United States Patent Application Publication US 2005/0244851 A1 - sequence listing, part 152

SEQ ID NO: 5934974 - DNA, 25 bp, Homo sapien
gttctccagagcgacgagatggaca

SEQ ID NO: 5934975 - DNA, 25 bp, Homo sapien
tctccatggcctgctcagctagccg

SEQ ID NO: 5934976 - DNA, 25 bp, Homo sapien
tggccgccaggtacatagacttcct

SEQ ID NO: 5934977 - DNA, 25 bp, Homo sapien
ggacaataagatgaccagctgcagc

SEQ ID NO: 5934978 - DNA, 25 bp, Homo sapien
tcccgtgactgtttcgaggaagcct

SEQ ID NO: 5934979 - DNA, 25 bp, Homo sapien
gagcgaagatggcagcccgaccccg

SEQ ID NO: 5934980 - DNA, 25 bp, Homo sapien
atactcctgttctttacgtctccat

SEQ ID NO: 5934981 - DNA, 25 bp, Homo sapien
tgccatccacctccggagccgcaag

SEQ ID NO: 5934982 - DNA, 25 bp, Homo sapien
gatgggcatcagccttcctgccagt

SEQ ID NO: 5934983 - DNA, 25 bp, Homo sapien
cactagcgccgcgccgtgccatcca

SEQ ID NO: 5934984 - DNA, 25 bp, Homo sapien
ggcacctggacaaccttgtggttcc

SEQ ID NO: 5934985 - DNA, 25 bp, Homo sapien
ctagcttcaggaatgcatttgtaag

SEQ ID NO: 5934986 - DNA, 25 bp, Homo sapien
gccttctccgtgtggcgcatggagg

SEQ ID NO: 5934987 - DNA, 25 bp, Homo sapien
tatatgttgcttatttgtttattta

SEQ ID NO: 5934988 - DNA, 25 bp, Homo sapien
gccgtgccatccacctccggagccg

SEQ ID NO: 5934989 - DNA, 25 bp, Homo sapien
cgtgtggcgcatggagggcgcgtgg

SEQ ID NO: 5934990 - DNA, 25 bp, Homo sapien
acatcctcctcagatacccagggga

SEQ ID NO: 5934991 - DNA, 25 bp, Homo sapien
agatggacaataagatgaccagctg

SEQ ID NO: 5934992 - DNA, 25 bp, Homo sapien
gaacctgtttaaactggaccaaggc

SEQ ID NO: 5934993 - DNA, 25 bp, Homo sapien
cccagacctcccgtgactgtttcga

SEQ ID NO: 5934994 - DNA, 25 bp, Homo sapien
ccaagcgcttcggccggaagcggcg

SEQ ID NO: 5934995 - DNA, 25 bp, Homo sapien
agatgaccagctgcagctacgtggc

SEQ ID NO: 5934996 - DNA, 25 bp, Homo sapien
aataagatgaccagctgcagctacg

SEQ ID NO: 5934997 - DNA, 25 bp, Homo sapien
aagtgtttggcaggggacagagacc

SEQ ID NO: 5934998 - DNA, 25 bp, Homo sapien
tcatctcctcactgttggattttcc

SEQ ID NO: 5934999 - DNA, 25 bp, Homo sapien
gtgaggaagagctggagaggcagcc

SEQ ID NO: 5935000 - DNA, 25 bp, Homo sapien
tggttcctcatgaccccagtgccca

SEQ ID NO: 5935001 - DNA, 25 bp, Homo sapien
gtacatagacttcctctaccaggtt

SEQ ID NO: 5935002 - DNA, 25 bp, Homo sapien
agcaagatccagacgctcaagctgg

SEQ ID NO: 5935003 - DNA, 25 bp, Homo sapien
aacgtgcgcgagcgccagcgcaccc

SEQ ID NO: 5935004 - DNA, 25 bp, Homo sapien
gtaaggatatatattggattgtatt

SEQ ID NO: 5935005 - DNA, 25 bp, Homo sapien
tttcggcacctggacaaccttgtgg

SEQ ID NO: 5935006 - DNA, 25 bp, Homo sapien
gccggaagcggcgctacagcaagaa

SEQ ID NO: 5935007 - DNA, 25 bp, Homo sapien
tccagagcgacgagatggacaataa

SEQ ID NO: 5935008 - DNA, 25 bp, Homo sapien
ccgaccccgggtaagcgcggcaaga

SEQ ID NO: 5935009 - DNA, 25 bp, Homo sapien
gagcgacgagatggacaataagatg

SEQ ID NO: 5935010 - DNA, 25 bp, Homo sapien
gcccaagcgcttcggccggaagcgg

SEQ ID NO: 5935011 - DNA, 25 bp, Homo sapien
aagccaggacccacctgcacatctc

SEQ ID NO: 5935012 - DNA, 25 bp, Homo sapien
ctgttctttacgtctccatggcctg

SEQ ID NO: 5935013 - DNA, 25 bp, Homo sapien
ttccctgtccagtgtatatgttgct

SEQ ID NO: 5935014 - DNA, 25 bp, Homo sapien
cagtgcccaagtgtttggcagggga

SEQ ID NO: 5935015 - DNA, 25 bp, Homo sapien
gagctggagaggcagcccaagcgct

SEQ ID NO: 5935016 - DNA, 25 bp, Homo sapien
aggttcacatcctcctcagataccc

SEQ ID NO: 5935017 - DNA, 25 bp, Homo sapien
cgtggacagtctgggcaccagtgag

SEQ ID NO: 5935018 - DNA, 25 bp, Homo sapien
tccatggcctgctcagctagccgtg

SEQ ID NO: 5935019 - DNA, 25 bp, Homo sapien
gccggtgtcccccgtggacagtctg

SEQ ID NO: 5935020 - DNA, 25 bp, Homo sapien
tgttggattttcctcctgggtttta

SEQ ID NO: 5935021 - DNA, 25 bp, Homo sapien
agatggcagcccgaccccgggtaag

SEQ ID NO: 5935022 - DNA, 25 bp, Homo sapien
gctggccgccaggtacatagacttc

SEQ ID NO: 5935023 - DNA, 25 bp, Homo sapien
tttcgaggagctgcagagccagcgc

SEQ ID NO: 5935024 - DNA, 25 bp, Homo sapien
gctcgccggtgtcccccgtggacag

SEQ ID NO: 5935025 - DNA, 25 bp, Homo sapien
ccgcgctgcgcaagatcatccccac

SEQ ID NO: 5935026 - DNA, 25 bp, Homo sapien
cgcggcaagaagggcagcccgagcg

SEQ ID NO: 5935027 - DNA, 25 bp, Homo sapien
atgtccgcctcccactagcgccgcg

SEQ ID NO: 5935028 - DNA, 25 bp, Homo sapien
tcccgccccagacctcccgtgactg

SEQ ID NO: 5935029 - DNA, 25 bp, Homo sapien
agctacgtggctcacgagcgtctca

SEQ ID NO: 5935030 - DNA, 25 bp, Homo sapien
cgccagcgcacccagtcgctcaacg

SEQ ID NO: 5935031 - DNA, 25 bp, Homo sapien
tgacttctgtgccctcatctcctca

SEQ ID NO: 5935032 - DNA, 25 bp, Homo sapien
tctgacaagctcagcaagatccaga

SEQ ID NO: 5935033 - DNA, 25 bp, Homo sapien
cttcaggaatgcatttgtaaggata

SEQ ID NO: 5935034 - DNA, 25 bp, Homo sapien
tctttacgtctccatggcctgctca

SEQ ID NO: 5935035 - DNA, 25 bp, Homo sapien
ccaacgtgcgcgagcgccagcgcac

SEQ ID NO: 5935036 - DNA, 25 bp, Homo sapien
cgcacccagtcgctcaacgaggcct

SEQ ID NO: 5935037 - DNA, 25 bp, Homo sapien
ccttcgccgcgctgcgcaagatcat

SEQ ID NO: 5935038 - DNA, 25 bp, Homo sapien
cctcctcagatacccaggggatggg

SEQ ID NO: 5935039 - DNA, 25 bp, Homo sapien
agctacgccttctccgtgtggcgca

SEQ ID NO: 5935040 - DNA, 25 bp, Homo sapien
cttgtggttcctcatgaccccagtg

SEQ ID NO: 5935041 - DNA, 25 bp, Homo sapien
tccagctcgccggtgtcccccgtgg

SEQ ID NO: 5935042 - DNA, 25 bp, Homo sapien
acgccttctccgtgtggcgcatgga

SEQ ID NO: 5935043 - DNA, 25 bp, Homo sapien
agcgccagcgcacccagtcgctcaa

SEQ ID NO: 5935044 - DNA, 25 bp, Homo sapien
cggaactggatgcggccacggctgt

SEQ ID NO: 5935045 - DNA, 25 bp, Homo sapien
ttcctctaccaggttctccagagcg

SEQ ID NO: 5935046 - DNA, 25 bp, Homo sapien
ctgtttaaactggaccaaggctctc

SEQ ID NO: 5935047 - DNA, 25 bp, Homo sapien
ctttctggaaagttctagcttcagg

SEQ ID NO: 5935048 - DNA, 25 bp, Homo sapien
gtggctcacgagcgtctcagctacg

SEQ ID NO: 5935049 - DNA, 25 bp, Homo sapien
gctaagtgactgccacgcggttgtg

SEQ ID NO: 5935050 - DNA, 25 bp, Homo sapien
cgggtaagcgcggcaagaagggcag

SEQ ID NO: 5935051 - DNA, 25 bp, Homo sapien
agagccagcgcatcctggccaacgt

SEQ ID NO: 5935052 - DNA, 25 bp, Homo sapien
ttcgaggaagcctggaattcttgcc

SEQ ID NO: 5935053 - DNA, 25 bp, Homo sapien
gaagcggcgctacagcaagaaatcg

SEQ ID NO: 5935054 - DNA, 25 bp, Homo sapien
cttctccgtgtggcgcatggagggc

SEQ ID NO: 5935055 - DNA, 25 bp, Homo sapien
gcctcccactagcgccgcgccgtgc

SEQ ID NO: 5935056 - DNA, 25 bp, Homo sapien
agacccaggttcacatcctcctcag

SEQ ID NO: 5935057 - DNA, 25 bp, Homo sapien
gctcagctagccgtgttttctattc

SEQ ID NO: 5935058 - DNA, 25 bp, Homo sapien
gcaccagtgaggaagagctggagag

SEQ ID NO: 5935059 - DNA, 25 bp, Homo sapien
ggcagcccaagcgcttcggccggaa

SEQ ID NO: 5935060 - DNA, 25 bp, Homo sapien
tttacgtctccatggcctgctcagc

SEQ ID NO: 5935061 - DNA, 25 bp, Homo sapien
tagtttgggggaatctttctggaaa

SEQ ID NO: 5935062 - DNA, 25 bp, Homo sapien
tattgagatattttaccagctaagt

SEQ ID NO: 5935063 - DNA, 25 bp, Homo sapien
cagctcgccggtgtcccccgtggac

SEQ ID NO: 5935064 - DNA, 25 bp, Homo sapien
tatttattgagatattttaccagct

SEQ ID NO: 5935065 - DNA, 25 bp, Homo sapien
atggagggcgcgtggtccatgtccg

SEQ ID NO: 5935066 - DNA, 25 bp, Homo sapien
tacgtctccatggcctgctcagcta

SEQ ID NO: 5935067 - DNA, 25 bp, Homo sapien
gcagagccagcgcatcctggccaac

SEQ ID NO: 5935068 - DNA, 25 bp, Homo sapien
cctcactgttggattttcctcctgg

SEQ ID NO: 5935069 - DNA, 25 bp, Homo sapien
gcatttgtaaggatatatattggat

SEQ ID NO: 5935070 - DNA, 25 bp, Homo sapien
tgccagtgacttctgtgccctcatc

SEQ ID NO: 5935071 - DNA, 25 bp, Homo sapien
gaagatggcagcccgaccccgggta

SEQ ID NO: 5935072 - DNA, 25 bp, Homo sapien
actttcggcacctggacaaccttgt

SEQ ID NO: 5935073 - DNA, 25 bp, Homo sapien
ttttaccagctaagtgactgccacg

SEQ ID NO: 5935074 - DNA, 25 bp, Homo sapien
catcagccttcctgccagtgacttc

SEQ ID NO: 5935075 - DNA, 25 bp, Homo sapien
gtgttttctattccctgtccagtgt

SEQ ID NO: 5935076 - DNA, 25 bp, Homo sapien
ctcagaacaagaacccaagatccct

SEQ ID NO: 5935077 - DNA, 25 bp, Homo sapien
acccacctgcacatctcaggcgcat

SEQ ID NO: 5935078 - DNA, 25 bp, Homo sapien
gccctcatctcctcactgttggatt

SEQ ID NO: 5935079 - DNA, 25 bp, Homo sapien
gtttggcaggggacagagacccagg

SEQ ID NO: 5935080 - DNA, 25 bp, Homo sapien
gtccatgtccgcctcccactagcgc

SEQ ID NO: 5935081 - DNA, 25 bp, Homo sapien
agagacccaggttcacatcctcctc

SEQ ID NO: 5935082 - DNA, 25 bp, Homo sapien
gccccagacctcccgtgactgtttc

SEQ ID NO: 5935083 - DNA, 25 bp, Homo sapien
tcaagctggccgccaggtacataga

SEQ ID NO: 5935084 - DNA, 25 bp, Homo sapien
agctagccgtgttttctattccctg

SEQ ID NO: 5935085 - DNA, 25 bp, Homo sapien
ccctgtccagtgtatatgttgctta

SEQ ID NO: 5935086 - DNA, 25 bp, Homo sapien
cagaacaagaacccaagatccctcc

SEQ ID NO: 5935087 - DNA, 25 bp, Homo sapien
gcacatctcaggcgcatgcggaact

SEQ ID NO: 5935088 - DNA, 25 bp, Homo sapien
cagacctcccgtgactgtttcgagg

SEQ ID NO: 5935089 - DNA, 25 bp, Homo sapien
tttattgagatattttaccagctaa

SEQ ID NO: 5935090 - DNA, 25 bp, Homo sapien
cagtcgctcaacgaggccttcgccg

SEQ ID NO: 5935091 - DNA, 25 bp, Homo sapien
gaacaagaacccaagatccctcccg

SEQ ID NO: 5935092 - DNA, 25 bp, Homo sapien
agggcgcgtggtccatgtccgcctc

SEQ ID NO: 5935093 - DNA, 25 bp, Homo sapien
tgggcatcagccttcctgccagtga

SEQ ID NO: 5935094 - DNA, 25 bp, Homo sapien
agcgccgcgccgtgccatccacctc

SEQ ID NO: 5935095 - DNA, 25 bp, Homo sapien
aaggctctcagaacaagaacccaag

SEQ ID NO: 5935096 - DNA, 25 bp, Homo sapien
agcgcggcaagaagggcagcccgag

SEQ ID NO: 5935097 - DNA, 25 bp, Homo sapien
acaataagatgaccagctgcagcta

SEQ ID NO: 5935098 - DNA, 25 bp, Homo sapien
catcctggccaacgtgcgcgagcgc

SEQ ID NO: 5935099 - DNA, 25 bp, Homo sapien
taaaacagaaatgcattcttgtaga

SEQ ID NO: 5935100 - DNA, 25 bp, Homo sapien
ctcccctctgacaagctcagcaaga

SEQ ID NO: 5935101 - DNA, 25 bp, Homo sapien
agacttcctctaccaggttctccag

SEQ ID NO: 5935102 - DNA, 25 bp, Homo sapien
taccaggttctccagagcgacgaga

SEQ ID NO: 5935103 - DNA, 25 bp, Homo sapien
caacgaggccttcgccgcgctgcgc

SEQ ID NO: 5935104 - DNA, 25 bp, Homo sapien
aagaagggcagcccgagcgcgcagt

SEQ ID NO: 5935105 - DNA, 25 bp, Homo sapien
ctctaagtgccttcttttaatgtat

SEQ ID NO: 5935106 - DNA, 25 bp, Homo sapien
acgaggccttcgccgcgctgcgcaa

SEQ ID NO: 5935107 - DNA, 25 bp, Homo sapien
aggaatgcatttgtaaggatatata

SEQ ID NO: 5935108 - DNA, 25 bp, Homo sapien
ttggcaggggacagagacccaggtt

SEQ ID NO: 5935109 - DNA, 25 bp, Homo sapien
ctgtgccctcatctcctcactgttg

SEQ ID NO: 5935110 - DNA, 25 bp, Homo sapien
atgcattcttgtagaacctgtttaa

SEQ ID NO: 5935111 - DNA, 25 bp, Homo sapien
gaactggatgcggccacggctgtga

SEQ ID NO: 5935112 - DNA, 25 bp, Homo sapien
agatccctcccgccccagacctccc

SEQ ID NO: 5935113 - DNA, 25 bp, Homo sapien
tcgagcgaagatggcagcccgaccc

SEQ ID NO: 5935114 - DNA, 25 bp, Homo sapien
cggcgctacagcaagaaatcgagcg

SEQ ID NO: 5935115 - DNA, 25 bp, Homo sapien
gaatctttctggaaagttctagctt

SEQ ID NO: 5935116 - DNA, 25 bp, Homo sapien
aggtacatagacttcctctaccagg

SEQ ID NO: 5935117 - DNA, 25 bp, Homo sapien
gaagcctggaattcttgcccgcata

SEQ ID NO: 5935118 - DNA, 25 bp, Homo sapien
ttgagatattttaccagctaagtga

SEQ ID NO: 5935119 - DNA, 25 bp, Homo sapien
ggtaagcgcggcaagaagggcagcc

SEQ ID NO: 5935120 - DNA, 25 bp, Homo sapien
agaacccaagatccctcccgcccca

SEQ ID NO: 5935121 - DNA, 25 bp, Homo sapien
cgagcgtctcagctacgccttctcc

SEQ ID NO: 5935122 - DNA, 25 bp, Homo sapien
catggcctgctcagctagccgtgtt

SEQ ID NO: 5935123 - DNA, 25 bp, Homo sapien
cagcccgaccccgggtaagcgcggc

SEQ ID NO: 5935124 - DNA, 25 bp, Homo sapien
catgcggaactggatgcggccacgg

SEQ ID NO: 5935125 - DNA, 25 bp, Homo sapien
cagagcgacgagatggacaataaga

SEQ ID NO: 5935126 - DNA, 25 bp, Homo sapien
tggatgcggccacggctgtgacttt

SEQ ID NO: 5935127 - DNA, 25 bp, Homo sapien
gtcgctcaacgaggccttcgccgcg

SEQ ID NO: 5935128 - DNA, 25 bp, Homo sapien
ccatccacctccggagccgcaagcc

SEQ ID NO: 5935129 - DNA, 25 bp, Homo sapien
gcagctacgtggctcacgagcgtct

SEQ ID NO: 5935130 - DNA, 25 bp, Homo sapien
ctgctcagctagccgtgttttctat

SEQ ID NO: 5935131 - DNA, 25 bp, Homo sapien
caggacccacctgcacatctcaggc

SEQ ID NO: 5935132 - DNA, 25 bp, Homo sapien
attcttgcccgcatactcctgttct

SEQ ID NO: 5935133 - DNA, 25 bp, Homo sapien
acagagacccaggttcacatcctcc

SEQ ID NO: 5935134 - DNA, 25 bp, Homo sapien
acagaaatgcattcttgtagaacct

SEQ ID NO: 5935135 - DNA, 25 bp, Homo sapien
ggcgcatgcggaactggatgcggcc

SEQ ID NO: 5935136 - DNA, 25 bp, Homo sapien
ggatatatattggattgtatttccc

SEQ ID NO: 5935137 - DNA, 25 bp, Homo sapien
tcagctagccgtgttttctattccc

SEQ ID NO: 5935138 - DNA, 25 bp, Homo sapien
gtgtttggcaggggacagagaccca

SEQ ID NO: 5935139 - DNA, 25 bp, Homo sapien
gctgcgcaagatcatccccacgctc

SEQ ID NO: 5935140 - DNA, 25 bp, Homo sapien
gatgcggccacggctgtgactttcg

SEQ ID NO: 5935141 - DNA, 25 bp, Homo sapien
tcacatcctcctcagatacccaggg

SEQ ID NO: 5935142 - DNA, 25 bp, Homo sapien
tggcgcatggagggcgcgtggtcca

SEQ ID NO: 5935143 - DNA, 25 bp, Homo sapien
gcgcttcggccggaagcggcgctac

SEQ ID NO: 5935144 - DNA, 25 bp, Homo sapien
cctgccagtgacttctgtgccctca

SEQ ID NO: 5935145 - DNA, 25 bp, Homo sapien
ttctgtgccctcatctcctcactgt

SEQ ID NO: 5935146 - DNA, 25 bp, Homo sapien
ggagggcgcgtggtccatgtccgcc

SEQ ID NO: 5935147 - DNA, 25 bp, Homo sapien
gacagtctgggcaccagtgaggaag

SEQ ID NO: 5935148 - DNA, 25 bp, Homo sapien
cgcgagcgccagcgcacccagtcgc

SEQ ID NO: 5935149 - DNA, 25 bp, Homo sapien
gccacggctgtgactttcggcacct

SEQ ID NO: 5935150 - DNA, 25 bp, Homo sapien
caggggacagagacccaggttcaca

SEQ ID NO: 5935151 - DNA, 25 bp, Homo sapien
agccagcgcatcctggccaacgtgc

SEQ ID NO: 5935152 - DNA, 25 bp, Homo sapien
ctagccgtgttttctattccctgtc

SEQ ID NO: 5935153 - DNA, 25 bp, Homo sapien
taagcgcggcaagaagggcagcccg

SEQ ID NO: 5935154 - DNA, 25 bp, Homo sapien
gcgctcgcgcacgttggccaggatg

SEQ ID NO: 5935155 - DNA, 25 bp, Homo sapien
tgagcgtctggatcttgctgagctt

SEQ ID NO: 5935156 - DNA, 25 bp, Homo sapien
aggaaggctgatgcccatcccctgg

SEQ ID NO: 5935157 - DNA, 25 bp, Homo sapien
ggggatgatcttgcgcagcgcggcg

SEQ ID NO: 5935158 - DNA, 25 bp, Homo sapien
aggggagcgtggggatgatcttgcg

SEQ ID NO: 5935159 - DNA, 25 bp, Homo sapien
gggaatagaaaacacggctagctga

SEQ ID NO: 5935160 - DNA, 25 bp, Homo sapien
cagaagtcactggcaggaaggctga

SEQ ID NO: 5935161 - DNA, 25 bp, Homo sapien
aacacggctagctgagcaggccatg

SEQ ID NO: 5935162 - DNA, 25 bp, Homo sapien
taagcaacatatacactggacaggg

SEQ ID NO: 5935163 - DNA, 25 bp, Homo sapien
aatatatatccttacaaatgcattc

SEQ ID NO: 5935164 - DNA, 25 bp, Homo sapien
agcgcggcgaaggcctcgttgagcg

SEQ ID NO: 5935165 - DNA, 25 bp, Homo sapien
tctatgtacctggcggccagcttga

SEQ ID NO: 5935166 - DNA, 25 bp, Homo sapien
agcttgtcagaggggagcgtgggga

SEQ ID NO: 5935167 - DNA, 25 bp, Homo sapien
gcttcctcgaaacagtcacgggagg

SEQ ID NO: 5935168 - DNA, 25 bp, Homo sapien
gatgcccatcccctgggtatctgag

SEQ ID NO: 5935169 - DNA, 25 bp, Homo sapien
cggggtcgggctgccatcttcgctc

SEQ ID NO: 5935170 - DNA, 25 bp, Homo sapien
ttccggccgaagcgcttgggctgcc

SEQ ID NO: 5935171 - DNA, 25 bp, Homo sapien
cacttgggcactggggtcatgagga

SEQ ID NO: 5935172 - DNA, 25 bp, Homo sapien
tcctggcttgcggctccggaggtgg

SEQ ID NO: 5935173 - DNA, 25 bp, Homo sapien
gaggaaaatccaacagtgaggagat

SEQ ID NO: 5935174 - DNA, 25 bp, Homo sapien
ttagctggtaaaatatctcaataaa

SEQ ID NO: 5935175 - DNA, 25 bp, Homo sapien
agacgctcgtgagccacgtagctgc

SEQ ID NO: 5935176 - DNA, 25 bp, Homo sapien
ttctgagagccttggtccagtttaa

SEQ ID NO: 5935177 - DNA, 25 bp, Homo sapien
ctgggtgcgctggcgctcgcgcacg

SEQ ID NO: 5935178 - DNA, 25 bp, Homo sapien
gcatccagttccgcatgcgcctgag

SEQ ID NO: 5935179 - DNA, 25 bp, Homo sapien
gctctgcagctcctcgaaagactgc

SEQ ID NO: 5935180 - DNA, 25 bp, Homo sapien
taaaagaaggcacttagagggaaat

SEQ ID NO: 5935181 - DNA, 25 bp, Homo sapien
gacagggaatagaaaacacggctag

SEQ ID NO: 5935182 - DNA, 25 bp, Homo sapien
gccctccatgcgccacacggagaag

SEQ ID NO: 5935183 - DNA, 25 bp, Homo sapien
cacagaagtcactggcaggaaggct

SEQ ID NO: 5935184 - DNA, 25 bp, Homo sapien
aataagcaacatatacactggacag

SEQ ID NO: 5935185 - DNA, 25 bp, Homo sapien
gctgcagctggtcatcttattgtcc

SEQ ID NO: 5935186 - DNA, 25 bp, Homo sapien
gggtatctgaggaggatgtgaacct

SEQ ID NO: 5935187 - DNA, 25 bp, Homo sapien
cggctccggaggtggatggcacggc

SEQ ID NO: 5935188 - DNA, 25 bp, Homo sapien
ggcacttagagggaaatacaatcca

SEQ ID NO: 5935189 - DNA, 25 bp, Homo sapien
agcgccgcttccggccgaagcgctt

SEQ ID NO: 5935190 - DNA, 25 bp, Homo sapien
tccatgcgccacacggagaaggcgt

SEQ ID NO: 5935191 - DNA, 25 bp, Homo sapien
gcgcagcgcggcgaaggcctcgttg

SEQ ID NO: 5935192 - DNA, 25 bp, Homo sapien
tgcccagactgtccacgggggacac

SEQ ID NO: 5935193 - DNA, 25 bp, Homo sapien
acgggggacaccggcgagctggagc

SEQ ID NO: 5935194 - DNA, 25 bp, Homo sapien
ctgcctctccagctcttcctcactg

SEQ ID NO: 5935195 - DNA, 25 bp, Homo sapien
ctcactggtgcccagactgtccacg

SEQ ID NO: 5935196 - DNA, 25 bp, Homo sapien
cacaaccgcgtggcagtcacttagc

SEQ ID NO: 5935197 - DNA, 25 bp, Homo sapien
agaacctggtagaggaagtctatgt

SEQ ID NO: 5935198 - DNA, 25 bp, Homo sapien
gagcgactgggtgcgctggcgctcg

SEQ ID NO: 5935199 - DNA, 25 bp, Homo sapien
ggcgtagctgagacgctcgtgagcc

SEQ ID NO: 5935200 - DNA, 25 bp, Homo sapien
gtcgctctggagaacctggtagagg

SEQ ID NO: 5935201 - DNA, 25 bp, Homo sapien
tctcgtcgctctggagaacctggta

SEQ ID NO: 5935202 - DNA, 25 bp, Homo sapien
ctggtgcccagactgtccacggggg

SEQ ID NO: 5935203 - DNA, 25 bp, Homo sapien
aaaatccaacagtgaggagatgagg

SEQ ID NO: 5935204 - DNA, 25 bp, Homo sapien
gaagcgcttgggctgcctctccagc

SEQ ID NO: 5935205 - DNA, 25 bp, Homo sapien
acacggagaaggcgtagctgagacg

SEQ ID NO: 5935206 - DNA, 25 bp, Homo sapien
aggctgatgcccatcccctgggtat

SEQ ID NO: 5935207 - DNA, 25 bp, Homo sapien
gttggccaggatgcgctggctctgc

SEQ ID NO: 5935208 - DNA, 25 bp, Homo sapien
ttcttgttctgagagccttggtcca

SEQ ID NO: 5935209 - DNA, 25 bp, Homo sapien
atatacattaaaagaaggcacttag

SEQ ID NO: 5935210 - DNA, 25 bp, Homo sapien
cccagactgtccacgggggacaccg

SEQ ID NO: 5935211 - DNA, 25 bp, Homo sapien
tggatggcacggcgcggcgctagtg

SEQ ID NO: 5935212 - DNA, 25 bp, Homo sapien
tccagaaagattcccccaaactaaa

SEQ ID NO: 5935213 - DNA, 25 bp, Homo sapien
gctcgcgcacgttggccaggatgcg

SEQ ID NO: 5935214 - DNA, 25 bp, Homo sapien
aatacaatccaatatatatccttac

SEQ ID NO: 5935215 - DNA, 25 bp, Homo sapien
tagagggaaatacaatccaatatat

SEQ ID NO: 5935216 - DNA, 25 bp, Homo sapien
agaggaagtctatgtacctggcggc

SEQ ID NO: 5935217 - DNA, 25 bp, Homo sapien
ggctgcctctccagctcttcctcac

SEQ ID NO: 5935218 - DNA, 25 bp, Homo sapien
ttgccgcgcttacccggggtcgggc

SEQ ID NO: 5935219 - DNA, 25 bp, Homo sapien
cgctctggagaacctggtagaggaa

SEQ ID NO: 5935220 - DNA, 25 bp, Homo sapien
agacgtaaagaacaggagtatgcgg

SEQ ID NO: 5935221 - DNA, 25 bp, Homo sapien
tacccggggtcgggctgccatcttc

SEQ ID NO: 5935222 - DNA, 25 bp, Homo sapien
taaataaacaaataagcaacatata

SEQ ID NO: 5935223 - DNA, 25 bp, Homo sapien
ttcctgaagctagaactttccagaa

SEQ ID NO: 5935224 - DNA, 25 bp, Homo sapien
tcttattgtccatctcgtcgctctg

SEQ ID NO: 5935225 - DNA, 25 bp, Homo sapien
cacggctagctgagcaggccatgga

SEQ ID NO: 5935226 - DNA, 25 bp, Homo sapien
acgttggccaggatgcgctggctct

SEQ ID NO: 5935227 - DNA, 25 bp, Homo sapien
tgagggcacagaagtcactggcagg

SEQ ID NO: 5935228 - DNA, 25 bp, Homo sapien
caaatgcattcctgaagctagaact

SEQ ID NO: 5935229 - DNA, 25 bp, Homo sapien
cggaggtggatggcacggcgcggcg

SEQ ID NO: 5935230 - DNA, 25 bp, Homo sapien
gaaggcctcgttgagcgactgggtg

SEQ ID NO: 5935231 - DNA, 25 bp, Homo sapien
tacaaatgcattcctgaagctagaa

SEQ ID NO: 5935232 - DNA, 25 bp, Homo sapien
acaaggttgtccaggtgccgaaagt

SEQ ID NO: 5935233 - DNA, 25 bp, Homo sapien
ccacgcgccctccatgcgccacacg

SEQ ID NO: 5935234 - DNA, 25 bp, Homo sapien
caggtgggtcctggcttgcggctcc

SEQ ID NO: 5935235 - DNA, 25 bp, Homo sapien
tctctgtcccctgccaaacacttgg

SEQ ID NO: 5935236 - DNA, 25 bp, Homo sapien
ccaggtgccgaaagtcacagccgtg

SEQ ID NO: 5935237 - DNA, 25 bp, Homo sapien
ggtcctggcttgcggctccggaggt

SEQ ID NO: 5935238 - DNA, 25 bp, Homo sapien
ccgcatgcgcctgagatgtgcaggt

SEQ ID NO: 5935239 - DNA, 25 bp, Homo sapien
tgcattcctgaagctagaactttcc

SEQ ID NO: 5935240 - DNA, 25 bp, Homo sapien
atcttgggttcttgttctgagagcc

SEQ ID NO: 5935241 - DNA, 25 bp, Homo sapien
tgtacctggcggccagcttgagcgt

SEQ ID NO: 5935242 - DNA, 25 bp, Homo sapien
gggggacaccggcgagctggagccc

SEQ ID NO: 5935243 - DNA, 25 bp, Homo sapien
aagctagaactttccagaaagattc

SEQ ID NO: 5935244 - DNA, 25 bp, Homo sapien
gctgagcttgtcagaggggagcgtg

SEQ ID NO: 5935245 - DNA, 25 bp, Homo sapien
gaccacgcgccctccatgcgccaca

SEQ ID NO: 5935246 - DNA, 25 bp, Homo sapien
ttaaaaatatacattaaaagaaggc

SEQ ID NO: 5935247 - DNA, 25 bp, Homo sapien
gcgctggcgctcgcgcacgttggcc

SEQ ID NO: 5935248 - DNA, 25 bp, Homo sapien
ttaaacaggttctacaagaatgcat

SEQ ID NO: 5935249 - DNA, 25 bp, Homo sapien
ctgccaaacacttgggcactggggt

SEQ ID NO: 5935250 - DNA, 25 bp, Homo sapien
gtggccgcatccagttccgcatgcg

SEQ ID NO: 5935251 - DNA, 25 bp, Homo sapien
gagccttggtccagtttaaacaggt

SEQ ID NO: 5935252 - DNA, 25 bp, Homo sapien
ttccgcatgcgcctgagatgtgcag

SEQ ID NO: 5935253 - DNA, 25 bp, Homo sapien
caaacacttgggcactggggtcatg

SEQ ID NO: 5935254 - DNA, 25 bp, Homo sapien
agctggtaaaatatctcaataaata

SEQ ID NO: 5935255 - DNA, 25 bp, Homo sapien
gatcttgctgagcttgtcagagggg

SEQ ID NO: 5935256 - DNA, 25 bp, Homo sapien
tgggcactggggtcatgaggaacca

SEQ ID NO: 5935257 - DNA, 25 bp, Homo sapien
ggaggatgtgaacctgggtctctgt

SEQ ID NO: 5935258 - DNA, 25 bp, Homo sapien
ccgcttccggccgaagcgcttgggc

SEQ ID NO: 5935259 - DNA, 25 bp, Homo sapien
tcctcactggtgcccagactgtcca

SEQ ID NO: 5935260 - DNA, 25 bp, Homo sapien
caacagtgaggagatgagggcacag

SEQ ID NO: 5935261 - DNA, 25 bp, Homo sapien
taaaacccaggaggaaaatccaaca

SEQ ID NO: 5935262 - DNA, 25 bp, Homo sapien
tcttgctgagcttgtcagaggggag

SEQ ID NO: 5935263 - DNA, 25 bp, Homo sapien
ttccaggcttcctcgaaacagtcac

SEQ ID NO: 5935264 - DNA, 25 bp, Homo sapien
gcagcgcggcgaaggcctcgttgag

SEQ ID NO: 5935265 - DNA, 25 bp, Homo sapien
caacatatacactggacagggaata

SEQ ID NO: 5935266 - DNA, 25 bp, Homo sapien
catgcgccacacggagaaggcgtag

SEQ ID NO: 5935267 - DNA, 25 bp, Homo sapien
cgaaagtcacagccgtggccgcatc

SEQ ID NO: 5935268 - DNA, 25 bp, Homo sapien
gcctgagatgtgcaggtgggtcctg

SEQ ID NO: 5935269 - DNA, 25 bp, Homo sapien
ggcacagaagtcactggcaggaagg

SEQ ID NO: 5935270 - DNA, 25 bp, Homo sapien
gctgatgcccatcccctgggtatct

SEQ ID NO: 5935271 - DNA, 25 bp, Homo sapien
ttgctgagcttgtcagaggggagcg

SEQ ID NO: 5935272 - DNA, 25 bp, Homo sapien
cgcggcgctagtgggaggcggacat

SEQ ID NO: 5935273 - DNA, 25 bp, Homo sapien
ggcgcggcgctagtgggaggcggac

SEQ ID NO: 5935274 - DNA, 25 bp, Homo sapien
atacactggacagggaatagaaaac

SEQ ID NO: 5935275 - DNA, 25 bp, Homo sapien
aacctggtagaggaagtctatgtac

SEQ ID NO: 5935276 - DNA, 25 bp, Homo sapien
ccagttccgcatgcgcctgagatgt

SEQ ID NO: 5935277 - DNA, 25 bp, Homo sapien
atctgaggaggatgtgaacctgggt

SEQ ID NO: 5935278 - DNA, 25 bp, Homo sapien
cgccacacggagaaggcgtagctga

SEQ ID NO: 5935279 - DNA, 25 bp, Homo sapien
gccaaacacttgggcactggggtca

SEQ ID NO: 5935280 - DNA, 25 bp, Homo sapien
gccgcgcttacccggggtcgggctg

SEQ ID NO: 5935281 - DNA, 25 bp, Homo sapien
gaggcggacatggaccacgcgccct

SEQ ID NO: 5935282 - DNA, 25 bp, Homo sapien
aatgcattcctgaagctagaacttt

SEQ ID NO: 5935283 - DNA, 25 bp, Homo sapien
gccaggatgcgctggctctgcagct

SEQ ID NO: 5935284 - DNA, 25 bp, Homo sapien
actgcgcgctcgggctgcccttctt

SEQ ID NO: 5935285 - DNA, 25 bp, Homo sapien
tctggatcttgctgagcttgtcaga

SEQ ID NO: 5935286 - DNA, 25 bp, Homo sapien
acggagaaggcgtagctgagacgct

SEQ ID NO: 5935287 - DNA, 25 bp, Homo sapien
cggcgaaggcctcgttgagcgactg

SEQ ID NO: 5935288 - DNA, 25 bp, Homo sapien
gtggggatgatcttgcgcagcgcgg

SEQ ID NO: 5935289 - DNA, 25 bp, Homo sapien
cagtttaaacaggttctacaagaat

SEQ ID NO: 5935290 - DNA, 25 bp, Homo sapien
tgcaggtgggtcctggcttgcggct

SEQ ID NO: 5935291 - DNA, 25 bp, Homo sapien
gctcgtgagccacgtagctgcagct

SEQ ID NO: 5935292 - DNA, 25 bp, Homo sapien
cgcttacccggggtcgggctgccat

SEQ ID NO: 5935293 - DNA, 25 bp, Homo sapien
cttgctgtagcgccgcttccggccg

SEQ ID NO: 5935294 - DNA, 25 bp, Homo sapien
acgcgccctccatgcgccacacgga

SEQ ID NO: 5935295 - DNA, 25 bp, Homo sapien
aaaaatatacattaaaagaaggcac

SEQ ID NO: 5935296 - DNA, 25 bp, Homo sapien
agaaggcacttagagggaaatacaa

SEQ ID NO: 5935297 - DNA, 25 bp, Homo sapien
aaagaacaggagtatgcgggcaaga

SEQ ID NO: 5935298 - DNA, 25 bp, Homo sapien
ccacaaggttgtccaggtgccgaaa

SEQ ID NO: 5935299 - DNA, 25 bp, Homo sapien
ggtccagtttaaacaggttctacaa

SEQ ID NO: 5935300 - DNA, 25 bp, Homo sapien
tcgtcgctctggagaacctggtaga

SEQ ID NO: 5935301 - DNA, 25 bp, Homo sapien
agtctatgtacctggcggccagctt

SEQ ID NO: 5935302 - DNA, 25 bp, Homo sapien
tggatcttgctgagcttgtcagagg

SEQ ID NO: 5935303 - DNA, 25 bp, Homo sapien
tgtgcaggtgggtcctggcttgcgg

SEQ ID NO: 5935304 - DNA, 25 bp, Homo sapien
tttccagaaagattcccccaaacta

SEQ ID NO: 5935305 - DNA, 25 bp, Homo sapien
gtgggaggcggacatggaccacgcg

SEQ ID NO: 5935306 - DNA, 25 bp, Homo sapien
ccctgccaaacacttgggcactggg

SEQ ID NO: 5935307 - DNA, 25 bp, Homo sapien
ggagtatgcgggcaagaattccagg

SEQ ID NO: 5935308 - DNA, 25 bp, Homo sapien
tggcagtcacttagctggtaaaata

SEQ ID NO: 5935309 - DNA, 25 bp, Homo sapien
tgtcagaggggagcgtggggatgat

SEQ ID NO: 5935310 - DNA, 25 bp, Homo sapien
gacaccggcgagctggagccctcct

SEQ ID NO: 5935311 - DNA, 25 bp, Homo sapien
gaaacagtcacgggaggtctggggc

SEQ ID NO: 5935312 - DNA, 25 bp, Homo sapien
gtgagccacgtagctgcagctggtc

SEQ ID NO: 5935313 - DNA, 25 bp, Homo sapien
cttgagcgtctggatcttgctgagc

SEQ ID NO: 5935314 - DNA, 25 bp, Homo sapien
gctgagacgctcgtgagccacgtag

SEQ ID NO: 5935315 - DNA, 25 bp, Homo sapien
gactgtccacgggggacaccggcga

SEQ ID NO: 5935316 - DNA, 25 bp, Homo sapien
tgagacgctcgtgagccacgtagct

SEQ ID NO: 5935317 - DNA, 25 bp, Homo sapien
ggccagcttgagcgtctggatcttg

SEQ ID NO: 5935318 - DNA, 25 bp, Homo sapien
tgtgaacctgggtctctgtcccctg

SEQ ID NO: 5935319 - DNA, 25 bp, Homo sapien
tgaacctgggtctctgtcccctgcc

SEQ ID NO: 5935320 - DNA, 25 bp, Homo sapien
tcccctgggtatctgaggaggatgt

SEQ ID NO: 5935321 - DNA, 25 bp, Homo sapien
tcacagccgtggccgcatccagttc

SEQ ID NO: 5935322 - DNA, 25 bp, Homo sapien
actggcaggaaggctgatgcccatc

SEQ ID NO: 5935323 - DNA, 25 bp, Homo sapien
tcttgccgcgcttacccggggtcgg

SEQ ID NO: 5935324 - DNA, 25 bp, Homo sapien
ctgggtatctgaggaggatgtgaac

SEQ ID NO: 5935325 - DNA, 25 bp, Homo sapien
ggatgcgctggctctgcagctcctc

SEQ ID NO: 5935326 - DNA, 25 bp, Homo sapien
cttgttctgagagccttggtccagt

SEQ ID NO: 5935327 - DNA, 25 bp, Homo sapien
tggcaggaaggctgatgcccatccc

SEQ ID NO: 5935328 - DNA, 25 bp, Homo sapien
tgggttcttgttctgagagccttgg

SEQ ID NO: 5935329 - DNA, 25 bp, Homo sapien
tatatatccttacaaatgcattcct

SEQ ID NO: 5935330 - DNA, 25 bp, Homo sapien
gcgaaggcctcgttgagcgactggg

SEQ ID NO: 5935331 - DNA, 25 bp, Homo sapien
gctagaactttccagaaagattccc

SEQ ID NO: 5935332 - DNA, 25 bp, Homo sapien
ccctgggtatctgaggaggatgtga

SEQ ID NO: 5935333 - DNA, 25 bp, Homo sapien
aaagtcacagccgtggccgcatcca

SEQ ID NO: 5935334 - DNA, 25 bp, Homo sapien
agtgaggagatgagggcacagaagt

SEQ ID NO: 5935335 - DNA, 25 bp, Homo sapien
atccaatatatatccttacaaatgc

SEQ ID NO: 5935336 - DNA, 25 bp, Homo sapien
aattccaggcttcctcgaaacagtc

SEQ ID NO: 5935337 - DNA, 25 bp, Homo sapien
ggctgccatcttcgctcgatttctt

SEQ ID NO: 5935338 - DNA, 25 bp, Homo sapien
gggacaccggcgagctggagccctc

SEQ ID NO: 5935339 - DNA, 25 bp, Homo sapien
cactggtgcccagactgtccacggg

SEQ ID NO: 5935340 - DNA, 25 bp, Homo sapien
agcgtctggatcttgctgagcttgt

SEQ ID NO: 5935341 - DNA, 25 bp, Homo sapien
cacgtagctgcagctggtcatctta

SEQ ID NO: 5935342 - DNA, 25 bp, Homo sapien
gagatgagggcacagaagtcactgg

SEQ ID NO: 5935343 - DNA, 25 bp, Homo sapien
ctcgggctgcccttcttgccgcgct

SEQ ID NO: 5935344 - DNA, 25 bp, Homo sapien
agtcacttagctggtaaaatatctc

SEQ ID NO: 5935345 - DNA, 25 bp, Homo sapien
agggatcttgggttcttgttctgag

SEQ ID NO: 5935346 - DNA, 25 bp, Homo sapien
gtccacgggggacaccggcgagctg

SEQ ID NO: 5935347 - DNA, 25 bp, Homo sapien
tgggtctctgtcccctgccaaacac

SEQ ID NO: 5935348 - DNA, 25 bp, Homo sapien
ctggggtcatgaggaaccacaaggt

SEQ ID NO: 5935349 - DNA, 25 bp, Homo sapien
cctgaagctagaactttccagaaag

SEQ ID NO: 5935350 - DNA, 25 bp, Homo sapien
tcacttagctggtaaaatatctcaa

SEQ ID NO: 5935351 - DNA, 25 bp, Homo sapien
cttcctcactggtgcccagactgtc

SEQ ID NO: 5935352 - DNA, 25 bp, Homo sapien
tcagaggggagcgtggggatgatct

SEQ ID NO: 5935353 - DNA, 25 bp, Homo sapien
tcgaaacagtcacgggaggtctggg

SEQ ID NO: 5935354 - DNA, 25 bp, Homo sapien
gctcctcgaaagactgcgcgctcgg

SEQ ID NO: 5935355 - DNA, 25 bp, Homo sapien
gggaaatacaatccaatatatatcc

SEQ ID NO: 5935356 - DNA, 25 bp, Homo sapien
cacttagagggaaatacaatccaat

SEQ ID NO: 5935357 - DNA, 25 bp, Homo sapien
ggagggatcttgggttcttgttctg

SEQ ID NO: 5935358 - DNA, 25 bp, Homo sapien
aggatgtgaacctgggtctctgtcc

SEQ ID NO: 5935359 - DNA, 25 bp, Homo sapien
gctggcgctcgcgcacgttggccag

SEQ ID NO: 5935360 - DNA, 25 bp, Homo sapien
ggtcatgaggaaccacaaggttgtc

SEQ ID NO: 5935361 - DNA, 25 bp, Homo sapien
gcgactgggtgcgctggcgctcgcg

SEQ ID NO: 5935362 - DNA, 25 bp, Homo sapien
ttcttgctgtagcgccgcttccggc

SEQ ID NO: 5935363 - DNA, 25 bp, Homo sapien
ccaggcttcctcgaaacagtcacgg

SEQ ID NO: 5935364 - DNA, 25 bp, Homo sapien
tgagcaggccatggagacgtaaaga

SEQ ID NO: 5935365 - DNA, 25 bp, Homo sapien
cttgtcagaggggagcgtggggatg

SEQ ID NO: 5935366 - DNA, 25 bp, Homo sapien
tctacaagaatgcatttctgtttta

SEQ ID NO: 5935367 - DNA, 25 bp, Homo sapien
cttgggttcttgttctgagagcctt

SEQ ID NO: 5935368 - DNA, 25 bp, Homo sapien
accgcgtggcagtcacttagctggt

SEQ ID NO: 5935369 - DNA, 25 bp, Homo sapien
agtcacagccgtggccgcatccagt

SEQ ID NO: 5935370 - DNA, 25 bp, Homo sapien
tggcggccagcttgagcgtctggat

SEQ ID NO: 5935371 - DNA, 25 bp, Homo sapien
gatgagggcacagaagtcactggca

SEQ ID NO: 5935372 - DNA, 25 bp, Homo sapien
cgatttcttgctgtagcgccgcttc

SEQ ID NO: 5935373 - DNA, 25 bp, Homo sapien
cgtggcagtcacttagctggtaaaa

SEQ ID NO: 5935374 - DNA, 25 bp, Homo sapien
tcccctgccaaacacttgggcactg

SEQ ID NO: 5935375 - DNA, 25 bp, Homo sapien
acggcgcggcgctagtgggaggcgg

SEQ ID NO: 5935376 - DNA, 25 bp, Homo sapien
cgggctgccatcttcgctcgatttc

SEQ ID NO: 5935377 - DNA, 25 bp, Homo sapien
tcgcgcacgttggccaggatgcgct

SEQ ID NO: 5935378 - DNA, 25 bp, Homo sapien
ccgtggccgcatccagttccgcatg

SEQ ID NO: 5935379 - DNA, 25 bp, Homo sapien
cgtctggatcttgctgagcttgtca

SEQ ID NO: 5935380 - DNA, 25 bp, Homo sapien
tggcacggcgcggcgctagtgggag

SEQ ID NO: 5935381 - DNA, 25 bp, Homo sapien
gagccacgtagctgcagctggtcat

SEQ ID NO: 5935382 - DNA, 25 bp, Homo sapien
ctgtccacgggggacaccggcgagc

SEQ ID NO: 5935383 - DNA, 25 bp, Homo sapien
attaaaagaaggcacttagagggaa

SEQ ID NO: 5935384 - DNA, 25 bp, Homo sapien
cactggggtcatgaggaaccacaag

SEQ ID NO: 5935385 - DNA, 25 bp, Homo sapien
aggtgccgaaagtcacagccgtggc

SEQ ID NO: 5935386 - DNA, 25 bp, Homo sapien
ctggtaaaatatctcaataaataaa

SEQ ID NO: 5935387 - DNA, 25 bp, Homo sapien
aaccacaaggttgtccaggtgccga

SEQ ID NO: 5935388 - DNA, 25 bp, Homo sapien
cattcctgaagctagaactttccag

SEQ ID NO: 5935389 - DNA, 25 bp, Homo sapien
tgaagctagaactttccagaaagat

SEQ ID NO: 5935390 - DNA, 25 bp, Homo sapien
ccgcatccagttccgcatgcgcctg

SEQ ID NO: 5935391 - DNA, 25 bp, Homo sapien
caaccgcgtggcagtcacttagctg

SEQ ID NO: 5935392 - DNA, 25 bp, Homo sapien
cgcgctcgggctgcccttcttgccg

SEQ ID NO: 5935393 - DNA, 25 bp, Homo sapien
atggagacgtaaagaacaggagtat

SEQ ID NO: 5935394 - DNA, 25 bp, Homo sapien
aacaggagtatgcgggcaagaattc

SEQ ID NO: 5935395 - DNA, 25 bp, Homo sapien
caagaattccaggcttcctcgaaac

SEQ ID NO: 5935396 - DNA, 25 bp, Homo sapien
gaggaggatgtgaacctgggtctct

SEQ ID NO: 5935397 - DNA, 25 bp, Homo sapien
aaggcacttagagggaaatacaatc

SEQ ID NO: 5935398 - DNA, 25 bp, Homo sapien
tggaccacgcgccctccatgcgcca

SEQ ID NO: 5935399 - DNA, 25 bp, Homo sapien
tagctgcagctggtcatcttattgt

SEQ ID NO: 5935400 - DNA, 25 bp, Homo sapien
ggagacgtaaagaacaggagtatgc

SEQ ID NO: 5935401 - DNA, 25 bp, Homo sapien
tccttacaaatgcattcctgaagct

SEQ ID NO: 5935402 - DNA, 25 bp, Homo sapien
ctggcttgcggctccggaggtggat

SEQ ID NO: 5935403 - DNA, 25 bp, Homo sapien
cctggtagaggaagtctatgtacct

SEQ ID NO: 5935404 - DNA, 25 bp, Homo sapien
ggggtcatgaggaaccacaaggttg

SEQ ID NO: 5935405 - DNA, 25 bp, Homo sapien
attgtccatctcgtcgctctggaga

SEQ ID NO: 5935406 - DNA, 25 bp, Homo sapien
cagggaatagaaaacacggctagct

SEQ ID NO: 5935407 - DNA, 25 bp, Homo sapien
cgttgagcgactgggtgcgctggcg

SEQ ID NO: 5935408 - DNA, 25 bp, Homo sapien
aaatatacattaaaagaaggcactt

SEQ ID NO: 5935409 - DNA, 25 bp, Homo sapien
ggaaaatccaacagtgaggagatga

SEQ ID NO: 5935410 - DNA, 25 bp, Homo sapien
acttagctggtaaaatatctcaata

SEQ ID NO: 5935411 - DNA, 25 bp, Homo sapien
gggagcgtggggatgatcttgcgca

SEQ ID NO: 5935412 - DNA, 25 bp, Homo sapien
cggctagctgagcaggccatggaga

SEQ ID NO: 5935413 - DNA, 25 bp, Homo sapien
ttcgctcgatttcttgctgtagcgc

SEQ ID NO: 5935414 - DNA, 25 bp, Homo sapien
ttgagcgactgggtgcgctggcgct

SEQ ID NO: 5935415 - DNA, 25 bp, Homo sapien
gtatctgaggaggatgtgaacctgg

SEQ ID NO: 5935416 - DNA, 25 bp, Homo sapien
tgcgggcaagaattccaggcttcct

SEQ ID NO: 5935417 - DNA, 25 bp, Homo sapien
tacctggcggccagcttgagcgtct

SEQ ID NO: 5935418 - DNA, 25 bp, Homo sapien
gcacggcgcggcgctagtgggaggc

SEQ ID NO: 5935419 - DNA, 25 bp, Homo sapien
agttccgcatgcgcctgagatgtgc

SEQ ID NO: 5935420 - DNA, 25 bp, Homo sapien
ggccatggagacgtaaagaacagga

SEQ ID NO: 5935421 - DNA, 25 bp, Homo sapien
tgctgtagcgccgcttccggccgaa

SEQ ID NO: 5935422 - DNA, 25 bp, Homo sapien
cgggcaagaattccaggcttcctcg

SEQ ID NO: 5935423 - DNA, 25 bp, Homo sapien
ggcttgcggctccggaggtggatgg

SEQ ID NO: 5935424 - DNA, 25 bp, Homo sapien
ctgcccttcttgccgcgcttacccg

SEQ ID NO: 5935425 - DNA, 25 bp, Homo sapien
gaactttccagaaagattcccccaa

SEQ ID NO: 5935426 - DNA, 25 bp, Homo sapien
agaacaggagtatgcgggcaagaat

SEQ ID NO: 5935427 - DNA, 25 bp, Homo sapien
atacattaaaagaaggcacttagag

SEQ ID NO: 5935428 - DNA, 25 bp, Homo sapien
agcgcttgggctgcctctccagctc

SEQ ID NO: 5935429 - DNA, 25 bp, Homo sapien
atttcttgctgtagcgccgcttccg

SEQ ID NO: 5935430 - DNA, 25 bp, Homo sapien
gatgtgaacctgggtctctgtcccc

SEQ ID NO: 5935431 - DNA, 25 bp, Homo sapien
gccatcttcgctcgatttcttgctg

SEQ ID NO: 5935432 - DNA, 25 bp, Homo sapien
ttgtccaggtgccgaaagtcacagc

SEQ ID NO: 5935433 - DNA, 25 bp, Homo sapien
tggacagggaatagaaaacacggct

SEQ ID NO: 5935434 - DNA, 25 bp, Homo sapien
tgcagctggtcatcttattgtccat

SEQ ID NO: 5935435 - DNA, 25 bp, Homo sapien
cgaaagactgcgcgctcgggctgcc

SEQ ID NO: 5935436 - DNA, 25 bp, Homo sapien
agcaacatatacactggacagggaa

SEQ ID NO: 5935437 - DNA, 25 bp, Homo sapien
acactggacagggaatagaaaacac

SEQ ID NO: 5935438 - DNA, 25 bp, Homo sapien
aaagactgcgcgctcgggctgccct

SEQ ID NO: 5935439 - DNA, 25 bp, Homo sapien
gagagccttggtccagtttaaacag

SEQ ID NO: 5935440 - DNA, 25 bp, Homo sapien
aataaataaacaaataagcaacata

SEQ ID NO: 5935441 - DNA, 25 bp, Homo sapien
aataaacaaataagcaacatataca

SEQ ID NO: 5935442 - DNA, 25 bp, Homo sapien
caatccaatatatatccttacaaat

SEQ ID NO: 5935443 - DNA, 25 bp, Homo sapien
catctcgtcgctctggagaacctgg

SEQ ID NO: 5935444 - DNA, 25 bp, Homo sapien
cgctcgatttcttgctgtagcgccg

SEQ ID NO: 5935445 - DNA, 25 bp, Homo sapien
tgttctgagagccttggtccagttt

SEQ ID NO: 5935446 - DNA, 25 bp, Homo sapien
tcctcgaaagactgcgcgctcgggc

SEQ ID NO: 5935447 - DNA, 25 bp, Homo sapien
cttagagggaaatacaatccaatat

SEQ ID NO: 5935448 - DNA, 25 bp, Homo sapien
gcgtggggatgatcttgcgcagcgc

SEQ ID NO: 5935449 - DNA, 25 bp, Homo sapien
cagctcctcgaaagactgcgcgctc

SEQ ID NO: 5935450 - DNA, 25 bp, Homo sapien
aaacaggttctacaagaatgcattt

SEQ ID NO: 5935451 - DNA, 25 bp, Homo sapien
ggatcttgggttcttgttctgagag

SEQ ID NO: 5935452 - DNA, 25 bp, Homo sapien
ttggtccagtttaaacaggttctac

SEQ ID NO: 5935453 - DNA, 25 bp, Homo sapien
gactgggtgcgctggcgctcgcgca

SEQ ID NO: 5935454 - DNA, 25 bp, Homo sapien
gcggccagcttgagcgtctggatct

SEQ ID NO: 5935455 - DNA, 25 bp, Homo sapien
cgcttgggctgcctctccagctctt

SEQ ID NO: 5935456 - DNA, 25 bp, Homo sapien
cgtagctgagacgctcgtgagccac

SEQ ID NO: 5935457 - DNA, 25 bp, Homo sapien
tctggggcgggagggatcttgggtt

SEQ ID NO: 5935458 - DNA, 25 bp, Homo sapien
ggtgcccagactgtccacgggggac

SEQ ID NO: 5935459 - DNA, 25 bp, Homo sapien
cgcgtggcagtcacttagctggtaa

SEQ ID NO: 5935460 - DNA, 25 bp, Homo sapien
agaattccaggcttcctcgaaacag

SEQ ID NO: 5935461 - DNA, 25 bp, Homo sapien
ggttcttgttctgagagccttggtc

SEQ ID NO: 5935462 - DNA, 25 bp, Homo sapien
aggaggaaaatccaacagtgaggag

SEQ ID NO: 5935463 - DNA, 25 bp, Homo sapien
tggtagaggaagtctatgtacctgg

SEQ ID NO: 5935464 - DNA, 25 bp, Homo sapien
caccggcgagctggagccctcctcc

SEQ ID NO: 5935465 - DNA, 25 bp, Homo sapien
ctccagctcttcctcactggtgccc

SEQ ID NO: 5935466 - DNA, 25 bp, Homo sapien
agctcttcctcactggtgcccagac

SEQ ID NO: 5935467 - DNA, 25 bp, Homo sapien
aggagatgagggcacagaagtcact

SEQ ID NO: 5935468 - DNA, 25 bp, Homo sapien
catcttattgtccatctcgtcgctc

SEQ ID NO: 5935469 - DNA, 25 bp, Homo sapien
cgggagggatcttgggttcttgttc

SEQ ID NO: 5935470 - DNA, 25 bp, Homo sapien
gaggtctggggcgggagggatcttg

SEQ ID NO: 5935471 - DNA, 25 bp, Homo sapien
gttatacacaaccgcgtggcagtca

SEQ ID NO: 5935472 - DNA, 25 bp, Homo sapien
atccagttccgcatgcgcctgagat

SEQ ID NO: 5935473 - DNA, 25 bp, Homo sapien
cccggggtcgggctgccatcttcgc

SEQ ID NO: 5935474 - DNA, 25 bp, Homo sapien
catggaccacgcgccctccatgcgc

SEQ ID NO: 5935475 - DNA, 25 bp, Homo sapien
ctcgttgagcgactgggtgcgctgg

SEQ ID NO: 5935476 - DNA, 25 bp, Homo sapien
ggcgggagggatcttgggttcttgt

SEQ ID NO: 5935477 - DNA, 25 bp, Homo sapien
gcgctagtgggaggcggacatggac

SEQ ID NO: 5935478 - DNA, 25 bp, Homo sapien
tacacaaccgcgtggcagtcactta

SEQ ID NO: 5935479 - DNA, 25 bp, Homo sapien
ccggcgagctggagccctcctccat

SEQ ID NO: 5935480 - DNA, 25 bp, Homo sapien
gaaatacaatccaatatatatcctt

SEQ ID NO: 5935481 - DNA, 25 bp, Homo sapien
aacacttgggcactggggtcatgag

SEQ ID NO: 5935482 - DNA, 25 bp, Homo sapien
tgggtcctggcttgcggctccggag

SEQ ID NO: 5935483 - DNA, 25 bp, Homo sapien
aggcctcgttgagcgactgggtgcg

SEQ ID NO: 5935484 - DNA, 25 bp, Homo sapien
ctctggagaacctggtagaggaagt

SEQ ID NO: 5935485 - DNA, 25 bp, Homo sapien
aacagtcacgggaggtctggggcgg

SEQ ID NO: 5935486 - DNA, 25 bp, Homo sapien
ggcactggggtcatgaggaaccaca

SEQ ID NO: 5935487 - DNA, 25 bp, Homo sapien
atagaaaacacggctagctgagcag

SEQ ID NO: 5935488 - DNA, 25 bp, Homo sapien
tgcggctccggaggtggatggcacg

SEQ ID NO: 5935489 - DNA, 25 bp, Homo sapien
cttcttgccgcgcttacccggggtc

SEQ ID NO: 5935490 - DNA, 25 bp, Homo sapien
ggagaaggcgtagctgagacgctcg

SEQ ID NO: 5935491 - DNA, 25 bp, Homo sapien
cggacatggaccacgcgccctccat

SEQ ID NO: 5935492 - DNA, 25 bp, Homo sapien
cagtcacgggaggtctggggcggga

SEQ ID NO: 5935493 - DNA, 25 bp, Homo sapien
gatggcacggcgcggcgctagtggg

SEQ ID NO: 5935494 - DNA, 25 bp, Homo sapien
caagaatgcatttctgttttattta

SEQ ID NO: 5935495 - DNA, 25 bp, Homo sapien
tagtgggaggcggacatggaccacg

SEQ ID NO: 5935496 - DNA, 25 bp, Homo sapien
tgtcccctgccaaacacttgggcac

SEQ ID NO: 5935497 - DNA, 25 bp, Homo sapien
gctggctctgcagctcctcgaaaga

SEQ ID NO: 5935498 - DNA, 25 bp, Homo sapien
gagggaaatacaatccaatatatat

SEQ ID NO: 5935499 - DNA, 25 bp, Homo sapien
actggacagggaatagaaaacacgg

SEQ ID NO: 5935500 - DNA, 25 bp, Homo sapien
cgctcgggctgcccttcttgccgcg

SEQ ID NO: 5935501 - DNA, 25 bp, Homo sapien
aaggcgtagctgagacgctcgtgag

SEQ ID NO: 5935502 - DNA, 25 bp, Homo sapien
atgaggaaccacaaggttgtccagg

SEQ ID NO: 5935503 - DNA, 25 bp, Homo sapien
ccacgggggacaccggcgagctgga

SEQ ID NO: 5935504 - DNA, 25 bp, Homo sapien
agcttgagcgtctggatcttgctga

SEQ ID NO: 5935505 - DNA, 25 bp, Homo sapien
tgcgcgctcgggctgcccttcttgc

SEQ ID NO: 5935506 - DNA, 25 bp, Homo sapien
ctgtagcgccgcttccggccgaagc

SEQ ID NO: 5935507 - DNA, 25 bp, Homo sapien
ggtgggtcctggcttgcggctccgg

SEQ ID NO: 5935508 - DNA, 25 bp, Homo sapien
cgtagctgcagctggtcatcttatt

SEQ ID NO: 5935509 - DNA, 25 bp, Homo sapien
ggagaacctggtagaggaagtctat

SEQ ID NO: 5935510 - DNA, 25 bp, Homo sapien
cgggctgcccttcttgccgcgctta

SEQ ID NO: 5935511 - DNA, 25 bp, Homo sapien
ttgcgcagcgcggcgaaggcctcgt

SEQ ID NO: 5935512 - DNA, 25 bp, Homo sapien
gaagtcactggcaggaaggctgatg

SEQ ID NO: 5935513 - DNA, 25 bp, Homo sapien
acaggttctacaagaatgcatttct

SEQ ID NO: 5935514 - DNA, 25 bp, Homo sapien
ggccgcatccagttccgcatgcgcc

SEQ ID NO: 5935515 - DNA, 25 bp, Homo sapien
ccacacggagaaggcgtagctgaga

SEQ ID NO: 5935516 - DNA, 25 bp, Homo sapien
ggttgtccaggtgccgaaagtcaca

SEQ ID NO: 5935517 - DNA, 25 bp, Homo sapien
aaggttgtccaggtgccgaaagtca

SEQ ID NO: 5935518 - DNA, 25 bp, Homo sapien
ccggccgaagcgcttgggctgcctc

SEQ ID NO: 5935519 - DNA, 25 bp, Homo sapien
tgagcttgtcagaggggagcgtggg

SEQ ID NO: 5935520 - DNA, 25 bp, Homo sapien
tcatgaggaaccacaaggttgtcca

SEQ ID NO: 5935521 - DNA, 25 bp, Homo sapien
agcaggccatggagacgtaaagaac

SEQ ID NO: 5935522 - DNA, 25 bp, Homo sapien
tatgtacctggcggccagcttgagc

SEQ ID NO: 5935523 - DNA, 25 bp, Homo sapien
catcttcgctcgatttcttgctgta

SEQ ID NO: 5935524 - DNA, 25 bp, Homo sapien
tatccttacaaatgcattcctgaag

SEQ ID NO: 5935525 - DNA, 25 bp, Homo sapien
taaacaaataagcaacatatacact

SEQ ID NO: 5935526 - DNA, 25 bp, Homo sapien
acccaggaggaaaatccaacagtga

SEQ ID NO: 5935527 - DNA, 25 bp, Homo sapien
gccgaaagtcacagccgtggccgca

SEQ ID NO: 5935528 - DNA, 25 bp, Homo sapien
acagtgaggagatgagggcacagaa

SEQ ID NO: 5935529 - DNA, 25 bp, Homo sapien
ctgccatcttcgctcgatttcttgc

SEQ ID NO: 5935530 - DNA, 25 bp, Homo sapien
tgcagctcctcgaaagactgcgcgc

SEQ ID NO: 5935531 - DNA, 25 bp, Homo sapien
gaaggctgatgcccatcccctgggt

SEQ ID NO: 5935532 - DNA, 25 bp, Homo sapien
gggtgcgctggcgctcgcgcacgtt

SEQ ID NO: 5935533 - DNA, 25 bp, Homo sapien
tctgtcccctgccaaacacttgggc

SEQ ID NO: 5935534 - DNA, 25 bp, Homo sapien
ctggagaacctggtagaggaagtct

SEQ ID NO: 5935535 - DNA, 25 bp, Homo sapien
ggcaagaattccaggcttcctcgaa

SEQ ID NO: 5935536 - DNA, 25 bp, Homo sapien
ctcttcctcactggtgcccagactg

SEQ ID NO: 5935537 - DNA, 25 bp, Homo sapien
tacaatccaatatatatccttacaa

SEQ ID NO: 5935538 - DNA, 25 bp, Homo sapien
gcgccctccatgcgccacacggaga

SEQ ID NO: 5935539 - DNA, 25 bp, Homo sapien
aggttctacaagaatgcatttctgt

SEQ ID NO: 5935540 - DNA, 25 bp, Homo sapien
cctccatgcgccacacggagaaggc

SEQ ID NO: 5935541 - DNA, 25 bp, Homo sapien
cgcggcgaaggcctcgttgagcgac

SEQ ID NO: 5935542 - DNA, 25 bp, Homo sapien
ggctgcccttcttgccgcgcttacc

SEQ ID NO: 5935543 - DNA, 25 bp, Homo sapien
agaaaacacggctagctgagcaggc

SEQ ID NO: 5935544 - DNA, 25 bp, Homo sapien
cttgggcactggggtcatgaggaac

SEQ ID NO: 5935545 - DNA, 25 bp, Homo sapien
gtttaaacaggttctacaagaatgc

SEQ ID NO: 5935546 - DNA, 25 bp, Homo sapien
agaaggcgtagctgagacgctcgtg

SEQ ID NO: 5935547 - DNA, 25 bp, Homo sapien
gtcatcttattgtccatctcgtcgc

SEQ ID NO: 5935548 - DNA, 25 bp, Homo sapien
gcgctggctctgcagctcctcgaaa

SEQ ID NO: 5935549 - DNA, 25 bp, Homo sapien
tccatctcgtcgctctggagaacct

SEQ ID NO: 5935550 - DNA, 25 bp, Homo sapien
ttcctcgaaacagtcacgggaggtc

SEQ ID NO: 5935551 - DNA, 25 bp, Homo sapien
agggcacagaagtcactggcaggaa

SEQ ID NO: 5935552 - DNA, 25 bp, Homo sapien
gaggtggatggcacggcgcggcgct

SEQ ID NO: 5935553 - DNA, 25 bp, Homo sapien
gcaggaaggctgatgcccatcccct

SEQ ID NO: 5935554 - DNA, 25 bp, Homo sapien
ggtaaaatatctcaataaataaaca

SEQ ID NO: 5935555 - DNA, 25 bp, Homo sapien
cggcgctagtgggaggcggacatgg

SEQ ID NO: 5935556 - DNA, 25 bp, Homo sapien
gcctcgttgagcgactgggtgcgct

SEQ ID NO: 5935557 - DNA, 25 bp, Homo sapien
tatacacaaccgcgtggcagtcact

SEQ ID NO: 5935558 - DNA, 25 bp, Homo sapien
tagctgagcaggccatggagacgta

SEQ ID NO: 5935559 - DNA, 25 bp, Homo sapien
ctcgaaagactgcgcgctcgggctg

SEQ ID NO: 5935560 - DNA, 25 bp, Homo sapien
aaaacacggctagctgagcaggcca

SEQ ID NO: 5935561 - DNA, 25 bp, Homo sapien
gcttccggccgaagcgcttgggctg

SEQ ID NO: 5935562 - DNA, 25 bp, Homo sapien
acgctcgtgagccacgtagctgcag

SEQ ID NO: 5935563 - DNA, 25 bp, Homo sapien
caggatgcgctggctctgcagctcc

SEQ ID NO: 5935564 - DNA, 25 bp, Homo sapien
tggctctgcagctcctcgaaagact

SEQ ID NO: 5935565 - DNA, 25 bp, Homo sapien
gaatagaaaacacggctagctgagc

SEQ ID NO: 5935566 - DNA, 25 bp, Homo sapien
gctgagcaggccatggagacgtaaa

SEQ ID NO: 5935567 - DNA, 25 bp, Homo sapien
ctgagatgtgcaggtgggtcctggc

SEQ ID NO: 5935568 - DNA, 25 bp, Homo sapien
gagcgtggggatgatcttgcgcagc

SEQ ID NO: 5935569 - DNA, 25 bp, Homo sapien
atgcgctggctctgcagctcctcga

SEQ ID NO: 5935570 - DNA, 25 bp, Homo sapien
ccatggagacgtaaagaacaggagt

SEQ ID NO: 5935571 - DNA, 25 bp, Homo sapien
cagactgtccacgggggacaccggc

SEQ ID NO: 5935572 - DNA, 25 bp, Homo sapien
cacgggaggtctggggcgggaggga

SEQ ID NO: 5935573 - DNA, 25 bp, Homo sapien
gtccaggtgccgaaagtcacagccg

SEQ ID NO: 5935574 - DNA, 25 bp, Homo sapien
tccagtttaaacaggttctacaaga

SEQ ID NO: 5935575 - DNA, 25 bp, Homo sapien
tatgcgggcaagaattccaggcttc

SEQ ID NO: 5935576 - DNA, 25 bp, Homo sapien
gatcttgcgcagcgcggcgaaggcc

SEQ ID NO: 5935577 - DNA, 25 bp, Homo sapien
tgcgccacacggagaaggcgtagct

SEQ ID NO: 5935578 - DNA, 25 bp, Homo sapien
ggccgaagcgcttgggctgcctctc

SEQ ID NO: 5935579 - DNA, 25 bp, Homo sapien
agccgtggccgcatccagttccgca

SEQ ID NO: 5935580 - DNA, 25 bp, Homo sapien
tcaataaataaacaaataagcaaca

SEQ ID NO: 5935581 - DNA, 25 bp, Homo sapien
cctcgaaacagtcacgggaggtctg

SEQ ID NO: 5935582 - DNA, 25 bp, Homo sapien
cgcgcttacccggggtcgggctgcc

SEQ ID NO: 5935583 - DNA, 25 bp, Homo sapien
tggcgctcgcgcacgttggccagga

SEQ ID NO: 5935584 - DNA, 25 bp, Homo sapien
gtagcgccgcttccggccgaagcgc

SEQ ID NO: 5935585 - DNA, 25 bp, Homo sapien
tggtcatcttattgtccatctcgtc

SEQ ID NO: 5935586 - DNA, 25 bp, Homo sapien
gctggtcatcttattgtccatctcg

SEQ ID NO: 5935587 - DNA, 25 bp, Homo sapien
gcgcacgttggccaggatgcgctgg

SEQ ID NO: 5935588 - DNA, 25 bp, Homo sapien
cgccgcttccggccgaagcgcttgg

SEQ ID NO: 5935589 - DNA, 25 bp, Homo sapien
agtcactggcaggaaggctgatgcc

SEQ ID NO: 5935590 - DNA, 25 bp, Homo sapien
ttattgtccatctcgtcgctctgga

SEQ ID NO: 5935591 - DNA, 25 bp, Homo sapien
gcacgttggccaggatgcgctggct

SEQ ID NO: 5935592 - DNA, 25 bp, Homo sapien
cccatcccctgggtatctgaggagg

SEQ ID NO: 5935593 - DNA, 25 bp, Homo sapien
caggagtatgcgggcaagaattcca

SEQ ID NO: 5935594 - DNA, 25 bp, Homo sapien
tagaactttccagaaagattccccc

SEQ ID NO: 5935595 - DNA, 25 bp, Homo sapien
tcttgcgcagcgcggcgaaggcctc

SEQ ID NO: 5935596 - DNA, 25 bp, Homo sapien
tcactggcaggaaggctgatgccca

SEQ ID NO: 5935597 - DNA, 25 bp, Homo sapien
aggcttcctcgaaacagtcacggga

SEQ ID NO: 5935598 - DNA, 25 bp, Homo sapien
atatacactggacagggaatagaaa

SEQ ID NO: 5935599 - DNA, 25 bp, Homo sapien
atgcgcctgagatgtgcaggtgggt

SEQ ID NO: 5935600 - DNA, 25 bp, Homo sapien
gcgcctgagatgtgcaggtgggtcc

SEQ ID NO: 5935601 - DNA, 25 bp, Homo sapien
gggtcgggctgccatcttcgctcga

SEQ ID NO: 5935602 - DNA, 25 bp, Homo sapien
ctgaggaggatgtgaacctgggtct

SEQ ID NO: 5935603 - DNA, 25 bp, Homo sapien
gggaggtctggggcgggagggatct

SEQ ID NO: 5935604 - DNA, 25 bp, Homo sapien
gccacgtagctgcagctggtcatct

SEQ ID NO: 5935605 - DNA, 25 bp, Homo sapien
tcttcgctcgatttcttgctgtagc

SEQ ID NO: 5935606 - DNA, 25 bp, Homo sapien
cctggcggccagcttgagcgtctgg

SEQ ID NO: 5935607 - DNA, 25 bp, Homo sapien
cttgcggctccggaggtggatggca

SEQ ID NO: 5935608 - DNA, 25 bp, Homo sapien
agtatgcgggcaagaattccaggct

SEQ ID NO: 5935609 - DNA, 25 bp, Homo sapien
gtagaggaagtctatgtacctggcg

SEQ ID NO: 5935610 - DNA, 25 bp, Homo sapien
ggcggacatggaccacgcgccctcc

SEQ ID NO: 5935611 - DNA, 25 bp, Homo sapien
gctagctgagcaggccatggagacg

SEQ ID NO: 5935612 - DNA, 25 bp, Homo sapien
gagatgtgcaggtgggtcctggctt

SEQ ID NO: 5935613 - DNA, 25 bp, Homo sapien
tggccaggatgcgctggctctgcag

SEQ ID NO: 5935614 - DNA, 25 bp, Homo sapien
ccgaagcgcttgggctgcctctcca

SEQ ID NO: 5935615 - DNA, 25 bp, Homo sapien
gttctacaagaatgcatttctgttt

SEQ ID NO: 5935616 - DNA, 25 bp, Homo sapien
acagccgtggccgcatccagttccg

SEQ ID NO: 5935617 - DNA, 25 bp, Homo sapien
tccggaggtggatggcacggcgcgg

SEQ ID NO: 5935618 - DNA, 25 bp, Homo sapien
tgaggagatgagggcacagaagtca

SEQ ID NO: 5935619 - DNA, 25 bp, Homo sapien
ccagctcttcctcactggtgcccag

SEQ ID NO: 5935620 - DNA, 25 bp, Homo sapien
caaataagcaacatatacactggac

SEQ ID NO: 5935621 - DNA, 25 bp, Homo sapien
ccaggaggaaaatccaacagtgagg

SEQ ID NO: 5935622 - DNA, 25 bp, Homo sapien
ccagcttgagcgtctggatcttgct

SEQ ID NO: 5935623 - DNA, 25 bp, Homo sapien
ctgagagccttggtccagtttaaac

SEQ ID NO: 5935624 - DNA, 25 bp, Homo sapien
gaagtctatgtacctggcggccagc

SEQ ID NO: 5935625 - DNA, 25 bp, Homo sapien
tggggcgggagggatcttgggttct

SEQ ID NO: 5935626 - DNA, 25 bp, Homo sapien
gtcacgggaggtctggggcgggagg

SEQ ID NO: 5935627 - DNA, 25 bp, Homo sapien
tgtccatctcgtcgctctggagaac

SEQ ID NO: 5935628 - DNA, 25 bp, Homo sapien
tctgcagctcctcgaaagactgcgc

SEQ ID NO: 5935629 - DNA, 25 bp, Homo sapien
gtgcgctggcgctcgcgcacgttgg

SEQ ID NO: 5935630 - DNA, 25 bp, Homo sapien
gcccttcttgccgcgcttacccggg

SEQ ID NO: 5935631 - DNA, 25 bp, Homo sapien
ggatgatcttgcgcagcgcggcgaa

SEQ ID NO: 5935632 - DNA, 25 bp, Homo sapien
ggtggatggcacggcgcggcgctag

SEQ ID NO: 5935633 - DNA, 25 bp, Homo sapien
acatatacactggacagggaataga

SEQ ID NO: 5935634 - DNA, 25 bp, Homo sapien
tacaagaatgcatttctgttttatt

SEQ ID NO: 5935635 - DNA, 25 bp, Homo sapien
gctagtgggaggcggacatggacca

SEQ ID NO: 5935636 - DNA, 25 bp, Homo sapien
acgtaaagaacaggagtatgcgggc

SEQ ID NO: 5935637 - DNA, 25 bp, Homo sapien
agaggggagcgtggggatgatcttg

SEQ ID NO: 5935638 - DNA, 25 bp, Homo sapien
aacctgggtctctgtcccctgccaa

SEQ ID NO: 5935639 - DNA, 25 bp, Homo sapien
atgatcttgcgcagcgcggcgaagg

SEQ ID NO: 5935640 - DNA, 25 bp, Homo sapien
tgggctgcctctccagctcttcctc

SEQ ID NO: 5935641 - DNA, 25 bp, Homo sapien
cctgggtctctgtcccctgccaaac

SEQ ID NO: 5935642 - DNA, 25 bp, Homo sapien
tcgtgagccacgtagctgcagctgg

SEQ ID NO: 5935643 - DNA, 25 bp, Homo sapien
agactgcgcgctcgggctgcccttc

SEQ ID NO: 5935644 - DNA, 25 bp, Homo sapien
gacatggaccacgcgccctccatgc

SEQ ID NO: 5935645 - DNA, 25 bp, Homo sapien
gcagtcacttagctggtaaaatatc

SEQ ID NO: 5935646 - DNA, 25 bp, Homo sapien
gaggaaccacaaggttgtccaggtg

SEQ ID NO: 5935647 - DNA, 25 bp, Homo sapien
ctctccagctcttcctcactggtgc

SEQ ID NO: 5935648 - DNA, 25 bp, Homo sapien
cttacaaatgcattcctgaagctag

SEQ ID NO: 5935649 - DNA, 25 bp, Homo sapien
aaagaaggcacttagagggaaatac

SEQ ID NO: 5935650 - DNA, 25 bp, Homo sapien
gatgtgcaggtgggtcctggcttgc

SEQ ID NO: 5935651 - DNA, 25 bp, Homo sapien
ccaatatatatccttacaaatgcat

SEQ ID NO: 5935652 - DNA, 25 bp, Homo sapien
gctccggaggtggatggcacggcgc

SEQ ID NO: 5935653 - DNA, 25 bp, Homo sapien
gcatgcgcctgagatgtgcaggtgg

SEQ ID NO: 5935654 - DNA, 25 bp, Homo sapien
cttacccggggtcgggctgccatct

SEQ ID NO: 5935655 - DNA, 25 bp, Homo sapien
acattaaaagaaggcacttagaggg

SEQ ID NO: 5935656 - DNA, 25 bp, Homo sapien
gtcgggctgccatcttcgctcgatt

SEQ ID NO: 5935657 - DNA, 25 bp, Homo sapien
caggccatggagacgtaaagaacag

SEQ ID NO: 5935658 - DNA, 25 bp, Homo sapien
gggaggcggacatggaccacgcgcc

SEQ ID NO: 5935659 - DNA, 25 bp, Homo sapien
tccaacagtgaggagatgagggcac

SEQ ID NO: 5935660 - DNA, 25 bp, Homo sapien
ctcgatttcttgctgtagcgccgct

SEQ ID NO: 5935661 - DNA, 25 bp, Homo sapien
aacaaataagcaacatatacactgg

SEQ ID NO: 5935662 - DNA, 25 bp, Homo sapien
aggaagtctatgtacctggcggcca

SEQ ID NO: 5935663 - DNA, 25 bp, Homo sapien
tctcaataaataaacaaataagcaa

SEQ ID NO: 5935664 - DNA, 25 bp, Homo sapien
tatctcaataaataaacaaataagc

SEQ ID NO: 5935665 - DNA, 25 bp, Homo sapien
aatccaacagtgaggagatgagggc

SEQ ID NO: 5935666 - DNA, 25 bp, Homo sapien
gtaaagaacaggagtatgcgggcaa

SEQ ID NO: 5935667 - DNA, 25 bp, Homo sapien
tatatccttacaaatgcattcctga

SEQ ID NO: 5935668 - DNA, 25 bp, Homo sapien
cagctggtcatcttattgtccatct

SEQ ID NO: 5935669 - DNA, 25 bp, Homo sapien
cttgggctgcctctccagctcttcc

SEQ ID NO: 5935670 - DNA, 25 bp, Homo sapien
catcccctgggtatctgaggaggat

SEQ ID NO: 5935671 - DNA, 25 bp, Homo sapien
ggtctctgtcccctgccaaacactt

SEQ ID NO: 5935672 - DNA, 25 bp, Homo sapien
ggaaccacaaggttgtccaggtgcc

SEQ ID NO: 5935673 - DNA, 25 bp, Homo sapien
gcctctccagctcttcctcactggt

SEQ ID NO: 5935674 - DNA, 25 bp, Homo sapien
gtgccgaaagtcacagccgtggccg

SEQ ID NO: 5935675 - DNA, 25 bp, Homo sapien
tagctgagacgctcgtgagccacgt

SEQ ID NO: 5935676 - DNA, 25 bp, Homo sapien
gccttggtccagtttaaacaggttc

SEQ ID NO: 5935677 - DNA, 25 bp, Homo sapien
ggtctggggcgggagggatcttggg

SEQ ID NO: 5935678 - DNA, 25 bp, Homo sapien
taccctacgggactcgctgatgaga

SEQ ID NO: 5935679 - DNA, 25 bp, Homo sapien
gtaaggtggagagcgcctgattatc

SEQ ID NO: 5935680 - DNA, 25 bp, Homo sapien
gtgtaaggttgtttggttccgtgtg

SEQ ID NO: 5935681 - DNA, 25 bp, Homo sapien
tttttgtacgttatatattgtatta

SEQ ID NO: 5935682 - DNA, 25 bp, Homo sapien
tgccttgcccgctcataaactggtt

SEQ ID NO: 5935683 - DNA, 25 bp, Homo sapien
tcaccttcccctattttaagacgtg

SEQ ID NO: 5935684 - DNA, 25 bp, Homo sapien
agccctcaaggctatggccgccggc

SEQ ID NO: 5935685 - DNA, 25 bp, Homo sapien
gcggactgagacaatcctgcagaga

SEQ ID NO: 5935686 - DNA, 25 bp, Homo sapien
tgtattaagggcattttaaagtgat

SEQ ID NO: 5935687 - DNA, 25 bp, Homo sapien
ttgtttggttccgtgtgtgtgtgtg

SEQ ID NO: 5935688 - DNA, 25 bp, Homo sapien
aaacctagcgaggaacgtgcaatgc

SEQ ID NO: 5935689 - DNA, 25 bp, Homo sapien
tggtttctcacggggcataagcctc

SEQ ID NO: 5935690 - DNA, 25 bp, Homo sapien
gttggcgcctgcggaatcagagaac

SEQ ID NO: 5935691 - DNA, 25 bp, Homo sapien
gagatatttttgtacgttatatatt

SEQ ID NO: 5935692 - DNA, 25 bp, Homo sapien
cgagcagaacacaactggcccccta

SEQ ID NO: 5935693 - DNA, 25 bp, Homo sapien
gcccctgggcgcacatctccagact

SEQ ID NO: 5935694 - DNA, 25 bp, Homo sapien
tgccagaaaccgagacttacaggct

SEQ ID NO: 5935695 - DNA, 25 bp, Homo sapien
agatctgcctggctgcccctagggg

SEQ ID NO: 5935696 - DNA, 25 bp, Homo sapien
ggttcccgcagcaatggatgccgct

SEQ ID NO: 5935697 - DNA, 25 bp, Homo sapien
agcgaagcccacattcgtgtcaaac

SEQ ID NO: 5935698 - DNA, 25 bp, Homo sapien
tgagacaatcctgcagagatctgcc

SEQ ID NO: 5935699 - DNA, 25 bp, Homo sapien
agagggaactacaagcatccagcag

SEQ ID NO: 5935700 - DNA, 25 bp, Homo sapien
cgagacttacaggctgatactctcc

SEQ ID NO: 5935701 - DNA, 25 bp, Homo sapien
gctatggccgccggcgccggcgttc

SEQ ID NO: 5935702 - DNA, 25 bp, Homo sapien
tcgtgtcaaacgctaccgccagagc

SEQ ID NO: 5935703 - DNA, 25 bp, Homo sapien
gggcggactgagacaatcctgcaga

SEQ ID NO: 5935704 - DNA, 25 bp, Homo sapien
cggggcggactgagacaatcctgca

SEQ ID NO: 5935705 - DNA, 25 bp, Homo sapien
tggagagcgcctgattatcgcctgt

SEQ ID NO: 5935706 - DNA, 25 bp, Homo sapien
ctatagtatttaagtttgttgctgt

SEQ ID NO: 5935707 - DNA, 25 bp, Homo sapien
attgtcaccttcccctattttaaga

SEQ ID NO: 5935708 - DNA, 25 bp, Homo sapien
cattcctggacgagcagaacacaac

SEQ ID NO: 5935709 - DNA, 25 bp, Homo sapien
agatctaccagctaacagacaaaga

SEQ ID NO: 5935710 - DNA, 25 bp, Homo sapien
cgttccctgctggaggtcctccggt

SEQ ID NO: 5935711 - DNA, 25 bp, Homo sapien
tgttgtccagccaaaggtaactata

SEQ ID NO: 5935712 - DNA, 25 bp, Homo sapien
acttgaactttccaaaacctagcga

SEQ ID NO: 5935713 - DNA, 25 bp, Homo sapien
gcattgaacagtcgggcgagtatcc

SEQ ID NO: 5935714 - DNA, 25 bp, Homo sapien
gctaacagacaaagacaaggacggc

SEQ ID NO: 5935715 - DNA, 25 bp, Homo sapien
gaacacaactggccccctacaagcc

SEQ ID NO: 5935716 - DNA, 25 bp, Homo sapien
ccaagccaggctcatgccagaaacc

SEQ ID NO: 5935717 - DNA, 25 bp, Homo sapien
gggactcgctgatgagacgacagtt

SEQ ID NO: 5935718 - DNA, 25 bp, Homo sapien
ctgcacatttcagaaattggcccac

SEQ ID NO: 5935719 - DNA, 25 bp, Homo sapien
ttgcccgctcataaactggtttctc

SEQ ID NO: 5935720 - DNA, 25 bp, Homo sapien
attcgtgtcaaacgctaccgccaga

SEQ ID NO: 5935721 - DNA, 25 bp, Homo sapien
ccgttggcgcctgcggaatcagaga

SEQ ID NO: 5935722 - DNA, 25 bp, Homo sapien
tttaagtttgttgctgtcaaggttt

SEQ ID NO: 5935723 - DNA, 25 bp, Homo sapien
gcggaatcagagaacttcgcaccgg

SEQ ID NO: 5935724 - DNA, 25 bp, Homo sapien
tatcccgttggcgcctgcggaatca

SEQ ID NO: 5935725 - DNA, 25 bp, Homo sapien
gtgattatattgtcaccttccccta

SEQ ID NO: 5935726 - DNA, 25 bp, Homo sapien
tatagagatatttttgtacgttata

SEQ ID NO: 5935727 - DNA, 25 bp, Homo sapien
tgatactctccgggcaggggtctga

SEQ ID NO: 5935728 - DNA, 25 bp, Homo sapien
attttaaagtgattatattgtcacc

SEQ ID NO: 5935729 - DNA, 25 bp, Homo sapien
cgggacctgcacatttcagaaattg

SEQ ID NO: 5935730 - DNA, 25 bp, Homo sapien
gagcagacacacacagccccaggcc

SEQ ID NO: 5935731 - DNA, 25 bp, Homo sapien
aaacaagatcagccctcaaggctat

SEQ ID NO: 5935732 - DNA, 25 bp, Homo sapien
ttacaggctgatactctccgggcag

SEQ ID NO: 5935733 - DNA, 25 bp, Homo sapien
ggcgccggcgttccctgctggaggt

SEQ ID NO: 5935734 - DNA, 25 bp, Homo sapien
ctccggtcccggactgtggagtcct

SEQ ID NO: 5935735 - DNA, 25 bp, Homo sapien
ccactgccttgcccgctcataaact

SEQ ID NO: 5935736 - DNA, 25 bp, Homo sapien
ataggtgcgggtgacagcattgaac

SEQ ID NO: 5935737 - DNA, 25 bp, Homo sapien
ccagatctaccagctaacagacaaa

SEQ ID NO: 5935738 - DNA, 25 bp, Homo sapien
gcaatggatgccgcttcgggacctg

SEQ ID NO: 5935739 - DNA, 25 bp, Homo sapien
actggtttctcacggggcataagcc

SEQ ID NO: 5935740 - DNA, 25 bp, Homo sapien
cagctaccctacgggactcgctgat

SEQ ID NO: 5935741 - DNA, 25 bp, Homo sapien
tagagatatttttgtacgttatata

SEQ ID NO: 5935742 - DNA, 25 bp, Homo sapien
ctacgggactcgctgatgagacgac

SEQ ID NO: 5935743 - DNA, 25 bp, Homo sapien
ggcccaccagatctaccagctaaca

SEQ ID NO: 5935744 - DNA, 25 bp, Homo sapien
gatgaagaaaaaacattgtgtttcc

SEQ ID NO: 5935745 - DNA, 25 bp, Homo sapien
aacttcgcaccggggcggactgaga

SEQ ID NO: 5935746 - DNA, 25 bp, Homo sapien
gccaggctcatgccagaaaccgaga

SEQ ID NO: 5935747 - DNA, 25 bp, Homo sapien
gtgcgggtgacagcattgaacagtc

SEQ ID NO: 5935748 - DNA, 25 bp, Homo sapien
gtctcagcaaggtgtaaggttgttt

SEQ ID NO: 5935749 - DNA, 25 bp, Homo sapien
accagctaacagacaaagacaagga

SEQ ID NO: 5935750 - DNA, 25 bp, Homo sapien
agtcgtgggaagagggaactacaag

SEQ ID NO: 5935751 - DNA, 25 bp, Homo sapien
ctacccagactcttgatccattcct

SEQ ID NO: 5935752 - DNA, 25 bp, Homo sapien
ctcattactacttgaactttccaaa

SEQ ID NO: 5935753 - DNA, 25 bp, Homo sapien
ggcatggctcccagaaacaagatca

SEQ ID NO: 5935754 - DNA, 25 bp, Homo sapien
agcatgaaccagggttcccgcagca

SEQ ID NO: 5935755 - DNA, 25 bp, Homo sapien
cagcattgaacagtcgggcgagtat

SEQ ID NO: 5935756 - DNA, 25 bp, Homo sapien
ccctcaaggctatggccgccggcgc

SEQ ID NO: 5935757 - DNA, 25 bp, Homo sapien
accgccagagcatgaaccagggttc

SEQ ID NO: 5935758 - DNA, 25 bp, Homo sapien
caaaacctagcgaggaacgtgcaat

SEQ ID NO: 5935759 - DNA, 25 bp, Homo sapien
ataagcctcattactacttgaactt

SEQ ID NO: 5935760 - DNA, 25 bp, Homo sapien
aggaacgtgcaatgcttgttgtcca

SEQ ID NO: 5935761 - DNA, 25 bp, Homo sapien
cattactacttgaactttccaaaac

SEQ ID NO: 5935762 - DNA, 25 bp, Homo sapien
cctgtggatgaagaaaaaacattgt

SEQ ID NO: 5935763 - DNA, 25 bp, Homo sapien
agactcttgatccattcctggacga

SEQ ID NO: 5935764 - DNA, 25 bp, Homo sapien
gtgtcaaacgctaccgccagagcat

SEQ ID NO: 5935765 - DNA, 25 bp, Homo sapien
gccagcaatcagagcgaagcccaca

SEQ ID NO: 5935766 - DNA, 25 bp, Homo sapien
tgaagaaaaaacattgtgtttccta

SEQ ID NO: 5935767 - DNA, 25 bp, Homo sapien
gatccattcctggacgagcagaaca

SEQ ID NO: 5935768 - DNA, 25 bp, Homo sapien
gcctggctgcccctaggggaggcag

SEQ ID NO: 5935769 - DNA, 25 bp, Homo sapien
tcccaggagcagacacacacagccc

SEQ ID NO: 5935770 - DNA, 25 bp, Homo sapien
taggatataggtgcgggtgacagca

SEQ ID NO: 5935771 - DNA, 25 bp, Homo sapien
acaggctgatactctccgggcaggg

SEQ ID NO: 5935772 - DNA, 25 bp, Homo sapien
aggcagaggaacccaagaccaagcc

SEQ ID NO: 5935773 - DNA, 25 bp, Homo sapien
ccgtgtgtgtgtgtgtgtgtgtgtg

SEQ ID NO: 5935774 - DNA, 25 bp, Homo sapien
tctttaggatataggtgcgggtgac

SEQ ID NO: 5935775 - DNA, 25 bp, Homo sapien
ttaagggcattttaaagtgattata

SEQ ID NO: 5935776 - DNA, 25 bp, Homo sapien
cccaccagatctaccagctaacaga

SEQ ID NO: 5935777 - DNA, 25 bp, Homo sapien
atttcagaaattggcccaccagatc

SEQ ID NO: 5935778 - DNA, 25 bp, Homo sapien
agagcatgaaccagggttcccgcag

SEQ ID NO: 5935779 - DNA, 25 bp, Homo sapien
cgccagagcatgaaccagggttccc

SEQ ID NO: 5935780 - DNA, 25 bp, Homo sapien
cttcgcaccggggcggactgagaca

SEQ ID NO: 5935781 - DNA, 25 bp, Homo sapien
ccttgcccgctcataaactggtttc

SEQ ID NO: 5935782 - DNA, 25 bp, Homo sapien
gatatttttgtacgttatatattgt

SEQ ID NO: 5935783 - DNA, 25 bp, Homo sapien
tggatgccgcttcgggacctgcaca

SEQ ID NO: 5935784 - DNA, 25 bp, Homo sapien
gccgccggcgccggcgttccctgct

SEQ ID NO: 5935785 - DNA, 25 bp, Homo sapien
ataaactggtttctcacggggcata

SEQ ID NO: 5935786 - DNA, 25 bp, Homo sapien
gtaactatagtatttaagtttgttg

SEQ ID NO: 5935787 - DNA, 25 bp, Homo sapien
ggcaggggtctgagccactgccttg

SEQ ID NO: 5935788 - DNA, 25 bp, Homo sapien
acttacaggctgatactctccgggc

SEQ ID NO: 5935789 - DNA, 25 bp, Homo sapien
ctcatgccagaaaccgagacttaca

SEQ ID NO: 5935790 - DNA, 25 bp, Homo sapien
aatggatgccgcttcgggacctgca

SEQ ID NO: 5935791 - DNA, 25 bp, Homo sapien
cagctaacagacaaagacaaggacg

SEQ ID NO: 5935792 - DNA, 25 bp, Homo sapien
gttcctacccagactcttgatccat

SEQ ID NO: 5935793 - DNA, 25 bp, Homo sapien
tggatgaagaaaaaacattgtgttt

SEQ ID NO: 5935794 - DNA, 25 bp, Homo sapien
aaggacggcatggctcccagaaaca

SEQ ID NO: 5935795 - DNA, 25 bp, Homo sapien
ttatattgtcaccttcccctatttt

SEQ ID NO: 5935796 - DNA, 25 bp, Homo sapien
ctcgctgatgagacgacagttccta

SEQ ID NO: 5935797 - DNA, 25 bp, Homo sapien
gtgcaatgcttgttgtccagccaaa

SEQ ID NO: 5935798 - DNA, 25 bp, Homo sapien
accggggcggactgagacaatcctg

SEQ ID NO: 5935799 - DNA, 25 bp, Homo sapien
caccagatctaccagctaacagaca

SEQ ID NO: 5935800 - DNA, 25 bp, Homo sapien
agacacacacagccccaggcccctg

SEQ ID NO: 5935801 - DNA, 25 bp, Homo sapien
acacaactggccccctacaagccag

SEQ ID NO: 5935802 - DNA, 25 bp, Homo sapien
acaactggccccctacaagccagca

SEQ ID NO: 5935803 - DNA, 25 bp, Homo sapien
gcattttaaagtgattatattgtca

SEQ ID NO: 5935804 - DNA, 25 bp, Homo sapien
ctggccccctacaagccagcaatca

SEQ ID NO: 5935805 - DNA, 25 bp, Homo sapien
gctcataaactggtttctcacgggg

SEQ ID NO: 5935806 - DNA, 25 bp, Homo sapien
tccgggcaggggtctgagccactgc

SEQ ID NO: 5935807 - DNA, 25 bp, Homo sapien
acaagatcagccctcaaggctatgg

SEQ ID NO: 5935808 - DNA, 25 bp, Homo sapien
cagcaatcagagcgaagcccacatt

SEQ ID NO: 5935809 - DNA, 25 bp, Homo sapien
cgagtatcccgttggcgcctgcgga

SEQ ID NO: 5935810 - DNA, 25 bp, Homo sapien
ctacaagccagcaatcagagcgaag

SEQ ID NO: 5935811 - DNA, 25 bp, Homo sapien
aatatatagagatatttttgtacgt

SEQ ID NO: 5935812 - DNA, 25 bp, Homo sapien
cgcagcaatggatgccgcttcggga

SEQ ID NO: 5935813 - DNA, 25 bp, Homo sapien
ggggtctgagccactgccttgcccg

SEQ ID NO: 5935814 - DNA, 25 bp, Homo sapien
gctggaggtcctccggtcccggact

SEQ ID NO: 5935815 - DNA, 25 bp, Homo sapien
ggttccgtgtgtgtgtgtgtgtgtg

SEQ ID NO: 5935816 - DNA, 25 bp, Homo sapien
cgcctgtggatgaagaaaaaacatt

SEQ ID NO: 5935817 - DNA, 25 bp, Homo sapien
ctcacggggcataagcctcattact

SEQ ID NO: 5935818 - DNA, 25 bp, Homo sapien
ccagaaacaagatcagccctcaagg

SEQ ID NO: 5935819 - DNA, 25 bp, Homo sapien
aaggtggagagcgcctgattatcgc

SEQ ID NO: 5935820 - DNA, 25 bp, Homo sapien
agccaaaggtaactatagtatttaa

SEQ ID NO: 5935821 - DNA, 25 bp, Homo sapien
tgtggatgaagaaaaaacattgtgt

SEQ ID NO: 5935822 - DNA, 25 bp, Homo sapien
cgaagcccacattcgtgtcaaacgc

SEQ ID NO: 5935823 - DNA, 25 bp, Homo sapien
agcagaacacaactggccccctaca

SEQ ID NO: 5935824 - DNA, 25 bp, Homo sapien
tcgtgggaagagggaactacaagca

SEQ ID NO: 5935825 - DNA, 25 bp, Homo sapien
atattgtattaagggcattttaaag

SEQ ID NO: 5935826 - DNA, 25 bp, Homo sapien
tgccgcttcgggacctgcacatttc

SEQ ID NO: 5935827 - DNA, 25 bp, Homo sapien
ccctgggcgcacatctccagactct

SEQ ID NO: 5935828 - DNA, 25 bp, Homo sapien
tcataaactggtttctcacggggca

SEQ ID NO: 5935829 - DNA, 25 bp, Homo sapien
aaagacaaggacggcatggctccca

SEQ ID NO: 5935830 - DNA, 25 bp, Homo sapien
ccctattttaagacgtgaatgtctc

SEQ ID NO: 5935831 - DNA, 25 bp, Homo sapien
tcccagaaacaagatcagccctcaa

SEQ ID NO: 5935832 - DNA, 25 bp, Homo sapien
cctggacgagcagaacacaactggc

SEQ ID NO: 5935833 - DNA, 25 bp, Homo sapien
tggagtcctcccaggagcagacaca

SEQ ID NO: 5935834 - DNA, 25 bp, Homo sapien
cgccggcgttccctgctggaggtcc

SEQ ID NO: 5935835 - DNA, 25 bp, Homo sapien
aggcccctgggcgcacatctccaga

SEQ ID NO: 5935836 - DNA, 25 bp, Homo sapien
cccgcagcaatggatgccgcttcgg

SEQ ID NO: 5935837 - DNA, 25 bp, Homo sapien
ggtctgagccactgccttgcccgct

SEQ ID NO: 5935838 - DNA, 25 bp, Homo sapien
agacttacaggctgatactctccgg

SEQ ID NO: 5935839 - DNA, 25 bp, Homo sapien
cgctgatgagacgacagttcctacc

SEQ ID NO: 5935840 - DNA, 25 bp, Homo sapien
ggactgagacaatcctgcagagatc

SEQ ID NO: 5935841 - DNA, 25 bp, Homo sapien
ggaggcagaggaacccaagaccaag

SEQ ID NO: 5935842 - DNA, 25 bp, Homo sapien
agccccaggcccctgggcgcacatc

SEQ ID NO: 5935843 - DNA, 25 bp, Homo sapien
aactatagtatttaagtttgttgct

SEQ ID NO: 5935844 - DNA, 25 bp, Homo sapien
ggcgttccctgctggaggtcctccg

SEQ ID NO: 5935845 - DNA, 25 bp, Homo sapien
aactacaagcatccagcagctaccc

SEQ ID NO: 5935846 - DNA, 25 bp, Homo sapien
ccctgctggaggtcctccggtcccg

SEQ ID NO: 5935847 - DNA, 25 bp, Homo sapien
ccagactcttgatccattcctggac

SEQ ID NO: 5935848 - DNA, 25 bp, Homo sapien
gggcgcacatctccagactctttag

SEQ ID NO: 5935849 - DNA, 25 bp, Homo sapien
taacagacaaagacaaggacggcat

SEQ ID NO: 5935850 - DNA, 25 bp, Homo sapien
tgtacgttatatattgtattaaggg

SEQ ID NO: 5935851 - DNA, 25 bp, Homo sapien
acccagactcttgatccattcctgg

SEQ ID NO: 5935852 - DNA, 25 bp, Homo sapien
ttggttccgtgtgtgtgtgtgtgtg

SEQ ID NO: 5935853 - DNA, 25 bp, Homo sapien
gatgccgcttcgggacctgcacatt

SEQ ID NO: 5935854 - DNA, 25 bp, Homo sapien
gcgcctgcggaatcagagaacttcg

SEQ ID NO: 5935855 - DNA, 25 bp, Homo sapien
gtgtgtgtaaggtggagagcgcctg

SEQ ID NO: 5935856 - DNA, 25 bp, Homo sapien
ccctacaagccagcaatcagagcga

SEQ ID NO: 5935857 - DNA, 25 bp, Homo sapien
agacaaggacggcatggctcccaga

SEQ ID NO: 5935858 - DNA, 25 bp, Homo sapien
aagcatccagcagctaccctacggg

SEQ ID NO: 5935859 - DNA, 25 bp, Homo sapien
acgtgcaatgcttgttgtccagcca

SEQ ID NO: 5935860 - DNA, 25 bp, Homo sapien
ttatcgcctgtggatgaagaaaaaa

SEQ ID NO: 5935861 - DNA, 25 bp, Homo sapien
acacagccccaggcccctgggcgca

SEQ ID NO: 5935862 - DNA, 25 bp, Homo sapien
agccactgccttgcccgctcataaa

SEQ ID NO: 5935863 - DNA, 25 bp, Homo sapien
ctacttgaactttccaaaacctagc

SEQ ID NO: 5935864 - DNA, 25 bp, Homo sapien
ttccctgctggaggtcctccggtcc

SEQ ID NO: 5935865 - DNA, 25 bp, Homo sapien
ggttgtttggttccgtgtgtgtgtg

SEQ ID NO: 5935866 - DNA, 25 bp, Homo sapien
aggagcagacacacacagccccagg

SEQ ID NO: 5935867 - DNA, 25 bp, Homo sapien
ggactgtggagtcctcccaggagca

SEQ ID NO: 5935868 - DNA, 25 bp, Homo sapien
ggaactacaagcatccagcagctac

SEQ ID NO: 5935869 - DNA, 25 bp, Homo sapien
aaaccgagacttacaggctgatact

SEQ ID NO: 5935870 - DNA, 25 bp, Homo sapien
ctcagcaaggtgtaaggttgtttgg

SEQ ID NO: 5935871 - DNA, 25 bp, Homo sapien
acgacagttcctacccagactcttg

SEQ ID NO: 5935872 - DNA, 25 bp, Homo sapien
gtgtgtgtgtgtgtgtgtgtgtaag

SEQ ID NO: 5935873 - DNA, 25 bp, Homo sapien
gtgtgtgtgtgtgtgtgtgtaaggt

SEQ ID NO: 5935874 - DNA, 25 bp, Homo sapien
acctagcgaggaacgtgcaatgctt

SEQ ID NO: 5935875 - DNA, 25 bp, Homo sapien
gtcctcccaggagcagacacacaca

SEQ ID NO: 5935876 - DNA, 25 bp, Homo sapien
cagttcctacccagactcttgatcc

SEQ ID NO: 5935877 - DNA, 25 bp, Homo sapien
cgggcgagtatcccgttggcgcctg

SEQ ID NO: 5935878 - DNA, 25 bp, Homo sapien
ggatataggtgcgggtgacagcatt

SEQ ID NO: 5935879 - DNA, 25 bp, Homo sapien
gtgggaagagggaactacaagcatc

SEQ ID NO: 5935880 - DNA, 25 bp, Homo sapien
actgagacaatcctgcagagatctg

SEQ ID NO: 5935881 - DNA, 25 bp, Homo sapien
gcaccggggcggactgagacaatcc

SEQ ID NO: 5935882 - DNA, 25 bp, Homo sapien
tatttaagtttgttgctgtcaaggt

SEQ ID NO: 5935883 - DNA, 25 bp, Homo sapien
tactacttgaactttccaaaaccta

SEQ ID NO: 5935884 - DNA, 25 bp, Homo sapien
aggtgcgggtgacagcattgaacag

SEQ ID NO: 5935885 - DNA, 25 bp, Homo sapien
aatgcttgttgtccagccaaaggta

SEQ ID NO: 5935886 - DNA, 25 bp, Homo sapien
aagaccaagccaggctcatgccaga

SEQ ID NO: 5935887 - DNA, 25 bp, Homo sapien
aaactggtttctcacggggcataag

SEQ ID NO: 5935888 - DNA, 25 bp, Homo sapien
agacgtgaatgtctcagcaaggtgt

SEQ ID NO: 5935889 - DNA, 25 bp, Homo sapien
ctgcagagatctgcctggctgcccc

SEQ ID NO: 5935890 - DNA, 25 bp, Homo sapien
accgagacttacaggctgatactct

SEQ ID NO: 5935891 - DNA, 25 bp, Homo sapien
acatctccagactctttaggatata

SEQ ID NO: 5935892 - DNA, 25 bp, Homo sapien
cggggcataagcctcattactactt

SEQ ID NO: 5935893 - DNA, 25 bp, Homo sapien
ccagggttcccgcagcaatggatgc

SEQ ID NO: 5935894 - DNA, 25 bp, Homo sapien
ctcaaggctatggccgccggcgccg

SEQ ID NO: 5935895 - DNA, 25 bp, Homo sapien
cgaggaacgtgcaatgcttgttgtc

SEQ ID NO: 5935896 - DNA, 25 bp, Homo sapien
agaggaacccaagaccaagccaggc

SEQ ID NO: 5935897 - DNA, 25 bp, Homo sapien
gcagagatctgcctggctgccccta

SEQ ID NO: 5935898 - DNA, 25 bp, Homo sapien
ggctcatgccagaaaccgagactta

SEQ ID NO: 5935899 - DNA, 25 bp, Homo sapien
taagacgtgaatgtctcagcaaggt

SEQ ID NO: 5935900 - DNA, 25 bp, Homo sapien
agaacttcgcaccggggcggactga

SEQ ID NO: 5935901 - DNA, 25 bp, Homo sapien
gaaattggcccaccagatctaccag

SEQ ID NO: 5935902 - DNA, 25 bp, Homo sapien
ctattttaagacgtgaatgtctcag

SEQ ID NO: 5935903 - DNA, 25 bp, Homo sapien
agacaaagacaaggacggcatggct

SEQ ID NO: 5935904 - DNA, 25 bp, Homo sapien
ggtggagagcgcctgattatcgcct

SEQ ID NO: 5935905 - DNA, 25 bp, Homo sapien
tcctccggtcccggactgtggagtc

SEQ ID NO: 5935906 - DNA, 25 bp, Homo sapien
ggtcccggactgtggagtcctccca

SEQ ID NO: 5935907 - DNA, 25 bp, Homo sapien
gcccgctcataaactggtttctcac

SEQ ID NO: 5935908 - DNA, 25 bp, Homo sapien
gtgtgtgtgtgtgtgtgtgtgtgta

SEQ ID NO: 5935909 - DNA, 25 bp, Homo sapien
gcccacattcgtgtcaaacgctacc

SEQ ID NO: 5935910 - DNA, 25 bp, Homo sapien
gcataagcctcattactacttgaac

SEQ ID NO: 5935911 - DNA, 25 bp, Homo sapien
agggttcccgcagcaatggatgccg

SEQ ID NO: 5935912 - DNA, 25 bp, Homo sapien
gcgggtgacagcattgaacagtcgg

SEQ ID NO: 5935913 - DNA, 25 bp, Homo sapien
ccgctcataaactggtttctcacgg

SEQ ID NO: 5935914 - DNA, 25 bp, Homo sapien
agagatctgcctggctgcccctagg

SEQ ID NO: 5935915 - DNA, 25 bp, Homo sapien
ccggtcccggactgtggagtcctcc

SEQ ID NO: 5935916 - DNA, 25 bp, Homo sapien
cttgttgtccagccaaaggtaacta

SEQ ID NO: 5935917 - DNA, 25 bp, Homo sapien
ggacggcatggctcccagaaacaag

SEQ ID NO: 5935918 - DNA, 25 bp, Homo sapien
ttgtccagccaaaggtaactatagt

SEQ ID NO: 5935919 - DNA, 25 bp, Homo sapien
tattaagggcattttaaagtgatta

SEQ ID NO: 5935920 - DNA, 25 bp, Homo sapien
acacacacagccccaggcccctggg

SEQ ID NO: 5935921 - DNA, 25 bp, Homo sapien
attgtattaagggcattttaaagtg

SEQ ID NO: 5935922 - DNA, 25 bp, Homo sapien
tcccctattttaagacgtgaatgtc

SEQ ID NO: 5935923 - DNA, 25 bp, Homo sapien
cacggggcataagcctcattactac

SEQ ID NO: 5935924 - DNA, 25 bp, Homo sapien
ccccaggcccctgggcgcacatctc

SEQ ID NO: 5935925 - DNA, 25 bp, Homo sapien
acagacaaagacaaggacggcatgg

SEQ ID NO: 5935926 - DNA, 25 bp, Homo sapien
atctaccagctaacagacaaagaca

SEQ ID NO: 5935927 - DNA, 25 bp, Homo sapien
ttccgtgtgtgtgtgtgtgtgtgtg

SEQ ID NO: 5935928 - DNA, 25 bp, Homo sapien
ggcgagtatcccgttggcgcctgcg

SEQ ID NO: 5935929 - DNA, 25 bp, Homo sapien
ggacctgcacatttcagaaattggc

SEQ ID NO: 5935930 - DNA, 25 bp, Homo sapien
acagccccaggcccctgggcgcaca

SEQ ID NO: 5935931 - DNA, 25 bp, Homo sapien
gtgtgtgtgtaaggtggagagcgcc

SEQ ID NO: 5935932 - DNA, 25 bp, Homo sapien
agcagctaccctacgggactcgctg

SEQ ID NO: 5935933 - DNA, 25 bp, Homo sapien
tatttttgtacgttatatattgtat

SEQ ID NO: 5935934 - DNA, 25 bp, Homo sapien
ccagccaaaggtaactatagtattt

SEQ ID NO: 5935935 - DNA, 25 bp, Homo sapien
tctgagccactgccttgcccgctca

SEQ ID NO: 5935936 - DNA, 25 bp, Homo sapien
ctaccgccagagcatgaaccagggt

SEQ ID NO: 5935937 - DNA, 25 bp, Homo sapien
tggctcccagaaacaagatcagccc

SEQ ID NO: 5935938 - DNA, 25 bp, Homo sapien
cagaacacaactggccccctacaag

SEQ ID NO: 5935939 - DNA, 25 bp, Homo sapien
gctaccctacgggactcgctgatga

SEQ ID NO: 5935940 - DNA, 25 bp, Homo sapien
ttggcccaccagatctaccagctaa

SEQ ID NO: 5935941 - DNA, 25 bp, Homo sapien
actgccttgcccgctcataaactgg

SEQ ID NO: 5935942 - DNA, 25 bp, Homo sapien
gggcataagcctcattactacttga

SEQ ID NO: 5935943 - DNA, 25 bp, Homo sapien
gctgatactctccgggcaggggtct

SEQ ID NO: 5935944 - DNA, 25 bp, Homo sapien
tccattcctggacgagcagaacaca

SEQ ID NO: 5935945 - DNA, 25 bp, Homo sapien
taaagtgattatattgtcaccttcc

SEQ ID NO: 5935946 - DNA, 25 bp, Homo sapien
tgagccactgccttgcccgctcata

SEQ ID NO: 5935947 - DNA, 25 bp, Homo sapien
ccaagaccaagccaggctcatgcca

SEQ ID NO: 5935948 - DNA, 25 bp, Homo sapien
tcttgatccattcctggacgagcag

SEQ ID NO: 5935949 - DNA, 25 bp, Homo sapien
tccaaaacctagcgaggaacgtgca

SEQ ID NO: 5935950 - DNA, 25 bp, Homo sapien
acacacagccccaggcccctgggcg

SEQ ID NO: 5935951 - DNA, 25 bp, Homo sapien
gtttctcacggggcataagcctcat

SEQ ID NO: 5935952 - DNA, 25 bp, Homo sapien
acctgcacatttcagaaattggccc

SEQ ID NO: 5935953 - DNA, 25 bp, Homo sapien
gaatgtctcagcaaggtgtaaggtt

SEQ ID NO: 5935954 - DNA, 25 bp, Homo sapien
gcacatctccagactctttaggata

SEQ ID NO: 5935955 - DNA, 25 bp, Homo sapien
cttcccctattttaagacgtgaatg

SEQ ID NO: 5935956 - DNA, 25 bp, Homo sapien
agacaatcctgcagagatctgcctg

SEQ ID NO: 5935957 - DNA, 25 bp, Homo sapien
aagggcattttaaagtgattatatt

SEQ ID NO: 5935958 - DNA, 25 bp, Homo sapien
tcagccctcaaggctatggccgccg

SEQ ID NO: 5935959 - DNA, 25 bp, Homo sapien
actctttaggatataggtgcgggtg

SEQ ID NO: 5935960 - DNA, 25 bp, Homo sapien
gacagttcctacccagactcttgat

SEQ ID NO: 5935961 - DNA, 25 bp, Homo sapien
gatcagccctcaaggctatggccgc

SEQ ID NO: 5935962 - DNA, 25 bp, Homo sapien
catgccagaaaccgagacttacagg

SEQ ID NO: 5935963 - DNA, 25 bp, Homo sapien
ctaccagctaacagacaaagacaag

SEQ ID NO: 5935964 - DNA, 25 bp, Homo sapien
gtccagccaaaggtaactatagtat

SEQ ID NO: 5935965 - DNA, 25 bp, Homo sapien
gcgcctgattatcgcctgtggatga

SEQ ID NO: 5935966 - DNA, 25 bp, Homo sapien
gtcgggcgagtatcccgttggcgcc

SEQ ID NO: 5935967 - DNA, 25 bp, Homo sapien
agaaaccgagacttacaggctgata

SEQ ID NO: 5935968 - DNA, 25 bp, Homo sapien
ccaggagcagacacacacagcccca

SEQ ID NO: 5935969 - DNA, 25 bp, Homo sapien
ctagcgaggaacgtgcaatgcttgt

SEQ ID NO: 5935970 - DNA, 25 bp, Homo sapien
attgaacagtcgggcgagtatcccg

SEQ ID NO: 5935971 - DNA, 25 bp, Homo sapien
ttcgggacctgcacatttcagaaat

SEQ ID NO: 5935972 - DNA, 25 bp, Homo sapien
gtgtgtgtgtgtgtgtgtgtgtgtg

SEQ ID NO: 5935973 - DNA, 25 bp, Homo sapien
tatatagagatatttttgtacgtta

SEQ ID NO: 5935974 - DNA, 25 bp, Homo sapien
actcttgatccattcctggacgagc

SEQ ID NO: 5935975 - DNA, 25 bp, Homo sapien
attttaagacgtgaatgtctcagca

SEQ ID NO: 5935976 - DNA, 25 bp, Homo sapien
acattcgtgtcaaacgctaccgcca

SEQ ID NO: 5935977 - DNA, 25 bp, Homo sapien
acatttcagaaattggcccaccaga

SEQ ID NO: 5935978 - DNA, 25 bp, Homo sapien
gaagagggaactacaagcatccagc

SEQ ID NO: 5935979 - DNA, 25 bp, Homo sapien
ttgatccattcctggacgagcagaa

SEQ ID NO: 5935980 - DNA, 25 bp, Homo sapien
ccaggcccctgggcgcacatctcca

SEQ ID NO: 5935981 - DNA, 25 bp, Homo sapien
gcctcattactacttgaactttcca

SEQ ID NO: 5935982 - DNA, 25 bp, Homo sapien
tggaggtcctccggtcccggactgt

SEQ ID NO: 5935983 - DNA, 25 bp, Homo sapien
ccccctacaagccagcaatcagagc

SEQ ID NO: 5935984 - DNA, 25 bp, Homo sapien
tcagagcgaagcccacattcgtgtc

SEQ ID NO: 5935985 - DNA, 25 bp, Homo sapien
actctccgggcaggggtctgagcca

SEQ ID NO: 5935986 - DNA, 25 bp, Homo sapien
aagatcagccctcaaggctatggcc

SEQ ID NO: 5935987 - DNA, 25 bp, Homo sapien
aagccaggctcatgccagaaaccga

SEQ ID NO: 5935988 - DNA, 25 bp, Homo sapien
gcaatcagagcgaagcccacattcg

SEQ ID NO: 5935989 - DNA, 25 bp, Homo sapien
acaatcctgcagagatctgcctggc

SEQ ID NO: 5935990 - DNA, 25 bp, Homo sapien
cagcaaggtgtaaggttgtttggtt

SEQ ID NO: 5935991 - DNA, 25 bp, Homo sapien
gagcgcctgattatcgcctgtggat

SEQ ID NO: 5935992 - DNA, 25 bp, Homo sapien
gtgacagcattgaacagtcgggcga

SEQ ID NO: 5935993 - DNA, 25 bp, Homo sapien
gcatccagcagctaccctacgggac

SEQ ID NO: 5935994 - DNA, 25 bp, Homo sapien
ctgctggaggtcctccggtcccgga

SEQ ID NO: 5935995 - DNA, 25 bp, Homo sapien
cgccggcgccggcgttccctgctgg

SEQ ID NO: 5935996 - DNA, 25 bp, Homo sapien
cgctaccgccagagcatgaaccagg

SEQ ID NO: 5935997 - DNA, 25 bp, Homo sapien
tgtcaccttcccctattttaagacg

SEQ ID NO: 5935998 - DNA, 25 bp, Homo sapien
agaaacaagatcagccctcaaggct

SEQ ID NO: 5935999 - DNA, 25 bp, Homo sapien
agggaactacaagcatccagcagct

SEQ ID NO: 5936000 - DNA, 25 bp, Homo sapien
gcttcgggacctgcacatttcagaa

SEQ ID NO: 5936001 - DNA, 25 bp, Homo sapien
tgagacgacagttcctacccagact

SEQ ID NO: 5936002 - DNA, 25 bp, Homo sapien
ccagcagctaccctacgggactcgc

SEQ ID NO: 5936003 - DNA, 25 bp, Homo sapien
acaagccagcaatcagagcgaagcc

SEQ ID NO: 5936004 - DNA, 25 bp, Homo sapien
cctcccaggagcagacacacacagc

SEQ ID NO: 5936005 - DNA, 25 bp, Homo sapien
gcctgattatcgcctgtggatgaag

SEQ ID NO: 5936006 - DNA, 25 bp, Homo sapien
gtgtaaggtggagagcgcctgatta

SEQ ID NO: 5936007 - DNA, 25 bp, Homo sapien
gtgaatgtctcagcaaggtgtaagg

SEQ ID NO: 5936008 - DNA, 25 bp, Homo sapien
aattggcccaccagatctaccagct

SEQ ID NO: 5936009 - DNA, 25 bp, Homo sapien
gtgtgtgtgtgtgtaaggtggagag

SEQ ID NO: 5936010 - DNA, 25 bp, Homo sapien
tacgttatatattgtattaagggca

SEQ ID NO: 5936011 - DNA, 25 bp, Homo sapien
tttaggatataggtgcgggtgacag

SEQ ID NO: 5936012 - DNA, 25 bp, Homo sapien
aggaacccaagaccaagccaggctc

SEQ ID NO: 5936013 - DNA, 25 bp, Homo sapien
acaaagacaaggacggcatggctcc

SEQ ID NO: 5936014 - DNA, 25 bp, Homo sapien
ctgggcgcacatctccagactcttt

SEQ ID NO: 5936015 - DNA, 25 bp, Homo sapien
tgcttgttgtccagccaaaggtaac

SEQ ID NO: 5936016 - DNA, 25 bp, Homo sapien
gggaagagggaactacaagcatcca

SEQ ID NO: 5936017 - DNA, 25 bp, Homo sapien
ttgtaacttcaaatatatagagata

SEQ ID NO: 5936018 - DNA, 25 bp, Homo sapien
ttcccgcagcaatggatgccgcttc

SEQ ID NO: 5936019 - DNA, 25 bp, Homo sapien
atcgcctgtggatgaagaaaaaaca

SEQ ID NO: 5936020 - DNA, 25 bp, Homo sapien
aacgctaccgccagagcatgaacca

SEQ ID NO: 5936021 - DNA, 25 bp, Homo sapien
gtaaggttgtttggttccgtgtgtg

SEQ ID NO: 5936022 - DNA, 25 bp, Homo sapien
gaacgtgcaatgcttgttgtccagc

SEQ ID NO: 5936023 - DNA, 25 bp, Homo sapien
cagtcgggcgagtatcccgttggcg

SEQ ID NO: 5936024 - DNA, 25 bp, Homo sapien
ccacattcgtgtcaaacgctaccgc

SEQ ID NO: 5936025 - DNA, 25 bp, Homo sapien
gatgagacgacagttcctacccaga

SEQ ID NO: 5936026 - DNA, 25 bp, Homo sapien
tggcgcctgcggaatcagagaactt

SEQ ID NO: 5936027 - DNA, 25 bp, Homo sapien
aagtgattatattgtcaccttcccc

SEQ ID NO: 5936028 - DNA, 25 bp, Homo sapien
gtgtgtaaggtggagagcgcctgat

SEQ ID NO: 5936029 - DNA, 25 bp, Homo sapien
gtgtgtgtgtgtaaggtggagagcg

SEQ ID NO: 5936030 - DNA, 25 bp, Homo sapien
cagcaatggatgccgcttcgggacc

SEQ ID NO: 5936031 - DNA, 25 bp, Homo sapien
aatcagagaacttcgcaccggggcg

SEQ ID NO: 5936032 - DNA, 25 bp, Homo sapien
atattgtcaccttcccctattttaa

SEQ ID NO: 5936033 - DNA, 25 bp, Homo sapien
taggggaggcagaggaacccaagac

SEQ ID NO: 5936034 - DNA, 25 bp, Homo sapien
atctgcctggctgcccctaggggag

SEQ ID NO: 5936035 - DNA, 25 bp, Homo sapien
aggctatggccgccggcgccggcgt

SEQ ID NO: 5936036 - DNA, 25 bp, Homo sapien
gaccaagccaggctcatgccagaaa

SEQ ID NO: 5936037 - DNA, 25 bp, Homo sapien
tcctacccagactcttgatccattc

SEQ ID NO: 5936038 - DNA, 25 bp, Homo sapien
gggcattttaaagtgattatattgt

SEQ ID NO: 5936039 - DNA, 25 bp, Homo sapien
ccctacgggactcgctgatgagacg

SEQ ID NO: 5936040 - DNA, 25 bp, Homo sapien
ggaatcagagaacttcgcaccgggg

SEQ ID NO: 5936041 - DNA, 25 bp, Homo sapien
agacgacagttcctacccagactct

SEQ ID NO: 5936042 - DNA, 25 bp, Homo sapien
gattatattgtcaccttcccctatt

SEQ ID NO: 5936043 - DNA, 25 bp, Homo sapien
tcccggactgtggagtcctcccagg

SEQ ID NO: 5936044 - DNA, 25 bp, Homo sapien
acccaagaccaagccaggctcatgc

SEQ ID NO: 5936045 - DNA, 25 bp, Homo sapien
atactctccgggcaggggtctgagc

SEQ ID NO: 5936046 - DNA, 25 bp, Homo sapien
ggggaggcagaggaacccaagacca

SEQ ID NO: 5936047 - DNA, 25 bp, Homo sapien
ccagagcatgaaccagggttcccgc

SEQ ID NO: 5936048 - DNA, 25 bp, Homo sapien
taagtcgtgggaagagggaactaca

SEQ ID NO: 5936049 - DNA, 25 bp, Homo sapien
ccggactgtggagtcctcccaggag

SEQ ID NO: 5936050 - DNA, 25 bp, Homo sapien
catgaaccagggttcccgcagcaat

SEQ ID NO: 5936051 - DNA, 25 bp, Homo sapien
aatcctgcagagatctgcctggctg

SEQ ID NO: 5936052 - DNA, 25 bp, Homo sapien
gggtgacagcattgaacagtcgggc

SEQ ID NO: 5936053 - DNA, 25 bp, Homo sapien
ctacaagcatccagcagctacccta

SEQ ID NO: 5936054 - DNA, 25 bp, Homo sapien
aagcccacattcgtgtcaaacgcta

SEQ ID NO: 5936055 - DNA, 25 bp, Homo sapien
atgtctcagcaaggtgtaaggttgt

SEQ ID NO: 5936056 - DNA, 25 bp, Homo sapien
gagtcctcccaggagcagacacaca

SEQ ID NO: 5936057 - DNA, 25 bp, Homo sapien
caaacgctaccgccagagcatgaac

SEQ ID NO: 5936058 - DNA, 25 bp, Homo sapien
gcctgcggaatcagagaacttcgca

SEQ ID NO: 5936059 - DNA, 25 bp, Homo sapien
caggggtctgagccactgccttgcc

SEQ ID NO: 5936060 - DNA, 25 bp, Homo sapien
aacagtcgggcgagtatcccgttgg

SEQ ID NO: 5936061 - DNA, 25 bp, Homo sapien
agagcgaagcccacattcgtgtcaa

SEQ ID NO: 5936062 - DNA, 25 bp, Homo sapien
cgttatatattgtattaagggcatt

SEQ ID NO: 5936063 - DNA, 25 bp, Homo sapien
ggccccctacaagccagcaatcaga

SEQ ID NO: 5936064 - DNA, 25 bp, Homo sapien
gcacatttcagaaattggcccacca

SEQ ID NO: 5936065 - DNA, 25 bp, Homo sapien
gctcccagaaacaagatcagccctc

SEQ ID NO: 5936066 - DNA, 25 bp, Homo sapien
gacgagcagaacacaactggccccc

SEQ ID NO: 5936067 - DNA, 25 bp, Homo sapien
cctaggggaggcagaggaacccaag

SEQ ID NO: 5936068 - DNA, 25 bp, Homo sapien
tcgcaccggggcggactgagacaat

SEQ ID NO: 5936069 - DNA, 25 bp, Homo sapien
gcaatgcttgttgtccagccaaagg

SEQ ID NO: 5936070 - DNA, 25 bp, Homo sapien
ctgattatcgcctgtggatgaagaa

SEQ ID NO: 5936071 - DNA, 25 bp, Homo sapien
agtatttaagtttgttgctgtcaag

SEQ ID NO: 5936072 - DNA, 25 bp, Homo sapien
catggctcccagaaacaagatcagc

SEQ ID NO: 5936073 - DNA, 25 bp, Homo sapien
tctccgggcaggggtctgagccact

SEQ ID NO: 5936074 - DNA, 25 bp, Homo sapien
ccgcttcgggacctgcacatttcag

SEQ ID NO: 5936075 - DNA, 25 bp, Homo sapien
tatggccgccggcgccggcgttccc

SEQ ID NO: 5936076 - DNA, 25 bp, Homo sapien
aagcctcattactacttgaactttc

SEQ ID NO: 5936077 - DNA, 25 bp, Homo sapien
atccagcagctaccctacgggactc

SEQ ID NO: 5936078 - DNA, 25 bp, Homo sapien
gtcaaacgctaccgccagagcatga

SEQ ID NO: 5936079 - DNA, 25 bp, Homo sapien
gaacccaagaccaagccaggctcat

SEQ ID NO: 5936080 - DNA, 25 bp, Homo sapien
tggacgagcagaacacaactggccc

SEQ ID NO: 5936081 - DNA, 25 bp, Homo sapien
cagaaattggcccaccagatctacc

SEQ ID NO: 5936082 - DNA, 25 bp, Homo sapien
tggccgccggcgccggcgttccctg

SEQ ID NO: 5936083 - DNA, 25 bp, Homo sapien
ttcagaaattggcccaccagatcta

SEQ ID NO: 5936084 - DNA, 25 bp, Homo sapien
tttaaagtgattatattgtcacctt

SEQ ID NO: 5936085 - DNA, 25 bp, Homo sapien
aactggccccctacaagccagcaat

SEQ ID NO: 5936086 - DNA, 25 bp, Homo sapien
acgggactcgctgatgagacgacag

SEQ ID NO: 5936087 - DNA, 25 bp, Homo sapien
ctgcctggctgcccctaggggaggc

SEQ ID NO: 5936088 - DNA, 25 bp, Homo sapien
ttatatattgtattaagggcatttt

SEQ ID NO: 5936089 - DNA, 25 bp, Homo sapien
aaccagggttcccgcagcaatggat

SEQ ID NO: 5936090 - DNA, 25 bp, Homo sapien
agtatcccgttggcgcctgcggaat

SEQ ID NO: 5936091 - DNA, 25 bp, Homo sapien
gtttggttccgtgtgtgtgtgtgtg

SEQ ID NO: 5936092 - DNA, 25 bp, Homo sapien
acggcatggctcccagaaacaagat

SEQ ID NO: 5936093 - DNA, 25 bp, Homo sapien
gactcgctgatgagacgacagttcc

SEQ ID NO: 5936094 - DNA, 25 bp, Homo sapien
agcgaggaacgtgcaatgcttgttg

SEQ ID NO: 5936095 - DNA, 25 bp, Homo sapien
gagagcgcctgattatcgcctgtgg

SEQ ID NO: 5936096 - DNA, 25 bp, Homo sapien
ctgatgagacgacagttcctaccca

SEQ ID NO: 5936097 - DNA, 25 bp, Homo sapien
gattatcgcctgtggatgaagaaaa

SEQ ID NO: 5936098 - DNA, 25 bp, Homo sapien
cgggcaggggtctgagccactgcct

SEQ ID NO: 5936099 - DNA, 25 bp, Homo sapien
ctgcggaatcagagaacttcgcacc

SEQ ID NO: 5936100 - DNA, 25 bp, Homo sapien
ttgaactttccaaaacctagcgagg

SEQ ID NO: 5936101 - DNA, 25 bp, Homo sapien
acaaggacggcatggctcccagaaa

SEQ ID NO: 5936102 - DNA, 25 bp, Homo sapien
tttccaaaacctagcgaggaacgtg

SEQ ID NO: 5936103 - DNA, 25 bp, Homo sapien
ccggcgccggcgttccctgctggag

SEQ ID NO: 5936104 - DNA, 25 bp, Homo sapien
tgctgtcaaggtttttttttttgta

SEQ ID NO: 5936105 - DNA, 25 bp, Homo sapien
ccagaaaccgagacttacaggctga

SEQ ID NO: 5936106 - DNA, 25 bp, Homo sapien
gtgtgtgtgtgtgtgtaaggtggag

SEQ ID NO: 5936107 - DNA, 25 bp, Homo sapien
tttgtacgttatatattgtattaag

SEQ ID NO: 5936108 - DNA, 25 bp, Homo sapien
ctccagactctttaggatataggtg

SEQ ID NO: 5936109 - DNA, 25 bp, Homo sapien
tgtggagtcctcccaggagcagaca

SEQ ID NO: 5936110 - DNA, 25 bp, Homo sapien
gcgcacatctccagactctttagga

SEQ ID NO: 5936111 - DNA, 25 bp, Homo sapien
atagtatttaagtttgttgctgtca

SEQ ID NO: 5936112 - DNA, 25 bp, Homo sapien
actgtggagtcctcccaggagcaga

SEQ ID NO: 5936113 - DNA, 25 bp, Homo sapien
tttaagacgtgaatgtctcagcaag

SEQ ID NO: 5936114 - DNA, 25 bp, Homo sapien
aatcagagcgaagcccacattcgtg

SEQ ID NO: 5936115 - DNA, 25 bp, Homo sapien
gaactttccaaaacctagcgaggaa

SEQ ID NO: 5936116 - DNA, 25 bp, Homo sapien
tcagagaacttcgcaccggggcgga

SEQ ID NO: 5936117 - DNA, 25 bp, Homo sapien
gtgtgtgtgtgtgtgtgtaaggtgg

SEQ ID NO: 5936118 - DNA, 25 bp, Homo sapien
agagaacttcgcaccggggcggact

SEQ ID NO: 5936119 - DNA, 25 bp, Homo sapien
gaggtcctccggtcccggactgtgg

SEQ ID NO: 5936120 - DNA, 25 bp, Homo sapien
ccagactctttaggatataggtgcg

SEQ ID NO: 5936121 - DNA, 25 bp, Homo sapien
caaggctatggccgccggcgccggc

SEQ ID NO: 5936122 - DNA, 25 bp, Homo sapien
aagccagcaatcagagcgaagccca

SEQ ID NO: 5936123 - DNA, 25 bp, Homo sapien
atataggtgcgggtgacagcattga

SEQ ID NO: 5936124 - DNA, 25 bp, Homo sapien
atatattgtattaagggcattttaa

SEQ ID NO: 5936125 - DNA, 25 bp, Homo sapien
tgaacagtcgggcgagtatcccgtt

SEQ ID NO: 5936126 - DNA, 25 bp, Homo sapien
caggctcatgccagaaaccgagact

SEQ ID NO: 5936127 - DNA, 25 bp, Homo sapien
acgtgaatgtctcagcaaggtgtaa

SEQ ID NO: 5936128 - DNA, 25 bp, Homo sapien
tcccgttggcgcctgcggaatcaga

SEQ ID NO: 5936129 - DNA, 25 bp, Homo sapien
acaagcatccagcagctaccctacg

SEQ ID NO: 5936130 - DNA, 25 bp, Homo sapien
gcagacacacacagccccaggcccc

SEQ ID NO: 5936131 - DNA, 25 bp, Homo sapien
tgaaccagggttcccgcagcaatgg

SEQ ID NO: 5936132 - DNA, 25 bp, Homo sapien
ccggcgttccctgctggaggtcctc

SEQ ID NO: 5936133 - DNA, 25 bp, Homo sapien
ttctcacggggcataagcctcatta

SEQ ID NO: 5936134 - DNA, 25 bp, Homo sapien
tcctgcagagatctgcctggctgcc

SEQ ID NO: 5936135 - DNA, 25 bp, Homo sapien
aggctgatactctccgggcaggggt

SEQ ID NO: 5936136 - DNA, 25 bp, Homo sapien
gcaaggtgtaaggttgtttggttcc

SEQ ID NO: 5936137 - DNA, 25 bp, Homo sapien
gcagaggaacccaagaccaagccag

SEQ ID NO: 5936138 - DNA, 25 bp, Homo sapien
taagtttgttgctgtcaaggttttt

SEQ ID NO: 5936139 - DNA, 25 bp, Homo sapien
agactctttaggatataggtgcggg

SEQ ID NO: 5936140 - DNA, 25 bp, Homo sapien
atctccagactctttaggatatagg

SEQ ID NO: 5936141 - DNA, 25 bp, Homo sapien
gacagcattgaacagtcgggcgagt

SEQ ID NO: 5936142 - DNA, 25 bp, Homo sapien
ttcctggacgagcagaacacaactg

SEQ ID NO: 5936143 - DNA, 25 bp, Homo sapien
ggtcctccggtcccggactgtggag

SEQ ID NO: 5936144 - DNA, 25 bp, Homo sapien
aaggttgtttggttccgtgtgtgtg

SEQ ID NO: 5936145 - DNA, 25 bp, Homo sapien
tttgtctgttagctggtagatctgg

SEQ ID NO: 5936146 - DNA, 25 bp, Homo sapien
ggcaaggcagtggctcagacccctg

SEQ ID NO: 5936147 - DNA, 25 bp, Homo sapien
tcagcctgtaagtctcggtttctgg

SEQ ID NO: 5936148 - DNA, 25 bp, Homo sapien
cctgggaggactccacagtccggga

SEQ ID NO: 5936149 - DNA, 25 bp, Homo sapien
tgtgtctgctcctgggaggactcca

SEQ ID NO: 5936150 - DNA, 25 bp, Homo sapien
cccctaggggcagccaggcagatct

SEQ ID NO: 5936151 - DNA, 25 bp, Homo sapien
tctgattgctggcttgtagggggcc

SEQ ID NO: 5936152 - DNA, 25 bp, Homo sapien
ttagctggtagatctggtgggccaa

SEQ ID NO: 5936153 - DNA, 25 bp, Homo sapien
cagggaacgccggcgccggcggcca

SEQ ID NO: 5936154 - DNA, 25 bp, Homo sapien
gtcgtctcatcagcgagtcccgtag

SEQ ID NO: 5936155 - DNA, 25 bp, Homo sapien
gggctgatcttgtttctgggagcca

SEQ ID NO: 5936156 - DNA, 25 bp, Homo sapien
agtccgggaccggaggacctccagc

SEQ ID NO: 5936157 - DNA, 25 bp, Homo sapien
cacacacggaaccaaacaaccttac

SEQ ID NO: 5936158 - DNA, 25 bp, Homo sapien
gcctcccctaggggcagccaggcag

SEQ ID NO: 5936159 - DNA, 25 bp, Homo sapien
tgctgagacattcacgtcttaaaat

SEQ ID NO: 5936160 - DNA, 25 bp, Homo sapien
aacgggatactcgcccgactgttca

SEQ ID NO: 5936161 - DNA, 25 bp, Homo sapien
ctaaagagtctggagatgtgcgccc

SEQ ID NO: 5936162 - DNA, 25 bp, Homo sapien
atagccttgagggctgatcttgttt

SEQ ID NO: 5936163 - DNA, 25 bp, Homo sapien
tatagttacctttggctggacaaca

SEQ ID NO: 5936164 - DNA, 25 bp, Homo sapien
gatgcttgtagttccctcttcccac

SEQ ID NO: 5936165 - DNA, 25 bp, Homo sapien
aagtagtaatgaggcttatgccccg

SEQ ID NO: 5936166 - DNA, 25 bp, Homo sapien
aggcagtggctcagacccctgcccg

SEQ ID NO: 5936167 - DNA, 25 bp, Homo sapien
gcctggcttggtcttgggttcctct

SEQ ID NO: 5936168 - DNA, 25 bp, Homo sapien
cttatgccccgtgagaaaccagttt

SEQ ID NO: 5936169 - DNA, 25 bp, Homo sapien
tgctcctgggaggactccacagtcc

SEQ ID NO: 5936170 - DNA, 25 bp, Homo sapien
tagcgtttgacacgaatgtgggctt

SEQ ID NO: 5936171 - DNA, 25 bp, Homo sapien
cctatatcctaaagagtctggagat

SEQ ID NO: 5936172 - DNA, 25 bp, Homo sapien
tcgctaggttttggaaagttcaagt

SEQ ID NO: 5936173 - DNA, 25 bp, Homo sapien
cctggttcatgctctggcggtagcg

SEQ ID NO: 5936174 - DNA, 25 bp, Homo sapien
accttgctgagacattcacgtctta

SEQ ID NO: 5936175 - DNA, 25 bp, Homo sapien
ccatagccttgagggctgatcttgt

SEQ ID NO: 5936176 - DNA, 25 bp, Homo sapien
atacaatatataacgtacaaaaata

SEQ ID NO: 5936177 - DNA, 25 bp, Homo sapien
tatctctatatatttgaagttacaa

SEQ ID NO: 5936178 - DNA, 25 bp, Homo sapien
gctggatgcttgtagttccctcttc

SEQ ID NO: 5936179 - DNA, 25 bp, Homo sapien
acaaccttacaccttgctgagacat

SEQ ID NO: 5936180 - DNA, 25 bp, Homo sapien
gccggcggccatagccttgagggct

SEQ ID NO: 5936181 - DNA, 25 bp, Homo sapien
aggactccacagtccgggaccggag

SEQ ID NO: 5936182 - DNA, 25 bp, Homo sapien
gagacattcacgtcttaaaataggg

SEQ ID NO: 5936183 - DNA, 25 bp, Homo sapien
ccgtgagaaaccagtttatgagcgg

SEQ ID NO: 5936184 - DNA, 25 bp, Homo sapien
gagggctgatcttgtttctgggagc

SEQ ID NO: 5936185 - DNA, 25 bp, Homo sapien
ccattgctgcgggaaccctggttca

SEQ ID NO: 5936186 - DNA, 25 bp, Homo sapien
gaggacctccagcagggaacgccgg

SEQ ID NO: 5936187 - DNA, 25 bp, Homo sapien
agcagggaacgccggcgccggcggc

SEQ ID NO: 5936188 - DNA, 25 bp, Homo sapien
aatatataacgtacaaaaatatctc

SEQ ID NO: 5936189 - DNA, 25 bp, Homo sapien
tggcatgagcctggcttggtcttgg

SEQ ID NO: 5936190 - DNA, 25 bp, Homo sapien
ggtagcgtttgacacgaatgtgggc

SEQ ID NO: 5936191 - DNA, 25 bp, Homo sapien
cgcccaggggcctggggctgtgtgt

SEQ ID NO: 5936192 - DNA, 25 bp, Homo sapien
atgagcctggcttggtcttgggttc

SEQ ID NO: 5936193 - DNA, 25 bp, Homo sapien
actcgcccgactgttcaatgctgtc

SEQ ID NO: 5936194 - DNA, 25 bp, Homo sapien
cttgtctttgtctgttagctggtag

SEQ ID NO: 5936195 - DNA, 25 bp, Homo sapien
cttgtagttccctcttcccacgact

SEQ ID NO: 5936196 - DNA, 25 bp, Homo sapien
tagatctggtgggccaatttctgaa

SEQ ID NO: 5936197 - DNA, 25 bp, Homo sapien
agcgggcaaggcagtggctcagacc

SEQ ID NO: 5936198 - DNA, 25 bp, Homo sapien
tccgggaccggaggacctccagcag

SEQ ID NO: 5936199 - DNA, 25 bp, Homo sapien
aaccttacaccttgctgagacattc

SEQ ID NO: 5936200 - DNA, 25 bp, Homo sapien
tgtctgctcctgggaggactccaca

SEQ ID NO: 5936201 - DNA, 25 bp, Homo sapien
tgctggcttgtagggggccagttgt

SEQ ID NO: 5936202 - DNA, 25 bp, Homo sapien
ggtttctggcatgagcctggcttgg

SEQ ID NO: 5936203 - DNA, 25 bp, Homo sapien
tgattccgcaggcgccaacgggata

SEQ ID NO: 5936204 - DNA, 25 bp, Homo sapien
ttaaaatgcccttaatacaatatat

SEQ ID NO: 5936205 - DNA, 25 bp, Homo sapien
gaaccctggttcatgctctggcggt

SEQ ID NO: 5936206 - DNA, 25 bp, Homo sapien
tatgccccgtgagaaaccagtttat

SEQ ID NO: 5936207 - DNA, 25 bp, Homo sapien
cttgggttcctctgcctcccctagg

SEQ ID NO: 5936208 - DNA, 25 bp, Homo sapien
gctggacaacaagcattgcacgttc

SEQ ID NO: 5936209 - DNA, 25 bp, Homo sapien
agtctggagatgtgcgcccaggggc

SEQ ID NO: 5936210 - DNA, 25 bp, Homo sapien
ctgaaatgtgcaggtcccgaagcgg

SEQ ID NO: 5936211 - DNA, 25 bp, Homo sapien
ggcctggggctgtgtgtgtctgctc

SEQ ID NO: 5936212 - DNA, 25 bp, Homo sapien
tggttcatgctctggcggtagcgtt

SEQ ID NO: 5936213 - DNA, 25 bp, Homo sapien
ctggtagatctggtgggccaatttc

SEQ ID NO: 5936214 - DNA, 25 bp, Homo sapien
taggggcagccaggcagatctctgc

SEQ ID NO: 5936215 - DNA, 25 bp, Homo sapien
taggaactgtcgtctcatcagcgag

SEQ ID NO: 5936216 - DNA, 25 bp, Homo sapien
tgtgggcttcgctctgattgctggc

SEQ ID NO: 5936217 - DNA, 25 bp, Homo sapien
gcggccatagccttgagggctgatc

SEQ ID NO: 5936218 - DNA, 25 bp, Homo sapien
tgatcttgtttctgggagccatgcc

SEQ ID NO: 5936219 - DNA, 25 bp, Homo sapien
tctctgattccgcaggcgccaacgg

SEQ ID NO: 5936220 - DNA, 25 bp, Homo sapien
atccacaggcgataatcaggcgctc

SEQ ID NO: 5936221 - DNA, 25 bp, Homo sapien
gaaatgtgcaggtcccgaagcggca

SEQ ID NO: 5936222 - DNA, 25 bp, Homo sapien
ccacagtccgggaccggaggacctc

SEQ ID NO: 5936223 - DNA, 25 bp, Homo sapien
cgtcttaaaataggggaaggtgaca

SEQ ID NO: 5936224 - DNA, 25 bp, Homo sapien
ggacctccagcagggaacgccggcg

SEQ ID NO: 5936225 - DNA, 25 bp, Homo sapien
taggaaacacaatgttttttcttca

SEQ ID NO: 5936226 - DNA, 25 bp, Homo sapien
attccgcaggcgccaacgggatact

SEQ ID NO: 5936227 - DNA, 25 bp, Homo sapien
tgttctgctcgtccaggaatggatc

SEQ ID NO: 5936228 - DNA, 25 bp, Homo sapien
cctgtaagtctcggtttctggcatg

SEQ ID NO: 5936229 - DNA, 25 bp, Homo sapien
cgaatgtgggcttcgctctgattgc

SEQ ID NO: 5936230 - DNA, 25 bp, Homo sapien
gcgagtcccgtagggtagctgctgg

SEQ ID NO: 5936231 - DNA, 25 bp, Homo sapien
acgccggcgccggcggccatagcct

SEQ ID NO: 5936232 - DNA, 25 bp, Homo sapien
ctgcgggaaccctggttcatgctct

SEQ ID NO: 5936233 - DNA, 25 bp, Homo sapien
tgctgcgggaaccctggttcatgct

SEQ ID NO: 5936234 - DNA, 25 bp, Homo sapien
aagttctctgattccgcaggcgcca

SEQ ID NO: 5936235 - DNA, 25 bp, Homo sapien
agtaatgaggcttatgccccgtgag

SEQ ID NO: 5936236 - DNA, 25 bp, Homo sapien
cacacggaaccaaacaaccttacac

SEQ ID NO: 5936237 - DNA, 25 bp, Homo sapien
gagtcccgtagggtagctgctggat

SEQ ID NO: 5936238 - DNA, 25 bp, Homo sapien
acctccagcagggaacgccggcgcc

SEQ ID NO: 5936239 - DNA, 25 bp, Homo sapien
cgtagggtagctgctggatgcttgt

SEQ ID NO: 5936240 - DNA, 25 bp, Homo sapien
ctggcttggtcttgggttcctctgc

SEQ ID NO: 5936241 - DNA, 25 bp, Homo sapien
ctgtcacccgcacctatatcctaaa

SEQ ID NO: 5936242 - DNA, 25 bp, Homo sapien
tgtgcgcccaggggcctggggctgt

SEQ ID NO: 5936243 - DNA, 25 bp, Homo sapien
taatcactttaaaatgcccttaata

SEQ ID NO: 5936244 - DNA, 25 bp, Homo sapien
ctgctggatgcttgtagttccctct

SEQ ID NO: 5936245 - DNA, 25 bp, Homo sapien
gttcaagtagtaatgaggcttatgc

SEQ ID NO: 5936246 - DNA, 25 bp, Homo sapien
tgagcgggcaaggcagtggctcaga

SEQ ID NO: 5936247 - DNA, 25 bp, Homo sapien
cacacacacacacacacggaaccaa

SEQ ID NO: 5936248 - DNA, 25 bp, Homo sapien
tcatgctctggcggtagcgtttgac

SEQ ID NO: 5936249 - DNA, 25 bp, Homo sapien
ttcttcatccacaggcgataatcag

SEQ ID NO: 5936250 - DNA, 25 bp, Homo sapien
agtttatgagcgggcaaggcagtgg

SEQ ID NO: 5936251 - DNA, 25 bp, Homo sapien
tgtctgttagctggtagatctggtg

SEQ ID NO: 5936252 - DNA, 25 bp, Homo sapien
tctctgcaggattgtctcagtccgc

SEQ ID NO: 5936253 - DNA, 25 bp, Homo sapien
caggcgccaacgggatactcgcccg

SEQ ID NO: 5936254 - DNA, 25 bp, Homo sapien
ccccggtgcgaagttctctgattcc

SEQ ID NO: 5936255 - DNA, 25 bp, Homo sapien
aatgtgcaggtcccgaagcggcatc

SEQ ID NO: 5936256 - DNA, 25 bp, Homo sapien
tggagatgtgcgcccaggggcctgg

SEQ ID NO: 5936257 - DNA, 25 bp, Homo sapien
attgcacgttcctcgctaggttttg

SEQ ID NO: 5936258 - DNA, 25 bp, Homo sapien
gtagtaatgaggcttatgccccgtg

SEQ ID NO: 5936259 - DNA, 25 bp, Homo sapien
tgcacgttcctcgctaggttttgga

SEQ ID NO: 5936260 - DNA, 25 bp, Homo sapien
gggctgtgtgtgtctgctcctggga

SEQ ID NO: 5936261 - DNA, 25 bp, Homo sapien
atgccgtccttgtctttgtctgtta

SEQ ID NO: 5936262 - DNA, 25 bp, Homo sapien
ctccagcagggaacgccggcgccgg

SEQ ID NO: 5936263 - DNA, 25 bp, Homo sapien
tctggtgggccaatttctgaaatgt

SEQ ID NO: 5936264 - DNA, 25 bp, Homo sapien
gacattcacgtcttaaaatagggga

SEQ ID NO: 5936265 - DNA, 25 bp, Homo sapien
ggaaggtgacaatataatcacttta

SEQ ID NO: 5936266 - DNA, 25 bp, Homo sapien
tgacaatataatcactttaaaatgc

SEQ ID NO: 5936267 - DNA, 25 bp, Homo sapien
tgccccgtgagaaaccagtttatga

SEQ ID NO: 5936268 - DNA, 25 bp, Homo sapien
ccggtgcgaagttctctgattccgc

SEQ ID NO: 5936269 - DNA, 25 bp, Homo sapien
aatgttttttcttcatccacaggcg

SEQ ID NO: 5936270 - DNA, 25 bp, Homo sapien
tcgcccgactgttcaatgctgtcac

SEQ ID NO: 5936271 - DNA, 25 bp, Homo sapien
ggaactgtcgtctcatcagcgagtc

SEQ ID NO: 5936272 - DNA, 25 bp, Homo sapien
ccaggaatggatcaagagtctgggt

SEQ ID NO: 5936273 - DNA, 25 bp, Homo sapien
cttaatacaatatataacgtacaaa

SEQ ID NO: 5936274 - DNA, 25 bp, Homo sapien
tggaaagttcaagtagtaatgaggc

SEQ ID NO: 5936275 - DNA, 25 bp, Homo sapien
atcaagagtctgggtaggaactgtc

SEQ ID NO: 5936276 - DNA, 25 bp, Homo sapien
gccgtccttgtctttgtctgttagc

SEQ ID NO: 5936277 - DNA, 25 bp, Homo sapien
ggaccggaggacctccagcagggaa

SEQ ID NO: 5936278 - DNA, 25 bp, Homo sapien
tcaatgctgtcacccgcacctatat

SEQ ID NO: 5936279 - DNA, 25 bp, Homo sapien
gtttgacacgaatgtgggcttcgct

SEQ ID NO: 5936280 - DNA, 25 bp, Homo sapien
ctgcctcccctaggggcagccaggc

SEQ ID NO: 5936281 - DNA, 25 bp, Homo sapien
tcagtccgccccggtgcgaagttct

SEQ ID NO: 5936282 - DNA, 25 bp, Homo sapien
atccattgctgcgggaaccctggtt

SEQ ID NO: 5936283 - DNA, 25 bp, Homo sapien
aatgcccttaatacaatatataacg

SEQ ID NO: 5936284 - DNA, 25 bp, Homo sapien
tgattgctggcttgtagggggccag

SEQ ID NO: 5936285 - DNA, 25 bp, Homo sapien
cgccaacgggatactcgcccgactg

SEQ ID NO: 5936286 - DNA, 25 bp, Homo sapien
gactgttcaatgctgtcacccgcac

SEQ ID NO: 5936287 - DNA, 25 bp, Homo sapien
tataatcactttaaaatgcccttaa

SEQ ID NO: 5936288 - DNA, 25 bp, Homo sapien
gccggcgccggcggccatagccttg

SEQ ID NO: 5936289 - DNA, 25 bp, Homo sapien
accctggttcatgctctggcggtag

SEQ ID NO: 5936290 - DNA, 25 bp, Homo sapien
atcttgtttctgggagccatgccgt

SEQ ID NO: 5936291 - DNA, 25 bp, Homo sapien
caagagtctgggtaggaactgtcgt

SEQ ID NO: 5936292 - DNA, 25 bp, Homo sapien
gaaaccagtttatgagcgggcaagg

SEQ ID NO: 5936293 - DNA, 25 bp, Homo sapien
tgtgttctgctcgtccaggaatgga

SEQ ID NO: 5936294 - DNA, 25 bp, Homo sapien
agtggctcagacccctgcccggaga

SEQ ID NO: 5936295 - DNA, 25 bp, Homo sapien
cgggatactcgcccgactgttcaat

SEQ ID NO: 5936296 - DNA, 25 bp, Homo sapien
tttctgggagccatgccgtccttgt

SEQ ID NO: 5936297 - DNA, 25 bp, Homo sapien
cgggaccggaggacctccagcaggg

SEQ ID NO: 5936298 - DNA, 25 bp, Homo sapien
gcggtagcgtttgacacgaatgtgg

SEQ ID NO: 5936299 - DNA, 25 bp, Homo sapien
atactatagttacctttggctggac

SEQ ID NO: 5936300 - DNA, 25 bp, Homo sapien
ggcttgtagggggccagttgtgttc

SEQ ID NO: 5936301 - DNA, 25 bp, Homo sapien
ggtcccgaagcggcatccattgctg

SEQ ID NO: 5936302 - DNA, 25 bp, Homo sapien
agcaacaaacttaaatactatagtt

SEQ ID NO: 5936303 - DNA, 25 bp, Homo sapien
agcggcatccattgctgcgggaacc

SEQ ID NO: 5936304 - DNA, 25 bp, Homo sapien
agtctgggtaggaactgtcgtctca

SEQ ID NO: 5936305 - DNA, 25 bp, Homo sapien
ccaaacaaccttacaccttgctgag

SEQ ID NO: 5936306 - DNA, 25 bp, Homo sapien
atcaggcgctctccaccttacacac

SEQ ID NO: 5936307 - DNA, 25 bp, Homo sapien
ggattgtctcagtccgccccggtgc

SEQ ID NO: 5936308 - DNA, 25 bp, Homo sapien
aatgtgggcttcgctctgattgctg

SEQ ID NO: 5936309 - DNA, 25 bp, Homo sapien
tgtaagtctcggtttctggcatgag

SEQ ID NO: 5936310 - DNA, 25 bp, Homo sapien
tcatcagcgagtcccgtagggtagc

SEQ ID NO: 5936311 - DNA, 25 bp, Homo sapien
cacacacacggaaccaaacaacctt

SEQ ID NO: 5936312 - DNA, 25 bp, Homo sapien
aaatactatagttacctttggctgg

SEQ ID NO: 5936313 - DNA, 25 bp, Homo sapien
ttcctcgctaggttttggaaagttc

SEQ ID NO: 5936314 - DNA, 25 bp, Homo sapien
gcgtttgacacgaatgtgggcttcg

SEQ ID NO: 5936315 - DNA, 25 bp, Homo sapien
cgggcaaggcagtggctcagacccc

SEQ ID NO: 5936316 - DNA, 25 bp, Homo sapien
gagaaaccagtttatgagcgggcaa

SEQ ID NO: 5936317 - DNA, 25 bp, Homo sapien
cggcggccatagccttgagggctga

SEQ ID NO: 5936318 - DNA, 25 bp, Homo sapien
gcgataatcaggcgctctccacctt

SEQ ID NO: 5936319 - DNA, 25 bp, Homo sapien
gaatggatcaagagtctgggtagga

SEQ ID NO: 5936320 - DNA, 25 bp, Homo sapien
atttctgaaatgtgcaggtcccgaa

SEQ ID NO: 5936321 - DNA, 25 bp, Homo sapien
ctgttcaatgctgtcacccgcacct

SEQ ID NO: 5936322 - DNA, 25 bp, Homo sapien
gatgtgcgcccaggggcctggggct

SEQ ID NO: 5936323 - DNA, 25 bp, Homo sapien
tgcgcccaggggcctggggctgtgt

SEQ ID NO: 5936324 - DNA, 25 bp, Homo sapien
tggggctgtgtgtgtctgctcctgg

SEQ ID NO: 5936325 - DNA, 25 bp, Homo sapien
gggggccagttgtgttctgctcgtc

SEQ ID NO: 5936326 - DNA, 25 bp, Homo sapien
aggcgataatcaggcgctctccacc

SEQ ID NO: 5936327 - DNA, 25 bp, Homo sapien
gggaacgccggcgccggcggccata

SEQ ID NO: 5936328 - DNA, 25 bp, Homo sapien
tgttttttcttcatccacaggcgat

SEQ ID NO: 5936329 - DNA, 25 bp, Homo sapien
gactccacagtccgggaccggagga

SEQ ID NO: 5936330 - DNA, 25 bp, Homo sapien
tctttgtctgttagctggtagatct

SEQ ID NO: 5936331 - DNA, 25 bp, Homo sapien
agccatgccgtccttgtctttgtct

SEQ ID NO: 5936332 - DNA, 25 bp, Homo sapien
cacgtcttaaaataggggaaggtga

SEQ ID NO: 5936333 - DNA, 25 bp, Homo sapien
taatcaggcgctctccaccttacac

SEQ ID NO: 5936334 - DNA, 25 bp, Homo sapien
cacacacacacacacacacacggaa

SEQ ID NO: 5936335 - DNA, 25 bp, Homo sapien
caggcagatctctgcaggattgtct

SEQ ID NO: 5936336 - DNA, 25 bp, Homo sapien
agagtatcagcctgtaagtctcggt

SEQ ID NO: 5936337 - DNA, 25 bp, Homo sapien
caacaagcattgcacgttcctcgct

SEQ ID NO: 5936338 - DNA, 25 bp, Homo sapien
tggctcagacccctgcccggagagt

SEQ ID NO: 5936339 - DNA, 25 bp, Homo sapien
acaatatataacgtacaaaaatatc

SEQ ID NO: 5936340 - DNA, 25 bp, Homo sapien
ggcttatgccccgtgagaaaccagt

SEQ ID NO: 5936341 - DNA, 25 bp, Homo sapien
cttgtagggggccagttgtgttctg

SEQ ID NO: 5936342 - DNA, 25 bp, Homo sapien
ggaggactccacagtccgggaccgg

SEQ ID NO: 5936343 - DNA, 25 bp, Homo sapien
cgtctcatcagcgagtcccgtaggg

SEQ ID NO: 5936344 - DNA, 25 bp, Homo sapien
gctctggcggtagcgtttgacacga

SEQ ID NO: 5936345 - DNA, 25 bp, Homo sapien
gaggcttatgccccgtgagaaacca

SEQ ID NO: 5936346 - DNA, 25 bp, Homo sapien
gttctctgattccgcaggcgccaac

SEQ ID NO: 5936347 - DNA, 25 bp, Homo sapien
caggggcctggggctgtgtgtgtct

SEQ ID NO: 5936348 - DNA, 25 bp, Homo sapien
cacctatatcctaaagagtctggag

SEQ ID NO: 5936349 - DNA, 25 bp, Homo sapien
tagggggccagttgtgttctgctcg

SEQ ID NO: 5936350 - DNA, 25 bp, Homo sapien
ccgaagcggcatccattgctgcggg

SEQ ID NO: 5936351 - DNA, 25 bp, Homo sapien
tgtgtgtgtctgctcctgggaggac

SEQ ID NO: 5936352 - DNA, 25 bp, Homo sapien
tcttaaaataggggaaggtgacaat

SEQ ID NO: 5936353 - DNA, 25 bp, Homo sapien
aaaccttgacagcaacaaacttaaa

SEQ ID NO: 5936354 - DNA, 25 bp, Homo sapien
cttgacagcaacaaacttaaatact

SEQ ID NO: 5936355 - DNA, 25 bp, Homo sapien
gcattgcacgttcctcgctaggttt

SEQ ID NO: 5936356 - DNA, 25 bp, Homo sapien
taatacaatatataacgtacaaaaa

SEQ ID NO: 5936357 - DNA, 25 bp, Homo sapien
agtctcggtttctggcatgagcctg

SEQ ID NO: 5936358 - DNA, 25 bp, Homo sapien
tgggtaggaactgtcgtctcatcag

SEQ ID NO: 5936359 - DNA, 25 bp, Homo sapien
gtgagaaaccagtttatgagcgggc

SEQ ID NO: 5936360 - DNA, 25 bp, Homo sapien
cttcgctctgattgctggcttgtag

SEQ ID NO: 5936361 - DNA, 25 bp, Homo sapien
cccttaatacaatatataacgtaca

SEQ ID NO: 5936362 - DNA, 25 bp, Homo sapien
gctaggttttggaaagttcaagtag

SEQ ID NO: 5936363 - DNA, 25 bp, Homo sapien
caggattgtctcagtccgccccggt

SEQ ID NO: 5936364 - DNA, 25 bp, Homo sapien
aaacaaccttacaccttgctgagac

SEQ ID NO: 5936365 - DNA, 25 bp, Homo sapien
caacaaacttaaatactatagttac

SEQ ID NO: 5936366 - DNA, 25 bp, Homo sapien
tgtctttgtctgttagctggtagat

SEQ ID NO: 5936367 - DNA, 25 bp, Homo sapien
tgggcttcgctctgattgctggctt

SEQ ID NO: 5936368 - DNA, 25 bp, Homo sapien
ggcgctctccaccttacacacacac

SEQ ID NO: 5936369 - DNA, 25 bp, Homo sapien
tgcttgtagttccctcttcccacga

SEQ ID NO: 5936370 - DNA, 25 bp, Homo sapien
cacacacacacacggaaccaaacaa

SEQ ID NO: 5936371 - DNA, 25 bp, Homo sapien
cacacacacacggaaccaaacaacc

SEQ ID NO: 5936372 - DNA, 25 bp, Homo sapien
cgctctccaccttacacacacacac

SEQ ID NO: 5936373 - DNA, 25 bp, Homo sapien
gggccagttgtgttctgctcgtcca

SEQ ID NO: 5936374 - DNA, 25 bp, Homo sapien
agctgctggatgcttgtagttccct

SEQ ID NO: 5936375 - DNA, 25 bp, Homo sapien
ggcttggtcttgggttcctctgcct

SEQ ID NO: 5936376 - DNA, 25 bp, Homo sapien
acgtacaaaaatatctctatatatt

SEQ ID NO: 5936377 - DNA, 25 bp, Homo sapien
ggggcctggggctgtgtgtgtctgc

SEQ ID NO: 5936378 - DNA, 25 bp, Homo sapien
tataacgtacaaaaatatctctata

SEQ ID NO: 5936379 - DNA, 25 bp, Homo sapien
cactttaaaatgcccttaatacaat

SEQ ID NO: 5936380 - DNA, 25 bp, Homo sapien
ttaaaataggggaaggtgacaatat

SEQ ID NO: 5936381 - DNA, 25 bp, Homo sapien
ttgagggctgatcttgtttctggga

SEQ ID NO: 5936382 - DNA, 25 bp, Homo sapien
gctcagacccctgcccggagagtat

SEQ ID NO: 5936383 - DNA, 25 bp, Homo sapien
gcccggagagtatcagcctgtaagt

SEQ ID NO: 5936384 - DNA, 25 bp, Homo sapien
aaccaaacaaccttacaccttgctg

SEQ ID NO: 5936385 - DNA, 25 bp, Homo sapien
ccagtttatgagcgggcaaggcagt

SEQ ID NO: 5936386 - DNA, 25 bp, Homo sapien
cacgaatgtgggcttcgctctgatt

SEQ ID NO: 5936387 - DNA, 25 bp, Homo sapien
cccgtagggtagctgctggatgctt

SEQ ID NO: 5936388 - DNA, 25 bp, Homo sapien
cccgcacctatatcctaaagagtct

SEQ ID NO: 5936389 - DNA, 25 bp, Homo sapien
tggacaacaagcattgcacgttcct

SEQ ID NO: 5936390 - DNA, 25 bp, Homo sapien
cgtccttgtctttgtctgttagctg

SEQ ID NO: 5936391 - DNA, 25 bp, Homo sapien
aaaaaccttgacagcaacaaactta

SEQ ID NO: 5936392 - DNA, 25 bp, Homo sapien
gctgatcttgtttctgggagccatg

SEQ ID NO: 5936393 - DNA, 25 bp, Homo sapien
tctcagtccgccccggtgcgaagtt

SEQ ID NO: 5936394 - DNA, 25 bp, Homo sapien
gcgccggcggccatagccttgaggg

SEQ ID NO: 5936395 - DNA, 25 bp, Homo sapien
tatcctaaagagtctggagatgtgc

SEQ ID NO: 5936396 - DNA, 25 bp, Homo sapien
cttacacacacacacacacacacac

SEQ ID NO: 5936397 - DNA, 25 bp, Homo sapien
ttttcttcatccacaggcgataatc

SEQ ID NO: 5936398 - DNA, 25 bp, Homo sapien
tgctgtcacccgcacctatatccta

SEQ ID NO: 5936399 - DNA, 25 bp, Homo sapien
agagtctggagatgtgcgcccaggg

SEQ ID NO: 5936400 - DNA, 25 bp, Homo sapien
tatataacgtacaaaaatatctcta

SEQ ID NO: 5936401 - DNA, 25 bp, Homo sapien
ggcagccaggcagatctctgcagga

SEQ ID NO: 5936402 - DNA, 25 bp, Homo sapien
atcagcgagtcccgtagggtagctg

SEQ ID NO: 5936403 - DNA, 25 bp, Homo sapien
acagtccgggaccggaggacctcca

SEQ ID NO: 5936404 - DNA, 25 bp, Homo sapien
taatgaggcttatgccccgtgagaa

SEQ ID NO: 5936405 - DNA, 25 bp, Homo sapien
tcgctctgattgctggcttgtaggg

SEQ ID NO: 5936406 - DNA, 25 bp, Homo sapien
tacaaaaaaaaaaaccttgacagca

SEQ ID NO: 5936407 - DNA, 25 bp, Homo sapien
cttcatccacaggcgataatcaggc

SEQ ID NO: 5936408 - DNA, 25 bp, Homo sapien
ggcagatctctgcaggattgtctca

SEQ ID NO: 5936409 - DNA, 25 bp, Homo sapien
ctggcttgtagggggccagttgtgt

SEQ ID NO: 5936410 - DNA, 25 bp, Homo sapien
tcctaaagagtctggagatgtgcgc

SEQ ID NO: 5936411 - DNA, 25 bp, Homo sapien
tccttgtctttgtctgttagctggt

SEQ ID NO: 5936412 - DNA, 25 bp, Homo sapien
cctaggggcagccaggcagatctct

SEQ ID NO: 5936413 - DNA, 25 bp, Homo sapien
tctgggagccatgccgtccttgtct

SEQ ID NO: 5936414 - DNA, 25 bp, Homo sapien
gtcttgggttcctctgcctccccta

SEQ ID NO: 5936415 - DNA, 25 bp, Homo sapien
agtccgccccggtgcgaagttctct

SEQ ID NO: 5936416 - DNA, 25 bp, Homo sapien
tggtcttgggttcctctgcctcccc

SEQ ID NO: 5936417 - DNA, 25 bp, Homo sapien
tgtgtgtctgctcctgggaggactc

SEQ ID NO: 5936418 - DNA, 25 bp, Homo sapien
cagcgagtcccgtagggtagctgct

SEQ ID NO: 5936419 - DNA, 25 bp, Homo sapien
ctttaaaatgcccttaatacaatat

SEQ ID NO: 5936420 - DNA, 25 bp, Homo sapien
ccttacaccttgctgagacattcac

SEQ ID NO: 5936421 - DNA, 25 bp, Homo sapien
gaagcggcatccattgctgcgggaa

SEQ ID NO: 5936422 - DNA, 25 bp, Homo sapien
tctgattccgcaggcgccaacggga

SEQ ID NO: 5936423 - DNA, 25 bp, Homo sapien
aataggggaaggtgacaatataatc

SEQ ID NO: 5936424 - DNA, 25 bp, Homo sapien
tttggctggacaacaagcattgcac

SEQ ID NO: 5936425 - DNA, 25 bp, Homo sapien
tctgcaggattgtctcagtccgccc

SEQ ID NO: 5936426 - DNA, 25 bp, Homo sapien
gtcccgtagggtagctgctggatgc

SEQ ID NO: 5936427 - DNA, 25 bp, Homo sapien
tttatgagcgggcaaggcagtggct

SEQ ID NO: 5936428 - DNA, 25 bp, Homo sapien
tacctttggctggacaacaagcatt

SEQ ID NO: 5936429 - DNA, 25 bp, Homo sapien
caggtcccgaagcggcatccattgc

SEQ ID NO: 5936430 - DNA, 25 bp, Homo sapien
gatctggtgggccaatttctgaaat

SEQ ID NO: 5936431 - DNA, 25 bp, Homo sapien
gacacgaatgtgggcttcgctctga

SEQ ID NO: 5936432 - DNA, 25 bp, Homo sapien
attgctggcttgtagggggccagtt

SEQ ID NO: 5936433 - DNA, 25 bp, Homo sapien
ggccatagccttgagggctgatctt

SEQ ID NO: 5936434 - DNA, 25 bp, Homo sapien
acacaatgttttttcttcatccaca

SEQ ID NO: 5936435 - DNA, 25 bp, Homo sapien
gttcaatgctgtcacccgcacctat

SEQ ID NO: 5936436 - DNA, 25 bp, Homo sapien
gctctgattgctggcttgtaggggg

SEQ ID NO: 5936437 - DNA, 25 bp, Homo sapien
taggttttggaaagttcaagtagta

SEQ ID NO: 5936438 - DNA, 25 bp, Homo sapien
gttacctttggctggacaacaagca

SEQ ID NO: 5936439 - DNA, 25 bp, Homo sapien
aaacacaatgttttttcttcatcca

SEQ ID NO: 5936440 - DNA, 25 bp, Homo sapien
cctttggctggacaacaagcattgc

SEQ ID NO: 5936441 - DNA, 25 bp, Homo sapien
ctcccctaggggcagccaggcagat

SEQ ID NO: 5936442 - DNA, 25 bp, Homo sapien
aaaataggggaaggtgacaatataa

SEQ ID NO: 5936443 - DNA, 25 bp, Homo sapien
gctgtgtgtgtctgctcctgggagg

SEQ ID NO: 5936444 - DNA, 25 bp, Homo sapien
cgccccggtgcgaagttctctgatt

SEQ ID NO: 5936445 - DNA, 25 bp, Homo sapien
gacaacaagcattgcacgttcctcg

SEQ ID NO: 5936446 - DNA, 25 bp, Homo sapien
tgtagggggccagttgtgttctgct

SEQ ID NO: 5936447 - DNA, 25 bp, Homo sapien
ccctgcccggagagtatcagcctgt

SEQ ID NO: 5936448 - DNA, 25 bp, Homo sapien
tatgagcgggcaaggcagtggctca

SEQ ID NO: 5936449 - DNA, 25 bp, Homo sapien
ttacaccttgctgagacattcacgt

SEQ ID NO: 5936450 - DNA, 25 bp, Homo sapien
tggatgcttgtagttccctcttccc

SEQ ID NO: 5936451 - DNA, 25 bp, Homo sapien
cttgctgagacattcacgtcttaaa

SEQ ID NO: 5936452 - DNA, 25 bp, Homo sapien
ggaaccaaacaaccttacaccttgc

SEQ ID NO: 5936453 - DNA, 25 bp, Homo sapien
tgcccttaatacaatatataacgta

SEQ ID NO: 5936454 - DNA, 25 bp, Homo sapien
ccggagagtatcagcctgtaagtct

SEQ ID NO: 5936455 - DNA, 25 bp, Homo sapien
accttgacagcaacaaacttaaata

SEQ ID NO: 5936456 - DNA, 25 bp, Homo sapien
tggctggacaacaagcattgcacgt

SEQ ID NO: 5936457 - DNA, 25 bp, Homo sapien
acaccttgctgagacattcacgtct

SEQ ID NO: 5936458 - DNA, 25 bp, Homo sapien
ggatcaagagtctgggtaggaactg

SEQ ID NO: 5936459 - DNA, 25 bp, Homo sapien
ccaacgggatactcgcccgactgtt

SEQ ID NO: 5936460 - DNA, 25 bp, Homo sapien
aaccagtttatgagcgggcaaggca

SEQ ID NO: 5936461 - DNA, 25 bp, Homo sapien
caggcgctctccaccttacacacac

SEQ ID NO: 5936462 - DNA, 25 bp, Homo sapien
cagccaggcagatctctgcaggatt

SEQ ID NO: 5936463 - DNA, 25 bp, Homo sapien
tgtgcaggtcccgaagcggcatcca

SEQ ID NO: 5936464 - DNA, 25 bp, Homo sapien
tcatccacaggcgataatcaggcgc

SEQ ID NO: 5936465 - DNA, 25 bp, Homo sapien
aatgctgtcacccgcacctatatcc

SEQ ID NO: 5936466 - DNA, 25 bp, Homo sapien
ttctgctcgtccaggaatggatcaa

SEQ ID NO: 5936467 - DNA, 25 bp, Homo sapien
ccgactgttcaatgctgtcacccgc

SEQ ID NO: 5936468 - DNA, 25 bp, Homo sapien
gaacgccggcgccggcggccatagc

SEQ ID NO: 5936469 - DNA, 25 bp, Homo sapien
gctcgtccaggaatggatcaagagt

SEQ ID NO: 5936470 - DNA, 25 bp, Homo sapien
actatagttacctttggctggacaa

SEQ ID NO: 5936471 - DNA, 25 bp, Homo sapien
ttaaatactatagttacctttggct

SEQ ID NO: 5936472 - DNA, 25 bp, Homo sapien
ctctccaccttacacacacacacac

SEQ ID NO: 5936473 - DNA, 25 bp, Homo sapien
agctggtagatctggtgggccaatt

SEQ ID NO: 5936474 - DNA, 25 bp, Homo sapien
ggaaacacaatgttttttcttcatc

SEQ ID NO: 5936475 - DNA, 25 bp, Homo sapien
ttctgaaatgtgcaggtcccgaagc

SEQ ID NO: 5936476 - DNA, 25 bp, Homo sapien
ggagccatgccgtccttgtctttgt

SEQ ID NO: 5936477 - DNA, 25 bp, Homo sapien
cacgttcctcgctaggttttggaaa

SEQ ID NO: 5936478 - DNA, 25 bp, Homo sapien
gcatccattgctgcgggaaccctgg

SEQ ID NO: 5936479 - DNA, 25 bp, Homo sapien
ctccaccttacacacacacacacac

SEQ ID NO: 5936480 - DNA, 25 bp, Homo sapien
aatataatcactttaaaatgccctt

SEQ ID NO: 5936481 - DNA, 25 bp, Homo sapien
ccaccttacacacacacacacacac

SEQ ID NO: 5936482 - DNA, 25 bp, Homo sapien
caatttctgaaatgtgcaggtcccg

SEQ ID NO: 5936483 - DNA, 25 bp, Homo sapien
cagatctctgcaggattgtctcagt

SEQ ID NO: 5936484 - DNA, 25 bp, Homo sapien
taagtctcggtttctggcatgagcc

SEQ ID NO: 5936485 - DNA, 25 bp, Homo sapien
tgcaggattgtctcagtccgccccg

SEQ ID NO: 5936486 - DNA, 25 bp, Homo sapien
accttacacacacacacacacacac

SEQ ID NO: 5936487 - DNA, 25 bp, Homo sapien
gttgtgttctgctcgtccaggaatg

SEQ ID NO: 5936488 - DNA, 25 bp, Homo sapien
ggggcagccaggcagatctctgcag

SEQ ID NO: 5936489 - DNA, 25 bp, Homo sapien
cttggtcttgggttcctctgcctcc

SEQ ID NO: 5936490 - DNA, 25 bp, Homo sapien
tgcgaagttctctgattccgcaggc

SEQ ID NO: 5936491 - DNA, 25 bp, Homo sapien
gggccaatttctgaaatgtgcaggt

SEQ ID NO: 5936492 - DNA, 25 bp, Homo sapien
ccagcagggaacgccggcgccggcg

SEQ ID NO: 5936493 - DNA, 25 bp, Homo sapien
atcactttaaaatgcccttaataca

SEQ ID NO: 5936494 - DNA, 25 bp, Homo sapien
agtatcagcctgtaagtctcggttt

SEQ ID NO: 5936495 - DNA, 25 bp, Homo sapien
atactcgcccgactgttcaatgctg

SEQ ID NO: 5936496 - DNA, 25 bp, Homo sapien
cacccgcacctatatcctaaagagt

SEQ ID NO: 5936497 - DNA, 25 bp, Homo sapien
gtgggccaatttctgaaatgtgcag

SEQ ID NO: 5936498 - DNA, 25 bp, Homo sapien
acagcaacaaacttaaatactatag

SEQ ID NO: 5936499 - DNA, 25 bp, Homo sapien
atggatcaagagtctgggtaggaac

SEQ ID NO: 5936500 - DNA, 25 bp, Homo sapien
tcgtccaggaatggatcaagagtct

SEQ ID NO: 5936501 - DNA, 25 bp, Homo sapien
tctgggtaggaactgtcgtctcatc

SEQ ID NO: 5936502 - DNA, 25 bp, Homo sapien
tgacagcaacaaacttaaatactat

SEQ ID NO: 5936503 - DNA, 25 bp, Homo sapien
cgcaggcgccaacgggatactcgcc

SEQ ID NO: 5936504 - DNA, 25 bp, Homo sapien
tggtgggccaatttctgaaatgtgc

SEQ ID NO: 5936505 - DNA, 25 bp, Homo sapien
tctcatcagcgagtcccgtagggta

SEQ ID NO: 5936506 - DNA, 25 bp, Homo sapien
tctgctcctgggaggactccacagt

SEQ ID NO: 5936507 - DNA, 25 bp, Homo sapien
aggaatggatcaagagtctgggtag

SEQ ID NO: 5936508 - DNA, 25 bp, Homo sapien
aaagagtctggagatgtgcgcccag

SEQ ID NO: 5936509 - DNA, 25 bp, Homo sapien
cacacacacacacacacacacacgg

SEQ ID NO: 5936510 - DNA, 25 bp, Homo sapien
agccttgagggctgatcttgtttct

SEQ ID NO: 5936511 - DNA, 25 bp, Homo sapien
ctcctgggaggactccacagtccgg

SEQ ID NO: 5936512 - DNA, 25 bp, Homo sapien
gccagttgtgttctgctcgtccagg

SEQ ID NO: 5936513 - DNA, 25 bp, Homo sapien
tgggaggactccacagtccgggacc

SEQ ID NO: 5936514 - DNA, 25 bp, Homo sapien
gccaggcagatctctgcaggattgt

SEQ ID NO: 5936515 - DNA, 25 bp, Homo sapien
ggtgcgaagttctctgattccgcag

SEQ ID NO: 5936516 - DNA, 25 bp, Homo sapien
tgttagctggtagatctggtgggcc

SEQ ID NO: 5936517 - DNA, 25 bp, Homo sapien
tagggtagctgctggatgcttgtag

SEQ ID NO: 5936518 - DNA, 25 bp, Homo sapien
gataatcaggcgctctccaccttac

SEQ ID NO: 5936519 - DNA, 25 bp, Homo sapien
tttggaaagttcaagtagtaatgag

SEQ ID NO: 5936520 - DNA, 25 bp, Homo sapien
cgaagttctctgattccgcaggcgc

SEQ ID NO: 5936521 - DNA, 25 bp, Homo sapien
tctcggtttctggcatgagcctggc

SEQ ID NO: 5936522 - DNA, 25 bp, Homo sapien
cttgtttctgggagccatgccgtcc

SEQ ID NO: 5936523 - DNA, 25 bp, Homo sapien
ccacaggcgataatcaggcgctctc

SEQ ID NO: 5936524 - DNA, 25 bp, Homo sapien
gttcatgctctggcggtagcgtttg

SEQ ID NO: 5936525 - DNA, 25 bp, Homo sapien
acaggcgataatcaggcgctctcca

SEQ ID NO: 5936526 - DNA, 25 bp, Homo sapien
agcctgtaagtctcggtttctggca

SEQ ID NO: 5936527 - DNA, 25 bp, Homo sapien
tctgttagctggtagatctggtggg

SEQ ID NO: 5936528 - DNA, 25 bp, Homo sapien
acccctgcccggagagtatcagcct

SEQ ID NO: 5936529 - DNA, 25 bp, Homo sapien
gcccgactgttcaatgctgtcaccc

SEQ ID NO: 5936530 - DNA, 25 bp, Homo sapien
gtagctgctggatgcttgtagttcc

SEQ ID NO: 5936531 - DNA, 25 bp, Homo sapien
tgtttctgggagccatgccgtcctt

SEQ ID NO: 5936532 - DNA, 25 bp, Homo sapien
gaaagttcaagtagtaatgaggctt

SEQ ID NO: 5936533 - DNA, 25 bp, Homo sapien
ccatgccgtccttgtctttgtctgt

SEQ ID NO: 5936534 - DNA, 25 bp, Homo sapien
tccgccccggtgcgaagttctctga

SEQ ID NO: 5936535 - DNA, 25 bp, Homo sapien
aagcattgcacgttcctcgctaggt

SEQ ID NO: 5936536 - DNA, 25 bp, Homo sapien
taacgtacaaaaatatctctatata

SEQ ID NO: 5936537 - DNA, 25 bp, Homo sapien
ctgagacattcacgtcttaaaatag

SEQ ID NO: 5936538 - DNA, 25 bp, Homo sapien
cacacacacacacacacacggaacc

SEQ ID NO: 5936539 - DNA, 25 bp, Homo sapien
tacacacacacacacacacacacac

SEQ ID NO: 5936540 - DNA, 25 bp, Homo sapien
ggtaggaactgtcgtctcatcagcg

SEQ ID NO: 5936541 - DNA, 25 bp, Homo sapien
ggatactcgcccgactgttcaatgc

SEQ ID NO: 5936542 - DNA, 25 bp, Homo sapien
tatcagcctgtaagtctcggtttct

SEQ ID NO: 5936543 - DNA, 25 bp, Homo sapien
gcgggaaccctggttcatgctctgg

SEQ ID NO: 5936544 - DNA, 25 bp, Homo sapien
gccaatttctgaaatgtgcaggtcc

SEQ ID NO: 5936545 - DNA, 25 bp, Homo sapien
cacacacacacacacacacacacac

SEQ ID NO: 5936546 - DNA, 25 bp, Homo sapien
tcagacccctgcccggagagtatca

SEQ ID NO: 5936547 - DNA, 25 bp, Homo sapien
tctggagatgtgcgcccaggggcct

SEQ ID NO: 5936548 - DNA, 25 bp, Homo sapien
accggaggacctccagcagggaacg

SEQ ID NO: 5936549 - DNA, 25 bp, Homo sapien
ggtagatctggtgggccaatttctg

SEQ ID NO: 5936550 - DNA, 25 bp, Homo sapien
ccccgtgagaaaccagtttatgagc

SEQ ID NO: 5936551 - DNA, 25 bp, Homo sapien
tgcaggtcccgaagcggcatccatt

SEQ ID NO: 5936552 - DNA, 25 bp, Homo sapien
tatatcctaaagagtctggagatgt

SEQ ID NO: 5936553 - DNA, 25 bp, Homo sapien
attgctgcgggaaccctggttcatg

SEQ ID NO: 5936554 - DNA, 25 bp, Homo sapien
ttttttcttcatccacaggcgataa

SEQ ID NO: 5936555 - DNA, 25 bp, Homo sapien
aagttcaagtagtaatgaggcttat

SEQ ID NO: 5936556 - DNA, 25 bp, Homo sapien
ggcgccaacgggatactcgcccgac

SEQ ID NO: 5936557 - DNA, 25 bp, Homo sapien
cggaggacctccagcagggaacgcc

SEQ ID NO: 5936558 - DNA, 25 bp, Homo sapien
acaatataatcactttaaaatgccc

SEQ ID NO: 5936559 - DNA, 25 bp, Homo sapien
tctggcggtagcgtttgacacgaat

SEQ ID NO: 5936560 - DNA, 25 bp, Homo sapien
cccaggggcctggggctgtgtgtgt

SEQ ID NO: 5936561 - DNA, 25 bp, Homo sapien
gatctctgcaggattgtctcagtcc

SEQ ID NO: 5936562 - DNA, 25 bp, Homo sapien
cagttgtgttctgctcgtccaggaa

SEQ ID NO: 5936563 - DNA, 25 bp, Homo sapien
ggcttcgctctgattgctggcttgt

SEQ ID NO: 5936564 - DNA, 25 bp, Homo sapien
ggagagtatcagcctgtaagtctcg

SEQ ID NO: 5936565 - DNA, 25 bp, Homo sapien
tcggtttctggcatgagcctggctt

SEQ ID NO: 5936566 - DNA, 25 bp, Homo sapien
atgaggcttatgccccgtgagaaac

SEQ ID NO: 5936567 - DNA, 25 bp, Homo sapien
ggtgacaatataatcactttaaaat

SEQ ID NO: 5936568 - DNA, 25 bp, Homo sapien
cacacacacacacacggaaccaaac

SEQ ID NO: 5936569 - DNA, 25 bp, Homo sapien
atgctctggcggtagcgtttgacac

SEQ ID NO: 5936570 - DNA, 25 bp, Homo sapien
acaatgttttttcttcatccacagg

SEQ ID NO: 5936571 - DNA, 25 bp, Homo sapien
gggaaccctggttcatgctctggcg

SEQ ID NO: 5936572 - DNA, 25 bp, Homo sapien
tgtagttccctcttcccacgactta

SEQ ID NO: 5936573 - DNA, 25 bp, Homo sapien
tccgcaggcgccaacgggatactcg

SEQ ID NO: 5936574 - DNA, 25 bp, Homo sapien
aactgtcgtctcatcagcgagtccc

SEQ ID NO: 5936575 - DNA, 25 bp, Homo sapien
tcccgaagcggcatccattgctgcg

SEQ ID NO: 5936576 - DNA, 25 bp, Homo sapien
ctgctcgtccaggaatggatcaaga

SEQ ID NO: 5936577 - DNA, 25 bp, Homo sapien
cgcacctatatcctaaagagtctgg

SEQ ID NO: 5936578 - DNA, 25 bp, Homo sapien
taggggaaggtgacaatataatcac

SEQ ID NO: 5936579 - DNA, 25 bp, Homo sapien
ctgcccggagagtatcagcctgtaa

SEQ ID NO: 5936580 - DNA, 25 bp, Homo sapien
gtccaggaatggatcaagagtctgg

SEQ ID NO: 5936581 - DNA, 25 bp, Homo sapien
tctggcatgagcctggcttggtctt

SEQ ID NO: 5936582 - DNA, 25 bp, Homo sapien
tagttacctttggctggacaacaag

SEQ ID NO: 5936583 - DNA, 25 bp, Homo sapien
agacccctgcccggagagtatcagc

SEQ ID NO: 5936584 - DNA, 25 bp, Homo sapien
aaggtgacaatataatcactttaaa

SEQ ID NO: 5936585 - DNA, 25 bp, Homo sapien
caaggcagtggctcagacccctgcc

SEQ ID NO: 5936586 - DNA, 25 bp, Homo sapien
ggggaaggtgacaatataatcactt

SEQ ID NO: 5936587 - DNA, 25 bp, Homo sapien
aaaatgcccttaatacaatatataa

SEQ ID NO: 5936588 - DNA, 25 bp, Homo sapien
gttttggaaagttcaagtagtaatg

SEQ ID NO: 5936589 - DNA, 25 bp, Homo sapien
gagcctggcttggtcttgggttcct

SEQ ID NO: 5936590 - DNA, 25 bp, Homo sapien
tgggagccatgccgtccttgtcttt

SEQ ID NO: 5936591 - DNA, 25 bp, Homo sapien
cattcacgtcttaaaataggggaag

SEQ ID NO: 5936592 - DNA, 25 bp, Homo sapien
cctcgctaggttttggaaagttcaa

SEQ ID NO: 5936593 - DNA, 25 bp, Homo sapien
ctccacagtccgggaccggaggacc

SEQ ID NO: 5936594 - DNA, 25 bp, Homo sapien
gggtagctgctggatgcttgtagtt

SEQ ID NO: 5936595 - DNA, 25 bp, Homo sapien
gagatgtgcgcccaggggcctgggg

SEQ ID NO: 5936596 - DNA, 25 bp, Homo sapien
gcagtggctcagacccctgcccgga

SEQ ID NO: 5936597 - DNA, 25 bp, Homo sapien
ttgacacgaatgtgggcttcgctct

SEQ ID NO: 5936598 - DNA, 25 bp, Homo sapien
gtcacccgcacctatatcctaaaga

SEQ ID NO: 5936599 - DNA, 25 bp, Homo sapien
tttctggcatgagcctggcttggtc

SEQ ID NO: 5936600 - DNA, 25 bp, Homo sapien
acaagcattgcacgttcctcgctag

SEQ ID NO: 5936601 - DNA, 25 bp, Homo sapien
ccttgagggctgatcttgtttctgg

SEQ ID NO: 5936602 - DNA, 25 bp, Homo sapien
cctggggctgtgtgtgtctgctcct

SEQ ID NO: 5936603 - DNA, 25 bp, Homo sapien
gcatgagcctggcttggtcttgggt

SEQ ID NO: 5936604 - DNA, 25 bp, Homo sapien
tgtctcagtccgccccggtgcgaag

SEQ ID NO: 5936605 - DNA, 25 bp, Homo sapien
attgtctcagtccgccccggtgcga

SEQ ID NO: 5936606 - DNA, 25 bp, Homo sapien
agagtctgggtaggaactgtcgtct

SEQ ID NO: 5936607 - DNA, 25 bp, Homo sapien
tcaagtagtaatgaggcttatgccc

SEQ ID NO: 5936608 - DNA, 25 bp, Homo sapien
tggcggtagcgtttgacacgaatgt

SEQ ID NO: 5936609 - DNA, 25 bp, Homo sapien
ctgtcgtctcatcagcgagtcccgt

SEQ ID NO: 5936610 - DNA, 25 bp, Homo sapien
cggcgccggcggccatagccttgag

SEQ ID NO: 5936611 - DNA, 25 bp, Homo sapien
cggcatccattgctgcgggaaccct

SEQ ID NO: 5936612 - DNA, 25 bp, Homo sapien
gaccgaaagctcgagtcgagttctg

SEQ ID NO: 5936613 - DNA, 25 bp, Homo sapien
tagctcatttacatttggagaccct

SEQ ID NO: 5936614 - DNA, 25 bp, Homo sapien
gagtgaggtttacggaggtgcccag

SEQ ID NO: 5936615 - DNA, 25 bp, Homo sapien
gagtttcctaccagttcactccagt

SEQ ID NO: 5936616 - DNA, 25 bp, Homo sapien
ctggccattgccatgtttattcgat

SEQ ID NO: 5936617 - DNA, 25 bp, Homo sapien
ttaaaatcactaacattatattgca

SEQ ID NO: 5936618 - DNA, 25 bp, Homo sapien
tgcaccttcctcctgaactccagcc

SEQ ID NO: 5936619 - DNA, 25 bp, Homo sapien
agaaactttgctacacaacaaaaag

SEQ ID NO: 5936620 - DNA, 25 bp, Homo sapien
cgaccgagtgagcacagaggggagt

SEQ ID NO: 5936621 - DNA, 25 bp, Homo sapien
cgaagatgatggaagtgagtctgaa

SEQ ID NO: 5936622 - DNA, 25 bp, Homo sapien
attctcccagtccacacccattgcc

SEQ ID NO: 5936623 - DNA, 25 bp, Homo sapien
tgccatgtttattcgatggaaaaaa

SEQ ID NO: 5936624 - DNA, 25 bp, Homo sapien
cttgtgtttctaggtgaggagtttc

SEQ ID NO: 5936625 - DNA, 25 bp, Homo sapien
actgtacacaccttagttacttcat

SEQ ID NO: 5936626 - DNA, 25 bp, Homo sapien
ccatggtagcgctcaaagccctaat

SEQ ID NO: 5936627 - DNA, 25 bp, Homo sapien
gttggtgtgtttccgggatgtctta

SEQ ID NO: 5936628 - DNA, 25 bp, Homo sapien
aaggctacagcagaaaagggttcga

SEQ ID NO: 5936629 - DNA, 25 bp, Homo sapien
cagcctgtggcagtaaagagaaact

SEQ ID NO: 5936630 - DNA, 25 bp, Homo sapien
tccgttggcttgtgtttctaggtga

SEQ ID NO: 5936631 - DNA, 25 bp, Homo sapien
gaaaggctacagcagaaaagggttc

SEQ ID NO: 5936632 - DNA, 25 bp, Homo sapien
tgggaagactccgaggaaagggaag

SEQ ID NO: 5936633 - DNA, 25 bp, Homo sapien
aaagccctaatggaagtttagctca

SEQ ID NO: 5936634 - DNA, 25 bp, Homo sapien
tttctcttcagttggtgtgtttccg

SEQ ID NO: 5936635 - DNA, 25 bp, Homo sapien
agccctattctctgcttgaacacag

SEQ ID NO: 5936636 - DNA, 25 bp, Homo sapien
cattctcagcctgtggcagtaaaga

SEQ ID NO: 5936637 - DNA, 25 bp, Homo sapien
gtattctcccagtccacacccattg

SEQ ID NO: 5936638 - DNA, 25 bp, Homo sapien
aatctaggaaatttctttgcaagcc

SEQ ID NO: 5936639 - DNA, 25 bp, Homo sapien
ttgcaagccggaaaggctacagcag

SEQ ID NO: 5936640 - DNA, 25 bp, Homo sapien
gcatttgattgtaaactgtactcgt

SEQ ID NO: 5936641 - DNA, 25 bp, Homo sapien
ctaaatctccctctatgtttttaaa

SEQ ID NO: 5936642 - DNA, 25 bp, Homo sapien
ctcctcttccatggtagcgctcaaa

SEQ ID NO: 5936643 - DNA, 25 bp, Homo sapien
ctggaagagtactgggaagactccg

SEQ ID NO: 5936644 - DNA, 25 bp, Homo sapien
tgtggaactgtacacaccttagtta

SEQ ID NO: 5936645 - DNA, 25 bp, Homo sapien
gattgtaaactgtactcgtccgtgt

SEQ ID NO: 5936646 - DNA, 25 bp, Homo sapien
tggaactgtacacaccttagttact

SEQ ID NO: 5936647 - DNA, 25 bp, Homo sapien
atttctttgcaagccggaaaggcta

SEQ ID NO: 5936648 - DNA, 25 bp, Homo sapien
ctaatggaagtttagctcatttaca

SEQ ID NO: 5936649 - DNA, 25 bp, Homo sapien
ttctggaagagtactgggaagactc

SEQ ID NO: 5936650 - DNA, 25 bp, Homo sapien
tggagctcgagtgaggtttacggag

SEQ ID NO: 5936651 - DNA, 25 bp, Homo sapien
aacaaaaagctgctaaatctccctc

SEQ ID NO: 5936652 - DNA, 25 bp, Homo sapien
gagtctgaagaggagtactcggctc

SEQ ID NO: 5936653 - DNA, 25 bp, Homo sapien
agatggttacactgttagaacacta

SEQ ID NO: 5936654 - DNA, 25 bp, Homo sapien
ctcgtccgtgtggaactgtacacac

SEQ ID NO: 5936655 - DNA, 25 bp, Homo sapien
aagccggaaaggctacagcagaaaa

SEQ ID NO: 5936656 - DNA, 25 bp, Homo sapien
ggccattgccatgtttattcgatgg

SEQ ID NO: 5936657 - DNA, 25 bp, Homo sapien
gaggtttacggaggtgcccagattc

SEQ ID NO: 5936658 - DNA, 25 bp, Homo sapien
gtaaactgtactcgtccgtgtggaa

SEQ ID NO: 5936659 - DNA, 25 bp, Homo sapien
gtactgggaagactccgaggaaagg

SEQ ID NO: 5936660 - DNA, 25 bp, Homo sapien
aaaatcactaacattatattgcaat

SEQ ID NO: 5936661 - DNA, 25 bp, Homo sapien
agcagaaaagggttcgaccgagtga

SEQ ID NO: 5936662 - DNA, 25 bp, Homo sapien
ccctattctctgcttgaacacagta

SEQ ID NO: 5936663 - DNA, 25 bp, Homo sapien
tgcctttcctgttcagcattctcag

SEQ ID NO: 5936664 - DNA, 25 bp, Homo sapien
tgcccactcctgcaccttcctcctg

SEQ ID NO: 5936665 - DNA, 25 bp, Homo sapien
agggttcgaccgagtgagcacagag

SEQ ID NO: 5936666 - DNA, 25 bp, Homo sapien
gctccgttggcttgtgtttctaggt

SEQ ID NO: 5936667 - DNA, 25 bp, Homo sapien
ttttttgtggatgtaaatagcccta

SEQ ID NO: 5936668 - DNA, 25 bp, Homo sapien
actcggctccgctgcccactcctgc

SEQ ID NO: 5936669 - DNA, 25 bp, Homo sapien
gagtgagcacagaggggagtgacca

SEQ ID NO: 5936670 - DNA, 25 bp, Homo sapien
ccctaatggaagtttagctcattta

SEQ ID NO: 5936671 - DNA, 25 bp, Homo sapien
cagtgtctttctttggtgcctttcc

SEQ ID NO: 5936672 - DNA, 25 bp, Homo sapien
tctaggtgaggagtttcctaccagt

SEQ ID NO: 5936673 - DNA, 25 bp, Homo sapien
gatcatgaccgaaagctcgagtcga

SEQ ID NO: 5936674 - DNA, 25 bp, Homo sapien
cgtccgtgtggaactgtacacacct

SEQ ID NO: 5936675 - DNA, 25 bp, Homo sapien
tttggctccgttggcttgtgtttct

SEQ ID NO: 5936676 - DNA, 25 bp, Homo sapien
atgtttattcgatggaaaaaatcaa

SEQ ID NO: 5936677 - DNA, 25 bp, Homo sapien
ctgttcagcattctcagcctgtggc

SEQ ID NO: 5936678 - DNA, 25 bp, Homo sapien
gcgtgtaaagttctgtgcatttgat

SEQ ID NO: 5936679 - DNA, 25 bp, Homo sapien
catttggctccgttggcttgtgttt

SEQ ID NO: 5936680 - DNA, 25 bp, Homo sapien
tcccagtccacacccattgccagtg

SEQ ID NO: 5936681 - DNA, 25 bp, Homo sapien
tgatggaagtgagtctgaagaggag

SEQ ID NO: 5936682 - DNA, 25 bp, Homo sapien
ctacacaacaaaaagctgctaaatc

SEQ ID NO: 5936683 - DNA, 25 bp, Homo sapien
gaggaaagggaagcagcggcttaaa

SEQ ID NO: 5936684 - DNA, 25 bp, Homo sapien
agcattctcagcctgtggcagtaaa

SEQ ID NO: 5936685 - DNA, 25 bp, Homo sapien
ccgaggaaagggaagcagcggctta

SEQ ID NO: 5936686 - DNA, 25 bp, Homo sapien
tgaacacagtattctcccagtccac

SEQ ID NO: 5936687 - DNA, 25 bp, Homo sapien
ggttcgaccgagtgagcacagaggg

SEQ ID NO: 5936688 - DNA, 25 bp, Homo sapien
cgagttctggaagagtactgggaag

SEQ ID NO: 5936689 - DNA, 25 bp, Homo sapien
ggaagagtactgggaagactccgag

SEQ ID NO: 5936690 - DNA, 25 bp, Homo sapien
gaactccagccttccttccgtggag

SEQ ID NO: 5936691 - DNA, 25 bp, Homo sapien
ttattcgatggaaaaaatcaagggc

SEQ ID NO: 5936692 - DNA, 25 bp, Homo sapien
gaactgtacacaccttagttacttc

SEQ ID NO: 5936693 - DNA, 25 bp, Homo sapien
cagttggtgtgtttccgggatgtct

SEQ ID NO: 5936694 - DNA, 25 bp, Homo sapien
aacacagtattctcccagtccacac

SEQ ID NO: 5936695 - DNA, 25 bp, Homo sapien
tctttatatgaagctgccctcctct

SEQ ID NO: 5936696 - DNA, 25 bp, Homo sapien
tgtacacaccttagttacttcattt

SEQ ID NO: 5936697 - DNA, 25 bp, Homo sapien
ttgattgtaaactgtactcgtccgt

SEQ ID NO: 5936698 - DNA, 25 bp, Homo sapien
ttcgaccgagtgagcacagagggga

SEQ ID NO: 5936699 - DNA, 25 bp, Homo sapien
tacacaccttagttacttcatttgg

SEQ ID NO: 5936700 - DNA, 25 bp, Homo sapien
gtgtctttctttggtgcctttcctg

SEQ ID NO: 5936701 - DNA, 25 bp, Homo sapien
ctgtggcagtaaagagaaactttgc

SEQ ID NO: 5936702 - DNA, 25 bp, Homo sapien
cctcctgaactccagccttccttcc

SEQ ID NO: 5936703 - DNA, 25 bp, Homo sapien
agccctaatggaagtttagctcatt

SEQ ID NO: 5936704 - DNA, 25 bp, Homo sapien
tgttagaacactatttttcagaatc

SEQ ID NO: 5936705 - DNA, 25 bp, Homo sapien
cacccattgccagtgtctttctttg

SEQ ID NO: 5936706 - DNA, 25 bp, Homo sapien
gatgtcttatttttagatggttaca

SEQ ID NO: 5936707 - DNA, 25 bp, Homo sapien
atagccctattctctgcttgaacac

SEQ ID NO: 5936708 - DNA, 25 bp, Homo sapien
atggaagtgagtctgaagaggagta

SEQ ID NO: 5936709 - DNA, 25 bp, Homo sapien
ctccgctgcccactcctgcaccttc

SEQ ID NO: 5936710 - DNA, 25 bp, Homo sapien
gagatcatgaccgaaagctcgagtc

SEQ ID NO: 5936711 - DNA, 25 bp, Homo sapien
ctgtgcatttgattgtaaactgtac

SEQ ID NO: 5936712 - DNA, 25 bp, Homo sapien
ccagtccacacccattgccagtgtc

SEQ ID NO: 5936713 - DNA, 25 bp, Homo sapien
tcatgaccgaaagctcgagtcgagt

SEQ ID NO: 5936714 - DNA, 25 bp, Homo sapien
atcaagggcctttggagatcatgac

SEQ ID NO: 5936715 - DNA, 25 bp, Homo sapien
tacggaggtgcccagattcctttcc

SEQ ID NO: 5936716 - DNA, 25 bp, Homo sapien
tcgagtcgagttctggaagagtact

SEQ ID NO: 5936717 - DNA, 25 bp, Homo sapien
gagctcgagtgaggtttacggaggt

SEQ ID NO: 5936718 - DNA, 25 bp, Homo sapien
cagtaaagagaaactttgctacaca

SEQ ID NO: 5936719 - DNA, 25 bp, Homo sapien
ggttgtcctgctggccattgccatg

SEQ ID NO: 5936720 - DNA, 25 bp, Homo sapien
gggatgtcttatttttagatggtta

SEQ ID NO: 5936721 - DNA, 25 bp, Homo sapien
gaggtgcccagattcctttcccttt

SEQ ID NO: 5936722 - DNA, 25 bp, Homo sapien
gagaaggacgaagatgatggaagtg

SEQ ID NO: 5936723 - DNA, 25 bp, Homo sapien
ttctttggtgcctttcctgttcagc

SEQ ID NO: 5936724 - DNA, 25 bp, Homo sapien
tcttcagttggtgtgtttccgggat

SEQ ID NO: 5936725 - DNA, 25 bp, Homo sapien
ggaagactccgaggaaagggaagca

SEQ ID NO: 5936726 - DNA, 25 bp, Homo sapien
ttacactgttagaacactatttttc

SEQ ID NO: 5936727 - DNA, 25 bp, Homo sapien
aagagtactgggaagactccgagga

SEQ ID NO: 5936728 - DNA, 25 bp, Homo sapien
ccttcctcctgaactccagccttcc

SEQ ID NO: 5936729 - DNA, 25 bp, Homo sapien
agggaagcagcggcttaaatctagg

SEQ ID NO: 5936730 - DNA, 25 bp, Homo sapien
ggaagcagcggcttaaatctaggaa

SEQ ID NO: 5936731 - DNA, 25 bp, Homo sapien
ttcatttggctccgttggcttgtgt

SEQ ID NO: 5936732 - DNA, 25 bp, Homo sapien
gggagtgaccaagagaaggacgaag

SEQ ID NO: 5936733 - DNA, 25 bp, Homo sapien
tttagctcatttacatttggagacc

SEQ ID NO: 5936734 - DNA, 25 bp, Homo sapien
ccttctggttatccctgtggttgtc

SEQ ID NO: 5936735 - DNA, 25 bp, Homo sapien
atccctgtggttgtcctgctggcca

SEQ ID NO: 5936736 - DNA, 25 bp, Homo sapien
tccgtgtggaactgtacacacctta

SEQ ID NO: 5936737 - DNA, 25 bp, Homo sapien
ttccgggatgtcttatttttagatg

SEQ ID NO: 5936738 - DNA, 25 bp, Homo sapien
atgtaaatagccctattctctgctt

SEQ ID NO: 5936739 - DNA, 25 bp, Homo sapien
ctttgcaagccggaaaggctacagc

SEQ ID NO: 5936740 - DNA, 25 bp, Homo sapien
gtcgagttctggaagagtactggga

SEQ ID NO: 5936741 - DNA, 25 bp, Homo sapien
gaaaagggttcgaccgagtgagcac

SEQ ID NO: 5936742 - DNA, 25 bp, Homo sapien
tagcgctcaaagccctaatggaagt

SEQ ID NO: 5936743 - DNA, 25 bp, Homo sapien
gaagtttagctcatttacatttgga

SEQ ID NO: 5936744 - DNA, 25 bp, Homo sapien
ccgagtgagcacagaggggagtgac

SEQ ID NO: 5936745 - DNA, 25 bp, Homo sapien
aaaagctgctaaatctccctctatg

SEQ ID NO: 5936746 - DNA, 25 bp, Homo sapien
acaacaaaaagctgctaaatctccc

SEQ ID NO: 5936747 - DNA, 25 bp, Homo sapien
ctccgaggaaagggaagcagcggct

SEQ ID NO: 5936748 - DNA, 25 bp, Homo sapien
ttgtggatgtaaatagccctattct

SEQ ID NO: 5936749 - DNA, 25 bp, Homo sapien
agttacttcatttggctccgttggc

SEQ ID NO: 5936750 - DNA, 25 bp, Homo sapien
agttcactccagtgccattgtcttt

SEQ ID NO: 5936751 - DNA, 25 bp, Homo sapien
agtccacacccattgccagtgtctt

SEQ ID NO: 5936752 - DNA, 25 bp, Homo sapien
ttagaacactatttttcagaatctg

SEQ ID NO: 5936753 - DNA, 25 bp, Homo sapien
tgtttctaggtgaggagtttcctac

SEQ ID NO: 5936754 - DNA, 25 bp, Homo sapien
ctcattacaacccttctggttatcc

SEQ ID NO: 5936755 - DNA, 25 bp, Homo sapien
gctgcccactcctgcaccttcctcc

SEQ ID NO: 5936756 - DNA, 25 bp, Homo sapien
ttcctcctgaactccagccttcctt

SEQ ID NO: 5936757 - DNA, 25 bp, Homo sapien
ttcagttggtgtgtttccgggatgt

SEQ ID NO: 5936758 - DNA, 25 bp, Homo sapien
tccctttaacgcgtgtaaagttctg

SEQ ID NO: 5936759 - DNA, 25 bp, Homo sapien
actgtactcgtccgtgtggaactgt

SEQ ID NO: 5936760 - DNA, 25 bp, Homo sapien
agggcctttggagatcatgaccgaa

SEQ ID NO: 5936761 - DNA, 25 bp, Homo sapien
tcatttacatttggagacccttttg

SEQ ID NO: 5936762 - DNA, 25 bp, Homo sapien
ggcagtaaagagaaactttgctaca

SEQ ID NO: 5936763 - DNA, 25 bp, Homo sapien
tccgtggagctcgagtgaggtttac

SEQ ID NO: 5936764 - DNA, 25 bp, Homo sapien
cagaaaagggttcgaccgagtgagc

SEQ ID NO: 5936765 - DNA, 25 bp, Homo sapien
gtgcatttgattgtaaactgtactc

SEQ ID NO: 5936766 - DNA, 25 bp, Homo sapien
agttctgtgcatttgattgtaaact

SEQ ID NO: 5936767 - DNA, 25 bp, Homo sapien
gctgccctcctcttccatggtagcg

SEQ ID NO: 5936768 - DNA, 25 bp, Homo sapien
aaactttgctacacaacaaaaagct

SEQ ID NO: 5936769 - DNA, 25 bp, Homo sapien
tccacacccattgccagtgtctttc

SEQ ID NO: 5936770 - DNA, 25 bp, Homo sapien
caagggcctttggagatcatgaccg

SEQ ID NO: 5936771 - DNA, 25 bp, Homo sapien
tactcgtccgtgtggaactgtacac

SEQ ID NO: 5936772 - DNA, 25 bp, Homo sapien
ttgccagtgtctttctttggtgcct

SEQ ID NO: 5936773 - DNA, 25 bp, Homo sapien
attgccatgtttattcgatggaaaa

SEQ ID NO: 5936774 - DNA, 25 bp, Homo sapien
cacaccttagttacttcatttggct

SEQ ID NO: 5936775 - DNA, 25 bp, Homo sapien
ttagttacttcatttggctccgttg

SEQ ID NO: 5936776 - DNA, 25 bp, Homo sapien
acaacccttctggttatccctgtgg

SEQ ID NO: 5936777 - DNA, 25 bp, Homo sapien
ttacttcatttggctccgttggctt

SEQ ID NO: 5936778 - DNA, 25 bp, Homo sapien
gtaaatagccctattctctgcttga

SEQ ID NO: 5936779 - DNA, 25 bp, Homo sapien
tccctctatgtttttaaaatcacta

SEQ ID NO: 5936780 - DNA, 25 bp, Homo sapien
ctcagcctgtggcagtaaagagaaa

SEQ ID NO: 5936781 - DNA, 25 bp, Homo sapien
cttaaatctaggaaatttctttgca

SEQ ID NO: 5936782 - DNA, 25 bp, Homo sapien
gtaaagttctgtgcatttgattgta

SEQ ID NO: 5936783 - DNA, 25 bp, Homo sapien
aagctcgagtcgagttctggaagag

SEQ ID NO: 5936784 - DNA, 25 bp, Homo sapien
gttcagcattctcagcctgtggcag

SEQ ID NO: 5936785 - DNA, 25 bp, Homo sapien
caccttcctcctgaactccagcctt

SEQ ID NO: 5936786 - DNA, 25 bp, Homo sapien
tgtcttatttttagatggttacact

SEQ ID NO: 5936787 - DNA, 25 bp, Homo sapien
tccagccttccttccgtggagctcg

SEQ ID NO: 5936788 - DNA, 25 bp, Homo sapien
atggttacactgttagaacactatt

SEQ ID NO: 5936789 - DNA, 25 bp, Homo sapien
actccagccttccttccgtggagct

SEQ ID NO: 5936790 - DNA, 25 bp, Homo sapien
agcggcttaaatctaggaaatttct

SEQ ID NO: 5936791 - DNA, 25 bp, Homo sapien
aatttctcttcagttggtgtgtttc

SEQ ID NO: 5936792 - DNA, 25 bp, Homo sapien
gtgaccaagagaaggacgaagatga

SEQ ID NO: 5936793 - DNA, 25 bp, Homo sapien
gtggttgtcctgctggccattgcca

SEQ ID NO: 5936794 - DNA, 25 bp, Homo sapien
tgcccagattcctttccctttaacg

SEQ ID NO: 5936795 - DNA, 25 bp, Homo sapien
gagtcgagttctggaagagtactgg

SEQ ID NO: 5936796 - DNA, 25 bp, Homo sapien
tcttatttttagatggttacactgt

SEQ ID NO: 5936797 - DNA, 25 bp, Homo sapien
cggaggtgcccagattcctttccct

SEQ ID NO: 5936798 - DNA, 25 bp, Homo sapien
tttctaggtgaggagtttcctacca

SEQ ID NO: 5936799 - DNA, 25 bp, Homo sapien
tggaagtttagctcatttacatttg

SEQ ID NO: 5936800 - DNA, 25 bp, Homo sapien
ggaaatttctttgcaagccggaaag

SEQ ID NO: 5936801 - DNA, 25 bp, Homo sapien
ctttggtgcctttcctgttcagcat

SEQ ID NO: 5936802 - DNA, 25 bp, Homo sapien
cagattcctttccctttaacgcgtg

SEQ ID NO: 5936803 - DNA, 25 bp, Homo sapien
tttacggaggtgcccagattccttt

SEQ ID NO: 5936804 - DNA, 25 bp, Homo sapien
cctttaacgcgtgtaaagttctgtg

SEQ ID NO: 5936805 - DNA, 25 bp, Homo sapien
tggagatcatgaccgaaagctcgag

SEQ ID NO: 5936806 - DNA, 25 bp, Homo sapien
tttaacgcgtgtaaagttctgtgca

SEQ ID NO: 5936807 - DNA, 25 bp, Homo sapien
tctctgcttgaacacagtattctcc

SEQ ID NO: 5936808 - DNA, 25 bp, Homo sapien
gtttttaaaatcactaacattatat

SEQ ID NO: 5936809 - DNA, 25 bp, Homo sapien
gtggatgtaaatagccctattctct

SEQ ID NO: 5936810 - DNA, 25 bp, Homo sapien
gccagtgtctttctttggtgccttt

SEQ ID NO: 5936811 - DNA, 25 bp, Homo sapien
ggcttgtgtttctaggtgaggagtt

SEQ ID NO: 5936812 - DNA, 25 bp, Homo sapien
ggttacactgttagaacactatttt

SEQ ID NO: 5936813 - DNA, 25 bp, Homo sapien
tgctaaatctccctctatgttttta

SEQ ID NO: 5936814 - DNA, 25 bp, Homo sapien
tgtgtttctaggtgaggagtttcct

SEQ ID NO: 5936815 - DNA, 25 bp, Homo sapien
tctaggaaatttctttgcaagccgg

SEQ ID NO: 5936816 - DNA, 25 bp, Homo sapien
ccctgtggttgtcctgctggccatt

SEQ ID NO: 5936817 - DNA, 25 bp, Homo sapien
aggagtactcggctccgctgcccac

SEQ ID NO: 5936818 - DNA, 25 bp, Homo sapien
aaatttctttgcaagccggaaaggc

SEQ ID NO: 5936819 - DNA, 25 bp, Homo sapien
ggtgcctttcctgttcagcattctc

SEQ ID NO: 5936820 - DNA, 25 bp, Homo sapien
taaatttctcttcagttggtgtgtt

SEQ ID NO: 5936821 - DNA, 25 bp, Homo sapien
aaaaatcaagggcctttggagatca

SEQ ID NO: 5936822 - DNA, 25 bp, Homo sapien
gcaagccggaaaggctacagcagaa

SEQ ID NO: 5936823 - DNA, 25 bp, Homo sapien
tttttaaatttctcttcagttggtg

SEQ ID NO: 5936824 - DNA, 25 bp, Homo sapien
cagtattctcccagtccacacccat

SEQ ID NO: 5936825 - DNA, 25 bp, Homo sapien
ggaaagggaagcagcggcttaaatc

SEQ ID NO: 5936826 - DNA, 25 bp, Homo sapien
gacgaagatgatggaagtgagtctg

SEQ ID NO: 5936827 - DNA, 25 bp, Homo sapien
aaatagccctattctctgcttgaac

SEQ ID NO: 5936828 - DNA, 25 bp, Homo sapien
gtctttctttggtgcctttcctgtt

SEQ ID NO: 5936829 - DNA, 25 bp, Homo sapien
aaactgtactcgtccgtgtggaact

SEQ ID NO: 5936830 - DNA, 25 bp, Homo sapien
gtcctgctggccattgccatgttta

SEQ ID NO: 5936831 - DNA, 25 bp, Homo sapien
taaatctaggaaatttctttgcaag

SEQ ID NO: 5936832 - DNA, 25 bp, Homo sapien
ggtgcccagattcctttccctttaa

SEQ ID NO: 5936833 - DNA, 25 bp, Homo sapien
acactgttagaacactatttttcag

SEQ ID NO: 5936834 - DNA, 25 bp, Homo sapien
ttttgtggatgtaaatagccctatt

SEQ ID NO: 5936835 - DNA, 25 bp, Homo sapien
gcgctcaaagccctaatggaagttt

SEQ ID NO: 5936836 - DNA, 25 bp, Homo sapien
ccgctgcccactcctgcaccttcct

SEQ ID NO: 5936837 - DNA, 25 bp, Homo sapien
cttccttccgtggagctcgagtgag

SEQ ID NO: 5936838 - DNA, 25 bp, Homo sapien
agtttagctcatttacatttggaga

SEQ ID NO: 5936839 - DNA, 25 bp, Homo sapien
acagcagaaaagggttcgaccgagt

SEQ ID NO: 5936840 - DNA, 25 bp, Homo sapien
tgccctcctcttccatggtagcgct

SEQ ID NO: 5936841 - DNA, 25 bp, Homo sapien
ggcttaaatctaggaaatttctttg

SEQ ID NO: 5936842 - DNA, 25 bp, Homo sapien
ttctcagcctgtggcagtaaagaga

SEQ ID NO: 5936843 - DNA, 25 bp, Homo sapien
ctgtggttgtcctgctggccattgc

SEQ ID NO: 5936844 - DNA, 25 bp, Homo sapien
agagaaactttgctacacaacaaaa

SEQ ID NO: 5936845 - DNA, 25 bp, Homo sapien
ctgaagaggagtactcggctccgct

SEQ ID NO: 5936846 - DNA, 25 bp, Homo sapien
ttacaacccttctggttatccctgt

SEQ ID NO: 5936847 - DNA, 25 bp, Homo sapien
tcgagtgaggtttacggaggtgccc

SEQ ID NO: 5936848 - DNA, 25 bp, Homo sapien
agttctggaagagtactgggaagac

SEQ ID NO: 5936849 - DNA, 25 bp, Homo sapien
atttgattgtaaactgtactcgtcc

SEQ ID NO: 5936850 - DNA, 25 bp, Homo sapien
taggaaatttctttgcaagccggaa

SEQ ID NO: 5936851 - DNA, 25 bp, Homo sapien
tctccctctatgtttttaaaatcac

SEQ ID NO: 5936852 - DNA, 25 bp, Homo sapien
gtgtgtttccgggatgtcttatttt

SEQ ID NO: 5936853 - DNA, 25 bp, Homo sapien
cctttggagatcatgaccgaaagct

SEQ ID NO: 5936854 - DNA, 25 bp, Homo sapien
aagctgccctcctcttccatggtag

SEQ ID NO: 5936855 - DNA, 25 bp, Homo sapien
tttatatgaagctgccctcctcttc

SEQ ID NO: 5936856 - DNA, 25 bp, Homo sapien
actaacattatattgcaatgagaga

SEQ ID NO: 5936857 - DNA, 25 bp, Homo sapien
gcctgtggcagtaaagagaaacttt

SEQ ID NO: 5936858 - DNA, 25 bp, Homo sapien
cattgccagtgtctttctttggtgc

SEQ ID NO: 5936859 - DNA, 25 bp, Homo sapien
gctgctaaatctccctctatgtttt

SEQ ID NO: 5936860 - DNA, 25 bp, Homo sapien
ccctcctcttccatggtagcgctca

SEQ ID NO: 5936861 - DNA, 25 bp, Homo sapien
gctcaaagccctaatggaagtttag

SEQ ID NO: 5936862 - DNA, 25 bp, Homo sapien
tatgaagctgccctcctcttccatg

SEQ ID NO: 5936863 - DNA, 25 bp, Homo sapien
tcactaacattatattgcaatgaga

SEQ ID NO: 5936864 - DNA, 25 bp, Homo sapien
tgctacacaacaaaaagctgctaaa

SEQ ID NO: 5936865 - DNA, 25 bp, Homo sapien
tgccattgtctttatatgaagctgc

SEQ ID NO: 5936866 - DNA, 25 bp, Homo sapien
gctcgagtgaggtttacggaggtgc

SEQ ID NO: 5936867 - DNA, 25 bp, Homo sapien
cattacaacccttctggttatccct

SEQ ID NO: 5936868 - DNA, 25 bp, Homo sapien
ggaagtgagtctgaagaggagtact

SEQ ID NO: 5936869 - DNA, 25 bp, Homo sapien
tttgctacacaacaaaaagctgcta

SEQ ID NO: 5936870 - DNA, 25 bp, Homo sapien
aagtgagtctgaagaggagtactcg

SEQ ID NO: 5936871 - DNA, 25 bp, Homo sapien
ttttaaaatcactaacattatattg

SEQ ID NO: 5936872 - DNA, 25 bp, Homo sapien
ggtgaggagtttcctaccagttcac

SEQ ID NO: 5936873 - DNA, 25 bp, Homo sapien
ggatgtaaatagccctattctctgc

SEQ ID NO: 5936874 - DNA, 25 bp, Homo sapien
tatatgaagctgccctcctcttcca

SEQ ID NO: 5936875 - DNA, 25 bp, Homo sapien
aggacgaagatgatggaagtgagtc

SEQ ID NO: 5936876 - DNA, 25 bp, Homo sapien
tcctgaactccagccttccttccgt

SEQ ID NO: 5936877 - DNA, 25 bp, Homo sapien
ccattgccatgtttattcgatggaa

SEQ ID NO: 5936878 - DNA, 25 bp, Homo sapien
cgtggagctcgagtgaggtttacgg

SEQ ID NO: 5936879 - DNA, 25 bp, Homo sapien
aagatgatggaagtgagtctgaaga

SEQ ID NO: 5936880 - DNA, 25 bp, Homo sapien
gtggcagtaaagagaaactttgcta

SEQ ID NO: 5936881 - DNA, 25 bp, Homo sapien
gtgtaaagttctgtgcatttgattg

SEQ ID NO: 5936882 - DNA, 25 bp, Homo sapien
ttttagatggttacactgttagaac

SEQ ID NO: 5936883 - DNA, 25 bp, Homo sapien
cctttcctgttcagcattctcagcc

SEQ ID NO: 5936884 - DNA, 25 bp, Homo sapien
taacattatattgcaatgagagaaa

SEQ ID NO: 5936885 - DNA, 25 bp, Homo sapien
cggaaaggctacagcagaaaagggt

SEQ ID NO: 5936886 - DNA, 25 bp, Homo sapien
tttaaatttctcttcagttggtgtg

SEQ ID NO: 5936887 - DNA, 25 bp, Homo sapien
taacgcgtgtaaagttctgtgcatt

SEQ ID NO: 5936888 - DNA, 25 bp, Homo sapien
acacaacaaaaagctgctaaatctc

SEQ ID NO: 5936889 - DNA, 25 bp, Homo sapien
aatcactaacattatattgcaatga

SEQ ID NO: 5936890 - DNA, 25 bp, Homo sapien
cacagtattctcccagtccacaccc

SEQ ID NO: 5936891 - DNA, 25 bp, Homo sapien
tttcctgttcagcattctcagcctg

SEQ ID NO: 5936892 - DNA, 25 bp, Homo sapien
tcagcattctcagcctgtggcagta

SEQ ID NO: 5936893 - DNA, 25 bp, Homo sapien
cagccttccttccgtggagctcgag

SEQ ID NO: 5936894 - DNA, 25 bp, Homo sapien
aggagtttcctaccagttcactcca

SEQ ID NO: 5936895 - DNA, 25 bp, Homo sapien
ttgtcctgctggccattgccatgtt

SEQ ID NO: 5936896 - DNA, 25 bp, Homo sapien
ttctgtgcatttgattgtaaactgt

SEQ ID NO: 5936897 - DNA, 25 bp, Homo sapien
tttggagatcatgaccgaaagctcg

SEQ ID NO: 5936898 - DNA, 25 bp, Homo sapien
taccagttcactccagtgccattgt

SEQ ID NO: 5936899 - DNA, 25 bp, Homo sapien
ctacagcagaaaagggttcgaccga

SEQ ID NO: 5936900 - DNA, 25 bp, Homo sapien
ttatccctgtggttgtcctgctggc

SEQ ID NO: 5936901 - DNA, 25 bp, Homo sapien
ttgtaaactgtactcgtccgtgtgg

SEQ ID NO: 5936902 - DNA, 25 bp, Homo sapien
gatggaaaaaatcaagggcctttgg

SEQ ID NO: 5936903 - DNA, 25 bp, Homo sapien
ggcctttggagatcatgaccgaaag

SEQ ID NO: 5936904 - DNA, 25 bp, Homo sapien
ccgaaagctcgagtcgagttctgga

SEQ ID NO: 5936905 - DNA, 25 bp, Homo sapien
gctcatttacatttggagacccttt

SEQ ID NO: 5936906 - DNA, 25 bp, Homo sapien
cactccagtgccattgtctttatat

SEQ ID NO: 5936907 - DNA, 25 bp, Homo sapien
gccggaaaggctacagcagaaaagg

SEQ ID NO: 5936908 - DNA, 25 bp, Homo sapien
tgaggagtttcctaccagttcactc

SEQ ID NO: 5936909 - DNA, 25 bp, Homo sapien
cgttggcttgtgtttctaggtgagg

SEQ ID NO: 5936910 - DNA, 25 bp, Homo sapien
aaatcaagggcctttggagatcatg

SEQ ID NO: 5936911 - DNA, 25 bp, Homo sapien
acttcatttggctccgttggcttgt

SEQ ID NO: 5936912 - DNA, 25 bp, Homo sapien
acccttctggttatccctgtggttg

SEQ ID NO: 5936913 - DNA, 25 bp, Homo sapien
gtttcctaccagttcactccagtgc

SEQ ID NO: 5936914 - DNA, 25 bp, Homo sapien
ttttttttgtggatgtaaatagccc

SEQ ID NO: 5936915 - DNA, 25 bp, Homo sapien
ctccagtgccattgtctttatatga

SEQ ID NO: 5936916 - DNA, 25 bp, Homo sapien
atttttagatggttacactgttaga

SEQ ID NO: 5936917 - DNA, 25 bp, Homo sapien
tcggctccgctgcccactcctgcac

SEQ ID NO: 5936918 - DNA, 25 bp, Homo sapien
tatattgcaatgagagaaattttaa

SEQ ID NO: 5936919 - DNA, 25 bp, Homo sapien
atgaccgaaagctcgagtcgagttc

SEQ ID NO: 5936920 - DNA, 25 bp, Homo sapien
aaagggaagcagcggcttaaatcta

SEQ ID NO: 5936921 - DNA, 25 bp, Homo sapien
aaagttctgtgcatttgattgtaaa

SEQ ID NO: 5936922 - DNA, 25 bp, Homo sapien
gaaggacgaagatgatggaagtgag

SEQ ID NO: 5936923 - DNA, 25 bp, Homo sapien
tggctccgttggcttgtgtttctag

SEQ ID NO: 5936924 - DNA, 25 bp, Homo sapien
taggtgaggagtttcctaccagttc

SEQ ID NO: 5936925 - DNA, 25 bp, Homo sapien
attctctgcttgaacacagtattct

SEQ ID NO: 5936926 - DNA, 25 bp, Homo sapien
ggttatccctgtggttgtcctgctg

SEQ ID NO: 5936927 - DNA, 25 bp, Homo sapien
tctcttcagttggtgtgtttccggg

SEQ ID NO: 5936928 - DNA, 25 bp, Homo sapien
tgcttgaacacagtattctcccagt

SEQ ID NO: 5936929 - DNA, 25 bp, Homo sapien
gaccaagagaaggacgaagatgatg

SEQ ID NO: 5936930 - DNA, 25 bp, Homo sapien
agtgccattgtctttatatgaagct

SEQ ID NO: 5936931 - DNA, 25 bp, Homo sapien
agaacactatttttcagaatctgaa

SEQ ID NO: 5936932 - DNA, 25 bp, Homo sapien
ccatgtttattcgatggaaaaaatc

SEQ ID NO: 5936933 - DNA, 25 bp, Homo sapien
tctatgtttttaaaatcactaacat

SEQ ID NO: 5936934 - DNA, 25 bp, Homo sapien
tggtgtgtttccgggatgtcttatt

SEQ ID NO: 5936935 - DNA, 25 bp, Homo sapien
ccaagagaaggacgaagatgatgga

SEQ ID NO: 5936936 - DNA, 25 bp, Homo sapien
gatgatggaagtgagtctgaagagg

SEQ ID NO: 5936937 - DNA, 25 bp, Homo sapien
gaaaaaatcaagggcctttggagat

SEQ ID NO: 5936938 - DNA, 25 bp, Homo sapien
tgaagctgccctcctcttccatggt

SEQ ID NO: 5936939 - DNA, 25 bp, Homo sapien
attgtctttatatgaagctgccctc

SEQ ID NO: 5936940 - DNA, 25 bp, Homo sapien
ttcactccagtgccattgtctttat

SEQ ID NO: 5936941 - DNA, 25 bp, Homo sapien
cctctatgtttttaaaatcactaac

SEQ ID NO: 5936942 - DNA, 25 bp, Homo sapien
caaaaagctgctaaatctccctcta

SEQ ID NO: 5936943 - DNA, 25 bp, Homo sapien
ttcctaccagttcactccagtgcca

SEQ ID NO: 5936944 - DNA, 25 bp, Homo sapien
cgtgtggaactgtacacaccttagt

SEQ ID NO: 5936945 - DNA, 25 bp, Homo sapien
tcaaagccctaatggaagtttagct

SEQ ID NO: 5936946 - DNA, 25 bp, Homo sapien
cacacccattgccagtgtctttctt

SEQ ID NO: 5936947 - DNA, 25 bp, Homo sapien
ttccatggtagcgctcaaagcccta

SEQ ID NO: 5936948 - DNA, 25 bp, Homo sapien
gaaagctcgagtcgagttctggaag

SEQ ID NO: 5936949 - DNA, 25 bp, Homo sapien
ccgggatgtcttatttttagatggt

SEQ ID NO: 5936950 - DNA, 25 bp, Homo sapien
ttatttttagatggttacactgtta

SEQ ID NO: 5936951 - DNA, 25 bp, Homo sapien
atggtagcgctcaaagccctaatgg

SEQ ID NO: 5936952 - DNA, 25 bp, Homo sapien
ttctggttatccctgtggttgtcct

SEQ ID NO: 5936953 - DNA, 25 bp, Homo sapien
cctaccagttcactccagtgccatt

SEQ ID NO: 5936954 - DNA, 25 bp, Homo sapien
tgctggccattgccatgtttattcg

SEQ ID NO: 5936955 - DNA, 25 bp, Homo sapien
gtttattcgatggaaaaaatcaagg

SEQ ID NO: 5936956 - DNA, 25 bp, Homo sapien
ccattgtctttatatgaagctgccc

SEQ ID NO: 5936957 - DNA, 25 bp, Homo sapien
ttttttttttgtggatgtaaatagc

SEQ ID NO: 5936958 - DNA, 25 bp, Homo sapien
gtgtttccgggatgtcttattttta

SEQ ID NO: 5936959 - DNA, 25 bp, Homo sapien
ggtagcgctcaaagccctaatggaa

SEQ ID NO: 5936960 - DNA, 25 bp, Homo sapien
attcgatggaaaaaatcaagggcct

SEQ ID NO: 5936961 - DNA, 25 bp, Homo sapien
ttctttgcaagccggaaaggctaca

SEQ ID NO: 5936962 - DNA, 25 bp, Homo sapien
aagactccgaggaaagggaagcagc

SEQ ID NO: 5936963 - DNA, 25 bp, Homo sapien
actgttagaacactatttttcagaa

SEQ ID NO: 5936964 - DNA, 25 bp, Homo sapien
caccttagttacttcatttggctcc

SEQ ID NO: 5936965 - DNA, 25 bp, Homo sapien
cctcttccatggtagcgctcaaagc

SEQ ID NO: 5936966 - DNA, 25 bp, Homo sapien
gagtactcggctccgctgcccactc

SEQ ID NO: 5936967 - DNA, 25 bp, Homo sapien
gagtactgggaagactccgaggaaa

SEQ ID NO: 5936968 - DNA, 25 bp, Homo sapien
gtgagtctgaagaggagtactcggc

SEQ ID NO: 5936969 - DNA, 25 bp, Homo sapien
ctggttatccctgtggttgtcctgc

SEQ ID NO: 5936970 - DNA, 25 bp, Homo sapien
ctttctttggtgcctttcctgttca

SEQ ID NO: 5936971 - DNA, 25 bp, Homo sapien
tgtactcgtccgtgtggaactgtac

SEQ ID NO: 5936972 - DNA, 25 bp, Homo sapien
tctcccagtccacacccattgccag

SEQ ID NO: 5936973 - DNA, 25 bp, Homo sapien
gtttccgggatgtcttatttttaga

SEQ ID NO: 5936974 - DNA, 25 bp, Homo sapien
aaagagaaactttgctacacaacaa

SEQ ID NO: 5936975 - DNA, 25 bp, Homo sapien
attatattgcaatgagagaaatttt

SEQ ID NO: 5936976 - DNA, 25 bp, Homo sapien
cctgctggccattgccatgtttatt

SEQ ID NO: 5936977 - DNA, 25 bp, Homo sapien
gcagcggcttaaatctaggaaattt

SEQ ID NO: 5936978 - DNA, 25 bp, Homo sapien
gagtgaccaagagaaggacgaagat

SEQ ID NO: 5936979 - DNA, 25 bp, Homo sapien
cccattgccagtgtctttctttggt

SEQ ID NO: 5936980 - DNA, 25 bp, Homo sapien
actttgctacacaacaaaaagctgc

SEQ ID NO: 5936981 - DNA, 25 bp, Homo sapien
ttggcttgtgtttctaggtgaggag

SEQ ID NO: 5936982 - DNA, 25 bp, Homo sapien
tcctgttcagcattctcagcctgtg

SEQ ID NO: 5936983 - DNA, 25 bp, Homo sapien
gtgagcacagaggggagtgaccaag

SEQ ID NO: 5936984 - DNA, 25 bp, Homo sapien
aatggaagtttagctcatttacatt

SEQ ID NO: 5936985 - DNA, 25 bp, Homo sapien
tgtctttatatgaagctgccctcct

SEQ ID NO: 5936986 - DNA, 25 bp, Homo sapien
cttgaacacagtattctcccagtcc

SEQ ID NO: 5936987 - DNA, 25 bp, Homo sapien
tggaaaaaatcaagggcctttggag

SEQ ID NO: 5936988 - DNA, 25 bp, Homo sapien
actgggaagactccgaggaaaggga

SEQ ID NO: 5936989 - DNA, 25 bp, Homo sapien
tccttccgtggagctcgagtgaggt

SEQ ID NO: 5936990 - DNA, 25 bp, Homo sapien
acgcgtgtaaagttctgtgcatttg

SEQ ID NO: 5936991 - DNA, 25 bp, Homo sapien
gtactcggctccgctgcccactcct

SEQ ID NO: 5936992 - DNA, 25 bp, Homo sapien
cttccgtggagctcgagtgaggttt

SEQ ID NO: 5936993 - DNA, 25 bp, Homo sapien
gactccgaggaaagggaagcagcgg

SEQ ID NO: 5936994 - DNA, 25 bp, Homo sapien
aagagaaggacgaagatgatggaag

SEQ ID NO: 5936995 - DNA, 25 bp, Homo sapien
gctcgagtcgagttctggaagagta

SEQ ID NO: 5936996 - DNA, 25 bp, Homo sapien
gtaaagagaaactttgctacacaac

SEQ ID NO: 5936997 - DNA, 25 bp, Homo sapien
ggctacagcagaaaagggttcgacc

SEQ ID NO: 5936998 - DNA, 25 bp, Homo sapien
tcttccatggtagcgctcaaagccc

SEQ ID NO: 5936999 - DNA, 25 bp, Homo sapien
ggtttacggaggtgcccagattcct

SEQ ID NO: 5937000 - DNA, 25 bp, Homo sapien
ctgaactccagccttccttccgtgg

SEQ ID NO: 5937001 - DNA, 25 bp, Homo sapien
cccactcctgcaccttcctcctgaa

SEQ ID NO: 5937002 - DNA, 25 bp, Homo sapien
ccttagttacttcatttggctccgt

SEQ ID NO: 5937003 - DNA, 25 bp, Homo sapien
ggctccgctgcccactcctgcacct

SEQ ID NO: 5937004 - DNA, 25 bp, Homo sapien
gaagaggagtactcggctccgctgc

SEQ ID NO: 5937005 - DNA, 25 bp, Homo sapien
ctattctctgcttgaacacagtatt

SEQ ID NO: 5937006 - DNA, 25 bp, Homo sapien
tcgatggaaaaaatcaagggccttt

SEQ ID NO: 5937007 - DNA, 25 bp, Homo sapien
gtgaggtttacggaggtgcccagat

SEQ ID NO: 5937008 - DNA, 25 bp, Homo sapien
ctcctgcaccttcctcctgaactcc

SEQ ID NO: 5937009 - DNA, 25 bp, Homo sapien
aatctccctctatgtttttaaaatc

SEQ ID NO: 5937010 - DNA, 25 bp, Homo sapien
ccagttcactccagtgccattgtct

SEQ ID NO: 5937011 - DNA, 25 bp, Homo sapien
aagcagcggcttaaatctaggaaat

SEQ ID NO: 5937012 - DNA, 25 bp, Homo sapien
cctgcaccttcctcctgaactccag

SEQ ID NO: 5937013 - DNA, 25 bp, Homo sapien
ttggtgcctttcctgttcagcattc

SEQ ID NO: 5937014 - DNA, 25 bp, Homo sapien
ttagatggttacactgttagaacac

SEQ ID NO: 5937015 - DNA, 25 bp, Homo sapien
gattcctttccctttaacgcgtgta

SEQ ID NO: 5937016 - DNA, 25 bp, Homo sapien
gtctgaagaggagtactcggctccg

SEQ ID NO: 5937017 - DNA, 25 bp, Homo sapien
agaggagtactcggctccgctgccc

SEQ ID NO: 5937018 - DNA, 25 bp, Homo sapien
ccagtgccattgtctttatatgaag

SEQ ID NO: 5937019 - DNA, 25 bp, Homo sapien
aaagggttcgaccgagtgagcacag

SEQ ID NO: 5937020 - DNA, 25 bp, Homo sapien
tctgcttgaacacagtattctccca

SEQ ID NO: 5937021 - DNA, 25 bp, Homo sapien
cactcctgcaccttcctcctgaact

SEQ ID NO: 5937022 - DNA, 25 bp, Homo sapien
gccttccttccgtggagctcgagtg

SEQ ID NO: 5937023 - DNA, 25 bp, Homo sapien
aagctgctaaatctccctctatgtt

SEQ ID NO: 5937024 - DNA, 25 bp, Homo sapien
ctttcggtcatgatctccaaaggcc

SEQ ID NO: 5937025 - DNA, 25 bp, Homo sapien
aatggcactggagtgaactggtagg

SEQ ID NO: 5937026 - DNA, 25 bp, Homo sapien
gcactggagtgaactggtaggaaac

SEQ ID NO: 5937027 - DNA, 25 bp, Homo sapien
agaggagggcagcttcatataaaga

SEQ ID NO: 5937028 - DNA, 25 bp, Homo sapien
catggaagaggagggcagcttcata

SEQ ID NO: 5937029 - DNA, 25 bp, Homo sapien
aaaggaatctgggcacctccgtaaa

SEQ ID NO: 5937030 - DNA, 25 bp, Homo sapien
ccaaaggcccttgattttttccatc

SEQ ID NO: 5937031 - DNA, 25 bp, Homo sapien
aaatttcctagatttaagccgctgc

SEQ ID NO: 5937032 - DNA, 25 bp, Homo sapien
cggaaacacaccaactgaagagaaa

SEQ ID NO: 5937033 - DNA, 25 bp, Homo sapien
ctgtgttcaagcagagaatagggct

SEQ ID NO: 5937034 - DNA, 25 bp, Homo sapien
gagggagatttagcagctttttgtt

SEQ ID NO: 5937035 - DNA, 25 bp, Homo sapien
caaagaaatttcctagatttaagcc

SEQ ID NO: 5937036 - DNA, 25 bp, Homo sapien
tcttcagactcacttccatcatctt

SEQ ID NO: 5937037 - DNA, 25 bp, Homo sapien
gaaacacaccaactgaagagaaatt

SEQ ID NO: 5937038 - DNA, 25 bp, Homo sapien
cgaataaacatggcaatggccagca

SEQ ID NO: 5937039 - DNA, 25 bp, Homo sapien
atcttcgtccttctcttggtcactc

SEQ ID NO: 5937040 - DNA, 25 bp, Homo sapien
ctgggcacctccgtaaacctcactc

SEQ ID NO: 5937041 - DNA, 25 bp, Homo sapien
gaatctgggcacctccgtaaacctc

SEQ ID NO: 5937042 - DNA, 25 bp, Homo sapien
tggcaatggccagcaggacaaccac

SEQ ID NO: 5937043 - DNA, 25 bp, Homo sapien
ccttgattttttccatcgaataaac

SEQ ID NO: 5937044 - DNA, 25 bp, Homo sapien
agccgctgcttccctttcctcggag

SEQ ID NO: 5937045 - DNA, 25 bp, Homo sapien
tccatcatcttcgtccttctcttgg

SEQ ID NO: 5937046 - DNA, 25 bp, Homo sapien
ttaaaatttctctcattgcaatata

SEQ ID NO: 5937047 - DNA, 25 bp, Homo sapien
aagccaacggagccaaatgaagtaa

SEQ ID NO: 5937048 - DNA, 25 bp, Homo sapien
tggtcactcccctctgtgctcactc

SEQ ID NO: 5937049 - DNA, 25 bp, Homo sapien
ccatcgaataaacatggcaatggcc

SEQ ID NO: 5937050 - DNA, 25 bp, Homo sapien
tttacaatcaaatgcacagaacttt

SEQ ID NO: 5937051 - DNA, 25 bp, Homo sapien
ctgccacaggctgagaatgctgaac

SEQ ID NO: 5937052 - DNA, 25 bp, Homo sapien
ggcaatgggtgtggactgggagaat

SEQ ID NO: 5937053 - DNA, 25 bp, Homo sapien
gctatttacatccacaaaaaaaaaa

SEQ ID NO: 5937054 - DNA, 25 bp, Homo sapien
aaacacaagccaacggagccaaatg

SEQ ID NO: 5937055 - DNA, 25 bp, Homo sapien
ctcctcttcagactcacttccatca

SEQ ID NO: 5937056 - DNA, 25 bp, Homo sapien
gcagcttcatataaagacaatggca

SEQ ID NO: 5937057 - DNA, 25 bp, Homo sapien
atcgaataaacatggcaatggccag

SEQ ID NO: 5937058 - DNA, 25 bp, Homo sapien
acttccattagggctttgagcgcta

SEQ ID NO: 5937059 - DNA, 25 bp, Homo sapien
tcggtcgaacccttttctgctgtag

SEQ ID NO: 5937060 - DNA, 25 bp, Homo sapien
gctgcttccctttcctcggagtctt

SEQ ID NO: 5937061 - DNA, 25 bp, Homo sapien
actcgactcgagctttcggtcatga

SEQ ID NO: 5937062 - DNA, 25 bp, Homo sapien
tctaacagtgtaaccatctaaaaat

SEQ ID NO: 5937063 - DNA, 25 bp, Homo sapien
caacggagccaaatgaagtaactaa

SEQ ID NO: 5937064 - DNA, 25 bp, Homo sapien
cactcgagctccacggaaggaaggc

SEQ ID NO: 5937065 - DNA, 25 bp, Homo sapien
tctttactgccacaggctgagaatg

SEQ ID NO: 5937066 - DNA, 25 bp, Homo sapien
ttcagattctgaaaaatagtgttct

SEQ ID NO: 5937067 - DNA, 25 bp, Homo sapien
ttttgttgtgtagcaaagtttctct

SEQ ID NO: 5937068 - DNA, 25 bp, Homo sapien
agcggagccgagtactcctcttcag

SEQ ID NO: 5937069 - DNA, 25 bp, Homo sapien
acaatggcactggagtgaactggta

SEQ ID NO: 5937070 - DNA, 25 bp, Homo sapien
agctttttgttgtgtagcaaagttt

SEQ ID NO: 5937071 - DNA, 25 bp, Homo sapien
gactcgagctttcggtcatgatctc

SEQ ID NO: 5937072 - DNA, 25 bp, Homo sapien
taaaaataagacatcccggaaacac

SEQ ID NO: 5937073 - DNA, 25 bp, Homo sapien
aggacaaccacagggataaccagaa

SEQ ID NO: 5937074 - DNA, 25 bp, Homo sapien
acggacgagtacagtttacaatcaa

SEQ ID NO: 5937075 - DNA, 25 bp, Homo sapien
agctccacggaaggaaggctggagt

SEQ ID NO: 5937076 - DNA, 25 bp, Homo sapien
tcctcggagtcttcccagtactctt

SEQ ID NO: 5937077 - DNA, 25 bp, Homo sapien
aggcaccaaagaaagacactggcaa

SEQ ID NO: 5937078 - DNA, 25 bp, Homo sapien
cagattctgaaaaatagtgttctaa

SEQ ID NO: 5937079 - DNA, 25 bp, Homo sapien
actcggtcgaacccttttctgctgt

SEQ ID NO: 5937080 - DNA, 25 bp, Homo sapien
agccaaatgaagtaactaaggtgtg

SEQ ID NO: 5937081 - DNA, 25 bp, Homo sapien
ccctctgtgctcactcggtcgaacc

SEQ ID NO: 5937082 - DNA, 25 bp, Homo sapien
acagggataaccagaagggttgtaa

SEQ ID NO: 5937083 - DNA, 25 bp, Homo sapien
accaaagaaagacactggcaatggg

SEQ ID NO: 5937084 - DNA, 25 bp, Homo sapien
aaagggaaaggaatctgggcacctc

SEQ ID NO: 5937085 - DNA, 25 bp, Homo sapien
gagtacagtttacaatcaaatgcac

SEQ ID NO: 5937086 - DNA, 25 bp, Homo sapien
gcaaagtttctctttactgccacag

SEQ ID NO: 5937087 - DNA, 25 bp, Homo sapien
gtcttcccagtactcttccagaact

SEQ ID NO: 5937088 - DNA, 25 bp, Homo sapien
actcccctctgtgctcactcggtcg

SEQ ID NO: 5937089 - DNA, 25 bp, Homo sapien
gcaatggccagcaggacaaccacag

SEQ ID NO: 5937090 - DNA, 25 bp, Homo sapien
ctgagaatgctgaacaggaaaggca

SEQ ID NO: 5937091 - DNA, 25 bp, Homo sapien
ctggagttcaggaggaaggtgcagg

SEQ ID NO: 5937092 - DNA, 25 bp, Homo sapien
ccgctgcttccctttcctcggagtc

SEQ ID NO: 5937093 - DNA, 25 bp, Homo sapien
agggtctccaaatgtaaatgagcta

SEQ ID NO: 5937094 - DNA, 25 bp, Homo sapien
gttagtgattttaaaaacatagagg

SEQ ID NO: 5937095 - DNA, 25 bp, Homo sapien
gtgtggactgggagaatactgtgtt

SEQ ID NO: 5937096 - DNA, 25 bp, Homo sapien
gggctttgagcgctaccatggaaga

SEQ ID NO: 5937097 - DNA, 25 bp, Homo sapien
tgaacaggaaaggcaccaaagaaag

SEQ ID NO: 5937098 - DNA, 25 bp, Homo sapien
aagacactggcaatgggtgtggact

SEQ ID NO: 5937099 - DNA, 25 bp, Homo sapien
tggagtgaactggtaggaaactcct

SEQ ID NO: 5937100 - DNA, 25 bp, Homo sapien
gtgggcagcggagccgagtactcct

SEQ ID NO: 5937101 - DNA, 25 bp, Homo sapien
ttccatcgaataaacatggcaatgg

SEQ ID NO: 5937102 - DNA, 25 bp, Homo sapien
aaacttccattagggctttgagcgc

SEQ ID NO: 5937103 - DNA, 25 bp, Homo sapien
ctccgtaaacctcactcgagctcca

SEQ ID NO: 5937104 - DNA, 25 bp, Homo sapien
aaaatagtgttctaacagtgtaacc

SEQ ID NO: 5937105 - DNA, 25 bp, Homo sapien
tggcactggagtgaactggtaggaa

SEQ ID NO: 5937106 - DNA, 25 bp, Homo sapien
ccagtactcttccagaactcgactc

SEQ ID NO: 5937107 - DNA, 25 bp, Homo sapien
gtcatgatctccaaaggcccttgat

SEQ ID NO: 5937108 - DNA, 25 bp, Homo sapien
accatggaagaggagggcagcttca

SEQ ID NO: 5937109 - DNA, 25 bp, Homo sapien
ccggcttgcaaagaaatttcctaga

SEQ ID NO: 5937110 - DNA, 25 bp, Homo sapien
tactcttccagaactcgactcgagc

SEQ ID NO: 5937111 - DNA, 25 bp, Homo sapien
ggagaatactgtgttcaagcagaga

SEQ ID NO: 5937112 - DNA, 25 bp, Homo sapien
acacaagccaacggagccaaatgaa

SEQ ID NO: 5937113 - DNA, 25 bp, Homo sapien
aataaacatggcaatggccagcagg

SEQ ID NO: 5937114 - DNA, 25 bp, Homo sapien
agtttacaatcaaatgcacagaact

SEQ ID NO: 5937115 - DNA, 25 bp, Homo sapien
gattctgaaaaatagtgttctaaca

SEQ ID NO: 5937116 - DNA, 25 bp, Homo sapien
aatagggctatttacatccacaaaa

SEQ ID NO: 5937117 - DNA, 25 bp, Homo sapien
attgcaatataatgttagtgatttt

SEQ ID NO: 5937118 - DNA, 25 bp, Homo sapien
caaagaaagacactggcaatgggtg

SEQ ID NO: 5937119 - DNA, 25 bp, Homo sapien
agtaactaaggtgtgtacagttcca

SEQ ID NO: 5937120 - DNA, 25 bp, Homo sapien
gtaaacctcactcgagctccacgga

SEQ ID NO: 5937121 - DNA, 25 bp, Homo sapien
ctcgagctccacggaaggaaggctg

SEQ ID NO: 5937122 - DNA, 25 bp, Homo sapien
ggactgggagaatactgtgttcaag

SEQ ID NO: 5937123 - DNA, 25 bp, Homo sapien
acctagaaacacaagccaacggagc

SEQ ID NO: 5937124 - DNA, 25 bp, Homo sapien
aaaatttctctcattgcaatataat

SEQ ID NO: 5937125 - DNA, 25 bp, Homo sapien
gggcacctccgtaaacctcactcga

SEQ ID NO: 5937126 - DNA, 25 bp, Homo sapien
agtactcttccagaactcgactcga

SEQ ID NO: 5937127 - DNA, 25 bp, Homo sapien
gtacagtttacaatcaaatgcacag

SEQ ID NO: 5937128 - DNA, 25 bp, Homo sapien
ccttttctgctgtagcctttccggc

SEQ ID NO: 5937129 - DNA, 25 bp, Homo sapien
tagcagctttttgttgtgtagcaaa

SEQ ID NO: 5937130 - DNA, 25 bp, Homo sapien
tgggagaatactgtgttcaagcaga

SEQ ID NO: 5937131 - DNA, 25 bp, Homo sapien
tgtaaccatctaaaaataagacatc

SEQ ID NO: 5937132 - DNA, 25 bp, Homo sapien
taaccatctaaaaataagacatccc

SEQ ID NO: 5937133 - DNA, 25 bp, Homo sapien
gggctatttacatccacaaaaaaaa

SEQ ID NO: 5937134 - DNA, 25 bp, Homo sapien
tctctcattgcaatataatgttagt

SEQ ID NO: 5937135 - DNA, 25 bp, Homo sapien
gctgtagcctttccggcttgcaaag

SEQ ID NO: 5937136 - DNA, 25 bp, Homo sapien
tctctttactgccacaggctgagaa

SEQ ID NO: 5937137 - DNA, 25 bp, Homo sapien
cttccagaactcgactcgagctttc

SEQ ID NO: 5937138 - DNA, 25 bp, Homo sapien
gccaacggagccaaatgaagtaact

SEQ ID NO: 5937139 - DNA, 25 bp, Homo sapien
gttcaagcagagaatagggctattt

SEQ ID NO: 5937140 - DNA, 25 bp, Homo sapien
cacagaactttacacgcgttaaagg

SEQ ID NO: 5937141 - DNA, 25 bp, Homo sapien
gtgtacagttccacacggacgagta

SEQ ID NO: 5937142 - DNA, 25 bp, Homo sapien
caaatgtaaatgagctaaacttcca

SEQ ID NO: 5937143 - DNA, 25 bp, Homo sapien
gcagagaatagggctatttacatcc

SEQ ID NO: 5937144 - DNA, 25 bp, Homo sapien
ataaagacaatggcactggagtgaa

SEQ ID NO: 5937145 - DNA, 25 bp, Homo sapien
ctccaaaggcccttgattttttcca

SEQ ID NO: 5937146 - DNA, 25 bp, Homo sapien
tactgtgttcaagcagagaataggg

SEQ ID NO: 5937147 - DNA, 25 bp, Homo sapien
accatctaaaaataagacatcccgg

SEQ ID NO: 5937148 - DNA, 25 bp, Homo sapien
ctcactcgagctccacggaaggaag

SEQ ID NO: 5937149 - DNA, 25 bp, Homo sapien
gtgcaggagtgggcagcggagccga

SEQ ID NO: 5937150 - DNA, 25 bp, Homo sapien
gattttttccatcgaataaacatgg

SEQ ID NO: 5937151 - DNA, 25 bp, Homo sapien
cttcgtccttctcttggtcactccc

SEQ ID NO: 5937152 - DNA, 25 bp, Homo sapien
acctccgtaaacctcactcgagctc

SEQ ID NO: 5937153 - DNA, 25 bp, Homo sapien
gcaggagtgggcagcggagccgagt

SEQ ID NO: 5937154 - DNA, 25 bp, Homo sapien
aaagtttctctttactgccacaggc

SEQ ID NO: 5937155 - DNA, 25 bp, Homo sapien
cggagtcttcccagtactcttccag

SEQ ID NO: 5937156 - DNA, 25 bp, Homo sapien
ggagccaaatgaagtaactaaggtg

SEQ ID NO: 5937157 - DNA, 25 bp, Homo sapien
taagccgctgcttccctttcctcgg

SEQ ID NO: 5937158 - DNA, 25 bp, Homo sapien
cttcccagtactcttccagaactcg

SEQ ID NO: 5937159 - DNA, 25 bp, Homo sapien
gtgttcaagcagagaatagggctat

SEQ ID NO: 5937160 - DNA, 25 bp, Homo sapien
tgagctaaacttccattagggcttt

SEQ ID NO: 5937161 - DNA, 25 bp, Homo sapien
ggcttgcaaagaaatttcctagatt

SEQ ID NO: 5937162 - DNA, 25 bp, Homo sapien
caaatgcacagaactttacacgcgt

SEQ ID NO: 5937163 - DNA, 25 bp, Homo sapien
tgcaatataatgttagtgattttaa

SEQ ID NO: 5937164 - DNA, 25 bp, Homo sapien
tcaagcagagaatagggctatttac

SEQ ID NO: 5937165 - DNA, 25 bp, Homo sapien
acagtttacaatcaaatgcacagaa

SEQ ID NO: 5937166 - DNA, 25 bp, Homo sapien
atcaaatgcacagaactttacacgc

SEQ ID NO: 5937167 - DNA, 25 bp, Homo sapien
ctttttgttgtgtagcaaagtttct

SEQ ID NO: 5937168 - DNA, 25 bp, Homo sapien
acggagccaaatgaagtaactaagg

SEQ ID NO: 5937169 - DNA, 25 bp, Homo sapien
gcacctccgtaaacctcactcgagc

SEQ ID NO: 5937170 - DNA, 25 bp, Homo sapien
attagggctttgagcgctaccatgg

SEQ ID NO: 5937171 - DNA, 25 bp, Homo sapien
catctaaaaataagacatcccggaa

SEQ ID NO: 5937172 - DNA, 25 bp, Homo sapien
gttctaacagtgtaaccatctaaaa

SEQ ID NO: 5937173 - DNA, 25 bp, Homo sapien
cctagatttaagccgctgcttccct

SEQ ID NO: 5937174 - DNA, 25 bp, Homo sapien
atataatgttagtgattttaaaaac

SEQ ID NO: 5937175 - DNA, 25 bp, Homo sapien
acgagtacagtttacaatcaaatgc

SEQ ID NO: 5937176 - DNA, 25 bp, Homo sapien
gtgtgtacagttccacacggacgag

SEQ ID NO: 5937177 - DNA, 25 bp, Homo sapien
tagtgattttaaaaacatagaggga

SEQ ID NO: 5937178 - DNA, 25 bp, Homo sapien
tacaatcaaatgcacagaactttac

SEQ ID NO: 5937179 - DNA, 25 bp, Homo sapien
aacatagagggagatttagcagctt

SEQ ID NO: 5937180 - DNA, 25 bp, Homo sapien
ccattagggctttgagcgctaccat

SEQ ID NO: 5937181 - DNA, 25 bp, Homo sapien
ttgattttttccatcgaataaacat

SEQ ID NO: 5937182 - DNA, 25 bp, Homo sapien
acaagccaacggagccaaatgaagt

SEQ ID NO: 5937183 - DNA, 25 bp, Homo sapien
ttgttgtgtagcaaagtttctcttt

SEQ ID NO: 5937184 - DNA, 25 bp, Homo sapien
tggccagcaggacaaccacagggat

SEQ ID NO: 5937185 - DNA, 25 bp, Homo sapien
ttttctgctgtagcctttccggctt

SEQ ID NO: 5937186 - DNA, 25 bp, Homo sapien
agttccacacggacgagtacagttt

SEQ ID NO: 5937187 - DNA, 25 bp, Homo sapien
agtttctctttactgccacaggctg

SEQ ID NO: 5937188 - DNA, 25 bp, Homo sapien
gtacagttccacacggacgagtaca

SEQ ID NO: 5937189 - DNA, 25 bp, Homo sapien
gatttagcagctttttgttgtgtag

SEQ ID NO: 5937190 - DNA, 25 bp, Homo sapien
ggaaggctggagttcaggaggaagg

SEQ ID NO: 5937191 - DNA, 25 bp, Homo sapien
gccagcaggacaaccacagggataa

SEQ ID NO: 5937192 - DNA, 25 bp, Homo sapien
aaaataagacatcccggaaacacac

SEQ ID NO: 5937193 - DNA, 25 bp, Homo sapien
taaatgagctaaacttccattaggg

SEQ ID NO: 5937194 - DNA, 25 bp, Homo sapien
taaacatggcaatggccagcaggac

SEQ ID NO: 5937195 - DNA, 25 bp, Homo sapien
tagatttaagccgctgcttcccttt

SEQ ID NO: 5937196 - DNA, 25 bp, Homo sapien
ggacgagtacagtttacaatcaaat

SEQ ID NO: 5937197 - DNA, 25 bp, Homo sapien
ctaccatggaagaggagggcagctt

SEQ ID NO: 5937198 - DNA, 25 bp, Homo sapien
ccacacggacgagtacagtttacaa

SEQ ID NO: 5937199 - DNA, 25 bp, Homo sapien
gctcactcggtcgaacccttttctg

SEQ ID NO: 5937200 - DNA, 25 bp, Homo sapien
acctcactcgagctccacggaagga

SEQ ID NO: 5937201 - DNA, 25 bp, Homo sapien
cacttccatcatcttcgtccttctc

SEQ ID NO: 5937202 - DNA, 25 bp, Homo sapien
gaaaaatagtgttctaacagtgtaa

SEQ ID NO: 5937203 - DNA, 25 bp, Homo sapien
ctcttccagaactcgactcgagctt

SEQ ID NO: 5937204 - DNA, 25 bp, Homo sapien
cccggaaacacaccaactgaagaga

SEQ ID NO: 5937205 - DNA, 25 bp, Homo sapien
agctaaacttccattagggctttga

SEQ ID NO: 5937206 - DNA, 25 bp, Homo sapien
cttcatataaagacaatggcactgg

SEQ ID NO: 5937207 - DNA, 25 bp, Homo sapien
caggctgagaatgctgaacaggaaa

SEQ ID NO: 5937208 - DNA, 25 bp, Homo sapien
aaaacatagagggagatttagcagc

SEQ ID NO: 5937209 - DNA, 25 bp, Homo sapien
agcttcatataaagacaatggcact

SEQ ID NO: 5937210 - DNA, 25 bp, Homo sapien
tttctctcattgcaatataatgtta

SEQ ID NO: 5937211 - DNA, 25 bp, Homo sapien
catgatctccaaaggcccttgattt

SEQ ID NO: 5937212 - DNA, 25 bp, Homo sapien
aaagacaatggcactggagtgaact

SEQ ID NO: 5937213 - DNA, 25 bp, Homo sapien
tgatctccaaaggcccttgattttt

SEQ ID NO: 5937214 - DNA, 25 bp, Homo sapien
ctagaaacacaagccaacggagcca

SEQ ID NO: 5937215 - DNA, 25 bp, Homo sapien
caggaggaaggtgcaggagtgggca

SEQ ID NO: 5937216 - DNA, 25 bp, Homo sapien
acacggacgagtacagtttacaatc

SEQ ID NO: 5937217 - DNA, 25 bp, Homo sapien
actgggagaatactgtgttcaagca

SEQ ID NO: 5937218 - DNA, 25 bp, Homo sapien
tctcattgcaatataatgttagtga

SEQ ID NO: 5937219 - DNA, 25 bp, Homo sapien
aatggccagcaggacaaccacaggg

SEQ ID NO: 5937220 - DNA, 25 bp, Homo sapien
tcatataaagacaatggcactggag

SEQ ID NO: 5937221 - DNA, 25 bp, Homo sapien
actggtaggaaactcctcacctaga

SEQ ID NO: 5937222 - DNA, 25 bp, Homo sapien
gggcagcggagccgagtactcctct

SEQ ID NO: 5937223 - DNA, 25 bp, Homo sapien
agaatagggctatttacatccacaa

SEQ ID NO: 5937224 - DNA, 25 bp, Homo sapien
gagatttagcagctttttgttgtgt

SEQ ID NO: 5937225 - DNA, 25 bp, Homo sapien
cctcttcagactcacttccatcatc

SEQ ID NO: 5937226 - DNA, 25 bp, Homo sapien
catagagggagatttagcagctttt

SEQ ID NO: 5937227 - DNA, 25 bp, Homo sapien
agacaatggcactggagtgaactgg

SEQ ID NO: 5937228 - DNA, 25 bp, Homo sapien
ttaaagggaaaggaatctgggcacc

SEQ ID NO: 5937229 - DNA, 25 bp, Homo sapien
ctcacttccatcatcttcgtccttc

SEQ ID NO: 5937230 - DNA, 25 bp, Homo sapien
tttaagccgctgcttccctttcctc

SEQ ID NO: 5937231 - DNA, 25 bp, Homo sapien
aactcctcacctagaaacacaagcc

SEQ ID NO: 5937232 - DNA, 25 bp, Homo sapien
tagggctttgagcgctaccatggaa

SEQ ID NO: 5937233 - DNA, 25 bp, Homo sapien
gaagaggagggcagcttcatataaa

SEQ ID NO: 5937234 - DNA, 25 bp, Homo sapien
gtgaactggtaggaaactcctcacc

SEQ ID NO: 5937235 - DNA, 25 bp, Homo sapien
gcccttgattttttccatcgaataa

SEQ ID NO: 5937236 - DNA, 25 bp, Homo sapien
tagtgttctaacagtgtaaccatct

SEQ ID NO: 5937237 - DNA, 25 bp, Homo sapien
ctggcaatgggtgtggactgggaga

SEQ ID NO: 5937238 - DNA, 25 bp, Homo sapien
gagtcttcccagtactcttccagaa

SEQ ID NO: 5937239 - DNA, 25 bp, Homo sapien
aatagtgttctaacagtgtaaccat

SEQ ID NO: 5937240 - DNA, 25 bp, Homo sapien
taaggtgtgtacagttccacacgga

SEQ ID NO: 5937241 - DNA, 25 bp, Homo sapien
atgttagtgattttaaaaacataga

SEQ ID NO: 5937242 - DNA, 25 bp, Homo sapien
tccagaactcgactcgagctttcgg

SEQ ID NO: 5937243 - DNA, 25 bp, Homo sapien
ccaaatgaagtaactaaggtgtgta

SEQ ID NO: 5937244 - DNA, 25 bp, Homo sapien
gaaactcctcacctagaaacacaag

SEQ ID NO: 5937245 - DNA, 25 bp, Homo sapien
tccaaatgtaaatgagctaaacttc

SEQ ID NO: 5937246 - DNA, 25 bp, Homo sapien
gacactggcaatgggtgtggactgg

SEQ ID NO: 5937247 - DNA, 25 bp, Homo sapien
catcatcttcgtccttctcttggtc

SEQ ID NO: 5937248 - DNA, 25 bp, Homo sapien
aggaatctgggcacctccgtaaacc

SEQ ID NO: 5937249 - DNA, 25 bp, Homo sapien
gagaatgctgaacaggaaaggcacc

SEQ ID NO: 5937250 - DNA, 25 bp, Homo sapien
agttcaggaggaaggtgcaggagtg

SEQ ID NO: 5937251 - DNA, 25 bp, Homo sapien
acagtgtaaccatctaaaaataaga

SEQ ID NO: 5937252 - DNA, 25 bp, Homo sapien
gaactggtaggaaactcctcaccta

SEQ ID NO: 5937253 - DNA, 25 bp, Homo sapien
gtaggaaactcctcacctagaaaca

SEQ ID NO: 5937254 - DNA, 25 bp, Homo sapien
caatgggtgtggactgggagaatac

SEQ ID NO: 5937255 - DNA, 25 bp, Homo sapien
cacaggctgagaatgctgaacagga

SEQ ID NO: 5937256 - DNA, 25 bp, Homo sapien
agacatcccggaaacacaccaactg

SEQ ID NO: 5937257 - DNA, 25 bp, Homo sapien
tagagggagatttagcagctttttg

SEQ ID NO: 5937258 - DNA, 25 bp, Homo sapien
atgctgaacaggaaaggcaccaaag

SEQ ID NO: 5937259 - DNA, 25 bp, Homo sapien
ggctgagaatgctgaacaggaaagg

SEQ ID NO: 5937260 - DNA, 25 bp, Homo sapien
ctcgagctttcggtcatgatctcca

SEQ ID NO: 5937261 - DNA, 25 bp, Homo sapien
actggagtgaactggtaggaaactc

SEQ ID NO: 5937262 - DNA, 25 bp, Homo sapien
gaatgctgaacaggaaaggcaccaa

SEQ ID NO: 5937263 - DNA, 25 bp, Homo sapien
tgcacagaactttacacgcgttaaa

SEQ ID NO: 5937264 - DNA, 25 bp, Homo sapien
agctttcggtcatgatctccaaagg

SEQ ID NO: 5937265 - DNA, 25 bp, Homo sapien
ctgtgctcactcggtcgaacccttt

SEQ ID NO: 5937266 - DNA, 25 bp, Homo sapien
tcgactcgagctttcggtcatgatc

SEQ ID NO: 5937267 - DNA, 25 bp, Homo sapien
cggtcatgatctccaaaggcccttg

SEQ ID NO: 5937268 - DNA, 25 bp, Homo sapien
gaacccttttctgctgtagcctttc

SEQ ID NO: 5937269 - DNA, 25 bp, Homo sapien
tcccagtactcttccagaactcgac

SEQ ID NO: 5937270 - DNA, 25 bp, Homo sapien
gattttaaaaacatagagggagatt

SEQ ID NO: 5937271 - DNA, 25 bp, Homo sapien
gagtgggcagcggagccgagtactc

SEQ ID NO: 5937272 - DNA, 25 bp, Homo sapien
gaaagacactggcaatgggtgtgga

SEQ ID NO: 5937273 - DNA, 25 bp, Homo sapien
caaccacagggataaccagaagggt

SEQ ID NO: 5937274 - DNA, 25 bp, Homo sapien
tttactgccacaggctgagaatgct

SEQ ID NO: 5937275 - DNA, 25 bp, Homo sapien
gagtgaactggtaggaaactcctca

SEQ ID NO: 5937276 - DNA, 25 bp, Homo sapien
ggaggaaggtgcaggagtgggcagc

SEQ ID NO: 5937277 - DNA, 25 bp, Homo sapien
caatcaaatgcacagaactttacac

SEQ ID NO: 5937278 - DNA, 25 bp, Homo sapien
cagcaggacaaccacagggataacc

SEQ ID NO: 5937279 - DNA, 25 bp, Homo sapien
cttgcaaagaaatttcctagattta

SEQ ID NO: 5937280 - DNA, 25 bp, Homo sapien
cacaccaactgaagagaaatttaaa

SEQ ID NO: 5937281 - DNA, 25 bp, Homo sapien
gccgagtactcctcttcagactcac

SEQ ID NO: 5937282 - DNA, 25 bp, Homo sapien
aggtgtgtacagttccacacggacg

SEQ ID NO: 5937283 - DNA, 25 bp, Homo sapien
atataaagacaatggcactggagtg

SEQ ID NO: 5937284 - DNA, 25 bp, Homo sapien
agaatactgtgttcaagcagagaat

SEQ ID NO: 5937285 - DNA, 25 bp, Homo sapien
tgtaaatgagctaaacttccattag

SEQ ID NO: 5937286 - DNA, 25 bp, Homo sapien
tttaaaaacatagagggagatttag

SEQ ID NO: 5937287 - DNA, 25 bp, Homo sapien
ctgctgtagcctttccggcttgcaa

SEQ ID NO: 5937288 - DNA, 25 bp, Homo sapien
aagaaagacactggcaatgggtgtg

SEQ ID NO: 5937289 - DNA, 25 bp, Homo sapien
cttccctttcctcggagtcttccca

SEQ ID NO: 5937290 - DNA, 25 bp, Homo sapien
aaaggcccttgattttttccatcga

SEQ ID NO: 5937291 - DNA, 25 bp, Homo sapien
tttcctcggagtcttcccagtactc

SEQ ID NO: 5937292 - DNA, 25 bp, Homo sapien
gcagcggagccgagtactcctcttc

SEQ ID NO: 5937293 - DNA, 25 bp, Homo sapien
ggaaaggcaccaaagaaagacactg

SEQ ID NO: 5937294 - DNA, 25 bp, Homo sapien
gacaaccacagggataaccagaagg

SEQ ID NO: 5937295 - DNA, 25 bp, Homo sapien
aaatgaagtaactaaggtgtgtaca

SEQ ID NO: 5937296 - DNA, 25 bp, Homo sapien
gaaggtgcaggagtgggcagcggag

SEQ ID NO: 5937297 - DNA, 25 bp, Homo sapien
ttttccatcgaataaacatggcaat

SEQ ID NO: 5937298 - DNA, 25 bp, Homo sapien
tcactcggtcgaacccttttctgct

SEQ ID NO: 5937299 - DNA, 25 bp, Homo sapien
caatataatgttagtgattttaaaa

SEQ ID NO: 5937300 - DNA, 25 bp, Homo sapien
cggagccgagtactcctcttcagac

SEQ ID NO: 5937301 - DNA, 25 bp, Homo sapien
tgcttccctttcctcggagtcttcc

SEQ ID NO: 5937302 - DNA, 25 bp, Homo sapien
tccctttcctcggagtcttcccagt

SEQ ID NO: 5937303 - DNA, 25 bp, Homo sapien
cgttaaagggaaaggaatctgggca

SEQ ID NO: 5937304 - DNA, 25 bp, Homo sapien
caccaactgaagagaaatttaaaaa

SEQ ID NO: 5937305 - DNA, 25 bp, Homo sapien
taaaaacatagagggagatttagca

SEQ ID NO: 5937306 - DNA, 25 bp, Homo sapien
ggaaaggaatctgggcacctccgta

SEQ ID NO: 5937307 - DNA, 25 bp, Homo sapien
taagacatcccggaaacacaccaac

SEQ ID NO: 5937308 - DNA, 25 bp, Homo sapien
gttgtgtagcaaagtttctctttac

SEQ ID NO: 5937309 - DNA, 25 bp, Homo sapien
tcacctagaaacacaagccaacgga

SEQ ID NO: 5937310 - DNA, 25 bp, Homo sapien
gggagatttagcagctttttgttgt

SEQ ID NO: 5937311 - DNA, 25 bp, Homo sapien
tctccaaatgtaaatgagctaaact

SEQ ID NO: 5937312 - DNA, 25 bp, Homo sapien
tacacgcgttaaagggaaaggaatc

SEQ ID NO: 5937313 - DNA, 25 bp, Homo sapien
cagaactcgactcgagctttcggtc

SEQ ID NO: 5937314 - DNA, 25 bp, Homo sapien
gatttaagccgctgcttccctttcc

SEQ ID NO: 5937315 - DNA, 25 bp, Homo sapien
aacaggaaaggcaccaaagaaagac

SEQ ID NO: 5937316 - DNA, 25 bp, Homo sapien
gtgttctaacagtgtaaccatctaa

SEQ ID NO: 5937317 - DNA, 25 bp, Homo sapien
acccttttctgctgtagcctttccg

SEQ ID NO: 5937318 - DNA, 25 bp, Homo sapien
taacagtgtaaccatctaaaaataa

SEQ ID NO: 5937319 - DNA, 25 bp, Homo sapien
gtgctcactcggtcgaacccttttc

SEQ ID NO: 5937320 - DNA, 25 bp, Homo sapien
gaagtaactaaggtgtgtacagttc

SEQ ID NO: 5937321 - DNA, 25 bp, Homo sapien
ctcggagtcttcccagtactcttcc

SEQ ID NO: 5937322 - DNA, 25 bp, Homo sapien
agaaatttcctagatttaagccgct

SEQ ID NO: 5937323 - DNA, 25 bp, Homo sapien
ttcaggaggaaggtgcaggagtggg

SEQ ID NO: 5937324 - DNA, 25 bp, Homo sapien
aaaggcaccaaagaaagacactggc

SEQ ID NO: 5937325 - DNA, 25 bp, Homo sapien
aggaaactcctcacctagaaacaca

SEQ ID NO: 5937326 - DNA, 25 bp, Homo sapien
tcatcttcgtccttctcttggtcac

SEQ ID NO: 5937327 - DNA, 25 bp, Homo sapien
cgagtactcctcttcagactcactt

SEQ ID NO: 5937328 - DNA, 25 bp, Homo sapien
gactcacttccatcatcttcgtcct

SEQ ID NO: 5937329 - DNA, 25 bp, Homo sapien
agagaatagggctatttacatccac

SEQ ID NO: 5937330 - DNA, 25 bp, Homo sapien
ggctggagttcaggaggaaggtgca

SEQ ID NO: 5937331 - DNA, 25 bp, Homo sapien
ggagttcaggaggaaggtgcaggag

SEQ ID NO: 5937332 - DNA, 25 bp, Homo sapien
aatgagctaaacttccattagggct

SEQ ID NO: 5937333 - DNA, 25 bp, Homo sapien
ctccacggaaggaaggctggagttc

SEQ ID NO: 5937334 - DNA, 25 bp, Homo sapien
tactgccacaggctgagaatgctga

SEQ ID NO: 5937335 - DNA, 25 bp, Homo sapien
aatgcacagaactttacacgcgtta

SEQ ID NO: 5937336 - DNA, 25 bp, Homo sapien
cctcacctagaaacacaagccaacg

SEQ ID NO: 5937337 - DNA, 25 bp, Homo sapien
tggtaggaaactcctcacctagaaa

SEQ ID NO: 5937338 - DNA, 25 bp, Homo sapien
aacatggcaatggccagcaggacaa

SEQ ID NO: 5937339 - DNA, 25 bp, Homo sapien
atttcctagatttaagccgctgctt

SEQ ID NO: 5937340 - DNA, 25 bp, Homo sapien
tcgaacccttttctgctgtagcctt

SEQ ID NO: 5937341 - DNA, 25 bp, Homo sapien
ggataaccagaagggttgtaatgag

SEQ ID NO: 5937342 - DNA, 25 bp, Homo sapien
ttcagactcacttccatcatcttcg

SEQ ID NO: 5937343 - DNA, 25 bp, Homo sapien
ctgaaaaatagtgttctaacagtgt

SEQ ID NO: 5937344 - DNA, 25 bp, Homo sapien
ttcggtcatgatctccaaaggccct

SEQ ID NO: 5937345 - DNA, 25 bp, Homo sapien
aagcagagaatagggctatttacat

SEQ ID NO: 5937346 - DNA, 25 bp, Homo sapien
gcaccaaagaaagacactggcaatg

SEQ ID NO: 5937347 - DNA, 25 bp, Homo sapien
acatcccggaaacacaccaactgaa

SEQ ID NO: 5937348 - DNA, 25 bp, Homo sapien
caaaagggtctccaaatgtaaatga

SEQ ID NO: 5937349 - DNA, 25 bp, Homo sapien
gcagctttttgttgtgtagcaaagt

SEQ ID NO: 5937350 - DNA, 25 bp, Homo sapien
tgagcgctaccatggaagaggaggg

SEQ ID NO: 5937351 - DNA, 25 bp, Homo sapien
tgtagcaaagtttctctttactgcc

SEQ ID NO: 5937352 - DNA, 25 bp, Homo sapien
gagccgagtactcctcttcagactc

SEQ ID NO: 5937353 - DNA, 25 bp, Homo sapien
atctgggcacctccgtaaacctcac

SEQ ID NO: 5937354 - DNA, 25 bp, Homo sapien
tagggctatttacatccacaaaaaa

SEQ ID NO: 5937355 - DNA, 25 bp, Homo sapien
cactggcaatgggtgtggactggga

SEQ ID NO: 5937356 - DNA, 25 bp, Homo sapien
ttcctagatttaagccgctgcttcc

SEQ ID NO: 5937357 - DNA, 25 bp, Homo sapien
gggcagcttcatataaagacaatgg

SEQ ID NO: 5937358 - DNA, 25 bp, Homo sapien
cgctaccatggaagaggagggcagc

SEQ ID NO: 5937359 - DNA, 25 bp, Homo sapien
ctcctcacctagaaacacaagccaa

SEQ ID NO: 5937360 - DNA, 25 bp, Homo sapien
aaacctcactcgagctccacggaag

SEQ ID NO: 5937361 - DNA, 25 bp, Homo sapien
cgagctttcggtcatgatctccaaa

SEQ ID NO: 5937362 - DNA, 25 bp, Homo sapien
tagcctttccggcttgcaaagaaat

SEQ ID NO: 5937363 - DNA, 25 bp, Homo sapien
ttccacacggacgagtacagtttac

SEQ ID NO: 5937364 - DNA, 25 bp, Homo sapien
catggcaatggccagcaggacaacc

SEQ ID NO: 5937365 - DNA, 25 bp, Homo sapien
atgaagtaactaaggtgtgtacagt

SEQ ID NO: 5937366 - DNA, 25 bp, Homo sapien
gcaggacaaccacagggataaccag

SEQ ID NO: 5937367 - DNA, 25 bp, Homo sapien
aaagggtctccaaatgtaaatgagc

SEQ ID NO: 5937368 - DNA, 25 bp, Homo sapien
agggaaaggaatctgggcacctccg

SEQ ID NO: 5937369 - DNA, 25 bp, Homo sapien
actaaggtgtgtacagttccacacg

SEQ ID NO: 5937370 - DNA, 25 bp, Homo sapien
cctttcctcggagtcttcccagtac

SEQ ID NO: 5937371 - DNA, 25 bp, Homo sapien
atgggtgtggactgggagaatactg

SEQ ID NO: 5937372 - DNA, 25 bp, Homo sapien
gtgattttaaaaacatagagggaga

SEQ ID NO: 5937373 - DNA, 25 bp, Homo sapien
ccacagggataaccagaagggttgt

SEQ ID NO: 5937374 - DNA, 25 bp, Homo sapien
aatactgtgttcaagcagagaatag

SEQ ID NO: 5937375 - DNA, 25 bp, Homo sapien
atctccaaaggcccttgattttttc

SEQ ID NO: 5937376 - DNA, 25 bp, Homo sapien
ttccggcttgcaaagaaatttccta

SEQ ID NO: 5937377 - DNA, 25 bp, Homo sapien
agtgtaaccatctaaaaataagaca

SEQ ID NO: 5937378 - DNA, 25 bp, Homo sapien
ttttttccatcgaataaacatggca

SEQ ID NO: 5937379 - DNA, 25 bp, Homo sapien
gagggcagcttcatataaagacaat

SEQ ID NO: 5937380 - DNA, 25 bp, Homo sapien
cgagctccacggaaggaaggctgga

SEQ ID NO: 5937381 - DNA, 25 bp, Homo sapien
agaaacacaagccaacggagccaaa

SEQ ID NO: 5937382 - DNA, 25 bp, Homo sapien
agtactcctcttcagactcacttcc

SEQ ID NO: 5937383 - DNA, 25 bp, Homo sapien
tctaaaaataagacatcccggaaac

SEQ ID NO: 5937384 - DNA, 25 bp, Homo sapien
acagttccacacggacgagtacagt

SEQ ID NO: 5937385 - DNA, 25 bp, Homo sapien
cttggtcactcccctctgtgctcac

SEQ ID NO: 5937386 - DNA, 25 bp, Homo sapien
gtggactgggagaatactgtgttca

SEQ ID NO: 5937387 - DNA, 25 bp, Homo sapien
tttgagcgctaccatggaagaggag

SEQ ID NO: 5937388 - DNA, 25 bp, Homo sapien
aacacaccaactgaagagaaattta

SEQ ID NO: 5937389 - DNA, 25 bp, Homo sapien
gtcactcccctctgtgctcactcgg

SEQ ID NO: 5937390 - DNA, 25 bp, Homo sapien
tcattgcaatataatgttagtgatt

SEQ ID NO: 5937391 - DNA, 25 bp, Homo sapien
aaggctggagttcaggaggaaggtg

SEQ ID NO: 5937392 - DNA, 25 bp, Homo sapien
gcctttccggcttgcaaagaaattt

SEQ ID NO: 5937393 - DNA, 25 bp, Homo sapien
tggaagaggagggcagcttcatata

SEQ ID NO: 5937394 - DNA, 25 bp, Homo sapien
ctttccggcttgcaaagaaatttcc

SEQ ID NO: 5937395 - DNA, 25 bp, Homo sapien
aggagggcagcttcatataaagaca

SEQ ID NO: 5937396 - DNA, 25 bp, Homo sapien
tgcaaagaaatttcctagatttaag

SEQ ID NO: 5937397 - DNA, 25 bp, Homo sapien
aggagtgggcagcggagccgagtac

SEQ ID NO: 5937398 - DNA, 25 bp, Homo sapien
tactcctcttcagactcacttccat

SEQ ID NO: 5937399 - DNA, 25 bp, Homo sapien
acggaaggaaggctggagttcagga

SEQ ID NO: 5937400 - DNA, 25 bp, Homo sapien
atcccggaaacacaccaactgaaga

SEQ ID NO: 5937401 - DNA, 25 bp, Homo sapien
ggaaggaaggctggagttcaggagg

SEQ ID NO: 5937402 - DNA, 25 bp, Homo sapien
tagcaaagtttctctttactgccac

SEQ ID NO: 5937403 - DNA, 25 bp, Homo sapien
cagactcacttccatcatcttcgtc

SEQ ID NO: 5937404 - DNA, 25 bp, Homo sapien
ggtcgaacccttttctgctgtagcc

SEQ ID NO: 5937405 - DNA, 25 bp, Homo sapien
aatgtaaatgagctaaacttccatt

SEQ ID NO: 5937406 - DNA, 25 bp, Homo sapien
aggtgcaggagtgggcagcggagcc

SEQ ID NO: 5937407 - DNA, 25 bp, Homo sapien
gctttgagcgctaccatggaagagg

SEQ ID NO: 5937408 - DNA, 25 bp, Homo sapien
ttctgctgtagcctttccggcttgc

SEQ ID NO: 5937409 - DNA, 25 bp, Homo sapien
gggtgtggactgggagaatactgtg

SEQ ID NO: 5937410 - DNA, 25 bp, Homo sapien
tttagcagctttttgttgtgtagca

SEQ ID NO: 5937411 - DNA, 25 bp, Homo sapien
tttctctttactgccacaggctgag

SEQ ID NO: 5937412 - DNA, 25 bp, Homo sapien
caggaaaggcaccaaagaaagacac

SEQ ID NO: 5937413 - DNA, 25 bp, Homo sapien
tgtagcctttccggcttgcaaagaa

SEQ ID NO: 5937414 - DNA, 25 bp, Homo sapien
aaggaaggctggagttcaggaggaa

SEQ ID NO: 5937415 - DNA, 25 bp, Homo sapien
cagaactttacacgcgttaaaggga

SEQ ID NO: 5937416 - DNA, 25 bp, Homo sapien
ccgtaaacctcactcgagctccacg

SEQ ID NO: 5937417 - DNA, 25 bp, Homo sapien
agcgctaccatggaagaggagggca

SEQ ID NO: 5937418 - DNA, 25 bp, Homo sapien
ccacggaaggaaggctggagttcag

SEQ ID NO: 5937419 - DNA, 25 bp, Homo sapien
cttccatcatcttcgtccttctctt

SEQ ID NO: 5937420 - DNA, 25 bp, Homo sapien
agggataaccagaagggttgtaatg

SEQ ID NO: 5937421 - DNA, 25 bp, Homo sapien
tcccctctgtgctcactcggtcgaa

SEQ ID NO: 5937422 - DNA, 25 bp, Homo sapien
taactaaggtgtgtacagttccaca

SEQ ID NO: 5937423 - DNA, 25 bp, Homo sapien
aggaaggtgcaggagtgggcagcgg

SEQ ID NO: 5937424 - DNA, 25 bp, Homo sapien
ggtctccaaatgtaaatgagctaaa

SEQ ID NO: 5937425 - DNA, 25 bp, Homo sapien
aataagacatcccggaaacacacca

SEQ ID NO: 5937426 - DNA, 25 bp, Homo sapien
ttccattagggctttgagcgctacc

SEQ ID NO: 5937427 - DNA, 25 bp, Homo sapien
ttctgaaaaatagtgttctaacagt

SEQ ID NO: 5937428 - DNA, 25 bp, Homo sapien
tgtgtagcaaagtttctctttactg

SEQ ID NO: 5937429 - DNA, 25 bp, Homo sapien
ctaaacttccattagggctttgagc

SEQ ID NO: 5937430 - DNA, 25 bp, Homo sapien
gctgaacaggaaaggcaccaaagaa

SEQ ID NO: 5937431 - DNA, 25 bp, Homo sapien
gaactcgactcgagctttcggtcat

SEQ ID NO: 5937432 - DNA, 25 bp, Homo sapien
ctctgtgctcactcggtcgaaccct

SEQ ID NO: 5937433 - DNA, 25 bp, Homo sapien
cacgcgttaaagggaaaggaatctg

SEQ ID NO: 5937434 - DNA, 25 bp, Homo sapien
gccacaggctgagaatgctgaacag

SEQ ID NO: 5937435 - DNA, 25 bp, Homo sapien
aggcccttgattttttccatcgaat

SEQ ID NO: 5937436 - DNA, 25 bp, Homo sapien
aagggagacagatgaggctggtgag

SEQ ID NO: 5937437 - DNA, 25 bp, Homo sapien
cccagaaccctccccgttgtgaaga

SEQ ID NO: 5937438 - DNA, 25 bp, Homo sapien
aagggaggcagatcaacagatgagc

SEQ ID NO: 5937439 - DNA, 25 bp, Homo sapien
tggagaagccttcccatgccgctca

SEQ ID NO: 5937440 - DNA, 25 bp, Homo sapien
gcacagccctcctttctcacctggg

SEQ ID NO: 5937441 - DNA, 25 bp, Homo sapien
tgctggccaaagaaataaccactcc

SEQ ID NO: 5937442 - DNA, 25 bp, Homo sapien
cacttttataaaaatccacctccag

SEQ ID NO: 5937443 - DNA, 25 bp, Homo sapien
gaggcaggaggtgatggagaagcct

SEQ ID NO: 5937444 - DNA, 25 bp, Homo sapien
ggccaaagaaataaccactcccact

SEQ ID NO: 5937445 - DNA, 25 bp, Homo sapien
agagcttccaggccctgcacagccc

SEQ ID NO: 5937446 - DNA, 25 bp, Homo sapien
gggcctcacgggaatgcagcagcca

SEQ ID NO: 5937447 - DNA, 25 bp, Homo sapien
gggagacagatgaggctggtgagct

SEQ ID NO: 5937448 - DNA, 25 bp, Homo sapien
aacagatgagccatcttggagccca

SEQ ID NO: 5937449 - DNA, 25 bp, Homo sapien
cttttttctctctgttttgaataat

SEQ ID NO: 5937450 - DNA, 25 bp, Homo sapien
gaagacattggccagtcctagtcat

SEQ ID NO: 5937451 - DNA, 25 bp, Homo sapien
agccttcccatgccgctcacagggg

SEQ ID NO: 5937452 - DNA, 25 bp, Homo sapien
gagagacccagtcactccaggagac

SEQ ID NO: 5937453 - DNA, 25 bp, Homo sapien
ctccccactcaggccttcgaggctg

SEQ ID NO: 5937454 - DNA, 25 bp, Homo sapien
gagcccaggtttcccctggagcaga

SEQ ID NO: 5937455 - DNA, 25 bp, Homo sapien
aggagactcctgagttaacactggg

SEQ ID NO: 5937456 - DNA, 25 bp, Homo sapien
tggcaaggggtgacctgaagagagc

SEQ ID NO: 5937457 - DNA, 25 bp, Homo sapien
gaagggtttttatgctggccaaaga

SEQ ID NO: 5937458 - DNA, 25 bp, Homo sapien
tttacaatttgcctcaatcactttt

SEQ ID NO: 5937459 - DNA, 25 bp, Homo sapien
gcccgcccctctccccactcaggcc

SEQ ID NO: 5937460 - DNA, 25 bp, Homo sapien
tgcccaacctaggtgaggagtggtg

SEQ ID NO: 5937461 - DNA, 25 bp, Homo sapien
ctcaatcacttttataaaaatccac

SEQ ID NO: 5937462 - DNA, 25 bp, Homo sapien
gaaccctccccgttgtgaagaggca

SEQ ID NO: 5937463 - DNA, 25 bp, Homo sapien
ccgcccctctccccactcaggcctt

SEQ ID NO: 5937464 - DNA, 25 bp, Homo sapien
ctgctttgtctctcctatgtggggc

SEQ ID NO: 5937465 - DNA, 25 bp, Homo sapien
gcagccatgcaattacctggaactg

SEQ ID NO: 5937466 - DNA, 25 bp, Homo sapien
gccaggctcctctccatggggcagc

SEQ ID NO: 5937467 - DNA, 25 bp, Homo sapien
ggaatgcagcagccatgcaattacc

SEQ ID NO: 5937468 - DNA, 25 bp, Homo sapien
cccagggatggggattggcacacaa

SEQ ID NO: 5937469 - DNA, 25 bp, Homo sapien
aaatgccctctgtcccagggatggg

SEQ ID NO: 5937470 - DNA, 25 bp, Homo sapien
gcccaggtttcccctggagcagatg

SEQ ID NO: 5937471 - DNA, 25 bp, Homo sapien
gctggtgagctggccgccttttcca

SEQ ID NO: 5937472 - DNA, 25 bp, Homo sapien
aggtttcccctggagcagatggagg

SEQ ID NO: 5937473 - DNA, 25 bp, Homo sapien
cagcccgcccctctccccactcagg

SEQ ID NO: 5937474 - DNA, 25 bp, Homo sapien
ctccaggagactcctgagttaacac

SEQ ID NO: 5937475 - DNA, 25 bp, Homo sapien
acagccctcctttctcacctggggg

SEQ ID NO: 5937476 - DNA, 25 bp, Homo sapien
gcaggggagagacccagtcactcca

SEQ ID NO: 5937477 - DNA, 25 bp, Homo sapien
ctaggtgaggagtggtggctcctgg

SEQ ID NO: 5937478 - DNA, 25 bp, Homo sapien
actggtgccaggctcctctccatgg

SEQ ID NO: 5937479 - DNA, 25 bp, Homo sapien
gtgtgttggggtggcttttttctct

SEQ ID NO: 5937480 - DNA, 25 bp, Homo sapien
aagtggctgcaggggagagacccag

SEQ ID NO: 5937481 - DNA, 25 bp, Homo sapien
gtgagctggccgccttttccaacac

SEQ ID NO: 5937482 - DNA, 25 bp, Homo sapien
acaccgaagggaggcagatcaacag

SEQ ID NO: 5937483 - DNA, 25 bp, Homo sapien
tccacctccagcccgcccctctccc

SEQ ID NO: 5937484 - DNA, 25 bp, Homo sapien
tcctatgtggggctaggagactcgc

SEQ ID NO: 5937485 - DNA, 25 bp, Homo sapien
cgttgtgaagaggcagtagcattta

SEQ ID NO: 5937486 - DNA, 25 bp, Homo sapien
tgagttaacactgggaagacattgg

SEQ ID NO: 5937487 - DNA, 25 bp, Homo sapien
ggagggttctgctttgtctctccta

SEQ ID NO: 5937488 - DNA, 25 bp, Homo sapien
caacctaggtgaggagtggtggctc

SEQ ID NO: 5937489 - DNA, 25 bp, Homo sapien
aagggtgtgtgaagggtttttatgc

SEQ ID NO: 5937490 - DNA, 25 bp, Homo sapien
tgtctctcctatgtggggctaggag

SEQ ID NO: 5937491 - DNA, 25 bp, Homo sapien
aatccacctccagcccgcccctctc

SEQ ID NO: 5937492 - DNA, 25 bp, Homo sapien
atgcttgaaaaactcaaccaaatcc

SEQ ID NO: 5937493 - DNA, 25 bp, Homo sapien
ccgctcacaggggcctcacgggaat

SEQ ID NO: 5937494 - DNA, 25 bp, Homo sapien
ggcacacaaggagccaaacacagcc

SEQ ID NO: 5937495 - DNA, 25 bp, Homo sapien
ggtcctgtgttggggagaaacaagt

SEQ ID NO: 5937496 - DNA, 25 bp, Homo sapien
ctggtcctgtgttggggagaaacaa

SEQ ID NO: 5937497 - DNA, 25 bp, Homo sapien
ttcccatgccgctcacaggggcctc

SEQ ID NO: 5937498 - DNA, 25 bp, Homo sapien
cagtcctagtcatctctcggtcagt

SEQ ID NO: 5937499 - DNA, 25 bp, Homo sapien
gatcaacagatgagccatcttggag

SEQ ID NO: 5937500 - DNA, 25 bp, Homo sapien
cttggagcccaggtttcccctggag

SEQ ID NO: 5937501 - DNA, 25 bp, Homo sapien
ctgcacagccctcctttctcacctg

SEQ ID NO: 5937502 - DNA, 25 bp, Homo sapien
gtgaagggtttttatgctggccaaa

SEQ ID NO: 5937503 - DNA, 25 bp, Homo sapien
ctcctctccatggggcagctaatga

SEQ ID NO: 5937504 - DNA, 25 bp, Homo sapien
ggtcagtaggtccgagagcttccag

SEQ ID NO: 5937505 - DNA, 25 bp, Homo sapien
aattacctggaactggtcctgtgtt

SEQ ID NO: 5937506 - DNA, 25 bp, Homo sapien
tggtggctcctggctctggggagag

SEQ ID NO: 5937507 - DNA, 25 bp, Homo sapien
gaggagtggtggctcctggctctgg

SEQ ID NO: 5937508 - DNA, 25 bp, Homo sapien
ctcgcagatcccttgcaccccagaa

SEQ ID NO: 5937509 - DNA, 25 bp, Homo sapien
gtgccaggctcctctccatggggca

SEQ ID NO: 5937510 - DNA, 25 bp, Homo sapien
accgaagggaggcagatcaacagat

SEQ ID NO: 5937511 - DNA, 25 bp, Homo sapien
caggctcctctccatggggcagcta

SEQ ID NO: 5937512 - DNA, 25 bp, Homo sapien
ccttcccatgccgctcacaggggcc

SEQ ID NO: 5937513 - DNA, 25 bp, Homo sapien
tataaaaatccacctccagcccgcc

SEQ ID NO: 5937514 - DNA, 25 bp, Homo sapien
tgccgctcacaggggcctcacggga

SEQ ID NO: 5937515 - DNA, 25 bp, Homo sapien
ctgtgtgttggggtggcttttttct

SEQ ID NO: 5937516 - DNA, 25 bp, Homo sapien
cctagtcatctctcggtcagtaggt

SEQ ID NO: 5937517 - DNA, 25 bp, Homo sapien
gcagtagcatttagaagggagacag

SEQ ID NO: 5937518 - DNA, 25 bp, Homo sapien
taaaaatccacctccagcccgcccc

SEQ ID NO: 5937519 - DNA, 25 bp, Homo sapien
cagtcactccaggagactcctgagt

SEQ ID NO: 5937520 - DNA, 25 bp, Homo sapien
caatttgcctcaatcacttttataa

SEQ ID NO: 5937521 - DNA, 25 bp, Homo sapien
agatggagggttctgctttgtctct

SEQ ID NO: 5937522 - DNA, 25 bp, Homo sapien
aaataaccactcccactgcccaacc

SEQ ID NO: 5937523 - DNA, 25 bp, Homo sapien
gtgaagaggcagtagcatttagaag

SEQ ID NO: 5937524 - DNA, 25 bp, Homo sapien
tccccgttgtgaagaggcagtagca

SEQ ID NO: 5937525 - DNA, 25 bp, Homo sapien
gtgaggagtggtggctcctggctct

SEQ ID NO: 5937526 - DNA, 25 bp, Homo sapien
tcagtaggtccgagagcttccaggc

SEQ ID NO: 5937527 - DNA, 25 bp, Homo sapien
ttctgctttgtctctcctatgtggg

SEQ ID NO: 5937528 - DNA, 25 bp, Homo sapien
gtggctcctggctctggggagagtg

SEQ ID NO: 5937529 - DNA, 25 bp, Homo sapien
gccaataggcagagagttgagggat

SEQ ID NO: 5937530 - DNA, 25 bp, Homo sapien
accctccccgttgtgaagaggcagt

SEQ ID NO: 5937531 - DNA, 25 bp, Homo sapien
cagatcccttgcaccccagaaccct

SEQ ID NO: 5937532 - DNA, 25 bp, Homo sapien
ttcacccaggtggctacaggccagg

SEQ ID NO: 5937533 - DNA, 25 bp, Homo sapien
gagctggccgccttttccaacaccg

SEQ ID NO: 5937534 - DNA, 25 bp, Homo sapien
aactggtcctgtgttggggagaaac

SEQ ID NO: 5937535 - DNA, 25 bp, Homo sapien
cacctccagcccgcccctctcccca

SEQ ID NO: 5937536 - DNA, 25 bp, Homo sapien
ggctgtctgaagatgcttgaaaaac

SEQ ID NO: 5937537 - DNA, 25 bp, Homo sapien
tctctcggtcagtaggtccgagagc

SEQ ID NO: 5937538 - DNA, 25 bp, Homo sapien
cagcagccatgcaattacctggaac

SEQ ID NO: 5937539 - DNA, 25 bp, Homo sapien
ccatcttggagcccaggtttcccct

SEQ ID NO: 5937540 - DNA, 25 bp, Homo sapien
cacaaggagccaaacacagccaata

SEQ ID NO: 5937541 - DNA, 25 bp, Homo sapien
agccatcttggagcccaggtttccc

SEQ ID NO: 5937542 - DNA, 25 bp, Homo sapien
tccagcccgcccctctccccactca

SEQ ID NO: 5937543 - DNA, 25 bp, Homo sapien
caacaccgaagggaggcagatcaac

SEQ ID NO: 5937544 - DNA, 25 bp, Homo sapien
gactcgccttaaatgccctctgtcc

SEQ ID NO: 5937545 - DNA, 25 bp, Homo sapien
aggcagagagttgagggattcaccc

SEQ ID NO: 5937546 - DNA, 25 bp, Homo sapien
ggtccgagagcttccaggccctgca

SEQ ID NO: 5937547 - DNA, 25 bp, Homo sapien
gccttcgaggctgtctgaagatgct

SEQ ID NO: 5937548 - DNA, 25 bp, Homo sapien
tgaggctggtgagctggccgccttt

SEQ ID NO: 5937549 - DNA, 25 bp, Homo sapien
gtgtgaagggtttttatgctggcca

SEQ ID NO: 5937550 - DNA, 25 bp, Homo sapien
aggggagagacccagtcactccagg

SEQ ID NO: 5937551 - DNA, 25 bp, Homo sapien
tccaggccctgcacagccctccttt

SEQ ID NO: 5937552 - DNA, 25 bp, Homo sapien
gtcactccaggagactcctgagtta

SEQ ID NO: 5937553 - DNA, 25 bp, Homo sapien
gacagatgaggctggtgagctggcc

SEQ ID NO: 5937554 - DNA, 25 bp, Homo sapien
gatggggattggcacacaaggagcc

SEQ ID NO: 5937555 - DNA, 25 bp, Homo sapien
agctaatgaaacctcgcagatccct

SEQ ID NO: 5937556 - DNA, 25 bp, Homo sapien
ccaggagactcctgagttaacactg

SEQ ID NO: 5937557 - DNA, 25 bp, Homo sapien
tgaaacctcgcagatcccttgcacc

SEQ ID NO: 5937558 - DNA, 25 bp, Homo sapien
cgccttaaatgccctctgtcccagg

SEQ ID NO: 5937559 - DNA, 25 bp, Homo sapien
gaagatgcttgaaaaactcaaccaa

SEQ ID NO: 5937560 - DNA, 25 bp, Homo sapien
ttgcaccccagaaccctccccgttg

SEQ ID NO: 5937561 - DNA, 25 bp, Homo sapien
agccctcctttctcacctgggggga

SEQ ID NO: 5937562 - DNA, 25 bp, Homo sapien
cccatgccgctcacaggggcctcac

SEQ ID NO: 5937563 - DNA, 25 bp, Homo sapien
ctctccccactcaggccttcgaggc

SEQ ID NO: 5937564 - DNA, 25 bp, Homo sapien
ctcctggctctggggagagtggcaa

SEQ ID NO: 5937565 - DNA, 25 bp, Homo sapien
acctaggtgaggagtggtggctcct

SEQ ID NO: 5937566 - DNA, 25 bp, Homo sapien
ggaagtggctgcaggggagagaccc

SEQ ID NO: 5937567 - DNA, 25 bp, Homo sapien
tcacaggggcctcacgggaatgcag

SEQ ID NO: 5937568 - DNA, 25 bp, Homo sapien
tagtcatctctcggtcagtaggtcc

SEQ ID NO: 5937569 - DNA, 25 bp, Homo sapien
cgaagggaggcagatcaacagatga

SEQ ID NO: 5937570 - DNA, 25 bp, Homo sapien
ttaaatgccctctgtcccagggatg

SEQ ID NO: 5937571 - DNA, 25 bp, Homo sapien
cagccaataggcagagagttgaggg

SEQ ID NO: 5937572 - DNA, 25 bp, Homo sapien
ttttgaataatgtttacaatttgcc

SEQ ID NO: 5937573 - DNA, 25 bp, Homo sapien
cacacaaggagccaaacacagccaa

SEQ ID NO: 5937574 - DNA, 25 bp, Homo sapien
ttaacactgggaagacattggccag

SEQ ID NO: 5937575 - DNA, 25 bp, Homo sapien
ccaaagaaataaccactcccactgc

SEQ ID NO: 5937576 - DNA, 25 bp, Homo sapien
caatcacttttataaaaatccacct

SEQ ID NO: 5937577 - DNA, 25 bp, Homo sapien
aacactgggaagacattggccagtc

SEQ ID NO: 5937578 - DNA, 25 bp, Homo sapien
ggtttttatgctggccaaagaaata

SEQ ID NO: 5937579 - DNA, 25 bp, Homo sapien
aggctggtgagctggccgccttttc

SEQ ID NO: 5937580 - DNA, 25 bp, Homo sapien
catgccgctcacaggggcctcacgg

SEQ ID NO: 5937581 - DNA, 25 bp, Homo sapien
tcaggccttcgaggctgtctgaaga

SEQ ID NO: 5937582 - DNA, 25 bp, Homo sapien
atgccctctgtcccagggatgggga

SEQ ID NO: 5937583 - DNA, 25 bp, Homo sapien
gctggccgccttttccaacaccgaa

SEQ ID NO: 5937584 - DNA, 25 bp, Homo sapien
ccccactcaggccttcgaggctgtc

SEQ ID NO: 5937585 - DNA, 25 bp, Homo sapien
caataggcagagagttgagggattc

SEQ ID NO: 5937586 - DNA, 25 bp, Homo sapien
agagctatactggtgccaggctcct

SEQ ID NO: 5937587 - DNA, 25 bp, Homo sapien
cacagccaataggcagagagttgag

SEQ ID NO: 5937588 - DNA, 25 bp, Homo sapien
ggctaggagactcgccttaaatgcc

SEQ ID NO: 5937589 - DNA, 25 bp, Homo sapien
tctctctgttttgaataatgtttac

SEQ ID NO: 5937590 - DNA, 25 bp, Homo sapien
aggggcctcacgggaatgcagcagc

SEQ ID NO: 5937591 - DNA, 25 bp, Homo sapien
ttgcctcaatcacttttataaaaat

SEQ ID NO: 5937592 - DNA, 25 bp, Homo sapien
ggagtggtggctcctggctctgggg

SEQ ID NO: 5937593 - DNA, 25 bp, Homo sapien
gaagagaaaagggtgtgtgaagggt

SEQ ID NO: 5937594 - DNA, 25 bp, Homo sapien
taggtccgagagcttccaggccctg

SEQ ID NO: 5937595 - DNA, 25 bp, Homo sapien
aaggatggaagagaaaagggtgtgt

SEQ ID NO: 5937596 - DNA, 25 bp, Homo sapien
gccgccttttccaacaccgaaggga

SEQ ID NO: 5937597 - DNA, 25 bp, Homo sapien
aatgcagcagccatgcaattacctg

SEQ ID NO: 5937598 - DNA, 25 bp, Homo sapien
ctatgtggggctaggagactcgcct

SEQ ID NO: 5937599 - DNA, 25 bp, Homo sapien
ccctgcacagccctcctttctcacc

SEQ ID NO: 5937600 - DNA, 25 bp, Homo sapien
gatggaagagaaaagggtgtgtgaa

SEQ ID NO: 5937601 - DNA, 25 bp, Homo sapien
tggggcagctaatgaaacctcgcag

SEQ ID NO: 5937602 - DNA, 25 bp, Homo sapien
tctcggtcagtaggtccgagagctt

SEQ ID NO: 5937603 - DNA, 25 bp, Homo sapien
cagatcaacagatgagccatcttgg

SEQ ID NO: 5937604 - DNA, 25 bp, Homo sapien
gggcagctgtgtgttggggtggctt

SEQ ID NO: 5937605 - DNA, 25 bp, Homo sapien
gagcagatggagggttctgctttgt

SEQ ID NO: 5937606 - DNA, 25 bp, Homo sapien
ctgtctgaagatgcttgaaaaactc

SEQ ID NO: 5937607 - DNA, 25 bp, Homo sapien
ctggaactggtcctgtgttggggag

SEQ ID NO: 5937608 - DNA, 25 bp, Homo sapien
agacattggccagtcctagtcatct

SEQ ID NO: 5937609 - DNA, 25 bp, Homo sapien
agccatgcaattacctggaactggt

SEQ ID NO: 5937610 - DNA, 25 bp, Homo sapien
gcccctctccccactcaggccttcg

SEQ ID NO: 5937611 - DNA, 25 bp, Homo sapien
cactccaggagactcctgagttaac

SEQ ID NO: 5937612 - DNA, 25 bp, Homo sapien
cttccaggccctgcacagccctcct

SEQ ID NO: 5937613 - DNA, 25 bp, Homo sapien
ccactcaggccttcgaggctgtctg

SEQ ID NO: 5937614 - DNA, 25 bp, Homo sapien
gggtggcttttttctctctgttttg

SEQ ID NO: 5937615 - DNA, 25 bp, Homo sapien
gaggctgtctgaagatgcttgaaaa

SEQ ID NO: 5937616 - DNA, 25 bp, Homo sapien
ctgcaggggagagacccagtcactc

SEQ ID NO: 5937617 - DNA, 25 bp, Homo sapien
aggcagtagcatttagaagggagac

SEQ ID NO: 5937618 - DNA, 25 bp, Homo sapien
agaggcagtagcatttagaagggag

SEQ ID NO: 5937619 - DNA, 25 bp, Homo sapien
gggagagacccagtcactccaggag

SEQ ID NO: 5937620 - DNA, 25 bp, Homo sapien
gcaattacctggaactggtcctgtg

SEQ ID NO: 5937621 - DNA, 25 bp, Homo sapien
gtggcttttttctctctgttttgaa

SEQ ID NO: 5937622 - DNA, 25 bp, Homo sapien
ctggccaaagaaataaccactccca

SEQ ID NO: 5937623 - DNA, 25 bp, Homo sapien
cacgggaatgcagcagccatgcaat

SEQ ID NO: 5937624 - DNA, 25 bp, Homo sapien
tagcatttagaagggagacagatga

SEQ ID NO: 5937625 - DNA, 25 bp, Homo sapien
aggagccaaacacagccaataggca

SEQ ID NO: 5937626 - DNA, 25 bp, Homo sapien
gtcatctctcggtcagtaggtccga

SEQ ID NO: 5937627 - DNA, 25 bp, Homo sapien
gaggcagatcaacagatgagccatc

SEQ ID NO: 5937628 - DNA, 25 bp, Homo sapien
tccatggggcagctaatgaaacctc

SEQ ID NO: 5937629 - DNA, 25 bp, Homo sapien
tttgtctctcctatgtggggctagg

SEQ ID NO: 5937630 - DNA, 25 bp, Homo sapien
agaagggagacagatgaggctggtg

SEQ ID NO: 5937631 - DNA, 25 bp, Homo sapien
gcagagagttgagggattcacccag

SEQ ID NO: 5937632 - DNA, 25 bp, Homo sapien
tcctttctcacctggggggaggcag

SEQ ID NO: 5937633 - DNA, 25 bp, Homo sapien
atttgcctcaatcacttttataaaa

SEQ ID NO: 5937634 - DNA, 25 bp, Homo sapien
ctcctgagttaacactgggaagaca

SEQ ID NO: 5937635 - DNA, 25 bp, Homo sapien
ctgggaagacattggccagtcctag

SEQ ID NO: 5937636 - DNA, 25 bp, Homo sapien
gagactcgccttaaatgccctctgt

SEQ ID NO: 5937637 - DNA, 25 bp, Homo sapien
agggtttttatgctggccaaagaaa

SEQ ID NO: 5937638 - DNA, 25 bp, Homo sapien
cttcgaggctgtctgaagatgcttg

SEQ ID NO: 5937639 - DNA, 25 bp, Homo sapien
ggctgcaggggagagacccagtcac

SEQ ID NO: 5937640 - DNA, 25 bp, Homo sapien
ggagaaacaagttttctgaagtcag

SEQ ID NO: 5937641 - DNA, 25 bp, Homo sapien
ataggcagagagttgagggattcac

SEQ ID NO: 5937642 - DNA, 25 bp, Homo sapien
ggggtgacctgaagagagctatact

SEQ ID NO: 5937643 - DNA, 25 bp, Homo sapien
ctaggagactcgccttaaatgccct

SEQ ID NO: 5937644 - DNA, 25 bp, Homo sapien
gagaagccttcccatgccgctcaca

SEQ ID NO: 5937645 - DNA, 25 bp, Homo sapien
aggtgaggagtggtggctcctggct

SEQ ID NO: 5937646 - DNA, 25 bp, Homo sapien
gcatttagaagggagacagatgagg

SEQ ID NO: 5937647 - DNA, 25 bp, Homo sapien
tatgctggccaaagaaataaccact

SEQ ID NO: 5937648 - DNA, 25 bp, Homo sapien
gagacccagtcactccaggagactc

SEQ ID NO: 5937649 - DNA, 25 bp, Homo sapien
tcggtcagtaggtccgagagcttcc

SEQ ID NO: 5937650 - DNA, 25 bp, Homo sapien
gcctcacgggaatgcagcagccatg

SEQ ID NO: 5937651 - DNA, 25 bp, Homo sapien
ttagaagggagacagatgaggctgg

SEQ ID NO: 5937652 - DNA, 25 bp, Homo sapien
atttagaagggagacagatgaggct

SEQ ID NO: 5937653 - DNA, 25 bp, Homo sapien
gccttttccaacaccgaagggaggc

SEQ ID NO: 5937654 - DNA, 25 bp, Homo sapien
cctcctttctcacctggggggaggc

SEQ ID NO: 5937655 - DNA, 25 bp, Homo sapien
atgtggggctaggagactcgcctta

SEQ ID NO: 5937656 - DNA, 25 bp, Homo sapien
ccaggtttcccctggagcagatgga

SEQ ID NO: 5937657 - DNA, 25 bp, Homo sapien
gacccagtcactccaggagactcct

SEQ ID NO: 5937658 - DNA, 25 bp, Homo sapien
ctgaagatgcttgaaaaactcaacc

SEQ ID NO: 5937659 - DNA, 25 bp, Homo sapien
catctctcggtcagtaggtccgaga

SEQ ID NO: 5937660 - DNA, 25 bp, Homo sapien
ttgaataatgtttacaatttgcctc

SEQ ID NO: 5937661 - DNA, 25 bp, Homo sapien
tcccttgcaccccagaaccctcccc

SEQ ID NO: 5937662 - DNA, 25 bp, Homo sapien
gtctgaagatgcttgaaaaactcaa

SEQ ID NO: 5937663 - DNA, 25 bp, Homo sapien
ggggctaggagactcgccttaaatg

SEQ ID NO: 5937664 - DNA, 25 bp, Homo sapien
agtggtggctcctggctctggggag

SEQ ID NO: 5937665 - DNA, 25 bp, Homo sapien
gtcccagggatggggattggcacac

SEQ ID NO: 5937666 - DNA, 25 bp, Homo sapien
ggctcctggctctggggagagtggc

SEQ ID NO: 5937667 - DNA, 25 bp, Homo sapien
gcagatggagggttctgctttgtct

SEQ ID NO: 5937668 - DNA, 25 bp, Homo sapien
gaagagagctatactggtgccaggc

SEQ ID NO: 5937669 - DNA, 25 bp, Homo sapien
aggtgatggagaagccttcccatgc

SEQ ID NO: 5937670 - DNA, 25 bp, Homo sapien
gaagaggcagtagcatttagaaggg

SEQ ID NO: 5937671 - DNA, 25 bp, Homo sapien
gaataatgtttacaatttgcctcaa

SEQ ID NO: 5937672 - DNA, 25 bp, Homo sapien
aaccactcccactgcccaacctagg

SEQ ID NO: 5937673 - DNA, 25 bp, Homo sapien
catggggcagctaatgaaacctcgc

SEQ ID NO: 5937674 - DNA, 25 bp, Homo sapien
tgtttacaatttgcctcaatcactt

SEQ ID NO: 5937675 - DNA, 25 bp, Homo sapien
agctgtgtgttggggtggctttttt

SEQ ID NO: 5937676 - DNA, 25 bp, Homo sapien
gattggcacacaaggagccaaacac

SEQ ID NO: 5937677 - DNA, 25 bp, Homo sapien
gggaggcagatcaacagatgagcca

SEQ ID NO: 5937678 - DNA, 25 bp, Homo sapien
cagaaccctccccgttgtgaagagg

SEQ ID NO: 5937679 - DNA, 25 bp, Homo sapien
agaaataaccactcccactgcccaa

SEQ ID NO: 5937680 - DNA, 25 bp, Homo sapien
ggaggtgatggagaagccttcccat

SEQ ID NO: 5937681 - DNA, 25 bp, Homo sapien
ggttctgctttgtctctcctatgtg

SEQ ID NO: 5937682 - DNA, 25 bp, Homo sapien
cagggatggggattggcacacaagg

SEQ ID NO: 5937683 - DNA, 25 bp, Homo sapien
gggatggggattggcacacaaggag

SEQ ID NO: 5937684 - DNA, 25 bp, Homo sapien
ggccctgcacagccctcctttctca

SEQ ID NO: 5937685 - DNA, 25 bp, Homo sapien
aatgaaacctcgcagatcccttgca

SEQ ID NO: 5937686 - DNA, 25 bp, Homo sapien
tggagcagatggagggttctgcttt

SEQ ID NO: 5937687 - DNA, 25 bp, Homo sapien
ctttctcacctggggggaggcagga

SEQ ID NO: 5937688 - DNA, 25 bp, Homo sapien
agtaggtccgagagcttccaggccc

SEQ ID NO: 5937689 - DNA, 25 bp, Homo sapien
gggattcacccaggtggctacaggc

SEQ ID NO: 5937690 - DNA, 25 bp, Homo sapien
tttttctctctgttttgaataatgt

SEQ ID NO: 5937691 - DNA, 25 bp, Homo sapien
gagactcctgagttaacactgggaa

SEQ ID NO: 5937692 - DNA, 25 bp, Homo sapien
tttatgctggccaaagaaataacca

SEQ ID NO: 5937693 - DNA, 25 bp, Homo sapien
ggtgacctgaagagagctatactgg

SEQ ID NO: 5937694 - DNA, 25 bp, Homo sapien
tggagcccaggtttcccctggagca

SEQ ID NO: 5937695 - DNA, 25 bp, Homo sapien
agatgcttgaaaaactcaaccaaat

SEQ ID NO: 5937696 - DNA, 25 bp, Homo sapien
tggccgccttttccaacaccgaagg

SEQ ID NO: 5937697 - DNA, 25 bp, Homo sapien
gatgaggctggtgagctggccgcct

SEQ ID NO: 5937698 - DNA, 25 bp, Homo sapien
gggaggcaggaggtgatggagaagc

SEQ ID NO: 5937699 - DNA, 25 bp, Homo sapien
caggaggtgatggagaagccttccc

SEQ ID NO: 5937700 - DNA, 25 bp, Homo sapien
ctatactggtgccaggctcctctcc

SEQ ID NO: 5937701 - DNA, 25 bp, Homo sapien
tgacctgaagagagctatactggtg

SEQ ID NO: 5937702 - DNA, 25 bp, Homo sapien
ttgagggattcacccaggtggctac

SEQ ID NO: 5937703 - DNA, 25 bp, Homo sapien
acctgaagagagctatactggtgcc

SEQ ID NO: 5937704 - DNA, 25 bp, Homo sapien
ggcagatcaacagatgagccatctt

SEQ ID NO: 5937705 - DNA, 25 bp, Homo sapien
gtgatggagaagccttcccatgccg

SEQ ID NO: 5937706 - DNA, 25 bp, Homo sapien
cccagtcactccaggagactcctga

SEQ ID NO: 5937707 - DNA, 25 bp, Homo sapien
tgttttgaataatgtttacaatttg

SEQ ID NO: 5937708 - DNA, 25 bp, Homo sapien
cagatgaggctggtgagctggccgc

SEQ ID NO: 5937709 - DNA, 25 bp, Homo sapien
gattcacccaggtggctacaggcca

SEQ ID NO: 5937710 - DNA, 25 bp, Homo sapien
gactcctgagttaacactgggaaga

SEQ ID NO: 5937711 - DNA, 25 bp, Homo sapien
gcagctaatgaaacctcgcagatcc

SEQ ID NO: 5937712 - DNA, 25 bp, Homo sapien
cccgttgtgaagaggcagtagcatt

SEQ ID NO: 5937713 - DNA, 25 bp, Homo sapien
aaacaagttttctgaagtcaggtat

SEQ ID NO: 5937714 - DNA, 25 bp, Homo sapien
aacacagccaataggcagagagttg

SEQ ID NO: 5937715 - DNA, 25 bp, Homo sapien
agcttccaggccctgcacagccctc

SEQ ID NO: 5937716 - DNA, 25 bp, Homo sapien
acctcgcagatcccttgcaccccag

SEQ ID NO: 5937717 - DNA, 25 bp, Homo sapien
tccgagagcttccaggccctgcaca

SEQ ID NO: 5937718 - DNA, 25 bp, Homo sapien
gggaagacattggccagtcctagtc

SEQ ID NO: 5937719 - DNA, 25 bp, Homo sapien
gtgtgtgaagggtttttatgctggc

SEQ ID NO: 5937720 - DNA, 25 bp, Homo sapien
ccttaaatgccctctgtcccaggga

SEQ ID NO: 5937721 - DNA, 25 bp, Homo sapien
gggtgtgtgaagggtttttatgctg

SEQ ID NO: 5937722 - DNA, 25 bp, Homo sapien
cttttataaaaatccacctccagcc

SEQ ID NO: 5937723 - DNA, 25 bp, Homo sapien
agttttctgaagtcaggtatggggc

SEQ ID NO: 5937724 - DNA, 25 bp, Homo sapien
acaagttttctgaagtcaggtatgg

SEQ ID NO: 5937725 - DNA, 25 bp, Homo sapien
ttgtgaagaggcagtagcatttaga

SEQ ID NO: 5937726 - DNA, 25 bp, Homo sapien
tggtgccaggctcctctccatgggg

SEQ ID NO: 5937727 - DNA, 25 bp, Homo sapien
atggagggttctgctttgtctctcc

SEQ ID NO: 5937728 - DNA, 25 bp, Homo sapien
gtggggctaggagactcgccttaaa

SEQ ID NO: 5937729 - DNA, 25 bp, Homo sapien
agaaacaagttttctgaagtcaggt

SEQ ID NO: 5937730 - DNA, 25 bp, Homo sapien
acattggccagtcctagtcatctct

SEQ ID NO: 5937731 - DNA, 25 bp, Homo sapien
cctccagcccgcccctctccccact

SEQ ID NO: 5937732 - DNA, 25 bp, Homo sapien
attggccagtcctagtcatctctcg

SEQ ID NO: 5937733 - DNA, 25 bp, Homo sapien
tacaatttgcctcaatcacttttat

SEQ ID NO: 5937734 - DNA, 25 bp, Homo sapien
tttctctctgttttgaataatgttt

SEQ ID NO: 5937735 - DNA, 25 bp, Homo sapien
tttccaacaccgaagggaggcagat

SEQ ID NO: 5937736 - DNA, 25 bp, Homo sapien
gagacagatgaggctggtgagctgg

SEQ ID NO: 5937737 - DNA, 25 bp, Homo sapien
caaggagccaaacacagccaatagg

SEQ ID NO: 5937738 - DNA, 25 bp, Homo sapien
tgagccatcttggagcccaggtttc

SEQ ID NO: 5937739 - DNA, 25 bp, Homo sapien
gttggggtggcttttttctctctgt

SEQ ID NO: 5937740 - DNA, 25 bp, Homo sapien
cagatgagccatcttggagcccagg

SEQ ID NO: 5937741 - DNA, 25 bp, Homo sapien
gcctcaatcacttttataaaaatcc

SEQ ID NO: 5937742 - DNA, 25 bp, Homo sapien
tggggattggcacacaaggagccaa

SEQ ID NO: 5937743 - DNA, 25 bp, Homo sapien
ttacctggaactggtcctgtgttgg

SEQ ID NO: 5937744 - DNA, 25 bp, Homo sapien
gatggagaagccttcccatgccgct

SEQ ID NO: 5937745 - DNA, 25 bp, Homo sapien
aatgtttacaatttgcctcaatcac

SEQ ID NO: 5937746 - DNA, 25 bp, Homo sapien
tctccatggggcagctaatgaaacc

SEQ ID NO: 5937747 - DNA, 25 bp, Homo sapien
agagtggcaaggggtgacctgaaga

SEQ ID NO: 5937748 - DNA, 25 bp, Homo sapien
agagagctatactggtgccaggctc

SEQ ID NO: 5937749 - DNA, 25 bp, Homo sapien
ttcccctggagcagatggagggttc

SEQ ID NO: 5937750 - DNA, 25 bp, Homo sapien
gtgttggggtggcttttttctctct

SEQ ID NO: 5937751 - DNA, 25 bp, Homo sapien
ccatgcaattacctggaactggtcc

SEQ ID NO: 5937752 - DNA, 25 bp, Homo sapien
agttaacactgggaagacattggcc

SEQ ID NO: 5937753 - DNA, 25 bp, Homo sapien
gggattggcacacaaggagccaaac

SEQ ID NO: 5937754 - DNA, 25 bp, Homo sapien
gggcagctaatgaaacctcgcagat

SEQ ID NO: 5937755 - DNA, 25 bp, Homo sapien
atgcaattacctggaactggtcctg

SEQ ID NO: 5937756 - DNA, 25 bp, Homo sapien
tctgttttgaataatgtttacaatt

SEQ ID NO: 5937757 - DNA, 25 bp, Homo sapien
aaaatccacctccagcccgcccctc

SEQ ID NO: 5937758 - DNA, 25 bp, Homo sapien
ccactcccactgcccaacctaggtg

SEQ ID NO: 5937759 - DNA, 25 bp, Homo sapien
gccaaacacagccaataggcagaga

SEQ ID NO: 5937760 - DNA, 25 bp, Homo sapien
agttgagggattcacccaggtggct

SEQ ID NO: 5937761 - DNA, 25 bp, Homo sapien
ggctcctctccatggggcagctaat

SEQ ID NO: 5937762 - DNA, 25 bp, Homo sapien
ccactgcccaacctaggtgaggagt

SEQ ID NO: 5937763 - DNA, 25 bp, Homo sapien
ttggcacacaaggagccaaacacag

SEQ ID NO: 5937764 - DNA, 25 bp, Homo sapien
cttttccaacaccgaagggaggcag

SEQ ID NO: 5937765 - DNA, 25 bp, Homo sapien
acaggggcctcacgggaatgcagca

SEQ ID NO: 5937766 - DNA, 25 bp, Homo sapien
gccagtcctagtcatctctcggtca

SEQ ID NO: 5937767 - DNA, 25 bp, Homo sapien
aggccttcgaggctgtctgaagatg

SEQ ID NO: 5937768 - DNA, 25 bp, Homo sapien
cctggagcagatggagggttctgct

SEQ ID NO: 5937769 - DNA, 25 bp, Homo sapien
actgcccaacctaggtgaggagtgg

SEQ ID NO: 5937770 - DNA, 25 bp, Homo sapien
gagccaaacacagccaataggcaga

SEQ ID NO: 5937771 - DNA, 25 bp, Homo sapien
agggttctgctttgtctctcctatg

SEQ ID NO: 5937772 - DNA, 25 bp, Homo sapien
ctaatgaaacctcgcagatcccttg

SEQ ID NO: 5937773 - DNA, 25 bp, Homo sapien
tccaacaccgaagggaggcagatca

SEQ ID NO: 5937774 - DNA, 25 bp, Homo sapien
ggaactggtcctgtgttggggagaa

SEQ ID NO: 5937775 - DNA, 25 bp, Homo sapien
ctgggtggggcagctgtgtgttggg

SEQ ID NO: 5937776 - DNA, 25 bp, Homo sapien
tcccactgcccaacctaggtgagga

SEQ ID NO: 5937777 - DNA, 25 bp, Homo sapien
ataaccactcccactgcccaaccta

SEQ ID NO: 5937778 - DNA, 25 bp, Homo sapien
gtttcccctggagcagatggagggt

SEQ ID NO: 5937779 - DNA, 25 bp, Homo sapien
cgcagatcccttgcaccccagaacc

SEQ ID NO: 5937780 - DNA, 25 bp, Homo sapien
tggtgagctggccgccttttccaac

SEQ ID NO: 5937781 - DNA, 25 bp, Homo sapien
cccaggtggctacaggccaggggaa

SEQ ID NO: 5937782 - DNA, 25 bp, Homo sapien
tctctgttttgaataatgtttacaa

SEQ ID NO: 5937783 - DNA, 25 bp, Homo sapien
ggcttttttctctctgttttgaata

SEQ ID NO: 5937784 - DNA, 25 bp, Homo sapien
aaagaaataaccactcccactgccc

SEQ ID NO: 5937785 - DNA, 25 bp, Homo sapien
aaacctcgcagatcccttgcacccc

SEQ ID NO: 5937786 - DNA, 25 bp, Homo sapien
cccaacctaggtgaggagtggtggc

SEQ ID NO: 5937787 - DNA, 25 bp, Homo sapien
ctcgccttaaatgccctctgtccca

SEQ ID NO: 5937788 - DNA, 25 bp, Homo sapien
tcgaggctgtctgaagatgcttgaa

SEQ ID NO: 5937789 - DNA, 25 bp, Homo sapien
caaacacagccaataggcagagagt

SEQ ID NO: 5937790 - DNA, 25 bp, Homo sapien
cctccccgttgtgaagaggcagtag

SEQ ID NO: 5937791 - DNA, 25 bp, Homo sapien
cccctggagcagatggagggttctg

SEQ ID NO: 5937792 - DNA, 25 bp, Homo sapien
tggccagtcctagtcatctctcggt

SEQ ID NO: 5937793 - DNA, 25 bp, Homo sapien
agctatactggtgccaggctcctct

SEQ ID NO: 5937794 - DNA, 25 bp, Homo sapien
gcaaggggtgacctgaagagagcta

SEQ ID NO: 5937795 - DNA, 25 bp, Homo sapien
gcaccccagaaccctccccgttgtg

SEQ ID NO: 5937796 - DNA, 25 bp, Homo sapien
ggggagaaacaagttttctgaagtc

SEQ ID NO: 5937797 - DNA, 25 bp, Homo sapien
agagttgagggattcacccaggtgg

SEQ ID NO: 5937798 - DNA, 25 bp, Homo sapien
cctgagttaacactgggaagacatt

SEQ ID NO: 5937799 - DNA, 25 bp, Homo sapien
gagggattcacccaggtggctacag

SEQ ID NO: 5937800 - DNA, 25 bp, Homo sapien
cctctccatggggcagctaatgaaa

SEQ ID NO: 5937801 - DNA, 25 bp, Homo sapien
ctcacgggaatgcagcagccatgca

SEQ ID NO: 5937802 - DNA, 25 bp, Homo sapien
gatcccttgcaccccagaaccctcc

SEQ ID NO: 5937803 - DNA, 25 bp, Homo sapien
cgagagcttccaggccctgcacagc

SEQ ID NO: 5937804 - DNA, 25 bp, Homo sapien
atcttggagcccaggtttcccctgg

SEQ ID NO: 5937805 - DNA, 25 bp, Homo sapien
tttttatgctggccaaagaaataac

SEQ ID NO: 5937806 - DNA, 25 bp, Homo sapien
gcagctgtgtgttggggtggctttt

SEQ ID NO: 5937807 - DNA, 25 bp, Homo sapien
ctgaagagagctatactggtgccag

SEQ ID NO: 5937808 - DNA, 25 bp, Homo sapien
actcaggccttcgaggctgtctgaa

SEQ ID NO: 5937809 - DNA, 25 bp, Homo sapien
gatgagccatcttggagcccaggtt

SEQ ID NO: 5937810 - DNA, 25 bp, Homo sapien
tcaacagatgagccatcttggagcc

SEQ ID NO: 5937811 - DNA, 25 bp, Homo sapien
cacccaggtggctacaggccagggg

SEQ ID NO: 5937812 - DNA, 25 bp, Homo sapien
atactggtgccaggctcctctccat

SEQ ID NO: 5937813 - DNA, 25 bp, Homo sapien
acctggaactggtcctgtgttgggg

SEQ ID NO: 5937814 - DNA, 25 bp, Homo sapien
agtagcatttagaagggagacagat

SEQ ID NO: 5937815 - DNA, 25 bp, Homo sapien
gaagccttcccatgccgctcacagg

SEQ ID NO: 5937816 - DNA, 25 bp, Homo sapien
cgggaatgcagcagccatgcaatta

SEQ ID NO: 5937817 - DNA, 25 bp, Homo sapien
cactgggaagacattggccagtcct

SEQ ID NO: 5937818 - DNA, 25 bp, Homo sapien
gctttgtctctcctatgtggggcta

SEQ ID NO: 5937819 - DNA, 25 bp, Homo sapien
tggggtggcttttttctctctgttt

SEQ ID NO: 5937820 - DNA, 25 bp, Homo sapien
tttctgaagtcaggtatggggctgg

SEQ ID NO: 5937821 - DNA, 25 bp, Homo sapien
aggagactcgccttaaatgccctct

SEQ ID NO: 5937822 - DNA, 25 bp, Homo sapien
gtcctagtcatctctcggtcagtag

SEQ ID NO: 5937823 - DNA, 25 bp, Homo sapien
gtggctgcaggggagagacccagtc

SEQ ID NO: 5937824 - DNA, 25 bp, Homo sapien
caggccctgcacagccctcctttct

SEQ ID NO: 5937825 - DNA, 25 bp, Homo sapien
actcccactgcccaacctaggtgag

SEQ ID NO: 5937826 - DNA, 25 bp, Homo sapien
agagagttgagggattcacccaggt

SEQ ID NO: 5937827 - DNA, 25 bp, Homo sapien
aaggggtgacctgaagagagctata

SEQ ID NO: 5937828 - DNA, 25 bp, Homo sapien
gccctctgtcccagggatggggatt

SEQ ID NO: 5937829 - DNA, 25 bp, Homo sapien
atcacttttataaaaatccacctcc

SEQ ID NO: 5937830 - DNA, 25 bp, Homo sapien
tttataaaaatccacctccagcccg

SEQ ID NO: 5937831 - DNA, 25 bp, Homo sapien
ggcaggaggtgatggagaagccttc

SEQ ID NO: 5937832 - DNA, 25 bp, Homo sapien
ataatgtttacaatttgcctcaatc

SEQ ID NO: 5937833 - DNA, 25 bp, Homo sapien
gctcacaggggcctcacgggaatgc

SEQ ID NO: 5937834 - DNA, 25 bp, Homo sapien
ccctctccccactcaggccttcgag

SEQ ID NO: 5937835 - DNA, 25 bp, Homo sapien
tgcagcagccatgcaattacctgga

SEQ ID NO: 5937836 - DNA, 25 bp, Homo sapien
ttgtttctccccaacacaggaccag

SEQ ID NO: 5937837 - DNA, 25 bp, Homo sapien
aagtgattgaggcaaattgtaaaca

SEQ ID NO: 5937838 - DNA, 25 bp, Homo sapien
cctgtgagcggcatgggaaggcttc

SEQ ID NO: 5937839 - DNA, 25 bp, Homo sapien
gtgaggcccctgtgagcggcatggg

SEQ ID NO: 5937840 - DNA, 25 bp, Homo sapien
tctcggacctactgaccgagagatg

SEQ ID NO: 5937841 - DNA, 25 bp, Homo sapien
ggctggaggtggatttttataaaag

SEQ ID NO: 5937842 - DNA, 25 bp, Homo sapien
agcatcttcagacagcctcgaaggc

SEQ ID NO: 5937843 - DNA, 25 bp, Homo sapien
attattcaaaacagagagaaaaaag

SEQ ID NO: 5937844 - DNA, 25 bp, Homo sapien
tgtgcagggcctggaagctctcgga

SEQ ID NO: 5937845 - DNA, 25 bp, Homo sapien
cccacataggagagacaaagcagaa

SEQ ID NO: 5937846 - DNA, 25 bp, Homo sapien
catttaaggcgagtctcctagcccc

SEQ ID NO: 5937847 - DNA, 25 bp, Homo sapien
ggacctactgaccgagagatgacta

SEQ ID NO: 5937848 - DNA, 25 bp, Homo sapien
tggctcatctgttgatctgcctccc

SEQ ID NO: 5937849 - DNA, 25 bp, Homo sapien
agtatagctctcttcaggtcacccc

SEQ ID NO: 5937850 - DNA, 25 bp, Homo sapien
ggagggttctggggtgcaagggatc

SEQ ID NO: 5937851 - DNA, 25 bp, Homo sapien
ccagtatagctctcttcaggtcacc

SEQ ID NO: 5937852 - DNA, 25 bp, Homo sapien
ttcaaaacagagagaaaaaagccac

SEQ ID NO: 5937853 - DNA, 25 bp, Homo sapien
gggctgtgcagggcctggaagctct

SEQ ID NO: 5937854 - DNA, 25 bp, Homo sapien
aaaggagggctgtgcagggcctgga

SEQ ID NO: 5937855 - DNA, 25 bp, Homo sapien
ccctcaactctctgcctattggctg

SEQ ID NO: 5937856 - DNA, 25 bp, Homo sapien
gagggctgtgcagggcctggaagct

SEQ ID NO: 5937857 - DNA, 25 bp, Homo sapien
taaggcgagtctcctagccccacat

SEQ ID NO: 5937858 - DNA, 25 bp, Homo sapien
gcatgggaaggcttctccatcacct

SEQ ID NO: 5937859 - DNA, 25 bp, Homo sapien
gagccaccactcctcacctaggttg

SEQ ID NO: 5937860 - DNA, 25 bp, Homo sapien
tcggacctactgaccgagagatgac

SEQ ID NO: 5937861 - DNA, 25 bp, Homo sapien
ggctgtgtttggctccttgtgtgcc

SEQ ID NO: 5937862 - DNA, 25 bp, Homo sapien
ggagaggagcctggcaccagtatag

SEQ ID NO: 5937863 - DNA, 25 bp, Homo sapien
cccctgtgagcggcatgggaaggct

SEQ ID NO: 5937864 - DNA, 25 bp, Homo sapien
ccaatgtcttcccagtgttaactca

SEQ ID NO: 5937865 - DNA, 25 bp, Homo sapien
ggccagctcaccagcctcatctgtc

SEQ ID NO: 5937866 - DNA, 25 bp, Homo sapien
agcggcatgggaaggcttctccatc

SEQ ID NO: 5937867 - DNA, 25 bp, Homo sapien
ggctccttgtgtgccaatccccatc

SEQ ID NO: 5937868 - DNA, 25 bp, Homo sapien
gattgaggcaaattgtaaacattat

SEQ ID NO: 5937869 - DNA, 25 bp, Homo sapien
gaaacctgggctccaagatggctca

SEQ ID NO: 5937870 - DNA, 25 bp, Homo sapien
ttgaggcaaattgtaaacattattc

SEQ ID NO: 5937871 - DNA, 25 bp, Homo sapien
ataaaagtgattgaggcaaattgta

SEQ ID NO: 5937872 - DNA, 25 bp, Homo sapien
agctcaccagcctcatctgtctccc

SEQ ID NO: 5937873 - DNA, 25 bp, Homo sapien
aagccaccccaacacacagctgccc

SEQ ID NO: 5937874 - DNA, 25 bp, Homo sapien
gccaccactcctcacctaggttggg

SEQ ID NO: 5937875 - DNA, 25 bp, Homo sapien
tttaaggcgagtctcctagccccac

SEQ ID NO: 5937876 - DNA, 25 bp, Homo sapien
tattcaaaacagagagaaaaaagcc

SEQ ID NO: 5937877 - DNA, 25 bp, Homo sapien
cctagccccacataggagagacaaa

SEQ ID NO: 5937878 - DNA, 25 bp, Homo sapien
agacaaagcagaaccctccatctgc

SEQ ID NO: 5937879 - DNA, 25 bp, Homo sapien
aatgctactgcctcttcacaacggg

SEQ ID NO: 5937880 - DNA, 25 bp, Homo sapien
cataggagagacaaagcagaaccct

SEQ ID NO: 5937881 - DNA, 25 bp, Homo sapien
ttctccccaacacaggaccagttcc

SEQ ID NO: 5937882 - DNA, 25 bp, Homo sapien
ggtgagaaaggagggctgtgcaggg

SEQ ID NO: 5937883 - DNA, 25 bp, Homo sapien
aggagcctggcaccagtatagctct

SEQ ID NO: 5937884 - DNA, 25 bp, Homo sapien
ggtttcattagctgccccatggaga

SEQ ID NO: 5937885 - DNA, 25 bp, Homo sapien
ttttcaagcatcttcagacagcctc

SEQ ID NO: 5937886 - DNA, 25 bp, Homo sapien
tctaaatgctactgcctcttcacaa

SEQ ID NO: 5937887 - DNA, 25 bp, Homo sapien
cccaacacacagctgccccacccag

SEQ ID NO: 5937888 - DNA, 25 bp, Homo sapien
acagagggcatttaaggcgagtctc

SEQ ID NO: 5937889 - DNA, 25 bp, Homo sapien
ccccaacacaggaccagttccaggt

SEQ ID NO: 5937890 - DNA, 25 bp, Homo sapien
ccatacctgacttcagaaaacttgt

SEQ ID NO: 5937891 - DNA, 25 bp, Homo sapien
ttcccagtgttaactcaggagtctc

SEQ ID NO: 5937892 - DNA, 25 bp, Homo sapien
agagccaggagccaccactcctcac

SEQ ID NO: 5937893 - DNA, 25 bp, Homo sapien
ctgcgaggtttcattagctgcccca

SEQ ID NO: 5937894 - DNA, 25 bp, Homo sapien
ggatttggttgagtttttcaagcat

SEQ ID NO: 5937895 - DNA, 25 bp, Homo sapien
cccagtgttaactcaggagtctcct

SEQ ID NO: 5937896 - DNA, 25 bp, Homo sapien
agagagaaaaaagccaccccaacac

SEQ ID NO: 5937897 - DNA, 25 bp, Homo sapien
gacagcctcgaaggcctgagtgggg

SEQ ID NO: 5937898 - DNA, 25 bp, Homo sapien
tgctccaggggaaacctgggctcca

SEQ ID NO: 5937899 - DNA, 25 bp, Homo sapien
gcagtgggagtggttatttctttgg

SEQ ID NO: 5937900 - DNA, 25 bp, Homo sapien
ccgtgaggcccctgtgagcggcatg

SEQ ID NO: 5937901 - DNA, 25 bp, Homo sapien
ttttataaaagtgattgaggcaaat

SEQ ID NO: 5937902 - DNA, 25 bp, Homo sapien
gctgctgcattcccgtgaggcccct

SEQ ID NO: 5937903 - DNA, 25 bp, Homo sapien
acaaagcagaaccctccatctgctc

SEQ ID NO: 5937904 - DNA, 25 bp, Homo sapien
taaatgctactgcctcttcacaacg

SEQ ID NO: 5937905 - DNA, 25 bp, Homo sapien
taggttgggcagtgggagtggttat

SEQ ID NO: 5937906 - DNA, 25 bp, Homo sapien
cggcatgggaaggcttctccatcac

SEQ ID NO: 5937907 - DNA, 25 bp, Homo sapien
ctgggtctctcccctgcagccactt

SEQ ID NO: 5937908 - DNA, 25 bp, Homo sapien
cccttctaaatgctactgcctcttc

SEQ ID NO: 5937909 - DNA, 25 bp, Homo sapien
ccttgtgtgccaatccccatccctg

SEQ ID NO: 5937910 - DNA, 25 bp, Homo sapien
atacctgacttcagaaaacttgttt

SEQ ID NO: 5937911 - DNA, 25 bp, Homo sapien
tcatctgttgatctgcctcccttcg

SEQ ID NO: 5937912 - DNA, 25 bp, Homo sapien
tccccatccctgggacagagggcat

SEQ ID NO: 5937913 - DNA, 25 bp, Homo sapien
caagggatctgcgaggtttcattag

SEQ ID NO: 5937914 - DNA, 25 bp, Homo sapien
caactctctgcctattggctgtgtt

SEQ ID NO: 5937915 - DNA, 25 bp, Homo sapien
gccccacataggagagacaaagcag

SEQ ID NO: 5937916 - DNA, 25 bp, Homo sapien
cccctggcctgtagccacctgggtg

SEQ ID NO: 5937917 - DNA, 25 bp, Homo sapien
atgggaaggcttctccatcacctcc

SEQ ID NO: 5937918 - DNA, 25 bp, Homo sapien
aattgtaaacattattcaaaacaga

SEQ ID NO: 5937919 - DNA, 25 bp, Homo sapien
aggcttctccatcacctcctgcctc

SEQ ID NO: 5937920 - DNA, 25 bp, Homo sapien
cctggcctgtagccacctgggtgaa

SEQ ID NO: 5937921 - DNA, 25 bp, Homo sapien
ggctccaagatggctcatctgttga

SEQ ID NO: 5937922 - DNA, 25 bp, Homo sapien
aaacagagagaaaaaagccacccca

SEQ ID NO: 5937923 - DNA, 25 bp, Homo sapien
ccagcctcatctgtctcccttctaa

SEQ ID NO: 5937924 - DNA, 25 bp, Homo sapien
accagttccaggtaattgcatggct

SEQ ID NO: 5937925 - DNA, 25 bp, Homo sapien
cccccaggtgagaaaggagggctgt

SEQ ID NO: 5937926 - DNA, 25 bp, Homo sapien
tcccgtgaggcccctgtgagcggca

SEQ ID NO: 5937927 - DNA, 25 bp, Homo sapien
gttggaaaaggcggccagctcacca

SEQ ID NO: 5937928 - DNA, 25 bp, Homo sapien
ctggccaatgtcttcccagtgttaa

SEQ ID NO: 5937929 - DNA, 25 bp, Homo sapien
catggctgctgcattcccgtgaggc

SEQ ID NO: 5937930 - DNA, 25 bp, Homo sapien
aggagccaccactcctcacctaggt

SEQ ID NO: 5937931 - DNA, 25 bp, Homo sapien
aacacaggaccagttccaggtaatt

SEQ ID NO: 5937932 - DNA, 25 bp, Homo sapien
ttcggtgttggaaaaggcggccagc

SEQ ID NO: 5937933 - DNA, 25 bp, Homo sapien
tgggacagagggcatttaaggcgag

SEQ ID NO: 5937934 - DNA, 25 bp, Homo sapien
aggggaaacctgggctccaagatgg

SEQ ID NO: 5937935 - DNA, 25 bp, Homo sapien
gcctcccttcggtgttggaaaaggc

SEQ ID NO: 5937936 - DNA, 25 bp, Homo sapien
cctgagtggggagaggggcgggctg

SEQ ID NO: 5937937 - DNA, 25 bp, Homo sapien
acctactgaccgagagatgactagg

SEQ ID NO: 5937938 - DNA, 25 bp, Homo sapien
cctccatctgctccaggggaaacct

SEQ ID NO: 5937939 - DNA, 25 bp, Homo sapien
gggagaggggcgggctggaggtgga

SEQ ID NO: 5937940 - DNA, 25 bp, Homo sapien
gagcctggcaccagtatagctctct

SEQ ID NO: 5937941 - DNA, 25 bp, Homo sapien
ctggcaccagtatagctctcttcag

SEQ ID NO: 5937942 - DNA, 25 bp, Homo sapien
ctgggtgaatccctcaactctctgc

SEQ ID NO: 5937943 - DNA, 25 bp, Homo sapien
ctccaggggaaacctgggctccaag

SEQ ID NO: 5937944 - DNA, 25 bp, Homo sapien
tcttcacaacggggagggttctggg

SEQ ID NO: 5937945 - DNA, 25 bp, Homo sapien
cggtgttggaaaaggcggccagctc

SEQ ID NO: 5937946 - DNA, 25 bp, Homo sapien
ccaagatggctcatctgttgatctg

SEQ ID NO: 5937947 - DNA, 25 bp, Homo sapien
tctgctccaggggaaacctgggctc

SEQ ID NO: 5937948 - DNA, 25 bp, Homo sapien
ctgacttcagaaaacttgtttctcc

SEQ ID NO: 5937949 - DNA, 25 bp, Homo sapien
agcagaaccctccatctgctccagg

SEQ ID NO: 5937950 - DNA, 25 bp, Homo sapien
tggaaaaggcggccagctcaccagc

SEQ ID NO: 5937951 - DNA, 25 bp, Homo sapien
ctcaccagcctcatctgtctccctt

SEQ ID NO: 5937952 - DNA, 25 bp, Homo sapien
tccctgggacagagggcatttaagg

SEQ ID NO: 5937953 - DNA, 25 bp, Homo sapien
gctctcggacctactgaccgagaga

SEQ ID NO: 5937954 - DNA, 25 bp, Homo sapien
gaggggcgggctggaggtggatttt

SEQ ID NO: 5937955 - DNA, 25 bp, Homo sapien
gacttcagaaaacttgtttctcccc

SEQ ID NO: 5937956 - DNA, 25 bp, Homo sapien
cacaacggggagggttctggggtgc

SEQ ID NO: 5937957 - DNA, 25 bp, Homo sapien
tcctgcctccccccaggtgagaaag

SEQ ID NO: 5937958 - DNA, 25 bp, Homo sapien
gcttctccatcacctcctgcctccc

SEQ ID NO: 5937959 - DNA, 25 bp, Homo sapien
ctggggtgcaagggatctgcgaggt

SEQ ID NO: 5937960 - DNA, 25 bp, Homo sapien
gtaaacattattcaaaacagagaga

SEQ ID NO: 5937961 - DNA, 25 bp, Homo sapien
tctttggccagcataaaaacccttc

SEQ ID NO: 5937962 - DNA, 25 bp, Homo sapien
aaagcagaaccctccatctgctcca

SEQ ID NO: 5937963 - DNA, 25 bp, Homo sapien
ccagccccatacctgacttcagaaa

SEQ ID NO: 5937964 - DNA, 25 bp, Homo sapien
cagacagcctcgaaggcctgagtgg

SEQ ID NO: 5937965 - DNA, 25 bp, Homo sapien
caggtgagaaaggagggctgtgcag

SEQ ID NO: 5937966 - DNA, 25 bp, Homo sapien
cgggctggaggtggatttttataaa

SEQ ID NO: 5937967 - DNA, 25 bp, Homo sapien
gcgagtctcctagccccacatagga

SEQ ID NO: 5937968 - DNA, 25 bp, Homo sapien
catctgctccaggggaaacctgggc

SEQ ID NO: 5937969 - DNA, 25 bp, Homo sapien
atttggttgagtttttcaagcatct

SEQ ID NO: 5937970 - DNA, 25 bp, Homo sapien
aaaaaagccaccccaacacacagct

SEQ ID NO: 5937971 - DNA, 25 bp, Homo sapien
caccagtatagctctcttcaggtca

SEQ ID NO: 5937972 - DNA, 25 bp, Homo sapien
ggttgggcagtgggagtggttattt

SEQ ID NO: 5937973 - DNA, 25 bp, Homo sapien
cttctaaatgctactgcctcttcac

SEQ ID NO: 5937974 - DNA, 25 bp, Homo sapien
ccagctcaccagcctcatctgtctc

SEQ ID NO: 5937975 - DNA, 25 bp, Homo sapien
atgactaggactggccaatgtcttc

SEQ ID NO: 5937976 - DNA, 25 bp, Homo sapien
ttctggggtgcaagggatctgcgag

SEQ ID NO: 5937977 - DNA, 25 bp, Homo sapien
cccaggtgagaaaggagggctgtgc

SEQ ID NO: 5937978 - DNA, 25 bp, Homo sapien
tggttatttctttggccagcataaa

SEQ ID NO: 5937979 - DNA, 25 bp, Homo sapien
ccccatggagaggagcctggcacca

SEQ ID NO: 5937980 - DNA, 25 bp, Homo sapien
gtgttaactcaggagtctcctggag

SEQ ID NO: 5937981 - DNA, 25 bp, Homo sapien
ggccaatgtcttcccagtgttaact

SEQ ID NO: 5937982 - DNA, 25 bp, Homo sapien
tgagaaaggagggctgtgcagggcc

SEQ ID NO: 5937983 - DNA, 25 bp, Homo sapien
ctccttgtgtgccaatccccatccc

SEQ ID NO: 5937984 - DNA, 25 bp, Homo sapien
ccatggagaggagcctggcaccagt

SEQ ID NO: 5937985 - DNA, 25 bp, Homo sapien
tcaggagtctcctggagtgactggg

SEQ ID NO: 5937986 - DNA, 25 bp, Homo sapien
gagtctcctggagtgactgggtctc

SEQ ID NO: 5937987 - DNA, 25 bp, Homo sapien
atggagaggagcctggcaccagtat

SEQ ID NO: 5937988 - DNA, 25 bp, Homo sapien
tgaccgagagatgactaggactggc

SEQ ID NO: 5937989 - DNA, 25 bp, Homo sapien
cacataggagagacaaagcagaacc

SEQ ID NO: 5937990 - DNA, 25 bp, Homo sapien
actgaccgagagatgactaggactg

SEQ ID NO: 5937991 - DNA, 25 bp, Homo sapien
tcattagctgccccatggagaggag

SEQ ID NO: 5937992 - DNA, 25 bp, Homo sapien
agccacctgggtgaatccctcaact

SEQ ID NO: 5937993 - DNA, 25 bp, Homo sapien
agggcatttaaggcgagtctcctag

SEQ ID NO: 5937994 - DNA, 25 bp, Homo sapien
tgggctccaagatggctcatctgtt

SEQ ID NO: 5937995 - DNA, 25 bp, Homo sapien
ctgcctcccttcggtgttggaaaag

SEQ ID NO: 5937996 - DNA, 25 bp, Homo sapien
gctcatctgttgatctgcctccctt

SEQ ID NO: 5937997 - DNA, 25 bp, Homo sapien
ctgcctccccccaggtgagaaagga

SEQ ID NO: 5937998 - DNA, 25 bp, Homo sapien
ccaggggaaacctgggctccaagat

SEQ ID NO: 5937999 - DNA, 25 bp, Homo sapien
tagctgccccatggagaggagcctg

SEQ ID NO: 5938000 - DNA, 25 bp, Homo sapien
tgtcttcccagtgttaactcaggag

SEQ ID NO: 5938001 - DNA, 25 bp, Homo sapien
tgcagggcctggaagctctcggacc

SEQ ID NO: 5938002 - DNA, 25 bp, Homo sapien
aggagtctcctggagtgactgggtc

SEQ ID NO: 5938003 - DNA, 25 bp, Homo sapien
tggggagaggggcgggctggaggtg

SEQ ID NO: 5938004 - DNA, 25 bp, Homo sapien
ctccccagagccaggagccaccact

SEQ ID NO: 5938005 - DNA, 25 bp, Homo sapien
tgatctgcctcccttcggtgttgga

SEQ ID NO: 5938006 - DNA, 25 bp, Homo sapien
cacaggaccagttccaggtaattgc

SEQ ID NO: 5938007 - DNA, 25 bp, Homo sapien
acctgggtgaatccctcaactctct

SEQ ID NO: 5938008 - DNA, 25 bp, Homo sapien
gttccaggtaattgcatggctgctg

SEQ ID NO: 5938009 - DNA, 25 bp, Homo sapien
tgcaagggatctgcgaggtttcatt

SEQ ID NO: 5938010 - DNA, 25 bp, Homo sapien
ctcctggagtgactgggtctctccc

SEQ ID NO: 5938011 - DNA, 25 bp, Homo sapien
aaggcctgagtggggagaggggcgg

SEQ ID NO: 5938012 - DNA, 25 bp, Homo sapien
gtgtttggctccttgtgtgccaatc

SEQ ID NO: 5938013 - DNA, 25 bp, Homo sapien
tcccttcggtgttggaaaaggcggc

SEQ ID NO: 5938014 - DNA, 25 bp, Homo sapien
cagcctcgaaggcctgagtggggag

SEQ ID NO: 5938015 - DNA, 25 bp, Homo sapien
ccaacacaggaccagttccaggtaa

SEQ ID NO: 5938016 - DNA, 25 bp, Homo sapien
accgagagatgactaggactggcca

SEQ ID NO: 5938017 - DNA, 25 bp, Homo sapien
tgctactgcctcttcacaacgggga

SEQ ID NO: 5938018 - DNA, 25 bp, Homo sapien
tggccagcataaaaacccttcacac

SEQ ID NO: 5938019 - DNA, 25 bp, Homo sapien
ctccccaacacaggaccagttccag

SEQ ID NO: 5938020 - DNA, 25 bp, Homo sapien
cactctccccagagccaggagccac

SEQ ID NO: 5938021 - DNA, 25 bp, Homo sapien
tgcctcttcacaacggggagggttc

SEQ ID NO: 5938022 - DNA, 25 bp, Homo sapien
ctgcattcccgtgaggcccctgtga

SEQ ID NO: 5938023 - DNA, 25 bp, Homo sapien
tattggctgtgtttggctccttgtg

SEQ ID NO: 5938024 - DNA, 25 bp, Homo sapien
ttgtgtgccaatccccatccctggg

SEQ ID NO: 5938025 - DNA, 25 bp, Homo sapien
gccactctccccagagccaggagcc

SEQ ID NO: 5938026 - DNA, 25 bp, Homo sapien
acattattcaaaacagagagaaaaa

SEQ ID NO: 5938027 - DNA, 25 bp, Homo sapien
acctgacttcagaaaacttgtttct

SEQ ID NO: 5938028 - DNA, 25 bp, Homo sapien
ccaggagccaccactcctcacctag

SEQ ID NO: 5938029 - DNA, 25 bp, Homo sapien
gaggcaaattgtaaacattattcaa

SEQ ID NO: 5938030 - DNA, 25 bp, Homo sapien
ggatctgcgaggtttcattagctgc

SEQ ID NO: 5938031 - DNA, 25 bp, Homo sapien
tctctgcctattggctgtgtttggc

SEQ ID NO: 5938032 - DNA, 25 bp, Homo sapien
aaaggcggccagctcaccagcctca

SEQ ID NO: 5938033 - DNA, 25 bp, Homo sapien
agagaaaaaagccaccccaacacac

SEQ ID NO: 5938034 - DNA, 25 bp, Homo sapien
ttataaaagtgattgaggcaaattg

SEQ ID NO: 5938035 - DNA, 25 bp, Homo sapien
caccactcctcacctaggttgggca

SEQ ID NO: 5938036 - DNA, 25 bp, Homo sapien
gtgttggaaaaggcggccagctcac

SEQ ID NO: 5938037 - DNA, 25 bp, Homo sapien
atctgcctcccttcggtgttggaaa

SEQ ID NO: 5938038 - DNA, 25 bp, Homo sapien
gcgaggtttcattagctgccccatg

SEQ ID NO: 5938039 - DNA, 25 bp, Homo sapien
gactggccaatgtcttcccagtgtt

SEQ ID NO: 5938040 - DNA, 25 bp, Homo sapien
ggcaccagtatagctctcttcaggt

SEQ ID NO: 5938041 - DNA, 25 bp, Homo sapien
acacacccttttctcttccatcctt

SEQ ID NO: 5938042 - DNA, 25 bp, Homo sapien
gaggcccctgtgagcggcatgggaa

SEQ ID NO: 5938043 - DNA, 25 bp, Homo sapien
attagctgccccatggagaggagcc

SEQ ID NO: 5938044 - DNA, 25 bp, Homo sapien
gaaccctccatctgctccaggggaa

SEQ ID NO: 5938045 - DNA, 25 bp, Homo sapien
agcctcatctgtctcccttctaaat

SEQ ID NO: 5938046 - DNA, 25 bp, Homo sapien
agaaaggagggctgtgcagggcctg

SEQ ID NO: 5938047 - DNA, 25 bp, Homo sapien
tgagcggcatgggaaggcttctcca

SEQ ID NO: 5938048 - DNA, 25 bp, Homo sapien
gaggtttcattagctgccccatgga

SEQ ID NO: 5938049 - DNA, 25 bp, Homo sapien
ccactcctcacctaggttgggcagt

SEQ ID NO: 5938050 - DNA, 25 bp, Homo sapien
tggctgctgcattcccgtgaggccc

SEQ ID NO: 5938051 - DNA, 25 bp, Homo sapien
atctgcgaggtttcattagctgccc

SEQ ID NO: 5938052 - DNA, 25 bp, Homo sapien
attcccgtgaggcccctgtgagcgg

SEQ ID NO: 5938053 - DNA, 25 bp, Homo sapien
gttatttctttggccagcataaaaa

SEQ ID NO: 5938054 - DNA, 25 bp, Homo sapien
ccagagccaggagccaccactcctc

SEQ ID NO: 5938055 - DNA, 25 bp, Homo sapien
actcaggagtctcctggagtgactg

SEQ ID NO: 5938056 - DNA, 25 bp, Homo sapien
gcctggaagctctcggacctactga

SEQ ID NO: 5938057 - DNA, 25 bp, Homo sapien
agccaggagccaccactcctcacct

SEQ ID NO: 5938058 - DNA, 25 bp, Homo sapien
agaaaaaagccaccccaacacacag

SEQ ID NO: 5938059 - DNA, 25 bp, Homo sapien
cgaaggcctgagtggggagaggggc

SEQ ID NO: 5938060 - DNA, 25 bp, Homo sapien
ctggaagctctcggacctactgacc

SEQ ID NO: 5938061 - DNA, 25 bp, Homo sapien
cgagagatgactaggactggccaat

SEQ ID NO: 5938062 - DNA, 25 bp, Homo sapien
gctgccccatggagaggagcctggc

SEQ ID NO: 5938063 - DNA, 25 bp, Homo sapien
tggagtgactgggtctctcccctgc

SEQ ID NO: 5938064 - DNA, 25 bp, Homo sapien
caggaccagttccaggtaattgcat

SEQ ID NO: 5938065 - DNA, 25 bp, Homo sapien
gggtgaatccctcaactctctgcct

SEQ ID NO: 5938066 - DNA, 25 bp, Homo sapien
gtagccacctgggtgaatccctcaa

SEQ ID NO: 5938067 - DNA, 25 bp, Homo sapien
ttggttgagtttttcaagcatcttc

SEQ ID NO: 5938068 - DNA, 25 bp, Homo sapien
gctgtgcagggcctggaagctctcg

SEQ ID NO: 5938069 - DNA, 25 bp, Homo sapien
gtttggctccttgtgtgccaatccc

SEQ ID NO: 5938070 - DNA, 25 bp, Homo sapien
cctgggctccaagatggctcatctg

SEQ ID NO: 5938071 - DNA, 25 bp, Homo sapien
tgtgagcggcatgggaaggcttctc

SEQ ID NO: 5938072 - DNA, 25 bp, Homo sapien
caaaacagagagaaaaaagccaccc

SEQ ID NO: 5938073 - DNA, 25 bp, Homo sapien
cagaaccctccatctgctccagggg

SEQ ID NO: 5938074 - DNA, 25 bp, Homo sapien
ggtaattgcatggctgctgcattcc

SEQ ID NO: 5938075 - DNA, 25 bp, Homo sapien
ttgagtttttcaagcatcttcagac

SEQ ID NO: 5938076 - DNA, 25 bp, Homo sapien
gcctccccccaggtgagaaaggagg

SEQ ID NO: 5938077 - DNA, 25 bp, Homo sapien
tatagctctcttcaggtcacccctt

SEQ ID NO: 5938078 - DNA, 25 bp, Homo sapien
gtggatttttataaaagtgattgag

SEQ ID NO: 5938079 - DNA, 25 bp, Homo sapien
actgcctcttcacaacggggagggt

SEQ ID NO: 5938080 - DNA, 25 bp, Homo sapien
gaatccctcaactctctgcctattg

SEQ ID NO: 5938081 - DNA, 25 bp, Homo sapien
gggaaacctgggctccaagatggct

SEQ ID NO: 5938082 - DNA, 25 bp, Homo sapien
agagacaaagcagaaccctccatct

SEQ ID NO: 5938083 - DNA, 25 bp, Homo sapien
tccaggtaattgcatggctgctgca

SEQ ID NO: 5938084 - DNA, 25 bp, Homo sapien
gagtgactgggtctctcccctgcag

SEQ ID NO: 5938085 - DNA, 25 bp, Homo sapien
cagggcctggaagctctcggaccta

SEQ ID NO: 5938086 - DNA, 25 bp, Homo sapien
aggagggctgtgcagggcctggaag

SEQ ID NO: 5938087 - DNA, 25 bp, Homo sapien
gcctcgaaggcctgagtggggagag

SEQ ID NO: 5938088 - DNA, 25 bp, Homo sapien
aggcggccagctcaccagcctcatc

SEQ ID NO: 5938089 - DNA, 25 bp, Homo sapien
ccacctgggtgaatccctcaactct

SEQ ID NO: 5938090 - DNA, 25 bp, Homo sapien
cctgggacagagggcatttaaggcg

SEQ ID NO: 5938091 - DNA, 25 bp, Homo sapien
tttggccagcataaaaacccttcac

SEQ ID NO: 5938092 - DNA, 25 bp, Homo sapien
ggcgggctggaggtggatttttata

SEQ ID NO: 5938093 - DNA, 25 bp, Homo sapien
aaacattattcaaaacagagagaaa

SEQ ID NO: 5938094 - DNA, 25 bp, Homo sapien
ggtgcaagggatctgcgaggtttca

SEQ ID NO: 5938095 - DNA, 25 bp, Homo sapien
aaaagtgattgaggcaaattgtaaa

SEQ ID NO: 5938096 - DNA, 25 bp, Homo sapien
gttaactcaggagtctcctggagtg

SEQ ID NO: 5938097 - DNA, 25 bp, Homo sapien
gtgaatccctcaactctctgcctat

SEQ ID NO: 5938098 - DNA, 25 bp, Homo sapien
gatggctcatctgttgatctgcctc

SEQ ID NO: 5938099 - DNA, 25 bp, Homo sapien
ggaccagttccaggtaattgcatgg

SEQ ID NO: 5938100 - DNA, 25 bp, Homo sapien
tcctcacctaggttgggcagtggga

SEQ ID NO: 5938101 - DNA, 25 bp, Homo sapien
catcttcagacagcctcgaaggcct

SEQ ID NO: 5938102 - DNA, 25 bp, Homo sapien
gactaggactggccaatgtcttccc

SEQ ID NO: 5938103 - DNA, 25 bp, Homo sapien
cccatccctgggacagagggcattt

SEQ ID NO: 5938104 - DNA, 25 bp, Homo sapien
gactgggtctctcccctgcagccac

SEQ ID NO: 5938105 - DNA, 25 bp, Homo sapien
caggtaattgcatggctgctgcatt

SEQ ID NO: 5938106 - DNA, 25 bp, Homo sapien
ggagagacaaagcagaaccctccat

SEQ ID NO: 5938107 - DNA, 25 bp, Homo sapien
tatttctttggccagcataaaaacc

SEQ ID NO: 5938108 - DNA, 25 bp, Homo sapien
ttggctgtgtttggctccttgtgtg

SEQ ID NO: 5938109 - DNA, 25 bp, Homo sapien
ctgttgatctgcctcccttcggtgt

SEQ ID NO: 5938110 - DNA, 25 bp, Homo sapien
cctcttcacaacggggagggttctg

SEQ ID NO: 5938111 - DNA, 25 bp, Homo sapien
acccttcacacacccttttctcttc

SEQ ID NO: 5938112 - DNA, 25 bp, Homo sapien
ggatttttataaaagtgattgaggc

SEQ ID NO: 5938113 - DNA, 25 bp, Homo sapien
gagaggggcgggctggaggtggatt

SEQ ID NO: 5938114 - DNA, 25 bp, Homo sapien
aatccccatccctgggacagagggc

SEQ ID NO: 5938115 - DNA, 25 bp, Homo sapien
aggcgagtctcctagccccacatag

SEQ ID NO: 5938116 - DNA, 25 bp, Homo sapien
gtctcctggagtgactgggtctctc

SEQ ID NO: 5938117 - DNA, 25 bp, Homo sapien
gtgactgggtctctcccctgcagcc

SEQ ID NO: 5938118 - DNA, 25 bp, Homo sapien
aagatggctcatctgttgatctgcc

SEQ ID NO: 5938119 - DNA, 25 bp, Homo sapien
ctcccttctaaatgctactgcctct

SEQ ID NO: 5938120 - DNA, 25 bp, Homo sapien
ggcccctgtgagcggcatgggaagg

SEQ ID NO: 5938121 - DNA, 25 bp, Homo sapien
actctctgcctattggctgtgtttg

SEQ ID NO: 5938122 - DNA, 25 bp, Homo sapien
tctgcctattggctgtgtttggctc

SEQ ID NO: 5938123 - DNA, 25 bp, Homo sapien
ctccaagatggctcatctgttgatc

SEQ ID NO: 5938124 - DNA, 25 bp, Homo sapien
ggagtggttatttctttggccagca

SEQ ID NO: 5938125 - DNA, 25 bp, Homo sapien
aagctctcggacctactgaccgaga

SEQ ID NO: 5938126 - DNA, 25 bp, Homo sapien
ggcaaattgtaaacattattcaaaa

SEQ ID NO: 5938127 - DNA, 25 bp, Homo sapien
agtggggagaggggcgggctggagg

SEQ ID NO: 5938128 - DNA, 25 bp, Homo sapien
tggcctgtagccacctgggtgaatc

SEQ ID NO: 5938129 - DNA, 25 bp, Homo sapien
tcatctgtctcccttctaaatgcta

SEQ ID NO: 5938130 - DNA, 25 bp, Homo sapien
ctactgaccgagagatgactaggac

SEQ ID NO: 5938131 - DNA, 25 bp, Homo sapien
cagtgttaactcaggagtctcctgg

SEQ ID NO: 5938132 - DNA, 25 bp, Homo sapien
ggacagagggcatttaaggcgagtc

SEQ ID NO: 5938133 - DNA, 25 bp, Homo sapien
accctccatctgctccaggggaaac

SEQ ID NO: 5938134 - DNA, 25 bp, Homo sapien
ggggcgggctggaggtggattttta

SEQ ID NO: 5938135 - DNA, 25 bp, Homo sapien
aaaagccaccccaacacacagctgc

SEQ ID NO: 5938136 - DNA, 25 bp, Homo sapien
ttcacacacccttttctcttccatc

SEQ ID NO: 5938137 - DNA, 25 bp, Homo sapien
ttcagacagcctcgaaggcctgagt

SEQ ID NO: 5938138 - DNA, 25 bp, Homo sapien
gtttttcaagcatcttcagacagcc

SEQ ID NO: 5938139 - DNA, 25 bp, Homo sapien
ggcctgagtggggagaggggcgggc

SEQ ID NO: 5938140 - DNA, 25 bp, Homo sapien
tagccccacataggagagacaaagc

SEQ ID NO: 5938141 - DNA, 25 bp, Homo sapien
taggagagacaaagcagaaccctcc

SEQ ID NO: 5938142 - DNA, 25 bp, Homo sapien
tttcattagctgccccatggagagg

SEQ ID NO: 5938143 - DNA, 25 bp, Homo sapien
aacctgggctccaagatggctcatc

SEQ ID NO: 5938144 - DNA, 25 bp, Homo sapien
gctctcttcaggtcaccccttgcca

SEQ ID NO: 5938145 - DNA, 25 bp, Homo sapien
ggttgagtttttcaagcatcttcag

SEQ ID NO: 5938146 - DNA, 25 bp, Homo sapien
actcctcacctaggttgggcagtgg

SEQ ID NO: 5938147 - DNA, 25 bp, Homo sapien
agtgggagtggttatttctttggcc

SEQ ID NO: 5938148 - DNA, 25 bp, Homo sapien
gggaaggcttctccatcacctcctg

SEQ ID NO: 5938149 - DNA, 25 bp, Homo sapien
taattgcatggctgctgcattcccg

SEQ ID NO: 5938150 - DNA, 25 bp, Homo sapien
atctgttgatctgcctcccttcggt

SEQ ID NO: 5938151 - DNA, 25 bp, Homo sapien
tcttcaggtcaccccttgccactct

SEQ ID NO: 5938152 - DNA, 25 bp, Homo sapien
gagtttttcaagcatcttcagacag

SEQ ID NO: 5938153 - DNA, 25 bp, Homo sapien
ttggctccttgtgtgccaatcccca

SEQ ID NO: 5938154 - DNA, 25 bp, Homo sapien
tcttcccagtgttaactcaggagtc

SEQ ID NO: 5938155 - DNA, 25 bp, Homo sapien
aatgtcttcccagtgttaactcagg

SEQ ID NO: 5938156 - DNA, 25 bp, Homo sapien
ctgtctcccttctaaatgctactgc

SEQ ID NO: 5938157 - DNA, 25 bp, Homo sapien
gtttctccccaacacaggaccagtt

SEQ ID NO: 5938158 - DNA, 25 bp, Homo sapien
tccccccaggtgagaaaggagggct

SEQ ID NO: 5938159 - DNA, 25 bp, Homo sapien
ctgtagccacctgggtgaatccctc

SEQ ID NO: 5938160 - DNA, 25 bp, Homo sapien
ggcatttaaggcgagtctcctagcc

SEQ ID NO: 5938161 - DNA, 25 bp, Homo sapien
cagcataaaaacccttcacacaccc

SEQ ID NO: 5938162 - DNA, 25 bp, Homo sapien
gccagcataaaaacccttcacacac

SEQ ID NO: 5938163 - DNA, 25 bp, Homo sapien
agaggagcctggcaccagtatagct

SEQ ID NO: 5938164 - DNA, 25 bp, Homo sapien
atccctcaactctctgcctattggc

SEQ ID NO: 5938165 - DNA, 25 bp, Homo sapien
cagttccaggtaattgcatggctgc

SEQ ID NO: 5938166 - DNA, 25 bp, Homo sapien
agatgactaggactggccaatgtct

SEQ ID NO: 5938167 - DNA, 25 bp, Homo sapien
ggaggtggatttttataaaagtgat

SEQ ID NO: 5938168 - DNA, 25 bp, Homo sapien
agtggttatttctttggccagcata

SEQ ID NO: 5938169 - DNA, 25 bp, Homo sapien
tgctgcattcccgtgaggcccctgt

SEQ ID NO: 5938170 - DNA, 25 bp, Homo sapien
cacctaggttgggcagtgggagtgg

SEQ ID NO: 5938171 - DNA, 25 bp, Homo sapien
ctctccccagagccaggagccacca

SEQ ID NO: 5938172 - DNA, 25 bp, Homo sapien
cctattggctgtgtttggctccttg

SEQ ID NO: 5938173 - DNA, 25 bp, Homo sapien
atttttataaaagtgattgaggcaa

SEQ ID NO: 5938174 - DNA, 25 bp, Homo sapien
catccctgggacagagggcatttaa

SEQ ID NO: 5938175 - DNA, 25 bp, Homo sapien
ttcaagcatcttcagacagcctcga

SEQ ID NO: 5938176 - DNA, 25 bp, Homo sapien
tgcctattggctgtgtttggctcct

SEQ ID NO: 5938177 - DNA, 25 bp, Homo sapien
ctcctagccccacataggagagaca

SEQ ID NO: 5938178 - DNA, 25 bp, Homo sapien
ggttctggggtgcaagggatctgcg

SEQ ID NO: 5938179 - DNA, 25 bp, Homo sapien
gcctggcaccagtatagctctcttc

SEQ ID NO: 5938180 - DNA, 25 bp, Homo sapien
gcctgtagccacctgggtgaatccc

SEQ ID NO: 5938181 - DNA, 25 bp, Homo sapien
acttgtttctccccaacacaggacc

SEQ ID NO: 5938182 - DNA, 25 bp, Homo sapien
caaattgtaaacattattcaaaaca

SEQ ID NO: 5938183 - DNA, 25 bp, Homo sapien
tccatctgctccaggggaaacctgg

SEQ ID NO: 5938184 - DNA, 25 bp, Homo sapien
tgccccatggagaggagcctggcac

SEQ ID NO: 5938185 - DNA, 25 bp, Homo sapien
ttcccctggcctgtagccacctggg

SEQ ID NO: 5938186 - DNA, 25 bp, Homo sapien
agggatctgcgaggtttcattagct

SEQ ID NO: 5938187 - DNA, 25 bp, Homo sapien
tgagtggggagaggggcgggctgga

SEQ ID NO: 5938188 - DNA, 25 bp, Homo sapien
aggactggccaatgtcttcccagtg

SEQ ID NO: 5938189 - DNA, 25 bp, Homo sapien
gtgattgaggcaaattgtaaacatt

SEQ ID NO: 5938190 - DNA, 25 bp, Homo sapien
ggaagctctcggacctactgaccga

SEQ ID NO: 5938191 - DNA, 25 bp, Homo sapien
gggtctctcccctgcagccacttcc

SEQ ID NO: 5938192 - DNA, 25 bp, Homo sapien
gggcagtgggagtggttatttcttt

SEQ ID NO: 5938193 - DNA, 25 bp, Homo sapien
attgcatggctgctgcattcccgtg

SEQ ID NO: 5938194 - DNA, 25 bp, Homo sapien
ccttcggtgttggaaaaggcggcca

SEQ ID NO: 5938195 - DNA, 25 bp, Homo sapien
ggggtgcaagggatctgcgaggttt

SEQ ID NO: 5938196 - DNA, 25 bp, Homo sapien
agagatgactaggactggccaatgt

SEQ ID NO: 5938197 - DNA, 25 bp, Homo sapien
ttgccactctccccagagccaggag

SEQ ID NO: 5938198 - DNA, 25 bp, Homo sapien
ctaggactggccaatgtcttcccag

SEQ ID NO: 5938199 - DNA, 25 bp, Homo sapien
gcataaaaacccttcacacaccctt

SEQ ID NO: 5938200 - DNA, 25 bp, Homo sapien
ctcaactctctgcctattggctgtg

SEQ ID NO: 5938201 - DNA, 25 bp, Homo sapien
atctgtctcccttctaaatgctact

SEQ ID NO: 5938202 - DNA, 25 bp, Homo sapien
gttgatctgcctcccttcggtgttg

SEQ ID NO: 5938203 - DNA, 25 bp, Homo sapien
gccccatacctgacttcagaaaact

SEQ ID NO: 5938204 - DNA, 25 bp, Homo sapien
tgggagtggttatttctttggccag

SEQ ID NO: 5938205 - DNA, 25 bp, Homo sapien
agggttctggggtgcaagggatctg

SEQ ID NO: 5938206 - DNA, 25 bp, Homo sapien
ctcacctaggttgggcagtgggagt

SEQ ID NO: 5938207 - DNA, 25 bp, Homo sapien
tcttcagacagcctcgaaggcctga

SEQ ID NO: 5938208 - DNA, 25 bp, Homo sapien
gcggccagctcaccagcctcatctg

SEQ ID NO: 5938209 - DNA, 25 bp, Homo sapien
caacggggagggttctggggtgcaa

SEQ ID NO: 5938210 - DNA, 25 bp, Homo sapien
ccccagagccaggagccaccactcc

SEQ ID NO: 5938211 - DNA, 25 bp, Homo sapien
cctaggttgggcagtgggagtggtt

SEQ ID NO: 5938212 - DNA, 25 bp, Homo sapien
tagctctcttcaggtcaccccttgc

SEQ ID NO: 5938213 - DNA, 25 bp, Homo sapien
ctgtgtttggctccttgtgtgccaa

SEQ ID NO: 5938214 - DNA, 25 bp, Homo sapien
gggcctggaagctctcggacctact

SEQ ID NO: 5938215 - DNA, 25 bp, Homo sapien
tttctttggccagcataaaaaccct

SEQ ID NO: 5938216 - DNA, 25 bp, Homo sapien
taactcaggagtctcctggagtgac

SEQ ID NO: 5938217 - DNA, 25 bp, Homo sapien
cctggagtgactgggtctctcccct

SEQ ID NO: 5938218 - DNA, 25 bp, Homo sapien
caagcatcttcagacagcctcgaag

SEQ ID NO: 5938219 - DNA, 25 bp, Homo sapien
ttgtaaacattattcaaaacagaga

SEQ ID NO: 5938220 - DNA, 25 bp, Homo sapien
caccagcctcatctgtctcccttct

SEQ ID NO: 5938221 - DNA, 25 bp, Homo sapien
ctactgcctcttcacaacggggagg

SEQ ID NO: 5938222 - DNA, 25 bp, Homo sapien
gcattcccgtgaggcccctgtgagc

SEQ ID NO: 5938223 - DNA, 25 bp, Homo sapien
ctggaggtggatttttataaaagtg

SEQ ID NO: 5938224 - DNA, 25 bp, Homo sapien
acagagagaaaaaagccaccccaac

SEQ ID NO: 5938225 - DNA, 25 bp, Homo sapien
aggtggatttttataaaagtgattg

SEQ ID NO: 5938226 - DNA, 25 bp, Homo sapien
cctcatctgtctcccttctaaatgc

SEQ ID NO: 5938227 - DNA, 25 bp, Homo sapien
gaaaaggcggccagctcaccagcct

SEQ ID NO: 5938228 - DNA, 25 bp, Homo sapien
gtctcccttctaaatgctactgcct

SEQ ID NO: 5938229 - DNA, 25 bp, Homo sapien
ttgggcagtgggagtggttatttct

SEQ ID NO: 5938230 - DNA, 25 bp, Homo sapien
ctcgaaggcctgagtggggagaggg

SEQ ID NO: 5938231 - DNA, 25 bp, Homo sapien
gaaggcttctccatcacctcctgcc

SEQ ID NO: 5938232 - DNA, 25 bp, Homo sapien
agagggcatttaaggcgagtctcct

SEQ ID NO: 5938233 - DNA, 25 bp, Homo sapien
tgcatggctgctgcattcccgtgag

SEQ ID NO: 5938234 - DNA, 25 bp, Homo sapien
gtgtgccaatccccatccctgggac

SEQ ID NO: 5938235 - DNA, 25 bp, Homo sapien
ggggagggttctggggtgcaaggga

SEQ ID NO: 5938236 - DNA, 25 bp, Homo sapien
gtgtggacagacatgatggacagtg

SEQ ID NO: 5938237 - DNA, 25 bp, Homo sapien
gccactgtcaccagcagcgtgtgga

SEQ ID NO: 5938238 - DNA, 25 bp, Homo sapien
agatccctgatacacttcacactct

SEQ ID NO: 5938239 - DNA, 25 bp, Homo sapien
acagacgtcccatgcaggacaagag

SEQ ID NO: 5938240 - DNA, 25 bp, Homo sapien
aggaagcacccactcctttcagccc

SEQ ID NO: 5938241 - DNA, 25 bp, Homo sapien
tcagccccaccagtcctagaatagt

SEQ ID NO: 5938242 - DNA, 25 bp, Homo sapien
tgcagggccattgtccacgcctgtg

SEQ ID NO: 5938243 - DNA, 25 bp, Homo sapien
ttctaggggtcagctgagctcttgg

SEQ ID NO: 5938244 - DNA, 25 bp, Homo sapien
accggaagtgctattttatatgctg

SEQ ID NO: 5938245 - DNA, 25 bp, Homo sapien
taccctgtcaatagtacaattcttg

SEQ ID NO: 5938246 - DNA, 25 bp, Homo sapien
accagtcctagaatagtccccaggt

SEQ ID NO: 5938247 - DNA, 25 bp, Homo sapien
ctcttggaagatccctgatacactt

SEQ ID NO: 5938248 - DNA, 25 bp, Homo sapien
gtcctaggaaacccccttacagctg

SEQ ID NO: 5938249 - DNA, 25 bp, Homo sapien
ccccgtccccagggagcaccccaca

SEQ ID NO: 5938250 - DNA, 25 bp, Homo sapien
accacctcaactgccagctgccccc

SEQ ID NO: 5938251 - DNA, 25 bp, Homo sapien
gtggggggaagtcagcctttctggg

SEQ ID NO: 5938252 - DNA, 25 bp, Homo sapien
caggaaccgagcctcttcttcaagt

SEQ ID NO: 5938253 - DNA, 25 bp, Homo sapien
ggctagctggcatctccccgcttgg

SEQ ID NO: 5938254 - DNA, 25 bp, Homo sapien
atagactctgagtaccctgtcaata

SEQ ID NO: 5938255 - DNA, 25 bp, Homo sapien
ccctgaaccaatgaacattgcaagt

SEQ ID NO: 5938256 - DNA, 25 bp, Homo sapien
cttgtcccgaggaagcagggtcaag

SEQ ID NO: 5938257 - DNA, 25 bp, Homo sapien
caatgaacattgcaagtgcctgggg

SEQ ID NO: 5938258 - DNA, 25 bp, Homo sapien
gtgaggacagacgtcccatgcagga

SEQ ID NO: 5938259 - DNA, 25 bp, Homo sapien
atagtccccaggtcactctcagctg

SEQ ID NO: 5938260 - DNA, 25 bp, Homo sapien
caccccacagaaacagttctaaccc

SEQ ID NO: 5938261 - DNA, 25 bp, Homo sapien
atttagacaccggaagtgctatttt

SEQ ID NO: 5938262 - DNA, 25 bp, Homo sapien
agacatgatggacagtgaggacaga

SEQ ID NO: 5938263 - DNA, 25 bp, Homo sapien
cgagacccttttttcatatcatgaa

SEQ ID NO: 5938264 - DNA, 25 bp, Homo sapien
tgctagctggttggctagctggcat

SEQ ID NO: 5938265 - DNA, 25 bp, Homo sapien
agtggcagagaaggcaagccaggtt

SEQ ID NO: 5938266 - DNA, 25 bp, Homo sapien
ccccttacagctgtcctgaggacac

SEQ ID NO: 5938267 - DNA, 25 bp, Homo sapien
gaggaagcagggtcaagtccttaaa

SEQ ID NO: 5938268 - DNA, 25 bp, Homo sapien
cacttcacactctgggggttcagga

SEQ ID NO: 5938269 - DNA, 25 bp, Homo sapien
agatagaatcacctaggtttacaag

SEQ ID NO: 5938270 - DNA, 25 bp, Homo sapien
acagaaacagttctaaccctgaacc

SEQ ID NO: 5938271 - DNA, 25 bp, Homo sapien
ttcaagtctccaagtgcaactgccc

SEQ ID NO: 5938272 - DNA, 25 bp, Homo sapien
ctaggagccctggctctgcgctgga

SEQ ID NO: 5938273 - DNA, 25 bp, Homo sapien
caattcttgtatgttctgggagttt

SEQ ID NO: 5938274 - DNA, 25 bp, Homo sapien
gtgtacctaccactaggagccctgg

SEQ ID NO: 5938275 - DNA, 25 bp, Homo sapien
aaccgagcctcttcttcaagtctcc

SEQ ID NO: 5938276 - DNA, 25 bp, Homo sapien
cttcttcaagtctccaagtgcaact

SEQ ID NO: 5938277 - DNA, 25 bp, Homo sapien
ggacaagagacttgagatgggcaat

SEQ ID NO: 5938278 - DNA, 25 bp, Homo sapien
ctgctatgagaccttgggggctttc

SEQ ID NO: 5938279 - DNA, 25 bp, Homo sapien
catgcaggacaagagacttgagatg

SEQ ID NO: 5938280 - DNA, 25 bp, Homo sapien
gtgataggtaagcatctgcctgaag

SEQ ID NO: 5938281 - DNA, 25 bp, Homo sapien
gggctttccttgttctctctgggga

SEQ ID NO: 5938282 - DNA, 25 bp, Homo sapien
gtccacgcctgtgataggtaagcat

SEQ ID NO: 5938283 - DNA, 25 bp, Homo sapien
agacccttttttcatatcatgaagc

SEQ ID NO: 5938284 - DNA, 25 bp, Homo sapien
catatcatgaagccagcaagagtgg

SEQ ID NO: 5938285 - DNA, 25 bp, Homo sapien
acctaccactaggagccctggctct

SEQ ID NO: 5938286 - DNA, 25 bp, Homo sapien
actcgagataacccacatttagaca

SEQ ID NO: 5938287 - DNA, 25 bp, Homo sapien
caatagtacaattcttgtatgttct

SEQ ID NO: 5938288 - DNA, 25 bp, Homo sapien
tttcccctttgaaaagcaagttgga

SEQ ID NO: 5938289 - DNA, 25 bp, Homo sapien
acaagagacttgagatgggcaatga

SEQ ID NO: 5938290 - DNA, 25 bp, Homo sapien
gcgtgtggacagacatgatggacag

SEQ ID NO: 5938291 - DNA, 25 bp, Homo sapien
tcccctttgaaaagcaagttggaca

SEQ ID NO: 5938292 - DNA, 25 bp, Homo sapien
tgcccagaccttgacttggagtgac

SEQ ID NO: 5938293 - DNA, 25 bp, Homo sapien
tatgagaccttgggggctttccttg

SEQ ID NO: 5938294 - DNA, 25 bp, Homo sapien
tgctcacaatggtaccaaagataga

SEQ ID NO: 5938295 - DNA, 25 bp, Homo sapien
cttggagtgacagtgagtgtcctag

SEQ ID NO: 5938296 - DNA, 25 bp, Homo sapien
gcagagaaggcaagccaggttacct

SEQ ID NO: 5938297 - DNA, 25 bp, Homo sapien
cgctggacctgctatgagaccttgg

SEQ ID NO: 5938298 - DNA, 25 bp, Homo sapien
tggagtgacagtgagtgtcctagga

SEQ ID NO: 5938299 - DNA, 25 bp, Homo sapien
tcacctaggtttacaagtacttgta

SEQ ID NO: 5938300 - DNA, 25 bp, Homo sapien
acaccggaagtgctattttatatgc

SEQ ID NO: 5938301 - DNA, 25 bp, Homo sapien
aagtccttaaactgatctttctagg

SEQ ID NO: 5938302 - DNA, 25 bp, Homo sapien
gacagtgagtgtcctaggaaacccc

SEQ ID NO: 5938303 - DNA, 25 bp, Homo sapien
ccagcaagagtggcagagaaggcaa

SEQ ID NO: 5938304 - DNA, 25 bp, Homo sapien
cacccaccagagtctgcagggccat

SEQ ID NO: 5938305 - DNA, 25 bp, Homo sapien
tggctctgcgctggacctgctatga

SEQ ID NO: 5938306 - DNA, 25 bp, Homo sapien
ttaccacctcaactgccagctgccc

SEQ ID NO: 5938307 - DNA, 25 bp, Homo sapien
gaggacagacgtcccatgcaggaca

SEQ ID NO: 5938308 - DNA, 25 bp, Homo sapien
atgttctgggagtttgctcttgtcc

SEQ ID NO: 5938309 - DNA, 25 bp, Homo sapien
cagtgagtgtcctaggaaaccccct

SEQ ID NO: 5938310 - DNA, 25 bp, Homo sapien
ccacaggaagcacccactcctttca

SEQ ID NO: 5938311 - DNA, 25 bp, Homo sapien
gctttccttgttctctctggggacc

SEQ ID NO: 5938312 - DNA, 25 bp, Homo sapien
acatgatggacagtgaggacagacg

SEQ ID NO: 5938313 - DNA, 25 bp, Homo sapien
acacatagactctgagtaccctgtc

SEQ ID NO: 5938314 - DNA, 25 bp, Homo sapien
ttctaaccctgaaccaatgaacatt

SEQ ID NO: 5938315 - DNA, 25 bp, Homo sapien
ggaagtcagcctttctggggaccct

SEQ ID NO: 5938316 - DNA, 25 bp, Homo sapien
ctcttgtcccgaggaagcagggtca

SEQ ID NO: 5938317 - DNA, 25 bp, Homo sapien
ttctctctggggaccagttttcttt

SEQ ID NO: 5938318 - DNA, 25 bp, Homo sapien
agtctgcagggccattgtccacgcc

SEQ ID NO: 5938319 - DNA, 25 bp, Homo sapien
aaactgatctttctaggggtcagct

SEQ ID NO: 5938320 - DNA, 25 bp, Homo sapien
gattaccacctcaactgccagctgc

SEQ ID NO: 5938321 - DNA, 25 bp, Homo sapien
taccaaagatagaatcacctaggtt

SEQ ID NO: 5938322 - DNA, 25 bp, Homo sapien
gaagatccctgatacacttcacact

SEQ ID NO: 5938323 - DNA, 25 bp, Homo sapien
cagcctttctggggaccctccctgc

SEQ ID NO: 5938324 - DNA, 25 bp, Homo sapien
tggcagagaaggcaagccaggttac

SEQ ID NO: 5938325 - DNA, 25 bp, Homo sapien
agctcttggaagatccctgatacac

SEQ ID NO: 5938326 - DNA, 25 bp, Homo sapien
cagaccttgacttggagtgacagtg

SEQ ID NO: 5938327 - DNA, 25 bp, Homo sapien
ttgacttggagtgacagtgagtgtc

SEQ ID NO: 5938328 - DNA, 25 bp, Homo sapien
gataggtaagcatctgcctgaagtg

SEQ ID NO: 5938329 - DNA, 25 bp, Homo sapien
gctgcccccgtccccagggagcacc

SEQ ID NO: 5938330 - DNA, 25 bp, Homo sapien
tatatgctgttaagttttcctatct

SEQ ID NO: 5938331 - DNA, 25 bp, Homo sapien
gttctgggagtttgctcttgtcccg

SEQ ID NO: 5938332 - DNA, 25 bp, Homo sapien
ggacagacatgatggacagtgagga

SEQ ID NO: 5938333 - DNA, 25 bp, Homo sapien
cctagaatagtccccaggtcactct

SEQ ID NO: 5938334 - DNA, 25 bp, Homo sapien
cccacccaccagagtctgcagggcc

SEQ ID NO: 5938335 - DNA, 25 bp, Homo sapien
gggcaatgagaggaagatgctgacg

SEQ ID NO: 5938336 - DNA, 25 bp, Homo sapien
tacaagtacttgtaggactcgagat

SEQ ID NO: 5938337 - DNA, 25 bp, Homo sapien
caatggtaccaaagatagaatcacc

SEQ ID NO: 5938338 - DNA, 25 bp, Homo sapien
gtactgctcacaatggtaccaaaga

SEQ ID NO: 5938339 - DNA, 25 bp, Homo sapien
ccgagcctcttcttcaagtctccaa

SEQ ID NO: 5938340 - DNA, 25 bp, Homo sapien
cctaggtttacaagtacttgtagga

SEQ ID NO: 5938341 - DNA, 25 bp, Homo sapien
ggaaacccccttacagctgtcctga

SEQ ID NO: 5938342 - DNA, 25 bp, Homo sapien
gagacttgagatgggcaatgagagg

SEQ ID NO: 5938343 - DNA, 25 bp, Homo sapien
gctgagctcttggaagatccctgat

SEQ ID NO: 5938344 - DNA, 25 bp, Homo sapien
cttgtaggactcgagataacccaca

SEQ ID NO: 5938345 - DNA, 25 bp, Homo sapien
actgatctttctaggggtcagctga

SEQ ID NO: 5938346 - DNA, 25 bp, Homo sapien
agacgtcccatgcaggacaagagac

SEQ ID NO: 5938347 - DNA, 25 bp, Homo sapien
cacctcaactgccagctgcccccgt

SEQ ID NO: 5938348 - DNA, 25 bp, Homo sapien
cactaggagccctggctctgcgctg

SEQ ID NO: 5938349 - DNA, 25 bp, Homo sapien
atgggcaatgagaggaagatgctga

SEQ ID NO: 5938350 - DNA, 25 bp, Homo sapien
cacccactcctttcagccccaccag

SEQ ID NO: 5938351 - DNA, 25 bp, Homo sapien
gggccattgtccacgcctgtgatag

SEQ ID NO: 5938352 - DNA, 25 bp, Homo sapien
ttgtccacgcctgtgataggtaagc

SEQ ID NO: 5938353 - DNA, 25 bp, Homo sapien
tgtaggactcgagataacccacatt

SEQ ID NO: 5938354 - DNA, 25 bp, Homo sapien
aggttacctcgggccactgtcacca

SEQ ID NO: 5938355 - DNA, 25 bp, Homo sapien
gcagaggctggggagtactgctcac

SEQ ID NO: 5938356 - DNA, 25 bp, Homo sapien
acagctgtcctgaggacacagaaga

SEQ ID NO: 5938357 - DNA, 25 bp, Homo sapien
taagcatctgcctgaagtgtgtacc

SEQ ID NO: 5938358 - DNA, 25 bp, Homo sapien
ctcacaatggtaccaaagatagaat

SEQ ID NO: 5938359 - DNA, 25 bp, Homo sapien
atagtacaattcttgtatgttctgg

SEQ ID NO: 5938360 - DNA, 25 bp, Homo sapien
acgggattaccacctcaactgccag

SEQ ID NO: 5938361 - DNA, 25 bp, Homo sapien
gaacattgcaagtgcctggggacta

SEQ ID NO: 5938362 - DNA, 25 bp, Homo sapien
cctaggaaacccccttacagctgtc

SEQ ID NO: 5938363 - DNA, 25 bp, Homo sapien
acccccttacagctgtcctgaggac

SEQ ID NO: 5938364 - DNA, 25 bp, Homo sapien
agctgacccacccaccagagtctgc

SEQ ID NO: 5938365 - DNA, 25 bp, Homo sapien
aggacacagaagagaccacgagacc

SEQ ID NO: 5938366 - DNA, 25 bp, Homo sapien
ctgtcaatagtacaattcttgtatg

SEQ ID NO: 5938367 - DNA, 25 bp, Homo sapien
ggtcaagtccttaaactgatctttc

SEQ ID NO: 5938368 - DNA, 25 bp, Homo sapien
caagtacttgtaggactcgagataa

SEQ ID NO: 5938369 - DNA, 25 bp, Homo sapien
caggtcactctcagctgacccaccc

SEQ ID NO: 5938370 - DNA, 25 bp, Homo sapien
taggactcgagataacccacattta

SEQ ID NO: 5938371 - DNA, 25 bp, Homo sapien
gaagatgctgacgggattaccacct

SEQ ID NO: 5938372 - DNA, 25 bp, Homo sapien
gatacacttcacactctgggggttc

SEQ ID NO: 5938373 - DNA, 25 bp, Homo sapien
gtgtgtacctaccactaggagccct

SEQ ID NO: 5938374 - DNA, 25 bp, Homo sapien
ccaccagtcctagaatagtccccag

SEQ ID NO: 5938375 - DNA, 25 bp, Homo sapien
ccaaagatagaatcacctaggttta

SEQ ID NO: 5938376 - DNA, 25 bp, Homo sapien
gggtcagctgagctcttggaagatc

SEQ ID NO: 5938377 - DNA, 25 bp, Homo sapien
tgcctgaagtgtgtacctaccacta

SEQ ID NO: 5938378 - DNA, 25 bp, Homo sapien
cccactcctttcagccccaccagtc

SEQ ID NO: 5938379 - DNA, 25 bp, Homo sapien
agccccaccagtcctagaatagtcc

SEQ ID NO: 5938380 - DNA, 25 bp, Homo sapien
aaagcaagttggacacatagactct

SEQ ID NO: 5938381 - DNA, 25 bp, Homo sapien
agtacttgtaggactcgagataacc

SEQ ID NO: 5938382 - DNA, 25 bp, Homo sapien
ctattttatatgctgttaagttttc

SEQ ID NO: 5938383 - DNA, 25 bp, Homo sapien
gtcaatagtacaattcttgtatgtt

SEQ ID NO: 5938384 - DNA, 25 bp, Homo sapien
ccctgtcaatagtacaattcttgta

SEQ ID NO: 5938385 - DNA, 25 bp, Homo sapien
cagtcctagaatagtccccaggtca

SEQ ID NO: 5938386 - DNA, 25 bp, Homo sapien
tctcagctgacccacccaccagagt

SEQ ID NO: 5938387 - DNA, 25 bp, Homo sapien
gggggctttccttgttctctctggg

SEQ ID NO: 5938388 - DNA, 25 bp, Homo sapien
ctttctggggaccctccctgctagc

SEQ ID NO: 5938389 - DNA, 25 bp, Homo sapien
atctttctaggggtcagctgagctc

SEQ ID NO: 5938390 - DNA, 25 bp, Homo sapien
gagccctggctctgcgctggacctg

SEQ ID NO: 5938391 - DNA, 25 bp, Homo sapien
atgaagccagcaagagtggcagaga

SEQ ID NO: 5938392 - DNA, 25 bp, Homo sapien
ggggaccctccctgctagctggttg

SEQ ID NO: 5938393 - DNA, 25 bp, Homo sapien
tctgcgctggacctgctatgagacc

SEQ ID NO: 5938394 - DNA, 25 bp, Homo sapien
ccccaccagtcctagaatagtcccc

SEQ ID NO: 5938395 - DNA, 25 bp, Homo sapien
tacctcgggccactgtcaccagcag

SEQ ID NO: 5938396 - DNA, 25 bp, Homo sapien
tacttgtaggactcgagataaccca

SEQ ID NO: 5938397 - DNA, 25 bp, Homo sapien
agggtcaagtccttaaactgatctt

SEQ ID NO: 5938398 - DNA, 25 bp, Homo sapien
gagtactgctcacaatggtaccaaa

SEQ ID NO: 5938399 - DNA, 25 bp, Homo sapien
acatagactctgagtaccctgtcaa

SEQ ID NO: 5938400 - DNA, 25 bp, Homo sapien
agagtctgcagggccattgtccacg

SEQ ID NO: 5938401 - DNA, 25 bp, Homo sapien
ggtcactctcagctgacccacccac

SEQ ID NO: 5938402 - DNA, 25 bp, Homo sapien
cagcgtgtggacagacatgatggac

SEQ ID NO: 5938403 - DNA, 25 bp, Homo sapien
gctgacgggattaccacctcaactg

SEQ ID NO: 5938404 - DNA, 25 bp, Homo sapien
gtggacagacatgatggacagtgag

SEQ ID NO: 5938405 - DNA, 25 bp, Homo sapien
cccaggtcactctcagctgacccac

SEQ ID NO: 5938406 - DNA, 25 bp, Homo sapien
tggacagtgaggacagacgtcccat

SEQ ID NO: 5938407 - DNA, 25 bp, Homo sapien
acagacatgatggacagtgaggaca

SEQ ID NO: 5938408 - DNA, 25 bp, Homo sapien
aatcacctaggtttacaagtacttg

SEQ ID NO: 5938409 - DNA, 25 bp, Homo sapien
ccccagggagcaccccacagaaaca

SEQ ID NO: 5938410 - DNA, 25 bp, Homo sapien
acaggaagcacccactcctttcagc

SEQ ID NO: 5938411 - DNA, 25 bp, Homo sapien
tcagctgacccacccaccagagtct

SEQ ID NO: 5938412 - DNA, 25 bp, Homo sapien
caagccaggttacctcgggccactg

SEQ ID NO: 5938413 - DNA, 25 bp, Homo sapien
ggagtttgctcttgtcccgaggaag

SEQ ID NO: 5938414 - DNA, 25 bp, Homo sapien
cccgcttggagcagcagaggctggg

SEQ ID NO: 5938415 - DNA, 25 bp, Homo sapien
cctccctgctagctggttggctagc

SEQ ID NO: 5938416 - DNA, 25 bp, Homo sapien
caagtgcaactgcccagaccttgac

SEQ ID NO: 5938417 - DNA, 25 bp, Homo sapien
tgagtaccctgtcaatagtacaatt

SEQ ID NO: 5938418 - DNA, 25 bp, Homo sapien
ctgccagctgcccccgtccccaggg

SEQ ID NO: 5938419 - DNA, 25 bp, Homo sapien
gtcctagaatagtccccaggtcact

SEQ ID NO: 5938420 - DNA, 25 bp, Homo sapien
ccttttttcatatcatgaagccagc

SEQ ID NO: 5938421 - DNA, 25 bp, Homo sapien
taggtaagcatctgcctgaagtgtg

SEQ ID NO: 5938422 - DNA, 25 bp, Homo sapien
catctgcctgaagtgtgtacctacc

SEQ ID NO: 5938423 - DNA, 25 bp, Homo sapien
tggaagatccctgatacacttcaca

SEQ ID NO: 5938424 - DNA, 25 bp, Homo sapien
ccagcagcgtgtggacagacatgat

SEQ ID NO: 5938425 - DNA, 25 bp, Homo sapien
tcttgtatgttctgggagtttgctc

SEQ ID NO: 5938426 - DNA, 25 bp, Homo sapien
agagtggcagagaaggcaagccagg

SEQ ID NO: 5938427 - DNA, 25 bp, Homo sapien
ggaagcagggtcaagtccttaaact

SEQ ID NO: 5938428 - DNA, 25 bp, Homo sapien
agatgctgacgggattaccacctca

SEQ ID NO: 5938429 - DNA, 25 bp, Homo sapien
ttcatatcatgaagccagcaagagt

SEQ ID NO: 5938430 - DNA, 25 bp, Homo sapien
cctcgggccactgtcaccagcagcg

SEQ ID NO: 5938431 - DNA, 25 bp, Homo sapien
tctccccgcttggagcagcagaggc

SEQ ID NO: 5938432 - DNA, 25 bp, Homo sapien
agcatctgcctgaagtgtgtaccta

SEQ ID NO: 5938433 - DNA, 25 bp, Homo sapien
ctgatacacttcacactctgggggt

SEQ ID NO: 5938434 - DNA, 25 bp, Homo sapien
gagataacccacatttagacaccgg

SEQ ID NO: 5938435 - DNA, 25 bp, Homo sapien
accactaggagccctggctctgcgc

SEQ ID NO: 5938436 - DNA, 25 bp, Homo sapien
ctgtcctgaggacacagaagagacc

SEQ ID NO: 5938437 - DNA, 25 bp, Homo sapien
catctccccgcttggagcagcagag

SEQ ID NO: 5938438 - DNA, 25 bp, Homo sapien
tcccgaggaagcagggtcaagtcct

SEQ ID NO: 5938439 - DNA, 25 bp, Homo sapien
ggcatctccccgcttggagcagcag

SEQ ID NO: 5938440 - DNA, 25 bp, Homo sapien
ggttcaggaaccgagcctcttcttc

SEQ ID NO: 5938441 - DNA, 25 bp, Homo sapien
ttggacacatagactctgagtaccc

SEQ ID NO: 5938442 - DNA, 25 bp, Homo sapien
agctggttggctagctggcatctcc

SEQ ID NO: 5938443 - DNA, 25 bp, Homo sapien
tacacttcacactctgggggttcag

SEQ ID NO: 5938444 - DNA, 25 bp, Homo sapien
tcaactgccagctgcccccgtcccc

SEQ ID NO: 5938445 - DNA, 25 bp, Homo sapien
agtgcaactgcccagaccttgactt

SEQ ID NO: 5938446 - DNA, 25 bp, Homo sapien
aaacccccttacagctgtcctgagg

SEQ ID NO: 5938447 - DNA, 25 bp, Homo sapien
ctggttggctagctggcatctcccc

SEQ ID NO: 5938448 - DNA, 25 bp, Homo sapien
ccacatttagacaccggaagtgcta

SEQ ID NO: 5938449 - DNA, 25 bp, Homo sapien
tttcagccccaccagtcctagaata

SEQ ID NO: 5938450 - DNA, 25 bp, Homo sapien
ggaaccgagcctcttcttcaagtct

SEQ ID NO: 5938451 - DNA, 25 bp, Homo sapien
attgcaagtgcctggggactaggga

SEQ ID NO: 5938452 - DNA, 25 bp, Homo sapien
gagtggggggaagtcagcctttctg

SEQ ID NO: 5938453 - DNA, 25 bp, Homo sapien
tctttcccctttgaaaagcaagttg

SEQ ID NO: 5938454 - DNA, 25 bp, Homo sapien
aactgccagctgcccccgtccccag

SEQ ID NO: 5938455 - DNA, 25 bp, Homo sapien
acactctgggggttcaggaaccgag

SEQ ID NO: 5938456 - DNA, 25 bp, Homo sapien
gtcagctgagctcttggaagatccc

SEQ ID NO: 5938457 - DNA, 25 bp, Homo sapien
tgagatgggcaatgagaggaagatg

SEQ ID NO: 5938458 - DNA, 25 bp, Homo sapien
gaatagtccccaggtcactctcagc

SEQ ID NO: 5938459 - DNA, 25 bp, Homo sapien
tgcaggacaagagacttgagatggg

SEQ ID NO: 5938460 - DNA, 25 bp, Homo sapien
cactgtcaccagcagcgtgtggaca

SEQ ID NO: 5938461 - DNA, 25 bp, Homo sapien
aaagatagaatcacctaggtttaca

SEQ ID NO: 5938462 - DNA, 25 bp, Homo sapien
taggaaacccccttacagctgtcct

SEQ ID NO: 5938463 - DNA, 25 bp, Homo sapien
gttacctcgggccactgtcaccagc

SEQ ID NO: 5938464 - DNA, 25 bp, Homo sapien
ttcaggaaccgagcctcttcttcaa

SEQ ID NO: 5938465 - DNA, 25 bp, Homo sapien
ccgtccccagggagcaccccacaga

SEQ ID NO: 5938466 - DNA, 25 bp, Homo sapien
gtgtcctaggaaacccccttacagc

SEQ ID NO: 5938467 - DNA, 25 bp, Homo sapien
tccccaggtcactctcagctgaccc

SEQ ID NO: 5938468 - DNA, 25 bp, Homo sapien
gtcctgaggacacagaagagaccac

SEQ ID NO: 5938469 - DNA, 25 bp, Homo sapien
aggctggggagtactgctcacaatg

SEQ ID NO: 5938470 - DNA, 25 bp, Homo sapien
gatggacagtgaggacagacgtccc

SEQ ID NO: 5938471 - DNA, 25 bp, Homo sapien
acatttagacaccggaagtgctatt

SEQ ID NO: 5938472 - DNA, 25 bp, Homo sapien
ccttacagctgtcctgaggacacag

SEQ ID NO: 5938473 - DNA, 25 bp, Homo sapien
agccaggttacctcgggccactgtc

SEQ ID NO: 5938474 - DNA, 25 bp, Homo sapien
agagaccacgagacccttttttcat

SEQ ID NO: 5938475 - DNA, 25 bp, Homo sapien
ggggggaagtcagcctttctgggga

SEQ ID NO: 5938476 - DNA, 25 bp, Homo sapien
cagtgaggacagacgtcccatgcag

SEQ ID NO: 5938477 - DNA, 25 bp, Homo sapien
ggacagacgtcccatgcaggacaag

SEQ ID NO: 5938478 - DNA, 25 bp, Homo sapien
aggaagatgctgacgggattaccac

SEQ ID NO: 5938479 - DNA, 25 bp, Homo sapien
gaccttgggggctttccttgttctc

SEQ ID NO: 5938480 - DNA, 25 bp, Homo sapien
cctttcagccccaccagtcctagaa

SEQ ID NO: 5938481 - DNA, 25 bp, Homo sapien
tgagctcttggaagatccctgatac

SEQ ID NO: 5938482 - DNA, 25 bp, Homo sapien
caagttggacacatagactctgagt

SEQ ID NO: 5938483 - DNA, 25 bp, Homo sapien
tttccttgttctctctggggaccag

SEQ ID NO: 5938484 - DNA, 25 bp, Homo sapien
agcaagttggacacatagactctga

SEQ ID NO: 5938485 - DNA, 25 bp, Homo sapien
tctgcagggccattgtccacgcctg

SEQ ID NO: 5938486 - DNA, 25 bp, Homo sapien
acattgcaagtgcctggggactagg

SEQ ID NO: 5938487 - DNA, 25 bp, Homo sapien
tgagaggaagatgctgacgggatta

SEQ ID NO: 5938488 - DNA, 25 bp, Homo sapien
ttgggggctttccttgttctctctg

SEQ ID NO: 5938489 - DNA, 25 bp, Homo sapien
atccctgatacacttcacactctgg

SEQ ID NO: 5938490 - DNA, 25 bp, Homo sapien
gcctcttcttcaagtctccaagtgc

SEQ ID NO: 5938491 - DNA, 25 bp, Homo sapien
caccagcagcgtgtggacagacatg

SEQ ID NO: 5938492 - DNA, 25 bp, Homo sapien
gaaaagcaagttggacacatagact

SEQ ID NO: 5938493 - DNA, 25 bp, Homo sapien
agctggcatctccccgcttggagca

SEQ ID NO: 5938494 - DNA, 25 bp, Homo sapien
actgctcacaatggtaccaaagata

SEQ ID NO: 5938495 - DNA, 25 bp, Homo sapien
tccttgttctctctggggaccagtt

SEQ ID NO: 5938496 - DNA, 25 bp, Homo sapien
cattgtccacgcctgtgataggtaa

SEQ ID NO: 5938497 - DNA, 25 bp, Homo sapien
tcgggccactgtcaccagcagcgtg

SEQ ID NO: 5938498 - DNA, 25 bp, Homo sapien
ctaccactaggagccctggctctgc

SEQ ID NO: 5938499 - DNA, 25 bp, Homo sapien
ctgacccacccaccagagtctgcag

SEQ ID NO: 5938500 - DNA, 25 bp, Homo sapien
gacttgagatgggcaatgagaggaa

SEQ ID NO: 5938501 - DNA, 25 bp, Homo sapien
attcttgtatgttctgggagtttgc

SEQ ID NO: 5938502 - DNA, 25 bp, Homo sapien
gcctttctggggaccctccctgcta

SEQ ID NO: 5938503 - DNA, 25 bp, Homo sapien
tctgagtaccctgtcaatagtacaa

SEQ ID NO: 5938504 - DNA, 25 bp, Homo sapien
tgacgggattaccacctcaactgcc

SEQ ID NO: 5938505 - DNA, 25 bp, Homo sapien
cggaagtgctattttatatgctgtt

SEQ ID NO: 5938506 - DNA, 25 bp, Homo sapien
ctgttaagttttcctatctgtactt

SEQ ID NO: 5938507 - DNA, 25 bp, Homo sapien
tgaagtgtgtacctaccactaggag

SEQ ID NO: 5938508 - DNA, 25 bp, Homo sapien
atgatggacagtgaggacagacgtc

SEQ ID NO: 5938509 - DNA, 25 bp, Homo sapien
agctgtcctgaggacacagaagaga

SEQ ID NO: 5938510 - DNA, 25 bp, Homo sapien
caggacaagagacttgagatgggca

SEQ ID NO: 5938511 - DNA, 25 bp, Homo sapien
tgggggttcaggaaccgagcctctt

SEQ ID NO: 5938512 - DNA, 25 bp, Homo sapien
agtaccctgtcaatagtacaattct

SEQ ID NO: 5938513 - DNA, 25 bp, Homo sapien
atgaacattgcaagtgcctggggac

SEQ ID NO: 5938514 - DNA, 25 bp, Homo sapien
tctgggggttcaggaaccgagcctc

SEQ ID NO: 5938515 - DNA, 25 bp, Homo sapien
tttgctcttgtcccgaggaagcagg

SEQ ID NO: 5938516 - DNA, 25 bp, Homo sapien
aaccctgaaccaatgaacattgcaa

SEQ ID NO: 5938517 - DNA, 25 bp, Homo sapien
gaagtgctattttatatgctgttaa

SEQ ID NO: 5938518 - DNA, 25 bp, Homo sapien
gaaccaatgaacattgcaagtgcct

SEQ ID NO: 5938519 - DNA, 25 bp, Homo sapien
ccagagtctgcagggccattgtcca

SEQ ID NO: 5938520 - DNA, 25 bp, Homo sapien
acgcctgtgataggtaagcatctgc

SEQ ID NO: 5938521 - DNA, 25 bp, Homo sapien
tccccgcttggagcagcagaggctg

SEQ ID NO: 5938522 - DNA, 25 bp, Homo sapien
agtccccaggtcactctcagctgac

SEQ ID NO: 5938523 - DNA, 25 bp, Homo sapien
tgctattttatatgctgttaagttt

SEQ ID NO: 5938524 - DNA, 25 bp, Homo sapien
agtctccaagtgcaactgcccagac

SEQ ID NO: 5938525 - DNA, 25 bp, Homo sapien
agactctgagtaccctgtcaatagt

SEQ ID NO: 5938526 - DNA, 25 bp, Homo sapien
gagcctcttcttcaagtctccaagt

SEQ ID NO: 5938527 - DNA, 25 bp, Homo sapien
ggttggctagctggcatctccccgc

SEQ ID NO: 5938528 - DNA, 25 bp, Homo sapien
cttgttctctctggggaccagtttt

SEQ ID NO: 5938529 - DNA, 25 bp, Homo sapien
gaagcacccactcctttcagcccca

SEQ ID NO: 5938530 - DNA, 25 bp, Homo sapien
gggagtggggggaagtcagcctttc

SEQ ID NO: 5938531 - DNA, 25 bp, Homo sapien
ttggctagctggcatctccccgctt

SEQ ID NO: 5938532 - DNA, 25 bp, Homo sapien
tgatctttctaggggtcagctgagc

SEQ ID NO: 5938533 - DNA, 25 bp, Homo sapien
gtccccagggagcaccccacagaaa

SEQ ID NO: 5938534 - DNA, 25 bp, Homo sapien
gacagtgaggacagacgtcccatgc

SEQ ID NO: 5938535 - DNA, 25 bp, Homo sapien
tgtcccgaggaagcagggtcaagtc

SEQ ID NO: 5938536 - DNA, 25 bp, Homo sapien
cttggaagatccctgatacacttca

SEQ ID NO: 5938537 - DNA, 25 bp, Homo sapien
ctagctggcatctccccgcttggag

SEQ ID NO: 5938538 - DNA, 25 bp, Homo sapien
gtcccatgcaggacaagagacttga

SEQ ID NO: 5938539 - DNA, 25 bp, Homo sapien
agcacccactcctttcagccccacc

SEQ ID NO: 5938540 - DNA, 25 bp, Homo sapien
gggattaccacctcaactgccagct

SEQ ID NO: 5938541 - DNA, 25 bp, Homo sapien
agaaacagttctaaccctgaaccaa

SEQ ID NO: 5938542 - DNA, 25 bp, Homo sapien
cagctgagctcttggaagatccctg

SEQ ID NO: 5938543 - DNA, 25 bp, Homo sapien
gtcaccagcagcgtgtggacagaca

SEQ ID NO: 5938544 - DNA, 25 bp, Homo sapien
ttctggggaccctccctgctagctg

SEQ ID NO: 5938545 - DNA, 25 bp, Homo sapien
acccttttttcatatcatgaagcca

SEQ ID NO: 5938546 - DNA, 25 bp, Homo sapien
ccctgatacacttcacactctgggg

SEQ ID NO: 5938547 - DNA, 25 bp, Homo sapien
actctcagctgacccacccaccaga

SEQ ID NO: 5938548 - DNA, 25 bp, Homo sapien
agaggctggggagtactgctcacaa

SEQ ID NO: 5938549 - DNA, 25 bp, Homo sapien
ccagggagcaccccacagaaacagt

SEQ ID NO: 5938550 - DNA, 25 bp, Homo sapien
tcatgaagccagcaagagtggcaga

SEQ ID NO: 5938551 - DNA, 25 bp, Homo sapien
ctggacctgctatgagaccttgggg

SEQ ID NO: 5938552 - DNA, 25 bp, Homo sapien
cacagaagagaccacgagacccttt

SEQ ID NO: 5938553 - DNA, 25 bp, Homo sapien
caagagtggcagagaaggcaagcca

SEQ ID NO: 5938554 - DNA, 25 bp, Homo sapien
cccaccagagtctgcagggccattg

SEQ ID NO: 5938555 - DNA, 25 bp, Homo sapien
ggacacatagactctgagtaccctg

SEQ ID NO: 5938556 - DNA, 25 bp, Homo sapien
gggccactgtcaccagcagcgtgtg

SEQ ID NO: 5938557 - DNA, 25 bp, Homo sapien
ctgaaccaatgaacattgcaagtgc

SEQ ID NO: 5938558 - DNA, 25 bp, Homo sapien
acagttctaaccctgaaccaatgaa

SEQ ID NO: 5938559 - DNA, 25 bp, Homo sapien
gaagccagcaagagtggcagagaag

SEQ ID NO: 5938560 - DNA, 25 bp, Homo sapien
ggtaccaaagatagaatcacctagg

SEQ ID NO: 5938561 - DNA, 25 bp, Homo sapien
ctaaccctgaaccaatgaacattgc

SEQ ID NO: 5938562 - DNA, 25 bp, Homo sapien
gtgagtgtcctaggaaaccccctta

SEQ ID NO: 5938563 - DNA, 25 bp, Homo sapien
accacgagacccttttttcatatca

SEQ ID NO: 5938564 - DNA, 25 bp, Homo sapien
ggaccctccctgctagctggttggc

SEQ ID NO: 5938565 - DNA, 25 bp, Homo sapien
agaccacgagacccttttttcatat

SEQ ID NO: 5938566 - DNA, 25 bp, Homo sapien
ccccacagaaacagttctaaccctg

SEQ ID NO: 5938567 - DNA, 25 bp, Homo sapien
ctcttcttcaagtctccaagtgcaa

SEQ ID NO: 5938568 - DNA, 25 bp, Homo sapien
gtatgttctgggagtttgctcttgt

SEQ ID NO: 5938569 - DNA, 25 bp, Homo sapien
acctgctatgagaccttgggggctt

SEQ ID NO: 5938570 - DNA, 25 bp, Homo sapien
tcttcaagtctccaagtgcaactgc

SEQ ID NO: 5938571 - DNA, 25 bp, Homo sapien
ggggttcaggaaccgagcctcttct

SEQ ID NO: 5938572 - DNA, 25 bp, Homo sapien
ccctttgaaaagcaagttggacaca

SEQ ID NO: 5938573 - DNA, 25 bp, Homo sapien
gacccacccaccagagtctgcaggg

SEQ ID NO: 5938574 - DNA, 25 bp, Homo sapien
ggggaagtcagcctttctggggacc

SEQ ID NO: 5938575 - DNA, 25 bp, Homo sapien
gtccttaaactgatctttctagggg

SEQ ID NO: 5938576 - DNA, 25 bp, Homo sapien
agcaccccacagaaacagttctaac

SEQ ID NO: 5938577 - DNA, 25 bp, Homo sapien
tgttctctctggggaccagttttct

SEQ ID NO: 5938578 - DNA, 25 bp, Homo sapien
cagggccattgtccacgcctgtgat

SEQ ID NO: 5938579 - DNA, 25 bp, Homo sapien
ctctctggggaccagttttctttcc

SEQ ID NO: 5938580 - DNA, 25 bp, Homo sapien
tcgagataacccacatttagacacc

SEQ ID NO: 5938581 - DNA, 25 bp, Homo sapien
aggagccctggctctgcgctggacc

SEQ ID NO: 5938582 - DNA, 25 bp, Homo sapien
gctggggagtactgctcacaatggt

SEQ ID NO: 5938583 - DNA, 25 bp, Homo sapien
aagtcagcctttctggggaccctcc

SEQ ID NO: 5938584 - DNA, 25 bp, Homo sapien
agaaggcaagccaggttacctcggg

SEQ ID NO: 5938585 - DNA, 25 bp, Homo sapien
taacccacatttagacaccggaagt

SEQ ID NO: 5938586 - DNA, 25 bp, Homo sapien
tggggagtactgctcacaatggtac

SEQ ID NO: 5938587 - DNA, 25 bp, Homo sapien
aagcagggtcaagtccttaaactga

SEQ ID NO: 5938588 - DNA, 25 bp, Homo sapien
ctagctggttggctagctggcatct

SEQ ID NO: 5938589 - DNA, 25 bp, Homo sapien
tgcaagtgcctggggactagggagt

SEQ ID NO: 5938590 - DNA, 25 bp, Homo sapien
tacaattcttgtatgttctgggagt

SEQ ID NO: 5938591 - DNA, 25 bp, Homo sapien
ccttgggggctttccttgttctctc

SEQ ID NO: 5938592 - DNA, 25 bp, Homo sapien
tccctgctagctggttggctagctg

SEQ ID NO: 5938593 - DNA, 25 bp, Homo sapien
ttgaaaagcaagttggacacataga

SEQ ID NO: 5938594 - DNA, 25 bp, Homo sapien
ccaggttacctcgggccactgtcac

SEQ ID NO: 5938595 - DNA, 25 bp, Homo sapien
ctggggaccctccctgctagctggt

SEQ ID NO: 5938596 - DNA, 25 bp, Homo sapien
cccatgcaggacaagagacttgaga

SEQ ID NO: 5938597 - DNA, 25 bp, Homo sapien
cttcacactctgggggttcaggaac

SEQ ID NO: 5938598 - DNA, 25 bp, Homo sapien
gagtgacagtgagtgtcctaggaaa

SEQ ID NO: 5938599 - DNA, 25 bp, Homo sapien
gctatgagaccttgggggctttcct

SEQ ID NO: 5938600 - DNA, 25 bp, Homo sapien
ttagacaccggaagtgctattttat

SEQ ID NO: 5938601 - DNA, 25 bp, Homo sapien
ctgtcaccagcagcgtgtggacaga

SEQ ID NO: 5938602 - DNA, 25 bp, Homo sapien
agcaagagtggcagagaaggcaagc

SEQ ID NO: 5938603 - DNA, 25 bp, Homo sapien
tttacaagtacttgtaggactcgag

SEQ ID NO: 5938604 - DNA, 25 bp, Homo sapien
caactgcccagaccttgacttggag

SEQ ID NO: 5938605 - DNA, 25 bp, Homo sapien
agaggaagatgctgacgggattacc

SEQ ID NO: 5938606 - DNA, 25 bp, Homo sapien
cacgagacccttttttcatatcatg

SEQ ID NO: 5938607 - DNA, 25 bp, Homo sapien
ctgtgataggtaagcatctgcctga

SEQ ID NO: 5938608 - DNA, 25 bp, Homo sapien
tccaagtgcaactgcccagaccttg

SEQ ID NO: 5938609 - DNA, 25 bp, Homo sapien
agttggacacatagactctgagtac

SEQ ID NO: 5938610 - DNA, 25 bp, Homo sapien
cttgagatgggcaatgagaggaaga

SEQ ID NO: 5938611 - DNA, 25 bp, Homo sapien
cagctgcccccgtccccagggagca

SEQ ID NO: 5938612 - DNA, 25 bp, Homo sapien
agagaaggcaagccaggttacctcg

SEQ ID NO: 5938613 - DNA, 25 bp, Homo sapien
cacaatggtaccaaagatagaatca

SEQ ID NO: 5938614 - DNA, 25 bp, Homo sapien
cactcctttcagccccaccagtcct

SEQ ID NO: 5938615 - DNA, 25 bp, Homo sapien
cctgaagtgtgtacctaccactagg

SEQ ID NO: 5938616 - DNA, 25 bp, Homo sapien
gcaatgagaggaagatgctgacggg

SEQ ID NO: 5938617 - DNA, 25 bp, Homo sapien
caccagagtctgcagggccattgtc

SEQ ID NO: 5938618 - DNA, 25 bp, Homo sapien
tctgggagtttgctcttgtcccgag

SEQ ID NO: 5938619 - DNA, 25 bp, Homo sapien
ttacagctgtcctgaggacacagaa

SEQ ID NO: 5938620 - DNA, 25 bp, Homo sapien
actgcccagaccttgacttggagtg

SEQ ID NO: 5938621 - DNA, 25 bp, Homo sapien
attttatatgctgttaagttttcct

SEQ ID NO: 5938622 - DNA, 25 bp, Homo sapien
agttctaaccctgaaccaatgaaca

SEQ ID NO: 5938623 - DNA, 25 bp, Homo sapien
aatgagaggaagatgctgacgggat

SEQ ID NO: 5938624 - DNA, 25 bp, Homo sapien
ggacctgctatgagaccttgggggc

SEQ ID NO: 5938625 - DNA, 25 bp, Homo sapien
tatgctgttaagttttcctatctgt

SEQ ID NO: 5938626 - DNA, 25 bp, Homo sapien
gacttggagtgacagtgagtgtcct

SEQ ID NO: 5938627 - DNA, 25 bp, Homo sapien
taggtttacaagtacttgtaggact

SEQ ID NO: 5938628 - DNA, 25 bp, Homo sapien
cagaagagaccacgagacccttttt

SEQ ID NO: 5938629 - DNA, 25 bp, Homo sapien
gagtgtcctaggaaacccccttaca

SEQ ID NO: 5938630 - DNA, 25 bp, Homo sapien
agatgggcaatgagaggaagatgct

SEQ ID NO: 5938631 - DNA, 25 bp, Homo sapien
tgctgttaagttttcctatctgtac

SEQ ID NO: 5938632 - DNA, 25 bp, Homo sapien
gaagagaccacgagacccttttttc

SEQ ID NO: 5938633 - DNA, 25 bp, Homo sapien
ggagcaccccacagaaacagttcta

SEQ ID NO: 5938634 - DNA, 25 bp, Homo sapien
ggtaagcatctgcctgaagtgtgta

SEQ ID NO: 5938635 - DNA, 25 bp, Homo sapien
gaccttgacttggagtgacagtgag

SEQ ID NO: 5938636 - DNA, 25 bp, Homo sapien
agccagcaagagtggcagagaaggc

SEQ ID NO: 5938637 - DNA, 25 bp, Homo sapien
tgcgctggacctgctatgagacctt

SEQ ID NO: 5938638 - DNA, 25 bp, Homo sapien
agggagcaccccacagaaacagttc

SEQ ID NO: 5938639 - DNA, 25 bp, Homo sapien
accctccctgctagctggttggcta

SEQ ID NO: 5938640 - DNA, 25 bp, Homo sapien
gtacctaccactaggagccctggct

SEQ ID NO: 5938641 - DNA, 25 bp, Homo sapien
ccgaggaagcagggtcaagtcctta

SEQ ID NO: 5938642 - DNA, 25 bp, Homo sapien
ggcaagccaggttacctcgggccac

SEQ ID NO: 5938643 - DNA, 25 bp, Homo sapien
ttttttcatatcatgaagccagcaa

SEQ ID NO: 5938644 - DNA, 25 bp, Homo sapien
atggtaccaaagatagaatcaccta

SEQ ID NO: 5938645 - DNA, 25 bp, Homo sapien
gcagggtcaagtccttaaactgatc

SEQ ID NO: 5938646 - DNA, 25 bp, Homo sapien
accaatgaacattgcaagtgcctgg

SEQ ID NO: 5938647 - DNA, 25 bp, Homo sapien
aaacagttctaaccctgaaccaatg

SEQ ID NO: 5938648 - DNA, 25 bp, Homo sapien
agcagcgtgtggacagacatgatgg

SEQ ID NO: 5938649 - DNA, 25 bp, Homo sapien
agaatcacctaggtttacaagtact

SEQ ID NO: 5938650 - DNA, 25 bp, Homo sapien
actctgagtaccctgtcaatagtac

SEQ ID NO: 5938651 - DNA, 25 bp, Homo sapien
aagagacttgagatgggcaatgaga

SEQ ID NO: 5938652 - DNA, 25 bp, Homo sapien
tgagaccttgggggctttccttgtt

SEQ ID NO: 5938653 - DNA, 25 bp, Homo sapien
ccttgacttggagtgacagtgagtg

SEQ ID NO: 5938654 - DNA, 25 bp, Homo sapien
aaggcaagccaggttacctcgggcc

SEQ ID NO: 5938655 - DNA, 25 bp, Homo sapien
aagtgtgtacctaccactaggagcc

SEQ ID NO: 5938656 - DNA, 25 bp, Homo sapien
ctggcatctccccgcttggagcagc

SEQ ID NO: 5938657 - DNA, 25 bp, Homo sapien
atgctgacgggattaccacctcaac

SEQ ID NO: 5938658 - DNA, 25 bp, Homo sapien
ccttaaactgatctttctaggggtc

SEQ ID NO: 5938659 - DNA, 25 bp, Homo sapien
tctgcctgaagtgtgtacctaccac

SEQ ID NO: 5938660 - DNA, 25 bp, Homo sapien
acgtcccatgcaggacaagagactt

SEQ ID NO: 5938661 - DNA, 25 bp, Homo sapien
tgctcttgtcccgaggaagcagggt

SEQ ID NO: 5938662 - DNA, 25 bp, Homo sapien
ttttcatatcatgaagccagcaaga

SEQ ID NO: 5938663 - DNA, 25 bp, Homo sapien
ccacagaaacagttctaaccctgaa

SEQ ID NO: 5938664 - DNA, 25 bp, Homo sapien
ttgtatgttctgggagtttgctctt

SEQ ID NO: 5938665 - DNA, 25 bp, Homo sapien
tctccaagtgcaactgcccagacct

SEQ ID NO: 5938666 - DNA, 25 bp, Homo sapien
cctcaactgccagctgcccccgtcc

SEQ ID NO: 5938667 - DNA, 25 bp, Homo sapien
aggggtcagctgagctcttggaaga

SEQ ID NO: 5938668 - DNA, 25 bp, Homo sapien
agacaccggaagtgctattttatat

SEQ ID NO: 5938669 - DNA, 25 bp, Homo sapien
gccctggctctgcgctggacctgct

SEQ ID NO: 5938670 - DNA, 25 bp, Homo sapien
ctaggggtcagctgagctcttggaa

SEQ ID NO: 5938671 - DNA, 25 bp, Homo sapien
agtacaattcttgtatgttctggga

SEQ ID NO: 5938672 - DNA, 25 bp, Homo sapien
gccagctgcccccgtccccagggag

SEQ ID NO: 5938673 - DNA, 25 bp, Homo sapien
actctgggggttcaggaaccgagcc

SEQ ID NO: 5938674 - DNA, 25 bp, Homo sapien
ctcctttcagccccaccagtcctag

SEQ ID NO: 5938675 - DNA, 25 bp, Homo sapien
cctgaggacacagaagagaccacga

SEQ ID NO: 5938676 - DNA, 25 bp, Homo sapien
gccattgtccacgcctgtgataggt

SEQ ID NO: 5938677 - DNA, 25 bp, Homo sapien
ccacgcctgtgataggtaagcatct

SEQ ID NO: 5938678 - DNA, 25 bp, Homo sapien
ggactcgagataacccacatttaga

SEQ ID NO: 5938679 - DNA, 25 bp, Homo sapien
cccagaccttgacttggagtgacag

SEQ ID NO: 5938680 - DNA, 25 bp, Homo sapien
ctttctaggggtcagctgagctctt

SEQ ID NO: 5938681 - DNA, 25 bp, Homo sapien
tgggagtttgctcttgtcccgagga

SEQ ID NO: 5938682 - DNA, 25 bp, Homo sapien
tcactctcagctgacccacccacca

SEQ ID NO: 5938683 - DNA, 25 bp, Homo sapien
agtttgctcttgtcccgaggaagca

SEQ ID NO: 5938684 - DNA, 25 bp, Homo sapien
tttatatgctgttaagttttcctat

SEQ ID NO: 5938685 - DNA, 25 bp, Homo sapien
gtcagcctttctggggaccctccct

SEQ ID NO: 5938686 - DNA, 25 bp, Homo sapien
gctctgcgctggacctgctatgaga

SEQ ID NO: 5938687 - DNA, 25 bp, Homo sapien
gggagtactgctcacaatggtacca

SEQ ID NO: 5938688 - DNA, 25 bp, Homo sapien
tgcaactgcccagaccttgacttgg

SEQ ID NO: 5938689 - DNA, 25 bp, Homo sapien
tgcccccgtccccagggagcacccc

SEQ ID NO: 5938690 - DNA, 25 bp, Homo sapien
tatcatgaagccagcaagagtggca

SEQ ID NO: 5938691 - DNA, 25 bp, Homo sapien
atagaatcacctaggtttacaagta

SEQ ID NO: 5938692 - DNA, 25 bp, Homo sapien
ttaaactgatctttctaggggtcag

SEQ ID NO: 5938693 - DNA, 25 bp, Homo sapien
acccacatttagacaccggaagtgc

SEQ ID NO: 5938694 - DNA, 25 bp, Homo sapien
gcctgtgataggtaagcatctgcct

SEQ ID NO: 5938695 - DNA, 25 bp, Homo sapien
ctttgaaaagcaagttggacacata

SEQ ID NO: 5938696 - DNA, 25 bp, Homo sapien
gacacagaagagaccacgagaccct

SEQ ID NO: 5938697 - DNA, 25 bp, Homo sapien
agtgctattttatatgctgttaagt

SEQ ID NO: 5938698 - DNA, 25 bp, Homo sapien
tagaatagtccccaggtcactctca

SEQ ID NO: 5938699 - DNA, 25 bp, Homo sapien
caagtctccaagtgcaactgcccag

SEQ ID NO: 5938700 - DNA, 25 bp, Homo sapien
ggtttacaagtacttgtaggactcg

SEQ ID NO: 5938701 - DNA, 25 bp, Homo sapien
gataacccacatttagacaccggaa

SEQ ID NO: 5938702 - DNA, 25 bp, Homo sapien
cctggctctgcgctggacctgctat

SEQ ID NO: 5938703 - DNA, 25 bp, Homo sapien
cctgctagctggttggctagctggc

SEQ ID NO: 5938704 - DNA, 25 bp, Homo sapien
tgaggacacagaagagaccacgaga

SEQ ID NO: 5938705 - DNA, 25 bp, Homo sapien
tcaagtccttaaactgatctttcta

SEQ ID NO: 5938706 - DNA, 25 bp, Homo sapien
gtgacagtgagtgtcctaggaaacc

SEQ ID NO: 5938707 - DNA, 25 bp, Homo sapien
tcacactctgggggttcaggaaccg

SEQ ID NO: 5938708 - DNA, 25 bp, Homo sapien
acctatcacaggcgtggacaatggc

SEQ ID NO: 5938709 - DNA, 25 bp, Homo sapien
atgcttacctatcacaggcgtggac

SEQ ID NO: 5938710 - DNA, 25 bp, Homo sapien
gacaatggccctgcagactctggtg

SEQ ID NO: 5938711 - DNA, 25 bp, Homo sapien
tgtctgtccacacgctgctggtgac

SEQ ID NO: 5938712 - DNA, 25 bp, Homo sapien
gacactcactgtcactccaagtcaa

SEQ ID NO: 5938713 - DNA, 25 bp, Homo sapien
acccccagagtgtgaagtgtatcag

SEQ ID NO: 5938714 - DNA, 25 bp, Homo sapien
tgagagtgacctggggactattcta

SEQ ID NO: 5938715 - DNA, 25 bp, Homo sapien
cagctgtaagggggtttcctaggac

SEQ ID NO: 5938716 - DNA, 25 bp, Homo sapien
tcctaggacactcactgtcactcca

SEQ ID NO: 5938717 - DNA, 25 bp, Homo sapien
gtaacctggcttgccttctctgcca

SEQ ID NO: 5938718 - DNA, 25 bp, Homo sapien
tggcttcatgatatgaaaaaagggt

SEQ ID NO: 5938719 - DNA, 25 bp, Homo sapien
ccaaggtctcatagcaggtccagcg

SEQ ID NO: 5938720 - DNA, 25 bp, Homo sapien
cactcactgtcactccaagtcaagg

SEQ ID NO: 5938721 - DNA, 25 bp, Homo sapien
tccagcgcagagccagggctcctag

SEQ ID NO: 5938722 - DNA, 25 bp, Homo sapien
ttgtgagcagtactccccagcctct

SEQ ID NO: 5938723 - DNA, 25 bp, Homo sapien
tttcctaggacactcactgtcactc

SEQ ID NO: 5938724 - DNA, 25 bp, Homo sapien
tcatagcaggtccagcgcagagcca

SEQ ID NO: 5938725 - DNA, 25 bp, Homo sapien
cactgtcactccaagtcaaggtctg

SEQ ID NO: 5938726 - DNA, 25 bp, Homo sapien
gtgtatcagggatcttccaagagct

SEQ ID NO: 5938727 - DNA, 25 bp, Homo sapien
gggacgtctgtcctcactgtccatc

SEQ ID NO: 5938728 - DNA, 25 bp, Homo sapien
tattgacagggtactcagagtctat

SEQ ID NO: 5938729 - DNA, 25 bp, Homo sapien
tcattgcccatctcaagtctcttgt

SEQ ID NO: 5938730 - DNA, 25 bp, Homo sapien
cttcctcgggacaagagcaaactcc

SEQ ID NO: 5938731 - DNA, 25 bp, Homo sapien
cggttcctgaacccccagagtgtga

SEQ ID NO: 5938732 - DNA, 25 bp, Homo sapien
ggctcctagtggtaggtacacactt

SEQ ID NO: 5938733 - DNA, 25 bp, Homo sapien
actcccagaacatacaagaattgta

SEQ ID NO: 5938734 - DNA, 25 bp, Homo sapien
tgaccctgcttcctcgggacaagag

SEQ ID NO: 5938735 - DNA, 25 bp, Homo sapien
agaagaggctcggttcctgaacccc

SEQ ID NO: 5938736 - DNA, 25 bp, Homo sapien
ctggtggggctgaaaggagtgggtg

SEQ ID NO: 5938737 - DNA, 25 bp, Homo sapien
agagtctatgtgtccaacttgcttt

SEQ ID NO: 5938738 - DNA, 25 bp, Homo sapien
caggtccagcgcagagccagggctc

SEQ ID NO: 5938739 - DNA, 25 bp, Homo sapien
ggctcggttcctgaacccccagagt

SEQ ID NO: 5938740 - DNA, 25 bp, Homo sapien
gggtcagctgagagtgacctgggga

SEQ ID NO: 5938741 - DNA, 25 bp, Homo sapien
ttctgtgtcctcaggacagctgtaa

SEQ ID NO: 5938742 - DNA, 25 bp, Homo sapien
cccatctcaagtctcttgtcctgca

SEQ ID NO: 5938743 - DNA, 25 bp, Homo sapien
aggacttgaccctgcttcctcggga

SEQ ID NO: 5938744 - DNA, 25 bp, Homo sapien
tgttcattggttcagggttagaact

SEQ ID NO: 5938745 - DNA, 25 bp, Homo sapien
tctttggtaccattgtgagcagtac

SEQ ID NO: 5938746 - DNA, 25 bp, Homo sapien
atgccagctagccaaccagctagca

SEQ ID NO: 5938747 - DNA, 25 bp, Homo sapien
agtgacctggggactattctaggac

SEQ ID NO: 5938748 - DNA, 25 bp, Homo sapien
tcttctgtgtcctcaggacagctgt

SEQ ID NO: 5938749 - DNA, 25 bp, Homo sapien
actgtttctgtggggtgctccctgg

SEQ ID NO: 5938750 - DNA, 25 bp, Homo sapien
ggtttcctaggacactcactgtcac

SEQ ID NO: 5938751 - DNA, 25 bp, Homo sapien
tggtgacagtggcccgaggtaacct

SEQ ID NO: 5938752 - DNA, 25 bp, Homo sapien
cgaggtaacctggcttgccttctct

SEQ ID NO: 5938753 - DNA, 25 bp, Homo sapien
gtcaaggtctgggcagttgcacttg

SEQ ID NO: 5938754 - DNA, 25 bp, Homo sapien
cctagtggtaggtacacacttcagg

SEQ ID NO: 5938755 - DNA, 25 bp, Homo sapien
ggtaggtacacacttcaggcagatg

SEQ ID NO: 5938756 - DNA, 25 bp, Homo sapien
agagtgacctggggactattctagg

SEQ ID NO: 5938757 - DNA, 25 bp, Homo sapien
gcccccaaggtctcatagcaggtcc

SEQ ID NO: 5938758 - DNA, 25 bp, Homo sapien
cagctagcagggagggtccccagaa

SEQ ID NO: 5938759 - DNA, 25 bp, Homo sapien
cagcgcagagccagggctcctagtg

SEQ ID NO: 5938760 - DNA, 25 bp, Homo sapien
tgaaaggagtgggtgcttcctgtgg

SEQ ID NO: 5938761 - DNA, 25 bp, Homo sapien
gcagactctggtgggtgggtcagct

SEQ ID NO: 5938762 - DNA, 25 bp, Homo sapien
acaagagcaaactcccagaacatac

SEQ ID NO: 5938763 - DNA, 25 bp, Homo sapien
gaaaaaagggtctcgtggtctcttc

SEQ ID NO: 5938764 - DNA, 25 bp, Homo sapien
ctgcagactctggtgggtgggtcag

SEQ ID NO: 5938765 - DNA, 25 bp, Homo sapien
acgggggcagctggcagttgaggtg

SEQ ID NO: 5938766 - DNA, 25 bp, Homo sapien
ccaagagctcagctgacccctagaa

SEQ ID NO: 5938767 - DNA, 25 bp, Homo sapien
caggcgtggacaatggccctgcaga

SEQ ID NO: 5938768 - DNA, 25 bp, Homo sapien
cccgtcagcatcttcctctcattgc

SEQ ID NO: 5938769 - DNA, 25 bp, Homo sapien
aaagaaaactggtccccagagagaa

SEQ ID NO: 5938770 - DNA, 25 bp, Homo sapien
ctaggactggtggggctgaaaggag

SEQ ID NO: 5938771 - DNA, 25 bp, Homo sapien
acttgaagaagaggctcggttcctg

SEQ ID NO: 5938772 - DNA, 25 bp, Homo sapien
tatctttggtaccattgtgagcagt

SEQ ID NO: 5938773 - DNA, 25 bp, Homo sapien
cagttgaggtggtaatcccgtcagc

SEQ ID NO: 5938774 - DNA, 25 bp, Homo sapien
agcaggtccagcgcagagccagggc

SEQ ID NO: 5938775 - DNA, 25 bp, Homo sapien
ggtacacacttcaggcagatgctta

SEQ ID NO: 5938776 - DNA, 25 bp, Homo sapien
gaaagcccccaaggtctcatagcag

SEQ ID NO: 5938777 - DNA, 25 bp, Homo sapien
atagcaggtccagcgcagagccagg

SEQ ID NO: 5938778 - DNA, 25 bp, Homo sapien
aacatacaagaattgtactattgac

SEQ ID NO: 5938779 - DNA, 25 bp, Homo sapien
ggactattctaggactggtggggct

SEQ ID NO: 5938780 - DNA, 25 bp, Homo sapien
gcagggagggtccccagaaaggctg

SEQ ID NO: 5938781 - DNA, 25 bp, Homo sapien
tctcttctgtgtcctcaggacagct

SEQ ID NO: 5938782 - DNA, 25 bp, Homo sapien
actccctagtccccaggcacttgca

SEQ ID NO: 5938783 - DNA, 25 bp, Homo sapien
tcctcgggacaagagcaaactccca

SEQ ID NO: 5938784 - DNA, 25 bp, Homo sapien
tggggctgaaaggagtgggtgcttc

SEQ ID NO: 5938785 - DNA, 25 bp, Homo sapien
gcacttgcaatgttcattggttcag

SEQ ID NO: 5938786 - DNA, 25 bp, Homo sapien
ctcactgtccatcatgtctgtccac

SEQ ID NO: 5938787 - DNA, 25 bp, Homo sapien
tattctaggactggtggggctgaaa

SEQ ID NO: 5938788 - DNA, 25 bp, Homo sapien
ccaggcacttgcaatgttcattggt

SEQ ID NO: 5938789 - DNA, 25 bp, Homo sapien
ctgtccatcatgtctgtccacacgc

SEQ ID NO: 5938790 - DNA, 25 bp, Homo sapien
agacttgaagaagaggctcggttcc

SEQ ID NO: 5938791 - DNA, 25 bp, Homo sapien
atcccgtcagcatcttcctctcatt

SEQ ID NO: 5938792 - DNA, 25 bp, Homo sapien
tctcgtggtctcttctgtgtcctca

SEQ ID NO: 5938793 - DNA, 25 bp, Homo sapien
cagctagccaaccagctagcaggga

SEQ ID NO: 5938794 - DNA, 25 bp, Homo sapien
aactggtccccagagagaacaagga

SEQ ID NO: 5938795 - DNA, 25 bp, Homo sapien
ttcatgatatgaaaaaagggtctcg

SEQ ID NO: 5938796 - DNA, 25 bp, Homo sapien
tctgtccacacgctgctggtgacag

SEQ ID NO: 5938797 - DNA, 25 bp, Homo sapien
aaagggtctcgtggtctcttctgtg

SEQ ID NO: 5938798 - DNA, 25 bp, Homo sapien
ctgtcactccaagtcaaggtctggg

SEQ ID NO: 5938799 - DNA, 25 bp, Homo sapien
tgcccatctcaagtctcttgtcctg

SEQ ID NO: 5938800 - DNA, 25 bp, Homo sapien
gacgtctgtcctcactgtccatcat

SEQ ID NO: 5938801 - DNA, 25 bp, Homo sapien
cagcatataaaatagcacttccggt

SEQ ID NO: 5938802 - DNA, 25 bp, Homo sapien
gacagggtactcagagtctatgtgt

SEQ ID NO: 5938803 - DNA, 25 bp, Homo sapien
aagtacagataggaaaacttaacag

SEQ ID NO: 5938804 - DNA, 25 bp, Homo sapien
cccagaaaggctgacttccccccac

SEQ ID NO: 5938805 - DNA, 25 bp, Homo sapien
ggagatgccagctagccaaccagct

SEQ ID NO: 5938806 - DNA, 25 bp, Homo sapien
tcttgctggcttcatgatatgaaaa

SEQ ID NO: 5938807 - DNA, 25 bp, Homo sapien
ggtgattctatctttggtaccattg

SEQ ID NO: 5938808 - DNA, 25 bp, Homo sapien
gcttacctatcacaggcgtggacaa

SEQ ID NO: 5938809 - DNA, 25 bp, Homo sapien
aagagctcagctgacccctagaaag

SEQ ID NO: 5938810 - DNA, 25 bp, Homo sapien
cagaaaggctgacttccccccactc

SEQ ID NO: 5938811 - DNA, 25 bp, Homo sapien
aagaggctcggttcctgaaccccca

SEQ ID NO: 5938812 - DNA, 25 bp, Homo sapien
taaacctaggtgattctatctttgg

SEQ ID NO: 5938813 - DNA, 25 bp, Homo sapien
ggggtgctccctggggacgggggca

SEQ ID NO: 5938814 - DNA, 25 bp, Homo sapien
tgtctaaatgtgggttatctcgagt

SEQ ID NO: 5938815 - DNA, 25 bp, Homo sapien
caaggtctgggcagttgcacttgga

SEQ ID NO: 5938816 - DNA, 25 bp, Homo sapien
tggtgggtgggtcagctgagagtga

SEQ ID NO: 5938817 - DNA, 25 bp, Homo sapien
tctaaatgtgggttatctcgagtcc

SEQ ID NO: 5938818 - DNA, 25 bp, Homo sapien
gctgctccaagcggggagatgccag

SEQ ID NO: 5938819 - DNA, 25 bp, Homo sapien
ttgtactattgacagggtactcaga

SEQ ID NO: 5938820 - DNA, 25 bp, Homo sapien
ccaagtcaaggtctgggcagttgca

SEQ ID NO: 5938821 - DNA, 25 bp, Homo sapien
ctgacccctagaaagatcagtttaa

SEQ ID NO: 5938822 - DNA, 25 bp, Homo sapien
gcaatgttcattggttcagggttag

SEQ ID NO: 5938823 - DNA, 25 bp, Homo sapien
caagtacttgtaaacctaggtgatt

SEQ ID NO: 5938824 - DNA, 25 bp, Homo sapien
atcagggatcttccaagagctcagc

SEQ ID NO: 5938825 - DNA, 25 bp, Homo sapien
tgtcctcactgtccatcatgtctgt

SEQ ID NO: 5938826 - DNA, 25 bp, Homo sapien
atggccctgcagactctggtgggtg

SEQ ID NO: 5938827 - DNA, 25 bp, Homo sapien
agggtctcgtggtctcttctgtgtc

SEQ ID NO: 5938828 - DNA, 25 bp, Homo sapien
tgctccaagcggggagatgccagct

SEQ ID NO: 5938829 - DNA, 25 bp, Homo sapien
agtttaaggacttgaccctgcttcc

SEQ ID NO: 5938830 - DNA, 25 bp, Homo sapien
ccccaaggtctcatagcaggtccag

SEQ ID NO: 5938831 - DNA, 25 bp, Homo sapien
gacttgaccctgcttcctcgggaca

SEQ ID NO: 5938832 - DNA, 25 bp, Homo sapien
cctggcttgccttctctgccactct

SEQ ID NO: 5938833 - DNA, 25 bp, Homo sapien
tgtggggtgctccctggggacgggg

SEQ ID NO: 5938834 - DNA, 25 bp, Homo sapien
agatgcttacctatcacaggcgtgg

SEQ ID NO: 5938835 - DNA, 25 bp, Homo sapien
ggtgtctaaatgtgggttatctcga

SEQ ID NO: 5938836 - DNA, 25 bp, Homo sapien
gaactgtttctgtggggtgctccct

SEQ ID NO: 5938837 - DNA, 25 bp, Homo sapien
aattgtactattgacagggtactca

SEQ ID NO: 5938838 - DNA, 25 bp, Homo sapien
ttgcaatgttcattggttcagggtt

SEQ ID NO: 5938839 - DNA, 25 bp, Homo sapien
cctgcttcctcgggacaagagcaaa

SEQ ID NO: 5938840 - DNA, 25 bp, Homo sapien
ggagggtccccagaaaggctgactt

SEQ ID NO: 5938841 - DNA, 25 bp, Homo sapien
tagtggtaggtacacacttcaggca

SEQ ID NO: 5938842 - DNA, 25 bp, Homo sapien
catgtctgtccacacgctgctggtg

SEQ ID NO: 5938843 - DNA, 25 bp, Homo sapien
ggtctcgtggtctcttctgtgtcct

SEQ ID NO: 5938844 - DNA, 25 bp, Homo sapien
ggacaagagcaaactcccagaacat

SEQ ID NO: 5938845 - DNA, 25 bp, Homo sapien
cctagaaagatcagtttaaggactt

SEQ ID NO: 5938846 - DNA, 25 bp, Homo sapien
tacaagtacttgtaaacctaggtga

SEQ ID NO: 5938847 - DNA, 25 bp, Homo sapien
gtatcagggatcttccaagagctca

SEQ ID NO: 5938848 - DNA, 25 bp, Homo sapien
tatgtgtccaacttgcttttcaaag

SEQ ID NO: 5938849 - DNA, 25 bp, Homo sapien
cctctcattgcccatctcaagtctc

SEQ ID NO: 5938850 - DNA, 25 bp, Homo sapien
gcagttgcacttggagacttgaaga

SEQ ID NO: 5938851 - DNA, 25 bp, Homo sapien
accagctagcagggagggtccccag

SEQ ID NO: 5938852 - DNA, 25 bp, Homo sapien
agactctggtgggtgggtcagctga

SEQ ID NO: 5938853 - DNA, 25 bp, Homo sapien
cagagagaacaaggaaagcccccaa

SEQ ID NO: 5938854 - DNA, 25 bp, Homo sapien
gaaaggctgacttccccccactccc

SEQ ID NO: 5938855 - DNA, 25 bp, Homo sapien
caaccagctagcagggagggtcccc

SEQ ID NO: 5938856 - DNA, 25 bp, Homo sapien
tcagcatcttcctctcattgcccat

SEQ ID NO: 5938857 - DNA, 25 bp, Homo sapien
tgtccaacttgcttttcaaagggga

SEQ ID NO: 5938858 - DNA, 25 bp, Homo sapien
ccactcttgctggcttcatgatatg

SEQ ID NO: 5938859 - DNA, 25 bp, Homo sapien
ccccagagtgtgaagtgtatcaggg

SEQ ID NO: 5938860 - DNA, 25 bp, Homo sapien
ctggggacgggggcagctggcagtt

SEQ ID NO: 5938861 - DNA, 25 bp, Homo sapien
aggtaacctggcttgccttctctgc

SEQ ID NO: 5938862 - DNA, 25 bp, Homo sapien
gcaaactcccagaacatacaagaat

SEQ ID NO: 5938863 - DNA, 25 bp, Homo sapien
tgctccctggggacgggggcagctg

SEQ ID NO: 5938864 - DNA, 25 bp, Homo sapien
agccagggctcctagtggtaggtac

SEQ ID NO: 5938865 - DNA, 25 bp, Homo sapien
acttaacagcatataaaatagcact

SEQ ID NO: 5938866 - DNA, 25 bp, Homo sapien
cagtggcccgaggtaacctggcttg

SEQ ID NO: 5938867 - DNA, 25 bp, Homo sapien
tagcacttccggtgtctaaatgtgg

SEQ ID NO: 5938868 - DNA, 25 bp, Homo sapien
gggatcttccaagagctcagctgac

SEQ ID NO: 5938869 - DNA, 25 bp, Homo sapien
tttctgtggggtgctccctggggac

SEQ ID NO: 5938870 - DNA, 25 bp, Homo sapien
ctcctagtggtaggtacacacttca

SEQ ID NO: 5938871 - DNA, 25 bp, Homo sapien
agaaaactggtccccagagagaaca

SEQ ID NO: 5938872 - DNA, 25 bp, Homo sapien
gatcttccaagagctcagctgaccc

SEQ ID NO: 5938873 - DNA, 25 bp, Homo sapien
catctcaagtctcttgtcctgcatg

SEQ ID NO: 5938874 - DNA, 25 bp, Homo sapien
tgatatgaaaaaagggtctcgtggt

SEQ ID NO: 5938875 - DNA, 25 bp, Homo sapien
caacttgcttttcaaaggggaaaga

SEQ ID NO: 5938876 - DNA, 25 bp, Homo sapien
tgacctggggactattctaggactg

SEQ ID NO: 5938877 - DNA, 25 bp, Homo sapien
gcagctggcagttgaggtggtaatc

SEQ ID NO: 5938878 - DNA, 25 bp, Homo sapien
tctgccactcttgctggcttcatga

SEQ ID NO: 5938879 - DNA, 25 bp, Homo sapien
cccagcctctgctgctccaagcggg

SEQ ID NO: 5938880 - DNA, 25 bp, Homo sapien
atgggacgtctgtcctcactgtcca

SEQ ID NO: 5938881 - DNA, 25 bp, Homo sapien
gactggtggggctgaaaggagtggg

SEQ ID NO: 5938882 - DNA, 25 bp, Homo sapien
actattctaggactggtggggctga

SEQ ID NO: 5938883 - DNA, 25 bp, Homo sapien
agggtccccagaaaggctgacttcc

SEQ ID NO: 5938884 - DNA, 25 bp, Homo sapien
cgggacaagagcaaactcccagaac

SEQ ID NO: 5938885 - DNA, 25 bp, Homo sapien
gccaaccagctagcagggagggtcc

SEQ ID NO: 5938886 - DNA, 25 bp, Homo sapien
ctcactgtcactccaagtcaaggtc

SEQ ID NO: 5938887 - DNA, 25 bp, Homo sapien
gtcagctgagagtgacctggggact

SEQ ID NO: 5938888 - DNA, 25 bp, Homo sapien
cgtggacaatggccctgcagactct

SEQ ID NO: 5938889 - DNA, 25 bp, Homo sapien
gcagatgcttacctatcacaggcgt

SEQ ID NO: 5938890 - DNA, 25 bp, Homo sapien
ttcctctcattgcccatctcaagtc

SEQ ID NO: 5938891 - DNA, 25 bp, Homo sapien
accattgtgagcagtactccccagc

SEQ ID NO: 5938892 - DNA, 25 bp, Homo sapien
gctagcagggagggtccccagaaag

SEQ ID NO: 5938893 - DNA, 25 bp, Homo sapien
gctgtaagggggtttcctaggacac

SEQ ID NO: 5938894 - DNA, 25 bp, Homo sapien
gcgcagagccagggctcctagtggt

SEQ ID NO: 5938895 - DNA, 25 bp, Homo sapien
tggacaatggccctgcagactctgg

SEQ ID NO: 5938896 - DNA, 25 bp, Homo sapien
ggacgggggcagctggcagttgagg

SEQ ID NO: 5938897 - DNA, 25 bp, Homo sapien
cttcaggcagatgcttacctatcac

SEQ ID NO: 5938898 - DNA, 25 bp, Homo sapien
taaggacttgaccctgcttcctcgg

SEQ ID NO: 5938899 - DNA, 25 bp, Homo sapien
catcttcctctcattgcccatctca

SEQ ID NO: 5938900 - DNA, 25 bp, Homo sapien
tggcttgccttctctgccactcttg

SEQ ID NO: 5938901 - DNA, 25 bp, Homo sapien
taatcccgtcagcatcttcctctca

SEQ ID NO: 5938902 - DNA, 25 bp, Homo sapien
aatgttcattggttcagggttagaa

SEQ ID NO: 5938903 - DNA, 25 bp, Homo sapien
gagctcagctgacccctagaaagat

SEQ ID NO: 5938904 - DNA, 25 bp, Homo sapien
tcaggcagatgcttacctatcacag

SEQ ID NO: 5938905 - DNA, 25 bp, Homo sapien
gtactattgacagggtactcagagt

SEQ ID NO: 5938906 - DNA, 25 bp, Homo sapien
gacccctagaaagatcagtttaagg

SEQ ID NO: 5938907 - DNA, 25 bp, Homo sapien
acttgcaatgttcattggttcaggg

SEQ ID NO: 5938908 - DNA, 25 bp, Homo sapien
tacaagaattgtactattgacaggg

SEQ ID NO: 5938909 - DNA, 25 bp, Homo sapien
ggtctcatagcaggtccagcgcaga

SEQ ID NO: 5938910 - DNA, 25 bp, Homo sapien
tgattctatctttggtaccattgtg

SEQ ID NO: 5938911 - DNA, 25 bp, Homo sapien
ttggttcagggttagaactgtttct

SEQ ID NO: 5938912 - DNA, 25 bp, Homo sapien
tcccagaacatacaagaattgtact

SEQ ID NO: 5938913 - DNA, 25 bp, Homo sapien
agtacttgtaaacctaggtgattct

SEQ ID NO: 5938914 - DNA, 25 bp, Homo sapien
tcagagtctatgtgtccaacttgct

SEQ ID NO: 5938915 - DNA, 25 bp, Homo sapien
tgccactcttgctggcttcatgata

SEQ ID NO: 5938916 - DNA, 25 bp, Homo sapien
gacagctgtaagggggtttcctagg

SEQ ID NO: 5938917 - DNA, 25 bp, Homo sapien
tagcagggagggtccccagaaaggc

SEQ ID NO: 5938918 - DNA, 25 bp, Homo sapien
tcctacaagtacttgtaaacctagg

SEQ ID NO: 5938919 - DNA, 25 bp, Homo sapien
ccggtgtctaaatgtgggttatctc

SEQ ID NO: 5938920 - DNA, 25 bp, Homo sapien
gctagccaaccagctagcagggagg

SEQ ID NO: 5938921 - DNA, 25 bp, Homo sapien
attctatctttggtaccattgtgag

SEQ ID NO: 5938922 - DNA, 25 bp, Homo sapien
aaaatagcacttccggtgtctaaat

SEQ ID NO: 5938923 - DNA, 25 bp, Homo sapien
aatagcacttccggtgtctaaatgt

SEQ ID NO: 5938924 - DNA, 25 bp, Homo sapien
ccagagtgtgaagtgtatcagggat

SEQ ID NO: 5938925 - DNA, 25 bp, Homo sapien
tccctagtccccaggcacttgcaat

SEQ ID NO: 5938926 - DNA, 25 bp, Homo sapien
agggctcctagtggtaggtacacac

SEQ ID NO: 5938927 - DNA, 25 bp, Homo sapien
gcttgccttctctgccactcttgct

SEQ ID NO: 5938928 - DNA, 25 bp, Homo sapien
taggtgattctatctttggtaccat

SEQ ID NO: 5938929 - DNA, 25 bp, Homo sapien
ctggcagttgaggtggtaatcccgt

SEQ ID NO: 5938930 - DNA, 25 bp, Homo sapien
tgggttatctcgagtcctacaagta

SEQ ID NO: 5938931 - DNA, 25 bp, Homo sapien
agctgacccctagaaagatcagttt

SEQ ID NO: 5938932 - DNA, 25 bp, Homo sapien
atcacaggcgtggacaatggccctg

SEQ ID NO: 5938933 - DNA, 25 bp, Homo sapien
cagcctctgctgctccaagcgggga

SEQ ID NO: 5938934 - DNA, 25 bp, Homo sapien
ctggggactattctaggactggtgg

SEQ ID NO: 5938935 - DNA, 25 bp, Homo sapien
gtggtaatcccgtcagcatcttcct

SEQ ID NO: 5938936 - DNA, 25 bp, Homo sapien
gttcctgaacccccagagtgtgaag

SEQ ID NO: 5938937 - DNA, 25 bp, Homo sapien
ggttcagggttagaactgtttctgt

SEQ ID NO: 5938938 - DNA, 25 bp, Homo sapien
tagaactgtttctgtggggtgctcc

SEQ ID NO: 5938939 - DNA, 25 bp, Homo sapien
cttgtcctgcatgggacgtctgtcc

SEQ ID NO: 5938940 - DNA, 25 bp, Homo sapien
gggttagaactgtttctgtggggtg

SEQ ID NO: 5938941 - DNA, 25 bp, Homo sapien
ttgccttctctgccactcttgctgg

SEQ ID NO: 5938942 - DNA, 25 bp, Homo sapien
gatcagtttaaggacttgaccctgc

SEQ ID NO: 5938943 - DNA, 25 bp, Homo sapien
actcttgctggcttcatgatatgaa

SEQ ID NO: 5938944 - DNA, 25 bp, Homo sapien
ggtccccagaaaggctgacttcccc

SEQ ID NO: 5938945 - DNA, 25 bp, Homo sapien
tggtaccattgtgagcagtactccc

SEQ ID NO: 5938946 - DNA, 25 bp, Homo sapien
cacacgctgctggtgacagtggccc

SEQ ID NO: 5938947 - DNA, 25 bp, Homo sapien
ctccaagtcaaggtctgggcagttg

SEQ ID NO: 5938948 - DNA, 25 bp, Homo sapien
ggtggggctgaaaggagtgggtgct

SEQ ID NO: 5938949 - DNA, 25 bp, Homo sapien
aaaactggtccccagagagaacaag

SEQ ID NO: 5938950 - DNA, 25 bp, Homo sapien
gcacttccggtgtctaaatgtgggt

SEQ ID NO: 5938951 - DNA, 25 bp, Homo sapien
ccctggggacgggggcagctggcag

SEQ ID NO: 5938952 - DNA, 25 bp, Homo sapien
gggggcagctggcagttgaggtggt

SEQ ID NO: 5938953 - DNA, 25 bp, Homo sapien
gcacttggagacttgaagaagaggc

SEQ ID NO: 5938954 - DNA, 25 bp, Homo sapien
cacgctgctggtgacagtggcccga

SEQ ID NO: 5938955 - DNA, 25 bp, Homo sapien
cagggttagaactgtttctgtgggg

SEQ ID NO: 5938956 - DNA, 25 bp, Homo sapien
gtgggtcagctgagagtgacctggg

SEQ ID NO: 5938957 - DNA, 25 bp, Homo sapien
aagagcaaactcccagaacatacaa

SEQ ID NO: 5938958 - DNA, 25 bp, Homo sapien
gtccccaggcacttgcaatgttcat

SEQ ID NO: 5938959 - DNA, 25 bp, Homo sapien
agtgtgaagtgtatcagggatcttc

SEQ ID NO: 5938960 - DNA, 25 bp, Homo sapien
gcatataaaatagcacttccggtgt

SEQ ID NO: 5938961 - DNA, 25 bp, Homo sapien
gctgagagtgacctggggactattc

SEQ ID NO: 5938962 - DNA, 25 bp, Homo sapien
ggggacgggggcagctggcagttga

SEQ ID NO: 5938963 - DNA, 25 bp, Homo sapien
ctgggcagttgcacttggagacttg

SEQ ID NO: 5938964 - DNA, 25 bp, Homo sapien
aacagcatataaaatagcacttccg

SEQ ID NO: 5938965 - DNA, 25 bp, Homo sapien
gctcagctgacccctagaaagatca

SEQ ID NO: 5938966 - DNA, 25 bp, Homo sapien
aacaaggaaagcccccaaggtctca

SEQ ID NO: 5938967 - DNA, 25 bp, Homo sapien
gtcactccaagtcaaggtctgggca

SEQ ID NO: 5938968 - DNA, 25 bp, Homo sapien
aggtggtaatcccgtcagcatcttc

SEQ ID NO: 5938969 - DNA, 25 bp, Homo sapien
taggtacacacttcaggcagatgct

SEQ ID NO: 5938970 - DNA, 25 bp, Homo sapien
ttcattggttcagggttagaactgt

SEQ ID NO: 5938971 - DNA, 25 bp, Homo sapien
ctccctggggacgggggcagctggc

SEQ ID NO: 5938972 - DNA, 25 bp, Homo sapien
ttgacagggtactcagagtctatgt

SEQ ID NO: 5938973 - DNA, 25 bp, Homo sapien
gtggtctcttctgtgtcctcaggac

SEQ ID NO: 5938974 - DNA, 25 bp, Homo sapien
gttagaactgtttctgtggggtgct

SEQ ID NO: 5938975 - DNA, 25 bp, Homo sapien
gcggggagatgccagctagccaacc

SEQ ID NO: 5938976 - DNA, 25 bp, Homo sapien
ctccaagcggggagatgccagctag

SEQ ID NO: 5938977 - DNA, 25 bp, Homo sapien
tctgtggggtgctccctggggacgg

SEQ ID NO: 5938978 - DNA, 25 bp, Homo sapien
gtcctcaggacagctgtaagggggt

SEQ ID NO: 5938979 - DNA, 25 bp, Homo sapien
gtacagataggaaaacttaacagca

SEQ ID NO: 5938980 - DNA, 25 bp, Homo sapien
gagcaaactcccagaacatacaaga

SEQ ID NO: 5938981 - DNA, 25 bp, Homo sapien
gaaagatcagtttaaggacttgacc

SEQ ID NO: 5938982 - DNA, 25 bp, Homo sapien
gggcagctggcagttgaggtggtaa

SEQ ID NO: 5938983 - DNA, 25 bp, Homo sapien
ggttatctcgagtcctacaagtact

SEQ ID NO: 5938984 - DNA, 25 bp, Homo sapien
cttgtaaacctaggtgattctatct

SEQ ID NO: 5938985 - DNA, 25 bp, Homo sapien
ggagacttgaagaagaggctcggtt

SEQ ID NO: 5938986 - DNA, 25 bp, Homo sapien
aggaaagcccccaaggtctcatagc

SEQ ID NO: 5938987 - DNA, 25 bp, Homo sapien
gcatgggacgtctgtcctcactgtc

SEQ ID NO: 5938988 - DNA, 25 bp, Homo sapien
gaaaacttaacagcatataaaatag

SEQ ID NO: 5938989 - DNA, 25 bp, Homo sapien
ctgaacccccagagtgtgaagtgta

SEQ ID NO: 5938990 - DNA, 25 bp, Homo sapien
cacacttcaggcagatgcttaccta

SEQ ID NO: 5938991 - DNA, 25 bp, Homo sapien
gggtgggtcagctgagagtgacctg

SEQ ID NO: 5938992 - DNA, 25 bp, Homo sapien
tccacacgctgctggtgacagtggc

SEQ ID NO: 5938993 - DNA, 25 bp, Homo sapien
gagaacaaggaaagcccccaaggtc

SEQ ID NO: 5938994 - DNA, 25 bp, Homo sapien
agtctatgtgtccaacttgcttttc

SEQ ID NO: 5938995 - DNA, 25 bp, Homo sapien
gctggtgacagtggcccgaggtaac

SEQ ID NO: 5938996 - DNA, 25 bp, Homo sapien
aggactggtggggctgaaaggagtg

SEQ ID NO: 5938997 - DNA, 25 bp, Homo sapien
ctcgagtcctacaagtacttgtaaa

SEQ ID NO: 5938998 - DNA, 25 bp, Homo sapien
aaggtctcatagcaggtccagcgca

SEQ ID NO: 5938999 - DNA, 25 bp, Homo sapien
agggggtttcctaggacactcactg

SEQ ID NO: 5939000 - DNA, 25 bp, Homo sapien
agaattgtactattgacagggtact

SEQ ID NO: 5939001 - DNA, 25 bp, Homo sapien
aggcagatgcttacctatcacaggc

SEQ ID NO: 5939002 - DNA, 25 bp, Homo sapien
agaacatacaagaattgtactattg

SEQ ID NO: 5939003 - DNA, 25 bp, Homo sapien
tctctgccactcttgctggcttcat

SEQ ID NO: 5939004 - DNA, 25 bp, Homo sapien
catacaagaattgtactattgacag

SEQ ID NO: 5939005 - DNA, 25 bp, Homo sapien
tcttcctctcattgcccatctcaag

SEQ ID NO: 5939006 - DNA, 25 bp, Homo sapien
agtcctacaagtacttgtaaaccta

SEQ ID NO: 5939007 - DNA, 25 bp, Homo sapien
gcctctgctgctccaagcggggaga

SEQ ID NO: 5939008 - DNA, 25 bp, Homo sapien
attgcccatctcaagtctcttgtcc

SEQ ID NO: 5939009 - DNA, 25 bp, Homo sapien
ggcagttgaggtggtaatcccgtca

SEQ ID NO: 5939010 - DNA, 25 bp, Homo sapien
gacagtggcccgaggtaacctggct

SEQ ID NO: 5939011 - DNA, 25 bp, Homo sapien
tgtgtccaacttgcttttcaaaggg

SEQ ID NO: 5939012 - DNA, 25 bp, Homo sapien
ttcagggttagaactgtttctgtgg

SEQ ID NO: 5939013 - DNA, 25 bp, Homo sapien
caaggaaagcccccaaggtctcata

SEQ ID NO: 5939014 - DNA, 25 bp, Homo sapien
aaaaagggtctcgtggtctcttctg

SEQ ID NO: 5939015 - DNA, 25 bp, Homo sapien
tctgtcctcactgtccatcatgtct

SEQ ID NO: 5939016 - DNA, 25 bp, Homo sapien
tgaggtggtaatcccgtcagcatct

SEQ ID NO: 5939017 - DNA, 25 bp, Homo sapien
aggtctgggcagttgcacttggaga

SEQ ID NO: 5939018 - DNA, 25 bp, Homo sapien
acctggggactattctaggactggt

SEQ ID NO: 5939019 - DNA, 25 bp, Homo sapien
tttaaggacttgaccctgcttcctc

SEQ ID NO: 5939020 - DNA, 25 bp, Homo sapien
gtctcttgtcctgcatgggacgtct

SEQ ID NO: 5939021 - DNA, 25 bp, Homo sapien
tagccaaccagctagcagggagggt

SEQ ID NO: 5939022 - DNA, 25 bp, Homo sapien
atgaaaaaagggtctcgtggtctct

SEQ ID NO: 5939023 - DNA, 25 bp, Homo sapien
acttccggtgtctaaatgtgggtta

SEQ ID NO: 5939024 - DNA, 25 bp, Homo sapien
ttggagacttgaagaagaggctcgg

SEQ ID NO: 5939025 - DNA, 25 bp, Homo sapien
agataggaaaacttaacagcatata

SEQ ID NO: 5939026 - DNA, 25 bp, Homo sapien
gtggcccgaggtaacctggcttgcc

SEQ ID NO: 5939027 - DNA, 25 bp, Homo sapien
ttacctatcacaggcgtggacaatg

SEQ ID NO: 5939028 - DNA, 25 bp, Homo sapien
agagtgtgaagtgtatcagggatct

SEQ ID NO: 5939029 - DNA, 25 bp, Homo sapien
tctcattgcccatctcaagtctctt

SEQ ID NO: 5939030 - DNA, 25 bp, Homo sapien
agctggcagttgaggtggtaatccc

SEQ ID NO: 5939031 - DNA, 25 bp, Homo sapien
ccagggctcctagtggtaggtacac

SEQ ID NO: 5939032 - DNA, 25 bp, Homo sapien
aacctaggtgattctatctttggta

SEQ ID NO: 5939033 - DNA, 25 bp, Homo sapien
gtctgggcagttgcacttggagact

SEQ ID NO: 5939034 - DNA, 25 bp, Homo sapien
aggcacttgcaatgttcattggttc

SEQ ID NO: 5939035 - DNA, 25 bp, Homo sapien
ttccggtgtctaaatgtgggttatc

SEQ ID NO: 5939036 - DNA, 25 bp, Homo sapien
aagcccccaaggtctcatagcaggt

SEQ ID NO: 5939037 - DNA, 25 bp, Homo sapien
ggcccgaggtaacctggcttgcctt

SEQ ID NO: 5939038 - DNA, 25 bp, Homo sapien
cccgaggtaacctggcttgccttct

SEQ ID NO: 5939039 - DNA, 25 bp, Homo sapien
ggcgtggacaatggccctgcagact

SEQ ID NO: 5939040 - DNA, 25 bp, Homo sapien
tacttgtaaacctaggtgattctat

SEQ ID NO: 5939041 - DNA, 25 bp, Homo sapien
actctggtgggtgggtcagctgaga

SEQ ID NO: 5939042 - DNA, 25 bp, Homo sapien
ccagaacatacaagaattgtactat

SEQ ID NO: 5939043 - DNA, 25 bp, Homo sapien
tcagtttaaggacttgaccctgctt

SEQ ID NO: 5939044 - DNA, 25 bp, Homo sapien
tacacacttcaggcagatgcttacc

SEQ ID NO: 5939045 - DNA, 25 bp, Homo sapien
tgaagtgtatcagggatcttccaag

SEQ ID NO: 5939046 - DNA, 25 bp, Homo sapien
tagaaagatcagtttaaggacttga

SEQ ID NO: 5939047 - DNA, 25 bp, Homo sapien
gtccatcatgtctgtccacacgctg

SEQ ID NO: 5939048 - DNA, 25 bp, Homo sapien
tgtgggttatctcgagtcctacaag

SEQ ID NO: 5939049 - DNA, 25 bp, Homo sapien
ggtaatcccgtcagcatcttcctct

SEQ ID NO: 5939050 - DNA, 25 bp, Homo sapien
atataaaatagcacttccggtgtct

SEQ ID NO: 5939051 - DNA, 25 bp, Homo sapien
catgatatgaaaaaagggtctcgtg

SEQ ID NO: 5939052 - DNA, 25 bp, Homo sapien
cgtctgtcctcactgtccatcatgt

SEQ ID NO: 5939053 - DNA, 25 bp, Homo sapien
ctcttgtcctgcatgggacgtctgt

SEQ ID NO: 5939054 - DNA, 25 bp, Homo sapien
ataggaaaacttaacagcatataaa

SEQ ID NO: 5939055 - DNA, 25 bp, Homo sapien
gctgaaaggagtgggtgcttcctgt

SEQ ID NO: 5939056 - DNA, 25 bp, Homo sapien
ttatctcgagtcctacaagtacttg

SEQ ID NO: 5939057 - DNA, 25 bp, Homo sapien
gctggcttcatgatatgaaaaaagg

SEQ ID NO: 5939058 - DNA, 25 bp, Homo sapien
tgcttcctcgggacaagagcaaact

SEQ ID NO: 5939059 - DNA, 25 bp, Homo sapien
cactccaagtcaaggtctgggcagt

SEQ ID NO: 5939060 - DNA, 25 bp, Homo sapien
tccccagagagaacaaggaaagccc

SEQ ID NO: 5939061 - DNA, 25 bp, Homo sapien
tctcatagcaggtccagcgcagagc

SEQ ID NO: 5939062 - DNA, 25 bp, Homo sapien
ttgcacttggagacttgaagaagag

SEQ ID NO: 5939063 - DNA, 25 bp, Homo sapien
tcagctgacccctagaaagatcagt

SEQ ID NO: 5939064 - DNA, 25 bp, Homo sapien
cgtcagcatcttcctctcattgccc

SEQ ID NO: 5939065 - DNA, 25 bp, Homo sapien
gtaccattgtgagcagtactcccca

SEQ ID NO: 5939066 - DNA, 25 bp, Homo sapien
ggccctgcagactctggtgggtggg

SEQ ID NO: 5939067 - DNA, 25 bp, Homo sapien
ctaggacactcactgtcactccaag

SEQ ID NO: 5939068 - DNA, 25 bp, Homo sapien
ttctaggactggtggggctgaaagg

SEQ ID NO: 5939069 - DNA, 25 bp, Homo sapien
tgtccacacgctgctggtgacagtg

SEQ ID NO: 5939070 - DNA, 25 bp, Homo sapien
ttaacagcatataaaatagcacttc

SEQ ID NO: 5939071 - DNA, 25 bp, Homo sapien
ctgcatgggacgtctgtcctcactg

SEQ ID NO: 5939072 - DNA, 25 bp, Homo sapien
ttgctggcttcatgatatgaaaaaa

SEQ ID NO: 5939073 - DNA, 25 bp, Homo sapien
cagggtactcagagtctatgtgtcc

SEQ ID NO: 5939074 - DNA, 25 bp, Homo sapien
ctgtgtcctcaggacagctgtaagg

SEQ ID NO: 5939075 - DNA, 25 bp, Homo sapien
aaacttaacagcatataaaatagca

SEQ ID NO: 5939076 - DNA, 25 bp, Homo sapien
ggggactattctaggactggtgggg

SEQ ID NO: 5939077 - DNA, 25 bp, Homo sapien
atctcgagtcctacaagtacttgta

SEQ ID NO: 5939078 - DNA, 25 bp, Homo sapien
gaggctcggttcctgaacccccaga

SEQ ID NO: 5939079 - DNA, 25 bp, Homo sapien
ctggtccccagagagaacaaggaaa

SEQ ID NO: 5939080 - DNA, 25 bp, Homo sapien
agagccagggctcctagtggtaggt

SEQ ID NO: 5939081 - DNA, 25 bp, Homo sapien
actattgacagggtactcagagtct

SEQ ID NO: 5939082 - DNA, 25 bp, Homo sapien
tgtaagggggtttcctaggacactc

SEQ ID NO: 5939083 - DNA, 25 bp, Homo sapien
taagggggtttcctaggacactcac

SEQ ID NO: 5939084 - DNA, 25 bp, Homo sapien
ctatcacaggcgtggacaatggccc

SEQ ID NO: 5939085 - DNA, 25 bp, Homo sapien
tcctgaacccccagagtgtgaagtg

SEQ ID NO: 5939086 - DNA, 25 bp, Homo sapien
caatggccctgcagactctggtggg

SEQ ID NO: 5939087 - DNA, 25 bp, Homo sapien
taaatgtgggttatctcgagtccta

SEQ ID NO: 5939088 - DNA, 25 bp, Homo sapien
cagctgagagtgacctggggactat

SEQ ID NO: 5939089 - DNA, 25 bp, Homo sapien
aacctggcttgccttctctgccact

SEQ ID NO: 5939090 - DNA, 25 bp, Homo sapien
tcaagtctcttgtcctgcatgggac

SEQ ID NO: 5939091 - DNA, 25 bp, Homo sapien
tctggtgggtgggtcagctgagagt

SEQ ID NO: 5939092 - DNA, 25 bp, Homo sapien
gcagagccagggctcctagtggtag

SEQ ID NO: 5939093 - DNA, 25 bp, Homo sapien
gtgtcctcaggacagctgtaagggg

SEQ ID NO: 5939094 - DNA, 25 bp, Homo sapien
atatgaaaaaagggtctcgtggtct

SEQ ID NO: 5939095 - DNA, 25 bp, Homo sapien
ctgctgctccaagcggggagatgcc

SEQ ID NO: 5939096 - DNA, 25 bp, Homo sapien
ctcggttcctgaacccccagagtgt

SEQ ID NO: 5939097 - DNA, 25 bp, Homo sapien
ggtccccagagagaacaaggaaagc

SEQ ID NO: 5939098 - DNA, 25 bp, Homo sapien
aggacagctgtaagggggtttccta

SEQ ID NO: 5939099 - DNA, 25 bp, Homo sapien
aggacactcactgtcactccaagtc

SEQ ID NO: 5939100 - DNA, 25 bp, Homo sapien
gaacccccagagtgtgaagtgtatc

SEQ ID NO: 5939101 - DNA, 25 bp, Homo sapien
ctcgggacaagagcaaactcccaga

SEQ ID NO: 5939102 - DNA, 25 bp, Homo sapien
gccttctctgccactcttgctggct

SEQ ID NO: 5939103 - DNA, 25 bp, Homo sapien
tctatgtgtccaacttgcttttcaa

SEQ ID NO: 5939104 - DNA, 25 bp, Homo sapien
tcttccaagagctcagctgacccct

SEQ ID NO: 5939105 - DNA, 25 bp, Homo sapien
tagtccccaggcacttgcaatgttc

SEQ ID NO: 5939106 - DNA, 25 bp, Homo sapien
ccaagcggggagatgccagctagcc

SEQ ID NO: 5939107 - DNA, 25 bp, Homo sapien
aagtcaaggtctgggcagttgcact

SEQ ID NO: 5939108 - DNA, 25 bp, Homo sapien
aagcggggagatgccagctagccaa

SEQ ID NO: 5939109 - DNA, 25 bp, Homo sapien
ccctgcagactctggtgggtgggtc

SEQ ID NO: 5939110 - DNA, 25 bp, Homo sapien
gggctgaaaggagtgggtgcttcct

SEQ ID NO: 5939111 - DNA, 25 bp, Homo sapien
acagataggaaaacttaacagcata

SEQ ID NO: 5939112 - DNA, 25 bp, Homo sapien
ataaaatagcacttccggtgtctaa

SEQ ID NO: 5939113 - DNA, 25 bp, Homo sapien
cttctctgccactcttgctggcttc

SEQ ID NO: 5939114 - DNA, 25 bp, Homo sapien
ttccaagagctcagctgacccctag

SEQ ID NO: 5939115 - DNA, 25 bp, Homo sapien
cgctgctggtgacagtggcccgagg

SEQ ID NO: 5939116 - DNA, 25 bp, Homo sapien
aagtctcttgtcctgcatgggacgt

SEQ ID NO: 5939117 - DNA, 25 bp, Homo sapien
cagggatcttccaagagctcagctg

SEQ ID NO: 5939118 - DNA, 25 bp, Homo sapien
gagagaacaaggaaagcccccaagg

SEQ ID NO: 5939119 - DNA, 25 bp, Homo sapien
gggtactcagagtctatgtgtccaa

SEQ ID NO: 5939120 - DNA, 25 bp, Homo sapien
gtgacagtggcccgaggtaacctgg

SEQ ID NO: 5939121 - DNA, 25 bp, Homo sapien
gggcagttgcacttggagacttgaa

SEQ ID NO: 5939122 - DNA, 25 bp, Homo sapien
gcttcatgatatgaaaaaagggtct

SEQ ID NO: 5939123 - DNA, 25 bp, Homo sapien
cccagagagaacaaggaaagccccc

SEQ ID NO: 5939124 - DNA, 25 bp, Homo sapien
cactgtccatcatgtctgtccacac

SEQ ID NO: 5939125 - DNA, 25 bp, Homo sapien
ccatcatgtctgtccacacgctgct

SEQ ID NO: 5939126 - DNA, 25 bp, Homo sapien
actcagagtctatgtgtccaacttg

SEQ ID NO: 5939127 - DNA, 25 bp, Homo sapien
tttggtaccattgtgagcagtactc

SEQ ID NO: 5939128 - DNA, 25 bp, Homo sapien
agcatcttcctctcattgcccatct

SEQ ID NO: 5939129 - DNA, 25 bp, Homo sapien
cattggttcagggttagaactgttt

SEQ ID NO: 5939130 - DNA, 25 bp, Homo sapien
atcatgtctgtccacacgctgctgg

SEQ ID NO: 5939131 - DNA, 25 bp, Homo sapien
tctcaagtctcttgtcctgcatggg

SEQ ID NO: 5939132 - DNA, 25 bp, Homo sapien
ggtccagcgcagagccagggctcct

SEQ ID NO: 5939133 - DNA, 25 bp, Homo sapien
gtactcagagtctatgtgtccaact

SEQ ID NO: 5939134 - DNA, 25 bp, Homo sapien
cctagtccccaggcacttgcaatgt

SEQ ID NO: 5939135 - DNA, 25 bp, Homo sapien
gtgggtgggtcagctgagagtgacc

SEQ ID NO: 5939136 - DNA, 25 bp, Homo sapien
ggaaagaaaactggtccccagagag

SEQ ID NO: 5939137 - DNA, 25 bp, Homo sapien
cctaggtgattctatctttggtacc

SEQ ID NO: 5939138 - DNA, 25 bp, Homo sapien
tgtcctgcatgggacgtctgtcctc

SEQ ID NO: 5939139 - DNA, 25 bp, Homo sapien
tccccagaaaggctgacttcccccc

SEQ ID NO: 5939140 - DNA, 25 bp, Homo sapien
tccaacttgcttttcaaaggggaaa

SEQ ID NO: 5939141 - DNA, 25 bp, Homo sapien
agttgcacttggagacttgaagaag

SEQ ID NO: 5939142 - DNA, 25 bp, Homo sapien
ggggtttcctaggacactcactgtc

SEQ ID NO: 5939143 - DNA, 25 bp, Homo sapien
gtgagcagtactccccagcctctgc

SEQ ID NO: 5939144 - DNA, 25 bp, Homo sapien
ctgctggtgacagtggcccgaggta

SEQ ID NO: 5939145 - DNA, 25 bp, Homo sapien
ctctgctgctccaagcggggagatg

SEQ ID NO: 5939146 - DNA, 25 bp, Homo sapien
tcaggacagctgtaagggggtttcc

SEQ ID NO: 5939147 - DNA, 25 bp, Homo sapien
tcgtggtctcttctgtgtcctcagg

SEQ ID NO: 5939148 - DNA, 25 bp, Homo sapien
ttgaagaagaggctcggttcctgaa

SEQ ID NO: 5939149 - DNA, 25 bp, Homo sapien
cattgtgagcagtactccccagcct

SEQ ID NO: 5939150 - DNA, 25 bp, Homo sapien
tgtaaacctaggtgattctatcttt

SEQ ID NO: 5939151 - DNA, 25 bp, Homo sapien
ggggagatgccagctagccaaccag

SEQ ID NO: 5939152 - DNA, 25 bp, Homo sapien
aggaaaacttaacagcatataaaat

SEQ ID NO: 5939153 - DNA, 25 bp, Homo sapien
accctgcttcctcgggacaagagca

SEQ ID NO: 5939154 - DNA, 25 bp, Homo sapien
gttgaggtggtaatcccgtcagcat

SEQ ID NO: 5939155 - DNA, 25 bp, Homo sapien
agggagggtccccagaaaggctgac

SEQ ID NO: 5939156 - DNA, 25 bp, Homo sapien
gtggtaggtacacacttcaggcaga

SEQ ID NO: 5939157 - DNA, 25 bp, Homo sapien
tctatctttggtaccattgtgagca

SEQ ID NO: 5939158 - DNA, 25 bp, Homo sapien
cacttcaggcagatgcttacctatc

SEQ ID NO: 5939159 - DNA, 25 bp, Homo sapien
cttgaccctgcttcctcgggacaag

SEQ ID NO: 5939160 - DNA, 25 bp, Homo sapien
acttggagacttgaagaagaggctc

SEQ ID NO: 5939161 - DNA, 25 bp, Homo sapien
cctcaggacagctgtaagggggttt

SEQ ID NO: 5939162 - DNA, 25 bp, Homo sapien
cgagtcctacaagtacttgtaaacc

SEQ ID NO: 5939163 - DNA, 25 bp, Homo sapien
ggtgctccctggggacgggggcagc

SEQ ID NO: 5939164 - DNA, 25 bp, Homo sapien
aaactcccagaacatacaagaattg

SEQ ID NO: 5939165 - DNA, 25 bp, Homo sapien
agatgccagctagccaaccagctag

SEQ ID NO: 5939166 - DNA, 25 bp, Homo sapien
cccctagaaagatcagtttaaggac

SEQ ID NO: 5939167 - DNA, 25 bp, Homo sapien
gaagaagaggctcggttcctgaacc

SEQ ID NO: 5939168 - DNA, 25 bp, Homo sapien
ccccaggcacttgcaatgttcattg

SEQ ID NO: 5939169 - DNA, 25 bp, Homo sapien
ggtctcttctgtgtcctcaggacag

SEQ ID NO: 5939170 - DNA, 25 bp, Homo sapien
tgtttctgtggggtgctccctgggg

SEQ ID NO: 5939171 - DNA, 25 bp, Homo sapien
aagtgtatcagggatcttccaagag

SEQ ID NO: 5939172 - DNA, 25 bp, Homo sapien
cacaggcgtggacaatggccctgca

SEQ ID NO: 5939173 - DNA, 25 bp, Homo sapien
aatgtgggttatctcgagtcctaca

SEQ ID NO: 5939174 - DNA, 25 bp, Homo sapien
tgtgaagtgtatcagggatcttcca

SEQ ID NO: 5939175 - DNA, 25 bp, Homo sapien
caagaattgtactattgacagggta

SEQ ID NO: 5939176 - DNA, 25 bp, Homo sapien
gccagctagccaaccagctagcagg

SEQ ID NO: 5939177 - DNA, 25 bp, Homo sapien
tcctcactgtccatcatgtctgtcc

SEQ ID NO: 5939178 - DNA, 25 bp, Homo sapien
aagatcagtttaaggacttgaccct

SEQ ID NO: 5939179 - DNA, 25 bp, Homo sapien
tcctgcatgggacgtctgtcctcac

SEQ ID NO: 5939180 - DNA, 25 bp, Homo sapien
taatgatcattcagattgtatattt

SEQ ID NO: 5939181 - DNA, 25 bp, Homo sapien
atactatcttccctgcctgtatttt

SEQ ID NO: 5939182 - DNA, 25 bp, Homo sapien
gaagtggctgttgatctacaataca

SEQ ID NO: 5939183 - DNA, 25 bp, Homo sapien
ctttacatgtaatgtgtagatctta

SEQ ID NO: 5939184 - DNA, 25 bp, Homo sapien
aatctcaactcagagtcttagtgac

SEQ ID NO: 5939185 - DNA, 25 bp, Homo sapien
ccttttctgcgtcagtgtgagtcat

SEQ ID NO: 5939186 - DNA, 25 bp, Homo sapien
ccagcatgattgaaaacacactgca

SEQ ID NO: 5939187 - DNA, 25 bp, Homo sapien
tgatatgtattgtcagacttttgac

SEQ ID NO: 5939188 - DNA, 25 bp, Homo sapien
agtggctgttgatctacaatacagg

SEQ ID NO: 5939189 - DNA, 25 bp, Homo sapien
gcttagctagggtttaagaatctca

SEQ ID NO: 5939190 - DNA, 25 bp, Homo sapien
ttttggtgctcatggggtgtattaa

SEQ ID NO: 5939191 - DNA, 25 bp, Homo sapien
ttgtccatttaatgacatgagctac

SEQ ID NO: 5939192 - DNA, 25 bp, Homo sapien
ttacatggatactattaaaatagac

SEQ ID NO: 5939193 - DNA, 25 bp, Homo sapien
atgtaatgtgtagatcttaccacat

SEQ ID NO: 5939194 - DNA, 25 bp, Homo sapien
ggtttaagaatctcaactcagagtc

SEQ ID NO: 5939195 - DNA, 25 bp, Homo sapien
atactattaaaatagacgggtctag

SEQ ID NO: 5939196 - DNA, 25 bp, Homo sapien
tttttttaatgatcattcagattgt

SEQ ID NO: 5939197 - DNA, 25 bp, Homo sapien
cttttttttttaatgatcattcaga

SEQ ID NO: 5939198 - DNA, 25 bp, Homo sapien
gccagcactcgtcattttattcata

SEQ ID NO: 5939199 - DNA, 25 bp, Homo sapien
ggtgctcatggggtgtattaaaaga

SEQ ID NO: 5939200 - DNA, 25 bp, Homo sapien
cttttaattgtaaatggttctttgc

SEQ ID NO: 5939201 - DNA, 25 bp, Homo sapien
agctagggtttaagaatctcaactc

SEQ ID NO: 5939202 - DNA, 25 bp, Homo sapien
acatgtaatgtgtagatcttaccac

SEQ ID NO: 5939203 - DNA, 25 bp, Homo sapien
atgtaattacatggatactattaaa

SEQ ID NO: 5939204 - DNA, 25 bp, Homo sapien
tttaagcaagccggtgaaatgttga

SEQ ID NO: 5939205 - DNA, 25 bp, Homo sapien
agtgtttcagccttttctgcgtcag

SEQ ID NO: 5939206 - DNA, 25 bp, Homo sapien
ttagctagggtttaagaatctcaac

SEQ ID NO: 5939207 - DNA, 25 bp, Homo sapien
gtcagtgtgagtcatgtggcgggtg

SEQ ID NO: 5939208 - DNA, 25 bp, Homo sapien
atgtaggcttagctagggtttaaga

SEQ ID NO: 5939209 - DNA, 25 bp, Homo sapien
tattgtccatttaatgacatgagct

SEQ ID NO: 5939210 - DNA, 25 bp, Homo sapien
gtcttggtatatgtaattacatgga

SEQ ID NO: 5939211 - DNA, 25 bp, Homo sapien
gttgacctgttttgatatgtattgt

SEQ ID NO: 5939212 - DNA, 25 bp, Homo sapien
agacttttgaccgtgaagtggctgt

SEQ ID NO: 5939213 - DNA, 25 bp, Homo sapien
tgtctgccgaagcttcatggacgcc

SEQ ID NO: 5939214 - DNA, 25 bp, Homo sapien
actatcttccctgcctgtattttat

SEQ ID NO: 5939215 - DNA, 25 bp, Homo sapien
ccaaagcccaaaaagctaggtttga

SEQ ID NO: 5939216 - DNA, 25 bp, Homo sapien
cacgtgtctgccgaagcttcatgga

SEQ ID NO: 5939217 - DNA, 25 bp, Homo sapien
gtattgtcagacttttgaccgtgaa

SEQ ID NO: 5939218 - DNA, 25 bp, Homo sapien
agcatgattgaaaacacactgcaga

SEQ ID NO: 5939219 - DNA, 25 bp, Homo sapien
ccgtgaagtggctgttgatctacaa

SEQ ID NO: 5939220 - DNA, 25 bp, Homo sapien
ataatggttatgatttagattgaac

SEQ ID NO: 5939221 - DNA, 25 bp, Homo sapien
cactgcagatctgtttttccaaact

SEQ ID NO: 5939222 - DNA, 25 bp, Homo sapien
tgccagtttaagcaagccggtgaaa

SEQ ID NO: 5939223 - DNA, 25 bp, Homo sapien
aagttcgcacaaatgtaggcttagc

SEQ ID NO: 5939224 - DNA, 25 bp, Homo sapien
tgaataaaacccctagattttgact

SEQ ID NO: 5939225 - DNA, 25 bp, Homo sapien
agaatctcaactcagagtcttagtg

SEQ ID NO: 5939226 - DNA, 25 bp, Homo sapien
agacagttcaaaggaagcacctttt

SEQ ID NO: 5939227 - DNA, 25 bp, Homo sapien
gtgagtcatgtggcgggtgagcggt

SEQ ID NO: 5939228 - DNA, 25 bp, Homo sapien
tcagacttttgaccgtgaagtggct

SEQ ID NO: 5939229 - DNA, 25 bp, Homo sapien
gtattaaaagacacacagtttggtt

SEQ ID NO: 5939230 - DNA, 25 bp, Homo sapien
cttggaatcagtggcaatctggaag

SEQ ID NO: 5939231 - DNA, 25 bp, Homo sapien
aatgtgtagatcttaccacattttt

SEQ ID NO: 5939232 - DNA, 25 bp, Homo sapien
tgccgaagcttcatggacgccatat

SEQ ID NO: 5939233 - DNA, 25 bp, Homo sapien
gggtgtattaaaagacacacagttt

SEQ ID NO: 5939234 - DNA, 25 bp, Homo sapien
tgagcggtggggcttctgggatgga

SEQ ID NO: 5939235 - DNA, 25 bp, Homo sapien
gaccgtgaagtggctgttgatctac

SEQ ID NO: 5939236 - DNA, 25 bp, Homo sapien
actctctttgccgttcaaaagcaga

SEQ ID NO: 5939237 - DNA, 25 bp, Homo sapien
cagagtcttagtgactgggctagga

SEQ ID NO: 5939238 - DNA, 25 bp, Homo sapien
ttttttggtgctcatggggtgtatt

SEQ ID NO: 5939239 - DNA, 25 bp, Homo sapien
ctttgtcttggtatatgtaattaca

SEQ ID NO: 5939240 - DNA, 25 bp, Homo sapien
tttaattggtttttttggtgctcat

SEQ ID NO: 5939241 - DNA, 25 bp, Homo sapien
ttagctggccagtacctttgaataa

SEQ ID NO: 5939242 - DNA, 25 bp, Homo sapien
tactttacatgtaatgtgtagatct

SEQ ID NO: 5939243 - DNA, 25 bp, Homo sapien
cttctgggatggatggttctgtgtg

SEQ ID NO: 5939244 - DNA, 25 bp, Homo sapien
ataaaacccctagattttgacttgc

SEQ ID NO: 5939245 - DNA, 25 bp, Homo sapien
aattcaattttttttatatactatc

SEQ ID NO: 5939246 - DNA, 25 bp, Homo sapien
gaatcagtggcaatctggaagattt

SEQ ID NO: 5939247 - DNA, 25 bp, Homo sapien
gtcattttattcataatttcatcca

SEQ ID NO: 5939248 - DNA, 25 bp, Homo sapien
aagggggaaaaagtccaggccagca

SEQ ID NO: 5939249 - DNA, 25 bp, Homo sapien
ccagttccttctattttccaaaaga

SEQ ID NO: 5939250 - DNA, 25 bp, Homo sapien
tttcctttgtcttggtatatgtaat

SEQ ID NO: 5939251 - DNA, 25 bp, Homo sapien
cgtgtctgccgaagcttcatggacg

SEQ ID NO: 5939252 - DNA, 25 bp, Homo sapien
ctattaaatcgaaacagtaactact

SEQ ID NO: 5939253 - DNA, 25 bp, Homo sapien
tacctgggtccattcctcccccaac

SEQ ID NO: 5939254 - DNA, 25 bp, Homo sapien
tttatgtattgtccatttaatgaca

SEQ ID NO: 5939255 - DNA, 25 bp, Homo sapien
tgtcagacttttgaccgtgaagtgg

SEQ ID NO: 5939256 - DNA, 25 bp, Homo sapien
cctagattttgacttgcactacaaa

SEQ ID NO: 5939257 - DNA, 25 bp, Homo sapien
tcttccctgcctgtattttatgtat

SEQ ID NO: 5939258 - DNA, 25 bp, Homo sapien
ttgaccgtgaagtggctgttgatct

SEQ ID NO: 5939259 - DNA, 25 bp, Homo sapien
caattttttttatatactatcttcc

SEQ ID NO: 5939260 - DNA, 25 bp, Homo sapien
gtccatttaatgacatgagctacct

SEQ ID NO: 5939261 - DNA, 25 bp, Homo sapien
ttctgtaataatggttatgatttag

SEQ ID NO: 5939262 - DNA, 25 bp, Homo sapien
attgaaaacacactgcagatctgtt

SEQ ID NO: 5939263 - DNA, 25 bp, Homo sapien
cagtggcaatctggaagattttttt

SEQ ID NO: 5939264 - DNA, 25 bp, Homo sapien
tcataatttcatccattatttccct

SEQ ID NO: 5939265 - DNA, 25 bp, Homo sapien
atctgtttttccaaactattaaatc

SEQ ID NO: 5939266 - DNA, 25 bp, Homo sapien
gtgtgagtcatgtggcgggtgagcg

SEQ ID NO: 5939267 - DNA, 25 bp, Homo sapien
ttcaattttttttatatactatctt

SEQ ID NO: 5939268 - DNA, 25 bp, Homo sapien
actattaaaatagacgggtctagaa

SEQ ID NO: 5939269 - DNA, 25 bp, Homo sapien
tcattcagattgtatatttgtttcc

SEQ ID NO: 5939270 - DNA, 25 bp, Homo sapien
ttaccacatttttaatattctgtaa

SEQ ID NO: 5939271 - DNA, 25 bp, Homo sapien
gtatatgtaattacatggatactat

SEQ ID NO: 5939272 - DNA, 25 bp, Homo sapien
aaaatagacgggtctagaagccagc

SEQ ID NO: 5939273 - DNA, 25 bp, Homo sapien
acctgttttgatatgtattgtcaga

SEQ ID NO: 5939274 - DNA, 25 bp, Homo sapien
tagtgactgggctaggaaaagtttc

SEQ ID NO: 5939275 - DNA, 25 bp, Homo sapien
ccgaagcttcatggacgccatatgc

SEQ ID NO: 5939276 - DNA, 25 bp, Homo sapien
aggccagcactcgtcattttattca

SEQ ID NO: 5939277 - DNA, 25 bp, Homo sapien
tcagccttttctgcgtcagtgtgag

SEQ ID NO: 5939278 - DNA, 25 bp, Homo sapien
aatggttctttgccagtttaagcaa

SEQ ID NO: 5939279 - DNA, 25 bp, Homo sapien
actcctatatttatggactctcttt

SEQ ID NO: 5939280 - DNA, 25 bp, Homo sapien
gtggggcttctgggatggatggttc

SEQ ID NO: 5939281 - DNA, 25 bp, Homo sapien
gtaattacatggatactattaaaat

SEQ ID NO: 5939282 - DNA, 25 bp, Homo sapien
gtgtgaacacagaagttcgcacaaa

SEQ ID NO: 5939283 - DNA, 25 bp, Homo sapien
acacagtttggttgagtttttcaaa

SEQ ID NO: 5939284 - DNA, 25 bp, Homo sapien
aacacactgcagatctgtttttcca

SEQ ID NO: 5939285 - DNA, 25 bp, Homo sapien
caagccggtgaaatgttgacctgtt

SEQ ID NO: 5939286 - DNA, 25 bp, Homo sapien
caggtttttcctttgtcttggtata

SEQ ID NO: 5939287 - DNA, 25 bp, Homo sapien
ttcaaaggaagcacctttttcttta

SEQ ID NO: 5939288 - DNA, 25 bp, Homo sapien
tttgccagtttaagcaagccggtga

SEQ ID NO: 5939289 - DNA, 25 bp, Homo sapien
ctccacagtgtttcagccttttctg

SEQ ID NO: 5939290 - DNA, 25 bp, Homo sapien
aaagacacacagtttggttgagttt

SEQ ID NO: 5939291 - DNA, 25 bp, Homo sapien
aatgacatgagctacctgggtccat

SEQ ID NO: 5939292 - DNA, 25 bp, Homo sapien
actcgtcattttattcataatttca

SEQ ID NO: 5939293 - DNA, 25 bp, Homo sapien
tcttaccacatttttaatattctgt

SEQ ID NO: 5939294 - DNA, 25 bp, Homo sapien
gtgactgggctaggaaaagtttctt

SEQ ID NO: 5939295 - DNA, 25 bp, Homo sapien
tcctatatttatggactctctttgc

SEQ ID NO: 5939296 - DNA, 25 bp, Homo sapien
taagaatctcaactcagagtcttag

SEQ ID NO: 5939297 - DNA, 25 bp, Homo sapien
ggtctagaagccagcatgattgaaa

SEQ ID NO: 5939298 - DNA, 25 bp, Homo sapien
tgtattgtccatttaatgacatgag

SEQ ID NO: 5939299 - DNA, 25 bp, Homo sapien
gctgttgatctacaatacaggtttt

SEQ ID NO: 5939300 - DNA, 25 bp, Homo sapien
gatttagattgaacttaaatttgga

SEQ ID NO: 5939301 - DNA, 25 bp, Homo sapien
ccctgcctgtattttatgtattgtc

SEQ ID NO: 5939302 - DNA, 25 bp, Homo sapien
ctgtaataatggttatgatttagat

SEQ ID NO: 5939303 - DNA, 25 bp, Homo sapien
agccggtgaaatgttgacctgtttt

SEQ ID NO: 5939304 - DNA, 25 bp, Homo sapien
tacaggtttttcctttgtcttggta

SEQ ID NO: 5939305 - DNA, 25 bp, Homo sapien
acagtaactactttacatgtaatgt

SEQ ID NO: 5939306 - DNA, 25 bp, Homo sapien
attggtttttttggtgctcatgggg

SEQ ID NO: 5939307 - DNA, 25 bp, Homo sapien
tggtttttttggtgctcatggggtg

SEQ ID NO: 5939308 - DNA, 25 bp, Homo sapien
atgtattgtcagacttttgaccgtg

SEQ ID NO: 5939309 - DNA, 25 bp, Homo sapien
cagaaggcctgttaacaaagaaaac

SEQ ID NO: 5939310 - DNA, 25 bp, Homo sapien
gcactcgtcattttattcataattt

SEQ ID NO: 5939311 - DNA, 25 bp, Homo sapien
aacttggaatcagtggcaatctgga

SEQ ID NO: 5939312 - DNA, 25 bp, Homo sapien
tgtatatttgtttcctttagctggc

SEQ ID NO: 5939313 - DNA, 25 bp, Homo sapien
ggtttttcctttgtcttggtatatg

SEQ ID NO: 5939314 - DNA, 25 bp, Homo sapien
ggactctctttgccgttcaaaagca

SEQ ID NO: 5939315 - DNA, 25 bp, Homo sapien
gtcttagtgactgggctaggaaaag

SEQ ID NO: 5939316 - DNA, 25 bp, Homo sapien
gacttttttttttaatgatcattca

SEQ ID NO: 5939317 - DNA, 25 bp, Homo sapien
gaagccagcatgattgaaaacacac

SEQ ID NO: 5939318 - DNA, 25 bp, Homo sapien
ccgttcaaaagcagacagttcaaag

SEQ ID NO: 5939319 - DNA, 25 bp, Homo sapien
atcgaaacagtaactactttacatg

SEQ ID NO: 5939320 - DNA, 25 bp, Homo sapien
tcgtcattttattcataatttcatc

SEQ ID NO: 5939321 - DNA, 25 bp, Homo sapien
tgggtccattcctcccccaacccca

SEQ ID NO: 5939322 - DNA, 25 bp, Homo sapien
taattggtttttttggtgctcatgg

SEQ ID NO: 5939323 - DNA, 25 bp, Homo sapien
ggatactattaaaatagacgggtct

SEQ ID NO: 5939324 - DNA, 25 bp, Homo sapien
agcggtggggcttctgggatggatg

SEQ ID NO: 5939325 - DNA, 25 bp, Homo sapien
agccttttctgcgtcagtgtgagtc

SEQ ID NO: 5939326 - DNA, 25 bp, Homo sapien
gactgggctaggaaaagtttcttta

SEQ ID NO: 5939327 - DNA, 25 bp, Homo sapien
tctgccgaagcttcatggacgccat

SEQ ID NO: 5939328 - DNA, 25 bp, Homo sapien
gggaaaaagtccaggccagcactcg

SEQ ID NO: 5939329 - DNA, 25 bp, Homo sapien
taataatggttatgatttagattga

SEQ ID NO: 5939330 - DNA, 25 bp, Homo sapien
taaatggttctttgccagtttaagc

SEQ ID NO: 5939331 - DNA, 25 bp, Homo sapien
gtttttttggtgctcatggggtgta

SEQ ID NO: 5939332 - DNA, 25 bp, Homo sapien
ttaatattctgtaataatggttatg

SEQ ID NO: 5939333 - DNA, 25 bp, Homo sapien
attgtcagacttttgaccgtgaagt

SEQ ID NO: 5939334 - DNA, 25 bp, Homo sapien
tttaagaatctcaactcagagtctt

SEQ ID NO: 5939335 - DNA, 25 bp, Homo sapien
tgtaaatggttctttgccagtttaa

SEQ ID NO: 5939336 - DNA, 25 bp, Homo sapien
taattgtaaatggttctttgccagt

SEQ ID NO: 5939337 - DNA, 25 bp, Homo sapien
gcagatctgtttttccaaactatta

SEQ ID NO: 5939338 - DNA, 25 bp, Homo sapien
aaaacccctagattttgacttgcac

SEQ ID NO: 5939339 - DNA, 25 bp, Homo sapien
agtaactactttacatgtaatgtgt

SEQ ID NO: 5939340 - DNA, 25 bp, Homo sapien
gctacctgggtccattcctccccca

SEQ ID NO: 5939341 - DNA, 25 bp, Homo sapien
tttgagctccacagtgtttcagcct

SEQ ID NO: 5939342 - DNA, 25 bp, Homo sapien
accacatttttaatattctgtaata

SEQ ID NO: 5939343 - DNA, 25 bp, Homo sapien
atggacgccatatgcccagaaggcc

SEQ ID NO: 5939344 - DNA, 25 bp, Homo sapien
aatggttatgatttagattgaactt

SEQ ID NO: 5939345 - DNA, 25 bp, Homo sapien
tagaagccagcatgattgaaaacac

SEQ ID NO: 5939346 - DNA, 25 bp, Homo sapien
ttaatgacatgagctacctgggtcc

SEQ ID NO: 5939347 - DNA, 25 bp, Homo sapien
tgttgatctacaatacaggtttttc

SEQ ID NO: 5939348 - DNA, 25 bp, Homo sapien
gccatatgcccagaaggcctgttaa

SEQ ID NO: 5939349 - DNA, 25 bp, Homo sapien
taaaagacacacagtttggttgagt

SEQ ID NO: 5939350 - DNA, 25 bp, Homo sapien
cgggtctagaagccagcatgattga

SEQ ID NO: 5939351 - DNA, 25 bp, Homo sapien
atttaatgacatgagctacctgggt

SEQ ID NO: 5939352 - DNA, 25 bp, Homo sapien
ccacagtgtttcagccttttctgcg

SEQ ID NO: 5939353 - DNA, 25 bp, Homo sapien
ccatttaatgacatgagctacctgg

SEQ ID NO: 5939354 - DNA, 25 bp, Homo sapien
aggcttagctagggtttaagaatct

SEQ ID NO: 5939355 - DNA, 25 bp, Homo sapien
cgaaacagtaactactttacatgta

SEQ ID NO: 5939356 - DNA, 25 bp, Homo sapien
gttaacaaagaaaacttggaatcag

SEQ ID NO: 5939357 - DNA, 25 bp, Homo sapien
gtggcaatctggaagattttttttt

SEQ ID NO: 5939358 - DNA, 25 bp, Homo sapien
atgatcattcagattgtatatttgt

SEQ ID NO: 5939359 - DNA, 25 bp, Homo sapien
acaaagaaaacttggaatcagtggc

SEQ ID NO: 5939360 - DNA, 25 bp, Homo sapien
ccaaactattaaatcgaaacagtaa

SEQ ID NO: 5939361 - DNA, 25 bp, Homo sapien
tatcttccctgcctgtattttatgt

SEQ ID NO: 5939362 - DNA, 25 bp, Homo sapien
attcagattgtatatttgtttcctt

SEQ ID NO: 5939363 - DNA, 25 bp, Homo sapien
atatttatggactctctttgccgtt

SEQ ID NO: 5939364 - DNA, 25 bp, Homo sapien
ttgtcttggtatatgtaattacatg

SEQ ID NO: 5939365 - DNA, 25 bp, Homo sapien
tagattgaacttaaatttggacttt

SEQ ID NO: 5939366 - DNA, 25 bp, Homo sapien
ttttttttatatactatcttccctg

SEQ ID NO: 5939367 - DNA, 25 bp, Homo sapien
atggatactattaaaatagacgggt

SEQ ID NO: 5939368 - DNA, 25 bp, Homo sapien
tctacaatacaggtttttcctttgt

SEQ ID NO: 5939369 - DNA, 25 bp, Homo sapien
gcctgtattttatgtattgtccatt

SEQ ID NO: 5939370 - DNA, 25 bp, Homo sapien
ttttgaccgtgaagtggctgttgat

SEQ ID NO: 5939371 - DNA, 25 bp, Homo sapien
attaaaagacacacagtttggttga

SEQ ID NO: 5939372 - DNA, 25 bp, Homo sapien
aaaagcagacagttcaaaggaagca

SEQ ID NO: 5939373 - DNA, 25 bp, Homo sapien
tttttcctttgtcttggtatatgta

SEQ ID NO: 5939374 - DNA, 25 bp, Homo sapien
tatgcccagaaggcctgttaacaaa

SEQ ID NO: 5939375 - DNA, 25 bp, Homo sapien
gctcatggggtgtattaaaagacac

SEQ ID NO: 5939376 - DNA, 25 bp, Homo sapien
tctctttgccgttcaaaagcagaca

SEQ ID NO: 5939377 - DNA, 25 bp, Homo sapien
agatctgtttttccaaactattaaa

SEQ ID NO: 5939378 - DNA, 25 bp, Homo sapien
cacatttttaatattctgtaataat

SEQ ID NO: 5939379 - DNA, 25 bp, Homo sapien
ggtgagcggtggggcttctgggatg

SEQ ID NO: 5939380 - DNA, 25 bp, Homo sapien
tggtatatgtaattacatggatact

SEQ ID NO: 5939381 - DNA, 25 bp, Homo sapien
aattacatggatactattaaaatag

SEQ ID NO: 5939382 - DNA, 25 bp, Homo sapien
tcaactcagagtcttagtgactggg

SEQ ID NO: 5939383 - DNA, 25 bp, Homo sapien
tttaactcctatatttatggactct

SEQ ID NO: 5939384 - DNA, 25 bp, Homo sapien
acatggatactattaaaatagacgg

SEQ ID NO: 5939385 - DNA, 25 bp, Homo sapien
atggttctgtgtgaacacagaagtt

SEQ ID NO: 5939386 - DNA, 25 bp, Homo sapien
cccagaaggcctgttaacaaagaaa

SEQ ID NO: 5939387 - DNA, 25 bp, Homo sapien
tgattgaaaacacactgcagatctg

SEQ ID NO: 5939388 - DNA, 25 bp, Homo sapien
catgattgaaaacacactgcagatc

SEQ ID NO: 5939389 - DNA, 25 bp, Homo sapien
tagacgggtctagaagccagcatga

SEQ ID NO: 5939390 - DNA, 25 bp, Homo sapien
agattgtatatttgtttcctttagc

SEQ ID NO: 5939391 - DNA, 25 bp, Homo sapien
acttttgaccgtgaagtggctgttg

SEQ ID NO: 5939392 - DNA, 25 bp, Homo sapien
cttcatggacgccatatgcccagaa

SEQ ID NO: 5939393 - DNA, 25 bp, Homo sapien
aaatgttgacctgttttgatatgta

SEQ ID NO: 5939394 - DNA, 25 bp, Homo sapien
ggtgaaatgttgacctgttttgata

SEQ ID NO: 5939395 - DNA, 25 bp, Homo sapien
aactattaaatcgaaacagtaacta

SEQ ID NO: 5939396 - DNA, 25 bp, Homo sapien
agtttctttaactcctatatttatg

SEQ ID NO: 5939397 - DNA, 25 bp, Homo sapien
agaagttcgcacaaatgtaggctta

SEQ ID NO: 5939398 - DNA, 25 bp, Homo sapien
tggctgttgatctacaatacaggtt

SEQ ID NO: 5939399 - DNA, 25 bp, Homo sapien
gtggcgggtgagcggtggggcttct

SEQ ID NO: 5939400 - DNA, 25 bp, Homo sapien
ctatatttatggactctctttgccg

SEQ ID NO: 5939401 - DNA, 25 bp, Homo sapien
aagtccaggccagcactcgtcattt

SEQ ID NO: 5939402 - DNA, 25 bp, Homo sapien
cccctagattttgacttgcactaca

SEQ ID NO: 5939403 - DNA, 25 bp, Homo sapien
gttctttgccagtttaagcaagccg

SEQ ID NO: 5939404 - DNA, 25 bp, Homo sapien
cagcactcgtcattttattcataat

SEQ ID NO: 5939405 - DNA, 25 bp, Homo sapien
gttatgatttagattgaacttaaat

SEQ ID NO: 5939406 - DNA, 25 bp, Homo sapien
gttcaaaagcagacagttcaaagga

SEQ ID NO: 5939407 - DNA, 25 bp, Homo sapien
ctagggtttaagaatctcaactcag

SEQ ID NO: 5939408 - DNA, 25 bp, Homo sapien
gtattttatgtattgtccatttaat

SEQ ID NO: 5939409 - DNA, 25 bp, Homo sapien
ttatatactatcttccctgcctgta

SEQ ID NO: 5939410 - DNA, 25 bp, Homo sapien
gacgggtctagaagccagcatgatt

SEQ ID NO: 5939411 - DNA, 25 bp, Homo sapien
ggtttgagctccacagtgtttcagc

SEQ ID NO: 5939412 - DNA, 25 bp, Homo sapien
gagtcatgtggcgggtgagcggtgg

SEQ ID NO: 5939413 - DNA, 25 bp, Homo sapien
ctgtgtgaacacagaagttcgcaca

SEQ ID NO: 5939414 - DNA, 25 bp, Homo sapien
ggatggttctgtgtgaacacagaag

SEQ ID NO: 5939415 - DNA, 25 bp, Homo sapien
agttccttctattttccaaaagata

SEQ ID NO: 5939416 - DNA, 25 bp, Homo sapien
ataatttcatccattatttccctga

SEQ ID NO: 5939417 - DNA, 25 bp, Homo sapien
acagttcaaaggaagcacctttttc

SEQ ID NO: 5939418 - DNA, 25 bp, Homo sapien
ctttagctggccagtacctttgaat

SEQ ID NO: 5939419 - DNA, 25 bp, Homo sapien
gcgtcagtgtgagtcatgtggcggg

SEQ ID NO: 5939420 - DNA, 25 bp, Homo sapien
atatgtaattacatggatactatta

SEQ ID NO: 5939421 - DNA, 25 bp, Homo sapien
ggggcttctgggatggatggttctg

SEQ ID NO: 5939422 - DNA, 25 bp, Homo sapien
cggtggggcttctgggatggatggt

SEQ ID NO: 5939423 - DNA, 25 bp, Homo sapien
gacttgcactacaaattcaattttt

SEQ ID NO: 5939424 - DNA, 25 bp, Homo sapien
tcctttagctggccagtacctttga

SEQ ID NO: 5939425 - DNA, 25 bp, Homo sapien
tcgcacaaatgtaggcttagctagg

SEQ ID NO: 5939426 - DNA, 25 bp, Homo sapien
ggcttctgggatggatggttctgtg

SEQ ID NO: 5939427 - DNA, 25 bp, Homo sapien
tggacttttttttttaatgatcatt

SEQ ID NO: 5939428 - DNA, 25 bp, Homo sapien
agaaaacttggaatcagtggcaatc

SEQ ID NO: 5939429 - DNA, 25 bp, Homo sapien
tgtagatcttaccacatttttaata

SEQ ID NO: 5939430 - DNA, 25 bp, Homo sapien
ctgttttgatatgtattgtcagact

SEQ ID NO: 5939431 - DNA, 25 bp, Homo sapien
ctgcgtcagtgtgagtcatgtggcg

SEQ ID NO: 5939432 - DNA, 25 bp, Homo sapien
tctttaattggtttttttggtgctc

SEQ ID NO: 5939433 - DNA, 25 bp, Homo sapien
tttagattgaacttaaatttggact

SEQ ID NO: 5939434 - DNA, 25 bp, Homo sapien
aaacagtaactactttacatgtaat

SEQ ID NO: 5939435 - DNA, 25 bp, Homo sapien
attcataatttcatccattatttcc

SEQ ID NO: 5939436 - DNA, 25 bp, Homo sapien
acaaatgtaggcttagctagggttt

SEQ ID NO: 5939437 - DNA, 25 bp, Homo sapien
ttaaaatagacgggtctagaagcca

SEQ ID NO: 5939438 - DNA, 25 bp, Homo sapien
tttctttaactcctatatttatgga

SEQ ID NO: 5939439 - DNA, 25 bp, Homo sapien
tctgggatggatggttctgtgtgaa

SEQ ID NO: 5939440 - DNA, 25 bp, Homo sapien
tttgtttcctttagctggccagtac

SEQ ID NO: 5939441 - DNA, 25 bp, Homo sapien
attgtatatttgtttcctttagctg

SEQ ID NO: 5939442 - DNA, 25 bp, Homo sapien
ccaggccagcactcgtcattttatt

SEQ ID NO: 5939443 - DNA, 25 bp, Homo sapien
caaaaagctaggtttgagctccaca

SEQ ID NO: 5939444 - DNA, 25 bp, Homo sapien
aaagcccaaaaagctaggtttgagc

SEQ ID NO: 5939445 - DNA, 25 bp, Homo sapien
aaaacttggaatcagtggcaatctg

SEQ ID NO: 5939446 - DNA, 25 bp, Homo sapien
ttttttatatactatcttccctgcc

SEQ ID NO: 5939447 - DNA, 25 bp, Homo sapien
caaattcaattttttttatatacta

SEQ ID NO: 5939448 - DNA, 25 bp, Homo sapien
atggatggttctgtgtgaacacaga

SEQ ID NO: 5939449 - DNA, 25 bp, Homo sapien
tctttgccagtttaagcaagccggt

SEQ ID NO: 5939450 - DNA, 25 bp, Homo sapien
taactactttacatgtaatgtgtag

SEQ ID NO: 5939451 - DNA, 25 bp, Homo sapien
tctttaactcctatatttatggact

SEQ ID NO: 5939452 - DNA, 25 bp, Homo sapien
ttttgacttgcactacaaattcaat

SEQ ID NO: 5939453 - DNA, 25 bp, Homo sapien
tgacctgttttgatatgtattgtca

SEQ ID NO: 5939454 - DNA, 25 bp, Homo sapien
cttgcactacaaattcaattttttt

SEQ ID NO: 5939455 - DNA, 25 bp, Homo sapien
gtgaagtggctgttgatctacaata

SEQ ID NO: 5939456 - DNA, 25 bp, Homo sapien
tttggacttttttttttaatgatca

SEQ ID NO: 5939457 - DNA, 25 bp, Homo sapien
tttaatgatcattcagattgtatat

SEQ ID NO: 5939458 - DNA, 25 bp, Homo sapien
ttgacttgcactacaaattcaattt

SEQ ID NO: 5939459 - DNA, 25 bp, Homo sapien
tggttctttgccagtttaagcaagc

SEQ ID NO: 5939460 - DNA, 25 bp, Homo sapien
ttttctgcgtcagtgtgagtcatgt

SEQ ID NO: 5939461 - DNA, 25 bp, Homo sapien
ttggtgctcatggggtgtattaaaa

SEQ ID NO: 5939462 - DNA, 25 bp, Homo sapien
acgccatatgcccagaaggcctgtt

SEQ ID NO: 5939463 - DNA, 25 bp, Homo sapien
aatagacgggtctagaagccagcat

SEQ ID NO: 5939464 - DNA, 25 bp, Homo sapien
gatcattcagattgtatatttgttt

SEQ ID NO: 5939465 - DNA, 25 bp, Homo sapien
ggcaatctggaagatttttttttcc

SEQ ID NO: 5939466 - DNA, 25 bp, Homo sapien
gggggaaaaagtccaggccagcact

SEQ ID NO: 5939467 - DNA, 25 bp, Homo sapien
tgaaaacacactgcagatctgtttt

SEQ ID NO: 5939468 - DNA, 25 bp, Homo sapien
tctagaagccagcatgattgaaaac

SEQ ID NO: 5939469 - DNA, 25 bp, Homo sapien
tattctgtaataatggttatgattt

SEQ ID NO: 5939470 - DNA, 25 bp, Homo sapien
ttaaatcgaaacagtaactacttta

SEQ ID NO: 5939471 - DNA, 25 bp, Homo sapien
gattttgacttgcactacaaattca

SEQ ID NO: 5939472 - DNA, 25 bp, Homo sapien
gaacacagaagttcgcacaaatgta

SEQ ID NO: 5939473 - DNA, 25 bp, Homo sapien
agcaagccggtgaaatgttgacctg

SEQ ID NO: 5939474 - DNA, 25 bp, Homo sapien
caaccccagttccttctattttcca

SEQ ID NO: 5939475 - DNA, 25 bp, Homo sapien
tgcccagaaggcctgttaacaaaga

SEQ ID NO: 5939476 - DNA, 25 bp, Homo sapien
tgagctccacagtgtttcagccttt

SEQ ID NO: 5939477 - DNA, 25 bp, Homo sapien
aagctaggtttgagctccacagtgt

SEQ ID NO: 5939478 - DNA, 25 bp, Homo sapien
cattttattcataatttcatccatt

SEQ ID NO: 5939479 - DNA, 25 bp, Homo sapien
tatttgtttcctttagctggccagt

SEQ ID NO: 5939480 - DNA, 25 bp, Homo sapien
tttcctttagctggccagtaccttt

SEQ ID NO: 5939481 - DNA, 25 bp, Homo sapien
agacacacagtttggttgagttttt

SEQ ID NO: 5939482 - DNA, 25 bp, Homo sapien
tatatttgtttcctttagctggcca

SEQ ID NO: 5939483 - DNA, 25 bp, Homo sapien
tcaaagggggaaaaagtccaggcca

SEQ ID NO: 5939484 - DNA, 25 bp, Homo sapien
attgtaaatggttctttgccagttt

SEQ ID NO: 5939485 - DNA, 25 bp, Homo sapien
taagcaagccggtgaaatgttgacc

SEQ ID NO: 5939486 - DNA, 25 bp, Homo sapien
acacacagtttggttgagtttttca

SEQ ID NO: 5939487 - DNA, 25 bp, Homo sapien
agcttcatggacgccatatgcccag

SEQ ID NO: 5939488 - DNA, 25 bp, Homo sapien
atgttgacctgttttgatatgtatt

SEQ ID NO: 5939489 - DNA, 25 bp, Homo sapien
tttgaataaaacccctagattttga

SEQ ID NO: 5939490 - DNA, 25 bp, Homo sapien
gttttgatatgtattgtcagacttt

SEQ ID NO: 5939491 - DNA, 25 bp, Homo sapien
ggcctgttaacaaagaaaacttgga

SEQ ID NO: 5939492 - DNA, 25 bp, Homo sapien
tggttatgatttagattgaacttaa

SEQ ID NO: 5939493 - DNA, 25 bp, Homo sapien
aaaacacactgcagatctgtttttc

SEQ ID NO: 5939494 - DNA, 25 bp, Homo sapien
aaaagtccaggccagcactcgtcat

SEQ ID NO: 5939495 - DNA, 25 bp, Homo sapien
ttctgtgtgaacacagaagttcgca

SEQ ID NO: 5939496 - DNA, 25 bp, Homo sapien
aaagaaaacttggaatcagtggcaa

SEQ ID NO: 5939497 - DNA, 25 bp, Homo sapien
ggcgggtgagcggtggggcttctgg

SEQ ID NO: 5939498 - DNA, 25 bp, Homo sapien
gatcttaccacatttttaatattct

SEQ ID NO: 5939499 - DNA, 25 bp, Homo sapien
tagattttgacttgcactacaaatt

SEQ ID NO: 5939500 - DNA, 25 bp, Homo sapien
agggtttaagaatctcaactcagag

SEQ ID NO: 5939501 - DNA, 25 bp, Homo sapien
acagaagttcgcacaaatgtaggct

SEQ ID NO: 5939502 - DNA, 25 bp, Homo sapien
tatgtattgtccatttaatgacatg

SEQ ID NO: 5939503 - DNA, 25 bp, Homo sapien
gtaatgtgtagatcttaccacattt

SEQ ID NO: 5939504 - DNA, 25 bp, Homo sapien
tagatcttaccacatttttaatatt

SEQ ID NO: 5939505 - DNA, 25 bp, Homo sapien
tacaatacaggtttttcctttgtct

SEQ ID NO: 5939506 - DNA, 25 bp, Homo sapien
atcagtggcaatctggaagattttt

SEQ ID NO: 5939507 - DNA, 25 bp, Homo sapien
tgaaatgttgacctgttttgatatg

SEQ ID NO: 5939508 - DNA, 25 bp, Homo sapien
gagtcttagtgactgggctaggaaa

SEQ ID NO: 5939509 - DNA, 25 bp, Homo sapien
gttcgcacaaatgtaggcttagcta

SEQ ID NO: 5939510 - DNA, 25 bp, Homo sapien
taacaaagaaaacttggaatcagtg

SEQ ID NO: 5939511 - DNA, 25 bp, Homo sapien
gtccaggccagcactcgtcatttta

SEQ ID NO: 5939512 - DNA, 25 bp, Homo sapien
acagtgtttcagccttttctgcgtc

SEQ ID NO: 5939513 - DNA, 25 bp, Homo sapien
ttattcataatttcatccattattt

SEQ ID NO: 5939514 - DNA, 25 bp, Homo sapien
ccggtgaaatgttgacctgttttga

SEQ ID NO: 5939515 - DNA, 25 bp, Homo sapien
agctccacagtgtttcagccttttc

SEQ ID NO: 5939516 - DNA, 25 bp, Homo sapien
gtgtattaaaagacacacagtttgg

SEQ ID NO: 5939517 - DNA, 25 bp, Homo sapien
actactttacatgtaatgtgtagat

SEQ ID NO: 5939518 - DNA, 25 bp, Homo sapien
ggatggatggttctgtgtgaacaca

SEQ ID NO: 5939519 - DNA, 25 bp, Homo sapien
atgagctacctgggtccattcctcc

SEQ ID NO: 5939520 - DNA, 25 bp, Homo sapien
gaagcttcatggacgccatatgccc

SEQ ID NO: 5939521 - DNA, 25 bp, Homo sapien
tgacatgagctacctgggtccattc

SEQ ID NO: 5939522 - DNA, 25 bp, Homo sapien
gtaggcttagctagggtttaagaat

SEQ ID NO: 5939523 - DNA, 25 bp, Homo sapien
gtgaacacagaagttcgcacaaatg

SEQ ID NO: 5939524 - DNA, 25 bp, Homo sapien
attttatgtattgtccatttaatga

SEQ ID NO: 5939525 - DNA, 25 bp, Homo sapien
aaatgtaggcttagctagggtttaa

SEQ ID NO: 5939526 - DNA, 25 bp, Homo sapien
tcaaaagcagacagttcaaaggaag

SEQ ID NO: 5939527 - DNA, 25 bp, Homo sapien
cgggtgagcggtggggcttctggga

SEQ ID NO: 5939528 - DNA, 25 bp, Homo sapien
tttaattgtaaatggttctttgcca

SEQ ID NO: 5939529 - DNA, 25 bp, Homo sapien
tcagattgtatatttgtttccttta

SEQ ID NO: 5939530 - DNA, 25 bp, Homo sapien
tctattttccaaaagataaaaacca

SEQ ID NO: 5939531 - DNA, 25 bp, Homo sapien
gcagacagttcaaaggaagcacctt

SEQ ID NO: 5939532 - DNA, 25 bp, Homo sapien
tctcaactcagagtcttagtgactg

SEQ ID NO: 5939533 - DNA, 25 bp, Homo sapien
tgccgttcaaaagcagacagttcaa

SEQ ID NO: 5939534 - DNA, 25 bp, Homo sapien
cttagtgactgggctaggaaaagtt

SEQ ID NO: 5939535 - DNA, 25 bp, Homo sapien
tttgatatgtattgtcagacttttg

SEQ ID NO: 5939536 - DNA, 25 bp, Homo sapien
aagcagacagttcaaaggaagcacc

SEQ ID NO: 5939537 - DNA, 25 bp, Homo sapien
tgtgtagatcttaccacatttttaa

SEQ ID NO: 5939538 - DNA, 25 bp, Homo sapien
taggtttgagctccacagtgtttca

SEQ ID NO: 5939539 - DNA, 25 bp, Homo sapien
cttggtatatgtaattacatggata

SEQ ID NO: 5939540 - DNA, 25 bp, Homo sapien
ctggccagtacctttgaataaaacc

SEQ ID NO: 5939541 - DNA, 25 bp, Homo sapien
ctcagagtcttagtgactgggctag

SEQ ID NO: 5939542 - DNA, 25 bp, Homo sapien
ctgtttttccaaactattaaatcga

SEQ ID NO: 5939543 - DNA, 25 bp, Homo sapien
atatgtattgtcagacttttgaccg

SEQ ID NO: 5939544 - DNA, 25 bp, Homo sapien
atggactctctttgccgttcaaaag

SEQ ID NO: 5939545 - DNA, 25 bp, Homo sapien
tttcagccttttctgcgtcagtgtg

SEQ ID NO: 5939546 - DNA, 25 bp, Homo sapien
ttttatatactatcttccctgcctg

SEQ ID NO: 5939547 - DNA, 25 bp, Homo sapien
ctgcctgtattttatgtattgtcca

SEQ ID NO: 5939548 - DNA, 25 bp, Homo sapien
aatattctgtaataatggttatgat

SEQ ID NO: 5939549 - DNA, 25 bp, Homo sapien
tgtttcagccttttctgcgtcagtg

SEQ ID NO: 5939550 - DNA, 25 bp, Homo sapien
ttccaaactattaaatcgaaacagt

SEQ ID NO: 5939551 - DNA, 25 bp, Homo sapien
tcatggacgccatatgcccagaagg

SEQ ID NO: 5939552 - DNA, 25 bp, Homo sapien
cagtgtgagtcatgtggcgggtgag

SEQ ID NO: 5939553 - DNA, 25 bp, Homo sapien
gatctacaatacaggtttttccttt

SEQ ID NO: 5939554 - DNA, 25 bp, Homo sapien
ccagtttaagcaagccggtgaaatg

SEQ ID NO: 5939555 - DNA, 25 bp, Homo sapien
ctgtattttatgtattgtccattta

SEQ ID NO: 5939556 - DNA, 25 bp, Homo sapien
tccattcctcccccaaccccagttc

SEQ ID NO: 5939557 - DNA, 25 bp, Homo sapien
acacagaagttcgcacaaatgtagg

SEQ ID NO: 5939558 - DNA, 25 bp, Homo sapien
atttatggactctctttgccgttca

SEQ ID NO: 5939559 - DNA, 25 bp, Homo sapien
ttttccaaactattaaatcgaaaca

SEQ ID NO: 5939560 - DNA, 25 bp, Homo sapien
tttttaatgatcattcagattgtat

SEQ ID NO: 5939561 - DNA, 25 bp, Homo sapien
gctaggtttgagctccacagtgttt

SEQ ID NO: 5939562 - DNA, 25 bp, Homo sapien
acatgagctacctgggtccattcct

SEQ ID NO: 5939563 - DNA, 25 bp, Homo sapien
aacacgtgtctgccgaagcttcatg

SEQ ID NO: 5939564 - DNA, 25 bp, Homo sapien
caatacaggtttttcctttgtcttg

SEQ ID NO: 5939565 - DNA, 25 bp, Homo sapien
gcacaaatgtaggcttagctagggt

SEQ ID NO: 5939566 - DNA, 25 bp, Homo sapien
aactcagagtcttagtgactgggct

SEQ ID NO: 5939567 - DNA, 25 bp, Homo sapien
ctgcagatctgtttttccaaactat

SEQ ID NO: 5939568 - DNA, 25 bp, Homo sapien
agctggccagtacctttgaataaaa

SEQ ID NO: 5939569 - DNA, 25 bp, Homo sapien
cacactgcagatctgtttttccaaa

SEQ ID NO: 5939570 - DNA, 25 bp, Homo sapien
ttacatgtaatgtgtagatcttacc

SEQ ID NO: 5939571 - DNA, 25 bp, Homo sapien
tggaatcagtggcaatctggaagat

SEQ ID NO: 5939572 - DNA, 25 bp, Homo sapien
tgggatggatggttctgtgtgaaca

SEQ ID NO: 5939573 - DNA, 25 bp, Homo sapien
tccaaaagataaaaaccaaagccca

SEQ ID NO: 5939574 - DNA, 25 bp, Homo sapien
agccagcatgattgaaaacacactg

SEQ ID NO: 5939575 - DNA, 25 bp, Homo sapien
aacccctagattttgacttgcacta

SEQ ID NO: 5939576 - DNA, 25 bp, Homo sapien
ttccctgcctgtattttatgtattg

SEQ ID NO: 5939577 - DNA, 25 bp, Homo sapien
tttttttttaatgatcattcagatt

SEQ ID NO: 5939578 - DNA, 25 bp, Homo sapien
gaaaaagtccaggccagcactcgtc

SEQ ID NO: 5939579 - DNA, 25 bp, Homo sapien
gagctacctgggtccattcctcccc

SEQ ID NO: 5939580 - DNA, 25 bp, Homo sapien
agtttaagcaagccggtgaaatgtt

SEQ ID NO: 5939581 - DNA, 25 bp, Homo sapien
tttgccgttcaaaagcagacagttc

SEQ ID NO: 5939582 - DNA, 25 bp, Homo sapien
cccaaaaagctaggtttgagctcca

SEQ ID NO: 5939583 - DNA, 25 bp, Homo sapien
ttccttctattttccaaaagataaa

SEQ ID NO: 5939584 - DNA, 25 bp, Homo sapien
atatactatcttccctgcctgtatt

SEQ ID NO: 5939585 - DNA, 25 bp, Homo sapien
taactcctatatttatggactctct

SEQ ID NO: 5939586 - DNA, 25 bp, Homo sapien
ttctgcgtcagtgtgagtcatgtgg

SEQ ID NO: 5939587 - DNA, 25 bp, Homo sapien
tgcactacaaattcaatttttttta

SEQ ID NO: 5939588 - DNA, 25 bp, Homo sapien
tattaaaatagacgggtctagaagc

SEQ ID NO: 5939589 - DNA, 25 bp, Homo sapien
aaatcgaaacagtaactactttaca

SEQ ID NO: 5939590 - DNA, 25 bp, Homo sapien
ctgttaacaaagaaaacttggaatc

SEQ ID NO: 5939591 - DNA, 25 bp, Homo sapien
tctttgccgttcaaaagcagacagt

SEQ ID NO: 5939592 - DNA, 25 bp, Homo sapien
tgtttcctttagctggccagtacct

SEQ ID NO: 5939593 - DNA, 25 bp, Homo sapien
ggacgccatatgcccagaaggcctg

SEQ ID NO: 5939594 - DNA, 25 bp, Homo sapien
ttatggactctctttgccgttcaaa

SEQ ID NO: 5939595 - DNA, 25 bp, Homo sapien
aaaagctaggtttgagctccacagt

SEQ ID NO: 5939596 - DNA, 25 bp, Homo sapien
tcctttgtcttggtatatgtaatta

SEQ ID NO: 5939597 - DNA, 25 bp, Homo sapien
ttgatctacaatacaggtttttcct

SEQ ID NO: 5939598 - DNA, 25 bp, Homo sapien
ttttattcataatttcatccattat

SEQ ID NO: 5939599 - DNA, 25 bp, Homo sapien
catatgcccagaaggcctgttaaca

SEQ ID NO: 5939600 - DNA, 25 bp, Homo sapien
agcccaaaaagctaggtttgagctc

SEQ ID NO: 5939601 - DNA, 25 bp, Homo sapien
ggttctgtgtgaacacagaagttcg

SEQ ID NO: 5939602 - DNA, 25 bp, Homo sapien
catatcaaaacaggtcaacatttca

SEQ ID NO: 5939603 - DNA, 25 bp, Homo sapien
ttgccactgattccaagttttcttt

SEQ ID NO: 5939604 - DNA, 25 bp, Homo sapien
ggcgtccatgaagcttcggcagaca

SEQ ID NO: 5939605 - DNA, 25 bp, Homo sapien
agagagtccataaatataggagtta

SEQ ID NO: 5939606 - DNA, 25 bp, Homo sapien
agacaaaggaaaaacctgtattgta

SEQ ID NO: 5939607 - DNA, 25 bp, Homo sapien
ttgaactgtctgcttttgaacggca

SEQ ID NO: 5939608 - DNA, 25 bp, Homo sapien
aaaaaaaaatcttccagattgccac

SEQ ID NO: 5939609 - DNA, 25 bp, Homo sapien
gccactgattccaagttttctttgt

SEQ ID NO: 5939610 - DNA, 25 bp, Homo sapien
accgctcacccgccacatgactcac

SEQ ID NO: 5939611 - DNA, 25 bp, Homo sapien
aaattgaatttgtagtgcaagtcaa

SEQ ID NO: 5939612 - DNA, 25 bp, Homo sapien
ttttaatacaccccatgagcaccaa

SEQ ID NO: 5939613 - DNA, 25 bp, Homo sapien
tctgcagtgtgttttcaatcatgct

SEQ ID NO: 5939614 - DNA, 25 bp, Homo sapien
cccgccacatgactcacactgacgc

SEQ ID NO: 5939615 - DNA, 25 bp, Homo sapien
aaaggaaaaacctgtattgtagatc

SEQ ID NO: 5939616 - DNA, 25 bp, Homo sapien
atatacaatctgaatgatcattaaa

SEQ ID NO: 5939617 - DNA, 25 bp, Homo sapien
cagatctgcagtgtgttttcaatca

SEQ ID NO: 5939618 - DNA, 25 bp, Homo sapien
cataaccattattacagaatattaa

SEQ ID NO: 5939619 - DNA, 25 bp, Homo sapien
aatctgaatgatcattaaaaaaaaa

SEQ ID NO: 5939620 - DNA, 25 bp, Homo sapien
tttcctagcccagtcactaagactc

SEQ ID NO: 5939621 - DNA, 25 bp, Homo sapien
caacagccacttcacggtcaaaagt

SEQ ID NO: 5939622 - DNA, 25 bp, Homo sapien
cagaaccatccatcccagaagcccc

SEQ ID NO: 5939623 - DNA, 25 bp, Homo sapien
ttaaaaatgtggtaagatctacaca

SEQ ID NO: 5939624 - DNA, 25 bp, Homo sapien
tttgaaaaactcaaccaaactgtgt

SEQ ID NO: 5939625 - DNA, 25 bp, Homo sapien
ggaaaaaaaaatcttccagattgcc

SEQ ID NO: 5939626 - DNA, 25 bp, Homo sapien
acaatacatatcaaaacaggtcaac

SEQ ID NO: 5939627 - DNA, 25 bp, Homo sapien
tgaaattatgaataaaatgacgagt

SEQ ID NO: 5939628 - DNA, 25 bp, Homo sapien
aacagatctgcagtgtgttttcaat

SEQ ID NO: 5939629 - DNA, 25 bp, Homo sapien
gtagatcaacagccacttcacggtc

SEQ ID NO: 5939630 - DNA, 25 bp, Homo sapien
ctctgagttgagattcttaaaccct

SEQ ID NO: 5939631 - DNA, 25 bp, Homo sapien
agaagccccaccgctcacccgccac

SEQ ID NO: 5939632 - DNA, 25 bp, Homo sapien
aacaggccttctgggcatatggcgt

SEQ ID NO: 5939633 - DNA, 25 bp, Homo sapien
cagggaagatagtatataaaaaaaa

SEQ ID NO: 5939634 - DNA, 25 bp, Homo sapien
gggcatatggcgtccatgaagcttc

SEQ ID NO: 5939635 - DNA, 25 bp, Homo sapien
ctaagactctgagttgagattctta

SEQ ID NO: 5939636 - DNA, 25 bp, Homo sapien
aatggatgaaattatgaataaaatg

SEQ ID NO: 5939637 - DNA, 25 bp, Homo sapien
ctgattccaagttttctttgttaac

SEQ ID NO: 5939638 - DNA, 25 bp, Homo sapien
aaatcttccagattgccactgattc

SEQ ID NO: 5939639 - DNA, 25 bp, Homo sapien
atacataaaatacaggcagggaaga

SEQ ID NO: 5939640 - DNA, 25 bp, Homo sapien
tacatttgtgcgaacttctgtgttc

SEQ ID NO: 5939641 - DNA, 25 bp, Homo sapien
gtgttttcaatcatgctggcttcta

SEQ ID NO: 5939642 - DNA, 25 bp, Homo sapien
aaagtctgacaatacatatcaaaac

SEQ ID NO: 5939643 - DNA, 25 bp, Homo sapien
ctttgaactgtctgcttttgaacgg

SEQ ID NO: 5939644 - DNA, 25 bp, Homo sapien
agtctgacaatacatatcaaaacag

SEQ ID NO: 5939645 - DNA, 25 bp, Homo sapien
tcctttgaactgtctgcttttgaac

SEQ ID NO: 5939646 - DNA, 25 bp, Homo sapien
caggcagggaagatagtatataaaa

SEQ ID NO: 5939647 - DNA, 25 bp, Homo sapien
catccatcccagaagccccaccgct

SEQ ID NO: 5939648 - DNA, 25 bp, Homo sapien
atctacacattacatgtaaagtagt

SEQ ID NO: 5939649 - DNA, 25 bp, Homo sapien
tagctaagcctacatttgtgcgaac

SEQ ID NO: 5939650 - DNA, 25 bp, Homo sapien
gttgagattcttaaaccctagctaa

SEQ ID NO: 5939651 - DNA, 25 bp, Homo sapien
aaagtccaaatttaagttcaatcta

SEQ ID NO: 5939652 - DNA, 25 bp, Homo sapien
tgtcattaaatggacaatacataaa

SEQ ID NO: 5939653 - DNA, 25 bp, Homo sapien
aatattaaaaatgtggtaagatcta

SEQ ID NO: 5939654 - DNA, 25 bp, Homo sapien
ttctgggcatatggcgtccatgaag

SEQ ID NO: 5939655 - DNA, 25 bp, Homo sapien
ctgggcatatggcgtccatgaagct

SEQ ID NO: 5939656 - DNA, 25 bp, Homo sapien
agtccaaatttaagttcaatctaaa

SEQ ID NO: 5939657 - DNA, 25 bp, Homo sapien
ttctagacccgtctattttaatagt

SEQ ID NO: 5939658 - DNA, 25 bp, Homo sapien
taaagtagttactgtttcgatttaa

SEQ ID NO: 5939659 - DNA, 25 bp, Homo sapien
atgactcacactgacgcagaaaagg

SEQ ID NO: 5939660 - DNA, 25 bp, Homo sapien
aaatcataaccattattacagaata

SEQ ID NO: 5939661 - DNA, 25 bp, Homo sapien
gaaacttttcctagcccagtcacta

SEQ ID NO: 5939662 - DNA, 25 bp, Homo sapien
aacttttcctagcccagtcactaag

SEQ ID NO: 5939663 - DNA, 25 bp, Homo sapien
tttctttgttaacaggccttctggg

SEQ ID NO: 5939664 - DNA, 25 bp, Homo sapien
actcaaccaaactgtgtgtctttta

SEQ ID NO: 5939665 - DNA, 25 bp, Homo sapien
acccgtctattttaatagtatccat

SEQ ID NO: 5939666 - DNA, 25 bp, Homo sapien
acaaaggaaaaacctgtattgtaga

SEQ ID NO: 5939667 - DNA, 25 bp, Homo sapien
gacgcagaaaaggctgaaacactgt

SEQ ID NO: 5939668 - DNA, 25 bp, Homo sapien
agtgctggcctggactttttccccc

SEQ ID NO: 5939669 - DNA, 25 bp, Homo sapien
tcaaaggtactggccagctaaagga

SEQ ID NO: 5939670 - DNA, 25 bp, Homo sapien
aaacaaatatacaatctgaatgatc

SEQ ID NO: 5939671 - DNA, 25 bp, Homo sapien
tatcaaaacaggtcaacatttcacc

SEQ ID NO: 5939672 - DNA, 25 bp, Homo sapien
taatagtttggaaaaacagatctgc

SEQ ID NO: 5939673 - DNA, 25 bp, Homo sapien
ctagacccgtctattttaatagtat

SEQ ID NO: 5939674 - DNA, 25 bp, Homo sapien
cagattgccactgattccaagtttt

SEQ ID NO: 5939675 - DNA, 25 bp, Homo sapien
gaactggggttgggggaggaatgga

SEQ ID NO: 5939676 - DNA, 25 bp, Homo sapien
aaaacagatctgcagtgtgttttca

SEQ ID NO: 5939677 - DNA, 25 bp, Homo sapien
ttgcttaaactggcaaagaaccatt

SEQ ID NO: 5939678 - DNA, 25 bp, Homo sapien
gatgaaattatgaataaaatgacga

SEQ ID NO: 5939679 - DNA, 25 bp, Homo sapien
tattaaaaatgtggtaagatctaca

SEQ ID NO: 5939680 - DNA, 25 bp, Homo sapien
atcaacagccacttcacggtcaaaa

SEQ ID NO: 5939681 - DNA, 25 bp, Homo sapien
aagttcaatctaaatcataaccatt

SEQ ID NO: 5939682 - DNA, 25 bp, Homo sapien
caagacaaaggaaaaacctgtattg

SEQ ID NO: 5939683 - DNA, 25 bp, Homo sapien
gatttaatagtttggaaaaacagat

SEQ ID NO: 5939684 - DNA, 25 bp, Homo sapien
cagtcactaagactctgagttgaga

SEQ ID NO: 5939685 - DNA, 25 bp, Homo sapien
tatgaataaaatgacgagtgctggc

SEQ ID NO: 5939686 - DNA, 25 bp, Homo sapien
atatggcgtccatgaagcttcggca

SEQ ID NO: 5939687 - DNA, 25 bp, Homo sapien
gcttctagacccgtctattttaata

SEQ ID NO: 5939688 - DNA, 25 bp, Homo sapien
tataccaagacaaaggaaaaacctg

SEQ ID NO: 5939689 - DNA, 25 bp, Homo sapien
gaatggacccaggtagctcatgtca

SEQ ID NO: 5939690 - DNA, 25 bp, Homo sapien
catgtcattaaatggacaatacata

SEQ ID NO: 5939691 - DNA, 25 bp, Homo sapien
cacacagaaccatccatcccagaag

SEQ ID NO: 5939692 - DNA, 25 bp, Homo sapien
tattacagaatattaaaaatgtggt

SEQ ID NO: 5939693 - DNA, 25 bp, Homo sapien
tttgtagtgcaagtcaaaatctagg

SEQ ID NO: 5939694 - DNA, 25 bp, Homo sapien
attgaatttgtagtgcaagtcaaaa

SEQ ID NO: 5939695 - DNA, 25 bp, Homo sapien
aatacatatcaaaacaggtcaacat

SEQ ID NO: 5939696 - DNA, 25 bp, Homo sapien
acatgactcacactgacgcagaaaa

SEQ ID NO: 5939697 - DNA, 25 bp, Homo sapien
gattccaagttttctttgttaacag

SEQ ID NO: 5939698 - DNA, 25 bp, Homo sapien
gctaaaggaaacaaatatacaatct

SEQ ID NO: 5939699 - DNA, 25 bp, Homo sapien
cacactgacgcagaaaaggctgaaa

SEQ ID NO: 5939700 - DNA, 25 bp, Homo sapien
attatgaataaaatgacgagtgctg

SEQ ID NO: 5939701 - DNA, 25 bp, Homo sapien
cgtccatgaagcttcggcagacacg

SEQ ID NO: 5939702 - DNA, 25 bp, Homo sapien
attcttaaaccctagctaagcctac

SEQ ID NO: 5939703 - DNA, 25 bp, Homo sapien
aatggacaatacataaaatacaggc

SEQ ID NO: 5939704 - DNA, 25 bp, Homo sapien
attcaaaggtactggccagctaaag

SEQ ID NO: 5939705 - DNA, 25 bp, Homo sapien
aaactcaaccaaactgtgtgtcttt

SEQ ID NO: 5939706 - DNA, 25 bp, Homo sapien
ataatggatgaaattatgaataaaa

SEQ ID NO: 5939707 - DNA, 25 bp, Homo sapien
ccagaagccccaccgctcacccgcc

SEQ ID NO: 5939708 - DNA, 25 bp, Homo sapien
cttctgtgttcacacagaaccatcc

SEQ ID NO: 5939709 - DNA, 25 bp, Homo sapien
ctcacccgccacatgactcacactg

SEQ ID NO: 5939710 - DNA, 25 bp, Homo sapien
gtcactaagactctgagttgagatt

SEQ ID NO: 5939711 - DNA, 25 bp, Homo sapien
taattacatataccaagacaaagga

SEQ ID NO: 5939712 - DNA, 25 bp, Homo sapien
agatcaacagccacttcacggtcaa

SEQ ID NO: 5939713 - DNA, 25 bp, Homo sapien
acacattacatgtaaagtagttact

SEQ ID NO: 5939714 - DNA, 25 bp, Homo sapien
ttacagaatattaaaaatgtggtaa

SEQ ID NO: 5939715 - DNA, 25 bp, Homo sapien
gaaccatccatcccagaagccccac

SEQ ID NO: 5939716 - DNA, 25 bp, Homo sapien
catgaagcttcggcagacacgtgtt

SEQ ID NO: 5939717 - DNA, 25 bp, Homo sapien
tttgtgcgaacttctgtgttcacac

SEQ ID NO: 5939718 - DNA, 25 bp, Homo sapien
taaatggacaatacataaaatacag

SEQ ID NO: 5939719 - DNA, 25 bp, Homo sapien
gtcaaaagtctgacaatacatatca

SEQ ID NO: 5939720 - DNA, 25 bp, Homo sapien
taccaagacaaaggaaaaacctgta

SEQ ID NO: 5939721 - DNA, 25 bp, Homo sapien
cccagtcactaagactctgagttga

SEQ ID NO: 5939722 - DNA, 25 bp, Homo sapien
tcgatttaatagtttggaaaaacag

SEQ ID NO: 5939723 - DNA, 25 bp, Homo sapien
caatacataaaatacaggcagggaa

SEQ ID NO: 5939724 - DNA, 25 bp, Homo sapien
tggtttttatcttttggaaaataga

SEQ ID NO: 5939725 - DNA, 25 bp, Homo sapien
tatcttttggaaaatagaaggaact

SEQ ID NO: 5939726 - DNA, 25 bp, Homo sapien
agtcaaaatctaggggttttattca

SEQ ID NO: 5939727 - DNA, 25 bp, Homo sapien
catgtaaagtagttactgtttcgat

SEQ ID NO: 5939728 - DNA, 25 bp, Homo sapien
aaaccctagctaagcctacatttgt

SEQ ID NO: 5939729 - DNA, 25 bp, Homo sapien
cacagaaccatccatcccagaagcc

SEQ ID NO: 5939730 - DNA, 25 bp, Homo sapien
ttaatacaccccatgagcaccaaaa

SEQ ID NO: 5939731 - DNA, 25 bp, Homo sapien
taaaaaaaattgaatttgtagtgca

SEQ ID NO: 5939732 - DNA, 25 bp, Homo sapien
tgtttcgatttaatagtttggaaaa

SEQ ID NO: 5939733 - DNA, 25 bp, Homo sapien
gcaagtcaaaatctaggggttttat

SEQ ID NO: 5939734 - DNA, 25 bp, Homo sapien
tgcttttgaacggcaaagagagtcc

SEQ ID NO: 5939735 - DNA, 25 bp, Homo sapien
ctacacattacatgtaaagtagtta

SEQ ID NO: 5939736 - DNA, 25 bp, Homo sapien
taaagaaaaaggtgcttcctttgaa

SEQ ID NO: 5939737 - DNA, 25 bp, Homo sapien
gttcaatctaaatcataaccattat

SEQ ID NO: 5939738 - DNA, 25 bp, Homo sapien
cataaatataggagttaaagaaact

SEQ ID NO: 5939739 - DNA, 25 bp, Homo sapien
atggacccaggtagctcatgtcatt

SEQ ID NO: 5939740 - DNA, 25 bp, Homo sapien
cgctcacccgccacatgactcacac

SEQ ID NO: 5939741 - DNA, 25 bp, Homo sapien
aggtactggccagctaaaggaaaca

SEQ ID NO: 5939742 - DNA, 25 bp, Homo sapien
aagatagtatataaaaaaaattgaa

SEQ ID NO: 5939743 - DNA, 25 bp, Homo sapien
ctaaatcataaccattattacagaa

SEQ ID NO: 5939744 - DNA, 25 bp, Homo sapien
aacaggtcaacatttcaccggcttg

SEQ ID NO: 5939745 - DNA, 25 bp, Homo sapien
tgacaatacatatcaaaacaggtca

SEQ ID NO: 5939746 - DNA, 25 bp, Homo sapien
tcatgctggcttctagacccgtcta

SEQ ID NO: 5939747 - DNA, 25 bp, Homo sapien
cactaagactctgagttgagattct

SEQ ID NO: 5939748 - DNA, 25 bp, Homo sapien
aaaaattgaatttgtagtgcaagtc

SEQ ID NO: 5939749 - DNA, 25 bp, Homo sapien
ccccatgagcaccaaaaaaaccaat

SEQ ID NO: 5939750 - DNA, 25 bp, Homo sapien
ctgacgcagaaaaggctgaaacact

SEQ ID NO: 5939751 - DNA, 25 bp, Homo sapien
tggaaaaacagatctgcagtgtgtt

SEQ ID NO: 5939752 - DNA, 25 bp, Homo sapien
aaagagagtccataaatataggagt

SEQ ID NO: 5939753 - DNA, 25 bp, Homo sapien
tggagctcaaacctagctttttggg

SEQ ID NO: 5939754 - DNA, 25 bp, Homo sapien
tagttactgtttcgatttaatagtt

SEQ ID NO: 5939755 - DNA, 25 bp, Homo sapien
gctgaaacactgtggagctcaaacc

SEQ ID NO: 5939756 - DNA, 25 bp, Homo sapien
agggaaataatggatgaaattatga

SEQ ID NO: 5939757 - DNA, 25 bp, Homo sapien
tcttttaatacaccccatgagcacc

SEQ ID NO: 5939758 - DNA, 25 bp, Homo sapien
acattacatgtaaagtagttactgt

SEQ ID NO: 5939759 - DNA, 25 bp, Homo sapien
cctagctaagcctacatttgtgcga

SEQ ID NO: 5939760 - DNA, 25 bp, Homo sapien
acccaggtagctcatgtcattaaat

SEQ ID NO: 5939761 - DNA, 25 bp, Homo sapien
aaatgacgagtgctggcctggactt

SEQ ID NO: 5939762 - DNA, 25 bp, Homo sapien
tcccagaagccccaccgctcacccg

SEQ ID NO: 5939763 - DNA, 25 bp, Homo sapien
aatcatgctggcttctagacccgtc

SEQ ID NO: 5939764 - DNA, 25 bp, Homo sapien
gaaaaggctgaaacactgtggagct

SEQ ID NO: 5939765 - DNA, 25 bp, Homo sapien
taatagtatccatgtaattacatat

SEQ ID NO: 5939766 - DNA, 25 bp, Homo sapien
attaaatggacaatacataaaatac

SEQ ID NO: 5939767 - DNA, 25 bp, Homo sapien
ggggaggaatggacccaggtagctc

SEQ ID NO: 5939768 - DNA, 25 bp, Homo sapien
ttaagttcaatctaaatcataacca

SEQ ID NO: 5939769 - DNA, 25 bp, Homo sapien
tctgaatgatcattaaaaaaaaaag

SEQ ID NO: 5939770 - DNA, 25 bp, Homo sapien
atggcgtccatgaagcttcggcaga

SEQ ID NO: 5939771 - DNA, 25 bp, Homo sapien
aaggaaacaaatatacaatctgaat

SEQ ID NO: 5939772 - DNA, 25 bp, Homo sapien
gagcaccaaaaaaaccaattaaaga

SEQ ID NO: 5939773 - DNA, 25 bp, Homo sapien
tgggggaggaatggacccaggtagc

SEQ ID NO: 5939774 - DNA, 25 bp, Homo sapien
acaaatatacaatctgaatgatcat

SEQ ID NO: 5939775 - DNA, 25 bp, Homo sapien
aatgatcattaaaaaaaaaagtcca

SEQ ID NO: 5939776 - DNA, 25 bp, Homo sapien
ggttttattcaaaggtactggccag

SEQ ID NO: 5939777 - DNA, 25 bp, Homo sapien
accctagctaagcctacatttgtgc

SEQ ID NO: 5939778 - DNA, 25 bp, Homo sapien
aacggcaaagagagtccataaatat

SEQ ID NO: 5939779 - DNA, 25 bp, Homo sapien
tcaaacctagctttttgggctttgg

SEQ ID NO: 5939780 - DNA, 25 bp, Homo sapien
gaactgtctgcttttgaacggcaaa

SEQ ID NO: 5939781 - DNA, 25 bp, Homo sapien
aaaaatcttccagattgccactgat

SEQ ID NO: 5939782 - DNA, 25 bp, Homo sapien
tagtatataaaaaaaattgaatttg

SEQ ID NO: 5939783 - DNA, 25 bp, Homo sapien
aaaaaaatcttccagattgccactg

SEQ ID NO: 5939784 - DNA, 25 bp, Homo sapien
actggccagctaaaggaaacaaata

SEQ ID NO: 5939785 - DNA, 25 bp, Homo sapien
agctcatgtcattaaatggacaata

SEQ ID NO: 5939786 - DNA, 25 bp, Homo sapien
tttgaacggcaaagagagtccataa

SEQ ID NO: 5939787 - DNA, 25 bp, Homo sapien
tgaacggcaaagagagtccataaat

SEQ ID NO: 5939788 - DNA, 25 bp, Homo sapien
gcaaagaaccatttacaattaaaag

SEQ ID NO: 5939789 - DNA, 25 bp, Homo sapien
gtgcaagtcaaaatctaggggtttt

SEQ ID NO: 5939790 - DNA, 25 bp, Homo sapien
agtccataaatataggagttaaaga

SEQ ID NO: 5939791 - DNA, 25 bp, Homo sapien
tgtgttcacacagaaccatccatcc

SEQ ID NO: 5939792 - DNA, 25 bp, Homo sapien
ttattcaaaggtactggccagctaa

SEQ ID NO: 5939793 - DNA, 25 bp, Homo sapien
gctggcttctagacccgtctatttt

SEQ ID NO: 5939794 - DNA, 25 bp, Homo sapien
agaatattaaaaatgtggtaagatc

SEQ ID NO: 5939795 - DNA, 25 bp, Homo sapien
tgagattcttaaaccctagctaagc

SEQ ID NO: 5939796 - DNA, 25 bp, Homo sapien
tgaatttgtagtgcaagtcaaaatc

SEQ ID NO: 5939797 - DNA, 25 bp, Homo sapien
acagaatattaaaaatgtggtaaga

SEQ ID NO: 5939798 - DNA, 25 bp, Homo sapien
tcaaaacaggtcaacatttcaccgg

SEQ ID NO: 5939799 - DNA, 25 bp, Homo sapien
gatagtatataaaaaaaattgaatt

SEQ ID NO: 5939800 - DNA, 25 bp, Homo sapien
tgaaaaactcaaccaaactgtgtgt

SEQ ID NO: 5939801 - DNA, 25 bp, Homo sapien
gactcacactgacgcagaaaaggct

SEQ ID NO: 5939802 - DNA, 25 bp, Homo sapien
ccatgagcaccaaaaaaaccaatta

SEQ ID NO: 5939803 - DNA, 25 bp, Homo sapien
ggtaagatctacacattacatgtaa

SEQ ID NO: 5939804 - DNA, 25 bp, Homo sapien
aggaatggacccaggtagctcatgt

SEQ ID NO: 5939805 - DNA, 25 bp, Homo sapien
actggcaaagaaccatttacaatta

SEQ ID NO: 5939806 - DNA, 25 bp, Homo sapien
catttgtgcgaacttctgtgttcac

SEQ ID NO: 5939807 - DNA, 25 bp, Homo sapien
tcaccggcttgcttaaactggcaaa

SEQ ID NO: 5939808 - DNA, 25 bp, Homo sapien
gagttgagattcttaaaccctagct

SEQ ID NO: 5939809 - DNA, 25 bp, Homo sapien
ctgagttgagattcttaaaccctag

SEQ ID NO: 5939810 - DNA, 25 bp, Homo sapien
tacatataccaagacaaaggaaaaa

SEQ ID NO: 5939811 - DNA, 25 bp, Homo sapien
gcatatggcgtccatgaagcttcgg

SEQ ID NO: 5939812 - DNA, 25 bp, Homo sapien
caccccatgagcaccaaaaaaacca

SEQ ID NO: 5939813 - DNA, 25 bp, Homo sapien
ttcacggtcaaaagtctgacaatac

SEQ ID NO: 5939814 - DNA, 25 bp, Homo sapien
aacatttcaccggcttgcttaaact

SEQ ID NO: 5939815 - DNA, 25 bp, Homo sapien
gtctattttaatagtatccatgtaa

SEQ ID NO: 5939816 - DNA, 25 bp, Homo sapien
atttaagttcaatctaaatcataac

SEQ ID NO: 5939817 - DNA, 25 bp, Homo sapien
cttttcctagcccagtcactaagac

SEQ ID NO: 5939818 - DNA, 25 bp, Homo sapien
aaatgtggtaagatctacacattac

SEQ ID NO: 5939819 - DNA, 25 bp, Homo sapien
aaactggcaaagaaccatttacaat

SEQ ID NO: 5939820 - DNA, 25 bp, Homo sapien
ggaggaatggacccaggtagctcat

SEQ ID NO: 5939821 - DNA, 25 bp, Homo sapien
tctgcttttgaacggcaaagagagt

SEQ ID NO: 5939822 - DNA, 25 bp, Homo sapien
aaacactgtggagctcaaacctagc

SEQ ID NO: 5939823 - DNA, 25 bp, Homo sapien
aaactgtgtgtcttttaatacaccc

SEQ ID NO: 5939824 - DNA, 25 bp, Homo sapien
gcttaaactggcaaagaaccattta

SEQ ID NO: 5939825 - DNA, 25 bp, Homo sapien
ctcacactgacgcagaaaaggctga

SEQ ID NO: 5939826 - DNA, 25 bp, Homo sapien
aaggtgcttcctttgaactgtctgc

SEQ ID NO: 5939827 - DNA, 25 bp, Homo sapien
actgtggagctcaaacctagctttt

SEQ ID NO: 5939828 - DNA, 25 bp, Homo sapien
cacccgccacatgactcacactgac

SEQ ID NO: 5939829 - DNA, 25 bp, Homo sapien
tggcctggactttttccccctttga

SEQ ID NO: 5939830 - DNA, 25 bp, Homo sapien
aagaaacttttcctagcccagtcac

SEQ ID NO: 5939831 - DNA, 25 bp, Homo sapien
aataaaatgacgagtgctggcctgg

SEQ ID NO: 5939832 - DNA, 25 bp, Homo sapien
tggatgaaattatgaataaaatgac

SEQ ID NO: 5939833 - DNA, 25 bp, Homo sapien
aagactctgagttgagattcttaaa

SEQ ID NO: 5939834 - DNA, 25 bp, Homo sapien
ggaaacaaatatacaatctgaatga

SEQ ID NO: 5939835 - DNA, 25 bp, Homo sapien
atgctggcttctagacccgtctatt

SEQ ID NO: 5939836 - DNA, 25 bp, Homo sapien
attacatataccaagacaaaggaaa

SEQ ID NO: 5939837 - DNA, 25 bp, Homo sapien
tttggaaaaacagatctgcagtgtg

SEQ ID NO: 5939838 - DNA, 25 bp, Homo sapien
tctttgttaacaggccttctgggca

SEQ ID NO: 5939839 - DNA, 25 bp, Homo sapien
ttcacacagaaccatccatcccaga

SEQ ID NO: 5939840 - DNA, 25 bp, Homo sapien
aaaaatgtggtaagatctacacatt

SEQ ID NO: 5939841 - DNA, 25 bp, Homo sapien
tgttaacaggccttctgggcatatg

SEQ ID NO: 5939842 - DNA, 25 bp, Homo sapien
aaccaaactgtgtgtcttttaatac

SEQ ID NO: 5939843 - DNA, 25 bp, Homo sapien
taaagaaacttttcctagcccagtc

SEQ ID NO: 5939844 - DNA, 25 bp, Homo sapien
ttaacaggccttctgggcatatggc

SEQ ID NO: 5939845 - DNA, 25 bp, Homo sapien
gttttctttgttaacaggccttctg

SEQ ID NO: 5939846 - DNA, 25 bp, Homo sapien
cttcctttgaactgtctgcttttga

SEQ ID NO: 5939847 - DNA, 25 bp, Homo sapien
ctcatgtcattaaatggacaataca

SEQ ID NO: 5939848 - DNA, 25 bp, Homo sapien
gttgggggaggaatggacccaggta

SEQ ID NO: 5939849 - DNA, 25 bp, Homo sapien
tcaacatttcaccggcttgcttaaa

SEQ ID NO: 5939850 - DNA, 25 bp, Homo sapien
tgaaacactgtggagctcaaaccta

SEQ ID NO: 5939851 - DNA, 25 bp, Homo sapien
tgcttcctttgaactgtctgctttt

SEQ ID NO: 5939852 - DNA, 25 bp, Homo sapien
tgtattgtagatcaacagccacttc

SEQ ID NO: 5939853 - DNA, 25 bp, Homo sapien
aacttctgtgttcacacagaaccat

SEQ ID NO: 5939854 - DNA, 25 bp, Homo sapien
cgcagaaaaggctgaaacactgtgg

SEQ ID NO: 5939855 - DNA, 25 bp, Homo sapien
tcttaaaccctagctaagcctacat

SEQ ID NO: 5939856 - DNA, 25 bp, Homo sapien
cctacatttgtgcgaacttctgtgt

SEQ ID NO: 5939857 - DNA, 25 bp, Homo sapien
ttaaactggcaaagaaccatttaca

SEQ ID NO: 5939858 - DNA, 25 bp, Homo sapien
ggtcaacatttcaccggcttgctta

SEQ ID NO: 5939859 - DNA, 25 bp, Homo sapien
tgtctgcttttgaacggcaaagaga

SEQ ID NO: 5939860 - DNA, 25 bp, Homo sapien
agtagttactgtttcgatttaatag

SEQ ID NO: 5939861 - DNA, 25 bp, Homo sapien
aaatatacaatctgaatgatcatta

SEQ ID NO: 5939862 - DNA, 25 bp, Homo sapien
tggcttctagacccgtctattttaa

SEQ ID NO: 5939863 - DNA, 25 bp, Homo sapien
gttttcaatcatgctggcttctaga

SEQ ID NO: 5939864 - DNA, 25 bp, Homo sapien
catataccaagacaaaggaaaaacc

SEQ ID NO: 5939865 - DNA, 25 bp, Homo sapien
gactctgagttgagattcttaaacc

SEQ ID NO: 5939866 - DNA, 25 bp, Homo sapien
tctgacaatacatatcaaaacaggt

SEQ ID NO: 5939867 - DNA, 25 bp, Homo sapien
gccagctaaaggaaacaaatataca

SEQ ID NO: 5939868 - DNA, 25 bp, Homo sapien
tgaatgatcattaaaaaaaaaagtc

SEQ ID NO: 5939869 - DNA, 25 bp, Homo sapien
tgtggagctcaaacctagctttttg

SEQ ID NO: 5939870 - DNA, 25 bp, Homo sapien
tggaaaatagaaggaactggggttg

SEQ ID NO: 5939871 - DNA, 25 bp, Homo sapien
aaaaaaattgaatttgtagtgcaag

SEQ ID NO: 5939872 - DNA, 25 bp, Homo sapien
atctaaatcataaccattattacag

SEQ ID NO: 5939873 - DNA, 25 bp, Homo sapien
tccatgtaattacatataccaagac

SEQ ID NO: 5939874 - DNA, 25 bp, Homo sapien
tttcaatcatgctggcttctagacc

SEQ ID NO: 5939875 - DNA, 25 bp, Homo sapien
aggaaaaacctgtattgtagatcaa

SEQ ID NO: 5939876 - DNA, 25 bp, Homo sapien
ataaaatacaggcagggaagatagt

SEQ ID NO: 5939877 - DNA, 25 bp, Homo sapien
agatctacacattacatgtaaagta

SEQ ID NO: 5939878 - DNA, 25 bp, Homo sapien
cacggtcaaaagtctgacaatacat

SEQ ID NO: 5939879 - DNA, 25 bp, Homo sapien
tccaagttttctttgttaacaggcc

SEQ ID NO: 5939880 - DNA, 25 bp, Homo sapien
ttttattcaaaggtactggccagct

SEQ ID NO: 5939881 - DNA, 25 bp, Homo sapien
catttcaccggcttgcttaaactgg

SEQ ID NO: 5939882 - DNA, 25 bp, Homo sapien
tccagattgccactgattccaagtt

SEQ ID NO: 5939883 - DNA, 25 bp, Homo sapien
acactgtggagctcaaacctagctt

SEQ ID NO: 5939884 - DNA, 25 bp, Homo sapien
tgtaaagtagttactgtttcgattt

SEQ ID NO: 5939885 - DNA, 25 bp, Homo sapien
acataaaatacaggcagggaagata

SEQ ID NO: 5939886 - DNA, 25 bp, Homo sapien
acagccacttcacggtcaaaagtct

SEQ ID NO: 5939887 - DNA, 25 bp, Homo sapien
tcagggaaataatggatgaaattat

SEQ ID NO: 5939888 - DNA, 25 bp, Homo sapien
gagctcaaacctagctttttgggct

SEQ ID NO: 5939889 - DNA, 25 bp, Homo sapien
tattgtagatcaacagccacttcac

SEQ ID NO: 5939890 - DNA, 25 bp, Homo sapien
ccacatgactcacactgacgcagaa

SEQ ID NO: 5939891 - DNA, 25 bp, Homo sapien
aggtagctcatgtcattaaatggac

SEQ ID NO: 5939892 - DNA, 25 bp, Homo sapien
taaaggaaacaaatatacaatctga

SEQ ID NO: 5939893 - DNA, 25 bp, Homo sapien
tgttcacacagaaccatccatccca

SEQ ID NO: 5939894 - DNA, 25 bp, Homo sapien
ggaaataatggatgaaattatgaat

SEQ ID NO: 5939895 - DNA, 25 bp, Homo sapien
tggggttgggggaggaatggaccca

SEQ ID NO: 5939896 - DNA, 25 bp, Homo sapien
ccaccgctcacccgccacatgactc

SEQ ID NO: 5939897 - DNA, 25 bp, Homo sapien
ccttctgggcatatggcgtccatga

SEQ ID NO: 5939898 - DNA, 25 bp, Homo sapien
gtggtaagatctacacattacatgt

SEQ ID NO: 5939899 - DNA, 25 bp, Homo sapien
tgtgcgaacttctgtgttcacacag

SEQ ID NO: 5939900 - DNA, 25 bp, Homo sapien
atagtttggaaaaacagatctgcag

SEQ ID NO: 5939901 - DNA, 25 bp, Homo sapien
tttatcttttggaaaatagaaggaa

SEQ ID NO: 5939902 - DNA, 25 bp, Homo sapien
tcttttggaaaatagaaggaactgg

SEQ ID NO: 5939903 - DNA, 25 bp, Homo sapien
aaaatacaggcagggaagatagtat

SEQ ID NO: 5939904 - DNA, 25 bp, Homo sapien
cagaaaaggctgaaacactgtggag

SEQ ID NO: 5939905 - DNA, 25 bp, Homo sapien
ttgtagatcaacagccacttcacgg

SEQ ID NO: 5939906 - DNA, 25 bp, Homo sapien
tcaaaatctaggggttttattcaaa

SEQ ID NO: 5939907 - DNA, 25 bp, Homo sapien
cttttgaacggcaaagagagtccat

SEQ ID NO: 5939908 - DNA, 25 bp, Homo sapien
tcaaccaaactgtgtgtcttttaat

SEQ ID NO: 5939909 - DNA, 25 bp, Homo sapien
gacgagtgctggcctggactttttc

SEQ ID NO: 5939910 - DNA, 25 bp, Homo sapien
tccaaatttaagttcaatctaaatc

SEQ ID NO: 5939911 - DNA, 25 bp, Homo sapien
cggcttgcttaaactggcaaagaac

SEQ ID NO: 5939912 - DNA, 25 bp, Homo sapien
aaaaggtgcttcctttgaactgtct

SEQ ID NO: 5939913 - DNA, 25 bp, Homo sapien
agacccgtctattttaatagtatcc

SEQ ID NO: 5939914 - DNA, 25 bp, Homo sapien
gcaaagagagtccataaatatagga

SEQ ID NO: 5939915 - DNA, 25 bp, Homo sapien
agcccagtcactaagactctgagtt

SEQ ID NO: 5939916 - DNA, 25 bp, Homo sapien
ccgtctattttaatagtatccatgt

SEQ ID NO: 5939917 - DNA, 25 bp, Homo sapien
cttccagattgccactgattccaag

SEQ ID NO: 5939918 - DNA, 25 bp, Homo sapien
ttactgtttcgatttaatagtttgg

SEQ ID NO: 5939919 - DNA, 25 bp, Homo sapien
atcataaccattattacagaatatt

SEQ ID NO: 5939920 - DNA, 25 bp, Homo sapien
cactgattccaagttttctttgtta

SEQ ID NO: 5939921 - DNA, 25 bp, Homo sapien
caggtcaacatttcaccggcttgct

SEQ ID NO: 5939922 - DNA, 25 bp, Homo sapien
attttaatagtatccatgtaattac

SEQ ID NO: 5939923 - DNA, 25 bp, Homo sapien
acttcacggtcaaaagtctgacaat

SEQ ID NO: 5939924 - DNA, 25 bp, Homo sapien
aaaggctgaaacactgtggagctca

SEQ ID NO: 5939925 - DNA, 25 bp, Homo sapien
aaataatggatgaaattatgaataa

SEQ ID NO: 5939926 - DNA, 25 bp, Homo sapien
acaatctgaatgatcattaaaaaaa

SEQ ID NO: 5939927 - DNA, 25 bp, Homo sapien
agagtccataaatataggagttaaa

SEQ ID NO: 5939928 - DNA, 25 bp, Homo sapien
tagtgcaagtcaaaatctaggggtt

SEQ ID NO: 5939929 - DNA, 25 bp, Homo sapien
ccaaactgtgtgtcttttaatacac

SEQ ID NO: 5939930 - DNA, 25 bp, Homo sapien
tgaataaaatgacgagtgctggcct

SEQ ID NO: 5939931 - DNA, 25 bp, Homo sapien
tgcgaacttctgtgttcacacagaa

SEQ ID NO: 5939932 - DNA, 25 bp, Homo sapien
gctaagcctacatttgtgcgaactt

SEQ ID NO: 5939933 - DNA, 25 bp, Homo sapien
aatacaccccatgagcaccaaaaaa

SEQ ID NO: 5939934 - DNA, 25 bp, Homo sapien
aaaggtactggccagctaaaggaaa

SEQ ID NO: 5939935 - DNA, 25 bp, Homo sapien
ggcagggaagatagtatataaaaaa

SEQ ID NO: 5939936 - DNA, 25 bp, Homo sapien
tccatcccagaagccccaccgctca

SEQ ID NO: 5939937 - DNA, 25 bp, Homo sapien
tcaatctaaatcataaccattatta

SEQ ID NO: 5939938 - DNA, 25 bp, Homo sapien
tacatgtaaagtagttactgtttcg

SEQ ID NO: 5939939 - DNA, 25 bp, Homo sapien
aggctgaaacactgtggagctcaaa

SEQ ID NO: 5939940 - DNA, 25 bp, Homo sapien
ctattttaatagtatccatgtaatt

SEQ ID NO: 5939941 - DNA, 25 bp, Homo sapien
cctgtattgtagatcaacagccact

SEQ ID NO: 5939942 - DNA, 25 bp, Homo sapien
accatccatcccagaagccccaccg

SEQ ID NO: 5939943 - DNA, 25 bp, Homo sapien
aaaaactcaaccaaactgtgtgtct

SEQ ID NO: 5939944 - DNA, 25 bp, Homo sapien
actgtctgcttttgaacggcaaaga

SEQ ID NO: 5939945 - DNA, 25 bp, Homo sapien
ggtgcttcctttgaactgtctgctt

SEQ ID NO: 5939946 - DNA, 25 bp, Homo sapien
tcctagcccagtcactaagactctg

SEQ ID NO: 5939947 - DNA, 25 bp, Homo sapien
tgtagtgcaagtcaaaatctagggg

SEQ ID NO: 5939948 - DNA, 25 bp, Homo sapien
tttcaccggcttgcttaaactggca

SEQ ID NO: 5939949 - DNA, 25 bp, Homo sapien
tcaatcatgctggcttctagacccg

SEQ ID NO: 5939950 - DNA, 25 bp, Homo sapien
actgtttcgatttaatagtttggaa

SEQ ID NO: 5939951 - DNA, 25 bp, Homo sapien
cgaacttctgtgttcacacagaacc

SEQ ID NO: 5939952 - DNA, 25 bp, Homo sapien
attattacagaatattaaaaatgtg

SEQ ID NO: 5939953 - DNA, 25 bp, Homo sapien
atagtatccatgtaattacatatac

SEQ ID NO: 5939954 - DNA, 25 bp, Homo sapien
ttaaaccctagctaagcctacattt

SEQ ID NO: 5939955 - DNA, 25 bp, Homo sapien
tttaatagtttggaaaaacagatct

SEQ ID NO: 5939956 - DNA, 25 bp, Homo sapien
ggccttctgggcatatggcgtccat

SEQ ID NO: 5939957 - DNA, 25 bp, Homo sapien
tatccatgtaattacatataccaag

SEQ ID NO: 5939958 - DNA, 25 bp, Homo sapien
aatacaggcagggaagatagtatat

SEQ ID NO: 5939959 - DNA, 25 bp, Homo sapien
accggcttgcttaaactggcaaaga

SEQ ID NO: 5939960 - DNA, 25 bp, Homo sapien
attacatgtaaagtagttactgttt

SEQ ID NO: 5939961 - DNA, 25 bp, Homo sapien
agccacttcacggtcaaaagtctga

SEQ ID NO: 5939962 - DNA, 25 bp, Homo sapien
gcttgcttaaactggcaaagaacca

SEQ ID NO: 5939963 - DNA, 25 bp, Homo sapien
atgtggtaagatctacacattacat

SEQ ID NO: 5939964 - DNA, 25 bp, Homo sapien
tggacaatacataaaatacaggcag

SEQ ID NO: 5939965 - DNA, 25 bp, Homo sapien
atgacgagtgctggcctggactttt

SEQ ID NO: 5939966 - DNA, 25 bp, Homo sapien
taagatctacacattacatgtaaag

SEQ ID NO: 5939967 - DNA, 25 bp, Homo sapien
ccaggtagctcatgtcattaaatgg

SEQ ID NO: 5939968 - DNA, 25 bp, Homo sapien
cagtgtgttttcaatcatgctggct

SEQ ID NO: 5939969 - DNA, 25 bp, Homo sapien
ggacccaggtagctcatgtcattaa

SEQ ID NO: 5939970 - DNA, 25 bp, Homo sapien
catgtaattacatataccaagacaa

SEQ ID NO: 5939971 - DNA, 25 bp, Homo sapien
taagcctacatttgtgcgaacttct

SEQ ID NO: 5939972 - DNA, 25 bp, Homo sapien
gtgtcttttaatacaccccatgagc

SEQ ID NO: 5939973 - DNA, 25 bp, Homo sapien
tacaccccatgagcaccaaaaaaac

SEQ ID NO: 5939974 - DNA, 25 bp, Homo sapien
taaaatgacgagtgctggcctggac

SEQ ID NO: 5939975 - DNA, 25 bp, Homo sapien
tttgttaacaggccttctgggcata

SEQ ID NO: 5939976 - DNA, 25 bp, Homo sapien
tacatatcaaaacaggtcaacattt

SEQ ID NO: 5939977 - DNA, 25 bp, Homo sapien
caggccttctgggcatatggcgtcc

SEQ ID NO: 5939978 - DNA, 25 bp, Homo sapien
tggccagctaaaggaaacaaatata

SEQ ID NO: 5939979 - DNA, 25 bp, Homo sapien
tttaatagtatccatgtaattacat

SEQ ID NO: 5939980 - DNA, 25 bp, Homo sapien
agcctacatttgtgcgaacttctgt

SEQ ID NO: 5939981 - DNA, 25 bp, Homo sapien
agtttggaaaaacagatctgcagtg

SEQ ID NO: 5939982 - DNA, 25 bp, Homo sapien
cagctaaaggaaacaaatatacaat

SEQ ID NO: 5939983 - DNA, 25 bp, Homo sapien
gtgtgttttcaatcatgctggcttc

SEQ ID NO: 5939984 - DNA, 25 bp, Homo sapien
tgggctttggtttttatcttttgga

SEQ ID NO: 5939985 - DNA, 25 bp, Homo sapien
cgagtgctggcctggactttttccc

SEQ ID NO: 5939986 - DNA, 25 bp, Homo sapien
agtatccatgtaattacatatacca

SEQ ID NO: 5939987 - DNA, 25 bp, Homo sapien
atcttccagattgccactgattcca

SEQ ID NO: 5939988 - DNA, 25 bp, Homo sapien
gaaaaaggtgcttcctttgaactgt

SEQ ID NO: 5939989 - DNA, 25 bp, Homo sapien
cggtcaaaagtctgacaatacatat

SEQ ID NO: 5939990 - DNA, 25 bp, Homo sapien
cggcaaagagagtccataaatatag

SEQ ID NO: 5939991 - DNA, 25 bp, Homo sapien
aaaacaggtcaacatttcaccggct

SEQ ID NO: 5939992 - DNA, 25 bp, Homo sapien
tgtaattacatataccaagacaaag

SEQ ID NO: 5939993 - DNA, 25 bp, Homo sapien
ccacttcacggtcaaaagtctgaca

SEQ ID NO: 5939994 - DNA, 25 bp, Homo sapien
tgcagtgtgttttcaatcatgctgg

SEQ ID NO: 5939995 - DNA, 25 bp, Homo sapien
tccatgaagcttcggcagacacgtg

SEQ ID NO: 5939996 - DNA, 25 bp, Homo sapien
tacaggcagggaagatagtatataa

SEQ ID NO: 5939997 - DNA, 25 bp, Homo sapien
atgagcaccaaaaaaaccaattaaa

SEQ ID NO: 5939998 - DNA, 25 bp, Homo sapien
gacaatacataaaatacaggcaggg

SEQ ID NO: 5939999 - DNA, 25 bp, Homo sapien
ggaagatagtatataaaaaaaattg

SEQ ID NO: 5940000 - DNA, 25 bp, Homo sapien
aatttgtagtgcaagtcaaaatcta

SEQ ID NO: 5940001 - DNA, 25 bp, Homo sapien
cgccacatgactcacactgacgcag

SEQ ID NO: 5940002 - DNA, 25 bp, Homo sapien
tggcaaagaaccatttacaattaaa

SEQ ID NO: 5940003 - DNA, 25 bp, Homo sapien
agattcttaaaccctagctaagcct

SEQ ID NO: 5940004 - DNA, 25 bp, Homo sapien
tgctggcctggactttttccccctt

SEQ ID NO: 5940005 - DNA, 25 bp, Homo sapien
aacctgtattgtagatcaacagcca

SEQ ID NO: 5940006 - DNA, 25 bp, Homo sapien
tcattaaatggacaatacataaaat

SEQ ID NO: 5940007 - DNA, 25 bp, Homo sapien
cactgacgcagaaaaggctgaaaca

SEQ ID NO: 5940008 - DNA, 25 bp, Homo sapien
gctcaaacctagctttttgggcttt

SEQ ID NO: 5940009 - DNA, 25 bp, Homo sapien
gtagctcatgtcattaaatggacaa

SEQ ID NO: 5940010 - DNA, 25 bp, Homo sapien
tccataaatataggagttaaagaaa

SEQ ID NO: 5940011 - DNA, 25 bp, Homo sapien
aaaacctgtattgtagatcaacagc

SEQ ID NO: 5940012 - DNA, 25 bp, Homo sapien
gtactggccagctaaaggaaacaaa

SEQ ID NO: 5940013 - DNA, 25 bp, Homo sapien
gaaaaacctgtattgtagatcaaca

SEQ ID NO: 5940014 - DNA, 25 bp, Homo sapien
catcccagaagccccaccgctcacc

SEQ ID NO: 5940015 - DNA, 25 bp, Homo sapien
atacaatctgaatgatcattaaaaa

SEQ ID NO: 5940016 - DNA, 25 bp, Homo sapien
caaaagtctgacaatacatatcaaa

SEQ ID NO: 5940017 - DNA, 25 bp, Homo sapien
aaattatgaataaaatgacgagtgc

SEQ ID NO: 5940018 - DNA, 25 bp, Homo sapien
gatctgcagtgtgttttcaatcatg

SEQ ID NO: 5940019 - DNA, 25 bp, Homo sapien
tctgtgttcacacagaaccatccat

SEQ ID NO: 5940020 - DNA, 25 bp, Homo sapien
tgatcattaaaaaaaaaagtccaaa

SEQ ID NO: 5940021 - DNA, 25 bp, Homo sapien
gaaaaacagatctgcagtgtgtttt

SEQ ID NO: 5940022 - DNA, 25 bp, Homo sapien
ctagcccagtcactaagactctgag

SEQ ID NO: 5940023 - DNA, 25 bp, Homo sapien
gattgccactgattccaagttttct

SEQ ID NO: 5940024 - DNA, 25 bp, Homo sapien
cactcataagcttttggcttgaaga

SEQ ID NO: 5940025 - DNA, 25 bp, Homo sapien
gtctgaaaaggtgtggcttgtcctt

SEQ ID NO: 5940026 - DNA, 25 bp, Homo sapien
gtaatcccggaatctagctgctgaa

SEQ ID NO: 5940027 - DNA, 25 bp, Homo sapien
ctccttcccttcaaagaactcggag

SEQ ID NO: 5940028 - DNA, 25 bp, Homo sapien
agagacgtgagactcacacgctgtt

SEQ ID NO: 5940029 - DNA, 25 bp, Homo sapien
aactccccgtgaccgatgtcagtta

SEQ ID NO: 5940030 - DNA, 25 bp, Homo sapien
agctctgtgccttttcaaccctccc

SEQ ID NO: 5940031 - DNA, 25 bp, Homo sapien
tcgtggggctcgcctgcgtggggtt

SEQ ID NO: 5940032 - DNA, 25 bp, Homo sapien
ctatcttattatgaaggttgttttg

SEQ ID NO: 5940033 - DNA, 25 bp, Homo sapien
tggtcagttgctaaggaagtggatt

SEQ ID NO: 5940034 - DNA, 25 bp, Homo sapien
gccttcgtggggctcgcctgcgtgg

SEQ ID NO: 5940035 - DNA, 25 bp, Homo sapien
acccatttcattgctgtctacgaaa

SEQ ID NO: 5940036 - DNA, 25 bp, Homo sapien
cgaatttgtaccatagaggactgtc

SEQ ID NO: 5940037 - DNA, 25 bp, Homo sapien
cataagcttttggcttgaagaaatg

SEQ ID NO: 5940038 - DNA, 25 bp, Homo sapien
agaggactgtccgtaactactgttt

SEQ ID NO: 5940039 - DNA, 25 bp, Homo sapien
ctacttaaaaactgctttgtggcaa

SEQ ID NO: 5940040 - DNA, 25 bp, Homo sapien
ggcggctcgccttcgtggggctcgc

SEQ ID NO: 5940041 - DNA, 25 bp, Homo sapien
gatgcagtccttatacaaaaccgac

SEQ ID NO: 5940042 - DNA, 25 bp, Homo sapien
ttaagctggtgatacctggagaagt

SEQ ID NO: 5940043 - DNA, 25 bp, Homo sapien
tgtagtgtaacgaatttgtaccata

SEQ ID NO: 5940044 - DNA, 25 bp, Homo sapien
tgagagctcgggcggctcgccttcg

SEQ ID NO: 5940045 - DNA, 25 bp, Homo sapien
cctggagaagtggtcagttgctaag

SEQ ID NO: 5940046 - DNA, 25 bp, Homo sapien
ccgtaactactgtttagcttctaca

SEQ ID NO: 5940047 - DNA, 25 bp, Homo sapien
aaccgacaactgtcaccaaagctta

SEQ ID NO: 5940048 - DNA, 25 bp, Homo sapien
ttaaaaactgctttgtggcaaaaac

SEQ ID NO: 5940049 - DNA, 25 bp, Homo sapien
cttattatgaaggttgttttgcttg

SEQ ID NO: 5940050 - DNA, 25 bp, Homo sapien
cccttcaaagaactcggagaggcca

SEQ ID NO: 5940051 - DNA, 25 bp, Homo sapien
atgtttcattggctgtctgaaaagg

SEQ ID NO: 5940052 - DNA, 25 bp, Homo sapien
ccccagccgcccaccctgcttctga

SEQ ID NO: 5940053 - DNA, 25 bp, Homo sapien
ccccgaggagctctgtgccttttca

SEQ ID NO: 5940054 - DNA, 25 bp, Homo sapien
caaagcttataaaacacgatagtac

SEQ ID NO: 5940055 - DNA, 25 bp, Homo sapien
ccgacaactgtcaccaaagcttata

SEQ ID NO: 5940056 - DNA, 25 bp, Homo sapien
tgccctgtgcaacgtggcagatgtc

SEQ ID NO: 5940057 - DNA, 25 bp, Homo sapien
gctagagagaagccgcctccacagt

SEQ ID NO: 5940058 - DNA, 25 bp, Homo sapien
tgtttagcttctacacattgaaatg

SEQ ID NO: 5940059 - DNA, 25 bp, Homo sapien
gggttcgaaagtgggctgctcctgg

SEQ ID NO: 5940060 - DNA, 25 bp, Homo sapien
ctcgggcggctcgccttcgtggggc

SEQ ID NO: 5940061 - DNA, 25 bp, Homo sapien
gtttcattggctgtctgaaaaggtg

SEQ ID NO: 5940062 - DNA, 25 bp, Homo sapien
ttctgcgctctcttctccttccctt

SEQ ID NO: 5940063 - DNA, 25 bp, Homo sapien
gtgacacaacggtgacaggtagctg

SEQ ID NO: 5940064 - DNA, 25 bp, Homo sapien
gtgcaacgtggcagatgtctgagga

SEQ ID NO: 5940065 - DNA, 25 bp, Homo sapien
gcacctcacctgtatagtcgttctg

SEQ ID NO: 5940066 - DNA, 25 bp, Homo sapien
ctgtgtaatcccggaatctagctgc

SEQ ID NO: 5940067 - DNA, 25 bp, Homo sapien
cagtaggggtttctgcacctcacct

SEQ ID NO: 5940068 - DNA, 25 bp, Homo sapien
gtagctgggacctaggctatcttat

SEQ ID NO: 5940069 - DNA, 25 bp, Homo sapien
gagaggccagaaacaagactgcaat

SEQ ID NO: 5940070 - DNA, 25 bp, Homo sapien
cgaaagagacgtgagactcacacgc

SEQ ID NO: 5940071 - DNA, 25 bp, Homo sapien
cacaacggtgacaggtagctgggac

SEQ ID NO: 5940072 - DNA, 25 bp, Homo sapien
ctttgtggcaaaaaccacacctgaa

SEQ ID NO: 5940073 - DNA, 25 bp, Homo sapien
ctgtccgtaactactgtttagcttc

SEQ ID NO: 5940074 - DNA, 25 bp, Homo sapien
tgtccttcctagagagatctactta

SEQ ID NO: 5940075 - DNA, 25 bp, Homo sapien
ttcattgctgtctacgaaagagacg

SEQ ID NO: 5940076 - DNA, 25 bp, Homo sapien
gcccaccctgcttctgagagctcgg

SEQ ID NO: 5940077 - DNA, 25 bp, Homo sapien
ttgtggcaaaaaccacacctgaaga

SEQ ID NO: 5940078 - DNA, 25 bp, Homo sapien
aattgaccccgaggagctctgtgcc

SEQ ID NO: 5940079 - DNA, 25 bp, Homo sapien
ccaccctgcttctgagagctcgggc

SEQ ID NO: 5940080 - DNA, 25 bp, Homo sapien
aaaacacgatagtactgtccctctt

SEQ ID NO: 5940081 - DNA, 25 bp, Homo sapien
acaggtagctgggacctaggctatc

SEQ ID NO: 5940082 - DNA, 25 bp, Homo sapien
cacctgaagaaattttaagaatttg

SEQ ID NO: 5940083 - DNA, 25 bp, Homo sapien
ttgctgtctacgaaagagacgtgag

SEQ ID NO: 5940084 - DNA, 25 bp, Homo sapien
taagcactcataagcttttggcttg

SEQ ID NO: 5940085 - DNA, 25 bp, Homo sapien
ttcccttcaaagaactcggagaggc

SEQ ID NO: 5940086 - DNA, 25 bp, Homo sapien
ttggcccagttagtcactctgtgta

SEQ ID NO: 5940087 - DNA, 25 bp, Homo sapien
gattctgcgctctcttctccttccc

SEQ ID NO: 5940088 - DNA, 25 bp, Homo sapien
ctcacctgtatagtcgttctgcgca

SEQ ID NO: 5940089 - DNA, 25 bp, Homo sapien
tctcttctccttcccttcaaagaac

SEQ ID NO: 5940090 - DNA, 25 bp, Homo sapien
gtgatacctggagaagtggtcagtt

SEQ ID NO: 5940091 - DNA, 25 bp, Homo sapien
gaaagtgggctgctcctggattctg

SEQ ID NO: 5940092 - DNA, 25 bp, Homo sapien
gctgctcctggattctgcgctctct

SEQ ID NO: 5940093 - DNA, 25 bp, Homo sapien
gcttataaaacacgatagtactgtc

SEQ ID NO: 5940094 - DNA, 25 bp, Homo sapien
taggctatcttattatgaaggttgt

SEQ ID NO: 5940095 - DNA, 25 bp, Homo sapien
ggagctctgtgccttttcaaccctc

SEQ ID NO: 5940096 - DNA, 25 bp, Homo sapien
gggctgctcctggattctgcgctct

SEQ ID NO: 5940097 - DNA, 25 bp, Homo sapien
gtgagactcacacgctgttctcgct

SEQ ID NO: 5940098 - DNA, 25 bp, Homo sapien
aagtgggctgctcctggattctgcg

SEQ ID NO: 5940099 - DNA, 25 bp, Homo sapien
ctgaaaaggtgtggcttgtccttcc

SEQ ID NO: 5940100 - DNA, 25 bp, Homo sapien
gtggcttgtccttcctagagagatc

SEQ ID NO: 5940101 - DNA, 25 bp, Homo sapien
ctcgcctgcgtggggttcgaaagtg

SEQ ID NO: 5940102 - DNA, 25 bp, Homo sapien
gaagacacaaaactgttagtgacac

SEQ ID NO: 5940103 - DNA, 25 bp, Homo sapien
atacaaaaccgacaactgtcaccaa

SEQ ID NO: 5940104 - DNA, 25 bp, Homo sapien
cccagttagtcactctgtgtaatcc

SEQ ID NO: 5940105 - DNA, 25 bp, Homo sapien
ccgcccaccctgcttctgagagctc

SEQ ID NO: 5940106 - DNA, 25 bp, Homo sapien
cagaagacacaaaactgttagtgac

SEQ ID NO: 5940107 - DNA, 25 bp, Homo sapien
ctagagagatctacttaaaaactgc

SEQ ID NO: 5940108 - DNA, 25 bp, Homo sapien
tcacccatttcattgctgtctacga

SEQ ID NO: 5940109 - DNA, 25 bp, Homo sapien
gcttgaagaaatgtactagttgagt

SEQ ID NO: 5940110 - DNA, 25 bp, Homo sapien
agagatctacttaaaaactgctttg

SEQ ID NO: 5940111 - DNA, 25 bp, Homo sapien
aggggtttctgcacctcacctgtat

SEQ ID NO: 5940112 - DNA, 25 bp, Homo sapien
actgctttgtggcaaaaaccacacc

SEQ ID NO: 5940113 - DNA, 25 bp, Homo sapien
gactgtccgtaactactgtttagct

SEQ ID NO: 5940114 - DNA, 25 bp, Homo sapien
ggggctcgcctgcgtggggttcgaa

SEQ ID NO: 5940115 - DNA, 25 bp, Homo sapien
atgtgctagagagaagccgcctcca

SEQ ID NO: 5940116 - DNA, 25 bp, Homo sapien
tgtatatttgtgtatgtagtgtaac

SEQ ID NO: 5940117 - DNA, 25 bp, Homo sapien
ccttatacaaaaccgacaactgtca

SEQ ID NO: 5940118 - DNA, 25 bp, Homo sapien
tcaaagaactcggagaggccagaaa

SEQ ID NO: 5940119 - DNA, 25 bp, Homo sapien
gtgtggcttgtccttcctagagaga

SEQ ID NO: 5940120 - DNA, 25 bp, Homo sapien
gtccttatacaaaaccgacaactgt

SEQ ID NO: 5940121 - DNA, 25 bp, Homo sapien
ttttaagaatttggcccagttagtc

SEQ ID NO: 5940122 - DNA, 25 bp, Homo sapien
gtctgaggaatggtttaattgaccc

SEQ ID NO: 5940123 - DNA, 25 bp, Homo sapien
aagaatttggcccagttagtcactc

SEQ ID NO: 5940124 - DNA, 25 bp, Homo sapien
ggcttgtccttcctagagagatcta

SEQ ID NO: 5940125 - DNA, 25 bp, Homo sapien
tatgtagtgtaacgaatttgtacca

SEQ ID NO: 5940126 - DNA, 25 bp, Homo sapien
ccatagaggactgtccgtaactact

SEQ ID NO: 5940127 - DNA, 25 bp, Homo sapien
gaattaaaggttaatcagagagtga

SEQ ID NO: 5940128 - DNA, 25 bp, Homo sapien
agaactcggagaggccagaaacaag

SEQ ID NO: 5940129 - DNA, 25 bp, Homo sapien
atcagaagacacaaaactgttagtg

SEQ ID NO: 5940130 - DNA, 25 bp, Homo sapien
gaagccgcctccacagtcacccatt

SEQ ID NO: 5940131 - DNA, 25 bp, Homo sapien
ggccagaaacaagactgcaatgggg

SEQ ID NO: 5940132 - DNA, 25 bp, Homo sapien
aaaggtgtggcttgtccttcctaga

SEQ ID NO: 5940133 - DNA, 25 bp, Homo sapien
aaaaactgctttgtggcaaaaacca

SEQ ID NO: 5940134 - DNA, 25 bp, Homo sapien
tagtcactctgtgtaatcccggaat

SEQ ID NO: 5940135 - DNA, 25 bp, Homo sapien
cagaaacaagactgcaatggggggc

SEQ ID NO: 5940136 - DNA, 25 bp, Homo sapien
ggctcgcctgcgtggggttcgaaag

SEQ ID NO: 5940137 - DNA, 25 bp, Homo sapien
tacctggagaagtggtcagttgcta

SEQ ID NO: 5940138 - DNA, 25 bp, Homo sapien
tactgtccctcttttctgaaccatc

SEQ ID NO: 5940139 - DNA, 25 bp, Homo sapien
aaccctccccagccgcccaccctgc

SEQ ID NO: 5940140 - DNA, 25 bp, Homo sapien
ctccccagccgcccaccctgcttct

SEQ ID NO: 5940141 - DNA, 25 bp, Homo sapien
ctgtgccttttcaaccctccccagc

SEQ ID NO: 5940142 - DNA, 25 bp, Homo sapien
tgtgtatgtagtgtaacgaatttgt

SEQ ID NO: 5940143 - DNA, 25 bp, Homo sapien
caactgtcaccaaagcttataaaac

SEQ ID NO: 5940144 - DNA, 25 bp, Homo sapien
ctaaggaagtggatttcccagtagg

SEQ ID NO: 5940145 - DNA, 25 bp, Homo sapien
gtgtaacgaatttgtaccatagagg

SEQ ID NO: 5940146 - DNA, 25 bp, Homo sapien
gaagaaattttaagaatttggccca

SEQ ID NO: 5940147 - DNA, 25 bp, Homo sapien
cttttctgaaccatcagaagacaca

SEQ ID NO: 5940148 - DNA, 25 bp, Homo sapien
tttagcttctacacattgaaatgta

SEQ ID NO: 5940149 - DNA, 25 bp, Homo sapien
agtggtcagttgctaaggaagtgga

SEQ ID NO: 5940150 - DNA, 25 bp, Homo sapien
ctgaggaatggtttaattgaccccg

SEQ ID NO: 5940151 - DNA, 25 bp, Homo sapien
gccttttcaaccctccccagccgcc

SEQ ID NO: 5940152 - DNA, 25 bp, Homo sapien
tttctccccagtattaagcactcat

SEQ ID NO: 5940153 - DNA, 25 bp, Homo sapien
tagtgtaacgaatttgtaccataga

SEQ ID NO: 5940154 - DNA, 25 bp, Homo sapien
tccccagtattaagcactcataagc

SEQ ID NO: 5940155 - DNA, 25 bp, Homo sapien
agagatgtgctagagagaagccgcc

SEQ ID NO: 5940156 - DNA, 25 bp, Homo sapien
ggaatggtttaattgaccccgagga

SEQ ID NO: 5940157 - DNA, 25 bp, Homo sapien
gggacctaggctatcttattatgaa

SEQ ID NO: 5940158 - DNA, 25 bp, Homo sapien
tgctttgtggcaaaaaccacacctg

SEQ ID NO: 5940159 - DNA, 25 bp, Homo sapien
ataaaacacgatagtactgtccctc

SEQ ID NO: 5940160 - DNA, 25 bp, Homo sapien
ttggctgtctgaaaaggtgtggctt

SEQ ID NO: 5940161 - DNA, 25 bp, Homo sapien
atgtctgaggaatggtttaattgac

SEQ ID NO: 5940162 - DNA, 25 bp, Homo sapien
gaagagatgtgctagagagaagccg

SEQ ID NO: 5940163 - DNA, 25 bp, Homo sapien
gttgttttgcttgttgtatatttgt

SEQ ID NO: 5940164 - DNA, 25 bp, Homo sapien
gtggcaaaaaccacacctgaagaaa

SEQ ID NO: 5940165 - DNA, 25 bp, Homo sapien
tgacaggtagctgggacctaggcta

SEQ ID NO: 5940166 - DNA, 25 bp, Homo sapien
caacggtgacaggtagctgggacct

SEQ ID NO: 5940167 - DNA, 25 bp, Homo sapien
gaagtcttgcgaagtaaactccccg

SEQ ID NO: 5940168 - DNA, 25 bp, Homo sapien
gtgtaatcccggaatctagctgctg

SEQ ID NO: 5940169 - DNA, 25 bp, Homo sapien
ctgaagtcttgcgaagtaaactccc

SEQ ID NO: 5940170 - DNA, 25 bp, Homo sapien
tctagctgctgaagtcttgcgaagt

SEQ ID NO: 5940171 - DNA, 25 bp, Homo sapien
gctggtgatacctggagaagtggtc

SEQ ID NO: 5940172 - DNA, 25 bp, Homo sapien
aggtagctgggacctaggctatctt

SEQ ID NO: 5940173 - DNA, 25 bp, Homo sapien
ctgcacctcacctgtatagtcgttc

SEQ ID NO: 5940174 - DNA, 25 bp, Homo sapien
cattggctgtctgaaaaggtgtggc

SEQ ID NO: 5940175 - DNA, 25 bp, Homo sapien
ctgtctgaaaaggtgtggcttgtcc

SEQ ID NO: 5940176 - DNA, 25 bp, Homo sapien
gaagaaatgtactagttgagtgaat

SEQ ID NO: 5940177 - DNA, 25 bp, Homo sapien
aacacgatagtactgtccctctttt

SEQ ID NO: 5940178 - DNA, 25 bp, Homo sapien
cggctcgccttcgtggggctcgcct

SEQ ID NO: 5940179 - DNA, 25 bp, Homo sapien
gatgtgccctgtgcaacgtggcaga

SEQ ID NO: 5940180 - DNA, 25 bp, Homo sapien
gaagtggtcagttgctaaggaagtg

SEQ ID NO: 5940181 - DNA, 25 bp, Homo sapien
cagttgctaaggaagtggatttccc

SEQ ID NO: 5940182 - DNA, 25 bp, Homo sapien
agtactgtccctcttttctgaacca

SEQ ID NO: 5940183 - DNA, 25 bp, Homo sapien
tgtgccctgtgcaacgtggcagatg

SEQ ID NO: 5940184 - DNA, 25 bp, Homo sapien
tttctgaaccatcagaagacacaaa

SEQ ID NO: 5940185 - DNA, 25 bp, Homo sapien
ttgaagaaatgtactagttgagtga

SEQ ID NO: 5940186 - DNA, 25 bp, Homo sapien
ggctatcttattatgaaggttgttt

SEQ ID NO: 5940187 - DNA, 25 bp, Homo sapien
aggactgtccgtaactactgtttag

SEQ ID NO: 5940188 - DNA, 25 bp, Homo sapien
gtgctagagagaagccgcctccaca

SEQ ID NO: 5940189 - DNA, 25 bp, Homo sapien
gtcactctgtgtaatcccggaatct

SEQ ID NO: 5940190 - DNA, 25 bp, Homo sapien
ttctgcacctcacctgtatagtcgt

SEQ ID NO: 5940191 - DNA, 25 bp, Homo sapien
aaatgtactagttgagtgaattaaa

SEQ ID NO: 5940192 - DNA, 25 bp, Homo sapien
acggtgacaggtagctgggacctag

SEQ ID NO: 5940193 - DNA, 25 bp, Homo sapien
attaaaggttaatcagagagtgagc

SEQ ID NO: 5940194 - DNA, 25 bp, Homo sapien
aaaactgttagtgacacaacggtga

SEQ ID NO: 5940195 - DNA, 25 bp, Homo sapien
tgctcctggattctgcgctctcttc

SEQ ID NO: 5940196 - DNA, 25 bp, Homo sapien
acgtgagactcacacgctgttctcg

SEQ ID NO: 5940197 - DNA, 25 bp, Homo sapien
ttatgaaggttgttttgcttgttgt

SEQ ID NO: 5940198 - DNA, 25 bp, Homo sapien
taaaggttaatcagagagtgagcag

SEQ ID NO: 5940199 - DNA, 25 bp, Homo sapien
cgggcggctcgccttcgtggggctc

SEQ ID NO: 5940200 - DNA, 25 bp, Homo sapien
gcctccacagtcacccatttcattg

SEQ ID NO: 5940201 - DNA, 25 bp, Homo sapien
cagtccttatacaaaaccgacaact

SEQ ID NO: 5940202 - DNA, 25 bp, Homo sapien
atttcattgctgtctacgaaagaga

SEQ ID NO: 5940203 - DNA, 25 bp, Homo sapien
ttaattgaccccgaggagctctgtg

SEQ ID NO: 5940204 - DNA, 25 bp, Homo sapien
agtcttgcgaagtaaactccccgtg

SEQ ID NO: 5940205 - DNA, 25 bp, Homo sapien
gcgctctcttctccttcccttcaaa

SEQ ID NO: 5940206 - DNA, 25 bp, Homo sapien
gttcgaaagtgggctgctcctggat

SEQ ID NO: 5940207 - DNA, 25 bp, Homo sapien
ccatttcattgctgtctacgaaaga

SEQ ID NO: 5940208 - DNA, 25 bp, Homo sapien
ccctcttttctgaaccatcagaaga

SEQ ID NO: 5940209 - DNA, 25 bp, Homo sapien
ctctgtgccttttcaaccctcccca

SEQ ID NO: 5940210 - DNA, 25 bp, Homo sapien
gggtttctgcacctcacctgtatag

SEQ ID NO: 5940211 - DNA, 25 bp, Homo sapien
gtagatgtttcattggctgtctgaa

SEQ ID NO: 5940212 - DNA, 25 bp, Homo sapien
tgttttgcttgttgtatatttgtgt

SEQ ID NO: 5940213 - DNA, 25 bp, Homo sapien
ctcttttctgaaccatcagaagaca

SEQ ID NO: 5940214 - DNA, 25 bp, Homo sapien
cacgatagtactgtccctcttttct

SEQ ID NO: 5940215 - DNA, 25 bp, Homo sapien
gttgctaaggaagtggatttcccag

SEQ ID NO: 5940216 - DNA, 25 bp, Homo sapien
atttcccagtaggggtttctgcacc

SEQ ID NO: 5940217 - DNA, 25 bp, Homo sapien
ctcacacgctgttctcgctttctcc

SEQ ID NO: 5940218 - DNA, 25 bp, Homo sapien
agatctacttaaaaactgctttgtg

SEQ ID NO: 5940219 - DNA, 25 bp, Homo sapien
cacgctgttctcgctttctccccag

SEQ ID NO: 5940220 - DNA, 25 bp, Homo sapien
agagagatctacttaaaaactgctt

SEQ ID NO: 5940221 - DNA, 25 bp, Homo sapien
ctcctggattctgcgctctcttctc

SEQ ID NO: 5940222 - DNA, 25 bp, Homo sapien
tcgaaagtgggctgctcctggattc

SEQ ID NO: 5940223 - DNA, 25 bp, Homo sapien
gaaggttgttttgcttgttgtatat

SEQ ID NO: 5940224 - DNA, 25 bp, Homo sapien
ccatcagaagacacaaaactgttag

SEQ ID NO: 5940225 - DNA, 25 bp, Homo sapien
tagttgagtgaattaaaggttaatc

SEQ ID NO: 5940226 - DNA, 25 bp, Homo sapien
tctgaaccatcagaagacacaaaac

SEQ ID NO: 5940227 - DNA, 25 bp, Homo sapien
gatgtcagttaagctggtgatacct

SEQ ID NO: 5940228 - DNA, 25 bp, Homo sapien
ctgttagtgacacaacggtgacagg

SEQ ID NO: 5940229 - DNA, 25 bp, Homo sapien
accctgcttctgagagctcgggcgg

SEQ ID NO: 5940230 - DNA, 25 bp, Homo sapien
gtgggctgctcctggattctgcgct

SEQ ID NO: 5940231 - DNA, 25 bp, Homo sapien
ggctgtctgaaaaggtgtggcttgt

SEQ ID NO: 5940232 - DNA, 25 bp, Homo sapien
tgagcagggatgtgccctgtgcaac

SEQ ID NO: 5940233 - DNA, 25 bp, Homo sapien
tggattctgcgctctcttctccttc

SEQ ID NO: 5940234 - DNA, 25 bp, Homo sapien
acaaaactgttagtgacacaacggt

SEQ ID NO: 5940235 - DNA, 25 bp, Homo sapien
aactactgtttagcttctacacatt

SEQ ID NO: 5940236 - DNA, 25 bp, Homo sapien
agtaaactccccgtgaccgatgtca

SEQ ID NO: 5940237 - DNA, 25 bp, Homo sapien
ctgcgctctcttctccttcccttca

SEQ ID NO: 5940238 - DNA, 25 bp, Homo sapien
tgtatgtagtgtaacgaatttgtac

SEQ ID NO: 5940239 - DNA, 25 bp, Homo sapien
tgtctacgaaagagacgtgagactc

SEQ ID NO: 5940240 - DNA, 25 bp, Homo sapien
gctttctccccagtattaagcactc

SEQ ID NO: 5940241 - DNA, 25 bp, Homo sapien
gagaagccgcctccacagtcaccca

SEQ ID NO: 5940242 - DNA, 25 bp, Homo sapien
cctgcttctgagagctcgggcggct

SEQ ID NO: 5940243 - DNA, 25 bp, Homo sapien
tgtcaccaaagcttataaaacacga

SEQ ID NO: 5940244 - DNA, 25 bp, Homo sapien
ttgttgtatatttgtgtatgtagtg

SEQ ID NO: 5940245 - DNA, 25 bp, Homo sapien
cactctgtgtaatcccggaatctag

SEQ ID NO: 5940246 - DNA, 25 bp, Homo sapien
gcagatgtctgaggaatggtttaat

SEQ ID NO: 5940247 - DNA, 25 bp, Homo sapien
tattatgaaggttgttttgcttgtt

SEQ ID NO: 5940248 - DNA, 25 bp, Homo sapien
gaggccagaaacaagactgcaatgg

SEQ ID NO: 5940249 - DNA, 25 bp, Homo sapien
tcgctttctccccagtattaagcac

SEQ ID NO: 5940250 - DNA, 25 bp, Homo sapien
aactgttagtgacacaacggtgaca

SEQ ID NO: 5940251 - DNA, 25 bp, Homo sapien
tttggcttgaagaaatgtactagtt

SEQ ID NO: 5940252 - DNA, 25 bp, Homo sapien
gtccctcttttctgaaccatcagaa

SEQ ID NO: 5940253 - DNA, 25 bp, Homo sapien
gcttgttgtatatttgtgtatgtag

SEQ ID NO: 5940254 - DNA, 25 bp, Homo sapien
ttttgcttgttgtatatttgtgtat

SEQ ID NO: 5940255 - DNA, 25 bp, Homo sapien
agcttttggcttgaagaaatgtact

SEQ ID NO: 5940256 - DNA, 25 bp, Homo sapien
cttcctagagagatctacttaaaaa

SEQ ID NO: 5940257 - DNA, 25 bp, Homo sapien
gtaggggtttctgcacctcacctgt

SEQ ID NO: 5940258 - DNA, 25 bp, Homo sapien
acacaaaactgttagtgacacaacg

SEQ ID NO: 5940259 - DNA, 25 bp, Homo sapien
ttctccttcccttcaaagaactcgg

SEQ ID NO: 5940260 - DNA, 25 bp, Homo sapien
gtggggctcgcctgcgtggggttcg

SEQ ID NO: 5940261 - DNA, 25 bp, Homo sapien
accaaagcttataaaacacgatagt

SEQ ID NO: 5940262 - DNA, 25 bp, Homo sapien
ctctgtgtaatcccggaatctagct

SEQ ID NO: 5940263 - DNA, 25 bp, Homo sapien
gtaactactgtttagcttctacaca

SEQ ID NO: 5940264 - DNA, 25 bp, Homo sapien
agcactcataagcttttggcttgaa

SEQ ID NO: 5940265 - DNA, 25 bp, Homo sapien
gaccgatgtcagttaagctggtgat

SEQ ID NO: 5940266 - DNA, 25 bp, Homo sapien
tagtgacacaacggtgacaggtagc

SEQ ID NO: 5940267 - DNA, 25 bp, Homo sapien
atcttattatgaaggttgttttgct

SEQ ID NO: 5940268 - DNA, 25 bp, Homo sapien
gacacaacggtgacaggtagctggg

SEQ ID NO: 5940269 - DNA, 25 bp, Homo sapien
cttctgagagctcgggcggctcgcc

SEQ ID NO: 5940270 - DNA, 25 bp, Homo sapien
ccagccgcccaccctgcttctgaga

SEQ ID NO: 5940271 - DNA, 25 bp, Homo sapien
tagctgctgaagtcttgcgaagtaa

SEQ ID NO: 5940272 - DNA, 25 bp, Homo sapien
ttgcttgttgtatatttgtgtatgt

SEQ ID NO: 5940273 - DNA, 25 bp, Homo sapien
tggcagatgtctgaggaatggttta

SEQ ID NO: 5940274 - DNA, 25 bp, Homo sapien
tcagttaagctggtgatacctggag

SEQ ID NO: 5940275 - DNA, 25 bp, Homo sapien
cagttagtcactctgtgtaatcccg

SEQ ID NO: 5940276 - DNA, 25 bp, Homo sapien
gcggggggagggatgatgcagtcct

SEQ ID NO: 5940277 - DNA, 25 bp, Homo sapien
aactcggagaggccagaaacaagac

SEQ ID NO: 5940278 - DNA, 25 bp, Homo sapien
tggagaagtggtcagttgctaagga

SEQ ID NO: 5940279 - DNA, 25 bp, Homo sapien
gttagtcactctgtgtaatcccgga

SEQ ID NO: 5940280 - DNA, 25 bp, Homo sapien
ctcataagcttttggcttgaagaaa

SEQ ID NO: 5940281 - DNA, 25 bp, Homo sapien
gaggaatggtttaattgaccccgag

SEQ ID NO: 5940282 - DNA, 25 bp, Homo sapien
gtcagttgctaaggaagtggatttc

SEQ ID NO: 5940283 - DNA, 25 bp, Homo sapien
cttcaaagaactcggagaggccaga

SEQ ID NO: 5940284 - DNA, 25 bp, Homo sapien
aaccacacctgaagaaattttaaga

SEQ ID NO: 5940285 - DNA, 25 bp, Homo sapien
gtgaccgatgtcagttaagctggtg

SEQ ID NO: 5940286 - DNA, 25 bp, Homo sapien
tgtaccatagaggactgtccgtaac

SEQ ID NO: 5940287 - DNA, 25 bp, Homo sapien
tttcaaccctccccagccgcccacc

SEQ ID NO: 5940288 - DNA, 25 bp, Homo sapien
aaagaactcggagaggccagaaaca

SEQ ID NO: 5940289 - DNA, 25 bp, Homo sapien
ggggagggatgatgcagtccttata

SEQ ID NO: 5940290 - DNA, 25 bp, Homo sapien
gtattaagcactcataagcttttgg

SEQ ID NO: 5940291 - DNA, 25 bp, Homo sapien
tcaccaaagcttataaaacacgata

SEQ ID NO: 5940292 - DNA, 25 bp, Homo sapien
gacaactgtcaccaaagcttataaa

SEQ ID NO: 5940293 - DNA, 25 bp, Homo sapien
tatttgtgtatgtagtgtaacgaat

SEQ ID NO: 5940294 - DNA, 25 bp, Homo sapien
atgtagatgtttcattggctgtctg

SEQ ID NO: 5940295 - DNA, 25 bp, Homo sapien
ggcaaaaaccacacctgaagaaatt

SEQ ID NO: 5940296 - DNA, 25 bp, Homo sapien
agatgtttcattggctgtctgaaaa

SEQ ID NO: 5940297 - DNA, 25 bp, Homo sapien
ccgtgaccgatgtcagttaagctgg

SEQ ID NO: 5940298 - DNA, 25 bp, Homo sapien
ccgaggagctctgtgccttttcaac

SEQ ID NO: 5940299 - DNA, 25 bp, Homo sapien
ggcccagttagtcactctgtgtaat

SEQ ID NO: 5940300 - DNA, 25 bp, Homo sapien
tcccggaatctagctgctgaagtct

SEQ ID NO: 5940301 - DNA, 25 bp, Homo sapien
aggttgttttgcttgttgtatattt

SEQ ID NO: 5940302 - DNA, 25 bp, Homo sapien
aaatgtagatgtttcattggctgtc

SEQ ID NO: 5940303 - DNA, 25 bp, Homo sapien
gtgaattaaaggttaatcagagagt

SEQ ID NO: 5940304 - DNA, 25 bp, Homo sapien
aaactgctttgtggcaaaaaccaca

SEQ ID NO: 5940305 - DNA, 25 bp, Homo sapien
agcagggatgtgccctgtgcaacgt

SEQ ID NO: 5940306 - DNA, 25 bp, Homo sapien
tccttcctagagagatctacttaaa

SEQ ID NO: 5940307 - DNA, 25 bp, Homo sapien
agtcacccatttcattgctgtctac

SEQ ID NO: 5940308 - DNA, 25 bp, Homo sapien
ctgtgcaacgtggcagatgtctgag

SEQ ID NO: 5940309 - DNA, 25 bp, Homo sapien
tctacgaaagagacgtgagactcac

SEQ ID NO: 5940310 - DNA, 25 bp, Homo sapien
ccgatgtcagttaagctggtgatac

SEQ ID NO: 5940311 - DNA, 25 bp, Homo sapien
ggagggatgatgcagtccttataca

SEQ ID NO: 5940312 - DNA, 25 bp, Homo sapien
agaaatgtactagttgagtgaatta

SEQ ID NO: 5940313 - DNA, 25 bp, Homo sapien
ctactgtttagcttctacacattga

SEQ ID NO: 5940314 - DNA, 25 bp, Homo sapien
gcttctacacattgaaatgtagatg

SEQ ID NO: 5940315 - DNA, 25 bp, Homo sapien
tctgagagctcgggcggctcgcctt

SEQ ID NO: 5940316 - DNA, 25 bp, Homo sapien
agctgggacctaggctatcttatta

SEQ ID NO: 5940317 - DNA, 25 bp, Homo sapien
aatcagagagtgagcagggatgtgc

SEQ ID NO: 5940318 - DNA, 25 bp, Homo sapien
tgtcagttaagctggtgatacctgg

SEQ ID NO: 5940319 - DNA, 25 bp, Homo sapien
gcgaagtaaactccccgtgaccgat

SEQ ID NO: 5940320 - DNA, 25 bp, Homo sapien
gctcgccttcgtggggctcgcctgc

SEQ ID NO: 5940321 - DNA, 25 bp, Homo sapien
gtactagttgagtgaattaaaggtt

SEQ ID NO: 5940322 - DNA, 25 bp, Homo sapien
atttggcccagttagtcactctgtg

SEQ ID NO: 5940323 - DNA, 25 bp, Homo sapien
acaaaaccgacaactgtcaccaaag

SEQ ID NO: 5940324 - DNA, 25 bp, Homo sapien
gctgctgaagtcttgcgaagtaaac

SEQ ID NO: 5940325 - DNA, 25 bp, Homo sapien
agggatgatgcagtccttatacaaa

SEQ ID NO: 5940326 - DNA, 25 bp, Homo sapien
cagggatgtgccctgtgcaacgtgg

SEQ ID NO: 5940327 - DNA, 25 bp, Homo sapien
cctaggctatcttattatgaaggtt

SEQ ID NO: 5940328 - DNA, 25 bp, Homo sapien
ctacacattgaaatgtagatgtttc

SEQ ID NO: 5940329 - DNA, 25 bp, Homo sapien
ccctccccagccgcccaccctgctt

SEQ ID NO: 5940330 - DNA, 25 bp, Homo sapien
atagaggactgtccgtaactactgt

SEQ ID NO: 5940331 - DNA, 25 bp, Homo sapien
ccctgtgcaacgtggcagatgtctg

SEQ ID NO: 5940332 - DNA, 25 bp, Homo sapien
cgctgttctcgctttctccccagta

SEQ ID NO: 5940333 - DNA, 25 bp, Homo sapien
tcaaccctccccagccgcccaccct

SEQ ID NO: 5940334 - DNA, 25 bp, Homo sapien
cgcctgcgtggggttcgaaagtggg

SEQ ID NO: 5940335 - DNA, 25 bp, Homo sapien
actgtttagcttctacacattgaaa

SEQ ID NO: 5940336 - DNA, 25 bp, Homo sapien
ggatgatgcagtccttatacaaaac

SEQ ID NO: 5940337 - DNA, 25 bp, Homo sapien
ctgttctcgctttctccccagtatt

SEQ ID NO: 5940338 - DNA, 25 bp, Homo sapien
gaatttggcccagttagtcactctg

SEQ ID NO: 5940339 - DNA, 25 bp, Homo sapien
gacctaggctatcttattatgaagg

SEQ ID NO: 5940340 - DNA, 25 bp, Homo sapien
ttcattggctgtctgaaaaggtgtg

SEQ ID NO: 5940341 - DNA, 25 bp, Homo sapien
ctcggagaggccagaaacaagactg

SEQ ID NO: 5940342 - DNA, 25 bp, Homo sapien
ggaatctagctgctgaagtcttgcg

SEQ ID NO: 5940343 - DNA, 25 bp, Homo sapien
agatgtgctagagagaagccgcctc

SEQ ID NO: 5940344 - DNA, 25 bp, Homo sapien
cttgtccttcctagagagatctact

SEQ ID NO: 5940345 - DNA, 25 bp, Homo sapien
atgtactagttgagtgaattaaagg

SEQ ID NO: 5940346 - DNA, 25 bp, Homo sapien
gagaagtggtcagttgctaaggaag

SEQ ID NO: 5940347 - DNA, 25 bp, Homo sapien
ttaatcagagagtgagcagggatgt

SEQ ID NO: 5940348 - DNA, 25 bp, Homo sapien
acttaaaaactgctttgtggcaaaa

SEQ ID NO: 5940349 - DNA, 25 bp, Homo sapien
aagcttataaaacacgatagtactg

SEQ ID NO: 5940350 - DNA, 25 bp, Homo sapien
tcttgcgaagtaaactccccgtgac

SEQ ID NO: 5940351 - DNA, 25 bp, Homo sapien
gtgccttttcaaccctccccagccg

SEQ ID NO: 5940352 - DNA, 25 bp, Homo sapien
gaccccgaggagctctgtgcctttt

SEQ ID NO: 5940353 - DNA, 25 bp, Homo sapien
ctgaagaaattttaagaatttggcc

SEQ ID NO: 5940354 - DNA, 25 bp, Homo sapien
acctcacctgtatagtcgttctgcg

SEQ ID NO: 5940355 - DNA, 25 bp, Homo sapien
gtttaattgaccccgaggagctctg

SEQ ID NO: 5940356 - DNA, 25 bp, Homo sapien
tcgccttcgtggggctcgcctgcgt

SEQ ID NO: 5940357 - DNA, 25 bp, Homo sapien
acacattgaaatgtagatgtttcat

SEQ ID NO: 5940358 - DNA, 25 bp, Homo sapien
aacgtggcagatgtctgaggaatgg

SEQ ID NO: 5940359 - DNA, 25 bp, Homo sapien
agacacaaaactgttagtgacacaa

SEQ ID NO: 5940360 - DNA, 25 bp, Homo sapien
tgctaaggaagtggatttcccagta

SEQ ID NO: 5940361 - DNA, 25 bp, Homo sapien
ttataaaacacgatagtactgtccc

SEQ ID NO: 5940362 - DNA, 25 bp, Homo sapien
taagcttttggcttgaagaaatgta

SEQ ID NO: 5940363 - DNA, 25 bp, Homo sapien
gactcacacgctgttctcgctttct

SEQ ID NO: 5940364 - DNA, 25 bp, Homo sapien
agtgagcagggatgtgccctgtgca

SEQ ID NO: 5940365 - DNA, 25 bp, Homo sapien
ccccgtgaccgatgtcagttaagct

SEQ ID NO: 5940366 - DNA, 25 bp, Homo sapien
aaagagacgtgagactcacacgctg

SEQ ID NO: 5940367 - DNA, 25 bp, Homo sapien
tgctgaagtcttgcgaagtaaactc

SEQ ID NO: 5940368 - DNA, 25 bp, Homo sapien
aaaaccgacaactgtcaccaaagct

SEQ ID NO: 5940369 - DNA, 25 bp, Homo sapien
tggcttgaagaaatgtactagttga

SEQ ID NO: 5940370 - DNA, 25 bp, Homo sapien
tacgaaagagacgtgagactcacac

SEQ ID NO: 5940371 - DNA, 25 bp, Homo sapien
tggggttcgaaagtgggctgctcct

SEQ ID NO: 5940372 - DNA, 25 bp, Homo sapien
ttatacaaaaccgacaactgtcacc

SEQ ID NO: 5940373 - DNA, 25 bp, Homo sapien
ggttaatcagagagtgagcagggat

SEQ ID NO: 5940374 - DNA, 25 bp, Homo sapien
gagactcacacgctgttctcgcttt

SEQ ID NO: 5940375 - DNA, 25 bp, Homo sapien
gcaacgtggcagatgtctgaggaat

SEQ ID NO: 5940376 - DNA, 25 bp, Homo sapien
ccttcccttcaaagaactcggagag

SEQ ID NO: 5940377 - DNA, 25 bp, Homo sapien
tttgtgtatgtagtgtaacgaattt

SEQ ID NO: 5940378 - DNA, 25 bp, Homo sapien
acattgaaatgtagatgtttcattg

SEQ ID NO: 5940379 - DNA, 25 bp, Homo sapien
ttgcgaagtaaactccccgtgaccg

SEQ ID NO: 5940380 - DNA, 25 bp, Homo sapien
aaggttaatcagagagtgagcaggg

SEQ ID NO: 5940381 - DNA, 25 bp, Homo sapien
cctgcgtggggttcgaaagtgggct

SEQ ID NO: 5940382 - DNA, 25 bp, Homo sapien
aagctggtgatacctggagaagtgg

SEQ ID NO: 5940383 - DNA, 25 bp, Homo sapien
cggagaggccagaaacaagactgca

SEQ ID NO: 5940384 - DNA, 25 bp, Homo sapien
gaaaaggtgtggcttgtccttccta

SEQ ID NO: 5940385 - DNA, 25 bp, Homo sapien
tatatttgtgtatgtagtgtaacga

SEQ ID NO: 5940386 - DNA, 25 bp, Homo sapien
aatggtttaattgaccccgaggagc

SEQ ID NO: 5940387 - DNA, 25 bp, Homo sapien
aatttgtaccatagaggactgtccg

SEQ ID NO: 5940388 - DNA, 25 bp, Homo sapien
cacacgctgttctcgctttctcccc

SEQ ID NO: 5940389 - DNA, 25 bp, Homo sapien
agccgcctccacagtcacccatttc

SEQ ID NO: 5940390 - DNA, 25 bp, Homo sapien
tgcttctgagagctcgggcggctcg

SEQ ID NO: 5940391 - DNA, 25 bp, Homo sapien
ggggggagggatgatgcagtcctta

SEQ ID NO: 5940392 - DNA, 25 bp, Homo sapien
cgtggcagatgtctgaggaatggtt

SEQ ID NO: 5940393 - DNA, 25 bp, Homo sapien
ttcccagtaggggtttctgcacctc

SEQ ID NO: 5940394 - DNA, 25 bp, Homo sapien
tggtttaattgaccccgaggagctc

SEQ ID NO: 5940395 - DNA, 25 bp, Homo sapien
agagctcgggcggctcgccttcgtg

SEQ ID NO: 5940396 - DNA, 25 bp, Homo sapien
aatcccggaatctagctgctgaagt

SEQ ID NO: 5940397 - DNA, 25 bp, Homo sapien
tgaaccatcagaagacacaaaactg

SEQ ID NO: 5940398 - DNA, 25 bp, Homo sapien
gatacctggagaagtggtcagttgc

SEQ ID NO: 5940399 - DNA, 25 bp, Homo sapien
tcctagagagatctacttaaaaact

SEQ ID NO: 5940400 - DNA, 25 bp, Homo sapien
cttttcaaccctccccagccgccca

SEQ ID NO: 5940401 - DNA, 25 bp, Homo sapien
ctccacagtcacccatttcattgct

SEQ ID NO: 5940402 - DNA, 25 bp, Homo sapien
agacgtgagactcacacgctgttct

SEQ ID NO: 5940403 - DNA, 25 bp, Homo sapien
ctccccgtgaccgatgtcagttaag

SEQ ID NO: 5940404 - DNA, 25 bp, Homo sapien
taccatagaggactgtccgtaacta

SEQ ID NO: 5940405 - DNA, 25 bp, Homo sapien
gtggatttcccagtaggggtttctg

SEQ ID NO: 5940406 - DNA, 25 bp, Homo sapien
cttcgtggggctcgcctgcgtgggg

SEQ ID NO: 5940407 - DNA, 25 bp, Homo sapien
atgaaggttgttttgcttgttgtat

SEQ ID NO: 5940408 - DNA, 25 bp, Homo sapien
gagtgaattaaaggttaatcagaga

SEQ ID NO: 5940409 - DNA, 25 bp, Homo sapien
tctcgctttctccccagtattaagc

SEQ ID NO: 5940410 - DNA, 25 bp, Homo sapien
ccacacctgaagaaattttaagaat

SEQ ID NO: 5940411 - DNA, 25 bp, Homo sapien
gtttctgcacctcacctgtatagtc

SEQ ID NO: 5940412 - DNA, 25 bp, Homo sapien
aatctagctgctgaagtcttgcgaa

SEQ ID NO: 5940413 - DNA, 25 bp, Homo sapien
cctggattctgcgctctcttctcct

SEQ ID NO: 5940414 - DNA, 25 bp, Homo sapien
cccagtaggggtttctgcacctcac

SEQ ID NO: 5940415 - DNA, 25 bp, Homo sapien
cgtggggttcgaaagtgggctgctc

SEQ ID NO: 5940416 - DNA, 25 bp, Homo sapien
tggtgatacctggagaagtggtcag

SEQ ID NO: 5940417 - DNA, 25 bp, Homo sapien
attaagcactcataagcttttggct

SEQ ID NO: 5940418 - DNA, 25 bp, Homo sapien
gttagtgacacaacggtgacaggta

SEQ ID NO: 5940419 - DNA, 25 bp, Homo sapien
gggatgtgccctgtgcaacgtggca

SEQ ID NO: 5940420 - DNA, 25 bp, Homo sapien
tgcgtggggttcgaaagtgggctgc

SEQ ID NO: 5940421 - DNA, 25 bp, Homo sapien
agccgcccaccctgcttctgagagc

SEQ ID NO: 5940422 - DNA, 25 bp, Homo sapien
tgaaatgtagatgtttcattggctg

SEQ ID NO: 5940423 - DNA, 25 bp, Homo sapien
ttgaccccgaggagctctgtgcctt

SEQ ID NO: 5940424 - DNA, 25 bp, Homo sapien
taaactccccgtgaccgatgtcagt

SEQ ID NO: 5940425 - DNA, 25 bp, Homo sapien
acagtcacccatttcattgctgtct

SEQ ID NO: 5940426 - DNA, 25 bp, Homo sapien
cattgctgtctacgaaagagacgtg

SEQ ID NO: 5940427 - DNA, 25 bp, Homo sapien
attgaaatgtagatgtttcattggc

SEQ ID NO: 5940428 - DNA, 25 bp, Homo sapien
gctgtctacgaaagagacgtgagac

SEQ ID NO: 5940429 - DNA, 25 bp, Homo sapien
gtccgtaactactgtttagcttcta

SEQ ID NO: 5940430 - DNA, 25 bp, Homo sapien
actgtcaccaaagcttataaaacac

SEQ ID NO: 5940431 - DNA, 25 bp, Homo sapien
agctcgggcggctcgccttcgtggg

SEQ ID NO: 5940432 - DNA, 25 bp, Homo sapien
agagtgagcagggatgtgccctgtg

SEQ ID NO: 5940433 - DNA, 25 bp, Homo sapien
tgcagtccttatacaaaaccgacaa

SEQ ID NO: 5940434 - DNA, 25 bp, Homo sapien
tagcttctacacattgaaatgtaga

SEQ ID NO: 5940435 - DNA, 25 bp, Homo sapien
aggtgtggcttgtccttcctagaga

SEQ ID NO: 5940436 - DNA, 25 bp, Homo sapien
gaaacaagactgcaatggggggcgg

SEQ ID NO: 5940437 - DNA, 25 bp, Homo sapien
tcagagagtgagcagggatgtgccc

SEQ ID NO: 5940438 - DNA, 25 bp, Homo sapien
ggtgacaggtagctgggacctaggc

SEQ ID NO: 5940439 - DNA, 25 bp, Homo sapien
tctccccagtattaagcactcataa

SEQ ID NO: 5940440 - DNA, 25 bp, Homo sapien
ctgtccctcttttctgaaccatcag

SEQ ID NO: 5940441 - DNA, 25 bp, Homo sapien
cttttggcttgaagaaatgtactag

SEQ ID NO: 5940442 - DNA, 25 bp, Homo sapien
gtaacgaatttgtaccatagaggac

SEQ ID NO: 5940443 - DNA, 25 bp, Homo sapien
ctgggacctaggctatcttattatg

SEQ ID NO: 5940444 - DNA, 25 bp, Homo sapien
ttaagaatttggcccagttagtcac

SEQ ID NO: 5940445 - DNA, 25 bp, Homo sapien
ccacagtcacccatttcattgctgt

SEQ ID NO: 5940446 - DNA, 25 bp, Homo sapien
cgatagtactgtccctcttttctga

SEQ ID NO: 5940447 - DNA, 25 bp, Homo sapien
agttaagctggtgatacctggagaa

SEQ ID NO: 5940448 - DNA, 25 bp, Homo sapien
aaccatcagaagacacaaaactgtt

SEQ ID NO: 5940449 - DNA, 25 bp, Homo sapien
agatgtctgaggaatggtttaattg

SEQ ID NO: 5940450 - DNA, 25 bp, Homo sapien
cccagtattaagcactcataagctt

SEQ ID NO: 5940451 - DNA, 25 bp, Homo sapien
aacgaatttgtaccatagaggactg

SEQ ID NO: 5940452 - DNA, 25 bp, Homo sapien
ccgcctccacagtcacccatttcat

SEQ ID NO: 5940453 - DNA, 25 bp, Homo sapien
tttgtaccatagaggactgtccgta

SEQ ID NO: 5940454 - DNA, 25 bp, Homo sapien
gagagaagccgcctccacagtcacc

SEQ ID NO: 5940455 - DNA, 25 bp, Homo sapien
cagtattaagcactcataagctttt

SEQ ID NO: 5940456 - DNA, 25 bp, Homo sapien
gctctcttctccttcccttcaaaga

SEQ ID NO: 5940457 - DNA, 25 bp, Homo sapien
gttgtatatttgtgtatgtagtgta

SEQ ID NO: 5940458 - DNA, 25 bp, Homo sapien
atagtactgtccctcttttctgaac

SEQ ID NO: 5940459 - DNA, 25 bp, Homo sapien
ggatttcccagtaggggtttctgca

SEQ ID NO: 5940460 - DNA, 25 bp, Homo sapien
gaggagctctgtgccttttcaaccc

SEQ ID NO: 5940461 - DNA, 25 bp, Homo sapien
gaagtaaactccccgtgaccgatgt

SEQ ID NO: 5940462 - DNA, 25 bp, Homo sapien
actagttgagtgaattaaaggttaa

SEQ ID NO: 5940463 - DNA, 25 bp, Homo sapien
gttctcgctttctccccagtattaa

SEQ ID NO: 5940464 - DNA, 25 bp, Homo sapien
tcttctccttcccttcaaagaactc

SEQ ID NO: 5940465 - DNA, 25 bp, Homo sapien
ttctacacattgaaatgtagatgtt

SEQ ID NO: 5940466 - DNA, 25 bp, Homo sapien
atgatgcagtccttatacaaaaccg

SEQ ID NO: 5940467 - DNA, 25 bp, Homo sapien
ccggaatctagctgctgaagtcttg

SEQ ID NO: 5940468 - DNA, 25 bp, Homo sapien
atctacttaaaaactgctttgtggc

SEQ ID NO: 5940469 - DNA, 25 bp, Homo sapien
agagagtgagcagggatgtgccctg

SEQ ID NO: 5940470 - DNA, 25 bp, Homo sapien
tagagagaagccgcctccacagtca

SEQ ID NO: 5940471 - DNA, 25 bp, Homo sapien
ccagcttaactgacatcggtcacgg

SEQ ID NO: 5940472 - DNA, 25 bp, Homo sapien
agtagatctctctaggaaggacaag

SEQ ID NO: 5940473 - DNA, 25 bp, Homo sapien
agattccgggattacacagagtgac

SEQ ID NO: 5940474 - DNA, 25 bp, Homo sapien
atccctgctcactctctgattaacc

SEQ ID NO: 5940475 - DNA, 25 bp, Homo sapien
gtcccagctacctgtcaccgttgtg

SEQ ID NO: 5940476 - DNA, 25 bp, Homo sapien
gagaagagagcgcagaatccaggag

SEQ ID NO: 5940477 - DNA, 25 bp, Homo sapien
acatccctgctcactctctgattaa

SEQ ID NO: 5940478 - DNA, 25 bp, Homo sapien
taattcactcaactagtacatttct

SEQ ID NO: 5940479 - DNA, 25 bp, Homo sapien
ggcgagccgcccgagctctcagaag

SEQ ID NO: 5940480 - DNA, 25 bp, Homo sapien
catttcaatgtgtagaagctaaaca

SEQ ID NO: 5940481 - DNA, 25 bp, Homo sapien
tggggagggttgaaaaggcacagag

SEQ ID NO: 5940482 - DNA, 25 bp, Homo sapien
aagagggacagtactatcgtgtttt

SEQ ID NO: 5940483 - DNA, 25 bp, Homo sapien
tttcttcaggtgtggtttttgccac

SEQ ID NO: 5940484 - DNA, 25 bp, Homo sapien
ggggagaaagcgagaacagcgtgtg

SEQ ID NO: 5940485 - DNA, 25 bp, Homo sapien
gagctcctcggggtcaattaaacca

SEQ ID NO: 5940486 - DNA, 25 bp, Homo sapien
gaaatccacttccttagcaactgac

SEQ ID NO: 5940487 - DNA, 25 bp, Homo sapien
tataagctttggtgacagttgtcgg

SEQ ID NO: 5940488 - DNA, 25 bp, Homo sapien
cagacatctgccacgttgcacaggg

SEQ ID NO: 5940489 - DNA, 25 bp, Homo sapien
atcaccagcttaactgacatcggtc

SEQ ID NO: 5940490 - DNA, 25 bp, Homo sapien
cacggggagtttacttcgcaagact

SEQ ID NO: 5940491 - DNA, 25 bp, Homo sapien
agacagcaatgaaatgggtgactgt

SEQ ID NO: 5940492 - DNA, 25 bp, Homo sapien
ggaaggacaagccacaccttttcag

SEQ ID NO: 5940493 - DNA, 25 bp, Homo sapien
tgacagttgtcggttttgtataagg

SEQ ID NO: 5940494 - DNA, 25 bp, Homo sapien
aactgaccacttctccaggtatcac

SEQ ID NO: 5940495 - DNA, 25 bp, Homo sapien
tcagaagcagggtgggcggctgggg

SEQ ID NO: 5940496 - DNA, 25 bp, Homo sapien
ggtgcagaaacccctactgggaaat

SEQ ID NO: 5940497 - DNA, 25 bp, Homo sapien
cagtactatcgtgttttataagctt

SEQ ID NO: 5940498 - DNA, 25 bp, Homo sapien
atacacaaatatacaacaagcaaaa

SEQ ID NO: 5940499 - DNA, 25 bp, Homo sapien
acagttgtcggttttgtataaggac

SEQ ID NO: 5940500 - DNA, 25 bp, Homo sapien
aatgggtgactgtggaggcggcttc

SEQ ID NO: 5940501 - DNA, 25 bp, Homo sapien
actatcgtgttttataagctttggt

SEQ ID NO: 5940502 - DNA, 25 bp, Homo sapien
acatacacaaatatacaacaagcaa

SEQ ID NO: 5940503 - DNA, 25 bp, Homo sapien
attaaaccattcctcagacatctgc

SEQ ID NO: 5940504 - DNA, 25 bp, Homo sapien
aatttcttcaggtgtggtttttgcc

SEQ ID NO: 5940505 - DNA, 25 bp, Homo sapien
agccaaaagcttatgagtgcttaat

SEQ ID NO: 5940506 - DNA, 25 bp, Homo sapien
attcgttacactacatacacaaata

SEQ ID NO: 5940507 - DNA, 25 bp, Homo sapien
cgcagaacgactatacaggtgaggt

SEQ ID NO: 5940508 - DNA, 25 bp, Homo sapien
atatacaacaagcaaaacaaccttc

SEQ ID NO: 5940509 - DNA, 25 bp, Homo sapien
gttgaaaaggcacagagctcctcgg

SEQ ID NO: 5940510 - DNA, 25 bp, Homo sapien
ttacttcgcaagacttcagcagcta

SEQ ID NO: 5940511 - DNA, 25 bp, Homo sapien
gttacactacatacacaaatataca

SEQ ID NO: 5940512 - DNA, 25 bp, Homo sapien
ccaggtatcaccagcttaactgaca

SEQ ID NO: 5940513 - DNA, 25 bp, Homo sapien
aaacagtagttacggacagtcctct

SEQ ID NO: 5940514 - DNA, 25 bp, Homo sapien
agacttcagcagctagattccggga

SEQ ID NO: 5940515 - DNA, 25 bp, Homo sapien
aaagcgagaacagcgtgtgagtctc

SEQ ID NO: 5940516 - DNA, 25 bp, Homo sapien
gccaatgaaacatctacatttcaat

SEQ ID NO: 5940517 - DNA, 25 bp, Homo sapien
acacaaatatacaacaagcaaaaca

SEQ ID NO: 5940518 - DNA, 25 bp, Homo sapien
acaaatatacaacaagcaaaacaac

SEQ ID NO: 5940519 - DNA, 25 bp, Homo sapien
tcagaaaagagggacagtactatcg

SEQ ID NO: 5940520 - DNA, 25 bp, Homo sapien
caagccaaaagcttatgagtgctta

SEQ ID NO: 5940521 - DNA, 25 bp, Homo sapien
caaattcttaaaatttcttcaggtg

SEQ ID NO: 5940522 - DNA, 25 bp, Homo sapien
tgggccaaattcttaaaatttcttc

SEQ ID NO: 5940523 - DNA, 25 bp, Homo sapien
cgaaccccacgcaggcgagccccac

SEQ ID NO: 5940524 - DNA, 25 bp, Homo sapien
tttcgtagacagcaatgaaatgggt

SEQ ID NO: 5940525 - DNA, 25 bp, Homo sapien
aaacaaccttcataataagatagcc

SEQ ID NO: 5940526 - DNA, 25 bp, Homo sapien
gaggtgcagaaacccctactgggaa

SEQ ID NO: 5940527 - DNA, 25 bp, Homo sapien
ggtgtggtttttgccacaaagcagt

SEQ ID NO: 5940528 - DNA, 25 bp, Homo sapien
gagtgcttaatactggggagaaagc

SEQ ID NO: 5940529 - DNA, 25 bp, Homo sapien
cggggtcaattaaaccattcctcag

SEQ ID NO: 5940530 - DNA, 25 bp, Homo sapien
agtagttacggacagtcctctatgg

SEQ ID NO: 5940531 - DNA, 25 bp, Homo sapien
cagttttgtgtcttctgatggttca

SEQ ID NO: 5940532 - DNA, 25 bp, Homo sapien
atccaggagcagcccactttcgaac

SEQ ID NO: 5940533 - DNA, 25 bp, Homo sapien
gccacaccttttcagacagccaatg

SEQ ID NO: 5940534 - DNA, 25 bp, Homo sapien
caatgaaatgggtgactgtggaggc

SEQ ID NO: 5940535 - DNA, 25 bp, Homo sapien
tcgtgttttataagctttggtgaca

SEQ ID NO: 5940536 - DNA, 25 bp, Homo sapien
gagtgactaactgggccaaattctt

SEQ ID NO: 5940537 - DNA, 25 bp, Homo sapien
ccacgcaggcgagccccacgaaggc

SEQ ID NO: 5940538 - DNA, 25 bp, Homo sapien
cacagggcacatccctgctcactct

SEQ ID NO: 5940539 - DNA, 25 bp, Homo sapien
tatcgtgttttataagctttggtga

SEQ ID NO: 5940540 - DNA, 25 bp, Homo sapien
cacagagctcctcggggtcaattaa

SEQ ID NO: 5940541 - DNA, 25 bp, Homo sapien
gcaggcgagccccacgaaggcgagc

SEQ ID NO: 5940542 - DNA, 25 bp, Homo sapien
acagcaatgaaatgggtgactgtgg

SEQ ID NO: 5940543 - DNA, 25 bp, Homo sapien
gtcttgtttctggcctctccgagtt

SEQ ID NO: 5940544 - DNA, 25 bp, Homo sapien
tacacagagtgactaactgggccaa

SEQ ID NO: 5940545 - DNA, 25 bp, Homo sapien
ttcaagccaaaagcttatgagtgct

SEQ ID NO: 5940546 - DNA, 25 bp, Homo sapien
caccttttcagacagccaatgaaac

SEQ ID NO: 5940547 - DNA, 25 bp, Homo sapien
cagaacgactatacaggtgaggtgc

SEQ ID NO: 5940548 - DNA, 25 bp, Homo sapien
gaaatgggtgactgtggaggcggct

SEQ ID NO: 5940549 - DNA, 25 bp, Homo sapien
taaggactgcatcatccctcccccc

SEQ ID NO: 5940550 - DNA, 25 bp, Homo sapien
gttgcacagggcacatccctgctca

SEQ ID NO: 5940551 - DNA, 25 bp, Homo sapien
atgaaacatctacatttcaatgtgt

SEQ ID NO: 5940552 - DNA, 25 bp, Homo sapien
cacagagtgactaactgggccaaat

SEQ ID NO: 5940553 - DNA, 25 bp, Homo sapien
ccgagttctttgaagggaaggagaa

SEQ ID NO: 5940554 - DNA, 25 bp, Homo sapien
tgtggtttttgccacaaagcagttt

SEQ ID NO: 5940555 - DNA, 25 bp, Homo sapien
cactttcgaaccccacgcaggcgag

SEQ ID NO: 5940556 - DNA, 25 bp, Homo sapien
gcctctccgagttctttgaagggaa

SEQ ID NO: 5940557 - DNA, 25 bp, Homo sapien
aaggcacagagctcctcggggtcaa

SEQ ID NO: 5940558 - DNA, 25 bp, Homo sapien
cagggcacatccctgctcactctct

SEQ ID NO: 5940559 - DNA, 25 bp, Homo sapien
tcgtagacagcaatgaaatgggtga

SEQ ID NO: 5940560 - DNA, 25 bp, Homo sapien
gagccccacgaaggcgagccgcccg

SEQ ID NO: 5940561 - DNA, 25 bp, Homo sapien
gaagagagcgcagaatccaggagca

SEQ ID NO: 5940562 - DNA, 25 bp, Homo sapien
gtagacagcaatgaaatgggtgact

SEQ ID NO: 5940563 - DNA, 25 bp, Homo sapien
cccacgaaggcgagccgcccgagct

SEQ ID NO: 5940564 - DNA, 25 bp, Homo sapien
gcccgagctctcagaagcagggtgg

SEQ ID NO: 5940565 - DNA, 25 bp, Homo sapien
tgtagaagctaaacagtagttacgg

SEQ ID NO: 5940566 - DNA, 25 bp, Homo sapien
tagatctctctaggaaggacaagcc

SEQ ID NO: 5940567 - DNA, 25 bp, Homo sapien
cactacatacacaaatatacaacaa

SEQ ID NO: 5940568 - DNA, 25 bp, Homo sapien
tctttgaagggaaggagaagagagc

SEQ ID NO: 5940569 - DNA, 25 bp, Homo sapien
tagcctaggtcccagctacctgtca

SEQ ID NO: 5940570 - DNA, 25 bp, Homo sapien
gcgagccccacgaaggcgagccgcc

SEQ ID NO: 5940571 - DNA, 25 bp, Homo sapien
gccacaaagcagtttttaagtagat

SEQ ID NO: 5940572 - DNA, 25 bp, Homo sapien
ttctgatggttcagaaaagagggac

SEQ ID NO: 5940573 - DNA, 25 bp, Homo sapien
ggtgacagttgtcggttttgtataa

SEQ ID NO: 5940574 - DNA, 25 bp, Homo sapien
ttaatactggggagaaagcgagaac

SEQ ID NO: 5940575 - DNA, 25 bp, Homo sapien
aacagttttgtgtcttctgatggtt

SEQ ID NO: 5940576 - DNA, 25 bp, Homo sapien
ccaaaagcttatgagtgcttaatac

SEQ ID NO: 5940577 - DNA, 25 bp, Homo sapien
cagagtgactaactgggccaaattc

SEQ ID NO: 5940578 - DNA, 25 bp, Homo sapien
gatggttcagaaaagagggacagta

SEQ ID NO: 5940579 - DNA, 25 bp, Homo sapien
taactgacatcggtcacggggagtt

SEQ ID NO: 5940580 - DNA, 25 bp, Homo sapien
gctacctgtcaccgttgtgtcacta

SEQ ID NO: 5940581 - DNA, 25 bp, Homo sapien
gctcactctctgattaacctttaat

SEQ ID NO: 5940582 - DNA, 25 bp, Homo sapien
tgtgtcttctgatggttcagaaaag

SEQ ID NO: 5940583 - DNA, 25 bp, Homo sapien
caccagcttaactgacatcggtcac

SEQ ID NO: 5940584 - DNA, 25 bp, Homo sapien
tggaggcggcttctctctagcacat

SEQ ID NO: 5940585 - DNA, 25 bp, Homo sapien
gttttgtataaggactgcatcatcc

SEQ ID NO: 5940586 - DNA, 25 bp, Homo sapien
gaacgactatacaggtgaggtgcag

SEQ ID NO: 5940587 - DNA, 25 bp, Homo sapien
taagctttggtgacagttgtcggtt

SEQ ID NO: 5940588 - DNA, 25 bp, Homo sapien
caatgaaacatctacatttcaatgt

SEQ ID NO: 5940589 - DNA, 25 bp, Homo sapien
caagacttcagcagctagattccgg

SEQ ID NO: 5940590 - DNA, 25 bp, Homo sapien
gaccacttctccaggtatcaccagc

SEQ ID NO: 5940591 - DNA, 25 bp, Homo sapien
agcttaactgacatcggtcacgggg

SEQ ID NO: 5940592 - DNA, 25 bp, Homo sapien
cgaaggcgagccgcccgagctctca

SEQ ID NO: 5940593 - DNA, 25 bp, Homo sapien
aaccttcataataagatagcctagg

SEQ ID NO: 5940594 - DNA, 25 bp, Homo sapien
tcaccgttgtgtcactaacagtttt

SEQ ID NO: 5940595 - DNA, 25 bp, Homo sapien
ctttcgaaccccacgcaggcgagcc

SEQ ID NO: 5940596 - DNA, 25 bp, Homo sapien
tttgtgtcttctgatggttcagaaa

SEQ ID NO: 5940597 - DNA, 25 bp, Homo sapien
cagtcctctatggtacaaattcgtt

SEQ ID NO: 5940598 - DNA, 25 bp, Homo sapien
tttgtataaggactgcatcatccct

SEQ ID NO: 5940599 - DNA, 25 bp, Homo sapien
gcagtttttaagtagatctctctag

SEQ ID NO: 5940600 - DNA, 25 bp, Homo sapien
tggtttttgccacaaagcagttttt

SEQ ID NO: 5940601 - DNA, 25 bp, Homo sapien
cacgtctctttcgtagacagcaatg

SEQ ID NO: 5940602 - DNA, 25 bp, Homo sapien
cggctggggagggttgaaaaggcac

SEQ ID NO: 5940603 - DNA, 25 bp, Homo sapien
ttttgccacaaagcagtttttaagt

SEQ ID NO: 5940604 - DNA, 25 bp, Homo sapien
cgcaagacttcagcagctagattcc

SEQ ID NO: 5940605 - DNA, 25 bp, Homo sapien
acaggtgaggtgcagaaacccctac

SEQ ID NO: 5940606 - DNA, 25 bp, Homo sapien
tggtacaaattcgttacactacata

SEQ ID NO: 5940607 - DNA, 25 bp, Homo sapien
catctgccacgttgcacagggcaca

SEQ ID NO: 5940608 - DNA, 25 bp, Homo sapien
tagcaactgaccacttctccaggta

SEQ ID NO: 5940609 - DNA, 25 bp, Homo sapien
acaaccttcataataagatagccta

SEQ ID NO: 5940610 - DNA, 25 bp, Homo sapien
cgttgtgtcactaacagttttgtgt

SEQ ID NO: 5940611 - DNA, 25 bp, Homo sapien
ggattacacagagtgactaactggg

SEQ ID NO: 5940612 - DNA, 25 bp, Homo sapien
aggtatcaccagcttaactgacatc

SEQ ID NO: 5940613 - DNA, 25 bp, Homo sapien
aatactggggagaaagcgagaacag

SEQ ID NO: 5940614 - DNA, 25 bp, Homo sapien
tgtggaggcggcttctctctagcac

SEQ ID NO: 5940615 - DNA, 25 bp, Homo sapien
gcagggtgggcggctggggagggtt

SEQ ID NO: 5940616 - DNA, 25 bp, Homo sapien
aggtgaggtgcagaaacccctactg

SEQ ID NO: 5940617 - DNA, 25 bp, Homo sapien
tcttcaagccaaaagcttatgagtg

SEQ ID NO: 5940618 - DNA, 25 bp, Homo sapien
ataagatagcctaggtcccagctac

SEQ ID NO: 5940619 - DNA, 25 bp, Homo sapien
gtcacggggagtttacttcgcaaga

SEQ ID NO: 5940620 - DNA, 25 bp, Homo sapien
tgcagtcttgtttctggcctctccg

SEQ ID NO: 5940621 - DNA, 25 bp, Homo sapien
tatggtacaaattcgttacactaca

SEQ ID NO: 5940622 - DNA, 25 bp, Homo sapien
tgacatcggtcacggggagtttact

SEQ ID NO: 5940623 - DNA, 25 bp, Homo sapien
ccacttctccaggtatcaccagctt

SEQ ID NO: 5940624 - DNA, 25 bp, Homo sapien
tccttagcaactgaccacttctcca

SEQ ID NO: 5940625 - DNA, 25 bp, Homo sapien
tcaatgtgtagaagctaaacagtag

SEQ ID NO: 5940626 - DNA, 25 bp, Homo sapien
gtcctctatggtacaaattcgttac

SEQ ID NO: 5940627 - DNA, 25 bp, Homo sapien
atgaaatgggtgactgtggaggcgg

SEQ ID NO: 5940628 - DNA, 25 bp, Homo sapien
tccacttccttagcaactgaccact

SEQ ID NO: 5940629 - DNA, 25 bp, Homo sapien
tgaaaaggcacagagctcctcgggg

SEQ ID NO: 5940630 - DNA, 25 bp, Homo sapien
cactaacagttttgtgtcttctgat

SEQ ID NO: 5940631 - DNA, 25 bp, Homo sapien
gggacagtactatcgtgttttataa

SEQ ID NO: 5940632 - DNA, 25 bp, Homo sapien
cagccaatgaaacatctacatttca

SEQ ID NO: 5940633 - DNA, 25 bp, Homo sapien
ctccgagttctttgaagggaaggag

SEQ ID NO: 5940634 - DNA, 25 bp, Homo sapien
ttcgcaagacttcagcagctagatt

SEQ ID NO: 5940635 - DNA, 25 bp, Homo sapien
cacaccttttcagacagccaatgaa

SEQ ID NO: 5940636 - DNA, 25 bp, Homo sapien
ttctccaggtatcaccagcttaact

SEQ ID NO: 5940637 - DNA, 25 bp, Homo sapien
cagtcttgtttctggcctctccgag

SEQ ID NO: 5940638 - DNA, 25 bp, Homo sapien
tcaactagtacatttcttcaagcca

SEQ ID NO: 5940639 - DNA, 25 bp, Homo sapien
tgccacgttgcacagggcacatccc

SEQ ID NO: 5940640 - DNA, 25 bp, Homo sapien
agcaatgaaatgggtgactgtggag

SEQ ID NO: 5940641 - DNA, 25 bp, Homo sapien
tataaggactgcatcatccctcccc

SEQ ID NO: 5940642 - DNA, 25 bp, Homo sapien
gccccacgaaggcgagccgcccgag

SEQ ID NO: 5940643 - DNA, 25 bp, Homo sapien
cgcagaatccaggagcagcccactt

SEQ ID NO: 5940644 - DNA, 25 bp, Homo sapien
gtacaaattcgttacactacataca

SEQ ID NO: 5940645 - DNA, 25 bp, Homo sapien
agctaaacagtagttacggacagtc

SEQ ID NO: 5940646 - DNA, 25 bp, Homo sapien
ccccattgcagtcttgtttctggcc

SEQ ID NO: 5940647 - DNA, 25 bp, Homo sapien
gacagtactatcgtgttttataagc

SEQ ID NO: 5940648 - DNA, 25 bp, Homo sapien
gagtttacttcgcaagacttcagca

SEQ ID NO: 5940649 - DNA, 25 bp, Homo sapien
gggttgaaaaggcacagagctcctc

SEQ ID NO: 5940650 - DNA, 25 bp, Homo sapien
ctgctcactctctgattaaccttta

SEQ ID NO: 5940651 - DNA, 25 bp, Homo sapien
aggcgagccccacgaaggcgagccg

SEQ ID NO: 5940652 - DNA, 25 bp, Homo sapien
gcttatgagtgcttaatactgggga

SEQ ID NO: 5940653 - DNA, 25 bp, Homo sapien
tctctgattaacctttaattcactc

SEQ ID NO: 5940654 - DNA, 25 bp, Homo sapien
cctactgggaaatccacttccttag

SEQ ID NO: 5940655 - DNA, 25 bp, Homo sapien
ggagaaagcgagaacagcgtgtgag

SEQ ID NO: 5940656 - DNA, 25 bp, Homo sapien
ctcagacatctgccacgttgcacag

SEQ ID NO: 5940657 - DNA, 25 bp, Homo sapien
tagttacggacagtcctctatggta

SEQ ID NO: 5940658 - DNA, 25 bp, Homo sapien
cgggattacacagagtgactaactg

SEQ ID NO: 5940659 - DNA, 25 bp, Homo sapien
gacagtcctctatggtacaaattcg

SEQ ID NO: 5940660 - DNA, 25 bp, Homo sapien
attacacagagtgactaactgggcc

SEQ ID NO: 5940661 - DNA, 25 bp, Homo sapien
atacaacaagcaaaacaaccttcat

SEQ ID NO: 5940662 - DNA, 25 bp, Homo sapien
ttggtgacagttgtcggttttgtat

SEQ ID NO: 5940663 - DNA, 25 bp, Homo sapien
aaaagagggacagtactatcgtgtt

SEQ ID NO: 5940664 - DNA, 25 bp, Homo sapien
tgggcggctggggagggttgaaaag

SEQ ID NO: 5940665 - DNA, 25 bp, Homo sapien
gttcagaaaagagggacagtactat

SEQ ID NO: 5940666 - DNA, 25 bp, Homo sapien
gattaacctttaattcactcaacta

SEQ ID NO: 5940667 - DNA, 25 bp, Homo sapien
tgtttctggcctctccgagttcttt

SEQ ID NO: 5940668 - DNA, 25 bp, Homo sapien
gtgagtctcacgtctctttcgtaga

SEQ ID NO: 5940669 - DNA, 25 bp, Homo sapien
acttcgcaagacttcagcagctaga

SEQ ID NO: 5940670 - DNA, 25 bp, Homo sapien
aagcagggtgggcggctggggaggg

SEQ ID NO: 5940671 - DNA, 25 bp, Homo sapien
cttgtttctggcctctccgagttct

SEQ ID NO: 5940672 - DNA, 25 bp, Homo sapien
ttcataataagatagcctaggtccc

SEQ ID NO: 5940673 - DNA, 25 bp, Homo sapien
agctttggtgacagttgtcggtttt

SEQ ID NO: 5940674 - DNA, 25 bp, Homo sapien
gaagctaaacagtagttacggacag

SEQ ID NO: 5940675 - DNA, 25 bp, Homo sapien
agcgcagaatccaggagcagcccac

SEQ ID NO: 5940676 - DNA, 25 bp, Homo sapien
gtgtgagtctcacgtctctttcgta

SEQ ID NO: 5940677 - DNA, 25 bp, Homo sapien
aagatagcctaggtcccagctacct

SEQ ID NO: 5940678 - DNA, 25 bp, Homo sapien
tttaagtagatctctctaggaagga

SEQ ID NO: 5940679 - DNA, 25 bp, Homo sapien
aaccccacgcaggcgagccccacga

SEQ ID NO: 5940680 - DNA, 25 bp, Homo sapien
cgtctctttcgtagacagcaatgaa

SEQ ID NO: 5940681 - DNA, 25 bp, Homo sapien
ttgccacaaagcagtttttaagtag

SEQ ID NO: 5940682 - DNA, 25 bp, Homo sapien
agggtgggcggctggggagggttga

SEQ ID NO: 5940683 - DNA, 25 bp, Homo sapien
tgaagggaaggagaagagagcgcag

SEQ ID NO: 5940684 - DNA, 25 bp, Homo sapien
gtcaattaaaccattcctcagacat

SEQ ID NO: 5940685 - DNA, 25 bp, Homo sapien
aatgtgtagaagctaaacagtagtt

SEQ ID NO: 5940686 - DNA, 25 bp, Homo sapien
ttaacctttaattcactcaactagt

SEQ ID NO: 5940687 - DNA, 25 bp, Homo sapien
agtttttaagtagatctctctagga

SEQ ID NO: 5940688 - DNA, 25 bp, Homo sapien
gctcctcggggtcaattaaaccatt

SEQ ID NO: 5940689 - DNA, 25 bp, Homo sapien
aggagcagcccactttcgaacccca

SEQ ID NO: 5940690 - DNA, 25 bp, Homo sapien
tttataagctttggtgacagttgtc

SEQ ID NO: 5940691 - DNA, 25 bp, Homo sapien
agcccactttcgaaccccacgcagg

SEQ ID NO: 5940692 - DNA, 25 bp, Homo sapien
cctgtcaccgttgtgtcactaacag

SEQ ID NO: 5940693 - DNA, 25 bp, Homo sapien
tacatttcttcaagccaaaagctta

SEQ ID NO: 5940694 - DNA, 25 bp, Homo sapien
gggtcaattaaaccattcctcagac

SEQ ID NO: 5940695 - DNA, 25 bp, Homo sapien
catctacatttcaatgtgtagaagc

SEQ ID NO: 5940696 - DNA, 25 bp, Homo sapien
cggggagtttacttcgcaagacttc

SEQ ID NO: 5940697 - DNA, 25 bp, Homo sapien
ctagattccgggattacacagagtg

SEQ ID NO: 5940698 - DNA, 25 bp, Homo sapien
tcctcggggtcaattaaaccattcc

SEQ ID NO: 5940699 - DNA, 25 bp, Homo sapien
gttctttgaagggaaggagaagaga

SEQ ID NO: 5940700 - DNA, 25 bp, Homo sapien
tctgccacgttgcacagggcacatc

SEQ ID NO: 5940701 - DNA, 25 bp, Homo sapien
tgactgtggaggcggcttctctcta

SEQ ID NO: 5940702 - DNA, 25 bp, Homo sapien
attcttaaaatttcttcaggtgtgg

SEQ ID NO: 5940703 - DNA, 25 bp, Homo sapien
ccccacgcaggcgagccccacgaag

SEQ ID NO: 5940704 - DNA, 25 bp, Homo sapien
gctctcagaagcagggtgggcggct

SEQ ID NO: 5940705 - DNA, 25 bp, Homo sapien
acatcggtcacggggagtttacttc

SEQ ID NO: 5940706 - DNA, 25 bp, Homo sapien
gtttttgccacaaagcagtttttaa

SEQ ID NO: 5940707 - DNA, 25 bp, Homo sapien
gcgtgtgagtctcacgtctctttcg

SEQ ID NO: 5940708 - DNA, 25 bp, Homo sapien
cttccttagcaactgaccacttctc

SEQ ID NO: 5940709 - DNA, 25 bp, Homo sapien
taggaaggacaagccacaccttttc

SEQ ID NO: 5940710 - DNA, 25 bp, Homo sapien
tcttaaaatttcttcaggtgtggtt

SEQ ID NO: 5940711 - DNA, 25 bp, Homo sapien
gagggacagtactatcgtgttttat

SEQ ID NO: 5940712 - DNA, 25 bp, Homo sapien
actctctgattaacctttaattcac

SEQ ID NO: 5940713 - DNA, 25 bp, Homo sapien
tactggggagaaagcgagaacagcg

SEQ ID NO: 5940714 - DNA, 25 bp, Homo sapien
tccgggattacacagagtgactaac

SEQ ID NO: 5940715 - DNA, 25 bp, Homo sapien
gtcactaacagttttgtgtcttctg

SEQ ID NO: 5940716 - DNA, 25 bp, Homo sapien
gatctctctaggaaggacaagccac

SEQ ID NO: 5940717 - DNA, 25 bp, Homo sapien
tgtataaggactgcatcatccctcc

SEQ ID NO: 5940718 - DNA, 25 bp, Homo sapien
gccccccattgcagtcttgtttctg

SEQ ID NO: 5940719 - DNA, 25 bp, Homo sapien
agttgtcggttttgtataaggactg

SEQ ID NO: 5940720 - DNA, 25 bp, Homo sapien
aaattcgttacactacatacacaaa

SEQ ID NO: 5940721 - DNA, 25 bp, Homo sapien
actgtggaggcggcttctctctagc

SEQ ID NO: 5940722 - DNA, 25 bp, Homo sapien
acaaattcgttacactacatacaca

SEQ ID NO: 5940723 - DNA, 25 bp, Homo sapien
acgttgcacagggcacatccctgct

SEQ ID NO: 5940724 - DNA, 25 bp, Homo sapien
gtttacttcgcaagacttcagcagc

SEQ ID NO: 5940725 - DNA, 25 bp, Homo sapien
ctccaggtatcaccagcttaactga

SEQ ID NO: 5940726 - DNA, 25 bp, Homo sapien
tggttcagaaaagagggacagtact

SEQ ID NO: 5940727 - DNA, 25 bp, Homo sapien
agccgcccgagctctcagaagcagg

SEQ ID NO: 5940728 - DNA, 25 bp, Homo sapien
gggcacatccctgctcactctctga

SEQ ID NO: 5940729 - DNA, 25 bp, Homo sapien
cgagccgcccgagctctcagaagca

SEQ ID NO: 5940730 - DNA, 25 bp, Homo sapien
aaccattcctcagacatctgccacg

SEQ ID NO: 5940731 - DNA, 25 bp, Homo sapien
caggtgtggtttttgccacaaagca

SEQ ID NO: 5940732 - DNA, 25 bp, Homo sapien
tgtcaccgttgtgtcactaacagtt

SEQ ID NO: 5940733 - DNA, 25 bp, Homo sapien
gtatcaccagcttaactgacatcgg

SEQ ID NO: 5940734 - DNA, 25 bp, Homo sapien
actgacatcggtcacggggagttta

SEQ ID NO: 5940735 - DNA, 25 bp, Homo sapien
acgactatacaggtgaggtgcagaa

SEQ ID NO: 5940736 - DNA, 25 bp, Homo sapien
agaaagcgagaacagcgtgtgagtc

SEQ ID NO: 5940737 - DNA, 25 bp, Homo sapien
tcctcagacatctgccacgttgcac

SEQ ID NO: 5940738 - DNA, 25 bp, Homo sapien
gcagctagattccgggattacacag

SEQ ID NO: 5940739 - DNA, 25 bp, Homo sapien
aagcagtttttaagtagatctctct

SEQ ID NO: 5940740 - DNA, 25 bp, Homo sapien
gttttgtgtcttctgatggttcaga

SEQ ID NO: 5940741 - DNA, 25 bp, Homo sapien
gtgcttaatactggggagaaagcga

SEQ ID NO: 5940742 - DNA, 25 bp, Homo sapien
tctaggaaggacaagccacaccttt

SEQ ID NO: 5940743 - DNA, 25 bp, Homo sapien
ctcggggtcaattaaaccattcctc

SEQ ID NO: 5940744 - DNA, 25 bp, Homo sapien
cccactttcgaaccccacgcaggcg

SEQ ID NO: 5940745 - DNA, 25 bp, Homo sapien
atgagtgcttaatactggggagaaa

SEQ ID NO: 5940746 - DNA, 25 bp, Homo sapien
cctttaattcactcaactagtacat

SEQ ID NO: 5940747 - DNA, 25 bp, Homo sapien
ctctccgagttctttgaagggaagg

SEQ ID NO: 5940748 - DNA, 25 bp, Homo sapien
aaatatacaacaagcaaaacaacct

SEQ ID NO: 5940749 - DNA, 25 bp, Homo sapien
gagctctcagaagcagggtgggcgg

SEQ ID NO: 5940750 - DNA, 25 bp, Homo sapien
taaaccattcctcagacatctgcca

SEQ ID NO: 5940751 - DNA, 25 bp, Homo sapien
ttcgaaccccacgcaggcgagcccc

SEQ ID NO: 5940752 - DNA, 25 bp, Homo sapien
tcttcaggtgtggtttttgccacaa

SEQ ID NO: 5940753 - DNA, 25 bp, Homo sapien
ttcagacagccaatgaaacatctac

SEQ ID NO: 5940754 - DNA, 25 bp, Homo sapien
actcaactagtacatttcttcaagc

SEQ ID NO: 5940755 - DNA, 25 bp, Homo sapien
acaacaagcaaaacaaccttcataa

SEQ ID NO: 5940756 - DNA, 25 bp, Homo sapien
ggcggcttctctctagcacatctct

SEQ ID NO: 5940757 - DNA, 25 bp, Homo sapien
ctgaccacttctccaggtatcacca

SEQ ID NO: 5940758 - DNA, 25 bp, Homo sapien
acagtagttacggacagtcctctat

SEQ ID NO: 5940759 - DNA, 25 bp, Homo sapien
cagaatccaggagcagcccactttc

SEQ ID NO: 5940760 - DNA, 25 bp, Homo sapien
accgttgtgtcactaacagttttgt

SEQ ID NO: 5940761 - DNA, 25 bp, Homo sapien
atcggtcacggggagtttacttcgc

SEQ ID NO: 5940762 - DNA, 25 bp, Homo sapien
aagcttatgagtgcttaatactggg

SEQ ID NO: 5940763 - DNA, 25 bp, Homo sapien
attcctcagacatctgccacgttgc

SEQ ID NO: 5940764 - DNA, 25 bp, Homo sapien
ctaggtcccagctacctgtcaccgt

SEQ ID NO: 5940765 - DNA, 25 bp, Homo sapien
ggtgactgtggaggcggcttctctc

SEQ ID NO: 5940766 - DNA, 25 bp, Homo sapien
tgtgtagaagctaaacagtagttac

SEQ ID NO: 5940767 - DNA, 25 bp, Homo sapien
tctctctaggaaggacaagccacac

SEQ ID NO: 5940768 - DNA, 25 bp, Homo sapien
aaggacaagccacaccttttcagac

SEQ ID NO: 5940769 - DNA, 25 bp, Homo sapien
gcttaatactggggagaaagcgaga

SEQ ID NO: 5940770 - DNA, 25 bp, Homo sapien
tcttctgatggttcagaaaagaggg

SEQ ID NO: 5940771 - DNA, 25 bp, Homo sapien
gtgaggtgcagaaacccctactggg

SEQ ID NO: 5940772 - DNA, 25 bp, Homo sapien
gaaggagaagagagcgcagaatcca

SEQ ID NO: 5940773 - DNA, 25 bp, Homo sapien
ctttggtgacagttgtcggttttgt

SEQ ID NO: 5940774 - DNA, 25 bp, Homo sapien
tgcacagggcacatccctgctcact

SEQ ID NO: 5940775 - DNA, 25 bp, Homo sapien
ccattcctcagacatctgccacgtt

SEQ ID NO: 5940776 - DNA, 25 bp, Homo sapien
agagcgcagaatccaggagcagccc

SEQ ID NO: 5940777 - DNA, 25 bp, Homo sapien
ccacgttgcacagggcacatccctg

SEQ ID NO: 5940778 - DNA, 25 bp, Homo sapien
caaagcagtttttaagtagatctct

SEQ ID NO: 5940779 - DNA, 25 bp, Homo sapien
gggaaatccacttccttagcaactg

SEQ ID NO: 5940780 - DNA, 25 bp, Homo sapien
gtctcacgtctctttcgtagacagc

SEQ ID NO: 5940781 - DNA, 25 bp, Homo sapien
gtactatcgtgttttataagctttg

SEQ ID NO: 5940782 - DNA, 25 bp, Homo sapien
agaacagcgtgtgagtctcacgtct

SEQ ID NO: 5940783 - DNA, 25 bp, Homo sapien
ctgggaaatccacttccttagcaac

SEQ ID NO: 5940784 - DNA, 25 bp, Homo sapien
ctacatacacaaatatacaacaagc

SEQ ID NO: 5940785 - DNA, 25 bp, Homo sapien
tctctaggaaggacaagccacacct

SEQ ID NO: 5940786 - DNA, 25 bp, Homo sapien
ggtgggcggctggggagggttgaaa

SEQ ID NO: 5940787 - DNA, 25 bp, Homo sapien
aacctttaattcactcaactagtac

SEQ ID NO: 5940788 - DNA, 25 bp, Homo sapien
gtgttttataagctttggtgacagt

SEQ ID NO: 5940789 - DNA, 25 bp, Homo sapien
tgggtgactgtggaggcggcttctc

SEQ ID NO: 5940790 - DNA, 25 bp, Homo sapien
tctacatttcaatgtgtagaagcta

SEQ ID NO: 5940791 - DNA, 25 bp, Homo sapien
aacagcgtgtgagtctcacgtctct

SEQ ID NO: 5940792 - DNA, 25 bp, Homo sapien
tttcttcaagccaaaagcttatgag

SEQ ID NO: 5940793 - DNA, 25 bp, Homo sapien
aatccacttccttagcaactgacca

SEQ ID NO: 5940794 - DNA, 25 bp, Homo sapien
ggccaaattcttaaaatttcttcag

SEQ ID NO: 5940795 - DNA, 25 bp, Homo sapien
ctaaacagtagttacggacagtcct

SEQ ID NO: 5940796 - DNA, 25 bp, Homo sapien
aaaagcttatgagtgcttaatactg

SEQ ID NO: 5940797 - DNA, 25 bp, Homo sapien
agctagattccgggattacacagag

SEQ ID NO: 5940798 - DNA, 25 bp, Homo sapien
gagtctcacgtctctttcgtagaca

SEQ ID NO: 5940799 - DNA, 25 bp, Homo sapien
gctggggagggttgaaaaggcacag

SEQ ID NO: 5940800 - DNA, 25 bp, Homo sapien
tagaagctaaacagtagttacggac

SEQ ID NO: 5940801 - DNA, 25 bp, Homo sapien
ccaggagcagcccactttcgaaccc

SEQ ID NO: 5940802 - DNA, 25 bp, Homo sapien
atacaggtgaggtgcagaaacccct

SEQ ID NO: 5940803 - DNA, 25 bp, Homo sapien
gcaactgaccacttctccaggtatc

SEQ ID NO: 5940804 - DNA, 25 bp, Homo sapien
tttttaagtagatctctctaggaag

SEQ ID NO: 5940805 - DNA, 25 bp, Homo sapien
ctcacgtctctttcgtagacagcaa

SEQ ID NO: 5940806 - DNA, 25 bp, Homo sapien
cgagaacagcgtgtgagtctcacgt

SEQ ID NO: 5940807 - DNA, 25 bp, Homo sapien
tttgaagggaaggagaagagagcgc

SEQ ID NO: 5940808 - DNA, 25 bp, Homo sapien
taataagatagcctaggtcccagct

SEQ ID NO: 5940809 - DNA, 25 bp, Homo sapien
caaaacaaccttcataataagatag

SEQ ID NO: 5940810 - DNA, 25 bp, Homo sapien
cggttttgtataaggactgcatcat

SEQ ID NO: 5940811 - DNA, 25 bp, Homo sapien
agaaaagagggacagtactatcgtg

SEQ ID NO: 5940812 - DNA, 25 bp, Homo sapien
tacactacatacacaaatatacaac

SEQ ID NO: 5940813 - DNA, 25 bp, Homo sapien
cagacagccaatgaaacatctacat

SEQ ID NO: 5940814 - DNA, 25 bp, Homo sapien
cttaactgacatcggtcacggggag

SEQ ID NO: 5940815 - DNA, 25 bp, Homo sapien
acaagccacaccttttcagacagcc

SEQ ID NO: 5940816 - DNA, 25 bp, Homo sapien
gtcggttttgtataaggactgcatc

SEQ ID NO: 5940817 - DNA, 25 bp, Homo sapien
ttatgagtgcttaatactggggaga

SEQ ID NO: 5940818 - DNA, 25 bp, Homo sapien
tcactcaactagtacatttcttcaa

SEQ ID NO: 5940819 - DNA, 25 bp, Homo sapien
gagcagcccactttcgaaccccacg

SEQ ID NO: 5940820 - DNA, 25 bp, Homo sapien
gggagtttacttcgcaagacttcag

SEQ ID NO: 5940821 - DNA, 25 bp, Homo sapien
caagcaaaacaaccttcataataag

SEQ ID NO: 5940822 - DNA, 25 bp, Homo sapien
tacctgtcaccgttgtgtcactaac

SEQ ID NO: 5940823 - DNA, 25 bp, Homo sapien
gcctaggtcccagctacctgtcacc

SEQ ID NO: 5940824 - DNA, 25 bp, Homo sapien
tctctttcgtagacagcaatgaaat

SEQ ID NO: 5940825 - DNA, 25 bp, Homo sapien
tgcgcagaacgactatacaggtgag

SEQ ID NO: 5940826 - DNA, 25 bp, Homo sapien
tggcctctccgagttctttgaaggg

SEQ ID NO: 5940827 - DNA, 25 bp, Homo sapien
tactgggaaatccacttccttagca

SEQ ID NO: 5940828 - DNA, 25 bp, Homo sapien
cggacagtcctctatggtacaaatt

SEQ ID NO: 5940829 - DNA, 25 bp, Homo sapien
ccgcccgagctctcagaagcagggt

SEQ ID NO: 5940830 - DNA, 25 bp, Homo sapien
catttcttcaagccaaaagcttatg

SEQ ID NO: 5940831 - DNA, 25 bp, Homo sapien
ctaacagttttgtgtcttctgatgg

SEQ ID NO: 5940832 - DNA, 25 bp, Homo sapien
tacggacagtcctctatggtacaaa

SEQ ID NO: 5940833 - DNA, 25 bp, Homo sapien
ttttcagacagccaatgaaacatct

SEQ ID NO: 5940834 - DNA, 25 bp, Homo sapien
ggacaagccacaccttttcagacag

SEQ ID NO: 5940835 - DNA, 25 bp, Homo sapien
cacttccttagcaactgaccacttc

SEQ ID NO: 5940836 - DNA, 25 bp, Homo sapien
agaagcagggtgggcggctggggag

SEQ ID NO: 5940837 - DNA, 25 bp, Homo sapien
cctctatggtacaaattcgttacac

SEQ ID NO: 5940838 - DNA, 25 bp, Homo sapien
aaggcgagccgcccgagctctcaga

SEQ ID NO: 5940839 - DNA, 25 bp, Homo sapien
ctggggagaaagcgagaacagcgtg

SEQ ID NO: 5940840 - DNA, 25 bp, Homo sapien
ttgtcggttttgtataaggactgca

SEQ ID NO: 5940841 - DNA, 25 bp, Homo sapien
tctatggtacaaattcgttacacta

SEQ ID NO: 5940842 - DNA, 25 bp, Homo sapien
attgcagtcttgtttctggcctctc

SEQ ID NO: 5940843 - DNA, 25 bp, Homo sapien
cccagctacctgtcaccgttgtgtc

SEQ ID NO: 5940844 - DNA, 25 bp, Homo sapien
gaaacatctacatttcaatgtgtag

SEQ ID NO: 5940845 - DNA, 25 bp, Homo sapien
agcaaaacaaccttcataataagat

SEQ ID NO: 5940846 - DNA, 25 bp, Homo sapien
cttagcaactgaccacttctccagg

SEQ ID NO: 5940847 - DNA, 25 bp, Homo sapien
tttctggcctctccgagttctttga

SEQ ID NO: 5940848 - DNA, 25 bp, Homo sapien
ccctgctcactctctgattaacctt

SEQ ID NO: 5940849 - DNA, 25 bp, Homo sapien
tctttcgtagacagcaatgaaatgg

SEQ ID NO: 5940850 - DNA, 25 bp, Homo sapien
aggtcccagctacctgtcaccgttg

SEQ ID NO: 5940851 - DNA, 25 bp, Homo sapien
acttcagcagctagattccgggatt

SEQ ID NO: 5940852 - DNA, 25 bp, Homo sapien
gtgtcactaacagttttgtgtcttc

SEQ ID NO: 5940853 - DNA, 25 bp, Homo sapien
gaggcggcttctctctagcacatct

SEQ ID NO: 5940854 - DNA, 25 bp, Homo sapien
cagcgtgtgagtctcacgtctcttt

SEQ ID NO: 5940855 - DNA, 25 bp, Homo sapien
cagaaacccctactgggaaatccac

SEQ ID NO: 5940856 - DNA, 25 bp, Homo sapien
cataataagatagcctaggtcccag

SEQ ID NO: 5940857 - DNA, 25 bp, Homo sapien
tgtcttctgatggttcagaaaagag

SEQ ID NO: 5940858 - DNA, 25 bp, Homo sapien
gacatctgccacgttgcacagggca

SEQ ID NO: 5940859 - DNA, 25 bp, Homo sapien
aaaaggcacagagctcctcggggtc

SEQ ID NO: 5940860 - DNA, 25 bp, Homo sapien
agagagcgcagaatccaggagcagc

SEQ ID NO: 5940861 - DNA, 25 bp, Homo sapien
cacgaaggcgagccgcccgagctct

SEQ ID NO: 5940862 - DNA, 25 bp, Homo sapien
acgcaggcgagccccacgaaggcga

SEQ ID NO: 5940863 - DNA, 25 bp, Homo sapien
gaatccaggagcagcccactttcga

SEQ ID NO: 5940864 - DNA, 25 bp, Homo sapien
gcacatccctgctcactctctgatt

SEQ ID NO: 5940865 - DNA, 25 bp, Homo sapien
cggcttctctctagcacatctcttc

SEQ ID NO: 5940866 - DNA, 25 bp, Homo sapien
attccgggattacacagagtgacta

SEQ ID NO: 5940867 - DNA, 25 bp, Homo sapien
gggagggttgaaaaggcacagagct

SEQ ID NO: 5940868 - DNA, 25 bp, Homo sapien
ccttttcagacagccaatgaaacat

SEQ ID NO: 5940869 - DNA, 25 bp, Homo sapien
tcgttacactacatacacaaatata

SEQ ID NO: 5940870 - DNA, 25 bp, Homo sapien
ccattgcagtcttgtttctggcctc

SEQ ID NO: 5940871 - DNA, 25 bp, Homo sapien
aacatctacatttcaatgtgtagaa

SEQ ID NO: 5940872 - DNA, 25 bp, Homo sapien
ctagtacatttcttcaagccaaaag

SEQ ID NO: 5940873 - DNA, 25 bp, Homo sapien
tgcagaaacccctactgggaaatcc

SEQ ID NO: 5940874 - DNA, 25 bp, Homo sapien
gatagcctaggtcccagctacctgt

SEQ ID NO: 5940875 - DNA, 25 bp, Homo sapien
cggtcacggggagtttacttcgcaa

SEQ ID NO: 5940876 - DNA, 25 bp, Homo sapien
aggagaagagagcgcagaatccagg

SEQ ID NO: 5940877 - DNA, 25 bp, Homo sapien
cagcagctagattccgggattacac

SEQ ID NO: 5940878 - DNA, 25 bp, Homo sapien
gagttctttgaagggaaggagaaga

SEQ ID NO: 5940879 - DNA, 25 bp, Homo sapien
aactagtacatttcttcaagccaaa

SEQ ID NO: 5940880 - DNA, 25 bp, Homo sapien
attcactcaactagtacatttcttc

SEQ ID NO: 5940881 - DNA, 25 bp, Homo sapien
gagggttgaaaaggcacagagctcc

SEQ ID NO: 5940882 - DNA, 25 bp, Homo sapien
agcgagaacagcgtgtgagtctcac

SEQ ID NO: 5940883 - DNA, 25 bp, Homo sapien
ttcagcagctagattccgggattac

SEQ ID NO: 5940884 - DNA, 25 bp, Homo sapien
gggaaggagaagagagcgcagaatc

SEQ ID NO: 5940885 - DNA, 25 bp, Homo sapien
ctgatggttcagaaaagagggacag

SEQ ID NO: 5940886 - DNA, 25 bp, Homo sapien
gttttataagctttggtgacagttg

SEQ ID NO: 5940887 - DNA, 25 bp, Homo sapien
aggactgcatcatccctccccccgc

SEQ ID NO: 5940888 - DNA, 25 bp, Homo sapien
tttcaatgtgtagaagctaaacagt

SEQ ID NO: 5940889 - DNA, 25 bp, Homo sapien
cagctacctgtcaccgttgtgtcac

SEQ ID NO: 5940890 - DNA, 25 bp, Homo sapien
ctatacaggtgaggtgcagaaaccc

SEQ ID NO: 5940891 - DNA, 25 bp, Homo sapien
gacagccaatgaaacatctacattt

SEQ ID NO: 5940892 - DNA, 25 bp, Homo sapien
ttgtgtcactaacagttttgtgtct

SEQ ID NO: 5940893 - DNA, 25 bp, Homo sapien
gcagcccactttcgaaccccacgca

SEQ ID NO: 5940894 - DNA, 25 bp, Homo sapien
aacaagcaaaacaaccttcataata

SEQ ID NO: 5940895 - DNA, 25 bp, Homo sapien
gactatacaggtgaggtgcagaaac

SEQ ID NO: 5940896 - DNA, 25 bp, Homo sapien
aagccacaccttttcagacagccaa

SEQ ID NO: 5940897 - DNA, 25 bp, Homo sapien
ccgagctctcagaagcagggtgggc

SEQ ID NO: 5940898 - DNA, 25 bp, Homo sapien
tctcagaagcagggtgggcggctgg

SEQ ID NO: 5940899 - DNA, 25 bp, Homo sapien
gttacggacagtcctctatggtaca

SEQ ID NO: 5940900 - DNA, 25 bp, Homo sapien
ccttcataataagatagcctaggtc

SEQ ID NO: 5940901 - DNA, 25 bp, Homo sapien
gactaactgggccaaattcttaaaa

SEQ ID NO: 5940902 - DNA, 25 bp, Homo sapien
tcactctctgattaacctttaattc

SEQ ID NO: 5940903 - DNA, 25 bp, Homo sapien
ggcggctggggagggttgaaaaggc

SEQ ID NO: 5940904 - DNA, 25 bp, Homo sapien
aagggaaggagaagagagcgcagaa

SEQ ID NO: 5940905 - DNA, 25 bp, Homo sapien
caattaaaccattcctcagacatct

SEQ ID NO: 5940906 - DNA, 25 bp, Homo sapien
ggcacagagctcctcggggtcaatt

SEQ ID NO: 5940907 - DNA, 25 bp, Homo sapien
tacatttcaatgtgtagaagctaaa

SEQ ID NO: 5940908 - DNA, 25 bp, Homo sapien
tctggcctctccgagttctttgaag

SEQ ID NO: 5940909 - DNA, 25 bp, Homo sapien
tttaattcactcaactagtacattt

SEQ ID NO: 5940910 - DNA, 25 bp, Homo sapien
ttcaggtgtggtttttgccacaaag

SEQ ID NO: 5940911 - DNA, 25 bp, Homo sapien
cacaaagcagtttttaagtagatct

SEQ ID NO: 5940912 - DNA, 25 bp, Homo sapien
cagagctcctcggggtcaattaaac

SEQ ID NO: 5940913 - DNA, 25 bp, Homo sapien
gtgactaactgggccaaattcttaa

SEQ ID NO: 5940914 - DNA, 25 bp, Homo sapien
acttctccaggtatcaccagcttaa

SEQ ID NO: 5940915 - DNA, 25 bp, Homo sapien
agtacatttcttcaagccaaaagct

SEQ ID NO: 5940916 - DNA, 25 bp, Homo sapien
taagtagatctctctaggaaggaca

SEQ ID NO: 5940917 - DNA, 25 bp, Homo sapien
ccgccccccattgcagtcttgtttc

SEQ ID NO: 5940918 - DNA, 25 bp, Homo sapien
cctgccaccattctgatccctctgc

SEQ ID NO: 5940919 - DNA, 25 bp, Homo sapien
tgtggagctggcgattgcctttggg

SEQ ID NO: 5940920 - DNA, 25 bp, Homo sapien
acccgctcccgcagcccattttgaa

SEQ ID NO: 5940921 - DNA, 25 bp, Homo sapien
tgccaccattctgatccctctgcac

SEQ ID NO: 5940922 - DNA, 25 bp, Homo sapien
atgttgagggaattaggtttgcaaa

SEQ ID NO: 5940923 - DNA, 25 bp, Homo sapien
cttagaattaaggatccaaaagaag

SEQ ID NO: 5940924 - DNA, 25 bp, Homo sapien
catcggtaatgctcagtgtggagct

SEQ ID NO: 5940925 - DNA, 25 bp, Homo sapien
tgctcaccaggaacccgctcccgca

SEQ ID NO: 5940926 - DNA, 25 bp, Homo sapien
ctggtaacgacttaaattgcttgtg

SEQ ID NO: 5940927 - DNA, 25 bp, Homo sapien
aatctgcatcattgttgtatctccc

SEQ ID NO: 5940928 - DNA, 25 bp, Homo sapien
tctaggaaaacctctatgatgtttg

SEQ ID NO: 5940929 - DNA, 25 bp, Homo sapien
atagtactggtaacgacttaaattg

SEQ ID NO: 5940930 - DNA, 25 bp, Homo sapien
cctaaagctcggtactgccatctag

SEQ ID NO: 5940931 - DNA, 25 bp, Homo sapien
acattgctcaccaggaacccgctcc

SEQ ID NO: 5940932 - DNA, 25 bp, Homo sapien
gtatataaactgtattaaaactggg

SEQ ID NO: 5940933 - DNA, 25 bp, Homo sapien
gtgagggaacacatagtactggtaa

SEQ ID NO: 5940934 - DNA, 25 bp, Homo sapien
gttttaaatctgcatcattgttgta

SEQ ID NO: 5940935 - DNA, 25 bp, Homo sapien
acacatagtactggtaacgacttaa

SEQ ID NO: 5940936 - DNA, 25 bp, Homo sapien
tgcaccacgtgtcttagaattaagg

SEQ ID NO: 5940937 - DNA, 25 bp, Homo sapien
tttccctccaccaagaaattctaaa

SEQ ID NO: 5940938 - DNA, 25 bp, Homo sapien
tgatgtttgttctgttgtccttttt

SEQ ID NO: 5940939 - DNA, 25 bp, Homo sapien
tacattggtcatgaggaatccactc

SEQ ID NO: 5940940 - DNA, 25 bp, Homo sapien
gcagcccattttgaaatgtgccctg

SEQ ID NO: 5940941 - DNA, 25 bp, Homo sapien
tccctccaccaagaaattctaaatt

SEQ ID NO: 5940942 - DNA, 25 bp, Homo sapien
gacttggagaagggatgttgaggga

SEQ ID NO: 5940943 - DNA, 25 bp, Homo sapien
tcacctttaattttcctgccaccat

SEQ ID NO: 5940944 - DNA, 25 bp, Homo sapien
acacagcaatcgtaagtaaatagaa

SEQ ID NO: 5940945 - DNA, 25 bp, Homo sapien
ccatccaagaaatgtatagaataca

SEQ ID NO: 5940946 - DNA, 25 bp, Homo sapien
accattctgatccctctgcaccacg

SEQ ID NO: 5940947 - DNA, 25 bp, Homo sapien
tccaatggacttggagaagggatgt

SEQ ID NO: 5940948 - DNA, 25 bp, Homo sapien
tttttataaattgtatgcttcagaa

SEQ ID NO: 5940949 - DNA, 25 bp, Homo sapien
aagttaccatggtgttgaacaatgc

SEQ ID NO: 5940950 - DNA, 25 bp, Homo sapien
tacgtcgtatataaactgtattaaa

SEQ ID NO: 5940951 - DNA, 25 bp, Homo sapien
caatggacttggagaagggatgttg

SEQ ID NO: 5940952 - DNA, 25 bp, Homo sapien
tctgcatcattgttgtatctcccct

SEQ ID NO: 5940953 - DNA, 25 bp, Homo sapien
attgctcaccaggaacccgctcccg

SEQ ID NO: 5940954 - DNA, 25 bp, Homo sapien
tctatgatgtttgttctgttgtcct

SEQ ID NO: 5940955 - DNA, 25 bp, Homo sapien
ccctggtacgtcgtatataaactgt

SEQ ID NO: 5940956 - DNA, 25 bp, Homo sapien
caccaagaaattctaaatttgaata

SEQ ID NO: 5940957 - DNA, 25 bp, Homo sapien
taaatctgcatcattgttgtatctc

SEQ ID NO: 5940958 - DNA, 25 bp, Homo sapien
ggtgtatctatccatcggtaatgct

SEQ ID NO: 5940959 - DNA, 25 bp, Homo sapien
tcgtatataaactgtattaaaactg

SEQ ID NO: 5940960 - DNA, 25 bp, Homo sapien
gaggaatccactcctgcagcccatc

SEQ ID NO: 5940961 - DNA, 25 bp, Homo sapien
cctgcagcccatccaagaaatgtat

SEQ ID NO: 5940962 - DNA, 25 bp, Homo sapien
ggtacgtcgtatataaactgtatta

SEQ ID NO: 5940963 - DNA, 25 bp, Homo sapien
ctgttttccggtgagggaacacata

SEQ ID NO: 5940964 - DNA, 25 bp, Homo sapien
cctatcagggtcttccaccctggta

SEQ ID NO: 5940965 - DNA, 25 bp, Homo sapien
atacattgctcaccaggaacccgct

SEQ ID NO: 5940966 - DNA, 25 bp, Homo sapien
gcccatccaagaaatgtatagaata

SEQ ID NO: 5940967 - DNA, 25 bp, Homo sapien
ccgctcccgcagcccattttgaaat

SEQ ID NO: 5940968 - DNA, 25 bp, Homo sapien
agcaatcgtaagtaaatagaaaagt

SEQ ID NO: 5940969 - DNA, 25 bp, Homo sapien
tacctctgcccctatcagggtcttc

SEQ ID NO: 5940970 - DNA, 25 bp, Homo sapien
aaattctaaatttgaatatgcagag

SEQ ID NO: 5940971 - DNA, 25 bp, Homo sapien
taaatttgaatatgcagagattgaa

SEQ ID NO: 5940972 - DNA, 25 bp, Homo sapien
taaattgtatgcttcagaaaataat

SEQ ID NO: 5940973 - DNA, 25 bp, Homo sapien
ccatggtgttgaacaatgcatgttt

SEQ ID NO: 5940974 - DNA, 25 bp, Homo sapien
ttggtcatgaggaatccactcctgc

SEQ ID NO: 5940975 - DNA, 25 bp, Homo sapien
tgtatctatccatcggtaatgctca

SEQ ID NO: 5940976 - DNA, 25 bp, Homo sapien
tctgcccctatcagggtcttccacc

SEQ ID NO: 5940977 - DNA, 25 bp, Homo sapien
ggaaaacctctatgatgtttgttct

SEQ ID NO: 5940978 - DNA, 25 bp, Homo sapien
ctgtactttgtatatagaatttttt

SEQ ID NO: 5940979 - DNA, 25 bp, Homo sapien
tccactcctgcagcccatccaagaa

SEQ ID NO: 5940980 - DNA, 25 bp, Homo sapien
ggtgttgaacaatgcatgtttttta

SEQ ID NO: 5940981 - DNA, 25 bp, Homo sapien
ggggtttcttaccagttgctgtact

SEQ ID NO: 5940982 - DNA, 25 bp, Homo sapien
taaattgcttgtgaccactgagaaa

SEQ ID NO: 5940983 - DNA, 25 bp, Homo sapien
gggtcttccaccctggtacgtcgta

SEQ ID NO: 5940984 - DNA, 25 bp, Homo sapien
ccccttaccgattcattcctgtgct

SEQ ID NO: 5940985 - DNA, 25 bp, Homo sapien
gacttaaattgcttgtgaccactga

SEQ ID NO: 5940986 - DNA, 25 bp, Homo sapien
gctcttggtgtatctatccatcggt

SEQ ID NO: 5940987 - DNA, 25 bp, Homo sapien
gtatctcccctatccaagaaatgta

SEQ ID NO: 5940988 - DNA, 25 bp, Homo sapien
ttgtatctcccctatccaagaaatg

SEQ ID NO: 5940989 - DNA, 25 bp, Homo sapien
aattgcttgtgaccactgagaaaca

SEQ ID NO: 5940990 - DNA, 25 bp, Homo sapien
taggaaaacctctatgatgtttgtt

SEQ ID NO: 5940991 - DNA, 25 bp, Homo sapien
tcagggtcttccaccctggtacgtc

SEQ ID NO: 5940992 - DNA, 25 bp, Homo sapien
tccatcggtaatgctcagtgtggag

SEQ ID NO: 5940993 - DNA, 25 bp, Homo sapien
cccgaaattacaactgcattatatt

SEQ ID NO: 5940994 - DNA, 25 bp, Homo sapien
tataaattgtatgcttcagaaaata

SEQ ID NO: 5940995 - DNA, 25 bp, Homo sapien
tcatgaggaatccactcctgcagcc

SEQ ID NO: 5940996 - DNA, 25 bp, Homo sapien
aagttttaaatctgcatcattgttg

SEQ ID NO: 5940997 - DNA, 25 bp, Homo sapien
ggatgttgagggaattaggtttgca

SEQ ID NO: 5940998 - DNA, 25 bp, Homo sapien
gaattttttataaattgtatgcttc

SEQ ID NO: 5940999 - DNA, 25 bp, Homo sapien
tagaatacattgctcaccaggaacc

SEQ ID NO: 5941000 - DNA, 25 bp, Homo sapien
tagaattaaggatccaaaagaagaa

SEQ ID NO: 5941001 - DNA, 25 bp, Homo sapien
gtactttgtatatagaattttttat

SEQ ID NO: 5941002 - DNA, 25 bp, Homo sapien
gaatattacctctgcccctatcagg

SEQ ID NO: 5941003 - DNA, 25 bp, Homo sapien
tccctctgcaccacgtgtcttagaa

SEQ ID NO: 5941004 - DNA, 25 bp, Homo sapien
tgttgaacaatgcatgttttttatc

SEQ ID NO: 5941005 - DNA, 25 bp, Homo sapien
gaacacatagtactggtaacgactt

SEQ ID NO: 5941006 - DNA, 25 bp, Homo sapien
tgcccctatcagggtcttccaccct

SEQ ID NO: 5941007 - DNA, 25 bp, Homo sapien
accagttgctgtactttgtatatag

SEQ ID NO: 5941008 - DNA, 25 bp, Homo sapien
ttttatcctaaagctcggtactgcc

SEQ ID NO: 5941009 - DNA, 25 bp, Homo sapien
ctttaattttcctgccaccattctg

SEQ ID NO: 5941010 - DNA, 25 bp, Homo sapien
gtcttagaattaaggatccaaaaga

SEQ ID NO: 5941011 - DNA, 25 bp, Homo sapien
ttccccttaccgattcattcctgtg

SEQ ID NO: 5941012 - DNA, 25 bp, Homo sapien
tcttaccagttgctgtactttgtat

SEQ ID NO: 5941013 - DNA, 25 bp, Homo sapien
aattgtatgcttcagaaaataattt

SEQ ID NO: 5941014 - DNA, 25 bp, Homo sapien
atattacctctgcccctatcagggt

SEQ ID NO: 5941015 - DNA, 25 bp, Homo sapien
caccacgtgtcttagaattaaggat

SEQ ID NO: 5941016 - DNA, 25 bp, Homo sapien
tggagaagggatgttgagggaatta

SEQ ID NO: 5941017 - DNA, 25 bp, Homo sapien
attcctgtgctcttggtgtatctat

SEQ ID NO: 5941018 - DNA, 25 bp, Homo sapien
tatagaatacattgctcaccaggaa

SEQ ID NO: 5941019 - DNA, 25 bp, Homo sapien
aaaagttttaaatctgcatcattgt

SEQ ID NO: 5941020 - DNA, 25 bp, Homo sapien
acaatgcatgttttttatcctaaag

SEQ ID NO: 5941021 - DNA, 25 bp, Homo sapien
acgtgtcttagaattaaggatccaa

SEQ ID NO: 5941022 - DNA, 25 bp, Homo sapien
agttccccttaccgattcattcctg

SEQ ID NO: 5941023 - DNA, 25 bp, Homo sapien
tgcatgttttttatcctaaagctcg

SEQ ID NO: 5941024 - DNA, 25 bp, Homo sapien
gtgtcttagaattaaggatccaaaa

SEQ ID NO: 5941025 - DNA, 25 bp, Homo sapien
tctatccatcggtaatgctcagtgt

SEQ ID NO: 5941026 - DNA, 25 bp, Homo sapien
catctaggaaaacctctatgatgtt

SEQ ID NO: 5941027 - DNA, 25 bp, Homo sapien
tccaccctggtacgtcgtatataaa

SEQ ID NO: 5941028 - DNA, 25 bp, Homo sapien
tttaaatctgcatcattgttgtatc

SEQ ID NO: 5941029 - DNA, 25 bp, Homo sapien
gtcttccaccctggtacgtcgtata

SEQ ID NO: 5941030 - DNA, 25 bp, Homo sapien
cggtgagggaacacatagtactggt

SEQ ID NO: 5941031 - DNA, 25 bp, Homo sapien
gttccaatggacttggagaagggat

SEQ ID NO: 5941032 - DNA, 25 bp, Homo sapien
tgttttttatcctaaagctcggtac

SEQ ID NO: 5941033 - DNA, 25 bp, Homo sapien
tttttccctccaccaagaaattcta

SEQ ID NO: 5941034 - DNA, 25 bp, Homo sapien
cccttcacctttaattttcctgcca

SEQ ID NO: 5941035 - DNA, 25 bp, Homo sapien
cctctatgatgtttgttctgttgtc

SEQ ID NO: 5941036 - DNA, 25 bp, Homo sapien
attttttataaattgtatgcttcag

SEQ ID NO: 5941037 - DNA, 25 bp, Homo sapien
ggtttcttaccagttgctgtacttt

SEQ ID NO: 5941038 - DNA, 25 bp, Homo sapien
cttccaccctggtacgtcgtatata

SEQ ID NO: 5941039 - DNA, 25 bp, Homo sapien
ggtaatgctcagtgtggagctggcg

SEQ ID NO: 5941040 - DNA, 25 bp, Homo sapien
ggggcttccccgaaattacaactgc

SEQ ID NO: 5941041 - DNA, 25 bp, Homo sapien
atggtgttgaacaatgcatgttttt

SEQ ID NO: 5941042 - DNA, 25 bp, Homo sapien
tatctatccatcggtaatgctcagt

SEQ ID NO: 5941043 - DNA, 25 bp, Homo sapien
atgctcagtgtggagctggcgattg

SEQ ID NO: 5941044 - DNA, 25 bp, Homo sapien
gatccctctgcaccacgtgtcttag

SEQ ID NO: 5941045 - DNA, 25 bp, Homo sapien
cgattcattcctgtgctcttggtgt

SEQ ID NO: 5941046 - DNA, 25 bp, Homo sapien
aaaagttaccatggtgttgaacaat

SEQ ID NO: 5941047 - DNA, 25 bp, Homo sapien
ttaaaagttttaaatctgcatcatt

SEQ ID NO: 5941048 - DNA, 25 bp, Homo sapien
gagctggcgattgcctttggggggg

SEQ ID NO: 5941049 - DNA, 25 bp, Homo sapien
tccaccaagaaattctaaatttgaa

SEQ ID NO: 5941050 - DNA, 25 bp, Homo sapien
caatcgtaagtaaatagaaaagttc

SEQ ID NO: 5941051 - DNA, 25 bp, Homo sapien
agcccattttgaaatgtgccctgtg

SEQ ID NO: 5941052 - DNA, 25 bp, Homo sapien
ggcttccccgaaattacaactgcat

SEQ ID NO: 5941053 - DNA, 25 bp, Homo sapien
ttgaatattacctctgcccctatca

SEQ ID NO: 5941054 - DNA, 25 bp, Homo sapien
gttaccatggtgttgaacaatgcat

SEQ ID NO: 5941055 - DNA, 25 bp, Homo sapien
ccaccattctgatccctctgcacca

SEQ ID NO: 5941056 - DNA, 25 bp, Homo sapien
ctgatccctctgcaccacgtgtctt

SEQ ID NO: 5941057 - DNA, 25 bp, Homo sapien
ttgtgaccactgagaaacacagcaa

SEQ ID NO: 5941058 - DNA, 25 bp, Homo sapien
tggagctggcgattgcctttggggg

SEQ ID NO: 5941059 - DNA, 25 bp, Homo sapien
cctctgcaccacgtgtcttagaatt

SEQ ID NO: 5941060 - DNA, 25 bp, Homo sapien
tcagtgtggagctggcgattgcctt

SEQ ID NO: 5941061 - DNA, 25 bp, Homo sapien
gctcggtactgccatctaggaaaac

SEQ ID NO: 5941062 - DNA, 25 bp, Homo sapien
aatccactcctgcagcccatccaag

SEQ ID NO: 5941063 - DNA, 25 bp, Homo sapien
cctctgcccctatcagggtcttcca

SEQ ID NO: 5941064 - DNA, 25 bp, Homo sapien
tcttggtgtatctatccatcggtaa

SEQ ID NO: 5941065 - DNA, 25 bp, Homo sapien
ttaattttcctgccaccattctgat

SEQ ID NO: 5941066 - DNA, 25 bp, Homo sapien
tctttcaagttccaatggacttgga

SEQ ID NO: 5941067 - DNA, 25 bp, Homo sapien
ctcaccaggaacccgctcccgcagc

SEQ ID NO: 5941068 - DNA, 25 bp, Homo sapien
tatccatcggtaatgctcagtgtgg

SEQ ID NO: 5941069 - DNA, 25 bp, Homo sapien
aatttgaatatgcagagattgaata

SEQ ID NO: 5941070 - DNA, 25 bp, Homo sapien
tgaatatgcagagattgaatattac

SEQ ID NO: 5941071 - DNA, 25 bp, Homo sapien
attctaaatttgaatatgcagagat

SEQ ID NO: 5941072 - DNA, 25 bp, Homo sapien
acatagtactggtaacgacttaaat

SEQ ID NO: 5941073 - DNA, 25 bp, Homo sapien
catcattgttgtatctcccctatcc

SEQ ID NO: 5941074 - DNA, 25 bp, Homo sapien
ggggtctttcaagttccaatggact

SEQ ID NO: 5941075 - DNA, 25 bp, Homo sapien
caccaggaacccgctcccgcagccc

SEQ ID NO: 5941076 - DNA, 25 bp, Homo sapien
tcctgtgctcttggtgtatctatcc

SEQ ID NO: 5941077 - DNA, 25 bp, Homo sapien
ttttttatcctaaagctcggtactg

SEQ ID NO: 5941078 - DNA, 25 bp, Homo sapien
tgggggtctttcaagttccaatgga

SEQ ID NO: 5941079 - DNA, 25 bp, Homo sapien
tcattcctgtgctcttggtgtatct

SEQ ID NO: 5941080 - DNA, 25 bp, Homo sapien
actgagaaacacagcaatcgtaagt

SEQ ID NO: 5941081 - DNA, 25 bp, Homo sapien
gaacccgctcccgcagcccattttg

SEQ ID NO: 5941082 - DNA, 25 bp, Homo sapien
gctcccgcagcccattttgaaatgt

SEQ ID NO: 5941083 - DNA, 25 bp, Homo sapien
tatttgtctgtttgttttgttttta

SEQ ID NO: 5941084 - DNA, 25 bp, Homo sapien
gaagggatgttgagggaattaggtt

SEQ ID NO: 5941085 - DNA, 25 bp, Homo sapien
cattggtcatgaggaatccactcct

SEQ ID NO: 5941086 - DNA, 25 bp, Homo sapien
aactggggtttcttaccagttgctg

SEQ ID NO: 5941087 - DNA, 25 bp, Homo sapien
tatcagggtcttccaccctggtacg

SEQ ID NO: 5941088 - DNA, 25 bp, Homo sapien
ttatcctaaagctcggtactgccat

SEQ ID NO: 5941089 - DNA, 25 bp, Homo sapien
gagattgaatattacctctgcccct

SEQ ID NO: 5941090 - DNA, 25 bp, Homo sapien
ttgtatgcttcagaaaataatttat

SEQ ID NO: 5941091 - DNA, 25 bp, Homo sapien
tttataaattgtatgcttcagaaaa

SEQ ID NO: 5941092 - DNA, 25 bp, Homo sapien
atggacttggagaagggatgttgag

SEQ ID NO: 5941093 - DNA, 25 bp, Homo sapien
ttatattcctaacccttcaccttta

SEQ ID NO: 5941094 - DNA, 25 bp, Homo sapien
aatacattggtcatgaggaatccac

SEQ ID NO: 5941095 - DNA, 25 bp, Homo sapien
gttgctgtactttgtatatagaatt

SEQ ID NO: 5941096 - DNA, 25 bp, Homo sapien
gggaacacatagtactggtaacgac

SEQ ID NO: 5941097 - DNA, 25 bp, Homo sapien
atgaggaatccactcctgcagccca

SEQ ID NO: 5941098 - DNA, 25 bp, Homo sapien
agaaacacagcaatcgtaagtaaat

SEQ ID NO: 5941099 - DNA, 25 bp, Homo sapien
attacctctgcccctatcagggtct

SEQ ID NO: 5941100 - DNA, 25 bp, Homo sapien
attacaactgcattatattcctaac

SEQ ID NO: 5941101 - DNA, 25 bp, Homo sapien
aatgcatgttttttatcctaaagct

SEQ ID NO: 5941102 - DNA, 25 bp, Homo sapien
tcggtaatgctcagtgtggagctgg

SEQ ID NO: 5941103 - DNA, 25 bp, Homo sapien
agtgtggagctggcgattgcctttg

SEQ ID NO: 5941104 - DNA, 25 bp, Homo sapien
cttggagaagggatgttgagggaat

SEQ ID NO: 5941105 - DNA, 25 bp, Homo sapien
cttaaattgcttgtgaccactgaga

SEQ ID NO: 5941106 - DNA, 25 bp, Homo sapien
aatatgcagagattgaatattacct

SEQ ID NO: 5941107 - DNA, 25 bp, Homo sapien
ttaccagttgctgtactttgtatat

SEQ ID NO: 5941108 - DNA, 25 bp, Homo sapien
tgtatagaatacattgctcaccagg

SEQ ID NO: 5941109 - DNA, 25 bp, Homo sapien
aattaaaagttttaaatctgcatca

SEQ ID NO: 5941110 - DNA, 25 bp, Homo sapien
gagggaattaggtttgcaaaggggc

SEQ ID NO: 5941111 - DNA, 25 bp, Homo sapien
gaaatgtatagaatacattgctcac

SEQ ID NO: 5941112 - DNA, 25 bp, Homo sapien
taacgacttaaattgcttgtgacca

SEQ ID NO: 5941113 - DNA, 25 bp, Homo sapien
cgtcgtatataaactgtattaaaac

SEQ ID NO: 5941114 - DNA, 25 bp, Homo sapien
tttcttaccagttgctgtactttgt

SEQ ID NO: 5941115 - DNA, 25 bp, Homo sapien
ttggtgtatctatccatcggtaatg

SEQ ID NO: 5941116 - DNA, 25 bp, Homo sapien
tccccgaaattacaactgcattata

SEQ ID NO: 5941117 - DNA, 25 bp, Homo sapien
ccactgagaaacacagcaatcgtaa

SEQ ID NO: 5941118 - DNA, 25 bp, Homo sapien
tatgatgtttgttctgttgtccttt

SEQ ID NO: 5941119 - DNA, 25 bp, Homo sapien
acctttaattttcctgccaccattc

SEQ ID NO: 5941120 - DNA, 25 bp, Homo sapien
tgcagagattgaatattacctctgc

SEQ ID NO: 5941121 - DNA, 25 bp, Homo sapien
cgaaattacaactgcattatattcc

SEQ ID NO: 5941122 - DNA, 25 bp, Homo sapien
cactcctgcagcccatccaagaaat

SEQ ID NO: 5941123 - DNA, 25 bp, Homo sapien
aaattacaactgcattatattccta

SEQ ID NO: 5941124 - DNA, 25 bp, Homo sapien
gccatctaggaaaacctctatgatg

SEQ ID NO: 5941125 - DNA, 25 bp, Homo sapien
aagttccaatggacttggagaaggg

SEQ ID NO: 5941126 - DNA, 25 bp, Homo sapien
aaatgtatagaatacattggtcatg

SEQ ID NO: 5941127 - DNA, 25 bp, Homo sapien
cctccaccaagaaattctaaatttg

SEQ ID NO: 5941128 - DNA, 25 bp, Homo sapien
accgattcattcctgtgctcttggt

SEQ ID NO: 5941129 - DNA, 25 bp, Homo sapien
taatgctcagtgtggagctggcgat

SEQ ID NO: 5941130 - DNA, 25 bp, Homo sapien
caccctggtacgtcgtatataaact

SEQ ID NO: 5941131 - DNA, 25 bp, Homo sapien
aggaacccgctcccgcagcccattt

SEQ ID NO: 5941132 - DNA, 25 bp, Homo sapien
gttgagggaattaggtttgcaaagg

SEQ ID NO: 5941133 - DNA, 25 bp, Homo sapien
tgctgtactttgtatatagaatttt

SEQ ID NO: 5941134 - DNA, 25 bp, Homo sapien
tacaactgcattatattcctaaccc

SEQ ID NO: 5941135 - DNA, 25 bp, Homo sapien
tcaagttccaatggacttggagaag

SEQ ID NO: 5941136 - DNA, 25 bp, Homo sapien
atgtatagaatacattggtcatgag

SEQ ID NO: 5941137 - DNA, 25 bp, Homo sapien
tctgcaccacgtgtcttagaattaa

SEQ ID NO: 5941138 - DNA, 25 bp, Homo sapien
agggatgttgagggaattaggtttg

SEQ ID NO: 5941139 - DNA, 25 bp, Homo sapien
ctcctgcagcccatccaagaaatgt

SEQ ID NO: 5941140 - DNA, 25 bp, Homo sapien
gagaagggatgttgagggaattagg

SEQ ID NO: 5941141 - DNA, 25 bp, Homo sapien
ctgtgctcttggtgtatctatccat

SEQ ID NO: 5941142 - DNA, 25 bp, Homo sapien
ttctgatccctctgcaccacgtgtc

SEQ ID NO: 5941143 - DNA, 25 bp, Homo sapien
ttcctgccaccattctgatccctct

SEQ ID NO: 5941144 - DNA, 25 bp, Homo sapien
gtgaccactgagaaacacagcaatc

SEQ ID NO: 5941145 - DNA, 25 bp, Homo sapien
aaaaaagttaccatggtgttgaaca

SEQ ID NO: 5941146 - DNA, 25 bp, Homo sapien
tttcaagttccaatggacttggaga

SEQ ID NO: 5941147 - DNA, 25 bp, Homo sapien
gctggcgattgcctttggggggggg

SEQ ID NO: 5941148 - DNA, 25 bp, Homo sapien
gattgaatattacctctgcccctat

SEQ ID NO: 5941149 - DNA, 25 bp, Homo sapien
ttgcttgtgaccactgagaaacaca

SEQ ID NO: 5941150 - DNA, 25 bp, Homo sapien
gtatgcttcagaaaataatttattt

SEQ ID NO: 5941151 - DNA, 25 bp, Homo sapien
acgacttaaattgcttgtgaccact

SEQ ID NO: 5941152 - DNA, 25 bp, Homo sapien
tcggtactgccatctaggaaaacct

SEQ ID NO: 5941153 - DNA, 25 bp, Homo sapien
tgttgtatctcccctatccaagaaa

SEQ ID NO: 5941154 - DNA, 25 bp, Homo sapien
cattatattcctaacccttcacctt

SEQ ID NO: 5941155 - DNA, 25 bp, Homo sapien
ctcccctatccaagaaatgtataga

SEQ ID NO: 5941156 - DNA, 25 bp, Homo sapien
atcctaaagctcggtactgccatct

SEQ ID NO: 5941157 - DNA, 25 bp, Homo sapien
agaaattctaaatttgaatatgcag

SEQ ID NO: 5941158 - DNA, 25 bp, Homo sapien
tttccggtgagggaacacatagtac

SEQ ID NO: 5941159 - DNA, 25 bp, Homo sapien
taccatggtgttgaacaatgcatgt

SEQ ID NO: 5941160 - DNA, 25 bp, Homo sapien
ccgcagcccattttgaaatgtgccc

SEQ ID NO: 5941161 - DNA, 25 bp, Homo sapien
gagggaacacatagtactggtaacg

SEQ ID NO: 5941162 - DNA, 25 bp, Homo sapien
ttgaacaatgcatgttttttatcct

SEQ ID NO: 5941163 - DNA, 25 bp, Homo sapien
atagaatacattggtcatgaggaat

SEQ ID NO: 5941164 - DNA, 25 bp, Homo sapien
taaagctcggtactgccatctagga

SEQ ID NO: 5941165 - DNA, 25 bp, Homo sapien
caactgcattatattcctaaccctt

SEQ ID NO: 5941166 - DNA, 25 bp, Homo sapien
cattctgatccctctgcaccacgtg

SEQ ID NO: 5941167 - DNA, 25 bp, Homo sapien
aactgttttccggtgagggaacaca

SEQ ID NO: 5941168 - DNA, 25 bp, Homo sapien
ttaccgattcattcctgtgctcttg

SEQ ID NO: 5941169 - DNA, 25 bp, Homo sapien
cctatccaagaaatgtatagaatac

SEQ ID NO: 5941170 - DNA, 25 bp, Homo sapien
tgcagcccatccaagaaatgtatag

SEQ ID NO: 5941171 - DNA, 25 bp, Homo sapien
acagcaatcgtaagtaaatagaaaa

SEQ ID NO: 5941172 - DNA, 25 bp, Homo sapien
agaaaaaaagttaccatggtgttga

SEQ ID NO: 5941173 - DNA, 25 bp, Homo sapien
attgttgtatctcccctatccaaga

SEQ ID NO: 5941174 - DNA, 25 bp, Homo sapien
tccggtgagggaacacatagtactg

SEQ ID NO: 5941175 - DNA, 25 bp, Homo sapien
gaccactgagaaacacagcaatcgt

SEQ ID NO: 5941176 - DNA, 25 bp, Homo sapien
gtgctcttggtgtatctatccatcg

SEQ ID NO: 5941177 - DNA, 25 bp, Homo sapien
gaatacattgctcaccaggaacccg

SEQ ID NO: 5941178 - DNA, 25 bp, Homo sapien
ccaggaacccgctcccgcagcccat

SEQ ID NO: 5941179 - DNA, 25 bp, Homo sapien
gtatagaatacattggtcatgagga

SEQ ID NO: 5941180 - DNA, 25 bp, Homo sapien
aagctcggtactgccatctaggaaa

SEQ ID NO: 5941181 - DNA, 25 bp, Homo sapien
cttcacctttaattttcctgccacc

SEQ ID NO: 5941182 - DNA, 25 bp, Homo sapien
tactggtaacgacttaaattgcttg

SEQ ID NO: 5941183 - DNA, 25 bp, Homo sapien
atctcccctatccaagaaatgtata

SEQ ID NO: 5941184 - DNA, 25 bp, Homo sapien
ggtctttcaagttccaatggacttg

SEQ ID NO: 5941185 - DNA, 25 bp, Homo sapien
gcttgtgaccactgagaaacacagc

SEQ ID NO: 5941186 - DNA, 25 bp, Homo sapien
taaactgttttccggtgagggaaca

SEQ ID NO: 5941187 - DNA, 25 bp, Homo sapien
cagcccatccaagaaatgtatagaa

SEQ ID NO: 5941188 - DNA, 25 bp, Homo sapien
ttttcctgccaccattctgatccct

SEQ ID NO: 5941189 - DNA, 25 bp, Homo sapien
actgcattatattcctaacccttca

SEQ ID NO: 5941190 - DNA, 25 bp, Homo sapien
tcattgttgtatctcccctatccaa

SEQ ID NO: 5941191 - DNA, 25 bp, Homo sapien
tgagaaacacagcaatcgtaagtaa

SEQ ID NO: 5941192 - DNA, 25 bp, Homo sapien
aattttcctgccaccattctgatcc

SEQ ID NO: 5941193 - DNA, 25 bp, Homo sapien
ccacgtgtcttagaattaaggatcc

SEQ ID NO: 5941194 - DNA, 25 bp, Homo sapien
ctggtacgtcgtatataaactgtat

SEQ ID NO: 5941195 - DNA, 25 bp, Homo sapien
ggaatccactcctgcagcccatcca

SEQ ID NO: 5941196 - DNA, 25 bp, Homo sapien
ggtcatgaggaatccactcctgcag

SEQ ID NO: 5941197 - DNA, 25 bp, Homo sapien
agtactggtaacgacttaaattgct

SEQ ID NO: 5941198 - DNA, 25 bp, Homo sapien
tatgcagagattgaatattacctct

SEQ ID NO: 5941199 - DNA, 25 bp, Homo sapien
ggtactgccatctaggaaaacctct

SEQ ID NO: 5941200 - DNA, 25 bp, Homo sapien
tgcatcattgttgtatctcccctat

SEQ ID NO: 5941201 - DNA, 25 bp, Homo sapien
gttttccggtgagggaacacatagt

SEQ ID NO: 5941202 - DNA, 25 bp, Homo sapien
tctaaatttgaatatgcagagattg

SEQ ID NO: 5941203 - DNA, 25 bp, Homo sapien
cccctatccaagaaatgtatagaat

SEQ ID NO: 5941204 - DNA, 25 bp, Homo sapien
ggtgggggtctttcaagttccaatg

SEQ ID NO: 5941205 - DNA, 25 bp, Homo sapien
tactgccatctaggaaaacctctat

SEQ ID NO: 5941206 - DNA, 25 bp, Homo sapien
aaaacctctatgatgtttgttctgt

SEQ ID NO: 5941207 - DNA, 25 bp, Homo sapien
cccctatcagggtcttccaccctgg

SEQ ID NO: 5941208 - DNA, 25 bp, Homo sapien
cagagattgaatattacctctgccc

SEQ ID NO: 5941209 - DNA, 25 bp, Homo sapien
tagaaaagttccccttaccgattca

SEQ ID NO: 5941210 - DNA, 25 bp, Homo sapien
agaatacattggtcatgaggaatcc

SEQ ID NO: 5941211 - DNA, 25 bp, Homo sapien
tgcattatattcctaacccttcacc

SEQ ID NO: 5941212 - DNA, 25 bp, Homo sapien
catgttttttatcctaaagctcggt

SEQ ID NO: 5941213 - DNA, 25 bp, Homo sapien
aatgtatagaatacattgctcacca

SEQ ID NO: 5941214 - DNA, 25 bp, Homo sapien
cagttgctgtactttgtatatagaa

SEQ ID NO: 5941215 - DNA, 25 bp, Homo sapien
ctgccatctaggaaaacctctatga

SEQ ID NO: 5941216 - DNA, 25 bp, Homo sapien
tcccgcagcccattttgaaatgtgc

SEQ ID NO: 5941217 - DNA, 25 bp, Homo sapien
gctcagtgtggagctggcgattgcc

SEQ ID NO: 5941218 - DNA, 25 bp, Homo sapien
ccttaccgattcattcctgtgctct

SEQ ID NO: 5941219 - DNA, 25 bp, Homo sapien
cttccccgaaattacaactgcatta

SEQ ID NO: 5941220 - DNA, 25 bp, Homo sapien
aaacacagcaatcgtaagtaaatag

SEQ ID NO: 5941221 - DNA, 25 bp, Homo sapien
attcattcctgtgctcttggtgtat

SEQ ID NO: 5941222 - DNA, 25 bp, Homo sapien
ggtaacgacttaaattgcttgtgac

SEQ ID NO: 5941223 - DNA, 25 bp, Homo sapien
aacctctatgatgtttgttctgttg

SEQ ID NO: 5941224 - DNA, 25 bp, Homo sapien
ctggggtttcttaccagttgctgta

SEQ ID NO: 5941225 - DNA, 25 bp, Homo sapien
gaacaatgcatgttttttatcctaa

SEQ ID NO: 5941226 - DNA, 25 bp, Homo sapien
ggaatataatgcagttgtaatttcg

SEQ ID NO: 5941227 - DNA, 25 bp, Homo sapien
ttacgattgctgtgtttctcagtgg

SEQ ID NO: 5941228 - DNA, 25 bp, Homo sapien
cttcttttggatccttaattctaag

SEQ ID NO: 5941229 - DNA, 25 bp, Homo sapien
cccccccccaaaggcaatcgccagc

SEQ ID NO: 5941230 - DNA, 25 bp, Homo sapien
agtacagcaactggtaagaaacccc

SEQ ID NO: 5941231 - DNA, 25 bp, Homo sapien
ttctatatacaaagtacagcaactg

SEQ ID NO: 5941232 - DNA, 25 bp, Homo sapien
acaaagtacagcaactggtaagaaa

SEQ ID NO: 5941233 - DNA, 25 bp, Homo sapien
tgcgggagcgggttcctggtgagca

SEQ ID NO: 5941234 - DNA, 25 bp, Homo sapien
aaataaattattttctgaagcatac

SEQ ID NO: 5941235 - DNA, 25 bp, Homo sapien
gacgtaccagggtggaagaccctga

SEQ ID NO: 5941236 - DNA, 25 bp, Homo sapien
caacatcccttctccaagtccattg

SEQ ID NO: 5941237 - DNA, 25 bp, Homo sapien
ctgaagcatacaatttataaaaaat

SEQ ID NO: 5941238 - DNA, 25 bp, Homo sapien
atacatttcttggatgggctgcagg

SEQ ID NO: 5941239 - DNA, 25 bp, Homo sapien
tattcaaatttagaatttcttggtg

SEQ ID NO: 5941240 - DNA, 25 bp, Homo sapien
atcagaatggtggcaggaaaattaa

SEQ ID NO: 5941241 - DNA, 25 bp, Homo sapien
attcctcatgaccaatgtattctat

SEQ ID NO: 5941242 - DNA, 25 bp, Homo sapien
taggaatataatgcagttgtaattt

SEQ ID NO: 5941243 - DNA, 25 bp, Homo sapien
gagatacaacaatgatgcagattta

SEQ ID NO: 5941244 - DNA, 25 bp, Homo sapien
taatgcagttgtaatttcggggaag

SEQ ID NO: 5941245 - DNA, 25 bp, Homo sapien
cattggaacttgaaagacccccacc

SEQ ID NO: 5941246 - DNA, 25 bp, Homo sapien
ggtgaagggttaggaatataatgca

SEQ ID NO: 5941247 - DNA, 25 bp, Homo sapien
atttaagtcgttaccagtactatgt

SEQ ID NO: 5941248 - DNA, 25 bp, Homo sapien
ataggggcagaggtaatattcaatc

SEQ ID NO: 5941249 - DNA, 25 bp, Homo sapien
aacctaattccctcaacatcccttc

SEQ ID NO: 5941250 - DNA, 25 bp, Homo sapien
tatatacgacgtaccagggtggaag

SEQ ID NO: 5941251 - DNA, 25 bp, Homo sapien
aatataatgcagttgtaatttcggg

SEQ ID NO: 5941252 - DNA, 25 bp, Homo sapien
acatgcattgttcaacaccatggta

SEQ ID NO: 5941253 - DNA, 25 bp, Homo sapien
aatttagaatttcttggtggaggga

SEQ ID NO: 5941254 - DNA, 25 bp, Homo sapien
tgcaaacctaattccctcaacatcc

SEQ ID NO: 5941255 - DNA, 25 bp, Homo sapien
tcagtggtcacaagcaatttaagtc

SEQ ID NO: 5941256 - DNA, 25 bp, Homo sapien
aacatcatagaggttttcctagatg

SEQ ID NO: 5941257 - DNA, 25 bp, Homo sapien
aaacatgcattgttcaacaccatgg

SEQ ID NO: 5941258 - DNA, 25 bp, Homo sapien
gtggattcctcatgaccaatgtatt

SEQ ID NO: 5941259 - DNA, 25 bp, Homo sapien
acttacgattgctgtgtttctcagt

SEQ ID NO: 5941260 - DNA, 25 bp, Homo sapien
caaaatgggctgcgggagcgggttc

SEQ ID NO: 5941261 - DNA, 25 bp, Homo sapien
ctatttacttacgattgctgtgttt

SEQ ID NO: 5941262 - DNA, 25 bp, Homo sapien
gaatggtggcaggaaaattaaaggt

SEQ ID NO: 5941263 - DNA, 25 bp, Homo sapien
catcatagaggttttcctagatggc

SEQ ID NO: 5941264 - DNA, 25 bp, Homo sapien
caatctctgcatattcaaatttaga

SEQ ID NO: 5941265 - DNA, 25 bp, Homo sapien
atacagtttatatacgacgtaccag

SEQ ID NO: 5941266 - DNA, 25 bp, Homo sapien
ttcaatctctgcatattcaaattta

SEQ ID NO: 5941267 - DNA, 25 bp, Homo sapien
aggggagatacaacaatgatgcaga

SEQ ID NO: 5941268 - DNA, 25 bp, Homo sapien
ttgctgtgtttctcagtggtcacaa

SEQ ID NO: 5941269 - DNA, 25 bp, Homo sapien
gtaatattcaatctctgcatattca

SEQ ID NO: 5941270 - DNA, 25 bp, Homo sapien
gcaggagtggattcctcatgaccaa

SEQ ID NO: 5941271 - DNA, 25 bp, Homo sapien
cagtaccgagctttaggataaaaaa

SEQ ID NO: 5941272 - DNA, 25 bp, Homo sapien
tattttctgaagcatacaatttata

SEQ ID NO: 5941273 - DNA, 25 bp, Homo sapien
cacgtggtgcagagggatcagaatg

SEQ ID NO: 5941274 - DNA, 25 bp, Homo sapien
aggtaatattcaatctctgcatatt

SEQ ID NO: 5941275 - DNA, 25 bp, Homo sapien
aaaaacatgcattgttcaacaccat

SEQ ID NO: 5941276 - DNA, 25 bp, Homo sapien
cagtactatgtgttccctcaccgga

SEQ ID NO: 5941277 - DNA, 25 bp, Homo sapien
agagcacaggaatgaatcggtaagg

SEQ ID NO: 5941278 - DNA, 25 bp, Homo sapien
cttctccaagtccattggaacttga

SEQ ID NO: 5941279 - DNA, 25 bp, Homo sapien
ggattcctcatgaccaatgtattct

SEQ ID NO: 5941280 - DNA, 25 bp, Homo sapien
caaacctaattccctcaacatccct

SEQ ID NO: 5941281 - DNA, 25 bp, Homo sapien
tatgtgttccctcaccggaaaacag

SEQ ID NO: 5941282 - DNA, 25 bp, Homo sapien
attccctcaacatcccttctccaag

SEQ ID NO: 5941283 - DNA, 25 bp, Homo sapien
cccccaaaggcaatcgccagctcca

SEQ ID NO: 5941284 - DNA, 25 bp, Homo sapien
tatacgacgtaccagggtggaagac

SEQ ID NO: 5941285 - DNA, 25 bp, Homo sapien
acatcccttctccaagtccattgga

SEQ ID NO: 5941286 - DNA, 25 bp, Homo sapien
agggtggaagaccctgataggggca

SEQ ID NO: 5941287 - DNA, 25 bp, Homo sapien
cgtaccagggtggaagaccctgata

SEQ ID NO: 5941288 - DNA, 25 bp, Homo sapien
ataggggagatacaacaatgatgca

SEQ ID NO: 5941289 - DNA, 25 bp, Homo sapien
agtttatatacgacgtaccagggtg

SEQ ID NO: 5941290 - DNA, 25 bp, Homo sapien
acatttcaaaatgggctgcgggagc

SEQ ID NO: 5941291 - DNA, 25 bp, Homo sapien
aaggcaatcgccagctccacactga

SEQ ID NO: 5941292 - DNA, 25 bp, Homo sapien
ataaattattttctgaagcatacaa

SEQ ID NO: 5941293 - DNA, 25 bp, Homo sapien
cctttgcaaacctaattccctcaac

SEQ ID NO: 5941294 - DNA, 25 bp, Homo sapien
ttggatccttaattctaagacacgt

SEQ ID NO: 5941295 - DNA, 25 bp, Homo sapien
gggttaggaatataatgcagttgta

SEQ ID NO: 5941296 - DNA, 25 bp, Homo sapien
caggaatgaatcggtaaggggaact

SEQ ID NO: 5941297 - DNA, 25 bp, Homo sapien
cgatggatagatacaccaagagcac

SEQ ID NO: 5941298 - DNA, 25 bp, Homo sapien
tggatgggctgcaggagtggattcc

SEQ ID NO: 5941299 - DNA, 25 bp, Homo sapien
tgtgtttctcagtggtcacaagcaa

SEQ ID NO: 5941300 - DNA, 25 bp, Homo sapien
tacagcaactggtaagaaaccccag

SEQ ID NO: 5941301 - DNA, 25 bp, Homo sapien
taattccctcaacatcccttctcca

SEQ ID NO: 5941302 - DNA, 25 bp, Homo sapien
atatacaaagtacagcaactggtaa

SEQ ID NO: 5941303 - DNA, 25 bp, Homo sapien
ggataggggagatacaacaatgatg

SEQ ID NO: 5941304 - DNA, 25 bp, Homo sapien
atggtggcaggaaaattaaaggtga

SEQ ID NO: 5941305 - DNA, 25 bp, Homo sapien
tgttcaacaccatggtaactttttt

SEQ ID NO: 5941306 - DNA, 25 bp, Homo sapien
ctccacactgagcattaccgatgga

SEQ ID NO: 5941307 - DNA, 25 bp, Homo sapien
ctatacatttcttggatgggctgca

SEQ ID NO: 5941308 - DNA, 25 bp, Homo sapien
aggttttcctagatggcagtaccga

SEQ ID NO: 5941309 - DNA, 25 bp, Homo sapien
ttaggataaaaaacatgcattgttc

SEQ ID NO: 5941310 - DNA, 25 bp, Homo sapien
atggatagatacaccaagagcacag

SEQ ID NO: 5941311 - DNA, 25 bp, Homo sapien
gggcacatttcaaaatgggctgcgg

SEQ ID NO: 5941312 - DNA, 25 bp, Homo sapien
aaaaaattctatatacaaagtacag

SEQ ID NO: 5941313 - DNA, 25 bp, Homo sapien
tctatacatttcttggataggggag

SEQ ID NO: 5941314 - DNA, 25 bp, Homo sapien
gtattctatacatttcttggatagg

SEQ ID NO: 5941315 - DNA, 25 bp, Homo sapien
tacaacaatgatgcagatttaaaac

SEQ ID NO: 5941316 - DNA, 25 bp, Homo sapien
gaacttttctatttacttacgattg

SEQ ID NO: 5941317 - DNA, 25 bp, Homo sapien
caaatttagaatttcttggtggagg

SEQ ID NO: 5941318 - DNA, 25 bp, Homo sapien
ttaccgatggatagatacaccaaga

SEQ ID NO: 5941319 - DNA, 25 bp, Homo sapien
atacaccaagagcacaggaatgaat

SEQ ID NO: 5941320 - DNA, 25 bp, Homo sapien
cccaaaggcaatcgccagctccaca

SEQ ID NO: 5941321 - DNA, 25 bp, Homo sapien
ttctatttacttacgattgctgtgt

SEQ ID NO: 5941322 - DNA, 25 bp, Homo sapien
agtggtcacaagcaatttaagtcgt

SEQ ID NO: 5941323 - DNA, 25 bp, Homo sapien
tctccaagtccattggaacttgaaa

SEQ ID NO: 5941324 - DNA, 25 bp, Homo sapien
caatttaagtcgttaccagtactat

SEQ ID NO: 5941325 - DNA, 25 bp, Homo sapien
ggctgcaggagtggattcctcatga

SEQ ID NO: 5941326 - DNA, 25 bp, Homo sapien
tcctcatgaccaatgtattctatac

SEQ ID NO: 5941327 - DNA, 25 bp, Homo sapien
aaatgggctgcgggagcgggttcct

SEQ ID NO: 5941328 - DNA, 25 bp, Homo sapien
ccttaattctaagacacgtggtgca

SEQ ID NO: 5941329 - DNA, 25 bp, Homo sapien
aaaaaggacaacagaacaaacatca

SEQ ID NO: 5941330 - DNA, 25 bp, Homo sapien
ggttcctggtgagcaatgtattcta

SEQ ID NO: 5941331 - DNA, 25 bp, Homo sapien
ttaagtcgttaccagtactatgtgt

SEQ ID NO: 5941332 - DNA, 25 bp, Homo sapien
ccacactgagcattaccgatggata

SEQ ID NO: 5941333 - DNA, 25 bp, Homo sapien
tctcagtggtcacaagcaatttaag

SEQ ID NO: 5941334 - DNA, 25 bp, Homo sapien
tgataggggcagaggtaatattcaa

SEQ ID NO: 5941335 - DNA, 25 bp, Homo sapien
taaaaacaaaacaaacagacaaata

SEQ ID NO: 5941336 - DNA, 25 bp, Homo sapien
agctttaggataaaaaacatgcatt

SEQ ID NO: 5941337 - DNA, 25 bp, Homo sapien
aagtcgttaccagtactatgtgttc

SEQ ID NO: 5941338 - DNA, 25 bp, Homo sapien
taaaaaacatgcattgttcaacacc

SEQ ID NO: 5941339 - DNA, 25 bp, Homo sapien
gttttaatacagtttatatacgacg

SEQ ID NO: 5941340 - DNA, 25 bp, Homo sapien
acagaacaaacatcatagaggtttt

SEQ ID NO: 5941341 - DNA, 25 bp, Homo sapien
gaagaccctgataggggcagaggta

SEQ ID NO: 5941342 - DNA, 25 bp, Homo sapien
gtgagcaatgtattctatacatttc

SEQ ID NO: 5941343 - DNA, 25 bp, Homo sapien
tggaagaccctgataggggcagagg

SEQ ID NO: 5941344 - DNA, 25 bp, Homo sapien
tattcaatctctgcatattcaaatt

SEQ ID NO: 5941345 - DNA, 25 bp, Homo sapien
atttcttggatgggctgcaggagtg

SEQ ID NO: 5941346 - DNA, 25 bp, Homo sapien
gcagagggatcagaatggtggcagg

SEQ ID NO: 5941347 - DNA, 25 bp, Homo sapien
atagatacaccaagagcacaggaat

SEQ ID NO: 5941348 - DNA, 25 bp, Homo sapien
atacaaagtacagcaactggtaaga

SEQ ID NO: 5941349 - DNA, 25 bp, Homo sapien
tggcaggaaaattaaaggtgaaggg

SEQ ID NO: 5941350 - DNA, 25 bp, Homo sapien
atttcaaaatgggctgcgggagcgg

SEQ ID NO: 5941351 - DNA, 25 bp, Homo sapien
tcttttggatccttaattctaagac

SEQ ID NO: 5941352 - DNA, 25 bp, Homo sapien
aggggcagaggtaatattcaatctc

SEQ ID NO: 5941353 - DNA, 25 bp, Homo sapien
taccagggtggaagaccctgatagg

SEQ ID NO: 5941354 - DNA, 25 bp, Homo sapien
cgttaccagtactatgtgttccctc

SEQ ID NO: 5941355 - DNA, 25 bp, Homo sapien
ggagcgggttcctggtgagcaatgt

SEQ ID NO: 5941356 - DNA, 25 bp, Homo sapien
tgagcattaccgatggatagataca

SEQ ID NO: 5941357 - DNA, 25 bp, Homo sapien
caatcgccagctccacactgagcat

SEQ ID NO: 5941358 - DNA, 25 bp, Homo sapien
ggatcagaatggtggcaggaaaatt

SEQ ID NO: 5941359 - DNA, 25 bp, Homo sapien
cgagctttaggataaaaaacatgca

SEQ ID NO: 5941360 - DNA, 25 bp, Homo sapien
tataatgcagttgtaatttcgggga

SEQ ID NO: 5941361 - DNA, 25 bp, Homo sapien
gcacatttcaaaatgggctgcggga

SEQ ID NO: 5941362 - DNA, 25 bp, Homo sapien
ggtggcaggaaaattaaaggtgaag

SEQ ID NO: 5941363 - DNA, 25 bp, Homo sapien
ggtggaagaccctgataggggcaga

SEQ ID NO: 5941364 - DNA, 25 bp, Homo sapien
agatacaccaagagcacaggaatga

SEQ ID NO: 5941365 - DNA, 25 bp, Homo sapien
aagacacgtggtgcagagggatcag

SEQ ID NO: 5941366 - DNA, 25 bp, Homo sapien
gttttcctagatggcagtaccgagc

SEQ ID NO: 5941367 - DNA, 25 bp, Homo sapien
tttcctagatggcagtaccgagctt

SEQ ID NO: 5941368 - DNA, 25 bp, Homo sapien
aatgatgcagatttaaaacttttaa

SEQ ID NO: 5941369 - DNA, 25 bp, Homo sapien
tagaatttcttggtggagggaaaaa

SEQ ID NO: 5941370 - DNA, 25 bp, Homo sapien
ttttctgaagcatacaatttataaa

SEQ ID NO: 5941371 - DNA, 25 bp, Homo sapien
tggtgagcaatgtattctatacatt

SEQ ID NO: 5941372 - DNA, 25 bp, Homo sapien
ttacttacgattgctgtgtttctca

SEQ ID NO: 5941373 - DNA, 25 bp, Homo sapien
tattctatacatttcttggatgggc

SEQ ID NO: 5941374 - DNA, 25 bp, Homo sapien
aattctatatacaaagtacagcaac

SEQ ID NO: 5941375 - DNA, 25 bp, Homo sapien
ctttaggataaaaaacatgcattgt

SEQ ID NO: 5941376 - DNA, 25 bp, Homo sapien
caaacatcatagaggttttcctaga

SEQ ID NO: 5941377 - DNA, 25 bp, Homo sapien
gtgcagagggatcagaatggtggca

SEQ ID NO: 5941378 - DNA, 25 bp, Homo sapien
ttcttggatgggctgcaggagtgga

SEQ ID NO: 5941379 - DNA, 25 bp, Homo sapien
agaccctgataggggcagaggtaat

SEQ ID NO: 5941380 - DNA, 25 bp, Homo sapien
actgagcattaccgatggatagata

SEQ ID NO: 5941381 - DNA, 25 bp, Homo sapien
atgggctgcgggagcgggttcctgg

SEQ ID NO: 5941382 - DNA, 25 bp, Homo sapien
acactgagcattaccgatggataga

SEQ ID NO: 5941383 - DNA, 25 bp, Homo sapien
tgtattctatacatttcttggatgg

SEQ ID NO: 5941384 - DNA, 25 bp, Homo sapien
catttcttggataggggagatacaa

SEQ ID NO: 5941385 - DNA, 25 bp, Homo sapien
cgggagcgggttcctggtgagcaat

SEQ ID NO: 5941386 - DNA, 25 bp, Homo sapien
tgttccctcaccggaaaacagttta

SEQ ID NO: 5941387 - DNA, 25 bp, Homo sapien
ctaagacacgtggtgcagagggatc

SEQ ID NO: 5941388 - DNA, 25 bp, Homo sapien
tcaacaccatggtaactttttttct

SEQ ID NO: 5941389 - DNA, 25 bp, Homo sapien
ctcatgaccaatgtattctatacat

SEQ ID NO: 5941390 - DNA, 25 bp, Homo sapien
gggcagaggtaatattcaatctctg

SEQ ID NO: 5941391 - DNA, 25 bp, Homo sapien
atcgccagctccacactgagcatta

SEQ ID NO: 5941392 - DNA, 25 bp, Homo sapien
aaaattctatatacaaagtacagca

SEQ ID NO: 5941393 - DNA, 25 bp, Homo sapien
aggacaacagaacaaacatcataga

SEQ ID NO: 5941394 - DNA, 25 bp, Homo sapien
gcagttgtaatttcggggaagcccc

SEQ ID NO: 5941395 - DNA, 25 bp, Homo sapien
agcaatttaagtcgttaccagtact

SEQ ID NO: 5941396 - DNA, 25 bp, Homo sapien
aaaggacaacagaacaaacatcata

SEQ ID NO: 5941397 - DNA, 25 bp, Homo sapien
tccattggaacttgaaagaccccca

SEQ ID NO: 5941398 - DNA, 25 bp, Homo sapien
gagtggattcctcatgaccaatgta

SEQ ID NO: 5941399 - DNA, 25 bp, Homo sapien
ctgcatattcaaatttagaatttct

SEQ ID NO: 5941400 - DNA, 25 bp, Homo sapien
ctgcaggagtggattcctcatgacc

SEQ ID NO: 5941401 - DNA, 25 bp, Homo sapien
atggcagtaccgagctttaggataa

SEQ ID NO: 5941402 - DNA, 25 bp, Homo sapien
tcatagaggttttcctagatggcag

SEQ ID NO: 5941403 - DNA, 25 bp, Homo sapien
ggcaatcgccagctccacactgagc

SEQ ID NO: 5941404 - DNA, 25 bp, Homo sapien
acttttctatttacttacgattgct

SEQ ID NO: 5941405 - DNA, 25 bp, Homo sapien
tttatatacgacgtaccagggtgga

SEQ ID NO: 5941406 - DNA, 25 bp, Homo sapien
agaggtaatattcaatctctgcata

SEQ ID NO: 5941407 - DNA, 25 bp, Homo sapien
tgaagggttaggaatataatgcagt

SEQ ID NO: 5941408 - DNA, 25 bp, Homo sapien
cacaggaatgaatcggtaaggggaa

SEQ ID NO: 5941409 - DNA, 25 bp, Homo sapien
caagcaatttaagtcgttaccagta

SEQ ID NO: 5941410 - DNA, 25 bp, Homo sapien
taaaggtgaagggttaggaatataa

SEQ ID NO: 5941411 - DNA, 25 bp, Homo sapien
aggagtggattcctcatgaccaatg

SEQ ID NO: 5941412 - DNA, 25 bp, Homo sapien
gcagaggtaatattcaatctctgca

SEQ ID NO: 5941413 - DNA, 25 bp, Homo sapien
gaagcatacaatttataaaaaattc

SEQ ID NO: 5941414 - DNA, 25 bp, Homo sapien
caagagcacaggaatgaatcggtaa

SEQ ID NO: 5941415 - DNA, 25 bp, Homo sapien
acgattgctgtgtttctcagtggtc

SEQ ID NO: 5941416 - DNA, 25 bp, Homo sapien
gtcgttaccagtactatgtgttccc

SEQ ID NO: 5941417 - DNA, 25 bp, Homo sapien
tgggctgcaggagtggattcctcat

SEQ ID NO: 5941418 - DNA, 25 bp, Homo sapien
ccagctccacactgagcattaccga

SEQ ID NO: 5941419 - DNA, 25 bp, Homo sapien
cctgataggggcagaggtaatattc

SEQ ID NO: 5941420 - DNA, 25 bp, Homo sapien
tttgcaaacctaattccctcaacat

SEQ ID NO: 5941421 - DNA, 25 bp, Homo sapien
atgcagttgtaatttcggggaagcc

SEQ ID NO: 5941422 - DNA, 25 bp, Homo sapien
cctggtgagcaatgtattctataca

SEQ ID NO: 5941423 - DNA, 25 bp, Homo sapien
cccttctccaagtccattggaactt

SEQ ID NO: 5941424 - DNA, 25 bp, Homo sapien
acagtttatatacgacgtaccaggg

SEQ ID NO: 5941425 - DNA, 25 bp, Homo sapien
ccagggtggaagaccctgatagggg

SEQ ID NO: 5941426 - DNA, 25 bp, Homo sapien
taatacagtttatatacgacgtacc

SEQ ID NO: 5941427 - DNA, 25 bp, Homo sapien
caaaggcaatcgccagctccacact

SEQ ID NO: 5941428 - DNA, 25 bp, Homo sapien
ttctgaagcatacaatttataaaaa

SEQ ID NO: 5941429 - DNA, 25 bp, Homo sapien
cttggatgggctgcaggagtggatt

SEQ ID NO: 5941430 - DNA, 25 bp, Homo sapien
accagtactatgtgttccctcaccg

SEQ ID NO: 5941431 - DNA, 25 bp, Homo sapien
cagttttaatacagtttatatacga

SEQ ID NO: 5941432 - DNA, 25 bp, Homo sapien
tttctcagtggtcacaagcaattta

SEQ ID NO: 5941433 - DNA, 25 bp, Homo sapien
atccttaattctaagacacgtggtg

SEQ ID NO: 5941434 - DNA, 25 bp, Homo sapien
gtcacaagcaatttaagtcgttacc

SEQ ID NO: 5941435 - DNA, 25 bp, Homo sapien
attattttctgaagcatacaattta

SEQ ID NO: 5941436 - DNA, 25 bp, Homo sapien
cctaattccctcaacatcccttctc

SEQ ID NO: 5941437 - DNA, 25 bp, Homo sapien
ttggataggggagatacaacaatga

SEQ ID NO: 5941438 - DNA, 25 bp, Homo sapien
cacaagcaatttaagtcgttaccag

SEQ ID NO: 5941439 - DNA, 25 bp, Homo sapien
atcccttctccaagtccattggaac

SEQ ID NO: 5941440 - DNA, 25 bp, Homo sapien
ttctatacatttcttggatgggctg

SEQ ID NO: 5941441 - DNA, 25 bp, Homo sapien
aagggttaggaatataatgcagttg

SEQ ID NO: 5941442 - DNA, 25 bp, Homo sapien
aaattattttctgaagcatacaatt

SEQ ID NO: 5941443 - DNA, 25 bp, Homo sapien
attgttcaacaccatggtaactttt

SEQ ID NO: 5941444 - DNA, 25 bp, Homo sapien
ttcaaatttagaatttcttggtgga

SEQ ID NO: 5941445 - DNA, 25 bp, Homo sapien
gatacaacaatgatgcagatttaaa

SEQ ID NO: 5941446 - DNA, 25 bp, Homo sapien
gcattgttcaacaccatggtaactt

SEQ ID NO: 5941447 - DNA, 25 bp, Homo sapien
tgtgttccctcaccggaaaacagtt

SEQ ID NO: 5941448 - DNA, 25 bp, Homo sapien
atttacttacgattgctgtgtttct

SEQ ID NO: 5941449 - DNA, 25 bp, Homo sapien
aggataaaaaacatgcattgttcaa

SEQ ID NO: 5941450 - DNA, 25 bp, Homo sapien
acaatgatgcagatttaaaactttt

SEQ ID NO: 5941451 - DNA, 25 bp, Homo sapien
ataaaaaattctatatacaaagtac

SEQ ID NO: 5941452 - DNA, 25 bp, Homo sapien
gtaccgagctttaggataaaaaaca

SEQ ID NO: 5941453 - DNA, 25 bp, Homo sapien
ttaccagtactatgtgttccctcac

SEQ ID NO: 5941454 - DNA, 25 bp, Homo sapien
ttcctggtgagcaatgtattctata

SEQ ID NO: 5941455 - DNA, 25 bp, Homo sapien
ctcaacatcccttctccaagtccat

SEQ ID NO: 5941456 - DNA, 25 bp, Homo sapien
acatttcttggatgggctgcaggag

SEQ ID NO: 5941457 - DNA, 25 bp, Homo sapien
ggcagtaccgagctttaggataaaa

SEQ ID NO: 5941458 - DNA, 25 bp, Homo sapien
tgtttctcagtggtcacaagcaatt

SEQ ID NO: 5941459 - DNA, 25 bp, Homo sapien
agagggatcagaatggtggcaggaa

SEQ ID NO: 5941460 - DNA, 25 bp, Homo sapien
ctagatggcagtaccgagctttagg

SEQ ID NO: 5941461 - DNA, 25 bp, Homo sapien
agatggcagtaccgagctttaggat

SEQ ID NO: 5941462 - DNA, 25 bp, Homo sapien
tcttggataggggagatacaacaat

SEQ ID NO: 5941463 - DNA, 25 bp, Homo sapien
aattctaagacacgtggtgcagagg

SEQ ID NO: 5941464 - DNA, 25 bp, Homo sapien
accgatggatagatacaccaagagc

SEQ ID NO: 5941465 - DNA, 25 bp, Homo sapien
tggtcacaagcaatttaagtcgtta

SEQ ID NO: 5941466 - DNA, 25 bp, Homo sapien
attctatacatttcttggatagggg

SEQ ID NO: 5941467 - DNA, 25 bp, Homo sapien
gattgctgtgtttctcagtggtcac

SEQ ID NO: 5941468 - DNA, 25 bp, Homo sapien
gggagatacaacaatgatgcagatt

SEQ ID NO: 5941469 - DNA, 25 bp, Homo sapien
tggtgcagagggatcagaatggtgg

SEQ ID NO: 5941470 - DNA, 25 bp, Homo sapien
tcctagatggcagtaccgagcttta

SEQ ID NO: 5941471 - DNA, 25 bp, Homo sapien
agcacaggaatgaatcggtaagggg

SEQ ID NO: 5941472 - DNA, 25 bp, Homo sapien
agaggttttcctagatggcagtacc

SEQ ID NO: 5941473 - DNA, 25 bp, Homo sapien
gacacgtggtgcagagggatcagaa

SEQ ID NO: 5941474 - DNA, 25 bp, Homo sapien
caacaatgatgcagatttaaaactt

SEQ ID NO: 5941475 - DNA, 25 bp, Homo sapien
gtactatgtgttccctcaccggaaa

SEQ ID NO: 5941476 - DNA, 25 bp, Homo sapien
cagcaactggtaagaaaccccagtt

SEQ ID NO: 5941477 - DNA, 25 bp, Homo sapien
gataaaaaacatgcattgttcaaca

SEQ ID NO: 5941478 - DNA, 25 bp, Homo sapien
gctgcgggagcgggttcctggtgag

SEQ ID NO: 5941479 - DNA, 25 bp, Homo sapien
ttcaaaatgggctgcgggagcgggt

SEQ ID NO: 5941480 - DNA, 25 bp, Homo sapien
tccctcaacatcccttctccaagtc

SEQ ID NO: 5941481 - DNA, 25 bp, Homo sapien
agggatcagaatggtggcaggaaaa

SEQ ID NO: 5941482 - DNA, 25 bp, Homo sapien
cgtggtgcagagggatcagaatggt

SEQ ID NO: 5941483 - DNA, 25 bp, Homo sapien
atgcattgttcaacaccatggtaac

SEQ ID NO: 5941484 - DNA, 25 bp, Homo sapien
ttctaagacacgtggtgcagaggga

SEQ ID NO: 5941485 - DNA, 25 bp, Homo sapien
accctgataggggcagaggtaatat

SEQ ID NO: 5941486 - DNA, 25 bp, Homo sapien
accgagctttaggataaaaaacatg

SEQ ID NO: 5941487 - DNA, 25 bp, Homo sapien
ggatagatacaccaagagcacagga

SEQ ID NO: 5941488 - DNA, 25 bp, Homo sapien
gctgtgtttctcagtggtcacaagc

SEQ ID NO: 5941489 - DNA, 25 bp, Homo sapien
cagaatggtggcaggaaaattaaag

SEQ ID NO: 5941490 - DNA, 25 bp, Homo sapien
actatgtgttccctcaccggaaaac

SEQ ID NO: 5941491 - DNA, 25 bp, Homo sapien
gggctgcgggagcgggttcctggtg

SEQ ID NO: 5941492 - DNA, 25 bp, Homo sapien
gacaacagaacaaacatcatagagg

SEQ ID NO: 5941493 - DNA, 25 bp, Homo sapien
cgccagctccacactgagcattacc

SEQ ID NO: 5941494 - DNA, 25 bp, Homo sapien
ttcttcttttggatccttaattcta

SEQ ID NO: 5941495 - DNA, 25 bp, Homo sapien
tgatgcagatttaaaacttttaatt

SEQ ID NO: 5941496 - DNA, 25 bp, Homo sapien
cgggttcctggtgagcaatgtattc

SEQ ID NO: 5941497 - DNA, 25 bp, Homo sapien
tacatttcttggataggggagatac

SEQ ID NO: 5941498 - DNA, 25 bp, Homo sapien
gcccctttgcaaacctaattccctc

SEQ ID NO: 5941499 - DNA, 25 bp, Homo sapien
aacaaacatcatagaggttttccta

SEQ ID NO: 5941500 - DNA, 25 bp, Homo sapien
ctatatacaaagtacagcaactggt

SEQ ID NO: 5941501 - DNA, 25 bp, Homo sapien
ctctgcatattcaaatttagaattt

SEQ ID NO: 5941502 - DNA, 25 bp, Homo sapien
agaacaaacatcatagaggttttcc

SEQ ID NO: 5941503 - DNA, 25 bp, Homo sapien
cccccccaaaggcaatcgccagctc

SEQ ID NO: 5941504 - DNA, 25 bp, Homo sapien
aaagtacagcaactggtaagaaacc

SEQ ID NO: 5941505 - DNA, 25 bp, Homo sapien
ttaattctaagacacgtggtgcaga

SEQ ID NO: 5941506 - DNA, 25 bp, Homo sapien
agcgggttcctggtgagcaatgtat

SEQ ID NO: 5941507 - DNA, 25 bp, Homo sapien
aaggtgaagggttaggaatataatg

SEQ ID NO: 5941508 - DNA, 25 bp, Homo sapien
ttttggatccttaattctaagacac

SEQ ID NO: 5941509 - DNA, 25 bp, Homo sapien
gttaggaatataatgcagttgtaat

SEQ ID NO: 5941510 - DNA, 25 bp, Homo sapien
tttcttggataggggagatacaaca

SEQ ID NO: 5941511 - DNA, 25 bp, Homo sapien
gatgggctgcaggagtggattcctc

SEQ ID NO: 5941512 - DNA, 25 bp, Homo sapien
accaagagcacaggaatgaatcggt

SEQ ID NO: 5941513 - DNA, 25 bp, Homo sapien
acaccaagagcacaggaatgaatcg

SEQ ID NO: 5941514 - DNA, 25 bp, Homo sapien
atctctgcatattcaaatttagaat

SEQ ID NO: 5941515 - DNA, 25 bp, Homo sapien
agcattaccgatggatagatacacc

SEQ ID NO: 5941516 - DNA, 25 bp, Homo sapien
ttttctatttacttacgattgctgt

SEQ ID NO: 5941517 - DNA, 25 bp, Homo sapien
tacgacgtaccagggtggaagaccc

SEQ ID NO: 5941518 - DNA, 25 bp, Homo sapien
tccaagtccattggaacttgaaaga

SEQ ID NO: 5941519 - DNA, 25 bp, Homo sapien
ggatccttaattctaagacacgtgg

SEQ ID NO: 5941520 - DNA, 25 bp, Homo sapien
agtccattggaacttgaaagacccc

SEQ ID NO: 5941521 - DNA, 25 bp, Homo sapien
atagaggttttcctagatggcagta

SEQ ID NO: 5941522 - DNA, 25 bp, Homo sapien
cacagggcacatttcaaaatgggct

SEQ ID NO: 5941523 - DNA, 25 bp, Homo sapien
cattaccgatggatagatacaccaa

SEQ ID NO: 5941524 - DNA, 25 bp, Homo sapien
caacagaacaaacatcatagaggtt

SEQ ID NO: 5941525 - DNA, 25 bp, Homo sapien
agctccacactgagcattaccgatg

SEQ ID NO: 5941526 - DNA, 25 bp, Homo sapien
tttaatacagtttatatacgacgta

SEQ ID NO: 5941527 - DNA, 25 bp, Homo sapien
tttagaatttcttggtggagggaaa

SEQ ID NO: 5941528 - DNA, 25 bp, Homo sapien
cagggcacatttcaaaatgggctgc

SEQ ID NO: 5941529 - DNA, 25 bp, Homo sapien
catgaccaatgtattctatacattt

SEQ ID NO: 5941530 - DNA, 25 bp, Homo sapien
tgaatcggtaaggggaacttttcta

SEQ ID NO: 5941531 - DNA, 25 bp, Homo sapien
tatacatttcttggataggggagat

SEQ ID NO: 5941532 - DNA, 25 bp, Homo sapien
caagtccattggaacttgaaagacc

SEQ ID NO: 5941533 - DNA, 25 bp, Homo sapien
cccagttttaatacagtttatatac

SEQ ID NO: 5941534 - DNA, 25 bp, Homo sapien
cagtttttactgtgtggccactggt

SEQ ID NO: 5941535 - DNA, 25 bp, Homo sapien
ggaagcggatgtgaatatcagcagt

SEQ ID NO: 5941536 - DNA, 25 bp, Homo sapien
aagctgacagtgccggtggtgccca

SEQ ID NO: 5941537 - DNA, 25 bp, Homo sapien
ttcgggttatgaccagtaaaatgaa

SEQ ID NO: 5941538 - DNA, 25 bp, Homo sapien
aagaagttctggtcctctctcccaa

SEQ ID NO: 5941539 - DNA, 25 bp, Homo sapien
aaagccctacctcctcgctgctctc

SEQ ID NO: 5941540 - DNA, 25 bp, Homo sapien
gtggaagcggatgtgaatatcagca

SEQ ID NO: 5941541 - DNA, 25 bp, Homo sapien
ggaatggcaaaggcaaaagcaggta

SEQ ID NO: 5941542 - DNA, 25 bp, Homo sapien
ggccaaccagggcaacaacccagaa

SEQ ID NO: 5941543 - DNA, 25 bp, Homo sapien
atcagcagtgcccttcggagttcga

SEQ ID NO: 5941544 - DNA, 25 bp, Homo sapien
ttgtcaaactctgagtaaaagcgtt

SEQ ID NO: 5941545 - DNA, 25 bp, Homo sapien
ccatcctagtgactttgctttttaa

SEQ ID NO: 5941546 - DNA, 25 bp, Homo sapien
ggttatgaccagtaaaatgaagaat

SEQ ID NO: 5941547 - DNA, 25 bp, Homo sapien
ggtacagaactgtagttagttgtgc

SEQ ID NO: 5941548 - DNA, 25 bp, Homo sapien
cttttccaattatggtctcaccttg

SEQ ID NO: 5941549 - DNA, 25 bp, Homo sapien
aatggcaaaggcaaaagcaggtacc

SEQ ID NO: 5941550 - DNA, 25 bp, Homo sapien
tgcccttcggagttcgagtacaacg

SEQ ID NO: 5941551 - DNA, 25 bp, Homo sapien
tgtgcattggtgatcttgttttctt

SEQ ID NO: 5941552 - DNA, 25 bp, Homo sapien
attctgggaagagtgccaacgagaa

SEQ ID NO: 5941553 - DNA, 25 bp, Homo sapien
cctgtttctcgctgtgcagggagag

SEQ ID NO: 5941554 - DNA, 25 bp, Homo sapien
tgggaagagtgccaacgagaaagct

SEQ ID NO: 5941555 - DNA, 25 bp, Homo sapien
ccggtggtgcccatgcagagacaaa

SEQ ID NO: 5941556 - DNA, 25 bp, Homo sapien
gtggagataattgtcaaactctgag

SEQ ID NO: 5941557 - DNA, 25 bp, Homo sapien
tacagtttttactgtgtggccactg

SEQ ID NO: 5941558 - DNA, 25 bp, Homo sapien
ttcttttccaattatggtctcacct

SEQ ID NO: 5941559 - DNA, 25 bp, Homo sapien
agaaaaccagggtcctttcttggca

SEQ ID NO: 5941560 - DNA, 25 bp, Homo sapien
tggcttctctcattttatttgtggg

SEQ ID NO: 5941561 - DNA, 25 bp, Homo sapien
acaagctggaaaatttccatttatc

SEQ ID NO: 5941562 - DNA, 25 bp, Homo sapien
gacaccagcaagccagacatactga

SEQ ID NO: 5941563 - DNA, 25 bp, Homo sapien
tctttgacatcagtgatgagagtag

SEQ ID NO: 5941564 - DNA, 25 bp, Homo sapien
ttcgagtacaacgccactgaccatt

SEQ ID NO: 5941565 - DNA, 25 bp, Homo sapien
atgcagagacaaagccctacctcct

SEQ ID NO: 5941566 - DNA, 25 bp, Homo sapien
caagccagacatactgatccttcgt

SEQ ID NO: 5941567 - DNA, 25 bp, Homo sapien
gttcatcatcagaaagttcaaaggc

SEQ ID NO: 5941568 - DNA, 25 bp, Homo sapien
aatggacaacaatgtacagttttta

SEQ ID NO: 5941569 - DNA, 25 bp, Homo sapien
gtttatttatcatgttatcttatta

SEQ ID NO: 5941570 - DNA, 25 bp, Homo sapien
taaatgaatggacaacaatgtacag

SEQ ID NO: 5941571 - DNA, 25 bp, Homo sapien
ttgctttttaaatgaatggacaaca

SEQ ID NO: 5941572 - DNA, 25 bp, Homo sapien
tgcagggagagtggagataattgtc

SEQ ID NO: 5941573 - DNA, 25 bp, Homo sapien
agacaaagccctacctcctcgctgc

SEQ ID NO: 5941574 - DNA, 25 bp, Homo sapien
tggcaaaggcaaaagcaggtacctg

SEQ ID NO: 5941575 - DNA, 25 bp, Homo sapien
tgacatcagtgatgagagtagtgga

SEQ ID NO: 5941576 - DNA, 25 bp, Homo sapien
agggcaacaacccagaagtccaggt

SEQ ID NO: 5941577 - DNA, 25 bp, Homo sapien
gctcattcagtttgaggggacagcg

SEQ ID NO: 5941578 - DNA, 25 bp, Homo sapien
atcctagtgactttgctttttaaat

SEQ ID NO: 5941579 - DNA, 25 bp, Homo sapien
ggtgatcttgttttctttgttggct

SEQ ID NO: 5941580 - DNA, 25 bp, Homo sapien
tgaatggacaacaatgtacagtttt

SEQ ID NO: 5941581 - DNA, 25 bp, Homo sapien
acatactgatccttcgtcagatcat

SEQ ID NO: 5941582 - DNA, 25 bp, Homo sapien
ccttcgtcagatcatggcccttcgg

SEQ ID NO: 5941583 - DNA, 25 bp, Homo sapien
gacgtggacttctttgacatcagtg

SEQ ID NO: 5941584 - DNA, 25 bp, Homo sapien
gtaacatgtacgtatttctgaaata

SEQ ID NO: 5941585 - DNA, 25 bp, Homo sapien
atgtaacatgtacgtatttctgaaa

SEQ ID NO: 5941586 - DNA, 25 bp, Homo sapien
tgtaggtacagaactgtagttagtt

SEQ ID NO: 5941587 - DNA, 25 bp, Homo sapien
gctggaaaatttccatttatccctg

SEQ ID NO: 5941588 - DNA, 25 bp, Homo sapien
tggtgcccatgcagagacaaagccc

SEQ ID NO: 5941589 - DNA, 25 bp, Homo sapien
ctcaccttgtttctcacaagaaaac

SEQ ID NO: 5941590 - DNA, 25 bp, Homo sapien
atccttcgtcagatcatggcccttc

SEQ ID NO: 5941591 - DNA, 25 bp, Homo sapien
cgtggacttctttgacatcagtgat

SEQ ID NO: 5941592 - DNA, 25 bp, Homo sapien
acctcctcgctgctctctgcatcct

SEQ ID NO: 5941593 - DNA, 25 bp, Homo sapien
agctaagaagttctggtcctctctc

SEQ ID NO: 5941594 - DNA, 25 bp, Homo sapien
agccctacctcctcgctgctctctg

SEQ ID NO: 5941595 - DNA, 25 bp, Homo sapien
tgtagttagttgtgcattggtgatc

SEQ ID NO: 5941596 - DNA, 25 bp, Homo sapien
tggacaacaatgtacagtttttact

SEQ ID NO: 5941597 - DNA, 25 bp, Homo sapien
cccagaagtccaggttgacaccagc

SEQ ID NO: 5941598 - DNA, 25 bp, Homo sapien
agaatgcttacaatggaaatgacgt

SEQ ID NO: 5941599 - DNA, 25 bp, Homo sapien
cgtcagatcatggcccttcgggtta

SEQ ID NO: 5941600 - DNA, 25 bp, Homo sapien
gacaacaatgtacagtttttactgt

SEQ ID NO: 5941601 - DNA, 25 bp, Homo sapien
tgtgtggccactggtttaagcaatg

SEQ ID NO: 5941602 - DNA, 25 bp, Homo sapien
taggtacagaactgtagttagttgt

SEQ ID NO: 5941603 - DNA, 25 bp, Homo sapien
aggtacctgtttgcagtgacaggaa

SEQ ID NO: 5941604 - DNA, 25 bp, Homo sapien
aggcaaaagcaggtacctgtttgca

SEQ ID NO: 5941605 - DNA, 25 bp, Homo sapien
ccccctcctttgagactcgtgttct

SEQ ID NO: 5941606 - DNA, 25 bp, Homo sapien
tcgtgttctgcgtggctagcagtgt

SEQ ID NO: 5941607 - DNA, 25 bp, Homo sapien
atgacgtggacttctttgacatcag

SEQ ID NO: 5941608 - DNA, 25 bp, Homo sapien
agataattgtcaaactctgagtaaa

SEQ ID NO: 5941609 - DNA, 25 bp, Homo sapien
tgagactcgtgttctgcgtggctag

SEQ ID NO: 5941610 - DNA, 25 bp, Homo sapien
agttcgagtacaacgccactgacca

SEQ ID NO: 5941611 - DNA, 25 bp, Homo sapien
agcaccgtttgcaatgatgagagga

SEQ ID NO: 5941612 - DNA, 25 bp, Homo sapien
ttttttaaccatcctagtgactttg

SEQ ID NO: 5941613 - DNA, 25 bp, Homo sapien
ccattctgggaagagtgccaacgag

SEQ ID NO: 5941614 - DNA, 25 bp, Homo sapien
cagggagagtggagataattgtcaa

SEQ ID NO: 5941615 - DNA, 25 bp, Homo sapien
atgtgaatatcagcagtgcccttcg

SEQ ID NO: 5941616 - DNA, 25 bp, Homo sapien
ctcacctcccccctcctttgagact

SEQ ID NO: 5941617 - DNA, 25 bp, Homo sapien
gagtaaaagcgttcatcatcagaaa

SEQ ID NO: 5941618 - DNA, 25 bp, Homo sapien
gtacagaagcaggtttatttatcat

SEQ ID NO: 5941619 - DNA, 25 bp, Homo sapien
tgaggatgactgctggaatggcaaa

SEQ ID NO: 5941620 - DNA, 25 bp, Homo sapien
ctggaatggcaaaggcaaaagcagg

SEQ ID NO: 5941621 - DNA, 25 bp, Homo sapien
cctttgagactcgtgttctgcgtgg

SEQ ID NO: 5941622 - DNA, 25 bp, Homo sapien
caagctaagaagttctggtcctctc

SEQ ID NO: 5941623 - DNA, 25 bp, Homo sapien
tacaatggaaatgacgtggacttct

SEQ ID NO: 5941624 - DNA, 25 bp, Homo sapien
tgactttgttttgctcattcagttt

SEQ ID NO: 5941625 - DNA, 25 bp, Homo sapien
tatggtctcaccttgtttctcacaa

SEQ ID NO: 5941626 - DNA, 25 bp, Homo sapien
cactgaccattctgggaagagtgcc

SEQ ID NO: 5941627 - DNA, 25 bp, Homo sapien
agtccaggttgacaccagcaagcca

SEQ ID NO: 5941628 - DNA, 25 bp, Homo sapien
gcagagacaaagccctacctcctcg

SEQ ID NO: 5941629 - DNA, 25 bp, Homo sapien
cgagtacaacgccactgaccattct

SEQ ID NO: 5941630 - DNA, 25 bp, Homo sapien
tccaattatggtctcaccttgtttc

SEQ ID NO: 5941631 - DNA, 25 bp, Homo sapien
acgagaaagctgacagtgccggtgg

SEQ ID NO: 5941632 - DNA, 25 bp, Homo sapien
tggattggccaaccagggcaacaac

SEQ ID NO: 5941633 - DNA, 25 bp, Homo sapien
ggaagagtgccaacgagaaagctga

SEQ ID NO: 5941634 - DNA, 25 bp, Homo sapien
gaaaatttccatttatccctgttat

SEQ ID NO: 5941635 - DNA, 25 bp, Homo sapien
ccagggtcctttcttggcatgtaac

SEQ ID NO: 5941636 - DNA, 25 bp, Homo sapien
caacaacccagaagtccaggttgac

SEQ ID NO: 5941637 - DNA, 25 bp, Homo sapien
gtacctgtttgcagtgacaggaaat

SEQ ID NO: 5941638 - DNA, 25 bp, Homo sapien
gagtagtggagagggaagtggaagc

SEQ ID NO: 5941639 - DNA, 25 bp, Homo sapien
aattgtcaaactctgagtaaaagcg

SEQ ID NO: 5941640 - DNA, 25 bp, Homo sapien
agactcgtgttctgcgtggctagca

SEQ ID NO: 5941641 - DNA, 25 bp, Homo sapien
ctcctcgctgctctctgcatcctgt

SEQ ID NO: 5941642 - DNA, 25 bp, Homo sapien
ggtcctctctcccaagcaccgtttg

SEQ ID NO: 5941643 - DNA, 25 bp, Homo sapien
tttaaatgaatggacaacaatgtac

SEQ ID NO: 5941644 - DNA, 25 bp, Homo sapien
gccaacgagaaagctgacagtgccg

SEQ ID NO: 5941645 - DNA, 25 bp, Homo sapien
tagttgtgcattggtgatcttgttt

SEQ ID NO: 5941646 - DNA, 25 bp, Homo sapien
gtttttcttttccaattatggtctc

SEQ ID NO: 5941647 - DNA, 25 bp, Homo sapien
ccaaccagggcaacaacccagaagt

SEQ ID NO: 5941648 - DNA, 25 bp, Homo sapien
tttaagcaatgttgactttgttttg

SEQ ID NO: 5941649 - DNA, 25 bp, Homo sapien
gcgttcatcatcagaaagttcaaag

SEQ ID NO: 5941650 - DNA, 25 bp, Homo sapien
cgtatttctgaaatattaaatagct

SEQ ID NO: 5941651 - DNA, 25 bp, Homo sapien
tgactgctggaatggcaaaggcaaa

SEQ ID NO: 5941652 - DNA, 25 bp, Homo sapien
tcctttcttggcatgtaacatgtac

SEQ ID NO: 5941653 - DNA, 25 bp, Homo sapien
ggtttaagcaatgttgactttgttt

SEQ ID NO: 5941654 - DNA, 25 bp, Homo sapien
cgggttatgaccagtaaaatgaaga

SEQ ID NO: 5941655 - DNA, 25 bp, Homo sapien
ctttcttggcatgtaacatgtacgt

SEQ ID NO: 5941656 - DNA, 25 bp, Homo sapien
ccagggcaacaacccagaagtccag

SEQ ID NO: 5941657 - DNA, 25 bp, Homo sapien
gcatgtaacatgtacgtatttctga

SEQ ID NO: 5941658 - DNA, 25 bp, Homo sapien
ccaaacaagctggaaaatttccatt

SEQ ID NO: 5941659 - DNA, 25 bp, Homo sapien
agaagcaggtttatttatcatgtta

SEQ ID NO: 5941660 - DNA, 25 bp, Homo sapien
ggcagcaggaaatgaaaatgaggat

SEQ ID NO: 5941661 - DNA, 25 bp, Homo sapien
ttgttggcttctctcattttatttg

SEQ ID NO: 5941662 - DNA, 25 bp, Homo sapien
tagtggagagggaagtggaagcgga

SEQ ID NO: 5941663 - DNA, 25 bp, Homo sapien
tgtggccactggtttaagcaatgtt

SEQ ID NO: 5941664 - DNA, 25 bp, Homo sapien
gcaaaggcaaaagcaggtacctgtt

SEQ ID NO: 5941665 - DNA, 25 bp, Homo sapien
ttaaatagctgtacagaagcaggtt

SEQ ID NO: 5941666 - DNA, 25 bp, Homo sapien
cctcccccctcctttgagactcgtg

SEQ ID NO: 5941667 - DNA, 25 bp, Homo sapien
gcatcctgtttctcgctgtgcaggg

SEQ ID NO: 5941668 - DNA, 25 bp, Homo sapien
aagtggaagcggatgtgaatatcag

SEQ ID NO: 5941669 - DNA, 25 bp, Homo sapien
aatgtacagtttttactgtgtggcc

SEQ ID NO: 5941670 - DNA, 25 bp, Homo sapien
aaaagcaggtacctgtttgcagtga

SEQ ID NO: 5941671 - DNA, 25 bp, Homo sapien
ggttgacaccagcaagccagacata

SEQ ID NO: 5941672 - DNA, 25 bp, Homo sapien
aaaatgaggatgactgctggaatgg

SEQ ID NO: 5941673 - DNA, 25 bp, Homo sapien
ttatgaccagtaaaatgaagaatgc

SEQ ID NO: 5941674 - DNA, 25 bp, Homo sapien
aactctgagtaaaagcgttcatcat

SEQ ID NO: 5941675 - DNA, 25 bp, Homo sapien
cagaactgtagttagttgtgcattg

SEQ ID NO: 5941676 - DNA, 25 bp, Homo sapien
gcagtgacaggaaatggattggcca

SEQ ID NO: 5941677 - DNA, 25 bp, Homo sapien
gaggggacagcggggcctcctgcct

SEQ ID NO: 5941678 - DNA, 25 bp, Homo sapien
agttcaaaggcaccaagttctcact

SEQ ID NO: 5941679 - DNA, 25 bp, Homo sapien
aatgcttacaatggaaatgacgtgg

SEQ ID NO: 5941680 - DNA, 25 bp, Homo sapien
gagaggatggcagcaggaaatgaaa

SEQ ID NO: 5941681 - DNA, 25 bp, Homo sapien
gttgactttgttttgctcattcagt

SEQ ID NO: 5941682 - DNA, 25 bp, Homo sapien
tttccaattatggtctcaccttgtt

SEQ ID NO: 5941683 - DNA, 25 bp, Homo sapien
cagcagtgcccttcggagttcgagt

SEQ ID NO: 5941684 - DNA, 25 bp, Homo sapien
aggatgactgctggaatggcaaagg

SEQ ID NO: 5941685 - DNA, 25 bp, Homo sapien
tgttttctttgttggcttctctcat

SEQ ID NO: 5941686 - DNA, 25 bp, Homo sapien
tcagatcatggcccttcgggttatg

SEQ ID NO: 5941687 - DNA, 25 bp, Homo sapien
ttcaaaggcaccaagttctcacttt

SEQ ID NO: 5941688 - DNA, 25 bp, Homo sapien
gtttgcagtgacaggaaatggattg

SEQ ID NO: 5941689 - DNA, 25 bp, Homo sapien
cactggtttaagcaatgttgacttt

SEQ ID NO: 5941690 - DNA, 25 bp, Homo sapien
ggagttcgagtacaacgccactgac

SEQ ID NO: 5941691 - DNA, 25 bp, Homo sapien
gttgtgcattggtgatcttgttttc

SEQ ID NO: 5941692 - DNA, 25 bp, Homo sapien
ccagcaagccagacatactgatcct

SEQ ID NO: 5941693 - DNA, 25 bp, Homo sapien
ctgaaatattaaatagctgtacaga

SEQ ID NO: 5941694 - DNA, 25 bp, Homo sapien
tttgacatcagtgatgagagtagtg

SEQ ID NO: 5941695 - DNA, 25 bp, Homo sapien
ttctttgttggcttctctcatttta

SEQ ID NO: 5941696 - DNA, 25 bp, Homo sapien
catcagaaagttcaaaggcaccaag

SEQ ID NO: 5941697 - DNA, 25 bp, Homo sapien
gcaggtttatttatcatgttatctt

SEQ ID NO: 5941698 - DNA, 25 bp, Homo sapien
tttttaaatgaatggacaacaatgt

SEQ ID NO: 5941699 - DNA, 25 bp, Homo sapien
ttgacaccagcaagccagacatact

SEQ ID NO: 5941700 - DNA, 25 bp, Homo sapien
attatggtctcaccttgtttctcac

SEQ ID NO: 5941701 - DNA, 25 bp, Homo sapien
tttgttttgctcattcagtttgagg

SEQ ID NO: 5941702 - DNA, 25 bp, Homo sapien
atatcagcagtgcccttcggagttc

SEQ ID NO: 5941703 - DNA, 25 bp, Homo sapien
gctgacagtgccggtggtgcccatg

SEQ ID NO: 5941704 - DNA, 25 bp, Homo sapien
aaagttcaaaggcaccaagttctca

SEQ ID NO: 5941705 - DNA, 25 bp, Homo sapien
tgatgagagtagtggagagggaagt

SEQ ID NO: 5941706 - DNA, 25 bp, Homo sapien
tgatgagaggatggcagcaggaaat

SEQ ID NO: 5941707 - DNA, 25 bp, Homo sapien
gtcaaactctgagtaaaagcgttca

SEQ ID NO: 5941708 - DNA, 25 bp, Homo sapien
gcaggaaatgaaaatgaggatgact

SEQ ID NO: 5941709 - DNA, 25 bp, Homo sapien
actcgtgttctgcgtggctagcagt

SEQ ID NO: 5941710 - DNA, 25 bp, Homo sapien
ttggtgatcttgttttctttgttgg

SEQ ID NO: 5941711 - DNA, 25 bp, Homo sapien
ctctctcccaagcaccgtttgcaat

SEQ ID NO: 5941712 - DNA, 25 bp, Homo sapien
ccctacctcctcgctgctctctgca

SEQ ID NO: 5941713 - DNA, 25 bp, Homo sapien
caaaggcaccaagttctcacttttt

SEQ ID NO: 5941714 - DNA, 25 bp, Homo sapien
ttcttggcatgtaacatgtacgtat

SEQ ID NO: 5941715 - DNA, 25 bp, Homo sapien
ccgtttgcaatgatgagaggatggc

SEQ ID NO: 5941716 - DNA, 25 bp, Homo sapien
gaccattctgggaagagtgccaacg

SEQ ID NO: 5941717 - DNA, 25 bp, Homo sapien
actgtgtggccactggtttaagcaa

SEQ ID NO: 5941718 - DNA, 25 bp, Homo sapien
taaaagaaaaagcccaaacaagctg

SEQ ID NO: 5941719 - DNA, 25 bp, Homo sapien
ctttgctttttaaatgaatggacaa

SEQ ID NO: 5941720 - DNA, 25 bp, Homo sapien
gccactggtttaagcaatgttgact

SEQ ID NO: 5941721 - DNA, 25 bp, Homo sapien
atttctgaaatattaaatagctgta

SEQ ID NO: 5941722 - DNA, 25 bp, Homo sapien
agtgtaggtacagaactgtagttag

SEQ ID NO: 5941723 - DNA, 25 bp, Homo sapien
ctctgcatcctgtttctcgctgtgc

SEQ ID NO: 5941724 - DNA, 25 bp, Homo sapien
gagtggagataattgtcaaactctg

SEQ ID NO: 5941725 - DNA, 25 bp, Homo sapien
gaccagtaaaatgaagaatgcttac

SEQ ID NO: 5941726 - DNA, 25 bp, Homo sapien
acaaagccctacctcctcgctgctc

SEQ ID NO: 5941727 - DNA, 25 bp, Homo sapien
tcattcagtttgaggggacagcggg

SEQ ID NO: 5941728 - DNA, 25 bp, Homo sapien
gctgctctctgcatcctgtttctcg

SEQ ID NO: 5941729 - DNA, 25 bp, Homo sapien
gtaaaagcgttcatcatcagaaagt

SEQ ID NO: 5941730 - DNA, 25 bp, Homo sapien
ctcctgcctttaagtttgttcctcc

SEQ ID NO: 5941731 - DNA, 25 bp, Homo sapien
gcaggtacctgtttgcagtgacagg

SEQ ID NO: 5941732 - DNA, 25 bp, Homo sapien
tctgggaagagtgccaacgagaaag

SEQ ID NO: 5941733 - DNA, 25 bp, Homo sapien
caacgagaaagctgacagtgccggt

SEQ ID NO: 5941734 - DNA, 25 bp, Homo sapien
gccactgaccattctgggaagagtg

SEQ ID NO: 5941735 - DNA, 25 bp, Homo sapien
gacttctttgacatcagtgatgaga

SEQ ID NO: 5941736 - DNA, 25 bp, Homo sapien
cttacaatggaaatgacgtggactt

SEQ ID NO: 5941737 - DNA, 25 bp, Homo sapien
atgaccagtaaaatgaagaatgctt

SEQ ID NO: 5941738 - DNA, 25 bp, Homo sapien
agggaagtggaagcggatgtgaata

SEQ ID NO: 5941739 - DNA, 25 bp, Homo sapien
ttttcttttccaattatggtctcac

SEQ ID NO: 5941740 - DNA, 25 bp, Homo sapien
atcagtgatgagagtagtggagagg

SEQ ID NO: 5941741 - DNA, 25 bp, Homo sapien
ttgctcattcagtttgaggggacag

SEQ ID NO: 5941742 - DNA, 25 bp, Homo sapien
atcctgtttctcgctgtgcagggag

SEQ ID NO: 5941743 - DNA, 25 bp, Homo sapien
gtgaatatcagcagtgcccttcgga

SEQ ID NO: 5941744 - DNA, 25 bp, Homo sapien
ttttaaccatcctagtgactttgct

SEQ ID NO: 5941745 - DNA, 25 bp, Homo sapien
agaaaaagcccaaacaagctggaaa

SEQ ID NO: 5941746 - DNA, 25 bp, Homo sapien
tgtttctcgctgtgcagggagagtg

SEQ ID NO: 5941747 - DNA, 25 bp, Homo sapien
gctagcagtgtaggtacagaactgt

SEQ ID NO: 5941748 - DNA, 25 bp, Homo sapien
ataattgtcaaactctgagtaaaag

SEQ ID NO: 5941749 - DNA, 25 bp, Homo sapien
cattggtgatcttgttttctttgtt

SEQ ID NO: 5941750 - DNA, 25 bp, Homo sapien
atcatggcccttcgggttatgacca

SEQ ID NO: 5941751 - DNA, 25 bp, Homo sapien
catggcccttcgggttatgaccagt

SEQ ID NO: 5941752 - DNA, 25 bp, Homo sapien
agatcatggcccttcgggttatgac

SEQ ID NO: 5941753 - DNA, 25 bp, Homo sapien
gaagttctggtcctctctcccaagc

SEQ ID NO: 5941754 - DNA, 25 bp, Homo sapien
tcgctgtgcagggagagtggagata

SEQ ID NO: 5941755 - DNA, 25 bp, Homo sapien
tggtctcaccttgtttctcacaaga

SEQ ID NO: 5941756 - DNA, 25 bp, Homo sapien
agcaatgttgactttgttttgctca

SEQ ID NO: 5941757 - DNA, 25 bp, Homo sapien
tgaaaatgaggatgactgctggaat

SEQ ID NO: 5941758 - DNA, 25 bp, Homo sapien
tgacagtgccggtggtgcccatgca

SEQ ID NO: 5941759 - DNA, 25 bp, Homo sapien
tttctcgctgtgcagggagagtgga

SEQ ID NO: 5941760 - DNA, 25 bp, Homo sapien
aaccagggtcctttcttggcatgta

SEQ ID NO: 5941761 - DNA, 25 bp, Homo sapien
cccttcggagttcgagtacaacgcc

SEQ ID NO: 5941762 - DNA, 25 bp, Homo sapien
ttgaggggacagcggggcctcctgc

SEQ ID NO: 5941763 - DNA, 25 bp, Homo sapien
atttatcatgttatcttattaaaag

SEQ ID NO: 5941764 - DNA, 25 bp, Homo sapien
aacatgtacgtatttctgaaatatt

SEQ ID NO: 5941765 - DNA, 25 bp, Homo sapien
acatcagtgatgagagtagtggaga

SEQ ID NO: 5941766 - DNA, 25 bp, Homo sapien
aggaaatgaaaatgaggatgactgc

SEQ ID NO: 5941767 - DNA, 25 bp, Homo sapien
ccagtaaaatgaagaatgcttacaa

SEQ ID NO: 5941768 - DNA, 25 bp, Homo sapien
caatggaaatgacgtggacttcttt

SEQ ID NO: 5941769 - DNA, 25 bp, Homo sapien
agcaagccagacatactgatccttc

SEQ ID NO: 5941770 - DNA, 25 bp, Homo sapien
actttgttttgctcattcagtttga

SEQ ID NO: 5941771 - DNA, 25 bp, Homo sapien
aaccagggcaacaacccagaagtcc

SEQ ID NO: 5941772 - DNA, 25 bp, Homo sapien
atactgatccttcgtcagatcatgg

SEQ ID NO: 5941773 - DNA, 25 bp, Homo sapien
aatattaaatagctgtacagaagca

SEQ ID NO: 5941774 - DNA, 25 bp, Homo sapien
agacatactgatccttcgtcagatc

SEQ ID NO: 5941775 - DNA, 25 bp, Homo sapien
tctgcgtggctagcagtgtaggtac

SEQ ID NO: 5941776 - DNA, 25 bp, Homo sapien
atcatcagaaagttcaaaggcacca

SEQ ID NO: 5941777 - DNA, 25 bp, Homo sapien
acaatgtacagtttttactgtgtgg

SEQ ID NO: 5941778 - DNA, 25 bp, Homo sapien
tccaggttgacaccagcaagccaga

SEQ ID NO: 5941779 - DNA, 25 bp, Homo sapien
tgttttgctcattcagtttgagggg

SEQ ID NO: 5941780 - DNA, 25 bp, Homo sapien
tcatcatcagaaagttcaaaggcac

SEQ ID NO: 5941781 - DNA, 25 bp, Homo sapien
tagtgactttgctttttaaatgaat

SEQ ID NO: 5941782 - DNA, 25 bp, Homo sapien
atgaagaatgcttacaatggaaatg

SEQ ID NO: 5941783 - DNA, 25 bp, Homo sapien
atggcagcaggaaatgaaaatgagg

SEQ ID NO: 5941784 - DNA, 25 bp, Homo sapien
gctttttaaatgaatggacaacaat

SEQ ID NO: 5941785 - DNA, 25 bp, Homo sapien
gcagtgtaggtacagaactgtagtt

SEQ ID NO: 5941786 - DNA, 25 bp, Homo sapien
acagtgccggtggtgcccatgcaga

SEQ ID NO: 5941787 - DNA, 25 bp, Homo sapien
actgatccttcgtcagatcatggcc

SEQ ID NO: 5941788 - DNA, 25 bp, Homo sapien
aaaagcgttcatcatcagaaagttc

SEQ ID NO: 5941789 - DNA, 25 bp, Homo sapien
caaactctgagtaaaagcgttcatc

SEQ ID NO: 5941790 - DNA, 25 bp, Homo sapien
ggatggcagcaggaaatgaaaatga

SEQ ID NO: 5941791 - DNA, 25 bp, Homo sapien
acaggaaatggattggccaaccagg

SEQ ID NO: 5941792 - DNA, 25 bp, Homo sapien
cttcggagttcgagtacaacgccac

SEQ ID NO: 5941793 - DNA, 25 bp, Homo sapien
ggagagggaagtggaagcggatgtg

SEQ ID NO: 5941794 - DNA, 25 bp, Homo sapien
agtacaacgccactgaccattctgg

SEQ ID NO: 5941795 - DNA, 25 bp, Homo sapien
gttggcttctctcattttatttgtg

SEQ ID NO: 5941796 - DNA, 25 bp, Homo sapien
tgccggtggtgcccatgcagagaca

SEQ ID NO: 5941797 - DNA, 25 bp, Homo sapien
tcagaaagttcaaaggcaccaagtt

SEQ ID NO: 5941798 - DNA, 25 bp, Homo sapien
aaacaagctggaaaatttccattta

SEQ ID NO: 5941799 - DNA, 25 bp, Homo sapien
cttggcatgtaacatgtacgtattt

SEQ ID NO: 5941800 - DNA, 25 bp, Homo sapien
tgatccttcgtcagatcatggccct

SEQ ID NO: 5941801 - DNA, 25 bp, Homo sapien
agaaagttcaaaggcaccaagttct

SEQ ID NO: 5941802 - DNA, 25 bp, Homo sapien
gcttctctcattttatttgtggggt

SEQ ID NO: 5941803 - DNA, 25 bp, Homo sapien
agtgccggtggtgcccatgcagaga

SEQ ID NO: 5941804 - DNA, 25 bp, Homo sapien
gaggatggcagcaggaaatgaaaat

SEQ ID NO: 5941805 - DNA, 25 bp, Homo sapien
gtggagagggaagtggaagcggatg

SEQ ID NO: 5941806 - DNA, 25 bp, Homo sapien
tggccactggtttaagcaatgttga

SEQ ID NO: 5941807 - DNA, 25 bp, Homo sapien
ctacctcctcgctgctctctgcatc

SEQ ID NO: 5941808 - DNA, 25 bp, Homo sapien
tgctctctgcatcctgtttctcgct

SEQ ID NO: 5941809 - DNA, 25 bp, Homo sapien
aaagaaaaagcccaaacaagctgga

SEQ ID NO: 5941810 - DNA, 25 bp, Homo sapien
tttgagactcgtgttctgcgtggct

SEQ ID NO: 5941811 - DNA, 25 bp, Homo sapien
ccttgtttctcacaagaaaaccagg

SEQ ID NO: 5941812 - DNA, 25 bp, Homo sapien
gcccatgcagagacaaagccctacc

SEQ ID NO: 5941813 - DNA, 25 bp, Homo sapien
ctgtttgcagtgacaggaaatggat

SEQ ID NO: 5941814 - DNA, 25 bp, Homo sapien
tagcagtgtaggtacagaactgtag

SEQ ID NO: 5941815 - DNA, 25 bp, Homo sapien
gtttttactgtgtggccactggttt

SEQ ID NO: 5941816 - DNA, 25 bp, Homo sapien
cgtggctagcagtgtaggtacagaa

SEQ ID NO: 5941817 - DNA, 25 bp, Homo sapien
caccagcaagccagacatactgatc

SEQ ID NO: 5941818 - DNA, 25 bp, Homo sapien
ttctcacaagaaaaccagggtcctt

SEQ ID NO: 5941819 - DNA, 25 bp, Homo sapien
ttgcaatgatgagaggatggcagca

SEQ ID NO: 5941820 - DNA, 25 bp, Homo sapien
ctcccaagcaccgtttgcaatgatg

SEQ ID NO: 5941821 - DNA, 25 bp, Homo sapien
tgtgcagggagagtggagataattg

SEQ ID NO: 5941822 - DNA, 25 bp, Homo sapien
ctctctgcatcctgtttctcgctgt

SEQ ID NO: 5941823 - DNA, 25 bp, Homo sapien
gaaagctgacagtgccggtggtgcc

SEQ ID NO: 5941824 - DNA, 25 bp, Homo sapien
tggcccttcgggttatgaccagtaa

SEQ ID NO: 5941825 - DNA, 25 bp, Homo sapien
agtaaaatgaagaatgcttacaatg

SEQ ID NO: 5941826 - DNA, 25 bp, Homo sapien
atgagaggatggcagcaggaaatga

SEQ ID NO: 5941827 - DNA, 25 bp, Homo sapien
ttatttatcatgttatcttattaaa

SEQ ID NO: 5941828 - DNA, 25 bp, Homo sapien
cagtgatgagagtagtggagaggga

SEQ ID NO: 5941829 - DNA, 25 bp, Homo sapien
ttgcagtgacaggaaatggattggc

SEQ ID NO: 5941830 - DNA, 25 bp, Homo sapien
tggaaaatttccatttatccctgtt

SEQ ID NO: 5941831 - DNA, 25 bp, Homo sapien
ccttcgggttatgaccagtaaaatg

SEQ ID NO: 5941832 - DNA, 25 bp, Homo sapien
acagcggggcctcctgcctttaagt

SEQ ID NO: 5941833 - DNA, 25 bp, Homo sapien
atagctgtacagaagcaggtttatt

SEQ ID NO: 5941834 - DNA, 25 bp, Homo sapien
tctcattttatttgtggggtttttc

SEQ ID NO: 5941835 - DNA, 25 bp, Homo sapien
gagagtagtggagagggaagtggaa

SEQ ID NO: 5941836 - DNA, 25 bp, Homo sapien
gcaatgatgagaggatggcagcagg

SEQ ID NO: 5941837 - DNA, 25 bp, Homo sapien
acaacccagaagtccaggttgacac

SEQ ID NO: 5941838 - DNA, 25 bp, Homo sapien
cagaagtccaggttgacaccagcaa

SEQ ID NO: 5941839 - DNA, 25 bp, Homo sapien
tattaaatagctgtacagaagcagg

SEQ ID NO: 5941840 - DNA, 25 bp, Homo sapien
tcctctctcccaagcaccgtttgca

SEQ ID NO: 5941841 - DNA, 25 bp, Homo sapien
taagcaatgttgactttgttttgct

SEQ ID NO: 5941842 - DNA, 25 bp, Homo sapien
tagttagttgtgcattggtgatctt

SEQ ID NO: 5941843 - DNA, 25 bp, Homo sapien
gggagagtggagataattgtcaaac

SEQ ID NO: 5941844 - DNA, 25 bp, Homo sapien
actgtagttagttgtgcattggtga

SEQ ID NO: 5941845 - DNA, 25 bp, Homo sapien
caacgccactgaccattctgggaag

SEQ ID NO: 5941846 - DNA, 25 bp, Homo sapien
gcggatgtgaatatcagcagtgccc

SEQ ID NO: 5941847 - DNA, 25 bp, Homo sapien
gaactgtagttagttgtgcattggt

SEQ ID NO: 5941848 - DNA, 25 bp, Homo sapien
ctggtcctctctcccaagcaccgtt

SEQ ID NO: 5941849 - DNA, 25 bp, Homo sapien
tgcattggtgatcttgttttctttg

SEQ ID NO: 5941850 - DNA, 25 bp, Homo sapien
tcggagttcgagtacaacgccactg

SEQ ID NO: 5941851 - DNA, 25 bp, Homo sapien
actgctggaatggcaaaggcaaaag

SEQ ID NO: 5941852 - DNA, 25 bp, Homo sapien
gaagtccaggttgacaccagcaagc

SEQ ID NO: 5941853 - DNA, 25 bp, Homo sapien
ggcaacaacccagaagtccaggttg

SEQ ID NO: 5941854 - DNA, 25 bp, Homo sapien
ttttactgtgtggccactggtttaa

SEQ ID NO: 5941855 - DNA, 25 bp, Homo sapien
ctttgttggcttctctcattttatt

SEQ ID NO: 5941856 - DNA, 25 bp, Homo sapien
aagcaggtttatttatcatgttatc

SEQ ID NO: 5941857 - DNA, 25 bp, Homo sapien
caggttgacaccagcaagccagaca

SEQ ID NO: 5941858 - DNA, 25 bp, Homo sapien
ctgagtaaaagcgttcatcatcaga

SEQ ID NO: 5941859 - DNA, 25 bp, Homo sapien
ttccatttatccctgttattttagc

SEQ ID NO: 5941860 - DNA, 25 bp, Homo sapien
atcttgttttctttgttggcttctc

SEQ ID NO: 5941861 - DNA, 25 bp, Homo sapien
ccctcacctcccccctcctttgaga

SEQ ID NO: 5941862 - DNA, 25 bp, Homo sapien
ctctgagtaaaagcgttcatcatca

SEQ ID NO: 5941863 - DNA, 25 bp, Homo sapien
tggcatgtaacatgtacgtatttct

SEQ ID NO: 5941864 - DNA, 25 bp, Homo sapien
gggcctcctgcctttaagtttgttc

SEQ ID NO: 5941865 - DNA, 25 bp, Homo sapien
gcagtgcccttcggagttcgagtac

SEQ ID NO: 5941866 - DNA, 25 bp, Homo sapien
aacccagaagtccaggttgacacca

SEQ ID NO: 5941867 - DNA, 25 bp, Homo sapien
acctgtttgcagtgacaggaaatgg

SEQ ID NO: 5941868 - DNA, 25 bp, Homo sapien
caccttgtttctcacaagaaaacca

SEQ ID NO: 5941869 - DNA, 25 bp, Homo sapien
gtgactttgctttttaaatgaatgg

SEQ ID NO: 5941870 - DNA, 25 bp, Homo sapien
caacaatgtacagtttttactgtgt

SEQ ID NO: 5941871 - DNA, 25 bp, Homo sapien
acgccactgaccattctgggaagag

SEQ ID NO: 5941872 - DNA, 25 bp, Homo sapien
ttgtttctcacaagaaaaccagggt

SEQ ID NO: 5941873 - DNA, 25 bp, Homo sapien
gatgactgctggaatggcaaaggca

SEQ ID NO: 5941874 - DNA, 25 bp, Homo sapien
aaatgaagaatgcttacaatggaaa

SEQ ID NO: 5941875 - DNA, 25 bp, Homo sapien
ttctggtcctctctcccaagcaccg

SEQ ID NO: 5941876 - DNA, 25 bp, Homo sapien
aagcccaaacaagctggaaaatttc

SEQ ID NO: 5941877 - DNA, 25 bp, Homo sapien
ctgtacagaagcaggtttatttatc

SEQ ID NO: 5941878 - DNA, 25 bp, Homo sapien
gctgtgcagggagagtggagataat

SEQ ID NO: 5941879 - DNA, 25 bp, Homo sapien
tgacaggaaatggattggccaacca

SEQ ID NO: 5941880 - DNA, 25 bp, Homo sapien
gcctcctgcctttaagtttgttcct

SEQ ID NO: 5941881 - DNA, 25 bp, Homo sapien
ttctgaaatattaaatagctgtaca

SEQ ID NO: 5941882 - DNA, 25 bp, Homo sapien
ggtcctttcttggcatgtaacatgt

SEQ ID NO: 5941883 - DNA, 25 bp, Homo sapien
ctaagaagttctggtcctctctccc

SEQ ID NO: 5941884 - DNA, 25 bp, Homo sapien
ttttctttgttggcttctctcattt

SEQ ID NO: 5941885 - DNA, 25 bp, Homo sapien
gaaatgaaaatgaggatgactgctg

SEQ ID NO: 5941886 - DNA, 25 bp, Homo sapien
tgcttacaatggaaatgacgtggac

SEQ ID NO: 5941887 - DNA, 25 bp, Homo sapien
aaatagctgtacagaagcaggttta

SEQ ID NO: 5941888 - DNA, 25 bp, Homo sapien
ttaaccatcctagtgactttgcttt

SEQ ID NO: 5941889 - DNA, 25 bp, Homo sapien
gtttctcacaagaaaaccagggtcc

SEQ ID NO: 5941890 - DNA, 25 bp, Homo sapien
aaccatcctagtgactttgcttttt

SEQ ID NO: 5941891 - DNA, 25 bp, Homo sapien
cttgttttctttgttggcttctctc

SEQ ID NO: 5941892 - DNA, 25 bp, Homo sapien
gagtgccaacgagaaagctgacagt

SEQ ID NO: 5941893 - DNA, 25 bp, Homo sapien
acagaagcaggtttatttatcatgt

SEQ ID NO: 5941894 - DNA, 25 bp, Homo sapien
caccgtttgcaatgatgagaggatg

SEQ ID NO: 5941895 - DNA, 25 bp, Homo sapien
tctcgctgtgcagggagagtggaga

SEQ ID NO: 5941896 - DNA, 25 bp, Homo sapien
gaagaatgcttacaatggaaatgac

SEQ ID NO: 5941897 - DNA, 25 bp, Homo sapien
gattggccaaccagggcaacaaccc

SEQ ID NO: 5941898 - DNA, 25 bp, Homo sapien
gcccaaacaagctggaaaatttcca

SEQ ID NO: 5941899 - DNA, 25 bp, Homo sapien
aagagtgccaacgagaaagctgaca

SEQ ID NO: 5941900 - DNA, 25 bp, Homo sapien
ggaaatgacgtggacttctttgaca

SEQ ID NO: 5941901 - DNA, 25 bp, Homo sapien
agtgcccttcggagttcgagtacaa

SEQ ID NO: 5941902 - DNA, 25 bp, Homo sapien
agctgtacagaagcaggtttattta

SEQ ID NO: 5941903 - DNA, 25 bp, Homo sapien
ccatgcagagacaaagccctacctc

SEQ ID NO: 5941904 - DNA, 25 bp, Homo sapien
tacagaactgtagttagttgtgcat

SEQ ID NO: 5941905 - DNA, 25 bp, Homo sapien
gtgttctgcgtggctagcagtgtag

SEQ ID NO: 5941906 - DNA, 25 bp, Homo sapien
aggaaatggattggccaaccagggc

SEQ ID NO: 5941907 - DNA, 25 bp, Homo sapien
aatgaaaatgaggatgactgctgga

SEQ ID NO: 5941908 - DNA, 25 bp, Homo sapien
gagaaagctgacagtgccggtggtg

SEQ ID NO: 5941909 - DNA, 25 bp, Homo sapien
atggaaatgacgtggacttctttga

SEQ ID NO: 5941910 - DNA, 25 bp, Homo sapien
ggagataattgtcaaactctgagta

SEQ ID NO: 5941911 - DNA, 25 bp, Homo sapien
taagtttgttcctccccctcacctc

SEQ ID NO: 5941912 - DNA, 25 bp, Homo sapien
agggtcctttcttggcatgtaacat

SEQ ID NO: 5941913 - DNA, 25 bp, Homo sapien
gcccttcgggttatgaccagtaaaa

SEQ ID NO: 5941914 - DNA, 25 bp, Homo sapien
gttagttgtgcattggtgatcttgt

SEQ ID NO: 5941915 - DNA, 25 bp, Homo sapien
tggacttctttgacatcagtgatga

SEQ ID NO: 5941916 - DNA, 25 bp, Homo sapien
ctggtttaagcaatgttgactttgt

SEQ ID NO: 5941917 - DNA, 25 bp, Homo sapien
tggctagcagtgtaggtacagaact

SEQ ID NO: 5941918 - DNA, 25 bp, Homo sapien
gaaatggattggccaaccagggcaa

SEQ ID NO: 5941919 - DNA, 25 bp, Homo sapien
atgttgactttgttttgctcattca

SEQ ID NO: 5941920 - DNA, 25 bp, Homo sapien
tgtacagtttttactgtgtggccac

SEQ ID NO: 5941921 - DNA, 25 bp, Homo sapien
ttactgtgtggccactggtttaagc

SEQ ID NO: 5941922 - DNA, 25 bp, Homo sapien
tgcgtggctagcagtgtaggtacag

SEQ ID NO: 5941923 - DNA, 25 bp, Homo sapien
gtttgcaatgatgagaggatggcag

SEQ ID NO: 5941924 - DNA, 25 bp, Homo sapien
aagcggatgtgaatatcagcagtgc

SEQ ID NO: 5941925 - DNA, 25 bp, Homo sapien
tgctggaatggcaaaggcaaaagca

SEQ ID NO: 5941926 - DNA, 25 bp, Homo sapien
gtgcccatgcagagacaaagcccta

SEQ ID NO: 5941927 - DNA, 25 bp, Homo sapien
cccaagcaccgtttgcaatgatgag

SEQ ID NO: 5941928 - DNA, 25 bp, Homo sapien
gactttgctttttaaatgaatggac

SEQ ID NO: 5941929 - DNA, 25 bp, Homo sapien
ctcacaagaaaaccagggtcctttc

SEQ ID NO: 5941930 - DNA, 25 bp, Homo sapien
aatgaggatgactgctggaatggca

SEQ ID NO: 5941931 - DNA, 25 bp, Homo sapien
ggaagtggaagcggatgtgaatatc

SEQ ID NO: 5941932 - DNA, 25 bp, Homo sapien
agagacaaagccctacctcctcgct

SEQ ID NO: 5941933 - DNA, 25 bp, Homo sapien
caagcaccgtttgcaatgatgagag

SEQ ID NO: 5941934 - DNA, 25 bp, Homo sapien
gttctgcgtggctagcagtgtaggt

SEQ ID NO: 5941935 - DNA, 25 bp, Homo sapien
cacctcccccctcctttgagactcg

SEQ ID NO: 5941936 - DNA, 25 bp, Homo sapien
ttcgtcagatcatggcccttcgggt

SEQ ID NO: 5941937 - DNA, 25 bp, Homo sapien
aaaaccagggtcctttcttggcatg

SEQ ID NO: 5941938 - DNA, 25 bp, Homo sapien
tacaacgccactgaccattctggga

SEQ ID NO: 5941939 - DNA, 25 bp, Homo sapien
ctcctttgagactcgtgttctgcgt

SEQ ID NO: 5941940 - DNA, 25 bp, Homo sapien
gagagtggagataattgtcaaactc

SEQ ID NO: 5941941 - DNA, 25 bp, Homo sapien
ccctcctttgagactcgtgttctgc

SEQ ID NO: 5941942 - DNA, 25 bp, Homo sapien
tcccccctcctttgagactcgtgtt

SEQ ID NO: 5941943 - DNA, 25 bp, Homo sapien
aggtttatttatcatgttatcttat

SEQ ID NO: 5941944 - DNA, 25 bp, Homo sapien
aatgaatggacaacaatgtacagtt

SEQ ID NO: 5941945 - DNA, 25 bp, Homo sapien
caatgttgactttgttttgctcatt

SEQ ID NO: 5941946 - DNA, 25 bp, Homo sapien
gcggggcctcctgcctttaagtttg

SEQ ID NO: 5941947 - DNA, 25 bp, Homo sapien
taaaatgaagaatgcttacaatgga

SEQ ID NO: 5941948 - DNA, 25 bp, Homo sapien
cttctttgacatcagtgatgagagt

SEQ ID NO: 5941949 - DNA, 25 bp, Homo sapien
agagggaagtggaagcggatgtgaa

SEQ ID NO: 5941950 - DNA, 25 bp, Homo sapien
cctagtgactttgctttttaaatga

SEQ ID NO: 5941951 - DNA, 25 bp, Homo sapien
aagcaggtacctgtttgcagtgaca

SEQ ID NO: 5941952 - DNA, 25 bp, Homo sapien
agccagacatactgatccttcgtca

SEQ ID NO: 5941953 - DNA, 25 bp, Homo sapien
tgatcttgttttctttgttggcttc

SEQ ID NO: 5941954 - DNA, 25 bp, Homo sapien
agttctggtcctctctcccaagcac

SEQ ID NO: 5941955 - DNA, 25 bp, Homo sapien
aaaggcaaaagcaggtacctgtttg

SEQ ID NO: 5941956 - DNA, 25 bp, Homo sapien
tcgctgctctctgcatcctgtttct

SEQ ID NO: 5941957 - DNA, 25 bp, Homo sapien
aaatgacgtggacttctttgacatc

SEQ ID NO: 5941958 - DNA, 25 bp, Homo sapien
ggtggtgcccatgcagagacaaagc

SEQ ID NO: 5941959 - DNA, 25 bp, Homo sapien
caattatggtctcaccttgtttctc

SEQ ID NO: 5941960 - DNA, 25 bp, Homo sapien
ggggacagcggggcctcctgccttt

SEQ ID NO: 5941961 - DNA, 25 bp, Homo sapien
catgtacgtatttctgaaatattaa

SEQ ID NO: 5941962 - DNA, 25 bp, Homo sapien
ctctcccaagcaccgtttgcaatga

SEQ ID NO: 5941963 - DNA, 25 bp, Homo sapien
gaaatattaaatagctgtacagaag

SEQ ID NO: 5941964 - DNA, 25 bp, Homo sapien
agtgacaggaaatggattggccaac

SEQ ID NO: 5941965 - DNA, 25 bp, Homo sapien
aatgatgagaggatggcagcaggaa

SEQ ID NO: 5941966 - DNA, 25 bp, Homo sapien
cagcaggaaatgaaaatgaggatga

SEQ ID NO: 5941967 - DNA, 25 bp, Homo sapien
ttttgctcattcagtttgaggggac

SEQ ID NO: 5941968 - DNA, 25 bp, Homo sapien
gtctcaccttgtttctcacaagaaa

SEQ ID NO: 5941969 - DNA, 25 bp, Homo sapien
atttccatttatccctgttatttta

SEQ ID NO: 5941970 - DNA, 25 bp, Homo sapien
gcaaaagcaggtacctgtttgcagt

SEQ ID NO: 5941971 - DNA, 25 bp, Homo sapien
ctgcatcctgtttctcgctgtgcag

SEQ ID NO: 5941972 - DNA, 25 bp, Homo sapien
ggatgtgaatatcagcagtgccctt

SEQ ID NO: 5941973 - DNA, 25 bp, Homo sapien
aagctggaaaatttccatttatccc

SEQ ID NO: 5941974 - DNA, 25 bp, Homo sapien
ggacagcggggcctcctgcctttaa

SEQ ID NO: 5941975 - DNA, 25 bp, Homo sapien
cctcgctgctctctgcatcctgttt

SEQ ID NO: 5941976 - DNA, 25 bp, Homo sapien
gaatatcagcagtgcccttcggagt

SEQ ID NO: 5941977 - DNA, 25 bp, Homo sapien
ttggccaaccagggcaacaacccag

SEQ ID NO: 5941978 - DNA, 25 bp, Homo sapien
aagcgttcatcatcagaaagttcaa

SEQ ID NO: 5941979 - DNA, 25 bp, Homo sapien
aatggattggccaaccagggcaaca

SEQ ID NO: 5941980 - DNA, 25 bp, Homo sapien
ccagacatactgatccttcgtcaga

SEQ ID NO: 5941981 - DNA, 25 bp, Homo sapien
gtgccaacgagaaagctgacagtgc

SEQ ID NO: 5941982 - DNA, 25 bp, Homo sapien
ctgaccattctgggaagagtgccaa

SEQ ID NO: 5941983 - DNA, 25 bp, Homo sapien
gtccattcatttaaaaagcaaagtc

SEQ ID NO: 5941984 - DNA, 25 bp, Homo sapien
tggtcataacccgaagggccatgat

SEQ ID NO: 5941985 - DNA, 25 bp, Homo sapien
cggcactgtcagctttctcgttggc

SEQ ID NO: 5941986 - DNA, 25 bp, Homo sapien
cctcaaactgaatgagcaaaacaaa

SEQ ID NO: 5941987 - DNA, 25 bp, Homo sapien
tgctgccatcctctcatcattgcaa

SEQ ID NO: 5941988 - DNA, 25 bp, Homo sapien
caattatctccactctccctgcaca

SEQ ID NO: 5941989 - DNA, 25 bp, Homo sapien
agctatttaatatttcagaaatacg

SEQ ID NO: 5941990 - DNA, 25 bp, Homo sapien
gtgagaccataattggaaaagaaaa

SEQ ID NO: 5941991 - DNA, 25 bp, Homo sapien
actttctgatgatgaacgcttttac

SEQ ID NO: 5941992 - DNA, 25 bp, Homo sapien
cttctgtacagctatttaatatttc

SEQ ID NO: 5941993 - DNA, 25 bp, Homo sapien
tctgacgaaggatcagtatgtctgg

SEQ ID NO: 5941994 - DNA, 25 bp, Homo sapien
cagagagcagcgaggaggtagggct

SEQ ID NO: 5941995 - DNA, 25 bp, Homo sapien
tgtcaaagaagtccacgtcatttcc

SEQ ID NO: 5941996 - DNA, 25 bp, Homo sapien
tgcttctgtacagctatttaatatt

SEQ ID NO: 5941997 - DNA, 25 bp, Homo sapien
gatattcacatccgcttccacttcc

SEQ ID NO: 5941998 - DNA, 25 bp, Homo sapien
atgagagaagccaacaaagaaaaca

SEQ ID NO: 5941999 - DNA, 25 bp, Homo sapien
tttaataagataacatgataaataa

SEQ ID NO: 5942000 - DNA, 25 bp, Homo sapien
aaatgagagaagccaacaaagaaaa

SEQ ID NO: 5942001 - DNA, 25 bp, Homo sapien
ctgatattcacatccgcttccactt

SEQ ID NO: 5942002 - DNA, 25 bp, Homo sapien
aatgagcaaaacaaagtcaacattg

SEQ ID NO: 5942003 - DNA, 25 bp, Homo sapien
ccaccggcactgtcagctttctcgt

SEQ ID NO: 5942004 - DNA, 25 bp, Homo sapien
cttggtgcctttgaactttctgatg

SEQ ID NO: 5942005 - DNA, 25 bp, Homo sapien
aaaaagtgagaacttggtgcctttg

SEQ ID NO: 5942006 - DNA, 25 bp, Homo sapien
gttacatgccaagaaaggaccctgg

SEQ ID NO: 5942007 - DNA, 25 bp, Homo sapien
acttctgggttgttgccctggttgg

SEQ ID NO: 5942008 - DNA, 25 bp, Homo sapien
agcaaagtcactaggatggttaaaa

SEQ ID NO: 5942009 - DNA, 25 bp, Homo sapien
gttgttgccctggttggccaatcca

SEQ ID NO: 5942010 - DNA, 25 bp, Homo sapien
tctggcttgctggtgtcaacctgga

SEQ ID NO: 5942011 - DNA, 25 bp, Homo sapien
gtgcttgggagagaggaccagaact

SEQ ID NO: 5942012 - DNA, 25 bp, Homo sapien
aaagaagtccacgtcatttccattg

SEQ ID NO: 5942013 - DNA, 25 bp, Homo sapien
gtcatttccattgtaagcattcttc

SEQ ID NO: 5942014 - DNA, 25 bp, Homo sapien
cccctcaaactgaatgagcaaaaca

SEQ ID NO: 5942015 - DNA, 25 bp, Homo sapien
agtatgtctggcttgctggtgtcaa

SEQ ID NO: 5942016 - DNA, 25 bp, Homo sapien
atcactgatgtcaaagaagtccacg

SEQ ID NO: 5942017 - DNA, 25 bp, Homo sapien
ctaactacagttctgtacctacact

SEQ ID NO: 5942018 - DNA, 25 bp, Homo sapien
taaatggaaattttccagcttgttt

SEQ ID NO: 5942019 - DNA, 25 bp, Homo sapien
taaaataacagggataaatggaaat

SEQ ID NO: 5942020 - DNA, 25 bp, Homo sapien
aaggaccctggttttcttgtgagaa

SEQ ID NO: 5942021 - DNA, 25 bp, Homo sapien
gttggccaatccatttcctgtcact

SEQ ID NO: 5942022 - DNA, 25 bp, Homo sapien
cggtgcttgggagagaggaccagaa

SEQ ID NO: 5942023 - DNA, 25 bp, Homo sapien
ttgacaattatctccactctccctg

SEQ ID NO: 5942024 - DNA, 25 bp, Homo sapien
actgaatgagcaaaacaaagtcaac

SEQ ID NO: 5942025 - DNA, 25 bp, Homo sapien
agaagtccacgtcatttccattgta

SEQ ID NO: 5942026 - DNA, 25 bp, Homo sapien
acgtacatgttacatgccaagaaag

SEQ ID NO: 5942027 - DNA, 25 bp, Homo sapien
tagggctttgtctctgcatgggcac

SEQ ID NO: 5942028 - DNA, 25 bp, Homo sapien
ttgccctggttggccaatccatttc

SEQ ID NO: 5942029 - DNA, 25 bp, Homo sapien
ctccctgcacagcgagaaacaggat

SEQ ID NO: 5942030 - DNA, 25 bp, Homo sapien
aagatcaccaatgcacaactaacta

SEQ ID NO: 5942031 - DNA, 25 bp, Homo sapien
attcatttaaaaagcaaagtcacta

SEQ ID NO: 5942032 - DNA, 25 bp, Homo sapien
agaacttggtgcctttgaactttct

SEQ ID NO: 5942033 - DNA, 25 bp, Homo sapien
ctggacttctgggttgttgccctgg

SEQ ID NO: 5942034 - DNA, 25 bp, Homo sapien
gacaattatctccactctccctgca

SEQ ID NO: 5942035 - DNA, 25 bp, Homo sapien
gatcaccaatgcacaactaactaca

SEQ ID NO: 5942036 - DNA, 25 bp, Homo sapien
cagcttgtttgggctttttctttta

SEQ ID NO: 5942037 - DNA, 25 bp, Homo sapien
tgcaaacggtgcttgggagagagga

SEQ ID NO: 5942038 - DNA, 25 bp, Homo sapien
acttccctctccactactctcatca

SEQ ID NO: 5942039 - DNA, 25 bp, Homo sapien
ttactggtcataacccgaagggcca

SEQ ID NO: 5942040 - DNA, 25 bp, Homo sapien
atgataaataaacctgcttctgtac

SEQ ID NO: 5942041 - DNA, 25 bp, Homo sapien
ccattcatttaaaaagcaaagtcac

SEQ ID NO: 5942042 - DNA, 25 bp, Homo sapien
caaaacaaagtcaacattgcttaaa

SEQ ID NO: 5942043 - DNA, 25 bp, Homo sapien
gctggtgtcaacctggacttctggg

SEQ ID NO: 5942044 - DNA, 25 bp, Homo sapien
ttaaaaagcaaagtcactaggatgg

SEQ ID NO: 5942045 - DNA, 25 bp, Homo sapien
accagtggccacacagtaaaaactg

SEQ ID NO: 5942046 - DNA, 25 bp, Homo sapien
tcctctcatcattgcaaacggtgct

SEQ ID NO: 5942047 - DNA, 25 bp, Homo sapien
caaagaaaacaagatcaccaatgca

SEQ ID NO: 5942048 - DNA, 25 bp, Homo sapien
tggttggccaatccatttcctgtca

SEQ ID NO: 5942049 - DNA, 25 bp, Homo sapien
atttcctgctgccatcctctcatca

SEQ ID NO: 5942050 - DNA, 25 bp, Homo sapien
tgctgatattcacatccgcttccac

SEQ ID NO: 5942051 - DNA, 25 bp, Homo sapien
gtacattgttgtccattcatttaaa

SEQ ID NO: 5942052 - DNA, 25 bp, Homo sapien
actctcatcactgatgtcaaagaag

SEQ ID NO: 5942053 - DNA, 25 bp, Homo sapien
gccctggttggccaatccatttcct

SEQ ID NO: 5942054 - DNA, 25 bp, Homo sapien
aggatgcagagagcagcgaggaggt

SEQ ID NO: 5942055 - DNA, 25 bp, Homo sapien
caatccatttcctgtcactgcaaac

SEQ ID NO: 5942056 - DNA, 25 bp, Homo sapien
cagtggcgttgtactcgaactccga

SEQ ID NO: 5942057 - DNA, 25 bp, Homo sapien
gtacatgttacatgccaagaaagga

SEQ ID NO: 5942058 - DNA, 25 bp, Homo sapien
caggtacctgcttttgcctttgcca

SEQ ID NO: 5942059 - DNA, 25 bp, Homo sapien
tcatcctcattttcatttcctgctg

SEQ ID NO: 5942060 - DNA, 25 bp, Homo sapien
tttcttgtgagaaacaaggtgagac

SEQ ID NO: 5942061 - DNA, 25 bp, Homo sapien
agtcatcctcattttcatttcctgc

SEQ ID NO: 5942062 - DNA, 25 bp, Homo sapien
tgcaaacaggtacctgcttttgcct

SEQ ID NO: 5942063 - DNA, 25 bp, Homo sapien
ggaggaacaaacttaaaggcaggag

SEQ ID NO: 5942064 - DNA, 25 bp, Homo sapien
tccgaagggcactgctgatattcac

SEQ ID NO: 5942065 - DNA, 25 bp, Homo sapien
ttggcactcttcccagaatggtcag

SEQ ID NO: 5942066 - DNA, 25 bp, Homo sapien
ttgaactttctgatgatgaacgctt

SEQ ID NO: 5942067 - DNA, 25 bp, Homo sapien
ctgggttgttgccctggttggccaa

SEQ ID NO: 5942068 - DNA, 25 bp, Homo sapien
gtggcgttgtactcgaactccgaag

SEQ ID NO: 5942069 - DNA, 25 bp, Homo sapien
taaacctgcttctgtacagctattt

SEQ ID NO: 5942070 - DNA, 25 bp, Homo sapien
acttaaaggcaggaggccccgctgt

SEQ ID NO: 5942071 - DNA, 25 bp, Homo sapien
accctggttttcttgtgagaaacaa

SEQ ID NO: 5942072 - DNA, 25 bp, Homo sapien
ctgtacctacactgctagccacgca

SEQ ID NO: 5942073 - DNA, 25 bp, Homo sapien
caaacggtgcttgggagagaggacc

SEQ ID NO: 5942074 - DNA, 25 bp, Homo sapien
ctgccatcctctcatcattgcaaac

SEQ ID NO: 5942075 - DNA, 25 bp, Homo sapien
aggaacaaacttaaaggcaggaggc

SEQ ID NO: 5942076 - DNA, 25 bp, Homo sapien
tttgccattccagcagtcatcctca

SEQ ID NO: 5942077 - DNA, 25 bp, Homo sapien
agcgagaaacaggatgcagagagca

SEQ ID NO: 5942078 - DNA, 25 bp, Homo sapien
cttcccagaatggtcagtggcgttg

SEQ ID NO: 5942079 - DNA, 25 bp, Homo sapien
agggccatgatctgacgaaggatca

SEQ ID NO: 5942080 - DNA, 25 bp, Homo sapien
gatgcagagagcagcgaggaggtag

SEQ ID NO: 5942081 - DNA, 25 bp, Homo sapien
agttctgtacctacactgctagcca

SEQ ID NO: 5942082 - DNA, 25 bp, Homo sapien
tggcttgctggtgtcaacctggact

SEQ ID NO: 5942083 - DNA, 25 bp, Homo sapien
cagggataaatggaaattttccagc

SEQ ID NO: 5942084 - DNA, 25 bp, Homo sapien
tgcatgggcaccaccggcactgtca

SEQ ID NO: 5942085 - DNA, 25 bp, Homo sapien
gtaagcattcttcattttactggtc

SEQ ID NO: 5942086 - DNA, 25 bp, Homo sapien
aaagtgagaacttggtgcctttgaa

SEQ ID NO: 5942087 - DNA, 25 bp, Homo sapien
tggtcagtggcgttgtactcgaact

SEQ ID NO: 5942088 - DNA, 25 bp, Homo sapien
ggcaccaccggcactgtcagctttc

SEQ ID NO: 5942089 - DNA, 25 bp, Homo sapien
tacctgcttttgcctttgccattcc

SEQ ID NO: 5942090 - DNA, 25 bp, Homo sapien
tcattttcatttcctgctgccatcc

SEQ ID NO: 5942091 - DNA, 25 bp, Homo sapien
acgtcatttccattgtaagcattct

SEQ ID NO: 5942092 - DNA, 25 bp, Homo sapien
actgctagccacgcagaacacgagt

SEQ ID NO: 5942093 - DNA, 25 bp, Homo sapien
gatcagtatgtctggcttgctggtg

SEQ ID NO: 5942094 - DNA, 25 bp, Homo sapien
cgaagggcactgctgatattcacat

SEQ ID NO: 5942095 - DNA, 25 bp, Homo sapien
ttgtaagcattcttcattttactgg

SEQ ID NO: 5942096 - DNA, 25 bp, Homo sapien
actccgaagggcactgctgatattc

SEQ ID NO: 5942097 - DNA, 25 bp, Homo sapien
cgttggcactcttcccagaatggtc

SEQ ID NO: 5942098 - DNA, 25 bp, Homo sapien
gaactccgaagggcactgctgatat

SEQ ID NO: 5942099 - DNA, 25 bp, Homo sapien
aataaacctgcttctgtacagctat

SEQ ID NO: 5942100 - DNA, 25 bp, Homo sapien
aggaggtagggctttgtctctgcat

SEQ ID NO: 5942101 - DNA, 25 bp, Homo sapien
aatggtcagtggcgttgtactcgaa

SEQ ID NO: 5942102 - DNA, 25 bp, Homo sapien
tgtcagctttctcgttggcactctt

SEQ ID NO: 5942103 - DNA, 25 bp, Homo sapien
gcactgctgatattcacatccgctt

SEQ ID NO: 5942104 - DNA, 25 bp, Homo sapien
ctctcatcattgcaaacggtgcttg

SEQ ID NO: 5942105 - DNA, 25 bp, Homo sapien
gggcactgctgatattcacatccgc

SEQ ID NO: 5942106 - DNA, 25 bp, Homo sapien
cttttaataagataacatgataaat

SEQ ID NO: 5942107 - DNA, 25 bp, Homo sapien
cagagtttgacaattatctccactc

SEQ ID NO: 5942108 - DNA, 25 bp, Homo sapien
aacgcttttactcagagtttgacaa

SEQ ID NO: 5942109 - DNA, 25 bp, Homo sapien
cgaggaggtagggctttgtctctgc

SEQ ID NO: 5942110 - DNA, 25 bp, Homo sapien
tacatgccaagaaaggaccctggtt

SEQ ID NO: 5942111 - DNA, 25 bp, Homo sapien
ttgggagagaggaccagaacttctt

SEQ ID NO: 5942112 - DNA, 25 bp, Homo sapien
catgggcaccaccggcactgtcagc

SEQ ID NO: 5942113 - DNA, 25 bp, Homo sapien
gcttgggagagaggaccagaacttc

SEQ ID NO: 5942114 - DNA, 25 bp, Homo sapien
gcacagcgagaaacaggatgcagag

SEQ ID NO: 5942115 - DNA, 25 bp, Homo sapien
gagagcagcgaggaggtagggcttt

SEQ ID NO: 5942116 - DNA, 25 bp, Homo sapien
actgtcagctttctcgttggcactc

SEQ ID NO: 5942117 - DNA, 25 bp, Homo sapien
tactcagagtttgacaattatctcc

SEQ ID NO: 5942118 - DNA, 25 bp, Homo sapien
acagcgagaaacaggatgcagagag

SEQ ID NO: 5942119 - DNA, 25 bp, Homo sapien
taaataaacctgcttctgtacagct

SEQ ID NO: 5942120 - DNA, 25 bp, Homo sapien
gctaaaataacagggataaatggaa

SEQ ID NO: 5942121 - DNA, 25 bp, Homo sapien
gaacaaacttaaaggcaggaggccc

SEQ ID NO: 5942122 - DNA, 25 bp, Homo sapien
gtgtcaacctggacttctgggttgt

SEQ ID NO: 5942123 - DNA, 25 bp, Homo sapien
gtcccctcaaactgaatgagcaaaa

SEQ ID NO: 5942124 - DNA, 25 bp, Homo sapien
caatgcacaactaactacagttctg

SEQ ID NO: 5942125 - DNA, 25 bp, Homo sapien
acaggatgcagagagcagcgaggag

SEQ ID NO: 5942126 - DNA, 25 bp, Homo sapien
cctttgccattccagcagtcatcct

SEQ ID NO: 5942127 - DNA, 25 bp, Homo sapien
tccagcttgtttgggctttttcttt

SEQ ID NO: 5942128 - DNA, 25 bp, Homo sapien
catttccattgtaagcattcttcat

SEQ ID NO: 5942129 - DNA, 25 bp, Homo sapien
cagcagtcatcctcattttcatttc

SEQ ID NO: 5942130 - DNA, 25 bp, Homo sapien
aagcattcttcattttactggtcat

SEQ ID NO: 5942131 - DNA, 25 bp, Homo sapien
gaaaggaccctggttttcttgtgag

SEQ ID NO: 5942132 - DNA, 25 bp, Homo sapien
agcaaaacaaagtcaacattgctta

SEQ ID NO: 5942133 - DNA, 25 bp, Homo sapien
tcagaaatacgtacatgttacatgc

SEQ ID NO: 5942134 - DNA, 25 bp, Homo sapien
accccacaaataaaatgagagaagc

SEQ ID NO: 5942135 - DNA, 25 bp, Homo sapien
tttactcagagtttgacaattatct

SEQ ID NO: 5942136 - DNA, 25 bp, Homo sapien
acctacactgctagccacgcagaac

SEQ ID NO: 5942137 - DNA, 25 bp, Homo sapien
aagggcactgctgatattcacatcc

SEQ ID NO: 5942138 - DNA, 25 bp, Homo sapien
tgagcaaaacaaagtcaacattgct

SEQ ID NO: 5942139 - DNA, 25 bp, Homo sapien
gggctttgtctctgcatgggcacca

SEQ ID NO: 5942140 - DNA, 25 bp, Homo sapien
aaaggcaggaggccccgctgtcccc

SEQ ID NO: 5942141 - DNA, 25 bp, Homo sapien
atttcctgtcactgcaaacaggtac

SEQ ID NO: 5942142 - DNA, 25 bp, Homo sapien
aataaaatgagagaagccaacaaag

SEQ ID NO: 5942143 - DNA, 25 bp, Homo sapien
tcaacattgcttaaaccagtggcca

SEQ ID NO: 5942144 - DNA, 25 bp, Homo sapien
caaggtgagaccataattggaaaag

SEQ ID NO: 5942145 - DNA, 25 bp, Homo sapien
tgttgtccattcatttaaaaagcaa

SEQ ID NO: 5942146 - DNA, 25 bp, Homo sapien
ttgtactcgaactccgaagggcact

SEQ ID NO: 5942147 - DNA, 25 bp, Homo sapien
aacattgcttaaaccagtggccaca

SEQ ID NO: 5942148 - DNA, 25 bp, Homo sapien
ctacactgctagccacgcagaacac

SEQ ID NO: 5942149 - DNA, 25 bp, Homo sapien
cactgatgtcaaagaagtccacgtc

SEQ ID NO: 5942150 - DNA, 25 bp, Homo sapien
agtctcaaaggaggggggaggtgag

SEQ ID NO: 5942151 - DNA, 25 bp, Homo sapien
ctcgttggcactcttcccagaatgg

SEQ ID NO: 5942152 - DNA, 25 bp, Homo sapien
ttcattttactggtcataacccgaa

SEQ ID NO: 5942153 - DNA, 25 bp, Homo sapien
ccaacaaagaaaacaagatcaccaa

SEQ ID NO: 5942154 - DNA, 25 bp, Homo sapien
gttttcttgtgagaaacaaggtgag

SEQ ID NO: 5942155 - DNA, 25 bp, Homo sapien
ggacttctgggttgttgccctggtt

SEQ ID NO: 5942156 - DNA, 25 bp, Homo sapien
aaaccagtggccacacagtaaaaac

SEQ ID NO: 5942157 - DNA, 25 bp, Homo sapien
acatgttacatgccaagaaaggacc

SEQ ID NO: 5942158 - DNA, 25 bp, Homo sapien
tgatgatgaacgcttttactcagag

SEQ ID NO: 5942159 - DNA, 25 bp, Homo sapien
cctcattttcatttcctgctgccat

SEQ ID NO: 5942160 - DNA, 25 bp, Homo sapien
tctcatcactgatgtcaaagaagtc

SEQ ID NO: 5942161 - DNA, 25 bp, Homo sapien
aacaaggtgagaccataattggaaa

SEQ ID NO: 5942162 - DNA, 25 bp, Homo sapien
cacatccgcttccacttccctctcc

SEQ ID NO: 5942163 - DNA, 25 bp, Homo sapien
ggcgttgtactcgaactccgaaggg

SEQ ID NO: 5942164 - DNA, 25 bp, Homo sapien
tcattgcaaacggtgcttgggagag

SEQ ID NO: 5942165 - DNA, 25 bp, Homo sapien
cctgtcactgcaaacaggtacctgc

SEQ ID NO: 5942166 - DNA, 25 bp, Homo sapien
gtacctacactgctagccacgcaga

SEQ ID NO: 5942167 - DNA, 25 bp, Homo sapien
aagataacatgataaataaacctgc

SEQ ID NO: 5942168 - DNA, 25 bp, Homo sapien
ttaatatttcagaaatacgtacatg

SEQ ID NO: 5942169 - DNA, 25 bp, Homo sapien
gagagaagccaacaaagaaaacaag

SEQ ID NO: 5942170 - DNA, 25 bp, Homo sapien
tattcacatccgcttccacttccct

SEQ ID NO: 5942171 - DNA, 25 bp, Homo sapien
catcattgcaaacggtgcttgggag

SEQ ID NO: 5942172 - DNA, 25 bp, Homo sapien
gaactttctgatgatgaacgctttt

SEQ ID NO: 5942173 - DNA, 25 bp, Homo sapien
cttttactcagagtttgacaattat

SEQ ID NO: 5942174 - DNA, 25 bp, Homo sapien
tgaacgcttttactcagagtttgac

SEQ ID NO: 5942175 - DNA, 25 bp, Homo sapien
ccacacagtaaaaactgtacattgt

SEQ ID NO: 5942176 - DNA, 25 bp, Homo sapien
tctctgcatgggcaccaccggcact

SEQ ID NO: 5942177 - DNA, 25 bp, Homo sapien
acactgctagccacgcagaacacga

SEQ ID NO: 5942178 - DNA, 25 bp, Homo sapien
gcagcgaggaggtagggctttgtct

SEQ ID NO: 5942179 - DNA, 25 bp, Homo sapien
attttcatttcctgctgccatcctc

SEQ ID NO: 5942180 - DNA, 25 bp, Homo sapien
catgccaagaaaggaccctggtttt

SEQ ID NO: 5942181 - DNA, 25 bp, Homo sapien
agtcaacattgcttaaaccagtggc

SEQ ID NO: 5942182 - DNA, 25 bp, Homo sapien
cattttactggtcataacccgaagg

SEQ ID NO: 5942183 - DNA, 25 bp, Homo sapien
ttcctgtcactgcaaacaggtacct

SEQ ID NO: 5942184 - DNA, 25 bp, Homo sapien
gtgcctttgaactttctgatgatga

SEQ ID NO: 5942185 - DNA, 25 bp, Homo sapien
aactgtacattgttgtccattcatt

SEQ ID NO: 5942186 - DNA, 25 bp, Homo sapien
agtgagaacttggtgcctttgaact

SEQ ID NO: 5942187 - DNA, 25 bp, Homo sapien
atttaaaaagcaaagtcactaggat

SEQ ID NO: 5942188 - DNA, 25 bp, Homo sapien
gctttgtctctgcatgggcaccacc

SEQ ID NO: 5942189 - DNA, 25 bp, Homo sapien
tatgtctggcttgctggtgtcaacc

SEQ ID NO: 5942190 - DNA, 25 bp, Homo sapien
aaagtcaacattgcttaaaccagtg

SEQ ID NO: 5942191 - DNA, 25 bp, Homo sapien
ggccacacagtaaaaactgtacatt

SEQ ID NO: 5942192 - DNA, 25 bp, Homo sapien
tggccaatccatttcctgtcactgc

SEQ ID NO: 5942193 - DNA, 25 bp, Homo sapien
tatctccactctccctgcacagcga

SEQ ID NO: 5942194 - DNA, 25 bp, Homo sapien
agccaacaaagaaaacaagatcacc

SEQ ID NO: 5942195 - DNA, 25 bp, Homo sapien
acagttctgtacctacactgctagc

SEQ ID NO: 5942196 - DNA, 25 bp, Homo sapien
gaaggatcagtatgtctggcttgct

SEQ ID NO: 5942197 - DNA, 25 bp, Homo sapien
tcatttaaaaagcaaagtcactagg

SEQ ID NO: 5942198 - DNA, 25 bp, Homo sapien
gtcataacccgaagggccatgatct

SEQ ID NO: 5942199 - DNA, 25 bp, Homo sapien
ttaaaggcaggaggccccgctgtcc

SEQ ID NO: 5942200 - DNA, 25 bp, Homo sapien
atacgtacatgttacatgccaagaa

SEQ ID NO: 5942201 - DNA, 25 bp, Homo sapien
tttccagcttgtttgggctttttct

SEQ ID NO: 5942202 - DNA, 25 bp, Homo sapien
aacaggtacctgcttttgcctttgc

SEQ ID NO: 5942203 - DNA, 25 bp, Homo sapien
tttgcctttgccattccagcagtca

SEQ ID NO: 5942204 - DNA, 25 bp, Homo sapien
acctggacttctgggttgttgccct

SEQ ID NO: 5942205 - DNA, 25 bp, Homo sapien
gtgagaaacaaggtgagaccataat

SEQ ID NO: 5942206 - DNA, 25 bp, Homo sapien
gcaggaggccccgctgtcccctcaa

SEQ ID NO: 5942207 - DNA, 25 bp, Homo sapien
aggatcagtatgtctggcttgctgg

SEQ ID NO: 5942208 - DNA, 25 bp, Homo sapien
tctccactctccctgcacagcgaga

SEQ ID NO: 5942209 - DNA, 25 bp, Homo sapien
cctgctgccatcctctcatcattgc

SEQ ID NO: 5942210 - DNA, 25 bp, Homo sapien
ttaaaccagtggccacacagtaaaa

SEQ ID NO: 5942211 - DNA, 25 bp, Homo sapien
taacatgataaataaacctgcttct

SEQ ID NO: 5942212 - DNA, 25 bp, Homo sapien
cccgctgtcccctcaaactgaatga

SEQ ID NO: 5942213 - DNA, 25 bp, Homo sapien
gaggtgagggggaggaacaaactta

SEQ ID NO: 5942214 - DNA, 25 bp, Homo sapien
cattgtaagcattcttcattttact

SEQ ID NO: 5942215 - DNA, 25 bp, Homo sapien
ctgtacattgttgtccattcattta

SEQ ID NO: 5942216 - DNA, 25 bp, Homo sapien
tcatcactgatgtcaaagaagtcca

SEQ ID NO: 5942217 - DNA, 25 bp, Homo sapien
ggtagggctttgtctctgcatgggc

SEQ ID NO: 5942218 - DNA, 25 bp, Homo sapien
ttctgtacctacactgctagccacg

SEQ ID NO: 5942219 - DNA, 25 bp, Homo sapien
tgcagagagcagcgaggaggtaggg

SEQ ID NO: 5942220 - DNA, 25 bp, Homo sapien
caaagtcactaggatggttaaaaaa

SEQ ID NO: 5942221 - DNA, 25 bp, Homo sapien
tggtgtcaacctggacttctgggtt

SEQ ID NO: 5942222 - DNA, 25 bp, Homo sapien
catcctctcatcattgcaaacggtg

SEQ ID NO: 5942223 - DNA, 25 bp, Homo sapien
tcagtatgtctggcttgctggtgtc

SEQ ID NO: 5942224 - DNA, 25 bp, Homo sapien
aacagggataaatggaaattttcca

SEQ ID NO: 5942225 - DNA, 25 bp, Homo sapien
gtcaacctggacttctgggttgttg

SEQ ID NO: 5942226 - DNA, 25 bp, Homo sapien
tcactgcaaacaggtacctgctttt

SEQ ID NO: 5942227 - DNA, 25 bp, Homo sapien
tcatttcctgctgccatcctctcat

SEQ ID NO: 5942228 - DNA, 25 bp, Homo sapien
ggaccctggttttcttgtgagaaac

SEQ ID NO: 5942229 - DNA, 25 bp, Homo sapien
aacacgagtctcaaaggagggggga

SEQ ID NO: 5942230 - DNA, 25 bp, Homo sapien
cctggttttcttgtgagaaacaagg

SEQ ID NO: 5942231 - DNA, 25 bp, Homo sapien
ccctgcacagcgagaaacaggatgc

SEQ ID NO: 5942232 - DNA, 25 bp, Homo sapien
aaacaaagtcaacattgcttaaacc

SEQ ID NO: 5942233 - DNA, 25 bp, Homo sapien
acccgaagggccatgatctgacgaa

SEQ ID NO: 5942234 - DNA, 25 bp, Homo sapien
attatctccactctccctgcacagc

SEQ ID NO: 5942235 - DNA, 25 bp, Homo sapien
aagaaaacaagatcaccaatgcaca

SEQ ID NO: 5942236 - DNA, 25 bp, Homo sapien
gtcagtggcgttgtactcgaactcc

SEQ ID NO: 5942237 - DNA, 25 bp, Homo sapien
gagaggaccagaacttcttagcttg

SEQ ID NO: 5942238 - DNA, 25 bp, Homo sapien
tatttcagaaatacgtacatgttac

SEQ ID NO: 5942239 - DNA, 25 bp, Homo sapien
ttcctgctgccatcctctcatcatt

SEQ ID NO: 5942240 - DNA, 25 bp, Homo sapien
ttgctggtgtcaacctggacttctg

SEQ ID NO: 5942241 - DNA, 25 bp, Homo sapien
ccacgcagaacacgagtctcaaagg

SEQ ID NO: 5942242 - DNA, 25 bp, Homo sapien
cgagtctcaaaggaggggggaggtg

SEQ ID NO: 5942243 - DNA, 25 bp, Homo sapien
tgccattccagcagtcatcctcatt

SEQ ID NO: 5942244 - DNA, 25 bp, Homo sapien
tgttgccctggttggccaatccatt

SEQ ID NO: 5942245 - DNA, 25 bp, Homo sapien
cctgcttttgcctttgccattccag

SEQ ID NO: 5942246 - DNA, 25 bp, Homo sapien
acacagtaaaaactgtacattgttg

SEQ ID NO: 5942247 - DNA, 25 bp, Homo sapien
gcctttgaactttctgatgatgaac

SEQ ID NO: 5942248 - DNA, 25 bp, Homo sapien
tccattgtaagcattcttcatttta

SEQ ID NO: 5942249 - DNA, 25 bp, Homo sapien
acaactaactacagttctgtaccta

SEQ ID NO: 5942250 - DNA, 25 bp, Homo sapien
gcattcttcattttactggtcataa

SEQ ID NO: 5942251 - DNA, 25 bp, Homo sapien
tccagcagtcatcctcattttcatt

SEQ ID NO: 5942252 - DNA, 25 bp, Homo sapien
ccacgtcatttccattgtaagcatt

SEQ ID NO: 5942253 - DNA, 25 bp, Homo sapien
ccagaatggtcagtggcgttgtact

SEQ ID NO: 5942254 - DNA, 25 bp, Homo sapien
gatctgacgaaggatcagtatgtct

SEQ ID NO: 5942255 - DNA, 25 bp, Homo sapien
accaatgcacaactaactacagttc

SEQ ID NO: 5942256 - DNA, 25 bp, Homo sapien
atgatctgacgaaggatcagtatgt

SEQ ID NO: 5942257 - DNA, 25 bp, Homo sapien
atcctcattttcatttcctgctgcc

SEQ ID NO: 5942258 - DNA, 25 bp, Homo sapien
aactacagttctgtacctacactgc

SEQ ID NO: 5942259 - DNA, 25 bp, Homo sapien
agaaacaggatgcagagagcagcga

SEQ ID NO: 5942260 - DNA, 25 bp, Homo sapien
tgaatgagcaaaacaaagtcaacat

SEQ ID NO: 5942261 - DNA, 25 bp, Homo sapien
cacaaataaaatgagagaagccaac

SEQ ID NO: 5942262 - DNA, 25 bp, Homo sapien
tgtacagctatttaatatttcagaa

SEQ ID NO: 5942263 - DNA, 25 bp, Homo sapien
gcagtcatcctcattttcatttcct

SEQ ID NO: 5942264 - DNA, 25 bp, Homo sapien
tgccaagaaaggaccctggttttct

SEQ ID NO: 5942265 - DNA, 25 bp, Homo sapien
acattgttgtccattcatttaaaaa

SEQ ID NO: 5942266 - DNA, 25 bp, Homo sapien
aaacaggatgcagagagcagcgagg

SEQ ID NO: 5942267 - DNA, 25 bp, Homo sapien
ataacagggataaatggaaattttc

SEQ ID NO: 5942268 - DNA, 25 bp, Homo sapien
gaagccaacaaagaaaacaagatca

SEQ ID NO: 5942269 - DNA, 25 bp, Homo sapien
ctcatcattgcaaacggtgcttggg

SEQ ID NO: 5942270 - DNA, 25 bp, Homo sapien
gccatcctctcatcattgcaaacgg

SEQ ID NO: 5942271 - DNA, 25 bp, Homo sapien
aaactgaatgagcaaaacaaagtca

SEQ ID NO: 5942272 - DNA, 25 bp, Homo sapien
cttttgcctttgccattccagcagt

SEQ ID NO: 5942273 - DNA, 25 bp, Homo sapien
atccatttcctgtcactgcaaacag

SEQ ID NO: 5942274 - DNA, 25 bp, Homo sapien
caaataaaatgagagaagccaacaa

SEQ ID NO: 5942275 - DNA, 25 bp, Homo sapien
tctgatgatgaacgcttttactcag

SEQ ID NO: 5942276 - DNA, 25 bp, Homo sapien
actggtcataacccgaagggccatg

SEQ ID NO: 5942277 - DNA, 25 bp, Homo sapien
cactactctcatcactgatgtcaaa

SEQ ID NO: 5942278 - DNA, 25 bp, Homo sapien
tcgaactccgaagggcactgctgat

SEQ ID NO: 5942279 - DNA, 25 bp, Homo sapien
gtccacgtcatttccattgtaagca

SEQ ID NO: 5942280 - DNA, 25 bp, Homo sapien
tctccactactctcatcactgatgt

SEQ ID NO: 5942281 - DNA, 25 bp, Homo sapien
ctcttcccagaatggtcagtggcgt

SEQ ID NO: 5942282 - DNA, 25 bp, Homo sapien
aacggtgcttgggagagaggaccag

SEQ ID NO: 5942283 - DNA, 25 bp, Homo sapien
cattgcttaaaccagtggccacaca

SEQ ID NO: 5942284 - DNA, 25 bp, Homo sapien
aacaaagaaaacaagatcaccaatg

SEQ ID NO: 5942285 - DNA, 25 bp, Homo sapien
attgcaaacggtgcttgggagagag

SEQ ID NO: 5942286 - DNA, 25 bp, Homo sapien
cgctgtcccctcaaactgaatgagc

SEQ ID NO: 5942287 - DNA, 25 bp, Homo sapien
gagtttgacaattatctccactctc

SEQ ID NO: 5942288 - DNA, 25 bp, Homo sapien
caacctggacttctgggttgttgcc

SEQ ID NO: 5942289 - DNA, 25 bp, Homo sapien
ataagataacatgataaataaacct

SEQ ID NO: 5942290 - DNA, 25 bp, Homo sapien
tacagctatttaatatttcagaaat

SEQ ID NO: 5942291 - DNA, 25 bp, Homo sapien
ccatgatctgacgaaggatcagtat

SEQ ID NO: 5942292 - DNA, 25 bp, Homo sapien
tgggcaccaccggcactgtcagctt

SEQ ID NO: 5942293 - DNA, 25 bp, Homo sapien
cataacccgaagggccatgatctga

SEQ ID NO: 5942294 - DNA, 25 bp, Homo sapien
tttccattgtaagcattcttcattt

SEQ ID NO: 5942295 - DNA, 25 bp, Homo sapien
aggcaggaggccccgctgtcccctc

SEQ ID NO: 5942296 - DNA, 25 bp, Homo sapien
tgctagccacgcagaacacgagtct

SEQ ID NO: 5942297 - DNA, 25 bp, Homo sapien
cctctccactactctcatcactgat

SEQ ID NO: 5942298 - DNA, 25 bp, Homo sapien
tcaccaatgcacaactaactacagt

SEQ ID NO: 5942299 - DNA, 25 bp, Homo sapien
gataacatgataaataaacctgctt

SEQ ID NO: 5942300 - DNA, 25 bp, Homo sapien
tgtcactgcaaacaggtacctgctt

SEQ ID NO: 5942301 - DNA, 25 bp, Homo sapien
ctctccctgcacagcgagaaacagg

SEQ ID NO: 5942302 - DNA, 25 bp, Homo sapien
agccacgcagaacacgagtctcaaa

SEQ ID NO: 5942303 - DNA, 25 bp, Homo sapien
ttttactggtcataacccgaagggc

SEQ ID NO: 5942304 - DNA, 25 bp, Homo sapien
aaaactgtacattgttgtccattca

SEQ ID NO: 5942305 - DNA, 25 bp, Homo sapien
gagcagcgaggaggtagggctttgt

SEQ ID NO: 5942306 - DNA, 25 bp, Homo sapien
tcaaagaagtccacgtcatttccat

SEQ ID NO: 5942307 - DNA, 25 bp, Homo sapien
attcttcattttactggtcataacc

SEQ ID NO: 5942308 - DNA, 25 bp, Homo sapien
gtttgacaattatctccactctccc

SEQ ID NO: 5942309 - DNA, 25 bp, Homo sapien
accggcactgtcagctttctcgttg

SEQ ID NO: 5942310 - DNA, 25 bp, Homo sapien
atgcacaactaactacagttctgta

SEQ ID NO: 5942311 - DNA, 25 bp, Homo sapien
taataagataacatgataaataaac

SEQ ID NO: 5942312 - DNA, 25 bp, Homo sapien
cccacaaataaaatgagagaagcca

SEQ ID NO: 5942313 - DNA, 25 bp, Homo sapien
agctttctcgttggcactcttccca

SEQ ID NO: 5942314 - DNA, 25 bp, Homo sapien
aggtgagaccataattggaaaagaa

SEQ ID NO: 5942315 - DNA, 25 bp, Homo sapien
ctgatgtcaaagaagtccacgtcat

SEQ ID NO: 5942316 - DNA, 25 bp, Homo sapien
cgcttttactcagagtttgacaatt

SEQ ID NO: 5942317 - DNA, 25 bp, Homo sapien
cctgcttctgtacagctatttaata

SEQ ID NO: 5942318 - DNA, 25 bp, Homo sapien
agtaaaaactgtacattgttgtcca

SEQ ID NO: 5942319 - DNA, 25 bp, Homo sapien
caccaccggcactgtcagctttctc

SEQ ID NO: 5942320 - DNA, 25 bp, Homo sapien
tttcatttcctgctgccatcctctc

SEQ ID NO: 5942321 - DNA, 25 bp, Homo sapien
gataaatggaaattttccagcttgt

SEQ ID NO: 5942322 - DNA, 25 bp, Homo sapien
ttctgggttgttgccctggttggcc

SEQ ID NO: 5942323 - DNA, 25 bp, Homo sapien
gccaatccatttcctgtcactgcaa

SEQ ID NO: 5942324 - DNA, 25 bp, Homo sapien
tgagaacttggtgcctttgaacttt

SEQ ID NO: 5942325 - DNA, 25 bp, Homo sapien
gggttgttgccctggttggccaatc

SEQ ID NO: 5942326 - DNA, 25 bp, Homo sapien
gatgtcaaagaagtccacgtcattt

SEQ ID NO: 5942327 - DNA, 25 bp, Homo sapien
ggccatgatctgacgaaggatcagt

SEQ ID NO: 5942328 - DNA, 25 bp, Homo sapien
gtggccacacagtaaaaactgtaca

SEQ ID NO: 5942329 - DNA, 25 bp, Homo sapien
ttcacatccgcttccacttccctct

SEQ ID NO: 5942330 - DNA, 25 bp, Homo sapien
gatgaacgcttttactcagagtttg

SEQ ID NO: 5942331 - DNA, 25 bp, Homo sapien
gagaagccaacaaagaaaacaagat

SEQ ID NO: 5942332 - DNA, 25 bp, Homo sapien
ttgcttaaaccagtggccacacagt

SEQ ID NO: 5942333 - DNA, 25 bp, Homo sapien
ggcactcttcccagaatggtcagtg

SEQ ID NO: 5942334 - DNA, 25 bp, Homo sapien
caaacttaaaggcaggaggccccgc

SEQ ID NO: 5942335 - DNA, 25 bp, Homo sapien
cctggttggccaatccatttcctgt

SEQ ID NO: 5942336 - DNA, 25 bp, Homo sapien
aaatacgtacatgttacatgccaag

SEQ ID NO: 5942337 - DNA, 25 bp, Homo sapien
actcgaactccgaagggcactgctg

SEQ ID NO: 5942338 - DNA, 25 bp, Homo sapien
attgttgtccattcatttaaaaagc

SEQ ID NO: 5942339 - DNA, 25 bp, Homo sapien
ctacagttctgtacctacactgcta

SEQ ID NO: 5942340 - DNA, 25 bp, Homo sapien
ctactctcatcactgatgtcaaaga

SEQ ID NO: 5942341 - DNA, 25 bp, Homo sapien
caaacaggtacctgcttttgccttt

SEQ ID NO: 5942342 - DNA, 25 bp, Homo sapien
ttccacttccctctccactactctc

SEQ ID NO: 5942343 - DNA, 25 bp, Homo sapien
aatggaaattttccagcttgtttgg

SEQ ID NO: 5942344 - DNA, 25 bp, Homo sapien
attccagcagtcatcctcattttca

SEQ ID NO: 5942345 - DNA, 25 bp, Homo sapien
tccctctccactactctcatcactg

SEQ ID NO: 5942346 - DNA, 25 bp, Homo sapien
aaacaagatcaccaatgcacaacta

SEQ ID NO: 5942347 - DNA, 25 bp, Homo sapien
aacctgcttctgtacagctatttaa

SEQ ID NO: 5942348 - DNA, 25 bp, Homo sapien
tttcagaaatacgtacatgttacat

SEQ ID NO: 5942349 - DNA, 25 bp, Homo sapien
actgcaaacaggtacctgcttttgc

SEQ ID NO: 5942350 - DNA, 25 bp, Homo sapien
gcactgtcagctttctcgttggcac

SEQ ID NO: 5942351 - DNA, 25 bp, Homo sapien
gcagaacacgagtctcaaaggaggg

SEQ ID NO: 5942352 - DNA, 25 bp, Homo sapien
ctagccacgcagaacacgagtctca

SEQ ID NO: 5942353 - DNA, 25 bp, Homo sapien
gcttccacttccctctccactactc

SEQ ID NO: 5942354 - DNA, 25 bp, Homo sapien
acaaagtcaacattgcttaaaccag

SEQ ID NO: 5942355 - DNA, 25 bp, Homo sapien
tctgtacagctatttaatatttcag

SEQ ID NO: 5942356 - DNA, 25 bp, Homo sapien
gtactcgaactccgaagggcactgc

SEQ ID NO: 5942357 - DNA, 25 bp, Homo sapien
acgcagaacacgagtctcaaaggag

SEQ ID NO: 5942358 - DNA, 25 bp, Homo sapien
gcacaactaactacagttctgtacc

SEQ ID NO: 5942359 - DNA, 25 bp, Homo sapien
tcttgtgagaaacaaggtgagacca

SEQ ID NO: 5942360 - DNA, 25 bp, Homo sapien
cactcttcccagaatggtcagtggc

SEQ ID NO: 5942361 - DNA, 25 bp, Homo sapien
ctgcacagcgagaaacaggatgcag

SEQ ID NO: 5942362 - DNA, 25 bp, Homo sapien
gaggtagggctttgtctctgcatgg

SEQ ID NO: 5942363 - DNA, 25 bp, Homo sapien
tgacgaaggatcagtatgtctggct

SEQ ID NO: 5942364 - DNA, 25 bp, Homo sapien
tggttttcttgtgagaaacaaggtg

SEQ ID NO: 5942365 - DNA, 25 bp, Homo sapien
ctcagagtttgacaattatctccac

SEQ ID NO: 5942366 - DNA, 25 bp, Homo sapien
acagtaaaaactgtacattgttgtc

SEQ ID NO: 5942367 - DNA, 25 bp, Homo sapien
ccatttcctgtcactgcaaacaggt

SEQ ID NO: 5942368 - DNA, 25 bp, Homo sapien
tctcaaaggaggggggaggtgaggg

SEQ ID NO: 5942369 - DNA, 25 bp, Homo sapien
gggataaatggaaattttccagctt

SEQ ID NO: 5942370 - DNA, 25 bp, Homo sapien
catccgcttccacttccctctccac

SEQ ID NO: 5942371 - DNA, 25 bp, Homo sapien
atgttacatgccaagaaaggaccct

SEQ ID NO: 5942372 - DNA, 25 bp, Homo sapien
gagagaggaccagaacttcttagct

SEQ ID NO: 5942373 - DNA, 25 bp, Homo sapien
atgatgaacgcttttactcagagtt

SEQ ID NO: 5942374 - DNA, 25 bp, Homo sapien
agcgaggaggtagggctttgtctct

SEQ ID NO: 5942375 - DNA, 25 bp, Homo sapien
ctttgaactttctgatgatgaacgc

SEQ ID NO: 5942376 - DNA, 25 bp, Homo sapien
ctttctcgttggcactcttcccaga

SEQ ID NO: 5942377 - DNA, 25 bp, Homo sapien
cagtggccacacagtaaaaactgta

SEQ ID NO: 5942378 - DNA, 25 bp, Homo sapien
tgtctggcttgctggtgtcaacctg

SEQ ID NO: 5942379 - DNA, 25 bp, Homo sapien
actgctgatattcacatccgcttcc

SEQ ID NO: 5942380 - DNA, 25 bp, Homo sapien
agaaatacgtacatgttacatgcca

SEQ ID NO: 5942381 - DNA, 25 bp, Homo sapien
cgttgtactcgaactccgaagggca

SEQ ID NO: 5942382 - DNA, 25 bp, Homo sapien
agaatggtcagtggcgttgtactcg

SEQ ID NO: 5942383 - DNA, 25 bp, Homo sapien
tcaaactgaatgagcaaaacaaagt

SEQ ID NO: 5942384 - DNA, 25 bp, Homo sapien
gagaaacaaggtgagaccataattg

SEQ ID NO: 5942385 - DNA, 25 bp, Homo sapien
aacttggtgcctttgaactttctga

SEQ ID NO: 5942386 - DNA, 25 bp, Homo sapien
cactctccctgcacagcgagaaaca

SEQ ID NO: 5942387 - DNA, 25 bp, Homo sapien
tgcttttgcctttgccattccagca

SEQ ID NO: 5942388 - DNA, 25 bp, Homo sapien
tggaaattttccagcttgtttgggc

SEQ ID NO: 5942389 - DNA, 25 bp, Homo sapien
gcttaaaccagtggccacacagtaa

SEQ ID NO: 5942390 - DNA, 25 bp, Homo sapien
tcccagaatggtcagtggcgttgta

SEQ ID NO: 5942391 - DNA, 25 bp, Homo sapien
acatgataaataaacctgcttctgt

SEQ ID NO: 5942392 - DNA, 25 bp, Homo sapien
tccactactctcatcactgatgtca

SEQ ID NO: 5942393 - DNA, 25 bp, Homo sapien
gagaccataattggaaaagaaaaac

SEQ ID NO: 5942394 - DNA, 25 bp, Homo sapien
ttgtccattcatttaaaaagcaaag

SEQ ID NO: 5942395 - DNA, 25 bp, Homo sapien
ccgaagggccatgatctgacgaagg

SEQ ID NO: 5942396 - DNA, 25 bp, Homo sapien
ttgtgagaaacaaggtgagaccata

SEQ ID NO: 5942397 - DNA, 25 bp, Homo sapien
gataaataaacctgcttctgtacag

SEQ ID NO: 5942398 - DNA, 25 bp, Homo sapien
tccgcttccacttccctctccacta

SEQ ID NO: 5942399 - DNA, 25 bp, Homo sapien
gaagggccatgatctgacgaaggat

SEQ ID NO: 5942400 - DNA, 25 bp, Homo sapien
tgtctctgcatgggcaccaccggca

SEQ ID NO: 5942401 - DNA, 25 bp, Homo sapien
taaaaactgtacattgttgtccatt

SEQ ID NO: 5942402 - DNA, 25 bp, Homo sapien
aagtccacgtcatttccattgtaag

SEQ ID NO: 5942403 - DNA, 25 bp, Homo sapien
ttctcgttggcactcttcccagaat

SEQ ID NO: 5942404 - DNA, 25 bp, Homo sapien
gaaaaaccccacaaataaaatgaga

SEQ ID NO: 5942405 - DNA, 25 bp, Homo sapien
aactaactacagttctgtacctaca

SEQ ID NO: 5942406 - DNA, 25 bp, Homo sapien
aaaaagcaaagtcactaggatggtt

SEQ ID NO: 5942407 - DNA, 25 bp, Homo sapien
aaagcaaagtcactaggatggttaa

SEQ ID NO: 5942408 - DNA, 25 bp, Homo sapien
tttctgatgatgaacgcttttactc

SEQ ID NO: 5942409 - DNA, 25 bp, Homo sapien
taacccgaagggccatgatctgacg

SEQ ID NO: 5942410 - DNA, 25 bp, Homo sapien
tctgcatgggcaccaccggcactgt

SEQ ID NO: 5942411 - DNA, 25 bp, Homo sapien
acgaaggatcagtatgtctggcttg

SEQ ID NO: 5942412 - DNA, 25 bp, Homo sapien
tccactctccctgcacagcgagaaa

SEQ ID NO: 5942413 - DNA, 25 bp, Homo sapien
tcttcattttactggtcataacccg

SEQ ID NO: 5942414 - DNA, 25 bp, Homo sapien
gaaaacaagatcaccaatgcacaac

SEQ ID NO: 5942415 - DNA, 25 bp, Homo sapien
cgagaaacaggatgcagagagcagc

SEQ ID NO: 5942416 - DNA, 25 bp, Homo sapien
acaagatcaccaatgcacaactaac

SEQ ID NO: 5942417 - DNA, 25 bp, Homo sapien
taaaatgagagaagccaacaaagaa

SEQ ID NO: 5942418 - DNA, 25 bp, Homo sapien
gaaacaaggtgagaccataattgga

SEQ ID NO: 5942419 - DNA, 25 bp, Homo sapien
gggagagaggaccagaacttcttag

SEQ ID NO: 5942420 - DNA, 25 bp, Homo sapien
tggtgcctttgaactttctgatgat

SEQ ID NO: 5942421 - DNA, 25 bp, Homo sapien
tcagctttctcgttggcactcttcc

SEQ ID NO: 5942422 - DNA, 25 bp, Homo sapien
ccattccagcagtcatcctcatttt

SEQ ID NO: 5942423 - DNA, 25 bp, Homo sapien
cacgagtctcaaaggaggggggagg

SEQ ID NO: 5942424 - DNA, 25 bp, Homo sapien
tgcctttgccattccagcagtcatc

SEQ ID NO: 5942425 - DNA, 25 bp, Homo sapien
tttgtctctgcatgggcaccaccgg

SEQ ID NO: 5942426 - DNA, 25 bp, Homo sapien
ggtacctgcttttgcctttgccatt

SEQ ID NO: 5942427 - DNA, 25 bp, Homo sapien
gcttgctggtgtcaacctggacttc

SEQ ID NO: 5942428 - DNA, 25 bp, Homo sapien
aatatttcagaaatacgtacatgtt

SEQ ID NO: 5942429 - DNA, 25 bp, Homo sapien
gaaattttccagcttgtttgggctt

SEQ ID NO: 5942430 - DNA, 25 bp, Homo sapien
agaacacgagtctcaaaggaggggg

SEQ ID NO: 5942431 - DNA, 25 bp, Homo sapien
ctgtcccctcaaactgaatgagcaa

SEQ ID NO: 5942432 - DNA, 25 bp, Homo sapien
ttgtctctggcatacatggttttca

SEQ ID NO: 5942433 - DNA, 25 bp, Homo sapien
caatgtagctgagaaatgaaactgt

SEQ ID NO: 5942434 - DNA, 25 bp, Homo sapien
gcccactattgagagagtatccatg

SEQ ID NO: 5942435 - DNA, 25 bp, Homo sapien
tccactgtttgtctctggcatacat

SEQ ID NO: 5942436 - DNA, 25 bp, Homo sapien
atctgctcatcttttactttatttt

SEQ ID NO: 5942437 - DNA, 25 bp, Homo sapien
aaaaagacactaaagaacaaagatg

SEQ ID NO: 5942438 - DNA, 25 bp, Homo sapien
cccagtcaagtattgctgtagctga

SEQ ID NO: 5942439 - DNA, 25 bp, Homo sapien
ctttttcccgggaattagcacaggc

SEQ ID NO: 5942440 - DNA, 25 bp, Homo sapien
gaggtcccaggtgaactgacccaga

SEQ ID NO: 5942441 - DNA, 25 bp, Homo sapien
tatatttgcacatttttgtaaaatg

SEQ ID NO: 5942442 - DNA, 25 bp, Homo sapien
atatgtaggtaaaactaatcatctt

SEQ ID NO: 5942443 - DNA, 25 bp, Homo sapien
gtctctggcatacatggttttcatg

SEQ ID NO: 5942444 - DNA, 25 bp, Homo sapien
catacatggttttcatgcctagtgg

SEQ ID NO: 5942445 - DNA, 25 bp, Homo sapien
ccatgacacgctatttctacctttt

SEQ ID NO: 5942446 - DNA, 25 bp, Homo sapien
actgttgcatatgtaggtaaaacta

SEQ ID NO: 5942447 - DNA, 25 bp, Homo sapien
tccctcttcatttccaaactcattg

SEQ ID NO: 5942448 - DNA, 25 bp, Homo sapien
agacactaaagaacatgtctgaaca

SEQ ID NO: 5942449 - DNA, 25 bp, Homo sapien
ttctatgaaattctatgcaaaattg

SEQ ID NO: 5942450 - DNA, 25 bp, Homo sapien
caccttttgatgaaccactttcacc

SEQ ID NO: 5942451 - DNA, 25 bp, Homo sapien
gctagataatttccataggttattt

SEQ ID NO: 5942452 - DNA, 25 bp, Homo sapien
tttgtaataagatatactcacacat

SEQ ID NO: 5942453 - DNA, 25 bp, Homo sapien
agatgatacaccttttgatgaacca

SEQ ID NO: 5942454 - DNA, 25 bp, Homo sapien
ctcacaaggaagatcttatctacaa

SEQ ID NO: 5942455 - DNA, 25 bp, Homo sapien
attttatacaatatcataaggctag

SEQ ID NO: 5942456 - DNA, 25 bp, Homo sapien
acctgatacgtaaaattttgcatga

SEQ ID NO: 5942457 - DNA, 25 bp, Homo sapien
tgttatcatttggaggaaatttttc

SEQ ID NO: 5942458 - DNA, 25 bp, Homo sapien
tgttgcatatgtaggtaaaactaat

SEQ ID NO: 5942459 - DNA, 25 bp, Homo sapien
cattaaagacaattttgagacaaaa

SEQ ID NO: 5942460 - DNA, 25 bp, Homo sapien
tatctacaatgtagctgagaaatga

SEQ ID NO: 5942461 - DNA, 25 bp, Homo sapien
atcccaggatttttaaatgtgtaaa

SEQ ID NO: 5942462 - DNA, 25 bp, Homo sapien
agacaaaatattctatgaaattcta

SEQ ID NO: 5942463 - DNA, 25 bp, Homo sapien
attctgtctattagtgttattgaaa

SEQ ID NO: 5942464 - DNA, 25 bp, Homo sapien
ccattcctttcaatcaatttcttag

SEQ ID NO: 5942465 - DNA, 25 bp, Homo sapien
gtatccatgacacgctatttctacc

SEQ ID NO: 5942466 - DNA, 25 bp, Homo sapien
aaaaagacactaaagaacatgtctg

SEQ ID NO: 5942467 - DNA, 25 bp, Homo sapien
taagattctgtctattagtgttatt

SEQ ID NO: 5942468 - DNA, 25 bp, Homo sapien
aagaaaattccaagatcccaggatt

SEQ ID NO: 5942469 - DNA, 25 bp, Homo sapien
gtagctgagaaatgaaactgttgca

SEQ ID NO: 5942470 - DNA, 25 bp, Homo sapien
aaagatgatacaccttttgatgaac

SEQ ID NO: 5942471 - DNA, 25 bp, Homo sapien
aaaactaatcatcttttaggaataa

SEQ ID NO: 5942472 - DNA, 25 bp, Homo sapien
tgaaattctatgcaaaattgaattc

SEQ ID NO: 5942473 - DNA, 25 bp, Homo sapien
aggtgaactgacccagatgcccact

SEQ ID NO: 5942474 - DNA, 25 bp, Homo sapien
atccatgacacgctatttctacctt

SEQ ID NO: 5942475 - DNA, 25 bp, Homo sapien
atgacacgctatttctacctttttc

SEQ ID NO: 5942476 - DNA, 25 bp, Homo sapien
gtactgttggtgttatcatttggag

SEQ ID NO: 5942477 - DNA, 25 bp, Homo sapien
agtatagattcgttccttccttcca

SEQ ID NO: 5942478 - DNA, 25 bp, Homo sapien
tcttcatttccaaactcattgactg

SEQ ID NO: 5942479 - DNA, 25 bp, Homo sapien
tgtttataatttttctcttaaatgc

SEQ ID NO: 5942480 - DNA, 25 bp, Homo sapien
ggaaaaagacactaaagaacatgtc

SEQ ID NO: 5942481 - DNA, 25 bp, Homo sapien
gctacctaccattcctttcaatcaa

SEQ ID NO: 5942482 - DNA, 25 bp, Homo sapien
tcatgcctagtggctacctaccatt

SEQ ID NO: 5942483 - DNA, 25 bp, Homo sapien
aatttactcacaaggaagatcttat

SEQ ID NO: 5942484 - DNA, 25 bp, Homo sapien
tcgaaaggttcaacactcatttgag

SEQ ID NO: 5942485 - DNA, 25 bp, Homo sapien
ttcaatcaatttcttaggatataat

SEQ ID NO: 5942486 - DNA, 25 bp, Homo sapien
tggttccctcttcatttccaaactc

SEQ ID NO: 5942487 - DNA, 25 bp, Homo sapien
caaatttatgctatgtttataattg

SEQ ID NO: 5942488 - DNA, 25 bp, Homo sapien
gttttcatgcctagtggctacctac

SEQ ID NO: 5942489 - DNA, 25 bp, Homo sapien
tctacctttttcccgggaattagca

SEQ ID NO: 5942490 - DNA, 25 bp, Homo sapien
aaatctgctcatcttttactttatt

SEQ ID NO: 5942491 - DNA, 25 bp, Homo sapien
atgatacaccttttgatgaaccact

SEQ ID NO: 5942492 - DNA, 25 bp, Homo sapien
tatactcacacatacacatttaaga

SEQ ID NO: 5942493 - DNA, 25 bp, Homo sapien
tattgctgtagctgagaagaaaaga

SEQ ID NO: 5942494 - DNA, 25 bp, Homo sapien
taaaacttttcagttagatatttta

SEQ ID NO: 5942495 - DNA, 25 bp, Homo sapien
caaactcattgactgcttcaaaaag

SEQ ID NO: 5942496 - DNA, 25 bp, Homo sapien
cttatctacaatgtagctgagaaat

SEQ ID NO: 5942497 - DNA, 25 bp, Homo sapien
aaggttcaacactcatttgaggtcc

SEQ ID NO: 5942498 - DNA, 25 bp, Homo sapien
agatcccaggatttttaaatgtgta

SEQ ID NO: 5942499 - DNA, 25 bp, Homo sapien
ttgactgcttcaaaaagtactgttg

SEQ ID NO: 5942500 - DNA, 25 bp, Homo sapien
ttttcccgggaattagcacaggcaa

SEQ ID NO: 5942501 - DNA, 25 bp, Homo sapien
gaaaagtatagattcgttccttcct

SEQ ID NO: 5942502 - DNA, 25 bp, Homo sapien
gaataagataaagaggtttatgtcc

SEQ ID NO: 5942503 - DNA, 25 bp, Homo sapien
tgaaccactttcacctataaattag

SEQ ID NO: 5942504 - DNA, 25 bp, Homo sapien
tctatgcaaaattgaattcttctac

SEQ ID NO: 5942505 - DNA, 25 bp, Homo sapien
gtagctgagaagaaaagaaaattcc

SEQ ID NO: 5942506 - DNA, 25 bp, Homo sapien
tacgtaaaattttgcatgaaaagta

SEQ ID NO: 5942507 - DNA, 25 bp, Homo sapien
atgcctagtggctacctaccattcc

SEQ ID NO: 5942508 - DNA, 25 bp, Homo sapien
caagtattgctgtagctgagaagaa

SEQ ID NO: 5942509 - DNA, 25 bp, Homo sapien
gttattgaaataaatcctagaaaca

SEQ ID NO: 5942510 - DNA, 25 bp, Homo sapien
aggctagataatttccataggttat

SEQ ID NO: 5942511 - DNA, 25 bp, Homo sapien
ttttgcatgaaaagtatagattcgt

SEQ ID NO: 5942512 - DNA, 25 bp, Homo sapien
ttgcatgaaaagtatagattcgttc

SEQ ID NO: 5942513 - DNA, 25 bp, Homo sapien
ggaaacctgatacgtaaaattttgc

SEQ ID NO: 5942514 - DNA, 25 bp, Homo sapien
aaggaaaaagacactaaagaacatg

SEQ ID NO: 5942515 - DNA, 25 bp, Homo sapien
aggaagatcttatctacaatgtagc

SEQ ID NO: 5942516 - DNA, 25 bp, Homo sapien
aactcattgactgcttcaaaaagta

SEQ ID NO: 5942517 - DNA, 25 bp, Homo sapien
aatttatatttgcacatttttgtaa

SEQ ID NO: 5942518 - DNA, 25 bp, Homo sapien
cacaaggaagatcttatctacaatg

SEQ ID NO: 5942519 - DNA, 25 bp, Homo sapien
ttcttaggatataattgacaaattt

SEQ ID NO: 5942520 - DNA, 25 bp, Homo sapien
gtcaagtattgctgtagctgagaag

SEQ ID NO: 5942521 - DNA, 25 bp, Homo sapien
gaactgacccagatgcccactattg

SEQ ID NO: 5942522 - DNA, 25 bp, Homo sapien
cgtaaaattttgcatgaaaagtata

SEQ ID NO: 5942523 - DNA, 25 bp, Homo sapien
ctagtggctacctaccattcctttc

SEQ ID NO: 5942524 - DNA, 25 bp, Homo sapien
ttcatttccaaactcattgactgct

SEQ ID NO: 5942525 - DNA, 25 bp, Homo sapien
aagaacatgtctgaacatatcctgg

SEQ ID NO: 5942526 - DNA, 25 bp, Homo sapien
aaagcattaaagacaattttgagac

SEQ ID NO: 5942527 - DNA, 25 bp, Homo sapien
gcttcaaaaagtactgttggtgtta

SEQ ID NO: 5942528 - DNA, 25 bp, Homo sapien
gtgttattgaaataaatcctagaaa

SEQ ID NO: 5942529 - DNA, 25 bp, Homo sapien
gaggtttatgtccactgtttgtctc

SEQ ID NO: 5942530 - DNA, 25 bp, Homo sapien
gtaaaactaatcatcttttaggaat

SEQ ID NO: 5942531 - DNA, 25 bp, Homo sapien
atgtgtaaaacttttcagttagata

SEQ ID NO: 5942532 - DNA, 25 bp, Homo sapien
actttcacctataaattagtagtaa

SEQ ID NO: 5942533 - DNA, 25 bp, Homo sapien
tgacccagatgcccactattgagag

SEQ ID NO: 5942534 - DNA, 25 bp, Homo sapien
cacatttaagattctgtctattagt

SEQ ID NO: 5942535 - DNA, 25 bp, Homo sapien
tgaaactgttgcatatgtaggtaaa

SEQ ID NO: 5942536 - DNA, 25 bp, Homo sapien
ttccaaatctgctcatcttttactt

SEQ ID NO: 5942537 - DNA, 25 bp, Homo sapien
gtgaactgacccagatgcccactat

SEQ ID NO: 5942538 - DNA, 25 bp, Homo sapien
tacaccttttgatgaaccactttca

SEQ ID NO: 5942539 - DNA, 25 bp, Homo sapien
aaaagaaaattccaagatcccagga

SEQ ID NO: 5942540 - DNA, 25 bp, Homo sapien
gcatatgtaggtaaaactaatcatc

SEQ ID NO: 5942541 - DNA, 25 bp, Homo sapien
aattgacaaatttatgctatgttta

SEQ ID NO: 5942542 - DNA, 25 bp, Homo sapien
ctggcatacatggttttcatgccta

SEQ ID NO: 5942543 - DNA, 25 bp, Homo sapien
aagaggtttatgtccactgtttgtc

SEQ ID NO: 5942544 - DNA, 25 bp, Homo sapien
atttatgctatgtttataatttttc

SEQ ID NO: 5942545 - DNA, 25 bp, Homo sapien
ttccttccttccaaatctgctcatc

SEQ ID NO: 5942546 - DNA, 25 bp, Homo sapien
gaacatgtctgaacatatcctggaa

SEQ ID NO: 5942547 - DNA, 25 bp, Homo sapien
gagaagaaaagaaaattccaagatc

SEQ ID NO: 5942548 - DNA, 25 bp, Homo sapien
ttcaaaaagtactgttggtgttatc

SEQ ID NO: 5942549 - DNA, 25 bp, Homo sapien
taaggctagataatttccataggtt

SEQ ID NO: 5942550 - DNA, 25 bp, Homo sapien
tttactcacaaggaagatcttatct

SEQ ID NO: 5942551 - DNA, 25 bp, Homo sapien
actgacccagatgcccactattgag

SEQ ID NO: 5942552 - DNA, 25 bp, Homo sapien
gatacgtaaaattttgcatgaaaag

SEQ ID NO: 5942553 - DNA, 25 bp, Homo sapien
cctggaacttcttctttgtaaaatg

SEQ ID NO: 5942554 - DNA, 25 bp, Homo sapien
ggaaaaagacactaaagaacaaaga

SEQ ID NO: 5942555 - DNA, 25 bp, Homo sapien
tgttggtgttatcatttggaggaaa

SEQ ID NO: 5942556 - DNA, 25 bp, Homo sapien
attagtgttattgaaataaatccta

SEQ ID NO: 5942557 - DNA, 25 bp, Homo sapien
aaagtatagattcgttccttccttc

SEQ ID NO: 5942558 - DNA, 25 bp, Homo sapien
aaatgtgtaaaacttttcagttaga

SEQ ID NO: 5942559 - DNA, 25 bp, Homo sapien
tggttttcatgcctagtggctacct

SEQ ID NO: 5942560 - DNA, 25 bp, Homo sapien
gatgaaccactttcacctataaatt

SEQ ID NO: 5942561 - DNA, 25 bp, Homo sapien
agtattgctgtagctgagaagaaaa

SEQ ID NO: 5942562 - DNA, 25 bp, Homo sapien
ttgacaaatttatgctatgtttata

SEQ ID NO: 5942563 - DNA, 25 bp, Homo sapien
aaactgttgcatatgtaggtaaaac

SEQ ID NO: 5942564 - DNA, 25 bp, Homo sapien
ttggtgttatcatttggaggaaatt

SEQ ID NO: 5942565 - DNA, 25 bp, Homo sapien
ttcgttccttccttccaaatctgct

SEQ ID NO: 5942566 - DNA, 25 bp, Homo sapien
catttaagattctgtctattagtgt

SEQ ID NO: 5942567 - DNA, 25 bp, Homo sapien
cactgtttgtctctggcatacatgg

SEQ ID NO: 5942568 - DNA, 25 bp, Homo sapien
aactaatcatcttttaggaataaga

SEQ ID NO: 5942569 - DNA, 25 bp, Homo sapien
agatgcccactattgagagagtatc

SEQ ID NO: 5942570 - DNA, 25 bp, Homo sapien
aaccactttcacctataaattagta

SEQ ID NO: 5942571 - DNA, 25 bp, Homo sapien
atatcataaggctagataatttcca

SEQ ID NO: 5942572 - DNA, 25 bp, Homo sapien
gtttaaagcattaaagacaattttg

SEQ ID NO: 5942573 - DNA, 25 bp, Homo sapien
cctaccattcctttcaatcaatttc

SEQ ID NO: 5942574 - DNA, 25 bp, Homo sapien
tgcaaaattgaattcttctacaagt

SEQ ID NO: 5942575 - DNA, 25 bp, Homo sapien
ggtcccaggtgaactgacccagatg

SEQ ID NO: 5942576 - DNA, 25 bp, Homo sapien
tagtgttattgaaataaatcctaga

SEQ ID NO: 5942577 - DNA, 25 bp, Homo sapien
caatcaatttcttaggatataattg

SEQ ID NO: 5942578 - DNA, 25 bp, Homo sapien
ctcattgactgcttcaaaaagtact

SEQ ID NO: 5942579 - DNA, 25 bp, Homo sapien
gataaagaggtttatgtccactgtt

SEQ ID NO: 5942580 - DNA, 25 bp, Homo sapien
atgaaaagtatagattcgttccttc

SEQ ID NO: 5942581 - DNA, 25 bp, Homo sapien
gtttgtctctggcatacatggtttt

SEQ ID NO: 5942582 - DNA, 25 bp, Homo sapien
gctatgtttataatttttctcttaa

SEQ ID NO: 5942583 - DNA, 25 bp, Homo sapien
cccgggaattagcacaggcaactct

SEQ ID NO: 5942584 - DNA, 25 bp, Homo sapien
tctacaagtatgtgatgaagcccac

SEQ ID NO: 5942585 - DNA, 25 bp, Homo sapien
aaattagtagtaagaatttactcac

SEQ ID NO: 5942586 - DNA, 25 bp, Homo sapien
aaagacactaaagaacaaagatgat

SEQ ID NO: 5942587 - DNA, 25 bp, Homo sapien
gattcgttccttccttccaaatctg

SEQ ID NO: 5942588 - DNA, 25 bp, Homo sapien
cacacatacacatttaagattctgt

SEQ ID NO: 5942589 - DNA, 25 bp, Homo sapien
attgaattcttctacaagtatgtga

SEQ ID NO: 5942590 - DNA, 25 bp, Homo sapien
tttcacctataaattagtagtaaga

SEQ ID NO: 5942591 - DNA, 25 bp, Homo sapien
gatacaccttttgatgaaccacttt

SEQ ID NO: 5942592 - DNA, 25 bp, Homo sapien
tctgtctattagtgttattgaaata

SEQ ID NO: 5942593 - DNA, 25 bp, Homo sapien
aaattccaagatcccaggattttta

SEQ ID NO: 5942594 - DNA, 25 bp, Homo sapien
tattgagagagtatccatgacacgc

SEQ ID NO: 5942595 - DNA, 25 bp, Homo sapien
ataattgacaaatttatgctatgtt

SEQ ID NO: 5942596 - DNA, 25 bp, Homo sapien
gctgtagctgagaagaaaagaaaat

SEQ ID NO: 5942597 - DNA, 25 bp, Homo sapien
tacatggttttcatgcctagtggct

SEQ ID NO: 5942598 - DNA, 25 bp, Homo sapien
gtaggtaaaactaatcatcttttag

SEQ ID NO: 5942599 - DNA, 25 bp, Homo sapien
ctatgaaattctatgcaaaattgaa

SEQ ID NO: 5942600 - DNA, 25 bp, Homo sapien
tcatttgaggtcccaggtgaactga

SEQ ID NO: 5942601 - DNA, 25 bp, Homo sapien
gaagatcttatctacaatgtagctg

SEQ ID NO: 5942602 - DNA, 25 bp, Homo sapien
gttccctcttcatttccaaactcat

SEQ ID NO: 5942603 - DNA, 25 bp, Homo sapien
ttcccgggaattagcacaggcaact

SEQ ID NO: 5942604 - DNA, 25 bp, Homo sapien
tggctacctaccattcctttcaatc

SEQ ID NO: 5942605 - DNA, 25 bp, Homo sapien
agcattaaagacaattttgagacaa

SEQ ID NO: 5942606 - DNA, 25 bp, Homo sapien
gacaaatttatgctatgtttataat

SEQ ID NO: 5942607 - DNA, 25 bp, Homo sapien
ttccttccaaatctgctcatctttt

SEQ ID NO: 5942608 - DNA, 25 bp, Homo sapien
tctcatgcagttcccagtcaagtat

SEQ ID NO: 5942609 - DNA, 25 bp, Homo sapien
atttgaggtcccaggtgaactgacc

SEQ ID NO: 5942610 - DNA, 25 bp, Homo sapien
atataattgacaaatttatgctatg

SEQ ID NO: 5942611 - DNA, 25 bp, Homo sapien
cacatacacatttaagattctgtct

SEQ ID NO: 5942612 - DNA, 25 bp, Homo sapien
gaacatatcctggaacttcttcttt

SEQ ID NO: 5942613 - DNA, 25 bp, Homo sapien
tatgtttataatttttctcttaaat

SEQ ID NO: 5942614 - DNA, 25 bp, Homo sapien
tattctatgaaattctatgcaaaat

SEQ ID NO: 5942615 - DNA, 25 bp, Homo sapien
tatgctatgtttataattgacaaat

SEQ ID NO: 5942616 - DNA, 25 bp, Homo sapien
ccttttgatgaaccactttcaccta

SEQ ID NO: 5942617 - DNA, 25 bp, Homo sapien
acactaaagaacatgtctgaacata

SEQ ID NO: 5942618 - DNA, 25 bp, Homo sapien
tttgagacaaaatattctatgaaat

SEQ ID NO: 5942619 - DNA, 25 bp, Homo sapien
ttgaggtcccaggtgaactgaccca

SEQ ID NO: 5942620 - DNA, 25 bp, Homo sapien
tgagacaaaatattctatgaaattc

SEQ ID NO: 5942621 - DNA, 25 bp, Homo sapien
gacacgctatttctacctttttccc

SEQ ID NO: 5942622 - DNA, 25 bp, Homo sapien
ctgaacatatcctggaacttcttct

SEQ ID NO: 5942623 - DNA, 25 bp, Homo sapien
tgaattcttctacaagtatgtgatg

SEQ ID NO: 5942624 - DNA, 25 bp, Homo sapien
catacacatttaagattctgtctat

SEQ ID NO: 5942625 - DNA, 25 bp, Homo sapien
gtgtaaaacttttcagttagatatt

SEQ ID NO: 5942626 - DNA, 25 bp, Homo sapien
agttcccagtcaagtattgctgtag

SEQ ID NO: 5942627 - DNA, 25 bp, Homo sapien
caggcaactctcatgcagttcccag

SEQ ID NO: 5942628 - DNA, 25 bp, Homo sapien
taaagaacatgtctgaacatatcct

SEQ ID NO: 5942629 - DNA, 25 bp, Homo sapien
aaacctgatacgtaaaattttgcat

SEQ ID NO: 5942630 - DNA, 25 bp, Homo sapien
ataagatatactcacacatacacat

SEQ ID NO: 5942631 - DNA, 25 bp, Homo sapien
tttcgaaaggttcaacactcatttg

SEQ ID NO: 5942632 - DNA, 25 bp, Homo sapien
caaaaagtactgttggtgttatcat

SEQ ID NO: 5942633 - DNA, 25 bp, Homo sapien
atcctggaacttcttctttgtaaaa

SEQ ID NO: 5942634 - DNA, 25 bp, Homo sapien
atcttatctacaatgtagctgagaa

SEQ ID NO: 5942635 - DNA, 25 bp, Homo sapien
actcatttgaggtcccaggtgaact

SEQ ID NO: 5942636 - DNA, 25 bp, Homo sapien
acttttcagttagatattttataca

SEQ ID NO: 5942637 - DNA, 25 bp, Homo sapien
cgttccttccttccaaatctgctca

SEQ ID NO: 5942638 - DNA, 25 bp, Homo sapien
ccttccaaatctgctcatcttttac

SEQ ID NO: 5942639 - DNA, 25 bp, Homo sapien
taaagaggtttatgtccactgtttg

SEQ ID NO: 5942640 - DNA, 25 bp, Homo sapien
cataaggctagataatttccatagg

SEQ ID NO: 5942641 - DNA, 25 bp, Homo sapien
atgtctgaacatatcctggaacttc

SEQ ID NO: 5942642 - DNA, 25 bp, Homo sapien
gtctgaacatatcctggaacttctt

SEQ ID NO: 5942643 - DNA, 25 bp, Homo sapien
tgctatgtttataattgacaaattt

SEQ ID NO: 5942644 - DNA, 25 bp, Homo sapien
aaacttttcagttagatattttata

SEQ ID NO: 5942645 - DNA, 25 bp, Homo sapien
ctgagaaatgaaactgttgcatatg

SEQ ID NO: 5942646 - DNA, 25 bp, Homo sapien
aaaatattctatgaaattctatgca

SEQ ID NO: 5942647 - DNA, 25 bp, Homo sapien
gaaaggttcaacactcatttgaggt

SEQ ID NO: 5942648 - DNA, 25 bp, Homo sapien
attccaagatcccaggatttttaaa

SEQ ID NO: 5942649 - DNA, 25 bp, Homo sapien
gactgcttcaaaaagtactgttggt

SEQ ID NO: 5942650 - DNA, 25 bp, Homo sapien
tttttcgaaaggttcaacactcatt

SEQ ID NO: 5942651 - DNA, 25 bp, Homo sapien
aatttatgctatgtttataattgac

SEQ ID NO: 5942652 - DNA, 25 bp, Homo sapien
aatattctatgaaattctatgcaaa

SEQ ID NO: 5942653 - DNA, 25 bp, Homo sapien
aagaacaaagatgatacaccttttg

SEQ ID NO: 5942654 - DNA, 25 bp, Homo sapien
ctgatacgtaaaattttgcatgaaa

SEQ ID NO: 5942655 - DNA, 25 bp, Homo sapien
acaaagatgatacaccttttgatga

SEQ ID NO: 5942656 - DNA, 25 bp, Homo sapien
tactcacacatacacatttaagatt

SEQ ID NO: 5942657 - DNA, 25 bp, Homo sapien
tatagattcgttccttccttccaaa

SEQ ID NO: 5942658 - DNA, 25 bp, Homo sapien
gagaaatgaaactgttgcatatgta

SEQ ID NO: 5942659 - DNA, 25 bp, Homo sapien
tcctttcaatcaatttcttaggata

SEQ ID NO: 5942660 - DNA, 25 bp, Homo sapien
ttgctgtagctgagaagaaaagaaa

SEQ ID NO: 5942661 - DNA, 25 bp, Homo sapien
gataatttccataggttatttttag

SEQ ID NO: 5942662 - DNA, 25 bp, Homo sapien
attaaatttatatttgcacattttt

SEQ ID NO: 5942663 - DNA, 25 bp, Homo sapien
aaaagtactgttggtgttatcattt

SEQ ID NO: 5942664 - DNA, 25 bp, Homo sapien
aaattctatgcaaaattgaattctt

SEQ ID NO: 5942665 - DNA, 25 bp, Homo sapien
agattctgtctattagtgttattga

SEQ ID NO: 5942666 - DNA, 25 bp, Homo sapien
tcatcttttactttattttattaaa

SEQ ID NO: 5942667 - DNA, 25 bp, Homo sapien
aagatatactcacacatacacattt

SEQ ID NO: 5942668 - DNA, 25 bp, Homo sapien
actggttccctcttcatttccaaac

SEQ ID NO: 5942669 - DNA, 25 bp, Homo sapien
cattgactgcttcaaaaagtactgt

SEQ ID NO: 5942670 - DNA, 25 bp, Homo sapien
ttcccagtcaagtattgctgtagct

SEQ ID NO: 5942671 - DNA, 25 bp, Homo sapien
tacaagtatgtgatgaagcccacct

SEQ ID NO: 5942672 - DNA, 25 bp, Homo sapien
taggatataattgacaaatttatgc

SEQ ID NO: 5942673 - DNA, 25 bp, Homo sapien
aatgaaactgttgcatatgtaggta

SEQ ID NO: 5942674 - DNA, 25 bp, Homo sapien
aaattgaattcttctacaagtatgt

SEQ ID NO: 5942675 - DNA, 25 bp, Homo sapien
ttgagagagtatccatgacacgcta

SEQ ID NO: 5942676 - DNA, 25 bp, Homo sapien
tgtccactgtttgtctctggcatac

SEQ ID NO: 5942677 - DNA, 25 bp, Homo sapien
tatgcaaaattgaattcttctacaa

SEQ ID NO: 5942678 - DNA, 25 bp, Homo sapien
ccttccttccaaatctgctcatctt

SEQ ID NO: 5942679 - DNA, 25 bp, Homo sapien
ccaggtgaactgacccagatgccca

SEQ ID NO: 5942680 - DNA, 25 bp, Homo sapien
ttatcatttggaggaaatttttcga

SEQ ID NO: 5942681 - DNA, 25 bp, Homo sapien
tgtaataagatatactcacacatac

SEQ ID NO: 5942682 - DNA, 25 bp, Homo sapien
tatacaatatcataaggctagataa

SEQ ID NO: 5942683 - DNA, 25 bp, Homo sapien
ggcatacatggttttcatgcctagt

SEQ ID NO: 5942684 - DNA, 25 bp, Homo sapien
gaaaattccaagatcccaggatttt

SEQ ID NO: 5942685 - DNA, 25 bp, Homo sapien
taagaatttactcacaaggaagatc

SEQ ID NO: 5942686 - DNA, 25 bp, Homo sapien
tatgtccactgtttgtctctggcat

SEQ ID NO: 5942687 - DNA, 25 bp, Homo sapien
tctacaatgtagctgagaaatgaaa

SEQ ID NO: 5942688 - DNA, 25 bp, Homo sapien
ttagcacaggcaactctcatgcagt

SEQ ID NO: 5942689 - DNA, 25 bp, Homo sapien
catttccaaactcattgactgcttc

SEQ ID NO: 5942690 - DNA, 25 bp, Homo sapien
gtagtaagaatttactcacaaggaa

SEQ ID NO: 5942691 - DNA, 25 bp, Homo sapien
tttccaaactcattgactgcttcaa

SEQ ID NO: 5942692 - DNA, 25 bp, Homo sapien
atgcagttcccagtcaagtattgct

SEQ ID NO: 5942693 - DNA, 25 bp, Homo sapien
attcctttcaatcaatttcttagga

SEQ ID NO: 5942694 - DNA, 25 bp, Homo sapien
tttcatgcctagtggctacctacca

SEQ ID NO: 5942695 - DNA, 25 bp, Homo sapien
tggaacttcttctttgtaaaatgaa

SEQ ID NO: 5942696 - DNA, 25 bp, Homo sapien
acttcttctttgtaaaatgaataaa

SEQ ID NO: 5942697 - DNA, 25 bp, Homo sapien
tagattcgttccttccttccaaatc

SEQ ID NO: 5942698 - DNA, 25 bp, Homo sapien
attttgagacaaaatattctatgaa

SEQ ID NO: 5942699 - DNA, 25 bp, Homo sapien
aatttttcgaaaggttcaacactca

SEQ ID NO: 5942700 - DNA, 25 bp, Homo sapien
atgtaggtaaaactaatcatctttt

SEQ ID NO: 5942701 - DNA, 25 bp, Homo sapien
actaaagaacatgtctgaacatatc

SEQ ID NO: 5942702 - DNA, 25 bp, Homo sapien
catggttttcatgcctagtggctac

SEQ ID NO: 5942703 - DNA, 25 bp, Homo sapien
agaatttactcacaaggaagatctt

SEQ ID NO: 5942704 - DNA, 25 bp, Homo sapien
tagtagtaagaatttactcacaagg

SEQ ID NO: 5942705 - DNA, 25 bp, Homo sapien
actgttggtgttatcatttggagga

SEQ ID NO: 5942706 - DNA, 25 bp, Homo sapien
caagatcccaggatttttaaatgtg

SEQ ID NO: 5942707 - DNA, 25 bp, Homo sapien
ttgatgaaccactttcacctataaa

SEQ ID NO: 5942708 - DNA, 25 bp, Homo sapien
attctatgcaaaattgaattcttct

SEQ ID NO: 5942709 - DNA, 25 bp, Homo sapien
caacactcatttgaggtcccaggtg

SEQ ID NO: 5942710 - DNA, 25 bp, Homo sapien
gctcatcttttactttattttatta

SEQ ID NO: 5942711 - DNA, 25 bp, Homo sapien
atttcttaggatataattgacaaat

SEQ ID NO: 5942712 - DNA, 25 bp, Homo sapien
ctgtttgtctctggcatacatggtt

SEQ ID NO: 5942713 - DNA, 25 bp, Homo sapien
gatatactcacacatacacatttaa

SEQ ID NO: 5942714 - DNA, 25 bp, Homo sapien
atgctatgtttataatttttctctt

SEQ ID NO: 5942715 - DNA, 25 bp, Homo sapien
ggatataattgacaaatttatgcta

SEQ ID NO: 5942716 - DNA, 25 bp, Homo sapien
ccactttcacctataaattagtagt

SEQ ID NO: 5942717 - DNA, 25 bp, Homo sapien
aggtaaaactaatcatcttttagga

SEQ ID NO: 5942718 - DNA, 25 bp, Homo sapien
gagtatccatgacacgctatttcta

SEQ ID NO: 5942719 - DNA, 25 bp, Homo sapien
atgtagctgagaaatgaaactgttg

SEQ ID NO: 5942720 - DNA, 25 bp, Homo sapien
atcatttggaggaaatttttcgaaa

SEQ ID NO: 5942721 - DNA, 25 bp, Homo sapien
taaatttatatttgcacatttttgt

SEQ ID NO: 5942722 - DNA, 25 bp, Homo sapien
atatcctggaacttcttctttgtaa

SEQ ID NO: 5942723 - DNA, 25 bp, Homo sapien
agctgagaaatgaaactgttgcata

SEQ ID NO: 5942724 - DNA, 25 bp, Homo sapien
taataagatatactcacacatacac

SEQ ID NO: 5942725 - DNA, 25 bp, Homo sapien
caatttcttaggatataattgacaa

SEQ ID NO: 5942726 - DNA, 25 bp, Homo sapien
tggaggaaatttttcgaaaggttca

SEQ ID NO: 5942727 - DNA, 25 bp, Homo sapien
ataagataaagaggtttatgtccac

SEQ ID NO: 5942728 - DNA, 25 bp, Homo sapien
agtggctacctaccattcctttcaa

SEQ ID NO: 5942729 - DNA, 25 bp, Homo sapien
cctcttcatttccaaactcattgac

SEQ ID NO: 5942730 - DNA, 25 bp, Homo sapien
ggcaactctcatgcagttcccagtc

SEQ ID NO: 5942731 - DNA, 25 bp, Homo sapien
gaagaaaagaaaattccaagatccc

SEQ ID NO: 5942732 - DNA, 25 bp, Homo sapien
atgtttataattgacaaatttatgc

SEQ ID NO: 5942733 - DNA, 25 bp, Homo sapien
tcatgcagttcccagtcaagtattg

SEQ ID NO: 5942734 - DNA, 25 bp, Homo sapien
gaaatgaaactgttgcatatgtagg

SEQ ID NO: 5942735 - DNA, 25 bp, Homo sapien
aattagcacaggcaactctcatgca

SEQ ID NO: 5942736 - DNA, 25 bp, Homo sapien
ccactattgagagagtatccatgac

SEQ ID NO: 5942737 - DNA, 25 bp, Homo sapien
ttgcatatgtaggtaaaactaatca

SEQ ID NO: 5942738 - DNA, 25 bp, Homo sapien
agatcttatctacaatgtagctgag

SEQ ID NO: 5942739 - DNA, 25 bp, Homo sapien
ttttgatgaaccactttcacctata

SEQ ID NO: 5942740 - DNA, 25 bp, Homo sapien
actctcatgcagttcccagtcaagt

SEQ ID NO: 5942741 - DNA, 25 bp, Homo sapien
acatatcctggaacttcttctttgt

SEQ ID NO: 5942742 - DNA, 25 bp, Homo sapien
ggttcaacactcatttgaggtccca

SEQ ID NO: 5942743 - DNA, 25 bp, Homo sapien
atattttatacaatatcataaggct

SEQ ID NO: 5942744 - DNA, 25 bp, Homo sapien
taaagaacaaagatgatacaccttt

SEQ ID NO: 5942745 - DNA, 25 bp, Homo sapien
tcacctataaattagtagtaagaat

SEQ ID NO: 5942746 - DNA, 25 bp, Homo sapien
ctaatcatcttttaggaataagata

SEQ ID NO: 5942747 - DNA, 25 bp, Homo sapien
agcacaggcaactctcatgcagttc

SEQ ID NO: 5942748 - DNA, 25 bp, Homo sapien
agtaagaatttactcacaaggaaga

SEQ ID NO: 5942749 - DNA, 25 bp, Homo sapien
ttaaatgtgtaaaacttttcagtta

SEQ ID NO: 5942750 - DNA, 25 bp, Homo sapien
ccagatgcccactattgagagagta

SEQ ID NO: 5942751 - DNA, 25 bp, Homo sapien
tacaatgtagctgagaaatgaaact

SEQ ID NO: 5942752 - DNA, 25 bp, Homo sapien
aaagacactaaagaacatgtctgaa

SEQ ID NO: 5942753 - DNA, 25 bp, Homo sapien
ttatgctatgtttataatttttctc

SEQ ID NO: 5942754 - DNA, 25 bp, Homo sapien
aagtactgttggtgttatcatttgg

SEQ ID NO: 5942755 - DNA, 25 bp, Homo sapien
agctgagaagaaaagaaaattccaa

SEQ ID NO: 5942756 - DNA, 25 bp, Homo sapien
ttaaagcattaaagacaattttgag

SEQ ID NO: 5942757 - DNA, 25 bp, Homo sapien
taccattcctttcaatcaatttctt

SEQ ID NO: 5942758 - DNA, 25 bp, Homo sapien
gaacaaagatgatacaccttttgat

SEQ ID NO: 5942759 - DNA, 25 bp, Homo sapien
tacaatatcataaggctagataatt

SEQ ID NO: 5942760 - DNA, 25 bp, Homo sapien
cagtcaagtattgctgtagctgaga

SEQ ID NO: 5942761 - DNA, 25 bp, Homo sapien
gcagttcccagtcaagtattgctgt

SEQ ID NO: 5942762 - DNA, 25 bp, Homo sapien
agaaaagaaaattccaagatcccag

SEQ ID NO: 5942763 - DNA, 25 bp, Homo sapien
ctttcaatcaatttcttaggatata

SEQ ID NO: 5942764 - DNA, 25 bp, Homo sapien
gagagtatccatgacacgctatttc

SEQ ID NO: 5942765 - DNA, 25 bp, Homo sapien
gagagagtatccatgacacgctatt

SEQ ID NO: 5942766 - DNA, 25 bp, Homo sapien
tttatgctatgtttataattgacaa

SEQ ID NO: 5942767 - DNA, 25 bp, Homo sapien
caactctcatgcagttcccagtcaa

SEQ ID NO: 5942768 - DNA, 25 bp, Homo sapien
attagtagtaagaatttactcacaa

SEQ ID NO: 5942769 - DNA, 25 bp, Homo sapien
ctctggcatacatggttttcatgcc

SEQ ID NO: 5942770 - DNA, 25 bp, Homo sapien
ggtttatgtccactgtttgtctctg

SEQ ID NO: 5942771 - DNA, 25 bp, Homo sapien
acaaaatattctatgaaattctatg

SEQ ID NO: 5942772 - DNA, 25 bp, Homo sapien
tatttgcacatttttgtaaaatgaa

SEQ ID NO: 5942773 - DNA, 25 bp, Homo sapien
cacaggcaactctcatgcagttccc

SEQ ID NO: 5942774 - DNA, 25 bp, Homo sapien
acactaaagaacaaagatgatacac

SEQ ID NO: 5942775 - DNA, 25 bp, Homo sapien
caaggaagatcttatctacaatgta

SEQ ID NO: 5942776 - DNA, 25 bp, Homo sapien
ccaaatctgctcatcttttacttta

SEQ ID NO: 5942777 - DNA, 25 bp, Homo sapien
ttttcagttagatattttatacaat

SEQ ID NO: 5942778 - DNA, 25 bp, Homo sapien
gtttataattgacaaatttatgcta

SEQ ID NO: 5942779 - DNA, 25 bp, Homo sapien
actattgagagagtatccatgacac

SEQ ID NO: 5942780 - DNA, 25 bp, Homo sapien
cttctacaagtatgtgatgaagccc

SEQ ID NO: 5942781 - DNA, 25 bp, Homo sapien
caaaattgaattcttctacaagtat

SEQ ID NO: 5942782 - DNA, 25 bp, Homo sapien
ctgctcatcttttactttattttat

SEQ ID NO: 5942783 - DNA, 25 bp, Homo sapien
gcctagtggctacctaccattcctt

SEQ ID NO: 5942784 - DNA, 25 bp, Homo sapien
tttatgtccactgtttgtctctggc

SEQ ID NO: 5942785 - DNA, 25 bp, Homo sapien
acactcatttgaggtcccaggtgaa

SEQ ID NO: 5942786 - DNA, 25 bp, Homo sapien
tccaaactcattgactgcttcaaaa

SEQ ID NO: 5942787 - DNA, 25 bp, Homo sapien
ctcacacatacacatttaagattct

SEQ ID NO: 5942788 - DNA, 25 bp, Homo sapien
atcataaggctagataatttccata

SEQ ID NO: 5942789 - DNA, 25 bp, Homo sapien
aattttgcatgaaaagtatagattc

SEQ ID NO: 5942790 - DNA, 25 bp, Homo sapien
ggaattagcacaggcaactctcatg

SEQ ID NO: 5942791 - DNA, 25 bp, Homo sapien
ggtgttatcatttggaggaaatttt

SEQ ID NO: 5942792 - DNA, 25 bp, Homo sapien
caatatcataaggctagataatttc

SEQ ID NO: 5942793 - DNA, 25 bp, Homo sapien
gaacttcttctttgtaaaatgaata

SEQ ID NO: 5942794 - DNA, 25 bp, Homo sapien
tttaagattctgtctattagtgtta

SEQ ID NO: 5942795 - DNA, 25 bp, Homo sapien
acccagatgcccactattgagagag

SEQ ID NO: 5942796 - DNA, 25 bp, Homo sapien
tacacatttaagattctgtctatta

SEQ ID NO: 5942797 - DNA, 25 bp, Homo sapien
ttcaacactcatttgaggtcccagg

SEQ ID NO: 5942798 - DNA, 25 bp, Homo sapien
tttatatttgcacatttttgtaaaa

SEQ ID NO: 5942799 - DNA, 25 bp, Homo sapien
acatgtctgaacatatcctggaact

SEQ ID NO: 5942800 - DNA, 25 bp, Homo sapien
tccaagatcccaggatttttaaatg

SEQ ID NO: 5942801 - DNA, 25 bp, Homo sapien
tttatacaatatcataaggctagat

SEQ ID NO: 5942802 - DNA, 25 bp, Homo sapien
tactcacaaggaagatcttatctac

SEQ ID NO: 5942803 - DNA, 25 bp, Homo sapien
actaaagaacaaagatgatacacct

SEQ ID NO: 5942804 - DNA, 25 bp, Homo sapien
gcatgaaaagtatagattcgttcct

SEQ ID NO: 5942805 - DNA, 25 bp, Homo sapien
tagataatttccataggttattttt

SEQ ID NO: 5942806 - DNA, 25 bp, Homo sapien
agacactaaagaacaaagatgatac

SEQ ID NO: 5942807 - DNA, 25 bp, Homo sapien
ctgcttcaaaaagtactgttggtgt

SEQ ID NO: 5942808 - DNA, 25 bp, Homo sapien
ttcttctacaagtatgtgatgaagc

SEQ ID NO: 5942809 - DNA, 25 bp, Homo sapien
ttataattgacaaatttatgctatg

SEQ ID NO: 5942810 - DNA, 25 bp, Homo sapien
tacctttttcccgggaattagcaca

SEQ ID NO: 5942811 - DNA, 25 bp, Homo sapien
tgtctattagtgttattgaaataaa

SEQ ID NO: 5942812 - DNA, 25 bp, Homo sapien
aagataaagaggtttatgtccactg

SEQ ID NO: 5942813 - DNA, 25 bp, Homo sapien
atgcccactattgagagagtatcca

SEQ ID NO: 5942814 - DNA, 25 bp, Homo sapien
tacctaccattcctttcaatcaatt

SEQ ID NO: 5942815 - DNA, 25 bp, Homo sapien
cgggaattagcacaggcaactctca

SEQ ID NO: 5942816 - DNA, 25 bp, Homo sapien
tcccaggtgaactgacccagatgcc

SEQ ID NO: 5942817 - DNA, 25 bp, Homo sapien
aattcttctacaagtatgtgatgaa

SEQ ID NO: 5942818 - DNA, 25 bp, Homo sapien
tataaaatatctaactgaaaagttt

SEQ ID NO: 5942819 - DNA, 25 bp, Homo sapien
aacctatggaaattatctagcctta

SEQ ID NO: 5942820 - DNA, 25 bp, Homo sapien
tagttttacctacatatgcaacagt

SEQ ID NO: 5942821 - DNA, 25 bp, Homo sapien
ttgtcaattatatcctaagaaattg

SEQ ID NO: 5942822 - DNA, 25 bp, Homo sapien
agcaatacttgactgggaactgcat

SEQ ID NO: 5942823 - DNA, 25 bp, Homo sapien
tcacatacttgtagaagaattcaat

SEQ ID NO: 5942824 - DNA, 25 bp, Homo sapien
tcaataacactaatagacagaatct

SEQ ID NO: 5942825 - DNA, 25 bp, Homo sapien
gtgtatcatctttgttctttagtgt

SEQ ID NO: 5942826 - DNA, 25 bp, Homo sapien
gtatgccagagacaaacagtggaca

SEQ ID NO: 5942827 - DNA, 25 bp, Homo sapien
tatgttcagacatgttctttagtgt

SEQ ID NO: 5942828 - DNA, 25 bp, Homo sapien
ccactaggcatgaaaaccatgtatg

SEQ ID NO: 5942829 - DNA, 25 bp, Homo sapien
tcctccaaatgataacaccaacagt

SEQ ID NO: 5942830 - DNA, 25 bp, Homo sapien
acagcaatacttgactgggaactgc

SEQ ID NO: 5942831 - DNA, 25 bp, Homo sapien
gtctcaaaattgtctttaatgcttt

SEQ ID NO: 5942832 - DNA, 25 bp, Homo sapien
gagaaaaattataaacatagcataa

SEQ ID NO: 5942833 - DNA, 25 bp, Homo sapien
tttcctccaaatgataacaccaaca

SEQ ID NO: 5942834 - DNA, 25 bp, Homo sapien
aaaaataacctatggaaattatcta

SEQ ID NO: 5942835 - DNA, 25 bp, Homo sapien
tatgcaacagtttcatttctcagct

SEQ ID NO: 5942836 - DNA, 25 bp, Homo sapien
gacatgttctttagtgtctttttcc

SEQ ID NO: 5942837 - DNA, 25 bp, Homo sapien
attttgcatagaatttcatagaata

SEQ ID NO: 5942838 - DNA, 25 bp, Homo sapien
ggaattttcttttcttctcagctac

SEQ ID NO: 5942839 - DNA, 25 bp, Homo sapien
tagcgtgtcatggatactctctcaa

SEQ ID NO: 5942840 - DNA, 25 bp, Homo sapien
gaactgcatgagagttgcctgtgct

SEQ ID NO: 5942841 - DNA, 25 bp, Homo sapien
tactttttgaagcagtcaatgagtt

SEQ ID NO: 5942842 - DNA, 25 bp, Homo sapien
caaatgagtgttgaacctttcgaaa

SEQ ID NO: 5942843 - DNA, 25 bp, Homo sapien
tagaatttcatagaatattttgtct

SEQ ID NO: 5942844 - DNA, 25 bp, Homo sapien
ggtagaaatagcgtgtcatggatac

SEQ ID NO: 5942845 - DNA, 25 bp, Homo sapien
atgataacaccaacagtactttttg

SEQ ID NO: 5942846 - DNA, 25 bp, Homo sapien
gatatgttcagacatgttctttagt

SEQ ID NO: 5942847 - DNA, 25 bp, Homo sapien
tattcattttacaaagaagaagttc

SEQ ID NO: 5942848 - DNA, 25 bp, Homo sapien
acgaatctatacttttcatgcaaaa

SEQ ID NO: 5942849 - DNA, 25 bp, Homo sapien
gtggacataaacctctttatcttat

SEQ ID NO: 5942850 - DNA, 25 bp, Homo sapien
caattttgcatagaatttcatagaa

SEQ ID NO: 5942851 - DNA, 25 bp, Homo sapien
gaaattatctagccttatgatattg

SEQ ID NO: 5942852 - DNA, 25 bp, Homo sapien
gaagttccaggatatgttcagacat

SEQ ID NO: 5942853 - DNA, 25 bp, Homo sapien
ccaaatgataacaccaacagtactt

SEQ ID NO: 5942854 - DNA, 25 bp, Homo sapien
atacttgtagaagaattcaattttg

SEQ ID NO: 5942855 - DNA, 25 bp, Homo sapien
aaagaagaagttccaggatatgttc

SEQ ID NO: 5942856 - DNA, 25 bp, Homo sapien
catagcataaatttgtcaattataa

SEQ ID NO: 5942857 - DNA, 25 bp, Homo sapien
aatagcgtgtcatggatactctctc

SEQ ID NO: 5942858 - DNA, 25 bp, Homo sapien
aggaacgaatctatacttttcatgc

SEQ ID NO: 5942859 - DNA, 25 bp, Homo sapien
ctaaaaataacctatggaaattatc

SEQ ID NO: 5942860 - DNA, 25 bp, Homo sapien
ataagatcttccttgtgagtaaatt

SEQ ID NO: 5942861 - DNA, 25 bp, Homo sapien
catttaaaaatcctgggatcttgga

SEQ ID NO: 5942862 - DNA, 25 bp, Homo sapien
gatgattagttttacctacatatgc

SEQ ID NO: 5942863 - DNA, 25 bp, Homo sapien
caacagtactttttgaagcagtcaa

SEQ ID NO: 5942864 - DNA, 25 bp, Homo sapien
ttaaatgtgtatgtgtgagtatatc

SEQ ID NO: 5942865 - DNA, 25 bp, Homo sapien
tttacacatttaaaaatcctgggat

SEQ ID NO: 5942866 - DNA, 25 bp, Homo sapien
tgttcagacatgttctttagtgtct

SEQ ID NO: 5942867 - DNA, 25 bp, Homo sapien
tttcgaaaaatttcctccaaatgat

SEQ ID NO: 5942868 - DNA, 25 bp, Homo sapien
ttcatcacatacttgtagaagaatt

SEQ ID NO: 5942869 - DNA, 25 bp, Homo sapien
gaaatagcgtgtcatggatactctc

SEQ ID NO: 5942870 - DNA, 25 bp, Homo sapien
atgagtttggaaatgaagagggaac

SEQ ID NO: 5942871 - DNA, 25 bp, Homo sapien
gaaaaatttcctccaaatgataaca

SEQ ID NO: 5942872 - DNA, 25 bp, Homo sapien
tacacatttaaaaatcctgggatct

SEQ ID NO: 5942873 - DNA, 25 bp, Homo sapien
tttcatttctcagctacattgtaga

SEQ ID NO: 5942874 - DNA, 25 bp, Homo sapien
tgagagttgcctgtgctaattcccg

SEQ ID NO: 5942875 - DNA, 25 bp, Homo sapien
ctcaaaattgtctttaatgctttaa

SEQ ID NO: 5942876 - DNA, 25 bp, Homo sapien
gtgggcttcatcacatacttgtaga

SEQ ID NO: 5942877 - DNA, 25 bp, Homo sapien
attcctaaaagatgattagttttac

SEQ ID NO: 5942878 - DNA, 25 bp, Homo sapien
actgcatgagagttgcctgtgctaa

SEQ ID NO: 5942879 - DNA, 25 bp, Homo sapien
attgtataaaatatctaactgaaaa

SEQ ID NO: 5942880 - DNA, 25 bp, Homo sapien
acagtttcatttctcagctacattg

SEQ ID NO: 5942881 - DNA, 25 bp, Homo sapien
ctaatttataggtgaaagtggttca

SEQ ID NO: 5942882 - DNA, 25 bp, Homo sapien
atcatctttgttctttagtgtcttt

SEQ ID NO: 5942883 - DNA, 25 bp, Homo sapien
tgcatgagagttgcctgtgctaatt

SEQ ID NO: 5942884 - DNA, 25 bp, Homo sapien
caattatatcctaagaaattgattg

SEQ ID NO: 5942885 - DNA, 25 bp, Homo sapien
aggatatgttcagacatgttcttta

SEQ ID NO: 5942886 - DNA, 25 bp, Homo sapien
taatagacagaatcttaaatgtgta

SEQ ID NO: 5942887 - DNA, 25 bp, Homo sapien
tatcctaagaaattgattgaaagga

SEQ ID NO: 5942888 - DNA, 25 bp, Homo sapien
ataacctatggaaattatctagcct

SEQ ID NO: 5942889 - DNA, 25 bp, Homo sapien
tgctaattcccgggaaaaaggtaga

SEQ ID NO: 5942890 - DNA, 25 bp, Homo sapien
aatatctaactgaaaagttttacac

SEQ ID NO: 5942891 - DNA, 25 bp, Homo sapien
gtcaatgagtttggaaatgaagagg

SEQ ID NO: 5942892 - DNA, 25 bp, Homo sapien
ttgactgggaactgcatgagagttg

SEQ ID NO: 5942893 - DNA, 25 bp, Homo sapien
gtcaattataaacatagcataaatt

SEQ ID NO: 5942894 - DNA, 25 bp, Homo sapien
tcttttcttctcagctacagcaata

SEQ ID NO: 5942895 - DNA, 25 bp, Homo sapien
aattatctagccttatgatattgta

SEQ ID NO: 5942896 - DNA, 25 bp, Homo sapien
aaaagatgagcagatttggaaggaa

SEQ ID NO: 5942897 - DNA, 25 bp, Homo sapien
agaagaattcaattttgcatagaat

SEQ ID NO: 5942898 - DNA, 25 bp, Homo sapien
tcttccttgtgagtaaattcttact

SEQ ID NO: 5942899 - DNA, 25 bp, Homo sapien
taacaccaacagtactttttgaagc

SEQ ID NO: 5942900 - DNA, 25 bp, Homo sapien
aattgattgaaaggaatggtaggta

SEQ ID NO: 5942901 - DNA, 25 bp, Homo sapien
catgagagttgcctgtgctaattcc

SEQ ID NO: 5942902 - DNA, 25 bp, Homo sapien
taaaatatctaactgaaaagtttta

SEQ ID NO: 5942903 - DNA, 25 bp, Homo sapien
aaagtggttcatcaaaaggtgtatc

SEQ ID NO: 5942904 - DNA, 25 bp, Homo sapien
ttgtcaattataaacatagcataaa

SEQ ID NO: 5942905 - DNA, 25 bp, Homo sapien
ttcattttacaaaaatgtgcaaata

SEQ ID NO: 5942906 - DNA, 25 bp, Homo sapien
cagtggacataaacctctttatctt

SEQ ID NO: 5942907 - DNA, 25 bp, Homo sapien
ttggaattttcttttcttctcagct

SEQ ID NO: 5942908 - DNA, 25 bp, Homo sapien
taggcatgaaaaccatgtatgccag

SEQ ID NO: 5942909 - DNA, 25 bp, Homo sapien
cctatggaaattatctagccttatg

SEQ ID NO: 5942910 - DNA, 25 bp, Homo sapien
ttgtctcaaaattgtctttaatgct

SEQ ID NO: 5942911 - DNA, 25 bp, Homo sapien
aagatgagcagatttggaaggaagg

SEQ ID NO: 5942912 - DNA, 25 bp, Homo sapien
tatctaactgaaaagttttacacat

SEQ ID NO: 5942913 - DNA, 25 bp, Homo sapien
ggtcagttcacctgggacctcaaat

SEQ ID NO: 5942914 - DNA, 25 bp, Homo sapien
ctaaaagatgattagttttacctac

SEQ ID NO: 5942915 - DNA, 25 bp, Homo sapien
catagcataaatttgtcaattatat

SEQ ID NO: 5942916 - DNA, 25 bp, Homo sapien
gccagagacaaacagtggacataaa

SEQ ID NO: 5942917 - DNA, 25 bp, Homo sapien
aaaatcctgggatcttggaattttc

SEQ ID NO: 5942918 - DNA, 25 bp, Homo sapien
ataaaataaagtaaaagatgagcag

SEQ ID NO: 5942919 - DNA, 25 bp, Homo sapien
accaacagtactttttgaagcagtc

SEQ ID NO: 5942920 - DNA, 25 bp, Homo sapien
ctacagcaatacttgactgggaact

SEQ ID NO: 5942921 - DNA, 25 bp, Homo sapien
acttgtagaagaattcaattttgca

SEQ ID NO: 5942922 - DNA, 25 bp, Homo sapien
gagacaaacagtggacataaacctc

SEQ ID NO: 5942923 - DNA, 25 bp, Homo sapien
gaattcaattttgcatagaatttca

SEQ ID NO: 5942924 - DNA, 25 bp, Homo sapien
taactgaaaagttttacacatttaa

SEQ ID NO: 5942925 - DNA, 25 bp, Homo sapien
attcttactactaatttataggtga

SEQ ID NO: 5942926 - DNA, 25 bp, Homo sapien
aaggtagaaatagcgtgtcatggat

SEQ ID NO: 5942927 - DNA, 25 bp, Homo sapien
taggatttatttcaataacactaat

SEQ ID NO: 5942928 - DNA, 25 bp, Homo sapien
cagatttggaaggaaggaacgaatc

SEQ ID NO: 5942929 - DNA, 25 bp, Homo sapien
caaaattgtctttaatgctttaaac

SEQ ID NO: 5942930 - DNA, 25 bp, Homo sapien
caatacttgactgggaactgcatga

SEQ ID NO: 5942931 - DNA, 25 bp, Homo sapien
tcagttcacctgggacctcaaatga

SEQ ID NO: 5942932 - DNA, 25 bp, Homo sapien
atgtgtgagtatatcttattacaaa

SEQ ID NO: 5942933 - DNA, 25 bp, Homo sapien
gtcatggatactctctcaatagtgg

SEQ ID NO: 5942934 - DNA, 25 bp, Homo sapien
gtgagtaaattcttactactaattt

SEQ ID NO: 5942935 - DNA, 25 bp, Homo sapien
caaacagtggacataaacctcttta

SEQ ID NO: 5942936 - DNA, 25 bp, Homo sapien
tactctctcaatagtgggcatctgg

SEQ ID NO: 5942937 - DNA, 25 bp, Homo sapien
tgattagttttacctacatatgcaa

SEQ ID NO: 5942938 - DNA, 25 bp, Homo sapien
aaaatttcctccaaatgataacacc

SEQ ID NO: 5942939 - DNA, 25 bp, Homo sapien
gtaggtagccactaggcatgaaaac

SEQ ID NO: 5942940 - DNA, 25 bp, Homo sapien
ggtgaaagtggttcatcaaaaggtg

SEQ ID NO: 5942941 - DNA, 25 bp, Homo sapien
ggacctcaaatgagtgttgaacctt

SEQ ID NO: 5942942 - DNA, 25 bp, Homo sapien
tggaaattatctagccttatgatat

SEQ ID NO: 5942943 - DNA, 25 bp, Homo sapien
ctcaatagtgggcatctgggtcagt

SEQ ID NO: 5942944 - DNA, 25 bp, Homo sapien
attataaacatagcataaatttgtc

SEQ ID NO: 5942945 - DNA, 25 bp, Homo sapien
gaacgaatctatacttttcatgcaa

SEQ ID NO: 5942946 - DNA, 25 bp, Homo sapien
gatttggaaggaaggaacgaatcta

SEQ ID NO: 5942947 - DNA, 25 bp, Homo sapien
tagcataaatttgtcaattataaac

SEQ ID NO: 5942948 - DNA, 25 bp, Homo sapien
acagaatcttaaatgtgtatgtgtg

SEQ ID NO: 5942949 - DNA, 25 bp, Homo sapien
aacatagcataaatttgtcaattat

SEQ ID NO: 5942950 - DNA, 25 bp, Homo sapien
cctacatatgcaacagtttcatttc

SEQ ID NO: 5942951 - DNA, 25 bp, Homo sapien
agcagtcaatgagtttggaaatgaa

SEQ ID NO: 5942952 - DNA, 25 bp, Homo sapien
ttttacaaaaatgtgcaaatataaa

SEQ ID NO: 5942953 - DNA, 25 bp, Homo sapien
acactaatagacagaatcttaaatg

SEQ ID NO: 5942954 - DNA, 25 bp, Homo sapien
tttgcatagaatttcatagaatatt

SEQ ID NO: 5942955 - DNA, 25 bp, Homo sapien
gaaaaattataaacatagcataaat

SEQ ID NO: 5942956 - DNA, 25 bp, Homo sapien
catagaatttcatagaatattttgt

SEQ ID NO: 5942957 - DNA, 25 bp, Homo sapien
gaatctatacttttcatgcaaaatt

SEQ ID NO: 5942958 - DNA, 25 bp, Homo sapien
gggaactgcatgagagttgcctgtg

SEQ ID NO: 5942959 - DNA, 25 bp, Homo sapien
catgaaaaccatgtatgccagagac

SEQ ID NO: 5942960 - DNA, 25 bp, Homo sapien
agttccaggatatgttcagacatgt

SEQ ID NO: 5942961 - DNA, 25 bp, Homo sapien
ctcagctacattgtagataagatct

SEQ ID NO: 5942962 - DNA, 25 bp, Homo sapien
aaaaggtagaaatagcgtgtcatgg

SEQ ID NO: 5942963 - DNA, 25 bp, Homo sapien
aatttcctccaaatgataacaccaa

SEQ ID NO: 5942964 - DNA, 25 bp, Homo sapien
agttgcctgtgctaattcccgggaa

SEQ ID NO: 5942965 - DNA, 25 bp, Homo sapien
gtgtcatggatactctctcaatagt

SEQ ID NO: 5942966 - DNA, 25 bp, Homo sapien
acaccaacagtactttttgaagcag

SEQ ID NO: 5942967 - DNA, 25 bp, Homo sapien
caattataaacatagcataaatttg

SEQ ID NO: 5942968 - DNA, 25 bp, Homo sapien
ttattcctaaaagatgattagtttt

SEQ ID NO: 5942969 - DNA, 25 bp, Homo sapien
ggcatctgggtcagttcacctggga

SEQ ID NO: 5942970 - DNA, 25 bp, Homo sapien
tacctacatatgcaacagtttcatt

SEQ ID NO: 5942971 - DNA, 25 bp, Homo sapien
gcataaatttgtcaattatatccta

SEQ ID NO: 5942972 - DNA, 25 bp, Homo sapien
tggaaggaaggaacgaatctatact

SEQ ID NO: 5942973 - DNA, 25 bp, Homo sapien
aggtagccactaggcatgaaaacca

SEQ ID NO: 5942974 - DNA, 25 bp, Homo sapien
atcaaaaggtgtatcatctttgttc

SEQ ID NO: 5942975 - DNA, 25 bp, Homo sapien
aatggtaggtagccactaggcatga

SEQ ID NO: 5942976 - DNA, 25 bp, Homo sapien
gtatcatctttgttctttagtgtct

SEQ ID NO: 5942977 - DNA, 25 bp, Homo sapien
gcgtgtcatggatactctctcaata

SEQ ID NO: 5942978 - DNA, 25 bp, Homo sapien
ctaagaaattgattgaaaggaatgg

SEQ ID NO: 5942979 - DNA, 25 bp, Homo sapien
agagttgcctgtgctaattcccggg

SEQ ID NO: 5942980 - DNA, 25 bp, Homo sapien
ctgggaactgcatgagagttgcctg

SEQ ID NO: 5942981 - DNA, 25 bp, Homo sapien
gttttacctacatatgcaacagttt

SEQ ID NO: 5942982 - DNA, 25 bp, Homo sapien
aaataacctatggaaattatctagc

SEQ ID NO: 5942983 - DNA, 25 bp, Homo sapien
ttgcctgtgctaattcccgggaaaa

SEQ ID NO: 5942984 - DNA, 25 bp, Homo sapien
gctacattgtagataagatcttcct

SEQ ID NO: 5942985 - DNA, 25 bp, Homo sapien
tttattcattttacaaagaagaagt

SEQ ID NO: 5942986 - DNA, 25 bp, Homo sapien
tcatcaaaaggtgtatcatctttgt

SEQ ID NO: 5942987 - DNA, 25 bp, Homo sapien
tagcataaatttgtcaattatatcc

SEQ ID NO: 5942988 - DNA, 25 bp, Homo sapien
ttcaattttgcatagaatttcatag

SEQ ID NO: 5942989 - DNA, 25 bp, Homo sapien
ttgtagataagatcttccttgtgag

SEQ ID NO: 5942990 - DNA, 25 bp, Homo sapien
agtgggcatctgggtcagttcacct

SEQ ID NO: 5942991 - DNA, 25 bp, Homo sapien
tcatttctcagctacattgtagata

SEQ ID NO: 5942992 - DNA, 25 bp, Homo sapien
agctacagcaatacttgactgggaa

SEQ ID NO: 5942993 - DNA, 25 bp, Homo sapien
tcgaaaaatttcctccaaatgataa

SEQ ID NO: 5942994 - DNA, 25 bp, Homo sapien
tggatactctctcaatagtgggcat

SEQ ID NO: 5942995 - DNA, 25 bp, Homo sapien
gggaaaaaggtagaaatagcgtgtc

SEQ ID NO: 5942996 - DNA, 25 bp, Homo sapien
agaatcttaaatgtgtatgtgtgag

SEQ ID NO: 5942997 - DNA, 25 bp, Homo sapien
acagtactttttgaagcagtcaatg

SEQ ID NO: 5942998 - DNA, 25 bp, Homo sapien
catgttctttagtgtctttttcctt

SEQ ID NO: 5942999 - DNA, 25 bp, Homo sapien
ttccaggatatgttcagacatgttc

SEQ ID NO: 5943000 - DNA, 25 bp, Homo sapien
gggcttcatcacatacttgtagaag

SEQ ID NO: 5943001 - DNA, 25 bp, Homo sapien
ttttacaaagaagaagttccaggat

SEQ ID NO: 5943002 - DNA, 25 bp, Homo sapien
atctagccttatgatattgtataaa

SEQ ID NO: 5943003 - DNA, 25 bp, Homo sapien
cagagacaaacagtggacataaacc

SEQ ID NO: 5943004 - DNA, 25 bp, Homo sapien
ttcattttacaaagaagaagttcca

SEQ ID NO: 5943005 - DNA, 25 bp, Homo sapien
atttcatagaatattttgtctcaaa

SEQ ID NO: 5943006 - DNA, 25 bp, Homo sapien
gtgtatgtgtgagtatatcttatta

SEQ ID NO: 5943007 - DNA, 25 bp, Homo sapien
gtatgtgtgagtatatcttattaca

SEQ ID NO: 5943008 - DNA, 25 bp, Homo sapien
ttttgaagcagtcaatgagtttgga

SEQ ID NO: 5943009 - DNA, 25 bp, Homo sapien
cacctgggacctcaaatgagtgttg

SEQ ID NO: 5943010 - DNA, 25 bp, Homo sapien
tactaatttataggtgaaagtggtt

SEQ ID NO: 5943011 - DNA, 25 bp, Homo sapien
ccaggatatgttcagacatgttctt

SEQ ID NO: 5943012 - DNA, 25 bp, Homo sapien
aataaagtaaaagatgagcagattt

SEQ ID NO: 5943013 - DNA, 25 bp, Homo sapien
ccatgtatgccagagacaaacagtg

SEQ ID NO: 5943014 - DNA, 25 bp, Homo sapien
tgggtcagttcacctgggacctcaa

SEQ ID NO: 5943015 - DNA, 25 bp, Homo sapien
gaaaggaatggtaggtagccactag

SEQ ID NO: 5943016 - DNA, 25 bp, Homo sapien
aaggaatggtaggtagccactaggc

SEQ ID NO: 5943017 - DNA, 25 bp, Homo sapien
aatgagtgttgaacctttcgaaaaa

SEQ ID NO: 5943018 - DNA, 25 bp, Homo sapien
atgtatgccagagacaaacagtgga

SEQ ID NO: 5943019 - DNA, 25 bp, Homo sapien
catctttgttctttagtgtcttttt

SEQ ID NO: 5943020 - DNA, 25 bp, Homo sapien
gtttggaaatgaagagggaaccagt

SEQ ID NO: 5943021 - DNA, 25 bp, Homo sapien
catatgcaacagtttcatttctcag

SEQ ID NO: 5943022 - DNA, 25 bp, Homo sapien
acctcaaatgagtgttgaacctttc

SEQ ID NO: 5943023 - DNA, 25 bp, Homo sapien
agccttatgatattgtataaaatat

SEQ ID NO: 5943024 - DNA, 25 bp, Homo sapien
aagatcttccttgtgagtaaattct

SEQ ID NO: 5943025 - DNA, 25 bp, Homo sapien
agttcacctgggacctcaaatgagt

SEQ ID NO: 5943026 - DNA, 25 bp, Homo sapien
ttaagagaaaaattataaacatagc

SEQ ID NO: 5943027 - DNA, 25 bp, Homo sapien
aaaagatgattagttttacctacat

SEQ ID NO: 5943028 - DNA, 25 bp, Homo sapien
gcctgtgctaattcccgggaaaaag

SEQ ID NO: 5943029 - DNA, 25 bp, Homo sapien
tctcagctacagcaatacttgactg

SEQ ID NO: 5943030 - DNA, 25 bp, Homo sapien
taacactaatagacagaatcttaaa

SEQ ID NO: 5943031 - DNA, 25 bp, Homo sapien
actaatagacagaatcttaaatgtg

SEQ ID NO: 5943032 - DNA, 25 bp, Homo sapien
atgccagagacaaacagtggacata

SEQ ID NO: 5943033 - DNA, 25 bp, Homo sapien
gatcttccttgtgagtaaattctta

SEQ ID NO: 5943034 - DNA, 25 bp, Homo sapien
tgggcatctgggtcagttcacctgg

SEQ ID NO: 5943035 - DNA, 25 bp, Homo sapien
gattgaaaggaatggtaggtagcca

SEQ ID NO: 5943036 - DNA, 25 bp, Homo sapien
tagaaatagcgtgtcatggatactc

SEQ ID NO: 5943037 - DNA, 25 bp, Homo sapien
ttttcttctcagctacagcaatact

SEQ ID NO: 5943038 - DNA, 25 bp, Homo sapien
taaaaatcctgggatcttggaattt

SEQ ID NO: 5943039 - DNA, 25 bp, Homo sapien
tcttactactaatttataggtgaaa

SEQ ID NO: 5943040 - DNA, 25 bp, Homo sapien
ttgattgaaaggaatggtaggtagc

SEQ ID NO: 5943041 - DNA, 25 bp, Homo sapien
tttaaaaatcctgggatcttggaat

SEQ ID NO: 5943042 - DNA, 25 bp, Homo sapien
tgaacctttcgaaaaatttcctcca

SEQ ID NO: 5943043 - DNA, 25 bp, Homo sapien
tcatgcaaaattttacgtatcaggt

SEQ ID NO: 5943044 - DNA, 25 bp, Homo sapien
ttgtagaagaattcaattttgcata

SEQ ID NO: 5943045 - DNA, 25 bp, Homo sapien
caaaaggtgtatcatctttgttctt

SEQ ID NO: 5943046 - DNA, 25 bp, Homo sapien
gaatttcatagaatattttgtctca

SEQ ID NO: 5943047 - DNA, 25 bp, Homo sapien
ttcagacatgttctttagtgtcttt

SEQ ID NO: 5943048 - DNA, 25 bp, Homo sapien
aaccatgtatgccagagacaaacag

SEQ ID NO: 5943049 - DNA, 25 bp, Homo sapien
ttctcagctacattgtagataagat

SEQ ID NO: 5943050 - DNA, 25 bp, Homo sapien
gactgggaactgcatgagagttgcc

SEQ ID NO: 5943051 - DNA, 25 bp, Homo sapien
aatcctgggatcttggaattttctt

SEQ ID NO: 5943052 - DNA, 25 bp, Homo sapien
tatcttattcctaaaagatgattag

SEQ ID NO: 5943053 - DNA, 25 bp, Homo sapien
ggaatggtaggtagccactaggcat

SEQ ID NO: 5943054 - DNA, 25 bp, Homo sapien
ttccttgtgagtaaattcttactac

SEQ ID NO: 5943055 - DNA, 25 bp, Homo sapien
caatagtgggcatctgggtcagttc

SEQ ID NO: 5943056 - DNA, 25 bp, Homo sapien
gaaggaaggaacgaatctatacttt

SEQ ID NO: 5943057 - DNA, 25 bp, Homo sapien
ttgaagcagtcaatgagtttggaaa

SEQ ID NO: 5943058 - DNA, 25 bp, Homo sapien
tttcatgcaaaattttacgtatcag

SEQ ID NO: 5943059 - DNA, 25 bp, Homo sapien
cattttacaaagaagaagttccagg

SEQ ID NO: 5943060 - DNA, 25 bp, Homo sapien
aagtaaaagatgagcagatttggaa

SEQ ID NO: 5943061 - DNA, 25 bp, Homo sapien
tttacctacatatgcaacagtttca

SEQ ID NO: 5943062 - DNA, 25 bp, Homo sapien
aaatttgtcaattataaacatagca

SEQ ID NO: 5943063 - DNA, 25 bp, Homo sapien
ctgggatcttggaattttcttttct

SEQ ID NO: 5943064 - DNA, 25 bp, Homo sapien
tgtgctaattcccgggaaaaaggta

SEQ ID NO: 5943065 - DNA, 25 bp, Homo sapien
ccttgtgagtaaattcttactacta

SEQ ID NO: 5943066 - DNA, 25 bp, Homo sapien
aaaataaagtaaaagatgagcagat

SEQ ID NO: 5943067 - DNA, 25 bp, Homo sapien
tcctgggatcttggaattttctttt

SEQ ID NO: 5943068 - DNA, 25 bp, Homo sapien
gggatcttggaattttcttttcttc

SEQ ID NO: 5943069 - DNA, 25 bp, Homo sapien
agcagatttggaaggaaggaacgaa

SEQ ID NO: 5943070 - DNA, 25 bp, Homo sapien
gtagaagaattcaattttgcataga

SEQ ID NO: 5943071 - DNA, 25 bp, Homo sapien
tgaaagtggttcatcaaaaggtgta

SEQ ID NO: 5943072 - DNA, 25 bp, Homo sapien
aaatttgtcaattatatcctaagaa

SEQ ID NO: 5943073 - DNA, 25 bp, Homo sapien
catggatactctctcaatagtgggc

SEQ ID NO: 5943074 - DNA, 25 bp, Homo sapien
atagtgggcatctgggtcagttcac

SEQ ID NO: 5943075 - DNA, 25 bp, Homo sapien
aatcttaaatgtgtatgtgtgagta

SEQ ID NO: 5943076 - DNA, 25 bp, Homo sapien
ttacaaagaagaagttccaggatat

SEQ ID NO: 5943077 - DNA, 25 bp, Homo sapien
tgcaacagtttcatttctcagctac

SEQ ID NO: 5943078 - DNA, 25 bp, Homo sapien
aatttataggtgaaagtggttcatc

SEQ ID NO: 5943079 - DNA, 25 bp, Homo sapien
tttcttttcttctcagctacagcaa

SEQ ID NO: 5943080 - DNA, 25 bp, Homo sapien
aggaaggaacgaatctatacttttc

SEQ ID NO: 5943081 - DNA, 25 bp, Homo sapien
acttgactgggaactgcatgagagt

SEQ ID NO: 5943082 - DNA, 25 bp, Homo sapien
ttgtgagtaaattcttactactaat

SEQ ID NO: 5943083 - DNA, 25 bp, Homo sapien
cagtcaatgagtttggaaatgaaga

SEQ ID NO: 5943084 - DNA, 25 bp, Homo sapien
aagaagttccaggatatgttcagac

SEQ ID NO: 5943085 - DNA, 25 bp, Homo sapien
tatatcctaagaaattgattgaaag

SEQ ID NO: 5943086 - DNA, 25 bp, Homo sapien
attttcttttcttctcagctacagc

SEQ ID NO: 5943087 - DNA, 25 bp, Homo sapien
tatggaaattatctagccttatgat

SEQ ID NO: 5943088 - DNA, 25 bp, Homo sapien
gaaaaaggtagaaatagcgtgtcat

SEQ ID NO: 5943089 - DNA, 25 bp, Homo sapien
gcatttaagagaaaaattataaaca

SEQ ID NO: 5943090 - DNA, 25 bp, Homo sapien
ctctcaatagtgggcatctgggtca

SEQ ID NO: 5943091 - DNA, 25 bp, Homo sapien
tcctaagaaattgattgaaaggaat

SEQ ID NO: 5943092 - DNA, 25 bp, Homo sapien
gcaaaattttacgtatcaggtttcc

SEQ ID NO: 5943093 - DNA, 25 bp, Homo sapien
gatactctctcaatagtgggcatct

SEQ ID NO: 5943094 - DNA, 25 bp, Homo sapien
ttactactaatttataggtgaaagt

SEQ ID NO: 5943095 - DNA, 25 bp, Homo sapien
tcctaaaagatgattagttttacct

SEQ ID NO: 5943096 - DNA, 25 bp, Homo sapien
tatttcaataacactaatagacaga

SEQ ID NO: 5943097 - DNA, 25 bp, Homo sapien
acaaagaagaagttccaggatatgt

SEQ ID NO: 5943098 - DNA, 25 bp, Homo sapien
aacagtggacataaacctctttatc

SEQ ID NO: 5943099 - DNA, 25 bp, Homo sapien
tggttcatcaaaaggtgtatcatct

SEQ ID NO: 5943100 - DNA, 25 bp, Homo sapien
tgagcagatttggaaggaaggaacg

SEQ ID NO: 5943101 - DNA, 25 bp, Homo sapien
agccactaggcatgaaaaccatgta

SEQ ID NO: 5943102 - DNA, 25 bp, Homo sapien
aagagaaaaattataaacatagcat

SEQ ID NO: 5943103 - DNA, 25 bp, Homo sapien
catctgggtcagttcacctgggacc

SEQ ID NO: 5943104 - DNA, 25 bp, Homo sapien
agtttcatttctcagctacattgta

SEQ ID NO: 5943105 - DNA, 25 bp, Homo sapien
gaagcagtcaatgagtttggaaatg

SEQ ID NO: 5943106 - DNA, 25 bp, Homo sapien
agacagaatcttaaatgtgtatgtg

SEQ ID NO: 5943107 - DNA, 25 bp, Homo sapien
ctccaaatgataacaccaacagtac

SEQ ID NO: 5943108 - DNA, 25 bp, Homo sapien
aaaaccatgtatgccagagacaaac

SEQ ID NO: 5943109 - DNA, 25 bp, Homo sapien
cagctacattgtagataagatcttc

SEQ ID NO: 5943110 - DNA, 25 bp, Homo sapien
gataacaccaacagtactttttgaa

SEQ ID NO: 5943111 - DNA, 25 bp, Homo sapien
gttcatcaaaaggtgtatcatcttt

SEQ ID NO: 5943112 - DNA, 25 bp, Homo sapien
ctttttgaagcagtcaatgagtttg

SEQ ID NO: 5943113 - DNA, 25 bp, Homo sapien
tctaggatttatttcaataacacta

SEQ ID NO: 5943114 - DNA, 25 bp, Homo sapien
ttatctagccttatgatattgtata

SEQ ID NO: 5943115 - DNA, 25 bp, Homo sapien
atttaagagaaaaattataaacata

SEQ ID NO: 5943116 - DNA, 25 bp, Homo sapien
agataagatcttccttgtgagtaaa

SEQ ID NO: 5943117 - DNA, 25 bp, Homo sapien
aaaggtgtatcatctttgttcttta

SEQ ID NO: 5943118 - DNA, 25 bp, Homo sapien
tttatttcaataacactaatagaca

SEQ ID NO: 5943119 - DNA, 25 bp, Homo sapien
caacagtttcatttctcagctacat

SEQ ID NO: 5943120 - DNA, 25 bp, Homo sapien
gtaaaagatgagcagatttggaagg

SEQ ID NO: 5943121 - DNA, 25 bp, Homo sapien
atttctcagctacattgtagataag

SEQ ID NO: 5943122 - DNA, 25 bp, Homo sapien
aaatgataacaccaacagtactttt

SEQ ID NO: 5943123 - DNA, 25 bp, Homo sapien
tacattgtagataagatcttccttg

SEQ ID NO: 5943124 - DNA, 25 bp, Homo sapien
attagttttacctacatatgcaaca

SEQ ID NO: 5943125 - DNA, 25 bp, Homo sapien
ctctctcaatagtgggcatctgggt

SEQ ID NO: 5943126 - DNA, 25 bp, Homo sapien
aaaaatgtgcaaatataaatttaat

SEQ ID NO: 5943127 - DNA, 25 bp, Homo sapien
aggtgggcttcatcacatacttgta

SEQ ID NO: 5943128 - DNA, 25 bp, Homo sapien
gcataaatttgtcaattataaacat

SEQ ID NO: 5943129 - DNA, 25 bp, Homo sapien
aataacactaatagacagaatctta

SEQ ID NO: 5943130 - DNA, 25 bp, Homo sapien
gacaaacagtggacataaacctctt

SEQ ID NO: 5943131 - DNA, 25 bp, Homo sapien
ggcatgaaaaccatgtatgccagag

SEQ ID NO: 5943132 - DNA, 25 bp, Homo sapien
cctgggacctcaaatgagtgttgaa

SEQ ID NO: 5943133 - DNA, 25 bp, Homo sapien
aaatgtgtatgtgtgagtatatctt

SEQ ID NO: 5943134 - DNA, 25 bp, Homo sapien
ttcttctcagctacagcaatacttg

SEQ ID NO: 5943135 - DNA, 25 bp, Homo sapien
ttacaaaaatgtgcaaatataaatt

SEQ ID NO: 5943136 - DNA, 25 bp, Homo sapien
atttgtcaattatatcctaagaaat

SEQ ID NO: 5943137 - DNA, 25 bp, Homo sapien
gatcttggaattttcttttcttctc

SEQ ID NO: 5943138 - DNA, 25 bp, Homo sapien
acatacttgtagaagaattcaattt

SEQ ID NO: 5943139 - DNA, 25 bp, Homo sapien
cattttacaaaaatgtgcaaatata

SEQ ID NO: 5943140 - DNA, 25 bp, Homo sapien
tcagctacagcaatacttgactggg

SEQ ID NO: 5943141 - DNA, 25 bp, Homo sapien
tctttgttctttagtgtctttttcc

SEQ ID NO: 5943142 - DNA, 25 bp, Homo sapien
taataaaataaagtaaaagatgagc

SEQ ID NO: 5943143 - DNA, 25 bp, Homo sapien
ttcatagaatattttgtctcaaaat

SEQ ID NO: 5943144 - DNA, 25 bp, Homo sapien
ctcaaatgagtgttgaacctttcga

SEQ ID NO: 5943145 - DNA, 25 bp, Homo sapien
tgagtgttgaacctttcgaaaaatt

SEQ ID NO: 5943146 - DNA, 25 bp, Homo sapien
tgaaaaccatgtatgccagagacaa

SEQ ID NO: 5943147 - DNA, 25 bp, Homo sapien
tctaactgaaaagttttacacattt

SEQ ID NO: 5943148 - DNA, 25 bp, Homo sapien
tttataggtgaaagtggttcatcaa

SEQ ID NO: 5943149 - DNA, 25 bp, Homo sapien
aagatgattagttttacctacatat

SEQ ID NO: 5943150 - DNA, 25 bp, Homo sapien
atgtgtatgtgtgagtatatcttat

SEQ ID NO: 5943151 - DNA, 25 bp, Homo sapien
acaaaaatgtgcaaatataaattta

SEQ ID NO: 5943152 - DNA, 25 bp, Homo sapien
ggacataaacctctttatcttattc

SEQ ID NO: 5943153 - DNA, 25 bp, Homo sapien
aagaaattgattgaaaggaatggta

SEQ ID NO: 5943154 - DNA, 25 bp, Homo sapien
atttgtcaattataaacatagcata

SEQ ID NO: 5943155 - DNA, 25 bp, Homo sapien
caatgagtttggaaatgaagaggga

SEQ ID NO: 5943156 - DNA, 25 bp, Homo sapien
tgcatagaatttcatagaatatttt

SEQ ID NO: 5943157 - DNA, 25 bp, Homo sapien
tatacttttcatgcaaaattttacg

SEQ ID NO: 5943158 - DNA, 25 bp, Homo sapien
gtagataagatcttccttgtgagta

SEQ ID NO: 5943159 - DNA, 25 bp, Homo sapien
tcttaaatgtgtatgtgtgagtata

SEQ ID NO: 5943160 - DNA, 25 bp, Homo sapien
ttttgtctcaaaattgtctttaatg

SEQ ID NO: 5943161 - DNA, 25 bp, Homo sapien
tgggacctcaaatgagtgttgaacc

SEQ ID NO: 5943162 - DNA, 25 bp, Homo sapien
tctgggtcagttcacctgggacctc

SEQ ID NO: 5943163 - DNA, 25 bp, Homo sapien
agtactttttgaagcagtcaatgag

SEQ ID NO: 5943164 - DNA, 25 bp, Homo sapien
atgcaaaattttacgtatcaggttt

SEQ ID NO: 5943165 - DNA, 25 bp, Homo sapien
agtggttcatcaaaaggtgtatcat

SEQ ID NO: 5943166 - DNA, 25 bp, Homo sapien
tataaacatagcataaatttgtcaa

SEQ ID NO: 5943167 - DNA, 25 bp, Homo sapien
tcttattcctaaaagatgattagtt

SEQ ID NO: 5943168 - DNA, 25 bp, Homo sapien
actactaatttataggtgaaagtgg

SEQ ID NO: 5943169 - DNA, 25 bp, Homo sapien
aggtgtatcatctttgttctttagt

SEQ ID NO: 5943170 - DNA, 25 bp, Homo sapien
tataggtgaaagtggttcatcaaaa

SEQ ID NO: 5943171 - DNA, 25 bp, Homo sapien
taaagtaaaagatgagcagatttgg

SEQ ID NO: 5943172 - DNA, 25 bp, Homo sapien
attatatcctaagaaattgattgaa

SEQ ID NO: 5943173 - DNA, 25 bp, Homo sapien
actaggcatgaaaaccatgtatgcc

SEQ ID NO: 5943174 - DNA, 25 bp, Homo sapien
tttggaaggaaggaacgaatctata

SEQ ID NO: 5943175 - DNA, 25 bp, Homo sapien
atacttgactgggaactgcatgaga

SEQ ID NO: 5943176 - DNA, 25 bp, Homo sapien
cttctcagctacagcaatacttgac

SEQ ID NO: 5943177 - DNA, 25 bp, Homo sapien
tggtaggtagccactaggcatgaaa

SEQ ID NO: 5943178 - DNA, 25 bp, Homo sapien
tacatatgcaacagtttcatttctc

SEQ ID NO: 5943179 - DNA, 25 bp, Homo sapien
gagtttggaaatgaagagggaacca

SEQ ID NO: 5943180 - DNA, 25 bp, Homo sapien
cagacatgttctttagtgtcttttt

SEQ ID NO: 5943181 - DNA, 25 bp, Homo sapien
aagaattcaattttgcatagaattt

SEQ ID NO: 5943182 - DNA, 25 bp, Homo sapien
gtagccactaggcatgaaaaccatg

SEQ ID NO: 5943183 - DNA, 25 bp, Homo sapien
cacatttaaaaatcctgggatcttg

SEQ ID NO: 5943184 - DNA, 25 bp, Homo sapien
taaacatagcataaatttgtcaatt

SEQ ID NO: 5943185 - DNA, 25 bp, Homo sapien
taggtgaaagtggttcatcaaaagg

SEQ ID NO: 5943186 - DNA, 25 bp, Homo sapien
tgtttctaggatttatttcaataac

SEQ ID NO: 5943187 - DNA, 25 bp, Homo sapien
tacttttcatgcaaaattttacgta

SEQ ID NO: 5943188 - DNA, 25 bp, Homo sapien
tttaataaaataaagtaaaagatga

SEQ ID NO: 5943189 - DNA, 25 bp, Homo sapien
gatgagcagatttggaaggaaggaa

SEQ ID NO: 5943190 - DNA, 25 bp, Homo sapien
tttcaataacactaatagacagaat

SEQ ID NO: 5943191 - DNA, 25 bp, Homo sapien
ctagccttatgatattgtataaaat

SEQ ID NO: 5943192 - DNA, 25 bp, Homo sapien
gaaattgattgaaaggaatggtagg

SEQ ID NO: 5943193 - DNA, 25 bp, Homo sapien
cttttcatgcaaaattttacgtatc

SEQ ID NO: 5943194 - DNA, 25 bp, Homo sapien
atagacagaatcttaaatgtgtatg

SEQ ID NO: 5943195 - DNA, 25 bp, Homo sapien
ttcacctgggacctcaaatgagtgt

SEQ ID NO: 5943196 - DNA, 25 bp, Homo sapien
catcacatacttgtagaagaattca

SEQ ID NO: 5943197 - DNA, 25 bp, Homo sapien
gaaggaacgaatctatacttttcat

SEQ ID NO: 5943198 - DNA, 25 bp, Homo sapien
tgtataaaatatctaactgaaaagt

SEQ ID NO: 5943199 - DNA, 25 bp, Homo sapien
ttgaaaggaatggtaggtagccact

SEQ ID NO: 5943200 - DNA, 25 bp, Homo sapien
agaagaagttccaggatatgttcag

SEQ ID NO: 5943201 - DNA, 25 bp, Homo sapien
tttctaggatttatttcaataacac

SEQ ID NO: 5943202 - DNA, 25 bp, Homo sapien
gcttcatcacatacttgtagaagaa

SEQ ID NO: 5943203 - DNA, 25 bp, Homo sapien
cattgtagataagatcttccttgtg

SEQ ID NO: 5943204 - DNA, 25 bp, Homo sapien
aggtgttaacaacttcgacgaaatc

SEQ ID NO: 5943205 - DNA, 25 bp, Homo sapien
tgaaggtcactgacggtgttatggt

SEQ ID NO: 5943206 - DNA, 25 bp, Homo sapien
ttatctgtgctacccaaatgttgga

SEQ ID NO: 5943207 - DNA, 25 bp, Homo sapien
ctggtaccaccaccaacgatgttga

SEQ ID NO: 5943208 - DNA, 25 bp, Homo sapien
gtcaagaacggtgtccacatggtct

SEQ ID NO: 5943209 - DNA, 25 bp, Homo sapien
atctacgttgatgatggtgttttgt

SEQ ID NO: 5943210 - DNA, 25 bp, Homo sapien
acgaataccacaagtctgtcattga

SEQ ID NO: 5943211 - DNA, 25 bp, Homo sapien
ttgaaggtcaaggctttgaacgccg

SEQ ID NO: 5943212 - DNA, 25 bp, Homo sapien
caaccagagctgaagtttccgatgt

SEQ ID NO: 5943213 - DNA, 25 bp, Homo sapien
atgagaaactgtactccaaagccaa

SEQ ID NO: 5943214 - DNA, 25 bp, Homo sapien
aacgccagaaagtccgaagaattgt

SEQ ID NO: 5943215 - DNA, 25 bp, Homo sapien
gaaaccgctgtcattgctgaacaag

SEQ ID NO: 5943216 - DNA, 25 bp, Homo sapien
aaggctggtttgaacattgtccgta

SEQ ID NO: 5943217 - DNA, 25 bp, Homo sapien
tcttcccattcgttttcgaaaagga

SEQ ID NO: 5943218 - DNA, 25 bp, Homo sapien
gtttccaagtacagaccaaactgtc

SEQ ID NO: 5943219 - DNA, 25 bp, Homo sapien
ggtatcttgaagaagggtgacactt

SEQ ID NO: 5943220 - DNA, 25 bp, Homo sapien
taacaacttcgacgaaatcttgaag

SEQ ID NO: 5943221 - DNA, 25 bp, Homo sapien
agaccaaccagagctgaagtttccg

SEQ ID NO: 5943222 - DNA, 25 bp, Homo sapien
aaggacgtcaagatcattgtcaaga

SEQ ID NO: 5943223 - DNA, 25 bp, Homo sapien
aaccgtcgctgcctccgctgtcgct

SEQ ID NO: 5943224 - DNA, 25 bp, Homo sapien
cttgagaagaacctccatcattggt

SEQ ID NO: 5943225 - DNA, 25 bp, Homo sapien
atgcccaagagctgctagattctct

SEQ ID NO: 5943226 - DNA, 25 bp, Homo sapien
atggttgccagaggtgacttgggta

SEQ ID NO: 5943227 - DNA, 25 bp, Homo sapien
ctttggacaccaagggtccagaaat

SEQ ID NO: 5943228 - DNA, 25 bp, Homo sapien
caaggaagatttgagattcggtgtc

SEQ ID NO: 5943229 - DNA, 25 bp, Homo sapien
aagctatcgcttacttgccaaacta

SEQ ID NO: 5943230 - DNA, 25 bp, Homo sapien
gctgaagtttccgatgtcggtaacg

SEQ ID NO: 5943231 - DNA, 25 bp, Homo sapien
ctttgaaggtcaaggctttgaacgc

SEQ ID NO: 5943232 - DNA, 25 bp, Homo sapien
tacgctaaggcttgtgacgacaaga

SEQ ID NO: 5943233 - DNA, 25 bp, Homo sapien
gtttccgatgtcggtaacgctatct

SEQ ID NO: 5943234 - DNA, 25 bp, Homo sapien
cgttaccactatggctgaaaccgct

SEQ ID NO: 5943235 - DNA, 25 bp, Homo sapien
tgaacgccggtaagatctgttccca

SEQ ID NO: 5943236 - DNA, 25 bp, Homo sapien
gattcggtgtcaagaacggtgtcca

SEQ ID NO: 5943237 - DNA, 25 bp, Homo sapien
cagaagtcttggctgtccaaaagaa

SEQ ID NO: 5943238 - DNA, 25 bp, Homo sapien
gtcttgggtgaacaaggtaaggacg

SEQ ID NO: 5943239 - DNA, 25 bp, Homo sapien
agccagttatctgtgctacccaaat

SEQ ID NO: 5943240 - DNA, 25 bp, Homo sapien
gaaaccgtcgctgcctccgctgtcg

SEQ ID NO: 5943241 - DNA, 25 bp, Homo sapien
tgtacgttgactacaagaacatcac

SEQ ID NO: 5943242 - DNA, 25 bp, Homo sapien
tacccaatcaacgccgttaccacta

SEQ ID NO: 5943243 - DNA, 25 bp, Homo sapien
ctgttcccacaagggtgtcaactta

SEQ ID NO: 5943244 - DNA, 25 bp, Homo sapien
gtccacatggtcttcgcttctttca

SEQ ID NO: 5943245 - DNA, 25 bp, Homo sapien
acctccatcattggtaccatcggtc

SEQ ID NO: 5943246 - DNA, 25 bp, Homo sapien
atgacaagtacgctaaggcttgtga

SEQ ID NO: 5943247 - DNA, 25 bp, Homo sapien
cgctgcctccgctgtcgctgctgtt

SEQ ID NO: 5943248 - DNA, 25 bp, Homo sapien
ttgacgacaagactttgaaggtcaa

SEQ ID NO: 5943249 - DNA, 25 bp, Homo sapien
acaagctatcgcttacttgccaaac

SEQ ID NO: 5943250 - DNA, 25 bp, Homo sapien
gggtattgaaatcccagccccagaa

SEQ ID NO: 5943251 - DNA, 25 bp, Homo sapien
ttggctggtaagccagttatctgtg

SEQ ID NO: 5943252 - DNA, 25 bp, Homo sapien
ttttggaagtcgttgacgacaagac

SEQ ID NO: 5943253 - DNA, 25 bp, Homo sapien
atgtcgatttgccagctttgtctga

SEQ ID NO: 5943254 - DNA, 25 bp, Homo sapien
ctttgagaaaggctggtttgaacat

SEQ ID NO: 5943255 - DNA, 25 bp, Homo sapien
ggaatccatgacttacaacccaaga

SEQ ID NO: 5943256 - DNA, 25 bp, Homo sapien
tccaagttttggaagtcgttgacga

SEQ ID NO: 5943257 - DNA, 25 bp, Homo sapien
ggtaactacccaatcaacgccgtta

SEQ ID NO: 5943258 - DNA, 25 bp, Homo sapien
tcggtatcttgaagaagggtgacac

SEQ ID NO: 5943259 - DNA, 25 bp, Homo sapien
gatcttcaccaccgatgacaagtac

SEQ ID NO: 5943260 - DNA, 25 bp, Homo sapien
ttcaccaccgatgacaagtacgcta

SEQ ID NO: 5943261 - DNA, 25 bp, Homo sapien
aggctaaggaattcggtatcttgaa

SEQ ID NO: 5943262 - DNA, 25 bp, Homo sapien
gccaacctccaccaccgaaaccgtc

SEQ ID NO: 5943263 - DNA, 25 bp, Homo sapien
gtccgtatgaacttctctcacggtt

SEQ ID NO: 5943264 - DNA, 25 bp, Homo sapien
cggtattgaaaaggctaaggaattc

SEQ ID NO: 5943265 - DNA, 25 bp, Homo sapien
aaaagaaattgattgctaagtctaa

SEQ ID NO: 5943266 - DNA, 25 bp, Homo sapien
attgctttggacaccaagggtccag

SEQ ID NO: 5943267 - DNA, 25 bp, Homo sapien
ggcttgtgacgacaagatcatgtac

SEQ ID NO: 5943268 - DNA, 25 bp, Homo sapien
tgtccacttccggtaccaccccaag

SEQ ID NO: 5943269 - DNA, 25 bp, Homo sapien
ggctatcattgtcttgtccacttcc

SEQ ID NO: 5943270 - DNA, 25 bp, Homo sapien
ttgggtattgaaatcccagccccag

SEQ ID NO: 5943271 - DNA, 25 bp, Homo sapien
ggtcactgacggtgttatggttgcc

SEQ ID NO: 5943272 - DNA, 25 bp, Homo sapien
tgacaacgccagaaagtccgaagaa

SEQ ID NO: 5943273 - DNA, 25 bp, Homo sapien
acttgccaaactacgatgacatgag

SEQ ID NO: 5943274 - DNA, 25 bp, Homo sapien
aacgccggtaagatctgttcccaca

SEQ ID NO: 5943275 - DNA, 25 bp, Homo sapien
aaggtcactgacggtgttatggttg

SEQ ID NO: 5943276 - DNA, 25 bp, Homo sapien
atttgagattcggtgtcaagaacgg

SEQ ID NO: 5943277 - DNA, 25 bp, Homo sapien
caaactgtccaatcatcttggttac

SEQ ID NO: 5943278 - DNA, 25 bp, Homo sapien
tttccatccaaggtttcaaggccgg

SEQ ID NO: 5943279 - DNA, 25 bp, Homo sapien
atcatgtacgttgactacaagaaca

SEQ ID NO: 5943280 - DNA, 25 bp, Homo sapien
gaaatcagaactggtaccaccacca

SEQ ID NO: 5943281 - DNA, 25 bp, Homo sapien
tttcgaacaaaaggccaaggctatc

SEQ ID NO: 5943282 - DNA, 25 bp, Homo sapien
aaatcccagccccagaagtcttggc

SEQ ID NO: 5943283 - DNA, 25 bp, Homo sapien
acaagactttgaaggtcaaggcttt

SEQ ID NO: 5943284 - DNA, 25 bp, Homo sapien
ccaagtacagaccaaactgtccaat

SEQ ID NO: 5943285 - DNA, 25 bp, Homo sapien
aggtttcaaggccggtgctggtcac

SEQ ID NO: 5943286 - DNA, 25 bp, Homo sapien
aatgttggaatccatgacttacaac

SEQ ID NO: 5943287 - DNA, 25 bp, Homo sapien
accgatgtcgatttgccagctttgt

SEQ ID NO: 5943288 - DNA, 25 bp, Homo sapien
aagactttgaaggtcaaggctttga

SEQ ID NO: 5943289 - DNA, 25 bp, Homo sapien
ttgctaagtctaacttggctggtaa

SEQ ID NO: 5943290 - DNA, 25 bp, Homo sapien
ccagttatctgtgctacccaaatgt

SEQ ID NO: 5943291 - DNA, 25 bp, Homo sapien
attcggtatcttgaagaagggtgac

SEQ ID NO: 5943292 - DNA, 25 bp, Homo sapien
caccgaaaccgtcgctgcctccgct

SEQ ID NO: 5943293 - DNA, 25 bp, Homo sapien
caagatcatgtacgttgactacaag

SEQ ID NO: 5943294 - DNA, 25 bp, Homo sapien
tgtctgaaaaggacaaggaagattt

SEQ ID NO: 5943295 - DNA, 25 bp, Homo sapien
agcccgtatcaacttcggtattgaa

SEQ ID NO: 5943296 - DNA, 25 bp, Homo sapien
cagaggtgacttgggtattgaaatc

SEQ ID NO: 5943297 - DNA, 25 bp, Homo sapien
tcatcttggttaccagatgcccaag

SEQ ID NO: 5943298 - DNA, 25 bp, Homo sapien
taccaccccaagattggtttccaag

SEQ ID NO: 5943299 - DNA, 25 bp, Homo sapien
cggttcttacgaataccacaagtct

SEQ ID NO: 5943300 - DNA, 25 bp, Homo sapien
accattggccattgctttggacacc

SEQ ID NO: 5943301 - DNA, 25 bp, Homo sapien
tccatgacttacaacccaagaccaa

SEQ ID NO: 5943302 - DNA, 25 bp, Homo sapien
ttccgatgtcggtaacgctatcttg

SEQ ID NO: 5943303 - DNA, 25 bp, Homo sapien
acgatgacatgagaaactgtactcc

SEQ ID NO: 5943304 - DNA, 25 bp, Homo sapien
caaggtttcaaggccggtgctggtc

SEQ ID NO: 5943305 - DNA, 25 bp, Homo sapien
cacgaaatgatcttcaccaccgatg

SEQ ID NO: 5943306 - DNA, 25 bp, Homo sapien
accaacaaggtgttaacaacttcga

SEQ ID NO: 5943307 - DNA, 25 bp, Homo sapien
aagggtgacacttacgtttccatcc

SEQ ID NO: 5943308 - DNA, 25 bp, Homo sapien
attgacaacgccagaaagtccgaag

SEQ ID NO: 5943309 - DNA, 25 bp, Homo sapien
attgaaatcccagccccagaagtct

SEQ ID NO: 5943310 - DNA, 25 bp, Homo sapien
tgttatggttgccagaggtgacttg

SEQ ID NO: 5943311 - DNA, 25 bp, Homo sapien
ccaccgatgacaagtacgctaaggc

SEQ ID NO: 5943312 - DNA, 25 bp, Homo sapien
actccaaagccaacctccaccaccg

SEQ ID NO: 5943313 - DNA, 25 bp, Homo sapien
ccagaaagtccgaagaattgtaccc

SEQ ID NO: 5943314 - DNA, 25 bp, Homo sapien
cacaagtctgtcattgacaacgcca

SEQ ID NO: 5943315 - DNA, 25 bp, Homo sapien
gctttgtctgaaaaggacaaggaag

SEQ ID NO: 5943316 - DNA, 25 bp, Homo sapien
tccaaggtttcaaggccggtgctgg

SEQ ID NO: 5943317 - DNA, 25 bp, Homo sapien
gaataccacaagtctgtcattgaca

SEQ ID NO: 5943318 - DNA, 25 bp, Homo sapien
aagaacatcaccaaggtcatctccg

SEQ ID NO: 5943319 - DNA, 25 bp, Homo sapien
agatcatgtacgttgactacaagaa

SEQ ID NO: 5943320 - DNA, 25 bp, Homo sapien
atgatcttcaccaccgatgacaagt

SEQ ID NO: 5943321 - DNA, 25 bp, Homo sapien
tgaagtttccgatgtcggtaacgct

SEQ ID NO: 5943322 - DNA, 25 bp, Homo sapien
caacctccaccaccgaaaccgtcgc

SEQ ID NO: 5943323 - DNA, 25 bp, Homo sapien
gattgacctcattaaacgttgttgc

SEQ ID NO: 5943324 - DNA, 25 bp, Homo sapien
ggttgccagaggtgacttgggtatt

SEQ ID NO: 5943325 - DNA, 25 bp, Homo sapien
tgtcattgctgaacaagctatcgct

SEQ ID NO: 5943326 - DNA, 25 bp, Homo sapien
aggacaaggaagatttgagattcgg

SEQ ID NO: 5943327 - DNA, 25 bp, Homo sapien
aacattgtccgtatgaacttctctc

SEQ ID NO: 5943328 - DNA, 25 bp, Homo sapien
tggtttccaagtacagaccaaactg

SEQ ID NO: 5943329 - DNA, 25 bp, Homo sapien
aagagctgctagattctctcacttg

SEQ ID NO: 5943330 - DNA, 25 bp, Homo sapien
aacactttgcaagtctctaccgttt

SEQ ID NO: 5943331 - DNA, 25 bp, Homo sapien
atctgttcccacaagggtgtcaact

SEQ ID NO: 5943332 - DNA, 25 bp, Homo sapien
ttggctgtccaaaagaaattgattg

SEQ ID NO: 5943333 - DNA, 25 bp, Homo sapien
ccgctgtcgctgctgttttcgaaca

SEQ ID NO: 5943334 - DNA, 25 bp, Homo sapien
agggtccagaaatcagaactggtac

SEQ ID NO: 5943335 - DNA, 25 bp, Homo sapien
attgaaaaggctaaggaattcggta

SEQ ID NO: 5943336 - DNA, 25 bp, Homo sapien
ctagattagaaagattgacctcatt

SEQ ID NO: 5943337 - DNA, 25 bp, Homo sapien
cccgtatcaacttcggtattgaaaa

SEQ ID NO: 5943338 - DNA, 25 bp, Homo sapien
aggctttgaacgccggtaagatctg

SEQ ID NO: 5943339 - DNA, 25 bp, Homo sapien
gactgtgttatgttgtctggtgaaa

SEQ ID NO: 5943340 - DNA, 25 bp, Homo sapien
ggactgatgatgttgaagcccgtat

SEQ ID NO: 5943341 - DNA, 25 bp, Homo sapien
atcaacgccgttaccactatggctg

SEQ ID NO: 5943342 - DNA, 25 bp, Homo sapien
cttctttcatcagaaccgccaacga

SEQ ID NO: 5943343 - DNA, 25 bp, Homo sapien
gctggtagaatcatctacgttgatg

SEQ ID NO: 5943344 - DNA, 25 bp, Homo sapien
atcttgaaggtcactgacggtgtta

SEQ ID NO: 5943345 - DNA, 25 bp, Homo sapien
gtcgctgcctccgctgtcgctgctg

SEQ ID NO: 5943346 - DNA, 25 bp, Homo sapien
tcttcaccaccgatgacaagtacgc

SEQ ID NO: 5943347 - DNA, 25 bp, Homo sapien
catccaaggtttcaaggccggtgct

SEQ ID NO: 5943348 - DNA, 25 bp, Homo sapien
aaaccacgaaatgatcttcaccacc

SEQ ID NO: 5943349 - DNA, 25 bp, Homo sapien
caatcaacgccgttaccactatggc

SEQ ID NO: 5943350 - DNA, 25 bp, Homo sapien
ctgttttcgaacaaaaggccaaggc

SEQ ID NO: 5943351 - DNA, 25 bp, Homo sapien
tgacgacaagatcatgtacgttgac

SEQ ID NO: 5943352 - DNA, 25 bp, Homo sapien
gtgttttgtctttccaagttttgga

SEQ ID NO: 5943353 - DNA, 25 bp, Homo sapien
ccaacactttgcaagtctctaccgt

SEQ ID NO: 5943354 - DNA, 25 bp, Homo sapien
tcttggatggtgctgactgtgttat

SEQ ID NO: 5943355 - DNA, 25 bp, Homo sapien
tgctgactgtgttatgttgtctggt

SEQ ID NO: 5943356 - DNA, 25 bp, Homo sapien
gtaaggacgtcaagatcattgtcaa

SEQ ID NO: 5943357 - DNA, 25 bp, Homo sapien
ctgtgttatgttgtctggtgaaacc

SEQ ID NO: 5943358 - DNA, 25 bp, Homo sapien
tcgctgctgttttcgaacaaaaggc

SEQ ID NO: 5943359 - DNA, 25 bp, Homo sapien
tgacatgagaaactgtactccaaag

SEQ ID NO: 5943360 - DNA, 25 bp, Homo sapien
actacccaatcaacgccgttaccac

SEQ ID NO: 5943361 - DNA, 25 bp, Homo sapien
accaccgaaaccgtcgctgcctccg

SEQ ID NO: 5943362 - DNA, 25 bp, Homo sapien
gctgtcattgctgaacaagctatcg

SEQ ID NO: 5943363 - DNA, 25 bp, Homo sapien
gccggtgctggtcactccaacactt

SEQ ID NO: 5943364 - DNA, 25 bp, Homo sapien
aactggtaccaccaccaacgatgtt

SEQ ID NO: 5943365 - DNA, 25 bp, Homo sapien
aacgttgttgctggttctgacttga

SEQ ID NO: 5943366 - DNA, 25 bp, Homo sapien
ggtaccaccccaagattggtttcca

SEQ ID NO: 5943367 - DNA, 25 bp, Homo sapien
gtgacacttacgtttccatccaagg

SEQ ID NO: 5943368 - DNA, 25 bp, Homo sapien
tatcgcttacttgccaaactacgat

SEQ ID NO: 5943369 - DNA, 25 bp, Homo sapien
atctgtgctacccaaatgttggaat

SEQ ID NO: 5943370 - DNA, 25 bp, Homo sapien
gtgtcaagaacggtgtccacatggt

SEQ ID NO: 5943371 - DNA, 25 bp, Homo sapien
tccagaaatcagaactggtaccacc

SEQ ID NO: 5943372 - DNA, 25 bp, Homo sapien
actacccaatcccaccaaaccacga

SEQ ID NO: 5943373 - DNA, 25 bp, Homo sapien
ctctcacggttcttacgaataccac

SEQ ID NO: 5943374 - DNA, 25 bp, Homo sapien
ccaaaccacgaaatgatcttcacca

SEQ ID NO: 5943375 - DNA, 25 bp, Homo sapien
ctatcattgtcttgtccacttccgg

SEQ ID NO: 5943376 - DNA, 25 bp, Homo sapien
cattgtccgtatgaacttctctcac

SEQ ID NO: 5943377 - DNA, 25 bp, Homo sapien
tgttgtctggtgaaaccgccaaggg

SEQ ID NO: 5943378 - DNA, 25 bp, Homo sapien
ttgtcttgtccacttccggtaccac

SEQ ID NO: 5943379 - DNA, 25 bp, Homo sapien
acttgggtattgaaatcccagcccc

SEQ ID NO: 5943380 - DNA, 25 bp, Homo sapien
tcttggctgtccaaaagaaattgat

SEQ ID NO: 5943381 - DNA, 25 bp, Homo sapien
acaagggtgtcaacttaccaggtac

SEQ ID NO: 5943382 - DNA, 25 bp, Homo sapien
aggccggtgctggtcactccaacac

SEQ ID NO: 5943383 - DNA, 25 bp, Homo sapien
tgtgacgacaagatcatgtacgttg

SEQ ID NO: 5943384 - DNA, 25 bp, Homo sapien
ttaccactatggctgaaaccgctgt

SEQ ID NO: 5943385 - DNA, 25 bp, Homo sapien
ttctgacttgagaagaacctccatc

SEQ ID NO: 5943386 - DNA, 25 bp, Homo sapien
tttgaacgccggtaagatctgttcc

SEQ ID NO: 5943387 - DNA, 25 bp, Homo sapien
aaccgctgtcattgctgaacaagct

SEQ ID NO: 5943388 - DNA, 25 bp, Homo sapien
ttgtacagaggtgtcttcccattcg

SEQ ID NO: 5943389 - DNA, 25 bp, Homo sapien
gccaaactacgatgacatgagaaac

SEQ ID NO: 5943390 - DNA, 25 bp, Homo sapien
gtgctacccaaatgttggaatccat

SEQ ID NO: 5943391 - DNA, 25 bp, Homo sapien
aggtaccgatgtcgatttgccagct

SEQ ID NO: 5943392 - DNA, 25 bp, Homo sapien
ttcgcttctttcatcagaaccgcca

SEQ ID NO: 5943393 - DNA, 25 bp, Homo sapien
gatgttgaagcccgtatcaacttcg

SEQ ID NO: 5943394 - DNA, 25 bp, Homo sapien
cgaaatcttgaaggtcactgacggt

SEQ ID NO: 5943395 - DNA, 25 bp, Homo sapien
tttgaccatcagagaagtcttgggt

SEQ ID NO: 5943396 - DNA, 25 bp, Homo sapien
caaactacgatgacatgagaaactg

SEQ ID NO: 5943397 - DNA, 25 bp, Homo sapien
tctaacttggctggtaagccagtta

SEQ ID NO: 5943398 - DNA, 25 bp, Homo sapien
gttttcgaacaaaaggccaaggcta

SEQ ID NO: 5943399 - DNA, 25 bp, Homo sapien
ccaccaccgaaaccgtcgctgcctc

SEQ ID NO: 5943400 - DNA, 25 bp, Homo sapien
tgggtgaacaaggtaaggacgtcaa

SEQ ID NO: 5943401 - DNA, 25 bp, Homo sapien
tgaaaccgccaagggtaactaccca

SEQ ID NO: 5943402 - DNA, 25 bp, Homo sapien
accaaccagagctgaagtttccgat

SEQ ID NO: 5943403 - DNA, 25 bp, Homo sapien
ctccatcattggtaccatcggtcca

SEQ ID NO: 5943404 - DNA, 25 bp, Homo sapien
gagaaaggctggtttgaacattgtc

SEQ ID NO: 5943405 - DNA, 25 bp, Homo sapien
cgctaaggcttgtgacgacaagatc

SEQ ID NO: 5943406 - DNA, 25 bp, Homo sapien
aacggtgtccacatggtcttcgctt

SEQ ID NO: 5943407 - DNA, 25 bp, Homo sapien
gactggactgatgatgttgaagccc

SEQ ID NO: 5943408 - DNA, 25 bp, Homo sapien
gtcaagattgaaaaccaacaaggtg

SEQ ID NO: 5943409 - DNA, 25 bp, Homo sapien
gactacaagaacatcaccaaggtca

SEQ ID NO: 5943410 - DNA, 25 bp, Homo sapien
gttttcgaaaaggaacctgtctctg

SEQ ID NO: 5943411 - DNA, 25 bp, Homo sapien
acccagaaaccttggttgctttgag

SEQ ID NO: 5943412 - DNA, 25 bp, Homo sapien
tttccaagttttggaagtcgttgac

SEQ ID NO: 5943413 - DNA, 25 bp, Homo sapien
cattggccattgctttggacaccaa

SEQ ID NO: 5943414 - DNA, 25 bp, Homo sapien
caatcccaccaaaccacgaaatgat

SEQ ID NO: 5943415 - DNA, 25 bp, Homo sapien
tcatctccgctggtagaatcatcta

SEQ ID NO: 5943416 - DNA, 25 bp, Homo sapien
atcaccaaggtcatctccgctggta

SEQ ID NO: 5943417 - DNA, 25 bp, Homo sapien
agggtgtcaacttaccaggtaccga

SEQ ID NO: 5943418 - DNA, 25 bp, Homo sapien
atggtgctgactgtgttatgttgtc

SEQ ID NO: 5943419 - DNA, 25 bp, Homo sapien
gacgacaagactttgaaggtcaagg

SEQ ID NO: 5943420 - DNA, 25 bp, Homo sapien
atgatgttgaagcccgtatcaactt

SEQ ID NO: 5943421 - DNA, 25 bp, Homo sapien
catgacttacaacccaagaccaacc

SEQ ID NO: 5943422 - DNA, 25 bp, Homo sapien
tgtcggtaacgctatcttggatggt

SEQ ID NO: 5943423 - DNA, 25 bp, Homo sapien
acgttgatgatggtgttttgtcttt

SEQ ID NO: 5943424 - DNA, 25 bp, Homo sapien
gacgaaatcttgaaggtcactgacg

SEQ ID NO: 5943425 - DNA, 25 bp, Homo sapien
atgttgactacccaatcccaccaaa

SEQ ID NO: 5943426 - DNA, 25 bp, Homo sapien
tgttgaagcccgtatcaacttcggt

SEQ ID NO: 5943427 - DNA, 25 bp, Homo sapien
tcagagaagtcttgggtgaacaagg

SEQ ID NO: 5943428 - DNA, 25 bp, Homo sapien
cgatgttgactacccaatcccacca

SEQ ID NO: 5943429 - DNA, 25 bp, Homo sapien
agaagggtgacacttacgtttccat

SEQ ID NO: 5943430 - DNA, 25 bp, Homo sapien
tgactacccaatcccaccaaaccac

SEQ ID NO: 5943431 - DNA, 25 bp, Homo sapien
cgtatcaacttcggtattgaaaagg

SEQ ID NO: 5943432 - DNA, 25 bp, Homo sapien
gaaccgccaacgatgttttgaccat

SEQ ID NO: 5943433 - DNA, 25 bp, Homo sapien
tcaacttaccaggtaccgatgtcga

SEQ ID NO: 5943434 - DNA, 25 bp, Homo sapien
ataccacaagtctgtcattgacaac

SEQ ID NO: 5943435 - DNA, 25 bp, Homo sapien
aagtcttgggtgaacaaggtaagga

SEQ ID NO: 5943436 - DNA, 25 bp, Homo sapien
atcattgtcttgtccacttccggta

SEQ ID NO: 5943437 - DNA, 25 bp, Homo sapien
tggttgctttgagaaaggctggttt

SEQ ID NO: 5943438 - DNA, 25 bp, Homo sapien
ggtcatctccgctggtagaatcatc

SEQ ID NO: 5943439 - DNA, 25 bp, Homo sapien
ctctgactggactgatgatgttgaa

SEQ ID NO: 5943440 - DNA, 25 bp, Homo sapien
ccaggtaccgatgtcgatttgccag

SEQ ID NO: 5943441 - DNA, 25 bp, Homo sapien
gacctcattaaacgttgttgctggt

SEQ ID NO: 5943442 - DNA, 25 bp, Homo sapien
gtccaaaagaaattgattgctaagt

SEQ ID NO: 5943443 - DNA, 25 bp, Homo sapien
tgaaatcccagccccagaagtcttg

SEQ ID NO: 5943444 - DNA, 25 bp, Homo sapien
tacgtttccatccaaggtttcaagg

SEQ ID NO: 5943445 - DNA, 25 bp, Homo sapien
gaacaaaaggccaaggctatcattg

SEQ ID NO: 5943446 - DNA, 25 bp, Homo sapien
gctgctagattctctcacttgtaca

SEQ ID NO: 5943447 - DNA, 25 bp, Homo sapien
acgtcaagatcattgtcaagattga

SEQ ID NO: 5943448 - DNA, 25 bp, Homo sapien
acccaggtagaccattggccattgc

SEQ ID NO: 5943449 - DNA, 25 bp, Homo sapien
ctaaggcttgtgacgacaagatcat

SEQ ID NO: 5943450 - DNA, 25 bp, Homo sapien
agagaagtcttgggtgaacaaggta

SEQ ID NO: 5943451 - DNA, 25 bp, Homo sapien
tcatctacgttgatgatggtgtttt

SEQ ID NO: 5943452 - DNA, 25 bp, Homo sapien
gaacatcaccaaggtcatctccgct

SEQ ID NO: 5943453 - DNA, 25 bp, Homo sapien
ctgaaaccgctgtcattgctgaaca

SEQ ID NO: 5943454 - DNA, 25 bp, Homo sapien
cgttgactacaagaacatcaccaag

SEQ ID NO: 5943455 - DNA, 25 bp, Homo sapien
gttgctttgagaaaggctggtttga

SEQ ID NO: 5943456 - DNA, 25 bp, Homo sapien
acggtgttatggttgccagaggtga

SEQ ID NO: 5943457 - DNA, 25 bp, Homo sapien
cgccaacgatgttttgaccatcaga

SEQ ID NO: 5943458 - DNA, 25 bp, Homo sapien
ttggtaccatcggtccaaagaccaa

SEQ ID NO: 5943459 - DNA, 25 bp, Homo sapien
aacgatgttttgaccatcagagaag

SEQ ID NO: 5943460 - DNA, 25 bp, Homo sapien
ccatcggtccaaagaccaacaaccc

SEQ ID NO: 5943461 - DNA, 25 bp, Homo sapien
cttcgacgaaatcttgaaggtcact

SEQ ID NO: 5943462 - DNA, 25 bp, Homo sapien
tacgttgactacaagaacatcacca

SEQ ID NO: 5943463 - DNA, 25 bp, Homo sapien
ttggacaccaagggtccagaaatca

SEQ ID NO: 5943464 - DNA, 25 bp, Homo sapien
gacttgagaagaacctccatcattg

SEQ ID NO: 5943465 - DNA, 25 bp, Homo sapien
aagtccgaagaattgtacccaggta

SEQ ID NO: 5943466 - DNA, 25 bp, Homo sapien
atgaacttctctcacggttcttacg

SEQ ID NO: 5943467 - DNA, 25 bp, Homo sapien
caaagccaacctccaccaccgaaac

SEQ ID NO: 5943468 - DNA, 25 bp, Homo sapien
attgaaaaccaacaaggtgttaaca

SEQ ID NO: 5943469 - DNA, 25 bp, Homo sapien
tgaacaaggtaaggacgtcaagatc

SEQ ID NO: 5943470 - DNA, 25 bp, Homo sapien
ttctctcacggttcttacgaatacc

SEQ ID NO: 5943471 - DNA, 25 bp, Homo sapien
tagaaagattgacctcattaaacgt

SEQ ID NO: 5943472 - DNA, 25 bp, Homo sapien
agatcattgtcaagattgaaaacca

SEQ ID NO: 5943473 - DNA, 25 bp, Homo sapien
aggtagaccattggccattgctttg

SEQ ID NO: 5943474 - DNA, 25 bp, Homo sapien
atctccgctggtagaatcatctacg

SEQ ID NO: 5943475 - DNA, 25 bp, Homo sapien
tcattgctgaacaagctatcgctta

SEQ ID NO: 5943476 - DNA, 25 bp, Homo sapien
ttgaagaagggtgacacttacgttt

SEQ ID NO: 5943477 - DNA, 25 bp, Homo sapien
taccaccaccaacgatgttgactac

SEQ ID NO: 5943478 - DNA, 25 bp, Homo sapien
ccacatggtcttcgcttctttcatc

SEQ ID NO: 5943479 - DNA, 25 bp, Homo sapien
ttacttgccaaactacgatgacatg

SEQ ID NO: 5943480 - DNA, 25 bp, Homo sapien
ggtaccatcggtccaaagaccaaca

SEQ ID NO: 5943481 - DNA, 25 bp, Homo sapien
ggtgttatggttgccagaggtgact

SEQ ID NO: 5943482 - DNA, 25 bp, Homo sapien
cgccggtaagatctgttcccacaag

SEQ ID NO: 5943483 - DNA, 25 bp, Homo sapien
ctgactgtgttatgttgtctggtga

SEQ ID NO: 5943484 - DNA, 25 bp, Homo sapien
taacgctatcttggatggtgctgac

SEQ ID NO: 5943485 - DNA, 25 bp, Homo sapien
cagccccagaagtcttggctgtcca

SEQ ID NO: 5943486 - DNA, 25 bp, Homo sapien
cccaaatgttggaatccatgactta

SEQ ID NO: 5943487 - DNA, 25 bp, Homo sapien
ccaaaagaaattgattgctaagtct

SEQ ID NO: 5943488 - DNA, 25 bp, Homo sapien
ccaggtagaccattggccattgctt

SEQ ID NO: 5943489 - DNA, 25 bp, Homo sapien
agatctgttcccacaagggtgtcaa

SEQ ID NO: 5943490 - DNA, 25 bp, Homo sapien
ccaacgatgttttgaccatcagaga

SEQ ID NO: 5943491 - DNA, 25 bp, Homo sapien
ttgattgctaagtctaacttggctg

SEQ ID NO: 5943492 - DNA, 25 bp, Homo sapien
tctcacttgtacagaggtgtcttcc

SEQ ID NO: 5943493 - DNA, 25 bp, Homo sapien
ttgagaaaggctggtttgaacattg

SEQ ID NO: 5943494 - DNA, 25 bp, Homo sapien
cttgtgacgacaagatcatgtacgt

SEQ ID NO: 5943495 - DNA, 25 bp, Homo sapien
ccggtaagatctgttcccacaaggg

SEQ ID NO: 5943496 - DNA, 25 bp, Homo sapien
gtagaccattggccattgctttgga

SEQ ID NO: 5943497 - DNA, 25 bp, Homo sapien
ccagatgcccaagagctgctagatt

SEQ ID NO: 5943498 - DNA, 25 bp, Homo sapien
gcctccgctgtcgctgctgttttcg

SEQ ID NO: 5943499 - DNA, 25 bp, Homo sapien
ggccaaggctatcattgtcttgtcc

SEQ ID NO: 5943500 - DNA, 25 bp, Homo sapien
gctaaggaattcggtatcttgaaga

SEQ ID NO: 5943501 - DNA, 25 bp, Homo sapien
ctgacttgagaagaacctccatcat

SEQ ID NO: 5943502 - DNA, 25 bp, Homo sapien
taagccagttatctgtgctacccaa

SEQ ID NO: 5943503 - DNA, 25 bp, Homo sapien
tcgcttacttgccaaactacgatga

SEQ ID NO: 5943504 - DNA, 25 bp, Homo sapien
ccattgctttggacaccaagggtcc

SEQ ID NO: 5943505 - DNA, 25 bp, Homo sapien
gaaggtcaaggctttgaacgccggt

SEQ ID NO: 5943506 - DNA, 25 bp, Homo sapien
ccgctgtcattgctgaacaagctat

SEQ ID NO: 5943507 - DNA, 25 bp, Homo sapien
cgatgttttgaccatcagagaagtc

SEQ ID NO: 5943508 - DNA, 25 bp, Homo sapien
gtccaatcatcttggttaccagatg

SEQ ID NO: 5943509 - DNA, 25 bp, Homo sapien
cctcattaaacgttgttgctggttc

SEQ ID NO: 5943510 - DNA, 25 bp, Homo sapien
gttgactacccaatcccaccaaacc

SEQ ID NO: 5943511 - DNA, 25 bp, Homo sapien
tatcaacttcggtattgaaaaggct

SEQ ID NO: 5943512 - DNA, 25 bp, Homo sapien
ctggtaagccagttatctgtgctac

SEQ ID NO: 5943513 - DNA, 25 bp, Homo sapien
atgatggtgttttgtctttccaagt

SEQ ID NO: 5943514 - DNA, 25 bp, Homo sapien
tgaaaaggctaaggaattcggtatc

SEQ ID NO: 5943515 - DNA, 25 bp, Homo sapien
acaccaagggtccagaaatcagaac

SEQ ID NO: 5943516 - DNA, 25 bp, Homo sapien
gaattcggtatcttgaagaagggtg

SEQ ID NO: 5943517 - DNA, 25 bp, Homo sapien
gtttcaaggccggtgctggtcactc

SEQ ID NO: 5943518 - DNA, 25 bp, Homo sapien
acaacttcgacgaaatcttgaaggt

SEQ ID NO: 5943519 - DNA, 25 bp, Homo sapien
acatggtcttcgcttctttcatcag

SEQ ID NO: 5943520 - DNA, 25 bp, Homo sapien
accaagggtccagaaatcagaactg

SEQ ID NO: 5943521 - DNA, 25 bp, Homo sapien
ctgtccaaaagaaattgattgctaa

SEQ ID NO: 5943522 - DNA, 25 bp, Homo sapien
cccagaagtcttggctgtccaaaag

SEQ ID NO: 5943523 - DNA, 25 bp, Homo sapien
accagagctgaagtttccgatgtcg

SEQ ID NO: 5943524 - DNA, 25 bp, Homo sapien
tcttacgaataccacaagtctgtca

SEQ ID NO: 5943525 - DNA, 25 bp, Homo sapien
cgatttgccagctttgtctgaaaag

SEQ ID NO: 5943526 - DNA, 25 bp, Homo sapien
ttggatggtgctgactgtgttatgt

SEQ ID NO: 5943527 - DNA, 25 bp, Homo sapien
aggtgtcttcccattcgttttcgaa

SEQ ID NO: 5943528 - DNA, 25 bp, Homo sapien
agaggtgtcttcccattcgttttcg

SEQ ID NO: 5943529 - DNA, 25 bp, Homo sapien
caaggctttgaacgccggtaagatc

SEQ ID NO: 5943530 - DNA, 25 bp, Homo sapien
gttttgaccatcagagaagtcttgg

SEQ ID NO: 5943531 - DNA, 25 bp, Homo sapien
agttatctgtgctacccaaatgttg

SEQ ID NO: 5943532 - DNA, 25 bp, Homo sapien
taagtctaacttggctggtaagcca

SEQ ID NO: 5943533 - DNA, 25 bp, Homo sapien
cttgaaggtcactgacggtgttatg

SEQ ID NO: 5943534 - DNA, 25 bp, Homo sapien
agtcttggctgtccaaaagaaattg

SEQ ID NO: 5943535 - DNA, 25 bp, Homo sapien
gaagcccgtatcaacttcggtattg

SEQ ID NO: 5943536 - DNA, 25 bp, Homo sapien
cccaatcccaccaaaccacgaaatg

SEQ ID NO: 5943537 - DNA, 25 bp, Homo sapien
gatgtcggtaacgctatcttggatg

SEQ ID NO: 5943538 - DNA, 25 bp, Homo sapien
aagtacagaccaaactgtccaatca

SEQ ID NO: 5943539 - DNA, 25 bp, Homo sapien
tcagaactggtaccaccaccaacga

SEQ ID NO: 5943540 - DNA, 25 bp, Homo sapien
ttggaatccatgacttacaacccaa

SEQ ID NO: 5943541 - DNA, 25 bp, Homo sapien
accaaactgtccaatcatcttggtt

SEQ ID NO: 5943542 - DNA, 25 bp, Homo sapien
tcgttttcgaaaaggaacctgtctc

SEQ ID NO: 5943543 - DNA, 25 bp, Homo sapien
ctgtccaatcatcttggttaccaga

SEQ ID NO: 5943544 - DNA, 25 bp, Homo sapien
gagctgctagattctctcacttgta

SEQ ID NO: 5943545 - DNA, 25 bp, Homo sapien
cccaatcaacgccgttaccactatg

SEQ ID NO: 5943546 - DNA, 25 bp, Homo sapien
ctgactggactgatgatgttgaagc

SEQ ID NO: 5943547 - DNA, 25 bp, Homo sapien
cccaagaccaaccagagctgaagtt

SEQ ID NO: 5943548 - DNA, 25 bp, Homo sapien
accacaagtctgtcattgacaacgc

SEQ ID NO: 5943549 - DNA, 25 bp, Homo sapien
tgagaagaacctccatcattggtac

SEQ ID NO: 5943550 - DNA, 25 bp, Homo sapien
ggtgctgactgtgttatgttgtctg

SEQ ID NO: 5943551 - DNA, 25 bp, Homo sapien
gttaccagatgcccaagagctgcta

SEQ ID NO: 5943552 - DNA, 25 bp, Homo sapien
tccaaagccaacctccaccaccgaa

SEQ ID NO: 5943553 - DNA, 25 bp, Homo sapien
gaaagattgacctcattaaacgttg

SEQ ID NO: 5943554 - DNA, 25 bp, Homo sapien
aatccatgacttacaacccaagacc

SEQ ID NO: 5943555 - DNA, 25 bp, Homo sapien
catgtacgttgactacaagaacatc

SEQ ID NO: 5943556 - DNA, 25 bp, Homo sapien
aaggccaaggctatcattgtcttgt

SEQ ID NO: 5943557 - DNA, 25 bp, Homo sapien
tcccacaagggtgtcaacttaccag

SEQ ID NO: 5943558 - DNA, 25 bp, Homo sapien
accacgaaatgatcttcaccaccga

SEQ ID NO: 5943559 - DNA, 25 bp, Homo sapien
ggaagtcgttgacgacaagactttg

SEQ ID NO: 5943560 - DNA, 25 bp, Homo sapien
cgaaatgatcttcaccaccgatgac

SEQ ID NO: 5943561 - DNA, 25 bp, Homo sapien
cacggttcttacgaataccacaagt

SEQ ID NO: 5943562 - DNA, 25 bp, Homo sapien
gtactccaaagccaacctccaccac

SEQ ID NO: 5943563 - DNA, 25 bp, Homo sapien
acaagaacatcaccaaggtcatctc

SEQ ID NO: 5943564 - DNA, 25 bp, Homo sapien
gaagatttgagattcggtgtcaaga

SEQ ID NO: 5943565 - DNA, 25 bp, Homo sapien
tgatgatggtgttttgtctttccaa

SEQ ID NO: 5943566 - DNA, 25 bp, Homo sapien
ggctggtaagccagttatctgtgct

SEQ ID NO: 5943567 - DNA, 25 bp, Homo sapien
acttggctggtaagccagttatctg

SEQ ID NO: 5943568 - DNA, 25 bp, Homo sapien
gtagaatcatctacgttgatgatgg

SEQ ID NO: 5943569 - DNA, 25 bp, Homo sapien
agatttgagattcggtgtcaagaac

SEQ ID NO: 5943570 - DNA, 25 bp, Homo sapien
gacacttacgtttccatccaaggtt

SEQ ID NO: 5943571 - DNA, 25 bp, Homo sapien
taccatcggtccaaagaccaacaac

SEQ ID NO: 5943572 - DNA, 25 bp, Homo sapien
acttctctcacggttcttacgaata

SEQ ID NO: 5943573 - DNA, 25 bp, Homo sapien
ggtcttcgcttctttcatcagaacc

SEQ ID NO: 5943574 - DNA, 25 bp, Homo sapien
accactatggctgaaaccgctgtca

SEQ ID NO: 5943575 - DNA, 25 bp, Homo sapien
ctgtgctacccaaatgttggaatcc

SEQ ID NO: 5943576 - DNA, 25 bp, Homo sapien
ccaaggctatcattgtcttgtccac

SEQ ID NO: 5943577 - DNA, 25 bp, Homo sapien
cgtttccatccaaggtttcaaggcc

SEQ ID NO: 5943578 - DNA, 25 bp, Homo sapien
gtacccaggtagaccattggccatt

SEQ ID NO: 5943579 - DNA, 25 bp, Homo sapien
tatgttgtctggtgaaaccgccaag

SEQ ID NO: 5943580 - DNA, 25 bp, Homo sapien
ctacgttgatgatggtgttttgtct

SEQ ID NO: 5943581 - DNA, 25 bp, Homo sapien
acttgtacagaggtgtcttcccatt

SEQ ID NO: 5943582 - DNA, 25 bp, Homo sapien
aaaggacaaggaagatttgagattc

SEQ ID NO: 5943583 - DNA, 25 bp, Homo sapien
aaatgatcttcaccaccgatgacaa

SEQ ID NO: 5943584 - DNA, 25 bp, Homo sapien
ccaccaccaacgatgttgactaccc

SEQ ID NO: 5943585 - DNA, 25 bp, Homo sapien
acctgtctctgactggactgatgat

SEQ ID NO: 5943586 - DNA, 25 bp, Homo sapien
ccaaggtcatctccgctggtagaat

SEQ ID NO: 5943587 - DNA, 25 bp, Homo sapien
cgttgttgctggttctgacttgaga

SEQ ID NO: 5943588 - DNA, 25 bp, Homo sapien
ccaagagctgctagattctctcact

SEQ ID NO: 5943589 - DNA, 25 bp, Homo sapien
taaacgttgttgctggttctgactt

SEQ ID NO: 5943590 - DNA, 25 bp, Homo sapien
actgatgatgttgaagcccgtatca

SEQ ID NO: 5943591 - DNA, 25 bp, Homo sapien
agatgcccaagagctgctagattct

SEQ ID NO: 5943592 - DNA, 25 bp, Homo sapien
gaaaggctggtttgaacattgtccg

SEQ ID NO: 5943593 - DNA, 25 bp, Homo sapien
tgctggttctgacttgagaagaacc

SEQ ID NO: 5943594 - DNA, 25 bp, Homo sapien
gtcttgtccacttccggtaccaccc

SEQ ID NO: 5943595 - DNA, 25 bp, Homo sapien
ttgccagctttgtctgaaaaggaca

SEQ ID NO: 5943596 - DNA, 25 bp, Homo sapien
acaaaaggccaaggctatcattgtc

SEQ ID NO: 5943597 - DNA, 25 bp, Homo sapien
agaagtcttgggtgaacaaggtaag

SEQ ID NO: 5943598 - DNA, 25 bp, Homo sapien
atgttttgaccatcagagaagtctt

SEQ ID NO: 5943599 - DNA, 25 bp, Homo sapien
gtcaaggctttgaacgccggtaaga

SEQ ID NO: 5943600 - DNA, 25 bp, Homo sapien
aacgatgttgactacccaatcccac

SEQ ID NO: 5943601 - DNA, 25 bp, Homo sapien
gttatgttgtctggtgaaaccgcca

SEQ ID NO: 5943602 - DNA, 25 bp, Homo sapien
cattgtcttgtccacttccggtacc

SEQ ID NO: 5943603 - DNA, 25 bp, Homo sapien
tatcttggatggtgctgactgtgtt

SEQ ID NO: 5943604 - DNA, 25 bp, Homo sapien
cgccagaaagtccgaagaattgtac

SEQ ID NO: 5943605 - DNA, 25 bp, Homo sapien
gacaagtacgctaaggcttgtgacg

SEQ ID NO: 5943606 - DNA, 25 bp, Homo sapien
caaggtaaggacgtcaagatcattg

SEQ ID NO: 5943607 - DNA, 25 bp, Homo sapien
aaggcttgtgacgacaagatcatgt

SEQ ID NO: 5943608 - DNA, 25 bp, Homo sapien
gtacagaccaaactgtccaatcatc

SEQ ID NO: 5943609 - DNA, 25 bp, Homo sapien
caagattgaaaaccaacaaggtgtt

SEQ ID NO: 5943610 - DNA, 25 bp, Homo sapien
taccagatgcccaagagctgctaga

SEQ ID NO: 5943611 - DNA, 25 bp, Homo sapien
gctaagtctaacttggctggtaagc

SEQ ID NO: 5943612 - DNA, 25 bp, Homo sapien
aacaaggtaaggacgtcaagatcat

SEQ ID NO: 5943613 - DNA, 25 bp, Homo sapien
tgtctttccaagttttggaagtcgt

SEQ ID NO: 5943614 - DNA, 25 bp, Homo sapien
cattggtaccatcggtccaaagacc

SEQ ID NO: 5943615 - DNA, 25 bp, Homo sapien
ttggaagtcgttgacgacaagactt

SEQ ID NO: 5943616 - DNA, 25 bp, Homo sapien
cgcttctttcatcagaaccgccaac

SEQ ID NO: 5943617 - DNA, 25 bp, Homo sapien
gtcgttgacgacaagactttgaagg

SEQ ID NO: 5943618 - DNA, 25 bp, Homo sapien
caccaacgatgttgactacccaatc

SEQ ID NO: 5943619 - DNA, 25 bp, Homo sapien
aatcatcttggttaccagatgccca

SEQ ID NO: 5943620 - DNA, 25 bp, Homo sapien
acaacgccagaaagtccgaagaatt

SEQ ID NO: 5943621 - DNA, 25 bp, Homo sapien
tcgaaaaggaacctgtctctgactg

SEQ ID NO: 5943622 - DNA, 25 bp, Homo sapien
ccaacaacccagaaaccttggttgc

SEQ ID NO: 5943623 - DNA, 25 bp, Homo sapien
caccaaggtcatctccgctggtaga

SEQ ID NO: 5943624 - DNA, 25 bp, Homo sapien
gaggtgacttgggtattgaaatccc

SEQ ID NO: 5943625 - DNA, 25 bp, Homo sapien
taacttggctggtaagccagttatc

SEQ ID NO: 5943626 - DNA, 25 bp, Homo sapien
aaatcttgaaggtcactgacggtgt

SEQ ID NO: 5943627 - DNA, 25 bp, Homo sapien
tgaacattgtccgtatgaacttctc

SEQ ID NO: 5943628 - DNA, 25 bp, Homo sapien
caccaccgatgacaagtacgctaag

SEQ ID NO: 5943629 - DNA, 25 bp, Homo sapien
ttatggttgccagaggtgacttggg

SEQ ID NO: 5943630 - DNA, 25 bp, Homo sapien
ggctggtttgaacattgtccgtatg

SEQ ID NO: 5943631 - DNA, 25 bp, Homo sapien
ctacaagaacatcaccaaggtcatc

SEQ ID NO: 5943632 - DNA, 25 bp, Homo sapien
tgtcattgacaacgccagaaagtcc

SEQ ID NO: 5943633 - DNA, 25 bp, Homo sapien
gcttacttgccaaactacgatgaca

SEQ ID NO: 5943634 - DNA, 25 bp, Homo sapien
taaggaattcggtatcttgaagaag

SEQ ID NO: 5943635 - DNA, 25 bp, Homo sapien
agaagaacctccatcattggtacca

SEQ ID NO: 5943636 - DNA, 25 bp, Homo sapien
gttgctggttctgacttgagaagaa

SEQ ID NO: 5943637 - DNA, 25 bp, Homo sapien
agaacggtgtccacatggtcttcgc

SEQ ID NO: 5943638 - DNA, 25 bp, Homo sapien
ccagaaaccttggttgctttgagaa

SEQ ID NO: 5943639 - DNA, 25 bp, Homo sapien
tcttgaagaagggtgacacttacgt

SEQ ID NO: 5943640 - DNA, 25 bp, Homo sapien
gtatgaacttctctcacggttctta

SEQ ID NO: 5943641 - DNA, 25 bp, Homo sapien
cgacaagactttgaaggtcaaggct

SEQ ID NO: 5943642 - DNA, 25 bp, Homo sapien
acatgagaaactgtactccaaagcc

SEQ ID NO: 5943643 - DNA, 25 bp, Homo sapien
ccgctggtagaatcatctacgttga

SEQ ID NO: 5943644 - DNA, 25 bp, Homo sapien
ctgcctccgctgtcgctgctgtttt

SEQ ID NO: 5943645 - DNA, 25 bp, Homo sapien
ggctgtccaaaagaaattgattgct

SEQ ID NO: 5943646 - DNA, 25 bp, Homo sapien
gccgttaccactatggctgaaaccg

SEQ ID NO: 5943647 - DNA, 25 bp, Homo sapien
tctgtcattgacaacgccagaaagt

SEQ ID NO: 5943648 - DNA, 25 bp, Homo sapien
aacttcgacgaaatcttgaaggtca

SEQ ID NO: 5943649 - DNA, 25 bp, Homo sapien
gctatcgcttacttgccaaactacg

SEQ ID NO: 5943650 - DNA, 25 bp, Homo sapien
ggtaagatctgttcccacaagggtg

SEQ ID NO: 5943651 - DNA, 25 bp, Homo sapien
ctagattctctcacttgtacagagg

SEQ ID NO: 5943652 - DNA, 25 bp, Homo sapien
gaagtcttggctgtccaaaagaaat

SEQ ID NO: 5943653 - DNA, 25 bp, Homo sapien
ttgccaaactacgatgacatgagaa

SEQ ID NO: 5943654 - DNA, 25 bp, Homo sapien
aaggctatcattgtcttgtccactt

SEQ ID NO: 5943655 - DNA, 25 bp, Homo sapien
atggtcttcgcttctttcatcagaa

SEQ ID NO: 5943656 - DNA, 25 bp, Homo sapien
ctgtactccaaagccaacctccacc

SEQ ID NO: 5943657 - DNA, 25 bp, Homo sapien
ttgacctcattaaacgttgttgctg

SEQ ID NO: 5943658 - DNA, 25 bp, Homo sapien
aaaggaacctgtctctgactggact

SEQ ID NO: 5943659 - DNA, 25 bp, Homo sapien
aagattgacctcattaaacgttgtt

SEQ ID NO: 5943660 - DNA, 25 bp, Homo sapien
gtctctgactggactgatgatgttg

SEQ ID NO: 5943661 - DNA, 25 bp, Homo sapien
agtacgctaaggcttgtgacgacaa

SEQ ID NO: 5943662 - DNA, 25 bp, Homo sapien
accatcagagaagtcttgggtgaac

SEQ ID NO: 5943663 - DNA, 25 bp, Homo sapien
gtattgaaatcccagccccagaagt

SEQ ID NO: 5943664 - DNA, 25 bp, Homo sapien
gaagaattgtacccaggtagaccat

SEQ ID NO: 5943665 - DNA, 25 bp, Homo sapien
tcgaacaaaaggccaaggctatcat

SEQ ID NO: 5943666 - DNA, 25 bp, Homo sapien
gttgatgatggtgttttgtctttcc

SEQ ID NO: 5943667 - DNA, 25 bp, Homo sapien
accgatgacaagtacgctaaggctt

SEQ ID NO: 5943668 - DNA, 25 bp, Homo sapien
aacttaccaggtaccgatgtcgatt

SEQ ID NO: 5943669 - DNA, 25 bp, Homo sapien
cattgtcaagattgaaaaccaacaa

SEQ ID NO: 5943670 - DNA, 25 bp, Homo sapien
gtctagattagaaagattgacctca

SEQ ID NO: 5943671 - DNA, 25 bp, Homo sapien
cgatgtcgatttgccagctttgtct

SEQ ID NO: 5943672 - DNA, 25 bp, Homo sapien
cccagccccagaagtcttggctgtc

SEQ ID NO: 5943673 - DNA, 25 bp, Homo sapien
aacccaagaccaaccagagctgaag

SEQ ID NO: 5943674 - DNA, 25 bp, Homo sapien
gacaaggaagatttgagattcggtg

SEQ ID NO: 5943675 - DNA, 25 bp, Homo sapien
aatcagaactggtaccaccaccaac

SEQ ID NO: 5943676 - DNA, 25 bp, Homo sapien
tgatgatgttgaagcccgtatcaac

SEQ ID NO: 5943677 - DNA, 25 bp, Homo sapien
caacgccgttaccactatggctgaa

SEQ ID NO: 5943678 - DNA, 25 bp, Homo sapien
aatcatctacgttgatgatggtgtt

SEQ ID NO: 5943679 - DNA, 25 bp, Homo sapien
attagaaagattgacctcattaaac

SEQ ID NO: 5943680 - DNA, 25 bp, Homo sapien
cggtgtccacatggtcttcgcttct

SEQ ID NO: 5943681 - DNA, 25 bp, Homo sapien
aagtcgttgacgacaagactttgaa

SEQ ID NO: 5943682 - DNA, 25 bp, Homo sapien
caagattggtttccaagtacagacc

SEQ ID NO: 5943683 - DNA, 25 bp, Homo sapien
tctgaaaaggacaaggaagatttga

SEQ ID NO: 5943684 - DNA, 25 bp, Homo sapien
agattgaaaaccaacaaggtgttaa

SEQ ID NO: 5943685 - DNA, 25 bp, Homo sapien
gggtgacacttacgtttccatccaa

SEQ ID NO: 5943686 - DNA, 25 bp, Homo sapien
tgctagattctctcacttgtacaga

SEQ ID NO: 5943687 - DNA, 25 bp, Homo sapien
atttgccagctttgtctgaaaagga

SEQ ID NO: 5943688 - DNA, 25 bp, Homo sapien
attggtttccaagtacagaccaaac

SEQ ID NO: 5943689 - DNA, 25 bp, Homo sapien
cactatggctgaaaccgctgtcatt

SEQ ID NO: 5943690 - DNA, 25 bp, Homo sapien
aggtaaggacgtcaagatcattgtc

SEQ ID NO: 5943691 - DNA, 25 bp, Homo sapien
gtccaaagaccaacaacccagaaac

SEQ ID NO: 5943692 - DNA, 25 bp, Homo sapien
ggatggtgctgactgtgttatgttg

SEQ ID NO: 5943693 - DNA, 25 bp, Homo sapien
tcactgacggtgttatggttgccag

SEQ ID NO: 5943694 - DNA, 25 bp, Homo sapien
aactgtactccaaagccaacctcca

SEQ ID NO: 5943695 - DNA, 25 bp, Homo sapien
gaacctgtctctgactggactgatg

SEQ ID NO: 5943696 - DNA, 25 bp, Homo sapien
agaatcatctacgttgatgatggtg

SEQ ID NO: 5943697 - DNA, 25 bp, Homo sapien
tcacttgtacagaggtgtcttccca

SEQ ID NO: 5943698 - DNA, 25 bp, Homo sapien
tggtgttttgtctttccaagttttg

SEQ ID NO: 5943699 - DNA, 25 bp, Homo sapien
tcggtaacgctatcttggatggtgc

SEQ ID NO: 5943700 - DNA, 25 bp, Homo sapien
ctggtgaaaccgccaagggtaacta

SEQ ID NO: 5943701 - DNA, 25 bp, Homo sapien
caagaacggtgtccacatggtcttc

SEQ ID NO: 5943702 - DNA, 25 bp, Homo sapien
ctggtttgaacattgtccgtatgaa

SEQ ID NO: 5943703 - DNA, 25 bp, Homo sapien
gtgctggtcactccaacactttgca

SEQ ID NO: 5943704 - DNA, 25 bp, Homo sapien
agaactggtaccaccaccaacgatg

SEQ ID NO: 5943705 - DNA, 25 bp, Homo sapien
tggttaccagatgcccaagagctgc

SEQ ID NO: 5943706 - DNA, 25 bp, Homo sapien
taagatctgttcccacaagggtgtc

SEQ ID NO: 5943707 - DNA, 25 bp, Homo sapien
atcccaccaaaccacgaaatgatct

SEQ ID NO: 5943708 - DNA, 25 bp, Homo sapien
gctatcttggatggtgctgactgtg

SEQ ID NO: 5943709 - DNA, 25 bp, Homo sapien
cttacgtttccatccaaggtttcaa

SEQ ID NO: 5943710 - DNA, 25 bp, Homo sapien
ctacgatgacatgagaaactgtact

SEQ ID NO: 5943711 - DNA, 25 bp, Homo sapien
gaacctccatcattggtaccatcgg

SEQ ID NO: 5943712 - DNA, 25 bp, Homo sapien
cagagctgaagtttccgatgtcggt

SEQ ID NO: 5943713 - DNA, 25 bp, Homo sapien
taccaggtaccgatgtcgatttgcc

SEQ ID NO: 5943714 - DNA, 25 bp, Homo sapien
ttgactacaagaacatcaccaaggt

SEQ ID NO: 5943715 - DNA, 25 bp, Homo sapien
atcggtccaaagaccaacaacccag

SEQ ID NO: 5943716 - DNA, 25 bp, Homo sapien
ggctgaaaccgctgtcattgctgaa

SEQ ID NO: 5943717 - DNA, 25 bp, Homo sapien
ggccattgctttggacaccaagggt

SEQ ID NO: 5943718 - DNA, 25 bp, Homo sapien
ttggccattgctttggacaccaagg

SEQ ID NO: 5943719 - DNA, 25 bp, Homo sapien
aggaattcggtatcttgaagaaggg

SEQ ID NO: 5943720 - DNA, 25 bp, Homo sapien
agaattgtacccaggtagaccattg

SEQ ID NO: 5943721 - DNA, 25 bp, Homo sapien
gatggtgttttgtctttccaagttt

SEQ ID NO: 5943722 - DNA, 25 bp, Homo sapien
agttttggaagtcgttgacgacaag

SEQ ID NO: 5943723 - DNA, 25 bp, Homo sapien
ctggactgatgatgttgaagcccgt

SEQ ID NO: 5943724 - DNA, 25 bp, Homo sapien
cttgtccacttccggtaccacccca

SEQ ID NO: 5943725 - DNA, 25 bp, Homo sapien
tctctcacttgtacagaggtgtctt

SEQ ID NO: 5943726 - DNA, 25 bp, Homo sapien
acgccgttaccactatggctgaaac

SEQ ID NO: 5943727 - DNA, 25 bp, Homo sapien
cgccaagggtaactacccaatcaac

SEQ ID NO: 5943728 - DNA, 25 bp, Homo sapien
tttcatcagaaccgccaacgatgtt

SEQ ID NO: 5943729 - DNA, 25 bp, Homo sapien
tcatcagaaccgccaacgatgtttt

SEQ ID NO: 5943730 - DNA, 25 bp, Homo sapien
tgctttgagaaaggctggtttgaac

SEQ ID NO: 5943731 - DNA, 25 bp, Homo sapien
caaggccggtgctggtcactccaac

SEQ ID NO: 5943732 - DNA, 25 bp, Homo sapien
gtctggtgaaaccgccaagggtaac

SEQ ID NO: 5943733 - DNA, 25 bp, Homo sapien
caagttttggaagtcgttgacgaca

SEQ ID NO: 5943734 - DNA, 25 bp, Homo sapien
gtacagaggtgtcttcccattcgtt

SEQ ID NO: 5943735 - DNA, 25 bp, Homo sapien
gtgtcttcccattcgttttcgaaaa

SEQ ID NO: 5943736 - DNA, 25 bp, Homo sapien
gtccgaagaattgtacccaggtaga

SEQ ID NO: 5943737 - DNA, 25 bp, Homo sapien
ccaatcatcttggttaccagatgcc

SEQ ID NO: 5943738 - DNA, 25 bp, Homo sapien
gctgctgttttcgaacaaaaggcca

SEQ ID NO: 5943739 - DNA, 25 bp, Homo sapien
gaacaagctatcgcttacttgccaa

SEQ ID NO: 5943740 - DNA, 25 bp, Homo sapien
aaaccttggttgctttgagaaaggc

SEQ ID NO: 5943741 - DNA, 25 bp, Homo sapien
ggacgtcaagatcattgtcaagatt

SEQ ID NO: 5943742 - DNA, 25 bp, Homo sapien
cttaccaggtaccgatgtcgatttg

SEQ ID NO: 5943743 - DNA, 25 bp, Homo sapien
gaaaaggacaaggaagatttgagat

SEQ ID NO: 5943744 - DNA, 25 bp, Homo sapien
gaaattgattgctaagtctaacttg

SEQ ID NO: 5943745 - DNA, 25 bp, Homo sapien
accttggttgctttgagaaaggctg

SEQ ID NO: 5943746 - DNA, 25 bp, Homo sapien
tcattgacaacgccagaaagtccga

SEQ ID NO: 5943747 - DNA, 25 bp, Homo sapien
gatgacatgagaaactgtactccaa

SEQ ID NO: 5943748 - DNA, 25 bp, Homo sapien
ttgtccgtatgaacttctctcacgg

SEQ ID NO: 5943749 - DNA, 25 bp, Homo sapien
atggctgaaaccgctgtcattgctg

SEQ ID NO: 5943750 - DNA, 25 bp, Homo sapien
ctccgctggtagaatcatctacgtt

SEQ ID NO: 5943751 - DNA, 25 bp, Homo sapien
atcttggttaccagatgcccaagag

SEQ ID NO: 5943752 - DNA, 25 bp, Homo sapien
ggacaccaagggtccagaaatcaga

SEQ ID NO: 5943753 - DNA, 25 bp, Homo sapien
gaacttctctcacggttcttacgaa

SEQ ID NO: 5943754 - DNA, 25 bp, Homo sapien
ccgtatgaacttctctcacggttct

SEQ ID NO: 5943755 - DNA, 25 bp, Homo sapien
acaacccaagaccaaccagagctga

SEQ ID NO: 5943756 - DNA, 25 bp, Homo sapien
accgccaagggtaactacccaatca

SEQ ID NO: 5943757 - DNA, 25 bp, Homo sapien
tggtagaatcatctacgttgatgat

SEQ ID NO: 5943758 - DNA, 25 bp, Homo sapien
gacaagatcatgtacgttgactaca

SEQ ID NO: 5943759 - DNA, 25 bp, Homo sapien
ttcggtgtcaagaacggtgtccaca

SEQ ID NO: 5943760 - DNA, 25 bp, Homo sapien
tcattaaacgttgttgctggttctg

SEQ ID NO: 5943761 - DNA, 25 bp, Homo sapien
ttgtctggtgaaaccgccaagggta

SEQ ID NO: 5943762 - DNA, 25 bp, Homo sapien
gaaactgtactccaaagccaacctc

SEQ ID NO: 5943763 - DNA, 25 bp, Homo sapien
cgatgacaagtacgctaaggcttgt

SEQ ID NO: 5943764 - DNA, 25 bp, Homo sapien
attaaacgttgttgctggttctgac

SEQ ID NO: 5943765 - DNA, 25 bp, Homo sapien
cagctttgtctgaaaaggacaagga

SEQ ID NO: 5943766 - DNA, 25 bp, Homo sapien
cggtgctggtcactccaacactttg

SEQ ID NO: 5943767 - DNA, 25 bp, Homo sapien
ttgccagaggtgacttgggtattga

SEQ ID NO: 5943768 - DNA, 25 bp, Homo sapien
ggttctgacttgagaagaacctcca

SEQ ID NO: 5943769 - DNA, 25 bp, Homo sapien
tacccaatcccaccaaaccacgaaa

SEQ ID NO: 5943770 - DNA, 25 bp, Homo sapien
tccacttccggtaccaccccaagat

SEQ ID NO: 5943771 - DNA, 25 bp, Homo sapien
ccgaagaattgtacccaggtagacc

SEQ ID NO: 5943772 - DNA, 25 bp, Homo sapien
gtcaagatcattgtcaagattgaaa

SEQ ID NO: 5943773 - DNA, 25 bp, Homo sapien
cagaaatcagaactggtaccaccac

SEQ ID NO: 5943774 - DNA, 25 bp, Homo sapien
agtctaacttggctggtaagccagt

SEQ ID NO: 5943775 - DNA, 25 bp, Homo sapien
gaaaaggaacctgtctctgactgga

SEQ ID NO: 5943776 - DNA, 25 bp, Homo sapien
caacaaggtgttaacaacttcgacg

SEQ ID NO: 5943777 - DNA, 25 bp, Homo sapien
gccagaggtgacttgggtattgaaa

SEQ ID NO: 5943778 - DNA, 25 bp, Homo sapien
cggtccaaagaccaacaacccagaa

SEQ ID NO: 5943779 - DNA, 25 bp, Homo sapien
tgctttggacaccaagggtccagaa

SEQ ID NO: 5943780 - DNA, 25 bp, Homo sapien
acatcaccaaggtcatctccgctgg

SEQ ID NO: 5943781 - DNA, 25 bp, Homo sapien
gtcactccaacactttgcaagtctc

SEQ ID NO: 5943782 - DNA, 25 bp, Homo sapien
caagatcattgtcaagattgaaaac

SEQ ID NO: 5943783 - DNA, 25 bp, Homo sapien
tacccaaatgttggaatccatgact

SEQ ID NO: 5943784 - DNA, 25 bp, Homo sapien
cggtgtcaagaacggtgtccacatg

SEQ ID NO: 5943785 - DNA, 25 bp, Homo sapien
ggtaacgctatcttggatggtgctg

SEQ ID NO: 5943786 - DNA, 25 bp, Homo sapien
caacccagaaaccttggttgctttg

SEQ ID NO: 5943787 - DNA, 25 bp, Homo sapien
gagaaactgtactccaaagccaacc

SEQ ID NO: 5943788 - DNA, 25 bp, Homo sapien
gccagctttgtctgaaaaggacaag

SEQ ID NO: 5943789 - DNA, 25 bp, Homo sapien
ttacgaataccacaagtctgtcatt

SEQ ID NO: 5943790 - DNA, 25 bp, Homo sapien
agaccattggccattgctttggaca

SEQ ID NO: 5943791 - DNA, 25 bp, Homo sapien
ccaacgatgttgactacccaatccc

SEQ ID NO: 5943792 - DNA, 25 bp, Homo sapien
caagaccaaccagagctgaagtttc

SEQ ID NO: 5943793 - DNA, 25 bp, Homo sapien
ccaccccaagattggtttccaagta

SEQ ID NO: 5943794 - DNA, 25 bp, Homo sapien
ggtccagaaatcagaactggtacca

SEQ ID NO: 5943795 - DNA, 25 bp, Homo sapien
caagtctgtcattgacaacgccaga

SEQ ID NO: 5943796 - DNA, 25 bp, Homo sapien
ttcaaggccggtgctggtcactcca

SEQ ID NO: 5943797 - DNA, 25 bp, Homo sapien
acttacaacccaagaccaaccagag

SEQ ID NO: 5943798 - DNA, 25 bp, Homo sapien
tgctgttttcgaacaaaaggccaag

SEQ ID NO: 5943799 - DNA, 25 bp, Homo sapien
agattagaaagattgacctcattaa

SEQ ID NO: 5943800 - DNA, 25 bp, Homo sapien
ggtttgaacattgtccgtatgaact

SEQ ID NO: 5943801 - DNA, 25 bp, Homo sapien
gctggtcactccaacactttgcaag

SEQ ID NO: 5943802 - DNA, 25 bp, Homo sapien
cttggttgctttgagaaaggctggt

SEQ ID NO: 5943803 - DNA, 25 bp, Homo sapien
ccacaagggtgtcaacttaccaggt

SEQ ID NO: 5943804 - DNA, 25 bp, Homo sapien
caaatgttggaatccatgacttaca

SEQ ID NO: 5943805 - DNA, 25 bp, Homo sapien
gcccaagagctgctagattctctca

SEQ ID NO: 5943806 - DNA, 25 bp, Homo sapien
acagaggtgtcttcccattcgtttt

SEQ ID NO: 5943807 - DNA, 25 bp, Homo sapien
ctcacggttcttacgaataccacaa

SEQ ID NO: 5943808 - DNA, 25 bp, Homo sapien
ttgaagcccgtatcaacttcggtat

SEQ ID NO: 5943809 - DNA, 25 bp, Homo sapien
aaaaggccaaggctatcattgtctt

SEQ ID NO: 5943810 - DNA, 25 bp, Homo sapien
ttcggtattgaaaaggctaaggaat

SEQ ID NO: 5943811 - DNA, 25 bp, Homo sapien
gattgctaagtctaacttggctggt

SEQ ID NO: 5943812 - DNA, 25 bp, Homo sapien
tgctgaacaagctatcgcttacttg

SEQ ID NO: 5943813 - DNA, 25 bp, Homo sapien
ttgtacccaggtagaccattggcca

SEQ ID NO: 5943814 - DNA, 25 bp, Homo sapien
atgtctagattagaaagattgacct

SEQ ID NO: 5943815 - DNA, 25 bp, Homo sapien
agattggtttccaagtacagaccaa

SEQ ID NO: 5943816 - DNA, 25 bp, Homo sapien
accaccaacgatgttgactacccaa

SEQ ID NO: 5943817 - DNA, 25 bp, Homo sapien
tgaaaaccaacaaggtgttaacaac

SEQ ID NO: 5943818 - DNA, 25 bp, Homo sapien
cactccaacactttgcaagtctcta

SEQ ID NO: 5943819 - DNA, 25 bp, Homo sapien
gagctgaagtttccgatgtcggtaa

SEQ ID NO: 5943820 - DNA, 25 bp, Homo sapien
gctgtcgctgctgttttcgaacaaa

SEQ ID NO: 5943821 - DNA, 25 bp, Homo sapien
cagaaccgccaacgatgttttgacc

SEQ ID NO: 5943822 - DNA, 25 bp, Homo sapien
tttgtctttccaagttttggaagtc

SEQ ID NO: 5943823 - DNA, 25 bp, Homo sapien
ggtgaacaaggtaaggacgtcaaga

SEQ ID NO: 5943824 - DNA, 25 bp, Homo sapien
atcagaaccgccaacgatgttttga

SEQ ID NO: 5943825 - DNA, 25 bp, Homo sapien
aggtcaaggctttgaacgccggtaa

SEQ ID NO: 5943826 - DNA, 25 bp, Homo sapien
gtcgatttgccagctttgtctgaaa

SEQ ID NO: 5943827 - DNA, 25 bp, Homo sapien
ccgtcgctgcctccgctgtcgctgc

SEQ ID NO: 5943828 - DNA, 25 bp, Homo sapien
gtaccgatgtcgatttgccagcttt

SEQ ID NO: 5943829 - DNA, 25 bp, Homo sapien
tcgacgaaatcttgaaggtcactga

SEQ ID NO: 5943830 - DNA, 25 bp, Homo sapien
ctggttctgacttgagaagaacctc

SEQ ID NO: 5943831 - DNA, 25 bp, Homo sapien
agaaaccttggttgctttgagaaag

SEQ ID NO: 5943832 - DNA, 25 bp, Homo sapien
acgctatcttggatggtgctgactg

SEQ ID NO: 5943833 - DNA, 25 bp, Homo sapien
accccaagattggtttccaagtaca

SEQ ID NO: 5943834 - DNA, 25 bp, Homo sapien
ggtgtcaacttaccaggtaccgatg

SEQ ID NO: 5943835 - DNA, 25 bp, Homo sapien
ttccaagtacagaccaaactgtcca

SEQ ID NO: 5943836 - DNA, 25 bp, Homo sapien
taactacccaatcaacgccgttacc

SEQ ID NO: 5943837 - DNA, 25 bp, Homo sapien
ccgatgtcggtaacgctatcttgga

SEQ ID NO: 5943838 - DNA, 25 bp, Homo sapien
actgacggtgttatggttgccagag

SEQ ID NO: 5943839 - DNA, 25 bp, Homo sapien
atcccagccccagaagtcttggctg

SEQ ID NO: 5943840 - DNA, 25 bp, Homo sapien
acctccaccaccgaaaccgtcgctg

SEQ ID NO: 5943841 - DNA, 25 bp, Homo sapien
agattctctcacttgtacagaggtg

SEQ ID NO: 5943842 - DNA, 25 bp, Homo sapien
tttcgaaaaggaacctgtctctgac

SEQ ID NO: 5943843 - DNA, 25 bp, Homo sapien
tatcttgaagaagggtgacacttac

SEQ ID NO: 5943844 - DNA, 25 bp, Homo sapien
aagaacctccatcattggtaccatc

SEQ ID NO: 5943845 - DNA, 25 bp, Homo sapien
accgccaacgatgttttgaccatca

SEQ ID NO: 5943846 - DNA, 25 bp, Homo sapien
ctccgctgtcgctgctgttttcgaa

SEQ ID NO: 5943847 - DNA, 25 bp, Homo sapien
agtctgtcattgacaacgccagaaa

SEQ ID NO: 5943848 - DNA, 25 bp, Homo sapien
gactttgaaggtcaaggctttgaac

SEQ ID NO: 5943849 - DNA, 25 bp, Homo sapien
ggtgacttgggtattgaaatcccag

SEQ ID NO: 5943850 - DNA, 25 bp, Homo sapien
gctttgaacgccggtaagatctgtt

SEQ ID NO: 5943851 - DNA, 25 bp, Homo sapien
gagattcggtgtcaagaacggtgtc

SEQ ID NO: 5943852 - DNA, 25 bp, Homo sapien
aaggtcatctccgctggtagaatca

SEQ ID NO: 5943853 - DNA, 25 bp, Homo sapien
cactttgcaagtctctaccgtttaa

SEQ ID NO: 5943854 - DNA, 25 bp, Homo sapien
cccaagattggtttccaagtacaga

SEQ ID NO: 5943855 - DNA, 25 bp, Homo sapien
gtgtccacatggtcttcgcttcttt

SEQ ID NO: 5943856 - DNA, 25 bp, Homo sapien
cacttccggtaccaccccaagattg

SEQ ID NO: 5943857 - DNA, 25 bp, Homo sapien
ggtaccaccaccaacgatgttgact

SEQ ID NO: 5943858 - DNA, 25 bp, Homo sapien
tgacggtgttatggttgccagaggt

SEQ ID NO: 5943859 - DNA, 25 bp, Homo sapien
tccatccaaggtttcaaggccggtg

SEQ ID NO: 5943860 - DNA, 25 bp, Homo sapien
ccatcattggtaccatcggtccaaa

SEQ ID NO: 5943861 - DNA, 25 bp, Homo sapien
tcaacttcggtattgaaaaggctaa

SEQ ID NO: 5943862 - DNA, 25 bp, Homo sapien
ctgaacaagctatcgcttacttgcc

SEQ ID NO: 5943863 - DNA, 25 bp, Homo sapien
gtattgaaaaggctaaggaattcgg

SEQ ID NO: 5943864 - DNA, 25 bp, Homo sapien
agaaagtccgaagaattgtacccag

SEQ ID NO: 5943865 - DNA, 25 bp, Homo sapien
ctccaccaccgaaaccgtcgctgcc

SEQ ID NO: 5943866 - DNA, 25 bp, Homo sapien
ttgtcaagattgaaaaccaacaagg

SEQ ID NO: 5943867 - DNA, 25 bp, Homo sapien
atcattgtcaagattgaaaaccaac

SEQ ID NO: 5943868 - DNA, 25 bp, Homo sapien
acttcggtattgaaaaggctaagga

SEQ ID NO: 5943869 - DNA, 25 bp, Homo sapien
aaaggctaaggaattcggtatcttg

SEQ ID NO: 5943870 - DNA, 25 bp, Homo sapien
acaaggtgttaacaacttcgacgaa

SEQ ID NO: 5943871 - DNA, 25 bp, Homo sapien
tggtcactccaacactttgcaagtc

SEQ ID NO: 5943872 - DNA, 25 bp, Homo sapien
attgctgaacaagctatcgcttact

SEQ ID NO: 5943873 - DNA, 25 bp, Homo sapien
agaccaaactgtccaatcatcttgg

SEQ ID NO: 5943874 - DNA, 25 bp, Homo sapien
aagaaattgattgctaagtctaact

SEQ ID NO: 5943875 - DNA, 25 bp, Homo sapien
gctacccaaatgttggaatccatga

SEQ ID NO: 5943876 - DNA, 25 bp, Homo sapien
ttgttgctggttctgacttgagaag

SEQ ID NO: 5943877 - DNA, 25 bp, Homo sapien
ggtaagccagttatctgtgctaccc

SEQ ID NO: 5943878 - DNA, 25 bp, Homo sapien
cttgggtgaacaaggtaaggacgtc

SEQ ID NO: 5943879 - DNA, 25 bp, Homo sapien
gtgttatgttgtctggtgaaaccgc

SEQ ID NO: 5943880 - DNA, 25 bp, Homo sapien
acgacaagatcatgtacgttgacta

SEQ ID NO: 5943881 - DNA, 25 bp, Homo sapien
acagaccaaactgtccaatcatctt

SEQ ID NO: 5943882 - DNA, 25 bp, Homo sapien
tcttcgcttctttcatcagaaccgc

SEQ ID NO: 5943883 - DNA, 25 bp, Homo sapien
cgttgacgacaagactttgaaggtc

SEQ ID NO: 5943884 - DNA, 25 bp, Homo sapien
aactgtccaatcatcttggttacca

SEQ ID NO: 5943885 - DNA, 25 bp, Homo sapien
tgacttgggtattgaaatcccagcc

SEQ ID NO: 5943886 - DNA, 25 bp, Homo sapien
tgtcaacttaccaggtaccgatgtc

SEQ ID NO: 5943887 - DNA, 25 bp, Homo sapien
aagtttccgatgtcggtaacgctat

SEQ ID NO: 5943888 - DNA, 25 bp, Homo sapien
cccaccaaaccacgaaatgatcttc

SEQ ID NO: 5943889 - DNA, 25 bp, Homo sapien
aattgattgctaagtctaacttggc

SEQ ID NO: 5943890 - DNA, 25 bp, Homo sapien
tttgaacattgtccgtatgaacttc

SEQ ID NO: 5943891 - DNA, 25 bp, Homo sapien
ctatggctgaaaccgctgtcattgc

SEQ ID NO: 5943892 - DNA, 25 bp, Homo sapien
ttacaacccaagaccaaccagagct

SEQ ID NO: 5943893 - DNA, 25 bp, Homo sapien
ccaagggtaactacccaatcaacgc

SEQ ID NO: 5943894 - DNA, 25 bp, Homo sapien
ctccaacactttgcaagtctctacc

SEQ ID NO: 5943895 - DNA, 25 bp, Homo sapien
ttgagattcggtgtcaagaacggtg

SEQ ID NO: 5943896 - DNA, 25 bp, Homo sapien
gtgttaacaacttcgacgaaatctt

SEQ ID NO: 5943897 - DNA, 25 bp, Homo sapien
gttaacaacttcgacgaaatcttga

SEQ ID NO: 5943898 - DNA, 25 bp, Homo sapien
atcattggtaccatcggtccaaaga

SEQ ID NO: 5943899 - DNA, 25 bp, Homo sapien
aactacgatgacatgagaaactgta

SEQ ID NO: 5943900 - DNA, 25 bp, Homo sapien
tgaccatcagagaagtcttgggtga

SEQ ID NO: 5943901 - DNA, 25 bp, Homo sapien
aggaacctgtctctgactggactga

SEQ ID NO: 5943902 - DNA, 25 bp, Homo sapien
tgacttacaacccaagaccaaccag

SEQ ID NO: 5943903 - DNA, 25 bp, Homo sapien
catcagagaagtcttgggtgaacaa

SEQ ID NO: 5943904 - DNA, 25 bp, Homo sapien
attctctcacttgtacagaggtgtc

SEQ ID NO: 5943905 - DNA, 25 bp, Homo sapien
tctttcatcagaaccgccaacgatg

SEQ ID NO: 5943906 - DNA, 25 bp, Homo sapien
gaagaagggtgacacttacgtttcc

SEQ ID NO: 5943907 - DNA, 25 bp, Homo sapien
cacttacgtttccatccaaggtttc

SEQ ID NO: 5943908 - DNA, 25 bp, Homo sapien
caccaaaccacgaaatgatcttcac

SEQ ID NO: 5943909 - DNA, 25 bp, Homo sapien
ctgtctctgactggactgatgatgt

SEQ ID NO: 5943910 - DNA, 25 bp, Homo sapien
gttcccacaagggtgtcaacttacc

SEQ ID NO: 5943911 - DNA, 25 bp, Homo sapien
aattgtacccaggtagaccattggc

SEQ ID NO: 5943912 - DNA, 25 bp, Homo sapien
caagtacgctaaggcttgtgacgac

SEQ ID NO: 5943913 - DNA, 25 bp, Homo sapien
gttcttacgaataccacaagtctgt

SEQ ID NO: 5943914 - DNA, 25 bp, Homo sapien
ccgaaaccgtcgctgcctccgctgt

SEQ ID NO: 5943915 - DNA, 25 bp, Homo sapien
caagggtccagaaatcagaactggt

SEQ ID NO: 5943916 - DNA, 25 bp, Homo sapien
gccccagaagtcttggctgtccaaa

SEQ ID NO: 5943917 - DNA, 25 bp, Homo sapien
cttggttaccagatgcccaagagct

SEQ ID NO: 5943918 - DNA, 25 bp, Homo sapien
tctttccaagttttggaagtcgttg

SEQ ID NO: 5943919 - DNA, 25 bp, Homo sapien
tgtcgctgctgttttcgaacaaaag

SEQ ID NO: 5943920 - DNA, 25 bp, Homo sapien
tgttggaatccatgacttacaaccc

SEQ ID NO: 5943921 - DNA, 25 bp, Homo sapien
aggaagatttgagattcggtgtcaa

SEQ ID NO: 5943922 - DNA, 25 bp, Homo sapien
aagatgattggacagtttggtctgt

SEQ ID NO: 5943923 - DNA, 25 bp, Homo sapien
ttgttcacccaagacttctctgatg

SEQ ID NO: 5943924 - DNA, 25 bp, Homo sapien
accatccaagatagcgttaccgaca

SEQ ID NO: 5943925 - DNA, 25 bp, Homo sapien
cttttggacagccaagacttctggg

SEQ ID NO: 5943926 - DNA, 25 bp, Homo sapien
ccatcatcaacgtagatgattctac

SEQ ID NO: 5943927 - DNA, 25 bp, Homo sapien
gacttgcaaagtgttggagtgacca

SEQ ID NO: 5943928 - DNA, 25 bp, Homo sapien
ttcaaagtcttgtcgtcaacgactt

SEQ ID NO: 5943929 - DNA, 25 bp, Homo sapien
cgacatcggaaacttcagctctggt

SEQ ID NO: 5943930 - DNA, 25 bp, Homo sapien
cttcttcaagataccgaattcctta

SEQ ID NO: 5943931 - DNA, 25 bp, Homo sapien
aagacttctctgatggtcaaaacat

SEQ ID NO: 5943932 - DNA, 25 bp, Homo sapien
acataacacagtcagcaccatccaa

SEQ ID NO: 5943933 - DNA, 25 bp, Homo sapien
gacgtccttaccttgttcacccaag

SEQ ID NO: 5943934 - DNA, 25 bp, Homo sapien
gatgaccttggtgatgttcttgtag

SEQ ID NO: 5943935 - DNA, 25 bp, Homo sapien
ttctggacccttggtgtccaaagca

SEQ ID NO: 5943936 - DNA, 25 bp, Homo sapien
atgatggaggttcttctcaagtcag

SEQ ID NO: 5943937 - DNA, 25 bp, Homo sapien
gtcatcggtggtgaagatcatttcg

SEQ ID NO: 5943938 - DNA, 25 bp, Homo sapien
ttgacaccgaatctcaaatcttcct

SEQ ID NO: 5943939 - DNA, 25 bp, Homo sapien
cagcaccatccaagatagcgttacc

SEQ ID NO: 5943940 - DNA, 25 bp, Homo sapien
cttaccttgttcacccaagacttct

SEQ ID NO: 5943941 - DNA, 25 bp, Homo sapien
aaacggtagagacttgcaaagtgtt

SEQ ID NO: 5943942 - DNA, 25 bp, Homo sapien
agtccagtcagagacaggttccttt

SEQ ID NO: 5943943 - DNA, 25 bp, Homo sapien
agcgttaccgacatcggaaacttca

SEQ ID NO: 5943944 - DNA, 25 bp, Homo sapien
ctggcaaatcgacatcggtacctgg

SEQ ID NO: 5943945 - DNA, 25 bp, Homo sapien
gataccgaattccttagccttttca

SEQ ID NO: 5943946 - DNA, 25 bp, Homo sapien
acagcggtttcagccatagtggtaa

SEQ ID NO: 5943947 - DNA, 25 bp, Homo sapien
ggaagtggacaagacaatgatagcc

SEQ ID NO: 5943948 - DNA, 25 bp, Homo sapien
atggaaacgtaagtgtcacccttct

SEQ ID NO: 5943949 - DNA, 25 bp, Homo sapien
tctagcagctcttgggcatctggta

SEQ ID NO: 5943950 - DNA, 25 bp, Homo sapien
taagtcatggattccaacatttggg

SEQ ID NO: 5943951 - DNA, 25 bp, Homo sapien
aagacacctctgtacaagtgagaga

SEQ ID NO: 5943952 - DNA, 25 bp, Homo sapien
ccttttcaataccgaagttgatacg

SEQ ID NO: 5943953 - DNA, 25 bp, Homo sapien
tcgtggtttggtgggattgggtagt

SEQ ID NO: 5943954 - DNA, 25 bp, Homo sapien
ggtctacctgggtacaattcttcgg

SEQ ID NO: 5943955 - DNA, 25 bp, Homo sapien
gttcttgacaccgaatctcaaatct

SEQ ID NO: 5943956 - DNA, 25 bp, Homo sapien
cgtcgaagttgttaacaccttgttg

SEQ ID NO: 5943957 - DNA, 25 bp, Homo sapien
gtcttgtcgtcaacgacttccaaaa

SEQ ID NO: 5943958 - DNA, 25 bp, Homo sapien
gtttggtctgtacttggaaaccaat

SEQ ID NO: 5943959 - DNA, 25 bp, Homo sapien
agcgacagcggaggcagcgacggtt

SEQ ID NO: 5943960 - DNA, 25 bp, Homo sapien
ggatggaaacgtaagtgtcaccctt

SEQ ID NO: 5943961 - DNA, 25 bp, Homo sapien
tcagtccagtcagagacaggttcct

SEQ ID NO: 5943962 - DNA, 25 bp, Homo sapien
ttcgaaaacagcagcgacagcggag

SEQ ID NO: 5943963 - DNA, 25 bp, Homo sapien
gttttcaatcttgacaatgatcttg

SEQ ID NO: 5943964 - DNA, 25 bp, Homo sapien
tcgttggtggtggtaccagttctga

SEQ ID NO: 5943965 - DNA, 25 bp, Homo sapien
accgtcagtgaccttcaagatttcg

SEQ ID NO: 5943966 - DNA, 25 bp, Homo sapien
cgacagcggaggcagcgacggtttc

SEQ ID NO: 5943967 - DNA, 25 bp, Homo sapien
gtgttggagtgaccagcaccggcct

SEQ ID NO: 5943968 - DNA, 25 bp, Homo sapien
gggtacaattcttcggactttctgg

SEQ ID NO: 5943969 - DNA, 25 bp, Homo sapien
tttggtgggattgggtagtcaacat

SEQ ID NO: 5943970 - DNA, 25 bp, Homo sapien
attctaccagcggagatgaccttgg

SEQ ID NO: 5943971 - DNA, 25 bp, Homo sapien
ttcatacggacaatgttcaaaccag

SEQ ID NO: 5943972 - DNA, 25 bp, Homo sapien
gtacctggtaagttgacacccttgt

SEQ ID NO: 5943973 - DNA, 25 bp, Homo sapien
caaaacttggaaagacaaaacacca

SEQ ID NO: 5943974 - DNA, 25 bp, Homo sapien
cagacaacataacacagtcagcacc

SEQ ID NO: 5943975 - DNA, 25 bp, Homo sapien
gtggtttggtgggattgggtagtca

SEQ ID NO: 5943976 - DNA, 25 bp, Homo sapien
cagataactggcttaccagccaagt

SEQ ID NO: 5943977 - DNA, 25 bp, Homo sapien
cctctgtacaagtgagagaatctag

SEQ ID NO: 5943978 - DNA, 25 bp, Homo sapien
catcaacgtagatgattctaccagc

SEQ ID NO: 5943979 - DNA, 25 bp, Homo sapien
tgatacgggcttcaacatcatcagt

SEQ ID NO: 5943980 - DNA, 25 bp, Homo sapien
tctgatggtcaaaacatcgttggcg

SEQ ID NO: 5943981 - DNA, 25 bp, Homo sapien
tcttgacgtccttaccttgttcacc

SEQ ID NO: 5943982 - DNA, 25 bp, Homo sapien
catagtggtaacggcgttgattggg

SEQ ID NO: 5943983 - DNA, 25 bp, Homo sapien
ctgggttgttggtctttggaccgat

SEQ ID NO: 5943984 - DNA, 25 bp, Homo sapien
agcaatcaatttcttttggacagcc

SEQ ID NO: 5943985 - DNA, 25 bp, Homo sapien
ggtttggtgggattgggtagtcaac

SEQ ID NO: 5943986 - DNA, 25 bp, Homo sapien
ctgggtacaattcttcggactttct

SEQ ID NO: 5943987 - DNA, 25 bp, Homo sapien
gacaacataacacagtcagcaccat

SEQ ID NO: 5943988 - DNA, 25 bp, Homo sapien
agaatctagcagctcttgggcatct

SEQ ID NO: 5943989 - DNA, 25 bp, Homo sapien
ctttggagtacagtttctcatgtca

SEQ ID NO: 5943990 - DNA, 25 bp, Homo sapien
gatgattctaccagcggagatgacc

SEQ ID NO: 5943991 - DNA, 25 bp, Homo sapien
taactggcttaccagccaagttaga

SEQ ID NO: 5943992 - DNA, 25 bp, Homo sapien
tgtgggaacagatcttaccggcgtt

SEQ ID NO: 5943993 - DNA, 25 bp, Homo sapien
agaagcgaagaccatgtggacaccg

SEQ ID NO: 5943994 - DNA, 25 bp, Homo sapien
tgggtagttacccttggcggtttca

SEQ ID NO: 5943995 - DNA, 25 bp, Homo sapien
tttcgtggtttggtgggattgggta

SEQ ID NO: 5943996 - DNA, 25 bp, Homo sapien
atggtctacctgggtacaattcttc

SEQ ID NO: 5943997 - DNA, 25 bp, Homo sapien
gttgatacgggcttcaacatcatca

SEQ ID NO: 5943998 - DNA, 25 bp, Homo sapien
ggaagacacctctgtacaagtgaga

SEQ ID NO: 5943999 - DNA, 25 bp, Homo sapien
gcgttcaaagccttgaccttcaaag

SEQ ID NO: 5944000 - DNA, 25 bp, Homo sapien
caagtaagcgatagcttgttcagca

SEQ ID NO: 5944001 - DNA, 25 bp, Homo sapien
gacaatgatcttgacgtccttacct

SEQ ID NO: 5944002 - DNA, 25 bp, Homo sapien
cttgttcagcaatgacagcggtttc

SEQ ID NO: 5944003 - DNA, 25 bp, Homo sapien
tacggacaatgttcaaaccagcctt

SEQ ID NO: 5944004 - DNA, 25 bp, Homo sapien
gacagccaagacttctggggctggg

SEQ ID NO: 5944005 - DNA, 25 bp, Homo sapien
accgaagttgatacgggcttcaaca

SEQ ID NO: 5944006 - DNA, 25 bp, Homo sapien
ggtctttggaccgatggtaccaatg

SEQ ID NO: 5944007 - DNA, 25 bp, Homo sapien
tgattgggtagttacccttggcggt

SEQ ID NO: 5944008 - DNA, 25 bp, Homo sapien
aaagccttgaccttcaaagtcttgt

SEQ ID NO: 5944009 - DNA, 25 bp, Homo sapien
tgaaagaagcgaagaccatgtggac

SEQ ID NO: 5944010 - DNA, 25 bp, Homo sapien
cttgtcgtcaacgacttccaaaact

SEQ ID NO: 5944011 - DNA, 25 bp, Homo sapien
ctcaaagcaaccaaggtttctgggt

SEQ ID NO: 5944012 - DNA, 25 bp, Homo sapien
ctggcaaccataacaccgtcagtga

SEQ ID NO: 5944013 - DNA, 25 bp, Homo sapien
tcaacgtagatgattctaccagcgg

SEQ ID NO: 5944014 - DNA, 25 bp, Homo sapien
ctgggatttcaatacccaagtcacc

SEQ ID NO: 5944015 - DNA, 25 bp, Homo sapien
accagccaagttagacttagcaatc

SEQ ID NO: 5944016 - DNA, 25 bp, Homo sapien
cttagcgtacttgtcatcggtggtg

SEQ ID NO: 5944017 - DNA, 25 bp, Homo sapien
caaagtcttgtcgtcaacgacttcc

SEQ ID NO: 5944018 - DNA, 25 bp, Homo sapien
agtgaccttcaagatttcgtcgaag

SEQ ID NO: 5944019 - DNA, 25 bp, Homo sapien
ttgtggtattcgtaagaaccgtgag

SEQ ID NO: 5944020 - DNA, 25 bp, Homo sapien
tcagtgaccttcaagatttcgtcga

SEQ ID NO: 5944021 - DNA, 25 bp, Homo sapien
ccttgaccttcaaagtcttgtcgtc

SEQ ID NO: 5944022 - DNA, 25 bp, Homo sapien
cttccttgtccttttcagacaaagc

SEQ ID NO: 5944023 - DNA, 25 bp, Homo sapien
cagagacaggttccttttcgaaaac

SEQ ID NO: 5944024 - DNA, 25 bp, Homo sapien
gcgacggtttcggtggtggaggttg

SEQ ID NO: 5944025 - DNA, 25 bp, Homo sapien
ttggagtacagtttctcatgtcatc

SEQ ID NO: 5944026 - DNA, 25 bp, Homo sapien
caagtcacctctggcaaccataaca

SEQ ID NO: 5944027 - DNA, 25 bp, Homo sapien
cttgggcatctggtaaccaagatga

SEQ ID NO: 5944028 - DNA, 25 bp, Homo sapien
agcggagatgaccttggtgatgttc

SEQ ID NO: 5944029 - DNA, 25 bp, Homo sapien
ttgaaaccttggatggaaacgtaag

SEQ ID NO: 5944030 - DNA, 25 bp, Homo sapien
ccttggatggaaacgtaagtgtcac

SEQ ID NO: 5944031 - DNA, 25 bp, Homo sapien
attccttagccttttcaataccgaa

SEQ ID NO: 5944032 - DNA, 25 bp, Homo sapien
gacacccttgtgggaacagatctta

SEQ ID NO: 5944033 - DNA, 25 bp, Homo sapien
aaaacgaatgggaagacacctctgt

SEQ ID NO: 5944034 - DNA, 25 bp, Homo sapien
caagtgagagaatctagcagctctt

SEQ ID NO: 5944035 - DNA, 25 bp, Homo sapien
attggacagtttggtctgtacttgg

SEQ ID NO: 5944036 - DNA, 25 bp, Homo sapien
cagcaacaacgtttaatgaggtcaa

SEQ ID NO: 5944037 - DNA, 25 bp, Homo sapien
tcttcaagataccgaattccttagc

SEQ ID NO: 5944038 - DNA, 25 bp, Homo sapien
gcgtacttgtcatcggtggtgaaga

SEQ ID NO: 5944039 - DNA, 25 bp, Homo sapien
caaccataacaccgtcagtgacctt

SEQ ID NO: 5944040 - DNA, 25 bp, Homo sapien
gcaatggccaatggtctacctgggt

SEQ ID NO: 5944041 - DNA, 25 bp, Homo sapien
gttggttttcaatcttgacaatgat

SEQ ID NO: 5944042 - DNA, 25 bp, Homo sapien
tcacccaagacttctctgatggtca

SEQ ID NO: 5944043 - DNA, 25 bp, Homo sapien
ggtaacggcgttgattgggtagtta

SEQ ID NO: 5944044 - DNA, 25 bp, Homo sapien
ttgggtagtcaacatcgttggtggt

SEQ ID NO: 5944045 - DNA, 25 bp, Homo sapien
agtcatggattccaacatttgggta

SEQ ID NO: 5944046 - DNA, 25 bp, Homo sapien
aagccttagcgtacttgtcatcggt

SEQ ID NO: 5944047 - DNA, 25 bp, Homo sapien
tgtcgtcaacgacttccaaaacttg

SEQ ID NO: 5944048 - DNA, 25 bp, Homo sapien
atttctggacccttggtgtccaaag

SEQ ID NO: 5944049 - DNA, 25 bp, Homo sapien
ttcgaaaacgaatgggaagacacct

SEQ ID NO: 5944050 - DNA, 25 bp, Homo sapien
cttggcggtttcaccagacaacata

SEQ ID NO: 5944051 - DNA, 25 bp, Homo sapien
ttgtcatcggtggtgaagatcattt

SEQ ID NO: 5944052 - DNA, 25 bp, Homo sapien
ttctcaaagcaaccaaggtttctgg

SEQ ID NO: 5944053 - DNA, 25 bp, Homo sapien
cttctcaagtcagaaccagcaacaa

SEQ ID NO: 5944054 - DNA, 25 bp, Homo sapien
ggcaagtaagcgatagcttgttcag

SEQ ID NO: 5944055 - DNA, 25 bp, Homo sapien
caatggtctacctgggtacaattct

SEQ ID NO: 5944056 - DNA, 25 bp, Homo sapien
catgtcatcgtagtttggcaagtaa

SEQ ID NO: 5944057 - DNA, 25 bp, Homo sapien
tccaaaacttggaaagacaaaacac

SEQ ID NO: 5944058 - DNA, 25 bp, Homo sapien
gtgagagaagttcatacggacaatg

SEQ ID NO: 5944059 - DNA, 25 bp, Homo sapien
ataccgaagttgatacgggcttcaa

SEQ ID NO: 5944060 - DNA, 25 bp, Homo sapien
ttgtcgtcacaagccttagcgtact

SEQ ID NO: 5944061 - DNA, 25 bp, Homo sapien
aagtcttgtcgtcaacgacttccaa

SEQ ID NO: 5944062 - DNA, 25 bp, Homo sapien
caccgttcttgacaccgaatctcaa

SEQ ID NO: 5944063 - DNA, 25 bp, Homo sapien
tgtggacaccgttcttgacaccgaa

SEQ ID NO: 5944064 - DNA, 25 bp, Homo sapien
tgtcaatgacagacttgtggtattc

SEQ ID NO: 5944065 - DNA, 25 bp, Homo sapien
gaaaccttggatggaaacgtaagtg

SEQ ID NO: 5944066 - DNA, 25 bp, Homo sapien
caagatagcgttaccgacatcggaa

SEQ ID NO: 5944067 - DNA, 25 bp, Homo sapien
gttcacccaagacttctctgatggt

SEQ ID NO: 5944068 - DNA, 25 bp, Homo sapien
tttggaccgatggtaccaatgatgg

SEQ ID NO: 5944069 - DNA, 25 bp, Homo sapien
aagatttcgtcgaagttgttaacac

SEQ ID NO: 5944070 - DNA, 25 bp, Homo sapien
agccttttcaataccgaagttgata

SEQ ID NO: 5944071 - DNA, 25 bp, Homo sapien
tagccttggccttttgttcgaaaac

SEQ ID NO: 5944072 - DNA, 25 bp, Homo sapien
agaaccgtgagagaagttcatacgg

SEQ ID NO: 5944073 - DNA, 25 bp, Homo sapien
tggccaatggtctacctgggtacaa

SEQ ID NO: 5944074 - DNA, 25 bp, Homo sapien
agccttgaccttcaaagtcttgtcg

SEQ ID NO: 5944075 - DNA, 25 bp, Homo sapien
cttcagctctggttggtcttgggtt

SEQ ID NO: 5944076 - DNA, 25 bp, Homo sapien
cttgtgggaacagatcttaccggcg

SEQ ID NO: 5944077 - DNA, 25 bp, Homo sapien
acccttggtgtccaaagcaatggcc

SEQ ID NO: 5944078 - DNA, 25 bp, Homo sapien
gtttctgggttgttggtctttggac

SEQ ID NO: 5944079 - DNA, 25 bp, Homo sapien
ttgacacccttgtgggaacagatct

SEQ ID NO: 5944080 - DNA, 25 bp, Homo sapien
ttggatggaaacgtaagtgtcaccc

SEQ ID NO: 5944081 - DNA, 25 bp, Homo sapien
aattcttcggactttctggcgttgt

SEQ ID NO: 5944082 - DNA, 25 bp, Homo sapien
tgtagtcaacgtacatgatcttgtc

SEQ ID NO: 5944083 - DNA, 25 bp, Homo sapien
ttaaacggtagagacttgcaaagtg

SEQ ID NO: 5944084 - DNA, 25 bp, Homo sapien
tgatttctggacccttggtgtccaa

SEQ ID NO: 5944085 - DNA, 25 bp, Homo sapien
tgacagacttgtggtattcgtaaga

SEQ ID NO: 5944086 - DNA, 25 bp, Homo sapien
gccatagtggtaacggcgttgattg

SEQ ID NO: 5944087 - DNA, 25 bp, Homo sapien
acttagcaatcaatttcttttggac

SEQ ID NO: 5944088 - DNA, 25 bp, Homo sapien
aaaacatcgttggcggttctgatga

SEQ ID NO: 5944089 - DNA, 25 bp, Homo sapien
gatagccttggccttttgttcgaaa

SEQ ID NO: 5944090 - DNA, 25 bp, Homo sapien
ctggttggtcttgggttgtaagtca

SEQ ID NO: 5944091 - DNA, 25 bp, Homo sapien
tgattctaccagcggagatgacctt

SEQ ID NO: 5944092 - DNA, 25 bp, Homo sapien
tcaagtcagaaccagcaacaacgtt

SEQ ID NO: 5944093 - DNA, 25 bp, Homo sapien
acttggaaagacaaaacaccatcat

SEQ ID NO: 5944094 - DNA, 25 bp, Homo sapien
gatttcgtcgaagttgttaacacct

SEQ ID NO: 5944095 - DNA, 25 bp, Homo sapien
cagttctgatttctggacccttggt

SEQ ID NO: 5944096 - DNA, 25 bp, Homo sapien
gtcagagacaggttccttttcgaaa

SEQ ID NO: 5944097 - DNA, 25 bp, Homo sapien
caatcttggggtggtaccggaagtg

SEQ ID NO: 5944098 - DNA, 25 bp, Homo sapien
cgttaccgacatcggaaacttcagc

SEQ ID NO: 5944099 - DNA, 25 bp, Homo sapien
ttgggttgtaagtcatggattccaa

SEQ ID NO: 5944100 - DNA, 25 bp, Homo sapien
tcacctctggcaaccataacaccgt

SEQ ID NO: 5944101 - DNA, 25 bp, Homo sapien
gaggttcttctcaagtcagaaccag

SEQ ID NO: 5944102 - DNA, 25 bp, Homo sapien
tgtccttttcagacaaagctggcaa

SEQ ID NO: 5944103 - DNA, 25 bp, Homo sapien
caccgaatctcaaatcttccttgtc

SEQ ID NO: 5944104 - DNA, 25 bp, Homo sapien
agctggcaaatcgacatcggtacct

SEQ ID NO: 5944105 - DNA, 25 bp, Homo sapien
ggattccaacatttgggtagcacag

SEQ ID NO: 5944106 - DNA, 25 bp, Homo sapien
gcagcgacagcggaggcagcgacgg

SEQ ID NO: 5944107 - DNA, 25 bp, Homo sapien
gtggtaacggcgttgattgggtagt

SEQ ID NO: 5944108 - DNA, 25 bp, Homo sapien
caacatttgggtagcacagataact

SEQ ID NO: 5944109 - DNA, 25 bp, Homo sapien
acaattcttcggactttctggcgtt

SEQ ID NO: 5944110 - DNA, 25 bp, Homo sapien
tagttacccttggcggtttcaccag

SEQ ID NO: 5944111 - DNA, 25 bp, Homo sapien
gttgttaacaccttgttggttttca

SEQ ID NO: 5944112 - DNA, 25 bp, Homo sapien
gtacttgtcatcggtggtgaagatc

SEQ ID NO: 5944113 - DNA, 25 bp, Homo sapien
acgtaagtgtcacccttcttcaaga

SEQ ID NO: 5944114 - DNA, 25 bp, Homo sapien
atgatagccttggccttttgttcga

SEQ ID NO: 5944115 - DNA, 25 bp, Homo sapien
ctgatgaaagaagcgaagaccatgt

SEQ ID NO: 5944116 - DNA, 25 bp, Homo sapien
atcggaaacttcagctctggttggt

SEQ ID NO: 5944117 - DNA, 25 bp, Homo sapien
tagatgattctaccagcggagatga

SEQ ID NO: 5944118 - DNA, 25 bp, Homo sapien
cagcgacggtttcggtggtggaggt

SEQ ID NO: 5944119 - DNA, 25 bp, Homo sapien
ggccttgaaaccttggatggaaacg

SEQ ID NO: 5944120 - DNA, 25 bp, Homo sapien
ctcttgggcatctggtaaccaagat

SEQ ID NO: 5944121 - DNA, 25 bp, Homo sapien
tggcgttgtcaatgacagacttgtg

SEQ ID NO: 5944122 - DNA, 25 bp, Homo sapien
gcaccatccaagatagcgttaccga

SEQ ID NO: 5944123 - DNA, 25 bp, Homo sapien
ttggtctttggaccgatggtaccaa

SEQ ID NO: 5944124 - DNA, 25 bp, Homo sapien
acatcatcagtccagtcagagacag

SEQ ID NO: 5944125 - DNA, 25 bp, Homo sapien
tggacagccaagacttctggggctg

SEQ ID NO: 5944126 - DNA, 25 bp, Homo sapien
caccatcatcaacgtagatgattct

SEQ ID NO: 5944127 - DNA, 25 bp, Homo sapien
acatcggaaacttcagctctggttg

SEQ ID NO: 5944128 - DNA, 25 bp, Homo sapien
tcaaaccagcctttctcaaagcaac

SEQ ID NO: 5944129 - DNA, 25 bp, Homo sapien
gagacttgcaaagtgttggagtgac

SEQ ID NO: 5944130 - DNA, 25 bp, Homo sapien
caatgatggaggttcttctcaagtc

SEQ ID NO: 5944131 - DNA, 25 bp, Homo sapien
cccttcttcaagataccgaattcct

SEQ ID NO: 5944132 - DNA, 25 bp, Homo sapien
gtcgtcacaagccttagcgtacttg

SEQ ID NO: 5944133 - DNA, 25 bp, Homo sapien
gacaccgaatctcaaatcttccttg

SEQ ID NO: 5944134 - DNA, 25 bp, Homo sapien
aatgacagcggtttcagccatagtg

SEQ ID NO: 5944135 - DNA, 25 bp, Homo sapien
tggcggttctgatgaaagaagcgaa

SEQ ID NO: 5944136 - DNA, 25 bp, Homo sapien
ccttggtgtccaaagcaatggccaa

SEQ ID NO: 5944137 - DNA, 25 bp, Homo sapien
atgatcttgacgtccttaccttgtt

SEQ ID NO: 5944138 - DNA, 25 bp, Homo sapien
atcaatttcttttggacagccaaga

SEQ ID NO: 5944139 - DNA, 25 bp, Homo sapien
gacagtttggtctgtacttggaaac

SEQ ID NO: 5944140 - DNA, 25 bp, Homo sapien
cggcgttcaaagccttgaccttcaa

SEQ ID NO: 5944141 - DNA, 25 bp, Homo sapien
tctaccagcggagatgaccttggtg

SEQ ID NO: 5944142 - DNA, 25 bp, Homo sapien
tcgttggcggttctgatgaaagaag

SEQ ID NO: 5944143 - DNA, 25 bp, Homo sapien
ttaacaccttgttggttttcaatct

SEQ ID NO: 5944144 - DNA, 25 bp, Homo sapien
catctggtaaccaagatgattggac

SEQ ID NO: 5944145 - DNA, 25 bp, Homo sapien
acagacttgtggtattcgtaagaac

SEQ ID NO: 5944146 - DNA, 25 bp, Homo sapien
cttttcagacaaagctggcaaatcg

SEQ ID NO: 5944147 - DNA, 25 bp, Homo sapien
cttggaaaccaatcttggggtggta

SEQ ID NO: 5944148 - DNA, 25 bp, Homo sapien
gtagtcaacatcgttggtggtggta

SEQ ID NO: 5944149 - DNA, 25 bp, Homo sapien
gtggtggtaccagttctgatttctg

SEQ ID NO: 5944150 - DNA, 25 bp, Homo sapien
ggtagagacttgcaaagtgttggag

SEQ ID NO: 5944151 - DNA, 25 bp, Homo sapien
gaggttggctttggagtacagtttc

SEQ ID NO: 5944152 - DNA, 25 bp, Homo sapien
tgaccttggtgatgttcttgtagtc

SEQ ID NO: 5944153 - DNA, 25 bp, Homo sapien
gttctgatttctggacccttggtgt

SEQ ID NO: 5944154 - DNA, 25 bp, Homo sapien
tgtcatcgtagtttggcaagtaagc

SEQ ID NO: 5944155 - DNA, 25 bp, Homo sapien
ttctggggctgggatttcaataccc

SEQ ID NO: 5944156 - DNA, 25 bp, Homo sapien
gtttggcaagtaagcgatagcttgt

SEQ ID NO: 5944157 - DNA, 25 bp, Homo sapien
tggcggtttcaccagacaacataac

SEQ ID NO: 5944158 - DNA, 25 bp, Homo sapien
cagtttctcatgtcatcgtagtttg

SEQ ID NO: 5944159 - DNA, 25 bp, Homo sapien
ggaaacgtaagtgtcacccttcttc

SEQ ID NO: 5944160 - DNA, 25 bp, Homo sapien
cggtttcagccatagtggtaacggc

SEQ ID NO: 5944161 - DNA, 25 bp, Homo sapien
acgtacatgatcttgtcgtcacaag

SEQ ID NO: 5944162 - DNA, 25 bp, Homo sapien
caacgtacatgatcttgtcgtcaca

SEQ ID NO: 5944163 - DNA, 25 bp, Homo sapien
cccttggcggtttcaccagacaaca

SEQ ID NO: 5944164 - DNA, 25 bp, Homo sapien
accttggtgatgttcttgtagtcaa

SEQ ID NO: 5944165 - DNA, 25 bp, Homo sapien
cacccttcttcaagataccgaattc

SEQ ID NO: 5944166 - DNA, 25 bp, Homo sapien
gtcaacgtacatgatcttgtcgtca

SEQ ID NO: 5944167 - DNA, 25 bp, Homo sapien
atgttcaaaccagcctttctcaaag

SEQ ID NO: 5944168 - DNA, 25 bp, Homo sapien
agacaaagctggcaaatcgacatcg

SEQ ID NO: 5944169 - DNA, 25 bp, Homo sapien
tacagtttctcatgtcatcgtagtt

SEQ ID NO: 5944170 - DNA, 25 bp, Homo sapien
tctgtacaagtgagagaatctagca

SEQ ID NO: 5944171 - DNA, 25 bp, Homo sapien
acgtttaatgaggtcaatctttcta

SEQ ID NO: 5944172 - DNA, 25 bp, Homo sapien
ccagcggagatgaccttggtgatgt

SEQ ID NO: 5944173 - DNA, 25 bp, Homo sapien
taagcgatagcttgttcagcaatga

SEQ ID NO: 5944174 - DNA, 25 bp, Homo sapien
agcaccggccttgaaaccttggatg

SEQ ID NO: 5944175 - DNA, 25 bp, Homo sapien
gcggttctgatgaaagaagcgaaga

SEQ ID NO: 5944176 - DNA, 25 bp, Homo sapien
tgaccttcaagatttcgtcgaagtt

SEQ ID NO: 5944177 - DNA, 25 bp, Homo sapien
tcttgacaccgaatctcaaatcttc

SEQ ID NO: 5944178 - DNA, 25 bp, Homo sapien
gtaccaatgatggaggttcttctca

SEQ ID NO: 5944179 - DNA, 25 bp, Homo sapien
ttgttggttttcaatcttgacaatg

SEQ ID NO: 5944180 - DNA, 25 bp, Homo sapien
accagttctgatttctggacccttg

SEQ ID NO: 5944181 - DNA, 25 bp, Homo sapien
aacgaatgggaagacacctctgtac

SEQ ID NO: 5944182 - DNA, 25 bp, Homo sapien
agatagcgttaccgacatcggaaac

SEQ ID NO: 5944183 - DNA, 25 bp, Homo sapien
tctctgatggtcaaaacatcgttgg

SEQ ID NO: 5944184 - DNA, 25 bp, Homo sapien
caagataccgaattccttagccttt

SEQ ID NO: 5944185 - DNA, 25 bp, Homo sapien
agacaaaacaccatcatcaacgtag

SEQ ID NO: 5944186 - DNA, 25 bp, Homo sapien
acaagacaatgatagccttggcctt

SEQ ID NO: 5944187 - DNA, 25 bp, Homo sapien
ttgacaatgatcttgacgtccttac

SEQ ID NO: 5944188 - DNA, 25 bp, Homo sapien
aaccttggatggaaacgtaagtgtc

SEQ ID NO: 5944189 - DNA, 25 bp, Homo sapien
catcagtccagtcagagacaggttc

SEQ ID NO: 5944190 - DNA, 25 bp, Homo sapien
agatcatttcgtggtttggtgggat

SEQ ID NO: 5944191 - DNA, 25 bp, Homo sapien
tgacagcggtttcagccatagtggt

SEQ ID NO: 5944192 - DNA, 25 bp, Homo sapien
tcgaagttgttaacaccttgttggt

SEQ ID NO: 5944193 - DNA, 25 bp, Homo sapien
tcagacaaagctggcaaatcgacat

SEQ ID NO: 5944194 - DNA, 25 bp, Homo sapien
tccaaagcaatggccaatggtctac

SEQ ID NO: 5944195 - DNA, 25 bp, Homo sapien
aacatcgttggcggttctgatgaaa

SEQ ID NO: 5944196 - DNA, 25 bp, Homo sapien
ggtctgtacttggaaaccaatcttg

SEQ ID NO: 5944197 - DNA, 25 bp, Homo sapien
ggaaagacaaaacaccatcatcaac

SEQ ID NO: 5944198 - DNA, 25 bp, Homo sapien
atacgggcttcaacatcatcagtcc

SEQ ID NO: 5944199 - DNA, 25 bp, Homo sapien
gagagaagttcatacggacaatgtt

SEQ ID NO: 5944200 - DNA, 25 bp, Homo sapien
aaccaagatgattggacagtttggt

SEQ ID NO: 5944201 - DNA, 25 bp, Homo sapien
gaccgatggtaccaatgatggaggt

SEQ ID NO: 5944202 - DNA, 25 bp, Homo sapien
tgttcgaaaacagcagcgacagcgg

SEQ ID NO: 5944203 - DNA, 25 bp, Homo sapien
cgaaaacgaatgggaagacacctct

SEQ ID NO: 5944204 - DNA, 25 bp, Homo sapien
tacttggaaaccaatcttggggtgg

SEQ ID NO: 5944205 - DNA, 25 bp, Homo sapien
ttcaataccgaagttgatacgggct

SEQ ID NO: 5944206 - DNA, 25 bp, Homo sapien
gtgaccagcaccggccttgaaacct

SEQ ID NO: 5944207 - DNA, 25 bp, Homo sapien
gatcttaccggcgttcaaagccttg

SEQ ID NO: 5944208 - DNA, 25 bp, Homo sapien
tacccaagtcacctctggcaaccat

SEQ ID NO: 5944209 - DNA, 25 bp, Homo sapien
ttttcaataccgaagttgatacggg

SEQ ID NO: 5944210 - DNA, 25 bp, Homo sapien
taccggaagtggacaagacaatgat

SEQ ID NO: 5944211 - DNA, 25 bp, Homo sapien
gagacaggttccttttcgaaaacga

SEQ ID NO: 5944212 - DNA, 25 bp, Homo sapien
ttaccagccaagttagacttagcaa

SEQ ID NO: 5944213 - DNA, 25 bp, Homo sapien
cgaagttgatacgggcttcaacatc

SEQ ID NO: 5944214 - DNA, 25 bp, Homo sapien
accttcaagatttcgtcgaagttgt

SEQ ID NO: 5944215 - DNA, 25 bp, Homo sapien
cggtggtggaggttggctttggagt

SEQ ID NO: 5944216 - DNA, 25 bp, Homo sapien
agtacagtttctcatgtcatcgtag

SEQ ID NO: 5944217 - DNA, 25 bp, Homo sapien
gcaaccaaggtttctgggttgttgg

SEQ ID NO: 5944218 - DNA, 25 bp, Homo sapien
tggtaaccaagatgattggacagtt

SEQ ID NO: 5944219 - DNA, 25 bp, Homo sapien
gccttttgttcgaaaacagcagcga

SEQ ID NO: 5944220 - DNA, 25 bp, Homo sapien
tcaaatcttccttgtccttttcaga

SEQ ID NO: 5944221 - DNA, 25 bp, Homo sapien
actttctggcgttgtcaatgacaga

SEQ ID NO: 5944222 - DNA, 25 bp, Homo sapien
tggacaccgttcttgacaccgaatc

SEQ ID NO: 5944223 - DNA, 25 bp, Homo sapien
atcatcaacgtagatgattctacca

SEQ ID NO: 5944224 - DNA, 25 bp, Homo sapien
tggcttaccagccaagttagactta

SEQ ID NO: 5944225 - DNA, 25 bp, Homo sapien
ggacccttggtgtccaaagcaatgg

SEQ ID NO: 5944226 - DNA, 25 bp, Homo sapien
gggatttcaatacccaagtcacctc

SEQ ID NO: 5944227 - DNA, 25 bp, Homo sapien
ttggctttggagtacagtttctcat

SEQ ID NO: 5944228 - DNA, 25 bp, Homo sapien
ttggcaagtaagcgatagcttgttc

SEQ ID NO: 5944229 - DNA, 25 bp, Homo sapien
cagccaagacttctggggctgggat

SEQ ID NO: 5944230 - DNA, 25 bp, Homo sapien
aagacaatgatagccttggcctttt

SEQ ID NO: 5944231 - DNA, 25 bp, Homo sapien
ctggtaagttgacacccttgtggga

SEQ ID NO: 5944232 - DNA, 25 bp, Homo sapien
agacttagcaatcaatttcttttgg

SEQ ID NO: 5944233 - DNA, 25 bp, Homo sapien
aatggccaatggtctacctgggtac

SEQ ID NO: 5944234 - DNA, 25 bp, Homo sapien
gccttagcgtacttgtcatcggtgg

SEQ ID NO: 5944235 - DNA, 25 bp, Homo sapien
tcaagatttcgtcgaagttgttaac

SEQ ID NO: 5944236 - DNA, 25 bp, Homo sapien
gagatgaccttggtgatgttcttgt

SEQ ID NO: 5944237 - DNA, 25 bp, Homo sapien
tttcaccagacaacataacacagtc

SEQ ID NO: 5944238 - DNA, 25 bp, Homo sapien
cagcagcgacagcggaggcagcgac

SEQ ID NO: 5944239 - DNA, 25 bp, Homo sapien
gtgaagatcatttcgtggtttggtg

SEQ ID NO: 5944240 - DNA, 25 bp, Homo sapien
tcgtcaacgacttccaaaacttgga

SEQ ID NO: 5944241 - DNA, 25 bp, Homo sapien
agtaagcgatagcttgttcagcaat

SEQ ID NO: 5944242 - DNA, 25 bp, Homo sapien
gacaccgttcttgacaccgaatctc

SEQ ID NO: 5944243 - DNA, 25 bp, Homo sapien
accaatgatggaggttcttctcaag

SEQ ID NO: 5944244 - DNA, 25 bp, Homo sapien
taccttgttcacccaagacttctct

SEQ ID NO: 5944245 - DNA, 25 bp, Homo sapien
gccaatggtctacctgggtacaatt

SEQ ID NO: 5944246 - DNA, 25 bp, Homo sapien
gatgttcttgtagtcaacgtacatg

SEQ ID NO: 5944247 - DNA, 25 bp, Homo sapien
gccaagacttctggggctgggattt

SEQ ID NO: 5944248 - DNA, 25 bp, Homo sapien
gttgttggtctttggaccgatggta

SEQ ID NO: 5944249 - DNA, 25 bp, Homo sapien
acaagccttagcgtacttgtcatcg

SEQ ID NO: 5944250 - DNA, 25 bp, Homo sapien
tggccttttgttcgaaaacagcagc

SEQ ID NO: 5944251 - DNA, 25 bp, Homo sapien
caagacttctggggctgggatttca

SEQ ID NO: 5944252 - DNA, 25 bp, Homo sapien
tcaatacccaagtcacctctggcaa

SEQ ID NO: 5944253 - DNA, 25 bp, Homo sapien
tctcaagtcagaaccagcaacaacg

SEQ ID NO: 5944254 - DNA, 25 bp, Homo sapien
caatcaatttcttttggacagccaa

SEQ ID NO: 5944255 - DNA, 25 bp, Homo sapien
ctggggctgggatttcaatacccaa

SEQ ID NO: 5944256 - DNA, 25 bp, Homo sapien
gtggtaccggaagtggacaagacaa

SEQ ID NO: 5944257 - DNA, 25 bp, Homo sapien
cttctctgatggtcaaaacatcgtt

SEQ ID NO: 5944258 - DNA, 25 bp, Homo sapien
cttggccttttgttcgaaaacagca

SEQ ID NO: 5944259 - DNA, 25 bp, Homo sapien
gaccagcaccggccttgaaaccttg

SEQ ID NO: 5944260 - DNA, 25 bp, Homo sapien
tacccttggcggtttcaccagacaa

SEQ ID NO: 5944261 - DNA, 25 bp, Homo sapien
tcacaagccttagcgtacttgtcat

SEQ ID NO: 5944262 - DNA, 25 bp, Homo sapien
ttcagccatagtggtaacggcgttg

SEQ ID NO: 5944263 - DNA, 25 bp, Homo sapien
atggattccaacatttgggtagcac

SEQ ID NO: 5944264 - DNA, 25 bp, Homo sapien
ccttgttggttttcaatcttgacaa

SEQ ID NO: 5944265 - DNA, 25 bp, Homo sapien
agagaatctagcagctcttgggcat

SEQ ID NO: 5944266 - DNA, 25 bp, Homo sapien
acaaaacaccatcatcaacgtagat

SEQ ID NO: 5944267 - DNA, 25 bp, Homo sapien
aatgaggtcaatctttctaatctag

SEQ ID NO: 5944268 - DNA, 25 bp, Homo sapien
gggttgttggtctttggaccgatgg

SEQ ID NO: 5944269 - DNA, 25 bp, Homo sapien
gatgattggacagtttggtctgtac

SEQ ID NO: 5944270 - DNA, 25 bp, Homo sapien
tagtcaacgtacatgatcttgtcgt

SEQ ID NO: 5944271 - DNA, 25 bp, Homo sapien
atcatttcgtggtttggtgggattg

SEQ ID NO: 5944272 - DNA, 25 bp, Homo sapien
acccaagacttctctgatggtcaaa

SEQ ID NO: 5944273 - DNA, 25 bp, Homo sapien
ccagcaccggccttgaaaccttgga

SEQ ID NO: 5944274 - DNA, 25 bp, Homo sapien
aacaccttgttggttttcaatcttg

SEQ ID NO: 5944275 - DNA, 25 bp, Homo sapien
ctcatgtcatcgtagtttggcaagt

SEQ ID NO: 5944276 - DNA, 25 bp, Homo sapien
cttggggtggtaccggaagtggaca

SEQ ID NO: 5944277 - DNA, 25 bp, Homo sapien
tggtgaagatcatttcgtggtttgg

SEQ ID NO: 5944278 - DNA, 25 bp, Homo sapien
cggacaatgttcaaaccagcctttc

SEQ ID NO: 5944279 - DNA, 25 bp, Homo sapien
taagaaccgtgagagaagttcatac

SEQ ID NO: 5944280 - DNA, 25 bp, Homo sapien
gtttcggtggtggaggttggctttg

SEQ ID NO: 5944281 - DNA, 25 bp, Homo sapien
ctttctcaaagcaaccaaggtttct

SEQ ID NO: 5944282 - DNA, 25 bp, Homo sapien
ggcaaatcgacatcggtacctggta

SEQ ID NO: 5944283 - DNA, 25 bp, Homo sapien
ttcttttggacagccaagacttctg

SEQ ID NO: 5944284 - DNA, 25 bp, Homo sapien
catcgttggcggttctgatgaaaga

SEQ ID NO: 5944285 - DNA, 25 bp, Homo sapien
aaaacaccatcatcaacgtagatga

SEQ ID NO: 5944286 - DNA, 25 bp, Homo sapien
accataacaccgtcagtgaccttca

SEQ ID NO: 5944287 - DNA, 25 bp, Homo sapien
gttggcggttctgatgaaagaagcg

SEQ ID NO: 5944288 - DNA, 25 bp, Homo sapien
aacatcgttggtggtggtaccagtt

SEQ ID NO: 5944289 - DNA, 25 bp, Homo sapien
ctctggttggtcttgggttgtaagt

SEQ ID NO: 5944290 - DNA, 25 bp, Homo sapien
gatggaggttcttctcaagtcagaa

SEQ ID NO: 5944291 - DNA, 25 bp, Homo sapien
gaagttcatacggacaatgttcaaa

SEQ ID NO: 5944292 - DNA, 25 bp, Homo sapien
tgggcatctggtaaccaagatgatt

SEQ ID NO: 5944293 - DNA, 25 bp, Homo sapien
cgtcacaagccttagcgtacttgtc

SEQ ID NO: 5944294 - DNA, 25 bp, Homo sapien
acaccgtcagtgaccttcaagattt

SEQ ID NO: 5944295 - DNA, 25 bp, Homo sapien
gggattgggtagtcaacatcgttgg

SEQ ID NO: 5944296 - DNA, 25 bp, Homo sapien
ggcatctggtaaccaagatgattgg

SEQ ID NO: 5944297 - DNA, 25 bp, Homo sapien
gggtagcacagataactggcttacc

SEQ ID NO: 5944298 - DNA, 25 bp, Homo sapien
tgtaagtcatggattccaacatttg

SEQ ID NO: 5944299 - DNA, 25 bp, Homo sapien
cacccttgtgggaacagatcttacc

SEQ ID NO: 5944300 - DNA, 25 bp, Homo sapien
ggacaagacaatgatagccttggcc

SEQ ID NO: 5944301 - DNA, 25 bp, Homo sapien
accatgtggacaccgttcttgacac

SEQ ID NO: 5944302 - DNA, 25 bp, Homo sapien
tgtccaaagcaatggccaatggtct

SEQ ID NO: 5944303 - DNA, 25 bp, Homo sapien
gagtgaccagcaccggccttgaaac

SEQ ID NO: 5944304 - DNA, 25 bp, Homo sapien
ggcagcgacggtttcggtggtggag

SEQ ID NO: 5944305 - DNA, 25 bp, Homo sapien
gcaatgacagcggtttcagccatag

SEQ ID NO: 5944306 - DNA, 25 bp, Homo sapien
tccagtcagagacaggttccttttc

SEQ ID NO: 5944307 - DNA, 25 bp, Homo sapien
ttaccggcgttcaaagccttgacct

SEQ ID NO: 5944308 - DNA, 25 bp, Homo sapien
ttaatgaggtcaatctttctaatct

SEQ ID NO: 5944309 - DNA, 25 bp, Homo sapien
tctacctgggtacaattcttcggac

SEQ ID NO: 5944310 - DNA, 25 bp, Homo sapien
acaaagctggcaaatcgacatcggt

SEQ ID NO: 5944311 - DNA, 25 bp, Homo sapien
gttacccttggcggtttcaccagac

SEQ ID NO: 5944312 - DNA, 25 bp, Homo sapien
tggggtggtaccggaagtggacaag

SEQ ID NO: 5944313 - DNA, 25 bp, Homo sapien
tccttgtccttttcagacaaagctg

SEQ ID NO: 5944314 - DNA, 25 bp, Homo sapien
gggcttcaacatcatcagtccagtc

SEQ ID NO: 5944315 - DNA, 25 bp, Homo sapien
agcggtttcagccatagtggtaacg

SEQ ID NO: 5944316 - DNA, 25 bp, Homo sapien
agtcacctctggcaaccataacacc

SEQ ID NO: 5944317 - DNA, 25 bp, Homo sapien
aaagctggcaaatcgacatcggtac

SEQ ID NO: 5944318 - DNA, 25 bp, Homo sapien
gttgtcaatgacagacttgtggtat

SEQ ID NO: 5944319 - DNA, 25 bp, Homo sapien
cggaggcagcgacggtttcggtggt

SEQ ID NO: 5944320 - DNA, 25 bp, Homo sapien
tggaccgatggtaccaatgatggag

SEQ ID NO: 5944321 - DNA, 25 bp, Homo sapien
agttagacttagcaatcaatttctt

SEQ ID NO: 5944322 - DNA, 25 bp, Homo sapien
aagtgtcacccttcttcaagatacc

SEQ ID NO: 5944323 - DNA, 25 bp, Homo sapien
acagcggaggcagcgacggtttcgg

SEQ ID NO: 5944324 - DNA, 25 bp, Homo sapien
gttcaaaccagcctttctcaaagca

SEQ ID NO: 5944325 - DNA, 25 bp, Homo sapien
cacagataactggcttaccagccaa

SEQ ID NO: 5944326 - DNA, 25 bp, Homo sapien
ggtaccggaagtggacaagacaatg

SEQ ID NO: 5944327 - DNA, 25 bp, Homo sapien
tgaggtcaatctttctaatctagac

SEQ ID NO: 5944328 - DNA, 25 bp, Homo sapien
tctggtaaccaagatgattggacag

SEQ ID NO: 5944329 - DNA, 25 bp, Homo sapien
ttagccttttcaataccgaagttga

SEQ ID NO: 5944330 - DNA, 25 bp, Homo sapien
gcaacaacgtttaatgaggtcaatc

SEQ ID NO: 5944331 - DNA, 25 bp, Homo sapien
tccttaccttgttcacccaagactt

SEQ ID NO: 5944332 - DNA, 25 bp, Homo sapien
ataacacagtcagcaccatccaaga

SEQ ID NO: 5944333 - DNA, 25 bp, Homo sapien
gaatctcaaatcttccttgtccttt

SEQ ID NO: 5944334 - DNA, 25 bp, Homo sapien
tccttttcagacaaagctggcaaat

SEQ ID NO: 5944335 - DNA, 25 bp, Homo sapien
gaccttcaaagtcttgtcgtcaacg

SEQ ID NO: 5944336 - DNA, 25 bp, Homo sapien
tttcaatacccaagtcacctctggc

SEQ ID NO: 5944337 - DNA, 25 bp, Homo sapien
cggagatgaccttggtgatgttctt

SEQ ID NO: 5944338 - DNA, 25 bp, Homo sapien
ggtaagttgacacccttgtgggaac

SEQ ID NO: 5944339 - DNA, 25 bp, Homo sapien
acttgtcatcggtggtgaagatcat

SEQ ID NO: 5944340 - DNA, 25 bp, Homo sapien
acctggtaagttgacacccttgtgg

SEQ ID NO: 5944341 - DNA, 25 bp, Homo sapien
gatggtaccaatgatggaggttctt

SEQ ID NO: 5944342 - DNA, 25 bp, Homo sapien
ttcaacatcatcagtccagtcagag

SEQ ID NO: 5944343 - DNA, 25 bp, Homo sapien
tcgacatcggtacctggtaagttga

SEQ ID NO: 5944344 - DNA, 25 bp, Homo sapien
tcatcgtagtttggcaagtaagcga

SEQ ID NO: 5944345 - DNA, 25 bp, Homo sapien
agaccatgtggacaccgttcttgac

SEQ ID NO: 5944346 - DNA, 25 bp, Homo sapien
taacggcgttgattgggtagttacc

SEQ ID NO: 5944347 - DNA, 25 bp, Homo sapien
aacagcagcgacagcggaggcagcg

SEQ ID NO: 5944348 - DNA, 25 bp, Homo sapien
ccgttcttgacaccgaatctcaaat

SEQ ID NO: 5944349 - DNA, 25 bp, Homo sapien
cttggtgatgttcttgtagtcaacg

SEQ ID NO: 5944350 - DNA, 25 bp, Homo sapien
aatcgacatcggtacctggtaagtt

SEQ ID NO: 5944351 - DNA, 25 bp, Homo sapien
aacagatcttaccggcgttcaaagc

SEQ ID NO: 5944352 - DNA, 25 bp, Homo sapien
gcagctcttgggcatctggtaacca

SEQ ID NO: 5944353 - DNA, 25 bp, Homo sapien
tggaggttggctttggagtacagtt

SEQ ID NO: 5944354 - DNA, 25 bp, Homo sapien
tggtaccagttctgatttctggacc

SEQ ID NO: 5944355 - DNA, 25 bp, Homo sapien
gtaccagttctgatttctggaccct

SEQ ID NO: 5944356 - DNA, 25 bp, Homo sapien
ttcttcggactttctggcgttgtca

SEQ ID NO: 5944357 - DNA, 25 bp, Homo sapien
cttcaagatttcgtcgaagttgtta

SEQ ID NO: 5944358 - DNA, 25 bp, Homo sapien
tggtgggattgggtagtcaacatcg

SEQ ID NO: 5944359 - DNA, 25 bp, Homo sapien
gatgaaagaagcgaagaccatgtgg

SEQ ID NO: 5944360 - DNA, 25 bp, Homo sapien
aacaccatcatcaacgtagatgatt

SEQ ID NO: 5944361 - DNA, 25 bp, Homo sapien
caatgttcaaaccagcctttctcaa

SEQ ID NO: 5944362 - DNA, 25 bp, Homo sapien
aaagacaaaacaccatcatcaacgt

SEQ ID NO: 5944363 - DNA, 25 bp, Homo sapien
ggtttcaccagacaacataacacag

SEQ ID NO: 5944364 - DNA, 25 bp, Homo sapien
ttctcatgtcatcgtagtttggcaa

SEQ ID NO: 5944365 - DNA, 25 bp, Homo sapien
gtcagaaccagcaacaacgtttaat

SEQ ID NO: 5944366 - DNA, 25 bp, Homo sapien
cccttgtgggaacagatcttaccgg

SEQ ID NO: 5944367 - DNA, 25 bp, Homo sapien
agctcttgggcatctggtaaccaag

SEQ ID NO: 5944368 - DNA, 25 bp, Homo sapien
gcgttgattgggtagttacccttgg

SEQ ID NO: 5944369 - DNA, 25 bp, Homo sapien
aaacgtaagtgtcacccttcttcaa

SEQ ID NO: 5944370 - DNA, 25 bp, Homo sapien
caccggccttgaaaccttggatgga

SEQ ID NO: 5944371 - DNA, 25 bp, Homo sapien
taccgaattccttagccttttcaat

SEQ ID NO: 5944372 - DNA, 25 bp, Homo sapien
actggcttaccagccaagttagact

SEQ ID NO: 5944373 - DNA, 25 bp, Homo sapien
cgtaagaaccgtgagagaagttcat

SEQ ID NO: 5944374 - DNA, 25 bp, Homo sapien
atgatcttgtcgtcacaagccttag

SEQ ID NO: 5944375 - DNA, 25 bp, Homo sapien
aagtggacaagacaatgatagcctt

SEQ ID NO: 5944376 - DNA, 25 bp, Homo sapien
cagcctttctcaaagcaaccaaggt

SEQ ID NO: 5944377 - DNA, 25 bp, Homo sapien
caatgatagccttggccttttgttc

SEQ ID NO: 5944378 - DNA, 25 bp, Homo sapien
agacttgtggtattcgtaagaaccg

SEQ ID NO: 5944379 - DNA, 25 bp, Homo sapien
tcaaagccttgaccttcaaagtctt

SEQ ID NO: 5944380 - DNA, 25 bp, Homo sapien
gtcaacgacttccaaaacttggaaa

SEQ ID NO: 5944381 - DNA, 25 bp, Homo sapien
tttcagacaaagctggcaaatcgac

SEQ ID NO: 5944382 - DNA, 25 bp, Homo sapien
tcaacatcgttggtggtggtaccag

SEQ ID NO: 5944383 - DNA, 25 bp, Homo sapien
caccttgttggttttcaatcttgac

SEQ ID NO: 5944384 - DNA, 25 bp, Homo sapien
aatctagcagctcttgggcatctgg

SEQ ID NO: 5944385 - DNA, 25 bp, Homo sapien
tcttgtcgtcacaagccttagcgta

SEQ ID NO: 5944386 - DNA, 25 bp, Homo sapien
gttggagtgaccagcaccggccttg

SEQ ID NO: 5944387 - DNA, 25 bp, Homo sapien
tgggaacagatcttaccggcgttca

SEQ ID NO: 5944388 - DNA, 25 bp, Homo sapien
tcagctctggttggtcttgggttgt

SEQ ID NO: 5944389 - DNA, 25 bp, Homo sapien
tcaaaacatcgttggcggttctgat

SEQ ID NO: 5944390 - DNA, 25 bp, Homo sapien
aacttcagctctggttggtcttggg

SEQ ID NO: 5944391 - DNA, 25 bp, Homo sapien
tcaatgacagacttgtggtattcgt

SEQ ID NO: 5944392 - DNA, 25 bp, Homo sapien
cagaaccagcaacaacgtttaatga

SEQ ID NO: 5944393 - DNA, 25 bp, Homo sapien
tacctgggtacaattcttcggactt

SEQ ID NO: 5944394 - DNA, 25 bp, Homo sapien
gatttcaatacccaagtcacctctg

SEQ ID NO: 5944395 - DNA, 25 bp, Homo sapien
tctggcgttgtcaatgacagacttg

SEQ ID NO: 5944396 - DNA, 25 bp, Homo sapien
ttcggtggtggaggttggctttgga

SEQ ID NO: 5944397 - DNA, 25 bp, Homo sapien
ccgaatctcaaatcttccttgtcct

SEQ ID NO: 5944398 - DNA, 25 bp, Homo sapien
gcgttgtcaatgacagacttgtggt

SEQ ID NO: 5944399 - DNA, 25 bp, Homo sapien
gattgggtagtcaacatcgttggtg

SEQ ID NO: 5944400 - DNA, 25 bp, Homo sapien
ttctgggttgttggtctttggaccg

SEQ ID NO: 5944401 - DNA, 25 bp, Homo sapien
ggttctgatgaaagaagcgaagacc

SEQ ID NO: 5944402 - DNA, 25 bp, Homo sapien
gccaagttagacttagcaatcaatt

SEQ ID NO: 5944403 - DNA, 25 bp, Homo sapien
gttgtaagtcatggattccaacatt

SEQ ID NO: 5944404 - DNA, 25 bp, Homo sapien
ggactttctggcgttgtcaatgaca

SEQ ID NO: 5944405 - DNA, 25 bp, Homo sapien
gacttccaaaacttggaaagacaaa

SEQ ID NO: 5944406 - DNA, 25 bp, Homo sapien
tcggtacctggtaagttgacaccct

SEQ ID NO: 5944407 - DNA, 25 bp, Homo sapien
aagcaatggccaatggtctacctgg

SEQ ID NO: 5944408 - DNA, 25 bp, Homo sapien
ggtgtccaaagcaatggccaatggt

SEQ ID NO: 5944409 - DNA, 25 bp, Homo sapien
ttggtgtccaaagcaatggccaatg

SEQ ID NO: 5944410 - DNA, 25 bp, Homo sapien
ccaagacttctctgatggtcaaaac

SEQ ID NO: 5944411 - DNA, 25 bp, Homo sapien
accagacaacataacacagtcagca

SEQ ID NO: 5944412 - DNA, 25 bp, Homo sapien
tgttcttgtagtcaacgtacatgat

SEQ ID NO: 5944413 - DNA, 25 bp, Homo sapien
agtgagagaatctagcagctcttgg

SEQ ID NO: 5944414 - DNA, 25 bp, Homo sapien
gtggacaagacaatgatagccttgg

SEQ ID NO: 5944415 - DNA, 25 bp, Homo sapien
cgtcagtgaccttcaagatttcgtc

SEQ ID NO: 5944416 - DNA, 25 bp, Homo sapien
gtggtattcgtaagaaccgtgagag

SEQ ID NO: 5944417 - DNA, 25 bp, Homo sapien
cagcaatgacagcggtttcagccat

SEQ ID NO: 5944418 - DNA, 25 bp, Homo sapien
tggacagtttggtctgtacttggaa

SEQ ID NO: 5944419 - DNA, 25 bp, Homo sapien
agcgatagcttgttcagcaatgaca

SEQ ID NO: 5944420 - DNA, 25 bp, Homo sapien
ttggaaagacaaaacaccatcatca

SEQ ID NO: 5944421 - DNA, 25 bp, Homo sapien
ttcttctcaagtcagaaccagcaac

SEQ ID NO: 5944422 - DNA, 25 bp, Homo sapien
acatgatcttgtcgtcacaagcctt

SEQ ID NO: 5944423 - DNA, 25 bp, Homo sapien
gtaaccaagatgattggacagtttg

SEQ ID NO: 5944424 - DNA, 25 bp, Homo sapien
ttctgatgaaagaagcgaagaccat

SEQ ID NO: 5944425 - DNA, 25 bp, Homo sapien
ggtggaggttggctttggagtacag

SEQ ID NO: 5944426 - DNA, 25 bp, Homo sapien
gttcaaagccttgaccttcaaagtc

SEQ ID NO: 5944427 - DNA, 25 bp, Homo sapien
gacaatgttcaaaccagcctttctc

SEQ ID NO: 5944428 - DNA, 25 bp, Homo sapien
ccaagatgattggacagtttggtct

SEQ ID NO: 5944429 - DNA, 25 bp, Homo sapien
gggtagtcaacatcgttggtggtgg

SEQ ID NO: 5944430 - DNA, 25 bp, Homo sapien
tagcagctcttgggcatctggtaac

SEQ ID NO: 5944431 - DNA, 25 bp, Homo sapien
atttgggtagcacagataactggct

SEQ ID NO: 5944432 - DNA, 25 bp, Homo sapien
cagccaagttagacttagcaatcaa

SEQ ID NO: 5944433 - DNA, 25 bp, Homo sapien
cggaaacttcagctctggttggtct

SEQ ID NO: 5944434 - DNA, 25 bp, Homo sapien
tggaggttcttctcaagtcagaacc

SEQ ID NO: 5944435 - DNA, 25 bp, Homo sapien
cagtttggtctgtacttggaaacca

SEQ ID NO: 5944436 - DNA, 25 bp, Homo sapien
agtcaacatcgttggtggtggtacc

SEQ ID NO: 5944437 - DNA, 25 bp, Homo sapien
ggtattcgtaagaaccgtgagagaa

SEQ ID NO: 5944438 - DNA, 25 bp, Homo sapien
atcttggggtggtaccggaagtgga

SEQ ID NO: 5944439 - DNA, 25 bp, Homo sapien
tcttgacaatgatcttgacgtcctt

SEQ ID NO: 5944440 - DNA, 25 bp, Homo sapien
ttggtcttgggttgtaagtcatgga

SEQ ID NO: 5944441 - DNA, 25 bp, Homo sapien
attccaacatttgggtagcacagat

SEQ ID NO: 5944442 - DNA, 25 bp, Homo sapien
gatcttgacgtccttaccttgttca

SEQ ID NO: 5944443 - DNA, 25 bp, Homo sapien
tcaatcttgacaatgatcttgacgt

SEQ ID NO: 5944444 - DNA, 25 bp, Homo sapien
tcttgggttgtaagtcatggattcc

SEQ ID NO: 5944445 - DNA, 25 bp, Homo sapien
catcggtacctggtaagttgacacc

SEQ ID NO: 5944446 - DNA, 25 bp, Homo sapien
ggctgggatttcaatacccaagtca

SEQ ID NO: 5944447 - DNA, 25 bp, Homo sapien
agctctggttggtcttgggttgtaa

SEQ ID NO: 5944448 - DNA, 25 bp, Homo sapien
caaagtgttggagtgaccagcaccg

SEQ ID NO: 5944449 - DNA, 25 bp, Homo sapien
gaaccagcaacaacgtttaatgagg

SEQ ID NO: 5944450 - DNA, 25 bp, Homo sapien
gacatcggtacctggtaagttgaca

SEQ ID NO: 5944451 - DNA, 25 bp, Homo sapien
tgtacttggaaaccaatcttggggt

SEQ ID NO: 5944452 - DNA, 25 bp, Homo sapien
atcatcagtccagtcagagacaggt

SEQ ID NO: 5944453 - DNA, 25 bp, Homo sapien
caatgatcttgacgtccttaccttg

SEQ ID NO: 5944454 - DNA, 25 bp, Homo sapien
tccaagatagcgttaccgacatcgg

SEQ ID NO: 5944455 - DNA, 25 bp, Homo sapien
ggggctgggatttcaatacccaagt

SEQ ID NO: 5944456 - DNA, 25 bp, Homo sapien
tctgtacttggaaaccaatcttggg

SEQ ID NO: 5944457 - DNA, 25 bp, Homo sapien
gttgattgggtagttacccttggcg

SEQ ID NO: 5944458 - DNA, 25 bp, Homo sapien
gcctttctcaaagcaaccaaggttt

SEQ ID NO: 5944459 - DNA, 25 bp, Homo sapien
tgttggtctttggaccgatggtacc

SEQ ID NO: 5944460 - DNA, 25 bp, Homo sapien
tggttttcaatcttgacaatgatct

SEQ ID NO: 5944461 - DNA, 25 bp, Homo sapien
caacgtttaatgaggtcaatctttc

SEQ ID NO: 5944462 - DNA, 25 bp, Homo sapien
tcaccagacaacataacacagtcag

SEQ ID NO: 5944463 - DNA, 25 bp, Homo sapien
cacctctgtacaagtgagagaatct

SEQ ID NO: 5944464 - DNA, 25 bp, Homo sapien
gacggtttcggtggtggaggttggc

SEQ ID NO: 5944465 - DNA, 25 bp, Homo sapien
gtacaattcttcggactttctggcg

SEQ ID NO: 5944466 - DNA, 25 bp, Homo sapien
cagatcttaccggcgttcaaagcct

SEQ ID NO: 5944467 - DNA, 25 bp, Homo sapien
tgtacaagtgagagaatctagcagc

SEQ ID NO: 5944468 - DNA, 25 bp, Homo sapien
caaagcaaccaaggtttctgggttg

SEQ ID NO: 5944469 - DNA, 25 bp, Homo sapien
acgggcttcaacatcatcagtccag

SEQ ID NO: 5944470 - DNA, 25 bp, Homo sapien
gtttcagccatagtggtaacggcgt

SEQ ID NO: 5944471 - DNA, 25 bp, Homo sapien
aaaacagcagcgacagcggaggcag

SEQ ID NO: 5944472 - DNA, 25 bp, Homo sapien
cgatagcttgttcagcaatgacagc

SEQ ID NO: 5944473 - DNA, 25 bp, Homo sapien
ccggaagtggacaagacaatgatag

SEQ ID NO: 5944474 - DNA, 25 bp, Homo sapien
ccttcaaagtcttgtcgtcaacgac

SEQ ID NO: 5944475 - DNA, 25 bp, Homo sapien
aagtcagaaccagcaacaacgttta

SEQ ID NO: 5944476 - DNA, 25 bp, Homo sapien
aaccgtgagagaagttcatacggac

SEQ ID NO: 5944477 - DNA, 25 bp, Homo sapien
gtttctcatgtcatcgtagtttggc

SEQ ID NO: 5944478 - DNA, 25 bp, Homo sapien
aatacccaagtcacctctggcaacc

SEQ ID NO: 5944479 - DNA, 25 bp, Homo sapien
acttgtggtattcgtaagaaccgtg

SEQ ID NO: 5944480 - DNA, 25 bp, Homo sapien
tcatggattccaacatttgggtagc

SEQ ID NO: 5944481 - DNA, 25 bp, Homo sapien
cttcggactttctggcgttgtcaat

SEQ ID NO: 5944482 - DNA, 25 bp, Homo sapien
tggaaaccaatcttggggtggtacc

SEQ ID NO: 5944483 - DNA, 25 bp, Homo sapien
aacgtagatgattctaccagcggag

SEQ ID NO: 5944484 - DNA, 25 bp, Homo sapien
tgcaaagtgttggagtgaccagcac

SEQ ID NO: 5944485 - DNA, 25 bp, Homo sapien
ccgtgagagaagttcatacggacaa

SEQ ID NO: 5944486 - DNA, 25 bp, Homo sapien
catcgttggtggtggtaccagttct

SEQ ID NO: 5944487 - DNA, 25 bp, Homo sapien
gcttcaacatcatcagtccagtcag

SEQ ID NO: 5944488 - DNA, 25 bp, Homo sapien
acggtagagacttgcaaagtgttgg

SEQ ID NO: 5944489 - DNA, 25 bp, Homo sapien
aggtcaatctttctaatctagacat

SEQ ID NO: 5944490 - DNA, 25 bp, Homo sapien
tacaagtgagagaatctagcagctc

SEQ ID NO: 5944491 - DNA, 25 bp, Homo sapien
catccaagatagcgttaccgacatc

SEQ ID NO: 5944492 - DNA, 25 bp, Homo sapien
tcggtggtgaagatcatttcgtggt

SEQ ID NO: 5944493 - DNA, 25 bp, Homo sapien
ttcttgtagtcaacgtacatgatct

SEQ ID NO: 5944494 - DNA, 25 bp, Homo sapien
tagcgtacttgtcatcggtggtgaa

SEQ ID NO: 5944495 - DNA, 25 bp, Homo sapien
tagagacttgcaaagtgttggagtg

SEQ ID NO: 5944496 - DNA, 25 bp, Homo sapien
tgttaacaccttgttggttttcaat

SEQ ID NO: 5944497 - DNA, 25 bp, Homo sapien
gtgtcacccttcttcaagataccga

SEQ ID NO: 5944498 - DNA, 25 bp, Homo sapien
accagcaacaacgtttaatgaggtc

SEQ ID NO: 5944499 - DNA, 25 bp, Homo sapien
tgattggacagtttggtctgtactt

SEQ ID NO: 5944500 - DNA, 25 bp, Homo sapien
caacatcatcagtccagtcagagac

SEQ ID NO: 5944501 - DNA, 25 bp, Homo sapien
gtagcacagataactggcttaccag

SEQ ID NO: 5944502 - DNA, 25 bp, Homo sapien
gggtggtaccggaagtggacaagac

SEQ ID NO: 5944503 - DNA, 25 bp, Homo sapien
gatcttgtcgtcacaagccttagcg

SEQ ID NO: 5944504 - DNA, 25 bp, Homo sapien
aagtgttggagtgaccagcaccggc

SEQ ID NO: 5944505 - DNA, 25 bp, Homo sapien
gaggcagcgacggtttcggtggtgg

SEQ ID NO: 5944506 - DNA, 25 bp, Homo sapien
gtcagcaccatccaagatagcgtta

SEQ ID NO: 5944507 - DNA, 25 bp, Homo sapien
cacagtcagcaccatccaagatagc

SEQ ID NO: 5944508 - DNA, 25 bp, Homo sapien
aaatcttccttgtccttttcagaca

SEQ ID NO: 5944509 - DNA, 25 bp, Homo sapien
ttagcaatcaatttcttttggacag

SEQ ID NO: 5944510 - DNA, 25 bp, Homo sapien
taccagcggagatgaccttggtgat

SEQ ID NO: 5944511 - DNA, 25 bp, Homo sapien
catacggacaatgttcaaaccagcc

SEQ ID NO: 5944512 - DNA, 25 bp, Homo sapien
cttttgttcgaaaacagcagcgaca

SEQ ID NO: 5944513 - DNA, 25 bp, Homo sapien
caatttcttttggacagccaagact

SEQ ID NO: 5944514 - DNA, 25 bp, Homo sapien
gggttgtaagtcatggattccaaca

SEQ ID NO: 5944515 - DNA, 25 bp, Homo sapien
tcggactttctggcgttgtcaatga

SEQ ID NO: 5944516 - DNA, 25 bp, Homo sapien
catcggtggtgaagatcatttcgtg

SEQ ID NO: 5944517 - DNA, 25 bp, Homo sapien
ggttggtcttgggttgtaagtcatg

SEQ ID NO: 5944518 - DNA, 25 bp, Homo sapien
ggtggtaccagttctgatttctgga

SEQ ID NO: 5944519 - DNA, 25 bp, Homo sapien
cttgcaaagtgttggagtgaccagc

SEQ ID NO: 5944520 - DNA, 25 bp, Homo sapien
gtttaatgaggtcaatctttctaat

SEQ ID NO: 5944521 - DNA, 25 bp, Homo sapien
cagtcagagacaggttccttttcga

SEQ ID NO: 5944522 - DNA, 25 bp, Homo sapien
gaattccttagccttttcaataccg

SEQ ID NO: 5944523 - DNA, 25 bp, Homo sapien
cgtccttaccttgttcacccaagac

SEQ ID NO: 5944524 - DNA, 25 bp, Homo sapien
cgaatgggaagacacctctgtacaa

SEQ ID NO: 5944525 - DNA, 25 bp, Homo sapien
cgaaaacagcagcgacagcggaggc

SEQ ID NO: 5944526 - DNA, 25 bp, Homo sapien
tagtttggcaagtaagcgatagctt

SEQ ID NO: 5944527 - DNA, 25 bp, Homo sapien
agcacagataactggcttaccagcc

SEQ ID NO: 5944528 - DNA, 25 bp, Homo sapien
caacataacacagtcagcaccatcc

SEQ ID NO: 5944529 - DNA, 25 bp, Homo sapien
caataccgaagttgatacgggcttc

SEQ ID NO: 5944530 - DNA, 25 bp, Homo sapien
tgagagaatctagcagctcttgggc

SEQ ID NO: 5944531 - DNA, 25 bp, Homo sapien
ggttcttctcaagtcagaaccagca

SEQ ID NO: 5944532 - DNA, 25 bp, Homo sapien
ttcagcaatgacagcggtttcagcc

SEQ ID NO: 5944533 - DNA, 25 bp, Homo sapien
atagcgttaccgacatcggaaactt

SEQ ID NO: 5944534 - DNA, 25 bp, Homo sapien
cataacaccgtcagtgaccttcaag

SEQ ID NO: 5944535 - DNA, 25 bp, Homo sapien
tttctggcgttgtcaatgacagact

SEQ ID NO: 5944536 - DNA, 25 bp, Homo sapien
cgtagatgattctaccagcggagat

SEQ ID NO: 5944537 - DNA, 25 bp, Homo sapien
gttggtggtggtaccagttctgatt

SEQ ID NO: 5944538 - DNA, 25 bp, Homo sapien
tttcaatcttgacaatgatcttgac

SEQ ID NO: 5944539 - DNA, 25 bp, Homo sapien
tgggaagacacctctgtacaagtga

SEQ ID NO: 5944540 - DNA, 25 bp, Homo sapien
cttgtccttttcagacaaagctggc

SEQ ID NO: 5944541 - DNA, 25 bp, Homo sapien
gataactggcttaccagccaagtta

SEQ ID NO: 5944542 - DNA, 25 bp, Homo sapien
agcttgttcagcaatgacagcggtt

SEQ ID NO: 5944543 - DNA, 25 bp, Homo sapien
gaaacttcagctctggttggtcttg

SEQ ID NO: 5944544 - DNA, 25 bp, Homo sapien
ccgatggtaccaatgatggaggttc

SEQ ID NO: 5944545 - DNA, 25 bp, Homo sapien
caaagcaatggccaatggtctacct

SEQ ID NO: 5944546 - DNA, 25 bp, Homo sapien
aatgacagacttgtggtattcgtaa

SEQ ID NO: 5944547 - DNA, 25 bp, Homo sapien
atagcttgttcagcaatgacagcgg

SEQ ID NO: 5944548 - DNA, 25 bp, Homo sapien
gtcacccttcttcaagataccgaat

SEQ ID NO: 5944549 - DNA, 25 bp, Homo sapien
tattcgtaagaaccgtgagagaagt

SEQ ID NO: 5944550 - DNA, 25 bp, Homo sapien
ttgaccttcaaagtcttgtcgtcaa

SEQ ID NO: 5944551 - DNA, 25 bp, Homo sapien
ttgggtagcacagataactggctta

SEQ ID NO: 5944552 - DNA, 25 bp, Homo sapien
ttagacttagcaatcaatttctttt

SEQ ID NO: 5944553 - DNA, 25 bp, Homo sapien
gccttggccttttgttcgaaaacag

SEQ ID NO: 5944554 - DNA, 25 bp, Homo sapien
gcggtttcaccagacaacataacac

SEQ ID NO: 5944555 - DNA, 25 bp, Homo sapien
ttcgtcgaagttgttaacaccttgt

SEQ ID NO: 5944556 - DNA, 25 bp, Homo sapien
ccttgaaaccttggatggaaacgta

SEQ ID NO: 5944557 - DNA, 25 bp, Homo sapien
atttcttttggacagccaagacttc

SEQ ID NO: 5944558 - DNA, 25 bp, Homo sapien
ggctttggagtacagtttctcatgt

SEQ ID NO: 5944559 - DNA, 25 bp, Homo sapien
tctgatttctggacccttggtgtcc

SEQ ID NO: 5944560 - DNA, 25 bp, Homo sapien
tccttttcgaaaacgaatgggaaga

SEQ ID NO: 5944561 - DNA, 25 bp, Homo sapien
ggtggtgaagatcatttcgtggttt

SEQ ID NO: 5944562 - DNA, 25 bp, Homo sapien
aatcttgacaatgatcttgacgtcc

SEQ ID NO: 5944563 - DNA, 25 bp, Homo sapien
ttcaagataccgaattccttagcct

SEQ ID NO: 5944564 - DNA, 25 bp, Homo sapien
tcttaccggcgttcaaagccttgac

SEQ ID NO: 5944565 - DNA, 25 bp, Homo sapien
taacaccgtcagtgaccttcaagat

SEQ ID NO: 5944566 - DNA, 25 bp, Homo sapien
gtaagtgtcacccttcttcaagata

SEQ ID NO: 5944567 - DNA, 25 bp, Homo sapien
tgttcagcaatgacagcggtttcag

SEQ ID NO: 5944568 - DNA, 25 bp, Homo sapien
tctttggaccgatggtaccaatgat

SEQ ID NO: 5944569 - DNA, 25 bp, Homo sapien
ccttgttcacccaagacttctctga

SEQ ID NO: 5944570 - DNA, 25 bp, Homo sapien
caagttagacttagcaatcaatttc

SEQ ID NO: 5944571 - DNA, 25 bp, Homo sapien
agttgacacccttgtgggaacagat

SEQ ID NO: 5944572 - DNA, 25 bp, Homo sapien
aagcgaagaccatgtggacaccgtt

SEQ ID NO: 5944573 - DNA, 25 bp, Homo sapien
gacttctctgatggtcaaaacatcg

SEQ ID NO: 5944574 - DNA, 25 bp, Homo sapien
gacaatgatagccttggccttttgt

SEQ ID NO: 5944575 - DNA, 25 bp, Homo sapien
acgacttccaaaacttggaaagaca

SEQ ID NO: 5944576 - DNA, 25 bp, Homo sapien
agttcatacggacaatgttcaaacc

SEQ ID NO: 5944577 - DNA, 25 bp, Homo sapien
gtacatgatcttgtcgtcacaagcc

SEQ ID NO: 5944578 - DNA, 25 bp, Homo sapien
ttttcgaaaacgaatgggaagacac

SEQ ID NO: 5944579 - DNA, 25 bp, Homo sapien
gaagatcatttcgtggtttggtggg

SEQ ID NO: 5944580 - DNA, 25 bp, Homo sapien
acatttgggtagcacagataactgg

SEQ ID NO: 5944581 - DNA, 25 bp, Homo sapien
accgacatcggaaacttcagctctg

SEQ ID NO: 5944582 - DNA, 25 bp, Homo sapien
gacacctctgtacaagtgagagaat

SEQ ID NO: 5944583 - DNA, 25 bp, Homo sapien
ttcgtaagaaccgtgagagaagttc

SEQ ID NO: 5944584 - DNA, 25 bp, Homo sapien
gagaagttcatacggacaatgttca

SEQ ID NO: 5944585 - DNA, 25 bp, Homo sapien
tttgttcgaaaacagcagcgacagc

SEQ ID NO: 5944586 - DNA, 25 bp, Homo sapien
ggaacagatcttaccggcgttcaaa

SEQ ID NO: 5944587 - DNA, 25 bp, Homo sapien
acttctggggctgggatttcaatac

SEQ ID NO: 5944588 - DNA, 25 bp, Homo sapien
agacttctggggctgggatttcaat

SEQ ID NO: 5944589 - DNA, 25 bp, Homo sapien
aacaacgtttaatgaggtcaatctt

SEQ ID NO: 5944590 - DNA, 25 bp, Homo sapien
aacacagtcagcaccatccaagata

SEQ ID NO: 5944591 - DNA, 25 bp, Homo sapien
caacgacttccaaaacttggaaaga

SEQ ID NO: 5944592 - DNA, 25 bp, Homo sapien
ttgacgtccttaccttgttcaccca

SEQ ID NO: 5944593 - DNA, 25 bp, Homo sapien
atggtcaaaacatcgttggcggttc

SEQ ID NO: 5944594 - DNA, 25 bp, Homo sapien
aaacttggaaagacaaaacaccatc

SEQ ID NO: 5944595 - DNA, 25 bp, Homo sapien
tgatggtcaaaacatcgttggcggt

SEQ ID NO: 5944596 - DNA, 25 bp, Homo sapien
ccgaattccttagccttttcaatac

SEQ ID NO: 5944597 - DNA, 25 bp, Homo sapien
tccttagccttttcaataccgaagt

SEQ ID NO: 5944598 - DNA, 25 bp, Homo sapien
ggtcttgggttgtaagtcatggatt

SEQ ID NO: 5944599 - DNA, 25 bp, Homo sapien
acctctggcaaccataacaccgtca

SEQ ID NO: 5944600 - DNA, 25 bp, Homo sapien
ccggccttgaaaccttggatggaaa

SEQ ID NO: 5944601 - DNA, 25 bp, Homo sapien
gcgaagaccatgtggacaccgttct

SEQ ID NO: 5944602 - DNA, 25 bp, Homo sapien
cagtcagcaccatccaagatagcgt

SEQ ID NO: 5944603 - DNA, 25 bp, Homo sapien
cagccatagtggtaacggcgttgat

SEQ ID NO: 5944604 - DNA, 25 bp, Homo sapien
cccaagtcacctctggcaaccataa

SEQ ID NO: 5944605 - DNA, 25 bp, Homo sapien
accggcgttcaaagccttgaccttc

SEQ ID NO: 5944606 - DNA, 25 bp, Homo sapien
gaagaccatgtggacaccgttcttg

SEQ ID NO: 5944607 - DNA, 25 bp, Homo sapien
taagttgacacccttgtgggaacag

SEQ ID NO: 5944608 - DNA, 25 bp, Homo sapien
ggcaaccataacaccgtcagtgacc

SEQ ID NO: 5944609 - DNA, 25 bp, Homo sapien
ttggtctgtacttggaaaccaatct

SEQ ID NO: 5944610 - DNA, 25 bp, Homo sapien
tggtaccaatgatggaggttcttct

SEQ ID NO: 5944611 - DNA, 25 bp, Homo sapien
catttcgtggtttggtgggattggg

SEQ ID NO: 5944612 - DNA, 25 bp, Homo sapien
ggttggctttggagtacagtttctc

SEQ ID NO: 5944613 - DNA, 25 bp, Homo sapien
ctggacccttggtgtccaaagcaat

SEQ ID NO: 5944614 - DNA, 25 bp, Homo sapien
atctcaaatcttccttgtccttttc

SEQ ID NO: 5944615 - DNA, 25 bp, Homo sapien
tggagtgaccagcaccggccttgaa

SEQ ID NO: 5944616 - DNA, 25 bp, Homo sapien
aatgggaagacacctctgtacaagt

SEQ ID NO: 5944617 - DNA, 25 bp, Homo sapien
aaaccagcctttctcaaagcaacca

SEQ ID NO: 5944618 - DNA, 25 bp, Homo sapien
gtgatgttcttgtagtcaacgtaca

SEQ ID NO: 5944619 - DNA, 25 bp, Homo sapien
ttaccgacatcggaaacttcagctc

SEQ ID NO: 5944620 - DNA, 25 bp, Homo sapien
gtgggattgggtagtcaacatcgtt

SEQ ID NO: 5944621 - DNA, 25 bp, Homo sapien
accagcctttctcaaagcaaccaag

SEQ ID NO: 5944622 - DNA, 25 bp, Homo sapien
gcttaccagccaagttagacttagc

SEQ ID NO: 5944623 - DNA, 25 bp, Homo sapien
aaagaagcgaagaccatgtggacac

SEQ ID NO: 5944624 - DNA, 25 bp, Homo sapien
atcgtagtttggcaagtaagcgata

SEQ ID NO: 5944625 - DNA, 25 bp, Homo sapien
tccaacatttgggtagcacagataa

SEQ ID NO: 5944626 - DNA, 25 bp, Homo sapien
ctctggcaaccataacaccgtcagt

SEQ ID NO: 5944627 - DNA, 25 bp, Homo sapien
ggtcaaaacatcgttggcggttctg

SEQ ID NO: 5944628 - DNA, 25 bp, Homo sapien
ggagtacagtttctcatgtcatcgt

SEQ ID NO: 5944629 - DNA, 25 bp, Homo sapien
cgtagtttggcaagtaagcgatagc

SEQ ID NO: 5944630 - DNA, 25 bp, Homo sapien
caaatcgacatcggtacctggtaag

SEQ ID NO: 5944631 - DNA, 25 bp, Homo sapien
agcggaggcagcgacggtttcggtg

SEQ ID NO: 5944632 - DNA, 25 bp, Homo sapien
cttgtagtcaacgtacatgatcttg

SEQ ID NO: 5944633 - DNA, 25 bp, Homo sapien
tttggacagccaagacttctggggc

SEQ ID NO: 5944634 - DNA, 25 bp, Homo sapien
tggtgatgttcttgtagtcaacgta

SEQ ID NO: 5944635 - DNA, 25 bp, Homo sapien
tggtggtggtaccagttctgatttc

SEQ ID NO: 5944636 - DNA, 25 bp, Homo sapien
catgtggacaccgttcttgacaccg

SEQ ID NO: 5944637 - DNA, 25 bp, Homo sapien
gtggtggaggttggctttggagtac

SEQ ID NO: 5944638 - DNA, 25 bp, Homo sapien
tagtggtaacggcgttgattgggta

SEQ ID NO: 5944639 - DNA, 25 bp, Homo sapien
aagttgatacgggcttcaacatcat

SEQ ID NO: 5944640 - DNA, 25 bp, Homo sapien
tgatgatctagatgctgaaactggt

SEQ ID NO: 5944641 - DNA, 25 bp, Homo sapien
tactgttcgtaccttatcttacaga

SEQ ID NO: 5944642 - DNA, 25 bp, Homo sapien
gttctccactggtcctcatgctcca

SEQ ID NO: 5944643 - DNA, 25 bp, Homo sapien
accgttctttacgctagagaccact

SEQ ID NO: 5944644 - DNA, 25 bp, Homo sapien
tttgattattcgccatttgttccgt

SEQ ID NO: 5944645 - DNA, 25 bp, Homo sapien
tatttccctgatgatctagatgctg

SEQ ID NO: 5944646 - DNA, 25 bp, Homo sapien
aacagcactacttcaattcgtacga

SEQ ID NO: 5944647 - DNA, 25 bp, Homo sapien
ggtaccggtattttatccatgtttg

SEQ ID NO: 5944648 - DNA, 25 bp, Homo sapien
ttatccatgtttgccgctaaacacg

SEQ ID NO: 5944649 - DNA, 25 bp, Homo sapien
aagagacctgttgagttctccactg

SEQ ID NO: 5944650 - DNA, 25 bp, Homo sapien
gtgaattggtttgctctccaaacga

SEQ ID NO: 5944651 - DNA, 25 bp, Homo sapien
aagcattattgagatggcgaaggaa

SEQ ID NO: 5944652 - DNA, 25 bp, Homo sapien
ggaaagaaacaatgtcaacaccacc

SEQ ID NO: 5944653 - DNA, 25 bp, Homo sapien
atccatgtttgccgctaaacacggt

SEQ ID NO: 5944654 - DNA, 25 bp, Homo sapien
caccgtggaaagaaacaatgtcaac

SEQ ID NO: 5944655 - DNA, 25 bp, Homo sapien
cgggtttgattattcgccatttgtt

SEQ ID NO: 5944656 - DNA, 25 bp, Homo sapien
aaaaccaagctaagtgaaagcgaac

SEQ ID NO: 5944657 - DNA, 25 bp, Homo sapien
tgaaagattctgctacagaaaaaac

SEQ ID NO: 5944658 - DNA, 25 bp, Homo sapien
caatattttatttccctgatgatct

SEQ ID NO: 5944659 - DNA, 25 bp, Homo sapien
gttatcggtgttgatatgtcaagca

SEQ ID NO: 5944660 - DNA, 25 bp, Homo sapien
aagttgaactactggcaagacgttt

SEQ ID NO: 5944661 - DNA, 25 bp, Homo sapien
gatctttttaaggacaagattgttt

SEQ ID NO: 5944662 - DNA, 25 bp, Homo sapien
tcaagcattattgagatggcgaagg

SEQ ID NO: 5944663 - DNA, 25 bp, Homo sapien
atgtttgccgctaaacacggtgcga

SEQ ID NO: 5944664 - DNA, 25 bp, Homo sapien
ttttccctgcaccaaagggtaagag

SEQ ID NO: 5944665 - DNA, 25 bp, Homo sapien
aagttgacatcataatttctgaatg

SEQ ID NO: 5944666 - DNA, 25 bp, Homo sapien
tcatttggccggtttggaagactct

SEQ ID NO: 5944667 - DNA, 25 bp, Homo sapien
cattgaaggtgaattggtttgctct

SEQ ID NO: 5944668 - DNA, 25 bp, Homo sapien
gatgcttcaagatactgttcgtacc

SEQ ID NO: 5944669 - DNA, 25 bp, Homo sapien
atttgttccgttggtcttacacgag

SEQ ID NO: 5944670 - DNA, 25 bp, Homo sapien
acaagttcgaatcgaatggcatcga

SEQ ID NO: 5944671 - DNA, 25 bp, Homo sapien
aagaggcaagttggaggacgttcat

SEQ ID NO: 5944672 - DNA, 25 bp, Homo sapien
ggatgggttactttctactatacga

SEQ ID NO: 5944673 - DNA, 25 bp, Homo sapien
tgatggacaccgttctttacgctag

SEQ ID NO: 5944674 - DNA, 25 bp, Homo sapien
agagatctaaatatcaaaatttctt

SEQ ID NO: 5944675 - DNA, 25 bp, Homo sapien
tcaccttgctaagaggcaagttgga

SEQ ID NO: 5944676 - DNA, 25 bp, Homo sapien
aagctaagtgaaagcgaacagcact

SEQ ID NO: 5944677 - DNA, 25 bp, Homo sapien
cttatcttacagaaacgcaattatc

SEQ ID NO: 5944678 - DNA, 25 bp, Homo sapien
gctagagaccactatttggtagaag

SEQ ID NO: 5944679 - DNA, 25 bp, Homo sapien
catgctccatacactcactggaagc

SEQ ID NO: 5944680 - DNA, 25 bp, Homo sapien
ttgttccgttggtcttacacgagcc

SEQ ID NO: 5944681 - DNA, 25 bp, Homo sapien
ctggtgacaccattgaaggtgaatt

SEQ ID NO: 5944682 - DNA, 25 bp, Homo sapien
tggaagcaaacaatattttatttcc

SEQ ID NO: 5944683 - DNA, 25 bp, Homo sapien
tcttacaagttcgaatcgaatggca

SEQ ID NO: 5944684 - DNA, 25 bp, Homo sapien
agcgaacagcactacttcaattcgt

SEQ ID NO: 5944685 - DNA, 25 bp, Homo sapien
tttttaaggacaagattgttttaga

SEQ ID NO: 5944686 - DNA, 25 bp, Homo sapien
aattgatcgaatttgatttaaatac

SEQ ID NO: 5944687 - DNA, 25 bp, Homo sapien
acctcagacaaattgatcgaatttg

SEQ ID NO: 5944688 - DNA, 25 bp, Homo sapien
accttgctaagaggcaagttggagg

SEQ ID NO: 5944689 - DNA, 25 bp, Homo sapien
gattaatggtatagtcacctggttc

SEQ ID NO: 5944690 - DNA, 25 bp, Homo sapien
taacagagatctaaatatcaaaatt

SEQ ID NO: 5944691 - DNA, 25 bp, Homo sapien
gtggaaagaaacaatgtcaacacca

SEQ ID NO: 5944692 - DNA, 25 bp, Homo sapien
cttcaagatactgttcgtaccttat

SEQ ID NO: 5944693 - DNA, 25 bp, Homo sapien
cactatggtattcacgaagagatgc

SEQ ID NO: 5944694 - DNA, 25 bp, Homo sapien
acactcactggaagcaaacaatatt

SEQ ID NO: 5944695 - DNA, 25 bp, Homo sapien
cgtcgacaccgtggaaagaaacaat

SEQ ID NO: 5944696 - DNA, 25 bp, Homo sapien
aataaggatctttttaaggacaaga

SEQ ID NO: 5944697 - DNA, 25 bp, Homo sapien
gcaccaaagggtaagagacctgttg

SEQ ID NO: 5944698 - DNA, 25 bp, Homo sapien
ctaagaggcaagttggaggacgttc

SEQ ID NO: 5944699 - DNA, 25 bp, Homo sapien
tgaactactggcaagacgtttacgg

SEQ ID NO: 5944700 - DNA, 25 bp, Homo sapien
taagtgaaagcgaacagcactactt

SEQ ID NO: 5944701 - DNA, 25 bp, Homo sapien
ttggaggacgttcatttaccctttc

SEQ ID NO: 5944702 - DNA, 25 bp, Homo sapien
tcgaatcgaatggcatcgacggtaa

SEQ ID NO: 5944703 - DNA, 25 bp, Homo sapien
aaacaatgtcaacaccacctcagac

SEQ ID NO: 5944704 - DNA, 25 bp, Homo sapien
tatcagatctagcgtttaagagtaa

SEQ ID NO: 5944705 - DNA, 25 bp, Homo sapien
ggttgcggtaccggtattttatcca

SEQ ID NO: 5944706 - DNA, 25 bp, Homo sapien
gtatagtcacctggttcgacattgt

SEQ ID NO: 5944707 - DNA, 25 bp, Homo sapien
ctgatctttcccgacaagtgctcca

SEQ ID NO: 5944708 - DNA, 25 bp, Homo sapien
ccaagctaagtgaaagcgaacagca

SEQ ID NO: 5944709 - DNA, 25 bp, Homo sapien
tgacaccattgaaggtgaattggtt

SEQ ID NO: 5944710 - DNA, 25 bp, Homo sapien
ctgaatggatgggttactttctact

SEQ ID NO: 5944711 - DNA, 25 bp, Homo sapien
tggcgaaggaattggtagagttgaa

SEQ ID NO: 5944712 - DNA, 25 bp, Homo sapien
caagttggaggacgttcatttaccc

SEQ ID NO: 5944713 - DNA, 25 bp, Homo sapien
cgacaagatcaccttgctaagaggc

SEQ ID NO: 5944714 - DNA, 25 bp, Homo sapien
tcaattcgtacgatcactatggtat

SEQ ID NO: 5944715 - DNA, 25 bp, Homo sapien
ctttcctaaagttgacatcataatt

SEQ ID NO: 5944716 - DNA, 25 bp, Homo sapien
gagttctccactggtcctcatgctc

SEQ ID NO: 5944717 - DNA, 25 bp, Homo sapien
tccgttggtcttacacgagcccatc

SEQ ID NO: 5944718 - DNA, 25 bp, Homo sapien
gccgctaaacacggtgcgaagcatg

SEQ ID NO: 5944719 - DNA, 25 bp, Homo sapien
tataaagacgagaagttgaactact

SEQ ID NO: 5944720 - DNA, 25 bp, Homo sapien
tagagaccactatttggtagaaggc

SEQ ID NO: 5944721 - DNA, 25 bp, Homo sapien
ccatacactcactggaagcaaacaa

SEQ ID NO: 5944722 - DNA, 25 bp, Homo sapien
ttctgaatggatgggttactttcta

SEQ ID NO: 5944723 - DNA, 25 bp, Homo sapien
gaccactatttggtagaaggcggtc

SEQ ID NO: 5944724 - DNA, 25 bp, Homo sapien
aacgaaggttcttatttaatgcatt

SEQ ID NO: 5944725 - DNA, 25 bp, Homo sapien
tctccaaacgagaagaataacagag

SEQ ID NO: 5944726 - DNA, 25 bp, Homo sapien
ttacagaaacgcaattatccaaaat

SEQ ID NO: 5944727 - DNA, 25 bp, Homo sapien
taccggtattttatccatgtttgcc

SEQ ID NO: 5944728 - DNA, 25 bp, Homo sapien
ggccggtttggaagactctcagtat

SEQ ID NO: 5944729 - DNA, 25 bp, Homo sapien
cagccgtgaaagattctgctacaga

SEQ ID NO: 5944730 - DNA, 25 bp, Homo sapien
tactttctactatacgagtccatga

SEQ ID NO: 5944731 - DNA, 25 bp, Homo sapien
gttactttctactatacgagtccat

SEQ ID NO: 5944732 - DNA, 25 bp, Homo sapien
acaagatcaccttgctaagaggcaa

SEQ ID NO: 5944733 - DNA, 25 bp, Homo sapien
gacaccgtggaaagaaacaatgtca

SEQ ID NO: 5944734 - DNA, 25 bp, Homo sapien
actacttcaattcgtacgatcacta

SEQ ID NO: 5944735 - DNA, 25 bp, Homo sapien
tggtttgctctccaaacgagaagaa

SEQ ID NO: 5944736 - DNA, 25 bp, Homo sapien
ttaatggtatagtcacctggttcga

SEQ ID NO: 5944737 - DNA, 25 bp, Homo sapien
cgccatttgttccgttggtcttaca

SEQ ID NO: 5944738 - DNA, 25 bp, Homo sapien
tgtcaacaccacctcagacaaattg

SEQ ID NO: 5944739 - DNA, 25 bp, Homo sapien
tactggcaagacgtttacgggtttg

SEQ ID NO: 5944740 - DNA, 25 bp, Homo sapien
ctgttcgtaccttatcttacagaaa

SEQ ID NO: 5944741 - DNA, 25 bp, Homo sapien
gttgaactactggcaagacgtttac

SEQ ID NO: 5944742 - DNA, 25 bp, Homo sapien
acctggttcgacattgttttccctg

SEQ ID NO: 5944743 - DNA, 25 bp, Homo sapien
aaaacgaaggttcttatttaatgca

SEQ ID NO: 5944744 - DNA, 25 bp, Homo sapien
tctttttaaggacaagattgtttta

SEQ ID NO: 5944745 - DNA, 25 bp, Homo sapien
tattcacgaagagatgcttcaagat

SEQ ID NO: 5944746 - DNA, 25 bp, Homo sapien
taaagttgacatcataatttctgaa

SEQ ID NO: 5944747 - DNA, 25 bp, Homo sapien
gaatcgaatggcatcgacggtaatt

SEQ ID NO: 5944748 - DNA, 25 bp, Homo sapien
tttggtagaaggcggtctgatcttt

SEQ ID NO: 5944749 - DNA, 25 bp, Homo sapien
gacctgttgagttctccactggtcc

SEQ ID NO: 5944750 - DNA, 25 bp, Homo sapien
aagggtaagagacctgttgagttct

SEQ ID NO: 5944751 - DNA, 25 bp, Homo sapien
cgaagcatgttatcggtgttgatat

SEQ ID NO: 5944752 - DNA, 25 bp, Homo sapien
acgctagagaccactatttggtaga

SEQ ID NO: 5944753 - DNA, 25 bp, Homo sapien
gagcccatcgtcgacaccgtggaaa

SEQ ID NO: 5944754 - DNA, 25 bp, Homo sapien
gaagactctcagtataaagacgaga

SEQ ID NO: 5944755 - DNA, 25 bp, Homo sapien
ttcgacattgttttccctgcaccaa

SEQ ID NO: 5944756 - DNA, 25 bp, Homo sapien
ggtaattcaagaagcagaaaaaacg

SEQ ID NO: 5944757 - DNA, 25 bp, Homo sapien
cagacaaattgatcgaatttgattt

SEQ ID NO: 5944758 - DNA, 25 bp, Homo sapien
attatccaaaataaggatcttttta

SEQ ID NO: 5944759 - DNA, 25 bp, Homo sapien
tcgaatttgatttaaatacagtaaa

SEQ ID NO: 5944760 - DNA, 25 bp, Homo sapien
accaaagggtaagagacctgttgag

SEQ ID NO: 5944761 - DNA, 25 bp, Homo sapien
ggcaagacgtttacgggtttgatta

SEQ ID NO: 5944762 - DNA, 25 bp, Homo sapien
aaaatttcttacaagttcgaatcga

SEQ ID NO: 5944763 - DNA, 25 bp, Homo sapien
gttcgaatcgaatggcatcgacggt

SEQ ID NO: 5944764 - DNA, 25 bp, Homo sapien
tatcggtgttgatatgtcaagcatt

SEQ ID NO: 5944765 - DNA, 25 bp, Homo sapien
atacactcactggaagcaaacaata

SEQ ID NO: 5944766 - DNA, 25 bp, Homo sapien
ccctgcaccaaagggtaagagacct

SEQ ID NO: 5944767 - DNA, 25 bp, Homo sapien
acggtgcgaagcatgttatcggtgt

SEQ ID NO: 5944768 - DNA, 25 bp, Homo sapien
gtttgccgctaaacacggtgcgaag

SEQ ID NO: 5944769 - DNA, 25 bp, Homo sapien
atcgaatggcatcgacggtaattca

SEQ ID NO: 5944770 - DNA, 25 bp, Homo sapien
gcatcgacggtaattcaagaagcag

SEQ ID NO: 5944771 - DNA, 25 bp, Homo sapien
tgttttagacgtcggttgcggtacc

SEQ ID NO: 5944772 - DNA, 25 bp, Homo sapien
tcaagatactgttcgtaccttatct

SEQ ID NO: 5944773 - DNA, 25 bp, Homo sapien
agaaacaatgtcaacaccacctcag

SEQ ID NO: 5944774 - DNA, 25 bp, Homo sapien
tcaacaccacctcagacaaattgat

SEQ ID NO: 5944775 - DNA, 25 bp, Homo sapien
attgttttccctgcaccaaagggta

SEQ ID NO: 5944776 - DNA, 25 bp, Homo sapien
ggtcttacacgagcccatcgtcgac

SEQ ID NO: 5944777 - DNA, 25 bp, Homo sapien
gtaagagacctgttgagttctccac

SEQ ID NO: 5944778 - DNA, 25 bp, Homo sapien
aaaatatcagatctagcgtttaaga

SEQ ID NO: 5944779 - DNA, 25 bp, Homo sapien
aagacgagaagttgaactactggca

SEQ ID NO: 5944780 - DNA, 25 bp, Homo sapien
ctatggtattcacgaagagatgctt

SEQ ID NO: 5944781 - DNA, 25 bp, Homo sapien
ttgatatgtcaagcattattgagat

SEQ ID NO: 5944782 - DNA, 25 bp, Homo sapien
gaagcagaaaaaacgaaggttctta

SEQ ID NO: 5944783 - DNA, 25 bp, Homo sapien
tagatgctgaaactggtgacaccat

SEQ ID NO: 5944784 - DNA, 25 bp, Homo sapien
gaattggtttgctctccaaacgaga

SEQ ID NO: 5944785 - DNA, 25 bp, Homo sapien
tatcttacagaaacgcaattatcca

SEQ ID NO: 5944786 - DNA, 25 bp, Homo sapien
agattgttttagacgtcggttgcgg

SEQ ID NO: 5944787 - DNA, 25 bp, Homo sapien
aagttcgaatcgaatggcatcgacg

SEQ ID NO: 5944788 - DNA, 25 bp, Homo sapien
gaacggattcagcgacaagatcacc

SEQ ID NO: 5944789 - DNA, 25 bp, Homo sapien
ctgaaactggtgacaccattgaagg

SEQ ID NO: 5944790 - DNA, 25 bp, Homo sapien
ggtttgattattcgccatttgttcc

SEQ ID NO: 5944791 - DNA, 25 bp, Homo sapien
aaatacagtaaaaatatcagatcta

SEQ ID NO: 5944792 - DNA, 25 bp, Homo sapien
atggatgggttactttctactatac

SEQ ID NO: 5944793 - DNA, 25 bp, Homo sapien
tcctcatgctccatacactcactgg

SEQ ID NO: 5944794 - DNA, 25 bp, Homo sapien
agaaggcggtctgatctttcccgac

SEQ ID NO: 5944795 - DNA, 25 bp, Homo sapien
ttcacgaagagatgcttcaagatac

SEQ ID NO: 5944796 - DNA, 25 bp, Homo sapien
gagatgcttcaagatactgttcgta

SEQ ID NO: 5944797 - DNA, 25 bp, Homo sapien
cgaaggttcttatttaatgcattaa

SEQ ID NO: 5944798 - DNA, 25 bp, Homo sapien
aaccaagctaagtgaaagcgaacag

SEQ ID NO: 5944799 - DNA, 25 bp, Homo sapien
tcggttgcggtaccggtattttatc

SEQ ID NO: 5944800 - DNA, 25 bp, Homo sapien
gagatggcgaaggaattggtagagt

SEQ ID NO: 5944801 - DNA, 25 bp, Homo sapien
accattgaaggtgaattggtttgct

SEQ ID NO: 5944802 - DNA, 25 bp, Homo sapien
gaggcaagttggaggacgttcattt

SEQ ID NO: 5944803 - DNA, 25 bp, Homo sapien
tcgacaccgtggaaagaaacaatgt

SEQ ID NO: 5944804 - DNA, 25 bp, Homo sapien
agatatgattaatggtatagtcacc

SEQ ID NO: 5944805 - DNA, 25 bp, Homo sapien
cgctaaacacggtgcgaagcatgtt

SEQ ID NO: 5944806 - DNA, 25 bp, Homo sapien
tgattattcgccatttgttccgttg

SEQ ID NO: 5944807 - DNA, 25 bp, Homo sapien
aacaccacctcagacaaattgatcg

SEQ ID NO: 5944808 - DNA, 25 bp, Homo sapien
aatggcatcgacggtaattcaagaa

SEQ ID NO: 5944809 - DNA, 25 bp, Homo sapien
tgctgaaactggtgacaccattgaa

SEQ ID NO: 5944810 - DNA, 25 bp, Homo sapien
agtgaaagcgaacagcactacttca

SEQ ID NO: 5944811 - DNA, 25 bp, Homo sapien
gcattattgagatggcgaaggaatt

SEQ ID NO: 5944812 - DNA, 25 bp, Homo sapien
tcactggaagcaaacaatattttat

SEQ ID NO: 5944813 - DNA, 25 bp, Homo sapien
ccctttcctaaagttgacatcataa

SEQ ID NO: 5944814 - DNA, 25 bp, Homo sapien
ggattcagcgacaagatcaccttgc

SEQ ID NO: 5944815 - DNA, 25 bp, Homo sapien
attctgctacagaaaaaaccaagct

SEQ ID NO: 5944816 - DNA, 25 bp, Homo sapien
agaaaaaaccaagctaagtgaaagc

SEQ ID NO: 5944817 - DNA, 25 bp, Homo sapien
tcagtataaagacgagaagttgaac

SEQ ID NO: 5944818 - DNA, 25 bp, Homo sapien
agtccatgatggacaccgttcttta

SEQ ID NO: 5944819 - DNA, 25 bp, Homo sapien
cgtacgatcactatggtattcacga

SEQ ID NO: 5944820 - DNA, 25 bp, Homo sapien
acaccattgaaggtgaattggtttg

SEQ ID NO: 5944821 - DNA, 25 bp, Homo sapien
tgaaagcgaacagcactacttcaat

SEQ ID NO: 5944822 - DNA, 25 bp, Homo sapien
tggtagaaggcggtctgatctttcc

SEQ ID NO: 5944823 - DNA, 25 bp, Homo sapien
catttaccctttcctaaagttgaca

SEQ ID NO: 5944824 - DNA, 25 bp, Homo sapien
caaacaatattttatttccctgatg

SEQ ID NO: 5944825 - DNA, 25 bp, Homo sapien
ccggtttggaagactctcagtataa

SEQ ID NO: 5944826 - DNA, 25 bp, Homo sapien
aagatactgttcgtaccttatctta

SEQ ID NO: 5944827 - DNA, 25 bp, Homo sapien
tttaaggacaagattgttttagacg

SEQ ID NO: 5944828 - DNA, 25 bp, Homo sapien
agaagttgaactactggcaagacgt

SEQ ID NO: 5944829 - DNA, 25 bp, Homo sapien
ttggccggtttggaagactctcagt

SEQ ID NO: 5944830 - DNA, 25 bp, Homo sapien
cagcactacttcaattcgtacgatc

SEQ ID NO: 5944831 - DNA, 25 bp, Homo sapien
tttacgggtttgattattcgccatt

SEQ ID NO: 5944832 - DNA, 25 bp, Homo sapien
atcactatggtattcacgaagagat

SEQ ID NO: 5944833 - DNA, 25 bp, Homo sapien
atatgattaatggtatagtcacctg

SEQ ID NO: 5944834 - DNA, 25 bp, Homo sapien
ttgccgctaaacacggtgcgaagca

SEQ ID NO: 5944835 - DNA, 25 bp, Homo sapien
atgttatcggtgttgatatgtcaag

SEQ ID NO: 5944836 - DNA, 25 bp, Homo sapien
caccacctcagacaaattgatcgaa

SEQ ID NO: 5944837 - DNA, 25 bp, Homo sapien
ttgcggtaccggtattttatccatg

SEQ ID NO: 5944838 - DNA, 25 bp, Homo sapien
tttcttacaagttcgaatcgaatgg

SEQ ID NO: 5944839 - DNA, 25 bp, Homo sapien
gaggacgttcatttaccctttccta

SEQ ID NO: 5944840 - DNA, 25 bp, Homo sapien
gatcaccttgctaagaggcaagttg

SEQ ID NO: 5944841 - DNA, 25 bp, Homo sapien
gacgagaagttgaactactggcaag

SEQ ID NO: 5944842 - DNA, 25 bp, Homo sapien
gtaccttatcttacagaaacgcaat

SEQ ID NO: 5944843 - DNA, 25 bp, Homo sapien
acaccgttctttacgctagagacca

SEQ ID NO: 5944844 - DNA, 25 bp, Homo sapien
tcagcgacaagatcaccttgctaag

SEQ ID NO: 5944845 - DNA, 25 bp, Homo sapien
gtctgatctttcccgacaagtgctc

SEQ ID NO: 5944846 - DNA, 25 bp, Homo sapien
tggtatagtcacctggttcgacatt

SEQ ID NO: 5944847 - DNA, 25 bp, Homo sapien
acagaaacgcaattatccaaaataa

SEQ ID NO: 5944848 - DNA, 25 bp, Homo sapien
gggttactttctactatacgagtcc

SEQ ID NO: 5944849 - DNA, 25 bp, Homo sapien
atcgacggtaattcaagaagcagaa

SEQ ID NO: 5944850 - DNA, 25 bp, Homo sapien
tccctgatgatctagatgctgaaac

SEQ ID NO: 5944851 - DNA, 25 bp, Homo sapien
cgatcactatggtattcacgaagag

SEQ ID NO: 5944852 - DNA, 25 bp, Homo sapien
ctactatacgagtccatgatggaca

SEQ ID NO: 5944853 - DNA, 25 bp, Homo sapien
ttacaagttcgaatcgaatggcatc

SEQ ID NO: 5944854 - DNA, 25 bp, Homo sapien
tttggaagactctcagtataaagac

SEQ ID NO: 5944855 - DNA, 25 bp, Homo sapien
taaatatcaaaatttcttacaagtt

SEQ ID NO: 5944856 - DNA, 25 bp, Homo sapien
atcgtcgacaccgtggaaagaaaca

SEQ ID NO: 5944857 - DNA, 25 bp, Homo sapien
tgctaagaggcaagttggaggacgt

SEQ ID NO: 5944858 - DNA, 25 bp, Homo sapien
acagtaaaaatatcagatctagcgt

SEQ ID NO: 5944859 - DNA, 25 bp, Homo sapien
agatctaaatatcaaaatttcttac

SEQ ID NO: 5944860 - DNA, 25 bp, Homo sapien
aggtgaattggtttgctctccaaac

SEQ ID NO: 5944861 - DNA, 25 bp, Homo sapien
agcgacaagatcaccttgctaagag

SEQ ID NO: 5944862 - DNA, 25 bp, Homo sapien
attattgagatggcgaaggaattgg

SEQ ID NO: 5944863 - DNA, 25 bp, Homo sapien
ttacacgagcccatcgtcgacaccg

SEQ ID NO: 5944864 - DNA, 25 bp, Homo sapien
tttaccctttcctaaagttgacatc

SEQ ID NO: 5944865 - DNA, 25 bp, Homo sapien
attgttttagacgtcggttgcggta

SEQ ID NO: 5944866 - DNA, 25 bp, Homo sapien
tattgagatggcgaaggaattggta

SEQ ID NO: 5944867 - DNA, 25 bp, Homo sapien
ctcagacaaattgatcgaatttgat

SEQ ID NO: 5944868 - DNA, 25 bp, Homo sapien
acacgagcccatcgtcgacaccgtg

SEQ ID NO: 5944869 - DNA, 25 bp, Homo sapien
agtaaaaatatcagatctagcgttt

SEQ ID NO: 5944870 - DNA, 25 bp, Homo sapien
ttcgccatttgttccgttggtctta

SEQ ID NO: 5944871 - DNA, 25 bp, Homo sapien
ctggcaagacgtttacgggtttgat

SEQ ID NO: 5944872 - DNA, 25 bp, Homo sapien
taccctttcctaaagttgacatcat

SEQ ID NO: 5944873 - DNA, 25 bp, Homo sapien
tacgatcactatggtattcacgaag

SEQ ID NO: 5944874 - DNA, 25 bp, Homo sapien
acattgttttccctgcaccaaaggg

SEQ ID NO: 5944875 - DNA, 25 bp, Homo sapien
tcggtgttgatatgtcaagcattat

SEQ ID NO: 5944876 - DNA, 25 bp, Homo sapien
ggtttggaagactctcagtataaag

SEQ ID NO: 5944877 - DNA, 25 bp, Homo sapien
catgatggacaccgttctttacgct

SEQ ID NO: 5944878 - DNA, 25 bp, Homo sapien
acgcaattatccaaaataaggatct

SEQ ID NO: 5944879 - DNA, 25 bp, Homo sapien
agattctgctacagaaaaaaccaag

SEQ ID NO: 5944880 - DNA, 25 bp, Homo sapien
tttcccgacaagtgctccattcatt

SEQ ID NO: 5944881 - DNA, 25 bp, Homo sapien
cataatttctgaatggatgggttac

SEQ ID NO: 5944882 - DNA, 25 bp, Homo sapien
tccaaaataaggatctttttaagga

SEQ ID NO: 5944883 - DNA, 25 bp, Homo sapien
gacaagattgttttagacgtcggtt

SEQ ID NO: 5944884 - DNA, 25 bp, Homo sapien
tacttcaattcgtacgatcactatg

SEQ ID NO: 5944885 - DNA, 25 bp, Homo sapien
caaacgagaagaataacagagatct

SEQ ID NO: 5944886 - DNA, 25 bp, Homo sapien
tatttggtagaaggcggtctgatct

SEQ ID NO: 5944887 - DNA, 25 bp, Homo sapien
cgtttacgggtttgattattcgcca

SEQ ID NO: 5944888 - DNA, 25 bp, Homo sapien
agtcacctggttcgacattgttttc

SEQ ID NO: 5944889 - DNA, 25 bp, Homo sapien
attggtttgctctccaaacgagaag

SEQ ID NO: 5944890 - DNA, 25 bp, Homo sapien
atagtcacctggttcgacattgttt

SEQ ID NO: 5944891 - DNA, 25 bp, Homo sapien
ggccaagagacaagatatgattaat

SEQ ID NO: 5944892 - DNA, 25 bp, Homo sapien
ctttacgctagagaccactatttgg

SEQ ID NO: 5944893 - DNA, 25 bp, Homo sapien
caagatatgattaatggtatagtca

SEQ ID NO: 5944894 - DNA, 25 bp, Homo sapien
tcgtaccttatcttacagaaacgca

SEQ ID NO: 5944895 - DNA, 25 bp, Homo sapien
tgacatcataatttctgaatggatg

SEQ ID NO: 5944896 - DNA, 25 bp, Homo sapien
acggtaattcaagaagcagaaaaaa

SEQ ID NO: 5944897 - DNA, 25 bp, Homo sapien
gacgtttacgggtttgattattcgc

SEQ ID NO: 5944898 - DNA, 25 bp, Homo sapien
cgaacagcactacttcaattcgtac

SEQ ID NO: 5944899 - DNA, 25 bp, Homo sapien
ttaaattgacggccaagagacaaga

SEQ ID NO: 5944900 - DNA, 25 bp, Homo sapien
attcagcgacaagatcaccttgcta

SEQ ID NO: 5944901 - DNA, 25 bp, Homo sapien
acggattcagcgacaagatcacctt

SEQ ID NO: 5944902 - DNA, 25 bp, Homo sapien
cgacggtaattcaagaagcagaaaa

SEQ ID NO: 5944903 - DNA, 25 bp, Homo sapien
tattttatccatgtttgccgctaaa

SEQ ID NO: 5944904 - DNA, 25 bp, Homo sapien
aaattgacggccaagagacaagata

SEQ ID NO: 5944905 - DNA, 25 bp, Homo sapien
ggtgttgatatgtcaagcattattg

SEQ ID NO: 5944906 - DNA, 25 bp, Homo sapien
tacgggtttgattattcgccatttg

SEQ ID NO: 5944907 - DNA, 25 bp, Homo sapien
tccatgatggacaccgttctttacg

SEQ ID NO: 5944908 - DNA, 25 bp, Homo sapien
cgagaagttgaactactggcaagac

SEQ ID NO: 5944909 - DNA, 25 bp, Homo sapien
cgttctttacgctagagaccactat

SEQ ID NO: 5944910 - DNA, 25 bp, Homo sapien
tgctccatacactcactggaagcaa

SEQ ID NO: 5944911 - DNA, 25 bp, Homo sapien
gagtaactttaaattgacggccaag

SEQ ID NO: 5944912 - DNA, 25 bp, Homo sapien
aactggtgacaccattgaaggtgaa

SEQ ID NO: 5944913 - DNA, 25 bp, Homo sapien
atgatctagatgctgaaactggtga

SEQ ID NO: 5944914 - DNA, 25 bp, Homo sapien
attcatttggccggtttggaagact

SEQ ID NO: 5944915 - DNA, 25 bp, Homo sapien
cggtctgatctttcccgacaagtgc

SEQ ID NO: 5944916 - DNA, 25 bp, Homo sapien
caaaataaggatctttttaaggaca

SEQ ID NO: 5944917 - DNA, 25 bp, Homo sapien
ctaaacacggtgcgaagcatgttat

SEQ ID NO: 5944918 - DNA, 25 bp, Homo sapien
gttgacatcataatttctgaatgga

SEQ ID NO: 5944919 - DNA, 25 bp, Homo sapien
agaaacgcaattatccaaaataagg

SEQ ID NO: 5944920 - DNA, 25 bp, Homo sapien
aaagaaacaatgtcaacaccacctc

SEQ ID NO: 5944921 - DNA, 25 bp, Homo sapien
attttatttccctgatgatctagat

SEQ ID NO: 5944922 - DNA, 25 bp, Homo sapien
ggtcctcatgctccatacactcact

SEQ ID NO: 5944923 - DNA, 25 bp, Homo sapien
acgagcccatcgtcgacaccgtgga

SEQ ID NO: 5944924 - DNA, 25 bp, Homo sapien
ccgacaagtgctccattcatttggc

SEQ ID NO: 5944925 - DNA, 25 bp, Homo sapien
gaagaataacagagatctaaatatc

SEQ ID NO: 5944926 - DNA, 25 bp, Homo sapien
gagacctgttgagttctccactggt

SEQ ID NO: 5944927 - DNA, 25 bp, Homo sapien
ccaagagacaagatatgattaatgg

SEQ ID NO: 5944928 - DNA, 25 bp, Homo sapien
ccatcgtcgacaccgtggaaagaaa

SEQ ID NO: 5944929 - DNA, 25 bp, Homo sapien
atattttatttccctgatgatctag

SEQ ID NO: 5944930 - DNA, 25 bp, Homo sapien
ggcaagttggaggacgttcatttac

SEQ ID NO: 5944931 - DNA, 25 bp, Homo sapien
tgacggccaagagacaagatatgat

SEQ ID NO: 5944932 - DNA, 25 bp, Homo sapien
tatgtcaagcattattgagatggcg

SEQ ID NO: 5944933 - DNA, 25 bp, Homo sapien
tccactggtcctcatgctccataca

SEQ ID NO: 5944934 - DNA, 25 bp, Homo sapien
taaaaatatcagatctagcgtttaa

SEQ ID NO: 5944935 - DNA, 25 bp, Homo sapien
tctccactggtcctcatgctccata

SEQ ID NO: 5944936 - DNA, 25 bp, Homo sapien
agtgctccattcatttggccggttt

SEQ ID NO: 5944937 - DNA, 25 bp, Homo sapien
gcactacttcaattcgtacgatcac

SEQ ID NO: 5944938 - DNA, 25 bp, Homo sapien
acatcataatttctgaatggatggg

SEQ ID NO: 5944939 - DNA, 25 bp, Homo sapien
gatatgtcaagcattattgagatgg

SEQ ID NO: 5944940 - DNA, 25 bp, Homo sapien
acagaaaaaaccaagctaagtgaaa

SEQ ID NO: 5944941 - DNA, 25 bp, Homo sapien
cacgaagagatgcttcaagatactg

SEQ ID NO: 5944942 - DNA, 25 bp, Homo sapien
atgggttactttctactatacgagt

SEQ ID NO: 5944943 - DNA, 25 bp, Homo sapien
tcttacacgagcccatcgtcgacac

SEQ ID NO: 5944944 - DNA, 25 bp, Homo sapien
aacgagaagaataacagagatctaa

SEQ ID NO: 5944945 - DNA, 25 bp, Homo sapien
ctttctactatacgagtccatgatg

SEQ ID NO: 5944946 - DNA, 25 bp, Homo sapien
tcagatctagcgtttaagagtaact

SEQ ID NO: 5944947 - DNA, 25 bp, Homo sapien
agttgaacggattcagcgacaagat

SEQ ID NO: 5944948 - DNA, 25 bp, Homo sapien
ttgaaggtgaattggtttgctctcc

SEQ ID NO: 5944949 - DNA, 25 bp, Homo sapien
ctcatgctccatacactcactggaa

SEQ ID NO: 5944950 - DNA, 25 bp, Homo sapien
attgacggccaagagacaagatatg

SEQ ID NO: 5944951 - DNA, 25 bp, Homo sapien
gaaggaattggtagagttgaacgga

SEQ ID NO: 5944952 - DNA, 25 bp, Homo sapien
agactctcagtataaagacgagaag

SEQ ID NO: 5944953 - DNA, 25 bp, Homo sapien
tcaaaatttcttacaagttcgaatc

SEQ ID NO: 5944954 - DNA, 25 bp, Homo sapien
cctgatgatctagatgctgaaactg

SEQ ID NO: 5944955 - DNA, 25 bp, Homo sapien
gacagccgtgaaagattctgctaca

SEQ ID NO: 5944956 - DNA, 25 bp, Homo sapien
ggtattttatccatgtttgccgcta

SEQ ID NO: 5944957 - DNA, 25 bp, Homo sapien
tccaaacgagaagaataacagagat

SEQ ID NO: 5944958 - DNA, 25 bp, Homo sapien
agaataacagagatctaaatatcaa

SEQ ID NO: 5944959 - DNA, 25 bp, Homo sapien
ttgagatggcgaaggaattggtaga

SEQ ID NO: 5944960 - DNA, 25 bp, Homo sapien
gatggcgaaggaattggtagagttg

SEQ ID NO: 5944961 - DNA, 25 bp, Homo sapien
aatatcaaaatttcttacaagttcg

SEQ ID NO: 5944962 - DNA, 25 bp, Homo sapien
gagaccactatttggtagaaggcgg

SEQ ID NO: 5944963 - DNA, 25 bp, Homo sapien
aatgtcaacaccacctcagacaaat

SEQ ID NO: 5944964 - DNA, 25 bp, Homo sapien
tgtcaagcattattgagatggcgaa

SEQ ID NO: 5944965 - DNA, 25 bp, Homo sapien
tattcgccatttgttccgttggtct

SEQ ID NO: 5944966 - DNA, 25 bp, Homo sapien
gaaggtgaattggtttgctctccaa

SEQ ID NO: 5944967 - DNA, 25 bp, Homo sapien
ccacctcagacaaattgatcgaatt

SEQ ID NO: 5944968 - DNA, 25 bp, Homo sapien
ggtgacaccattgaaggtgaattgg

SEQ ID NO: 5944969 - DNA, 25 bp, Homo sapien
tcccgacaagtgctccattcatttg

SEQ ID NO: 5944970 - DNA, 25 bp, Homo sapien
gtagagttgaacggattcagcgaca

SEQ ID NO: 5944971 - DNA, 25 bp, Homo sapien
aatggtatagtcacctggttcgaca

SEQ ID NO: 5944972 - DNA, 25 bp, Homo sapien
atacagtaaaaatatcagatctagc

SEQ ID NO: 5944973 - DNA, 25 bp, Homo sapien
tgcgaagcatgttatcggtgttgat

SEQ ID NO: 5944974 - DNA, 25 bp, Homo sapien
cactggtcctcatgctccatacact

SEQ ID NO: 5944975 - DNA, 25 bp, Homo sapien
tggaagactctcagtataaagacga

SEQ ID NO: 5944976 - DNA, 25 bp, Homo sapien
gttccgttggtcttacacgagccca

SEQ ID NO: 5944977 - DNA, 25 bp, Homo sapien
aggacaagattgttttagacgtcgg

SEQ ID NO: 5944978 - DNA, 25 bp, Homo sapien
ccggtattttatccatgtttgccgc

SEQ ID NO: 5944979 - DNA, 25 bp, Homo sapien
ctccattcatttggccggtttggaa

SEQ ID NO: 5944980 - DNA, 25 bp, Homo sapien
tttccctgatgatctagatgctgaa

SEQ ID NO: 5944981 - DNA, 25 bp, Homo sapien
aacaatattttatttccctgatgat

SEQ ID NO: 5944982 - DNA, 25 bp, Homo sapien
ttctttacgctagagaccactattt

SEQ ID NO: 5944983 - DNA, 25 bp, Homo sapien
aatatcagatctagcgtttaagagt

SEQ ID NO: 5944984 - DNA, 25 bp, Homo sapien
tggtagagttgaacggattcagcga

SEQ ID NO: 5944985 - DNA, 25 bp, Homo sapien
atggacaccgttctttacgctagag

SEQ ID NO: 5944986 - DNA, 25 bp, Homo sapien
aactttaaattgacggccaagagac

SEQ ID NO: 5944987 - DNA, 25 bp, Homo sapien
gatgctgaaactggtgacaccattg

SEQ ID NO: 5944988 - DNA, 25 bp, Homo sapien
tatacgagtccatgatggacaccgt

SEQ ID NO: 5944989 - DNA, 25 bp, Homo sapien
agcaaacaatattttatttccctga

SEQ ID NO: 5944990 - DNA, 25 bp, Homo sapien
agagttgaacggattcagcgacaag

SEQ ID NO: 5944991 - DNA, 25 bp, Homo sapien
agtataaagacgagaagttgaacta

SEQ ID NO: 5944992 - DNA, 25 bp, Homo sapien
cgttggtcttacacgagcccatcgt

SEQ ID NO: 5944993 - DNA, 25 bp, Homo sapien
ttcatttaccctttcctaaagttga

SEQ ID NO: 5944994 - DNA, 25 bp, Homo sapien
ttacgctagagaccactatttggta

SEQ ID NO: 5944995 - DNA, 25 bp, Homo sapien
actctcagtataaagacgagaagtt

SEQ ID NO: 5944996 - DNA, 25 bp, Homo sapien
aagagtaactttaaattgacggcca

SEQ ID NO: 5944997 - DNA, 25 bp, Homo sapien
tctgctacagaaaaaaccaagctaa

SEQ ID NO: 5944998 - DNA, 25 bp, Homo sapien
tctcagtataaagacgagaagttga

SEQ ID NO: 5944999 - DNA, 25 bp, Homo sapien
ttcctaaagttgacatcataatttc

SEQ ID NO: 5945000 - DNA, 25 bp, Homo sapien
acggccaagagacaagatatgatta

SEQ ID NO: 5945001 - DNA, 25 bp, Homo sapien
taaagacgagaagttgaactactgg

SEQ ID NO: 5945002 - DNA, 25 bp, Homo sapien
cgtgaaagattctgctacagaaaaa

SEQ ID NO: 5945003 - DNA, 25 bp, Homo sapien
attattcgccatttgttccgttggt

SEQ ID NO: 5945004 - DNA, 25 bp, Homo sapien
taaggatctttttaaggacaagatt

SEQ ID NO: 5945005 - DNA, 25 bp, Homo sapien
ccactatttggtagaaggcggtctg

SEQ ID NO: 5945006 - DNA, 25 bp, Homo sapien
aggaattggtagagttgaacggatt

SEQ ID NO: 5945007 - DNA, 25 bp, Homo sapien
tacgagtccatgatggacaccgttc

SEQ ID NO: 5945008 - DNA, 25 bp, Homo sapien
gcccatcgtcgacaccgtggaaaga

SEQ ID NO: 5945009 - DNA, 25 bp, Homo sapien
ttagacgtcggttgcggtaccggta

SEQ ID NO: 5945010 - DNA, 25 bp, Homo sapien
aaagattctgctacagaaaaaacca

SEQ ID NO: 5945011 - DNA, 25 bp, Homo sapien
aagagacaagatatgattaatggta

SEQ ID NO: 5945012 - DNA, 25 bp, Homo sapien
gacaagatatgattaatggtatagt

SEQ ID NO: 5945013 - DNA, 25 bp, Homo sapien
actatttggtagaaggcggtctgat

SEQ ID NO: 5945014 - DNA, 25 bp, Homo sapien
ttggtcttacacgagcccatcgtcg

SEQ ID NO: 5945015 - DNA, 25 bp, Homo sapien
ttttatccatgtttgccgctaaaca

SEQ ID NO: 5945016 - DNA, 25 bp, Homo sapien
actcactggaagcaaacaatatttt

SEQ ID NO: 5945017 - DNA, 25 bp, Homo sapien
aagatcaccttgctaagaggcaagt

SEQ ID NO: 5945018 - DNA, 25 bp, Homo sapien
cgaagagatgcttcaagatactgtt

SEQ ID NO: 5945019 - DNA, 25 bp, Homo sapien
atcataatttctgaatggatgggtt

SEQ ID NO: 5945020 - DNA, 25 bp, Homo sapien
aagagatgcttcaagatactgttcg

SEQ ID NO: 5945021 - DNA, 25 bp, Homo sapien
gtttgctctccaaacgagaagaata

SEQ ID NO: 5945022 - DNA, 25 bp, Homo sapien
acaatgtcaacaccacctcagacaa

SEQ ID NO: 5945023 - DNA, 25 bp, Homo sapien
gcggtaccggtattttatccatgtt

SEQ ID NO: 5945024 - DNA, 25 bp, Homo sapien
tcttacagaaacgcaattatccaaa

SEQ ID NO: 5945025 - DNA, 25 bp, Homo sapien
taatttctgaatggatgggttactt

SEQ ID NO: 5945026 - DNA, 25 bp, Homo sapien
aaacgcaattatccaaaataaggat

SEQ ID NO: 5945027 - DNA, 25 bp, Homo sapien
gatctttcccgacaagtgctccatt

SEQ ID NO: 5945028 - DNA, 25 bp, Homo sapien
actatacgagtccatgatggacacc

SEQ ID NO: 5945029 - DNA, 25 bp, Homo sapien
ggtattcacgaagagatgcttcaag

SEQ ID NO: 5945030 - DNA, 25 bp, Homo sapien
caagaagcagaaaaaacgaaggttc

SEQ ID NO: 5945031 - DNA, 25 bp, Homo sapien
ccatgtttgccgctaaacacggtgc

SEQ ID NO: 5945032 - DNA, 25 bp, Homo sapien
gagcaagacagccgtgaaagattct

SEQ ID NO: 5945033 - DNA, 25 bp, Homo sapien
tggcatcgacggtaattcaagaagc

SEQ ID NO: 5945034 - DNA, 25 bp, Homo sapien
ttgagttctccactggtcctcatgc

SEQ ID NO: 5945035 - DNA, 25 bp, Homo sapien
tgttgatatgtcaagcattattgag

SEQ ID NO: 5945036 - DNA, 25 bp, Homo sapien
tgctccattcatttggccggtttgg

SEQ ID NO: 5945037 - DNA, 25 bp, Homo sapien
tctaaatatcaaaatttcttacaag

SEQ ID NO: 5945038 - DNA, 25 bp, Homo sapien
ctttaaattgacggccaagagacaa

SEQ ID NO: 5945039 - DNA, 25 bp, Homo sapien
cttgctaagaggcaagttggaggac

SEQ ID NO: 5945040 - DNA, 25 bp, Homo sapien
gggtaagagacctgttgagttctcc

SEQ ID NO: 5945041 - DNA, 25 bp, Homo sapien
tatcaaaatttcttacaagttcgaa

SEQ ID NO: 5945042 - DNA, 25 bp, Homo sapien
aaagcgaacagcactacttcaattc

SEQ ID NO: 5945043 - DNA, 25 bp, Homo sapien
ggcggtctgatctttcccgacaagt

SEQ ID NO: 5945044 - DNA, 25 bp, Homo sapien
ttgctctccaaacgagaagaataac

SEQ ID NO: 5945045 - DNA, 25 bp, Homo sapien
cgacattgttttccctgcaccaaag

SEQ ID NO: 5945046 - DNA, 25 bp, Homo sapien
gaagcaaacaatattttatttccct

SEQ ID NO: 5945047 - DNA, 25 bp, Homo sapien
atggtattcacgaagagatgcttca

SEQ ID NO: 5945048 - DNA, 25 bp, Homo sapien
ccgtggaaagaaacaatgtcaacac

SEQ ID NO: 5945049 - DNA, 25 bp, Homo sapien
cgaatggcatcgacggtaattcaag

SEQ ID NO: 5945050 - DNA, 25 bp, Homo sapien
cgagaagaataacagagatctaaat

SEQ ID NO: 5945051 - DNA, 25 bp, Homo sapien
ttccctgcaccaaagggtaagagac

SEQ ID NO: 5945052 - DNA, 25 bp, Homo sapien
tatccaaaataaggatctttttaag

SEQ ID NO: 5945053 - DNA, 25 bp, Homo sapien
cttcaattcgtacgatcactatggt

SEQ ID NO: 5945054 - DNA, 25 bp, Homo sapien
atctagcgtttaagagtaactttaa

SEQ ID NO: 5945055 - DNA, 25 bp, Homo sapien
ttaagagtaactttaaattgacggc

SEQ ID NO: 5945056 - DNA, 25 bp, Homo sapien
gtagaaggcggtctgatctttcccg

SEQ ID NO: 5945057 - DNA, 25 bp, Homo sapien
ggtgcgaagcatgttatcggtgttg

SEQ ID NO: 5945058 - DNA, 25 bp, Homo sapien
ctccatacactcactggaagcaaac

SEQ ID NO: 5945059 - DNA, 25 bp, Homo sapien
cctgttgagttctccactggtcctc

SEQ ID NO: 5945060 - DNA, 25 bp, Homo sapien
gcgaaggaattggtagagttgaacg

SEQ ID NO: 5945061 - DNA, 25 bp, Homo sapien
gaaactggtgacaccattgaaggtg

SEQ ID NO: 5945062 - DNA, 25 bp, Homo sapien
attggtagagttgaacggattcagc

SEQ ID NO: 5945063 - DNA, 25 bp, Homo sapien
gcaagacagccgtgaaagattctgc

SEQ ID NO: 5945064 - DNA, 25 bp, Homo sapien
gacaaattgatcgaatttgatttaa

SEQ ID NO: 5945065 - DNA, 25 bp, Homo sapien
ttgaacggattcagcgacaagatca

SEQ ID NO: 5945066 - DNA, 25 bp, Homo sapien
aattcgtacgatcactatggtattc

SEQ ID NO: 5945067 - DNA, 25 bp, Homo sapien
cctaaagttgacatcataatttctg

SEQ ID NO: 5945068 - DNA, 25 bp, Homo sapien
atttctgaatggatgggttactttc

SEQ ID NO: 5945069 - DNA, 25 bp, Homo sapien
gacaagtgctccattcatttggccg

SEQ ID NO: 5945070 - DNA, 25 bp, Homo sapien
tcacctggttcgacattgttttccc

SEQ ID NO: 5945071 - DNA, 25 bp, Homo sapien
agatctagcgtttaagagtaacttt

SEQ ID NO: 5945072 - DNA, 25 bp, Homo sapien
caagattgttttagacgtcggttgc

SEQ ID NO: 5945073 - DNA, 25 bp, Homo sapien
actggaagcaaacaatattttattt

SEQ ID NO: 5945074 - DNA, 25 bp, Homo sapien
gctctccaaacgagaagaataacag

SEQ ID NO: 5945075 - DNA, 25 bp, Homo sapien
ctggttcgacattgttttccctgca

SEQ ID NO: 5945076 - DNA, 25 bp, Homo sapien
gatctagatgctgaaactggtgaca

SEQ ID NO: 5945077 - DNA, 25 bp, Homo sapien
aaacacggtgcgaagcatgttatcg

SEQ ID NO: 5945078 - DNA, 25 bp, Homo sapien
gagacaagatatgattaatggtata

SEQ ID NO: 5945079 - DNA, 25 bp, Homo sapien
ggacaccgttctttacgctagagac

SEQ ID NO: 5945080 - DNA, 25 bp, Homo sapien
ttctactatacgagtccatgatgga

SEQ ID NO: 5945081 - DNA, 25 bp, Homo sapien
tctagatgctgaaactggtgacacc

SEQ ID NO: 5945082 - DNA, 25 bp, Homo sapien
tgttttccctgcaccaaagggtaag

SEQ ID NO: 5945083 - DNA, 25 bp, Homo sapien
aaggcggtctgatctttcccgacaa

SEQ ID NO: 5945084 - DNA, 25 bp, Homo sapien
cgagtccatgatggacaccgttctt

SEQ ID NO: 5945085 - DNA, 25 bp, Homo sapien
atttggccggtttggaagactctca

SEQ ID NO: 5945086 - DNA, 25 bp, Homo sapien
aaaaaaccaagctaagtgaaagcga

SEQ ID NO: 5945087 - DNA, 25 bp, Homo sapien
gtaactttaaattgacggccaagag

SEQ ID NO: 5945088 - DNA, 25 bp, Homo sapien
acagagatctaaatatcaaaatttc

SEQ ID NO: 5945089 - DNA, 25 bp, Homo sapien
ggttcgacattgttttccctgcacc

SEQ ID NO: 5945090 - DNA, 25 bp, Homo sapien
ctacagaaaaaaccaagctaagtga

SEQ ID NO: 5945091 - DNA, 25 bp, Homo sapien
aagacagccgtgaaagattctgcta

SEQ ID NO: 5945092 - DNA, 25 bp, Homo sapien
tttatttccctgatgatctagatgc

SEQ ID NO: 5945093 - DNA, 25 bp, Homo sapien
accttatcttacagaaacgcaatta

SEQ ID NO: 5945094 - DNA, 25 bp, Homo sapien
gctaagtgaaagcgaacagcactac

SEQ ID NO: 5945095 - DNA, 25 bp, Homo sapien
aataacagagatctaaatatcaaaa

SEQ ID NO: 5945096 - DNA, 25 bp, Homo sapien
aagcatgttatcggtgttgatatgt

SEQ ID NO: 5945097 - DNA, 25 bp, Homo sapien
tgctacagaaaaaaccaagctaagt

SEQ ID NO: 5945098 - DNA, 25 bp, Homo sapien
ctggtcctcatgctccatacactca

SEQ ID NO: 5945099 - DNA, 25 bp, Homo sapien
gttcgtaccttatcttacagaaacg

SEQ ID NO: 5945100 - DNA, 25 bp, Homo sapien
gatcgaatttgatttaaatacagta

SEQ ID NO: 5945101 - DNA, 25 bp, Homo sapien
gcatgttatcggtgttgatatgtca

SEQ ID NO: 5945102 - DNA, 25 bp, Homo sapien
gccgtgaaagattctgctacagaaa

SEQ ID NO: 5945103 - DNA, 25 bp, Homo sapien
tgttgagttctccactggtcctcat

SEQ ID NO: 5945104 - DNA, 25 bp, Homo sapien
tgcttcaagatactgttcgtacctt

SEQ ID NO: 5945105 - DNA, 25 bp, Homo sapien
taaggacaagattgttttagacgtc

SEQ ID NO: 5945106 - DNA, 25 bp, Homo sapien
ttgatcgaatttgatttaaatacag

SEQ ID NO: 5945107 - DNA, 25 bp, Homo sapien
gatactgttcgtaccttatcttaca

SEQ ID NO: 5945108 - DNA, 25 bp, Homo sapien
acacggtgcgaagcatgttatcggt

SEQ ID NO: 5945109 - DNA, 25 bp, Homo sapien
ttcgtacgatcactatggtattcac

SEQ ID NO: 5945110 - DNA, 25 bp, Homo sapien
gcaattatccaaaataaggatcttt

SEQ ID NO: 5945111 - DNA, 25 bp, Homo sapien
caaagggtaagagacctgttgagtt

SEQ ID NO: 5945112 - DNA, 25 bp, Homo sapien
caagtgctccattcatttggccggt

SEQ ID NO: 5945113 - DNA, 25 bp, Homo sapien
ccatttgttccgttggtcttacacg

SEQ ID NO: 5945114 - DNA, 25 bp, Homo sapien
atgagcaagacagccgtgaaagatt

SEQ ID NO: 5945115 - DNA, 25 bp, Homo sapien
aggatctttttaaggacaagattgt

SEQ ID NO: 5945116 - DNA, 25 bp, Homo sapien
gaattggtagagttgaacggattca

SEQ ID NO: 5945117 - DNA, 25 bp, Homo sapien
gaatggatgggttactttctactat

SEQ ID NO: 5945118 - DNA, 25 bp, Homo sapien
gcgtttaagagtaactttaaattga

SEQ ID NO: 5945119 - DNA, 25 bp, Homo sapien
atgattaatggtatagtcacctggt

SEQ ID NO: 5945120 - DNA, 25 bp, Homo sapien
aatttcttacaagttcgaatcgaat

SEQ ID NO: 5945121 - DNA, 25 bp, Homo sapien
tctttcccgacaagtgctccattca

SEQ ID NO: 5945122 - DNA, 25 bp, Homo sapien
ccattcatttggccggtttggaaga

SEQ ID NO: 5945123 - DNA, 25 bp, Homo sapien
ctgcaccaaagggtaagagacctgt

SEQ ID NO: 5945124 - DNA, 25 bp, Homo sapien
ttcaagaagcagaaaaaacgaaggt

SEQ ID NO: 5945125 - DNA, 25 bp, Homo sapien
cgtttctgtaagataaggtacgaac

SEQ ID NO: 5945126 - DNA, 25 bp, Homo sapien
ttgtctgaggtggtgttgacattgt

SEQ ID NO: 5945127 - DNA, 25 bp, Homo sapien
agtagttcaacttctcgtctttata

SEQ ID NO: 5945128 - DNA, 25 bp, Homo sapien
gaaattatgatgtcaactttaggaa

SEQ ID NO: 5945129 - DNA, 25 bp, Homo sapien
tgctgttcgctttcacttagcttgg

SEQ ID NO: 5945130 - DNA, 25 bp, Homo sapien
attcgattcgaacttgtaagaaatt

SEQ ID NO: 5945131 - DNA, 25 bp, Homo sapien
taccctttggtgcagggaaaacaat

SEQ ID NO: 5945132 - DNA, 25 bp, Homo sapien
gtgttgacattgtttctttccacgg

SEQ ID NO: 5945133 - DNA, 25 bp, Homo sapien
caacggaacaaatggcgaataatca

SEQ ID NO: 5945134 - DNA, 25 bp, Homo sapien
taagaaccttcgttttttctgcttc

SEQ ID NO: 5945135 - DNA, 25 bp, Homo sapien
tgaagtagtgctgttcgctttcact

SEQ ID NO: 5945136 - DNA, 25 bp, Homo sapien
tcagggaaataaaatattgtttgct

SEQ ID NO: 5945137 - DNA, 25 bp, Homo sapien
gtgtcgacgatgggctcgtgtaaga

SEQ ID NO: 5945138 - DNA, 25 bp, Homo sapien
catccattcagaaattatgatgtca

SEQ ID NO: 5945139 - DNA, 25 bp, Homo sapien
ttggagagcaaaccaattcaccttc

SEQ ID NO: 5945140 - DNA, 25 bp, Homo sapien
gaaagtaacccatccattcagaaat

SEQ ID NO: 5945141 - DNA, 25 bp, Homo sapien
ataccatagtgatcgtacgaattga

SEQ ID NO: 5945142 - DNA, 25 bp, Homo sapien
caaacatggataaaataccggtacc

SEQ ID NO: 5945143 - DNA, 25 bp, Homo sapien
cgtcgatgccattcgattcgaactt

SEQ ID NO: 5945144 - DNA, 25 bp, Homo sapien
ataaaatattgtttgcttccagtga

SEQ ID NO: 5945145 - DNA, 25 bp, Homo sapien
ctcaataatgcttgacatatcaaca

SEQ ID NO: 5945146 - DNA, 25 bp, Homo sapien
tacgaacagtatcttgaagcatctc

SEQ ID NO: 5945147 - DNA, 25 bp, Homo sapien
ttaaacgctagatctgatattttta

SEQ ID NO: 5945148 - DNA, 25 bp, Homo sapien
ttttttctgcttcttgaattaccgt

SEQ ID NO: 5945149 - DNA, 25 bp, Homo sapien
caaattcgatcaatttgtctgaggt

SEQ ID NO: 5945150 - DNA, 25 bp, Homo sapien
ttcaactctaccaattccttcgcca

SEQ ID NO: 5945151 - DNA, 25 bp, Homo sapien
gctgaatccgttcaactctaccaat

SEQ ID NO: 5945152 - DNA, 25 bp, Homo sapien
tcgattcgaacttgtaagaaatttt

SEQ ID NO: 5945153 - DNA, 25 bp, Homo sapien
atgaggaccagtggagaactcaaca

SEQ ID NO: 5945154 - DNA, 25 bp, Homo sapien
ccatctcaataatgcttgacatatc

SEQ ID NO: 5945155 - DNA, 25 bp, Homo sapien
agaccaacggaacaaatggcgaata

SEQ ID NO: 5945156 - DNA, 25 bp, Homo sapien
ttaatgcattaaataagaaccttcg

SEQ ID NO: 5945157 - DNA, 25 bp, Homo sapien
tccatcatggactcgtatagtagaa

SEQ ID NO: 5945158 - DNA, 25 bp, Homo sapien
tggccgtcaatttaaagttactctt

SEQ ID NO: 5945159 - DNA, 25 bp, Homo sapien
aatcttgtccttaaaaagatcctta

SEQ ID NO: 5945160 - DNA, 25 bp, Homo sapien
ttcagcatctagatcatcagggaaa

SEQ ID NO: 5945161 - DNA, 25 bp, Homo sapien
accgtcgatgccattcgattcgaac

SEQ ID NO: 5945162 - DNA, 25 bp, Homo sapien
atcatcagggaaataaaatattgtt

SEQ ID NO: 5945163 - DNA, 25 bp, Homo sapien
agaactcaacaggtctcttaccctt

SEQ ID NO: 5945164 - DNA, 25 bp, Homo sapien
tttactgtatttaaatcaaattcga

SEQ ID NO: 5945165 - DNA, 25 bp, Homo sapien
aacagtatcttgaagcatctcttcg

SEQ ID NO: 5945166 - DNA, 25 bp, Homo sapien
tctgtagcagaatctttcacggctg

SEQ ID NO: 5945167 - DNA, 25 bp, Homo sapien
atccttattttggataattgcgttt

SEQ ID NO: 5945168 - DNA, 25 bp, Homo sapien
ataacatgcttcgcaccgtgtttag

SEQ ID NO: 5945169 - DNA, 25 bp, Homo sapien
tttctgtagcagaatctttcacggc

SEQ ID NO: 5945170 - DNA, 25 bp, Homo sapien
cttcgtgaataccatagtgatcgta

SEQ ID NO: 5945171 - DNA, 25 bp, Homo sapien
gtgaataccatagtgatcgtacgaa

SEQ ID NO: 5945172 - DNA, 25 bp, Homo sapien
gtgatcgtacgaattgaagtagtgc

SEQ ID NO: 5945173 - DNA, 25 bp, Homo sapien
gtcgggaaagatcagaccgccttct

SEQ ID NO: 5945174 - DNA, 25 bp, Homo sapien
ttattttggataattgcgtttctgt

SEQ ID NO: 5945175 - DNA, 25 bp, Homo sapien
gtttggagagcaaaccaattcacct

SEQ ID NO: 5945176 - DNA, 25 bp, Homo sapien
taagataaggtacgaacagtatctt

SEQ ID NO: 5945177 - DNA, 25 bp, Homo sapien
caatggtgtcaccagtttcagcatc

SEQ ID NO: 5945178 - DNA, 25 bp, Homo sapien
tgtcaccagtttcagcatctagatc

SEQ ID NO: 5945179 - DNA, 25 bp, Homo sapien
tgtatggagcatgaggaccagtgga

SEQ ID NO: 5945180 - DNA, 25 bp, Homo sapien
ttgcctcttagcaaggtgatcttgt

SEQ ID NO: 5945181 - DNA, 25 bp, Homo sapien
ggtacgaacagtatcttgaagcatc

SEQ ID NO: 5945182 - DNA, 25 bp, Homo sapien
cagaccgccttctaccaaatagtgg

SEQ ID NO: 5945183 - DNA, 25 bp, Homo sapien
aaccaattcaccttcaatggtgtca

SEQ ID NO: 5945184 - DNA, 25 bp, Homo sapien
gtttgcttccagtgagtgtatggag

SEQ ID NO: 5945185 - DNA, 25 bp, Homo sapien
gaaccaggtgactataccattaatc

SEQ ID NO: 5945186 - DNA, 25 bp, Homo sapien
gacgtctaaaacaatcttgtcctta

SEQ ID NO: 5945187 - DNA, 25 bp, Homo sapien
caataatgcttgacatatcaacacc

SEQ ID NO: 5945188 - DNA, 25 bp, Homo sapien
aaacgtcttgccagtagttcaactt

SEQ ID NO: 5945189 - DNA, 25 bp, Homo sapien
actgagagtcttccaaaccggccaa

SEQ ID NO: 5945190 - DNA, 25 bp, Homo sapien
tagatctgatatttttactgtattt

SEQ ID NO: 5945191 - DNA, 25 bp, Homo sapien
aacaaatggcgaataatcaaacccg

SEQ ID NO: 5945192 - DNA, 25 bp, Homo sapien
cgtgtttagcggcaaacatggataa

SEQ ID NO: 5945193 - DNA, 25 bp, Homo sapien
agcgtaaagaacggtgtccatcatg

SEQ ID NO: 5945194 - DNA, 25 bp, Homo sapien
cggtgtcgacgatgggctcgtgtaa

SEQ ID NO: 5945195 - DNA, 25 bp, Homo sapien
gtaaacgtcttgccagtagttcaac

SEQ ID NO: 5945196 - DNA, 25 bp, Homo sapien
ggcaaacatggataaaataccggta

SEQ ID NO: 5945197 - DNA, 25 bp, Homo sapien
caaatgaatggagcacttgtcggga

SEQ ID NO: 5945198 - DNA, 25 bp, Homo sapien
gcatgaggaccagtggagaactcaa

SEQ ID NO: 5945199 - DNA, 25 bp, Homo sapien
cccatccattcagaaattatgatgt

SEQ ID NO: 5945200 - DNA, 25 bp, Homo sapien
aagaacggtgtccatcatggactcg

SEQ ID NO: 5945201 - DNA, 25 bp, Homo sapien
gaataccatagtgatcgtacgaatt

SEQ ID NO: 5945202 - DNA, 25 bp, Homo sapien
aaccgacgtctaaaacaatcttgtc

SEQ ID NO: 5945203 - DNA, 25 bp, Homo sapien
ttttctgcttcttgaattaccgtcg

SEQ ID NO: 5945204 - DNA, 25 bp, Homo sapien
ggagaactcaacaggtctcttaccc

SEQ ID NO: 5945205 - DNA, 25 bp, Homo sapien
atgaacgtcctccaacttgcctctt

SEQ ID NO: 5945206 - DNA, 25 bp, Homo sapien
gccaaatgaatggagcacttgtcgg

SEQ ID NO: 5945207 - DNA, 25 bp, Homo sapien
ccaaatagtggtctctagcgtaaag

SEQ ID NO: 5945208 - DNA, 25 bp, Homo sapien
gggaaaacaatgtcgaaccaggtga

SEQ ID NO: 5945209 - DNA, 25 bp, Homo sapien
tttggataattgcgtttctgtaaga

SEQ ID NO: 5945210 - DNA, 25 bp, Homo sapien
accgtgtttagcggcaaacatggat

SEQ ID NO: 5945211 - DNA, 25 bp, Homo sapien
gttcgctttcacttagcttggtttt

SEQ ID NO: 5945212 - DNA, 25 bp, Homo sapien
gcatctagatcatcagggaaataaa

SEQ ID NO: 5945213 - DNA, 25 bp, Homo sapien
gaggtggtgttgacattgtttcttt

SEQ ID NO: 5945214 - DNA, 25 bp, Homo sapien
tctaaaacaatcttgtccttaaaaa

SEQ ID NO: 5945215 - DNA, 25 bp, Homo sapien
catggataaaataccggtaccgcaa

SEQ ID NO: 5945216 - DNA, 25 bp, Homo sapien
tagcagaatctttcacggctgtctt

SEQ ID NO: 5945217 - DNA, 25 bp, Homo sapien
ataatgcttgacatatcaacaccga

SEQ ID NO: 5945218 - DNA, 25 bp, Homo sapien
aaaatattgtttgcttccagtgagt

SEQ ID NO: 5945219 - DNA, 25 bp, Homo sapien
caacaccgataacatgcttcgcacc

SEQ ID NO: 5945220 - DNA, 25 bp, Homo sapien
agatcagaccgccttctaccaaata

SEQ ID NO: 5945221 - DNA, 25 bp, Homo sapien
aaacaatcttgtccttaaaaagatc

SEQ ID NO: 5945222 - DNA, 25 bp, Homo sapien
ctcttaccctttggtgcagggaaaa

SEQ ID NO: 5945223 - DNA, 25 bp, Homo sapien
aaacaatgtcgaaccaggtgactat

SEQ ID NO: 5945224 - DNA, 25 bp, Homo sapien
catagtgatcgtacgaattgaagta

SEQ ID NO: 5945225 - DNA, 25 bp, Homo sapien
tataccattaatcatatcttgtctc

SEQ ID NO: 5945226 - DNA, 25 bp, Homo sapien
attgcgtttctgtaagataaggtac

SEQ ID NO: 5945227 - DNA, 25 bp, Homo sapien
tatggagcatgaggaccagtggaga

SEQ ID NO: 5945228 - DNA, 25 bp, Homo sapien
cgtaaagaacggtgtccatcatgga

SEQ ID NO: 5945229 - DNA, 25 bp, Homo sapien
atttagatctctgttattcttctcg

SEQ ID NO: 5945230 - DNA, 25 bp, Homo sapien
cttgaattaccgtcgatgccattcg

SEQ ID NO: 5945231 - DNA, 25 bp, Homo sapien
caaacccgtaaacgtcttgccagta

SEQ ID NO: 5945232 - DNA, 25 bp, Homo sapien
caacttgcctcttagcaaggtgatc

SEQ ID NO: 5945233 - DNA, 25 bp, Homo sapien
agtagaaagtaacccatccattcag

SEQ ID NO: 5945234 - DNA, 25 bp, Homo sapien
tactgtatttaaatcaaattcgatc

SEQ ID NO: 5945235 - DNA, 25 bp, Homo sapien
gatgggctcgtgtaagaccaacgga

SEQ ID NO: 5945236 - DNA, 25 bp, Homo sapien
cagggaaaacaatgtcgaaccaggt

SEQ ID NO: 5945237 - DNA, 25 bp, Homo sapien
gttattcttctcgtttggagagcaa

SEQ ID NO: 5945238 - DNA, 25 bp, Homo sapien
ctagcgtaaagaacggtgtccatca

SEQ ID NO: 5945239 - DNA, 25 bp, Homo sapien
atttgtctgaggtggtgttgacatt

SEQ ID NO: 5945240 - DNA, 25 bp, Homo sapien
tctgtaagataaggtacgaacagta

SEQ ID NO: 5945241 - DNA, 25 bp, Homo sapien
acatatcaacaccgataacatgctt

SEQ ID NO: 5945242 - DNA, 25 bp, Homo sapien
tgtccatcatggactcgtatagtag

SEQ ID NO: 5945243 - DNA, 25 bp, Homo sapien
cgacgatgggctcgtgtaagaccaa

SEQ ID NO: 5945244 - DNA, 25 bp, Homo sapien
gtctcttggccgtcaatttaaagtt

SEQ ID NO: 5945245 - DNA, 25 bp, Homo sapien
gtggagaactcaacaggtctcttac

SEQ ID NO: 5945246 - DNA, 25 bp, Homo sapien
tggcgaataatcaaacccgtaaacg

SEQ ID NO: 5945247 - DNA, 25 bp, Homo sapien
ttactcttaaacgctagatctgata

SEQ ID NO: 5945248 - DNA, 25 bp, Homo sapien
cttggttttttctgtagcagaatct

SEQ ID NO: 5945249 - DNA, 25 bp, Homo sapien
actcgtatagtagaaagtaacccat

SEQ ID NO: 5945250 - DNA, 25 bp, Homo sapien
accagtttcagcatctagatcatca

SEQ ID NO: 5945251 - DNA, 25 bp, Homo sapien
taatcatatcttgtctcttggccgt

SEQ ID NO: 5945252 - DNA, 25 bp, Homo sapien
aagaaattttgatatttagatctct

SEQ ID NO: 5945253 - DNA, 25 bp, Homo sapien
ctttatactgagagtcttccaaacc

SEQ ID NO: 5945254 - DNA, 25 bp, Homo sapien
ttgcttccagtgagtgtatggagca

SEQ ID NO: 5945255 - DNA, 25 bp, Homo sapien
ggtgactataccattaatcatatct

SEQ ID NO: 5945256 - DNA, 25 bp, Homo sapien
gttcaacttctcgtctttatactga

SEQ ID NO: 5945257 - DNA, 25 bp, Homo sapien
gtttcagcatctagatcatcaggga

SEQ ID NO: 5945258 - DNA, 25 bp, Homo sapien
atcatatcttgtctcttggccgtca

SEQ ID NO: 5945259 - DNA, 25 bp, Homo sapien
atcttgaagcatctcttcgtgaata

SEQ ID NO: 5945260 - DNA, 25 bp, Homo sapien
cttctcgtctttatactgagagtct

SEQ ID NO: 5945261 - DNA, 25 bp, Homo sapien
aatgcattaaataagaaccttcgtt

SEQ ID NO: 5945262 - DNA, 25 bp, Homo sapien
gaacggtgtccatcatggactcgta

SEQ ID NO: 5945263 - DNA, 25 bp, Homo sapien
gtctctagcgtaaagaacggtgtcc

SEQ ID NO: 5945264 - DNA, 25 bp, Homo sapien
aatgtcgaaccaggtgactatacca

SEQ ID NO: 5945265 - DNA, 25 bp, Homo sapien
gaggaccagtggagaactcaacagg

SEQ ID NO: 5945266 - DNA, 25 bp, Homo sapien
tgggctcgtgtaagaccaacggaac

SEQ ID NO: 5945267 - DNA, 25 bp, Homo sapien
ccttcaatggtgtcaccagtttcag

SEQ ID NO: 5945268 - DNA, 25 bp, Homo sapien
ttttgatatttagatctctgttatt

SEQ ID NO: 5945269 - DNA, 25 bp, Homo sapien
aactcaacaggtctcttaccctttg

SEQ ID NO: 5945270 - DNA, 25 bp, Homo sapien
ggaccagtggagaactcaacaggtc

SEQ ID NO: 5945271 - DNA, 25 bp, Homo sapien
gttgacattgtttctttccacggtg

SEQ ID NO: 5945272 - DNA, 25 bp, Homo sapien
tttagcggcaaacatggataaaata

SEQ ID NO: 5945273 - DNA, 25 bp, Homo sapien
tcgtacgaattgaagtagtgctgtt

SEQ ID NO: 5945274 - DNA, 25 bp, Homo sapien
cagtatcttgaagcatctcttcgtg

SEQ ID NO: 5945275 - DNA, 25 bp, Homo sapien
atggtgtcaccagtttcagcatcta

SEQ ID NO: 5945276 - DNA, 25 bp, Homo sapien
cgggaaagatcagaccgccttctac

SEQ ID NO: 5945277 - DNA, 25 bp, Homo sapien
taggaaagggtaaatgaacgtcctc

SEQ ID NO: 5945278 - DNA, 25 bp, Homo sapien
tttctttccacggtgtcgacgatgg

SEQ ID NO: 5945279 - DNA, 25 bp, Homo sapien
ctcttggccgtcaatttaaagttac

SEQ ID NO: 5945280 - DNA, 25 bp, Homo sapien
tgtccttaaaaagatccttattttg

SEQ ID NO: 5945281 - DNA, 25 bp, Homo sapien
atctagatcatcagggaaataaaat

SEQ ID NO: 5945282 - DNA, 25 bp, Homo sapien
acattgtttctttccacggtgtcga

SEQ ID NO: 5945283 - DNA, 25 bp, Homo sapien
tcaactttaggaaagggtaaatgaa

SEQ ID NO: 5945284 - DNA, 25 bp, Homo sapien
tcgtatagtagaaagtaacccatcc

SEQ ID NO: 5945285 - DNA, 25 bp, Homo sapien
cgtctaaaacaatcttgtccttaaa

SEQ ID NO: 5945286 - DNA, 25 bp, Homo sapien
atcttgtcgctgaatccgttcaact

SEQ ID NO: 5945287 - DNA, 25 bp, Homo sapien
atcagaccgccttctaccaaatagt

SEQ ID NO: 5945288 - DNA, 25 bp, Homo sapien
gaaagggtaaatgaacgtcctccaa

SEQ ID NO: 5945289 - DNA, 25 bp, Homo sapien
ctcttcgtgaataccatagtgatcg

SEQ ID NO: 5945290 - DNA, 25 bp, Homo sapien
atcaacaccgataacatgcttcgca

SEQ ID NO: 5945291 - DNA, 25 bp, Homo sapien
cttaccctttggtgcagggaaaaca

SEQ ID NO: 5945292 - DNA, 25 bp, Homo sapien
atatcaacaccgataacatgcttcg

SEQ ID NO: 5945293 - DNA, 25 bp, Homo sapien
aggtctcttaccctttggtgcaggg

SEQ ID NO: 5945294 - DNA, 25 bp, Homo sapien
aaggtgatcttgtcgctgaatccgt

SEQ ID NO: 5945295 - DNA, 25 bp, Homo sapien
gtcgacgatgggctcgtgtaagacc

SEQ ID NO: 5945296 - DNA, 25 bp, Homo sapien
gaaccttcgttttttctgcttcttg

SEQ ID NO: 5945297 - DNA, 25 bp, Homo sapien
agcaaaccaattcaccttcaatggt

SEQ ID NO: 5945298 - DNA, 25 bp, Homo sapien
tccattcagaaattatgatgtcaac

SEQ ID NO: 5945299 - DNA, 25 bp, Homo sapien
tgagtgtatggagcatgaggaccag

SEQ ID NO: 5945300 - DNA, 25 bp, Homo sapien
tcgtctttatactgagagtcttcca

SEQ ID NO: 5945301 - DNA, 25 bp, Homo sapien
accatagtgatcgtacgaattgaag

SEQ ID NO: 5945302 - DNA, 25 bp, Homo sapien
aattccttcgccatctcaataatgc

SEQ ID NO: 5945303 - DNA, 25 bp, Homo sapien
gatgtcaactttaggaaagggtaaa

SEQ ID NO: 5945304 - DNA, 25 bp, Homo sapien
gtctgaggtggtgttgacattgttt

SEQ ID NO: 5945305 - DNA, 25 bp, Homo sapien
gctttcacttagcttggttttttct

SEQ ID NO: 5945306 - DNA, 25 bp, Homo sapien
agtgctgttcgctttcacttagctt

SEQ ID NO: 5945307 - DNA, 25 bp, Homo sapien
acttagcttggttttttctgtagca

SEQ ID NO: 5945308 - DNA, 25 bp, Homo sapien
ttaaagttactcttaaacgctagat

SEQ ID NO: 5945309 - DNA, 25 bp, Homo sapien
tattgtttgcttccagtgagtgtat

SEQ ID NO: 5945310 - DNA, 25 bp, Homo sapien
gcacttgtcgggaaagatcagaccg

SEQ ID NO: 5945311 - DNA, 25 bp, Homo sapien
gattcgaacttgtaagaaattttga

SEQ ID NO: 5945312 - DNA, 25 bp, Homo sapien
cagaaattatgatgtcaactttagg

SEQ ID NO: 5945313 - DNA, 25 bp, Homo sapien
tggataattgcgtttctgtaagata

SEQ ID NO: 5945314 - DNA, 25 bp, Homo sapien
ttccttcgccatctcaataatgctt

SEQ ID NO: 5945315 - DNA, 25 bp, Homo sapien
gtatagtagaaagtaacccatccat

SEQ ID NO: 5945316 - DNA, 25 bp, Homo sapien
ctgttcgctttcacttagcttggtt

SEQ ID NO: 5945317 - DNA, 25 bp, Homo sapien
gaaattttgatatttagatctctgt

SEQ ID NO: 5945318 - DNA, 25 bp, Homo sapien
aaagatccttattttggataattgc

SEQ ID NO: 5945319 - DNA, 25 bp, Homo sapien
tcgctgaatccgttcaactctacca

SEQ ID NO: 5945320 - DNA, 25 bp, Homo sapien
tgaatggagcacttgtcgggaaaga

SEQ ID NO: 5945321 - DNA, 25 bp, Homo sapien
actctaccaattccttcgccatctc

SEQ ID NO: 5945322 - DNA, 25 bp, Homo sapien
ctttggtgcagggaaaacaatgtcg

SEQ ID NO: 5945323 - DNA, 25 bp, Homo sapien
tttcacttagcttggttttttctgt

SEQ ID NO: 5945324 - DNA, 25 bp, Homo sapien
ggtgatcttgtcgctgaatccgttc

SEQ ID NO: 5945325 - DNA, 25 bp, Homo sapien
catatcttgtctcttggccgtcaat

SEQ ID NO: 5945326 - DNA, 25 bp, Homo sapien
gaacgtcctccaacttgcctcttag

SEQ ID NO: 5945327 - DNA, 25 bp, Homo sapien
aaagttactcttaaacgctagatct

SEQ ID NO: 5945328 - DNA, 25 bp, Homo sapien
atctctgttattcttctcgtttgga

SEQ ID NO: 5945329 - DNA, 25 bp, Homo sapien
gtaacccatccattcagaaattatg

SEQ ID NO: 5945330 - DNA, 25 bp, Homo sapien
ctgttattcttctcgtttggagagc

SEQ ID NO: 5945331 - DNA, 25 bp, Homo sapien
cattcagaaattatgatgtcaactt

SEQ ID NO: 5945332 - DNA, 25 bp, Homo sapien
tattcttctcgtttggagagcaaac

SEQ ID NO: 5945333 - DNA, 25 bp, Homo sapien
gccgtcaatttaaagttactcttaa

SEQ ID NO: 5945334 - DNA, 25 bp, Homo sapien
ggaaataaaatattgtttgcttcca

SEQ ID NO: 5945335 - DNA, 25 bp, Homo sapien
cgttcaactctaccaattccttcgc

SEQ ID NO: 5945336 - DNA, 25 bp, Homo sapien
gataattgcgtttctgtaagataag

SEQ ID NO: 5945337 - DNA, 25 bp, Homo sapien
tcaacttctcgtctttatactgaga

SEQ ID NO: 5945338 - DNA, 25 bp, Homo sapien
cttcgcaccgtgtttagcggcaaac

SEQ ID NO: 5945339 - DNA, 25 bp, Homo sapien
aacttgtaagaaattttgatattta

SEQ ID NO: 5945340 - DNA, 25 bp, Homo sapien
tgtagcagaatctttcacggctgtc

SEQ ID NO: 5945341 - DNA, 25 bp, Homo sapien
tgtcaactttaggaaagggtaaatg

SEQ ID NO: 5945342 - DNA, 25 bp, Homo sapien
aaatgaacgtcctccaacttgcctc

SEQ ID NO: 5945343 - DNA, 25 bp, Homo sapien
atcaaacccgtaaacgtcttgccag

SEQ ID NO: 5945344 - DNA, 25 bp, Homo sapien
atctcaataatgcttgacatatcaa

SEQ ID NO: 5945345 - DNA, 25 bp, Homo sapien
accagtggagaactcaacaggtctc

SEQ ID NO: 5945346 - DNA, 25 bp, Homo sapien
tgacatatcaacaccgataacatgc

SEQ ID NO: 5945347 - DNA, 25 bp, Homo sapien
agtggtctctagcgtaaagaacggt

SEQ ID NO: 5945348 - DNA, 25 bp, Homo sapien
aagtagtgctgttcgctttcactta

SEQ ID NO: 5945349 - DNA, 25 bp, Homo sapien
ccattaatcatatcttgtctcttgg

SEQ ID NO: 5945350 - DNA, 25 bp, Homo sapien
gatgccattcgattcgaacttgtaa

SEQ ID NO: 5945351 - DNA, 25 bp, Homo sapien
gcagaatctttcacggctgtcttgc

SEQ ID NO: 5945352 - DNA, 25 bp, Homo sapien
tcttgtccttaaaaagatccttatt

SEQ ID NO: 5945353 - DNA, 25 bp, Homo sapien
aaataaaatattgtttgcttccagt

SEQ ID NO: 5945354 - DNA, 25 bp, Homo sapien
acggtgtccatcatggactcgtata

SEQ ID NO: 5945355 - DNA, 25 bp, Homo sapien
tagaaagtaacccatccattcagaa

SEQ ID NO: 5945356 - DNA, 25 bp, Homo sapien
attgaagtagtgctgttcgctttca

SEQ ID NO: 5945357 - DNA, 25 bp, Homo sapien
tcttaaacgctagatctgatatttt

SEQ ID NO: 5945358 - DNA, 25 bp, Homo sapien
ggtggtgttgacattgtttctttcc

SEQ ID NO: 5945359 - DNA, 25 bp, Homo sapien
tagcggcaaacatggataaaatacc

SEQ ID NO: 5945360 - DNA, 25 bp, Homo sapien
tggttttttctgtagcagaatcttt

SEQ ID NO: 5945361 - DNA, 25 bp, Homo sapien
tcacttagcttggttttttctgtag

SEQ ID NO: 5945362 - DNA, 25 bp, Homo sapien
aaatagtggtctctagcgtaaagaa

SEQ ID NO: 5945363 - DNA, 25 bp, Homo sapien
agataaggtacgaacagtatcttga

SEQ ID NO: 5945364 - DNA, 25 bp, Homo sapien
ctctagcgtaaagaacggtgtccat

SEQ ID NO: 5945365 - DNA, 25 bp, Homo sapien
catcatggactcgtatagtagaaag

SEQ ID NO: 5945366 - DNA, 25 bp, Homo sapien
ttcgatcaatttgtctgaggtggtg

SEQ ID NO: 5945367 - DNA, 25 bp, Homo sapien
gagcacttgtcgggaaagatcagac

SEQ ID NO: 5945368 - DNA, 25 bp, Homo sapien
cggccaaatgaatggagcacttgtc

SEQ ID NO: 5945369 - DNA, 25 bp, Homo sapien
tttccacggtgtcgacgatgggctc

SEQ ID NO: 5945370 - DNA, 25 bp, Homo sapien
ctcttagcaaggtgatcttgtcgct

SEQ ID NO: 5945371 - DNA, 25 bp, Homo sapien
ttgtttgcttccagtgagtgtatgg

SEQ ID NO: 5945372 - DNA, 25 bp, Homo sapien
tggtctctagcgtaaagaacggtgt

SEQ ID NO: 5945373 - DNA, 25 bp, Homo sapien
aattcaccttcaatggtgtcaccag

SEQ ID NO: 5945374 - DNA, 25 bp, Homo sapien
taccattaatcatatcttgtctctt

SEQ ID NO: 5945375 - DNA, 25 bp, Homo sapien
ttgatatttagatctctgttattct

SEQ ID NO: 5945376 - DNA, 25 bp, Homo sapien
cctccaacttgcctcttagcaaggt

SEQ ID NO: 5945377 - DNA, 25 bp, Homo sapien
tgtcgaaccaggtgactataccatt

SEQ ID NO: 5945378 - DNA, 25 bp, Homo sapien
gtacgaattgaagtagtgctgttcg

SEQ ID NO: 5945379 - DNA, 25 bp, Homo sapien
gtctcttaccctttggtgcagggaa

SEQ ID NO: 5945380 - DNA, 25 bp, Homo sapien
accttcgttttttctgcttcttgaa

SEQ ID NO: 5945381 - DNA, 25 bp, Homo sapien
gttttttctgtagcagaatctttca

SEQ ID NO: 5945382 - DNA, 25 bp, Homo sapien
caaatggcgaataatcaaacccgta

SEQ ID NO: 5945383 - DNA, 25 bp, Homo sapien
tgaattaccgtcgatgccattcgat

SEQ ID NO: 5945384 - DNA, 25 bp, Homo sapien
cgttttttctgcttcttgaattacc

SEQ ID NO: 5945385 - DNA, 25 bp, Homo sapien
tgaagcatctcttcgtgaataccat

SEQ ID NO: 5945386 - DNA, 25 bp, Homo sapien
tctcgtctttatactgagagtcttc

SEQ ID NO: 5945387 - DNA, 25 bp, Homo sapien
tttctgtaagataaggtacgaacag

SEQ ID NO: 5945388 - DNA, 25 bp, Homo sapien
tggagcatgaggaccagtggagaac

SEQ ID NO: 5945389 - DNA, 25 bp, Homo sapien
tccacggtgtcgacgatgggctcgt

SEQ ID NO: 5945390 - DNA, 25 bp, Homo sapien
tcgtgaataccatagtgatcgtacg

SEQ ID NO: 5945391 - DNA, 25 bp, Homo sapien
aaatcaaattcgatcaatttgtctg

SEQ ID NO: 5945392 - DNA, 25 bp, Homo sapien
ttctgcttcttgaattaccgtcgat

SEQ ID NO: 5945393 - DNA, 25 bp, Homo sapien
tagcaaggtgatcttgtcgctgaat

SEQ ID NO: 5945394 - DNA, 25 bp, Homo sapien
ggtgtccatcatggactcgtatagt

SEQ ID NO: 5945395 - DNA, 25 bp, Homo sapien
ttagcttggttttttctgtagcaga

SEQ ID NO: 5945396 - DNA, 25 bp, Homo sapien
gtatcttgaagcatctcttcgtgaa

SEQ ID NO: 5945397 - DNA, 25 bp, Homo sapien
ccagtagttcaacttctcgtcttta

SEQ ID NO: 5945398 - DNA, 25 bp, Homo sapien
ttatactgagagtcttccaaaccgg

SEQ ID NO: 5945399 - DNA, 25 bp, Homo sapien
catcagggaaataaaatattgtttg

SEQ ID NO: 5945400 - DNA, 25 bp, Homo sapien
acgtcctccaacttgcctcttagca

SEQ ID NO: 5945401 - DNA, 25 bp, Homo sapien
tagttcaacttctcgtctttatact

SEQ ID NO: 5945402 - DNA, 25 bp, Homo sapien
cttgtaagaaattttgatatttaga

SEQ ID NO: 5945403 - DNA, 25 bp, Homo sapien
ccctttggtgcagggaaaacaatgt

SEQ ID NO: 5945404 - DNA, 25 bp, Homo sapien
tgccattcgattcgaacttgtaaga

SEQ ID NO: 5945405 - DNA, 25 bp, Homo sapien
cttagcaaggtgatcttgtcgctga

SEQ ID NO: 5945406 - DNA, 25 bp, Homo sapien
taattgcgtttctgtaagataaggt

SEQ ID NO: 5945407 - DNA, 25 bp, Homo sapien
agagtcttccaaaccggccaaatga

SEQ ID NO: 5945408 - DNA, 25 bp, Homo sapien
tgcttcgcaccgtgtttagcggcaa

SEQ ID NO: 5945409 - DNA, 25 bp, Homo sapien
tcgaaccaggtgactataccattaa

SEQ ID NO: 5945410 - DNA, 25 bp, Homo sapien
aattttgatatttagatctctgtta

SEQ ID NO: 5945411 - DNA, 25 bp, Homo sapien
gcaaccgacgtctaaaacaatcttg

SEQ ID NO: 5945412 - DNA, 25 bp, Homo sapien
gatatttagatctctgttattcttc

SEQ ID NO: 5945413 - DNA, 25 bp, Homo sapien
aaacgctagatctgatatttttact

SEQ ID NO: 5945414 - DNA, 25 bp, Homo sapien
tcaatttaaagttactcttaaacgc

SEQ ID NO: 5945415 - DNA, 25 bp, Homo sapien
gctagatctgatatttttactgtat

SEQ ID NO: 5945416 - DNA, 25 bp, Homo sapien
tccttaaaaagatccttattttgga

SEQ ID NO: 5945417 - DNA, 25 bp, Homo sapien
atggactcgtatagtagaaagtaac

SEQ ID NO: 5945418 - DNA, 25 bp, Homo sapien
caaaccaattcaccttcaatggtgt

SEQ ID NO: 5945419 - DNA, 25 bp, Homo sapien
attttggataattgcgtttctgtaa

SEQ ID NO: 5945420 - DNA, 25 bp, Homo sapien
ccaaaccggccaaatgaatggagca

SEQ ID NO: 5945421 - DNA, 25 bp, Homo sapien
ttgtcgggaaagatcagaccgcctt

SEQ ID NO: 5945422 - DNA, 25 bp, Homo sapien
ggctcgtgtaagaccaacggaacaa

SEQ ID NO: 5945423 - DNA, 25 bp, Homo sapien
gggtaaatgaacgtcctccaacttg

SEQ ID NO: 5945424 - DNA, 25 bp, Homo sapien
tcgcaccgtgtttagcggcaaacat

SEQ ID NO: 5945425 - DNA, 25 bp, Homo sapien
ccttattttggataattgcgtttct

SEQ ID NO: 5945426 - DNA, 25 bp, Homo sapien
ggactcgtatagtagaaagtaaccc

SEQ ID NO: 5945427 - DNA, 25 bp, Homo sapien
gcggcaaacatggataaaataccgg

SEQ ID NO: 5945428 - DNA, 25 bp, Homo sapien
ctgaggtggtgttgacattgtttct

SEQ ID NO: 5945429 - DNA, 25 bp, Homo sapien
taagaccaacggaacaaatggcgaa

SEQ ID NO: 5945430 - DNA, 25 bp, Homo sapien
cttgtcgctgaatccgttcaactct

SEQ ID NO: 5945431 - DNA, 25 bp, Homo sapien
ctcgtgtaagaccaacggaacaaat

SEQ ID NO: 5945432 - DNA, 25 bp, Homo sapien
gcaccgtgtttagcggcaaacatgg

SEQ ID NO: 5945433 - DNA, 25 bp, Homo sapien
tcgctttcacttagcttggtttttt

SEQ ID NO: 5945434 - DNA, 25 bp, Homo sapien
tgagagtcttccaaaccggccaaat

SEQ ID NO: 5945435 - DNA, 25 bp, Homo sapien
tgacattgtttctttccacggtgtc

SEQ ID NO: 5945436 - DNA, 25 bp, Homo sapien
ttcaatggtgtcaccagtttcagca

SEQ ID NO: 5945437 - DNA, 25 bp, Homo sapien
acgatgggctcgtgtaagaccaacg

SEQ ID NO: 5945438 - DNA, 25 bp, Homo sapien
aatattgtttgcttccagtgagtgt

SEQ ID NO: 5945439 - DNA, 25 bp, Homo sapien
ttcttctcgtttggagagcaaacca

SEQ ID NO: 5945440 - DNA, 25 bp, Homo sapien
tctttccacggtgtcgacgatgggc

SEQ ID NO: 5945441 - DNA, 25 bp, Homo sapien
taatcaaacccgtaaacgtcttgcc

SEQ ID NO: 5945442 - DNA, 25 bp, Homo sapien
gtcttgccagtagttcaacttctcg

SEQ ID NO: 5945443 - DNA, 25 bp, Homo sapien
tccaacttgcctcttagcaaggtga

SEQ ID NO: 5945444 - DNA, 25 bp, Homo sapien
ggaaagatcagaccgccttctacca

SEQ ID NO: 5945445 - DNA, 25 bp, Homo sapien
gaaaacaatgtcgaaccaggtgact

SEQ ID NO: 5945446 - DNA, 25 bp, Homo sapien
cgataacatgcttcgcaccgtgttt

SEQ ID NO: 5945447 - DNA, 25 bp, Homo sapien
tgcttgacatatcaacaccgataac

SEQ ID NO: 5945448 - DNA, 25 bp, Homo sapien
aacatgcttcgcaccgtgtttagcg

SEQ ID NO: 5945449 - DNA, 25 bp, Homo sapien
attaatcatatcttgtctcttggcc

SEQ ID NO: 5945450 - DNA, 25 bp, Homo sapien
tttttctgtagcagaatctttcacg

SEQ ID NO: 5945451 - DNA, 25 bp, Homo sapien
gataaaataccggtaccgcaaccga

SEQ ID NO: 5945452 - DNA, 25 bp, Homo sapien
gatcgtacgaattgaagtagtgctg

SEQ ID NO: 5945453 - DNA, 25 bp, Homo sapien
aagtaacccatccattcagaaatta

SEQ ID NO: 5945454 - DNA, 25 bp, Homo sapien
cacggtgtcgacgatgggctcgtgt

SEQ ID NO: 5945455 - DNA, 25 bp, Homo sapien
gccttctaccaaatagtggtctcta

SEQ ID NO: 5945456 - DNA, 25 bp, Homo sapien
tgaatccgttcaactctaccaattc

SEQ ID NO: 5945457 - DNA, 25 bp, Homo sapien
accggccaaatgaatggagcacttg

SEQ ID NO: 5945458 - DNA, 25 bp, Homo sapien
ttagatctctgttattcttctcgtt

SEQ ID NO: 5945459 - DNA, 25 bp, Homo sapien
ggaacaaatggcgaataatcaaacc

SEQ ID NO: 5945460 - DNA, 25 bp, Homo sapien
acttgtcgggaaagatcagaccgcc

SEQ ID NO: 5945461 - DNA, 25 bp, Homo sapien
accaacggaacaaatggcgaataat

SEQ ID NO: 5945462 - DNA, 25 bp, Homo sapien
ttcttgaattaccgtcgatgccatt

SEQ ID NO: 5945463 - DNA, 25 bp, Homo sapien
gtatttaaatcaaattcgatcaatt

SEQ ID NO: 5945464 - DNA, 25 bp, Homo sapien
tccgttcaactctaccaattccttc

SEQ ID NO: 5945465 - DNA, 25 bp, Homo sapien
tggataaaataccggtaccgcaacc

SEQ ID NO: 5945466 - DNA, 25 bp, Homo sapien
ttaaatcaaattcgatcaatttgtc

SEQ ID NO: 5945467 - DNA, 25 bp, Homo sapien
aagcatctcttcgtgaataccatag

SEQ ID NO: 5945468 - DNA, 25 bp, Homo sapien
caacaggtctcttaccctttggtgc

SEQ ID NO: 5945469 - DNA, 25 bp, Homo sapien
aatctttcacggctgtcttgctcat

SEQ ID NO: 5945470 - DNA, 25 bp, Homo sapien
gcgaataatcaaacccgtaaacgtc

SEQ ID NO: 5945471 - DNA, 25 bp, Homo sapien
ttcagaaattatgatgtcaacttta

SEQ ID NO: 5945472 - DNA, 25 bp, Homo sapien
atagtggtctctagcgtaaagaacg

SEQ ID NO: 5945473 - DNA, 25 bp, Homo sapien
cgtgtaagaccaacggaacaaatgg

SEQ ID NO: 5945474 - DNA, 25 bp, Homo sapien
ttgtctcttggccgtcaatttaaag

SEQ ID NO: 5945475 - DNA, 25 bp, Homo sapien
tgtttagcggcaaacatggataaaa

SEQ ID NO: 5945476 - DNA, 25 bp, Homo sapien
gcatctcttcgtgaataccatagtg

SEQ ID NO: 5945477 - DNA, 25 bp, Homo sapien
cttggccgtcaatttaaagttactc

SEQ ID NO: 5945478 - DNA, 25 bp, Homo sapien
agtgagtgtatggagcatgaggacc

SEQ ID NO: 5945479 - DNA, 25 bp, Homo sapien
acttgcctcttagcaaggtgatctt

SEQ ID NO: 5945480 - DNA, 25 bp, Homo sapien
cttaaaaagatccttattttggata

SEQ ID NO: 5945481 - DNA, 25 bp, Homo sapien
taccaattccttcgccatctcaata

SEQ ID NO: 5945482 - DNA, 25 bp, Homo sapien
aaaccggccaaatgaatggagcact

SEQ ID NO: 5945483 - DNA, 25 bp, Homo sapien
ccgccttctaccaaatagtggtctc

SEQ ID NO: 5945484 - DNA, 25 bp, Homo sapien
actataccattaatcatatcttgtc

SEQ ID NO: 5945485 - DNA, 25 bp, Homo sapien
atactgagagtcttccaaaccggcc

SEQ ID NO: 5945486 - DNA, 25 bp, Homo sapien
aatggagcacttgtcgggaaagatc

SEQ ID NO: 5945487 - DNA, 25 bp, Homo sapien
ccaattccttcgccatctcaataat

SEQ ID NO: 5945488 - DNA, 25 bp, Homo sapien
ccgtaaacgtcttgccagtagttca

SEQ ID NO: 5945489 - DNA, 25 bp, Homo sapien
aaagatcagaccgccttctaccaaa

SEQ ID NO: 5945490 - DNA, 25 bp, Homo sapien
agatcatcagggaaataaaatattg

SEQ ID NO: 5945491 - DNA, 25 bp, Homo sapien
taccggtaccgcaaccgacgtctaa

SEQ ID NO: 5945492 - DNA, 25 bp, Homo sapien
aatgcttgacatatcaacaccgata

SEQ ID NO: 5945493 - DNA, 25 bp, Homo sapien
tgtttctttccacggtgtcgacgat

SEQ ID NO: 5945494 - DNA, 25 bp, Homo sapien
ctgcttcttgaattaccgtcgatgc

SEQ ID NO: 5945495 - DNA, 25 bp, Homo sapien
ctcaacaggtctcttaccctttggt

SEQ ID NO: 5945496 - DNA, 25 bp, Homo sapien
tatcttgtctcttggccgtcaattt

SEQ ID NO: 5945497 - DNA, 25 bp, Homo sapien
tagtgatcgtacgaattgaagtagt

SEQ ID NO: 5945498 - DNA, 25 bp, Homo sapien
ccgacgtctaaaacaatcttgtcct

SEQ ID NO: 5945499 - DNA, 25 bp, Homo sapien
acaggtctcttaccctttggtgcag

SEQ ID NO: 5945500 - DNA, 25 bp, Homo sapien
tgtcgctgaatccgttcaactctac

SEQ ID NO: 5945501 - DNA, 25 bp, Homo sapien
cttgccagtagttcaacttctcgtc

SEQ ID NO: 5945502 - DNA, 25 bp, Homo sapien
tcaccagtttcagcatctagatcat

SEQ ID NO: 5945503 - DNA, 25 bp, Homo sapien
tggtgttgacattgtttctttccac

SEQ ID NO: 5945504 - DNA, 25 bp, Homo sapien
ttatgatgtcaactttaggaaaggg

SEQ ID NO: 5945505 - DNA, 25 bp, Homo sapien
tcatggactcgtatagtagaaagta

SEQ ID NO: 5945506 - DNA, 25 bp, Homo sapien
gtcctccaacttgcctcttagcaag

SEQ ID NO: 5945507 - DNA, 25 bp, Homo sapien
cgaacttgtaagaaattttgatatt

SEQ ID NO: 5945508 - DNA, 25 bp, Homo sapien
cgatcaatttgtctgaggtggtgtt

SEQ ID NO: 5945509 - DNA, 25 bp, Homo sapien
aacatggataaaataccggtaccgc

SEQ ID NO: 5945510 - DNA, 25 bp, Homo sapien
ccaattcaccttcaatggtgtcacc

SEQ ID NO: 5945511 - DNA, 25 bp, Homo sapien
agttactcttaaacgctagatctga

SEQ ID NO: 5945512 - DNA, 25 bp, Homo sapien
catgcttcgcaccgtgtttagcggc

SEQ ID NO: 5945513 - DNA, 25 bp, Homo sapien
caccttcaatggtgtcaccagtttc

SEQ ID NO: 5945514 - DNA, 25 bp, Homo sapien
tgcattaaataagaaccttcgtttt

SEQ ID NO: 5945515 - DNA, 25 bp, Homo sapien
gtaagaaattttgatatttagatct

SEQ ID NO: 5945516 - DNA, 25 bp, Homo sapien
ggtaccgcaaccgacgtctaaaaca

SEQ ID NO: 5945517 - DNA, 25 bp, Homo sapien
gtaaatgaacgtcctccaacttgcc

SEQ ID NO: 5945518 - DNA, 25 bp, Homo sapien
ataaggtacgaacagtatcttgaag

SEQ ID NO: 5945519 - DNA, 25 bp, Homo sapien
aatggcgaataatcaaacccgtaaa

SEQ ID NO: 5945520 - DNA, 25 bp, Homo sapien
agggaaataaaatattgtttgcttc

SEQ ID NO: 5945521 - DNA, 25 bp, Homo sapien
agtcttccaaaccggccaaatgaat

SEQ ID NO: 5945522 - DNA, 25 bp, Homo sapien
atcaatttgtctgaggtggtgttga

SEQ ID NO: 5945523 - DNA, 25 bp, Homo sapien
aacccatccattcagaaattatgat

SEQ ID NO: 5945524 - DNA, 25 bp, Homo sapien
tctcgtttggagagcaaaccaattc

SEQ ID NO: 5945525 - DNA, 25 bp, Homo sapien
attgtttctttccacggtgtcgacg

SEQ ID NO: 5945526 - DNA, 25 bp, Homo sapien
tggagcacttgtcgggaaagatcag

SEQ ID NO: 5945527 - DNA, 25 bp, Homo sapien
tcgtttggagagcaaaccaattcac

SEQ ID NO: 5945528 - DNA, 25 bp, Homo sapien
caatttgtctgaggtggtgttgaca

SEQ ID NO: 5945529 - DNA, 25 bp, Homo sapien
gcctcttagcaaggtgatcttgtcg

SEQ ID NO: 5945530 - DNA, 25 bp, Homo sapien
aacttctcgtctttatactgagagt

SEQ ID NO: 5945531 - DNA, 25 bp, Homo sapien
acgaattgaagtagtgctgttcgct

SEQ ID NO: 5945532 - DNA, 25 bp, Homo sapien
agagcaaaccaattcaccttcaatg

SEQ ID NO: 5945533 - DNA, 25 bp, Homo sapien
taaaacaatcttgtccttaaaaaga

SEQ ID NO: 5945534 - DNA, 25 bp, Homo sapien
gagcatgaggaccagtggagaactc

SEQ ID NO: 5945535 - DNA, 25 bp, Homo sapien
ccagtgagtgtatggagcatgagga

SEQ ID NO: 5945536 - DNA, 25 bp, Homo sapien
gcaaggtgatcttgtcgctgaatcc

SEQ ID NO: 5945537 - DNA, 25 bp, Homo sapien
actcttaaacgctagatctgatatt

SEQ ID NO: 5945538 - DNA, 25 bp, Homo sapien
acaatcttgtccttaaaaagatcct

SEQ ID NO: 5945539 - DNA, 25 bp, Homo sapien
gaattgaagtagtgctgttcgcttt

SEQ ID NO: 5945540 - DNA, 25 bp, Homo sapien
cttctcgtttggagagcaaaccaat

SEQ ID NO: 5945541 - DNA, 25 bp, Homo sapien
atctcttcgtgaataccatagtgat

SEQ ID NO: 5945542 - DNA, 25 bp, Homo sapien
tgtaagataaggtacgaacagtatc

SEQ ID NO: 5945543 - DNA, 25 bp, Homo sapien
tgccagtagttcaacttctcgtctt

SEQ ID NO: 5945544 - DNA, 25 bp, Homo sapien
ctgtatttaaatcaaattcgatcaa

SEQ ID NO: 5945545 - DNA, 25 bp, Homo sapien
atagtagaaagtaacccatccattc

SEQ ID NO: 5945546 - DNA, 25 bp, Homo sapien
ttccagtgagtgtatggagcatgag

SEQ ID NO: 5945547 - DNA, 25 bp, Homo sapien
ggtgtcaccagtttcagcatctaga

SEQ ID NO: 5945548 - DNA, 25 bp, Homo sapien
aatccgttcaactctaccaattcct

SEQ ID NO: 5945549 - DNA, 25 bp, Homo sapien
ttcgaacttgtaagaaattttgata

SEQ ID NO: 5945550 - DNA, 25 bp, Homo sapien
tgactataccattaatcatatcttg

SEQ ID NO: 5945551 - DNA, 25 bp, Homo sapien
aattatgatgtcaactttaggaaag

SEQ ID NO: 5945552 - DNA, 25 bp, Homo sapien
aatgaatggagcacttgtcgggaaa

SEQ ID NO: 5945553 - DNA, 25 bp, Homo sapien
agcttggttttttctgtagcagaat

SEQ ID NO: 5945554 - DNA, 25 bp, Homo sapien
cttctaccaaatagtggtctctagc

SEQ ID NO: 5945555 - DNA, 25 bp, Homo sapien
ttcaccttcaatggtgtcaccagtt

SEQ ID NO: 5945556 - DNA, 25 bp, Homo sapien
acaatgtcgaaccaggtgactatac

SEQ ID NO: 5945557 - DNA, 25 bp, Homo sapien
accaggtgactataccattaatcat

SEQ ID NO: 5945558 - DNA, 25 bp, Homo sapien
taaagaacggtgtccatcatggact

SEQ ID NO: 5945559 - DNA, 25 bp, Homo sapien
ttggtgcagggaaaacaatgtcgaa

SEQ ID NO: 5945560 - DNA, 25 bp, Homo sapien
gaccgccttctaccaaatagtggtc

SEQ ID NO: 5945561 - DNA, 25 bp, Homo sapien
ttccaaaccggccaaatgaatggag

SEQ ID NO: 5945562 - DNA, 25 bp, Homo sapien
ccgcaaccgacgtctaaaacaatct

SEQ ID NO: 5945563 - DNA, 25 bp, Homo sapien
agaatctttcacggctgtcttgctc

SEQ ID NO: 5945564 - DNA, 25 bp, Homo sapien
cagcatctagatcatcagggaaata

SEQ ID NO: 5945565 - DNA, 25 bp, Homo sapien
cttgaagcatctcttcgtgaatacc

SEQ ID NO: 5945566 - DNA, 25 bp, Homo sapien
tctaccaattccttcgccatctcaa

SEQ ID NO: 5945567 - DNA, 25 bp, Homo sapien
tgcagggaaaacaatgtcgaaccag

SEQ ID NO: 5945568 - DNA, 25 bp, Homo sapien
gtctttatactgagagtcttccaaa

SEQ ID NO: 5945569 - DNA, 25 bp, Homo sapien
ccattcgattcgaacttgtaagaaa

SEQ ID NO: 5945570 - DNA, 25 bp, Homo sapien
tcttccaaaccggccaaatgaatgg

SEQ ID NO: 5945571 - DNA, 25 bp, Homo sapien
gcttcttgaattaccgtcgatgcca

SEQ ID NO: 5945572 - DNA, 25 bp, Homo sapien
atcaaattcgatcaatttgtctgag

SEQ ID NO: 5945573 - DNA, 25 bp, Homo sapien
tgatcttgtcgctgaatccgttcaa

SEQ ID NO: 5945574 - DNA, 25 bp, Homo sapien
gcttccagtgagtgtatggagcatg

SEQ ID NO: 5945575 - DNA, 25 bp, Homo sapien
acgctagatctgatatttttactgt

SEQ ID NO: 5945576 - DNA, 25 bp, Homo sapien
tcttgtctcttggccgtcaatttaa

SEQ ID NO: 5945577 - DNA, 25 bp, Homo sapien
cttgacatatcaacaccgataacat

SEQ ID NO: 5945578 - DNA, 25 bp, Homo sapien
agatctctgttattcttctcgtttg

SEQ ID NO: 5945579 - DNA, 25 bp, Homo sapien
cgaacagtatcttgaagcatctctt

SEQ ID NO: 5945580 - DNA, 25 bp, Homo sapien
ggagagcaaaccaattcaccttcaa

SEQ ID NO: 5945581 - DNA, 25 bp, Homo sapien
ttaccgtcgatgccattcgattcga

SEQ ID NO: 5945582 - DNA, 25 bp, Homo sapien
atgatgtcaactttaggaaagggta

SEQ ID NO: 5945583 - DNA, 25 bp, Homo sapien
agatccttattttggataattgcgt

SEQ ID NO: 5945584 - DNA, 25 bp, Homo sapien
aattcgatcaatttgtctgaggtgg

SEQ ID NO: 5945585 - DNA, 25 bp, Homo sapien
cagtggagaactcaacaggtctctt

SEQ ID NO: 5945586 - DNA, 25 bp, Homo sapien
tgcgtttctgtaagataaggtacga

SEQ ID NO: 5945587 - DNA, 25 bp, Homo sapien
caactctaccaattccttcgccatc

SEQ ID NO: 5945588 - DNA, 25 bp, Homo sapien
ggtgcagggaaaacaatgtcgaacc

SEQ ID NO: 5945589 - DNA, 25 bp, Homo sapien
tgtaagaccaacggaacaaatggcg

SEQ ID NO: 5945590 - DNA, 25 bp, Homo sapien
taccgcaaccgacgtctaaaacaat

SEQ ID NO: 5945591 - DNA, 25 bp, Homo sapien
acgtcttgccagtagttcaacttct

SEQ ID NO: 5945592 - DNA, 25 bp, Homo sapien
gtagtgctgttcgctttcacttagc

SEQ ID NO: 5945593 - DNA, 25 bp, Homo sapien
tcgatgccattcgattcgaacttgt

SEQ ID NO: 5945594 - DNA, 25 bp, Homo sapien
acaccgataacatgcttcgcaccgt

SEQ ID NO: 5945595 - DNA, 25 bp, Homo sapien
agtgtatggagcatgaggaccagtg

SEQ ID NO: 5945596 - DNA, 25 bp, Homo sapien
accgataacatgcttcgcaccgtgt

SEQ ID NO: 5945597 - DNA, 25 bp, Homo sapien
tctaccaaatagtggtctctagcgt

SEQ ID NO: 5945598 - DNA, 25 bp, Homo sapien
acggaacaaatggcgaataatcaaa

SEQ ID NO: 5945599 - DNA, 25 bp, Homo sapien
ctagatcatcagggaaataaaatat

SEQ ID NO: 5945600 - DNA, 25 bp, Homo sapien
ccttcgccatctcaataatgcttga

SEQ ID NO: 5945601 - DNA, 25 bp, Homo sapien
ctctgttattcttctcgtttggaga

SEQ ID NO: 5945602 - DNA, 25 bp, Homo sapien
cagtttcagcatctagatcatcagg

SEQ ID NO: 5945603 - DNA, 25 bp, Homo sapien
cgccatctcaataatgcttgacata

SEQ ID NO: 5945604 - DNA, 25 bp, Homo sapien
taccaaatagtggtctctagcgtaa

SEQ ID NO: 5945605 - DNA, 25 bp, Homo sapien
caggtgactataccattaatcatat

SEQ ID NO: 5945606 - DNA, 25 bp, Homo sapien
aattaccgtcgatgccattcgattc

SEQ ID NO: 5945607 - DNA, 25 bp, Homo sapien
taaaaagatccttattttggataat

SEQ ID NO: 5945608 - DNA, 25 bp, Homo sapien
ttcgccatctcaataatgcttgaca

SEQ ID NO: 5945609 - DNA, 25 bp, Homo sapien
aaggtacgaacagtatcttgaagca

SEQ ID NO: 5945610 - DNA, 25 bp, Homo sapien
ctaatgggaatcctaatgactcgat

SEQ ID NO: 5945611 - DNA, 25 bp, Homo sapien
ttccttttaatcatgtgacagcgct

SEQ ID NO: 5945612 - DNA, 25 bp, Homo sapien
agaatggaagcattggaagtagaac

SEQ ID NO: 5945613 - DNA, 25 bp, Homo sapien
cgggattaatgaacaccttaggtca

SEQ ID NO: 5945614 - DNA, 25 bp, Homo sapien
ttaagagaaaaaatcgcatctttgg

SEQ ID NO: 5945615 - DNA, 25 bp, Homo sapien
tagcagagacgaaagaaaatctgga

SEQ ID NO: 5945616 - DNA, 25 bp, Homo sapien
caagaattcatttgttccttttaat

SEQ ID NO: 5945617 - DNA, 25 bp, Homo sapien
gaagtagaactacaaataaaggaaa

SEQ ID NO: 5945618 - DNA, 25 bp, Homo sapien
agtgactaagtatggcaggtatgat

SEQ ID NO: 5945619 - DNA, 25 bp, Homo sapien
taatgaacaccttaggtcaggcgag

SEQ ID NO: 5945620 - DNA, 25 bp, Homo sapien
gcgctctcaatgaataatgtcaaca

SEQ ID NO: 5945621 - DNA, 25 bp, Homo sapien
aatcctaatgactcgatgtcatcaa

SEQ ID NO: 5945622 - DNA, 25 bp, Homo sapien
gaaacgtcctttaacaatttggcat

SEQ ID NO: 5945623 - DNA, 25 bp, Homo sapien
tttcaacatgcccccatcaatgaat

SEQ ID NO: 5945624 - DNA, 25 bp, Homo sapien
aataatgtcaacagcaatgagatga

SEQ ID NO: 5945625 - DNA, 25 bp, Homo sapien
ggcagatcaaaagagacccaaattg

SEQ ID NO: 5945626 - DNA, 25 bp, Homo sapien
cgcatctttggaagcccatttggct

SEQ ID NO: 5945627 - DNA, 25 bp, Homo sapien
gcatatggcagatcaaaagagaccc

SEQ ID NO: 5945628 - DNA, 25 bp, Homo sapien
aaattcagtgactaagtatggcagg

SEQ ID NO: 5945629 - DNA, 25 bp, Homo sapien
attccatgcttcctcaaggttcgtc

SEQ ID NO: 5945630 - DNA, 25 bp, Homo sapien
gaaatactctcaatcataacaatat

SEQ ID NO: 5945631 - DNA, 25 bp, Homo sapien
aagtatgagaaggaaaactgccata

SEQ ID NO: 5945632 - DNA, 25 bp, Homo sapien
cacagcaacaagccctatacgaatc

SEQ ID NO: 5945633 - DNA, 25 bp, Homo sapien
gcactggcgctaaatccaacaaatt

SEQ ID NO: 5945634 - DNA, 25 bp, Homo sapien
aatggaagcattggaagtagaacta

SEQ ID NO: 5945635 - DNA, 25 bp, Homo sapien
tgacaaataacaaggatactaatgg

SEQ ID NO: 5945636 - DNA, 25 bp, Homo sapien
cagtacaacaaatttcaacatgccc

SEQ ID NO: 5945637 - DNA, 25 bp, Homo sapien
atgagaaggaaaactgccatatacc

SEQ ID NO: 5945638 - DNA, 25 bp, Homo sapien
atcactcgagaacgaaattcaaagg

SEQ ID NO: 5945639 - DNA, 25 bp, Homo sapien
gcaggtatgatgcagaatcgattgc

SEQ ID NO: 5945640 - DNA, 25 bp, Homo sapien
tgagatgaattcaaataaagatgac

SEQ ID NO: 5945641 - DNA, 25 bp, Homo sapien
agaattaagagaaaaaatcgcatct

SEQ ID NO: 5945642 - DNA, 25 bp, Homo sapien
accttaggtcaggcgagtaaaatga

SEQ ID NO: 5945643 - DNA, 25 bp, Homo sapien
aaagtatattaactgcactggcgct

SEQ ID NO: 5945644 - DNA, 25 bp, Homo sapien
ctggtgaaagaaacgatgccaggcc

SEQ ID NO: 5945645 - DNA, 25 bp, Homo sapien
gaaagaaaatctggaaagtatatta

SEQ ID NO: 5945646 - DNA, 25 bp, Homo sapien
ctagaattaagagaaaaaatcgcat

SEQ ID NO: 5945647 - DNA, 25 bp, Homo sapien
ggtgaaagaaacgatgccaggccgg

SEQ ID NO: 5945648 - DNA, 25 bp, Homo sapien
aagtgatattcagaaaactgtcatc

SEQ ID NO: 5945649 - DNA, 25 bp, Homo sapien
aaaggaaaaggagttagcagagacg

SEQ ID NO: 5945650 - DNA, 25 bp, Homo sapien
ggcaactgctaatgattattggctg

SEQ ID NO: 5945651 - DNA, 25 bp, Homo sapien
aaaagagacccaaattgaactgcag

SEQ ID NO: 5945652 - DNA, 25 bp, Homo sapien
cagcttccttggaagtgatattcag

SEQ ID NO: 5945653 - DNA, 25 bp, Homo sapien
acggcattcaagaattcatttgttc

SEQ ID NO: 5945654 - DNA, 25 bp, Homo sapien
gagcataagtatgagaaggaaaact

SEQ ID NO: 5945655 - DNA, 25 bp, Homo sapien
ggattaatgaacaccttaggtcagg

SEQ ID NO: 5945656 - DNA, 25 bp, Homo sapien
tcatgtgacagcgctctcaatgaat

SEQ ID NO: 5945657 - DNA, 25 bp, Homo sapien
gattatgatccccaacattcgttgg

SEQ ID NO: 5945658 - DNA, 25 bp, Homo sapien
agattagaaaacttaacaaacgaga

SEQ ID NO: 5945659 - DNA, 25 bp, Homo sapien
gttagcatatggcagatcaaaagag

SEQ ID NO: 5945660 - DNA, 25 bp, Homo sapien
gtagaactacaaataaaggaaagtc

SEQ ID NO: 5945661 - DNA, 25 bp, Homo sapien
tgcttcctcaaggttcgtcggctag

SEQ ID NO: 5945662 - DNA, 25 bp, Homo sapien
caaatttcaacatgcccccatcaat

SEQ ID NO: 5945663 - DNA, 25 bp, Homo sapien
gtcaacatagcttgaacagtacaac

SEQ ID NO: 5945664 - DNA, 25 bp, Homo sapien
tattaactgcactggcgctaaatcc

SEQ ID NO: 5945665 - DNA, 25 bp, Homo sapien
tccatgcttcctcaaggttcgtcgg

SEQ ID NO: 5945666 - DNA, 25 bp, Homo sapien
ccttttaatcatgtgacagcgctct

SEQ ID NO: 5945667 - DNA, 25 bp, Homo sapien
tatcatgaatggggcaactgctaat

SEQ ID NO: 5945668 - DNA, 25 bp, Homo sapien
agcttgaacagtacaacaaatttca

SEQ ID NO: 5945669 - DNA, 25 bp, Homo sapien
gctaaactacaagcagaatgagcat

SEQ ID NO: 5945670 - DNA, 25 bp, Homo sapien
cgctaaaacctcaatcaatagtacg

SEQ ID NO: 5945671 - DNA, 25 bp, Homo sapien
aagatgacagaatggaagcattgga

SEQ ID NO: 5945672 - DNA, 25 bp, Homo sapien
ggaatcctaatgactcgatgtcatc

SEQ ID NO: 5945673 - DNA, 25 bp, Homo sapien
tgcatgcaaaggaaaaggagttagc

SEQ ID NO: 5945674 - DNA, 25 bp, Homo sapien
gaaggaaaactgccatataccccaa

SEQ ID NO: 5945675 - DNA, 25 bp, Homo sapien
acaaataacaaggatactaatggga

SEQ ID NO: 5945676 - DNA, 25 bp, Homo sapien
gccaagatgttagcatatggcagat

SEQ ID NO: 5945677 - DNA, 25 bp, Homo sapien
gaacaccttaggtcaggcgagtaaa

SEQ ID NO: 5945678 - DNA, 25 bp, Homo sapien
atgttagcatatggcagatcaaaag

SEQ ID NO: 5945679 - DNA, 25 bp, Homo sapien
gctaaatccaacaaattcagtgact

SEQ ID NO: 5945680 - DNA, 25 bp, Homo sapien
agatgttagcatatggcagatcaaa

SEQ ID NO: 5945681 - DNA, 25 bp, Homo sapien
tataattaccagaatgtaccacaag

SEQ ID NO: 5945682 - DNA, 25 bp, Homo sapien
ctggatccaatgaataatatgacaa

SEQ ID NO: 5945683 - DNA, 25 bp, Homo sapien
atcgtcactgcatgcaaaggaaaag

SEQ ID NO: 5945684 - DNA, 25 bp, Homo sapien
tgactcgatgtcatcaatgtctaat

SEQ ID NO: 5945685 - DNA, 25 bp, Homo sapien
gaaaactgtcatcgtcactgcatgc

SEQ ID NO: 5945686 - DNA, 25 bp, Homo sapien
aatcgaatcactcgagaacgaaatt

SEQ ID NO: 5945687 - DNA, 25 bp, Homo sapien
ttatgatccccaacattcgttggaa

SEQ ID NO: 5945688 - DNA, 25 bp, Homo sapien
agcccatttggcttcaaaggagtct

SEQ ID NO: 5945689 - DNA, 25 bp, Homo sapien
cattcgttggaaacgtcctttaaca

SEQ ID NO: 5945690 - DNA, 25 bp, Homo sapien
gaaagtcaaatcgaatcactcgaga

SEQ ID NO: 5945691 - DNA, 25 bp, Homo sapien
acaaattcagtgactaagtatggca

SEQ ID NO: 5945692 - DNA, 25 bp, Homo sapien
caaattgaactgcagttggccaaaa

SEQ ID NO: 5945693 - DNA, 25 bp, Homo sapien
aggcgagtaaaatgaataattccat

SEQ ID NO: 5945694 - DNA, 25 bp, Homo sapien
gatgcagaatcgattgctcacaaaa

SEQ ID NO: 5945695 - DNA, 25 bp, Homo sapien
cccaccaacagtcacagcaacaagc

SEQ ID NO: 5945696 - DNA, 25 bp, Homo sapien
tgattattggctggatccaatgaat

SEQ ID NO: 5945697 - DNA, 25 bp, Homo sapien
tgttccttttaatcatgtgacagcg

SEQ ID NO: 5945698 - DNA, 25 bp, Homo sapien
taccacaagcatctatgagaaatac

SEQ ID NO: 5945699 - DNA, 25 bp, Homo sapien
ctacaaataaaggaaagtcaaatcg

SEQ ID NO: 5945700 - DNA, 25 bp, Homo sapien
tgccaggccgggattaatgaacacc

SEQ ID NO: 5945701 - DNA, 25 bp, Homo sapien
agaacgaaattcaaaggctaaagaa

SEQ ID NO: 5945702 - DNA, 25 bp, Homo sapien
gcttccttggaagtgatattcagaa

SEQ ID NO: 5945703 - DNA, 25 bp, Homo sapien
agagacgaaagaaaatctggaaagt

SEQ ID NO: 5945704 - DNA, 25 bp, Homo sapien
aatgactcgatgtcatcaatgtcta

SEQ ID NO: 5945705 - DNA, 25 bp, Homo sapien
cgaggggctaaactacaagcagaat

SEQ ID NO: 5945706 - DNA, 25 bp, Homo sapien
aataattccatgcttcctcaaggtt

SEQ ID NO: 5945707 - DNA, 25 bp, Homo sapien
taacaatatcatgaatggggcaact

SEQ ID NO: 5945708 - DNA, 25 bp, Homo sapien
attaccagaatgtaccacaagcatc

SEQ ID NO: 5945709 - DNA, 25 bp, Homo sapien
gtcctttaacaatttggcatttcat

SEQ ID NO: 5945710 - DNA, 25 bp, Homo sapien
ttgaactgcagttggccaaaaaaga

SEQ ID NO: 5945711 - DNA, 25 bp, Homo sapien
acaaataaaggaaagtcaaatcgaa

SEQ ID NO: 5945712 - DNA, 25 bp, Homo sapien
aagagacccaaattgaactgcagtt

SEQ ID NO: 5945713 - DNA, 25 bp, Homo sapien
agccctatacgaatctggtgaaaga

SEQ ID NO: 5945714 - DNA, 25 bp, Homo sapien
atcgattgctcacaaaatggtggta

SEQ ID NO: 5945715 - DNA, 25 bp, Homo sapien
aattcatttgttccttttaatcatg

SEQ ID NO: 5945716 - DNA, 25 bp, Homo sapien
ttaacaaacgagaacaaagaaatgg

SEQ ID NO: 5945717 - DNA, 25 bp, Homo sapien
aaactgtcatcgtcactgcatgcaa

SEQ ID NO: 5945718 - DNA, 25 bp, Homo sapien
aggatactaatgggaatcctaatga

SEQ ID NO: 5945719 - DNA, 25 bp, Homo sapien
cggctagtcccttaacgggtcaaca

SEQ ID NO: 5945720 - DNA, 25 bp, Homo sapien
aacgagaacaaagaaatggccaaga

SEQ ID NO: 5945721 - DNA, 25 bp, Homo sapien
caaagaaatggccaagatgttagca

SEQ ID NO: 5945722 - DNA, 25 bp, Homo sapien
accgctaaaacctcaatcaatagta

SEQ ID NO: 5945723 - DNA, 25 bp, Homo sapien
atgatccccaacattcgttggaaac

SEQ ID NO: 5945724 - DNA, 25 bp, Homo sapien
acaagcagaatgagcataagtatga

SEQ ID NO: 5945725 - DNA, 25 bp, Homo sapien
ttggctggatccaatgaataatatg

SEQ ID NO: 5945726 - DNA, 25 bp, Homo sapien
tggcttatgattatgatccccaaca

SEQ ID NO: 5945727 - DNA, 25 bp, Homo sapien
atgatgcagaatcgattgctcacaa

SEQ ID NO: 5945728 - DNA, 25 bp, Homo sapien
attcaaaggctaaagaaaattttca

SEQ ID NO: 5945729 - DNA, 25 bp, Homo sapien
cctataattaccagaatgtaccaca

SEQ ID NO: 5945730 - DNA, 25 bp, Homo sapien
aatccaacaaattcagtgactaagt

SEQ ID NO: 5945731 - DNA, 25 bp, Homo sapien
catggcttatgattatgatccccaa

SEQ ID NO: 5945732 - DNA, 25 bp, Homo sapien
taggtcaggcgagtaaaatgaataa

SEQ ID NO: 5945733 - DNA, 25 bp, Homo sapien
ttttaatcatgtgacagcgctctca

SEQ ID NO: 5945734 - DNA, 25 bp, Homo sapien
gatgacagaatggaagcattggaag

SEQ ID NO: 5945735 - DNA, 25 bp, Homo sapien
tctttggaagcccatttggcttcaa

SEQ ID NO: 5945736 - DNA, 25 bp, Homo sapien
tcaatgaataatgtcaacagcaatg

SEQ ID NO: 5945737 - DNA, 25 bp, Homo sapien
tcaacatgcccccatcaatgaatac

SEQ ID NO: 5945738 - DNA, 25 bp, Homo sapien
acaagcatctatgagaaatactctc

SEQ ID NO: 5945739 - DNA, 25 bp, Homo sapien
caagatgttagcatatggcagatca

SEQ ID NO: 5945740 - DNA, 25 bp, Homo sapien
caactgctaatgattattggctgga

SEQ ID NO: 5945741 - DNA, 25 bp, Homo sapien
ttatgattatgatccccaacattcg

SEQ ID NO: 5945742 - DNA, 25 bp, Homo sapien
aattaagagaaaaaatcgcatcttt

SEQ ID NO: 5945743 - DNA, 25 bp, Homo sapien
ccacaagcatctatgagaaatactc

SEQ ID NO: 5945744 - DNA, 25 bp, Homo sapien
ctcaatcataacaatatcatgaatg

SEQ ID NO: 5945745 - DNA, 25 bp, Homo sapien
tgcccccatcaatgaatacctataa

SEQ ID NO: 5945746 - DNA, 25 bp, Homo sapien
gatgtcatcaatgtctaatatgacc

SEQ ID NO: 5945747 - DNA, 25 bp, Homo sapien
tagtacggcattcaagaattcattt

SEQ ID NO: 5945748 - DNA, 25 bp, Homo sapien
aatgtaccacaagcatctatgagaa

SEQ ID NO: 5945749 - DNA, 25 bp, Homo sapien
cctttaacaatttggcatttcatcc

SEQ ID NO: 5945750 - DNA, 25 bp, Homo sapien
gagttagcagagacgaaagaaaatc

SEQ ID NO: 5945751 - DNA, 25 bp, Homo sapien
cataacaatatcatgaatggggcaa

SEQ ID NO: 5945752 - DNA, 25 bp, Homo sapien
ctaaaacctcaatcaatagtacggc

SEQ ID NO: 5945753 - DNA, 25 bp, Homo sapien
ttcaagaattcatttgttcctttta

SEQ ID NO: 5945754 - DNA, 25 bp, Homo sapien
gacagcgctctcaatgaataatgtc

SEQ ID NO: 5945755 - DNA, 25 bp, Homo sapien
tggaagcccatttggcttcaaagga

SEQ ID NO: 5945756 - DNA, 25 bp, Homo sapien
acatagcttgaacagtacaacaaat

SEQ ID NO: 5945757 - DNA, 25 bp, Homo sapien
cttaacgggtcaacatagcttgaac

SEQ ID NO: 5945758 - DNA, 25 bp, Homo sapien
ctcacaaaatggtggtaagattaga

SEQ ID NO: 5945759 - DNA, 25 bp, Homo sapien
atctggtgaaagaaacgatgccagg

SEQ ID NO: 5945760 - DNA, 25 bp, Homo sapien
caatgtctaatatgaccgctaaaac

SEQ ID NO: 5945761 - DNA, 25 bp, Homo sapien
aatttggcatttcatccccaccaac

SEQ ID NO: 5945762 - DNA, 25 bp, Homo sapien
aaaggaaagtcaaatcgaatcactc

SEQ ID NO: 5945763 - DNA, 25 bp, Homo sapien
caacattcgttggaaacgtccttta

SEQ ID NO: 5945764 - DNA, 25 bp, Homo sapien
caaggatactaatgggaatcctaat

SEQ ID NO: 5945765 - DNA, 25 bp, Homo sapien
cttaggtcaggcgagtaaaatgaat

SEQ ID NO: 5945766 - DNA, 25 bp, Homo sapien
agatgaattcaaataaagatgacag

SEQ ID NO: 5945767 - DNA, 25 bp, Homo sapien
actcgatgtcatcaatgtctaatat

SEQ ID NO: 5945768 - DNA, 25 bp, Homo sapien
tatggcaggtatgatgcagaatcga

SEQ ID NO: 5945769 - DNA, 25 bp, Homo sapien
atgtgacagcgctctcaatgaataa

SEQ ID NO: 5945770 - DNA, 25 bp, Homo sapien
cagcgctctcaatgaataatgtcaa

SEQ ID NO: 5945771 - DNA, 25 bp, Homo sapien
agaaacgatgccaggccgggattaa

SEQ ID NO: 5945772 - DNA, 25 bp, Homo sapien
atagcttgaacagtacaacaaattt

SEQ ID NO: 5945773 - DNA, 25 bp, Homo sapien
acaatatcatgaatggggcaactgc

SEQ ID NO: 5945774 - DNA, 25 bp, Homo sapien
gtcaacagcaatgagatgaattcaa

SEQ ID NO: 5945775 - DNA, 25 bp, Homo sapien
tgctaatgattattggctggatcca

SEQ ID NO: 5945776 - DNA, 25 bp, Homo sapien
acgatgccaggccgggattaatgaa

SEQ ID NO: 5945777 - DNA, 25 bp, Homo sapien
gtacaacaaatttcaacatgccccc

SEQ ID NO: 5945778 - DNA, 25 bp, Homo sapien
tagcatatggcagatcaaaagagac

SEQ ID NO: 5945779 - DNA, 25 bp, Homo sapien
tcaaaggctaaagaaaattttcaac

SEQ ID NO: 5945780 - DNA, 25 bp, Homo sapien
aacaagccctatacgaatctggtga

SEQ ID NO: 5945781 - DNA, 25 bp, Homo sapien
agtatattaactgcactggcgctaa

SEQ ID NO: 5945782 - DNA, 25 bp, Homo sapien
aaactgccatataccccaaactttc

SEQ ID NO: 5945783 - DNA, 25 bp, Homo sapien
ttagaaaacttaacaaacgagaaca

SEQ ID NO: 5945784 - DNA, 25 bp, Homo sapien
actgcagttggccaaaaaagaaaat

SEQ ID NO: 5945785 - DNA, 25 bp, Homo sapien
aactacaagcagaatgagcataagt

SEQ ID NO: 5945786 - DNA, 25 bp, Homo sapien
aaaaatcgcatctttggaagcccat

SEQ ID NO: 5945787 - DNA, 25 bp, Homo sapien
aaaggagttagcagagacgaaagaa

SEQ ID NO: 5945788 - DNA, 25 bp, Homo sapien
aaatcgcatctttggaagcccattt

SEQ ID NO: 5945789 - DNA, 25 bp, Homo sapien
atttcatccccaccaacagtcacag

SEQ ID NO: 5945790 - DNA, 25 bp, Homo sapien
tttgttccttttaatcatgtgacag

SEQ ID NO: 5945791 - DNA, 25 bp, Homo sapien
cagttggccaaaaaagaaaatctag

SEQ ID NO: 5945792 - DNA, 25 bp, Homo sapien
tgccatataccccaaactttcgaat

SEQ ID NO: 5945793 - DNA, 25 bp, Homo sapien
gctctcaatgaataatgtcaacagc

SEQ ID NO: 5945794 - DNA, 25 bp, Homo sapien
tggcaggtatgatgcagaatcgatt

SEQ ID NO: 5945795 - DNA, 25 bp, Homo sapien
aatgaatacctataattaccagaat

SEQ ID NO: 5945796 - DNA, 25 bp, Homo sapien
attaatgaacaccttaggtcaggcg

SEQ ID NO: 5945797 - DNA, 25 bp, Homo sapien
agaacaaagaaatggccaagatgtt

SEQ ID NO: 5945798 - DNA, 25 bp, Homo sapien
tcaaaagagacccaaattgaactgc

SEQ ID NO: 5945799 - DNA, 25 bp, Homo sapien
gaaatggccaagatgttagcatatg

SEQ ID NO: 5945800 - DNA, 25 bp, Homo sapien
tggaagcattggaagtagaactaca

SEQ ID NO: 5945801 - DNA, 25 bp, Homo sapien
attgctcacaaaatggtggtaagat

SEQ ID NO: 5945802 - DNA, 25 bp, Homo sapien
aggccgggattaatgaacaccttag

SEQ ID NO: 5945803 - DNA, 25 bp, Homo sapien
ggaagtgatattcagaaaactgtca

SEQ ID NO: 5945804 - DNA, 25 bp, Homo sapien
gttggccaaaaaagaaaatctagaa

SEQ ID NO: 5945805 - DNA, 25 bp, Homo sapien
tctcaatgaataatgtcaacagcaa

SEQ ID NO: 5945806 - DNA, 25 bp, Homo sapien
aaagaaacgatgccaggccgggatt

SEQ ID NO: 5945807 - DNA, 25 bp, Homo sapien
atgattatgatccccaacattcgtt

SEQ ID NO: 5945808 - DNA, 25 bp, Homo sapien
cagcaacaagccctatacgaatctg

SEQ ID NO: 5945809 - DNA, 25 bp, Homo sapien
aggtatgatgcagaatcgattgctc

SEQ ID NO: 5945810 - DNA, 25 bp, Homo sapien
accccaaactttcgaattgccagct

SEQ ID NO: 5945811 - DNA, 25 bp, Homo sapien
aagagaaaaaatcgcatctttggaa

SEQ ID NO: 5945812 - DNA, 25 bp, Homo sapien
ctggaaagtatattaactgcactgg

SEQ ID NO: 5945813 - DNA, 25 bp, Homo sapien
ggctggatccaatgaataatatgac

SEQ ID NO: 5945814 - DNA, 25 bp, Homo sapien
ccaggccgggattaatgaacacctt

SEQ ID NO: 5945815 - DNA, 25 bp, Homo sapien
aatgggaatcctaatgactcgatgt

SEQ ID NO: 5945816 - DNA, 25 bp, Homo sapien
ttcaaaggagtcttcaaaggaggac

SEQ ID NO: 5945817 - DNA, 25 bp, Homo sapien
caacagcaatgagatgaattcaaat

SEQ ID NO: 5945818 - DNA, 25 bp, Homo sapien
ataacaaggatactaatgggaatcc

SEQ ID NO: 5945819 - DNA, 25 bp, Homo sapien
aaggagtcttcaaaggaggacgttg

SEQ ID NO: 5945820 - DNA, 25 bp, Homo sapien
tcaatagtacggcattcaagaattc

SEQ ID NO: 5945821 - DNA, 25 bp, Homo sapien
gaatctggtgaaagaaacgatgcca

SEQ ID NO: 5945822 - DNA, 25 bp, Homo sapien
gctagtcccttaacgggtcaacata

SEQ ID NO: 5945823 - DNA, 25 bp, Homo sapien
aacaaggatactaatgggaatccta

SEQ ID NO: 5945824 - DNA, 25 bp, Homo sapien
tgaccgctaaaacctcaatcaatag

SEQ ID NO: 5945825 - DNA, 25 bp, Homo sapien
aagaaatggccaagatgttagcata

SEQ ID NO: 5945826 - DNA, 25 bp, Homo sapien
gcgagtaaaatgaataattccatgc

SEQ ID NO: 5945827 - DNA, 25 bp, Homo sapien
gtcaaatcgaatcactcgagaacga

SEQ ID NO: 5945828 - DNA, 25 bp, Homo sapien
gaatggggcaactgctaatgattat

SEQ ID NO: 5945829 - DNA, 25 bp, Homo sapien
cagaatcgattgctcacaaaatggt

SEQ ID NO: 5945830 - DNA, 25 bp, Homo sapien
ttaatcatgtgacagcgctctcaat

SEQ ID NO: 5945831 - DNA, 25 bp, Homo sapien
aaataaaggaaagtcaaatcgaatc

SEQ ID NO: 5945832 - DNA, 25 bp, Homo sapien
ttcagaaaactgtcatcgtcactgc

SEQ ID NO: 5945833 - DNA, 25 bp, Homo sapien
tacctataattaccagaatgtacca

SEQ ID NO: 5945834 - DNA, 25 bp, Homo sapien
taccagaatgtaccacaagcatcta

SEQ ID NO: 5945835 - DNA, 25 bp, Homo sapien
tgaaagaaacgatgccaggccggga

SEQ ID NO: 5945836 - DNA, 25 bp, Homo sapien
tgaacagtacaacaaatttcaacat

SEQ ID NO: 5945837 - DNA, 25 bp, Homo sapien
tcaggcgagtaaaatgaataattcc

SEQ ID NO: 5945838 - DNA, 25 bp, Homo sapien
cgattgctcacaaaatggtggtaag

SEQ ID NO: 5945839 - DNA, 25 bp, Homo sapien
ccaacagtcacagcaacaagcccta

SEQ ID NO: 5945840 - DNA, 25 bp, Homo sapien
gcatctatgagaaatactctcaatc

SEQ ID NO: 5945841 - DNA, 25 bp, Homo sapien
tggtggtaagattagaaaacttaac

SEQ ID NO: 5945842 - DNA, 25 bp, Homo sapien
tgactaagtatggcaggtatgatgc

SEQ ID NO: 5945843 - DNA, 25 bp, Homo sapien
agcaatgagatgaattcaaataaag

SEQ ID NO: 5945844 - DNA, 25 bp, Homo sapien
actggcgctaaatccaacaaattca

SEQ ID NO: 5945845 - DNA, 25 bp, Homo sapien
atggcagatcaaaagagacccaaat

SEQ ID NO: 5945846 - DNA, 25 bp, Homo sapien
gatccccaacattcgttggaaacgt

SEQ ID NO: 5945847 - DNA, 25 bp, Homo sapien
gtggtaagattagaaaacttaacaa

SEQ ID NO: 5945848 - DNA, 25 bp, Homo sapien
acaacaaatttcaacatgcccccat

SEQ ID NO: 5945849 - DNA, 25 bp, Homo sapien
tatattaactgcactggcgctaaat

SEQ ID NO: 5945850 - DNA, 25 bp, Homo sapien
atatggcagatcaaaagagacccaa

SEQ ID NO: 5945851 - DNA, 25 bp, Homo sapien
caaatcgaatcactcgagaacgaaa

SEQ ID NO: 5945852 - DNA, 25 bp, Homo sapien
actgccatataccccaaactttcga

SEQ ID NO: 5945853 - DNA, 25 bp, Homo sapien
taagtatggcaggtatgatgcagaa

SEQ ID NO: 5945854 - DNA, 25 bp, Homo sapien
aagtcaaatcgaatcactcgagaac

SEQ ID NO: 5945855 - DNA, 25 bp, Homo sapien
tcaatcaatagtacggcattcaaga

SEQ ID NO: 5945856 - DNA, 25 bp, Homo sapien
ccttggaagtgatattcagaaaact

SEQ ID NO: 5945857 - DNA, 25 bp, Homo sapien
gcagaatgagcataagtatgagaag

SEQ ID NO: 5945858 - DNA, 25 bp, Homo sapien
caaaggagtcttcaaaggaggacgt

SEQ ID NO: 5945859 - DNA, 25 bp, Homo sapien
aatatgaccgctaaaacctcaatca

SEQ ID NO: 5945860 - DNA, 25 bp, Homo sapien
ttcaaaggaggacgttgctaattga

SEQ ID NO: 5945861 - DNA, 25 bp, Homo sapien
cccccatcaatgaatacctataatt

SEQ ID NO: 5945862 - DNA, 25 bp, Homo sapien
ttcatccccaccaacagtcacagca

SEQ ID NO: 5945863 - DNA, 25 bp, Homo sapien
tttggcatttcatccccaccaacag

SEQ ID NO: 5945864 - DNA, 25 bp, Homo sapien
tggccaaaaaagaaaatctagaatt

SEQ ID NO: 5945865 - DNA, 25 bp, Homo sapien
aatgaataattccatgcttcctcaa

SEQ ID NO: 5945866 - DNA, 25 bp, Homo sapien
ttggaagtgatattcagaaaactgt

SEQ ID NO: 5945867 - DNA, 25 bp, Homo sapien
tcatcgtcactgcatgcaaaggaaa

SEQ ID NO: 5945868 - DNA, 25 bp, Homo sapien
atgaatggggcaactgctaatgatt

SEQ ID NO: 5945869 - DNA, 25 bp, Homo sapien
gatgccaggccgggattaatgaaca

SEQ ID NO: 5945870 - DNA, 25 bp, Homo sapien
cttgaacagtacaacaaatttcaac

SEQ ID NO: 5945871 - DNA, 25 bp, Homo sapien
gtgatattcagaaaactgtcatcgt

SEQ ID NO: 5945872 - DNA, 25 bp, Homo sapien
aatggtggtaagattagaaaactta

SEQ ID NO: 5945873 - DNA, 25 bp, Homo sapien
agaatgtaccacaagcatctatgag

SEQ ID NO: 5945874 - DNA, 25 bp, Homo sapien
acaccttaggtcaggcgagtaaaat

SEQ ID NO: 5945875 - DNA, 25 bp, Homo sapien
caaaatggtggtaagattagaaaac

SEQ ID NO: 5945876 - DNA, 25 bp, Homo sapien
gtacggcattcaagaattcatttgt

SEQ ID NO: 5945877 - DNA, 25 bp, Homo sapien
tttggcttcaaaggagtcttcaaag

SEQ ID NO: 5945878 - DNA, 25 bp, Homo sapien
taacaatttggcatttcatccccac

SEQ ID NO: 5945879 - DNA, 25 bp, Homo sapien
caaacgagaacaaagaaatggccaa

SEQ ID NO: 5945880 - DNA, 25 bp, Homo sapien
gaatcgattgctcacaaaatggtgg

SEQ ID NO: 5945881 - DNA, 25 bp, Homo sapien
tactaatgggaatcctaatgactcg

SEQ ID NO: 5945882 - DNA, 25 bp, Homo sapien
cccatcaatgaatacctataattac

SEQ ID NO: 5945883 - DNA, 25 bp, Homo sapien
ccctatacgaatctggtgaaagaaa

SEQ ID NO: 5945884 - DNA, 25 bp, Homo sapien
aatacctataattaccagaatgtac

SEQ ID NO: 5945885 - DNA, 25 bp, Homo sapien
ggatccaatgaataatatgacaaat

SEQ ID NO: 5945886 - DNA, 25 bp, Homo sapien
acagaatggaagcattggaagtaga

SEQ ID NO: 5945887 - DNA, 25 bp, Homo sapien
gcgctaaatccaacaaattcagtga

SEQ ID NO: 5945888 - DNA, 25 bp, Homo sapien
tcctcaaggttcgtcggctagtccc

SEQ ID NO: 5945889 - DNA, 25 bp, Homo sapien
ctaatatgaccgctaaaacctcaat

SEQ ID NO: 5945890 - DNA, 25 bp, Homo sapien
taattccatgcttcctcaaggttcg

SEQ ID NO: 5945891 - DNA, 25 bp, Homo sapien
aggagttagcagagacgaaagaaaa

SEQ ID NO: 5945892 - DNA, 25 bp, Homo sapien
gaagcattggaagtagaactacaaa

SEQ ID NO: 5945893 - DNA, 25 bp, Homo sapien
gaaaactgccatataccccaaactt

SEQ ID NO: 5945894 - DNA, 25 bp, Homo sapien
ttcgaattgccagcttccttggaag

SEQ ID NO: 5945895 - DNA, 25 bp, Homo sapien
aatatcatgaatggggcaactgcta

SEQ ID NO: 5945896 - DNA, 25 bp, Homo sapien
cactcgagaacgaaattcaaaggct

SEQ ID NO: 5945897 - DNA, 25 bp, Homo sapien
tcttcaaaggaggacgttgctaatt

SEQ ID NO: 5945898 - DNA, 25 bp, Homo sapien
ataccccaaactttcgaattgccag

SEQ ID NO: 5945899 - DNA, 25 bp, Homo sapien
ataagtatgagaaggaaaactgcca

SEQ ID NO: 5945900 - DNA, 25 bp, Homo sapien
gaaaaaatcgcatctttggaagccc

SEQ ID NO: 5945901 - DNA, 25 bp, Homo sapien
aatcaatagtacggcattcaagaat

SEQ ID NO: 5945902 - DNA, 25 bp, Homo sapien
gcttcaaaggagtcttcaaaggagg

SEQ ID NO: 5945903 - DNA, 25 bp, Homo sapien
gagtaaaatgaataattccatgctt

SEQ ID NO: 5945904 - DNA, 25 bp, Homo sapien
tgtcatcaatgtctaatatgaccgc

SEQ ID NO: 5945905 - DNA, 25 bp, Homo sapien
cgtcactgcatgcaaaggaaaagga

SEQ ID NO: 5945906 - DNA, 25 bp, Homo sapien
atctatgagaaatactctcaatcat

SEQ ID NO: 5945907 - DNA, 25 bp, Homo sapien
caacaaattcagtgactaagtatgg

SEQ ID NO: 5945908 - DNA, 25 bp, Homo sapien
tgctcacaaaatggtggtaagatta

SEQ ID NO: 5945909 - DNA, 25 bp, Homo sapien
caccaacagtcacagcaacaagccc

SEQ ID NO: 5945910 - DNA, 25 bp, Homo sapien
atgaacaccttaggtcaggcgagta

SEQ ID NO: 5945911 - DNA, 25 bp, Homo sapien
ctatgagaaatactctcaatcataa

SEQ ID NO: 5945912 - DNA, 25 bp, Homo sapien
caaggttcgtcggctagtcccttaa

SEQ ID NO: 5945913 - DNA, 25 bp, Homo sapien
ctaatgattattggctggatccaat

SEQ ID NO: 5945914 - DNA, 25 bp, Homo sapien
caagccctatacgaatctggtgaaa

SEQ ID NO: 5945915 - DNA, 25 bp, Homo sapien
tcgaatcactcgagaacgaaattca

SEQ ID NO: 5945916 - DNA, 25 bp, Homo sapien
ataatatgacaaataacaaggatac

SEQ ID NO: 5945917 - DNA, 25 bp, Homo sapien
atggggcaactgctaatgattattg

SEQ ID NO: 5945918 - DNA, 25 bp, Homo sapien
catccccaccaacagtcacagcaac

SEQ ID NO: 5945919 - DNA, 25 bp, Homo sapien
aggaaagtcaaatcgaatcactcga

SEQ ID NO: 5945920 - DNA, 25 bp, Homo sapien
gccagcttccttggaagtgatattc

SEQ ID NO: 5945921 - DNA, 25 bp, Homo sapien
taattaccagaatgtaccacaagca

SEQ ID NO: 5945922 - DNA, 25 bp, Homo sapien
gggctaaactacaagcagaatgagc

SEQ ID NO: 5945923 - DNA, 25 bp, Homo sapien
tattggctggatccaatgaataata

SEQ ID NO: 5945924 - DNA, 25 bp, Homo sapien
gccgggattaatgaacaccttaggt

SEQ ID NO: 5945925 - DNA, 25 bp, Homo sapien
ggaaagtatattaactgcactggcg

SEQ ID NO: 5945926 - DNA, 25 bp, Homo sapien
taacgggtcaacatagcttgaacag

SEQ ID NO: 5945927 - DNA, 25 bp, Homo sapien
aacaaacgagaacaaagaaatggcc

SEQ ID NO: 5945928 - DNA, 25 bp, Homo sapien
atcaatgtctaatatgaccgctaaa

SEQ ID NO: 5945929 - DNA, 25 bp, Homo sapien
ctatacgaatctggtgaaagaaacg

SEQ ID NO: 5945930 - DNA, 25 bp, Homo sapien
aaatctggaaagtatattaactgca

SEQ ID NO: 5945931 - DNA, 25 bp, Homo sapien
gcataagtatgagaaggaaaactgc

SEQ ID NO: 5945932 - DNA, 25 bp, Homo sapien
cagatcaaaagagacccaaattgaa

SEQ ID NO: 5945933 - DNA, 25 bp, Homo sapien
cattcaagaattcatttgttccttt

SEQ ID NO: 5945934 - DNA, 25 bp, Homo sapien
cctcaatcaatagtacggcattcaa

SEQ ID NO: 5945935 - DNA, 25 bp, Homo sapien
aacctcaatcaatagtacggcattc

SEQ ID NO: 5945936 - DNA, 25 bp, Homo sapien
atacgaatctggtgaaagaaacgat

SEQ ID NO: 5945937 - DNA, 25 bp, Homo sapien
tactctcaatcataacaatatcatg

SEQ ID NO: 5945938 - DNA, 25 bp, Homo sapien
ctctcaatcataacaatatcatgaa

SEQ ID NO: 5945939 - DNA, 25 bp, Homo sapien
aacaaagaaatggccaagatgttag

SEQ ID NO: 5945940 - DNA, 25 bp, Homo sapien
tgaataatgtcaacagcaatgagat

SEQ ID NO: 5945941 - DNA, 25 bp, Homo sapien
atgaattacatggcttatgattatg

SEQ ID NO: 5945942 - DNA, 25 bp, Homo sapien
tggaaacgtcctttaacaatttggc

SEQ ID NO: 5945943 - DNA, 25 bp, Homo sapien
actgtcatcgtcactgcatgcaaag

SEQ ID NO: 5945944 - DNA, 25 bp, Homo sapien
atcgcatctttggaagcccatttgg

SEQ ID NO: 5945945 - DNA, 25 bp, Homo sapien
atgtctaatatgaccgctaaaacct

SEQ ID NO: 5945946 - DNA, 25 bp, Homo sapien
tcactgcatgcaaaggaaaaggagt

SEQ ID NO: 5945947 - DNA, 25 bp, Homo sapien
ggtcaggcgagtaaaatgaataatt

SEQ ID NO: 5945948 - DNA, 25 bp, Homo sapien
attacatggcttatgattatgatcc

SEQ ID NO: 5945949 - DNA, 25 bp, Homo sapien
gtcacagcaacaagccctatacgaa

SEQ ID NO: 5945950 - DNA, 25 bp, Homo sapien
gacccaaattgaactgcagttggcc

SEQ ID NO: 5945951 - DNA, 25 bp, Homo sapien
tgggaatcctaatgactcgatgtca

SEQ ID NO: 5945952 - DNA, 25 bp, Homo sapien
ctgcactggcgctaaatccaacaaa

SEQ ID NO: 5945953 - DNA, 25 bp, Homo sapien
gatcaaaagagacccaaattgaact

SEQ ID NO: 5945954 - DNA, 25 bp, Homo sapien
cccatttggcttcaaaggagtcttc

SEQ ID NO: 5945955 - DNA, 25 bp, Homo sapien
aatatgacaaataacaaggatacta

SEQ ID NO: 5945956 - DNA, 25 bp, Homo sapien
acgaatctggtgaaagaaacgatgc

SEQ ID NO: 5945957 - DNA, 25 bp, Homo sapien
tgaataattccatgcttcctcaagg

SEQ ID NO: 5945958 - DNA, 25 bp, Homo sapien
ctacaagcagaatgagcataagtat

SEQ ID NO: 5945959 - DNA, 25 bp, Homo sapien
attattggctggatccaatgaataa

SEQ ID NO: 5945960 - DNA, 25 bp, Homo sapien
gaataatatgacaaataacaaggat

SEQ ID NO: 5945961 - DNA, 25 bp, Homo sapien
aagcatctatgagaaatactctcaa

SEQ ID NO: 5945962 - DNA, 25 bp, Homo sapien
tttaacaatttggcatttcatcccc

SEQ ID NO: 5945963 - DNA, 25 bp, Homo sapien
ctttcgaattgccagcttccttgga

SEQ ID NO: 5945964 - DNA, 25 bp, Homo sapien
ccagaatgtaccacaagcatctatg

SEQ ID NO: 5945965 - DNA, 25 bp, Homo sapien
attcagtgactaagtatggcaggta

SEQ ID NO: 5945966 - DNA, 25 bp, Homo sapien
gaattacatggcttatgattatgat

SEQ ID NO: 5945967 - DNA, 25 bp, Homo sapien
gatattcagaaaactgtcatcgtca

SEQ ID NO: 5945968 - DNA, 25 bp, Homo sapien
aacgaggggctaaactacaagcaga

SEQ ID NO: 5945969 - DNA, 25 bp, Homo sapien
aacagtacaacaaatttcaacatgc

SEQ ID NO: 5945970 - DNA, 25 bp, Homo sapien
gtcccttaacgggtcaacatagctt

SEQ ID NO: 5945971 - DNA, 25 bp, Homo sapien
tcatcaatgtctaatatgaccgcta

SEQ ID NO: 5945972 - DNA, 25 bp, Homo sapien
aatggccaagatgttagcatatggc

SEQ ID NO: 5945973 - DNA, 25 bp, Homo sapien
catcaatgaatacctataattacca

SEQ ID NO: 5945974 - DNA, 25 bp, Homo sapien
ataaaggaaagtcaaatcgaatcac

SEQ ID NO: 5945975 - DNA, 25 bp, Homo sapien
agcattggaagtagaactacaaata

SEQ ID NO: 5945976 - DNA, 25 bp, Homo sapien
gtgacagcgctctcaatgaataatg

SEQ ID NO: 5945977 - DNA, 25 bp, Homo sapien
gtatgatgcagaatcgattgctcac

SEQ ID NO: 5945978 - DNA, 25 bp, Homo sapien
aggaaaaggagttagcagagacgaa

SEQ ID NO: 5945979 - DNA, 25 bp, Homo sapien
agtatggcaggtatgatgcagaatc

SEQ ID NO: 5945980 - DNA, 25 bp, Homo sapien
gagacccaaattgaactgcagttgg

SEQ ID NO: 5945981 - DNA, 25 bp, Homo sapien
aactgcactggcgctaaatccaaca

SEQ ID NO: 5945982 - DNA, 25 bp, Homo sapien
aatgattattggctggatccaatga

SEQ ID NO: 5945983 - DNA, 25 bp, Homo sapien
ttccttggaagtgatattcagaaaa

SEQ ID NO: 5945984 - DNA, 25 bp, Homo sapien
tttggaagcccatttggcttcaaag

SEQ ID NO: 5945985 - DNA, 25 bp, Homo sapien
gagaaggaaaactgccatatacccc

SEQ ID NO: 5945986 - DNA, 25 bp, Homo sapien
agacgaaagaaaatctggaaagtat

SEQ ID NO: 5945987 - DNA, 25 bp, Homo sapien
tgcagttggccaaaaaagaaaatct

SEQ ID NO: 5945988 - DNA, 25 bp, Homo sapien
taatgtcaacagcaatgagatgaat

SEQ ID NO: 5945989 - DNA, 25 bp, Homo sapien
attttcaacgaggggctaaactaca

SEQ ID NO: 5945990 - DNA, 25 bp, Homo sapien
aggaaaactgccatataccccaaac

SEQ ID NO: 5945991 - DNA, 25 bp, Homo sapien
caaactttcgaattgccagcttcct

SEQ ID NO: 5945992 - DNA, 25 bp, Homo sapien
aagaaaatctggaaagtatattaac

SEQ ID NO: 5945993 - DNA, 25 bp, Homo sapien
tatgaccgctaaaacctcaatcaat

SEQ ID NO: 5945994 - DNA, 25 bp, Homo sapien
tattcagaaaactgtcatcgtcact

SEQ ID NO: 5945995 - DNA, 25 bp, Homo sapien
acgaaagaaaatctggaaagtatat

SEQ ID NO: 5945996 - DNA, 25 bp, Homo sapien
tagtcccttaacgggtcaacatagc

SEQ ID NO: 5945997 - DNA, 25 bp, Homo sapien
acagcaatgagatgaattcaaataa

SEQ ID NO: 5945998 - DNA, 25 bp, Homo sapien
tggccaagatgttagcatatggcag

SEQ ID NO: 5945999 - DNA, 25 bp, Homo sapien
acgtcctttaacaatttggcatttc

SEQ ID NO: 5946000 - DNA, 25 bp, Homo sapien
agtcttcaaaggaggacgttgctaa

SEQ ID NO: 5946001 - DNA, 25 bp, Homo sapien
gagaaatactctcaatcataacaat

SEQ ID NO: 5946002 - DNA, 25 bp, Homo sapien
ggggcaactgctaatgattattggc

SEQ ID NO: 5946003 - DNA, 25 bp, Homo sapien
gggtcaacatagcttgaacagtaca

SEQ ID NO: 5946004 - DNA, 25 bp, Homo sapien
agaattcatttgttccttttaatca

SEQ ID NO: 5946005 - DNA, 25 bp, Homo sapien
tcagtgactaagtatggcaggtatg

SEQ ID NO: 5946006 - DNA, 25 bp, Homo sapien
gtaaaatgaataattccatgcttcc

SEQ ID NO: 5946007 - DNA, 25 bp, Homo sapien
ccatataccccaaactttcgaattg

SEQ ID NO: 5946008 - DNA, 25 bp, Homo sapien
cccaaattgaactgcagttggccaa

SEQ ID NO: 5946009 - DNA, 25 bp, Homo sapien
tccccaacattcgttggaaacgtcc

SEQ ID NO: 5946010 - DNA, 25 bp, Homo sapien
aagcagaatgagcataagtatgaga

SEQ ID NO: 5946011 - DNA, 25 bp, Homo sapien
cacaaaatggtggtaagattagaaa

SEQ ID NO: 5946012 - DNA, 25 bp, Homo sapien
gaactgcagttggccaaaaaagaaa

SEQ ID NO: 5946013 - DNA, 25 bp, Homo sapien
caacatagcttgaacagtacaacaa

SEQ ID NO: 5946014 - DNA, 25 bp, Homo sapien
taaactacaagcagaatgagcataa

SEQ ID NO: 5946015 - DNA, 25 bp, Homo sapien
cgagaacaaagaaatggccaagatg

SEQ ID NO: 5946016 - DNA, 25 bp, Homo sapien
ggagtcttcaaaggaggacgttgct

SEQ ID NO: 5946017 - DNA, 25 bp, Homo sapien
aaacgatgccaggccgggattaatg

SEQ ID NO: 5946018 - DNA, 25 bp, Homo sapien
cgaattgccagcttccttggaagtg

SEQ ID NO: 5946019 - DNA, 25 bp, Homo sapien
aactttcgaattgccagcttccttg

SEQ ID NO: 5946020 - DNA, 25 bp, Homo sapien
gcagagacgaaagaaaatctggaaa

SEQ ID NO: 5946021 - DNA, 25 bp, Homo sapien
tcgtcggctagtcccttaacgggtc

SEQ ID NO: 5946022 - DNA, 25 bp, Homo sapien
aattgccagcttccttggaagtgat

SEQ ID NO: 5946023 - DNA, 25 bp, Homo sapien
aatttcaacatgcccccatcaatga

SEQ ID NO: 5946024 - DNA, 25 bp, Homo sapien
gtctaatatgaccgctaaaacctca

SEQ ID NO: 5946025 - DNA, 25 bp, Homo sapien
atctggaaagtatattaactgcact

SEQ ID NO: 5946026 - DNA, 25 bp, Homo sapien
gagaaaaaatcgcatctttggaagc

SEQ ID NO: 5946027 - DNA, 25 bp, Homo sapien
gcatttcatccccaccaacagtcac

SEQ ID NO: 5946028 - DNA, 25 bp, Homo sapien
gaaaatctggaaagtatattaactg

SEQ ID NO: 5946029 - DNA, 25 bp, Homo sapien
aacaaatttcaacatgcccccatca

SEQ ID NO: 5946030 - DNA, 25 bp, Homo sapien
tcatgaatggggcaactgctaatga

SEQ ID NO: 5946031 - DNA, 25 bp, Homo sapien
aatcatgtgacagcgctctcaatga

SEQ ID NO: 5946032 - DNA, 25 bp, Homo sapien
tggcatttcatccccaccaacagtc

SEQ ID NO: 5946033 - DNA, 25 bp, Homo sapien
aatagtacggcattcaagaattcat

SEQ ID NO: 5946034 - DNA, 25 bp, Homo sapien
ttaactgcactggcgctaaatccaa

SEQ ID NO: 5946035 - DNA, 25 bp, Homo sapien
aatgaataatgtcaacagcaatgag

SEQ ID NO: 5946036 - DNA, 25 bp, Homo sapien
tttcaacgaggggctaaactacaag

SEQ ID NO: 5946037 - DNA, 25 bp, Homo sapien
cagtcacagcaacaagccctatacg

SEQ ID NO: 5946038 - DNA, 25 bp, Homo sapien
acgggtcaacatagcttgaacagta

SEQ ID NO: 5946039 - DNA, 25 bp, Homo sapien
gaaaaggagttagcagagacgaaag

SEQ ID NO: 5946040 - DNA, 25 bp, Homo sapien
tatgacaaataacaaggatactaat

SEQ ID NO: 5946041 - DNA, 25 bp, Homo sapien
gtcggctagtcccttaacgggtcaa

SEQ ID NO: 5946042 - DNA, 25 bp, Homo sapien
tggcgctaaatccaacaaattcagt

SEQ ID NO: 5946043 - DNA, 25 bp, Homo sapien
aaaacctcaatcaatagtacggcat

SEQ ID NO: 5946044 - DNA, 25 bp, Homo sapien
ttcatttgttccttttaatcatgtg

SEQ ID NO: 5946045 - DNA, 25 bp, Homo sapien
tacatggcttatgattatgatcccc

SEQ ID NO: 5946046 - DNA, 25 bp, Homo sapien
gcttatgattatgatccccaacatt

SEQ ID NO: 5946047 - DNA, 25 bp, Homo sapien
cttcctcaaggttcgtcggctagtc

SEQ ID NO: 5946048 - DNA, 25 bp, Homo sapien
aaaatgaataattccatgcttcctc

SEQ ID NO: 5946049 - DNA, 25 bp, Homo sapien
tgacagaatggaagcattggaagta

SEQ ID NO: 5946050 - DNA, 25 bp, Homo sapien
gtatgagaaggaaaactgccatata

SEQ ID NO: 5946051 - DNA, 25 bp, Homo sapien
tcaacgaggggctaaactacaagca

SEQ ID NO: 5946052 - DNA, 25 bp, Homo sapien
aattgaactgcagttggccaaaaaa

SEQ ID NO: 5946053 - DNA, 25 bp, Homo sapien
actgcatgcaaaggaaaaggagtta

SEQ ID NO: 5946054 - DNA, 25 bp, Homo sapien
ctcaaggttcgtcggctagtccctt

SEQ ID NO: 5946055 - DNA, 25 bp, Homo sapien
caatcataacaatatcatgaatggg

SEQ ID NO: 5946056 - DNA, 25 bp, Homo sapien
acaatttggcatttcatccccacca

SEQ ID NO: 5946057 - DNA, 25 bp, Homo sapien
cgagaacgaaattcaaaggctaaag

SEQ ID NO: 5946058 - DNA, 25 bp, Homo sapien
aatactctcaatcataacaatatca

SEQ ID NO: 5946059 - DNA, 25 bp, Homo sapien
cccttaacgggtcaacatagcttga

SEQ ID NO: 5946060 - DNA, 25 bp, Homo sapien
taaagatgacagaatggaagcattg

SEQ ID NO: 5946061 - DNA, 25 bp, Homo sapien
aacagtcacagcaacaagccctata

SEQ ID NO: 5946062 - DNA, 25 bp, Homo sapien
tgtcatcgtcactgcatgcaaagga

SEQ ID NO: 5946063 - DNA, 25 bp, Homo sapien
catgcccccatcaatgaatacctat

SEQ ID NO: 5946064 - DNA, 25 bp, Homo sapien
tgaatacctataattaccagaatgt

SEQ ID NO: 5946065 - DNA, 25 bp, Homo sapien
atgagaaatactctcaatcataaca

SEQ ID NO: 5946066 - DNA, 25 bp, Homo sapien
ctcgagaacgaaattcaaaggctaa

SEQ ID NO: 5946067 - DNA, 25 bp, Homo sapien
tggcttcaaaggagtcttcaaagga

SEQ ID NO: 5946068 - DNA, 25 bp, Homo sapien
tgtaccacaagcatctatgagaaat

SEQ ID NO: 5946069 - DNA, 25 bp, Homo sapien
catgcaaaggaaaaggagttagcag

SEQ ID NO: 5946070 - DNA, 25 bp, Homo sapien
gcaaaggaaaaggagttagcagaga

SEQ ID NO: 5946071 - DNA, 25 bp, Homo sapien
aacatgcccccatcaatgaatacct

SEQ ID NO: 5946072 - DNA, 25 bp, Homo sapien
aaataacaaggatactaatgggaat

SEQ ID NO: 5946073 - DNA, 25 bp, Homo sapien
gcaacaagccctatacgaatctggt

SEQ ID NO: 5946074 - DNA, 25 bp, Homo sapien
atgtcaacagcaatgagatgaattc

SEQ ID NO: 5946075 - DNA, 25 bp, Homo sapien
tccccaccaacagtcacagcaacaa

SEQ ID NO: 5946076 - DNA, 25 bp, Homo sapien
gatactaatgggaatcctaatgact

SEQ ID NO: 5946077 - DNA, 25 bp, Homo sapien
gaatcactcgagaacgaaattcaaa

SEQ ID NO: 5946078 - DNA, 25 bp, Homo sapien
cccaaactttcgaattgccagcttc

SEQ ID NO: 5946079 - DNA, 25 bp, Homo sapien
catttggcttcaaaggagtcttcaa

SEQ ID NO: 5946080 - DNA, 25 bp, Homo sapien
actgctaatgattattggctggatc

SEQ ID NO: 5946081 - DNA, 25 bp, Homo sapien
catttgttccttttaatcatgtgac

SEQ ID NO: 5946082 - DNA, 25 bp, Homo sapien
ggcattcaagaattcatttgttcct

SEQ ID NO: 5946083 - DNA, 25 bp, Homo sapien
gaatgagcataagtatgagaaggaa

SEQ ID NO: 5946084 - DNA, 25 bp, Homo sapien
tcctaatgactcgatgtcatcaatg

SEQ ID NO: 5946085 - DNA, 25 bp, Homo sapien
aggggctaaactacaagcagaatga

SEQ ID NO: 5946086 - DNA, 25 bp, Homo sapien
ttgccagcttccttggaagtgatat

SEQ ID NO: 5946087 - DNA, 25 bp, Homo sapien
atataccccaaactttcgaattgcc

SEQ ID NO: 5946088 - DNA, 25 bp, Homo sapien
actaagtatggcaggtatgatgcag

SEQ ID NO: 5946089 - DNA, 25 bp, Homo sapien
aataaagatgacagaatggaagcat

SEQ ID NO: 5946090 - DNA, 25 bp, Homo sapien
tcgatgtcatcaatgtctaatatga

SEQ ID NO: 5946091 - DNA, 25 bp, Homo sapien
tcaatgaatacctataattaccaga

SEQ ID NO: 5946092 - DNA, 25 bp, Homo sapien
tccaacaaattcagtgactaagtat

SEQ ID NO: 5946093 - DNA, 25 bp, Homo sapien
cagaaaactgtcatcgtcactgcat

SEQ ID NO: 5946094 - DNA, 25 bp, Homo sapien
ctaatgactcgatgtcatcaatgtc

SEQ ID NO: 5946095 - DNA, 25 bp, Homo sapien
caaataaagatgacagaatggaagc

SEQ ID NO: 5946096 - DNA, 25 bp, Homo sapien
catctttggaagcccatttggcttc

SEQ ID NO: 5946097 - DNA, 25 bp, Homo sapien
taaatccaacaaattcagtgactaa

SEQ ID NO: 5946098 - DNA, 25 bp, Homo sapien
gttagcagagacgaaagaaaatctg

SEQ ID NO: 5946099 - DNA, 25 bp, Homo sapien
catgcttcctcaaggttcgtcggct

SEQ ID NO: 5946100 - DNA, 25 bp, Homo sapien
tgcagaatcgattgctcacaaaatg

SEQ ID NO: 5946101 - DNA, 25 bp, Homo sapien
gaagcccatttggcttcaaaggagt

SEQ ID NO: 5946102 - DNA, 25 bp, Homo sapien
tcttggccatttctttgttctcgtt

SEQ ID NO: 5946103 - DNA, 25 bp, Homo sapien
ttttggccaactgcagttcaatttg

SEQ ID NO: 5946104 - DNA, 25 bp, Homo sapien
attctggtaattataggtattcatt

SEQ ID NO: 5946105 - DNA, 25 bp, Homo sapien
tccagattttctttcgtctctgcta

SEQ ID NO: 5946106 - DNA, 25 bp, Homo sapien
ttctagattttcttttttggccaac

SEQ ID NO: 5946107 - DNA, 25 bp, Homo sapien
aactgcagttcaatttgggtctctt

SEQ ID NO: 5946108 - DNA, 25 bp, Homo sapien
agctggcaattcgaaagtttggggt

SEQ ID NO: 5946109 - DNA, 25 bp, Homo sapien
tcattggatccagccaataatcatt

SEQ ID NO: 5946110 - DNA, 25 bp, Homo sapien
gcggtcatattagacattgatgaca

SEQ ID NO: 5946111 - DNA, 25 bp, Homo sapien
gggcatgttgaaatttgttgtactg

SEQ ID NO: 5946112 - DNA, 25 bp, Homo sapien
ctcatagatgcttgtggtacattct

SEQ ID NO: 5946113 - DNA, 25 bp, Homo sapien
attgttatgattgagagtatttctc

SEQ ID NO: 5946114 - DNA, 25 bp, Homo sapien
gactttcctttatttgtagttctac

SEQ ID NO: 5946115 - DNA, 25 bp, Homo sapien
ttgttgctgtgactgttggtgggga

SEQ ID NO: 5946116 - DNA, 25 bp, Homo sapien
attcattttactcgcctgacctaag

SEQ ID NO: 5946117 - DNA, 25 bp, Homo sapien
acgtttccaacgaatgttggggatc

SEQ ID NO: 5946118 - DNA, 25 bp, Homo sapien
aattctagattttcttttttggcca

SEQ ID NO: 5946119 - DNA, 25 bp, Homo sapien
cccattcatgatattgttatgattg

SEQ ID NO: 5946120 - DNA, 25 bp, Homo sapien
aatgttggggatcataatcataagc

SEQ ID NO: 5946121 - DNA, 25 bp, Homo sapien
ggaagcatggaattattcattttac

SEQ ID NO: 5946122 - DNA, 25 bp, Homo sapien
aaaggaacaaatgaattcttgaatg

SEQ ID NO: 5946123 - DNA, 25 bp, Homo sapien
gcagttttccttctcatacttatgc

SEQ ID NO: 5946124 - DNA, 25 bp, Homo sapien
gctcattctgcttgtagtttagccc

SEQ ID NO: 5946125 - DNA, 25 bp, Homo sapien
cgtatagggcttgttgctgtgactg

SEQ ID NO: 5946126 - DNA, 25 bp, Homo sapien
ctgtcacatgattaaaaggaacaaa

SEQ ID NO: 5946127 - DNA, 25 bp, Homo sapien
gctatgttgacccgttaagggacta

SEQ ID NO: 5946128 - DNA, 25 bp, Homo sapien
ttattcattttactcgcctgaccta

SEQ ID NO: 5946129 - DNA, 25 bp, Homo sapien
acttagtcactgaatttgttggatt

SEQ ID NO: 5946130 - DNA, 25 bp, Homo sapien
ccatacttagtcactgaatttgttg

SEQ ID NO: 5946131 - DNA, 25 bp, Homo sapien
tcatattagacattgatgacatcga

SEQ ID NO: 5946132 - DNA, 25 bp, Homo sapien
aacatcttggccatttctttgttct

SEQ ID NO: 5946133 - DNA, 25 bp, Homo sapien
atttgtcatattattcattggatcc

SEQ ID NO: 5946134 - DNA, 25 bp, Homo sapien
gcttgttgctgtgactgttggtggg

SEQ ID NO: 5946135 - DNA, 25 bp, Homo sapien
actccttttcctttgcatgcagtga

SEQ ID NO: 5946136 - DNA, 25 bp, Homo sapien
cttgtagtttagcccctcgttgaaa

SEQ ID NO: 5946137 - DNA, 25 bp, Homo sapien
ttggggtatatggcagttttccttc

SEQ ID NO: 5946138 - DNA, 25 bp, Homo sapien
ttcatgatattgttatgattgagag

SEQ ID NO: 5946139 - DNA, 25 bp, Homo sapien
taagttttctaatcttaccaccatt

SEQ ID NO: 5946140 - DNA, 25 bp, Homo sapien
gcatgttgaaatttgttgtactgtt

SEQ ID NO: 5946141 - DNA, 25 bp, Homo sapien
atgcagtgacgatgacagttttctg

SEQ ID NO: 5946142 - DNA, 25 bp, Homo sapien
ttccaacgaatgttggggatcataa

SEQ ID NO: 5946143 - DNA, 25 bp, Homo sapien
tgatctgccatatgctaacatcttg

SEQ ID NO: 5946144 - DNA, 25 bp, Homo sapien
tctcgtttgttaagttttctaatct

SEQ ID NO: 5946145 - DNA, 25 bp, Homo sapien
gtatttctcatagatgcttgtggta

SEQ ID NO: 5946146 - DNA, 25 bp, Homo sapien
ctttgaagccaaatgggcttccaaa

SEQ ID NO: 5946147 - DNA, 25 bp, Homo sapien
cagattttctttcgtctctgctaac

SEQ ID NO: 5946148 - DNA, 25 bp, Homo sapien
gcatcatacctgccatacttagtca

SEQ ID NO: 5946149 - DNA, 25 bp, Homo sapien
tgcttgtggtacattctggtaatta

SEQ ID NO: 5946150 - DNA, 25 bp, Homo sapien
ttctgcatcatacctgccatactta

SEQ ID NO: 5946151 - DNA, 25 bp, Homo sapien
atacttatgctcattctgcttgtag

SEQ ID NO: 5946152 - DNA, 25 bp, Homo sapien
gtttggggtatatggcagttttcct

SEQ ID NO: 5946153 - DNA, 25 bp, Homo sapien
ttttttggccaactgcagttcaatt

SEQ ID NO: 5946154 - DNA, 25 bp, Homo sapien
tcattctgcttgtagtttagcccct

SEQ ID NO: 5946155 - DNA, 25 bp, Homo sapien
gtgagcaatcgattctgcatcatac

SEQ ID NO: 5946156 - DNA, 25 bp, Homo sapien
ggatcataatcataagccatgtaat

SEQ ID NO: 5946157 - DNA, 25 bp, Homo sapien
agactcctttgaagccaaatgggct

SEQ ID NO: 5946158 - DNA, 25 bp, Homo sapien
ggccaactgcagttcaatttgggtc

SEQ ID NO: 5946159 - DNA, 25 bp, Homo sapien
tgtactgttcaagctatgttgaccc

SEQ ID NO: 5946160 - DNA, 25 bp, Homo sapien
agattttcttttttggccaactgca

SEQ ID NO: 5946161 - DNA, 25 bp, Homo sapien
tcattgatgggggcatgttgaaatt

SEQ ID NO: 5946162 - DNA, 25 bp, Homo sapien
atacttagtcactgaatttgttgga

SEQ ID NO: 5946163 - DNA, 25 bp, Homo sapien
gacccgttaagggactagccgacga

SEQ ID NO: 5946164 - DNA, 25 bp, Homo sapien
ctttatttgaattcatctcattgct

SEQ ID NO: 5946165 - DNA, 25 bp, Homo sapien
attctgcttgtagtttagcccctcg

SEQ ID NO: 5946166 - DNA, 25 bp, Homo sapien
atgggcttccaaagatgcgattttt

SEQ ID NO: 5946167 - DNA, 25 bp, Homo sapien
catattattcattggatccagccaa

SEQ ID NO: 5946168 - DNA, 25 bp, Homo sapien
tatggcagttttccttctcatactt

SEQ ID NO: 5946169 - DNA, 25 bp, Homo sapien
cacatgattaaaaggaacaaatgaa

SEQ ID NO: 5946170 - DNA, 25 bp, Homo sapien
tggatccagccaataatcattagca

SEQ ID NO: 5946171 - DNA, 25 bp, Homo sapien
gtatccttgttatttgtcatattat

SEQ ID NO: 5946172 - DNA, 25 bp, Homo sapien
gagcaatcgattctgcatcatacct

SEQ ID NO: 5946173 - DNA, 25 bp, Homo sapien
cattcatgatattgttatgattgag

SEQ ID NO: 5946174 - DNA, 25 bp, Homo sapien
gcagtgacgatgacagttttctgaa

SEQ ID NO: 5946175 - DNA, 25 bp, Homo sapien
gatgcttgtggtacattctggtaat

SEQ ID NO: 5946176 - DNA, 25 bp, Homo sapien
ccagtgcagttaatatactttccag

SEQ ID NO: 5946177 - DNA, 25 bp, Homo sapien
ctttgcatgcagtgacgatgacagt

SEQ ID NO: 5946178 - DNA, 25 bp, Homo sapien
ttttgtgagcaatcgattctgcatc

SEQ ID NO: 5946179 - DNA, 25 bp, Homo sapien
ctcgcctgacctaaggtgttcatta

SEQ ID NO: 5946180 - DNA, 25 bp, Homo sapien
tggtaattataggtattcattgatg

SEQ ID NO: 5946181 - DNA, 25 bp, Homo sapien
ttgacccgttaagggactagccgac

SEQ ID NO: 5946182 - DNA, 25 bp, Homo sapien
aattattcattttactcgcctgacc

SEQ ID NO: 5946183 - DNA, 25 bp, Homo sapien
tgttggatttagcgccagtgcagtt

SEQ ID NO: 5946184 - DNA, 25 bp, Homo sapien
acatcgagtcattaggattcccatt

SEQ ID NO: 5946185 - DNA, 25 bp, Homo sapien
gccatatgctaacatcttggccatt

SEQ ID NO: 5946186 - DNA, 25 bp, Homo sapien
ccatttctttgttctcgtttgttaa

SEQ ID NO: 5946187 - DNA, 25 bp, Homo sapien
agcctttgaatttcgttctcgagtg

SEQ ID NO: 5946188 - DNA, 25 bp, Homo sapien
gagagtatttctcatagatgcttgt

SEQ ID NO: 5946189 - DNA, 25 bp, Homo sapien
cgtttctttcaccagattcgtatag

SEQ ID NO: 5946190 - DNA, 25 bp, Homo sapien
aaccttgaggaagcatggaattatt

SEQ ID NO: 5946191 - DNA, 25 bp, Homo sapien
ttccttctcatacttatgctcattc

SEQ ID NO: 5946192 - DNA, 25 bp, Homo sapien
gtaattataggtattcattgatggg

SEQ ID NO: 5946193 - DNA, 25 bp, Homo sapien
gaagctggcaattcgaaagtttggg

SEQ ID NO: 5946194 - DNA, 25 bp, Homo sapien
ggtatatggcagttttccttctcat

SEQ ID NO: 5946195 - DNA, 25 bp, Homo sapien
gggactagccgacgaaccttgagga

SEQ ID NO: 5946196 - DNA, 25 bp, Homo sapien
ctttagcctttgaatttcgttctcg

SEQ ID NO: 5946197 - DNA, 25 bp, Homo sapien
tccaatgcttccattctgtcatctt

SEQ ID NO: 5946198 - DNA, 25 bp, Homo sapien
gtcctcctttgaagactcctttgaa

SEQ ID NO: 5946199 - DNA, 25 bp, Homo sapien
tctaatcttaccaccattttgtgag

SEQ ID NO: 5946200 - DNA, 25 bp, Homo sapien
gattctgcatcatacctgccatact

SEQ ID NO: 5946201 - DNA, 25 bp, Homo sapien
taggattcccattagtatccttgtt

SEQ ID NO: 5946202 - DNA, 25 bp, Homo sapien
tgttcattaatcccggcctggcatc

SEQ ID NO: 5946203 - DNA, 25 bp, Homo sapien
aatcattagcagttgccccattcat

SEQ ID NO: 5946204 - DNA, 25 bp, Homo sapien
ttggccatttctttgttctcgtttg

SEQ ID NO: 5946205 - DNA, 25 bp, Homo sapien
catgatattgttatgattgagagta

SEQ ID NO: 5946206 - DNA, 25 bp, Homo sapien
cattgctgttgacattattcattga

SEQ ID NO: 5946207 - DNA, 25 bp, Homo sapien
actcctttgaagccaaatgggcttc

SEQ ID NO: 5946208 - DNA, 25 bp, Homo sapien
cttaccaccattttgtgagcaatcg

SEQ ID NO: 5946209 - DNA, 25 bp, Homo sapien
ttcgtctctgctaactccttttcct

SEQ ID NO: 5946210 - DNA, 25 bp, Homo sapien
taatcttaccaccattttgtgagca

SEQ ID NO: 5946211 - DNA, 25 bp, Homo sapien
tctggtaattataggtattcattga

SEQ ID NO: 5946212 - DNA, 25 bp, Homo sapien
ctattgattgaggttttagcggtca

SEQ ID NO: 5946213 - DNA, 25 bp, Homo sapien
cttccaaggaagctggcaattcgaa

SEQ ID NO: 5946214 - DNA, 25 bp, Homo sapien
ttatgattgagagtatttctcatag

SEQ ID NO: 5946215 - DNA, 25 bp, Homo sapien
cacttccaaggaagctggcaattcg

SEQ ID NO: 5946216 - DNA, 25 bp, Homo sapien
tacttccaatgcttccattctgtca

SEQ ID NO: 5946217 - DNA, 25 bp, Homo sapien
ggggatgaaatgccaaattgttaaa

SEQ ID NO: 5946218 - DNA, 25 bp, Homo sapien
tgttatgattgagagtatttctcat

SEQ ID NO: 5946219 - DNA, 25 bp, Homo sapien
tgaatttgttggatttagcgccagt

SEQ ID NO: 5946220 - DNA, 25 bp, Homo sapien
aaatgggcttccaaagatgcgattt

SEQ ID NO: 5946221 - DNA, 25 bp, Homo sapien
cttccaatgcttccattctgtcatc

SEQ ID NO: 5946222 - DNA, 25 bp, Homo sapien
tttcgttctcgagtgattcgatttg

SEQ ID NO: 5946223 - DNA, 25 bp, Homo sapien
accattttgtgagcaatcgattctg

SEQ ID NO: 5946224 - DNA, 25 bp, Homo sapien
tgtagtttagcccctcgttgaaaat

SEQ ID NO: 5946225 - DNA, 25 bp, Homo sapien
ctgtcatctttatttgaattcatct

SEQ ID NO: 5946226 - DNA, 25 bp, Homo sapien
tttctaatcttaccaccattttgtg

SEQ ID NO: 5946227 - DNA, 25 bp, Homo sapien
ccaaatgggcttccaaagatgcgat

SEQ ID NO: 5946228 - DNA, 25 bp, Homo sapien
aaatttgttgtactgttcaagctat

SEQ ID NO: 5946229 - DNA, 25 bp, Homo sapien
ttagcctttgaatttcgttctcgag

SEQ ID NO: 5946230 - DNA, 25 bp, Homo sapien
ccaactgcagttcaatttgggtctc

SEQ ID NO: 5946231 - DNA, 25 bp, Homo sapien
tttcttttttggccaactgcagttc

SEQ ID NO: 5946232 - DNA, 25 bp, Homo sapien
cattaatcccggcctggcatcgttt

SEQ ID NO: 5946233 - DNA, 25 bp, Homo sapien
ccgacgaaccttgaggaagcatgga

SEQ ID NO: 5946234 - DNA, 25 bp, Homo sapien
tactgttcaagctatgttgacccgt

SEQ ID NO: 5946235 - DNA, 25 bp, Homo sapien
gacgaaccttgaggaagcatggaat

SEQ ID NO: 5946236 - DNA, 25 bp, Homo sapien
tcattttactcgcctgacctaaggt

SEQ ID NO: 5946237 - DNA, 25 bp, Homo sapien
tcttttttggccaactgcagttcaa

SEQ ID NO: 5946238 - DNA, 25 bp, Homo sapien
attagcagttgccccattcatgata

SEQ ID NO: 5946239 - DNA, 25 bp, Homo sapien
ttgaagccaaatgggcttccaaaga

SEQ ID NO: 5946240 - DNA, 25 bp, Homo sapien
gactagccgacgaaccttgaggaag

SEQ ID NO: 5946241 - DNA, 25 bp, Homo sapien
tcgaaagtttggggtatatggcagt

SEQ ID NO: 5946242 - DNA, 25 bp, Homo sapien
gcagttcaatttgggtctcttttga

SEQ ID NO: 5946243 - DNA, 25 bp, Homo sapien
tgtggtacattctggtaattatagg

SEQ ID NO: 5946244 - DNA, 25 bp, Homo sapien
gaggaagcatggaattattcatttt

SEQ ID NO: 5946245 - DNA, 25 bp, Homo sapien
gccaataatcattagcagttgcccc

SEQ ID NO: 5946246 - DNA, 25 bp, Homo sapien
atgttgaaatttgttgtactgttca

SEQ ID NO: 5946247 - DNA, 25 bp, Homo sapien
atcttaccaccattttgtgagcaat

SEQ ID NO: 5946248 - DNA, 25 bp, Homo sapien
tttcaccagattcgtatagggcttg

SEQ ID NO: 5946249 - DNA, 25 bp, Homo sapien
ggtgttcattaatcccggcctggca

SEQ ID NO: 5946250 - DNA, 25 bp, Homo sapien
tgttctcgtttgttaagttttctaa

SEQ ID NO: 5946251 - DNA, 25 bp, Homo sapien
atgcgattttttctcttaattctag

SEQ ID NO: 5946252 - DNA, 25 bp, Homo sapien
catcttggccatttctttgttctcg

SEQ ID NO: 5946253 - DNA, 25 bp, Homo sapien
tgttgacccgttaagggactagccg

SEQ ID NO: 5946254 - DNA, 25 bp, Homo sapien
caatttgggtctcttttgatctgcc

SEQ ID NO: 5946255 - DNA, 25 bp, Homo sapien
ctgcagttcaatttgggtctctttt

SEQ ID NO: 5946256 - DNA, 25 bp, Homo sapien
atttgttgtactgttcaagctatgt

SEQ ID NO: 5946257 - DNA, 25 bp, Homo sapien
agtgacgatgacagttttctgaata

SEQ ID NO: 5946258 - DNA, 25 bp, Homo sapien
tatgttgacccgttaagggactagc

SEQ ID NO: 5946259 - DNA, 25 bp, Homo sapien
aagggactagccgacgaaccttgag

SEQ ID NO: 5946260 - DNA, 25 bp, Homo sapien
aagctatgttgacccgttaagggac

SEQ ID NO: 5946261 - DNA, 25 bp, Homo sapien
tcctttgaagccaaatgggcttcca

SEQ ID NO: 5946262 - DNA, 25 bp, Homo sapien
attagtatccttgttatttgtcata

SEQ ID NO: 5946263 - DNA, 25 bp, Homo sapien
gcttccattctgtcatctttatttg

SEQ ID NO: 5946264 - DNA, 25 bp, Homo sapien
aggttttagcggtcatattagacat

SEQ ID NO: 5946265 - DNA, 25 bp, Homo sapien
ggggatcataatcataagccatgta

SEQ ID NO: 5946266 - DNA, 25 bp, Homo sapien
attcattgatgggggcatgttgaaa

SEQ ID NO: 5946267 - DNA, 25 bp, Homo sapien
cctgccatacttagtcactgaattt

SEQ ID NO: 5946268 - DNA, 25 bp, Homo sapien
ggatgaaatgccaaattgttaaagg

SEQ ID NO: 5946269 - DNA, 25 bp, Homo sapien
tcttgaatgccgtactattgattga

SEQ ID NO: 5946270 - DNA, 25 bp, Homo sapien
tgttggggatcataatcataagcca

SEQ ID NO: 5946271 - DNA, 25 bp, Homo sapien
ttttctgaatatcacttccaaggaa

SEQ ID NO: 5946272 - DNA, 25 bp, Homo sapien
gcaatcgattctgcatcatacctgc

SEQ ID NO: 5946273 - DNA, 25 bp, Homo sapien
gaagccaaatgggcttccaaagatg

SEQ ID NO: 5946274 - DNA, 25 bp, Homo sapien
tttgatctgccatatgctaacatct

SEQ ID NO: 5946275 - DNA, 25 bp, Homo sapien
ttcaatttgggtctcttttgatctg

SEQ ID NO: 5946276 - DNA, 25 bp, Homo sapien
gtgactgttggtggggatgaaatgc

SEQ ID NO: 5946277 - DNA, 25 bp, Homo sapien
ttttctttcgtctctgctaactcct

SEQ ID NO: 5946278 - DNA, 25 bp, Homo sapien
ttctgaatatcacttccaaggaagc

SEQ ID NO: 5946279 - DNA, 25 bp, Homo sapien
gctgttgacattattcattgagagc

SEQ ID NO: 5946280 - DNA, 25 bp, Homo sapien
gaatatcacttccaaggaagctggc

SEQ ID NO: 5946281 - DNA, 25 bp, Homo sapien
tagtatccttgttatttgtcatatt

SEQ ID NO: 5946282 - DNA, 25 bp, Homo sapien
acgtcctcctttgaagactcctttg

SEQ ID NO: 5946283 - DNA, 25 bp, Homo sapien
tgttgacattattcattgagagcgc

SEQ ID NO: 5946284 - DNA, 25 bp, Homo sapien
tctctgctaactccttttcctttgc

SEQ ID NO: 5946285 - DNA, 25 bp, Homo sapien
ttgaggaagcatggaattattcatt

SEQ ID NO: 5946286 - DNA, 25 bp, Homo sapien
attgatgggggcatgttgaaatttg

SEQ ID NO: 5946287 - DNA, 25 bp, Homo sapien
ctgcatcatacctgccatacttagt

SEQ ID NO: 5946288 - DNA, 25 bp, Homo sapien
atgattgagagtatttctcatagat

SEQ ID NO: 5946289 - DNA, 25 bp, Homo sapien
aggaacaaatgaattcttgaatgcc

SEQ ID NO: 5946290 - DNA, 25 bp, Homo sapien
cattgatgacatcgagtcattagga

SEQ ID NO: 5946291 - DNA, 25 bp, Homo sapien
atttagcgccagtgcagttaatata

SEQ ID NO: 5946292 - DNA, 25 bp, Homo sapien
atatactttccagattttctttcgt

SEQ ID NO: 5946293 - DNA, 25 bp, Homo sapien
cttttcctttgcatgcagtgacgat

SEQ ID NO: 5946294 - DNA, 25 bp, Homo sapien
ttgttgtactgttcaagctatgttg

SEQ ID NO: 5946295 - DNA, 25 bp, Homo sapien
ataatcattagcagttgccccattc

SEQ ID NO: 5946296 - DNA, 25 bp, Homo sapien
ttccaaagatgcgattttttctctt

SEQ ID NO: 5946297 - DNA, 25 bp, Homo sapien
tcattgagagcgctgtcacatgatt

SEQ ID NO: 5946298 - DNA, 25 bp, Homo sapien
ttgaatgccgtactattgattgagg

SEQ ID NO: 5946299 - DNA, 25 bp, Homo sapien
ccttgaggaagcatggaattattca

SEQ ID NO: 5946300 - DNA, 25 bp, Homo sapien
aaagatgcgattttttctcttaatt

SEQ ID NO: 5946301 - DNA, 25 bp, Homo sapien
gagtgattcgatttgactttccttt

SEQ ID NO: 5946302 - DNA, 25 bp, Homo sapien
gttggtggggatgaaatgccaaatt

SEQ ID NO: 5946303 - DNA, 25 bp, Homo sapien
ggatttagcgccagtgcagttaata

SEQ ID NO: 5946304 - DNA, 25 bp, Homo sapien
tcaattagcaacgtcctcctttgaa

SEQ ID NO: 5946305 - DNA, 25 bp, Homo sapien
tcccattagtatccttgttatttgt

SEQ ID NO: 5946306 - DNA, 25 bp, Homo sapien
tgattaaaaggaacaaatgaattct

SEQ ID NO: 5946307 - DNA, 25 bp, Homo sapien
tagatgcttgtggtacattctggta

SEQ ID NO: 5946308 - DNA, 25 bp, Homo sapien
cagccaataatcattagcagttgcc

SEQ ID NO: 5946309 - DNA, 25 bp, Homo sapien
attgattgaggttttagcggtcata

SEQ ID NO: 5946310 - DNA, 25 bp, Homo sapien
gaagactcctttgaagccaaatggg

SEQ ID NO: 5946311 - DNA, 25 bp, Homo sapien
cataatcataagccatgtaattcat

SEQ ID NO: 5946312 - DNA, 25 bp, Homo sapien
ttagcaacgtcctcctttgaagact

SEQ ID NO: 5946313 - DNA, 25 bp, Homo sapien
agagcgctgtcacatgattaaaagg

SEQ ID NO: 5946314 - DNA, 25 bp, Homo sapien
aattagcaacgtcctcctttgaaga

SEQ ID NO: 5946315 - DNA, 25 bp, Homo sapien
gacattattcattgagagcgctgtc

SEQ ID NO: 5946316 - DNA, 25 bp, Homo sapien
tagcagttgccccattcatgatatt

SEQ ID NO: 5946317 - DNA, 25 bp, Homo sapien
caaggaagctggcaattcgaaagtt

SEQ ID NO: 5946318 - DNA, 25 bp, Homo sapien
tgaaaattttctttagcctttgaat

SEQ ID NO: 5946319 - DNA, 25 bp, Homo sapien
gctaactccttttcctttgcatgca

SEQ ID NO: 5946320 - DNA, 25 bp, Homo sapien
tgaaatttgttgtactgttcaagct

SEQ ID NO: 5946321 - DNA, 25 bp, Homo sapien
gattttctttcgtctctgctaactc

SEQ ID NO: 5946322 - DNA, 25 bp, Homo sapien
cgatttgactttcctttatttgtag

SEQ ID NO: 5946323 - DNA, 25 bp, Homo sapien
ctgaatatcacttccaaggaagctg

SEQ ID NO: 5946324 - DNA, 25 bp, Homo sapien
acaaatgaattcttgaatgccgtac

SEQ ID NO: 5946325 - DNA, 25 bp, Homo sapien
gttttctaatcttaccaccattttg

SEQ ID NO: 5946326 - DNA, 25 bp, Homo sapien
tttccagattttctttcgtctctgc

SEQ ID NO: 5946327 - DNA, 25 bp, Homo sapien
tcactgaatttgttggatttagcgc

SEQ ID NO: 5946328 - DNA, 25 bp, Homo sapien
tatatggcagttttccttctcatac

SEQ ID NO: 5946329 - DNA, 25 bp, Homo sapien
ccattagtatccttgttatttgtca

SEQ ID NO: 5946330 - DNA, 25 bp, Homo sapien
gggcttccaaagatgcgattttttc

SEQ ID NO: 5946331 - DNA, 25 bp, Homo sapien
aattataggtattcattgatggggg

SEQ ID NO: 5946332 - DNA, 25 bp, Homo sapien
tcctttgaagactcctttgaagcca

SEQ ID NO: 5946333 - DNA, 25 bp, Homo sapien
gattcgtatagggcttgttgctgtg

SEQ ID NO: 5946334 - DNA, 25 bp, Homo sapien
ggccatttctttgttctcgtttgtt

SEQ ID NO: 5946335 - DNA, 25 bp, Homo sapien
atctgccatatgctaacatcttggc

SEQ ID NO: 5946336 - DNA, 25 bp, Homo sapien
aagcatggaattattcattttactc

SEQ ID NO: 5946337 - DNA, 25 bp, Homo sapien
ataggtattcattgatgggggcatg

SEQ ID NO: 5946338 - DNA, 25 bp, Homo sapien
agttttccttctcatacttatgctc

SEQ ID NO: 5946339 - DNA, 25 bp, Homo sapien
tcgttctcgagtgattcgatttgac

SEQ ID NO: 5946340 - DNA, 25 bp, Homo sapien
gttttagcggtcatattagacattg

SEQ ID NO: 5946341 - DNA, 25 bp, Homo sapien
attagacattgatgacatcgagtca

SEQ ID NO: 5946342 - DNA, 25 bp, Homo sapien
cagattcgtatagggcttgttgctg

SEQ ID NO: 5946343 - DNA, 25 bp, Homo sapien
gaattcttgaatgccgtactattga

SEQ ID NO: 5946344 - DNA, 25 bp, Homo sapien
agcgccagtgcagttaatatacttt

SEQ ID NO: 5946345 - DNA, 25 bp, Homo sapien
ggtcatattagacattgatgacatc

SEQ ID NO: 5946346 - DNA, 25 bp, Homo sapien
ttagcgccagtgcagttaatatact

SEQ ID NO: 5946347 - DNA, 25 bp, Homo sapien
tttcctttatttgtagttctacttc

SEQ ID NO: 5946348 - DNA, 25 bp, Homo sapien
gtcacatgattaaaaggaacaaatg

SEQ ID NO: 5946349 - DNA, 25 bp, Homo sapien
gtggggatgaaatgccaaattgtta

SEQ ID NO: 5946350 - DNA, 25 bp, Homo sapien
cctttgaatttcgttctcgagtgat

SEQ ID NO: 5946351 - DNA, 25 bp, Homo sapien
attcatctcattgctgttgacatta

SEQ ID NO: 5946352 - DNA, 25 bp, Homo sapien
ttgatgacatcgagtcattaggatt

SEQ ID NO: 5946353 - DNA, 25 bp, Homo sapien
ttctttagcctttgaatttcgttct

SEQ ID NO: 5946354 - DNA, 25 bp, Homo sapien
catacctgccatacttagtcactga

SEQ ID NO: 5946355 - DNA, 25 bp, Homo sapien
cgaaccttgaggaagcatggaatta

SEQ ID NO: 5946356 - DNA, 25 bp, Homo sapien
agcgctgtcacatgattaaaaggaa

SEQ ID NO: 5946357 - DNA, 25 bp, Homo sapien
tttgttggatttagcgccagtgcag

SEQ ID NO: 5946358 - DNA, 25 bp, Homo sapien
aaatgaattcttgaatgccgtacta

SEQ ID NO: 5946359 - DNA, 25 bp, Homo sapien
atttgaattcatctcattgctgttg

SEQ ID NO: 5946360 - DNA, 25 bp, Homo sapien
aacgaatgttggggatcataatcat

SEQ ID NO: 5946361 - DNA, 25 bp, Homo sapien
tatttgtagttctacttccaatgct

SEQ ID NO: 5946362 - DNA, 25 bp, Homo sapien
acagttttctgaatatcacttccaa

SEQ ID NO: 5946363 - DNA, 25 bp, Homo sapien
tctttcaccagattcgtatagggct

SEQ ID NO: 5946364 - DNA, 25 bp, Homo sapien
gttctcgagtgattcgatttgactt

SEQ ID NO: 5946365 - DNA, 25 bp, Homo sapien
tacctgccatacttagtcactgaat

SEQ ID NO: 5946366 - DNA, 25 bp, Homo sapien
tgcagttaatatactttccagattt

SEQ ID NO: 5946367 - DNA, 25 bp, Homo sapien
gccgtactattgattgaggttttag

SEQ ID NO: 5946368 - DNA, 25 bp, Homo sapien
ttgacattattcattgagagcgctg

SEQ ID NO: 5946369 - DNA, 25 bp, Homo sapien
ctttgaagactcctttgaagccaaa

SEQ ID NO: 5946370 - DNA, 25 bp, Homo sapien
atcatacctgccatacttagtcact

SEQ ID NO: 5946371 - DNA, 25 bp, Homo sapien
agatgcgattttttctcttaattct

SEQ ID NO: 5946372 - DNA, 25 bp, Homo sapien
tgacatcgagtcattaggattccca

SEQ ID NO: 5946373 - DNA, 25 bp, Homo sapien
taaaggacgtttccaacgaatgttg

SEQ ID NO: 5946374 - DNA, 25 bp, Homo sapien
acctaaggtgttcattaatcccggc

SEQ ID NO: 5946375 - DNA, 25 bp, Homo sapien
cgaatgttggggatcataatcataa

SEQ ID NO: 5946376 - DNA, 25 bp, Homo sapien
gttgtactgttcaagctatgttgac

SEQ ID NO: 5946377 - DNA, 25 bp, Homo sapien
ttggggatcataatcataagccatg

SEQ ID NO: 5946378 - DNA, 25 bp, Homo sapien
tgatattgttatgattgagagtatt

SEQ ID NO: 5946379 - DNA, 25 bp, Homo sapien
tcattaggattcccattagtatcct

SEQ ID NO: 5946380 - DNA, 25 bp, Homo sapien
aggtattcattgatgggggcatgtt

SEQ ID NO: 5946381 - DNA, 25 bp, Homo sapien
tttgtagttctacttccaatgcttc

SEQ ID NO: 5946382 - DNA, 25 bp, Homo sapien
gtttccaacgaatgttggggatcat

SEQ ID NO: 5946383 - DNA, 25 bp, Homo sapien
tagttctacttccaatgcttccatt

SEQ ID NO: 5946384 - DNA, 25 bp, Homo sapien
atgccaaattgttaaaggacgtttc

SEQ ID NO: 5946385 - DNA, 25 bp, Homo sapien
gattcgatttgactttcctttattt

SEQ ID NO: 5946386 - DNA, 25 bp, Homo sapien
ttcattaatcccggcctggcatcgt

SEQ ID NO: 5946387 - DNA, 25 bp, Homo sapien
agcaacgtcctcctttgaagactcc

SEQ ID NO: 5946388 - DNA, 25 bp, Homo sapien
ggattcccattagtatccttgttat

SEQ ID NO: 5946389 - DNA, 25 bp, Homo sapien
tgctgtgactgttggtggggatgaa

SEQ ID NO: 5946390 - DNA, 25 bp, Homo sapien
tgatgggggcatgttgaaatttgtt

SEQ ID NO: 5946391 - DNA, 25 bp, Homo sapien
tggtggggatgaaatgccaaattgt

SEQ ID NO: 5946392 - DNA, 25 bp, Homo sapien
ttgccccattcatgatattgttatg

SEQ ID NO: 5946393 - DNA, 25 bp, Homo sapien
aaggtgttcattaatcccggcctgg

SEQ ID NO: 5946394 - DNA, 25 bp, Homo sapien
ctgctaactccttttcctttgcatg

SEQ ID NO: 5946395 - DNA, 25 bp, Homo sapien
tccaaggaagctggcaattcgaaag

SEQ ID NO: 5946396 - DNA, 25 bp, Homo sapien
atgcttccattctgtcatctttatt

SEQ ID NO: 5946397 - DNA, 25 bp, Homo sapien
ctgttcaagctatgttgacccgtta

SEQ ID NO: 5946398 - DNA, 25 bp, Homo sapien
atttgggtctcttttgatctgccat

SEQ ID NO: 5946399 - DNA, 25 bp, Homo sapien
tcgattctgcatcatacctgccata

SEQ ID NO: 5946400 - DNA, 25 bp, Homo sapien
ttggatttagcgccagtgcagttaa

SEQ ID NO: 5946401 - DNA, 25 bp, Homo sapien
atcataatcataagccatgtaattc

SEQ ID NO: 5946402 - DNA, 25 bp, Homo sapien
ggacgtttccaacgaatgttgggga

SEQ ID NO: 5946403 - DNA, 25 bp, Homo sapien
tgccatacttagtcactgaatttgt

SEQ ID NO: 5946404 - DNA, 25 bp, Homo sapien
catgattaaaaggaacaaatgaatt

SEQ ID NO: 5946405 - DNA, 25 bp, Homo sapien
acgatgacagttttctgaatatcac

SEQ ID NO: 5946406 - DNA, 25 bp, Homo sapien
tcccggcctggcatcgtttctttca

SEQ ID NO: 5946407 - DNA, 25 bp, Homo sapien
atctcattgctgttgacattattca

SEQ ID NO: 5946408 - DNA, 25 bp, Homo sapien
ttatttgaattcatctcattgctgt

SEQ ID NO: 5946409 - DNA, 25 bp, Homo sapien
ttattcattgagagcgctgtcacat

SEQ ID NO: 5946410 - DNA, 25 bp, Homo sapien
ttaatcccggcctggcatcgtttct

SEQ ID NO: 5946411 - DNA, 25 bp, Homo sapien
tagacattgatgacatcgagtcatt

SEQ ID NO: 5946412 - DNA, 25 bp, Homo sapien
tactcgcctgacctaaggtgttcat

SEQ ID NO: 5946413 - DNA, 25 bp, Homo sapien
tagggcttgttgctgtgactgttgg

SEQ ID NO: 5946414 - DNA, 25 bp, Homo sapien
ttggccaactgcagttcaatttggg

SEQ ID NO: 5946415 - DNA, 25 bp, Homo sapien
aatcccggcctggcatcgtttcttt

SEQ ID NO: 5946416 - DNA, 25 bp, Homo sapien
ccggcctggcatcgtttctttcacc

SEQ ID NO: 5946417 - DNA, 25 bp, Homo sapien
ttattcattggatccagccaataat

SEQ ID NO: 5946418 - DNA, 25 bp, Homo sapien
gacattgatgacatcgagtcattag

SEQ ID NO: 5946419 - DNA, 25 bp, Homo sapien
atgctcattctgcttgtagtttagc

SEQ ID NO: 5946420 - DNA, 25 bp, Homo sapien
gatgacagttttctgaatatcactt

SEQ ID NO: 5946421 - DNA, 25 bp, Homo sapien
agtgcagttaatatactttccagat

SEQ ID NO: 5946422 - DNA, 25 bp, Homo sapien
gcttccaaagatgcgattttttctc

SEQ ID NO: 5946423 - DNA, 25 bp, Homo sapien
attgagagcgctgtcacatgattaa

SEQ ID NO: 5946424 - DNA, 25 bp, Homo sapien
atattagacattgatgacatcgagt

SEQ ID NO: 5946425 - DNA, 25 bp, Homo sapien
attcccattagtatccttgttattt

SEQ ID NO: 5946426 - DNA, 25 bp, Homo sapien
ctaaggtgttcattaatcccggcct

SEQ ID NO: 5946427 - DNA, 25 bp, Homo sapien
attgaggttttagcggtcatattag

SEQ ID NO: 5946428 - DNA, 25 bp, Homo sapien
ctgccatatgctaacatcttggcca

SEQ ID NO: 5946429 - DNA, 25 bp, Homo sapien
taactccttttcctttgcatgcagt

SEQ ID NO: 5946430 - DNA, 25 bp, Homo sapien
gcatcgtttctttcaccagattcgt

SEQ ID NO: 5946431 - DNA, 25 bp, Homo sapien
ttctttcgtctctgctaactccttt

SEQ ID NO: 5946432 - DNA, 25 bp, Homo sapien
ctcttttgatctgccatatgctaac

SEQ ID NO: 5946433 - DNA, 25 bp, Homo sapien
attcattggatccagccaataatca

SEQ ID NO: 5946434 - DNA, 25 bp, Homo sapien
tattattcattggatccagccaata

SEQ ID NO: 5946435 - DNA, 25 bp, Homo sapien
ctgttggtggggatgaaatgccaaa

SEQ ID NO: 5946436 - DNA, 25 bp, Homo sapien
gtcatctttatttgaattcatctca

SEQ ID NO: 5946437 - DNA, 25 bp, Homo sapien
ctaacatcttggccatttctttgtt

SEQ ID NO: 5946438 - DNA, 25 bp, Homo sapien
ctggcaattcgaaagtttggggtat

SEQ ID NO: 5946439 - DNA, 25 bp, Homo sapien
gtacattctggtaattataggtatt

SEQ ID NO: 5946440 - DNA, 25 bp, Homo sapien
tcatctcattgctgttgacattatt

SEQ ID NO: 5946441 - DNA, 25 bp, Homo sapien
ttgttaagttttctaatcttaccac

SEQ ID NO: 5946442 - DNA, 25 bp, Homo sapien
caattcgaaagtttggggtatatgg

SEQ ID NO: 5946443 - DNA, 25 bp, Homo sapien
atgaattcttgaatgccgtactatt

SEQ ID NO: 5946444 - DNA, 25 bp, Homo sapien
tgaggttttagcggtcatattagac

SEQ ID NO: 5946445 - DNA, 25 bp, Homo sapien
attggatccagccaataatcattag

SEQ ID NO: 5946446 - DNA, 25 bp, Homo sapien
attcttgaatgccgtactattgatt

SEQ ID NO: 5946447 - DNA, 25 bp, Homo sapien
atgaaatgccaaattgttaaaggac

SEQ ID NO: 5946448 - DNA, 25 bp, Homo sapien
tccagccaataatcattagcagttg

SEQ ID NO: 5946449 - DNA, 25 bp, Homo sapien
ggcaattcgaaagtttggggtatat

SEQ ID NO: 5946450 - DNA, 25 bp, Homo sapien
ttagtcactgaatttgttggattta

SEQ ID NO: 5946451 - DNA, 25 bp, Homo sapien
gttgaaatttgttgtactgttcaag

SEQ ID NO: 5946452 - DNA, 25 bp, Homo sapien
agtcattaggattcccattagtatc

SEQ ID NO: 5946453 - DNA, 25 bp, Homo sapien
tttcctttgcatgcagtgacgatga

SEQ ID NO: 5946454 - DNA, 25 bp, Homo sapien
cgctgtcacatgattaaaaggaaca

SEQ ID NO: 5946455 - DNA, 25 bp, Homo sapien
ttgctgttgacattattcattgaga

SEQ ID NO: 5946456 - DNA, 25 bp, Homo sapien
tctgcttgtagtttagcccctcgtt

SEQ ID NO: 5946457 - DNA, 25 bp, Homo sapien
tgaatttcgttctcgagtgattcga

SEQ ID NO: 5946458 - DNA, 25 bp, Homo sapien
accagattcgtatagggcttgttgc

SEQ ID NO: 5946459 - DNA, 25 bp, Homo sapien
gggggcatgttgaaatttgttgtac

SEQ ID NO: 5946460 - DNA, 25 bp, Homo sapien
cttgtggtacattctggtaattata

SEQ ID NO: 5946461 - DNA, 25 bp, Homo sapien
agttttctgaatatcacttccaagg

SEQ ID NO: 5946462 - DNA, 25 bp, Homo sapien
gttgaaaattttctttagcctttga

SEQ ID NO: 5946463 - DNA, 25 bp, Homo sapien
agtcactgaatttgttggatttagc

SEQ ID NO: 5946464 - DNA, 25 bp, Homo sapien
gaatgccgtactattgattgaggtt

SEQ ID NO: 5946465 - DNA, 25 bp, Homo sapien
tcaagctatgttgacccgttaaggg

SEQ ID NO: 5946466 - DNA, 25 bp, Homo sapien
ctgtgactgttggtggggatgaaat

SEQ ID NO: 5946467 - DNA, 25 bp, Homo sapien
atactttccagattttctttcgtct

SEQ ID NO: 5946468 - DNA, 25 bp, Homo sapien
caataatcattagcagttgccccat

SEQ ID NO: 5946469 - DNA, 25 bp, Homo sapien
tatagggcttgttgctgtgactgtt

SEQ ID NO: 5946470 - DNA, 25 bp, Homo sapien
aagtttggggtatatggcagttttc

SEQ ID NO: 5946471 - DNA, 25 bp, Homo sapien
gggcttgttgctgtgactgttggtg

SEQ ID NO: 5946472 - DNA, 25 bp, Homo sapien
gatccagccaataatcattagcagt

SEQ ID NO: 5946473 - DNA, 25 bp, Homo sapien
cattttgtgagcaatcgattctgca

SEQ ID NO: 5946474 - DNA, 25 bp, Homo sapien
cattattcattgagagcgctgtcac

SEQ ID NO: 5946475 - DNA, 25 bp, Homo sapien
actttccagattttctttcgtctct

SEQ ID NO: 5946476 - DNA, 25 bp, Homo sapien
tgattgaggttttagcggtcatatt

SEQ ID NO: 5946477 - DNA, 25 bp, Homo sapien
ttctcatagatgcttgtggtacatt

SEQ ID NO: 5946478 - DNA, 25 bp, Homo sapien
cctggcatcgtttctttcaccagat

SEQ ID NO: 5946479 - DNA, 25 bp, Homo sapien
gccaaattgttaaaggacgtttcca

SEQ ID NO: 5946480 - DNA, 25 bp, Homo sapien
atttctcatagatgcttgtggtaca

SEQ ID NO: 5946481 - DNA, 25 bp, Homo sapien
tcattagcagttgccccattcatga

SEQ ID NO: 5946482 - DNA, 25 bp, Homo sapien
tttactcgcctgacctaaggtgttc

SEQ ID NO: 5946483 - DNA, 25 bp, Homo sapien
tgacagttttctgaatatcacttcc

SEQ ID NO: 5946484 - DNA, 25 bp, Homo sapien
tctcgagtgattcgatttgactttc

SEQ ID NO: 5946485 - DNA, 25 bp, Homo sapien
gaaatgccaaattgttaaaggacgt

SEQ ID NO: 5946486 - DNA, 25 bp, Homo sapien
tggcatcgtttctttcaccagattc

SEQ ID NO: 5946487 - DNA, 25 bp, Homo sapien
caacgtcctcctttgaagactcctt

SEQ ID NO: 5946488 - DNA, 25 bp, Homo sapien
gcagttgccccattcatgatattgt

SEQ ID NO: 5946489 - DNA, 25 bp, Homo sapien
tgcttgtagtttagcccctcgttga

SEQ ID NO: 5946490 - DNA, 25 bp, Homo sapien
gtattcattgatgggggcatgttga

SEQ ID NO: 5946491 - DNA, 25 bp, Homo sapien
taccaccattttgtgagcaatcgat

SEQ ID NO: 5946492 - DNA, 25 bp, Homo sapien
gttaagttttctaatcttaccacca

SEQ ID NO: 5946493 - DNA, 25 bp, Homo sapien
tcgagtgattcgatttgactttcct

SEQ ID NO: 5946494 - DNA, 25 bp, Homo sapien
ttgaattcatctcattgctgttgac

SEQ ID NO: 5946495 - DNA, 25 bp, Homo sapien
tgctaacatcttggccatttctttg

SEQ ID NO: 5946496 - DNA, 25 bp, Homo sapien
ttgtgagcaatcgattctgcatcat

SEQ ID NO: 5946497 - DNA, 25 bp, Homo sapien
gcatggaattattcattttactcgc

SEQ ID NO: 5946498 - DNA, 25 bp, Homo sapien
attttcttttttggccaactgcagt

SEQ ID NO: 5946499 - DNA, 25 bp, Homo sapien
atgggggcatgttgaaatttgttgt

SEQ ID NO: 5946500 - DNA, 25 bp, Homo sapien
atccttgttatttgtcatattattc

SEQ ID NO: 5946501 - DNA, 25 bp, Homo sapien
tggtacattctggtaattataggta

SEQ ID NO: 5946502 - DNA, 25 bp, Homo sapien
ttgagagtatttctcatagatgctt

SEQ ID NO: 5946503 - DNA, 25 bp, Homo sapien
tgacgatgacagttttctgaatatc

SEQ ID NO: 5946504 - DNA, 25 bp, Homo sapien
ctttcgtctctgctaactccttttc

SEQ ID NO: 5946505 - DNA, 25 bp, Homo sapien
cctgacctaaggtgttcattaatcc

SEQ ID NO: 5946506 - DNA, 25 bp, Homo sapien
ctagccgacgaaccttgaggaagca

SEQ ID NO: 5946507 - DNA, 25 bp, Homo sapien
tcaccagattcgtatagggcttgtt

SEQ ID NO: 5946508 - DNA, 25 bp, Homo sapien
gattgagagtatttctcatagatgc

SEQ ID NO: 5946509 - DNA, 25 bp, Homo sapien
ttcgtatagggcttgttgctgtgac

SEQ ID NO: 5946510 - DNA, 25 bp, Homo sapien
tttgaatttcgttctcgagtgattc

SEQ ID NO: 5946511 - DNA, 25 bp, Homo sapien
tctacttccaatgcttccattctgt

SEQ ID NO: 5946512 - DNA, 25 bp, Homo sapien
tgacctaaggtgttcattaatcccg

SEQ ID NO: 5946513 - DNA, 25 bp, Homo sapien
catatgctaacatcttggccatttc

SEQ ID NO: 5946514 - DNA, 25 bp, Homo sapien
attcgaaagtttggggtatatggca

SEQ ID NO: 5946515 - DNA, 25 bp, Homo sapien
ttgcatgcagtgacgatgacagttt

SEQ ID NO: 5946516 - DNA, 25 bp, Homo sapien
ccaccattttgtgagcaatcgattc

SEQ ID NO: 5946517 - DNA, 25 bp, Homo sapien
ttgggtctcttttgatctgccatat

SEQ ID NO: 5946518 - DNA, 25 bp, Homo sapien
ttataggtattcattgatgggggca

SEQ ID NO: 5946519 - DNA, 25 bp, Homo sapien
ttcgatttgactttcctttatttgt

SEQ ID NO: 5946520 - DNA, 25 bp, Homo sapien
gttcaagctatgttgacccgttaag

SEQ ID NO: 5946521 - DNA, 25 bp, Homo sapien
actgaatttgttggatttagcgcca

SEQ ID NO: 5946522 - DNA, 25 bp, Homo sapien
gaattcatctcattgctgttgacat

SEQ ID NO: 5946523 - DNA, 25 bp, Homo sapien
cgcctgacctaaggtgttcattaat

SEQ ID NO: 5946524 - DNA, 25 bp, Homo sapien
tgttaaaggacgtttccaacgaatg

SEQ ID NO: 5946525 - DNA, 25 bp, Homo sapien
taaaaggaacaaatgaattcttgaa

SEQ ID NO: 5946526 - DNA, 25 bp, Homo sapien
attaggattcccattagtatccttg

SEQ ID NO: 5946527 - DNA, 25 bp, Homo sapien
gtgattcgatttgactttcctttat

SEQ ID NO: 5946528 - DNA, 25 bp, Homo sapien
tccttttcctttgcatgcagtgacg

SEQ ID NO: 5946529 - DNA, 25 bp, Homo sapien
gttaatatactttccagattttctt

SEQ ID NO: 5946530 - DNA, 25 bp, Homo sapien
ttgtcatattattcattggatccag

SEQ ID NO: 5946531 - DNA, 25 bp, Homo sapien
cgccagtgcagttaatatactttcc

SEQ ID NO: 5946532 - DNA, 25 bp, Homo sapien
ctagattttcttttttggccaactg

SEQ ID NO: 5946533 - DNA, 25 bp, Homo sapien
attcattgagagcgctgtcacatga

SEQ ID NO: 5946534 - DNA, 25 bp, Homo sapien
acttatgctcattctgcttgtagtt

SEQ ID NO: 5946535 - DNA, 25 bp, Homo sapien
acattctggtaattataggtattca

SEQ ID NO: 5946536 - DNA, 25 bp, Homo sapien
tactattgattgaggttttagcggt

SEQ ID NO: 5946537 - DNA, 25 bp, Homo sapien
gggtctcttttgatctgccatatgc

SEQ ID NO: 5946538 - DNA, 25 bp, Homo sapien
tggcagttttccttctcatacttat

SEQ ID NO: 5946539 - DNA, 25 bp, Homo sapien
tctcatacttatgctcattctgctt

SEQ ID NO: 5946540 - DNA, 25 bp, Homo sapien
ttaagggactagccgacgaaccttg

SEQ ID NO: 5946541 - DNA, 25 bp, Homo sapien
gttgctgtgactgttggtggggatg

SEQ ID NO: 5946542 - DNA, 25 bp, Homo sapien
ggaattattcattttactcgcctga

SEQ ID NO: 5946543 - DNA, 25 bp, Homo sapien
cttttgatctgccatatgctaacat

SEQ ID NO: 5946544 - DNA, 25 bp, Homo sapien
tagcggtcatattagacattgatga

SEQ ID NO: 5946545 - DNA, 25 bp, Homo sapien
tttagcggtcatattagacattgat

SEQ ID NO: 5946546 - DNA, 25 bp, Homo sapien
ggcctggcatcgtttctttcaccag

SEQ ID NO: 5946547 - DNA, 25 bp, Homo sapien
ttgaagactcctttgaagccaaatg

SEQ ID NO: 5946548 - DNA, 25 bp, Homo sapien
aatttcgttctcgagtgattcgatt

SEQ ID NO: 5946549 - DNA, 25 bp, Homo sapien
agttgccccattcatgatattgtta

SEQ ID NO: 5946550 - DNA, 25 bp, Homo sapien
atgccgtactattgattgaggtttt

SEQ ID NO: 5946551 - DNA, 25 bp, Homo sapien
gaaagtttggggtatatggcagttt

SEQ ID NO: 5946552 - DNA, 25 bp, Homo sapien
gtctcttttgatctgccatatgcta

SEQ ID NO: 5946553 - DNA, 25 bp, Homo sapien
ttatgctcattctgcttgtagttta

SEQ ID NO: 5946554 - DNA, 25 bp, Homo sapien
atggaattattcattttactcgcct

SEQ ID NO: 5946555 - DNA, 25 bp, Homo sapien
ctcattgctgttgacattattcatt

SEQ ID NO: 5946556 - DNA, 25 bp, Homo sapien
tcctttgcatgcagtgacgatgaca

SEQ ID NO: 5946557 - DNA, 25 bp, Homo sapien
tgagagcgctgtcacatgattaaaa

SEQ ID NO: 5946558 - DNA, 25 bp, Homo sapien
atatcacttccaaggaagctggcaa

SEQ ID NO: 5946559 - DNA, 25 bp, Homo sapien
agttcaatttgggtctcttttgatc

SEQ ID NO: 5946560 - DNA, 25 bp, Homo sapien
gcatgcagtgacgatgacagttttc

SEQ ID NO: 5946561 - DNA, 25 bp, Homo sapien
atcgagtcattaggattcccattag

SEQ ID NO: 5946562 - DNA, 25 bp, Homo sapien
gtcatattattcattggatccagcc

SEQ ID NO: 5946563 - DNA, 25 bp, Homo sapien
catagatgcttgtggtacattctgg

SEQ ID NO: 5946564 - DNA, 25 bp, Homo sapien
tttctttcaccagattcgtataggg

SEQ ID NO: 5946565 - DNA, 25 bp, Homo sapien
attaaaaggaacaaatgaattcttg

SEQ ID NO: 5946566 - DNA, 25 bp, Homo sapien
gatgacatcgagtcattaggattcc

SEQ ID NO: 5946567 - DNA, 25 bp, Homo sapien
cgagtcattaggattcccattagta

SEQ ID NO: 5946568 - DNA, 25 bp, Homo sapien
cgtactattgattgaggttttagcg

SEQ ID NO: 5946569 - DNA, 25 bp, Homo sapien
gttctacttccaatgcttccattct

SEQ ID NO: 5946570 - DNA, 25 bp, Homo sapien
agccgacgaaccttgaggaagcatg

SEQ ID NO: 5946571 - DNA, 25 bp, Homo sapien
aatttgttggatttagcgccagtgc

SEQ ID NO: 5946572 - DNA, 25 bp, Homo sapien
cgtctctgctaactccttttccttt

SEQ ID NO: 5946573 - DNA, 25 bp, Homo sapien
atcgtttctttcaccagattcgtat

SEQ ID NO: 5946574 - DNA, 25 bp, Homo sapien
tgtagttctacttccaatgcttcca

SEQ ID NO: 5946575 - DNA, 25 bp, Homo sapien
taatatactttccagattttctttc

SEQ ID NO: 5946576 - DNA, 25 bp, Homo sapien
ccaacgaatgttggggatcataatc

SEQ ID NO: 5946577 - DNA, 25 bp, Homo sapien
ccaaagatgcgattttttctcttaa

SEQ ID NO: 5946578 - DNA, 25 bp, Homo sapien
agccaaatgggcttccaaagatgcg

SEQ ID NO: 5946579 - DNA, 25 bp, Homo sapien
cctcctttgaagactcctttgaagc

SEQ ID NO: 5946580 - DNA, 25 bp, Homo sapien
cttctcatacttatgctcattctgc

SEQ ID NO: 5946581 - DNA, 25 bp, Homo sapien
gagtatttctcatagatgcttgtgg

SEQ ID NO: 5946582 - DNA, 25 bp, Homo sapien
ggggtatatggcagttttccttctc

SEQ ID NO: 5946583 - DNA, 25 bp, Homo sapien
aggaagctggcaattcgaaagtttg

SEQ ID NO: 5946584 - DNA, 25 bp, Homo sapien
atcacttccaaggaagctggcaatt

SEQ ID NO: 5946585 - DNA, 25 bp, Homo sapien
gactgttggtggggatgaaatgcca

SEQ ID NO: 5946586 - DNA, 25 bp, Homo sapien
atattgttatgattgagagtatttc

SEQ ID NO: 5946587 - DNA, 25 bp, Homo sapien
gaacaaatgaattcttgaatgccgt

SEQ ID NO: 5946588 - DNA, 25 bp, Homo sapien
aatcgattctgcatcatacctgcca

SEQ ID NO: 5946589 - DNA, 25 bp, Homo sapien
caatgcttccattctgtcatcttta

SEQ ID NO: 5946590 - DNA, 25 bp, Homo sapien
tatgctaacatcttggccatttctt

SEQ ID NO: 5946591 - DNA, 25 bp, Homo sapien
tcatacttatgctcattctgcttgt

SEQ ID NO: 5946592 - DNA, 25 bp, Homo sapien
cagttaatatactttccagattttc

SEQ ID NO: 5946593 - DNA, 25 bp, Homo sapien
attttactcgcctgacctaaggtgt

SEQ ID NO: 5946594 - DNA, 25 bp, Homo sapien
caattgttgggggtcaaacgagttg

SEQ ID NO: 5946595 - DNA, 25 bp, Homo sapien
tcagaatattcctgggtgtgtccga

SEQ ID NO: 5946596 - DNA, 25 bp, Homo sapien
agtcattctagtgaccgttcggccg

SEQ ID NO: 5946597 - DNA, 25 bp, Homo sapien
gattttagagaaatattcgctatca

SEQ ID NO: 5946598 - DNA, 25 bp, Homo sapien
acaattgatgcagctatccatgata

SEQ ID NO: 5946599 - DNA, 25 bp, Homo sapien
ggtcaaacgagttgtaagctgccgg

SEQ ID NO: 5946600 - DNA, 25 bp, Homo sapien
taccgtgcattcccttcatgggcct

SEQ ID NO: 5946601 - DNA, 25 bp, Homo sapien
gcaacgtatggaccatcttctaagg

SEQ ID NO: 5946602 - DNA, 25 bp, Homo sapien
agaaaaatatgcctcagctaaattc

SEQ ID NO: 5946603 - DNA, 25 bp, Homo sapien
aggataagattgagcaatggaaagc

SEQ ID NO: 5946604 - DNA, 25 bp, Homo sapien
gtggtttcaacttggtattgatcca

SEQ ID NO: 5946605 - DNA, 25 bp, Homo sapien
acgctaataaatttacagatgctgg

SEQ ID NO: 5946606 - DNA, 25 bp, Homo sapien
ttgacatatgaagagcatgacaaga

SEQ ID NO: 5946607 - DNA, 25 bp, Homo sapien
aaaagttctttgagccaatgcttcc

SEQ ID NO: 5946608 - DNA, 25 bp, Homo sapien
tggaacaattgttgggggtcaaacg

SEQ ID NO: 5946609 - DNA, 25 bp, Homo sapien
taaatttacagatgctggatggggt

SEQ ID NO: 5946610 - DNA, 25 bp, Homo sapien
tagggaagaatattatgatgaactg

SEQ ID NO: 5946611 - DNA, 25 bp, Homo sapien
aacaattgcaagccagtgccgaatt

SEQ ID NO: 5946612 - DNA, 25 bp, Homo sapien
agtgcaacagaactatttagtttaa

SEQ ID NO: 5946613 - DNA, 25 bp, Homo sapien
aagcaagtttatttgacatatgaag

SEQ ID NO: 5946614 - DNA, 25 bp, Homo sapien
aacaaatggtacggtggcctagaaa

SEQ ID NO: 5946615 - DNA, 25 bp, Homo sapien
ggtcatttggtatccaggcaaagcg

SEQ ID NO: 5946616 - DNA, 25 bp, Homo sapien
gaccgttcggccgctgaaaaaagaa

SEQ ID NO: 5946617 - DNA, 25 bp, Homo sapien
catatgaagagcatgacaagattac

SEQ ID NO: 5946618 - DNA, 25 bp, Homo sapien
gcattggtaacagcaacaattgcaa

SEQ ID NO: 5946619 - DNA, 25 bp, Homo sapien
aaaaccattctgagtcattctagtg

SEQ ID NO: 5946620 - DNA, 25 bp, Homo sapien
ggatctgcgtgggcaaagataaaga

SEQ ID NO: 5946621 - DNA, 25 bp, Homo sapien
gctgatacacaagctgtgacacatg

SEQ ID NO: 5946622 - DNA, 25 bp, Homo sapien
cactaagaatctattcgaacaagtg

SEQ ID NO: 5946623 - DNA, 25 bp, Homo sapien
caacagaactatttagtttaatgat

SEQ ID NO: 5946624 - DNA, 25 bp, Homo sapien
gctatccatgataaatcattcataa

SEQ ID NO: 5946625 - DNA, 25 bp, Homo sapien
gctagagaatggagctcggttgttt

SEQ ID NO: 5946626 - DNA, 25 bp, Homo sapien
gcgacatcattaccgtgcattccct

SEQ ID NO: 5946627 - DNA, 25 bp, Homo sapien
ataaagatttatccttggactctgg

SEQ ID NO: 5946628 - DNA, 25 bp, Homo sapien
ggggtcaaacgagttgtaagctgcc

SEQ ID NO: 5946629 - DNA, 25 bp, Homo sapien
gtgaaagttaatatatcactaagaa

SEQ ID NO: 5946630 - DNA, 25 bp, Homo sapien
tctatagtgttgaagcatccaatat

SEQ ID NO: 5946631 - DNA, 25 bp, Homo sapien
atatacaaaaagcaatttcagagtg

SEQ ID NO: 5946632 - DNA, 25 bp, Homo sapien
gctaataaatttacagatgctggat

SEQ ID NO: 5946633 - DNA, 25 bp, Homo sapien
caatggaaagccacaaaagtcattg

SEQ ID NO: 5946634 - DNA, 25 bp, Homo sapien
aagtaagcaagtttatttgacatat

SEQ ID NO: 5946635 - DNA, 25 bp, Homo sapien
atacaaaaagcaatttcagagtgtt

SEQ ID NO: 5946636 - DNA, 25 bp, Homo sapien
attaccgtgcattcccttcatgggc

SEQ ID NO: 5946637 - DNA, 25 bp, Homo sapien
atcttctaaggttggaacaattgtt

SEQ ID NO: 5946638 - DNA, 25 bp, Homo sapien
tctcattggcaacgagatgataaaa

SEQ ID NO: 5946639 - DNA, 25 bp, Homo sapien
gaacaagtggcatgtttacgcagga

SEQ ID NO: 5946640 - DNA, 25 bp, Homo sapien
tattatacgctaataaatttacaga

SEQ ID NO: 5946641 - DNA, 25 bp, Homo sapien
gctatcaaaaagcagcattggtaac

SEQ ID NO: 5946642 - DNA, 25 bp, Homo sapien
gacatatgaagagcatgacaagatt

SEQ ID NO: 5946643 - DNA, 25 bp, Homo sapien
tgagtcattctagtgaccgttcggc

SEQ ID NO: 5946644 - DNA, 25 bp, Homo sapien
tggtaacagcaacaattgcaagcca

SEQ ID NO: 5946645 - DNA, 25 bp, Homo sapien
aagcgactatattatctatagtgtt

SEQ ID NO: 5946646 - DNA, 25 bp, Homo sapien
ttagaatttgttatttcggctagag

SEQ ID NO: 5946647 - DNA, 25 bp, Homo sapien
ccgctgatacacaagctgtgacaca

SEQ ID NO: 5946648 - DNA, 25 bp, Homo sapien
atccaatattagtaagatcgtcgca

SEQ ID NO: 5946649 - DNA, 25 bp, Homo sapien
gagtgttcaaaagttctttgagcca

SEQ ID NO: 5946650 - DNA, 25 bp, Homo sapien
ttcttttgccaattttgatatatac

SEQ ID NO: 5946651 - DNA, 25 bp, Homo sapien
gcaagtttatttgacatatgaagag

SEQ ID NO: 5946652 - DNA, 25 bp, Homo sapien
gtgatatgggcctattatacgctaa

SEQ ID NO: 5946653 - DNA, 25 bp, Homo sapien
acaagctgtgacacatgctgctttc

SEQ ID NO: 5946654 - DNA, 25 bp, Homo sapien
gttggcgattgttgattcgtggttt

SEQ ID NO: 5946655 - DNA, 25 bp, Homo sapien
ggttgtttcttttgccaattttgat

SEQ ID NO: 5946656 - DNA, 25 bp, Homo sapien
atttggtatccaggcaaagcgacta

SEQ ID NO: 5946657 - DNA, 25 bp, Homo sapien
agataaagatttatccttggactct

SEQ ID NO: 5946658 - DNA, 25 bp, Homo sapien
actgaaagaaaaatatgcctcagct

SEQ ID NO: 5946659 - DNA, 25 bp, Homo sapien
aaaacctggcttattagaacagaca

SEQ ID NO: 5946660 - DNA, 25 bp, Homo sapien
tggatgacacgattttagagaaata

SEQ ID NO: 5946661 - DNA, 25 bp, Homo sapien
tatgggcctattatacgctaataaa

SEQ ID NO: 5946662 - DNA, 25 bp, Homo sapien
gggtgatatgggcctattatacgct

SEQ ID NO: 5946663 - DNA, 25 bp, Homo sapien
ctgcgacatcattaccgtgcattcc

SEQ ID NO: 5946664 - DNA, 25 bp, Homo sapien
tcggttgtttcttttgccaattttg

SEQ ID NO: 5946665 - DNA, 25 bp, Homo sapien
atgataaaaaccattctgagtcatt

SEQ ID NO: 5946666 - DNA, 25 bp, Homo sapien
attaaaagctaagcaatttgtattt

SEQ ID NO: 5946667 - DNA, 25 bp, Homo sapien
agaatattatgatgaactgaaagaa

SEQ ID NO: 5946668 - DNA, 25 bp, Homo sapien
cccagaatcttttgagttcgttaat

SEQ ID NO: 5946669 - DNA, 25 bp, Homo sapien
cgaactggtgaaaaatggtcatttg

SEQ ID NO: 5946670 - DNA, 25 bp, Homo sapien
gcatccaatattagtaagatcgtcg

SEQ ID NO: 5946671 - DNA, 25 bp, Homo sapien
gcaacgagatgataaaaaccattct

SEQ ID NO: 5946672 - DNA, 25 bp, Homo sapien
tattagtaagatcgtcgcaacgtat

SEQ ID NO: 5946673 - DNA, 25 bp, Homo sapien
tatggcatgtttgaaaagtaagcaa

SEQ ID NO: 5946674 - DNA, 25 bp, Homo sapien
tggaccatcttctaaggttggaaca

SEQ ID NO: 5946675 - DNA, 25 bp, Homo sapien
gctgctttcttaagtatgggatctg

SEQ ID NO: 5946676 - DNA, 25 bp, Homo sapien
tatccatgataaatcattcataaaa

SEQ ID NO: 5946677 - DNA, 25 bp, Homo sapien
gaaaagtatttacccaaggactgcg

SEQ ID NO: 5946678 - DNA, 25 bp, Homo sapien
ggattagccataacaaacccaagtg

SEQ ID NO: 5946679 - DNA, 25 bp, Homo sapien
aagttctttgagccaatgcttccag

SEQ ID NO: 5946680 - DNA, 25 bp, Homo sapien
tgacacatgctgctttcttaagtat

SEQ ID NO: 5946681 - DNA, 25 bp, Homo sapien
caatcacagatcacagtacccagaa

SEQ ID NO: 5946682 - DNA, 25 bp, Homo sapien
tcatatgatttgttcgacgccatta

SEQ ID NO: 5946683 - DNA, 25 bp, Homo sapien
ccttggactctgggtgtaaacaaat

SEQ ID NO: 5946684 - DNA, 25 bp, Homo sapien
ttcagagtgttcaaaagttctttga

SEQ ID NO: 5946685 - DNA, 25 bp, Homo sapien
tatagtgttgaagcatccaatatta

SEQ ID NO: 5946686 - DNA, 25 bp, Homo sapien
gccataacaaacccaagtgcacatc

SEQ ID NO: 5946687 - DNA, 25 bp, Homo sapien
atatatcactaagaatctattcgaa

SEQ ID NO: 5946688 - DNA, 25 bp, Homo sapien
tgagcaatggaaagccacaaaagtc

SEQ ID NO: 5946689 - DNA, 25 bp, Homo sapien
tatctatagtgttgaagcatccaat

SEQ ID NO: 5946690 - DNA, 25 bp, Homo sapien
gatgacacgattttagagaaatatt

SEQ ID NO: 5946691 - DNA, 25 bp, Homo sapien
ctgcgtgggcaaagataaagattta

SEQ ID NO: 5946692 - DNA, 25 bp, Homo sapien
gagcatgacaagattaccgctgata

SEQ ID NO: 5946693 - DNA, 25 bp, Homo sapien
ttcctgggtgtgtccgaatatcttt

SEQ ID NO: 5946694 - DNA, 25 bp, Homo sapien
agaacttactgatagactattaaaa

SEQ ID NO: 5946695 - DNA, 25 bp, Homo sapien
agtatttacccaaggactgcgacat

SEQ ID NO: 5946696 - DNA, 25 bp, Homo sapien
agtaagatcgtcgcaacgtatggac

SEQ ID NO: 5946697 - DNA, 25 bp, Homo sapien
ccaagtgcacatcagcaaattcttc

SEQ ID NO: 5946698 - DNA, 25 bp, Homo sapien
gacaagattaccgctgatacacaag

SEQ ID NO: 5946699 - DNA, 25 bp, Homo sapien
tgggcctattatacgctaataaatt

SEQ ID NO: 5946700 - DNA, 25 bp, Homo sapien
atccatatgatcatatgatttgttc

SEQ ID NO: 5946701 - DNA, 25 bp, Homo sapien
tgcaagccagtgccgaattcacatt

SEQ ID NO: 5946702 - DNA, 25 bp, Homo sapien
ccagtgccgaattcacatttatcat

SEQ ID NO: 5946703 - DNA, 25 bp, Homo sapien
tgaaaagtaagcaagtttatttgac

SEQ ID NO: 5946704 - DNA, 25 bp, Homo sapien
gatgatttagaatttgttatttcgg

SEQ ID NO: 5946705 - DNA, 25 bp, Homo sapien
gtgttgaagcatccaatattagtaa

SEQ ID NO: 5946706 - DNA, 25 bp, Homo sapien
gttatggcatgtttgaaaagtaagc

SEQ ID NO: 5946707 - DNA, 25 bp, Homo sapien
atccttggactctgggtgtaaacaa

SEQ ID NO: 5946708 - DNA, 25 bp, Homo sapien
taaacaaatggtacggtggcctaga

SEQ ID NO: 5946709 - DNA, 25 bp, Homo sapien
attcacatttatcattgttggcgat

SEQ ID NO: 5946710 - DNA, 25 bp, Homo sapien
ctaagaatctattcgaacaagtggc

SEQ ID NO: 5946711 - DNA, 25 bp, Homo sapien
aagtcattggtataattggtctggg

SEQ ID NO: 5946712 - DNA, 25 bp, Homo sapien
gaccatcttctaaggttggaacaat

SEQ ID NO: 5946713 - DNA, 25 bp, Homo sapien
cttctaaggttggaacaattgttgg

SEQ ID NO: 5946714 - DNA, 25 bp, Homo sapien
attagccataacaaacccaagtgca

SEQ ID NO: 5946715 - DNA, 25 bp, Homo sapien
ggtataattggtctgggtgatatgg

SEQ ID NO: 5946716 - DNA, 25 bp, Homo sapien
cggaaatcgaggctttcgaaaagta

SEQ ID NO: 5946717 - DNA, 25 bp, Homo sapien
acaagtggcatgtttacgcaggatt

SEQ ID NO: 5946718 - DNA, 25 bp, Homo sapien
ggctaatctcattggcaacgagatg

SEQ ID NO: 5946719 - DNA, 25 bp, Homo sapien
atcactaagaatctattcgaacaag

SEQ ID NO: 5946720 - DNA, 25 bp, Homo sapien
aaaaagcaatttcagagtgttcaaa

SEQ ID NO: 5946721 - DNA, 25 bp, Homo sapien
aacttactgatagactattaaaagc

SEQ ID NO: 5946722 - DNA, 25 bp, Homo sapien
agccagtgccgaattcacatttatc

SEQ ID NO: 5946723 - DNA, 25 bp, Homo sapien
tataattggtctgggtgatatgggc

SEQ ID NO: 5946724 - DNA, 25 bp, Homo sapien
atgatcatatgatttgttcgacgcc

SEQ ID NO: 5946725 - DNA, 25 bp, Homo sapien
aaagcagcattggtaacagcaacaa

SEQ ID NO: 5946726 - DNA, 25 bp, Homo sapien
ttcggccgctgaaaaaagaaataca

SEQ ID NO: 5946727 - DNA, 25 bp, Homo sapien
atcgtcgcaacgtatggaccatctt

SEQ ID NO: 5946728 - DNA, 25 bp, Homo sapien
taagtatgggatctgcgtgggcaaa

SEQ ID NO: 5946729 - DNA, 25 bp, Homo sapien
acagaactatttagtttaatgatag

SEQ ID NO: 5946730 - DNA, 25 bp, Homo sapien
tatttacccaaggactgcgacatca

SEQ ID NO: 5946731 - DNA, 25 bp, Homo sapien
cgttcggccgctgaaaaaagaaata

SEQ ID NO: 5946732 - DNA, 25 bp, Homo sapien
gtaacagcaacaattgcaagccagt

SEQ ID NO: 5946733 - DNA, 25 bp, Homo sapien
aagcatactggtctcttactattgg

SEQ ID NO: 5946734 - DNA, 25 bp, Homo sapien
gaacaattgttgggggtcaaacgag

SEQ ID NO: 5946735 - DNA, 25 bp, Homo sapien
taacaaagaacaagaacttactgat

SEQ ID NO: 5946736 - DNA, 25 bp, Homo sapien
aatcgaggctttcgaaaagtattta

SEQ ID NO: 5946737 - DNA, 25 bp, Homo sapien
cctaaagttaatactgaaggccaac

SEQ ID NO: 5946738 - DNA, 25 bp, Homo sapien
tgatagataacaaagaacaagaact

SEQ ID NO: 5946739 - DNA, 25 bp, Homo sapien
ctggtgaaaaatggtcatttggtat

SEQ ID NO: 5946740 - DNA, 25 bp, Homo sapien
tttacgcaggattagccataacaaa

SEQ ID NO: 5946741 - DNA, 25 bp, Homo sapien
atatgatcatatgatttgttcgacg

SEQ ID NO: 5946742 - DNA, 25 bp, Homo sapien
gtgttcaaaagttctttgagccaat

SEQ ID NO: 5946743 - DNA, 25 bp, Homo sapien
tgaagcatccaatattagtaagatc

SEQ ID NO: 5946744 - DNA, 25 bp, Homo sapien
cgacgccattattcagaatattcct

SEQ ID NO: 5946745 - DNA, 25 bp, Homo sapien
cgtatggaccatcttctaaggttgg

SEQ ID NO: 5946746 - DNA, 25 bp, Homo sapien
ctgggtgatatgggcctattatacg

SEQ ID NO: 5946747 - DNA, 25 bp, Homo sapien
gtgcattcccttcatgggcctaaag

SEQ ID NO: 5946748 - DNA, 25 bp, Homo sapien
aaccactagttattatcaatcacag

SEQ ID NO: 5946749 - DNA, 25 bp, Homo sapien
ttattagaacagacaattgatgcag

SEQ ID NO: 5946750 - DNA, 25 bp, Homo sapien
taaattcgaactggtgaaaaatggt

SEQ ID NO: 5946751 - DNA, 25 bp, Homo sapien
ctaagcaatttgtatttggaaagca

SEQ ID NO: 5946752 - DNA, 25 bp, Homo sapien
agaatattcctgggtgtgtccgaat

SEQ ID NO: 5946753 - DNA, 25 bp, Homo sapien
ggtgtgtccgaatatctttttttaa

SEQ ID NO: 5946754 - DNA, 25 bp, Homo sapien
tgaaaaatggtcatttggtatccag

SEQ ID NO: 5946755 - DNA, 25 bp, Homo sapien
tgttcgacgccattattcagaatat

SEQ ID NO: 5946756 - DNA, 25 bp, Homo sapien
ttgttgggggtcaaacgagttgtaa

SEQ ID NO: 5946757 - DNA, 25 bp, Homo sapien
tatgaagagcatgacaagattaccg

SEQ ID NO: 5946758 - DNA, 25 bp, Homo sapien
aatgcttccagaggctaatctcatt

SEQ ID NO: 5946759 - DNA, 25 bp, Homo sapien
agcagcattggtaacagcaacaatt

SEQ ID NO: 5946760 - DNA, 25 bp, Homo sapien
ttctgttatggcatgtttgaaaagt

SEQ ID NO: 5946761 - DNA, 25 bp, Homo sapien
tcgtggtttcaacttggtattgatc

SEQ ID NO: 5946762 - DNA, 25 bp, Homo sapien
agatttatccttggactctgggtgt

SEQ ID NO: 5946763 - DNA, 25 bp, Homo sapien
attggcaacgagatgataaaaacca

SEQ ID NO: 5946764 - DNA, 25 bp, Homo sapien
cattgttggcgattgttgattcgtg

SEQ ID NO: 5946765 - DNA, 25 bp, Homo sapien
tgtgacacatgctgctttcttaagt

SEQ ID NO: 5946766 - DNA, 25 bp, Homo sapien
cagatcacagtacccagaatctttt

SEQ ID NO: 5946767 - DNA, 25 bp, Homo sapien
gttaatactgaaggccaaccactag

SEQ ID NO: 5946768 - DNA, 25 bp, Homo sapien
cccaaggactgcgacatcattaccg

SEQ ID NO: 5946769 - DNA, 25 bp, Homo sapien
tgacacgattttagagaaatattcg

SEQ ID NO: 5946770 - DNA, 25 bp, Homo sapien
atatgatttgttcgacgccattatt

SEQ ID NO: 5946771 - DNA, 25 bp, Homo sapien
attgagcaatggaaagccacaaaag

SEQ ID NO: 5946772 - DNA, 25 bp, Homo sapien
caaagcgactatattatctatagtg

SEQ ID NO: 5946773 - DNA, 25 bp, Homo sapien
gcaacaattgcaagccagtgccgaa

SEQ ID NO: 5946774 - DNA, 25 bp, Homo sapien
caaggactgcgacatcattaccgtg

SEQ ID NO: 5946775 - DNA, 25 bp, Homo sapien
gcgactatattatctatagtgttga

SEQ ID NO: 5946776 - DNA, 25 bp, Homo sapien
tggtacggtggcctagaaaatgtga

SEQ ID NO: 5946777 - DNA, 25 bp, Homo sapien
tgcaacagaactatttagtttaatg

SEQ ID NO: 5946778 - DNA, 25 bp, Homo sapien
caatatgcaaccagtgcaacagaac

SEQ ID NO: 5946779 - DNA, 25 bp, Homo sapien
gaaatcgaggctttcgaaaagtatt

SEQ ID NO: 5946780 - DNA, 25 bp, Homo sapien
aaaaatggtcatttggtatccaggc

SEQ ID NO: 5946781 - DNA, 25 bp, Homo sapien
ggtttcaacttggtattgatccata

SEQ ID NO: 5946782 - DNA, 25 bp, Homo sapien
taattggtctgggtgatatgggcct

SEQ ID NO: 5946783 - DNA, 25 bp, Homo sapien
ctaatctcattggcaacgagatgat

SEQ ID NO: 5946784 - DNA, 25 bp, Homo sapien
gaatctattcgaacaagtggcatgt

SEQ ID NO: 5946785 - DNA, 25 bp, Homo sapien
tcattctagtgaccgttcggccgct

SEQ ID NO: 5946786 - DNA, 25 bp, Homo sapien
atatatacaaaaagcaatttcagag

SEQ ID NO: 5946787 - DNA, 25 bp, Homo sapien
catgtttacgcaggattagccataa

SEQ ID NO: 5946788 - DNA, 25 bp, Homo sapien
ctattggatgacacgattttagaga

SEQ ID NO: 5946789 - DNA, 25 bp, Homo sapien
gccattattcagaatattcctgggt

SEQ ID NO: 5946790 - DNA, 25 bp, Homo sapien
gctgtgacacatgctgctttcttaa

SEQ ID NO: 5946791 - DNA, 25 bp, Homo sapien
attcgaacaagtggcatgtttacgc

SEQ ID NO: 5946792 - DNA, 25 bp, Homo sapien
catgggcctaaagttaatactgaag

SEQ ID NO: 5946793 - DNA, 25 bp, Homo sapien
taaagttaatactgaaggccaacca

SEQ ID NO: 5946794 - DNA, 25 bp, Homo sapien
gtttcttttgccaattttgatatat

SEQ ID NO: 5946795 - DNA, 25 bp, Homo sapien
tactgatagactattaaaagctaag

SEQ ID NO: 5946796 - DNA, 25 bp, Homo sapien
tatttggaaagcatactggtctctt

SEQ ID NO: 5946797 - DNA, 25 bp, Homo sapien
tcaaaaagcagcattggtaacagca

SEQ ID NO: 5946798 - DNA, 25 bp, Homo sapien
cagagtgttcaaaagttctttgagc

SEQ ID NO: 5946799 - DNA, 25 bp, Homo sapien
atttcagagtgttcaaaagttcttt

SEQ ID NO: 5946800 - DNA, 25 bp, Homo sapien
cagctaaattcgaactggtgaaaaa

SEQ ID NO: 5946801 - DNA, 25 bp, Homo sapien
attgcaagccagtgccgaattcaca

SEQ ID NO: 5946802 - DNA, 25 bp, Homo sapien
agcaatttcagagtgttcaaaagtt

SEQ ID NO: 5946803 - DNA, 25 bp, Homo sapien
tcacagtacccagaatcttttgagt

SEQ ID NO: 5946804 - DNA, 25 bp, Homo sapien
gcatgacaagattaccgctgataca

SEQ ID NO: 5946805 - DNA, 25 bp, Homo sapien
gtctgggtgatatgggcctattata

SEQ ID NO: 5946806 - DNA, 25 bp, Homo sapien
cgtcgcaacgtatggaccatcttct

SEQ ID NO: 5946807 - DNA, 25 bp, Homo sapien
atgatttgttcgacgccattattca

SEQ ID NO: 5946808 - DNA, 25 bp, Homo sapien
tgtgtccgaatatctttttttaaaa

SEQ ID NO: 5946809 - DNA, 25 bp, Homo sapien
tgttatttcggctagagaatggagc

SEQ ID NO: 5946810 - DNA, 25 bp, Homo sapien
tgccgaattcacatttatcattgtt

SEQ ID NO: 5946811 - DNA, 25 bp, Homo sapien
aacgtatggaccatcttctaaggtt

SEQ ID NO: 5946812 - DNA, 25 bp, Homo sapien
tctttgagccaatgcttccagaggc

SEQ ID NO: 5946813 - DNA, 25 bp, Homo sapien
agcaatggaaagccacaaaagtcat

SEQ ID NO: 5946814 - DNA, 25 bp, Homo sapien
aaaagtaagcaagtttatttgacat

SEQ ID NO: 5946815 - DNA, 25 bp, Homo sapien
aaacgagttgtaagctgccggaaat

SEQ ID NO: 5946816 - DNA, 25 bp, Homo sapien
atttcggctagagaatggagctcgg

SEQ ID NO: 5946817 - DNA, 25 bp, Homo sapien
tcatttggtatccaggcaaagcgac

SEQ ID NO: 5946818 - DNA, 25 bp, Homo sapien
aacaagaacttactgatagactatt

SEQ ID NO: 5946819 - DNA, 25 bp, Homo sapien
aagagcatgacaagattaccgctga

SEQ ID NO: 5946820 - DNA, 25 bp, Homo sapien
tttgttcgacgccattattcagaat

SEQ ID NO: 5946821 - DNA, 25 bp, Homo sapien
tggtattgatccatatgatcatatg

SEQ ID NO: 5946822 - DNA, 25 bp, Homo sapien
actctgggtgtaaacaaatggtacg

SEQ ID NO: 5946823 - DNA, 25 bp, Homo sapien
tcgaaaagtatttacccaaggactg

SEQ ID NO: 5946824 - DNA, 25 bp, Homo sapien
cttggtattgatccatatgatcata

SEQ ID NO: 5946825 - DNA, 25 bp, Homo sapien
gatagggaagaatattatgatgaac

SEQ ID NO: 5946826 - DNA, 25 bp, Homo sapien
ttgatgcagctatccatgataaatc

SEQ ID NO: 5946827 - DNA, 25 bp, Homo sapien
agaatttgttatttcggctagagaa

SEQ ID NO: 5946828 - DNA, 25 bp, Homo sapien
aacttggtattgatccatatgatca

SEQ ID NO: 5946829 - DNA, 25 bp, Homo sapien
tgaaggccaaccactagttattatc

SEQ ID NO: 5946830 - DNA, 25 bp, Homo sapien
atcttttgagttcgttaattctgtt

SEQ ID NO: 5946831 - DNA, 25 bp, Homo sapien
aaatatgcctcagctaaattcgaac

SEQ ID NO: 5946832 - DNA, 25 bp, Homo sapien
aaattcttcaatatgcaaccagtgc

SEQ ID NO: 5946833 - DNA, 25 bp, Homo sapien
tgtatttggaaagcatactggtctc

SEQ ID NO: 5946834 - DNA, 25 bp, Homo sapien
aactggtgaaaaatggtcatttggt

SEQ ID NO: 5946835 - DNA, 25 bp, Homo sapien
taaaaaccattctgagtcattctag

SEQ ID NO: 5946836 - DNA, 25 bp, Homo sapien
aagcatccaatattagtaagatcgt

SEQ ID NO: 5946837 - DNA, 25 bp, Homo sapien
ttatacgctaataaatttacagatg

SEQ ID NO: 5946838 - DNA, 25 bp, Homo sapien
acgattttagagaaatattcgctat

SEQ ID NO: 5946839 - DNA, 25 bp, Homo sapien
tggtctcttactattggatgacacg

SEQ ID NO: 5946840 - DNA, 25 bp, Homo sapien
gttaatatatcactaagaatctatt

SEQ ID NO: 5946841 - DNA, 25 bp, Homo sapien
atgcaaccagtgcaacagaactatt

SEQ ID NO: 5946842 - DNA, 25 bp, Homo sapien
gctaaattcgaactggtgaaaaatg

SEQ ID NO: 5946843 - DNA, 25 bp, Homo sapien
gaggctttcgaaaagtatttaccca

SEQ ID NO: 5946844 - DNA, 25 bp, Homo sapien
tcgaggctttcgaaaagtatttacc

SEQ ID NO: 5946845 - DNA, 25 bp, Homo sapien
ttggtatccaggcaaagcgactata

SEQ ID NO: 5946846 - DNA, 25 bp, Homo sapien
ttttaaaacctggcttattagaaca

SEQ ID NO: 5946847 - DNA, 25 bp, Homo sapien
gttctttgagccaatgcttccagag

SEQ ID NO: 5946848 - DNA, 25 bp, Homo sapien
ttcatgggcctaaagttaatactga

SEQ ID NO: 5946849 - DNA, 25 bp, Homo sapien
ttggactctgggtgtaaacaaatgg

SEQ ID NO: 5946850 - DNA, 25 bp, Homo sapien
attatctatagtgttgaagcatcca

SEQ ID NO: 5946851 - DNA, 25 bp, Homo sapien
gtgaccgttcggccgctgaaaaaag

SEQ ID NO: 5946852 - DNA, 25 bp, Homo sapien
attggatgacacgattttagagaaa

SEQ ID NO: 5946853 - DNA, 25 bp, Homo sapien
tccagaggctaatctcattggcaac

SEQ ID NO: 5946854 - DNA, 25 bp, Homo sapien
cattggtataattggtctgggtgat

SEQ ID NO: 5946855 - DNA, 25 bp, Homo sapien
aaggccaaccactagttattatcaa

SEQ ID NO: 5946856 - DNA, 25 bp, Homo sapien
taatatatcactaagaatctattcg

SEQ ID NO: 5946857 - DNA, 25 bp, Homo sapien
agacaattgatgcagctatccatga

SEQ ID NO: 5946858 - DNA, 25 bp, Homo sapien
attcagaatattcctgggtgtgtcc

SEQ ID NO: 5946859 - DNA, 25 bp, Homo sapien
gtctcttactattggatgacacgat

SEQ ID NO: 5946860 - DNA, 25 bp, Homo sapien
aatttgtatttggaaagcatactgg

SEQ ID NO: 5946861 - DNA, 25 bp, Homo sapien
taatactgaaggccaaccactagtt

SEQ ID NO: 5946862 - DNA, 25 bp, Homo sapien
ttagtaagatcgtcgcaacgtatgg

SEQ ID NO: 5946863 - DNA, 25 bp, Homo sapien
tgagccaatgcttccagaggctaat

SEQ ID NO: 5946864 - DNA, 25 bp, Homo sapien
acatttatcattgttggcgattgtt

SEQ ID NO: 5946865 - DNA, 25 bp, Homo sapien
atattcgctatcaaaaagcagcatt

SEQ ID NO: 5946866 - DNA, 25 bp, Homo sapien
cgcaggattagccataacaaaccca

SEQ ID NO: 5946867 - DNA, 25 bp, Homo sapien
ttagagaaatattcgctatcaaaaa

SEQ ID NO: 5946868 - DNA, 25 bp, Homo sapien
tcacatttatcattgttggcgattg

SEQ ID NO: 5946869 - DNA, 25 bp, Homo sapien
tatcaaaaagcagcattggtaacag

SEQ ID NO: 5946870 - DNA, 25 bp, Homo sapien
ttatatgttgtgatagggaagaata

SEQ ID NO: 5946871 - DNA, 25 bp, Homo sapien
gaggctaatctcattggcaacgaga

SEQ ID NO: 5946872 - DNA, 25 bp, Homo sapien
ggccaaccactagttattatcaatc

SEQ ID NO: 5946873 - DNA, 25 bp, Homo sapien
gtggcatgtttacgcaggattagcc

SEQ ID NO: 5946874 - DNA, 25 bp, Homo sapien
caagaacttactgatagactattaa

SEQ ID NO: 5946875 - DNA, 25 bp, Homo sapien
gtttatttgacatatgaagagcatg

SEQ ID NO: 5946876 - DNA, 25 bp, Homo sapien
gatatgggcctattatacgctaata

SEQ ID NO: 5946877 - DNA, 25 bp, Homo sapien
tttgttatttcggctagagaatgga

SEQ ID NO: 5946878 - DNA, 25 bp, Homo sapien
actagttattatcaatcacagatca

SEQ ID NO: 5946879 - DNA, 25 bp, Homo sapien
acacaagctgtgacacatgctgctt

SEQ ID NO: 5946880 - DNA, 25 bp, Homo sapien
atcacagatcacagtacccagaatc

SEQ ID NO: 5946881 - DNA, 25 bp, Homo sapien
gcgattgttgattcgtggtttcaac

SEQ ID NO: 5946882 - DNA, 25 bp, Homo sapien
tggcctagaaaatgtgaaagttaat

SEQ ID NO: 5946883 - DNA, 25 bp, Homo sapien
acaaaagtcattggtataattggtc

SEQ ID NO: 5946884 - DNA, 25 bp, Homo sapien
agagaaatattcgctatcaaaaagc

SEQ ID NO: 5946885 - DNA, 25 bp, Homo sapien
aagttaatatatcactaagaatcta

SEQ ID NO: 5946886 - DNA, 25 bp, Homo sapien
gacatcattaccgtgcattcccttc

SEQ ID NO: 5946887 - DNA, 25 bp, Homo sapien
catcattaccgtgcattcccttcat

SEQ ID NO: 5946888 - DNA, 25 bp, Homo sapien
tgattcgtggtttcaacttggtatt

SEQ ID NO: 5946889 - DNA, 25 bp, Homo sapien
ttaattctgttatggcatgtttgaa

SEQ ID NO: 5946890 - DNA, 25 bp, Homo sapien
aatttgttatttcggctagagaatg

SEQ ID NO: 5946891 - DNA, 25 bp, Homo sapien
taataaatttacagatgctggatgg

SEQ ID NO: 5946892 - DNA, 25 bp, Homo sapien
ttcgaactggtgaaaaatggtcatt

SEQ ID NO: 5946893 - DNA, 25 bp, Homo sapien
tttggaaagcatactggtctcttac

SEQ ID NO: 5946894 - DNA, 25 bp, Homo sapien
agccaatgcttccagaggctaatct

SEQ ID NO: 5946895 - DNA, 25 bp, Homo sapien
tagtgaccgttcggccgctgaaaaa

SEQ ID NO: 5946896 - DNA, 25 bp, Homo sapien
tggaaagcatactggtctcttacta

SEQ ID NO: 5946897 - DNA, 25 bp, Homo sapien
tcaaaagttctttgagccaatgctt

SEQ ID NO: 5946898 - DNA, 25 bp, Homo sapien
attgatccatatgatcatatgattt

SEQ ID NO: 5946899 - DNA, 25 bp, Homo sapien
acgagttgtaagctgccggaaatcg

SEQ ID NO: 5946900 - DNA, 25 bp, Homo sapien
tgggatctgcgtgggcaaagataaa

SEQ ID NO: 5946901 - DNA, 25 bp, Homo sapien
gcctcagctaaattcgaactggtga

SEQ ID NO: 5946902 - DNA, 25 bp, Homo sapien
acatgctgctttcttaagtatggga

SEQ ID NO: 5946903 - DNA, 25 bp, Homo sapien
actggtctcttactattggatgaca

SEQ ID NO: 5946904 - DNA, 25 bp, Homo sapien
gactgcgacatcattaccgtgcatt

SEQ ID NO: 5946905 - DNA, 25 bp, Homo sapien
tggcgattgttgattcgtggtttca

SEQ ID NO: 5946906 - DNA, 25 bp, Homo sapien
gttcaaaagttctttgagccaatgc

SEQ ID NO: 5946907 - DNA, 25 bp, Homo sapien
ctgttatggcatgtttgaaaagtaa

SEQ ID NO: 5946908 - DNA, 25 bp, Homo sapien
aaagaacaagaacttactgatagac

SEQ ID NO: 5946909 - DNA, 25 bp, Homo sapien
gtcattggtataattggtctgggtg

SEQ ID NO: 5946910 - DNA, 25 bp, Homo sapien
agaaatattcgctatcaaaaagcag

SEQ ID NO: 5946911 - DNA, 25 bp, Homo sapien
tgctttcttaagtatgggatctgcg

SEQ ID NO: 5946912 - DNA, 25 bp, Homo sapien
atgtttgaaaagtaagcaagtttat

SEQ ID NO: 5946913 - DNA, 25 bp, Homo sapien
aaacccaagtgcacatcagcaaatt

SEQ ID NO: 5946914 - DNA, 25 bp, Homo sapien
acaaagaacaagaacttactgatag

SEQ ID NO: 5946915 - DNA, 25 bp, Homo sapien
tgtaaacaaatggtacggtggccta

SEQ ID NO: 5946916 - DNA, 25 bp, Homo sapien
atctgcgtgggcaaagataaagatt

SEQ ID NO: 5946917 - DNA, 25 bp, Homo sapien
ccaatattagtaagatcgtcgcaac

SEQ ID NO: 5946918 - DNA, 25 bp, Homo sapien
tggcaacgagatgataaaaaccatt

SEQ ID NO: 5946919 - DNA, 25 bp, Homo sapien
gaacagacaattgatgcagctatcc

SEQ ID NO: 5946920 - DNA, 25 bp, Homo sapien
atcaatcacagatcacagtacccag

SEQ ID NO: 5946921 - DNA, 25 bp, Homo sapien
agtacccagaatcttttgagttcgt

SEQ ID NO: 5946922 - DNA, 25 bp, Homo sapien
gttggaacaattgttgggggtcaaa

SEQ ID NO: 5946923 - DNA, 25 bp, Homo sapien
ccacaaaagtcattggtataattgg

SEQ ID NO: 5946924 - DNA, 25 bp, Homo sapien
attcccttcatgggcctaaagttaa

SEQ ID NO: 5946925 - DNA, 25 bp, Homo sapien
atttgacatatgaagagcatgacaa

SEQ ID NO: 5946926 - DNA, 25 bp, Homo sapien
caattgcaagccagtgccgaattca

SEQ ID NO: 5946927 - DNA, 25 bp, Homo sapien
tatgttgtgatagggaagaatatta

SEQ ID NO: 5946928 - DNA, 25 bp, Homo sapien
atacgctaataaatttacagatgct

SEQ ID NO: 5946929 - DNA, 25 bp, Homo sapien
ttggtataattggtctgggtgatat

SEQ ID NO: 5946930 - DNA, 25 bp, Homo sapien
cagcaacaattgcaagccagtgccg

SEQ ID NO: 5946931 - DNA, 25 bp, Homo sapien
acggtggcctagaaaatgtgaaagt

SEQ ID NO: 5946932 - DNA, 25 bp, Homo sapien
ttatcaatcacagatcacagtaccc

SEQ ID NO: 5946933 - DNA, 25 bp, Homo sapien
ggaaagccacaaaagtcattggtat

SEQ ID NO: 5946934 - DNA, 25 bp, Homo sapien
aagtggcatgtttacgcaggattag

SEQ ID NO: 5946935 - DNA, 25 bp, Homo sapien
gttgggggtcaaacgagttgtaagc

SEQ ID NO: 5946936 - DNA, 25 bp, Homo sapien
atgcctcagctaaattcgaactggt

SEQ ID NO: 5946937 - DNA, 25 bp, Homo sapien
ccttcatgggcctaaagttaatact

SEQ ID NO: 5946938 - DNA, 25 bp, Homo sapien
ccgaattcacatttatcattgttgg

SEQ ID NO: 5946939 - DNA, 25 bp, Homo sapien
ttatttcggctagagaatggagctc

SEQ ID NO: 5946940 - DNA, 25 bp, Homo sapien
aacctggcttattagaacagacaat

SEQ ID NO: 5946941 - DNA, 25 bp, Homo sapien
ctattaaaagctaagcaatttgtat

SEQ ID NO: 5946942 - DNA, 25 bp, Homo sapien
ttatccttggactctgggtgtaaac

SEQ ID NO: 5946943 - DNA, 25 bp, Homo sapien
tacgcaggattagccataacaaacc

SEQ ID NO: 5946944 - DNA, 25 bp, Homo sapien
tagaacagacaattgatgcagctat

SEQ ID NO: 5946945 - DNA, 25 bp, Homo sapien
cttactgatagactattaaaagcta

SEQ ID NO: 5946946 - DNA, 25 bp, Homo sapien
cagatgctggatggggtgttatatg

SEQ ID NO: 5946947 - DNA, 25 bp, Homo sapien
tactattggatgacacgattttaga

SEQ ID NO: 5946948 - DNA, 25 bp, Homo sapien
gactatattatctatagtgttgaag

SEQ ID NO: 5946949 - DNA, 25 bp, Homo sapien
gaagaatattatgatgaactgaaag

SEQ ID NO: 5946950 - DNA, 25 bp, Homo sapien
acatcagcaaattcttcaatatgca

SEQ ID NO: 5946951 - DNA, 25 bp, Homo sapien
gatttgttcgacgccattattcaga

SEQ ID NO: 5946952 - DNA, 25 bp, Homo sapien
tagactattaaaagctaagcaattt

SEQ ID NO: 5946953 - DNA, 25 bp, Homo sapien
cgagatgataaaaaccattctgagt

SEQ ID NO: 5946954 - DNA, 25 bp, Homo sapien
ttcttaagtatgggatctgcgtggg

SEQ ID NO: 5946955 - DNA, 25 bp, Homo sapien
gactattaaaagctaagcaatttgt

SEQ ID NO: 5946956 - DNA, 25 bp, Homo sapien
ggactctgggtgtaaacaaatggta

SEQ ID NO: 5946957 - DNA, 25 bp, Homo sapien
ggatggggtgttatatgttgtgata

SEQ ID NO: 5946958 - DNA, 25 bp, Homo sapien
atatgcaaccagtgcaacagaacta

SEQ ID NO: 5946959 - DNA, 25 bp, Homo sapien
atctattcgaacaagtggcatgttt

SEQ ID NO: 5946960 - DNA, 25 bp, Homo sapien
taagatcgtcgcaacgtatggacca

SEQ ID NO: 5946961 - DNA, 25 bp, Homo sapien
tgatttagaatttgttatttcggct

SEQ ID NO: 5946962 - DNA, 25 bp, Homo sapien
ctcttactattggatgacacgattt

SEQ ID NO: 5946963 - DNA, 25 bp, Homo sapien
tttacccaaggactgcgacatcatt

SEQ ID NO: 5946964 - DNA, 25 bp, Homo sapien
atattatctatagtgttgaagcatc

SEQ ID NO: 5946965 - DNA, 25 bp, Homo sapien
acaaaaagcaatttcagagtgttca

SEQ ID NO: 5946966 - DNA, 25 bp, Homo sapien
tctagtgaccgttcggccgctgaaa

SEQ ID NO: 5946967 - DNA, 25 bp, Homo sapien
gaatcttttgagttcgttaattctg

SEQ ID NO: 5946968 - DNA, 25 bp, Homo sapien
aggttggaacaattgttgggggtca

SEQ ID NO: 5946969 - DNA, 25 bp, Homo sapien
ttatcattgttggcgattgttgatt

SEQ ID NO: 5946970 - DNA, 25 bp, Homo sapien
tgaaagaaaaatatgcctcagctaa

SEQ ID NO: 5946971 - DNA, 25 bp, Homo sapien
aggactgcgacatcattaccgtgca

SEQ ID NO: 5946972 - DNA, 25 bp, Homo sapien
aatattcctgggtgtgtccgaatat

SEQ ID NO: 5946973 - DNA, 25 bp, Homo sapien
gataagattgagcaatggaaagcca

SEQ ID NO: 5946974 - DNA, 25 bp, Homo sapien
atgctgctttcttaagtatgggatc

SEQ ID NO: 5946975 - DNA, 25 bp, Homo sapien
cataacaaacccaagtgcacatcag

SEQ ID NO: 5946976 - DNA, 25 bp, Homo sapien
cggctagagaatggagctcggttgt

SEQ ID NO: 5946977 - DNA, 25 bp, Homo sapien
attcgctatcaaaaagcagcattgg

SEQ ID NO: 5946978 - DNA, 25 bp, Homo sapien
ggcctattatacgctaataaattta

SEQ ID NO: 5946979 - DNA, 25 bp, Homo sapien
aaagctaagcaatttgtatttggaa

SEQ ID NO: 5946980 - DNA, 25 bp, Homo sapien
cctggcttattagaacagacaattg

SEQ ID NO: 5946981 - DNA, 25 bp, Homo sapien
cacagatcacagtacccagaatctt

SEQ ID NO: 5946982 - DNA, 25 bp, Homo sapien
aatctcattggcaacgagatgataa

SEQ ID NO: 5946983 - DNA, 25 bp, Homo sapien
ccgtgcattcccttcatgggcctaa

SEQ ID NO: 5946984 - DNA, 25 bp, Homo sapien
caatttcagagtgttcaaaagttct

SEQ ID NO: 5946985 - DNA, 25 bp, Homo sapien
tcgcaacgtatggaccatcttctaa

SEQ ID NO: 5946986 - DNA, 25 bp, Homo sapien
aaccagtgcaacagaactatttagt

SEQ ID NO: 5946987 - DNA, 25 bp, Homo sapien
tgtttacgcaggattagccataaca

SEQ ID NO: 5946988 - DNA, 25 bp, Homo sapien
agttcgttaattctgttatggcatg

SEQ ID NO: 5946989 - DNA, 25 bp, Homo sapien
ttcgacgccattattcagaatattc

SEQ ID NO: 5946990 - DNA, 25 bp, Homo sapien
tgttgtgatagggaagaatattatg

SEQ ID NO: 5946991 - DNA, 25 bp, Homo sapien
gataacaaagaacaagaacttactg

SEQ ID NO: 5946992 - DNA, 25 bp, Homo sapien
ttgttggcgattgttgattcgtggt

SEQ ID NO: 5946993 - DNA, 25 bp, Homo sapien
atatgcctcagctaaattcgaactg

SEQ ID NO: 5946994 - DNA, 25 bp, Homo sapien
atggggtgttatatgttgtgatagg

SEQ ID NO: 5946995 - DNA, 25 bp, Homo sapien
tcttcaatatgcaaccagtgcaaca

SEQ ID NO: 5946996 - DNA, 25 bp, Homo sapien
tattatcaatcacagatcacagtac

SEQ ID NO: 5946997 - DNA, 25 bp, Homo sapien
gaaagttaatatatcactaagaatc

SEQ ID NO: 5946998 - DNA, 25 bp, Homo sapien
gagaatggagctcggttgtttcttt

SEQ ID NO: 5946999 - DNA, 25 bp, Homo sapien
agattaccgctgatacacaagctgt

SEQ ID NO: 5947000 - DNA, 25 bp, Homo sapien
ccatatgatcatatgatttgttcga

SEQ ID NO: 5947001 - DNA, 25 bp, Homo sapien
tagccataacaaacccaagtgcaca

SEQ ID NO: 5947002 - DNA, 25 bp, Homo sapien
tgggtgtgtccgaatatcttttttt

SEQ ID NO: 5947003 - DNA, 25 bp, Homo sapien
cttaagtatgggatctgcgtgggca

SEQ ID NO: 5947004 - DNA, 25 bp, Homo sapien
aaatggtcatttggtatccaggcaa

SEQ ID NO: 5947005 - DNA, 25 bp, Homo sapien
gttgaagcatccaatattagtaaga

SEQ ID NO: 5947006 - DNA, 25 bp, Homo sapien
tcaacttggtattgatccatatgat

SEQ ID NO: 5947007 - DNA, 25 bp, Homo sapien
gttgattcgtggtttcaacttggta

SEQ ID NO: 5947008 - DNA, 25 bp, Homo sapien
cagcaaattcttcaatatgcaacca

SEQ ID NO: 5947009 - DNA, 25 bp, Homo sapien
ggtgttatatgttgtgatagggaag

SEQ ID NO: 5947010 - DNA, 25 bp, Homo sapien
gcacatcagcaaattcttcaatatg

SEQ ID NO: 5947011 - DNA, 25 bp, Homo sapien
caggcaaagcgactatattatctat

SEQ ID NO: 5947012 - DNA, 25 bp, Homo sapien
ttcgttaattctgttatggcatgtt

SEQ ID NO: 5947013 - DNA, 25 bp, Homo sapien
ctgatagactattaaaagctaagca

SEQ ID NO: 5947014 - DNA, 25 bp, Homo sapien
tgatatatacaaaaagcaatttcag

SEQ ID NO: 5947015 - DNA, 25 bp, Homo sapien
gaaagcatactggtctcttactatt

SEQ ID NO: 5947016 - DNA, 25 bp, Homo sapien
agatgataaaaaccattctgagtca

SEQ ID NO: 5947017 - DNA, 25 bp, Homo sapien
gatcacagtacccagaatcttttga

SEQ ID NO: 5947018 - DNA, 25 bp, Homo sapien
gaactgaaagaaaaatatgcctcag

SEQ ID NO: 5947019 - DNA, 25 bp, Homo sapien
ttatttgacatatgaagagcatgac

SEQ ID NO: 5947020 - DNA, 25 bp, Homo sapien
ggtatccaggcaaagcgactatatt

SEQ ID NO: 5947021 - DNA, 25 bp, Homo sapien
atggaaagccacaaaagtcattggt

SEQ ID NO: 5947022 - DNA, 25 bp, Homo sapien
cagctatccatgataaatcattcat

SEQ ID NO: 5947023 - DNA, 25 bp, Homo sapien
caggattagccataacaaacccaag

SEQ ID NO: 5947024 - DNA, 25 bp, Homo sapien
tacccaaggactgcgacatcattac

SEQ ID NO: 5947025 - DNA, 25 bp, Homo sapien
ttgttgattcgtggtttcaacttgg

SEQ ID NO: 5947026 - DNA, 25 bp, Homo sapien
attcttcaatatgcaaccagtgcaa

SEQ ID NO: 5947027 - DNA, 25 bp, Homo sapien
tcaaacgagttgtaagctgccggaa

SEQ ID NO: 5947028 - DNA, 25 bp, Homo sapien
gtacggtggcctagaaaatgtgaaa

SEQ ID NO: 5947029 - DNA, 25 bp, Homo sapien
ttgtttcttttgccaattttgatat

SEQ ID NO: 5947030 - DNA, 25 bp, Homo sapien
ggcctaaagttaatactgaaggcca

SEQ ID NO: 5947031 - DNA, 25 bp, Homo sapien
attcgtggtttcaacttggtattga

SEQ ID NO: 5947032 - DNA, 25 bp, Homo sapien
ttcaatatgcaaccagtgcaacaga

SEQ ID NO: 5947033 - DNA, 25 bp, Homo sapien
agctgccggaaatcgaggctttcga

SEQ ID NO: 5947034 - DNA, 25 bp, Homo sapien
gatcatatgatttgttcgacgccat

SEQ ID NO: 5947035 - DNA, 25 bp, Homo sapien
cttttgagttcgttaattctgttat

SEQ ID NO: 5947036 - DNA, 25 bp, Homo sapien
tttgaaaagtaagcaagtttatttg

SEQ ID NO: 5947037 - DNA, 25 bp, Homo sapien
actgaaggccaaccactagttatta

SEQ ID NO: 5947038 - DNA, 25 bp, Homo sapien
acacgattttagagaaatattcgct

SEQ ID NO: 5947039 - DNA, 25 bp, Homo sapien
attctagtgaccgttcggccgctga

SEQ ID NO: 5947040 - DNA, 25 bp, Homo sapien
tagagaatggagctcggttgtttct

SEQ ID NO: 5947041 - DNA, 25 bp, Homo sapien
attaccgctgatacacaagctgtga

SEQ ID NO: 5947042 - DNA, 25 bp, Homo sapien
cctgggtgtgtccgaatatcttttt

SEQ ID NO: 5947043 - DNA, 25 bp, Homo sapien
agtgccgaattcacatttatcattg

SEQ ID NO: 5947044 - DNA, 25 bp, Homo sapien
gatgcagctatccatgataaatcat

SEQ ID NO: 5947045 - DNA, 25 bp, Homo sapien
gcaaccagtgcaacagaactattta

SEQ ID NO: 5947046 - DNA, 25 bp, Homo sapien
ggcatgtttacgcaggattagccat

SEQ ID NO: 5947047 - DNA, 25 bp, Homo sapien
cttccagaggctaatctcattggca

SEQ ID NO: 5947048 - DNA, 25 bp, Homo sapien
aattgatgcagctatccatgataaa

SEQ ID NO: 5947049 - DNA, 25 bp, Homo sapien
gtaagcaagtttatttgacatatga

SEQ ID NO: 5947050 - DNA, 25 bp, Homo sapien
gtattgatccatatgatcatatgat

SEQ ID NO: 5947051 - DNA, 25 bp, Homo sapien
taccgctgatacacaagctgtgaca

SEQ ID NO: 5947052 - DNA, 25 bp, Homo sapien
gataaaaaccattctgagtcattct

SEQ ID NO: 5947053 - DNA, 25 bp, Homo sapien
aaagaaaaatatgcctcagctaaat

SEQ ID NO: 5947054 - DNA, 25 bp, Homo sapien
atgacaagattaccgctgatacaca

SEQ ID NO: 5947055 - DNA, 25 bp, Homo sapien
gttgtaagctgccggaaatcgaggc

SEQ ID NO: 5947056 - DNA, 25 bp, Homo sapien
tggtctgggtgatatgggcctatta

SEQ ID NO: 5947057 - DNA, 25 bp, Homo sapien
ccaatgcttccagaggctaatctca

SEQ ID NO: 5947058 - DNA, 25 bp, Homo sapien
ttttagagaaatattcgctatcaaa

SEQ ID NO: 5947059 - DNA, 25 bp, Homo sapien
tttgtatttggaaagcatactggtc

SEQ ID NO: 5947060 - DNA, 25 bp, Homo sapien
tgttatatgttgtgatagggaagaa

SEQ ID NO: 5947061 - DNA, 25 bp, Homo sapien
ggagctcggttgtttcttttgccaa

SEQ ID NO: 5947062 - DNA, 25 bp, Homo sapien
atgaactgaaagaaaaatatgcctc

SEQ ID NO: 5947063 - DNA, 25 bp, Homo sapien
gaatggagctcggttgtttcttttg

SEQ ID NO: 5947064 - DNA, 25 bp, Homo sapien
tctgagtcattctagtgaccgttcg

SEQ ID NO: 5947065 - DNA, 25 bp, Homo sapien
tgatccatatgatcatatgatttgt

SEQ ID NO: 5947066 - DNA, 25 bp, Homo sapien
gttattatcaatcacagatcacagt

SEQ ID NO: 5947067 - DNA, 25 bp, Homo sapien
tttgagttcgttaattctgttatgg

SEQ ID NO: 5947068 - DNA, 25 bp, Homo sapien
tagataacaaagaacaagaacttac

SEQ ID NO: 5947069 - DNA, 25 bp, Homo sapien
cttttgccaattttgatatatacaa

SEQ ID NO: 5947070 - DNA, 25 bp, Homo sapien
aagtttatttgacatatgaagagca

SEQ ID NO: 5947071 - DNA, 25 bp, Homo sapien
agaacaagaacttactgatagacta

SEQ ID NO: 5947072 - DNA, 25 bp, Homo sapien
ttattcagaatattcctgggtgtgt

SEQ ID NO: 5947073 - DNA, 25 bp, Homo sapien
gaattcacatttatcattgttggcg

SEQ ID NO: 5947074 - DNA, 25 bp, Homo sapien
ggggtgttatatgttgtgataggga

SEQ ID NO: 5947075 - DNA, 25 bp, Homo sapien
aaaaatatgcctcagctaaattcga

SEQ ID NO: 5947076 - DNA, 25 bp, Homo sapien
tcattggcaacgagatgataaaaac

SEQ ID NO: 5947077 - DNA, 25 bp, Homo sapien
aacgagatgataaaaaccattctga

SEQ ID NO: 5947078 - DNA, 25 bp, Homo sapien
aaagataaagatttatccttggact

SEQ ID NO: 5947079 - DNA, 25 bp, Homo sapien
ctttcttaagtatgggatctgcgtg

SEQ ID NO: 5947080 - DNA, 25 bp, Homo sapien
aagcaatttgtatttggaaagcata

SEQ ID NO: 5947081 - DNA, 25 bp, Homo sapien
tcagaggataagattgagcaatgga

SEQ ID NO: 5947082 - DNA, 25 bp, Homo sapien
gggaagaatattatgatgaactgaa

SEQ ID NO: 5947083 - DNA, 25 bp, Homo sapien
tgagttcgttaattctgttatggca

SEQ ID NO: 5947084 - DNA, 25 bp, Homo sapien
cgttaattctgttatggcatgtttg

SEQ ID NO: 5947085 - DNA, 25 bp, Homo sapien
tggcatgtttgaaaagtaagcaagt

SEQ ID NO: 5947086 - DNA, 25 bp, Homo sapien
gcctagaaaatgtgaaagttaatat

SEQ ID NO: 5947087 - DNA, 25 bp, Homo sapien
ttcggctagagaatggagctcggtt

SEQ ID NO: 5947088 - DNA, 25 bp, Homo sapien
cagaatcttttgagttcgttaattc

SEQ ID NO: 5947089 - DNA, 25 bp, Homo sapien
aaaagtcattggtataattggtctg

SEQ ID NO: 5947090 - DNA, 25 bp, Homo sapien
tgggcctaaagttaatactgaaggc

SEQ ID NO: 5947091 - DNA, 25 bp, Homo sapien
gatagactattaaaagctaagcaat

SEQ ID NO: 5947092 - DNA, 25 bp, Homo sapien
taagattgagcaatggaaagccaca

SEQ ID NO: 5947093 - DNA, 25 bp, Homo sapien
ccactagttattatcaatcacagat

SEQ ID NO: 5947094 - DNA, 25 bp, Homo sapien
atggagctcggttgtttcttttgcc

SEQ ID NO: 5947095 - DNA, 25 bp, Homo sapien
tattcctgggtgtgtccgaatatct

SEQ ID NO: 5947096 - DNA, 25 bp, Homo sapien
aatttacagatgctggatggggtgt

SEQ ID NO: 5947097 - DNA, 25 bp, Homo sapien
attggtaacagcaacaattgcaagc

SEQ ID NO: 5947098 - DNA, 25 bp, Homo sapien
atttatcattgttggcgattgttga

SEQ ID NO: 5947099 - DNA, 25 bp, Homo sapien
ggtgtaaacaaatggtacggtggcc

SEQ ID NO: 5947100 - DNA, 25 bp, Homo sapien
atacacaagctgtgacacatgctgc

SEQ ID NO: 5947101 - DNA, 25 bp, Homo sapien
aatattatgatgaactgaaagaaaa

SEQ ID NO: 5947102 - DNA, 25 bp, Homo sapien
aaccattctgagtcattctagtgac

SEQ ID NO: 5947103 - DNA, 25 bp, Homo sapien
tcattaccgtgcattcccttcatgg

SEQ ID NO: 5947104 - DNA, 25 bp, Homo sapien
gcatgtttgaaaagtaagcaagttt

SEQ ID NO: 5947105 - DNA, 25 bp, Homo sapien
ccagtgcaacagaactatttagttt

SEQ ID NO: 5947106 - DNA, 25 bp, Homo sapien
aagatgatttagaatttgttatttc

SEQ ID NO: 5947107 - DNA, 25 bp, Homo sapien
gggcaaagataaagatttatccttg

SEQ ID NO: 5947108 - DNA, 25 bp, Homo sapien
caagccagtgccgaattcacattta

SEQ ID NO: 5947109 - DNA, 25 bp, Homo sapien
tgctggatggggtgttatatgttgt

SEQ ID NO: 5947110 - DNA, 25 bp, Homo sapien
atggtcatttggtatccaggcaaag

SEQ ID NO: 5947111 - DNA, 25 bp, Homo sapien
gcaatttgtatttggaaagcatact

SEQ ID NO: 5947112 - DNA, 25 bp, Homo sapien
aaagatttatccttggactctgggt

SEQ ID NO: 5947113 - DNA, 25 bp, Homo sapien
ccattctgagtcattctagtgaccg

SEQ ID NO: 5947114 - DNA, 25 bp, Homo sapien
aaagtatttacccaaggactgcgac

SEQ ID NO: 5947115 - DNA, 25 bp, Homo sapien
atcagcaaattcttcaatatgcaac

SEQ ID NO: 5947116 - DNA, 25 bp, Homo sapien
ctggatggggtgttatatgttgtga

SEQ ID NO: 5947117 - DNA, 25 bp, Homo sapien
ttaaaacctggcttattagaacaga

SEQ ID NO: 5947118 - DNA, 25 bp, Homo sapien
ggtatcagaggataagattgagcaa

SEQ ID NO: 5947119 - DNA, 25 bp, Homo sapien
gagttgtaagctgccggaaatcgag

SEQ ID NO: 5947120 - DNA, 25 bp, Homo sapien
tgcttccagaggctaatctcattgg

SEQ ID NO: 5947121 - DNA, 25 bp, Homo sapien
tgatgaactgaaagaaaaatatgcc

SEQ ID NO: 5947122 - DNA, 25 bp, Homo sapien
ccatcttctaaggttggaacaattg

SEQ ID NO: 5947123 - DNA, 25 bp, Homo sapien
cattattcagaatattcctgggtgt

SEQ ID NO: 5947124 - DNA, 25 bp, Homo sapien
tgatacacaagctgtgacacatgct

SEQ ID NO: 5947125 - DNA, 25 bp, Homo sapien
ctgccggaaatcgaggctttcgaaa

SEQ ID NO: 5947126 - DNA, 25 bp, Homo sapien
cttactattggatgacacgatttta

SEQ ID NO: 5947127 - DNA, 25 bp, Homo sapien
taacaaacccaagtgcacatcagca

SEQ ID NO: 5947128 - DNA, 25 bp, Homo sapien
attagaacagacaattgatgcagct

SEQ ID NO: 5947129 - DNA, 25 bp, Homo sapien
tagttattatcaatcacagatcaca

SEQ ID NO: 5947130 - DNA, 25 bp, Homo sapien
agatcgtcgcaacgtatggaccatc

SEQ ID NO: 5947131 - DNA, 25 bp, Homo sapien
atatcactaagaatctattcgaaca

SEQ ID NO: 5947132 - DNA, 25 bp, Homo sapien
tcgctatcaaaaagcagcattggta

SEQ ID NO: 5947133 - DNA, 25 bp, Homo sapien
aatggtacggtggcctagaaaatgt

SEQ ID NO: 5947134 - DNA, 25 bp, Homo sapien
cctattatacgctaataaatttaca

SEQ ID NO: 5947135 - DNA, 25 bp, Homo sapien
ctcagctaaattcgaactggtgaaa

SEQ ID NO: 5947136 - DNA, 25 bp, Homo sapien
tacagatgctggatggggtgttata

SEQ ID NO: 5947137 - DNA, 25 bp, Homo sapien
tgggggtcaaacgagttgtaagctg

SEQ ID NO: 5947138 - DNA, 25 bp, Homo sapien
tagtgttgaagcatccaatattagt

SEQ ID NO: 5947139 - DNA, 25 bp, Homo sapien
aaagcaatttcagagtgttcaaaag

SEQ ID NO: 5947140 - DNA, 25 bp, Homo sapien
gcattcccttcatgggcctaaagtt

SEQ ID NO: 5947141 - DNA, 25 bp, Homo sapien
aattctgttatggcatgtttgaaaa

SEQ ID NO: 5947142 - DNA, 25 bp, Homo sapien
atttagaatttgttatttcggctag

SEQ ID NO: 5947143 - DNA, 25 bp, Homo sapien
caaatggtacggtggcctagaaaat

SEQ ID NO: 5947144 - DNA, 25 bp, Homo sapien
gattgttgattcgtggtttcaactt

SEQ ID NO: 5947145 - DNA, 25 bp, Homo sapien
atactggtctcttactattggatga

SEQ ID NO: 5947146 - DNA, 25 bp, Homo sapien
cggccgctgaaaaaagaaatacata

SEQ ID NO: 5947147 - DNA, 25 bp, Homo sapien
gtgcacatcagcaaattcttcaata

SEQ ID NO: 5947148 - DNA, 25 bp, Homo sapien
caagattaccgctgatacacaagct

SEQ ID NO: 5947149 - DNA, 25 bp, Homo sapien
aagttaatactgaaggccaaccact

SEQ ID NO: 5947150 - DNA, 25 bp, Homo sapien
tttgagccaatgcttccagaggcta

SEQ ID NO: 5947151 - DNA, 25 bp, Homo sapien
tctgggtgtaaacaaatggtacggt

SEQ ID NO: 5947152 - DNA, 25 bp, Homo sapien
gtgggcaaagataaagatttatcct

SEQ ID NO: 5947153 - DNA, 25 bp, Homo sapien
tatccaggcaaagcgactatattat

SEQ ID NO: 5947154 - DNA, 25 bp, Homo sapien
agctcggttgtttcttttgccaatt

SEQ ID NO: 5947155 - DNA, 25 bp, Homo sapien
ctatattatctatagtgttgaagca

SEQ ID NO: 5947156 - DNA, 25 bp, Homo sapien
aacagcaacaattgcaagccagtgc

SEQ ID NO: 5947157 - DNA, 25 bp, Homo sapien
aatattagtaagatcgtcgcaacgt

SEQ ID NO: 5947158 - DNA, 25 bp, Homo sapien
tttgccaattttgatatatacaaaa

SEQ ID NO: 5947159 - DNA, 25 bp, Homo sapien
cagcattggtaacagcaacaattgc

SEQ ID NO: 5947160 - DNA, 25 bp, Homo sapien
agtatgggatctgcgtgggcaaaga

SEQ ID NO: 5947161 - DNA, 25 bp, Homo sapien
tcgaacaagtggcatgtttacgcag

SEQ ID NO: 5947162 - DNA, 25 bp, Homo sapien
agccacaaaagtcattggtataatt

SEQ ID NO: 5947163 - DNA, 25 bp, Homo sapien
tatggaccatcttctaaggttggaa

SEQ ID NO: 5947164 - DNA, 25 bp, Homo sapien
acagacaattgatgcagctatccat

SEQ ID NO: 5947165 - DNA, 25 bp, Homo sapien
aaatattcgctatcaaaaagcagca

SEQ ID NO: 5947166 - DNA, 25 bp, Homo sapien
agctaagcaatttgtatttggaaag

SEQ ID NO: 5947167 - DNA, 25 bp, Homo sapien
tccaggcaaagcgactatattatct

SEQ ID NO: 5947168 - DNA, 25 bp, Homo sapien
tggcttattagaacagacaattgat

SEQ ID NO: 5947169 - DNA, 25 bp, Homo sapien
acgccattattcagaatattcctgg

SEQ ID NO: 5947170 - DNA, 25 bp, Homo sapien
atttatccttggactctgggtgtaa

SEQ ID NO: 5947171 - DNA, 25 bp, Homo sapien
aagaatctattcgaacaagtggcat

SEQ ID NO: 5947172 - DNA, 25 bp, Homo sapien
aagtgcacatcagcaaattcttcaa

SEQ ID NO: 5947173 - DNA, 25 bp, Homo sapien
agattgagcaatggaaagccacaaa

SEQ ID NO: 5947174 - DNA, 25 bp, Homo sapien
ctattcgaacaagtggcatgtttac

SEQ ID NO: 5947175 - DNA, 25 bp, Homo sapien
tgaagagcatgacaagattaccgct

SEQ ID NO: 5947176 - DNA, 25 bp, Homo sapien
aaagccacaaaagtcattggtataa

SEQ ID NO: 5947177 - DNA, 25 bp, Homo sapien
gccggaaatcgaggctttcgaaaag

SEQ ID NO: 5947178 - DNA, 25 bp, Homo sapien
atcattgttggcgattgttgattcg

SEQ ID NO: 5947179 - DNA, 25 bp, Homo sapien
tacccagaatcttttgagttcgtta

SEQ ID NO: 5947180 - DNA, 25 bp, Homo sapien
ggtggcctagaaaatgtgaaagtta

SEQ ID NO: 5947181 - DNA, 25 bp, Homo sapien
attggtctgggtgatatgggcctat

SEQ ID NO: 5947182 - DNA, 25 bp, Homo sapien
gatgctggatggggtgttatatgtt

SEQ ID NO: 5947183 - DNA, 25 bp, Homo sapien
gcatactggtctcttactattggat

SEQ ID NO: 5947184 - DNA, 25 bp, Homo sapien
acccaagtgcacatcagcaaattct

SEQ ID NO: 5947185 - DNA, 25 bp, Homo sapien
taagctgccggaaatcgaggctttc

SEQ ID NO: 5947186 - DNA, 25 bp, Homo sapien
aagctgtgacacatgctgctttctt

SEQ ID NO: 5947187 - DNA, 25 bp, Homo sapien
gcaaagataaagatttatccttgga

SEQ ID NO: 5947188 - DNA, 25 bp, Homo sapien
tatcagaggataagattgagcaatg

SEQ ID NO: 5947189 - DNA, 25 bp, Homo sapien
gcaaattcttcaatatgcaaccagt

SEQ ID NO: 5947190 - DNA, 25 bp, Homo sapien
tgtaagctgccggaaatcgaggctt

SEQ ID NO: 5947191 - DNA, 25 bp, Homo sapien
tcccttcatgggcctaaagttaata

SEQ ID NO: 5947192 - DNA, 25 bp, Homo sapien
aattcgaactggtgaaaaatggtca

SEQ ID NO: 5947193 - DNA, 25 bp, Homo sapien
tgcagctatccatgataaatcattc

SEQ ID NO: 5947194 - DNA, 25 bp, Homo sapien
tgggtgtaaacaaatggtacggtgg

SEQ ID NO: 5947195 - DNA, 25 bp, Homo sapien
acaaacccaagtgcacatcagcaaa

SEQ ID NO: 5947196 - DNA, 25 bp, Homo sapien
tatgggatctgcgtgggcaaagata

SEQ ID NO: 5947197 - DNA, 25 bp, Homo sapien
aaaaagcagcattggtaacagcaac

SEQ ID NO: 5947198 - DNA, 25 bp, Homo sapien
acacatgctgctttcttaagtatgg

SEQ ID NO: 5947199 - DNA, 25 bp, Homo sapien
ggtgaaaaatggtcatttggtatcc

SEQ ID NO: 5947200 - DNA, 25 bp, Homo sapien
taaaagctaagcaatttgtatttgg

SEQ ID NO: 5947201 - DNA, 25 bp, Homo sapien
gcttattagaacagacaattgatgc

SEQ ID NO: 5947202 - DNA, 25 bp, Homo sapien
acagtacccagaatcttttgagttc

SEQ ID NO: 5947203 - DNA, 25 bp, Homo sapien
atggtatcagaggataagattgagc

SEQ ID NO: 5947204 - DNA, 25 bp, Homo sapien
attctgagtcattctagtgaccgtt

SEQ ID NO: 5947205 - DNA, 25 bp, Homo sapien
atactgaaggccaaccactagttat

SEQ ID NO: 5947206 - DNA, 25 bp, Homo sapien
ccaaccactagttattatcaatcac

SEQ ID NO: 5947207 - DNA, 25 bp, Homo sapien
cagaggctaatctcattggcaacga

SEQ ID NO: 5947208 - DNA, 25 bp, Homo sapien
ggcaaagcgactatattatctatag

SEQ ID NO: 5947209 - DNA, 25 bp, Homo sapien
agaggataagattgagcaatggaaa

SEQ ID NO: 5947210 - DNA, 25 bp, Homo sapien
gcgtgggcaaagataaagatttatc

SEQ ID NO: 5947211 - DNA, 25 bp, Homo sapien
tttcaacttggtattgatccatatg

SEQ ID NO: 5947212 - DNA, 25 bp, Homo sapien
ttttatcatctcgttgccaatgaga

SEQ ID NO: 5947213 - DNA, 25 bp, Homo sapien
agtatgctttccaaatacaaattgc

SEQ ID NO: 5947214 - DNA, 25 bp, Homo sapien
catgccataacagaattaacgaact

SEQ ID NO: 5947215 - DNA, 25 bp, Homo sapien
tacttttcgaaagcctcgatttccg

SEQ ID NO: 5947216 - DNA, 25 bp, Homo sapien
ttccggcagcttacaactcgtttga

SEQ ID NO: 5947217 - DNA, 25 bp, Homo sapien
gcatcaattgtctgttctaataagc

SEQ ID NO: 5947218 - DNA, 25 bp, Homo sapien
ttagctgaggcatatttttctttca

SEQ ID NO: 5947219 - DNA, 25 bp, Homo sapien
tcacaacatataacaccccatccag

SEQ ID NO: 5947220 - DNA, 25 bp, Homo sapien
taaatctttatctttgcccacgcag

SEQ ID NO: 5947221 - DNA, 25 bp, Homo sapien
gcagcatgtgtcacagcttgtgtat

SEQ ID NO: 5947222 - DNA, 25 bp, Homo sapien
ttgcactggttgcatattgaagaat

SEQ ID NO: 5947223 - DNA, 25 bp, Homo sapien
aatatagtcgctttgcctggatacc

SEQ ID NO: 5947224 - DNA, 25 bp, Homo sapien
ctggataccaaatgaccatttttca

SEQ ID NO: 5947225 - DNA, 25 bp, Homo sapien
tgaaaccacgaatcaacaatcgcca

SEQ ID NO: 5947226 - DNA, 25 bp, Homo sapien
attgttccaaccttagaagatggtc

SEQ ID NO: 5947227 - DNA, 25 bp, Homo sapien
ccgaaataacaaattctaaatcatc

SEQ ID NO: 5947228 - DNA, 25 bp, Homo sapien
ttttcaaacatgccataacagaatt

SEQ ID NO: 5947229 - DNA, 25 bp, Homo sapien
gttcatcataatattcttccctatc

SEQ ID NO: 5947230 - DNA, 25 bp, Homo sapien
ccatacgttgcgacgatcttactaa

SEQ ID NO: 5947231 - DNA, 25 bp, Homo sapien
tgttccaaccttagaagatggtcca

SEQ ID NO: 5947232 - DNA, 25 bp, Homo sapien
ctcgatttccggcagcttacaactc

SEQ ID NO: 5947233 - DNA, 25 bp, Homo sapien
tgtgatctgtgattgataataacta

SEQ ID NO: 5947234 - DNA, 25 bp, Homo sapien
tgatagcgaatatttctctaaaatc

SEQ ID NO: 5947235 - DNA, 25 bp, Homo sapien
tatgctttccaaatacaaattgctt

SEQ ID NO: 5947236 - DNA, 25 bp, Homo sapien
cgtaccatttgtttacacccagagt

SEQ ID NO: 5947237 - DNA, 25 bp, Homo sapien
ctatagataatatagtcgctttgcc

SEQ ID NO: 5947238 - DNA, 25 bp, Homo sapien
cgcagatcccatacttaagaaagca

SEQ ID NO: 5947239 - DNA, 25 bp, Homo sapien
ctgcgtaaacatgccacttgttcga

SEQ ID NO: 5947240 - DNA, 25 bp, Homo sapien
tctaggccaccgtaccatttgttta

SEQ ID NO: 5947241 - DNA, 25 bp, Homo sapien
tctcgttgccaatgagattagcctc

SEQ ID NO: 5947242 - DNA, 25 bp, Homo sapien
cgaatagattcttagtgatatatta

SEQ ID NO: 5947243 - DNA, 25 bp, Homo sapien
ttcggcactggcttgcaattgttgc

SEQ ID NO: 5947244 - DNA, 25 bp, Homo sapien
tatcagcggtaatcttgtcatgctc

SEQ ID NO: 5947245 - DNA, 25 bp, Homo sapien
gccttcagtattaactttaggccca

SEQ ID NO: 5947246 - DNA, 25 bp, Homo sapien
gaatattctgaataatggcgtcgaa

SEQ ID NO: 5947247 - DNA, 25 bp, Homo sapien
ctagccgaaataacaaattctaaat

SEQ ID NO: 5947248 - DNA, 25 bp, Homo sapien
aaactaaatagttctgttgcactgg

SEQ ID NO: 5947249 - DNA, 25 bp, Homo sapien
ttcttccctatcacaacatataaca

SEQ ID NO: 5947250 - DNA, 25 bp, Homo sapien
acgatcttactaatattggatgctt

SEQ ID NO: 5947251 - DNA, 25 bp, Homo sapien
cacttgttcgaatagattcttagtg

SEQ ID NO: 5947252 - DNA, 25 bp, Homo sapien
tcctgcgtaaacatgccacttgttc

SEQ ID NO: 5947253 - DNA, 25 bp, Homo sapien
caatcgccaacaatgataaatgtga

SEQ ID NO: 5947254 - DNA, 25 bp, Homo sapien
ctttcagttcatcataatattcttc

SEQ ID NO: 5947255 - DNA, 25 bp, Homo sapien
gatgcttcaacactatagataatat

SEQ ID NO: 5947256 - DNA, 25 bp, Homo sapien
tgggtaaatacttttcgaaagcctc

SEQ ID NO: 5947257 - DNA, 25 bp, Homo sapien
tgcgacgatcttactaatattggat

SEQ ID NO: 5947258 - DNA, 25 bp, Homo sapien
cattgctcaatcttatcctctgata

SEQ ID NO: 5947259 - DNA, 25 bp, Homo sapien
taacgaactcaaaagattctgggta

SEQ ID NO: 5947260 - DNA, 25 bp, Homo sapien
tgcatattgaagaatttgctgatgt

SEQ ID NO: 5947261 - DNA, 25 bp, Homo sapien
atgataaatgtgaattcggcactgg

SEQ ID NO: 5947262 - DNA, 25 bp, Homo sapien
ttcttttttcagcggccgaacggtc

SEQ ID NO: 5947263 - DNA, 25 bp, Homo sapien
tctgttgcactggttgcatattgaa

SEQ ID NO: 5947264 - DNA, 25 bp, Homo sapien
cactctgaaattgctttttgtatat

SEQ ID NO: 5947265 - DNA, 25 bp, Homo sapien
agaacttttgaacactctgaaattg

SEQ ID NO: 5947266 - DNA, 25 bp, Homo sapien
gcactggcttgcaattgttgctgtt

SEQ ID NO: 5947267 - DNA, 25 bp, Homo sapien
aatagttctgttgcactggttgcat

SEQ ID NO: 5947268 - DNA, 25 bp, Homo sapien
aatagattcttagtgatatattaac

SEQ ID NO: 5947269 - DNA, 25 bp, Homo sapien
aaagatattcggacacacccaggaa

SEQ ID NO: 5947270 - DNA, 25 bp, Homo sapien
tcatccaatagtaagagaccagtat

SEQ ID NO: 5947271 - DNA, 25 bp, Homo sapien
aagatggtccatacgttgcgacgat

SEQ ID NO: 5947272 - DNA, 25 bp, Homo sapien
gagaccagtatgctttccaaataca

SEQ ID NO: 5947273 - DNA, 25 bp, Homo sapien
tgcttcaacactatagataatatag

SEQ ID NO: 5947274 - DNA, 25 bp, Homo sapien
ccgagctccattctctagccgaaat

SEQ ID NO: 5947275 - DNA, 25 bp, Homo sapien
gttaccaatgctgctttttgatagc

SEQ ID NO: 5947276 - DNA, 25 bp, Homo sapien
agtggttggccttcagtattaactt

SEQ ID NO: 5947277 - DNA, 25 bp, Homo sapien
aatcttgtcatgctcttcatatgtc

SEQ ID NO: 5947278 - DNA, 25 bp, Homo sapien
aatcctgcgtaaacatgccacttgt

SEQ ID NO: 5947279 - DNA, 25 bp, Homo sapien
aatttattagcgtataataggccca

SEQ ID NO: 5947280 - DNA, 25 bp, Homo sapien
ccaacaatgataaatgtgaattcgg

SEQ ID NO: 5947281 - DNA, 25 bp, Homo sapien
caaaagaaacaaccgagctccattc

SEQ ID NO: 5947282 - DNA, 25 bp, Homo sapien
cggtaatcttgtcatgctcttcata

SEQ ID NO: 5947283 - DNA, 25 bp, Homo sapien
ataacagaattaacgaactcaaaag

SEQ ID NO: 5947284 - DNA, 25 bp, Homo sapien
catctgtaaatttattagcgtataa

SEQ ID NO: 5947285 - DNA, 25 bp, Homo sapien
aagcctcgatttccggcagcttaca

SEQ ID NO: 5947286 - DNA, 25 bp, Homo sapien
agagtccaaggataaatctttatct

SEQ ID NO: 5947287 - DNA, 25 bp, Homo sapien
ctttaggcccatgaagggaatgcac

SEQ ID NO: 5947288 - DNA, 25 bp, Homo sapien
catatggatcaataccaagttgaaa

SEQ ID NO: 5947289 - DNA, 25 bp, Homo sapien
gtcactagaatgactcagaatggtt

SEQ ID NO: 5947290 - DNA, 25 bp, Homo sapien
ataggcccatatcacccagaccaat

SEQ ID NO: 5947291 - DNA, 25 bp, Homo sapien
attgtctgttctaataagccaggtt

SEQ ID NO: 5947292 - DNA, 25 bp, Homo sapien
cagaccaattataccaatgactttt

SEQ ID NO: 5947293 - DNA, 25 bp, Homo sapien
ttagaagatggtccatacgttgcga

SEQ ID NO: 5947294 - DNA, 25 bp, Homo sapien
ccaccgtaccatttgtttacaccca

SEQ ID NO: 5947295 - DNA, 25 bp, Homo sapien
gaactcaaaagattctgggtactgt

SEQ ID NO: 5947296 - DNA, 25 bp, Homo sapien
aatgcacggtaatgatgtcgcagtc

SEQ ID NO: 5947297 - DNA, 25 bp, Homo sapien
atctgtgattgataataactagtgg

SEQ ID NO: 5947298 - DNA, 25 bp, Homo sapien
ttgcctggataccaaatgaccattt

SEQ ID NO: 5947299 - DNA, 25 bp, Homo sapien
tcaacaatcgccaacaatgataaat

SEQ ID NO: 5947300 - DNA, 25 bp, Homo sapien
tggttggccttcagtattaacttta

SEQ ID NO: 5947301 - DNA, 25 bp, Homo sapien
tattcttccctatcacaacatataa

SEQ ID NO: 5947302 - DNA, 25 bp, Homo sapien
ccaagttgaaaccacgaatcaacaa

SEQ ID NO: 5947303 - DNA, 25 bp, Homo sapien
aaaccacgaatcaacaatcgccaac

SEQ ID NO: 5947304 - DNA, 25 bp, Homo sapien
ggtaaatacttttcgaaagcctcga

SEQ ID NO: 5947305 - DNA, 25 bp, Homo sapien
agatattcggacacacccaggaata

SEQ ID NO: 5947306 - DNA, 25 bp, Homo sapien
ttatcatctcgttgccaatgagatt

SEQ ID NO: 5947307 - DNA, 25 bp, Homo sapien
actggttgcatattgaagaatttgc

SEQ ID NO: 5947308 - DNA, 25 bp, Homo sapien
tcatggatagctgcatcaattgtct

SEQ ID NO: 5947309 - DNA, 25 bp, Homo sapien
tttcagcggccgaacggtcactaga

SEQ ID NO: 5947310 - DNA, 25 bp, Homo sapien
tcagcggccgaacggtcactagaat

SEQ ID NO: 5947311 - DNA, 25 bp, Homo sapien
tttgttatggctaatcctgcgtaaa

SEQ ID NO: 5947312 - DNA, 25 bp, Homo sapien
ctagtggttggccttcagtattaac

SEQ ID NO: 5947313 - DNA, 25 bp, Homo sapien
atatcacccagaccaattataccaa

SEQ ID NO: 5947314 - DNA, 25 bp, Homo sapien
aatgactcagaatggtttttatcat

SEQ ID NO: 5947315 - DNA, 25 bp, Homo sapien
accccatccagcatctgtaaattta

SEQ ID NO: 5947316 - DNA, 25 bp, Homo sapien
tgctgttaccaatgctgctttttga

SEQ ID NO: 5947317 - DNA, 25 bp, Homo sapien
cttttgaacactctgaaattgcttt

SEQ ID NO: 5947318 - DNA, 25 bp, Homo sapien
cagttcgaatttagctgaggcatat

SEQ ID NO: 5947319 - DNA, 25 bp, Homo sapien
tcgaacaaatcatatgatcatatgg

SEQ ID NO: 5947320 - DNA, 25 bp, Homo sapien
acaacatataacaccccatccagca

SEQ ID NO: 5947321 - DNA, 25 bp, Homo sapien
taaatacttttcgaaagcctcgatt

SEQ ID NO: 5947322 - DNA, 25 bp, Homo sapien
gtactgtgatctgtgattgataata

SEQ ID NO: 5947323 - DNA, 25 bp, Homo sapien
tcttgtcatgctcttcatatgtcaa

SEQ ID NO: 5947324 - DNA, 25 bp, Homo sapien
gatcccatacttaagaaagcagcat

SEQ ID NO: 5947325 - DNA, 25 bp, Homo sapien
tcaacactatagataatatagtcgc

SEQ ID NO: 5947326 - DNA, 25 bp, Homo sapien
tgtcatccaatagtaagagaccagt

SEQ ID NO: 5947327 - DNA, 25 bp, Homo sapien
ctgctttttgatagcgaatatttct

SEQ ID NO: 5947328 - DNA, 25 bp, Homo sapien
atatatcaaaattggcaaaagaaac

SEQ ID NO: 5947329 - DNA, 25 bp, Homo sapien
tcgttgccaatgagattagcctctg

SEQ ID NO: 5947330 - DNA, 25 bp, Homo sapien
ttgctcaatcttatcctctgatacc

SEQ ID NO: 5947331 - DNA, 25 bp, Homo sapien
aacactctgaaattgctttttgtat

SEQ ID NO: 5947332 - DNA, 25 bp, Homo sapien
cacttgggtttgttatggctaatcc

SEQ ID NO: 5947333 - DNA, 25 bp, Homo sapien
taccaatgctgctttttgatagcga

SEQ ID NO: 5947334 - DNA, 25 bp, Homo sapien
aacggtcactagaatgactcagaat

SEQ ID NO: 5947335 - DNA, 25 bp, Homo sapien
tctttatctttgcccacgcagatcc

SEQ ID NO: 5947336 - DNA, 25 bp, Homo sapien
atattcggacacacccaggaatatt

SEQ ID NO: 5947337 - DNA, 25 bp, Homo sapien
aatgaccatttttcaccagttcgaa

SEQ ID NO: 5947338 - DNA, 25 bp, Homo sapien
gtaagttcttgttctttgttatcta

SEQ ID NO: 5947339 - DNA, 25 bp, Homo sapien
ttatggctaatcctgcgtaaacatg

SEQ ID NO: 5947340 - DNA, 25 bp, Homo sapien
ctcgtttgacccccaacaattgttc

SEQ ID NO: 5947341 - DNA, 25 bp, Homo sapien
gaccagtatgctttccaaatacaaa

SEQ ID NO: 5947342 - DNA, 25 bp, Homo sapien
tcagaatggtttttatcatctcgtt

SEQ ID NO: 5947343 - DNA, 25 bp, Homo sapien
catattgaagaatttgctgatgtgc

SEQ ID NO: 5947344 - DNA, 25 bp, Homo sapien
aacaatcgccaacaatgataaatgt

SEQ ID NO: 5947345 - DNA, 25 bp, Homo sapien
caatgataaatgtgaattcggcact

SEQ ID NO: 5947346 - DNA, 25 bp, Homo sapien
aaaagattctgggtactgtgatctg

SEQ ID NO: 5947347 - DNA, 25 bp, Homo sapien
tttcacattttctaggccaccgtac

SEQ ID NO: 5947348 - DNA, 25 bp, Homo sapien
cgcagtccttgggtaaatacttttc

SEQ ID NO: 5947349 - DNA, 25 bp, Homo sapien
aaatcatatgatcatatggatcaat

SEQ ID NO: 5947350 - DNA, 25 bp, Homo sapien
gtaatcttgtcatgctcttcatatg

SEQ ID NO: 5947351 - DNA, 25 bp, Homo sapien
tagtaagagaccagtatgctttcca

SEQ ID NO: 5947352 - DNA, 25 bp, Homo sapien
taactttcacattttctaggccacc

SEQ ID NO: 5947353 - DNA, 25 bp, Homo sapien
taataactagtggttggccttcagt

SEQ ID NO: 5947354 - DNA, 25 bp, Homo sapien
gcccatatcacccagaccaattata

SEQ ID NO: 5947355 - DNA, 25 bp, Homo sapien
tcacagcttgtgtatcagcggtaat

SEQ ID NO: 5947356 - DNA, 25 bp, Homo sapien
caaggataaatctttatctttgccc

SEQ ID NO: 5947357 - DNA, 25 bp, Homo sapien
ccaacaattgttccaaccttagaag

SEQ ID NO: 5947358 - DNA, 25 bp, Homo sapien
cggtaatgatgtcgcagtccttggg

SEQ ID NO: 5947359 - DNA, 25 bp, Homo sapien
gaaagcagcatgtgtcacagcttgt

SEQ ID NO: 5947360 - DNA, 25 bp, Homo sapien
atcacccagaccaattataccaatg

SEQ ID NO: 5947361 - DNA, 25 bp, Homo sapien
caactcgtttgacccccaacaattg

SEQ ID NO: 5947362 - DNA, 25 bp, Homo sapien
cccacgcagatcccatacttaagaa

SEQ ID NO: 5947363 - DNA, 25 bp, Homo sapien
atagataatatagtcgctttgcctg

SEQ ID NO: 5947364 - DNA, 25 bp, Homo sapien
aataatggcgtcgaacaaatcatat

SEQ ID NO: 5947365 - DNA, 25 bp, Homo sapien
tgatgtcgcagtccttgggtaaata

SEQ ID NO: 5947366 - DNA, 25 bp, Homo sapien
cttttcgaaagcctcgatttccggc

SEQ ID NO: 5947367 - DNA, 25 bp, Homo sapien
tggcttgcaattgttgctgttacca

SEQ ID NO: 5947368 - DNA, 25 bp, Homo sapien
tggatcaataccaagttgaaaccac

SEQ ID NO: 5947369 - DNA, 25 bp, Homo sapien
gcttacttttcaaacatgccataac

SEQ ID NO: 5947370 - DNA, 25 bp, Homo sapien
ctagaatgactcagaatggttttta

SEQ ID NO: 5947371 - DNA, 25 bp, Homo sapien
ccagagtccaaggataaatctttat

SEQ ID NO: 5947372 - DNA, 25 bp, Homo sapien
tcatatgtcaaataaacttgcttac

SEQ ID NO: 5947373 - DNA, 25 bp, Homo sapien
ttttaaaaaaagatattcggacaca

SEQ ID NO: 5947374 - DNA, 25 bp, Homo sapien
gatgtgcacttgggtttgttatggc

SEQ ID NO: 5947375 - DNA, 25 bp, Homo sapien
actcagaatggtttttatcatctcg

SEQ ID NO: 5947376 - DNA, 25 bp, Homo sapien
atattggatgcttcaacactataga

SEQ ID NO: 5947377 - DNA, 25 bp, Homo sapien
ttgaagaatttgctgatgtgcactt

SEQ ID NO: 5947378 - DNA, 25 bp, Homo sapien
ggacacacccaggaatattctgaat

SEQ ID NO: 5947379 - DNA, 25 bp, Homo sapien
atgatttatcatggatagctgcatc

SEQ ID NO: 5947380 - DNA, 25 bp, Homo sapien
ttactaatattggatgcttcaacac

SEQ ID NO: 5947381 - DNA, 25 bp, Homo sapien
tgtatttcttttttcagcggccgaa

SEQ ID NO: 5947382 - DNA, 25 bp, Homo sapien
ttataccaatgacttttgtggcttt

SEQ ID NO: 5947383 - DNA, 25 bp, Homo sapien
gctccattctctagccgaaataaca

SEQ ID NO: 5947384 - DNA, 25 bp, Homo sapien
ctggaagcattggctcaaagaactt

SEQ ID NO: 5947385 - DNA, 25 bp, Homo sapien
ttgtatatatcaaaattggcaaaag

SEQ ID NO: 5947386 - DNA, 25 bp, Homo sapien
attaacgaactcaaaagattctggg

SEQ ID NO: 5947387 - DNA, 25 bp, Homo sapien
attgcttagcttttaatagtctatc

SEQ ID NO: 5947388 - DNA, 25 bp, Homo sapien
tctgttctaataagccaggttttaa

SEQ ID NO: 5947389 - DNA, 25 bp, Homo sapien
cgaatcaacaatcgccaacaatgat

SEQ ID NO: 5947390 - DNA, 25 bp, Homo sapien
ctatcattaaactaaatagttctgt

SEQ ID NO: 5947391 - DNA, 25 bp, Homo sapien
cggcactggcttgcaattgttgctg

SEQ ID NO: 5947392 - DNA, 25 bp, Homo sapien
cagtaagttcttgttctttgttatc

SEQ ID NO: 5947393 - DNA, 25 bp, Homo sapien
atagcgaatatttctctaaaatcgt

SEQ ID NO: 5947394 - DNA, 25 bp, Homo sapien
taataggcccatatcacccagacca

SEQ ID NO: 5947395 - DNA, 25 bp, Homo sapien
catatgatcatatggatcaatacca

SEQ ID NO: 5947396 - DNA, 25 bp, Homo sapien
aagattctgggtactgtgatctgtg

SEQ ID NO: 5947397 - DNA, 25 bp, Homo sapien
tcaataccaagttgaaaccacgaat

SEQ ID NO: 5947398 - DNA, 25 bp, Homo sapien
ctctggaagcattggctcaaagaac

SEQ ID NO: 5947399 - DNA, 25 bp, Homo sapien
gctcaatcttatcctctgataccat

SEQ ID NO: 5947400 - DNA, 25 bp, Homo sapien
ttctgggtactgtgatctgtgattg

SEQ ID NO: 5947401 - DNA, 25 bp, Homo sapien
ttcttagtgatatattaactttcac

SEQ ID NO: 5947402 - DNA, 25 bp, Homo sapien
ctatcagtaagttcttgttctttgt

SEQ ID NO: 5947403 - DNA, 25 bp, Homo sapien
acttgcttacttttcaaacatgcca

SEQ ID NO: 5947404 - DNA, 25 bp, Homo sapien
agcggccgaacggtcactagaatga

SEQ ID NO: 5947405 - DNA, 25 bp, Homo sapien
aggaatattctgaataatggcgtcg

SEQ ID NO: 5947406 - DNA, 25 bp, Homo sapien
accagttcgaatttagctgaggcat

SEQ ID NO: 5947407 - DNA, 25 bp, Homo sapien
gattctgggtactgtgatctgtgat

SEQ ID NO: 5947408 - DNA, 25 bp, Homo sapien
cagatcccatacttaagaaagcagc

SEQ ID NO: 5947409 - DNA, 25 bp, Homo sapien
gctcaaagaacttttgaacactctg

SEQ ID NO: 5947410 - DNA, 25 bp, Homo sapien
gaagggaatgcacggtaatgatgtc

SEQ ID NO: 5947411 - DNA, 25 bp, Homo sapien
tgccataacagaattaacgaactca

SEQ ID NO: 5947412 - DNA, 25 bp, Homo sapien
tgcccacgcagatcccatacttaag

SEQ ID NO: 5947413 - DNA, 25 bp, Homo sapien
ggcaaaagaaacaaccgagctccat

SEQ ID NO: 5947414 - DNA, 25 bp, Homo sapien
actgtgatctgtgattgataataac

SEQ ID NO: 5947415 - DNA, 25 bp, Homo sapien
tagtctatcagtaagttcttgttct

SEQ ID NO: 5947416 - DNA, 25 bp, Homo sapien
tctctaaaatcgtgtcatccaatag

SEQ ID NO: 5947417 - DNA, 25 bp, Homo sapien
tgggtttgttatggctaatcctgcg

SEQ ID NO: 5947418 - DNA, 25 bp, Homo sapien
gcaattgttgctgttaccaatgctg

SEQ ID NO: 5947419 - DNA, 25 bp, Homo sapien
gaatgatttatcatggatagctgca

SEQ ID NO: 5947420 - DNA, 25 bp, Homo sapien
tcccatacttaagaaagcagcatgt

SEQ ID NO: 5947421 - DNA, 25 bp, Homo sapien
gtaaacatgccacttgttcgaatag

SEQ ID NO: 5947422 - DNA, 25 bp, Homo sapien
cacgcagatcccatacttaagaaag

SEQ ID NO: 5947423 - DNA, 25 bp, Homo sapien
acgaactcaaaagattctgggtact

SEQ ID NO: 5947424 - DNA, 25 bp, Homo sapien
atccaatagtaagagaccagtatgc

SEQ ID NO: 5947425 - DNA, 25 bp, Homo sapien
atgaagggaatgcacggtaatgatg

SEQ ID NO: 5947426 - DNA, 25 bp, Homo sapien
tcgaatttagctgaggcatattttt

SEQ ID NO: 5947427 - DNA, 25 bp, Homo sapien
gcttacaactcgtttgacccccaac

SEQ ID NO: 5947428 - DNA, 25 bp, Homo sapien
ataccaatgacttttgtggctttcc

SEQ ID NO: 5947429 - DNA, 25 bp, Homo sapien
accatttttcaccagttcgaattta

SEQ ID NO: 5947430 - DNA, 25 bp, Homo sapien
atcagtaagttcttgttctttgtta

SEQ ID NO: 5947431 - DNA, 25 bp, Homo sapien
ataccaaatgaccatttttcaccag

SEQ ID NO: 5947432 - DNA, 25 bp, Homo sapien
attcggacacacccaggaatattct

SEQ ID NO: 5947433 - DNA, 25 bp, Homo sapien
ttcaaacatgccataacagaattaa

SEQ ID NO: 5947434 - DNA, 25 bp, Homo sapien
tgatctgtgattgataataactagt

SEQ ID NO: 5947435 - DNA, 25 bp, Homo sapien
tagttctgttgcactggttgcatat

SEQ ID NO: 5947436 - DNA, 25 bp, Homo sapien
tgtcacagcttgtgtatcagcggta

SEQ ID NO: 5947437 - DNA, 25 bp, Homo sapien
gaccaattataccaatgacttttgt

SEQ ID NO: 5947438 - DNA, 25 bp, Homo sapien
tattagcgtataataggcccatatc

SEQ ID NO: 5947439 - DNA, 25 bp, Homo sapien
ggcatatttttctttcagttcatca

SEQ ID NO: 5947440 - DNA, 25 bp, Homo sapien
aactttaggcccatgaagggaatgc

SEQ ID NO: 5947441 - DNA, 25 bp, Homo sapien
attggatgcttcaacactatagata

SEQ ID NO: 5947442 - DNA, 25 bp, Homo sapien
gaaagcctcgatttccggcagctta

SEQ ID NO: 5947443 - DNA, 25 bp, Homo sapien
acccagagtccaaggataaatcttt

SEQ ID NO: 5947444 - DNA, 25 bp, Homo sapien
aacaatgataaatgtgaattcggca

SEQ ID NO: 5947445 - DNA, 25 bp, Homo sapien
gataaatgtgaattcggcactggct

SEQ ID NO: 5947446 - DNA, 25 bp, Homo sapien
ctgggtactgtgatctgtgattgat

SEQ ID NO: 5947447 - DNA, 25 bp, Homo sapien
tggctcaaagaacttttgaacactc

SEQ ID NO: 5947448 - DNA, 25 bp, Homo sapien
taatggcgtcgaacaaatcatatga

SEQ ID NO: 5947449 - DNA, 25 bp, Homo sapien
attggctcaaagaacttttgaacac

SEQ ID NO: 5947450 - DNA, 25 bp, Homo sapien
actggcttgcaattgttgctgttac

SEQ ID NO: 5947451 - DNA, 25 bp, Homo sapien
atcaattgtctgttctaataagcca

SEQ ID NO: 5947452 - DNA, 25 bp, Homo sapien
aataccaagttgaaaccacgaatca

SEQ ID NO: 5947453 - DNA, 25 bp, Homo sapien
aacactatagataatatagtcgctt

SEQ ID NO: 5947454 - DNA, 25 bp, Homo sapien
cttcatatgtcaaataaacttgctt

SEQ ID NO: 5947455 - DNA, 25 bp, Homo sapien
aatgatgtcgcagtccttgggtaaa

SEQ ID NO: 5947456 - DNA, 25 bp, Homo sapien
aatgtgaattcggcactggcttgca

SEQ ID NO: 5947457 - DNA, 25 bp, Homo sapien
tctgtaaatttattagcgtataata

SEQ ID NO: 5947458 - DNA, 25 bp, Homo sapien
gtccatacgttgcgacgatcttact

SEQ ID NO: 5947459 - DNA, 25 bp, Homo sapien
gataataactagtggttggccttca

SEQ ID NO: 5947460 - DNA, 25 bp, Homo sapien
tttctaggccaccgtaccatttgtt

SEQ ID NO: 5947461 - DNA, 25 bp, Homo sapien
atgtcgcagtccttgggtaaatact

SEQ ID NO: 5947462 - DNA, 25 bp, Homo sapien
cttcaacactatagataatatagtc

SEQ ID NO: 5947463 - DNA, 25 bp, Homo sapien
tttctctaaaatcgtgtcatccaat

SEQ ID NO: 5947464 - DNA, 25 bp, Homo sapien
ttcagttcatcataatattcttccc

SEQ ID NO: 5947465 - DNA, 25 bp, Homo sapien
ccaatagtaagagaccagtatgctt

SEQ ID NO: 5947466 - DNA, 25 bp, Homo sapien
agcatctgtaaatttattagcgtat

SEQ ID NO: 5947467 - DNA, 25 bp, Homo sapien
attagcctctggaagcattggctca

SEQ ID NO: 5947468 - DNA, 25 bp, Homo sapien
catttttcaccagttcgaatttagc

SEQ ID NO: 5947469 - DNA, 25 bp, Homo sapien
atacttaagaaagcagcatgtgtca

SEQ ID NO: 5947470 - DNA, 25 bp, Homo sapien
gtaatgatgtcgcagtccttgggta

SEQ ID NO: 5947471 - DNA, 25 bp, Homo sapien
tgtgaattcggcactggcttgcaat

SEQ ID NO: 5947472 - DNA, 25 bp, Homo sapien
gcccatgaagggaatgcacggtaat

SEQ ID NO: 5947473 - DNA, 25 bp, Homo sapien
aattataccaatgacttttgtggct

SEQ ID NO: 5947474 - DNA, 25 bp, Homo sapien
aattgttgctgttaccaatgctgct

SEQ ID NO: 5947475 - DNA, 25 bp, Homo sapien
gcattggctcaaagaacttttgaac

SEQ ID NO: 5947476 - DNA, 25 bp, Homo sapien
aatatttctctaaaatcgtgtcatc

SEQ ID NO: 5947477 - DNA, 25 bp, Homo sapien
acagcttgtgtatcagcggtaatct

SEQ ID NO: 5947478 - DNA, 25 bp, Homo sapien
tataataggcccatatcacccagac

SEQ ID NO: 5947479 - DNA, 25 bp, Homo sapien
caaatgaccatttttcaccagttcg

SEQ ID NO: 5947480 - DNA, 25 bp, Homo sapien
tgctcttcatatgtcaaataaactt

SEQ ID NO: 5947481 - DNA, 25 bp, Homo sapien
atttgtttacacccagagtccaagg

SEQ ID NO: 5947482 - DNA, 25 bp, Homo sapien
gcactggttgcatattgaagaattt

SEQ ID NO: 5947483 - DNA, 25 bp, Homo sapien
aagagaccagtatgctttccaaata

SEQ ID NO: 5947484 - DNA, 25 bp, Homo sapien
tgagattagcctctggaagcattgg

SEQ ID NO: 5947485 - DNA, 25 bp, Homo sapien
tgatcatatggatcaataccaagtt

SEQ ID NO: 5947486 - DNA, 25 bp, Homo sapien
ttaagaaagcagcatgtgtcacagc

SEQ ID NO: 5947487 - DNA, 25 bp, Homo sapien
ttacacccagagtccaaggataaat

SEQ ID NO: 5947488 - DNA, 25 bp, Homo sapien
ctgttaccaatgctgctttttgata

SEQ ID NO: 5947489 - DNA, 25 bp, Homo sapien
tttttcaccagttcgaatttagctg

SEQ ID NO: 5947490 - DNA, 25 bp, Homo sapien
cgtttgacccccaacaattgttcca

SEQ ID NO: 5947491 - DNA, 25 bp, Homo sapien
ccaatgctgctttttgatagcgaat

SEQ ID NO: 5947492 - DNA, 25 bp, Homo sapien
ctttccaaatacaaattgcttagct

SEQ ID NO: 5947493 - DNA, 25 bp, Homo sapien
tagtcgctttgcctggataccaaat

SEQ ID NO: 5947494 - DNA, 25 bp, Homo sapien
cttcagtattaactttaggcccatg

SEQ ID NO: 5947495 - DNA, 25 bp, Homo sapien
aacaattgttccaaccttagaagat

SEQ ID NO: 5947496 - DNA, 25 bp, Homo sapien
attctgaataatggcgtcgaacaaa

SEQ ID NO: 5947497 - DNA, 25 bp, Homo sapien
aaaaagatattcggacacacccagg

SEQ ID NO: 5947498 - DNA, 25 bp, Homo sapien
cacccagaccaattataccaatgac

SEQ ID NO: 5947499 - DNA, 25 bp, Homo sapien
tgctgatgtgcacttgggtttgtta

SEQ ID NO: 5947500 - DNA, 25 bp, Homo sapien
tcaaagaacttttgaacactctgaa

SEQ ID NO: 5947501 - DNA, 25 bp, Homo sapien
acccaggaatattctgaataatggc

SEQ ID NO: 5947502 - DNA, 25 bp, Homo sapien
ggtttgttatggctaatcctgcgta

SEQ ID NO: 5947503 - DNA, 25 bp, Homo sapien
taggccaccgtaccatttgtttaca

SEQ ID NO: 5947504 - DNA, 25 bp, Homo sapien
gtcatgctcttcatatgtcaaataa

SEQ ID NO: 5947505 - DNA, 25 bp, Homo sapien
agaatttgctgatgtgcacttgggt

SEQ ID NO: 5947506 - DNA, 25 bp, Homo sapien
tgtatcagcggtaatcttgtcatgc

SEQ ID NO: 5947507 - DNA, 25 bp, Homo sapien
gccacttgttcgaatagattcttag

SEQ ID NO: 5947508 - DNA, 25 bp, Homo sapien
cattaaactaaatagttctgttgca

SEQ ID NO: 5947509 - DNA, 25 bp, Homo sapien
tgactcagaatggtttttatcatct

SEQ ID NO: 5947510 - DNA, 25 bp, Homo sapien
agataatatagtcgctttgcctgga

SEQ ID NO: 5947511 - DNA, 25 bp, Homo sapien
tttatcatggatagctgcatcaatt

SEQ ID NO: 5947512 - DNA, 25 bp, Homo sapien
tagcctctggaagcattggctcaaa

SEQ ID NO: 5947513 - DNA, 25 bp, Homo sapien
aaattgcttagcttttaatagtcta

SEQ ID NO: 5947514 - DNA, 25 bp, Homo sapien
ccttagaagatggtccatacgttgc

SEQ ID NO: 5947515 - DNA, 25 bp, Homo sapien
gatcttactaatattggatgcttca

SEQ ID NO: 5947516 - DNA, 25 bp, Homo sapien
ccaaccttagaagatggtccatacg

SEQ ID NO: 5947517 - DNA, 25 bp, Homo sapien
atggatagctgcatcaattgtctgt

SEQ ID NO: 5947518 - DNA, 25 bp, Homo sapien
taccatttgtttacacccagagtcc

SEQ ID NO: 5947519 - DNA, 25 bp, Homo sapien
caaacatgccataacagaattaacg

SEQ ID NO: 5947520 - DNA, 25 bp, Homo sapien
cacggtaatgatgtcgcagtccttg

SEQ ID NO: 5947521 - DNA, 25 bp, Homo sapien
cttgtgtatcagcggtaatcttgtc

SEQ ID NO: 5947522 - DNA, 25 bp, Homo sapien
gcttttaatagtctatcagtaagtt

SEQ ID NO: 5947523 - DNA, 25 bp, Homo sapien
aaatacaaattgcttagcttttaat

SEQ ID NO: 5947524 - DNA, 25 bp, Homo sapien
tagcttttaatagtctatcagtaag

SEQ ID NO: 5947525 - DNA, 25 bp, Homo sapien
atattaactttcacattttctaggc

SEQ ID NO: 5947526 - DNA, 25 bp, Homo sapien
tatgatcatatggatcaataccaag

SEQ ID NO: 5947527 - DNA, 25 bp, Homo sapien
cataatattcttccctatcacaaca

SEQ ID NO: 5947528 - DNA, 25 bp, Homo sapien
gtctatcagtaagttcttgttcttt

SEQ ID NO: 5947529 - DNA, 25 bp, Homo sapien
gtttacacccagagtccaaggataa

SEQ ID NO: 5947530 - DNA, 25 bp, Homo sapien
tcacattttctaggccaccgtacca

SEQ ID NO: 5947531 - DNA, 25 bp, Homo sapien
tggtccatacgttgcgacgatctta

SEQ ID NO: 5947532 - DNA, 25 bp, Homo sapien
agccgaaataacaaattctaaatca

SEQ ID NO: 5947533 - DNA, 25 bp, Homo sapien
tgttatggctaatcctgcgtaaaca

SEQ ID NO: 5947534 - DNA, 25 bp, Homo sapien
aaagaacttttgaacactctgaaat

SEQ ID NO: 5947535 - DNA, 25 bp, Homo sapien
atagctgcatcaattgtctgttcta

SEQ ID NO: 5947536 - DNA, 25 bp, Homo sapien
actaaatagttctgttgcactggtt

SEQ ID NO: 5947537 - DNA, 25 bp, Homo sapien
tccattctctagccgaaataacaaa

SEQ ID NO: 5947538 - DNA, 25 bp, Homo sapien
agaatggtttttatcatctcgttgc

SEQ ID NO: 5947539 - DNA, 25 bp, Homo sapien
cgtgtcatccaatagtaagagacca

SEQ ID NO: 5947540 - DNA, 25 bp, Homo sapien
ttctttcagttcatcataatattct

SEQ ID NO: 5947541 - DNA, 25 bp, Homo sapien
ttcgaatagattcttagtgatatat

SEQ ID NO: 5947542 - DNA, 25 bp, Homo sapien
atatgtcaaataaacttgcttactt

SEQ ID NO: 5947543 - DNA, 25 bp, Homo sapien
ccatatcacccagaccaattatacc

SEQ ID NO: 5947544 - DNA, 25 bp, Homo sapien
gtttttatcatctcgttgccaatga

SEQ ID NO: 5947545 - DNA, 25 bp, Homo sapien
agcggtaatcttgtcatgctcttca

SEQ ID NO: 5947546 - DNA, 25 bp, Homo sapien
taaatttattagcgtataataggcc

SEQ ID NO: 5947547 - DNA, 25 bp, Homo sapien
tttgatagcgaatatttctctaaaa

SEQ ID NO: 5947548 - DNA, 25 bp, Homo sapien
ttagcgtataataggcccatatcac

SEQ ID NO: 5947549 - DNA, 25 bp, Homo sapien
ttgtcatgctcttcatatgtcaaat

SEQ ID NO: 5947550 - DNA, 25 bp, Homo sapien
ggcgtcgaacaaatcatatgatcat

SEQ ID NO: 5947551 - DNA, 25 bp, Homo sapien
cttagcttttaatagtctatcagta

SEQ ID NO: 5947552 - DNA, 25 bp, Homo sapien
tatagtcgctttgcctggataccaa

SEQ ID NO: 5947553 - DNA, 25 bp, Homo sapien
acttaagaaagcagcatgtgtcaca

SEQ ID NO: 5947554 - DNA, 25 bp, Homo sapien
atcatctcgttgccaatgagattag

SEQ ID NO: 5947555 - DNA, 25 bp, Homo sapien
cactatagataatatagtcgctttg

SEQ ID NO: 5947556 - DNA, 25 bp, Homo sapien
ttgttgctgttaccaatgctgcttt

SEQ ID NO: 5947557 - DNA, 25 bp, Homo sapien
atacgttgcgacgatcttactaata

SEQ ID NO: 5947558 - DNA, 25 bp, Homo sapien
tatttcttttttcagcggccgaacg

SEQ ID NO: 5947559 - DNA, 25 bp, Homo sapien
atttccggcagcttacaactcgttt

SEQ ID NO: 5947560 - DNA, 25 bp, Homo sapien
gaagaatttgctgatgtgcacttgg

SEQ ID NO: 5947561 - DNA, 25 bp, Homo sapien
ctcttcatatgtcaaataaacttgc

SEQ ID NO: 5947562 - DNA, 25 bp, Homo sapien
cacgaatcaacaatcgccaacaatg

SEQ ID NO: 5947563 - DNA, 25 bp, Homo sapien
catgctcttcatatgtcaaataaac

SEQ ID NO: 5947564 - DNA, 25 bp, Homo sapien
ttggcaaaagaaacaaccgagctcc

SEQ ID NO: 5947565 - DNA, 25 bp, Homo sapien
aagcagcatgtgtcacagcttgtgt

SEQ ID NO: 5947566 - DNA, 25 bp, Homo sapien
aaacaaccgagctccattctctagc

SEQ ID NO: 5947567 - DNA, 25 bp, Homo sapien
atgacttttgtggctttccattgct

SEQ ID NO: 5947568 - DNA, 25 bp, Homo sapien
tatcacaacatataacaccccatcc

SEQ ID NO: 5947569 - DNA, 25 bp, Homo sapien
taaaatcgtgtcatccaatagtaag

SEQ ID NO: 5947570 - DNA, 25 bp, Homo sapien
ctctagccgaaataacaaattctaa

SEQ ID NO: 5947571 - DNA, 25 bp, Homo sapien
gcctctggaagcattggctcaaaga

SEQ ID NO: 5947572 - DNA, 25 bp, Homo sapien
ttgataataactagtggttggcctt

SEQ ID NO: 5947573 - DNA, 25 bp, Homo sapien
tttgacccccaacaattgttccaac

SEQ ID NO: 5947574 - DNA, 25 bp, Homo sapien
ccatacttaagaaagcagcatgtgt

SEQ ID NO: 5947575 - DNA, 25 bp, Homo sapien
catgtgtcacagcttgtgtatcagc

SEQ ID NO: 5947576 - DNA, 25 bp, Homo sapien
accaatgacttttgtggctttccat

SEQ ID NO: 5947577 - DNA, 25 bp, Homo sapien
tgtaaatttattagcgtataatagg

SEQ ID NO: 5947578 - DNA, 25 bp, Homo sapien
tttatctttgcccacgcagatccca

SEQ ID NO: 5947579 - DNA, 25 bp, Homo sapien
cccagaccaattataccaatgactt

SEQ ID NO: 5947580 - DNA, 25 bp, Homo sapien
gcgtaaacatgccacttgttcgaat

SEQ ID NO: 5947581 - DNA, 25 bp, Homo sapien
actaatattggatgcttcaacacta

SEQ ID NO: 5947582 - DNA, 25 bp, Homo sapien
aaaaaaagatattcggacacaccca

SEQ ID NO: 5947583 - DNA, 25 bp, Homo sapien
agaatgactcagaatggtttttatc

SEQ ID NO: 5947584 - DNA, 25 bp, Homo sapien
atggctaatcctgcgtaaacatgcc

SEQ ID NO: 5947585 - DNA, 25 bp, Homo sapien
tcggacacacccaggaatattctga

SEQ ID NO: 5947586 - DNA, 25 bp, Homo sapien
tgctttccaaatacaaattgcttag

SEQ ID NO: 5947587 - DNA, 25 bp, Homo sapien
tgttctaataagccaggttttaaaa

SEQ ID NO: 5947588 - DNA, 25 bp, Homo sapien
attttctaggccaccgtaccatttg

SEQ ID NO: 5947589 - DNA, 25 bp, Homo sapien
tcaaaagattctgggtactgtgatc

SEQ ID NO: 5947590 - DNA, 25 bp, Homo sapien
atgccacttgttcgaatagattctt

SEQ ID NO: 5947591 - DNA, 25 bp, Homo sapien
agcgaatatttctctaaaatcgtgt

SEQ ID NO: 5947592 - DNA, 25 bp, Homo sapien
ttaggcccatgaagggaatgcacgg

SEQ ID NO: 5947593 - DNA, 25 bp, Homo sapien
gttctgttgcactggttgcatattg

SEQ ID NO: 5947594 - DNA, 25 bp, Homo sapien
taatattcttccctatcacaacata

SEQ ID NO: 5947595 - DNA, 25 bp, Homo sapien
ataaacttgcttacttttcaaacat

SEQ ID NO: 5947596 - DNA, 25 bp, Homo sapien
ttatgaatgatttatcatggatagc

SEQ ID NO: 5947597 - DNA, 25 bp, Homo sapien
gttggccttcagtattaactttagg

SEQ ID NO: 5947598 - DNA, 25 bp, Homo sapien
gctttccattgctcaatcttatcct

SEQ ID NO: 5947599 - DNA, 25 bp, Homo sapien
tgcttagcttttaatagtctatcag

SEQ ID NO: 5947600 - DNA, 25 bp, Homo sapien
cttccctatcacaacatataacacc

SEQ ID NO: 5947601 - DNA, 25 bp, Homo sapien
agtccaaggataaatctttatcttt

SEQ ID NO: 5947602 - DNA, 25 bp, Homo sapien
ggaatgcacggtaatgatgtcgcag

SEQ ID NO: 5947603 - DNA, 25 bp, Homo sapien
atgtcaaataaacttgcttactttt

SEQ ID NO: 5947604 - DNA, 25 bp, Homo sapien
aatgagattagcctctggaagcatt

SEQ ID NO: 5947605 - DNA, 25 bp, Homo sapien
aaacttgcttacttttcaaacatgc

SEQ ID NO: 5947606 - DNA, 25 bp, Homo sapien
agcttgtgtatcagcggtaatcttg

SEQ ID NO: 5947607 - DNA, 25 bp, Homo sapien
tgcacggtaatgatgtcgcagtcct

SEQ ID NO: 5947608 - DNA, 25 bp, Homo sapien
ggatagctgcatcaattgtctgttc

SEQ ID NO: 5947609 - DNA, 25 bp, Homo sapien
gaacaaatcatatgatcatatggat

SEQ ID NO: 5947610 - DNA, 25 bp, Homo sapien
tgcacttgggtttgttatggctaat

SEQ ID NO: 5947611 - DNA, 25 bp, Homo sapien
ctaatcctgcgtaaacatgccactt

SEQ ID NO: 5947612 - DNA, 25 bp, Homo sapien
aattggcaaaagaaacaaccgagct

SEQ ID NO: 5947613 - DNA, 25 bp, Homo sapien
gggtactgtgatctgtgattgataa

SEQ ID NO: 5947614 - DNA, 25 bp, Homo sapien
ctttgcctggataccaaatgaccat

SEQ ID NO: 5947615 - DNA, 25 bp, Homo sapien
aatgctgctttttgatagcgaatat

SEQ ID NO: 5947616 - DNA, 25 bp, Homo sapien
agctgcatcaattgtctgttctaat

SEQ ID NO: 5947617 - DNA, 25 bp, Homo sapien
catataacaccccatccagcatctg

SEQ ID NO: 5947618 - DNA, 25 bp, Homo sapien
attaactttcacattttctaggcca

SEQ ID NO: 5947619 - DNA, 25 bp, Homo sapien
cagttcatcataatattcttcccta

SEQ ID NO: 5947620 - DNA, 25 bp, Homo sapien
tttgctgatgtgcacttgggtttgt

SEQ ID NO: 5947621 - DNA, 25 bp, Homo sapien
caattgtctgttctaataagccagg

SEQ ID NO: 5947622 - DNA, 25 bp, Homo sapien
ccatttgtttacacccagagtccaa

SEQ ID NO: 5947623 - DNA, 25 bp, Homo sapien
taaatgtgaattcggcactggcttg

SEQ ID NO: 5947624 - DNA, 25 bp, Homo sapien
cagaattaacgaactcaaaagattc

SEQ ID NO: 5947625 - DNA, 25 bp, Homo sapien
actttcacattttctaggccaccgt

SEQ ID NO: 5947626 - DNA, 25 bp, Homo sapien
tgtctgttctaataagccaggtttt

SEQ ID NO: 5947627 - DNA, 25 bp, Homo sapien
gttgcgacgatcttactaatattgg

SEQ ID NO: 5947628 - DNA, 25 bp, Homo sapien
taaatagttctgttgcactggttgc

SEQ ID NO: 5947629 - DNA, 25 bp, Homo sapien
tttgaacactctgaaattgcttttt

SEQ ID NO: 5947630 - DNA, 25 bp, Homo sapien
atacaaattgcttagcttttaatag

SEQ ID NO: 5947631 - DNA, 25 bp, Homo sapien
tctttgcccacgcagatcccatact

SEQ ID NO: 5947632 - DNA, 25 bp, Homo sapien
tgaccatttttcaccagttcgaatt

SEQ ID NO: 5947633 - DNA, 25 bp, Homo sapien
aaacatgccacttgttcgaatagat

SEQ ID NO: 5947634 - DNA, 25 bp, Homo sapien
agattagcctctggaagcattggct

SEQ ID NO: 5947635 - DNA, 25 bp, Homo sapien
agcatgtgtcacagcttgtgtatca

SEQ ID NO: 5947636 - DNA, 25 bp, Homo sapien
atcaaaattggcaaaagaaacaacc

SEQ ID NO: 5947637 - DNA, 25 bp, Homo sapien
aatagtaagagaccagtatgctttc

SEQ ID NO: 5947638 - DNA, 25 bp, Homo sapien
ttttgtatatatcaaaattggcaaa

SEQ ID NO: 5947639 - DNA, 25 bp, Homo sapien
tggtttttatcatctcgttgccaat

SEQ ID NO: 5947640 - DNA, 25 bp, Homo sapien
cgaatatttctctaaaatcgtgtca

SEQ ID NO: 5947641 - DNA, 25 bp, Homo sapien
aggcccatatcacccagaccaatta

SEQ ID NO: 5947642 - DNA, 25 bp, Homo sapien
cttgttcgaatagattcttagtgat

SEQ ID NO: 5947643 - DNA, 25 bp, Homo sapien
agttcttgttctttgttatctatca

SEQ ID NO: 5947644 - DNA, 25 bp, Homo sapien
tccctatcacaacatataacacccc

SEQ ID NO: 5947645 - DNA, 25 bp, Homo sapien
cgccaacaatgataaatgtgaattc

SEQ ID NO: 5947646 - DNA, 25 bp, Homo sapien
ccataacagaattaacgaactcaaa

SEQ ID NO: 5947647 - DNA, 25 bp, Homo sapien
tggatgcttcaacactatagataat

SEQ ID NO: 5947648 - DNA, 25 bp, Homo sapien
acattttctaggccaccgtaccatt

SEQ ID NO: 5947649 - DNA, 25 bp, Homo sapien
ttgcttacttttcaaacatgccata

SEQ ID NO: 5947650 - DNA, 25 bp, Homo sapien
aacatgccataacagaattaacgaa

SEQ ID NO: 5947651 - DNA, 25 bp, Homo sapien
gtcgcagtccttgggtaaatacttt

SEQ ID NO: 5947652 - DNA, 25 bp, Homo sapien
atcatatgatcatatggatcaatac

SEQ ID NO: 5947653 - DNA, 25 bp, Homo sapien
tagattcttagtgatatattaactt

SEQ ID NO: 5947654 - DNA, 25 bp, Homo sapien
tttccattgctcaatcttatcctct

SEQ ID NO: 5947655 - DNA, 25 bp, Homo sapien
cttttttcagcggccgaacggtcac

SEQ ID NO: 5947656 - DNA, 25 bp, Homo sapien
tttcgaaagcctcgatttccggcag

SEQ ID NO: 5947657 - DNA, 25 bp, Homo sapien
gtatatatcaaaattggcaaaagaa

SEQ ID NO: 5947658 - DNA, 25 bp, Homo sapien
ccaaatacaaattgcttagctttta

SEQ ID NO: 5947659 - DNA, 25 bp, Homo sapien
cagcttacaactcgtttgaccccca

SEQ ID NO: 5947660 - DNA, 25 bp, Homo sapien
gattgataataactagtggttggcc

SEQ ID NO: 5947661 - DNA, 25 bp, Homo sapien
tggttgcatattgaagaatttgctg

SEQ ID NO: 5947662 - DNA, 25 bp, Homo sapien
tcaccagttcgaatttagctgaggc

SEQ ID NO: 5947663 - DNA, 25 bp, Homo sapien
tttattagcgtataataggcccata

SEQ ID NO: 5947664 - DNA, 25 bp, Homo sapien
acacacccaggaatattctgaataa

SEQ ID NO: 5947665 - DNA, 25 bp, Homo sapien
tattgaagaatttgctgatgtgcac

SEQ ID NO: 5947666 - DNA, 25 bp, Homo sapien
acaaccgagctccattctctagccg

SEQ ID NO: 5947667 - DNA, 25 bp, Homo sapien
gttgaaaccacgaatcaacaatcgc

SEQ ID NO: 5947668 - DNA, 25 bp, Homo sapien
ttacaactcgtttgacccccaacaa

SEQ ID NO: 5947669 - DNA, 25 bp, Homo sapien
tattaactttaggcccatgaaggga

SEQ ID NO: 5947670 - DNA, 25 bp, Homo sapien
tgtgcacttgggtttgttatggcta

SEQ ID NO: 5947671 - DNA, 25 bp, Homo sapien
cagtccttgggtaaatacttttcga

SEQ ID NO: 5947672 - DNA, 25 bp, Homo sapien
tgaacactctgaaattgctttttgt

SEQ ID NO: 5947673 - DNA, 25 bp, Homo sapien
ttgcaattgttgctgttaccaatgc

SEQ ID NO: 5947674 - DNA, 25 bp, Homo sapien
ggccaccgtaccatttgtttacacc

SEQ ID NO: 5947675 - DNA, 25 bp, Homo sapien
ttttaatagtctatcagtaagttct

SEQ ID NO: 5947676 - DNA, 25 bp, Homo sapien
gatcaataccaagttgaaaccacga

SEQ ID NO: 5947677 - DNA, 25 bp, Homo sapien
gataaatctttatctttgcccacgc

SEQ ID NO: 5947678 - DNA, 25 bp, Homo sapien
ctctgaaattgctttttgtatatat

SEQ ID NO: 5947679 - DNA, 25 bp, Homo sapien
gttcgaatttagctgaggcatattt

SEQ ID NO: 5947680 - DNA, 25 bp, Homo sapien
ggaagcattggctcaaagaactttt

SEQ ID NO: 5947681 - DNA, 25 bp, Homo sapien
ttaaactaaatagttctgttgcact

SEQ ID NO: 5947682 - DNA, 25 bp, Homo sapien
acaaattgcttagcttttaatagtc

SEQ ID NO: 5947683 - DNA, 25 bp, Homo sapien
ttaatagtctatcagtaagttcttg

SEQ ID NO: 5947684 - DNA, 25 bp, Homo sapien
ccatgaagggaatgcacggtaatga

SEQ ID NO: 5947685 - DNA, 25 bp, Homo sapien
aaatcgtgtcatccaatagtaagag

SEQ ID NO: 5947686 - DNA, 25 bp, Homo sapien
cgtcgaacaaatcatatgatcatat

SEQ ID NO: 5947687 - DNA, 25 bp, Homo sapien
agaagatggtccatacgttgcgacg

SEQ ID NO: 5947688 - DNA, 25 bp, Homo sapien
tttttgatagcgaatatttctctaa

SEQ ID NO: 5947689 - DNA, 25 bp, Homo sapien
ataatatagtcgctttgcctggata

SEQ ID NO: 5947690 - DNA, 25 bp, Homo sapien
actcaaaagattctgggtactgtga

SEQ ID NO: 5947691 - DNA, 25 bp, Homo sapien
agaaacaaccgagctccattctcta

SEQ ID NO: 5947692 - DNA, 25 bp, Homo sapien
gacttttgtggctttccattgctca

SEQ ID NO: 5947693 - DNA, 25 bp, Homo sapien
cattctctagccgaaataacaaatt

SEQ ID NO: 5947694 - DNA, 25 bp, Homo sapien
aacagaattaacgaactcaaaagat

SEQ ID NO: 5947695 - DNA, 25 bp, Homo sapien
ctgatgtgcacttgggtttgttatg

SEQ ID NO: 5947696 - DNA, 25 bp, Homo sapien
tgacccccaacaattgttccaacct

SEQ ID NO: 5947697 - DNA, 25 bp, Homo sapien
tttcaccagttcgaatttagctgag

SEQ ID NO: 5947698 - DNA, 25 bp, Homo sapien
aatacttttcgaaagcctcgatttc

SEQ ID NO: 5947699 - DNA, 25 bp, Homo sapien
cgaacggtcactagaatgactcaga

SEQ ID NO: 5947700 - DNA, 25 bp, Homo sapien
ataactagtggttggccttcagtat

SEQ ID NO: 5947701 - DNA, 25 bp, Homo sapien
caaaattggcaaaagaaacaaccga

SEQ ID NO: 5947702 - DNA, 25 bp, Homo sapien
catctcgttgccaatgagattagcc

SEQ ID NO: 5947703 - DNA, 25 bp, Homo sapien
agggaatgcacggtaatgatgtcgc

SEQ ID NO: 5947704 - DNA, 25 bp, Homo sapien
aacttttgaacactctgaaattgct

SEQ ID NO: 5947705 - DNA, 25 bp, Homo sapien
cgctttgcctggataccaaatgacc

SEQ ID NO: 5947706 - DNA, 25 bp, Homo sapien
tatctttgcccacgcagatcccata

SEQ ID NO: 5947707 - DNA, 25 bp, Homo sapien
cgtataataggcccatatcacccag

SEQ ID NO: 5947708 - DNA, 25 bp, Homo sapien
tatgtatttcttttttcagcggccg

SEQ ID NO: 5947709 - DNA, 25 bp, Homo sapien
ctgcatcaattgtctgttctaataa

SEQ ID NO: 5947710 - DNA, 25 bp, Homo sapien
caaataaacttgcttacttttcaaa

SEQ ID NO: 5947711 - DNA, 25 bp, Homo sapien
tttgtggctttccattgctcaatct

SEQ ID NO: 5947712 - DNA, 25 bp, Homo sapien
ccagcatctgtaaatttattagcgt

SEQ ID NO: 5947713 - DNA, 25 bp, Homo sapien
aggataaatctttatctttgcccac

SEQ ID NO: 5947714 - DNA, 25 bp, Homo sapien
ggctaatcctgcgtaaacatgccac

SEQ ID NO: 5947715 - DNA, 25 bp, Homo sapien
cctatcacaacatataacaccccat

SEQ ID NO: 5947716 - DNA, 25 bp, Homo sapien
atcgtgtcatccaatagtaagagac

SEQ ID NO: 5947717 - DNA, 25 bp, Homo sapien
gttgccaatgagattagcctctgga

SEQ ID NO: 5947718 - DNA, 25 bp, Homo sapien
cgacgatcttactaatattggatgc

SEQ ID NO: 5947719 - DNA, 25 bp, Homo sapien
aagttgaaaccacgaatcaacaatc

SEQ ID NO: 5947720 - DNA, 25 bp, Homo sapien
aacatataacaccccatccagcatc

SEQ ID NO: 5947721 - DNA, 25 bp, Homo sapien
ttgtttacacccagagtccaaggat

SEQ ID NO: 5947722 - DNA, 25 bp, Homo sapien
aatctttatctttgcccacgcagat

SEQ ID NO: 5947723 - DNA, 25 bp, Homo sapien
taatattggatgcttcaacactata

SEQ ID NO: 5947724 - DNA, 25 bp, Homo sapien
aactagtggttggccttcagtatta

SEQ ID NO: 5947725 - DNA, 25 bp, Homo sapien
tcagtattaactttaggcccatgaa

SEQ ID NO: 5947726 - DNA, 25 bp, Homo sapien
acacccaggaatattctgaataatg

SEQ ID NO: 5947727 - DNA, 25 bp, Homo sapien
gcttgcaattgttgctgttaccaat

SEQ ID NO: 5947728 - DNA, 25 bp, Homo sapien
gtcgctttgcctggataccaaatga

SEQ ID NO: 5947729 - DNA, 25 bp, Homo sapien
ttaactttaggcccatgaagggaat

SEQ ID NO: 5947730 - DNA, 25 bp, Homo sapien
acttttcaaacatgccataacagaa

SEQ ID NO: 5947731 - DNA, 25 bp, Homo sapien
gccgaacggtcactagaatgactca

SEQ ID NO: 5947732 - DNA, 25 bp, Homo sapien
ccaggaatattctgaataatggcgt

SEQ ID NO: 5947733 - DNA, 25 bp, Homo sapien
gcctcgatttccggcagcttacaac

SEQ ID NO: 5947734 - DNA, 25 bp, Homo sapien
tgttgcactggttgcatattgaaga

SEQ ID NO: 5947735 - DNA, 25 bp, Homo sapien
tgaattcggcactggcttgcaattg

SEQ ID NO: 5947736 - DNA, 25 bp, Homo sapien
aggcccatgaagggaatgcacggta

SEQ ID NO: 5947737 - DNA, 25 bp, Homo sapien
gaggcatatttttctttcagttcat

SEQ ID NO: 5947738 - DNA, 25 bp, Homo sapien
ttaaaaaaagatattcggacacacc

SEQ ID NO: 5947739 - DNA, 25 bp, Homo sapien
cgatttccggcagcttacaactcgt

SEQ ID NO: 5947740 - DNA, 25 bp, Homo sapien
aatggtttttatcatctcgttgcca

SEQ ID NO: 5947741 - DNA, 25 bp, Homo sapien
agctgaggcatatttttctttcagt

SEQ ID NO: 5947742 - DNA, 25 bp, Homo sapien
atcgccaacaatgataaatgtgaat

SEQ ID NO: 5947743 - DNA, 25 bp, Homo sapien
accacgaatcaacaatcgccaacaa

SEQ ID NO: 5947744 - DNA, 25 bp, Homo sapien
ctgaaattgctttttgtatatatca

SEQ ID NO: 5947745 - DNA, 25 bp, Homo sapien
tgccaatgagattagcctctggaag

SEQ ID NO: 5947746 - DNA, 25 bp, Homo sapien
tccaaggataaatctttatctttgc

SEQ ID NO: 5947747 - DNA, 25 bp, Homo sapien
ttacttttcaaacatgccataacag

SEQ ID NO: 5947748 - DNA, 25 bp, Homo sapien
ccatccagcatctgtaaatttatta

SEQ ID NO: 5947749 - DNA, 25 bp, Homo sapien
agcgtataataggcccatatcaccc

SEQ ID NO: 5947750 - DNA, 25 bp, Homo sapien
cttttgtggctttccattgctcaat

SEQ ID NO: 5947751 - DNA, 25 bp, Homo sapien
ccagtatgctttccaaatacaaatt

SEQ ID NO: 5947752 - DNA, 25 bp, Homo sapien
atatcaaaattggcaaaagaaacaa

SEQ ID NO: 5947753 - DNA, 25 bp, Homo sapien
gcctggataccaaatgaccattttt

SEQ ID NO: 5947754 - DNA, 25 bp, Homo sapien
tcagcggtaatcttgtcatgctctt

SEQ ID NO: 5947755 - DNA, 25 bp, Homo sapien
cttgggtttgttatggctaatcctg

SEQ ID NO: 5947756 - DNA, 25 bp, Homo sapien
ccaattataccaatgacttttgtgg

SEQ ID NO: 5947757 - DNA, 25 bp, Homo sapien
gaatttagctgaggcatatttttct

SEQ ID NO: 5947758 - DNA, 25 bp, Homo sapien
gtaagagaccagtatgctttccaaa

SEQ ID NO: 5947759 - DNA, 25 bp, Homo sapien
ttttatgaatgatttatcatggata

SEQ ID NO: 5947760 - DNA, 25 bp, Homo sapien
ctgtgattgataataactagtggtt

SEQ ID NO: 5947761 - DNA, 25 bp, Homo sapien
ttctctagccgaaataacaaattct

SEQ ID NO: 5947762 - DNA, 25 bp, Homo sapien
atggcgtcgaacaaatcatatgatc

SEQ ID NO: 5947763 - DNA, 25 bp, Homo sapien
aaagaaacaaccgagctccattctc

SEQ ID NO: 5947764 - DNA, 25 bp, Homo sapien
tataacaccccatccagcatctgta

SEQ ID NO: 5947765 - DNA, 25 bp, Homo sapien
gttgcatattgaagaatttgctgat

SEQ ID NO: 5947766 - DNA, 25 bp, Homo sapien
acgttgcgacgatcttactaatatt

SEQ ID NO: 5947767 - DNA, 25 bp, Homo sapien
tgtggctttccattgctcaatctta

SEQ ID NO: 5947768 - DNA, 25 bp, Homo sapien
acaccccatccagcatctgtaaatt

SEQ ID NO: 5947769 - DNA, 25 bp, Homo sapien
aagaaagcagcatgtgtcacagctt

SEQ ID NO: 5947770 - DNA, 25 bp, Homo sapien
ggcagcttacaactcgtttgacccc

SEQ ID NO: 5947771 - DNA, 25 bp, Homo sapien
acaaatcatatgatcatatggatca

SEQ ID NO: 5947772 - DNA, 25 bp, Homo sapien
gctttttgatagcgaatatttctct

SEQ ID NO: 5947773 - DNA, 25 bp, Homo sapien
gattcttagtgatatattaactttc

SEQ ID NO: 5947774 - DNA, 25 bp, Homo sapien
acacccagagtccaaggataaatct

SEQ ID NO: 5947775 - DNA, 25 bp, Homo sapien
tttttcagcggccgaacggtcacta

SEQ ID NO: 5947776 - DNA, 25 bp, Homo sapien
ccaatgagattagcctctggaagca

SEQ ID NO: 5947777 - DNA, 25 bp, Homo sapien
ttccaaccttagaagatggtccata

SEQ ID NO: 5947778 - DNA, 25 bp, Homo sapien
ccggcagcttacaactcgtttgacc

SEQ ID NO: 5947779 - DNA, 25 bp, Homo sapien
aaccttagaagatggtccatacgtt

SEQ ID NO: 5947780 - DNA, 25 bp, Homo sapien
caatgacttttgtggctttccattg

SEQ ID NO: 5947781 - DNA, 25 bp, Homo sapien
gatttatcatggatagctgcatcaa

SEQ ID NO: 5947782 - DNA, 25 bp, Homo sapien
tatttctctaaaatcgtgtcatcca

SEQ ID NO: 5947783 - DNA, 25 bp, Homo sapien
tggctttccattgctcaatcttatc

SEQ ID NO: 5947784 - DNA, 25 bp, Homo sapien
tcgaaagcctcgatttccggcagct

SEQ ID NO: 5947785 - DNA, 25 bp, Homo sapien
cggtcactagaatgactcagaatgg

SEQ ID NO: 5947786 - DNA, 25 bp, Homo sapien
tctaaaatcgtgtcatccaatagta

SEQ ID NO: 5947787 - DNA, 25 bp, Homo sapien
tctgaataatggcgtcgaacaaatc

SEQ ID NO: 5947788 - DNA, 25 bp, Homo sapien
atcatatggatcaataccaagttga

SEQ ID NO: 5947789 - DNA, 25 bp, Homo sapien
gtgattgataataactagtggttgg

SEQ ID NO: 5947790 - DNA, 25 bp, Homo sapien
gtcaaataaacttgcttacttttca

SEQ ID NO: 5947791 - DNA, 25 bp, Homo sapien
atccagcatctgtaaatttattagc

SEQ ID NO: 5947792 - DNA, 25 bp, Homo sapien
tccattgctcaatcttatcctctga

SEQ ID NO: 5947793 - DNA, 25 bp, Homo sapien
tgctgctttttgatagcgaatattt

SEQ ID NO: 5947794 - DNA, 25 bp, Homo sapien
atttagctgaggcatatttttcttt

SEQ ID NO: 5947795 - DNA, 25 bp, Homo sapien
tcttactaatattggatgcttcaac

SEQ ID NO: 5947796 - DNA, 25 bp, Homo sapien
aatttgctgatgtgcacttgggttt

SEQ ID NO: 5947797 - DNA, 25 bp, Homo sapien
caattgttccaaccttagaagatgg

SEQ ID NO: 5947798 - DNA, 25 bp, Homo sapien
gaattaacgaactcaaaagattctg

SEQ ID NO: 5947799 - DNA, 25 bp, Homo sapien
tgtgtcacagcttgtgtatcagcgg

SEQ ID NO: 5947800 - DNA, 25 bp, Homo sapien
acatgccacttgttcgaatagattc

SEQ ID NO: 5947801 - DNA, 25 bp, Homo sapien
aatcaacaatcgccaacaatgataa

SEQ ID NO: 5947802 - DNA, 25 bp, Homo sapien
accgtaccatttgtttacacccaga

SEQ ID NO: 5947803 - DNA, 25 bp, Homo sapien
atcattaaactaaatagttctgttg

SEQ ID NO: 5947804 - DNA, 25 bp, Homo sapien
gttgctgttaccaatgctgcttttt

SEQ ID NO: 5947805 - DNA, 25 bp, Homo sapien
aaccgagctccattctctagccgaa

SEQ ID NO: 5947806 - DNA, 25 bp, Homo sapien
taccaagttgaaaccacgaatcaac

SEQ ID NO: 5947807 - DNA, 25 bp, Homo sapien
atattctgaataatggcgtcgaaca

SEQ ID NO: 5947808 - DNA, 25 bp, Homo sapien
ttttctttcagttcatcataatatt

SEQ ID NO: 5947809 - DNA, 25 bp, Homo sapien
cactagaatgactcagaatggtttt

SEQ ID NO: 5947810 - DNA, 25 bp, Homo sapien
gagctccattctctagccgaaataa

SEQ ID NO: 5947811 - DNA, 25 bp, Homo sapien
ttccaaatacaaattgcttagcttt

SEQ ID NO: 5947812 - DNA, 25 bp, Homo sapien
tatcatggatagctgcatcaattgt

SEQ ID NO: 5947813 - DNA, 25 bp, Homo sapien
aattcggcactggcttgcaattgtt

SEQ ID NO: 5947814 - DNA, 25 bp, Homo sapien
aatagtctatcagtaagttcttgtt

SEQ ID NO: 5947815 - DNA, 25 bp, Homo sapien
tttgcccacgcagatcccatactta

SEQ ID NO: 5947816 - DNA, 25 bp, Homo sapien
ggataccaaatgaccatttttcacc

SEQ ID NO: 5947817 - DNA, 25 bp, Homo sapien
agtattaactttaggcccatgaagg

SEQ ID NO: 5947818 - DNA, 25 bp, Homo sapien
cggccgaacggtcactagaatgact

SEQ ID NO: 5947819 - DNA, 25 bp, Homo sapien
gaaataacaaattctaaatcatctt

SEQ ID NO: 5947820 - DNA, 25 bp, Homo sapien
aagcattggctcaaagaacttttga

SEQ ID NO: 5947821 - DNA, 25 bp, Homo sapien
tggccttcagtattaactttaggcc

SEQ ID NO: 5947822 - DNA, 25 bp, Homo sapien
tgttcgaatagattcttagtgatat

SEQ ID NO: 5947823 - DNA, 25 bp, Homo sapien
ctgaggcatatttttctttcagttc

SEQ ID NO: 5947824 - DNA, 25 bp, Homo sapien
tgtgtatcagcggtaatcttgtcat

SEQ ID NO: 5947825 - DNA, 25 bp, Homo sapien
tgaataatggcgtcgaacaaatcat

SEQ ID NO: 5947826 - DNA, 25 bp, Homo sapien
tatggatcaataccaagttgaaacc

SEQ ID NO: 5947827 - DNA, 25 bp, Homo sapien
gatggtccatacgttgcgacgatct

SEQ ID NO: 5947828 - DNA, 25 bp, Homo sapien
atgaatgatttatcatggatagctg

SEQ ID NO: 5947829 - DNA, 25 bp, Homo sapien
accaaatgaccatttttcaccagtt

SEQ ID NO: 5947830 - DNA, 25 bp, Homo sapien
tggcggtggacgtgttgcagttcga

SEQ ID NO: 5947831 - DNA, 25 bp, Homo sapien
aaaccaattaacgtgcctgttacca

SEQ ID NO: 5947832 - DNA, 25 bp, Homo sapien
agatcataaatcctccaaaccacta

SEQ ID NO: 5947833 - DNA, 25 bp, Homo sapien
cctatcactaatagcaagagctcac

SEQ ID NO: 5947834 - DNA, 25 bp, Homo sapien
ggtggatgaaaaccataataggcaa

SEQ ID NO: 5947835 - DNA, 25 bp, Homo sapien
tgctccaaattattgttatagatgt

SEQ ID NO: 5947836 - DNA, 25 bp, Homo sapien
ttgtcctgacaccaattaccttttc

SEQ ID NO: 5947837 - DNA, 25 bp, Homo sapien
aatgtgtgaccttctatggtccgat

SEQ ID NO: 5947838 - DNA, 25 bp, Homo sapien
ccaattggtaatggaaggatattct

SEQ ID NO: 5947839 - DNA, 25 bp, Homo sapien
aaagtacggcagtgcgaacgtgtgg

SEQ ID NO: 5947840 - DNA, 25 bp, Homo sapien
acgactatgtaaaatggcggtggac

SEQ ID NO: 5947841 - DNA, 25 bp, Homo sapien
ctgtgagacccggtgaaccaaccgt

SEQ ID NO: 5947842 - DNA, 25 bp, Homo sapien
atttccccgttactgccttggtgga

SEQ ID NO: 5947843 - DNA, 25 bp, Homo sapien
ggatatggaaattgatgaccctatg

SEQ ID NO: 5947844 - DNA, 25 bp, Homo sapien
ccgactctcgacgaagacatgaata

SEQ ID NO: 5947845 - DNA, 25 bp, Homo sapien
atgtaaaatggcggtggacgtgttg

SEQ ID NO: 5947846 - DNA, 25 bp, Homo sapien
cagtccgagaggtgcaggcttcact

SEQ ID NO: 5947847 - DNA, 25 bp, Homo sapien
attcttacaatacgatccatctgtg

SEQ ID NO: 5947848 - DNA, 25 bp, Homo sapien
ctcaccaattggtaatggaaggata

SEQ ID NO: 5947849 - DNA, 25 bp, Homo sapien
taaaccggggtcctcgggtatagca

SEQ ID NO: 5947850 - DNA, 25 bp, Homo sapien
ttaaaccaattaacgtgcctgttac

SEQ ID NO: 5947851 - DNA, 25 bp, Homo sapien
cagcttgaccaatggattgagcatt

SEQ ID NO: 5947852 - DNA, 25 bp, Homo sapien
tgacgaagacacagatgaagagttg

SEQ ID NO: 5947853 - DNA, 25 bp, Homo sapien
gtccgatcctgatgatagaggcgga

SEQ ID NO: 5947854 - DNA, 25 bp, Homo sapien
catgaaagtcagatatccacataga

SEQ ID NO: 5947855 - DNA, 25 bp, Homo sapien
aaggcgcgttctaatgacgaagaca

SEQ ID NO: 5947856 - DNA, 25 bp, Homo sapien
cttggtggataataaaatcttctgt

SEQ ID NO: 5947857 - DNA, 25 bp, Homo sapien
ctgttgagaccgtatcttacctagt

SEQ ID NO: 5947858 - DNA, 25 bp, Homo sapien
cagcaaaatgttgtcaccattttca

SEQ ID NO: 5947859 - DNA, 25 bp, Homo sapien
atataaatcagcttgaccaatggat

SEQ ID NO: 5947860 - DNA, 25 bp, Homo sapien
caattaccttttcatgggtgattac

SEQ ID NO: 5947861 - DNA, 25 bp, Homo sapien
ggagaatgttaaaccaattaacgtg

SEQ ID NO: 5947862 - DNA, 25 bp, Homo sapien
aactgaccaatacaaatataaatca

SEQ ID NO: 5947863 - DNA, 25 bp, Homo sapien
gaggatattattctgttgagaccgt

SEQ ID NO: 5947864 - DNA, 25 bp, Homo sapien
gaggtggatgaaaaccataataggc

SEQ ID NO: 5947865 - DNA, 25 bp, Homo sapien
gatcaattatcaccgactctcgacg

SEQ ID NO: 5947866 - DNA, 25 bp, Homo sapien
tagaatacaggaagtgcctcacgaa

SEQ ID NO: 5947867 - DNA, 25 bp, Homo sapien
accactaaaactgaccaatacaaat

SEQ ID NO: 5947868 - DNA, 25 bp, Homo sapien
atggaaggatattcttggtctcacc

SEQ ID NO: 5947869 - DNA, 25 bp, Homo sapien
gtctaggcagattacccaagtatat

SEQ ID NO: 5947870 - DNA, 25 bp, Homo sapien
tcgattatttccccgttactgcctt

SEQ ID NO: 5947871 - DNA, 25 bp, Homo sapien
ccctatgcatggttcagatgaagat

SEQ ID NO: 5947872 - DNA, 25 bp, Homo sapien
gaagacatgaatagtgatgacggca

SEQ ID NO: 5947873 - DNA, 25 bp, Homo sapien
tacgtggatagaggatattattctg

SEQ ID NO: 5947874 - DNA, 25 bp, Homo sapien
ccaaattattgttatagatgtggta

SEQ ID NO: 5947875 - DNA, 25 bp, Homo sapien
tggatagaggatattattctgttga

SEQ ID NO: 5947876 - DNA, 25 bp, Homo sapien
gatcctgatgatagaggcggatggg

SEQ ID NO: 5947877 - DNA, 25 bp, Homo sapien
agtgatgacggcaaaaataatacga

SEQ ID NO: 5947878 - DNA, 25 bp, Homo sapien
attttcagtgctccaaattattgtt

SEQ ID NO: 5947879 - DNA, 25 bp, Homo sapien
agtgcctcacgaaggtccaatgtgt

SEQ ID NO: 5947880 - DNA, 25 bp, Homo sapien
gccactatcagaagacgatgtagca

SEQ ID NO: 5947881 - DNA, 25 bp, Homo sapien
ttttggtcaagacatcagtgagcaa

SEQ ID NO: 5947882 - DNA, 25 bp, Homo sapien
acagatgaagagttggaagatttta

SEQ ID NO: 5947883 - DNA, 25 bp, Homo sapien
ttcatgggtgattacgtggatagag

SEQ ID NO: 5947884 - DNA, 25 bp, Homo sapien
aagacatcagtgagcaattcaatca

SEQ ID NO: 5947885 - DNA, 25 bp, Homo sapien
aaagtcagatatccacatagaatta

SEQ ID NO: 5947886 - DNA, 25 bp, Homo sapien
gcggtggacgtgttgcagttcgagg

SEQ ID NO: 5947887 - DNA, 25 bp, Homo sapien
tagatgtggtaaccaggccgctatt

SEQ ID NO: 5947888 - DNA, 25 bp, Homo sapien
tatatgggttttatgacgaatgttt

SEQ ID NO: 5947889 - DNA, 25 bp, Homo sapien
acgtgcctgttaccatttgtggtga

SEQ ID NO: 5947890 - DNA, 25 bp, Homo sapien
tgattacgtggatagaggatattat

SEQ ID NO: 5947891 - DNA, 25 bp, Homo sapien
actaatgacctatcactaatagcaa

SEQ ID NO: 5947892 - DNA, 25 bp, Homo sapien
aaaactgaccaatacaaatataaat

SEQ ID NO: 5947893 - DNA, 25 bp, Homo sapien
cgggtatagcagatcataaatcctc

SEQ ID NO: 5947894 - DNA, 25 bp, Homo sapien
gacaatagatcaagttagagattta

SEQ ID NO: 5947895 - DNA, 25 bp, Homo sapien
tactgccttggtggataataaaatc

SEQ ID NO: 5947896 - DNA, 25 bp, Homo sapien
gttactgccttggtggataataaaa

SEQ ID NO: 5947897 - DNA, 25 bp, Homo sapien
cgtggatagaggatattattctgtt

SEQ ID NO: 5947898 - DNA, 25 bp, Homo sapien
gtaaatgcgagccactatcagaaga

SEQ ID NO: 5947899 - DNA, 25 bp, Homo sapien
attaccttttcatgggtgattacgt

SEQ ID NO: 5947900 - DNA, 25 bp, Homo sapien
gaatagtgatgacggcaaaaataat

SEQ ID NO: 5947901 - DNA, 25 bp, Homo sapien
aaccataataggcaattcttacaat

SEQ ID NO: 5947902 - DNA, 25 bp, Homo sapien
cactaaaactgaccaatacaaatat

SEQ ID NO: 5947903 - DNA, 25 bp, Homo sapien
gactatgtaaaatggcggtggacgt

SEQ ID NO: 5947904 - DNA, 25 bp, Homo sapien
attcgattatttccccgttactgcc

SEQ ID NO: 5947905 - DNA, 25 bp, Homo sapien
acgatgtagcacgactatgtaaaat

SEQ ID NO: 5947906 - DNA, 25 bp, Homo sapien
ttggtctcaccagcaaaatgttgtc

SEQ ID NO: 5947907 - DNA, 25 bp, Homo sapien
ggtaatggaaggatattcttggtct

SEQ ID NO: 5947908 - DNA, 25 bp, Homo sapien
acaccaattaccttttcatgggtga

SEQ ID NO: 5947909 - DNA, 25 bp, Homo sapien
gatagaggatattattctgttgaga

SEQ ID NO: 5947910 - DNA, 25 bp, Homo sapien
tgttagaacttttcaagattggtgg

SEQ ID NO: 5947911 - DNA, 25 bp, Homo sapien
ttggtaatggaaggatattcttggt

SEQ ID NO: 5947912 - DNA, 25 bp, Homo sapien
ggaaggatattcttggtctcaccag

SEQ ID NO: 5947913 - DNA, 25 bp, Homo sapien
atgacggcaaaaataatacgaaggc

SEQ ID NO: 5947914 - DNA, 25 bp, Homo sapien
cgaatgtttgagaaagtacggcagt

SEQ ID NO: 5947915 - DNA, 25 bp, Homo sapien
ttatttccccgttactgccttggtg

SEQ ID NO: 5947916 - DNA, 25 bp, Homo sapien
tctcacccatgatagagacaataga

SEQ ID NO: 5947917 - DNA, 25 bp, Homo sapien
ttacaatacgatccatctgtgagac

SEQ ID NO: 5947918 - DNA, 25 bp, Homo sapien
gcagtgcgaacgtgtggaaaatgtt

SEQ ID NO: 5947919 - DNA, 25 bp, Homo sapien
aatacgatccatctgtgagacccgg

SEQ ID NO: 5947920 - DNA, 25 bp, Homo sapien
ataaatcagcttgaccaatggattg

SEQ ID NO: 5947921 - DNA, 25 bp, Homo sapien
gatgtagcacgactatgtaaaatgg

SEQ ID NO: 5947922 - DNA, 25 bp, Homo sapien
caattcaatcacactaatgacctat

SEQ ID NO: 5947923 - DNA, 25 bp, Homo sapien
cgtgtggaaaatgtttaccgatcta

SEQ ID NO: 5947924 - DNA, 25 bp, Homo sapien
attactatacttaggggcaatcacg

SEQ ID NO: 5947925 - DNA, 25 bp, Homo sapien
ccggggtcctcgggtatagcagatc

SEQ ID NO: 5947926 - DNA, 25 bp, Homo sapien
acacagatgaagagttggaagattt

SEQ ID NO: 5947927 - DNA, 25 bp, Homo sapien
attacgtggatagaggatattattc

SEQ ID NO: 5947928 - DNA, 25 bp, Homo sapien
gaaaatgtttaccgatctattcgat

SEQ ID NO: 5947929 - DNA, 25 bp, Homo sapien
atacttaggggcaatcacgagtcta

SEQ ID NO: 5947930 - DNA, 25 bp, Homo sapien
ttatgacgaatgtttgagaaagtac

SEQ ID NO: 5947931 - DNA, 25 bp, Homo sapien
cctgacaccaattaccttttcatgg

SEQ ID NO: 5947932 - DNA, 25 bp, Homo sapien
agtcagatatccacatagaattact

SEQ ID NO: 5947933 - DNA, 25 bp, Homo sapien
tggattgagcatttgagtaaatgcg

SEQ ID NO: 5947934 - DNA, 25 bp, Homo sapien
tcctcgggtatagcagatcataaat

SEQ ID NO: 5947935 - DNA, 25 bp, Homo sapien
gttatagatgtggtaaccaggccgc

SEQ ID NO: 5947936 - DNA, 25 bp, Homo sapien
tttcagtgctccaaattattgttat

SEQ ID NO: 5947937 - DNA, 25 bp, Homo sapien
gtccgagaggtgcaggcttcacttt

SEQ ID NO: 5947938 - DNA, 25 bp, Homo sapien
aaattattgttatagatgtggtaac

SEQ ID NO: 5947939 - DNA, 25 bp, Homo sapien
atgtttaccgatctattcgattatt

SEQ ID NO: 5947940 - DNA, 25 bp, Homo sapien
ccgagaggtgcaggcttcacttttg

SEQ ID NO: 5947941 - DNA, 25 bp, Homo sapien
tctatggtccgatcctgatgataga

SEQ ID NO: 5947942 - DNA, 25 bp, Homo sapien
ccgttactgccttggtggataataa

SEQ ID NO: 5947943 - DNA, 25 bp, Homo sapien
tggaggtctctcacccatgatagag

SEQ ID NO: 5947944 - DNA, 25 bp, Homo sapien
agaatgttaaaccaattaacgtgcc

SEQ ID NO: 5947945 - DNA, 25 bp, Homo sapien
attatggaggtggatgaaaaccata

SEQ ID NO: 5947946 - DNA, 25 bp, Homo sapien
gagacaatagatcaagttagagatt

SEQ ID NO: 5947947 - DNA, 25 bp, Homo sapien
ggaaattgatgaccctatgcatggt

SEQ ID NO: 5947948 - DNA, 25 bp, Homo sapien
ggtcctcgggtatagcagatcataa

SEQ ID NO: 5947949 - DNA, 25 bp, Homo sapien
acacggtcaattccatgacttgtta

SEQ ID NO: 5947950 - DNA, 25 bp, Homo sapien
tgaccaatacaaatataaatcagct

SEQ ID NO: 5947951 - DNA, 25 bp, Homo sapien
tgtttgagaaagtacggcagtgcga

SEQ ID NO: 5947952 - DNA, 25 bp, Homo sapien
ctgccttggtggataataaaatctt

SEQ ID NO: 5947953 - DNA, 25 bp, Homo sapien
ttgaccaatggattgagcatttgag

SEQ ID NO: 5947954 - DNA, 25 bp, Homo sapien
aattggtaatggaaggatattcttg

SEQ ID NO: 5947955 - DNA, 25 bp, Homo sapien
taggcaattcttacaatacgatcca

SEQ ID NO: 5947956 - DNA, 25 bp, Homo sapien
atctattcgattatttccccgttac

SEQ ID NO: 5947957 - DNA, 25 bp, Homo sapien
ttggtcaagacatcagtgagcaatt

SEQ ID NO: 5947958 - DNA, 25 bp, Homo sapien
atccacatagaattactatacttag

SEQ ID NO: 5947959 - DNA, 25 bp, Homo sapien
agtatatgggttttatgacgaatgt

SEQ ID NO: 5947960 - DNA, 25 bp, Homo sapien
agttgccatgaaagtcagatatcca

SEQ ID NO: 5947961 - DNA, 25 bp, Homo sapien
gcaaaaataatacgaaggcgcgttc

SEQ ID NO: 5947962 - DNA, 25 bp, Homo sapien
aaggatattcttggtctcaccagca

SEQ ID NO: 5947963 - DNA, 25 bp, Homo sapien
ataatacgaaggcgcgttctaatga

SEQ ID NO: 5947964 - DNA, 25 bp, Homo sapien
atttgagtaaatgcgagccactatc

SEQ ID NO: 5947965 - DNA, 25 bp, Homo sapien
gcagatcataaatcctccaaaccac

SEQ ID NO: 5947966 - DNA, 25 bp, Homo sapien
gcaatcacgagtctaggcagattac

SEQ ID NO: 5947967 - DNA, 25 bp, Homo sapien
caagagctcaccaattggtaatgga

SEQ ID NO: 5947968 - DNA, 25 bp, Homo sapien
tgttgcagttcgaggagaatgttaa

SEQ ID NO: 5947969 - DNA, 25 bp, Homo sapien
aatggattgagcatttgagtaaatg

SEQ ID NO: 5947970 - DNA, 25 bp, Homo sapien
ggcttcacttttggtcaagacatca

SEQ ID NO: 5947971 - DNA, 25 bp, Homo sapien
tattgttatagatgtggtaaccagg

SEQ ID NO: 5947972 - DNA, 25 bp, Homo sapien
tggtggataataaaatcttctgttt

SEQ ID NO: 5947973 - DNA, 25 bp, Homo sapien
tatggtccgatcctgatgatagagg

SEQ ID NO: 5947974 - DNA, 25 bp, Homo sapien
ttctgttgagaccgtatcttaccta

SEQ ID NO: 5947975 - DNA, 25 bp, Homo sapien
aatcctccaaaccactaaaactgac

SEQ ID NO: 5947976 - DNA, 25 bp, Homo sapien
atacaggaagtgcctcacgaaggtc

SEQ ID NO: 5947977 - DNA, 25 bp, Homo sapien
tgatgaccctatgcatggttcagat

SEQ ID NO: 5947978 - DNA, 25 bp, Homo sapien
tgaccttctatggtccgatcctgat

SEQ ID NO: 5947979 - DNA, 25 bp, Homo sapien
agtgagcaattcaatcacactaatg

SEQ ID NO: 5947980 - DNA, 25 bp, Homo sapien
gatagagacaatagatcaagttaga

SEQ ID NO: 5947981 - DNA, 25 bp, Homo sapien
acggtcaattccatgacttgttaga

SEQ ID NO: 5947982 - DNA, 25 bp, Homo sapien
tacccaagtatatgggttttatgac

SEQ ID NO: 5947983 - DNA, 25 bp, Homo sapien
gatgaaaaccataataggcaattct

SEQ ID NO: 5947984 - DNA, 25 bp, Homo sapien
cagatgaagatcaattatcaccgac

SEQ ID NO: 5947985 - DNA, 25 bp, Homo sapien
gtttaccgatctattcgattatttc

SEQ ID NO: 5947986 - DNA, 25 bp, Homo sapien
ctgatgatagaggcggatggggaat

SEQ ID NO: 5947987 - DNA, 25 bp, Homo sapien
agacatgaatagtgatgacggcaaa

SEQ ID NO: 5947988 - DNA, 25 bp, Homo sapien
attcaatcacactaatgacctatca

SEQ ID NO: 5947989 - DNA, 25 bp, Homo sapien
agttcgaggagaatgttaaaccaat

SEQ ID NO: 5947990 - DNA, 25 bp, Homo sapien
accaatacaaatataaatcagcttg

SEQ ID NO: 5947991 - DNA, 25 bp, Homo sapien
taatgacctatcactaatagcaaga

SEQ ID NO: 5947992 - DNA, 25 bp, Homo sapien
atcagtccgagaggtgcaggcttca

SEQ ID NO: 5947993 - DNA, 25 bp, Homo sapien
gtggataataaaatcttctgtttgc

SEQ ID NO: 5947994 - DNA, 25 bp, Homo sapien
taccatttgtggtgacgtacacggt

SEQ ID NO: 5947995 - DNA, 25 bp, Homo sapien
cccaagtatatgggttttatgacga

SEQ ID NO: 5947996 - DNA, 25 bp, Homo sapien
gaatcagtccgagaggtgcaggctt

SEQ ID NO: 5947997 - DNA, 25 bp, Homo sapien
tgacgtacacggtcaattccatgac

SEQ ID NO: 5947998 - DNA, 25 bp, Homo sapien
tcttacaatacgatccatctgtgag

SEQ ID NO: 5947999 - DNA, 25 bp, Homo sapien
aatcacgagtctaggcagattaccc

SEQ ID NO: 5948000 - DNA, 25 bp, Homo sapien
gtaaaatggcggtggacgtgttgca

SEQ ID NO: 5948001 - DNA, 25 bp, Homo sapien
ggtctctcacccatgatagagacaa

SEQ ID NO: 5948002 - DNA, 25 bp, Homo sapien
ccccgttactgccttggtggataat

SEQ ID NO: 5948003 - DNA, 25 bp, Homo sapien
accgatctattcgattatttccccg

SEQ ID NO: 5948004 - DNA, 25 bp, Homo sapien
gaagacacagatgaagagttggaag

SEQ ID NO: 5948005 - DNA, 25 bp, Homo sapien
cttttcaagattggtggtccttgtc

SEQ ID NO: 5948006 - DNA, 25 bp, Homo sapien
gagtaaatgcgagccactatcagaa

SEQ ID NO: 5948007 - DNA, 25 bp, Homo sapien
ctcgacgaagacatgaatagtgatg

SEQ ID NO: 5948008 - DNA, 25 bp, Homo sapien
tatagatgtggtaaccaggccgcta

SEQ ID NO: 5948009 - DNA, 25 bp, Homo sapien
ctaatgacgaagacacagatgaaga

SEQ ID NO: 5948010 - DNA, 25 bp, Homo sapien
acctagttgccatgaaagtcagata

SEQ ID NO: 5948011 - DNA, 25 bp, Homo sapien
tatagcagatcataaatcctccaaa

SEQ ID NO: 5948012 - DNA, 25 bp, Homo sapien
aataaaatcttctgtttgcatggag

SEQ ID NO: 5948013 - DNA, 25 bp, Homo sapien
tagaggatattattctgttgagacc

SEQ ID NO: 5948014 - DNA, 25 bp, Homo sapien
tggtccgatcctgatgatagaggcg

SEQ ID NO: 5948015 - DNA, 25 bp, Homo sapien
gagccactatcagaagacgatgtag

SEQ ID NO: 5948016 - DNA, 25 bp, Homo sapien
attattgttatagatgtggtaacca

SEQ ID NO: 5948017 - DNA, 25 bp, Homo sapien
cgatctattcgattatttccccgtt

SEQ ID NO: 5948018 - DNA, 25 bp, Homo sapien
tcacgaaggtccaatgtgtgacctt

SEQ ID NO: 5948019 - DNA, 25 bp, Homo sapien
tggaggtggatgaaaaccataatag

SEQ ID NO: 5948020 - DNA, 25 bp, Homo sapien
aggaagtgcctcacgaaggtccaat

SEQ ID NO: 5948021 - DNA, 25 bp, Homo sapien
gtggtgacgtacacggtcaattcca

SEQ ID NO: 5948022 - DNA, 25 bp, Homo sapien
tagaattactatacttaggggcaat

SEQ ID NO: 5948023 - DNA, 25 bp, Homo sapien
atgacctatcactaatagcaagagc

SEQ ID NO: 5948024 - DNA, 25 bp, Homo sapien
ttatcaccgactctcgacgaagaca

SEQ ID NO: 5948025 - DNA, 25 bp, Homo sapien
atcagaagacgatgtagcacgacta

SEQ ID NO: 5948026 - DNA, 25 bp, Homo sapien
ctattcgattatttccccgttactg

SEQ ID NO: 5948027 - DNA, 25 bp, Homo sapien
taacgtgcctgttaccatttgtggt

SEQ ID NO: 5948028 - DNA, 25 bp, Homo sapien
tcaagacatcagtgagcaattcaat

SEQ ID NO: 5948029 - DNA, 25 bp, Homo sapien
attacccaagtatatgggttttatg

SEQ ID NO: 5948030 - DNA, 25 bp, Homo sapien
atgatagagacaatagatcaagtta

SEQ ID NO: 5948031 - DNA, 25 bp, Homo sapien
acaggaagtgcctcacgaaggtcca

SEQ ID NO: 5948032 - DNA, 25 bp, Homo sapien
acaatacgatccatctgtgagaccc

SEQ ID NO: 5948033 - DNA, 25 bp, Homo sapien
gtccaatgtgtgaccttctatggtc

SEQ ID NO: 5948034 - DNA, 25 bp, Homo sapien
ccatctgtgagacccggtgaaccaa

SEQ ID NO: 5948035 - DNA, 25 bp, Homo sapien
gcagattacccaagtatatgggttt

SEQ ID NO: 5948036 - DNA, 25 bp, Homo sapien
aaatcttctgtttgcatggaggtct

SEQ ID NO: 5948037 - DNA, 25 bp, Homo sapien
ccacatagaattactatacttaggg

SEQ ID NO: 5948038 - DNA, 25 bp, Homo sapien
aggccgctattatggaggtggatga

SEQ ID NO: 5948039 - DNA, 25 bp, Homo sapien
tgaaaaccataataggcaattctta

SEQ ID NO: 5948040 - DNA, 25 bp, Homo sapien
ttccccgttactgccttggtggata

SEQ ID NO: 5948041 - DNA, 25 bp, Homo sapien
cttctatggtccgatcctgatgata

SEQ ID NO: 5948042 - DNA, 25 bp, Homo sapien
gttgagaccgtatcttacctagttg

SEQ ID NO: 5948043 - DNA, 25 bp, Homo sapien
ccatgacttgttagaacttttcaag

SEQ ID NO: 5948044 - DNA, 25 bp, Homo sapien
gatgaagatcaattatcaccgactc

SEQ ID NO: 5948045 - DNA, 25 bp, Homo sapien
tcacttttggtcaagacatcagtga

SEQ ID NO: 5948046 - DNA, 25 bp, Homo sapien
ggttcagatgaagatcaattatcac

SEQ ID NO: 5948047 - DNA, 25 bp, Homo sapien
tttgagaaagtacggcagtgcgaac

SEQ ID NO: 5948048 - DNA, 25 bp, Homo sapien
tgggtgattacgtggatagaggata

SEQ ID NO: 5948049 - DNA, 25 bp, Homo sapien
attattctgttgagaccgtatctta

SEQ ID NO: 5948050 - DNA, 25 bp, Homo sapien
atttgtggtgacgtacacggtcaat

SEQ ID NO: 5948051 - DNA, 25 bp, Homo sapien
acccatgatagagacaatagatcaa

SEQ ID NO: 5948052 - DNA, 25 bp, Homo sapien
ggtggacgtgttgcagttcgaggag

SEQ ID NO: 5948053 - DNA, 25 bp, Homo sapien
atatggaaattgatgaccctatgca

SEQ ID NO: 5948054 - DNA, 25 bp, Homo sapien
actaatagcaagagctcaccaattg

SEQ ID NO: 5948055 - DNA, 25 bp, Homo sapien
tcagatatccacatagaattactat

SEQ ID NO: 5948056 - DNA, 25 bp, Homo sapien
atggaaattgatgaccctatgcatg

SEQ ID NO: 5948057 - DNA, 25 bp, Homo sapien
ctcgggtatagcagatcataaatcc

SEQ ID NO: 5948058 - DNA, 25 bp, Homo sapien
aagattggtggtccttgtcctgaca

SEQ ID NO: 5948059 - DNA, 25 bp, Homo sapien
agaacttttcaagattggtggtcct

SEQ ID NO: 5948060 - DNA, 25 bp, Homo sapien
tgggttttatgacgaatgtttgaga

SEQ ID NO: 5948061 - DNA, 25 bp, Homo sapien
aatgacgaagacacagatgaagagt

SEQ ID NO: 5948062 - DNA, 25 bp, Homo sapien
gtgaaccaaccgtcaccaggaagac

SEQ ID NO: 5948063 - DNA, 25 bp, Homo sapien
attaacgtgcctgttaccatttgtg

SEQ ID NO: 5948064 - DNA, 25 bp, Homo sapien
tgcatggaggtctctcacccatgat

SEQ ID NO: 5948065 - DNA, 25 bp, Homo sapien
atctgtgagacccggtgaaccaacc

SEQ ID NO: 5948066 - DNA, 25 bp, Homo sapien
atggatatggaaattgatgacccta

SEQ ID NO: 5948067 - DNA, 25 bp, Homo sapien
tgagaccgtatcttacctagttgcc

SEQ ID NO: 5948068 - DNA, 25 bp, Homo sapien
agacgatgtagcacgactatgtaaa

SEQ ID NO: 5948069 - DNA, 25 bp, Homo sapien
agatgaagagttggaagattttaat

SEQ ID NO: 5948070 - DNA, 25 bp, Homo sapien
ccgatcctgatgatagaggcggatg

SEQ ID NO: 5948071 - DNA, 25 bp, Homo sapien
atgaagagttggaagattttaattt

SEQ ID NO: 5948072 - DNA, 25 bp, Homo sapien
taatggaaggatattcttggtctca

SEQ ID NO: 5948073 - DNA, 25 bp, Homo sapien
ggggtcctcgggtatagcagatcat

SEQ ID NO: 5948074 - DNA, 25 bp, Homo sapien
caatagatcaagttagagatttaaa

SEQ ID NO: 5948075 - DNA, 25 bp, Homo sapien
ataataaaatcttctgtttgcatgg

SEQ ID NO: 5948076 - DNA, 25 bp, Homo sapien
gcgagccactatcagaagacgatgt

SEQ ID NO: 5948077 - DNA, 25 bp, Homo sapien
tcacccatgatagagacaatagatc

SEQ ID NO: 5948078 - DNA, 25 bp, Homo sapien
gaaggtccaatgtgtgaccttctat

SEQ ID NO: 5948079 - DNA, 25 bp, Homo sapien
gacgaatgtttgagaaagtacggca

SEQ ID NO: 5948080 - DNA, 25 bp, Homo sapien
cttcacttttggtcaagacatcagt

SEQ ID NO: 5948081 - DNA, 25 bp, Homo sapien
tgatgacggcaaaaataatacgaag

SEQ ID NO: 5948082 - DNA, 25 bp, Homo sapien
tcaatcacactaatgacctatcact

SEQ ID NO: 5948083 - DNA, 25 bp, Homo sapien
tatggaggtggatgaaaaccataat

SEQ ID NO: 5948084 - DNA, 25 bp, Homo sapien
caaccgtcaccaggaagacaccgga

SEQ ID NO: 5948085 - DNA, 25 bp, Homo sapien
cgtcaccaggaagacaccggattat

SEQ ID NO: 5948086 - DNA, 25 bp, Homo sapien
cttgttagaacttttcaagattggt

SEQ ID NO: 5948087 - DNA, 25 bp, Homo sapien
atcaccgactctcgacgaagacatg

SEQ ID NO: 5948088 - DNA, 25 bp, Homo sapien
aattatcaccgactctcgacgaaga

SEQ ID NO: 5948089 - DNA, 25 bp, Homo sapien
ttgcagttcgaggagaatgttaaac

SEQ ID NO: 5948090 - DNA, 25 bp, Homo sapien
tgtagcacgactatgtaaaatggcg

SEQ ID NO: 5948091 - DNA, 25 bp, Homo sapien
aggcagattacccaagtatatgggt

SEQ ID NO: 5948092 - DNA, 25 bp, Homo sapien
gggcaatcacgagtctaggcagatt

SEQ ID NO: 5948093 - DNA, 25 bp, Homo sapien
gagtctaggcagattacccaagtat

SEQ ID NO: 5948094 - DNA, 25 bp, Homo sapien
accaaccgtcaccaggaagacaccg

SEQ ID NO: 5948095 - DNA, 25 bp, Homo sapien
tggatgaaaaccataataggcaatt

SEQ ID NO: 5948096 - DNA, 25 bp, Homo sapien
gacccggtgaaccaaccgtcaccag

SEQ ID NO: 5948097 - DNA, 25 bp, Homo sapien
tatcttacctagttgccatgaaagt

SEQ ID NO: 5948098 - DNA, 25 bp, Homo sapien
ttcagatgaagatcaattatcaccg

SEQ ID NO: 5948099 - DNA, 25 bp, Homo sapien
ctatcagaagacgatgtagcacgac

SEQ ID NO: 5948100 - DNA, 25 bp, Homo sapien
agagctcaccaattggtaatggaag

SEQ ID NO: 5948101 - DNA, 25 bp, Homo sapien
ttttatgacgaatgtttgagaaagt

SEQ ID NO: 5948102 - DNA, 25 bp, Homo sapien
ttacctagttgccatgaaagtcaga

SEQ ID NO: 5948103 - DNA, 25 bp, Homo sapien
catgggtgattacgtggatagagga

SEQ ID NO: 5948104 - DNA, 25 bp, Homo sapien
gaggtgcaggcttcacttttggtca

SEQ ID NO: 5948105 - DNA, 25 bp, Homo sapien
ttggtggtccttgtcctgacaccaa

SEQ ID NO: 5948106 - DNA, 25 bp, Homo sapien
tgtgaccttctatggtccgatcctg

SEQ ID NO: 5948107 - DNA, 25 bp, Homo sapien
ctctcgacgaagacatgaatagtga

SEQ ID NO: 5948108 - DNA, 25 bp, Homo sapien
tctctcacccatgatagagacaata

SEQ ID NO: 5948109 - DNA, 25 bp, Homo sapien
tttcaagattggtggtccttgtcct

SEQ ID NO: 5948110 - DNA, 25 bp, Homo sapien
gcttgaccaatggattgagcatttg

SEQ ID NO: 5948111 - DNA, 25 bp, Homo sapien
aatgttgtcaccattttcagtgctc

SEQ ID NO: 5948112 - DNA, 25 bp, Homo sapien
taaaatcttctgtttgcatggaggt

SEQ ID NO: 5948113 - DNA, 25 bp, Homo sapien
taccttttcatgggtgattacgtgg

SEQ ID NO: 5948114 - DNA, 25 bp, Homo sapien
ccttgtcctgacaccaattaccttt

SEQ ID NO: 5948115 - DNA, 25 bp, Homo sapien
tgtggaaaatgtttaccgatctatt

SEQ ID NO: 5948116 - DNA, 25 bp, Homo sapien
tattctgttgagaccgtatcttacc

SEQ ID NO: 5948117 - DNA, 25 bp, Homo sapien
tttgcatggaggtctctcacccatg

SEQ ID NO: 5948118 - DNA, 25 bp, Homo sapien
caggcttcacttttggtcaagacat

SEQ ID NO: 5948119 - DNA, 25 bp, Homo sapien
aaaatgttgtcaccattttcagtgc

SEQ ID NO: 5948120 - DNA, 25 bp, Homo sapien
tggtccttgtcctgacaccaattac

SEQ ID NO: 5948121 - DNA, 25 bp, Homo sapien
tagagacaatagatcaagttagaga

SEQ ID NO: 5948122 - DNA, 25 bp, Homo sapien
gtgagacccggtgaaccaaccgtca

SEQ ID NO: 5948123 - DNA, 25 bp, Homo sapien
aaatcagcttgaccaatggattgag

SEQ ID NO: 5948124 - DNA, 25 bp, Homo sapien
ggtggtccttgtcctgacaccaatt

SEQ ID NO: 5948125 - DNA, 25 bp, Homo sapien
aaaatggcggtggacgtgttgcagt

SEQ ID NO: 5948126 - DNA, 25 bp, Homo sapien
ctatacttaggggcaatcacgagtc

SEQ ID NO: 5948127 - DNA, 25 bp, Homo sapien
agattacccaagtatatgggtttta

SEQ ID NO: 5948128 - DNA, 25 bp, Homo sapien
caccattttcagtgctccaaattat

SEQ ID NO: 5948129 - DNA, 25 bp, Homo sapien
caccgactctcgacgaagacatgaa

SEQ ID NO: 5948130 - DNA, 25 bp, Homo sapien
aacgtgtggaaaatgtttaccgatc

SEQ ID NO: 5948131 - DNA, 25 bp, Homo sapien
atatccacatagaattactatactt

SEQ ID NO: 5948132 - DNA, 25 bp, Homo sapien
catggaggtctctcacccatgatag

SEQ ID NO: 5948133 - DNA, 25 bp, Homo sapien
ctgttaccatttgtggtgacgtaca

SEQ ID NO: 5948134 - DNA, 25 bp, Homo sapien
tgttaaaccaattaacgtgcctgtt

SEQ ID NO: 5948135 - DNA, 25 bp, Homo sapien
taatagcaagagctcaccaattggt

SEQ ID NO: 5948136 - DNA, 25 bp, Homo sapien
tgagcaattcaatcacactaatgac

SEQ ID NO: 5948137 - DNA, 25 bp, Homo sapien
gacgtgttgcagttcgaggagaatg

SEQ ID NO: 5948138 - DNA, 25 bp, Homo sapien
gcatttgagtaaatgcgagccacta

SEQ ID NO: 5948139 - DNA, 25 bp, Homo sapien
ggtctcaccagcaaaatgttgtcac

SEQ ID NO: 5948140 - DNA, 25 bp, Homo sapien
gattatttccccgttactgccttgg

SEQ ID NO: 5948141 - DNA, 25 bp, Homo sapien
gaggtctctcacccatgatagagac

SEQ ID NO: 5948142 - DNA, 25 bp, Homo sapien
tgcctcacgaaggtccaatgtgtga

SEQ ID NO: 5948143 - DNA, 25 bp, Homo sapien
acttttggtcaagacatcagtgagc

SEQ ID NO: 5948144 - DNA, 25 bp, Homo sapien
ctaggcagattacccaagtatatgg

SEQ ID NO: 5948145 - DNA, 25 bp, Homo sapien
aataggcaattcttacaatacgatc

SEQ ID NO: 5948146 - DNA, 25 bp, Homo sapien
tcacgagtctaggcagattacccaa

SEQ ID NO: 5948147 - DNA, 25 bp, Homo sapien
caagtatatgggttttatgacgaat

SEQ ID NO: 5948148 - DNA, 25 bp, Homo sapien
ccttttcatgggtgattacgtggat

SEQ ID NO: 5948149 - DNA, 25 bp, Homo sapien
gtaaccaggccgctattatggaggt

SEQ ID NO: 5948150 - DNA, 25 bp, Homo sapien
cgacgaagacatgaatagtgatgac

SEQ ID NO: 5948151 - DNA, 25 bp, Homo sapien
gaccaatggattgagcatttgagta

SEQ ID NO: 5948152 - DNA, 25 bp, Homo sapien
aaattgatgaccctatgcatggttc

SEQ ID NO: 5948153 - DNA, 25 bp, Homo sapien
ctagttgccatgaaagtcagatatc

SEQ ID NO: 5948154 - DNA, 25 bp, Homo sapien
gtcaccattttcagtgctccaaatt

SEQ ID NO: 5948155 - DNA, 25 bp, Homo sapien
aggtccaatgtgtgaccttctatgg

SEQ ID NO: 5948156 - DNA, 25 bp, Homo sapien
gtccttgtcctgacaccaattacct

SEQ ID NO: 5948157 - DNA, 25 bp, Homo sapien
acgaagacacagatgaagagttgga

SEQ ID NO: 5948158 - DNA, 25 bp, Homo sapien
tctgtttgcatggaggtctctcacc

SEQ ID NO: 5948159 - DNA, 25 bp, Homo sapien
aaccggggtcctcgggtatagcaga

SEQ ID NO: 5948160 - DNA, 25 bp, Homo sapien
gccgctattatggaggtggatgaaa

SEQ ID NO: 5948161 - DNA, 25 bp, Homo sapien
gattggtggtccttgtcctgacacc

SEQ ID NO: 5948162 - DNA, 25 bp, Homo sapien
tgcaggcttcacttttggtcaagac

SEQ ID NO: 5948163 - DNA, 25 bp, Homo sapien
gtgcctgttaccatttgtggtgacg

SEQ ID NO: 5948164 - DNA, 25 bp, Homo sapien
cctcacgaaggtccaatgtgtgacc

SEQ ID NO: 5948165 - DNA, 25 bp, Homo sapien
tcactaatagcaagagctcaccaat

SEQ ID NO: 5948166 - DNA, 25 bp, Homo sapien
gaattactatacttaggggcaatca

SEQ ID NO: 5948167 - DNA, 25 bp, Homo sapien
gcaaaatgttgtcaccattttcagt

SEQ ID NO: 5948168 - DNA, 25 bp, Homo sapien
gttaccatttgtggtgacgtacacg

SEQ ID NO: 5948169 - DNA, 25 bp, Homo sapien
tgacaccaattaccttttcatgggt

SEQ ID NO: 5948170 - DNA, 25 bp, Homo sapien
atcttctgtttgcatggaggtctct

SEQ ID NO: 5948171 - DNA, 25 bp, Homo sapien
ttgtggtgacgtacacggtcaattc

SEQ ID NO: 5948172 - DNA, 25 bp, Homo sapien
tcaattccatgacttgttagaactt

SEQ ID NO: 5948173 - DNA, 25 bp, Homo sapien
ttctaatgacgaagacacagatgaa

SEQ ID NO: 5948174 - DNA, 25 bp, Homo sapien
caattaacgtgcctgttaccatttg

SEQ ID NO: 5948175 - DNA, 25 bp, Homo sapien
atggttcagatgaagatcaattatc

SEQ ID NO: 5948176 - DNA, 25 bp, Homo sapien
atgaccctatgcatggttcagatga

SEQ ID NO: 5948177 - DNA, 25 bp, Homo sapien
tcaccaggaagacaccggattattt

SEQ ID NO: 5948178 - DNA, 25 bp, Homo sapien
tggggaatcagtccgagaggtgcag

SEQ ID NO: 5948179 - DNA, 25 bp, Homo sapien
gaccctatgcatggttcagatgaag

SEQ ID NO: 5948180 - DNA, 25 bp, Homo sapien
atattattctgttgagaccgtatct

SEQ ID NO: 5948181 - DNA, 25 bp, Homo sapien
tggacgtgttgcagttcgaggagaa

SEQ ID NO: 5948182 - DNA, 25 bp, Homo sapien
ttccatgacttgttagaacttttca

SEQ ID NO: 5948183 - DNA, 25 bp, Homo sapien
atcagcttgaccaatggattgagca

SEQ ID NO: 5948184 - DNA, 25 bp, Homo sapien
gtacacggtcaattccatgacttgt

SEQ ID NO: 5948185 - DNA, 25 bp, Homo sapien
cgaggagaatgttaaaccaattaac

SEQ ID NO: 5948186 - DNA, 25 bp, Homo sapien
agctcaccaattggtaatggaagga

SEQ ID NO: 5948187 - DNA, 25 bp, Homo sapien
catcagtgagcaattcaatcacact

SEQ ID NO: 5948188 - DNA, 25 bp, Homo sapien
tgtttgcatggaggtctctcaccca

SEQ ID NO: 5948189 - DNA, 25 bp, Homo sapien
atagtgatgacggcaaaaataatac

SEQ ID NO: 5948190 - DNA, 25 bp, Homo sapien
cactatcagaagacgatgtagcacg

SEQ ID NO: 5948191 - DNA, 25 bp, Homo sapien
ccatgatagagacaatagatcaagt

SEQ ID NO: 5948192 - DNA, 25 bp, Homo sapien
ttcgaggagaatgttaaaccaatta

SEQ ID NO: 5948193 - DNA, 25 bp, Homo sapien
tcacactaatgacctatcactaata

SEQ ID NO: 5948194 - DNA, 25 bp, Homo sapien
gcagttcgaggagaatgttaaacca

SEQ ID NO: 5948195 - DNA, 25 bp, Homo sapien
tctcaccagcaaaatgttgtcacca

SEQ ID NO: 5948196 - DNA, 25 bp, Homo sapien
gacctatcactaatagcaagagctc

SEQ ID NO: 5948197 - DNA, 25 bp, Homo sapien
aatggcggtggacgtgttgcagttc

SEQ ID NO: 5948198 - DNA, 25 bp, Homo sapien
ggttttatgacgaatgtttgagaaa

SEQ ID NO: 5948199 - DNA, 25 bp, Homo sapien
ttgagcatttgagtaaatgcgagcc

SEQ ID NO: 5948200 - DNA, 25 bp, Homo sapien
ggcgcgttctaatgacgaagacaca

SEQ ID NO: 5948201 - DNA, 25 bp, Homo sapien
attgatgaccctatgcatggttcag

SEQ ID NO: 5948202 - DNA, 25 bp, Homo sapien
agtgctccaaattattgttatagat

SEQ ID NO: 5948203 - DNA, 25 bp, Homo sapien
gactctcgacgaagacatgaatagt

SEQ ID NO: 5948204 - DNA, 25 bp, Homo sapien
ttgttatagatgtggtaaccaggcc

SEQ ID NO: 5948205 - DNA, 25 bp, Homo sapien
aaaaataatacgaaggcgcgttcta

SEQ ID NO: 5948206 - DNA, 25 bp, Homo sapien
tagcacgactatgtaaaatggcggt

SEQ ID NO: 5948207 - DNA, 25 bp, Homo sapien
ttgtcaccattttcagtgctccaaa

SEQ ID NO: 5948208 - DNA, 25 bp, Homo sapien
ggaagacaccggattatttcttata

SEQ ID NO: 5948209 - DNA, 25 bp, Homo sapien
ataataggcaattcttacaatacga

SEQ ID NO: 5948210 - DNA, 25 bp, Homo sapien
gatggggaatcagtccgagaggtgc

SEQ ID NO: 5948211 - DNA, 25 bp, Homo sapien
aggggcaatcacgagtctaggcaga

SEQ ID NO: 5948212 - DNA, 25 bp, Homo sapien
gacttgttagaacttttcaagattg

SEQ ID NO: 5948213 - DNA, 25 bp, Homo sapien
aatgtttgagaaagtacggcagtgc

SEQ ID NO: 5948214 - DNA, 25 bp, Homo sapien
accgtatcttacctagttgccatga

SEQ ID NO: 5948215 - DNA, 25 bp, Homo sapien
gtcctgacaccaattaccttttcat

SEQ ID NO: 5948216 - DNA, 25 bp, Homo sapien
cataaatcctccaaaccactaaaac

SEQ ID NO: 5948217 - DNA, 25 bp, Homo sapien
agcaagagctcaccaattggtaatg

SEQ ID NO: 5948218 - DNA, 25 bp, Homo sapien
aaaaccataataggcaattcttaca

SEQ ID NO: 5948219 - DNA, 25 bp, Homo sapien
acaaatataaatcagcttgaccaat

SEQ ID NO: 5948220 - DNA, 25 bp, Homo sapien
ggtgattacgtggatagaggatatt

SEQ ID NO: 5948221 - DNA, 25 bp, Homo sapien
gattgagcatttgagtaaatgcgag

SEQ ID NO: 5948222 - DNA, 25 bp, Homo sapien
gaagtgcctcacgaaggtccaatgt

SEQ ID NO: 5948223 - DNA, 25 bp, Homo sapien
accttctatggtccgatcctgatga

SEQ ID NO: 5948224 - DNA, 25 bp, Homo sapien
atgcgagccactatcagaagacgat

SEQ ID NO: 5948225 - DNA, 25 bp, Homo sapien
acgtacacggtcaattccatgactt

SEQ ID NO: 5948226 - DNA, 25 bp, Homo sapien
tcagtgagcaattcaatcacactaa

SEQ ID NO: 5948227 - DNA, 25 bp, Homo sapien
ctaaaactgaccaatacaaatataa

SEQ ID NO: 5948228 - DNA, 25 bp, Homo sapien
aacttttcaagattggtggtccttg

SEQ ID NO: 5948229 - DNA, 25 bp, Homo sapien
tggtaaccaggccgctattatggag

SEQ ID NO: 5948230 - DNA, 25 bp, Homo sapien
tatcactaatagcaagagctcacca

SEQ ID NO: 5948231 - DNA, 25 bp, Homo sapien
aaccaggccgctattatggaggtgg

SEQ ID NO: 5948232 - DNA, 25 bp, Homo sapien
accaattaccttttcatgggtgatt

SEQ ID NO: 5948233 - DNA, 25 bp, Homo sapien
cgttctaatgacgaagacacagatg

SEQ ID NO: 5948234 - DNA, 25 bp, Homo sapien
atattcttggtctcaccagcaaaat

SEQ ID NO: 5948235 - DNA, 25 bp, Homo sapien
ctatgtaaaatggcggtggacgtgt

SEQ ID NO: 5948236 - DNA, 25 bp, Homo sapien
atagcaagagctcaccaattggtaa

SEQ ID NO: 5948237 - DNA, 25 bp, Homo sapien
aaaccactaaaactgaccaatacaa

SEQ ID NO: 5948238 - DNA, 25 bp, Homo sapien
gccttggtggataataaaatcttct

SEQ ID NO: 5948239 - DNA, 25 bp, Homo sapien
tggaaaatgtttaccgatctattcg

SEQ ID NO: 5948240 - DNA, 25 bp, Homo sapien
ggcaattcttacaatacgatccatc

SEQ ID NO: 5948241 - DNA, 25 bp, Homo sapien
gacatcagtgagcaattcaatcaca

SEQ ID NO: 5948242 - DNA, 25 bp, Homo sapien
gagaggtgcaggcttcacttttggt

SEQ ID NO: 5948243 - DNA, 25 bp, Homo sapien
cgcgttctaatgacgaagacacaga

SEQ ID NO: 5948244 - DNA, 25 bp, Homo sapien
tgtgtgaccttctatggtccgatcc

SEQ ID NO: 5948245 - DNA, 25 bp, Homo sapien
tgagaaagtacggcagtgcgaacgt

SEQ ID NO: 5948246 - DNA, 25 bp, Homo sapien
gcctgttaccatttgtggtgacgta

SEQ ID NO: 5948247 - DNA, 25 bp, Homo sapien
gaaccaaccgtcaccaggaagacac

SEQ ID NO: 5948248 - DNA, 25 bp, Homo sapien
aaatgcgagccactatcagaagacg

SEQ ID NO: 5948249 - DNA, 25 bp, Homo sapien
acatgaatagtgatgacggcaaaaa

SEQ ID NO: 5948250 - DNA, 25 bp, Homo sapien
agaaagtacggcagtgcgaacgtgt

SEQ ID NO: 5948251 - DNA, 25 bp, Homo sapien
aatagaatacaggaagtgcctcacg

SEQ ID NO: 5948252 - DNA, 25 bp, Homo sapien
ggataataaaatcttctgtttgcat

SEQ ID NO: 5948253 - DNA, 25 bp, Homo sapien
ctatgcatggttcagatgaagatca

SEQ ID NO: 5948254 - DNA, 25 bp, Homo sapien
atgaatagtgatgacggcaaaaata

SEQ ID NO: 5948255 - DNA, 25 bp, Homo sapien
aatacgaaggcgcgttctaatgacg

SEQ ID NO: 5948256 - DNA, 25 bp, Homo sapien
ccaatgtgtgaccttctatggtccg

SEQ ID NO: 5948257 - DNA, 25 bp, Homo sapien
gaagagttggaagattttaatttta

SEQ ID NO: 5948258 - DNA, 25 bp, Homo sapien
aaatgtttaccgatctattcgatta

SEQ ID NO: 5948259 - DNA, 25 bp, Homo sapien
attcttggtctcaccagcaaaatgt

SEQ ID NO: 5948260 - DNA, 25 bp, Homo sapien
aatcacactaatgacctatcactaa

SEQ ID NO: 5948261 - DNA, 25 bp, Homo sapien
accgtcaccaggaagacaccggatt

SEQ ID NO: 5948262 - DNA, 25 bp, Homo sapien
atccatctgtgagacccggtgaacc

SEQ ID NO: 5948263 - DNA, 25 bp, Homo sapien
cggatggggaatcagtccgagaggt

SEQ ID NO: 5948264 - DNA, 25 bp, Homo sapien
agacacagatgaagagttggaagat

SEQ ID NO: 5948265 - DNA, 25 bp, Homo sapien
aagatcaattatcaccgactctcga

SEQ ID NO: 5948266 - DNA, 25 bp, Homo sapien
gcacgactatgtaaaatggcggtgg

SEQ ID NO: 5948267 - DNA, 25 bp, Homo sapien
gacggcaaaaataatacgaaggcgc

SEQ ID NO: 5948268 - DNA, 25 bp, Homo sapien
atcataaatcctccaaaccactaaa

SEQ ID NO: 5948269 - DNA, 25 bp, Homo sapien
ggatattattctgttgagaccgtat

SEQ ID NO: 5948270 - DNA, 25 bp, Homo sapien
cggcaaaaataatacgaaggcgcgt

SEQ ID NO: 5948271 - DNA, 25 bp, Homo sapien
cgtgttgcagttcgaggagaatgtt

SEQ ID NO: 5948272 - DNA, 25 bp, Homo sapien
gccatgaaagtcagatatccacata

SEQ ID NO: 5948273 - DNA, 25 bp, Homo sapien
acactaatgacctatcactaatagc

SEQ ID NO: 5948274 - DNA, 25 bp, Homo sapien
tgaagatcaattatcaccgactctc

SEQ ID NO: 5948275 - DNA, 25 bp, Homo sapien
ccaaaccactaaaactgaccaatac

SEQ ID NO: 5948276 - DNA, 25 bp, Homo sapien
agaccgtatcttacctagttgccat

SEQ ID NO: 5948277 - DNA, 25 bp, Homo sapien
gaatacaggaagtgcctcacgaagg

SEQ ID NO: 5948278 - DNA, 25 bp, Homo sapien
ttgagtaaatgcgagccactatcag

SEQ ID NO: 5948279 - DNA, 25 bp, Homo sapien
ccatttgtggtgacgtacacggtca

SEQ ID NO: 5948280 - DNA, 25 bp, Homo sapien
caggaagacaccggattatttctta

SEQ ID NO: 5948281 - DNA, 25 bp, Homo sapien
accaattaacgtgcctgttaccatt

SEQ ID NO: 5948282 - DNA, 25 bp, Homo sapien
ttagaacttttcaagattggtggtc

SEQ ID NO: 5948283 - DNA, 25 bp, Homo sapien
gagcatttgagtaaatgcgagccac

SEQ ID NO: 5948284 - DNA, 25 bp, Homo sapien
ctccaaaccactaaaactgaccaat

SEQ ID NO: 5948285 - DNA, 25 bp, Homo sapien
gagacccggtgaaccaaccgtcacc

SEQ ID NO: 5948286 - DNA, 25 bp, Homo sapien
ccataataggcaattcttacaatac

SEQ ID NO: 5948287 - DNA, 25 bp, Homo sapien
gaagacgatgtagcacgactatgta

SEQ ID NO: 5948288 - DNA, 25 bp, Homo sapien
cgctattatggaggtggatgaaaac

SEQ ID NO: 5948289 - DNA, 25 bp, Homo sapien
ctattatggaggtggatgaaaacca

SEQ ID NO: 5948290 - DNA, 25 bp, Homo sapien
tcttggtctcaccagcaaaatgttg

SEQ ID NO: 5948291 - DNA, 25 bp, Homo sapien
ttgccatgaaagtcagatatccaca

SEQ ID NO: 5948292 - DNA, 25 bp, Homo sapien
acgaagacatgaatagtgatgacgg

SEQ ID NO: 5948293 - DNA, 25 bp, Homo sapien
tgcgaacgtgtggaaaatgtttacc

SEQ ID NO: 5948294 - DNA, 25 bp, Homo sapien
ttaccgatctattcgattatttccc

SEQ ID NO: 5948295 - DNA, 25 bp, Homo sapien
gggaatcagtccgagaggtgcaggc

SEQ ID NO: 5948296 - DNA, 25 bp, Homo sapien
ccaatggattgagcatttgagtaaa

SEQ ID NO: 5948297 - DNA, 25 bp, Homo sapien
cagaagacgatgtagcacgactatg

SEQ ID NO: 5948298 - DNA, 25 bp, Homo sapien
ttaggggcaatcacgagtctaggca

SEQ ID NO: 5948299 - DNA, 25 bp, Homo sapien
tgaaagtcagatatccacatagaat

SEQ ID NO: 5948300 - DNA, 25 bp, Homo sapien
caccaattggtaatggaaggatatt

SEQ ID NO: 5948301 - DNA, 25 bp, Homo sapien
gatgtggtaaccaggccgctattat

SEQ ID NO: 5948302 - DNA, 25 bp, Homo sapien
ccattttcagtgctccaaattattg

SEQ ID NO: 5948303 - DNA, 25 bp, Homo sapien
tacggcagtgcgaacgtgtggaaaa

SEQ ID NO: 5948304 - DNA, 25 bp, Homo sapien
atgacgaatgtttgagaaagtacgg

SEQ ID NO: 5948305 - DNA, 25 bp, Homo sapien
ggtcaagacatcagtgagcaattca

SEQ ID NO: 5948306 - DNA, 25 bp, Homo sapien
caatacaaatataaatcagcttgac

SEQ ID NO: 5948307 - DNA, 25 bp, Homo sapien
tcaagattggtggtccttgtcctga

SEQ ID NO: 5948308 - DNA, 25 bp, Homo sapien
acgagtctaggcagattacccaagt

SEQ ID NO: 5948309 - DNA, 25 bp, Homo sapien
cccggtgaaccaaccgtcaccagga

SEQ ID NO: 5948310 - DNA, 25 bp, Homo sapien
tactatacttaggggcaatcacgag

SEQ ID NO: 5948311 - DNA, 25 bp, Homo sapien
accaggaagacaccggattatttct

SEQ ID NO: 5948312 - DNA, 25 bp, Homo sapien
ccaggccgctattatggaggtggat

SEQ ID NO: 5948313 - DNA, 25 bp, Homo sapien
acgaaggtccaatgtgtgaccttct

SEQ ID NO: 5948314 - DNA, 25 bp, Homo sapien
tcttacctagttgccatgaaagtca

SEQ ID NO: 5948315 - DNA, 25 bp, Homo sapien
tcagtgctccaaattattgttatag

SEQ ID NO: 5948316 - DNA, 25 bp, Homo sapien
ctccaaattattgttatagatgtgg

SEQ ID NO: 5948317 - DNA, 25 bp, Homo sapien
cgaaggcgcgttctaatgacgaaga

SEQ ID NO: 5948318 - DNA, 25 bp, Homo sapien
cgtatcttacctagttgccatgaaa

SEQ ID NO: 5948319 - DNA, 25 bp, Homo sapien
agcaattcaatcacactaatgacct

SEQ ID NO: 5948320 - DNA, 25 bp, Homo sapien
aatgttaaaccaattaacgtgcctg

SEQ ID NO: 5948321 - DNA, 25 bp, Homo sapien
ggtgcaggcttcacttttggtcaag

SEQ ID NO: 5948322 - DNA, 25 bp, Homo sapien
cttctgtttgcatggaggtctctca

SEQ ID NO: 5948323 - DNA, 25 bp, Homo sapien
tacgatccatctgtgagacccggtg

SEQ ID NO: 5948324 - DNA, 25 bp, Homo sapien
taaatcctccaaaccactaaaactg

SEQ ID NO: 5948325 - DNA, 25 bp, Homo sapien
atacaaatataaatcagcttgacca

SEQ ID NO: 5948326 - DNA, 25 bp, Homo sapien
ggtgacgtacacggtcaattccatg

SEQ ID NO: 5948327 - DNA, 25 bp, Homo sapien
aaataatacgaaggcgcgttctaat

SEQ ID NO: 5948328 - DNA, 25 bp, Homo sapien
agtacggcagtgcgaacgtgtggaa

SEQ ID NO: 5948329 - DNA, 25 bp, Homo sapien
agtgcgaacgtgtggaaaatgttta

SEQ ID NO: 5948330 - DNA, 25 bp, Homo sapien
ggtcaattccatgacttgttagaac

SEQ ID NO: 5948331 - DNA, 25 bp, Homo sapien
ggatattcttggtctcaccagcaaa

SEQ ID NO: 5948332 - DNA, 25 bp, Homo sapien
tttaaatagaatacaggaagtgcct

SEQ ID NO: 5948333 - DNA, 25 bp, Homo sapien
gatttaaatagaatacaggaagtgc

SEQ ID NO: 5948334 - DNA, 25 bp, Homo sapien
tcaattatcaccgactctcgacgaa

SEQ ID NO: 5948335 - DNA, 25 bp, Homo sapien
cggtgaaccaaccgtcaccaggaag

SEQ ID NO: 5948336 - DNA, 25 bp, Homo sapien
gagatttaaatagaatacaggaagt

SEQ ID NO: 5948337 - DNA, 25 bp, Homo sapien
gcatggttcagatgaagatcaatta

SEQ ID NO: 5948338 - DNA, 25 bp, Homo sapien
taaatagaatacaggaagtgcctca

SEQ ID NO: 5948339 - DNA, 25 bp, Homo sapien
atgcatggttcagatgaagatcaat

SEQ ID NO: 5948340 - DNA, 25 bp, Homo sapien
atgacttgttagaacttttcaagat

SEQ ID NO: 5948341 - DNA, 25 bp, Homo sapien
tcctccaaaccactaaaactgacca

SEQ ID NO: 5948342 - DNA, 25 bp, Homo sapien
ggtatagcagatcataaatcctcca

SEQ ID NO: 5948343 - DNA, 25 bp, Homo sapien
agatatccacatagaattactatac

SEQ ID NO: 5948344 - DNA, 25 bp, Homo sapien
gatagaggcggatggggaatcagtc

SEQ ID NO: 5948345 - DNA, 25 bp, Homo sapien
cggcagtgcgaacgtgtggaaaatg

SEQ ID NO: 5948346 - DNA, 25 bp, Homo sapien
tatgggttttatgacgaatgtttga

SEQ ID NO: 5948347 - DNA, 25 bp, Homo sapien
cgaacgtgtggaaaatgtttaccga

SEQ ID NO: 5948348 - DNA, 25 bp, Homo sapien
tagcagatcataaatcctccaaacc

SEQ ID NO: 5948349 - DNA, 25 bp, Homo sapien
tcaccagcaaaatgttgtcaccatt

SEQ ID NO: 5948350 - DNA, 25 bp, Homo sapien
ttttcatgggtgattacgtggatag

SEQ ID NO: 5948351 - DNA, 25 bp, Homo sapien
tgttgtcaccattttcagtgctcca

SEQ ID NO: 5948352 - DNA, 25 bp, Homo sapien
tacgaaggcgcgttctaatgacgaa

SEQ ID NO: 5948353 - DNA, 25 bp, Homo sapien
acttaggggcaatcacgagtctagg

SEQ ID NO: 5948354 - DNA, 25 bp, Homo sapien
aaatataaatcagcttgaccaatgg

SEQ ID NO: 5948355 - DNA, 25 bp, Homo sapien
aattccatgacttgttagaactttt

SEQ ID NO: 5948356 - DNA, 25 bp, Homo sapien
cgatccatctgtgagacccggtgaa

SEQ ID NO: 5948357 - DNA, 25 bp, Homo sapien
catagaattactatacttaggggca

SEQ ID NO: 5948358 - DNA, 25 bp, Homo sapien
accagcaaaatgttgtcaccatttt

SEQ ID NO: 5948359 - DNA, 25 bp, Homo sapien
tgtggtaaccaggccgctattatgg

SEQ ID NO: 5948360 - DNA, 25 bp, Homo sapien
caattcttacaatacgatccatctg

SEQ ID NO: 5948361 - DNA, 25 bp, Homo sapien
catctgtgtcttcgtcattagaacg

SEQ ID NO: 5948362 - DNA, 25 bp, Homo sapien
attatccaccaaggcagtaacgggg

SEQ ID NO: 5948363 - DNA, 25 bp, Homo sapien
ccattttacatagtcgtgctacatc

SEQ ID NO: 5948364 - DNA, 25 bp, Homo sapien
gctcactgatgtcttgaccaaaagt

SEQ ID NO: 5948365 - DNA, 25 bp, Homo sapien
gggtaatctgcctagactcgtgatt

SEQ ID NO: 5948366 - DNA, 25 bp, Homo sapien
attgaccgtgtacgtcaccacaaat

SEQ ID NO: 5948367 - DNA, 25 bp, Homo sapien
tctatgtggatatctgactttcatg

SEQ ID NO: 5948368 - DNA, 25 bp, Homo sapien
taaaacccatatacttgggtaatct

SEQ ID NO: 5948369 - DNA, 25 bp, Homo sapien
gtctcacagatggatcgtattgtaa

SEQ ID NO: 5948370 - DNA, 25 bp, Homo sapien
ttggttcaccgggtctcacagatgg

SEQ ID NO: 5948371 - DNA, 25 bp, Homo sapien
ttaccaattggtgagctcttgctat

SEQ ID NO: 5948372 - DNA, 25 bp, Homo sapien
gggaaataatcgaatagatcggtaa

SEQ ID NO: 5948373 - DNA, 25 bp, Homo sapien
gacaacattttgctggtgagaccaa

SEQ ID NO: 5948374 - DNA, 25 bp, Homo sapien
ttcatgtcttcgtcgagagtcggtg

SEQ ID NO: 5948375 - DNA, 25 bp, Homo sapien
gtgataattgatcttcatctgaacc

SEQ ID NO: 5948376 - DNA, 25 bp, Homo sapien
tatcatcaggatcggaccatagaag

SEQ ID NO: 5948377 - DNA, 25 bp, Homo sapien
tgatcttcatctgaaccatgcatag

SEQ ID NO: 5948378 - DNA, 25 bp, Homo sapien
tttcatccacctccataatagcggc

SEQ ID NO: 5948379 - DNA, 25 bp, Homo sapien
cacagatggatcgtattgtaagaat

SEQ ID NO: 5948380 - DNA, 25 bp, Homo sapien
tgggtgagagacctccatgcaaaca

SEQ ID NO: 5948381 - DNA, 25 bp, Homo sapien
catagtcgtgctacatcgtcttctg

SEQ ID NO: 5948382 - DNA, 25 bp, Homo sapien
tttggagcactgaaaatggtgacaa

SEQ ID NO: 5948383 - DNA, 25 bp, Homo sapien
ccatgcaaacagaagattttattat

SEQ ID NO: 5948384 - DNA, 25 bp, Homo sapien
atgatctgctatacccgaggacccc

SEQ ID NO: 5948385 - DNA, 25 bp, Homo sapien
cgtgaggcacttcctgtattctatt

SEQ ID NO: 5948386 - DNA, 25 bp, Homo sapien
gtgacaacattttgctggtgagacc

SEQ ID NO: 5948387 - DNA, 25 bp, Homo sapien
ttgctattagtgataggtcattagt

SEQ ID NO: 5948388 - DNA, 25 bp, Homo sapien
caatccattggtcaagctgatttat

SEQ ID NO: 5948389 - DNA, 25 bp, Homo sapien
tggtcaagctgatttatatttgtat

SEQ ID NO: 5948390 - DNA, 25 bp, Homo sapien
attggtcagttttagtggtttggag

SEQ ID NO: 5948391 - DNA, 25 bp, Homo sapien
acatctataacaataatttggagca

SEQ ID NO: 5948392 - DNA, 25 bp, Homo sapien
ccaaggcagtaacggggaaataatc

SEQ ID NO: 5948393 - DNA, 25 bp, Homo sapien
acattggaccttcgtgaggcacttc

SEQ ID NO: 5948394 - DNA, 25 bp, Homo sapien
acgcgccttcgtattatttttgccg

SEQ ID NO: 5948395 - DNA, 25 bp, Homo sapien
taagaattgcctattatggttttca

SEQ ID NO: 5948396 - DNA, 25 bp, Homo sapien
tcgcactgccgtactttctcaaaca

SEQ ID NO: 5948397 - DNA, 25 bp, Homo sapien
ccgggtctcacagatggatcgtatt

SEQ ID NO: 5948398 - DNA, 25 bp, Homo sapien
gatctattgtctctatcatgggtga

SEQ ID NO: 5948399 - DNA, 25 bp, Homo sapien
caggcacgttaattggtttaacatt

SEQ ID NO: 5948400 - DNA, 25 bp, Homo sapien
atcttcatctgaaccatgcataggg

SEQ ID NO: 5948401 - DNA, 25 bp, Homo sapien
ttgctcactgatgtcttgaccaaaa

SEQ ID NO: 5948402 - DNA, 25 bp, Homo sapien
caactaggtaagatacggtctcaac

SEQ ID NO: 5948403 - DNA, 25 bp, Homo sapien
catgcatagggtcatcaatttccat

SEQ ID NO: 5948404 - DNA, 25 bp, Homo sapien
aagtcatggaattgaccgtgtacgt

SEQ ID NO: 5948405 - DNA, 25 bp, Homo sapien
ccgtactttctcaaacattcgtcat

SEQ ID NO: 5948406 - DNA, 25 bp, Homo sapien
attgaattgctcactgatgtcttga

SEQ ID NO: 5948407 - DNA, 25 bp, Homo sapien
tccaccaaggcagtaacggggaaat

SEQ ID NO: 5948408 - DNA, 25 bp, Homo sapien
gtggtttggaggatttatgatctgc

SEQ ID NO: 5948409 - DNA, 25 bp, Homo sapien
actattcatgtcttcgtcgagagtc

SEQ ID NO: 5948410 - DNA, 25 bp, Homo sapien
attggtcaagctgatttatatttgt

SEQ ID NO: 5948411 - DNA, 25 bp, Homo sapien
taaatctctaacttgatctattgtc

SEQ ID NO: 5948412 - DNA, 25 bp, Homo sapien
tcctggtgacggttggttcaccggg

SEQ ID NO: 5948413 - DNA, 25 bp, Homo sapien
ttatatttgtattggtcagttttag

SEQ ID NO: 5948414 - DNA, 25 bp, Homo sapien
gtggctcgcatttactcaaatgctc

SEQ ID NO: 5948415 - DNA, 25 bp, Homo sapien
tagatcggtaaacattttccacacg

SEQ ID NO: 5948416 - DNA, 25 bp, Homo sapien
ctcaatccattggtcaagctgattt

SEQ ID NO: 5948417 - DNA, 25 bp, Homo sapien
caagctgatttatatttgtattggt

SEQ ID NO: 5948418 - DNA, 25 bp, Homo sapien
cagttttagtggtttggaggattta

SEQ ID NO: 5948419 - DNA, 25 bp, Homo sapien
aatcacccatgaaaaggtaattggt

SEQ ID NO: 5948420 - DNA, 25 bp, Homo sapien
aaaggtaattggtgtcaggacaagg

SEQ ID NO: 5948421 - DNA, 25 bp, Homo sapien
cggggaaataatcgaatagatcggt

SEQ ID NO: 5948422 - DNA, 25 bp, Homo sapien
accaatcttgaaaagttctaacaag

SEQ ID NO: 5948423 - DNA, 25 bp, Homo sapien
atcggaccatagaaggtcacacatt

SEQ ID NO: 5948424 - DNA, 25 bp, Homo sapien
agaccaagaatatccttccattacc

SEQ ID NO: 5948425 - DNA, 25 bp, Homo sapien
atggcaactaggtaagatacggtct

SEQ ID NO: 5948426 - DNA, 25 bp, Homo sapien
acctctcggactgattccccatccg

SEQ ID NO: 5948427 - DNA, 25 bp, Homo sapien
tctaacaagtcatggaattgaccgt

SEQ ID NO: 5948428 - DNA, 25 bp, Homo sapien
atatacttgggtaatctgcctagac

SEQ ID NO: 5948429 - DNA, 25 bp, Homo sapien
tttggaggatttatgatctgctata

SEQ ID NO: 5948430 - DNA, 25 bp, Homo sapien
gaacgcgccttcgtattatttttgc

SEQ ID NO: 5948431 - DNA, 25 bp, Homo sapien
tgctcaatccattggtcaagctgat

SEQ ID NO: 5948432 - DNA, 25 bp, Homo sapien
gaaataatcgaatagatcggtaaac

SEQ ID NO: 5948433 - DNA, 25 bp, Homo sapien
aaggcagtaacggggaaataatcga

SEQ ID NO: 5948434 - DNA, 25 bp, Homo sapien
ttgtctctatcatgggtgagagacc

SEQ ID NO: 5948435 - DNA, 25 bp, Homo sapien
accaaaagtgaagcctgcacctctc

SEQ ID NO: 5948436 - DNA, 25 bp, Homo sapien
cagtaacggggaaataatcgaatag

SEQ ID NO: 5948437 - DNA, 25 bp, Homo sapien
atcttgaaaagttctaacaagtcat

SEQ ID NO: 5948438 - DNA, 25 bp, Homo sapien
gtccaccgccattttacatagtcgt

SEQ ID NO: 5948439 - DNA, 25 bp, Homo sapien
actgatgtcttgaccaaaagtgaag

SEQ ID NO: 5948440 - DNA, 25 bp, Homo sapien
ccatatacttgggtaatctgcctag

SEQ ID NO: 5948441 - DNA, 25 bp, Homo sapien
caactcttcatctgtgtcttcgtca

SEQ ID NO: 5948442 - DNA, 25 bp, Homo sapien
aagattttattatccaccaaggcag

SEQ ID NO: 5948443 - DNA, 25 bp, Homo sapien
attagaacgcgccttcgtattattt

SEQ ID NO: 5948444 - DNA, 25 bp, Homo sapien
ttaacattctcctcgaactgcaaca

SEQ ID NO: 5948445 - DNA, 25 bp, Homo sapien
gtgtcttcctggtgacggttggttc

SEQ ID NO: 5948446 - DNA, 25 bp, Homo sapien
gtcattagtgtgattgaattgctca

SEQ ID NO: 5948447 - DNA, 25 bp, Homo sapien
ccacatctataacaataatttggag

SEQ ID NO: 5948448 - DNA, 25 bp, Homo sapien
ttgcctattatggttttcatccacc

SEQ ID NO: 5948449 - DNA, 25 bp, Homo sapien
ggcaactaggtaagatacggtctca

SEQ ID NO: 5948450 - DNA, 25 bp, Homo sapien
tggaggatttatgatctgctatacc

SEQ ID NO: 5948451 - DNA, 25 bp, Homo sapien
agtgaagcctgcacctctcggactg

SEQ ID NO: 5948452 - DNA, 25 bp, Homo sapien
tttcatggcaactaggtaagatacg

SEQ ID NO: 5948453 - DNA, 25 bp, Homo sapien
cccatccgcctctatcatcaggatc

SEQ ID NO: 5948454 - DNA, 25 bp, Homo sapien
ggtcacacattggaccttcgtgagg

SEQ ID NO: 5948455 - DNA, 25 bp, Homo sapien
gaccaccaatcttgaaaagttctaa

SEQ ID NO: 5948456 - DNA, 25 bp, Homo sapien
cctggttaccacatctataacaata

SEQ ID NO: 5948457 - DNA, 25 bp, Homo sapien
ccacctccataatagcggcctggtt

SEQ ID NO: 5948458 - DNA, 25 bp, Homo sapien
aagtatagtaattctatgtggatat

SEQ ID NO: 5948459 - DNA, 25 bp, Homo sapien
ggtctcaacagaataatatcctcta

SEQ ID NO: 5948460 - DNA, 25 bp, Homo sapien
tggtttaacattctcctcgaactgc

SEQ ID NO: 5948461 - DNA, 25 bp, Homo sapien
aaaatggtgacaacattttgctggt

SEQ ID NO: 5948462 - DNA, 25 bp, Homo sapien
tgaagcctgcacctctcggactgat

SEQ ID NO: 5948463 - DNA, 25 bp, Homo sapien
gactcgtgattgcccctaagtatag

SEQ ID NO: 5948464 - DNA, 25 bp, Homo sapien
acacattggaccttcgtgaggcact

SEQ ID NO: 5948465 - DNA, 25 bp, Homo sapien
acaagtcatggaattgaccgtgtac

SEQ ID NO: 5948466 - DNA, 25 bp, Homo sapien
ataatatcctctatccacgtaatca

SEQ ID NO: 5948467 - DNA, 25 bp, Homo sapien
acgtaatcacccatgaaaaggtaat

SEQ ID NO: 5948468 - DNA, 25 bp, Homo sapien
tttctcaaacattcgtcataaaacc

SEQ ID NO: 5948469 - DNA, 25 bp, Homo sapien
gcaaacagaagattttattatccac

SEQ ID NO: 5948470 - DNA, 25 bp, Homo sapien
acggtctcaacagaataatatcctc

SEQ ID NO: 5948471 - DNA, 25 bp, Homo sapien
gtaacaggcacgttaattggtttaa

SEQ ID NO: 5948472 - DNA, 25 bp, Homo sapien
aaggtcacacattggaccttcgtga

SEQ ID NO: 5948473 - DNA, 25 bp, Homo sapien
tggttaccacatctataacaataat

SEQ ID NO: 5948474 - DNA, 25 bp, Homo sapien
agaaggtcacacattggaccttcgt

SEQ ID NO: 5948475 - DNA, 25 bp, Homo sapien
aataatcgaatagatcggtaaacat

SEQ ID NO: 5948476 - DNA, 25 bp, Homo sapien
ttagtgataggtcattagtgtgatt

SEQ ID NO: 5948477 - DNA, 25 bp, Homo sapien
gtaatctgcctagactcgtgattgc

SEQ ID NO: 5948478 - DNA, 25 bp, Homo sapien
tctgtgtcttcgtcattagaacgcg

SEQ ID NO: 5948479 - DNA, 25 bp, Homo sapien
tgtacgtcaccacaaatggtaacag

SEQ ID NO: 5948480 - DNA, 25 bp, Homo sapien
tgaccaaaagtgaagcctgcacctc

SEQ ID NO: 5948481 - DNA, 25 bp, Homo sapien
tggaccttcgtgaggcacttcctgt

SEQ ID NO: 5948482 - DNA, 25 bp, Homo sapien
catccgcctctatcatcaggatcgg

SEQ ID NO: 5948483 - DNA, 25 bp, Homo sapien
gtctctatcatgggtgagagacctc

SEQ ID NO: 5948484 - DNA, 25 bp, Homo sapien
gagtcggtgataattgatcttcatc

SEQ ID NO: 5948485 - DNA, 25 bp, Homo sapien
aattgcctattatggttttcatcca

SEQ ID NO: 5948486 - DNA, 25 bp, Homo sapien
gaaaaggtaattggtgtcaggacaa

SEQ ID NO: 5948487 - DNA, 25 bp, Homo sapien
ccataatagcggcctggttaccaca

SEQ ID NO: 5948488 - DNA, 25 bp, Homo sapien
aggtaattggtgtcaggacaaggac

SEQ ID NO: 5948489 - DNA, 25 bp, Homo sapien
accacaaatggtaacaggcacgtta

SEQ ID NO: 5948490 - DNA, 25 bp, Homo sapien
ctataacaataatttggagcactga

SEQ ID NO: 5948491 - DNA, 25 bp, Homo sapien
tccttccattaccaattggtgagct

SEQ ID NO: 5948492 - DNA, 25 bp, Homo sapien
catcactattcatgtcttcgtcgag

SEQ ID NO: 5948493 - DNA, 25 bp, Homo sapien
cgtcgagagtcggtgataattgatc

SEQ ID NO: 5948494 - DNA, 25 bp, Homo sapien
gcacttcctgtattctatttaaatc

SEQ ID NO: 5948495 - DNA, 25 bp, Homo sapien
tcttcgtcattagaacgcgccttcg

SEQ ID NO: 5948496 - DNA, 25 bp, Homo sapien
cgtcttctgatagtggctcgcattt

SEQ ID NO: 5948497 - DNA, 25 bp, Homo sapien
tagtggtttggaggatttatgatct

SEQ ID NO: 5948498 - DNA, 25 bp, Homo sapien
cttcctggtgacggttggttcaccg

SEQ ID NO: 5948499 - DNA, 25 bp, Homo sapien
tagtggctcgcatttactcaaatgc

SEQ ID NO: 5948500 - DNA, 25 bp, Homo sapien
gtgagctcttgctattagtgatagg

SEQ ID NO: 5948501 - DNA, 25 bp, Homo sapien
ctcgcatttactcaaatgctcaatc

SEQ ID NO: 5948502 - DNA, 25 bp, Homo sapien
ggttggttcaccgggtctcacagat

SEQ ID NO: 5948503 - DNA, 25 bp, Homo sapien
ccacgtaatcacccatgaaaaggta

SEQ ID NO: 5948504 - DNA, 25 bp, Homo sapien
tatccttccattaccaattggtgag

SEQ ID NO: 5948505 - DNA, 25 bp, Homo sapien
atcgtcttctgatagtggctcgcat

SEQ ID NO: 5948506 - DNA, 25 bp, Homo sapien
aatctctaacttgatctattgtctc

SEQ ID NO: 5948507 - DNA, 25 bp, Homo sapien
cttccaactcttcatctgtgtcttc

SEQ ID NO: 5948508 - DNA, 25 bp, Homo sapien
tgaggcacttcctgtattctattta

SEQ ID NO: 5948509 - DNA, 25 bp, Homo sapien
taacttgatctattgtctctatcat

SEQ ID NO: 5948510 - DNA, 25 bp, Homo sapien
tcgtattgtaagaattgcctattat

SEQ ID NO: 5948511 - DNA, 25 bp, Homo sapien
tttgccgtcatcactattcatgtct

SEQ ID NO: 5948512 - DNA, 25 bp, Homo sapien
ttcgtcattagaacgcgccttcgta

SEQ ID NO: 5948513 - DNA, 25 bp, Homo sapien
gtattggtcagttttagtggtttgg

SEQ ID NO: 5948514 - DNA, 25 bp, Homo sapien
atacggtctcaacagaataatatcc

SEQ ID NO: 5948515 - DNA, 25 bp, Homo sapien
atttatatttgtattggtcagtttt

SEQ ID NO: 5948516 - DNA, 25 bp, Homo sapien
tgaattgctcactgatgtcttgacc

SEQ ID NO: 5948517 - DNA, 25 bp, Homo sapien
gaaccatgcatagggtcatcaattt

SEQ ID NO: 5948518 - DNA, 25 bp, Homo sapien
taaaatcttccaactcttcatctgt

SEQ ID NO: 5948519 - DNA, 25 bp, Homo sapien
tctctaacttgatctattgtctcta

SEQ ID NO: 5948520 - DNA, 25 bp, Homo sapien
cttgaccaaaagtgaagcctgcacc

SEQ ID NO: 5948521 - DNA, 25 bp, Homo sapien
taagatacggtctcaacagaataat

SEQ ID NO: 5948522 - DNA, 25 bp, Homo sapien
tccaactcttcatctgtgtcttcgt

SEQ ID NO: 5948523 - DNA, 25 bp, Homo sapien
aatagcggcctggttaccacatcta

SEQ ID NO: 5948524 - DNA, 25 bp, Homo sapien
cattctcctcgaactgcaacacgtc

SEQ ID NO: 5948525 - DNA, 25 bp, Homo sapien
agacctccatgcaaacagaagattt

SEQ ID NO: 5948526 - DNA, 25 bp, Homo sapien
ttggtgtcaggacaaggaccaccaa

SEQ ID NO: 5948527 - DNA, 25 bp, Homo sapien
gaccatagaaggtcacacattggac

SEQ ID NO: 5948528 - DNA, 25 bp, Homo sapien
aggtcattagtgtgattgaattgct

SEQ ID NO: 5948529 - DNA, 25 bp, Homo sapien
tgccgtcatcactattcatgtcttc

SEQ ID NO: 5948530 - DNA, 25 bp, Homo sapien
cctagactcgtgattgcccctaagt

SEQ ID NO: 5948531 - DNA, 25 bp, Homo sapien
atctgaaccatgcatagggtcatca

SEQ ID NO: 5948532 - DNA, 25 bp, Homo sapien
aacaataatttggagcactgaaaat

SEQ ID NO: 5948533 - DNA, 25 bp, Homo sapien
ggcctggttaccacatctataacaa

SEQ ID NO: 5948534 - DNA, 25 bp, Homo sapien
cgtgtacgtcaccacaaatggtaac

SEQ ID NO: 5948535 - DNA, 25 bp, Homo sapien
aatggtaacaggcacgttaattggt

SEQ ID NO: 5948536 - DNA, 25 bp, Homo sapien
acattttgctggtgagaccaagaat

SEQ ID NO: 5948537 - DNA, 25 bp, Homo sapien
gaggatttatgatctgctatacccg

SEQ ID NO: 5948538 - DNA, 25 bp, Homo sapien
tagactcgtgattgcccctaagtat

SEQ ID NO: 5948539 - DNA, 25 bp, Homo sapien
ctcaaatgctcaatccattggtcaa

SEQ ID NO: 5948540 - DNA, 25 bp, Homo sapien
tgcctagactcgtgattgcccctaa

SEQ ID NO: 5948541 - DNA, 25 bp, Homo sapien
ttttattatccaccaaggcagtaac

SEQ ID NO: 5948542 - DNA, 25 bp, Homo sapien
ctcacagatggatcgtattgtaaga

SEQ ID NO: 5948543 - DNA, 25 bp, Homo sapien
gatctgctatacccgaggaccccgg

SEQ ID NO: 5948544 - DNA, 25 bp, Homo sapien
tatttttgccgtcatcactattcat

SEQ ID NO: 5948545 - DNA, 25 bp, Homo sapien
cattaccaattggtgagctcttgct

SEQ ID NO: 5948546 - DNA, 25 bp, Homo sapien
caaggaccaccaatcttgaaaagtt

SEQ ID NO: 5948547 - DNA, 25 bp, Homo sapien
ggtgagagacctccatgcaaacaga

SEQ ID NO: 5948548 - DNA, 25 bp, Homo sapien
tgtcttcgtcgagagtcggtgataa

SEQ ID NO: 5948549 - DNA, 25 bp, Homo sapien
tatggttttcatccacctccataat

SEQ ID NO: 5948550 - DNA, 25 bp, Homo sapien
acacgtccaccgccattttacatag

SEQ ID NO: 5948551 - DNA, 25 bp, Homo sapien
caacacgtccaccgccattttacat

SEQ ID NO: 5948552 - DNA, 25 bp, Homo sapien
gatcgtattgtaagaattgcctatt

SEQ ID NO: 5948553 - DNA, 25 bp, Homo sapien
tcgtcataaaacccatatacttggg

SEQ ID NO: 5948554 - DNA, 25 bp, Homo sapien
atttgtattggtcagttttagtggt

SEQ ID NO: 5948555 - DNA, 25 bp, Homo sapien
acgtccaccgccattttacatagtc

SEQ ID NO: 5948556 - DNA, 25 bp, Homo sapien
ggcacgttaattggtttaacattct

SEQ ID NO: 5948557 - DNA, 25 bp, Homo sapien
tttttgccgtcatcactattcatgt

SEQ ID NO: 5948558 - DNA, 25 bp, Homo sapien
agtgtgattgaattgctcactgatg

SEQ ID NO: 5948559 - DNA, 25 bp, Homo sapien
aatttggagcactgaaaatggtgac

SEQ ID NO: 5948560 - DNA, 25 bp, Homo sapien
tactcaaatgctcaatccattggtc

SEQ ID NO: 5948561 - DNA, 25 bp, Homo sapien
gcggcctggttaccacatctataac

SEQ ID NO: 5948562 - DNA, 25 bp, Homo sapien
ggtaaacattttccacacgttcgca

SEQ ID NO: 5948563 - DNA, 25 bp, Homo sapien
gtcaagctgatttatatttgtattg

SEQ ID NO: 5948564 - DNA, 25 bp, Homo sapien
ttgggtaatctgcctagactcgtga

SEQ ID NO: 5948565 - DNA, 25 bp, Homo sapien
aacattctcctcgaactgcaacacg

SEQ ID NO: 5948566 - DNA, 25 bp, Homo sapien
ggcagtaacggggaaataatcgaat

SEQ ID NO: 5948567 - DNA, 25 bp, Homo sapien
tagtcgtgctacatcgtcttctgat

SEQ ID NO: 5948568 - DNA, 25 bp, Homo sapien
attgatcttcatctgaaccatgcat

SEQ ID NO: 5948569 - DNA, 25 bp, Homo sapien
atgcaaacagaagattttattatcc

SEQ ID NO: 5948570 - DNA, 25 bp, Homo sapien
tcaaacattcgtcataaaacccata

SEQ ID NO: 5948571 - DNA, 25 bp, Homo sapien
ctcgtgattgcccctaagtatagta

SEQ ID NO: 5948572 - DNA, 25 bp, Homo sapien
tcaggacaaggaccaccaatcttga

SEQ ID NO: 5948573 - DNA, 25 bp, Homo sapien
tggttttcatccacctccataatag

SEQ ID NO: 5948574 - DNA, 25 bp, Homo sapien
ataggtcattagtgtgattgaattg

SEQ ID NO: 5948575 - DNA, 25 bp, Homo sapien
caaaagtgaagcctgcacctctcgg

SEQ ID NO: 5948576 - DNA, 25 bp, Homo sapien
atacttgggtaatctgcctagactc

SEQ ID NO: 5948577 - DNA, 25 bp, Homo sapien
actttcatggcaactaggtaagata

SEQ ID NO: 5948578 - DNA, 25 bp, Homo sapien
tataagaaataatccggtgtcttcc

SEQ ID NO: 5948579 - DNA, 25 bp, Homo sapien
tgaaaatggtgacaacattttgctg

SEQ ID NO: 5948580 - DNA, 25 bp, Homo sapien
tgctacatcgtcttctgatagtggc

SEQ ID NO: 5948581 - DNA, 25 bp, Homo sapien
agagacctccatgcaaacagaagat

SEQ ID NO: 5948582 - DNA, 25 bp, Homo sapien
gtcttcctggtgacggttggttcac

SEQ ID NO: 5948583 - DNA, 25 bp, Homo sapien
tcctctatccacgtaatcacccatg

SEQ ID NO: 5948584 - DNA, 25 bp, Homo sapien
tcttctgatagtggctcgcatttac

SEQ ID NO: 5948585 - DNA, 25 bp, Homo sapien
acccatatacttgggtaatctgcct

SEQ ID NO: 5948586 - DNA, 25 bp, Homo sapien
tccattaccaattggtgagctcttg

SEQ ID NO: 5948587 - DNA, 25 bp, Homo sapien
tgtgattgaattgctcactgatgtc

SEQ ID NO: 5948588 - DNA, 25 bp, Homo sapien
gctattagtgataggtcattagtgt

SEQ ID NO: 5948589 - DNA, 25 bp, Homo sapien
ctggtgagaccaagaatatccttcc

SEQ ID NO: 5948590 - DNA, 25 bp, Homo sapien
gaactgcaacacgtccaccgccatt

SEQ ID NO: 5948591 - DNA, 25 bp, Homo sapien
tggtaacaggcacgttaattggttt

SEQ ID NO: 5948592 - DNA, 25 bp, Homo sapien
gtcagttttagtggtttggaggatt

SEQ ID NO: 5948593 - DNA, 25 bp, Homo sapien
ggtgtcaggacaaggaccaccaatc

SEQ ID NO: 5948594 - DNA, 25 bp, Homo sapien
tccggtgtcttcctggtgacggttg

SEQ ID NO: 5948595 - DNA, 25 bp, Homo sapien
catagggtcatcaatttccatatcc

SEQ ID NO: 5948596 - DNA, 25 bp, Homo sapien
aatctgcctagactcgtgattgccc

SEQ ID NO: 5948597 - DNA, 25 bp, Homo sapien
aatccggtgtcttcctggtgacggt

SEQ ID NO: 5948598 - DNA, 25 bp, Homo sapien
accgtgtacgtcaccacaaatggta

SEQ ID NO: 5948599 - DNA, 25 bp, Homo sapien
aggacaaggaccaccaatcttgaaa

SEQ ID NO: 5948600 - DNA, 25 bp, Homo sapien
tggtgagctcttgctattagtgata

SEQ ID NO: 5948601 - DNA, 25 bp, Homo sapien
taattgatcttcatctgaaccatgc

SEQ ID NO: 5948602 - DNA, 25 bp, Homo sapien
cttcatctgaaccatgcatagggtc

SEQ ID NO: 5948603 - DNA, 25 bp, Homo sapien
catgggtgagagacctccatgcaaa

SEQ ID NO: 5948604 - DNA, 25 bp, Homo sapien
atgtcttgaccaaaagtgaagcctg

SEQ ID NO: 5948605 - DNA, 25 bp, Homo sapien
gactgattccccatccgcctctatc

SEQ ID NO: 5948606 - DNA, 25 bp, Homo sapien
acacgttcgcactgccgtactttct

SEQ ID NO: 5948607 - DNA, 25 bp, Homo sapien
gatggatcgtattgtaagaattgcc

SEQ ID NO: 5948608 - DNA, 25 bp, Homo sapien
tttacatagtcgtgctacatcgtct

SEQ ID NO: 5948609 - DNA, 25 bp, Homo sapien
cttccattaccaattggtgagctct

SEQ ID NO: 5948610 - DNA, 25 bp, Homo sapien
attttgctggtgagaccaagaatat

SEQ ID NO: 5948611 - DNA, 25 bp, Homo sapien
gccttcgtattatttttgccgtcat

SEQ ID NO: 5948612 - DNA, 25 bp, Homo sapien
tctaacttgatctattgtctctatc

SEQ ID NO: 5948613 - DNA, 25 bp, Homo sapien
accaagaatatccttccattaccaa

SEQ ID NO: 5948614 - DNA, 25 bp, Homo sapien
gagagtcggtgataattgatcttca

SEQ ID NO: 5948615 - DNA, 25 bp, Homo sapien
tgattgcccctaagtatagtaattc

SEQ ID NO: 5948616 - DNA, 25 bp, Homo sapien
atccattggtcaagctgatttatat

SEQ ID NO: 5948617 - DNA, 25 bp, Homo sapien
accgccattttacatagtcgtgcta

SEQ ID NO: 5948618 - DNA, 25 bp, Homo sapien
tttagtggtttggaggatttatgat

SEQ ID NO: 5948619 - DNA, 25 bp, Homo sapien
ccgtcatcactattcatgtcttcgt

SEQ ID NO: 5948620 - DNA, 25 bp, Homo sapien
ataatttggagcactgaaaatggtg

SEQ ID NO: 5948621 - DNA, 25 bp, Homo sapien
taagaaataatccggtgtcttcctg

SEQ ID NO: 5948622 - DNA, 25 bp, Homo sapien
tccgcctctatcatcaggatcggac

SEQ ID NO: 5948623 - DNA, 25 bp, Homo sapien
tatccaccaaggcagtaacggggaa

SEQ ID NO: 5948624 - DNA, 25 bp, Homo sapien
tcacacattggaccttcgtgaggca

SEQ ID NO: 5948625 - DNA, 25 bp, Homo sapien
gcactgccgtactttctcaaacatt

SEQ ID NO: 5948626 - DNA, 25 bp, Homo sapien
ctattatggttttcatccacctcca

SEQ ID NO: 5948627 - DNA, 25 bp, Homo sapien
tgagaccaagaatatccttccatta

SEQ ID NO: 5948628 - DNA, 25 bp, Homo sapien
cataaaacccatatacttgggtaat

SEQ ID NO: 5948629 - DNA, 25 bp, Homo sapien
agtaattctatgtggatatctgact

SEQ ID NO: 5948630 - DNA, 25 bp, Homo sapien
tttaaatctctaacttgatctattg

SEQ ID NO: 5948631 - DNA, 25 bp, Homo sapien
tggaattgaccgtgtacgtcaccac

SEQ ID NO: 5948632 - DNA, 25 bp, Homo sapien
tcttgctattagtgataggtcatta

SEQ ID NO: 5948633 - DNA, 25 bp, Homo sapien
ctgcacctctcggactgattcccca

SEQ ID NO: 5948634 - DNA, 25 bp, Homo sapien
caataatttggagcactgaaaatgg

SEQ ID NO: 5948635 - DNA, 25 bp, Homo sapien
tagaacgcgccttcgtattattttt

SEQ ID NO: 5948636 - DNA, 25 bp, Homo sapien
acccatgaaaaggtaattggtgtca

SEQ ID NO: 5948637 - DNA, 25 bp, Homo sapien
aatatccttccattaccaattggtg

SEQ ID NO: 5948638 - DNA, 25 bp, Homo sapien
ggtgagaccaagaatatccttccat

SEQ ID NO: 5948639 - DNA, 25 bp, Homo sapien
gtatagtaattctatgtggatatct

SEQ ID NO: 5948640 - DNA, 25 bp, Homo sapien
gaataatatcctctatccacgtaat

SEQ ID NO: 5948641 - DNA, 25 bp, Homo sapien
tcttcatctgtgtcttcgtcattag

SEQ ID NO: 5948642 - DNA, 25 bp, Homo sapien
aaacattcgtcataaaacccatata

SEQ ID NO: 5948643 - DNA, 25 bp, Homo sapien
gtaattggtgtcaggacaaggacca

SEQ ID NO: 5948644 - DNA, 25 bp, Homo sapien
gattttattatccaccaaggcagta

SEQ ID NO: 5948645 - DNA, 25 bp, Homo sapien
agaattgcctattatggttttcatc

SEQ ID NO: 5948646 - DNA, 25 bp, Homo sapien
ttattatccaccaaggcagtaacgg

SEQ ID NO: 5948647 - DNA, 25 bp, Homo sapien
tcactgatgtcttgaccaaaagtga

SEQ ID NO: 5948648 - DNA, 25 bp, Homo sapien
actgccgtactttctcaaacattcg

SEQ ID NO: 5948649 - DNA, 25 bp, Homo sapien
gataattgatcttcatctgaaccat

SEQ ID NO: 5948650 - DNA, 25 bp, Homo sapien
tcatctgaaccatgcatagggtcat

SEQ ID NO: 5948651 - DNA, 25 bp, Homo sapien
gcctgcacctctcggactgattccc

SEQ ID NO: 5948652 - DNA, 25 bp, Homo sapien
attccccatccgcctctatcatcag

SEQ ID NO: 5948653 - DNA, 25 bp, Homo sapien
taaacattttccacacgttcgcact

SEQ ID NO: 5948654 - DNA, 25 bp, Homo sapien
agaaataatccggtgtcttcctggt

SEQ ID NO: 5948655 - DNA, 25 bp, Homo sapien
aatggtgacaacattttgctggtga

SEQ ID NO: 5948656 - DNA, 25 bp, Homo sapien
tctgcctagactcgtgattgcccct

SEQ ID NO: 5948657 - DNA, 25 bp, Homo sapien
gatatctgactttcatggcaactag

SEQ ID NO: 5948658 - DNA, 25 bp, Homo sapien
tgtggatatctgactttcatggcaa

SEQ ID NO: 5948659 - DNA, 25 bp, Homo sapien
tcggtaaacattttccacacgttcg

SEQ ID NO: 5948660 - DNA, 25 bp, Homo sapien
ttccacacgttcgcactgccgtact

SEQ ID NO: 5948661 - DNA, 25 bp, Homo sapien
ttcatctgtgtcttcgtcattagaa

SEQ ID NO: 5948662 - DNA, 25 bp, Homo sapien
actttctcaaacattcgtcataaaa

SEQ ID NO: 5948663 - DNA, 25 bp, Homo sapien
acttgggtaatctgcctagactcgt

SEQ ID NO: 5948664 - DNA, 25 bp, Homo sapien
ctccataatagcggcctggttacca

SEQ ID NO: 5948665 - DNA, 25 bp, Homo sapien
ataatagcggcctggttaccacatc

SEQ ID NO: 5948666 - DNA, 25 bp, Homo sapien
aacaggcacgttaattggtttaaca

SEQ ID NO: 5948667 - DNA, 25 bp, Homo sapien
tctatcatcaggatcggaccataga

SEQ ID NO: 5948668 - DNA, 25 bp, Homo sapien
aagcctgcacctctcggactgattc

SEQ ID NO: 5948669 - DNA, 25 bp, Homo sapien
aaacccatatacttgggtaatctgc

SEQ ID NO: 5948670 - DNA, 25 bp, Homo sapien
ttcgtcgagagtcggtgataattga

SEQ ID NO: 5948671 - DNA, 25 bp, Homo sapien
tgattgaattgctcactgatgtctt

SEQ ID NO: 5948672 - DNA, 25 bp, Homo sapien
tcatccacctccataatagcggcct

SEQ ID NO: 5948673 - DNA, 25 bp, Homo sapien
tgatttatatttgtattggtcagtt

SEQ ID NO: 5948674 - DNA, 25 bp, Homo sapien
tacatagtcgtgctacatcgtcttc

SEQ ID NO: 5948675 - DNA, 25 bp, Homo sapien
tggagcactgaaaatggtgacaaca

SEQ ID NO: 5948676 - DNA, 25 bp, Homo sapien
attatggttttcatccacctccata

SEQ ID NO: 5948677 - DNA, 25 bp, Homo sapien
gtactttctcaaacattcgtcataa

SEQ ID NO: 5948678 - DNA, 25 bp, Homo sapien
ctgatagtggctcgcatttactcaa

SEQ ID NO: 5948679 - DNA, 25 bp, Homo sapien
atcaggatcggaccatagaaggtca

SEQ ID NO: 5948680 - DNA, 25 bp, Homo sapien
ctccatgcaaacagaagattttatt

SEQ ID NO: 5948681 - DNA, 25 bp, Homo sapien
cgtcattagaacgcgccttcgtatt

SEQ ID NO: 5948682 - DNA, 25 bp, Homo sapien
cagatggatcgtattgtaagaattg

SEQ ID NO: 5948683 - DNA, 25 bp, Homo sapien
tagggtcatcaatttccatatccat

SEQ ID NO: 5948684 - DNA, 25 bp, Homo sapien
gtattatttttgccgtcatcactat

SEQ ID NO: 5948685 - DNA, 25 bp, Homo sapien
ctctatccacgtaatcacccatgaa

SEQ ID NO: 5948686 - DNA, 25 bp, Homo sapien
tggatcgtattgtaagaattgccta

SEQ ID NO: 5948687 - DNA, 25 bp, Homo sapien
tgctggtgagaccaagaatatcctt

SEQ ID NO: 5948688 - DNA, 25 bp, Homo sapien
atttatgatctgctatacccgagga

SEQ ID NO: 5948689 - DNA, 25 bp, Homo sapien
tgagagacctccatgcaaacagaag

SEQ ID NO: 5948690 - DNA, 25 bp, Homo sapien
gggtctcacagatggatcgtattgt

SEQ ID NO: 5948691 - DNA, 25 bp, Homo sapien
tgatgtcttgaccaaaagtgaagcc

SEQ ID NO: 5948692 - DNA, 25 bp, Homo sapien
cgcatttactcaaatgctcaatcca

SEQ ID NO: 5948693 - DNA, 25 bp, Homo sapien
tctgactttcatggcaactaggtaa

SEQ ID NO: 5948694 - DNA, 25 bp, Homo sapien
tgcaacacgtccaccgccattttac

SEQ ID NO: 5948695 - DNA, 25 bp, Homo sapien
caccaaggcagtaacggggaaataa

SEQ ID NO: 5948696 - DNA, 25 bp, Homo sapien
cgccattttacatagtcgtgctaca

SEQ ID NO: 5948697 - DNA, 25 bp, Homo sapien
actgcaacacgtccaccgccatttt

SEQ ID NO: 5948698 - DNA, 25 bp, Homo sapien
gttaccacatctataacaataattt

SEQ ID NO: 5948699 - DNA, 25 bp, Homo sapien
cacgttaattggtttaacattctcc

SEQ ID NO: 5948700 - DNA, 25 bp, Homo sapien
caattggtgagctcttgctattagt

SEQ ID NO: 5948701 - DNA, 25 bp, Homo sapien
attggtttaacattctcctcgaact

SEQ ID NO: 5948702 - DNA, 25 bp, Homo sapien
acagaagattttattatccaccaag

SEQ ID NO: 5948703 - DNA, 25 bp, Homo sapien
catttactcaaatgctcaatccatt

SEQ ID NO: 5948704 - DNA, 25 bp, Homo sapien
ctatccacgtaatcacccatgaaaa

SEQ ID NO: 5948705 - DNA, 25 bp, Homo sapien
ggctcgcatttactcaaatgctcaa

SEQ ID NO: 5948706 - DNA, 25 bp, Homo sapien
aagttctaacaagtcatggaattga

SEQ ID NO: 5948707 - DNA, 25 bp, Homo sapien
acggttggttcaccgggtctcacag

SEQ ID NO: 5948708 - DNA, 25 bp, Homo sapien
gagctcttgctattagtgataggtc

SEQ ID NO: 5948709 - DNA, 25 bp, Homo sapien
taaaattaaaatcttccaactcttc

SEQ ID NO: 5948710 - DNA, 25 bp, Homo sapien
cgtcaccacaaatggtaacaggcac

SEQ ID NO: 5948711 - DNA, 25 bp, Homo sapien
tcattagaacgcgccttcgtattat

SEQ ID NO: 5948712 - DNA, 25 bp, Homo sapien
tatctgactttcatggcaactaggt

SEQ ID NO: 5948713 - DNA, 25 bp, Homo sapien
gaattgaccgtgtacgtcaccacaa

SEQ ID NO: 5948714 - DNA, 25 bp, Homo sapien
attatttttgccgtcatcactattc

SEQ ID NO: 5948715 - DNA, 25 bp, Homo sapien
ctatcatgggtgagagacctccatg

SEQ ID NO: 5948716 - DNA, 25 bp, Homo sapien
atcgaatagatcggtaaacattttc

SEQ ID NO: 5948717 - DNA, 25 bp, Homo sapien
attgtaagaattgcctattatggtt

SEQ ID NO: 5948718 - DNA, 25 bp, Homo sapien
tatcctctatccacgtaatcaccca

SEQ ID NO: 5948719 - DNA, 25 bp, Homo sapien
gtcatcactattcatgtcttcgtcg

SEQ ID NO: 5948720 - DNA, 25 bp, Homo sapien
tgaccgtgtacgtcaccacaaatgg

SEQ ID NO: 5948721 - DNA, 25 bp, Homo sapien
caaatggtaacaggcacgttaattg

SEQ ID NO: 5948722 - DNA, 25 bp, Homo sapien
ccttcgtgaggcacttcctgtattc

SEQ ID NO: 5948723 - DNA, 25 bp, Homo sapien
tgtgtcttcgtcattagaacgcgcc

SEQ ID NO: 5948724 - DNA, 25 bp, Homo sapien
gcctattatggttttcatccacctc

SEQ ID NO: 5948725 - DNA, 25 bp, Homo sapien
cagaataatatcctctatccacgta

SEQ ID NO: 5948726 - DNA, 25 bp, Homo sapien
tctattgtctctatcatgggtgaga

SEQ ID NO: 5948727 - DNA, 25 bp, Homo sapien
ccaccaatcttgaaaagttctaaca

SEQ ID NO: 5948728 - DNA, 25 bp, Homo sapien
gtattgtaagaattgcctattatgg

SEQ ID NO: 5948729 - DNA, 25 bp, Homo sapien
tggatatctgactttcatggcaact

SEQ ID NO: 5948730 - DNA, 25 bp, Homo sapien
cgtgattgcccctaagtatagtaat

SEQ ID NO: 5948731 - DNA, 25 bp, Homo sapien
ataacaataatttggagcactgaaa

SEQ ID NO: 5948732 - DNA, 25 bp, Homo sapien
acgttcgcactgccgtactttctca

SEQ ID NO: 5948733 - DNA, 25 bp, Homo sapien
catggaattgaccgtgtacgtcacc

SEQ ID NO: 5948734 - DNA, 25 bp, Homo sapien
gtcggtgataattgatcttcatctg

SEQ ID NO: 5948735 - DNA, 25 bp, Homo sapien
ctaagtatagtaattctatgtggat

SEQ ID NO: 5948736 - DNA, 25 bp, Homo sapien
cttcgtattatttttgccgtcatca

SEQ ID NO: 5948737 - DNA, 25 bp, Homo sapien
atcttccaactcttcatctgtgtct

SEQ ID NO: 5948738 - DNA, 25 bp, Homo sapien
aggaccaccaatcttgaaaagttct

SEQ ID NO: 5948739 - DNA, 25 bp, Homo sapien
gttttagtggtttggaggatttatg

SEQ ID NO: 5948740 - DNA, 25 bp, Homo sapien
tcatggcaactaggtaagatacggt

SEQ ID NO: 5948741 - DNA, 25 bp, Homo sapien
gtcataaaacccatatacttgggta

SEQ ID NO: 5948742 - DNA, 25 bp, Homo sapien
caatcttgaaaagttctaacaagtc

SEQ ID NO: 5948743 - DNA, 25 bp, Homo sapien
aaacagaagattttattatccacca

SEQ ID NO: 5948744 - DNA, 25 bp, Homo sapien
aattggtgtcaggacaaggaccacc

SEQ ID NO: 5948745 - DNA, 25 bp, Homo sapien
tatgtggatatctgactttcatggc

SEQ ID NO: 5948746 - DNA, 25 bp, Homo sapien
tggtgacaacattttgctggtgaga

SEQ ID NO: 5948747 - DNA, 25 bp, Homo sapien
gttttcatccacctccataatagcg

SEQ ID NO: 5948748 - DNA, 25 bp, Homo sapien
ccaccgccattttacatagtcgtgc

SEQ ID NO: 5948749 - DNA, 25 bp, Homo sapien
aattgctcactgatgtcttgaccaa

SEQ ID NO: 5948750 - DNA, 25 bp, Homo sapien
taccacatctataacaataatttgg

SEQ ID NO: 5948751 - DNA, 25 bp, Homo sapien
taattggtttaacattctcctcgaa

SEQ ID NO: 5948752 - DNA, 25 bp, Homo sapien
agaatatccttccattaccaattgg

SEQ ID NO: 5948753 - DNA, 25 bp, Homo sapien
acatcgtcttctgatagtggctcgc

SEQ ID NO: 5948754 - DNA, 25 bp, Homo sapien
aaattaaaatcttccaactcttcat

SEQ ID NO: 5948755 - DNA, 25 bp, Homo sapien
tgctatacccgaggaccccggttta

SEQ ID NO: 5948756 - DNA, 25 bp, Homo sapien
tcgtattatttttgccgtcatcact

SEQ ID NO: 5948757 - DNA, 25 bp, Homo sapien
ccctaagtatagtaattctatgtgg

SEQ ID NO: 5948758 - DNA, 25 bp, Homo sapien
tgaaaagttctaacaagtcatggaa

SEQ ID NO: 5948759 - DNA, 25 bp, Homo sapien
tcatcaggatcggaccatagaaggt

SEQ ID NO: 5948760 - DNA, 25 bp, Homo sapien
tcttcgtcgagagtcggtgataatt

SEQ ID NO: 5948761 - DNA, 25 bp, Homo sapien
ccatgaaaaggtaattggtgtcagg

SEQ ID NO: 5948762 - DNA, 25 bp, Homo sapien
aaatcttccaactcttcatctgtgt

SEQ ID NO: 5948763 - DNA, 25 bp, Homo sapien
gctcttgctattagtgataggtcat

SEQ ID NO: 5948764 - DNA, 25 bp, Homo sapien
tcaacagaataatatcctctatcca

SEQ ID NO: 5948765 - DNA, 25 bp, Homo sapien
caacattttgctggtgagaccaaga

SEQ ID NO: 5948766 - DNA, 25 bp, Homo sapien
gtaatcacccatgaaaaggtaattg

SEQ ID NO: 5948767 - DNA, 25 bp, Homo sapien
cggaccatagaaggtcacacattgg

SEQ ID NO: 5948768 - DNA, 25 bp, Homo sapien
acttgatctattgtctctatcatgg

SEQ ID NO: 5948769 - DNA, 25 bp, Homo sapien
cacaaatggtaacaggcacgttaat

SEQ ID NO: 5948770 - DNA, 25 bp, Homo sapien
ttttccacacgttcgcactgccgta

SEQ ID NO: 5948771 - DNA, 25 bp, Homo sapien
aaaagttctaacaagtcatggaatt

SEQ ID NO: 5948772 - DNA, 25 bp, Homo sapien
attttacatagtcgtgctacatcgt

SEQ ID NO: 5948773 - DNA, 25 bp, Homo sapien
ttcgtgaggcacttcctgtattcta

SEQ ID NO: 5948774 - DNA, 25 bp, Homo sapien
caagaatatccttccattaccaatt

SEQ ID NO: 5948775 - DNA, 25 bp, Homo sapien
ggtaagatacggtctcaacagaata

SEQ ID NO: 5948776 - DNA, 25 bp, Homo sapien
gttaattggtttaacattctcctcg

SEQ ID NO: 5948777 - DNA, 25 bp, Homo sapien
gttctaacaagtcatggaattgacc

SEQ ID NO: 5948778 - DNA, 25 bp, Homo sapien
taacaagtcatggaattgaccgtgt

SEQ ID NO: 5948779 - DNA, 25 bp, Homo sapien
actcttcatctgtgtcttcgtcatt

SEQ ID NO: 5948780 - DNA, 25 bp, Homo sapien
gtcgtgctacatcgtcttctgatag

SEQ ID NO: 5948781 - DNA, 25 bp, Homo sapien
acattcgtcataaaacccatatact

SEQ ID NO: 5948782 - DNA, 25 bp, Homo sapien
ggtgacggttggttcaccgggtctc

SEQ ID NO: 5948783 - DNA, 25 bp, Homo sapien
tctgctatacccgaggaccccggtt

SEQ ID NO: 5948784 - DNA, 25 bp, Homo sapien
taatcgaatagatcggtaaacattt

SEQ ID NO: 5948785 - DNA, 25 bp, Homo sapien
aatatcctctatccacgtaatcacc

SEQ ID NO: 5948786 - DNA, 25 bp, Homo sapien
tttactcaaatgctcaatccattgg

SEQ ID NO: 5948787 - DNA, 25 bp, Homo sapien
actgaaaatggtgacaacattttgc

SEQ ID NO: 5948788 - DNA, 25 bp, Homo sapien
tacgtcaccacaaatggtaacaggc

SEQ ID NO: 5948789 - DNA, 25 bp, Homo sapien
tcgaactgcaacacgtccaccgcca

SEQ ID NO: 5948790 - DNA, 25 bp, Homo sapien
actaggtaagatacggtctcaacag

SEQ ID NO: 5948791 - DNA, 25 bp, Homo sapien
acttcctgtattctatttaaatctc

SEQ ID NO: 5948792 - DNA, 25 bp, Homo sapien
ggatttatgatctgctatacccgag

SEQ ID NO: 5948793 - DNA, 25 bp, Homo sapien
attggaccttcgtgaggcacttcct

SEQ ID NO: 5948794 - DNA, 25 bp, Homo sapien
agctgatttatatttgtattggtca

SEQ ID NO: 5948795 - DNA, 25 bp, Homo sapien
attgcccctaagtatagtaattcta

SEQ ID NO: 5948796 - DNA, 25 bp, Homo sapien
gcgccttcgtattatttttgccgtc

SEQ ID NO: 5948797 - DNA, 25 bp, Homo sapien
tcgagagtcggtgataattgatctt

SEQ ID NO: 5948798 - DNA, 25 bp, Homo sapien
gcacctctcggactgattccccatc

SEQ ID NO: 5948799 - DNA, 25 bp, Homo sapien
gcactgaaaatggtgacaacatttt

SEQ ID NO: 5948800 - DNA, 25 bp, Homo sapien
tattcatgtcttcgtcgagagtcgg

SEQ ID NO: 5948801 - DNA, 25 bp, Homo sapien
aacggggaaataatcgaatagatcg

SEQ ID NO: 5948802 - DNA, 25 bp, Homo sapien
tgacggttggttcaccgggtctcac

SEQ ID NO: 5948803 - DNA, 25 bp, Homo sapien
accatgcatagggtcatcaatttcc

SEQ ID NO: 5948804 - DNA, 25 bp, Homo sapien
ttgatctattgtctctatcatgggt

SEQ ID NO: 5948805 - DNA, 25 bp, Homo sapien
ttgtattggtcagttttagtggttt

SEQ ID NO: 5948806 - DNA, 25 bp, Homo sapien
cattagtgtgattgaattgctcact

SEQ ID NO: 5948807 - DNA, 25 bp, Homo sapien
cctcgaactgcaacacgtccaccgc

SEQ ID NO: 5948808 - DNA, 25 bp, Homo sapien
aatagatcggtaaacattttccaca

SEQ ID NO: 5948809 - DNA, 25 bp, Homo sapien
atccacctccataatagcggcctgg

SEQ ID NO: 5948810 - DNA, 25 bp, Homo sapien
gtcttgaccaaaagtgaagcctgca

SEQ ID NO: 5948811 - DNA, 25 bp, Homo sapien
cgcctctatcatcaggatcggacca

SEQ ID NO: 5948812 - DNA, 25 bp, Homo sapien
tgataggtcattagtgtgattgaat

SEQ ID NO: 5948813 - DNA, 25 bp, Homo sapien
atatttgtattggtcagttttagtg

SEQ ID NO: 5948814 - DNA, 25 bp, Homo sapien
tgcccctaagtatagtaattctatg

SEQ ID NO: 5948815 - DNA, 25 bp, Homo sapien
ataatccggtgtcttcctggtgacg

SEQ ID NO: 5948816 - DNA, 25 bp, Homo sapien
cggtgataattgatcttcatctgaa

SEQ ID NO: 5948817 - DNA, 25 bp, Homo sapien
ccattggtcaagctgatttatattt

SEQ ID NO: 5948818 - DNA, 25 bp, Homo sapien
gtaacggggaaataatcgaatagat

SEQ ID NO: 5948819 - DNA, 25 bp, Homo sapien
aaagtgaagcctgcacctctcggac

SEQ ID NO: 5948820 - DNA, 25 bp, Homo sapien
gtcatggaattgaccgtgtacgtca

SEQ ID NO: 5948821 - DNA, 25 bp, Homo sapien
ttctcctcgaactgcaacacgtcca

SEQ ID NO: 5948822 - DNA, 25 bp, Homo sapien
gagcactgaaaatggtgacaacatt

SEQ ID NO: 5948823 - DNA, 25 bp, Homo sapien
ctcctcgaactgcaacacgtccacc

SEQ ID NO: 5948824 - DNA, 25 bp, Homo sapien
tgtaagaattgcctattatggtttt

SEQ ID NO: 5948825 - DNA, 25 bp, Homo sapien
agtgataggtcattagtgtgattga

SEQ ID NO: 5948826 - DNA, 25 bp, Homo sapien
atccacgtaatcacccatgaaaagg

SEQ ID NO: 5948827 - DNA, 25 bp, Homo sapien
cggtgtcttcctggtgacggttggt

SEQ ID NO: 5948828 - DNA, 25 bp, Homo sapien
tgcatagggtcatcaatttccatat

SEQ ID NO: 5948829 - DNA, 25 bp, Homo sapien
ttcaccgggtctcacagatggatcg

SEQ ID NO: 5948830 - DNA, 25 bp, Homo sapien
aatgctcaatccattggtcaagctg

SEQ ID NO: 5948831 - DNA, 25 bp, Homo sapien
acctccatgcaaacagaagatttta

SEQ ID NO: 5948832 - DNA, 25 bp, Homo sapien
atagtaattctatgtggatatctga

SEQ ID NO: 5948833 - DNA, 25 bp, Homo sapien
agatacggtctcaacagaataatat

SEQ ID NO: 5948834 - DNA, 25 bp, Homo sapien
caccgggtctcacagatggatcgta

SEQ ID NO: 5948835 - DNA, 25 bp, Homo sapien
tctcaaacattcgtcataaaaccca

SEQ ID NO: 5948836 - DNA, 25 bp, Homo sapien
atagaaggtcacacattggaccttc

SEQ ID NO: 5948837 - DNA, 25 bp, Homo sapien
tcactattcatgtcttcgtcgagag

SEQ ID NO: 5948838 - DNA, 25 bp, Homo sapien
tgtcaggacaaggaccaccaatctt

SEQ ID NO: 5948839 - DNA, 25 bp, Homo sapien
tctcaacagaataatatcctctatc

SEQ ID NO: 5948840 - DNA, 25 bp, Homo sapien
caaatgctcaatccattggtcaagc

SEQ ID NO: 5948841 - DNA, 25 bp, Homo sapien
gatagtggctcgcatttactcaaat

SEQ ID NO: 5948842 - DNA, 25 bp, Homo sapien
taattctatgtggatatctgacttt

SEQ ID NO: 5948843 - DNA, 25 bp, Homo sapien
gtttaacattctcctcgaactgcaa

SEQ ID NO: 5948844 - DNA, 25 bp, Homo sapien
aacagaataatatcctctatccacg

SEQ ID NO: 5948845 - DNA, 25 bp, Homo sapien
ggtttggaggatttatgatctgcta

SEQ ID NO: 5948846 - DNA, 25 bp, Homo sapien
tcacccatgaaaaggtaattggtgt

SEQ ID NO: 5948847 - DNA, 25 bp, Homo sapien
ggttcaccgggtctcacagatggat

SEQ ID NO: 5948848 - DNA, 25 bp, Homo sapien
ttatgatctgctatacccgaggacc

SEQ ID NO: 5948849 - DNA, 25 bp, Homo sapien
acctccataatagcggcctggttac

SEQ ID NO: 5948850 - DNA, 25 bp, Homo sapien
ctggtgacggttggttcaccgggtc

SEQ ID NO: 5948851 - DNA, 25 bp, Homo sapien
ctctatcatgggtgagagacctcca

SEQ ID NO: 5948852 - DNA, 25 bp, Homo sapien
ttagtgtgattgaattgctcactga

SEQ ID NO: 5948853 - DNA, 25 bp, Homo sapien
tggtcagttttagtggtttggagga

SEQ ID NO: 5948854 - DNA, 25 bp, Homo sapien
ggatcggaccatagaaggtcacaca

SEQ ID NO: 5948855 - DNA, 25 bp, Homo sapien
gttcgcactgccgtactttctcaaa

SEQ ID NO: 5948856 - DNA, 25 bp, Homo sapien
cattttccacacgttcgcactgccg

SEQ ID NO: 5948857 - DNA, 25 bp, Homo sapien
tagcggcctggttaccacatctata

SEQ ID NO: 5948858 - DNA, 25 bp, Homo sapien
ccatagaaggtcacacattggacct

SEQ ID NO: 5948859 - DNA, 25 bp, Homo sapien
catgtcttcgtcgagagtcggtgat

SEQ ID NO: 5948860 - DNA, 25 bp, Homo sapien
tattagtgataggtcattagtgtga

SEQ ID NO: 5948861 - DNA, 25 bp, Homo sapien
cctctatcatcaggatcggaccata

SEQ ID NO: 5948862 - DNA, 25 bp, Homo sapien
tgactttcatggcaactaggtaaga

SEQ ID NO: 5948863 - DNA, 25 bp, Homo sapien
aaataatccggtgtcttcctggtga

SEQ ID NO: 5948864 - DNA, 25 bp, Homo sapien
attctatgtggatatctgactttca

SEQ ID NO: 5948865 - DNA, 25 bp, Homo sapien
attcgtcataaaacccatatacttg

SEQ ID NO: 5948866 - DNA, 25 bp, Homo sapien
atgaaaaggtaattggtgtcaggac

SEQ ID NO: 5948867 - DNA, 25 bp, Homo sapien
tattgtctctatcatgggtgagaga

SEQ ID NO: 5948868 - DNA, 25 bp, Homo sapien
aggcacttcctgtattctatttaaa

SEQ ID NO: 5948869 - DNA, 25 bp, Homo sapien
cgtgctacatcgtcttctgatagtg

SEQ ID NO: 5948870 - DNA, 25 bp, Homo sapien
tgccgtactttctcaaacattcgtc

SEQ ID NO: 5948871 - DNA, 25 bp, Homo sapien
taggtaagatacggtctcaacagaa

SEQ ID NO: 5948872 - DNA, 25 bp, Homo sapien
cttgaaaagttctaacaagtcatgg

SEQ ID NO: 5948873 - DNA, 25 bp, Homo sapien
ccacacgttcgcactgccgtacttt

SEQ ID NO: 5948874 - DNA, 25 bp, Homo sapien
gaccttcgtgaggcacttcctgtat

SEQ ID NO: 5948875 - DNA, 25 bp, Homo sapien
gatcggtaaacattttccacacgtt

SEQ ID NO: 5948876 - DNA, 25 bp, Homo sapien
aacattttccacacgttcgcactgc

SEQ ID NO: 5948877 - DNA, 25 bp, Homo sapien
ttctgatagtggctcgcatttactc

SEQ ID NO: 5948878 - DNA, 25 bp, Homo sapien
atcatgggtgagagacctccatgca

SEQ ID NO: 5948879 - DNA, 25 bp, Homo sapien
tgtcttcgtcattagaacgcgcctt

SEQ ID NO: 5948880 - DNA, 25 bp, Homo sapien
gacaaggaccaccaatcttgaaaag

SEQ ID NO: 5948881 - DNA, 25 bp, Homo sapien
ctgaaccatgcatagggtcatcaat

SEQ ID NO: 5948882 - DNA, 25 bp, Homo sapien
accaattggtgagctcttgctatta

SEQ ID NO: 5948883 - DNA, 25 bp, Homo sapien
attggtgagctcttgctattagtga

SEQ ID NO: 5948884 - DNA, 25 bp, Homo sapien
cgaatagatcggtaaacattttcca

SEQ ID NO: 5948885 - DNA, 25 bp, Homo sapien
tcaccacaaatggtaacaggcacgt

SEQ ID NO: 5948886 - DNA, 25 bp, Homo sapien
ctacatcgtcttctgatagtggctc

SEQ ID NO: 5948887 - DNA, 25 bp, Homo sapien
agaagattttattatccaccaaggc

SEQ ID NO: 5948888 - DNA, 25 bp, Homo sapien
attaaaatcttccaactcttcatct

SEQ ID NO: 5948889 - DNA, 25 bp, Homo sapien
caggatcggaccatagaaggtcaca

SEQ ID NO: 5948890 - DNA, 25 bp, Homo sapien
atctataacaataatttggagcact

SEQ ID NO: 5948891 - DNA, 25 bp, Homo sapien
tttgctggtgagaccaagaatatcc

SEQ ID NO: 5948892 - DNA, 25 bp, Homo sapien
acgaagcttattttgctgagctggg

SEQ ID NO: 5948893 - DNA, 25 bp, Homo sapien
cttggtgtgcatatatcttttgtaa

SEQ ID NO: 5948894 - DNA, 25 bp, Homo sapien
ttggagctttcatttgccttgaatg

SEQ ID NO: 5948895 - DNA, 25 bp, Homo sapien
agcatttggattttgatgcttccaa

SEQ ID NO: 5948896 - DNA, 25 bp, Homo sapien
gatctgcaacaccagcaaactctag

SEQ ID NO: 5948897 - DNA, 25 bp, Homo sapien
taaccaaatcgttcgaggacgtaaa

SEQ ID NO: 5948898 - DNA, 25 bp, Homo sapien
catttgcccccttctcaaggtggta

SEQ ID NO: 5948899 - DNA, 25 bp, Homo sapien
tctagaccagatcatttgccccctt

SEQ ID NO: 5948900 - DNA, 25 bp, Homo sapien
attggtgcaaataagaaatgtatgg

SEQ ID NO: 5948901 - DNA, 25 bp, Homo sapien
ctatcactatggatcagtttaaacc

SEQ ID NO: 5948902 - DNA, 25 bp, Homo sapien
cagctgcccagtttggccaaaagtt

SEQ ID NO: 5948903 - DNA, 25 bp, Homo sapien
attttcaaaaggagaagaacgaagc

SEQ ID NO: 5948904 - DNA, 25 bp, Homo sapien
tatggattgtggtgcgccaaatcca

SEQ ID NO: 5948905 - DNA, 25 bp, Homo sapien
ggacgaggacaaatgggacgatttc

SEQ ID NO: 5948906 - DNA, 25 bp, Homo sapien
tgaatggttcaagtcgcataatatt

SEQ ID NO: 5948907 - DNA, 25 bp, Homo sapien
tcttcgtatggaaaaaggtggtaac

SEQ ID NO: 5948908 - DNA, 25 bp, Homo sapien
aagtcgcataatattgacctgagtt

SEQ ID NO: 5948909 - DNA, 25 bp, Homo sapien
gcctggaaaattttcaagctgatcc

SEQ ID NO: 5948910 - DNA, 25 bp, Homo sapien
gttcaagtcgcataatattgacctg

SEQ ID NO: 5948911 - DNA, 25 bp, Homo sapien
tgcccccttctcaaggtggtaaata

SEQ ID NO: 5948912 - DNA, 25 bp, Homo sapien
cgcctggtgttgctcaaagtcgaga

SEQ ID NO: 5948913 - DNA, 25 bp, Homo sapien
gggacaccactggagaaccgtcgat

SEQ ID NO: 5948914 - DNA, 25 bp, Homo sapien
ttcatttgccttgaatgtgccggta

SEQ ID NO: 5948915 - DNA, 25 bp, Homo sapien
atcttttgtaagatctatcactatg

SEQ ID NO: 5948916 - DNA, 25 bp, Homo sapien
caacaccagcaaactctagtaatgg

SEQ ID NO: 5948917 - DNA, 25 bp, Homo sapien
cgcataatattgacctgagtttacc

SEQ ID NO: 5948918 - DNA, 25 bp, Homo sapien
acgcctaagtttggagctttcattt

SEQ ID NO: 5948919 - DNA, 25 bp, Homo sapien
gtgaaatacgataaccccgtcgcag

SEQ ID NO: 5948920 - DNA, 25 bp, Homo sapien
agcaatggcaatccggagagttgtc

SEQ ID NO: 5948921 - DNA, 25 bp, Homo sapien
acgaagagagcagctgcccagtttg

SEQ ID NO: 5948922 - DNA, 25 bp, Homo sapien
aagattgataataacgataagaaga

SEQ ID NO: 5948923 - DNA, 25 bp, Homo sapien
cttccaagttatcagcaacctctca

SEQ ID NO: 5948924 - DNA, 25 bp, Homo sapien
tggaagtacacccgcaaaacctcca

SEQ ID NO: 5948925 - DNA, 25 bp, Homo sapien
tacccgcaggcgtcttttgcaattg

SEQ ID NO: 5948926 - DNA, 25 bp, Homo sapien
ctgagtttaccacaaaaagtgaaat

SEQ ID NO: 5948927 - DNA, 25 bp, Homo sapien
cttcttcgtatggaaaaaggtggta

SEQ ID NO: 5948928 - DNA, 25 bp, Homo sapien
caagcatttagtaacttcactaaaa

SEQ ID NO: 5948929 - DNA, 25 bp, Homo sapien
aatggtgccaattttcaaaaggaga

SEQ ID NO: 5948930 - DNA, 25 bp, Homo sapien
attaagcctcacgtccagcaatggc

SEQ ID NO: 5948931 - DNA, 25 bp, Homo sapien
caagaacggtctgcagggtccagca

SEQ ID NO: 5948932 - DNA, 25 bp, Homo sapien
ccggaggaacttcttcgtatggaaa

SEQ ID NO: 5948933 - DNA, 25 bp, Homo sapien
tggtaacgaacctttgactgaatgg

SEQ ID NO: 5948934 - DNA, 25 bp, Homo sapien
aagatagagtatttgaagagcgtga

SEQ ID NO: 5948935 - DNA, 25 bp, Homo sapien
aggatagctctacagcagggaatac

SEQ ID NO: 5948936 - DNA, 25 bp, Homo sapien
gatggggcctcttctccagcgctgt

SEQ ID NO: 5948937 - DNA, 25 bp, Homo sapien
agttatggattccaagcatttagta

SEQ ID NO: 5948938 - DNA, 25 bp, Homo sapien
agaatgaacaggacgaggacaaatg

SEQ ID NO: 5948939 - DNA, 25 bp, Homo sapien
ttgaatgtgccggtatccatagagg

SEQ ID NO: 5948940 - DNA, 25 bp, Homo sapien
aatgggccacgcctaagtttggagc

SEQ ID NO: 5948941 - DNA, 25 bp, Homo sapien
gacaccactggagaaccgtcgatct

SEQ ID NO: 5948942 - DNA, 25 bp, Homo sapien
atggcaatccggagagttgtcagaa

SEQ ID NO: 5948943 - DNA, 25 bp, Homo sapien
agagcagctgcccagtttggccaaa

SEQ ID NO: 5948944 - DNA, 25 bp, Homo sapien
ctttgggaacattgagcagaggatg

SEQ ID NO: 5948945 - DNA, 25 bp, Homo sapien
atgtgccggtatccatagagggctt

SEQ ID NO: 5948946 - DNA, 25 bp, Homo sapien
cttctccagcgctgtaaccaaatcg

SEQ ID NO: 5948947 - DNA, 25 bp, Homo sapien
aagtttggagctttcatttgccttg

SEQ ID NO: 5948948 - DNA, 25 bp, Homo sapien
gcatccgctacgcctggtgttgctc

SEQ ID NO: 5948949 - DNA, 25 bp, Homo sapien
ggtccagcaatactttgagcctgga

SEQ ID NO: 5948950 - DNA, 25 bp, Homo sapien
aatctagaccagatcatttgccccc

SEQ ID NO: 5948951 - DNA, 25 bp, Homo sapien
ctcttctccagcgctgtaaccaaat

SEQ ID NO: 5948952 - DNA, 25 bp, Homo sapien
tcctttgggaacattgagcagagga

SEQ ID NO: 5948953 - DNA, 25 bp, Homo sapien
aatactttgagcctggaaaattttc

SEQ ID NO: 5948954 - DNA, 25 bp, Homo sapien
ttcaagaaacgagtagttatggatt

SEQ ID NO: 5948955 - DNA, 25 bp, Homo sapien
ccgcaaaacctccacaagaacggtc

SEQ ID NO: 5948956 - DNA, 25 bp, Homo sapien
aagaaaagttaacatgtctttgcga

SEQ ID NO: 5948957 - DNA, 25 bp, Homo sapien
caattttcaaaaggagaagaacgaa

SEQ ID NO: 5948958 - DNA, 25 bp, Homo sapien
gctgcccagtttggccaaaagtttc

SEQ ID NO: 5948959 - DNA, 25 bp, Homo sapien
tgacctgagtttaccacaaaaagtg

SEQ ID NO: 5948960 - DNA, 25 bp, Homo sapien
gtttaccacaaaaagtgaaatacga

SEQ ID NO: 5948961 - DNA, 25 bp, Homo sapien
ccaaatccacaatgggccacgccta

SEQ ID NO: 5948962 - DNA, 25 bp, Homo sapien
accgctgcatccgctacgcctggtg

SEQ ID NO: 5948963 - DNA, 25 bp, Homo sapien
ccccgtcgcagaggattataaagaa

SEQ ID NO: 5948964 - DNA, 25 bp, Homo sapien
ggaaagtggacccagatacccgcag

SEQ ID NO: 5948965 - DNA, 25 bp, Homo sapien
caggcgtcttttgcaattgcaaaag

SEQ ID NO: 5948966 - DNA, 25 bp, Homo sapien
atatcttttgtaagatctatcacta

SEQ ID NO: 5948967 - DNA, 25 bp, Homo sapien
aaactctagtaatggtgccaatttt

SEQ ID NO: 5948968 - DNA, 25 bp, Homo sapien
cagcaacctctcaaaccgctgcatc

SEQ ID NO: 5948969 - DNA, 25 bp, Homo sapien
acttcactaaaaatttcaatggtaa

SEQ ID NO: 5948970 - DNA, 25 bp, Homo sapien
cgaaacggttattaagcctcacgtc

SEQ ID NO: 5948971 - DNA, 25 bp, Homo sapien
ggtggtaacgaacctttgactgaat

SEQ ID NO: 5948972 - DNA, 25 bp, Homo sapien
cctttgactgaatggttcaagtcgc

SEQ ID NO: 5948973 - DNA, 25 bp, Homo sapien
agaagggacaccactggagaaccgt

SEQ ID NO: 5948974 - DNA, 25 bp, Homo sapien
gtcgcagaggattataaagaaaagt

SEQ ID NO: 5948975 - DNA, 25 bp, Homo sapien
aatggttcaagtcgcataatattga

SEQ ID NO: 5948976 - DNA, 25 bp, Homo sapien
tttggaagtacacccgcaaaacctc

SEQ ID NO: 5948977 - DNA, 25 bp, Homo sapien
accgtcgatctgcaacaccagcaaa

SEQ ID NO: 5948978 - DNA, 25 bp, Homo sapien
ccacaaaaagtgaaatacgataacc

SEQ ID NO: 5948979 - DNA, 25 bp, Homo sapien
agatcatttgcccccttctcaaggt

SEQ ID NO: 5948980 - DNA, 25 bp, Homo sapien
gcatatatcttttgtaagatctatc

SEQ ID NO: 5948981 - DNA, 25 bp, Homo sapien
gcagaggatagctctacagcaggga

SEQ ID NO: 5948982 - DNA, 25 bp, Homo sapien
gctctacagcagggaatacaaccca

SEQ ID NO: 5948983 - DNA, 25 bp, Homo sapien
ccacaatgggccacgcctaagtttg

SEQ ID NO: 5948984 - DNA, 25 bp, Homo sapien
aatgaacaggacgaggacaaatggg

SEQ ID NO: 5948985 - DNA, 25 bp, Homo sapien
tggattttgatgcttccaagttatc

SEQ ID NO: 5948986 - DNA, 25 bp, Homo sapien
gagaaccgtcgatctgcaacaccag

SEQ ID NO: 5948987 - DNA, 25 bp, Homo sapien
cccagatacccgcaggcgtcttttg

SEQ ID NO: 5948988 - DNA, 25 bp, Homo sapien
gaagaatgaacaggacgaggacaaa

SEQ ID NO: 5948989 - DNA, 25 bp, Homo sapien
atccatagagggcttggtgtgcata

SEQ ID NO: 5948990 - DNA, 25 bp, Homo sapien
ttagtaacttcactaaaaatttcaa

SEQ ID NO: 5948991 - DNA, 25 bp, Homo sapien
cataatattgacctgagtttaccac

SEQ ID NO: 5948992 - DNA, 25 bp, Homo sapien
ggcttggtgtgcatatatcttttgt

SEQ ID NO: 5948993 - DNA, 25 bp, Homo sapien
gtaacgaacctttgactgaatggtt

SEQ ID NO: 5948994 - DNA, 25 bp, Homo sapien
cctggtgttgctcaaagtcgagaag

SEQ ID NO: 5948995 - DNA, 25 bp, Homo sapien
tgagctgggcaagaagaaccaatct

SEQ ID NO: 5948996 - DNA, 25 bp, Homo sapien
cagcaatactttgagcctggaaaat

SEQ ID NO: 5948997 - DNA, 25 bp, Homo sapien
gaaccgtcgatctgcaacaccagca

SEQ ID NO: 5948998 - DNA, 25 bp, Homo sapien
ccagcaatggcaatccggagagttg

SEQ ID NO: 5948999 - DNA, 25 bp, Homo sapien
tattttgctgagctgggcaagaaga

SEQ ID NO: 5949000 - DNA, 25 bp, Homo sapien
ataagaagaatgaacaggacgagga

SEQ ID NO: 5949001 - DNA, 25 bp, Homo sapien
ttgggaacattgagcagaggatggg

SEQ ID NO: 5949002 - DNA, 25 bp, Homo sapien
ggaatacaacccatacagaatatca

SEQ ID NO: 5949003 - DNA, 25 bp, Homo sapien
ttaacatgtctttgcgaagatagag

SEQ ID NO: 5949004 - DNA, 25 bp, Homo sapien
aacaggacgaggacaaatgggacga

SEQ ID NO: 5949005 - DNA, 25 bp, Homo sapien
gataataacgataagaagaatgaac

SEQ ID NO: 5949006 - DNA, 25 bp, Homo sapien
gaatgtgccggtatccatagagggc

SEQ ID NO: 5949007 - DNA, 25 bp, Homo sapien
gatcctttgggaacattgagcagag

SEQ ID NO: 5949008 - DNA, 25 bp, Homo sapien
ttgctgagctgggcaagaagaacca

SEQ ID NO: 5949009 - DNA, 25 bp, Homo sapien
tagtaatggtgccaattttcaaaag

SEQ ID NO: 5949010 - DNA, 25 bp, Homo sapien
tgtatggattgtggtgcgccaaatc

SEQ ID NO: 5949011 - DNA, 25 bp, Homo sapien
cgaagatagagtatttgaagagcgt

SEQ ID NO: 5949012 - DNA, 25 bp, Homo sapien
tggggcctcttctccagcgctgtaa

SEQ ID NO: 5949013 - DNA, 25 bp, Homo sapien
agctttcatttgccttgaatgtgcc

SEQ ID NO: 5949014 - DNA, 25 bp, Homo sapien
atatatcttttgtaagatctatcac

SEQ ID NO: 5949015 - DNA, 25 bp, Homo sapien
agctgatcctttgggaacattgagc

SEQ ID NO: 5949016 - DNA, 25 bp, Homo sapien
tcaaggtggtaaatatcagggcttt

SEQ ID NO: 5949017 - DNA, 25 bp, Homo sapien
gatacccgcaggcgtcttttgcaat

SEQ ID NO: 5949018 - DNA, 25 bp, Homo sapien
gaaatgtatggattgtggtgcgcca

SEQ ID NO: 5949019 - DNA, 25 bp, Homo sapien
gcagaggatggggcctcttctccag

SEQ ID NO: 5949020 - DNA, 25 bp, Homo sapien
tctacagcagggaatacaacccata

SEQ ID NO: 5949021 - DNA, 25 bp, Homo sapien
agtaacttcactaaaaatttcaatg

SEQ ID NO: 5949022 - DNA, 25 bp, Homo sapien
ctttcatttgccttgaatgtgccgg

SEQ ID NO: 5949023 - DNA, 25 bp, Homo sapien
ggaacattgagcagaggatggggcc

SEQ ID NO: 5949024 - DNA, 25 bp, Homo sapien
tactttgagcctggaaaattttcaa

SEQ ID NO: 5949025 - DNA, 25 bp, Homo sapien
ctgggcaagaagaaccaatctagac

SEQ ID NO: 5949026 - DNA, 25 bp, Homo sapien
caatccggagagttgtcagaagaaa

SEQ ID NO: 5949027 - DNA, 25 bp, Homo sapien
atccgctacgcctggtgttgctcaa

SEQ ID NO: 5949028 - DNA, 25 bp, Homo sapien
ttttgctgagctgggcaagaagaac

SEQ ID NO: 5949029 - DNA, 25 bp, Homo sapien
ggattccaagcatttagtaacttca

SEQ ID NO: 5949030 - DNA, 25 bp, Homo sapien
ggccacgcctaagtttggagctttc

SEQ ID NO: 5949031 - DNA, 25 bp, Homo sapien
ataaccccgtcgcagaggattataa

SEQ ID NO: 5949032 - DNA, 25 bp, Homo sapien
attccaagcatttagtaacttcact

SEQ ID NO: 5949033 - DNA, 25 bp, Homo sapien
gcaatactttgagcctggaaaattt

SEQ ID NO: 5949034 - DNA, 25 bp, Homo sapien
tccaagcatttagtaacttcactaa

SEQ ID NO: 5949035 - DNA, 25 bp, Homo sapien
ccacgcctaagtttggagctttcat

SEQ ID NO: 5949036 - DNA, 25 bp, Homo sapien
agtacacccgcaaaacctccacaag

SEQ ID NO: 5949037 - DNA, 25 bp, Homo sapien
aacatgtctttgcgaagatagagta

SEQ ID NO: 5949038 - DNA, 25 bp, Homo sapien
tcaagtcgcataatattgacctgag

SEQ ID NO: 5949039 - DNA, 25 bp, Homo sapien
aaagtggacccagatacccgcaggc

SEQ ID NO: 5949040 - DNA, 25 bp, Homo sapien
atagagggcttggtgtgcatatatc

SEQ ID NO: 5949041 - DNA, 25 bp, Homo sapien
cttctcaaggtggtaaatatcaggg

SEQ ID NO: 5949042 - DNA, 25 bp, Homo sapien
agggtccagcaatactttgagcctg

SEQ ID NO: 5949043 - DNA, 25 bp, Homo sapien
tttgccttgaatgtgccggtatcca

SEQ ID NO: 5949044 - DNA, 25 bp, Homo sapien
aacgataagaagaatgaacaggacg

SEQ ID NO: 5949045 - DNA, 25 bp, Homo sapien
aatacgataaccccgtcgcagagga

SEQ ID NO: 5949046 - DNA, 25 bp, Homo sapien
tttgcccccttctcaaggtggtaaa

SEQ ID NO: 5949047 - DNA, 25 bp, Homo sapien
tttggccaaaagtttcaagaaacga

SEQ ID NO: 5949048 - DNA, 25 bp, Homo sapien
cctccacaagaacggtctgcagggt

SEQ ID NO: 5949049 - DNA, 25 bp, Homo sapien
tctcaaaccgctgcatccgctacgc

SEQ ID NO: 5949050 - DNA, 25 bp, Homo sapien
tgtaaccaaatcgttcgaggacgta

SEQ ID NO: 5949051 - DNA, 25 bp, Homo sapien
gctacgcctggtgttgctcaaagtc

SEQ ID NO: 5949052 - DNA, 25 bp, Homo sapien
gtaaatatcagggctttggaagtac

SEQ ID NO: 5949053 - DNA, 25 bp, Homo sapien
ttgatgcttccaagttatcagcaac

SEQ ID NO: 5949054 - DNA, 25 bp, Homo sapien
agagagcagctgcccagtttggcca

SEQ ID NO: 5949055 - DNA, 25 bp, Homo sapien
gaaatacgataaccccgtcgcagag

SEQ ID NO: 5949056 - DNA, 25 bp, Homo sapien
aagaaatgtatggattgtggtgcgc

SEQ ID NO: 5949057 - DNA, 25 bp, Homo sapien
gcaagaagaaccaatctagaccaga

SEQ ID NO: 5949058 - DNA, 25 bp, Homo sapien
atggatcagtttaaaccggaggaac

SEQ ID NO: 5949059 - DNA, 25 bp, Homo sapien
acggttattaagcctcacgtccagc

SEQ ID NO: 5949060 - DNA, 25 bp, Homo sapien
tgtctttgcgaagatagagtatttg

SEQ ID NO: 5949061 - DNA, 25 bp, Homo sapien
acaccagcaaactctagtaatggtg

SEQ ID NO: 5949062 - DNA, 25 bp, Homo sapien
gaagagcgtgagcatttggattttg

SEQ ID NO: 5949063 - DNA, 25 bp, Homo sapien
cacccgcaaaacctccacaagaacg

SEQ ID NO: 5949064 - DNA, 25 bp, Homo sapien
tggtgttgctcaaagtcgagaaggg

SEQ ID NO: 5949065 - DNA, 25 bp, Homo sapien
ggagagttgtcagaagaaacgaaga

SEQ ID NO: 5949066 - DNA, 25 bp, Homo sapien
tagctctacagcagggaatacaacc

SEQ ID NO: 5949067 - DNA, 25 bp, Homo sapien
atattgacctgagtttaccacaaaa

SEQ ID NO: 5949068 - DNA, 25 bp, Homo sapien
cctctcaaaccgctgcatccgctac

SEQ ID NO: 5949069 - DNA, 25 bp, Homo sapien
tggtgccaattttcaaaaggagaag

SEQ ID NO: 5949070 - DNA, 25 bp, Homo sapien
ggcaatccggagagttgtcagaaga

SEQ ID NO: 5949071 - DNA, 25 bp, Homo sapien
gtgtgcatatatcttttgtaagatc

SEQ ID NO: 5949072 - DNA, 25 bp, Homo sapien
cagattggaaagtggacccagatac

SEQ ID NO: 5949073 - DNA, 25 bp, Homo sapien
gctgagctgggcaagaagaaccaat

SEQ ID NO: 5949074 - DNA, 25 bp, Homo sapien
atgtcagattggaaagtggacccag

SEQ ID NO: 5949075 - DNA, 25 bp, Homo sapien
cgataagaagaatgaacaggacgag

SEQ ID NO: 5949076 - DNA, 25 bp, Homo sapien
aacattgagcagaggatggggcctc

SEQ ID NO: 5949077 - DNA, 25 bp, Homo sapien
tctccagcgctgtaaccaaatcgtt

SEQ ID NO: 5949078 - DNA, 25 bp, Homo sapien
ttgtcagaagaaacgaagagagcag

SEQ ID NO: 5949079 - DNA, 25 bp, Homo sapien
aaggtggtaaatatcagggctttgg

SEQ ID NO: 5949080 - DNA, 25 bp, Homo sapien
gggctttggaagtacacccgcaaaa

SEQ ID NO: 5949081 - DNA, 25 bp, Homo sapien
gaacgaagcttattttgctgagctg

SEQ ID NO: 5949082 - DNA, 25 bp, Homo sapien
ttcaagctgatcctttgggaacatt

SEQ ID NO: 5949083 - DNA, 25 bp, Homo sapien
tcgatctgcaacaccagcaaactct

SEQ ID NO: 5949084 - DNA, 25 bp, Homo sapien
cgtgagcatttggattttgatgctt

SEQ ID NO: 5949085 - DNA, 25 bp, Homo sapien
caatggcaatccggagagttgtcag

SEQ ID NO: 5949086 - DNA, 25 bp, Homo sapien
tggttcaagtcgcataatattgacc

SEQ ID NO: 5949087 - DNA, 25 bp, Homo sapien
aaatttcaatggtaatgcagaggat

SEQ ID NO: 5949088 - DNA, 25 bp, Homo sapien
gagcctggaaaattttcaagctgat

SEQ ID NO: 5949089 - DNA, 25 bp, Homo sapien
atccacaatgggccacgcctaagtt

SEQ ID NO: 5949090 - DNA, 25 bp, Homo sapien
ctaagtttggagctttcatttgcct

SEQ ID NO: 5949091 - DNA, 25 bp, Homo sapien
ggttattaagcctcacgtccagcaa

SEQ ID NO: 5949092 - DNA, 25 bp, Homo sapien
taatgcagaggatagctctacagca

SEQ ID NO: 5949093 - DNA, 25 bp, Homo sapien
ccgctacgcctggtgttgctcaaag

SEQ ID NO: 5949094 - DNA, 25 bp, Homo sapien
cgcagaggattataaagaaaagtta

SEQ ID NO: 5949095 - DNA, 25 bp, Homo sapien
gtcgagaagggacaccactggagaa

SEQ ID NO: 5949096 - DNA, 25 bp, Homo sapien
tcacgtccagcaatggcaatccgga

SEQ ID NO: 5949097 - DNA, 25 bp, Homo sapien
acgtccagcaatggcaatccggaga

SEQ ID NO: 5949098 - DNA, 25 bp, Homo sapien
gtccagcaatggcaatccggagagt

SEQ ID NO: 5949099 - DNA, 25 bp, Homo sapien
ttttgcaattgcaaaagattggtgc

SEQ ID NO: 5949100 - DNA, 25 bp, Homo sapien
agcatttagtaacttcactaaaaat

SEQ ID NO: 5949101 - DNA, 25 bp, Homo sapien
ctaaaaatttcaatggtaatgcaga

SEQ ID NO: 5949102 - DNA, 25 bp, Homo sapien
gtgcaaataagaaatgtatggattg

SEQ ID NO: 5949103 - DNA, 25 bp, Homo sapien
agagggcttggtgtgcatatatctt

SEQ ID NO: 5949104 - DNA, 25 bp, Homo sapien
atatcagggctttggaagtacaccc

SEQ ID NO: 5949105 - DNA, 25 bp, Homo sapien
cagcgctgtaaccaaatcgttcgag

SEQ ID NO: 5949106 - DNA, 25 bp, Homo sapien
acgagtagttatggattccaagcat

SEQ ID NO: 5949107 - DNA, 25 bp, Homo sapien
tacgcctggtgttgctcaaagtcga

SEQ ID NO: 5949108 - DNA, 25 bp, Homo sapien
catttgccttgaatgtgccggtatc

SEQ ID NO: 5949109 - DNA, 25 bp, Homo sapien
caagctgatcctttgggaacattga

SEQ ID NO: 5949110 - DNA, 25 bp, Homo sapien
agcagctgcccagtttggccaaaag

SEQ ID NO: 5949111 - DNA, 25 bp, Homo sapien
agaaacgagtagttatggattccaa

SEQ ID NO: 5949112 - DNA, 25 bp, Homo sapien
cgagaagggacaccactggagaacc

SEQ ID NO: 5949113 - DNA, 25 bp, Homo sapien
cttttgtaagatctatcactatgga

SEQ ID NO: 5949114 - DNA, 25 bp, Homo sapien
aaccaatctagaccagatcatttgc

SEQ ID NO: 5949115 - DNA, 25 bp, Homo sapien
gtgccggtatccatagagggcttgg

SEQ ID NO: 5949116 - DNA, 25 bp, Homo sapien
gctgtaaccaaatcgttcgaggacg

SEQ ID NO: 5949117 - DNA, 25 bp, Homo sapien
aaaccgctgcatccgctacgcctgg

SEQ ID NO: 5949118 - DNA, 25 bp, Homo sapien
gaccagatcatttgcccccttctca

SEQ ID NO: 5949119 - DNA, 25 bp, Homo sapien
cgccaaatccacaatgggccacgcc

SEQ ID NO: 5949120 - DNA, 25 bp, Homo sapien
gggcctcttctccagcgctgtaacc

SEQ ID NO: 5949121 - DNA, 25 bp, Homo sapien
agaagaacgaagcttattttgctga

SEQ ID NO: 5949122 - DNA, 25 bp, Homo sapien
atcatttgcccccttctcaaggtgg

SEQ ID NO: 5949123 - DNA, 25 bp, Homo sapien
taaagaaaagttaacatgtctttgc

SEQ ID NO: 5949124 - DNA, 25 bp, Homo sapien
caagttatcagcaacctctcaaacc

SEQ ID NO: 5949125 - DNA, 25 bp, Homo sapien
atggtaatgcagaggatagctctac

SEQ ID NO: 5949126 - DNA, 25 bp, Homo sapien
aagtttcaagaaacgagtagttatg

SEQ ID NO: 5949127 - DNA, 25 bp, Homo sapien
aaagttaacatgtctttgcgaagat

SEQ ID NO: 5949128 - DNA, 25 bp, Homo sapien
agctgggcaagaagaaccaatctag

SEQ ID NO: 5949129 - DNA, 25 bp, Homo sapien
gtgttgctcaaagtcgagaagggac

SEQ ID NO: 5949130 - DNA, 25 bp, Homo sapien
tgccttgaatgtgccggtatccata

SEQ ID NO: 5949131 - DNA, 25 bp, Homo sapien
aaaattttcaagctgatcctttggg

SEQ ID NO: 5949132 - DNA, 25 bp, Homo sapien
gagtatttgaagagcgtgagcattt

SEQ ID NO: 5949133 - DNA, 25 bp, Homo sapien
aagaagaatgaacaggacgaggaca

SEQ ID NO: 5949134 - DNA, 25 bp, Homo sapien
actgaatggttcaagtcgcataata

SEQ ID NO: 5949135 - DNA, 25 bp, Homo sapien
agttatcagcaacctctcaaaccgc

SEQ ID NO: 5949136 - DNA, 25 bp, Homo sapien
ccaaatcgttcgaggacgtaaacga

SEQ ID NO: 5949137 - DNA, 25 bp, Homo sapien
tttgactgaatggttcaagtcgcat

SEQ ID NO: 5949138 - DNA, 25 bp, Homo sapien
ctttgagcctggaaaattttcaagc

SEQ ID NO: 5949139 - DNA, 25 bp, Homo sapien
atttcaatggtaatgcagaggatag

SEQ ID NO: 5949140 - DNA, 25 bp, Homo sapien
ttgagcctggaaaattttcaagctg

SEQ ID NO: 5949141 - DNA, 25 bp, Homo sapien
gaagcttattttgctgagctgggca

SEQ ID NO: 5949142 - DNA, 25 bp, Homo sapien
gagtagttatggattccaagcattt

SEQ ID NO: 5949143 - DNA, 25 bp, Homo sapien
tgcttccaagttatcagcaacctct

SEQ ID NO: 5949144 - DNA, 25 bp, Homo sapien
ggaaaattttcaagctgatcctttg

SEQ ID NO: 5949145 - DNA, 25 bp, Homo sapien
agttaacatgtctttgcgaagatag

SEQ ID NO: 5949146 - DNA, 25 bp, Homo sapien
tagagtatttgaagagcgtgagcat

SEQ ID NO: 5949147 - DNA, 25 bp, Homo sapien
gcaattgcaaaagattggtgcaaat

SEQ ID NO: 5949148 - DNA, 25 bp, Homo sapien
gcagggtccagcaatactttgagcc

SEQ ID NO: 5949149 - DNA, 25 bp, Homo sapien
agcctcacgtccagcaatggcaatc

SEQ ID NO: 5949150 - DNA, 25 bp, Homo sapien
aaatatcagggctttggaagtacac

SEQ ID NO: 5949151 - DNA, 25 bp, Homo sapien
tggtgcaaataagaaatgtatggat

SEQ ID NO: 5949152 - DNA, 25 bp, Homo sapien
ccagatcatttgcccccttctcaag

SEQ ID NO: 5949153 - DNA, 25 bp, Homo sapien
atcactatggatcagtttaaaccgg

SEQ ID NO: 5949154 - DNA, 25 bp, Homo sapien
ctgcagggtccagcaatactttgag

SEQ ID NO: 5949155 - DNA, 25 bp, Homo sapien
ttcactaaaaatttcaatggtaatg

SEQ ID NO: 5949156 - DNA, 25 bp, Homo sapien
tggattgtggtgcgccaaatccaca

SEQ ID NO: 5949157 - DNA, 25 bp, Homo sapien
cggtatccatagagggcttggtgtg

SEQ ID NO: 5949158 - DNA, 25 bp, Homo sapien
agggaatacaacccatacagaatat

SEQ ID NO: 5949159 - DNA, 25 bp, Homo sapien
gtttggagctttcatttgccttgaa

SEQ ID NO: 5949160 - DNA, 25 bp, Homo sapien
aacggtctgcagggtccagcaatac

SEQ ID NO: 5949161 - DNA, 25 bp, Homo sapien
gtgcatatatcttttgtaagatcta

SEQ ID NO: 5949162 - DNA, 25 bp, Homo sapien
ttcaatggtaatgcagaggatagct

SEQ ID NO: 5949163 - DNA, 25 bp, Homo sapien
cgcaggcgtcttttgcaattgcaaa

SEQ ID NO: 5949164 - DNA, 25 bp, Homo sapien
gggcaagaagaaccaatctagacca

SEQ ID NO: 5949165 - DNA, 25 bp, Homo sapien
tgagcatttggattttgatgcttcc

SEQ ID NO: 5949166 - DNA, 25 bp, Homo sapien
gccggtatccatagagggcttggtg

SEQ ID NO: 5949167 - DNA, 25 bp, Homo sapien
acctgagtttaccacaaaaagtgaa

SEQ ID NO: 5949168 - DNA, 25 bp, Homo sapien
cagatacccgcaggcgtcttttgca

SEQ ID NO: 5949169 - DNA, 25 bp, Homo sapien
gccaaaagtttcaagaaacgagtag

SEQ ID NO: 5949170 - DNA, 25 bp, Homo sapien
acgaggacaaatgggacgatttcta

SEQ ID NO: 5949171 - DNA, 25 bp, Homo sapien
actctagtaatggtgccaattttca

SEQ ID NO: 5949172 - DNA, 25 bp, Homo sapien
aaaaatttcaatggtaatgcagagg

SEQ ID NO: 5949173 - DNA, 25 bp, Homo sapien
gtgccaattttcaaaaggagaagaa

SEQ ID NO: 5949174 - DNA, 25 bp, Homo sapien
taaacgaaacggttattaagcctca

SEQ ID NO: 5949175 - DNA, 25 bp, Homo sapien
taatattgacctgagtttaccacaa

SEQ ID NO: 5949176 - DNA, 25 bp, Homo sapien
ttggaaagtggacccagatacccgc

SEQ ID NO: 5949177 - DNA, 25 bp, Homo sapien
ataagaaatgtatggattgtggtgc

SEQ ID NO: 5949178 - DNA, 25 bp, Homo sapien
tggtaaatatcagggctttggaagt

SEQ ID NO: 5949179 - DNA, 25 bp, Homo sapien
taagatctatcactatggatcagtt

SEQ ID NO: 5949180 - DNA, 25 bp, Homo sapien
taagcctcacgtccagcaatggcaa

SEQ ID NO: 5949181 - DNA, 25 bp, Homo sapien
aaatccacaatgggccacgcctaag

SEQ ID NO: 5949182 - DNA, 25 bp, Homo sapien
cacaagaacggtctgcagggtccag

SEQ ID NO: 5949183 - DNA, 25 bp, Homo sapien
aagtcgagaagggacaccactggag

SEQ ID NO: 5949184 - DNA, 25 bp, Homo sapien
aaataagaaatgtatggattgtggt

SEQ ID NO: 5949185 - DNA, 25 bp, Homo sapien
cagtttggccaaaagtttcaagaaa

SEQ ID NO: 5949186 - DNA, 25 bp, Homo sapien
ttgtggtgcgccaaatccacaatgg

SEQ ID NO: 5949187 - DNA, 25 bp, Homo sapien
ggtggtaaatatcagggctttggaa

SEQ ID NO: 5949188 - DNA, 25 bp, Homo sapien
catttggattttgatgcttccaagt

SEQ ID NO: 5949189 - DNA, 25 bp, Homo sapien
gagcagaggatggggcctcttctcc

SEQ ID NO: 5949190 - DNA, 25 bp, Homo sapien
aacctctcaaaccgctgcatccgct

SEQ ID NO: 5949191 - DNA, 25 bp, Homo sapien
ttgaagagcgtgagcatttggattt

SEQ ID NO: 5949192 - DNA, 25 bp, Homo sapien
cagcaaactctagtaatggtgccaa

SEQ ID NO: 5949193 - DNA, 25 bp, Homo sapien
agatctatcactatggatcagttta

SEQ ID NO: 5949194 - DNA, 25 bp, Homo sapien
tggagaaccgtcgatctgcaacacc

SEQ ID NO: 5949195 - DNA, 25 bp, Homo sapien
gattttgatgcttccaagttatcag

SEQ ID NO: 5949196 - DNA, 25 bp, Homo sapien
gcaaaagattggtgcaaataagaaa

SEQ ID NO: 5949197 - DNA, 25 bp, Homo sapien
tccagcaatactttgagcctggaaa

SEQ ID NO: 5949198 - DNA, 25 bp, Homo sapien
gccaattttcaaaaggagaagaacg

SEQ ID NO: 5949199 - DNA, 25 bp, Homo sapien
tccaagttatcagcaacctctcaaa

SEQ ID NO: 5949200 - DNA, 25 bp, Homo sapien
agcgtgagcatttggattttgatgc

SEQ ID NO: 5949201 - DNA, 25 bp, Homo sapien
agaggatagctctacagcagggaat

SEQ ID NO: 5949202 - DNA, 25 bp, Homo sapien
agtggacccagatacccgcaggcgt

SEQ ID NO: 5949203 - DNA, 25 bp, Homo sapien
ggagaagaacgaagcttattttgct

SEQ ID NO: 5949204 - DNA, 25 bp, Homo sapien
tacacccgcaaaacctccacaagaa

SEQ ID NO: 5949205 - DNA, 25 bp, Homo sapien
tctttgcgaagatagagtatttgaa

SEQ ID NO: 5949206 - DNA, 25 bp, Homo sapien
aatgtatggattgtggtgcgccaaa

SEQ ID NO: 5949207 - DNA, 25 bp, Homo sapien
agaggatggggcctcttctccagcg

SEQ ID NO: 5949208 - DNA, 25 bp, Homo sapien
gttgctcaaagtcgagaagggacac

SEQ ID NO: 5949209 - DNA, 25 bp, Homo sapien
ctcaaagtcgagaagggacaccact

SEQ ID NO: 5949210 - DNA, 25 bp, Homo sapien
ttgagcagaggatggggcctcttct

SEQ ID NO: 5949211 - DNA, 25 bp, Homo sapien
gtagttatggattccaagcatttag

SEQ ID NO: 5949212 - DNA, 25 bp, Homo sapien
gatgcttccaagttatcagcaacct

SEQ ID NO: 5949213 - DNA, 25 bp, Homo sapien
cactatggatcagtttaaaccggag

SEQ ID NO: 5949214 - DNA, 25 bp, Homo sapien
ttttgatgcttccaagttatcagca

SEQ ID NO: 5949215 - DNA, 25 bp, Homo sapien
agattggtgcaaataagaaatgtat

SEQ ID NO: 5949216 - DNA, 25 bp, Homo sapien
aaacgagtagttatggattccaagc

SEQ ID NO: 5949217 - DNA, 25 bp, Homo sapien
agaacggtctgcagggtccagcaat

SEQ ID NO: 5949218 - DNA, 25 bp, Homo sapien
cccgcaggcgtcttttgcaattgca

SEQ ID NO: 5949219 - DNA, 25 bp, Homo sapien
gcgctgtaaccaaatcgttcgagga

SEQ ID NO: 5949220 - DNA, 25 bp, Homo sapien
gattggaaagtggacccagataccc

SEQ ID NO: 5949221 - DNA, 25 bp, Homo sapien
tcaaaccgctgcatccgctacgcct

SEQ ID NO: 5949222 - DNA, 25 bp, Homo sapien
tctcaaggtggtaaatatcagggct

SEQ ID NO: 5949223 - DNA, 25 bp, Homo sapien
aacctccacaagaacggtctgcagg

SEQ ID NO: 5949224 - DNA, 25 bp, Homo sapien
tgcgccaaatccacaatgggccacg

SEQ ID NO: 5949225 - DNA, 25 bp, Homo sapien
gcaaactctagtaatggtgccaatt

SEQ ID NO: 5949226 - DNA, 25 bp, Homo sapien
aggatggggcctcttctccagcgct

SEQ ID NO: 5949227 - DNA, 25 bp, Homo sapien
aagaagaaccaatctagaccagatc

SEQ ID NO: 5949228 - DNA, 25 bp, Homo sapien
tctagtaatggtgccaattttcaaa

SEQ ID NO: 5949229 - DNA, 25 bp, Homo sapien
tgcgaagatagagtatttgaagagc

SEQ ID NO: 5949230 - DNA, 25 bp, Homo sapien
ctggaaaattttcaagctgatcctt

SEQ ID NO: 5949231 - DNA, 25 bp, Homo sapien
tcaaaaggagaagaacgaagcttat

SEQ ID NO: 5949232 - DNA, 25 bp, Homo sapien
ttttcaagctgatcctttgggaaca

SEQ ID NO: 5949233 - DNA, 25 bp, Homo sapien
caagaaacgagtagttatggattcc

SEQ ID NO: 5949234 - DNA, 25 bp, Homo sapien
cccttctcaaggtggtaaatatcag

SEQ ID NO: 5949235 - DNA, 25 bp, Homo sapien
cggtctgcagggtccagcaatactt

SEQ ID NO: 5949236 - DNA, 25 bp, Homo sapien
gaagtacacccgcaaaacctccaca

SEQ ID NO: 5949237 - DNA, 25 bp, Homo sapien
ttgcaattgcaaaagattggtgcaa

SEQ ID NO: 5949238 - DNA, 25 bp, Homo sapien
aaccccgtcgcagaggattataaag

SEQ ID NO: 5949239 - DNA, 25 bp, Homo sapien
gcctcttctccagcgctgtaaccaa

SEQ ID NO: 5949240 - DNA, 25 bp, Homo sapien
acccatacagaatatcaaaagattg

SEQ ID NO: 5949241 - DNA, 25 bp, Homo sapien
tacgataaccccgtcgcagaggatt

SEQ ID NO: 5949242 - DNA, 25 bp, Homo sapien
agggcttggtgtgcatatatctttt

SEQ ID NO: 5949243 - DNA, 25 bp, Homo sapien
ctatggatcagtttaaaccggagga

SEQ ID NO: 5949244 - DNA, 25 bp, Homo sapien
agcttattttgctgagctgggcaag

SEQ ID NO: 5949245 - DNA, 25 bp, Homo sapien
caaagtcgagaagggacaccactgg

SEQ ID NO: 5949246 - DNA, 25 bp, Homo sapien
atttgaagagcgtgagcatttggat

SEQ ID NO: 5949247 - DNA, 25 bp, Homo sapien
cagggctttggaagtacacccgcaa

SEQ ID NO: 5949248 - DNA, 25 bp, Homo sapien
tgggccacgcctaagtttggagctt

SEQ ID NO: 5949249 - DNA, 25 bp, Homo sapien
atctatcactatggatcagtttaaa

SEQ ID NO: 5949250 - DNA, 25 bp, Homo sapien
tgcaacaccagcaaactctagtaat

SEQ ID NO: 5949251 - DNA, 25 bp, Homo sapien
tggacccagatacccgcaggcgtct

SEQ ID NO: 5949252 - DNA, 25 bp, Homo sapien
aaacggttattaagcctcacgtcca

SEQ ID NO: 5949253 - DNA, 25 bp, Homo sapien
gacccagatacccgcaggcgtcttt

SEQ ID NO: 5949254 - DNA, 25 bp, Homo sapien
cgctgcatccgctacgcctggtgtt

SEQ ID NO: 5949255 - DNA, 25 bp, Homo sapien
ccgtcgcagaggattataaagaaaa

SEQ ID NO: 5949256 - DNA, 25 bp, Homo sapien
atcagggctttggaagtacacccgc

SEQ ID NO: 5949257 - DNA, 25 bp, Homo sapien
tgcccagtttggccaaaagtttcaa

SEQ ID NO: 5949258 - DNA, 25 bp, Homo sapien
tttgtaagatctatcactatggatc

SEQ ID NO: 5949259 - DNA, 25 bp, Homo sapien
ccactggagaaccgtcgatctgcaa

SEQ ID NO: 5949260 - DNA, 25 bp, Homo sapien
ggtgcgccaaatccacaatgggcca

SEQ ID NO: 5949261 - DNA, 25 bp, Homo sapien
gaagaaccaatctagaccagatcat

SEQ ID NO: 5949262 - DNA, 25 bp, Homo sapien
aacgaacctttgactgaatggttca

SEQ ID NO: 5949263 - DNA, 25 bp, Homo sapien
tttggattttgatgcttccaagtta

SEQ ID NO: 5949264 - DNA, 25 bp, Homo sapien
tagaccagatcatttgcccccttct

SEQ ID NO: 5949265 - DNA, 25 bp, Homo sapien
catgtctttgcgaagatagagtatt

SEQ ID NO: 5949266 - DNA, 25 bp, Homo sapien
cttattttgctgagctgggcaagaa

SEQ ID NO: 5949267 - DNA, 25 bp, Homo sapien
ggaggaacttcttcgtatggaaaaa

SEQ ID NO: 5949268 - DNA, 25 bp, Homo sapien
aagggacaccactggagaaccgtcg

SEQ ID NO: 5949269 - DNA, 25 bp, Homo sapien
gaaaagttaacatgtctttgcgaag

SEQ ID NO: 5949270 - DNA, 25 bp, Homo sapien
cagcagggaatacaacccatacaga

SEQ ID NO: 5949271 - DNA, 25 bp, Homo sapien
gaagagagcagctgcccagtttggc

SEQ ID NO: 5949272 - DNA, 25 bp, Homo sapien
aacctttgactgaatggttcaagtc

SEQ ID NO: 5949273 - DNA, 25 bp, Homo sapien
tttcaaaaggagaagaacgaagctt

SEQ ID NO: 5949274 - DNA, 25 bp, Homo sapien
aaccggaggaacttcttcgtatgga

SEQ ID NO: 5949275 - DNA, 25 bp, Homo sapien
tggtgtgcatatatcttttgtaaga

SEQ ID NO: 5949276 - DNA, 25 bp, Homo sapien
tgctcaaagtcgagaagggacacca

SEQ ID NO: 5949277 - DNA, 25 bp, Homo sapien
atcagcaacctctcaaaccgctgca

SEQ ID NO: 5949278 - DNA, 25 bp, Homo sapien
agttgtcagaagaaacgaagagagc

SEQ ID NO: 5949279 - DNA, 25 bp, Homo sapien
accagcaaactctagtaatggtgcc

SEQ ID NO: 5949280 - DNA, 25 bp, Homo sapien
ggtaatgcagaggatagctctacag

SEQ ID NO: 5949281 - DNA, 25 bp, Homo sapien
gcagggaatacaacccatacagaat

SEQ ID NO: 5949282 - DNA, 25 bp, Homo sapien
gtggtgcgccaaatccacaatgggc

SEQ ID NO: 5949283 - DNA, 25 bp, Homo sapien
ttatggattccaagcatttagtaac

SEQ ID NO: 5949284 - DNA, 25 bp, Homo sapien
acaatgggccacgcctaagtttgga

SEQ ID NO: 5949285 - DNA, 25 bp, Homo sapien
cctcacgtccagcaatggcaatccg

SEQ ID NO: 5949286 - DNA, 25 bp, Homo sapien
gtatccatagagggcttggtgtgca

SEQ ID NO: 5949287 - DNA, 25 bp, Homo sapien
gattgtggtgcgccaaatccacaat

SEQ ID NO: 5949288 - DNA, 25 bp, Homo sapien
agaaacgaagagagcagctgcccag

SEQ ID NO: 5949289 - DNA, 25 bp, Homo sapien
cactaaaaatttcaatggtaatgca

SEQ ID NO: 5949290 - DNA, 25 bp, Homo sapien
gcaaaacctccacaagaacggtctg

SEQ ID NO: 5949291 - DNA, 25 bp, Homo sapien
gcctaagtttggagctttcatttgc

SEQ ID NO: 5949292 - DNA, 25 bp, Homo sapien
aagtgaaatacgataaccccgtcgc

SEQ ID NO: 5949293 - DNA, 25 bp, Homo sapien
ggcgtcttttgcaattgcaaaagat

SEQ ID NO: 5949294 - DNA, 25 bp, Homo sapien
gatagagtatttgaagagcgtgagc

SEQ ID NO: 5949295 - DNA, 25 bp, Homo sapien
gagtttaccacaaaaagtgaaatac

SEQ ID NO: 5949296 - DNA, 25 bp, Homo sapien
gatcagtttaaaccggaggaacttc

SEQ ID NO: 5949297 - DNA, 25 bp, Homo sapien
ccttgaatgtgccggtatccataga

SEQ ID NO: 5949298 - DNA, 25 bp, Homo sapien
taaaccggaggaacttcttcgtatg

SEQ ID NO: 5949299 - DNA, 25 bp, Homo sapien
gctttggaagtacacccgcaaaacc

SEQ ID NO: 5949300 - DNA, 25 bp, Homo sapien
atccggagagttgtcagaagaaacg

SEQ ID NO: 5949301 - DNA, 25 bp, Homo sapien
ttatcagcaacctctcaaaccgctg

SEQ ID NO: 5949302 - DNA, 25 bp, Homo sapien
tacaacccatacagaatatcaaaag

SEQ ID NO: 5949303 - DNA, 25 bp, Homo sapien
agagttgtcagaagaaacgaagaga

SEQ ID NO: 5949304 - DNA, 25 bp, Homo sapien
ccatagagggcttggtgtgcatata

SEQ ID NO: 5949305 - DNA, 25 bp, Homo sapien
cagaagaaacgaagagagcagctgc

SEQ ID NO: 5949306 - DNA, 25 bp, Homo sapien
ctgatcctttgggaacattgagcag

SEQ ID NO: 5949307 - DNA, 25 bp, Homo sapien
gtcagattggaaagtggacccagat

SEQ ID NO: 5949308 - DNA, 25 bp, Homo sapien
aaacgaagagagcagctgcccagtt

SEQ ID NO: 5949309 - DNA, 25 bp, Homo sapien
tacagcagggaatacaacccataca

SEQ ID NO: 5949310 - DNA, 25 bp, Homo sapien
aattttcaagctgatcctttgggaa

SEQ ID NO: 5949311 - DNA, 25 bp, Homo sapien
cccagtttggccaaaagtttcaaga

SEQ ID NO: 5949312 - DNA, 25 bp, Homo sapien
cgaacctttgactgaatggttcaag

SEQ ID NO: 5949313 - DNA, 25 bp, Homo sapien
gtatttgaagagcgtgagcatttgg

SEQ ID NO: 5949314 - DNA, 25 bp, Homo sapien
gtcagaagaaacgaagagagcagct

SEQ ID NO: 5949315 - DNA, 25 bp, Homo sapien
ccaatctagaccagatcatttgccc

SEQ ID NO: 5949316 - DNA, 25 bp, Homo sapien
attgacctgagtttaccacaaaaag

SEQ ID NO: 5949317 - DNA, 25 bp, Homo sapien
caatggtaatgcagaggatagctct

SEQ ID NO: 5949318 - DNA, 25 bp, Homo sapien
gtaatggtgccaattttcaaaagga

SEQ ID NO: 5949319 - DNA, 25 bp, Homo sapien
tccagcgctgtaaccaaatcgttcg

SEQ ID NO: 5949320 - DNA, 25 bp, Homo sapien
tgaacaggacgaggacaaatgggac

SEQ ID NO: 5949321 - DNA, 25 bp, Homo sapien
ttaccacaaaaagtgaaatacgata

SEQ ID NO: 5949322 - DNA, 25 bp, Homo sapien
aatacaacccatacagaatatcaaa

SEQ ID NO: 5949323 - DNA, 25 bp, Homo sapien
gtttcaagaaacgagtagttatgga

SEQ ID NO: 5949324 - DNA, 25 bp, Homo sapien
ttattaagcctcacgtccagcaatg

SEQ ID NO: 5949325 - DNA, 25 bp, Homo sapien
tgtaagatctatcactatggatcag

SEQ ID NO: 5949326 - DNA, 25 bp, Homo sapien
taataacgataagaagaatgaacag

SEQ ID NO: 5949327 - DNA, 25 bp, Homo sapien
cccccttctcaaggtggtaaatatc

SEQ ID NO: 5949328 - DNA, 25 bp, Homo sapien
ataacgataagaagaatgaacagga

SEQ ID NO: 5949329 - DNA, 25 bp, Homo sapien
tccacaagaacggtctgcagggtcc

SEQ ID NO: 5949330 - DNA, 25 bp, Homo sapien
caacccatacagaatatcaaaagat

SEQ ID NO: 5949331 - DNA, 25 bp, Homo sapien
agaaccaatctagaccagatcattt

SEQ ID NO: 5949332 - DNA, 25 bp, Homo sapien
gtcgcataatattgacctgagttta

SEQ ID NO: 5949333 - DNA, 25 bp, Homo sapien
ccggagagttgtcagaagaaacgaa

SEQ ID NO: 5949334 - DNA, 25 bp, Homo sapien
tctgcaacaccagcaaactctagta

SEQ ID NO: 5949335 - DNA, 25 bp, Homo sapien
gatagctctacagcagggaatacaa

SEQ ID NO: 5949336 - DNA, 25 bp, Homo sapien
aagaacgaagcttattttgctgagc

SEQ ID NO: 5949337 - DNA, 25 bp, Homo sapien
aaagattggtgcaaataagaaatgt

SEQ ID NO: 5949338 - DNA, 25 bp, Homo sapien
caccactggagaaccgtcgatctgc

SEQ ID NO: 5949339 - DNA, 25 bp, Homo sapien
aaaacctccacaagaacggtctgca

SEQ ID NO: 5949340 - DNA, 25 bp, Homo sapien
aaggagaagaacgaagcttattttg

SEQ ID NO: 5949341 - DNA, 25 bp, Homo sapien
ctgcatccgctacgcctggtgttgc

SEQ ID NO: 5949342 - DNA, 25 bp, Homo sapien
tgactgaatggttcaagtcgcataa

SEQ ID NO: 5949343 - DNA, 25 bp, Homo sapien
ggagctttcatttgccttgaatgtg

SEQ ID NO: 5949344 - DNA, 25 bp, Homo sapien
gaagaaacgaagagagcagctgccc

SEQ ID NO: 5949345 - DNA, 25 bp, Homo sapien
gcaaataagaaatgtatggattgtg

SEQ ID NO: 5949346 - DNA, 25 bp, Homo sapien
cgataaccccgtcgcagaggattat

SEQ ID NO: 5949347 - DNA, 25 bp, Homo sapien
agagcgtgagcatttggattttgat

SEQ ID NO: 5949348 - DNA, 25 bp, Homo sapien
caggacgaggacaaatgggacgatt

SEQ ID NO: 5949349 - DNA, 25 bp, Homo sapien
taacttcactaaaaatttcaatggt

SEQ ID NO: 5949350 - DNA, 25 bp, Homo sapien
atggattccaagcatttagtaactt

SEQ ID NO: 5949351 - DNA, 25 bp, Homo sapien
cgtcgatctgcaacaccagcaaact

SEQ ID NO: 5949352 - DNA, 25 bp, Homo sapien
tttgcgaagatagagtatttgaaga

SEQ ID NO: 5949353 - DNA, 25 bp, Homo sapien
ttcgtatggaaaaaggtggtaacga

SEQ ID NO: 5949354 - DNA, 25 bp, Homo sapien
gtctgcagggtccagcaatactttg

SEQ ID NO: 5949355 - DNA, 25 bp, Homo sapien
gcaacctctcaaaccgctgcatccg

SEQ ID NO: 5949356 - DNA, 25 bp, Homo sapien
tggccaaaagtttcaagaaacgagt

SEQ ID NO: 5949357 - DNA, 25 bp, Homo sapien
actggagaaccgtcgatctgcaaca

SEQ ID NO: 5949358 - DNA, 25 bp, Homo sapien
gaacttcttcgtatggaaaaaggtg

SEQ ID NO: 5949359 - DNA, 25 bp, Homo sapien
atgcagaggatagctctacagcagg

SEQ ID NO: 5949360 - DNA, 25 bp, Homo sapien
aaggtggtaacgaacctttgactga

SEQ ID NO: 5949361 - DNA, 25 bp, Homo sapien
tcaatgttcccaaaggatcagcttg

SEQ ID NO: 5949362 - DNA, 25 bp, Homo sapien
acatttcttatttgcaccaatcttt

SEQ ID NO: 5949363 - DNA, 25 bp, Homo sapien
caattgcaaaagacgcctgcgggta

SEQ ID NO: 5949364 - DNA, 25 bp, Homo sapien
tgaaaattggcaccattactagagt

SEQ ID NO: 5949365 - DNA, 25 bp, Homo sapien
ctgcgacggggttatcgtatttcac

SEQ ID NO: 5949366 - DNA, 25 bp, Homo sapien
cccatcctctgctcaatgttcccaa

SEQ ID NO: 5949367 - DNA, 25 bp, Homo sapien
ctagattggttcttcttgcccagct

SEQ ID NO: 5949368 - DNA, 25 bp, Homo sapien
aacaccaggcgtagcggatgcagcg

SEQ ID NO: 5949369 - DNA, 25 bp, Homo sapien
gttcttcttgcccagctcagcaaaa

SEQ ID NO: 5949370 - DNA, 25 bp, Homo sapien
cttgaaccattcagtcaaaggttcg

SEQ ID NO: 5949371 - DNA, 25 bp, Homo sapien
atgcttggaatccataactactcgt

SEQ ID NO: 5949372 - DNA, 25 bp, Homo sapien
ttgcgggtgtacttccaaagccctg

SEQ ID NO: 5949373 - DNA, 25 bp, Homo sapien
atgatctggtctagattggttcttc

SEQ ID NO: 5949374 - DNA, 25 bp, Homo sapien
tcttacaaaagatatatgcacacca

SEQ ID NO: 5949375 - DNA, 25 bp, Homo sapien
cacattcaaggcaaatgaaagctcc

SEQ ID NO: 5949376 - DNA, 25 bp, Homo sapien
atttcactttttgtggtaaactcag

SEQ ID NO: 5949377 - DNA, 25 bp, Homo sapien
tgcccagctcagcaaaataagcttc

SEQ ID NO: 5949378 - DNA, 25 bp, Homo sapien
ataatcctctgcgacggggttatcg

SEQ ID NO: 5949379 - DNA, 25 bp, Homo sapien
gataacttggaagcatcaaaatcca

SEQ ID NO: 5949380 - DNA, 25 bp, Homo sapien
gcaccacaatccatacatttcttat

SEQ ID NO: 5949381 - DNA, 25 bp, Homo sapien
ttgccattgctggacgtgaggctta

SEQ ID NO: 5949382 - DNA, 25 bp, Homo sapien
tggtgtcccttctcgactttgagca

SEQ ID NO: 5949383 - DNA, 25 bp, Homo sapien
cttttgatattctgtatgggttgta

SEQ ID NO: 5949384 - DNA, 25 bp, Homo sapien
gctccaaacttaggcgtggcccatt

SEQ ID NO: 5949385 - DNA, 25 bp, Homo sapien
aagggggcaaatgatctggtctaga

SEQ ID NO: 5949386 - DNA, 25 bp, Homo sapien
ctcgaacgatttggttacagcgctg

SEQ ID NO: 5949387 - DNA, 25 bp, Homo sapien
agctgctctcttcgtttcttctgac

SEQ ID NO: 5949388 - DNA, 25 bp, Homo sapien
caaggcaaatgaaagctccaaactt

SEQ ID NO: 5949389 - DNA, 25 bp, Homo sapien
gaggccccatcctctgctcaatgtt

SEQ ID NO: 5949390 - DNA, 25 bp, Homo sapien
caaatactctatcttcgcaaagaca

SEQ ID NO: 5949391 - DNA, 25 bp, Homo sapien
ctgatatttaccaccttgagaaggg

SEQ ID NO: 5949392 - DNA, 25 bp, Homo sapien
atacatttcttatttgcaccaatct

SEQ ID NO: 5949393 - DNA, 25 bp, Homo sapien
agctatcctctgcattaccattgaa

SEQ ID NO: 5949394 - DNA, 25 bp, Homo sapien
acgctcttcaaatactctatcttcg

SEQ ID NO: 5949395 - DNA, 25 bp, Homo sapien
tattatgcgacttgaaccattcagt

SEQ ID NO: 5949396 - DNA, 25 bp, Homo sapien
ctactcgtttcttgaaacttttggc

SEQ ID NO: 5949397 - DNA, 25 bp, Homo sapien
ggaccctgcagaccgttcttgtgga

SEQ ID NO: 5949398 - DNA, 25 bp, Homo sapien
ttggcaccattactagagtttgctg

SEQ ID NO: 5949399 - DNA, 25 bp, Homo sapien
gtattccctgctgtagagctatcct

SEQ ID NO: 5949400 - DNA, 25 bp, Homo sapien
ctggtgttgcagatcgacggttctc

SEQ ID NO: 5949401 - DNA, 25 bp, Homo sapien
tgtggatttggcgcaccacaatcca

SEQ ID NO: 5949402 - DNA, 25 bp, Homo sapien
ttataatcctctgcgacggggttat

SEQ ID NO: 5949403 - DNA, 25 bp, Homo sapien
gcctgcgggtatctgggtccacttt

SEQ ID NO: 5949404 - DNA, 25 bp, Homo sapien
gcagatcgacggttctccagtggtg

SEQ ID NO: 5949405 - DNA, 25 bp, Homo sapien
tctcttcgtttcttctgacaactct

SEQ ID NO: 5949406 - DNA, 25 bp, Homo sapien
gaaaattttccaggctcaaagtatt

SEQ ID NO: 5949407 - DNA, 25 bp, Homo sapien
caccaagccctctatggataccggc

SEQ ID NO: 5949408 - DNA, 25 bp, Homo sapien
acttttctttataatcctctgcgac

SEQ ID NO: 5949409 - DNA, 25 bp, Homo sapien
gcgcaccacaatccatacatttctt

SEQ ID NO: 5949410 - DNA, 25 bp, Homo sapien
cgttcttctccttttgaaaattggc

SEQ ID NO: 5949411 - DNA, 25 bp, Homo sapien
tatggataccggcacattcaaggca

SEQ ID NO: 5949412 - DNA, 25 bp, Homo sapien
ttatgcgacttgaaccattcagtca

SEQ ID NO: 5949413 - DNA, 25 bp, Homo sapien
ccaccttgagaagggggcaaatgat

SEQ ID NO: 5949414 - DNA, 25 bp, Homo sapien
cgtggcccattgtggatttggcgca

SEQ ID NO: 5949415 - DNA, 25 bp, Homo sapien
gcagctgctctcttcgtttcttctg

SEQ ID NO: 5949416 - DNA, 25 bp, Homo sapien
ctttgagcaacaccaggcgtagcgg

SEQ ID NO: 5949417 - DNA, 25 bp, Homo sapien
agcgctggagaagaggccccatcct

SEQ ID NO: 5949418 - DNA, 25 bp, Homo sapien
ctcaaagtattgctggaccctgcag

SEQ ID NO: 5949419 - DNA, 25 bp, Homo sapien
ttaccattgaaatttttagtgaagt

SEQ ID NO: 5949420 - DNA, 25 bp, Homo sapien
cccttctcgactttgagcaacacca

SEQ ID NO: 5949421 - DNA, 25 bp, Homo sapien
ttagtgaagttactaaatgcttgga

SEQ ID NO: 5949422 - DNA, 25 bp, Homo sapien
tgcaattgcaaaagacgcctgcggg

SEQ ID NO: 5949423 - DNA, 25 bp, Homo sapien
caccattactagagtttgctggtgt

SEQ ID NO: 5949424 - DNA, 25 bp, Homo sapien
ttgtattccctgctgtagagctatc

SEQ ID NO: 5949425 - DNA, 25 bp, Homo sapien
atgaaagctccaaacttaggcgtgg

SEQ ID NO: 5949426 - DNA, 25 bp, Homo sapien
tgaagttactaaatgcttggaatcc

SEQ ID NO: 5949427 - DNA, 25 bp, Homo sapien
ctatcttcgcaaagacatgttaact

SEQ ID NO: 5949428 - DNA, 25 bp, Homo sapien
ggtaaactcaggtcaatattatgcg

SEQ ID NO: 5949429 - DNA, 25 bp, Homo sapien
ctatcctctgcattaccattgaaat

SEQ ID NO: 5949430 - DNA, 25 bp, Homo sapien
cgaacgatttggttacagcgctgga

SEQ ID NO: 5949431 - DNA, 25 bp, Homo sapien
ggtcaatattatgcgacttgaacca

SEQ ID NO: 5949432 - DNA, 25 bp, Homo sapien
ccattcagtcaaaggttcgttacca

SEQ ID NO: 5949433 - DNA, 25 bp, Homo sapien
gcatcaaaatccaaatgctcacgct

SEQ ID NO: 5949434 - DNA, 25 bp, Homo sapien
atttggttacagcgctggagaagag

SEQ ID NO: 5949435 - DNA, 25 bp, Homo sapien
tgagaagggggcaaatgatctggtc

SEQ ID NO: 5949436 - DNA, 25 bp, Homo sapien
ctgctcaatgttcccaaaggatcag

SEQ ID NO: 5949437 - DNA, 25 bp, Homo sapien
tcttcttatcgttattatcaatctt

SEQ ID NO: 5949438 - DNA, 25 bp, Homo sapien
tttggcgcaccacaatccatacatt

SEQ ID NO: 5949439 - DNA, 25 bp, Homo sapien
aacgatttggttacagcgctggaga

SEQ ID NO: 5949440 - DNA, 25 bp, Homo sapien
caaaataagcttcgttcttctcctt

SEQ ID NO: 5949441 - DNA, 25 bp, Homo sapien
tctccggattgccattgctggacgt

SEQ ID NO: 5949442 - DNA, 25 bp, Homo sapien
ctgctctcttcgtttcttctgacaa

SEQ ID NO: 5949443 - DNA, 25 bp, Homo sapien
ccatacatttcttatttgcaccaat

SEQ ID NO: 5949444 - DNA, 25 bp, Homo sapien
tcgttaccacctttttccatacgaa

SEQ ID NO: 5949445 - DNA, 25 bp, Homo sapien
tgcagaccgttcttgtggaggtttt

SEQ ID NO: 5949446 - DNA, 25 bp, Homo sapien
aaatgatctggtctagattggttct

SEQ ID NO: 5949447 - DNA, 25 bp, Homo sapien
gtatctgggtccactttccaatctg

SEQ ID NO: 5949448 - DNA, 25 bp, Homo sapien
ttgaaacttttggccaaactgggca

SEQ ID NO: 5949449 - DNA, 25 bp, Homo sapien
ctggaccctgcagaccgttcttgtg

SEQ ID NO: 5949450 - DNA, 25 bp, Homo sapien
ttttagtgaagttactaaatgcttg

SEQ ID NO: 5949451 - DNA, 25 bp, Homo sapien
gatatttaccaccttgagaaggggg

SEQ ID NO: 5949452 - DNA, 25 bp, Homo sapien
gcttgaaaattttccaggctcaaag

SEQ ID NO: 5949453 - DNA, 25 bp, Homo sapien
gcgacttgaaccattcagtcaaagg

SEQ ID NO: 5949454 - DNA, 25 bp, Homo sapien
tttacgtcctcgaacgatttggtta

SEQ ID NO: 5949455 - DNA, 25 bp, Homo sapien
ttcttgcccagctcagcaaaataag

SEQ ID NO: 5949456 - DNA, 25 bp, Homo sapien
cttgagaagggggcaaatgatctgg

SEQ ID NO: 5949457 - DNA, 25 bp, Homo sapien
ctgatccatagtgatagatcttaca

SEQ ID NO: 5949458 - DNA, 25 bp, Homo sapien
ccggtttaaactgatccatagtgat

SEQ ID NO: 5949459 - DNA, 25 bp, Homo sapien
ccattgtggatttggcgcaccacaa

SEQ ID NO: 5949460 - DNA, 25 bp, Homo sapien
ggatcagcttgaaaattttccaggc

SEQ ID NO: 5949461 - DNA, 25 bp, Homo sapien
gcaaatgaaagctccaaacttaggc

SEQ ID NO: 5949462 - DNA, 25 bp, Homo sapien
gttactaaatgcttggaatccataa

SEQ ID NO: 5949463 - DNA, 25 bp, Homo sapien
aacttaggcgtggcccattgtggat

SEQ ID NO: 5949464 - DNA, 25 bp, Homo sapien
taccaccttgagaagggggcaaatg

SEQ ID NO: 5949465 - DNA, 25 bp, Homo sapien
caggctcaaagtattgctggaccct

SEQ ID NO: 5949466 - DNA, 25 bp, Homo sapien
aagatatatgcacaccaagccctct

SEQ ID NO: 5949467 - DNA, 25 bp, Homo sapien
agtttgctggtgttgcagatcgacg

SEQ ID NO: 5949468 - DNA, 25 bp, Homo sapien
aaatgaaagctccaaacttaggcgt

SEQ ID NO: 5949469 - DNA, 25 bp, Homo sapien
aaattttccaggctcaaagtattgc

SEQ ID NO: 5949470 - DNA, 25 bp, Homo sapien
cctgcagaccgttcttgtggaggtt

SEQ ID NO: 5949471 - DNA, 25 bp, Homo sapien
tccaaacttaggcgtggcccattgt

SEQ ID NO: 5949472 - DNA, 25 bp, Homo sapien
ggtttgagaggttgctgataacttg

SEQ ID NO: 5949473 - DNA, 25 bp, Homo sapien
ccattactagagtttgctggtgttg

SEQ ID NO: 5949474 - DNA, 25 bp, Homo sapien
tccctgctgtagagctatcctctgc

SEQ ID NO: 5949475 - DNA, 25 bp, Homo sapien
gctcaatgttcccaaaggatcagct

SEQ ID NO: 5949476 - DNA, 25 bp, Homo sapien
cttaggcgtggcccattgtggattt

SEQ ID NO: 5949477 - DNA, 25 bp, Homo sapien
gaaagctccaaacttaggcgtggcc

SEQ ID NO: 5949478 - DNA, 25 bp, Homo sapien
cacaatccatacatttcttatttgc

SEQ ID NO: 5949479 - DNA, 25 bp, Homo sapien
aaagccctgatatttaccaccttga

SEQ ID NO: 5949480 - DNA, 25 bp, Homo sapien
ggtttaaactgatccatagtgatag

SEQ ID NO: 5949481 - DNA, 25 bp, Homo sapien
agcggatgcagcggtttgagaggtt

SEQ ID NO: 5949482 - DNA, 25 bp, Homo sapien
tactaaatgcttggaatccataact

SEQ ID NO: 5949483 - DNA, 25 bp, Homo sapien
gaccgttcttgtggaggttttgcgg

SEQ ID NO: 5949484 - DNA, 25 bp, Homo sapien
tggtctagattggttcttcttgccc

SEQ ID NO: 5949485 - DNA, 25 bp, Homo sapien
acaaaagatatatgcacaccaagcc

SEQ ID NO: 5949486 - DNA, 25 bp, Homo sapien
tcacgctcttcaaatactctatctt

SEQ ID NO: 5949487 - DNA, 25 bp, Homo sapien
tgctgtagagctatcctctgcatta

SEQ ID NO: 5949488 - DNA, 25 bp, Homo sapien
aatactctatcttcgcaaagacatg

SEQ ID NO: 5949489 - DNA, 25 bp, Homo sapien
agaagaggccccatcctctgctcaa

SEQ ID NO: 5949490 - DNA, 25 bp, Homo sapien
tggacgtgaggcttaataaccgttt

SEQ ID NO: 5949491 - DNA, 25 bp, Homo sapien
gttcctccggtttaaactgatccat

SEQ ID NO: 5949492 - DNA, 25 bp, Homo sapien
aaaagatatatgcacaccaagccct

SEQ ID NO: 5949493 - DNA, 25 bp, Homo sapien
tactagagtttgctggtgttgcaga

SEQ ID NO: 5949494 - DNA, 25 bp, Homo sapien
cattgaaatttttagtgaagttact

SEQ ID NO: 5949495 - DNA, 25 bp, Homo sapien
taggcgtggcccattgtggatttgg

SEQ ID NO: 5949496 - DNA, 25 bp, Homo sapien
ctgggtccactttccaatctgacat

SEQ ID NO: 5949497 - DNA, 25 bp, Homo sapien
cgatttggttacagcgctggagaag

SEQ ID NO: 5949498 - DNA, 25 bp, Homo sapien
aaggatcagcttgaaaattttccag

SEQ ID NO: 5949499 - DNA, 25 bp, Homo sapien
tgctggtgttgcagatcgacggttc

SEQ ID NO: 5949500 - DNA, 25 bp, Homo sapien
gaaacttttggccaaactgggcagc

SEQ ID NO: 5949501 - DNA, 25 bp, Homo sapien
tttcttgaaacttttggccaaactg

SEQ ID NO: 5949502 - DNA, 25 bp, Homo sapien
ctgataacttggaagcatcaaaatc

SEQ ID NO: 5949503 - DNA, 25 bp, Homo sapien
tcaatattatgcgacttgaaccatt

SEQ ID NO: 5949504 - DNA, 25 bp, Homo sapien
ggttatcgtatttcactttttgtgg

SEQ ID NO: 5949505 - DNA, 25 bp, Homo sapien
ctccggtttaaactgatccatagtg

SEQ ID NO: 5949506 - DNA, 25 bp, Homo sapien
tggccaaactgggcagctgctctct

SEQ ID NO: 5949507 - DNA, 25 bp, Homo sapien
atttgcaccaatcttttgcaattgc

SEQ ID NO: 5949508 - DNA, 25 bp, Homo sapien
gcgtagcggatgcagcggtttgaga

SEQ ID NO: 5949509 - DNA, 25 bp, Homo sapien
attcagtcaaaggttcgttaccacc

SEQ ID NO: 5949510 - DNA, 25 bp, Homo sapien
gtgtcccttctcgactttgagcaac

SEQ ID NO: 5949511 - DNA, 25 bp, Homo sapien
tgatattctgtatgggttgtattcc

SEQ ID NO: 5949512 - DNA, 25 bp, Homo sapien
attgtggatttggcgcaccacaatc

SEQ ID NO: 5949513 - DNA, 25 bp, Homo sapien
aaagacgcctgcgggtatctgggtc

SEQ ID NO: 5949514 - DNA, 25 bp, Homo sapien
tcgtttcttgaaacttttggccaaa

SEQ ID NO: 5949515 - DNA, 25 bp, Homo sapien
cctctgcattaccattgaaattttt

SEQ ID NO: 5949516 - DNA, 25 bp, Homo sapien
gatttggcgcaccacaatccataca

SEQ ID NO: 5949517 - DNA, 25 bp, Homo sapien
taacttggaagcatcaaaatccaaa

SEQ ID NO: 5949518 - DNA, 25 bp, Homo sapien
tccataactactcgtttcttgaaac

SEQ ID NO: 5949519 - DNA, 25 bp, Homo sapien
attggttcttcttgcccagctcagc

SEQ ID NO: 5949520 - DNA, 25 bp, Homo sapien
cctctatggataccggcacattcaa

SEQ ID NO: 5949521 - DNA, 25 bp, Homo sapien
tttcttctgacaactctccggattg

SEQ ID NO: 5949522 - DNA, 25 bp, Homo sapien
tttccatacgaagaagttcctccgg

SEQ ID NO: 5949523 - DNA, 25 bp, Homo sapien
gacttgaaccattcagtcaaaggtt

SEQ ID NO: 5949524 - DNA, 25 bp, Homo sapien
tcagcaaaataagcttcgttcttct

SEQ ID NO: 5949525 - DNA, 25 bp, Homo sapien
tggatttggcgcaccacaatccata

SEQ ID NO: 5949526 - DNA, 25 bp, Homo sapien
ctgttcattcttcttatcgttatta

SEQ ID NO: 5949527 - DNA, 25 bp, Homo sapien
caaactgggcagctgctctcttcgt

SEQ ID NO: 5949528 - DNA, 25 bp, Homo sapien
taacttttctttataatcctctgcg

SEQ ID NO: 5949529 - DNA, 25 bp, Homo sapien
actcgtttcttgaaacttttggcca

SEQ ID NO: 5949530 - DNA, 25 bp, Homo sapien
gcaaagacatgttaacttttcttta

SEQ ID NO: 5949531 - DNA, 25 bp, Homo sapien
attgctggaccctgcagaccgttct

SEQ ID NO: 5949532 - DNA, 25 bp, Homo sapien
tccggattgccattgctggacgtga

SEQ ID NO: 5949533 - DNA, 25 bp, Homo sapien
tttaaactgatccatagtgatagat

SEQ ID NO: 5949534 - DNA, 25 bp, Homo sapien
accctgcagaccgttcttgtggagg

SEQ ID NO: 5949535 - DNA, 25 bp, Homo sapien
gggcagctgctctcttcgtttcttc

SEQ ID NO: 5949536 - DNA, 25 bp, Homo sapien
ttctttataatcctctgcgacgggg

SEQ ID NO: 5949537 - DNA, 25 bp, Homo sapien
cagcggtttgagaggttgctgataa

SEQ ID NO: 5949538 - DNA, 25 bp, Homo sapien
ctgcgggtatctgggtccactttcc

SEQ ID NO: 5949539 - DNA, 25 bp, Homo sapien
gctcacgctcttcaaatactctatc

SEQ ID NO: 5949540 - DNA, 25 bp, Homo sapien
tgcaaaagacgcctgcgggtatctg

SEQ ID NO: 5949541 - DNA, 25 bp, Homo sapien
tcttgaaacttttggccaaactggg

SEQ ID NO: 5949542 - DNA, 25 bp, Homo sapien
gacaactctccggattgccattgct

SEQ ID NO: 5949543 - DNA, 25 bp, Homo sapien
gcaccaatcttttgcaattgcaaaa

SEQ ID NO: 5949544 - DNA, 25 bp, Homo sapien
cttctcgactttgagcaacaccagg

SEQ ID NO: 5949545 - DNA, 25 bp, Homo sapien
tcttctgacaactctccggattgcc

SEQ ID NO: 5949546 - DNA, 25 bp, Homo sapien
gataccggcacattcaaggcaaatg

SEQ ID NO: 5949547 - DNA, 25 bp, Homo sapien
caatcttttgatattctgtatgggt

SEQ ID NO: 5949548 - DNA, 25 bp, Homo sapien
caactctccggattgccattgctgg

SEQ ID NO: 5949549 - DNA, 25 bp, Homo sapien
gatctggtctagattggttcttctt

SEQ ID NO: 5949550 - DNA, 25 bp, Homo sapien
gtatttcactttttgtggtaaactc

SEQ ID NO: 5949551 - DNA, 25 bp, Homo sapien
gtctagattggttcttcttgcccag

SEQ ID NO: 5949552 - DNA, 25 bp, Homo sapien
tttaccaccttgagaagggggcaaa

SEQ ID NO: 5949553 - DNA, 25 bp, Homo sapien
tagatcttacaaaagatatatgcac

SEQ ID NO: 5949554 - DNA, 25 bp, Homo sapien
agacgcctgcgggtatctgggtcca

SEQ ID NO: 5949555 - DNA, 25 bp, Homo sapien
ttgagcaacaccaggcgtagcggat

SEQ ID NO: 5949556 - DNA, 25 bp, Homo sapien
tatttaccaccttgagaagggggca

SEQ ID NO: 5949557 - DNA, 25 bp, Homo sapien
gcttcgttcttctccttttgaaaat

SEQ ID NO: 5949558 - DNA, 25 bp, Homo sapien
ttacaaaagatatatgcacaccaag

SEQ ID NO: 5949559 - DNA, 25 bp, Homo sapien
gactttgagcaacaccaggcgtagc

SEQ ID NO: 5949560 - DNA, 25 bp, Homo sapien
tttggccaaactgggcagctgctct

SEQ ID NO: 5949561 - DNA, 25 bp, Homo sapien
ggttacagcgctggagaagaggccc

SEQ ID NO: 5949562 - DNA, 25 bp, Homo sapien
ctttataatcctctgcgacggggtt

SEQ ID NO: 5949563 - DNA, 25 bp, Homo sapien
ctctatcttcgcaaagacatgttaa

SEQ ID NO: 5949564 - DNA, 25 bp, Homo sapien
gccattgctggacgtgaggcttaat

SEQ ID NO: 5949565 - DNA, 25 bp, Homo sapien
ctcaggtcaatattatgcgacttga

SEQ ID NO: 5949566 - DNA, 25 bp, Homo sapien
gcggtttgagaggttgctgataact

SEQ ID NO: 5949567 - DNA, 25 bp, Homo sapien
aagttactaaatgcttggaatccat

SEQ ID NO: 5949568 - DNA, 25 bp, Homo sapien
atccatacatttcttatttgcacca

SEQ ID NO: 5949569 - DNA, 25 bp, Homo sapien
gggtatctgggtccactttccaatc

SEQ ID NO: 5949570 - DNA, 25 bp, Homo sapien
aactcaggtcaatattatgcgactt

SEQ ID NO: 5949571 - DNA, 25 bp, Homo sapien
catagtgatagatcttacaaaagat

SEQ ID NO: 5949572 - DNA, 25 bp, Homo sapien
ttcaaatactctatcttcgcaaaga

SEQ ID NO: 5949573 - DNA, 25 bp, Homo sapien
gctctcttcgtttcttctgacaact

SEQ ID NO: 5949574 - DNA, 25 bp, Homo sapien
atcagcttgaaaattttccaggctc

SEQ ID NO: 5949575 - DNA, 25 bp, Homo sapien
ccagtggtgtcccttctcgactttg

SEQ ID NO: 5949576 - DNA, 25 bp, Homo sapien
gagcaacaccaggcgtagcggatgc

SEQ ID NO: 5949577 - DNA, 25 bp, Homo sapien
agtgaagttactaaatgcttggaat

SEQ ID NO: 5949578 - DNA, 25 bp, Homo sapien
gcaaatgatctggtctagattggtt

SEQ ID NO: 5949579 - DNA, 25 bp, Homo sapien
tgcacaccaagccctctatggatac

SEQ ID NO: 5949580 - DNA, 25 bp, Homo sapien
ctgacaactctccggattgccattg

SEQ ID NO: 5949581 - DNA, 25 bp, Homo sapien
aattggcaccattactagagtttgc

SEQ ID NO: 5949582 - DNA, 25 bp, Homo sapien
tgctggaccctgcagaccgttcttg

SEQ ID NO: 5949583 - DNA, 25 bp, Homo sapien
tacgtcctcgaacgatttggttaca

SEQ ID NO: 5949584 - DNA, 25 bp, Homo sapien
cgtcctcgaacgatttggttacagc

SEQ ID NO: 5949585 - DNA, 25 bp, Homo sapien
tagaaatcgtcccatttgtcctcgt

SEQ ID NO: 5949586 - DNA, 25 bp, Homo sapien
ataagcttcgttcttctccttttga

SEQ ID NO: 5949587 - DNA, 25 bp, Homo sapien
tcgcaaagacatgttaacttttctt

SEQ ID NO: 5949588 - DNA, 25 bp, Homo sapien
taaactgatccatagtgatagatct

SEQ ID NO: 5949589 - DNA, 25 bp, Homo sapien
tcctctgcgacggggttatcgtatt

SEQ ID NO: 5949590 - DNA, 25 bp, Homo sapien
cacaccaagccctctatggataccg

SEQ ID NO: 5949591 - DNA, 25 bp, Homo sapien
cgttcttgtggaggttttgcgggtg

SEQ ID NO: 5949592 - DNA, 25 bp, Homo sapien
tcctcgaacgatttggttacagcgc

SEQ ID NO: 5949593 - DNA, 25 bp, Homo sapien
ccaggcgtagcggatgcagcggttt

SEQ ID NO: 5949594 - DNA, 25 bp, Homo sapien
catacgaagaagttcctccggttta

SEQ ID NO: 5949595 - DNA, 25 bp, Homo sapien
gggggcaaatgatctggtctagatt

SEQ ID NO: 5949596 - DNA, 25 bp, Homo sapien
actctccggattgccattgctggac

SEQ ID NO: 5949597 - DNA, 25 bp, Homo sapien
aatccataactactcgtttcttgaa

SEQ ID NO: 5949598 - DNA, 25 bp, Homo sapien
cgctggagaagaggccccatcctct

SEQ ID NO: 5949599 - DNA, 25 bp, Homo sapien
gtacttccaaagccctgatatttac

SEQ ID NO: 5949600 - DNA, 25 bp, Homo sapien
gaggttttgcgggtgtacttccaaa

SEQ ID NO: 5949601 - DNA, 25 bp, Homo sapien
tctgtatgggttgtattccctgctg

SEQ ID NO: 5949602 - DNA, 25 bp, Homo sapien
ttgtggtaaactcaggtcaatatta

SEQ ID NO: 5949603 - DNA, 25 bp, Homo sapien
ttgaaaattttccaggctcaaagta

SEQ ID NO: 5949604 - DNA, 25 bp, Homo sapien
ttggaatccataactactcgtttct

SEQ ID NO: 5949605 - DNA, 25 bp, Homo sapien
ttcccaaaggatcagcttgaaaatt

SEQ ID NO: 5949606 - DNA, 25 bp, Homo sapien
tttgtcctcgtcctgttcattcttc

SEQ ID NO: 5949607 - DNA, 25 bp, Homo sapien
aagcatcaaaatccaaatgctcacg

SEQ ID NO: 5949608 - DNA, 25 bp, Homo sapien
ggccccatcctctgctcaatgttcc

SEQ ID NO: 5949609 - DNA, 25 bp, Homo sapien
gggtgtacttccaaagccctgatat

SEQ ID NO: 5949610 - DNA, 25 bp, Homo sapien
gtcccttctcgactttgagcaacac

SEQ ID NO: 5949611 - DNA, 25 bp, Homo sapien
ggaagcatcaaaatccaaatgctca

SEQ ID NO: 5949612 - DNA, 25 bp, Homo sapien
tcttcgtttcttctgacaactctcc

SEQ ID NO: 5949613 - DNA, 25 bp, Homo sapien
ctgggcagctgctctcttcgtttct

SEQ ID NO: 5949614 - DNA, 25 bp, Homo sapien
ctctgcgacggggttatcgtatttc

SEQ ID NO: 5949615 - DNA, 25 bp, Homo sapien
tgtcctcgtcctgttcattcttctt

SEQ ID NO: 5949616 - DNA, 25 bp, Homo sapien
aacttttggccaaactgggcagctg

SEQ ID NO: 5949617 - DNA, 25 bp, Homo sapien
accacaatccatacatttcttattt

SEQ ID NO: 5949618 - DNA, 25 bp, Homo sapien
gtagagctatcctctgcattaccat

SEQ ID NO: 5949619 - DNA, 25 bp, Homo sapien
ccctgatatttaccaccttgagaag

SEQ ID NO: 5949620 - DNA, 25 bp, Homo sapien
ttctgacaactctccggattgccat

SEQ ID NO: 5949621 - DNA, 25 bp, Homo sapien
tcgtttacgtcctcgaacgatttgg

SEQ ID NO: 5949622 - DNA, 25 bp, Homo sapien
aatcgtcccatttgtcctcgtcctg

SEQ ID NO: 5949623 - DNA, 25 bp, Homo sapien
gtagcggatgcagcggtttgagagg

SEQ ID NO: 5949624 - DNA, 25 bp, Homo sapien
tggcccattgtggatttggcgcacc

SEQ ID NO: 5949625 - DNA, 25 bp, Homo sapien
tttccaggctcaaagtattgctgga

SEQ ID NO: 5949626 - DNA, 25 bp, Homo sapien
taccggcacattcaaggcaaatgaa

SEQ ID NO: 5949627 - DNA, 25 bp, Homo sapien
catttgtcctcgtcctgttcattct

SEQ ID NO: 5949628 - DNA, 25 bp, Homo sapien
ttgctggacgtgaggcttaataacc

SEQ ID NO: 5949629 - DNA, 25 bp, Homo sapien
cttttgcaattgcaaaagacgcctg

SEQ ID NO: 5949630 - DNA, 25 bp, Homo sapien
tcctgttcattcttcttatcgttat

SEQ ID NO: 5949631 - DNA, 25 bp, Homo sapien
gatatatgcacaccaagccctctat

SEQ ID NO: 5949632 - DNA, 25 bp, Homo sapien
ctctgctcaatgttcccaaaggatc

SEQ ID NO: 5949633 - DNA, 25 bp, Homo sapien
agaggttgctgataacttggaagca

SEQ ID NO: 5949634 - DNA, 25 bp, Homo sapien
agagtttgctggtgttgcagatcga

SEQ ID NO: 5949635 - DNA, 25 bp, Homo sapien
cggattgccattgctggacgtgagg

SEQ ID NO: 5949636 - DNA, 25 bp, Homo sapien
gtgatagatcttacaaaagatatat

SEQ ID NO: 5949637 - DNA, 25 bp, Homo sapien
gtggtaaactcaggtcaatattatg

SEQ ID NO: 5949638 - DNA, 25 bp, Homo sapien
ggttttgcgggtgtacttccaaagc

SEQ ID NO: 5949639 - DNA, 25 bp, Homo sapien
ggtgttgcagatcgacggttctcca

SEQ ID NO: 5949640 - DNA, 25 bp, Homo sapien
tctatggataccggcacattcaagg

SEQ ID NO: 5949641 - DNA, 25 bp, Homo sapien
tatcgtatttcactttttgtggtaa

SEQ ID NO: 5949642 - DNA, 25 bp, Homo sapien
gcaacaccaggcgtagcggatgcag

SEQ ID NO: 5949643 - DNA, 25 bp, Homo sapien
caaagtattgctggaccctgcagac

SEQ ID NO: 5949644 - DNA, 25 bp, Homo sapien
cagcttgaaaattttccaggctcaa

SEQ ID NO: 5949645 - DNA, 25 bp, Homo sapien
caccaggcgtagcggatgcagcggt

SEQ ID NO: 5949646 - DNA, 25 bp, Homo sapien
ccaaatgctcacgctcttcaaatac

SEQ ID NO: 5949647 - DNA, 25 bp, Homo sapien
tctcgactttgagcaacaccaggcg

SEQ ID NO: 5949648 - DNA, 25 bp, Homo sapien
ttttgtggtaaactcaggtcaatat

SEQ ID NO: 5949649 - DNA, 25 bp, Homo sapien
atcaaaatccaaatgctcacgctct

SEQ ID NO: 5949650 - DNA, 25 bp, Homo sapien
tttcttatttgcaccaatcttttgc

SEQ ID NO: 5949651 - DNA, 25 bp, Homo sapien
agatcgacggttctccagtggtgtc

SEQ ID NO: 5949652 - DNA, 25 bp, Homo sapien
ttcaaggcaaatgaaagctccaaac

SEQ ID NO: 5949653 - DNA, 25 bp, Homo sapien
atcttcgcaaagacatgttaacttt

SEQ ID NO: 5949654 - DNA, 25 bp, Homo sapien
tactctatcttcgcaaagacatgtt

SEQ ID NO: 5949655 - DNA, 25 bp, Homo sapien
atgctcacgctcttcaaatactcta

SEQ ID NO: 5949656 - DNA, 25 bp, Homo sapien
cctgctgtagagctatcctctgcat

SEQ ID NO: 5949657 - DNA, 25 bp, Homo sapien
gatgcagcggtttgagaggttgctg

SEQ ID NO: 5949658 - DNA, 25 bp, Homo sapien
aaatccaaatgctcacgctcttcaa

SEQ ID NO: 5949659 - DNA, 25 bp, Homo sapien
ggctcaaagtattgctggaccctgc

SEQ ID NO: 5949660 - DNA, 25 bp, Homo sapien
tttgctggtgttgcagatcgacggt

SEQ ID NO: 5949661 - DNA, 25 bp, Homo sapien
cttctccttttgaaaattggcacca

SEQ ID NO: 5949662 - DNA, 25 bp, Homo sapien
tcttcttgcccagctcagcaaaata

SEQ ID NO: 5949663 - DNA, 25 bp, Homo sapien
cggatgcagcggtttgagaggttgc

SEQ ID NO: 5949664 - DNA, 25 bp, Homo sapien
ttcactttttgtggtaaactcaggt

SEQ ID NO: 5949665 - DNA, 25 bp, Homo sapien
ggttgtattccctgctgtagagcta

SEQ ID NO: 5949666 - DNA, 25 bp, Homo sapien
gctcagcaaaataagcttcgttctt

SEQ ID NO: 5949667 - DNA, 25 bp, Homo sapien
ttgcaccaatcttttgcaattgcaa

SEQ ID NO: 5949668 - DNA, 25 bp, Homo sapien
cttttggccaaactgggcagctgct

SEQ ID NO: 5949669 - DNA, 25 bp, Homo sapien
caatccatacatttcttatttgcac

SEQ ID NO: 5949670 - DNA, 25 bp, Homo sapien
acttggaagcatcaaaatccaaatg

SEQ ID NO: 5949671 - DNA, 25 bp, Homo sapien
tggataccggcacattcaaggcaaa

SEQ ID NO: 5949672 - DNA, 25 bp, Homo sapien
ttcttctccttttgaaaattggcac

SEQ ID NO: 5949673 - DNA, 25 bp, Homo sapien
ggcgtggcccattgtggatttggcg

SEQ ID NO: 5949674 - DNA, 25 bp, Homo sapien
gtattgctggaccctgcagaccgtt

SEQ ID NO: 5949675 - DNA, 25 bp, Homo sapien
ctttttgtggtaaactcaggtcaat

SEQ ID NO: 5949676 - DNA, 25 bp, Homo sapien
cagctcagcaaaataagcttcgttc

SEQ ID NO: 5949677 - DNA, 25 bp, Homo sapien
gcgggtgtacttccaaagccctgat

SEQ ID NO: 5949678 - DNA, 25 bp, Homo sapien
aactgggcagctgctctcttcgttt

SEQ ID NO: 5949679 - DNA, 25 bp, Homo sapien
gatcttacaaaagatatatgcacac

SEQ ID NO: 5949680 - DNA, 25 bp, Homo sapien
atcctctgcattaccattgaaattt

SEQ ID NO: 5949681 - DNA, 25 bp, Homo sapien
ggcacattcaaggcaaatgaaagct

SEQ ID NO: 5949682 - DNA, 25 bp, Homo sapien
cttcgcaaagacatgttaacttttc

SEQ ID NO: 5949683 - DNA, 25 bp, Homo sapien
aggcgtagcggatgcagcggtttga

SEQ ID NO: 5949684 - DNA, 25 bp, Homo sapien
attttccaggctcaaagtattgctg

SEQ ID NO: 5949685 - DNA, 25 bp, Homo sapien
aaatgctcacgctcttcaaatactc

SEQ ID NO: 5949686 - DNA, 25 bp, Homo sapien
ggagaagaggccccatcctctgctc

SEQ ID NO: 5949687 - DNA, 25 bp, Homo sapien
tggaggttttgcgggtgtacttcca

SEQ ID NO: 5949688 - DNA, 25 bp, Homo sapien
tcgactttgagcaacaccaggcgta

SEQ ID NO: 5949689 - DNA, 25 bp, Homo sapien
aagccctctatggataccggcacat

SEQ ID NO: 5949690 - DNA, 25 bp, Homo sapien
agattggttcttcttgcccagctca

SEQ ID NO: 5949691 - DNA, 25 bp, Homo sapien
ttcgtttcttctgacaactctccgg

SEQ ID NO: 5949692 - DNA, 25 bp, Homo sapien
tcgtatttcactttttgtggtaaac

SEQ ID NO: 5949693 - DNA, 25 bp, Homo sapien
aatcctctgcgacggggttatcgta

SEQ ID NO: 5949694 - DNA, 25 bp, Homo sapien
agaagggggcaaatgatctggtcta

SEQ ID NO: 5949695 - DNA, 25 bp, Homo sapien
tgcattaccattgaaatttttagtg

SEQ ID NO: 5949696 - DNA, 25 bp, Homo sapien
tgctgataacttggaagcatcaaaa

SEQ ID NO: 5949697 - DNA, 25 bp, Homo sapien
ggttctccagtggtgtcccttctcg

SEQ ID NO: 5949698 - DNA, 25 bp, Homo sapien
tcgtcccatttgtcctcgtcctgtt

SEQ ID NO: 5949699 - DNA, 25 bp, Homo sapien
tatgcacaccaagccctctatggat

SEQ ID NO: 5949700 - DNA, 25 bp, Homo sapien
gttcattcttcttatcgttattatc

SEQ ID NO: 5949701 - DNA, 25 bp, Homo sapien
gcgggtatctgggtccactttccaa

SEQ ID NO: 5949702 - DNA, 25 bp, Homo sapien
acggttctccagtggtgtcccttct

SEQ ID NO: 5949703 - DNA, 25 bp, Homo sapien
cattaccattgaaatttttagtgaa

SEQ ID NO: 5949704 - DNA, 25 bp, Homo sapien
ggcaccattactagagtttgctggt

SEQ ID NO: 5949705 - DNA, 25 bp, Homo sapien
cacctttttccatacgaagaagttc

SEQ ID NO: 5949706 - DNA, 25 bp, Homo sapien
cgtttcttctgacaactctccggat

SEQ ID NO: 5949707 - DNA, 25 bp, Homo sapien
aggttgctgataacttggaagcatc

SEQ ID NO: 5949708 - DNA, 25 bp, Homo sapien
atattctgtatgggttgtattccct

SEQ ID NO: 5949709 - DNA, 25 bp, Homo sapien
atcttttgcaattgcaaaagacgcc

SEQ ID NO: 5949710 - DNA, 25 bp, Homo sapien
aaaattggcaccattactagagttt

SEQ ID NO: 5949711 - DNA, 25 bp, Homo sapien
acgcctgcgggtatctgggtccact

SEQ ID NO: 5949712 - DNA, 25 bp, Homo sapien
ctagagtttgctggtgttgcagatc

SEQ ID NO: 5949713 - DNA, 25 bp, Homo sapien
atttttagtgaagttactaaatgct

SEQ ID NO: 5949714 - DNA, 25 bp, Homo sapien
tggcgcaccacaatccatacatttc

SEQ ID NO: 5949715 - DNA, 25 bp, Homo sapien
agagctatcctctgcattaccattg

SEQ ID NO: 5949716 - DNA, 25 bp, Homo sapien
ttccaaagccctgatatttaccacc

SEQ ID NO: 5949717 - DNA, 25 bp, Homo sapien
ctaaatgcttggaatccataactac

SEQ ID NO: 5949718 - DNA, 25 bp, Homo sapien
gccaaactgggcagctgctctcttc

SEQ ID NO: 5949719 - DNA, 25 bp, Homo sapien
tcttcaaatactctatcttcgcaaa

SEQ ID NO: 5949720 - DNA, 25 bp, Homo sapien
tccttttgaaaattggcaccattac

SEQ ID NO: 5949721 - DNA, 25 bp, Homo sapien
ctggagaagaggccccatcctctgc

SEQ ID NO: 5949722 - DNA, 25 bp, Homo sapien
cttgcccagctcagcaaaataagct

SEQ ID NO: 5949723 - DNA, 25 bp, Homo sapien
aaccattcagtcaaaggttcgttac

SEQ ID NO: 5949724 - DNA, 25 bp, Homo sapien
aaatgcttggaatccataactactc

SEQ ID NO: 5949725 - DNA, 25 bp, Homo sapien
tttgagaggttgctgataacttgga

SEQ ID NO: 5949726 - DNA, 25 bp, Homo sapien
agccctgatatttaccaccttgaga

SEQ ID NO: 5949727 - DNA, 25 bp, Homo sapien
caaacttaggcgtggcccattgtgg

SEQ ID NO: 5949728 - DNA, 25 bp, Homo sapien
gcttggaatccataactactcgttt

SEQ ID NO: 5949729 - DNA, 25 bp, Homo sapien
ttacagcgctggagaagaggcccca

SEQ ID NO: 5949730 - DNA, 25 bp, Homo sapien
tttgaaaattggcaccattactaga

SEQ ID NO: 5949731 - DNA, 25 bp, Homo sapien
gatagatcttacaaaagatatatgc

SEQ ID NO: 5949732 - DNA, 25 bp, Homo sapien
attctgtatgggttgtattccctgc

SEQ ID NO: 5949733 - DNA, 25 bp, Homo sapien
gtcccatttgtcctcgtcctgttca

SEQ ID NO: 5949734 - DNA, 25 bp, Homo sapien
cttgtggaggttttgcgggtgtact

SEQ ID NO: 5949735 - DNA, 25 bp, Homo sapien
ttctccagtggtgtcccttctcgac

SEQ ID NO: 5949736 - DNA, 25 bp, Homo sapien
tggttcttcttgcccagctcagcaa

SEQ ID NO: 5949737 - DNA, 25 bp, Homo sapien
ccaagccctctatggataccggcac

SEQ ID NO: 5949738 - DNA, 25 bp, Homo sapien
gattgccattgctggacgtgaggct

SEQ ID NO: 5949739 - DNA, 25 bp, Homo sapien
taccacctttttccatacgaagaag

SEQ ID NO: 5949740 - DNA, 25 bp, Homo sapien
cataactactcgtttcttgaaactt

SEQ ID NO: 5949741 - DNA, 25 bp, Homo sapien
tctggtctagattggttcttcttgc

SEQ ID NO: 5949742 - DNA, 25 bp, Homo sapien
accttgagaagggggcaaatgatct

SEQ ID NO: 5949743 - DNA, 25 bp, Homo sapien
tgtggaggttttgcgggtgtacttc

SEQ ID NO: 5949744 - DNA, 25 bp, Homo sapien
attccctgctgtagagctatcctct

SEQ ID NO: 5949745 - DNA, 25 bp, Homo sapien
tcagtcaaaggttcgttaccacctt

SEQ ID NO: 5949746 - DNA, 25 bp, Homo sapien
aagctccaaacttaggcgtggccca

SEQ ID NO: 5949747 - DNA, 25 bp, Homo sapien
tatgggttgtattccctgctgtaga

SEQ ID NO: 5949748 - DNA, 25 bp, Homo sapien
agcaaaataagcttcgttcttctcc

SEQ ID NO: 5949749 - DNA, 25 bp, Homo sapien
gctcttcaaatactctatcttcgca

SEQ ID NO: 5949750 - DNA, 25 bp, Homo sapien
cgtcctgttcattcttcttatcgtt

SEQ ID NO: 5949751 - DNA, 25 bp, Homo sapien
acagcgctggagaagaggccccatc

SEQ ID NO: 5949752 - DNA, 25 bp, Homo sapien
tccatacgaagaagttcctccggtt

SEQ ID NO: 5949753 - DNA, 25 bp, Homo sapien
accattgaaatttttagtgaagtta

SEQ ID NO: 5949754 - DNA, 25 bp, Homo sapien
ttgcagatcgacggttctccagtgg

SEQ ID NO: 5949755 - DNA, 25 bp, Homo sapien
tgcagcggtttgagaggttgctgat

SEQ ID NO: 5949756 - DNA, 25 bp, Homo sapien
gccctctatggataccggcacattc

SEQ ID NO: 5949757 - DNA, 25 bp, Homo sapien
tgtatgggttgtattccctgctgta

SEQ ID NO: 5949758 - DNA, 25 bp, Homo sapien
ccaaagccctgatatttaccacctt

SEQ ID NO: 5949759 - DNA, 25 bp, Homo sapien
atcttttgatattctgtatgggttg

SEQ ID NO: 5949760 - DNA, 25 bp, Homo sapien
ttggaagcatcaaaatccaaatgct

SEQ ID NO: 5949761 - DNA, 25 bp, Homo sapien
cagaccgttcttgtggaggttttgc

SEQ ID NO: 5949762 - DNA, 25 bp, Homo sapien
gatccatagtgatagatcttacaaa

SEQ ID NO: 5949763 - DNA, 25 bp, Homo sapien
tcctccggtttaaactgatccatag

SEQ ID NO: 5949764 - DNA, 25 bp, Homo sapien
aatgttcccaaaggatcagcttgaa

SEQ ID NO: 5949765 - DNA, 25 bp, Homo sapien
tccatagtgatagatcttacaaaag

SEQ ID NO: 5949766 - DNA, 25 bp, Homo sapien
aggcaaatgaaagctccaaacttag

SEQ ID NO: 5949767 - DNA, 25 bp, Homo sapien
aagcttcgttcttctccttttgaaa

SEQ ID NO: 5949768 - DNA, 25 bp, Homo sapien
gtgtacttccaaagccctgatattt

SEQ ID NO: 5949769 - DNA, 25 bp, Homo sapien
caaaagacgcctgcgggtatctggg

SEQ ID NO: 5949770 - DNA, 25 bp, Homo sapien
caaaatccaaatgctcacgctcttc

SEQ ID NO: 5949771 - DNA, 25 bp, Homo sapien
ttggttacagcgctggagaagaggc

SEQ ID NO: 5949772 - DNA, 25 bp, Homo sapien
cgacggttctccagtggtgtccctt

SEQ ID NO: 5949773 - DNA, 25 bp, Homo sapien
ccggcacattcaaggcaaatgaaag

SEQ ID NO: 5949774 - DNA, 25 bp, Homo sapien
cactttttgtggtaaactcaggtca

SEQ ID NO: 5949775 - DNA, 25 bp, Homo sapien
gctggacgtgaggcttaataaccgt

SEQ ID NO: 5949776 - DNA, 25 bp, Homo sapien
gcccattgtggatttggcgcaccac

SEQ ID NO: 5949777 - DNA, 25 bp, Homo sapien
gcgacggggttatcgtatttcactt

SEQ ID NO: 5949778 - DNA, 25 bp, Homo sapien
aatattatgcgacttgaaccattca

SEQ ID NO: 5949779 - DNA, 25 bp, Homo sapien
tgggttgtattccctgctgtagagc

SEQ ID NO: 5949780 - DNA, 25 bp, Homo sapien
atctgggtccactttccaatctgac

SEQ ID NO: 5949781 - DNA, 25 bp, Homo sapien
taaactcaggtcaatattatgcgac

SEQ ID NO: 5949782 - DNA, 25 bp, Homo sapien
ggaatccataactactcgtttcttg

SEQ ID NO: 5949783 - DNA, 25 bp, Homo sapien
tttgatattctgtatgggttgtatt

SEQ ID NO: 5949784 - DNA, 25 bp, Homo sapien
tgttcccaaaggatcagcttgaaaa

SEQ ID NO: 5949785 - DNA, 25 bp, Homo sapien
cttttgaaaattggcaccattacta

SEQ ID NO: 5949786 - DNA, 25 bp, Homo sapien
atgcgacttgaaccattcagtcaaa

SEQ ID NO: 5949787 - DNA, 25 bp, Homo sapien
ttttgcgggtgtacttccaaagccc

SEQ ID NO: 5949788 - DNA, 25 bp, Homo sapien
catcctctgctcaatgttcccaaag

SEQ ID NO: 5949789 - DNA, 25 bp, Homo sapien
tctgcattaccattgaaatttttag

SEQ ID NO: 5949790 - DNA, 25 bp, Homo sapien
ttcttgtggaggttttgcgggtgta

SEQ ID NO: 5949791 - DNA, 25 bp, Homo sapien
tgttgcagatcgacggttctccagt

SEQ ID NO: 5949792 - DNA, 25 bp, Homo sapien
gttgctgataacttggaagcatcaa

SEQ ID NO: 5949793 - DNA, 25 bp, Homo sapien
gaaatcgtcccatttgtcctcgtcc

SEQ ID NO: 5949794 - DNA, 25 bp, Homo sapien
cattgctggacgtgaggcttaataa

SEQ ID NO: 5949795 - DNA, 25 bp, Homo sapien
atcgacggttctccagtggtgtccc

SEQ ID NO: 5949796 - DNA, 25 bp, Homo sapien
gggcaaatgatctggtctagattgg

SEQ ID NO: 5949797 - DNA, 25 bp, Homo sapien
tgaaccattcagtcaaaggttcgtt

SEQ ID NO: 5949798 - DNA, 25 bp, Homo sapien
cccaaaggatcagcttgaaaatttt

SEQ ID NO: 5949799 - DNA, 25 bp, Homo sapien
tcctcgtcctgttcattcttcttat

SEQ ID NO: 5949800 - DNA, 25 bp, Homo sapien
ctcgtcctgttcattcttcttatcg

SEQ ID NO: 5949801 - DNA, 25 bp, Homo sapien
cccagctcagcaaaataagcttcgt

SEQ ID NO: 5949802 - DNA, 25 bp, Homo sapien
tatatgcacaccaagccctctatgg

SEQ ID NO: 5949803 - DNA, 25 bp, Homo sapien
tcctctgctcaatgttcccaaagga

SEQ ID NO: 5949804 - DNA, 25 bp, Homo sapien
ttcgttcttctccttttgaaaattg

SEQ ID NO: 5949805 - DNA, 25 bp, Homo sapien
gacgtgaggcttaataaccgtttcg

SEQ ID NO: 5949806 - DNA, 25 bp, Homo sapien
attactagagtttgctggtgttgca

SEQ ID NO: 5949807 - DNA, 25 bp, Homo sapien
tttttccatacgaagaagttcctcc

SEQ ID NO: 5949808 - DNA, 25 bp, Homo sapien
gttaccacctttttccatacgaaga

SEQ ID NO: 5949809 - DNA, 25 bp, Homo sapien
ctccagtggtgtcccttctcgactt

SEQ ID NO: 5949810 - DNA, 25 bp, Homo sapien
acttccaaagccctgatatttacca

SEQ ID NO: 5949811 - DNA, 25 bp, Homo sapien
ttttctttataatcctctgcgacgg

SEQ ID NO: 5949812 - DNA, 25 bp, Homo sapien
tctccttttgaaaattggcaccatt

SEQ ID NO: 5949813 - DNA, 25 bp, Homo sapien
attgcaaaagacgcctgcgggtatc

SEQ ID NO: 5949814 - DNA, 25 bp, Homo sapien
gaagttcctccggtttaaactgatc

SEQ ID NO: 5949815 - DNA, 25 bp, Homo sapien
cccatttgtcctcgtcctgttcatt

SEQ ID NO: 5949816 - DNA, 25 bp, Homo sapien
cattcaaggcaaatgaaagctccaa

SEQ ID NO: 5949817 - DNA, 25 bp, Homo sapien
tagtgatagatcttacaaaagatat

SEQ ID NO: 5949818 - DNA, 25 bp, Homo sapien
atccaaatgctcacgctcttcaaat

SEQ ID NO: 5949819 - DNA, 25 bp, Homo sapien
aagtattgctggaccctgcagaccg

SEQ ID NO: 5949820 - DNA, 25 bp, Homo sapien
aactgatccatagtgatagatctta

SEQ ID NO: 5949821 - DNA, 25 bp, Homo sapien
tccaggctcaaagtattgctggacc

SEQ ID NO: 5949822 - DNA, 25 bp, Homo sapien
tgagaggttgctgataacttggaag

SEQ ID NO: 5949823 - DNA, 25 bp, Homo sapien
agtggtgtcccttctcgactttgag

SEQ ID NO: 5949824 - DNA, 25 bp, Homo sapien
caaaggatcagcttgaaaattttcc

SEQ ID NO: 5949825 - DNA, 25 bp, Homo sapien
ttgaaatttttagtgaagttactaa

SEQ ID NO: 5949826 - DNA, 25 bp, Homo sapien
caggtcaatattatgcgacttgaac

SEQ ID NO: 5949827 - DNA, 25 bp, Homo sapien
tgaggcttaataaccgtttcgttta

SEQ ID NO: 5949828 - DNA, 25 bp, Homo sapien
ctgtagagctatcctctgcattacc

SEQ ID NO: 5949829 - DNA, 25 bp, Homo sapien
tttgcaattgcaaaagacgcctgcg

SEQ ID NO: 5949830 - DNA, 25 bp, Homo sapien
tgatagcaaaagctttgaaccagtc

SEQ ID NO: 5949831 - DNA, 25 bp, Homo sapien
ctttgaaccagtctaggttggagtt

SEQ ID NO: 5949832 - DNA, 25 bp, Homo sapien
gagaattgagttatctaaatattac

SEQ ID NO: 5949833 - DNA, 25 bp, Homo sapien
accgaattggtcaacactctgagcg

SEQ ID NO: 5949834 - DNA, 25 bp, Homo sapien
cattttttaaagggttcttctgctg

SEQ ID NO: 5949835 - DNA, 25 bp, Homo sapien
aggaaataaagatacaagtggacga

SEQ ID NO: 5949836 - DNA, 25 bp, Homo sapien
ataaagacgaaaattccatatatct

SEQ ID NO: 5949837 - DNA, 25 bp, Homo sapien
atagcaaaagctttgaaccagtcta

SEQ ID NO: 5949838 - DNA, 25 bp, Homo sapien
cacaaacaacttttgctcaaatgca

SEQ ID NO: 5949839 - DNA, 25 bp, Homo sapien
acgatgattccgatttttctaaagg

SEQ ID NO: 5949840 - DNA, 25 bp, Homo sapien
tattcaatttatcgaccaggcacaa

SEQ ID NO: 5949841 - DNA, 25 bp, Homo sapien
gtctactattccctcagaaatcatc

SEQ ID NO: 5949842 - DNA, 25 bp, Homo sapien
agacgaaaattccatatatctcatc

SEQ ID NO: 5949843 - DNA, 25 bp, Homo sapien
cctgggtttgtgaaagaattcaaaa

SEQ ID NO: 5949844 - DNA, 25 bp, Homo sapien
caagaccgaattggtcaacactctg

SEQ ID NO: 5949845 - DNA, 25 bp, Homo sapien
taaaggtctaattattcaatttatc

SEQ ID NO: 5949846 - DNA, 25 bp, Homo sapien
cttgatagcaaaagctttgaaccag

SEQ ID NO: 5949847 - DNA, 25 bp, Homo sapien
aaagctttgaaccagtctaggttgg

SEQ ID NO: 5949848 - DNA, 25 bp, Homo sapien
gacgataaagacgaaaattccatat

SEQ ID NO: 5949849 - DNA, 25 bp, Homo sapien
tccgatttttctaaaggtctaatta

SEQ ID NO: 5949850 - DNA, 25 bp, Homo sapien
gaaccagtctaggttggagttcaaa

SEQ ID NO: 5949851 - DNA, 25 bp, Homo sapien
tccatatatctcatcttgatagcaa

SEQ ID NO: 5949852 - DNA, 25 bp, Homo sapien
tctatggatgacgatgattccgatt

SEQ ID NO: 5949853 - DNA, 25 bp, Homo sapien
ttaaagggttcttctgctgcattag

SEQ ID NO: 5949854 - DNA, 25 bp, Homo sapien
agaaaaatggaacatttcttcccca

SEQ ID NO: 5949855 - DNA, 25 bp, Homo sapien
ttatcgaccaggcacaaacaacttt

SEQ ID NO: 5949856 - DNA, 25 bp, Homo sapien
gacaatctgggccattttttaaagg

SEQ ID NO: 5949857 - DNA, 25 bp, Homo sapien
tattccctcagaaatcatcaattgg

SEQ ID NO: 5949858 - DNA, 25 bp, Homo sapien
aataaagatacaagtggacgataaa

SEQ ID NO: 5949859 - DNA, 25 bp, Homo sapien
caaagaattgcctgggtttgtgaaa

SEQ ID NO: 5949860 - DNA, 25 bp, Homo sapien
ttttttaaagggttcttctgctgca

SEQ ID NO: 5949861 - DNA, 25 bp, Homo sapien
ttttgctcaaatgcaacgacagctg

SEQ ID NO: 5949862 - DNA, 25 bp, Homo sapien
tcaaactggcgagaattgagttatc

SEQ ID NO: 5949863 - DNA, 25 bp, Homo sapien
gaattgagttatctaaatattacaa

SEQ ID NO: 5949864 - DNA, 25 bp, Homo sapien
tgggtttgtgaaagaattcaaaact

SEQ ID NO: 5949865 - DNA, 25 bp, Homo sapien
tcatcaattggaccatcttaaatga

SEQ ID NO: 5949866 - DNA, 25 bp, Homo sapien
ttgaaccagtctaggttggagttca

SEQ ID NO: 5949867 - DNA, 25 bp, Homo sapien
gctcaaatgcaacgacagctggacg

SEQ ID NO: 5949868 - DNA, 25 bp, Homo sapien
gaccatcttaaatgaaattatatct

SEQ ID NO: 5949869 - DNA, 25 bp, Homo sapien
caaacaacttttgctcaaatgcaac

SEQ ID NO: 5949870 - DNA, 25 bp, Homo sapien
atgacgaggaaataaagatacaagt

SEQ ID NO: 5949871 - DNA, 25 bp, Homo sapien
ggtttgtgaaagaattcaaaacttg

SEQ ID NO: 5949872 - DNA, 25 bp, Homo sapien
atctaaatattacaacacaaaccta

SEQ ID NO: 5949873 - DNA, 25 bp, Homo sapien
ctgcattaggcttacaaagaattgc

SEQ ID NO: 5949874 - DNA, 25 bp, Homo sapien
caggcacaaacaacttttgctcaaa

SEQ ID NO: 5949875 - DNA, 25 bp, Homo sapien
agttatctaaatattacaacacaaa

SEQ ID NO: 5949876 - DNA, 25 bp, Homo sapien
attggaccatcttaaatgaaattat

SEQ ID NO: 5949877 - DNA, 25 bp, Homo sapien
aaatcttaccgaattagacaatctg

SEQ ID NO: 5949878 - DNA, 25 bp, Homo sapien
caatattgatgaagatgacgaggaa

SEQ ID NO: 5949879 - DNA, 25 bp, Homo sapien
aagaattgcctgggtttgtgaaaga

SEQ ID NO: 5949880 - DNA, 25 bp, Homo sapien
atttatcgaccaggcacaaacaact

SEQ ID NO: 5949881 - DNA, 25 bp, Homo sapien
acttttgctcaaatgcaacgacagc

SEQ ID NO: 5949882 - DNA, 25 bp, Homo sapien
aggttggagttcaaactggcgagaa

SEQ ID NO: 5949883 - DNA, 25 bp, Homo sapien
tgtgaaagaattcaaaacttgggaa

SEQ ID NO: 5949884 - DNA, 25 bp, Homo sapien
atgaagatgacgaggaaataaagat

SEQ ID NO: 5949885 - DNA, 25 bp, Homo sapien
agatgacgaggaaataaagatacaa

SEQ ID NO: 5949886 - DNA, 25 bp, Homo sapien
attattcaatttatcgaccaggcac

SEQ ID NO: 5949887 - DNA, 25 bp, Homo sapien
gcattaggcttacaaagaattgcct

SEQ ID NO: 5949888 - DNA, 25 bp, Homo sapien
ttggtcaacactctgagcgataaat

SEQ ID NO: 5949889 - DNA, 25 bp, Homo sapien
agtggacgataaagacgaaaattcc

SEQ ID NO: 5949890 - DNA, 25 bp, Homo sapien
ccctcagaaatcatcaattggacca

SEQ ID NO: 5949891 - DNA, 25 bp, Homo sapien
attaggcttacaaagaattgcctgg

SEQ ID NO: 5949892 - DNA, 25 bp, Homo sapien
aaattatatctatggatgacgatga

SEQ ID NO: 5949893 - DNA, 25 bp, Homo sapien
tgatgaagatgacgaggaaataaag

SEQ ID NO: 5949894 - DNA, 25 bp, Homo sapien
cttctgctgcattaggcttacaaag

SEQ ID NO: 5949895 - DNA, 25 bp, Homo sapien
attgatgaagatgacgaggaaataa

SEQ ID NO: 5949896 - DNA, 25 bp, Homo sapien
gttcaaactggcgagaattgagtta

SEQ ID NO: 5949897 - DNA, 25 bp, Homo sapien
tgagttatctaaatattacaacaca

SEQ ID NO: 5949898 - DNA, 25 bp, Homo sapien
attatatctatggatgacgatgatt

SEQ ID NO: 5949899 - DNA, 25 bp, Homo sapien
gatacaagtggacgataaagacgaa

SEQ ID NO: 5949900 - DNA, 25 bp, Homo sapien
taccgaattagacaatctgggccat

SEQ ID NO: 5949901 - DNA, 25 bp, Homo sapien
aacaagaccgaattggtcaacactc

SEQ ID NO: 5949902 - DNA, 25 bp, Homo sapien
cgaccaggcacaaacaacttttgct

SEQ ID NO: 5949903 - DNA, 25 bp, Homo sapien
gcaacgacagctggacggtgaaaaa

SEQ ID NO: 5949904 - DNA, 25 bp, Homo sapien
aagatacaagtggacgataaagacg

SEQ ID NO: 5949905 - DNA, 25 bp, Homo sapien
agcaaaagctttgaaccagtctagg

SEQ ID NO: 5949906 - DNA, 25 bp, Homo sapien
cagaaatcatcaattggaccatctt

SEQ ID NO: 5949907 - DNA, 25 bp, Homo sapien
atattgatgaagatgacgaggaaat

SEQ ID NO: 5949908 - DNA, 25 bp, Homo sapien
tatctatggatgacgatgattccga

SEQ ID NO: 5949909 - DNA, 25 bp, Homo sapien
aatgaaattatatctatggatgacg

SEQ ID NO: 5949910 - DNA, 25 bp, Homo sapien
tggatgacgatgattccgatttttc

SEQ ID NO: 5949911 - DNA, 25 bp, Homo sapien
tgaaagaattcaaaacttgggaaga

SEQ ID NO: 5949912 - DNA, 25 bp, Homo sapien
tggaacatttcttccccaacaagac

SEQ ID NO: 5949913 - DNA, 25 bp, Homo sapien
atcaatattgatgaagatgacgagg

SEQ ID NO: 5949914 - DNA, 25 bp, Homo sapien
atgcaacgacagctggacggtgaaa

SEQ ID NO: 5949915 - DNA, 25 bp, Homo sapien
ttcaaaacttgggaagaaaaatgga

SEQ ID NO: 5949916 - DNA, 25 bp, Homo sapien
tggaccatcttaaatgaaattatat

SEQ ID NO: 5949917 - DNA, 25 bp, Homo sapien
caattggaccatcttaaatgaaatt

SEQ ID NO: 5949918 - DNA, 25 bp, Homo sapien
ttccctcagaaatcatcaattggac

SEQ ID NO: 5949919 - DNA, 25 bp, Homo sapien
atcgaccaggcacaaacaacttttg

SEQ ID NO: 5949920 - DNA, 25 bp, Homo sapien
cttaaatgaaattatatctatggat

SEQ ID NO: 5949921 - DNA, 25 bp, Homo sapien
taaagatacaagtggacgataaaga

SEQ ID NO: 5949922 - DNA, 25 bp, Homo sapien
ttttaaagggttcttctgctgcatt

SEQ ID NO: 5949923 - DNA, 25 bp, Homo sapien
tctcatcttgatagcaaaagctttg

SEQ ID NO: 5949924 - DNA, 25 bp, Homo sapien
attgagttatctaaatattacaaca

SEQ ID NO: 5949925 - DNA, 25 bp, Homo sapien
gaacatttcttccccaacaagaccg

SEQ ID NO: 5949926 - DNA, 25 bp, Homo sapien
ttcaatttatcgaccaggcacaaac

SEQ ID NO: 5949927 - DNA, 25 bp, Homo sapien
caagtggacgataaagacgaaaatt

SEQ ID NO: 5949928 - DNA, 25 bp, Homo sapien
acatttcttccccaacaagaccgaa

SEQ ID NO: 5949929 - DNA, 25 bp, Homo sapien
gaatcaatattgatgaagatgacga

SEQ ID NO: 5949930 - DNA, 25 bp, Homo sapien
atcaattggaccatcttaaatgaaa

SEQ ID NO: 5949931 - DNA, 25 bp, Homo sapien
tggacggtgaaaaaaatcttaccga

SEQ ID NO: 5949932 - DNA, 25 bp, Homo sapien
gaattagacaatctgggccattttt

SEQ ID NO: 5949933 - DNA, 25 bp, Homo sapien
tacaagtggacgataaagacgaaaa

SEQ ID NO: 5949934 - DNA, 25 bp, Homo sapien
cttaccgaattagacaatctgggcc

SEQ ID NO: 5949935 - DNA, 25 bp, Homo sapien
ccatcttaaatgaaattatatctat

SEQ ID NO: 5949936 - DNA, 25 bp, Homo sapien
cactctgagcgataaatcgattatt

SEQ ID NO: 5949937 - DNA, 25 bp, Homo sapien
taaatgaaattatatctatggatga

SEQ ID NO: 5949938 - DNA, 25 bp, Homo sapien
gccattttttaaagggttcttctgc

SEQ ID NO: 5949939 - DNA, 25 bp, Homo sapien
caacttttgctcaaatgcaacgaca

SEQ ID NO: 5949940 - DNA, 25 bp, Homo sapien
taaatcgattattaatggaatcaat

SEQ ID NO: 5949941 - DNA, 25 bp, Homo sapien
tgaaattatatctatggatgacgat

SEQ ID NO: 5949942 - DNA, 25 bp, Homo sapien
tttttctaaaggtctaattattcaa

SEQ ID NO: 5949943 - DNA, 25 bp, Homo sapien
cgaattggtcaacactctgagcgat

SEQ ID NO: 5949944 - DNA, 25 bp, Homo sapien
aatcatcaattggaccatcttaaat

SEQ ID NO: 5949945 - DNA, 25 bp, Homo sapien
tctaaaggtctaattattcaattta

SEQ ID NO: 5949946 - DNA, 25 bp, Homo sapien
ggtcaacactctgagcgataaatcg

SEQ ID NO: 5949947 - DNA, 25 bp, Homo sapien
tctgctgcattaggcttacaaagaa

SEQ ID NO: 5949948 - DNA, 25 bp, Homo sapien
tggagttcaaactggcgagaattga

SEQ ID NO: 5949949 - DNA, 25 bp, Homo sapien
ctcagaaatcatcaattggaccatc

SEQ ID NO: 5949950 - DNA, 25 bp, Homo sapien
tgattccgatttttctaaaggtcta

SEQ ID NO: 5949951 - DNA, 25 bp, Homo sapien
ttccccaacaagaccgaattggtca

SEQ ID NO: 5949952 - DNA, 25 bp, Homo sapien
taggcttacaaagaattgcctgggt

SEQ ID NO: 5949953 - DNA, 25 bp, Homo sapien
aacactctgagcgataaatcgatta

SEQ ID NO: 5949954 - DNA, 25 bp, Homo sapien
gaattgcctgggtttgtgaaagaat

SEQ ID NO: 5949955 - DNA, 25 bp, Homo sapien
gcgataaatcgattattaatggaat

SEQ ID NO: 5949956 - DNA, 25 bp, Homo sapien
ccccaacaagaccgaattggtcaac

SEQ ID NO: 5949957 - DNA, 25 bp, Homo sapien
cgaggaaataaagatacaagtggac

SEQ ID NO: 5949958 - DNA, 25 bp, Homo sapien
ttcttctgctgcattaggcttacaa

SEQ ID NO: 5949959 - DNA, 25 bp, Homo sapien
tacaaagaattgcctgggtttgtga

SEQ ID NO: 5949960 - DNA, 25 bp, Homo sapien
ccgaattagacaatctgggccattt

SEQ ID NO: 5949961 - DNA, 25 bp, Homo sapien
ctactattccctcagaaatcatcaa

SEQ ID NO: 5949962 - DNA, 25 bp, Homo sapien
atcttgatagcaaaagctttgaacc

SEQ ID NO: 5949963 - DNA, 25 bp, Homo sapien
taattattcaatttatcgaccaggc

SEQ ID NO: 5949964 - DNA, 25 bp, Homo sapien
tggcgagaattgagttatctaaata

SEQ ID NO: 5949965 - DNA, 25 bp, Homo sapien
ggcacaaacaacttttgctcaaatg

SEQ ID NO: 5949966 - DNA, 25 bp, Homo sapien
gatgattccgatttttctaaaggtc

SEQ ID NO: 5949967 - DNA, 25 bp, Homo sapien
tgacgatgattccgatttttctaaa

SEQ ID NO: 5949968 - DNA, 25 bp, Homo sapien
ctaaatattacaacacaaacctata

SEQ ID NO: 5949969 - DNA, 25 bp, Homo sapien
tcaacactctgagcgataaatcgat

SEQ ID NO: 5949970 - DNA, 25 bp, Homo sapien
aacaacttttgctcaaatgcaacga

SEQ ID NO: 5949971 - DNA, 25 bp, Homo sapien
cttacaaagaattgcctgggtttgt

SEQ ID NO: 5949972 - DNA, 25 bp, Homo sapien
ttgctcaaatgcaacgacagctgga

SEQ ID NO: 5949973 - DNA, 25 bp, Homo sapien
ctgagcgataaatcgattattaatg

SEQ ID NO: 5949974 - DNA, 25 bp, Homo sapien
tagacaatctgggccattttttaaa

SEQ ID NO: 5949975 - DNA, 25 bp, Homo sapien
tatatctcatcttgatagcaaaagc

SEQ ID NO: 5949976 - DNA, 25 bp, Homo sapien
gaaatcatcaattggaccatcttaa

SEQ ID NO: 5949977 - DNA, 25 bp, Homo sapien
ttatctaaatattacaacacaaacc

SEQ ID NO: 5949978 - DNA, 25 bp, Homo sapien
gtgaaaaaaatcttaccgaattaga

SEQ ID NO: 5949979 - DNA, 25 bp, Homo sapien
cgacagctggacggtgaaaaaaatc

SEQ ID NO: 5949980 - DNA, 25 bp, Homo sapien
gagttcaaactggcgagaattgagt

SEQ ID NO: 5949981 - DNA, 25 bp, Homo sapien
aaagggttcttctgctgcattaggc

SEQ ID NO: 5949982 - DNA, 25 bp, Homo sapien
aatggaacatttcttccccaacaag

SEQ ID NO: 5949983 - DNA, 25 bp, Homo sapien
gaaaattccatatatctcatcttga

SEQ ID NO: 5949984 - DNA, 25 bp, Homo sapien
gtctaggttggagttcaaactggcg

SEQ ID NO: 5949985 - DNA, 25 bp, Homo sapien
atgtctactattccctcagaaatca

SEQ ID NO: 5949986 - DNA, 25 bp, Homo sapien
attagacaatctgggccatttttta

SEQ ID NO: 5949987 - DNA, 25 bp, Homo sapien
tcatcttgatagcaaaagctttgaa

SEQ ID NO: 5949988 - DNA, 25 bp, Homo sapien
tgctgcattaggcttacaaagaatt

SEQ ID NO: 5949989 - DNA, 25 bp, Homo sapien
gaaataaagatacaagtggacgata

SEQ ID NO: 5949990 - DNA, 25 bp, Homo sapien
tctaattattcaatttatcgaccag

SEQ ID NO: 5949991 - DNA, 25 bp, Homo sapien
caatttatcgaccaggcacaaacaa

SEQ ID NO: 5949992 - DNA, 25 bp, Homo sapien
caaaagctttgaaccagtctaggtt

SEQ ID NO: 5949993 - DNA, 25 bp, Homo sapien
atcttaccgaattagacaatctggg

SEQ ID NO: 5949994 - DNA, 25 bp, Homo sapien
aaggtctaattattcaatttatcga

SEQ ID NO: 5949995 - DNA, 25 bp, Homo sapien
ctaggttggagttcaaactggcgag

SEQ ID NO: 5949996 - DNA, 25 bp, Homo sapien
ccaacaagaccgaattggtcaacac

SEQ ID NO: 5949997 - DNA, 25 bp, Homo sapien
tcttccccaacaagaccgaattggt

SEQ ID NO: 5949998 - DNA, 25 bp, Homo sapien
catatatctcatcttgatagcaaaa

SEQ ID NO: 5949999 - DNA, 25 bp, Homo sapien
cttgggaagaaaaatggaacatttc

SEQ ID NO: 5950000 - DNA, 25 bp, Homo sapien
acagctggacggtgaaaaaaatctt

SEQ ID NO: 5950001 - DNA, 25 bp, Homo sapien
agggttcttctgctgcattaggctt

SEQ ID NO: 5950002 - DNA, 25 bp, Homo sapien
agaccgaattggtcaacactctgag

SEQ ID NO: 5950003 - DNA, 25 bp, Homo sapien
cgataaagacgaaaattccatatat

SEQ ID NO: 5950004 - DNA, 25 bp, Homo sapien
tttctaaaggtctaattattcaatt

SEQ ID NO: 5950005 - DNA, 25 bp, Homo sapien
agctttgaaccagtctaggttggag

SEQ ID NO: 5950006 - DNA, 25 bp, Homo sapien
gaagatgacgaggaaataaagatac

SEQ ID NO: 5950007 - DNA, 25 bp, Homo sapien
cagtctaggttggagttcaaactgg

SEQ ID NO: 5950008 - DNA, 25 bp, Homo sapien
tgcctgggtttgtgaaagaattcaa

SEQ ID NO: 5950009 - DNA, 25 bp, Homo sapien
attgcctgggtttgtgaaagaattc

SEQ ID NO: 5950010 - DNA, 25 bp, Homo sapien
tatatctatggatgacgatgattcc

SEQ ID NO: 5950011 - DNA, 25 bp, Homo sapien
gaagaaaaatggaacatttcttccc

SEQ ID NO: 5950012 - DNA, 25 bp, Homo sapien
tttcttccccaacaagaccgaattg

SEQ ID NO: 5950013 - DNA, 25 bp, Homo sapien
aaattccatatatctcatcttgata

SEQ ID NO: 5950014 - DNA, 25 bp, Homo sapien
ctctgagcgataaatcgattattaa

SEQ ID NO: 5950015 - DNA, 25 bp, Homo sapien
attccatatatctcatcttgatagc

SEQ ID NO: 5950016 - DNA, 25 bp, Homo sapien
aattggtcaacactctgagcgataa

SEQ ID NO: 5950017 - DNA, 25 bp, Homo sapien
accaggcacaaacaacttttgctca

SEQ ID NO: 5950018 - DNA, 25 bp, Homo sapien
tggacgataaagacgaaaattccat

SEQ ID NO: 5950019 - DNA, 25 bp, Homo sapien
ggcttacaaagaattgcctgggttt

SEQ ID NO: 5950020 - DNA, 25 bp, Homo sapien
gatttttctaaaggtctaattattc

SEQ ID NO: 5950021 - DNA, 25 bp, Homo sapien
aaaaatcttaccgaattagacaatc

SEQ ID NO: 5950022 - DNA, 25 bp, Homo sapien
tcaaatgcaacgacagctggacggt

SEQ ID NO: 5950023 - DNA, 25 bp, Homo sapien
tggaatcaatattgatgaagatgac

SEQ ID NO: 5950024 - DNA, 25 bp, Homo sapien
aaactggcgagaattgagttatcta

SEQ ID NO: 5950025 - DNA, 25 bp, Homo sapien
gaaaaaaatcttaccgaattagaca

SEQ ID NO: 5950026 - DNA, 25 bp, Homo sapien
ggtctaattattcaatttatcgacc

SEQ ID NO: 5950027 - DNA, 25 bp, Homo sapien
actattccctcagaaatcatcaatt

SEQ ID NO: 5950028 - DNA, 25 bp, Homo sapien
aaaatggaacatttcttccccaaca

SEQ ID NO: 5950029 - DNA, 25 bp, Homo sapien
accagtctaggttggagttcaaact

SEQ ID NO: 5950030 - DNA, 25 bp, Homo sapien
acgaaaattccatatatctcatctt

SEQ ID NO: 5950031 - DNA, 25 bp, Homo sapien
tatggatgacgatgattccgatttt

SEQ ID NO: 5950032 - DNA, 25 bp, Homo sapien
tttgtgaaagaattcaaaacttggg

SEQ ID NO: 5950033 - DNA, 25 bp, Homo sapien
agctggacggtgaaaaaaatcttac

SEQ ID NO: 5950034 - DNA, 25 bp, Homo sapien
gagcgataaatcgattattaatgga

SEQ ID NO: 5950035 - DNA, 25 bp, Homo sapien
gatgacgatgattccgatttttcta

SEQ ID NO: 5950036 - DNA, 25 bp, Homo sapien
aacgacagctggacggtgaaaaaaa

SEQ ID NO: 5950037 - DNA, 25 bp, Homo sapien
aaagacgaaaattccatatatctca

SEQ ID NO: 5950038 - DNA, 25 bp, Homo sapien
atcttaaatgaaattatatctatgg

SEQ ID NO: 5950039 - DNA, 25 bp, Homo sapien
tatctcatcttgatagcaaaagctt

SEQ ID NO: 5950040 - DNA, 25 bp, Homo sapien
gataaatcgattattaatggaatca

SEQ ID NO: 5950041 - DNA, 25 bp, Homo sapien
tcgattattaatggaatcaatattg

SEQ ID NO: 5950042 - DNA, 25 bp, Homo sapien
ggttcttctgctgcattaggcttac

SEQ ID NO: 5950043 - DNA, 25 bp, Homo sapien
gttggagttcaaactggcgagaatt

SEQ ID NO: 5950044 - DNA, 25 bp, Homo sapien
gacgaggaaataaagatacaagtgg

SEQ ID NO: 5950045 - DNA, 25 bp, Homo sapien
aaatgcaacgacagctggacggtga

SEQ ID NO: 5950046 - DNA, 25 bp, Homo sapien
actggcgagaattgagttatctaaa

SEQ ID NO: 5950047 - DNA, 25 bp, Homo sapien
gcgagaattgagttatctaaatatt

SEQ ID NO: 5950048 - DNA, 25 bp, Homo sapien
tccagctgtcgttgcatttgagcaa

SEQ ID NO: 5950049 - DNA, 25 bp, Homo sapien
aggcaattctttgtaagcctaatgc

SEQ ID NO: 5950050 - DNA, 25 bp, Homo sapien
taaattgaataattagacctttaga

SEQ ID NO: 5950051 - DNA, 25 bp, Homo sapien
atggcccagattgtctaattcggta

SEQ ID NO: 5950052 - DNA, 25 bp, Homo sapien
aatgcagcagaagaaccctttaaaa

SEQ ID NO: 5950053 - DNA, 25 bp, Homo sapien
aagatggtccaattgatgatttctg

SEQ ID NO: 5950054 - DNA, 25 bp, Homo sapien
ctttatttcctcgtcatcttcatca

SEQ ID NO: 5950055 - DNA, 25 bp, Homo sapien
aattgatgatttctgagggaatagt

SEQ ID NO: 5950056 - DNA, 25 bp, Homo sapien
aaaatcggaatcatcgtcatccata

SEQ ID NO: 5950057 - DNA, 25 bp, Homo sapien
atccatagatataatttcatttaag

SEQ ID NO: 5950058 - DNA, 25 bp, Homo sapien
tgaccaattcggtcttgttggggaa

SEQ ID NO: 5950059 - DNA, 25 bp, Homo sapien
tttaaaaaatggcccagattgtcta

SEQ ID NO: 5950060 - DNA, 25 bp, Homo sapien
gttgaccaattcggtcttgttgggg

SEQ ID NO: 5950061 - DNA, 25 bp, Homo sapien
ttgtgcctggtcgataaattgaata

SEQ ID NO: 5950062 - DNA, 25 bp, Homo sapien
ttgctatcaagatgagatatatgga

SEQ ID NO: 5950063 - DNA, 25 bp, Homo sapien
ggtcgataaattgaataattagacc

SEQ ID NO: 5950064 - DNA, 25 bp, Homo sapien
ttttgaattctttcacaaacccagg

SEQ ID NO: 5950065 - DNA, 25 bp, Homo sapien
tcggtaagatttttttcaccgtcca

SEQ ID NO: 5950066 - DNA, 25 bp, Homo sapien
gactggttcaaagcttttgctatca

SEQ ID NO: 5950067 - DNA, 25 bp, Homo sapien
taattagacctttagaaaaatcgga

SEQ ID NO: 5950068 - DNA, 25 bp, Homo sapien
ggtttgtgttgtaatatttagataa

SEQ ID NO: 5950069 - DNA, 25 bp, Homo sapien
cgtcatccatagatataatttcatt

SEQ ID NO: 5950070 - DNA, 25 bp, Homo sapien
aagatgagatatatggaattttcgt

SEQ ID NO: 5950071 - DNA, 25 bp, Homo sapien
ttcgtctttatcgtccacttgtatc

SEQ ID NO: 5950072 - DNA, 25 bp, Homo sapien
ttgtttgtgcctggtcgataaattg

SEQ ID NO: 5950073 - DNA, 25 bp, Homo sapien
aatcggaatcatcgtcatccataga

SEQ ID NO: 5950074 - DNA, 25 bp, Homo sapien
tttgagcaaaagttgtttgtgcctg

SEQ ID NO: 5950075 - DNA, 25 bp, Homo sapien
aatcatcgtcatccatagatataat

SEQ ID NO: 5950076 - DNA, 25 bp, Homo sapien
tagactggttcaaagcttttgctat

SEQ ID NO: 5950077 - DNA, 25 bp, Homo sapien
gcaattctttgtaagcctaatgcag

SEQ ID NO: 5950078 - DNA, 25 bp, Homo sapien
taaaaaatggcccagattgtctaat

SEQ ID NO: 5950079 - DNA, 25 bp, Homo sapien
cctttagaaaaatcggaatcatcgt

SEQ ID NO: 5950080 - DNA, 25 bp, Homo sapien
gatgagatatatggaattttcgtct

SEQ ID NO: 5950081 - DNA, 25 bp, Homo sapien
aagcctaatgcagcagaagaaccct

SEQ ID NO: 5950082 - DNA, 25 bp, Homo sapien
ttcccaagttttgaattctttcaca

SEQ ID NO: 5950083 - DNA, 25 bp, Homo sapien
agatatatggaattttcgtctttat

SEQ ID NO: 5950084 - DNA, 25 bp, Homo sapien
ctcgccagtttgaactccaacctag

SEQ ID NO: 5950085 - DNA, 25 bp, Homo sapien
atatggaattttcgtctttatcgtc

SEQ ID NO: 5950086 - DNA, 25 bp, Homo sapien
tcatttaagatggtccaattgatga

SEQ ID NO: 5950087 - DNA, 25 bp, Homo sapien
tcaagatgagatatatggaattttc

SEQ ID NO: 5950088 - DNA, 25 bp, Homo sapien
ttgaattctttcacaaacccaggca

SEQ ID NO: 5950089 - DNA, 25 bp, Homo sapien
catttgagcaaaagttgtttgtgcc

SEQ ID NO: 5950090 - DNA, 25 bp, Homo sapien
atagatataatttcatttaagatgg

SEQ ID NO: 5950091 - DNA, 25 bp, Homo sapien
cctttaaaaaatggcccagattgtc

SEQ ID NO: 5950092 - DNA, 25 bp, Homo sapien
ttttcgtctttatcgtccacttgta

SEQ ID NO: 5950093 - DNA, 25 bp, Homo sapien
ttcggtcttgttggggaagaaatgt

SEQ ID NO: 5950094 - DNA, 25 bp, Homo sapien
taactcaattctcgccagtttgaac

SEQ ID NO: 5950095 - DNA, 25 bp, Homo sapien
aaatggcccagattgtctaattcgg

SEQ ID NO: 5950096 - DNA, 25 bp, Homo sapien
ctggtcgataaattgaataattaga

SEQ ID NO: 5950097 - DNA, 25 bp, Homo sapien
ttcaaagcttttgctatcaagatga

SEQ ID NO: 5950098 - DNA, 25 bp, Homo sapien
tgagcaaaagttgtttgtgcctggt

SEQ ID NO: 5950099 - DNA, 25 bp, Homo sapien
acttgtatctttatttcctcgtcat

SEQ ID NO: 5950100 - DNA, 25 bp, Homo sapien
tgcatttgagcaaaagttgtttgtg

SEQ ID NO: 5950101 - DNA, 25 bp, Homo sapien
ccaattgatgatttctgagggaata

SEQ ID NO: 5950102 - DNA, 25 bp, Homo sapien
tagacctttagaaaaatcggaatca

SEQ ID NO: 5950103 - DNA, 25 bp, Homo sapien
gaataattagacctttagaaaaatc

SEQ ID NO: 5950104 - DNA, 25 bp, Homo sapien
cgtctttatcgtccacttgtatctt

SEQ ID NO: 5950105 - DNA, 25 bp, Homo sapien
tcgtccacttgtatctttatttcct

SEQ ID NO: 5950106 - DNA, 25 bp, Homo sapien
tttcatttaagatggtccaattgat

SEQ ID NO: 5950107 - DNA, 25 bp, Homo sapien
ttctttgtaagcctaatgcagcaga

SEQ ID NO: 5950108 - DNA, 25 bp, Homo sapien
gataactcaattctcgccagtttga

SEQ ID NO: 5950109 - DNA, 25 bp, Homo sapien
tagaaaaatcggaatcatcgtcatc

SEQ ID NO: 5950110 - DNA, 25 bp, Homo sapien
ctttgtaagcctaatgcagcagaag

SEQ ID NO: 5950111 - DNA, 25 bp, Homo sapien
ggttcaaagcttttgctatcaagat

SEQ ID NO: 5950112 - DNA, 25 bp, Homo sapien
gtaatatttagataactcaattctc

SEQ ID NO: 5950113 - DNA, 25 bp, Homo sapien
cagattgtctaattcggtaagattt

SEQ ID NO: 5950114 - DNA, 25 bp, Homo sapien
gcctggtcgataaattgaataatta

SEQ ID NO: 5950115 - DNA, 25 bp, Homo sapien
tgaactccaacctagactggttcaa

SEQ ID NO: 5950116 - DNA, 25 bp, Homo sapien
taggtttgtgttgtaatatttagat

SEQ ID NO: 5950117 - DNA, 25 bp, Homo sapien
atttatcgctcagagtgttgaccaa

SEQ ID NO: 5950118 - DNA, 25 bp, Homo sapien
ctcagagtgttgaccaattcggtct

SEQ ID NO: 5950119 - DNA, 25 bp, Homo sapien
cattaataatcgatttatcgctcag

SEQ ID NO: 5950120 - DNA, 25 bp, Homo sapien
tcaccgtccagctgtcgttgcattt

SEQ ID NO: 5950121 - DNA, 25 bp, Homo sapien
tttttttcaccgtccagctgtcgtt

SEQ ID NO: 5950122 - DNA, 25 bp, Homo sapien
gtatctttatttcctcgtcatcttc

SEQ ID NO: 5950123 - DNA, 25 bp, Homo sapien
atcgatttatcgctcagagtgttga

SEQ ID NO: 5950124 - DNA, 25 bp, Homo sapien
tgatttctgagggaatagtagacat

SEQ ID NO: 5950125 - DNA, 25 bp, Homo sapien
aattctcgccagtttgaactccaac

SEQ ID NO: 5950126 - DNA, 25 bp, Homo sapien
tttgaactccaacctagactggttc

SEQ ID NO: 5950127 - DNA, 25 bp, Homo sapien
attccattaataatcgatttatcgc

SEQ ID NO: 5950128 - DNA, 25 bp, Homo sapien
gaattctttcacaaacccaggcaat

SEQ ID NO: 5950129 - DNA, 25 bp, Homo sapien
aagatttttttcaccgtccagctgt

SEQ ID NO: 5950130 - DNA, 25 bp, Homo sapien
gtcatcttcatcaatattgattcca

SEQ ID NO: 5950131 - DNA, 25 bp, Homo sapien
tgtctaattcggtaagatttttttc

SEQ ID NO: 5950132 - DNA, 25 bp, Homo sapien
gctgtcgttgcatttgagcaaaagt

SEQ ID NO: 5950133 - DNA, 25 bp, Homo sapien
tgtgttgtaatatttagataactca

SEQ ID NO: 5950134 - DNA, 25 bp, Homo sapien
ccatagatataatttcatttaagat

SEQ ID NO: 5950135 - DNA, 25 bp, Homo sapien
atttaagatggtccaattgatgatt

SEQ ID NO: 5950136 - DNA, 25 bp, Homo sapien
tatcaagatgagatatatggaattt

SEQ ID NO: 5950137 - DNA, 25 bp, Homo sapien
tgtcgttgcatttgagcaaaagttg

SEQ ID NO: 5950138 - DNA, 25 bp, Homo sapien
tagataactcaattctcgccagttt

SEQ ID NO: 5950139 - DNA, 25 bp, Homo sapien
gggaagaaatgttccatttttcttc

SEQ ID NO: 5950140 - DNA, 25 bp, Homo sapien
gtccaattgatgatttctgagggaa

SEQ ID NO: 5950141 - DNA, 25 bp, Homo sapien
attgattccattaataatcgattta

SEQ ID NO: 5950142 - DNA, 25 bp, Homo sapien
cagctgtcgttgcatttgagcaaaa

SEQ ID NO: 5950143 - DNA, 25 bp, Homo sapien
tatttagataactcaattctcgcca

SEQ ID NO: 5950144 - DNA, 25 bp, Homo sapien
aatttcatttaagatggtccaattg

SEQ ID NO: 5950145 - DNA, 25 bp, Homo sapien
gatttttttcaccgtccagctgtcg

SEQ ID NO: 5950146 - DNA, 25 bp, Homo sapien
gaaaaatcggaatcatcgtcatcca

SEQ ID NO: 5950147 - DNA, 25 bp, Homo sapien
cggtcttgttggggaagaaatgttc

SEQ ID NO: 5950148 - DNA, 25 bp, Homo sapien
ttgtaatatttagataactcaattc

SEQ ID NO: 5950149 - DNA, 25 bp, Homo sapien
cgtccagctgtcgttgcatttgagc

SEQ ID NO: 5950150 - DNA, 25 bp, Homo sapien
ttgtatctttatttcctcgtcatct

SEQ ID NO: 5950151 - DNA, 25 bp, Homo sapien
gtaagatttttttcaccgtccagct

SEQ ID NO: 5950152 - DNA, 25 bp, Homo sapien
agtttgaactccaacctagactggt

SEQ ID NO: 5950153 - DNA, 25 bp, Homo sapien
cctagactggttcaaagcttttgct

SEQ ID NO: 5950154 - DNA, 25 bp, Homo sapien
tctttatcgtccacttgtatcttta

SEQ ID NO: 5950155 - DNA, 25 bp, Homo sapien
cccagattgtctaattcggtaagat

SEQ ID NO: 5950156 - DNA, 25 bp, Homo sapien
tcaattctcgccagtttgaactcca

SEQ ID NO: 5950157 - DNA, 25 bp, Homo sapien
aagcttttgctatcaagatgagata

SEQ ID NO: 5950158 - DNA, 25 bp, Homo sapien
ttgatgatttctgagggaatagtag

SEQ ID NO: 5950159 - DNA, 25 bp, Homo sapien
atcgtcatccatagatataatttca

SEQ ID NO: 5950160 - DNA, 25 bp, Homo sapien
gtaagcctaatgcagcagaagaacc

SEQ ID NO: 5950161 - DNA, 25 bp, Homo sapien
atctttatttcctcgtcatcttcat

SEQ ID NO: 5950162 - DNA, 25 bp, Homo sapien
gataaattgaataattagaccttta

SEQ ID NO: 5950163 - DNA, 25 bp, Homo sapien
tcgataaattgaataattagacctt

SEQ ID NO: 5950164 - DNA, 25 bp, Homo sapien
aattgaataattagacctttagaaa

SEQ ID NO: 5950165 - DNA, 25 bp, Homo sapien
gatggtccaattgatgatttctgag

SEQ ID NO: 5950166 - DNA, 25 bp, Homo sapien
gcagaagaaccctttaaaaaatggc

SEQ ID NO: 5950167 - DNA, 25 bp, Homo sapien
ccacttgtatctttatttcctcgtc

SEQ ID NO: 5950168 - DNA, 25 bp, Homo sapien
tccattaataatcgatttatcgctc

SEQ ID NO: 5950169 - DNA, 25 bp, Homo sapien
tcggaatcatcgtcatccatagata

SEQ ID NO: 5950170 - DNA, 25 bp, Homo sapien
aactccaacctagactggttcaaag

SEQ ID NO: 5950171 - DNA, 25 bp, Homo sapien
tccatttttcttcccaagttttgaa

SEQ ID NO: 5950172 - DNA, 25 bp, Homo sapien
gctatcaagatgagatatatggaat

SEQ ID NO: 5950173 - DNA, 25 bp, Homo sapien
ttatttcctcgtcatcttcatcaat

SEQ ID NO: 5950174 - DNA, 25 bp, Homo sapien
tttcaccgtccagctgtcgttgcat

SEQ ID NO: 5950175 - DNA, 25 bp, Homo sapien
aatatttagataactcaattctcgc

SEQ ID NO: 5950176 - DNA, 25 bp, Homo sapien
tttcacaaacccaggcaattctttg

SEQ ID NO: 5950177 - DNA, 25 bp, Homo sapien
tctaattcggtaagatttttttcac

SEQ ID NO: 5950178 - DNA, 25 bp, Homo sapien
ttaataatcgatttatcgctcagag

SEQ ID NO: 5950179 - DNA, 25 bp, Homo sapien
caagttttgaattctttcacaaacc

SEQ ID NO: 5950180 - DNA, 25 bp, Homo sapien
tggtccaattgatgatttctgaggg

SEQ ID NO: 5950181 - DNA, 25 bp, Homo sapien
cgctcagagtgttgaccaattcggt

SEQ ID NO: 5950182 - DNA, 25 bp, Homo sapien
tcgttgcatttgagcaaaagttgtt

SEQ ID NO: 5950183 - DNA, 25 bp, Homo sapien
ataatttcatttaagatggtccaat

SEQ ID NO: 5950184 - DNA, 25 bp, Homo sapien
ccaggcaattctttgtaagcctaat

SEQ ID NO: 5950185 - DNA, 25 bp, Homo sapien
ttgaataattagacctttagaaaaa

SEQ ID NO: 5950186 - DNA, 25 bp, Homo sapien
ttcctcgtcatcttcatcaatattg

SEQ ID NO: 5950187 - DNA, 25 bp, Homo sapien
accgtccagctgtcgttgcatttga

SEQ ID NO: 5950188 - DNA, 25 bp, Homo sapien
gcctaatgcagcagaagaacccttt

SEQ ID NO: 5950189 - DNA, 25 bp, Homo sapien
atttcctcgtcatcttcatcaatat

SEQ ID NO: 5950190 - DNA, 25 bp, Homo sapien
agatataatttcatttaagatggtc

SEQ ID NO: 5950191 - DNA, 25 bp, Homo sapien
cttgttggggaagaaatgttccatt

SEQ ID NO: 5950192 - DNA, 25 bp, Homo sapien
tgattccattaataatcgatttatc

SEQ ID NO: 5950193 - DNA, 25 bp, Homo sapien
gagtgttgaccaattcggtcttgtt

SEQ ID NO: 5950194 - DNA, 25 bp, Homo sapien
aattttcgtctttatcgtccacttg

SEQ ID NO: 5950195 - DNA, 25 bp, Homo sapien
cagagtgttgaccaattcggtcttg

SEQ ID NO: 5950196 - DNA, 25 bp, Homo sapien
ctggttcaaagcttttgctatcaag

SEQ ID NO: 5950197 - DNA, 25 bp, Homo sapien
attctttcacaaacccaggcaattc

SEQ ID NO: 5950198 - DNA, 25 bp, Homo sapien
ttctcgccagtttgaactccaacct

SEQ ID NO: 5950199 - DNA, 25 bp, Homo sapien
agttgtttgtgcctggtcgataaat

SEQ ID NO: 5950200 - DNA, 25 bp, Homo sapien
aaacccaggcaattctttgtaagcc

SEQ ID NO: 5950201 - DNA, 25 bp, Homo sapien
gaaatgttccatttttcttcccaag

SEQ ID NO: 5950202 - DNA, 25 bp, Homo sapien
ctaatgcagcagaagaaccctttaa

SEQ ID NO: 5950203 - DNA, 25 bp, Homo sapien
ccagtttgaactccaacctagactg

SEQ ID NO: 5950204 - DNA, 25 bp, Homo sapien
caaagcttttgctatcaagatgaga

SEQ ID NO: 5950205 - DNA, 25 bp, Homo sapien
tcatccatagatataatttcattta

SEQ ID NO: 5950206 - DNA, 25 bp, Homo sapien
taatcgatttatcgctcagagtgtt

SEQ ID NO: 5950207 - DNA, 25 bp, Homo sapien
caattcggtcttgttggggaagaaa

SEQ ID NO: 5950208 - DNA, 25 bp, Homo sapien
cccaagttttgaattctttcacaaa

SEQ ID NO: 5950209 - DNA, 25 bp, Homo sapien
accaattcggtcttgttggggaaga

SEQ ID NO: 5950210 - DNA, 25 bp, Homo sapien
atataatttcatttaagatggtcca

SEQ ID NO: 5950211 - DNA, 25 bp, Homo sapien
tttagataactcaattctcgccagt

SEQ ID NO: 5950212 - DNA, 25 bp, Homo sapien
ccaacctagactggttcaaagcttt

SEQ ID NO: 5950213 - DNA, 25 bp, Homo sapien
ttttgctatcaagatgagatatatg

SEQ ID NO: 5950214 - DNA, 25 bp, Homo sapien
atatatggaattttcgtctttatcg

SEQ ID NO: 5950215 - DNA, 25 bp, Homo sapien
gatgatttctgagggaatagtagac

SEQ ID NO: 5950216 - DNA, 25 bp, Homo sapien
aattctttgtaagcctaatgcagca

SEQ ID NO: 5950217 - DNA, 25 bp, Homo sapien
acaaacccaggcaattctttgtaag

SEQ ID NO: 5950218 - DNA, 25 bp, Homo sapien
tcacaaacccaggcaattctttgta

SEQ ID NO: 5950219 - DNA, 25 bp, Homo sapien
actcaattctcgccagtttgaactc

SEQ ID NO: 5950220 - DNA, 25 bp, Homo sapien
caatattgattccattaataatcga

SEQ ID NO: 5950221 - DNA, 25 bp, Homo sapien
acccaggcaattctttgtaagccta

SEQ ID NO: 5950222 - DNA, 25 bp, Homo sapien
cgatttatcgctcagagtgttgacc

SEQ ID NO: 5950223 - DNA, 25 bp, Homo sapien
gacctttagaaaaatcggaatcatc

SEQ ID NO: 5950224 - DNA, 25 bp, Homo sapien
tcgtcatcttcatcaatattgattc

SEQ ID NO: 5950225 - DNA, 25 bp, Homo sapien
tttagaaaaatcggaatcatcgtca

SEQ ID NO: 5950226 - DNA, 25 bp, Homo sapien
gtccacttgtatctttatttcctcg

SEQ ID NO: 5950227 - DNA, 25 bp, Homo sapien
aacctagactggttcaaagcttttg

SEQ ID NO: 5950228 - DNA, 25 bp, Homo sapien
ggaattttcgtctttatcgtccact

SEQ ID NO: 5950229 - DNA, 25 bp, Homo sapien
ctccaacctagactggttcaaagct

SEQ ID NO: 5950230 - DNA, 25 bp, Homo sapien
tgttggggaagaaatgttccatttt

SEQ ID NO: 5950231 - DNA, 25 bp, Homo sapien
gattgtctaattcggtaagattttt

SEQ ID NO: 5950232 - DNA, 25 bp, Homo sapien
ggaatcatcgtcatccatagatata

SEQ ID NO: 5950233 - DNA, 25 bp, Homo sapien
tttttcaccgtccagctgtcgttgc

SEQ ID NO: 5950234 - DNA, 25 bp, Homo sapien
tctttcacaaacccaggcaattctt

SEQ ID NO: 5950235 - DNA, 25 bp, Homo sapien
gcttttgctatcaagatgagatata

SEQ ID NO: 5950236 - DNA, 25 bp, Homo sapien
caaaagttgtttgtgcctggtcgat

SEQ ID NO: 5950237 - DNA, 25 bp, Homo sapien
tttatcgtccacttgtatctttatt

SEQ ID NO: 5950238 - DNA, 25 bp, Homo sapien
cgccagtttgaactccaacctagac

SEQ ID NO: 5950239 - DNA, 25 bp, Homo sapien
tataggtttgtgttgtaatatttag

SEQ ID NO: 5950240 - DNA, 25 bp, Homo sapien
agcaaaagttgtttgtgcctggtcg

SEQ ID NO: 5950241 - DNA, 25 bp, Homo sapien
tgcagcagaagaaccctttaaaaaa

SEQ ID NO: 5950242 - DNA, 25 bp, Homo sapien
aaaaatggcccagattgtctaattc

SEQ ID NO: 5950243 - DNA, 25 bp, Homo sapien
ttatcgctcagagtgttgaccaatt

SEQ ID NO: 5950244 - DNA, 25 bp, Homo sapien
ttaagatggtccaattgatgatttc

SEQ ID NO: 5950245 - DNA, 25 bp, Homo sapien
gttgcatttgagcaaaagttgtttg

SEQ ID NO: 5950246 - DNA, 25 bp, Homo sapien
tgagatatatggaattttcgtcttt

SEQ ID NO: 5950247 - DNA, 25 bp, Homo sapien
gtcttgttggggaagaaatgttcca

SEQ ID NO: 5950248 - DNA, 25 bp, Homo sapien
gtgttgaccaattcggtcttgttgg

SEQ ID NO: 5950249 - DNA, 25 bp, Homo sapien
aataatcgatttatcgctcagagtg

SEQ ID NO: 5950250 - DNA, 25 bp, Homo sapien
tggggaagaaatgttccatttttct

SEQ ID NO: 5950251 - DNA, 25 bp, Homo sapien
agttttgaattctttcacaaaccca

SEQ ID NO: 5950252 - DNA, 25 bp, Homo sapien
gtgcctggtcgataaattgaataat

SEQ ID NO: 5950253 - DNA, 25 bp, Homo sapien
gtttgtgcctggtcgataaattgaa

SEQ ID NO: 5950254 - DNA, 25 bp, Homo sapien
tttgtgttgtaatatttagataact

SEQ ID NO: 5950255 - DNA, 25 bp, Homo sapien
tatcgtccacttgtatctttatttc

SEQ ID NO: 5950256 - DNA, 25 bp, Homo sapien
atcgctcagagtgttgaccaattcg

SEQ ID NO: 5950257 - DNA, 25 bp, Homo sapien
aaagttgtttgtgcctggtcgataa

SEQ ID NO: 5950258 - DNA, 25 bp, Homo sapien
tcatcgtcatccatagatataattt

SEQ ID NO: 5950259 - DNA, 25 bp, Homo sapien
ttgtaagcctaatgcagcagaagaa

SEQ ID NO: 5950260 - DNA, 25 bp, Homo sapien
tcttcccaagttttgaattctttca

SEQ ID NO: 5950261 - DNA, 25 bp, Homo sapien
tgttgtaatatttagataactcaat

SEQ ID NO: 5950262 - DNA, 25 bp, Homo sapien
cagcagaagaaccctttaaaaaatg

SEQ ID NO: 5950263 - DNA, 25 bp, Homo sapien
ggcccagattgtctaattcggtaag

SEQ ID NO: 5950264 - DNA, 25 bp, Homo sapien
atggaattttcgtctttatcgtcca

SEQ ID NO: 5950265 - DNA, 25 bp, Homo sapien
cctcgtcatcttcatcaatattgat

SEQ ID NO: 5950266 - DNA, 25 bp, Homo sapien
ctcacgctaaggaaatgggtatacg

SEQ ID NO: 5950267 - DNA, 25 bp, Homo sapien
ggaaaaagtacaacatgttttagtc

SEQ ID NO: 5950268 - DNA, 25 bp, Homo sapien
aagcgactacttggtgcatcatagg

SEQ ID NO: 5950269 - DNA, 25 bp, Homo sapien
ggaattgtggggaagcagggcataa

SEQ ID NO: 5950270 - DNA, 25 bp, Homo sapien
ccgtaggttcattgaagaaagatga

SEQ ID NO: 5950271 - DNA, 25 bp, Homo sapien
cattttgtaggaattgtggggaagc

SEQ ID NO: 5950272 - DNA, 25 bp, Homo sapien
atacgtgatgaaattgaggataagg

SEQ ID NO: 5950273 - DNA, 25 bp, Homo sapien
agaaaagatagatggtacggttact

SEQ ID NO: 5950274 - DNA, 25 bp, Homo sapien
aaccagtttgctagatctcacgcta

SEQ ID NO: 5950275 - DNA, 25 bp, Homo sapien
tataggacatcaacgagattgagag

SEQ ID NO: 5950276 - DNA, 25 bp, Homo sapien
aaaacctcgtaagatgcagaagctt

SEQ ID NO: 5950277 - DNA, 25 bp, Homo sapien
gacaataattcagaaccaaaaattg

SEQ ID NO: 5950278 - DNA, 25 bp, Homo sapien
aataatggcacagttttagtacgag

SEQ ID NO: 5950279 - DNA, 25 bp, Homo sapien
ctgaggaacaacggaaccacttaaa

SEQ ID NO: 5950280 - DNA, 25 bp, Homo sapien
ctagatctcacgctaaggaaatggg

SEQ ID NO: 5950281 - DNA, 25 bp, Homo sapien
gggaagaagcccggcaatgatgata

SEQ ID NO: 5950282 - DNA, 25 bp, Homo sapien
tcattgaagaaagatgatgctgata

SEQ ID NO: 5950283 - DNA, 25 bp, Homo sapien
atatctgaagaaaaaacgggaacaa

SEQ ID NO: 5950284 - DNA, 25 bp, Homo sapien
acgagcactgcagaaggaggagaaa

SEQ ID NO: 5950285 - DNA, 25 bp, Homo sapien
tctcattcgctgtcattttgtagga

SEQ ID NO: 5950286 - DNA, 25 bp, Homo sapien
cctaaatcaagattgtacaaaactg

SEQ ID NO: 5950287 - DNA, 25 bp, Homo sapien
taacagaaataaaaggcaactacaa

SEQ ID NO: 5950288 - DNA, 25 bp, Homo sapien
cttgttcccgatttaaattcacaaa

SEQ ID NO: 5950289 - DNA, 25 bp, Homo sapien
tcatatccccaggtatattagaaat

SEQ ID NO: 5950290 - DNA, 25 bp, Homo sapien
aaactgatgaaacactatgggatac

SEQ ID NO: 5950291 - DNA, 25 bp, Homo sapien
caagaagaaaccaagcagcccaaga

SEQ ID NO: 5950292 - DNA, 25 bp, Homo sapien
atgagttcaaactaatcagacccca

SEQ ID NO: 5950293 - DNA, 25 bp, Homo sapien
aaggatgagttcaaactaatcagac

SEQ ID NO: 5950294 - DNA, 25 bp, Homo sapien
tacagatgaagagatagaactaatg

SEQ ID NO: 5950295 - DNA, 25 bp, Homo sapien
ctacttggtgcatcataggcaaaaa

SEQ ID NO: 5950296 - DNA, 25 bp, Homo sapien
taattatgatcctaaatcaagattg

SEQ ID NO: 5950297 - DNA, 25 bp, Homo sapien
tagaactaatgaagttagaacttta

SEQ ID NO: 5950298 - DNA, 25 bp, Homo sapien
catttgacaggtgaaggcctaaaat

SEQ ID NO: 5950299 - DNA, 25 bp, Homo sapien
tcaaccatggtactataaggatacc

SEQ ID NO: 5950300 - DNA, 25 bp, Homo sapien
atcgaagcactattaacagaaataa

SEQ ID NO: 5950301 - DNA, 25 bp, Homo sapien
taaatcaagattgtacaaaactgaa

SEQ ID NO: 5950302 - DNA, 25 bp, Homo sapien
tcagcattggagatctggaagctag

SEQ ID NO: 5950303 - DNA, 25 bp, Homo sapien
aaataaaaggcaactacaacaagca

SEQ ID NO: 5950304 - DNA, 25 bp, Homo sapien
tgacaggtgaaggcctaaaattaaa

SEQ ID NO: 5950305 - DNA, 25 bp, Homo sapien
tgctagatctcacgctaaggaaatg

SEQ ID NO: 5950306 - DNA, 25 bp, Homo sapien
ctgatgatgactgggactccagaaa

SEQ ID NO: 5950307 - DNA, 25 bp, Homo sapien
agaaagactgcatggaaaaacctcg

SEQ ID NO: 5950308 - DNA, 25 bp, Homo sapien
gctaggaaagtagatggtacaaagc

SEQ ID NO: 5950309 - DNA, 25 bp, Homo sapien
gggtatacgtgatgaaattgaggat

SEQ ID NO: 5950310 - DNA, 25 bp, Homo sapien
ggggtgctttagatattgacaataa

SEQ ID NO: 5950311 - DNA, 25 bp, Homo sapien
tgatgactgggactccagaaaagat

SEQ ID NO: 5950312 - DNA, 25 bp, Homo sapien
agaaccaaaaattggtatgggtata

SEQ ID NO: 5950313 - DNA, 25 bp, Homo sapien
aggaggagaaaaaagcgactacttg

SEQ ID NO: 5950314 - DNA, 25 bp, Homo sapien
aaggctgcttacttgaacgacataa

SEQ ID NO: 5950315 - DNA, 25 bp, Homo sapien
cagaaggaggagaaaaaagcgacta

SEQ ID NO: 5950316 - DNA, 25 bp, Homo sapien
agtttgctagatctcacgctaagga

SEQ ID NO: 5950317 - DNA, 25 bp, Homo sapien
ctattaacagaaataaaaggcaact

SEQ ID NO: 5950318 - DNA, 25 bp, Homo sapien
ggaaagaatacaatgaactgataag

SEQ ID NO: 5950319 - DNA, 25 bp, Homo sapien
actaatcagaccccagaagatgtcc

SEQ ID NO: 5950320 - DNA, 25 bp, Homo sapien
tgaagaaagatgatgctgataattc

SEQ ID NO: 5950321 - DNA, 25 bp, Homo sapien
caacatgttttagtcgccaatccta

SEQ ID NO: 5950322 - DNA, 25 bp, Homo sapien
ccaggtatattagaaatcaaccatg

SEQ ID NO: 5950323 - DNA, 25 bp, Homo sapien
gcccggcaatgatgatacgagcact

SEQ ID NO: 5950324 - DNA, 25 bp, Homo sapien
agcagggcataaggagaaagactgc

SEQ ID NO: 5950325 - DNA, 25 bp, Homo sapien
gaaagatgatgctgataattctcag

SEQ ID NO: 5950326 - DNA, 25 bp, Homo sapien
tgcagaagcttgttcccgatttaaa

SEQ ID NO: 5950327 - DNA, 25 bp, Homo sapien
gttgtataggacatcaacgagattg

SEQ ID NO: 5950328 - DNA, 25 bp, Homo sapien
aagattgtacaaaactgaaacactg

SEQ ID NO: 5950329 - DNA, 25 bp, Homo sapien
gggagcgtgataaaagaaataaaat

SEQ ID NO: 5950330 - DNA, 25 bp, Homo sapien
gtaagtgggagcgtgataaaagaaa

SEQ ID NO: 5950331 - DNA, 25 bp, Homo sapien
aacctcgtaagatgcagaagcttgt

SEQ ID NO: 5950332 - DNA, 25 bp, Homo sapien
ccaaagaacaagaagggaagaagcc

SEQ ID NO: 5950333 - DNA, 25 bp, Homo sapien
ggtgctttagatattgacaataatt

SEQ ID NO: 5950334 - DNA, 25 bp, Homo sapien
agcattggagatctggaagctagga

SEQ ID NO: 5950335 - DNA, 25 bp, Homo sapien
aactgaaacactgggcgcagttgat

SEQ ID NO: 5950336 - DNA, 25 bp, Homo sapien
atccccaggtatattagaaatcaac

SEQ ID NO: 5950337 - DNA, 25 bp, Homo sapien
gtcgccaatcctactaaatatgaat

SEQ ID NO: 5950338 - DNA, 25 bp, Homo sapien
gatacagatgaagagatagaactaa

SEQ ID NO: 5950339 - DNA, 25 bp, Homo sapien
agaaataaaaggcaactacaacaag

SEQ ID NO: 5950340 - DNA, 25 bp, Homo sapien
ggaagctaggaaagtagatggtaca

SEQ ID NO: 5950341 - DNA, 25 bp, Homo sapien
agaagatgtccgtccgagattctca

SEQ ID NO: 5950342 - DNA, 25 bp, Homo sapien
cattggagatctggaagctaggaaa

SEQ ID NO: 5950343 - DNA, 25 bp, Homo sapien
aatcaagattgtacaaaactgaaac

SEQ ID NO: 5950344 - DNA, 25 bp, Homo sapien
taaattcacaaaaaaataatggcac

SEQ ID NO: 5950345 - DNA, 25 bp, Homo sapien
gtgggagcgtgataaaagaaataaa

SEQ ID NO: 5950346 - DNA, 25 bp, Homo sapien
gaactgataagtaagtgggagcgtg

SEQ ID NO: 5950347 - DNA, 25 bp, Homo sapien
gtatacgtgatgaaattgaggataa

SEQ ID NO: 5950348 - DNA, 25 bp, Homo sapien
gctgataattctcagttgtatagga

SEQ ID NO: 5950349 - DNA, 25 bp, Homo sapien
atgatgatacgagcactgcagaagg

SEQ ID NO: 5950350 - DNA, 25 bp, Homo sapien
ataaggagaaagactgcatggaaaa

SEQ ID NO: 5950351 - DNA, 25 bp, Homo sapien
aaatattcatatccccaggtatatt

SEQ ID NO: 5950352 - DNA, 25 bp, Homo sapien
tgctttagatattgacaataattca

SEQ ID NO: 5950353 - DNA, 25 bp, Homo sapien
gggactccagaaaagatagatggta

SEQ ID NO: 5950354 - DNA, 25 bp, Homo sapien
ccagaagatgtccgtccgagattct

SEQ ID NO: 5950355 - DNA, 25 bp, Homo sapien
aaaaatgaaaatattcatatcccca

SEQ ID NO: 5950356 - DNA, 25 bp, Homo sapien
agataaggctgcttacttgaacgac

SEQ ID NO: 5950357 - DNA, 25 bp, Homo sapien
tgttcccgatttaaattcacaaaaa

SEQ ID NO: 5950358 - DNA, 25 bp, Homo sapien
aagatgcagaagcttgttcccgatt

SEQ ID NO: 5950359 - DNA, 25 bp, Homo sapien
gaggagaaaaaagcgactacttggt

SEQ ID NO: 5950360 - DNA, 25 bp, Homo sapien
gtaagatgcagaagcttgttcccga

SEQ ID NO: 5950361 - DNA, 25 bp, Homo sapien
atggtactataaggatacccccaaa

SEQ ID NO: 5950362 - DNA, 25 bp, Homo sapien
gaaaatcgaagcactattaacagaa

SEQ ID NO: 5950363 - DNA, 25 bp, Homo sapien
atcaacgagattgagagaagataag

SEQ ID NO: 5950364 - DNA, 25 bp, Homo sapien
ggacatcaacgagattgagagaaga

SEQ ID NO: 5950365 - DNA, 25 bp, Homo sapien
ttaaacgaattgaaccagtttgcta

SEQ ID NO: 5950366 - DNA, 25 bp, Homo sapien
acgacataaattcaacggagagtaa

SEQ ID NO: 5950367 - DNA, 25 bp, Homo sapien
tagtacgagctactgatgatgactg

SEQ ID NO: 5950368 - DNA, 25 bp, Homo sapien
cgaagcactattaacagaaataaaa

SEQ ID NO: 5950369 - DNA, 25 bp, Homo sapien
ggaaagtagatggtacaaagcaatc

SEQ ID NO: 5950370 - DNA, 25 bp, Homo sapien
actgataagtaagtgggagcgtgat

SEQ ID NO: 5950371 - DNA, 25 bp, Homo sapien
gttttagtacgagctactgatgatg

SEQ ID NO: 5950372 - DNA, 25 bp, Homo sapien
aaaagatagatggtacggttactca

SEQ ID NO: 5950373 - DNA, 25 bp, Homo sapien
cagggcataaggagaaagactgcat

SEQ ID NO: 5950374 - DNA, 25 bp, Homo sapien
acatcaacgagattgagagaagata

SEQ ID NO: 5950375 - DNA, 25 bp, Homo sapien
tagaactttacaaggattccgtagg

SEQ ID NO: 5950376 - DNA, 25 bp, Homo sapien
aaaattggtatgggtataaaggatg

SEQ ID NO: 5950377 - DNA, 25 bp, Homo sapien
gagattgagagaagataaggctgct

SEQ ID NO: 5950378 - DNA, 25 bp, Homo sapien
ggctgcttacttgaacgacataaat

SEQ ID NO: 5950379 - DNA, 25 bp, Homo sapien
ccccaggtatattagaaatcaacca

SEQ ID NO: 5950380 - DNA, 25 bp, Homo sapien
taggaaagtagatggtacaaagcaa

SEQ ID NO: 5950381 - DNA, 25 bp, Homo sapien
attaacagaaataaaaggcaactac

SEQ ID NO: 5950382 - DNA, 25 bp, Homo sapien
aagaaaccaagcagcccaagattgt

SEQ ID NO: 5950383 - DNA, 25 bp, Homo sapien
tccgtccgagattctcattcgctgt

SEQ ID NO: 5950384 - DNA, 25 bp, Homo sapien
aaatgaaaatattcatatccccagg

SEQ ID NO: 5950385 - DNA, 25 bp, Homo sapien
gacaaatcccaaactgatgaaacac

SEQ ID NO: 5950386 - DNA, 25 bp, Homo sapien
ctataaggatacccccaaagaacaa

SEQ ID NO: 5950387 - DNA, 25 bp, Homo sapien
aaggcaactacaacaagcaaaagaa

SEQ ID NO: 5950388 - DNA, 25 bp, Homo sapien
ttgtacaaaactgaaacactgggcg

SEQ ID NO: 5950389 - DNA, 25 bp, Homo sapien
aacaagaagaaaccaagcagcccaa

SEQ ID NO: 5950390 - DNA, 25 bp, Homo sapien
gcgcagttgatgaaaaatcaaaaat

SEQ ID NO: 5950391 - DNA, 25 bp, Homo sapien
aacaagaagggaagaagcccggcaa

SEQ ID NO: 5950392 - DNA, 25 bp, Homo sapien
aattggtatgggtataaaggatgag

SEQ ID NO: 5950393 - DNA, 25 bp, Homo sapien
tgtataggacatcaacgagattgag

SEQ ID NO: 5950394 - DNA, 25 bp, Homo sapien
gattgtacaaaactgaaacactggg

SEQ ID NO: 5950395 - DNA, 25 bp, Homo sapien
aaggaaatgggtatacgtgatgaaa

SEQ ID NO: 5950396 - DNA, 25 bp, Homo sapien
gggatacagatgaagagatagaact

SEQ ID NO: 5950397 - DNA, 25 bp, Homo sapien
gtaggttcattgaagaaagatgatg

SEQ ID NO: 5950398 - DNA, 25 bp, Homo sapien
aaagactgcatggaaaaacctcgta

SEQ ID NO: 5950399 - DNA, 25 bp, Homo sapien
tagaaatcaaccatggtactataag

SEQ ID NO: 5950400 - DNA, 25 bp, Homo sapien
cactgggcgcagttgatgaaaaatc

SEQ ID NO: 5950401 - DNA, 25 bp, Homo sapien
gaattgaaccagtttgctagatctc

SEQ ID NO: 5950402 - DNA, 25 bp, Homo sapien
atattcatatccccaggtatattag

SEQ ID NO: 5950403 - DNA, 25 bp, Homo sapien
ctgggactccagaaaagatagatgg

SEQ ID NO: 5950404 - DNA, 25 bp, Homo sapien
ggttactcagggaaagaatacaatg

SEQ ID NO: 5950405 - DNA, 25 bp, Homo sapien
gggcgcagttgatgaaaaatcaaaa

SEQ ID NO: 5950406 - DNA, 25 bp, Homo sapien
aacactgggcgcagttgatgaaaaa

SEQ ID NO: 5950407 - DNA, 25 bp, Homo sapien
agatctcacgctaaggaaatgggta

SEQ ID NO: 5950408 - DNA, 25 bp, Homo sapien
ggcaactacaacaagcaaaagaaaa

SEQ ID NO: 5950409 - DNA, 25 bp, Homo sapien
acgtgatgaaattgaggataaggaa

SEQ ID NO: 5950410 - DNA, 25 bp, Homo sapien
cactatgggatacagatgaagagat

SEQ ID NO: 5950411 - DNA, 25 bp, Homo sapien
tggtacggttactcagggaaagaat

SEQ ID NO: 5950412 - DNA, 25 bp, Homo sapien
atctggaagctaggaaagtagatgg

SEQ ID NO: 5950413 - DNA, 25 bp, Homo sapien
gttcattgaagaaagatgatgctga

SEQ ID NO: 5950414 - DNA, 25 bp, Homo sapien
cacgctaaggaaatgggtatacgtg

SEQ ID NO: 5950415 - DNA, 25 bp, Homo sapien
gtacggttactcagggaaagaatac

SEQ ID NO: 5950416 - DNA, 25 bp, Homo sapien
cagaaacaacgaaaatcgaagcact

SEQ ID NO: 5950417 - DNA, 25 bp, Homo sapien
attgaaccagtttgctagatctcac

SEQ ID NO: 5950418 - DNA, 25 bp, Homo sapien
attctcattcgctgtcattttgtag

SEQ ID NO: 5950419 - DNA, 25 bp, Homo sapien
gcctaaaattaaacgaattgaacca

SEQ ID NO: 5950420 - DNA, 25 bp, Homo sapien
gggcataaggagaaagactgcatgg

SEQ ID NO: 5950421 - DNA, 25 bp, Homo sapien
gaaaccaagcagcccaagattgtca

SEQ ID NO: 5950422 - DNA, 25 bp, Homo sapien
aaacgaattgaaccagtttgctaga

SEQ ID NO: 5950423 - DNA, 25 bp, Homo sapien
atcctaaatcaagattgtacaaaac

SEQ ID NO: 5950424 - DNA, 25 bp, Homo sapien
ggaaaagacaaatcccaaactgatg

SEQ ID NO: 5950425 - DNA, 25 bp, Homo sapien
ataaggatacccccaaagaacaaga

SEQ ID NO: 5950426 - DNA, 25 bp, Homo sapien
ttccgtaggttcattgaagaaagat

SEQ ID NO: 5950427 - DNA, 25 bp, Homo sapien
gaaaaatcaaaaatgttccgcagac

SEQ ID NO: 5950428 - DNA, 25 bp, Homo sapien
taaaggatgagttcaaactaatcag

SEQ ID NO: 5950429 - DNA, 25 bp, Homo sapien
tcaagattgtacaaaactgaaacac

SEQ ID NO: 5950430 - DNA, 25 bp, Homo sapien
gattgagagaagataaggctgctta

SEQ ID NO: 5950431 - DNA, 25 bp, Homo sapien
ggcacagttttagtacgagctactg

SEQ ID NO: 5950432 - DNA, 25 bp, Homo sapien
acgagctactgatgatgactgggac

SEQ ID NO: 5950433 - DNA, 25 bp, Homo sapien
ctatgggatacagatgaagagatag

SEQ ID NO: 5950434 - DNA, 25 bp, Homo sapien
tattgacaataattcagaaccaaaa

SEQ ID NO: 5950435 - DNA, 25 bp, Homo sapien
aatcctactaaatatgaatatctga

SEQ ID NO: 5950436 - DNA, 25 bp, Homo sapien
gtcattttgtaggaattgtggggaa

SEQ ID NO: 5950437 - DNA, 25 bp, Homo sapien
ggtatgggtataaaggatgagttca

SEQ ID NO: 5950438 - DNA, 25 bp, Homo sapien
gactgggactccagaaaagatagat

SEQ ID NO: 5950439 - DNA, 25 bp, Homo sapien
tgatcctaaatcaagattgtacaaa

SEQ ID NO: 5950440 - DNA, 25 bp, Homo sapien
gaagcagggcataaggagaaagact

SEQ ID NO: 5950441 - DNA, 25 bp, Homo sapien
tgaggataaggaaaaagtacaacat

SEQ ID NO: 5950442 - DNA, 25 bp, Homo sapien
aaaatcaaaaatgttccgcagacat

SEQ ID NO: 5950443 - DNA, 25 bp, Homo sapien
aacgggaacaagaagaaaccaagca

SEQ ID NO: 5950444 - DNA, 25 bp, Homo sapien
tgatgctgataattctcagttgtat

SEQ ID NO: 5950445 - DNA, 25 bp, Homo sapien
atgttccgcagacatttgacaggtg

SEQ ID NO: 5950446 - DNA, 25 bp, Homo sapien
caaaagggggtgctttagatattga

SEQ ID NO: 5950447 - DNA, 25 bp, Homo sapien
gagcactgcagaaggaggagaaaaa

SEQ ID NO: 5950448 - DNA, 25 bp, Homo sapien
aggttcattgaagaaagatgatgct

SEQ ID NO: 5950449 - DNA, 25 bp, Homo sapien
tcaaaaatgttccgcagacatttga

SEQ ID NO: 5950450 - DNA, 25 bp, Homo sapien
ttcacaaaaaaataatggcacagtt

SEQ ID NO: 5950451 - DNA, 25 bp, Homo sapien
aaatcgaagcactattaacagaaat

SEQ ID NO: 5950452 - DNA, 25 bp, Homo sapien
gagatagaactaatgaagttagaac

SEQ ID NO: 5950453 - DNA, 25 bp, Homo sapien
ttacttgaacgacataaattcaacg

SEQ ID NO: 5950454 - DNA, 25 bp, Homo sapien
atatccccaggtatattagaaatca

SEQ ID NO: 5950455 - DNA, 25 bp, Homo sapien
cataaattcaacggagagtaattat

SEQ ID NO: 5950456 - DNA, 25 bp, Homo sapien
cagaagcttgttcccgatttaaatt

SEQ ID NO: 5950457 - DNA, 25 bp, Homo sapien
gaaggaggagaaaaaagcgactact

SEQ ID NO: 5950458 - DNA, 25 bp, Homo sapien
gaccccagaagatgtccgtccgaga

SEQ ID NO: 5950459 - DNA, 25 bp, Homo sapien
caacggagagtaattatgatcctaa

SEQ ID NO: 5950460 - DNA, 25 bp, Homo sapien
gaaacactatgggatacagatgaag

SEQ ID NO: 5950461 - DNA, 25 bp, Homo sapien
aggataaggaaaaagtacaacatgt

SEQ ID NO: 5950462 - DNA, 25 bp, Homo sapien
aaagcaatctgaggaacaacggaac

SEQ ID NO: 5950463 - DNA, 25 bp, Homo sapien
tagtcgccaatcctactaaatatga

SEQ ID NO: 5950464 - DNA, 25 bp, Homo sapien
ttgacaataattcagaaccaaaaat

SEQ ID NO: 5950465 - DNA, 25 bp, Homo sapien
taattcagaaccaaaaattggtatg

SEQ ID NO: 5950466 - DNA, 25 bp, Homo sapien
gggaagcagggcataaggagaaaga

SEQ ID NO: 5950467 - DNA, 25 bp, Homo sapien
ctactaaatatgaatatctgaagaa

SEQ ID NO: 5950468 - DNA, 25 bp, Homo sapien
tgaaccagtttgctagatctcacgc

SEQ ID NO: 5950469 - DNA, 25 bp, Homo sapien
actcagggaaagaatacaatgaact

SEQ ID NO: 5950470 - DNA, 25 bp, Homo sapien
gaagcttgttcccgatttaaattca

SEQ ID NO: 5950471 - DNA, 25 bp, Homo sapien
gaagaagcccggcaatgatgatacg

SEQ ID NO: 5950472 - DNA, 25 bp, Homo sapien
cgagattctcattcgctgtcatttt

SEQ ID NO: 5950473 - DNA, 25 bp, Homo sapien
ggagaaaaaagcgactacttggtgc

SEQ ID NO: 5950474 - DNA, 25 bp, Homo sapien
agcccaagattgtcagcattggaga

SEQ ID NO: 5950475 - DNA, 25 bp, Homo sapien
agtacaacatgttttagtcgccaat

SEQ ID NO: 5950476 - DNA, 25 bp, Homo sapien
actaatgaagttagaactttacaag

SEQ ID NO: 5950477 - DNA, 25 bp, Homo sapien
gattccgtaggttcattgaagaaag

SEQ ID NO: 5950478 - DNA, 25 bp, Homo sapien
aagaaagatgatgctgataattctc

SEQ ID NO: 5950479 - DNA, 25 bp, Homo sapien
ggagatctggaagctaggaaagtag

SEQ ID NO: 5950480 - DNA, 25 bp, Homo sapien
ctggaagctaggaaagtagatggta

SEQ ID NO: 5950481 - DNA, 25 bp, Homo sapien
tggtacaaagcaatctgaggaacaa

SEQ ID NO: 5950482 - DNA, 25 bp, Homo sapien
ggagaaagactgcatggaaaaacct

SEQ ID NO: 5950483 - DNA, 25 bp, Homo sapien
aacaacgaaaatcgaagcactatta

SEQ ID NO: 5950484 - DNA, 25 bp, Homo sapien
acgaattgaaccagtttgctagatc

SEQ ID NO: 5950485 - DNA, 25 bp, Homo sapien
aaagtacaacatgttttagtcgcca

SEQ ID NO: 5950486 - DNA, 25 bp, Homo sapien
agcagaaacaacgaaaatcgaagca

SEQ ID NO: 5950487 - DNA, 25 bp, Homo sapien
atacgagcactgcagaaggaggaga

SEQ ID NO: 5950488 - DNA, 25 bp, Homo sapien
tgataagtaagtgggagcgtgataa

SEQ ID NO: 5950489 - DNA, 25 bp, Homo sapien
acttgaacgacataaattcaacgga

SEQ ID NO: 5950490 - DNA, 25 bp, Homo sapien
acgaaaatcgaagcactattaacag

SEQ ID NO: 5950491 - DNA, 25 bp, Homo sapien
atctgaggaacaacggaaccactta

SEQ ID NO: 5950492 - DNA, 25 bp, Homo sapien
aatcccaaactgatgaaacactatg

SEQ ID NO: 5950493 - DNA, 25 bp, Homo sapien
actgcatggaaaaacctcgtaagat

SEQ ID NO: 5950494 - DNA, 25 bp, Homo sapien
ataattctcagttgtataggacatc

SEQ ID NO: 5950495 - DNA, 25 bp, Homo sapien
ttactcagggaaagaatacaatgaa

SEQ ID NO: 5950496 - DNA, 25 bp, Homo sapien
caatctgaggaacaacggaaccact

SEQ ID NO: 5950497 - DNA, 25 bp, Homo sapien
ttgagagaagataaggctgcttact

SEQ ID NO: 5950498 - DNA, 25 bp, Homo sapien
ccggcaatgatgatacgagcactgc

SEQ ID NO: 5950499 - DNA, 25 bp, Homo sapien
acatgttttagtcgccaatcctact

SEQ ID NO: 5950500 - DNA, 25 bp, Homo sapien
aaaataatggcacagttttagtacg

SEQ ID NO: 5950501 - DNA, 25 bp, Homo sapien
cccaagattgtcagcattggagatc

SEQ ID NO: 5950502 - DNA, 25 bp, Homo sapien
cagttgtataggacatcaacgagat

SEQ ID NO: 5950503 - DNA, 25 bp, Homo sapien
gagagaagataaggctgcttacttg

SEQ ID NO: 5950504 - DNA, 25 bp, Homo sapien
gaactaatgaagttagaactttaca

SEQ ID NO: 5950505 - DNA, 25 bp, Homo sapien
agaagcccggcaatgatgatacgag

SEQ ID NO: 5950506 - DNA, 25 bp, Homo sapien
tgaaggcctaaaattaaacgaattg

SEQ ID NO: 5950507 - DNA, 25 bp, Homo sapien
agaatacaatgaactgataagtaag

SEQ ID NO: 5950508 - DNA, 25 bp, Homo sapien
gagaagataaggctgcttacttgaa

SEQ ID NO: 5950509 - DNA, 25 bp, Homo sapien
caagattgtcagcattggagatctg

SEQ ID NO: 5950510 - DNA, 25 bp, Homo sapien
caatgaactgataagtaagtgggag

SEQ ID NO: 5950511 - DNA, 25 bp, Homo sapien
tacaacatgttttagtcgccaatcc

SEQ ID NO: 5950512 - DNA, 25 bp, Homo sapien
gacatttgacaggtgaaggcctaaa

SEQ ID NO: 5950513 - DNA, 25 bp, Homo sapien
aggattccgtaggttcattgaagaa

SEQ ID NO: 5950514 - DNA, 25 bp, Homo sapien
aatcaaccatggtactataaggata

SEQ ID NO: 5950515 - DNA, 25 bp, Homo sapien
gcagcccaagattgtcagcattgga

SEQ ID NO: 5950516 - DNA, 25 bp, Homo sapien
ctgggcgcagttgatgaaaaatcaa

SEQ ID NO: 5950517 - DNA, 25 bp, Homo sapien
tttagtacgagctactgatgatgac

SEQ ID NO: 5950518 - DNA, 25 bp, Homo sapien
aaactaatcagaccccagaagatgt

SEQ ID NO: 5950519 - DNA, 25 bp, Homo sapien
ttggtgcatcataggcaaaaagcaa

SEQ ID NO: 5950520 - DNA, 25 bp, Homo sapien
aattaaacgaattgaaccagtttgc

SEQ ID NO: 5950521 - DNA, 25 bp, Homo sapien
caaaaattggtatgggtataaagga

SEQ ID NO: 5950522 - DNA, 25 bp, Homo sapien
attcgctgtcattttgtaggaattg

SEQ ID NO: 5950523 - DNA, 25 bp, Homo sapien
atgaataataacagcagaaacaacg

SEQ ID NO: 5950524 - DNA, 25 bp, Homo sapien
tcccaaactgatgaaacactatggg

SEQ ID NO: 5950525 - DNA, 25 bp, Homo sapien
aaaagcgactacttggtgcatcata

SEQ ID NO: 5950526 - DNA, 25 bp, Homo sapien
tggaaaaacctcgtaagatgcagaa

SEQ ID NO: 5950527 - DNA, 25 bp, Homo sapien
gttttagtcgccaatcctactaaat

SEQ ID NO: 5950528 - DNA, 25 bp, Homo sapien
ggtactataaggatacccccaaaga

SEQ ID NO: 5950529 - DNA, 25 bp, Homo sapien
agcaatctgaggaacaacggaacca

SEQ ID NO: 5950530 - DNA, 25 bp, Homo sapien
gaacgacataaattcaacggagagt

SEQ ID NO: 5950531 - DNA, 25 bp, Homo sapien
tgcagaaggaggagaaaaaagcgac

SEQ ID NO: 5950532 - DNA, 25 bp, Homo sapien
aaaaaataatggcacagttttagta

SEQ ID NO: 5950533 - DNA, 25 bp, Homo sapien
agcttgttcccgatttaaattcaca

SEQ ID NO: 5950534 - DNA, 25 bp, Homo sapien
acaaagcaatctgaggaacaacgga

SEQ ID NO: 5950535 - DNA, 25 bp, Homo sapien
agactgcatggaaaaacctcgtaag

SEQ ID NO: 5950536 - DNA, 25 bp, Homo sapien
acagaaataaaaggcaactacaaca

SEQ ID NO: 5950537 - DNA, 25 bp, Homo sapien
tttgacaggtgaaggcctaaaatta

SEQ ID NO: 5950538 - DNA, 25 bp, Homo sapien
ctcagttgtataggacatcaacgag

SEQ ID NO: 5950539 - DNA, 25 bp, Homo sapien
agggggtgctttagatattgacaat

SEQ ID NO: 5950540 - DNA, 25 bp, Homo sapien
caggtgaaggcctaaaattaaacga

SEQ ID NO: 5950541 - DNA, 25 bp, Homo sapien
ctgaaacactgggcgcagttgatga

SEQ ID NO: 5950542 - DNA, 25 bp, Homo sapien
taacagcagaaacaacgaaaatcga

SEQ ID NO: 5950543 - DNA, 25 bp, Homo sapien
aagacaaatcccaaactgatgaaac

SEQ ID NO: 5950544 - DNA, 25 bp, Homo sapien
gttcaaactaatcagaccccagaag

SEQ ID NO: 5950545 - DNA, 25 bp, Homo sapien
agtagatggtacaaagcaatctgag

SEQ ID NO: 5950546 - DNA, 25 bp, Homo sapien
aagctaggaaagtagatggtacaaa

SEQ ID NO: 5950547 - DNA, 25 bp, Homo sapien
aaccatggtactataaggatacccc

SEQ ID NO: 5950548 - DNA, 25 bp, Homo sapien
atgaaacactatgggatacagatga

SEQ ID NO: 5950549 - DNA, 25 bp, Homo sapien
ccaatcctactaaatatgaatatct

SEQ ID NO: 5950550 - DNA, 25 bp, Homo sapien
aatcaaaaatgttccgcagacattt

SEQ ID NO: 5950551 - DNA, 25 bp, Homo sapien
ataaggctgcttacttgaacgacat

SEQ ID NO: 5950552 - DNA, 25 bp, Homo sapien
gaaacaacgaaaatcgaagcactat

SEQ ID NO: 5950553 - DNA, 25 bp, Homo sapien
gatgatgctgataattctcagttgt

SEQ ID NO: 5950554 - DNA, 25 bp, Homo sapien
ccaagcagcccaagattgtcagcat

SEQ ID NO: 5950555 - DNA, 25 bp, Homo sapien
acttggtgcatcataggcaaaaagc

SEQ ID NO: 5950556 - DNA, 25 bp, Homo sapien
agcactattaacagaaataaaaggc

SEQ ID NO: 5950557 - DNA, 25 bp, Homo sapien
aagatgtccgtccgagattctcatt

SEQ ID NO: 5950558 - DNA, 25 bp, Homo sapien
ccccagaagatgtccgtccgagatt

SEQ ID NO: 5950559 - DNA, 25 bp, Homo sapien
tcgctgtcattttgtaggaattgtg

SEQ ID NO: 5950560 - DNA, 25 bp, Homo sapien
aaaaatgttccgcagacatttgaca

SEQ ID NO: 5950561 - DNA, 25 bp, Homo sapien
atgggatacagatgaagagatagaa

SEQ ID NO: 5950562 - DNA, 25 bp, Homo sapien
ataataacagcagaaacaacgaaaa

SEQ ID NO: 5950563 - DNA, 25 bp, Homo sapien
aaccaagcagcccaagattgtcagc

SEQ ID NO: 5950564 - DNA, 25 bp, Homo sapien
aaatgttccgcagacatttgacagg

SEQ ID NO: 5950565 - DNA, 25 bp, Homo sapien
ttctcagttgtataggacatcaacg

SEQ ID NO: 5950566 - DNA, 25 bp, Homo sapien
tatgatcctaaatcaagattgtaca

SEQ ID NO: 5950567 - DNA, 25 bp, Homo sapien
tcgtaagatgcagaagcttgttccc

SEQ ID NO: 5950568 - DNA, 25 bp, Homo sapien
gatggtacggttactcagggaaaga

SEQ ID NO: 5950569 - DNA, 25 bp, Homo sapien
tcctactaaatatgaatatctgaag

SEQ ID NO: 5950570 - DNA, 25 bp, Homo sapien
attgaagaaagatgatgctgataat

SEQ ID NO: 5950571 - DNA, 25 bp, Homo sapien
gactacttggtgcatcataggcaaa

SEQ ID NO: 5950572 - DNA, 25 bp, Homo sapien
cacagttttagtacgagctactgat

SEQ ID NO: 5950573 - DNA, 25 bp, Homo sapien
gcataaggagaaagactgcatggaa

SEQ ID NO: 5950574 - DNA, 25 bp, Homo sapien
acgagattgagagaagataaggctg

SEQ ID NO: 5950575 - DNA, 25 bp, Homo sapien
gcactgcagaaggaggagaaaaaag

SEQ ID NO: 5950576 - DNA, 25 bp, Homo sapien
ggtgcatcataggcaaaaagcaaaa

SEQ ID NO: 5950577 - DNA, 25 bp, Homo sapien
atgaaaaatcaaaaatgttccgcag

SEQ ID NO: 5950578 - DNA, 25 bp, Homo sapien
ccaaactgatgaaacactatgggat

SEQ ID NO: 5950579 - DNA, 25 bp, Homo sapien
gactccagaaaagatagatggtacg

SEQ ID NO: 5950580 - DNA, 25 bp, Homo sapien
cacaaaaaaataatggcacagtttt

SEQ ID NO: 5950581 - DNA, 25 bp, Homo sapien
cagttttagtacgagctactgatga

SEQ ID NO: 5950582 - DNA, 25 bp, Homo sapien
ttcaacggagagtaattatgatcct

SEQ ID NO: 5950583 - DNA, 25 bp, Homo sapien
tgataattctcagttgtataggaca

SEQ ID NO: 5950584 - DNA, 25 bp, Homo sapien
gaaaaacctcgtaagatgcagaagc

SEQ ID NO: 5950585 - DNA, 25 bp, Homo sapien
tccgagattctcattcgctgtcatt

SEQ ID NO: 5950586 - DNA, 25 bp, Homo sapien
ctccagaaaagatagatggtacggt

SEQ ID NO: 5950587 - DNA, 25 bp, Homo sapien
cggaaccacttaaaagatttatatg

SEQ ID NO: 5950588 - DNA, 25 bp, Homo sapien
atggcacagttttagtacgagctac

SEQ ID NO: 5950589 - DNA, 25 bp, Homo sapien
tactgatgatgactgggactccaga

SEQ ID NO: 5950590 - DNA, 25 bp, Homo sapien
cagacatttgacaggtgaaggccta

SEQ ID NO: 5950591 - DNA, 25 bp, Homo sapien
caaatcccaaactgatgaaacacta

SEQ ID NO: 5950592 - DNA, 25 bp, Homo sapien
cgggaacaagaagaaaccaagcagc

SEQ ID NO: 5950593 - DNA, 25 bp, Homo sapien
ggaaatgggtatacgtgatgaaatt

SEQ ID NO: 5950594 - DNA, 25 bp, Homo sapien
caaaaaaataatggcacagttttag

SEQ ID NO: 5950595 - DNA, 25 bp, Homo sapien
aagcagcccaagattgtcagcattg

SEQ ID NO: 5950596 - DNA, 25 bp, Homo sapien
atgctgataattctcagttgtatag

SEQ ID NO: 5950597 - DNA, 25 bp, Homo sapien
aggtatattagaaatcaaccatggt

SEQ ID NO: 5950598 - DNA, 25 bp, Homo sapien
ggagagtaattatgatcctaaatca

SEQ ID NO: 5950599 - DNA, 25 bp, Homo sapien
gatgtccgtccgagattctcattcg

SEQ ID NO: 5950600 - DNA, 25 bp, Homo sapien
ccacttaaaagatttatatggttaa

SEQ ID NO: 5950601 - DNA, 25 bp, Homo sapien
agagtaattatgatcctaaatcaag

SEQ ID NO: 5950602 - DNA, 25 bp, Homo sapien
agatctggaagctaggaaagtagat

SEQ ID NO: 5950603 - DNA, 25 bp, Homo sapien
caaggattccgtaggttcattgaag

SEQ ID NO: 5950604 - DNA, 25 bp, Homo sapien
gcgactacttggtgcatcataggca

SEQ ID NO: 5950605 - DNA, 25 bp, Homo sapien
tgatgaaacactatgggatacagat

SEQ ID NO: 5950606 - DNA, 25 bp, Homo sapien
acaaaactgaaacactgggcgcagt

SEQ ID NO: 5950607 - DNA, 25 bp, Homo sapien
ttggtatgggtataaaggatgagtt

SEQ ID NO: 5950608 - DNA, 25 bp, Homo sapien
agaagaaaccaagcagcccaagatt

SEQ ID NO: 5950609 - DNA, 25 bp, Homo sapien
cgtccgagattctcattcgctgtca

SEQ ID NO: 5950610 - DNA, 25 bp, Homo sapien
gaatatctgaagaaaaaacgggaac

SEQ ID NO: 5950611 - DNA, 25 bp, Homo sapien
agaaaaaagcgactacttggtgcat

SEQ ID NO: 5950612 - DNA, 25 bp, Homo sapien
gaaccacttaaaagatttatatggt

SEQ ID NO: 5950613 - DNA, 25 bp, Homo sapien
taatcagaccccagaagatgtccgt

SEQ ID NO: 5950614 - DNA, 25 bp, Homo sapien
tgtccgtccgagattctcattcgct

SEQ ID NO: 5950615 - DNA, 25 bp, Homo sapien
acagcagaaacaacgaaaatcgaag

SEQ ID NO: 5950616 - DNA, 25 bp, Homo sapien
aattctcagttgtataggacatcaa

SEQ ID NO: 5950617 - DNA, 25 bp, Homo sapien
gcttacttgaacgacataaattcaa

SEQ ID NO: 5950618 - DNA, 25 bp, Homo sapien
tataaaggatgagttcaaactaatc

SEQ ID NO: 5950619 - DNA, 25 bp, Homo sapien
gaaaatattcatatccccaggtata

SEQ ID NO: 5950620 - DNA, 25 bp, Homo sapien
aaaaagtacaacatgttttagtcgc

SEQ ID NO: 5950621 - DNA, 25 bp, Homo sapien
aattcacaaaaaaataatggcacag

SEQ ID NO: 5950622 - DNA, 25 bp, Homo sapien
taggaattgtggggaagcagggcat

SEQ ID NO: 5950623 - DNA, 25 bp, Homo sapien
gttccgcagacatttgacaggtgaa

SEQ ID NO: 5950624 - DNA, 25 bp, Homo sapien
atgggtatacgtgatgaaattgagg

SEQ ID NO: 5950625 - DNA, 25 bp, Homo sapien
aatacaatgaactgataagtaagtg

SEQ ID NO: 5950626 - DNA, 25 bp, Homo sapien
gaagataaggctgcttacttgaacg

SEQ ID NO: 5950627 - DNA, 25 bp, Homo sapien
aaaaggcaactacaacaagcaaaag

SEQ ID NO: 5950628 - DNA, 25 bp, Homo sapien
ccagaaaagatagatggtacggtta

SEQ ID NO: 5950629 - DNA, 25 bp, Homo sapien
cctcgtaagatgcagaagcttgttc

SEQ ID NO: 5950630 - DNA, 25 bp, Homo sapien
ggtataaaggatgagttcaaactaa

SEQ ID NO: 5950631 - DNA, 25 bp, Homo sapien
cagaccccagaagatgtccgtccga

SEQ ID NO: 5950632 - DNA, 25 bp, Homo sapien
atgaactgataagtaagtgggagcg

SEQ ID NO: 5950633 - DNA, 25 bp, Homo sapien
actttacaaggattccgtaggttca

SEQ ID NO: 5950634 - DNA, 25 bp, Homo sapien
tgcatcataggcaaaaagcaaaagg

SEQ ID NO: 5950635 - DNA, 25 bp, Homo sapien
aaagggggtgctttagatattgaca

SEQ ID NO: 5950636 - DNA, 25 bp, Homo sapien
caacgaaaatcgaagcactattaac

SEQ ID NO: 5950637 - DNA, 25 bp, Homo sapien
atattagaaatcaaccatggtacta

SEQ ID NO: 5950638 - DNA, 25 bp, Homo sapien
ccatggtactataaggataccccca

SEQ ID NO: 5950639 - DNA, 25 bp, Homo sapien
aacactatgggatacagatgaagag

SEQ ID NO: 5950640 - DNA, 25 bp, Homo sapien
tgatgaaaaatcaaaaatgttccgc

SEQ ID NO: 5950641 - DNA, 25 bp, Homo sapien
tactataaggatacccccaaagaac

SEQ ID NO: 5950642 - DNA, 25 bp, Homo sapien
tagatggtacggttactcagggaaa

SEQ ID NO: 5950643 - DNA, 25 bp, Homo sapien
gtacaaagcaatctgaggaacaacg

SEQ ID NO: 5950644 - DNA, 25 bp, Homo sapien
gatagatggtacggttactcaggga

SEQ ID NO: 5950645 - DNA, 25 bp, Homo sapien
aaagtagatggtacaaagcaatctg

SEQ ID NO: 5950646 - DNA, 25 bp, Homo sapien
tttacaaggattccgtaggttcatt

SEQ ID NO: 5950647 - DNA, 25 bp, Homo sapien
tttagtcgccaatcctactaaatat

SEQ ID NO: 5950648 - DNA, 25 bp, Homo sapien
atcagaccccagaagatgtccgtcc

SEQ ID NO: 5950649 - DNA, 25 bp, Homo sapien
atgttttagtcgccaatcctactaa

SEQ ID NO: 5950650 - DNA, 25 bp, Homo sapien
acggttactcagggaaagaatacaa

SEQ ID NO: 5950651 - DNA, 25 bp, Homo sapien
aaaactgaaacactgggcgcagttg

SEQ ID NO: 5950652 - DNA, 25 bp, Homo sapien
gatgcagaagcttgttcccgattta

SEQ ID NO: 5950653 - DNA, 25 bp, Homo sapien
taaattcaacggagagtaattatga

SEQ ID NO: 5950654 - DNA, 25 bp, Homo sapien
gaaacactgggcgcagttgatgaaa

SEQ ID NO: 5950655 - DNA, 25 bp, Homo sapien
ctaaggaaatgggtatacgtgatga

SEQ ID NO: 5950656 - DNA, 25 bp, Homo sapien
ctgcttacttgaacgacataaattc

SEQ ID NO: 5950657 - DNA, 25 bp, Homo sapien
gctactgatgatgactgggactcca

SEQ ID NO: 5950658 - DNA, 25 bp, Homo sapien
ttgaacgacataaattcaacggaga

SEQ ID NO: 5950659 - DNA, 25 bp, Homo sapien
aagtaagtgggagcgtgataaaaga

SEQ ID NO: 5950660 - DNA, 25 bp, Homo sapien
gatacccccaaagaacaagaaggga

SEQ ID NO: 5950661 - DNA, 25 bp, Homo sapien
caagaagggaagaagcccggcaatg

SEQ ID NO: 5950662 - DNA, 25 bp, Homo sapien
ataaaaggcaactacaacaagcaaa

SEQ ID NO: 5950663 - DNA, 25 bp, Homo sapien
aagggaagaagcccggcaatgatga

SEQ ID NO: 5950664 - DNA, 25 bp, Homo sapien
tgtcagcattggagatctggaagct

SEQ ID NO: 5950665 - DNA, 25 bp, Homo sapien
gatgatacgagcactgcagaaggag

SEQ ID NO: 5950666 - DNA, 25 bp, Homo sapien
attcagaaccaaaaattggtatggg

SEQ ID NO: 5950667 - DNA, 25 bp, Homo sapien
atgactgggactccagaaaagatag

SEQ ID NO: 5950668 - DNA, 25 bp, Homo sapien
actgatgaaacactatgggatacag

SEQ ID NO: 5950669 - DNA, 25 bp, Homo sapien
cgctaaggaaatgggtatacgtgat

SEQ ID NO: 5950670 - DNA, 25 bp, Homo sapien
gagttcaaactaatcagaccccaga

SEQ ID NO: 5950671 - DNA, 25 bp, Homo sapien
atctgaagaaaaaacgggaacaaga

SEQ ID NO: 5950672 - DNA, 25 bp, Homo sapien
attatgatcctaaatcaagattgta

SEQ ID NO: 5950673 - DNA, 25 bp, Homo sapien
tcattcgctgtcattttgtaggaat

SEQ ID NO: 5950674 - DNA, 25 bp, Homo sapien
gatattgacaataattcagaaccaa

SEQ ID NO: 5950675 - DNA, 25 bp, Homo sapien
taggacatcaacgagattgagagaa

SEQ ID NO: 5950676 - DNA, 25 bp, Homo sapien
ataagtaagtgggagcgtgataaaa

SEQ ID NO: 5950677 - DNA, 25 bp, Homo sapien
gatagaactaatgaagttagaactt

SEQ ID NO: 5950678 - DNA, 25 bp, Homo sapien
gaataataacagcagaaacaacgaa

SEQ ID NO: 5950679 - DNA, 25 bp, Homo sapien
tacaaggattccgtaggttcattga

SEQ ID NO: 5950680 - DNA, 25 bp, Homo sapien
aagatgatgctgataattctcagtt

SEQ ID NO: 5950681 - DNA, 25 bp, Homo sapien
agaacaagaagggaagaagcccggc

SEQ ID NO: 5950682 - DNA, 25 bp, Homo sapien
tccgcagacatttgacaggtgaagg

SEQ ID NO: 5950683 - DNA, 25 bp, Homo sapien
aattcaacggagagtaattatgatc

SEQ ID NO: 5950684 - DNA, 25 bp, Homo sapien
cgccaatcctactaaatatgaatat

SEQ ID NO: 5950685 - DNA, 25 bp, Homo sapien
gtacaaaactgaaacactgggcgca

SEQ ID NO: 5950686 - DNA, 25 bp, Homo sapien
taatggcacagttttagtacgagct

SEQ ID NO: 5950687 - DNA, 25 bp, Homo sapien
aaggagaaagactgcatggaaaaac

SEQ ID NO: 5950688 - DNA, 25 bp, Homo sapien
aaaaaagcgactacttggtgcatca

SEQ ID NO: 5950689 - DNA, 25 bp, Homo sapien
taaggaaaaagtacaacatgtttta

SEQ ID NO: 5950690 - DNA, 25 bp, Homo sapien
tcaaactaatcagaccccagaagat

SEQ ID NO: 5950691 - DNA, 25 bp, Homo sapien
gaagttagaactttacaaggattcc

SEQ ID NO: 5950692 - DNA, 25 bp, Homo sapien
tcagaaccaaaaattggtatgggta

SEQ ID NO: 5950693 - DNA, 25 bp, Homo sapien
ccagtttgctagatctcacgctaag

SEQ ID NO: 5950694 - DNA, 25 bp, Homo sapien
agattgtcagcattggagatctgga

SEQ ID NO: 5950695 - DNA, 25 bp, Homo sapien
gttagaactttacaaggattccgta

SEQ ID NO: 5950696 - DNA, 25 bp, Homo sapien
cgcagacatttgacaggtgaaggcc

SEQ ID NO: 5950697 - DNA, 25 bp, Homo sapien
aagcccggcaatgatgatacgagca

SEQ ID NO: 5950698 - DNA, 25 bp, Homo sapien
catggaaaaacctcgtaagatgcag

SEQ ID NO: 5950699 - DNA, 25 bp, Homo sapien
gatgatgactgggactccagaaaag

SEQ ID NO: 5950700 - DNA, 25 bp, Homo sapien
gatggtacaaagcaatctgaggaac

SEQ ID NO: 5950701 - DNA, 25 bp, Homo sapien
agggaaagaatacaatgaactgata

SEQ ID NO: 5950702 - DNA, 25 bp, Homo sapien
tgcatggaaaaacctcgtaagatgc

SEQ ID NO: 5950703 - DNA, 25 bp, Homo sapien
ggcaatgatgatacgagcactgcag

SEQ ID NO: 5950704 - DNA, 25 bp, Homo sapien
ggatgagttcaaactaatcagaccc

SEQ ID NO: 5950705 - DNA, 25 bp, Homo sapien
atgaagttagaactttacaaggatt

SEQ ID NO: 5950706 - DNA, 25 bp, Homo sapien
caataattcagaaccaaaaattggt

SEQ ID NO: 5950707 - DNA, 25 bp, Homo sapien
agaagggaagaagcccggcaatgat

SEQ ID NO: 5950708 - DNA, 25 bp, Homo sapien
tacaatgaactgataagtaagtggg

SEQ ID NO: 5950709 - DNA, 25 bp, Homo sapien
aagatagatggtacggttactcagg

SEQ ID NO: 5950710 - DNA, 25 bp, Homo sapien
agattctcattcgctgtcattttgt

SEQ ID NO: 5950711 - DNA, 25 bp, Homo sapien
tcagggaaagaatacaatgaactga

SEQ ID NO: 5950712 - DNA, 25 bp, Homo sapien
gctgtcattttgtaggaattgtggg

SEQ ID NO: 5950713 - DNA, 25 bp, Homo sapien
gataaggaaaaagtacaacatgttt

SEQ ID NO: 5950714 - DNA, 25 bp, Homo sapien
attgtcagcattggagatctggaag

SEQ ID NO: 5950715 - DNA, 25 bp, Homo sapien
aataacagcagaaacaacgaaaatc

SEQ ID NO: 5950716 - DNA, 25 bp, Homo sapien
aaatgggtatacgtgatgaaattga

SEQ ID NO: 5950717 - DNA, 25 bp, Homo sapien
gaaatcaaccatggtactataagga

SEQ ID NO: 5950718 - DNA, 25 bp, Homo sapien
taatgaagttagaactttacaagga

SEQ ID NO: 5950719 - DNA, 25 bp, Homo sapien
caatgatgatacgagcactgcagaa

SEQ ID NO: 5950720 - DNA, 25 bp, Homo sapien
tgatacgagcactgcagaaggagga

SEQ ID NO: 5950721 - DNA, 25 bp, Homo sapien
aaaagacaaatcccaaactgatgaa

SEQ ID NO: 5950722 - DNA, 25 bp, Homo sapien
atgaaaatattcatatccccaggta

SEQ ID NO: 5950723 - DNA, 25 bp, Homo sapien
tagatattgacaataattcagaacc

SEQ ID NO: 5950724 - DNA, 25 bp, Homo sapien
gagctactgatgatgactgggactc

SEQ ID NO: 5950725 - DNA, 25 bp, Homo sapien
tagatggtacaaagcaatctgagga

SEQ ID NO: 5950726 - DNA, 25 bp, Homo sapien
acggagagtaattatgatcctaaat

SEQ ID NO: 5950727 - DNA, 25 bp, Homo sapien
gtatattagaaatcaaccatggtac

SEQ ID NO: 5950728 - DNA, 25 bp, Homo sapien
aaagaatacaatgaactgataagta

SEQ ID NO: 5950729 - DNA, 25 bp, Homo sapien
tatgggtataaaggatgagttcaaa

SEQ ID NO: 5950730 - DNA, 25 bp, Homo sapien
tgggtataaaggatgagttcaaact

SEQ ID NO: 5950731 - DNA, 25 bp, Homo sapien
attagaaatcaaccatggtactata

SEQ ID NO: 5950732 - DNA, 25 bp, Homo sapien
gtacgagctactgatgatgactggg

SEQ ID NO: 5950733 - DNA, 25 bp, Homo sapien
agtaattatgatcctaaatcaagat

SEQ ID NO: 5950734 - DNA, 25 bp, Homo sapien
atgaatatctgaagaaaaaacggga

SEQ ID NO: 5950735 - DNA, 25 bp, Homo sapien
gacataaattcaacggagagtaatt

SEQ ID NO: 5950736 - DNA, 25 bp, Homo sapien
attcatatccccaggtatattagaa

SEQ ID NO: 5950737 - DNA, 25 bp, Homo sapien
aaggaaaagacaaatcccaaactga

SEQ ID NO: 5950738 - DNA, 25 bp, Homo sapien
caacgagattgagagaagataaggc

SEQ ID NO: 5950739 - DNA, 25 bp, Homo sapien
atctcacgctaaggaaatgggtata

SEQ ID NO: 5950740 - DNA, 25 bp, Homo sapien
tttgctagatctcacgctaaggaaa

SEQ ID NO: 5950741 - DNA, 25 bp, Homo sapien
aagtgggagcgtgataaaagaaata

SEQ ID NO: 5950742 - DNA, 25 bp, Homo sapien
ggaacaagaagaaaccaagcagccc

SEQ ID NO: 5950743 - DNA, 25 bp, Homo sapien
ttggagatctggaagctaggaaagt

SEQ ID NO: 5950744 - DNA, 25 bp, Homo sapien
tccttgtaaagttctaacttcatta

SEQ ID NO: 5950745 - DNA, 25 bp, Homo sapien
ttttgatttttcatcaactgcgccc

SEQ ID NO: 5950746 - DNA, 25 bp, Homo sapien
ttgatgtcctatacaactgagaatt

SEQ ID NO: 5950747 - DNA, 25 bp, Homo sapien
agtttgaactcatcctttataccca

SEQ ID NO: 5950748 - DNA, 25 bp, Homo sapien
tcatctttcttcaatgaacctacgg

SEQ ID NO: 5950749 - DNA, 25 bp, Homo sapien
ttttatttctgttaatagtgcttcg

SEQ ID NO: 5950750 - DNA, 25 bp, Homo sapien
tttgcttgttgtagttgccttttat

SEQ ID NO: 5950751 - DNA, 25 bp, Homo sapien
ctccttctgcagtgctcgtatcatc

SEQ ID NO: 5950752 - DNA, 25 bp, Homo sapien
cgctcccacttacttatcagttcat

SEQ ID NO: 5950753 - DNA, 25 bp, Homo sapien
ttatcacgctcccacttacttatca

SEQ ID NO: 5950754 - DNA, 25 bp, Homo sapien
taaaacatgttgtactttttcctta

SEQ ID NO: 5950755 - DNA, 25 bp, Homo sapien
tcctccttctgcagtgctcgtatca

SEQ ID NO: 5950756 - DNA, 25 bp, Homo sapien
gtgccattatttttttgtgaattta

SEQ ID NO: 5950757 - DNA, 25 bp, Homo sapien
tcataattactctccgttgaattta

SEQ ID NO: 5950758 - DNA, 25 bp, Homo sapien
cacgtatacccatttccttagcgtg

SEQ ID NO: 5950759 - DNA, 25 bp, Homo sapien
ttctctcaatctcgttgatgtccta

SEQ ID NO: 5950760 - DNA, 25 bp, Homo sapien
cttgttgtagttgccttttatttct

SEQ ID NO: 5950761 - DNA, 25 bp, Homo sapien
gccttatcttctctcaatctcgttg

SEQ ID NO: 5950762 - DNA, 25 bp, Homo sapien
tggggatatgaatattttcattttt

SEQ ID NO: 5950763 - DNA, 25 bp, Homo sapien
tttcttttatcacgctcccacttac

SEQ ID NO: 5950764 - DNA, 25 bp, Homo sapien
aaaatgacagcgaatgagaatctcg

SEQ ID NO: 5950765 - DNA, 25 bp, Homo sapien
agatattcatatttagtaggattgg

SEQ ID NO: 5950766 - DNA, 25 bp, Homo sapien
atcacgtatacccatttccttagcg

SEQ ID NO: 5950767 - DNA, 25 bp, Homo sapien
aatcgggaacaagcttctgcatctt

SEQ ID NO: 5950768 - DNA, 25 bp, Homo sapien
ctgtgccattatttttttgtgaatt

SEQ ID NO: 5950769 - DNA, 25 bp, Homo sapien
tccgttgaatttatgtcgttcaagt

SEQ ID NO: 5950770 - DNA, 25 bp, Homo sapien
tatacccatttccttagcgtgagat

SEQ ID NO: 5950771 - DNA, 25 bp, Homo sapien
ttcattgtattctttccctgagtaa

SEQ ID NO: 5950772 - DNA, 25 bp, Homo sapien
ctcttcatctgtatcccatagtgtt

SEQ ID NO: 5950773 - DNA, 25 bp, Homo sapien
tcagatattcatatttagtaggatt

SEQ ID NO: 5950774 - DNA, 25 bp, Homo sapien
ggttctgaattattgtcaatatcta

SEQ ID NO: 5950775 - DNA, 25 bp, Homo sapien
attttatttcttttatcacgctccc

SEQ ID NO: 5950776 - DNA, 25 bp, Homo sapien
tatgatgcaccaagtagtcgctttt

SEQ ID NO: 5950777 - DNA, 25 bp, Homo sapien
tatacccataccaatttttggttct

SEQ ID NO: 5950778 - DNA, 25 bp, Homo sapien
ttttcttttgcttgttgtagttgcc

SEQ ID NO: 5950779 - DNA, 25 bp, Homo sapien
agtaggattggcgactaaaacatgt

SEQ ID NO: 5950780 - DNA, 25 bp, Homo sapien
cacgctcccacttacttatcagttc

SEQ ID NO: 5950781 - DNA, 25 bp, Homo sapien
aagcttctgcatcttacgaggtttt

SEQ ID NO: 5950782 - DNA, 25 bp, Homo sapien
ttttggttctgaattattgtcaata

SEQ ID NO: 5950783 - DNA, 25 bp, Homo sapien
ttttatcacgctcccacttacttat

SEQ ID NO: 5950784 - DNA, 25 bp, Homo sapien
ctgcagtgctcgtatcatcattgcc

SEQ ID NO: 5950785 - DNA, 25 bp, Homo sapien
atcttctggggtctgattagtttga

SEQ ID NO: 5950786 - DNA, 25 bp, Homo sapien
ttgtattctttccctgagtaaccgt

SEQ ID NO: 5950787 - DNA, 25 bp, Homo sapien
tgaacctacggaatccttgtaaagt

SEQ ID NO: 5950788 - DNA, 25 bp, Homo sapien
gattagtttgaactcatcctttata

SEQ ID NO: 5950789 - DNA, 25 bp, Homo sapien
atagtgcttcgattttcgttgtttc

SEQ ID NO: 5950790 - DNA, 25 bp, Homo sapien
aaacatgttgtactttttccttatc

SEQ ID NO: 5950791 - DNA, 25 bp, Homo sapien
gttctaacttcattagttctatctc

SEQ ID NO: 5950792 - DNA, 25 bp, Homo sapien
caattcctacaaaatgacagcgaat

SEQ ID NO: 5950793 - DNA, 25 bp, Homo sapien
cttgtaaagttctaacttcattagt

SEQ ID NO: 5950794 - DNA, 25 bp, Homo sapien
aactgagaattatcagcatcatctt

SEQ ID NO: 5950795 - DNA, 25 bp, Homo sapien
tttcctagcttccagatctccaatg

SEQ ID NO: 5950796 - DNA, 25 bp, Homo sapien
ctaaaactgtgccattatttttttg

SEQ ID NO: 5950797 - DNA, 25 bp, Homo sapien
ctaatatacctggggatatgaatat

SEQ ID NO: 5950798 - DNA, 25 bp, Homo sapien
cttttttctcctccttctgcagtgc

SEQ ID NO: 5950799 - DNA, 25 bp, Homo sapien
cgaatgagaatctcggacggacatc

SEQ ID NO: 5950800 - DNA, 25 bp, Homo sapien
aattactctccgttgaatttatgtc

SEQ ID NO: 5950801 - DNA, 25 bp, Homo sapien
agtctttctccttatgccctgcttc

SEQ ID NO: 5950802 - DNA, 25 bp, Homo sapien
tgacagcgaatgagaatctcggacg

SEQ ID NO: 5950803 - DNA, 25 bp, Homo sapien
actttcctagcttccagatctccaa

SEQ ID NO: 5950804 - DNA, 25 bp, Homo sapien
taattttaggccttcacctgtcaaa

SEQ ID NO: 5950805 - DNA, 25 bp, Homo sapien
tcgggaacaagcttctgcatcttac

SEQ ID NO: 5950806 - DNA, 25 bp, Homo sapien
tcttttatcacgctcccacttactt

SEQ ID NO: 5950807 - DNA, 25 bp, Homo sapien
cgttcaagtaagcagccttatcttc

SEQ ID NO: 5950808 - DNA, 25 bp, Homo sapien
gaacaagcttctgcatcttacgagg

SEQ ID NO: 5950809 - DNA, 25 bp, Homo sapien
tatagtaccatggttgatttctaat

SEQ ID NO: 5950810 - DNA, 25 bp, Homo sapien
cagattgctttgtaccatctacttt

SEQ ID NO: 5950811 - DNA, 25 bp, Homo sapien
ttctgttaatagtgcttcgattttc

SEQ ID NO: 5950812 - DNA, 25 bp, Homo sapien
ctatacaactgagaattatcagcat

SEQ ID NO: 5950813 - DNA, 25 bp, Homo sapien
gtcccagtcatcatcagtagctcgt

SEQ ID NO: 5950814 - DNA, 25 bp, Homo sapien
ttagttctatctcttcatctgtatc

SEQ ID NO: 5950815 - DNA, 25 bp, Homo sapien
atctcttcatctgtatcccatagtg

SEQ ID NO: 5950816 - DNA, 25 bp, Homo sapien
tgtcaaatgtctgcggaacattttt

SEQ ID NO: 5950817 - DNA, 25 bp, Homo sapien
ctgcatcttacgaggtttttccatg

SEQ ID NO: 5950818 - DNA, 25 bp, Homo sapien
atttctgttaatagtgcttcgattt

SEQ ID NO: 5950819 - DNA, 25 bp, Homo sapien
ttgctttgtaccatctactttccta

SEQ ID NO: 5950820 - DNA, 25 bp, Homo sapien
tttcatcacgtatacccatttcctt

SEQ ID NO: 5950821 - DNA, 25 bp, Homo sapien
gcagtctttctccttatgccctgct

SEQ ID NO: 5950822 - DNA, 25 bp, Homo sapien
agctcgtactaaaactgtgccatta

SEQ ID NO: 5950823 - DNA, 25 bp, Homo sapien
catcctttatacccataccaatttt

SEQ ID NO: 5950824 - DNA, 25 bp, Homo sapien
caatgctgacaatcttgggctgctt

SEQ ID NO: 5950825 - DNA, 25 bp, Homo sapien
tcgtttaattttaggccttcacctg

SEQ ID NO: 5950826 - DNA, 25 bp, Homo sapien
gatctagcaaactggttcaattcgt

SEQ ID NO: 5950827 - DNA, 25 bp, Homo sapien
accatggttgatttctaatatacct

SEQ ID NO: 5950828 - DNA, 25 bp, Homo sapien
atgttgtactttttccttatcctca

SEQ ID NO: 5950829 - DNA, 25 bp, Homo sapien
atttagtaggattggcgactaaaac

SEQ ID NO: 5950830 - DNA, 25 bp, Homo sapien
atgctgacaatcttgggctgcttgg

SEQ ID NO: 5950831 - DNA, 25 bp, Homo sapien
ttcttttgcttgttgtagttgcctt

SEQ ID NO: 5950832 - DNA, 25 bp, Homo sapien
tacccatttccttagcgtgagatct

SEQ ID NO: 5950833 - DNA, 25 bp, Homo sapien
tgtcaatatctaaagcacccccttt

SEQ ID NO: 5950834 - DNA, 25 bp, Homo sapien
attgtcaatatctaaagcaccccct

SEQ ID NO: 5950835 - DNA, 25 bp, Homo sapien
cgttgatgtcctatacaactgagaa

SEQ ID NO: 5950836 - DNA, 25 bp, Homo sapien
aatgagaatctcggacggacatctt

SEQ ID NO: 5950837 - DNA, 25 bp, Homo sapien
cagtagctcgtactaaaactgtgcc

SEQ ID NO: 5950838 - DNA, 25 bp, Homo sapien
aatgaacctacggaatccttgtaaa

SEQ ID NO: 5950839 - DNA, 25 bp, Homo sapien
tctttccctgagtaaccgtaccatc

SEQ ID NO: 5950840 - DNA, 25 bp, Homo sapien
gtgagatctagcaaactggttcaat

SEQ ID NO: 5950841 - DNA, 25 bp, Homo sapien
agaatctcggacggacatcttctgg

SEQ ID NO: 5950842 - DNA, 25 bp, Homo sapien
atgtctgcggaacatttttgatttt

SEQ ID NO: 5950843 - DNA, 25 bp, Homo sapien
cccatagtgtttcatcagtttggga

SEQ ID NO: 5950844 - DNA, 25 bp, Homo sapien
tctttgggggtatccttatagtacc

SEQ ID NO: 5950845 - DNA, 25 bp, Homo sapien
ttctatctcttcatctgtatcccat

SEQ ID NO: 5950846 - DNA, 25 bp, Homo sapien
tgagtaaccgtaccatctatctttt

SEQ ID NO: 5950847 - DNA, 25 bp, Homo sapien
cctatgatgcaccaagtagtcgctt

SEQ ID NO: 5950848 - DNA, 25 bp, Homo sapien
tacgaggtttttccatgcagtcttt

SEQ ID NO: 5950849 - DNA, 25 bp, Homo sapien
gttcccgttttttcttcagatattc

SEQ ID NO: 5950850 - DNA, 25 bp, Homo sapien
ctgattagtttgaactcatccttta

SEQ ID NO: 5950851 - DNA, 25 bp, Homo sapien
atcattgccgggcttcttcccttct

SEQ ID NO: 5950852 - DNA, 25 bp, Homo sapien
tcatatttagtaggattggcgacta

SEQ ID NO: 5950853 - DNA, 25 bp, Homo sapien
cacttacttatcagttcattgtatt

SEQ ID NO: 5950854 - DNA, 25 bp, Homo sapien
tgtcctatacaactgagaattatca

SEQ ID NO: 5950855 - DNA, 25 bp, Homo sapien
acggacatcttctggggtctgatta

SEQ ID NO: 5950856 - DNA, 25 bp, Homo sapien
gtcatcatcagtagctcgtactaaa

SEQ ID NO: 5950857 - DNA, 25 bp, Homo sapien
taagcagccttatcttctctcaatc

SEQ ID NO: 5950858 - DNA, 25 bp, Homo sapien
tcttgttctttgggggtatccttat

SEQ ID NO: 5950859 - DNA, 25 bp, Homo sapien
tttatttcttttatcacgctcccac

SEQ ID NO: 5950860 - DNA, 25 bp, Homo sapien
agtgctcgtatcatcattgccgggc

SEQ ID NO: 5950861 - DNA, 25 bp, Homo sapien
ctacaaaatgacagcgaatgagaat

SEQ ID NO: 5950862 - DNA, 25 bp, Homo sapien
tgtaaagttctaacttcattagttc

SEQ ID NO: 5950863 - DNA, 25 bp, Homo sapien
gtaccatggttgatttctaatatac

SEQ ID NO: 5950864 - DNA, 25 bp, Homo sapien
ttcacctgtcaaatgtctgcggaac

SEQ ID NO: 5950865 - DNA, 25 bp, Homo sapien
ttccatgcagtctttctccttatgc

SEQ ID NO: 5950866 - DNA, 25 bp, Homo sapien
gcttccccacaattcctacaaaatg

SEQ ID NO: 5950867 - DNA, 25 bp, Homo sapien
ttgttcccgttttttcttcagatat

SEQ ID NO: 5950868 - DNA, 25 bp, Homo sapien
cagtgtttcagttttgtacaatctt

SEQ ID NO: 5950869 - DNA, 25 bp, Homo sapien
tcagcatcatctttcttcaatgaac

SEQ ID NO: 5950870 - DNA, 25 bp, Homo sapien
tagtgtttcatcagtttgggatttg

SEQ ID NO: 5950871 - DNA, 25 bp, Homo sapien
tcagtttgggatttgtcttttcctt

SEQ ID NO: 5950872 - DNA, 25 bp, Homo sapien
tttgtaccatctactttcctagctt

SEQ ID NO: 5950873 - DNA, 25 bp, Homo sapien
ttgttctttgggggtatccttatag

SEQ ID NO: 5950874 - DNA, 25 bp, Homo sapien
agcagccttatcttctctcaatctc

SEQ ID NO: 5950875 - DNA, 25 bp, Homo sapien
aatatacctggggatatgaatattt

SEQ ID NO: 5950876 - DNA, 25 bp, Homo sapien
ccatgcagtctttctccttatgccc

SEQ ID NO: 5950877 - DNA, 25 bp, Homo sapien
ccttcacctgtcaaatgtctgcgga

SEQ ID NO: 5950878 - DNA, 25 bp, Homo sapien
gcaaactggttcaattcgtttaatt

SEQ ID NO: 5950879 - DNA, 25 bp, Homo sapien
cttttctggagtcccagtcatcatc

SEQ ID NO: 5950880 - DNA, 25 bp, Homo sapien
ttaggatcataattactctccgttg

SEQ ID NO: 5950881 - DNA, 25 bp, Homo sapien
tgagaatctcggacggacatcttct

SEQ ID NO: 5950882 - DNA, 25 bp, Homo sapien
cgaggtttttccatgcagtctttct

SEQ ID NO: 5950883 - DNA, 25 bp, Homo sapien
ctgtatcccatagtgtttcatcagt

SEQ ID NO: 5950884 - DNA, 25 bp, Homo sapien
gggtctgattagtttgaactcatcc

SEQ ID NO: 5950885 - DNA, 25 bp, Homo sapien
tttccctgagtaaccgtaccatcta

SEQ ID NO: 5950886 - DNA, 25 bp, Homo sapien
cttccagatctccaatgctgacaat

SEQ ID NO: 5950887 - DNA, 25 bp, Homo sapien
tccttagcgtgagatctagcaaact

SEQ ID NO: 5950888 - DNA, 25 bp, Homo sapien
actctccgttgaatttatgtcgttc

SEQ ID NO: 5950889 - DNA, 25 bp, Homo sapien
attttaggccttcacctgtcaaatg

SEQ ID NO: 5950890 - DNA, 25 bp, Homo sapien
tcatcacgtatacccatttccttag

SEQ ID NO: 5950891 - DNA, 25 bp, Homo sapien
ctgcggaacatttttgatttttcat

SEQ ID NO: 5950892 - DNA, 25 bp, Homo sapien
atcttgatttaggatcataattact

SEQ ID NO: 5950893 - DNA, 25 bp, Homo sapien
tgtacaatcttgatttaggatcata

SEQ ID NO: 5950894 - DNA, 25 bp, Homo sapien
gtttttccatgcagtctttctcctt

SEQ ID NO: 5950895 - DNA, 25 bp, Homo sapien
gattgctttgtaccatctactttcc

SEQ ID NO: 5950896 - DNA, 25 bp, Homo sapien
cctacggaatccttgtaaagttcta

SEQ ID NO: 5950897 - DNA, 25 bp, Homo sapien
tcatcagtagctcgtactaaaactg

SEQ ID NO: 5950898 - DNA, 25 bp, Homo sapien
cttcgattttcgttgtttctgctgt

SEQ ID NO: 5950899 - DNA, 25 bp, Homo sapien
cttatcttctctcaatctcgttgat

SEQ ID NO: 5950900 - DNA, 25 bp, Homo sapien
gtattctttccctgagtaaccgtac

SEQ ID NO: 5950901 - DNA, 25 bp, Homo sapien
ttcttcaatgaacctacggaatcct

SEQ ID NO: 5950902 - DNA, 25 bp, Homo sapien
tttaagtggttccgttgttcctcag

SEQ ID NO: 5950903 - DNA, 25 bp, Homo sapien
ttttgctttttgcctatgatgcacc

SEQ ID NO: 5950904 - DNA, 25 bp, Homo sapien
cttcaatgaacctacggaatccttg

SEQ ID NO: 5950905 - DNA, 25 bp, Homo sapien
tttttgtgaatttaaatcgggaaca

SEQ ID NO: 5950906 - DNA, 25 bp, Homo sapien
tacaatcttgatttaggatcataat

SEQ ID NO: 5950907 - DNA, 25 bp, Homo sapien
gtttcagttttgtacaatcttgatt

SEQ ID NO: 5950908 - DNA, 25 bp, Homo sapien
atgtcgttcaagtaagcagccttat

SEQ ID NO: 5950909 - DNA, 25 bp, Homo sapien
atgcagtctttctccttatgccctg

SEQ ID NO: 5950910 - DNA, 25 bp, Homo sapien
cgtatacccatttccttagcgtgag

SEQ ID NO: 5950911 - DNA, 25 bp, Homo sapien
tcgattttcgttgtttctgctgtta

SEQ ID NO: 5950912 - DNA, 25 bp, Homo sapien
atcaactgcgcccagtgtttcagtt

SEQ ID NO: 5950913 - DNA, 25 bp, Homo sapien
attcctacaaaatgacagcgaatga

SEQ ID NO: 5950914 - DNA, 25 bp, Homo sapien
agttctatctcttcatctgtatccc

SEQ ID NO: 5950915 - DNA, 25 bp, Homo sapien
tcctttatacccataccaatttttg

SEQ ID NO: 5950916 - DNA, 25 bp, Homo sapien
ccttatcctcaatttcatcacgtat

SEQ ID NO: 5950917 - DNA, 25 bp, Homo sapien
ctgagaattatcagcatcatctttc

SEQ ID NO: 5950918 - DNA, 25 bp, Homo sapien
agtgcttcgattttcgttgtttctg

SEQ ID NO: 5950919 - DNA, 25 bp, Homo sapien
gcatcttacgaggtttttccatgca

SEQ ID NO: 5950920 - DNA, 25 bp, Homo sapien
gtcgttcaagtaagcagccttatct

SEQ ID NO: 5950921 - DNA, 25 bp, Homo sapien
cataccaatttttggttctgaatta

SEQ ID NO: 5950922 - DNA, 25 bp, Homo sapien
gttaatagtgcttcgattttcgttg

SEQ ID NO: 5950923 - DNA, 25 bp, Homo sapien
cagccttatcttctctcaatctcgt

SEQ ID NO: 5950924 - DNA, 25 bp, Homo sapien
tctccgttgaatttatgtcgttcaa

SEQ ID NO: 5950925 - DNA, 25 bp, Homo sapien
tctcctccttctgcagtgctcgtat

SEQ ID NO: 5950926 - DNA, 25 bp, Homo sapien
ttactctccgttgaatttatgtcgt

SEQ ID NO: 5950927 - DNA, 25 bp, Homo sapien
cctggggatatgaatattttcattt

SEQ ID NO: 5950928 - DNA, 25 bp, Homo sapien
tcagttcattgtattctttccctga

SEQ ID NO: 5950929 - DNA, 25 bp, Homo sapien
agtggttccgttgttcctcagattg

SEQ ID NO: 5950930 - DNA, 25 bp, Homo sapien
tgcttgttgtagttgccttttattt

SEQ ID NO: 5950931 - DNA, 25 bp, Homo sapien
tacccataccaatttttggttctga

SEQ ID NO: 5950932 - DNA, 25 bp, Homo sapien
catcatcagtagctcgtactaaaac

SEQ ID NO: 5950933 - DNA, 25 bp, Homo sapien
aatctcggacggacatcttctgggg

SEQ ID NO: 5950934 - DNA, 25 bp, Homo sapien
tacggaatccttgtaaagttctaac

SEQ ID NO: 5950935 - DNA, 25 bp, Homo sapien
ttgttcctcagattgctttgtacca

SEQ ID NO: 5950936 - DNA, 25 bp, Homo sapien
atcagtagctcgtactaaaactgtg

SEQ ID NO: 5950937 - DNA, 25 bp, Homo sapien
ccttttgctttttgcctatgatgca

SEQ ID NO: 5950938 - DNA, 25 bp, Homo sapien
cttgatttaggatcataattactct

SEQ ID NO: 5950939 - DNA, 25 bp, Homo sapien
tgaattattgtcaatatctaaagca

SEQ ID NO: 5950940 - DNA, 25 bp, Homo sapien
cccacaattcctacaaaatgacagc

SEQ ID NO: 5950941 - DNA, 25 bp, Homo sapien
caagtagtcgcttttttctcctcct

SEQ ID NO: 5950942 - DNA, 25 bp, Homo sapien
tactaaaactgtgccattatttttt

SEQ ID NO: 5950943 - DNA, 25 bp, Homo sapien
atcttacgaggtttttccatgcagt

SEQ ID NO: 5950944 - DNA, 25 bp, Homo sapien
ttctgcatcttacgaggtttttcca

SEQ ID NO: 5950945 - DNA, 25 bp, Homo sapien
ttggttctgaattattgtcaatatc

SEQ ID NO: 5950946 - DNA, 25 bp, Homo sapien
catataaatcttttaagtggttccg

SEQ ID NO: 5950947 - DNA, 25 bp, Homo sapien
ttaaccatataaatcttttaagtgg

SEQ ID NO: 5950948 - DNA, 25 bp, Homo sapien
ttcttcagatattcatatttagtag

SEQ ID NO: 5950949 - DNA, 25 bp, Homo sapien
ataattactctccgttgaatttatg

SEQ ID NO: 5950950 - DNA, 25 bp, Homo sapien
acaactgagaattatcagcatcatc

SEQ ID NO: 5950951 - DNA, 25 bp, Homo sapien
tagcaaactggttcaattcgtttaa

SEQ ID NO: 5950952 - DNA, 25 bp, Homo sapien
tatcagcatcatctttcttcaatga

SEQ ID NO: 5950953 - DNA, 25 bp, Homo sapien
taatagtgcttcgattttcgttgtt

SEQ ID NO: 5950954 - DNA, 25 bp, Homo sapien
cgtactaaaactgtgccattatttt

SEQ ID NO: 5950955 - DNA, 25 bp, Homo sapien
catttccttagcgtgagatctagca

SEQ ID NO: 5950956 - DNA, 25 bp, Homo sapien
aattattgtcaatatctaaagcacc

SEQ ID NO: 5950957 - DNA, 25 bp, Homo sapien
tgaatttaaatcgggaacaagcttc

SEQ ID NO: 5950958 - DNA, 25 bp, Homo sapien
tgcttcgattttcgttgtttctgct

SEQ ID NO: 5950959 - DNA, 25 bp, Homo sapien
tctagcaaactggttcaattcgttt

SEQ ID NO: 5950960 - DNA, 25 bp, Homo sapien
aaaactgtgccattatttttttgtg

SEQ ID NO: 5950961 - DNA, 25 bp, Homo sapien
ttcatcagtttgggatttgtctttt

SEQ ID NO: 5950962 - DNA, 25 bp, Homo sapien
tttgtgaatttaaatcgggaacaag

SEQ ID NO: 5950963 - DNA, 25 bp, Homo sapien
cgtatcatcattgccgggcttcttc

SEQ ID NO: 5950964 - DNA, 25 bp, Homo sapien
aatccttgtaaagttctaacttcat

SEQ ID NO: 5950965 - DNA, 25 bp, Homo sapien
tccagatctccaatgctgacaatct

SEQ ID NO: 5950966 - DNA, 25 bp, Homo sapien
gtttcatcagtttgggatttgtctt

SEQ ID NO: 5950967 - DNA, 25 bp, Homo sapien
tttttgcctatgatgcaccaagtag

SEQ ID NO: 5950968 - DNA, 25 bp, Homo sapien
gttccgttgttcctcagattgcttt

SEQ ID NO: 5950969 - DNA, 25 bp, Homo sapien
gatttttcatcaactgcgcccagtg

SEQ ID NO: 5950970 - DNA, 25 bp, Homo sapien
ttcgttgtttctgctgttattattc

SEQ ID NO: 5950971 - DNA, 25 bp, Homo sapien
gttcctcagattgctttgtaccatc

SEQ ID NO: 5950972 - DNA, 25 bp, Homo sapien
gaattatcagcatcatctttcttca

SEQ ID NO: 5950973 - DNA, 25 bp, Homo sapien
tttttctcctccttctgcagtgctc

SEQ ID NO: 5950974 - DNA, 25 bp, Homo sapien
acaaaatgacagcgaatgagaatct

SEQ ID NO: 5950975 - DNA, 25 bp, Homo sapien
tcctcagattgctttgtaccatcta

SEQ ID NO: 5950976 - DNA, 25 bp, Homo sapien
tttctcctccttctgcagtgctcgt

SEQ ID NO: 5950977 - DNA, 25 bp, Homo sapien
cttacgaggtttttccatgcagtct

SEQ ID NO: 5950978 - DNA, 25 bp, Homo sapien
ccatctactttcctagcttccagat

SEQ ID NO: 5950979 - DNA, 25 bp, Homo sapien
tggttcaattcgtttaattttaggc

SEQ ID NO: 5950980 - DNA, 25 bp, Homo sapien
ctcccacttacttatcagttcattg

SEQ ID NO: 5950981 - DNA, 25 bp, Homo sapien
gcggaacatttttgatttttcatca

SEQ ID NO: 5950982 - DNA, 25 bp, Homo sapien
tgcctatgatgcaccaagtagtcgc

SEQ ID NO: 5950983 - DNA, 25 bp, Homo sapien
atctgtatcccatagtgtttcatca

SEQ ID NO: 5950984 - DNA, 25 bp, Homo sapien
aactcatcctttatacccataccaa

SEQ ID NO: 5950985 - DNA, 25 bp, Homo sapien
aatttaaatcgggaacaagcttctg

SEQ ID NO: 5950986 - DNA, 25 bp, Homo sapien
ctcagattgctttgtaccatctact

SEQ ID NO: 5950987 - DNA, 25 bp, Homo sapien
cttcatctgtatcccatagtgtttc

SEQ ID NO: 5950988 - DNA, 25 bp, Homo sapien
tcatcattgccgggcttcttccctt

SEQ ID NO: 5950989 - DNA, 25 bp, Homo sapien
ttccccacaattcctacaaaatgac

SEQ ID NO: 5950990 - DNA, 25 bp, Homo sapien
ctctcaatctcgttgatgtcctata

SEQ ID NO: 5950991 - DNA, 25 bp, Homo sapien
aatcttgggctgcttggtttcttct

SEQ ID NO: 5950992 - DNA, 25 bp, Homo sapien
tctggggtctgattagtttgaactc

SEQ ID NO: 5950993 - DNA, 25 bp, Homo sapien
caagtaagcagccttatcttctctc

SEQ ID NO: 5950994 - DNA, 25 bp, Homo sapien
ggacatcttctggggtctgattagt

SEQ ID NO: 5950995 - DNA, 25 bp, Homo sapien
gactaaaacatgttgtactttttcc

SEQ ID NO: 5950996 - DNA, 25 bp, Homo sapien
gcaccaagtagtcgcttttttctcc

SEQ ID NO: 5950997 - DNA, 25 bp, Homo sapien
cctgagtaaccgtaccatctatctt

SEQ ID NO: 5950998 - DNA, 25 bp, Homo sapien
cattagttctatctcttcatctgta

SEQ ID NO: 5950999 - DNA, 25 bp, Homo sapien
tacctggggatatgaatattttcat

SEQ ID NO: 5951000 - DNA, 25 bp, Homo sapien
gctttttgcctatgatgcaccaagt

SEQ ID NO: 5951001 - DNA, 25 bp, Homo sapien
tatccttatagtaccatggttgatt

SEQ ID NO: 5951002 - DNA, 25 bp, Homo sapien
tggcgactaaaacatgttgtacttt

SEQ ID NO: 5951003 - DNA, 25 bp, Homo sapien
ttttccatgcagtctttctccttat

SEQ ID NO: 5951004 - DNA, 25 bp, Homo sapien
atgccctgcttccccacaattccta

SEQ ID NO: 5951005 - DNA, 25 bp, Homo sapien
tccctgagtaaccgtaccatctatc

SEQ ID NO: 5951006 - DNA, 25 bp, Homo sapien
atatttagtaggattggcgactaaa

SEQ ID NO: 5951007 - DNA, 25 bp, Homo sapien
atcacgctcccacttacttatcagt

SEQ ID NO: 5951008 - DNA, 25 bp, Homo sapien
atcttttctggagtcccagtcatca

SEQ ID NO: 5951009 - DNA, 25 bp, Homo sapien
tcaatgaacctacggaatccttgta

SEQ ID NO: 5951010 - DNA, 25 bp, Homo sapien
cccataccaatttttggttctgaat

SEQ ID NO: 5951011 - DNA, 25 bp, Homo sapien
gagtcccagtcatcatcagtagctc

SEQ ID NO: 5951012 - DNA, 25 bp, Homo sapien
ttatttctgttaatagtgcttcgat

SEQ ID NO: 5951013 - DNA, 25 bp, Homo sapien
ccttctgcagtgctcgtatcatcat

SEQ ID NO: 5951014 - DNA, 25 bp, Homo sapien
ttcagttttgtacaatcttgattta

SEQ ID NO: 5951015 - DNA, 25 bp, Homo sapien
atttttgatttttcatcaactgcgc

SEQ ID NO: 5951016 - DNA, 25 bp, Homo sapien
catagtgtttcatcagtttgggatt

SEQ ID NO: 5951017 - DNA, 25 bp, Homo sapien
tatttcttttatcacgctcccactt

SEQ ID NO: 5951018 - DNA, 25 bp, Homo sapien
tctccaatgctgacaatcttgggct

SEQ ID NO: 5951019 - DNA, 25 bp, Homo sapien
tttgcctatgatgcaccaagtagtc

SEQ ID NO: 5951020 - DNA, 25 bp, Homo sapien
accgtaccatctatcttttctggag

SEQ ID NO: 5951021 - DNA, 25 bp, Homo sapien
ggcttcttcccttcttgttctttgg

SEQ ID NO: 5951022 - DNA, 25 bp, Homo sapien
atattcatatttagtaggattggcg

SEQ ID NO: 5951023 - DNA, 25 bp, Homo sapien
tccgttgttcctcagattgctttgt

SEQ ID NO: 5951024 - DNA, 25 bp, Homo sapien
tttgaactcatcctttatacccata

SEQ ID NO: 5951025 - DNA, 25 bp, Homo sapien
atctactttcctagcttccagatct

SEQ ID NO: 5951026 - DNA, 25 bp, Homo sapien
taagtggttccgttgttcctcagat

SEQ ID NO: 5951027 - DNA, 25 bp, Homo sapien
ctcaatctcgttgatgtcctataca

SEQ ID NO: 5951028 - DNA, 25 bp, Homo sapien
ttctaatatacctggggatatgaat

SEQ ID NO: 5951029 - DNA, 25 bp, Homo sapien
ctgttaatagtgcttcgattttcgt

SEQ ID NO: 5951030 - DNA, 25 bp, Homo sapien
agcgaatgagaatctcggacggaca

SEQ ID NO: 5951031 - DNA, 25 bp, Homo sapien
tatcttctctcaatctcgttgatgt

SEQ ID NO: 5951032 - DNA, 25 bp, Homo sapien
atctatcttttctggagtcccagtc

SEQ ID NO: 5951033 - DNA, 25 bp, Homo sapien
acatcttctggggtctgattagttt

SEQ ID NO: 5951034 - DNA, 25 bp, Homo sapien
tttaggccttcacctgtcaaatgtc

SEQ ID NO: 5951035 - DNA, 25 bp, Homo sapien
tgatttaggatcataattactctcc

SEQ ID NO: 5951036 - DNA, 25 bp, Homo sapien
gtagttgccttttatttctgttaat

SEQ ID NO: 5951037 - DNA, 25 bp, Homo sapien
agttcattgtattctttccctgagt

SEQ ID NO: 5951038 - DNA, 25 bp, Homo sapien
gatgtcctatacaactgagaattat

SEQ ID NO: 5951039 - DNA, 25 bp, Homo sapien
caatcttgatttaggatcataatta

SEQ ID NO: 5951040 - DNA, 25 bp, Homo sapien
ctttcttcaatgaacctacggaatc

SEQ ID NO: 5951041 - DNA, 25 bp, Homo sapien
gatctccaatgctgacaatcttggg

SEQ ID NO: 5951042 - DNA, 25 bp, Homo sapien
agtagtcgcttttttctcctccttc

SEQ ID NO: 5951043 - DNA, 25 bp, Homo sapien
tgggggtatccttatagtaccatgg

SEQ ID NO: 5951044 - DNA, 25 bp, Homo sapien
ctcgttgatgtcctatacaactgag

SEQ ID NO: 5951045 - DNA, 25 bp, Homo sapien
atacaactgagaattatcagcatca

SEQ ID NO: 5951046 - DNA, 25 bp, Homo sapien
ttttcgttgtttctgctgttattat

SEQ ID NO: 5951047 - DNA, 25 bp, Homo sapien
tctcggacggacatcttctggggtc

SEQ ID NO: 5951048 - DNA, 25 bp, Homo sapien
gtctgattagtttgaactcatcctt

SEQ ID NO: 5951049 - DNA, 25 bp, Homo sapien
agcttccagatctccaatgctgaca

SEQ ID NO: 5951050 - DNA, 25 bp, Homo sapien
tgttgtagttgccttttatttctgt

SEQ ID NO: 5951051 - DNA, 25 bp, Homo sapien
tgatgcaccaagtagtcgctttttt

SEQ ID NO: 5951052 - DNA, 25 bp, Homo sapien
tggttgatttctaatatacctgggg

SEQ ID NO: 5951053 - DNA, 25 bp, Homo sapien
gtagctcgtactaaaactgtgccat

SEQ ID NO: 5951054 - DNA, 25 bp, Homo sapien
ttatgccctgcttccccacaattcc

SEQ ID NO: 5951055 - DNA, 25 bp, Homo sapien
attatcagcatcatctttcttcaat

SEQ ID NO: 5951056 - DNA, 25 bp, Homo sapien
cattgtattctttccctgagtaacc

SEQ ID NO: 5951057 - DNA, 25 bp, Homo sapien
tgaactcatcctttatacccatacc

SEQ ID NO: 5951058 - DNA, 25 bp, Homo sapien
gtgtttcagttttgtacaatcttga

SEQ ID NO: 5951059 - DNA, 25 bp, Homo sapien
attcatatttagtaggattggcgac

SEQ ID NO: 5951060 - DNA, 25 bp, Homo sapien
gctgacaatcttgggctgcttggtt

SEQ ID NO: 5951061 - DNA, 25 bp, Homo sapien
tctggagtcccagtcatcatcagta

SEQ ID NO: 5951062 - DNA, 25 bp, Homo sapien
gcgtgagatctagcaaactggttca

SEQ ID NO: 5951063 - DNA, 25 bp, Homo sapien
cccacttacttatcagttcattgta

SEQ ID NO: 5951064 - DNA, 25 bp, Homo sapien
atcccatagtgtttcatcagtttgg

SEQ ID NO: 5951065 - DNA, 25 bp, Homo sapien
taccatctactttcctagcttccag

SEQ ID NO: 5951066 - DNA, 25 bp, Homo sapien
aatttcatcacgtatacccatttcc

SEQ ID NO: 5951067 - DNA, 25 bp, Homo sapien
gtatcccatagtgtttcatcagttt

SEQ ID NO: 5951068 - DNA, 25 bp, Homo sapien
gggaacaagcttctgcatcttacga

SEQ ID NO: 5951069 - DNA, 25 bp, Homo sapien
caatctcgttgatgtcctatacaac

SEQ ID NO: 5951070 - DNA, 25 bp, Homo sapien
cagatctccaatgctgacaatcttg

SEQ ID NO: 5951071 - DNA, 25 bp, Homo sapien
taggattggcgactaaaacatgttg

SEQ ID NO: 5951072 - DNA, 25 bp, Homo sapien
agtaagcagccttatcttctctcaa

SEQ ID NO: 5951073 - DNA, 25 bp, Homo sapien
tcccgttttttcttcagatattcat

SEQ ID NO: 5951074 - DNA, 25 bp, Homo sapien
gttgatttctaatatacctggggat

SEQ ID NO: 5951075 - DNA, 25 bp, Homo sapien
cccagtcatcatcagtagctcgtac

SEQ ID NO: 5951076 - DNA, 25 bp, Homo sapien
accaagtagtcgcttttttctcctc

SEQ ID NO: 5951077 - DNA, 25 bp, Homo sapien
ggattggcgactaaaacatgttgta

SEQ ID NO: 5951078 - DNA, 25 bp, Homo sapien
gattttcgttgtttctgctgttatt

SEQ ID NO: 5951079 - DNA, 25 bp, Homo sapien
caattcgtttaattttaggccttca

SEQ ID NO: 5951080 - DNA, 25 bp, Homo sapien
gtgtttcatcagtttgggatttgtc

SEQ ID NO: 5951081 - DNA, 25 bp, Homo sapien
cttttgcttgttgtagttgcctttt

SEQ ID NO: 5951082 - DNA, 25 bp, Homo sapien
tcatcaactgcgcccagtgtttcag

SEQ ID NO: 5951083 - DNA, 25 bp, Homo sapien
ctagcttccagatctccaatgctga

SEQ ID NO: 5951084 - DNA, 25 bp, Homo sapien
attctttccctgagtaaccgtacca

SEQ ID NO: 5951085 - DNA, 25 bp, Homo sapien
gaatttatgtcgttcaagtaagcag

SEQ ID NO: 5951086 - DNA, 25 bp, Homo sapien
cttatcagttcattgtattctttcc

SEQ ID NO: 5951087 - DNA, 25 bp, Homo sapien
gttttgtacaatcttgatttaggat

SEQ ID NO: 5951088 - DNA, 25 bp, Homo sapien
cgttgtttctgctgttattattcat

SEQ ID NO: 5951089 - DNA, 25 bp, Homo sapien
ccatctatcttttctggagtcccag

SEQ ID NO: 5951090 - DNA, 25 bp, Homo sapien
taaccgtaccatctatcttttctgg

SEQ ID NO: 5951091 - DNA, 25 bp, Homo sapien
aatgacagcgaatgagaatctcgga

SEQ ID NO: 5951092 - DNA, 25 bp, Homo sapien
tggttccgttgttcctcagattgct

SEQ ID NO: 5951093 - DNA, 25 bp, Homo sapien
ctatcttttctggagtcccagtcat

SEQ ID NO: 5951094 - DNA, 25 bp, Homo sapien
cgtaccatctatcttttctggagtc

SEQ ID NO: 5951095 - DNA, 25 bp, Homo sapien
agcatcatctttcttcaatgaacct

SEQ ID NO: 5951096 - DNA, 25 bp, Homo sapien
cagttttgtacaatcttgatttagg

SEQ ID NO: 5951097 - DNA, 25 bp, Homo sapien
ctactttcctagcttccagatctcc

SEQ ID NO: 5951098 - DNA, 25 bp, Homo sapien
tcttctctcaatctcgttgatgtcc

SEQ ID NO: 5951099 - DNA, 25 bp, Homo sapien
tggggtctgattagtttgaactcat

SEQ ID NO: 5951100 - DNA, 25 bp, Homo sapien
tgctcgtatcatcattgccgggctt

SEQ ID NO: 5951101 - DNA, 25 bp, Homo sapien
accatataaatcttttaagtggttc

SEQ ID NO: 5951102 - DNA, 25 bp, Homo sapien
cagtcatcatcagtagctcgtacta

SEQ ID NO: 5951103 - DNA, 25 bp, Homo sapien
atctcgttgatgtcctatacaactg

SEQ ID NO: 5951104 - DNA, 25 bp, Homo sapien
tcggacggacatcttctggggtctg

SEQ ID NO: 5951105 - DNA, 25 bp, Homo sapien
cctcaatttcatcacgtatacccat

SEQ ID NO: 5951106 - DNA, 25 bp, Homo sapien
atgcaccaagtagtcgcttttttct

SEQ ID NO: 5951107 - DNA, 25 bp, Homo sapien
tcatctgtatcccatagtgtttcat

SEQ ID NO: 5951108 - DNA, 25 bp, Homo sapien
gctttgtaccatctactttcctagc

SEQ ID NO: 5951109 - DNA, 25 bp, Homo sapien
agttgccttttatttctgttaatag

SEQ ID NO: 5951110 - DNA, 25 bp, Homo sapien
tttgtacaatcttgatttaggatca

SEQ ID NO: 5951111 - DNA, 25 bp, Homo sapien
actgcgcccagtgtttcagttttgt

SEQ ID NO: 5951112 - DNA, 25 bp, Homo sapien
taccatctatcttttctggagtccc

SEQ ID NO: 5951113 - DNA, 25 bp, Homo sapien
ttgccgggcttcttcccttcttgtt

SEQ ID NO: 5951114 - DNA, 25 bp, Homo sapien
cttcagatattcatatttagtagga

SEQ ID NO: 5951115 - DNA, 25 bp, Homo sapien
acaagcttctgcatcttacgaggtt

SEQ ID NO: 5951116 - DNA, 25 bp, Homo sapien
cttatagtaccatggttgatttcta

SEQ ID NO: 5951117 - DNA, 25 bp, Homo sapien
tcctacaaaatgacagcgaatgaga

SEQ ID NO: 5951118 - DNA, 25 bp, Homo sapien
tatcagttcattgtattctttccct

SEQ ID NO: 5951119 - DNA, 25 bp, Homo sapien
ctcatcctttatacccataccaatt

SEQ ID NO: 5951120 - DNA, 25 bp, Homo sapien
gcttctgcatcttacgaggtttttc

SEQ ID NO: 5951121 - DNA, 25 bp, Homo sapien
tcccttcttgttctttgggggtatc

SEQ ID NO: 5951122 - DNA, 25 bp, Homo sapien
atttttggttctgaattattgtcaa

SEQ ID NO: 5951123 - DNA, 25 bp, Homo sapien
cccagtgtttcagttttgtacaatc

SEQ ID NO: 5951124 - DNA, 25 bp, Homo sapien
cattgccgggcttcttcccttcttg

SEQ ID NO: 5951125 - DNA, 25 bp, Homo sapien
tcaatatctaaagcacccccttttg

SEQ ID NO: 5951126 - DNA, 25 bp, Homo sapien
tttccttagcgtgagatctagcaaa

SEQ ID NO: 5951127 - DNA, 25 bp, Homo sapien
tacttatcagttcattgtattcttt

SEQ ID NO: 5951128 - DNA, 25 bp, Homo sapien
gagaattatcagcatcatctttctt

SEQ ID NO: 5951129 - DNA, 25 bp, Homo sapien
tgatttctaatatacctggggatat

SEQ ID NO: 5951130 - DNA, 25 bp, Homo sapien
ggtatccttatagtaccatggttga

SEQ ID NO: 5951131 - DNA, 25 bp, Homo sapien
tttttcatcaactgcgcccagtgtt

SEQ ID NO: 5951132 - DNA, 25 bp, Homo sapien
caatttttggttctgaattattgtc

SEQ ID NO: 5951133 - DNA, 25 bp, Homo sapien
atttaggatcataattactctccgt

SEQ ID NO: 5951134 - DNA, 25 bp, Homo sapien
cctgtcaaatgtctgcggaacattt

SEQ ID NO: 5951135 - DNA, 25 bp, Homo sapien
ggccttcacctgtcaaatgtctgcg

SEQ ID NO: 5951136 - DNA, 25 bp, Homo sapien
tgcttggtttcttcttgttcccgtt

SEQ ID NO: 5951137 - DNA, 25 bp, Homo sapien
catggttgatttctaatatacctgg

SEQ ID NO: 5951138 - DNA, 25 bp, Homo sapien
atttctaatatacctggggatatga

SEQ ID NO: 5951139 - DNA, 25 bp, Homo sapien
gctgcttggtttcttcttgttcccg

SEQ ID NO: 5951140 - DNA, 25 bp, Homo sapien
tagtcgcttttttctcctccttctg

SEQ ID NO: 5951141 - DNA, 25 bp, Homo sapien
tgacaatcttgggctgcttggtttc

SEQ ID NO: 5951142 - DNA, 25 bp, Homo sapien
aaatgtctgcggaacatttttgatt

SEQ ID NO: 5951143 - DNA, 25 bp, Homo sapien
tcctagcttccagatctccaatgct

SEQ ID NO: 5951144 - DNA, 25 bp, Homo sapien
gatcataattactctccgttgaatt

SEQ ID NO: 5951145 - DNA, 25 bp, Homo sapien
aggatcataattactctccgttgaa

SEQ ID NO: 5951146 - DNA, 25 bp, Homo sapien
tgtgaatttaaatcgggaacaagct

SEQ ID NO: 5951147 - DNA, 25 bp, Homo sapien
tttgggggtatccttatagtaccat

SEQ ID NO: 5951148 - DNA, 25 bp, Homo sapien
gttctttgggggtatccttatagta

SEQ ID NO: 5951149 - DNA, 25 bp, Homo sapien
gcgactaaaacatgttgtacttttt

SEQ ID NO: 5951150 - DNA, 25 bp, Homo sapien
ggggtatccttatagtaccatggtt

SEQ ID NO: 5951151 - DNA, 25 bp, Homo sapien
gagatctagcaaactggttcaattc

SEQ ID NO: 5951152 - DNA, 25 bp, Homo sapien
tcaaatgtctgcggaacatttttga

SEQ ID NO: 5951153 - DNA, 25 bp, Homo sapien
aggtttttccatgcagtctttctcc

SEQ ID NO: 5951154 - DNA, 25 bp, Homo sapien
tttcatcaactgcgcccagtgtttc

SEQ ID NO: 5951155 - DNA, 25 bp, Homo sapien
cttagcgtgagatctagcaaactgg

SEQ ID NO: 5951156 - DNA, 25 bp, Homo sapien
atttatgtcgttcaagtaagcagcc

SEQ ID NO: 5951157 - DNA, 25 bp, Homo sapien
ttgtagttgccttttatttctgtta

SEQ ID NO: 5951158 - DNA, 25 bp, Homo sapien
ctcgtactaaaactgtgccattatt

SEQ ID NO: 5951159 - DNA, 25 bp, Homo sapien
taaagttctaacttcattagttcta

SEQ ID NO: 5951160 - DNA, 25 bp, Homo sapien
tgcgcccagtgtttcagttttgtac

SEQ ID NO: 5951161 - DNA, 25 bp, Homo sapien
tggagtcccagtcatcatcagtagc

SEQ ID NO: 5951162 - DNA, 25 bp, Homo sapien
acatgttgtactttttccttatcct

SEQ ID NO: 5951163 - DNA, 25 bp, Homo sapien
ttgatttttcatcaactgcgcccag

SEQ ID NO: 5951164 - DNA, 25 bp, Homo sapien
ctatctcttcatctgtatcccatag

SEQ ID NO: 5951165 - DNA, 25 bp, Homo sapien
tcaatttcatcacgtatacccattt

SEQ ID NO: 5951166 - DNA, 25 bp, Homo sapien
attggcgactaaaacatgttgtact

SEQ ID NO: 5951167 - DNA, 25 bp, Homo sapien
gggctgcttggtttcttcttgttcc

SEQ ID NO: 5951168 - DNA, 25 bp, Homo sapien
accaatttttggttctgaattattg

SEQ ID NO: 5951169 - DNA, 25 bp, Homo sapien
cttctggggtctgattagtttgaac

SEQ ID NO: 5951170 - DNA, 25 bp, Homo sapien
gccttttatttctgttaatagtgct

SEQ ID NO: 5951171 - DNA, 25 bp, Homo sapien
ttgctttttgcctatgatgcaccaa

SEQ ID NO: 5951172 - DNA, 25 bp, Homo sapien
cgcccagtgtttcagttttgtacaa

SEQ ID NO: 5951173 - DNA, 25 bp, Homo sapien
tagtaccatggttgatttctaatat

SEQ ID NO: 5951174 - DNA, 25 bp, Homo sapien
gccgggcttcttcccttcttgttct

SEQ ID NO: 5951175 - DNA, 25 bp, Homo sapien
aactgtgccattatttttttgtgaa

SEQ ID NO: 5951176 - DNA, 25 bp, Homo sapien
cacaattcctacaaaatgacagcga

SEQ ID NO: 5951177 - DNA, 25 bp, Homo sapien
ttagtaggattggcgactaaaacat

SEQ ID NO: 5951178 - DNA, 25 bp, Homo sapien
cgttgaatttatgtcgttcaagtaa

SEQ ID NO: 5951179 - DNA, 25 bp, Homo sapien
gtctgcggaacatttttgatttttc

SEQ ID NO: 5951180 - DNA, 25 bp, Homo sapien
aagttctaacttcattagttctatc

SEQ ID NO: 5951181 - DNA, 25 bp, Homo sapien
catcagtttgggatttgtcttttcc

SEQ ID NO: 5951182 - DNA, 25 bp, Homo sapien
atcctcaatttcatcacgtataccc

SEQ ID NO: 5951183 - DNA, 25 bp, Homo sapien
tttaattttaggccttcacctgtca

SEQ ID NO: 5951184 - DNA, 25 bp, Homo sapien
caactgcgcccagtgtttcagtttt

SEQ ID NO: 5951185 - DNA, 25 bp, Homo sapien
tttctggagtcccagtcatcatcag

SEQ ID NO: 5951186 - DNA, 25 bp, Homo sapien
tcttgggctgcttggtttcttcttg

SEQ ID NO: 5951187 - DNA, 25 bp, Homo sapien
cgttgttcctcagattgctttgtac

SEQ ID NO: 5951188 - DNA, 25 bp, Homo sapien
tagcgtgagatctagcaaactggtt

SEQ ID NO: 5951189 - DNA, 25 bp, Homo sapien
ttatgtcgttcaagtaagcagcctt

SEQ ID NO: 5951190 - DNA, 25 bp, Homo sapien
taaatcgggaacaagcttctgcatc

SEQ ID NO: 5951191 - DNA, 25 bp, Homo sapien
atctttcttcaatgaacctacggaa

SEQ ID NO: 5951192 - DNA, 25 bp, Homo sapien
ctcgtatcatcattgccgggcttct

SEQ ID NO: 5951193 - DNA, 25 bp, Homo sapien
ttctgcagtgctcgtatcatcattg

SEQ ID NO: 5951194 - DNA, 25 bp, Homo sapien
ttatcctcaatttcatcacgtatac

SEQ ID NO: 5951195 - DNA, 25 bp, Homo sapien
catcatctttcttcaatgaacctac

SEQ ID NO: 5951196 - DNA, 25 bp, Homo sapien
tgtaccatctactttcctagcttcc

SEQ ID NO: 5951197 - DNA, 25 bp, Homo sapien
ttgggctgcttggtttcttcttgtt

SEQ ID NO: 5951198 - DNA, 25 bp, Homo sapien
cttacttatcagttcattgtattct

SEQ ID NO: 5951199 - DNA, 25 bp, Homo sapien
gcagtgctcgtatcatcattgccgg

SEQ ID NO: 5951200 - DNA, 25 bp, Homo sapien
ggacggacatcttctggggtctgat

SEQ ID NO: 5951201 - DNA, 25 bp, Homo sapien
ttcaagtaagcagccttatcttctc

SEQ ID NO: 5951202 - DNA, 25 bp, Homo sapien
tatacctggggatatgaatattttc

SEQ ID NO: 5951203 - DNA, 25 bp, Homo sapien
acaatcttgggctgcttggtttctt

SEQ ID NO: 5951204 - DNA, 25 bp, Homo sapien
taggccttcacctgtcaaatgtctg

SEQ ID NO: 5951205 - DNA, 25 bp, Homo sapien
ttgaatttatgtcgttcaagtaagc

SEQ ID NO: 5951206 - DNA, 25 bp, Homo sapien
cccatttccttagcgtgagatctag

SEQ ID NO: 5951207 - DNA, 25 bp, Homo sapien
agtaaccgtaccatctatcttttct

SEQ ID NO: 5951208 - DNA, 25 bp, Homo sapien
tccttatagtaccatggttgatttc

SEQ ID NO: 5951209 - DNA, 25 bp, Homo sapien
ttattgtcaatatctaaagcacccc

SEQ ID NO: 5951210 - DNA, 25 bp, Homo sapien
tctttctccttatgccctgcttccc

SEQ ID NO: 5951211 - DNA, 25 bp, Homo sapien
tccaatgctgacaatcttgggctgc

SEQ ID NO: 5951212 - DNA, 25 bp, Homo sapien
cacctgtcaaatgtctgcggaacat

SEQ ID NO: 5951213 - DNA, 25 bp, Homo sapien
tcttgttcccgttttttcttcagat

SEQ ID NO: 5951214 - DNA, 25 bp, Homo sapien
ggaatccttgtaaagttctaacttc

SEQ ID NO: 5951215 - DNA, 25 bp, Homo sapien
tcctatacaactgagaattatcagc

SEQ ID NO: 5951216 - DNA, 25 bp, Homo sapien
acagcgaatgagaatctcggacgga

SEQ ID NO: 5951217 - DNA, 25 bp, Homo sapien
tatcatcattgccgggcttcttccc

SEQ ID NO: 5951218 - DNA, 25 bp, Homo sapien
ttccttatcctcaatttcatcacgt

SEQ ID NO: 5951219 - DNA, 25 bp, Homo sapien
tttaaatcgggaacaagcttctgca

SEQ ID NO: 5951220 - DNA, 25 bp, Homo sapien
ttagtttgaactcatcctttatacc

SEQ ID NO: 5951221 - DNA, 25 bp, Homo sapien
gtcgcttttttctcctccttctgca

SEQ ID NO: 5951222 - DNA, 25 bp, Homo sapien
ctcccactagaacaaattgatgaag

SEQ ID NO: 5951223 - DNA, 25 bp, Homo sapien
ctttcgcaaatttctcgcagtcgta

SEQ ID NO: 5951224 - DNA, 25 bp, Homo sapien
ctggcagcaaaagacaacaatagat

SEQ ID NO: 5951225 - DNA, 25 bp, Homo sapien
cgtatatacagggaatgaaagttcc

SEQ ID NO: 5951226 - DNA, 25 bp, Homo sapien
tgaagattccgagagtaaacttggc

SEQ ID NO: 5951227 - DNA, 25 bp, Homo sapien
ctaatcagagtaaagatgcagactt

SEQ ID NO: 5951228 - DNA, 25 bp, Homo sapien
aaaatgaagagagttccgacgatga

SEQ ID NO: 5951229 - DNA, 25 bp, Homo sapien
atgatgccagctaacgaagataaag

SEQ ID NO: 5951230 - DNA, 25 bp, Homo sapien
gatcgaaaagctttatttttcccga

SEQ ID NO: 5951231 - DNA, 25 bp, Homo sapien
aacaatggcaacacattaaagtaca

SEQ ID NO: 5951232 - DNA, 25 bp, Homo sapien
gttccggcattaactttccacagac

SEQ ID NO: 5951233 - DNA, 25 bp, Homo sapien
ttaagcaattcaagaaagttacaaa

SEQ ID NO: 5951234 - DNA, 25 bp, Homo sapien
tagggccaaccataatgatttgtta

SEQ ID NO: 5951235 - DNA, 25 bp, Homo sapien
ttttcccgaaacttctaatcagagt

SEQ ID NO: 5951236 - DNA, 25 bp, Homo sapien
ttataatgctttacctaaaatgaaa

SEQ ID NO: 5951237 - DNA, 25 bp, Homo sapien
tatcgaaatagcaccacagaggcag

SEQ ID NO: 5951238 - DNA, 25 bp, Homo sapien
tcaactcaccatataagcttgactt

SEQ ID NO: 5951239 - DNA, 25 bp, Homo sapien
aagaaggcctcgatcctgaagaact

SEQ ID NO: 5951240 - DNA, 25 bp, Homo sapien
ggtggtctgcaacaactcataaaga

SEQ ID NO: 5951241 - DNA, 25 bp, Homo sapien
tcactcggaatcaagaagaaggtgc

SEQ ID NO: 5951242 - DNA, 25 bp, Homo sapien
cggcattaactttccacagacgccg

SEQ ID NO: 5951243 - DNA, 25 bp, Homo sapien
atgtaccagaaggctattccccatt

SEQ ID NO: 5951244 - DNA, 25 bp, Homo sapien
atatcgtatatacagggaatgaaag

SEQ ID NO: 5951245 - DNA, 25 bp, Homo sapien
gatttgttaagcaattcaagaaagt

SEQ ID NO: 5951246 - DNA, 25 bp, Homo sapien
agtctagttttaaaagatcttgcag

SEQ ID NO: 5951247 - DNA, 25 bp, Homo sapien
tcaagaagaaggtgcagcgttacca

SEQ ID NO: 5951248 - DNA, 25 bp, Homo sapien
aactccacgaagaatgagcaaaaaa

SEQ ID NO: 5951249 - DNA, 25 bp, Homo sapien
gactatgatatcgaaatagcaccac

SEQ ID NO: 5951250 - DNA, 25 bp, Homo sapien
aaggttgcatacccatgcgcaacaa

SEQ ID NO: 5951251 - DNA, 25 bp, Homo sapien
gggatgcgaacagcaacaatggcaa

SEQ ID NO: 5951252 - DNA, 25 bp, Homo sapien
gctattccccatttcaacaagatga

SEQ ID NO: 5951253 - DNA, 25 bp, Homo sapien
aagattccgagagtaaacttggcaa

SEQ ID NO: 5951254 - DNA, 25 bp, Homo sapien
aagtacggttctgtccttggttata

SEQ ID NO: 5951255 - DNA, 25 bp, Homo sapien
ctcacttgctgaaaaggtcgcactc

SEQ ID NO: 5951256 - DNA, 25 bp, Homo sapien
aaaagggatgcgaacagcaacaatg

SEQ ID NO: 5951257 - DNA, 25 bp, Homo sapien
aaggtgcagcgttaccactgctgtc

SEQ ID NO: 5951258 - DNA, 25 bp, Homo sapien
tgagactgagtgcatcactcggaat

SEQ ID NO: 5951259 - DNA, 25 bp, Homo sapien
cgccgtcccaaccatggagttagtg

SEQ ID NO: 5951260 - DNA, 25 bp, Homo sapien
tattttaaaaccacctgtaagattg

SEQ ID NO: 5951261 - DNA, 25 bp, Homo sapien
tggtggcctaggactatttaatgag

SEQ ID NO: 5951262 - DNA, 25 bp, Homo sapien
gacaccccagataaagttgatttac

SEQ ID NO: 5951263 - DNA, 25 bp, Homo sapien
tgagtgcatcactcggaatcaagaa

SEQ ID NO: 5951264 - DNA, 25 bp, Homo sapien
gcatacccatgcgcaacaacaagga

SEQ ID NO: 5951265 - DNA, 25 bp, Homo sapien
accatggagttagtgtacagcgaag

SEQ ID NO: 5951266 - DNA, 25 bp, Homo sapien
gtacagcgaagaaggcctcgatcct

SEQ ID NO: 5951267 - DNA, 25 bp, Homo sapien
tttaaaagatcttgcagattcaggt

SEQ ID NO: 5951268 - DNA, 25 bp, Homo sapien
taaaagatcttgcagattcaggtaa

SEQ ID NO: 5951269 - DNA, 25 bp, Homo sapien
cctaggactatttaatgagcaaggt

SEQ ID NO: 5951270 - DNA, 25 bp, Homo sapien
ccactgctgtctaagaacttcaaag

SEQ ID NO: 5951271 - DNA, 25 bp, Homo sapien
acgcaaaaacgaccaactcaggaaa

SEQ ID NO: 5951272 - DNA, 25 bp, Homo sapien
ggaccaactcaaaagggatgcgaac

SEQ ID NO: 5951273 - DNA, 25 bp, Homo sapien
gtggcctaggactatttaatgagca

SEQ ID NO: 5951274 - DNA, 25 bp, Homo sapien
caacaaggaagattgcctctggcag

SEQ ID NO: 5951275 - DNA, 25 bp, Homo sapien
taggactatttaatgagcaaggtgg

SEQ ID NO: 5951276 - DNA, 25 bp, Homo sapien
tcaacaagatgatattgaaaagctg

SEQ ID NO: 5951277 - DNA, 25 bp, Homo sapien
aaaaccacctgtaagattggaccaa

SEQ ID NO: 5951278 - DNA, 25 bp, Homo sapien
aacaactcataaagaactccacgaa

SEQ ID NO: 5951279 - DNA, 25 bp, Homo sapien
tgttaagcaattcaagaaagttaca

SEQ ID NO: 5951280 - DNA, 25 bp, Homo sapien
cttggaagacgaagatgacacccca

SEQ ID NO: 5951281 - DNA, 25 bp, Homo sapien
taatattttaaaaccacctgtaaga

SEQ ID NO: 5951282 - DNA, 25 bp, Homo sapien
gcgcaacaacaaggaagattgcctc

SEQ ID NO: 5951283 - DNA, 25 bp, Homo sapien
atgaattaaatggtggcctaggact

SEQ ID NO: 5951284 - DNA, 25 bp, Homo sapien
tctcgcagtcgtagtagggccaacc

SEQ ID NO: 5951285 - DNA, 25 bp, Homo sapien
aaagtgcacttttaaaacaggattc

SEQ ID NO: 5951286 - DNA, 25 bp, Homo sapien
acaactacagaatacactatctata

SEQ ID NO: 5951287 - DNA, 25 bp, Homo sapien
cgaccaactcaggaaactttcgcaa

SEQ ID NO: 5951288 - DNA, 25 bp, Homo sapien
atgcgcaacaacaaggaagattgcc

SEQ ID NO: 5951289 - DNA, 25 bp, Homo sapien
ggagggaaggaggtgtcacccacaa

SEQ ID NO: 5951290 - DNA, 25 bp, Homo sapien
tagttttaaaagatcttgcagattc

SEQ ID NO: 5951291 - DNA, 25 bp, Homo sapien
aaaaggttgcatacccatgcgcaac

SEQ ID NO: 5951292 - DNA, 25 bp, Homo sapien
ataaaagtgataaaactgatgacta

SEQ ID NO: 5951293 - DNA, 25 bp, Homo sapien
ccgacggtgaaaatgaattaaatgg

SEQ ID NO: 5951294 - DNA, 25 bp, Homo sapien
agaactccacgaagaatgagcaaaa

SEQ ID NO: 5951295 - DNA, 25 bp, Homo sapien
cctgaagaactagaggacttagtta

SEQ ID NO: 5951296 - DNA, 25 bp, Homo sapien
ccgtatgtaccagaaggctattccc

SEQ ID NO: 5951297 - DNA, 25 bp, Homo sapien
caggattcctccgacggtgaaaatg

SEQ ID NO: 5951298 - DNA, 25 bp, Homo sapien
taccgtatgtaccagaaggctattc

SEQ ID NO: 5951299 - DNA, 25 bp, Homo sapien
gaaaaggtcgcactctaatatttta

SEQ ID NO: 5951300 - DNA, 25 bp, Homo sapien
cacttttaaaacaggattcctccga

SEQ ID NO: 5951301 - DNA, 25 bp, Homo sapien
gaagaaggtgcagcgttaccactgc

SEQ ID NO: 5951302 - DNA, 25 bp, Homo sapien
tggagttagtgtacagcgaagaagg

SEQ ID NO: 5951303 - DNA, 25 bp, Homo sapien
taatatcgtatatacagggaatgaa

SEQ ID NO: 5951304 - DNA, 25 bp, Homo sapien
cccacaaaaaggttgcatacccatg

SEQ ID NO: 5951305 - DNA, 25 bp, Homo sapien
aaaggtcgcactctaatattttaaa

SEQ ID NO: 5951306 - DNA, 25 bp, Homo sapien
gattgcctctggcagcaaaagacaa

SEQ ID NO: 5951307 - DNA, 25 bp, Homo sapien
caaattgatgaagaaggcgaaaaag

SEQ ID NO: 5951308 - DNA, 25 bp, Homo sapien
actgagtgcatcactcggaatcaag

SEQ ID NO: 5951309 - DNA, 25 bp, Homo sapien
gcattaactttccacagacgccggc

SEQ ID NO: 5951310 - DNA, 25 bp, Homo sapien
aatgctttacctaaaatgaaaagtc

SEQ ID NO: 5951311 - DNA, 25 bp, Homo sapien
gttagtgtacagcgaagaaggcctc

SEQ ID NO: 5951312 - DNA, 25 bp, Homo sapien
aagagagttccgacgatgatgaagg

SEQ ID NO: 5951313 - DNA, 25 bp, Homo sapien
taccactgctgtctaagaacttcaa

SEQ ID NO: 5951314 - DNA, 25 bp, Homo sapien
aatacactatctatacgcaaaaacg

SEQ ID NO: 5951315 - DNA, 25 bp, Homo sapien
ggattcctccgacggtgaaaatgaa

SEQ ID NO: 5951316 - DNA, 25 bp, Homo sapien
ctcaccatataagcttgacttggaa

SEQ ID NO: 5951317 - DNA, 25 bp, Homo sapien
tttaatgagcaaggtggtctgcaac

SEQ ID NO: 5951318 - DNA, 25 bp, Homo sapien
gatatcgaaatagcaccacagaggc

SEQ ID NO: 5951319 - DNA, 25 bp, Homo sapien
ataaagttgatttactcccactaga

SEQ ID NO: 5951320 - DNA, 25 bp, Homo sapien
gcctctggcagcaaaagacaacaat

SEQ ID NO: 5951321 - DNA, 25 bp, Homo sapien
agacgttcaactcaccatataagct

SEQ ID NO: 5951322 - DNA, 25 bp, Homo sapien
gagagttccgacgatgatgaaggta

SEQ ID NO: 5951323 - DNA, 25 bp, Homo sapien
aagcaattcaagaaagttacaaaag

SEQ ID NO: 5951324 - DNA, 25 bp, Homo sapien
taaatggtggcctaggactatttaa

SEQ ID NO: 5951325 - DNA, 25 bp, Homo sapien
tgaagagagttccgacgatgatgaa

SEQ ID NO: 5951326 - DNA, 25 bp, Homo sapien
gaagacgttcaactcaccatataag

SEQ ID NO: 5951327 - DNA, 25 bp, Homo sapien
gtgataaaactgatgactatgatat

SEQ ID NO: 5951328 - DNA, 25 bp, Homo sapien
aaaagtgataaaactgatgactatg

SEQ ID NO: 5951329 - DNA, 25 bp, Homo sapien
gagttccgacgatgatgaaggtaat

SEQ ID NO: 5951330 - DNA, 25 bp, Homo sapien
tgaagaaggcgaaaaagatgagact

SEQ ID NO: 5951331 - DNA, 25 bp, Homo sapien
caggagccgttaccgtatgtaccag

SEQ ID NO: 5951332 - DNA, 25 bp, Homo sapien
accataatgatttgttaagcaattc

SEQ ID NO: 5951333 - DNA, 25 bp, Homo sapien
gattggaccaactcaaaagggatgc

SEQ ID NO: 5951334 - DNA, 25 bp, Homo sapien
agggaaggaggtgtcacccacaaaa

SEQ ID NO: 5951335 - DNA, 25 bp, Homo sapien
agactgagtgcatcactcggaatca

SEQ ID NO: 5951336 - DNA, 25 bp, Homo sapien
cacagaggcaggagccgttaccgta

SEQ ID NO: 5951337 - DNA, 25 bp, Homo sapien
ggctcacttgctgaaaaggtcgcac

SEQ ID NO: 5951338 - DNA, 25 bp, Homo sapien
cacttgctgaaaaggtcgcactcta

SEQ ID NO: 5951339 - DNA, 25 bp, Homo sapien
cacaaaaaggttgcatacccatgcg

SEQ ID NO: 5951340 - DNA, 25 bp, Homo sapien
aacaggattcctccgacggtgaaaa

SEQ ID NO: 5951341 - DNA, 25 bp, Homo sapien
aatttctcgcagtcgtagtagggcc

SEQ ID NO: 5951342 - DNA, 25 bp, Homo sapien
actcaggaaactttcgcaaatttct

SEQ ID NO: 5951343 - DNA, 25 bp, Homo sapien
gggaatgaaagttccggcattaact

SEQ ID NO: 5951344 - DNA, 25 bp, Homo sapien
aatcaagaagaaggtgcagcgttac

SEQ ID NO: 5951345 - DNA, 25 bp, Homo sapien
agtgcacttttaaaacaggattcct

SEQ ID NO: 5951346 - DNA, 25 bp, Homo sapien
acaatagatcgaaaagctttatttt

SEQ ID NO: 5951347 - DNA, 25 bp, Homo sapien
gacaacaatagatcgaaaagcttta

SEQ ID NO: 5951348 - DNA, 25 bp, Homo sapien
acaaggagggaaggaggtgtcaccc

SEQ ID NO: 5951349 - DNA, 25 bp, Homo sapien
tgaagaactagaggacttagttact

SEQ ID NO: 5951350 - DNA, 25 bp, Homo sapien
taaaactgatgactatgatatcgaa

SEQ ID NO: 5951351 - DNA, 25 bp, Homo sapien
ctgaagacgttcaactcaccatata

SEQ ID NO: 5951352 - DNA, 25 bp, Homo sapien
aaactgatgactatgatatcgaaat

SEQ ID NO: 5951353 - DNA, 25 bp, Homo sapien
gtaatgaagattccgagagtaaact

SEQ ID NO: 5951354 - DNA, 25 bp, Homo sapien
tgatgaaggtaatgaagattccgag

SEQ ID NO: 5951355 - DNA, 25 bp, Homo sapien
caccccagataaagttgatttactc

SEQ ID NO: 5951356 - DNA, 25 bp, Homo sapien
tcgaaatagcaccacagaggcagga

SEQ ID NO: 5951357 - DNA, 25 bp, Homo sapien
aacgaccaactcaggaaactttcgc

SEQ ID NO: 5951358 - DNA, 25 bp, Homo sapien
atgaaaagtctagttttaaaagatc

SEQ ID NO: 5951359 - DNA, 25 bp, Homo sapien
agatgatattgaaaagctgaagacg

SEQ ID NO: 5951360 - DNA, 25 bp, Homo sapien
cagcaaaagacaacaatagatcgaa

SEQ ID NO: 5951361 - DNA, 25 bp, Homo sapien
gaagatgacaccccagataaagttg

SEQ ID NO: 5951362 - DNA, 25 bp, Homo sapien
cactagaacaaattgatgaagaagg

SEQ ID NO: 5951363 - DNA, 25 bp, Homo sapien
ccggctcacttgctgaaaaggtcgc

SEQ ID NO: 5951364 - DNA, 25 bp, Homo sapien
gaattaaatggtggcctaggactat

SEQ ID NO: 5951365 - DNA, 25 bp, Homo sapien
ttcaaagaagttgccgccgtcccaa

SEQ ID NO: 5951366 - DNA, 25 bp, Homo sapien
aagaactagaggacttagttactta

SEQ ID NO: 5951367 - DNA, 25 bp, Homo sapien
tcaggaaactttcgcaaatttctcg

SEQ ID NO: 5951368 - DNA, 25 bp, Homo sapien
tgcgaacagcaacaatggcaacaca

SEQ ID NO: 5951369 - DNA, 25 bp, Homo sapien
acacattaaagtacatacaaggagg

SEQ ID NO: 5951370 - DNA, 25 bp, Homo sapien
ttgatgaagaaggcgaaaaagatga

SEQ ID NO: 5951371 - DNA, 25 bp, Homo sapien
gtacggttctgtccttggttataat

SEQ ID NO: 5951372 - DNA, 25 bp, Homo sapien
ctatctatacgcaaaaacgaccaac

SEQ ID NO: 5951373 - DNA, 25 bp, Homo sapien
ctccacgaagaatgagcaaaaaact

SEQ ID NO: 5951374 - DNA, 25 bp, Homo sapien
ttgaaaagctgaagacgttcaactc

SEQ ID NO: 5951375 - DNA, 25 bp, Homo sapien
tagcaccacagaggcaggagccgtt

SEQ ID NO: 5951376 - DNA, 25 bp, Homo sapien
ccatataagcttgacttggaagacg

SEQ ID NO: 5951377 - DNA, 25 bp, Homo sapien
cagaggcaggagccgttaccgtatg

SEQ ID NO: 5951378 - DNA, 25 bp, Homo sapien
gatttactcccactagaacaaattg

SEQ ID NO: 5951379 - DNA, 25 bp, Homo sapien
ggagccgttaccgtatgtaccagaa

SEQ ID NO: 5951380 - DNA, 25 bp, Homo sapien
attcctccgacggtgaaaatgaatt

SEQ ID NO: 5951381 - DNA, 25 bp, Homo sapien
tttctcgcagtcgtagtagggccaa

SEQ ID NO: 5951382 - DNA, 25 bp, Homo sapien
aagattgcctctggcagcaaaagac

SEQ ID NO: 5951383 - DNA, 25 bp, Homo sapien
aagatgagactgagtgcatcactcg

SEQ ID NO: 5951384 - DNA, 25 bp, Homo sapien
caactcataaagaactccacgaaga

SEQ ID NO: 5951385 - DNA, 25 bp, Homo sapien
gtgaaaatgaattaaatggtggcct

SEQ ID NO: 5951386 - DNA, 25 bp, Homo sapien
cccaaccatggagttagtgtacagc

SEQ ID NO: 5951387 - DNA, 25 bp, Homo sapien
ataatgctttacctaaaatgaaaag

SEQ ID NO: 5951388 - DNA, 25 bp, Homo sapien
ccacgaagaatgagcaaaaaactaa

SEQ ID NO: 5951389 - DNA, 25 bp, Homo sapien
ttcaggtaaaaatgaagagagttcc

SEQ ID NO: 5951390 - DNA, 25 bp, Homo sapien
gtcgcactctaatattttaaaacca

SEQ ID NO: 5951391 - DNA, 25 bp, Homo sapien
gcaaaaacgaccaactcaggaaact

SEQ ID NO: 5951392 - DNA, 25 bp, Homo sapien
atcctgaagaactagaggacttagt

SEQ ID NO: 5951393 - DNA, 25 bp, Homo sapien
gaggcaggagccgttaccgtatgta

SEQ ID NO: 5951394 - DNA, 25 bp, Homo sapien
atgatattgaaaagctgaagacgtt

SEQ ID NO: 5951395 - DNA, 25 bp, Homo sapien
acgttcaactcaccatataagcttg

SEQ ID NO: 5951396 - DNA, 25 bp, Homo sapien
cacagacgccggctcacttgctgaa

SEQ ID NO: 5951397 - DNA, 25 bp, Homo sapien
gcaacaatggcaacacattaaagta

SEQ ID NO: 5951398 - DNA, 25 bp, Homo sapien
aaccacctgtaagattggaccaact

SEQ ID NO: 5951399 - DNA, 25 bp, Homo sapien
agatgacaccccagataaagttgat

SEQ ID NO: 5951400 - DNA, 25 bp, Homo sapien
ttccgagagtaaacttggcaaaaaa

SEQ ID NO: 5951401 - DNA, 25 bp, Homo sapien
tggtctgcaacaactcataaagaac

SEQ ID NO: 5951402 - DNA, 25 bp, Homo sapien
agctaacgaagataaagagaataat

SEQ ID NO: 5951403 - DNA, 25 bp, Homo sapien
ttcccgaaacttctaatcagagtaa

SEQ ID NO: 5951404 - DNA, 25 bp, Homo sapien
gcgttaccactgctgtctaagaact

SEQ ID NO: 5951405 - DNA, 25 bp, Homo sapien
attaactttccacagacgccggctc

SEQ ID NO: 5951406 - DNA, 25 bp, Homo sapien
tgcagattcaggtaaaaatgaagag

SEQ ID NO: 5951407 - DNA, 25 bp, Homo sapien
gaaaagctgaagacgttcaactcac

SEQ ID NO: 5951408 - DNA, 25 bp, Homo sapien
tcataaagaactccacgaagaatga

SEQ ID NO: 5951409 - DNA, 25 bp, Homo sapien
ctctaatattttaaaaccacctgta

SEQ ID NO: 5951410 - DNA, 25 bp, Homo sapien
agagtaaacttggcaaaaaactcca

SEQ ID NO: 5951411 - DNA, 25 bp, Homo sapien
gaaggctattccccatttcaacaag

SEQ ID NO: 5951412 - DNA, 25 bp, Homo sapien
tctagttttaaaagatcttgcagat

SEQ ID NO: 5951413 - DNA, 25 bp, Homo sapien
acaaggaagattgcctctggcagca

SEQ ID NO: 5951414 - DNA, 25 bp, Homo sapien
aagtacatacaaggagggaaggagg

SEQ ID NO: 5951415 - DNA, 25 bp, Homo sapien
gtgtcacccacaaaaaggttgcata

SEQ ID NO: 5951416 - DNA, 25 bp, Homo sapien
aaaacaggattcctccgacggtgaa

SEQ ID NO: 5951417 - DNA, 25 bp, Homo sapien
ccagctaacgaagataaagagaata

SEQ ID NO: 5951418 - DNA, 25 bp, Homo sapien
aaggaagattgcctctggcagcaaa

SEQ ID NO: 5951419 - DNA, 25 bp, Homo sapien
gtccttggttataatgctttaccta

SEQ ID NO: 5951420 - DNA, 25 bp, Homo sapien
ttgccgccgtcccaaccatggagtt

SEQ ID NO: 5951421 - DNA, 25 bp, Homo sapien
gtctaagaacttcaaagaagttgcc

SEQ ID NO: 5951422 - DNA, 25 bp, Homo sapien
accacagaggcaggagccgttaccg

SEQ ID NO: 5951423 - DNA, 25 bp, Homo sapien
gcaacaactcataaagaactccacg

SEQ ID NO: 5951424 - DNA, 25 bp, Homo sapien
taatgagcaaggtggtctgcaacaa

SEQ ID NO: 5951425 - DNA, 25 bp, Homo sapien
aatagatcgaaaagctttatttttc

SEQ ID NO: 5951426 - DNA, 25 bp, Homo sapien
gatgaagaaggcgaaaaagatgaga

SEQ ID NO: 5951427 - DNA, 25 bp, Homo sapien
tacactatctatacgcaaaaacgac

SEQ ID NO: 5951428 - DNA, 25 bp, Homo sapien
gcaattcaagaaagttacaaaagta

SEQ ID NO: 5951429 - DNA, 25 bp, Homo sapien
aacttggcaaaaaactccaaagtgc

SEQ ID NO: 5951430 - DNA, 25 bp, Homo sapien
gcgaaaaagatgagactgagtgcat

SEQ ID NO: 5951431 - DNA, 25 bp, Homo sapien
agaatacactatctatacgcaaaaa

SEQ ID NO: 5951432 - DNA, 25 bp, Homo sapien
tgatgactatgatatcgaaatagca

SEQ ID NO: 5951433 - DNA, 25 bp, Homo sapien
gagttagtgtacagcgaagaaggcc

SEQ ID NO: 5951434 - DNA, 25 bp, Homo sapien
ctgtccttggttataatgctttacc

SEQ ID NO: 5951435 - DNA, 25 bp, Homo sapien
aagaagttgccgccgtcccaaccat

SEQ ID NO: 5951436 - DNA, 25 bp, Homo sapien
gcaacaacaaggaagattgcctctg

SEQ ID NO: 5951437 - DNA, 25 bp, Homo sapien
ctcgatcctgaagaactagaggact

SEQ ID NO: 5951438 - DNA, 25 bp, Homo sapien
ccccatttcaacaagatgatattga

SEQ ID NO: 5951439 - DNA, 25 bp, Homo sapien
actgatgactatgatatcgaaatag

SEQ ID NO: 5951440 - DNA, 25 bp, Homo sapien
cagcaacaatggcaacacattaaag

SEQ ID NO: 5951441 - DNA, 25 bp, Homo sapien
acatacaaggagggaaggaggtgtc

SEQ ID NO: 5951442 - DNA, 25 bp, Homo sapien
ggttgcatacccatgcgcaacaaca

SEQ ID NO: 5951443 - DNA, 25 bp, Homo sapien
gttaccgtatgtaccagaaggctat

SEQ ID NO: 5951444 - DNA, 25 bp, Homo sapien
ggcctaggactatttaatgagcaag

SEQ ID NO: 5951445 - DNA, 25 bp, Homo sapien
atgaaagttccggcattaactttcc

SEQ ID NO: 5951446 - DNA, 25 bp, Homo sapien
taaagtacatacaaggagggaagga

SEQ ID NO: 5951447 - DNA, 25 bp, Homo sapien
gatgatgaaggtaatgaagattccg

SEQ ID NO: 5951448 - DNA, 25 bp, Homo sapien
cgatcctgaagaactagaggactta

SEQ ID NO: 5951449 - DNA, 25 bp, Homo sapien
tgcatcactcggaatcaagaagaag

SEQ ID NO: 5951450 - DNA, 25 bp, Homo sapien
aactcaccatataagcttgacttgg

SEQ ID NO: 5951451 - DNA, 25 bp, Homo sapien
ctctggcagcaaaagacaacaatag

SEQ ID NO: 5951452 - DNA, 25 bp, Homo sapien
aactccaaagtgcacttttaaaaca

SEQ ID NO: 5951453 - DNA, 25 bp, Homo sapien
tatttaatgagcaaggtggtctgca

SEQ ID NO: 5951454 - DNA, 25 bp, Homo sapien
caaccataatgatttgttaagcaat

SEQ ID NO: 5951455 - DNA, 25 bp, Homo sapien
cccgaaacttctaatcagagtaaag

SEQ ID NO: 5951456 - DNA, 25 bp, Homo sapien
ccatgcgcaacaacaaggaagattg

SEQ ID NO: 5951457 - DNA, 25 bp, Homo sapien
atgatatcgaaatagcaccacagag

SEQ ID NO: 5951458 - DNA, 25 bp, Homo sapien
cttaccacaactacagaatacacta

SEQ ID NO: 5951459 - DNA, 25 bp, Homo sapien
atctatacgcaaaaacgaccaactc

SEQ ID NO: 5951460 - DNA, 25 bp, Homo sapien
acgaagatgacaccccagataaagt

SEQ ID NO: 5951461 - DNA, 25 bp, Homo sapien
actcaaaagggatgcgaacagcaac

SEQ ID NO: 5951462 - DNA, 25 bp, Homo sapien
tgcagacttaccacaactacagaat

SEQ ID NO: 5951463 - DNA, 25 bp, Homo sapien
ggaggtgtcacccacaaaaaggttg

SEQ ID NO: 5951464 - DNA, 25 bp, Homo sapien
agtcgtagtagggccaaccataatg

SEQ ID NO: 5951465 - DNA, 25 bp, Homo sapien
aagaagaaggtgcagcgttaccact

SEQ ID NO: 5951466 - DNA, 25 bp, Homo sapien
gcagtcgtagtagggccaaccataa

SEQ ID NO: 5951467 - DNA, 25 bp, Homo sapien
accaactcaaaagggatgcgaacag

SEQ ID NO: 5951468 - DNA, 25 bp, Homo sapien
cgaaacttctaatcagagtaaagat

SEQ ID NO: 5951469 - DNA, 25 bp, Homo sapien
tccgacgatgatgaaggtaatgaag

SEQ ID NO: 5951470 - DNA, 25 bp, Homo sapien
aaagatcttgcagattcaggtaaaa

SEQ ID NO: 5951471 - DNA, 25 bp, Homo sapien
ctgtaagattggaccaactcaaaag

SEQ ID NO: 5951472 - DNA, 25 bp, Homo sapien
actttccacagacgccggctcactt

SEQ ID NO: 5951473 - DNA, 25 bp, Homo sapien
cagacttaccacaactacagaatac

SEQ ID NO: 5951474 - DNA, 25 bp, Homo sapien
aaaagacaacaatagatcgaaaagc

SEQ ID NO: 5951475 - DNA, 25 bp, Homo sapien
atcgtatatacagggaatgaaagtt

SEQ ID NO: 5951476 - DNA, 25 bp, Homo sapien
accaactcaggaaactttcgcaaat

SEQ ID NO: 5951477 - DNA, 25 bp, Homo sapien
gatgcgaacagcaacaatggcaaca

SEQ ID NO: 5951478 - DNA, 25 bp, Homo sapien
aataatatcgtatatacagggaatg

SEQ ID NO: 5951479 - DNA, 25 bp, Homo sapien
atacaaggagggaaggaggtgtcac

SEQ ID NO: 5951480 - DNA, 25 bp, Homo sapien
gaaggcctcgatcctgaagaactag

SEQ ID NO: 5951481 - DNA, 25 bp, Homo sapien
ccttggttataatgctttacctaaa

SEQ ID NO: 5951482 - DNA, 25 bp, Homo sapien
tattccccatttcaacaagatgata

SEQ ID NO: 5951483 - DNA, 25 bp, Homo sapien
accagaaggctattccccatttcaa

SEQ ID NO: 5951484 - DNA, 25 bp, Homo sapien
ttaaaaccacctgtaagattggacc

SEQ ID NO: 5951485 - DNA, 25 bp, Homo sapien
ccgttaccgtatgtaccagaaggct

SEQ ID NO: 5951486 - DNA, 25 bp, Homo sapien
cagcgttaccactgctgtctaagaa

SEQ ID NO: 5951487 - DNA, 25 bp, Homo sapien
ttctaatcagagtaaagatgcagac

SEQ ID NO: 5951488 - DNA, 25 bp, Homo sapien
tcgcagtcgtagtagggccaaccat

SEQ ID NO: 5951489 - DNA, 25 bp, Homo sapien
acctgtaagattggaccaactcaaa

SEQ ID NO: 5951490 - DNA, 25 bp, Homo sapien
acttcaaagaagttgccgccgtccc

SEQ ID NO: 5951491 - DNA, 25 bp, Homo sapien
ctatacgcaaaaacgaccaactcag

SEQ ID NO: 5951492 - DNA, 25 bp, Homo sapien
caaaaaggttgcatacccatgcgca

SEQ ID NO: 5951493 - DNA, 25 bp, Homo sapien
tttgttaagcaattcaagaaagtta

SEQ ID NO: 5951494 - DNA, 25 bp, Homo sapien
ggcagcaaaagacaacaatagatcg

SEQ ID NO: 5951495 - DNA, 25 bp, Homo sapien
actgctgtctaagaacttcaaagaa

SEQ ID NO: 5951496 - DNA, 25 bp, Homo sapien
caccatataagcttgacttggaaga

SEQ ID NO: 5951497 - DNA, 25 bp, Homo sapien
cccactagaacaaattgatgaagaa

SEQ ID NO: 5951498 - DNA, 25 bp, Homo sapien
aagacaacaatagatcgaaaagctt

SEQ ID NO: 5951499 - DNA, 25 bp, Homo sapien
agttgatttactcccactagaacaa

SEQ ID NO: 5951500 - DNA, 25 bp, Homo sapien
atggcaacacattaaagtacataca

SEQ ID NO: 5951501 - DNA, 25 bp, Homo sapien
gtaagattggaccaactcaaaaggg

SEQ ID NO: 5951502 - DNA, 25 bp, Homo sapien
aacaagatgatattgaaaagctgaa

SEQ ID NO: 5951503 - DNA, 25 bp, Homo sapien
cataatgatttgttaagcaattcaa

SEQ ID NO: 5951504 - DNA, 25 bp, Homo sapien
aaagttgatttactcccactagaac

SEQ ID NO: 5951505 - DNA, 25 bp, Homo sapien
ggttataatgctttacctaaaatga

SEQ ID NO: 5951506 - DNA, 25 bp, Homo sapien
aggtaatgaagattccgagagtaaa

SEQ ID NO: 5951507 - DNA, 25 bp, Homo sapien
acttctaatcagagtaaagatgcag

SEQ ID NO: 5951508 - DNA, 25 bp, Homo sapien
gacttggaagacgaagatgacaccc

SEQ ID NO: 5951509 - DNA, 25 bp, Homo sapien
caacacattaaagtacatacaagga

SEQ ID NO: 5951510 - DNA, 25 bp, Homo sapien
gcaccacagaggcaggagccgttac

SEQ ID NO: 5951511 - DNA, 25 bp, Homo sapien
caatggcaacacattaaagtacata

SEQ ID NO: 5951512 - DNA, 25 bp, Homo sapien
tgctttacctaaaatgaaaagtcta

SEQ ID NO: 5951513 - DNA, 25 bp, Homo sapien
agatcttgcagattcaggtaaaaat

SEQ ID NO: 5951514 - DNA, 25 bp, Homo sapien
agacgaagatgacaccccagataaa

SEQ ID NO: 5951515 - DNA, 25 bp, Homo sapien
ttgcatacccatgcgcaacaacaag

SEQ ID NO: 5951516 - DNA, 25 bp, Homo sapien
gaaagttccggcattaactttccac

SEQ ID NO: 5951517 - DNA, 25 bp, Homo sapien
ccacctgtaagattggaccaactca

SEQ ID NO: 5951518 - DNA, 25 bp, Homo sapien
agcgaagaaggcctcgatcctgaag

SEQ ID NO: 5951519 - DNA, 25 bp, Homo sapien
atacgcaaaaacgaccaactcagga

SEQ ID NO: 5951520 - DNA, 25 bp, Homo sapien
cgagagtaaacttggcaaaaaactc

SEQ ID NO: 5951521 - DNA, 25 bp, Homo sapien
acagcgaagaaggcctcgatcctga

SEQ ID NO: 5951522 - DNA, 25 bp, Homo sapien
ccaaagtgcacttttaaaacaggat

SEQ ID NO: 5951523 - DNA, 25 bp, Homo sapien
gcaaaagacaacaatagatcgaaaa

SEQ ID NO: 5951524 - DNA, 25 bp, Homo sapien
gacgccggctcacttgctgaaaagg

SEQ ID NO: 5951525 - DNA, 25 bp, Homo sapien
actcggaatcaagaagaaggtgcag

SEQ ID NO: 5951526 - DNA, 25 bp, Homo sapien
cttgcagattcaggtaaaaatgaag

SEQ ID NO: 5951527 - DNA, 25 bp, Homo sapien
tggaagacgaagatgacaccccaga

SEQ ID NO: 5951528 - DNA, 25 bp, Homo sapien
ttgatttactcccactagaacaaat

SEQ ID NO: 5951529 - DNA, 25 bp, Homo sapien
ttccccatttcaacaagatgatatt

SEQ ID NO: 5951530 - DNA, 25 bp, Homo sapien
ctccaaagtgcacttttaaaacagg

SEQ ID NO: 5951531 - DNA, 25 bp, Homo sapien
gggccaaccataatgatttgttaag

SEQ ID NO: 5951532 - DNA, 25 bp, Homo sapien
tgctgaaaaggtcgcactctaatat

SEQ ID NO: 5951533 - DNA, 25 bp, Homo sapien
gcctcgatcctgaagaactagagga

SEQ ID NO: 5951534 - DNA, 25 bp, Homo sapien
tagatcgaaaagctttatttttccc

SEQ ID NO: 5951535 - DNA, 25 bp, Homo sapien
gtaccagaaggctattccccatttc

SEQ ID NO: 5951536 - DNA, 25 bp, Homo sapien
cgccggctcacttgctgaaaaggtc

SEQ ID NO: 5951537 - DNA, 25 bp, Homo sapien
gcaaggtggtctgcaacaactcata

SEQ ID NO: 5951538 - DNA, 25 bp, Homo sapien
ccagataaagttgatttactcccac

SEQ ID NO: 5951539 - DNA, 25 bp, Homo sapien
aggcctcgatcctgaagaactagag

SEQ ID NO: 5951540 - DNA, 25 bp, Homo sapien
ttggaccaactcaaaagggatgcga

SEQ ID NO: 5951541 - DNA, 25 bp, Homo sapien
ggaatcaagaagaaggtgcagcgtt

SEQ ID NO: 5951542 - DNA, 25 bp, Homo sapien
aatgaagagagttccgacgatgatg

SEQ ID NO: 5951543 - DNA, 25 bp, Homo sapien
cgaacagcaacaatggcaacacatt

SEQ ID NO: 5951544 - DNA, 25 bp, Homo sapien
cgacgatgatgaaggtaatgaagat

SEQ ID NO: 5951545 - DNA, 25 bp, Homo sapien
atttttcccgaaacttctaatcaga

SEQ ID NO: 5951546 - DNA, 25 bp, Homo sapien
tcggaatcaagaagaaggtgcagcg

SEQ ID NO: 5951547 - DNA, 25 bp, Homo sapien
cagacgccggctcacttgctgaaaa

SEQ ID NO: 5951548 - DNA, 25 bp, Homo sapien
tccggcattaactttccacagacgc

SEQ ID NO: 5951549 - DNA, 25 bp, Homo sapien
ctgtctaagaacttcaaagaagttg

SEQ ID NO: 5951550 - DNA, 25 bp, Homo sapien
aggcgaaaaagatgagactgagtgc

SEQ ID NO: 5951551 - DNA, 25 bp, Homo sapien
aacaaattgatgaagaaggcgaaaa

SEQ ID NO: 5951552 - DNA, 25 bp, Homo sapien
ttcgcaaatttctcgcagtcgtagt

SEQ ID NO: 5951553 - DNA, 25 bp, Homo sapien
tactcccactagaacaaattgatga

SEQ ID NO: 5951554 - DNA, 25 bp, Homo sapien
agtgcatcactcggaatcaagaaga

SEQ ID NO: 5951555 - DNA, 25 bp, Homo sapien
cactatctatacgcaaaaacgacca

SEQ ID NO: 5951556 - DNA, 25 bp, Homo sapien
agtaaagatgcagacttaccacaac

SEQ ID NO: 5951557 - DNA, 25 bp, Homo sapien
gaaggtaatgaagattccgagagta

SEQ ID NO: 5951558 - DNA, 25 bp, Homo sapien
gaagacgaagatgacaccccagata

SEQ ID NO: 5951559 - DNA, 25 bp, Homo sapien
tgcacttttaaaacaggattcctcc

SEQ ID NO: 5951560 - DNA, 25 bp, Homo sapien
gttcaactcaccatataagcttgac

SEQ ID NO: 5951561 - DNA, 25 bp, Homo sapien
ttgcctctggcagcaaaagacaaca

SEQ ID NO: 5951562 - DNA, 25 bp, Homo sapien
tcaaaagggatgcgaacagcaacaa

SEQ ID NO: 5951563 - DNA, 25 bp, Homo sapien
gtagtagggccaaccataatgattt

SEQ ID NO: 5951564 - DNA, 25 bp, Homo sapien
gtatgtaccagaaggctattcccca

SEQ ID NO: 5951565 - DNA, 25 bp, Homo sapien
agagaataatatcgtatatacaggg

SEQ ID NO: 5951566 - DNA, 25 bp, Homo sapien
gttccgacgatgatgaaggtaatga

SEQ ID NO: 5951567 - DNA, 25 bp, Homo sapien
caactcaggaaactttcgcaaattt

SEQ ID NO: 5951568 - DNA, 25 bp, Homo sapien
tcgtagtagggccaaccataatgat

SEQ ID NO: 5951569 - DNA, 25 bp, Homo sapien
aagttccggcattaactttccacag

SEQ ID NO: 5951570 - DNA, 25 bp, Homo sapien
aagcttgacttggaagacgaagatg

SEQ ID NO: 5951571 - DNA, 25 bp, Homo sapien
gacggtgaaaatgaattaaatggtg

SEQ ID NO: 5951572 - DNA, 25 bp, Homo sapien
gaacttcaaagaagttgccgccgtc

SEQ ID NO: 5951573 - DNA, 25 bp, Homo sapien
ttttaaaaccacctgtaagattgga

SEQ ID NO: 5951574 - DNA, 25 bp, Homo sapien
tgccagctaacgaagataaagagaa

SEQ ID NO: 5951575 - DNA, 25 bp, Homo sapien
ttgacttggaagacgaagatgacac

SEQ ID NO: 5951576 - DNA, 25 bp, Homo sapien
cgcaaatttctcgcagtcgtagtag

SEQ ID NO: 5951577 - DNA, 25 bp, Homo sapien
tttccacagacgccggctcacttgc

SEQ ID NO: 5951578 - DNA, 25 bp, Homo sapien
aattgatgaagaaggcgaaaaagat

SEQ ID NO: 5951579 - DNA, 25 bp, Homo sapien
acgatgatgaaggtaatgaagattc

SEQ ID NO: 5951580 - DNA, 25 bp, Homo sapien
tattgaaaagctgaagacgttcaac

SEQ ID NO: 5951581 - DNA, 25 bp, Homo sapien
aagggatgcgaacagcaacaatggc

SEQ ID NO: 5951582 - DNA, 25 bp, Homo sapien
acccatgcgcaacaacaaggaagat

SEQ ID NO: 5951583 - DNA, 25 bp, Homo sapien
atacccatgcgcaacaacaaggaag

SEQ ID NO: 5951584 - DNA, 25 bp, Homo sapien
ggaaggaggtgtcacccacaaaaag

SEQ ID NO: 5951585 - DNA, 25 bp, Homo sapien
caaagaagttgccgccgtcccaacc

SEQ ID NO: 5951586 - DNA, 25 bp, Homo sapien
aagatgcagacttaccacaactaca

SEQ ID NO: 5951587 - DNA, 25 bp, Homo sapien
agagtaaagatgcagacttaccaca

SEQ ID NO: 5951588 - DNA, 25 bp, Homo sapien
cggtgaaaatgaattaaatggtggc

SEQ ID NO: 5951589 - DNA, 25 bp, Homo sapien
agccgttaccgtatgtaccagaagg

SEQ ID NO: 5951590 - DNA, 25 bp, Homo sapien
attaaatggtggcctaggactattt

SEQ ID NO: 5951591 - DNA, 25 bp, Homo sapien
agtagggccaaccataatgatttgt

SEQ ID NO: 5951592 - DNA, 25 bp, Homo sapien
ctaagaacttcaaagaagttgccgc

SEQ ID NO: 5951593 - DNA, 25 bp, Homo sapien
cgcactctaatattttaaaaccacc

SEQ ID NO: 5951594 - DNA, 25 bp, Homo sapien
agctgaagacgttcaactcaccata

SEQ ID NO: 5951595 - DNA, 25 bp, Homo sapien
gagcaaggtggtctgcaacaactca

SEQ ID NO: 5951596 - DNA, 25 bp, Homo sapien
cgaagaaggcctcgatcctgaagaa

SEQ ID NO: 5951597 - DNA, 25 bp, Homo sapien
gaaggcgaaaaagatgagactgagt

SEQ ID NO: 5951598 - DNA, 25 bp, Homo sapien
gatgagactgagtgcatcactcgga

SEQ ID NO: 5951599 - DNA, 25 bp, Homo sapien
tcagagtaaagatgcagacttacca

SEQ ID NO: 5951600 - DNA, 25 bp, Homo sapien
aaatgaattaaatggtggcctagga

SEQ ID NO: 5951601 - DNA, 25 bp, Homo sapien
ttaaaacaggattcctccgacggtg

SEQ ID NO: 5951602 - DNA, 25 bp, Homo sapien
ggcaggagccgttaccgtatgtacc

SEQ ID NO: 5951603 - DNA, 25 bp, Homo sapien
caacaatagatcgaaaagctttatt

SEQ ID NO: 5951604 - DNA, 25 bp, Homo sapien
aatggtggcctaggactatttaatg

SEQ ID NO: 5951605 - DNA, 25 bp, Homo sapien
gaatgagcaaaaaactaaaaacgat

SEQ ID NO: 5951606 - DNA, 25 bp, Homo sapien
tttactcccactagaacaaattgat

SEQ ID NO: 5951607 - DNA, 25 bp, Homo sapien
acggttctgtccttggttataatgc

SEQ ID NO: 5951608 - DNA, 25 bp, Homo sapien
gataaaactgatgactatgatatcg

SEQ ID NO: 5951609 - DNA, 25 bp, Homo sapien
ggactatttaatgagcaaggtggtc

SEQ ID NO: 5951610 - DNA, 25 bp, Homo sapien
gaatgaaagttccggcattaacttt

SEQ ID NO: 5951611 - DNA, 25 bp, Homo sapien
cacccacaaaaaggttgcataccca

SEQ ID NO: 5951612 - DNA, 25 bp, Homo sapien
caaccatggagttagtgtacagcga

SEQ ID NO: 5951613 - DNA, 25 bp, Homo sapien
tatacagggaatgaaagttccggca

SEQ ID NO: 5951614 - DNA, 25 bp, Homo sapien
agttgccgccgtcccaaccatggag

SEQ ID NO: 5951615 - DNA, 25 bp, Homo sapien
gccgccgtcccaaccatggagttag

SEQ ID NO: 5951616 - DNA, 25 bp, Homo sapien
ggaagattgcctctggcagcaaaag

SEQ ID NO: 5951617 - DNA, 25 bp, Homo sapien
gccaaccataatgatttgttaagca

SEQ ID NO: 5951618 - DNA, 25 bp, Homo sapien
atgagcaaggtggtctgcaacaact

SEQ ID NO: 5951619 - DNA, 25 bp, Homo sapien
taaaaatgaagagagttccgacgat

SEQ ID NO: 5951620 - DNA, 25 bp, Homo sapien
atataagcttgacttggaagacgaa

SEQ ID NO: 5951621 - DNA, 25 bp, Homo sapien
gatgccagctaacgaagataaagag

SEQ ID NO: 5951622 - DNA, 25 bp, Homo sapien
taactttccacagacgccggctcac

SEQ ID NO: 5951623 - DNA, 25 bp, Homo sapien
acagaatacactatctatacgcaaa

SEQ ID NO: 5951624 - DNA, 25 bp, Homo sapien
aaaagatgagactgagtgcatcact

SEQ ID NO: 5951625 - DNA, 25 bp, Homo sapien
gattccgagagtaaacttggcaaaa

SEQ ID NO: 5951626 - DNA, 25 bp, Homo sapien
cagaaggctattccccatttcaaca

SEQ ID NO: 5951627 - DNA, 25 bp, Homo sapien
aagaaggcgaaaaagatgagactga

SEQ ID NO: 5951628 - DNA, 25 bp, Homo sapien
aaagctgaagacgttcaactcacca

SEQ ID NO: 5951629 - DNA, 25 bp, Homo sapien
aactacagaatacactatctatacg

SEQ ID NO: 5951630 - DNA, 25 bp, Homo sapien
atcttgcagattcaggtaaaaatga

SEQ ID NO: 5951631 - DNA, 25 bp, Homo sapien
atgatttgttaagcaattcaagaaa

SEQ ID NO: 5951632 - DNA, 25 bp, Homo sapien
aggctattccccatttcaacaagat

SEQ ID NO: 5951633 - DNA, 25 bp, Homo sapien
acattaaagtacatacaaggaggga

SEQ ID NO: 5951634 - DNA, 25 bp, Homo sapien
aagattggaccaactcaaaagggat

SEQ ID NO: 5951635 - DNA, 25 bp, Homo sapien
tatatacagggaatgaaagttccgg

SEQ ID NO: 5951636 - DNA, 25 bp, Homo sapien
aaggtggtctgcaacaactcataaa

SEQ ID NO: 5951637 - DNA, 25 bp, Homo sapien
ggtgcagcgttaccactgctgtcta

SEQ ID NO: 5951638 - DNA, 25 bp, Homo sapien
cgataaaagtgataaaactgatgac

SEQ ID NO: 5951639 - DNA, 25 bp, Homo sapien
gtcccaaccatggagttagtgtaca

SEQ ID NO: 5951640 - DNA, 25 bp, Homo sapien
caagatgatattgaaaagctgaaga

SEQ ID NO: 5951641 - DNA, 25 bp, Homo sapien
gaagttgccgccgtcccaaccatgg

SEQ ID NO: 5951642 - DNA, 25 bp, Homo sapien
aaacttctaatcagagtaaagatgc

SEQ ID NO: 5951643 - DNA, 25 bp, Homo sapien
cactctaatattttaaaaccacctg

SEQ ID NO: 5951644 - DNA, 25 bp, Homo sapien
tacagggaatgaaagttccggcatt

SEQ ID NO: 5951645 - DNA, 25 bp, Homo sapien
aacagcaacaatggcaacacattaa

SEQ ID NO: 5951646 - DNA, 25 bp, Homo sapien
aatcagagtaaagatgcagacttac

SEQ ID NO: 5951647 - DNA, 25 bp, Homo sapien
actcataaagaactccacgaagaat

SEQ ID NO: 5951648 - DNA, 25 bp, Homo sapien
gtcacccacaaaaaggttgcatacc

SEQ ID NO: 5951649 - DNA, 25 bp, Homo sapien
tgcagcgttaccactgctgtctaag

SEQ ID NO: 5951650 - DNA, 25 bp, Homo sapien
aaagaactccacgaagaatgagcaa

SEQ ID NO: 5951651 - DNA, 25 bp, Homo sapien
tcctccgacggtgaaaatgaattaa

SEQ ID NO: 5951652 - DNA, 25 bp, Homo sapien
ctacagaatacactatctatacgca

SEQ ID NO: 5951653 - DNA, 25 bp, Homo sapien
catcactcggaatcaagaagaaggt

SEQ ID NO: 5951654 - DNA, 25 bp, Homo sapien
agaacaaattgatgaagaaggcgaa

SEQ ID NO: 5951655 - DNA, 25 bp, Homo sapien
ggttctgtccttggttataatgctt

SEQ ID NO: 5951656 - DNA, 25 bp, Homo sapien
gacttaccacaactacagaatacac

SEQ ID NO: 5951657 - DNA, 25 bp, Homo sapien
aagtgataaaactgatgactatgat

SEQ ID NO: 5951658 - DNA, 25 bp, Homo sapien
atgactatgatatcgaaatagcacc

SEQ ID NO: 5951659 - DNA, 25 bp, Homo sapien
aacaacaaggaagattgcctctggc

SEQ ID NO: 5951660 - DNA, 25 bp, Homo sapien
aggaaactttcgcaaatttctcgca

SEQ ID NO: 5951661 - DNA, 25 bp, Homo sapien
actatttaatgagcaaggtggtctg

SEQ ID NO: 5951662 - DNA, 25 bp, Homo sapien
gaaatagcaccacagaggcaggagc

SEQ ID NO: 5951663 - DNA, 25 bp, Homo sapien
gcttgacttggaagacgaagatgac

SEQ ID NO: 5951664 - DNA, 25 bp, Homo sapien
ccgtcccaaccatggagttagtgta

SEQ ID NO: 5951665 - DNA, 25 bp, Homo sapien
gtgtacagcgaagaaggcctcgatc

SEQ ID NO: 5951666 - DNA, 25 bp, Homo sapien
ggcaacacattaaagtacatacaag

SEQ ID NO: 5951667 - DNA, 25 bp, Homo sapien
tggcaaaaaactccaaagtgcactt

SEQ ID NO: 5951668 - DNA, 25 bp, Homo sapien
taccacaactacagaatacactatc

SEQ ID NO: 5951669 - DNA, 25 bp, Homo sapien
agaaggtgcagcgttaccactgctg

SEQ ID NO: 5951670 - DNA, 25 bp, Homo sapien
agataaagttgatttactcccacta

SEQ ID NO: 5951671 - DNA, 25 bp, Homo sapien
gatattgaaaagctgaagacgttca

SEQ ID NO: 5951672 - DNA, 25 bp, Homo sapien
attaaagtacatacaaggagggaag

SEQ ID NO: 5951673 - DNA, 25 bp, Homo sapien
aaggagggaaggaggtgtcacccac

SEQ ID NO: 5951674 - DNA, 25 bp, Homo sapien
gaaaatgaattaaatggtggcctag

SEQ ID NO: 5951675 - DNA, 25 bp, Homo sapien
gttttaaaagatcttgcagattcag

SEQ ID NO: 5951676 - DNA, 25 bp, Homo sapien
aggtgtcacccacaaaaaggttgca

SEQ ID NO: 5951677 - DNA, 25 bp, Homo sapien
taaagatgcagacttaccacaacta

SEQ ID NO: 5951678 - DNA, 25 bp, Homo sapien
ctatgatatcgaaatagcaccacag

SEQ ID NO: 5951679 - DNA, 25 bp, Homo sapien
atgaaggtaatgaagattccgagag

SEQ ID NO: 5951680 - DNA, 25 bp, Homo sapien
caactcaaaagggatgcgaacagca

SEQ ID NO: 5951681 - DNA, 25 bp, Homo sapien
ataagcttgacttggaagacgaaga

SEQ ID NO: 5951682 - DNA, 25 bp, Homo sapien
aatgaagattccgagagtaaacttg

SEQ ID NO: 5951683 - DNA, 25 bp, Homo sapien
tgctgtctaagaacttcaaagaagt

SEQ ID NO: 5951684 - DNA, 25 bp, Homo sapien
gcaaaaaactccaaagtgcactttt

SEQ ID NO: 5951685 - DNA, 25 bp, Homo sapien
ccacaactacagaatacactatcta

SEQ ID NO: 5951686 - DNA, 25 bp, Homo sapien
cagggaatgaaagttccggcattaa

SEQ ID NO: 5951687 - DNA, 25 bp, Homo sapien
caggtaaaaatgaagagagttccga

SEQ ID NO: 5951688 - DNA, 25 bp, Homo sapien
gatgcagacttaccacaactacaga

SEQ ID NO: 5951689 - DNA, 25 bp, Homo sapien
taatgatttgttaagcaattcaaga

SEQ ID NO: 5951690 - DNA, 25 bp, Homo sapien
gtctgcaacaactcataaagaactc

SEQ ID NO: 5951691 - DNA, 25 bp, Homo sapien
ctccgacggtgaaaatgaattaaat

SEQ ID NO: 5951692 - DNA, 25 bp, Homo sapien
tagtgtacagcgaagaaggcctcga

SEQ ID NO: 5951693 - DNA, 25 bp, Homo sapien
cttgctgaaaaggtcgcactctaat

SEQ ID NO: 5951694 - DNA, 25 bp, Homo sapien
gaaaaagatgagactgagtgcatca

SEQ ID NO: 5951695 - DNA, 25 bp, Homo sapien
catggagttagtgtacagcgaagaa

SEQ ID NO: 5951696 - DNA, 25 bp, Homo sapien
ctgaaaaggtcgcactctaatattt

SEQ ID NO: 5951697 - DNA, 25 bp, Homo sapien
gaaactttcgcaaatttctcgcagt

SEQ ID NO: 5951698 - DNA, 25 bp, Homo sapien
caaatttctcgcagtcgtagtaggg

SEQ ID NO: 5951699 - DNA, 25 bp, Homo sapien
agaataatatcgtatatacagggaa

SEQ ID NO: 5951700 - DNA, 25 bp, Homo sapien
aaagagaataatatcgtatatacag

SEQ ID NO: 5951701 - DNA, 25 bp, Homo sapien
ctgcaacaactcataaagaactcca

SEQ ID NO: 5951702 - DNA, 25 bp, Homo sapien
ttggttataatgctttacctaaaat

SEQ ID NO: 5951703 - DNA, 25 bp, Homo sapien
cttggcaaaaaactccaaagtgcac

SEQ ID NO: 5951704 - DNA, 25 bp, Homo sapien
ttacaaaagtacggttctgtccttg

SEQ ID NO: 5951705 - DNA, 25 bp, Homo sapien
aaagtctagttttaaaagatcttgc

SEQ ID NO: 5951706 - DNA, 25 bp, Homo sapien
ggtaaaaatgaagagagttccgacg

SEQ ID NO: 5951707 - DNA, 25 bp, Homo sapien
ctagaacaaattgatgaagaaggcg

SEQ ID NO: 5951708 - DNA, 25 bp, Homo sapien
aagaacttcaaagaagttgccgccg

SEQ ID NO: 5951709 - DNA, 25 bp, Homo sapien
ataaagaactccacgaagaatgagc

SEQ ID NO: 5951710 - DNA, 25 bp, Homo sapien
ccccagataaagttgatttactccc

SEQ ID NO: 5951711 - DNA, 25 bp, Homo sapien
atgacaccccagataaagttgattt

SEQ ID NO: 5951712 - DNA, 25 bp, Homo sapien
aggtcgcactctaatattttaaaac

SEQ ID NO: 5951713 - DNA, 25 bp, Homo sapien
aactttcgcaaatttctcgcagtcg

SEQ ID NO: 5951714 - DNA, 25 bp, Homo sapien
aatagcaccacagaggcaggagccg

SEQ ID NO: 5951715 - DNA, 25 bp, Homo sapien
tccacagacgccggctcacttgctg

SEQ ID NO: 5951716 - DNA, 25 bp, Homo sapien
gttaccactgctgtctaagaacttc

SEQ ID NO: 5951717 - DNA, 25 bp, Homo sapien
ttatttttcccgaaacttctaatca

SEQ ID NO: 5951718 - DNA, 25 bp, Homo sapien
ttctgtccttggttataatgcttta

SEQ ID NO: 5951719 - DNA, 25 bp, Homo sapien
gtacatacaaggagggaaggaggtg

SEQ ID NO: 5951720 - DNA, 25 bp, Homo sapien
agtctcatctttttcgccttcttca

SEQ ID NO: 5951721 - DNA, 25 bp, Homo sapien
ttcttcatcaatttgttctagtggg

SEQ ID NO: 5951722 - DNA, 25 bp, Homo sapien
ttgtcttttgctgccagaggcaatc

SEQ ID NO: 5951723 - DNA, 25 bp, Homo sapien
caggtggttttaaaatattagagtg

SEQ ID NO: 5951724 - DNA, 25 bp, Homo sapien
ggaactctcttcatttttacctgaa

SEQ ID NO: 5951725 - DNA, 25 bp, Homo sapien
gacttttcattttaggtaaagcatt

SEQ ID NO: 5951726 - DNA, 25 bp, Homo sapien
atttgttctagtgggagtaaatcaa

SEQ ID NO: 5951727 - DNA, 25 bp, Homo sapien
tttgcgtatagatagtgtattctgt

SEQ ID NO: 5951728 - DNA, 25 bp, Homo sapien
aaatcaactttatctggggtgtcat

SEQ ID NO: 5951729 - DNA, 25 bp, Homo sapien
tgagttgttgcagaccaccttgctc

SEQ ID NO: 5951730 - DNA, 25 bp, Homo sapien
ctttcattccctgtatatacgatat

SEQ ID NO: 5951731 - DNA, 25 bp, Homo sapien
tcgggaaaaataaagcttttcgatc

SEQ ID NO: 5951732 - DNA, 25 bp, Homo sapien
cgtggagttctttatgagttgttgc

SEQ ID NO: 5951733 - DNA, 25 bp, Homo sapien
ttcattttcaccgtcggaggaatcc

SEQ ID NO: 5951734 - DNA, 25 bp, Homo sapien
gcattataaccaaggacagaaccgt

SEQ ID NO: 5951735 - DNA, 25 bp, Homo sapien
cggaatcttcattaccttcatcatc

SEQ ID NO: 5951736 - DNA, 25 bp, Homo sapien
gaccaccttgctcattaaatagtcc

SEQ ID NO: 5951737 - DNA, 25 bp, Homo sapien
ttgtgggtgacacctccttccctcc

SEQ ID NO: 5951738 - DNA, 25 bp, Homo sapien
ctattgttgtcttttgctgccagag

SEQ ID NO: 5951739 - DNA, 25 bp, Homo sapien
ttccaagtcaagcttatatggtgag

SEQ ID NO: 5951740 - DNA, 25 bp, Homo sapien
catcttcgtcttccaagtcaagctt

SEQ ID NO: 5951741 - DNA, 25 bp, Homo sapien
cctgttttaaaagtgcactttggag

SEQ ID NO: 5951742 - DNA, 25 bp, Homo sapien
ggtccaatcttacaggtggttttaa

SEQ ID NO: 5951743 - DNA, 25 bp, Homo sapien
aagtgagccggcgtctgtggaaagt

SEQ ID NO: 5951744 - DNA, 25 bp, Homo sapien
ctactacgactgcgagaaatttgcg

SEQ ID NO: 5951745 - DNA, 25 bp, Homo sapien
cggctcctgcctctgtggtgctatt

SEQ ID NO: 5951746 - DNA, 25 bp, Homo sapien
gagccggcgtctgtggaaagttaat

SEQ ID NO: 5951747 - DNA, 25 bp, Homo sapien
tctagtgggagtaaatcaactttat

SEQ ID NO: 5951748 - DNA, 25 bp, Homo sapien
tgttttaaaagtgcactttggagtt

SEQ ID NO: 5951749 - DNA, 25 bp, Homo sapien
gaaaaataaagcttttcgatctatt

SEQ ID NO: 5951750 - DNA, 25 bp, Homo sapien
aagtcaagcttatatggtgagttga

SEQ ID NO: 5951751 - DNA, 25 bp, Homo sapien
tcttccaagtcaagcttatatggtg

SEQ ID NO: 5951752 - DNA, 25 bp, Homo sapien
cttgctcattaaatagtcctaggcc

SEQ ID NO: 5951753 - DNA, 25 bp, Homo sapien
gagttctttatgagttgttgcagac

SEQ ID NO: 5951754 - DNA, 25 bp, Homo sapien
tactttaatgtgttgccattgttgc

SEQ ID NO: 5951755 - DNA, 25 bp, Homo sapien
gtgtattctgtagttgtggtaagtc

SEQ ID NO: 5951756 - DNA, 25 bp, Homo sapien
ttcttgattccgagtgatgcactca

SEQ ID NO: 5951757 - DNA, 25 bp, Homo sapien
tacatacggtaacggctcctgcctc

SEQ ID NO: 5951758 - DNA, 25 bp, Homo sapien
ttgttctagtgggagtaaatcaact

SEQ ID NO: 5951759 - DNA, 25 bp, Homo sapien
tggggaatagccttctggtacatac

SEQ ID NO: 5951760 - DNA, 25 bp, Homo sapien
gttgtggtaagtctgcatctttact

SEQ ID NO: 5951761 - DNA, 25 bp, Homo sapien
cttcattaccttcatcatcgtcgga

SEQ ID NO: 5951762 - DNA, 25 bp, Homo sapien
agttcttcaggatcgaggccttctt

SEQ ID NO: 5951763 - DNA, 25 bp, Homo sapien
cttcgctgtacactaactccatggt

SEQ ID NO: 5951764 - DNA, 25 bp, Homo sapien
gctcctgcctctgtggtgctatttc

SEQ ID NO: 5951765 - DNA, 25 bp, Homo sapien
ctttgaagttcttagacagcagtgg

SEQ ID NO: 5951766 - DNA, 25 bp, Homo sapien
gtgcgaccttttcagcaagtgagcc

SEQ ID NO: 5951767 - DNA, 25 bp, Homo sapien
ttgctcattcttcgtggagttcttt

SEQ ID NO: 5951768 - DNA, 25 bp, Homo sapien
cattccctgtatatacgatattatt

SEQ ID NO: 5951769 - DNA, 25 bp, Homo sapien
taacaaatcattatggttggcccta

SEQ ID NO: 5951770 - DNA, 25 bp, Homo sapien
tgtagttgtggtaagtctgcatctt

SEQ ID NO: 5951771 - DNA, 25 bp, Homo sapien
cttgttgaaatggggaatagccttc

SEQ ID NO: 5951772 - DNA, 25 bp, Homo sapien
ctggtacatacggtaacggctcctg

SEQ ID NO: 5951773 - DNA, 25 bp, Homo sapien
aagcattataaccaaggacagaacc

SEQ ID NO: 5951774 - DNA, 25 bp, Homo sapien
tggtaacgctgcaccttcttcttga

SEQ ID NO: 5951775 - DNA, 25 bp, Homo sapien
gtaaatcaactttatctggggtgtc

SEQ ID NO: 5951776 - DNA, 25 bp, Homo sapien
agtttactctcggaatcttcattac

SEQ ID NO: 5951777 - DNA, 25 bp, Homo sapien
gttctagtgggagtaaatcaacttt

SEQ ID NO: 5951778 - DNA, 25 bp, Homo sapien
ttttcgatctattgttgtcttttgc

SEQ ID NO: 5951779 - DNA, 25 bp, Homo sapien
cagcttttcaatatcatcttgttga

SEQ ID NO: 5951780 - DNA, 25 bp, Homo sapien
tcattaccttcatcatcgtcggaac

SEQ ID NO: 5951781 - DNA, 25 bp, Homo sapien
ccctgtatatacgatattattctct

SEQ ID NO: 5951782 - DNA, 25 bp, Homo sapien
gccattgttgctgttcgcatccctt

SEQ ID NO: 5951783 - DNA, 25 bp, Homo sapien
taggtaaagcattataaccaaggac

SEQ ID NO: 5951784 - DNA, 25 bp, Homo sapien
accttgctcattaaatagtcctagg

SEQ ID NO: 5951785 - DNA, 25 bp, Homo sapien
aagcttttcgatctattgttgtctt

SEQ ID NO: 5951786 - DNA, 25 bp, Homo sapien
ggtacatacggtaacggctcctgcc

SEQ ID NO: 5951787 - DNA, 25 bp, Homo sapien
ttcgtcttccaagtcaagcttatat

SEQ ID NO: 5951788 - DNA, 25 bp, Homo sapien
ggccctactacgactgcgagaaatt

SEQ ID NO: 5951789 - DNA, 25 bp, Homo sapien
ccttttcagcaagtgagccggcgtc

SEQ ID NO: 5951790 - DNA, 25 bp, Homo sapien
tttgtaactttcttgaattgcttaa

SEQ ID NO: 5951791 - DNA, 25 bp, Homo sapien
acttctttgaagttcttagacagca

SEQ ID NO: 5951792 - DNA, 25 bp, Homo sapien
gggtgacacctccttccctccttgt

SEQ ID NO: 5951793 - DNA, 25 bp, Homo sapien
ctgcctctgtggtgctatttcgata

SEQ ID NO: 5951794 - DNA, 25 bp, Homo sapien
cttccctccttgtatgtactttaat

SEQ ID NO: 5951795 - DNA, 25 bp, Homo sapien
cttttgagttggtccaatcttacag

SEQ ID NO: 5951796 - DNA, 25 bp, Homo sapien
tgtggtaagtctgcatctttactct

SEQ ID NO: 5951797 - DNA, 25 bp, Homo sapien
aaatattagagtgcgaccttttcag

SEQ ID NO: 5951798 - DNA, 25 bp, Homo sapien
ttttgccaagtttactctcggaatc

SEQ ID NO: 5951799 - DNA, 25 bp, Homo sapien
gaagttcttagacagcagtggtaac

SEQ ID NO: 5951800 - DNA, 25 bp, Homo sapien
gttttaaaatattagagtgcgacct

SEQ ID NO: 5951801 - DNA, 25 bp, Homo sapien
cgtcttccaagtcaagcttatatgg

SEQ ID NO: 5951802 - DNA, 25 bp, Homo sapien
ctaactccatggttgggacggcggc

SEQ ID NO: 5951803 - DNA, 25 bp, Homo sapien
gcttttcgatctattgttgtctttt

SEQ ID NO: 5951804 - DNA, 25 bp, Homo sapien
tgctgccagaggcaatcttccttgt

SEQ ID NO: 5951805 - DNA, 25 bp, Homo sapien
aaaagtgcactttggagttttttgc

SEQ ID NO: 5951806 - DNA, 25 bp, Homo sapien
atcaatttgttctagtgggagtaaa

SEQ ID NO: 5951807 - DNA, 25 bp, Homo sapien
caccgtcggaggaatcctgttttaa

SEQ ID NO: 5951808 - DNA, 25 bp, Homo sapien
atctattgttgtcttttgctgccag

SEQ ID NO: 5951809 - DNA, 25 bp, Homo sapien
taaaatattagagtgcgaccttttc

SEQ ID NO: 5951810 - DNA, 25 bp, Homo sapien
acaaatcattatggttggccctact

SEQ ID NO: 5951811 - DNA, 25 bp, Homo sapien
atcttcattaccttcatcatcgtcg

SEQ ID NO: 5951812 - DNA, 25 bp, Homo sapien
ctgccagaggcaatcttccttgttg

SEQ ID NO: 5951813 - DNA, 25 bp, Homo sapien
tgattagaagtttcgggaaaaataa

SEQ ID NO: 5951814 - DNA, 25 bp, Homo sapien
tatgtactttaatgtgttgccattg

SEQ ID NO: 5951815 - DNA, 25 bp, Homo sapien
gtcaagcttatatggtgagttgaac

SEQ ID NO: 5951816 - DNA, 25 bp, Homo sapien
gtgacacctccttccctccttgtat

SEQ ID NO: 5951817 - DNA, 25 bp, Homo sapien
caatcttacaggtggttttaaaata

SEQ ID NO: 5951818 - DNA, 25 bp, Homo sapien
aataaagcttttcgatctattgttg

SEQ ID NO: 5951819 - DNA, 25 bp, Homo sapien
ttacctgaatctgcaagatctttta

SEQ ID NO: 5951820 - DNA, 25 bp, Homo sapien
catacggtaacggctcctgcctctg

SEQ ID NO: 5951821 - DNA, 25 bp, Homo sapien
ccaagtcaagcttatatggtgagtt

SEQ ID NO: 5951822 - DNA, 25 bp, Homo sapien
agaaatttgcgaaagtttcctgagt

SEQ ID NO: 5951823 - DNA, 25 bp, Homo sapien
gaggcaatcttccttgttgttgcgc

SEQ ID NO: 5951824 - DNA, 25 bp, Homo sapien
tcatctttttcgccttcttcatcaa

SEQ ID NO: 5951825 - DNA, 25 bp, Homo sapien
tctcatctttttcgccttcttcatc

SEQ ID NO: 5951826 - DNA, 25 bp, Homo sapien
gtgggagtaaatcaactttatctgg

SEQ ID NO: 5951827 - DNA, 25 bp, Homo sapien
tgtgttgccattgttgctgttcgca

SEQ ID NO: 5951828 - DNA, 25 bp, Homo sapien
atcctgttttaaaagtgcactttgg

SEQ ID NO: 5951829 - DNA, 25 bp, Homo sapien
atagtcctaggccaccatttaattc

SEQ ID NO: 5951830 - DNA, 25 bp, Homo sapien
cttgttgttgcgcatgggtatgcaa

SEQ ID NO: 5951831 - DNA, 25 bp, Homo sapien
gttgcagaccaccttgctcattaaa

SEQ ID NO: 5951832 - DNA, 25 bp, Homo sapien
tgcgcatgggtatgcaacctttttg

SEQ ID NO: 5951833 - DNA, 25 bp, Homo sapien
ttgttgcagaccaccttgctcatta

SEQ ID NO: 5951834 - DNA, 25 bp, Homo sapien
ctgtggaaagttaatgccggaactt

SEQ ID NO: 5951835 - DNA, 25 bp, Homo sapien
ttgccattgttgctgttcgcatccc

SEQ ID NO: 5951836 - DNA, 25 bp, Homo sapien
gagttttttgccaagtttactctcg

SEQ ID NO: 5951837 - DNA, 25 bp, Homo sapien
atattagagtgcgaccttttcagca

SEQ ID NO: 5951838 - DNA, 25 bp, Homo sapien
ctatttcgatatcatagtcatcagt

SEQ ID NO: 5951839 - DNA, 25 bp, Homo sapien
ctgtatatacgatattattctcttt

SEQ ID NO: 5951840 - DNA, 25 bp, Homo sapien
ggaaagttaatgccggaactttcat

SEQ ID NO: 5951841 - DNA, 25 bp, Homo sapien
caccatttaattcattttcaccgtc

SEQ ID NO: 5951842 - DNA, 25 bp, Homo sapien
catcatcgtcggaactctcttcatt

SEQ ID NO: 5951843 - DNA, 25 bp, Homo sapien
ctctttatcttcgttagctggcatc

SEQ ID NO: 5951844 - DNA, 25 bp, Homo sapien
gtaacgctgcaccttcttcttgatt

SEQ ID NO: 5951845 - DNA, 25 bp, Homo sapien
gagttgaacgtcttcagcttttcaa

SEQ ID NO: 5951846 - DNA, 25 bp, Homo sapien
ggttgggacggcggcaacttctttg

SEQ ID NO: 5951847 - DNA, 25 bp, Homo sapien
caacttctttgaagttcttagacag

SEQ ID NO: 5951848 - DNA, 25 bp, Homo sapien
agtttcctgagttggtcgtttttgc

SEQ ID NO: 5951849 - DNA, 25 bp, Homo sapien
cgtcttcagcttttcaatatcatct

SEQ ID NO: 5951850 - DNA, 25 bp, Homo sapien
ccttctggtacatacggtaacggct

SEQ ID NO: 5951851 - DNA, 25 bp, Homo sapien
tgattccgagtgatgcactcagtct

SEQ ID NO: 5951852 - DNA, 25 bp, Homo sapien
atcgtttttagttttttgctcattc

SEQ ID NO: 5951853 - DNA, 25 bp, Homo sapien
tcgcatcccttttgagttggtccaa

SEQ ID NO: 5951854 - DNA, 25 bp, Homo sapien
cattttcaccgtcggaggaatcctg

SEQ ID NO: 5951855 - DNA, 25 bp, Homo sapien
gttggtcgtttttgcgtatagatag

SEQ ID NO: 5951856 - DNA, 25 bp, Homo sapien
agtggtaacgctgcaccttcttctt

SEQ ID NO: 5951857 - DNA, 25 bp, Homo sapien
aaatagtcctaggccaccatttaat

SEQ ID NO: 5951858 - DNA, 25 bp, Homo sapien
cgtttttgcgtatagatagtgtatt

SEQ ID NO: 5951859 - DNA, 25 bp, Homo sapien
gcactttggagttttttgccaagtt

SEQ ID NO: 5951860 - DNA, 25 bp, Homo sapien
aactccatggttgggacggcggcaa

SEQ ID NO: 5951861 - DNA, 25 bp, Homo sapien
gacagcagtggtaacgctgcacctt

SEQ ID NO: 5951862 - DNA, 25 bp, Homo sapien
ttcgtggagttctttatgagttgtt

SEQ ID NO: 5951863 - DNA, 25 bp, Homo sapien
ttgcgaaagtttcctgagttggtcg

SEQ ID NO: 5951864 - DNA, 25 bp, Homo sapien
actttatctggggtgtcatcttcgt

SEQ ID NO: 5951865 - DNA, 25 bp, Homo sapien
gtcatcttcgtcttccaagtcaagc

SEQ ID NO: 5951866 - DNA, 25 bp, Homo sapien
ggttggccctactacgactgcgaga

SEQ ID NO: 5951867 - DNA, 25 bp, Homo sapien
gaatcttcattaccttcatcatcgt

SEQ ID NO: 5951868 - DNA, 25 bp, Homo sapien
tgtactttaatgtgttgccattgtt

SEQ ID NO: 5951869 - DNA, 25 bp, Homo sapien
ctgcaccttcttcttgattccgagt

SEQ ID NO: 5951870 - DNA, 25 bp, Homo sapien
cttaacaaatcattatggttggccc

SEQ ID NO: 5951871 - DNA, 25 bp, Homo sapien
cgtcggaactctcttcatttttacc

SEQ ID NO: 5951872 - DNA, 25 bp, Homo sapien
tccctccttgtatgtactttaatgt

SEQ ID NO: 5951873 - DNA, 25 bp, Homo sapien
tcgaggccttcttcgctgtacacta

SEQ ID NO: 5951874 - DNA, 25 bp, Homo sapien
ccttcttcgctgtacactaactcca

SEQ ID NO: 5951875 - DNA, 25 bp, Homo sapien
ttaatgccggaactttcattccctg

SEQ ID NO: 5951876 - DNA, 25 bp, Homo sapien
atggttggccctactacgactgcga

SEQ ID NO: 5951877 - DNA, 25 bp, Homo sapien
ggcaatcttccttgttgttgcgcat

SEQ ID NO: 5951878 - DNA, 25 bp, Homo sapien
tggggtgtcatcttcgtcttccaag

SEQ ID NO: 5951879 - DNA, 25 bp, Homo sapien
tacaggtggttttaaaatattagag

SEQ ID NO: 5951880 - DNA, 25 bp, Homo sapien
gccggcgtctgtggaaagttaatgc

SEQ ID NO: 5951881 - DNA, 25 bp, Homo sapien
tgttgccattgttgctgttcgcatc

SEQ ID NO: 5951882 - DNA, 25 bp, Homo sapien
tacggtaacggctcctgcctctgtg

SEQ ID NO: 5951883 - DNA, 25 bp, Homo sapien
tatctggggtgtcatcttcgtcttc

SEQ ID NO: 5951884 - DNA, 25 bp, Homo sapien
cttgattccgagtgatgcactcagt

SEQ ID NO: 5951885 - DNA, 25 bp, Homo sapien
atcattatggttggccctactacga

SEQ ID NO: 5951886 - DNA, 25 bp, Homo sapien
aaaataaagcttttcgatctattgt

SEQ ID NO: 5951887 - DNA, 25 bp, Homo sapien
tatagatagtgtattctgtagttgt

SEQ ID NO: 5951888 - DNA, 25 bp, Homo sapien
ctttttgtgggtgacacctccttcc

SEQ ID NO: 5951889 - DNA, 25 bp, Homo sapien
caacctttttgtgggtgacacctcc

SEQ ID NO: 5951890 - DNA, 25 bp, Homo sapien
ccttcttcatcaatttgttctagtg

SEQ ID NO: 5951891 - DNA, 25 bp, Homo sapien
actctgattagaagtttcgggaaaa

SEQ ID NO: 5951892 - DNA, 25 bp, Homo sapien
tgccggaactttcattccctgtata

SEQ ID NO: 5951893 - DNA, 25 bp, Homo sapien
ttcttcaggatcgaggccttcttcg

SEQ ID NO: 5951894 - DNA, 25 bp, Homo sapien
tcaatatcatcttgttgaaatgggg

SEQ ID NO: 5951895 - DNA, 25 bp, Homo sapien
gacacctccttccctccttgtatgt

SEQ ID NO: 5951896 - DNA, 25 bp, Homo sapien
cattaaatagtcctaggccaccatt

SEQ ID NO: 5951897 - DNA, 25 bp, Homo sapien
tccttgtatgtactttaatgtgttg

SEQ ID NO: 5951898 - DNA, 25 bp, Homo sapien
ctttatcttcgttagctggcatcat

SEQ ID NO: 5951899 - DNA, 25 bp, Homo sapien
gccaccatttaattcattttcaccg

SEQ ID NO: 5951900 - DNA, 25 bp, Homo sapien
caagcttatatggtgagttgaacgt

SEQ ID NO: 5951901 - DNA, 25 bp, Homo sapien
actaagtcctctagttcttcaggat

SEQ ID NO: 5951902 - DNA, 25 bp, Homo sapien
attagagtgcgaccttttcagcaag

SEQ ID NO: 5951903 - DNA, 25 bp, Homo sapien
tgctgttcgcatcccttttgagttg

SEQ ID NO: 5951904 - DNA, 25 bp, Homo sapien
agttcttagacagcagtggtaacgc

SEQ ID NO: 5951905 - DNA, 25 bp, Homo sapien
aatatcatcttgttgaaatggggaa

SEQ ID NO: 5951906 - DNA, 25 bp, Homo sapien
gtcgtttttgcgtatagatagtgta

SEQ ID NO: 5951907 - DNA, 25 bp, Homo sapien
cagaccaccttgctcattaaatagt

SEQ ID NO: 5951908 - DNA, 25 bp, Homo sapien
gtgtcatcttcgtcttccaagtcaa

SEQ ID NO: 5951909 - DNA, 25 bp, Homo sapien
ggtaaagcattataaccaaggacag

SEQ ID NO: 5951910 - DNA, 25 bp, Homo sapien
taactttcttgaattgcttaacaaa

SEQ ID NO: 5951911 - DNA, 25 bp, Homo sapien
gtaagtctgcatctttactctgatt

SEQ ID NO: 5951912 - DNA, 25 bp, Homo sapien
attataaccaaggacagaaccgtac

SEQ ID NO: 5951913 - DNA, 25 bp, Homo sapien
gcaagtgagccggcgtctgtggaaa

SEQ ID NO: 5951914 - DNA, 25 bp, Homo sapien
ctcattaaatagtcctaggccacca

SEQ ID NO: 5951915 - DNA, 25 bp, Homo sapien
tgaacgtcttcagcttttcaatatc

SEQ ID NO: 5951916 - DNA, 25 bp, Homo sapien
tagtcatcagttttatcacttttat

SEQ ID NO: 5951917 - DNA, 25 bp, Homo sapien
aagtctgcatctttactctgattag

SEQ ID NO: 5951918 - DNA, 25 bp, Homo sapien
cctccttgtatgtactttaatgtgt

SEQ ID NO: 5951919 - DNA, 25 bp, Homo sapien
cgactgcgagaaatttgcgaaagtt

SEQ ID NO: 5951920 - DNA, 25 bp, Homo sapien
atttcgatatcatagtcatcagttt

SEQ ID NO: 5951921 - DNA, 25 bp, Homo sapien
attcttcgtggagttctttatgagt

SEQ ID NO: 5951922 - DNA, 25 bp, Homo sapien
atctttactctgattagaagtttcg

SEQ ID NO: 5951923 - DNA, 25 bp, Homo sapien
cattgttgctgttcgcatccctttt

SEQ ID NO: 5951924 - DNA, 25 bp, Homo sapien
gtggtgctatttcgatatcatagtc

SEQ ID NO: 5951925 - DNA, 25 bp, Homo sapien
cttttgtaactttcttgaattgctt

SEQ ID NO: 5951926 - DNA, 25 bp, Homo sapien
tgttgtcttttgctgccagaggcaa

SEQ ID NO: 5951927 - DNA, 25 bp, Homo sapien
ttcgatctattgttgtcttttgctg

SEQ ID NO: 5951928 - DNA, 25 bp, Homo sapien
ttctggtacatacggtaacggctcc

SEQ ID NO: 5951929 - DNA, 25 bp, Homo sapien
agtcctctagttcttcaggatcgag

SEQ ID NO: 5951930 - DNA, 25 bp, Homo sapien
tttactctcggaatcttcattacct

SEQ ID NO: 5951931 - DNA, 25 bp, Homo sapien
gacggcggcaacttctttgaagttc

SEQ ID NO: 5951932 - DNA, 25 bp, Homo sapien
accttcttcttgattccgagtgatg

SEQ ID NO: 5951933 - DNA, 25 bp, Homo sapien
gggaatagccttctggtacatacgg

SEQ ID NO: 5951934 - DNA, 25 bp, Homo sapien
aggccaccatttaattcattttcac

SEQ ID NO: 5951935 - DNA, 25 bp, Homo sapien
gttgcgcatgggtatgcaacctttt

SEQ ID NO: 5951936 - DNA, 25 bp, Homo sapien
taagtaactaagtcctctagttctt

SEQ ID NO: 5951937 - DNA, 25 bp, Homo sapien
cttagacagcagtggtaacgctgca

SEQ ID NO: 5951938 - DNA, 25 bp, Homo sapien
gatcgaggccttcttcgctgtacac

SEQ ID NO: 5951939 - DNA, 25 bp, Homo sapien
ctgaatctgcaagatcttttaaaac

SEQ ID NO: 5951940 - DNA, 25 bp, Homo sapien
tccgagtgatgcactcagtctcatc

SEQ ID NO: 5951941 - DNA, 25 bp, Homo sapien
caaggacagaaccgtacttttgtaa

SEQ ID NO: 5951942 - DNA, 25 bp, Homo sapien
tatcatcttgttgaaatggggaata

SEQ ID NO: 5951943 - DNA, 25 bp, Homo sapien
ttgaaatggggaatagccttctggt

SEQ ID NO: 5951944 - DNA, 25 bp, Homo sapien
atttgcgaaagtttcctgagttggt

SEQ ID NO: 5951945 - DNA, 25 bp, Homo sapien
gttcgcatcccttttgagttggtcc

SEQ ID NO: 5951946 - DNA, 25 bp, Homo sapien
caatttgttctagtgggagtaaatc

SEQ ID NO: 5951947 - DNA, 25 bp, Homo sapien
ttttttgctcattcttcgtggagtt

SEQ ID NO: 5951948 - DNA, 25 bp, Homo sapien
ttttttgccaagtttactctcggaa

SEQ ID NO: 5951949 - DNA, 25 bp, Homo sapien
cagaggcaatcttccttgttgttgc

SEQ ID NO: 5951950 - DNA, 25 bp, Homo sapien
gaccttttcagcaagtgagccggcg

SEQ ID NO: 5951951 - DNA, 25 bp, Homo sapien
agcttatatggtgagttgaacgtct

SEQ ID NO: 5951952 - DNA, 25 bp, Homo sapien
gatagtgtattctgtagttgtggta

SEQ ID NO: 5951953 - DNA, 25 bp, Homo sapien
cttcatcaatttgttctagtgggag

SEQ ID NO: 5951954 - DNA, 25 bp, Homo sapien
cttccttgttgttgcgcatgggtat

SEQ ID NO: 5951955 - DNA, 25 bp, Homo sapien
tctgattagaagtttcgggaaaaat

SEQ ID NO: 5951956 - DNA, 25 bp, Homo sapien
ctgagttggtcgtttttgcgtatag

SEQ ID NO: 5951957 - DNA, 25 bp, Homo sapien
tatggtgagttgaacgtcttcagct

SEQ ID NO: 5951958 - DNA, 25 bp, Homo sapien
gagtaaatcaactttatctggggtg

SEQ ID NO: 5951959 - DNA, 25 bp, Homo sapien
ttagttttttgctcattcttcgtgg

SEQ ID NO: 5951960 - DNA, 25 bp, Homo sapien
tatatggtgagttgaacgtcttcag

SEQ ID NO: 5951961 - DNA, 25 bp, Homo sapien
catgggtatgcaacctttttgtggg

SEQ ID NO: 5951962 - DNA, 25 bp, Homo sapien
aagtgcactttggagttttttgcca

SEQ ID NO: 5951963 - DNA, 25 bp, Homo sapien
tattctctttatcttcgttagctgg

SEQ ID NO: 5951964 - DNA, 25 bp, Homo sapien
ctcttcatttttacctgaatctgca

SEQ ID NO: 5951965 - DNA, 25 bp, Homo sapien
atcccttttgagttggtccaatctt

SEQ ID NO: 5951966 - DNA, 25 bp, Homo sapien
ggtgctatttcgatatcatagtcat

SEQ ID NO: 5951967 - DNA, 25 bp, Homo sapien
gttgaacgtcttcagcttttcaata

SEQ ID NO: 5951968 - DNA, 25 bp, Homo sapien
cccttttgagttggtccaatcttac

SEQ ID NO: 5951969 - DNA, 25 bp, Homo sapien
caagtttactctcggaatcttcatt

SEQ ID NO: 5951970 - DNA, 25 bp, Homo sapien
agttaatgccggaactttcattccc

SEQ ID NO: 5951971 - DNA, 25 bp, Homo sapien
cggcggcaacttctttgaagttctt

SEQ ID NO: 5951972 - DNA, 25 bp, Homo sapien
cttgtatgtactttaatgtgttgcc

SEQ ID NO: 5951973 - DNA, 25 bp, Homo sapien
gtgagccggcgtctgtggaaagtta

SEQ ID NO: 5951974 - DNA, 25 bp, Homo sapien
ttgccaagtttactctcggaatctt

SEQ ID NO: 5951975 - DNA, 25 bp, Homo sapien
aaatttgcgaaagtttcctgagttg

SEQ ID NO: 5951976 - DNA, 25 bp, Homo sapien
tttgctgccagaggcaatcttcctt

SEQ ID NO: 5951977 - DNA, 25 bp, Homo sapien
tacttttgtaactttcttgaattgc

SEQ ID NO: 5951978 - DNA, 25 bp, Homo sapien
ggtggttttaaaatattagagtgcg

SEQ ID NO: 5951979 - DNA, 25 bp, Homo sapien
gtattctgtagttgtggtaagtctg

SEQ ID NO: 5951980 - DNA, 25 bp, Homo sapien
attctgtagttgtggtaagtctgca

SEQ ID NO: 5951981 - DNA, 25 bp, Homo sapien
cttatatggtgagttgaacgtcttc

SEQ ID NO: 5951982 - DNA, 25 bp, Homo sapien
tctggggtgtcatcttcgtcttcca

SEQ ID NO: 5951983 - DNA, 25 bp, Homo sapien
tcttcgtcttccaagtcaagcttat

SEQ ID NO: 5951984 - DNA, 25 bp, Homo sapien
gcactcagtctcatctttttcgcct

SEQ ID NO: 5951985 - DNA, 25 bp, Homo sapien
tccttgttgttgcgcatgggtatgc

SEQ ID NO: 5951986 - DNA, 25 bp, Homo sapien
tatgcaacctttttgtgggtgacac

SEQ ID NO: 5951987 - DNA, 25 bp, Homo sapien
ttactctgattagaagtttcgggaa

SEQ ID NO: 5951988 - DNA, 25 bp, Homo sapien
tacgactgcgagaaatttgcgaaag

SEQ ID NO: 5951989 - DNA, 25 bp, Homo sapien
ttgttgctgttcgcatcccttttga

SEQ ID NO: 5951990 - DNA, 25 bp, Homo sapien
tcatcttgttgaaatggggaatagc

SEQ ID NO: 5951991 - DNA, 25 bp, Homo sapien
aatggggaatagccttctggtacat

SEQ ID NO: 5951992 - DNA, 25 bp, Homo sapien
tccaatcttacaggtggttttaaaa

SEQ ID NO: 5951993 - DNA, 25 bp, Homo sapien
ggccttcttcgctgtacactaactc

SEQ ID NO: 5951994 - DNA, 25 bp, Homo sapien
ttatggttggccctactacgactgc

SEQ ID NO: 5951995 - DNA, 25 bp, Homo sapien
ctagttcttcaggatcgaggccttc

SEQ ID NO: 5951996 - DNA, 25 bp, Homo sapien
caactttatctggggtgtcatcttc

SEQ ID NO: 5951997 - DNA, 25 bp, Homo sapien
ctgcaagatcttttaaaactagact

SEQ ID NO: 5951998 - DNA, 25 bp, Homo sapien
aatgccggaactttcattccctgta

SEQ ID NO: 5951999 - DNA, 25 bp, Homo sapien
tgtaactttcttgaattgcttaaca

SEQ ID NO: 5952000 - DNA, 25 bp, Homo sapien
ttcgatatcatagtcatcagtttta

SEQ ID NO: 5952001 - DNA, 25 bp, Homo sapien
tgcaacctttttgtgggtgacacct

SEQ ID NO: 5952002 - DNA, 25 bp, Homo sapien
tgcgagaaatttgcgaaagtttcct

SEQ ID NO: 5952003 - DNA, 25 bp, Homo sapien
tcgctgtacactaactccatggttg

SEQ ID NO: 5952004 - DNA, 25 bp, Homo sapien
gcgtctgtggaaagttaatgccgga

SEQ ID NO: 5952005 - DNA, 25 bp, Homo sapien
atcttgttgaaatggggaatagcct

SEQ ID NO: 5952006 - DNA, 25 bp, Homo sapien
tcttgaattgcttaacaaatcatta

SEQ ID NO: 5952007 - DNA, 25 bp, Homo sapien
tcctgcctctgtggtgctatttcga

SEQ ID NO: 5952008 - DNA, 25 bp, Homo sapien
tgctcattaaatagtcctaggccac

SEQ ID NO: 5952009 - DNA, 25 bp, Homo sapien
ggaggaatcctgttttaaaagtgca

SEQ ID NO: 5952010 - DNA, 25 bp, Homo sapien
gcggcaacttctttgaagttcttag

SEQ ID NO: 5952011 - DNA, 25 bp, Homo sapien
gtctgtggaaagttaatgccggaac

SEQ ID NO: 5952012 - DNA, 25 bp, Homo sapien
aacgctgcaccttcttcttgattcc

SEQ ID NO: 5952013 - DNA, 25 bp, Homo sapien
ttcatcatcgtcggaactctcttca

SEQ ID NO: 5952014 - DNA, 25 bp, Homo sapien
cgatatcatagtcatcagttttatc

SEQ ID NO: 5952015 - DNA, 25 bp, Homo sapien
ttaatgtgttgccattgttgctgtt

SEQ ID NO: 5952016 - DNA, 25 bp, Homo sapien
tactctcggaatcttcattaccttc

SEQ ID NO: 5952017 - DNA, 25 bp, Homo sapien
ttttcaccgtcggaggaatcctgtt

SEQ ID NO: 5952018 - DNA, 25 bp, Homo sapien
gaaatggggaatagccttctggtac

SEQ ID NO: 5952019 - DNA, 25 bp, Homo sapien
ggaactttcattccctgtatatacg

SEQ ID NO: 5952020 - DNA, 25 bp, Homo sapien
caatcttccttgttgttgcgcatgg

SEQ ID NO: 5952021 - DNA, 25 bp, Homo sapien
gtgcactttggagttttttgccaag

SEQ ID NO: 5952022 - DNA, 25 bp, Homo sapien
tcctaggccaccatttaattcattt

SEQ ID NO: 5952023 - DNA, 25 bp, Homo sapien
ttcgccttcttcatcaatttgttct

SEQ ID NO: 5952024 - DNA, 25 bp, Homo sapien
tttaaaatattagagtgcgaccttt

SEQ ID NO: 5952025 - DNA, 25 bp, Homo sapien
tcggaactctcttcatttttacctg

SEQ ID NO: 5952026 - DNA, 25 bp, Homo sapien
ggcaacttctttgaagttcttagac

SEQ ID NO: 5952027 - DNA, 25 bp, Homo sapien
ttcttcgctgtacactaactccatg

SEQ ID NO: 5952028 - DNA, 25 bp, Homo sapien
tgcagaccaccttgctcattaaata

SEQ ID NO: 5952029 - DNA, 25 bp, Homo sapien
tttgagttggtccaatcttacaggt

SEQ ID NO: 5952030 - DNA, 25 bp, Homo sapien
atcatagtcatcagttttatcactt

SEQ ID NO: 5952031 - DNA, 25 bp, Homo sapien
gcctctgtggtgctatttcgatatc

SEQ ID NO: 5952032 - DNA, 25 bp, Homo sapien
attgcttaacaaatcattatggttg

SEQ ID NO: 5952033 - DNA, 25 bp, Homo sapien
ctctgtggtgctatttcgatatcat

SEQ ID NO: 5952034 - DNA, 25 bp, Homo sapien
ccatggttgggacggcggcaacttc

SEQ ID NO: 5952035 - DNA, 25 bp, Homo sapien
ttcaccgtcggaggaatcctgtttt

SEQ ID NO: 5952036 - DNA, 25 bp, Homo sapien
taaagcattataaccaaggacagaa

SEQ ID NO: 5952037 - DNA, 25 bp, Homo sapien
ttttacctgaatctgcaagatcttt

SEQ ID NO: 5952038 - DNA, 25 bp, Homo sapien
agtgatgcactcagtctcatctttt

SEQ ID NO: 5952039 - DNA, 25 bp, Homo sapien
ccttcatcatcgtcggaactctctt

SEQ ID NO: 5952040 - DNA, 25 bp, Homo sapien
ccctactacgactgcgagaaatttg

SEQ ID NO: 5952041 - DNA, 25 bp, Homo sapien
ttttcgccttcttcatcaatttgtt

SEQ ID NO: 5952042 - DNA, 25 bp, Homo sapien
cgagtgatgcactcagtctcatctt

SEQ ID NO: 5952043 - DNA, 25 bp, Homo sapien
ccaccttgctcattaaatagtccta

SEQ ID NO: 5952044 - DNA, 25 bp, Homo sapien
atgcactcagtctcatctttttcgc

SEQ ID NO: 5952045 - DNA, 25 bp, Homo sapien
gaatcctgttttaaaagtgcacttt

SEQ ID NO: 5952046 - DNA, 25 bp, Homo sapien
ttcttagacagcagtggtaacgctg

SEQ ID NO: 5952047 - DNA, 25 bp, Homo sapien
gggtgtcatcttcgtcttccaagtc

SEQ ID NO: 5952048 - DNA, 25 bp, Homo sapien
tttatctggggtgtcatcttcgtct

SEQ ID NO: 5952049 - DNA, 25 bp, Homo sapien
attccgagtgatgcactcagtctca

SEQ ID NO: 5952050 - DNA, 25 bp, Homo sapien
cacctccttccctccttgtatgtac

SEQ ID NO: 5952051 - DNA, 25 bp, Homo sapien
ttttgctcattcttcgtggagttct

SEQ ID NO: 5952052 - DNA, 25 bp, Homo sapien
tcggaggaatcctgttttaaaagtg

SEQ ID NO: 5952053 - DNA, 25 bp, Homo sapien
ttaaatagtcctaggccaccattta

SEQ ID NO: 5952054 - DNA, 25 bp, Homo sapien
tggtaagtctgcatctttactctga

SEQ ID NO: 5952055 - DNA, 25 bp, Homo sapien
cgccttcttcatcaatttgttctag

SEQ ID NO: 5952056 - DNA, 25 bp, Homo sapien
tttatgagttgttgcagaccacctt

SEQ ID NO: 5952057 - DNA, 25 bp, Homo sapien
tacactaactccatggttgggacgg

SEQ ID NO: 5952058 - DNA, 25 bp, Homo sapien
ttctttgaagttcttagacagcagt

SEQ ID NO: 5952059 - DNA, 25 bp, Homo sapien
tgcttaacaaatcattatggttggc

SEQ ID NO: 5952060 - DNA, 25 bp, Homo sapien
tctttatgagttgttgcagaccacc

SEQ ID NO: 5952061 - DNA, 25 bp, Homo sapien
tgggtatgcaacctttttgtgggtg

SEQ ID NO: 5952062 - DNA, 25 bp, Homo sapien
aacggctcctgcctctgtggtgcta

SEQ ID NO: 5952063 - DNA, 25 bp, Homo sapien
tcagtctcatctttttcgccttctt

SEQ ID NO: 5952064 - DNA, 25 bp, Homo sapien
gccagaggcaatcttccttgttgtt

SEQ ID NO: 5952065 - DNA, 25 bp, Homo sapien
agttttttgctcattcttcgtggag

SEQ ID NO: 5952066 - DNA, 25 bp, Homo sapien
tcttcgtggagttctttatgagttg

SEQ ID NO: 5952067 - DNA, 25 bp, Homo sapien
ttgttgcgcatgggtatgcaacctt

SEQ ID NO: 5952068 - DNA, 25 bp, Homo sapien
aggaatcctgttttaaaagtgcact

SEQ ID NO: 5952069 - DNA, 25 bp, Homo sapien
actttcttgaattgcttaacaaatc

SEQ ID NO: 5952070 - DNA, 25 bp, Homo sapien
catagtcatcagttttatcactttt

SEQ ID NO: 5952071 - DNA, 25 bp, Homo sapien
aacgtcttcagcttttcaatatcat

SEQ ID NO: 5952072 - DNA, 25 bp, Homo sapien
taccttcatcatcgtcggaactctc

SEQ ID NO: 5952073 - DNA, 25 bp, Homo sapien
ttccctgtatatacgatattattct

SEQ ID NO: 5952074 - DNA, 25 bp, Homo sapien
ttgaattgcttaacaaatcattatg

SEQ ID NO: 5952075 - DNA, 25 bp, Homo sapien
ttggccctactacgactgcgagaaa

SEQ ID NO: 5952076 - DNA, 25 bp, Homo sapien
cagcaagtgagccggcgtctgtgga

SEQ ID NO: 5952077 - DNA, 25 bp, Homo sapien
ctctagttcttcaggatcgaggcct

SEQ ID NO: 5952078 - DNA, 25 bp, Homo sapien
taagtcctctagttcttcaggatcg

SEQ ID NO: 5952079 - DNA, 25 bp, Homo sapien
tggagttttttgccaagtttactct

SEQ ID NO: 5952080 - DNA, 25 bp, Homo sapien
atatcatagtcatcagttttatcac

SEQ ID NO: 5952081 - DNA, 25 bp, Homo sapien
gaatagccttctggtacatacggta

SEQ ID NO: 5952082 - DNA, 25 bp, Homo sapien
ttctctttatcttcgttagctggca

SEQ ID NO: 5952083 - DNA, 25 bp, Homo sapien
actgcgagaaatttgcgaaagtttc

SEQ ID NO: 5952084 - DNA, 25 bp, Homo sapien
tggtgagttgaacgtcttcagcttt

SEQ ID NO: 5952085 - DNA, 25 bp, Homo sapien
tgtatgtactttaatgtgttgccat

SEQ ID NO: 5952086 - DNA, 25 bp, Homo sapien
atggttgggacggcggcaacttctt

SEQ ID NO: 5952087 - DNA, 25 bp, Homo sapien
ctttactctgattagaagtttcggg

SEQ ID NO: 5952088 - DNA, 25 bp, Homo sapien
tggagttctttatgagttgttgcag

SEQ ID NO: 5952089 - DNA, 25 bp, Homo sapien
gggagtaaatcaactttatctgggg

SEQ ID NO: 5952090 - DNA, 25 bp, Homo sapien
tcaggatcgaggccttcttcgctgt

SEQ ID NO: 5952091 - DNA, 25 bp, Homo sapien
tcttacaggtggttttaaaatatta

SEQ ID NO: 5952092 - DNA, 25 bp, Homo sapien
gtcatcagttttatcacttttatcg

SEQ ID NO: 5952093 - DNA, 25 bp, Homo sapien
gcatcccttttgagttggtccaatc

SEQ ID NO: 5952094 - DNA, 25 bp, Homo sapien
tgttgttgcgcatgggtatgcaacc

SEQ ID NO: 5952095 - DNA, 25 bp, Homo sapien
tagttgtggtaagtctgcatcttta

SEQ ID NO: 5952096 - DNA, 25 bp, Homo sapien
tcatcgtcggaactctcttcatttt

SEQ ID NO: 5952097 - DNA, 25 bp, Homo sapien
gtgagttgaacgtcttcagcttttc

SEQ ID NO: 5952098 - DNA, 25 bp, Homo sapien
gcgaccttttcagcaagtgagccgg

SEQ ID NO: 5952099 - DNA, 25 bp, Homo sapien
gggacggcggcaacttctttgaagt

SEQ ID NO: 5952100 - DNA, 25 bp, Homo sapien
ttcagcttttcaatatcatcttgtt

SEQ ID NO: 5952101 - DNA, 25 bp, Homo sapien
tttcattttaggtaaagcattataa

SEQ ID NO: 5952102 - DNA, 25 bp, Homo sapien
atagccttctggtacatacggtaac

SEQ ID NO: 5952103 - DNA, 25 bp, Homo sapien
cggtaacggctcctgcctctgtggt

SEQ ID NO: 5952104 - DNA, 25 bp, Homo sapien
tagagtgcgaccttttcagcaagtg

SEQ ID NO: 5952105 - DNA, 25 bp, Homo sapien
tagtgggagtaaatcaactttatct

SEQ ID NO: 5952106 - DNA, 25 bp, Homo sapien
gtggaaagttaatgccggaactttc

SEQ ID NO: 5952107 - DNA, 25 bp, Homo sapien
tatgagttgttgcagaccaccttgc

SEQ ID NO: 5952108 - DNA, 25 bp, Homo sapien
cttcaggatcgaggccttcttcgct

SEQ ID NO: 5952109 - DNA, 25 bp, Homo sapien
atctttttcgccttcttcatcaatt

SEQ ID NO: 5952110 - DNA, 25 bp, Homo sapien
tcatttttacctgaatctgcaagat

SEQ ID NO: 5952111 - DNA, 25 bp, Homo sapien
gcagtggtaacgctgcaccttcttc

SEQ ID NO: 5952112 - DNA, 25 bp, Homo sapien
cttcatttttacctgaatctgcaag

SEQ ID NO: 5952113 - DNA, 25 bp, Homo sapien
attttaggtaaagcattataaccaa

SEQ ID NO: 5952114 - DNA, 25 bp, Homo sapien
ccatttaattcattttcaccgtcgg

SEQ ID NO: 5952115 - DNA, 25 bp, Homo sapien
attaccttcatcatcgtcggaactc

SEQ ID NO: 5952116 - DNA, 25 bp, Homo sapien
cgatctattgttgtcttttgctgcc

SEQ ID NO: 5952117 - DNA, 25 bp, Homo sapien
aatgtgttgccattgttgctgttcg

SEQ ID NO: 5952118 - DNA, 25 bp, Homo sapien
agccttctggtacatacggtaacgg

SEQ ID NO: 5952119 - DNA, 25 bp, Homo sapien
atttttacctgaatctgcaagatct

SEQ ID NO: 5952120 - DNA, 25 bp, Homo sapien
taactaagtcctctagttcttcagg

SEQ ID NO: 5952121 - DNA, 25 bp, Homo sapien
tgctatttcgatatcatagtcatca

SEQ ID NO: 5952122 - DNA, 25 bp, Homo sapien
gagttggtcgtttttgcgtatagat

SEQ ID NO: 5952123 - DNA, 25 bp, Homo sapien
cgctgcaccttcttcttgattccga

SEQ ID NO: 5952124 - DNA, 25 bp, Homo sapien
ctccatggttgggacggcggcaact

SEQ ID NO: 5952125 - DNA, 25 bp, Homo sapien
tctgtagttgtggtaagtctgcatc

SEQ ID NO: 5952126 - DNA, 25 bp, Homo sapien
tagacttttcattttaggtaaagca

SEQ ID NO: 5952127 - DNA, 25 bp, Homo sapien
tgatgcactcagtctcatctttttc

SEQ ID NO: 5952128 - DNA, 25 bp, Homo sapien
cctccttccctccttgtatgtactt

SEQ ID NO: 5952129 - DNA, 25 bp, Homo sapien
cgtatagatagtgtattctgtagtt

SEQ ID NO: 5952130 - DNA, 25 bp, Homo sapien
aaagttaatgccggaactttcattc

SEQ ID NO: 5952131 - DNA, 25 bp, Homo sapien
tgagttggtccaatcttacaggtgg

SEQ ID NO: 5952132 - DNA, 25 bp, Homo sapien
tagacagcagtggtaacgctgcacc

SEQ ID NO: 5952133 - DNA, 25 bp, Homo sapien
tgttgaaatggggaatagccttctg

SEQ ID NO: 5952134 - DNA, 25 bp, Homo sapien
tagtgtattctgtagttgtggtaag

SEQ ID NO: 5952135 - DNA, 25 bp, Homo sapien
ctgtggtgctatttcgatatcatag

SEQ ID NO: 5952136 - DNA, 25 bp, Homo sapien
ccggaactttcattccctgtatata

SEQ ID NO: 5952137 - DNA, 25 bp, Homo sapien
ctctcggaatcttcattaccttcat

SEQ ID NO: 5952138 - DNA, 25 bp, Homo sapien
ttttgtgggtgacacctccttccct

SEQ ID NO: 5952139 - DNA, 25 bp, Homo sapien
tcctctagttcttcaggatcgaggc

SEQ ID NO: 5952140 - DNA, 25 bp, Homo sapien
gcatctttactctgattagaagttt

SEQ ID NO: 5952141 - DNA, 25 bp, Homo sapien
tccttccctccttgtatgtacttta

SEQ ID NO: 5952142 - DNA, 25 bp, Homo sapien
actcagtctcatctttttcgccttc

SEQ ID NO: 5952143 - DNA, 25 bp, Homo sapien
atcaactttatctggggtgtcatct

SEQ ID NO: 5952144 - DNA, 25 bp, Homo sapien
ctgcatctttactctgattagaagt

SEQ ID NO: 5952145 - DNA, 25 bp, Homo sapien
tggttttaaaatattagagtgcgac

SEQ ID NO: 5952146 - DNA, 25 bp, Homo sapien
ctcggaatcttcattaccttcatca

SEQ ID NO: 5952147 - DNA, 25 bp, Homo sapien
aactttcattccctgtatatacgat

SEQ ID NO: 5952148 - DNA, 25 bp, Homo sapien
cttttgctgccagaggcaatcttcc

SEQ ID NO: 5952149 - DNA, 25 bp, Homo sapien
ttcagcaagtgagccggcgtctgtg

SEQ ID NO: 5952150 - DNA, 25 bp, Homo sapien
gccaagtttactctcggaatcttca

SEQ ID NO: 5952151 - DNA, 25 bp, Homo sapien
ttaattcattttcaccgtcggagga

SEQ ID NO: 5952152 - DNA, 25 bp, Homo sapien
agttgttgcagaccaccttgctcat

SEQ ID NO: 5952153 - DNA, 25 bp, Homo sapien
tggtcgtttttgcgtatagatagtg

SEQ ID NO: 5952154 - DNA, 25 bp, Homo sapien
gtcttttgctgccagaggcaatctt

SEQ ID NO: 5952155 - DNA, 25 bp, Homo sapien
acctgaatctgcaagatcttttaaa

SEQ ID NO: 5952156 - DNA, 25 bp, Homo sapien
tgtacactaactccatggttgggac

SEQ ID NO: 5952157 - DNA, 25 bp, Homo sapien
tcattttaggtaaagcattataacc

SEQ ID NO: 5952158 - DNA, 25 bp, Homo sapien
agtaactaagtcctctagttcttca

SEQ ID NO: 5952159 - DNA, 25 bp, Homo sapien
gcaagatcttttaaaactagacttt

SEQ ID NO: 5952160 - DNA, 25 bp, Homo sapien
ttggtccaatcttacaggtggtttt

SEQ ID NO: 5952161 - DNA, 25 bp, Homo sapien
ttgaagttcttagacagcagtggta

SEQ ID NO: 5952162 - DNA, 25 bp, Homo sapien
gaatctgcaagatcttttaaaacta

SEQ ID NO: 5952163 - DNA, 25 bp, Homo sapien
gtaacggctcctgcctctgtggtgc

SEQ ID NO: 5952164 - DNA, 25 bp, Homo sapien
tataaccaaggacagaaccgtactt

SEQ ID NO: 5952165 - DNA, 25 bp, Homo sapien
attattctctttatcttcgttagct

SEQ ID NO: 5952166 - DNA, 25 bp, Homo sapien
gaattgcttaacaaatcattatggt

SEQ ID NO: 5952167 - DNA, 25 bp, Homo sapien
gttgctgttcgcatcccttttgagt

SEQ ID NO: 5952168 - DNA, 25 bp, Homo sapien
ggtatgcaacctttttgtgggtgac

SEQ ID NO: 5952169 - DNA, 25 bp, Homo sapien
ctttaatgtgttgccattgttgctg

SEQ ID NO: 5952170 - DNA, 25 bp, Homo sapien
tcttcagcttttcaatatcatcttg

SEQ ID NO: 5952171 - DNA, 25 bp, Homo sapien
atctgcaagatcttttaaaactaga

SEQ ID NO: 5952172 - DNA, 25 bp, Homo sapien
gcaccttcttcttgattccgagtga

SEQ ID NO: 5952173 - DNA, 25 bp, Homo sapien
atcttccttgttgttgcgcatgggt

SEQ ID NO: 5952174 - DNA, 25 bp, Homo sapien
atttaattcattttcaccgtcggag

SEQ ID NO: 5952175 - DNA, 25 bp, Homo sapien
aggatcgaggccttcttcgctgtac

SEQ ID NO: 5952176 - DNA, 25 bp, Homo sapien
gctgtacactaactccatggttggg

SEQ ID NO: 5952177 - DNA, 25 bp, Homo sapien
agttggtccaatcttacaggtggtt

SEQ ID NO: 5952178 - DNA, 25 bp, Homo sapien
taaagcttttcgatctattgttgtc

SEQ ID NO: 5952179 - DNA, 25 bp, Homo sapien
gtgggtgacacctccttccctcctt

SEQ ID NO: 5952180 - DNA, 25 bp, Homo sapien
gagtgcgaccttttcagcaagtgag

SEQ ID NO: 5952181 - DNA, 25 bp, Homo sapien
agtcctaggccaccatttaattcat

SEQ ID NO: 5952182 - DNA, 25 bp, Homo sapien
gatcttttaaaactagacttttcat

SEQ ID NO: 5952183 - DNA, 25 bp, Homo sapien
ctgttcgcatcccttttgagttggt

SEQ ID NO: 5952184 - DNA, 25 bp, Homo sapien
tttcttgaattgcttaacaaatcat

SEQ ID NO: 5952185 - DNA, 25 bp, Homo sapien
atcgtcggaactctcttcattttta

SEQ ID NO: 5952186 - DNA, 25 bp, Homo sapien
gctcattcttcgtggagttctttat

SEQ ID NO: 5952187 - DNA, 25 bp, Homo sapien
gtctgcatctttactctgattagaa

SEQ ID NO: 5952188 - DNA, 25 bp, Homo sapien
cactaactccatggttgggacggcg

SEQ ID NO: 5952189 - DNA, 25 bp, Homo sapien
actacgactgcgagaaatttgcgaa

SEQ ID NO: 5952190 - DNA, 25 bp, Homo sapien
cttttcattttaggtaaagcattat

SEQ ID NO: 5952191 - DNA, 25 bp, Homo sapien
ttcattccctgtatatacgatatta

SEQ ID NO: 5952192 - DNA, 25 bp, Homo sapien
cggcgtctgtggaaagttaatgccg

SEQ ID NO: 5952193 - DNA, 25 bp, Homo sapien
tagatagtgtattctgtagttgtgg

SEQ ID NO: 5952194 - DNA, 25 bp, Homo sapien
tgcgtatagatagtgtattctgtag

SEQ ID NO: 5952195 - DNA, 25 bp, Homo sapien
tttaggtaaagcattataaccaagg

SEQ ID NO: 5952196 - DNA, 25 bp, Homo sapien
gcgaaagtttcctgagttggtcgtt

SEQ ID NO: 5952197 - DNA, 25 bp, Homo sapien
ctaggccaccatttaattcattttc

SEQ ID NO: 5952198 - DNA, 25 bp, Homo sapien
ctttttcgccttcttcatcaatttg

SEQ ID NO: 5952199 - DNA, 25 bp, Homo sapien
ttttcagcaagtgagccggcgtctg

SEQ ID NO: 5952200 - DNA, 25 bp, Homo sapien
cagcagtggtaacgctgcaccttct

SEQ ID NO: 5952201 - DNA, 25 bp, Homo sapien
aattcattttcaccgtcggaggaat

SEQ ID NO: 5952202 - DNA, 25 bp, Homo sapien
cattatggttggccctactacgact

SEQ ID NO: 5952203 - DNA, 25 bp, Homo sapien
cgagaaatttgcgaaagtttcctga

SEQ ID NO: 5952204 - DNA, 25 bp, Homo sapien
gaggccttcttcgctgtacactaac

SEQ ID NO: 5952205 - DNA, 25 bp, Homo sapien
gttctttatgagttgttgcagacca

SEQ ID NO: 5952206 - DNA, 25 bp, Homo sapien
ttgggacggcggcaacttctttgaa

SEQ ID NO: 5952207 - DNA, 25 bp, Homo sapien
cttcttcttgattccgagtgatgca

SEQ ID NO: 5952208 - DNA, 25 bp, Homo sapien
tcctgagttggtcgtttttgcgtat

SEQ ID NO: 5952209 - DNA, 25 bp, Homo sapien
tcttcttgattccgagtgatgcact

SEQ ID NO: 5952210 - DNA, 25 bp, Homo sapien
gggaaaaataaagcttttcgatcta

SEQ ID NO: 5952211 - DNA, 25 bp, Homo sapien
aaatcattatggttggccctactac

SEQ ID NO: 5952212 - DNA, 25 bp, Homo sapien
tcattcttcgtggagttctttatga

SEQ ID NO: 5952213 - DNA, 25 bp, Homo sapien
cgcatgggtatgcaacctttttgtg

SEQ ID NO: 5952214 - DNA, 25 bp, Homo sapien
attgttgtcttttgctgccagaggc

SEQ ID NO: 5952215 - DNA, 25 bp, Homo sapien
tttttgcgtatagatagtgtattct

SEQ ID NO: 5952216 - DNA, 25 bp, Homo sapien
tcatcaatttgttctagtgggagta

SEQ ID NO: 5952217 - DNA, 25 bp, Homo sapien
tttcctgagttggtcgtttttgcgt

SEQ ID NO: 5952218 - DNA, 25 bp, Homo sapien
tgaaagtcaaagagattctacgaca

SEQ ID NO: 5952219 - DNA, 25 bp, Homo sapien
aatgtagtattgtggaaatgaccta

SEQ ID NO: 5952220 - DNA, 25 bp, Homo sapien
gaaatcaaattttgcagtccggaat

SEQ ID NO: 5952221 - DNA, 25 bp, Homo sapien
cacccagtcttgtgctaaatgcacc

SEQ ID NO: 5952222 - DNA, 25 bp, Homo sapien
gccactacaactacatcctcagcaa

SEQ ID NO: 5952223 - DNA, 25 bp, Homo sapien
agagattctacgacaacaccacaaa

SEQ ID NO: 5952224 - DNA, 25 bp, Homo sapien
attgctaccgcctgaaagtcaaaga

SEQ ID NO: 5952225 - DNA, 25 bp, Homo sapien
tcaaagagattctacgacaacacca

SEQ ID NO: 5952226 - DNA, 25 bp, Homo sapien
tcccatcaagagaaacgagatgtct

SEQ ID NO: 5952227 - DNA, 25 bp, Homo sapien
tgagaggaaatcaaattttgcagtc

SEQ ID NO: 5952228 - DNA, 25 bp, Homo sapien
gacaagcttcaccaaggaacgtcgt

SEQ ID NO: 5952229 - DNA, 25 bp, Homo sapien
aaagtcaaagagattctacgacaac

SEQ ID NO: 5952230 - DNA, 25 bp, Homo sapien
caacgaacacaatgatgaagaagaa

SEQ ID NO: 5952231 - DNA, 25 bp, Homo sapien
agtactggaaaatgcctcccatcaa

SEQ ID NO: 5952232 - DNA, 25 bp, Homo sapien
ctcaattcgaaaccgtcttcaagaa

SEQ ID NO: 5952233 - DNA, 25 bp, Homo sapien
agcaacctctgtggaaccattcgca

SEQ ID NO: 5952234 - DNA, 25 bp, Homo sapien
cttcaccaaggaacgtcgtcatcgt

SEQ ID NO: 5952235 - DNA, 25 bp, Homo sapien
cagtcttgtgctaaatgcacccatt

SEQ ID NO: 5952236 - DNA, 25 bp, Homo sapien
atgcacccattctagccactacaac

SEQ ID NO: 5952237 - DNA, 25 bp, Homo sapien
cgtccacatcgatggaaaaagccag

SEQ ID NO: 5952238 - DNA, 25 bp, Homo sapien
atttgcaaaaattaagtgcaatctc

SEQ ID NO: 5952239 - DNA, 25 bp, Homo sapien
ttctattgctaccgcctgaaagtca

SEQ ID NO: 5952240 - DNA, 25 bp, Homo sapien
ggaacgacgagaaaagagaccgcgc

SEQ ID NO: 5952241 - DNA, 25 bp, Homo sapien
cgaaaccgtcttcaagaaaactgcc

SEQ ID NO: 5952242 - DNA, 25 bp, Homo sapien
cctctcttcaagcacccagtcttgt

SEQ ID NO: 5952243 - DNA, 25 bp, Homo sapien
tttgagcaaaacaaaacaactgacg

SEQ ID NO: 5952244 - DNA, 25 bp, Homo sapien
caatctcccgcagaaaagaaagcgg

SEQ ID NO: 5952245 - DNA, 25 bp, Homo sapien
agaggaaatcaaattttgcagtccg

SEQ ID NO: 5952246 - DNA, 25 bp, Homo sapien
aattttacaaagtgacctgaatttg

SEQ ID NO: 5952247 - DNA, 25 bp, Homo sapien
aagttttgcaagatgcattattaaa

SEQ ID NO: 5952248 - DNA, 25 bp, Homo sapien
cctatgctgcgtctcgtgggttcta

SEQ ID NO: 5952249 - DNA, 25 bp, Homo sapien
tgcatattgtgaagcttgataaaca

SEQ ID NO: 5952250 - DNA, 25 bp, Homo sapien
gtccggaattttacaaagtgacctg

SEQ ID NO: 5952251 - DNA, 25 bp, Homo sapien
tcacttgggttcctcctatgctgcg

SEQ ID NO: 5952252 - DNA, 25 bp, Homo sapien
gttaaactcggcctctggctgctat

SEQ ID NO: 5952253 - DNA, 25 bp, Homo sapien
gatttggtgaatattatagagagca

SEQ ID NO: 5952254 - DNA, 25 bp, Homo sapien
attccttaacacaaatcgatgacaa

SEQ ID NO: 5952255 - DNA, 25 bp, Homo sapien
atttcgaatcggtactgaaatgtag

SEQ ID NO: 5952256 - DNA, 25 bp, Homo sapien
acgagaaaagagaccgcgctataaa

SEQ ID NO: 5952257 - DNA, 25 bp, Homo sapien
gaaaaaagccctagatacgatcaat

SEQ ID NO: 5952258 - DNA, 25 bp, Homo sapien
tcagtagtatccagcgggctgtcga

SEQ ID NO: 5952259 - DNA, 25 bp, Homo sapien
aacaaaacaactgacgaataacttg

SEQ ID NO: 5952260 - DNA, 25 bp, Homo sapien
attgtggaaatgacctacaaatacc

SEQ ID NO: 5952261 - DNA, 25 bp, Homo sapien
atattatagagagcaaagtttcaga

SEQ ID NO: 5952262 - DNA, 25 bp, Homo sapien
agagcccaaaccaattccttaacac

SEQ ID NO: 5952263 - DNA, 25 bp, Homo sapien
aactggatttcgtgttgcaattcgt

SEQ ID NO: 5952264 - DNA, 25 bp, Homo sapien
acgtcgtcatcgtcaagcttaacgt

SEQ ID NO: 5952265 - DNA, 25 bp, Homo sapien
ggtcgaagaactggatttcgtgttg

SEQ ID NO: 5952266 - DNA, 25 bp, Homo sapien
ggttctattgctaccgcctgaaagt

SEQ ID NO: 5952267 - DNA, 25 bp, Homo sapien
acaactgacgaataacttggtgaga

SEQ ID NO: 5952268 - DNA, 25 bp, Homo sapien
gatcgtctcacatgatgagctatga

SEQ ID NO: 5952269 - DNA, 25 bp, Homo sapien
ggagaaagcaagcatgataataagg

SEQ ID NO: 5952270 - DNA, 25 bp, Homo sapien
ggaattttacaaagtgacctgaatt

SEQ ID NO: 5952271 - DNA, 25 bp, Homo sapien
ctgtcgatgaggccgtggacaggat

SEQ ID NO: 5952272 - DNA, 25 bp, Homo sapien
caagtacactcaattcgaaaccgtc

SEQ ID NO: 5952273 - DNA, 25 bp, Homo sapien
agtttttcaagggtatactcgtcac

SEQ ID NO: 5952274 - DNA, 25 bp, Homo sapien
aaagagattctacgacaacaccaca

SEQ ID NO: 5952275 - DNA, 25 bp, Homo sapien
gtatccagcgggctgtcgatgaggc

SEQ ID NO: 5952276 - DNA, 25 bp, Homo sapien
ctagatacgatcaatgcgataagtt

SEQ ID NO: 5952277 - DNA, 25 bp, Homo sapien
aggaacgtcgtcatcgtcaagctta

SEQ ID NO: 5952278 - DNA, 25 bp, Homo sapien
acaacaccacaaacgtgacttagct

SEQ ID NO: 5952279 - DNA, 25 bp, Homo sapien
caagtttttcaagggtatactcgtc

SEQ ID NO: 5952280 - DNA, 25 bp, Homo sapien
cactacaactacatcctcagcaacc

SEQ ID NO: 5952281 - DNA, 25 bp, Homo sapien
cgctataaaatttcacgctgtggat

SEQ ID NO: 5952282 - DNA, 25 bp, Homo sapien
tgcaggctcctcgtcctctcttcaa

SEQ ID NO: 5952283 - DNA, 25 bp, Homo sapien
tcaagcttaacgtccacatcgatgg

SEQ ID NO: 5952284 - DNA, 25 bp, Homo sapien
gcttaacgtccacatcgatggaaaa

SEQ ID NO: 5952285 - DNA, 25 bp, Homo sapien
atgaggccgtggacaggatcgtctc

SEQ ID NO: 5952286 - DNA, 25 bp, Homo sapien
cgtcttcaagaaaactgccgatttg

SEQ ID NO: 5952287 - DNA, 25 bp, Homo sapien
gacaagtacactcaattcgaaaccg

SEQ ID NO: 5952288 - DNA, 25 bp, Homo sapien
agcacccagtcttgtgctaaatgca

SEQ ID NO: 5952289 - DNA, 25 bp, Homo sapien
cccagtcttgtgctaaatgcaccca

SEQ ID NO: 5952290 - DNA, 25 bp, Homo sapien
gctcagttggtcgaagaactggatt

SEQ ID NO: 5952291 - DNA, 25 bp, Homo sapien
acaggatcgtctcacatgatgagct

SEQ ID NO: 5952292 - DNA, 25 bp, Homo sapien
tcgtcctctcttcaagcacccagtc

SEQ ID NO: 5952293 - DNA, 25 bp, Homo sapien
cgaatcggtactgaaatgtagtatt

SEQ ID NO: 5952294 - DNA, 25 bp, Homo sapien
acctgttaaactcggcctctggctg

SEQ ID NO: 5952295 - DNA, 25 bp, Homo sapien
cgtcagtagtatccagcgggctgtc

SEQ ID NO: 5952296 - DNA, 25 bp, Homo sapien
attgagagcccaaaccaattcctta

SEQ ID NO: 5952297 - DNA, 25 bp, Homo sapien
ttaaaagctatgcaggctcctcgtc

SEQ ID NO: 5952298 - DNA, 25 bp, Homo sapien
tggtgaatattatagagagcaaagt

SEQ ID NO: 5952299 - DNA, 25 bp, Homo sapien
aatcggtactgaaatgtagtattgt

SEQ ID NO: 5952300 - DNA, 25 bp, Homo sapien
aaacgtgacttagcttggaacgacg

SEQ ID NO: 5952301 - DNA, 25 bp, Homo sapien
tgcaggacctggaagttttgcaaga

SEQ ID NO: 5952302 - DNA, 25 bp, Homo sapien
aataaggacagttttgcagccattg

SEQ ID NO: 5952303 - DNA, 25 bp, Homo sapien
gcggagaaagcaagcatgataataa

SEQ ID NO: 5952304 - DNA, 25 bp, Homo sapien
gtgaagcttgataaacaaatgaacg

SEQ ID NO: 5952305 - DNA, 25 bp, Homo sapien
attaagtgcaatctcccgcagaaaa

SEQ ID NO: 5952306 - DNA, 25 bp, Homo sapien
aatgacctacaaataccccgaatta

SEQ ID NO: 5952307 - DNA, 25 bp, Homo sapien
aaatgcacccattctagccactaca

SEQ ID NO: 5952308 - DNA, 25 bp, Homo sapien
tcacgctgtggattacgacaagctt

SEQ ID NO: 5952309 - DNA, 25 bp, Homo sapien
ataaaatttcacgctgtggattacg

SEQ ID NO: 5952310 - DNA, 25 bp, Homo sapien
tttgcaggacctggaagttttgcaa

SEQ ID NO: 5952311 - DNA, 25 bp, Homo sapien
ctggaaaatgcctcccatcaagaga

SEQ ID NO: 5952312 - DNA, 25 bp, Homo sapien
attgaatttgaggatttggtgaata

SEQ ID NO: 5952313 - DNA, 25 bp, Homo sapien
tcgtcaccctaggtctagttaaaag

SEQ ID NO: 5952314 - DNA, 25 bp, Homo sapien
aaccattcgcatctgtatcagccgt

SEQ ID NO: 5952315 - DNA, 25 bp, Homo sapien
catcgatggaaaaagccagcactag

SEQ ID NO: 5952316 - DNA, 25 bp, Homo sapien
gctgtggattacgacaagcttcacc

SEQ ID NO: 5952317 - DNA, 25 bp, Homo sapien
gtggacaggatcgtctcacatgatg

SEQ ID NO: 5952318 - DNA, 25 bp, Homo sapien
ttaacgtccacatcgatggaaaaag

SEQ ID NO: 5952319 - DNA, 25 bp, Homo sapien
atcagccgtcagtagtatccagcgg

SEQ ID NO: 5952320 - DNA, 25 bp, Homo sapien
gccgatttggtcaaagtactggaaa

SEQ ID NO: 5952321 - DNA, 25 bp, Homo sapien
aagaagagattgaatttgaggattt

SEQ ID NO: 5952322 - DNA, 25 bp, Homo sapien
tcttcaagaaaactgccgatttggt

SEQ ID NO: 5952323 - DNA, 25 bp, Homo sapien
tattcaagtttttcaagggtatact

SEQ ID NO: 5952324 - DNA, 25 bp, Homo sapien
acatcctcagcaacctctgtggaac

SEQ ID NO: 5952325 - DNA, 25 bp, Homo sapien
tcgtattttcaagttacctgttaaa

SEQ ID NO: 5952326 - DNA, 25 bp, Homo sapien
cgaataacttggtgagaggaaatca

SEQ ID NO: 5952327 - DNA, 25 bp, Homo sapien
tcaagggtatactcgtcaccctagg

SEQ ID NO: 5952328 - DNA, 25 bp, Homo sapien
ctaggtctagttaaaagctatgcag

SEQ ID NO: 5952329 - DNA, 25 bp, Homo sapien
tagccactacaactacatcctcagc

SEQ ID NO: 5952330 - DNA, 25 bp, Homo sapien
agccctagatacgatcaatgcgata

SEQ ID NO: 5952331 - DNA, 25 bp, Homo sapien
aaaatgcctcccatcaagagaaacg

SEQ ID NO: 5952332 - DNA, 25 bp, Homo sapien
tccttaacacaaatcgatgacaagt

SEQ ID NO: 5952333 - DNA, 25 bp, Homo sapien
cagttttgcagccattgccaacgaa

SEQ ID NO: 5952334 - DNA, 25 bp, Homo sapien
tttgaggatttggtgaatattatag

SEQ ID NO: 5952335 - DNA, 25 bp, Homo sapien
aactcggcctctggctgctattcaa

SEQ ID NO: 5952336 - DNA, 25 bp, Homo sapien
catttttgcaggacctggaagtttt

SEQ ID NO: 5952337 - DNA, 25 bp, Homo sapien
cttagcttggaacgacgagaaaaga

SEQ ID NO: 5952338 - DNA, 25 bp, Homo sapien
aacgtccacatcgatggaaaaagcc

SEQ ID NO: 5952339 - DNA, 25 bp, Homo sapien
gtatactcgtcaccctaggtctagt

SEQ ID NO: 5952340 - DNA, 25 bp, Homo sapien
gaattgagagcccaaaccaattcct

SEQ ID NO: 5952341 - DNA, 25 bp, Homo sapien
aaattaagtgcaatctcccgcagaa

SEQ ID NO: 5952342 - DNA, 25 bp, Homo sapien
gggaaaaaagccctagatacgatca

SEQ ID NO: 5952343 - DNA, 25 bp, Homo sapien
gaggccgtggacaggatcgtctcac

SEQ ID NO: 5952344 - DNA, 25 bp, Homo sapien
gcactagagagaagcttttgagcaa

SEQ ID NO: 5952345 - DNA, 25 bp, Homo sapien
aatgcgataagttgcatattgtgaa

SEQ ID NO: 5952346 - DNA, 25 bp, Homo sapien
tggattacgacaagcttcaccaagg

SEQ ID NO: 5952347 - DNA, 25 bp, Homo sapien
cctcagcaacctctgtggaaccatt

SEQ ID NO: 5952348 - DNA, 25 bp, Homo sapien
aaaaattaagtgcaatctcccgcag

SEQ ID NO: 5952349 - DNA, 25 bp, Homo sapien
accgcgctataaaatttcacgctgt

SEQ ID NO: 5952350 - DNA, 25 bp, Homo sapien
tttttgcaggacctggaagttttgc

SEQ ID NO: 5952351 - DNA, 25 bp, Homo sapien
caggacctggaagttttgcaagatg

SEQ ID NO: 5952352 - DNA, 25 bp, Homo sapien
tttcacgctgtggattacgacaagc

SEQ ID NO: 5952353 - DNA, 25 bp, Homo sapien
agaaaactgccgatttggtcaaagt

SEQ ID NO: 5952354 - DNA, 25 bp, Homo sapien
ctgaaatgtagtattgtggaaatga

SEQ ID NO: 5952355 - DNA, 25 bp, Homo sapien
aagggtatactcgtcaccctaggtc

SEQ ID NO: 5952356 - DNA, 25 bp, Homo sapien
gaatattatagagagcaaagtttca

SEQ ID NO: 5952357 - DNA, 25 bp, Homo sapien
ggaaaatgcctcccatcaagagaaa

SEQ ID NO: 5952358 - DNA, 25 bp, Homo sapien
tgagcaaaacaaaacaactgacgaa

SEQ ID NO: 5952359 - DNA, 25 bp, Homo sapien
actcgtcaccctaggtctagttaaa

SEQ ID NO: 5952360 - DNA, 25 bp, Homo sapien
gaacacaatgatgaagaagaagaga

SEQ ID NO: 5952361 - DNA, 25 bp, Homo sapien
accgtcttcaagaaaactgccgatt

SEQ ID NO: 5952362 - DNA, 25 bp, Homo sapien
aacaccacaaacgtgacttagcttg

SEQ ID NO: 5952363 - DNA, 25 bp, Homo sapien
aaaatttcacgctgtggattacgac

SEQ ID NO: 5952364 - DNA, 25 bp, Homo sapien
tacactcaattcgaaaccgtcttca

SEQ ID NO: 5952365 - DNA, 25 bp, Homo sapien
ctaccgcctgaaagtcaaagagatt

SEQ ID NO: 5952366 - DNA, 25 bp, Homo sapien
atactcgtcaccctaggtctagtta

SEQ ID NO: 5952367 - DNA, 25 bp, Homo sapien
ccacaaacgtgacttagcttggaac

SEQ ID NO: 5952368 - DNA, 25 bp, Homo sapien
agaccgcgctataaaatttcacgct

SEQ ID NO: 5952369 - DNA, 25 bp, Homo sapien
attatagagagcaaagtttcagatt

SEQ ID NO: 5952370 - DNA, 25 bp, Homo sapien
ttcgtgttgcaattcgtcgattggt

SEQ ID NO: 5952371 - DNA, 25 bp, Homo sapien
aaaccaattccttaacacaaatcga

SEQ ID NO: 5952372 - DNA, 25 bp, Homo sapien
aaattttgcagtccggaattttaca

SEQ ID NO: 5952373 - DNA, 25 bp, Homo sapien
gtcgtcatcgtcaagcttaacgtcc

SEQ ID NO: 5952374 - DNA, 25 bp, Homo sapien
ttcaagtttttcaagggtatactcg

SEQ ID NO: 5952375 - DNA, 25 bp, Homo sapien
gtgacatttttgcaggacctggaag

SEQ ID NO: 5952376 - DNA, 25 bp, Homo sapien
aaagtgacctgaatttggatgaatt

SEQ ID NO: 5952377 - DNA, 25 bp, Homo sapien
ataagttgcatattgtgaagcttga

SEQ ID NO: 5952378 - DNA, 25 bp, Homo sapien
taagtgcaatctcccgcagaaaaga

SEQ ID NO: 5952379 - DNA, 25 bp, Homo sapien
cagcactagagagaagcttttgagc

SEQ ID NO: 5952380 - DNA, 25 bp, Homo sapien
attctagccactacaactacatcct

SEQ ID NO: 5952381 - DNA, 25 bp, Homo sapien
aacgacgagaaaagagaccgcgcta

SEQ ID NO: 5952382 - DNA, 25 bp, Homo sapien
ttacgacaagcttcaccaaggaacg

SEQ ID NO: 5952383 - DNA, 25 bp, Homo sapien
tgtctatttatcacttgggttcctc

SEQ ID NO: 5952384 - DNA, 25 bp, Homo sapien
tcatcgtcaagcttaacgtccacat

SEQ ID NO: 5952385 - DNA, 25 bp, Homo sapien
aaagagaccgcgctataaaatttca

SEQ ID NO: 5952386 - DNA, 25 bp, Homo sapien
aggtctagttaaaagctatgcaggc

SEQ ID NO: 5952387 - DNA, 25 bp, Homo sapien
tgacctgaatttggatgaattgaga

SEQ ID NO: 5952388 - DNA, 25 bp, Homo sapien
atggtcgtgacatttttgcaggacc

SEQ ID NO: 5952389 - DNA, 25 bp, Homo sapien
gcaaagtttcagatttcgaatcggt

SEQ ID NO: 5952390 - DNA, 25 bp, Homo sapien
ctgacgaataacttggtgagaggaa

SEQ ID NO: 5952391 - DNA, 25 bp, Homo sapien
tgcaatctcccgcagaaaagaaagc

SEQ ID NO: 5952392 - DNA, 25 bp, Homo sapien
gatcaatgcgataagttgcatattg

SEQ ID NO: 5952393 - DNA, 25 bp, Homo sapien
ggaaccattcgcatctgtatcagcc

SEQ ID NO: 5952394 - DNA, 25 bp, Homo sapien
cgggctgtcgatgaggccgtggaca

SEQ ID NO: 5952395 - DNA, 25 bp, Homo sapien
gaacgaggacatatatgctcagttg

SEQ ID NO: 5952396 - DNA, 25 bp, Homo sapien
ttggtcaaagtactggaaaatgcct

SEQ ID NO: 5952397 - DNA, 25 bp, Homo sapien
ccagcgggctgtcgatgaggccgtg

SEQ ID NO: 5952398 - DNA, 25 bp, Homo sapien
tgcctcccatcaagagaaacgagat

SEQ ID NO: 5952399 - DNA, 25 bp, Homo sapien
agagaccgcgctataaaatttcacg

SEQ ID NO: 5952400 - DNA, 25 bp, Homo sapien
aactacatcctcagcaacctctgtg

SEQ ID NO: 5952401 - DNA, 25 bp, Homo sapien
caacctctgtggaaccattcgcatc

SEQ ID NO: 5952402 - DNA, 25 bp, Homo sapien
cgatgacaagtacactcaattcgaa

SEQ ID NO: 5952403 - DNA, 25 bp, Homo sapien
tctacgacaacaccacaaacgtgac

SEQ ID NO: 5952404 - DNA, 25 bp, Homo sapien
ctggctgctattcaagtttttcaag

SEQ ID NO: 5952405 - DNA, 25 bp, Homo sapien
cctcgtcctctcttcaagcacccag

SEQ ID NO: 5952406 - DNA, 25 bp, Homo sapien
acaactacatcctcagcaacctctg

SEQ ID NO: 5952407 - DNA, 25 bp, Homo sapien
tttatcacttgggttcctcctatgc

SEQ ID NO: 5952408 - DNA, 25 bp, Homo sapien
tgcagccattgccaacgaacacaat

SEQ ID NO: 5952409 - DNA, 25 bp, Homo sapien
atttggatgaattgagagcccaaac

SEQ ID NO: 5952410 - DNA, 25 bp, Homo sapien
tgcagtccggaattttacaaagtga

SEQ ID NO: 5952411 - DNA, 25 bp, Homo sapien
acgaacacaatgatgaagaagaaga

SEQ ID NO: 5952412 - DNA, 25 bp, Homo sapien
gacagttttgcagccattgccaacg

SEQ ID NO: 5952413 - DNA, 25 bp, Homo sapien
agattgaatttgaggatttggtgaa

SEQ ID NO: 5952414 - DNA, 25 bp, Homo sapien
gcacccattctagccactacaacta

SEQ ID NO: 5952415 - DNA, 25 bp, Homo sapien
ttgcaaaaattaagtgcaatctccc

SEQ ID NO: 5952416 - DNA, 25 bp, Homo sapien
ggtgagaggaaatcaaattttgcag

SEQ ID NO: 5952417 - DNA, 25 bp, Homo sapien
gatggaaaaagccagcactagagag

SEQ ID NO: 5952418 - DNA, 25 bp, Homo sapien
ctcgtgggttctatggcgtcgtatt

SEQ ID NO: 5952419 - DNA, 25 bp, Homo sapien
tcaaattttgcagtccggaatttta

SEQ ID NO: 5952420 - DNA, 25 bp, Homo sapien
gcctctggctgctattcaagttttt

SEQ ID NO: 5952421 - DNA, 25 bp, Homo sapien
atgctcagttggtcgaagaactgga

SEQ ID NO: 5952422 - DNA, 25 bp, Homo sapien
aaagccctagatacgatcaatgcga

SEQ ID NO: 5952423 - DNA, 25 bp, Homo sapien
aggatcgtctcacatgatgagctat

SEQ ID NO: 5952424 - DNA, 25 bp, Homo sapien
tgataaacaaatgaacgaggacata

SEQ ID NO: 5952425 - DNA, 25 bp, Homo sapien
gaagcttttgagcaaaacaaaacaa

SEQ ID NO: 5952426 - DNA, 25 bp, Homo sapien
atgacaagtacactcaattcgaaac

SEQ ID NO: 5952427 - DNA, 25 bp, Homo sapien
atatatgctcagttggtcgaagaac

SEQ ID NO: 5952428 - DNA, 25 bp, Homo sapien
agattctacgacaacaccacaaacg

SEQ ID NO: 5952429 - DNA, 25 bp, Homo sapien
tccacatcgatggaaaaagccagca

SEQ ID NO: 5952430 - DNA, 25 bp, Homo sapien
cgcctgaaagtcaaagagattctac

SEQ ID NO: 5952431 - DNA, 25 bp, Homo sapien
ctgccgatttggtcaaagtactgga

SEQ ID NO: 5952432 - DNA, 25 bp, Homo sapien
ggatttcgtgttgcaattcgtcgat

SEQ ID NO: 5952433 - DNA, 25 bp, Homo sapien
ctagttaaaagctatgcaggctcct

SEQ ID NO: 5952434 - DNA, 25 bp, Homo sapien
tttcagatttcgaatcggtactgaa

SEQ ID NO: 5952435 - DNA, 25 bp, Homo sapien
ggtcgtgacatttttgcaggacctg

SEQ ID NO: 5952436 - DNA, 25 bp, Homo sapien
atgaattgagagcccaaaccaattc

SEQ ID NO: 5952437 - DNA, 25 bp, Homo sapien
caagcatgataataaggacagtttt

SEQ ID NO: 5952438 - DNA, 25 bp, Homo sapien
agcccaaaccaattccttaacacaa

SEQ ID NO: 5952439 - DNA, 25 bp, Homo sapien
caccctaggtctagttaaaagctat

SEQ ID NO: 5952440 - DNA, 25 bp, Homo sapien
cgacaacaccacaaacgtgacttag

SEQ ID NO: 5952441 - DNA, 25 bp, Homo sapien
gttcctcctatgctgcgtctcgtgg

SEQ ID NO: 5952442 - DNA, 25 bp, Homo sapien
accaaggaacgtcgtcatcgtcaag

SEQ ID NO: 5952443 - DNA, 25 bp, Homo sapien
tttcaagttacctgttaaactcggc

SEQ ID NO: 5952444 - DNA, 25 bp, Homo sapien
ttgccaacgaacacaatgatgaaga

SEQ ID NO: 5952445 - DNA, 25 bp, Homo sapien
tgaatttgaggatttggtgaatatt

SEQ ID NO: 5952446 - DNA, 25 bp, Homo sapien
aaacaaatgaacgaggacatatatg

SEQ ID NO: 5952447 - DNA, 25 bp, Homo sapien
agcaagcatgataataaggacagtt

SEQ ID NO: 5952448 - DNA, 25 bp, Homo sapien
tcagttggtcgaagaactggatttc

SEQ ID NO: 5952449 - DNA, 25 bp, Homo sapien
ttacctgttaaactcggcctctggc

SEQ ID NO: 5952450 - DNA, 25 bp, Homo sapien
acaaatgaacgaggacatatatgct

SEQ ID NO: 5952451 - DNA, 25 bp, Homo sapien
aactgccgatttggtcaaagtactg

SEQ ID NO: 5952452 - DNA, 25 bp, Homo sapien
aaagcaagcatgataataaggacag

SEQ ID NO: 5952453 - DNA, 25 bp, Homo sapien
tctagccactacaactacatcctca

SEQ ID NO: 5952454 - DNA, 25 bp, Homo sapien
ctcctcgtcctctcttcaagcaccc

SEQ ID NO: 5952455 - DNA, 25 bp, Homo sapien
aatgcctcccatcaagagaaacgag

SEQ ID NO: 5952456 - DNA, 25 bp, Homo sapien
aggacagttttgcagccattgccaa

SEQ ID NO: 5952457 - DNA, 25 bp, Homo sapien
ttggttctattgctaccgcctgaaa

SEQ ID NO: 5952458 - DNA, 25 bp, Homo sapien
acgacaagcttcaccaaggaacgtc

SEQ ID NO: 5952459 - DNA, 25 bp, Homo sapien
ctgttaaactcggcctctggctgct

SEQ ID NO: 5952460 - DNA, 25 bp, Homo sapien
ggctgctattcaagtttttcaaggg

SEQ ID NO: 5952461 - DNA, 25 bp, Homo sapien
caaaacaaaacaactgacgaataac

SEQ ID NO: 5952462 - DNA, 25 bp, Homo sapien
cttgtgctaaatgcacccattctag

SEQ ID NO: 5952463 - DNA, 25 bp, Homo sapien
agcttgataaacaaatgaacgagga

SEQ ID NO: 5952464 - DNA, 25 bp, Homo sapien
cacatcgatggaaaaagccagcact

SEQ ID NO: 5952465 - DNA, 25 bp, Homo sapien
gaaaagagaccgcgctataaaattt

SEQ ID NO: 5952466 - DNA, 25 bp, Homo sapien
aaatgaacgaggacatatatgctca

SEQ ID NO: 5952467 - DNA, 25 bp, Homo sapien
taaactcggcctctggctgctattc

SEQ ID NO: 5952468 - DNA, 25 bp, Homo sapien
gtattgtggaaatgacctacaaata

SEQ ID NO: 5952469 - DNA, 25 bp, Homo sapien
ttgggttcctcctatgctgcgtctc

SEQ ID NO: 5952470 - DNA, 25 bp, Homo sapien
cttgataaacaaatgaacgaggaca

SEQ ID NO: 5952471 - DNA, 25 bp, Homo sapien
ggacaggatcgtctcacatgatgag

SEQ ID NO: 5952472 - DNA, 25 bp, Homo sapien
acctctgtggaaccattcgcatctg

SEQ ID NO: 5952473 - DNA, 25 bp, Homo sapien
accgcctgaaagtcaaagagattct

SEQ ID NO: 5952474 - DNA, 25 bp, Homo sapien
aagctatgcaggctcctcgtcctct

SEQ ID NO: 5952475 - DNA, 25 bp, Homo sapien
gaaatgacctacaaataccccgaat

SEQ ID NO: 5952476 - DNA, 25 bp, Homo sapien
agagattgaatttgaggatttggtg

SEQ ID NO: 5952477 - DNA, 25 bp, Homo sapien
ccggaattttacaaagtgacctgaa

SEQ ID NO: 5952478 - DNA, 25 bp, Homo sapien
ctcggcctctggctgctattcaagt

SEQ ID NO: 5952479 - DNA, 25 bp, Homo sapien
cctcccatcaagagaaacgagatgt

SEQ ID NO: 5952480 - DNA, 25 bp, Homo sapien
ccattcgcatctgtatcagccgtca

SEQ ID NO: 5952481 - DNA, 25 bp, Homo sapien
taacacaaatcgatgacaagtacac

SEQ ID NO: 5952482 - DNA, 25 bp, Homo sapien
agcgggctgtcgatgaggccgtgga

SEQ ID NO: 5952483 - DNA, 25 bp, Homo sapien
acatatatgctcagttggtcgaaga

SEQ ID NO: 5952484 - DNA, 25 bp, Homo sapien
atacgatcaatgcgataagttgcat

SEQ ID NO: 5952485 - DNA, 25 bp, Homo sapien
tgctaaatgcacccattctagccac

SEQ ID NO: 5952486 - DNA, 25 bp, Homo sapien
acttgggttcctcctatgctgcgtc

SEQ ID NO: 5952487 - DNA, 25 bp, Homo sapien
tcgaagaactggatttcgtgttgca

SEQ ID NO: 5952488 - DNA, 25 bp, Homo sapien
cattgccaacgaacacaatgatgaa

SEQ ID NO: 5952489 - DNA, 25 bp, Homo sapien
gggtatactcgtcaccctaggtcta

SEQ ID NO: 5952490 - DNA, 25 bp, Homo sapien
cgacgagaaaagagaccgcgctata

SEQ ID NO: 5952491 - DNA, 25 bp, Homo sapien
agaactggatttcgtgttgcaattc

SEQ ID NO: 5952492 - DNA, 25 bp, Homo sapien
gagagaagcttttgagcaaaacaaa

SEQ ID NO: 5952493 - DNA, 25 bp, Homo sapien
ctattgctaccgcctgaaagtcaaa

SEQ ID NO: 5952494 - DNA, 25 bp, Homo sapien
gaaaaagccagcactagagagaagc

SEQ ID NO: 5952495 - DNA, 25 bp, Homo sapien
acctgaatttggatgaattgagagc

SEQ ID NO: 5952496 - DNA, 25 bp, Homo sapien
agaaagcaagcatgataataaggac

SEQ ID NO: 5952497 - DNA, 25 bp, Homo sapien
atggcgtcgtattttcaagttacct

SEQ ID NO: 5952498 - DNA, 25 bp, Homo sapien
caagaaaactgccgatttggtcaaa

SEQ ID NO: 5952499 - DNA, 25 bp, Homo sapien
ctcctatgctgcgtctcgtgggttc

SEQ ID NO: 5952500 - DNA, 25 bp, Homo sapien
ggcgtcgtattttcaagttacctgt

SEQ ID NO: 5952501 - DNA, 25 bp, Homo sapien
gaagagattgaatttgaggatttgg

SEQ ID NO: 5952502 - DNA, 25 bp, Homo sapien
gagatgtctatttatcacttgggtt

SEQ ID NO: 5952503 - DNA, 25 bp, Homo sapien
ggaagttttgcaagatgcattatta

SEQ ID NO: 5952504 - DNA, 25 bp, Homo sapien
gcttggaacgacgagaaaagagacc

SEQ ID NO: 5952505 - DNA, 25 bp, Homo sapien
ggctgtcgatgaggccgtggacagg

SEQ ID NO: 5952506 - DNA, 25 bp, Homo sapien
acgaggacatatatgctcagttggt

SEQ ID NO: 5952507 - DNA, 25 bp, Homo sapien
tcagatttcgaatcggtactgaaat

SEQ ID NO: 5952508 - DNA, 25 bp, Homo sapien
aaaagccagcactagagagaagctt

SEQ ID NO: 5952509 - DNA, 25 bp, Homo sapien
gtcaccctaggtctagttaaaagct

SEQ ID NO: 5952510 - DNA, 25 bp, Homo sapien
cgataagttgcatattgtgaagctt

SEQ ID NO: 5952511 - DNA, 25 bp, Homo sapien
tagagagcaaagtttcagatttcga

SEQ ID NO: 5952512 - DNA, 25 bp, Homo sapien
caagagaaacgagatgtctatttat

SEQ ID NO: 5952513 - DNA, 25 bp, Homo sapien
aactgacgaataacttggtgagagg

SEQ ID NO: 5952514 - DNA, 25 bp, Homo sapien
acgagatgtctatttatcacttggg

SEQ ID NO: 5952515 - DNA, 25 bp, Homo sapien
attctacgacaacaccacaaacgtg

SEQ ID NO: 5952516 - DNA, 25 bp, Homo sapien
agtgcaatctcccgcagaaaagaaa

SEQ ID NO: 5952517 - DNA, 25 bp, Homo sapien
gaggacatatatgctcagttggtcg

SEQ ID NO: 5952518 - DNA, 25 bp, Homo sapien
tggaaaaagccagcactagagagaa

SEQ ID NO: 5952519 - DNA, 25 bp, Homo sapien
atcgatgacaagtacactcaattcg

SEQ ID NO: 5952520 - DNA, 25 bp, Homo sapien
tgataataaggacagttttgcagcc

SEQ ID NO: 5952521 - DNA, 25 bp, Homo sapien
ttcgaatcggtactgaaatgtagta

SEQ ID NO: 5952522 - DNA, 25 bp, Homo sapien
gtatcagccgtcagtagtatccagc

SEQ ID NO: 5952523 - DNA, 25 bp, Homo sapien
ccgtggacaggatcgtctcacatga

SEQ ID NO: 5952524 - DNA, 25 bp, Homo sapien
cagccattgccaacgaacacaatga

SEQ ID NO: 5952525 - DNA, 25 bp, Homo sapien
atcctcagcaacctctgtggaacca

SEQ ID NO: 5952526 - DNA, 25 bp, Homo sapien
aagcttaacgtccacatcgatggaa

SEQ ID NO: 5952527 - DNA, 25 bp, Homo sapien
gagaagcttttgagcaaaacaaaac

SEQ ID NO: 5952528 - DNA, 25 bp, Homo sapien
aaaagaaagcggagaaagcaagcat

SEQ ID NO: 5952529 - DNA, 25 bp, Homo sapien
aaacgagatgtctatttatcacttg

SEQ ID NO: 5952530 - DNA, 25 bp, Homo sapien
ggctcctcgtcctctcttcaagcac

SEQ ID NO: 5952531 - DNA, 25 bp, Homo sapien
ggtcaaagtactggaaaatgcctcc

SEQ ID NO: 5952532 - DNA, 25 bp, Homo sapien
gacatttttgcaggacctggaagtt

SEQ ID NO: 5952533 - DNA, 25 bp, Homo sapien
tagtatccagcgggctgtcgatgag

SEQ ID NO: 5952534 - DNA, 25 bp, Homo sapien
gagaaaagagaccgcgctataaaat

SEQ ID NO: 5952535 - DNA, 25 bp, Homo sapien
ctacaactacatcctcagcaacctc

SEQ ID NO: 5952536 - DNA, 25 bp, Homo sapien
acctggaagttttgcaagatgcatt

SEQ ID NO: 5952537 - DNA, 25 bp, Homo sapien
tcaatgcgataagttgcatattgtg

SEQ ID NO: 5952538 - DNA, 25 bp, Homo sapien
tcgattggttctattgctaccgcct

SEQ ID NO: 5952539 - DNA, 25 bp, Homo sapien
tacgacaacaccacaaacgtgactt

SEQ ID NO: 5952540 - DNA, 25 bp, Homo sapien
tggaaatgacctacaaataccccga

SEQ ID NO: 5952541 - DNA, 25 bp, Homo sapien
tcgcatctgtatcagccgtcagtag

SEQ ID NO: 5952542 - DNA, 25 bp, Homo sapien
agtcaaagagattctacgacaacac

SEQ ID NO: 5952543 - DNA, 25 bp, Homo sapien
agatttcgaatcggtactgaaatgt

SEQ ID NO: 5952544 - DNA, 25 bp, Homo sapien
gggttcctcctatgctgcgtctcgt

SEQ ID NO: 5952545 - DNA, 25 bp, Homo sapien
agtagtatccagcgggctgtcgatg

SEQ ID NO: 5952546 - DNA, 25 bp, Homo sapien
ccctaggtctagttaaaagctatgc

SEQ ID NO: 5952547 - DNA, 25 bp, Homo sapien
ccaaaccaattccttaacacaaatc

SEQ ID NO: 5952548 - DNA, 25 bp, Homo sapien
gaagcttgataaacaaatgaacgag

SEQ ID NO: 5952549 - DNA, 25 bp, Homo sapien
aagttgcatattgtgaagcttgata

SEQ ID NO: 5952550 - DNA, 25 bp, Homo sapien
ccctagatacgatcaatgcgataag

SEQ ID NO: 5952551 - DNA, 25 bp, Homo sapien
atctgtatcagccgtcagtagtatc

SEQ ID NO: 5952552 - DNA, 25 bp, Homo sapien
aaaagctatgcaggctcctcgtcct

SEQ ID NO: 5952553 - DNA, 25 bp, Homo sapien
gaatttggatgaattgagagcccaa

SEQ ID NO: 5952554 - DNA, 25 bp, Homo sapien
gaagaactggatttcgtgttgcaat

SEQ ID NO: 5952555 - DNA, 25 bp, Homo sapien
catgataataaggacagttttgcag

SEQ ID NO: 5952556 - DNA, 25 bp, Homo sapien
cttaacacaaatcgatgacaagtac

SEQ ID NO: 5952557 - DNA, 25 bp, Homo sapien
ggtactgaaatgtagtattgtggaa

SEQ ID NO: 5952558 - DNA, 25 bp, Homo sapien
agagaaacgagatgtctatttatca

SEQ ID NO: 5952559 - DNA, 25 bp, Homo sapien
tgtggaaatgacctacaaatacccc

SEQ ID NO: 5952560 - DNA, 25 bp, Homo sapien
ctgtggaaccattcgcatctgtatc

SEQ ID NO: 5952561 - DNA, 25 bp, Homo sapien
caattccttaacacaaatcgatgac

SEQ ID NO: 5952562 - DNA, 25 bp, Homo sapien
tatcacttgggttcctcctatgctg

SEQ ID NO: 5952563 - DNA, 25 bp, Homo sapien
atatgctcagttggtcgaagaactg

SEQ ID NO: 5952564 - DNA, 25 bp, Homo sapien
gtggaaccattcgcatctgtatcag

SEQ ID NO: 5952565 - DNA, 25 bp, Homo sapien
gttttgcagccattgccaacgaaca

SEQ ID NO: 5952566 - DNA, 25 bp, Homo sapien
cgcgctataaaatttcacgctgtgg

SEQ ID NO: 5952567 - DNA, 25 bp, Homo sapien
tattttcaagttacctgttaaactc

SEQ ID NO: 5952568 - DNA, 25 bp, Homo sapien
aggatttggtgaatattatagagag

SEQ ID NO: 5952569 - DNA, 25 bp, Homo sapien
acgctgtggattacgacaagcttca

SEQ ID NO: 5952570 - DNA, 25 bp, Homo sapien
acttggtgagaggaaatcaaatttt

SEQ ID NO: 5952571 - DNA, 25 bp, Homo sapien
tacagtgggaaaaaagccctagata

SEQ ID NO: 5952572 - DNA, 25 bp, Homo sapien
tgtggattacgacaagcttcaccaa

SEQ ID NO: 5952573 - DNA, 25 bp, Homo sapien
accaattccttaacacaaatcgatg

SEQ ID NO: 5952574 - DNA, 25 bp, Homo sapien
caaggaacgtcgtcatcgtcaagct

SEQ ID NO: 5952575 - DNA, 25 bp, Homo sapien
ttggtgagaggaaatcaaattttgc

SEQ ID NO: 5952576 - DNA, 25 bp, Homo sapien
ttcgtcgattggttctattgctacc

SEQ ID NO: 5952577 - DNA, 25 bp, Homo sapien
acccattctagccactacaactaca

SEQ ID NO: 5952578 - DNA, 25 bp, Homo sapien
gtgggaaaaaagccctagatacgat

SEQ ID NO: 5952579 - DNA, 25 bp, Homo sapien
taacttggtgagaggaaatcaaatt

SEQ ID NO: 5952580 - DNA, 25 bp, Homo sapien
cgtgttgcaattcgtcgattggttc

SEQ ID NO: 5952581 - DNA, 25 bp, Homo sapien
agaaacgagatgtctatttatcact

SEQ ID NO: 5952582 - DNA, 25 bp, Homo sapien
tgttgcaattcgtcgattggttcta

SEQ ID NO: 5952583 - DNA, 25 bp, Homo sapien
ttcgaaaccgtcttcaagaaaactg

SEQ ID NO: 5952584 - DNA, 25 bp, Homo sapien
ggccgtggacaggatcgtctcacat

SEQ ID NO: 5952585 - DNA, 25 bp, Homo sapien
aagcggagaaagcaagcatgataat

SEQ ID NO: 5952586 - DNA, 25 bp, Homo sapien
caagcttcaccaaggaacgtcgtca

SEQ ID NO: 5952587 - DNA, 25 bp, Homo sapien
aaaactgccgatttggtcaaagtac

SEQ ID NO: 5952588 - DNA, 25 bp, Homo sapien
gctattcaagtttttcaagggtata

SEQ ID NO: 5952589 - DNA, 25 bp, Homo sapien
ggatgaattgagagcccaaaccaat

SEQ ID NO: 5952590 - DNA, 25 bp, Homo sapien
tcaaagtactggaaaatgcctccca

SEQ ID NO: 5952591 - DNA, 25 bp, Homo sapien
ctgtatcagccgtcagtagtatcca

SEQ ID NO: 5952592 - DNA, 25 bp, Homo sapien
gccagcactagagagaagcttttga

SEQ ID NO: 5952593 - DNA, 25 bp, Homo sapien
cgtcgtattttcaagttacctgtta

SEQ ID NO: 5952594 - DNA, 25 bp, Homo sapien
agcttcaccaaggaacgtcgtcatc

SEQ ID NO: 5952595 - DNA, 25 bp, Homo sapien
ataataaggacagttttgcagccat

SEQ ID NO: 5952596 - DNA, 25 bp, Homo sapien
gagcaaagtttcagatttcgaatcg

SEQ ID NO: 5952597 - DNA, 25 bp, Homo sapien
ttcaagaaaactgccgatttggtca

SEQ ID NO: 5952598 - DNA, 25 bp, Homo sapien
ctgctattcaagtttttcaagggta

SEQ ID NO: 5952599 - DNA, 25 bp, Homo sapien
tagagagaagcttttgagcaaaaca

SEQ ID NO: 5952600 - DNA, 25 bp, Homo sapien
tactggaaaatgcctcccatcaaga

SEQ ID NO: 5952601 - DNA, 25 bp, Homo sapien
gtctcgtgggttctatggcgtcgta

SEQ ID NO: 5952602 - DNA, 25 bp, Homo sapien
tatgcaggctcctcgtcctctcttc

SEQ ID NO: 5952603 - DNA, 25 bp, Homo sapien
atccagcgggctgtcgatgaggccg

SEQ ID NO: 5952604 - DNA, 25 bp, Homo sapien
aaacaactgacgaataacttggtga

SEQ ID NO: 5952605 - DNA, 25 bp, Homo sapien
ttggaacgacgagaaaagagaccgc

SEQ ID NO: 5952606 - DNA, 25 bp, Homo sapien
aaaccgtcttcaagaaaactgccga

SEQ ID NO: 5952607 - DNA, 25 bp, Homo sapien
tttgcagtccggaattttacaaagt

SEQ ID NO: 5952608 - DNA, 25 bp, Homo sapien
atcgtcaagcttaacgtccacatcg

SEQ ID NO: 5952609 - DNA, 25 bp, Homo sapien
ctatggcgtcgtattttcaagttac

SEQ ID NO: 5952610 - DNA, 25 bp, Homo sapien
cgatttggtcaaagtactggaaaat

SEQ ID NO: 5952611 - DNA, 25 bp, Homo sapien
ctggaagttttgcaagatgcattat

SEQ ID NO: 5952612 - DNA, 25 bp, Homo sapien
tcttcaagcacccagtcttgtgcta

SEQ ID NO: 5952613 - DNA, 25 bp, Homo sapien
ctaaatgcacccattctagccacta

SEQ ID NO: 5952614 - DNA, 25 bp, Homo sapien
agcatgataataaggacagttttgc

SEQ ID NO: 5952615 - DNA, 25 bp, Homo sapien
tgcgataagttgcatattgtgaagc

SEQ ID NO: 5952616 - DNA, 25 bp, Homo sapien
ttggtcgaagaactggatttcgtgt

SEQ ID NO: 5952617 - DNA, 25 bp, Homo sapien
gttgcatattgtgaagcttgataaa

SEQ ID NO: 5952618 - DNA, 25 bp, Homo sapien
ggacctggaagttttgcaagatgca

SEQ ID NO: 5952619 - DNA, 25 bp, Homo sapien
cttttgagcaaaacaaaacaactga

SEQ ID NO: 5952620 - DNA, 25 bp, Homo sapien
cgtgggttctatggcgtcgtatttt

SEQ ID NO: 5952621 - DNA, 25 bp, Homo sapien
gccgtcagtagtatccagcgggctg

SEQ ID NO: 5952622 - DNA, 25 bp, Homo sapien
ttctatggcgtcgtattttcaagtt

SEQ ID NO: 5952623 - DNA, 25 bp, Homo sapien
aggaaatcaaattttgcagtccgga

SEQ ID NO: 5952624 - DNA, 25 bp, Homo sapien
tcgatggaaaaagccagcactagag

SEQ ID NO: 5952625 - DNA, 25 bp, Homo sapien
aaaaagccctagatacgatcaatgc

SEQ ID NO: 5952626 - DNA, 25 bp, Homo sapien
tagtattgtggaaatgacctacaaa

SEQ ID NO: 5952627 - DNA, 25 bp, Homo sapien
acgatcaatgcgataagttgcatat

SEQ ID NO: 5952628 - DNA, 25 bp, Homo sapien
tagcttggaacgacgagaaaagaga

SEQ ID NO: 5952629 - DNA, 25 bp, Homo sapien
ctcccgcagaaaagaaagcggagaa

SEQ ID NO: 5952630 - DNA, 25 bp, Homo sapien
ttacaaagtgacctgaatttggatg

SEQ ID NO: 5952631 - DNA, 25 bp, Homo sapien
cgatgaggccgtggacaggatcgtc

SEQ ID NO: 5952632 - DNA, 25 bp, Homo sapien
tatagagagcaaagtttcagatttc

SEQ ID NO: 5952633 - DNA, 25 bp, Homo sapien
atgaacgaggacatatatgctcagt

SEQ ID NO: 5952634 - DNA, 25 bp, Homo sapien
cagtgggaaaaaagccctagatacg

SEQ ID NO: 5952635 - DNA, 25 bp, Homo sapien
tttgcagccattgccaacgaacaca

SEQ ID NO: 5952636 - DNA, 25 bp, Homo sapien
ctataaaatttcacgctgtggatta

SEQ ID NO: 5952637 - DNA, 25 bp, Homo sapien
gctatgcaggctcctcgtcctctct

SEQ ID NO: 5952638 - DNA, 25 bp, Homo sapien
acaaagtgacctgaatttggatgaa

SEQ ID NO: 5952639 - DNA, 25 bp, Homo sapien
acacaatgatgaagaagaagagatt

SEQ ID NO: 5952640 - DNA, 25 bp, Homo sapien
agtgacctgaatttggatgaattga

SEQ ID NO: 5952641 - DNA, 25 bp, Homo sapien
catattgtgaagcttgataaacaaa

SEQ ID NO: 5952642 - DNA, 25 bp, Homo sapien
agttaaaagctatgcaggctcctcg

SEQ ID NO: 5952643 - DNA, 25 bp, Homo sapien
tgacctacaaataccccgaattaaa

SEQ ID NO: 5952644 - DNA, 25 bp, Homo sapien
cgtcgattggttctattgctaccgc

SEQ ID NO: 5952645 - DNA, 25 bp, Homo sapien
ttgcaattcgtcgattggttctatt

SEQ ID NO: 5952646 - DNA, 25 bp, Homo sapien
acaaacgtgacttagcttggaacga

SEQ ID NO: 5952647 - DNA, 25 bp, Homo sapien
aaagtttcagatttcgaatcggtac

SEQ ID NO: 5952648 - DNA, 25 bp, Homo sapien
agttacctgttaaactcggcctctg

SEQ ID NO: 5952649 - DNA, 25 bp, Homo sapien
ttttacaaagtgacctgaatttgga

SEQ ID NO: 5952650 - DNA, 25 bp, Homo sapien
gttttgcaagatgcattattaaata

SEQ ID NO: 5952651 - DNA, 25 bp, Homo sapien
gcgtctcgtgggttctatggcgtcg

SEQ ID NO: 5952652 - DNA, 25 bp, Homo sapien
tactgaaatgtagtattgtggaaat

SEQ ID NO: 5952653 - DNA, 25 bp, Homo sapien
agtacactcaattcgaaaccgtctt

SEQ ID NO: 5952654 - DNA, 25 bp, Homo sapien
gcagaaaagaaagcggagaaagcaa

SEQ ID NO: 5952655 - DNA, 25 bp, Homo sapien
gcaaaaattaagtgcaatctcccgc

SEQ ID NO: 5952656 - DNA, 25 bp, Homo sapien
cagccgtcagtagtatccagcgggc

SEQ ID NO: 5952657 - DNA, 25 bp, Homo sapien
ctacatcctcagcaacctctgtgga

SEQ ID NO: 5952658 - DNA, 25 bp, Homo sapien
gacttagcttggaacgacgagaaaa

SEQ ID NO: 5952659 - DNA, 25 bp, Homo sapien
aagaaagcggagaaagcaagcatga

SEQ ID NO: 5952660 - DNA, 25 bp, Homo sapien
gtctagttaaaagctatgcaggctc

SEQ ID NO: 5952661 - DNA, 25 bp, Homo sapien
tcaccaaggaacgtcgtcatcgtca

SEQ ID NO: 5952662 - DNA, 25 bp, Homo sapien
tgctaccgcctgaaagtcaaagaga

SEQ ID NO: 5952663 - DNA, 25 bp, Homo sapien
cctgaaagtcaaagagattctacga

SEQ ID NO: 5952664 - DNA, 25 bp, Homo sapien
gtgacttagcttggaacgacgagaa

SEQ ID NO: 5952665 - DNA, 25 bp, Homo sapien
aaagtactggaaaatgcctcccatc

SEQ ID NO: 5952666 - DNA, 25 bp, Homo sapien
acgtgacttagcttggaacgacgag

SEQ ID NO: 5952667 - DNA, 25 bp, Homo sapien
gccattgccaacgaacacaatgatg

SEQ ID NO: 5952668 - DNA, 25 bp, Homo sapien
agttggtcgaagaactggatttcgt

SEQ ID NO: 5952669 - DNA, 25 bp, Homo sapien
attacagtgggaaaaaagccctaga

SEQ ID NO: 5952670 - DNA, 25 bp, Homo sapien
agtttcagatttcgaatcggtactg

SEQ ID NO: 5952671 - DNA, 25 bp, Homo sapien
cagtccggaattttacaaagtgacc

SEQ ID NO: 5952672 - DNA, 25 bp, Homo sapien
atcaagagaaacgagatgtctattt

SEQ ID NO: 5952673 - DNA, 25 bp, Homo sapien
caccacaaacgtgacttagcttgga

SEQ ID NO: 5952674 - DNA, 25 bp, Homo sapien
gaaagcggagaaagcaagcatgata

SEQ ID NO: 5952675 - DNA, 25 bp, Homo sapien
agcaaaacaaaacaactgacgaata

SEQ ID NO: 5952676 - DNA, 25 bp, Homo sapien
tcgtgacatttttgcaggacctgga

SEQ ID NO: 5952677 - DNA, 25 bp, Homo sapien
ttggatgaattgagagcccaaacca

SEQ ID NO: 5952678 - DNA, 25 bp, Homo sapien
tcctcctatgctgcgtctcgtgggt

SEQ ID NO: 5952679 - DNA, 25 bp, Homo sapien
aattcgtcgattggttctattgcta

SEQ ID NO: 5952680 - DNA, 25 bp, Homo sapien
atctcccgcagaaaagaaagcggag

SEQ ID NO: 5952681 - DNA, 25 bp, Homo sapien
tctatttatcacttgggttcctcct

SEQ ID NO: 5952682 - DNA, 25 bp, Homo sapien
tgtagtattgtggaaatgacctaca

SEQ ID NO: 5952683 - DNA, 25 bp, Homo sapien
attttgcagtccggaattttacaaa

SEQ ID NO: 5952684 - DNA, 25 bp, Homo sapien
agaaaagaaagcggagaaagcaagc

SEQ ID NO: 5952685 - DNA, 25 bp, Homo sapien
ggacatatatgctcagttggtcgaa

SEQ ID NO: 5952686 - DNA, 25 bp, Homo sapien
gaaatgtagtattgtggaaatgacc

SEQ ID NO: 5952687 - DNA, 25 bp, Homo sapien
gattacgacaagcttcaccaaggaa

SEQ ID NO: 5952688 - DNA, 25 bp, Homo sapien
gtcctctcttcaagcacccagtctt

SEQ ID NO: 5952689 - DNA, 25 bp, Homo sapien
ggttctatggcgtcgtattttcaag

SEQ ID NO: 5952690 - DNA, 25 bp, Homo sapien
ttgtgaagcttgataaacaaatgaa

SEQ ID NO: 5952691 - DNA, 25 bp, Homo sapien
aagccagcactagagagaagctttt

SEQ ID NO: 5952692 - DNA, 25 bp, Homo sapien
ctggatttcgtgttgcaattcgtcg

SEQ ID NO: 5952693 - DNA, 25 bp, Homo sapien
cgtcatcgtcaagcttaacgtccac

SEQ ID NO: 5952694 - DNA, 25 bp, Homo sapien
tgaggatttggtgaatattatagag

SEQ ID NO: 5952695 - DNA, 25 bp, Homo sapien
tatttatcacttgggttcctcctat

SEQ ID NO: 5952696 - DNA, 25 bp, Homo sapien
caagcacccagtcttgtgctaaatg

SEQ ID NO: 5952697 - DNA, 25 bp, Homo sapien
tgggttctatggcgtcgtattttca

SEQ ID NO: 5952698 - DNA, 25 bp, Homo sapien
tttggtgaatattatagagagcaaa

SEQ ID NO: 5952699 - DNA, 25 bp, Homo sapien
ctctggctgctattcaagtttttca

SEQ ID NO: 5952700 - DNA, 25 bp, Homo sapien
cactcaattcgaaaccgtcttcaag

SEQ ID NO: 5952701 - DNA, 25 bp, Homo sapien
caaaacaactgacgaataacttggt

SEQ ID NO: 5952702 - DNA, 25 bp, Homo sapien
ataaacaaatgaacgaggacatata

SEQ ID NO: 5952703 - DNA, 25 bp, Homo sapien
gcaattcgtcgattggttctattgc

SEQ ID NO: 5952704 - DNA, 25 bp, Homo sapien
tgagagcccaaaccaattccttaac

SEQ ID NO: 5952705 - DNA, 25 bp, Homo sapien
cggcctctggctgctattcaagttt

SEQ ID NO: 5952706 - DNA, 25 bp, Homo sapien
attcgcatctgtatcagccgtcagt

SEQ ID NO: 5952707 - DNA, 25 bp, Homo sapien
tttcaagggtatactcgtcacccta

SEQ ID NO: 5952708 - DNA, 25 bp, Homo sapien
tatgctgcgtctcgtgggttctatg

SEQ ID NO: 5952709 - DNA, 25 bp, Homo sapien
agcttttgagcaaaacaaaacaact

SEQ ID NO: 5952710 - DNA, 25 bp, Homo sapien
aatcaaattttgcagtccggaattt

SEQ ID NO: 5952711 - DNA, 25 bp, Homo sapien
tattgtgaagcttgataaacaaatg

SEQ ID NO: 5952712 - DNA, 25 bp, Homo sapien
ctgaatttggatgaattgagagccc

SEQ ID NO: 5952713 - DNA, 25 bp, Homo sapien
gcatctgtatcagccgtcagtagta

SEQ ID NO: 5952714 - DNA, 25 bp, Homo sapien
tttttcaagggtatactcgtcaccc

SEQ ID NO: 5952715 - DNA, 25 bp, Homo sapien
tctcttcaagcacccagtcttgtgc

SEQ ID NO: 5952716 - DNA, 25 bp, Homo sapien
gtcgatgaggccgtggacaggatcg

SEQ ID NO: 5952717 - DNA, 25 bp, Homo sapien
taaggacagttttgcagccattgcc

SEQ ID NO: 5952718 - DNA, 25 bp, Homo sapien
ttcaagcacccagtcttgtgctaaa

SEQ ID NO: 5952719 - DNA, 25 bp, Homo sapien
tgctgcgtctcgtgggttctatggc

SEQ ID NO: 5952720 - DNA, 25 bp, Homo sapien
gaacgtcgtcatcgtcaagcttaac

SEQ ID NO: 5952721 - DNA, 25 bp, Homo sapien
aatttcacgctgtggattacgacaa

SEQ ID NO: 5952722 - DNA, 25 bp, Homo sapien
agaagaagagattgaatttgaggat

SEQ ID NO: 5952723 - DNA, 25 bp, Homo sapien
caattcgaaaccgtcttcaagaaaa

SEQ ID NO: 5952724 - DNA, 25 bp, Homo sapien
acacaaatcgatgacaagtacactc

SEQ ID NO: 5952725 - DNA, 25 bp, Homo sapien
actagagagaagcttttgagcaaaa

SEQ ID NO: 5952726 - DNA, 25 bp, Homo sapien
aataacttggtgagaggaaatcaaa

SEQ ID NO: 5952727 - DNA, 25 bp, Homo sapien
ctgcgtctcgtgggttctatggcgt

SEQ ID NO: 5952728 - DNA, 25 bp, Homo sapien
gtcttgtgctaaatgcacccattct

SEQ ID NO: 5952729 - DNA, 25 bp, Homo sapien
acaaatcgatgacaagtacactcaa

SEQ ID NO: 5952730 - DNA, 25 bp, Homo sapien
tcaagttacctgttaaactcggcct

SEQ ID NO: 5952731 - DNA, 25 bp, Homo sapien
ccatcaagagaaacgagatgtctat

SEQ ID NO: 5952732 - DNA, 25 bp, Homo sapien
agatacgatcaatgcgataagttgc

SEQ ID NO: 5952733 - DNA, 25 bp, Homo sapien
atttcgtgttgcaattcgtcgattg

SEQ ID NO: 5952734 - DNA, 25 bp, Homo sapien
tgtgctaaatgcacccattctagcc

SEQ ID NO: 5952735 - DNA, 25 bp, Homo sapien
ctctgtggaaccattcgcatctgta

SEQ ID NO: 5952736 - DNA, 25 bp, Homo sapien
aaatcgatgacaagtacactcaatt

SEQ ID NO: 5952737 - DNA, 25 bp, Homo sapien
gatgtctatttatcacttgggttcc

SEQ ID NO: 5952738 - DNA, 25 bp, Homo sapien
gagagcaaagtttcagatttcgaat

SEQ ID NO: 5952739 - DNA, 25 bp, Homo sapien
caggctcctcgtcctctcttcaagc

SEQ ID NO: 5952740 - DNA, 25 bp, Homo sapien
tcagcaacctctgtggaaccattcg

SEQ ID NO: 5952741 - DNA, 25 bp, Homo sapien
atttggtcaaagtactggaaaatgc

SEQ ID NO: 5952742 - DNA, 25 bp, Homo sapien
gtgaatattatagagagcaaagttt

SEQ ID NO: 5952743 - DNA, 25 bp, Homo sapien
tttgcaagatgcattattaaataat

SEQ ID NO: 5952744 - DNA, 25 bp, Homo sapien
cgtcaagcttaacgtccacatcgat

SEQ ID NO: 5952745 - DNA, 25 bp, Homo sapien
tcggtactgaaatgtagtattgtgg

SEQ ID NO: 5952746 - DNA, 25 bp, Homo sapien
aatttgaggatttggtgaatattat

SEQ ID NO: 5952747 - DNA, 25 bp, Homo sapien
gacgaataacttggtgagaggaaat

SEQ ID NO: 5952748 - DNA, 25 bp, Homo sapien
gattggttctattgctaccgcctga

SEQ ID NO: 5952749 - DNA, 25 bp, Homo sapien
ccattctagccactacaactacatc

SEQ ID NO: 5952750 - DNA, 25 bp, Homo sapien
gccaacgaacacaatgatgaagaag

SEQ ID NO: 5952751 - DNA, 25 bp, Homo sapien
gtgtacttgtcatcgatttgtgtta

SEQ ID NO: 5952752 - DNA, 25 bp, Homo sapien
caacacgaaatccagttcttcgacc

SEQ ID NO: 5952753 - DNA, 25 bp, Homo sapien
aatcggcagttttcttgaagacggt

SEQ ID NO: 5952754 - DNA, 25 bp, Homo sapien
ttcgttggcaatggctgcaaaactg

SEQ ID NO: 5952755 - DNA, 25 bp, Homo sapien
cgtaatccacagcgtgaaattttat

SEQ ID NO: 5952756 - DNA, 25 bp, Homo sapien
cgagtatacccttgaaaaacttgaa

SEQ ID NO: 5952757 - DNA, 25 bp, Homo sapien
tttgctctctataatattcaccaaa

SEQ ID NO: 5952758 - DNA, 25 bp, Homo sapien
tcattgtgttcgttggcaatggctg

SEQ ID NO: 5952759 - DNA, 25 bp, Homo sapien
aggaggaacccaagtgataaataga

SEQ ID NO: 5952760 - DNA, 25 bp, Homo sapien
ccacaatactacatttcagtaccga

SEQ ID NO: 5952761 - DNA, 25 bp, Homo sapien
tctcttcttcttcatcattgtgttc

SEQ ID NO: 5952762 - DNA, 25 bp, Homo sapien
atgcaacttatcgcattgatcgtat

SEQ ID NO: 5952763 - DNA, 25 bp, Homo sapien
tgtaaaattccggactgcaaaattt

SEQ ID NO: 5952764 - DNA, 25 bp, Homo sapien
actttgaccaaatcggcagttttct

SEQ ID NO: 5952765 - DNA, 25 bp, Homo sapien
gttaagcttgacgatgacgacgttc

SEQ ID NO: 5952766 - DNA, 25 bp, Homo sapien
attgatcgtatctagggcttttttc

SEQ ID NO: 5952767 - DNA, 25 bp, Homo sapien
atcgacgaattgcaacacgaaatcc

SEQ ID NO: 5952768 - DNA, 25 bp, Homo sapien
cgttggcaatggctgcaaaactgtc

SEQ ID NO: 5952769 - DNA, 25 bp, Homo sapien
tgaggatgtagttgtagtggctaga

SEQ ID NO: 5952770 - DNA, 25 bp, Homo sapien
tgtagtggctagaatgggtgcattt

SEQ ID NO: 5952771 - DNA, 25 bp, Homo sapien
tccaggtcctgcaaaaatgtcacga

SEQ ID NO: 5952772 - DNA, 25 bp, Homo sapien
accaaatcggcagttttcttgaaga

SEQ ID NO: 5952773 - DNA, 25 bp, Homo sapien
tactactgacggctgatacagatgc

SEQ ID NO: 5952774 - DNA, 25 bp, Homo sapien
aaattttatagcgcggtctcttttc

SEQ ID NO: 5952775 - DNA, 25 bp, Homo sapien
tgtggtgttgtcgtagaatctcttt

SEQ ID NO: 5952776 - DNA, 25 bp, Homo sapien
atttccacaatactacatttcagta

SEQ ID NO: 5952777 - DNA, 25 bp, Homo sapien
taagcttgacgatgacgacgttcct

SEQ ID NO: 5952778 - DNA, 25 bp, Homo sapien
aatactacatttcagtaccgattcg

SEQ ID NO: 5952779 - DNA, 25 bp, Homo sapien
tgtcgtagaatctctttgactttca

SEQ ID NO: 5952780 - DNA, 25 bp, Homo sapien
aatgggtgcatttagcacaagactg

SEQ ID NO: 5952781 - DNA, 25 bp, Homo sapien
ttctccgctttcttttctgcgggag

SEQ ID NO: 5952782 - DNA, 25 bp, Homo sapien
ataggaggaacccaagtgataaata

SEQ ID NO: 5952783 - DNA, 25 bp, Homo sapien
acggctgatacagatgcgaatggtt

SEQ ID NO: 5952784 - DNA, 25 bp, Homo sapien
gttattcgtcagttgttttgttttg

SEQ ID NO: 5952785 - DNA, 25 bp, Homo sapien
agcgtgaaattttatagcgcggtct

SEQ ID NO: 5952786 - DNA, 25 bp, Homo sapien
aattgagtgtacttgtcatcgattt

SEQ ID NO: 5952787 - DNA, 25 bp, Homo sapien
cgttccttggtgaagcttgtcgtaa

SEQ ID NO: 5952788 - DNA, 25 bp, Homo sapien
ggtgaagcttgtcgtaatccacagc

SEQ ID NO: 5952789 - DNA, 25 bp, Homo sapien
cacaatatgcaacttatcgcattga

SEQ ID NO: 5952790 - DNA, 25 bp, Homo sapien
accaatcgacgaattgcaacacgaa

SEQ ID NO: 5952791 - DNA, 25 bp, Homo sapien
cggactgcaaaatttgatttcctct

SEQ ID NO: 5952792 - DNA, 25 bp, Homo sapien
tcactttgtaaaattccggactgca

SEQ ID NO: 5952793 - DNA, 25 bp, Homo sapien
tgataaatagacatctcgtttctct

SEQ ID NO: 5952794 - DNA, 25 bp, Homo sapien
aactgtccttattatcatgcttgct

SEQ ID NO: 5952795 - DNA, 25 bp, Homo sapien
aagtcacgtttgtggtgttgtcgta

SEQ ID NO: 5952796 - DNA, 25 bp, Homo sapien
taatccacagcgtgaaattttatag

SEQ ID NO: 5952797 - DNA, 25 bp, Homo sapien
attatttaataatgcatcttgcaaa

SEQ ID NO: 5952798 - DNA, 25 bp, Homo sapien
tttgtaaaattccggactgcaaaat

SEQ ID NO: 5952799 - DNA, 25 bp, Homo sapien
tgactttcaggcggtagcaatagaa

SEQ ID NO: 5952800 - DNA, 25 bp, Homo sapien
agttgttttgttttgctcaaaagct

SEQ ID NO: 5952801 - DNA, 25 bp, Homo sapien
ctcgtcgttccaagctaagtcacgt

SEQ ID NO: 5952802 - DNA, 25 bp, Homo sapien
tattcgtcagttgttttgttttgct

SEQ ID NO: 5952803 - DNA, 25 bp, Homo sapien
agtgctggctttttccatcgatgtg

SEQ ID NO: 5952804 - DNA, 25 bp, Homo sapien
cgatgtggacgttaagcttgacgat

SEQ ID NO: 5952805 - DNA, 25 bp, Homo sapien
ttcctctcaccaagttattcgtcag

SEQ ID NO: 5952806 - DNA, 25 bp, Homo sapien
gccgagtttaacaggtaacttgaaa

SEQ ID NO: 5952807 - DNA, 25 bp, Homo sapien
aggatgtagttgtagtggctagaat

SEQ ID NO: 5952808 - DNA, 25 bp, Homo sapien
gatgggaggcattttccagtacttt

SEQ ID NO: 5952809 - DNA, 25 bp, Homo sapien
gtgacgagtatacccttgaaaaact

SEQ ID NO: 5952810 - DNA, 25 bp, Homo sapien
gcattgatcgtatctagggcttttt

SEQ ID NO: 5952811 - DNA, 25 bp, Homo sapien
ggtagcaatagaaccaatcgacgaa

SEQ ID NO: 5952812 - DNA, 25 bp, Homo sapien
gaggaacccaagtgataaatagaca

SEQ ID NO: 5952813 - DNA, 25 bp, Homo sapien
tttctcttgatgggaggcattttcc

SEQ ID NO: 5952814 - DNA, 25 bp, Homo sapien
ttctcgtcgttccaagctaagtcac

SEQ ID NO: 5952815 - DNA, 25 bp, Homo sapien
tgaagacggtttcgaattgagtgta

SEQ ID NO: 5952816 - DNA, 25 bp, Homo sapien
aaatcctcaaattcaatctcttctt

SEQ ID NO: 5952817 - DNA, 25 bp, Homo sapien
ataaatagacatctcgtttctcttg

SEQ ID NO: 5952818 - DNA, 25 bp, Homo sapien
attttatagcgcggtctcttttctc

SEQ ID NO: 5952819 - DNA, 25 bp, Homo sapien
tgatcgtatctagggcttttttccc

SEQ ID NO: 5952820 - DNA, 25 bp, Homo sapien
tgtaggtcatttccacaatactaca

SEQ ID NO: 5952821 - DNA, 25 bp, Homo sapien
ctactgacggctgatacagatgcga

SEQ ID NO: 5952822 - DNA, 25 bp, Homo sapien
gaggttgctgaggatgtagttgtag

SEQ ID NO: 5952823 - DNA, 25 bp, Homo sapien
cgaccaactgagcatatatgtcctc

SEQ ID NO: 5952824 - DNA, 25 bp, Homo sapien
tcatagctcatcatgtgagacgatc

SEQ ID NO: 5952825 - DNA, 25 bp, Homo sapien
acgaattgcaacacgaaatccagtt

SEQ ID NO: 5952826 - DNA, 25 bp, Homo sapien
ttggcaatggctgcaaaactgtcct

SEQ ID NO: 5952827 - DNA, 25 bp, Homo sapien
gaaccaatcgacgaattgcaacacg

SEQ ID NO: 5952828 - DNA, 25 bp, Homo sapien
ttcaggtcactttgtaaaattccgg

SEQ ID NO: 5952829 - DNA, 25 bp, Homo sapien
tcgttccaagctaagtcacgtttgt

SEQ ID NO: 5952830 - DNA, 25 bp, Homo sapien
tttgaccaaatcggcagttttcttg

SEQ ID NO: 5952831 - DNA, 25 bp, Homo sapien
ctgcatagcttttaactagacctag

SEQ ID NO: 5952832 - DNA, 25 bp, Homo sapien
ttcgaattgagtgtacttgtcatcg

SEQ ID NO: 5952833 - DNA, 25 bp, Homo sapien
cgattcgaaatctgaaactttgctc

SEQ ID NO: 5952834 - DNA, 25 bp, Homo sapien
ttgcaaaacttccaggtcctgcaaa

SEQ ID NO: 5952835 - DNA, 25 bp, Homo sapien
aaacttgaatagcagccagaggccg

SEQ ID NO: 5952836 - DNA, 25 bp, Homo sapien
cgatcctgtccacggcctcatcgac

SEQ ID NO: 5952837 - DNA, 25 bp, Homo sapien
gctgaggatgtagttgtagtggcta

SEQ ID NO: 5952838 - DNA, 25 bp, Homo sapien
cgacgccatagaacccacgagacgc

SEQ ID NO: 5952839 - DNA, 25 bp, Homo sapien
atctcgtttctcttgatgggaggca

SEQ ID NO: 5952840 - DNA, 25 bp, Homo sapien
cgtttctcttgatgggaggcatttt

SEQ ID NO: 5952841 - DNA, 25 bp, Homo sapien
accgattcgaaatctgaaactttgc

SEQ ID NO: 5952842 - DNA, 25 bp, Homo sapien
cgaatggttccacagaggttgctga

SEQ ID NO: 5952843 - DNA, 25 bp, Homo sapien
aaaaacttgaatagcagccagaggc

SEQ ID NO: 5952844 - DNA, 25 bp, Homo sapien
tagtggctagaatgggtgcatttag

SEQ ID NO: 5952845 - DNA, 25 bp, Homo sapien
agacatctcgtttctcttgatggga

SEQ ID NO: 5952846 - DNA, 25 bp, Homo sapien
tcttttctcgtcgttccaagctaag

SEQ ID NO: 5952847 - DNA, 25 bp, Homo sapien
atatgcaacttatcgcattgatcgt

SEQ ID NO: 5952848 - DNA, 25 bp, Homo sapien
acaggtaacttgaaaatacgacgcc

SEQ ID NO: 5952849 - DNA, 25 bp, Homo sapien
atgtgagacgatcctgtccacggcc

SEQ ID NO: 5952850 - DNA, 25 bp, Homo sapien
gcctgcatagcttttaactagacct

SEQ ID NO: 5952851 - DNA, 25 bp, Homo sapien
gtacttgtcatcgatttgtgttaag

SEQ ID NO: 5952852 - DNA, 25 bp, Homo sapien
gagcctgcatagcttttaactagac

SEQ ID NO: 5952853 - DNA, 25 bp, Homo sapien
gaagagaggacgaggagcctgcata

SEQ ID NO: 5952854 - DNA, 25 bp, Homo sapien
tgaaaaacttgaatagcagccagag

SEQ ID NO: 5952855 - DNA, 25 bp, Homo sapien
ggctttttccatcgatgtggacgtt

SEQ ID NO: 5952856 - DNA, 25 bp, Homo sapien
ttggtgaagcttgtcgtaatccaca

SEQ ID NO: 5952857 - DNA, 25 bp, Homo sapien
gacgagtatacccttgaaaaacttg

SEQ ID NO: 5952858 - DNA, 25 bp, Homo sapien
cctgtccacggcctcatcgacagcc

SEQ ID NO: 5952859 - DNA, 25 bp, Homo sapien
aaaatttgatttcctctcaccaagt

SEQ ID NO: 5952860 - DNA, 25 bp, Homo sapien
gtgcttgaagagaggacgaggagcc

SEQ ID NO: 5952861 - DNA, 25 bp, Homo sapien
tggttccacagaggttgctgaggat

SEQ ID NO: 5952862 - DNA, 25 bp, Homo sapien
cagaggccgagtttaacaggtaact

SEQ ID NO: 5952863 - DNA, 25 bp, Homo sapien
ggggtatttgtaggtcatttccaca

SEQ ID NO: 5952864 - DNA, 25 bp, Homo sapien
tttgactttcaggcggtagcaatag

SEQ ID NO: 5952865 - DNA, 25 bp, Homo sapien
cagttttcttgaagacggtttcgaa

SEQ ID NO: 5952866 - DNA, 25 bp, Homo sapien
catagaacccacgagacgcagcata

SEQ ID NO: 5952867 - DNA, 25 bp, Homo sapien
tcttgatgggaggcattttccagta

SEQ ID NO: 5952868 - DNA, 25 bp, Homo sapien
attcgaaatctgaaactttgctctc

SEQ ID NO: 5952869 - DNA, 25 bp, Homo sapien
tgacggctgatacagatgcgaatgg

SEQ ID NO: 5952870 - DNA, 25 bp, Homo sapien
gtttcgaattgagtgtacttgtcat

SEQ ID NO: 5952871 - DNA, 25 bp, Homo sapien
tcgacagcccgctggatactactga

SEQ ID NO: 5952872 - DNA, 25 bp, Homo sapien
tcaaaagcttctctctagtgctggc

SEQ ID NO: 5952873 - DNA, 25 bp, Homo sapien
taggtcatttccacaatactacatt

SEQ ID NO: 5952874 - DNA, 25 bp, Homo sapien
ttcacaatatgcaacttatcgcatt

SEQ ID NO: 5952875 - DNA, 25 bp, Homo sapien
tactacatttcagtaccgattcgaa

SEQ ID NO: 5952876 - DNA, 25 bp, Homo sapien
ttttgctcaaaagcttctctctagt

SEQ ID NO: 5952877 - DNA, 25 bp, Homo sapien
cttgaagacggtttcgaattgagtg

SEQ ID NO: 5952878 - DNA, 25 bp, Homo sapien
cgtatctagggcttttttcccactg

SEQ ID NO: 5952879 - DNA, 25 bp, Homo sapien
cgtgaaattttatagcgcggtctct

SEQ ID NO: 5952880 - DNA, 25 bp, Homo sapien
agcttgacgatgacgacgttccttg

SEQ ID NO: 5952881 - DNA, 25 bp, Homo sapien
tggatactactgacggctgatacag

SEQ ID NO: 5952882 - DNA, 25 bp, Homo sapien
cagccagaggccgagtttaacaggt

SEQ ID NO: 5952883 - DNA, 25 bp, Homo sapien
cacagaggttgctgaggatgtagtt

SEQ ID NO: 5952884 - DNA, 25 bp, Homo sapien
ctgcaaaactgtccttattatcatg

SEQ ID NO: 5952885 - DNA, 25 bp, Homo sapien
atttcagtaccgattcgaaatctga

SEQ ID NO: 5952886 - DNA, 25 bp, Homo sapien
caggtcactttgtaaaattccggac

SEQ ID NO: 5952887 - DNA, 25 bp, Homo sapien
catcatgtgagacgatcctgtccac

SEQ ID NO: 5952888 - DNA, 25 bp, Homo sapien
ttccacaatactacatttcagtacc

SEQ ID NO: 5952889 - DNA, 25 bp, Homo sapien
ctaagtcacgtttgtggtgttgtcg

SEQ ID NO: 5952890 - DNA, 25 bp, Homo sapien
gaattgcaacacgaaatccagttct

SEQ ID NO: 5952891 - DNA, 25 bp, Homo sapien
gcttgtcgtaatccacagcgtgaaa

SEQ ID NO: 5952892 - DNA, 25 bp, Homo sapien
cagatgcgaatggttccacagaggt

SEQ ID NO: 5952893 - DNA, 25 bp, Homo sapien
ctgggtgcttgaagagaggacgagg

SEQ ID NO: 5952894 - DNA, 25 bp, Homo sapien
ctacatttcagtaccgattcgaaat

SEQ ID NO: 5952895 - DNA, 25 bp, Homo sapien
gacgaggagcctgcatagcttttaa

SEQ ID NO: 5952896 - DNA, 25 bp, Homo sapien
attgcaacacgaaatccagttcttc

SEQ ID NO: 5952897 - DNA, 25 bp, Homo sapien
ttccatcgatgtggacgttaagctt

SEQ ID NO: 5952898 - DNA, 25 bp, Homo sapien
tcaccaagttattcgtcagttgttt

SEQ ID NO: 5952899 - DNA, 25 bp, Homo sapien
ctctataatattcaccaaatcctca

SEQ ID NO: 5952900 - DNA, 25 bp, Homo sapien
attcggggtatttgtaggtcatttc

SEQ ID NO: 5952901 - DNA, 25 bp, Homo sapien
ccacagcgtgaaattttatagcgcg

SEQ ID NO: 5952902 - DNA, 25 bp, Homo sapien
ttcatttgtttatcaagcttcacaa

SEQ ID NO: 5952903 - DNA, 25 bp, Homo sapien
gatttgtgttaaggaattggtttgg

SEQ ID NO: 5952904 - DNA, 25 bp, Homo sapien
tctttgactttcaggcggtagcaat

SEQ ID NO: 5952905 - DNA, 25 bp, Homo sapien
aaaacttccaggtcctgcaaaaatg

SEQ ID NO: 5952906 - DNA, 25 bp, Homo sapien
aagcttcacaatatgcaacttatcg

SEQ ID NO: 5952907 - DNA, 25 bp, Homo sapien
ttctgcgggagattgcacttaattt

SEQ ID NO: 5952908 - DNA, 25 bp, Homo sapien
tagggtgacgagtatacccttgaaa

SEQ ID NO: 5952909 - DNA, 25 bp, Homo sapien
aatattcaccaaatcctcaaattca

SEQ ID NO: 5952910 - DNA, 25 bp, Homo sapien
gaatagcagccagaggccgagttta

SEQ ID NO: 5952911 - DNA, 25 bp, Homo sapien
tgagcatatatgtcctcgttcattt

SEQ ID NO: 5952912 - DNA, 25 bp, Homo sapien
gcggtctcttttctcgtcgttccaa

SEQ ID NO: 5952913 - DNA, 25 bp, Homo sapien
tcgcattgatcgtatctagggcttt

SEQ ID NO: 5952914 - DNA, 25 bp, Homo sapien
cttgaaaatacgacgccatagaacc

SEQ ID NO: 5952915 - DNA, 25 bp, Homo sapien
aatttgatttcctctcaccaagtta

SEQ ID NO: 5952916 - DNA, 25 bp, Homo sapien
tttccagtactttgaccaaatcggc

SEQ ID NO: 5952917 - DNA, 25 bp, Homo sapien
aggacgaggagcctgcatagctttt

SEQ ID NO: 5952918 - DNA, 25 bp, Homo sapien
gacctagggtgacgagtataccctt

SEQ ID NO: 5952919 - DNA, 25 bp, Homo sapien
aaaagcttctctctagtgctggctt

SEQ ID NO: 5952920 - DNA, 25 bp, Homo sapien
taactagacctagggtgacgagtat

SEQ ID NO: 5952921 - DNA, 25 bp, Homo sapien
gtggacgttaagcttgacgatgacg

SEQ ID NO: 5952922 - DNA, 25 bp, Homo sapien
tatttaataatgcatcttgcaaaac

SEQ ID NO: 5952923 - DNA, 25 bp, Homo sapien
ctgatacagatgcgaatggttccac

SEQ ID NO: 5952924 - DNA, 25 bp, Homo sapien
aagacggtttcgaattgagtgtact

SEQ ID NO: 5952925 - DNA, 25 bp, Homo sapien
tatttgtaggtcatttccacaatac

SEQ ID NO: 5952926 - DNA, 25 bp, Homo sapien
tgtgttcgttggcaatggctgcaaa

SEQ ID NO: 5952927 - DNA, 25 bp, Homo sapien
gtttgggctctcaattcatccaaat

SEQ ID NO: 5952928 - DNA, 25 bp, Homo sapien
aacccaagtgataaatagacatctc

SEQ ID NO: 5952929 - DNA, 25 bp, Homo sapien
ctggctttttccatcgatgtggacg

SEQ ID NO: 5952930 - DNA, 25 bp, Homo sapien
agcatatatgtcctcgttcatttgt

SEQ ID NO: 5952931 - DNA, 25 bp, Homo sapien
ttcttcttcatcattgtgttcgttg

SEQ ID NO: 5952932 - DNA, 25 bp, Homo sapien
catcgacagcccgctggatactact

SEQ ID NO: 5952933 - DNA, 25 bp, Homo sapien
aggcattttccagtactttgaccaa

SEQ ID NO: 5952934 - DNA, 25 bp, Homo sapien
tcaagcttcacaatatgcaacttat

SEQ ID NO: 5952935 - DNA, 25 bp, Homo sapien
tgcgaatggttccacagaggttgct

SEQ ID NO: 5952936 - DNA, 25 bp, Homo sapien
tgaaactttgctctctataatattc

SEQ ID NO: 5952937 - DNA, 25 bp, Homo sapien
taataatgcatcttgcaaaacttcc

SEQ ID NO: 5952938 - DNA, 25 bp, Homo sapien
ctgcaaaatttgatttcctctcacc

SEQ ID NO: 5952939 - DNA, 25 bp, Homo sapien
tagttgtagtggctagaatgggtgc

SEQ ID NO: 5952940 - DNA, 25 bp, Homo sapien
tatcatgcttgctttctccgctttc

SEQ ID NO: 5952941 - DNA, 25 bp, Homo sapien
tcggcagttttcttgaagacggttt

SEQ ID NO: 5952942 - DNA, 25 bp, Homo sapien
aaaatacgacgccatagaacccacg

SEQ ID NO: 5952943 - DNA, 25 bp, Homo sapien
cggtttcgaattgagtgtacttgtc

SEQ ID NO: 5952944 - DNA, 25 bp, Homo sapien
aaattccggactgcaaaatttgatt

SEQ ID NO: 5952945 - DNA, 25 bp, Homo sapien
aagcttctctctagtgctggctttt

SEQ ID NO: 5952946 - DNA, 25 bp, Homo sapien
tctcaccaagttattcgtcagttgt

SEQ ID NO: 5952947 - DNA, 25 bp, Homo sapien
ggtcatttccacaatactacatttc

SEQ ID NO: 5952948 - DNA, 25 bp, Homo sapien
gactgcaaaatttgatttcctctca

SEQ ID NO: 5952949 - DNA, 25 bp, Homo sapien
aatccagttcttcgaccaactgagc

SEQ ID NO: 5952950 - DNA, 25 bp, Homo sapien
cagcccgctggatactactgacggc

SEQ ID NO: 5952951 - DNA, 25 bp, Homo sapien
aacttatcgcattgatcgtatctag

SEQ ID NO: 5952952 - DNA, 25 bp, Homo sapien
acgacgttccttggtgaagcttgtc

SEQ ID NO: 5952953 - DNA, 25 bp, Homo sapien
atgcttgctttctccgctttctttt

SEQ ID NO: 5952954 - DNA, 25 bp, Homo sapien
gatgtagttgtagtggctagaatgg

SEQ ID NO: 5952955 - DNA, 25 bp, Homo sapien
tctcttttctcgtcgttccaagcta

SEQ ID NO: 5952956 - DNA, 25 bp, Homo sapien
ctataatattcaccaaatcctcaaa

SEQ ID NO: 5952957 - DNA, 25 bp, Homo sapien
cttttaactagacctagggtgacga

SEQ ID NO: 5952958 - DNA, 25 bp, Homo sapien
catcgatttgtgttaaggaattggt

SEQ ID NO: 5952959 - DNA, 25 bp, Homo sapien
tccaaattcaggtcactttgtaaaa

SEQ ID NO: 5952960 - DNA, 25 bp, Homo sapien
ccaaatcctcaaattcaatctcttc

SEQ ID NO: 5952961 - DNA, 25 bp, Homo sapien
tcaattcatccaaattcaggtcact

SEQ ID NO: 5952962 - DNA, 25 bp, Homo sapien
ttcttgaagacggtttcgaattgag

SEQ ID NO: 5952963 - DNA, 25 bp, Homo sapien
tttgtaggtcatttccacaatacta

SEQ ID NO: 5952964 - DNA, 25 bp, Homo sapien
catttagcacaagactgggtgcttg

SEQ ID NO: 5952965 - DNA, 25 bp, Homo sapien
gcttgctttctccgctttcttttct

SEQ ID NO: 5952966 - DNA, 25 bp, Homo sapien
tatcaagcttcacaatatgcaactt

SEQ ID NO: 5952967 - DNA, 25 bp, Homo sapien
gatgacgacgttccttggtgaagct

SEQ ID NO: 5952968 - DNA, 25 bp, Homo sapien
gcgggagattgcacttaatttttgc

SEQ ID NO: 5952969 - DNA, 25 bp, Homo sapien
tatcgcattgatcgtatctagggct

SEQ ID NO: 5952970 - DNA, 25 bp, Homo sapien
tcttcttcttcatcattgtgttcgt

SEQ ID NO: 5952971 - DNA, 25 bp, Homo sapien
ttattatcatgcttgctttctccgc

SEQ ID NO: 5952972 - DNA, 25 bp, Homo sapien
tgaaaatacgacgccatagaaccca

SEQ ID NO: 5952973 - DNA, 25 bp, Homo sapien
actttgctctctataatattcacca

SEQ ID NO: 5952974 - DNA, 25 bp, Homo sapien
tttgtttatcaagcttcacaatatg

SEQ ID NO: 5952975 - DNA, 25 bp, Homo sapien
aatagaaccaatcgacgaattgcaa

SEQ ID NO: 5952976 - DNA, 25 bp, Homo sapien
accaagttattcgtcagttgttttg

SEQ ID NO: 5952977 - DNA, 25 bp, Homo sapien
tgctctctataatattcaccaaatc

SEQ ID NO: 5952978 - DNA, 25 bp, Homo sapien
gttttgttttgctcaaaagcttctc

SEQ ID NO: 5952979 - DNA, 25 bp, Homo sapien
actttgtaaaattccggactgcaaa

SEQ ID NO: 5952980 - DNA, 25 bp, Homo sapien
ggtgcatttagcacaagactgggtg

SEQ ID NO: 5952981 - DNA, 25 bp, Homo sapien
gtcgtaatccacagcgtgaaatttt

SEQ ID NO: 5952982 - DNA, 25 bp, Homo sapien
tttaactagacctagggtgacgagt

SEQ ID NO: 5952983 - DNA, 25 bp, Homo sapien
caagttattcgtcagttgttttgtt

SEQ ID NO: 5952984 - DNA, 25 bp, Homo sapien
aggaattggtttgggctctcaattc

SEQ ID NO: 5952985 - DNA, 25 bp, Homo sapien
tctcaattcatccaaattcaggtca

SEQ ID NO: 5952986 - DNA, 25 bp, Homo sapien
atccacagcgtgaaattttatagcg

SEQ ID NO: 5952987 - DNA, 25 bp, Homo sapien
tagcgcggtctcttttctcgtcgtt

SEQ ID NO: 5952988 - DNA, 25 bp, Homo sapien
cgttcatttgtttatcaagcttcac

SEQ ID NO: 5952989 - DNA, 25 bp, Homo sapien
cacggcctcatcgacagcccgctgg

SEQ ID NO: 5952990 - DNA, 25 bp, Homo sapien
gtcatcgatttgtgttaaggaattg

SEQ ID NO: 5952991 - DNA, 25 bp, Homo sapien
caatatgcaacttatcgcattgatc

SEQ ID NO: 5952992 - DNA, 25 bp, Homo sapien
tttgatttcctctcaccaagttatt

SEQ ID NO: 5952993 - DNA, 25 bp, Homo sapien
ggttgctgaggatgtagttgtagtg

SEQ ID NO: 5952994 - DNA, 25 bp, Homo sapien
cagaggttgctgaggatgtagttgt

SEQ ID NO: 5952995 - DNA, 25 bp, Homo sapien
gagtttaacaggtaacttgaaaata

SEQ ID NO: 5952996 - DNA, 25 bp, Homo sapien
tgcatcttgcaaaacttccaggtcc

SEQ ID NO: 5952997 - DNA, 25 bp, Homo sapien
atttcctctcaccaagttattcgtc

SEQ ID NO: 5952998 - DNA, 25 bp, Homo sapien
tgtttatcaagcttcacaatatgca

SEQ ID NO: 5952999 - DNA, 25 bp, Homo sapien
ggctgcaaaactgtccttattatca

SEQ ID NO: 5953000 - DNA, 25 bp, Homo sapien
tcatttccacaatactacatttcag

SEQ ID NO: 5953001 - DNA, 25 bp, Homo sapien
gttgtcgtagaatctctttgacttt

SEQ ID NO: 5953002 - DNA, 25 bp, Homo sapien
gcttcacaatatgcaacttatcgca

SEQ ID NO: 5953003 - DNA, 25 bp, Homo sapien
acgttaagcttgacgatgacgacgt

SEQ ID NO: 5953004 - DNA, 25 bp, Homo sapien
ttttccatcgatgtggacgttaagc

SEQ ID NO: 5953005 - DNA, 25 bp, Homo sapien
tagacctagggtgacgagtataccc

SEQ ID NO: 5953006 - DNA, 25 bp, Homo sapien
ggtctcttttctcgtcgttccaagc

SEQ ID NO: 5953007 - DNA, 25 bp, Homo sapien
catccaaattcaggtcactttgtaa

SEQ ID NO: 5953008 - DNA, 25 bp, Homo sapien
aaaactgtccttattatcatgcttg

SEQ ID NO: 5953009 - DNA, 25 bp, Homo sapien
ctctctagtgctggctttttccatc

SEQ ID NO: 5953010 - DNA, 25 bp, Homo sapien
ttgctttctccgctttcttttctgc

SEQ ID NO: 5953011 - DNA, 25 bp, Homo sapien
tgcatttagcacaagactgggtgct

SEQ ID NO: 5953012 - DNA, 25 bp, Homo sapien
gtgagacgatcctgtccacggcctc

SEQ ID NO: 5953013 - DNA, 25 bp, Homo sapien
tatacccttgaaaaacttgaatagc

SEQ ID NO: 5953014 - DNA, 25 bp, Homo sapien
atgtggacgttaagcttgacgatga

SEQ ID NO: 5953015 - DNA, 25 bp, Homo sapien
aggccgagtttaacaggtaacttga

SEQ ID NO: 5953016 - DNA, 25 bp, Homo sapien
tcatgtgagacgatcctgtccacgg

SEQ ID NO: 5953017 - DNA, 25 bp, Homo sapien
taaggaattggtttgggctctcaat

SEQ ID NO: 5953018 - DNA, 25 bp, Homo sapien
cgtcgttccaagctaagtcacgttt

SEQ ID NO: 5953019 - DNA, 25 bp, Homo sapien
attccggactgcaaaatttgatttc

SEQ ID NO: 5953020 - DNA, 25 bp, Homo sapien
tatctagggcttttttcccactgta

SEQ ID NO: 5953021 - DNA, 25 bp, Homo sapien
ctccgctttcttttctgcgggagat

SEQ ID NO: 5953022 - DNA, 25 bp, Homo sapien
gccatagaacccacgagacgcagca

SEQ ID NO: 5953023 - DNA, 25 bp, Homo sapien
aatacgacgccatagaacccacgag

SEQ ID NO: 5953024 - DNA, 25 bp, Homo sapien
atcctcaaattcaatctcttcttct

SEQ ID NO: 5953025 - DNA, 25 bp, Homo sapien
acccacgagacgcagcataggagga

SEQ ID NO: 5953026 - DNA, 25 bp, Homo sapien
ggtcctgcaaaaatgtcacgaccat

SEQ ID NO: 5953027 - DNA, 25 bp, Homo sapien
agagaggacgaggagcctgcatagc

SEQ ID NO: 5953028 - DNA, 25 bp, Homo sapien
gcataggaggaacccaagtgataaa

SEQ ID NO: 5953029 - DNA, 25 bp, Homo sapien
tatatgtcctcgttcatttgtttat

SEQ ID NO: 5953030 - DNA, 25 bp, Homo sapien
ccgctggatactactgacggctgat

SEQ ID NO: 5953031 - DNA, 25 bp, Homo sapien
gcccgctggatactactgacggctg

SEQ ID NO: 5953032 - DNA, 25 bp, Homo sapien
atcgtatctagggcttttttcccac

SEQ ID NO: 5953033 - DNA, 25 bp, Homo sapien
tattcaccaaatcctcaaattcaat

SEQ ID NO: 5953034 - DNA, 25 bp, Homo sapien
tcgtagaatctctttgactttcagg

SEQ ID NO: 5953035 - DNA, 25 bp, Homo sapien
gactgggtgcttgaagagaggacga

SEQ ID NO: 5953036 - DNA, 25 bp, Homo sapien
gagattgcacttaatttttgcaaat

SEQ ID NO: 5953037 - DNA, 25 bp, Homo sapien
caatggctgcaaaactgtccttatt

SEQ ID NO: 5953038 - DNA, 25 bp, Homo sapien
aatctctttgactttcaggcggtag

SEQ ID NO: 5953039 - DNA, 25 bp, Homo sapien
ttctctctagtgctggctttttcca

SEQ ID NO: 5953040 - DNA, 25 bp, Homo sapien
gggtgcttgaagagaggacgaggag

SEQ ID NO: 5953041 - DNA, 25 bp, Homo sapien
aaactttgctctctataatattcac

SEQ ID NO: 5953042 - DNA, 25 bp, Homo sapien
gcattttccagtactttgaccaaat

SEQ ID NO: 5953043 - DNA, 25 bp, Homo sapien
ccttattatcatgcttgctttctcc

SEQ ID NO: 5953044 - DNA, 25 bp, Homo sapien
ctctagtgctggctttttccatcga

SEQ ID NO: 5953045 - DNA, 25 bp, Homo sapien
ttcatccaaattcaggtcactttgt

SEQ ID NO: 5953046 - DNA, 25 bp, Homo sapien
gacagcccgctggatactactgacg

SEQ ID NO: 5953047 - DNA, 25 bp, Homo sapien
cagttcttcgaccaactgagcatat

SEQ ID NO: 5953048 - DNA, 25 bp, Homo sapien
gggtgacgagtatacccttgaaaaa

SEQ ID NO: 5953049 - DNA, 25 bp, Homo sapien
gtactttgaccaaatcggcagtttt

SEQ ID NO: 5953050 - DNA, 25 bp, Homo sapien
gcacaagactgggtgcttgaagaga

SEQ ID NO: 5953051 - DNA, 25 bp, Homo sapien
tacagatgcgaatggttccacagag

SEQ ID NO: 5953052 - DNA, 25 bp, Homo sapien
ttgctcaaaagcttctctctagtgc

SEQ ID NO: 5953053 - DNA, 25 bp, Homo sapien
ccttggtgaagcttgtcgtaatcca

SEQ ID NO: 5953054 - DNA, 25 bp, Homo sapien
ttccttggtgaagcttgtcgtaatc

SEQ ID NO: 5953055 - DNA, 25 bp, Homo sapien
ctgtccttattatcatgcttgcttt

SEQ ID NO: 5953056 - DNA, 25 bp, Homo sapien
aacttccaggtcctgcaaaaatgtc

SEQ ID NO: 5953057 - DNA, 25 bp, Homo sapien
caatcgacgaattgcaacacgaaat

SEQ ID NO: 5953058 - DNA, 25 bp, Homo sapien
agtatacccttgaaaaacttgaata

SEQ ID NO: 5953059 - DNA, 25 bp, Homo sapien
ccatcgatgtggacgttaagcttga

SEQ ID NO: 5953060 - DNA, 25 bp, Homo sapien
ggctagaatgggtgcatttagcaca

SEQ ID NO: 5953061 - DNA, 25 bp, Homo sapien
ggacgttaagcttgacgatgacgac

SEQ ID NO: 5953062 - DNA, 25 bp, Homo sapien
gctctcaattcatccaaattcaggt

SEQ ID NO: 5953063 - DNA, 25 bp, Homo sapien
ttcgtcagttgttttgttttgctca

SEQ ID NO: 5953064 - DNA, 25 bp, Homo sapien
attatcatgcttgctttctccgctt

SEQ ID NO: 5953065 - DNA, 25 bp, Homo sapien
acacgaaatccagttcttcgaccaa

SEQ ID NO: 5953066 - DNA, 25 bp, Homo sapien
gatgcgaatggttccacagaggttg

SEQ ID NO: 5953067 - DNA, 25 bp, Homo sapien
ttgtcgtaatccacagcgtgaaatt

SEQ ID NO: 5953068 - DNA, 25 bp, Homo sapien
gatactactgacggctgatacagat

SEQ ID NO: 5953069 - DNA, 25 bp, Homo sapien
gagacgcagcataggaggaacccaa

SEQ ID NO: 5953070 - DNA, 25 bp, Homo sapien
gcggtagcaatagaaccaatcgacg

SEQ ID NO: 5953071 - DNA, 25 bp, Homo sapien
ttgggctctcaattcatccaaattc

SEQ ID NO: 5953072 - DNA, 25 bp, Homo sapien
tgatttcctctcaccaagttattcg

SEQ ID NO: 5953073 - DNA, 25 bp, Homo sapien
caccaaatcctcaaattcaatctct

SEQ ID NO: 5953074 - DNA, 25 bp, Homo sapien
tggtttgggctctcaattcatccaa

SEQ ID NO: 5953075 - DNA, 25 bp, Homo sapien
tccaagctaagtcacgtttgtggtg

SEQ ID NO: 5953076 - DNA, 25 bp, Homo sapien
tgggtgcatttagcacaagactggg

SEQ ID NO: 5953077 - DNA, 25 bp, Homo sapien
caaattcaggtcactttgtaaaatt

SEQ ID NO: 5953078 - DNA, 25 bp, Homo sapien
ttcaccaaatcctcaaattcaatct

SEQ ID NO: 5953079 - DNA, 25 bp, Homo sapien
ggtcactttgtaaaattccggactg

SEQ ID NO: 5953080 - DNA, 25 bp, Homo sapien
gccagaggccgagtttaacaggtaa

SEQ ID NO: 5953081 - DNA, 25 bp, Homo sapien
tcgaaatctgaaactttgctctcta

SEQ ID NO: 5953082 - DNA, 25 bp, Homo sapien
tcatgcttgctttctccgctttctt

SEQ ID NO: 5953083 - DNA, 25 bp, Homo sapien
ggaggcattttccagtactttgacc

SEQ ID NO: 5953084 - DNA, 25 bp, Homo sapien
gttaaggaattggtttgggctctca

SEQ ID NO: 5953085 - DNA, 25 bp, Homo sapien
cccaagtgataaatagacatctcgt

SEQ ID NO: 5953086 - DNA, 25 bp, Homo sapien
gttccaagctaagtcacgtttgtgg

SEQ ID NO: 5953087 - DNA, 25 bp, Homo sapien
gttcttcgaccaactgagcatatat

SEQ ID NO: 5953088 - DNA, 25 bp, Homo sapien
caagtgataaatagacatctcgttt

SEQ ID NO: 5953089 - DNA, 25 bp, Homo sapien
ttgtgttaaggaattggtttgggct

SEQ ID NO: 5953090 - DNA, 25 bp, Homo sapien
tagaacccacgagacgcagcatagg

SEQ ID NO: 5953091 - DNA, 25 bp, Homo sapien
tcttcatcattgtgttcgttggcaa

SEQ ID NO: 5953092 - DNA, 25 bp, Homo sapien
ccgctttcttttctgcgggagattg

SEQ ID NO: 5953093 - DNA, 25 bp, Homo sapien
tcaggcggtagcaatagaaccaatc

SEQ ID NO: 5953094 - DNA, 25 bp, Homo sapien
ctttttccatcgatgtggacgttaa

SEQ ID NO: 5953095 - DNA, 25 bp, Homo sapien
tcgatttgtgttaaggaattggttt

SEQ ID NO: 5953096 - DNA, 25 bp, Homo sapien
catcttgcaaaacttccaggtcctg

SEQ ID NO: 5953097 - DNA, 25 bp, Homo sapien
cttccaggtcctgcaaaaatgtcac

SEQ ID NO: 5953098 - DNA, 25 bp, Homo sapien
tacccttgaaaaacttgaatagcag

SEQ ID NO: 5953099 - DNA, 25 bp, Homo sapien
gtgttgtcgtagaatctctttgact

SEQ ID NO: 5953100 - DNA, 25 bp, Homo sapien
tcctcgttcatttgtttatcaagct

SEQ ID NO: 5953101 - DNA, 25 bp, Homo sapien
atcgatgtggacgttaagcttgacg

SEQ ID NO: 5953102 - DNA, 25 bp, Homo sapien
aagactgggtgcttgaagagaggac

SEQ ID NO: 5953103 - DNA, 25 bp, Homo sapien
gtccttattatcatgcttgctttct

SEQ ID NO: 5953104 - DNA, 25 bp, Homo sapien
cccttgaaaaacttgaatagcagcc

SEQ ID NO: 5953105 - DNA, 25 bp, Homo sapien
catttgtttatcaagcttcacaata

SEQ ID NO: 5953106 - DNA, 25 bp, Homo sapien
aggagcctgcatagcttttaactag

SEQ ID NO: 5953107 - DNA, 25 bp, Homo sapien
aatctgaaactttgctctctataat

SEQ ID NO: 5953108 - DNA, 25 bp, Homo sapien
atagacatctcgtttctcttgatgg

SEQ ID NO: 5953109 - DNA, 25 bp, Homo sapien
cctctcaccaagttattcgtcagtt

SEQ ID NO: 5953110 - DNA, 25 bp, Homo sapien
ttcgaccaactgagcatatatgtcc

SEQ ID NO: 5953111 - DNA, 25 bp, Homo sapien
tagcacaagactgggtgcttgaaga

SEQ ID NO: 5953112 - DNA, 25 bp, Homo sapien
acaagactgggtgcttgaagagagg

SEQ ID NO: 5953113 - DNA, 25 bp, Homo sapien
atagctcatcatgtgagacgatcct

SEQ ID NO: 5953114 - DNA, 25 bp, Homo sapien
acttgaatagcagccagaggccgag

SEQ ID NO: 5953115 - DNA, 25 bp, Homo sapien
cacgtttgtggtgttgtcgtagaat

SEQ ID NO: 5953116 - DNA, 25 bp, Homo sapien
catcattgtgttcgttggcaatggc

SEQ ID NO: 5953117 - DNA, 25 bp, Homo sapien
gacgatcctgtccacggcctcatcg

SEQ ID NO: 5953118 - DNA, 25 bp, Homo sapien
ttgagtgtacttgtcatcgatttgt

SEQ ID NO: 5953119 - DNA, 25 bp, Homo sapien
tcttcgaccaactgagcatatatgt

SEQ ID NO: 5953120 - DNA, 25 bp, Homo sapien
tagaaccaatcgacgaattgcaaca

SEQ ID NO: 5953121 - DNA, 25 bp, Homo sapien
aattcaggtcactttgtaaaattcc

SEQ ID NO: 5953122 - DNA, 25 bp, Homo sapien
acttgtcatcgatttgtgttaagga

SEQ ID NO: 5953123 - DNA, 25 bp, Homo sapien
gcaaaatttgatttcctctcaccaa

SEQ ID NO: 5953124 - DNA, 25 bp, Homo sapien
tgacgatgacgacgttccttggtga

SEQ ID NO: 5953125 - DNA, 25 bp, Homo sapien
ggcaatggctgcaaaactgtcctta

SEQ ID NO: 5953126 - DNA, 25 bp, Homo sapien
gacggtttcgaattgagtgtacttg

SEQ ID NO: 5953127 - DNA, 25 bp, Homo sapien
tatagcgcggtctcttttctcgtcg

SEQ ID NO: 5953128 - DNA, 25 bp, Homo sapien
tgcaacacgaaatccagttcttcga

SEQ ID NO: 5953129 - DNA, 25 bp, Homo sapien
ggctgatacagatgcgaatggttcc

SEQ ID NO: 5953130 - DNA, 25 bp, Homo sapien
cggcctcatcgacagcccgctggat

SEQ ID NO: 5953131 - DNA, 25 bp, Homo sapien
taattcggggtatttgtaggtcatt

SEQ ID NO: 5953132 - DNA, 25 bp, Homo sapien
tttaattcggggtatttgtaggtca

SEQ ID NO: 5953133 - DNA, 25 bp, Homo sapien
gatacagatgcgaatggttccacag

SEQ ID NO: 5953134 - DNA, 25 bp, Homo sapien
aatggttccacagaggttgctgagg

SEQ ID NO: 5953135 - DNA, 25 bp, Homo sapien
cagtactttgaccaaatcggcagtt

SEQ ID NO: 5953136 - DNA, 25 bp, Homo sapien
cgcagcataggaggaacccaagtga

SEQ ID NO: 5953137 - DNA, 25 bp, Homo sapien
gctggatactactgacggctgatac

SEQ ID NO: 5953138 - DNA, 25 bp, Homo sapien
attggtttgggctctcaattcatcc

SEQ ID NO: 5953139 - DNA, 25 bp, Homo sapien
gcaatagaaccaatcgacgaattgc

SEQ ID NO: 5953140 - DNA, 25 bp, Homo sapien
gaaatctgaaactttgctctctata

SEQ ID NO: 5953141 - DNA, 25 bp, Homo sapien
agaatctctttgactttcaggcggt

SEQ ID NO: 5953142 - DNA, 25 bp, Homo sapien
tttgtggtgttgtcgtagaatctct

SEQ ID NO: 5953143 - DNA, 25 bp, Homo sapien
tttatagcgcggtctcttttctcgt

SEQ ID NO: 5953144 - DNA, 25 bp, Homo sapien
ttgaatagcagccagaggccgagtt

SEQ ID NO: 5953145 - DNA, 25 bp, Homo sapien
ttgttttgttttgctcaaaagcttc

SEQ ID NO: 5953146 - DNA, 25 bp, Homo sapien
catatatgtcctcgttcatttgttt

SEQ ID NO: 5953147 - DNA, 25 bp, Homo sapien
gacgcagcataggaggaacccaagt

SEQ ID NO: 5953148 - DNA, 25 bp, Homo sapien
actgagcatatatgtcctcgttcat

SEQ ID NO: 5953149 - DNA, 25 bp, Homo sapien
cgaggagcctgcatagcttttaact

SEQ ID NO: 5953150 - DNA, 25 bp, Homo sapien
tatgtcctcgttcatttgtttatca

SEQ ID NO: 5953151 - DNA, 25 bp, Homo sapien
tttaataatgcatcttgcaaaactt

SEQ ID NO: 5953152 - DNA, 25 bp, Homo sapien
atcctgtccacggcctcatcgacag

SEQ ID NO: 5953153 - DNA, 25 bp, Homo sapien
ggcagttttcttgaagacggtttcg

SEQ ID NO: 5953154 - DNA, 25 bp, Homo sapien
caagctaagtcacgtttgtggtgtt

SEQ ID NO: 5953155 - DNA, 25 bp, Homo sapien
tgaagcttgtcgtaatccacagcgt

SEQ ID NO: 5953156 - DNA, 25 bp, Homo sapien
ttttctcgtcgttccaagctaagtc

SEQ ID NO: 5953157 - DNA, 25 bp, Homo sapien
tgctggctttttccatcgatgtgga

SEQ ID NO: 5953158 - DNA, 25 bp, Homo sapien
agaatgggtgcatttagcacaagac

SEQ ID NO: 5953159 - DNA, 25 bp, Homo sapien
agcttttaactagacctagggtgac

SEQ ID NO: 5953160 - DNA, 25 bp, Homo sapien
aattcatccaaattcaggtcacttt

SEQ ID NO: 5953161 - DNA, 25 bp, Homo sapien
cagcataggaggaacccaagtgata

SEQ ID NO: 5953162 - DNA, 25 bp, Homo sapien
actgacggctgatacagatgcgaat

SEQ ID NO: 5953163 - DNA, 25 bp, Homo sapien
tcttgcaaaacttccaggtcctgca

SEQ ID NO: 5953164 - DNA, 25 bp, Homo sapien
agtgataaatagacatctcgtttct

SEQ ID NO: 5953165 - DNA, 25 bp, Homo sapien
gcaaaacttccaggtcctgcaaaaa

SEQ ID NO: 5953166 - DNA, 25 bp, Homo sapien
gttgtagtggctagaatgggtgcat

SEQ ID NO: 5953167 - DNA, 25 bp, Homo sapien
atagcagccagaggccgagtttaac

SEQ ID NO: 5953168 - DNA, 25 bp, Homo sapien
gcatagcttttaactagacctaggg

SEQ ID NO: 5953169 - DNA, 25 bp, Homo sapien
aatctcttcttcttcatcattgtgt

SEQ ID NO: 5953170 - DNA, 25 bp, Homo sapien
gagtgtacttgtcatcgatttgtgt

SEQ ID NO: 5953171 - DNA, 25 bp, Homo sapien
tccagtactttgaccaaatcggcag

SEQ ID NO: 5953172 - DNA, 25 bp, Homo sapien
gcttctctctagtgctggctttttc

SEQ ID NO: 5953173 - DNA, 25 bp, Homo sapien
ttttctgcgggagattgcacttaat

SEQ ID NO: 5953174 - DNA, 25 bp, Homo sapien
cttatcgcattgatcgtatctaggg

SEQ ID NO: 5953175 - DNA, 25 bp, Homo sapien
gtagaatctctttgactttcaggcg

SEQ ID NO: 5953176 - DNA, 25 bp, Homo sapien
tgacgacgttccttggtgaagcttg

SEQ ID NO: 5953177 - DNA, 25 bp, Homo sapien
tctgaaactttgctctctataatat

SEQ ID NO: 5953178 - DNA, 25 bp, Homo sapien
ctagtgctggctttttccatcgatg

SEQ ID NO: 5953179 - DNA, 25 bp, Homo sapien
tgttcgttggcaatggctgcaaaac

SEQ ID NO: 5953180 - DNA, 25 bp, Homo sapien
gaaatccagttcttcgaccaactga

SEQ ID NO: 5953181 - DNA, 25 bp, Homo sapien
agcagccagaggccgagtttaacag

SEQ ID NO: 5953182 - DNA, 25 bp, Homo sapien
tacgacgccatagaacccacgagac

SEQ ID NO: 5953183 - DNA, 25 bp, Homo sapien
gaacccacgagacgcagcataggag

SEQ ID NO: 5953184 - DNA, 25 bp, Homo sapien
ataatgcatcttgcaaaacttccag

SEQ ID NO: 5953185 - DNA, 25 bp, Homo sapien
cgtttgtggtgttgtcgtagaatct

SEQ ID NO: 5953186 - DNA, 25 bp, Homo sapien
tgtccacggcctcatcgacagcccg

SEQ ID NO: 5953187 - DNA, 25 bp, Homo sapien
cttgaaaaacttgaatagcagccag

SEQ ID NO: 5953188 - DNA, 25 bp, Homo sapien
ctgcgggagattgcacttaattttt

SEQ ID NO: 5953189 - DNA, 25 bp, Homo sapien
acagcgtgaaattttatagcgcggt

SEQ ID NO: 5953190 - DNA, 25 bp, Homo sapien
attttccagtactttgaccaaatcg

SEQ ID NO: 5953191 - DNA, 25 bp, Homo sapien
actagacctagggtgacgagtatac

SEQ ID NO: 5953192 - DNA, 25 bp, Homo sapien
tccacggcctcatcgacagcccgct

SEQ ID NO: 5953193 - DNA, 25 bp, Homo sapien
gctttcttttctgcgggagattgca

SEQ ID NO: 5953194 - DNA, 25 bp, Homo sapien
gaattggtttgggctctcaattcat

SEQ ID NO: 5953195 - DNA, 25 bp, Homo sapien
ctcatcatgtgagacgatcctgtcc

SEQ ID NO: 5953196 - DNA, 25 bp, Homo sapien
atagcttttaactagacctagggtg

SEQ ID NO: 5953197 - DNA, 25 bp, Homo sapien
gtggctagaatgggtgcatttagca

SEQ ID NO: 5953198 - DNA, 25 bp, Homo sapien
ttgatgggaggcattttccagtact

SEQ ID NO: 5953199 - DNA, 25 bp, Homo sapien
ataatattcaccaaatcctcaaatt

SEQ ID NO: 5953200 - DNA, 25 bp, Homo sapien
tagcaatagaaccaatcgacgaatt

SEQ ID NO: 5953201 - DNA, 25 bp, Homo sapien
tccagttcttcgaccaactgagcat

SEQ ID NO: 5953202 - DNA, 25 bp, Homo sapien
aaatagacatctcgtttctcttgat

SEQ ID NO: 5953203 - DNA, 25 bp, Homo sapien
cctagggtgacgagtatacccttga

SEQ ID NO: 5953204 - DNA, 25 bp, Homo sapien
tttcttttctgcgggagattgcact

SEQ ID NO: 5953205 - DNA, 25 bp, Homo sapien
aagcttgtcgtaatccacagcgtga

SEQ ID NO: 5953206 - DNA, 25 bp, Homo sapien
tggtgttgtcgtagaatctctttga

SEQ ID NO: 5953207 - DNA, 25 bp, Homo sapien
tctctttgactttcaggcggtagca

SEQ ID NO: 5953208 - DNA, 25 bp, Homo sapien
tttaacaggtaacttgaaaatacga

SEQ ID NO: 5953209 - DNA, 25 bp, Homo sapien
caactgagcatatatgtcctcgttc

SEQ ID NO: 5953210 - DNA, 25 bp, Homo sapien
tccggactgcaaaatttgatttcct

SEQ ID NO: 5953211 - DNA, 25 bp, Homo sapien
tctcttgatgggaggcattttccag

SEQ ID NO: 5953212 - DNA, 25 bp, Homo sapien
cagtaccgattcgaaatctgaaact

SEQ ID NO: 5953213 - DNA, 25 bp, Homo sapien
ggtatttgtaggtcatttccacaat

SEQ ID NO: 5953214 - DNA, 25 bp, Homo sapien
caggtcctgcaaaaatgtcacgacc

SEQ ID NO: 5953215 - DNA, 25 bp, Homo sapien
acgatgacgacgttccttggtgaag

SEQ ID NO: 5953216 - DNA, 25 bp, Homo sapien
aacttgaaaatacgacgccatagaa

SEQ ID NO: 5953217 - DNA, 25 bp, Homo sapien
acgaaatccagttcttcgaccaact

SEQ ID NO: 5953218 - DNA, 25 bp, Homo sapien
acatctcgtttctcttgatgggagg

SEQ ID NO: 5953219 - DNA, 25 bp, Homo sapien
taacaggtaacttgaaaatacgacg

SEQ ID NO: 5953220 - DNA, 25 bp, Homo sapien
gggctctcaattcatccaaattcag

SEQ ID NO: 5953221 - DNA, 25 bp, Homo sapien
tctagggcttttttcccactgtaat

SEQ ID NO: 5953222 - DNA, 25 bp, Homo sapien
agctcatcatgtgagacgatcctgt

SEQ ID NO: 5953223 - DNA, 25 bp, Homo sapien
cgaattgagtgtacttgtcatcgat

SEQ ID NO: 5953224 - DNA, 25 bp, Homo sapien
gacgttccttggtgaagcttgtcgt

SEQ ID NO: 5953225 - DNA, 25 bp, Homo sapien
agaggacgaggagcctgcatagctt

SEQ ID NO: 5953226 - DNA, 25 bp, Homo sapien
gtgttaaggaattggtttgggctct

SEQ ID NO: 5953227 - DNA, 25 bp, Homo sapien
tcggggtatttgtaggtcatttcca

SEQ ID NO: 5953228 - DNA, 25 bp, Homo sapien
acgagacgcagcataggaggaaccc

SEQ ID NO: 5953229 - DNA, 25 bp, Homo sapien
tgtagttgtagtggctagaatgggt

SEQ ID NO: 5953230 - DNA, 25 bp, Homo sapien
tttatcaagcttcacaatatgcaac

SEQ ID NO: 5953231 - DNA, 25 bp, Homo sapien
taaaattccggactgcaaaatttga

SEQ ID NO: 5953232 - DNA, 25 bp, Homo sapien
ctcatcgacagcccgctggatacta

SEQ ID NO: 5953233 - DNA, 25 bp, Homo sapien
ttgtcatcgatttgtgttaaggaat

SEQ ID NO: 5953234 - DNA, 25 bp, Homo sapien
atggctgcaaaactgtccttattat

SEQ ID NO: 5953235 - DNA, 25 bp, Homo sapien
gcaaaactgtccttattatcatgct

SEQ ID NO: 5953236 - DNA, 25 bp, Homo sapien
ccacgagacgcagcataggaggaac

SEQ ID NO: 5953237 - DNA, 25 bp, Homo sapien
aatgcatcttgcaaaacttccaggt

SEQ ID NO: 5953238 - DNA, 25 bp, Homo sapien
gagacgatcctgtccacggcctcat

SEQ ID NO: 5953239 - DNA, 25 bp, Homo sapien
ctcgttcatttgtttatcaagcttc

SEQ ID NO: 5953240 - DNA, 25 bp, Homo sapien
tccacagaggttgctgaggatgtag

SEQ ID NO: 5953241 - DNA, 25 bp, Homo sapien
ttgctgaggatgtagttgtagtggc

SEQ ID NO: 5953242 - DNA, 25 bp, Homo sapien
gttccacagaggttgctgaggatgt

SEQ ID NO: 5953243 - DNA, 25 bp, Homo sapien
tgaccaaatcggcagttttcttgaa

SEQ ID NO: 5953244 - DNA, 25 bp, Homo sapien
gcttgaagagaggacgaggagcctg

SEQ ID NO: 5953245 - DNA, 25 bp, Homo sapien
acaatactacatttcagtaccgatt

SEQ ID NO: 5953246 - DNA, 25 bp, Homo sapien
ttttcttgaagacggtttcgaattg

SEQ ID NO: 5953247 - DNA, 25 bp, Homo sapien
gcctcatcgacagcccgctggatac

SEQ ID NO: 5953248 - DNA, 25 bp, Homo sapien
ttcagtaccgattcgaaatctgaaa

SEQ ID NO: 5953249 - DNA, 25 bp, Homo sapien
tgttttgctcaaaagcttctctcta

SEQ ID NO: 5953250 - DNA, 25 bp, Homo sapien
attgtgttcgttggcaatggctgca

SEQ ID NO: 5953251 - DNA, 25 bp, Homo sapien
accaactgagcatatatgtcctcgt

SEQ ID NO: 5953252 - DNA, 25 bp, Homo sapien
caaatcggcagttttcttgaagacg

SEQ ID NO: 5953253 - DNA, 25 bp, Homo sapien
gcaacttatcgcattgatcgtatct

SEQ ID NO: 5953254 - DNA, 25 bp, Homo sapien
cttcttcatcattgtgttcgttggc

SEQ ID NO: 5953255 - DNA, 25 bp, Homo sapien
gcgcggtctcttttctcgtcgttcc

SEQ ID NO: 5953256 - DNA, 25 bp, Homo sapien
tttgttttgctcaaaagcttctctc

SEQ ID NO: 5953257 - DNA, 25 bp, Homo sapien
ttgaagagaggacgaggagcctgca

SEQ ID NO: 5953258 - DNA, 25 bp, Homo sapien
ctctctataatattcaccaaatcct

SEQ ID NO: 5953259 - DNA, 25 bp, Homo sapien
gggagattgcacttaatttttgcaa

SEQ ID NO: 5953260 - DNA, 25 bp, Homo sapien
tttagcacaagactgggtgcttgaa

SEQ ID NO: 5953261 - DNA, 25 bp, Homo sapien
cgtcagttgttttgttttgctcaaa

SEQ ID NO: 5953262 - DNA, 25 bp, Homo sapien
tttcaggcggtagcaatagaaccaa

SEQ ID NO: 5953263 - DNA, 25 bp, Homo sapien
ctcgtttctcttgatgggaggcatt

SEQ ID NO: 5953264 - DNA, 25 bp, Homo sapien
ctagaatgggtgcatttagcacaag

SEQ ID NO: 5953265 - DNA, 25 bp, Homo sapien
tgaaattttatagcgcggtctcttt

SEQ ID NO: 5953266 - DNA, 25 bp, Homo sapien
actttcaggcggtagcaatagaacc

SEQ ID NO: 5953267 - DNA, 25 bp, Homo sapien
gtaccgattcgaaatctgaaacttt

SEQ ID NO: 5953268 - DNA, 25 bp, Homo sapien
tcttttctgcgggagattgcactta

SEQ ID NO: 5953269 - DNA, 25 bp, Homo sapien
agctaagtcacgtttgtggtgttgt

SEQ ID NO: 5953270 - DNA, 25 bp, Homo sapien
ttcatcattgtgttcgttggcaatg

SEQ ID NO: 5953271 - DNA, 25 bp, Homo sapien
ggaacccaagtgataaatagacatc

SEQ ID NO: 5953272 - DNA, 25 bp, Homo sapien
gtcacgtttgtggtgttgtcgtaga

SEQ ID NO: 5953273 - DNA, 25 bp, Homo sapien
aggtaacttgaaaatacgacgccat

SEQ ID NO: 5953274 - DNA, 25 bp, Homo sapien
gtaacttgaaaatacgacgccatag

SEQ ID NO: 5953275 - DNA, 25 bp, Homo sapien
tcagttgttttgttttgctcaaaag

SEQ ID NO: 5953276 - DNA, 25 bp, Homo sapien
acgccatagaacccacgagacgcag

SEQ ID NO: 5953277 - DNA, 25 bp, Homo sapien
cgacgaattgcaacacgaaatccag

SEQ ID NO: 5953278 - DNA, 25 bp, Homo sapien
cttgacgatgacgacgttccttggt

SEQ ID NO: 5953279 - DNA, 25 bp, Homo sapien
aggcggtagcaatagaaccaatcga

SEQ ID NO: 5953280 - DNA, 25 bp, Homo sapien
gctcaaaagcttctctctagtgctg

SEQ ID NO: 5953281 - DNA, 25 bp, Homo sapien
tgggaggcattttccagtactttga

SEQ ID NO: 5953282 - DNA, 25 bp, Homo sapien
tgtcctcgttcatttgtttatcaag

SEQ ID NO: 5953283 - DNA, 25 bp, Homo sapien
acatttcagtaccgattcgaaatct

SEQ ID NO: 5953284 - DNA, 25 bp, Homo sapien
tacaggatgataggtggcgcacttg

SEQ ID NO: 5953285 - DNA, 25 bp, Homo sapien
tggcgcacttgttgaaagtgatgtt

SEQ ID NO: 5953286 - DNA, 25 bp, Homo sapien
aagaaaccttaatacaaactgcaaa

SEQ ID NO: 5953287 - DNA, 25 bp, Homo sapien
aattttatcttactaacaatctttg

SEQ ID NO: 5953288 - DNA, 25 bp, Homo sapien
aaagacaataagattcaagtcgtta

SEQ ID NO: 5953289 - DNA, 25 bp, Homo sapien
caggatgataggtggcgcacttgtt

SEQ ID NO: 5953290 - DNA, 25 bp, Homo sapien
ttgcctattcttgaaactaagaagg

SEQ ID NO: 5953291 - DNA, 25 bp, Homo sapien
tgatgttcaaacgagtttgcctatt

SEQ ID NO: 5953292 - DNA, 25 bp, Homo sapien
acgagaaaatgttacaggatgatag

SEQ ID NO: 5953293 - DNA, 25 bp, Homo sapien
gaaaacatagaaggtacaataagta

SEQ ID NO: 5953294 - DNA, 25 bp, Homo sapien
ttaggtcatgacaaagatgaacaca

SEQ ID NO: 5953295 - DNA, 25 bp, Homo sapien
atgataggtggcgcacttgttgaaa

SEQ ID NO: 5953296 - DNA, 25 bp, Homo sapien
agtgatgttcaaacgagtttgccta

SEQ ID NO: 5953297 - DNA, 25 bp, Homo sapien
gtgttttctctgtgtatagtctttc

SEQ ID NO: 5953298 - DNA, 25 bp, Homo sapien
ttgttgaaagtgatgttcaaacgag

SEQ ID NO: 5953299 - DNA, 25 bp, Homo sapien
atgaacacactatagtcataaaaac

SEQ ID NO: 5953300 - DNA, 25 bp, Homo sapien
gaaagaaaccttaatacaaactgca

SEQ ID NO: 5953301 - DNA, 25 bp, Homo sapien
tagtcataaaaacactgaaagacgc

SEQ ID NO: 5953302 - DNA, 25 bp, Homo sapien
tactaacaatctttgtgttttctct

SEQ ID NO: 5953303 - DNA, 25 bp, Homo sapien
aggtcatgacaaagatgaacacact

SEQ ID NO: 5953304 - DNA, 25 bp, Homo sapien
cgacgagaaaatgttacaggatgat

SEQ ID NO: 5953305 - DNA, 25 bp, Homo sapien
tatagtctttcaagcaaaatataat

SEQ ID NO: 5953306 - DNA, 25 bp, Homo sapien
aaccttaatacaaactgcaaaagag

SEQ ID NO: 5953307 - DNA, 25 bp, Homo sapien
gttcaaacgagtttgcctattcttg

SEQ ID NO: 5953308 - DNA, 25 bp, Homo sapien
gttacaggatgataggtggcgcact

SEQ ID NO: 5953309 - DNA, 25 bp, Homo sapien
tcaaacgagtttgcctattcttgaa

SEQ ID NO: 5953310 - DNA, 25 bp, Homo sapien
aattaggtcatgacaaagatgaaca

SEQ ID NO: 5953311 - DNA, 25 bp, Homo sapien
tagtctttcaagcaaaatataatga

SEQ ID NO: 5953312 - DNA, 25 bp, Homo sapien
tcatagaattaggtcatgacaaaga

SEQ ID NO: 5953313 - DNA, 25 bp, Homo sapien
gagccgacgagaaaatgttacagga

SEQ ID NO: 5953314 - DNA, 25 bp, Homo sapien
gagtttgcctattcttgaaactaag

SEQ ID NO: 5953315 - DNA, 25 bp, Homo sapien
aaacgagtttgcctattcttgaaac

SEQ ID NO: 5953316 - DNA, 25 bp, Homo sapien
aaagatgaacacactatagtcataa

SEQ ID NO: 5953317 - DNA, 25 bp, Homo sapien
tgaaagtgatgttcaaacgagtttg

SEQ ID NO: 5953318 - DNA, 25 bp, Homo sapien
gataggtggcgcacttgttgaaagt

SEQ ID NO: 5953319 - DNA, 25 bp, Homo sapien
acactatagtcataaaaacactgaa

SEQ ID NO: 5953320 - DNA, 25 bp, Homo sapien
atagaattaggtcatgacaaagatg

SEQ ID NO: 5953321 - DNA, 25 bp, Homo sapien
ctttgtgttttctctgtgtatagtc

SEQ ID NO: 5953322 - DNA, 25 bp, Homo sapien
tggaagaattgcaaacaaaaatcat

SEQ ID NO: 5953323 - DNA, 25 bp, Homo sapien
atcttactaacaatctttgtgtttt

SEQ ID NO: 5953324 - DNA, 25 bp, Homo sapien
aagacgctgagccgacgagaaaatg

SEQ ID NO: 5953325 - DNA, 25 bp, Homo sapien
aggaaaacatagaaggtacaataag

SEQ ID NO: 5953326 - DNA, 25 bp, Homo sapien
ctaagaaggaaaacatagaaggtac

SEQ ID NO: 5953327 - DNA, 25 bp, Homo sapien
agatgaacacactatagtcataaaa

SEQ ID NO: 5953328 - DNA, 25 bp, Homo sapien
gttttctctgtgtatagtctttcaa

SEQ ID NO: 5953329 - DNA, 25 bp, Homo sapien
aacactgaaagacgctgagccgacg

SEQ ID NO: 5953330 - DNA, 25 bp, Homo sapien
gaaggaaaacatagaaggtacaata

SEQ ID NO: 5953331 - DNA, 25 bp, Homo sapien
taaaaacactgaaagacgctgagcc

SEQ ID NO: 5953332 - DNA, 25 bp, Homo sapien
gtctttcaagcaaaatataatgaat

SEQ ID NO: 5953333 - DNA, 25 bp, Homo sapien
tgacaaagatgaacacactatagtc

SEQ ID NO: 5953334 - DNA, 25 bp, Homo sapien
gaaaccttaatacaaactgcaaaag

SEQ ID NO: 5953335 - DNA, 25 bp, Homo sapien
ctgagccgacgagaaaatgttacag

SEQ ID NO: 5953336 - DNA, 25 bp, Homo sapien
aatcatagaattaggtcatgacaaa

SEQ ID NO: 5953337 - DNA, 25 bp, Homo sapien
acaaagatgaacacactatagtcat

SEQ ID NO: 5953338 - DNA, 25 bp, Homo sapien
aaaacactgaaagacgctgagccga

SEQ ID NO: 5953339 - DNA, 25 bp, Homo sapien
tgtatagtctttcaagcaaaatata

SEQ ID NO: 5953340 - DNA, 25 bp, Homo sapien
atgcatgtagccaattttatcttac

SEQ ID NO: 5953341 - DNA, 25 bp, Homo sapien
actatagtcataaaaacactgaaag

SEQ ID NO: 5953342 - DNA, 25 bp, Homo sapien
cataaaaacactgaaagacgctgag

SEQ ID NO: 5953343 - DNA, 25 bp, Homo sapien
caaacaaattttggaagaattgcaa

SEQ ID NO: 5953344 - DNA, 25 bp, Homo sapien
gtcatgacaaagatgaacacactat

SEQ ID NO: 5953345 - DNA, 25 bp, Homo sapien
ttttatcttactaacaatctttgtg

SEQ ID NO: 5953346 - DNA, 25 bp, Homo sapien
acttgttgaaagtgatgttcaaacg

SEQ ID NO: 5953347 - DNA, 25 bp, Homo sapien
gtcataaaaacactgaaagacgctg

SEQ ID NO: 5953348 - DNA, 25 bp, Homo sapien
acacactatagtcataaaaacactg

SEQ ID NO: 5953349 - DNA, 25 bp, Homo sapien
aaaaagacaataagattcaagtcgt

SEQ ID NO: 5953350 - DNA, 25 bp, Homo sapien
caaattttggaagaattgcaaacaa

SEQ ID NO: 5953351 - DNA, 25 bp, Homo sapien
gaaaatgttacaggatgataggtgg

SEQ ID NO: 5953352 - DNA, 25 bp, Homo sapien
gaacacactatagtcataaaaacac

SEQ ID NO: 5953353 - DNA, 25 bp, Homo sapien
agaattgcaaacaaaaatcatagaa

SEQ ID NO: 5953354 - DNA, 25 bp, Homo sapien
ccaattttatcttactaacaatctt

SEQ ID NO: 5953355 - DNA, 25 bp, Homo sapien
atgaaagaaaccttaatacaaactg

SEQ ID NO: 5953356 - DNA, 25 bp, Homo sapien
tctctgtgtatagtctttcaagcaa

SEQ ID NO: 5953357 - DNA, 25 bp, Homo sapien
aagaaggaaaacatagaaggtacaa

SEQ ID NO: 5953358 - DNA, 25 bp, Homo sapien
gttgaaagtgatgttcaaacgagtt

SEQ ID NO: 5953359 - DNA, 25 bp, Homo sapien
aacaaaaatcatagaattaggtcat

SEQ ID NO: 5953360 - DNA, 25 bp, Homo sapien
tgcaaacaaaaatcatagaattagg

SEQ ID NO: 5953361 - DNA, 25 bp, Homo sapien
aaatgttacaggatgataggtggcg

SEQ ID NO: 5953362 - DNA, 25 bp, Homo sapien
tttggaagaattgcaaacaaaaatc

SEQ ID NO: 5953363 - DNA, 25 bp, Homo sapien
catgacaaagatgaacacactatag

SEQ ID NO: 5953364 - DNA, 25 bp, Homo sapien
ctaacaatctttgtgttttctctgt

SEQ ID NO: 5953365 - DNA, 25 bp, Homo sapien
gcgcacttgttgaaagtgatgttca

SEQ ID NO: 5953366 - DNA, 25 bp, Homo sapien
aaaatcatagaattaggtcatgaca

SEQ ID NO: 5953367 - DNA, 25 bp, Homo sapien
tacaaacaaattttggaagaattgc

SEQ ID NO: 5953368 - DNA, 25 bp, Homo sapien
ggtggcgcacttgttgaaagtgatg

SEQ ID NO: 5953369 - DNA, 25 bp, Homo sapien
aaagtgatgttcaaacgagtttgcc

SEQ ID NO: 5953370 - DNA, 25 bp, Homo sapien
gaagaattgcaaacaaaaatcatag

SEQ ID NO: 5953371 - DNA, 25 bp, Homo sapien
cgctgagccgacgagaaaatgttac

SEQ ID NO: 5953372 - DNA, 25 bp, Homo sapien
atgtagccaattttatcttactaac

SEQ ID NO: 5953373 - DNA, 25 bp, Homo sapien
ataagattcaagtcgttaaaaacta

SEQ ID NO: 5953374 - DNA, 25 bp, Homo sapien
gccgacgagaaaatgttacaggatg

SEQ ID NO: 5953375 - DNA, 25 bp, Homo sapien
gtttgcctattcttgaaactaagaa

SEQ ID NO: 5953376 - DNA, 25 bp, Homo sapien
agacaataagattcaagtcgttaaa

SEQ ID NO: 5953377 - DNA, 25 bp, Homo sapien
tttctctgtgtatagtctttcaagc

SEQ ID NO: 5953378 - DNA, 25 bp, Homo sapien
atgttcaaacgagtttgcctattct

SEQ ID NO: 5953379 - DNA, 25 bp, Homo sapien
atgttacaggatgataggtggcgca

SEQ ID NO: 5953380 - DNA, 25 bp, Homo sapien
tgtgtatagtctttcaagcaaaata

SEQ ID NO: 5953381 - DNA, 25 bp, Homo sapien
gcatgtagccaattttatcttacta

SEQ ID NO: 5953382 - DNA, 25 bp, Homo sapien
attgcaaacaaaaatcatagaatta

SEQ ID NO: 5953383 - DNA, 25 bp, Homo sapien
gacgctgagccgacgagaaaatgtt

SEQ ID NO: 5953384 - DNA, 25 bp, Homo sapien
ctgaaagacgctgagccgacgagaa

SEQ ID NO: 5953385 - DNA, 25 bp, Homo sapien
gaaagacgctgagccgacgagaaaa

SEQ ID NO: 5953386 - DNA, 25 bp, Homo sapien
cttactaacaatctttgtgttttct

SEQ ID NO: 5953387 - DNA, 25 bp, Homo sapien
tctgtgtatagtctttcaagcaaaa

SEQ ID NO: 5953388 - DNA, 25 bp, Homo sapien
cactgaaagacgctgagccgacgag

SEQ ID NO: 5953389 - DNA, 25 bp, Homo sapien
aacaaattttggaagaattgcaaac

SEQ ID NO: 5953390 - DNA, 25 bp, Homo sapien
aacaatctttgtgttttctctgtgt

SEQ ID NO: 5953391 - DNA, 25 bp, Homo sapien
gcacttgttgaaagtgatgttcaaa

SEQ ID NO: 5953392 - DNA, 25 bp, Homo sapien
ttatcttactaacaatctttgtgtt

SEQ ID NO: 5953393 - DNA, 25 bp, Homo sapien
gcctattcttgaaactaagaaggaa

SEQ ID NO: 5953394 - DNA, 25 bp, Homo sapien
gaatacaaacaaattttggaagaat

SEQ ID NO: 5953395 - DNA, 25 bp, Homo sapien
ttgtgttttctctgtgtatagtctt

SEQ ID NO: 5953396 - DNA, 25 bp, Homo sapien
gagaaaatgttacaggatgataggt

SEQ ID NO: 5953397 - DNA, 25 bp, Homo sapien
tatagtcataaaaacactgaaagac

SEQ ID NO: 5953398 - DNA, 25 bp, Homo sapien
ggatgataggtggcgcacttgttga

SEQ ID NO: 5953399 - DNA, 25 bp, Homo sapien
gtagccaattttatcttactaacaa

SEQ ID NO: 5953400 - DNA, 25 bp, Homo sapien
acaataagattcaagtcgttaaaaa

SEQ ID NO: 5953401 - DNA, 25 bp, Homo sapien
caatctttgtgttttctctgtgtat

SEQ ID NO: 5953402 - DNA, 25 bp, Homo sapien
ccttaatacaaactgcaaaagagtt

SEQ ID NO: 5953403 - DNA, 25 bp, Homo sapien
taggtggcgcacttgttgaaagtga

SEQ ID NO: 5953404 - DNA, 25 bp, Homo sapien
acgagtttgcctattcttgaaacta

SEQ ID NO: 5953405 - DNA, 25 bp, Homo sapien
agccaattttatcttactaacaatc

SEQ ID NO: 5953406 - DNA, 25 bp, Homo sapien
atctttgtgttttctctgtgtatag

SEQ ID NO: 5953407 - DNA, 25 bp, Homo sapien
caaaaatcatagaattaggtcatga

SEQ ID NO: 5953408 - DNA, 25 bp, Homo sapien
caaacaaaaatcatagaattaggtc

SEQ ID NO: 5953409 - DNA, 25 bp, Homo sapien
agaattaggtcatgacaaagatgaa

SEQ ID NO: 5953410 - DNA, 25 bp, Homo sapien
ctatacacagagaaaacacaaagat

SEQ ID NO: 5953411 - DNA, 25 bp, Homo sapien
catcctgtaacattttctcgtcggc

SEQ ID NO: 5953412 - DNA, 25 bp, Homo sapien
ctcgtcggctcagcgtctttcagtg

SEQ ID NO: 5953413 - DNA, 25 bp, Homo sapien
taggcaaactcgtttgaacatcact

SEQ ID NO: 5953414 - DNA, 25 bp, Homo sapien
cgtttgaacatcactttcaacaagt

SEQ ID NO: 5953415 - DNA, 25 bp, Homo sapien
acgacttgaatcttattgtcttttt

SEQ ID NO: 5953416 - DNA, 25 bp, Homo sapien
ttcatctttgtcatgacctaattct

SEQ ID NO: 5953417 - DNA, 25 bp, Homo sapien
tgaacatcactttcaacaagtgcgc

SEQ ID NO: 5953418 - DNA, 25 bp, Homo sapien
tttttaacgacttgaatcttattgt

SEQ ID NO: 5953419 - DNA, 25 bp, Homo sapien
tttgcagtttgtattaaggtttctt

SEQ ID NO: 5953420 - DNA, 25 bp, Homo sapien
tcatgacctaattctatgatttttg

SEQ ID NO: 5953421 - DNA, 25 bp, Homo sapien
cttagtttcaagaataggcaaactc

SEQ ID NO: 5953422 - DNA, 25 bp, Homo sapien
tattttgcttgaaagactatacaca

SEQ ID NO: 5953423 - DNA, 25 bp, Homo sapien
agtgtgttcatctttgtcatgacct

SEQ ID NO: 5953424 - DNA, 25 bp, Homo sapien
tagtttcaagaataggcaaactcgt

SEQ ID NO: 5953425 - DNA, 25 bp, Homo sapien
aacatcactttcaacaagtgcgcca

SEQ ID NO: 5953426 - DNA, 25 bp, Homo sapien
ctcgtttgaacatcactttcaacaa

SEQ ID NO: 5953427 - DNA, 25 bp, Homo sapien
ttttctcgtcggctcagcgtctttc

SEQ ID NO: 5953428 - DNA, 25 bp, Homo sapien
ccttcttagtttcaagaataggcaa

SEQ ID NO: 5953429 - DNA, 25 bp, Homo sapien
gtaagataaaattggctacatgcat

SEQ ID NO: 5953430 - DNA, 25 bp, Homo sapien
gtttcaagaataggcaaactcgttt

SEQ ID NO: 5953431 - DNA, 25 bp, Homo sapien
taattctatgatttttgtttgcaat

SEQ ID NO: 5953432 - DNA, 25 bp, Homo sapien
tttgtcatgacctaattctatgatt

SEQ ID NO: 5953433 - DNA, 25 bp, Homo sapien
agaaaacacaaagattgttagtaag

SEQ ID NO: 5953434 - DNA, 25 bp, Homo sapien
ttctcgtcggctcagcgtctttcag

SEQ ID NO: 5953435 - DNA, 25 bp, Homo sapien
tcggctcagcgtctttcagtgtttt

SEQ ID NO: 5953436 - DNA, 25 bp, Homo sapien
gacctaattctatgatttttgtttg

SEQ ID NO: 5953437 - DNA, 25 bp, Homo sapien
ttcttagtttcaagaataggcaaac

SEQ ID NO: 5953438 - DNA, 25 bp, Homo sapien
ttcagtgtttttatgactatagtgt

SEQ ID NO: 5953439 - DNA, 25 bp, Homo sapien
ggcaaactcgtttgaacatcacttt

SEQ ID NO: 5953440 - DNA, 25 bp, Homo sapien
ctttcagtgtttttatgactatagt

SEQ ID NO: 5953441 - DNA, 25 bp, Homo sapien
cagtttgtattaaggtttctttcat

SEQ ID NO: 5953442 - DNA, 25 bp, Homo sapien
atacacagagaaaacacaaagattg

SEQ ID NO: 5953443 - DNA, 25 bp, Homo sapien
caagaataggcaaactcgtttgaac

SEQ ID NO: 5953444 - DNA, 25 bp, Homo sapien
tgtcatgacctaattctatgatttt

SEQ ID NO: 5953445 - DNA, 25 bp, Homo sapien
ctatcatcctgtaacattttctcgt

SEQ ID NO: 5953446 - DNA, 25 bp, Homo sapien
atagtgtgttcatctttgtcatgac

SEQ ID NO: 5953447 - DNA, 25 bp, Homo sapien
acacagagaaaacacaaagattgtt

SEQ ID NO: 5953448 - DNA, 25 bp, Homo sapien
tagtttttaacgacttgaatcttat

SEQ ID NO: 5953449 - DNA, 25 bp, Homo sapien
tagtaagataaaattggctacatgc

SEQ ID NO: 5953450 - DNA, 25 bp, Homo sapien
ctatgatttttgtttgcaattcttc

SEQ ID NO: 5953451 - DNA, 25 bp, Homo sapien
tcctgtaacattttctcgtcggctc

SEQ ID NO: 5953452 - DNA, 25 bp, Homo sapien
tttcaacaagtgcgccacctatcat

SEQ ID NO: 5953453 - DNA, 25 bp, Homo sapien
tgcagtttgtattaaggtttctttc

SEQ ID NO: 5953454 - DNA, 25 bp, Homo sapien
cttattgtaccttctatgttttcct

SEQ ID NO: 5953455 - DNA, 25 bp, Homo sapien
ttccttcttagtttcaagaataggc

SEQ ID NO: 5953456 - DNA, 25 bp, Homo sapien
gcgtctttcagtgtttttatgacta

SEQ ID NO: 5953457 - DNA, 25 bp, Homo sapien
tcactttcaacaagtgcgccaccta

SEQ ID NO: 5953458 - DNA, 25 bp, Homo sapien
cagcgtctttcagtgtttttatgac

SEQ ID NO: 5953459 - DNA, 25 bp, Homo sapien
gaaagactatacacagagaaaacac

SEQ ID NO: 5953460 - DNA, 25 bp, Homo sapien
cattttctcgtcggctcagcgtctt

SEQ ID NO: 5953461 - DNA, 25 bp, Homo sapien
tctttgtcatgacctaattctatga

SEQ ID NO: 5953462 - DNA, 25 bp, Homo sapien
aacacaaagattgttagtaagataa

SEQ ID NO: 5953463 - DNA, 25 bp, Homo sapien
aataggcaaactcgtttgaacatca

SEQ ID NO: 5953464 - DNA, 25 bp, Homo sapien
atgactatagtgtgttcatctttgt

SEQ ID NO: 5953465 - DNA, 25 bp, Homo sapien
attatattttgcttgaaagactata

SEQ ID NO: 5953466 - DNA, 25 bp, Homo sapien
gtttgcaattcttccaaaatttgtt

SEQ ID NO: 5953467 - DNA, 25 bp, Homo sapien
caaagattgttagtaagataaaatt

SEQ ID NO: 5953468 - DNA, 25 bp, Homo sapien
attcttccaaaatttgtttgtattc

SEQ ID NO: 5953469 - DNA, 25 bp, Homo sapien
ttttgcttgaaagactatacacaga

SEQ ID NO: 5953470 - DNA, 25 bp, Homo sapien
caaactcgtttgaacatcactttca

SEQ ID NO: 5953471 - DNA, 25 bp, Homo sapien
catcactttcaacaagtgcgccacc

SEQ ID NO: 5953472 - DNA, 25 bp, Homo sapien
gtaacattttctcgtcggctcagcg

SEQ ID NO: 5953473 - DNA, 25 bp, Homo sapien
aagattgttagtaagataaaattgg

SEQ ID NO: 5953474 - DNA, 25 bp, Homo sapien
cgccacctatcatcctgtaacattt

SEQ ID NO: 5953475 - DNA, 25 bp, Homo sapien
gtttttatgactatagtgtgttcat

SEQ ID NO: 5953476 - DNA, 25 bp, Homo sapien
gtctttcagtgtttttatgactata

SEQ ID NO: 5953477 - DNA, 25 bp, Homo sapien
ttcaagaataggcaaactcgtttga

SEQ ID NO: 5953478 - DNA, 25 bp, Homo sapien
tacttattgtaccttctatgttttc

SEQ ID NO: 5953479 - DNA, 25 bp, Homo sapien
ttatgactatagtgtgttcatcttt

SEQ ID NO: 5953480 - DNA, 25 bp, Homo sapien
tttgaacatcactttcaacaagtgc

SEQ ID NO: 5953481 - DNA, 25 bp, Homo sapien
aactcgtttgaacatcactttcaac

SEQ ID NO: 5953482 - DNA, 25 bp, Homo sapien
aagactatacacagagaaaacacaa

SEQ ID NO: 5953483 - DNA, 25 bp, Homo sapien
ttgaaagactatacacagagaaaac

SEQ ID NO: 5953484 - DNA, 25 bp, Homo sapien
agagaaaacacaaagattgttagta

SEQ ID NO: 5953485 - DNA, 25 bp, Homo sapien
ctatagtgtgttcatctttgtcatg

SEQ ID NO: 5953486 - DNA, 25 bp, Homo sapien
aactcttttgcagtttgtattaagg

SEQ ID NO: 5953487 - DNA, 25 bp, Homo sapien
ggctcagcgtctttcagtgttttta

SEQ ID NO: 5953488 - DNA, 25 bp, Homo sapien
ttgcttgaaagactatacacagaga

SEQ ID NO: 5953489 - DNA, 25 bp, Homo sapien
agtgcgccacctatcatcctgtaac

SEQ ID NO: 5953490 - DNA, 25 bp, Homo sapien
cagtgtttttatgactatagtgtgt

SEQ ID NO: 5953491 - DNA, 25 bp, Homo sapien
taacgacttgaatcttattgtcttt

SEQ ID NO: 5953492 - DNA, 25 bp, Homo sapien
tatattttgcttgaaagactataca

SEQ ID NO: 5953493 - DNA, 25 bp, Homo sapien
tttaacgacttgaatcttattgtct

SEQ ID NO: 5953494 - DNA, 25 bp, Homo sapien
gatttttgtttgcaattcttccaaa

SEQ ID NO: 5953495 - DNA, 25 bp, Homo sapien
ttgtaccttctatgttttccttctt

SEQ ID NO: 5953496 - DNA, 25 bp, Homo sapien
acagagaaaacacaaagattgttag

SEQ ID NO: 5953497 - DNA, 25 bp, Homo sapien
gtaccttctatgttttccttcttag

SEQ ID NO: 5953498 - DNA, 25 bp, Homo sapien
gactatacacagagaaaacacaaag

SEQ ID NO: 5953499 - DNA, 25 bp, Homo sapien
gactatagtgtgttcatctttgtca

SEQ ID NO: 5953500 - DNA, 25 bp, Homo sapien
ttgttagtaagataaaattggctac

SEQ ID NO: 5953501 - DNA, 25 bp, Homo sapien
agaataggcaaactcgtttgaacat

SEQ ID NO: 5953502 - DNA, 25 bp, Homo sapien
atcatcctgtaacattttctcgtcg

SEQ ID NO: 5953503 - DNA, 25 bp, Homo sapien
actttcaacaagtgcgccacctatc

SEQ ID NO: 5953504 - DNA, 25 bp, Homo sapien
gcttgaaagactatacacagagaaa

SEQ ID NO: 5953505 - DNA, 25 bp, Homo sapien
aacaagtgcgccacctatcatcctg

SEQ ID NO: 5953506 - DNA, 25 bp, Homo sapien
tgttcatctttgtcatgacctaatt

SEQ ID NO: 5953507 - DNA, 25 bp, Homo sapien
tcattatattttgcttgaaagacta

SEQ ID NO: 5953508 - DNA, 25 bp, Homo sapien
caagtgcgccacctatcatcctgta

SEQ ID NO: 5953509 - DNA, 25 bp, Homo sapien
ttgcaattcttccaaaatttgtttg

SEQ ID NO: 5953510 - DNA, 25 bp, Homo sapien
gttagtaagataaaattggctacat

SEQ ID NO: 5953511 - DNA, 25 bp, Homo sapien
tcaacaagtgcgccacctatcatcc

SEQ ID NO: 5953512 - DNA, 25 bp, Homo sapien
ttgtttgcaattcttccaaaatttg

SEQ ID NO: 5953513 - DNA, 25 bp, Homo sapien
cctaattctatgatttttgtttgca

SEQ ID NO: 5953514 - DNA, 25 bp, Homo sapien
ctcttttgcagtttgtattaaggtt

SEQ ID NO: 5953515 - DNA, 25 bp, Homo sapien
atgacctaattctatgatttttgtt

SEQ ID NO: 5953516 - DNA, 25 bp, Homo sapien
gtgtttttatgactatagtgtgttc

SEQ ID NO: 5953517 - DNA, 25 bp, Homo sapien
acctatcatcctgtaacattttctc

SEQ ID NO: 5953518 - DNA, 25 bp, Homo sapien
atgatttttgtttgcaattcttcca

SEQ ID NO: 5953519 - DNA, 25 bp, Homo sapien
gattgttagtaagataaaattggct

SEQ ID NO: 5953520 - DNA, 25 bp, Homo sapien
ttttatgactatagtgtgttcatct

SEQ ID NO: 5953521 - DNA, 25 bp, Homo sapien
tgtgttcatctttgtcatgacctaa

SEQ ID NO: 5953522 - DNA, 25 bp, Homo sapien
attcattatattttgcttgaaagac

SEQ ID NO: 5953523 - DNA, 25 bp, Homo sapien
cgtcggctcagcgtctttcagtgtt

SEQ ID NO: 5953524 - DNA, 25 bp, Homo sapien
cacaaagattgttagtaagataaaa

SEQ ID NO: 5953525 - DNA, 25 bp, Homo sapien
catctttgtcatgacctaattctat

SEQ ID NO: 5953526 - DNA, 25 bp, Homo sapien
tgcgccacctatcatcctgtaacat

SEQ ID NO: 5953527 - DNA, 25 bp, Homo sapien
ctgtaacattttctcgtcggctcag

SEQ ID NO: 5953528 - DNA, 25 bp, Homo sapien
ttctatgatttttgtttgcaattct

SEQ ID NO: 5953529 - DNA, 25 bp, Homo sapien
tattgtaccttctatgttttccttc

SEQ ID NO: 5953530 - DNA, 25 bp, Homo sapien
ccacctatcatcctgtaacattttc

SEQ ID NO: 5953531 - DNA, 25 bp, Homo sapien
cttttgcagtttgtattaaggtttc

SEQ ID NO: 5953532 - DNA, 25 bp, Homo sapien
gcaattcttccaaaatttgtttgta

SEQ ID NO: 5953533 - DNA, 25 bp, Homo sapien
ctcagcgtctttcagtgtttttatg

SEQ ID NO: 5953534 - DNA, 25 bp, Homo sapien
aaaacacaaagattgttagtaagat

SEQ ID NO: 5953535 - DNA, 25 bp, Homo sapien
aacattttctcgtcggctcagcgtc

SEQ ID NO: 5953536 - DNA, 25 bp, Homo sapien
gggaggaatcaacatgattgggaat

SEQ ID NO: 5953537 - DNA, 25 bp, Homo sapien
aactattgaaattatacagagatac

SEQ ID NO: 5953538 - DNA, 25 bp, Homo sapien
attgaaattatacagagataccgtt

SEQ ID NO: 5953539 - DNA, 25 bp, Homo sapien
catgcaaatgctggcaaaagtggat

SEQ ID NO: 5953540 - DNA, 25 bp, Homo sapien
ctgggcatcaacgatatcctgacca

SEQ ID NO: 5953541 - DNA, 25 bp, Homo sapien
acaagtgcagtttgaattggatgat

SEQ ID NO: 5953542 - DNA, 25 bp, Homo sapien
atgatatcgagaagctccttgacga

SEQ ID NO: 5953543 - DNA, 25 bp, Homo sapien
tgctggtaccagtgctactataact

SEQ ID NO: 5953544 - DNA, 25 bp, Homo sapien
ggaattttcagaagctattcaagag

SEQ ID NO: 5953545 - DNA, 25 bp, Homo sapien
acttagtctacacggtttggaaatg

SEQ ID NO: 5953546 - DNA, 25 bp, Homo sapien
tgctactataactacgactacgcca

SEQ ID NO: 5953547 - DNA, 25 bp, Homo sapien
cttcgaatatcgctagtcaagttga

SEQ ID NO: 5953548 - DNA, 25 bp, Homo sapien
gtgcagtttgaattggatgatacgg

SEQ ID NO: 5953549 - DNA, 25 bp, Homo sapien
aacgagctgacaaatttaagaaggc

SEQ ID NO: 5953550 - DNA, 25 bp, Homo sapien
ttggctagacaagtgcagtttgaat

SEQ ID NO: 5953551 - DNA, 25 bp, Homo sapien
cgcattcaatggacccaaaaagaga

SEQ ID NO: 5953552 - DNA, 25 bp, Homo sapien
aaaagtacgatcgattcaagaaaac

SEQ ID NO: 5953553 - DNA, 25 bp, Homo sapien
ttcagaagctattcaagagtcccga

SEQ ID NO: 5953554 - DNA, 25 bp, Homo sapien
ttggaaatgcatgatatcgagaagc

SEQ ID NO: 5953555 - DNA, 25 bp, Homo sapien
caaatgctggcaaaagtggatctgc

SEQ ID NO: 5953556 - DNA, 25 bp, Homo sapien
tcaagttgactaacgaaatacaaaa

SEQ ID NO: 5953557 - DNA, 25 bp, Homo sapien
actataactacgactacgccacaca

SEQ ID NO: 5953558 - DNA, 25 bp, Homo sapien
gttgactaacgaaatacaaaacaat

SEQ ID NO: 5953559 - DNA, 25 bp, Homo sapien
ggctagacaagtgcagtttgaattg

SEQ ID NO: 5953560 - DNA, 25 bp, Homo sapien
atggtagcattatcaagaatgagat

SEQ ID NO: 5953561 - DNA, 25 bp, Homo sapien
aaatggaaacaggaaactgggcatc

SEQ ID NO: 5953562 - DNA, 25 bp, Homo sapien
tacggtgcagttcatgagaagagca

SEQ ID NO: 5953563 - DNA, 25 bp, Homo sapien
gcagttcatgagaagagcactagag

SEQ ID NO: 5953564 - DNA, 25 bp, Homo sapien
tacgactacgccacacatggcgcat

SEQ ID NO: 5953565 - DNA, 25 bp, Homo sapien
actggaaattggctagacaagtgca

SEQ ID NO: 5953566 - DNA, 25 bp, Homo sapien
taccagtgctactataactacgact

SEQ ID NO: 5953567 - DNA, 25 bp, Homo sapien
tcgaacaaataaggatgatggagga

SEQ ID NO: 5953568 - DNA, 25 bp, Homo sapien
aaaactattgaaattatacagagat

SEQ ID NO: 5953569 - DNA, 25 bp, Homo sapien
cacactttaatttccaacaagaatg

SEQ ID NO: 5953570 - DNA, 25 bp, Homo sapien
taactacgactacgccacacatggc

SEQ ID NO: 5953571 - DNA, 25 bp, Homo sapien
tccaacaagaatgaagaactggtta

SEQ ID NO: 5953572 - DNA, 25 bp, Homo sapien
gataccgttctgaataaattggaaa

SEQ ID NO: 5953573 - DNA, 25 bp, Homo sapien
caacttagtctacacggtttggaaa

SEQ ID NO: 5953574 - DNA, 25 bp, Homo sapien
aatttgctaatcaacgagctgacaa

SEQ ID NO: 5953575 - DNA, 25 bp, Homo sapien
atgatacggtgcagttcatgagaag

SEQ ID NO: 5953576 - DNA, 25 bp, Homo sapien
gaccatagttaagaatttattccca

SEQ ID NO: 5953577 - DNA, 25 bp, Homo sapien
tacacactttaatttccaacaagaa

SEQ ID NO: 5953578 - DNA, 25 bp, Homo sapien
cgactggaaattggctagacaagtg

SEQ ID NO: 5953579 - DNA, 25 bp, Homo sapien
actacgactacgccacacatggcgc

SEQ ID NO: 5953580 - DNA, 25 bp, Homo sapien
atcgctagtcaagttgactaacgaa

SEQ ID NO: 5953581 - DNA, 25 bp, Homo sapien
gatatcgagaagctccttgacgaaa

SEQ ID NO: 5953582 - DNA, 25 bp, Homo sapien
aagcaacgtggcaaatggaaacagg

SEQ ID NO: 5953583 - DNA, 25 bp, Homo sapien
ggaaacaggaaactgggcatcaacg

SEQ ID NO: 5953584 - DNA, 25 bp, Homo sapien
accacatgcaaatgctggcaaaagt

SEQ ID NO: 5953585 - DNA, 25 bp, Homo sapien
atgcatgatatcgagaagctccttg

SEQ ID NO: 5953586 - DNA, 25 bp, Homo sapien
ctattgaaattatacagagataccg

SEQ ID NO: 5953587 - DNA, 25 bp, Homo sapien
acgatatcctgaccatagttaagaa

SEQ ID NO: 5953588 - DNA, 25 bp, Homo sapien
tggtagtgttgcagctaatacacac

SEQ ID NO: 5953589 - DNA, 25 bp, Homo sapien
ttcaatggacccaaaaagagaaaaa

SEQ ID NO: 5953590 - DNA, 25 bp, Homo sapien
gagaagctccttgacgaaaagtacg

SEQ ID NO: 5953591 - DNA, 25 bp, Homo sapien
aagagcataacggacggtgtaatgc

SEQ ID NO: 5953592 - DNA, 25 bp, Homo sapien
gaggatgagatattgaagaacggta

SEQ ID NO: 5953593 - DNA, 25 bp, Homo sapien
cccggcagcgttcatgaactgcagc

SEQ ID NO: 5953594 - DNA, 25 bp, Homo sapien
atttattcccagagtacagaacaac

SEQ ID NO: 5953595 - DNA, 25 bp, Homo sapien
caacaagaatgaagaactggttagg

SEQ ID NO: 5953596 - DNA, 25 bp, Homo sapien
ggaatcaacatgattgggaataatc

SEQ ID NO: 5953597 - DNA, 25 bp, Homo sapien
cattggtacggacgactggaaattg

SEQ ID NO: 5953598 - DNA, 25 bp, Homo sapien
atcaacgatatcctgaccatagtta

SEQ ID NO: 5953599 - DNA, 25 bp, Homo sapien
gtcattggtacggacgactggaaat

SEQ ID NO: 5953600 - DNA, 25 bp, Homo sapien
aaacaggaaactgggcatcaacgat

SEQ ID NO: 5953601 - DNA, 25 bp, Homo sapien
gtgaattggtagtgttgcagctaat

SEQ ID NO: 5953602 - DNA, 25 bp, Homo sapien
cgctagtcaagttgactaacgaaat

SEQ ID NO: 5953603 - DNA, 25 bp, Homo sapien
catgaactgcagctgattcttcaaa

SEQ ID NO: 5953604 - DNA, 25 bp, Homo sapien
aaacaatttgctaatcaacgagctg

SEQ ID NO: 5953605 - DNA, 25 bp, Homo sapien
gatattgaagaacggtataaagacc

SEQ ID NO: 5953606 - DNA, 25 bp, Homo sapien
aaagaggtaagtgaattggtagtgt

SEQ ID NO: 5953607 - DNA, 25 bp, Homo sapien
gaaattggctagacaagtgcagttt

SEQ ID NO: 5953608 - DNA, 25 bp, Homo sapien
aggtcattggtacggacgactggaa

SEQ ID NO: 5953609 - DNA, 25 bp, Homo sapien
gaattggtagtgttgcagctaatac

SEQ ID NO: 5953610 - DNA, 25 bp, Homo sapien
gaaaaactattgaaattatacagag

SEQ ID NO: 5953611 - DNA, 25 bp, Homo sapien
ttattcccagagtacagaacaacac

SEQ ID NO: 5953612 - DNA, 25 bp, Homo sapien
aaactgggaattttcagaagctatt

SEQ ID NO: 5953613 - DNA, 25 bp, Homo sapien
cgactacgccacacatggcgcattc

SEQ ID NO: 5953614 - DNA, 25 bp, Homo sapien
tcccagagtacagaacaacactaaa

SEQ ID NO: 5953615 - DNA, 25 bp, Homo sapien
gcatcgcaactgcaaccacatgcaa

SEQ ID NO: 5953616 - DNA, 25 bp, Homo sapien
tcgagaagctccttgacgaaaagta

SEQ ID NO: 5953617 - DNA, 25 bp, Homo sapien
aattggatgatacggtgcagttcat

SEQ ID NO: 5953618 - DNA, 25 bp, Homo sapien
ggatgagatattgaagaacggtata

SEQ ID NO: 5953619 - DNA, 25 bp, Homo sapien
cgaaaagtacgatcgattcaagaaa

SEQ ID NO: 5953620 - DNA, 25 bp, Homo sapien
taacgaaatacaaaacaatttgcta

SEQ ID NO: 5953621 - DNA, 25 bp, Homo sapien
ttaatttccaacaagaatgaagaac

SEQ ID NO: 5953622 - DNA, 25 bp, Homo sapien
agtacagaacaacactaaacgatgg

SEQ ID NO: 5953623 - DNA, 25 bp, Homo sapien
tacagaacaacactaaacgatggac

SEQ ID NO: 5953624 - DNA, 25 bp, Homo sapien
aaataaggatgatggaggatgagat

SEQ ID NO: 5953625 - DNA, 25 bp, Homo sapien
cgcccggcagcgttcatgaactgca

SEQ ID NO: 5953626 - DNA, 25 bp, Homo sapien
aataatcttcgaatatcgctagtca

SEQ ID NO: 5953627 - DNA, 25 bp, Homo sapien
accggtgcatcgcaactgcaaccac

SEQ ID NO: 5953628 - DNA, 25 bp, Homo sapien
ctgaccatagttaagaatttattcc

SEQ ID NO: 5953629 - DNA, 25 bp, Homo sapien
ctaatacacactttaatttccaaca

SEQ ID NO: 5953630 - DNA, 25 bp, Homo sapien
ccagagtacagaacaacactaaacg

SEQ ID NO: 5953631 - DNA, 25 bp, Homo sapien
tgcaaccacatgcaaatgctggcaa

SEQ ID NO: 5953632 - DNA, 25 bp, Homo sapien
caagaatgagataaattacgaagac

SEQ ID NO: 5953633 - DNA, 25 bp, Homo sapien
agtctacacggtttggaaatgcatg

SEQ ID NO: 5953634 - DNA, 25 bp, Homo sapien
ccttgacgaaaagtacgatcgattc

SEQ ID NO: 5953635 - DNA, 25 bp, Homo sapien
aatcaacgagctgacaaatttaaga

SEQ ID NO: 5953636 - DNA, 25 bp, Homo sapien
ataaagaacgaaacgcccggcagcg

SEQ ID NO: 5953637 - DNA, 25 bp, Homo sapien
ggatgatggaggatgagatattgaa

SEQ ID NO: 5953638 - DNA, 25 bp, Homo sapien
gaaatacaaaacaatttgctaatca

SEQ ID NO: 5953639 - DNA, 25 bp, Homo sapien
agtgttgcagctaatacacacttta

SEQ ID NO: 5953640 - DNA, 25 bp, Homo sapien
gaaacgcccggcagcgttcatgaac

SEQ ID NO: 5953641 - DNA, 25 bp, Homo sapien
gtagtgttgcagctaatacacactt

SEQ ID NO: 5953642 - DNA, 25 bp, Homo sapien
ggaaatgcatgatatcgagaagctc

SEQ ID NO: 5953643 - DNA, 25 bp, Homo sapien
gaatttattcccagagtacagaaca

SEQ ID NO: 5953644 - DNA, 25 bp, Homo sapien
tataactacgactacgccacacatg

SEQ ID NO: 5953645 - DNA, 25 bp, Homo sapien
agtttgaattggatgatacggtgca

SEQ ID NO: 5953646 - DNA, 25 bp, Homo sapien
gcagctgattcttcaaaagagcata

SEQ ID NO: 5953647 - DNA, 25 bp, Homo sapien
cggtttggaaatgcatgatatcgag

SEQ ID NO: 5953648 - DNA, 25 bp, Homo sapien
aagaatttattcccagagtacagaa

SEQ ID NO: 5953649 - DNA, 25 bp, Homo sapien
ctggcaaaagtggatctgctggtac

SEQ ID NO: 5953650 - DNA, 25 bp, Homo sapien
cccgatggtagcattatcaagaatg

SEQ ID NO: 5953651 - DNA, 25 bp, Homo sapien
agctgattcttcaaaagagcataac

SEQ ID NO: 5953652 - DNA, 25 bp, Homo sapien
tgctaatcaacgagctgacaaattt

SEQ ID NO: 5953653 - DNA, 25 bp, Homo sapien
aattggctagacaagtgcagtttga

SEQ ID NO: 5953654 - DNA, 25 bp, Homo sapien
tacggacgactggaaattggctaga

SEQ ID NO: 5953655 - DNA, 25 bp, Homo sapien
attatacagagataccgttctgaat

SEQ ID NO: 5953656 - DNA, 25 bp, Homo sapien
aaaggtcattggtacggacgactgg

SEQ ID NO: 5953657 - DNA, 25 bp, Homo sapien
ctggtaccagtgctactataactac

SEQ ID NO: 5953658 - DNA, 25 bp, Homo sapien
ctactataactacgactacgccaca

SEQ ID NO: 5953659 - DNA, 25 bp, Homo sapien
aacgtggcaaatggaaacaggaaac

SEQ ID NO: 5953660 - DNA, 25 bp, Homo sapien
agtgctactataactacgactacgc

SEQ ID NO: 5953661 - DNA, 25 bp, Homo sapien
tgaaattatacagagataccgttct

SEQ ID NO: 5953662 - DNA, 25 bp, Homo sapien
ctagtcaagttgactaacgaaatac

SEQ ID NO: 5953663 - DNA, 25 bp, Homo sapien
cgcaactgcaaccacatgcaaatgc

SEQ ID NO: 5953664 - DNA, 25 bp, Homo sapien
gcagtttgaattggatgatacggtg

SEQ ID NO: 5953665 - DNA, 25 bp, Homo sapien
ttaagaatttattcccagagtacag

SEQ ID NO: 5953666 - DNA, 25 bp, Homo sapien
actgggaattttcagaagctattca

SEQ ID NO: 5953667 - DNA, 25 bp, Homo sapien
agataaattacgaagacataaagaa

SEQ ID NO: 5953668 - DNA, 25 bp, Homo sapien
gtataaagaccggtgcatcgcaact

SEQ ID NO: 5953669 - DNA, 25 bp, Homo sapien
atatcgctagtcaagttgactaacg

SEQ ID NO: 5953670 - DNA, 25 bp, Homo sapien
tcaagagtcccgatggtagcattat

SEQ ID NO: 5953671 - DNA, 25 bp, Homo sapien
aacgcaggtcgaacaaataaggatg

SEQ ID NO: 5953672 - DNA, 25 bp, Homo sapien
atgatggaggatgagatattgaaga

SEQ ID NO: 5953673 - DNA, 25 bp, Homo sapien
tttccaacaagaatgaagaactggt

SEQ ID NO: 5953674 - DNA, 25 bp, Homo sapien
ggcgcattcaatggacccaaaaaga

SEQ ID NO: 5953675 - DNA, 25 bp, Homo sapien
ttgacgaaaagtacgatcgattcaa

SEQ ID NO: 5953676 - DNA, 25 bp, Homo sapien
tttgctaatcaacgagctgacaaat

SEQ ID NO: 5953677 - DNA, 25 bp, Homo sapien
ttggatgatacggtgcagttcatga

SEQ ID NO: 5953678 - DNA, 25 bp, Homo sapien
tttaagaaggcaaagcaacgtggca

SEQ ID NO: 5953679 - DNA, 25 bp, Homo sapien
ctaatcaacgagctgacaaatttaa

SEQ ID NO: 5953680 - DNA, 25 bp, Homo sapien
cacatgcaaatgctggcaaaagtgg

SEQ ID NO: 5953681 - DNA, 25 bp, Homo sapien
tgagataaattacgaagacataaag

SEQ ID NO: 5953682 - DNA, 25 bp, Homo sapien
tgcgaaaggtcattggtacggacga

SEQ ID NO: 5953683 - DNA, 25 bp, Homo sapien
ctgcagctgattcttcaaaagagca

SEQ ID NO: 5953684 - DNA, 25 bp, Homo sapien
cggcagcgttcatgaactgcagctg

SEQ ID NO: 5953685 - DNA, 25 bp, Homo sapien
atcaagaatgagataaattacgaag

SEQ ID NO: 5953686 - DNA, 25 bp, Homo sapien
ggcaaagcaacgtggcaaatggaaa

SEQ ID NO: 5953687 - DNA, 25 bp, Homo sapien
gtacgatcgattcaagaaaacgcag

SEQ ID NO: 5953688 - DNA, 25 bp, Homo sapien
gcagcgttcatgaactgcagctgat

SEQ ID NO: 5953689 - DNA, 25 bp, Homo sapien
aatttaagaaggcaaagcaacgtgg

SEQ ID NO: 5953690 - DNA, 25 bp, Homo sapien
acaaataaggatgatggaggatgag

SEQ ID NO: 5953691 - DNA, 25 bp, Homo sapien
aacggacggtgtaatgcgaaaggtc

SEQ ID NO: 5953692 - DNA, 25 bp, Homo sapien
cggtataaagaccggtgcatcgcaa

SEQ ID NO: 5953693 - DNA, 25 bp, Homo sapien
tggacaacttagtctacacggtttg

SEQ ID NO: 5953694 - DNA, 25 bp, Homo sapien
attcccagagtacagaacaacacta

SEQ ID NO: 5953695 - DNA, 25 bp, Homo sapien
ggcaaaagtggatctgctggtacca

SEQ ID NO: 5953696 - DNA, 25 bp, Homo sapien
tgattgggaataatcttcgaatatc

SEQ ID NO: 5953697 - DNA, 25 bp, Homo sapien
tcaacgagctgacaaatttaagaag

SEQ ID NO: 5953698 - DNA, 25 bp, Homo sapien
cggacgactggaaattggctagaca

SEQ ID NO: 5953699 - DNA, 25 bp, Homo sapien
aaattacgaagacataaagaacgaa

SEQ ID NO: 5953700 - DNA, 25 bp, Homo sapien
ttgcagctaatacacactttaattt

SEQ ID NO: 5953701 - DNA, 25 bp, Homo sapien
agttcatgagaagagcactagagta

SEQ ID NO: 5953702 - DNA, 25 bp, Homo sapien
ctattcaagagtcccgatggtagca

SEQ ID NO: 5953703 - DNA, 25 bp, Homo sapien
agctaatacacactttaatttccaa

SEQ ID NO: 5953704 - DNA, 25 bp, Homo sapien
gaacgaaacgcccggcagcgttcat

SEQ ID NO: 5953705 - DNA, 25 bp, Homo sapien
cggtgcagttcatgagaagagcact

SEQ ID NO: 5953706 - DNA, 25 bp, Homo sapien
attacgaagacataaagaacgaaac

SEQ ID NO: 5953707 - DNA, 25 bp, Homo sapien
ctttaatttccaacaagaatgaaga

SEQ ID NO: 5953708 - DNA, 25 bp, Homo sapien
aagtgaattggtagtgttgcagcta

SEQ ID NO: 5953709 - DNA, 25 bp, Homo sapien
acaggaaactgggcatcaacgatat

SEQ ID NO: 5953710 - DNA, 25 bp, Homo sapien
aatgagataaattacgaagacataa

SEQ ID NO: 5953711 - DNA, 25 bp, Homo sapien
gaatatcgctagtcaagttgactaa

SEQ ID NO: 5953712 - DNA, 25 bp, Homo sapien
acataaagaacgaaacgcccggcag

SEQ ID NO: 5953713 - DNA, 25 bp, Homo sapien
atgagatattgaagaacggtataaa

SEQ ID NO: 5953714 - DNA, 25 bp, Homo sapien
agaaaacgcaggtcgaacaaataag

SEQ ID NO: 5953715 - DNA, 25 bp, Homo sapien
ttcttcaaaagagcataacggacgg

SEQ ID NO: 5953716 - DNA, 25 bp, Homo sapien
atggcgcattcaatggacccaaaaa

SEQ ID NO: 5953717 - DNA, 25 bp, Homo sapien
atagttaagaatttattcccagagt

SEQ ID NO: 5953718 - DNA, 25 bp, Homo sapien
tatcctgaccatagttaagaattta

SEQ ID NO: 5953719 - DNA, 25 bp, Homo sapien
ggataaagaggtaagtgaattggta

SEQ ID NO: 5953720 - DNA, 25 bp, Homo sapien
ataacggacggtgtaatgcgaaagg

SEQ ID NO: 5953721 - DNA, 25 bp, Homo sapien
atggaaacaggaaactgggcatcaa

SEQ ID NO: 5953722 - DNA, 25 bp, Homo sapien
aaattatacagagataccgttctga

SEQ ID NO: 5953723 - DNA, 25 bp, Homo sapien
ccatagttaagaatttattcccaga

SEQ ID NO: 5953724 - DNA, 25 bp, Homo sapien
gaatgaagaactggttaggaacggg

SEQ ID NO: 5953725 - DNA, 25 bp, Homo sapien
tgaactgcagctgattcttcaaaag

SEQ ID NO: 5953726 - DNA, 25 bp, Homo sapien
tgggaattttcagaagctattcaag

SEQ ID NO: 5953727 - DNA, 25 bp, Homo sapien
ttcatgaactgcagctgattcttca

SEQ ID NO: 5953728 - DNA, 25 bp, Homo sapien
gtaagtgaattggtagtgttgcagc

SEQ ID NO: 5953729 - DNA, 25 bp, Homo sapien
aatttccaacaagaatgaagaactg

SEQ ID NO: 5953730 - DNA, 25 bp, Homo sapien
cgatggtagcattatcaagaatgag

SEQ ID NO: 5953731 - DNA, 25 bp, Homo sapien
tcaaaagagcataacggacggtgta

SEQ ID NO: 5953732 - DNA, 25 bp, Homo sapien
gagaaaaactattgaaattatacag

SEQ ID NO: 5953733 - DNA, 25 bp, Homo sapien
cgtggcaaatggaaacaggaaactg

SEQ ID NO: 5953734 - DNA, 25 bp, Homo sapien
gagtcccgatggtagcattatcaag

SEQ ID NO: 5953735 - DNA, 25 bp, Homo sapien
cagaacaacactaaacgatggacaa

SEQ ID NO: 5953736 - DNA, 25 bp, Homo sapien
caaagcaacgtggcaaatggaaaca

SEQ ID NO: 5953737 - DNA, 25 bp, Homo sapien
tgaattggatgatacggtgcagttc

SEQ ID NO: 5953738 - DNA, 25 bp, Homo sapien
cgttcatgaactgcagctgattctt

SEQ ID NO: 5953739 - DNA, 25 bp, Homo sapien
agttaagaatttattcccagagtac

SEQ ID NO: 5953740 - DNA, 25 bp, Homo sapien
cggacggtgtaatgcgaaaggtcat

SEQ ID NO: 5953741 - DNA, 25 bp, Homo sapien
gatctgctggtaccagtgctactat

SEQ ID NO: 5953742 - DNA, 25 bp, Homo sapien
ttggtacggacgactggaaattggc

SEQ ID NO: 5953743 - DNA, 25 bp, Homo sapien
attggtagtgttgcagctaatacac

SEQ ID NO: 5953744 - DNA, 25 bp, Homo sapien
catgattgggaataatcttcgaata

SEQ ID NO: 5953745 - DNA, 25 bp, Homo sapien
gatcgattcaagaaaacgcaggtcg

SEQ ID NO: 5953746 - DNA, 25 bp, Homo sapien
aaaagagcataacggacggtgtaat

SEQ ID NO: 5953747 - DNA, 25 bp, Homo sapien
tacaaaacaatttgctaatcaacga

SEQ ID NO: 5953748 - DNA, 25 bp, Homo sapien
acatggcgcattcaatggacccaaa

SEQ ID NO: 5953749 - DNA, 25 bp, Homo sapien
ttaggaacgggggaggaatcaacat

SEQ ID NO: 5953750 - DNA, 25 bp, Homo sapien
aagtacgatcgattcaagaaaacgc

SEQ ID NO: 5953751 - DNA, 25 bp, Homo sapien
cgcaggtcgaacaaataaggatgat

SEQ ID NO: 5953752 - DNA, 25 bp, Homo sapien
tcctgaccatagttaagaatttatt

SEQ ID NO: 5953753 - DNA, 25 bp, Homo sapien
atcgcaactgcaaccacatgcaaat

SEQ ID NO: 5953754 - DNA, 25 bp, Homo sapien
gatatcctgaccatagttaagaatt

SEQ ID NO: 5953755 - DNA, 25 bp, Homo sapien
aattttcagaagctattcaagagtc

SEQ ID NO: 5953756 - DNA, 25 bp, Homo sapien
cgaagacataaagaacgaaacgccc

SEQ ID NO: 5953757 - DNA, 25 bp, Homo sapien
aacgggggaggaatcaacatgattg

SEQ ID NO: 5953758 - DNA, 25 bp, Homo sapien
aagaacgaaacgcccggcagcgttc

SEQ ID NO: 5953759 - DNA, 25 bp, Homo sapien
ttcaagaaaacgcaggtcgaacaaa

SEQ ID NO: 5953760 - DNA, 25 bp, Homo sapien
gcataacggacggtgtaatgcgaaa

SEQ ID NO: 5953761 - DNA, 25 bp, Homo sapien
gcaacgtggcaaatggaaacaggaa

SEQ ID NO: 5953762 - DNA, 25 bp, Homo sapien
gtgcagttcatgagaagagcactag

SEQ ID NO: 5953763 - DNA, 25 bp, Homo sapien
acaagaatgaagaactggttaggaa

SEQ ID NO: 5953764 - DNA, 25 bp, Homo sapien
aggtaagtgaattggtagtgttgca

SEQ ID NO: 5953765 - DNA, 25 bp, Homo sapien
aaagaccggtgcatcgcaactgcaa

SEQ ID NO: 5953766 - DNA, 25 bp, Homo sapien
gtaatgcgaaaggtcattggtacgg

SEQ ID NO: 5953767 - DNA, 25 bp, Homo sapien
ataaagaggtaagtgaattggtagt

SEQ ID NO: 5953768 - DNA, 25 bp, Homo sapien
tattgaagaacggtataaagaccgg

SEQ ID NO: 5953769 - DNA, 25 bp, Homo sapien
cagaagctattcaagagtcccgatg

SEQ ID NO: 5953770 - DNA, 25 bp, Homo sapien
aatcaacatgattgggaataatctt

SEQ ID NO: 5953771 - DNA, 25 bp, Homo sapien
tcgattcaagaaaacgcaggtcgaa

SEQ ID NO: 5953772 - DNA, 25 bp, Homo sapien
tgggaataatcttcgaatatcgcta

SEQ ID NO: 5953773 - DNA, 25 bp, Homo sapien
ctccttgacgaaaagtacgatcgat

SEQ ID NO: 5953774 - DNA, 25 bp, Homo sapien
ggaacgggggaggaatcaacatgat

SEQ ID NO: 5953775 - DNA, 25 bp, Homo sapien
aggaaactgggcatcaacgatatcc

SEQ ID NO: 5953776 - DNA, 25 bp, Homo sapien
gaacaaataaggatgatggaggatg

SEQ ID NO: 5953777 - DNA, 25 bp, Homo sapien
caggtcgaacaaataaggatgatgg

SEQ ID NO: 5953778 - DNA, 25 bp, Homo sapien
gcatcaacgatatcctgaccatagt

SEQ ID NO: 5953779 - DNA, 25 bp, Homo sapien
tcgaatatcgctagtcaagttgact

SEQ ID NO: 5953780 - DNA, 25 bp, Homo sapien
cattcaatggacccaaaaagagaaa

SEQ ID NO: 5953781 - DNA, 25 bp, Homo sapien
caactgcaaccacatgcaaatgctg

SEQ ID NO: 5953782 - DNA, 25 bp, Homo sapien
ataaggatgatggaggatgagatat

SEQ ID NO: 5953783 - DNA, 25 bp, Homo sapien
agacaagtgcagtttgaattggatg

SEQ ID NO: 5953784 - DNA, 25 bp, Homo sapien
agagtacagaacaacactaaacgat

SEQ ID NO: 5953785 - DNA, 25 bp, Homo sapien
ggtagcattatcaagaatgagataa

SEQ ID NO: 5953786 - DNA, 25 bp, Homo sapien
tgttgcagctaatacacactttaat

SEQ ID NO: 5953787 - DNA, 25 bp, Homo sapien
aaggcaaagcaacgtggcaaatgga

SEQ ID NO: 5953788 - DNA, 25 bp, Homo sapien
tatacagagataccgttctgaataa

SEQ ID NO: 5953789 - DNA, 25 bp, Homo sapien
gacaacttagtctacacggtttgga

SEQ ID NO: 5953790 - DNA, 25 bp, Homo sapien
gaaagtaaaactgggaattttcaga

SEQ ID NO: 5953791 - DNA, 25 bp, Homo sapien
cactaaacgatggacaacttagtct

SEQ ID NO: 5953792 - DNA, 25 bp, Homo sapien
attgggaataatcttcgaatatcgc

SEQ ID NO: 5953793 - DNA, 25 bp, Homo sapien
aatacaaaacaatttgctaatcaac

SEQ ID NO: 5953794 - DNA, 25 bp, Homo sapien
caaaacaatttgctaatcaacgagc

SEQ ID NO: 5953795 - DNA, 25 bp, Homo sapien
tatcgagaagctccttgacgaaaag

SEQ ID NO: 5953796 - DNA, 25 bp, Homo sapien
cagagataccgttctgaataaattg

SEQ ID NO: 5953797 - DNA, 25 bp, Homo sapien
gacggtgtaatgcgaaaggtcattg

SEQ ID NO: 5953798 - DNA, 25 bp, Homo sapien
gaagctccttgacgaaaagtacgat

SEQ ID NO: 5953799 - DNA, 25 bp, Homo sapien
cgccacacatggcgcattcaatgga

SEQ ID NO: 5953800 - DNA, 25 bp, Homo sapien
tacgccacacatggcgcattcaatg

SEQ ID NO: 5953801 - DNA, 25 bp, Homo sapien
gaggaatcaacatgattgggaataa

SEQ ID NO: 5953802 - DNA, 25 bp, Homo sapien
tttgaattggatgatacggtgcagt

SEQ ID NO: 5953803 - DNA, 25 bp, Homo sapien
caaaagtggatctgctggtaccagt

SEQ ID NO: 5953804 - DNA, 25 bp, Homo sapien
agctgacaaatttaagaaggcaaag

SEQ ID NO: 5953805 - DNA, 25 bp, Homo sapien
gagataccgttctgaataaattgga

SEQ ID NO: 5953806 - DNA, 25 bp, Homo sapien
ggtacggacgactggaaattggcta

SEQ ID NO: 5953807 - DNA, 25 bp, Homo sapien
ggaataatcttcgaatatcgctagt

SEQ ID NO: 5953808 - DNA, 25 bp, Homo sapien
cgaaaggtcattggtacggacgact

SEQ ID NO: 5953809 - DNA, 25 bp, Homo sapien
agaaggcaaagcaacgtggcaaatg

SEQ ID NO: 5953810 - DNA, 25 bp, Homo sapien
aacgcccggcagcgttcatgaactg

SEQ ID NO: 5953811 - DNA, 25 bp, Homo sapien
aatgctggcaaaagtggatctgctg

SEQ ID NO: 5953812 - DNA, 25 bp, Homo sapien
agtggatctgctggtaccagtgcta

SEQ ID NO: 5953813 - DNA, 25 bp, Homo sapien
gaagctattcaagagtcccgatggt

SEQ ID NO: 5953814 - DNA, 25 bp, Homo sapien
agaggtaagtgaattggtagtgttg

SEQ ID NO: 5953815 - DNA, 25 bp, Homo sapien
tggaaagtaaaactgggaattttca

SEQ ID NO: 5953816 - DNA, 25 bp, Homo sapien
acgaaatacaaaacaatttgctaat

SEQ ID NO: 5953817 - DNA, 25 bp, Homo sapien
ccacacatggcgcattcaatggacc

SEQ ID NO: 5953818 - DNA, 25 bp, Homo sapien
gagcataacggacggtgtaatgcga

SEQ ID NO: 5953819 - DNA, 25 bp, Homo sapien
agtaaaactgggaattttcagaagc

SEQ ID NO: 5953820 - DNA, 25 bp, Homo sapien
agcgttcatgaactgcagctgattc

SEQ ID NO: 5953821 - DNA, 25 bp, Homo sapien
tctgctggtaccagtgctactataa

SEQ ID NO: 5953822 - DNA, 25 bp, Homo sapien
aagaatgaagaactggttaggaacg

SEQ ID NO: 5953823 - DNA, 25 bp, Homo sapien
ttttcagaagctattcaagagtccc

SEQ ID NO: 5953824 - DNA, 25 bp, Homo sapien
tggaaattggctagacaagtgcagt

SEQ ID NO: 5953825 - DNA, 25 bp, Homo sapien
aatgcgaaaggtcattggtacggac

SEQ ID NO: 5953826 - DNA, 25 bp, Homo sapien
tcaacatgattgggaataatcttcg

SEQ ID NO: 5953827 - DNA, 25 bp, Homo sapien
attcaagagtcccgatggtagcatt

SEQ ID NO: 5953828 - DNA, 25 bp, Homo sapien
gtttggaaatgcatgatatcgagaa

SEQ ID NO: 5953829 - DNA, 25 bp, Homo sapien
acgatggacaacttagtctacacgg

SEQ ID NO: 5953830 - DNA, 25 bp, Homo sapien
tacgaagacataaagaacgaaacgc

SEQ ID NO: 5953831 - DNA, 25 bp, Homo sapien
gtcccgatggtagcattatcaagaa

SEQ ID NO: 5953832 - DNA, 25 bp, Homo sapien
aacatgattgggaataatcttcgaa

SEQ ID NO: 5953833 - DNA, 25 bp, Homo sapien
caagaaaacgcaggtcgaacaaata

SEQ ID NO: 5953834 - DNA, 25 bp, Homo sapien
caacgatatcctgaccatagttaag

SEQ ID NO: 5953835 - DNA, 25 bp, Homo sapien
aactgggcatcaacgatatcctgac

SEQ ID NO: 5953836 - DNA, 25 bp, Homo sapien
gacccaaaaagagaaaaactattga

SEQ ID NO: 5953837 - DNA, 25 bp, Homo sapien
acaacactaaacgatggacaactta

SEQ ID NO: 5953838 - DNA, 25 bp, Homo sapien
ccgttctgaataaattggaaagtaa

SEQ ID NO: 5953839 - DNA, 25 bp, Homo sapien
agtcaagttgactaacgaaatacaa

SEQ ID NO: 5953840 - DNA, 25 bp, Homo sapien
gaacaacactaaacgatggacaact

SEQ ID NO: 5953841 - DNA, 25 bp, Homo sapien
aacactaaacgatggacaacttagt

SEQ ID NO: 5953842 - DNA, 25 bp, Homo sapien
aagtgcagtttgaattggatgatac

SEQ ID NO: 5953843 - DNA, 25 bp, Homo sapien
aacggtataaagaccggtgcatcgc

SEQ ID NO: 5953844 - DNA, 25 bp, Homo sapien
gaaactgggcatcaacgatatcctg

SEQ ID NO: 5953845 - DNA, 25 bp, Homo sapien
cggtgtaatgcgaaaggtcattggt

SEQ ID NO: 5953846 - DNA, 25 bp, Homo sapien
agacataaagaacgaaacgcccggc

SEQ ID NO: 5953847 - DNA, 25 bp, Homo sapien
gaagaacggtataaagaccggtgca

SEQ ID NO: 5953848 - DNA, 25 bp, Homo sapien
gatggaggatgagatattgaagaac

SEQ ID NO: 5953849 - DNA, 25 bp, Homo sapien
gattcaagaaaacgcaggtcgaaca

SEQ ID NO: 5953850 - DNA, 25 bp, Homo sapien
gattcttcaaaagagcataacggac

SEQ ID NO: 5953851 - DNA, 25 bp, Homo sapien
gggcatcaacgatatcctgaccata

SEQ ID NO: 5953852 - DNA, 25 bp, Homo sapien
aaaacgcaggtcgaacaaataagga

SEQ ID NO: 5953853 - DNA, 25 bp, Homo sapien
actaacgaaatacaaaacaatttgc

SEQ ID NO: 5953854 - DNA, 25 bp, Homo sapien
ggtaccagtgctactataactacga

SEQ ID NO: 5953855 - DNA, 25 bp, Homo sapien
gcaaatggaaacaggaaactgggca

SEQ ID NO: 5953856 - DNA, 25 bp, Homo sapien
ggtcgaacaaataaggatgatggag

SEQ ID NO: 5953857 - DNA, 25 bp, Homo sapien
cgagctgacaaatttaagaaggcaa

SEQ ID NO: 5953858 - DNA, 25 bp, Homo sapien
ataaagaccggtgcatcgcaactgc

SEQ ID NO: 5953859 - DNA, 25 bp, Homo sapien
aagagtcccgatggtagcattatca

SEQ ID NO: 5953860 - DNA, 25 bp, Homo sapien
acaatttgctaatcaacgagctgac

SEQ ID NO: 5953861 - DNA, 25 bp, Homo sapien
gacgaaaagtacgatcgattcaaga

SEQ ID NO: 5953862 - DNA, 25 bp, Homo sapien
taccgttctgaataaattggaaagt

SEQ ID NO: 5953863 - DNA, 25 bp, Homo sapien
cactttaatttccaacaagaatgaa

SEQ ID NO: 5953864 - DNA, 25 bp, Homo sapien
gcagctaatacacactttaatttcc

SEQ ID NO: 5953865 - DNA, 25 bp, Homo sapien
agctccttgacgaaaagtacgatcg

SEQ ID NO: 5953866 - DNA, 25 bp, Homo sapien
taatcttcgaatatcgctagtcaag

SEQ ID NO: 5953867 - DNA, 25 bp, Homo sapien
acgatcgattcaagaaaacgcaggt

SEQ ID NO: 5953868 - DNA, 25 bp, Homo sapien
acgaaacgcccggcagcgttcatga

SEQ ID NO: 5953869 - DNA, 25 bp, Homo sapien
ctagacaagtgcagtttgaattgga

SEQ ID NO: 5953870 - DNA, 25 bp, Homo sapien
actacgccacacatggcgcattcaa

SEQ ID NO: 5953871 - DNA, 25 bp, Homo sapien
taagaaggcaaagcaacgtggcaaa

SEQ ID NO: 5953872 - DNA, 25 bp, Homo sapien
ctaaacgatggacaacttagtctac

SEQ ID NO: 5953873 - DNA, 25 bp, Homo sapien
agaatgagataaattacgaagacat

SEQ ID NO: 5953874 - DNA, 25 bp, Homo sapien
cacggtttggaaatgcatgatatcg

SEQ ID NO: 5953875 - DNA, 25 bp, Homo sapien
caaatttaagaaggcaaagcaacgt

SEQ ID NO: 5953876 - DNA, 25 bp, Homo sapien
tctacacggtttggaaatgcatgat

SEQ ID NO: 5953877 - DNA, 25 bp, Homo sapien
taaaactgggaattttcagaagcta

SEQ ID NO: 5953878 - DNA, 25 bp, Homo sapien
ttgaagaacggtataaagaccggtg

SEQ ID NO: 5953879 - DNA, 25 bp, Homo sapien
tggatctgctggtaccagtgctact

SEQ ID NO: 5953880 - DNA, 25 bp, Homo sapien
gatacggtgcagttcatgagaagag

SEQ ID NO: 5953881 - DNA, 25 bp, Homo sapien
agaccggtgcatcgcaactgcaacc

SEQ ID NO: 5953882 - DNA, 25 bp, Homo sapien
tacacggtttggaaatgcatgatat

SEQ ID NO: 5953883 - DNA, 25 bp, Homo sapien
agctattcaagagtcccgatggtag

SEQ ID NO: 5953884 - DNA, 25 bp, Homo sapien
ccagtgctactataactacgactac

SEQ ID NO: 5953885 - DNA, 25 bp, Homo sapien
cttcaaaagagcataacggacggtg

SEQ ID NO: 5953886 - DNA, 25 bp, Homo sapien
aagttgactaacgaaatacaaaaca

SEQ ID NO: 5953887 - DNA, 25 bp, Homo sapien
ctgattcttcaaaagagcataacgg

SEQ ID NO: 5953888 - DNA, 25 bp, Homo sapien
tgcaaatgctggcaaaagtggatct

SEQ ID NO: 5953889 - DNA, 25 bp, Homo sapien
tggcaaatggaaacaggaaactggg

SEQ ID NO: 5953890 - DNA, 25 bp, Homo sapien
agaacggtataaagaccggtgcatc

SEQ ID NO: 5953891 - DNA, 25 bp, Homo sapien
aaatgcatgatatcgagaagctcct

SEQ ID NO: 5953892 - DNA, 25 bp, Homo sapien
atcttcgaatatcgctagtcaagtt

SEQ ID NO: 5953893 - DNA, 25 bp, Homo sapien
aaggatgatggaggatgagatattg

SEQ ID NO: 5953894 - DNA, 25 bp, Homo sapien
gtgtaatgcgaaaggtcattggtac

SEQ ID NO: 5953895 - DNA, 25 bp, Homo sapien
aactgcagctgattcttcaaaagag

SEQ ID NO: 5953896 - DNA, 25 bp, Homo sapien
tggaggatgagatattgaagaacgg

SEQ ID NO: 5953897 - DNA, 25 bp, Homo sapien
acacatggcgcattcaatggaccca

SEQ ID NO: 5953898 - DNA, 25 bp, Homo sapien
gagatattgaagaacggtataaaga

SEQ ID NO: 5953899 - DNA, 25 bp, Homo sapien
cggtgcatcgcaactgcaaccacat

SEQ ID NO: 5953900 - DNA, 25 bp, Homo sapien
aatacacactttaatttccaacaag

SEQ ID NO: 5953901 - DNA, 25 bp, Homo sapien
caaccacatgcaaatgctggcaaaa

SEQ ID NO: 5953902 - DNA, 25 bp, Homo sapien
aaacgatggacaacttagtctacac

SEQ ID NO: 5953903 - DNA, 25 bp, Homo sapien
ggatgatacggtgcagttcatgaga

SEQ ID NO: 5953904 - DNA, 25 bp, Homo sapien
gtgcatcgcaactgcaaccacatgc

SEQ ID NO: 5953905 - DNA, 25 bp, Homo sapien
tgctggcaaaagtggatctgctggt

SEQ ID NO: 5953906 - DNA, 25 bp, Homo sapien
gcatgatatcgagaagctccttgac

SEQ ID NO: 5953907 - DNA, 25 bp, Homo sapien
aaagtggatctgctggtaccagtgc

SEQ ID NO: 5953908 - DNA, 25 bp, Homo sapien
gatggacaacttagtctacacggtt

SEQ ID NO: 5953909 - DNA, 25 bp, Homo sapien
actgcaaccacatgcaaatgctggc

SEQ ID NO: 5953910 - DNA, 25 bp, Homo sapien
tacagagataccgttctgaataaat

SEQ ID NO: 5953911 - DNA, 25 bp, Homo sapien
gacaaatttaagaaggcaaagcaac

SEQ ID NO: 5953912 - DNA, 25 bp, Homo sapien
ctgacaaatttaagaaggcaaagca

SEQ ID NO: 5953913 - DNA, 25 bp, Homo sapien
ataaattacgaagacataaagaacg

SEQ ID NO: 5953914 - DNA, 25 bp, Homo sapien
gacgactggaaattggctagacaag

SEQ ID NO: 5953915 - DNA, 25 bp, Homo sapien
tgactaacgaaatacaaaacaattt

SEQ ID NO: 5953916 - DNA, 25 bp, Homo sapien
ttagtctacacggtttggaaatgca

SEQ ID NO: 5953917 - DNA, 25 bp, Homo sapien
tactctagtgctcttctcatgaact

SEQ ID NO: 5953918 - DNA, 25 bp, Homo sapien
tgcatttccaaaccgtgtagactaa

SEQ ID NO: 5953919 - DNA, 25 bp, Homo sapien
catttgccacgttgctttgccttct

SEQ ID NO: 5953920 - DNA, 25 bp, Homo sapien
gaactgcaccgtatcatccaattca

SEQ ID NO: 5953921 - DNA, 25 bp, Homo sapien
caaaccgtgtagactaagttgtcca

SEQ ID NO: 5953922 - DNA, 25 bp, Homo sapien
tataccgttcttcaatatctcatcc

SEQ ID NO: 5953923 - DNA, 25 bp, Homo sapien
gttgattagcaaattgttttgtatt

SEQ ID NO: 5953924 - DNA, 25 bp, Homo sapien
acgttgctttgccttcttaaatttg

SEQ ID NO: 5953925 - DNA, 25 bp, Homo sapien
tttttgggtccattgaatgcgccat

SEQ ID NO: 5953926 - DNA, 25 bp, Homo sapien
tagccaatttccagtcgtccgtacc

SEQ ID NO: 5953927 - DNA, 25 bp, Homo sapien
tgcaacactaccaattcacttacct

SEQ ID NO: 5953928 - DNA, 25 bp, Homo sapien
ccgtccgttatgctcttttgaagaa

SEQ ID NO: 5953929 - DNA, 25 bp, Homo sapien
ccatcgtttagtgttgttctgtact

SEQ ID NO: 5953930 - DNA, 25 bp, Homo sapien
agtgctcttctcatgaactgcaccg

SEQ ID NO: 5953931 - DNA, 25 bp, Homo sapien
agttgcgatgcaccggtctttatac

SEQ ID NO: 5953932 - DNA, 25 bp, Homo sapien
caaggagcttctcgatatcatgcat

SEQ ID NO: 5953933 - DNA, 25 bp, Homo sapien
atcgtacttttcgtcaaggagcttc

SEQ ID NO: 5953934 - DNA, 25 bp, Homo sapien
atttgtcagctcgttgattagcaaa

SEQ ID NO: 5953935 - DNA, 25 bp, Homo sapien
atcatgttgattcctcccccgttcc

SEQ ID NO: 5953936 - DNA, 25 bp, Homo sapien
acttttgccagcatttgcatgtggt

SEQ ID NO: 5953937 - DNA, 25 bp, Homo sapien
tcgtcaaggagcttctcgatatcat

SEQ ID NO: 5953938 - DNA, 25 bp, Homo sapien
tacttttcgtcaaggagcttctcga

SEQ ID NO: 5953939 - DNA, 25 bp, Homo sapien
cagttcatgaacgctgccgggcgtt

SEQ ID NO: 5953940 - DNA, 25 bp, Homo sapien
gtcagctcgttgattagcaaattgt

SEQ ID NO: 5953941 - DNA, 25 bp, Homo sapien
actaagttgtccatcgtttagtgtt

SEQ ID NO: 5953942 - DNA, 25 bp, Homo sapien
tcatgaacgctgccgggcgtttcgt

SEQ ID NO: 5953943 - DNA, 25 bp, Homo sapien
accagttcttcattcttgttggaaa

SEQ ID NO: 5953944 - DNA, 25 bp, Homo sapien
ttgcgatgcaccggtctttataccg

SEQ ID NO: 5953945 - DNA, 25 bp, Homo sapien
ctgccgggcgtttcgttctttatgt

SEQ ID NO: 5953946 - DNA, 25 bp, Homo sapien
ggaaattaaagtgtgtattagctgc

SEQ ID NO: 5953947 - DNA, 25 bp, Homo sapien
gctcgttgattagcaaattgttttg

SEQ ID NO: 5953948 - DNA, 25 bp, Homo sapien
ttgtccatcgtttagtgttgttctg

SEQ ID NO: 5953949 - DNA, 25 bp, Homo sapien
ttagtcaacttgactagcgatattc

SEQ ID NO: 5953950 - DNA, 25 bp, Homo sapien
ctgtactctgggaataaattcttaa

SEQ ID NO: 5953951 - DNA, 25 bp, Homo sapien
gttcatgaacgctgccgggcgtttc

SEQ ID NO: 5953952 - DNA, 25 bp, Homo sapien
cagcagatccacttttgccagcatt

SEQ ID NO: 5953953 - DNA, 25 bp, Homo sapien
gcagatccacttttgccagcatttg

SEQ ID NO: 5953954 - DNA, 25 bp, Homo sapien
aaatttgtcagctcgttgattagca

SEQ ID NO: 5953955 - DNA, 25 bp, Homo sapien
aggagcttctcgatatcatgcattt

SEQ ID NO: 5953956 - DNA, 25 bp, Homo sapien
gattattcccaatcatgttgattcc

SEQ ID NO: 5953957 - DNA, 25 bp, Homo sapien
ccgttcttcaatatctcatcctcca

SEQ ID NO: 5953958 - DNA, 25 bp, Homo sapien
ccgtaccaatgacctttcgcattac

SEQ ID NO: 5953959 - DNA, 25 bp, Homo sapien
tatttgttcgacctgcgttttcttg

SEQ ID NO: 5953960 - DNA, 25 bp, Homo sapien
catcgggactcttgaatagcttctg

SEQ ID NO: 5953961 - DNA, 25 bp, Homo sapien
gtattagctgcaacactaccaattc

SEQ ID NO: 5953962 - DNA, 25 bp, Homo sapien
cttatttgttcgacctgcgttttct

SEQ ID NO: 5953963 - DNA, 25 bp, Homo sapien
cgttctttatgtcttcgtaatttat

SEQ ID NO: 5953964 - DNA, 25 bp, Homo sapien
cttaactatggtcaggatatcgttg

SEQ ID NO: 5953965 - DNA, 25 bp, Homo sapien
tattcgaagattattcccaatcatg

SEQ ID NO: 5953966 - DNA, 25 bp, Homo sapien
atgaacgctgccgggcgtttcgttc

SEQ ID NO: 5953967 - DNA, 25 bp, Homo sapien
tctttataccgttcttcaatatctc

SEQ ID NO: 5953968 - DNA, 25 bp, Homo sapien
gacctttcgcattacaccgtccgtt

SEQ ID NO: 5953969 - DNA, 25 bp, Homo sapien
tgtttccatttgccacgttgctttg

SEQ ID NO: 5953970 - DNA, 25 bp, Homo sapien
gtccatcgtttagtgttgttctgta

SEQ ID NO: 5953971 - DNA, 25 bp, Homo sapien
atttgcatgtggttgcagttgcgat

SEQ ID NO: 5953972 - DNA, 25 bp, Homo sapien
tgcaccggtctttataccgttcttc

SEQ ID NO: 5953973 - DNA, 25 bp, Homo sapien
agtcgtagttatagtagcactggta

SEQ ID NO: 5953974 - DNA, 25 bp, Homo sapien
gaatcgatcgtacttttcgtcaagg

SEQ ID NO: 5953975 - DNA, 25 bp, Homo sapien
taaattcttaactatggtcaggata

SEQ ID NO: 5953976 - DNA, 25 bp, Homo sapien
agtcaacttgactagcgatattcga

SEQ ID NO: 5953977 - DNA, 25 bp, Homo sapien
ttctttatgtcttcgtaatttatct

SEQ ID NO: 5953978 - DNA, 25 bp, Homo sapien
ataatgctaccatcgggactcttga

SEQ ID NO: 5953979 - DNA, 25 bp, Homo sapien
cctaaccagttcttcattcttgttg

SEQ ID NO: 5953980 - DNA, 25 bp, Homo sapien
cagtttcctgtttccatttgccacg

SEQ ID NO: 5953981 - DNA, 25 bp, Homo sapien
aataaattcttaactatggtcagga

SEQ ID NO: 5953982 - DNA, 25 bp, Homo sapien
gtttcctgtttccatttgccacgtt

SEQ ID NO: 5953983 - DNA, 25 bp, Homo sapien
gcttctgaaaattcccagttttact

SEQ ID NO: 5953984 - DNA, 25 bp, Homo sapien
tttctctttttgggtccattgaatg

SEQ ID NO: 5953985 - DNA, 25 bp, Homo sapien
cctgtttccatttgccacgttgctt

SEQ ID NO: 5953986 - DNA, 25 bp, Homo sapien
cgacctgcgttttcttgaatcgatc

SEQ ID NO: 5953987 - DNA, 25 bp, Homo sapien
ttcgacctgcgttttcttgaatcga

SEQ ID NO: 5953988 - DNA, 25 bp, Homo sapien
ccgttatgctcttttgaagaatcag

SEQ ID NO: 5953989 - DNA, 25 bp, Homo sapien
cattcttgttggaaattaaagtgtg

SEQ ID NO: 5953990 - DNA, 25 bp, Homo sapien
gcatgtggttgcagttgcgatgcac

SEQ ID NO: 5953991 - DNA, 25 bp, Homo sapien
attagcaaattgttttgtatttcgt

SEQ ID NO: 5953992 - DNA, 25 bp, Homo sapien
accaatgacctttcgcattacaccg

SEQ ID NO: 5953993 - DNA, 25 bp, Homo sapien
agactaagttgtccatcgtttagtg

SEQ ID NO: 5953994 - DNA, 25 bp, Homo sapien
tacaccgtccgttatgctcttttga

SEQ ID NO: 5953995 - DNA, 25 bp, Homo sapien
ttgtcagctcgttgattagcaaatt

SEQ ID NO: 5953996 - DNA, 25 bp, Homo sapien
atcgttgatgcccagtttcctgttt

SEQ ID NO: 5953997 - DNA, 25 bp, Homo sapien
cgttcctaaccagttcttcattctt

SEQ ID NO: 5953998 - DNA, 25 bp, Homo sapien
ttcattcttgttggaaattaaagtg

SEQ ID NO: 5953999 - DNA, 25 bp, Homo sapien
ttgccagcatttgcatgtggttgca

SEQ ID NO: 5954000 - DNA, 25 bp, Homo sapien
atttattcagaacggtatctctgta

SEQ ID NO: 5954001 - DNA, 25 bp, Homo sapien
atcagctgcagttcatgaacgctgc

SEQ ID NO: 5954002 - DNA, 25 bp, Homo sapien
ctcatcctccatcatccttatttgt

SEQ ID NO: 5954003 - DNA, 25 bp, Homo sapien
accagcagatccacttttgccagca

SEQ ID NO: 5954004 - DNA, 25 bp, Homo sapien
aagaatcagctgcagttcatgaacg

SEQ ID NO: 5954005 - DNA, 25 bp, Homo sapien
tagcgatattcgaagattattccca

SEQ ID NO: 5954006 - DNA, 25 bp, Homo sapien
aaattgttttgtatttcgttagtca

SEQ ID NO: 5954007 - DNA, 25 bp, Homo sapien
caacactaccaattcacttacctct

SEQ ID NO: 5954008 - DNA, 25 bp, Homo sapien
attagctgcaacactaccaattcac

SEQ ID NO: 5954009 - DNA, 25 bp, Homo sapien
tccaaaccgtgtagactaagttgtc

SEQ ID NO: 5954010 - DNA, 25 bp, Homo sapien
caatttccagtcgtccgtaccaatg

SEQ ID NO: 5954011 - DNA, 25 bp, Homo sapien
tgctttgccttcttaaatttgtcag

SEQ ID NO: 5954012 - DNA, 25 bp, Homo sapien
caccggtctttataccgttcttcaa

SEQ ID NO: 5954013 - DNA, 25 bp, Homo sapien
cagcatttgcatgtggttgcagttg

SEQ ID NO: 5954014 - DNA, 25 bp, Homo sapien
tagctgcaacactaccaattcactt

SEQ ID NO: 5954015 - DNA, 25 bp, Homo sapien
cgaagattattcccaatcatgttga

SEQ ID NO: 5954016 - DNA, 25 bp, Homo sapien
gtgttgttctgtactctgggaataa

SEQ ID NO: 5954017 - DNA, 25 bp, Homo sapien
cgatcgtacttttcgtcaaggagct

SEQ ID NO: 5954018 - DNA, 25 bp, Homo sapien
atcgtttagtgttgttctgtactct

SEQ ID NO: 5954019 - DNA, 25 bp, Homo sapien
tttgaagaatcagctgcagttcatg

SEQ ID NO: 5954020 - DNA, 25 bp, Homo sapien
gcagttgcgatgcaccggtctttat

SEQ ID NO: 5954021 - DNA, 25 bp, Homo sapien
ttgaatcgatcgtacttttcgtcaa

SEQ ID NO: 5954022 - DNA, 25 bp, Homo sapien
atgtcttcgtaatttatctcattct

SEQ ID NO: 5954023 - DNA, 25 bp, Homo sapien
tcaatagtttttctctttttgggtc

SEQ ID NO: 5954024 - DNA, 25 bp, Homo sapien
ttgaatgcgccatgtgtggcgtagt

SEQ ID NO: 5954025 - DNA, 25 bp, Homo sapien
atatcatgcatttccaaaccgtgta

SEQ ID NO: 5954026 - DNA, 25 bp, Homo sapien
gccgggcgtttcgttctttatgtct

SEQ ID NO: 5954027 - DNA, 25 bp, Homo sapien
actctgggaataaattcttaactat

SEQ ID NO: 5954028 - DNA, 25 bp, Homo sapien
cttgaatagcttctgaaaattccca

SEQ ID NO: 5954029 - DNA, 25 bp, Homo sapien
ttcgttctttatgtcttcgtaattt

SEQ ID NO: 5954030 - DNA, 25 bp, Homo sapien
ttgcatgtggttgcagttgcgatgc

SEQ ID NO: 5954031 - DNA, 25 bp, Homo sapien
ttatagtagcactggtaccagcaga

SEQ ID NO: 5954032 - DNA, 25 bp, Homo sapien
tctagccaatttccagtcgtccgta

SEQ ID NO: 5954033 - DNA, 25 bp, Homo sapien
gtatcatccaattcaaactgcactt

SEQ ID NO: 5954034 - DNA, 25 bp, Homo sapien
tgttttgtatttcgttagtcaactt

SEQ ID NO: 5954035 - DNA, 25 bp, Homo sapien
cctttcgcattacaccgtccgttat

SEQ ID NO: 5954036 - DNA, 25 bp, Homo sapien
atctcattcttgataatgctaccat

SEQ ID NO: 5954037 - DNA, 25 bp, Homo sapien
ttcttaactatggtcaggatatcgt

SEQ ID NO: 5954038 - DNA, 25 bp, Homo sapien
tgttcgacctgcgttttcttgaatc

SEQ ID NO: 5954039 - DNA, 25 bp, Homo sapien
ttcgaagattattcccaatcatgtt

SEQ ID NO: 5954040 - DNA, 25 bp, Homo sapien
ctttatgtcttcgtaatttatctca

SEQ ID NO: 5954041 - DNA, 25 bp, Homo sapien
cacttgtctagccaatttccagtcg

SEQ ID NO: 5954042 - DNA, 25 bp, Homo sapien
tagtgttgttctgtactctgggaat

SEQ ID NO: 5954043 - DNA, 25 bp, Homo sapien
gtgtgtattagctgcaacactacca

SEQ ID NO: 5954044 - DNA, 25 bp, Homo sapien
caatcatgttgattcctcccccgtt

SEQ ID NO: 5954045 - DNA, 25 bp, Homo sapien
cttgttggaaattaaagtgtgtatt

SEQ ID NO: 5954046 - DNA, 25 bp, Homo sapien
tcagaacggtatctctgtataattt

SEQ ID NO: 5954047 - DNA, 25 bp, Homo sapien
tttccaaaccgtgtagactaagttg

SEQ ID NO: 5954048 - DNA, 25 bp, Homo sapien
caatttattcagaacggtatctctg

SEQ ID NO: 5954049 - DNA, 25 bp, Homo sapien
tcttgaatcgatcgtacttttcgtc

SEQ ID NO: 5954050 - DNA, 25 bp, Homo sapien
agtagcactggtaccagcagatcca

SEQ ID NO: 5954051 - DNA, 25 bp, Homo sapien
atcatccaattcaaactgcacttgt

SEQ ID NO: 5954052 - DNA, 25 bp, Homo sapien
tggcgtagtcgtagttatagtagca

SEQ ID NO: 5954053 - DNA, 25 bp, Homo sapien
ttattcccaatcatgttgattcctc

SEQ ID NO: 5954054 - DNA, 25 bp, Homo sapien
ccagtcgtccgtaccaatgaccttt

SEQ ID NO: 5954055 - DNA, 25 bp, Homo sapien
tgaaaattcccagttttactttcca

SEQ ID NO: 5954056 - DNA, 25 bp, Homo sapien
tgtgtggcgtagtcgtagttatagt

SEQ ID NO: 5954057 - DNA, 25 bp, Homo sapien
ttctcgatatcatgcatttccaaac

SEQ ID NO: 5954058 - DNA, 25 bp, Homo sapien
tgccacgttgctttgccttcttaaa

SEQ ID NO: 5954059 - DNA, 25 bp, Homo sapien
actagcgatattcgaagattattcc

SEQ ID NO: 5954060 - DNA, 25 bp, Homo sapien
cgctgccgggcgtttcgttctttat

SEQ ID NO: 5954061 - DNA, 25 bp, Homo sapien
tttcttgaatcgatcgtacttttcg

SEQ ID NO: 5954062 - DNA, 25 bp, Homo sapien
gggcgtttcgttctttatgtcttcg

SEQ ID NO: 5954063 - DNA, 25 bp, Homo sapien
atgaactgcaccgtatcatccaatt

SEQ ID NO: 5954064 - DNA, 25 bp, Homo sapien
tcaaactgcacttgtctagccaatt

SEQ ID NO: 5954065 - DNA, 25 bp, Homo sapien
aaactgcacttgtctagccaatttc

SEQ ID NO: 5954066 - DNA, 25 bp, Homo sapien
gccagcatttgcatgtggttgcagt

SEQ ID NO: 5954067 - DNA, 25 bp, Homo sapien
tatgctcttttgaagaatcagctgc

SEQ ID NO: 5954068 - DNA, 25 bp, Homo sapien
attgttttgtatttcgttagtcaac

SEQ ID NO: 5954069 - DNA, 25 bp, Homo sapien
ttttgccagcatttgcatgtggttg

SEQ ID NO: 5954070 - DNA, 25 bp, Homo sapien
cccgttcctaaccagttcttcattc

SEQ ID NO: 5954071 - DNA, 25 bp, Homo sapien
cgtttagtgttgttctgtactctgg

SEQ ID NO: 5954072 - DNA, 25 bp, Homo sapien
ctctgtataatttcaatagtttttc

SEQ ID NO: 5954073 - DNA, 25 bp, Homo sapien
acctgcgttttcttgaatcgatcgt

SEQ ID NO: 5954074 - DNA, 25 bp, Homo sapien
gcgatattcgaagattattcccaat

SEQ ID NO: 5954075 - DNA, 25 bp, Homo sapien
tccttatttgttcgacctgcgtttt

SEQ ID NO: 5954076 - DNA, 25 bp, Homo sapien
tgaagaatcagctgcagttcatgaa

SEQ ID NO: 5954077 - DNA, 25 bp, Homo sapien
catttccaaaccgtgtagactaagt

SEQ ID NO: 5954078 - DNA, 25 bp, Homo sapien
ctccatcatccttatttgttcgacc

SEQ ID NO: 5954079 - DNA, 25 bp, Homo sapien
tgattagcaaattgttttgtatttc

SEQ ID NO: 5954080 - DNA, 25 bp, Homo sapien
gcgatgcaccggtctttataccgtt

SEQ ID NO: 5954081 - DNA, 25 bp, Homo sapien
tccaattcaaactgcacttgtctag

SEQ ID NO: 5954082 - DNA, 25 bp, Homo sapien
cgttgatgcccagtttcctgtttcc

SEQ ID NO: 5954083 - DNA, 25 bp, Homo sapien
gttttcttgaatcgatcgtactttt

SEQ ID NO: 5954084 - DNA, 25 bp, Homo sapien
taaagtgtgtattagctgcaacact

SEQ ID NO: 5954085 - DNA, 25 bp, Homo sapien
ccgtgtagactaagttgtccatcgt

SEQ ID NO: 5954086 - DNA, 25 bp, Homo sapien
actaccaattcacttacctctttat

SEQ ID NO: 5954087 - DNA, 25 bp, Homo sapien
catgcatttccaaaccgtgtagact

SEQ ID NO: 5954088 - DNA, 25 bp, Homo sapien
gcgttttcttgaatcgatcgtactt

SEQ ID NO: 5954089 - DNA, 25 bp, Homo sapien
cttgactagcgatattcgaagatta

SEQ ID NO: 5954090 - DNA, 25 bp, Homo sapien
ccacgttgctttgccttcttaaatt

SEQ ID NO: 5954091 - DNA, 25 bp, Homo sapien
caccgtatcatccaattcaaactgc

SEQ ID NO: 5954092 - DNA, 25 bp, Homo sapien
gtgtagactaagttgtccatcgttt

SEQ ID NO: 5954093 - DNA, 25 bp, Homo sapien
gctgcaacactaccaattcacttac

SEQ ID NO: 5954094 - DNA, 25 bp, Homo sapien
ttgccttcttaaatttgtcagctcg

SEQ ID NO: 5954095 - DNA, 25 bp, Homo sapien
attacaccgtccgttatgctctttt

SEQ ID NO: 5954096 - DNA, 25 bp, Homo sapien
caattcaaactgcacttgtctagcc

SEQ ID NO: 5954097 - DNA, 25 bp, Homo sapien
tttttctctttttgggtccattgaa

SEQ ID NO: 5954098 - DNA, 25 bp, Homo sapien
taccaattcacttacctctttatcc

SEQ ID NO: 5954099 - DNA, 25 bp, Homo sapien
cttttcgtcaaggagcttctcgata

SEQ ID NO: 5954100 - DNA, 25 bp, Homo sapien
cttcttaaatttgtcagctcgttga

SEQ ID NO: 5954101 - DNA, 25 bp, Homo sapien
cgttagtcaacttgactagcgatat

SEQ ID NO: 5954102 - DNA, 25 bp, Homo sapien
attcccaatcatgttgattcctccc

SEQ ID NO: 5954103 - DNA, 25 bp, Homo sapien
ttcttgataatgctaccatcgggac

SEQ ID NO: 5954104 - DNA, 25 bp, Homo sapien
gtaccaatgacctttcgcattacac

SEQ ID NO: 5954105 - DNA, 25 bp, Homo sapien
ggaataaattcttaactatggtcag

SEQ ID NO: 5954106 - DNA, 25 bp, Homo sapien
ttcctgtttccatttgccacgttgc

SEQ ID NO: 5954107 - DNA, 25 bp, Homo sapien
gtaccagcagatccacttttgccag

SEQ ID NO: 5954108 - DNA, 25 bp, Homo sapien
ttggaaattaaagtgtgtattagct

SEQ ID NO: 5954109 - DNA, 25 bp, Homo sapien
agatccacttttgccagcatttgca

SEQ ID NO: 5954110 - DNA, 25 bp, Homo sapien
cgtacttttcgtcaaggagcttctc

SEQ ID NO: 5954111 - DNA, 25 bp, Homo sapien
aaattaaagtgtgtattagctgcaa

SEQ ID NO: 5954112 - DNA, 25 bp, Homo sapien
tttgggtccattgaatgcgccatgt

SEQ ID NO: 5954113 - DNA, 25 bp, Homo sapien
tcatgaactgcaccgtatcatccaa

SEQ ID NO: 5954114 - DNA, 25 bp, Homo sapien
tgtggcgtagtcgtagttatagtag

SEQ ID NO: 5954115 - DNA, 25 bp, Homo sapien
gttcttcaatatctcatcctccatc

SEQ ID NO: 5954116 - DNA, 25 bp, Homo sapien
tttgccacgttgctttgccttctta

SEQ ID NO: 5954117 - DNA, 25 bp, Homo sapien
gtagtcgtagttatagtagcactgg

SEQ ID NO: 5954118 - DNA, 25 bp, Homo sapien
atgtggttgcagttgcgatgcaccg

SEQ ID NO: 5954119 - DNA, 25 bp, Homo sapien
ctgcgttttcttgaatcgatcgtac

SEQ ID NO: 5954120 - DNA, 25 bp, Homo sapien
actgcacttgtctagccaatttcca

SEQ ID NO: 5954121 - DNA, 25 bp, Homo sapien
attaaagtgtgtattagctgcaaca

SEQ ID NO: 5954122 - DNA, 25 bp, Homo sapien
caatgacctttcgcattacaccgtc

SEQ ID NO: 5954123 - DNA, 25 bp, Homo sapien
ttactttccaatttattcagaacgg

SEQ ID NO: 5954124 - DNA, 25 bp, Homo sapien
ccatcatccttatttgttcgacctg

SEQ ID NO: 5954125 - DNA, 25 bp, Homo sapien
gtttcgttctttatgtcttcgtaat

SEQ ID NO: 5954126 - DNA, 25 bp, Homo sapien
atttcgttagtcaacttgactagcg

SEQ ID NO: 5954127 - DNA, 25 bp, Homo sapien
cttgtctagccaatttccagtcgtc

SEQ ID NO: 5954128 - DNA, 25 bp, Homo sapien
actttccaatttattcagaacggta

SEQ ID NO: 5954129 - DNA, 25 bp, Homo sapien
attcaaactgcacttgtctagccaa

SEQ ID NO: 5954130 - DNA, 25 bp, Homo sapien
ttgtatttcgttagtcaacttgact

SEQ ID NO: 5954131 - DNA, 25 bp, Homo sapien
cgatatcatgcatttccaaaccgtg

SEQ ID NO: 5954132 - DNA, 25 bp, Homo sapien
ctgtataatttcaatagtttttctc

SEQ ID NO: 5954133 - DNA, 25 bp, Homo sapien
gtcttcgtaatttatctcattcttg

SEQ ID NO: 5954134 - DNA, 25 bp, Homo sapien
atatcgttgatgcccagtttcctgt

SEQ ID NO: 5954135 - DNA, 25 bp, Homo sapien
ttctgtactctgggaataaattctt

SEQ ID NO: 5954136 - DNA, 25 bp, Homo sapien
tgttggaaattaaagtgtgtattag

SEQ ID NO: 5954137 - DNA, 25 bp, Homo sapien
cttttgaagaatcagctgcagttca

SEQ ID NO: 5954138 - DNA, 25 bp, Homo sapien
gtactctgggaataaattcttaact

SEQ ID NO: 5954139 - DNA, 25 bp, Homo sapien
tccattgaatgcgccatgtgtggcg

SEQ ID NO: 5954140 - DNA, 25 bp, Homo sapien
tcgtccgtaccaatgacctttcgca

SEQ ID NO: 5954141 - DNA, 25 bp, Homo sapien
taaccagttcttcattcttgttgga

SEQ ID NO: 5954142 - DNA, 25 bp, Homo sapien
ctcttctcatgaactgcaccgtatc

SEQ ID NO: 5954143 - DNA, 25 bp, Homo sapien
tttccaatttattcagaacggtatc

SEQ ID NO: 5954144 - DNA, 25 bp, Homo sapien
tgcacttgtctagccaatttccagt

SEQ ID NO: 5954145 - DNA, 25 bp, Homo sapien
gttgttctgtactctgggaataaat

SEQ ID NO: 5954146 - DNA, 25 bp, Homo sapien
tgggaataaattcttaactatggtc

SEQ ID NO: 5954147 - DNA, 25 bp, Homo sapien
tctcatgaactgcaccgtatcatcc

SEQ ID NO: 5954148 - DNA, 25 bp, Homo sapien
ttcgttagtcaacttgactagcgat

SEQ ID NO: 5954149 - DNA, 25 bp, Homo sapien
atttccagtcgtccgtaccaatgac

SEQ ID NO: 5954150 - DNA, 25 bp, Homo sapien
actggtaccagcagatccacttttg

SEQ ID NO: 5954151 - DNA, 25 bp, Homo sapien
tggtaccagcagatccacttttgcc

SEQ ID NO: 5954152 - DNA, 25 bp, Homo sapien
tctctttttgggtccattgaatgcg

SEQ ID NO: 5954153 - DNA, 25 bp, Homo sapien
tgactagcgatattcgaagattatt

SEQ ID NO: 5954154 - DNA, 25 bp, Homo sapien
ttatgtcttcgtaatttatctcatt

SEQ ID NO: 5954155 - DNA, 25 bp, Homo sapien
actatggtcaggatatcgttgatgc

SEQ ID NO: 5954156 - DNA, 25 bp, Homo sapien
atgcgccatgtgtggcgtagtcgta

SEQ ID NO: 5954157 - DNA, 25 bp, Homo sapien
gttgctttgccttcttaaatttgtc

SEQ ID NO: 5954158 - DNA, 25 bp, Homo sapien
tctttttgggtccattgaatgcgcc

SEQ ID NO: 5954159 - DNA, 25 bp, Homo sapien
atcgatcgtacttttcgtcaaggag

SEQ ID NO: 5954160 - DNA, 25 bp, Homo sapien
ttgcagttgcgatgcaccggtcttt

SEQ ID NO: 5954161 - DNA, 25 bp, Homo sapien
gcgccatgtgtggcgtagtcgtagt

SEQ ID NO: 5954162 - DNA, 25 bp, Homo sapien
accatcgggactcttgaatagcttc

SEQ ID NO: 5954163 - DNA, 25 bp, Homo sapien
aacggtatctctgtataatttcaat

SEQ ID NO: 5954164 - DNA, 25 bp, Homo sapien
catcctccatcatccttatttgttc

SEQ ID NO: 5954165 - DNA, 25 bp, Homo sapien
tcctccatcatccttatttgttcga

SEQ ID NO: 5954166 - DNA, 25 bp, Homo sapien
gtagttatagtagcactggtaccag

SEQ ID NO: 5954167 - DNA, 25 bp, Homo sapien
gccatgtgtggcgtagtcgtagtta

SEQ ID NO: 5954168 - DNA, 25 bp, Homo sapien
ccggtctttataccgttcttcaata

SEQ ID NO: 5954169 - DNA, 25 bp, Homo sapien
tcaacttgactagcgatattcgaag

SEQ ID NO: 5954170 - DNA, 25 bp, Homo sapien
tccaatttattcagaacggtatctc

SEQ ID NO: 5954171 - DNA, 25 bp, Homo sapien
gagcttctcgatatcatgcatttcc

SEQ ID NO: 5954172 - DNA, 25 bp, Homo sapien
gcgtagtcgtagttatagtagcact

SEQ ID NO: 5954173 - DNA, 25 bp, Homo sapien
gatgcccagtttcctgtttccattt

SEQ ID NO: 5954174 - DNA, 25 bp, Homo sapien
cagctgcagttcatgaacgctgccg

SEQ ID NO: 5954175 - DNA, 25 bp, Homo sapien
tgaatagcttctgaaaattcccagt

SEQ ID NO: 5954176 - DNA, 25 bp, Homo sapien
atctcatcctccatcatccttattt

SEQ ID NO: 5954177 - DNA, 25 bp, Homo sapien
ctcgatatcatgcatttccaaaccg

SEQ ID NO: 5954178 - DNA, 25 bp, Homo sapien
agaacggtatctctgtataatttca

SEQ ID NO: 5954179 - DNA, 25 bp, Homo sapien
tgcaccgtatcatccaattcaaact

SEQ ID NO: 5954180 - DNA, 25 bp, Homo sapien
cttgataatgctaccatcgggactc

SEQ ID NO: 5954181 - DNA, 25 bp, Homo sapien
gttatgctcttttgaagaatcagct

SEQ ID NO: 5954182 - DNA, 25 bp, Homo sapien
tgctcttttgaagaatcagctgcag

SEQ ID NO: 5954183 - DNA, 25 bp, Homo sapien
tagcttctgaaaattcccagtttta

SEQ ID NO: 5954184 - DNA, 25 bp, Homo sapien
gaatcagctgcagttcatgaacgct

SEQ ID NO: 5954185 - DNA, 25 bp, Homo sapien
aatgctaccatcgggactcttgaat

SEQ ID NO: 5954186 - DNA, 25 bp, Homo sapien
tggtcaggatatcgttgatgcccag

SEQ ID NO: 5954187 - DNA, 25 bp, Homo sapien
tcgggactcttgaatagcttctgaa

SEQ ID NO: 5954188 - DNA, 25 bp, Homo sapien
cattgaatgcgccatgtgtggcgta

SEQ ID NO: 5954189 - DNA, 25 bp, Homo sapien
tcttaaatttgtcagctcgttgatt

SEQ ID NO: 5954190 - DNA, 25 bp, Homo sapien
agttgtccatcgtttagtgttgttc

SEQ ID NO: 5954191 - DNA, 25 bp, Homo sapien
gttcttcattcttgttggaaattaa

SEQ ID NO: 5954192 - DNA, 25 bp, Homo sapien
gcatttgcatgtggttgcagttgcg

SEQ ID NO: 5954193 - DNA, 25 bp, Homo sapien
gaatgcgccatgtgtggcgtagtcg

SEQ ID NO: 5954194 - DNA, 25 bp, Homo sapien
atccacttttgccagcatttgcatg

SEQ ID NO: 5954195 - DNA, 25 bp, Homo sapien
aatagcttctgaaaattcccagttt

SEQ ID NO: 5954196 - DNA, 25 bp, Homo sapien
gccaatttccagtcgtccgtaccaa

SEQ ID NO: 5954197 - DNA, 25 bp, Homo sapien
gtcaggatatcgttgatgcccagtt

SEQ ID NO: 5954198 - DNA, 25 bp, Homo sapien
caatatctcatcctccatcatcctt

SEQ ID NO: 5954199 - DNA, 25 bp, Homo sapien
gtatttcgttagtcaacttgactag

SEQ ID NO: 5954200 - DNA, 25 bp, Homo sapien
agtcgtccgtaccaatgacctttcg

SEQ ID NO: 5954201 - DNA, 25 bp, Homo sapien
gggactcttgaatagcttctgaaaa

SEQ ID NO: 5954202 - DNA, 25 bp, Homo sapien
ctcattcttgataatgctaccatcg

SEQ ID NO: 5954203 - DNA, 25 bp, Homo sapien
ctagtgctcttctcatgaactgcac

SEQ ID NO: 5954204 - DNA, 25 bp, Homo sapien
tcttcaatatctcatcctccatcat

SEQ ID NO: 5954205 - DNA, 25 bp, Homo sapien
attcagaacggtatctctgtataat

SEQ ID NO: 5954206 - DNA, 25 bp, Homo sapien
ggtctttataccgttcttcaatatc

SEQ ID NO: 5954207 - DNA, 25 bp, Homo sapien
ttaaatttgtcagctcgttgattag

SEQ ID NO: 5954208 - DNA, 25 bp, Homo sapien
caggatatcgttgatgcccagtttc

SEQ ID NO: 5954209 - DNA, 25 bp, Homo sapien
ttcttgttggaaattaaagtgtgta

SEQ ID NO: 5954210 - DNA, 25 bp, Homo sapien
gcgtttcgttctttatgtcttcgta

SEQ ID NO: 5954211 - DNA, 25 bp, Homo sapien
tgataatgctaccatcgggactctt

SEQ ID NO: 5954212 - DNA, 25 bp, Homo sapien
aagtgtgtattagctgcaacactac

SEQ ID NO: 5954213 - DNA, 25 bp, Homo sapien
gcaaattgttttgtatttcgttagt

SEQ ID NO: 5954214 - DNA, 25 bp, Homo sapien
gaacgctgccgggcgtttcgttctt

SEQ ID NO: 5954215 - DNA, 25 bp, Homo sapien
cagctcgttgattagcaaattgttt

SEQ ID NO: 5954216 - DNA, 25 bp, Homo sapien
aaccgtgtagactaagttgtccatc

SEQ ID NO: 5954217 - DNA, 25 bp, Homo sapien
gtggttgcagttgcgatgcaccggt

SEQ ID NO: 5954218 - DNA, 25 bp, Homo sapien
tatggtcaggatatcgttgatgccc

SEQ ID NO: 5954219 - DNA, 25 bp, Homo sapien
taagttgtccatcgtttagtgttgt

SEQ ID NO: 5954220 - DNA, 25 bp, Homo sapien
ttgatgcccagtttcctgtttccat

SEQ ID NO: 5954221 - DNA, 25 bp, Homo sapien
gatgcaccggtctttataccgttct

SEQ ID NO: 5954222 - DNA, 25 bp, Homo sapien
aagattattcccaatcatgttgatt

SEQ ID NO: 5954223 - DNA, 25 bp, Homo sapien
aattcttaactatggtcaggatatc

SEQ ID NO: 5954224 - DNA, 25 bp, Homo sapien
acactaccaattcacttacctcttt

SEQ ID NO: 5954225 - DNA, 25 bp, Homo sapien
tcgcattacaccgtccgttatgctc

SEQ ID NO: 5954226 - DNA, 25 bp, Homo sapien
atcatccttatttgttcgacctgcg

SEQ ID NO: 5954227 - DNA, 25 bp, Homo sapien
ggtccattgaatgcgccatgtgtgg

SEQ ID NO: 5954228 - DNA, 25 bp, Homo sapien
ttccagtcgtccgtaccaatgacct

SEQ ID NO: 5954229 - DNA, 25 bp, Homo sapien
gtatctctgtataatttcaatagtt

SEQ ID NO: 5954230 - DNA, 25 bp, Homo sapien
ttattcagaacggtatctctgtata

SEQ ID NO: 5954231 - DNA, 25 bp, Homo sapien
catccaattcaaactgcacttgtct

SEQ ID NO: 5954232 - DNA, 25 bp, Homo sapien
tcgtagttatagtagcactggtacc

SEQ ID NO: 5954233 - DNA, 25 bp, Homo sapien
ccacttttgccagcatttgcatgtg

SEQ ID NO: 5954234 - DNA, 25 bp, Homo sapien
atctctgtataatttcaatagtttt

SEQ ID NO: 5954235 - DNA, 25 bp, Homo sapien
ctctagtgctcttctcatgaactgc

SEQ ID NO: 5954236 - DNA, 25 bp, Homo sapien
gtgtattagctgcaacactaccaat

SEQ ID NO: 5954237 - DNA, 25 bp, Homo sapien
tttcgtcaaggagcttctcgatatc

SEQ ID NO: 5954238 - DNA, 25 bp, Homo sapien
ggttgcagttgcgatgcaccggtct

SEQ ID NO: 5954239 - DNA, 25 bp, Homo sapien
gcactggtaccagcagatccacttt

SEQ ID NO: 5954240 - DNA, 25 bp, Homo sapien
ccgtatcatccaattcaaactgcac

SEQ ID NO: 5954241 - DNA, 25 bp, Homo sapien
gcattacaccgtccgttatgctctt

SEQ ID NO: 5954242 - DNA, 25 bp, Homo sapien
gatattcgaagattattcccaatca

SEQ ID NO: 5954243 - DNA, 25 bp, Homo sapien
tccatttgccacgttgctttgcctt

SEQ ID NO: 5954244 - DNA, 25 bp, Homo sapien
ctttgccttcttaaatttgtcagct

SEQ ID NO: 5954245 - DNA, 25 bp, Homo sapien
caccgtccgttatgctcttttgaag

SEQ ID NO: 5954246 - DNA, 25 bp, Homo sapien
tgctaccatcgggactcttgaatag

SEQ ID NO: 5954247 - DNA, 25 bp, Homo sapien
ggatatcgttgatgcccagtttcct

SEQ ID NO: 5954248 - DNA, 25 bp, Homo sapien
tttagtgttgttctgtactctggga

SEQ ID NO: 5954249 - DNA, 25 bp, Homo sapien
tgcccagtttcctgtttccatttgc

SEQ ID NO: 5954250 - DNA, 25 bp, Homo sapien
tttgttcgacctgcgttttcttgaa

SEQ ID NO: 5954251 - DNA, 25 bp, Homo sapien
cttctcatgaactgcaccgtatcat

SEQ ID NO: 5954252 - DNA, 25 bp, Homo sapien
tgggtccattgaatgcgccatgtgt

SEQ ID NO: 5954253 - DNA, 25 bp, Homo sapien
gtcaaggagcttctcgatatcatgc

SEQ ID NO: 5954254 - DNA, 25 bp, Homo sapien
tgctcttctcatgaactgcaccgta

SEQ ID NO: 5954255 - DNA, 25 bp, Homo sapien
catgtgtggcgtagtcgtagttata

SEQ ID NO: 5954256 - DNA, 25 bp, Homo sapien
ctcttttgaagaatcagctgcagtt

SEQ ID NO: 5954257 - DNA, 25 bp, Homo sapien
actgcaccgtatcatccaattcaaa

SEQ ID NO: 5954258 - DNA, 25 bp, Homo sapien
tgttctgtactctgggaataaattc

SEQ ID NO: 5954259 - DNA, 25 bp, Homo sapien
gctgcagttcatgaacgctgccggg

SEQ ID NO: 5954260 - DNA, 25 bp, Homo sapien
tttataccgttcttcaatatctcat

SEQ ID NO: 5954261 - DNA, 25 bp, Homo sapien
gtccgttatgctcttttgaagaatc

SEQ ID NO: 5954262 - DNA, 25 bp, Homo sapien
tgtctagccaatttccagtcgtccg

SEQ ID NO: 5954263 - DNA, 25 bp, Homo sapien
cagttcttcattcttgttggaaatt

SEQ ID NO: 5954264 - DNA, 25 bp, Homo sapien
taactatggtcaggatatcgttgat

SEQ ID NO: 5954265 - DNA, 25 bp, Homo sapien
ttcctaaccagttcttcattcttgt

SEQ ID NO: 5954266 - DNA, 25 bp, Homo sapien
taccgttcttcaatatctcatcctc

SEQ ID NO: 5954267 - DNA, 25 bp, Homo sapien
gcttctcgatatcatgcatttccaa

SEQ ID NO: 5954268 - DNA, 25 bp, Homo sapien
gactcttgaatagcttctgaaaatt

SEQ ID NO: 5954269 - DNA, 25 bp, Homo sapien
tttcgcattacaccgtccgttatgc

SEQ ID NO: 5954270 - DNA, 25 bp, Homo sapien
tcttcattcttgttggaaattaaag

SEQ ID NO: 5954271 - DNA, 25 bp, Homo sapien
tagcaaattgttttgtatttcgtta

SEQ ID NO: 5954272 - DNA, 25 bp, Homo sapien
atgacctttcgcattacaccgtccg

SEQ ID NO: 5954273 - DNA, 25 bp, Homo sapien
ctaccatcgggactcttgaatagct

SEQ ID NO: 5954274 - DNA, 25 bp, Homo sapien
ttttgtatttcgttagtcaacttga

SEQ ID NO: 5954275 - DNA, 25 bp, Homo sapien
atagtagcactggtaccagcagatc

SEQ ID NO: 5954276 - DNA, 25 bp, Homo sapien
agttatagtagcactggtaccagca

SEQ ID NO: 5954277 - DNA, 25 bp, Homo sapien
ctcttgaatagcttctgaaaattcc

SEQ ID NO: 5954278 - DNA, 25 bp, Homo sapien
cggtatctctgtataatttcaatag

SEQ ID NO: 5954279 - DNA, 25 bp, Homo sapien
cccagtttcctgtttccatttgcca

SEQ ID NO: 5954280 - DNA, 25 bp, Homo sapien
tctgaaaattcccagttttactttc

SEQ ID NO: 5954281 - DNA, 25 bp, Homo sapien
gtccgtaccaatgacctttcgcatt

SEQ ID NO: 5954282 - DNA, 25 bp, Homo sapien
cttcgtaatttatctcattcttgat

SEQ ID NO: 5954283 - DNA, 25 bp, Homo sapien
atatctcatcctccatcatccttat

SEQ ID NO: 5954284 - DNA, 25 bp, Homo sapien
tagcactggtaccagcagatccact

SEQ ID NO: 5954285 - DNA, 25 bp, Homo sapien
aacttgactagcgatattcgaagat

SEQ ID NO: 5954286 - DNA, 25 bp, Homo sapien
atcatgcatttccaaaccgtgtaga

SEQ ID NO: 5954287 - DNA, 25 bp, Homo sapien
tttccatttgccacgttgctttgcc

SEQ ID NO: 5954288 - DNA, 25 bp, Homo sapien
cattcttgataatgctaccatcggg

SEQ ID NO: 5954289 - DNA, 25 bp, Homo sapien
catccttatttgttcgacctgcgtt

SEQ ID NO: 5954290 - DNA, 25 bp, Homo sapien
gtagactaagttgtccatcgtttag

SEQ ID NO: 5954291 - DNA, 25 bp, Homo sapien
atgttgattcctcccccgttcctaa

SEQ ID NO: 5954292 - DNA, 25 bp, Homo sapien
tgcagttcatgaacgctgccgggcg

SEQ ID NO: 5954293 - DNA, 25 bp, Homo sapien
ttatctcattcttgataatgctacc

SEQ ID NO: 5954294 - DNA, 25 bp, Homo sapien
tctgggaataaattcttaactatgg

SEQ ID NO: 5954295 - DNA, 25 bp, Homo sapien
tcgttgattagcaaattgttttgta

SEQ ID NO: 5954296 - DNA, 25 bp, Homo sapien
gccttcttaaatttgtcagctcgtt

SEQ ID NO: 5954297 - DNA, 25 bp, Homo sapien
ttcaatatctcatcctccatcatcc

SEQ ID NO: 5954298 - DNA, 25 bp, Homo sapien
taattatgctgggtatttgtactca

SEQ ID NO: 5954299 - DNA, 25 bp, Homo sapien
aaattcctgcttatgaattcgatgg

SEQ ID NO: 5954300 - DNA, 25 bp, Homo sapien
gtccttgccatggttcacattatga

SEQ ID NO: 5954301 - DNA, 25 bp, Homo sapien
gctgacagagtcaaagaccctcaat

SEQ ID NO: 5954302 - DNA, 25 bp, Homo sapien
atctttgctggctagcaaatccacg

SEQ ID NO: 5954303 - DNA, 25 bp, Homo sapien
atttccggtagaatcagaaagggac

SEQ ID NO: 5954304 - DNA, 25 bp, Homo sapien
ggctatcccattgggtaaaaacgtg

SEQ ID NO: 5954305 - DNA, 25 bp, Homo sapien
tcctgcttatgaattcgatggtgat

SEQ ID NO: 5954306 - DNA, 25 bp, Homo sapien
cctttatttcatctatgaccgctac

SEQ ID NO: 5954307 - DNA, 25 bp, Homo sapien
tcacattatgatatttccggtagaa

SEQ ID NO: 5954308 - DNA, 25 bp, Homo sapien
tatttcatctatgaccgctactgcc

SEQ ID NO: 5954309 - DNA, 25 bp, Homo sapien
caatctttgctggctagcaaatcca

SEQ ID NO: 5954310 - DNA, 25 bp, Homo sapien
gtggatatgtccgctttgaaggacc

SEQ ID NO: 5954311 - DNA, 25 bp, Homo sapien
catgaaattcaggaagccaacagtg

SEQ ID NO: 5954312 - DNA, 25 bp, Homo sapien
atgcttactttatggtcggtgctat

SEQ ID NO: 5954313 - DNA, 25 bp, Homo sapien
tagcggctatcccattgggtaaaaa

SEQ ID NO: 5954314 - DNA, 25 bp, Homo sapien
tgatgacgttttaaaggaaaataac

SEQ ID NO: 5954315 - DNA, 25 bp, Homo sapien
tagcaaatccacgtacaggacccca

SEQ ID NO: 5954316 - DNA, 25 bp, Homo sapien
acagaccgatgctgacagagtcaaa

SEQ ID NO: 5954317 - DNA, 25 bp, Homo sapien
ggtgattttggtggttggttctgtc

SEQ ID NO: 5954318 - DNA, 25 bp, Homo sapien
ttgtactcacttaggttgtgttcca

SEQ ID NO: 5954319 - DNA, 25 bp, Homo sapien
ggccgttcttatgcttactttatgg

SEQ ID NO: 5954320 - DNA, 25 bp, Homo sapien
ttgctggctagcaaatccacgtaca

SEQ ID NO: 5954321 - DNA, 25 bp, Homo sapien
caaccgtagaaacctttatttcatc

SEQ ID NO: 5954322 - DNA, 25 bp, Homo sapien
aacctttatttcatctatgaccgct

SEQ ID NO: 5954323 - DNA, 25 bp, Homo sapien
tttgaaggacccacagaccgatgct

SEQ ID NO: 5954324 - DNA, 25 bp, Homo sapien
attcgatggtgataaggtcattgtt

SEQ ID NO: 5954325 - DNA, 25 bp, Homo sapien
tttaaaggaaaataacgatgctgat

SEQ ID NO: 5954326 - DNA, 25 bp, Homo sapien
ctgtccttgccatggttcacattat

SEQ ID NO: 5954327 - DNA, 25 bp, Homo sapien
acttagaaattcctgcttatgaatt

SEQ ID NO: 5954328 - DNA, 25 bp, Homo sapien
atcatctgtcaagacctgcttcaag

SEQ ID NO: 5954329 - DNA, 25 bp, Homo sapien
agaccctcaatggttaattatgctg

SEQ ID NO: 5954330 - DNA, 25 bp, Homo sapien
gcaaatccacgtacaggaccccaaa

SEQ ID NO: 5954331 - DNA, 25 bp, Homo sapien
ccaattggtgaagccggtgattttg

SEQ ID NO: 5954332 - DNA, 25 bp, Homo sapien
ttttgtcatctgcaggtgccaaatc

SEQ ID NO: 5954333 - DNA, 25 bp, Homo sapien
actcacttaggttgtgttccaattg

SEQ ID NO: 5954334 - DNA, 25 bp, Homo sapien
gtccgctttgaaggacccacagacc

SEQ ID NO: 5954335 - DNA, 25 bp, Homo sapien
ttatgcttactttatggtcggtgct

SEQ ID NO: 5954336 - DNA, 25 bp, Homo sapien
atttctcaatctttgctggctagca

SEQ ID NO: 5954337 - DNA, 25 bp, Homo sapien
taaaaacgtggttgtcaaatggcaa

SEQ ID NO: 5954338 - DNA, 25 bp, Homo sapien
gttcttatgcttactttatggtcgg

SEQ ID NO: 5954339 - DNA, 25 bp, Homo sapien
gcttatgaattcgatggtgataagg

SEQ ID NO: 5954340 - DNA, 25 bp, Homo sapien
aagcctgtgttcattagacacagaa

SEQ ID NO: 5954341 - DNA, 25 bp, Homo sapien
taagatcatctgtcaagacctgctt

SEQ ID NO: 5954342 - DNA, 25 bp, Homo sapien
gatgctgataaaggccgttcttatg

SEQ ID NO: 5954343 - DNA, 25 bp, Homo sapien
gtcatctgcaggtgccaaatcaacc

SEQ ID NO: 5954344 - DNA, 25 bp, Homo sapien
agatcatctgtcaagacctgcttca

SEQ ID NO: 5954345 - DNA, 25 bp, Homo sapien
cgatgttttggctatggctaaagtt

SEQ ID NO: 5954346 - DNA, 25 bp, Homo sapien
gtctttaacttccaaaagactgatt

SEQ ID NO: 5954347 - DNA, 25 bp, Homo sapien
ccgttcttatgcttactttatggtc

SEQ ID NO: 5954348 - DNA, 25 bp, Homo sapien
attttggtggttggttctgtccttg

SEQ ID NO: 5954349 - DNA, 25 bp, Homo sapien
ctatgaccgctactgccgatgtttt

SEQ ID NO: 5954350 - DNA, 25 bp, Homo sapien
aattggtgaagccggtgattttggt

SEQ ID NO: 5954351 - DNA, 25 bp, Homo sapien
tcaggaagccaacagtgtggatatg

SEQ ID NO: 5954352 - DNA, 25 bp, Homo sapien
tggtggttggttctgtccttgccat

SEQ ID NO: 5954353 - DNA, 25 bp, Homo sapien
tagaatcagaaagggacctgccccc

SEQ ID NO: 5954354 - DNA, 25 bp, Homo sapien
gttcacattatgatatttccggtag

SEQ ID NO: 5954355 - DNA, 25 bp, Homo sapien
aaagaccctcaatggttaattatgc

SEQ ID NO: 5954356 - DNA, 25 bp, Homo sapien
ccattgggtaaaaacgtggttgtca

SEQ ID NO: 5954357 - DNA, 25 bp, Homo sapien
tggtcggtgctatgggtcttttgtc

SEQ ID NO: 5954358 - DNA, 25 bp, Homo sapien
gccatggttcacattatgatatttc

SEQ ID NO: 5954359 - DNA, 25 bp, Homo sapien
tcaagacctgcttcaagccaatgtc

SEQ ID NO: 5954360 - DNA, 25 bp, Homo sapien
atttgtactcacttaggttgtgttc

SEQ ID NO: 5954361 - DNA, 25 bp, Homo sapien
aaggaaaataacgatgctgataaag

SEQ ID NO: 5954362 - DNA, 25 bp, Homo sapien
cggtgctatgggtcttttgtcatct

SEQ ID NO: 5954363 - DNA, 25 bp, Homo sapien
tcgatggtgataaggtcattgttgg

SEQ ID NO: 5954364 - DNA, 25 bp, Homo sapien
gctggctagcaaatccacgtacagg

SEQ ID NO: 5954365 - DNA, 25 bp, Homo sapien
caggtgccaaatcaaccgtagaaac

SEQ ID NO: 5954366 - DNA, 25 bp, Homo sapien
gttcattagacacagaactcctcat

SEQ ID NO: 5954367 - DNA, 25 bp, Homo sapien
tatgatatttccggtagaatcagaa

SEQ ID NO: 5954368 - DNA, 25 bp, Homo sapien
tctgtcaagacctgcttcaagccaa

SEQ ID NO: 5954369 - DNA, 25 bp, Homo sapien
agttgaagttaatttagcggctatc

SEQ ID NO: 5954370 - DNA, 25 bp, Homo sapien
ggaataagatcatctgtcaagacct

SEQ ID NO: 5954371 - DNA, 25 bp, Homo sapien
ccttgccatggttcacattatgata

SEQ ID NO: 5954372 - DNA, 25 bp, Homo sapien
tcaaagaccctcaatggttaattat

SEQ ID NO: 5954373 - DNA, 25 bp, Homo sapien
tgtgttccaattggtgaagccggtg

SEQ ID NO: 5954374 - DNA, 25 bp, Homo sapien
attagacacagaactcctcatgaaa

SEQ ID NO: 5954375 - DNA, 25 bp, Homo sapien
tcacttaggttgtgttccaattggt

SEQ ID NO: 5954376 - DNA, 25 bp, Homo sapien
agaccgatgctgacagagtcaaaga

SEQ ID NO: 5954377 - DNA, 25 bp, Homo sapien
aaaataacgatgctgataaaggccg

SEQ ID NO: 5954378 - DNA, 25 bp, Homo sapien
tttgatgacgttttaaaggaaaata

SEQ ID NO: 5954379 - DNA, 25 bp, Homo sapien
ggttctgtccttgccatggttcaca

SEQ ID NO: 5954380 - DNA, 25 bp, Homo sapien
ccggtagaatcagaaagggacctgc

SEQ ID NO: 5954381 - DNA, 25 bp, Homo sapien
attcctgcttatgaattcgatggtg

SEQ ID NO: 5954382 - DNA, 25 bp, Homo sapien
gaagccaacagtgtggatatgtccg

SEQ ID NO: 5954383 - DNA, 25 bp, Homo sapien
atatgtccgctttgaaggacccaca

SEQ ID NO: 5954384 - DNA, 25 bp, Homo sapien
ctgataaaggccgttcttatgctta

SEQ ID NO: 5954385 - DNA, 25 bp, Homo sapien
ggtagaatcagaaagggacctgccc

SEQ ID NO: 5954386 - DNA, 25 bp, Homo sapien
gcggctatcccattgggtaaaaacg

SEQ ID NO: 5954387 - DNA, 25 bp, Homo sapien
cagtgtggatatgtccgctttgaag

SEQ ID NO: 5954388 - DNA, 25 bp, Homo sapien
ttggttctgtccttgccatggttca

SEQ ID NO: 5954389 - DNA, 25 bp, Homo sapien
tcttttgtcatctgcaggtgccaaa

SEQ ID NO: 5954390 - DNA, 25 bp, Homo sapien
aacgtggttgtcaaatggcaaggta

SEQ ID NO: 5954391 - DNA, 25 bp, Homo sapien
tggctagcaaatccacgtacaggac

SEQ ID NO: 5954392 - DNA, 25 bp, Homo sapien
ttatgaattcgatggtgataaggtc

SEQ ID NO: 5954393 - DNA, 25 bp, Homo sapien
tgggtaaaaacgtggttgtcaaatg

SEQ ID NO: 5954394 - DNA, 25 bp, Homo sapien
ctttaacttccaaaagactgatttc

SEQ ID NO: 5954395 - DNA, 25 bp, Homo sapien
ttaggttgtgttccaattggtgaag

SEQ ID NO: 5954396 - DNA, 25 bp, Homo sapien
gctatgggtcttttgtcatctgcag

SEQ ID NO: 5954397 - DNA, 25 bp, Homo sapien
aaggacccacagaccgatgctgaca

SEQ ID NO: 5954398 - DNA, 25 bp, Homo sapien
tttatggtcggtgctatgggtcttt

SEQ ID NO: 5954399 - DNA, 25 bp, Homo sapien
ttctcaatctttgctggctagcaaa

SEQ ID NO: 5954400 - DNA, 25 bp, Homo sapien
aacttccaaaagactgatttctcaa

SEQ ID NO: 5954401 - DNA, 25 bp, Homo sapien
aataacgatgctgataaaggccgtt

SEQ ID NO: 5954402 - DNA, 25 bp, Homo sapien
tgggtcttttgtcatctgcaggtgc

SEQ ID NO: 5954403 - DNA, 25 bp, Homo sapien
tgttccaattggtgaagccggtgat

SEQ ID NO: 5954404 - DNA, 25 bp, Homo sapien
aaagttgaagttaatttagcggcta

SEQ ID NO: 5954405 - DNA, 25 bp, Homo sapien
accctcaatggttaattatgctggg

SEQ ID NO: 5954406 - DNA, 25 bp, Homo sapien
tgatttctcaatctttgctggctag

SEQ ID NO: 5954407 - DNA, 25 bp, Homo sapien
tggtgataaggtcattgttggttag

SEQ ID NO: 5954408 - DNA, 25 bp, Homo sapien
aaattcaggaagccaacagtgtgga

SEQ ID NO: 5954409 - DNA, 25 bp, Homo sapien
aaaacgtggttgtcaaatggcaagg

SEQ ID NO: 5954410 - DNA, 25 bp, Homo sapien
cttccaaaagactgatttctcaatc

SEQ ID NO: 5954411 - DNA, 25 bp, Homo sapien
atgaccgctactgccgatgttttgg

SEQ ID NO: 5954412 - DNA, 25 bp, Homo sapien
actgatttctcaatctttgctggct

SEQ ID NO: 5954413 - DNA, 25 bp, Homo sapien
caaattttgatgacgttttaaagga

SEQ ID NO: 5954414 - DNA, 25 bp, Homo sapien
tttggtggttggttctgtccttgcc

SEQ ID NO: 5954415 - DNA, 25 bp, Homo sapien
ttaacttccaaaagactgatttctc

SEQ ID NO: 5954416 - DNA, 25 bp, Homo sapien
ttactttatggtcggtgctatgggt

SEQ ID NO: 5954417 - DNA, 25 bp, Homo sapien
tggttaattatgctgggtatttgta

SEQ ID NO: 5954418 - DNA, 25 bp, Homo sapien
atcagaaagggacctgcccccttaa

SEQ ID NO: 5954419 - DNA, 25 bp, Homo sapien
aatggttaattatgctgggtatttg

SEQ ID NO: 5954420 - DNA, 25 bp, Homo sapien
ggatatgtccgctttgaaggaccca

SEQ ID NO: 5954421 - DNA, 25 bp, Homo sapien
ttgtcatctgcaggtgccaaatcaa

SEQ ID NO: 5954422 - DNA, 25 bp, Homo sapien
acttaggttgtgttccaattggtga

SEQ ID NO: 5954423 - DNA, 25 bp, Homo sapien
gtgctatgggtcttttgtcatctgc

SEQ ID NO: 5954424 - DNA, 25 bp, Homo sapien
cctcaatggttaattatgctgggta

SEQ ID NO: 5954425 - DNA, 25 bp, Homo sapien
ttctgtccttgccatggttcacatt

SEQ ID NO: 5954426 - DNA, 25 bp, Homo sapien
attatgctgggtatttgtactcact

SEQ ID NO: 5954427 - DNA, 25 bp, Homo sapien
tgctgggtatttgtactcacttagg

SEQ ID NO: 5954428 - DNA, 25 bp, Homo sapien
tactgccgatgttttggctatggct

SEQ ID NO: 5954429 - DNA, 25 bp, Homo sapien
actttatggtcggtgctatgggtct

SEQ ID NO: 5954430 - DNA, 25 bp, Homo sapien
atgaattcgatggtgataaggtcat

SEQ ID NO: 5954431 - DNA, 25 bp, Homo sapien
ctaaagttgaagttaatttagcggc

SEQ ID NO: 5954432 - DNA, 25 bp, Homo sapien
gaactcctcatgaaattcaggaagc

SEQ ID NO: 5954433 - DNA, 25 bp, Homo sapien
acccacagaccgatgctgacagagt

SEQ ID NO: 5954434 - DNA, 25 bp, Homo sapien
agccaacagtgtggatatgtccgct

SEQ ID NO: 5954435 - DNA, 25 bp, Homo sapien
tgattttggtggttggttctgtcct

SEQ ID NO: 5954436 - DNA, 25 bp, Homo sapien
gtgtggatatgtccgctttgaagga

SEQ ID NO: 5954437 - DNA, 25 bp, Homo sapien
atgctgacagagtcaaagaccctca

SEQ ID NO: 5954438 - DNA, 25 bp, Homo sapien
gttttaaaggaaaataacgatgctg

SEQ ID NO: 5954439 - DNA, 25 bp, Homo sapien
atgtccgctttgaaggacccacaga

SEQ ID NO: 5954440 - DNA, 25 bp, Homo sapien
tttcatctatgaccgctactgccga

SEQ ID NO: 5954441 - DNA, 25 bp, Homo sapien
gtactcacttaggttgtgttccaat

SEQ ID NO: 5954442 - DNA, 25 bp, Homo sapien
ttggtgaagccggtgattttggtgg

SEQ ID NO: 5954443 - DNA, 25 bp, Homo sapien
gctttgaaggacccacagaccgatg

SEQ ID NO: 5954444 - DNA, 25 bp, Homo sapien
ctcaatctttgctggctagcaaatc

SEQ ID NO: 5954445 - DNA, 25 bp, Homo sapien
tcaaatggcaaggtaagcctgtgtt

SEQ ID NO: 5954446 - DNA, 25 bp, Homo sapien
ggtgaagccggtgattttggtggtt

SEQ ID NO: 5954447 - DNA, 25 bp, Homo sapien
ctgccgatgttttggctatggctaa

SEQ ID NO: 5954448 - DNA, 25 bp, Homo sapien
accgatgctgacagagtcaaagacc

SEQ ID NO: 5954449 - DNA, 25 bp, Homo sapien
acgatgctgataaaggccgttctta

SEQ ID NO: 5954450 - DNA, 25 bp, Homo sapien
tgacagagtcaaagaccctcaatgg

SEQ ID NO: 5954451 - DNA, 25 bp, Homo sapien
catggttcacattatgatatttccg

SEQ ID NO: 5954452 - DNA, 25 bp, Homo sapien
ttgaagttaatttagcggctatccc

SEQ ID NO: 5954453 - DNA, 25 bp, Homo sapien
ttgccatggttcacattatgatatt

SEQ ID NO: 5954454 - DNA, 25 bp, Homo sapien
gatggtgataaggtcattgttggtt

SEQ ID NO: 5954455 - DNA, 25 bp, Homo sapien
agtcaaagaccctcaatggttaatt

SEQ ID NO: 5954456 - DNA, 25 bp, Homo sapien
gaattcgatggtgataaggtcattg

SEQ ID NO: 5954457 - DNA, 25 bp, Homo sapien
tgcaggtgccaaatcaaccgtagaa

SEQ ID NO: 5954458 - DNA, 25 bp, Homo sapien
gaatcagaaagggacctgccccctt

SEQ ID NO: 5954459 - DNA, 25 bp, Homo sapien
tgatatttccggtagaatcagaaag

SEQ ID NO: 5954460 - DNA, 25 bp, Homo sapien
ccggtgattttggtggttggttctg

SEQ ID NO: 5954461 - DNA, 25 bp, Homo sapien
tatgctgggtatttgtactcactta

SEQ ID NO: 5954462 - DNA, 25 bp, Homo sapien
aggttgtgttccaattggtgaagcc

SEQ ID NO: 5954463 - DNA, 25 bp, Homo sapien
caatgtctttaacttccaaaagact

SEQ ID NO: 5954464 - DNA, 25 bp, Homo sapien
gctactgccgatgttttggctatgg

SEQ ID NO: 5954465 - DNA, 25 bp, Homo sapien
gacctgcttcaagccaatgtcttta

SEQ ID NO: 5954466 - DNA, 25 bp, Homo sapien
cgtggttgtcaaatggcaaggtaag

SEQ ID NO: 5954467 - DNA, 25 bp, Homo sapien
tgcttcaagccaatgtctttaactt

SEQ ID NO: 5954468 - DNA, 25 bp, Homo sapien
gccaatgtctttaacttccaaaaga

SEQ ID NO: 5954469 - DNA, 25 bp, Homo sapien
aagccaatgtctttaacttccaaaa

SEQ ID NO: 5954470 - DNA, 25 bp, Homo sapien
tcctcatgaaattcaggaagccaac

SEQ ID NO: 5954471 - DNA, 25 bp, Homo sapien
gataaaggccgttcttatgcttact

SEQ ID NO: 5954472 - DNA, 25 bp, Homo sapien
attatgatatttccggtagaatcag

SEQ ID NO: 5954473 - DNA, 25 bp, Homo sapien
ccacagaccgatgctgacagagtca

SEQ ID NO: 5954474 - DNA, 25 bp, Homo sapien
ctgtgttcattagacacagaactcc

SEQ ID NO: 5954475 - DNA, 25 bp, Homo sapien
tagaaacctttatttcatctatgac

SEQ ID NO: 5954476 - DNA, 25 bp, Homo sapien
gtaagcctgtgttcattagacacag

SEQ ID NO: 5954477 - DNA, 25 bp, Homo sapien
ccgctttgaaggacccacagaccga

SEQ ID NO: 5954478 - DNA, 25 bp, Homo sapien
tagacacagaactcctcatgaaatt

SEQ ID NO: 5954479 - DNA, 25 bp, Homo sapien
ctgggtatttgtactcacttaggtt

SEQ ID NO: 5954480 - DNA, 25 bp, Homo sapien
ttagaaattcctgcttatgaattcg

SEQ ID NO: 5954481 - DNA, 25 bp, Homo sapien
aggaagccaacagtgtggatatgtc

SEQ ID NO: 5954482 - DNA, 25 bp, Homo sapien
ggacccacagaccgatgctgacaga

SEQ ID NO: 5954483 - DNA, 25 bp, Homo sapien
aaagactgatttctcaatctttgct

SEQ ID NO: 5954484 - DNA, 25 bp, Homo sapien
cctgcttcaagccaatgtctttaac

SEQ ID NO: 5954485 - DNA, 25 bp, Homo sapien
cagaactcctcatgaaattcaggaa

SEQ ID NO: 5954486 - DNA, 25 bp, Homo sapien
attcaggaagccaacagtgtggata

SEQ ID NO: 5954487 - DNA, 25 bp, Homo sapien
ggtaaaaacgtggttgtcaaatggc

SEQ ID NO: 5954488 - DNA, 25 bp, Homo sapien
ttccggtagaatcagaaagggacct

SEQ ID NO: 5954489 - DNA, 25 bp, Homo sapien
accgtagaaacctttatttcatcta

SEQ ID NO: 5954490 - DNA, 25 bp, Homo sapien
cacgtacaggaccccaaattttgat

SEQ ID NO: 5954491 - DNA, 25 bp, Homo sapien
atctatgaccgctactgccgatgtt

SEQ ID NO: 5954492 - DNA, 25 bp, Homo sapien
tatggtcggtgctatgggtcttttg

SEQ ID NO: 5954493 - DNA, 25 bp, Homo sapien
gccgatgttttggctatggctaaag

SEQ ID NO: 5954494 - DNA, 25 bp, Homo sapien
acattatgatatttccggtagaatc

SEQ ID NO: 5954495 - DNA, 25 bp, Homo sapien
agaaattcctgcttatgaattcgat

SEQ ID NO: 5954496 - DNA, 25 bp, Homo sapien
tcaatggttaattatgctgggtatt

SEQ ID NO: 5954497 - DNA, 25 bp, Homo sapien
tccacgtacaggaccccaaattttg

SEQ ID NO: 5954498 - DNA, 25 bp, Homo sapien
gttaggaataagatcatctgtcaag

SEQ ID NO: 5954499 - DNA, 25 bp, Homo sapien
atggcaaggtaagcctgtgttcatt

SEQ ID NO: 5954500 - DNA, 25 bp, Homo sapien
gtatttgtactcacttaggttgtgt

SEQ ID NO: 5954501 - DNA, 25 bp, Homo sapien
tttatttcatctatgaccgctactg

SEQ ID NO: 5954502 - DNA, 25 bp, Homo sapien
cgatgctgacagagtcaaagaccct

SEQ ID NO: 5954503 - DNA, 25 bp, Homo sapien
agccggtgattttggtggttggttc

SEQ ID NO: 5954504 - DNA, 25 bp, Homo sapien
aggtaagcctgtgttcattagacac

SEQ ID NO: 5954505 - DNA, 25 bp, Homo sapien
ggtcttttgtcatctgcaggtgcca

SEQ ID NO: 5954506 - DNA, 25 bp, Homo sapien
tctgcaggtgccaaatcaaccgtag

SEQ ID NO: 5954507 - DNA, 25 bp, Homo sapien
gtcggtgctatgggtcttttgtcat

SEQ ID NO: 5954508 - DNA, 25 bp, Homo sapien
cttcaagccaatgtctttaacttcc

SEQ ID NO: 5954509 - DNA, 25 bp, Homo sapien
ggcaaggtaagcctgtgttcattag

SEQ ID NO: 5954510 - DNA, 25 bp, Homo sapien
tgaaggacccacagaccgatgctga

SEQ ID NO: 5954511 - DNA, 25 bp, Homo sapien
gaagttaatttagcggctatcccat

SEQ ID NO: 5954512 - DNA, 25 bp, Homo sapien
tggctatggctaaagttgaagttaa

SEQ ID NO: 5954513 - DNA, 25 bp, Homo sapien
ccaacagtgtggatatgtccgcttt

SEQ ID NO: 5954514 - DNA, 25 bp, Homo sapien
atgttttggctatggctaaagttga

SEQ ID NO: 5954515 - DNA, 25 bp, Homo sapien
taacgatgctgataaaggccgttct

SEQ ID NO: 5954516 - DNA, 25 bp, Homo sapien
tggttgtcaaatggcaaggtaagcc

SEQ ID NO: 5954517 - DNA, 25 bp, Homo sapien
gctagcaaatccacgtacaggaccc

SEQ ID NO: 5954518 - DNA, 25 bp, Homo sapien
gaaacctttatttcatctatgaccg

SEQ ID NO: 5954519 - DNA, 25 bp, Homo sapien
tatgggtcttttgtcatctgcaggt

SEQ ID NO: 5954520 - DNA, 25 bp, Homo sapien
agactgatttctcaatctttgctgg

SEQ ID NO: 5954521 - DNA, 25 bp, Homo sapien
gaccccaaattttgatgacgtttta

SEQ ID NO: 5954522 - DNA, 25 bp, Homo sapien
aacagtgtggatatgtccgctttga

SEQ ID NO: 5954523 - DNA, 25 bp, Homo sapien
catctgcaggtgccaaatcaaccgt

SEQ ID NO: 5954524 - DNA, 25 bp, Homo sapien
aaggccgttcttatgcttactttat

SEQ ID NO: 5954525 - DNA, 25 bp, Homo sapien
tggttcacattatgatatttccggt

SEQ ID NO: 5954526 - DNA, 25 bp, Homo sapien
cgtagaaacctttatttcatctatg

SEQ ID NO: 5954527 - DNA, 25 bp, Homo sapien
ttaaacttagaaattcctgcttatg

SEQ ID NO: 5954528 - DNA, 25 bp, Homo sapien
tgtcaagacctgcttcaagccaatg

SEQ ID NO: 5954529 - DNA, 25 bp, Homo sapien
ggtgccaaatcaaccgtagaaacct

SEQ ID NO: 5954530 - DNA, 25 bp, Homo sapien
aagacctgcttcaagccaatgtctt

SEQ ID NO: 5954531 - DNA, 25 bp, Homo sapien
taaaggccgttcttatgcttacttt

SEQ ID NO: 5954532 - DNA, 25 bp, Homo sapien
tttagcggctatcccattgggtaaa

SEQ ID NO: 5954533 - DNA, 25 bp, Homo sapien
aatttagcggctatcccattgggta

SEQ ID NO: 5954534 - DNA, 25 bp, Homo sapien
aataagatcatctgtcaagacctgc

SEQ ID NO: 5954535 - DNA, 25 bp, Homo sapien
gtgttcattagacacagaactcctc

SEQ ID NO: 5954536 - DNA, 25 bp, Homo sapien
tatggctaaagttgaagttaattta

SEQ ID NO: 5954537 - DNA, 25 bp, Homo sapien
gcttactttatggtcggtgctatgg

SEQ ID NO: 5954538 - DNA, 25 bp, Homo sapien
agagtcaaagaccctcaatggttaa

SEQ ID NO: 5954539 - DNA, 25 bp, Homo sapien
gtggttggttctgtccttgccatgg

SEQ ID NO: 5954540 - DNA, 25 bp, Homo sapien
actcctcatgaaattcaggaagcca

SEQ ID NO: 5954541 - DNA, 25 bp, Homo sapien
taaaggaaaataacgatgctgataa

SEQ ID NO: 5954542 - DNA, 25 bp, Homo sapien
taggaataagatcatctgtcaagac

SEQ ID NO: 5954543 - DNA, 25 bp, Homo sapien
ttccaattggtgaagccggtgattt

SEQ ID NO: 5954544 - DNA, 25 bp, Homo sapien
atgttaggaataagatcatctgtca

SEQ ID NO: 5954545 - DNA, 25 bp, Homo sapien
tgaagccggtgattttggtggttgg

SEQ ID NO: 5954546 - DNA, 25 bp, Homo sapien
tgccaaatcaaccgtagaaaccttt

SEQ ID NO: 5954547 - DNA, 25 bp, Homo sapien
tgtcaaatggcaaggtaagcctgtg

SEQ ID NO: 5954548 - DNA, 25 bp, Homo sapien
atcaaccgtagaaacctttatttca

SEQ ID NO: 5954549 - DNA, 25 bp, Homo sapien
aaacttagaaattcctgcttatgaa

SEQ ID NO: 5954550 - DNA, 25 bp, Homo sapien
ggttggttctgtccttgccatggtt

SEQ ID NO: 5954551 - DNA, 25 bp, Homo sapien
tgctgataaaggccgttcttatgct

SEQ ID NO: 5954552 - DNA, 25 bp, Homo sapien
caggaccccaaattttgatgacgtt

SEQ ID NO: 5954553 - DNA, 25 bp, Homo sapien
agttaatttagcggctatcccattg

SEQ ID NO: 5954554 - DNA, 25 bp, Homo sapien
catctgtcaagacctgcttcaagcc

SEQ ID NO: 5954555 - DNA, 25 bp, Homo sapien
tacaggaccccaaattttgatgacg

SEQ ID NO: 5954556 - DNA, 25 bp, Homo sapien
ccttaaacttagaaattcctgctta

SEQ ID NO: 5954557 - DNA, 25 bp, Homo sapien
tgaaattcaggaagccaacagtgtg

SEQ ID NO: 5954558 - DNA, 25 bp, Homo sapien
gttgtcaaatggcaaggtaagcctg

SEQ ID NO: 5954559 - DNA, 25 bp, Homo sapien
gttttggctatggctaaagttgaag

SEQ ID NO: 5954560 - DNA, 25 bp, Homo sapien
cacagaactcctcatgaaattcagg

SEQ ID NO: 5954561 - DNA, 25 bp, Homo sapien
gaccgctactgccgatgttttggct

SEQ ID NO: 5954562 - DNA, 25 bp, Homo sapien
gggtatttgtactcacttaggttgt

SEQ ID NO: 5954563 - DNA, 25 bp, Homo sapien
atgtctttaacttccaaaagactga

SEQ ID NO: 5954564 - DNA, 25 bp, Homo sapien
gttgtgttccaattggtgaagccgg

SEQ ID NO: 5954565 - DNA, 25 bp, Homo sapien
acagagtcaaagaccctcaatggtt

SEQ ID NO: 5954566 - DNA, 25 bp, Homo sapien
gctatggctaaagttgaagttaatt

SEQ ID NO: 5954567 - DNA, 25 bp, Homo sapien
caaaagactgatttctcaatctttg

SEQ ID NO: 5954568 - DNA, 25 bp, Homo sapien
gacacagaactcctcatgaaattca

SEQ ID NO: 5954569 - DNA, 25 bp, Homo sapien
tcatctatgaccgctactgccgatg

SEQ ID NO: 5954570 - DNA, 25 bp, Homo sapien
ggaaaataacgatgctgataaaggc

SEQ ID NO: 5954571 - DNA, 25 bp, Homo sapien
ctttgctggctagcaaatccacgta

SEQ ID NO: 5954572 - DNA, 25 bp, Homo sapien
cgtacaggaccccaaattttgatga

SEQ ID NO: 5954573 - DNA, 25 bp, Homo sapien
tcattagacacagaactcctcatga

SEQ ID NO: 5954574 - DNA, 25 bp, Homo sapien
caaggtaagcctgtgttcattagac

SEQ ID NO: 5954575 - DNA, 25 bp, Homo sapien
ctcatgaaattcaggaagccaacag

SEQ ID NO: 5954576 - DNA, 25 bp, Homo sapien
gcctgtgttcattagacacagaact

SEQ ID NO: 5954577 - DNA, 25 bp, Homo sapien
ttaatttagcggctatcccattggg

SEQ ID NO: 5954578 - DNA, 25 bp, Homo sapien
atatttccggtagaatcagaaaggg

SEQ ID NO: 5954579 - DNA, 25 bp, Homo sapien
aaatggcaaggtaagcctgtgttca

SEQ ID NO: 5954580 - DNA, 25 bp, Homo sapien
tccaaaagactgatttctcaatctt

SEQ ID NO: 5954581 - DNA, 25 bp, Homo sapien
tcttatgcttactttatggtcggtg

SEQ ID NO: 5954582 - DNA, 25 bp, Homo sapien
tttggctatggctaaagttgaagtt

SEQ ID NO: 5954583 - DNA, 25 bp, Homo sapien
ccgctactgccgatgttttggctat

SEQ ID NO: 5954584 - DNA, 25 bp, Homo sapien
ctgcttatgaattcgatggtgataa

SEQ ID NO: 5954585 - DNA, 25 bp, Homo sapien
tcaagccaatgtctttaacttccaa

SEQ ID NO: 5954586 - DNA, 25 bp, Homo sapien
gttaattatgctgggtatttgtact

SEQ ID NO: 5954587 - DNA, 25 bp, Homo sapien
caaaagacccatagcaccgaccata

SEQ ID NO: 5954588 - DNA, 25 bp, Homo sapien
tttgactctgtcagcatcggtctgt

SEQ ID NO: 5954589 - DNA, 25 bp, Homo sapien
tcagcatcggtctgtgggtccttca

SEQ ID NO: 5954590 - DNA, 25 bp, Homo sapien
tccttcaaagcggacatatccacac

SEQ ID NO: 5954591 - DNA, 25 bp, Homo sapien
cagcatcgttattttcctttaaaac

SEQ ID NO: 5954592 - DNA, 25 bp, Homo sapien
ttcataagcaggaatttctaagttt

SEQ ID NO: 5954593 - DNA, 25 bp, Homo sapien
catagatgaaataaaggtttctacg

SEQ ID NO: 5954594 - DNA, 25 bp, Homo sapien
cctgtacgtggatttgctagccagc

SEQ ID NO: 5954595 - DNA, 25 bp, Homo sapien
gacaaaagacccatagcaccgacca

SEQ ID NO: 5954596 - DNA, 25 bp, Homo sapien
attggaacacaacctaagtgagtac

SEQ ID NO: 5954597 - DNA, 25 bp, Homo sapien
atgggatagccgctaaattaacttc

SEQ ID NO: 5954598 - DNA, 25 bp, Homo sapien
agcaccgaccataaagtaagcataa

SEQ ID NO: 5954599 - DNA, 25 bp, Homo sapien
gcaggtcttgacagatgatcttatt

SEQ ID NO: 5954600 - DNA, 25 bp, Homo sapien
atgaggagttctgtgtctaatgaac

SEQ ID NO: 5954601 - DNA, 25 bp, Homo sapien
gaccttatcaccatcgaattcataa

SEQ ID NO: 5954602 - DNA, 25 bp, Homo sapien
tgaagcaggtcttgacagatgatct

SEQ ID NO: 5954603 - DNA, 25 bp, Homo sapien
ggcttaccttgccatttgacaacca

SEQ ID NO: 5954604 - DNA, 25 bp, Homo sapien
catttgacaaccacgtttttaccca

SEQ ID NO: 5954605 - DNA, 25 bp, Homo sapien
aatgtgaaccatggcaaggacagaa

SEQ ID NO: 5954606 - DNA, 25 bp, Homo sapien
agtgagtacaaatacccagcataat

SEQ ID NO: 5954607 - DNA, 25 bp, Homo sapien
gacagaaccaaccaccaaaatcacc

SEQ ID NO: 5954608 - DNA, 25 bp, Homo sapien
caccgaccataaagtaagcataaga

SEQ ID NO: 5954609 - DNA, 25 bp, Homo sapien
cggaaatatcataatgtgaaccatg

SEQ ID NO: 5954610 - DNA, 25 bp, Homo sapien
acaacctaagtgagtacaaataccc

SEQ ID NO: 5954611 - DNA, 25 bp, Homo sapien
cccagcataattaaccattgagggt

SEQ ID NO: 5954612 - DNA, 25 bp, Homo sapien
ttctacggttgatttggcacctgca

SEQ ID NO: 5954613 - DNA, 25 bp, Homo sapien
aaagacccatagcaccgaccataaa

SEQ ID NO: 5954614 - DNA, 25 bp, Homo sapien
cttcaaagcggacatatccacactg

SEQ ID NO: 5954615 - DNA, 25 bp, Homo sapien
ttctgattctaccggaaatatcata

SEQ ID NO: 5954616 - DNA, 25 bp, Homo sapien
gttattttcctttaaaacgtcatca

SEQ ID NO: 5954617 - DNA, 25 bp, Homo sapien
ctgcagatgacaaaagacccatagc

SEQ ID NO: 5954618 - DNA, 25 bp, Homo sapien
ccaaaacatcggcagtagcggtcat

SEQ ID NO: 5954619 - DNA, 25 bp, Homo sapien
cattggcttgaagcaggtcttgaca

SEQ ID NO: 5954620 - DNA, 25 bp, Homo sapien
aagggggcaggtccctttctgattc

SEQ ID NO: 5954621 - DNA, 25 bp, Homo sapien
aattcataagcaggaatttctaagt

SEQ ID NO: 5954622 - DNA, 25 bp, Homo sapien
tttcatgaggagttctgtgtctaat

SEQ ID NO: 5954623 - DNA, 25 bp, Homo sapien
ctaatgaacacaggcttaccttgcc

SEQ ID NO: 5954624 - DNA, 25 bp, Homo sapien
tgagggtctttgactctgtcagcat

SEQ ID NO: 5954625 - DNA, 25 bp, Homo sapien
atgaccttatcaccatcgaattcat

SEQ ID NO: 5954626 - DNA, 25 bp, Homo sapien
acacaacctaagtgagtacaaatac

SEQ ID NO: 5954627 - DNA, 25 bp, Homo sapien
ggcttcaccaattggaacacaacct

SEQ ID NO: 5954628 - DNA, 25 bp, Homo sapien
caaagattgagaaatcagtcttttg

SEQ ID NO: 5954629 - DNA, 25 bp, Homo sapien
aagcaggtcttgacagatgatctta

SEQ ID NO: 5954630 - DNA, 25 bp, Homo sapien
cccaatgggatagccgctaaattaa

SEQ ID NO: 5954631 - DNA, 25 bp, Homo sapien
tatccacactgttggcttcctgaat

SEQ ID NO: 5954632 - DNA, 25 bp, Homo sapien
ccggcttcaccaattggaacacaac

SEQ ID NO: 5954633 - DNA, 25 bp, Homo sapien
aaagtaagcataagaacggccttta

SEQ ID NO: 5954634 - DNA, 25 bp, Homo sapien
ggtctgtgggtccttcaaagcggac

SEQ ID NO: 5954635 - DNA, 25 bp, Homo sapien
agtaagcataagaacggcctttatc

SEQ ID NO: 5954636 - DNA, 25 bp, Homo sapien
atcaccatcgaattcataagcagga

SEQ ID NO: 5954637 - DNA, 25 bp, Homo sapien
caggcttaccttgccatttgacaac

SEQ ID NO: 5954638 - DNA, 25 bp, Homo sapien
gtgtctaatgaacacaggcttacct

SEQ ID NO: 5954639 - DNA, 25 bp, Homo sapien
ataaagtaagcataagaacggcctt

SEQ ID NO: 5954640 - DNA, 25 bp, Homo sapien
cgtcatcaaaatttggggtcctgta

SEQ ID NO: 5954641 - DNA, 25 bp, Homo sapien
aattaacttcaactttagccatagc

SEQ ID NO: 5954642 - DNA, 25 bp, Homo sapien
tgctagccagcaaagattgagaaat

SEQ ID NO: 5954643 - DNA, 25 bp, Homo sapien
gggatagccgctaaattaacttcaa

SEQ ID NO: 5954644 - DNA, 25 bp, Homo sapien
ctagccagcaaagattgagaaatca

SEQ ID NO: 5954645 - DNA, 25 bp, Homo sapien
cacactgttggcttcctgaatttca

SEQ ID NO: 5954646 - DNA, 25 bp, Homo sapien
gattctaccggaaatatcataatgt

SEQ ID NO: 5954647 - DNA, 25 bp, Homo sapien
agcaaagattgagaaatcagtcttt

SEQ ID NO: 5954648 - DNA, 25 bp, Homo sapien
ttaaccattgagggtctttgactct

SEQ ID NO: 5954649 - DNA, 25 bp, Homo sapien
gaggagttctgtgtctaatgaacac

SEQ ID NO: 5954650 - DNA, 25 bp, Homo sapien
gggcaggtccctttctgattctacc

SEQ ID NO: 5954651 - DNA, 25 bp, Homo sapien
tacccaatgggatagccgctaaatt

SEQ ID NO: 5954652 - DNA, 25 bp, Homo sapien
agccatagccaaaacatcggcagta

SEQ ID NO: 5954653 - DNA, 25 bp, Homo sapien
ttagccatagccaaaacatcggcag

SEQ ID NO: 5954654 - DNA, 25 bp, Homo sapien
ttaacttcaactttagccatagcca

SEQ ID NO: 5954655 - DNA, 25 bp, Homo sapien
agacccatagcaccgaccataaagt

SEQ ID NO: 5954656 - DNA, 25 bp, Homo sapien
tcataatgtgaaccatggcaaggac

SEQ ID NO: 5954657 - DNA, 25 bp, Homo sapien
ctacggttgatttggcacctgcaga

SEQ ID NO: 5954658 - DNA, 25 bp, Homo sapien
tttggcacctgcagatgacaaaaga

SEQ ID NO: 5954659 - DNA, 25 bp, Homo sapien
taagcaggaatttctaagtttaagg

SEQ ID NO: 5954660 - DNA, 25 bp, Homo sapien
ataattaaccattgagggtctttga

SEQ ID NO: 5954661 - DNA, 25 bp, Homo sapien
gaaatatcataatgtgaaccatggc

SEQ ID NO: 5954662 - DNA, 25 bp, Homo sapien
ccaacaatgaccttatcaccatcga

SEQ ID NO: 5954663 - DNA, 25 bp, Homo sapien
ccatagccaaaacatcggcagtagc

SEQ ID NO: 5954664 - DNA, 25 bp, Homo sapien
taaattaacttcaactttagccata

SEQ ID NO: 5954665 - DNA, 25 bp, Homo sapien
tacccagcataattaaccattgagg

SEQ ID NO: 5954666 - DNA, 25 bp, Homo sapien
ctttctgattctaccggaaatatca

SEQ ID NO: 5954667 - DNA, 25 bp, Homo sapien
ataatgtgaaccatggcaaggacag

SEQ ID NO: 5954668 - DNA, 25 bp, Homo sapien
taaagacattggcttgaagcaggtc

SEQ ID NO: 5954669 - DNA, 25 bp, Homo sapien
ggcagtagcggtcatagatgaaata

SEQ ID NO: 5954670 - DNA, 25 bp, Homo sapien
cctaagtgagtacaaatacccagca

SEQ ID NO: 5954671 - DNA, 25 bp, Homo sapien
tcaaagcggacatatccacactgtt

SEQ ID NO: 5954672 - DNA, 25 bp, Homo sapien
cgtttttacccaatgggatagccgc

SEQ ID NO: 5954673 - DNA, 25 bp, Homo sapien
catcggtctgtgggtccttcaaagc

SEQ ID NO: 5954674 - DNA, 25 bp, Homo sapien
gggggcaggtccctttctgattcta

SEQ ID NO: 5954675 - DNA, 25 bp, Homo sapien
tggcacctgcagatgacaaaagacc

SEQ ID NO: 5954676 - DNA, 25 bp, Homo sapien
aggtccctttctgattctaccggaa

SEQ ID NO: 5954677 - DNA, 25 bp, Homo sapien
ttatcaccatcgaattcataagcag

SEQ ID NO: 5954678 - DNA, 25 bp, Homo sapien
gatagccgctaaattaacttcaact

SEQ ID NO: 5954679 - DNA, 25 bp, Homo sapien
ggttgatttggcacctgcagatgac

SEQ ID NO: 5954680 - DNA, 25 bp, Homo sapien
cttcaccaattggaacacaacctaa

SEQ ID NO: 5954681 - DNA, 25 bp, Homo sapien
gggtcctgtacgtggatttgctagc

SEQ ID NO: 5954682 - DNA, 25 bp, Homo sapien
ctaccggaaatatcataatgtgaac

SEQ ID NO: 5954683 - DNA, 25 bp, Homo sapien
atgacaaaagacccatagcaccgac

SEQ ID NO: 5954684 - DNA, 25 bp, Homo sapien
aaaggtttctacggttgatttggca

SEQ ID NO: 5954685 - DNA, 25 bp, Homo sapien
aacacaggcttaccttgccatttga

SEQ ID NO: 5954686 - DNA, 25 bp, Homo sapien
aatacccagcataattaaccattga

SEQ ID NO: 5954687 - DNA, 25 bp, Homo sapien
aaccatggcaaggacagaaccaacc

SEQ ID NO: 5954688 - DNA, 25 bp, Homo sapien
gcagatgacaaaagacccatagcac

SEQ ID NO: 5954689 - DNA, 25 bp, Homo sapien
gaaatcagtcttttggaagttaaag

SEQ ID NO: 5954690 - DNA, 25 bp, Homo sapien
ccatagcaccgaccataaagtaagc

SEQ ID NO: 5954691 - DNA, 25 bp, Homo sapien
caaaatttggggtcctgtacgtgga

SEQ ID NO: 5954692 - DNA, 25 bp, Homo sapien
tttggggtcctgtacgtggatttgc

SEQ ID NO: 5954693 - DNA, 25 bp, Homo sapien
gcttcctgaatttcatgaggagttc

SEQ ID NO: 5954694 - DNA, 25 bp, Homo sapien
caccatcgaattcataagcaggaat

SEQ ID NO: 5954695 - DNA, 25 bp, Homo sapien
ggcttgaagcaggtcttgacagatg

SEQ ID NO: 5954696 - DNA, 25 bp, Homo sapien
actctgtcagcatcggtctgtgggt

SEQ ID NO: 5954697 - DNA, 25 bp, Homo sapien
agcatcggtctgtgggtccttcaaa

SEQ ID NO: 5954698 - DNA, 25 bp, Homo sapien
agcggtcatagatgaaataaaggtt

SEQ ID NO: 5954699 - DNA, 25 bp, Homo sapien
tgactctgtcagcatcggtctgtgg

SEQ ID NO: 5954700 - DNA, 25 bp, Homo sapien
ggcaaggacagaaccaaccaccaaa

SEQ ID NO: 5954701 - DNA, 25 bp, Homo sapien
cggacatatccacactgttggcttc

SEQ ID NO: 5954702 - DNA, 25 bp, Homo sapien
tgagtacaaatacccagcataatta

SEQ ID NO: 5954703 - DNA, 25 bp, Homo sapien
taaaacgtcatcaaaatttggggtc

SEQ ID NO: 5954704 - DNA, 25 bp, Homo sapien
tcggtctgtgggtccttcaaagcgg

SEQ ID NO: 5954705 - DNA, 25 bp, Homo sapien
cttcaactttagccatagccaaaac

SEQ ID NO: 5954706 - DNA, 25 bp, Homo sapien
ccaaccaccaaaatcaccggcttca

SEQ ID NO: 5954707 - DNA, 25 bp, Homo sapien
cactgttggcttcctgaatttcatg

SEQ ID NO: 5954708 - DNA, 25 bp, Homo sapien
cttaccttgccatttgacaaccacg

SEQ ID NO: 5954709 - DNA, 25 bp, Homo sapien
aacctaagtgagtacaaatacccag

SEQ ID NO: 5954710 - DNA, 25 bp, Homo sapien
taagaacggcctttatcagcatcgt

SEQ ID NO: 5954711 - DNA, 25 bp, Homo sapien
atcaccggcttcaccaattggaaca

SEQ ID NO: 5954712 - DNA, 25 bp, Homo sapien
tggaacacaacctaagtgagtacaa

SEQ ID NO: 5954713 - DNA, 25 bp, Homo sapien
atcaaaatttggggtcctgtacgtg

SEQ ID NO: 5954714 - DNA, 25 bp, Homo sapien
ttatcagcatcgttattttccttta

SEQ ID NO: 5954715 - DNA, 25 bp, Homo sapien
acctgcagatgacaaaagacccata

SEQ ID NO: 5954716 - DNA, 25 bp, Homo sapien
gagaaatcagtcttttggaagttaa

SEQ ID NO: 5954717 - DNA, 25 bp, Homo sapien
tcctttaaaacgtcatcaaaatttg

SEQ ID NO: 5954718 - DNA, 25 bp, Homo sapien
gtcatagatgaaataaaggtttcta

SEQ ID NO: 5954719 - DNA, 25 bp, Homo sapien
agttctgtgtctaatgaacacaggc

SEQ ID NO: 5954720 - DNA, 25 bp, Homo sapien
tcttttggaagttaaagacattggc

SEQ ID NO: 5954721 - DNA, 25 bp, Homo sapien
atagcaccgaccataaagtaagcat

SEQ ID NO: 5954722 - DNA, 25 bp, Homo sapien
cttgacagatgatcttattcctaac

SEQ ID NO: 5954723 - DNA, 25 bp, Homo sapien
aagattgagaaatcagtcttttgga

SEQ ID NO: 5954724 - DNA, 25 bp, Homo sapien
aacttcaactttagccatagccaaa

SEQ ID NO: 5954725 - DNA, 25 bp, Homo sapien
tgtgaaccatggcaaggacagaacc

SEQ ID NO: 5954726 - DNA, 25 bp, Homo sapien
ccataaagtaagcataagaacggcc

SEQ ID NO: 5954727 - DNA, 25 bp, Homo sapien
ccttatcaccatcgaattcataagc

SEQ ID NO: 5954728 - DNA, 25 bp, Homo sapien
aagttaaagacattggcttgaagca

SEQ ID NO: 5954729 - DNA, 25 bp, Homo sapien
aaagcggacatatccacactgttgg

SEQ ID NO: 5954730 - DNA, 25 bp, Homo sapien
gtctaatgaacacaggcttaccttg

SEQ ID NO: 5954731 - DNA, 25 bp, Homo sapien
tgggtccttcaaagcggacatatcc

SEQ ID NO: 5954732 - DNA, 25 bp, Homo sapien
ccatggcaaggacagaaccaaccac

SEQ ID NO: 5954733 - DNA, 25 bp, Homo sapien
ccctttctgattctaccggaaatat

SEQ ID NO: 5954734 - DNA, 25 bp, Homo sapien
gcaggtccctttctgattctaccgg

SEQ ID NO: 5954735 - DNA, 25 bp, Homo sapien
aaccaccaaaatcaccggcttcacc

SEQ ID NO: 5954736 - DNA, 25 bp, Homo sapien
taccttgccatttgacaaccacgtt

SEQ ID NO: 5954737 - DNA, 25 bp, Homo sapien
aggtcttgacagatgatcttattcc

SEQ ID NO: 5954738 - DNA, 25 bp, Homo sapien
catatccacactgttggcttcctga

SEQ ID NO: 5954739 - DNA, 25 bp, Homo sapien
aactttagccatagccaaaacatcg

SEQ ID NO: 5954740 - DNA, 25 bp, Homo sapien
gtccctttctgattctaccggaaat

SEQ ID NO: 5954741 - DNA, 25 bp, Homo sapien
accggaaatatcataatgtgaacca

SEQ ID NO: 5954742 - DNA, 25 bp, Homo sapien
aaatcaccggcttcaccaattggaa

SEQ ID NO: 5954743 - DNA, 25 bp, Homo sapien
aatcagtcttttggaagttaaagac

SEQ ID NO: 5954744 - DNA, 25 bp, Homo sapien
taagtgagtacaaatacccagcata

SEQ ID NO: 5954745 - DNA, 25 bp, Homo sapien
cttgaagcaggtcttgacagatgat

SEQ ID NO: 5954746 - DNA, 25 bp, Homo sapien
gaaccaaccaccaaaatcaccggct

SEQ ID NO: 5954747 - DNA, 25 bp, Homo sapien
caattggaacacaacctaagtgagt

SEQ ID NO: 5954748 - DNA, 25 bp, Homo sapien
tttttacccaatgggatagccgcta

SEQ ID NO: 5954749 - DNA, 25 bp, Homo sapien
ctttagccatagccaaaacatcggc

SEQ ID NO: 5954750 - DNA, 25 bp, Homo sapien
gttggcttcctgaatttcatgagga

SEQ ID NO: 5954751 - DNA, 25 bp, Homo sapien
ggtctttgactctgtcagcatcggt

SEQ ID NO: 5954752 - DNA, 25 bp, Homo sapien
ccgaccataaagtaagcataagaac

SEQ ID NO: 5954753 - DNA, 25 bp, Homo sapien
tggggtcctgtacgtggatttgcta

SEQ ID NO: 5954754 - DNA, 25 bp, Homo sapien
aaccattgagggtctttgactctgt

SEQ ID NO: 5954755 - DNA, 25 bp, Homo sapien
gttaaagacattggcttgaagcagg

SEQ ID NO: 5954756 - DNA, 25 bp, Homo sapien
ttgagaaatcagtcttttggaagtt

SEQ ID NO: 5954757 - DNA, 25 bp, Homo sapien
gtagcggtcatagatgaaataaagg

SEQ ID NO: 5954758 - DNA, 25 bp, Homo sapien
aggacagaaccaaccaccaaaatca

SEQ ID NO: 5954759 - DNA, 25 bp, Homo sapien
agccagcaaagattgagaaatcagt

SEQ ID NO: 5954760 - DNA, 25 bp, Homo sapien
agaacggcctttatcagcatcgtta

SEQ ID NO: 5954761 - DNA, 25 bp, Homo sapien
caaggacagaaccaaccaccaaaat

SEQ ID NO: 5954762 - DNA, 25 bp, Homo sapien
ggagttctgtgtctaatgaacacag

SEQ ID NO: 5954763 - DNA, 25 bp, Homo sapien
ttggcttgaagcaggtcttgacaga

SEQ ID NO: 5954764 - DNA, 25 bp, Homo sapien
cgaattcataagcaggaatttctaa

SEQ ID NO: 5954765 - DNA, 25 bp, Homo sapien
agcggacatatccacactgttggct

SEQ ID NO: 5954766 - DNA, 25 bp, Homo sapien
gacatatccacactgttggcttcct

SEQ ID NO: 5954767 - DNA, 25 bp, Homo sapien
aacgtcatcaaaatttggggtcctg

SEQ ID NO: 5954768 - DNA, 25 bp, Homo sapien
ccttgccatttgacaaccacgtttt

SEQ ID NO: 5954769 - DNA, 25 bp, Homo sapien
atagccaaaacatcggcagtagcgg

SEQ ID NO: 5954770 - DNA, 25 bp, Homo sapien
acccatagcaccgaccataaagtaa

SEQ ID NO: 5954771 - DNA, 25 bp, Homo sapien
tgaaccatggcaaggacagaaccaa

SEQ ID NO: 5954772 - DNA, 25 bp, Homo sapien
gtcttgacagatgatcttattccta

SEQ ID NO: 5954773 - DNA, 25 bp, Homo sapien
atggcaaggacagaaccaaccacca

SEQ ID NO: 5954774 - DNA, 25 bp, Homo sapien
cggtcatagatgaaataaaggtttc

SEQ ID NO: 5954775 - DNA, 25 bp, Homo sapien
tctgtgggtccttcaaagcggacat

SEQ ID NO: 5954776 - DNA, 25 bp, Homo sapien
aattaaccattgagggtctttgact

SEQ ID NO: 5954777 - DNA, 25 bp, Homo sapien
taagcataagaacggcctttatcag

SEQ ID NO: 5954778 - DNA, 25 bp, Homo sapien
tttacccaatgggatagccgctaaa

SEQ ID NO: 5954779 - DNA, 25 bp, Homo sapien
attgagggtctttgactctgtcagc

SEQ ID NO: 5954780 - DNA, 25 bp, Homo sapien
ttctgtgtctaatgaacacaggctt

SEQ ID NO: 5954781 - DNA, 25 bp, Homo sapien
tgaatttcatgaggagttctgtgtc

SEQ ID NO: 5954782 - DNA, 25 bp, Homo sapien
aacggcctttatcagcatcgttatt

SEQ ID NO: 5954783 - DNA, 25 bp, Homo sapien
tccacactgttggcttcctgaattt

SEQ ID NO: 5954784 - DNA, 25 bp, Homo sapien
gatttggcacctgcagatgacaaaa

SEQ ID NO: 5954785 - DNA, 25 bp, Homo sapien
cataagcaggaatttctaagtttaa

SEQ ID NO: 5954786 - DNA, 25 bp, Homo sapien
aaaacatcggcagtagcggtcatag

SEQ ID NO: 5954787 - DNA, 25 bp, Homo sapien
tacgtggatttgctagccagcaaag

SEQ ID NO: 5954788 - DNA, 25 bp, Homo sapien
ggaagttaaagacattggcttgaag

SEQ ID NO: 5954789 - DNA, 25 bp, Homo sapien
ctttatcagcatcgttattttcctt

SEQ ID NO: 5954790 - DNA, 25 bp, Homo sapien
tggcttcctgaatttcatgaggagt

SEQ ID NO: 5954791 - DNA, 25 bp, Homo sapien
tgaaataaaggtttctacggttgat

SEQ ID NO: 5954792 - DNA, 25 bp, Homo sapien
catcggcagtagcggtcatagatga

SEQ ID NO: 5954793 - DNA, 25 bp, Homo sapien
aacatcggcagtagcggtcatagat

SEQ ID NO: 5954794 - DNA, 25 bp, Homo sapien
ggtccttcaaagcggacatatccac

SEQ ID NO: 5954795 - DNA, 25 bp, Homo sapien
agtacaaatacccagcataattaac

SEQ ID NO: 5954796 - DNA, 25 bp, Homo sapien
ttctaccggaaatatcataatgtga

SEQ ID NO: 5954797 - DNA, 25 bp, Homo sapien
aagacattggcttgaagcaggtctt

SEQ ID NO: 5954798 - DNA, 25 bp, Homo sapien
tattttcctttaaaacgtcatcaaa

SEQ ID NO: 5954799 - DNA, 25 bp, Homo sapien
ttttggaagttaaagacattggctt

SEQ ID NO: 5954800 - DNA, 25 bp, Homo sapien
tttgctagccagcaaagattgagaa

SEQ ID NO: 5954801 - DNA, 25 bp, Homo sapien
tcaccaattggaacacaacctaagt

SEQ ID NO: 5954802 - DNA, 25 bp, Homo sapien
atcagcatcgttattttcctttaaa

SEQ ID NO: 5954803 - DNA, 25 bp, Homo sapien
gtcctgtacgtggatttgctagcca

SEQ ID NO: 5954804 - DNA, 25 bp, Homo sapien
tgtcagcatcggtctgtgggtcctt

SEQ ID NO: 5954805 - DNA, 25 bp, Homo sapien
cacaggcttaccttgccatttgaca

SEQ ID NO: 5954806 - DNA, 25 bp, Homo sapien
cgtggatttgctagccagcaaagat

SEQ ID NO: 5954807 - DNA, 25 bp, Homo sapien
ttaagggggcaggtccctttctgat

SEQ ID NO: 5954808 - DNA, 25 bp, Homo sapien
accaaaatcaccggcttcaccaatt

SEQ ID NO: 5954809 - DNA, 25 bp, Homo sapien
tcatcaaaatttggggtcctgtacg

SEQ ID NO: 5954810 - DNA, 25 bp, Homo sapien
aatatcataatgtgaaccatggcaa

SEQ ID NO: 5954811 - DNA, 25 bp, Homo sapien
cagcataattaaccattgagggtct

SEQ ID NO: 5954812 - DNA, 25 bp, Homo sapien
tagccgctaaattaacttcaacttt

SEQ ID NO: 5954813 - DNA, 25 bp, Homo sapien
cataagaacggcctttatcagcatc

SEQ ID NO: 5954814 - DNA, 25 bp, Homo sapien
tacaaatacccagcataattaacca

SEQ ID NO: 5954815 - DNA, 25 bp, Homo sapien
aatttcatgaggagttctgtgtcta

SEQ ID NO: 5954816 - DNA, 25 bp, Homo sapien
cggcctttatcagcatcgttatttt

SEQ ID NO: 5954817 - DNA, 25 bp, Homo sapien
tctttgactctgtcagcatcggtct

SEQ ID NO: 5954818 - DNA, 25 bp, Homo sapien
caaaatcaccggcttcaccaattgg

SEQ ID NO: 5954819 - DNA, 25 bp, Homo sapien
tcagtcttttggaagttaaagacat

SEQ ID NO: 5954820 - DNA, 25 bp, Homo sapien
gaccataaagtaagcataagaacgg

SEQ ID NO: 5954821 - DNA, 25 bp, Homo sapien
agggtctttgactctgtcagcatcg

SEQ ID NO: 5954822 - DNA, 25 bp, Homo sapien
atcgaattcataagcaggaatttct

SEQ ID NO: 5954823 - DNA, 25 bp, Homo sapien
gcataattaaccattgagggtcttt

SEQ ID NO: 5954824 - DNA, 25 bp, Homo sapien
aggtttctacggttgatttggcacc

SEQ ID NO: 5954825 - DNA, 25 bp, Homo sapien
agcataagaacggcctttatcagca

SEQ ID NO: 5954826 - DNA, 25 bp, Homo sapien
gacattggcttgaagcaggtcttga

SEQ ID NO: 5954827 - DNA, 25 bp, Homo sapien
tgtacgtggatttgctagccagcaa

SEQ ID NO: 5954828 - DNA, 25 bp, Homo sapien
gtttctacggttgatttggcacctg

SEQ ID NO: 5954829 - DNA, 25 bp, Homo sapien
cagaaccaaccaccaaaatcaccgg

SEQ ID NO: 5954830 - DNA, 25 bp, Homo sapien
ccatcgaattcataagcaggaattt

SEQ ID NO: 5954831 - DNA, 25 bp, Homo sapien
tagatgaaataaaggtttctacggt

SEQ ID NO: 5954832 - DNA, 25 bp, Homo sapien
caccggcttcaccaattggaacaca

SEQ ID NO: 5954833 - DNA, 25 bp, Homo sapien
tggatttgctagccagcaaagattg

SEQ ID NO: 5954834 - DNA, 25 bp, Homo sapien
gcacctgcagatgacaaaagaccca

SEQ ID NO: 5954835 - DNA, 25 bp, Homo sapien
gccatttgacaaccacgtttttacc

SEQ ID NO: 5954836 - DNA, 25 bp, Homo sapien
gccgctaaattaacttcaactttag

SEQ ID NO: 5954837 - DNA, 25 bp, Homo sapien
tctgtcagcatcggtctgtgggtcc

SEQ ID NO: 5954838 - DNA, 25 bp, Homo sapien
ctgattctaccggaaatatcataat

SEQ ID NO: 5954839 - DNA, 25 bp, Homo sapien
tgaacacaggcttaccttgccattt

SEQ ID NO: 5954840 - DNA, 25 bp, Homo sapien
gatttgctagccagcaaagattgag

SEQ ID NO: 5954841 - DNA, 25 bp, Homo sapien
tcaactttagccatagccaaaacat

SEQ ID NO: 5954842 - DNA, 25 bp, Homo sapien
accaattggaacacaacctaagtga

SEQ ID NO: 5954843 - DNA, 25 bp, Homo sapien
ccagcaaagattgagaaatcagtct

SEQ ID NO: 5954844 - DNA, 25 bp, Homo sapien
caatgggatagccgctaaattaact

SEQ ID NO: 5954845 - DNA, 25 bp, Homo sapien
tgtgggtccttcaaagcggacatat

SEQ ID NO: 5954846 - DNA, 25 bp, Homo sapien
aacaatgaccttatcaccatcgaat

SEQ ID NO: 5954847 - DNA, 25 bp, Homo sapien
gaacacaacctaagtgagtacaaat

SEQ ID NO: 5954848 - DNA, 25 bp, Homo sapien
agatgacaaaagacccatagcaccg

SEQ ID NO: 5954849 - DNA, 25 bp, Homo sapien
cctgaatttcatgaggagttctgtg

SEQ ID NO: 5954850 - DNA, 25 bp, Homo sapien
gattgagaaatcagtcttttggaag

SEQ ID NO: 5954851 - DNA, 25 bp, Homo sapien
ctgttggcttcctgaatttcatgag

SEQ ID NO: 5954852 - DNA, 25 bp, Homo sapien
aaccaacaatgaccttatcaccatc

SEQ ID NO: 5954853 - DNA, 25 bp, Homo sapien
ttgatttggcacctgcagatgacaa

SEQ ID NO: 5954854 - DNA, 25 bp, Homo sapien
ctaaccaacaatgaccttatcacca

SEQ ID NO: 5954855 - DNA, 25 bp, Homo sapien
gatgaaataaaggtttctacggttg

SEQ ID NO: 5954856 - DNA, 25 bp, Homo sapien
aatgaacacaggcttaccttgccat

SEQ ID NO: 5954857 - DNA, 25 bp, Homo sapien
ttggaagttaaagacattggcttga

SEQ ID NO: 5954858 - DNA, 25 bp, Homo sapien
tgacaaccacgtttttacccaatgg

SEQ ID NO: 5954859 - DNA, 25 bp, Homo sapien
tatcataatgtgaaccatggcaagg

SEQ ID NO: 5954860 - DNA, 25 bp, Homo sapien
ttgccatttgacaaccacgttttta

SEQ ID NO: 5954861 - DNA, 25 bp, Homo sapien
ccattgagggtctttgactctgtca

SEQ ID NO: 5954862 - DNA, 25 bp, Homo sapien
gcctttatcagcatcgttattttcc

SEQ ID NO: 5954863 - DNA, 25 bp, Homo sapien
ccaccaaaatcaccggcttcaccaa

SEQ ID NO: 5954864 - DNA, 25 bp, Homo sapien
tcatgaggagttctgtgtctaatga

SEQ ID NO: 5954865 - DNA, 25 bp, Homo sapien
tgacagatgatcttattcctaacat

SEQ ID NO: 5954866 - DNA, 25 bp, Homo sapien
agccaaaacatcggcagtagcggtc

SEQ ID NO: 5954867 - DNA, 25 bp, Homo sapien
caaatacccagcataattaaccatt

SEQ ID NO: 5954868 - DNA, 25 bp, Homo sapien
tcggcagtagcggtcatagatgaaa

SEQ ID NO: 5954869 - DNA, 25 bp, Homo sapien
cagtagcggtcatagatgaaataaa

SEQ ID NO: 5954870 - DNA, 25 bp, Homo sapien
ttcctgaatttcatgaggagttctg

SEQ ID NO: 5954871 - DNA, 25 bp, Homo sapien
cacgtttttacccaatgggatagcc

SEQ ID NO: 5954872 - DNA, 25 bp, Homo sapien
caatgaccttatcaccatcgaattc

SEQ ID NO: 5954873 - DNA, 25 bp, Homo sapien
ctgtgtctaatgaacacaggcttac

SEQ ID NO: 5954874 - DNA, 25 bp, Homo sapien
agtcttttggaagttaaagacattg

SEQ ID NO: 5954875 - DNA, 25 bp, Homo sapien
acggttgatttggcacctgcagatg

SEQ ID NO: 5954876 - DNA, 25 bp, Homo sapien
ctaaagaagttccattagacttcga

SEQ ID NO: 5954877 - DNA, 25 bp, Homo sapien
aagctgatggccagggctcgtaatt

SEQ ID NO: 5954878 - DNA, 25 bp, Homo sapien
aaatctatgagaaggacttcggcca

SEQ ID NO: 5954879 - DNA, 25 bp, Homo sapien
cgtcacgggtttggcgcccagggcc

SEQ ID NO: 5954880 - DNA, 25 bp, Homo sapien
aatctacagatggcgcaatcgcaac

SEQ ID NO: 5954881 - DNA, 25 bp, Homo sapien
aggatctaatgcatcacgacaagga

SEQ ID NO: 5954882 - DNA, 25 bp, Homo sapien
gcacaacctgattgatctgtcgttt

SEQ ID NO: 5954883 - DNA, 25 bp, Homo sapien
agatgtcagagaccaatggaacgaa

SEQ ID NO: 5954884 - DNA, 25 bp, Homo sapien
ttggatttgaagatgtcagagacca

SEQ ID NO: 5954885 - DNA, 25 bp, Homo sapien
gaagacgaaatggaattggacggta

SEQ ID NO: 5954886 - DNA, 25 bp, Homo sapien
ggaacgttgcttacggtgttctttc

SEQ ID NO: 5954887 - DNA, 25 bp, Homo sapien
caacagcagcagcagcaacagcaac

SEQ ID NO: 5954888 - DNA, 25 bp, Homo sapien
agagagaattcgcgaattttacaac

SEQ ID NO: 5954889 - DNA, 25 bp, Homo sapien
tagacgaagatgctgtcattgtgga

SEQ ID NO: 5954890 - DNA, 25 bp, Homo sapien
tctgatcgtcacgggtttggcgccc

SEQ ID NO: 5954891 - DNA, 25 bp, Homo sapien
ccaatctacagatggcgcaatcgca

SEQ ID NO: 5954892 - DNA, 25 bp, Homo sapien
gaagggggtcttcaattggcggatt

SEQ ID NO: 5954893 - DNA, 25 bp, Homo sapien
ctcgacggcaacccgcaggggaaac

SEQ ID NO: 5954894 - DNA, 25 bp, Homo sapien
agaacaggctcacactttcctgcat

SEQ ID NO: 5954895 - DNA, 25 bp, Homo sapien
aaacattgactccactttgaacaat

SEQ ID NO: 5954896 - DNA, 25 bp, Homo sapien
attggcttgggtccgtggccctgaa

SEQ ID NO: 5954897 - DNA, 25 bp, Homo sapien
cgacaaggacgtcattgtccccaac

SEQ ID NO: 5954898 - DNA, 25 bp, Homo sapien
gacggcaacccgcaggggaaacctc

SEQ ID NO: 5954899 - DNA, 25 bp, Homo sapien
gggaaacctcttgatgacaacgaca

SEQ ID NO: 5954900 - DNA, 25 bp, Homo sapien
acgaaattaccaaggcaacaaagat

SEQ ID NO: 5954901 - DNA, 25 bp, Homo sapien
actcgtgctttcgttcttctcgata

SEQ ID NO: 5954902 - DNA, 25 bp, Homo sapien
cgtctggagacctttaccagactgg

SEQ ID NO: 5954903 - DNA, 25 bp, Homo sapien
tttgtctcaccaaacaaccaacaac

SEQ ID NO: 5954904 - DNA, 25 bp, Homo sapien
gtccgtggccctgaaaccataccac

SEQ ID NO: 5954905 - DNA, 25 bp, Homo sapien
cttctgagcatcttcccatgttttt

SEQ ID NO: 5954906 - DNA, 25 bp, Homo sapien
ctattccagctggtaactttccaag

SEQ ID NO: 5954907 - DNA, 25 bp, Homo sapien
tcaaccctaccacagtaagtatcgc

SEQ ID NO: 5954908 - DNA, 25 bp, Homo sapien
cagcagcagcaacagcaacagcaac

SEQ ID NO: 5954909 - DNA, 25 bp, Homo sapien
ccagagtacgccacttggagacctc

SEQ ID NO: 5954910 - DNA, 25 bp, Homo sapien
ttggaggggtctcgattctcgcgaa

SEQ ID NO: 5954911 - DNA, 25 bp, Homo sapien
aagtcactgtagactggtctgaaga

SEQ ID NO: 5954912 - DNA, 25 bp, Homo sapien
atctgtcgtttttggtgagtgactc

SEQ ID NO: 5954913 - DNA, 25 bp, Homo sapien
tctcgttcaaccctaccacagtaag

SEQ ID NO: 5954914 - DNA, 25 bp, Homo sapien
aagaaagctgatggccagggctcgt

SEQ ID NO: 5954915 - DNA, 25 bp, Homo sapien
gttcaaccctaccacagtaagtatc

SEQ ID NO: 5954916 - DNA, 25 bp, Homo sapien
ggtattggaggggtctcgattctcg

SEQ ID NO: 5954917 - DNA, 25 bp, Homo sapien
ccccaacgtctggagacctttacca

SEQ ID NO: 5954918 - DNA, 25 bp, Homo sapien
caggatgaattacaatgtcatcggc

SEQ ID NO: 5954919 - DNA, 25 bp, Homo sapien
gcaacaagacaagtccaaaaggttt

SEQ ID NO: 5954920 - DNA, 25 bp, Homo sapien
caaggcaacaaagatggttggcaac

SEQ ID NO: 5954921 - DNA, 25 bp, Homo sapien
catccccactaccatcatggaggat

SEQ ID NO: 5954922 - DNA, 25 bp, Homo sapien
accaaacaaccaacaacaacaacaa

SEQ ID NO: 5954923 - DNA, 25 bp, Homo sapien
cttaaagcacatggcttggatggct

SEQ ID NO: 5954924 - DNA, 25 bp, Homo sapien
ttttaaccatctgaataccatgaca

SEQ ID NO: 5954925 - DNA, 25 bp, Homo sapien
gtcactgtagactggtctgaagagg

SEQ ID NO: 5954926 - DNA, 25 bp, Homo sapien
tactggagagacgtggatgtcgaaa

SEQ ID NO: 5954927 - DNA, 25 bp, Homo sapien
caccatgggcgtgttactatccaat

SEQ ID NO: 5954928 - DNA, 25 bp, Homo sapien
ctcttcggataacaccatgggcgtg

SEQ ID NO: 5954929 - DNA, 25 bp, Homo sapien
gcggaaactagaagaagagagaatt

SEQ ID NO: 5954930 - DNA, 25 bp, Homo sapien
acgtcattgtccccaacgtctggag

SEQ ID NO: 5954931 - DNA, 25 bp, Homo sapien
aggacttcggccaaatcattggtca

SEQ ID NO: 5954932 - DNA, 25 bp, Homo sapien
ggccctgaaaccataccactcctgg

SEQ ID NO: 5954933 - DNA, 25 bp, Homo sapien
tccccactaccatcatggaggatct

SEQ ID NO: 5954934 - DNA, 25 bp, Homo sapien
tctacgacctacgaaattaccaagg

SEQ ID NO: 5954935 - DNA, 25 bp, Homo sapien
tctggagacctttaccagactggct

SEQ ID NO: 5954936 - DNA, 25 bp, Homo sapien
aaagaagttccattagacttcgacc

SEQ ID NO: 5954937 - DNA, 25 bp, Homo sapien
cccactaccatcatggaggatctaa

SEQ ID NO: 5954938 - DNA, 25 bp, Homo sapien
gtcgaaaccatccccactaccatca

SEQ ID NO: 5954939 - DNA, 25 bp, Homo sapien
taaagcacatggcttggatggctga

SEQ ID NO: 5954940 - DNA, 25 bp, Homo sapien
aacaacagcaacaacaacaacaaca

SEQ ID NO: 5954941 - DNA, 25 bp, Homo sapien
actcaaagggtgactttgtctcacc

SEQ ID NO: 5954942 - DNA, 25 bp, Homo sapien
ttggacggtattggaggggtctcga

SEQ ID NO: 5954943 - DNA, 25 bp, Homo sapien
tatgtcatctggcacatctacgaac

SEQ ID NO: 5954944 - DNA, 25 bp, Homo sapien
atcgaaatctatgagaaggacttcg

SEQ ID NO: 5954945 - DNA, 25 bp, Homo sapien
aaactctcgttcaaccctaccacag

SEQ ID NO: 5954946 - DNA, 25 bp, Homo sapien
acagctcgacggcaacccgcagggg

SEQ ID NO: 5954947 - DNA, 25 bp, Homo sapien
ctaccatcatggaggatctaatgca

SEQ ID NO: 5954948 - DNA, 25 bp, Homo sapien
agagacgtggatgtcgaaaccatcc

SEQ ID NO: 5954949 - DNA, 25 bp, Homo sapien
tctgagcatcttcccatgtttttta

SEQ ID NO: 5954950 - DNA, 25 bp, Homo sapien
agaagaaagctgatggccagggctc

SEQ ID NO: 5954951 - DNA, 25 bp, Homo sapien
gcattcggtaggctctcccgcagga

SEQ ID NO: 5954952 - DNA, 25 bp, Homo sapien
ccttccagcgacgacttaaagcaca

SEQ ID NO: 5954953 - DNA, 25 bp, Homo sapien
gtcagagaccaatggaacgaagaaa

SEQ ID NO: 5954954 - DNA, 25 bp, Homo sapien
tttgaaaagcacgcagagacagaag

SEQ ID NO: 5954955 - DNA, 25 bp, Homo sapien
tacagatggcgcaatcgcaacaaga

SEQ ID NO: 5954956 - DNA, 25 bp, Homo sapien
cctgattgatctgtcgtttttggtg

SEQ ID NO: 5954957 - DNA, 25 bp, Homo sapien
aacgttgcttacggtgttctttctc

SEQ ID NO: 5954958 - DNA, 25 bp, Homo sapien
taccagactggctgggaaacattca

SEQ ID NO: 5954959 - DNA, 25 bp, Homo sapien
tggatggctgaagaggagaagcgga

SEQ ID NO: 5954960 - DNA, 25 bp, Homo sapien
gagctggtggactcaaagggtgact

SEQ ID NO: 5954961 - DNA, 25 bp, Homo sapien
taacatcgaaatctatgagaaggac

SEQ ID NO: 5954962 - DNA, 25 bp, Homo sapien
ggaatcagaagggggtcttcaattg

SEQ ID NO: 5954963 - DNA, 25 bp, Homo sapien
taataacagaaaactctcgttcaac

SEQ ID NO: 5954964 - DNA, 25 bp, Homo sapien
tcaaagggtgactttgtctcaccaa

SEQ ID NO: 5954965 - DNA, 25 bp, Homo sapien
caacaacaacaacaacagcaacaac

SEQ ID NO: 5954966 - DNA, 25 bp, Homo sapien
tataataacagaaaactctcgttca

SEQ ID NO: 5954967 - DNA, 25 bp, Homo sapien
gcgaaagctaaagtattcagaacag

SEQ ID NO: 5954968 - DNA, 25 bp, Homo sapien
gagattggatttgaagatgtcagag

SEQ ID NO: 5954969 - DNA, 25 bp, Homo sapien
gaaagctgatggccagggctcgtaa

SEQ ID NO: 5954970 - DNA, 25 bp, Homo sapien
atgagagacccaaacggtaatccag

SEQ ID NO: 5954971 - DNA, 25 bp, Homo sapien
ctcacactttcctgcattctccttt

SEQ ID NO: 5954972 - DNA, 25 bp, Homo sapien
ataccactcctgggtttactggaga

SEQ ID NO: 5954973 - DNA, 25 bp, Homo sapien
gagaaggacttcggccaaatcattg

SEQ ID NO: 5954974 - DNA, 25 bp, Homo sapien
ggcacatctacgaaccttccagcga

SEQ ID NO: 5954975 - DNA, 25 bp, Homo sapien
gtgaccgcatcttgttttgcgtgcc

SEQ ID NO: 5954976 - DNA, 25 bp, Homo sapien
agatctgggagattggatttgaaga

SEQ ID NO: 5954977 - DNA, 25 bp, Homo sapien
tttaccagactggctgggaaacatt

SEQ ID NO: 5954978 - DNA, 25 bp, Homo sapien
cgggtttggcgcccagggccccaga

SEQ ID NO: 5954979 - DNA, 25 bp, Homo sapien
cccaaacggtaatccagaagacgaa

SEQ ID NO: 5954980 - DNA, 25 bp, Homo sapien
cattgtccccaacgtctggagacct

SEQ ID NO: 5954981 - DNA, 25 bp, Homo sapien
cgaaaccatccccactaccatcatg

SEQ ID NO: 5954982 - DNA, 25 bp, Homo sapien
gtgccactgagagatgcttctgagc

SEQ ID NO: 5954983 - DNA, 25 bp, Homo sapien
taattggcttgggtccgtggccctg

SEQ ID NO: 5954984 - DNA, 25 bp, Homo sapien
atcacgacaaggacgtcattgtccc

SEQ ID NO: 5954985 - DNA, 25 bp, Homo sapien
atcttgttttgcgtgccactgagag

SEQ ID NO: 5954986 - DNA, 25 bp, Homo sapien
gttcttctcgatatcgctattccag

SEQ ID NO: 5954987 - DNA, 25 bp, Homo sapien
ccgtggccctgaaaccataccactc

SEQ ID NO: 5954988 - DNA, 25 bp, Homo sapien
gcaacagcaacagcaacaacagctc

SEQ ID NO: 5954989 - DNA, 25 bp, Homo sapien
gattcaatcttaaaaaacattgact

SEQ ID NO: 5954990 - DNA, 25 bp, Homo sapien
tattggaggggtctcgattctcgcg

SEQ ID NO: 5954991 - DNA, 25 bp, Homo sapien
ccaacgtctggagacctttaccaga

SEQ ID NO: 5954992 - DNA, 25 bp, Homo sapien
acctacgaaattaccaaggcaacaa

SEQ ID NO: 5954993 - DNA, 25 bp, Homo sapien
catgttttttaaccatctgaatacc

SEQ ID NO: 5954994 - DNA, 25 bp, Homo sapien
gatgcttctgagcatcttcccatgt

SEQ ID NO: 5954995 - DNA, 25 bp, Homo sapien
tcggtaggctctcccgcaggatgaa

SEQ ID NO: 5954996 - DNA, 25 bp, Homo sapien
acatgagagacccaaacggtaatcc

SEQ ID NO: 5954997 - DNA, 25 bp, Homo sapien
ccgcaggggaaacctcttgatgaca

SEQ ID NO: 5954998 - DNA, 25 bp, Homo sapien
ggctctcccgcaggatgaattacaa

SEQ ID NO: 5954999 - DNA, 25 bp, Homo sapien
ctcgtaattggcttgggtccgtggc

SEQ ID NO: 5955000 - DNA, 25 bp, Homo sapien
aagatgctgtcattgtggaagggta

SEQ ID NO: 5955001 - DNA, 25 bp, Homo sapien
acagaagcattcggtaggctctccc

SEQ ID NO: 5955002 - DNA, 25 bp, Homo sapien
gaaacctcttgatgacaacgacaag

SEQ ID NO: 5955003 - DNA, 25 bp, Homo sapien
gcaacagggtgaccgcatcttgttt

SEQ ID NO: 5955004 - DNA, 25 bp, Homo sapien
tcgcgaaagctaaagtattcagaac

SEQ ID NO: 5955005 - DNA, 25 bp, Homo sapien
ttgaagatgtcagagaccaatggaa

SEQ ID NO: 5955006 - DNA, 25 bp, Homo sapien
accatcatggaggatctaatgcatc

SEQ ID NO: 5955007 - DNA, 25 bp, Homo sapien
gctggtggactcaaagggtgacttt

SEQ ID NO: 5955008 - DNA, 25 bp, Homo sapien
gatgacaacgacaagaacaagaaaa

SEQ ID NO: 5955009 - DNA, 25 bp, Homo sapien
tcttctcgatatcgctattccagct

SEQ ID NO: 5955010 - DNA, 25 bp, Homo sapien
gtctgaagagggagatggctcggag

SEQ ID NO: 5955011 - DNA, 25 bp, Homo sapien
acaacaacaacaacagcaacaacaa

SEQ ID NO: 5955012 - DNA, 25 bp, Homo sapien
gtctcgattctcgcgaaagctaaag

SEQ ID NO: 5955013 - DNA, 25 bp, Homo sapien
tacgacctacgaaattaccaaggca

SEQ ID NO: 5955014 - DNA, 25 bp, Homo sapien
gttccattagacttcgaccctgata

SEQ ID NO: 5955015 - DNA, 25 bp, Homo sapien
aacctcttgatgacaacgacaagaa

SEQ ID NO: 5955016 - DNA, 25 bp, Homo sapien
ttccaaggaatcttcaagccctatg

SEQ ID NO: 5955017 - DNA, 25 bp, Homo sapien
aagggtacccagagtacgccacttg

SEQ ID NO: 5955018 - DNA, 25 bp, Homo sapien
gtggccctgaaaccataccactcct

SEQ ID NO: 5955019 - DNA, 25 bp, Homo sapien
aattaccaaggcaacaaagatggtt

SEQ ID NO: 5955020 - DNA, 25 bp, Homo sapien
cttgttttgcgtgccactgagagat

SEQ ID NO: 5955021 - DNA, 25 bp, Homo sapien
actctcgttcaaccctaccacagta

SEQ ID NO: 5955022 - DNA, 25 bp, Homo sapien
gtagactggtctgaagagggagatg

SEQ ID NO: 5955023 - DNA, 25 bp, Homo sapien
gctaaagtattcagaacaggctcac

SEQ ID NO: 5955024 - DNA, 25 bp, Homo sapien
cgcgaattttacaacaagatctggg

SEQ ID NO: 5955025 - DNA, 25 bp, Homo sapien
tcatggaggatctaatgcatcacga

SEQ ID NO: 5955026 - DNA, 25 bp, Homo sapien
tcatctggcacatctacgaaccttc

SEQ ID NO: 5955027 - DNA, 25 bp, Homo sapien
atgagaaggacttcggccaaatcat

SEQ ID NO: 5955028 - DNA, 25 bp, Homo sapien
attctcgcgaaagctaaagtattca

SEQ ID NO: 5955029 - DNA, 25 bp, Homo sapien
gcaggggaaacctcttgatgacaac

SEQ ID NO: 5955030 - DNA, 25 bp, Homo sapien
tggcggattccctagacgaagatgc

SEQ ID NO: 5955031 - DNA, 25 bp, Homo sapien
cgtagagttctacgacctacgaaat

SEQ ID NO: 5955032 - DNA, 25 bp, Homo sapien
ttgggtccgtggccctgaaaccata

SEQ ID NO: 5955033 - DNA, 25 bp, Homo sapien
accatccccactaccatcatggagg

SEQ ID NO: 5955034 - DNA, 25 bp, Homo sapien
atctgggagattggatttgaagatg

SEQ ID NO: 5955035 - DNA, 25 bp, Homo sapien
gattttaaaaatactcccagcgtag

SEQ ID NO: 5955036 - DNA, 25 bp, Homo sapien
acattgactccactttgaacaataa

SEQ ID NO: 5955037 - DNA, 25 bp, Homo sapien
aatggaacgaagaaagagattcaat

SEQ ID NO: 5955038 - DNA, 25 bp, Homo sapien
aattcgcgaattttacaacaagatc

SEQ ID NO: 5955039 - DNA, 25 bp, Homo sapien
aatcagaagggggtcttcaattggc

SEQ ID NO: 5955040 - DNA, 25 bp, Homo sapien
cttggatggctgaagaggagaagcg

SEQ ID NO: 5955041 - DNA, 25 bp, Homo sapien
gtacccagagtacgccacttggaga

SEQ ID NO: 5955042 - DNA, 25 bp, Homo sapien
aacaggctcacactttcctgcattc

SEQ ID NO: 5955043 - DNA, 25 bp, Homo sapien
agaattcgcgaattttacaacaaga

SEQ ID NO: 5955044 - DNA, 25 bp, Homo sapien
caaacaaccaacaacaacaacaaca

SEQ ID NO: 5955045 - DNA, 25 bp, Homo sapien
atgaattacaatgtcatcggcttgc

SEQ ID NO: 5955046 - DNA, 25 bp, Homo sapien
cccatgttttttaaccatctgaata

SEQ ID NO: 5955047 - DNA, 25 bp, Homo sapien
gggtccgtggccctgaaaccatacc

SEQ ID NO: 5955048 - DNA, 25 bp, Homo sapien
accatgacatatccgcacaacctga

SEQ ID NO: 5955049 - DNA, 25 bp, Homo sapien
ggtgactttgtctcaccaaacaacc

SEQ ID NO: 5955050 - DNA, 25 bp, Homo sapien
ataacaccatgggcgtgttactatc

SEQ ID NO: 5955051 - DNA, 25 bp, Homo sapien
ttgtggaagggtacccagagtacgc

SEQ ID NO: 5955052 - DNA, 25 bp, Homo sapien
gagatgcttctgagcatcttcccat

SEQ ID NO: 5955053 - DNA, 25 bp, Homo sapien
acagcagcagcagcaacagcaacag

SEQ ID NO: 5955054 - DNA, 25 bp, Homo sapien
acaacaacaacaacagcagcagcag

SEQ ID NO: 5955055 - DNA, 25 bp, Homo sapien
caatgtcatcggcttgccccattat

SEQ ID NO: 5955056 - DNA, 25 bp, Homo sapien
acgtggatgtcgaaaccatccccac

SEQ ID NO: 5955057 - DNA, 25 bp, Homo sapien
gcgcaatcgcaacaagacaagtcca

SEQ ID NO: 5955058 - DNA, 25 bp, Homo sapien
cgatatcgctattccagctggtaac

SEQ ID NO: 5955059 - DNA, 25 bp, Homo sapien
tgccccattatgtcatctggcacat

SEQ ID NO: 5955060 - DNA, 25 bp, Homo sapien
ggccaaatcattggtcagtcctttt

SEQ ID NO: 5955061 - DNA, 25 bp, Homo sapien
ctcccgcaggatgaattacaatgtc

SEQ ID NO: 5955062 - DNA, 25 bp, Homo sapien
gcagcagcaacagcaacagcaacaa

SEQ ID NO: 5955063 - DNA, 25 bp, Homo sapien
ctcggagctggtggactcaaagggt

SEQ ID NO: 5955064 - DNA, 25 bp, Homo sapien
caatcttaaaaaacattgactccac

SEQ ID NO: 5955065 - DNA, 25 bp, Homo sapien
tccagaagacgaaatggaattggac

SEQ ID NO: 5955066 - DNA, 25 bp, Homo sapien
ctttcctgcattctcctttgaaaag

SEQ ID NO: 5955067 - DNA, 25 bp, Homo sapien
gtcattgtggaagggtacccagagt

SEQ ID NO: 5955068 - DNA, 25 bp, Homo sapien
tggtgagtgactcttcggataacac

SEQ ID NO: 5955069 - DNA, 25 bp, Homo sapien
acaaggacgtcattgtccccaacgt

SEQ ID NO: 5955070 - DNA, 25 bp, Homo sapien
actccactttgaacaataaagtcac

SEQ ID NO: 5955071 - DNA, 25 bp, Homo sapien
tgatcgtcacgggtttggcgcccag

SEQ ID NO: 5955072 - DNA, 25 bp, Homo sapien
acagcaacaacaacaacaacagcag

SEQ ID NO: 5955073 - DNA, 25 bp, Homo sapien
atcgtcacgggtttggcgcccaggg

SEQ ID NO: 5955074 - DNA, 25 bp, Homo sapien
aaatactcccagcgtagagttctac

SEQ ID NO: 5955075 - DNA, 25 bp, Homo sapien
ttttaaaaatactcccagcgtagag

SEQ ID NO: 5955076 - DNA, 25 bp, Homo sapien
cttcggataacaccatgggcgtgtt

SEQ ID NO: 5955077 - DNA, 25 bp, Homo sapien
gcatcacgacaaggacgtcattgtc

SEQ ID NO: 5955078 - DNA, 25 bp, Homo sapien
tgactccactttgaacaataaagtc

SEQ ID NO: 5955079 - DNA, 25 bp, Homo sapien
tcgcaacaagacaagtccaaaaggt

SEQ ID NO: 5955080 - DNA, 25 bp, Homo sapien
agaagcggaaactagaagaagagag

SEQ ID NO: 5955081 - DNA, 25 bp, Homo sapien
aagcattcggtaggctctcccgcag

SEQ ID NO: 5955082 - DNA, 25 bp, Homo sapien
atgtcatcggcttgccccattatgt

SEQ ID NO: 5955083 - DNA, 25 bp, Homo sapien
tgggtttactggagagacgtggatg

SEQ ID NO: 5955084 - DNA, 25 bp, Homo sapien
ttaaaaatactcccagcgtagagtt

SEQ ID NO: 5955085 - DNA, 25 bp, Homo sapien
ttccagcgacgacttaaagcacatg

SEQ ID NO: 5955086 - DNA, 25 bp, Homo sapien
tttactggagagacgtggatgtcga

SEQ ID NO: 5955087 - DNA, 25 bp, Homo sapien
ccccattatgtcatctggcacatct

SEQ ID NO: 5955088 - DNA, 25 bp, Homo sapien
catcatggaggatctaatgcatcac

SEQ ID NO: 5955089 - DNA, 25 bp, Homo sapien
tcacgggtttggcgcccagggcccc

SEQ ID NO: 5955090 - DNA, 25 bp, Homo sapien
tcttcccatgttttttaaccatctg

SEQ ID NO: 5955091 - DNA, 25 bp, Homo sapien
ctgaagagggagatggctcggagct

SEQ ID NO: 5955092 - DNA, 25 bp, Homo sapien
cgctggaacgttgcttacggtgttc

SEQ ID NO: 5955093 - DNA, 25 bp, Homo sapien
tttttggtgagtgactcttcggata

SEQ ID NO: 5955094 - DNA, 25 bp, Homo sapien
agtccaaaaggtttggtaacatcga

SEQ ID NO: 5955095 - DNA, 25 bp, Homo sapien
agatggctcggagctggtggactca

SEQ ID NO: 5955096 - DNA, 25 bp, Homo sapien
acgatttaaattcatggaaggaatc

SEQ ID NO: 5955097 - DNA, 25 bp, Homo sapien
gagagatgcttctgagcatcttccc

SEQ ID NO: 5955098 - DNA, 25 bp, Homo sapien
cctagacgaagatgctgtcattgtg

SEQ ID NO: 5955099 - DNA, 25 bp, Homo sapien
ggccagggctcgtaattggcttggg

SEQ ID NO: 5955100 - DNA, 25 bp, Homo sapien
cattggtcagtccttttctgatcgt

SEQ ID NO: 5955101 - DNA, 25 bp, Homo sapien
agcgtagagttctacgacctacgaa

SEQ ID NO: 5955102 - DNA, 25 bp, Homo sapien
gtggactcaaagggtgactttgtct

SEQ ID NO: 5955103 - DNA, 25 bp, Homo sapien
gacttcggccaaatcattggtcagt

SEQ ID NO: 5955104 - DNA, 25 bp, Homo sapien
ctgaaaccataccactcctgggttt

SEQ ID NO: 5955105 - DNA, 25 bp, Homo sapien
aaaaacattgactccactttgaaca

SEQ ID NO: 5955106 - DNA, 25 bp, Homo sapien
ggaggatctaatgcatcacgacaag

SEQ ID NO: 5955107 - DNA, 25 bp, Homo sapien
gcacatggcttggatggctgaagag

SEQ ID NO: 5955108 - DNA, 25 bp, Homo sapien
ccaaatcattggtcagtccttttct

SEQ ID NO: 5955109 - DNA, 25 bp, Homo sapien
gaaactagaagaagagagaattcgc

SEQ ID NO: 5955110 - DNA, 25 bp, Homo sapien
ttcaatcttaaaaaacattgactcc

SEQ ID NO: 5955111 - DNA, 25 bp, Homo sapien
ttctcacaagactcgtgctttcgtt

SEQ ID NO: 5955112 - DNA, 25 bp, Homo sapien
agggggtcttcaattggcggattcc

SEQ ID NO: 5955113 - DNA, 25 bp, Homo sapien
gcagagacagaagcattcggtaggc

SEQ ID NO: 5955114 - DNA, 25 bp, Homo sapien
ccattatgtcatctggcacatctac

SEQ ID NO: 5955115 - DNA, 25 bp, Homo sapien
agacgtggatgtcgaaaccatcccc

SEQ ID NO: 5955116 - DNA, 25 bp, Homo sapien
tgaaaagcacgcagagacagaagca

SEQ ID NO: 5955117 - DNA, 25 bp, Homo sapien
tcctaaagaagttccattagacttc

SEQ ID NO: 5955118 - DNA, 25 bp, Homo sapien
acaacgacaagaacaagaaaaaaca

SEQ ID NO: 5955119 - DNA, 25 bp, Homo sapien
ccctaccacagtaagtatcgctgga

SEQ ID NO: 5955120 - DNA, 25 bp, Homo sapien
cgctattccagctggtaactttcca

SEQ ID NO: 5955121 - DNA, 25 bp, Homo sapien
ctggagagacgtggatgtcgaaacc

SEQ ID NO: 5955122 - DNA, 25 bp, Homo sapien
cgtaattggcttgggtccgtggccc

SEQ ID NO: 5955123 - DNA, 25 bp, Homo sapien
cctcttgatgacaacgacaagaaca

SEQ ID NO: 5955124 - DNA, 25 bp, Homo sapien
aaatcattggtcagtccttttctga

SEQ ID NO: 5955125 - DNA, 25 bp, Homo sapien
ccgcacaacctgattgatctgtcgt

SEQ ID NO: 5955126 - DNA, 25 bp, Homo sapien
acaacaagatctgggagattggatt

SEQ ID NO: 5955127 - DNA, 25 bp, Homo sapien
cttcggccaaatcattggtcagtcc

SEQ ID NO: 5955128 - DNA, 25 bp, Homo sapien
agagacagaagcattcggtaggctc

SEQ ID NO: 5955129 - DNA, 25 bp, Homo sapien
aacagcaacaacagctcgacggcaa

SEQ ID NO: 5955130 - DNA, 25 bp, Homo sapien
ggaagggtacccagagtacgccact

SEQ ID NO: 5955131 - DNA, 25 bp, Homo sapien
agggccccagaagaaagctgatggc

SEQ ID NO: 5955132 - DNA, 25 bp, Homo sapien
tcttcaattggcggattccctagac

SEQ ID NO: 5955133 - DNA, 25 bp, Homo sapien
ttaaccatctgaataccatgacata

SEQ ID NO: 5955134 - DNA, 25 bp, Homo sapien
acatatccgcacaacctgattgatc

SEQ ID NO: 5955135 - DNA, 25 bp, Homo sapien
caacagcaacaacaacaacaacagc

SEQ ID NO: 5955136 - DNA, 25 bp, Homo sapien
ggatttgaagatgtcagagaccaat

SEQ ID NO: 5955137 - DNA, 25 bp, Homo sapien
acatggcttggatggctgaagagga

SEQ ID NO: 5955138 - DNA, 25 bp, Homo sapien
ttgatgacaacgacaagaacaagaa

SEQ ID NO: 5955139 - DNA, 25 bp, Homo sapien
cccgcaggatgaattacaatgtcat

SEQ ID NO: 5955140 - DNA, 25 bp, Homo sapien
gtgactcttcggataacaccatggg

SEQ ID NO: 5955141 - DNA, 25 bp, Homo sapien
caaacggtaatccagaagacgaaat

SEQ ID NO: 5955142 - DNA, 25 bp, Homo sapien
gtgagtgactcttcggataacacca

SEQ ID NO: 5955143 - DNA, 25 bp, Homo sapien
gcgtgccactgagagatgcttctga

SEQ ID NO: 5955144 - DNA, 25 bp, Homo sapien
tctaatgcatcacgacaaggacgtc

SEQ ID NO: 5955145 - DNA, 25 bp, Homo sapien
ccatgggcgtgttactatccaatct

SEQ ID NO: 5955146 - DNA, 25 bp, Homo sapien
ttttttaaccatctgaataccatga

SEQ ID NO: 5955147 - DNA, 25 bp, Homo sapien
atgttccagattttaaaaatactcc

SEQ ID NO: 5955148 - DNA, 25 bp, Homo sapien
gacaagaacaagaaaaaacatccta

SEQ ID NO: 5955149 - DNA, 25 bp, Homo sapien
aagcggaaactagaagaagagagaa

SEQ ID NO: 5955150 - DNA, 25 bp, Homo sapien
ccccagaagaaagctgatggccagg

SEQ ID NO: 5955151 - DNA, 25 bp, Homo sapien
agactggctgggaaacattcaaccc

SEQ ID NO: 5955152 - DNA, 25 bp, Homo sapien
tacgccacttggagacctcacctgg

SEQ ID NO: 5955153 - DNA, 25 bp, Homo sapien
ggtttggcgcccagggccccagaag

SEQ ID NO: 5955154 - DNA, 25 bp, Homo sapien
ttcgcgaattttacaacaagatctg

SEQ ID NO: 5955155 - DNA, 25 bp, Homo sapien
attgatctgtcgtttttggtgagtg

SEQ ID NO: 5955156 - DNA, 25 bp, Homo sapien
attggcggattccctagacgaagat

SEQ ID NO: 5955157 - DNA, 25 bp, Homo sapien
ggccccagaagaaagctgatggcca

SEQ ID NO: 5955158 - DNA, 25 bp, Homo sapien
aacaacagcagcagcagcaacagca

SEQ ID NO: 5955159 - DNA, 25 bp, Homo sapien
attacaatgtcatcggcttgcccca

SEQ ID NO: 5955160 - DNA, 25 bp, Homo sapien
tgtcatctggcacatctacgaacct

SEQ ID NO: 5955161 - DNA, 25 bp, Homo sapien
ggatgtcgaaaccatccccactacc

SEQ ID NO: 5955162 - DNA, 25 bp, Homo sapien
cgaagatgctgtcattgtggaaggg

SEQ ID NO: 5955163 - DNA, 25 bp, Homo sapien
tgagcatcttcccatgttttttaac

SEQ ID NO: 5955164 - DNA, 25 bp, Homo sapien
gaaggacttcggccaaatcattggt

SEQ ID NO: 5955165 - DNA, 25 bp, Homo sapien
taaaaaacattgactccactttgaa

SEQ ID NO: 5955166 - DNA, 25 bp, Homo sapien
ccatctgaataccatgacatatccg

SEQ ID NO: 5955167 - DNA, 25 bp, Homo sapien
atatccgcacaacctgattgatctg

SEQ ID NO: 5955168 - DNA, 25 bp, Homo sapien
ttggtaacatcgaaatctatgagaa

SEQ ID NO: 5955169 - DNA, 25 bp, Homo sapien
gggcgtgttactatccaatctacag

SEQ ID NO: 5955170 - DNA, 25 bp, Homo sapien
gaataccatgacatatccgcacaac

SEQ ID NO: 5955171 - DNA, 25 bp, Homo sapien
agccctatgttccagattttaaaaa

SEQ ID NO: 5955172 - DNA, 25 bp, Homo sapien
aacaacagctcgacggcaacccgca

SEQ ID NO: 5955173 - DNA, 25 bp, Homo sapien
gtgttactatccaatctacagatgg

SEQ ID NO: 5955174 - DNA, 25 bp, Homo sapien
gaagatgtcagagaccaatggaacg

SEQ ID NO: 5955175 - DNA, 25 bp, Homo sapien
aacagcaacagcaacaacagctcga

SEQ ID NO: 5955176 - DNA, 25 bp, Homo sapien
ctatgagaaggacttcggccaaatc

SEQ ID NO: 5955177 - DNA, 25 bp, Homo sapien
cgaaatctatgagaaggacttcggc

SEQ ID NO: 5955178 - DNA, 25 bp, Homo sapien
cggagctggtggactcaaagggtga

SEQ ID NO: 5955179 - DNA, 25 bp, Homo sapien
gggtgaccgcatcttgttttgcgtg

SEQ ID NO: 5955180 - DNA, 25 bp, Homo sapien
ttctcgatatcgctattccagctgg

SEQ ID NO: 5955181 - DNA, 25 bp, Homo sapien
taatgcatcacgacaaggacgtcat

SEQ ID NO: 5955182 - DNA, 25 bp, Homo sapien
acaacaacagcagcagcagcaacag

SEQ ID NO: 5955183 - DNA, 25 bp, Homo sapien
tgatggccagggctcgtaattggct

SEQ ID NO: 5955184 - DNA, 25 bp, Homo sapien
actcccagcgtagagttctacgacc

SEQ ID NO: 5955185 - DNA, 25 bp, Homo sapien
cgccacttggagacctcacctggca

SEQ ID NO: 5955186 - DNA, 25 bp, Homo sapien
tcggccaaatcattggtcagtcctt

SEQ ID NO: 5955187 - DNA, 25 bp, Homo sapien
acccagagtacgccacttggagacc

SEQ ID NO: 5955188 - DNA, 25 bp, Homo sapien
gcgcccagggccccagaagaaagct

SEQ ID NO: 5955189 - DNA, 25 bp, Homo sapien
acattcaaccctacgatttaaattc

SEQ ID NO: 5955190 - DNA, 25 bp, Homo sapien
cagagaccaatggaacgaagaaaga

SEQ ID NO: 5955191 - DNA, 25 bp, Homo sapien
aatccagaagacgaaatggaattgg

SEQ ID NO: 5955192 - DNA, 25 bp, Homo sapien
gggtacccagagtacgccacttgga

SEQ ID NO: 5955193 - DNA, 25 bp, Homo sapien
accacagtaagtatcgctggaacgt

SEQ ID NO: 5955194 - DNA, 25 bp, Homo sapien
gtaactttccaaggaatcttcaagc

SEQ ID NO: 5955195 - DNA, 25 bp, Homo sapien
accaacaacaacaacaacagcaaca

SEQ ID NO: 5955196 - DNA, 25 bp, Homo sapien
gagtgactcttcggataacaccatg

SEQ ID NO: 5955197 - DNA, 25 bp, Homo sapien
tctacgaaccttccagcgacgactt

SEQ ID NO: 5955198 - DNA, 25 bp, Homo sapien
caacaacaacagcagcagcagcaac

SEQ ID NO: 5955199 - DNA, 25 bp, Homo sapien
taaattcatggaaggaatcagaagg

SEQ ID NO: 5955200 - DNA, 25 bp, Homo sapien
aaggaatcagaagggggtcttcaat

SEQ ID NO: 5955201 - DNA, 25 bp, Homo sapien
cactcctgggtttactggagagacg

SEQ ID NO: 5955202 - DNA, 25 bp, Homo sapien
tcggataacaccatgggcgtgttac

SEQ ID NO: 5955203 - DNA, 25 bp, Homo sapien
ctatccaatctacagatggcgcaat

SEQ ID NO: 5955204 - DNA, 25 bp, Homo sapien
ggtcagtccttttctgatcgtcacg

SEQ ID NO: 5955205 - DNA, 25 bp, Homo sapien
atggctcggagctggtggactcaaa

SEQ ID NO: 5955206 - DNA, 25 bp, Homo sapien
agacgaaatggaattggacggtatt

SEQ ID NO: 5955207 - DNA, 25 bp, Homo sapien
aaaggtttggtaacatcgaaatcta

SEQ ID NO: 5955208 - DNA, 25 bp, Homo sapien
cacaagactcgtgctttcgttcttc

SEQ ID NO: 5955209 - DNA, 25 bp, Homo sapien
aagtattcagaacaggctcacactt

SEQ ID NO: 5955210 - DNA, 25 bp, Homo sapien
tcttgatgacaacgacaagaacaag

SEQ ID NO: 5955211 - DNA, 25 bp, Homo sapien
gaggagaagcggaaactagaagaag

SEQ ID NO: 5955212 - DNA, 25 bp, Homo sapien
cctggcatacatgagagacccaaac

SEQ ID NO: 5955213 - DNA, 25 bp, Homo sapien
ggcaacccgcaggggaaacctcttg

SEQ ID NO: 5955214 - DNA, 25 bp, Homo sapien
ggagaagcggaaactagaagaagag

SEQ ID NO: 5955215 - DNA, 25 bp, Homo sapien
attccagctggtaactttccaagga

SEQ ID NO: 5955216 - DNA, 25 bp, Homo sapien
catctacgaaccttccagcgacgac

SEQ ID NO: 5955217 - DNA, 25 bp, Homo sapien
caagactcgtgctttcgttcttctc

SEQ ID NO: 5955218 - DNA, 25 bp, Homo sapien
cagattttaaaaatactcccagcgt

SEQ ID NO: 5955219 - DNA, 25 bp, Homo sapien
aggcaacaaagatggttggcaacag

SEQ ID NO: 5955220 - DNA, 25 bp, Homo sapien
ctttctcacaagactcgtgctttcg

SEQ ID NO: 5955221 - DNA, 25 bp, Homo sapien
tggtaactttccaaggaatcttcaa

SEQ ID NO: 5955222 - DNA, 25 bp, Homo sapien
ttcaattggcggattccctagacga

SEQ ID NO: 5955223 - DNA, 25 bp, Homo sapien
ttgaacaataaagtcactgtagact

SEQ ID NO: 5955224 - DNA, 25 bp, Homo sapien
ttttacaacaagatctgggagattg

SEQ ID NO: 5955225 - DNA, 25 bp, Homo sapien
ataccatgacatatccgcacaacct

SEQ ID NO: 5955226 - DNA, 25 bp, Homo sapien
cttgccccattatgtcatctggcac

SEQ ID NO: 5955227 - DNA, 25 bp, Homo sapien
gtaagtatcgctggaacgttgctta

SEQ ID NO: 5955228 - DNA, 25 bp, Homo sapien
aagctaaagtattcagaacaggctc

SEQ ID NO: 5955229 - DNA, 25 bp, Homo sapien
cagcaacaacagctcgacggcaacc

SEQ ID NO: 5955230 - DNA, 25 bp, Homo sapien
tttcgttcttctcgatatcgctatt

SEQ ID NO: 5955231 - DNA, 25 bp, Homo sapien
gtggatgtcgaaaccatccccacta

SEQ ID NO: 5955232 - DNA, 25 bp, Homo sapien
gtaatccagaagacgaaatggaatt

SEQ ID NO: 5955233 - DNA, 25 bp, Homo sapien
gaacgaagaaagagattcaatctta

SEQ ID NO: 5955234 - DNA, 25 bp, Homo sapien
ttcccatgttttttaaccatctgaa

SEQ ID NO: 5955235 - DNA, 25 bp, Homo sapien
aagaggagaagcggaaactagaaga

SEQ ID NO: 5955236 - DNA, 25 bp, Homo sapien
cagctggtaactttccaaggaatct

SEQ ID NO: 5955237 - DNA, 25 bp, Homo sapien
tcccagcgtagagttctacgaccta

SEQ ID NO: 5955238 - DNA, 25 bp, Homo sapien
ggagatggctcggagctggtggact

SEQ ID NO: 5955239 - DNA, 25 bp, Homo sapien
cattctcctttgaaaagcacgcaga

SEQ ID NO: 5955240 - DNA, 25 bp, Homo sapien
acaacaacagcaacaacaacaacaa

SEQ ID NO: 5955241 - DNA, 25 bp, Homo sapien
tggagacctttaccagactggctgg

SEQ ID NO: 5955242 - DNA, 25 bp, Homo sapien
aataaagtcactgtagactggtctg

SEQ ID NO: 5955243 - DNA, 25 bp, Homo sapien
tctacagatggcgcaatcgcaacaa

SEQ ID NO: 5955244 - DNA, 25 bp, Homo sapien
actggctgggaaacattcaacccta

SEQ ID NO: 5955245 - DNA, 25 bp, Homo sapien
caaaaggtttggtaacatcgaaatc

SEQ ID NO: 5955246 - DNA, 25 bp, Homo sapien
cgtttttggtgagtgactcttcgga

SEQ ID NO: 5955247 - DNA, 25 bp, Homo sapien
ccagcgtagagttctacgacctacg

SEQ ID NO: 5955248 - DNA, 25 bp, Homo sapien
ccctgaaaccataccactcctgggt

SEQ ID NO: 5955249 - DNA, 25 bp, Homo sapien
attgactccactttgaacaataaag

SEQ ID NO: 5955250 - DNA, 25 bp, Homo sapien
aacagaaaactctcgttcaacccta

SEQ ID NO: 5955251 - DNA, 25 bp, Homo sapien
tggcaacagggtgaccgcatcttgt

SEQ ID NO: 5955252 - DNA, 25 bp, Homo sapien
tccactttgaacaataaagtcactg

SEQ ID NO: 5955253 - DNA, 25 bp, Homo sapien
cagggtgaccgcatcttgttttgcg

SEQ ID NO: 5955254 - DNA, 25 bp, Homo sapien
gcaatcgcaacaagacaagtccaaa

SEQ ID NO: 5955255 - DNA, 25 bp, Homo sapien
acctcacctggcatacatgagagac

SEQ ID NO: 5955256 - DNA, 25 bp, Homo sapien
gaaaactctcgttcaaccctaccac

SEQ ID NO: 5955257 - DNA, 25 bp, Homo sapien
ttagacttcgaccctgatagaaact

SEQ ID NO: 5955258 - DNA, 25 bp, Homo sapien
aagttccattagacttcgaccctga

SEQ ID NO: 5955259 - DNA, 25 bp, Homo sapien
tacaatgtcatcggcttgccccatt

SEQ ID NO: 5955260 - DNA, 25 bp, Homo sapien
caagacaagtccaaaaggtttggta

SEQ ID NO: 5955261 - DNA, 25 bp, Homo sapien
cagaagggggtcttcaattggcgga

SEQ ID NO: 5955262 - DNA, 25 bp, Homo sapien
ggactcaaagggtgactttgtctca

SEQ ID NO: 5955263 - DNA, 25 bp, Homo sapien
atatcgctattccagctggtaactt

SEQ ID NO: 5955264 - DNA, 25 bp, Homo sapien
ttggtcagtccttttctgatcgtca

SEQ ID NO: 5955265 - DNA, 25 bp, Homo sapien
aaggacgtcattgtccccaacgtct

SEQ ID NO: 5955266 - DNA, 25 bp, Homo sapien
agacctcacctggcatacatgagag

SEQ ID NO: 5955267 - DNA, 25 bp, Homo sapien
cgttgcttacggtgttctttctcac

SEQ ID NO: 5955268 - DNA, 25 bp, Homo sapien
ctgtcgtttttggtgagtgactctt

SEQ ID NO: 5955269 - DNA, 25 bp, Homo sapien
gttggcaacagggtgaccgcatctt

SEQ ID NO: 5955270 - DNA, 25 bp, Homo sapien
cacctggcatacatgagagacccaa

SEQ ID NO: 5955271 - DNA, 25 bp, Homo sapien
caacaacaacaacaacagcagcagc

SEQ ID NO: 5955272 - DNA, 25 bp, Homo sapien
caaagatggttggcaacagggtgac

SEQ ID NO: 5955273 - DNA, 25 bp, Homo sapien
aactagaagaagagagaattcgcga

SEQ ID NO: 5955274 - DNA, 25 bp, Homo sapien
tggcttgggtccgtggccctgaaac

SEQ ID NO: 5955275 - DNA, 25 bp, Homo sapien
ctctcccgcaggatgaattacaatg

SEQ ID NO: 5955276 - DNA, 25 bp, Homo sapien
ctcacctggcatacatgagagaccc

SEQ ID NO: 5955277 - DNA, 25 bp, Homo sapien
gcttgggtccgtggccctgaaacca

SEQ ID NO: 5955278 - DNA, 25 bp, Homo sapien
atcgctggaacgttgcttacggtgt

SEQ ID NO: 5955279 - DNA, 25 bp, Homo sapien
tgaagaggagaagcggaaactagaa

SEQ ID NO: 5955280 - DNA, 25 bp, Homo sapien
caagccctatgttccagattttaaa

SEQ ID NO: 5955281 - DNA, 25 bp, Homo sapien
ttacggtgttctttctcacaagact

SEQ ID NO: 5955282 - DNA, 25 bp, Homo sapien
attcggtaggctctcccgcaggatg

SEQ ID NO: 5955283 - DNA, 25 bp, Homo sapien
catggaaggaatcagaagggggtct

SEQ ID NO: 5955284 - DNA, 25 bp, Homo sapien
caagtccaaaaggtttggtaacatc

SEQ ID NO: 5955285 - DNA, 25 bp, Homo sapien
ctatgttccagattttaaaaatact

SEQ ID NO: 5955286 - DNA, 25 bp, Homo sapien
ctcgattctcgcgaaagctaaagta

SEQ ID NO: 5955287 - DNA, 25 bp, Homo sapien
ggataacaccatgggcgtgttacta

SEQ ID NO: 5955288 - DNA, 25 bp, Homo sapien
aacaacaacaacagcagcagcagca

SEQ ID NO: 5955289 - DNA, 25 bp, Homo sapien
ctacgatttaaattcatggaaggaa

SEQ ID NO: 5955290 - DNA, 25 bp, Homo sapien
caaccaacaacaacaacaacagcaa

SEQ ID NO: 5955291 - DNA, 25 bp, Homo sapien
tgggaaacattcaaccctacgattt

SEQ ID NO: 5955292 - DNA, 25 bp, Homo sapien
acggtgttctttctcacaagactcg

SEQ ID NO: 5955293 - DNA, 25 bp, Homo sapien
ttcaagccctatgttccagatttta

SEQ ID NO: 5955294 - DNA, 25 bp, Homo sapien
acaacctgattgatctgtcgttttt

SEQ ID NO: 5955295 - DNA, 25 bp, Homo sapien
ccgcatcttgttttgcgtgccactg

SEQ ID NO: 5955296 - DNA, 25 bp, Homo sapien
tccctagacgaagatgctgtcattg

SEQ ID NO: 5955297 - DNA, 25 bp, Homo sapien
ccaaggaatcttcaagccctatgtt

SEQ ID NO: 5955298 - DNA, 25 bp, Homo sapien
ctcacaagactcgtgctttcgttct

SEQ ID NO: 5955299 - DNA, 25 bp, Homo sapien
gctgaagaggagaagcggaaactag

SEQ ID NO: 5955300 - DNA, 25 bp, Homo sapien
caagaacaagaaaaaacatcctaaa

SEQ ID NO: 5955301 - DNA, 25 bp, Homo sapien
tccttttctgatcgtcacgggtttg

SEQ ID NO: 5955302 - DNA, 25 bp, Homo sapien
tactatccaatctacagatggcgca

SEQ ID NO: 5955303 - DNA, 25 bp, Homo sapien
ttacaacaagatctgggagattgga

SEQ ID NO: 5955304 - DNA, 25 bp, Homo sapien
cattagacttcgaccctgatagaaa

SEQ ID NO: 5955305 - DNA, 25 bp, Homo sapien
taggctctcccgcaggatgaattac

SEQ ID NO: 5955306 - DNA, 25 bp, Homo sapien
gatggctgaagaggagaagcggaaa

SEQ ID NO: 5955307 - DNA, 25 bp, Homo sapien
agggctcgtaattggcttgggtccg

SEQ ID NO: 5955308 - DNA, 25 bp, Homo sapien
accaaggcaacaaagatggttggca

SEQ ID NO: 5955309 - DNA, 25 bp, Homo sapien
atttgaagatgtcagagaccaatgg

SEQ ID NO: 5955310 - DNA, 25 bp, Homo sapien
acggtattggaggggtctcgattct

SEQ ID NO: 5955311 - DNA, 25 bp, Homo sapien
aaaagcacgcagagacagaagcatt

SEQ ID NO: 5955312 - DNA, 25 bp, Homo sapien
gagattcaatcttaaaaaacattga

SEQ ID NO: 5955313 - DNA, 25 bp, Homo sapien
agtccttttctgatcgtcacgggtt

SEQ ID NO: 5955314 - DNA, 25 bp, Homo sapien
acttggagacctcacctggcataca

SEQ ID NO: 5955315 - DNA, 25 bp, Homo sapien
ggctcacactttcctgcattctcct

SEQ ID NO: 5955316 - DNA, 25 bp, Homo sapien
agacagaagcattcggtaggctctc

SEQ ID NO: 5955317 - DNA, 25 bp, Homo sapien
aacagggtgaccgcatcttgttttg

SEQ ID NO: 5955318 - DNA, 25 bp, Homo sapien
gaacaataaagtcactgtagactgg

SEQ ID NO: 5955319 - DNA, 25 bp, Homo sapien
gattggatttgaagatgtcagagac

SEQ ID NO: 5955320 - DNA, 25 bp, Homo sapien
gaccgcatcttgttttgcgtgccac

SEQ ID NO: 5955321 - DNA, 25 bp, Homo sapien
cgacgacttaaagcacatggcttgg

SEQ ID NO: 5955322 - DNA, 25 bp, Homo sapien
cagaagacgaaatggaattggacgg

SEQ ID NO: 5955323 - DNA, 25 bp, Homo sapien
gtattcagaacaggctcacactttc

SEQ ID NO: 5955324 - DNA, 25 bp, Homo sapien
gcaacaacagctcgacggcaacccg

SEQ ID NO: 5955325 - DNA, 25 bp, Homo sapien
cgcaggatgaattacaatgtcatcg

SEQ ID NO: 5955326 - DNA, 25 bp, Homo sapien
ggggtcttcaattggcggattccct

SEQ ID NO: 5955327 - DNA, 25 bp, Homo sapien
atgtcagagaccaatggaacgaaga

SEQ ID NO: 5955328 - DNA, 25 bp, Homo sapien
acgcagagacagaagcattcggtag

SEQ ID NO: 5955329 - DNA, 25 bp, Homo sapien
gactcttcggataacaccatgggcg

SEQ ID NO: 5955330 - DNA, 25 bp, Homo sapien
atgcatcacgacaaggacgtcattg

SEQ ID NO: 5955331 - DNA, 25 bp, Homo sapien
gtttggtaacatcgaaatctatgag

SEQ ID NO: 5955332 - DNA, 25 bp, Homo sapien
ccctacgatttaaattcatggaagg

SEQ ID NO: 5955333 - DNA, 25 bp, Homo sapien
ccagggccccagaagaaagctgatg

SEQ ID NO: 5955334 - DNA, 25 bp, Homo sapien
cacatctacgaaccttccagcgacg

SEQ ID NO: 5955335 - DNA, 25 bp, Homo sapien
aagcacgcagagacagaagcattcg

SEQ ID NO: 5955336 - DNA, 25 bp, Homo sapien
taaagtcactgtagactggtctgaa

SEQ ID NO: 5955337 - DNA, 25 bp, Homo sapien
tggaacgaagaaagagattcaatct

SEQ ID NO: 5955338 - DNA, 25 bp, Homo sapien
gaattacaatgtcatcggcttgccc

SEQ ID NO: 5955339 - DNA, 25 bp, Homo sapien
ttgcttacggtgttctttctcacaa

SEQ ID NO: 5955340 - DNA, 25 bp, Homo sapien
ggtaggctctcccgcaggatgaatt

SEQ ID NO: 5955341 - DNA, 25 bp, Homo sapien
atgggcgtgttactatccaatctac

SEQ ID NO: 5955342 - DNA, 25 bp, Homo sapien
ggagagacgtggatgtcgaaaccat

SEQ ID NO: 5955343 - DNA, 25 bp, Homo sapien
gacccaaacggtaatccagaagacg

SEQ ID NO: 5955344 - DNA, 25 bp, Homo sapien
tgttttgcgtgccactgagagatgc

SEQ ID NO: 5955345 - DNA, 25 bp, Homo sapien
ggatgaattacaatgtcatcggctt

SEQ ID NO: 5955346 - DNA, 25 bp, Homo sapien
acgacaagaacaagaaaaaacatcc

SEQ ID NO: 5955347 - DNA, 25 bp, Homo sapien
gatggttggcaacagggtgaccgca

SEQ ID NO: 5955348 - DNA, 25 bp, Homo sapien
gcaacaaagatggttggcaacaggg

SEQ ID NO: 5955349 - DNA, 25 bp, Homo sapien
aacaccatgggcgtgttactatcca

SEQ ID NO: 5955350 - DNA, 25 bp, Homo sapien
ataacagaaaactctcgttcaaccc

SEQ ID NO: 5955351 - DNA, 25 bp, Homo sapien
tacgaaccttccagcgacgacttaa

SEQ ID NO: 5955352 - DNA, 25 bp, Homo sapien
attccctagacgaagatgctgtcat

SEQ ID NO: 5955353 - DNA, 25 bp, Homo sapien
agagtacgccacttggagacctcac

SEQ ID NO: 5955354 - DNA, 25 bp, Homo sapien
agggtgactttgtctcaccaaacaa

SEQ ID NO: 5955355 - DNA, 25 bp, Homo sapien
gtcattgtccccaacgtctggagac

SEQ ID NO: 5955356 - DNA, 25 bp, Homo sapien
ggacggtattggaggggtctcgatt

SEQ ID NO: 5955357 - DNA, 25 bp, Homo sapien
ccataccactcctgggtttactgga

SEQ ID NO: 5955358 - DNA, 25 bp, Homo sapien
tggtggactcaaagggtgactttgt

SEQ ID NO: 5955359 - DNA, 25 bp, Homo sapien
gatggcgcaatcgcaacaagacaag

SEQ ID NO: 5955360 - DNA, 25 bp, Homo sapien
ggcttgccccattatgtcatctggc

SEQ ID NO: 5955361 - DNA, 25 bp, Homo sapien
gcacgcagagacagaagcattcggt

SEQ ID NO: 5955362 - DNA, 25 bp, Homo sapien
cagatggcgcaatcgcaacaagaca

SEQ ID NO: 5955363 - DNA, 25 bp, Homo sapien
gtcgtttttggtgagtgactcttcg

SEQ ID NO: 5955364 - DNA, 25 bp, Homo sapien
atcgctattccagctggtaactttc

SEQ ID NO: 5955365 - DNA, 25 bp, Homo sapien
agctcgacggcaacccgcaggggaa

SEQ ID NO: 5955366 - DNA, 25 bp, Homo sapien
gctttcgttcttctcgatatcgcta

SEQ ID NO: 5955367 - DNA, 25 bp, Homo sapien
tcgttcttctcgatatcgctattcc

SEQ ID NO: 5955368 - DNA, 25 bp, Homo sapien
tggcgcccagggccccagaagaaag

SEQ ID NO: 5955369 - DNA, 25 bp, Homo sapien
tccagctggtaactttccaaggaat

SEQ ID NO: 5955370 - DNA, 25 bp, Homo sapien
ccagcgacgacttaaagcacatggc

SEQ ID NO: 5955371 - DNA, 25 bp, Homo sapien
gtatcgctggaacgttgcttacggt

SEQ ID NO: 5955372 - DNA, 25 bp, Homo sapien
cagaaaactctcgttcaaccctacc

SEQ ID NO: 5955373 - DNA, 25 bp, Homo sapien
gcccagggccccagaagaaagctga

SEQ ID NO: 5955374 - DNA, 25 bp, Homo sapien
agcaacaacaacaacaacagcagca

SEQ ID NO: 5955375 - DNA, 25 bp, Homo sapien
cactaccatcatggaggatctaatg

SEQ ID NO: 5955376 - DNA, 25 bp, Homo sapien
tttctgatcgtcacgggtttggcgc

SEQ ID NO: 5955377 - DNA, 25 bp, Homo sapien
caggctcacactttcctgcattctc

SEQ ID NO: 5955378 - DNA, 25 bp, Homo sapien
agactcgtgctttcgttcttctcga

SEQ ID NO: 5955379 - DNA, 25 bp, Homo sapien
ctcctttgaaaagcacgcagagaca

SEQ ID NO: 5955380 - DNA, 25 bp, Homo sapien
ggtaacatcgaaatctatgagaagg

SEQ ID NO: 5955381 - DNA, 25 bp, Homo sapien
tcgtgctttcgttcttctcgatatc

SEQ ID NO: 5955382 - DNA, 25 bp, Homo sapien
gggtctcgattctcgcgaaagctaa

SEQ ID NO: 5955383 - DNA, 25 bp, Homo sapien
agaagaagagagaattcgcgaattt

SEQ ID NO: 5955384 - DNA, 25 bp, Homo sapien
agtacgccacttggagacctcacct

SEQ ID NO: 5955385 - DNA, 25 bp, Homo sapien
gaaatggaattggacggtattggag

SEQ ID NO: 5955386 - DNA, 25 bp, Homo sapien
accactcctgggtttactggagaga

SEQ ID NO: 5955387 - DNA, 25 bp, Homo sapien
aattttacaacaagatctgggagat

SEQ ID NO: 5955388 - DNA, 25 bp, Homo sapien
catcggcttgccccattatgtcatc

SEQ ID NO: 5955389 - DNA, 25 bp, Homo sapien
gcggattccctagacgaagatgctg

SEQ ID NO: 5955390 - DNA, 25 bp, Homo sapien
acgaaatggaattggacggtattgg

SEQ ID NO: 5955391 - DNA, 25 bp, Homo sapien
cattgtggaagggtacccagagtac

SEQ ID NO: 5955392 - DNA, 25 bp, Homo sapien
agtataataacagaaaactctcgtt

SEQ ID NO: 5955393 - DNA, 25 bp, Homo sapien
tggctgaagaggagaagcggaaact

SEQ ID NO: 5955394 - DNA, 25 bp, Homo sapien
tttggcgcccagggccccagaagaa

SEQ ID NO: 5955395 - DNA, 25 bp, Homo sapien
cctgggtttactggagagacgtgga

SEQ ID NO: 5955396 - DNA, 25 bp, Homo sapien
tcagaacaggctcacactttcctgc

SEQ ID NO: 5955397 - DNA, 25 bp, Homo sapien
gagacctttaccagactggctggga

SEQ ID NO: 5955398 - DNA, 25 bp, Homo sapien
aaaaatactcccagcgtagagttct

SEQ ID NO: 5955399 - DNA, 25 bp, Homo sapien
cactttcctgcattctcctttgaaa

SEQ ID NO: 5955400 - DNA, 25 bp, Homo sapien
gacaagtccaaaaggtttggtaaca

SEQ ID NO: 5955401 - DNA, 25 bp, Homo sapien
agcagcaacagcaacagcaacaaca

SEQ ID NO: 5955402 - DNA, 25 bp, Homo sapien
tggctgggaaacattcaaccctacg

SEQ ID NO: 5955403 - DNA, 25 bp, Homo sapien
cctgcattctcctttgaaaagcacg

SEQ ID NO: 5955404 - DNA, 25 bp, Homo sapien
atggccagggctcgtaattggcttg

SEQ ID NO: 5955405 - DNA, 25 bp, Homo sapien
tgcttctgagcatcttcccatgttt

SEQ ID NO: 5955406 - DNA, 25 bp, Homo sapien
tgttctttctcacaagactcgtgct

SEQ ID NO: 5955407 - DNA, 25 bp, Homo sapien
ttttgcgtgccactgagagatgctt

SEQ ID NO: 5955408 - DNA, 25 bp, Homo sapien
aatcgcaacaagacaagtccaaaag

SEQ ID NO: 5955409 - DNA, 25 bp, Homo sapien
aacaaagatggttggcaacagggtg

SEQ ID NO: 5955410 - DNA, 25 bp, Homo sapien
cttaaaaaacattgactccactttg

SEQ ID NO: 5955411 - DNA, 25 bp, Homo sapien
cactgagagatgcttctgagcatct

SEQ ID NO: 5955412 - DNA, 25 bp, Homo sapien
atggaggatctaatgcatcacgaca

SEQ ID NO: 5955413 - DNA, 25 bp, Homo sapien
gcatacatgagagacccaaacggta

SEQ ID NO: 5955414 - DNA, 25 bp, Homo sapien
attatgtcatctggcacatctacga

SEQ ID NO: 5955415 - DNA, 25 bp, Homo sapien
tccattagacttcgaccctgataga

SEQ ID NO: 5955416 - DNA, 25 bp, Homo sapien
attcaaccctacgatttaaattcat

SEQ ID NO: 5955417 - DNA, 25 bp, Homo sapien
ttgcgtgccactgagagatgcttct

SEQ ID NO: 5955418 - DNA, 25 bp, Homo sapien
attcagaacaggctcacactttcct

SEQ ID NO: 5955419 - DNA, 25 bp, Homo sapien
ggacgtcattgtccccaacgtctgg

SEQ ID NO: 5955420 - DNA, 25 bp, Homo sapien
cgaattttacaacaagatctgggag

SEQ ID NO: 5955421 - DNA, 25 bp, Homo sapien
gacctttaccagactggctgggaaa

SEQ ID NO: 5955422 - DNA, 25 bp, Homo sapien
gagttctacgacctacgaaattacc

SEQ ID NO: 5955423 - DNA, 25 bp, Homo sapien
atacatgagagacccaaacggtaat

SEQ ID NO: 5955424 - DNA, 25 bp, Homo sapien
tggcgcaatcgcaacaagacaagtc

SEQ ID NO: 5955425 - DNA, 25 bp, Homo sapien
gctgatggccagggctcgtaattgg

SEQ ID NO: 5955426 - DNA, 25 bp, Homo sapien
gaaaccataccactcctgggtttac

SEQ ID NO: 5955427 - DNA, 25 bp, Homo sapien
aggtttggtaacatcgaaatctatg

SEQ ID NO: 5955428 - DNA, 25 bp, Homo sapien
ttcctgcattctcctttgaaaagca

SEQ ID NO: 5955429 - DNA, 25 bp, Homo sapien
ggcttggatggctgaagaggagaag

SEQ ID NO: 5955430 - DNA, 25 bp, Homo sapien
gaaaaaacatcctaaagaagttcca

SEQ ID NO: 5955431 - DNA, 25 bp, Homo sapien
atcattggtcagtccttttctgatc

SEQ ID NO: 5955432 - DNA, 25 bp, Homo sapien
cagtaagtatcgctggaacgttgct

SEQ ID NO: 5955433 - DNA, 25 bp, Homo sapien
atccaatctacagatggcgcaatcg

SEQ ID NO: 5955434 - DNA, 25 bp, Homo sapien
atggcttggatggctgaagaggaga

SEQ ID NO: 5955435 - DNA, 25 bp, Homo sapien
aaaccatccccactaccatcatgga

SEQ ID NO: 5955436 - DNA, 25 bp, Homo sapien
cacagtaagtatcgctggaacgttg

SEQ ID NO: 5955437 - DNA, 25 bp, Homo sapien
cactttgaacaataaagtcactgta

SEQ ID NO: 5955438 - DNA, 25 bp, Homo sapien
gcatcttgttttgcgtgccactgag

SEQ ID NO: 5955439 - DNA, 25 bp, Homo sapien
tcagtccttttctgatcgtcacggg

SEQ ID NO: 5955440 - DNA, 25 bp, Homo sapien
ccagactggctgggaaacattcaac

SEQ ID NO: 5955441 - DNA, 25 bp, Homo sapien
agacttcgaccctgatagaaactag

SEQ ID NO: 5955442 - DNA, 25 bp, Homo sapien
aattggacggtattggaggggtctc

SEQ ID NO: 5955443 - DNA, 25 bp, Homo sapien
acgaagaaagagattcaatcttaaa

SEQ ID NO: 5955444 - DNA, 25 bp, Homo sapien
atccgcacaacctgattgatctgtc

SEQ ID NO: 5955445 - DNA, 25 bp, Homo sapien
cgaaccttccagcgacgacttaaag

SEQ ID NO: 5955446 - DNA, 25 bp, Homo sapien
catcctaaagaagttccattagact

SEQ ID NO: 5955447 - DNA, 25 bp, Homo sapien
cggtaatccagaagacgaaatggaa

SEQ ID NO: 5955448 - DNA, 25 bp, Homo sapien
caacagctcgacggcaacccgcagg

SEQ ID NO: 5955449 - DNA, 25 bp, Homo sapien
agcgacgacttaaagcacatggctt

SEQ ID NO: 5955450 - DNA, 25 bp, Homo sapien
aaccttccagcgacgacttaaagca

SEQ ID NO: 5955451 - DNA, 25 bp, Homo sapien
gctggtaactttccaaggaatcttc

SEQ ID NO: 5955452 - DNA, 25 bp, Homo sapien
ttctttctcacaagactcgtgcttt

SEQ ID NO: 5955453 - DNA, 25 bp, Homo sapien
gggagattggatttgaagatgtcag

SEQ ID NO: 5955454 - DNA, 25 bp, Homo sapien
aaagggtgactttgtctcaccaaac

SEQ ID NO: 5955455 - DNA, 25 bp, Homo sapien
aagagattcaatcttaaaaaacatt

SEQ ID NO: 5955456 - DNA, 25 bp, Homo sapien
agaagttccattagacttcgaccct

SEQ ID NO: 5955457 - DNA, 25 bp, Homo sapien
tccagattttaaaaatactcccagc

SEQ ID NO: 5955458 - DNA, 25 bp, Homo sapien
tccaaaaggtttggtaacatcgaaa

SEQ ID NO: 5955459 - DNA, 25 bp, Homo sapien
atgtcgaaaccatccccactaccat

SEQ ID NO: 5955460 - DNA, 25 bp, Homo sapien
tcttcaagccctatgttccagattt

SEQ ID NO: 5955461 - DNA, 25 bp, Homo sapien
tagagttctacgacctacgaaatta

SEQ ID NO: 5955462 - DNA, 25 bp, Homo sapien
tgacaacgacaagaacaagaaaaaa

SEQ ID NO: 5955463 - DNA, 25 bp, Homo sapien
aacgtctggagacctttaccagact

SEQ ID NO: 5955464 - DNA, 25 bp, Homo sapien
tgtctcaccaaacaaccaacaacaa

SEQ ID NO: 5955465 - DNA, 25 bp, Homo sapien
tgatctgtcgtttttggtgagtgac

SEQ ID NO: 5955466 - DNA, 25 bp, Homo sapien
ggctcggagctggtggactcaaagg

SEQ ID NO: 5955467 - DNA, 25 bp, Homo sapien
agagggagatggctcggagctggtg

SEQ ID NO: 5955468 - DNA, 25 bp, Homo sapien
gacttaaagcacatggcttggatgg

SEQ ID NO: 5955469 - DNA, 25 bp, Homo sapien
gttccagattttaaaaatactccca

SEQ ID NO: 5955470 - DNA, 25 bp, Homo sapien
gagaccaatggaacgaagaaagaga

SEQ ID NO: 5955471 - DNA, 25 bp, Homo sapien
ctagaagaagagagaattcgcgaat

SEQ ID NO: 5955472 - DNA, 25 bp, Homo sapien
catgacatatccgcacaacctgatt

SEQ ID NO: 5955473 - DNA, 25 bp, Homo sapien
ttctcctttgaaaagcacgcagaga

SEQ ID NO: 5955474 - DNA, 25 bp, Homo sapien
gttctacgacctacgaaattaccaa

SEQ ID NO: 5955475 - DNA, 25 bp, Homo sapien
gaagagggagatggctcggagctgg

SEQ ID NO: 5955476 - DNA, 25 bp, Homo sapien
ggaatcttcaagccctatgttccag

SEQ ID NO: 5955477 - DNA, 25 bp, Homo sapien
ccagaagaaagctgatggccagggc

SEQ ID NO: 5955478 - DNA, 25 bp, Homo sapien
gctgggaaacattcaaccctacgat

SEQ ID NO: 5955479 - DNA, 25 bp, Homo sapien
ctcgatatcgctattccagctggta

SEQ ID NO: 5955480 - DNA, 25 bp, Homo sapien
tcaaccctacgatttaaattcatgg

SEQ ID NO: 5955481 - DNA, 25 bp, Homo sapien
gtccccaacgtctggagacctttac

SEQ ID NO: 5955482 - DNA, 25 bp, Homo sapien
aacggtaatccagaagacgaaatgg

SEQ ID NO: 5955483 - DNA, 25 bp, Homo sapien
gccactgagagatgcttctgagcat

SEQ ID NO: 5955484 - DNA, 25 bp, Homo sapien
tcaccaaacaaccaacaacaacaac

SEQ ID NO: 5955485 - DNA, 25 bp, Homo sapien
tgcattctcctttgaaaagcacgca

SEQ ID NO: 5955486 - DNA, 25 bp, Homo sapien
tctcaccaaacaaccaacaacaaca

SEQ ID NO: 5955487 - DNA, 25 bp, Homo sapien
aaggaatcttcaagccctatgttcc

SEQ ID NO: 5955488 - DNA, 25 bp, Homo sapien
agggagatggctcggagctggtgga

SEQ ID NO: 5955489 - DNA, 25 bp, Homo sapien
aatggaattggacggtattggaggg

SEQ ID NO: 5955490 - DNA, 25 bp, Homo sapien
actggtctgaagagggagatggctc

SEQ ID NO: 5955491 - DNA, 25 bp, Homo sapien
ctggcacatctacgaaccttccagc

SEQ ID NO: 5955492 - DNA, 25 bp, Homo sapien
cagcaacagcaacagcaacaacagc

SEQ ID NO: 5955493 - DNA, 25 bp, Homo sapien
ctttgaacaataaagtcactgtaga

SEQ ID NO: 5955494 - DNA, 25 bp, Homo sapien
gagacccaaacggtaatccagaaga

SEQ ID NO: 5955495 - DNA, 25 bp, Homo sapien
tggttggcaacagggtgaccgcatc

SEQ ID NO: 5955496 - DNA, 25 bp, Homo sapien
ggtcttcaattggcggattccctag

SEQ ID NO: 5955497 - DNA, 25 bp, Homo sapien
tcgttcaaccctaccacagtaagta

SEQ ID NO: 5955498 - DNA, 25 bp, Homo sapien
aagatggttggcaacagggtgaccg

SEQ ID NO: 5955499 - DNA, 25 bp, Homo sapien
ctacgaaattaccaaggcaacaaag

SEQ ID NO: 5955500 - DNA, 25 bp, Homo sapien
aacctgattgatctgtcgtttttgg

SEQ ID NO: 5955501 - DNA, 25 bp, Homo sapien
ggtgttctttctcacaagactcgtg

SEQ ID NO: 5955502 - DNA, 25 bp, Homo sapien
atactcccagcgtagagttctacga

SEQ ID NO: 5955503 - DNA, 25 bp, Homo sapien
ctttccaaggaatcttcaagcccta

SEQ ID NO: 5955504 - DNA, 25 bp, Homo sapien
cgacctacgaaattaccaaggcaac

SEQ ID NO: 5955505 - DNA, 25 bp, Homo sapien
taaagtattcagaacaggctcacac

SEQ ID NO: 5955506 - DNA, 25 bp, Homo sapien
gatctaatgcatcacgacaaggacg

SEQ ID NO: 5955507 - DNA, 25 bp, Homo sapien
tgactttgtctcaccaaacaaccaa

SEQ ID NO: 5955508 - DNA, 25 bp, Homo sapien
gatttaaattcatggaaggaatcag

SEQ ID NO: 5955509 - DNA, 25 bp, Homo sapien
aagaagagagaattcgcgaatttta

SEQ ID NO: 5955510 - DNA, 25 bp, Homo sapien
cagcaacagcaacaacagctcgacg

SEQ ID NO: 5955511 - DNA, 25 bp, Homo sapien
aacaaccaacaacaacaacaacagc

SEQ ID NO: 5955512 - DNA, 25 bp, Homo sapien
atctgaataccatgacatatccgca

SEQ ID NO: 5955513 - DNA, 25 bp, Homo sapien
caacccgcaggggaaacctcttgat

SEQ ID NO: 5955514 - DNA, 25 bp, Homo sapien
acccgcaggggaaacctcttgatga

SEQ ID NO: 5955515 - DNA, 25 bp, Homo sapien
ttggagacctcacctggcatacatg

SEQ ID NO: 5955516 - DNA, 25 bp, Homo sapien
tcggcttgccccattatgtcatctg

SEQ ID NO: 5955517 - DNA, 25 bp, Homo sapien
aaccatctgaataccatgacatatc

SEQ ID NO: 5955518 - DNA, 25 bp, Homo sapien
aacaagatctgggagattggatttg

SEQ ID NO: 5955519 - DNA, 25 bp, Homo sapien
tggtctgaagagggagatggctcgg

SEQ ID NO: 5955520 - DNA, 25 bp, Homo sapien
gatgctgtcattgtggaagggtacc

SEQ ID NO: 5955521 - DNA, 25 bp, Homo sapien
tgttttttaaccatctgaataccat

SEQ ID NO: 5955522 - DNA, 25 bp, Homo sapien
atctggcacatctacgaaccttcca

SEQ ID NO: 5955523 - DNA, 25 bp, Homo sapien
aagcacatggcttggatggctgaag

SEQ ID NO: 5955524 - DNA, 25 bp, Homo sapien
ccaatggaacgaagaaagagattca

SEQ ID NO: 5955525 - DNA, 25 bp, Homo sapien
ctgtagactggtctgaagagggaga

SEQ ID NO: 5955526 - DNA, 25 bp, Homo sapien
agaagcattcggtaggctctcccgc

SEQ ID NO: 5955527 - DNA, 25 bp, Homo sapien
atcttaaaaaacattgactccactt

SEQ ID NO: 5955528 - DNA, 25 bp, Homo sapien
aggggaaacctcttgatgacaacga

SEQ ID NO: 5955529 - DNA, 25 bp, Homo sapien
tctcgcgaaagctaaagtattcaga

SEQ ID NO: 5955530 - DNA, 25 bp, Homo sapien
ctcctgggtttactggagagacgtg

SEQ ID NO: 5955531 - DNA, 25 bp, Homo sapien
ggaggggtctcgattctcgcgaaag

SEQ ID NO: 5955532 - DNA, 25 bp, Homo sapien
gcaacagcaacaacagctcgacggc

SEQ ID NO: 5955533 - DNA, 25 bp, Homo sapien
gttactatccaatctacagatggcg

SEQ ID NO: 5955534 - DNA, 25 bp, Homo sapien
gtgctttcgttcttctcgatatcgc

SEQ ID NO: 5955535 - DNA, 25 bp, Homo sapien
gcgtgttactatccaatctacagat

SEQ ID NO: 5955536 - DNA, 25 bp, Homo sapien
acaataaagtcactgtagactggtc

SEQ ID NO: 5955537 - DNA, 25 bp, Homo sapien
ccagggctcgtaattggcttgggtc

SEQ ID NO: 5955538 - DNA, 25 bp, Homo sapien
tgctgtcattgtggaagggtaccca

SEQ ID NO: 5955539 - DNA, 25 bp, Homo sapien
gagagacccaaacggtaatccagaa

SEQ ID NO: 5955540 - DNA, 25 bp, Homo sapien
ggagacctcacctggcatacatgag

SEQ ID NO: 5955541 - DNA, 25 bp, Homo sapien
agactggtctgaagagggagatggc

SEQ ID NO: 5955542 - DNA, 25 bp, Homo sapien
aaccataccactcctgggtttactg

SEQ ID NO: 5955543 - DNA, 25 bp, Homo sapien
ggaaacattcaaccctacgatttaa

SEQ ID NO: 5955544 - DNA, 25 bp, Homo sapien
ggtttactggagagacgtggatgtc

SEQ ID NO: 5955545 - DNA, 25 bp, Homo sapien
ctggaacgttgcttacggtgttctt

SEQ ID NO: 5955546 - DNA, 25 bp, Homo sapien
cgattctcgcgaaagctaaagtatt

SEQ ID NO: 5955547 - DNA, 25 bp, Homo sapien
caattggcggattccctagacgaag

SEQ ID NO: 5955548 - DNA, 25 bp, Homo sapien
acatcgaaatctatgagaaggactt

SEQ ID NO: 5955549 - DNA, 25 bp, Homo sapien
gaaattaccaaggcaacaaagatgg

SEQ ID NO: 5955550 - DNA, 25 bp, Homo sapien
gaagagagaattcgcgaattttaca

SEQ ID NO: 5955551 - DNA, 25 bp, Homo sapien
ggattccctagacgaagatgctgtc

SEQ ID NO: 5955552 - DNA, 25 bp, Homo sapien
aagtatcgctggaacgttgcttacg

SEQ ID NO: 5955553 - DNA, 25 bp, Homo sapien
atctatgagaaggacttcggccaaa

SEQ ID NO: 5955554 - DNA, 25 bp, Homo sapien
ctaccacagtaagtatcgctggaac

SEQ ID NO: 5955555 - DNA, 25 bp, Homo sapien
aggggtctcgattctcgcgaaagct

SEQ ID NO: 5955556 - DNA, 25 bp, Homo sapien
ttaccaaggcaacaaagatggttgg

SEQ ID NO: 5955557 - DNA, 25 bp, Homo sapien
ctgaataccatgacatatccgcaca

SEQ ID NO: 5955558 - DNA, 25 bp, Homo sapien
ctgggagattggatttgaagatgtc

SEQ ID NO: 5955559 - DNA, 25 bp, Homo sapien
aatcttcaagccctatgttccagat

SEQ ID NO: 5955560 - DNA, 25 bp, Homo sapien
aaccctaccacagtaagtatcgctg

SEQ ID NO: 5955561 - DNA, 25 bp, Homo sapien
ttgtccccaacgtctggagaccttt

SEQ ID NO: 5955562 - DNA, 25 bp, Homo sapien
agaacaagaaaaaacatcctaaaga

SEQ ID NO: 5955563 - DNA, 25 bp, Homo sapien
caacaacaacagcaacaacaacaac

SEQ ID NO: 5955564 - DNA, 25 bp, Homo sapien
gtggaagggtacccagagtacgcca

SEQ ID NO: 5955565 - DNA, 25 bp, Homo sapien
caagatctgggagattggatttgaa

SEQ ID NO: 5955566 - DNA, 25 bp, Homo sapien
ccctatgttccagattttaaaaata

SEQ ID NO: 5955567 - DNA, 25 bp, Homo sapien
tttggtgagtgactcttcggataac

SEQ ID NO: 5955568 - DNA, 25 bp, Homo sapien
tgattgatctgtcgtttttggtgag

SEQ ID NO: 5955569 - DNA, 25 bp, Homo sapien
ctgagagatgcttctgagcatcttc

SEQ ID NO: 5955570 - DNA, 25 bp, Homo sapien
cactgtagactggtctgaagaggga

SEQ ID NO: 5955571 - DNA, 25 bp, Homo sapien
actttgtctcaccaaacaaccaaca

SEQ ID NO: 5955572 - DNA, 25 bp, Homo sapien
cctttgaaaagcacgcagagacaga

SEQ ID NO: 5955573 - DNA, 25 bp, Homo sapien
agcatcttcccatgttttttaacca

SEQ ID NO: 5955574 - DNA, 25 bp, Homo sapien
aacaacaacaacagcaacaacaaca

SEQ ID NO: 5955575 - DNA, 25 bp, Homo sapien
agcagcagcagcaacagcaacagca

SEQ ID NO: 5955576 - DNA, 25 bp, Homo sapien
cttttctgatcgtcacgggtttggc

SEQ ID NO: 5955577 - DNA, 25 bp, Homo sapien
gtcatcggcttgccccattatgtca

SEQ ID NO: 5955578 - DNA, 25 bp, Homo sapien
gcttacggtgttctttctcacaaga

SEQ ID NO: 5955579 - DNA, 25 bp, Homo sapien
aacatcctaaagaagttccattaga

SEQ ID NO: 5955580 - DNA, 25 bp, Homo sapien
aaccctacgatttaaattcatggaa

SEQ ID NO: 5955581 - DNA, 25 bp, Homo sapien
tgacatatccgcacaacctgattga

SEQ ID NO: 5955582 - DNA, 25 bp, Homo sapien
tggcatacatgagagacccaaacgg

SEQ ID NO: 5955583 - DNA, 25 bp, Homo sapien
gaaagctaaagtattcagaacaggc

SEQ ID NO: 5955584 - DNA, 25 bp, Homo sapien
ctgtcattgtggaagggtacccaga

SEQ ID NO: 5955585 - DNA, 25 bp, Homo sapien
cctttaccagactggctgggaaaca

SEQ ID NO: 5955586 - DNA, 25 bp, Homo sapien
aactttccaaggaatcttcaagccc

SEQ ID NO: 5955587 - DNA, 25 bp, Homo sapien
agagaattcgcgaattttacaacaa

SEQ ID NO: 5955588 - DNA, 25 bp, Homo sapien
tttaaattcatggaaggaatcagaa

SEQ ID NO: 5955589 - DNA, 25 bp, Homo sapien
gaagaaagagattcaatcttaaaaa

SEQ ID NO: 5955590 - DNA, 25 bp, Homo sapien
cacgacaaggacgtcattgtcccca

SEQ ID NO: 5955591 - DNA, 25 bp, Homo sapien
gaccaatggaacgaagaaagagatt

SEQ ID NO: 5955592 - DNA, 25 bp, Homo sapien
ggctcgtaattggcttgggtccgtg

SEQ ID NO: 5955593 - DNA, 25 bp, Homo sapien
ccacttggagacctcacctggcata

SEQ ID NO: 5955594 - DNA, 25 bp, Homo sapien
gaagtataataacagaaaactctcg

SEQ ID NO: 5955595 - DNA, 25 bp, Homo sapien
acgacttaaagcacatggcttggat

SEQ ID NO: 5955596 - DNA, 25 bp, Homo sapien
catcttcccatgttttttaaccatc

SEQ ID NO: 5955597 - DNA, 25 bp, Homo sapien
gacgaagatgctgtcattgtggaag

SEQ ID NO: 5955598 - DNA, 25 bp, Homo sapien
cacactttcctgcattctcctttga

SEQ ID NO: 5955599 - DNA, 25 bp, Homo sapien
aaaacatcctaaagaagttccatta

SEQ ID NO: 5955600 - DNA, 25 bp, Homo sapien
tgttttttcttgttcttgtcgttgt

SEQ ID NO: 5955601 - DNA, 25 bp, Homo sapien
ttcttgttcttgtcgttgtcatcaa

SEQ ID NO: 5955602 - DNA, 25 bp, Homo sapien
tagtggggatggtttcgacatccac

SEQ ID NO: 5955603 - DNA, 25 bp, Homo sapien
attgttcaaagtggagtcaatgttt

SEQ ID NO: 5955604 - DNA, 25 bp, Homo sapien
atgctcagaagcatctctcagtggc

SEQ ID NO: 5955605 - DNA, 25 bp, Homo sapien
gctgttgttgttgttgttggttgtt

SEQ ID NO: 5955606 - DNA, 25 bp, Homo sapien
cagtaaacccaggagtggtatggtt

SEQ ID NO: 5955607 - DNA, 25 bp, Homo sapien
tttttaaaatctggaacatagggct

SEQ ID NO: 5955608 - DNA, 25 bp, Homo sapien
gattccttccatgaatttaaatcgt

SEQ ID NO: 5955609 - DNA, 25 bp, Homo sapien
ggagtatttttaaaatctggaacat

SEQ ID NO: 5955610 - DNA, 25 bp, Homo sapien
tcgagctgttgttgctgttgctgtt

SEQ ID NO: 5955611 - DNA, 25 bp, Homo sapien
ggtcgaagtctaatggaacttcttt

SEQ ID NO: 5955612 - DNA, 25 bp, Homo sapien
aatccgccaattgaagacccccttc

SEQ ID NO: 5955613 - DNA, 25 bp, Homo sapien
aaaggagaatgcaggaaagtgtgag

SEQ ID NO: 5955614 - DNA, 25 bp, Homo sapien
tgttgttgttgctgttgttgttgtt

SEQ ID NO: 5955615 - DNA, 25 bp, Homo sapien
ccttggtaatttcgtaggtcgtaga

SEQ ID NO: 5955616 - DNA, 25 bp, Homo sapien
ccatctgtagattggatagtaacac

SEQ ID NO: 5955617 - DNA, 25 bp, Homo sapien
ggttgccgtcgagctgttgttgctg

SEQ ID NO: 5955618 - DNA, 25 bp, Homo sapien
caatctcccagatcttgttgtaaaa

SEQ ID NO: 5955619 - DNA, 25 bp, Homo sapien
gtgtgagcctgttctgaatacttta

SEQ ID NO: 5955620 - DNA, 25 bp, Homo sapien
gtggtagggttgaacgagagttttc

SEQ ID NO: 5955621 - DNA, 25 bp, Homo sapien
catagggcttgaagattccttggaa

SEQ ID NO: 5955622 - DNA, 25 bp, Homo sapien
ttgttgcgattgcgccatctgtaga

SEQ ID NO: 5955623 - DNA, 25 bp, Homo sapien
cttcagccatccaagccatgtgctt

SEQ ID NO: 5955624 - DNA, 25 bp, Homo sapien
gttgctgctgctgctgttgttgttg

SEQ ID NO: 5955625 - DNA, 25 bp, Homo sapien
gttgtgcggatatgtcatggtattc

SEQ ID NO: 5955626 - DNA, 25 bp, Homo sapien
gacagcatcttcgtctagggaatcc

SEQ ID NO: 5955627 - DNA, 25 bp, Homo sapien
ttcgttccattggtctctgacatct

SEQ ID NO: 5955628 - DNA, 25 bp, Homo sapien
gttccagcgatacttactgtggtag

SEQ ID NO: 5955629 - DNA, 25 bp, Homo sapien
aacgaaagcacgagtcttgtgagaa

SEQ ID NO: 5955630 - DNA, 25 bp, Homo sapien
cccgtgacgatcagaaaaggactga

SEQ ID NO: 5955631 - DNA, 25 bp, Homo sapien
gtgagcctgttctgaatactttagc

SEQ ID NO: 5955632 - DNA, 25 bp, Homo sapien
ctgacatcttcaaatccaatctccc

SEQ ID NO: 5955633 - DNA, 25 bp, Homo sapien
ggaatccgccaattgaagaccccct

SEQ ID NO: 5955634 - DNA, 25 bp, Homo sapien
cccagatcttgttgtaaaattcgcg

SEQ ID NO: 5955635 - DNA, 25 bp, Homo sapien
cgaagagtcactcaccaaaaacgac

SEQ ID NO: 5955636 - DNA, 25 bp, Homo sapien
gagcctgttctgaatactttagctt

SEQ ID NO: 5955637 - DNA, 25 bp, Homo sapien
ttgttgttgttgttggttgtttggt

SEQ ID NO: 5955638 - DNA, 25 bp, Homo sapien
tgcggtcaccctgttgccaaccatc

SEQ ID NO: 5955639 - DNA, 25 bp, Homo sapien
atggtagtggggatggtttcgacat

SEQ ID NO: 5955640 - DNA, 25 bp, Homo sapien
tcttcagaccagtctacagtgactt

SEQ ID NO: 5955641 - DNA, 25 bp, Homo sapien
tgttgttgttgttgttggttgtttg

SEQ ID NO: 5955642 - DNA, 25 bp, Homo sapien
tacttactgtggtagggttgaacga

SEQ ID NO: 5955643 - DNA, 25 bp, Homo sapien
tgcttctgtctctgcgtgcttttca

SEQ ID NO: 5955644 - DNA, 25 bp, Homo sapien
tctgaatactttagctttcgcgaga

SEQ ID NO: 5955645 - DNA, 25 bp, Homo sapien
caacgttccagcgatacttactgtg

SEQ ID NO: 5955646 - DNA, 25 bp, Homo sapien
ggattaccgtttgggtctctcatgt

SEQ ID NO: 5955647 - DNA, 25 bp, Homo sapien
tgtctctgcgtgcttttcaaaggag

SEQ ID NO: 5955648 - DNA, 25 bp, Homo sapien
tctgtctctgcgtgcttttcaaagg

SEQ ID NO: 5955649 - DNA, 25 bp, Homo sapien
aagtccttctcatagatttcgatgt

SEQ ID NO: 5955650 - DNA, 25 bp, Homo sapien
tccgcttctcctcttcagccatcca

SEQ ID NO: 5955651 - DNA, 25 bp, Homo sapien
tttgagtccaccagctccgagccat

SEQ ID NO: 5955652 - DNA, 25 bp, Homo sapien
ttggttgtttggtgagacaaagtca

SEQ ID NO: 5955653 - DNA, 25 bp, Homo sapien
tctatcagggtcgaagtctaatgga

SEQ ID NO: 5955654 - DNA, 25 bp, Homo sapien
tgtatgccaggtgaggtctccaagt

SEQ ID NO: 5955655 - DNA, 25 bp, Homo sapien
gggaagatgctcagaagcatctctc

SEQ ID NO: 5955656 - DNA, 25 bp, Homo sapien
gggcgccaaacccgtgacgatcaga

SEQ ID NO: 5955657 - DNA, 25 bp, Homo sapien
gctgctgctgttgttgttgttgttg

SEQ ID NO: 5955658 - DNA, 25 bp, Homo sapien
tcagctttcttctggggccctgggc

SEQ ID NO: 5955659 - DNA, 25 bp, Homo sapien
tttaaaatctggaacatagggcttg

SEQ ID NO: 5955660 - DNA, 25 bp, Homo sapien
atgcaggaaagtgtgagcctgttct

SEQ ID NO: 5955661 - DNA, 25 bp, Homo sapien
ttgaagattccttggaaagttacca

SEQ ID NO: 5955662 - DNA, 25 bp, Homo sapien
caagccaattacgagccctggccat

SEQ ID NO: 5955663 - DNA, 25 bp, Homo sapien
ttagatcctccatgatggtagtggg

SEQ ID NO: 5955664 - DNA, 25 bp, Homo sapien
tccttggaaagttaccagctggaat

SEQ ID NO: 5955665 - DNA, 25 bp, Homo sapien
tctttaggatgttttttcttgttct

SEQ ID NO: 5955666 - DNA, 25 bp, Homo sapien
ctgcgggagagcctaccgaatgctt

SEQ ID NO: 5955667 - DNA, 25 bp, Homo sapien
ctttagctttcgcgagaatcgagac

SEQ ID NO: 5955668 - DNA, 25 bp, Homo sapien
tcctgcgggagagcctaccgaatgc

SEQ ID NO: 5955669 - DNA, 25 bp, Homo sapien
cgatgacattgtaattcatcctgcg

SEQ ID NO: 5955670 - DNA, 25 bp, Homo sapien
tgttggttgtttggtgagacaaagt

SEQ ID NO: 5955671 - DNA, 25 bp, Homo sapien
agtttccgcttctcctcttcagcca

SEQ ID NO: 5955672 - DNA, 25 bp, Homo sapien
taccagctggaatagcgatatcgag

SEQ ID NO: 5955673 - DNA, 25 bp, Homo sapien
cttgtcttgttgcgattgcgccatc

SEQ ID NO: 5955674 - DNA, 25 bp, Homo sapien
tcttctggattaccgtttgggtctc

SEQ ID NO: 5955675 - DNA, 25 bp, Homo sapien
aatgtttcccagccagtctggtaaa

SEQ ID NO: 5955676 - DNA, 25 bp, Homo sapien
aatccaatctcccagatcttgttgt

SEQ ID NO: 5955677 - DNA, 25 bp, Homo sapien
aaaggtctccagacgttggggacaa

SEQ ID NO: 5955678 - DNA, 25 bp, Homo sapien
acgagccctggccatcagctttctt

SEQ ID NO: 5955679 - DNA, 25 bp, Homo sapien
ccatccaagccatgtgctttaagtc

SEQ ID NO: 5955680 - DNA, 25 bp, Homo sapien
cgaatgcttctgtctctgcgtgctt

SEQ ID NO: 5955681 - DNA, 25 bp, Homo sapien
gggacaatgacgtccttgtcgtgat

SEQ ID NO: 5955682 - DNA, 25 bp, Homo sapien
gtctctcatgtatgccaggtgaggt

SEQ ID NO: 5955683 - DNA, 25 bp, Homo sapien
aattccatttcgtcttctggattac

SEQ ID NO: 5955684 - DNA, 25 bp, Homo sapien
ctccagacgttggggacaatgacgt

SEQ ID NO: 5955685 - DNA, 25 bp, Homo sapien
ttggtgagacaaagtcaccctttga

SEQ ID NO: 5955686 - DNA, 25 bp, Homo sapien
aatcaggttgtgcggatatgtcatg

SEQ ID NO: 5955687 - DNA, 25 bp, Homo sapien
ttcttctggggccctgggcgccaaa

SEQ ID NO: 5955688 - DNA, 25 bp, Homo sapien
catcagctttcttctggggccctgg

SEQ ID NO: 5955689 - DNA, 25 bp, Homo sapien
agtggcgtactctgggtacccttcc

SEQ ID NO: 5955690 - DNA, 25 bp, Homo sapien
agcaacgttccagcgatacttactg

SEQ ID NO: 5955691 - DNA, 25 bp, Homo sapien
caatgatttggccgaagtccttctc

SEQ ID NO: 5955692 - DNA, 25 bp, Homo sapien
agggaatccgccaattgaagacccc

SEQ ID NO: 5955693 - DNA, 25 bp, Homo sapien
aataccgtccaattccatttcgtct

SEQ ID NO: 5955694 - DNA, 25 bp, Homo sapien
tccgaagagtcactcaccaaaaacg

SEQ ID NO: 5955695 - DNA, 25 bp, Homo sapien
aatgttttttaagattgaatctctt

SEQ ID NO: 5955696 - DNA, 25 bp, Homo sapien
ttccatttcgtcttctggattaccg

SEQ ID NO: 5955697 - DNA, 25 bp, Homo sapien
gtaaacccaggagtggtatggtttc

SEQ ID NO: 5955698 - DNA, 25 bp, Homo sapien
gttaccagctggaatagcgatatcg

SEQ ID NO: 5955699 - DNA, 25 bp, Homo sapien
atgatttggccgaagtccttctcat

SEQ ID NO: 5955700 - DNA, 25 bp, Homo sapien
ctcatagatttcgatgttaccaaac

SEQ ID NO: 5955701 - DNA, 25 bp, Homo sapien
ttccattggtctctgacatcttcaa

SEQ ID NO: 5955702 - DNA, 25 bp, Homo sapien
tgagtccaccagctccgagccatct

SEQ ID NO: 5955703 - DNA, 25 bp, Homo sapien
gcgatatcgagaagaacgaaagcac

SEQ ID NO: 5955704 - DNA, 25 bp, Homo sapien
catccacgtctctccagtaaaccca

SEQ ID NO: 5955705 - DNA, 25 bp, Homo sapien
ttctcatagatttcgatgttaccaa

SEQ ID NO: 5955706 - DNA, 25 bp, Homo sapien
tgttgctgttgttgttgttgttggt

SEQ ID NO: 5955707 - DNA, 25 bp, Homo sapien
tttcgatgttaccaaaccttttgga

SEQ ID NO: 5955708 - DNA, 25 bp, Homo sapien
tctaatggaacttctttaggatgtt

SEQ ID NO: 5955709 - DNA, 25 bp, Homo sapien
cacggacccaagccaattacgagcc

SEQ ID NO: 5955710 - DNA, 25 bp, Homo sapien
ctaccgaatgcttctgtctctgcgt

SEQ ID NO: 5955711 - DNA, 25 bp, Homo sapien
cttttcaaaggagaatgcaggaaag

SEQ ID NO: 5955712 - DNA, 25 bp, Homo sapien
gatttcgatgttaccaaaccttttg

SEQ ID NO: 5955713 - DNA, 25 bp, Homo sapien
ggggccctgggcgccaaacccgtga

SEQ ID NO: 5955714 - DNA, 25 bp, Homo sapien
tcgagacccctccaataccgtccaa

SEQ ID NO: 5955715 - DNA, 25 bp, Homo sapien
ctagtttccgcttctcctcttcagc

SEQ ID NO: 5955716 - DNA, 25 bp, Homo sapien
tgcgggttgccgtcgagctgttgtt

SEQ ID NO: 5955717 - DNA, 25 bp, Homo sapien
cacaatgacagcatcttcgtctagg

SEQ ID NO: 5955718 - DNA, 25 bp, Homo sapien
ctgattccttccatgaatttaaatc

SEQ ID NO: 5955719 - DNA, 25 bp, Homo sapien
tcccagccagtctggtaaaggtctc

SEQ ID NO: 5955720 - DNA, 25 bp, Homo sapien
cgtcgagctgttgttgctgttgctg

SEQ ID NO: 5955721 - DNA, 25 bp, Homo sapien
tctgggtacccttccacaatgacag

SEQ ID NO: 5955722 - DNA, 25 bp, Homo sapien
gtaaaggtctccagacgttggggac

SEQ ID NO: 5955723 - DNA, 25 bp, Homo sapien
cgcaaaacaagatgcggtcaccctg

SEQ ID NO: 5955724 - DNA, 25 bp, Homo sapien
aagcatctctcagtggcacgcaaaa

SEQ ID NO: 5955725 - DNA, 25 bp, Homo sapien
aatctctttcttcgttccattggtc

SEQ ID NO: 5955726 - DNA, 25 bp, Homo sapien
gttcgtagatgtgccagatgacata

SEQ ID NO: 5955727 - DNA, 25 bp, Homo sapien
aagttaccagctggaatagcgatat

SEQ ID NO: 5955728 - DNA, 25 bp, Homo sapien
gatatgtcatggtattcagatggtt

SEQ ID NO: 5955729 - DNA, 25 bp, Homo sapien
cgttccattggtctctgacatcttc

SEQ ID NO: 5955730 - DNA, 25 bp, Homo sapien
aggtctccagacgttggggacaatg

SEQ ID NO: 5955731 - DNA, 25 bp, Homo sapien
cagtgactttattgttcaaagtgga

SEQ ID NO: 5955732 - DNA, 25 bp, Homo sapien
tttcaaaggagaatgcaggaaagtg

SEQ ID NO: 5955733 - DNA, 25 bp, Homo sapien
gagaagaacgaaagcacgagtcttg

SEQ ID NO: 5955734 - DNA, 25 bp, Homo sapien
aggaaagtgtgagcctgttctgaat

SEQ ID NO: 5955735 - DNA, 25 bp, Homo sapien
gctgttgttgctgttgctgttgctg

SEQ ID NO: 5955736 - DNA, 25 bp, Homo sapien
agtcttgtgagaaagaacaccgtaa

SEQ ID NO: 5955737 - DNA, 25 bp, Homo sapien
gccgtcgagctgttgttgctgttgc

SEQ ID NO: 5955738 - DNA, 25 bp, Homo sapien
gttgaacgagagttttctgttatta

SEQ ID NO: 5955739 - DNA, 25 bp, Homo sapien
aatgcttctgtctctgcgtgctttt

SEQ ID NO: 5955740 - DNA, 25 bp, Homo sapien
cagtggcacgcaaaacaagatgcgg

SEQ ID NO: 5955741 - DNA, 25 bp, Homo sapien
tggccgaagtccttctcatagattt

SEQ ID NO: 5955742 - DNA, 25 bp, Homo sapien
tgagacaaagtcaccctttgagtcc

SEQ ID NO: 5955743 - DNA, 25 bp, Homo sapien
ggaatagcgatatcgagaagaacga

SEQ ID NO: 5955744 - DNA, 25 bp, Homo sapien
ttgttgttgctgttgttgttgttgt

SEQ ID NO: 5955745 - DNA, 25 bp, Homo sapien
gtggggatggtttcgacatccacgt

SEQ ID NO: 5955746 - DNA, 25 bp, Homo sapien
taccgtccaattccatttcgtcttc

SEQ ID NO: 5955747 - DNA, 25 bp, Homo sapien
ttcagaccagtctacagtgacttta

SEQ ID NO: 5955748 - DNA, 25 bp, Homo sapien
gaggtctccaagtggcgtactctgg

SEQ ID NO: 5955749 - DNA, 25 bp, Homo sapien
ccatttcgtcttctggattaccgtt

SEQ ID NO: 5955750 - DNA, 25 bp, Homo sapien
tcttgttgtaaaattcgcgaattct

SEQ ID NO: 5955751 - DNA, 25 bp, Homo sapien
ttgccgtcgagctgttgttgctgtt

SEQ ID NO: 5955752 - DNA, 25 bp, Homo sapien
tacagtgactttattgttcaaagtg

SEQ ID NO: 5955753 - DNA, 25 bp, Homo sapien
atttcgtcttctggattaccgtttg

SEQ ID NO: 5955754 - DNA, 25 bp, Homo sapien
attgaagacccccttctgattcctt

SEQ ID NO: 5955755 - DNA, 25 bp, Homo sapien
aagtggagtcaatgttttttaagat

SEQ ID NO: 5955756 - DNA, 25 bp, Homo sapien
atctttgttgccttggtaatttcgt

SEQ ID NO: 5955757 - DNA, 25 bp, Homo sapien
gtttcccctgcgggttgccgtcgag

SEQ ID NO: 5955758 - DNA, 25 bp, Homo sapien
tggtttcagggccacggacccaagc

SEQ ID NO: 5955759 - DNA, 25 bp, Homo sapien
cgaagtccttctcatagatttcgat

SEQ ID NO: 5955760 - DNA, 25 bp, Homo sapien
tgcattagatcctccatgatggtag

SEQ ID NO: 5955761 - DNA, 25 bp, Homo sapien
gggcttgaagattccttggaaagtt

SEQ ID NO: 5955762 - DNA, 25 bp, Homo sapien
ctggaacatagggcttgaagattcc

SEQ ID NO: 5955763 - DNA, 25 bp, Homo sapien
ccaataccgtccaattccatttcgt

SEQ ID NO: 5955764 - DNA, 25 bp, Homo sapien
tatccgaagagtcactcaccaaaaa

SEQ ID NO: 5955765 - DNA, 25 bp, Homo sapien
acgttccagcgatacttactgtggt

SEQ ID NO: 5955766 - DNA, 25 bp, Homo sapien
aatactttagctttcgcgagaatcg

SEQ ID NO: 5955767 - DNA, 25 bp, Homo sapien
attaccgtttgggtctctcatgtat

SEQ ID NO: 5955768 - DNA, 25 bp, Homo sapien
tccctcttcagaccagtctacagtg

SEQ ID NO: 5955769 - DNA, 25 bp, Homo sapien
ccaaccatctttgttgccttggtaa

SEQ ID NO: 5955770 - DNA, 25 bp, Homo sapien
gccatcagctttcttctggggccct

SEQ ID NO: 5955771 - DNA, 25 bp, Homo sapien
tgctgttgctgttgctgctgctgct

SEQ ID NO: 5955772 - DNA, 25 bp, Homo sapien
gaatttaaatcgtagggttgaatgt

SEQ ID NO: 5955773 - DNA, 25 bp, Homo sapien
gcgatacttactgtggtagggttga

SEQ ID NO: 5955774 - DNA, 25 bp, Homo sapien
attcgcgaattctctcttcttctag

SEQ ID NO: 5955775 - DNA, 25 bp, Homo sapien
tttcgacatccacgtctctccagta

SEQ ID NO: 5955776 - DNA, 25 bp, Homo sapien
ttgttgctgttgctgttgctgctgc

SEQ ID NO: 5955777 - DNA, 25 bp, Homo sapien
aagagtcactcaccaaaaacgacag

SEQ ID NO: 5955778 - DNA, 25 bp, Homo sapien
tttcttcgttccattggtctctgac

SEQ ID NO: 5955779 - DNA, 25 bp, Homo sapien
ttcttgtcgttgtcatcaagaggtt

SEQ ID NO: 5955780 - DNA, 25 bp, Homo sapien
cccatggtgttatccgaagagtcac

SEQ ID NO: 5955781 - DNA, 25 bp, Homo sapien
gtgagaaagaacaccgtaagcaacg

SEQ ID NO: 5955782 - DNA, 25 bp, Homo sapien
tgaacgagagttttctgttattata

SEQ ID NO: 5955783 - DNA, 25 bp, Homo sapien
caccagctccgagccatctccctct

SEQ ID NO: 5955784 - DNA, 25 bp, Homo sapien
aagccatgtgctttaagtcgtcgct

SEQ ID NO: 5955785 - DNA, 25 bp, Homo sapien
gccatgtgctttaagtcgtcgctgg

SEQ ID NO: 5955786 - DNA, 25 bp, Homo sapien
tgcgtgcttttcaaaggagaatgca

SEQ ID NO: 5955787 - DNA, 25 bp, Homo sapien
tgggagtatttttaaaatctggaac

SEQ ID NO: 5955788 - DNA, 25 bp, Homo sapien
tcgtagaactctacgctgggagtat

SEQ ID NO: 5955789 - DNA, 25 bp, Homo sapien
acccaggagtggtatggtttcaggg

SEQ ID NO: 5955790 - DNA, 25 bp, Homo sapien
gatatcgagaagaacgaaagcacga

SEQ ID NO: 5955791 - DNA, 25 bp, Homo sapien
tgtcgttgtcatcaagaggtttccc

SEQ ID NO: 5955792 - DNA, 25 bp, Homo sapien
ctttcttctggggccctgggcgcca

SEQ ID NO: 5955793 - DNA, 25 bp, Homo sapien
caatgacgtccttgtcgtgatgcat

SEQ ID NO: 5955794 - DNA, 25 bp, Homo sapien
gggttgaatgtttcccagccagtct

SEQ ID NO: 5955795 - DNA, 25 bp, Homo sapien
ttttcttgttcttgtcgttgtcatc

SEQ ID NO: 5955796 - DNA, 25 bp, Homo sapien
agatgctcagaagcatctctcagtg

SEQ ID NO: 5955797 - DNA, 25 bp, Homo sapien
gccgatgacattgtaattcatcctg

SEQ ID NO: 5955798 - DNA, 25 bp, Homo sapien
ggccctgggcgccaaacccgtgacg

SEQ ID NO: 5955799 - DNA, 25 bp, Homo sapien
gttgttgttgttggttgtttggtga

SEQ ID NO: 5955800 - DNA, 25 bp, Homo sapien
tatttttaaaatctggaacataggg

SEQ ID NO: 5955801 - DNA, 25 bp, Homo sapien
gtgccagatgacataatggggcaag

SEQ ID NO: 5955802 - DNA, 25 bp, Homo sapien
aaagtcaccctttgagtccaccagc

SEQ ID NO: 5955803 - DNA, 25 bp, Homo sapien
acaccgtaagcaacgttccagcgat

SEQ ID NO: 5955804 - DNA, 25 bp, Homo sapien
ttcgcgagaatcgagacccctccaa

SEQ ID NO: 5955805 - DNA, 25 bp, Homo sapien
cgtctctccagtaaacccaggagtg

SEQ ID NO: 5955806 - DNA, 25 bp, Homo sapien
gtagaactctacgctgggagtattt

SEQ ID NO: 5955807 - DNA, 25 bp, Homo sapien
ccctccaataccgtccaattccatt

SEQ ID NO: 5955808 - DNA, 25 bp, Homo sapien
taggtcgtagaactctacgctggga

SEQ ID NO: 5955809 - DNA, 25 bp, Homo sapien
accgaatgcttctgtctctgcgtgc

SEQ ID NO: 5955810 - DNA, 25 bp, Homo sapien
tgttcttgtcgttgtcatcaagagg

SEQ ID NO: 5955811 - DNA, 25 bp, Homo sapien
aacccgtgacgatcagaaaaggact

SEQ ID NO: 5955812 - DNA, 25 bp, Homo sapien
gtctctgacatcttcaaatccaatc

SEQ ID NO: 5955813 - DNA, 25 bp, Homo sapien
attgcgccatctgtagattggatag

SEQ ID NO: 5955814 - DNA, 25 bp, Homo sapien
ataatggggcaagccgatgacattg

SEQ ID NO: 5955815 - DNA, 25 bp, Homo sapien
agattccttggaaagttaccagctg

SEQ ID NO: 5955816 - DNA, 25 bp, Homo sapien
cttccacaatgacagcatcttcgtc

SEQ ID NO: 5955817 - DNA, 25 bp, Homo sapien
gatagtaacacgcccatggtgttat

SEQ ID NO: 5955818 - DNA, 25 bp, Homo sapien
ctgctgttgttgttgttgttgctgt

SEQ ID NO: 5955819 - DNA, 25 bp, Homo sapien
tagggcttgaagattccttggaaag

SEQ ID NO: 5955820 - DNA, 25 bp, Homo sapien
catctccctcttcagaccagtctac

SEQ ID NO: 5955821 - DNA, 25 bp, Homo sapien
gggcaagccgatgacattgtaattc

SEQ ID NO: 5955822 - DNA, 25 bp, Homo sapien
gaaagtgtgagcctgttctgaatac

SEQ ID NO: 5955823 - DNA, 25 bp, Homo sapien
aaagcacgagtcttgtgagaaagaa

SEQ ID NO: 5955824 - DNA, 25 bp, Homo sapien
gttgttgttgttgctgttgttgttg

SEQ ID NO: 5955825 - DNA, 25 bp, Homo sapien
agtcaatgttttttaagattgaatc

SEQ ID NO: 5955826 - DNA, 25 bp, Homo sapien
tcttcgttccattggtctctgacat

SEQ ID NO: 5955827 - DNA, 25 bp, Homo sapien
gagtggtatggtttcagggccacgg

SEQ ID NO: 5955828 - DNA, 25 bp, Homo sapien
ttcagggccacggacccaagccaat

SEQ ID NO: 5955829 - DNA, 25 bp, Homo sapien
tgtcatggtattcagatggttaaaa

SEQ ID NO: 5955830 - DNA, 25 bp, Homo sapien
tctggggccctgggcgccaaacccg

SEQ ID NO: 5955831 - DNA, 25 bp, Homo sapien
tagatttcgatgttaccaaaccttt

SEQ ID NO: 5955832 - DNA, 25 bp, Homo sapien
tctccaagtggcgtactctgggtac

SEQ ID NO: 5955833 - DNA, 25 bp, Homo sapien
cgggttgccgtcgagctgttgttgc

SEQ ID NO: 5955834 - DNA, 25 bp, Homo sapien
tcgcgaattctctcttcttctagtt

SEQ ID NO: 5955835 - DNA, 25 bp, Homo sapien
ttgttgttggttgtttggtgagaca

SEQ ID NO: 5955836 - DNA, 25 bp, Homo sapien
cagatcaatcaggttgtgcggatat

SEQ ID NO: 5955837 - DNA, 25 bp, Homo sapien
gtctagggaatccgccaattgaaga

SEQ ID NO: 5955838 - DNA, 25 bp, Homo sapien
agatcctccatgatggtagtgggga

SEQ ID NO: 5955839 - DNA, 25 bp, Homo sapien
ctctacgctgggagtatttttaaaa

SEQ ID NO: 5955840 - DNA, 25 bp, Homo sapien
ctacgctgggagtatttttaaaatc

SEQ ID NO: 5955841 - DNA, 25 bp, Homo sapien
gccacggacccaagccaattacgag

SEQ ID NO: 5955842 - DNA, 25 bp, Homo sapien
tccacaatgacagcatcttcgtcta

SEQ ID NO: 5955843 - DNA, 25 bp, Homo sapien
ctcaccaaaaacgacagatcaatca

SEQ ID NO: 5955844 - DNA, 25 bp, Homo sapien
aaacatgggaagatgctcagaagca

SEQ ID NO: 5955845 - DNA, 25 bp, Homo sapien
ccagacgttggggacaatgacgtcc

SEQ ID NO: 5955846 - DNA, 25 bp, Homo sapien
caaacccgtgacgatcagaaaagga

SEQ ID NO: 5955847 - DNA, 25 bp, Homo sapien
aagtcgtcgctggaaggttcgtaga

SEQ ID NO: 5955848 - DNA, 25 bp, Homo sapien
acataatggggcaagccgatgacat

SEQ ID NO: 5955849 - DNA, 25 bp, Homo sapien
aacacgcccatggtgttatccgaag

SEQ ID NO: 5955850 - DNA, 25 bp, Homo sapien
gggccacggacccaagccaattacg

SEQ ID NO: 5955851 - DNA, 25 bp, Homo sapien
ccagtctacagtgactttattgttc

SEQ ID NO: 5955852 - DNA, 25 bp, Homo sapien
ttgctgttgttgttgttgttggttg

SEQ ID NO: 5955853 - DNA, 25 bp, Homo sapien
agtctaatggaacttctttaggatg

SEQ ID NO: 5955854 - DNA, 25 bp, Homo sapien
ggtagtggggatggtttcgacatcc

SEQ ID NO: 5955855 - DNA, 25 bp, Homo sapien
ggtaatttcgtaggtcgtagaactc

SEQ ID NO: 5955856 - DNA, 25 bp, Homo sapien
ccagctccgagccatctccctcttc

SEQ ID NO: 5955857 - DNA, 25 bp, Homo sapien
tggaaggttcgtagatgtgccagat

SEQ ID NO: 5955858 - DNA, 25 bp, Homo sapien
tggggcaagccgatgacattgtaat

SEQ ID NO: 5955859 - DNA, 25 bp, Homo sapien
gcttgaagattccttggaaagttac

SEQ ID NO: 5955860 - DNA, 25 bp, Homo sapien
gttgttggttgtttggtgagacaaa

SEQ ID NO: 5955861 - DNA, 25 bp, Homo sapien
ggactgaccaatgatttggccgaag

SEQ ID NO: 5955862 - DNA, 25 bp, Homo sapien
atgaatttaaatcgtagggttgaat

SEQ ID NO: 5955863 - DNA, 25 bp, Homo sapien
accctttgagtccaccagctccgag

SEQ ID NO: 5955864 - DNA, 25 bp, Homo sapien
tggtctctgacatcttcaaatccaa

SEQ ID NO: 5955865 - DNA, 25 bp, Homo sapien
gtgactttattgttcaaagtggagt

SEQ ID NO: 5955866 - DNA, 25 bp, Homo sapien
atcaagaggtttcccctgcgggttg

SEQ ID NO: 5955867 - DNA, 25 bp, Homo sapien
gaaagaacaccgtaagcaacgttcc

SEQ ID NO: 5955868 - DNA, 25 bp, Homo sapien
atgacagcatcttcgtctagggaat

SEQ ID NO: 5955869 - DNA, 25 bp, Homo sapien
caccctgttgccaaccatctttgtt

SEQ ID NO: 5955870 - DNA, 25 bp, Homo sapien
tggaaagttaccagctggaatagcg

SEQ ID NO: 5955871 - DNA, 25 bp, Homo sapien
tcaatgttttttaagattgaatctc

SEQ ID NO: 5955872 - DNA, 25 bp, Homo sapien
gatgttaccaaaccttttggacttg

SEQ ID NO: 5955873 - DNA, 25 bp, Homo sapien
tccaccagctccgagccatctccct

SEQ ID NO: 5955874 - DNA, 25 bp, Homo sapien
tatcagggtcgaagtctaatggaac

SEQ ID NO: 5955875 - DNA, 25 bp, Homo sapien
agacaaagtcaccctttgagtccac

SEQ ID NO: 5955876 - DNA, 25 bp, Homo sapien
cgtaggtcgtagaactctacgctgg

SEQ ID NO: 5955877 - DNA, 25 bp, Homo sapien
tagtaacacgcccatggtgttatcc

SEQ ID NO: 5955878 - DNA, 25 bp, Homo sapien
ctctcatgtatgccaggtgaggtct

SEQ ID NO: 5955879 - DNA, 25 bp, Homo sapien
gttgccaaccatctttgttgccttg

SEQ ID NO: 5955880 - DNA, 25 bp, Homo sapien
aattcatcctgcgggagagcctacc

SEQ ID NO: 5955881 - DNA, 25 bp, Homo sapien
tgaatgtttcccagccagtctggta

SEQ ID NO: 5955882 - DNA, 25 bp, Homo sapien
cgcttctcctcttcagccatccaag

SEQ ID NO: 5955883 - DNA, 25 bp, Homo sapien
gtcaccctgttgccaaccatctttg

SEQ ID NO: 5955884 - DNA, 25 bp, Homo sapien
ctctcttcttctagtttccgcttct

SEQ ID NO: 5955885 - DNA, 25 bp, Homo sapien
attggtctctgacatcttcaaatcc

SEQ ID NO: 5955886 - DNA, 25 bp, Homo sapien
gaacaccgtaagcaacgttccagcg

SEQ ID NO: 5955887 - DNA, 25 bp, Homo sapien
aaaaacatgggaagatgctcagaag

SEQ ID NO: 5955888 - DNA, 25 bp, Homo sapien
agtcaccctttgagtccaccagctc

SEQ ID NO: 5955889 - DNA, 25 bp, Homo sapien
agctttcgcgagaatcgagacccct

SEQ ID NO: 5955890 - DNA, 25 bp, Homo sapien
gcaggaaagtgtgagcctgttctga

SEQ ID NO: 5955891 - DNA, 25 bp, Homo sapien
gttgctgttgctgctgctgctgttg

SEQ ID NO: 5955892 - DNA, 25 bp, Homo sapien
catgtatgccaggtgaggtctccaa

SEQ ID NO: 5955893 - DNA, 25 bp, Homo sapien
tcttgttgcgattgcgccatctgta

SEQ ID NO: 5955894 - DNA, 25 bp, Homo sapien
catagatttcgatgttaccaaacct

SEQ ID NO: 5955895 - DNA, 25 bp, Homo sapien
gccatctccctcttcagaccagtct

SEQ ID NO: 5955896 - DNA, 25 bp, Homo sapien
cagatggttaaaaaacatgggaaga

SEQ ID NO: 5955897 - DNA, 25 bp, Homo sapien
gaaggttcgtagatgtgccagatga

SEQ ID NO: 5955898 - DNA, 25 bp, Homo sapien
agaactctacgctgggagtattttt

SEQ ID NO: 5955899 - DNA, 25 bp, Homo sapien
ctgggcgccaaacccgtgacgatca

SEQ ID NO: 5955900 - DNA, 25 bp, Homo sapien
gggtctctcatgtatgccaggtgag

SEQ ID NO: 5955901 - DNA, 25 bp, Homo sapien
gttgttgctgttgttgttgttgttg

SEQ ID NO: 5955902 - DNA, 25 bp, Homo sapien
atggtttcgacatccacgtctctcc

SEQ ID NO: 5955903 - DNA, 25 bp, Homo sapien
tggatagtaacacgcccatggtgtt

SEQ ID NO: 5955904 - DNA, 25 bp, Homo sapien
tcctcttcagccatccaagccatgt

SEQ ID NO: 5955905 - DNA, 25 bp, Homo sapien
cgcgagaatcgagacccctccaata

SEQ ID NO: 5955906 - DNA, 25 bp, Homo sapien
atccaagccatgtgctttaagtcgt

SEQ ID NO: 5955907 - DNA, 25 bp, Homo sapien
agattggatagtaacacgcccatgg

SEQ ID NO: 5955908 - DNA, 25 bp, Homo sapien
gcctaccgaatgcttctgtctctgc

SEQ ID NO: 5955909 - DNA, 25 bp, Homo sapien
cattgtaattcatcctgcgggagag

SEQ ID NO: 5955910 - DNA, 25 bp, Homo sapien
agtctggtaaaggtctccagacgtt

SEQ ID NO: 5955911 - DNA, 25 bp, Homo sapien
actctgggtacccttccacaatgac

SEQ ID NO: 5955912 - DNA, 25 bp, Homo sapien
gacgtccttgtcgtgatgcattaga

SEQ ID NO: 5955913 - DNA, 25 bp, Homo sapien
tcagccatccaagccatgtgcttta

SEQ ID NO: 5955914 - DNA, 25 bp, Homo sapien
tatcgagaagaacgaaagcacgagt

SEQ ID NO: 5955915 - DNA, 25 bp, Homo sapien
cttggaaagttaccagctggaatag

SEQ ID NO: 5955916 - DNA, 25 bp, Homo sapien
cactcaccaaaaacgacagatcaat

SEQ ID NO: 5955917 - DNA, 25 bp, Homo sapien
gacattgtaattcatcctgcgggag

SEQ ID NO: 5955918 - DNA, 25 bp, Homo sapien
caagtggcgtactctgggtaccctt

SEQ ID NO: 5955919 - DNA, 25 bp, Homo sapien
gtggcacgcaaaacaagatgcggtc

SEQ ID NO: 5955920 - DNA, 25 bp, Homo sapien
catggtgttatccgaagagtcactc

SEQ ID NO: 5955921 - DNA, 25 bp, Homo sapien
gactttattgttcaaagtggagtca

SEQ ID NO: 5955922 - DNA, 25 bp, Homo sapien
gacatccacgtctctccagtaaacc

SEQ ID NO: 5955923 - DNA, 25 bp, Homo sapien
gtactctgggtacccttccacaatg

SEQ ID NO: 5955924 - DNA, 25 bp, Homo sapien
gagagcctaccgaatgcttctgtct

SEQ ID NO: 5955925 - DNA, 25 bp, Homo sapien
ggcacgcaaaacaagatgcggtcac

SEQ ID NO: 5955926 - DNA, 25 bp, Homo sapien
gttggggacaatgacgtccttgtcg

SEQ ID NO: 5955927 - DNA, 25 bp, Homo sapien
taaaaaacatgggaagatgctcaga

SEQ ID NO: 5955928 - DNA, 25 bp, Homo sapien
gcctgttctgaatactttagctttc

SEQ ID NO: 5955929 - DNA, 25 bp, Homo sapien
ctctgacatcttcaaatccaatctc

SEQ ID NO: 5955930 - DNA, 25 bp, Homo sapien
tttggacttgtcttgttgcgattgc

SEQ ID NO: 5955931 - DNA, 25 bp, Homo sapien
tgaccaatgatttggccgaagtcct

SEQ ID NO: 5955932 - DNA, 25 bp, Homo sapien
ctgtagattggatagtaacacgccc

SEQ ID NO: 5955933 - DNA, 25 bp, Homo sapien
tctgcgtgcttttcaaaggagaatg

SEQ ID NO: 5955934 - DNA, 25 bp, Homo sapien
ggttgtttggtgagacaaagtcacc

SEQ ID NO: 5955935 - DNA, 25 bp, Homo sapien
catcctgcgggagagcctaccgaat

SEQ ID NO: 5955936 - DNA, 25 bp, Homo sapien
catgatggtagtggggatggtttcg

SEQ ID NO: 5955937 - DNA, 25 bp, Homo sapien
aagtgtgagcctgttctgaatactt

SEQ ID NO: 5955938 - DNA, 25 bp, Homo sapien
ctgctgctgctgttgttgttgttgt

SEQ ID NO: 5955939 - DNA, 25 bp, Homo sapien
ttattgttcaaagtggagtcaatgt

SEQ ID NO: 5955940 - DNA, 25 bp, Homo sapien
tgtcgtgatgcattagatcctccat

SEQ ID NO: 5955941 - DNA, 25 bp, Homo sapien
ccttctcatagatttcgatgttacc

SEQ ID NO: 5955942 - DNA, 25 bp, Homo sapien
tccagtaaacccaggagtggtatgg

SEQ ID NO: 5955943 - DNA, 25 bp, Homo sapien
ccaattccatttcgtcttctggatt

SEQ ID NO: 5955944 - DNA, 25 bp, Homo sapien
tcagaagcatctctcagtggcacgc

SEQ ID NO: 5955945 - DNA, 25 bp, Homo sapien
cagggccacggacccaagccaatta

SEQ ID NO: 5955946 - DNA, 25 bp, Homo sapien
caattgaagacccccttctgattcc

SEQ ID NO: 5955947 - DNA, 25 bp, Homo sapien
ccattggtctctgacatcttcaaat

SEQ ID NO: 5955948 - DNA, 25 bp, Homo sapien
gtgatgcattagatcctccatgatg

SEQ ID NO: 5955949 - DNA, 25 bp, Homo sapien
aggtgaggtctccaagtggcgtact

SEQ ID NO: 5955950 - DNA, 25 bp, Homo sapien
gggagagcctaccgaatgcttctgt

SEQ ID NO: 5955951 - DNA, 25 bp, Homo sapien
gcgtactctgggtacccttccacaa

SEQ ID NO: 5955952 - DNA, 25 bp, Homo sapien
ttgttgccttggtaatttcgtaggt

SEQ ID NO: 5955953 - DNA, 25 bp, Homo sapien
tcaatcaggttgtgcggatatgtca

SEQ ID NO: 5955954 - DNA, 25 bp, Homo sapien
gacagatcaatcaggttgtgcggat

SEQ ID NO: 5955955 - DNA, 25 bp, Homo sapien
atcgtagggttgaatgtttcccagc

SEQ ID NO: 5955956 - DNA, 25 bp, Homo sapien
tccaagtggcgtactctgggtaccc

SEQ ID NO: 5955957 - DNA, 25 bp, Homo sapien
tctttcttcgttccattggtctctg

SEQ ID NO: 5955958 - DNA, 25 bp, Homo sapien
cacgcccatggtgttatccgaagag

SEQ ID NO: 5955959 - DNA, 25 bp, Homo sapien
gttgtcatcaagaggtttcccctgc

SEQ ID NO: 5955960 - DNA, 25 bp, Homo sapien
ctcagtggcacgcaaaacaagatgc

SEQ ID NO: 5955961 - DNA, 25 bp, Homo sapien
gttatccgaagagtcactcaccaaa

SEQ ID NO: 5955962 - DNA, 25 bp, Homo sapien
cgaaagcacgagtcttgtgagaaag

SEQ ID NO: 5955963 - DNA, 25 bp, Homo sapien
gttgctgttgctgttgctgctgctg

SEQ ID NO: 5955964 - DNA, 25 bp, Homo sapien
cttcgtctagggaatccgccaattg

SEQ ID NO: 5955965 - DNA, 25 bp, Homo sapien
tccagcgatacttactgtggtaggg

SEQ ID NO: 5955966 - DNA, 25 bp, Homo sapien
cttgtcgtgatgcattagatcctcc

SEQ ID NO: 5955967 - DNA, 25 bp, Homo sapien
acaaagtcaccctttgagtccacca

SEQ ID NO: 5955968 - DNA, 25 bp, Homo sapien
ctccaataccgtccaattccatttc

SEQ ID NO: 5955969 - DNA, 25 bp, Homo sapien
gttaaaaaacatgggaagatgctca

SEQ ID NO: 5955970 - DNA, 25 bp, Homo sapien
tgccaaccatctttgttgccttggt

SEQ ID NO: 5955971 - DNA, 25 bp, Homo sapien
aaacgacagatcaatcaggttgtgc

SEQ ID NO: 5955972 - DNA, 25 bp, Homo sapien
aaacaagatgcggtcaccctgttgc

SEQ ID NO: 5955973 - DNA, 25 bp, Homo sapien
tgcggatatgtcatggtattcagat

SEQ ID NO: 5955974 - DNA, 25 bp, Homo sapien
ctttattgttcaaagtggagtcaat

SEQ ID NO: 5955975 - DNA, 25 bp, Homo sapien
cttttggacttgtcttgttgcgatt

SEQ ID NO: 5955976 - DNA, 25 bp, Homo sapien
tactttagctttcgcgagaatcgag

SEQ ID NO: 5955977 - DNA, 25 bp, Homo sapien
acgttggggacaatgacgtccttgt

SEQ ID NO: 5955978 - DNA, 25 bp, Homo sapien
attggatagtaacacgcccatggtg

SEQ ID NO: 5955979 - DNA, 25 bp, Homo sapien
tactgtggtagggttgaacgagagt

SEQ ID NO: 5955980 - DNA, 25 bp, Homo sapien
tcttctagtttccgcttctcctctt

SEQ ID NO: 5955981 - DNA, 25 bp, Homo sapien
cctcttcagaccagtctacagtgac

SEQ ID NO: 5955982 - DNA, 25 bp, Homo sapien
ttcaaagtggagtcaatgtttttta

SEQ ID NO: 5955983 - DNA, 25 bp, Homo sapien
tcgatgttaccaaaccttttggact

SEQ ID NO: 5955984 - DNA, 25 bp, Homo sapien
cagcatcttcgtctagggaatccgc

SEQ ID NO: 5955985 - DNA, 25 bp, Homo sapien
tctacagtgactttattgttcaaag

SEQ ID NO: 5955986 - DNA, 25 bp, Homo sapien
atggtattcagatggttaaaaaaca

SEQ ID NO: 5955987 - DNA, 25 bp, Homo sapien
accttttggacttgtcttgttgcga

SEQ ID NO: 5955988 - DNA, 25 bp, Homo sapien
cggacccaagccaattacgagccct

SEQ ID NO: 5955989 - DNA, 25 bp, Homo sapien
gttctgaatactttagctttcgcga

SEQ ID NO: 5955990 - DNA, 25 bp, Homo sapien
ttacgagccctggccatcagctttc

SEQ ID NO: 5955991 - DNA, 25 bp, Homo sapien
catcttcaaatccaatctcccagat

SEQ ID NO: 5955992 - DNA, 25 bp, Homo sapien
gatggttaaaaaacatgggaagatg

SEQ ID NO: 5955993 - DNA, 25 bp, Homo sapien
tttaagattgaatctctttcttcgt

SEQ ID NO: 5955994 - DNA, 25 bp, Homo sapien
tgcgattgcgccatctgtagattgg

SEQ ID NO: 5955995 - DNA, 25 bp, Homo sapien
agatgtgccagatgacataatgggg

SEQ ID NO: 5955996 - DNA, 25 bp, Homo sapien
tgtaaaattcgcgaattctctcttc

SEQ ID NO: 5955997 - DNA, 25 bp, Homo sapien
cagatgacataatggggcaagccga

SEQ ID NO: 5955998 - DNA, 25 bp, Homo sapien
ttgggtctctcatgtatgccaggtg

SEQ ID NO: 5955999 - DNA, 25 bp, Homo sapien
tttaggatgttttttcttgttcttg

SEQ ID NO: 5956000 - DNA, 25 bp, Homo sapien
gagaaagaacaccgtaagcaacgtt

SEQ ID NO: 5956001 - DNA, 25 bp, Homo sapien
tgttgttgctgttgctgttgctgct

SEQ ID NO: 5956002 - DNA, 25 bp, Homo sapien
ttgttgttgttgttgctgttgttgt

SEQ ID NO: 5956003 - DNA, 25 bp, Homo sapien
tggaacttctttaggatgttttttc

SEQ ID NO: 5956004 - DNA, 25 bp, Homo sapien
gttgccttggtaatttcgtaggtcg

SEQ ID NO: 5956005 - DNA, 25 bp, Homo sapien
ctggaatagcgatatcgagaagaac

SEQ ID NO: 5956006 - DNA, 25 bp, Homo sapien
tgtgctttaagtcgtcgctggaagg

SEQ ID NO: 5956007 - DNA, 25 bp, Homo sapien
ttccttccatgaatttaaatcgtag

SEQ ID NO: 5956008 - DNA, 25 bp, Homo sapien
aggagaatgcaggaaagtgtgagcc

SEQ ID NO: 5956009 - DNA, 25 bp, Homo sapien
tatgtcatggtattcagatggttaa

SEQ ID NO: 5956010 - DNA, 25 bp, Homo sapien
ttaaatcgtagggttgaatgtttcc

SEQ ID NO: 5956011 - DNA, 25 bp, Homo sapien
gatgcattagatcctccatgatggt

SEQ ID NO: 5956012 - DNA, 25 bp, Homo sapien
gcgccaaacccgtgacgatcagaaa

SEQ ID NO: 5956013 - DNA, 25 bp, Homo sapien
cctttgagtccaccagctccgagcc

SEQ ID NO: 5956014 - DNA, 25 bp, Homo sapien
gtaacacgcccatggtgttatccga

SEQ ID NO: 5956015 - DNA, 25 bp, Homo sapien
gtcactcaccaaaaacgacagatca

SEQ ID NO: 5956016 - DNA, 25 bp, Homo sapien
ggtgagacaaagtcaccctttgagt

SEQ ID NO: 5956017 - DNA, 25 bp, Homo sapien
tctggtaaaggtctccagacgttgg

SEQ ID NO: 5956018 - DNA, 25 bp, Homo sapien
cctgcgggttgccgtcgagctgttg

SEQ ID NO: 5956019 - DNA, 25 bp, Homo sapien
caagaggtttcccctgcgggttgcc

SEQ ID NO: 5956020 - DNA, 25 bp, Homo sapien
tagggttgaatgtttcccagccagt

SEQ ID NO: 5956021 - DNA, 25 bp, Homo sapien
tcgagaagaacgaaagcacgagtct

SEQ ID NO: 5956022 - DNA, 25 bp, Homo sapien
ccctgggcgccaaacccgtgacgat

SEQ ID NO: 5956023 - DNA, 25 bp, Homo sapien
atctggaacatagggcttgaagatt

SEQ ID NO: 5956024 - DNA, 25 bp, Homo sapien
tcgtagatgtgccagatgacataat

SEQ ID NO: 5956025 - DNA, 25 bp, Homo sapien
ctcttcttctagtttccgcttctcc

SEQ ID NO: 5956026 - DNA, 25 bp, Homo sapien
taaaatctggaacatagggcttgaa

SEQ ID NO: 5956027 - DNA, 25 bp, Homo sapien
tttctatcagggtcgaagtctaatg

SEQ ID NO: 5956028 - DNA, 25 bp, Homo sapien
atctgtagattggatagtaacacgc

SEQ ID NO: 5956029 - DNA, 25 bp, Homo sapien
tgttcaaagtggagtcaatgttttt

SEQ ID NO: 5956030 - DNA, 25 bp, Homo sapien
aagaacaccgtaagcaacgttccag

SEQ ID NO: 5956031 - DNA, 25 bp, Homo sapien
gcatcttcgtctagggaatccgcca

SEQ ID NO: 5956032 - DNA, 25 bp, Homo sapien
tccgccaattgaagacccccttctg

SEQ ID NO: 5956033 - DNA, 25 bp, Homo sapien
ccaagccatgtgctttaagtcgtcg

SEQ ID NO: 5956034 - DNA, 25 bp, Homo sapien
cgtcgctggaaggttcgtagatgtg

SEQ ID NO: 5956035 - DNA, 25 bp, Homo sapien
gtggagtcaatgttttttaagattg

SEQ ID NO: 5956036 - DNA, 25 bp, Homo sapien
cgccatctgtagattggatagtaac

SEQ ID NO: 5956037 - DNA, 25 bp, Homo sapien
tcatggtattcagatggttaaaaaa

SEQ ID NO: 5956038 - DNA, 25 bp, Homo sapien
ccgtccaattccatttcgtcttctg

SEQ ID NO: 5956039 - DNA, 25 bp, Homo sapien
tggtgttatccgaagagtcactcac

SEQ ID NO: 5956040 - DNA, 25 bp, Homo sapien
acaagatgcggtcaccctgttgcca

SEQ ID NO: 5956041 - DNA, 25 bp, Homo sapien
taatttcgtaggtcgtagaactcta

SEQ ID NO: 5956042 - DNA, 25 bp, Homo sapien
tcgttgtcatcaagaggtttcccct

SEQ ID NO: 5956043 - DNA, 25 bp, Homo sapien
tctctttcttcgttccattggtctc

SEQ ID NO: 5956044 - DNA, 25 bp, Homo sapien
tgcttttcaaaggagaatgcaggaa

SEQ ID NO: 5956045 - DNA, 25 bp, Homo sapien
ccatctttgttgccttggtaatttc

SEQ ID NO: 5956046 - DNA, 25 bp, Homo sapien
agctggaatagcgatatcgagaaga

SEQ ID NO: 5956047 - DNA, 25 bp, Homo sapien
attgaatctctttcttcgttccatt

SEQ ID NO: 5956048 - DNA, 25 bp, Homo sapien
gagccctggccatcagctttcttct

SEQ ID NO: 5956049 - DNA, 25 bp, Homo sapien
ttctgattccttccatgaatttaaa

SEQ ID NO: 5956050 - DNA, 25 bp, Homo sapien
aattctctcttcttctagtttccgc

SEQ ID NO: 5956051 - DNA, 25 bp, Homo sapien
ccagctggaatagcgatatcgagaa

SEQ ID NO: 5956052 - DNA, 25 bp, Homo sapien
ccaattacgagccctggccatcagc

SEQ ID NO: 5956053 - DNA, 25 bp, Homo sapien
aaggactgaccaatgatttggccga

SEQ ID NO: 5956054 - DNA, 25 bp, Homo sapien
gatttggccgaagtccttctcatag

SEQ ID NO: 5956055 - DNA, 25 bp, Homo sapien
ttgtttggtgagacaaagtcaccct

SEQ ID NO: 5956056 - DNA, 25 bp, Homo sapien
agctttcttctggggccctgggcgc

SEQ ID NO: 5956057 - DNA, 25 bp, Homo sapien
gtttgggtctctcatgtatgccagg

SEQ ID NO: 5956058 - DNA, 25 bp, Homo sapien
gagctgttgttgctgttgctgttgc

SEQ ID NO: 5956059 - DNA, 25 bp, Homo sapien
agctccgagccatctccctcttcag

SEQ ID NO: 5956060 - DNA, 25 bp, Homo sapien
ctccgagccatctccctcttcagac

SEQ ID NO: 5956061 - DNA, 25 bp, Homo sapien
ttggtaatttcgtaggtcgtagaac

SEQ ID NO: 5956062 - DNA, 25 bp, Homo sapien
ttaagtcgtcgctggaaggttcgta

SEQ ID NO: 5956063 - DNA, 25 bp, Homo sapien
gatcttgttgtaaaattcgcgaatt

SEQ ID NO: 5956064 - DNA, 25 bp, Homo sapien
tctccctcttcagaccagtctacag

SEQ ID NO: 5956065 - DNA, 25 bp, Homo sapien
tggccatcagctttcttctggggcc

SEQ ID NO: 5956066 - DNA, 25 bp, Homo sapien
gatgcggtcaccctgttgccaacca

SEQ ID NO: 5956067 - DNA, 25 bp, Homo sapien
gcaagccgatgacattgtaattcat

SEQ ID NO: 5956068 - DNA, 25 bp, Homo sapien
tttggccgaagtccttctcatagat

SEQ ID NO: 5956069 - DNA, 25 bp, Homo sapien
tccttgtcgtgatgcattagatcct

SEQ ID NO: 5956070 - DNA, 25 bp, Homo sapien
aatagcgatatcgagaagaacgaaa

SEQ ID NO: 5956071 - DNA, 25 bp, Homo sapien
cgtagggttgaatgtttcccagcca

SEQ ID NO: 5956072 - DNA, 25 bp, Homo sapien
ctgttgctgttgctgctgctgctgt

SEQ ID NO: 5956073 - DNA, 25 bp, Homo sapien
gacaatgacgtccttgtcgtgatgc

SEQ ID NO: 5956074 - DNA, 25 bp, Homo sapien
ctcatgtatgccaggtgaggtctcc

SEQ ID NO: 5956075 - DNA, 25 bp, Homo sapien
gagtcactcaccaaaaacgacagat

SEQ ID NO: 5956076 - DNA, 25 bp, Homo sapien
ttccatgaatttaaatcgtagggtt

SEQ ID NO: 5956077 - DNA, 25 bp, Homo sapien
gtcgtcgctggaaggttcgtagatg

SEQ ID NO: 5956078 - DNA, 25 bp, Homo sapien
agccatccaagccatgtgctttaag

SEQ ID NO: 5956079 - DNA, 25 bp, Homo sapien
tcttgtgagaaagaacaccgtaagc

SEQ ID NO: 5956080 - DNA, 25 bp, Homo sapien
ctcttcagccatccaagccatgtgc

SEQ ID NO: 5956081 - DNA, 25 bp, Homo sapien
caccaaaaacgacagatcaatcagg

SEQ ID NO: 5956082 - DNA, 25 bp, Homo sapien
tatggtttcagggccacggacccaa

SEQ ID NO: 5956083 - DNA, 25 bp, Homo sapien
gctcagaagcatctctcagtggcac

SEQ ID NO: 5956084 - DNA, 25 bp, Homo sapien
cttctcctcttcagccatccaagcc

SEQ ID NO: 5956085 - DNA, 25 bp, Homo sapien
atttcgtaggtcgtagaactctacg

SEQ ID NO: 5956086 - DNA, 25 bp, Homo sapien
atcttcgtctagggaatccgccaat

SEQ ID NO: 5956087 - DNA, 25 bp, Homo sapien
cagatcttgttgtaaaattcgcgaa

SEQ ID NO: 5956088 - DNA, 25 bp, Homo sapien
tcgacatccacgtctctccagtaaa

SEQ ID NO: 5956089 - DNA, 25 bp, Homo sapien
atctctcagtggcacgcaaaacaag

SEQ ID NO: 5956090 - DNA, 25 bp, Homo sapien
taccaaaccttttggacttgtcttg

SEQ ID NO: 5956091 - DNA, 25 bp, Homo sapien
acgacagatcaatcaggttgtgcgg

SEQ ID NO: 5956092 - DNA, 25 bp, Homo sapien
ccaggtgaggtctccaagtggcgta

SEQ ID NO: 5956093 - DNA, 25 bp, Homo sapien
cctggccatcagctttcttctgggg

SEQ ID NO: 5956094 - DNA, 25 bp, Homo sapien
caaatccaatctcccagatcttgtt

SEQ ID NO: 5956095 - DNA, 25 bp, Homo sapien
gttgcgattgcgccatctgtagatt

SEQ ID NO: 5956096 - DNA, 25 bp, Homo sapien
gaggtttcccctgcgggttgccgtc

SEQ ID NO: 5956097 - DNA, 25 bp, Homo sapien
acgatcagaaaaggactgaccaatg

SEQ ID NO: 5956098 - DNA, 25 bp, Homo sapien
cattagatcctccatgatggtagtg

SEQ ID NO: 5956099 - DNA, 25 bp, Homo sapien
ccgtttgggtctctcatgtatgcca

SEQ ID NO: 5956100 - DNA, 25 bp, Homo sapien
cgtccttgtcgtgatgcattagatc

SEQ ID NO: 5956101 - DNA, 25 bp, Homo sapien
agaaaaggactgaccaatgatttgg

SEQ ID NO: 5956102 - DNA, 25 bp, Homo sapien
cttgttcttgtcgttgtcatcaaga

SEQ ID NO: 5956103 - DNA, 25 bp, Homo sapien
gagacccctccaataccgtccaatt

SEQ ID NO: 5956104 - DNA, 25 bp, Homo sapien
gtgaggtctccaagtggcgtactct

SEQ ID NO: 5956105 - DNA, 25 bp, Homo sapien
aacgagagttttctgttattatact

SEQ ID NO: 5956106 - DNA, 25 bp, Homo sapien
cagaccagtctacagtgactttatt

SEQ ID NO: 5956107 - DNA, 25 bp, Homo sapien
tttccgcttctcctcttcagccatc

SEQ ID NO: 5956108 - DNA, 25 bp, Homo sapien
ttctagtttccgcttctcctcttca

SEQ ID NO: 5956109 - DNA, 25 bp, Homo sapien
tgaatactttagctttcgcgagaat

SEQ ID NO: 5956110 - DNA, 25 bp, Homo sapien
taagattgaatctctttcttcgttc

SEQ ID NO: 5956111 - DNA, 25 bp, Homo sapien
acatgggaagatgctcagaagcatc

SEQ ID NO: 5956112 - DNA, 25 bp, Homo sapien
gtggtatggtttcagggccacggac

SEQ ID NO: 5956113 - DNA, 25 bp, Homo sapien
ggtttcgacatccacgtctctccag

SEQ ID NO: 5956114 - DNA, 25 bp, Homo sapien
ttctctcttcttctagtttccgctt

SEQ ID NO: 5956115 - DNA, 25 bp, Homo sapien
aggttgtgcggatatgtcatggtat

SEQ ID NO: 5956116 - DNA, 25 bp, Homo sapien
tggggacaatgacgtccttgtcgtg

SEQ ID NO: 5956117 - DNA, 25 bp, Homo sapien
aaatctggaacatagggcttgaaga

SEQ ID NO: 5956118 - DNA, 25 bp, Homo sapien
actgaccaatgatttggccgaagtc

SEQ ID NO: 5956119 - DNA, 25 bp, Homo sapien
ctttgttgccttggtaatttcgtag

SEQ ID NO: 5956120 - DNA, 25 bp, Homo sapien
cgtcttctggattaccgtttgggtc

SEQ ID NO: 5956121 - DNA, 25 bp, Homo sapien
ttcaaatccaatctcccagatcttg

SEQ ID NO: 5956122 - DNA, 25 bp, Homo sapien
ctttaagtcgtcgctggaaggttcg

SEQ ID NO: 5956123 - DNA, 25 bp, Homo sapien
cacgcaaaacaagatgcggtcaccc

SEQ ID NO: 5956124 - DNA, 25 bp, Homo sapien
agcacgagtcttgtgagaaagaaca

SEQ ID NO: 5956125 - DNA, 25 bp, Homo sapien
tttcccagccagtctggtaaaggtc

SEQ ID NO: 5956126 - DNA, 25 bp, Homo sapien
ctagtttctatcagggtcgaagtct

SEQ ID NO: 5956127 - DNA, 25 bp, Homo sapien
atcctccatgatggtagtggggatg

SEQ ID NO: 5956128 - DNA, 25 bp, Homo sapien
ggtatggtttcagggccacggaccc

SEQ ID NO: 5956129 - DNA, 25 bp, Homo sapien
cccaagccaattacgagccctggcc

SEQ ID NO: 5956130 - DNA, 25 bp, Homo sapien
gtctccagacgttggggacaatgac

SEQ ID NO: 5956131 - DNA, 25 bp, Homo sapien
agccaattacgagccctggccatca

SEQ ID NO: 5956132 - DNA, 25 bp, Homo sapien
tcatcaagaggtttcccctgcgggt

SEQ ID NO: 5956133 - DNA, 25 bp, Homo sapien
agaagcatctctcagtggcacgcaa

SEQ ID NO: 5956134 - DNA, 25 bp, Homo sapien
gtccaattccatttcgtcttctgga

SEQ ID NO: 5956135 - DNA, 25 bp, Homo sapien
tggacttgtcttgttgcgattgcgc

SEQ ID NO: 5956136 - DNA, 25 bp, Homo sapien
gccgaagtccttctcatagatttcg

SEQ ID NO: 5956137 - DNA, 25 bp, Homo sapien
ctgttgccaaccatctttgttgcct

SEQ ID NO: 5956138 - DNA, 25 bp, Homo sapien
tcgtgatgcattagatcctccatga

SEQ ID NO: 5956139 - DNA, 25 bp, Homo sapien
gacccaagccaattacgagccctgg

SEQ ID NO: 5956140 - DNA, 25 bp, Homo sapien
acgctgggagtatttttaaaatctg

SEQ ID NO: 5956141 - DNA, 25 bp, Homo sapien
ctctcagtggcacgcaaaacaagat

SEQ ID NO: 5956142 - DNA, 25 bp, Homo sapien
gatcagaaaaggactgaccaatgat

SEQ ID NO: 5956143 - DNA, 25 bp, Homo sapien
ttcccctgcgggttgccgtcgagct

SEQ ID NO: 5956144 - DNA, 25 bp, Homo sapien
tgtcatcaagaggtttcccctgcgg

SEQ ID NO: 5956145 - DNA, 25 bp, Homo sapien
taagcaacgttccagcgatacttac

SEQ ID NO: 5956146 - DNA, 25 bp, Homo sapien
taggatgttttttcttgttcttgtc

SEQ ID NO: 5956147 - DNA, 25 bp, Homo sapien
tgctgctgctgctgttgttgttgtt

SEQ ID NO: 5956148 - DNA, 25 bp, Homo sapien
gtgttatccgaagagtcactcacca

SEQ ID NO: 5956149 - DNA, 25 bp, Homo sapien
tgcgccatctgtagattggatagta

SEQ ID NO: 5956150 - DNA, 25 bp, Homo sapien
gtttcagggccacggacccaagcca

SEQ ID NO: 5956151 - DNA, 25 bp, Homo sapien
ggtctccaagtggcgtactctgggt

SEQ ID NO: 5956152 - DNA, 25 bp, Homo sapien
aaaccttttggacttgtcttgttgc

SEQ ID NO: 5956153 - DNA, 25 bp, Homo sapien
taatggaacttctttaggatgtttt

SEQ ID NO: 5956154 - DNA, 25 bp, Homo sapien
tccatgatggtagtggggatggttt

SEQ ID NO: 5956155 - DNA, 25 bp, Homo sapien
ctgttctgaatactttagctttcgc

SEQ ID NO: 5956156 - DNA, 25 bp, Homo sapien
ccagtctggtaaaggtctccagacg

SEQ ID NO: 5956157 - DNA, 25 bp, Homo sapien
gtccttctcatagatttcgatgtta

SEQ ID NO: 5956158 - DNA, 25 bp, Homo sapien
tgctgctgttgttgttgttgttgct

SEQ ID NO: 5956159 - DNA, 25 bp, Homo sapien
tgctttaagtcgtcgctggaaggtt

SEQ ID NO: 5956160 - DNA, 25 bp, Homo sapien
cttgtcgttgtcatcaagaggtttc

SEQ ID NO: 5956161 - DNA, 25 bp, Homo sapien
tgttgttgttggttgtttggtgaga

SEQ ID NO: 5956162 - DNA, 25 bp, Homo sapien
tcgtctagggaatccgccaattgaa

SEQ ID NO: 5956163 - DNA, 25 bp, Homo sapien
ggtattcagatggttaaaaaacatg

SEQ ID NO: 5956164 - DNA, 25 bp, Homo sapien
cacgtctctccagtaaacccaggag

SEQ ID NO: 5956165 - DNA, 25 bp, Homo sapien
tgttgttgttgttgttgctgttgtt

SEQ ID NO: 5956166 - DNA, 25 bp, Homo sapien
gaatgcaggaaagtgtgagcctgtt

SEQ ID NO: 5956167 - DNA, 25 bp, Homo sapien
gatcaatcaggttgtgcggatatgt

SEQ ID NO: 5956168 - DNA, 25 bp, Homo sapien
ttgttgtaaaattcgcgaattctct

SEQ ID NO: 5956169 - DNA, 25 bp, Homo sapien
ttcgtaggtcgtagaactctacgct

SEQ ID NO: 5956170 - DNA, 25 bp, Homo sapien
agaacgaaagcacgagtcttgtgag

SEQ ID NO: 5956171 - DNA, 25 bp, Homo sapien
caatgacagcatcttcgtctaggga

SEQ ID NO: 5956172 - DNA, 25 bp, Homo sapien
atgacattgtaattcatcctgcggg

SEQ ID NO: 5956173 - DNA, 25 bp, Homo sapien
gaccagtctacagtgactttattgt

SEQ ID NO: 5956174 - DNA, 25 bp, Homo sapien
gatgacataatggggcaagccgatg

SEQ ID NO: 5956175 - DNA, 25 bp, Homo sapien
aacatagggcttgaagattccttgg

SEQ ID NO: 5956176 - DNA, 25 bp, Homo sapien
aaaaggactgaccaatgatttggcc

SEQ ID NO: 5956177 - DNA, 25 bp, Homo sapien
tgacgatcagaaaaggactgaccaa

SEQ ID NO: 5956178 - DNA, 25 bp, Homo sapien
aaattcgcgaattctctcttcttct

SEQ ID NO: 5956179 - DNA, 25 bp, Homo sapien
tgacataatggggcaagccgatgac

SEQ ID NO: 5956180 - DNA, 25 bp, Homo sapien
ctagggaatccgccaattgaagacc

SEQ ID NO: 5956181 - DNA, 25 bp, Homo sapien
ccttctgattccttccatgaattta

SEQ ID NO: 5956182 - DNA, 25 bp, Homo sapien
tagggttgaacgagagttttctgtt

SEQ ID NO: 5956183 - DNA, 25 bp, Homo sapien
gccagatgacataatggggcaagcc

SEQ ID NO: 5956184 - DNA, 25 bp, Homo sapien
ggaacatagggcttgaagattcctt

SEQ ID NO: 5956185 - DNA, 25 bp, Homo sapien
tcgctggaaggttcgtagatgtgcc

SEQ ID NO: 5956186 - DNA, 25 bp, Homo sapien
tgttaccaaaccttttggacttgtc

SEQ ID NO: 5956187 - DNA, 25 bp, Homo sapien
ttgtgagaaagaacaccgtaagcaa

SEQ ID NO: 5956188 - DNA, 25 bp, Homo sapien
gtagatgtgccagatgacataatgg

SEQ ID NO: 5956189 - DNA, 25 bp, Homo sapien
tttttaagattgaatctctttcttc

SEQ ID NO: 5956190 - DNA, 25 bp, Homo sapien
gaagtctaatggaacttctttagga

SEQ ID NO: 5956191 - DNA, 25 bp, Homo sapien
ggtagggttgaacgagagttttctg

SEQ ID NO: 5956192 - DNA, 25 bp, Homo sapien
ttcagatggttaaaaaacatgggaa

SEQ ID NO: 5956193 - DNA, 25 bp, Homo sapien
ccaaaaacgacagatcaatcaggtt

SEQ ID NO: 5956194 - DNA, 25 bp, Homo sapien
gccaattgaagacccccttctgatt

SEQ ID NO: 5956195 - DNA, 25 bp, Homo sapien
tccacgtctctccagtaaacccagg

SEQ ID NO: 5956196 - DNA, 25 bp, Homo sapien
tggcgtactctgggtacccttccac

SEQ ID NO: 5956197 - DNA, 25 bp, Homo sapien
caaaacaagatgcggtcaccctgtt

SEQ ID NO: 5956198 - DNA, 25 bp, Homo sapien
cttcttctagtttccgcttctcctc

SEQ ID NO: 5956199 - DNA, 25 bp, Homo sapien
cgtaagcaacgttccagcgatactt

SEQ ID NO: 5956200 - DNA, 25 bp, Homo sapien
gcgaattctctcttcttctagtttc

SEQ ID NO: 5956201 - DNA, 25 bp, Homo sapien
accgtaagcaacgttccagcgatac

SEQ ID NO: 5956202 - DNA, 25 bp, Homo sapien
agaatcgagacccctccaataccgt

SEQ ID NO: 5956203 - DNA, 25 bp, Homo sapien
tgatggtagtggggatggtttcgac

SEQ ID NO: 5956204 - DNA, 25 bp, Homo sapien
tgtgcggatatgtcatggtattcag

SEQ ID NO: 5956205 - DNA, 25 bp, Homo sapien
gacttgtcttgttgcgattgcgcca

SEQ ID NO: 5956206 - DNA, 25 bp, Homo sapien
gtaattcatcctgcgggagagccta

SEQ ID NO: 5956207 - DNA, 25 bp, Homo sapien
gaagaacgaaagcacgagtcttgtg

SEQ ID NO: 5956208 - DNA, 25 bp, Homo sapien
cacgagtcttgtgagaaagaacacc

SEQ ID NO: 5956209 - DNA, 25 bp, Homo sapien
tgggtacccttccacaatgacagca

SEQ ID NO: 5956210 - DNA, 25 bp, Homo sapien
cccctgcgggttgccgtcgagctgt

SEQ ID NO: 5956211 - DNA, 25 bp, Homo sapien
agtccaccagctccgagccatctcc

SEQ ID NO: 5956212 - DNA, 25 bp, Homo sapien
ccgagccatctccctcttcagacca

SEQ ID NO: 5956213 - DNA, 25 bp, Homo sapien
ggagtcaatgttttttaagattgaa

SEQ ID NO: 5956214 - DNA, 25 bp, Homo sapien
ttctggattaccgtttgggtctctc

SEQ ID NO: 5956215 - DNA, 25 bp, Homo sapien
tctcctcttcagccatccaagccat

SEQ ID NO: 5956216 - DNA, 25 bp, Homo sapien
tgccaggtgaggtctccaagtggcg

SEQ ID NO: 5956217 - DNA, 25 bp, Homo sapien
agccagtctggtaaaggtctccaga

SEQ ID NO: 5956218 - DNA, 25 bp, Homo sapien
ggatgttttttcttgttcttgtcgt

SEQ ID NO: 5956219 - DNA, 25 bp, Homo sapien
ttagctttcgcgagaatcgagaccc

SEQ ID NO: 5956220 - DNA, 25 bp, Homo sapien
cgtgacgatcagaaaaggactgacc

SEQ ID NO: 5956221 - DNA, 25 bp, Homo sapien
tcaccctttgagtccaccagctccg

SEQ ID NO: 5956222 - DNA, 25 bp, Homo sapien
tcagaaaaggactgaccaatgattt

SEQ ID NO: 5956223 - DNA, 25 bp, Homo sapien
gaagattccttggaaagttaccagc

SEQ ID NO: 5956224 - DNA, 25 bp, Homo sapien
tagcgatatcgagaagaacgaaagc

SEQ ID NO: 5956225 - DNA, 25 bp, Homo sapien
aaaaacgacagatcaatcaggttgt

SEQ ID NO: 5956226 - DNA, 25 bp, Homo sapien
tattcagatggttaaaaaacatggg

SEQ ID NO: 5956227 - DNA, 25 bp, Homo sapien
cggatatgtcatggtattcagatgg

SEQ ID NO: 5956228 - DNA, 25 bp, Homo sapien
ccctgttgccaaccatctttgttgc

SEQ ID NO: 5956229 - DNA, 25 bp, Homo sapien
tggttaaaaaacatgggaagatgct

SEQ ID NO: 5956230 - DNA, 25 bp, Homo sapien
gctggaaggttcgtagatgtgccag

SEQ ID NO: 5956231 - DNA, 25 bp, Homo sapien
ctggattaccgtttgggtctctcat

SEQ ID NO: 5956232 - DNA, 25 bp, Homo sapien
atctcccagatcttgttgtaaaatt

SEQ ID NO: 5956233 - DNA, 25 bp, Homo sapien
cgagagttttctgttattatacttc

SEQ ID NO: 5956234 - DNA, 25 bp, Homo sapien
aaccatctttgttgccttggtaatt

SEQ ID NO: 5956235 - DNA, 25 bp, Homo sapien
tcaggttgtgcggatatgtcatggt

SEQ ID NO: 5956236 - DNA, 25 bp, Homo sapien
cgagaatcgagacccctccaatacc

SEQ ID NO: 5956237 - DNA, 25 bp, Homo sapien
ccatgaatttaaatcgtagggttga

SEQ ID NO: 5956238 - DNA, 25 bp, Homo sapien
aaatcgtagggttgaatgtttccca

SEQ ID NO: 5956239 - DNA, 25 bp, Homo sapien
tatgccaggtgaggtctccaagtgg

SEQ ID NO: 5956240 - DNA, 25 bp, Homo sapien
agtttctatcagggtcgaagtctaa

SEQ ID NO: 5956241 - DNA, 25 bp, Homo sapien
accaatgatttggccgaagtccttc

SEQ ID NO: 5956242 - DNA, 25 bp, Homo sapien
cctccatgatggtagtggggatggt

SEQ ID NO: 5956243 - DNA, 25 bp, Homo sapien
tggtaaaggtctccagacgttgggg

SEQ ID NO: 5956244 - DNA, 25 bp, Homo sapien
gctgggagtatttttaaaatctgga

SEQ ID NO: 5956245 - DNA, 25 bp, Homo sapien
ccagccagtctggtaaaggtctcca

SEQ ID NO: 5956246 - DNA, 25 bp, Homo sapien
caaagtggagtcaatgttttttaag

SEQ ID NO: 5956247 - DNA, 25 bp, Homo sapien
aagatgcggtcaccctgttgccaac

SEQ ID NO: 5956248 - DNA, 25 bp, Homo sapien
atgacgtccttgtcgtgatgcatta

SEQ ID NO: 5956249 - DNA, 25 bp, Homo sapien
cgagtcttgtgagaaagaacaccgt

SEQ ID NO: 5956250 - DNA, 25 bp, Homo sapien
cttctggggccctgggcgccaaacc

SEQ ID NO: 5956251 - DNA, 25 bp, Homo sapien
agacccccttctgattccttccatg

SEQ ID NO: 5956252 - DNA, 25 bp, Homo sapien
ccaggagtggtatggtttcagggcc

SEQ ID NO: 5956253 - DNA, 25 bp, Homo sapien
agtatttttaaaatctggaacatag

SEQ ID NO: 5956254 - DNA, 25 bp, Homo sapien
tctctccagtaaacccaggagtggt

SEQ ID NO: 5956255 - DNA, 25 bp, Homo sapien
tcagggtcgaagtctaatggaactt

SEQ ID NO: 5956256 - DNA, 25 bp, Homo sapien
cgattgcgccatctgtagattggat

SEQ ID NO: 5956257 - DNA, 25 bp, Homo sapien
tctccagtaaacccaggagtggtat

SEQ ID NO: 5956258 - DNA, 25 bp, Homo sapien
ggatggtttcgacatccacgtctct

SEQ ID NO: 5956259 - DNA, 25 bp, Homo sapien
cggtcaccctgttgccaaccatctt

SEQ ID NO: 5956260 - DNA, 25 bp, Homo sapien
gcatctctcagtggcacgcaaaaca

SEQ ID NO: 5956261 - DNA, 25 bp, Homo sapien
gaaagttaccagctggaatagcgat

SEQ ID NO: 5956262 - DNA, 25 bp, Homo sapien
cccttccacaatgacagcatcttcg

SEQ ID NO: 5956263 - DNA, 25 bp, Homo sapien
gagccatctccctcttcagaccagt

SEQ ID NO: 5956264 - DNA, 25 bp, Homo sapien
atgggaagatgctcagaagcatctc

SEQ ID NO: 5956265 - DNA, 25 bp, Homo sapien
tgtcttgttgcgattgcgccatctg

SEQ ID NO: 5956266 - DNA, 25 bp, Homo sapien
gagcctaccgaatgcttctgtctct

SEQ ID NO: 5956267 - DNA, 25 bp, Homo sapien
gtagattggatagtaacacgcccat

SEQ ID NO: 5956268 - DNA, 25 bp, Homo sapien
cttctgtctctgcgtgcttttcaaa

SEQ ID NO: 5956269 - DNA, 25 bp, Homo sapien
tcgaagtctaatggaacttctttag

SEQ ID NO: 5956270 - DNA, 25 bp, Homo sapien
ggtcgtagaactctacgctgggagt

SEQ ID NO: 5956271 - DNA, 25 bp, Homo sapien
tacccttccacaatgacagcatctt

SEQ ID NO: 5956272 - DNA, 25 bp, Homo sapien
cgcccatggtgttatccgaagagtc

SEQ ID NO: 5956273 - DNA, 25 bp, Homo sapien
ggtacccttccacaatgacagcatc

SEQ ID NO: 5956274 - DNA, 25 bp, Homo sapien
ctgttgctgctgctgctgttgttgt

SEQ ID NO: 5956275 - DNA, 25 bp, Homo sapien
gaagatgctcagaagcatctctcag

SEQ ID NO: 5956276 - DNA, 25 bp, Homo sapien
gctgttgttgttgttgttgctgttg

SEQ ID NO: 5956277 - DNA, 25 bp, Homo sapien
agggtcgaagtctaatggaacttct

SEQ ID NO: 5956278 - DNA, 25 bp, Homo sapien
gagaatgcaggaaagtgtgagcctg

SEQ ID NO: 5956279 - DNA, 25 bp, Homo sapien
ttcgtcttctggattaccgtttggg

SEQ ID NO: 5956280 - DNA, 25 bp, Homo sapien
tcaaaggagaatgcaggaaagtgtg

SEQ ID NO: 5956281 - DNA, 25 bp, Homo sapien
taccgtttgggtctctcatgtatgc

SEQ ID NO: 5956282 - DNA, 25 bp, Homo sapien
gccctggccatcagctttcttctgg

SEQ ID NO: 5956283 - DNA, 25 bp, Homo sapien
gttgaatgtttcccagccagtctgg

SEQ ID NO: 5956284 - DNA, 25 bp, Homo sapien
ctgtggtagggttgaacgagagttt

SEQ ID NO: 5956285 - DNA, 25 bp, Homo sapien
ggggatggtttcgacatccacgtct

SEQ ID NO: 5956286 - DNA, 25 bp, Homo sapien
aattacgagccctggccatcagctt

SEQ ID NO: 5956287 - DNA, 25 bp, Homo sapien
aatggggcaagccgatgacattgta

SEQ ID NO: 5956288 - DNA, 25 bp, Homo sapien
ttgtaattcatcctgcgggagagcc

SEQ ID NO: 5956289 - DNA, 25 bp, Homo sapien
gggttgaacgagagttttctgttat

SEQ ID NO: 5956290 - DNA, 25 bp, Homo sapien
ctcccagatcttgttgtaaaattcg

SEQ ID NO: 5956291 - DNA, 25 bp, Homo sapien
ttcatcctgcgggagagcctaccga

SEQ ID NO: 5956292 - DNA, 25 bp, Homo sapien
gccaaacccgtgacgatcagaaaag

SEQ ID NO: 5956293 - DNA, 25 bp, Homo sapien
aaacccaggagtggtatggtttcag

SEQ ID NO: 5956294 - DNA, 25 bp, Homo sapien
agacgttggggacaatgacgtcctt

SEQ ID NO: 5956295 - DNA, 25 bp, Homo sapien
tgctgttgctgctgctgctgttgtt

SEQ ID NO: 5956296 - DNA, 25 bp, Homo sapien
attccttggaaagttaccagctgga

SEQ ID NO: 5956297 - DNA, 25 bp, Homo sapien
aggttcgtagatgtgccagatgaca

SEQ ID NO: 5956298 - DNA, 25 bp, Homo sapien
aactctacgctgggagtatttttaa

SEQ ID NO: 5956299 - DNA, 25 bp, Homo sapien
tctctgcgtgcttttcaaaggagaa

SEQ ID NO: 5956300 - DNA, 25 bp, Homo sapien
gtttggtgagacaaagtcacccttt

SEQ ID NO: 5956301 - DNA, 25 bp, Homo sapien
aggagtggtatggtttcagggccac

SEQ ID NO: 5956302 - DNA, 25 bp, Homo sapien
catgtgctttaagtcgtcgctggaa

SEQ ID NO: 5956303 - DNA, 25 bp, Homo sapien
tccaatctcccagatcttgttgtaa

SEQ ID NO: 5956304 - DNA, 25 bp, Homo sapien
cttactgtggtagggttgaacgaga

SEQ ID NO: 5956305 - DNA, 25 bp, Homo sapien
gacatcttcaaatccaatctcccag

SEQ ID NO: 5956306 - DNA, 25 bp, Homo sapien
aagccgatgacattgtaattcatcc

SEQ ID NO: 5956307 - DNA, 25 bp, Homo sapien
tgaatctctttcttcgttccattgg

SEQ ID NO: 5956308 - DNA, 25 bp, Homo sapien
gttgtaaaattcgcgaattctctct

SEQ ID NO: 5956309 - DNA, 25 bp, Homo sapien
agattgaatctctttcttcgttcca

SEQ ID NO: 5956310 - DNA, 25 bp, Homo sapien
cgtgcttttcaaaggagaatgcagg

SEQ ID NO: 5956311 - DNA, 25 bp, Homo sapien
tcttcaaatccaatctcccagatct

SEQ ID NO: 5956312 - DNA, 25 bp, Homo sapien
taaaattcgcgaattctctcttctt

SEQ ID NO: 5956313 - DNA, 25 bp, Homo sapien
gatacttactgtggtagggttgaac

SEQ ID NO: 5956314 - DNA, 25 bp, Homo sapien
gcgggagagcctaccgaatgcttct

SEQ ID NO: 5956315 - DNA, 25 bp, Homo sapien
agtctacagtgactttattgttcaa

SEQ ID NO: 5956316 - DNA, 25 bp, Homo sapien
ctttcgcgagaatcgagacccctcc

SEQ ID NO: 5956317 - DNA, 25 bp, Homo sapien
atgtgccagatgacataatggggca

SEQ ID NO: 5956318 - DNA, 25 bp, Homo sapien
aatcgagacccctccaataccgtcc

SEQ ID NO: 5956319 - DNA, 25 bp, Homo sapien
tgccttggtaatttcgtaggtcgta

SEQ ID NO: 5956320 - DNA, 25 bp, Homo sapien
ccttccatgaatttaaatcgtaggg

SEQ ID NO: 5956321 - DNA, 25 bp, Homo sapien
tgtttcccagccagtctggtaaagg

SEQ ID NO: 5956322 - DNA, 25 bp, Homo sapien
cagcgatacttactgtggtagggtt

SEQ ID NO: 5956323 - DNA, 25 bp, Homo sapien
ttttttcttgttcttgtcgttgtca

SEQ ID NO: 5956324 - DNA, 25 bp, Homo sapien
ctcgcactctttggctcatgaatta

SEQ ID NO: 5956325 - DNA, 25 bp, Homo sapien
aacactttacacggtattgtttatc

SEQ ID NO: 5956326 - DNA, 25 bp, Homo sapien
gtcgacgttgatggcaacgctatcc

SEQ ID NO: 5956327 - DNA, 25 bp, Homo sapien
ggctggcaaagaagcaggtttgttc

SEQ ID NO: 5956328 - DNA, 25 bp, Homo sapien
ggaaaatggtctcaaactacattgt

SEQ ID NO: 5956329 - DNA, 25 bp, Homo sapien
gggtgctcctattgggtccgtcttg

SEQ ID NO: 5956330 - DNA, 25 bp, Homo sapien
atcaacaacgattggaagtcccaat

SEQ ID NO: 5956331 - DNA, 25 bp, Homo sapien
acacattcaccactccaactgcaga

SEQ ID NO: 5956332 - DNA, 25 bp, Homo sapien
tggaagaactggtccgcatcaaagc

SEQ ID NO: 5956333 - DNA, 25 bp, Homo sapien
tacaacgttaagctaatgggtggta

SEQ ID NO: 5956334 - DNA, 25 bp, Homo sapien
tcacggtgcccccaccagattgatt

SEQ ID NO: 5956335 - DNA, 25 bp, Homo sapien
tccactatcaagtcaccagagatac

SEQ ID NO: 5956336 - DNA, 25 bp, Homo sapien
aacaaggtggtggtattagacaatc

SEQ ID NO: 5956337 - DNA, 25 bp, Homo sapien
ggtttgttctgtgtctctgggactt

SEQ ID NO: 5956338 - DNA, 25 bp, Homo sapien
aggtggtggtattagacaatctggt

SEQ ID NO: 5956339 - DNA, 25 bp, Homo sapien
ggtatgatggctagaatggctcttg

SEQ ID NO: 5956340 - DNA, 25 bp, Homo sapien
agccgaatattgtgaggcaaagggc

SEQ ID NO: 5956341 - DNA, 25 bp, Homo sapien
atactctattctatgtgattacagg

SEQ ID NO: 5956342 - DNA, 25 bp, Homo sapien
cactcacgaagccgctggactggcg

SEQ ID NO: 5956343 - DNA, 25 bp, Homo sapien
acgctatccgcgaaataaaaaccta

SEQ ID NO: 5956344 - DNA, 25 bp, Homo sapien
gtcaagaaggccacccatttcagaa

SEQ ID NO: 5956345 - DNA, 25 bp, Homo sapien
agaatctggaatgccgctgcacaat

SEQ ID NO: 5956346 - DNA, 25 bp, Homo sapien
ggtgacgctgtctacggtgaagatg

SEQ ID NO: 5956347 - DNA, 25 bp, Homo sapien
tctttattaacctgaaggccgctag

SEQ ID NO: 5956348 - DNA, 25 bp, Homo sapien
actggcgatcttgtctcaagcgatg

SEQ ID NO: 5956349 - DNA, 25 bp, Homo sapien
gtctatccaagtctatgggtgctcc

SEQ ID NO: 5956350 - DNA, 25 bp, Homo sapien
tcaagtcacactacgtcccagacga

SEQ ID NO: 5956351 - DNA, 25 bp, Homo sapien
tggtctcaaactacattgtgacggt

SEQ ID NO: 5956352 - DNA, 25 bp, Homo sapien
ttgcccgcatggctggcaaagaagc

SEQ ID NO: 5956353 - DNA, 25 bp, Homo sapien
atatatcaccgctgctaacgacttg

SEQ ID NO: 5956354 - DNA, 25 bp, Homo sapien
accgaggtcgacgttgatggcaacg

SEQ ID NO: 5956355 - DNA, 25 bp, Homo sapien
gactacttgaccttggaagacatca

SEQ ID NO: 5956356 - DNA, 25 bp, Homo sapien
caagcgatggtggttcctgtggttc

SEQ ID NO: 5956357 - DNA, 25 bp, Homo sapien
atctgtctatccaagtctatgggtg

SEQ ID NO: 5956358 - DNA, 25 bp, Homo sapien
ctgaattcgaattgcctccaaaata

SEQ ID NO: 5956359 - DNA, 25 bp, Homo sapien
caggtttgttctgtgtctctgggac

SEQ ID NO: 5956360 - DNA, 25 bp, Homo sapien
ggccacccatttcagaaaacaacaa

SEQ ID NO: 5956361 - DNA, 25 bp, Homo sapien
taagctaatgggtggtagagtctcg

SEQ ID NO: 5956362 - DNA, 25 bp, Homo sapien
tgttctgtgtctctgggactttgtc

SEQ ID NO: 5956363 - DNA, 25 bp, Homo sapien
ccttaagtttgtcaagaaggccacc

SEQ ID NO: 5956364 - DNA, 25 bp, Homo sapien
tttacactcacgaagccgctggact

SEQ ID NO: 5956365 - DNA, 25 bp, Homo sapien
cgatggtggttcctgtggttccttc

SEQ ID NO: 5956366 - DNA, 25 bp, Homo sapien
tcaccactccaactgcagagatgat

SEQ ID NO: 5956367 - DNA, 25 bp, Homo sapien
agagatgatggaggccgctttagag

SEQ ID NO: 5956368 - DNA, 25 bp, Homo sapien
tcaccagagatactttggaaaaagt

SEQ ID NO: 5956369 - DNA, 25 bp, Homo sapien
ctggcaaagaagcaggtttgttctg

SEQ ID NO: 5956370 - DNA, 25 bp, Homo sapien
cactccaactgcagagatgatggag

SEQ ID NO: 5956371 - DNA, 25 bp, Homo sapien
ccaagtctatgggtgctcctattgg

SEQ ID NO: 5956372 - DNA, 25 bp, Homo sapien
gaagatgttgacaccgttaggctcg

SEQ ID NO: 5956373 - DNA, 25 bp, Homo sapien
ggtattgtttatccattggaagaac

SEQ ID NO: 5956374 - DNA, 25 bp, Homo sapien
gctgtctacggtgaagatgttgaca

SEQ ID NO: 5956375 - DNA, 25 bp, Homo sapien
agtcccaattgctgtactcgcactc

SEQ ID NO: 5956376 - DNA, 25 bp, Homo sapien
ctggaaaacactttacacggtattg

SEQ ID NO: 5956377 - DNA, 25 bp, Homo sapien
gtttgaagtacaacgttaagctaat

SEQ ID NO: 5956378 - DNA, 25 bp, Homo sapien
tggaatgccgctgcacaatctggcg

SEQ ID NO: 5956379 - DNA, 25 bp, Homo sapien
gaggccgctttagaggcctctatcg

SEQ ID NO: 5956380 - DNA, 25 bp, Homo sapien
agaatggctcttgtaaacatcaaca

SEQ ID NO: 5956381 - DNA, 25 bp, Homo sapien
aatctggcgtgccattaaagcaata

SEQ ID NO: 5956382 - DNA, 25 bp, Homo sapien
acccagatttaccgtagtgaatcca

SEQ ID NO: 5956383 - DNA, 25 bp, Homo sapien
agagtctcgttccactatcaagtca

SEQ ID NO: 5956384 - DNA, 25 bp, Homo sapien
caagtcaccagagatactttggaaa

SEQ ID NO: 5956385 - DNA, 25 bp, Homo sapien
tggtgtatggaaaatggtctcaaac

SEQ ID NO: 5956386 - DNA, 25 bp, Homo sapien
ttcgactgtaacggacctacccaga

SEQ ID NO: 5956387 - DNA, 25 bp, Homo sapien
tcccaattgctgtactcgcactctt

SEQ ID NO: 5956388 - DNA, 25 bp, Homo sapien
agggctcacgtttacactcacgaag

SEQ ID NO: 5956389 - DNA, 25 bp, Homo sapien
gctgctaacgacttgcggtcagaca

SEQ ID NO: 5956390 - DNA, 25 bp, Homo sapien
acatcctttcgactgtaacggacct

SEQ ID NO: 5956391 - DNA, 25 bp, Homo sapien
gcgatcttgtctcaagcgatggtgg

SEQ ID NO: 5956392 - DNA, 25 bp, Homo sapien
gttgatggcaacgctatccgcgaaa

SEQ ID NO: 5956393 - DNA, 25 bp, Homo sapien
aagtctatgggtgctcctattgggt

SEQ ID NO: 5956394 - DNA, 25 bp, Homo sapien
gaattcgaattgcctccaaaatata

SEQ ID NO: 5956395 - DNA, 25 bp, Homo sapien
ccgcatggctggcaaagaagcaggt

SEQ ID NO: 5956396 - DNA, 25 bp, Homo sapien
aggctcgaacagaccgttgcccgca

SEQ ID NO: 5956397 - DNA, 25 bp, Homo sapien
ccattggaagaactggtccgcatca

SEQ ID NO: 5956398 - DNA, 25 bp, Homo sapien
ttcagaaaacaacaaggtggtggta

SEQ ID NO: 5956399 - DNA, 25 bp, Homo sapien
cagaactcacttgatgcaacctcca

SEQ ID NO: 5956400 - DNA, 25 bp, Homo sapien
acaccgttaggctcgaacagaccgt

SEQ ID NO: 5956401 - DNA, 25 bp, Homo sapien
acattgtgacggtgccagaatctgg

SEQ ID NO: 5956402 - DNA, 25 bp, Homo sapien
gcagagatgatggaggccgctttag

SEQ ID NO: 5956403 - DNA, 25 bp, Homo sapien
tgaattagccgaatattgtgaggca

SEQ ID NO: 5956404 - DNA, 25 bp, Homo sapien
aatgggtggtagagtctcgttccac

SEQ ID NO: 5956405 - DNA, 25 bp, Homo sapien
ttgtttatccattggaagaactggt

SEQ ID NO: 5956406 - DNA, 25 bp, Homo sapien
ctagaatggctcttgtaaacatcaa

SEQ ID NO: 5956407 - DNA, 25 bp, Homo sapien
cgacttgcggtcagacacattcacc

SEQ ID NO: 5956408 - DNA, 25 bp, Homo sapien
tgacaccgttaggctcgaacagacc

SEQ ID NO: 5956409 - DNA, 25 bp, Homo sapien
gtgtctctgggactttgtccaacca

SEQ ID NO: 5956410 - DNA, 25 bp, Homo sapien
aagacatcaagtcacactacgtccc

SEQ ID NO: 5956411 - DNA, 25 bp, Homo sapien
tattctatgtgattacagggctcac

SEQ ID NO: 5956412 - DNA, 25 bp, Homo sapien
ctatccaagtctatgggtgctccta

SEQ ID NO: 5956413 - DNA, 25 bp, Homo sapien
tagtgaatccaccgaggtcgacgtt

SEQ ID NO: 5956414 - DNA, 25 bp, Homo sapien
gctcttgtaaacatcaacaacgatt

SEQ ID NO: 5956415 - DNA, 25 bp, Homo sapien
tgtgaggcaaagggcatcccgctag

SEQ ID NO: 5956416 - DNA, 25 bp, Homo sapien
taaagaacatcctttcgactgtaac

SEQ ID NO: 5956417 - DNA, 25 bp, Homo sapien
atttctctggaaaacactttacacg

SEQ ID NO: 5956418 - DNA, 25 bp, Homo sapien
aacgattggaagtcccaattgctgt

SEQ ID NO: 5956419 - DNA, 25 bp, Homo sapien
ttccttccaacggtgactacttgac

SEQ ID NO: 5956420 - DNA, 25 bp, Homo sapien
ttaggctcgaacagaccgttgcccg

SEQ ID NO: 5956421 - DNA, 25 bp, Homo sapien
attggaagtcccaattgctgtactc

SEQ ID NO: 5956422 - DNA, 25 bp, Homo sapien
ctggtatgatggctagaatggctct

SEQ ID NO: 5956423 - DNA, 25 bp, Homo sapien
tgtaacggacctacccagatttacc

SEQ ID NO: 5956424 - DNA, 25 bp, Homo sapien
ctgtggttccttccaacggtgacta

SEQ ID NO: 5956425 - DNA, 25 bp, Homo sapien
tgaaggccgctagaatggacccaga

SEQ ID NO: 5956426 - DNA, 25 bp, Homo sapien
gaagcaggtttgttctgtgtctctg

SEQ ID NO: 5956427 - DNA, 25 bp, Homo sapien
cactctttggctcatgaattagccg

SEQ ID NO: 5956428 - DNA, 25 bp, Homo sapien
tctggaatgccgctgcacaatctgg

SEQ ID NO: 5956429 - DNA, 25 bp, Homo sapien
caacgctatccgcgaaataaaaacc

SEQ ID NO: 5956430 - DNA, 25 bp, Homo sapien
cgaggccttcgactatgctaaagaa

SEQ ID NO: 5956431 - DNA, 25 bp, Homo sapien
gggactttgtccaaccagattgcca

SEQ ID NO: 5956432 - DNA, 25 bp, Homo sapien
gaatattgtgaggcaaagggcatcc

SEQ ID NO: 5956433 - DNA, 25 bp, Homo sapien
tctggcgtgccattaaagcaatatg

SEQ ID NO: 5956434 - DNA, 25 bp, Homo sapien
tcttgtaaacatcaacaacgattgg

SEQ ID NO: 5956435 - DNA, 25 bp, Homo sapien
ccagattgatttctctggaaaacac

SEQ ID NO: 5956436 - DNA, 25 bp, Homo sapien
ttgtaaacatcaacaacgattggaa

SEQ ID NO: 5956437 - DNA, 25 bp, Homo sapien
gaatgccgctgcacaatctggcgtg

SEQ ID NO: 5956438 - DNA, 25 bp, Homo sapien
cgtagtgaatccaccgaggtcgacg

SEQ ID NO: 5956439 - DNA, 25 bp, Homo sapien
tcctgtggttccttccaacggtgac

SEQ ID NO: 5956440 - DNA, 25 bp, Homo sapien
agcaggtttgttctgtgtctctggg

SEQ ID NO: 5956441 - DNA, 25 bp, Homo sapien
tgcccccaccagattgatttctctg

SEQ ID NO: 5956442 - DNA, 25 bp, Homo sapien
atggacccagatgtccttgttaaga

SEQ ID NO: 5956443 - DNA, 25 bp, Homo sapien
agaactggtccgcatcaaagcttgg

SEQ ID NO: 5956444 - DNA, 25 bp, Homo sapien
ggtccgcatcaaagcttggtgtatg

SEQ ID NO: 5956445 - DNA, 25 bp, Homo sapien
ctctggaaaacactttacacggtat

SEQ ID NO: 5956446 - DNA, 25 bp, Homo sapien
aaggccacccatttcagaaaacaac

SEQ ID NO: 5956447 - DNA, 25 bp, Homo sapien
gtccaaccagattgccatcagaact

SEQ ID NO: 5956448 - DNA, 25 bp, Homo sapien
cacgaagccgctggactggcgatct

SEQ ID NO: 5956449 - DNA, 25 bp, Homo sapien
ctggactggcgatcttgtctcaagc

SEQ ID NO: 5956450 - DNA, 25 bp, Homo sapien
ttctatgtgattacagggctcacgt

SEQ ID NO: 5956451 - DNA, 25 bp, Homo sapien
tgccagaatctggaatgccgctgca

SEQ ID NO: 5956452 - DNA, 25 bp, Homo sapien
cgacgttgatggcaacgctatccgc

SEQ ID NO: 5956453 - DNA, 25 bp, Homo sapien
acgctgtctacggtgaagatgttga

SEQ ID NO: 5956454 - DNA, 25 bp, Homo sapien
gatactttggaaaaagtcaaattgg

SEQ ID NO: 5956455 - DNA, 25 bp, Homo sapien
aatggctcttgtaaacatcaacaac

SEQ ID NO: 5956456 - DNA, 25 bp, Homo sapien
ctctttggctcatgaattagccgaa

SEQ ID NO: 5956457 - DNA, 25 bp, Homo sapien
gcgtgccattaaagcaatatgggga

SEQ ID NO: 5956458 - DNA, 25 bp, Homo sapien
tggttcctgtggttccttccaacgg

SEQ ID NO: 5956459 - DNA, 25 bp, Homo sapien
aagaacatcctttcgactgtaacgg

SEQ ID NO: 5956460 - DNA, 25 bp, Homo sapien
accgttgcccgcatggctggcaaag

SEQ ID NO: 5956461 - DNA, 25 bp, Homo sapien
tcgaacagaccgttgcccgcatggc

SEQ ID NO: 5956462 - DNA, 25 bp, Homo sapien
attgcctccaaaatatatcaccgct

SEQ ID NO: 5956463 - DNA, 25 bp, Homo sapien
agatgttgacaccgttaggctcgaa

SEQ ID NO: 5956464 - DNA, 25 bp, Homo sapien
ctacttgaccttggaagacatcaag

SEQ ID NO: 5956465 - DNA, 25 bp, Homo sapien
gattacagggctcacgtttacactc

SEQ ID NO: 5956466 - DNA, 25 bp, Homo sapien
ctttgtccaaccagattgccatcag

SEQ ID NO: 5956467 - DNA, 25 bp, Homo sapien
atttcagaaaacaacaaggtggtgg

SEQ ID NO: 5956468 - DNA, 25 bp, Homo sapien
tcgactatgctaaagaacatccttt

SEQ ID NO: 5956469 - DNA, 25 bp, Homo sapien
caacctccatactctattctatgtg

SEQ ID NO: 5956470 - DNA, 25 bp, Homo sapien
gaagaactggtccgcatcaaagctt

SEQ ID NO: 5956471 - DNA, 25 bp, Homo sapien
cgactgtaacggacctacccagatt

SEQ ID NO: 5956472 - DNA, 25 bp, Homo sapien
caatctggtatgatggctagaatgg

SEQ ID NO: 5956473 - DNA, 25 bp, Homo sapien
gactccatctccatctgtctatcca

SEQ ID NO: 5956474 - DNA, 25 bp, Homo sapien
gatcttgtctcaagcgatggtggtt

SEQ ID NO: 5956475 - DNA, 25 bp, Homo sapien
atttaccgtagtgaatccaccgagg

SEQ ID NO: 5956476 - DNA, 25 bp, Homo sapien
tgatttctctggaaaacactttaca

SEQ ID NO: 5956477 - DNA, 25 bp, Homo sapien
gaccttggaagacatcaagtcacac

SEQ ID NO: 5956478 - DNA, 25 bp, Homo sapien
agtcaccagagatactttggaaaaa

SEQ ID NO: 5956479 - DNA, 25 bp, Homo sapien
cgctgcacaatctggcgtgccatta

SEQ ID NO: 5956480 - DNA, 25 bp, Homo sapien
gagtctccagcagacaccaactttg

SEQ ID NO: 5956481 - DNA, 25 bp, Homo sapien
gcgaaataaaaacctacaaatactg

SEQ ID NO: 5956482 - DNA, 25 bp, Homo sapien
acaatctggcgtgccattaaagcaa

SEQ ID NO: 5956483 - DNA, 25 bp, Homo sapien
tgggaaccttaagtttgtcaagaag

SEQ ID NO: 5956484 - DNA, 25 bp, Homo sapien
ttctctggaaaacactttacacggt

SEQ ID NO: 5956485 - DNA, 25 bp, Homo sapien
acctacccagatttaccgtagtgaa

SEQ ID NO: 5956486 - DNA, 25 bp, Homo sapien
ggcaacgctatccgcgaaataaaaa

SEQ ID NO: 5956487 - DNA, 25 bp, Homo sapien
ctcaaactacattgtgacggtgcca

SEQ ID NO: 5956488 - DNA, 25 bp, Homo sapien
cctgaaggccgctagaatggaccca

SEQ ID NO: 5956489 - DNA, 25 bp, Homo sapien
ttgctgtactcgcactctttggctc

SEQ ID NO: 5956490 - DNA, 25 bp, Homo sapien
ctaatgggtggtagagtctcgttcc

SEQ ID NO: 5956491 - DNA, 25 bp, Homo sapien
atatggggaaatcttcgactccatc

SEQ ID NO: 5956492 - DNA, 25 bp, Homo sapien
tcggtgacgctgtctacggtgaaga

SEQ ID NO: 5956493 - DNA, 25 bp, Homo sapien
ccgctagaatggacccagatgtcct

SEQ ID NO: 5956494 - DNA, 25 bp, Homo sapien
aatggtctcaaactacattgtgacg

SEQ ID NO: 5956495 - DNA, 25 bp, Homo sapien
gttccactatcaagtcaccagagat

SEQ ID NO: 5956496 - DNA, 25 bp, Homo sapien
tgtctttattaacctgaaggccgct

SEQ ID NO: 5956497 - DNA, 25 bp, Homo sapien
aaccagattgccatcagaactcact

SEQ ID NO: 5956498 - DNA, 25 bp, Homo sapien
tggaggccgctttagaggcctctat

SEQ ID NO: 5956499 - DNA, 25 bp, Homo sapien
aaaaagtcaaattggccatctccga

SEQ ID NO: 5956500 - DNA, 25 bp, Homo sapien
tctcgttccactatcaagtcaccag

SEQ ID NO: 5956501 - DNA, 25 bp, Homo sapien
ctaacgacttgcggtcagacacatt

SEQ ID NO: 5956502 - DNA, 25 bp, Homo sapien
ccatttcagaaaacaacaaggtggt

SEQ ID NO: 5956503 - DNA, 25 bp, Homo sapien
aaaatggtctcaaactacattgtga

SEQ ID NO: 5956504 - DNA, 25 bp, Homo sapien
agacacattcaccactccaactgca

SEQ ID NO: 5956505 - DNA, 25 bp, Homo sapien
acggtattgtttatccattggaaga

SEQ ID NO: 5956506 - DNA, 25 bp, Homo sapien
gtggtggtattagacaatctggtat

SEQ ID NO: 5956507 - DNA, 25 bp, Homo sapien
ccgctagagtctccagcagacacca

SEQ ID NO: 5956508 - DNA, 25 bp, Homo sapien
agcttggtgtatggaaaatggtctc

SEQ ID NO: 5956509 - DNA, 25 bp, Homo sapien
cctccaaaatatatcaccgctgcta

SEQ ID NO: 5956510 - DNA, 25 bp, Homo sapien
ccaacggtgactacttgaccttgga

SEQ ID NO: 5956511 - DNA, 25 bp, Homo sapien
tagaggcctctatcggtgacgctgt

SEQ ID NO: 5956512 - DNA, 25 bp, Homo sapien
ctcaagcgatggtggttcctgtggt

SEQ ID NO: 5956513 - DNA, 25 bp, Homo sapien
gccgctggactggcgatcttgtctc

SEQ ID NO: 5956514 - DNA, 25 bp, Homo sapien
aaagcttggtgtatggaaaatggtc

SEQ ID NO: 5956515 - DNA, 25 bp, Homo sapien
caatatggggaaatcttcgactcca

SEQ ID NO: 5956516 - DNA, 25 bp, Homo sapien
tgaggcaaagggcatcccgctagag

SEQ ID NO: 5956517 - DNA, 25 bp, Homo sapien
tcgaattgcctccaaaatatatcac

SEQ ID NO: 5956518 - DNA, 25 bp, Homo sapien
ggcaaagaagcaggtttgttctgtg

SEQ ID NO: 5956519 - DNA, 25 bp, Homo sapien
attcgaattgcctccaaaatatatc

SEQ ID NO: 5956520 - DNA, 25 bp, Homo sapien
gtgaagatgttgacaccgttaggct

SEQ ID NO: 5956521 - DNA, 25 bp, Homo sapien
aagtttgtcaagaaggccacccatt

SEQ ID NO: 5956522 - DNA, 25 bp, Homo sapien
ctccatactctattctatgtgatta

SEQ ID NO: 5956523 - DNA, 25 bp, Homo sapien
tattgtttatccattggaagaactg

SEQ ID NO: 5956524 - DNA, 25 bp, Homo sapien
acttgaccttggaagacatcaagtc

SEQ ID NO: 5956525 - DNA, 25 bp, Homo sapien
ttaccgtagtgaatccaccgaggtc

SEQ ID NO: 5956526 - DNA, 25 bp, Homo sapien
cagaaaacaacaaggtggtggtatt

SEQ ID NO: 5956527 - DNA, 25 bp, Homo sapien
ggccgctagaatggacccagatgtc

SEQ ID NO: 5956528 - DNA, 25 bp, Homo sapien
ctccagcagacaccaactttgtctt

SEQ ID NO: 5956529 - DNA, 25 bp, Homo sapien
tggcgtgccattaaagcaatatggg

SEQ ID NO: 5956530 - DNA, 25 bp, Homo sapien
actttgtctttattaacctgaaggc

SEQ ID NO: 5956531 - DNA, 25 bp, Homo sapien
acttgcggtcagacacattcaccac

SEQ ID NO: 5956532 - DNA, 25 bp, Homo sapien
atggcaacgctatccgcgaaataaa

SEQ ID NO: 5956533 - DNA, 25 bp, Homo sapien
ttctgtgtctctgggactttgtcca

SEQ ID NO: 5956534 - DNA, 25 bp, Homo sapien
atgttgacaccgttaggctcgaaca

SEQ ID NO: 5956535 - DNA, 25 bp, Homo sapien
ccagaatctggaatgccgctgcaca

SEQ ID NO: 5956536 - DNA, 25 bp, Homo sapien
agcgatggtggttcctgtggttcct

SEQ ID NO: 5956537 - DNA, 25 bp, Homo sapien
ttaagtttgtcaagaaggccaccca

SEQ ID NO: 5956538 - DNA, 25 bp, Homo sapien
tggtattagacaatctggtatgatg

SEQ ID NO: 5956539 - DNA, 25 bp, Homo sapien
ccagcagacaccaactttgtcttta

SEQ ID NO: 5956540 - DNA, 25 bp, Homo sapien
aaccttaagtttgtcaagaaggcca

SEQ ID NO: 5956541 - DNA, 25 bp, Homo sapien
ccagatttaccgtagtgaatccacc

SEQ ID NO: 5956542 - DNA, 25 bp, Homo sapien
gtgtatggaaaatggtctcaaacta

SEQ ID NO: 5956543 - DNA, 25 bp, Homo sapien
tttgtctttattaacctgaaggccg

SEQ ID NO: 5956544 - DNA, 25 bp, Homo sapien
cagagatactttggaaaaagtcaaa

SEQ ID NO: 5956545 - DNA, 25 bp, Homo sapien
gaacagaccgttgcccgcatggctg

SEQ ID NO: 5956546 - DNA, 25 bp, Homo sapien
gtgattacagggctcacgtttacac

SEQ ID NO: 5956547 - DNA, 25 bp, Homo sapien
tattaacctgaaggccgctagaatg

SEQ ID NO: 5956548 - DNA, 25 bp, Homo sapien
accagagatactttggaaaaagtca

SEQ ID NO: 5956549 - DNA, 25 bp, Homo sapien
acggtgccagaatctggaatgccgc

SEQ ID NO: 5956550 - DNA, 25 bp, Homo sapien
gccgctgcacaatctggcgtgccat

SEQ ID NO: 5956551 - DNA, 25 bp, Homo sapien
gactgaattcgaattgcctccaaaa

SEQ ID NO: 5956552 - DNA, 25 bp, Homo sapien
attgtgacggtgccagaatctggaa

SEQ ID NO: 5956553 - DNA, 25 bp, Homo sapien
agatttaccgtagtgaatccaccga

SEQ ID NO: 5956554 - DNA, 25 bp, Homo sapien
gtctcaaactacattgtgacggtgc

SEQ ID NO: 5956555 - DNA, 25 bp, Homo sapien
cagacaccaactttgtctttattaa

SEQ ID NO: 5956556 - DNA, 25 bp, Homo sapien
ctattgggtccgtcttggttgggaa

SEQ ID NO: 5956557 - DNA, 25 bp, Homo sapien
ctccatctccatctgtctatccaag

SEQ ID NO: 5956558 - DNA, 25 bp, Homo sapien
caccaactttgtctttattaacctg

SEQ ID NO: 5956559 - DNA, 25 bp, Homo sapien
atgtgattacagggctcacgtttac

SEQ ID NO: 5956560 - DNA, 25 bp, Homo sapien
ggtgatattcacggtgcccccacca

SEQ ID NO: 5956561 - DNA, 25 bp, Homo sapien
agctaatgggtggtagagtctcgtt

SEQ ID NO: 5956562 - DNA, 25 bp, Homo sapien
aattagccgaatattgtgaggcaaa

SEQ ID NO: 5956563 - DNA, 25 bp, Homo sapien
tactttggaaaaagtcaaattggcc

SEQ ID NO: 5956564 - DNA, 25 bp, Homo sapien
gactttgtccaaccagattgccatc

SEQ ID NO: 5956565 - DNA, 25 bp, Homo sapien
ctcacgtttacactcacgaagccgc

SEQ ID NO: 5956566 - DNA, 25 bp, Homo sapien
tgatggctagaatggctcttgtaaa

SEQ ID NO: 5956567 - DNA, 25 bp, Homo sapien
tggctcttgtaaacatcaacaacga

SEQ ID NO: 5956568 - DNA, 25 bp, Homo sapien
aagccgctggactggcgatcttgtc

SEQ ID NO: 5956569 - DNA, 25 bp, Homo sapien
cgtttacactcacgaagccgctgga

SEQ ID NO: 5956570 - DNA, 25 bp, Homo sapien
ctatgggtgctcctattgggtccgt

SEQ ID NO: 5956571 - DNA, 25 bp, Homo sapien
ctccaactgcagagatgatggaggc

SEQ ID NO: 5956572 - DNA, 25 bp, Homo sapien
cgcactctttggctcatgaattagc

SEQ ID NO: 5956573 - DNA, 25 bp, Homo sapien
aaatcttcgactccatctccatctg

SEQ ID NO: 5956574 - DNA, 25 bp, Homo sapien
ggccgctttagaggcctctatcggt

SEQ ID NO: 5956575 - DNA, 25 bp, Homo sapien
acccagatgtccttgttaagaaggg

SEQ ID NO: 5956576 - DNA, 25 bp, Homo sapien
ttgtcaagaaggccacccatttcag

SEQ ID NO: 5956577 - DNA, 25 bp, Homo sapien
aacctgaaggccgctagaatggacc

SEQ ID NO: 5956578 - DNA, 25 bp, Homo sapien
gtctctgggactttgtccaaccaga

SEQ ID NO: 5956579 - DNA, 25 bp, Homo sapien
gacatcaagtcacactacgtcccag

SEQ ID NO: 5956580 - DNA, 25 bp, Homo sapien
tcaaagcttggtgtatggaaaatgg

SEQ ID NO: 5956581 - DNA, 25 bp, Homo sapien
gaattgcctccaaaatatatcaccg

SEQ ID NO: 5956582 - DNA, 25 bp, Homo sapien
acaacaaggtggtggtattagacaa

SEQ ID NO: 5956583 - DNA, 25 bp, Homo sapien
atggctagaatggctcttgtaaaca

SEQ ID NO: 5956584 - DNA, 25 bp, Homo sapien
ctgcacaatctggcgtgccattaaa

SEQ ID NO: 5956585 - DNA, 25 bp, Homo sapien
tatcggtgacgctgtctacggtgaa

SEQ ID NO: 5956586 - DNA, 25 bp, Homo sapien
acattcaccactccaactgcagaga

SEQ ID NO: 5956587 - DNA, 25 bp, Homo sapien
ccttggaagacatcaagtcacacta

SEQ ID NO: 5956588 - DNA, 25 bp, Homo sapien
cctctatcggtgacgctgtctacgg

SEQ ID NO: 5956589 - DNA, 25 bp, Homo sapien
ctcatgaattagccgaatattgtga

SEQ ID NO: 5956590 - DNA, 25 bp, Homo sapien
gtcacactacgtcccagacgacggt

SEQ ID NO: 5956591 - DNA, 25 bp, Homo sapien
tccgcgaaataaaaacctacaaata

SEQ ID NO: 5956592 - DNA, 25 bp, Homo sapien
gttcctgtggttccttccaacggtg

SEQ ID NO: 5956593 - DNA, 25 bp, Homo sapien
ggaaccttaagtttgtcaagaaggc

SEQ ID NO: 5956594 - DNA, 25 bp, Homo sapien
gtgactacttgaccttggaagacat

SEQ ID NO: 5956595 - DNA, 25 bp, Homo sapien
ggaaatcttcgactccatctccatc

SEQ ID NO: 5956596 - DNA, 25 bp, Homo sapien
tgggtggtagagtctcgttccacta

SEQ ID NO: 5956597 - DNA, 25 bp, Homo sapien
ttagccgaatattgtgaggcaaagg

SEQ ID NO: 5956598 - DNA, 25 bp, Homo sapien
actcacttgatgcaacctccatact

SEQ ID NO: 5956599 - DNA, 25 bp, Homo sapien
ccatactctattctatgtgattaca

SEQ ID NO: 5956600 - DNA, 25 bp, Homo sapien
caagaaggccacccatttcagaaaa

SEQ ID NO: 5956601 - DNA, 25 bp, Homo sapien
caaactacattgtgacggtgccaga

SEQ ID NO: 5956602 - DNA, 25 bp, Homo sapien
gccatctccgaggccttcgactatg

SEQ ID NO: 5956603 - DNA, 25 bp, Homo sapien
gaatccaccgaggtcgacgttgatg

SEQ ID NO: 5956604 - DNA, 25 bp, Homo sapien
cactttacacggtattgtttatcca

SEQ ID NO: 5956605 - DNA, 25 bp, Homo sapien
cgaagccgctggactggcgatcttg

SEQ ID NO: 5956606 - DNA, 25 bp, Homo sapien
acacggtattgtttatccattggaa

SEQ ID NO: 5956607 - DNA, 25 bp, Homo sapien
acagggctcacgtttacactcacga

SEQ ID NO: 5956608 - DNA, 25 bp, Homo sapien
gggtttgaagtacaacgttaagcta

SEQ ID NO: 5956609 - DNA, 25 bp, Homo sapien
ttggttgggaaccttaagtttgtca

SEQ ID NO: 5956610 - DNA, 25 bp, Homo sapien
acatcaacaacgattggaagtccca

SEQ ID NO: 5956611 - DNA, 25 bp, Homo sapien
aatctggaatgccgctgcacaatct

SEQ ID NO: 5956612 - DNA, 25 bp, Homo sapien
ccacccatttcagaaaacaacaagg

SEQ ID NO: 5956613 - DNA, 25 bp, Homo sapien
ttgtctcaagcgatggtggttcctg

SEQ ID NO: 5956614 - DNA, 25 bp, Homo sapien
ggtcagacacattcaccactccaac

SEQ ID NO: 5956615 - DNA, 25 bp, Homo sapien
ttgaccttggaagacatcaagtcac

SEQ ID NO: 5956616 - DNA, 25 bp, Homo sapien
acgtcccagacgacggtgatattca

SEQ ID NO: 5956617 - DNA, 25 bp, Homo sapien
ggcctctatcggtgacgctgtctac

SEQ ID NO: 5956618 - DNA, 25 bp, Homo sapien
caccgctgctaacgacttgcggtca

SEQ ID NO: 5956619 - DNA, 25 bp, Homo sapien
gaacatcctttcgactgtaacggac

SEQ ID NO: 5956620 - DNA, 25 bp, Homo sapien
ggtgcccccaccagattgatttctc

SEQ ID NO: 5956621 - DNA, 25 bp, Homo sapien
cggtgactacttgaccttggaagac

SEQ ID NO: 5956622 - DNA, 25 bp, Homo sapien
atgtccttgttaagaagggtttgaa

SEQ ID NO: 5956623 - DNA, 25 bp, Homo sapien
gctatccgcgaaataaaaacctaca

SEQ ID NO: 5956624 - DNA, 25 bp, Homo sapien
atcaagtcaccagagatactttgga

SEQ ID NO: 5956625 - DNA, 25 bp, Homo sapien
gtttgtcaagaaggccacccatttc

SEQ ID NO: 5956626 - DNA, 25 bp, Homo sapien
ctttcgactgtaacggacctaccca

SEQ ID NO: 5956627 - DNA, 25 bp, Homo sapien
cacactacgtcccagacgacggtga

SEQ ID NO: 5956628 - DNA, 25 bp, Homo sapien
agatgatggaggccgctttagaggc

SEQ ID NO: 5956629 - DNA, 25 bp, Homo sapien
ccatctgtctatccaagtctatggg

SEQ ID NO: 5956630 - DNA, 25 bp, Homo sapien
gcacaatctggcgtgccattaaagc

SEQ ID NO: 5956631 - DNA, 25 bp, Homo sapien
attggccatctccgaggccttcgac

SEQ ID NO: 5956632 - DNA, 25 bp, Homo sapien
atggtggttcctgtggttccttcca

SEQ ID NO: 5956633 - DNA, 25 bp, Homo sapien
ttccaacggtgactacttgaccttg

SEQ ID NO: 5956634 - DNA, 25 bp, Homo sapien
cgctggactggcgatcttgtctcaa

SEQ ID NO: 5956635 - DNA, 25 bp, Homo sapien
attcaccactccaactgcagagatg

SEQ ID NO: 5956636 - DNA, 25 bp, Homo sapien
ctcacgaagccgctggactggcgat

SEQ ID NO: 5956637 - DNA, 25 bp, Homo sapien
accgttaggctcgaacagaccgttg

SEQ ID NO: 5956638 - DNA, 25 bp, Homo sapien
atggctggcaaagaagcaggtttgt

SEQ ID NO: 5956639 - DNA, 25 bp, Homo sapien
gtgaatccaccgaggtcgacgttga

SEQ ID NO: 5956640 - DNA, 25 bp, Homo sapien
gtagagtctcgttccactatcaagt

SEQ ID NO: 5956641 - DNA, 25 bp, Homo sapien
tccgcatcaaagcttggtgtatgga

SEQ ID NO: 5956642 - DNA, 25 bp, Homo sapien
gaagtacaacgttaagctaatgggt

SEQ ID NO: 5956643 - DNA, 25 bp, Homo sapien
acgttaagctaatgggtggtagagt

SEQ ID NO: 5956644 - DNA, 25 bp, Homo sapien
gtttatccattggaagaactggtcc

SEQ ID NO: 5956645 - DNA, 25 bp, Homo sapien
acagaccgttgcccgcatggctggc

SEQ ID NO: 5956646 - DNA, 25 bp, Homo sapien
cggtgaagatgttgacaccgttagg

SEQ ID NO: 5956647 - DNA, 25 bp, Homo sapien
ctacccagatttaccgtagtgaatc

SEQ ID NO: 5956648 - DNA, 25 bp, Homo sapien
tccaaaatatatcaccgctgctaac

SEQ ID NO: 5956649 - DNA, 25 bp, Homo sapien
ggactggcgatcttgtctcaagcga

SEQ ID NO: 5956650 - DNA, 25 bp, Homo sapien
agcaatatggggaaatcttcgactc

SEQ ID NO: 5956651 - DNA, 25 bp, Homo sapien
accgtagtgaatccaccgaggtcga

SEQ ID NO: 5956652 - DNA, 25 bp, Homo sapien
ctacattgtgacggtgccagaatct

SEQ ID NO: 5956653 - DNA, 25 bp, Homo sapien
ccaattgctgtactcgcactctttg

SEQ ID NO: 5956654 - DNA, 25 bp, Homo sapien
aaagcaatatggggaaatcttcgac

SEQ ID NO: 5956655 - DNA, 25 bp, Homo sapien
attagacaatctggtatgatggcta

SEQ ID NO: 5956656 - DNA, 25 bp, Homo sapien
ctttggctcatgaattagccgaata

SEQ ID NO: 5956657 - DNA, 25 bp, Homo sapien
ctgtgtctctgggactttgtccaac

SEQ ID NO: 5956658 - DNA, 25 bp, Homo sapien
tgctaacgacttgcggtcagacaca

SEQ ID NO: 5956659 - DNA, 25 bp, Homo sapien
gcccgcatggctggcaaagaagcag

SEQ ID NO: 5956660 - DNA, 25 bp, Homo sapien
cgaggtcgacgttgatggcaacgct

SEQ ID NO: 5956661 - DNA, 25 bp, Homo sapien
tggcgatcttgtctcaagcgatggt

SEQ ID NO: 5956662 - DNA, 25 bp, Homo sapien
ggtggtagagtctcgttccactatc

SEQ ID NO: 5956663 - DNA, 25 bp, Homo sapien
ccaactttgtctttattaacctgaa

SEQ ID NO: 5956664 - DNA, 25 bp, Homo sapien
tactcgcactctttggctcatgaat

SEQ ID NO: 5956665 - DNA, 25 bp, Homo sapien
catcccgctagagtctccagcagac

SEQ ID NO: 5956666 - DNA, 25 bp, Homo sapien
tagagtctccagcagacaccaactt

SEQ ID NO: 5956667 - DNA, 25 bp, Homo sapien
ctatcaagtcaccagagatactttg

SEQ ID NO: 5956668 - DNA, 25 bp, Homo sapien
atcagaactcacttgatgcaacctc

SEQ ID NO: 5956669 - DNA, 25 bp, Homo sapien
cttcgactccatctccatctgtcta

SEQ ID NO: 5956670 - DNA, 25 bp, Homo sapien
tgccatcagaactcacttgatgcaa

SEQ ID NO: 5956671 - DNA, 25 bp, Homo sapien
agggcatcccgctagagtctccagc

SEQ ID NO: 5956672 - DNA, 25 bp, Homo sapien
aaagtcaaattggccatctccgagg

SEQ ID NO: 5956673 - DNA, 25 bp, Homo sapien
tttagaggcctctatcggtgacgct

SEQ ID NO: 5956674 - DNA, 25 bp, Homo sapien
ggacctacccagatttaccgtagtg

SEQ ID NO: 5956675 - DNA, 25 bp, Homo sapien
agtctcgttccactatcaagtcacc

SEQ ID NO: 5956676 - DNA, 25 bp, Homo sapien
gctagagtctccagcagacaccaac

SEQ ID NO: 5956677 - DNA, 25 bp, Homo sapien
gctgtactcgcactctttggctcat

SEQ ID NO: 5956678 - DNA, 25 bp, Homo sapien
gctttagaggcctctatcggtgacg

SEQ ID NO: 5956679 - DNA, 25 bp, Homo sapien
cgttaggctcgaacagaccgttgcc

SEQ ID NO: 5956680 - DNA, 25 bp, Homo sapien
aaacaacaaggtggtggtattagac

SEQ ID NO: 5956681 - DNA, 25 bp, Homo sapien
tctatcggtgacgctgtctacggtg

SEQ ID NO: 5956682 - DNA, 25 bp, Homo sapien
tctattctatgtgattacagggctc

SEQ ID NO: 5956683 - DNA, 25 bp, Homo sapien
tatgatggctagaatggctcttgta

SEQ ID NO: 5956684 - DNA, 25 bp, Homo sapien
acaacgattggaagtcccaattgct

SEQ ID NO: 5956685 - DNA, 25 bp, Homo sapien
ccgctgctaacgacttgcggtcaga

SEQ ID NO: 5956686 - DNA, 25 bp, Homo sapien
gagatactttggaaaaagtcaaatt

SEQ ID NO: 5956687 - DNA, 25 bp, Homo sapien
atccaccgaggtcgacgttgatggc

SEQ ID NO: 5956688 - DNA, 25 bp, Homo sapien
ctgtctatccaagtctatgggtgct

SEQ ID NO: 5956689 - DNA, 25 bp, Homo sapien
tgcaacctccatactctattctatg

SEQ ID NO: 5956690 - DNA, 25 bp, Homo sapien
tcttgtctcaagcgatggtggttcc

SEQ ID NO: 5956691 - DNA, 25 bp, Homo sapien
tgtctacggtgaagatgttgacacc

SEQ ID NO: 5956692 - DNA, 25 bp, Homo sapien
ggtgccagaatctggaatgccgctg

SEQ ID NO: 5956693 - DNA, 25 bp, Homo sapien
atgctaaagaacatcctttcgactg

SEQ ID NO: 5956694 - DNA, 25 bp, Homo sapien
tgttaagaagggtttgaagtacaac

SEQ ID NO: 5956695 - DNA, 25 bp, Homo sapien
ctggtccgcatcaaagcttggtgta

SEQ ID NO: 5956696 - DNA, 25 bp, Homo sapien
gacaatctggtatgatggctagaat

SEQ ID NO: 5956697 - DNA, 25 bp, Homo sapien
gaactcacttgatgcaacctccata

SEQ ID NO: 5956698 - DNA, 25 bp, Homo sapien
tctacggtgaagatgttgacaccgt

SEQ ID NO: 5956699 - DNA, 25 bp, Homo sapien
cccaccagattgatttctctggaaa

SEQ ID NO: 5956700 - DNA, 25 bp, Homo sapien
ttgtccaaccagattgccatcagaa

SEQ ID NO: 5956701 - DNA, 25 bp, Homo sapien
ccttccaacggtgactacttgacct

SEQ ID NO: 5956702 - DNA, 25 bp, Homo sapien
tccttgttaagaagggtttgaagta

SEQ ID NO: 5956703 - DNA, 25 bp, Homo sapien
attgatttctctggaaaacacttta

SEQ ID NO: 5956704 - DNA, 25 bp, Homo sapien
gtctcaagcgatggtggttcctgtg

SEQ ID NO: 5956705 - DNA, 25 bp, Homo sapien
ggaagacatcaagtcacactacgtc

SEQ ID NO: 5956706 - DNA, 25 bp, Homo sapien
attgtgaggcaaagggcatcccgct

SEQ ID NO: 5956707 - DNA, 25 bp, Homo sapien
ttggctcatgaattagccgaatatt

SEQ ID NO: 5956708 - DNA, 25 bp, Homo sapien
ccatcagaactcacttgatgcaacc

SEQ ID NO: 5956709 - DNA, 25 bp, Homo sapien
tggccatctccgaggccttcgacta

SEQ ID NO: 5956710 - DNA, 25 bp, Homo sapien
agtcaaattggccatctccgaggcc

SEQ ID NO: 5956711 - DNA, 25 bp, Homo sapien
ggacccagatgtccttgttaagaag

SEQ ID NO: 5956712 - DNA, 25 bp, Homo sapien
acctccatactctattctatgtgat

SEQ ID NO: 5956713 - DNA, 25 bp, Homo sapien
ctttggaaaaagtcaaattggccat

SEQ ID NO: 5956714 - DNA, 25 bp, Homo sapien
caaagaagcaggtttgttctgtgtc

SEQ ID NO: 5956715 - DNA, 25 bp, Homo sapien
ccgctttagaggcctctatcggtga

SEQ ID NO: 5956716 - DNA, 25 bp, Homo sapien
atatcaccgctgctaacgacttgcg

SEQ ID NO: 5956717 - DNA, 25 bp, Homo sapien
tttattaacctgaaggccgctagaa

SEQ ID NO: 5956718 - DNA, 25 bp, Homo sapien
accactccaactgcagagatgatgg

SEQ ID NO: 5956719 - DNA, 25 bp, Homo sapien
tgatggcaacgctatccgcgaaata

SEQ ID NO: 5956720 - DNA, 25 bp, Homo sapien
ctatgtgattacagggctcacgttt

SEQ ID NO: 5956721 - DNA, 25 bp, Homo sapien
tacggtgaagatgttgacaccgtta

SEQ ID NO: 5956722 - DNA, 25 bp, Homo sapien
tgcctccaaaatatatcaccgctgc

SEQ ID NO: 5956723 - DNA, 25 bp, Homo sapien
atcctttcgactgtaacggacctac

SEQ ID NO: 5956724 - DNA, 25 bp, Homo sapien
ggttccttccaacggtgactacttg

SEQ ID NO: 5956725 - DNA, 25 bp, Homo sapien
aacggtgactacttgaccttggaag

SEQ ID NO: 5956726 - DNA, 25 bp, Homo sapien
aacgacttgcggtcagacacattca

SEQ ID NO: 5956727 - DNA, 25 bp, Homo sapien
ttgcggtcagacacattcaccactc

SEQ ID NO: 5956728 - DNA, 25 bp, Homo sapien
aaatatatcaccgctgctaacgact

SEQ ID NO: 5956729 - DNA, 25 bp, Homo sapien
ccaccgaggtcgacgttgatggcaa

SEQ ID NO: 5956730 - DNA, 25 bp, Homo sapien
acggtgatattcacggtgcccccac

SEQ ID NO: 5956731 - DNA, 25 bp, Homo sapien
aaggccgctagaatggacccagatg

SEQ ID NO: 5956732 - DNA, 25 bp, Homo sapien
ggtggtattagacaatctggtatga

SEQ ID NO: 5956733 - DNA, 25 bp, Homo sapien
cacgtttacactcacgaagccgctg

SEQ ID NO: 5956734 - DNA, 25 bp, Homo sapien
ctccatctgtctatccaagtctatg

SEQ ID NO: 5956735 - DNA, 25 bp, Homo sapien
ttggaagacatcaagtcacactacg

SEQ ID NO: 5956736 - DNA, 25 bp, Homo sapien
gatgcaacctccatactctattcta

SEQ ID NO: 5956737 - DNA, 25 bp, Homo sapien
gttgacaccgttaggctcgaacaga

SEQ ID NO: 5956738 - DNA, 25 bp, Homo sapien
atcaccgctgctaacgacttgcggt

SEQ ID NO: 5956739 - DNA, 25 bp, Homo sapien
ctgggactttgtccaaccagattgc

SEQ ID NO: 5956740 - DNA, 25 bp, Homo sapien
ttacagggctcacgtttacactcac

SEQ ID NO: 5956741 - DNA, 25 bp, Homo sapien
ggaaaaagtcaaattggccatctcc

SEQ ID NO: 5956742 - DNA, 25 bp, Homo sapien
agatgtccttgttaagaagggtttg

SEQ ID NO: 5956743 - DNA, 25 bp, Homo sapien
gacgacggtgatattcacggtgccc

SEQ ID NO: 5956744 - DNA, 25 bp, Homo sapien
gctagaatggacccagatgtccttg

SEQ ID NO: 5956745 - DNA, 25 bp, Homo sapien
tgtgacggtgccagaatctggaatg

SEQ ID NO: 5956746 - DNA, 25 bp, Homo sapien
cgttgcccgcatggctggcaaagaa

SEQ ID NO: 5956747 - DNA, 25 bp, Homo sapien
tcgttccactatcaagtcaccagag

SEQ ID NO: 5956748 - DNA, 25 bp, Homo sapien
actgtaacggacctacccagattta

SEQ ID NO: 5956749 - DNA, 25 bp, Homo sapien
agattgccatcagaactcacttgat

SEQ ID NO: 5956750 - DNA, 25 bp, Homo sapien
ccagatgtccttgttaagaagggtt

SEQ ID NO: 5956751 - DNA, 25 bp, Homo sapien
gctcctattgggtccgtcttggttg

SEQ ID NO: 5956752 - DNA, 25 bp, Homo sapien
aactggtccgcatcaaagcttggtg

SEQ ID NO: 5956753 - DNA, 25 bp, Homo sapien
attgccatcagaactcacttgatgc

SEQ ID NO: 5956754 - DNA, 25 bp, Homo sapien
acggtgcccccaccagattgatttc

SEQ ID NO: 5956755 - DNA, 25 bp, Homo sapien
gtattagacaatctggtatgatggc

SEQ ID NO: 5956756 - DNA, 25 bp, Homo sapien
caaggtggtggtattagacaatctg

SEQ ID NO: 5956757 - DNA, 25 bp, Homo sapien
tacactcacgaagccgctggactgg

SEQ ID NO: 5956758 - DNA, 25 bp, Homo sapien
gaaaacaacaaggtggtggtattag

SEQ ID NO: 5956759 - DNA, 25 bp, Homo sapien
cgattggaagtcccaattgctgtac

SEQ ID NO: 5956760 - DNA, 25 bp, Homo sapien
aagtcacactacgtcccagacgacg

SEQ ID NO: 5956761 - DNA, 25 bp, Homo sapien
atgactgaattcgaattgcctccaa

SEQ ID NO: 5956762 - DNA, 25 bp, Homo sapien
atgccgctgcacaatctggcgtgcc

SEQ ID NO: 5956763 - DNA, 25 bp, Homo sapien
tcagacacattcaccactccaactg

SEQ ID NO: 5956764 - DNA, 25 bp, Homo sapien
cgcatcaaagcttggtgtatggaaa

SEQ ID NO: 5956765 - DNA, 25 bp, Homo sapien
aattgctgtactcgcactctttggc

SEQ ID NO: 5956766 - DNA, 25 bp, Homo sapien
tgacggtgccagaatctggaatgcc

SEQ ID NO: 5956767 - DNA, 25 bp, Homo sapien
cagacgacggtgatattcacggtgc

SEQ ID NO: 5956768 - DNA, 25 bp, Homo sapien
gctcgaacagaccgttgcccgcatg

SEQ ID NO: 5956769 - DNA, 25 bp, Homo sapien
catgaattagccgaatattgtgagg

SEQ ID NO: 5956770 - DNA, 25 bp, Homo sapien
aaagggcatcccgctagagtctcca

SEQ ID NO: 5956771 - DNA, 25 bp, Homo sapien
ttaacctgaaggccgctagaatgga

SEQ ID NO: 5956772 - DNA, 25 bp, Homo sapien
tagaatggacccagatgtccttgtt

SEQ ID NO: 5956773 - DNA, 25 bp, Homo sapien
gtatggaaaatggtctcaaactaca

SEQ ID NO: 5956774 - DNA, 25 bp, Homo sapien
gttgggaaccttaagtttgtcaaga

SEQ ID NO: 5956775 - DNA, 25 bp, Homo sapien
ttatccattggaagaactggtccgc

SEQ ID NO: 5956776 - DNA, 25 bp, Homo sapien
cactatcaagtcaccagagatactt

SEQ ID NO: 5956777 - DNA, 25 bp, Homo sapien
aggtcgacgttgatggcaacgctat

SEQ ID NO: 5956778 - DNA, 25 bp, Homo sapien
acccatttcagaaaacaacaaggtg

SEQ ID NO: 5956779 - DNA, 25 bp, Homo sapien
atggggaaatcttcgactccatctc

SEQ ID NO: 5956780 - DNA, 25 bp, Homo sapien
catcaagtcacactacgtcccagac

SEQ ID NO: 5956781 - DNA, 25 bp, Homo sapien
atattcacggtgcccccaccagatt

SEQ ID NO: 5956782 - DNA, 25 bp, Homo sapien
ggctcatgaattagccgaatattgt

SEQ ID NO: 5956783 - DNA, 25 bp, Homo sapien
attggaagaactggtccgcatcaaa

SEQ ID NO: 5956784 - DNA, 25 bp, Homo sapien
gaagtcccaattgctgtactcgcac

SEQ ID NO: 5956785 - DNA, 25 bp, Homo sapien
ctgcagagatgatggaggccgcttt

SEQ ID NO: 5956786 - DNA, 25 bp, Homo sapien
gtctccagcagacaccaactttgtc

SEQ ID NO: 5956787 - DNA, 25 bp, Homo sapien
tctccgaggccttcgactatgctaa

SEQ ID NO: 5956788 - DNA, 25 bp, Homo sapien
ccagattgccatcagaactcacttg

SEQ ID NO: 5956789 - DNA, 25 bp, Homo sapien
aagaagcaggtttgttctgtgtctc

SEQ ID NO: 5956790 - DNA, 25 bp, Homo sapien
ggctcacgtttacactcacgaagcc

SEQ ID NO: 5956791 - DNA, 25 bp, Homo sapien
gcaaagggcatcccgctagagtctc

SEQ ID NO: 5956792 - DNA, 25 bp, Homo sapien
acgttgatggcaacgctatccgcga

SEQ ID NO: 5956793 - DNA, 25 bp, Homo sapien
gatggaggccgctttagaggcctct

SEQ ID NO: 5956794 - DNA, 25 bp, Homo sapien
ttgaagtacaacgttaagctaatgg

SEQ ID NO: 5956795 - DNA, 25 bp, Homo sapien
caacaacgattggaagtcccaattg

SEQ ID NO: 5956796 - DNA, 25 bp, Homo sapien
gcatggctggcaaagaagcaggttt

SEQ ID NO: 5956797 - DNA, 25 bp, Homo sapien
atccaagtctatgggtgctcctatt

SEQ ID NO: 5956798 - DNA, 25 bp, Homo sapien
cccccaccagattgatttctctgga

SEQ ID NO: 5956799 - DNA, 25 bp, Homo sapien
atgggtgctcctattgggtccgtct

SEQ ID NO: 5956800 - DNA, 25 bp, Homo sapien
aggcaaagggcatcccgctagagtc

SEQ ID NO: 5956801 - DNA, 25 bp, Homo sapien
atctccatctgtctatccaagtcta

SEQ ID NO: 5956802 - DNA, 25 bp, Homo sapien
cttcgactatgctaaagaacatcct

SEQ ID NO: 5956803 - DNA, 25 bp, Homo sapien
caccagattgatttctctggaaaac

SEQ ID NO: 5956804 - DNA, 25 bp, Homo sapien
gaggcctctatcggtgacgctgtct

SEQ ID NO: 5956805 - DNA, 25 bp, Homo sapien
cgacggtgatattcacggtgccccc

SEQ ID NO: 5956806 - DNA, 25 bp, Homo sapien
aaacatcaacaacgattggaagtcc

SEQ ID NO: 5956807 - DNA, 25 bp, Homo sapien
tgatattcacggtgcccccaccaga

SEQ ID NO: 5956808 - DNA, 25 bp, Homo sapien
gaatggacccagatgtccttgttaa

SEQ ID NO: 5956809 - DNA, 25 bp, Homo sapien
gtctatgggtgctcctattgggtcc

SEQ ID NO: 5956810 - DNA, 25 bp, Homo sapien
tatccgcgaaataaaaacctacaaa

SEQ ID NO: 5956811 - DNA, 25 bp, Homo sapien
agtacaacgttaagctaatgggtgg

SEQ ID NO: 5956812 - DNA, 25 bp, Homo sapien
agattgatttctctggaaaacactt

SEQ ID NO: 5956813 - DNA, 25 bp, Homo sapien
agaaggccacccatttcagaaaaca

SEQ ID NO: 5956814 - DNA, 25 bp, Homo sapien
gtcccagacgacggtgatattcacg

SEQ ID NO: 5956815 - DNA, 25 bp, Homo sapien
tcacttgatgcaacctccatactct

SEQ ID NO: 5956816 - DNA, 25 bp, Homo sapien
gtgctcctattgggtccgtcttggt

SEQ ID NO: 5956817 - DNA, 25 bp, Homo sapien
ggctagaatggctcttgtaaacatc

SEQ ID NO: 5956818 - DNA, 25 bp, Homo sapien
atattgtgaggcaaagggcatcccg

SEQ ID NO: 5956819 - DNA, 25 bp, Homo sapien
tcaaattggccatctccgaggcctt

SEQ ID NO: 5956820 - DNA, 25 bp, Homo sapien
catctccgaggccttcgactatgct

SEQ ID NO: 5956821 - DNA, 25 bp, Homo sapien
ccaaccagattgccatcagaactca

SEQ ID NO: 5956822 - DNA, 25 bp, Homo sapien
tcgactccatctccatctgtctatc

SEQ ID NO: 5956823 - DNA, 25 bp, Homo sapien
cttgttaagaagggtttgaagtaca

SEQ ID NO: 5956824 - DNA, 25 bp, Homo sapien
gtaaacatcaacaacgattggaagt

SEQ ID NO: 5956825 - DNA, 25 bp, Homo sapien
gccttcgactatgctaaagaacatc

SEQ ID NO: 5956826 - DNA, 25 bp, Homo sapien
gcggtcagacacattcaccactcca

SEQ ID NO: 5956827 - DNA, 25 bp, Homo sapien
tgtactcgcactctttggctcatga

SEQ ID NO: 5956828 - DNA, 25 bp, Homo sapien
ccaactgcagagatgatggaggccg

SEQ ID NO: 5956829 - DNA, 25 bp, Homo sapien
atggaaaatggtctcaaactacatt

SEQ ID NO: 5956830 - DNA, 25 bp, Homo sapien
gtggttccttccaacggtgactact

SEQ ID NO: 5956831 - DNA, 25 bp, Homo sapien
gactatgctaaagaacatcctttcg

SEQ ID NO: 5956832 - DNA, 25 bp, Homo sapien
aaattggccatctccgaggccttcg

SEQ ID NO: 5956833 - DNA, 25 bp, Homo sapien
acttgatgcaacctccatactctat

SEQ ID NO: 5956834 - DNA, 25 bp, Homo sapien
caaaatatatcaccgctgctaacga

SEQ ID NO: 5956835 - DNA, 25 bp, Homo sapien
ctttacacggtattgtttatccatt

SEQ ID NO: 5956836 - DNA, 25 bp, Homo sapien
ttacacggtattgtttatccattgg

SEQ ID NO: 5956837 - DNA, 25 bp, Homo sapien
ggcatcccgctagagtctccagcag

SEQ ID NO: 5956838 - DNA, 25 bp, Homo sapien
ctatgctaaagaacatcctttcgac

SEQ ID NO: 5956839 - DNA, 25 bp, Homo sapien
atgatggaggccgctttagaggcct

SEQ ID NO: 5956840 - DNA, 25 bp, Homo sapien
ttggaaaaagtcaaattggccatct

SEQ ID NO: 5956841 - DNA, 25 bp, Homo sapien
ggtggttcctgtggttccttccaac

SEQ ID NO: 5956842 - DNA, 25 bp, Homo sapien
atcttcgactccatctccatctgtc

SEQ ID NO: 5956843 - DNA, 25 bp, Homo sapien
aactacattgtgacggtgccagaat

SEQ ID NO: 5956844 - DNA, 25 bp, Homo sapien
aggccttcgactatgctaaagaaca

SEQ ID NO: 5956845 - DNA, 25 bp, Homo sapien
gacaccaactttgtctttattaacc

SEQ ID NO: 5956846 - DNA, 25 bp, Homo sapien
cttggtgtatggaaaatggtctcaa

SEQ ID NO: 5956847 - DNA, 25 bp, Homo sapien
tgacgctgtctacggtgaagatgtt

SEQ ID NO: 5956848 - DNA, 25 bp, Homo sapien
caacgttaagctaatgggtggtaga

SEQ ID NO: 5956849 - DNA, 25 bp, Homo sapien
ccgaatattgtgaggcaaagggcat

SEQ ID NO: 5956850 - DNA, 25 bp, Homo sapien
agcagacaccaactttgtctttatt

SEQ ID NO: 5956851 - DNA, 25 bp, Homo sapien
ctacgtcccagacgacggtgatatt

SEQ ID NO: 5956852 - DNA, 25 bp, Homo sapien
ttgatgcaacctccatactctattc

SEQ ID NO: 5956853 - DNA, 25 bp, Homo sapien
tcccgctagagtctccagcagacac

SEQ ID NO: 5956854 - DNA, 25 bp, Homo sapien
ggggaaatcttcgactccatctcca

SEQ ID NO: 5956855 - DNA, 25 bp, Homo sapien
atccattggaagaactggtccgcat

SEQ ID NO: 5956856 - DNA, 25 bp, Homo sapien
ccatctccatctgtctatccaagtc

SEQ ID NO: 5956857 - DNA, 25 bp, Homo sapien
tcctattgggtccgtcttggttggg

SEQ ID NO: 5956858 - DNA, 25 bp, Homo sapien
attcacggtgcccccaccagattga

SEQ ID NO: 5956859 - DNA, 25 bp, Homo sapien
cactacgtcccagacgacggtgata

SEQ ID NO: 5956860 - DNA, 25 bp, Homo sapien
tagacaatctggtatgatggctaga

SEQ ID NO: 5956861 - DNA, 25 bp, Homo sapien
agaccgttgcccgcatggctggcaa

SEQ ID NO: 5956862 - DNA, 25 bp, Homo sapien
atctggtatgatggctagaatggct

SEQ ID NO: 5956863 - DNA, 25 bp, Homo sapien
tggtagagtctcgttccactatcaa

SEQ ID NO: 5956864 - DNA, 25 bp, Homo sapien
ctctgggactttgtccaaccagatt

SEQ ID NO: 5956865 - DNA, 25 bp, Homo sapien
tttgttctgtgtctctgggactttg

SEQ ID NO: 5956866 - DNA, 25 bp, Homo sapien
gctaaagaacatcctttcgactgta

SEQ ID NO: 5956867 - DNA, 25 bp, Homo sapien
aactgcagagatgatggaggccgct

SEQ ID NO: 5956868 - DNA, 25 bp, Homo sapien
tccgaggccttcgactatgctaaag

SEQ ID NO: 5956869 - DNA, 25 bp, Homo sapien
tggaagtcccaattgctgtactcgc

SEQ ID NO: 5956870 - DNA, 25 bp, Homo sapien
gttaagctaatgggtggtagagtct

SEQ ID NO: 5956871 - DNA, 25 bp, Homo sapien
cccagacgacggtgatattcacggt

SEQ ID NO: 5956872 - DNA, 25 bp, Homo sapien
actctattctatgtgattacagggc

SEQ ID NO: 5956873 - DNA, 25 bp, Homo sapien
catcaaagcttggtgtatggaaaat

SEQ ID NO: 5956874 - DNA, 25 bp, Homo sapien
cttccaaggtcaagtagtcaccgtt

SEQ ID NO: 5956875 - DNA, 25 bp, Homo sapien
tgaccgcaagtcgttagcagcggtg

SEQ ID NO: 5956876 - DNA, 25 bp, Homo sapien
ttctagcggccttcaggttaataaa

SEQ ID NO: 5956877 - DNA, 25 bp, Homo sapien
tagaatagagtatggaggttgcatc

SEQ ID NO: 5956878 - DNA, 25 bp, Homo sapien
gtaaacgtgagccctgtaatcacat

SEQ ID NO: 5956879 - DNA, 25 bp, Homo sapien
gaaggaaccacaggaaccaccatcg

SEQ ID NO: 5956880 - DNA, 25 bp, Homo sapien
gccctgtaatcacatagaatagagt

SEQ ID NO: 5956881 - DNA, 25 bp, Homo sapien
caggaaccaccatcgcttgagacaa

SEQ ID NO: 5956882 - DNA, 25 bp, Homo sapien
aggtccgttacagtcgaaaggatgt

SEQ ID NO: 5956883 - DNA, 25 bp, Homo sapien
cggccttcaggttaataaagacaaa

SEQ ID NO: 5956884 - DNA, 25 bp, Homo sapien
aacgagactctaccacccattagct

SEQ ID NO: 5956885 - DNA, 25 bp, Homo sapien
gaaatcaatctggtgggggcaccgt

SEQ ID NO: 5956886 - DNA, 25 bp, Homo sapien
tttccagagaaatcaatctggtggg

SEQ ID NO: 5956887 - DNA, 25 bp, Homo sapien
ggacccaataggagcacccatagac

SEQ ID NO: 5956888 - DNA, 25 bp, Homo sapien
gacgtagtgtgacttgatgtcttcc

SEQ ID NO: 5956889 - DNA, 25 bp, Homo sapien
tctggcaccgtcacaatgtagtttg

SEQ ID NO: 5956890 - DNA, 25 bp, Homo sapien
tcgtgagtgtaaacgtgagccctgt

SEQ ID NO: 5956891 - DNA, 25 bp, Homo sapien
gtgtaaacgtgagccctgtaatcac

SEQ ID NO: 5956892 - DNA, 25 bp, Homo sapien
atgccctttgcctcacaatattcgg

SEQ ID NO: 5956893 - DNA, 25 bp, Homo sapien
ctttagcatagtcgaaggcctcgga

SEQ ID NO: 5956894 - DNA, 25 bp, Homo sapien
gtcaagtagtcaccgttggaaggaa

SEQ ID NO: 5956895 - DNA, 25 bp, Homo sapien
gacatctgggtccattctagcggcc

SEQ ID NO: 5956896 - DNA, 25 bp, Homo sapien
tgcagttggagtggtgaatgtgtct

SEQ ID NO: 5956897 - DNA, 25 bp, Homo sapien
aatggataaacaataccgtgtaaag

SEQ ID NO: 5956898 - DNA, 25 bp, Homo sapien
ttggaggcaattcgaattcagtcat

SEQ ID NO: 5956899 - DNA, 25 bp, Homo sapien
gattgtctaataccaccaccttgtt

SEQ ID NO: 5956900 - DNA, 25 bp, Homo sapien
tggagtggtgaatgtgtctgaccgc

SEQ ID NO: 5956901 - DNA, 25 bp, Homo sapien
accaccttgttgttttctgaaatgg

SEQ ID NO: 5956902 - DNA, 25 bp, Homo sapien
cggcctccatcatctctgcagttgg

SEQ ID NO: 5956903 - DNA, 25 bp, Homo sapien
tcaacgtcgacctcggtggattcac

SEQ ID NO: 5956904 - DNA, 25 bp, Homo sapien
aacccttcttaacaaggacatctgg

SEQ ID NO: 5956905 - DNA, 25 bp, Homo sapien
tggttggacaaagtcccagagacac

SEQ ID NO: 5956906 - DNA, 25 bp, Homo sapien
tgggtaggtccgttacagtcgaaag

SEQ ID NO: 5956907 - DNA, 25 bp, Homo sapien
taatggcacgccagattgtgcagcg

SEQ ID NO: 5956908 - DNA, 25 bp, Homo sapien
gaaatgggtggccttcttgacaaac

SEQ ID NO: 5956909 - DNA, 25 bp, Homo sapien
cccaaccaagacggacccaatagga

SEQ ID NO: 5956910 - DNA, 25 bp, Homo sapien
cagaacaaacctgcttctttgccag

SEQ ID NO: 5956911 - DNA, 25 bp, Homo sapien
gagccaaagagtgcgagtacagcaa

SEQ ID NO: 5956912 - DNA, 25 bp, Homo sapien
gatggagatggagtcgaagatttcc

SEQ ID NO: 5956913 - DNA, 25 bp, Homo sapien
tttgtaggtttttatttcgcggata

SEQ ID NO: 5956914 - DNA, 25 bp, Homo sapien
ttgctttaatggcacgccagattgt

SEQ ID NO: 5956915 - DNA, 25 bp, Homo sapien
cagtatttgtaggtttttatttcgc

SEQ ID NO: 5956916 - DNA, 25 bp, Homo sapien
cgtcaccgatagaggcctctaaagc

SEQ ID NO: 5956917 - DNA, 25 bp, Homo sapien
gcttgagacaagatcgccagtccag

SEQ ID NO: 5956918 - DNA, 25 bp, Homo sapien
caataccgtgtaaagtgttttccag

SEQ ID NO: 5956919 - DNA, 25 bp, Homo sapien
ggatagcgttgccatcaacgtcgac

SEQ ID NO: 5956920 - DNA, 25 bp, Homo sapien
atcaagtgagttctgatggcaatct

SEQ ID NO: 5956921 - DNA, 25 bp, Homo sapien
ttctttgccagccatgcgggcaacg

SEQ ID NO: 5956922 - DNA, 25 bp, Homo sapien
gtcgaagatttccccatattgcttt

SEQ ID NO: 5956923 - DNA, 25 bp, Homo sapien
tatattttggaggcaattcgaattc

SEQ ID NO: 5956924 - DNA, 25 bp, Homo sapien
gatagacagatggagatggagtcga

SEQ ID NO: 5956925 - DNA, 25 bp, Homo sapien
tagccatcataccagattgtctaat

SEQ ID NO: 5956926 - DNA, 25 bp, Homo sapien
aatatcaccgtcgtctgggacgtag

SEQ ID NO: 5956927 - DNA, 25 bp, Homo sapien
tctaccacccattagcttaacgttg

SEQ ID NO: 5956928 - DNA, 25 bp, Homo sapien
ctgaaatgggtggccttcttgacaa

SEQ ID NO: 5956929 - DNA, 25 bp, Homo sapien
ctggtgacttgatagtggaacgaga

SEQ ID NO: 5956930 - DNA, 25 bp, Homo sapien
aaggcctcggagatggccaatttga

SEQ ID NO: 5956931 - DNA, 25 bp, Homo sapien
tttccatacaccaagctttgatgcg

SEQ ID NO: 5956932 - DNA, 25 bp, Homo sapien
gcaatctggttggacaaagtcccag

SEQ ID NO: 5956933 - DNA, 25 bp, Homo sapien
tcgtctgggacgtagtgtgacttga

SEQ ID NO: 5956934 - DNA, 25 bp, Homo sapien
agacggacccaataggagcacccat

SEQ ID NO: 5956935 - DNA, 25 bp, Homo sapien
cgagactctaccacccattagctta

SEQ ID NO: 5956936 - DNA, 25 bp, Homo sapien
gcagcggtgatatattttggaggca

SEQ ID NO: 5956937 - DNA, 25 bp, Homo sapien
catcgcttgagacaagatcgccagt

SEQ ID NO: 5956938 - DNA, 25 bp, Homo sapien
ccatcatctctgcagttggagtggt

SEQ ID NO: 5956939 - DNA, 25 bp, Homo sapien
tgtagtttgagaccattttccatac

SEQ ID NO: 5956940 - DNA, 25 bp, Homo sapien
ttcaaacccttcttaacaaggacat

SEQ ID NO: 5956941 - DNA, 25 bp, Homo sapien
ggtggccttcttgacaaacttaagg

SEQ ID NO: 5956942 - DNA, 25 bp, Homo sapien
atcatctctgcagttggagtggtga

SEQ ID NO: 5956943 - DNA, 25 bp, Homo sapien
cttgatgtcttccaaggtcaagtag

SEQ ID NO: 5956944 - DNA, 25 bp, Homo sapien
tgagttctgatggcaatctggttgg

SEQ ID NO: 5956945 - DNA, 25 bp, Homo sapien
tgtctgaccgcaagtcgttagcagc

SEQ ID NO: 5956946 - DNA, 25 bp, Homo sapien
aacatcttcaccgtagacagcgtca

SEQ ID NO: 5956947 - DNA, 25 bp, Homo sapien
agcatagtcgaaggcctcggagatg

SEQ ID NO: 5956948 - DNA, 25 bp, Homo sapien
gtgttttccagagaaatcaatctgg

SEQ ID NO: 5956949 - DNA, 25 bp, Homo sapien
ctccatcatctctgcagttggagtg

SEQ ID NO: 5956950 - DNA, 25 bp, Homo sapien
tattcggctaattcatgagccaaag

SEQ ID NO: 5956951 - DNA, 25 bp, Homo sapien
tggatagacagatggagatggagtc

SEQ ID NO: 5956952 - DNA, 25 bp, Homo sapien
attgtgcagcggcattccagattct

SEQ ID NO: 5956953 - DNA, 25 bp, Homo sapien
tcaacatcttcaccgtagacagcgt

SEQ ID NO: 5956954 - DNA, 25 bp, Homo sapien
gagtacagcaattgggacttccaat

SEQ ID NO: 5956955 - DNA, 25 bp, Homo sapien
aagtcccagagacacagaacaaacc

SEQ ID NO: 5956956 - DNA, 25 bp, Homo sapien
accgtgtaaagtgttttccagagaa

SEQ ID NO: 5956957 - DNA, 25 bp, Homo sapien
agcggccttcaggttaataaagaca

SEQ ID NO: 5956958 - DNA, 25 bp, Homo sapien
acaatattcggctaattcatgagcc

SEQ ID NO: 5956959 - DNA, 25 bp, Homo sapien
ttctgaaatgggtggccttcttgac

SEQ ID NO: 5956960 - DNA, 25 bp, Homo sapien
ttttctgaaatgggtggccttcttg

SEQ ID NO: 5956961 - DNA, 25 bp, Homo sapien
ctaaagcggcctccatcatctctgc

SEQ ID NO: 5956962 - DNA, 25 bp, Homo sapien
tcttgacaaacttaaggttcccaac

SEQ ID NO: 5956963 - DNA, 25 bp, Homo sapien
acggtgtcaacatcttcaccgtaga

SEQ ID NO: 5956964 - DNA, 25 bp, Homo sapien
attttccatacaccaagctttgatg

SEQ ID NO: 5956965 - DNA, 25 bp, Homo sapien
ttagcatagtcgaaggcctcggaga

SEQ ID NO: 5956966 - DNA, 25 bp, Homo sapien
tatttgtaggtttttatttcgcgga

SEQ ID NO: 5956967 - DNA, 25 bp, Homo sapien
tcgttgttgatgtttacaagagcca

SEQ ID NO: 5956968 - DNA, 25 bp, Homo sapien
taaagtgttttccagagaaatcaat

SEQ ID NO: 5956969 - DNA, 25 bp, Homo sapien
cctttgcctcacaatattcggctaa

SEQ ID NO: 5956970 - DNA, 25 bp, Homo sapien
cgatagaggcctctaaagcggcctc

SEQ ID NO: 5956971 - DNA, 25 bp, Homo sapien
ctctaaagcggcctccatcatctct

SEQ ID NO: 5956972 - DNA, 25 bp, Homo sapien
aataccaccaccttgttgttttctg

SEQ ID NO: 5956973 - DNA, 25 bp, Homo sapien
ccattctagccatcataccagattg

SEQ ID NO: 5956974 - DNA, 25 bp, Homo sapien
caagtcgttagcagcggtgatatat

SEQ ID NO: 5956975 - DNA, 25 bp, Homo sapien
agccattctagccatcataccagat

SEQ ID NO: 5956976 - DNA, 25 bp, Homo sapien
gatggagtcgaagatttccccatat

SEQ ID NO: 5956977 - DNA, 25 bp, Homo sapien
cctaacggtgtcaacatcttcaccg

SEQ ID NO: 5956978 - DNA, 25 bp, Homo sapien
caaagtcccagagacacagaacaaa

SEQ ID NO: 5956979 - DNA, 25 bp, Homo sapien
gagaccattttccatacaccaagct

SEQ ID NO: 5956980 - DNA, 25 bp, Homo sapien
ttgagaccattttccatacaccaag

SEQ ID NO: 5956981 - DNA, 25 bp, Homo sapien
actctaccacccattagcttaacgt

SEQ ID NO: 5956982 - DNA, 25 bp, Homo sapien
tggagtcgaagatttccccatattg

SEQ ID NO: 5956983 - DNA, 25 bp, Homo sapien
tagtggaacgagactctaccaccca

SEQ ID NO: 5956984 - DNA, 25 bp, Homo sapien
gccatcataccagattgtctaatac

SEQ ID NO: 5956985 - DNA, 25 bp, Homo sapien
ccgttggaaggaaccacaggaacca

SEQ ID NO: 5956986 - DNA, 25 bp, Homo sapien
cacgccagattgtgcagcggcattc

SEQ ID NO: 5956987 - DNA, 25 bp, Homo sapien
aagttggtgtctgctggagactcta

SEQ ID NO: 5956988 - DNA, 25 bp, Homo sapien
tctggttggacaaagtcccagagac

SEQ ID NO: 5956989 - DNA, 25 bp, Homo sapien
gggcaccgtgaatatcaccgtcgtc

SEQ ID NO: 5956990 - DNA, 25 bp, Homo sapien
gaccattttccatacaccaagcttt

SEQ ID NO: 5956991 - DNA, 25 bp, Homo sapien
tccaaagtatctctggtgacttgat

SEQ ID NO: 5956992 - DNA, 25 bp, Homo sapien
tgcctcacaatattcggctaattca

SEQ ID NO: 5956993 - DNA, 25 bp, Homo sapien
cagagaaatcaatctggtgggggca

SEQ ID NO: 5956994 - DNA, 25 bp, Homo sapien
gttggtgtctgctggagactctagc

SEQ ID NO: 5956995 - DNA, 25 bp, Homo sapien
ttccaatggataaacaataccgtgt

SEQ ID NO: 5956996 - DNA, 25 bp, Homo sapien
ggcttcgtgagtgtaaacgtgagcc

SEQ ID NO: 5956997 - DNA, 25 bp, Homo sapien
tgatgcggaccagttcttccaatgg

SEQ ID NO: 5956998 - DNA, 25 bp, Homo sapien
acccattagcttaacgttgtacttc

SEQ ID NO: 5956999 - DNA, 25 bp, Homo sapien
gacagatggagatggagtcgaagat

SEQ ID NO: 5957000 - DNA, 25 bp, Homo sapien
catcaacgtcgacctcggtggattc

SEQ ID NO: 5957001 - DNA, 25 bp, Homo sapien
gacacagaacaaacctgcttctttg

SEQ ID NO: 5957002 - DNA, 25 bp, Homo sapien
gggggcaccgtgaatatcaccgtcg

SEQ ID NO: 5957003 - DNA, 25 bp, Homo sapien
gttcttccaatggataaacaatacc

SEQ ID NO: 5957004 - DNA, 25 bp, Homo sapien
tggccttcttgacaaacttaaggtt

SEQ ID NO: 5957005 - DNA, 25 bp, Homo sapien
caccgtagacagcgtcaccgataga

SEQ ID NO: 5957006 - DNA, 25 bp, Homo sapien
atggcacgccagattgtgcagcggc

SEQ ID NO: 5957007 - DNA, 25 bp, Homo sapien
tagcttaacgttgtacttcaaaccc

SEQ ID NO: 5957008 - DNA, 25 bp, Homo sapien
atctctggtgacttgatagtggaac

SEQ ID NO: 5957009 - DNA, 25 bp, Homo sapien
caagtagtcaccgttggaaggaacc

SEQ ID NO: 5957010 - DNA, 25 bp, Homo sapien
cggctaattcatgagccaaagagtg

SEQ ID NO: 5957011 - DNA, 25 bp, Homo sapien
gtggaacgagactctaccacccatt

SEQ ID NO: 5957012 - DNA, 25 bp, Homo sapien
ctgatggcaatctggttggacaaag

SEQ ID NO: 5957013 - DNA, 25 bp, Homo sapien
gagacacagaacaaacctgcttctt

SEQ ID NO: 5957014 - DNA, 25 bp, Homo sapien
accatcgcttgagacaagatcgcca

SEQ ID NO: 5957015 - DNA, 25 bp, Homo sapien
gactctagcgggatgccctttgcct

SEQ ID NO: 5957016 - DNA, 25 bp, Homo sapien
tagtcaccgttggaaggaaccacag

SEQ ID NO: 5957017 - DNA, 25 bp, Homo sapien
tagacttggatagacagatggagat

SEQ ID NO: 5957018 - DNA, 25 bp, Homo sapien
agtagtcaccgttggaaggaaccac

SEQ ID NO: 5957019 - DNA, 25 bp, Homo sapien
tttgatgcggaccagttcttccaat

SEQ ID NO: 5957020 - DNA, 25 bp, Homo sapien
tctggtgggggcaccgtgaatatca

SEQ ID NO: 5957021 - DNA, 25 bp, Homo sapien
cgccagtccagcggcttcgtgagtg

SEQ ID NO: 5957022 - DNA, 25 bp, Homo sapien
gtgatatattttggaggcaattcga

SEQ ID NO: 5957023 - DNA, 25 bp, Homo sapien
tatggaggttgcatcaagtgagttc

SEQ ID NO: 5957024 - DNA, 25 bp, Homo sapien
tttttatttcgcggatagcgttgcc

SEQ ID NO: 5957025 - DNA, 25 bp, Homo sapien
acgtgagccctgtaatcacatagaa

SEQ ID NO: 5957026 - DNA, 25 bp, Homo sapien
aagctttgatgcggaccagttcttc

SEQ ID NO: 5957027 - DNA, 25 bp, Homo sapien
ggagatggccaatttgactttttcc

SEQ ID NO: 5957028 - DNA, 25 bp, Homo sapien
gtcgaaaggatgttctttagcatag

SEQ ID NO: 5957029 - DNA, 25 bp, Homo sapien
aatattcggctaattcatgagccaa

SEQ ID NO: 5957030 - DNA, 25 bp, Homo sapien
tgggtggccttcttgacaaacttaa

SEQ ID NO: 5957031 - DNA, 25 bp, Homo sapien
ataccagattgtctaataccaccac

SEQ ID NO: 5957032 - DNA, 25 bp, Homo sapien
aatcgttgttgatgtttacaagagc

SEQ ID NO: 5957033 - DNA, 25 bp, Homo sapien
cattctagcggccttcaggttaata

SEQ ID NO: 5957034 - DNA, 25 bp, Homo sapien
tggtgtctgctggagactctagcgg

SEQ ID NO: 5957035 - DNA, 25 bp, Homo sapien
taaagacaaagttggtgtctgctgg

SEQ ID NO: 5957036 - DNA, 25 bp, Homo sapien
cagcggcattccagattctggcacc

SEQ ID NO: 5957037 - DNA, 25 bp, Homo sapien
tgtaggtttttatttcgcggatagc

SEQ ID NO: 5957038 - DNA, 25 bp, Homo sapien
ttccagattctggcaccgtcacaat

SEQ ID NO: 5957039 - DNA, 25 bp, Homo sapien
ggtccattctagcggccttcaggtt

SEQ ID NO: 5957040 - DNA, 25 bp, Homo sapien
ttaataaagacaaagttggtgtctg

SEQ ID NO: 5957041 - DNA, 25 bp, Homo sapien
cccagagacacagaacaaacctgct

SEQ ID NO: 5957042 - DNA, 25 bp, Homo sapien
ggttgcatcaagtgagttctgatgg

SEQ ID NO: 5957043 - DNA, 25 bp, Homo sapien
tggattcactacggtaaatctgggt

SEQ ID NO: 5957044 - DNA, 25 bp, Homo sapien
gattcactacggtaaatctgggtag

SEQ ID NO: 5957045 - DNA, 25 bp, Homo sapien
ttaacaaggacatctgggtccattc

SEQ ID NO: 5957046 - DNA, 25 bp, Homo sapien
cctcggagatggccaatttgacttt

SEQ ID NO: 5957047 - DNA, 25 bp, Homo sapien
tcttaacaaggacatctgggtccat

SEQ ID NO: 5957048 - DNA, 25 bp, Homo sapien
tcggagatggccaatttgacttttt

SEQ ID NO: 5957049 - DNA, 25 bp, Homo sapien
gacaaagttggtgtctgctggagac

SEQ ID NO: 5957050 - DNA, 25 bp, Homo sapien
agcggtgatatattttggaggcaat

SEQ ID NO: 5957051 - DNA, 25 bp, Homo sapien
agcaattgggacttccaatcgttgt

SEQ ID NO: 5957052 - DNA, 25 bp, Homo sapien
ggcattccagattctggcaccgtca

SEQ ID NO: 5957053 - DNA, 25 bp, Homo sapien
gcaccgtgaatatcaccgtcgtctg

SEQ ID NO: 5957054 - DNA, 25 bp, Homo sapien
taacggtgtcaacatcttcaccgta

SEQ ID NO: 5957055 - DNA, 25 bp, Homo sapien
gcggaccagttcttccaatggataa

SEQ ID NO: 5957056 - DNA, 25 bp, Homo sapien
ttccaatcgttgttgatgtttacaa

SEQ ID NO: 5957057 - DNA, 25 bp, Homo sapien
taatcacatagaatagagtatggag

SEQ ID NO: 5957058 - DNA, 25 bp, Homo sapien
tcgacctcggtggattcactacggt

SEQ ID NO: 5957059 - DNA, 25 bp, Homo sapien
ccaataggagcacccatagacttgg

SEQ ID NO: 5957060 - DNA, 25 bp, Homo sapien
tagtgtgacttgatgtcttccaagg

SEQ ID NO: 5957061 - DNA, 25 bp, Homo sapien
ctctggtgacttgatagtggaacga

SEQ ID NO: 5957062 - DNA, 25 bp, Homo sapien
gtctgctggagactctagcgggatg

SEQ ID NO: 5957063 - DNA, 25 bp, Homo sapien
tttccaaagtatctctggtgacttg

SEQ ID NO: 5957064 - DNA, 25 bp, Homo sapien
tcaatctggtgggggcaccgtgaat

SEQ ID NO: 5957065 - DNA, 25 bp, Homo sapien
gcctctaaagcggcctccatcatct

SEQ ID NO: 5957066 - DNA, 25 bp, Homo sapien
gacttggatagacagatggagatgg

SEQ ID NO: 5957067 - DNA, 25 bp, Homo sapien
tcaccgtcgtctgggacgtagtgtg

SEQ ID NO: 5957068 - DNA, 25 bp, Homo sapien
attctagccatcataccagattgtc

SEQ ID NO: 5957069 - DNA, 25 bp, Homo sapien
attagcttaacgttgtacttcaaac

SEQ ID NO: 5957070 - DNA, 25 bp, Homo sapien
agaggcctctaaagcggcctccatc

SEQ ID NO: 5957071 - DNA, 25 bp, Homo sapien
acctgcttctttgccagccatgcgg

SEQ ID NO: 5957072 - DNA, 25 bp, Homo sapien
cagagacacagaacaaacctgcttc

SEQ ID NO: 5957073 - DNA, 25 bp, Homo sapien
tacaagagccattctagccatcata

SEQ ID NO: 5957074 - DNA, 25 bp, Homo sapien
gtagacagcgtcaccgatagaggcc

SEQ ID NO: 5957075 - DNA, 25 bp, Homo sapien
cctcggtggattcactacggtaaat

SEQ ID NO: 5957076 - DNA, 25 bp, Homo sapien
caattgggacttccaatcgttgttg

SEQ ID NO: 5957077 - DNA, 25 bp, Homo sapien
tgactttttccaaagtatctctggt

SEQ ID NO: 5957078 - DNA, 25 bp, Homo sapien
caaggtcaagtagtcaccgttggaa

SEQ ID NO: 5957079 - DNA, 25 bp, Homo sapien
ccagtccagcggcttcgtgagtgta

SEQ ID NO: 5957080 - DNA, 25 bp, Homo sapien
gccttcaggttaataaagacaaagt

SEQ ID NO: 5957081 - DNA, 25 bp, Homo sapien
ccttgttgttttctgaaatgggtgg

SEQ ID NO: 5957082 - DNA, 25 bp, Homo sapien
cagattgtctaataccaccaccttg

SEQ ID NO: 5957083 - DNA, 25 bp, Homo sapien
cccatattgctttaatggcacgcca

SEQ ID NO: 5957084 - DNA, 25 bp, Homo sapien
ggtgtcaacatcttcaccgtagaca

SEQ ID NO: 5957085 - DNA, 25 bp, Homo sapien
tcacaatgtagtttgagaccatttt

SEQ ID NO: 5957086 - DNA, 25 bp, Homo sapien
catctgggtccattctagcggcctt

SEQ ID NO: 5957087 - DNA, 25 bp, Homo sapien
cagtcgaaaggatgttctttagcat

SEQ ID NO: 5957088 - DNA, 25 bp, Homo sapien
gtgggggcaccgtgaatatcaccgt

SEQ ID NO: 5957089 - DNA, 25 bp, Homo sapien
cagatggagatggagtcgaagattt

SEQ ID NO: 5957090 - DNA, 25 bp, Homo sapien
tcgttagcagcggtgatatattttg

SEQ ID NO: 5957091 - DNA, 25 bp, Homo sapien
gagtgcgagtacagcaattgggact

SEQ ID NO: 5957092 - DNA, 25 bp, Homo sapien
cgggcaacggtctgttcgagcctaa

SEQ ID NO: 5957093 - DNA, 25 bp, Homo sapien
catctctgcagttggagtggtgaat

SEQ ID NO: 5957094 - DNA, 25 bp, Homo sapien
ctagcggccttcaggttaataaaga

SEQ ID NO: 5957095 - DNA, 25 bp, Homo sapien
tcttcaccgtagacagcgtcaccga

SEQ ID NO: 5957096 - DNA, 25 bp, Homo sapien
aataaagacaaagttggtgtctgct

SEQ ID NO: 5957097 - DNA, 25 bp, Homo sapien
tgaatatcaccgtcgtctgggacgt

SEQ ID NO: 5957098 - DNA, 25 bp, Homo sapien
tgacaaacttaaggttcccaaccaa

SEQ ID NO: 5957099 - DNA, 25 bp, Homo sapien
tctgaccgcaagtcgttagcagcgg

SEQ ID NO: 5957100 - DNA, 25 bp, Homo sapien
tacttcaaacccttcttaacaagga

SEQ ID NO: 5957101 - DNA, 25 bp, Homo sapien
aatgtagtttgagaccattttccat

SEQ ID NO: 5957102 - DNA, 25 bp, Homo sapien
gaatagagtatggaggttgcatcaa

SEQ ID NO: 5957103 - DNA, 25 bp, Homo sapien
tttcgcggatagcgttgccatcaac

SEQ ID NO: 5957104 - DNA, 25 bp, Homo sapien
atagaggcctctaaagcggcctcca

SEQ ID NO: 5957105 - DNA, 25 bp, Homo sapien
cttggatagacagatggagatggag

SEQ ID NO: 5957106 - DNA, 25 bp, Homo sapien
cacaggaaccaccatcgcttgagac

SEQ ID NO: 5957107 - DNA, 25 bp, Homo sapien
gaggttgcatcaagtgagttctgat

SEQ ID NO: 5957108 - DNA, 25 bp, Homo sapien
ccattttccatacaccaagctttga

SEQ ID NO: 5957109 - DNA, 25 bp, Homo sapien
gagatggagtcgaagatttccccat

SEQ ID NO: 5957110 - DNA, 25 bp, Homo sapien
acaatgtagtttgagaccattttcc

SEQ ID NO: 5957111 - DNA, 25 bp, Homo sapien
agatggccaatttgactttttccaa

SEQ ID NO: 5957112 - DNA, 25 bp, Homo sapien
caggttaataaagacaaagttggtg

SEQ ID NO: 5957113 - DNA, 25 bp, Homo sapien
cgagcctaacggtgtcaacatcttc

SEQ ID NO: 5957114 - DNA, 25 bp, Homo sapien
aatgggtggccttcttgacaaactt

SEQ ID NO: 5957115 - DNA, 25 bp, Homo sapien
cgtcgtctgggacgtagtgtgactt

SEQ ID NO: 5957116 - DNA, 25 bp, Homo sapien
tggagactctagcgggatgcccttt

SEQ ID NO: 5957117 - DNA, 25 bp, Homo sapien
aagacaaagttggtgtctgctggag

SEQ ID NO: 5957118 - DNA, 25 bp, Homo sapien
tctgggtccattctagcggccttca

SEQ ID NO: 5957119 - DNA, 25 bp, Homo sapien
gttgttgatgtttacaagagccatt

SEQ ID NO: 5957120 - DNA, 25 bp, Homo sapien
ggaccagttcttccaatggataaac

SEQ ID NO: 5957121 - DNA, 25 bp, Homo sapien
caccttgttgttttctgaaatgggt

SEQ ID NO: 5957122 - DNA, 25 bp, Homo sapien
gtcgaaggcctcggagatggccaat

SEQ ID NO: 5957123 - DNA, 25 bp, Homo sapien
aacgtcgacctcggtggattcacta

SEQ ID NO: 5957124 - DNA, 25 bp, Homo sapien
gacttgatgtcttccaaggtcaagt

SEQ ID NO: 5957125 - DNA, 25 bp, Homo sapien
cctcacaatattcggctaattcatg

SEQ ID NO: 5957126 - DNA, 25 bp, Homo sapien
cagttggagtggtgaatgtgtctga

SEQ ID NO: 5957127 - DNA, 25 bp, Homo sapien
gttggacaaagtcccagagacacag

SEQ ID NO: 5957128 - DNA, 25 bp, Homo sapien
gtcttccaaggtcaagtagtcaccg

SEQ ID NO: 5957129 - DNA, 25 bp, Homo sapien
accagattgtctaataccaccacct

SEQ ID NO: 5957130 - DNA, 25 bp, Homo sapien
accgatagaggcctctaaagcggcc

SEQ ID NO: 5957131 - DNA, 25 bp, Homo sapien
gacctcggtggattcactacggtaa

SEQ ID NO: 5957132 - DNA, 25 bp, Homo sapien
ttgttgttttctgaaatgggtggcc

SEQ ID NO: 5957133 - DNA, 25 bp, Homo sapien
ggcctcggagatggccaatttgact

SEQ ID NO: 5957134 - DNA, 25 bp, Homo sapien
tctctgcagttggagtggtgaatgt

SEQ ID NO: 5957135 - DNA, 25 bp, Homo sapien
caagtgagttctgatggcaatctgg

SEQ ID NO: 5957136 - DNA, 25 bp, Homo sapien
ggtgaatgtgtctgaccgcaagtcg

SEQ ID NO: 5957137 - DNA, 25 bp, Homo sapien
atgcggaccagttcttccaatggat

SEQ ID NO: 5957138 - DNA, 25 bp, Homo sapien
gctttgatgcggaccagttcttcca

SEQ ID NO: 5957139 - DNA, 25 bp, Homo sapien
aaccaccatcgcttgagacaagatc

SEQ ID NO: 5957140 - DNA, 25 bp, Homo sapien
ataccgtgtaaagtgttttccagag

SEQ ID NO: 5957141 - DNA, 25 bp, Homo sapien
agcgttgccatcaacgtcgacctcg

SEQ ID NO: 5957142 - DNA, 25 bp, Homo sapien
tccatacaccaagctttgatgcgga

SEQ ID NO: 5957143 - DNA, 25 bp, Homo sapien
ttttggaggcaattcgaattcagtc

SEQ ID NO: 5957144 - DNA, 25 bp, Homo sapien
tccagcggcttcgtgagtgtaaacg

SEQ ID NO: 5957145 - DNA, 25 bp, Homo sapien
tttaatggcacgccagattgtgcag

SEQ ID NO: 5957146 - DNA, 25 bp, Homo sapien
tttgcctcacaatattcggctaatt

SEQ ID NO: 5957147 - DNA, 25 bp, Homo sapien
gtaggtccgttacagtcgaaaggat

SEQ ID NO: 5957148 - DNA, 25 bp, Homo sapien
gcggcattccagattctggcaccgt

SEQ ID NO: 5957149 - DNA, 25 bp, Homo sapien
ttcactacggtaaatctgggtaggt

SEQ ID NO: 5957150 - DNA, 25 bp, Homo sapien
catagacttggatagacagatggag

SEQ ID NO: 5957151 - DNA, 25 bp, Homo sapien
gtcaccgttggaaggaaccacagga

SEQ ID NO: 5957152 - DNA, 25 bp, Homo sapien
gatatattttggaggcaattcgaat

SEQ ID NO: 5957153 - DNA, 25 bp, Homo sapien
aaagcggcctccatcatctctgcag

SEQ ID NO: 5957154 - DNA, 25 bp, Homo sapien
gagtgtaaacgtgagccctgtaatc

SEQ ID NO: 5957155 - DNA, 25 bp, Homo sapien
atagagtatggaggttgcatcaagt

SEQ ID NO: 5957156 - DNA, 25 bp, Homo sapien
gacaaagtcccagagacacagaaca

SEQ ID NO: 5957157 - DNA, 25 bp, Homo sapien
cgtcacaatgtagtttgagaccatt

SEQ ID NO: 5957158 - DNA, 25 bp, Homo sapien
ttctttagcatagtcgaaggcctcg

SEQ ID NO: 5957159 - DNA, 25 bp, Homo sapien
gaaccacaggaaccaccatcgcttg

SEQ ID NO: 5957160 - DNA, 25 bp, Homo sapien
ggttaataaagacaaagttggtgtc

SEQ ID NO: 5957161 - DNA, 25 bp, Homo sapien
tattgctttaatggcacgccagatt

SEQ ID NO: 5957162 - DNA, 25 bp, Homo sapien
accagttcttccaatggataaacaa

SEQ ID NO: 5957163 - DNA, 25 bp, Homo sapien
ggtaaatctgggtaggtccgttaca

SEQ ID NO: 5957164 - DNA, 25 bp, Homo sapien
gataaacaataccgtgtaaagtgtt

SEQ ID NO: 5957165 - DNA, 25 bp, Homo sapien
cacatagaatagagtatggaggttg

SEQ ID NO: 5957166 - DNA, 25 bp, Homo sapien
ggagcacccatagacttggatagac

SEQ ID NO: 5957167 - DNA, 25 bp, Homo sapien
aacaaggacatctgggtccattcta

SEQ ID NO: 5957168 - DNA, 25 bp, Homo sapien
tgacttgatagtggaacgagactct

SEQ ID NO: 5957169 - DNA, 25 bp, Homo sapien
gtcccagagacacagaacaaacctg

SEQ ID NO: 5957170 - DNA, 25 bp, Homo sapien
attcatgagccaaagagtgcgagta

SEQ ID NO: 5957171 - DNA, 25 bp, Homo sapien
tggacaaagtcccagagacacagaa

SEQ ID NO: 5957172 - DNA, 25 bp, Homo sapien
ggcacgccagattgtgcagcggcat

SEQ ID NO: 5957173 - DNA, 25 bp, Homo sapien
ggtctgttcgagcctaacggtgtca

SEQ ID NO: 5957174 - DNA, 25 bp, Homo sapien
agagccattctagccatcataccag

SEQ ID NO: 5957175 - DNA, 25 bp, Homo sapien
ggacttccaatcgttgttgatgttt

SEQ ID NO: 5957176 - DNA, 25 bp, Homo sapien
catagtcgaaggcctcggagatggc

SEQ ID NO: 5957177 - DNA, 25 bp, Homo sapien
tggataaacaataccgtgtaaagtg

SEQ ID NO: 5957178 - DNA, 25 bp, Homo sapien
tcacaatattcggctaattcatgag

SEQ ID NO: 5957179 - DNA, 25 bp, Homo sapien
agattctggcaccgtcacaatgtag

SEQ ID NO: 5957180 - DNA, 25 bp, Homo sapien
accgtgaatatcaccgtcgtctggg

SEQ ID NO: 5957181 - DNA, 25 bp, Homo sapien
atgtcttccaaggtcaagtagtcac

SEQ ID NO: 5957182 - DNA, 25 bp, Homo sapien
ctgcttctttgccagccatgcgggc

SEQ ID NO: 5957183 - DNA, 25 bp, Homo sapien
gttggagtggtgaatgtgtctgacc

SEQ ID NO: 5957184 - DNA, 25 bp, Homo sapien
agactctaccacccattagcttaac

SEQ ID NO: 5957185 - DNA, 25 bp, Homo sapien
tgatgtcttccaaggtcaagtagtc

SEQ ID NO: 5957186 - DNA, 25 bp, Homo sapien
tctgggtaggtccgttacagtcgaa

SEQ ID NO: 5957187 - DNA, 25 bp, Homo sapien
tcatgagccaaagagtgcgagtaca

SEQ ID NO: 5957188 - DNA, 25 bp, Homo sapien
agtatggaggttgcatcaagtgagt

SEQ ID NO: 5957189 - DNA, 25 bp, Homo sapien
agagtatggaggttgcatcaagtga

SEQ ID NO: 5957190 - DNA, 25 bp, Homo sapien
gttagcagcggtgatatattttgga

SEQ ID NO: 5957191 - DNA, 25 bp, Homo sapien
acagcaattgggacttccaatcgtt

SEQ ID NO: 5957192 - DNA, 25 bp, Homo sapien
caaccaagacggacccaataggagc

SEQ ID NO: 5957193 - DNA, 25 bp, Homo sapien
ttgagacaagatcgccagtccagcg

SEQ ID NO: 5957194 - DNA, 25 bp, Homo sapien
cagccatgcgggcaacggtctgttc

SEQ ID NO: 5957195 - DNA, 25 bp, Homo sapien
cccatagacttggatagacagatgg

SEQ ID NO: 5957196 - DNA, 25 bp, Homo sapien
ttcggctaattcatgagccaaagag

SEQ ID NO: 5957197 - DNA, 25 bp, Homo sapien
aatctggtgggggcaccgtgaatat

SEQ ID NO: 5957198 - DNA, 25 bp, Homo sapien
gaacaaacctgcttctttgccagcc

SEQ ID NO: 5957199 - DNA, 25 bp, Homo sapien
tgcagcggcattccagattctggca

SEQ ID NO: 5957200 - DNA, 25 bp, Homo sapien
caaagagtgcgagtacagcaattgg

SEQ ID NO: 5957201 - DNA, 25 bp, Homo sapien
tttacaagagccattctagccatca

SEQ ID NO: 5957202 - DNA, 25 bp, Homo sapien
tgtttacaagagccattctagccat

SEQ ID NO: 5957203 - DNA, 25 bp, Homo sapien
agacagcgtcaccgatagaggcctc

SEQ ID NO: 5957204 - DNA, 25 bp, Homo sapien
gcctccatcatctctgcagttggag

SEQ ID NO: 5957205 - DNA, 25 bp, Homo sapien
gccatgcgggcaacggtctgttcga

SEQ ID NO: 5957206 - DNA, 25 bp, Homo sapien
gccttcttgacaaacttaaggttcc

SEQ ID NO: 5957207 - DNA, 25 bp, Homo sapien
tgttttctgaaatgggtggccttct

SEQ ID NO: 5957208 - DNA, 25 bp, Homo sapien
ttcaccgtagacagcgtcaccgata

SEQ ID NO: 5957209 - DNA, 25 bp, Homo sapien
gccagccatgcgggcaacggtctgt

SEQ ID NO: 5957210 - DNA, 25 bp, Homo sapien
ggtgacttgatagtggaacgagact

SEQ ID NO: 5957211 - DNA, 25 bp, Homo sapien
gacaagatcgccagtccagcggctt

SEQ ID NO: 5957212 - DNA, 25 bp, Homo sapien
gggacgtagtgtgacttgatgtctt

SEQ ID NO: 5957213 - DNA, 25 bp, Homo sapien
ttgccagccatgcgggcaacggtct

SEQ ID NO: 5957214 - DNA, 25 bp, Homo sapien
atggccaatttgactttttccaaag

SEQ ID NO: 5957215 - DNA, 25 bp, Homo sapien
gcggatagcgttgccatcaacgtcg

SEQ ID NO: 5957216 - DNA, 25 bp, Homo sapien
tccaaggtcaagtagtcaccgttgg

SEQ ID NO: 5957217 - DNA, 25 bp, Homo sapien
agcgggatgccctttgcctcacaat

SEQ ID NO: 5957218 - DNA, 25 bp, Homo sapien
gcgagtacagcaattgggacttcca

SEQ ID NO: 5957219 - DNA, 25 bp, Homo sapien
ttcccaaccaagacggacccaatag

SEQ ID NO: 5957220 - DNA, 25 bp, Homo sapien
ccagattctggcaccgtcacaatgt

SEQ ID NO: 5957221 - DNA, 25 bp, Homo sapien
ggccaatttgactttttccaaagta

SEQ ID NO: 5957222 - DNA, 25 bp, Homo sapien
tgttctttagcatagtcgaaggcct

SEQ ID NO: 5957223 - DNA, 25 bp, Homo sapien
gcaccgtcacaatgtagtttgagac

SEQ ID NO: 5957224 - DNA, 25 bp, Homo sapien
caacggtctgttcgagcctaacggt

SEQ ID NO: 5957225 - DNA, 25 bp, Homo sapien
tatcaccgtcgtctgggacgtagtg

SEQ ID NO: 5957226 - DNA, 25 bp, Homo sapien
cctgtaatcacatagaatagagtat

SEQ ID NO: 5957227 - DNA, 25 bp, Homo sapien
tggtgggggcaccgtgaatatcacc

SEQ ID NO: 5957228 - DNA, 25 bp, Homo sapien
tttgactttttccaaagtatctctg

SEQ ID NO: 5957229 - DNA, 25 bp, Homo sapien
ggtttttatttcgcggatagcgttg

SEQ ID NO: 5957230 - DNA, 25 bp, Homo sapien
gttgttttctgaaatgggtggcctt

SEQ ID NO: 5957231 - DNA, 25 bp, Homo sapien
gagaaatcaatctggtgggggcacc

SEQ ID NO: 5957232 - DNA, 25 bp, Homo sapien
catgcgggcaacggtctgttcgagc

SEQ ID NO: 5957233 - DNA, 25 bp, Homo sapien
attctggcaccgtcacaatgtagtt

SEQ ID NO: 5957234 - DNA, 25 bp, Homo sapien
ggatgccctttgcctcacaatattc

SEQ ID NO: 5957235 - DNA, 25 bp, Homo sapien
tccagagaaatcaatctggtggggg

SEQ ID NO: 5957236 - DNA, 25 bp, Homo sapien
cgtagtgtgacttgatgtcttccaa

SEQ ID NO: 5957237 - DNA, 25 bp, Homo sapien
cgcaagtcgttagcagcggtgatat

SEQ ID NO: 5957238 - DNA, 25 bp, Homo sapien
atgagccaaagagtgcgagtacagc

SEQ ID NO: 5957239 - DNA, 25 bp, Homo sapien
caaagttggtgtctgctggagactc

SEQ ID NO: 5957240 - DNA, 25 bp, Homo sapien
tgttgatgtttacaagagccattct

SEQ ID NO: 5957241 - DNA, 25 bp, Homo sapien
taggagcacccatagacttggatag

SEQ ID NO: 5957242 - DNA, 25 bp, Homo sapien
gcttctttgccagccatgcgggcaa

SEQ ID NO: 5957243 - DNA, 25 bp, Homo sapien
tgggtccattctagcggccttcagg

SEQ ID NO: 5957244 - DNA, 25 bp, Homo sapien
catattgctttaatggcacgccaga

SEQ ID NO: 5957245 - DNA, 25 bp, Homo sapien
aaacgtgagccctgtaatcacatag

SEQ ID NO: 5957246 - DNA, 25 bp, Homo sapien
cgtgaatatcaccgtcgtctgggac

SEQ ID NO: 5957247 - DNA, 25 bp, Homo sapien
tagtcgaaggcctcggagatggcca

SEQ ID NO: 5957248 - DNA, 25 bp, Homo sapien
gtgagccctgtaatcacatagaata

SEQ ID NO: 5957249 - DNA, 25 bp, Homo sapien
gccctttgcctcacaatattcggct

SEQ ID NO: 5957250 - DNA, 25 bp, Homo sapien
cgaaggcctcggagatggccaattt

SEQ ID NO: 5957251 - DNA, 25 bp, Homo sapien
catcataccagattgtctaatacca

SEQ ID NO: 5957252 - DNA, 25 bp, Homo sapien
acttccaatcgttgttgatgtttac

SEQ ID NO: 5957253 - DNA, 25 bp, Homo sapien
tgtacttcaaacccttcttaacaag

SEQ ID NO: 5957254 - DNA, 25 bp, Homo sapien
ccaatcgttgttgatgtttacaaga

SEQ ID NO: 5957255 - DNA, 25 bp, Homo sapien
ttcgagcctaacggtgtcaacatct

SEQ ID NO: 5957256 - DNA, 25 bp, Homo sapien
gtctgggacgtagtgtgacttgatg

SEQ ID NO: 5957257 - DNA, 25 bp, Homo sapien
aataggagcacccatagacttggat

SEQ ID NO: 5957258 - DNA, 25 bp, Homo sapien
accgtcgtctgggacgtagtgtgac

SEQ ID NO: 5957259 - DNA, 25 bp, Homo sapien
gttttccagagaaatcaatctggtg

SEQ ID NO: 5957260 - DNA, 25 bp, Homo sapien
ccagattgtgcagcggcattccaga

SEQ ID NO: 5957261 - DNA, 25 bp, Homo sapien
tacaccaagctttgatgcggaccag

SEQ ID NO: 5957262 - DNA, 25 bp, Homo sapien
caccgttggaaggaaccacaggaac

SEQ ID NO: 5957263 - DNA, 25 bp, Homo sapien
cttcttgacaaacttaaggttccca

SEQ ID NO: 5957264 - DNA, 25 bp, Homo sapien
gagacaagatcgccagtccagcggc

SEQ ID NO: 5957265 - DNA, 25 bp, Homo sapien
aggacatctgggtccattctagcgg

SEQ ID NO: 5957266 - DNA, 25 bp, Homo sapien
ggtggattcactacggtaaatctgg

SEQ ID NO: 5957267 - DNA, 25 bp, Homo sapien
acccaataggagcacccatagactt

SEQ ID NO: 5957268 - DNA, 25 bp, Homo sapien
actttttccaaagtatctctggtga

SEQ ID NO: 5957269 - DNA, 25 bp, Homo sapien
ccaatggataaacaataccgtgtaa

SEQ ID NO: 5957270 - DNA, 25 bp, Homo sapien
aggatgttctttagcatagtcgaag

SEQ ID NO: 5957271 - DNA, 25 bp, Homo sapien
gatgttctttagcatagtcgaaggc

SEQ ID NO: 5957272 - DNA, 25 bp, Homo sapien
accgcaagtcgttagcagcggtgat

SEQ ID NO: 5957273 - DNA, 25 bp, Homo sapien
acggtctgttcgagcctaacggtgt

SEQ ID NO: 5957274 - DNA, 25 bp, Homo sapien
ttgatagtggaacgagactctacca

SEQ ID NO: 5957275 - DNA, 25 bp, Homo sapien
tctagccatcataccagattgtcta

SEQ ID NO: 5957276 - DNA, 25 bp, Homo sapien
tccccatattgctttaatggcacgc

SEQ ID NO: 5957277 - DNA, 25 bp, Homo sapien
ccaccatcgcttgagacaagatcgc

SEQ ID NO: 5957278 - DNA, 25 bp, Homo sapien
tcggtggattcactacggtaaatct

SEQ ID NO: 5957279 - DNA, 25 bp, Homo sapien
gagtcgaagatttccccatattgct

SEQ ID NO: 5957280 - DNA, 25 bp, Homo sapien
tcgcggatagcgttgccatcaacgt

SEQ ID NO: 5957281 - DNA, 25 bp, Homo sapien
gtctaataccaccaccttgttgttt

SEQ ID NO: 5957282 - DNA, 25 bp, Homo sapien
gtgtgacttgatgtcttccaaggtc

SEQ ID NO: 5957283 - DNA, 25 bp, Homo sapien
cacagaacaaacctgcttctttgcc

SEQ ID NO: 5957284 - DNA, 25 bp, Homo sapien
caaggacatctgggtccattctagc

SEQ ID NO: 5957285 - DNA, 25 bp, Homo sapien
atcgccagtccagcggcttcgtgag

SEQ ID NO: 5957286 - DNA, 25 bp, Homo sapien
tctgttcgagcctaacggtgtcaac

SEQ ID NO: 5957287 - DNA, 25 bp, Homo sapien
taccacccattagcttaacgttgta

SEQ ID NO: 5957288 - DNA, 25 bp, Homo sapien
ccacccattagcttaacgttgtact

SEQ ID NO: 5957289 - DNA, 25 bp, Homo sapien
cagttcttccaatggataaacaata

SEQ ID NO: 5957290 - DNA, 25 bp, Homo sapien
tcttccaatggataaacaataccgt

SEQ ID NO: 5957291 - DNA, 25 bp, Homo sapien
gctaattcatgagccaaagagtgcg

SEQ ID NO: 5957292 - DNA, 25 bp, Homo sapien
tagacagatggagatggagtcgaag

SEQ ID NO: 5957293 - DNA, 25 bp, Homo sapien
ggaacgagactctaccacccattag

SEQ ID NO: 5957294 - DNA, 25 bp, Homo sapien
cactacggtaaatctgggtaggtcc

SEQ ID NO: 5957295 - DNA, 25 bp, Homo sapien
gcggcttcgtgagtgtaaacgtgag

SEQ ID NO: 5957296 - DNA, 25 bp, Homo sapien
tgtcaacatcttcaccgtagacagc

SEQ ID NO: 5957297 - DNA, 25 bp, Homo sapien
tttttccaaagtatctctggtgact

SEQ ID NO: 5957298 - DNA, 25 bp, Homo sapien
ctgctggagactctagcgggatgcc

SEQ ID NO: 5957299 - DNA, 25 bp, Homo sapien
caaagtatctctggtgacttgatag

SEQ ID NO: 5957300 - DNA, 25 bp, Homo sapien
gagactctagcgggatgccctttgc

SEQ ID NO: 5957301 - DNA, 25 bp, Homo sapien
tcataccagattgtctaataccacc

SEQ ID NO: 5957302 - DNA, 25 bp, Homo sapien
catacaccaagctttgatgcggacc

SEQ ID NO: 5957303 - DNA, 25 bp, Homo sapien
atagcgttgccatcaacgtcgacct

SEQ ID NO: 5957304 - DNA, 25 bp, Homo sapien
ttctgatggcaatctggttggacaa

SEQ ID NO: 5957305 - DNA, 25 bp, Homo sapien
ccaagctttgatgcggaccagttct

SEQ ID NO: 5957306 - DNA, 25 bp, Homo sapien
aaacctgcttctttgccagccatgc

SEQ ID NO: 5957307 - DNA, 25 bp, Homo sapien
gtgtctgctggagactctagcggga

SEQ ID NO: 5957308 - DNA, 25 bp, Homo sapien
tagtttgagaccattttccatacac

SEQ ID NO: 5957309 - DNA, 25 bp, Homo sapien
cccttcttaacaaggacatctgggt

SEQ ID NO: 5957310 - DNA, 25 bp, Homo sapien
ctctagcgggatgccctttgcctca

SEQ ID NO: 5957311 - DNA, 25 bp, Homo sapien
agcgtcaccgatagaggcctctaaa

SEQ ID NO: 5957312 - DNA, 25 bp, Homo sapien
aatcaatctggtgggggcaccgtga

SEQ ID NO: 5957313 - DNA, 25 bp, Homo sapien
gtccgttacagtcgaaaggatgttc

SEQ ID NO: 5957314 - DNA, 25 bp, Homo sapien
acttgatagtggaacgagactctac

SEQ ID NO: 5957315 - DNA, 25 bp, Homo sapien
gagtggtgaatgtgtctgaccgcaa

SEQ ID NO: 5957316 - DNA, 25 bp, Homo sapien
tcgcttgagacaagatcgccagtcc

SEQ ID NO: 5957317 - DNA, 25 bp, Homo sapien
caagagccattctagccatcatacc

SEQ ID NO: 5957318 - DNA, 25 bp, Homo sapien
agtccagcggcttcgtgagtgtaaa

SEQ ID NO: 5957319 - DNA, 25 bp, Homo sapien
gagccctgtaatcacatagaataga

SEQ ID NO: 5957320 - DNA, 25 bp, Homo sapien
gatgtttacaagagccattctagcc

SEQ ID NO: 5957321 - DNA, 25 bp, Homo sapien
tcaccgatagaggcctctaaagcgg

SEQ ID NO: 5957322 - DNA, 25 bp, Homo sapien
ttcaggttaataaagacaaagttgg

SEQ ID NO: 5957323 - DNA, 25 bp, Homo sapien
accacaggaaccaccatcgcttgag

SEQ ID NO: 5957324 - DNA, 25 bp, Homo sapien
tgggacttccaatcgttgttgatgt

SEQ ID NO: 5957325 - DNA, 25 bp, Homo sapien
agcggcctccatcatctctgcagtt

SEQ ID NO: 5957326 - DNA, 25 bp, Homo sapien
ctagcgggatgccctttgcctcaca

SEQ ID NO: 5957327 - DNA, 25 bp, Homo sapien
attgggacttccaatcgttgttgat

SEQ ID NO: 5957328 - DNA, 25 bp, Homo sapien
gtggtgaatgtgtctgaccgcaagt

SEQ ID NO: 5957329 - DNA, 25 bp, Homo sapien
caccaagctttgatgcggaccagtt

SEQ ID NO: 5957330 - DNA, 25 bp, Homo sapien
ccgtagacagcgtcaccgatagagg

SEQ ID NO: 5957331 - DNA, 25 bp, Homo sapien
tggagatggagtcgaagatttcccc

SEQ ID NO: 5957332 - DNA, 25 bp, Homo sapien
ttgcatcaagtgagttctgatggca

SEQ ID NO: 5957333 - DNA, 25 bp, Homo sapien
cgttgccatcaacgtcgacctcggt

SEQ ID NO: 5957334 - DNA, 25 bp, Homo sapien
cgtgtaaagtgttttccagagaaat

SEQ ID NO: 5957335 - DNA, 25 bp, Homo sapien
caagatcgccagtccagcggcttcg

SEQ ID NO: 5957336 - DNA, 25 bp, Homo sapien
tgcgggcaacggtctgttcgagcct

SEQ ID NO: 5957337 - DNA, 25 bp, Homo sapien
agttctgatggcaatctggttggac

SEQ ID NO: 5957338 - DNA, 25 bp, Homo sapien
gttacagtcgaaaggatgttcttta

SEQ ID NO: 5957339 - DNA, 25 bp, Homo sapien
tccattctagcggccttcaggttaa

SEQ ID NO: 5957340 - DNA, 25 bp, Homo sapien
aatttgactttttccaaagtatctc

SEQ ID NO: 5957341 - DNA, 25 bp, Homo sapien
accgtcacaatgtagtttgagacca

SEQ ID NO: 5957342 - DNA, 25 bp, Homo sapien
catcttcaccgtagacagcgtcacc

SEQ ID NO: 5957343 - DNA, 25 bp, Homo sapien
agtgagttctgatggcaatctggtt

SEQ ID NO: 5957344 - DNA, 25 bp, Homo sapien
tattttggaggcaattcgaattcag

SEQ ID NO: 5957345 - DNA, 25 bp, Homo sapien
catagaatagagtatggaggttgca

SEQ ID NO: 5957346 - DNA, 25 bp, Homo sapien
aggcctctaaagcggcctccatcat

SEQ ID NO: 5957347 - DNA, 25 bp, Homo sapien
cattccagattctggcaccgtcaca

SEQ ID NO: 5957348 - DNA, 25 bp, Homo sapien
gccaaagagtgcgagtacagcaatt

SEQ ID NO: 5957349 - DNA, 25 bp, Homo sapien
cttcgtgagtgtaaacgtgagccct

SEQ ID NO: 5957350 - DNA, 25 bp, Homo sapien
gctggagactctagcgggatgccct

SEQ ID NO: 5957351 - DNA, 25 bp, Homo sapien
agcctaacggtgtcaacatcttcac

SEQ ID NO: 5957352 - DNA, 25 bp, Homo sapien
acaaacctgcttctttgccagccat

SEQ ID NO: 5957353 - DNA, 25 bp, Homo sapien
gtgagtgtaaacgtgagccctgtaa

SEQ ID NO: 5957354 - DNA, 25 bp, Homo sapien
gttggaaggaaccacaggaaccacc

SEQ ID NO: 5957355 - DNA, 25 bp, Homo sapien
gtgcgagtacagcaattgggacttc

SEQ ID NO: 5957356 - DNA, 25 bp, Homo sapien
taattcatgagccaaagagtgcgag

SEQ ID NO: 5957357 - DNA, 25 bp, Homo sapien
tggcaccgtcacaatgtagtttgag

SEQ ID NO: 5957358 - DNA, 25 bp, Homo sapien
aatctggttggacaaagtcccagag

SEQ ID NO: 5957359 - DNA, 25 bp, Homo sapien
tgtaaagtgttttccagagaaatca

SEQ ID NO: 5957360 - DNA, 25 bp, Homo sapien
ctttgccagccatgcgggcaacggt

SEQ ID NO: 5957361 - DNA, 25 bp, Homo sapien
ttgccatcaacgtcgacctcggtgg

SEQ ID NO: 5957362 - DNA, 25 bp, Homo sapien
gtttgagaccattttccatacacca

SEQ ID NO: 5957363 - DNA, 25 bp, Homo sapien
tggcaatctggttggacaaagtccc

SEQ ID NO: 5957364 - DNA, 25 bp, Homo sapien
accaagacggacccaataggagcac

SEQ ID NO: 5957365 - DNA, 25 bp, Homo sapien
aatgtgtctgaccgcaagtcgttag

SEQ ID NO: 5957366 - DNA, 25 bp, Homo sapien
aatctgggtaggtccgttacagtcg

SEQ ID NO: 5957367 - DNA, 25 bp, Homo sapien
tctgcagttggagtggtgaatgtgt

SEQ ID NO: 5957368 - DNA, 25 bp, Homo sapien
cacccatagacttggatagacagat

SEQ ID NO: 5957369 - DNA, 25 bp, Homo sapien
gtgacttgatgtcttccaaggtcaa

SEQ ID NO: 5957370 - DNA, 25 bp, Homo sapien
agatcgccagtccagcggcttcgtg

SEQ ID NO: 5957371 - DNA, 25 bp, Homo sapien
tgaatgtgtctgaccgcaagtcgtt

SEQ ID NO: 5957372 - DNA, 25 bp, Homo sapien
tatttcgcggatagcgttgccatca

SEQ ID NO: 5957373 - DNA, 25 bp, Homo sapien
cgaaaggatgttctttagcatagtc

SEQ ID NO: 5957374 - DNA, 25 bp, Homo sapien
aggaaccacaggaaccaccatcgct

SEQ ID NO: 5957375 - DNA, 25 bp, Homo sapien
gtatctctggtgacttgatagtgga

SEQ ID NO: 5957376 - DNA, 25 bp, Homo sapien
atcacatagaatagagtatggaggt

SEQ ID NO: 5957377 - DNA, 25 bp, Homo sapien
ccgttacagtcgaaaggatgttctt

SEQ ID NO: 5957378 - DNA, 25 bp, Homo sapien
gatggcaatctggttggacaaagtc

SEQ ID NO: 5957379 - DNA, 25 bp, Homo sapien
ggcaacggtctgttcgagcctaacg

SEQ ID NO: 5957380 - DNA, 25 bp, Homo sapien
gctttaatggcacgccagattgtgc

SEQ ID NO: 5957381 - DNA, 25 bp, Homo sapien
ctaataccaccaccttgttgttttc

SEQ ID NO: 5957382 - DNA, 25 bp, Homo sapien
ttgatgtttacaagagccattctag

SEQ ID NO: 5957383 - DNA, 25 bp, Homo sapien
taggtttttatttcgcggatagcgt

SEQ ID NO: 5957384 - DNA, 25 bp, Homo sapien
ttgtctaataccaccaccttgttgt

SEQ ID NO: 5957385 - DNA, 25 bp, Homo sapien
gttgtacttcaaacccttcttaaca

SEQ ID NO: 5957386 - DNA, 25 bp, Homo sapien
taaatctgggtaggtccgttacagt

SEQ ID NO: 5957387 - DNA, 25 bp, Homo sapien
cgccagattgtgcagcggcattcca

SEQ ID NO: 5957388 - DNA, 25 bp, Homo sapien
taccaccaccttgttgttttctgaa

SEQ ID NO: 5957389 - DNA, 25 bp, Homo sapien
cgtcgacctcggtggattcactacg

SEQ ID NO: 5957390 - DNA, 25 bp, Homo sapien
cgggatgccctttgcctcacaatat

SEQ ID NO: 5957391 - DNA, 25 bp, Homo sapien
tttatttcgcggatagcgttgccat

SEQ ID NO: 5957392 - DNA, 25 bp, Homo sapien
acggacccaataggagcacccatag

SEQ ID NO: 5957393 - DNA, 25 bp, Homo sapien
agattgtgcagcggcattccagatt

SEQ ID NO: 5957394 - DNA, 25 bp, Homo sapien
aggtcaagtagtcaccgttggaagg

SEQ ID NO: 5957395 - DNA, 25 bp, Homo sapien
aagagtgcgagtacagcaattggga

SEQ ID NO: 5957396 - DNA, 25 bp, Homo sapien
ctgggacgtagtgtgacttgatgtc

SEQ ID NO: 5957397 - DNA, 25 bp, Homo sapien
tggaggttgcatcaagtgagttctg

SEQ ID NO: 5957398 - DNA, 25 bp, Homo sapien
gatagtggaacgagactctaccacc

SEQ ID NO: 5957399 - DNA, 25 bp, Homo sapien
acagcgtcaccgatagaggcctcta

SEQ ID NO: 5957400 - DNA, 25 bp, Homo sapien
tggaaggaaccacaggaaccaccat

SEQ ID NO: 5957401 - DNA, 25 bp, Homo sapien
gccatcaacgtcgacctcggtggat

SEQ ID NO: 5957402 - DNA, 25 bp, Homo sapien
tgtaatcacatagaatagagtatgg

SEQ ID NO: 5957403 - DNA, 25 bp, Homo sapien
ccaatttgactttttccaaagtatc

SEQ ID NO: 5957404 - DNA, 25 bp, Homo sapien
tacagtcgaaaggatgttctttagc

SEQ ID NO: 5957405 - DNA, 25 bp, Homo sapien
agtcgttagcagcggtgatatattt

SEQ ID NO: 5957406 - DNA, 25 bp, Homo sapien
gcatcaagtgagttctgatggcaat

SEQ ID NO: 5957407 - DNA, 25 bp, Homo sapien
ccaccaccttgttgttttctgaaat

SEQ ID NO: 5957408 - DNA, 25 bp, Homo sapien
cttcttaacaaggacatctgggtcc

SEQ ID NO: 5957409 - DNA, 25 bp, Homo sapien
gtacagcaattgggacttccaatcg

SEQ ID NO: 5957410 - DNA, 25 bp, Homo sapien
aagtgttttccagagaaatcaatct

SEQ ID NO: 5957411 - DNA, 25 bp, Homo sapien
tgtgtctgaccgcaagtcgttagca

SEQ ID NO: 5957412 - DNA, 25 bp, Homo sapien
caagacggacccaataggagcaccc

SEQ ID NO: 5957413 - DNA, 25 bp, Homo sapien
tgttcgagcctaacggtgtcaacat

SEQ ID NO: 5957414 - DNA, 25 bp, Homo sapien
cggtgatatattttggaggcaattc

SEQ ID NO: 5957415 - DNA, 25 bp, Homo sapien
tagcagcggtgatatattttggagg

SEQ ID NO: 5957416 - DNA, 25 bp, Homo sapien
aaaggatgttctttagcatagtcga

SEQ ID NO: 5957417 - DNA, 25 bp, Homo sapien
tgtgcagcggcattccagattctgg

SEQ ID NO: 5957418 - DNA, 25 bp, Homo sapien
caaacccttcttaacaaggacatct

SEQ ID NO: 5957419 - DNA, 25 bp, Homo sapien
ggaaccaccatcgcttgagacaaga

SEQ ID NO: 5957420 - DNA, 25 bp, Homo sapien
agcacccatagacttggatagacag

SEQ ID NO: 5957421 - DNA, 25 bp, Homo sapien
ccattagcttaacgttgtacttcaa

SEQ ID NO: 5957422 - DNA, 25 bp, Homo sapien
cagcggcttcgtgagtgtaaacgtg

SEQ ID NO: 5957423 - DNA, 25 bp, Homo sapien
aagtatctctggtgacttgatagtg

SEQ ID NO: 5957424 - DNA, 25 bp, Homo sapien
ggctggttttgagaatactcagcca

SEQ ID NO: 5957425 - DNA, 25 bp, Homo sapien
catttgaacaaaatgaaatcctaca

SEQ ID NO: 5957426 - DNA, 25 bp, Homo sapien
tttagtgtatgcggatggtcccaag

SEQ ID NO: 5957427 - DNA, 25 bp, Homo sapien
cgatcattacagaatcttcatcacc

SEQ ID NO: 5957428 - DNA, 25 bp, Homo sapien
aatggcaatacggaaactacgatgg

SEQ ID NO: 5957429 - DNA, 25 bp, Homo sapien
cgcgaaggaaaccaatgataatagc

SEQ ID NO: 5957430 - DNA, 25 bp, Homo sapien
atcgggggctccatctcatctgcat

SEQ ID NO: 5957431 - DNA, 25 bp, Homo sapien
ggcaataggaacacaacgccttacc

SEQ ID NO: 5957432 - DNA, 25 bp, Homo sapien
atacgagactcaggctacgcgacac

SEQ ID NO: 5957433 - DNA, 25 bp, Homo sapien
aagaaagctgctgcttcagcaggtg

SEQ ID NO: 5957434 - DNA, 25 bp, Homo sapien
aactacgatgggagacactttgggt

SEQ ID NO: 5957435 - DNA, 25 bp, Homo sapien
tttccattaagggtatcaggccttc

SEQ ID NO: 5957436 - DNA, 25 bp, Homo sapien
tacggcggtgataatgcttccccaa

SEQ ID NO: 5957437 - DNA, 25 bp, Homo sapien
gaacactctacaacaacgtatcaat

SEQ ID NO: 5957438 - DNA, 25 bp, Homo sapien
cagtgcaacgaatttagtgtatgcg

SEQ ID NO: 5957439 - DNA, 25 bp, Homo sapien
aatgtctataatgatgctatacgag

SEQ ID NO: 5957440 - DNA, 25 bp, Homo sapien
aatctggattctgtactacggcggt

SEQ ID NO: 5957441 - DNA, 25 bp, Homo sapien
atttttcaaatggcaatacggaaac

SEQ ID NO: 5957442 - DNA, 25 bp, Homo sapien
accacatctattgcagtggcatttg

SEQ ID NO: 5957443 - DNA, 25 bp, Homo sapien
agaccaactcctcgtaaaccttcac

SEQ ID NO: 5957444 - DNA, 25 bp, Homo sapien
acttgaacactctacaacaacgtat

SEQ ID NO: 5957445 - DNA, 25 bp, Homo sapien
cgtatcaatagcgcaagcaacgcga

SEQ ID NO: 5957446 - DNA, 25 bp, Homo sapien
ccaatttctaattatttgttcttta

SEQ ID NO: 5957447 - DNA, 25 bp, Homo sapien
aaattttatgccgatcctttcgcta

SEQ ID NO: 5957448 - DNA, 25 bp, Homo sapien
ttacagaatcttcatcaccacatct

SEQ ID NO: 5957449 - DNA, 25 bp, Homo sapien
aatacgttcgatactgatttttcaa

SEQ ID NO: 5957450 - DNA, 25 bp, Homo sapien
gaaatcctacaagtctctgacattg

SEQ ID NO: 5957451 - DNA, 25 bp, Homo sapien
agacactttgggtctgtatagcgat

SEQ ID NO: 5957452 - DNA, 25 bp, Homo sapien
aagctgctgcttcagcaggtgtcat

SEQ ID NO: 5957453 - DNA, 25 bp, Homo sapien
ccgttaatcttcacttgaacactct

SEQ ID NO: 5957454 - DNA, 25 bp, Homo sapien
ctccatctcatctgcatccaccaat

SEQ ID NO: 5957455 - DNA, 25 bp, Homo sapien
aaatacttcagaagccgttaatctt

SEQ ID NO: 5957456 - DNA, 25 bp, Homo sapien
tagtataccaatttctaattatttg

SEQ ID NO: 5957457 - DNA, 25 bp, Homo sapien
cctcgtaaaccttcacgtatggcta

SEQ ID NO: 5957458 - DNA, 25 bp, Homo sapien
ttctgtactacggcggtgataatgc

SEQ ID NO: 5957459 - DNA, 25 bp, Homo sapien
ttctacggcattggctggttttgag

SEQ ID NO: 5957460 - DNA, 25 bp, Homo sapien
gattctgtactacggcggtgataat

SEQ ID NO: 5957461 - DNA, 25 bp, Homo sapien
ttgttctttaatgctgttctattgt

SEQ ID NO: 5957462 - DNA, 25 bp, Homo sapien
ataatgtctataatgatgctatacg

SEQ ID NO: 5957463 - DNA, 25 bp, Homo sapien
caagcaattatgttcaactaatcga

SEQ ID NO: 5957464 - DNA, 25 bp, Homo sapien
cgaaggaaaccaatgataatagcaa

SEQ ID NO: 5957465 - DNA, 25 bp, Homo sapien
tccccaaccaatagatggattgatt

SEQ ID NO: 5957466 - DNA, 25 bp, Homo sapien
tgcttccccaaccaatagatggatt

SEQ ID NO: 5957467 - DNA, 25 bp, Homo sapien
ttcaactaatcgatggtccagaaga

SEQ ID NO: 5957468 - DNA, 25 bp, Homo sapien
actacggcggtgataatgcttcccc

SEQ ID NO: 5957469 - DNA, 25 bp, Homo sapien
ttgaaggcagatggtggaaggcaag

SEQ ID NO: 5957470 - DNA, 25 bp, Homo sapien
tgattcgttttccattaagggtatc

SEQ ID NO: 5957471 - DNA, 25 bp, Homo sapien
tatcttctacggcattggctggttt

SEQ ID NO: 5957472 - DNA, 25 bp, Homo sapien
gacacagtttgatggatatccacag

SEQ ID NO: 5957473 - DNA, 25 bp, Homo sapien
ggttttgagaatactcagccaaata

SEQ ID NO: 5957474 - DNA, 25 bp, Homo sapien
gcagcaaccttctcacacaaattat

SEQ ID NO: 5957475 - DNA, 25 bp, Homo sapien
cagaagccgttaatcttcacttgaa

SEQ ID NO: 5957476 - DNA, 25 bp, Homo sapien
gatatcggtgatgataatttcattt

SEQ ID NO: 5957477 - DNA, 25 bp, Homo sapien
aactcctcgtaaaccttcacgtatg

SEQ ID NO: 5957478 - DNA, 25 bp, Homo sapien
gcgacacagtttgatggatatccac

SEQ ID NO: 5957479 - DNA, 25 bp, Homo sapien
acgagactcaggctacgcgacacag

SEQ ID NO: 5957480 - DNA, 25 bp, Homo sapien
gcaagcaacgcgaaggaaaccaatg

SEQ ID NO: 5957481 - DNA, 25 bp, Homo sapien
aacgcgaaggaaaccaatgataata

SEQ ID NO: 5957482 - DNA, 25 bp, Homo sapien
aaaccaatgataatagcaataatca

SEQ ID NO: 5957483 - DNA, 25 bp, Homo sapien
agaagggcaaacggtgaaacaggta

SEQ ID NO: 5957484 - DNA, 25 bp, Homo sapien
tgtacccatacgacgctgatgacga

SEQ ID NO: 5957485 - DNA, 25 bp, Homo sapien
cgttcgatactgatttttcaaatgg

SEQ ID NO: 5957486 - DNA, 25 bp, Homo sapien
actgtacccatacgacgctgatgac

SEQ ID NO: 5957487 - DNA, 25 bp, Homo sapien
catttacaaggcaaaagcactgtac

SEQ ID NO: 5957488 - DNA, 25 bp, Homo sapien
caatactaatataggtaatacgttc

SEQ ID NO: 5957489 - DNA, 25 bp, Homo sapien
cagcaggtgtcatcttactttccat

SEQ ID NO: 5957490 - DNA, 25 bp, Homo sapien
gtcgatcattacagaatcttcatca

SEQ ID NO: 5957491 - DNA, 25 bp, Homo sapien
aagggtatcaggccttcgccattag

SEQ ID NO: 5957492 - DNA, 25 bp, Homo sapien
tacaaggcaaaagcactgtacccat

SEQ ID NO: 5957493 - DNA, 25 bp, Homo sapien
gtcgaagaggcaataggaacacaac

SEQ ID NO: 5957494 - DNA, 25 bp, Homo sapien
ctacgatgggagacactttgggtct

SEQ ID NO: 5957495 - DNA, 25 bp, Homo sapien
tgtatcttctacggcattggctggt

SEQ ID NO: 5957496 - DNA, 25 bp, Homo sapien
ataatgcttccccaaccaatagatg

SEQ ID NO: 5957497 - DNA, 25 bp, Homo sapien
tccacagcagcaaccttctcacaca

SEQ ID NO: 5957498 - DNA, 25 bp, Homo sapien
ttgaacactctacaacaacgtatca

SEQ ID NO: 5957499 - DNA, 25 bp, Homo sapien
aggaacacaacgccttaccaaaata

SEQ ID NO: 5957500 - DNA, 25 bp, Homo sapien
attgttttgatttagtcgatcatta

SEQ ID NO: 5957501 - DNA, 25 bp, Homo sapien
atggtccagaagaaatgcatcgtta

SEQ ID NO: 5957502 - DNA, 25 bp, Homo sapien
gttaatcttcacttgaacactctac

SEQ ID NO: 5957503 - DNA, 25 bp, Homo sapien
cgccattagagaattctcttcatag

SEQ ID NO: 5957504 - DNA, 25 bp, Homo sapien
taatagcaataatcaaaccaatact

SEQ ID NO: 5957505 - DNA, 25 bp, Homo sapien
tatagtataccaatttctaattatt

SEQ ID NO: 5957506 - DNA, 25 bp, Homo sapien
accttctcacacaaattatgtatct

SEQ ID NO: 5957507 - DNA, 25 bp, Homo sapien
atactcagccaaatacttcagaagc

SEQ ID NO: 5957508 - DNA, 25 bp, Homo sapien
tacggaaactacgatgggagacact

SEQ ID NO: 5957509 - DNA, 25 bp, Homo sapien
ttctaattatttgttctttaatgct

SEQ ID NO: 5957510 - DNA, 25 bp, Homo sapien
gcaagaagggcaaacggtgaaacag

SEQ ID NO: 5957511 - DNA, 25 bp, Homo sapien
ctgcttcagcaggtgtcatcttact

SEQ ID NO: 5957512 - DNA, 25 bp, Homo sapien
gagaatactcagccaaatacttcag

SEQ ID NO: 5957513 - DNA, 25 bp, Homo sapien
catcaaagataagaccaactcctcg

SEQ ID NO: 5957514 - DNA, 25 bp, Homo sapien
cagcagcaaccttctcacacaaatt

SEQ ID NO: 5957515 - DNA, 25 bp, Homo sapien
tgggtctgtatagcgatatcggtga

SEQ ID NO: 5957516 - DNA, 25 bp, Homo sapien
atagcaataatcaaaccaatactaa

SEQ ID NO: 5957517 - DNA, 25 bp, Homo sapien
tcggtgatgataatttcatttacaa

SEQ ID NO: 5957518 - DNA, 25 bp, Homo sapien
agggcaaacggtgaaacaggtatta

SEQ ID NO: 5957519 - DNA, 25 bp, Homo sapien
tacaacaacgtatcaatagcgcaag

SEQ ID NO: 5957520 - DNA, 25 bp, Homo sapien
gagactcaggctacgcgacacagtt

SEQ ID NO: 5957521 - DNA, 25 bp, Homo sapien
gaaagctgctgcttcagcaggtgtc

SEQ ID NO: 5957522 - DNA, 25 bp, Homo sapien
tcacacaaattatgtatcttctacg

SEQ ID NO: 5957523 - DNA, 25 bp, Homo sapien
agataagaccaactcctcgtaaacc

SEQ ID NO: 5957524 - DNA, 25 bp, Homo sapien
atcatcaatttctttggcaattgta

SEQ ID NO: 5957525 - DNA, 25 bp, Homo sapien
acactttgggtctgtatagcgatat

SEQ ID NO: 5957526 - DNA, 25 bp, Homo sapien
ttcgatactgatttttcaaatggca

SEQ ID NO: 5957527 - DNA, 25 bp, Homo sapien
cccaaccaatagatggattgattcg

SEQ ID NO: 5957528 - DNA, 25 bp, Homo sapien
tatcaatagcgcaagcaacgcgaag

SEQ ID NO: 5957529 - DNA, 25 bp, Homo sapien
tgctgcttcagcaggtgtcatctta

SEQ ID NO: 5957530 - DNA, 25 bp, Homo sapien
cgggggctccatctcatctgcatcc

SEQ ID NO: 5957531 - DNA, 25 bp, Homo sapien
gtcatcttactttccatcataaatt

SEQ ID NO: 5957532 - DNA, 25 bp, Homo sapien
actttccatcataaatttaatctgg

SEQ ID NO: 5957533 - DNA, 25 bp, Homo sapien
atgataatttcatttacaaggcaaa

SEQ ID NO: 5957534 - DNA, 25 bp, Homo sapien
cattggctggttttgagaatactca

SEQ ID NO: 5957535 - DNA, 25 bp, Homo sapien
aacagtgcaacgaatttagtgtatg

SEQ ID NO: 5957536 - DNA, 25 bp, Homo sapien
ggctaccgaccattcttttaaaatg

SEQ ID NO: 5957537 - DNA, 25 bp, Homo sapien
attagagaattctcttcatagagct

SEQ ID NO: 5957538 - DNA, 25 bp, Homo sapien
aaaccaatactaatataggtaatac

SEQ ID NO: 5957539 - DNA, 25 bp, Homo sapien
tataatgatgctatacgagactcag

SEQ ID NO: 5957540 - DNA, 25 bp, Homo sapien
atcgatggtccagaagaaatgcatc

SEQ ID NO: 5957541 - DNA, 25 bp, Homo sapien
attttatgccgatcctttcgctata

SEQ ID NO: 5957542 - DNA, 25 bp, Homo sapien
taatttcatttacaaggcaaaagca

SEQ ID NO: 5957543 - DNA, 25 bp, Homo sapien
gtgtcatcttactttccatcataaa

SEQ ID NO: 5957544 - DNA, 25 bp, Homo sapien
cgtgggtcatcgccatcgggggctc

SEQ ID NO: 5957545 - DNA, 25 bp, Homo sapien
ttaagggtatcaggccttcgccatt

SEQ ID NO: 5957546 - DNA, 25 bp, Homo sapien
tgaaaaaattttatgccgatccttt

SEQ ID NO: 5957547 - DNA, 25 bp, Homo sapien
tgaacaaaatgaaatcctacaagtc

SEQ ID NO: 5957548 - DNA, 25 bp, Homo sapien
tagtgtatgcggatggtcccaagaa

SEQ ID NO: 5957549 - DNA, 25 bp, Homo sapien
gtgtatgcggatggtcccaagaaag

SEQ ID NO: 5957550 - DNA, 25 bp, Homo sapien
gaaggcagatggtggaaggcaagaa

SEQ ID NO: 5957551 - DNA, 25 bp, Homo sapien
atacttcagaagccgttaatcttca

SEQ ID NO: 5957552 - DNA, 25 bp, Homo sapien
tcacgtatggctaccgaccattctt

SEQ ID NO: 5957553 - DNA, 25 bp, Homo sapien
cccatacgacgctgatgacgatgat

SEQ ID NO: 5957554 - DNA, 25 bp, Homo sapien
tgggagacactttgggtctgtatag

SEQ ID NO: 5957555 - DNA, 25 bp, Homo sapien
tccaccaatgaatccttcccacgtt

SEQ ID NO: 5957556 - DNA, 25 bp, Homo sapien
actaatataggtaatacgttcgata

SEQ ID NO: 5957557 - DNA, 25 bp, Homo sapien
tgccgatcctttcgctatatcatca

SEQ ID NO: 5957558 - DNA, 25 bp, Homo sapien
aaataatgtctataatgatgctata

SEQ ID NO: 5957559 - DNA, 25 bp, Homo sapien
tcagccaaatacttcagaagccgtt

SEQ ID NO: 5957560 - DNA, 25 bp, Homo sapien
ctacggcattggctggttttgagaa

SEQ ID NO: 5957561 - DNA, 25 bp, Homo sapien
atcaggccttcgccattagagaatt

SEQ ID NO: 5957562 - DNA, 25 bp, Homo sapien
tgttctattgttttgatttagtcga

SEQ ID NO: 5957563 - DNA, 25 bp, Homo sapien
gcaattgtatcgtgggtcatcgcca

SEQ ID NO: 5957564 - DNA, 25 bp, Homo sapien
ttgtatcgtgggtcatcgccatcgg

SEQ ID NO: 5957565 - DNA, 25 bp, Homo sapien
caaggcaaaagcactgtacccatac

SEQ ID NO: 5957566 - DNA, 25 bp, Homo sapien
atcgtgggtcatcgccatcgggggc

SEQ ID NO: 5957567 - DNA, 25 bp, Homo sapien
atcgccatcgggggctccatctcat

SEQ ID NO: 5957568 - DNA, 25 bp, Homo sapien
taagaccaactcctcgtaaaccttc

SEQ ID NO: 5957569 - DNA, 25 bp, Homo sapien
gctgctgcttcagcaggtgtcatct

SEQ ID NO: 5957570 - DNA, 25 bp, Homo sapien
gaaacaggtattattccaagcaatt

SEQ ID NO: 5957571 - DNA, 25 bp, Homo sapien
cttacgaaatctcatttgaacaaaa

SEQ ID NO: 5957572 - DNA, 25 bp, Homo sapien
cggtgaaacaggtattattccaagc

SEQ ID NO: 5957573 - DNA, 25 bp, Homo sapien
aatgcttccccaaccaatagatgga

SEQ ID NO: 5957574 - DNA, 25 bp, Homo sapien
taatataggtaatacgttcgatact

SEQ ID NO: 5957575 - DNA, 25 bp, Homo sapien
ccaagaaagctgctgcttcagcagg

SEQ ID NO: 5957576 - DNA, 25 bp, Homo sapien
caggtattattccaagcaattatgt

SEQ ID NO: 5957577 - DNA, 25 bp, Homo sapien
tcaaaccaatactaatataggtaat

SEQ ID NO: 5957578 - DNA, 25 bp, Homo sapien
tcttcatcaccacatctattgcagt

SEQ ID NO: 5957579 - DNA, 25 bp, Homo sapien
cgaatttagtgtatgcggatggtcc

SEQ ID NO: 5957580 - DNA, 25 bp, Homo sapien
gtcaatatcatcaaagataagacca

SEQ ID NO: 5957581 - DNA, 25 bp, Homo sapien
ccaatgaatccttcccacgttttac

SEQ ID NO: 5957582 - DNA, 25 bp, Homo sapien
gatgctatacgagactcaggctacg

SEQ ID NO: 5957583 - DNA, 25 bp, Homo sapien
gatatccacagcagcaaccttctca

SEQ ID NO: 5957584 - DNA, 25 bp, Homo sapien
aaaaattttatgccgatcctttcgc

SEQ ID NO: 5957585 - DNA, 25 bp, Homo sapien
tatcggtgatgataatttcatttac

SEQ ID NO: 5957586 - DNA, 25 bp, Homo sapien
ctttcgctatatcatcaatttcttt

SEQ ID NO: 5957587 - DNA, 25 bp, Homo sapien
ttcatagagctcgtcgaagaggcaa

SEQ ID NO: 5957588 - DNA, 25 bp, Homo sapien
aagcactgtacccatacgacgctga

SEQ ID NO: 5957589 - DNA, 25 bp, Homo sapien
gtatgcggatggtcccaagaaagct

SEQ ID NO: 5957590 - DNA, 25 bp, Homo sapien
caaacagtgcaacgaatttagtgta

SEQ ID NO: 5957591 - DNA, 25 bp, Homo sapien
ttttgagaatactcagccaaatact

SEQ ID NO: 5957592 - DNA, 25 bp, Homo sapien
gcagtggcatttgtgtataatacaa

SEQ ID NO: 5957593 - DNA, 25 bp, Homo sapien
ggtattattccaagcaattatgttc

SEQ ID NO: 5957594 - DNA, 25 bp, Homo sapien
atgatgcttacgaaatctcatttga

SEQ ID NO: 5957595 - DNA, 25 bp, Homo sapien
accaatactaatataggtaatacgt

SEQ ID NO: 5957596 - DNA, 25 bp, Homo sapien
acggcattggctggttttgagaata

SEQ ID NO: 5957597 - DNA, 25 bp, Homo sapien
ctacgcgacacagtttgatggatat

SEQ ID NO: 5957598 - DNA, 25 bp, Homo sapien
gatggatatccacagcagcaacctt

SEQ ID NO: 5957599 - DNA, 25 bp, Homo sapien
gaagccgttaatcttcacttgaaca

SEQ ID NO: 5957600 - DNA, 25 bp, Homo sapien
gttctttaatgctgttctattgttt

SEQ ID NO: 5957601 - DNA, 25 bp, Homo sapien
acaagtctctgacattgaaggcaga

SEQ ID NO: 5957602 - DNA, 25 bp, Homo sapien
ataatcaaaccaatactaatatagg

SEQ ID NO: 5957603 - DNA, 25 bp, Homo sapien
ccttcgccattagagaattctcttc

SEQ ID NO: 5957604 - DNA, 25 bp, Homo sapien
tcaccacatctattgcagtggcatt

SEQ ID NO: 5957605 - DNA, 25 bp, Homo sapien
caatatcatcaaagataagaccaac

SEQ ID NO: 5957606 - DNA, 25 bp, Homo sapien
aaagataagaccaactcctcgtaaa

SEQ ID NO: 5957607 - DNA, 25 bp, Homo sapien
ggtcatcgccatcgggggctccatc

SEQ ID NO: 5957608 - DNA, 25 bp, Homo sapien
ggatggtcccaagaaagctgctgct

SEQ ID NO: 5957609 - DNA, 25 bp, Homo sapien
ttcgctatatcatcaatttctttgg

SEQ ID NO: 5957610 - DNA, 25 bp, Homo sapien
tacgacgctgatgacgatgatgctt

SEQ ID NO: 5957611 - DNA, 25 bp, Homo sapien
ctaccgaccattcttttaaaatgaa

SEQ ID NO: 5957612 - DNA, 25 bp, Homo sapien
ttcgccattagagaattctcttcat

SEQ ID NO: 5957613 - DNA, 25 bp, Homo sapien
catcttactttccatcataaattta

SEQ ID NO: 5957614 - DNA, 25 bp, Homo sapien
atgcggatggtcccaagaaagctgc

SEQ ID NO: 5957615 - DNA, 25 bp, Homo sapien
tcctacaagtctctgacattgaagg

SEQ ID NO: 5957616 - DNA, 25 bp, Homo sapien
cacagcagcaaccttctcacacaaa

SEQ ID NO: 5957617 - DNA, 25 bp, Homo sapien
gtctctgacattgaaggcagatggt

SEQ ID NO: 5957618 - DNA, 25 bp, Homo sapien
tcaaagataagaccaactcctcgta

SEQ ID NO: 5957619 - DNA, 25 bp, Homo sapien
ggtctgtatagcgatatcggtgatg

SEQ ID NO: 5957620 - DNA, 25 bp, Homo sapien
cattgaaggcagatggtggaaggca

SEQ ID NO: 5957621 - DNA, 25 bp, Homo sapien
gatcctttcgctatatcatcaattt

SEQ ID NO: 5957622 - DNA, 25 bp, Homo sapien
caacaacgtatcaatagcgcaagca

SEQ ID NO: 5957623 - DNA, 25 bp, Homo sapien
tttgaacaaaatgaaatcctacaag

SEQ ID NO: 5957624 - DNA, 25 bp, Homo sapien
acaacgtatcaatagcgcaagcaac

SEQ ID NO: 5957625 - DNA, 25 bp, Homo sapien
acgcgacacagtttgatggatatcc

SEQ ID NO: 5957626 - DNA, 25 bp, Homo sapien
ccaaatacttcagaagccgttaatc

SEQ ID NO: 5957627 - DNA, 25 bp, Homo sapien
atttcatttacaaggcaaaagcact

SEQ ID NO: 5957628 - DNA, 25 bp, Homo sapien
tacgaaatctcatttgaacaaaatg

SEQ ID NO: 5957629 - DNA, 25 bp, Homo sapien
tttaatgctgttctattgttttgat

SEQ ID NO: 5957630 - DNA, 25 bp, Homo sapien
atgacgatgatgcttacgaaatctc

SEQ ID NO: 5957631 - DNA, 25 bp, Homo sapien
atttctaattatttgttctttaatg

SEQ ID NO: 5957632 - DNA, 25 bp, Homo sapien
tttgggtctgtatagcgatatcggt

SEQ ID NO: 5957633 - DNA, 25 bp, Homo sapien
ccttaccaaaataatgtctataatg

SEQ ID NO: 5957634 - DNA, 25 bp, Homo sapien
atactaatataggtaatacgttcga

SEQ ID NO: 5957635 - DNA, 25 bp, Homo sapien
tcccaagaaagctgctgcttcagca

SEQ ID NO: 5957636 - DNA, 25 bp, Homo sapien
caataatcaaaccaatactaatata

SEQ ID NO: 5957637 - DNA, 25 bp, Homo sapien
catctgcatccaccaatgaatcctt

SEQ ID NO: 5957638 - DNA, 25 bp, Homo sapien
atggattgattcgttttccattaag

SEQ ID NO: 5957639 - DNA, 25 bp, Homo sapien
tcataaatttaatctggattctgta

SEQ ID NO: 5957640 - DNA, 25 bp, Homo sapien
cgccttaccaaaataatgtctataa

SEQ ID NO: 5957641 - DNA, 25 bp, Homo sapien
acaaattatgtatcttctacggcat

SEQ ID NO: 5957642 - DNA, 25 bp, Homo sapien
atgataatagcaataatcaaaccaa

SEQ ID NO: 5957643 - DNA, 25 bp, Homo sapien
attatgtatcttctacggcattggc

SEQ ID NO: 5957644 - DNA, 25 bp, Homo sapien
tatgttcaactaatcgatggtccag

SEQ ID NO: 5957645 - DNA, 25 bp, Homo sapien
tttacaaggcaaaagcactgtaccc

SEQ ID NO: 5957646 - DNA, 25 bp, Homo sapien
ttctattgttttgatttagtcgatc

SEQ ID NO: 5957647 - DNA, 25 bp, Homo sapien
gcttcagcaggtgtcatcttacttt

SEQ ID NO: 5957648 - DNA, 25 bp, Homo sapien
gcaacgcgaaggaaaccaatgataa

SEQ ID NO: 5957649 - DNA, 25 bp, Homo sapien
tagagaattctcttcatagagctcg

SEQ ID NO: 5957650 - DNA, 25 bp, Homo sapien
gtgaaacaggtattattccaagcaa

SEQ ID NO: 5957651 - DNA, 25 bp, Homo sapien
ttttgatttagtcgatcattacaga

SEQ ID NO: 5957652 - DNA, 25 bp, Homo sapien
atagatggattgattcgttttccat

SEQ ID NO: 5957653 - DNA, 25 bp, Homo sapien
tccattaagggtatcaggccttcgc

SEQ ID NO: 5957654 - DNA, 25 bp, Homo sapien
ggcaaacggtgaaacaggtattatt

SEQ ID NO: 5957655 - DNA, 25 bp, Homo sapien
gcaatacggaaactacgatgggaga

SEQ ID NO: 5957656 - DNA, 25 bp, Homo sapien
ttgagaatactcagccaaatacttc

SEQ ID NO: 5957657 - DNA, 25 bp, Homo sapien
ggtgataatgcttccccaaccaata

SEQ ID NO: 5957658 - DNA, 25 bp, Homo sapien
aagtctctgacattgaaggcagatg

SEQ ID NO: 5957659 - DNA, 25 bp, Homo sapien
tggatatccacagcagcaaccttct

SEQ ID NO: 5957660 - DNA, 25 bp, Homo sapien
aaatttaatctggattctgtactac

SEQ ID NO: 5957661 - DNA, 25 bp, Homo sapien
caatagatggattgattcgttttcc

SEQ ID NO: 5957662 - DNA, 25 bp, Homo sapien
ggtggaaggcaagaagggcaaacgg

SEQ ID NO: 5957663 - DNA, 25 bp, Homo sapien
tagagctcgtcgaagaggcaatagg

SEQ ID NO: 5957664 - DNA, 25 bp, Homo sapien
aatacaaacagtgcaacgaatttag

SEQ ID NO: 5957665 - DNA, 25 bp, Homo sapien
aatgaaaaaattttatgccgatcct

SEQ ID NO: 5957666 - DNA, 25 bp, Homo sapien
aacgccttaccaaaataatgtctat

SEQ ID NO: 5957667 - DNA, 25 bp, Homo sapien
gtataatacaaacagtgcaacgaat

SEQ ID NO: 5957668 - DNA, 25 bp, Homo sapien
caaatggcaatacggaaactacgat

SEQ ID NO: 5957669 - DNA, 25 bp, Homo sapien
gtatggctaccgaccattcttttaa

SEQ ID NO: 5957670 - DNA, 25 bp, Homo sapien
aatcttcatcaccacatctattgca

SEQ ID NO: 5957671 - DNA, 25 bp, Homo sapien
ccaactcctcgtaaaccttcacgta

SEQ ID NO: 5957672 - DNA, 25 bp, Homo sapien
atataggtaatacgttcgatactga

SEQ ID NO: 5957673 - DNA, 25 bp, Homo sapien
acagaatcttcatcaccacatctat

SEQ ID NO: 5957674 - DNA, 25 bp, Homo sapien
cgaaatctcatttgaacaaaatgaa

SEQ ID NO: 5957675 - DNA, 25 bp, Homo sapien
ctcctcgtaaaccttcacgtatggc

SEQ ID NO: 5957676 - DNA, 25 bp, Homo sapien
catacgacgctgatgacgatgatgc

SEQ ID NO: 5957677 - DNA, 25 bp, Homo sapien
tctcttcatagagctcgtcgaagag

SEQ ID NO: 5957678 - DNA, 25 bp, Homo sapien
tcgttttccattaagggtatcaggc

SEQ ID NO: 5957679 - DNA, 25 bp, Homo sapien
tggcatttgtgtataatacaaacag

SEQ ID NO: 5957680 - DNA, 25 bp, Homo sapien
ttaccaaaataatgtctataatgat

SEQ ID NO: 5957681 - DNA, 25 bp, Homo sapien
gtaaaccttcacgtatggctaccga

SEQ ID NO: 5957682 - DNA, 25 bp, Homo sapien
tgatttttcaaatggcaatacggaa

SEQ ID NO: 5957683 - DNA, 25 bp, Homo sapien
gcaaaagcactgtacccatacgacg

SEQ ID NO: 5957684 - DNA, 25 bp, Homo sapien
gagaattctcttcatagagctcgtc

SEQ ID NO: 5957685 - DNA, 25 bp, Homo sapien
caaaatgaaatcctacaagtctctg

SEQ ID NO: 5957686 - DNA, 25 bp, Homo sapien
atctcatctgcatccaccaatgaat

SEQ ID NO: 5957687 - DNA, 25 bp, Homo sapien
gcgcaagcaacgcgaaggaaaccaa

SEQ ID NO: 5957688 - DNA, 25 bp, Homo sapien
actttgggtctgtatagcgatatcg

SEQ ID NO: 5957689 - DNA, 25 bp, Homo sapien
catctattgcagtggcatttgtgta

SEQ ID NO: 5957690 - DNA, 25 bp, Homo sapien
gggtatcaggccttcgccattagag

SEQ ID NO: 5957691 - DNA, 25 bp, Homo sapien
tcgtaaaccttcacgtatggctacc

SEQ ID NO: 5957692 - DNA, 25 bp, Homo sapien
ttgatggatatccacagcagcaacc

SEQ ID NO: 5957693 - DNA, 25 bp, Homo sapien
taatgatgctatacgagactcaggc

SEQ ID NO: 5957694 - DNA, 25 bp, Homo sapien
ctggttttgagaatactcagccaaa

SEQ ID NO: 5957695 - DNA, 25 bp, Homo sapien
aggtaatacgttcgatactgatttt

SEQ ID NO: 5957696 - DNA, 25 bp, Homo sapien
tctgtatagcgatatcggtgatgat

SEQ ID NO: 5957697 - DNA, 25 bp, Homo sapien
aacggtgaaacaggtattattccaa

SEQ ID NO: 5957698 - DNA, 25 bp, Homo sapien
cacatctattgcagtggcatttgtg

SEQ ID NO: 5957699 - DNA, 25 bp, Homo sapien
tgatgataatttcatttacaaggca

SEQ ID NO: 5957700 - DNA, 25 bp, Homo sapien
aaattatgtatcttctacggcattg

SEQ ID NO: 5957701 - DNA, 25 bp, Homo sapien
gttttccattaagggtatcaggcct

SEQ ID NO: 5957702 - DNA, 25 bp, Homo sapien
atgctgttctattgttttgatttag

SEQ ID NO: 5957703 - DNA, 25 bp, Homo sapien
agccgttaatcttcacttgaacact

SEQ ID NO: 5957704 - DNA, 25 bp, Homo sapien
ggaaaccaatgataatagcaataat

SEQ ID NO: 5957705 - DNA, 25 bp, Homo sapien
aatcaaaccaatactaatataggta

SEQ ID NO: 5957706 - DNA, 25 bp, Homo sapien
acaacgccttaccaaaataatgtct

SEQ ID NO: 5957707 - DNA, 25 bp, Homo sapien
tatccacagcagcaaccttctcaca

SEQ ID NO: 5957708 - DNA, 25 bp, Homo sapien
ggcattggctggttttgagaatact

SEQ ID NO: 5957709 - DNA, 25 bp, Homo sapien
gaaggcaagaagggcaaacggtgaa

SEQ ID NO: 5957710 - DNA, 25 bp, Homo sapien
tctgcatccaccaatgaatccttcc

SEQ ID NO: 5957711 - DNA, 25 bp, Homo sapien
cattaagggtatcaggccttcgcca

SEQ ID NO: 5957712 - DNA, 25 bp, Homo sapien
acactctacaacaacgtatcaatag

SEQ ID NO: 5957713 - DNA, 25 bp, Homo sapien
actctacaacaacgtatcaatagcg

SEQ ID NO: 5957714 - DNA, 25 bp, Homo sapien
tctacaacaacgtatcaatagcgca

SEQ ID NO: 5957715 - DNA, 25 bp, Homo sapien
ggattgattcgttttccattaaggg

SEQ ID NO: 5957716 - DNA, 25 bp, Homo sapien
gctgatgacgatgatgcttacgaaa

SEQ ID NO: 5957717 - DNA, 25 bp, Homo sapien
tagtcgatcattacagaatcttcat

SEQ ID NO: 5957718 - DNA, 25 bp, Homo sapien
gaattctcttcatagagctcgtcga

SEQ ID NO: 5957719 - DNA, 25 bp, Homo sapien
tggcaattgtatcgtgggtcatcgc

SEQ ID NO: 5957720 - DNA, 25 bp, Homo sapien
ctaattatttgttctttaatgctgt

SEQ ID NO: 5957721 - DNA, 25 bp, Homo sapien
ttcatttacaaggcaaaagcactgt

SEQ ID NO: 5957722 - DNA, 25 bp, Homo sapien
ttactttccatcataaatttaatct

SEQ ID NO: 5957723 - DNA, 25 bp, Homo sapien
catcataaatttaatctggattctg

SEQ ID NO: 5957724 - DNA, 25 bp, Homo sapien
acttcagaagccgttaatcttcact

SEQ ID NO: 5957725 - DNA, 25 bp, Homo sapien
gcggtgataatgcttccccaaccaa

SEQ ID NO: 5957726 - DNA, 25 bp, Homo sapien
taatcgatggtccagaagaaatgca

SEQ ID NO: 5957727 - DNA, 25 bp, Homo sapien
tgatgacgatgatgcttacgaaatc

SEQ ID NO: 5957728 - DNA, 25 bp, Homo sapien
gtatcgtgggtcatcgccatcgggg

SEQ ID NO: 5957729 - DNA, 25 bp, Homo sapien
ccatcgggggctccatctcatctgc

SEQ ID NO: 5957730 - DNA, 25 bp, Homo sapien
acgtatggctaccgaccattctttt

SEQ ID NO: 5957731 - DNA, 25 bp, Homo sapien
tgcttacgaaatctcatttgaacaa

SEQ ID NO: 5957732 - DNA, 25 bp, Homo sapien
aggcagatggtggaaggcaagaagg

SEQ ID NO: 5957733 - DNA, 25 bp, Homo sapien
cttccccaaccaatagatggattga

SEQ ID NO: 5957734 - DNA, 25 bp, Homo sapien
gacgatgatgcttacgaaatctcat

SEQ ID NO: 5957735 - DNA, 25 bp, Homo sapien
atactgatttttcaaatggcaatac

SEQ ID NO: 5957736 - DNA, 25 bp, Homo sapien
gtatcaggccttcgccattagagaa

SEQ ID NO: 5957737 - DNA, 25 bp, Homo sapien
ggctacgcgacacagtttgatggat

SEQ ID NO: 5957738 - DNA, 25 bp, Homo sapien
ttcaaatggcaatacggaaactacg

SEQ ID NO: 5957739 - DNA, 25 bp, Homo sapien
gatgcttacgaaatctcatttgaac

SEQ ID NO: 5957740 - DNA, 25 bp, Homo sapien
ccatctcatctgcatccaccaatga

SEQ ID NO: 5957741 - DNA, 25 bp, Homo sapien
aacgaatttagtgtatgcggatggt

SEQ ID NO: 5957742 - DNA, 25 bp, Homo sapien
cacagtttgatggatatccacagca

SEQ ID NO: 5957743 - DNA, 25 bp, Homo sapien
ctgtactacggcggtgataatgctt

SEQ ID NO: 5957744 - DNA, 25 bp, Homo sapien
tcaatagcgcaagcaacgcgaagga

SEQ ID NO: 5957745 - DNA, 25 bp, Homo sapien
gtactacggcggtgataatgcttcc

SEQ ID NO: 5957746 - DNA, 25 bp, Homo sapien
tagcgcaagcaacgcgaaggaaacc

SEQ ID NO: 5957747 - DNA, 25 bp, Homo sapien
gatttagtcgatcattacagaatct

SEQ ID NO: 5957748 - DNA, 25 bp, Homo sapien
ctgacattgaaggcagatggtggaa

SEQ ID NO: 5957749 - DNA, 25 bp, Homo sapien
aatagcgcaagcaacgcgaaggaaa

SEQ ID NO: 5957750 - DNA, 25 bp, Homo sapien
cttctcacacaaattatgtatcttc

SEQ ID NO: 5957751 - DNA, 25 bp, Homo sapien
catagagctcgtcgaagaggcaata

SEQ ID NO: 5957752 - DNA, 25 bp, Homo sapien
gtgcaacgaatttagtgtatgcgga

SEQ ID NO: 5957753 - DNA, 25 bp, Homo sapien
atatcatcaaagataagaccaactc

SEQ ID NO: 5957754 - DNA, 25 bp, Homo sapien
caactaatcgatggtccagaagaaa

SEQ ID NO: 5957755 - DNA, 25 bp, Homo sapien
attatgttcaactaatcgatggtcc

SEQ ID NO: 5957756 - DNA, 25 bp, Homo sapien
ataaatttaatctggattctgtact

SEQ ID NO: 5957757 - DNA, 25 bp, Homo sapien
tctataatgatgctatacgagactc

SEQ ID NO: 5957758 - DNA, 25 bp, Homo sapien
taatgctgttctattgttttgattt

SEQ ID NO: 5957759 - DNA, 25 bp, Homo sapien
caaacggtgaaacaggtattattcc

SEQ ID NO: 5957760 - DNA, 25 bp, Homo sapien
ggggctccatctcatctgcatccac

SEQ ID NO: 5957761 - DNA, 25 bp, Homo sapien
ttgcagtggcatttgtgtataatac

SEQ ID NO: 5957762 - DNA, 25 bp, Homo sapien
gaacacaacgccttaccaaaataat

SEQ ID NO: 5957763 - DNA, 25 bp, Homo sapien
caggctacgcgacacagtttgatgg

SEQ ID NO: 5957764 - DNA, 25 bp, Homo sapien
aagaggcaataggaacacaacgcct

SEQ ID NO: 5957765 - DNA, 25 bp, Homo sapien
ttaatctggattctgtactacggcg

SEQ ID NO: 5957766 - DNA, 25 bp, Homo sapien
attccaagcaattatgttcaactaa

SEQ ID NO: 5957767 - DNA, 25 bp, Homo sapien
taatcttcacttgaacactctacaa

SEQ ID NO: 5957768 - DNA, 25 bp, Homo sapien
tgtatagcgatatcggtgatgataa

SEQ ID NO: 5957769 - DNA, 25 bp, Homo sapien
gaatactcagccaaatacttcagaa

SEQ ID NO: 5957770 - DNA, 25 bp, Homo sapien
ttcagcaggtgtcatcttactttcc

SEQ ID NO: 5957771 - DNA, 25 bp, Homo sapien
actaatcgatggtccagaagaaatg

SEQ ID NO: 5957772 - DNA, 25 bp, Homo sapien
aaaatgaaaaaattttatgccgatc

SEQ ID NO: 5957773 - DNA, 25 bp, Homo sapien
atggtggaaggcaagaagggcaaac

SEQ ID NO: 5957774 - DNA, 25 bp, Homo sapien
ccgatcctttcgctatatcatcaat

SEQ ID NO: 5957775 - DNA, 25 bp, Homo sapien
tggaaggcaagaagggcaaacggtg

SEQ ID NO: 5957776 - DNA, 25 bp, Homo sapien
ataatacaaacagtgcaacgaattt

SEQ ID NO: 5957777 - DNA, 25 bp, Homo sapien
tgttcaactaatcgatggtccagaa

SEQ ID NO: 5957778 - DNA, 25 bp, Homo sapien
acacaacgccttaccaaaataatgt

SEQ ID NO: 5957779 - DNA, 25 bp, Homo sapien
cggcggtgataatgcttccccaacc

SEQ ID NO: 5957780 - DNA, 25 bp, Homo sapien
aggcaaaagcactgtacccatacga

SEQ ID NO: 5957781 - DNA, 25 bp, Homo sapien
tacccatacgacgctgatgacgatg

SEQ ID NO: 5957782 - DNA, 25 bp, Homo sapien
actgatttttcaaatggcaatacgg

SEQ ID NO: 5957783 - DNA, 25 bp, Homo sapien
agatggattgattcgttttccatta

SEQ ID NO: 5957784 - DNA, 25 bp, Homo sapien
ggtcccaagaaagctgctgcttcag

SEQ ID NO: 5957785 - DNA, 25 bp, Homo sapien
aagcaacgcgaaggaaaccaatgat

SEQ ID NO: 5957786 - DNA, 25 bp, Homo sapien
tatgtatcttctacggcattggctg

SEQ ID NO: 5957787 - DNA, 25 bp, Homo sapien
aggcaagaagggcaaacggtgaaac

SEQ ID NO: 5957788 - DNA, 25 bp, Homo sapien
gataatttcatttacaaggcaaaag

SEQ ID NO: 5957789 - DNA, 25 bp, Homo sapien
tctcacacaaattatgtatcttcta

SEQ ID NO: 5957790 - DNA, 25 bp, Homo sapien
aatacggaaactacgatgggagaca

SEQ ID NO: 5957791 - DNA, 25 bp, Homo sapien
tgttttgatttagtcgatcattaca

SEQ ID NO: 5957792 - DNA, 25 bp, Homo sapien
tgcatccaccaatgaatccttccca

SEQ ID NO: 5957793 - DNA, 25 bp, Homo sapien
cttcacttgaacactctacaacaac

SEQ ID NO: 5957794 - DNA, 25 bp, Homo sapien
ttcatcaccacatctattgcagtgg

SEQ ID NO: 5957795 - DNA, 25 bp, Homo sapien
gcgatatcggtgatgataatttcat

SEQ ID NO: 5957796 - DNA, 25 bp, Homo sapien
tttctttggcaattgtatcgtgggt

SEQ ID NO: 5957797 - DNA, 25 bp, Homo sapien
tccaagcaattatgttcaactaatc

SEQ ID NO: 5957798 - DNA, 25 bp, Homo sapien
ctctgacattgaaggcagatggtgg

SEQ ID NO: 5957799 - DNA, 25 bp, Homo sapien
ggggtatagtataccaatttctaat

SEQ ID NO: 5957800 - DNA, 25 bp, Homo sapien
tgataatgcttccccaaccaataga

SEQ ID NO: 5957801 - DNA, 25 bp, Homo sapien
acgctgatgacgatgatgcttacga

SEQ ID NO: 5957802 - DNA, 25 bp, Homo sapien
cgacgctgatgacgatgatgcttac

SEQ ID NO: 5957803 - DNA, 25 bp, Homo sapien
tcgtcgaagaggcaataggaacaca

SEQ ID NO: 5957804 - DNA, 25 bp, Homo sapien
gtttgatggatatccacagcagcaa

SEQ ID NO: 5957805 - DNA, 25 bp, Homo sapien
acgatgggagacactttgggtctgt

SEQ ID NO: 5957806 - DNA, 25 bp, Homo sapien
ttgatttagtcgatcattacagaat

SEQ ID NO: 5957807 - DNA, 25 bp, Homo sapien
ctatacgagactcaggctacgcgac

SEQ ID NO: 5957808 - DNA, 25 bp, Homo sapien
aacaggtattattccaagcaattat

SEQ ID NO: 5957809 - DNA, 25 bp, Homo sapien
gcactgtacccatacgacgctgatg

SEQ ID NO: 5957810 - DNA, 25 bp, Homo sapien
ctcaggctacgcgacacagtttgat

SEQ ID NO: 5957811 - DNA, 25 bp, Homo sapien
tattgcagtggcatttgtgtataat

SEQ ID NO: 5957812 - DNA, 25 bp, Homo sapien
tacgttcgatactgatttttcaaat

SEQ ID NO: 5957813 - DNA, 25 bp, Homo sapien
ctattgttttgatttagtcgatcat

SEQ ID NO: 5957814 - DNA, 25 bp, Homo sapien
tagcgatatcggtgatgataatttc

SEQ ID NO: 5957815 - DNA, 25 bp, Homo sapien
agcaattatgttcaactaatcgatg

SEQ ID NO: 5957816 - DNA, 25 bp, Homo sapien
atgaatccttcccacgttttacttg

SEQ ID NO: 5957817 - DNA, 25 bp, Homo sapien
ttattccaagcaattatgttcaact

SEQ ID NO: 5957818 - DNA, 25 bp, Homo sapien
caaccttctcacacaaattatgtat

SEQ ID NO: 5957819 - DNA, 25 bp, Homo sapien
ctcatctgcatccaccaatgaatcc

SEQ ID NO: 5957820 - DNA, 25 bp, Homo sapien
gctcgtcgaagaggcaataggaaca

SEQ ID NO: 5957821 - DNA, 25 bp, Homo sapien
tgggtcatcgccatcgggggctcca

SEQ ID NO: 5957822 - DNA, 25 bp, Homo sapien
ttggctggttttgagaatactcagc

SEQ ID NO: 5957823 - DNA, 25 bp, Homo sapien
tccatcataaatttaatctggattc

SEQ ID NO: 5957824 - DNA, 25 bp, Homo sapien
tggattctgtactacggcggtgata

SEQ ID NO: 5957825 - DNA, 25 bp, Homo sapien
aattgtatcgtgggtcatcgccatc

SEQ ID NO: 5957826 - DNA, 25 bp, Homo sapien
tcctttcgctatatcatcaatttct

SEQ ID NO: 5957827 - DNA, 25 bp, Homo sapien
aaggaaaccaatgataatagcaata

SEQ ID NO: 5957828 - DNA, 25 bp, Homo sapien
agatggtggaaggcaagaagggcaa

SEQ ID NO: 5957829 - DNA, 25 bp, Homo sapien
attcgttttccattaagggtatcag

SEQ ID NO: 5957830 - DNA, 25 bp, Homo sapien
ggtatagtataccaatttctaatta

SEQ ID NO: 5957831 - DNA, 25 bp, Homo sapien
caattatgttcaactaatcgatggt

SEQ ID NO: 5957832 - DNA, 25 bp, Homo sapien
ataggtaatacgttcgatactgatt

SEQ ID NO: 5957833 - DNA, 25 bp, Homo sapien
cggaaactacgatgggagacacttt

SEQ ID NO: 5957834 - DNA, 25 bp, Homo sapien
gataatagcaataatcaaaccaata

SEQ ID NO: 5957835 - DNA, 25 bp, Homo sapien
tatgccgatcctttcgctatatcat

SEQ ID NO: 5957836 - DNA, 25 bp, Homo sapien
tggcaatacggaaactacgatggga

SEQ ID NO: 5957837 - DNA, 25 bp, Homo sapien
atttgttctttaatgctgttctatt

SEQ ID NO: 5957838 - DNA, 25 bp, Homo sapien
gtgtataatacaaacagtgcaacga

SEQ ID NO: 5957839 - DNA, 25 bp, Homo sapien
aggtgtcatcttactttccatcata

SEQ ID NO: 5957840 - DNA, 25 bp, Homo sapien
cttcacgtatggctaccgaccattc

SEQ ID NO: 5957841 - DNA, 25 bp, Homo sapien
ataccaatttctaattatttgttct

SEQ ID NO: 5957842 - DNA, 25 bp, Homo sapien
tctttggcaattgtatcgtgggtca

SEQ ID NO: 5957843 - DNA, 25 bp, Homo sapien
atcattacagaatcttcatcaccac

SEQ ID NO: 5957844 - DNA, 25 bp, Homo sapien
accaaaataatgtctataatgatgc

SEQ ID NO: 5957845 - DNA, 25 bp, Homo sapien
tttggcaattgtatcgtgggtcatc

SEQ ID NO: 5957846 - DNA, 25 bp, Homo sapien
cgctatatcatcaatttctttggca

SEQ ID NO: 5957847 - DNA, 25 bp, Homo sapien
aaatgaaatcctacaagtctctgac

SEQ ID NO: 5957848 - DNA, 25 bp, Homo sapien
aatttagtgtatgcggatggtccca

SEQ ID NO: 5957849 - DNA, 25 bp, Homo sapien
catccaccaatgaatccttcccacg

SEQ ID NO: 5957850 - DNA, 25 bp, Homo sapien
aacaaaatgaaatcctacaagtctc

SEQ ID NO: 5957851 - DNA, 25 bp, Homo sapien
gcatttgtgtataatacaaacagtg

SEQ ID NO: 5957852 - DNA, 25 bp, Homo sapien
atcatcaaagataagaccaactcct

SEQ ID NO: 5957853 - DNA, 25 bp, Homo sapien
accaatagatggattgattcgtttt

SEQ ID NO: 5957854 - DNA, 25 bp, Homo sapien
ggccttcgccattagagaattctct

SEQ ID NO: 5957855 - DNA, 25 bp, Homo sapien
tcttctacggcattggctggttttg

SEQ ID NO: 5957856 - DNA, 25 bp, Homo sapien
gagctcgtcgaagaggcaataggaa

SEQ ID NO: 5957857 - DNA, 25 bp, Homo sapien
gaggcaataggaacacaacgcctta

SEQ ID NO: 5957858 - DNA, 25 bp, Homo sapien
attgattcgttttccattaagggta

SEQ ID NO: 5957859 - DNA, 25 bp, Homo sapien
aaaccttcacgtatggctaccgacc

SEQ ID NO: 5957860 - DNA, 25 bp, Homo sapien
tcttcatagagctcgtcgaagaggc

SEQ ID NO: 5957861 - DNA, 25 bp, Homo sapien
atggtcccaagaaagctgctgcttc

SEQ ID NO: 5957862 - DNA, 25 bp, Homo sapien
actcagccaaatacttcagaagccg

SEQ ID NO: 5957863 - DNA, 25 bp, Homo sapien
ggagacactttgggtctgtatagcg

SEQ ID NO: 5957864 - DNA, 25 bp, Homo sapien
tcatcgccatcgggggctccatctc

SEQ ID NO: 5957865 - DNA, 25 bp, Homo sapien
gatgggagacactttgggtctgtat

SEQ ID NO: 5957866 - DNA, 25 bp, Homo sapien
gtataccaatttctaattatttgtt

SEQ ID NO: 5957867 - DNA, 25 bp, Homo sapien
tttagtcgatcattacagaatcttc

SEQ ID NO: 5957868 - DNA, 25 bp, Homo sapien
agtggcatttgtgtataatacaaac

SEQ ID NO: 5957869 - DNA, 25 bp, Homo sapien
tcacttgaacactctacaacaacgt

SEQ ID NO: 5957870 - DNA, 25 bp, Homo sapien
agaatcttcatcaccacatctattg

SEQ ID NO: 5957871 - DNA, 25 bp, Homo sapien
tttacttggtggggtatagtatacc

SEQ ID NO: 5957872 - DNA, 25 bp, Homo sapien
tctttaatgctgttctattgttttg

SEQ ID NO: 5957873 - DNA, 25 bp, Homo sapien
aaaagcactgtacccatacgacgct

SEQ ID NO: 5957874 - DNA, 25 bp, Homo sapien
tatagcgatatcggtgatgataatt

SEQ ID NO: 5957875 - DNA, 25 bp, Homo sapien
ttttcaaatggcaatacggaaacta

SEQ ID NO: 5957876 - DNA, 25 bp, Homo sapien
tacaaacagtgcaacgaatttagtg

SEQ ID NO: 5957877 - DNA, 25 bp, Homo sapien
ttgtgtataatacaaacagtgcaac

SEQ ID NO: 5957878 - DNA, 25 bp, Homo sapien
tattattccaagcaattatgttcaa

SEQ ID NO: 5957879 - DNA, 25 bp, Homo sapien
catcaatttctttggcaattgtatc

SEQ ID NO: 5957880 - DNA, 25 bp, Homo sapien
atatcatcaatttctttggcaattg

SEQ ID NO: 5957881 - DNA, 25 bp, Homo sapien
atttgtgtataatacaaacagtgca

SEQ ID NO: 5957882 - DNA, 25 bp, Homo sapien
gacattgaaggcagatggtggaagg

SEQ ID NO: 5957883 - DNA, 25 bp, Homo sapien
gcggatggtcccaagaaagctgctg

SEQ ID NO: 5957884 - DNA, 25 bp, Homo sapien
caaccaatagatggattgattcgtt

SEQ ID NO: 5957885 - DNA, 25 bp, Homo sapien
agcaataatcaaaccaatactaata

SEQ ID NO: 5957886 - DNA, 25 bp, Homo sapien
cgatgatgcttacgaaatctcattt

SEQ ID NO: 5957887 - DNA, 25 bp, Homo sapien
gcaacgaatttagtgtatgcggatg

SEQ ID NO: 5957888 - DNA, 25 bp, Homo sapien
caataggaacacaacgccttaccaa

SEQ ID NO: 5957889 - DNA, 25 bp, Homo sapien
atcttcacttgaacactctacaaca

SEQ ID NO: 5957890 - DNA, 25 bp, Homo sapien
gcaggtgtcatcttactttccatca

SEQ ID NO: 5957891 - DNA, 25 bp, Homo sapien
atgaaatcctacaagtctctgacat

SEQ ID NO: 5957892 - DNA, 25 bp, Homo sapien
ttatttgttctttaatgctgttcta

SEQ ID NO: 5957893 - DNA, 25 bp, Homo sapien
atgtcaatatcatcaaagataagac

SEQ ID NO: 5957894 - DNA, 25 bp, Homo sapien
caccaatgaatccttcccacgtttt

SEQ ID NO: 5957895 - DNA, 25 bp, Homo sapien
aacgtatcaatagcgcaagcaacgc

SEQ ID NO: 5957896 - DNA, 25 bp, Homo sapien
cgatactgatttttcaaatggcaat

SEQ ID NO: 5957897 - DNA, 25 bp, Homo sapien
ccattagagaattctcttcatagag

SEQ ID NO: 5957898 - DNA, 25 bp, Homo sapien
gctgttctattgttttgatttagtc

SEQ ID NO: 5957899 - DNA, 25 bp, Homo sapien
acacaaattatgtatcttctacggc

SEQ ID NO: 5957900 - DNA, 25 bp, Homo sapien
gaaactacgatgggagacactttgg

SEQ ID NO: 5957901 - DNA, 25 bp, Homo sapien
cgatggtccagaagaaatgcatcgt

SEQ ID NO: 5957902 - DNA, 25 bp, Homo sapien
ctacaagtctctgacattgaaggca

SEQ ID NO: 5957903 - DNA, 25 bp, Homo sapien
ataggaacacaacgccttaccaaaa

SEQ ID NO: 5957904 - DNA, 25 bp, Homo sapien
tgtctataatgatgctatacgagac

SEQ ID NO: 5957905 - DNA, 25 bp, Homo sapien
aatcctacaagtctctgacattgaa

SEQ ID NO: 5957906 - DNA, 25 bp, Homo sapien
tttatgccgatcctttcgctatatc

SEQ ID NO: 5957907 - DNA, 25 bp, Homo sapien
agccaaatacttcagaagccgttaa

SEQ ID NO: 5957908 - DNA, 25 bp, Homo sapien
gactcaggctacgcgacacagtttg

SEQ ID NO: 5957909 - DNA, 25 bp, Homo sapien
ggctccatctcatctgcatccacca

SEQ ID NO: 5957910 - DNA, 25 bp, Homo sapien
tcaatttctttggcaattgtatcgt

SEQ ID NO: 5957911 - DNA, 25 bp, Homo sapien
caggccttcgccattagagaattct

SEQ ID NO: 5957912 - DNA, 25 bp, Homo sapien
gcagatggtggaaggcaagaagggc

SEQ ID NO: 5957913 - DNA, 25 bp, Homo sapien
atgatgctatacgagactcaggcta

SEQ ID NO: 5957914 - DNA, 25 bp, Homo sapien
ttcagaagccgttaatcttcacttg

SEQ ID NO: 5957915 - DNA, 25 bp, Homo sapien
gtaatacgttcgatactgatttttc

SEQ ID NO: 5957916 - DNA, 25 bp, Homo sapien
accttcacgtatggctaccgaccat

SEQ ID NO: 5957917 - DNA, 25 bp, Homo sapien
ggtgatgataatttcatttacaagg

SEQ ID NO: 5957918 - DNA, 25 bp, Homo sapien
cattacagaatcttcatcaccacat

SEQ ID NO: 5957919 - DNA, 25 bp, Homo sapien
tctggattctgtactacggcggtga

SEQ ID NO: 5957920 - DNA, 25 bp, Homo sapien
tcttactttccatcataaatttaat

SEQ ID NO: 5957921 - DNA, 25 bp, Homo sapien
cgccatcgggggctccatctcatct

SEQ ID NO: 5957922 - DNA, 25 bp, Homo sapien
tctattgcagtggcatttgtgtata

SEQ ID NO: 5957923 - DNA, 25 bp, Homo sapien
cagtttgatggatatccacagcagc

SEQ ID NO: 5957924 - DNA, 25 bp, Homo sapien
ctatatcatcaatttctttggcaat

SEQ ID NO: 5957925 - DNA, 25 bp, Homo sapien
agcaaccttctcacacaaattatgt

SEQ ID NO: 5957926 - DNA, 25 bp, Homo sapien
tgctatacgagactcaggctacgcg

SEQ ID NO: 5957927 - DNA, 25 bp, Homo sapien
attctcttcatagagctcgtcgaag

SEQ ID NO: 5957928 - DNA, 25 bp, Homo sapien
tttccatcataaatttaatctggat

SEQ ID NO: 5957929 - DNA, 25 bp, Homo sapien
caaaataatgtctataatgatgcta

SEQ ID NO: 5957930 - DNA, 25 bp, Homo sapien
catcaccacatctattgcagtggca

SEQ ID NO: 5957931 - DNA, 25 bp, Homo sapien
atttaatctggattctgtactacgg

SEQ ID NO: 5957932 - DNA, 25 bp, Homo sapien
aattatttgttctttaatgctgttc

SEQ ID NO: 5957933 - DNA, 25 bp, Homo sapien
atggctaccgaccattcttttaaaa

SEQ ID NO: 5957934 - DNA, 25 bp, Homo sapien
cgaagaggcaataggaacacaacgc

SEQ ID NO: 5957935 - DNA, 25 bp, Homo sapien
aatttctttggcaattgtatcgtgg

SEQ ID NO: 5957936 - DNA, 25 bp, Homo sapien
agcagcagctttcttgggaccatcc

SEQ ID NO: 5957937 - DNA, 25 bp, Homo sapien
attagaaattggtatactatacccc

SEQ ID NO: 5957938 - DNA, 25 bp, Homo sapien
tgccttgtaaatgaaattatcatca

SEQ ID NO: 5957939 - DNA, 25 bp, Homo sapien
ggtagccatacgtgaaggtttacga

SEQ ID NO: 5957940 - DNA, 25 bp, Homo sapien
tcattggtggatgcagatgagatgg

SEQ ID NO: 5957941 - DNA, 25 bp, Homo sapien
aaggttgctgctgtggatatccatc

SEQ ID NO: 5957942 - DNA, 25 bp, Homo sapien
agagtgttcaagtgaagattaacgg

SEQ ID NO: 5957943 - DNA, 25 bp, Homo sapien
tggtggatgcagatgagatggagcc

SEQ ID NO: 5957944 - DNA, 25 bp, Homo sapien
cttaatggaaaacgaatcaatccat

SEQ ID NO: 5957945 - DNA, 25 bp, Homo sapien
ccgatggcgatgacccacgatacaa

SEQ ID NO: 5957946 - DNA, 25 bp, Homo sapien
acgttgttgtagagtgttcaagtga

SEQ ID NO: 5957947 - DNA, 25 bp, Homo sapien
aaattcgttgcactgtttgtattat

SEQ ID NO: 5957948 - DNA, 25 bp, Homo sapien
cctattgcctcttcgacgagctcta

SEQ ID NO: 5957949 - DNA, 25 bp, Homo sapien
cgatatcgctatacagacccaaagt

SEQ ID NO: 5957950 - DNA, 25 bp, Homo sapien
aaaacgaatcaatccatctattggt

SEQ ID NO: 5957951 - DNA, 25 bp, Homo sapien
ttttgttcaaatgagatttcgtaag

SEQ ID NO: 5957952 - DNA, 25 bp, Homo sapien
agtaagatgacacctgctgaagcag

SEQ ID NO: 5957953 - DNA, 25 bp, Homo sapien
cgtagaagatacataatttgtgtga

SEQ ID NO: 5957954 - DNA, 25 bp, Homo sapien
tcttctggaccatcgattagttgaa

SEQ ID NO: 5957955 - DNA, 25 bp, Homo sapien
cgctatacagacccaaagtgtctcc

SEQ ID NO: 5957956 - DNA, 25 bp, Homo sapien
gcgttgcttgcgctattgatacgtt

SEQ ID NO: 5957957 - DNA, 25 bp, Homo sapien
gatcgactaaatcaaaacaatagaa

SEQ ID NO: 5957958 - DNA, 25 bp, Homo sapien
ggaaagtaagatgacacctgctgaa

SEQ ID NO: 5957959 - DNA, 25 bp, Homo sapien
tattatcattggtttccttcgcgtt

SEQ ID NO: 5957960 - DNA, 25 bp, Homo sapien
accatcgattagttgaacataattg

SEQ ID NO: 5957961 - DNA, 25 bp, Homo sapien
ttgctattatcattggtttccttcg

SEQ ID NO: 5957962 - DNA, 25 bp, Homo sapien
atatccatcaaactgtgtcgcgtag

SEQ ID NO: 5957963 - DNA, 25 bp, Homo sapien
catctgccttcaatgtcagagactt

SEQ ID NO: 5957964 - DNA, 25 bp, Homo sapien
aaagtaagatgacacctgctgaagc

SEQ ID NO: 5957965 - DNA, 25 bp, Homo sapien
gtggtgatgaagattctgtaatgat

SEQ ID NO: 5957966 - DNA, 25 bp, Homo sapien
gtttccgtattgccatttgaaaaat

SEQ ID NO: 5957967 - DNA, 25 bp, Homo sapien
cgcatacactaaattcgttgcactg

SEQ ID NO: 5957968 - DNA, 25 bp, Homo sapien
gtagtacagaatccagattaaattt

SEQ ID NO: 5957969 - DNA, 25 bp, Homo sapien
tgctgaagcagcagctttcttggga

SEQ ID NO: 5957970 - DNA, 25 bp, Homo sapien
cgctattgatacgttgttgtagagt

SEQ ID NO: 5957971 - DNA, 25 bp, Homo sapien
ctatacagacccaaagtgtctccca

SEQ ID NO: 5957972 - DNA, 25 bp, Homo sapien
tcgtcatcagcgtcgtatgggtaca

SEQ ID NO: 5957973 - DNA, 25 bp, Homo sapien
tagcatcattatagacattattttg

SEQ ID NO: 5957974 - DNA, 25 bp, Homo sapien
agtattggtttgattattgctatta

SEQ ID NO: 5957975 - DNA, 25 bp, Homo sapien
ttctggaccatcgattagttgaaca

SEQ ID NO: 5957976 - DNA, 25 bp, Homo sapien
ctaatggcgaaggcctgataccctt

SEQ ID NO: 5957977 - DNA, 25 bp, Homo sapien
aataatacctgtttcaccgtttgcc

SEQ ID NO: 5957978 - DNA, 25 bp, Homo sapien
tagaagatacataatttgtgtgaga

SEQ ID NO: 5957979 - DNA, 25 bp, Homo sapien
ctttcttgggaccatccgcatacac

SEQ ID NO: 5957980 - DNA, 25 bp, Homo sapien
gaagtatttggctgagtattctcaa

SEQ ID NO: 5957981 - DNA, 25 bp, Homo sapien
ttttaaaagaatggtcggtagccat

SEQ ID NO: 5957982 - DNA, 25 bp, Homo sapien
gcttggaataatacctgtttcaccg

SEQ ID NO: 5957983 - DNA, 25 bp, Homo sapien
tgtgagaaggttgctgctgtggata

SEQ ID NO: 5957984 - DNA, 25 bp, Homo sapien
gcctgatacccttaatggaaaacga

SEQ ID NO: 5957985 - DNA, 25 bp, Homo sapien
aaaggatcggcataaaattttttca

SEQ ID NO: 5957986 - DNA, 25 bp, Homo sapien
catcaccgatatcgctatacagacc

SEQ ID NO: 5957987 - DNA, 25 bp, Homo sapien
accatctgccttcaatgtcagagac

SEQ ID NO: 5957988 - DNA, 25 bp, Homo sapien
caatgtcagagacttgtaggatttc

SEQ ID NO: 5957989 - DNA, 25 bp, Homo sapien
aatggcgaaggcctgatacccttaa

SEQ ID NO: 5957990 - DNA, 25 bp, Homo sapien
gatggcgatgacccacgatacaatt

SEQ ID NO: 5957991 - DNA, 25 bp, Homo sapien
attcgttgcactgtttgtattatac

SEQ ID NO: 5957992 - DNA, 25 bp, Homo sapien
ttctctaatggcgaaggcctgatac

SEQ ID NO: 5957993 - DNA, 25 bp, Homo sapien
agtatcgaacgtattacctatatta

SEQ ID NO: 5957994 - DNA, 25 bp, Homo sapien
agaacaaataattagaaattggtat

SEQ ID NO: 5957995 - DNA, 25 bp, Homo sapien
acagacccaaagtgtctcccatcgt

SEQ ID NO: 5957996 - DNA, 25 bp, Homo sapien
caaataattagaaattggtatacta

SEQ ID NO: 5957997 - DNA, 25 bp, Homo sapien
ttggtttccttcgcgttgcttgcgc

SEQ ID NO: 5957998 - DNA, 25 bp, Homo sapien
ggaaaacgaatcaatccatctattg

SEQ ID NO: 5957999 - DNA, 25 bp, Homo sapien
gtggatatccatcaaactgtgtcgc

SEQ ID NO: 5958000 - DNA, 25 bp, Homo sapien
gcatcattatagacattattttggt

SEQ ID NO: 5958001 - DNA, 25 bp, Homo sapien
gaacagcattaaagaacaaataatt

SEQ ID NO: 5958002 - DNA, 25 bp, Homo sapien
atgggtacagtgcttttgccttgta

SEQ ID NO: 5958003 - DNA, 25 bp, Homo sapien
caaatgccactgcaatagatgtggt

SEQ ID NO: 5958004 - DNA, 25 bp, Homo sapien
ttcattttaaaagaatggtcggtag

SEQ ID NO: 5958005 - DNA, 25 bp, Homo sapien
agctctatgaagagaattctctaat

SEQ ID NO: 5958006 - DNA, 25 bp, Homo sapien
ccacgatacaattgccaaagaaatt

SEQ ID NO: 5958007 - DNA, 25 bp, Homo sapien
gatggagcccccgatggcgatgacc

SEQ ID NO: 5958008 - DNA, 25 bp, Homo sapien
aggcgttgtgttcctattgcctctt

SEQ ID NO: 5958009 - DNA, 25 bp, Homo sapien
gatttcgtaagcatcatcgtcatca

SEQ ID NO: 5958010 - DNA, 25 bp, Homo sapien
ctgtgtcgcgtagcctgagtctcgt

SEQ ID NO: 5958011 - DNA, 25 bp, Homo sapien
aagcatcatcgtcatcagcgtcgta

SEQ ID NO: 5958012 - DNA, 25 bp, Homo sapien
atgtcagagacttgtaggatttcat

SEQ ID NO: 5958013 - DNA, 25 bp, Homo sapien
gcgatgacccacgatacaattgcca

SEQ ID NO: 5958014 - DNA, 25 bp, Homo sapien
ccagattaaatttatgatggaaagt

SEQ ID NO: 5958015 - DNA, 25 bp, Homo sapien
gtgaaggtttacgaggagttggtct

SEQ ID NO: 5958016 - DNA, 25 bp, Homo sapien
gcgaaaggatcggcataaaattttt

SEQ ID NO: 5958017 - DNA, 25 bp, Homo sapien
tatttggctgagtattctcaaaacc

SEQ ID NO: 5958018 - DNA, 25 bp, Homo sapien
ttcaatgtcagagacttgtaggatt

SEQ ID NO: 5958019 - DNA, 25 bp, Homo sapien
actgcaatagatgtggtgatgaaga

SEQ ID NO: 5958020 - DNA, 25 bp, Homo sapien
atatcgctatacagacccaaagtgt

SEQ ID NO: 5958021 - DNA, 25 bp, Homo sapien
ttggaataatacctgtttcaccgtt

SEQ ID NO: 5958022 - DNA, 25 bp, Homo sapien
attatcaccgccgtagtacagaatc

SEQ ID NO: 5958023 - DNA, 25 bp, Homo sapien
tccatctattggttggggaagcatt

SEQ ID NO: 5958024 - DNA, 25 bp, Homo sapien
tagaacagcattaaagaacaaataa

SEQ ID NO: 5958025 - DNA, 25 bp, Homo sapien
tgaagattaacggcttctgaagtat

SEQ ID NO: 5958026 - DNA, 25 bp, Homo sapien
ttgttcaaatgagatttcgtaagca

SEQ ID NO: 5958027 - DNA, 25 bp, Homo sapien
acagtgcttttgccttgtaaatgaa

SEQ ID NO: 5958028 - DNA, 25 bp, Homo sapien
cattggtttccttcgcgttgcttgc

SEQ ID NO: 5958029 - DNA, 25 bp, Homo sapien
cgtcgtatgggtacagtgcttttgc

SEQ ID NO: 5958030 - DNA, 25 bp, Homo sapien
ccatttgaaaaatcagtatcgaacg

SEQ ID NO: 5958031 - DNA, 25 bp, Homo sapien
gcatcatcgtcatcagcgtcgtatg

SEQ ID NO: 5958032 - DNA, 25 bp, Homo sapien
ggtgatgaagattctgtaatgatcg

SEQ ID NO: 5958033 - DNA, 25 bp, Homo sapien
gaacgtattacctatattagtattg

SEQ ID NO: 5958034 - DNA, 25 bp, Homo sapien
gtcagagacttgtaggatttcattt

SEQ ID NO: 5958035 - DNA, 25 bp, Homo sapien
atcatcgtcatcagcgtcgtatggg

SEQ ID NO: 5958036 - DNA, 25 bp, Homo sapien
atagacattattttggtaaggcgtt

SEQ ID NO: 5958037 - DNA, 25 bp, Homo sapien
tattgctattatcattggtttcctt

SEQ ID NO: 5958038 - DNA, 25 bp, Homo sapien
atcgctatacagacccaaagtgtct

SEQ ID NO: 5958039 - DNA, 25 bp, Homo sapien
tattggtttgattattgctattatc

SEQ ID NO: 5958040 - DNA, 25 bp, Homo sapien
atcattatagacattattttggtaa

SEQ ID NO: 5958041 - DNA, 25 bp, Homo sapien
ttccgtattgccatttgaaaaatca

SEQ ID NO: 5958042 - DNA, 25 bp, Homo sapien
catacgtgaaggtttacgaggagtt

SEQ ID NO: 5958043 - DNA, 25 bp, Homo sapien
ctgatacccttaatggaaaacgaat

SEQ ID NO: 5958044 - DNA, 25 bp, Homo sapien
caattgccaaagaaattgatgatat

SEQ ID NO: 5958045 - DNA, 25 bp, Homo sapien
atcattggtttccttcgcgttgctt

SEQ ID NO: 5958046 - DNA, 25 bp, Homo sapien
ggaccatccgcatacactaaattcg

SEQ ID NO: 5958047 - DNA, 25 bp, Homo sapien
tgccatttgaaaaatcagtatcgaa

SEQ ID NO: 5958048 - DNA, 25 bp, Homo sapien
ttatcatcaccgatatcgctataca

SEQ ID NO: 5958049 - DNA, 25 bp, Homo sapien
tattttggtaaggcgttgtgttcct

SEQ ID NO: 5958050 - DNA, 25 bp, Homo sapien
gcccttcttgccttccaccatctgc

SEQ ID NO: 5958051 - DNA, 25 bp, Homo sapien
aggcctgatacccttaatggaaaac

SEQ ID NO: 5958052 - DNA, 25 bp, Homo sapien
ccgtttgcccttcttgccttccacc

SEQ ID NO: 5958053 - DNA, 25 bp, Homo sapien
tgatacgttgttgtagagtgttcaa

SEQ ID NO: 5958054 - DNA, 25 bp, Homo sapien
ctcgtatagcatcattatagacatt

SEQ ID NO: 5958055 - DNA, 25 bp, Homo sapien
aaacaatagaacagcattaaagaac

SEQ ID NO: 5958056 - DNA, 25 bp, Homo sapien
atacagacccaaagtgtctcccatc

SEQ ID NO: 5958057 - DNA, 25 bp, Homo sapien
tacagaatccagattaaatttatga

SEQ ID NO: 5958058 - DNA, 25 bp, Homo sapien
acccacgatacaattgccaaagaaa

SEQ ID NO: 5958059 - DNA, 25 bp, Homo sapien
gattagttgaacataattgcttgga

SEQ ID NO: 5958060 - DNA, 25 bp, Homo sapien
ttggtaaggcgttgtgttcctattg

SEQ ID NO: 5958061 - DNA, 25 bp, Homo sapien
attcattggtggatgcagatgagat

SEQ ID NO: 5958062 - DNA, 25 bp, Homo sapien
aataattagaaattggtatactata

SEQ ID NO: 5958063 - DNA, 25 bp, Homo sapien
gttgcttgcgctattgatacgttgt

SEQ ID NO: 5958064 - DNA, 25 bp, Homo sapien
tcccatcgtagtttccgtattgcca

SEQ ID NO: 5958065 - DNA, 25 bp, Homo sapien
agaaggttgctgctgtggatatcca

SEQ ID NO: 5958066 - DNA, 25 bp, Homo sapien
tcgttgcactgtttgtattatacac

SEQ ID NO: 5958067 - DNA, 25 bp, Homo sapien
agaaattgatgatatagcgaaagga

SEQ ID NO: 5958068 - DNA, 25 bp, Homo sapien
caagtaaaacgtgggaaggattcat

SEQ ID NO: 5958069 - DNA, 25 bp, Homo sapien
gtaaaacgtgggaaggattcattgg

SEQ ID NO: 5958070 - DNA, 25 bp, Homo sapien
ctgagtctcgtatagcatcattata

SEQ ID NO: 5958071 - DNA, 25 bp, Homo sapien
agattaaatttatgatggaaagtaa

SEQ ID NO: 5958072 - DNA, 25 bp, Homo sapien
tgtgttcctattgcctcttcgacga

SEQ ID NO: 5958073 - DNA, 25 bp, Homo sapien
ctgtttgtattatacacaaatgcca

SEQ ID NO: 5958074 - DNA, 25 bp, Homo sapien
tagcgaaaggatcggcataaaattt

SEQ ID NO: 5958075 - DNA, 25 bp, Homo sapien
acagcattaaagaacaaataattag

SEQ ID NO: 5958076 - DNA, 25 bp, Homo sapien
gtattatacacaaatgccactgcaa

SEQ ID NO: 5958077 - DNA, 25 bp, Homo sapien
gagttggtcttatctttgatgatat

SEQ ID NO: 5958078 - DNA, 25 bp, Homo sapien
acccaaagtgtctcccatcgtagtt

SEQ ID NO: 5958079 - DNA, 25 bp, Homo sapien
atgagatggagcccccgatggcgat

SEQ ID NO: 5958080 - DNA, 25 bp, Homo sapien
gactaaatcaaaacaatagaacagc

SEQ ID NO: 5958081 - DNA, 25 bp, Homo sapien
agtatttggctgagtattctcaaaa

SEQ ID NO: 5958082 - DNA, 25 bp, Homo sapien
attgatgatatagcgaaaggatcgg

SEQ ID NO: 5958083 - DNA, 25 bp, Homo sapien
cgccgtagtacagaatccagattaa

SEQ ID NO: 5958084 - DNA, 25 bp, Homo sapien
ttgcccttcttgccttccaccatct

SEQ ID NO: 5958085 - DNA, 25 bp, Homo sapien
gtacagtgcttttgccttgtaaatg

SEQ ID NO: 5958086 - DNA, 25 bp, Homo sapien
tgcgctattgatacgttgttgtaga

SEQ ID NO: 5958087 - DNA, 25 bp, Homo sapien
ccaaagtgtctcccatcgtagtttc

SEQ ID NO: 5958088 - DNA, 25 bp, Homo sapien
ctcttcgacgagctctatgaagaga

SEQ ID NO: 5958089 - DNA, 25 bp, Homo sapien
tacctgtttcaccgtttgcccttct

SEQ ID NO: 5958090 - DNA, 25 bp, Homo sapien
tgatgatatagcgaaaggatcggca

SEQ ID NO: 5958091 - DNA, 25 bp, Homo sapien
cagagacttgtaggatttcattttg

SEQ ID NO: 5958092 - DNA, 25 bp, Homo sapien
catccgcatacactaaattcgttgc

SEQ ID NO: 5958093 - DNA, 25 bp, Homo sapien
gttggtcttatctttgatgatattg

SEQ ID NO: 5958094 - DNA, 25 bp, Homo sapien
cagaatccagattaaatttatgatg

SEQ ID NO: 5958095 - DNA, 25 bp, Homo sapien
gcagctttcttgggaccatccgcat

SEQ ID NO: 5958096 - DNA, 25 bp, Homo sapien
gcccccgatggcgatgacccacgat

SEQ ID NO: 5958097 - DNA, 25 bp, Homo sapien
atgccgtagaagatacataatttgt

SEQ ID NO: 5958098 - DNA, 25 bp, Homo sapien
gaacataattgcttggaataatacc

SEQ ID NO: 5958099 - DNA, 25 bp, Homo sapien
atacgttgttgtagagtgttcaagt

SEQ ID NO: 5958100 - DNA, 25 bp, Homo sapien
taatgatcgactaaatcaaaacaat

SEQ ID NO: 5958101 - DNA, 25 bp, Homo sapien
gaaggtttacgaggagttggtctta

SEQ ID NO: 5958102 - DNA, 25 bp, Homo sapien
aaggattcattggtggatgcagatg

SEQ ID NO: 5958103 - DNA, 25 bp, Homo sapien
acataatttgtgtgagaaggttgct

SEQ ID NO: 5958104 - DNA, 25 bp, Homo sapien
gaaattatcatcaccgatatcgcta

SEQ ID NO: 5958105 - DNA, 25 bp, Homo sapien
tcaatccatctattggttggggaag

SEQ ID NO: 5958106 - DNA, 25 bp, Homo sapien
cgcgtagcctgagtctcgtatagca

SEQ ID NO: 5958107 - DNA, 25 bp, Homo sapien
atggaaaacgaatcaatccatctat

SEQ ID NO: 5958108 - DNA, 25 bp, Homo sapien
tagcctgagtctcgtatagcatcat

SEQ ID NO: 5958109 - DNA, 25 bp, Homo sapien
ttcttgggaccatccgcatacacta

SEQ ID NO: 5958110 - DNA, 25 bp, Homo sapien
gaatggtcggtagccatacgtgaag

SEQ ID NO: 5958111 - DNA, 25 bp, Homo sapien
acaatagaacagcattaaagaacaa

SEQ ID NO: 5958112 - DNA, 25 bp, Homo sapien
gagtctcgtatagcatcattataga

SEQ ID NO: 5958113 - DNA, 25 bp, Homo sapien
atacataatttgtgtgagaaggttg

SEQ ID NO: 5958114 - DNA, 25 bp, Homo sapien
gcctcttcgacgagctctatgaaga

SEQ ID NO: 5958115 - DNA, 25 bp, Homo sapien
tctgccttcaatgtcagagacttgt

SEQ ID NO: 5958116 - DNA, 25 bp, Homo sapien
gttcaaatgagatttcgtaagcatc

SEQ ID NO: 5958117 - DNA, 25 bp, Homo sapien
aatttgtgtgagaaggttgctgctg

SEQ ID NO: 5958118 - DNA, 25 bp, Homo sapien
cgagctctatgaagagaattctcta

SEQ ID NO: 5958119 - DNA, 25 bp, Homo sapien
aagcattatcaccgccgtagtacag

SEQ ID NO: 5958120 - DNA, 25 bp, Homo sapien
atcaaaacaatagaacagcattaaa

SEQ ID NO: 5958121 - DNA, 25 bp, Homo sapien
tgccactgcaatagatgtggtgatg

SEQ ID NO: 5958122 - DNA, 25 bp, Homo sapien
attgatacgttgttgtagagtgttc

SEQ ID NO: 5958123 - DNA, 25 bp, Homo sapien
tcgactaaatcaaaacaatagaaca

SEQ ID NO: 5958124 - DNA, 25 bp, Homo sapien
attgccaaagaaattgatgatatag

SEQ ID NO: 5958125 - DNA, 25 bp, Homo sapien
aatcaatccatctattggttgggga

SEQ ID NO: 5958126 - DNA, 25 bp, Homo sapien
atgaagagaattctctaatggcgaa

SEQ ID NO: 5958127 - DNA, 25 bp, Homo sapien
acgatgcatttcttctggaccatcg

SEQ ID NO: 5958128 - DNA, 25 bp, Homo sapien
gtcatcagcgtcgtatgggtacagt

SEQ ID NO: 5958129 - DNA, 25 bp, Homo sapien
tatattagtattggtttgattattg

SEQ ID NO: 5958130 - DNA, 25 bp, Homo sapien
caaactgtgtcgcgtagcctgagtc

SEQ ID NO: 5958131 - DNA, 25 bp, Homo sapien
ttctgaagtatttggctgagtattc

SEQ ID NO: 5958132 - DNA, 25 bp, Homo sapien
tcgtaagcatcatcgtcatcagcgt

SEQ ID NO: 5958133 - DNA, 25 bp, Homo sapien
ttagttgaacataattgcttggaat

SEQ ID NO: 5958134 - DNA, 25 bp, Homo sapien
ttgtattatacacaaatgccactgc

SEQ ID NO: 5958135 - DNA, 25 bp, Homo sapien
tgacccacgatacaattgccaaaga

SEQ ID NO: 5958136 - DNA, 25 bp, Homo sapien
tttccttcgcgttgcttgcgctatt

SEQ ID NO: 5958137 - DNA, 25 bp, Homo sapien
gagacttgtaggatttcattttgtt

SEQ ID NO: 5958138 - DNA, 25 bp, Homo sapien
gctgctgtggatatccatcaaactg

SEQ ID NO: 5958139 - DNA, 25 bp, Homo sapien
gttgcactgtttgtattatacacaa

SEQ ID NO: 5958140 - DNA, 25 bp, Homo sapien
atccagattaaatttatgatggaaa

SEQ ID NO: 5958141 - DNA, 25 bp, Homo sapien
aacgtgggaaggattcattggtgga

SEQ ID NO: 5958142 - DNA, 25 bp, Homo sapien
tcaccgccgtagtacagaatccaga

SEQ ID NO: 5958143 - DNA, 25 bp, Homo sapien
caatgccgtagaagatacataattt

SEQ ID NO: 5958144 - DNA, 25 bp, Homo sapien
taaatttatgatggaaagtaagatg

SEQ ID NO: 5958145 - DNA, 25 bp, Homo sapien
ggtaaggcgttgtgttcctattgcc

SEQ ID NO: 5958146 - DNA, 25 bp, Homo sapien
aaatgagatttcgtaagcatcatcg

SEQ ID NO: 5958147 - DNA, 25 bp, Homo sapien
cgtgggaaggattcattggtggatg

SEQ ID NO: 5958148 - DNA, 25 bp, Homo sapien
tctcccatcgtagtttccgtattgc

SEQ ID NO: 5958149 - DNA, 25 bp, Homo sapien
cggcttctgaagtatttggctgagt

SEQ ID NO: 5958150 - DNA, 25 bp, Homo sapien
tcggtagccatacgtgaaggtttac

SEQ ID NO: 5958151 - DNA, 25 bp, Homo sapien
accgccgtagtacagaatccagatt

SEQ ID NO: 5958152 - DNA, 25 bp, Homo sapien
tttcttctggaccatcgattagttg

SEQ ID NO: 5958153 - DNA, 25 bp, Homo sapien
aacaaataattagaaattggtatac

SEQ ID NO: 5958154 - DNA, 25 bp, Homo sapien
atggtcggtagccatacgtgaaggt

SEQ ID NO: 5958155 - DNA, 25 bp, Homo sapien
aaaccagccaatgccgtagaagata

SEQ ID NO: 5958156 - DNA, 25 bp, Homo sapien
attacctatattagtattggtttga

SEQ ID NO: 5958157 - DNA, 25 bp, Homo sapien
gcgttgtgttcctattgcctcttcg

SEQ ID NO: 5958158 - DNA, 25 bp, Homo sapien
ccactgcaatagatgtggtgatgaa

SEQ ID NO: 5958159 - DNA, 25 bp, Homo sapien
attgccatttgaaaaatcagtatcg

SEQ ID NO: 5958160 - DNA, 25 bp, Homo sapien
aatccatctattggttggggaagca

SEQ ID NO: 5958161 - DNA, 25 bp, Homo sapien
ttctcaaaaccagccaatgccgtag

SEQ ID NO: 5958162 - DNA, 25 bp, Homo sapien
tgtaggatttcattttgttcaaatg

SEQ ID NO: 5958163 - DNA, 25 bp, Homo sapien
attattttggtaaggcgttgtgttc

SEQ ID NO: 5958164 - DNA, 25 bp, Homo sapien
catcagcgtcgtatgggtacagtgc

SEQ ID NO: 5958165 - DNA, 25 bp, Homo sapien
cctgctgaagcagcagctttcttgg

SEQ ID NO: 5958166 - DNA, 25 bp, Homo sapien
tgcatttcttctggaccatcgatta

SEQ ID NO: 5958167 - DNA, 25 bp, Homo sapien
cattatagacattattttggtaagg

SEQ ID NO: 5958168 - DNA, 25 bp, Homo sapien
tttgtgtgagaaggttgctgctgtg

SEQ ID NO: 5958169 - DNA, 25 bp, Homo sapien
tccgcatacactaaattcgttgcac

SEQ ID NO: 5958170 - DNA, 25 bp, Homo sapien
cacaaatgccactgcaatagatgtg

SEQ ID NO: 5958171 - DNA, 25 bp, Homo sapien
agtgtctcccatcgtagtttccgta

SEQ ID NO: 5958172 - DNA, 25 bp, Homo sapien
gacttgtaggatttcattttgttca

SEQ ID NO: 5958173 - DNA, 25 bp, Homo sapien
catcgattagttgaacataattgct

SEQ ID NO: 5958174 - DNA, 25 bp, Homo sapien
gtctcgtatagcatcattatagaca

SEQ ID NO: 5958175 - DNA, 25 bp, Homo sapien
gagatttcgtaagcatcatcgtcat

SEQ ID NO: 5958176 - DNA, 25 bp, Homo sapien
ccatcaaactgtgtcgcgtagcctg

SEQ ID NO: 5958177 - DNA, 25 bp, Homo sapien
tacgaggagttggtcttatctttga

SEQ ID NO: 5958178 - DNA, 25 bp, Homo sapien
gatgacccacgatacaattgccaaa

SEQ ID NO: 5958179 - DNA, 25 bp, Homo sapien
tacacaaatgccactgcaatagatg

SEQ ID NO: 5958180 - DNA, 25 bp, Homo sapien
ccgtagtacagaatccagattaaat

SEQ ID NO: 5958181 - DNA, 25 bp, Homo sapien
agatgagatggagcccccgatggcg

SEQ ID NO: 5958182 - DNA, 25 bp, Homo sapien
cgtagtttccgtattgccatttgaa

SEQ ID NO: 5958183 - DNA, 25 bp, Homo sapien
aggatcggcataaaattttttcatt

SEQ ID NO: 5958184 - DNA, 25 bp, Homo sapien
aatcagtatcgaacgtattacctat

SEQ ID NO: 5958185 - DNA, 25 bp, Homo sapien
tgagaaggttgctgctgtggatatc

SEQ ID NO: 5958186 - DNA, 25 bp, Homo sapien
tttacgaggagttggtcttatcttt

SEQ ID NO: 5958187 - DNA, 25 bp, Homo sapien
tatagcgaaaggatcggcataaaat

SEQ ID NO: 5958188 - DNA, 25 bp, Homo sapien
tgctgtggatatccatcaaactgtg

SEQ ID NO: 5958189 - DNA, 25 bp, Homo sapien
ccaccatctgccttcaatgtcagag

SEQ ID NO: 5958190 - DNA, 25 bp, Homo sapien
ctgtggatatccatcaaactgtgtc

SEQ ID NO: 5958191 - DNA, 25 bp, Homo sapien
ggtcggtagccatacgtgaaggttt

SEQ ID NO: 5958192 - DNA, 25 bp, Homo sapien
tagccatacgtgaaggtttacgagg

SEQ ID NO: 5958193 - DNA, 25 bp, Homo sapien
gccatacgtgaaggtttacgaggag

SEQ ID NO: 5958194 - DNA, 25 bp, Homo sapien
ctgtttcaccgtttgcccttcttgc

SEQ ID NO: 5958195 - DNA, 25 bp, Homo sapien
gatatagcgaaaggatcggcataaa

SEQ ID NO: 5958196 - DNA, 25 bp, Homo sapien
tctattggttggggaagcattatca

SEQ ID NO: 5958197 - DNA, 25 bp, Homo sapien
ttagtattggtttgattattgctat

SEQ ID NO: 5958198 - DNA, 25 bp, Homo sapien
aatagaacagcattaaagaacaaat

SEQ ID NO: 5958199 - DNA, 25 bp, Homo sapien
cgaatcaatccatctattggttggg

SEQ ID NO: 5958200 - DNA, 25 bp, Homo sapien
caatagatgtggtgatgaagattct

SEQ ID NO: 5958201 - DNA, 25 bp, Homo sapien
tgtgtgagaaggttgctgctgtgga

SEQ ID NO: 5958202 - DNA, 25 bp, Homo sapien
atgcagatgagatggagcccccgat

SEQ ID NO: 5958203 - DNA, 25 bp, Homo sapien
aagattaacggcttctgaagtattt

SEQ ID NO: 5958204 - DNA, 25 bp, Homo sapien
taattagaaattggtatactatacc

SEQ ID NO: 5958205 - DNA, 25 bp, Homo sapien
cattttgttcaaatgagatttcgta

SEQ ID NO: 5958206 - DNA, 25 bp, Homo sapien
ggaagcattatcaccgccgtagtac

SEQ ID NO: 5958207 - DNA, 25 bp, Homo sapien
gtatgggtacagtgcttttgccttg

SEQ ID NO: 5958208 - DNA, 25 bp, Homo sapien
gcgaaggcctgatacccttaatgga

SEQ ID NO: 5958209 - DNA, 25 bp, Homo sapien
gaaggcctgatacccttaatggaaa

SEQ ID NO: 5958210 - DNA, 25 bp, Homo sapien
taagatgacacctgctgaagcagca

SEQ ID NO: 5958211 - DNA, 25 bp, Homo sapien
atccatcaaactgtgtcgcgtagcc

SEQ ID NO: 5958212 - DNA, 25 bp, Homo sapien
aaaacgtgggaaggattcattggtg

SEQ ID NO: 5958213 - DNA, 25 bp, Homo sapien
ataattgcttggaataatacctgtt

SEQ ID NO: 5958214 - DNA, 25 bp, Homo sapien
ctggaccatcgattagttgaacata

SEQ ID NO: 5958215 - DNA, 25 bp, Homo sapien
taacgatgcatttcttctggaccat

SEQ ID NO: 5958216 - DNA, 25 bp, Homo sapien
gagcccccgatggcgatgacccacg

SEQ ID NO: 5958217 - DNA, 25 bp, Homo sapien
cacctgctgaagcagcagctttctt

SEQ ID NO: 5958218 - DNA, 25 bp, Homo sapien
tcgattagttgaacataattgcttg

SEQ ID NO: 5958219 - DNA, 25 bp, Homo sapien
aaattgatgatatagcgaaaggatc

SEQ ID NO: 5958220 - DNA, 25 bp, Homo sapien
tttatgatggaaagtaagatgacac

SEQ ID NO: 5958221 - DNA, 25 bp, Homo sapien
ataatttgtgtgagaaggttgctgc

SEQ ID NO: 5958222 - DNA, 25 bp, Homo sapien
tatacacaaatgccactgcaataga

SEQ ID NO: 5958223 - DNA, 25 bp, Homo sapien
tgtctcccatcgtagtttccgtatt

SEQ ID NO: 5958224 - DNA, 25 bp, Homo sapien
tgttgtagagtgttcaagtgaagat

SEQ ID NO: 5958225 - DNA, 25 bp, Homo sapien
tggtcttatctttgatgatattgac

SEQ ID NO: 5958226 - DNA, 25 bp, Homo sapien
gtgtcgcgtagcctgagtctcgtat

SEQ ID NO: 5958227 - DNA, 25 bp, Homo sapien
ccatcgtagtttccgtattgccatt

SEQ ID NO: 5958228 - DNA, 25 bp, Homo sapien
caagtgaagattaacggcttctgaa

SEQ ID NO: 5958229 - DNA, 25 bp, Homo sapien
tggcgaaggcctgatacccttaatg

SEQ ID NO: 5958230 - DNA, 25 bp, Homo sapien
gatacccttaatggaaaacgaatca

SEQ ID NO: 5958231 - DNA, 25 bp, Homo sapien
tatcaccgccgtagtacagaatcca

SEQ ID NO: 5958232 - DNA, 25 bp, Homo sapien
aaaatcagtatcgaacgtattacct

SEQ ID NO: 5958233 - DNA, 25 bp, Homo sapien
gatgcatttcttctggaccatcgat

SEQ ID NO: 5958234 - DNA, 25 bp, Homo sapien
ctgaagcagcagctttcttgggacc

SEQ ID NO: 5958235 - DNA, 25 bp, Homo sapien
aaagaaattgatgatatagcgaaag

SEQ ID NO: 5958236 - DNA, 25 bp, Homo sapien
agacccaaagtgtctcccatcgtag

SEQ ID NO: 5958237 - DNA, 25 bp, Homo sapien
agattctgtaatgatcgactaaatc

SEQ ID NO: 5958238 - DNA, 25 bp, Homo sapien
ttatagacattattttggtaaggcg

SEQ ID NO: 5958239 - DNA, 25 bp, Homo sapien
cttttgccttgtaaatgaaattatc

SEQ ID NO: 5958240 - DNA, 25 bp, Homo sapien
gccgtagaagatacataatttgtgt

SEQ ID NO: 5958241 - DNA, 25 bp, Homo sapien
atgatcgactaaatcaaaacaatag

SEQ ID NO: 5958242 - DNA, 25 bp, Homo sapien
gtcttatctttgatgatattgacat

SEQ ID NO: 5958243 - DNA, 25 bp, Homo sapien
ctattgatacgttgttgtagagtgt

SEQ ID NO: 5958244 - DNA, 25 bp, Homo sapien
tcagcgtcgtatgggtacagtgctt

SEQ ID NO: 5958245 - DNA, 25 bp, Homo sapien
tattctcaaaaccagccaatgccgt

SEQ ID NO: 5958246 - DNA, 25 bp, Homo sapien
atcaaactgtgtcgcgtagcctgag

SEQ ID NO: 5958247 - DNA, 25 bp, Homo sapien
tcgaacgtattacctatattagtat

SEQ ID NO: 5958248 - DNA, 25 bp, Homo sapien
cttcgcgttgcttgcgctattgata

SEQ ID NO: 5958249 - DNA, 25 bp, Homo sapien
ttcaccgtttgcccttcttgccttc

SEQ ID NO: 5958250 - DNA, 25 bp, Homo sapien
ccttccaccatctgccttcaatgtc

SEQ ID NO: 5958251 - DNA, 25 bp, Homo sapien
catcgtcatcagcgtcgtatgggta

SEQ ID NO: 5958252 - DNA, 25 bp, Homo sapien
cattaaagaacaaataattagaaat

SEQ ID NO: 5958253 - DNA, 25 bp, Homo sapien
ttcattttgttcaaatgagatttcg

SEQ ID NO: 5958254 - DNA, 25 bp, Homo sapien
aaatcaaaacaatagaacagcatta

SEQ ID NO: 5958255 - DNA, 25 bp, Homo sapien
aatgccactgcaatagatgtggtga

SEQ ID NO: 5958256 - DNA, 25 bp, Homo sapien
ggaccatcgattagttgaacataat

SEQ ID NO: 5958257 - DNA, 25 bp, Homo sapien
gcagatgagatggagcccccgatgg

SEQ ID NO: 5958258 - DNA, 25 bp, Homo sapien
gtaagcatcatcgtcatcagcgtcg

SEQ ID NO: 5958259 - DNA, 25 bp, Homo sapien
caccgtttgcccttcttgccttcca

SEQ ID NO: 5958260 - DNA, 25 bp, Homo sapien
tgttcaagtgaagattaacggcttc

SEQ ID NO: 5958261 - DNA, 25 bp, Homo sapien
tggagcccccgatggcgatgaccca

SEQ ID NO: 5958262 - DNA, 25 bp, Homo sapien
gggtacagtgcttttgccttgtaaa

SEQ ID NO: 5958263 - DNA, 25 bp, Homo sapien
attggtggatgcagatgagatggag

SEQ ID NO: 5958264 - DNA, 25 bp, Homo sapien
ctaaattcgttgcactgtttgtatt

SEQ ID NO: 5958265 - DNA, 25 bp, Homo sapien
gccaatgccgtagaagatacataat

SEQ ID NO: 5958266 - DNA, 25 bp, Homo sapien
gagatggagcccccgatggcgatga

SEQ ID NO: 5958267 - DNA, 25 bp, Homo sapien
tgatggaaagtaagatgacacctgc

SEQ ID NO: 5958268 - DNA, 25 bp, Homo sapien
tacctatattagtattggtttgatt

SEQ ID NO: 5958269 - DNA, 25 bp, Homo sapien
ctctatgaagagaattctctaatgg

SEQ ID NO: 5958270 - DNA, 25 bp, Homo sapien
agttgaacataattgcttggaataa

SEQ ID NO: 5958271 - DNA, 25 bp, Homo sapien
gtttcaccgtttgcccttcttgcct

SEQ ID NO: 5958272 - DNA, 25 bp, Homo sapien
tgcttttgccttgtaaatgaaatta

SEQ ID NO: 5958273 - DNA, 25 bp, Homo sapien
atggaaagtaagatgacacctgctg

SEQ ID NO: 5958274 - DNA, 25 bp, Homo sapien
gtagagtgttcaagtgaagattaac

SEQ ID NO: 5958275 - DNA, 25 bp, Homo sapien
tgatgaagattctgtaatgatcgac

SEQ ID NO: 5958276 - DNA, 25 bp, Homo sapien
aactgtgtcgcgtagcctgagtctc

SEQ ID NO: 5958277 - DNA, 25 bp, Homo sapien
agacattattttggtaaggcgttgt

SEQ ID NO: 5958278 - DNA, 25 bp, Homo sapien
ggtatactataccccaccaagtaaa

SEQ ID NO: 5958279 - DNA, 25 bp, Homo sapien
atgaaattatcatcaccgatatcgc

SEQ ID NO: 5958280 - DNA, 25 bp, Homo sapien
ttaacggcttctgaagtatttggct

SEQ ID NO: 5958281 - DNA, 25 bp, Homo sapien
gattaacggcttctgaagtatttgg

SEQ ID NO: 5958282 - DNA, 25 bp, Homo sapien
gcctgagtctcgtatagcatcatta

SEQ ID NO: 5958283 - DNA, 25 bp, Homo sapien
attctgtaatgatcgactaaatcaa

SEQ ID NO: 5958284 - DNA, 25 bp, Homo sapien
atcatcaccgatatcgctatacaga

SEQ ID NO: 5958285 - DNA, 25 bp, Homo sapien
aagaatggtcggtagccatacgtga

SEQ ID NO: 5958286 - DNA, 25 bp, Homo sapien
agatgtggtgatgaagattctgtaa

SEQ ID NO: 5958287 - DNA, 25 bp, Homo sapien
tcaccgatatcgctatacagaccca

SEQ ID NO: 5958288 - DNA, 25 bp, Homo sapien
ctgaagtatttggctgagtattctc

SEQ ID NO: 5958289 - DNA, 25 bp, Homo sapien
ggatatccatcaaactgtgtcgcgt

SEQ ID NO: 5958290 - DNA, 25 bp, Homo sapien
cactaaattcgttgcactgtttgta

SEQ ID NO: 5958291 - DNA, 25 bp, Homo sapien
aattctctaatggcgaaggcctgat

SEQ ID NO: 5958292 - DNA, 25 bp, Homo sapien
ggaataatacctgtttcaccgtttg

SEQ ID NO: 5958293 - DNA, 25 bp, Homo sapien
ttgaaaaatcagtatcgaacgtatt

SEQ ID NO: 5958294 - DNA, 25 bp, Homo sapien
aacgaatcaatccatctattggttg

SEQ ID NO: 5958295 - DNA, 25 bp, Homo sapien
tattgcctcttcgacgagctctatg

SEQ ID NO: 5958296 - DNA, 25 bp, Homo sapien
atagatgtggtgatgaagattctgt

SEQ ID NO: 5958297 - DNA, 25 bp, Homo sapien
tgattattgctattatcattggttt

SEQ ID NO: 5958298 - DNA, 25 bp, Homo sapien
ttgaacataattgcttggaataata

SEQ ID NO: 5958299 - DNA, 25 bp, Homo sapien
tacactaaattcgttgcactgtttg

SEQ ID NO: 5958300 - DNA, 25 bp, Homo sapien
gaagcagcagctttcttgggaccat

SEQ ID NO: 5958301 - DNA, 25 bp, Homo sapien
tcgcgttgcttgcgctattgatacg

SEQ ID NO: 5958302 - DNA, 25 bp, Homo sapien
gtattgccatttgaaaaatcagtat

SEQ ID NO: 5958303 - DNA, 25 bp, Homo sapien
gaagattctgtaatgatcgactaaa

SEQ ID NO: 5958304 - DNA, 25 bp, Homo sapien
aggagttggtcttatctttgatgat

SEQ ID NO: 5958305 - DNA, 25 bp, Homo sapien
taatacctgtttcaccgtttgccct

SEQ ID NO: 5958306 - DNA, 25 bp, Homo sapien
ggatgcagatgagatggagcccccg

SEQ ID NO: 5958307 - DNA, 25 bp, Homo sapien
cgaggagttggtcttatctttgatg

SEQ ID NO: 5958308 - DNA, 25 bp, Homo sapien
gacacctgctgaagcagcagctttc

SEQ ID NO: 5958309 - DNA, 25 bp, Homo sapien
ggattcattggtggatgcagatgag

SEQ ID NO: 5958310 - DNA, 25 bp, Homo sapien
gtggatgcagatgagatggagcccc

SEQ ID NO: 5958311 - DNA, 25 bp, Homo sapien
acgatacaattgccaaagaaattga

SEQ ID NO: 5958312 - DNA, 25 bp, Homo sapien
tttcgtaagcatcatcgtcatcagc

SEQ ID NO: 5958313 - DNA, 25 bp, Homo sapien
agaattctctaatggcgaaggcctg

SEQ ID NO: 5958314 - DNA, 25 bp, Homo sapien
cctatattagtattggtttgattat

SEQ ID NO: 5958315 - DNA, 25 bp, Homo sapien
tgcaatagatgtggtgatgaagatt

SEQ ID NO: 5958316 - DNA, 25 bp, Homo sapien
tgcactgtttgtattatacacaaat

SEQ ID NO: 5958317 - DNA, 25 bp, Homo sapien
cagcagctttcttgggaccatccgc

SEQ ID NO: 5958318 - DNA, 25 bp, Homo sapien
ttggggaagcattatcaccgccgta

SEQ ID NO: 5958319 - DNA, 25 bp, Homo sapien
acattattttggtaaggcgttgtgt

SEQ ID NO: 5958320 - DNA, 25 bp, Homo sapien
catttcttctggaccatcgattagt

SEQ ID NO: 5958321 - DNA, 25 bp, Homo sapien
tatcgaacgtattacctatattagt

SEQ ID NO: 5958322 - DNA, 25 bp, Homo sapien
accgatatcgctatacagacccaaa

SEQ ID NO: 5958323 - DNA, 25 bp, Homo sapien
gaagagaattctctaatggcgaagg

SEQ ID NO: 5958324 - DNA, 25 bp, Homo sapien
caaaacaatagaacagcattaaaga

SEQ ID NO: 5958325 - DNA, 25 bp, Homo sapien
ctcaaaaccagccaatgccgtagaa

SEQ ID NO: 5958326 - DNA, 25 bp, Homo sapien
agtattctcaaaaccagccaatgcc

SEQ ID NO: 5958327 - DNA, 25 bp, Homo sapien
gcttctgaagtatttggctgagtat

SEQ ID NO: 5958328 - DNA, 25 bp, Homo sapien
cttgtaggatttcattttgttcaaa

SEQ ID NO: 5958329 - DNA, 25 bp, Homo sapien
ttgctgctgtggatatccatcaaac

SEQ ID NO: 5958330 - DNA, 25 bp, Homo sapien
attatacacaaatgccactgcaata

SEQ ID NO: 5958331 - DNA, 25 bp, Homo sapien
catacactaaattcgttgcactgtt

SEQ ID NO: 5958332 - DNA, 25 bp, Homo sapien
tacccttaatggaaaacgaatcaat

SEQ ID NO: 5958333 - DNA, 25 bp, Homo sapien
ttggttggggaagcattatcaccgc

SEQ ID NO: 5958334 - DNA, 25 bp, Homo sapien
gctattatcattggtttccttcgcg

SEQ ID NO: 5958335 - DNA, 25 bp, Homo sapien
ttgtagagtgttcaagtgaagatta

SEQ ID NO: 5958336 - DNA, 25 bp, Homo sapien
tgggaaggattcattggtggatgca

SEQ ID NO: 5958337 - DNA, 25 bp, Homo sapien
aattatcatcaccgatatcgctata

SEQ ID NO: 5958338 - DNA, 25 bp, Homo sapien
atgatatagcgaaaggatcggcata

SEQ ID NO: 5958339 - DNA, 25 bp, Homo sapien
aatttatgatggaaagtaagatgac

SEQ ID NO: 5958340 - DNA, 25 bp, Homo sapien
tgttcctattgcctcttcgacgagc

SEQ ID NO: 5958341 - DNA, 25 bp, Homo sapien
ccccgatggcgatgacccacgatac

SEQ ID NO: 5958342 - DNA, 25 bp, Homo sapien
ctaaatcaaaacaatagaacagcat

SEQ ID NO: 5958343 - DNA, 25 bp, Homo sapien
ttccaccatctgccttcaatgtcag

SEQ ID NO: 5958344 - DNA, 25 bp, Homo sapien
ttgcttggaataatacctgtttcac

SEQ ID NO: 5958345 - DNA, 25 bp, Homo sapien
tcgacgagctctatgaagagaattc

SEQ ID NO: 5958346 - DNA, 25 bp, Homo sapien
gtaaatgaaattatcatcaccgata

SEQ ID NO: 5958347 - DNA, 25 bp, Homo sapien
tggctgagtattctcaaaaccagcc

SEQ ID NO: 5958348 - DNA, 25 bp, Homo sapien
tgtaatgatcgactaaatcaaaaca

SEQ ID NO: 5958349 - DNA, 25 bp, Homo sapien
gtattacctatattagtattggttt

SEQ ID NO: 5958350 - DNA, 25 bp, Homo sapien
caaaaccagccaatgccgtagaaga

SEQ ID NO: 5958351 - DNA, 25 bp, Homo sapien
ctctaatggcgaaggcctgataccc

SEQ ID NO: 5958352 - DNA, 25 bp, Homo sapien
cattttaaaagaatggtcggtagcc

SEQ ID NO: 5958353 - DNA, 25 bp, Homo sapien
aacggcttctgaagtatttggctga

SEQ ID NO: 5958354 - DNA, 25 bp, Homo sapien
atgacacctgctgaagcagcagctt

SEQ ID NO: 5958355 - DNA, 25 bp, Homo sapien
accagccaatgccgtagaagataca

SEQ ID NO: 5958356 - DNA, 25 bp, Homo sapien
gtttgtattatacacaaatgccact

SEQ ID NO: 5958357 - DNA, 25 bp, Homo sapien
tttgccttgtaaatgaaattatcat

SEQ ID NO: 5958358 - DNA, 25 bp, Homo sapien
cttgcgctattgatacgttgttgta

SEQ ID NO: 5958359 - DNA, 25 bp, Homo sapien
tcagtatcgaacgtattacctatat

SEQ ID NO: 5958360 - DNA, 25 bp, Homo sapien
tagtttccgtattgccatttgaaaa

SEQ ID NO: 5958361 - DNA, 25 bp, Homo sapien
cttgccttccaccatctgccttcaa

SEQ ID NO: 5958362 - DNA, 25 bp, Homo sapien
gttgtgttcctattgcctcttcgac

SEQ ID NO: 5958363 - DNA, 25 bp, Homo sapien
tttggctgagtattctcaaaaccag

SEQ ID NO: 5958364 - DNA, 25 bp, Homo sapien
ttcctattgcctcttcgacgagctc

SEQ ID NO: 5958365 - DNA, 25 bp, Homo sapien
tccttcgcgttgcttgcgctattga

SEQ ID NO: 5958366 - DNA, 25 bp, Homo sapien
tgccttccaccatctgccttcaatg

SEQ ID NO: 5958367 - DNA, 25 bp, Homo sapien
accatccgcatacactaaattcgtt

SEQ ID NO: 5958368 - DNA, 25 bp, Homo sapien
acataattgcttggaataatacctg

SEQ ID NO: 5958369 - DNA, 25 bp, Homo sapien
tctgtaatgatcgactaaatcaaaa

SEQ ID NO: 5958370 - DNA, 25 bp, Homo sapien
tatagcatcattatagacattattt

SEQ ID NO: 5958371 - DNA, 25 bp, Homo sapien
tacgtgaaggtttacgaggagttgg

SEQ ID NO: 5958372 - DNA, 25 bp, Homo sapien
gacgagctctatgaagagaattctc

SEQ ID NO: 5958373 - DNA, 25 bp, Homo sapien
attattgctattatcattggtttcc

SEQ ID NO: 5958374 - DNA, 25 bp, Homo sapien
ccttcaatgtcagagacttgtagga

SEQ ID NO: 5958375 - DNA, 25 bp, Homo sapien
cgtagcctgagtctcgtatagcatc

SEQ ID NO: 5958376 - DNA, 25 bp, Homo sapien
taatggaaaacgaatcaatccatct

SEQ ID NO: 5958377 - DNA, 25 bp, Homo sapien
ttttggtaaggcgttgtgttcctat

SEQ ID NO: 5958378 - DNA, 25 bp, Homo sapien
ggtttacgaggagttggtcttatct

SEQ ID NO: 5958379 - DNA, 25 bp, Homo sapien
ccaaagaaattgatgatatagcgaa

SEQ ID NO: 5958380 - DNA, 25 bp, Homo sapien
atttgaaaaatcagtatcgaacgta

SEQ ID NO: 5958381 - DNA, 25 bp, Homo sapien
tgagtattctcaaaaccagccaatg

SEQ ID NO: 5958382 - DNA, 25 bp, Homo sapien
atgagatttcgtaagcatcatcgtc

SEQ ID NO: 5958383 - DNA, 25 bp, Homo sapien
tgggaccatccgcatacactaaatt

SEQ ID NO: 5958384 - DNA, 25 bp, Homo sapien
ttgcctcttcgacgagctctatgaa

SEQ ID NO: 5958385 - DNA, 25 bp, Homo sapien
ggttggggaagcattatcaccgccg

SEQ ID NO: 5958386 - DNA, 25 bp, Homo sapien
ttgtaaatgaaattatcatcaccga

SEQ ID NO: 5958387 - DNA, 25 bp, Homo sapien
agctttcttgggaccatccgcatac

SEQ ID NO: 5958388 - DNA, 25 bp, Homo sapien
ttcaagtgaagattaacggcttctg

SEQ ID NO: 5958389 - DNA, 25 bp, Homo sapien
agatgacacctgctgaagcagcagc

SEQ ID NO: 5958390 - DNA, 25 bp, Homo sapien
agcattaaagaacaaataattagaa

SEQ ID NO: 5958391 - DNA, 25 bp, Homo sapien
ttcttgccttccaccatctgccttc

SEQ ID NO: 5958392 - DNA, 25 bp, Homo sapien
ccttgtaaatgaaattatcatcacc

SEQ ID NO: 5958393 - DNA, 25 bp, Homo sapien
cccttaatggaaaacgaatcaatcc

SEQ ID NO: 5958394 - DNA, 25 bp, Homo sapien
gtttgcccttcttgccttccaccat

SEQ ID NO: 5958395 - DNA, 25 bp, Homo sapien
atcgtagtttccgtattgccatttg

SEQ ID NO: 5958396 - DNA, 25 bp, Homo sapien
acgtattacctatattagtattggt

SEQ ID NO: 5958397 - DNA, 25 bp, Homo sapien
gtcgcgtagcctgagtctcgtatag

SEQ ID NO: 5958398 - DNA, 25 bp, Homo sapien
tggcgatgacccacgatacaattgc

SEQ ID NO: 5958399 - DNA, 25 bp, Homo sapien
aaagtgtctcccatcgtagtttccg

SEQ ID NO: 5958400 - DNA, 25 bp, Homo sapien
taaagaacaaataattagaaattgg

SEQ ID NO: 5958401 - DNA, 25 bp, Homo sapien
tgccaaagaaattgatgatatagcg

SEQ ID NO: 5958402 - DNA, 25 bp, Homo sapien
gatcggcataaaattttttcatttt

SEQ ID NO: 5958403 - DNA, 25 bp, Homo sapien
tatgatggaaagtaagatgacacct

SEQ ID NO: 5958404 - DNA, 25 bp, Homo sapien
ccttcttgccttccaccatctgcct

SEQ ID NO: 5958405 - DNA, 25 bp, Homo sapien
gcattatcaccgccgtagtacagaa

SEQ ID NO: 5958406 - DNA, 25 bp, Homo sapien
agagaattctctaatggcgaaggcc

SEQ ID NO: 5958407 - DNA, 25 bp, Homo sapien
tacaattgccaaagaaattgatgat

SEQ ID NO: 5958408 - DNA, 25 bp, Homo sapien
agatacataatttgtgtgagaaggt

SEQ ID NO: 5958409 - DNA, 25 bp, Homo sapien
agtgaagattaacggcttctgaagt

SEQ ID NO: 5958410 - DNA, 25 bp, Homo sapien
agtgcttttgccttgtaaatgaaat

SEQ ID NO: 5958411 - DNA, 25 bp, Homo sapien
tcaaatgagatttcgtaagcatcat

SEQ ID NO: 5958412 - DNA, 25 bp, Homo sapien
taaggcgttgtgttcctattgcctc

SEQ ID NO: 5958413 - DNA, 25 bp, Homo sapien
gctgagtattctcaaaaccagccaa

SEQ ID NO: 5958414 - DNA, 25 bp, Homo sapien
atgtggtgatgaagattctgtaatg

SEQ ID NO: 5958415 - DNA, 25 bp, Homo sapien
tcgtatgggtacagtgcttttgcct

SEQ ID NO: 5958416 - DNA, 25 bp, Homo sapien
attaaatttatgatggaaagtaaga

SEQ ID NO: 5958417 - DNA, 25 bp, Homo sapien
ttaaaagaatggtcggtagccatac

SEQ ID NO: 5958418 - DNA, 25 bp, Homo sapien
cactgtttgtattatacacaaatgc

SEQ ID NO: 5958419 - DNA, 25 bp, Homo sapien
cgtatagcatcattatagacattat

SEQ ID NO: 5958420 - DNA, 25 bp, Homo sapien
cttgggaccatccgcatacactaaa

SEQ ID NO: 5958421 - DNA, 25 bp, Homo sapien
tgccttcaatgtcagagacttgtag

SEQ ID NO: 5958422 - DNA, 25 bp, Homo sapien
tattagtattggtttgattattgct

SEQ ID NO: 5958423 - DNA, 25 bp, Homo sapien
ggaaggattcattggtggatgcaga

SEQ ID NO: 5958424 - DNA, 25 bp, Homo sapien
ctatgaagagaattctctaatggcg

SEQ ID NO: 5958425 - DNA, 25 bp, Homo sapien
agtgttcaagtgaagattaacggct

SEQ ID NO: 5958426 - DNA, 25 bp, Homo sapien
gaagatacataatttgtgtgagaag

SEQ ID NO: 5958427 - DNA, 25 bp, Homo sapien
catctattggttggggaagcattat

SEQ ID NO: 5958428 - DNA, 25 bp, Homo sapien
tattggttggggaagcattatcacc

SEQ ID NO: 5958429 - DNA, 25 bp, Homo sapien
agtacagaatccagattaaatttat

SEQ ID NO: 5958430 - DNA, 25 bp, Homo sapien
atgaagattctgtaatgatcgacta

SEQ ID NO: 5958431 - DNA, 25 bp, Homo sapien
ttggtttgattattgctattatcat

SEQ ID NO: 5958432 - DNA, 25 bp, Homo sapien
gttgttgtagagtgttcaagtgaag

SEQ ID NO: 5958433 - DNA, 25 bp, Homo sapien
tgcttgcgctattgatacgttgttg

SEQ ID NO: 5958434 - DNA, 25 bp, Homo sapien
gatacaattgccaaagaaattgatg

SEQ ID NO: 5958435 - DNA, 25 bp, Homo sapien
ccgtattgccatttgaaaaatcagt

SEQ ID NO: 5958436 - DNA, 25 bp, Homo sapien
aaatgaaattatcatcaccgatatc

SEQ ID NO: 5958437 - DNA, 25 bp, Homo sapien
ggtttccttcgcgttgcttgcgcta

SEQ ID NO: 5958438 - DNA, 25 bp, Homo sapien
cagccaatgccgtagaagatacata

SEQ ID NO: 5958439 - DNA, 25 bp, Homo sapien
aaaagaatggtcggtagccatacgt

SEQ ID NO: 5958440 - DNA, 25 bp, Homo sapien
aattgcttggaataatacctgtttc

SEQ ID NO: 5958441 - DNA, 25 bp, Homo sapien
gaaaaatcagtatcgaacgtattac

SEQ ID NO: 5958442 - DNA, 25 bp, Homo sapien
ttatcattggtttccttcgcgttgc

SEQ ID NO: 5958443 - DNA, 25 bp, Homo sapien
ggggaagcattatcaccgccgtagt

SEQ ID NO: 5958444 - DNA, 25 bp, Homo sapien
gaatccagattaaatttatgatgga

SEQ ID NO: 5958445 - DNA, 25 bp, Homo sapien
cttcgacgagctctatgaagagaat

SEQ ID NO: 5958446 - DNA, 25 bp, Homo sapien
ggttgctgctgtggatatccatcaa

SEQ ID NO: 5958447 - DNA, 25 bp, Homo sapien
agcgtcgtatgggtacagtgctttt

SEQ ID NO: 5958448 - DNA, 25 bp, Homo sapien
aagatccattacccaagaagaatga

SEQ ID NO: 5958449 - DNA, 25 bp, Homo sapien
caaatacgaaaatcaacgactgcat

SEQ ID NO: 5958450 - DNA, 25 bp, Homo sapien
gttaaagaatggtgctttggctaaa

SEQ ID NO: 5958451 - DNA, 25 bp, Homo sapien
gaaacgtggcacctcatctggatct

SEQ ID NO: 5958452 - DNA, 25 bp, Homo sapien
atcaagataccaggatgactatgat

SEQ ID NO: 5958453 - DNA, 25 bp, Homo sapien
accacaaaagaaagcatcccctggc

SEQ ID NO: 5958454 - DNA, 25 bp, Homo sapien
accaggatgactatgatgaagaaga

SEQ ID NO: 5958455 - DNA, 25 bp, Homo sapien
aacgatatggatgattttatagaag

SEQ ID NO: 5958456 - DNA, 25 bp, Homo sapien
aaagaaagcatcccctggcgcaaca

SEQ ID NO: 5958457 - DNA, 25 bp, Homo sapien
ccaagaagaatgacgaagagtattc

SEQ ID NO: 5958458 - DNA, 25 bp, Homo sapien
ccactcaagccagttgtaaggaaga

SEQ ID NO: 5958459 - DNA, 25 bp, Homo sapien
tcgaaacacagcaatggtcccggat

SEQ ID NO: 5958460 - DNA, 25 bp, Homo sapien
aagattgaaggagctgaggcggcag

SEQ ID NO: 5958461 - DNA, 25 bp, Homo sapien
ctgaacctatcaaaaagatgtcatt

SEQ ID NO: 5958462 - DNA, 25 bp, Homo sapien
aggtctattggagcaagtcatgcgc

SEQ ID NO: 5958463 - DNA, 25 bp, Homo sapien
tgatatggaagcaaatgagatggaa

SEQ ID NO: 5958464 - DNA, 25 bp, Homo sapien
cataaaatcatcagactcacccaag

SEQ ID NO: 5958465 - DNA, 25 bp, Homo sapien
gttcaaaaagaccacaaaagaaagc

SEQ ID NO: 5958466 - DNA, 25 bp, Homo sapien
gagatggaaatcttggaagaggagg

SEQ ID NO: 5958467 - DNA, 25 bp, Homo sapien
cgactgcatcaaaagcccaagtgca

SEQ ID NO: 5958468 - DNA, 25 bp, Homo sapien
tgggctatgttcaatagaggcaaga

SEQ ID NO: 5958469 - DNA, 25 bp, Homo sapien
attacataagagacgaagatcctgc

SEQ ID NO: 5958470 - DNA, 25 bp, Homo sapien
gactatgatgaagaagataacgata

SEQ ID NO: 5958471 - DNA, 25 bp, Homo sapien
tggccttggaattaggtttaagagg

SEQ ID NO: 5958472 - DNA, 25 bp, Homo sapien
aaaaagaccacaaaagaaagcatcc

SEQ ID NO: 5958473 - DNA, 25 bp, Homo sapien
aatggcaaggttagaggataaacgt

SEQ ID NO: 5958474 - DNA, 25 bp, Homo sapien
caaaaagatgtcatttgaagagcta

SEQ ID NO: 5958475 - DNA, 25 bp, Homo sapien
tcaaaaagaccacaaaagaaagcat

SEQ ID NO: 5958476 - DNA, 25 bp, Homo sapien
ctcatctggatctgagaaaaagaaa

SEQ ID NO: 5958477 - DNA, 25 bp, Homo sapien
agacgaagatcctgcagtaaaaaga

SEQ ID NO: 5958478 - DNA, 25 bp, Homo sapien
acttgcccacaaatggatttgctca

SEQ ID NO: 5958479 - DNA, 25 bp, Homo sapien
gcggtcagaatacgattacgatgag

SEQ ID NO: 5958480 - DNA, 25 bp, Homo sapien
aggaaatggcaagaaaaatggcaag

SEQ ID NO: 5958481 - DNA, 25 bp, Homo sapien
catcaaaagcccaagtgcaagatcc

SEQ ID NO: 5958482 - DNA, 25 bp, Homo sapien
gattttatagaagacgatgaagatg

SEQ ID NO: 5958483 - DNA, 25 bp, Homo sapien
tgtaaggaagaaacctgaacctatc

SEQ ID NO: 5958484 - DNA, 25 bp, Homo sapien
cgattacgatgagcttgaggatgat

SEQ ID NO: 5958485 - DNA, 25 bp, Homo sapien
aaacagaaatcaagataccaggatg

SEQ ID NO: 5958486 - DNA, 25 bp, Homo sapien
aatagaaaggaatgacgatgatgaa

SEQ ID NO: 5958487 - DNA, 25 bp, Homo sapien
aataatgagaaacagcccccaaaag

SEQ ID NO: 5958488 - DNA, 25 bp, Homo sapien
taggtttaagaggtctattggagca

SEQ ID NO: 5958489 - DNA, 25 bp, Homo sapien
cgtgacgaaatttgggctatgttca

SEQ ID NO: 5958490 - DNA, 25 bp, Homo sapien
aaagaccacaaaagaaagcatcccc

SEQ ID NO: 5958491 - DNA, 25 bp, Homo sapien
aagaggagaagagacgccgtaagaa

SEQ ID NO: 5958492 - DNA, 25 bp, Homo sapien
agaggtctattggagcaagtcatgc

SEQ ID NO: 5958493 - DNA, 25 bp, Homo sapien
atgaaggttaccacagcaaatcgaa

SEQ ID NO: 5958494 - DNA, 25 bp, Homo sapien
atttgaagagctaatgaaacaagcg

SEQ ID NO: 5958495 - DNA, 25 bp, Homo sapien
aaattacataagagacgaagatcct

SEQ ID NO: 5958496 - DNA, 25 bp, Homo sapien
aacgtggcacctcatctggatctga

SEQ ID NO: 5958497 - DNA, 25 bp, Homo sapien
acctgaacctatcaaaaagatgtca

SEQ ID NO: 5958498 - DNA, 25 bp, Homo sapien
atgattttatagaagacgatgaaga

SEQ ID NO: 5958499 - DNA, 25 bp, Homo sapien
tctttccaaactttcccaaatacga

SEQ ID NO: 5958500 - DNA, 25 bp, Homo sapien
aagagacgccgtaagaagggcatac

SEQ ID NO: 5958501 - DNA, 25 bp, Homo sapien
gaagcttggttaaaaaagcatgaag

SEQ ID NO: 5958502 - DNA, 25 bp, Homo sapien
gatgatgaaggtggccttggaatta

SEQ ID NO: 5958503 - DNA, 25 bp, Homo sapien
tgttacccaaaaattacataagaga

SEQ ID NO: 5958504 - DNA, 25 bp, Homo sapien
ggtttaagaggtctattggagcaag

SEQ ID NO: 5958505 - DNA, 25 bp, Homo sapien
gaacgcccacattttaacaagccag

SEQ ID NO: 5958506 - DNA, 25 bp, Homo sapien
agatgaaggttaccacagcaaatcg

SEQ ID NO: 5958507 - DNA, 25 bp, Homo sapien
acctatcaaaaagatgtcatttgaa

SEQ ID NO: 5958508 - DNA, 25 bp, Homo sapien
ggatttgctcaacctaataggagat

SEQ ID NO: 5958509 - DNA, 25 bp, Homo sapien
aatgacgaagagtattccttgttac

SEQ ID NO: 5958510 - DNA, 25 bp, Homo sapien
ctatgttcaatagaggcaagaagcg

SEQ ID NO: 5958511 - DNA, 25 bp, Homo sapien
cggatatgatcgtgacgaaatttgg

SEQ ID NO: 5958512 - DNA, 25 bp, Homo sapien
aatttgggctatgttcaatagaggc

SEQ ID NO: 5958513 - DNA, 25 bp, Homo sapien
gatccattacccaagaagaatgacg

SEQ ID NO: 5958514 - DNA, 25 bp, Homo sapien
gcaagatccattacccaagaagaat

SEQ ID NO: 5958515 - DNA, 25 bp, Homo sapien
aggcggcaggaactgttaaagaatg

SEQ ID NO: 5958516 - DNA, 25 bp, Homo sapien
acccaagcccgtcaagctcaacttg

SEQ ID NO: 5958517 - DNA, 25 bp, Homo sapien
agaaagcatcccctggcgcaacatt

SEQ ID NO: 5958518 - DNA, 25 bp, Homo sapien
aatggtcccggatatgatcgtgacg

SEQ ID NO: 5958519 - DNA, 25 bp, Homo sapien
cttggttaaaaaagcatgaagagga

SEQ ID NO: 5958520 - DNA, 25 bp, Homo sapien
ttgaggatgatgatatggaagcaaa

SEQ ID NO: 5958521 - DNA, 25 bp, Homo sapien
gaatggtgctttggctaaaaaaagt

SEQ ID NO: 5958522 - DNA, 25 bp, Homo sapien
atgagatggaaatcttggaagagga

SEQ ID NO: 5958523 - DNA, 25 bp, Homo sapien
actcaagccagttgtaaggaagaaa

SEQ ID NO: 5958524 - DNA, 25 bp, Homo sapien
ggtcagaatacgattacgatgagct

SEQ ID NO: 5958525 - DNA, 25 bp, Homo sapien
taaaaagattgaaggagctgaggcg

SEQ ID NO: 5958526 - DNA, 25 bp, Homo sapien
tgacgaaatttgggctatgttcaat

SEQ ID NO: 5958527 - DNA, 25 bp, Homo sapien
gaagagctaatgaaacaagcggaaa

SEQ ID NO: 5958528 - DNA, 25 bp, Homo sapien
tattccttgttacccaaaaattaca

SEQ ID NO: 5958529 - DNA, 25 bp, Homo sapien
tgaaacaagcggaaaataatgagaa

SEQ ID NO: 5958530 - DNA, 25 bp, Homo sapien
gatatgatcgtgacgaaatttgggc

SEQ ID NO: 5958531 - DNA, 25 bp, Homo sapien
ggcaatagcataaaatcatcagact

SEQ ID NO: 5958532 - DNA, 25 bp, Homo sapien
atagcataaaatcatcagactcacc

SEQ ID NO: 5958533 - DNA, 25 bp, Homo sapien
gaaggttaccacagcaaatcgaaac

SEQ ID NO: 5958534 - DNA, 25 bp, Homo sapien
tgcatcaaaagcccaagtgcaagat

SEQ ID NO: 5958535 - DNA, 25 bp, Homo sapien
caagaagcggtcagaatacgattac

SEQ ID NO: 5958536 - DNA, 25 bp, Homo sapien
tgagttttctttccaaactttccca

SEQ ID NO: 5958537 - DNA, 25 bp, Homo sapien
aagacgatgaagatgaaggttacca

SEQ ID NO: 5958538 - DNA, 25 bp, Homo sapien
aggataaacgtgaggaagcttggtt

SEQ ID NO: 5958539 - DNA, 25 bp, Homo sapien
agaccacaaaagaaagcatcccctg

SEQ ID NO: 5958540 - DNA, 25 bp, Homo sapien
atggaagcaaatgagatggaaatct

SEQ ID NO: 5958541 - DNA, 25 bp, Homo sapien
aacaagccaggtttcaaaagttcaa

SEQ ID NO: 5958542 - DNA, 25 bp, Homo sapien
cttggaattaggtttaagaggtcta

SEQ ID NO: 5958543 - DNA, 25 bp, Homo sapien
aagaagataacgatatggatgattt

SEQ ID NO: 5958544 - DNA, 25 bp, Homo sapien
tggagtatcttctggaggcaatagc

SEQ ID NO: 5958545 - DNA, 25 bp, Homo sapien
gaggagaagagacgccgtaagaagg

SEQ ID NO: 5958546 - DNA, 25 bp, Homo sapien
gccagttgtaaggaagaaacctgaa

SEQ ID NO: 5958547 - DNA, 25 bp, Homo sapien
caggatgactatgatgaagaagata

SEQ ID NO: 5958548 - DNA, 25 bp, Homo sapien
ggaactgttaaagaatggtgctttg

SEQ ID NO: 5958549 - DNA, 25 bp, Homo sapien
cgccactcaagccagttgtaaggaa

SEQ ID NO: 5958550 - DNA, 25 bp, Homo sapien
atgaaggtggccttggaattaggtt

SEQ ID NO: 5958551 - DNA, 25 bp, Homo sapien
tggaaatcttggaagaggaggaaat

SEQ ID NO: 5958552 - DNA, 25 bp, Homo sapien
atggatgattttatagaagacgatg

SEQ ID NO: 5958553 - DNA, 25 bp, Homo sapien
gcccacattttaacaagccaggttt

SEQ ID NO: 5958554 - DNA, 25 bp, Homo sapien
gattgaaggagctgaggcggcagga

SEQ ID NO: 5958555 - DNA, 25 bp, Homo sapien
tcatttgaagagctaatgaaacaag

SEQ ID NO: 5958556 - DNA, 25 bp, Homo sapien
aatggcaagaaaaatggcaaggtta

SEQ ID NO: 5958557 - DNA, 25 bp, Homo sapien
gacgatgaagatgaaggttaccaca

SEQ ID NO: 5958558 - DNA, 25 bp, Homo sapien
tcagaatacgattacgatgagcttg

SEQ ID NO: 5958559 - DNA, 25 bp, Homo sapien
gaattaggtttaagaggtctattgg

SEQ ID NO: 5958560 - DNA, 25 bp, Homo sapien
taagtcatcggaacccgtaactaag

SEQ ID NO: 5958561 - DNA, 25 bp, Homo sapien
agaagagacgccgtaagaagggcat

SEQ ID NO: 5958562 - DNA, 25 bp, Homo sapien
gttcaatagaggcaagaagcggtca

SEQ ID NO: 5958563 - DNA, 25 bp, Homo sapien
aaacctgaacctatcaaaaagatgt

SEQ ID NO: 5958564 - DNA, 25 bp, Homo sapien
catcccctggcgcaacattgcgtgg

SEQ ID NO: 5958565 - DNA, 25 bp, Homo sapien
tggtcccggatatgatcgtgacgaa

SEQ ID NO: 5958566 - DNA, 25 bp, Homo sapien
catgaagaggagaagagacgccgta

SEQ ID NO: 5958567 - DNA, 25 bp, Homo sapien
cttctggaggcaatagcataaaatc

SEQ ID NO: 5958568 - DNA, 25 bp, Homo sapien
gttgtaaggaagaaacctgaaccta

SEQ ID NO: 5958569 - DNA, 25 bp, Homo sapien
ctaatgaaacaagcggaaaataatg

SEQ ID NO: 5958570 - DNA, 25 bp, Homo sapien
ccacattttaacaagccaggtttca

SEQ ID NO: 5958571 - DNA, 25 bp, Homo sapien
tatgatcgtgacgaaatttgggcta

SEQ ID NO: 5958572 - DNA, 25 bp, Homo sapien
atcgtgacgaaatttgggctatgtt

SEQ ID NO: 5958573 - DNA, 25 bp, Homo sapien
cctgcagtaaaaagattgaaggagc

SEQ ID NO: 5958574 - DNA, 25 bp, Homo sapien
aaatcttggaagaggaggaaatggc

SEQ ID NO: 5958575 - DNA, 25 bp, Homo sapien
gcccccaaaagttaagtcatcggaa

SEQ ID NO: 5958576 - DNA, 25 bp, Homo sapien
aatcaacgactgcatcaaaagccca

SEQ ID NO: 5958577 - DNA, 25 bp, Homo sapien
ggcgcaacattgcgtggagtatctt

SEQ ID NO: 5958578 - DNA, 25 bp, Homo sapien
aaatggatttgctcaacctaatagg

SEQ ID NO: 5958579 - DNA, 25 bp, Homo sapien
acaaatggatttgctcaacctaata

SEQ ID NO: 5958580 - DNA, 25 bp, Homo sapien
aatgacgatgatgaaggtggccttg

SEQ ID NO: 5958581 - DNA, 25 bp, Homo sapien
agcataaaatcatcagactcaccca

SEQ ID NO: 5958582 - DNA, 25 bp, Homo sapien
tagaaaggaatgacgatgatgaagg

SEQ ID NO: 5958583 - DNA, 25 bp, Homo sapien
gcccacaaatggatttgctcaacct

SEQ ID NO: 5958584 - DNA, 25 bp, Homo sapien
ttggaagaggaggaaatggcaagaa

SEQ ID NO: 5958585 - DNA, 25 bp, Homo sapien
atatggatgattttatagaagacga

SEQ ID NO: 5958586 - DNA, 25 bp, Homo sapien
taagaggtctattggagcaagtcat

SEQ ID NO: 5958587 - DNA, 25 bp, Homo sapien
ggtggccttggaattaggtttaaga

SEQ ID NO: 5958588 - DNA, 25 bp, Homo sapien
agtggtgtaaaacggaaacgtggca

SEQ ID NO: 5958589 - DNA, 25 bp, Homo sapien
ggcaagaagcggtcagaatacgatt

SEQ ID NO: 5958590 - DNA, 25 bp, Homo sapien
caatagcataaaatcatcagactca

SEQ ID NO: 5958591 - DNA, 25 bp, Homo sapien
aaatcatcagactcacccaagcccg

SEQ ID NO: 5958592 - DNA, 25 bp, Homo sapien
atgagcttgaggatgatgatatgga

SEQ ID NO: 5958593 - DNA, 25 bp, Homo sapien
caagataccaggatgactatgatga

SEQ ID NO: 5958594 - DNA, 25 bp, Homo sapien
acagaaatcaagataccaggatgac

SEQ ID NO: 5958595 - DNA, 25 bp, Homo sapien
gtcaagctcaacttgcccacaaatg

SEQ ID NO: 5958596 - DNA, 25 bp, Homo sapien
gcaaggttagaggataaacgtgagg

SEQ ID NO: 5958597 - DNA, 25 bp, Homo sapien
aagtgcaagatccattacccaagaa

SEQ ID NO: 5958598 - DNA, 25 bp, Homo sapien
acagcaaatcgaaacacagcaatgg

SEQ ID NO: 5958599 - DNA, 25 bp, Homo sapien
tggagcaagtcatgcgccactcaag

SEQ ID NO: 5958600 - DNA, 25 bp, Homo sapien
agtaaaaagattgaaggagctgagg

SEQ ID NO: 5958601 - DNA, 25 bp, Homo sapien
ccacaaatggatttgctcaacctaa

SEQ ID NO: 5958602 - DNA, 25 bp, Homo sapien
agcaaatcgaaacacagcaatggtc

SEQ ID NO: 5958603 - DNA, 25 bp, Homo sapien
ttacccaaaaattacataagagacg

SEQ ID NO: 5958604 - DNA, 25 bp, Homo sapien
tggttaaaaaagcatgaagaggaga

SEQ ID NO: 5958605 - DNA, 25 bp, Homo sapien
atcttctggaggcaatagcataaaa

SEQ ID NO: 5958606 - DNA, 25 bp, Homo sapien
gaagataacgatatggatgatttta

SEQ ID NO: 5958607 - DNA, 25 bp, Homo sapien
gccttggaattaggtttaagaggtc

SEQ ID NO: 5958608 - DNA, 25 bp, Homo sapien
cattacccaagaagaatgacgaaga

SEQ ID NO: 5958609 - DNA, 25 bp, Homo sapien
agaagacgatgaagatgaaggttac

SEQ ID NO: 5958610 - DNA, 25 bp, Homo sapien
agctcaacttgcccacaaatggatt

SEQ ID NO: 5958611 - DNA, 25 bp, Homo sapien
tgcgccactcaagccagttgtaagg

SEQ ID NO: 5958612 - DNA, 25 bp, Homo sapien
cgatgaagatgaaggttaccacagc

SEQ ID NO: 5958613 - DNA, 25 bp, Homo sapien
tgacgaagagtattccttgttaccc

SEQ ID NO: 5958614 - DNA, 25 bp, Homo sapien
gtcccggatatgatcgtgacgaaat

SEQ ID NO: 5958615 - DNA, 25 bp, Homo sapien
tgacgatgatgaaggtggccttgga

SEQ ID NO: 5958616 - DNA, 25 bp, Homo sapien
gaggcaatagcataaaatcatcaga

SEQ ID NO: 5958617 - DNA, 25 bp, Homo sapien
aaaaagcatgaagaggagaagagac

SEQ ID NO: 5958618 - DNA, 25 bp, Homo sapien
ccaagcccgtcaagctcaacttgcc

SEQ ID NO: 5958619 - DNA, 25 bp, Homo sapien
tacgattacgatgagcttgaggatg

SEQ ID NO: 5958620 - DNA, 25 bp, Homo sapien
gaaaaatggcaaggttagaggataa

SEQ ID NO: 5958621 - DNA, 25 bp, Homo sapien
agctaatgaaacaagcggaaaataa

SEQ ID NO: 5958622 - DNA, 25 bp, Homo sapien
caaactttcccaaatacgaaaatca

SEQ ID NO: 5958623 - DNA, 25 bp, Homo sapien
ggatgactatgatgaagaagataac

SEQ ID NO: 5958624 - DNA, 25 bp, Homo sapien
tcaacctaataggagattaaaagaa

SEQ ID NO: 5958625 - DNA, 25 bp, Homo sapien
gctgaggcggcaggaactgttaaag

SEQ ID NO: 5958626 - DNA, 25 bp, Homo sapien
gcaagtcatgcgccactcaagccag

SEQ ID NO: 5958627 - DNA, 25 bp, Homo sapien
cgaaaatcaacgactgcatcaaaag

SEQ ID NO: 5958628 - DNA, 25 bp, Homo sapien
tggaggcaatagcataaaatcatca

SEQ ID NO: 5958629 - DNA, 25 bp, Homo sapien
agttagaatctagaaaacagaaatc

SEQ ID NO: 5958630 - DNA, 25 bp, Homo sapien
aggagctgaggcggcaggaactgtt

SEQ ID NO: 5958631 - DNA, 25 bp, Homo sapien
ctattggagcaagtcatgcgccact

SEQ ID NO: 5958632 - DNA, 25 bp, Homo sapien
atcttggaagaggaggaaatggcaa

SEQ ID NO: 5958633 - DNA, 25 bp, Homo sapien
cacagcaatggtcccggatatgatc

SEQ ID NO: 5958634 - DNA, 25 bp, Homo sapien
acgcccacattttaacaagccaggt

SEQ ID NO: 5958635 - DNA, 25 bp, Homo sapien
aatgaaacaagcggaaaataatgag

SEQ ID NO: 5958636 - DNA, 25 bp, Homo sapien
cgtggcacctcatctggatctgaga

SEQ ID NO: 5958637 - DNA, 25 bp, Homo sapien
ttatagaagacgatgaagatgaagg

SEQ ID NO: 5958638 - DNA, 25 bp, Homo sapien
agataacgatatggatgattttata

SEQ ID NO: 5958639 - DNA, 25 bp, Homo sapien
caagccaggtttcaaaagttcaaaa

SEQ ID NO: 5958640 - DNA, 25 bp, Homo sapien
aacgactgcatcaaaagcccaagtg

SEQ ID NO: 5958641 - DNA, 25 bp, Homo sapien
agtcatcggaacccgtaactaagga

SEQ ID NO: 5958642 - DNA, 25 bp, Homo sapien
caacttgcccacaaatggatttgct

SEQ ID NO: 5958643 - DNA, 25 bp, Homo sapien
aaacaagcggaaaataatgagaaac

SEQ ID NO: 5958644 - DNA, 25 bp, Homo sapien
agaagcggtcagaatacgattacga

SEQ ID NO: 5958645 - DNA, 25 bp, Homo sapien
taaggaacgcccacattttaacaag

SEQ ID NO: 5958646 - DNA, 25 bp, Homo sapien
ctgttaaagaatggtgctttggcta

SEQ ID NO: 5958647 - DNA, 25 bp, Homo sapien
gcccgtcaagctcaacttgcccaca

SEQ ID NO: 5958648 - DNA, 25 bp, Homo sapien
acgaaatttgggctatgttcaatag

SEQ ID NO: 5958649 - DNA, 25 bp, Homo sapien
aacagcccccaaaagttaagtcatc

SEQ ID NO: 5958650 - DNA, 25 bp, Homo sapien
catctggatctgagaaaaagaaaat

SEQ ID NO: 5958651 - DNA, 25 bp, Homo sapien
aagcggaaaataatgagaaacagcc

SEQ ID NO: 5958652 - DNA, 25 bp, Homo sapien
aaaaattacataagagacgaagatc

SEQ ID NO: 5958653 - DNA, 25 bp, Homo sapien
atgaagatgaaggttaccacagcaa

SEQ ID NO: 5958654 - DNA, 25 bp, Homo sapien
gaagatgaaggttaccacagcaaat

SEQ ID NO: 5958655 - DNA, 25 bp, Homo sapien
agataccaggatgactatgatgaag

SEQ ID NO: 5958656 - DNA, 25 bp, Homo sapien
atatggaagcaaatgagatggaaat

SEQ ID NO: 5958657 - DNA, 25 bp, Homo sapien
ggaagaggaggaaatggcaagaaaa

SEQ ID NO: 5958658 - DNA, 25 bp, Homo sapien
catgcgccactcaagccagttgtaa

SEQ ID NO: 5958659 - DNA, 25 bp, Homo sapien
tcaaaagcccaagtgcaagatccat

SEQ ID NO: 5958660 - DNA, 25 bp, Homo sapien
acattttaacaagccaggtttcaaa

SEQ ID NO: 5958661 - DNA, 25 bp, Homo sapien
tgtcatttgaagagctaatgaaaca

SEQ ID NO: 5958662 - DNA, 25 bp, Homo sapien
agatcctgcagtaaaaagattgaag

SEQ ID NO: 5958663 - DNA, 25 bp, Homo sapien
tgaggaagcttggttaaaaaagcat

SEQ ID NO: 5958664 - DNA, 25 bp, Homo sapien
gagcaagtcatgcgccactcaagcc

SEQ ID NO: 5958665 - DNA, 25 bp, Homo sapien
aaaagattgaaggagctgaggcggc

SEQ ID NO: 5958666 - DNA, 25 bp, Homo sapien
gaaaggaatgacgatgatgaaggtg

SEQ ID NO: 5958667 - DNA, 25 bp, Homo sapien
tcagactcacccaagcccgtcaagc

SEQ ID NO: 5958668 - DNA, 25 bp, Homo sapien
ttccttgttacccaaaaattacata

SEQ ID NO: 5958669 - DNA, 25 bp, Homo sapien
gtatcttctggaggcaatagcataa

SEQ ID NO: 5958670 - DNA, 25 bp, Homo sapien
gcaagaaaaatggcaaggttagagg

SEQ ID NO: 5958671 - DNA, 25 bp, Homo sapien
acgaagatcctgcagtaaaaagatt

SEQ ID NO: 5958672 - DNA, 25 bp, Homo sapien
tgatgaaggtggccttggaattagg

SEQ ID NO: 5958673 - DNA, 25 bp, Homo sapien
gagcttgaggatgatgatatggaag

SEQ ID NO: 5958674 - DNA, 25 bp, Homo sapien
aaagcatgaagaggagaagagacgc

SEQ ID NO: 5958675 - DNA, 25 bp, Homo sapien
taaagaatggtgctttggctaaaaa

SEQ ID NO: 5958676 - DNA, 25 bp, Homo sapien
caacattgcgtggagtatcttctgg

SEQ ID NO: 5958677 - DNA, 25 bp, Homo sapien
ggttagaggataaacgtgaggaagc

SEQ ID NO: 5958678 - DNA, 25 bp, Homo sapien
aatagaggcaagaagcggtcagaat

SEQ ID NO: 5958679 - DNA, 25 bp, Homo sapien
atgatgaagaagataacgatatgga

SEQ ID NO: 5958680 - DNA, 25 bp, Homo sapien
gaagagtattccttgttacccaaaa

SEQ ID NO: 5958681 - DNA, 25 bp, Homo sapien
gaaatttgggctatgttcaatagag

SEQ ID NO: 5958682 - DNA, 25 bp, Homo sapien
ttgcccacaaatggatttgctcaac

SEQ ID NO: 5958683 - DNA, 25 bp, Homo sapien
gacgccgtaagaagggcatacgcta

SEQ ID NO: 5958684 - DNA, 25 bp, Homo sapien
aggaagcttggttaaaaaagcatga

SEQ ID NO: 5958685 - DNA, 25 bp, Homo sapien
ggaaaataatgagaaacagccccca

SEQ ID NO: 5958686 - DNA, 25 bp, Homo sapien
actcacccaagcccgtcaagctcaa

SEQ ID NO: 5958687 - DNA, 25 bp, Homo sapien
agagctaatgaaacaagcggaaaat

SEQ ID NO: 5958688 - DNA, 25 bp, Homo sapien
cgatgagcttgaggatgatgatatg

SEQ ID NO: 5958689 - DNA, 25 bp, Homo sapien
attgcgtggagtatcttctggaggc

SEQ ID NO: 5958690 - DNA, 25 bp, Homo sapien
atgagaaacagcccccaaaagttaa

SEQ ID NO: 5958691 - DNA, 25 bp, Homo sapien
ccacagcaaatcgaaacacagcaat

SEQ ID NO: 5958692 - DNA, 25 bp, Homo sapien
acccaagaagaatgacgaagagtat

SEQ ID NO: 5958693 - DNA, 25 bp, Homo sapien
atgttcaatagaggcaagaagcggt

SEQ ID NO: 5958694 - DNA, 25 bp, Homo sapien
gaaacacagcaatggtcccggatat

SEQ ID NO: 5958695 - DNA, 25 bp, Homo sapien
gcggcaggaactgttaaagaatggt

SEQ ID NO: 5958696 - DNA, 25 bp, Homo sapien
caaaagaaagcatcccctggcgcaa

SEQ ID NO: 5958697 - DNA, 25 bp, Homo sapien
aactgttaaagaatggtgctttggc

SEQ ID NO: 5958698 - DNA, 25 bp, Homo sapien
gcttgaggatgatgatatggaagca

SEQ ID NO: 5958699 - DNA, 25 bp, Homo sapien
tgatcgtgacgaaatttgggctatg

SEQ ID NO: 5958700 - DNA, 25 bp, Homo sapien
aagaaaaatggcaaggttagaggat

SEQ ID NO: 5958701 - DNA, 25 bp, Homo sapien
ccgtcaagctcaacttgcccacaaa

SEQ ID NO: 5958702 - DNA, 25 bp, Homo sapien
ttgaagagctaatgaaacaagcgga

SEQ ID NO: 5958703 - DNA, 25 bp, Homo sapien
ttcaaaagttcaaaaagaccacaaa

SEQ ID NO: 5958704 - DNA, 25 bp, Homo sapien
taaggaagaaacctgaacctatcaa

SEQ ID NO: 5958705 - DNA, 25 bp, Homo sapien
taagagacgaagatcctgcagtaaa

SEQ ID NO: 5958706 - DNA, 25 bp, Homo sapien
tacgaaaatcaacgactgcatcaaa

SEQ ID NO: 5958707 - DNA, 25 bp, Homo sapien
ggatgattttatagaagacgatgaa

SEQ ID NO: 5958708 - DNA, 25 bp, Homo sapien
tagaatctagaaaacagaaatcaag

SEQ ID NO: 5958709 - DNA, 25 bp, Homo sapien
cgcaacattgcgtggagtatcttct

SEQ ID NO: 5958710 - DNA, 25 bp, Homo sapien
agcatgaagaggagaagagacgccg

SEQ ID NO: 5958711 - DNA, 25 bp, Homo sapien
aatacgattacgatgagcttgagga

SEQ ID NO: 5958712 - DNA, 25 bp, Homo sapien
gagacgccgtaagaagggcatacgc

SEQ ID NO: 5958713 - DNA, 25 bp, Homo sapien
ctcaacttgcccacaaatggatttg

SEQ ID NO: 5958714 - DNA, 25 bp, Homo sapien
acaagcggaaaataatgagaaacag

SEQ ID NO: 5958715 - DNA, 25 bp, Homo sapien
gttaagtcatcggaacccgtaacta

SEQ ID NO: 5958716 - DNA, 25 bp, Homo sapien
actgcatcaaaagcccaagtgcaag

SEQ ID NO: 5958717 - DNA, 25 bp, Homo sapien
gaagaaacctgaacctatcaaaaag

SEQ ID NO: 5958718 - DNA, 25 bp, Homo sapien
aggttaccacagcaaatcgaaacac

SEQ ID NO: 5958719 - DNA, 25 bp, Homo sapien
cacaaaagaaagcatcccctggcgc

SEQ ID NO: 5958720 - DNA, 25 bp, Homo sapien
tttgggctatgttcaatagaggcaa

SEQ ID NO: 5958721 - DNA, 25 bp, Homo sapien
agaaacctgaacctatcaaaaagat

SEQ ID NO: 5958722 - DNA, 25 bp, Homo sapien
ccaaaaattacataagagacgaaga

SEQ ID NO: 5958723 - DNA, 25 bp, Homo sapien
atgactatgatgaagaagataacga

SEQ ID NO: 5958724 - DNA, 25 bp, Homo sapien
ttgaaggagctgaggcggcaggaac

SEQ ID NO: 5958725 - DNA, 25 bp, Homo sapien
aagcggtcagaatacgattacgatg

SEQ ID NO: 5958726 - DNA, 25 bp, Homo sapien
atagaagacgatgaagatgaaggtt

SEQ ID NO: 5958727 - DNA, 25 bp, Homo sapien
tgaagaagataacgatatggatgat

SEQ ID NO: 5958728 - DNA, 25 bp, Homo sapien
ggaagcaaatgagatggaaatcttg

SEQ ID NO: 5958729 - DNA, 25 bp, Homo sapien
gcagtaaaaagattgaaggagctga

SEQ ID NO: 5958730 - DNA, 25 bp, Homo sapien
gcaatggtcccggatatgatcgtga

SEQ ID NO: 5958731 - DNA, 25 bp, Homo sapien
atgatgatatggaagcaaatgagat

SEQ ID NO: 5958732 - DNA, 25 bp, Homo sapien
tagaggcaagaagcggtcagaatac

SEQ ID NO: 5958733 - DNA, 25 bp, Homo sapien
aaaagcccaagtgcaagatccatta

SEQ ID NO: 5958734 - DNA, 25 bp, Homo sapien
attacgatgagcttgaggatgatga

SEQ ID NO: 5958735 - DNA, 25 bp, Homo sapien
ccctggcgcaacattgcgtggagta

SEQ ID NO: 5958736 - DNA, 25 bp, Homo sapien
tcccctggcgcaacattgcgtggag

SEQ ID NO: 5958737 - DNA, 25 bp, Homo sapien
tgctttggctaaaaaaagtggtgta

SEQ ID NO: 5958738 - DNA, 25 bp, Homo sapien
gtcatgcgccactcaagccagttgt

SEQ ID NO: 5958739 - DNA, 25 bp, Homo sapien
tacataagagacgaagatcctgcag

SEQ ID NO: 5958740 - DNA, 25 bp, Homo sapien
aaatgagatggaaatcttggaagag

SEQ ID NO: 5958741 - DNA, 25 bp, Homo sapien
aagccagttgtaaggaagaaacctg

SEQ ID NO: 5958742 - DNA, 25 bp, Homo sapien
gtgcaagatccattacccaagaaga

SEQ ID NO: 5958743 - DNA, 25 bp, Homo sapien
ataccaggatgactatgatgaagaa

SEQ ID NO: 5958744 - DNA, 25 bp, Homo sapien
gaaaacagaaatcaagataccagga

SEQ ID NO: 5958745 - DNA, 25 bp, Homo sapien
gaacctatcaaaaagatgtcatttg

SEQ ID NO: 5958746 - DNA, 25 bp, Homo sapien
acctcatctggatctgagaaaaaga

SEQ ID NO: 5958747 - DNA, 25 bp, Homo sapien
aaatcaagataccaggatgactatg

SEQ ID NO: 5958748 - DNA, 25 bp, Homo sapien
gatgtcatttgaagagctaatgaaa

SEQ ID NO: 5958749 - DNA, 25 bp, Homo sapien
aaaatggcaaggttagaggataaac

SEQ ID NO: 5958750 - DNA, 25 bp, Homo sapien
aagaggaggaaatggcaagaaaaat

SEQ ID NO: 5958751 - DNA, 25 bp, Homo sapien
tcatcggaacccgtaactaaggaac

SEQ ID NO: 5958752 - DNA, 25 bp, Homo sapien
tacgatgagcttgaggatgatgata

SEQ ID NO: 5958753 - DNA, 25 bp, Homo sapien
gcccaagtgcaagatccattaccca

SEQ ID NO: 5958754 - DNA, 25 bp, Homo sapien
gaagaatgacgaagagtattccttg

SEQ ID NO: 5958755 - DNA, 25 bp, Homo sapien
aagaagaatgacgaagagtattcct

SEQ ID NO: 5958756 - DNA, 25 bp, Homo sapien
atttgctcaacctaataggagatta

SEQ ID NO: 5958757 - DNA, 25 bp, Homo sapien
agaatacgattacgatgagcttgag

SEQ ID NO: 5958758 - DNA, 25 bp, Homo sapien
tcaacgactgcatcaaaagcccaag

SEQ ID NO: 5958759 - DNA, 25 bp, Homo sapien
gccaggtttcaaaagttcaaaaaga

SEQ ID NO: 5958760 - DNA, 25 bp, Homo sapien
gataaacgtgaggaagcttggttaa

SEQ ID NO: 5958761 - DNA, 25 bp, Homo sapien
cataagagacgaagatcctgcagta

SEQ ID NO: 5958762 - DNA, 25 bp, Homo sapien
agaggataaacgtgaggaagcttgg

SEQ ID NO: 5958763 - DNA, 25 bp, Homo sapien
aaaagatgtcatttgaagagctaat

SEQ ID NO: 5958764 - DNA, 25 bp, Homo sapien
cagcccccaaaagttaagtcatcgg

SEQ ID NO: 5958765 - DNA, 25 bp, Homo sapien
ccaagtgcaagatccattacccaag

SEQ ID NO: 5958766 - DNA, 25 bp, Homo sapien
acgaagagtattccttgttacccaa

SEQ ID NO: 5958767 - DNA, 25 bp, Homo sapien
cagttgtaaggaagaaacctgaacc

SEQ ID NO: 5958768 - DNA, 25 bp, Homo sapien
atcatcagactcacccaagcccgtc

SEQ ID NO: 5958769 - DNA, 25 bp, Homo sapien
cccaaatacgaaaatcaacgactgc

SEQ ID NO: 5958770 - DNA, 25 bp, Homo sapien
gttaaaaaagcatgaagaggagaag

SEQ ID NO: 5958771 - DNA, 25 bp, Homo sapien
tggcacctcatctggatctgagaaa

SEQ ID NO: 5958772 - DNA, 25 bp, Homo sapien
tggtgtaaaacggaaacgtggcacc

SEQ ID NO: 5958773 - DNA, 25 bp, Homo sapien
attaggtttaagaggtctattggag

SEQ ID NO: 5958774 - DNA, 25 bp, Homo sapien
gatgaagaagataacgatatggatg

SEQ ID NO: 5958775 - DNA, 25 bp, Homo sapien
taaacgtgaggaagcttggttaaaa

SEQ ID NO: 5958776 - DNA, 25 bp, Homo sapien
agaaatcaagataccaggatgacta

SEQ ID NO: 5958777 - DNA, 25 bp, Homo sapien
ttaacaagccaggtttcaaaagttc

SEQ ID NO: 5958778 - DNA, 25 bp, Homo sapien
aaggaatgacgatgatgaaggtggc

SEQ ID NO: 5958779 - DNA, 25 bp, Homo sapien
cagcaatggtcccggatatgatcgt

SEQ ID NO: 5958780 - DNA, 25 bp, Homo sapien
aagaatggtgctttggctaaaaaaa

SEQ ID NO: 5958781 - DNA, 25 bp, Homo sapien
aagcccgtcaagctcaacttgccca

SEQ ID NO: 5958782 - DNA, 25 bp, Homo sapien
gatggaaatcttggaagaggaggaa

SEQ ID NO: 5958783 - DNA, 25 bp, Homo sapien
agaatgacgaagagtattccttgtt

SEQ ID NO: 5958784 - DNA, 25 bp, Homo sapien
aagtcatgcgccactcaagccagtt

SEQ ID NO: 5958785 - DNA, 25 bp, Homo sapien
gcacctcatctggatctgagaaaaa

SEQ ID NO: 5958786 - DNA, 25 bp, Homo sapien
caggaactgttaaagaatggtgctt

SEQ ID NO: 5958787 - DNA, 25 bp, Homo sapien
ttgctcaacctaataggagattaaa

SEQ ID NO: 5958788 - DNA, 25 bp, Homo sapien
aaagcatcccctggcgcaacattgc

SEQ ID NO: 5958789 - DNA, 25 bp, Homo sapien
gaagatcctgcagtaaaaagattga

SEQ ID NO: 5958790 - DNA, 25 bp, Homo sapien
tagaaaacagaaatcaagataccag

SEQ ID NO: 5958791 - DNA, 25 bp, Homo sapien
tgaggcggcaggaactgttaaagaa

SEQ ID NO: 5958792 - DNA, 25 bp, Homo sapien
acccaaaaattacataagagacgaa

SEQ ID NO: 5958793 - DNA, 25 bp, Homo sapien
gagctgaggcggcaggaactgttaa

SEQ ID NO: 5958794 - DNA, 25 bp, Homo sapien
gaaggagctgaggcggcaggaactg

SEQ ID NO: 5958795 - DNA, 25 bp, Homo sapien
gttaccacagcaaatcgaaacacag

SEQ ID NO: 5958796 - DNA, 25 bp, Homo sapien
tgcgtggagtatcttctggaggcaa

SEQ ID NO: 5958797 - DNA, 25 bp, Homo sapien
gatgatatggaagcaaatgagatgg

SEQ ID NO: 5958798 - DNA, 25 bp, Homo sapien
ataacgatatggatgattttataga

SEQ ID NO: 5958799 - DNA, 25 bp, Homo sapien
ttagaggataaacgtgaggaagctt

SEQ ID NO: 5958800 - DNA, 25 bp, Homo sapien
aatcgaaacacagcaatggtcccgg

SEQ ID NO: 5958801 - DNA, 25 bp, Homo sapien
gtaaaacggaaacgtggcacctcat

SEQ ID NO: 5958802 - DNA, 25 bp, Homo sapien
ggctatgttcaatagaggcaagaag

SEQ ID NO: 5958803 - DNA, 25 bp, Homo sapien
gcaaatgagatggaaatcttggaag

SEQ ID NO: 5958804 - DNA, 25 bp, Homo sapien
tctggaggcaatagcataaaatcat

SEQ ID NO: 5958805 - DNA, 25 bp, Homo sapien
tgaagaggagaagagacgccgtaag

SEQ ID NO: 5958806 - DNA, 25 bp, Homo sapien
tggcaaggttagaggataaacgtga

SEQ ID NO: 5958807 - DNA, 25 bp, Homo sapien
aatacgaaaatcaacgactgcatca

SEQ ID NO: 5958808 - DNA, 25 bp, Homo sapien
agcatcccctggcgcaacattgcgt

SEQ ID NO: 5958809 - DNA, 25 bp, Homo sapien
atcaaaaagatgtcatttgaagagc

SEQ ID NO: 5958810 - DNA, 25 bp, Homo sapien
aggaacgcccacattttaacaagcc

SEQ ID NO: 5958811 - DNA, 25 bp, Homo sapien
gaggcaagaagcggtcagaatacga

SEQ ID NO: 5958812 - DNA, 25 bp, Homo sapien
ctatgatgaagaagataacgatatg

SEQ ID NO: 5958813 - DNA, 25 bp, Homo sapien
aaaataatgagaaacagcccccaaa

SEQ ID NO: 5958814 - DNA, 25 bp, Homo sapien
agaaaatagaaaggaatgacgatga

SEQ ID NO: 5958815 - DNA, 25 bp, Homo sapien
tttaagaggtctattggagcaagtc

SEQ ID NO: 5958816 - DNA, 25 bp, Homo sapien
ggatgatgatatggaagcaaatgag

SEQ ID NO: 5958817 - DNA, 25 bp, Homo sapien
aaaacggaaacgtggcacctcatct

SEQ ID NO: 5958818 - DNA, 25 bp, Homo sapien
ttcccaaatacgaaaatcaacgact

SEQ ID NO: 5958819 - DNA, 25 bp, Homo sapien
gctcaacctaataggagattaaaag

SEQ ID NO: 5958820 - DNA, 25 bp, Homo sapien
tggcaagaaaaatggcaaggttaga

SEQ ID NO: 5958821 - DNA, 25 bp, Homo sapien
gcggaaaataatgagaaacagcccc

SEQ ID NO: 5958822 - DNA, 25 bp, Homo sapien
acattgcgtggagtatcttctggag

SEQ ID NO: 5958823 - DNA, 25 bp, Homo sapien
gtctattggagcaagtcatgcgcca

SEQ ID NO: 5958824 - DNA, 25 bp, Homo sapien
taccacagcaaatcgaaacacagca

SEQ ID NO: 5958825 - DNA, 25 bp, Homo sapien
aggaagaaacctgaacctatcaaaa

SEQ ID NO: 5958826 - DNA, 25 bp, Homo sapien
ttttatagaagacgatgaagatgaa

SEQ ID NO: 5958827 - DNA, 25 bp, Homo sapien
ggaggaaatggcaagaaaaatggca

SEQ ID NO: 5958828 - DNA, 25 bp, Homo sapien
acgatgatgaaggtggccttggaat

SEQ ID NO: 5958829 - DNA, 25 bp, Homo sapien
cttgttacccaaaaattacataaga

SEQ ID NO: 5958830 - DNA, 25 bp, Homo sapien
gaaatggcaagaaaaatggcaaggt

SEQ ID NO: 5958831 - DNA, 25 bp, Homo sapien
atggatttgctcaacctaataggag

SEQ ID NO: 5958832 - DNA, 25 bp, Homo sapien
ggtgctttggctaaaaaaagtggtg

SEQ ID NO: 5958833 - DNA, 25 bp, Homo sapien
aacacagcaatggtcccggatatga

SEQ ID NO: 5958834 - DNA, 25 bp, Homo sapien
aaaatagaaaggaatgacgatgatg

SEQ ID NO: 5958835 - DNA, 25 bp, Homo sapien
gtaactaaggaacgcccacatttta

SEQ ID NO: 5958836 - DNA, 25 bp, Homo sapien
agactcacccaagcccgtcaagctc

SEQ ID NO: 5958837 - DNA, 25 bp, Homo sapien
gaggatgatgatatggaagcaaatg

SEQ ID NO: 5958838 - DNA, 25 bp, Homo sapien
atcctgcagtaaaaagattgaagga

SEQ ID NO: 5958839 - DNA, 25 bp, Homo sapien
ttacccaagaagaatgacgaagagt

SEQ ID NO: 5958840 - DNA, 25 bp, Homo sapien
caagctcaacttgcccacaaatgga

SEQ ID NO: 5958841 - DNA, 25 bp, Homo sapien
gtttcaaaagttcaaaaagaccaca

SEQ ID NO: 5958842 - DNA, 25 bp, Homo sapien
ggaatgacgatgatgaaggtggcct

SEQ ID NO: 5958843 - DNA, 25 bp, Homo sapien
aagcccaagtgcaagatccattacc

SEQ ID NO: 5958844 - DNA, 25 bp, Homo sapien
cggaaacgtggcacctcatctggat

SEQ ID NO: 5958845 - DNA, 25 bp, Homo sapien
attggagcaagtcatgcgccactca

SEQ ID NO: 5958846 - DNA, 25 bp, Homo sapien
agagacgaagatcctgcagtaaaaa

SEQ ID NO: 5958847 - DNA, 25 bp, Homo sapien
cgatatggatgattttatagaagac

SEQ ID NO: 5958848 - DNA, 25 bp, Homo sapien
gaaggtggccttggaattaggttta

SEQ ID NO: 5958849 - DNA, 25 bp, Homo sapien
gaaacagcccccaaaagttaagtca

SEQ ID NO: 5958850 - DNA, 25 bp, Homo sapien
cgtggagtatcttctggaggcaata

SEQ ID NO: 5958851 - DNA, 25 bp, Homo sapien
tcacccaagcccgtcaagctcaact

SEQ ID NO: 5958852 - DNA, 25 bp, Homo sapien
ctggcgcaacattgcgtggagtatc

SEQ ID NO: 5958853 - DNA, 25 bp, Homo sapien
taaaatcatcagactcacccaagcc

SEQ ID NO: 5958854 - DNA, 25 bp, Homo sapien
actaaggaacgcccacattttaaca

SEQ ID NO: 5958855 - DNA, 25 bp, Homo sapien
taatgagaaacagcccccaaaagtt

SEQ ID NO: 5958856 - DNA, 25 bp, Homo sapien
tccattacccaagaagaatgacgaa

SEQ ID NO: 5958857 - DNA, 25 bp, Homo sapien
gagtatcttctggaggcaatagcat

SEQ ID NO: 5958858 - DNA, 25 bp, Homo sapien
aaaatcaacgactgcatcaaaagcc

SEQ ID NO: 5958859 - DNA, 25 bp, Homo sapien
cccggatatgatcgtgacgaaattt

SEQ ID NO: 5958860 - DNA, 25 bp, Homo sapien
catcagactcacccaagcccgtcaa

SEQ ID NO: 5958861 - DNA, 25 bp, Homo sapien
tcaatagaggcaagaagcggtcaga

SEQ ID NO: 5958862 - DNA, 25 bp, Homo sapien
ctttcccaaatacgaaaatcaacga

SEQ ID NO: 5958863 - DNA, 25 bp, Homo sapien
aaggttagaggataaacgtgaggaa

SEQ ID NO: 5958864 - DNA, 25 bp, Homo sapien
cgtgaggaagcttggttaaaaaagc

SEQ ID NO: 5958865 - DNA, 25 bp, Homo sapien
tcaagccagttgtaaggaagaaacc

SEQ ID NO: 5958866 - DNA, 25 bp, Homo sapien
ggagaagagacgccgtaagaagggc

SEQ ID NO: 5958867 - DNA, 25 bp, Homo sapien
caaatcgaaacacagcaatggtccc

SEQ ID NO: 5958868 - DNA, 25 bp, Homo sapien
atggtgctttggctaaaaaaagtgg

SEQ ID NO: 5958869 - DNA, 25 bp, Homo sapien
aagcaaatgagatggaaatcttgga

SEQ ID NO: 5958870 - DNA, 25 bp, Homo sapien
aagatgtcatttgaagagctaatga

SEQ ID NO: 5958871 - DNA, 25 bp, Homo sapien
tggaattaggtttaagaggtctatt

SEQ ID NO: 5958872 - DNA, 25 bp, Homo sapien
aacggaaacgtggcacctcatctgg

SEQ ID NO: 5958873 - DNA, 25 bp, Homo sapien
ggcaggaactgttaaagaatggtgc

SEQ ID NO: 5958874 - DNA, 25 bp, Homo sapien
gtgtaaaacggaaacgtggcacctc

SEQ ID NO: 5958875 - DNA, 25 bp, Homo sapien
tctagaaaacagaaatcaagatacc

SEQ ID NO: 5958876 - DNA, 25 bp, Homo sapien
agaagatactccacgcaatgttgcg

SEQ ID NO: 5958877 - DNA, 25 bp, Homo sapien
ccttacaactggcttgagtggcgca

SEQ ID NO: 5958878 - DNA, 25 bp, Homo sapien
caaatgacatctttttgataggttc

SEQ ID NO: 5958879 - DNA, 25 bp, Homo sapien
aacttttgggggctgtttctcatta

SEQ ID NO: 5958880 - DNA, 25 bp, Homo sapien
cgtcattcttcttgggtaatggatc

SEQ ID NO: 5958881 - DNA, 25 bp, Homo sapien
tctttttctcagatccagatgaggt

SEQ ID NO: 5958882 - DNA, 25 bp, Homo sapien
caccttcatcatcgtcattcctttc

SEQ ID NO: 5958883 - DNA, 25 bp, Homo sapien
cgcctcagctccttcaatcttttta

SEQ ID NO: 5958884 - DNA, 25 bp, Homo sapien
caaggccaccttcatcatcgtcatt

SEQ ID NO: 5958885 - DNA, 25 bp, Homo sapien
ggatcttgcacttgggcttttgatg

SEQ ID NO: 5958886 - DNA, 25 bp, Homo sapien
tcatcatagtcatcctggtatcttg

SEQ ID NO: 5958887 - DNA, 25 bp, Homo sapien
tcatcgtcattcctttctattttct

SEQ ID NO: 5958888 - DNA, 25 bp, Homo sapien
ttttaaccaagcttcctcacgttta

SEQ ID NO: 5958889 - DNA, 25 bp, Homo sapien
ttcttgccatttcctcctcttccaa

SEQ ID NO: 5958890 - DNA, 25 bp, Homo sapien
ctttttgataggttcaggtttcttc

SEQ ID NO: 5958891 - DNA, 25 bp, Homo sapien
tccaaggccaccttcatcatcgtca

SEQ ID NO: 5958892 - DNA, 25 bp, Homo sapien
ttcaggtttcttccttacaactggc

SEQ ID NO: 5958893 - DNA, 25 bp, Homo sapien
tcattcttcttgggtaatggatctt

SEQ ID NO: 5958894 - DNA, 25 bp, Homo sapien
catatcgttatcttcttcatcatag

SEQ ID NO: 5958895 - DNA, 25 bp, Homo sapien
tgttgcgccaggggatgctttcttt

SEQ ID NO: 5958896 - DNA, 25 bp, Homo sapien
taaaatcatccatatcgttatcttc

SEQ ID NO: 5958897 - DNA, 25 bp, Homo sapien
attgaacatagcccaaatttcgtca

SEQ ID NO: 5958898 - DNA, 25 bp, Homo sapien
accattctttaacagttcctgccgc

SEQ ID NO: 5958899 - DNA, 25 bp, Homo sapien
agatgaggtgccacgtttccgtttt

SEQ ID NO: 5958900 - DNA, 25 bp, Homo sapien
gatcttcgtctcttatgtaattttt

SEQ ID NO: 5958901 - DNA, 25 bp, Homo sapien
ccttcttacggcgtctcttctcctc

SEQ ID NO: 5958902 - DNA, 25 bp, Homo sapien
aatgttgcgccaggggatgctttct

SEQ ID NO: 5958903 - DNA, 25 bp, Homo sapien
ttgataggttcaggtttcttcctta

SEQ ID NO: 5958904 - DNA, 25 bp, Homo sapien
cttcatcatagtcatcctggtatct

SEQ ID NO: 5958905 - DNA, 25 bp, Homo sapien
ttttcttgccatttcctcctcttcc

SEQ ID NO: 5958906 - DNA, 25 bp, Homo sapien
atcatcctcaagctcatcgtaatcg

SEQ ID NO: 5958907 - DNA, 25 bp, Homo sapien
cgggcttgggtgagtctgatgattt

SEQ ID NO: 5958908 - DNA, 25 bp, Homo sapien
ggggatgctttcttttgtggtcttt

SEQ ID NO: 5958909 - DNA, 25 bp, Homo sapien
aagcttcctcacgtttatcctctaa

SEQ ID NO: 5958910 - DNA, 25 bp, Homo sapien
atgattttatgctattgcctccaga

SEQ ID NO: 5958911 - DNA, 25 bp, Homo sapien
catcgtcttctataaaatcatccat

SEQ ID NO: 5958912 - DNA, 25 bp, Homo sapien
tccatatcgttatcttcttcatcat

SEQ ID NO: 5958913 - DNA, 25 bp, Homo sapien
cctcctcttccaagatttccatctc

SEQ ID NO: 5958914 - DNA, 25 bp, Homo sapien
tgtaatttttgggtaacaaggaata

SEQ ID NO: 5958915 - DNA, 25 bp, Homo sapien
ttatcctctaaccttgccatttttc

SEQ ID NO: 5958916 - DNA, 25 bp, Homo sapien
ggtatcttgatttctgttttctaga

SEQ ID NO: 5958917 - DNA, 25 bp, Homo sapien
ggcaagttgagcttgacgggcttgg

SEQ ID NO: 5958918 - DNA, 25 bp, Homo sapien
ctggtatcttgatttctgttttcta

SEQ ID NO: 5958919 - DNA, 25 bp, Homo sapien
gatgacttaacttttgggggctgtt

SEQ ID NO: 5958920 - DNA, 25 bp, Homo sapien
gggaccattgctgtgtttcgatttg

SEQ ID NO: 5958921 - DNA, 25 bp, Homo sapien
ccacgcaatgttgcgccaggggatg

SEQ ID NO: 5958922 - DNA, 25 bp, Homo sapien
tgccatttttcttgccatttcctcc

SEQ ID NO: 5958923 - DNA, 25 bp, Homo sapien
tttcttccttacaactggcttgagt

SEQ ID NO: 5958924 - DNA, 25 bp, Homo sapien
aatgacatctttttgataggttcag

SEQ ID NO: 5958925 - DNA, 25 bp, Homo sapien
gttccttagttacgggttccgatga

SEQ ID NO: 5958926 - DNA, 25 bp, Homo sapien
ggctgtttctcattattttccgctt

SEQ ID NO: 5958927 - DNA, 25 bp, Homo sapien
aggatcttcgtctcttatgtaattt

SEQ ID NO: 5958928 - DNA, 25 bp, Homo sapien
cgtctcttatgtaatttttgggtaa

SEQ ID NO: 5958929 - DNA, 25 bp, Homo sapien
actcttcgtcattcttcttgggtaa

SEQ ID NO: 5958930 - DNA, 25 bp, Homo sapien
cttcaatctttttactgcaggatct

SEQ ID NO: 5958931 - DNA, 25 bp, Homo sapien
gcttcctcacgtttatcctctaacc

SEQ ID NO: 5958932 - DNA, 25 bp, Homo sapien
gagcttgacgggcttgggtgagtct

SEQ ID NO: 5958933 - DNA, 25 bp, Homo sapien
tcctcttcatgcttttttaaccaag

SEQ ID NO: 5958934 - DNA, 25 bp, Homo sapien
acgatcatatccgggaccattgctg

SEQ ID NO: 5958935 - DNA, 25 bp, Homo sapien
aagcaccattctttaacagttcctg

SEQ ID NO: 5958936 - DNA, 25 bp, Homo sapien
catccatatcgttatcttcttcatc

SEQ ID NO: 5958937 - DNA, 25 bp, Homo sapien
tcttcgtctcttatgtaatttttgg

SEQ ID NO: 5958938 - DNA, 25 bp, Homo sapien
ctcattattttccgcttgtttcatt

SEQ ID NO: 5958939 - DNA, 25 bp, Homo sapien
caaagcaccattctttaacagttcc

SEQ ID NO: 5958940 - DNA, 25 bp, Homo sapien
caagatttccatctcatttgcttcc

SEQ ID NO: 5958941 - DNA, 25 bp, Homo sapien
aaccttcatcttcatcgtcttctat

SEQ ID NO: 5958942 - DNA, 25 bp, Homo sapien
ccattgctgtgtttcgatttgctgt

SEQ ID NO: 5958943 - DNA, 25 bp, Homo sapien
gcctctattgaacatagcccaaatt

SEQ ID NO: 5958944 - DNA, 25 bp, Homo sapien
tcagatccagatgaggtgccacgtt

SEQ ID NO: 5958945 - DNA, 25 bp, Homo sapien
cggcgtctcttctcctcttcatgct

SEQ ID NO: 5958946 - DNA, 25 bp, Homo sapien
aacagttcctgccgcctcagctcct

SEQ ID NO: 5958947 - DNA, 25 bp, Homo sapien
gtttctcattattttccgcttgttt

SEQ ID NO: 5958948 - DNA, 25 bp, Homo sapien
tttgaaacctggcttgttaaaatgt

SEQ ID NO: 5958949 - DNA, 25 bp, Homo sapien
tcacgatcatatccgggaccattgc

SEQ ID NO: 5958950 - DNA, 25 bp, Homo sapien
tgccacgtttccgttttacaccact

SEQ ID NO: 5958951 - DNA, 25 bp, Homo sapien
cttctcctcttcatgcttttttaac

SEQ ID NO: 5958952 - DNA, 25 bp, Homo sapien
ctcaagctcatcgtaatcgtattct

SEQ ID NO: 5958953 - DNA, 25 bp, Homo sapien
tttttctcagatccagatgaggtgc

SEQ ID NO: 5958954 - DNA, 25 bp, Homo sapien
ttctttaacagttcctgccgcctca

SEQ ID NO: 5958955 - DNA, 25 bp, Homo sapien
caggggatgctttcttttgtggtct

SEQ ID NO: 5958956 - DNA, 25 bp, Homo sapien
tgattttcgtatttgggaaagtttg

SEQ ID NO: 5958957 - DNA, 25 bp, Homo sapien
attagctcttcaaatgacatctttt

SEQ ID NO: 5958958 - DNA, 25 bp, Homo sapien
ttcatcatcgtcattcctttctatt

SEQ ID NO: 5958959 - DNA, 25 bp, Homo sapien
ggggctgtttctcattattttccgc

SEQ ID NO: 5958960 - DNA, 25 bp, Homo sapien
cctattaggttgagcaaatccattt

SEQ ID NO: 5958961 - DNA, 25 bp, Homo sapien
cttgagtggcgcatgacttgctcca

SEQ ID NO: 5958962 - DNA, 25 bp, Homo sapien
tgggcaagttgagcttgacgggctt

SEQ ID NO: 5958963 - DNA, 25 bp, Homo sapien
ttaacttttgggggctgtttctcat

SEQ ID NO: 5958964 - DNA, 25 bp, Homo sapien
cttctataaaatcatccatatcgtt

SEQ ID NO: 5958965 - DNA, 25 bp, Homo sapien
tcgtaatcgtattctgaccgcttct

SEQ ID NO: 5958966 - DNA, 25 bp, Homo sapien
ttccttacaactggcttgagtggcg

SEQ ID NO: 5958967 - DNA, 25 bp, Homo sapien
gccatttcctcctcttccaagattt

SEQ ID NO: 5958968 - DNA, 25 bp, Homo sapien
gtttcgatttgctgtggtaaccttc

SEQ ID NO: 5958969 - DNA, 25 bp, Homo sapien
ccaatagacctcttaaacctaattc

SEQ ID NO: 5958970 - DNA, 25 bp, Homo sapien
tcctcttccaagatttccatctcat

SEQ ID NO: 5958971 - DNA, 25 bp, Homo sapien
tgcacttgggcttttgatgcagtcg

SEQ ID NO: 5958972 - DNA, 25 bp, Homo sapien
ctgccgcctcagctccttcaatctt

SEQ ID NO: 5958973 - DNA, 25 bp, Homo sapien
catttgtgggcaagttgagcttgac

SEQ ID NO: 5958974 - DNA, 25 bp, Homo sapien
taattccaaggccaccttcatcatc

SEQ ID NO: 5958975 - DNA, 25 bp, Homo sapien
cttgatttctgttttctagattcta

SEQ ID NO: 5958976 - DNA, 25 bp, Homo sapien
gtcttctataaaatcatccatatcg

SEQ ID NO: 5958977 - DNA, 25 bp, Homo sapien
ttgacgggcttgggtgagtctgatg

SEQ ID NO: 5958978 - DNA, 25 bp, Homo sapien
atcctctaaccttgccatttttctt

SEQ ID NO: 5958979 - DNA, 25 bp, Homo sapien
tgtggtctttttgaacttttgaaac

SEQ ID NO: 5958980 - DNA, 25 bp, Homo sapien
gcaccattctttaacagttcctgcc

SEQ ID NO: 5958981 - DNA, 25 bp, Homo sapien
tagttacgggttccgatgacttaac

SEQ ID NO: 5958982 - DNA, 25 bp, Homo sapien
agtggcgcatgacttgctccaatag

SEQ ID NO: 5958983 - DNA, 25 bp, Homo sapien
catcatcgtcattcctttctatttt

SEQ ID NO: 5958984 - DNA, 25 bp, Homo sapien
gtatgcccttcttacggcgtctctt

SEQ ID NO: 5958985 - DNA, 25 bp, Homo sapien
ttttatgctattgcctccagaagat

SEQ ID NO: 5958986 - DNA, 25 bp, Homo sapien
tttgggggctgtttctcattatttt

SEQ ID NO: 5958987 - DNA, 25 bp, Homo sapien
ctccaatagacctcttaaacctaat

SEQ ID NO: 5958988 - DNA, 25 bp, Homo sapien
tcattagctcttcaaatgacatctt

SEQ ID NO: 5958989 - DNA, 25 bp, Homo sapien
catcctcaagctcatcgtaatcgta

SEQ ID NO: 5958990 - DNA, 25 bp, Homo sapien
ttgcctctattgaacatagcccaaa

SEQ ID NO: 5958991 - DNA, 25 bp, Homo sapien
tcttcgtcattcttcttgggtaatg

SEQ ID NO: 5958992 - DNA, 25 bp, Homo sapien
aacatagcccaaatttcgtcacgat

SEQ ID NO: 5958993 - DNA, 25 bp, Homo sapien
atcatagtcatcctggtatcttgat

SEQ ID NO: 5958994 - DNA, 25 bp, Homo sapien
agttgagcttgacgggcttgggtga

SEQ ID NO: 5958995 - DNA, 25 bp, Homo sapien
ccgatgacttaacttttgggggctg

SEQ ID NO: 5958996 - DNA, 25 bp, Homo sapien
agctcatcgtaatcgtattctgacc

SEQ ID NO: 5958997 - DNA, 25 bp, Homo sapien
ttgccatttcctcctcttccaagat

SEQ ID NO: 5958998 - DNA, 25 bp, Homo sapien
ccaaatttcgtcacgatcatatccg

SEQ ID NO: 5958999 - DNA, 25 bp, Homo sapien
tcttgcctctattgaacatagccca

SEQ ID NO: 5959000 - DNA, 25 bp, Homo sapien
tcgtcttctataaaatcatccatat

SEQ ID NO: 5959001 - DNA, 25 bp, Homo sapien
ggcttgagtggcgcatgacttgctc

SEQ ID NO: 5959002 - DNA, 25 bp, Homo sapien
ttcttacggcgtctcttctcctctt

SEQ ID NO: 5959003 - DNA, 25 bp, Homo sapien
cttgggtgagtctgatgattttatg

SEQ ID NO: 5959004 - DNA, 25 bp, Homo sapien
taaaatgtgggcgttccttagttac

SEQ ID NO: 5959005 - DNA, 25 bp, Homo sapien
cgtcacgatcatatccgggaccatt

SEQ ID NO: 5959006 - DNA, 25 bp, Homo sapien
tttagccaaagcaccattctttaac

SEQ ID NO: 5959007 - DNA, 25 bp, Homo sapien
tttttagccaaagcaccattcttta

SEQ ID NO: 5959008 - DNA, 25 bp, Homo sapien
tttgtggtctttttgaacttttgaa

SEQ ID NO: 5959009 - DNA, 25 bp, Homo sapien
tagacctcttaaacctaattccaag

SEQ ID NO: 5959010 - DNA, 25 bp, Homo sapien
tccatttgtgggcaagttgagcttg

SEQ ID NO: 5959011 - DNA, 25 bp, Homo sapien
gcttttttaaccaagcttcctcacg

SEQ ID NO: 5959012 - DNA, 25 bp, Homo sapien
agatccagatgaggtgccacgtttc

SEQ ID NO: 5959013 - DNA, 25 bp, Homo sapien
cttcatgcttttttaaccaagcttc

SEQ ID NO: 5959014 - DNA, 25 bp, Homo sapien
tctcagatccagatgaggtgccacg

SEQ ID NO: 5959015 - DNA, 25 bp, Homo sapien
gctattgcctccagaagatactcca

SEQ ID NO: 5959016 - DNA, 25 bp, Homo sapien
cacttgggcttttgatgcagtcgtt

SEQ ID NO: 5959017 - DNA, 25 bp, Homo sapien
tagccaaagcaccattctttaacag

SEQ ID NO: 5959018 - DNA, 25 bp, Homo sapien
atttcctcctcttccaagatttcca

SEQ ID NO: 5959019 - DNA, 25 bp, Homo sapien
aagatactccacgcaatgttgcgcc

SEQ ID NO: 5959020 - DNA, 25 bp, Homo sapien
tcttccttacaactggcttgagtgg

SEQ ID NO: 5959021 - DNA, 25 bp, Homo sapien
tgacttaacttttgggggctgtttc

SEQ ID NO: 5959022 - DNA, 25 bp, Homo sapien
gatcatatccgggaccattgctgtg

SEQ ID NO: 5959023 - DNA, 25 bp, Homo sapien
taaacctaattccaaggccaccttc

SEQ ID NO: 5959024 - DNA, 25 bp, Homo sapien
taatctcctattaggttgagcaaat

SEQ ID NO: 5959025 - DNA, 25 bp, Homo sapien
cctcacgtttatcctctaaccttgc

SEQ ID NO: 5959026 - DNA, 25 bp, Homo sapien
tgggcttttgatgcagtcgttgatt

SEQ ID NO: 5959027 - DNA, 25 bp, Homo sapien
tatcatcatcctcaagctcatcgta

SEQ ID NO: 5959028 - DNA, 25 bp, Homo sapien
attccaaggccaccttcatcatcgt

SEQ ID NO: 5959029 - DNA, 25 bp, Homo sapien
ctcatcgtaatcgtattctgaccgc

SEQ ID NO: 5959030 - DNA, 25 bp, Homo sapien
cttttaatctcctattaggttgagc

SEQ ID NO: 5959031 - DNA, 25 bp, Homo sapien
tcctcaagctcatcgtaatcgtatt

SEQ ID NO: 5959032 - DNA, 25 bp, Homo sapien
tctataaaatcatccatatcgttat

SEQ ID NO: 5959033 - DNA, 25 bp, Homo sapien
taaccttgccatttttcttgccatt

SEQ ID NO: 5959034 - DNA, 25 bp, Homo sapien
attcttcttgggtaatggatcttgc

SEQ ID NO: 5959035 - DNA, 25 bp, Homo sapien
cctcttaaacctaattccaaggcca

SEQ ID NO: 5959036 - DNA, 25 bp, Homo sapien
tcttcttgggtaatggatcttgcac

SEQ ID NO: 5959037 - DNA, 25 bp, Homo sapien
aggaatactcttcgtcattcttctt

SEQ ID NO: 5959038 - DNA, 25 bp, Homo sapien
gaccattgctgtgtttcgatttgct

SEQ ID NO: 5959039 - DNA, 25 bp, Homo sapien
aatagacctcttaaacctaattcca

SEQ ID NO: 5959040 - DNA, 25 bp, Homo sapien
tctaaccttgccatttttcttgcca

SEQ ID NO: 5959041 - DNA, 25 bp, Homo sapien
aggttgagcaaatccatttgtgggc

SEQ ID NO: 5959042 - DNA, 25 bp, Homo sapien
aaatcatccatatcgttatcttctt

SEQ ID NO: 5959043 - DNA, 25 bp, Homo sapien
tatgtaatttttgggtaacaaggaa

SEQ ID NO: 5959044 - DNA, 25 bp, Homo sapien
ggcttgggtgagtctgatgatttta

SEQ ID NO: 5959045 - DNA, 25 bp, Homo sapien
ttcttcatcatagtcatcctggtat

SEQ ID NO: 5959046 - DNA, 25 bp, Homo sapien
ttcctcctcttccaagatttccatc

SEQ ID NO: 5959047 - DNA, 25 bp, Homo sapien
cttgggcttttgatgcagtcgttga

SEQ ID NO: 5959048 - DNA, 25 bp, Homo sapien
catcgtaatcgtattctgaccgctt

SEQ ID NO: 5959049 - DNA, 25 bp, Homo sapien
gatttctgttttctagattctaact

SEQ ID NO: 5959050 - DNA, 25 bp, Homo sapien
tgctgtgtttcgatttgctgtggta

SEQ ID NO: 5959051 - DNA, 25 bp, Homo sapien
atgaggtgccacgtttccgttttac

SEQ ID NO: 5959052 - DNA, 25 bp, Homo sapien
tctttttactgcaggatcttcgtct

SEQ ID NO: 5959053 - DNA, 25 bp, Homo sapien
ggttcaggtttcttccttacaactg

SEQ ID NO: 5959054 - DNA, 25 bp, Homo sapien
cgatttgctgtggtaaccttcatct

SEQ ID NO: 5959055 - DNA, 25 bp, Homo sapien
tttcattagctcttcaaatgacatc

SEQ ID NO: 5959056 - DNA, 25 bp, Homo sapien
cattctttaacagttcctgccgcct

SEQ ID NO: 5959057 - DNA, 25 bp, Homo sapien
atccagatgaggtgccacgtttccg

SEQ ID NO: 5959058 - DNA, 25 bp, Homo sapien
ctgtgtttcgatttgctgtggtaac

SEQ ID NO: 5959059 - DNA, 25 bp, Homo sapien
tagcccaaatttcgtcacgatcata

SEQ ID NO: 5959060 - DNA, 25 bp, Homo sapien
accgcttcttgcctctattgaacat

SEQ ID NO: 5959061 - DNA, 25 bp, Homo sapien
gataggttcaggtttcttccttaca

SEQ ID NO: 5959062 - DNA, 25 bp, Homo sapien
ttattttccgcttgtttcattagct

SEQ ID NO: 5959063 - DNA, 25 bp, Homo sapien
atgctttcttttgtggtctttttga

SEQ ID NO: 5959064 - DNA, 25 bp, Homo sapien
atatccgggaccattgctgtgtttc

SEQ ID NO: 5959065 - DNA, 25 bp, Homo sapien
cttccatatcatcatcctcaagctc

SEQ ID NO: 5959066 - DNA, 25 bp, Homo sapien
agtcgttgattttcgtatttgggaa

SEQ ID NO: 5959067 - DNA, 25 bp, Homo sapien
ttcctcacgtttatcctctaacctt

SEQ ID NO: 5959068 - DNA, 25 bp, Homo sapien
ttaacagttcctgccgcctcagctc

SEQ ID NO: 5959069 - DNA, 25 bp, Homo sapien
ggtgccacgtttccgttttacacca

SEQ ID NO: 5959070 - DNA, 25 bp, Homo sapien
tcttcttcatcatagtcatcctggt

SEQ ID NO: 5959071 - DNA, 25 bp, Homo sapien
actttttttagccaaagcaccattc

SEQ ID NO: 5959072 - DNA, 25 bp, Homo sapien
cttgttaaaatgtgggcgttcctta

SEQ ID NO: 5959073 - DNA, 25 bp, Homo sapien
tttaatctcctattaggttgagcaa

SEQ ID NO: 5959074 - DNA, 25 bp, Homo sapien
aacaaggaatactcttcgtcattct

SEQ ID NO: 5959075 - DNA, 25 bp, Homo sapien
cttttgatgcagtcgttgattttcg

SEQ ID NO: 5959076 - DNA, 25 bp, Homo sapien
atttttcttgccatttcctcctctt

SEQ ID NO: 5959077 - DNA, 25 bp, Homo sapien
catagtcatcctggtatcttgattt

SEQ ID NO: 5959078 - DNA, 25 bp, Homo sapien
ttttgataggttcaggtttcttcct

SEQ ID NO: 5959079 - DNA, 25 bp, Homo sapien
ccttcatcatcgtcattcctttcta

SEQ ID NO: 5959080 - DNA, 25 bp, Homo sapien
ttgctgtggtaaccttcatcttcat

SEQ ID NO: 5959081 - DNA, 25 bp, Homo sapien
tccgcttgtttcattagctcttcaa

SEQ ID NO: 5959082 - DNA, 25 bp, Homo sapien
gccgcctcagctccttcaatctttt

SEQ ID NO: 5959083 - DNA, 25 bp, Homo sapien
tgggtaatggatcttgcacttgggc

SEQ ID NO: 5959084 - DNA, 25 bp, Homo sapien
tcgttgattttcgtatttgggaaag

SEQ ID NO: 5959085 - DNA, 25 bp, Homo sapien
gacttgctccaatagacctcttaaa

SEQ ID NO: 5959086 - DNA, 25 bp, Homo sapien
catcctggtatcttgatttctgttt

SEQ ID NO: 5959087 - DNA, 25 bp, Homo sapien
acgtttatcctctaaccttgccatt

SEQ ID NO: 5959088 - DNA, 25 bp, Homo sapien
aacctaattccaaggccaccttcat

SEQ ID NO: 5959089 - DNA, 25 bp, Homo sapien
ttcaaatgacatctttttgataggt

SEQ ID NO: 5959090 - DNA, 25 bp, Homo sapien
ggtttcttccttacaactggcttga

SEQ ID NO: 5959091 - DNA, 25 bp, Homo sapien
gcagtcgttgattttcgtatttggg

SEQ ID NO: 5959092 - DNA, 25 bp, Homo sapien
tcctgccgcctcagctccttcaatc

SEQ ID NO: 5959093 - DNA, 25 bp, Homo sapien
tcctggtatcttgatttctgttttc

SEQ ID NO: 5959094 - DNA, 25 bp, Homo sapien
ggatgctttcttttgtggtcttttt

SEQ ID NO: 5959095 - DNA, 25 bp, Homo sapien
tgtttcattagctcttcaaatgaca

SEQ ID NO: 5959096 - DNA, 25 bp, Homo sapien
atgcagtcgttgattttcgtatttg

SEQ ID NO: 5959097 - DNA, 25 bp, Homo sapien
catcttcatcgtcttctataaaatc

SEQ ID NO: 5959098 - DNA, 25 bp, Homo sapien
aactggcttgagtggcgcatgactt

SEQ ID NO: 5959099 - DNA, 25 bp, Homo sapien
ggcttttgatgcagtcgttgatttt

SEQ ID NO: 5959100 - DNA, 25 bp, Homo sapien
gtgtttcgatttgctgtggtaacct

SEQ ID NO: 5959101 - DNA, 25 bp, Homo sapien
tccttagttacgggttccgatgact

SEQ ID NO: 5959102 - DNA, 25 bp, Homo sapien
tgatgattttatgctattgcctcca

SEQ ID NO: 5959103 - DNA, 25 bp, Homo sapien
tccttcaatctttttactgcaggat

SEQ ID NO: 5959104 - DNA, 25 bp, Homo sapien
gcccaaatttcgtcacgatcatatc

SEQ ID NO: 5959105 - DNA, 25 bp, Homo sapien
tctttttgaacttttgaaacctggc

SEQ ID NO: 5959106 - DNA, 25 bp, Homo sapien
ccatctcatttgcttccatatcatc

SEQ ID NO: 5959107 - DNA, 25 bp, Homo sapien
ctcttccaagatttccatctcattt

SEQ ID NO: 5959108 - DNA, 25 bp, Homo sapien
taatggatcttgcacttgggctttt

SEQ ID NO: 5959109 - DNA, 25 bp, Homo sapien
cttgccatttttcttgccatttcct

SEQ ID NO: 5959110 - DNA, 25 bp, Homo sapien
gtaacaaggaatactcttcgtcatt

SEQ ID NO: 5959111 - DNA, 25 bp, Homo sapien
ttacaactggcttgagtggcgcatg

SEQ ID NO: 5959112 - DNA, 25 bp, Homo sapien
ttcgtcacgatcatatccgggacca

SEQ ID NO: 5959113 - DNA, 25 bp, Homo sapien
ttatgctattgcctccagaagatac

SEQ ID NO: 5959114 - DNA, 25 bp, Homo sapien
acctggcttgttaaaatgtgggcgt

SEQ ID NO: 5959115 - DNA, 25 bp, Homo sapien
tccatatcatcatcctcaagctcat

SEQ ID NO: 5959116 - DNA, 25 bp, Homo sapien
ctggcttgttaaaatgtgggcgttc

SEQ ID NO: 5959117 - DNA, 25 bp, Homo sapien
ttcttttaatctcctattaggttga

SEQ ID NO: 5959118 - DNA, 25 bp, Homo sapien
ttgcctccagaagatactccacgca

SEQ ID NO: 5959119 - DNA, 25 bp, Homo sapien
cgcttcttgcctctattgaacatag

SEQ ID NO: 5959120 - DNA, 25 bp, Homo sapien
ttcgtctcttatgtaatttttgggt

SEQ ID NO: 5959121 - DNA, 25 bp, Homo sapien
acatctttttgataggttcaggttt

SEQ ID NO: 5959122 - DNA, 25 bp, Homo sapien
ctggcttgagtggcgcatgacttgc

SEQ ID NO: 5959123 - DNA, 25 bp, Homo sapien
tattaggttgagcaaatccatttgt

SEQ ID NO: 5959124 - DNA, 25 bp, Homo sapien
cagttcctgccgcctcagctccttc

SEQ ID NO: 5959125 - DNA, 25 bp, Homo sapien
tctgaccgcttcttgcctctattga

SEQ ID NO: 5959126 - DNA, 25 bp, Homo sapien
tctgatgattttatgctattgcctc

SEQ ID NO: 5959127 - DNA, 25 bp, Homo sapien
tgggaaagtttggaaagaaaactca

SEQ ID NO: 5959128 - DNA, 25 bp, Homo sapien
gaacttttgaaacctggcttgttaa

SEQ ID NO: 5959129 - DNA, 25 bp, Homo sapien
catttgcttccatatcatcatcctc

SEQ ID NO: 5959130 - DNA, 25 bp, Homo sapien
tcttcatcgtcttctataaaatcat

SEQ ID NO: 5959131 - DNA, 25 bp, Homo sapien
cctctaaccttgccatttttcttgc

SEQ ID NO: 5959132 - DNA, 25 bp, Homo sapien
gattttatgctattgcctccagaag

SEQ ID NO: 5959133 - DNA, 25 bp, Homo sapien
attttctttttctcagatccagatg

SEQ ID NO: 5959134 - DNA, 25 bp, Homo sapien
caccactttttttagccaaagcacc

SEQ ID NO: 5959135 - DNA, 25 bp, Homo sapien
atctcctattaggttgagcaaatcc

SEQ ID NO: 5959136 - DNA, 25 bp, Homo sapien
gctgtggtaaccttcatcttcatcg

SEQ ID NO: 5959137 - DNA, 25 bp, Homo sapien
tcagctccttcaatctttttactgc

SEQ ID NO: 5959138 - DNA, 25 bp, Homo sapien
gtaatcgtattctgaccgcttcttg

SEQ ID NO: 5959139 - DNA, 25 bp, Homo sapien
atggatcttgcacttgggcttttga

SEQ ID NO: 5959140 - DNA, 25 bp, Homo sapien
ggcttgttaaaatgtgggcgttcct

SEQ ID NO: 5959141 - DNA, 25 bp, Homo sapien
aaacctggcttgttaaaatgtgggc

SEQ ID NO: 5959142 - DNA, 25 bp, Homo sapien
gtattctgaccgcttcttgcctcta

SEQ ID NO: 5959143 - DNA, 25 bp, Homo sapien
tttttttagccaaagcaccattctt

SEQ ID NO: 5959144 - DNA, 25 bp, Homo sapien
tagcgtatgcccttcttacggcgtc

SEQ ID NO: 5959145 - DNA, 25 bp, Homo sapien
ctgcaggatcttcgtctcttatgta

SEQ ID NO: 5959146 - DNA, 25 bp, Homo sapien
agatttccatctcatttgcttccat

SEQ ID NO: 5959147 - DNA, 25 bp, Homo sapien
attttccgcttgtttcattagctct

SEQ ID NO: 5959148 - DNA, 25 bp, Homo sapien
tcgtatttgggaaagtttggaaaga

SEQ ID NO: 5959149 - DNA, 25 bp, Homo sapien
tactgcaggatcttcgtctcttatg

SEQ ID NO: 5959150 - DNA, 25 bp, Homo sapien
tgtgggcaagttgagcttgacgggc

SEQ ID NO: 5959151 - DNA, 25 bp, Homo sapien
gccaggggatgctttcttttgtggt

SEQ ID NO: 5959152 - DNA, 25 bp, Homo sapien
ttcttgggtaatggatcttgcactt

SEQ ID NO: 5959153 - DNA, 25 bp, Homo sapien
tataaaatcatccatatcgttatct

SEQ ID NO: 5959154 - DNA, 25 bp, Homo sapien
tgaccgcttcttgcctctattgaac

SEQ ID NO: 5959155 - DNA, 25 bp, Homo sapien
tagctcttcaaatgacatctttttg

SEQ ID NO: 5959156 - DNA, 25 bp, Homo sapien
cttgggtaatggatcttgcacttgg

SEQ ID NO: 5959157 - DNA, 25 bp, Homo sapien
ttaaccaagcttcctcacgtttatc

SEQ ID NO: 5959158 - DNA, 25 bp, Homo sapien
atcttgcacttgggcttttgatgca

SEQ ID NO: 5959159 - DNA, 25 bp, Homo sapien
gtcatcctggtatcttgatttctgt

SEQ ID NO: 5959160 - DNA, 25 bp, Homo sapien
tcatatccgggaccattgctgtgtt

SEQ ID NO: 5959161 - DNA, 25 bp, Homo sapien
gtaaccttcatcttcatcgtcttct

SEQ ID NO: 5959162 - DNA, 25 bp, Homo sapien
tcgtattctgaccgcttcttgcctc

SEQ ID NO: 5959163 - DNA, 25 bp, Homo sapien
gttcctgccgcctcagctccttcaa

SEQ ID NO: 5959164 - DNA, 25 bp, Homo sapien
gtctcttctcctcttcatgcttttt

SEQ ID NO: 5959165 - DNA, 25 bp, Homo sapien
ttcatcgtcttctataaaatcatcc

SEQ ID NO: 5959166 - DNA, 25 bp, Homo sapien
gacgggcttgggtgagtctgatgat

SEQ ID NO: 5959167 - DNA, 25 bp, Homo sapien
gcccttcttacggcgtctcttctcc

SEQ ID NO: 5959168 - DNA, 25 bp, Homo sapien
ggtgagtctgatgattttatgctat

SEQ ID NO: 5959169 - DNA, 25 bp, Homo sapien
gcttgacgggcttgggtgagtctga

SEQ ID NO: 5959170 - DNA, 25 bp, Homo sapien
ctccagaagatactccacgcaatgt

SEQ ID NO: 5959171 - DNA, 25 bp, Homo sapien
attctgaccgcttcttgcctctatt

SEQ ID NO: 5959172 - DNA, 25 bp, Homo sapien
ccttcatcttcatcgtcttctataa

SEQ ID NO: 5959173 - DNA, 25 bp, Homo sapien
tcatcatcctcaagctcatcgtaat

SEQ ID NO: 5959174 - DNA, 25 bp, Homo sapien
atgcccttcttacggcgtctcttct

SEQ ID NO: 5959175 - DNA, 25 bp, Homo sapien
gaggtgccacgtttccgttttacac

SEQ ID NO: 5959176 - DNA, 25 bp, Homo sapien
gttatcttcttcatcatagtcatcc

SEQ ID NO: 5959177 - DNA, 25 bp, Homo sapien
tcaatctttttactgcaggatcttc

SEQ ID NO: 5959178 - DNA, 25 bp, Homo sapien
tgttaaaatgtgggcgttccttagt

SEQ ID NO: 5959179 - DNA, 25 bp, Homo sapien
tgacatctttttgataggttcaggt

SEQ ID NO: 5959180 - DNA, 25 bp, Homo sapien
tatcttcttcatcatagtcatcctg

SEQ ID NO: 5959181 - DNA, 25 bp, Homo sapien
tggtaaccttcatcttcatcgtctt

SEQ ID NO: 5959182 - DNA, 25 bp, Homo sapien
gcatgacttgctccaatagacctct

SEQ ID NO: 5959183 - DNA, 25 bp, Homo sapien
atcatccatatcgttatcttcttca

SEQ ID NO: 5959184 - DNA, 25 bp, Homo sapien
ctgtttctcattattttccgcttgt

SEQ ID NO: 5959185 - DNA, 25 bp, Homo sapien
aatcgtattctgaccgcttcttgcc

SEQ ID NO: 5959186 - DNA, 25 bp, Homo sapien
aatccatttgtgggcaagttgagct

SEQ ID NO: 5959187 - DNA, 25 bp, Homo sapien
ctctattgaacatagcccaaatttc

SEQ ID NO: 5959188 - DNA, 25 bp, Homo sapien
gctcttcaaatgacatctttttgat

SEQ ID NO: 5959189 - DNA, 25 bp, Homo sapien
gaatactcttcgtcattcttcttgg

SEQ ID NO: 5959190 - DNA, 25 bp, Homo sapien
tttccgcttgtttcattagctcttc

SEQ ID NO: 5959191 - DNA, 25 bp, Homo sapien
gttgagcaaatccatttgtgggcaa

SEQ ID NO: 5959192 - DNA, 25 bp, Homo sapien
tgaacatagcccaaatttcgtcacg

SEQ ID NO: 5959193 - DNA, 25 bp, Homo sapien
tatcgttatcttcttcatcatagtc

SEQ ID NO: 5959194 - DNA, 25 bp, Homo sapien
cttttgggggctgtttctcattatt

SEQ ID NO: 5959195 - DNA, 25 bp, Homo sapien
atttcgtcacgatcatatccgggac

SEQ ID NO: 5959196 - DNA, 25 bp, Homo sapien
catagcccaaatttcgtcacgatca

SEQ ID NO: 5959197 - DNA, 25 bp, Homo sapien
ttctcattattttccgcttgtttca

SEQ ID NO: 5959198 - DNA, 25 bp, Homo sapien
cttgcacttgggcttttgatgcagt

SEQ ID NO: 5959199 - DNA, 25 bp, Homo sapien
tccaagatttccatctcatttgctt

SEQ ID NO: 5959200 - DNA, 25 bp, Homo sapien
cctcagctccttcaatctttttact

SEQ ID NO: 5959201 - DNA, 25 bp, Homo sapien
ttgggtaacaaggaatactcttcgt

SEQ ID NO: 5959202 - DNA, 25 bp, Homo sapien
tgggtgagtctgatgattttatgct

SEQ ID NO: 5959203 - DNA, 25 bp, Homo sapien
tattgcctccagaagatactccacg

SEQ ID NO: 5959204 - DNA, 25 bp, Homo sapien
tgagcaaatccatttgtgggcaagt

SEQ ID NO: 5959205 - DNA, 25 bp, Homo sapien
cttgctccaatagacctcttaaacc

SEQ ID NO: 5959206 - DNA, 25 bp, Homo sapien
taggttcaggtttcttccttacaac

SEQ ID NO: 5959207 - DNA, 25 bp, Homo sapien
catatcatcatcctcaagctcatcg

SEQ ID NO: 5959208 - DNA, 25 bp, Homo sapien
ctcctattaggttgagcaaatccat

SEQ ID NO: 5959209 - DNA, 25 bp, Homo sapien
tacaccactttttttagccaaagca

SEQ ID NO: 5959210 - DNA, 25 bp, Homo sapien
tgtggtaaccttcatcttcatcgtc

SEQ ID NO: 5959211 - DNA, 25 bp, Homo sapien
caggtttcttccttacaactggctt

SEQ ID NO: 5959212 - DNA, 25 bp, Homo sapien
caaatccatttgtgggcaagttgag

SEQ ID NO: 5959213 - DNA, 25 bp, Homo sapien
ccactttttttagccaaagcaccat

SEQ ID NO: 5959214 - DNA, 25 bp, Homo sapien
tggcgcatgacttgctccaatagac

SEQ ID NO: 5959215 - DNA, 25 bp, Homo sapien
tttttactgcaggatcttcgtctct

SEQ ID NO: 5959216 - DNA, 25 bp, Homo sapien
ttttgaacttttgaaacctggcttg

SEQ ID NO: 5959217 - DNA, 25 bp, Homo sapien
cattattttccgcttgtttcattag

SEQ ID NO: 5959218 - DNA, 25 bp, Homo sapien
gcgtctcttctcctcttcatgcttt

SEQ ID NO: 5959219 - DNA, 25 bp, Homo sapien
caagctcatcgtaatcgtattctga

SEQ ID NO: 5959220 - DNA, 25 bp, Homo sapien
tgcttccatatcatcatcctcaagc

SEQ ID NO: 5959221 - DNA, 25 bp, Homo sapien
ttgaacttttgaaacctggcttgtt

SEQ ID NO: 5959222 - DNA, 25 bp, Homo sapien
gcgcatgacttgctccaatagacct

SEQ ID NO: 5959223 - DNA, 25 bp, Homo sapien
ttcatcttcatcgtcttctataaaa

SEQ ID NO: 5959224 - DNA, 25 bp, Homo sapien
agtctgatgattttatgctattgcc

SEQ ID NO: 5959225 - DNA, 25 bp, Homo sapien
ccgggaccattgctgtgtttcgatt

SEQ ID NO: 5959226 - DNA, 25 bp, Homo sapien
ttcgtcattcttcttgggtaatgga

SEQ ID NO: 5959227 - DNA, 25 bp, Homo sapien
cttacggcgtctcttctcctcttca

SEQ ID NO: 5959228 - DNA, 25 bp, Homo sapien
ttcgatttgctgtggtaaccttcat

SEQ ID NO: 5959229 - DNA, 25 bp, Homo sapien
tttgatgcagtcgttgattttcgta

SEQ ID NO: 5959230 - DNA, 25 bp, Homo sapien
gatactccacgcaatgttgcgccag

SEQ ID NO: 5959231 - DNA, 25 bp, Homo sapien
gggtaacaaggaatactcttcgtca

SEQ ID NO: 5959232 - DNA, 25 bp, Homo sapien
atctcatttgcttccatatcatcat

SEQ ID NO: 5959233 - DNA, 25 bp, Homo sapien
tctcttatgtaatttttgggtaaca

SEQ ID NO: 5959234 - DNA, 25 bp, Homo sapien
agcaaatccatttgtgggcaagttg

SEQ ID NO: 5959235 - DNA, 25 bp, Homo sapien
ggtaatggatcttgcacttgggctt

SEQ ID NO: 5959236 - DNA, 25 bp, Homo sapien
tcgttatcttcttcatcatagtcat

SEQ ID NO: 5959237 - DNA, 25 bp, Homo sapien
aggccaccttcatcatcgtcattcc

SEQ ID NO: 5959238 - DNA, 25 bp, Homo sapien
ttttgggtaacaaggaatactcttc

SEQ ID NO: 5959239 - DNA, 25 bp, Homo sapien
ctttaacagttcctgccgcctcagc

SEQ ID NO: 5959240 - DNA, 25 bp, Homo sapien
tcatgcttttttaaccaagcttcct

SEQ ID NO: 5959241 - DNA, 25 bp, Homo sapien
tttactgcaggatcttcgtctctta

SEQ ID NO: 5959242 - DNA, 25 bp, Homo sapien
tcacgtttatcctctaaccttgcca

SEQ ID NO: 5959243 - DNA, 25 bp, Homo sapien
aaccaagcttcctcacgtttatcct

SEQ ID NO: 5959244 - DNA, 25 bp, Homo sapien
attgctgtgtttcgatttgctgtgg

SEQ ID NO: 5959245 - DNA, 25 bp, Homo sapien
gctttcttttgtggtctttttgaac

SEQ ID NO: 5959246 - DNA, 25 bp, Homo sapien
ctccacgcaatgttgcgccagggga

SEQ ID NO: 5959247 - DNA, 25 bp, Homo sapien
gcctccagaagatactccacgcaat

SEQ ID NO: 5959248 - DNA, 25 bp, Homo sapien
cctaattccaaggccaccttcatca

SEQ ID NO: 5959249 - DNA, 25 bp, Homo sapien
gtttatcctctaaccttgccatttt

SEQ ID NO: 5959250 - DNA, 25 bp, Homo sapien
gcgccaggggatgctttcttttgtg

SEQ ID NO: 5959251 - DNA, 25 bp, Homo sapien
tactccacgcaatgttgcgccaggg

SEQ ID NO: 5959252 - DNA, 25 bp, Homo sapien
caaggaatactcttcgtcattcttc

SEQ ID NO: 5959253 - DNA, 25 bp, Homo sapien
ttgagcttgacgggcttgggtgagt

SEQ ID NO: 5959254 - DNA, 25 bp, Homo sapien
ccagatgaggtgccacgtttccgtt

SEQ ID NO: 5959255 - DNA, 25 bp, Homo sapien
tgggggctgtttctcattattttcc

SEQ ID NO: 5959256 - DNA, 25 bp, Homo sapien
gccaccttcatcatcgtcattcctt

SEQ ID NO: 5959257 - DNA, 25 bp, Homo sapien
atccgggaccattgctgtgtttcga

SEQ ID NO: 5959258 - DNA, 25 bp, Homo sapien
tttgtgggcaagttgagcttgacgg

SEQ ID NO: 5959259 - DNA, 25 bp, Homo sapien
atgctattgcctccagaagatactc

SEQ ID NO: 5959260 - DNA, 25 bp, Homo sapien
gcgtatgcccttcttacggcgtctc

SEQ ID NO: 5959261 - DNA, 25 bp, Homo sapien
tcttaaacctaattccaaggccacc

SEQ ID NO: 5959262 - DNA, 25 bp, Homo sapien
caagttgagcttgacgggcttgggt

SEQ ID NO: 5959263 - DNA, 25 bp, Homo sapien
atgcttttttaaccaagcttcctca

SEQ ID NO: 5959264 - DNA, 25 bp, Homo sapien
tgaaacctggcttgttaaaatgtgg

SEQ ID NO: 5959265 - DNA, 25 bp, Homo sapien
tctcctcttcatgcttttttaacca

SEQ ID NO: 5959266 - DNA, 25 bp, Homo sapien
cttgtttcattagctcttcaaatga

SEQ ID NO: 5959267 - DNA, 25 bp, Homo sapien
atgacttgctccaatagacctctta

SEQ ID NO: 5959268 - DNA, 25 bp, Homo sapien
cttcttgcctctattgaacatagcc

SEQ ID NO: 5959269 - DNA, 25 bp, Homo sapien
gcaggatcttcgtctcttatgtaat

SEQ ID NO: 5959270 - DNA, 25 bp, Homo sapien
ttaggttgagcaaatccatttgtgg

SEQ ID NO: 5959271 - DNA, 25 bp, Homo sapien
gacctcttaaacctaattccaaggc

SEQ ID NO: 5959272 - DNA, 25 bp, Homo sapien
gcaatgttgcgccaggggatgcttt

SEQ ID NO: 5959273 - DNA, 25 bp, Homo sapien
tgagtggcgcatgacttgctccaat

SEQ ID NO: 5959274 - DNA, 25 bp, Homo sapien
ccaagcttcctcacgtttatcctct

SEQ ID NO: 5959275 - DNA, 25 bp, Homo sapien
ctcatttgcttccatatcatcatcc

SEQ ID NO: 5959276 - DNA, 25 bp, Homo sapien
ttgcgccaggggatgctttcttttg

SEQ ID NO: 5959277 - DNA, 25 bp, Homo sapien
tgctccaatagacctcttaaaccta

SEQ ID NO: 5959278 - DNA, 25 bp, Homo sapien
gctccttcaatctttttactgcagg

SEQ ID NO: 5959279 - DNA, 25 bp, Homo sapien
atctttttgataggttcaggtttct

SEQ ID NO: 5959280 - DNA, 25 bp, Homo sapien
ctattgaacatagcccaaatttcgt

SEQ ID NO: 5959281 - DNA, 25 bp, Homo sapien
cttccaagatttccatctcatttgc

SEQ ID NO: 5959282 - DNA, 25 bp, Homo sapien
accttgccatttttcttgccatttc

SEQ ID NO: 5959283 - DNA, 25 bp, Homo sapien
tttctttttctcagatccagatgag

SEQ ID NO: 5959284 - DNA, 25 bp, Homo sapien
tgagtctgatgattttatgctattg

SEQ ID NO: 5959285 - DNA, 25 bp, Homo sapien
tcttatgtaatttttgggtaacaag

SEQ ID NO: 5959286 - DNA, 25 bp, Homo sapien
cgcttgtttcattagctcttcaaat

SEQ ID NO: 5959287 - DNA, 25 bp, Homo sapien
tttctcagatccagatgaggtgcca

SEQ ID NO: 5959288 - DNA, 25 bp, Homo sapien
atactcttcgtcattcttcttgggt

SEQ ID NO: 5959289 - DNA, 25 bp, Homo sapien
tttgcttccatatcatcatcctcaa

SEQ ID NO: 5959290 - DNA, 25 bp, Homo sapien
aaatttcgtcacgatcatatccggg

SEQ ID NO: 5959291 - DNA, 25 bp, Homo sapien
ttccgatgacttaacttttgggggc

SEQ ID NO: 5959292 - DNA, 25 bp, Homo sapien
tgatgcagtcgttgattttcgtatt

SEQ ID NO: 5959293 - DNA, 25 bp, Homo sapien
tacggcgtctcttctcctcttcatg

SEQ ID NO: 5959294 - DNA, 25 bp, Homo sapien
acgcaatgttgcgccaggggatgct

SEQ ID NO: 5959295 - DNA, 25 bp, Homo sapien
atttccatctcatttgcttccatat

SEQ ID NO: 5959296 - DNA, 25 bp, Homo sapien
ccagaagatactccacgcaatgttg

SEQ ID NO: 5959297 - DNA, 25 bp, Homo sapien
tagtcatcctggtatcttgatttct

SEQ ID NO: 5959298 - DNA, 25 bp, Homo sapien
acaactggcttgagtggcgcatgac

SEQ ID NO: 5959299 - DNA, 25 bp, Homo sapien
ttccatctcatttgcttccatatca

SEQ ID NO: 5959300 - DNA, 25 bp, Homo sapien
gccaaagcaccattctttaacagtt

SEQ ID NO: 5959301 - DNA, 25 bp, Homo sapien
cttagttacgggttccgatgactta

SEQ ID NO: 5959302 - DNA, 25 bp, Homo sapien
atttgctgtggtaaccttcatcttc

SEQ ID NO: 5959303 - DNA, 25 bp, Homo sapien
aatctttttactgcaggatcttcgt

SEQ ID NO: 5959304 - DNA, 25 bp, Homo sapien
ccaaggttactgtagtagaatttca

SEQ ID NO: 5959305 - DNA, 25 bp, Homo sapien
aacgtagcaaacttccaaaaggcta

SEQ ID NO: 5959306 - DNA, 25 bp, Homo sapien
ccaagacactgaaggtttcgtgaag

SEQ ID NO: 5959307 - DNA, 25 bp, Homo sapien
aggtaatggttcattcgaagacgaa

SEQ ID NO: 5959308 - DNA, 25 bp, Homo sapien
ccacgggctctgaagttacaccctt

SEQ ID NO: 5959309 - DNA, 25 bp, Homo sapien
ttctcatttattccaccaaatgcat

SEQ ID NO: 5959310 - DNA, 25 bp, Homo sapien
aatagatgaggaaaaaattgtctct

SEQ ID NO: 5959311 - DNA, 25 bp, Homo sapien
gtcacctattataaaggtaatggtt

SEQ ID NO: 5959312 - DNA, 25 bp, Homo sapien
aaaggtaatggttcattcgaagacg

SEQ ID NO: 5959313 - DNA, 25 bp, Homo sapien
gtattttgggggctcacattatcgg

SEQ ID NO: 5959314 - DNA, 25 bp, Homo sapien
ctatcaaagctgctcaattgggatt

SEQ ID NO: 5959315 - DNA, 25 bp, Homo sapien
gtgccttttcgtccacagtcaggac

SEQ ID NO: 5959316 - DNA, 25 bp, Homo sapien
aaaactggtcacggtcatgtcaact

SEQ ID NO: 5959317 - DNA, 25 bp, Homo sapien
taacaacattccttcggtcatgtat

SEQ ID NO: 5959318 - DNA, 25 bp, Homo sapien
tactctagattaggctccaaggtta

SEQ ID NO: 5959319 - DNA, 25 bp, Homo sapien
tgtattctcacccagaagtagcatg

SEQ ID NO: 5959320 - DNA, 25 bp, Homo sapien
aattgaaagaagccggcattgacta

SEQ ID NO: 5959321 - DNA, 25 bp, Homo sapien
attgtctcttcaacaggtgctcttt

SEQ ID NO: 5959322 - DNA, 25 bp, Homo sapien
cccttccccggtattgaaatagatg

SEQ ID NO: 5959323 - DNA, 25 bp, Homo sapien
aagaagccggcattgactataaaat

SEQ ID NO: 5959324 - DNA, 25 bp, Homo sapien
ctcatttattccaccaaatgcatac

SEQ ID NO: 5959325 - DNA, 25 bp, Homo sapien
ttccaagaccgagcgtattttgggg

SEQ ID NO: 5959326 - DNA, 25 bp, Homo sapien
aatcagatcactcctaaataataag

SEQ ID NO: 5959327 - DNA, 25 bp, Homo sapien
taaggaagctaacatggctgcctat

SEQ ID NO: 5959328 - DNA, 25 bp, Homo sapien
agacgaaacgaagatcagagtaact

SEQ ID NO: 5959329 - DNA, 25 bp, Homo sapien
cggtccaaatgccggtgaaatgatt

SEQ ID NO: 5959330 - DNA, 25 bp, Homo sapien
tttattccaccaaatgcatacggaa

SEQ ID NO: 5959331 - DNA, 25 bp, Homo sapien
gggttcagtttactctagattaggc

SEQ ID NO: 5959332 - DNA, 25 bp, Homo sapien
caaagttatttctgcaaagagaaac

SEQ ID NO: 5959333 - DNA, 25 bp, Homo sapien
agctaacatggctgcctatgataaa

SEQ ID NO: 5959334 - DNA, 25 bp, Homo sapien
tctgaagttacacccttccccggta

SEQ ID NO: 5959335 - DNA, 25 bp, Homo sapien
ggcgcttccgcagaagatgttgcta

SEQ ID NO: 5959336 - DNA, 25 bp, Homo sapien
ctgctggttacgtggctgctatcaa

SEQ ID NO: 5959337 - DNA, 25 bp, Homo sapien
cacccagaagtagcatgggttggta

SEQ ID NO: 5959338 - DNA, 25 bp, Homo sapien
atctatggacggcgaggttgccaaa

SEQ ID NO: 5959339 - DNA, 25 bp, Homo sapien
atatcaaaattaacgtagcaaactt

SEQ ID NO: 5959340 - DNA, 25 bp, Homo sapien
ttgaccattaacaagtcacatgatg

SEQ ID NO: 5959341 - DNA, 25 bp, Homo sapien
tgctgttggtagaagaccttacatt

SEQ ID NO: 5959342 - DNA, 25 bp, Homo sapien
cctagtcattgatgaccaatttaat

SEQ ID NO: 5959343 - DNA, 25 bp, Homo sapien
aggggacgcctagtcattgatgacc

SEQ ID NO: 5959344 - DNA, 25 bp, Homo sapien
gaggtattgagcttctgttcaagaa

SEQ ID NO: 5959345 - DNA, 25 bp, Homo sapien
gcggtacctgtcttaacgttggatg

SEQ ID NO: 5959346 - DNA, 25 bp, Homo sapien
ggttggtaaaaccgaagagcaattg

SEQ ID NO: 5959347 - DNA, 25 bp, Homo sapien
aagaccgagcgtattttgggggctc

SEQ ID NO: 5959348 - DNA, 25 bp, Homo sapien
agcaattaactggaggtattgagct

SEQ ID NO: 5959349 - DNA, 25 bp, Homo sapien
aagtcacatgatgtagtcatcatcg

SEQ ID NO: 5959350 - DNA, 25 bp, Homo sapien
ctgtcgaaatgttgaaaactggtca

SEQ ID NO: 5959351 - DNA, 25 bp, Homo sapien
atgttacatttggtccaatgctggc

SEQ ID NO: 5959352 - DNA, 25 bp, Homo sapien
cctatgataaagctattcattgttg

SEQ ID NO: 5959353 - DNA, 25 bp, Homo sapien
aggcaaattaggcggtacctgtctt

SEQ ID NO: 5959354 - DNA, 25 bp, Homo sapien
ctttgcggccaattcaagagccaag

SEQ ID NO: 5959355 - DNA, 25 bp, Homo sapien
agtagacaaaaggggacgcctagtc

SEQ ID NO: 5959356 - DNA, 25 bp, Homo sapien
ctgaaggtttcgtgaagattttgat

SEQ ID NO: 5959357 - DNA, 25 bp, Homo sapien
gggctgaaaagattggattagaagt

SEQ ID NO: 5959358 - DNA, 25 bp, Homo sapien
catgatgtagtcatcatcggtggtg

SEQ ID NO: 5959359 - DNA, 25 bp, Homo sapien
gtggccctgctggttacgtggctgc

SEQ ID NO: 5959360 - DNA, 25 bp, Homo sapien
gttaagcaattaactggaggtattg

SEQ ID NO: 5959361 - DNA, 25 bp, Homo sapien
cgccacgggctctgaagttacaccc

SEQ ID NO: 5959362 - DNA, 25 bp, Homo sapien
ttaagcaccaaagttatttctgcaa

SEQ ID NO: 5959363 - DNA, 25 bp, Homo sapien
atgttgctagggtctgccatgctca

SEQ ID NO: 5959364 - DNA, 25 bp, Homo sapien
ttacattgctggcttaggggctgaa

SEQ ID NO: 5959365 - DNA, 25 bp, Homo sapien
ctcacccagaagtagcatgggttgg

SEQ ID NO: 5959366 - DNA, 25 bp, Homo sapien
ctgttcaagaaaaataaggtcacct

SEQ ID NO: 5959367 - DNA, 25 bp, Homo sapien
cacccaaaagttcttgaaaaagcaa

SEQ ID NO: 5959368 - DNA, 25 bp, Homo sapien
tcatgtcaactataacaacattcct

SEQ ID NO: 5959369 - DNA, 25 bp, Homo sapien
gatcagagtaactcccgttgatggg

SEQ ID NO: 5959370 - DNA, 25 bp, Homo sapien
caatttaattccaagttcccacaca

SEQ ID NO: 5959371 - DNA, 25 bp, Homo sapien
tcaagaaaaataaggtcacctatta

SEQ ID NO: 5959372 - DNA, 25 bp, Homo sapien
ccgaagcatttaaggaagctaacat

SEQ ID NO: 5959373 - DNA, 25 bp, Homo sapien
aagtggtaggagatgttacatttgg

SEQ ID NO: 5959374 - DNA, 25 bp, Homo sapien
cgcctagtcattgatgaccaattta

SEQ ID NO: 5959375 - DNA, 25 bp, Homo sapien
gatcgattccaagaccgagcgtatt

SEQ ID NO: 5959376 - DNA, 25 bp, Homo sapien
agtagcatgggttggtaaaaccgaa

SEQ ID NO: 5959377 - DNA, 25 bp, Homo sapien
cctccaaagcacttctaaataattc

SEQ ID NO: 5959378 - DNA, 25 bp, Homo sapien
gttcccctttgcggccaattcaaga

SEQ ID NO: 5959379 - DNA, 25 bp, Homo sapien
actataacaacattccttcggtcat

SEQ ID NO: 5959380 - DNA, 25 bp, Homo sapien
aagaccacatactagatgttaagaa

SEQ ID NO: 5959381 - DNA, 25 bp, Homo sapien
agaaaatttggaagctgaagttttg

SEQ ID NO: 5959382 - DNA, 25 bp, Homo sapien
ctatggacggcgaggttgccaaagc

SEQ ID NO: 5959383 - DNA, 25 bp, Homo sapien
tgatatcaaaattaacgtagcaaac

SEQ ID NO: 5959384 - DNA, 25 bp, Homo sapien
gtccaaatgccggtgaaatgattgc

SEQ ID NO: 5959385 - DNA, 25 bp, Homo sapien
gattttgatcgattccaagaccgag

SEQ ID NO: 5959386 - DNA, 25 bp, Homo sapien
aatttggaagctgaagttttgctgg

SEQ ID NO: 5959387 - DNA, 25 bp, Homo sapien
tattctcacccagaagtagcatggg

SEQ ID NO: 5959388 - DNA, 25 bp, Homo sapien
ttaagaacatcatagtcgccacggg

SEQ ID NO: 5959389 - DNA, 25 bp, Homo sapien
acttccaaaaggctaaggatgacgc

SEQ ID NO: 5959390 - DNA, 25 bp, Homo sapien
taactggaggtattgagcttctgtt

SEQ ID NO: 5959391 - DNA, 25 bp, Homo sapien
agaagtagacaaaaggggacgccta

SEQ ID NO: 5959392 - DNA, 25 bp, Homo sapien
attgttgtagaagatactaaaacga

SEQ ID NO: 5959393 - DNA, 25 bp, Homo sapien
tccgcagaagatgttgctagggtct

SEQ ID NO: 5959394 - DNA, 25 bp, Homo sapien
ggtacctgtcttaacgttggatgta

SEQ ID NO: 5959395 - DNA, 25 bp, Homo sapien
gattccaagaccgagcgtattttgg

SEQ ID NO: 5959396 - DNA, 25 bp, Homo sapien
tcatcggattggaaatgggttcagt

SEQ ID NO: 5959397 - DNA, 25 bp, Homo sapien
gtccacagtcaggacattgaccatt

SEQ ID NO: 5959398 - DNA, 25 bp, Homo sapien
gttacgtggctgctatcaaagctgc

SEQ ID NO: 5959399 - DNA, 25 bp, Homo sapien
agttttgctggttgctgttggtaga

SEQ ID NO: 5959400 - DNA, 25 bp, Homo sapien
ggtattgagcttctgttcaagaaaa

SEQ ID NO: 5959401 - DNA, 25 bp, Homo sapien
gaaaaaagaggcaaattaggcggta

SEQ ID NO: 5959402 - DNA, 25 bp, Homo sapien
cacaaagccgaagaggaaggtattg

SEQ ID NO: 5959403 - DNA, 25 bp, Homo sapien
gaagtagcatgggttggtaaaaccg

SEQ ID NO: 5959404 - DNA, 25 bp, Homo sapien
acggtgatatcaaaattaacgtagc

SEQ ID NO: 5959405 - DNA, 25 bp, Homo sapien
ggtaaaaccgaagagcaattgaaag

SEQ ID NO: 5959406 - DNA, 25 bp, Homo sapien
acggcgaggttgccaaagccaccca

SEQ ID NO: 5959407 - DNA, 25 bp, Homo sapien
tgcaaagagaaacgacgacaagaac

SEQ ID NO: 5959408 - DNA, 25 bp, Homo sapien
taataagcgtgccttttcgtccaca

SEQ ID NO: 5959409 - DNA, 25 bp, Homo sapien
atgggttcagtttactctagattag

SEQ ID NO: 5959410 - DNA, 25 bp, Homo sapien
tgttaagaacatcatagtcgccacg

SEQ ID NO: 5959411 - DNA, 25 bp, Homo sapien
agattaggctccaaggttactgtag

SEQ ID NO: 5959412 - DNA, 25 bp, Homo sapien
tagcaaacttccaaaaggctaagga

SEQ ID NO: 5959413 - DNA, 25 bp, Homo sapien
ttgaaagaagccggcattgactata

SEQ ID NO: 5959414 - DNA, 25 bp, Homo sapien
cccggtattgaaatagatgaggaaa

SEQ ID NO: 5959415 - DNA, 25 bp, Homo sapien
ggatgtatcccctccaaagcacttc

SEQ ID NO: 5959416 - DNA, 25 bp, Homo sapien
ctggtcacggtcatgtcaactataa

SEQ ID NO: 5959417 - DNA, 25 bp, Homo sapien
ctgttggtagaagaccttacattgc

SEQ ID NO: 5959418 - DNA, 25 bp, Homo sapien
gtcattgatgaccaatttaattcca

SEQ ID NO: 5959419 - DNA, 25 bp, Homo sapien
tctgcaaagagaaacgacgacaaga

SEQ ID NO: 5959420 - DNA, 25 bp, Homo sapien
ttgcggccaattcaagagccaagac

SEQ ID NO: 5959421 - DNA, 25 bp, Homo sapien
ccctttgcggccaattcaagagcca

SEQ ID NO: 5959422 - DNA, 25 bp, Homo sapien
cctcaaattggtgcatctatggacg

SEQ ID NO: 5959423 - DNA, 25 bp, Homo sapien
catacggaagcgcaaaagagaggta

SEQ ID NO: 5959424 - DNA, 25 bp, Homo sapien
tcttaacgttggatgtatcccctcc

SEQ ID NO: 5959425 - DNA, 25 bp, Homo sapien
acgacaagaacgtcgtcgaaattgt

SEQ ID NO: 5959426 - DNA, 25 bp, Homo sapien
aataaggtcacctattataaaggta

SEQ ID NO: 5959427 - DNA, 25 bp, Homo sapien
cagaagtagcatgggttggtaaaac

SEQ ID NO: 5959428 - DNA, 25 bp, Homo sapien
ggttgccaaagccacccaaaagttc

SEQ ID NO: 5959429 - DNA, 25 bp, Homo sapien
ccaaccaagacactgaaggtttcgt

SEQ ID NO: 5959430 - DNA, 25 bp, Homo sapien
cactcctaaataataagcgtgcctt

SEQ ID NO: 5959431 - DNA, 25 bp, Homo sapien
agaggcaaattaggcggtacctgtc

SEQ ID NO: 5959432 - DNA, 25 bp, Homo sapien
agatcactcctaaataataagcgtg

SEQ ID NO: 5959433 - DNA, 25 bp, Homo sapien
tggttacgtggctgctatcaaagct

SEQ ID NO: 5959434 - DNA, 25 bp, Homo sapien
tagacaaaaggggacgcctagtcat

SEQ ID NO: 5959435 - DNA, 25 bp, Homo sapien
tcaacctcaaattggtgcatctatg

SEQ ID NO: 5959436 - DNA, 25 bp, Homo sapien
gcggccaattcaagagccaagacca

SEQ ID NO: 5959437 - DNA, 25 bp, Homo sapien
tttactctagattaggctccaaggt

SEQ ID NO: 5959438 - DNA, 25 bp, Homo sapien
ccaccaaatgcatacggaagcgcaa

SEQ ID NO: 5959439 - DNA, 25 bp, Homo sapien
atgtgtagaaaaaagaggcaaatta

SEQ ID NO: 5959440 - DNA, 25 bp, Homo sapien
tgttgtagaagatactaaaacgaat

SEQ ID NO: 5959441 - DNA, 25 bp, Homo sapien
tggaagctgaagttttgctggttgc

SEQ ID NO: 5959442 - DNA, 25 bp, Homo sapien
atgccggtgaaatgattgctgaagc

SEQ ID NO: 5959443 - DNA, 25 bp, Homo sapien
atcatcggtggtggccctgctggtt

SEQ ID NO: 5959444 - DNA, 25 bp, Homo sapien
ggatttaacactgcatgtgtagaaa

SEQ ID NO: 5959445 - DNA, 25 bp, Homo sapien
cactgaaggtttcgtgaagattttg

SEQ ID NO: 5959446 - DNA, 25 bp, Homo sapien
gaagatgttgctagggtctgccatg

SEQ ID NO: 5959447 - DNA, 25 bp, Homo sapien
aaatgccggtgaaatgattgctgaa

SEQ ID NO: 5959448 - DNA, 25 bp, Homo sapien
tgctcaattgggatttaacactgca

SEQ ID NO: 5959449 - DNA, 25 bp, Homo sapien
tgacgtcaacggtgatatcaaaatt

SEQ ID NO: 5959450 - DNA, 25 bp, Homo sapien
gtggtaggagatgttacatttggtc

SEQ ID NO: 5959451 - DNA, 25 bp, Homo sapien
aacctcaaattggtgcatctatgga

SEQ ID NO: 5959452 - DNA, 25 bp, Homo sapien
gccttagaatatggcgcttccgcag

SEQ ID NO: 5959453 - DNA, 25 bp, Homo sapien
ctggctcacaaagccgaagaggaag

SEQ ID NO: 5959454 - DNA, 25 bp, Homo sapien
atgttgaaaactggtcacggtcatg

SEQ ID NO: 5959455 - DNA, 25 bp, Homo sapien
agatgttgctagggtctgccatgct

SEQ ID NO: 5959456 - DNA, 25 bp, Homo sapien
gctggttgctgttggtagaagacct

SEQ ID NO: 5959457 - DNA, 25 bp, Homo sapien
ctgaagctggcttagccttagaata

SEQ ID NO: 5959458 - DNA, 25 bp, Homo sapien
actggaggtattgagcttctgttca

SEQ ID NO: 5959459 - DNA, 25 bp, Homo sapien
caagaaaatttggaagctgaagttt

SEQ ID NO: 5959460 - DNA, 25 bp, Homo sapien
aaagaggcaaattaggcggtacctg

SEQ ID NO: 5959461 - DNA, 25 bp, Homo sapien
ggctccaaggttactgtagtagaat

SEQ ID NO: 5959462 - DNA, 25 bp, Homo sapien
tttcaacctcaaattggtgcatcta

SEQ ID NO: 5959463 - DNA, 25 bp, Homo sapien
atgtagtcatcatcggtggtggccc

SEQ ID NO: 5959464 - DNA, 25 bp, Homo sapien
ggctcacattatcggtccaaatgcc

SEQ ID NO: 5959465 - DNA, 25 bp, Homo sapien
ttgatcgattccaagaccgagcgta

SEQ ID NO: 5959466 - DNA, 25 bp, Homo sapien
attttgggggctcacattatcggtc

SEQ ID NO: 5959467 - DNA, 25 bp, Homo sapien
ggggctcacattatcggtccaaatg

SEQ ID NO: 5959468 - DNA, 25 bp, Homo sapien
ttaacgttggatgtatcccctccaa

SEQ ID NO: 5959469 - DNA, 25 bp, Homo sapien
gttacatttggtccaatgctggctc

SEQ ID NO: 5959470 - DNA, 25 bp, Homo sapien
agggtctgccatgctcatcctactt

SEQ ID NO: 5959471 - DNA, 25 bp, Homo sapien
caattgggatttaacactgcatgtg

SEQ ID NO: 5959472 - DNA, 25 bp, Homo sapien
tacctgtcttaacgttggatgtatc

SEQ ID NO: 5959473 - DNA, 25 bp, Homo sapien
tactttgtccgaagcatttaaggaa

SEQ ID NO: 5959474 - DNA, 25 bp, Homo sapien
ccaatgctggctcacaaagccgaag

SEQ ID NO: 5959475 - DNA, 25 bp, Homo sapien
cagaagatgttgctagggtctgcca

SEQ ID NO: 5959476 - DNA, 25 bp, Homo sapien
tttgggggctcacattatcggtcca

SEQ ID NO: 5959477 - DNA, 25 bp, Homo sapien
tagccttagaatatggcgcttccgc

SEQ ID NO: 5959478 - DNA, 25 bp, Homo sapien
aaattgtctcttcaacaggtgctct

SEQ ID NO: 5959479 - DNA, 25 bp, Homo sapien
tcaaattggtgcatctatggacggc

SEQ ID NO: 5959480 - DNA, 25 bp, Homo sapien
cactgcatgtgtagaaaaaagaggc

SEQ ID NO: 5959481 - DNA, 25 bp, Homo sapien
aatgcatacggaagcgcaaaagaga

SEQ ID NO: 5959482 - DNA, 25 bp, Homo sapien
accaaatgcatacggaagcgcaaaa

SEQ ID NO: 5959483 - DNA, 25 bp, Homo sapien
ccctgctggttacgtggctgctatc

SEQ ID NO: 5959484 - DNA, 25 bp, Homo sapien
caaaattaacgtagcaaacttccaa

SEQ ID NO: 5959485 - DNA, 25 bp, Homo sapien
ctaacatggctgcctatgataaagc

SEQ ID NO: 5959486 - DNA, 25 bp, Homo sapien
taggagatgttacatttggtccaat

SEQ ID NO: 5959487 - DNA, 25 bp, Homo sapien
aaattcccaaaagattaaccatcat

SEQ ID NO: 5959488 - DNA, 25 bp, Homo sapien
ttcaacaggtgctctttcgttaaag

SEQ ID NO: 5959489 - DNA, 25 bp, Homo sapien
ccttacattgctggcttaggggctg

SEQ ID NO: 5959490 - DNA, 25 bp, Homo sapien
cttccgcagaagatgttgctagggt

SEQ ID NO: 5959491 - DNA, 25 bp, Homo sapien
gcttctgttcaagaaaaataaggtc

SEQ ID NO: 5959492 - DNA, 25 bp, Homo sapien
acgggctctgaagttacacccttcc

SEQ ID NO: 5959493 - DNA, 25 bp, Homo sapien
gctgctatcaaagctgctcaattgg

SEQ ID NO: 5959494 - DNA, 25 bp, Homo sapien
cgctgttaagcaattaactggaggt

SEQ ID NO: 5959495 - DNA, 25 bp, Homo sapien
tgtcttaacgttggatgtatcccct

SEQ ID NO: 5959496 - DNA, 25 bp, Homo sapien
cttttcgtccacagtcaggacattg

SEQ ID NO: 5959497 - DNA, 25 bp, Homo sapien
gttatttctgcaaagagaaacgacg

SEQ ID NO: 5959498 - DNA, 25 bp, Homo sapien
gtcgaaattgttgtagaagatacta

SEQ ID NO: 5959499 - DNA, 25 bp, Homo sapien
gctggttacgtggctgctatcaaag

SEQ ID NO: 5959500 - DNA, 25 bp, Homo sapien
tcagagtaactcccgttgatgggtt

SEQ ID NO: 5959501 - DNA, 25 bp, Homo sapien
ttcggtcatgtattctcacccagaa

SEQ ID NO: 5959502 - DNA, 25 bp, Homo sapien
gaaagaagccggcattgactataaa

SEQ ID NO: 5959503 - DNA, 25 bp, Homo sapien
catttattccaccaaatgcatacgg

SEQ ID NO: 5959504 - DNA, 25 bp, Homo sapien
tataacaacattccttcggtcatgt

SEQ ID NO: 5959505 - DNA, 25 bp, Homo sapien
ccattaacaagtcacatgatgtagt

SEQ ID NO: 5959506 - DNA, 25 bp, Homo sapien
tcgattccaagaccgagcgtatttt

SEQ ID NO: 5959507 - DNA, 25 bp, Homo sapien
acttcaaattaagcaccaaagttat

SEQ ID NO: 5959508 - DNA, 25 bp, Homo sapien
cgtgaagattttgatcgattccaag

SEQ ID NO: 5959509 - DNA, 25 bp, Homo sapien
ggccaattcaagagccaagaccaac

SEQ ID NO: 5959510 - DNA, 25 bp, Homo sapien
gctgcctatgataaagctattcatt

SEQ ID NO: 5959511 - DNA, 25 bp, Homo sapien
attgacgtcaacggtgatatcaaaa

SEQ ID NO: 5959512 - DNA, 25 bp, Homo sapien
gtagaagaccttacattgctggctt

SEQ ID NO: 5959513 - DNA, 25 bp, Homo sapien
gttcattcgaagacgaaacgaagat

SEQ ID NO: 5959514 - DNA, 25 bp, Homo sapien
gcagctgtcgaaatgttgaaaactg

SEQ ID NO: 5959515 - DNA, 25 bp, Homo sapien
taaataataagcgtgccttttcgtc

SEQ ID NO: 5959516 - DNA, 25 bp, Homo sapien
gaccattaacaagtcacatgatgta

SEQ ID NO: 5959517 - DNA, 25 bp, Homo sapien
tcccgttgatgggttggaaggcact

SEQ ID NO: 5959518 - DNA, 25 bp, Homo sapien
gaggaaggtattgcagctgtcgaaa

SEQ ID NO: 5959519 - DNA, 25 bp, Homo sapien
tcatcctactttgtccgaagcattt

SEQ ID NO: 5959520 - DNA, 25 bp, Homo sapien
tgtcaaggaagaccacatactagat

SEQ ID NO: 5959521 - DNA, 25 bp, Homo sapien
caaagccacccaaaagttcttgaaa

SEQ ID NO: 5959522 - DNA, 25 bp, Homo sapien
atcctactttgtccgaagcatttaa

SEQ ID NO: 5959523 - DNA, 25 bp, Homo sapien
catttggtccaatgctggctcacaa

SEQ ID NO: 5959524 - DNA, 25 bp, Homo sapien
aaggttactgtagtagaatttcaac

SEQ ID NO: 5959525 - DNA, 25 bp, Homo sapien
ttcaaattaagcaccaaagttattt

SEQ ID NO: 5959526 - DNA, 25 bp, Homo sapien
aggaagctaacatggctgcctatga

SEQ ID NO: 5959527 - DNA, 25 bp, Homo sapien
catcggtggtggccctgctggttac

SEQ ID NO: 5959528 - DNA, 25 bp, Homo sapien
tggaaggcactgtcaaggaagacca

SEQ ID NO: 5959529 - DNA, 25 bp, Homo sapien
tggttcattcgaagacgaaacgaag

SEQ ID NO: 5959530 - DNA, 25 bp, Homo sapien
ccaaaaggctaaggatgacgctgtt

SEQ ID NO: 5959531 - DNA, 25 bp, Homo sapien
ggtggaggaatcatcggattggaaa

SEQ ID NO: 5959532 - DNA, 25 bp, Homo sapien
caaatgcatacggaagcgcaaaaga

SEQ ID NO: 5959533 - DNA, 25 bp, Homo sapien
ctgaagttttgctggttgctgttgg

SEQ ID NO: 5959534 - DNA, 25 bp, Homo sapien
tagaagatactaaaacgaataagca

SEQ ID NO: 5959535 - DNA, 25 bp, Homo sapien
tattccaccaaatgcatacggaagc

SEQ ID NO: 5959536 - DNA, 25 bp, Homo sapien
atcaaagctgctcaattgggattta

SEQ ID NO: 5959537 - DNA, 25 bp, Homo sapien
tgctggctcacaaagccgaagagga

SEQ ID NO: 5959538 - DNA, 25 bp, Homo sapien
tcaaggaagaccacatactagatgt

SEQ ID NO: 5959539 - DNA, 25 bp, Homo sapien
cctactttgtccgaagcatttaagg

SEQ ID NO: 5959540 - DNA, 25 bp, Homo sapien
ggaatcatcggattggaaatgggtt

SEQ ID NO: 5959541 - DNA, 25 bp, Homo sapien
cgcaaaagagaggtattgacgtcaa

SEQ ID NO: 5959542 - DNA, 25 bp, Homo sapien
caaagagaaacgacgacaagaacgt

SEQ ID NO: 5959543 - DNA, 25 bp, Homo sapien
aaaagattggattagaagtagacaa

SEQ ID NO: 5959544 - DNA, 25 bp, Homo sapien
ttggacttcaaattaagcaccaaag

SEQ ID NO: 5959545 - DNA, 25 bp, Homo sapien
ttaacgtagcaaacttccaaaaggc

SEQ ID NO: 5959546 - DNA, 25 bp, Homo sapien
tcagatcactcctaaataataagcg

SEQ ID NO: 5959547 - DNA, 25 bp, Homo sapien
ccaagttcccacacattaaagtggt

SEQ ID NO: 5959548 - DNA, 25 bp, Homo sapien
ggtaggagatgttacatttggtcca

SEQ ID NO: 5959549 - DNA, 25 bp, Homo sapien
aagcaccaaagttatttctgcaaag

SEQ ID NO: 5959550 - DNA, 25 bp, Homo sapien
aagattaaccatcattggtggagga

SEQ ID NO: 5959551 - DNA, 25 bp, Homo sapien
tgcctatgataaagctattcattgt

SEQ ID NO: 5959552 - DNA, 25 bp, Homo sapien
tcgtccacagtcaggacattgacca

SEQ ID NO: 5959553 - DNA, 25 bp, Homo sapien
taagcaattaactggaggtattgag

SEQ ID NO: 5959554 - DNA, 25 bp, Homo sapien
aaatgttgaaaactggtcacggtca

SEQ ID NO: 5959555 - DNA, 25 bp, Homo sapien
agaacgtcgtcgaaattgttgtaga

SEQ ID NO: 5959556 - DNA, 25 bp, Homo sapien
atggacggcgaggttgccaaagcca

SEQ ID NO: 5959557 - DNA, 25 bp, Homo sapien
taagaatcagatcactcctaaataa

SEQ ID NO: 5959558 - DNA, 25 bp, Homo sapien
aaggaagaccacatactagatgtta

SEQ ID NO: 5959559 - DNA, 25 bp, Homo sapien
acaagtcacatgatgtagtcatcat

SEQ ID NO: 5959560 - DNA, 25 bp, Homo sapien
aagaacatcatagtcgccacgggct

SEQ ID NO: 5959561 - DNA, 25 bp, Homo sapien
ggttactgtagtagaatttcaacct

SEQ ID NO: 5959562 - DNA, 25 bp, Homo sapien
cgaataagcaagaaaatttggaagc

SEQ ID NO: 5959563 - DNA, 25 bp, Homo sapien
tacatttggtccaatgctggctcac

SEQ ID NO: 5959564 - DNA, 25 bp, Homo sapien
attaactggaggtattgagcttctg

SEQ ID NO: 5959565 - DNA, 25 bp, Homo sapien
cgcttccgcagaagatgttgctagg

SEQ ID NO: 5959566 - DNA, 25 bp, Homo sapien
catgtattctcacccagaagtagca

SEQ ID NO: 5959567 - DNA, 25 bp, Homo sapien
agatgttacatttggtccaatgctg

SEQ ID NO: 5959568 - DNA, 25 bp, Homo sapien
gaaaaataaggtcacctattataaa

SEQ ID NO: 5959569 - DNA, 25 bp, Homo sapien
aaaggggacgcctagtcattgatga

SEQ ID NO: 5959570 - DNA, 25 bp, Homo sapien
ggaaggtattgcagctgtcgaaatg

SEQ ID NO: 5959571 - DNA, 25 bp, Homo sapien
aagttcccacacattaaagtggtag

SEQ ID NO: 5959572 - DNA, 25 bp, Homo sapien
gaagttttgctggttgctgttggta

SEQ ID NO: 5959573 - DNA, 25 bp, Homo sapien
ttccaagttcccacacattaaagtg

SEQ ID NO: 5959574 - DNA, 25 bp, Homo sapien
gcaattgaaagaagccggcattgac

SEQ ID NO: 5959575 - DNA, 25 bp, Homo sapien
tcaggacattgaccattaacaagtc

SEQ ID NO: 5959576 - DNA, 25 bp, Homo sapien
gggacgcctagtcattgatgaccaa

SEQ ID NO: 5959577 - DNA, 25 bp, Homo sapien
cgtagcaaacttccaaaaggctaag

SEQ ID NO: 5959578 - DNA, 25 bp, Homo sapien
tgctagggtctgccatgctcatcct

SEQ ID NO: 5959579 - DNA, 25 bp, Homo sapien
ggcttaggggctgaaaagattggat

SEQ ID NO: 5959580 - DNA, 25 bp, Homo sapien
tcattcgaagacgaaacgaagatca

SEQ ID NO: 5959581 - DNA, 25 bp, Homo sapien
ataattctcatttattccaccaaat

SEQ ID NO: 5959582 - DNA, 25 bp, Homo sapien
ctagggtctgccatgctcatcctac

SEQ ID NO: 5959583 - DNA, 25 bp, Homo sapien
aagattggattagaagtagacaaaa

SEQ ID NO: 5959584 - DNA, 25 bp, Homo sapien
taactcccgttgatgggttggaagg

SEQ ID NO: 5959585 - DNA, 25 bp, Homo sapien
atcggattggaaatgggttcagttt

SEQ ID NO: 5959586 - DNA, 25 bp, Homo sapien
agtcatcatcggtggtggccctgct

SEQ ID NO: 5959587 - DNA, 25 bp, Homo sapien
gtagtcatcatcggtggtggccctg

SEQ ID NO: 5959588 - DNA, 25 bp, Homo sapien
gaagctgaagttttgctggttgctg

SEQ ID NO: 5959589 - DNA, 25 bp, Homo sapien
agttcttgaaaaagcaaggtttgga

SEQ ID NO: 5959590 - DNA, 25 bp, Homo sapien
cgacgacaagaacgtcgtcgaaatt

SEQ ID NO: 5959591 - DNA, 25 bp, Homo sapien
cgcagaagatgttgctagggtctgc

SEQ ID NO: 5959592 - DNA, 25 bp, Homo sapien
gaagctaacatggctgcctatgata

SEQ ID NO: 5959593 - DNA, 25 bp, Homo sapien
agctggcttagccttagaatatggc

SEQ ID NO: 5959594 - DNA, 25 bp, Homo sapien
gttcccacacattaaagtggtagga

SEQ ID NO: 5959595 - DNA, 25 bp, Homo sapien
ttccttcggtcatgtattctcaccc

SEQ ID NO: 5959596 - DNA, 25 bp, Homo sapien
accaatttaattccaagttcccaca

SEQ ID NO: 5959597 - DNA, 25 bp, Homo sapien
aattaagcaccaaagttatttctgc

SEQ ID NO: 5959598 - DNA, 25 bp, Homo sapien
aggcactgtcaaggaagaccacata

SEQ ID NO: 5959599 - DNA, 25 bp, Homo sapien
catggctgcctatgataaagctatt

SEQ ID NO: 5959600 - DNA, 25 bp, Homo sapien
ttggtaaaaccgaagagcaattgaa

SEQ ID NO: 5959601 - DNA, 25 bp, Homo sapien
gaagcgcaaaagagaggtattgacg

SEQ ID NO: 5959602 - DNA, 25 bp, Homo sapien
aagcacttctaaataattctcattt

SEQ ID NO: 5959603 - DNA, 25 bp, Homo sapien
ttactgtagtagaatttcaacctca

SEQ ID NO: 5959604 - DNA, 25 bp, Homo sapien
aaattgttgtagaagatactaaaac

SEQ ID NO: 5959605 - DNA, 25 bp, Homo sapien
tgtagaagatactaaaacgaataag

SEQ ID NO: 5959606 - DNA, 25 bp, Homo sapien
ctaaggatgacgctgttaagcaatt

SEQ ID NO: 5959607 - DNA, 25 bp, Homo sapien
tcagtttactctagattaggctcca

SEQ ID NO: 5959608 - DNA, 25 bp, Homo sapien
gaggaatcatcggattggaaatggg

SEQ ID NO: 5959609 - DNA, 25 bp, Homo sapien
tgctggcttaggggctgaaaagatt

SEQ ID NO: 5959610 - DNA, 25 bp, Homo sapien
aatttcaacctcaaattggtgcatc

SEQ ID NO: 5959611 - DNA, 25 bp, Homo sapien
ttctcacccagaagtagcatgggtt

SEQ ID NO: 5959612 - DNA, 25 bp, Homo sapien
tacggaagcgcaaaagagaggtatt

SEQ ID NO: 5959613 - DNA, 25 bp, Homo sapien
atttaattccaagttcccacacatt

SEQ ID NO: 5959614 - DNA, 25 bp, Homo sapien
tattgagcttctgttcaagaaaaat

SEQ ID NO: 5959615 - DNA, 25 bp, Homo sapien
agctgaagttttgctggttgctgtt

SEQ ID NO: 5959616 - DNA, 25 bp, Homo sapien
ccaaaagattaaccatcattggtgg

SEQ ID NO: 5959617 - DNA, 25 bp, Homo sapien
ttgcagctgtcgaaatgttgaaaac

SEQ ID NO: 5959618 - DNA, 25 bp, Homo sapien
cattgactataaaattggtaagttc

SEQ ID NO: 5959619 - DNA, 25 bp, Homo sapien
ataaaggtaatggttcattcgaaga

SEQ ID NO: 5959620 - DNA, 25 bp, Homo sapien
ctaaataattctcatttattccacc

SEQ ID NO: 5959621 - DNA, 25 bp, Homo sapien
ccatcattggtggaggaatcatcgg

SEQ ID NO: 5959622 - DNA, 25 bp, Homo sapien
aaaaggctaaggatgacgctgttaa

SEQ ID NO: 5959623 - DNA, 25 bp, Homo sapien
gtatcccctccaaagcacttctaaa

SEQ ID NO: 5959624 - DNA, 25 bp, Homo sapien
gaaggcactgtcaaggaagaccaca

SEQ ID NO: 5959625 - DNA, 25 bp, Homo sapien
gaccttacattgctggcttaggggc

SEQ ID NO: 5959626 - DNA, 25 bp, Homo sapien
tctcttcaacaggtgctctttcgtt

SEQ ID NO: 5959627 - DNA, 25 bp, Homo sapien
tggtaagttcccctttgcggccaat

SEQ ID NO: 5959628 - DNA, 25 bp, Homo sapien
ttttgatcgattccaagaccgagcg

SEQ ID NO: 5959629 - DNA, 25 bp, Homo sapien
gttaagaatcagatcactcctaaat

SEQ ID NO: 5959630 - DNA, 25 bp, Homo sapien
gaaacgaagatcagagtaactcccg

SEQ ID NO: 5959631 - DNA, 25 bp, Homo sapien
attggtaagttcccctttgcggcca

SEQ ID NO: 5959632 - DNA, 25 bp, Homo sapien
ttggatgtatcccctccaaagcact

SEQ ID NO: 5959633 - DNA, 25 bp, Homo sapien
gtccaatgctggctcacaaagccga

SEQ ID NO: 5959634 - DNA, 25 bp, Homo sapien
gcatctatggacggcgaggttgcca

SEQ ID NO: 5959635 - DNA, 25 bp, Homo sapien
tctgccatgctcatcctactttgtc

SEQ ID NO: 5959636 - DNA, 25 bp, Homo sapien
tgtctcttcaacaggtgctctttcg

SEQ ID NO: 5959637 - DNA, 25 bp, Homo sapien
atcatagtcgccacgggctctgaag

SEQ ID NO: 5959638 - DNA, 25 bp, Homo sapien
aataagcaagaaaatttggaagctg

SEQ ID NO: 5959639 - DNA, 25 bp, Homo sapien
aacatggctgcctatgataaagcta

SEQ ID NO: 5959640 - DNA, 25 bp, Homo sapien
taagcaagaaaatttggaagctgaa

SEQ ID NO: 5959641 - DNA, 25 bp, Homo sapien
attcgaagacgaaacgaagatcaga

SEQ ID NO: 5959642 - DNA, 25 bp, Homo sapien
gcacttctaaataattctcatttat

SEQ ID NO: 5959643 - DNA, 25 bp, Homo sapien
attaggctccaaggttactgtagta

SEQ ID NO: 5959644 - DNA, 25 bp, Homo sapien
aagattttgatcgattccaagaccg

SEQ ID NO: 5959645 - DNA, 25 bp, Homo sapien
gacgcctagtcattgatgaccaatt

SEQ ID NO: 5959646 - DNA, 25 bp, Homo sapien
cattatcggtccaaatgccggtgaa

SEQ ID NO: 5959647 - DNA, 25 bp, Homo sapien
gaccacatactagatgttaagaaca

SEQ ID NO: 5959648 - DNA, 25 bp, Homo sapien
tcgaagacgaaacgaagatcagagt

SEQ ID NO: 5959649 - DNA, 25 bp, Homo sapien
gacattgaccattaacaagtcacat

SEQ ID NO: 5959650 - DNA, 25 bp, Homo sapien
ccgagcgtattttgggggctcacat

SEQ ID NO: 5959651 - DNA, 25 bp, Homo sapien
gggctctgaagttacacccttcccc

SEQ ID NO: 5959652 - DNA, 25 bp, Homo sapien
gttcaagaaaaataaggtcacctat

SEQ ID NO: 5959653 - DNA, 25 bp, Homo sapien
gtcaacggtgatatcaaaattaacg

SEQ ID NO: 5959654 - DNA, 25 bp, Homo sapien
atgtatcccctccaaagcacttcta

SEQ ID NO: 5959655 - DNA, 25 bp, Homo sapien
aaggatgacgctgttaagcaattaa

SEQ ID NO: 5959656 - DNA, 25 bp, Homo sapien
cgaagatcagagtaactcccgttga

SEQ ID NO: 5959657 - DNA, 25 bp, Homo sapien
ccaaatgccggtgaaatgattgctg

SEQ ID NO: 5959658 - DNA, 25 bp, Homo sapien
ggtcatgtcaactataacaacattc

SEQ ID NO: 5959659 - DNA, 25 bp, Homo sapien
gccacccaaaagttcttgaaaaagc

SEQ ID NO: 5959660 - DNA, 25 bp, Homo sapien
tattataaaggtaatggttcattcg

SEQ ID NO: 5959661 - DNA, 25 bp, Homo sapien
acattgctggcttaggggctgaaaa

SEQ ID NO: 5959662 - DNA, 25 bp, Homo sapien
tagcatgggttggtaaaaccgaaga

SEQ ID NO: 5959663 - DNA, 25 bp, Homo sapien
gcatgggttggtaaaaccgaagagc

SEQ ID NO: 5959664 - DNA, 25 bp, Homo sapien
cattgatgaccaatttaattccaag

SEQ ID NO: 5959665 - DNA, 25 bp, Homo sapien
ggacttcaaattaagcaccaaagtt

SEQ ID NO: 5959666 - DNA, 25 bp, Homo sapien
gattaaccatcattggtggaggaat

SEQ ID NO: 5959667 - DNA, 25 bp, Homo sapien
gttggtagaagaccttacattgctg

SEQ ID NO: 5959668 - DNA, 25 bp, Homo sapien
tggaggaatcatcggattggaaatg

SEQ ID NO: 5959669 - DNA, 25 bp, Homo sapien
ttctaaataattctcatttattcca

SEQ ID NO: 5959670 - DNA, 25 bp, Homo sapien
cgaaattgttgtagaagatactaaa

SEQ ID NO: 5959671 - DNA, 25 bp, Homo sapien
aacgaagatcagagtaactcccgtt

SEQ ID NO: 5959672 - DNA, 25 bp, Homo sapien
caaggtttggacttcaaattaagca

SEQ ID NO: 5959673 - DNA, 25 bp, Homo sapien
gaaaaaattgtctcttcaacaggtg

SEQ ID NO: 5959674 - DNA, 25 bp, Homo sapien
aagcgtgccttttcgtccacagtca

SEQ ID NO: 5959675 - DNA, 25 bp, Homo sapien
ttctgttcaagaaaaataaggtcac

SEQ ID NO: 5959676 - DNA, 25 bp, Homo sapien
gcgtgccttttcgtccacagtcagg

SEQ ID NO: 5959677 - DNA, 25 bp, Homo sapien
ttcttgaaaaagcaaggtttggact

SEQ ID NO: 5959678 - DNA, 25 bp, Homo sapien
ttaaccatcattggtggaggaatca

SEQ ID NO: 5959679 - DNA, 25 bp, Homo sapien
tcttcaacaggtgctctttcgttaa

SEQ ID NO: 5959680 - DNA, 25 bp, Homo sapien
gtccgaagcatttaaggaagctaac

SEQ ID NO: 5959681 - DNA, 25 bp, Homo sapien
aggacattgaccattaacaagtcac

SEQ ID NO: 5959682 - DNA, 25 bp, Homo sapien
agcaagaaaatttggaagctgaagt

SEQ ID NO: 5959683 - DNA, 25 bp, Homo sapien
aaggctaaggatgacgctgttaagc

SEQ ID NO: 5959684 - DNA, 25 bp, Homo sapien
aattctcatttattccaccaaatgc

SEQ ID NO: 5959685 - DNA, 25 bp, Homo sapien
gctgaaaagattggattagaagtag

SEQ ID NO: 5959686 - DNA, 25 bp, Homo sapien
acgtcaacggtgatatcaaaattaa

SEQ ID NO: 5959687 - DNA, 25 bp, Homo sapien
ggtattgcagctgtcgaaatgttga

SEQ ID NO: 5959688 - DNA, 25 bp, Homo sapien
ttaattccaagttcccacacattaa

SEQ ID NO: 5959689 - DNA, 25 bp, Homo sapien
gaccaaccaagacactgaaggtttc

SEQ ID NO: 5959690 - DNA, 25 bp, Homo sapien
aatggttcattcgaagacgaaacga

SEQ ID NO: 5959691 - DNA, 25 bp, Homo sapien
atatggcgcttccgcagaagatgtt

SEQ ID NO: 5959692 - DNA, 25 bp, Homo sapien
tcggtggtggccctgctggttacgt

SEQ ID NO: 5959693 - DNA, 25 bp, Homo sapien
aaaatttggaagctgaagttttgct

SEQ ID NO: 5959694 - DNA, 25 bp, Homo sapien
aaggtattgcagctgtcgaaatgtt

SEQ ID NO: 5959695 - DNA, 25 bp, Homo sapien
atgctcatcctactttgtccgaagc

SEQ ID NO: 5959696 - DNA, 25 bp, Homo sapien
tagatgaggaaaaaattgtctcttc

SEQ ID NO: 5959697 - DNA, 25 bp, Homo sapien
caaaagagaggtattgacgtcaacg

SEQ ID NO: 5959698 - DNA, 25 bp, Homo sapien
agctgtcgaaatgttgaaaactggt

SEQ ID NO: 5959699 - DNA, 25 bp, Homo sapien
actcccgttgatgggttggaaggca

SEQ ID NO: 5959700 - DNA, 25 bp, Homo sapien
attaaagtggtaggagatgttacat

SEQ ID NO: 5959701 - DNA, 25 bp, Homo sapien
tagtcattgatgaccaatttaattc

SEQ ID NO: 5959702 - DNA, 25 bp, Homo sapien
gtcatgtattctcacccagaagtag

SEQ ID NO: 5959703 - DNA, 25 bp, Homo sapien
agagccaagaccaaccaagacactg

SEQ ID NO: 5959704 - DNA, 25 bp, Homo sapien
cttagccttagaatatggcgcttcc

SEQ ID NO: 5959705 - DNA, 25 bp, Homo sapien
tggctgctatcaaagctgctcaatt

SEQ ID NO: 5959706 - DNA, 25 bp, Homo sapien
gggttggaaggcactgtcaaggaag

SEQ ID NO: 5959707 - DNA, 25 bp, Homo sapien
ctcacaaagccgaagaggaaggtat

SEQ ID NO: 5959708 - DNA, 25 bp, Homo sapien
gatgttaagaacatcatagtcgcca

SEQ ID NO: 5959709 - DNA, 25 bp, Homo sapien
aattcaagagccaagaccaaccaag

SEQ ID NO: 5959710 - DNA, 25 bp, Homo sapien
tgcatacggaagcgcaaaagagagg

SEQ ID NO: 5959711 - DNA, 25 bp, Homo sapien
ggtctgccatgctcatcctactttg

SEQ ID NO: 5959712 - DNA, 25 bp, Homo sapien
aagaggaaggtattgcagctgtcga

SEQ ID NO: 5959713 - DNA, 25 bp, Homo sapien
aagctgctcaattgggatttaacac

SEQ ID NO: 5959714 - DNA, 25 bp, Homo sapien
aagatcagagtaactcccgttgatg

SEQ ID NO: 5959715 - DNA, 25 bp, Homo sapien
ttaggcggtacctgtcttaacgttg

SEQ ID NO: 5959716 - DNA, 25 bp, Homo sapien
gcaccaaagttatttctgcaaagag

SEQ ID NO: 5959717 - DNA, 25 bp, Homo sapien
ggcttagccttagaatatggcgctt

SEQ ID NO: 5959718 - DNA, 25 bp, Homo sapien
cacattatcggtccaaatgccggtg

SEQ ID NO: 5959719 - DNA, 25 bp, Homo sapien
gaagctggcttagccttagaatatg

SEQ ID NO: 5959720 - DNA, 25 bp, Homo sapien
agaatcagatcactcctaaataata

SEQ ID NO: 5959721 - DNA, 25 bp, Homo sapien
ggagatgttacatttggtccaatgc

SEQ ID NO: 5959722 - DNA, 25 bp, Homo sapien
gccttttcgtccacagtcaggacat

SEQ ID NO: 5959723 - DNA, 25 bp, Homo sapien
cctaaataataagcgtgccttttcg

SEQ ID NO: 5959724 - DNA, 25 bp, Homo sapien
ggaagaccacatactagatgttaag

SEQ ID NO: 5959725 - DNA, 25 bp, Homo sapien
tagaatatggcgcttccgcagaaga

SEQ ID NO: 5959726 - DNA, 25 bp, Homo sapien
ctcctaaataataagcgtgcctttt

SEQ ID NO: 5959727 - DNA, 25 bp, Homo sapien
gagcttctgttcaagaaaaataagg

SEQ ID NO: 5959728 - DNA, 25 bp, Homo sapien
ttttgctggttgctgttggtagaag

SEQ ID NO: 5959729 - DNA, 25 bp, Homo sapien
tggctgcctatgataaagctattca

SEQ ID NO: 5959730 - DNA, 25 bp, Homo sapien
gttgaaaactggtcacggtcatgtc

SEQ ID NO: 5959731 - DNA, 25 bp, Homo sapien
accaaagttatttctgcaaagagaa

SEQ ID NO: 5959732 - DNA, 25 bp, Homo sapien
gtaatggttcattcgaagacgaaac

SEQ ID NO: 5959733 - DNA, 25 bp, Homo sapien
ataagcgtgccttttcgtccacagt

SEQ ID NO: 5959734 - DNA, 25 bp, Homo sapien
ttatcggtccaaatgccggtgaaat

SEQ ID NO: 5959735 - DNA, 25 bp, Homo sapien
tattgcagctgtcgaaatgttgaaa

SEQ ID NO: 5959736 - DNA, 25 bp, Homo sapien
taaagtggtaggagatgttacattt

SEQ ID NO: 5959737 - DNA, 25 bp, Homo sapien
tcccaaaagattaaccatcattggt

SEQ ID NO: 5959738 - DNA, 25 bp, Homo sapien
gtattgacgtcaacggtgatatcaa

SEQ ID NO: 5959739 - DNA, 25 bp, Homo sapien
aattccaagttcccacacattaaag

SEQ ID NO: 5959740 - DNA, 25 bp, Homo sapien
ttccaaaaggctaaggatgacgctg

SEQ ID NO: 5959741 - DNA, 25 bp, Homo sapien
tttcgtccacagtcaggacattgac

SEQ ID NO: 5959742 - DNA, 25 bp, Homo sapien
ttggtggaggaatcatcggattgga

SEQ ID NO: 5959743 - DNA, 25 bp, Homo sapien
attgctggcttaggggctgaaaaga

SEQ ID NO: 5959744 - DNA, 25 bp, Homo sapien
aaaaattgtctcttcaacaggtgct

SEQ ID NO: 5959745 - DNA, 25 bp, Homo sapien
agaagaccttacattgctggcttag

SEQ ID NO: 5959746 - DNA, 25 bp, Homo sapien
aaagcaaggtttggacttcaaatta

SEQ ID NO: 5959747 - DNA, 25 bp, Homo sapien
gacactgaaggtttcgtgaagattt

SEQ ID NO: 5959748 - DNA, 25 bp, Homo sapien
ctagattaggctccaaggttactgt

SEQ ID NO: 5959749 - DNA, 25 bp, Homo sapien
gctcatcctactttgtccgaagcat

SEQ ID NO: 5959750 - DNA, 25 bp, Homo sapien
ctgttaagcaattaactggaggtat

SEQ ID NO: 5959751 - DNA, 25 bp, Homo sapien
caactataacaacattccttcggtc

SEQ ID NO: 5959752 - DNA, 25 bp, Homo sapien
aacgttggatgtatcccctccaaag

SEQ ID NO: 5959753 - DNA, 25 bp, Homo sapien
ccacagtcaggacattgaccattaa

SEQ ID NO: 5959754 - DNA, 25 bp, Homo sapien
gcaaattaggcggtacctgtcttaa

SEQ ID NO: 5959755 - DNA, 25 bp, Homo sapien
tgccatgctcatcctactttgtccg

SEQ ID NO: 5959756 - DNA, 25 bp, Homo sapien
gccggtgaaatgattgctgaagctg

SEQ ID NO: 5959757 - DNA, 25 bp, Homo sapien
gagaaacgacgacaagaacgtcgtc

SEQ ID NO: 5959758 - DNA, 25 bp, Homo sapien
atttaacactgcatgtgtagaaaaa

SEQ ID NO: 5959759 - DNA, 25 bp, Homo sapien
aatgctggctcacaaagccgaagag

SEQ ID NO: 5959760 - DNA, 25 bp, Homo sapien
gtgaaatgattgctgaagctggctt

SEQ ID NO: 5959761 - DNA, 25 bp, Homo sapien
ttccaccaaatgcatacggaagcgc

SEQ ID NO: 5959762 - DNA, 25 bp, Homo sapien
aaagagaggtattgacgtcaacggt

SEQ ID NO: 5959763 - DNA, 25 bp, Homo sapien
gctctgaagttacacccttccccgg

SEQ ID NO: 5959764 - DNA, 25 bp, Homo sapien
cgaaatgttgaaaactggtcacggt

SEQ ID NO: 5959765 - DNA, 25 bp, Homo sapien
acatactagatgttaagaacatcat

SEQ ID NO: 5959766 - DNA, 25 bp, Homo sapien
aagttcccctttgcggccaattcaa

SEQ ID NO: 5959767 - DNA, 25 bp, Homo sapien
ctcacattatcggtccaaatgccgg

SEQ ID NO: 5959768 - DNA, 25 bp, Homo sapien
gctgctcaattgggatttaacactg

SEQ ID NO: 5959769 - DNA, 25 bp, Homo sapien
tcacggtcatgtcaactataacaac

SEQ ID NO: 5959770 - DNA, 25 bp, Homo sapien
ctggcttagccttagaatatggcgc

SEQ ID NO: 5959771 - DNA, 25 bp, Homo sapien
ttaacactgcatgtgtagaaaaaag

SEQ ID NO: 5959772 - DNA, 25 bp, Homo sapien
ttgccaaagccacccaaaagttctt

SEQ ID NO: 5959773 - DNA, 25 bp, Homo sapien
cggtgaaatgattgctgaagctggc

SEQ ID NO: 5959774 - DNA, 25 bp, Homo sapien
catagtcgccacgggctctgaagtt

SEQ ID NO: 5959775 - DNA, 25 bp, Homo sapien
cttagaatatggcgcttccgcagaa

SEQ ID NO: 5959776 - DNA, 25 bp, Homo sapien
agaggtattgacgtcaacggtgata

SEQ ID NO: 5959777 - DNA, 25 bp, Homo sapien
tcccctttgcggccaattcaagagc

SEQ ID NO: 5959778 - DNA, 25 bp, Homo sapien
gaccgagcgtattttgggggctcac

SEQ ID NO: 5959779 - DNA, 25 bp, Homo sapien
actgtcaaggaagaccacatactag

SEQ ID NO: 5959780 - DNA, 25 bp, Homo sapien
actagatgttaagaacatcatagtc

SEQ ID NO: 5959781 - DNA, 25 bp, Homo sapien
tgggatttaacactgcatgtgtaga

SEQ ID NO: 5959782 - DNA, 25 bp, Homo sapien
ggcgaggttgccaaagccacccaaa

SEQ ID NO: 5959783 - DNA, 25 bp, Homo sapien
tggtagaagaccttacattgctggc

SEQ ID NO: 5959784 - DNA, 25 bp, Homo sapien
ttataaaggtaatggttcattcgaa

SEQ ID NO: 5959785 - DNA, 25 bp, Homo sapien
caacaggtgctctttcgttaaagga

SEQ ID NO: 5959786 - DNA, 25 bp, Homo sapien
ttagaagtagacaaaaggggacgcc

SEQ ID NO: 5959787 - DNA, 25 bp, Homo sapien
aataataagcgtgccttttcgtcca

SEQ ID NO: 5959788 - DNA, 25 bp, Homo sapien
atgggttggtaaaaccgaagagcaa

SEQ ID NO: 5959789 - DNA, 25 bp, Homo sapien
aaatgggttcagtttactctagatt

SEQ ID NO: 5959790 - DNA, 25 bp, Homo sapien
ccaattcaagagccaagaccaacca

SEQ ID NO: 5959791 - DNA, 25 bp, Homo sapien
aacgacgacaagaacgtcgtcgaaa

SEQ ID NO: 5959792 - DNA, 25 bp, Homo sapien
aacattccttcggtcatgtattctc

SEQ ID NO: 5959793 - DNA, 25 bp, Homo sapien
ccgttgatgggttggaaggcactgt

SEQ ID NO: 5959794 - DNA, 25 bp, Homo sapien
ccaagaccaaccaagacactgaagg

SEQ ID NO: 5959795 - DNA, 25 bp, Homo sapien
aatgattgctgaagctggcttagcc

SEQ ID NO: 5959796 - DNA, 25 bp, Homo sapien
cattccttcggtcatgtattctcac

SEQ ID NO: 5959797 - DNA, 25 bp, Homo sapien
ttgactataaaattggtaagttccc

SEQ ID NO: 5959798 - DNA, 25 bp, Homo sapien
ttgatgaccaatttaattccaagtt

SEQ ID NO: 5959799 - DNA, 25 bp, Homo sapien
atcggtccaaatgccggtgaaatga

SEQ ID NO: 5959800 - DNA, 25 bp, Homo sapien
ggaaattcccaaaagattaaccatc

SEQ ID NO: 5959801 - DNA, 25 bp, Homo sapien
ggatgacgctgttaagcaattaact

SEQ ID NO: 5959802 - DNA, 25 bp, Homo sapien
gatgaggaaaaaattgtctcttcaa

SEQ ID NO: 5959803 - DNA, 25 bp, Homo sapien
tgaaaactggtcacggtcatgtcaa

SEQ ID NO: 5959804 - DNA, 25 bp, Homo sapien
gccgaagaggaaggtattgcagctg

SEQ ID NO: 5959805 - DNA, 25 bp, Homo sapien
cgttggatgtatcccctccaaagca

SEQ ID NO: 5959806 - DNA, 25 bp, Homo sapien
agagaggtattgacgtcaacggtga

SEQ ID NO: 5959807 - DNA, 25 bp, Homo sapien
cgtggctgctatcaaagctgctcaa

SEQ ID NO: 5959808 - DNA, 25 bp, Homo sapien
atggcgcttccgcagaagatgttgc

SEQ ID NO: 5959809 - DNA, 25 bp, Homo sapien
aggtttcgtgaagattttgatcgat

SEQ ID NO: 5959810 - DNA, 25 bp, Homo sapien
gtttcgtgaagattttgatcgattc

SEQ ID NO: 5959811 - DNA, 25 bp, Homo sapien
gttggaaggcactgtcaaggaagac

SEQ ID NO: 5959812 - DNA, 25 bp, Homo sapien
tccccggtattgaaatagatgagga

SEQ ID NO: 5959813 - DNA, 25 bp, Homo sapien
gagcgtattttgggggctcacatta

SEQ ID NO: 5959814 - DNA, 25 bp, Homo sapien
aagaccaaccaagacactgaaggtt

SEQ ID NO: 5959815 - DNA, 25 bp, Homo sapien
ctctagattaggctccaaggttact

SEQ ID NO: 5959816 - DNA, 25 bp, Homo sapien
agatactaaaacgaataagcaagaa

SEQ ID NO: 5959817 - DNA, 25 bp, Homo sapien
cctgtcttaacgttggatgtatccc

SEQ ID NO: 5959818 - DNA, 25 bp, Homo sapien
taggctccaaggttactgtagtaga

SEQ ID NO: 5959819 - DNA, 25 bp, Homo sapien
gaaggtttcgtgaagattttgatcg

SEQ ID NO: 5959820 - DNA, 25 bp, Homo sapien
gaatatggcgcttccgcagaagatg

SEQ ID NO: 5959821 - DNA, 25 bp, Homo sapien
cggattggaaatgggttcagtttac

SEQ ID NO: 5959822 - DNA, 25 bp, Homo sapien
tccaaagcacttctaaataattctc

SEQ ID NO: 5959823 - DNA, 25 bp, Homo sapien
gtcacatgatgtagtcatcatcggt

SEQ ID NO: 5959824 - DNA, 25 bp, Homo sapien
tacacccttccccggtattgaaata

SEQ ID NO: 5959825 - DNA, 25 bp, Homo sapien
tagaaaaaagaggcaaattaggcgg

SEQ ID NO: 5959826 - DNA, 25 bp, Homo sapien
acggtcatgtcaactataacaacat

SEQ ID NO: 5959827 - DNA, 25 bp, Homo sapien
caaagctgctcaattgggatttaac

SEQ ID NO: 5959828 - DNA, 25 bp, Homo sapien
ggtggtggccctgctggttacgtgg

SEQ ID NO: 5959829 - DNA, 25 bp, Homo sapien
aagaaaaataaggtcacctattata

SEQ ID NO: 5959830 - DNA, 25 bp, Homo sapien
aacgtcgtcgaaattgttgtagaag

SEQ ID NO: 5959831 - DNA, 25 bp, Homo sapien
atgacgctgttaagcaattaactgg

SEQ ID NO: 5959832 - DNA, 25 bp, Homo sapien
tggtggccctgctggttacgtggct

SEQ ID NO: 5959833 - DNA, 25 bp, Homo sapien
attgggatttaacactgcatgtgta

SEQ ID NO: 5959834 - DNA, 25 bp, Homo sapien
tgaaaagattggattagaagtagac

SEQ ID NO: 5959835 - DNA, 25 bp, Homo sapien
cttgaaaaagcaaggtttggacttc

SEQ ID NO: 5959836 - DNA, 25 bp, Homo sapien
atcattggtggaggaatcatcggat

SEQ ID NO: 5959837 - DNA, 25 bp, Homo sapien
aggaaaaaattgtctcttcaacagg

SEQ ID NO: 5959838 - DNA, 25 bp, Homo sapien
aaataattctcatttattccaccaa

SEQ ID NO: 5959839 - DNA, 25 bp, Homo sapien
aacactgcatgtgtagaaaaaagag

SEQ ID NO: 5959840 - DNA, 25 bp, Homo sapien
atgtcaactataacaacattccttc

SEQ ID NO: 5959841 - DNA, 25 bp, Homo sapien
agtcaggacattgaccattaacaag

SEQ ID NO: 5959842 - DNA, 25 bp, Homo sapien
aaccatcattggtggaggaatcatc

SEQ ID NO: 5959843 - DNA, 25 bp, Homo sapien
tgaggaaaaaattgtctcttcaaca

SEQ ID NO: 5959844 - DNA, 25 bp, Homo sapien
ggtcacggtcatgtcaactataaca

SEQ ID NO: 5959845 - DNA, 25 bp, Homo sapien
gaaacgacgacaagaacgtcgtcga

SEQ ID NO: 5959846 - DNA, 25 bp, Homo sapien
ggacggcgaggttgccaaagccacc

SEQ ID NO: 5959847 - DNA, 25 bp, Homo sapien
cgaggttgccaaagccacccaaaag

SEQ ID NO: 5959848 - DNA, 25 bp, Homo sapien
atcaaaattaacgtagcaaacttcc

SEQ ID NO: 5959849 - DNA, 25 bp, Homo sapien
agtaactcccgttgatgggttggaa

SEQ ID NO: 5959850 - DNA, 25 bp, Homo sapien
cctattataaaggtaatggttcatt

SEQ ID NO: 5959851 - DNA, 25 bp, Homo sapien
ggccctgctggttacgtggctgcta

SEQ ID NO: 5959852 - DNA, 25 bp, Homo sapien
ttggaaatgggttcagtttactcta

SEQ ID NO: 5959853 - DNA, 25 bp, Homo sapien
gcactgtcaaggaagaccacatact

SEQ ID NO: 5959854 - DNA, 25 bp, Homo sapien
ccggcattgactataaaattggtaa

SEQ ID NO: 5959855 - DNA, 25 bp, Homo sapien
tcatcatcggtggtggccctgctgg

SEQ ID NO: 5959856 - DNA, 25 bp, Homo sapien
gttcagtttactctagattaggctc

SEQ ID NO: 5959857 - DNA, 25 bp, Homo sapien
caaagcacttctaaataattctcat

SEQ ID NO: 5959858 - DNA, 25 bp, Homo sapien
cggtcatgtattctcacccagaagt

SEQ ID NO: 5959859 - DNA, 25 bp, Homo sapien
ccaagaccgagcgtattttgggggc

SEQ ID NO: 5959860 - DNA, 25 bp, Homo sapien
gaagccggcattgactataaaattg

SEQ ID NO: 5959861 - DNA, 25 bp, Homo sapien
tgatgggttggaaggcactgtcaag

SEQ ID NO: 5959862 - DNA, 25 bp, Homo sapien
tggttgctgttggtagaagacctta

SEQ ID NO: 5959863 - DNA, 25 bp, Homo sapien
gtttggacttcaaattaagcaccaa

SEQ ID NO: 5959864 - DNA, 25 bp, Homo sapien
cttccccggtattgaaatagatgag

SEQ ID NO: 5959865 - DNA, 25 bp, Homo sapien
tacgtggctgctatcaaagctgctc

SEQ ID NO: 5959866 - DNA, 25 bp, Homo sapien
cattggtggaggaatcatcggattg

SEQ ID NO: 5959867 - DNA, 25 bp, Homo sapien
attcccaaaagattaaccatcattg

SEQ ID NO: 5959868 - DNA, 25 bp, Homo sapien
agcatttaaggaagctaacatggct

SEQ ID NO: 5959869 - DNA, 25 bp, Homo sapien
taacaagtcacatgatgtagtcatc

SEQ ID NO: 5959870 - DNA, 25 bp, Homo sapien
aagacactgaaggtttcgtgaagat

SEQ ID NO: 5959871 - DNA, 25 bp, Homo sapien
gaagatactaaaacgaataagcaag

SEQ ID NO: 5959872 - DNA, 25 bp, Homo sapien
atcccctccaaagcacttctaaata

SEQ ID NO: 5959873 - DNA, 25 bp, Homo sapien
cccctccaaagcacttctaaataat

SEQ ID NO: 5959874 - DNA, 25 bp, Homo sapien
tttctgcaaagagaaacgacgacaa

SEQ ID NO: 5959875 - DNA, 25 bp, Homo sapien
acacattaaagtggtaggagatgtt

SEQ ID NO: 5959876 - DNA, 25 bp, Homo sapien
acagtcaggacattgaccattaaca

SEQ ID NO: 5959877 - DNA, 25 bp, Homo sapien
cccagaagtagcatgggttggtaaa

SEQ ID NO: 5959878 - DNA, 25 bp, Homo sapien
tgaaaaagcaaggtttggacttcaa

SEQ ID NO: 5959879 - DNA, 25 bp, Homo sapien
aagccgaagaggaaggtattgcagc

SEQ ID NO: 5959880 - DNA, 25 bp, Homo sapien
agccggcattgactataaaattggt

SEQ ID NO: 5959881 - DNA, 25 bp, Homo sapien
attaacaagtcacatgatgtagtca

SEQ ID NO: 5959882 - DNA, 25 bp, Homo sapien
ggtgctctttcgttaaaggaaattc

SEQ ID NO: 5959883 - DNA, 25 bp, Homo sapien
tgtagtagaatttcaacctcaaatt

SEQ ID NO: 5959884 - DNA, 25 bp, Homo sapien
gttgctgttggtagaagaccttaca

SEQ ID NO: 5959885 - DNA, 25 bp, Homo sapien
aggtcacctattataaaggtaatgg

SEQ ID NO: 5959886 - DNA, 25 bp, Homo sapien
gaagcatttaaggaagctaacatgg

SEQ ID NO: 5959887 - DNA, 25 bp, Homo sapien
gccaaagccacccaaaagttcttga

SEQ ID NO: 5959888 - DNA, 25 bp, Homo sapien
actgtagtagaatttcaacctcaaa

SEQ ID NO: 5959889 - DNA, 25 bp, Homo sapien
tgctatcaaagctgctcaattggga

SEQ ID NO: 5959890 - DNA, 25 bp, Homo sapien
agcgcaaaagagaggtattgacgtc

SEQ ID NO: 5959891 - DNA, 25 bp, Homo sapien
tgattgctgaagctggcttagcctt

SEQ ID NO: 5959892 - DNA, 25 bp, Homo sapien
aggcggtacctgtcttaacgttgga

SEQ ID NO: 5959893 - DNA, 25 bp, Homo sapien
acatcatagtcgccacgggctctga

SEQ ID NO: 5959894 - DNA, 25 bp, Homo sapien
gaacatcatagtcgccacgggctct

SEQ ID NO: 5959895 - DNA, 25 bp, Homo sapien
gtcgccacgggctctgaagttacac

SEQ ID NO: 5959896 - DNA, 25 bp, Homo sapien
attggtgcatctatggacggcgagg

SEQ ID NO: 5959897 - DNA, 25 bp, Homo sapien
cacctattataaaggtaatggttca

SEQ ID NO: 5959898 - DNA, 25 bp, Homo sapien
caattaactggaggtattgagcttc

SEQ ID NO: 5959899 - DNA, 25 bp, Homo sapien
gcgtattttgggggctcacattatc

SEQ ID NO: 5959900 - DNA, 25 bp, Homo sapien
aagttatttctgcaaagagaaacga

SEQ ID NO: 5959901 - DNA, 25 bp, Homo sapien
tggtccaatgctggctcacaaagcc

SEQ ID NO: 5959902 - DNA, 25 bp, Homo sapien
cggaagcgcaaaagagaggtattga

SEQ ID NO: 5959903 - DNA, 25 bp, Homo sapien
ggaaatgggttcagtttactctaga

SEQ ID NO: 5959904 - DNA, 25 bp, Homo sapien
gagcaattgaaagaagccggcattg

SEQ ID NO: 5959905 - DNA, 25 bp, Homo sapien
atcactcctaaataataagcgtgcc

SEQ ID NO: 5959906 - DNA, 25 bp, Homo sapien
agagtaactcccgttgatgggttgg

SEQ ID NO: 5959907 - DNA, 25 bp, Homo sapien
ttcaagagccaagaccaaccaagac

SEQ ID NO: 5959908 - DNA, 25 bp, Homo sapien
aatcatcggattggaaatgggttca

SEQ ID NO: 5959909 - DNA, 25 bp, Homo sapien
gaagacgaaacgaagatcagagtaa

SEQ ID NO: 5959910 - DNA, 25 bp, Homo sapien
aaaagattaaccatcattggtggag

SEQ ID NO: 5959911 - DNA, 25 bp, Homo sapien
gacaaaaggggacgcctagtcattg

SEQ ID NO: 5959912 - DNA, 25 bp, Homo sapien
aaaccgaagagcaattgaaagaagc

SEQ ID NO: 5959913 - DNA, 25 bp, Homo sapien
gattggaaatgggttcagtttactc

SEQ ID NO: 5959914 - DNA, 25 bp, Homo sapien
gtcgaaatgttgaaaactggtcacg

SEQ ID NO: 5959915 - DNA, 25 bp, Homo sapien
gtaagttcccctttgcggccaattc

SEQ ID NO: 5959916 - DNA, 25 bp, Homo sapien
gacgctgttaagcaattaactggag

SEQ ID NO: 5959917 - DNA, 25 bp, Homo sapien
tgggggctcacattatcggtccaaa

SEQ ID NO: 5959918 - DNA, 25 bp, Homo sapien
accgaagagcaattgaaagaagccg

SEQ ID NO: 5959919 - DNA, 25 bp, Homo sapien
ccatgctcatcctactttgtccgaa

SEQ ID NO: 5959920 - DNA, 25 bp, Homo sapien
cgtcgtcgaaattgttgtagaagat

SEQ ID NO: 5959921 - DNA, 25 bp, Homo sapien
atgttaagaatcagatcactcctaa

SEQ ID NO: 5959922 - DNA, 25 bp, Homo sapien
catttaaggaagctaacatggctgc

SEQ ID NO: 5959923 - DNA, 25 bp, Homo sapien
gttgatgggttggaaggcactgtca

SEQ ID NO: 5959924 - DNA, 25 bp, Homo sapien
atgggttggaaggcactgtcaagga

SEQ ID NO: 5959925 - DNA, 25 bp, Homo sapien
acattaaagtggtaggagatgttac

SEQ ID NO: 5959926 - DNA, 25 bp, Homo sapien
tatttctgcaaagagaaacgacgac

SEQ ID NO: 5959927 - DNA, 25 bp, Homo sapien
gtcaactataacaacattccttcgg

SEQ ID NO: 5959928 - DNA, 25 bp, Homo sapien
tttggaagctgaagttttgctggtt

SEQ ID NO: 5959929 - DNA, 25 bp, Homo sapien
tggaggtattgagcttctgttcaag

SEQ ID NO: 5959930 - DNA, 25 bp, Homo sapien
cattgaccattaacaagtcacatga

SEQ ID NO: 5959931 - DNA, 25 bp, Homo sapien
ggtgatatcaaaattaacgtagcaa

SEQ ID NO: 5959932 - DNA, 25 bp, Homo sapien
tcgtcgaaattgttgtagaagatac

SEQ ID NO: 5959933 - DNA, 25 bp, Homo sapien
ccacacattaaagtggtaggagatg

SEQ ID NO: 5959934 - DNA, 25 bp, Homo sapien
acaggtgctctttcgttaaaggaaa

SEQ ID NO: 5959935 - DNA, 25 bp, Homo sapien
aagaccttacattgctggcttaggg

SEQ ID NO: 5959936 - DNA, 25 bp, Homo sapien
tgtagaaaaaagaggcaaattaggc

SEQ ID NO: 5959937 - DNA, 25 bp, Homo sapien
ggctcacaaagccgaagaggaaggt

SEQ ID NO: 5959938 - DNA, 25 bp, Homo sapien
aagagcaattgaaagaagccggcat

SEQ ID NO: 5959939 - DNA, 25 bp, Homo sapien
gatgaccaatttaattccaagttcc

SEQ ID NO: 5959940 - DNA, 25 bp, Homo sapien
attgctgaagctggcttagccttag

SEQ ID NO: 5959941 - DNA, 25 bp, Homo sapien
caagagccaagaccaaccaagacac

SEQ ID NO: 5959942 - DNA, 25 bp, Homo sapien
caagaacgtcgtcgaaattgttgta

SEQ ID NO: 5959943 - DNA, 25 bp, Homo sapien
tagtagaatttcaacctcaaattgg

SEQ ID NO: 5959944 - DNA, 25 bp, Homo sapien
caaagccgaagaggaaggtattgca

SEQ ID NO: 5959945 - DNA, 25 bp, Homo sapien
aactggtcacggtcatgtcaactat

SEQ ID NO: 5959946 - DNA, 25 bp, Homo sapien
gtgcatctatggacggcgaggttgc

SEQ ID NO: 5959947 - DNA, 25 bp, Homo sapien
agccaagaccaaccaagacactgaa

SEQ ID NO: 5959948 - DNA, 25 bp, Homo sapien
cgaagaggaaggtattgcagctgtc

SEQ ID NO: 5959949 - DNA, 25 bp, Homo sapien
tcccacacattaaagtggtaggaga

SEQ ID NO: 5959950 - DNA, 25 bp, Homo sapien
agtttactctagattaggctccaag

SEQ ID NO: 5959951 - DNA, 25 bp, Homo sapien
gcatgtgtagaaaaaagaggcaaat

SEQ ID NO: 5959952 - DNA, 25 bp, Homo sapien
tgaccaatttaattccaagttccca

SEQ ID NO: 5959953 - DNA, 25 bp, Homo sapien
aaattggtgcatctatggacggcga

SEQ ID NO: 5959954 - DNA, 25 bp, Homo sapien
tgctgaagctggcttagccttagaa

SEQ ID NO: 5959955 - DNA, 25 bp, Homo sapien
cacccttccccggtattgaaataga

SEQ ID NO: 5959956 - DNA, 25 bp, Homo sapien
ttgtccgaagcatttaaggaagcta

SEQ ID NO: 5959957 - DNA, 25 bp, Homo sapien
ttgctggttgctgttggtagaagac

SEQ ID NO: 5959958 - DNA, 25 bp, Homo sapien
tagtcgccacgggctctgaagttac

SEQ ID NO: 5959959 - DNA, 25 bp, Homo sapien
aaacttccaaaaggctaaggatgac

SEQ ID NO: 5959960 - DNA, 25 bp, Homo sapien
acaacattccttcggtcatgtattc

SEQ ID NO: 5959961 - DNA, 25 bp, Homo sapien
tttaaggaagctaacatggctgcct

SEQ ID NO: 5959962 - DNA, 25 bp, Homo sapien
caacggtgatatcaaaattaacgta

SEQ ID NO: 5959963 - DNA, 25 bp, Homo sapien
ggctaaggatgacgctgttaagcaa

SEQ ID NO: 5959964 - DNA, 25 bp, Homo sapien
agaatttcaacctcaaattggtgca

SEQ ID NO: 5959965 - DNA, 25 bp, Homo sapien
gtagaatttcaacctcaaattggtg

SEQ ID NO: 5959966 - DNA, 25 bp, Homo sapien
aggtttggacttcaaattaagcacc

SEQ ID NO: 5959967 - DNA, 25 bp, Homo sapien
ccttcggtcatgtattctcacccag

SEQ ID NO: 5959968 - DNA, 25 bp, Homo sapien
tttggtccaatgctggctcacaaag

SEQ ID NO: 5959969 - DNA, 25 bp, Homo sapien
ttgagcttctgttcaagaaaaataa

SEQ ID NO: 5959970 - DNA, 25 bp, Homo sapien
gacaagaacgtcgtcgaaattgttg

SEQ ID NO: 5959971 - DNA, 25 bp, Homo sapien
ctgcatgtgtagaaaaaagaggcaa

SEQ ID NO: 5959972 - DNA, 25 bp, Homo sapien
tgctctttcgttaaaggaaattccc

SEQ ID NO: 5959973 - DNA, 25 bp, Homo sapien
ccacatactagatgttaagaacatc

SEQ ID NO: 5959974 - DNA, 25 bp, Homo sapien
taaaaccgaagagcaattgaaagaa

SEQ ID NO: 5959975 - DNA, 25 bp, Homo sapien
tagatgttaagaacatcatagtcgc

SEQ ID NO: 5959976 - DNA, 25 bp, Homo sapien
aaccaagacactgaaggtttcgtga

SEQ ID NO: 5959977 - DNA, 25 bp, Homo sapien
caaattaagcaccaaagttatttct

SEQ ID NO: 5959978 - DNA, 25 bp, Homo sapien
aagagaaacgacgacaagaacgtcg

SEQ ID NO: 5959979 - DNA, 25 bp, Homo sapien
agcaaggtttggacttcaaattaag

SEQ ID NO: 5959980 - DNA, 25 bp, Homo sapien
cgaagagcaattgaaagaagccggc

SEQ ID NO: 5959981 - DNA, 25 bp, Homo sapien
acttctaaataattctcatttattc

SEQ ID NO: 5959982 - DNA, 25 bp, Homo sapien
gcaaacttccaaaaggctaaggatg

SEQ ID NO: 5959983 - DNA, 25 bp, Homo sapien
gaaatgattgctgaagctggcttag

SEQ ID NO: 5959984 - DNA, 25 bp, Homo sapien
cacatgatgtagtcatcatcggtgg

SEQ ID NO: 5959985 - DNA, 25 bp, Homo sapien
tgatgtagtcatcatcggtggtggc

SEQ ID NO: 5959986 - DNA, 25 bp, Homo sapien
tgaagattttgatcgattccaagac

SEQ ID NO: 5959987 - DNA, 25 bp, Homo sapien
ttcgtgaagattttgatcgattcca

SEQ ID NO: 5959988 - DNA, 25 bp, Homo sapien
ctttgtccgaagcatttaaggaagc

SEQ ID NO: 5959989 - DNA, 25 bp, Homo sapien
ctcaattgggatttaacactgcatg

SEQ ID NO: 5959990 - DNA, 25 bp, Homo sapien
ggcattgactataaaattggtaagt

SEQ ID NO: 5959991 - DNA, 25 bp, Homo sapien
aggtattgacgtcaacggtgatatc

SEQ ID NO: 5959992 - DNA, 25 bp, Homo sapien
tggtgcatctatggacggcgaggtt

SEQ ID NO: 5959993 - DNA, 25 bp, Homo sapien
taaggtcacctattataaaggtaat

SEQ ID NO: 5959994 - DNA, 25 bp, Homo sapien
ctccaaggttactgtagtagaattt

SEQ ID NO: 5959995 - DNA, 25 bp, Homo sapien
gttgctagggtctgccatgctcatc

SEQ ID NO: 5959996 - DNA, 25 bp, Homo sapien
acgaaacgaagatcagagtaactcc

SEQ ID NO: 5959997 - DNA, 25 bp, Homo sapien
caaaaggggacgcctagtcattgat

SEQ ID NO: 5959998 - DNA, 25 bp, Homo sapien
tatcaccgttgacgtcaatacctct

SEQ ID NO: 5959999 - DNA, 25 bp, Homo sapien
cttaacatctagtatgtggtcttcc

SEQ ID NO: 5960000 - DNA, 25 bp, Homo sapien
atacatgaccgaaggaatgttgtta

SEQ ID NO: 5960001 - DNA, 25 bp, Homo sapien
atccaatcttttcagcccctaagcc

SEQ ID NO: 5960002 - DNA, 25 bp, Homo sapien
gccggcttctttcaattgctcttcg

SEQ ID NO: 5960003 - DNA, 25 bp, Homo sapien
tatttagaagtgctttggaggggat

SEQ ID NO: 5960004 - DNA, 25 bp, Homo sapien
acagtaaccttggagcctaatctag

SEQ ID NO: 5960005 - DNA, 25 bp, Homo sapien
aaatgcttcggacaaagtaggatga

SEQ ID NO: 5960006 - DNA, 25 bp, Homo sapien
agtaaccttggagcctaatctagag

SEQ ID NO: 5960007 - DNA, 25 bp, Homo sapien
aatcttttcagcccctaagccagca

SEQ ID NO: 5960008 - DNA, 25 bp, Homo sapien
accgtgaccagttttcaacatttcg

SEQ ID NO: 5960009 - DNA, 25 bp, Homo sapien
gtttgctacgttaattttgatatca

SEQ ID NO: 5960010 - DNA, 25 bp, Homo sapien
cagttttcaacatttcgacagctgc

SEQ ID NO: 5960011 - DNA, 25 bp, Homo sapien
tttggaccgataatgtgagccccca

SEQ ID NO: 5960012 - DNA, 25 bp, Homo sapien
gatgcaccaatttgaggttgaaatt

SEQ ID NO: 5960013 - DNA, 25 bp, Homo sapien
tttcaagaacttttgggtggctttg

SEQ ID NO: 5960014 - DNA, 25 bp, Homo sapien
ggcacgcttattatttaggagtgat

SEQ ID NO: 5960015 - DNA, 25 bp, Homo sapien
taaattggtcatcaatgactaggcg

SEQ ID NO: 5960016 - DNA, 25 bp, Homo sapien
cctgactgtggacgaaaaggcacgc

SEQ ID NO: 5960017 - DNA, 25 bp, Homo sapien
tttttctacacatgcagtgttaaat

SEQ ID NO: 5960018 - DNA, 25 bp, Homo sapien
gctcttgaattggccgcaaagggga

SEQ ID NO: 5960019 - DNA, 25 bp, Homo sapien
gtcctgactgtggacgaaaaggcac

SEQ ID NO: 5960020 - DNA, 25 bp, Homo sapien
actacatcatgtgacttgttaatgg

SEQ ID NO: 5960021 - DNA, 25 bp, Homo sapien
aatagctttatcataggcagccatg

SEQ ID NO: 5960022 - DNA, 25 bp, Homo sapien
catagatgcaccaatttgaggttga

SEQ ID NO: 5960023 - DNA, 25 bp, Homo sapien
ttcttaacatctagtatgtggtctt

SEQ ID NO: 5960024 - DNA, 25 bp, Homo sapien
cttgaacagaagctcaatacctcca

SEQ ID NO: 5960025 - DNA, 25 bp, Homo sapien
gataatgtgagcccccaaaatacgc

SEQ ID NO: 5960026 - DNA, 25 bp, Homo sapien
ttgtctacttctaatccaatctttt

SEQ ID NO: 5960027 - DNA, 25 bp, Homo sapien
agagcacctgttgaagagacaattt

SEQ ID NO: 5960028 - DNA, 25 bp, Homo sapien
gacgacgttcttgtcgtcgtttctc

SEQ ID NO: 5960029 - DNA, 25 bp, Homo sapien
cagcccctaagccagcaatgtaagg

SEQ ID NO: 5960030 - DNA, 25 bp, Homo sapien
gttttcaacatttcgacagctgcaa

SEQ ID NO: 5960031 - DNA, 25 bp, Homo sapien
gtcatccttagccttttggaagttt

SEQ ID NO: 5960032 - DNA, 25 bp, Homo sapien
cgaaaaggcacgcttattatttagg

SEQ ID NO: 5960033 - DNA, 25 bp, Homo sapien
catattctaaggctaagccagcttc

SEQ ID NO: 5960034 - DNA, 25 bp, Homo sapien
agctttgatagcagccacgtaacca

SEQ ID NO: 5960035 - DNA, 25 bp, Homo sapien
ggcatttggaccgataatgtgagcc

SEQ ID NO: 5960036 - DNA, 25 bp, Homo sapien
tccatagatgcaccaatttgaggtt

SEQ ID NO: 5960037 - DNA, 25 bp, Homo sapien
accttggagcctaatctagagtaaa

SEQ ID NO: 5960038 - DNA, 25 bp, Homo sapien
ttcagtgtcttggttggtcttggct

SEQ ID NO: 5960039 - DNA, 25 bp, Homo sapien
gcttctttcaattgctcttcggttt

SEQ ID NO: 5960040 - DNA, 25 bp, Homo sapien
agcatggcagaccctagcaacatct

SEQ ID NO: 5960041 - DNA, 25 bp, Homo sapien
ccgatgattcctccaccaatgatgg

SEQ ID NO: 5960042 - DNA, 25 bp, Homo sapien
gtcttggttggtcttggctcttgaa

SEQ ID NO: 5960043 - DNA, 25 bp, Homo sapien
ccgcctaatttgcctcttttttcta

SEQ ID NO: 5960044 - DNA, 25 bp, Homo sapien
tctactacagtaaccttggagccta

SEQ ID NO: 5960045 - DNA, 25 bp, Homo sapien
aagtttgctacgttaattttgatat

SEQ ID NO: 5960046 - DNA, 25 bp, Homo sapien
gggaacttaccaattttatagtcaa

SEQ ID NO: 5960047 - DNA, 25 bp, Homo sapien
tgtaaggtcttctaccaacagcaac

SEQ ID NO: 5960048 - DNA, 25 bp, Homo sapien
atttcaccggcatttggaccgataa

SEQ ID NO: 5960049 - DNA, 25 bp, Homo sapien
gaatacatgaccgaaggaatgttgt

SEQ ID NO: 5960050 - DNA, 25 bp, Homo sapien
ccatgttagcttccttaaatgcttc

SEQ ID NO: 5960051 - DNA, 25 bp, Homo sapien
ttaaatgcttcggacaaagtaggat

SEQ ID NO: 5960052 - DNA, 25 bp, Homo sapien
ctttggaggggatacatccaacgtt

SEQ ID NO: 5960053 - DNA, 25 bp, Homo sapien
gggtgtaacttcagagcccgtggcg

SEQ ID NO: 5960054 - DNA, 25 bp, Homo sapien
agagcccgtggcgactatgatgttc

SEQ ID NO: 5960055 - DNA, 25 bp, Homo sapien
agcagggccaccaccgatgatgact

SEQ ID NO: 5960056 - DNA, 25 bp, Homo sapien
catctatttcaataccggggaaggg

SEQ ID NO: 5960057 - DNA, 25 bp, Homo sapien
gccttttggaagtttgctacgttaa

SEQ ID NO: 5960058 - DNA, 25 bp, Homo sapien
taggcgtccccttttgtctacttct

SEQ ID NO: 5960059 - DNA, 25 bp, Homo sapien
aaccagcagggccaccaccgatgat

SEQ ID NO: 5960060 - DNA, 25 bp, Homo sapien
aattgcttaacagcgtcatccttag

SEQ ID NO: 5960061 - DNA, 25 bp, Homo sapien
acgttcttgtcgtcgtttctctttg

SEQ ID NO: 5960062 - DNA, 25 bp, Homo sapien
taatttgcctcttttttctacacat

SEQ ID NO: 5960063 - DNA, 25 bp, Homo sapien
agcacctgttgaagagacaattttt

SEQ ID NO: 5960064 - DNA, 25 bp, Homo sapien
tcttcggttttaccaacccatgcta

SEQ ID NO: 5960065 - DNA, 25 bp, Homo sapien
ataccttcctcttcggctttgtgag

SEQ ID NO: 5960066 - DNA, 25 bp, Homo sapien
ctaatctagagtaaactgaacccat

SEQ ID NO: 5960067 - DNA, 25 bp, Homo sapien
aaatgagaattatttagaagtgctt

SEQ ID NO: 5960068 - DNA, 25 bp, Homo sapien
ctttgcagaaataactttggtgctt

SEQ ID NO: 5960069 - DNA, 25 bp, Homo sapien
ttgtgagccagcattggaccaaatg

SEQ ID NO: 5960070 - DNA, 25 bp, Homo sapien
gaccgataatgtgagcccccaaaat

SEQ ID NO: 5960071 - DNA, 25 bp, Homo sapien
accttcctcttcggctttgtgagcc

SEQ ID NO: 5960072 - DNA, 25 bp, Homo sapien
cttattcgttttagtatcttctaca

SEQ ID NO: 5960073 - DNA, 25 bp, Homo sapien
caatacctccagttaattgcttaac

SEQ ID NO: 5960074 - DNA, 25 bp, Homo sapien
gtatgcatttggtggaataaatgag

SEQ ID NO: 5960075 - DNA, 25 bp, Homo sapien
cttaatttgaagtccaaaccttgct

SEQ ID NO: 5960076 - DNA, 25 bp, Homo sapien
actctgatcttcgtttcgtcttcga

SEQ ID NO: 5960077 - DNA, 25 bp, Homo sapien
tgctacttctgggtgagaatacatg

SEQ ID NO: 5960078 - DNA, 25 bp, Homo sapien
aaagagcacctgttgaagagacaat

SEQ ID NO: 5960079 - DNA, 25 bp, Homo sapien
ttatttaggagtgatctgattctta

SEQ ID NO: 5960080 - DNA, 25 bp, Homo sapien
cttggttggtcttggctcttgaatt

SEQ ID NO: 5960081 - DNA, 25 bp, Homo sapien
tagcagccacgtaaccagcagggcc

SEQ ID NO: 5960082 - DNA, 25 bp, Homo sapien
tggttggtcttggctcttgaattgg

SEQ ID NO: 5960083 - DNA, 25 bp, Homo sapien
gaacttaccaattttatagtcaatg

SEQ ID NO: 5960084 - DNA, 25 bp, Homo sapien
tgatcttcgtttcgtcttcgaatga

SEQ ID NO: 5960085 - DNA, 25 bp, Homo sapien
ccagttaattgcttaacagcgtcat

SEQ ID NO: 5960086 - DNA, 25 bp, Homo sapien
taacatctagtatgtggtcttcctt

SEQ ID NO: 5960087 - DNA, 25 bp, Homo sapien
taaatcccaattgagcagctttgat

SEQ ID NO: 5960088 - DNA, 25 bp, Homo sapien
ccaaatgtaacatctcctaccactt

SEQ ID NO: 5960089 - DNA, 25 bp, Homo sapien
ccagcaaaacttcagcttccaaatt

SEQ ID NO: 5960090 - DNA, 25 bp, Homo sapien
ctttgatagcagccacgtaaccagc

SEQ ID NO: 5960091 - DNA, 25 bp, Homo sapien
ttcaccggcatttggaccgataatg

SEQ ID NO: 5960092 - DNA, 25 bp, Homo sapien
gaataaatgagaattatttagaagt

SEQ ID NO: 5960093 - DNA, 25 bp, Homo sapien
ctctttgcagaaataactttggtgc

SEQ ID NO: 5960094 - DNA, 25 bp, Homo sapien
gatagcagccacgtaaccagcaggg

SEQ ID NO: 5960095 - DNA, 25 bp, Homo sapien
cccatcaacgggagttactctgatc

SEQ ID NO: 5960096 - DNA, 25 bp, Homo sapien
gatatcaccgttgacgtcaatacct

SEQ ID NO: 5960097 - DNA, 25 bp, Homo sapien
gaagagacaattttttcctcatcta

SEQ ID NO: 5960098 - DNA, 25 bp, Homo sapien
gacagctgcaataccttcctcttcg

SEQ ID NO: 5960099 - DNA, 25 bp, Homo sapien
tgaggttgaaattctactacagtaa

SEQ ID NO: 5960100 - DNA, 25 bp, Homo sapien
accagttttcaacatttcgacagct

SEQ ID NO: 5960101 - DNA, 25 bp, Homo sapien
tgttcttaacatctagtatgtggtc

SEQ ID NO: 5960102 - DNA, 25 bp, Homo sapien
caggtaccgcctaatttgcctcttt

SEQ ID NO: 5960103 - DNA, 25 bp, Homo sapien
tttataataggtgaccttatttttc

SEQ ID NO: 5960104 - DNA, 25 bp, Homo sapien
acttaccaattttatagtcaatgcc

SEQ ID NO: 5960105 - DNA, 25 bp, Homo sapien
ccgtatgcatttggtggaataaatg

SEQ ID NO: 5960106 - DNA, 25 bp, Homo sapien
atgactaggcgtccccttttgtcta

SEQ ID NO: 5960107 - DNA, 25 bp, Homo sapien
tggacgaaaaggcacgcttattatt

SEQ ID NO: 5960108 - DNA, 25 bp, Homo sapien
tgaatagctttatcataggcagcca

SEQ ID NO: 5960109 - DNA, 25 bp, Homo sapien
cgggagttactctgatcttcgtttc

SEQ ID NO: 5960110 - DNA, 25 bp, Homo sapien
gtgacttgttaatggtcaatgtcct

SEQ ID NO: 5960111 - DNA, 25 bp, Homo sapien
tggtcttggctcttgaattggccgc

SEQ ID NO: 5960112 - DNA, 25 bp, Homo sapien
aacagcaaccagcaaaacttcagct

SEQ ID NO: 5960113 - DNA, 25 bp, Homo sapien
gctgcaataccttcctcttcggctt

SEQ ID NO: 5960114 - DNA, 25 bp, Homo sapien
atcgatcaaaatcttcacgaaacct

SEQ ID NO: 5960115 - DNA, 25 bp, Homo sapien
ttggtcatcaatgactaggcgtccc

SEQ ID NO: 5960116 - DNA, 25 bp, Homo sapien
catccaacgttaagacaggtaccgc

SEQ ID NO: 5960117 - DNA, 25 bp, Homo sapien
tcacgaaaccttcagtgtcttggtt

SEQ ID NO: 5960118 - DNA, 25 bp, Homo sapien
gtaacatctcctaccactttaatgt

SEQ ID NO: 5960119 - DNA, 25 bp, Homo sapien
agcaaaacttcagcttccaaatttt

SEQ ID NO: 5960120 - DNA, 25 bp, Homo sapien
cgcttattatttaggagtgatctga

SEQ ID NO: 5960121 - DNA, 25 bp, Homo sapien
atccgatgattcctccaccaatgat

SEQ ID NO: 5960122 - DNA, 25 bp, Homo sapien
ctacttctgggtgagaatacatgac

SEQ ID NO: 5960123 - DNA, 25 bp, Homo sapien
tccaaaccttgctttttcaagaact

SEQ ID NO: 5960124 - DNA, 25 bp, Homo sapien
agttactctgatcttcgtttcgtct

SEQ ID NO: 5960125 - DNA, 25 bp, Homo sapien
gttgttatagttgacatgaccgtga

SEQ ID NO: 5960126 - DNA, 25 bp, Homo sapien
gcaacatcttctgcggaagcgccat

SEQ ID NO: 5960127 - DNA, 25 bp, Homo sapien
caatgccggcttctttcaattgctc

SEQ ID NO: 5960128 - DNA, 25 bp, Homo sapien
ttgatagcagccacgtaaccagcag

SEQ ID NO: 5960129 - DNA, 25 bp, Homo sapien
cagctgcaataccttcctcttcggc

SEQ ID NO: 5960130 - DNA, 25 bp, Homo sapien
gtcttctaccaacagcaaccagcaa

SEQ ID NO: 5960131 - DNA, 25 bp, Homo sapien
tacgttaattttgatatcaccgttg

SEQ ID NO: 5960132 - DNA, 25 bp, Homo sapien
caataccttcctcttcggctttgtg

SEQ ID NO: 5960133 - DNA, 25 bp, Homo sapien
tcggctttgtgagccagcattggac

SEQ ID NO: 5960134 - DNA, 25 bp, Homo sapien
atttggtggaataaatgagaattat

SEQ ID NO: 5960135 - DNA, 25 bp, Homo sapien
gtaaccagcagggccaccaccgatg

SEQ ID NO: 5960136 - DNA, 25 bp, Homo sapien
gtgagcccccaaaatacgctcggtc

SEQ ID NO: 5960137 - DNA, 25 bp, Homo sapien
ctcatctatttcaataccggggaag

SEQ ID NO: 5960138 - DNA, 25 bp, Homo sapien
tgtggacgaaaaggcacgcttatta

SEQ ID NO: 5960139 - DNA, 25 bp, Homo sapien
tcgttttagtatcttctacaacaat

SEQ ID NO: 5960140 - DNA, 25 bp, Homo sapien
tttcctcatctatttcaataccggg

SEQ ID NO: 5960141 - DNA, 25 bp, Homo sapien
caccggcatttggaccgataatgtg

SEQ ID NO: 5960142 - DNA, 25 bp, Homo sapien
tcatttcaccggcatttggaccgat

SEQ ID NO: 5960143 - DNA, 25 bp, Homo sapien
ttccgtatgcatttggtggaataaa

SEQ ID NO: 5960144 - DNA, 25 bp, Homo sapien
agttgacatgaccgtgaccagtttt

SEQ ID NO: 5960145 - DNA, 25 bp, Homo sapien
agaaataactttggtgcttaatttg

SEQ ID NO: 5960146 - DNA, 25 bp, Homo sapien
cttcgtttcgtcttcgaatgaacca

SEQ ID NO: 5960147 - DNA, 25 bp, Homo sapien
cctctcttttgcgcttccgtatgca

SEQ ID NO: 5960148 - DNA, 25 bp, Homo sapien
tcatcaatgactaggcgtccccttt

SEQ ID NO: 5960149 - DNA, 25 bp, Homo sapien
ttaggagtgatctgattcttaacat

SEQ ID NO: 5960150 - DNA, 25 bp, Homo sapien
ttcggacaaagtaggatgagcatgg

SEQ ID NO: 5960151 - DNA, 25 bp, Homo sapien
gccgtccatagatgcaccaatttga

SEQ ID NO: 5960152 - DNA, 25 bp, Homo sapien
tttcgacgacgttcttgtcgtcgtt

SEQ ID NO: 5960153 - DNA, 25 bp, Homo sapien
tgttaatggtcaatgtcctgactgt

SEQ ID NO: 5960154 - DNA, 25 bp, Homo sapien
cagtgtcttggttggtcttggctct

SEQ ID NO: 5960155 - DNA, 25 bp, Homo sapien
tggcagaccctagcaacatcttctg

SEQ ID NO: 5960156 - DNA, 25 bp, Homo sapien
cttctacaacaatttcgacgacgtt

SEQ ID NO: 5960157 - DNA, 25 bp, Homo sapien
tacaacaatttcgacgacgttcttg

SEQ ID NO: 5960158 - DNA, 25 bp, Homo sapien
gcagaccctagcaacatcttctgcg

SEQ ID NO: 5960159 - DNA, 25 bp, Homo sapien
acttctgggtgagaatacatgaccg

SEQ ID NO: 5960160 - DNA, 25 bp, Homo sapien
aggtgaccttatttttcttgaacag

SEQ ID NO: 5960161 - DNA, 25 bp, Homo sapien
gtgtaacttcagagcccgtggcgac

SEQ ID NO: 5960162 - DNA, 25 bp, Homo sapien
tagatgcaccaatttgaggttgaaa

SEQ ID NO: 5960163 - DNA, 25 bp, Homo sapien
tattctaaggctaagccagcttcag

SEQ ID NO: 5960164 - DNA, 25 bp, Homo sapien
ttaagacaggtaccgcctaatttgc

SEQ ID NO: 5960165 - DNA, 25 bp, Homo sapien
tgaacagaagctcaatacctccagt

SEQ ID NO: 5960166 - DNA, 25 bp, Homo sapien
ttaccaattttatagtcaatgccgg

SEQ ID NO: 5960167 - DNA, 25 bp, Homo sapien
ttggaggggatacatccaacgttaa

SEQ ID NO: 5960168 - DNA, 25 bp, Homo sapien
tgactacatcatgtgacttgttaat

SEQ ID NO: 5960169 - DNA, 25 bp, Homo sapien
tatttcaataccggggaagggtgta

SEQ ID NO: 5960170 - DNA, 25 bp, Homo sapien
gtgagaatacatgaccgaaggaatg

SEQ ID NO: 5960171 - DNA, 25 bp, Homo sapien
agtccaaaccttgctttttcaagaa

SEQ ID NO: 5960172 - DNA, 25 bp, Homo sapien
aaggcacgcttattatttaggagtg

SEQ ID NO: 5960173 - DNA, 25 bp, Homo sapien
cgttaattttgatatcaccgttgac

SEQ ID NO: 5960174 - DNA, 25 bp, Homo sapien
ttcgaatgaaccattacctttataa

SEQ ID NO: 5960175 - DNA, 25 bp, Homo sapien
accgatgatgactacatcatgtgac

SEQ ID NO: 5960176 - DNA, 25 bp, Homo sapien
agtatgtggtcttccttgacagtgc

SEQ ID NO: 5960177 - DNA, 25 bp, Homo sapien
attttatagtcaatgccggcttctt

SEQ ID NO: 5960178 - DNA, 25 bp, Homo sapien
gaattatttagaagtgctttggagg

SEQ ID NO: 5960179 - DNA, 25 bp, Homo sapien
aacccatcaacgggagttactctga

SEQ ID NO: 5960180 - DNA, 25 bp, Homo sapien
atgtgagcccccaaaatacgctcgg

SEQ ID NO: 5960181 - DNA, 25 bp, Homo sapien
tatagtcaatgccggcttctttcaa

SEQ ID NO: 5960182 - DNA, 25 bp, Homo sapien
tgaccagttttcaacatttcgacag

SEQ ID NO: 5960183 - DNA, 25 bp, Homo sapien
gagcccccaaaatacgctcggtctt

SEQ ID NO: 5960184 - DNA, 25 bp, Homo sapien
ttgcttaacagcgtcatccttagcc

SEQ ID NO: 5960185 - DNA, 25 bp, Homo sapien
aacatcttctgcggaagcgccatat

SEQ ID NO: 5960186 - DNA, 25 bp, Homo sapien
accaattttatagtcaatgccggct

SEQ ID NO: 5960187 - DNA, 25 bp, Homo sapien
ctaagccagcttcagcaatcatttc

SEQ ID NO: 5960188 - DNA, 25 bp, Homo sapien
gatacatccaacgttaagacaggta

SEQ ID NO: 5960189 - DNA, 25 bp, Homo sapien
ctttcaattgctcttcggttttacc

SEQ ID NO: 5960190 - DNA, 25 bp, Homo sapien
tttcaacatttcgacagctgcaata

SEQ ID NO: 5960191 - DNA, 25 bp, Homo sapien
gacttgttaatggtcaatgtcctga

SEQ ID NO: 5960192 - DNA, 25 bp, Homo sapien
taatgtgagcccccaaaatacgctc

SEQ ID NO: 5960193 - DNA, 25 bp, Homo sapien
tcttgaattggccgcaaaggggaac

SEQ ID NO: 5960194 - DNA, 25 bp, Homo sapien
ttgacgtcaatacctctcttttgcg

SEQ ID NO: 5960195 - DNA, 25 bp, Homo sapien
ccttccaacccatcaacgggagtta

SEQ ID NO: 5960196 - DNA, 25 bp, Homo sapien
gatgagcatggcagaccctagcaac

SEQ ID NO: 5960197 - DNA, 25 bp, Homo sapien
cttgcttattcgttttagtatcttc

SEQ ID NO: 5960198 - DNA, 25 bp, Homo sapien
ggaagtttgctacgttaattttgat

SEQ ID NO: 5960199 - DNA, 25 bp, Homo sapien
aatgaaccattacctttataatagg

SEQ ID NO: 5960200 - DNA, 25 bp, Homo sapien
agccatgttagcttccttaaatgct

SEQ ID NO: 5960201 - DNA, 25 bp, Homo sapien
tagtatcttctacaacaatttcgac

SEQ ID NO: 5960202 - DNA, 25 bp, Homo sapien
cagaagctcaatacctccagttaat

SEQ ID NO: 5960203 - DNA, 25 bp, Homo sapien
aaatgtaacatctcctaccacttta

SEQ ID NO: 5960204 - DNA, 25 bp, Homo sapien
gttaaatcccaattgagcagctttg

SEQ ID NO: 5960205 - DNA, 25 bp, Homo sapien
tcgacgacgttcttgtcgtcgtttc

SEQ ID NO: 5960206 - DNA, 25 bp, Homo sapien
gctttggcaacctcgccgtccatag

SEQ ID NO: 5960207 - DNA, 25 bp, Homo sapien
tagctttatcataggcagccatgtt

SEQ ID NO: 5960208 - DNA, 25 bp, Homo sapien
cctcgccgtccatagatgcaccaat

SEQ ID NO: 5960209 - DNA, 25 bp, Homo sapien
aatttcgacgacgttcttgtcgtcg

SEQ ID NO: 5960210 - DNA, 25 bp, Homo sapien
tggccgcaaaggggaacttaccaat

SEQ ID NO: 5960211 - DNA, 25 bp, Homo sapien
acctccagttaattgcttaacagcg

SEQ ID NO: 5960212 - DNA, 25 bp, Homo sapien
gctcttcggttttaccaacccatgc

SEQ ID NO: 5960213 - DNA, 25 bp, Homo sapien
tgaaattctactacagtaaccttgg

SEQ ID NO: 5960214 - DNA, 25 bp, Homo sapien
tttcctttaacgaaagagcacctgt

SEQ ID NO: 5960215 - DNA, 25 bp, Homo sapien
cactttaatgtgtgggaacttggaa

SEQ ID NO: 5960216 - DNA, 25 bp, Homo sapien
tcctcatctatttcaataccgggga

SEQ ID NO: 5960217 - DNA, 25 bp, Homo sapien
gcatttggtggaataaatgagaatt

SEQ ID NO: 5960218 - DNA, 25 bp, Homo sapien
gccagcttcagcaatcatttcaccg

SEQ ID NO: 5960219 - DNA, 25 bp, Homo sapien
gccaccaccgatgatgactacatca

SEQ ID NO: 5960220 - DNA, 25 bp, Homo sapien
acttcagcttccaaattttcttgct

SEQ ID NO: 5960221 - DNA, 25 bp, Homo sapien
gcctcttttttctacacatgcagtg

SEQ ID NO: 5960222 - DNA, 25 bp, Homo sapien
gagaattatttagaagtgctttgga

SEQ ID NO: 5960223 - DNA, 25 bp, Homo sapien
acatctagtatgtggtcttccttga

SEQ ID NO: 5960224 - DNA, 25 bp, Homo sapien
aactttggtgcttaatttgaagtcc

SEQ ID NO: 5960225 - DNA, 25 bp, Homo sapien
tcctccaccaatgatggttaatctt

SEQ ID NO: 5960226 - DNA, 25 bp, Homo sapien
gtcttggctcttgaattggccgcaa

SEQ ID NO: 5960227 - DNA, 25 bp, Homo sapien
gaatcgatcaaaatcttcacgaaac

SEQ ID NO: 5960228 - DNA, 25 bp, Homo sapien
tggtcttccttgacagtgccttcca

SEQ ID NO: 5960229 - DNA, 25 bp, Homo sapien
ttgctcttcggttttaccaacccat

SEQ ID NO: 5960230 - DNA, 25 bp, Homo sapien
tctatttcaataccggggaagggtg

SEQ ID NO: 5960231 - DNA, 25 bp, Homo sapien
gagcagctttgatagcagccacgta

SEQ ID NO: 5960232 - DNA, 25 bp, Homo sapien
tctaccaacagcaaccagcaaaact

SEQ ID NO: 5960233 - DNA, 25 bp, Homo sapien
atttgcctcttttttctacacatgc

SEQ ID NO: 5960234 - DNA, 25 bp, Homo sapien
ctacttctaatccaatcttttcagc

SEQ ID NO: 5960235 - DNA, 25 bp, Homo sapien
gctttttcaagaacttttgggtggc

SEQ ID NO: 5960236 - DNA, 25 bp, Homo sapien
attcctccaccaatgatggttaatc

SEQ ID NO: 5960237 - DNA, 25 bp, Homo sapien
caccaatttgaggttgaaattctac

SEQ ID NO: 5960238 - DNA, 25 bp, Homo sapien
agagacaattttttcctcatctatt

SEQ ID NO: 5960239 - DNA, 25 bp, Homo sapien
tgactgtggacgaaaaggcacgctt

SEQ ID NO: 5960240 - DNA, 25 bp, Homo sapien
gacaggtaccgcctaatttgcctct

SEQ ID NO: 5960241 - DNA, 25 bp, Homo sapien
ccaccgatgatgactacatcatgtg

SEQ ID NO: 5960242 - DNA, 25 bp, Homo sapien
catttcgacagctgcaataccttcc

SEQ ID NO: 5960243 - DNA, 25 bp, Homo sapien
cgttgacgtcaatacctctcttttg

SEQ ID NO: 5960244 - DNA, 25 bp, Homo sapien
gacatgaccgtgaccagttttcaac

SEQ ID NO: 5960245 - DNA, 25 bp, Homo sapien
aatacgctcggtcttggaatcgatc

SEQ ID NO: 5960246 - DNA, 25 bp, Homo sapien
tgttgaagagacaattttttcctca

SEQ ID NO: 5960247 - DNA, 25 bp, Homo sapien
cagcaatgtaaggtcttctaccaac

SEQ ID NO: 5960248 - DNA, 25 bp, Homo sapien
atgtcctgactgtggacgaaaaggc

SEQ ID NO: 5960249 - DNA, 25 bp, Homo sapien
gtcaatgtcctgactgtggacgaaa

SEQ ID NO: 5960250 - DNA, 25 bp, Homo sapien
aattggtcatcaatgactaggcgtc

SEQ ID NO: 5960251 - DNA, 25 bp, Homo sapien
ttttgtctacttctaatccaatctt

SEQ ID NO: 5960252 - DNA, 25 bp, Homo sapien
aacttggaattaaattggtcatcaa

SEQ ID NO: 5960253 - DNA, 25 bp, Homo sapien
gcgcttccgtatgcatttggtggaa

SEQ ID NO: 5960254 - DNA, 25 bp, Homo sapien
aatgaatagctttatcataggcagc

SEQ ID NO: 5960255 - DNA, 25 bp, Homo sapien
cccatgctacttctgggtgagaata

SEQ ID NO: 5960256 - DNA, 25 bp, Homo sapien
attggaccaaatgtaacatctccta

SEQ ID NO: 5960257 - DNA, 25 bp, Homo sapien
ctttaacgaaagagcacctgttgaa

SEQ ID NO: 5960258 - DNA, 25 bp, Homo sapien
ctttaatgtgtgggaacttggaatt

SEQ ID NO: 5960259 - DNA, 25 bp, Homo sapien
gggaatttcctttaacgaaagagca

SEQ ID NO: 5960260 - DNA, 25 bp, Homo sapien
tgtggtcttccttgacagtgccttc

SEQ ID NO: 5960261 - DNA, 25 bp, Homo sapien
gcattggaccaaatgtaacatctcc

SEQ ID NO: 5960262 - DNA, 25 bp, Homo sapien
accctagcaacatcttctgcggaag

SEQ ID NO: 5960263 - DNA, 25 bp, Homo sapien
cttcacgaaaccttcagtgtcttgg

SEQ ID NO: 5960264 - DNA, 25 bp, Homo sapien
gatgactacatcatgtgacttgtta

SEQ ID NO: 5960265 - DNA, 25 bp, Homo sapien
gaccaaatgtaacatctcctaccac

SEQ ID NO: 5960266 - DNA, 25 bp, Homo sapien
actgtggacgaaaaggcacgcttat

SEQ ID NO: 5960267 - DNA, 25 bp, Homo sapien
tggaatcgatcaaaatcttcacgaa

SEQ ID NO: 5960268 - DNA, 25 bp, Homo sapien
tccaacgttaagacaggtaccgcct

SEQ ID NO: 5960269 - DNA, 25 bp, Homo sapien
gcaacctcgccgtccatagatgcac

SEQ ID NO: 5960270 - DNA, 25 bp, Homo sapien
tttagtatcttctacaacaatttcg

SEQ ID NO: 5960271 - DNA, 25 bp, Homo sapien
aatttgaggttgaaattctactaca

SEQ ID NO: 5960272 - DNA, 25 bp, Homo sapien
tcctaccactttaatgtgtgggaac

SEQ ID NO: 5960273 - DNA, 25 bp, Homo sapien
aaccattacctttataataggtgac

SEQ ID NO: 5960274 - DNA, 25 bp, Homo sapien
ctgggtgagaatacatgaccgaagg

SEQ ID NO: 5960275 - DNA, 25 bp, Homo sapien
tgggaacttggaattaaattggtca

SEQ ID NO: 5960276 - DNA, 25 bp, Homo sapien
agttaattgcttaacagcgtcatcc

SEQ ID NO: 5960277 - DNA, 25 bp, Homo sapien
ggcgtccccttttgtctacttctaa

SEQ ID NO: 5960278 - DNA, 25 bp, Homo sapien
gccatattctaaggctaagccagct

SEQ ID NO: 5960279 - DNA, 25 bp, Homo sapien
catttccaatccgatgattcctcca

SEQ ID NO: 5960280 - DNA, 25 bp, Homo sapien
aacagcgtcatccttagccttttgg

SEQ ID NO: 5960281 - DNA, 25 bp, Homo sapien
gcttcagcaatcatttcaccggcat

SEQ ID NO: 5960282 - DNA, 25 bp, Homo sapien
tacgctcggtcttggaatcgatcaa

SEQ ID NO: 5960283 - DNA, 25 bp, Homo sapien
atgccggcttctttcaattgctctt

SEQ ID NO: 5960284 - DNA, 25 bp, Homo sapien
catccttagccttttggaagtttgc

SEQ ID NO: 5960285 - DNA, 25 bp, Homo sapien
gggtgagaatacatgaccgaaggaa

SEQ ID NO: 5960286 - DNA, 25 bp, Homo sapien
tcctttaacgaaagagcacctgttg

SEQ ID NO: 5960287 - DNA, 25 bp, Homo sapien
ttgcgcttccgtatgcatttggtgg

SEQ ID NO: 5960288 - DNA, 25 bp, Homo sapien
tttaccaacccatgctacttctggg

SEQ ID NO: 5960289 - DNA, 25 bp, Homo sapien
ttgaagtccaaaccttgctttttca

SEQ ID NO: 5960290 - DNA, 25 bp, Homo sapien
attatttagaagtgctttggagggg

SEQ ID NO: 5960291 - DNA, 25 bp, Homo sapien
ggaagcgccatattctaaggctaag

SEQ ID NO: 5960292 - DNA, 25 bp, Homo sapien
aacatttcgacagctgcaatacctt

SEQ ID NO: 5960293 - DNA, 25 bp, Homo sapien
catcatgtgacttgttaatggtcaa

SEQ ID NO: 5960294 - DNA, 25 bp, Homo sapien
tcttctgcggaagcgccatattcta

SEQ ID NO: 5960295 - DNA, 25 bp, Homo sapien
gcttccgtatgcatttggtggaata

SEQ ID NO: 5960296 - DNA, 25 bp, Homo sapien
gtgtcttggttggtcttggctcttg

SEQ ID NO: 5960297 - DNA, 25 bp, Homo sapien
cttggaatcgatcaaaatcttcacg

SEQ ID NO: 5960298 - DNA, 25 bp, Homo sapien
tggctcttgaattggccgcaaaggg

SEQ ID NO: 5960299 - DNA, 25 bp, Homo sapien
cgtcttcgaatgaaccattaccttt

SEQ ID NO: 5960300 - DNA, 25 bp, Homo sapien
ctcttcggctttgtgagccagcatt

SEQ ID NO: 5960301 - DNA, 25 bp, Homo sapien
aacccatttccaatccgatgattcc

SEQ ID NO: 5960302 - DNA, 25 bp, Homo sapien
tagagtaaactgaacccatttccaa

SEQ ID NO: 5960303 - DNA, 25 bp, Homo sapien
atgtgacttgttaatggtcaatgtc

SEQ ID NO: 5960304 - DNA, 25 bp, Homo sapien
ttgaattggccgcaaaggggaactt

SEQ ID NO: 5960305 - DNA, 25 bp, Homo sapien
gctttatcataggcagccatgttag

SEQ ID NO: 5960306 - DNA, 25 bp, Homo sapien
ttgtcgtcgtttctctttgcagaaa

SEQ ID NO: 5960307 - DNA, 25 bp, Homo sapien
catcttctgcggaagcgccatattc

SEQ ID NO: 5960308 - DNA, 25 bp, Homo sapien
gaattaaattggtcatcaatgacta

SEQ ID NO: 5960309 - DNA, 25 bp, Homo sapien
ctagtatgtggtcttccttgacagt

SEQ ID NO: 5960310 - DNA, 25 bp, Homo sapien
ccaacccatgctacttctgggtgag

SEQ ID NO: 5960311 - DNA, 25 bp, Homo sapien
aacccatgctacttctgggtgagaa

SEQ ID NO: 5960312 - DNA, 25 bp, Homo sapien
aatctagagtaaactgaacccattt

SEQ ID NO: 5960313 - DNA, 25 bp, Homo sapien
aggatgagcatggcagaccctagca

SEQ ID NO: 5960314 - DNA, 25 bp, Homo sapien
ttttgcgcttccgtatgcatttggt

SEQ ID NO: 5960315 - DNA, 25 bp, Homo sapien
ccggcatttggaccgataatgtgag

SEQ ID NO: 5960316 - DNA, 25 bp, Homo sapien
tatcataggcagccatgttagcttc

SEQ ID NO: 5960317 - DNA, 25 bp, Homo sapien
tcaccgttgacgtcaatacctctct

SEQ ID NO: 5960318 - DNA, 25 bp, Homo sapien
ccattacctttataataggtgacct

SEQ ID NO: 5960319 - DNA, 25 bp, Homo sapien
tccttagccttttggaagtttgcta

SEQ ID NO: 5960320 - DNA, 25 bp, Homo sapien
ccttcagtgtcttggttggtcttgg

SEQ ID NO: 5960321 - DNA, 25 bp, Homo sapien
gaccttatttttcttgaacagaagc

SEQ ID NO: 5960322 - DNA, 25 bp, Homo sapien
ggaggggatacatccaacgttaaga

SEQ ID NO: 5960323 - DNA, 25 bp, Homo sapien
ttttgatatcaccgttgacgtcaat

SEQ ID NO: 5960324 - DNA, 25 bp, Homo sapien
cagcaatcatttcaccggcatttgg

SEQ ID NO: 5960325 - DNA, 25 bp, Homo sapien
gtttctctttgcagaaataactttg

SEQ ID NO: 5960326 - DNA, 25 bp, Homo sapien
atgagaattatttagaagtgctttg

SEQ ID NO: 5960327 - DNA, 25 bp, Homo sapien
ttcttgcttattcgttttagtatct

SEQ ID NO: 5960328 - DNA, 25 bp, Homo sapien
tctcctaccactttaatgtgtggga

SEQ ID NO: 5960329 - DNA, 25 bp, Homo sapien
tttcgacagctgcaataccttcctc

SEQ ID NO: 5960330 - DNA, 25 bp, Homo sapien
ggtcatcaatgactaggcgtcccct

SEQ ID NO: 5960331 - DNA, 25 bp, Homo sapien
tgattcctccaccaatgatggttaa

SEQ ID NO: 5960332 - DNA, 25 bp, Homo sapien
atgcatttggtggaataaatgagaa

SEQ ID NO: 5960333 - DNA, 25 bp, Homo sapien
cctgttgaagagacaattttttcct

SEQ ID NO: 5960334 - DNA, 25 bp, Homo sapien
ccaacagcaaccagcaaaacttcag

SEQ ID NO: 5960335 - DNA, 25 bp, Homo sapien
ggctaagccagcttcagcaatcatt

SEQ ID NO: 5960336 - DNA, 25 bp, Homo sapien
tctagagtaaactgaacccatttcc

SEQ ID NO: 5960337 - DNA, 25 bp, Homo sapien
ttaacgaaagagcacctgttgaaga

SEQ ID NO: 5960338 - DNA, 25 bp, Homo sapien
aacgggagttactctgatcttcgtt

SEQ ID NO: 5960339 - DNA, 25 bp, Homo sapien
gcagaaataactttggtgcttaatt

SEQ ID NO: 5960340 - DNA, 25 bp, Homo sapien
atgcttcggacaaagtaggatgagc

SEQ ID NO: 5960341 - DNA, 25 bp, Homo sapien
acaatttcgacgacgttcttgtcgt

SEQ ID NO: 5960342 - DNA, 25 bp, Homo sapien
cagcaaccagcaaaacttcagcttc

SEQ ID NO: 5960343 - DNA, 25 bp, Homo sapien
atcaaaatcttcacgaaaccttcag

SEQ ID NO: 5960344 - DNA, 25 bp, Homo sapien
ccccaaaatacgctcggtcttggaa

SEQ ID NO: 5960345 - DNA, 25 bp, Homo sapien
actgaacccatttccaatccgatga

SEQ ID NO: 5960346 - DNA, 25 bp, Homo sapien
ttttcagcccctaagccagcaatgt

SEQ ID NO: 5960347 - DNA, 25 bp, Homo sapien
attcgttttagtatcttctacaaca

SEQ ID NO: 5960348 - DNA, 25 bp, Homo sapien
cttcggctttgtgagccagcattgg

SEQ ID NO: 5960349 - DNA, 25 bp, Homo sapien
agaccctagcaacatcttctgcgga

SEQ ID NO: 5960350 - DNA, 25 bp, Homo sapien
agtgctttggaggggatacatccaa

SEQ ID NO: 5960351 - DNA, 25 bp, Homo sapien
ctaaggctaagccagcttcagcaat

SEQ ID NO: 5960352 - DNA, 25 bp, Homo sapien
tacacatgcagtgttaaatcccaat

SEQ ID NO: 5960353 - DNA, 25 bp, Homo sapien
tcagagcccgtggcgactatgatgt

SEQ ID NO: 5960354 - DNA, 25 bp, Homo sapien
ctgcggaagcgccatattctaaggc

SEQ ID NO: 5960355 - DNA, 25 bp, Homo sapien
aaacttcagcttccaaattttcttg

SEQ ID NO: 5960356 - DNA, 25 bp, Homo sapien
cggcttctttcaattgctcttcggt

SEQ ID NO: 5960357 - DNA, 25 bp, Homo sapien
tggaccaaatgtaacatctcctacc

SEQ ID NO: 5960358 - DNA, 25 bp, Homo sapien
tggtcaatgtcctgactgtggacga

SEQ ID NO: 5960359 - DNA, 25 bp, Homo sapien
gtcgtcgtttctctttgcagaaata

SEQ ID NO: 5960360 - DNA, 25 bp, Homo sapien
ttgcagaaataactttggtgcttaa

SEQ ID NO: 5960361 - DNA, 25 bp, Homo sapien
ttggaagtttgctacgttaattttg

SEQ ID NO: 5960362 - DNA, 25 bp, Homo sapien
ttaatgtgtgggaacttggaattaa

SEQ ID NO: 5960363 - DNA, 25 bp, Homo sapien
atcttcgtttcgtcttcgaatgaac

SEQ ID NO: 5960364 - DNA, 25 bp, Homo sapien
tgaaccattacctttataataggtg

SEQ ID NO: 5960365 - DNA, 25 bp, Homo sapien
catgcagtgttaaatcccaattgag

SEQ ID NO: 5960366 - DNA, 25 bp, Homo sapien
tgccttccaacccatcaacgggagt

SEQ ID NO: 5960367 - DNA, 25 bp, Homo sapien
ttcttgaacagaagctcaatacctc

SEQ ID NO: 5960368 - DNA, 25 bp, Homo sapien
ataggtgaccttatttttcttgaac

SEQ ID NO: 5960369 - DNA, 25 bp, Homo sapien
caatgtcctgactgtggacgaaaag

SEQ ID NO: 5960370 - DNA, 25 bp, Homo sapien
catgctacttctgggtgagaataca

SEQ ID NO: 5960371 - DNA, 25 bp, Homo sapien
gcagctttgatagcagccacgtaac

SEQ ID NO: 5960372 - DNA, 25 bp, Homo sapien
tcgtttcgtcttcgaatgaaccatt

SEQ ID NO: 5960373 - DNA, 25 bp, Homo sapien
aagggtgtaacttcagagcccgtgg

SEQ ID NO: 5960374 - DNA, 25 bp, Homo sapien
aacctcgccgtccatagatgcacca

SEQ ID NO: 5960375 - DNA, 25 bp, Homo sapien
tggcaacctcgccgtccatagatgc

SEQ ID NO: 5960376 - DNA, 25 bp, Homo sapien
tcatgtgacttgttaatggtcaatg

SEQ ID NO: 5960377 - DNA, 25 bp, Homo sapien
aatcatttcaccggcatttggaccg

SEQ ID NO: 5960378 - DNA, 25 bp, Homo sapien
gcccctaagccagcaatgtaaggtc

SEQ ID NO: 5960379 - DNA, 25 bp, Homo sapien
ccgaaggaatgttgttatagttgac

SEQ ID NO: 5960380 - DNA, 25 bp, Homo sapien
cagtgttaaatcccaattgagcagc

SEQ ID NO: 5960381 - DNA, 25 bp, Homo sapien
gcggaagcgccatattctaaggcta

SEQ ID NO: 5960382 - DNA, 25 bp, Homo sapien
cgctcggtcttggaatcgatcaaaa

SEQ ID NO: 5960383 - DNA, 25 bp, Homo sapien
tcgacagctgcaataccttcctctt

SEQ ID NO: 5960384 - DNA, 25 bp, Homo sapien
gccagcaatgtaaggtcttctacca

SEQ ID NO: 5960385 - DNA, 25 bp, Homo sapien
gatggttaatcttttgggaatttcc

SEQ ID NO: 5960386 - DNA, 25 bp, Homo sapien
ccaaaatacgctcggtcttggaatc

SEQ ID NO: 5960387 - DNA, 25 bp, Homo sapien
tcaacgggagttactctgatcttcg

SEQ ID NO: 5960388 - DNA, 25 bp, Homo sapien
cgaatgaaccattacctttataata

SEQ ID NO: 5960389 - DNA, 25 bp, Homo sapien
ctccaccaatgatggttaatctttt

SEQ ID NO: 5960390 - DNA, 25 bp, Homo sapien
ttctgggtgagaatacatgaccgaa

SEQ ID NO: 5960391 - DNA, 25 bp, Homo sapien
tcttttgcgcttccgtatgcatttg

SEQ ID NO: 5960392 - DNA, 25 bp, Homo sapien
aagaacttttgggtggctttggcaa

SEQ ID NO: 5960393 - DNA, 25 bp, Homo sapien
cgatcaaaatcttcacgaaaccttc

SEQ ID NO: 5960394 - DNA, 25 bp, Homo sapien
tttctacacatgcagtgttaaatcc

SEQ ID NO: 5960395 - DNA, 25 bp, Homo sapien
aatgtgtgggaacttggaattaaat

SEQ ID NO: 5960396 - DNA, 25 bp, Homo sapien
ggtggaataaatgagaattatttag

SEQ ID NO: 5960397 - DNA, 25 bp, Homo sapien
cttcagagcccgtggcgactatgat

SEQ ID NO: 5960398 - DNA, 25 bp, Homo sapien
atacctccagttaattgcttaacag

SEQ ID NO: 5960399 - DNA, 25 bp, Homo sapien
cttggagcctaatctagagtaaact

SEQ ID NO: 5960400 - DNA, 25 bp, Homo sapien
tgtgtgggaacttggaattaaattg

SEQ ID NO: 5960401 - DNA, 25 bp, Homo sapien
tggaataaatgagaattatttagaa

SEQ ID NO: 5960402 - DNA, 25 bp, Homo sapien
cagcttcagcaatcatttcaccggc

SEQ ID NO: 5960403 - DNA, 25 bp, Homo sapien
aacatctcctaccactttaatgtgt

SEQ ID NO: 5960404 - DNA, 25 bp, Homo sapien
ccgataatgtgagcccccaaaatac

SEQ ID NO: 5960405 - DNA, 25 bp, Homo sapien
gtcttccttgacagtgccttccaac

SEQ ID NO: 5960406 - DNA, 25 bp, Homo sapien
atcttctacaacaatttcgacgacg

SEQ ID NO: 5960407 - DNA, 25 bp, Homo sapien
ccaacccatcaacgggagttactct

SEQ ID NO: 5960408 - DNA, 25 bp, Homo sapien
accaatgatggttaatcttttggga

SEQ ID NO: 5960409 - DNA, 25 bp, Homo sapien
cggacaaagtaggatgagcatggca

SEQ ID NO: 5960410 - DNA, 25 bp, Homo sapien
tggagcctaatctagagtaaactga

SEQ ID NO: 5960411 - DNA, 25 bp, Homo sapien
aggggatacatccaacgttaagaca

SEQ ID NO: 5960412 - DNA, 25 bp, Homo sapien
tgagcatggcagaccctagcaacat

SEQ ID NO: 5960413 - DNA, 25 bp, Homo sapien
aacagaagctcaatacctccagtta

SEQ ID NO: 5960414 - DNA, 25 bp, Homo sapien
gatgttcttaacatctagtatgtgg

SEQ ID NO: 5960415 - DNA, 25 bp, Homo sapien
tcctcttcggctttgtgagccagca

SEQ ID NO: 5960416 - DNA, 25 bp, Homo sapien
gagccagcattggaccaaatgtaac

SEQ ID NO: 5960417 - DNA, 25 bp, Homo sapien
aaactgaacccatttccaatccgat

SEQ ID NO: 5960418 - DNA, 25 bp, Homo sapien
cttggctcttgaattggccgcaaag

SEQ ID NO: 5960419 - DNA, 25 bp, Homo sapien
tccaatccgatgattcctccaccaa

SEQ ID NO: 5960420 - DNA, 25 bp, Homo sapien
ttcagcccctaagccagcaatgtaa

SEQ ID NO: 5960421 - DNA, 25 bp, Homo sapien
ccttaaatgcttcggacaaagtagg

SEQ ID NO: 5960422 - DNA, 25 bp, Homo sapien
tacctctcttttgcgcttccgtatg

SEQ ID NO: 5960423 - DNA, 25 bp, Homo sapien
taccaacccatgctacttctgggtg

SEQ ID NO: 5960424 - DNA, 25 bp, Homo sapien
tctcttttgcgcttccgtatgcatt

SEQ ID NO: 5960425 - DNA, 25 bp, Homo sapien
tgggtggctttggcaacctcgccgt

SEQ ID NO: 5960426 - DNA, 25 bp, Homo sapien
tggctttggcaacctcgccgtccat

SEQ ID NO: 5960427 - DNA, 25 bp, Homo sapien
caattttatagtcaatgccggcttc

SEQ ID NO: 5960428 - DNA, 25 bp, Homo sapien
taaccttggagcctaatctagagta

SEQ ID NO: 5960429 - DNA, 25 bp, Homo sapien
gaagtccaaaccttgctttttcaag

SEQ ID NO: 5960430 - DNA, 25 bp, Homo sapien
ctaccactttaatgtgtgggaactt

SEQ ID NO: 5960431 - DNA, 25 bp, Homo sapien
cttagccttttggaagtttgctacg

SEQ ID NO: 5960432 - DNA, 25 bp, Homo sapien
ttttcttgaacagaagctcaatacc

SEQ ID NO: 5960433 - DNA, 25 bp, Homo sapien
attaaattggtcatcaatgactagg

SEQ ID NO: 5960434 - DNA, 25 bp, Homo sapien
caaaacttcagcttccaaattttct

SEQ ID NO: 5960435 - DNA, 25 bp, Homo sapien
gttggtcttggctcttgaattggcc

SEQ ID NO: 5960436 - DNA, 25 bp, Homo sapien
aggaatgttgttatagttgacatga

SEQ ID NO: 5960437 - DNA, 25 bp, Homo sapien
gccagcattggaccaaatgtaacat

SEQ ID NO: 5960438 - DNA, 25 bp, Homo sapien
tactacagtaaccttggagcctaat

SEQ ID NO: 5960439 - DNA, 25 bp, Homo sapien
tgaccgtgaccagttttcaacattt

SEQ ID NO: 5960440 - DNA, 25 bp, Homo sapien
ctccagttaattgcttaacagcgtc

SEQ ID NO: 5960441 - DNA, 25 bp, Homo sapien
caaagtaggatgagcatggcagacc

SEQ ID NO: 5960442 - DNA, 25 bp, Homo sapien
gtaacttcagagcccgtggcgacta

SEQ ID NO: 5960443 - DNA, 25 bp, Homo sapien
tacatcatgtgacttgttaatggtc

SEQ ID NO: 5960444 - DNA, 25 bp, Homo sapien
ttcagcaatcatttcaccggcattt

SEQ ID NO: 5960445 - DNA, 25 bp, Homo sapien
ttaacagcgtcatccttagcctttt

SEQ ID NO: 5960446 - DNA, 25 bp, Homo sapien
tcaatacctctcttttgcgcttccg

SEQ ID NO: 5960447 - DNA, 25 bp, Homo sapien
tgcttaatttgaagtccaaaccttg

SEQ ID NO: 5960448 - DNA, 25 bp, Homo sapien
cttattatttaggagtgatctgatt

SEQ ID NO: 5960449 - DNA, 25 bp, Homo sapien
ccaccaatgatggttaatcttttgg

SEQ ID NO: 5960450 - DNA, 25 bp, Homo sapien
gtttcgtcttcgaatgaaccattac

SEQ ID NO: 5960451 - DNA, 25 bp, Homo sapien
ggtggctttggcaacctcgccgtcc

SEQ ID NO: 5960452 - DNA, 25 bp, Homo sapien
ataaatgagaattatttagaagtgc

SEQ ID NO: 5960453 - DNA, 25 bp, Homo sapien
caacaatgaatagctttatcatagg

SEQ ID NO: 5960454 - DNA, 25 bp, Homo sapien
gtgttaaatcccaattgagcagctt

SEQ ID NO: 5960455 - DNA, 25 bp, Homo sapien
atgtaacatctcctaccactttaat

SEQ ID NO: 5960456 - DNA, 25 bp, Homo sapien
attctactacagtaaccttggagcc

SEQ ID NO: 5960457 - DNA, 25 bp, Homo sapien
gttgaaattctactacagtaacctt

SEQ ID NO: 5960458 - DNA, 25 bp, Homo sapien
ccaattgagcagctttgatagcagc

SEQ ID NO: 5960459 - DNA, 25 bp, Homo sapien
gaatgttgttatagttgacatgacc

SEQ ID NO: 5960460 - DNA, 25 bp, Homo sapien
ttgagcagctttgatagcagccacg

SEQ ID NO: 5960461 - DNA, 25 bp, Homo sapien
ccttatttttcttgaacagaagctc

SEQ ID NO: 5960462 - DNA, 25 bp, Homo sapien
gcttaacagcgtcatccttagcctt

SEQ ID NO: 5960463 - DNA, 25 bp, Homo sapien
tgaacccatttccaatccgatgatt

SEQ ID NO: 5960464 - DNA, 25 bp, Homo sapien
ttcggttttaccaacccatgctact

SEQ ID NO: 5960465 - DNA, 25 bp, Homo sapien
cgtcaatacctctcttttgcgcttc

SEQ ID NO: 5960466 - DNA, 25 bp, Homo sapien
ttctctttgcagaaataactttggt

SEQ ID NO: 5960467 - DNA, 25 bp, Homo sapien
cttctaccaacagcaaccagcaaaa

SEQ ID NO: 5960468 - DNA, 25 bp, Homo sapien
cacctgttgaagagacaattttttc

SEQ ID NO: 5960469 - DNA, 25 bp, Homo sapien
tagaagtgctttggaggggatacat

SEQ ID NO: 5960470 - DNA, 25 bp, Homo sapien
gcagccatgttagcttccttaaatg

SEQ ID NO: 5960471 - DNA, 25 bp, Homo sapien
accactttaatgtgtgggaacttgg

SEQ ID NO: 5960472 - DNA, 25 bp, Homo sapien
gagtaaactgaacccatttccaatc

SEQ ID NO: 5960473 - DNA, 25 bp, Homo sapien
atgatgactacatcatgtgacttgt

SEQ ID NO: 5960474 - DNA, 25 bp, Homo sapien
gttttaccaacccatgctacttctg

SEQ ID NO: 5960475 - DNA, 25 bp, Homo sapien
gtcaatgccggcttctttcaattgc

SEQ ID NO: 5960476 - DNA, 25 bp, Homo sapien
gcgtcatccttagccttttggaagt

SEQ ID NO: 5960477 - DNA, 25 bp, Homo sapien
tgttatagttgacatgaccgtgacc

SEQ ID NO: 5960478 - DNA, 25 bp, Homo sapien
tttatcataggcagccatgttagct

SEQ ID NO: 5960479 - DNA, 25 bp, Homo sapien
cgtccatagatgcaccaatttgagg

SEQ ID NO: 5960480 - DNA, 25 bp, Homo sapien
tggaccgataatgtgagcccccaaa

SEQ ID NO: 5960481 - DNA, 25 bp, Homo sapien
ccctaagccagcaatgtaaggtctt

SEQ ID NO: 5960482 - DNA, 25 bp, Homo sapien
ctacagtaaccttggagcctaatct

SEQ ID NO: 5960483 - DNA, 25 bp, Homo sapien
ggaacttggaattaaattggtcatc

SEQ ID NO: 5960484 - DNA, 25 bp, Homo sapien
cggtcttggaatcgatcaaaatctt

SEQ ID NO: 5960485 - DNA, 25 bp, Homo sapien
atcaatgactaggcgtccccttttg

SEQ ID NO: 5960486 - DNA, 25 bp, Homo sapien
ttaattttgatatcaccgttgacgt

SEQ ID NO: 5960487 - DNA, 25 bp, Homo sapien
tagcaacatcttctgcggaagcgcc

SEQ ID NO: 5960488 - DNA, 25 bp, Homo sapien
caatgatggttaatcttttgggaat

SEQ ID NO: 5960489 - DNA, 25 bp, Homo sapien
agctcaatacctccagttaattgct

SEQ ID NO: 5960490 - DNA, 25 bp, Homo sapien
aaccttcagtgtcttggttggtctt

SEQ ID NO: 5960491 - DNA, 25 bp, Homo sapien
ggagttactctgatcttcgtttcgt

SEQ ID NO: 5960492 - DNA, 25 bp, Homo sapien
gcccccaaaatacgctcggtcttgg

SEQ ID NO: 5960493 - DNA, 25 bp, Homo sapien
ttgctacgttaattttgatatcacc

SEQ ID NO: 5960494 - DNA, 25 bp, Homo sapien
ttaatggtcaatgtcctgactgtgg

SEQ ID NO: 5960495 - DNA, 25 bp, Homo sapien
gactaggcgtccccttttgtctact

SEQ ID NO: 5960496 - DNA, 25 bp, Homo sapien
cccatttccaatccgatgattcctc

SEQ ID NO: 5960497 - DNA, 25 bp, Homo sapien
acgaaaccttcagtgtcttggttgg

SEQ ID NO: 5960498 - DNA, 25 bp, Homo sapien
tcccaattgagcagctttgatagca

SEQ ID NO: 5960499 - DNA, 25 bp, Homo sapien
ttgatatcaccgttgacgtcaatac

SEQ ID NO: 5960500 - DNA, 25 bp, Homo sapien
cgatgatgactacatcatgtgactt

SEQ ID NO: 5960501 - DNA, 25 bp, Homo sapien
atagttgacatgaccgtgaccagtt

SEQ ID NO: 5960502 - DNA, 25 bp, Homo sapien
catttggaccgataatgtgagcccc

SEQ ID NO: 5960503 - DNA, 25 bp, Homo sapien
tcttttcagcccctaagccagcaat

SEQ ID NO: 5960504 - DNA, 25 bp, Homo sapien
gctacgttaattttgatatcaccgt

SEQ ID NO: 5960505 - DNA, 25 bp, Homo sapien
tctacaacaatttcgacgacgttct

SEQ ID NO: 5960506 - DNA, 25 bp, Homo sapien
gaaaccttcagtgtcttggttggtc

SEQ ID NO: 5960507 - DNA, 25 bp, Homo sapien
ggaagggtgtaacttcagagcccgt

SEQ ID NO: 5960508 - DNA, 25 bp, Homo sapien
gtaggatgagcatggcagaccctag

SEQ ID NO: 5960509 - DNA, 25 bp, Homo sapien
ttcagcttccaaattttcttgctta

SEQ ID NO: 5960510 - DNA, 25 bp, Homo sapien
ttggtggaataaatgagaattattt

SEQ ID NO: 5960511 - DNA, 25 bp, Homo sapien
gggatacatccaacgttaagacagg

SEQ ID NO: 5960512 - DNA, 25 bp, Homo sapien
tgtgggaacttggaattaaattggt

SEQ ID NO: 5960513 - DNA, 25 bp, Homo sapien
tggaattaaattggtcatcaatgac

SEQ ID NO: 5960514 - DNA, 25 bp, Homo sapien
tttatagtcaatgccggcttctttc

SEQ ID NO: 5960515 - DNA, 25 bp, Homo sapien
gaatttcctttaacgaaagagcacc

SEQ ID NO: 5960516 - DNA, 25 bp, Homo sapien
accgttgacgtcaatacctctcttt

SEQ ID NO: 5960517 - DNA, 25 bp, Homo sapien
tttgggtggctttggcaacctcgcc

SEQ ID NO: 5960518 - DNA, 25 bp, Homo sapien
ttgaagagacaattttttcctcatc

SEQ ID NO: 5960519 - DNA, 25 bp, Homo sapien
gttagcttccttaaatgcttcggac

SEQ ID NO: 5960520 - DNA, 25 bp, Homo sapien
aggtcttctaccaacagcaaccagc

SEQ ID NO: 5960521 - DNA, 25 bp, Homo sapien
agtgccttccaacccatcaacggga

SEQ ID NO: 5960522 - DNA, 25 bp, Homo sapien
gcaatgtaaggtcttctaccaacag

SEQ ID NO: 5960523 - DNA, 25 bp, Homo sapien
atctagtatgtggtcttccttgaca

SEQ ID NO: 5960524 - DNA, 25 bp, Homo sapien
aaggctaagccagcttcagcaatca

SEQ ID NO: 5960525 - DNA, 25 bp, Homo sapien
tttggcaacctcgccgtccatagat

SEQ ID NO: 5960526 - DNA, 25 bp, Homo sapien
aggttgaaattctactacagtaacc

SEQ ID NO: 5960527 - DNA, 25 bp, Homo sapien
cttttttctacacatgcagtgttaa

SEQ ID NO: 5960528 - DNA, 25 bp, Homo sapien
atgaccgaaggaatgttgttatagt

SEQ ID NO: 5960529 - DNA, 25 bp, Homo sapien
aagcgccatattctaaggctaagcc

SEQ ID NO: 5960530 - DNA, 25 bp, Homo sapien
gcagccacgtaaccagcagggccac

SEQ ID NO: 5960531 - DNA, 25 bp, Homo sapien
aatgtaaggtcttctaccaacagca

SEQ ID NO: 5960532 - DNA, 25 bp, Homo sapien
ttcaattgctcttcggttttaccaa

SEQ ID NO: 5960533 - DNA, 25 bp, Homo sapien
aagtaggatgagcatggcagaccct

SEQ ID NO: 5960534 - DNA, 25 bp, Homo sapien
gttttagtatcttctacaacaattt

SEQ ID NO: 5960535 - DNA, 25 bp, Homo sapien
tctacacatgcagtgttaaatccca

SEQ ID NO: 5960536 - DNA, 25 bp, Homo sapien
ttcgtcttcgaatgaaccattacct

SEQ ID NO: 5960537 - DNA, 25 bp, Homo sapien
gtgagccagcattggaccaaatgta

SEQ ID NO: 5960538 - DNA, 25 bp, Homo sapien
agccacgtaaccagcagggccacca

SEQ ID NO: 5960539 - DNA, 25 bp, Homo sapien
cttcctcttcggctttgtgagccag

SEQ ID NO: 5960540 - DNA, 25 bp, Homo sapien
tgcagtgttaaatcccaattgagca

SEQ ID NO: 5960541 - DNA, 25 bp, Homo sapien
gaagtgctttggaggggatacatcc

SEQ ID NO: 5960542 - DNA, 25 bp, Homo sapien
tacatccaacgttaagacaggtacc

SEQ ID NO: 5960543 - DNA, 25 bp, Homo sapien
tataataggtgaccttatttttctt

SEQ ID NO: 5960544 - DNA, 25 bp, Homo sapien
tcgtttctctttgcagaaataactt

SEQ ID NO: 5960545 - DNA, 25 bp, Homo sapien
gtctacttctaatccaatcttttca

SEQ ID NO: 5960546 - DNA, 25 bp, Homo sapien
tttccaatccgatgattcctccacc

SEQ ID NO: 5960547 - DNA, 25 bp, Homo sapien
ctttgtgagccagcattggaccaaa

SEQ ID NO: 5960548 - DNA, 25 bp, Homo sapien
ccacgtaaccagcagggccaccacc

SEQ ID NO: 5960549 - DNA, 25 bp, Homo sapien
caattgctcttcggttttaccaacc

SEQ ID NO: 5960550 - DNA, 25 bp, Homo sapien
aagccagcaatgtaaggtcttctac

SEQ ID NO: 5960551 - DNA, 25 bp, Homo sapien
aaccagcaaaacttcagcttccaaa

SEQ ID NO: 5960552 - DNA, 25 bp, Homo sapien
attggccgcaaaggggaacttacca

SEQ ID NO: 5960553 - DNA, 25 bp, Homo sapien
aaataactttggtgcttaatttgaa

SEQ ID NO: 5960554 - DNA, 25 bp, Homo sapien
ctttggtgcttaatttgaagtccaa

SEQ ID NO: 5960555 - DNA, 25 bp, Homo sapien
ccggggaagggtgtaacttcagagc

SEQ ID NO: 5960556 - DNA, 25 bp, Homo sapien
taccgcctaatttgcctcttttttc

SEQ ID NO: 5960557 - DNA, 25 bp, Homo sapien
tcaacatttcgacagctgcaatacc

SEQ ID NO: 5960558 - DNA, 25 bp, Homo sapien
ctaagccagcaatgtaaggtcttct

SEQ ID NO: 5960559 - DNA, 25 bp, Homo sapien
gacgaaaaggcacgcttattattta

SEQ ID NO: 5960560 - DNA, 25 bp, Homo sapien
cttgttaatggtcaatgtcctgact

SEQ ID NO: 5960561 - DNA, 25 bp, Homo sapien
ggctttgtgagccagcattggacca

SEQ ID NO: 5960562 - DNA, 25 bp, Homo sapien
aacgaaagagcacctgttgaagaga

SEQ ID NO: 5960563 - DNA, 25 bp, Homo sapien
cacgcttattatttaggagtgatct

SEQ ID NO: 5960564 - DNA, 25 bp, Homo sapien
gaaggaatgttgttatagttgacat

SEQ ID NO: 5960565 - DNA, 25 bp, Homo sapien
aagacaggtaccgcctaatttgcct

SEQ ID NO: 5960566 - DNA, 25 bp, Homo sapien
cagcgtcatccttagccttttggaa

SEQ ID NO: 5960567 - DNA, 25 bp, Homo sapien
cggttttaccaacccatgctacttc

SEQ ID NO: 5960568 - DNA, 25 bp, Homo sapien
catctcctaccactttaatgtgtgg

SEQ ID NO: 5960569 - DNA, 25 bp, Homo sapien
gcttccttaaatgcttcggacaaag

SEQ ID NO: 5960570 - DNA, 25 bp, Homo sapien
aaaaggcacgcttattatttaggag

SEQ ID NO: 5960571 - DNA, 25 bp, Homo sapien
ttgctttttcaagaacttttgggtg

SEQ ID NO: 5960572 - DNA, 25 bp, Homo sapien
ttaattgcttaacagcgtcatcctt

SEQ ID NO: 5960573 - DNA, 25 bp, Homo sapien
tttgaggttgaaattctactacagt

SEQ ID NO: 5960574 - DNA, 25 bp, Homo sapien
acatgaccgaaggaatgttgttata

SEQ ID NO: 5960575 - DNA, 25 bp, Homo sapien
ttatagttgacatgaccgtgaccag

SEQ ID NO: 5960576 - DNA, 25 bp, Homo sapien
tattatttaggagtgatctgattct

SEQ ID NO: 5960577 - DNA, 25 bp, Homo sapien
taaggtcttctaccaacagcaacca

SEQ ID NO: 5960578 - DNA, 25 bp, Homo sapien
gcttcggacaaagtaggatgagcat

SEQ ID NO: 5960579 - DNA, 25 bp, Homo sapien
gcgactatgatgttcttaacatcta

SEQ ID NO: 5960580 - DNA, 25 bp, Homo sapien
aattttgatatcaccgttgacgtca

SEQ ID NO: 5960581 - DNA, 25 bp, Homo sapien
ttccttaaatgcttcggacaaagta

SEQ ID NO: 5960582 - DNA, 25 bp, Homo sapien
gggccaccaccgatgatgactacat

SEQ ID NO: 5960583 - DNA, 25 bp, Homo sapien
cttgacagtgccttccaacccatca

SEQ ID NO: 5960584 - DNA, 25 bp, Homo sapien
gcaaccagcaaaacttcagcttcca

SEQ ID NO: 5960585 - DNA, 25 bp, Homo sapien
taccggggaagggtgtaacttcaga

SEQ ID NO: 5960586 - DNA, 25 bp, Homo sapien
gaacttttgggtggctttggcaacc

SEQ ID NO: 5960587 - DNA, 25 bp, Homo sapien
caacgttaagacaggtaccgcctaa

SEQ ID NO: 5960588 - DNA, 25 bp, Homo sapien
aaaatacgctcggtcttggaatcga

SEQ ID NO: 5960589 - DNA, 25 bp, Homo sapien
agcccgtggcgactatgatgttctt

SEQ ID NO: 5960590 - DNA, 25 bp, Homo sapien
cgtggcgactatgatgttcttaaca

SEQ ID NO: 5960591 - DNA, 25 bp, Homo sapien
ttctttcaattgctcttcggtttta

SEQ ID NO: 5960592 - DNA, 25 bp, Homo sapien
gatgattcctccaccaatgatggtt

SEQ ID NO: 5960593 - DNA, 25 bp, Homo sapien
acaatgaatagctttatcataggca

SEQ ID NO: 5960594 - DNA, 25 bp, Homo sapien
gttcttgtcgtcgtttctctttgca

SEQ ID NO: 5960595 - DNA, 25 bp, Homo sapien
gtaaactgaacccatttccaatccg

SEQ ID NO: 5960596 - DNA, 25 bp, Homo sapien
ttatttttcttgaacagaagctcaa

SEQ ID NO: 5960597 - DNA, 25 bp, Homo sapien
taatttgaagtccaaaccttgcttt

SEQ ID NO: 5960598 - DNA, 25 bp, Homo sapien
gaccgaaggaatgttgttatagttg

SEQ ID NO: 5960599 - DNA, 25 bp, Homo sapien
taataggtgaccttatttttcttga

SEQ ID NO: 5960600 - DNA, 25 bp, Homo sapien
cgaaagagcacctgttgaagagaca

SEQ ID NO: 5960601 - DNA, 25 bp, Homo sapien
gacaaagtaggatgagcatggcaga

SEQ ID NO: 5960602 - DNA, 25 bp, Homo sapien
atttaggagtgatctgattcttaac

SEQ ID NO: 5960603 - DNA, 25 bp, Homo sapien
cctagcaacatcttctgcggaagcg

SEQ ID NO: 5960604 - DNA, 25 bp, Homo sapien
atgatggttaatcttttgggaattt

SEQ ID NO: 5960605 - DNA, 25 bp, Homo sapien
catcaacgggagttactctgatctt

SEQ ID NO: 5960606 - DNA, 25 bp, Homo sapien
tcttcgaatgaaccattacctttat

SEQ ID NO: 5960607 - DNA, 25 bp, Homo sapien
gcgccatattctaaggctaagccag

SEQ ID NO: 5960608 - DNA, 25 bp, Homo sapien
tacctttataataggtgaccttatt

SEQ ID NO: 5960609 - DNA, 25 bp, Homo sapien
gcctaatttgcctcttttttctaca

SEQ ID NO: 5960610 - DNA, 25 bp, Homo sapien
acagtgccttccaacccatcaacgg

SEQ ID NO: 5960611 - DNA, 25 bp, Homo sapien
gagaatacatgaccgaaggaatgtt

SEQ ID NO: 5960612 - DNA, 25 bp, Homo sapien
tcttgtcgtcgtttctctttgcaga

SEQ ID NO: 5960613 - DNA, 25 bp, Homo sapien
tcataggcagccatgttagcttcct

SEQ ID NO: 5960614 - DNA, 25 bp, Homo sapien
ctcaatacctccagttaattgctta

SEQ ID NO: 5960615 - DNA, 25 bp, Homo sapien
cagggccaccaccgatgatgactac

SEQ ID NO: 5960616 - DNA, 25 bp, Homo sapien
cttccttgacagtgccttccaaccc

SEQ ID NO: 5960617 - DNA, 25 bp, Homo sapien
aatcccaattgagcagctttgatag

SEQ ID NO: 5960618 - DNA, 25 bp, Homo sapien
tgacagtgccttccaacccatcaac

SEQ ID NO: 5960619 - DNA, 25 bp, Homo sapien
tgcaataccttcctcttcggctttg

SEQ ID NO: 5960620 - DNA, 25 bp, Homo sapien
taccaacagcaaccagcaaaacttc

SEQ ID NO: 5960621 - DNA, 25 bp, Homo sapien
cacatgcagtgttaaatcccaattg

SEQ ID NO: 5960622 - DNA, 25 bp, Homo sapien
tggcgactatgatgttcttaacatc

SEQ ID NO: 5960623 - DNA, 25 bp, Homo sapien
ttctaaggctaagccagcttcagca

SEQ ID NO: 5960624 - DNA, 25 bp, Homo sapien
caaaatcttcacgaaaccttcagtg

SEQ ID NO: 5960625 - DNA, 25 bp, Homo sapien
catgaccgtgaccagttttcaacat

SEQ ID NO: 5960626 - DNA, 25 bp, Homo sapien
gagcctaatctagagtaaactgaac

SEQ ID NO: 5960627 - DNA, 25 bp, Homo sapien
gactatgatgttcttaacatctagt

SEQ ID NO: 5960628 - DNA, 25 bp, Homo sapien
gcctaatctagagtaaactgaaccc

SEQ ID NO: 5960629 - DNA, 25 bp, Homo sapien
cttttgggtggctttggcaacctcg

SEQ ID NO: 5960630 - DNA, 25 bp, Homo sapien
cccgtggcgactatgatgttcttaa

SEQ ID NO: 5960631 - DNA, 25 bp, Homo sapien
aacttcagagcccgtggcgactatg

SEQ ID NO: 5960632 - DNA, 25 bp, Homo sapien
ggggaagggtgtaacttcagagccc

SEQ ID NO: 5960633 - DNA, 25 bp, Homo sapien
tttagaagtgctttggaggggatac

SEQ ID NO: 5960634 - DNA, 25 bp, Homo sapien
attacctttataataggtgacctta

SEQ ID NO: 5960635 - DNA, 25 bp, Homo sapien
cttggaattaaattggtcatcaatg

SEQ ID NO: 5960636 - DNA, 25 bp, Homo sapien
ttgacatgaccgtgaccagttttca

SEQ ID NO: 5960637 - DNA, 25 bp, Homo sapien
atttttcttgaacagaagctcaata

SEQ ID NO: 5960638 - DNA, 25 bp, Homo sapien
cgtcgtttctctttgcagaaataac

SEQ ID NO: 5960639 - DNA, 25 bp, Homo sapien
cgacgttcttgtcgtcgtttctctt

SEQ ID NO: 5960640 - DNA, 25 bp, Homo sapien
tatgtggtcttccttgacagtgcct

SEQ ID NO: 5960641 - DNA, 25 bp, Homo sapien
aatacctctcttttgcgcttccgta

SEQ ID NO: 5960642 - DNA, 25 bp, Homo sapien
tgcttattcgttttagtatcttcta

SEQ ID NO: 5960643 - DNA, 25 bp, Homo sapien
gtgaccttatttttcttgaacagaa

SEQ ID NO: 5960644 - DNA, 25 bp, Homo sapien
gtcttggaatcgatcaaaatcttca

SEQ ID NO: 5960645 - DNA, 25 bp, Homo sapien
tgcaccaatttgaggttgaaattct

SEQ ID NO: 5960646 - DNA, 25 bp, Homo sapien
aaatcttcacgaaaccttcagtgtc

SEQ ID NO: 5960647 - DNA, 25 bp, Homo sapien
ttggtgcttaatttgaagtccaaac

SEQ ID NO: 5960648 - DNA, 25 bp, Homo sapien
cagcttccaaattttcttgcttatt

SEQ ID NO: 5960649 - DNA, 25 bp, Homo sapien
tgctttggaggggatacatccaacg

SEQ ID NO: 5960650 - DNA, 25 bp, Homo sapien
tcaagaacttttgggtggctttggc

SEQ ID NO: 5960651 - DNA, 25 bp, Homo sapien
gaattggccgcaaaggggaacttac

SEQ ID NO: 5960652 - DNA, 25 bp, Homo sapien
tcgccgtccatagatgcaccaattt

SEQ ID NO: 5960653 - DNA, 25 bp, Homo sapien
acttctaatccaatcttttcagccc

SEQ ID NO: 5960654 - DNA, 25 bp, Homo sapien
caccaccgatgatgactacatcatg

SEQ ID NO: 5960655 - DNA, 25 bp, Homo sapien
atgatgttcttaacatctagtatgt

SEQ ID NO: 5960656 - DNA, 25 bp, Homo sapien
caatccgatgattcctccaccaatg

SEQ ID NO: 5960657 - DNA, 25 bp, Homo sapien
gacgtcaatacctctcttttgcgct

SEQ ID NO: 5960658 - DNA, 25 bp, Homo sapien
aaattctactacagtaaccttggag

SEQ ID NO: 5960659 - DNA, 25 bp, Homo sapien
aggcagccatgttagcttccttaaa

SEQ ID NO: 5960660 - DNA, 25 bp, Homo sapien
atgttagcttccttaaatgcttcgg

SEQ ID NO: 5960661 - DNA, 25 bp, Homo sapien
atcttcacgaaaccttcagtgtctt

SEQ ID NO: 5960662 - DNA, 25 bp, Homo sapien
ctcttttttctacacatgcagtgtt

SEQ ID NO: 5960663 - DNA, 25 bp, Homo sapien
ccaatttgaggttgaaattctacta

SEQ ID NO: 5960664 - DNA, 25 bp, Homo sapien
tagcttccttaaatgcttcggacaa

SEQ ID NO: 5960665 - DNA, 25 bp, Homo sapien
cgtgaccagttttcaacatttcgac

SEQ ID NO: 5960666 - DNA, 25 bp, Homo sapien
tccttgacagtgccttccaacccat

SEQ ID NO: 5960667 - DNA, 25 bp, Homo sapien
ataactttggtgcttaatttgaagt

SEQ ID NO: 5960668 - DNA, 25 bp, Homo sapien
gaagctcaatacctccagttaattg

SEQ ID NO: 5960669 - DNA, 25 bp, Homo sapien
gtatcttctacaacaatttcgacga

SEQ ID NO: 5960670 - DNA, 25 bp, Homo sapien
aatggtcaatgtcctgactgtggac

SEQ ID NO: 5960671 - DNA, 25 bp, Homo sapien
aagccagcttcagcaatcatttcac

SEQ ID NO: 5960672 - DNA, 25 bp, Homo sapien
ttgcctcttttttctacacatgcag

SEQ ID NO: 5960673 - DNA, 25 bp, Homo sapien
ttctgcggaagcgccatattctaag

SEQ ID NO: 5960674 - DNA, 25 bp, Homo sapien
caatgactaggcgtccccttttgtc

SEQ ID NO: 5960675 - DNA, 25 bp, Homo sapien
ggtgcttaatttgaagtccaaacct

SEQ ID NO: 5960676 - DNA, 25 bp, Homo sapien
acgtaaccagcagggccaccaccga

SEQ ID NO: 5960677 - DNA, 25 bp, Homo sapien
ttactctgatcttcgtttcgtcttc

SEQ ID NO: 5960678 - DNA, 25 bp, Homo sapien
caacaatttcgacgacgttcttgtc

SEQ ID NO: 5960679 - DNA, 25 bp, Homo sapien
atgttgttatagttgacatgaccgt

SEQ ID NO: 5960680 - DNA, 25 bp, Homo sapien
aattgagcagctttgatagcagcca

SEQ ID NO: 5960681 - DNA, 25 bp, Homo sapien
ttccaacccatcaacgggagttact

SEQ ID NO: 5960682 - DNA, 25 bp, Homo sapien
tctgatcttcgtttcgtcttcgaat

SEQ ID NO: 5960683 - DNA, 25 bp, Homo sapien
ataggcagccatgttagcttcctta

SEQ ID NO: 5960684 - DNA, 25 bp, Homo sapien
ccagcagggccaccaccgatgatga

SEQ ID NO: 5960685 - DNA, 25 bp, Homo sapien
ctcggtcttggaatcgatcaaaatc

SEQ ID NO: 5960686 - DNA, 25 bp, Homo sapien
gcaatcatttcaccggcatttggac

SEQ ID NO: 5960687 - DNA, 25 bp, Homo sapien
tagtcaatgccggcttctttcaatt

SEQ ID NO: 5960688 - DNA, 25 bp, Homo sapien
tagccttttggaagtttgctacgtt

SEQ ID NO: 5960689 - DNA, 25 bp, Homo sapien
catggcagaccctagcaacatcttc

SEQ ID NO: 5960690 - DNA, 25 bp, Homo sapien
cagcattggaccaaatgtaacatct

SEQ ID NO: 5960691 - DNA, 25 bp, Homo sapien
gcttccaaattttcttgcttattcg

SEQ ID NO: 5960692 - DNA, 25 bp, Homo sapien
cgaaaagttgggcataccgtccatt

SEQ ID NO: 5960693 - DNA, 25 bp, Homo sapien
tgattttggcatctcttatgacatg

SEQ ID NO: 5960694 - DNA, 25 bp, Homo sapien
acaaactgggcaacaaatgtaagca

SEQ ID NO: 5960695 - DNA, 25 bp, Homo sapien
aagtgctttttggagtaaaatgcta

SEQ ID NO: 5960696 - DNA, 25 bp, Homo sapien
attttggcatctcttatgacatggc

SEQ ID NO: 5960697 - DNA, 25 bp, Homo sapien
caataccagcaccgtatccccaaag

SEQ ID NO: 5960698 - DNA, 25 bp, Homo sapien
caaagttgtacataattgattttgg

SEQ ID NO: 5960699 - DNA, 25 bp, Homo sapien
tgtacataattgattttggcatctc

SEQ ID NO: 5960700 - DNA, 25 bp, Homo sapien
tcaatattcgaaaagttgggcatac

SEQ ID NO: 5960701 - DNA, 25 bp, Homo sapien
gttgtttccctttgaagagatgaac

SEQ ID NO: 5960702 - DNA, 25 bp, Homo sapien
gtggttccagagagaaacaagccgt

SEQ ID NO: 5960703 - DNA, 25 bp, Homo sapien
ctcggttgatgcatttgttggtatg

SEQ ID NO: 5960704 - DNA, 25 bp, Homo sapien
tattaaacaaactgggcaacaaatg

SEQ ID NO: 5960705 - DNA, 25 bp, Homo sapien
gaagggattgcattcttacatgaga

SEQ ID NO: 5960706 - DNA, 25 bp, Homo sapien
taatcaattggacgtcaatcggtat

SEQ ID NO: 5960707 - DNA, 25 bp, Homo sapien
tgacctattgttgttgtttcccttt

SEQ ID NO: 5960708 - DNA, 25 bp, Homo sapien
gtatcctggggatggtttcattttc

SEQ ID NO: 5960709 - DNA, 25 bp, Homo sapien
tgaagagatgaacctttatgagttc

SEQ ID NO: 5960710 - DNA, 25 bp, Homo sapien
aggaatttacaaggccccagaagtg

SEQ ID NO: 5960711 - DNA, 25 bp, Homo sapien
gatttgctaaatcccagtatcccaa

SEQ ID NO: 5960712 - DNA, 25 bp, Homo sapien
cgtatccccaaagttgtacataatt

SEQ ID NO: 5960713 - DNA, 25 bp, Homo sapien
atgatggtggcgtggacgtgtggtc

SEQ ID NO: 5960714 - DNA, 25 bp, Homo sapien
gataataatgacctattgttgttgt

SEQ ID NO: 5960715 - DNA, 25 bp, Homo sapien
tgtacagattagcattgttgagagg

SEQ ID NO: 5960716 - DNA, 25 bp, Homo sapien
gcaccgtatccccaaagttgtacat

SEQ ID NO: 5960717 - DNA, 25 bp, Homo sapien
agttcatgcaaatgcactataaaag

SEQ ID NO: 5960718 - DNA, 25 bp, Homo sapien
cattacacactgtcagttggtcaaa

SEQ ID NO: 5960719 - DNA, 25 bp, Homo sapien
aggagaaagatgtacagattagcat

SEQ ID NO: 5960720 - DNA, 25 bp, Homo sapien
actgggcaacaaatgtaagcacatc

SEQ ID NO: 5960721 - DNA, 25 bp, Homo sapien
agagtctaaggctaccgataataat

SEQ ID NO: 5960722 - DNA, 25 bp, Homo sapien
gaaacaagccgtatggggcacgttc

SEQ ID NO: 5960723 - DNA, 25 bp, Homo sapien
aatccctattacgatttgctaaatc

SEQ ID NO: 5960724 - DNA, 25 bp, Homo sapien
ggaagcgatttcagactgatttgct

SEQ ID NO: 5960725 - DNA, 25 bp, Homo sapien
tccccaaagttgtacataattgatt

SEQ ID NO: 5960726 - DNA, 25 bp, Homo sapien
gaagaggttgcgcaacacggctcgg

SEQ ID NO: 5960727 - DNA, 25 bp, Homo sapien
acaaatgtaagcacatcttacctct

SEQ ID NO: 5960728 - DNA, 25 bp, Homo sapien
ttaaatgtctagcactagatttcga

SEQ ID NO: 5960729 - DNA, 25 bp, Homo sapien
caccaaacgaaagatggagctgtca

SEQ ID NO: 5960730 - DNA, 25 bp, Homo sapien
aactggatagtatagacattacaca

SEQ ID NO: 5960731 - DNA, 25 bp, Homo sapien
gttgtacataattgattttggcatc

SEQ ID NO: 5960732 - DNA, 25 bp, Homo sapien
gacgacatgaactcagatggaagcg

SEQ ID NO: 5960733 - DNA, 25 bp, Homo sapien
tggatagcaaggtgacggatataag

SEQ ID NO: 5960734 - DNA, 25 bp, Homo sapien
cgcaaaatatcatgctaacaaacaa

SEQ ID NO: 5960735 - DNA, 25 bp, Homo sapien
atgtctagcactagatttcgatatc

SEQ ID NO: 5960736 - DNA, 25 bp, Homo sapien
ttcaccaaacgaaagatggagctgt

SEQ ID NO: 5960737 - DNA, 25 bp, Homo sapien
atgaaactggatagtatagacatta

SEQ ID NO: 5960738 - DNA, 25 bp, Homo sapien
tgttgttgtttccctttgaagagat

SEQ ID NO: 5960739 - DNA, 25 bp, Homo sapien
tccctttgaagagatgaacctttat

SEQ ID NO: 5960740 - DNA, 25 bp, Homo sapien
atttgttggtatgtttggtgcagat

SEQ ID NO: 5960741 - DNA, 25 bp, Homo sapien
agtatcgatattaaacaaactgggc

SEQ ID NO: 5960742 - DNA, 25 bp, Homo sapien
cgtcaatcggtattctttgtccttt

SEQ ID NO: 5960743 - DNA, 25 bp, Homo sapien
aagatggagctgtcaaagaatcttg

SEQ ID NO: 5960744 - DNA, 25 bp, Homo sapien
tgggcataccgtccattcagaaatg

SEQ ID NO: 5960745 - DNA, 25 bp, Homo sapien
tggggatggtttcattttcaccaaa

SEQ ID NO: 5960746 - DNA, 25 bp, Homo sapien
gattagcattgttgagaggaatatg

SEQ ID NO: 5960747 - DNA, 25 bp, Homo sapien
tcagatggaagcgatttcagactga

SEQ ID NO: 5960748 - DNA, 25 bp, Homo sapien
atgaactcagatggaagcgatttca

SEQ ID NO: 5960749 - DNA, 25 bp, Homo sapien
catgcaaatgcactataaaagagat

SEQ ID NO: 5960750 - DNA, 25 bp, Homo sapien
atggttgaagggattgcattcttac

SEQ ID NO: 5960751 - DNA, 25 bp, Homo sapien
gtttggtgcagatggcgatggcaag

SEQ ID NO: 5960752 - DNA, 25 bp, Homo sapien
agcattgttgagaggaatatgcctc

SEQ ID NO: 5960753 - DNA, 25 bp, Homo sapien
gcagaagttcattaattgtatcctg

SEQ ID NO: 5960754 - DNA, 25 bp, Homo sapien
aggttgcgcaacacggctcggttga

SEQ ID NO: 5960755 - DNA, 25 bp, Homo sapien
gcgatttcagactgatttgctcaat

SEQ ID NO: 5960756 - DNA, 25 bp, Homo sapien
attaattgtatcctggggatggttt

SEQ ID NO: 5960757 - DNA, 25 bp, Homo sapien
tggagtaaaatgctatgatggtggc

SEQ ID NO: 5960758 - DNA, 25 bp, Homo sapien
ggctcggttgatgcatttgttggta

SEQ ID NO: 5960759 - DNA, 25 bp, Homo sapien
aaatgggaagaggttgcgcaacacg

SEQ ID NO: 5960760 - DNA, 25 bp, Homo sapien
tcaatcggtattctttgtccttttt

SEQ ID NO: 5960761 - DNA, 25 bp, Homo sapien
gcgacgacatgaactcagatggaag

SEQ ID NO: 5960762 - DNA, 25 bp, Homo sapien
atgccattaaatgtctagcactaga

SEQ ID NO: 5960763 - DNA, 25 bp, Homo sapien
tgataattatttctcagtggttcca

SEQ ID NO: 5960764 - DNA, 25 bp, Homo sapien
aatcttgcaagaattagaaaagcca

SEQ ID NO: 5960765 - DNA, 25 bp, Homo sapien
cataattgattttggcatctcttat

SEQ ID NO: 5960766 - DNA, 25 bp, Homo sapien
atcctggggatggtttcattttcac

SEQ ID NO: 5960767 - DNA, 25 bp, Homo sapien
ttgtcctttttccggcaaatggttg

SEQ ID NO: 5960768 - DNA, 25 bp, Homo sapien
tcacaaacaagtgcggaacccatgg

SEQ ID NO: 5960769 - DNA, 25 bp, Homo sapien
ccacataacgccaaattcgaagtat

SEQ ID NO: 5960770 - DNA, 25 bp, Homo sapien
atatactaatcaattggacgtcaat

SEQ ID NO: 5960771 - DNA, 25 bp, Homo sapien
ttggtcaaatctactagaactgcta

SEQ ID NO: 5960772 - DNA, 25 bp, Homo sapien
catggatagcaaggtgacggatata

SEQ ID NO: 5960773 - DNA, 25 bp, Homo sapien
ccatgattgatgacggcagcgacga

SEQ ID NO: 5960774 - DNA, 25 bp, Homo sapien
gtatggggcacgttccggccatgat

SEQ ID NO: 5960775 - DNA, 25 bp, Homo sapien
gcgatggcaagtatgtactggacca

SEQ ID NO: 5960776 - DNA, 25 bp, Homo sapien
tatccccaaagttgtacataattga

SEQ ID NO: 5960777 - DNA, 25 bp, Homo sapien
aatgctatgatggtggcgtggacgt

SEQ ID NO: 5960778 - DNA, 25 bp, Homo sapien
acaggaatttacaaggccccagaag

SEQ ID NO: 5960779 - DNA, 25 bp, Homo sapien
aaatggttgaagggattgcattctt

SEQ ID NO: 5960780 - DNA, 25 bp, Homo sapien
tcttctagagtctaaggctaccgat

SEQ ID NO: 5960781 - DNA, 25 bp, Homo sapien
aaaccgcaaaatatcatgctaacaa

SEQ ID NO: 5960782 - DNA, 25 bp, Homo sapien
tttatgagttcatgcaaatgcacta

SEQ ID NO: 5960783 - DNA, 25 bp, Homo sapien
tcaaagtcaagcagaagttcattaa

SEQ ID NO: 5960784 - DNA, 25 bp, Homo sapien
ttagcattgttgagaggaatatgcc

SEQ ID NO: 5960785 - DNA, 25 bp, Homo sapien
agaaatgggaagaggttgcgcaaca

SEQ ID NO: 5960786 - DNA, 25 bp, Homo sapien
attgattttggcatctcttatgaca

SEQ ID NO: 5960787 - DNA, 25 bp, Homo sapien
tgttgcggacccccccgttcagaaa

SEQ ID NO: 5960788 - DNA, 25 bp, Homo sapien
attgttgcggacccccccgttcaga

SEQ ID NO: 5960789 - DNA, 25 bp, Homo sapien
tagaactgctaggatttataggtcg

SEQ ID NO: 5960790 - DNA, 25 bp, Homo sapien
tgcgcaacacggctcggttgatgca

SEQ ID NO: 5960791 - DNA, 25 bp, Homo sapien
aacctttatgagttcatgcaaatgc

SEQ ID NO: 5960792 - DNA, 25 bp, Homo sapien
acaagtgcggaacccatggatagca

SEQ ID NO: 5960793 - DNA, 25 bp, Homo sapien
atttctcagtggttccagagagaaa

SEQ ID NO: 5960794 - DNA, 25 bp, Homo sapien
tttccggcaaatggttgaagggatt

SEQ ID NO: 5960795 - DNA, 25 bp, Homo sapien
aaatatactaatcaattggacgtca

SEQ ID NO: 5960796 - DNA, 25 bp, Homo sapien
caattggacgtcaatcggtattctt

SEQ ID NO: 5960797 - DNA, 25 bp, Homo sapien
ggtcggatacatatgccattaaatg

SEQ ID NO: 5960798 - DNA, 25 bp, Homo sapien
atggcaaataactcacaaacaagtg

SEQ ID NO: 5960799 - DNA, 25 bp, Homo sapien
gaactgctaggatttataggtcgga

SEQ ID NO: 5960800 - DNA, 25 bp, Homo sapien
tgggcaacaaatgtaagcacatctt

SEQ ID NO: 5960801 - DNA, 25 bp, Homo sapien
aaggccccagaagtgctttttggag

SEQ ID NO: 5960802 - DNA, 25 bp, Homo sapien
ttctttgtcctttttccggcaaatg

SEQ ID NO: 5960803 - DNA, 25 bp, Homo sapien
tcaaatctactagaactgctaggat

SEQ ID NO: 5960804 - DNA, 25 bp, Homo sapien
gatagcaaggtgacggatataagca

SEQ ID NO: 5960805 - DNA, 25 bp, Homo sapien
tagcaaggtgacggatataagcaca

SEQ ID NO: 5960806 - DNA, 25 bp, Homo sapien
agaagttcattaattgtatcctggg

SEQ ID NO: 5960807 - DNA, 25 bp, Homo sapien
aacaagccgtatggggcacgttccg

SEQ ID NO: 5960808 - DNA, 25 bp, Homo sapien
tagacattacacactgtcagttggt

SEQ ID NO: 5960809 - DNA, 25 bp, Homo sapien
tggcgatggcaagtatgtactggac

SEQ ID NO: 5960810 - DNA, 25 bp, Homo sapien
cattttcaccaaacgaaagatggag

SEQ ID NO: 5960811 - DNA, 25 bp, Homo sapien
acatatgccattaaatgtctagcac

SEQ ID NO: 5960812 - DNA, 25 bp, Homo sapien
cgtgtggtcgttgttgataattatt

SEQ ID NO: 5960813 - DNA, 25 bp, Homo sapien
tttggcatctcttatgacatggcaa

SEQ ID NO: 5960814 - DNA, 25 bp, Homo sapien
attgtatcctggggatggtttcatt

SEQ ID NO: 5960815 - DNA, 25 bp, Homo sapien
cccagtatcccaattgttgcggacc

SEQ ID NO: 5960816 - DNA, 25 bp, Homo sapien
gcggacccccccgttcagaaatata

SEQ ID NO: 5960817 - DNA, 25 bp, Homo sapien
gacgtgtggtcgttgttgataatta

SEQ ID NO: 5960818 - DNA, 25 bp, Homo sapien
accgtatccccaaagttgtacataa

SEQ ID NO: 5960819 - DNA, 25 bp, Homo sapien
tgagaggaatatgcctcgactggac

SEQ ID NO: 5960820 - DNA, 25 bp, Homo sapien
caaataactcacaaacaagtgcgga

SEQ ID NO: 5960821 - DNA, 25 bp, Homo sapien
aagcgatttcagactgatttgctca

SEQ ID NO: 5960822 - DNA, 25 bp, Homo sapien
atttgctcaatattcgaaaagttgg

SEQ ID NO: 5960823 - DNA, 25 bp, Homo sapien
atggggcacgttccggccatgattg

SEQ ID NO: 5960824 - DNA, 25 bp, Homo sapien
aaaatgctatgatggtggcgtggac

SEQ ID NO: 5960825 - DNA, 25 bp, Homo sapien
ttcatgcaaatgcactataaaagag

SEQ ID NO: 5960826 - DNA, 25 bp, Homo sapien
agaaatatactaatcaattggacgt

SEQ ID NO: 5960827 - DNA, 25 bp, Homo sapien
cattgttgagaggaatatgcctcga

SEQ ID NO: 5960828 - DNA, 25 bp, Homo sapien
aacaaacaataccagcaccgtatcc

SEQ ID NO: 5960829 - DNA, 25 bp, Homo sapien
gcctcgactggacgagattgcggat

SEQ ID NO: 5960830 - DNA, 25 bp, Homo sapien
atcttacctcttctagagtctaagg

SEQ ID NO: 5960831 - DNA, 25 bp, Homo sapien
ctattgttgttgtttccctttgaag

SEQ ID NO: 5960832 - DNA, 25 bp, Homo sapien
acacggctcggttgatgcatttgtt

SEQ ID NO: 5960833 - DNA, 25 bp, Homo sapien
taggtcggatacatatgccattaaa

SEQ ID NO: 5960834 - DNA, 25 bp, Homo sapien
gttgcgcaacacggctcggttgatg

SEQ ID NO: 5960835 - DNA, 25 bp, Homo sapien
atcccagtatcccaattgttgcgga

SEQ ID NO: 5960836 - DNA, 25 bp, Homo sapien
ttccagagagaaacaagccgtatgg

SEQ ID NO: 5960837 - DNA, 25 bp, Homo sapien
gatttataggtcggatacatatgcc

SEQ ID NO: 5960838 - DNA, 25 bp, Homo sapien
catcaaaccgcaaaatatcatgcta

SEQ ID NO: 5960839 - DNA, 25 bp, Homo sapien
gttcattaattgtatcctggggatg

SEQ ID NO: 5960840 - DNA, 25 bp, Homo sapien
tacagattagcattgttgagaggaa

SEQ ID NO: 5960841 - DNA, 25 bp, Homo sapien
tggacgagattgcggatgtcaaagt

SEQ ID NO: 5960842 - DNA, 25 bp, Homo sapien
ttatttctcagtggttccagagaga

SEQ ID NO: 5960843 - DNA, 25 bp, Homo sapien
actcagatggaagcgatttcagact

SEQ ID NO: 5960844 - DNA, 25 bp, Homo sapien
caacaaatgtaagcacatcttacct

SEQ ID NO: 5960845 - DNA, 25 bp, Homo sapien
tttccctttgaagagatgaaccttt

SEQ ID NO: 5960846 - DNA, 25 bp, Homo sapien
ctagagtctaaggctaccgataata

SEQ ID NO: 5960847 - DNA, 25 bp, Homo sapien
cattaaatgtctagcactagatttc

SEQ ID NO: 5960848 - DNA, 25 bp, Homo sapien
ttgttgtttccctttgaagagatga

SEQ ID NO: 5960849 - DNA, 25 bp, Homo sapien
ttgttgagaggaatatgcctcgact

SEQ ID NO: 5960850 - DNA, 25 bp, Homo sapien
gatgaacctttatgagttcatgcaa

SEQ ID NO: 5960851 - DNA, 25 bp, Homo sapien
tggcatctcttatgacatggcaaat

SEQ ID NO: 5960852 - DNA, 25 bp, Homo sapien
ctactagaactgctaggatttatag

SEQ ID NO: 5960853 - DNA, 25 bp, Homo sapien
ggtgacggatataagcacaggaatt

SEQ ID NO: 5960854 - DNA, 25 bp, Homo sapien
ccgtatggggcacgttccggccatg

SEQ ID NO: 5960855 - DNA, 25 bp, Homo sapien
ctaacaaacaataccagcaccgtat

SEQ ID NO: 5960856 - DNA, 25 bp, Homo sapien
atctactagaactgctaggatttat

SEQ ID NO: 5960857 - DNA, 25 bp, Homo sapien
acacactgtcagttggtcaaatcta

SEQ ID NO: 5960858 - DNA, 25 bp, Homo sapien
aagttgtacataattgattttggca

SEQ ID NO: 5960859 - DNA, 25 bp, Homo sapien
tacataattgattttggcatctctt

SEQ ID NO: 5960860 - DNA, 25 bp, Homo sapien
aacaagatcattcaccgcgacatca

SEQ ID NO: 5960861 - DNA, 25 bp, Homo sapien
agatcattcaccgcgacatcaaacc

SEQ ID NO: 5960862 - DNA, 25 bp, Homo sapien
gttgatgcatttgttggtatgtttg

SEQ ID NO: 5960863 - DNA, 25 bp, Homo sapien
atatgcctcgactggacgagattgc

SEQ ID NO: 5960864 - DNA, 25 bp, Homo sapien
cgagattgcggatgtcaaagtcaag

SEQ ID NO: 5960865 - DNA, 25 bp, Homo sapien
ggcagcgacgacatgaactcagatg

SEQ ID NO: 5960866 - DNA, 25 bp, Homo sapien
aaatgtctagcactagatttcgata

SEQ ID NO: 5960867 - DNA, 25 bp, Homo sapien
ttctagagtctaaggctaccgataa

SEQ ID NO: 5960868 - DNA, 25 bp, Homo sapien
gggaagaggttgcgcaacacggctc

SEQ ID NO: 5960869 - DNA, 25 bp, Homo sapien
ctcagtggttccagagagaaacaag

SEQ ID NO: 5960870 - DNA, 25 bp, Homo sapien
gttgggcataccgtccattcagaaa

SEQ ID NO: 5960871 - DNA, 25 bp, Homo sapien
ataacgccaaattcgaagtatcgat

SEQ ID NO: 5960872 - DNA, 25 bp, Homo sapien
aaactgggcaacaaatgtaagcaca

SEQ ID NO: 5960873 - DNA, 25 bp, Homo sapien
tgaacctttatgagttcatgcaaat

SEQ ID NO: 5960874 - DNA, 25 bp, Homo sapien
tttggagtaaaatgctatgatggtg

SEQ ID NO: 5960875 - DNA, 25 bp, Homo sapien
gctttttggagtaaaatgctatgat

SEQ ID NO: 5960876 - DNA, 25 bp, Homo sapien
ggcataccgtccattcagaaatggg

SEQ ID NO: 5960877 - DNA, 25 bp, Homo sapien
gtcctttttccggcaaatggttgaa

SEQ ID NO: 5960878 - DNA, 25 bp, Homo sapien
aagtgcggaacccatggatagcaag

SEQ ID NO: 5960879 - DNA, 25 bp, Homo sapien
aagcagaagttcattaattgtatcc

SEQ ID NO: 5960880 - DNA, 25 bp, Homo sapien
tccggcaaatggttgaagggattgc

SEQ ID NO: 5960881 - DNA, 25 bp, Homo sapien
gatggtttcattttcaccaaacgaa

SEQ ID NO: 5960882 - DNA, 25 bp, Homo sapien
gatggcgatggcaagtatgtactgg

SEQ ID NO: 5960883 - DNA, 25 bp, Homo sapien
gtaagcacatcttacctcttctaga

SEQ ID NO: 5960884 - DNA, 25 bp, Homo sapien
aaaaaatccctattacgatttgcta

SEQ ID NO: 5960885 - DNA, 25 bp, Homo sapien
ggccccagaagtgctttttggagta

SEQ ID NO: 5960886 - DNA, 25 bp, Homo sapien
agggattgcattcttacatgagaac

SEQ ID NO: 5960887 - DNA, 25 bp, Homo sapien
tttataggtcggatacatatgccat

SEQ ID NO: 5960888 - DNA, 25 bp, Homo sapien
aacaataccagcaccgtatccccaa

SEQ ID NO: 5960889 - DNA, 25 bp, Homo sapien
aaatatcatgctaacaaacaatacc

SEQ ID NO: 5960890 - DNA, 25 bp, Homo sapien
gaatatgcctcgactggacgagatt

SEQ ID NO: 5960891 - DNA, 25 bp, Homo sapien
ttttcaccaaacgaaagatggagct

SEQ ID NO: 5960892 - DNA, 25 bp, Homo sapien
ccccccgttcagaaatatactaatc

SEQ ID NO: 5960893 - DNA, 25 bp, Homo sapien
atgattgatgacggcagcgacgaca

SEQ ID NO: 5960894 - DNA, 25 bp, Homo sapien
acataacgccaaattcgaagtatcg

SEQ ID NO: 5960895 - DNA, 25 bp, Homo sapien
aagttgggcataccgtccattcaga

SEQ ID NO: 5960896 - DNA, 25 bp, Homo sapien
tgcggatgtcaaagtcaagcagaag

SEQ ID NO: 5960897 - DNA, 25 bp, Homo sapien
gagatgaacctttatgagttcatgc

SEQ ID NO: 5960898 - DNA, 25 bp, Homo sapien
gagtaaaatgctatgatggtggcgt

SEQ ID NO: 5960899 - DNA, 25 bp, Homo sapien
cctttgaagagatgaacctttatga

SEQ ID NO: 5960900 - DNA, 25 bp, Homo sapien
ttacacactgtcagttggtcaaatc

SEQ ID NO: 5960901 - DNA, 25 bp, Homo sapien
aaatgtaagcacatcttacctcttc

SEQ ID NO: 5960902 - DNA, 25 bp, Homo sapien
gcaagtatgtactggaccaggagaa

SEQ ID NO: 5960903 - DNA, 25 bp, Homo sapien
aacccatggatagcaaggtgacgga

SEQ ID NO: 5960904 - DNA, 25 bp, Homo sapien
attggacgtcaatcggtattctttg

SEQ ID NO: 5960905 - DNA, 25 bp, Homo sapien
ccccgttcagaaatatactaatcaa

SEQ ID NO: 5960906 - DNA, 25 bp, Homo sapien
tgtttccctttgaagagatgaacct

SEQ ID NO: 5960907 - DNA, 25 bp, Homo sapien
aacgccaaattcgaagtatcgatat

SEQ ID NO: 5960908 - DNA, 25 bp, Homo sapien
tggtttcattttcaccaaacgaaag

SEQ ID NO: 5960909 - DNA, 25 bp, Homo sapien
ttcgatatcccgccacataacgcca

SEQ ID NO: 5960910 - DNA, 25 bp, Homo sapien
gcacaggaatttacaaggccccaga

SEQ ID NO: 5960911 - DNA, 25 bp, Homo sapien
ggtcaaatctactagaactgctagg

SEQ ID NO: 5960912 - DNA, 25 bp, Homo sapien
tcagaaatatactaatcaattggac

SEQ ID NO: 5960913 - DNA, 25 bp, Homo sapien
acatgaactcagatggaagcgattt

SEQ ID NO: 5960914 - DNA, 25 bp, Homo sapien
caccgcgacatcaaaccgcaaaata

SEQ ID NO: 5960915 - DNA, 25 bp, Homo sapien
cccatggatagcaaggtgacggata

SEQ ID NO: 5960916 - DNA, 25 bp, Homo sapien
tggtggcgtggacgtgtggtcgttg

SEQ ID NO: 5960917 - DNA, 25 bp, Homo sapien
caaaatatcatgctaacaaacaata

SEQ ID NO: 5960918 - DNA, 25 bp, Homo sapien
acatggcaaataactcacaaacaag

SEQ ID NO: 5960919 - DNA, 25 bp, Homo sapien
gcggaacccatggatagcaaggtga

SEQ ID NO: 5960920 - DNA, 25 bp, Homo sapien
tcaaaccgcaaaatatcatgctaac

SEQ ID NO: 5960921 - DNA, 25 bp, Homo sapien
gctgtcaaagaatcttgcaagaatt

SEQ ID NO: 5960922 - DNA, 25 bp, Homo sapien
tattacgatttgctaaatcccagta

SEQ ID NO: 5960923 - DNA, 25 bp, Homo sapien
gttgataattatttctcagtggttc

SEQ ID NO: 5960924 - DNA, 25 bp, Homo sapien
taactcacaaacaagtgcggaaccc

SEQ ID NO: 5960925 - DNA, 25 bp, Homo sapien
gcgacatcaaaccgcaaaatatcat

SEQ ID NO: 5960926 - DNA, 25 bp, Homo sapien
tggagctgtcaaagaatcttgcaag

SEQ ID NO: 5960927 - DNA, 25 bp, Homo sapien
catgagaacaagatcattcaccgcg

SEQ ID NO: 5960928 - DNA, 25 bp, Homo sapien
cagatggcgatggcaagtatgtact

SEQ ID NO: 5960929 - DNA, 25 bp, Homo sapien
atataagcacaggaatttacaaggc

SEQ ID NO: 5960930 - DNA, 25 bp, Homo sapien
ggattgcattcttacatgagaacaa

SEQ ID NO: 5960931 - DNA, 25 bp, Homo sapien
cactagatttcgatatcccgccaca

SEQ ID NO: 5960932 - DNA, 25 bp, Homo sapien
tttcagactgatttgctcaatattc

SEQ ID NO: 5960933 - DNA, 25 bp, Homo sapien
tataggtcggatacatatgccatta

SEQ ID NO: 5960934 - DNA, 25 bp, Homo sapien
ttaaacaaactgggcaacaaatgta

SEQ ID NO: 5960935 - DNA, 25 bp, Homo sapien
ggtattctttgtcctttttccggca

SEQ ID NO: 5960936 - DNA, 25 bp, Homo sapien
cattcaccgcgacatcaaaccgcaa

SEQ ID NO: 5960937 - DNA, 25 bp, Homo sapien
aaattcgaagtatcgatattaaaca

SEQ ID NO: 5960938 - DNA, 25 bp, Homo sapien
cgccaaattcgaagtatcgatatta

SEQ ID NO: 5960939 - DNA, 25 bp, Homo sapien
ttcttacatgagaacaagatcattc

SEQ ID NO: 5960940 - DNA, 25 bp, Homo sapien
ttgaagggattgcattcttacatga

SEQ ID NO: 5960941 - DNA, 25 bp, Homo sapien
caacacggctcggttgatgcatttg

SEQ ID NO: 5960942 - DNA, 25 bp, Homo sapien
tgctaaatcccagtatcccaattgt

SEQ ID NO: 5960943 - DNA, 25 bp, Homo sapien
agcactagatttcgatatcccgcca

SEQ ID NO: 5960944 - DNA, 25 bp, Homo sapien
agattgcggatgtcaaagtcaagca

SEQ ID NO: 5960945 - DNA, 25 bp, Homo sapien
aatattcgaaaagttgggcataccg

SEQ ID NO: 5960946 - DNA, 25 bp, Homo sapien
actagaactgctaggatttataggt

SEQ ID NO: 5960947 - DNA, 25 bp, Homo sapien
atatcatgctaacaaacaataccag

SEQ ID NO: 5960948 - DNA, 25 bp, Homo sapien
tatagacattacacactgtcagttg

SEQ ID NO: 5960949 - DNA, 25 bp, Homo sapien
tgtcagttggtcaaatctactagaa

SEQ ID NO: 5960950 - DNA, 25 bp, Homo sapien
taccgtccattcagaaatgggaaga

SEQ ID NO: 5960951 - DNA, 25 bp, Homo sapien
atcattcaccgcgacatcaaaccgc

SEQ ID NO: 5960952 - DNA, 25 bp, Homo sapien
ttgttgataattatttctcagtggt

SEQ ID NO: 5960953 - DNA, 25 bp, Homo sapien
gcaaggtgacggatataagcacagg

SEQ ID NO: 5960954 - DNA, 25 bp, Homo sapien
agaggttgcgcaacacggctcggtt

SEQ ID NO: 5960955 - DNA, 25 bp, Homo sapien
gcatctcttatgacatggcaaataa

SEQ ID NO: 5960956 - DNA, 25 bp, Homo sapien
ataagcacaggaatttacaaggccc

SEQ ID NO: 5960957 - DNA, 25 bp, Homo sapien
atagtatagacattacacactgtca

SEQ ID NO: 5960958 - DNA, 25 bp, Homo sapien
aatgacctattgttgttgtttccct

SEQ ID NO: 5960959 - DNA, 25 bp, Homo sapien
aataactcacaaacaagtgcggaac

SEQ ID NO: 5960960 - DNA, 25 bp, Homo sapien
gctaccgataataatgacctattgt

SEQ ID NO: 5960961 - DNA, 25 bp, Homo sapien
aaagaatcttgcaagaattagaaaa

SEQ ID NO: 5960962 - DNA, 25 bp, Homo sapien
tattctttgtcctttttccggcaaa

SEQ ID NO: 5960963 - DNA, 25 bp, Homo sapien
gtcgttgttgataattatttctcag

SEQ ID NO: 5960964 - DNA, 25 bp, Homo sapien
atcatgctaacaaacaataccagca

SEQ ID NO: 5960965 - DNA, 25 bp, Homo sapien
ttacgatttgctaaatcccagtatc

SEQ ID NO: 5960966 - DNA, 25 bp, Homo sapien
gatggcaagtatgtactggaccagg

SEQ ID NO: 5960967 - DNA, 25 bp, Homo sapien
gacatcaaaccgcaaaatatcatgc

SEQ ID NO: 5960968 - DNA, 25 bp, Homo sapien
ggaacccatggatagcaaggtgacg

SEQ ID NO: 5960969 - DNA, 25 bp, Homo sapien
tatgacatggcaaataactcacaaa

SEQ ID NO: 5960970 - DNA, 25 bp, Homo sapien
attcgaagtatcgatattaaacaaa

SEQ ID NO: 5960971 - DNA, 25 bp, Homo sapien
acggcagcgacgacatgaactcaga

SEQ ID NO: 5960972 - DNA, 25 bp, Homo sapien
gtatcccaattgttgcggacccccc

SEQ ID NO: 5960973 - DNA, 25 bp, Homo sapien
accagcaccgtatccccaaagttgt

SEQ ID NO: 5960974 - DNA, 25 bp, Homo sapien
gattgatgacggcagcgacgacatg

SEQ ID NO: 5960975 - DNA, 25 bp, Homo sapien
ggttgaagggattgcattcttacat

SEQ ID NO: 5960976 - DNA, 25 bp, Homo sapien
ggggcacgttccggccatgattgat

SEQ ID NO: 5960977 - DNA, 25 bp, Homo sapien
tggacgtcaatcggtattctttgtc

SEQ ID NO: 5960978 - DNA, 25 bp, Homo sapien
ggatagtatagacattacacactgt

SEQ ID NO: 5960979 - DNA, 25 bp, Homo sapien
attcagaaatgggaagaggttgcgc

SEQ ID NO: 5960980 - DNA, 25 bp, Homo sapien
agccgtatggggcacgttccggcca

SEQ ID NO: 5960981 - DNA, 25 bp, Homo sapien
gatggagctgtcaaagaatcttgca

SEQ ID NO: 5960982 - DNA, 25 bp, Homo sapien
aaatctactagaactgctaggattt

SEQ ID NO: 5960983 - DNA, 25 bp, Homo sapien
aaacgaaagatggagctgtcaaaga

SEQ ID NO: 5960984 - DNA, 25 bp, Homo sapien
actgtcagttggtcaaatctactag

SEQ ID NO: 5960985 - DNA, 25 bp, Homo sapien
gttcagaaatatactaatcaattgg

SEQ ID NO: 5960986 - DNA, 25 bp, Homo sapien
cctcttctagagtctaaggctaccg

SEQ ID NO: 5960987 - DNA, 25 bp, Homo sapien
tcagaaatgggaagaggttgcgcaa

SEQ ID NO: 5960988 - DNA, 25 bp, Homo sapien
ctagcactagatttcgatatcccgc

SEQ ID NO: 5960989 - DNA, 25 bp, Homo sapien
aaacaaactgggcaacaaatgtaag

SEQ ID NO: 5960990 - DNA, 25 bp, Homo sapien
catgctaacaaacaataccagcacc

SEQ ID NO: 5960991 - DNA, 25 bp, Homo sapien
cgacatgaactcagatggaagcgat

SEQ ID NO: 5960992 - DNA, 25 bp, Homo sapien
cagcaccgtatccccaaagttgtac

SEQ ID NO: 5960993 - DNA, 25 bp, Homo sapien
ctcttatgacatggcaaataactca

SEQ ID NO: 5960994 - DNA, 25 bp, Homo sapien
gcaaatggttgaagggattgcattc

SEQ ID NO: 5960995 - DNA, 25 bp, Homo sapien
agaatcttgcaagaattagaaaagc

SEQ ID NO: 5960996 - DNA, 25 bp, Homo sapien
accgcaaaatatcatgctaacaaac

SEQ ID NO: 5960997 - DNA, 25 bp, Homo sapien
tggtatgtttggtgcagatggcgat

SEQ ID NO: 5960998 - DNA, 25 bp, Homo sapien
ttacaaggccccagaagtgcttttt

SEQ ID NO: 5960999 - DNA, 25 bp, Homo sapien
tggacgtgtggtcgttgttgataat

SEQ ID NO: 5961000 - DNA, 25 bp, Homo sapien
gaaactggatagtatagacattaca

SEQ ID NO: 5961001 - DNA, 25 bp, Homo sapien
tttgaagagatgaacctttatgagt

SEQ ID NO: 5961002 - DNA, 25 bp, Homo sapien
cgttgttgataattatttctcagtg

SEQ ID NO: 5961003 - DNA, 25 bp, Homo sapien
acggctcggttgatgcatttgttgg

SEQ ID NO: 5961004 - DNA, 25 bp, Homo sapien
gttgagaggaatatgcctcgactgg

SEQ ID NO: 5961005 - DNA, 25 bp, Homo sapien
agaggaatatgcctcgactggacga

SEQ ID NO: 5961006 - DNA, 25 bp, Homo sapien
aaaagttgggcataccgtccattca

SEQ ID NO: 5961007 - DNA, 25 bp, Homo sapien
ttgctcaatattcgaaaagttgggc

SEQ ID NO: 5961008 - DNA, 25 bp, Homo sapien
ggatataagcacaggaatttacaag

SEQ ID NO: 5961009 - DNA, 25 bp, Homo sapien
gagaaagatgtacagattagcattg

SEQ ID NO: 5961010 - DNA, 25 bp, Homo sapien
taaggctaccgataataatgaccta

SEQ ID NO: 5961011 - DNA, 25 bp, Homo sapien
taattgtatcctggggatggtttca

SEQ ID NO: 5961012 - DNA, 25 bp, Homo sapien
tgagaacaagatcattcaccgcgac

SEQ ID NO: 5961013 - DNA, 25 bp, Homo sapien
tcgaagtatcgatattaaacaaact

SEQ ID NO: 5961014 - DNA, 25 bp, Homo sapien
ccgttcagaaatatactaatcaatt

SEQ ID NO: 5961015 - DNA, 25 bp, Homo sapien
gatttcagactgatttgctcaatat

SEQ ID NO: 5961016 - DNA, 25 bp, Homo sapien
ctatgatggtggcgtggacgtgtgg

SEQ ID NO: 5961017 - DNA, 25 bp, Homo sapien
ctggatagtatagacattacacact

SEQ ID NO: 5961018 - DNA, 25 bp, Homo sapien
gacccccccgttcagaaatatacta

SEQ ID NO: 5961019 - DNA, 25 bp, Homo sapien
tgatgcatttgttggtatgtttggt

SEQ ID NO: 5961020 - DNA, 25 bp, Homo sapien
ttcaccgcgacatcaaaccgcaaaa

SEQ ID NO: 5961021 - DNA, 25 bp, Homo sapien
ccgcgacatcaaaccgcaaaatatc

SEQ ID NO: 5961022 - DNA, 25 bp, Homo sapien
aagcacaggaatttacaaggcccca

SEQ ID NO: 5961023 - DNA, 25 bp, Homo sapien
tgcagatggcgatggcaagtatgta

SEQ ID NO: 5961024 - DNA, 25 bp, Homo sapien
gaatttacaaggccccagaagtgct

SEQ ID NO: 5961025 - DNA, 25 bp, Homo sapien
tgctatgatggtggcgtggacgtgt

SEQ ID NO: 5961026 - DNA, 25 bp, Homo sapien
acatcttacctcttctagagtctaa

SEQ ID NO: 5961027 - DNA, 25 bp, Homo sapien
ggccatgattgatgacggcagcgac

SEQ ID NO: 5961028 - DNA, 25 bp, Homo sapien
ttcgaaaagttgggcataccgtcca

SEQ ID NO: 5961029 - DNA, 25 bp, Homo sapien
acggatataagcacaggaatttaca

SEQ ID NO: 5961030 - DNA, 25 bp, Homo sapien
agatggaagcgatttcagactgatt

SEQ ID NO: 5961031 - DNA, 25 bp, Homo sapien
cctattacgatttgctaaatcccag

SEQ ID NO: 5961032 - DNA, 25 bp, Homo sapien
gaaagatgtacagattagcattgtt

SEQ ID NO: 5961033 - DNA, 25 bp, Homo sapien
gccattaaatgtctagcactagatt

SEQ ID NO: 5961034 - DNA, 25 bp, Homo sapien
cttacctcttctagagtctaaggct

SEQ ID NO: 5961035 - DNA, 25 bp, Homo sapien
gtaaaatgctatgatggtggcgtgg

SEQ ID NO: 5961036 - DNA, 25 bp, Homo sapien
tgatttgctcaatattcgaaaagtt

SEQ ID NO: 5961037 - DNA, 25 bp, Homo sapien
tgcaaatgcactataaaagagatag

SEQ ID NO: 5961038 - DNA, 25 bp, Homo sapien
ttctcagtggttccagagagaaaca

SEQ ID NO: 5961039 - DNA, 25 bp, Homo sapien
gtctagcactagatttcgatatccc

SEQ ID NO: 5961040 - DNA, 25 bp, Homo sapien
tgagttcatgcaaatgcactataaa

SEQ ID NO: 5961041 - DNA, 25 bp, Homo sapien
tttttggagtaaaatgctatgatgg

SEQ ID NO: 5961042 - DNA, 25 bp, Homo sapien
ccaaacgaaagatggagctgtcaaa

SEQ ID NO: 5961043 - DNA, 25 bp, Homo sapien
agatttcgatatcccgccacataac

SEQ ID NO: 5961044 - DNA, 25 bp, Homo sapien
tattcgaaaagttgggcataccgtc

SEQ ID NO: 5961045 - DNA, 25 bp, Homo sapien
tgtggtcgttgttgataattatttc

SEQ ID NO: 5961046 - DNA, 25 bp, Homo sapien
tcattaattgtatcctggggatggt

SEQ ID NO: 5961047 - DNA, 25 bp, Homo sapien
atcccgccacataacgccaaattcg

SEQ ID NO: 5961048 - DNA, 25 bp, Homo sapien
atttacaaggccccagaagtgcttt

SEQ ID NO: 5961049 - DNA, 25 bp, Homo sapien
cgtggacgtgtggtcgttgttgata

SEQ ID NO: 5961050 - DNA, 25 bp, Homo sapien
cgccacataacgccaaattcgaagt

SEQ ID NO: 5961051 - DNA, 25 bp, Homo sapien
gagagaaacaagccgtatggggcac

SEQ ID NO: 5961052 - DNA, 25 bp, Homo sapien
cccgccacataacgccaaattcgaa

SEQ ID NO: 5961053 - DNA, 25 bp, Homo sapien
gatattaaacaaactgggcaacaaa

SEQ ID NO: 5961054 - DNA, 25 bp, Homo sapien
tgtcaaagaatcttgcaagaattag

SEQ ID NO: 5961055 - DNA, 25 bp, Homo sapien
ggcgtggacgtgtggtcgttgttga

SEQ ID NO: 5961056 - DNA, 25 bp, Homo sapien
ccgtccattcagaaatgggaagagg

SEQ ID NO: 5961057 - DNA, 25 bp, Homo sapien
atatgccattaaatgtctagcacta

SEQ ID NO: 5961058 - DNA, 25 bp, Homo sapien
ttgatgacggcagcgacgacatgaa

SEQ ID NO: 5961059 - DNA, 25 bp, Homo sapien
gatggtggcgtggacgtgtggtcgt

SEQ ID NO: 5961060 - DNA, 25 bp, Homo sapien
ggatacatatgccattaaatgtcta

SEQ ID NO: 5961061 - DNA, 25 bp, Homo sapien
taccgataataatgacctattgttg

SEQ ID NO: 5961062 - DNA, 25 bp, Homo sapien
atgggaagaggttgcgcaacacggc

SEQ ID NO: 5961063 - DNA, 25 bp, Homo sapien
acgaaagatggagctgtcaaagaat

SEQ ID NO: 5961064 - DNA, 25 bp, Homo sapien
aagtatgtactggaccaggagaaag

SEQ ID NO: 5961065 - DNA, 25 bp, Homo sapien
ggcaacaaatgtaagcacatcttac

SEQ ID NO: 5961066 - DNA, 25 bp, Homo sapien
gctcaatattcgaaaagttgggcat

SEQ ID NO: 5961067 - DNA, 25 bp, Homo sapien
tttttccggcaaatggttgaaggga

SEQ ID NO: 5961068 - DNA, 25 bp, Homo sapien
ccggccatgattgatgacggcagcg

SEQ ID NO: 5961069 - DNA, 25 bp, Homo sapien
cttatgacatggcaaataactcaca

SEQ ID NO: 5961070 - DNA, 25 bp, Homo sapien
actggacgagattgcggatgtcaaa

SEQ ID NO: 5961071 - DNA, 25 bp, Homo sapien
gtttcattttcaccaaacgaaagat

SEQ ID NO: 5961072 - DNA, 25 bp, Homo sapien
actcacaaacaagtgcggaacccat

SEQ ID NO: 5961073 - DNA, 25 bp, Homo sapien
cacgttccggccatgattgatgacg

SEQ ID NO: 5961074 - DNA, 25 bp, Homo sapien
caaacaataccagcaccgtatcccc

SEQ ID NO: 5961075 - DNA, 25 bp, Homo sapien
gtccattcagaaatgggaagaggtt

SEQ ID NO: 5961076 - DNA, 25 bp, Homo sapien
aggatttataggtcggatacatatg

SEQ ID NO: 5961077 - DNA, 25 bp, Homo sapien
cagattagcattgttgagaggaata

SEQ ID NO: 5961078 - DNA, 25 bp, Homo sapien
gtgcggaacccatggatagcaaggt

SEQ ID NO: 5961079 - DNA, 25 bp, Homo sapien
ctcgactggacgagattgcggatgt

SEQ ID NO: 5961080 - DNA, 25 bp, Homo sapien
cgttccggccatgattgatgacggc

SEQ ID NO: 5961081 - DNA, 25 bp, Homo sapien
gggatggtttcattttcaccaaacg

SEQ ID NO: 5961082 - DNA, 25 bp, Homo sapien
ttcattttcaccaaacgaaagatgg

SEQ ID NO: 5961083 - DNA, 25 bp, Homo sapien
acgatttgctaaatcccagtatccc

SEQ ID NO: 5961084 - DNA, 25 bp, Homo sapien
actaatcaattggacgtcaatcggt

SEQ ID NO: 5961085 - DNA, 25 bp, Homo sapien
ttgcggacccccccgttcagaaata

SEQ ID NO: 5961086 - DNA, 25 bp, Homo sapien
tatcgatattaaacaaactgggcaa

SEQ ID NO: 5961087 - DNA, 25 bp, Homo sapien
tcgatattaaacaaactgggcaaca

SEQ ID NO: 5961088 - DNA, 25 bp, Homo sapien
ataatgacctattgttgttgtttcc

SEQ ID NO: 5961089 - DNA, 25 bp, Homo sapien
gagctgtcaaagaatcttgcaagaa

SEQ ID NO: 5961090 - DNA, 25 bp, Homo sapien
tggcaagtatgtactggaccaggag

SEQ ID NO: 5961091 - DNA, 25 bp, Homo sapien
ccaggagaaagatgtacagattagc

SEQ ID NO: 5961092 - DNA, 25 bp, Homo sapien
atatcccgccacataacgccaaatt

SEQ ID NO: 5961093 - DNA, 25 bp, Homo sapien
tggtcgttgttgataattatttctc

SEQ ID NO: 5961094 - DNA, 25 bp, Homo sapien
gacattacacactgtcagttggtca

SEQ ID NO: 5961095 - DNA, 25 bp, Homo sapien
actgatttgctcaatattcgaaaag

SEQ ID NO: 5961096 - DNA, 25 bp, Homo sapien
aggctaccgataataatgacctatt

SEQ ID NO: 5961097 - DNA, 25 bp, Homo sapien
tgacggcagcgacgacatgaactca

SEQ ID NO: 5961098 - DNA, 25 bp, Homo sapien
atgcctcgactggacgagattgcgg

SEQ ID NO: 5961099 - DNA, 25 bp, Homo sapien
gagaaacaagccgtatggggcacgt

SEQ ID NO: 5961100 - DNA, 25 bp, Homo sapien
atgtaagcacatcttacctcttcta

SEQ ID NO: 5961101 - DNA, 25 bp, Homo sapien
actggaccaggagaaagatgtacag

SEQ ID NO: 5961102 - DNA, 25 bp, Homo sapien
ctaggatttataggtcggatacata

SEQ ID NO: 5961103 - DNA, 25 bp, Homo sapien
aaacaagtgcggaacccatggatag

SEQ ID NO: 5961104 - DNA, 25 bp, Homo sapien
agttggtcaaatctactagaactgc

SEQ ID NO: 5961105 - DNA, 25 bp, Homo sapien
acctattgttgttgtttccctttga

SEQ ID NO: 5961106 - DNA, 25 bp, Homo sapien
tcggatacatatgccattaaatgtc

SEQ ID NO: 5961107 - DNA, 25 bp, Homo sapien
tttgctaaatcccagtatcccaatt

SEQ ID NO: 5961108 - DNA, 25 bp, Homo sapien
gatgtacagattagcattgttgaga

SEQ ID NO: 5961109 - DNA, 25 bp, Homo sapien
cgcaacacggctcggttgatgcatt

SEQ ID NO: 5961110 - DNA, 25 bp, Homo sapien
acaaacaagtgcggaacccatggat

SEQ ID NO: 5961111 - DNA, 25 bp, Homo sapien
cggttgatgcatttgttggtatgtt

SEQ ID NO: 5961112 - DNA, 25 bp, Homo sapien
ccgataataatgacctattgttgtt

SEQ ID NO: 5961113 - DNA, 25 bp, Homo sapien
ctagatttcgatatcccgccacata

SEQ ID NO: 5961114 - DNA, 25 bp, Homo sapien
attgcattcttacatgagaacaaga

SEQ ID NO: 5961115 - DNA, 25 bp, Homo sapien
aagagatgaacctttatgagttcat

SEQ ID NO: 5961116 - DNA, 25 bp, Homo sapien
gtgctttttggagtaaaatgctatg

SEQ ID NO: 5961117 - DNA, 25 bp, Homo sapien
tgacggatataagcacaggaattta

SEQ ID NO: 5961118 - DNA, 25 bp, Homo sapien
cttacatgagaacaagatcattcac

SEQ ID NO: 5961119 - DNA, 25 bp, Homo sapien
tgtcaaagtcaagcagaagttcatt

SEQ ID NO: 5961120 - DNA, 25 bp, Homo sapien
ttggtgcagatggcgatggcaagta

SEQ ID NO: 5961121 - DNA, 25 bp, Homo sapien
gtggcgtggacgtgtggtcgttgtt

SEQ ID NO: 5961122 - DNA, 25 bp, Homo sapien
gaactcagatggaagcgatttcaga

SEQ ID NO: 5961123 - DNA, 25 bp, Homo sapien
gatgacggcagcgacgacatgaact

SEQ ID NO: 5961124 - DNA, 25 bp, Homo sapien
agaacaagatcattcaccgcgacat

SEQ ID NO: 5961125 - DNA, 25 bp, Homo sapien
cggatgtcaaagtcaagcagaagtt

SEQ ID NO: 5961126 - DNA, 25 bp, Homo sapien
aggaatatgcctcgactggacgaga

SEQ ID NO: 5961127 - DNA, 25 bp, Homo sapien
agaagtgctttttggagtaaaatgc

SEQ ID NO: 5961128 - DNA, 25 bp, Homo sapien
actgctaggatttataggtcggata

SEQ ID NO: 5961129 - DNA, 25 bp, Homo sapien
ggcaaataactcacaaacaagtgcg

SEQ ID NO: 5961130 - DNA, 25 bp, Homo sapien
atactaatcaattggacgtcaatcg

SEQ ID NO: 5961131 - DNA, 25 bp, Homo sapien
atgtttggtgcagatggcgatggca

SEQ ID NO: 5961132 - DNA, 25 bp, Homo sapien
atgtactggaccaggagaaagatgt

SEQ ID NO: 5961133 - DNA, 25 bp, Homo sapien
ataattatttctcagtggttccaga

SEQ ID NO: 5961134 - DNA, 25 bp, Homo sapien
gtactggaccaggagaaagatgtac

SEQ ID NO: 5961135 - DNA, 25 bp, Homo sapien
cagcgacgacatgaactcagatgga

SEQ ID NO: 5961136 - DNA, 25 bp, Homo sapien
taattgattttggcatctcttatga

SEQ ID NO: 5961137 - DNA, 25 bp, Homo sapien
aagatgtacagattagcattgttga

SEQ ID NO: 5961138 - DNA, 25 bp, Homo sapien
ccccagaagtgctttttggagtaaa

SEQ ID NO: 5961139 - DNA, 25 bp, Homo sapien
aattatttctcagtggttccagaga

SEQ ID NO: 5961140 - DNA, 25 bp, Homo sapien
atctcttatgacatggcaaataact

SEQ ID NO: 5961141 - DNA, 25 bp, Homo sapien
agtatagacattacacactgtcagt

SEQ ID NO: 5961142 - DNA, 25 bp, Homo sapien
ggtgcagatggcgatggcaagtatg

SEQ ID NO: 5961143 - DNA, 25 bp, Homo sapien
cataccgtccattcagaaatgggaa

SEQ ID NO: 5961144 - DNA, 25 bp, Homo sapien
caagccgtatggggcacgttccggc

SEQ ID NO: 5961145 - DNA, 25 bp, Homo sapien
agtcaagcagaagttcattaattgt

SEQ ID NO: 5961146 - DNA, 25 bp, Homo sapien
aaggtgacggatataagcacaggaa

SEQ ID NO: 5961147 - DNA, 25 bp, Homo sapien
aaaatccctattacgatttgctaaa

SEQ ID NO: 5961148 - DNA, 25 bp, Homo sapien
gacgagattgcggatgtcaaagtca

SEQ ID NO: 5961149 - DNA, 25 bp, Homo sapien
aagcacatcttacctcttctagagt

SEQ ID NO: 5961150 - DNA, 25 bp, Homo sapien
gaagtatcgatattaaacaaactgg

SEQ ID NO: 5961151 - DNA, 25 bp, Homo sapien
tcaagcagaagttcattaattgtat

SEQ ID NO: 5961152 - DNA, 25 bp, Homo sapien
cgatatcccgccacataacgccaaa

SEQ ID NO: 5961153 - DNA, 25 bp, Homo sapien
atacatatgccattaaatgtctagc

SEQ ID NO: 5961154 - DNA, 25 bp, Homo sapien
ggttccagagagaaacaagccgtat

SEQ ID NO: 5961155 - DNA, 25 bp, Homo sapien
ccaaattcgaagtatcgatattaaa

SEQ ID NO: 5961156 - DNA, 25 bp, Homo sapien
tcagactgatttgctcaatattcga

SEQ ID NO: 5961157 - DNA, 25 bp, Homo sapien
atcaattggacgtcaatcggtattc

SEQ ID NO: 5961158 - DNA, 25 bp, Homo sapien
agtctaaggctaccgataataatga

SEQ ID NO: 5961159 - DNA, 25 bp, Homo sapien
cccaaagttgtacataattgatttt

SEQ ID NO: 5961160 - DNA, 25 bp, Homo sapien
gcatttgttggtatgtttggtgcag

SEQ ID NO: 5961161 - DNA, 25 bp, Homo sapien
tggaccaggagaaagatgtacagat

SEQ ID NO: 5961162 - DNA, 25 bp, Homo sapien
ctaaatcccagtatcccaattgttg

SEQ ID NO: 5961163 - DNA, 25 bp, Homo sapien
gtatgtactggaccaggagaaagat

SEQ ID NO: 5961164 - DNA, 25 bp, Homo sapien
attgcggatgtcaaagtcaagcaga

SEQ ID NO: 5961165 - DNA, 25 bp, Homo sapien
acaaggccccagaagtgctttttgg

SEQ ID NO: 5961166 - DNA, 25 bp, Homo sapien
caattgttgcggacccccccgttca

SEQ ID NO: 5961167 - DNA, 25 bp, Homo sapien
gatgtcaaagtcaagcagaagttca

SEQ ID NO: 5961168 - DNA, 25 bp, Homo sapien
cgactggacgagattgcggatgtca

SEQ ID NO: 5961169 - DNA, 25 bp, Homo sapien
gacgtcaatcggtattctttgtcct

SEQ ID NO: 5961170 - DNA, 25 bp, Homo sapien
cattcttacatgagaacaagatcat

SEQ ID NO: 5961171 - DNA, 25 bp, Homo sapien
ttgttggtatgtttggtgcagatgg

SEQ ID NO: 5961172 - DNA, 25 bp, Homo sapien
tgctaggatttataggtcggataca

SEQ ID NO: 5961173 - DNA, 25 bp, Homo sapien
gttggtatgtttggtgcagatggcg

SEQ ID NO: 5961174 - DNA, 25 bp, Homo sapien
atttcgatatcccgccacataacgc

SEQ ID NO: 5961175 - DNA, 25 bp, Homo sapien
tgcattcttacatgagaacaagatc

SEQ ID NO: 5961176 - DNA, 25 bp, Homo sapien
caagatcattcaccgcgacatcaaa

SEQ ID NO: 5961177 - DNA, 25 bp, Homo sapien
agactgatttgctcaatattcgaaa

SEQ ID NO: 5961178 - DNA, 25 bp, Homo sapien
tgctaacaaacaataccagcaccgt

SEQ ID NO: 5961179 - DNA, 25 bp, Homo sapien
tatgagttcatgcaaatgcactata

SEQ ID NO: 5961180 - DNA, 25 bp, Homo sapien
tccctattacgatttgctaaatccc

SEQ ID NO: 5961181 - DNA, 25 bp, Homo sapien
cctggggatggtttcattttcacca

SEQ ID NO: 5961182 - DNA, 25 bp, Homo sapien
tctaaggctaccgataataatgacc

SEQ ID NO: 5961183 - DNA, 25 bp, Homo sapien
cggcaaatggttgaagggattgcat

SEQ ID NO: 5961184 - DNA, 25 bp, Homo sapien
attgttgttgtttccctttgaagag

SEQ ID NO: 5961185 - DNA, 25 bp, Homo sapien
tcttgcaagaattagaaaagccata

SEQ ID NO: 5961186 - DNA, 25 bp, Homo sapien
taataatgacctattgttgttgttt

SEQ ID NO: 5961187 - DNA, 25 bp, Homo sapien
tacatgagaacaagatcattcaccg

SEQ ID NO: 5961188 - DNA, 25 bp, Homo sapien
aaatcccagtatcccaattgttgcg

SEQ ID NO: 5961189 - DNA, 25 bp, Homo sapien
ccattcagaaatgggaagaggttgc

SEQ ID NO: 5961190 - DNA, 25 bp, Homo sapien
gcacatcttacctcttctagagtct

SEQ ID NO: 5961191 - DNA, 25 bp, Homo sapien
cagtatcccaattgttgcggacccc

SEQ ID NO: 5961192 - DNA, 25 bp, Homo sapien
atggaagcgatttcagactgatttg

SEQ ID NO: 5961193 - DNA, 25 bp, Homo sapien
ggcacgttccggccatgattgatga

SEQ ID NO: 5961194 - DNA, 25 bp, Homo sapien
aagttcattaattgtatcctgggga

SEQ ID NO: 5961195 - DNA, 25 bp, Homo sapien
atgcatttgttggtatgtttggtgc

SEQ ID NO: 5961196 - DNA, 25 bp, Homo sapien
gtatgtttggtgcagatggcgatgg

SEQ ID NO: 5961197 - DNA, 25 bp, Homo sapien
aaagtcaagcagaagttcattaatt

SEQ ID NO: 5961198 - DNA, 25 bp, Homo sapien
ataccagcaccgtatccccaaagtt

SEQ ID NO: 5961199 - DNA, 25 bp, Homo sapien
ttccggccatgattgatgacggcag

SEQ ID NO: 5961200 - DNA, 25 bp, Homo sapien
tacctcttctagagtctaaggctac

SEQ ID NO: 5961201 - DNA, 25 bp, Homo sapien
tcagttggtcaaatctactagaact

SEQ ID NO: 5961202 - DNA, 25 bp, Homo sapien
cctttatgagttcatgcaaatgcac

SEQ ID NO: 5961203 - DNA, 25 bp, Homo sapien
tcaaagaatcttgcaagaattagaa

SEQ ID NO: 5961204 - DNA, 25 bp, Homo sapien
cagtggttccagagagaaacaagcc

SEQ ID NO: 5961205 - DNA, 25 bp, Homo sapien
acactgtcagttggtcaaatctact

SEQ ID NO: 5961206 - DNA, 25 bp, Homo sapien
gaccaggagaaagatgtacagatta

SEQ ID NO: 5961207 - DNA, 25 bp, Homo sapien
gaaagatggagctgtcaaagaatct

SEQ ID NO: 5961208 - DNA, 25 bp, Homo sapien
ccagaagtgctttttggagtaaaat

SEQ ID NO: 5961209 - DNA, 25 bp, Homo sapien
tgacatggcaaataactcacaaaca

SEQ ID NO: 5961210 - DNA, 25 bp, Homo sapien
cagagagaaacaagccgtatggggc

SEQ ID NO: 5961211 - DNA, 25 bp, Homo sapien
acgtccaattgattagtatatttct

SEQ ID NO: 5961212 - DNA, 25 bp, Homo sapien
aaacaacaacaataggtcattatta

SEQ ID NO: 5961213 - DNA, 25 bp, Homo sapien
accgattgacgtccaattgattagt

SEQ ID NO: 5961214 - DNA, 25 bp, Homo sapien
ataaatcctagcagttctagtagat

SEQ ID NO: 5961215 - DNA, 25 bp, Homo sapien
tctgaaatcgcttccatctgagttc

SEQ ID NO: 5961216 - DNA, 25 bp, Homo sapien
aagaatgcaatcccttcaaccattt

SEQ ID NO: 5961217 - DNA, 25 bp, Homo sapien
ctcttcaaagggaaacaacaacaat

SEQ ID NO: 5961218 - DNA, 25 bp, Homo sapien
catctgagttcatgtcgtcgctgcc

SEQ ID NO: 5961219 - DNA, 25 bp, Homo sapien
tacttgccatcgccatctgcaccaa

SEQ ID NO: 5961220 - DNA, 25 bp, Homo sapien
aatctagtgctagacatttaatggc

SEQ ID NO: 5961221 - DNA, 25 bp, Homo sapien
agtgtgtaatgtctatactatccag

SEQ ID NO: 5961222 - DNA, 25 bp, Homo sapien
tatcaacaacgaccacacgtccacg

SEQ ID NO: 5961223 - DNA, 25 bp, Homo sapien
aaaaaggacaaagaataccgattga

SEQ ID NO: 5961224 - DNA, 25 bp, Homo sapien
cgtcatcaatcatggccggaacgtg

SEQ ID NO: 5961225 - DNA, 25 bp, Homo sapien
tattgtttgttagcatgatattttg

SEQ ID NO: 5961226 - DNA, 25 bp, Homo sapien
gccttgtaaattcctgtgcttatat

SEQ ID NO: 5961227 - DNA, 25 bp, Homo sapien
gagccgtgttgcgcaacctcttccc

SEQ ID NO: 5961228 - DNA, 25 bp, Homo sapien
cctctcaacaatgctaatctgtaca

SEQ ID NO: 5961229 - DNA, 25 bp, Homo sapien
tagtgctagacatttaatggcatat

SEQ ID NO: 5961230 - DNA, 25 bp, Homo sapien
cctcttcccatttctgaatggacgg

SEQ ID NO: 5961231 - DNA, 25 bp, Homo sapien
gcaccaaacataccaacaaatgcat

SEQ ID NO: 5961232 - DNA, 25 bp, Homo sapien
tcaacaatgctaatctgtacatctt

SEQ ID NO: 5961233 - DNA, 25 bp, Homo sapien
tagatttgaccaactgacagtgtgt

SEQ ID NO: 5961234 - DNA, 25 bp, Homo sapien
cacttgtttgtgagttatttgccat

SEQ ID NO: 5961235 - DNA, 25 bp, Homo sapien
cttttatagtgcatttgcatgaact

SEQ ID NO: 5961236 - DNA, 25 bp, Homo sapien
agcaaatcagtctgaaatcgcttcc

SEQ ID NO: 5961237 - DNA, 25 bp, Homo sapien
aaaatcaattatgtacaactttggg

SEQ ID NO: 5961238 - DNA, 25 bp, Homo sapien
tcgaatattgagcaaatcagtctga

SEQ ID NO: 5961239 - DNA, 25 bp, Homo sapien
atcatggccggaacgtgccccatac

SEQ ID NO: 5961240 - DNA, 25 bp, Homo sapien
actctagaagaggtaagatgtgctt

SEQ ID NO: 5961241 - DNA, 25 bp, Homo sapien
tgagttcatgtcgtcgctgccgtca

SEQ ID NO: 5961242 - DNA, 25 bp, Homo sapien
ggtccgcaacaattgggatactggg

SEQ ID NO: 5961243 - DNA, 25 bp, Homo sapien
tgtatccgacctataaatcctagca

SEQ ID NO: 5961244 - DNA, 25 bp, Homo sapien
ggggggtccgcaacaattgggatac

SEQ ID NO: 5961245 - DNA, 25 bp, Homo sapien
tagcagttctagtagatttgaccaa

SEQ ID NO: 5961246 - DNA, 25 bp, Homo sapien
tttgtttaatatcgatacttcgaat

SEQ ID NO: 5961247 - DNA, 25 bp, Homo sapien
tgtcataagagatgccaaaatcaat

SEQ ID NO: 5961248 - DNA, 25 bp, Homo sapien
tccgtcaccttgctatccatgggtt

SEQ ID NO: 5961249 - DNA, 25 bp, Homo sapien
ggatacggtgctggtattgtttgtt

SEQ ID NO: 5961250 - DNA, 25 bp, Homo sapien
atctcttcaaagggaaacaacaaca

SEQ ID NO: 5961251 - DNA, 25 bp, Homo sapien
tctagtgctagacatttaatggcat

SEQ ID NO: 5961252 - DNA, 25 bp, Homo sapien
tctcatgtaagaatgcaatcccttc

SEQ ID NO: 5961253 - DNA, 25 bp, Homo sapien
cgtcaccttgctatccatgggttcc

SEQ ID NO: 5961254 - DNA, 25 bp, Homo sapien
aattcttgcaagattctttgacagc

SEQ ID NO: 5961255 - DNA, 25 bp, Homo sapien
agtttgtttaatatcgatacttcga

SEQ ID NO: 5961256 - DNA, 25 bp, Homo sapien
agattctttgacagctccatctttc

SEQ ID NO: 5961257 - DNA, 25 bp, Homo sapien
tcatcaatcatggccggaacgtgcc

SEQ ID NO: 5961258 - DNA, 25 bp, Homo sapien
tcaacaacgaccacacgtccacgcc

SEQ ID NO: 5961259 - DNA, 25 bp, Homo sapien
tttcgaatattgagcaaatcagtct

SEQ ID NO: 5961260 - DNA, 25 bp, Homo sapien
tagcaaatcgtaatagggatttttt

SEQ ID NO: 5961261 - DNA, 25 bp, Homo sapien
aatcaattatgtacaactttgggga

SEQ ID NO: 5961262 - DNA, 25 bp, Homo sapien
gtcgcggtgaatgatcttgttctca

SEQ ID NO: 5961263 - DNA, 25 bp, Homo sapien
gatgccaaaatcaattatgtacaac

SEQ ID NO: 5961264 - DNA, 25 bp, Homo sapien
atgcaatcccttcaaccatttgccg

SEQ ID NO: 5961265 - DNA, 25 bp, Homo sapien
tttaatatcgatacttcgaatttgg

SEQ ID NO: 5961266 - DNA, 25 bp, Homo sapien
ttcttgcaagattctttgacagctc

SEQ ID NO: 5961267 - DNA, 25 bp, Homo sapien
cgccatctgcaccaaacataccaac

SEQ ID NO: 5961268 - DNA, 25 bp, Homo sapien
tgtttctctctggaaccactgagaa

SEQ ID NO: 5961269 - DNA, 25 bp, Homo sapien
tgacatccgcaatctcgtccagtcg

SEQ ID NO: 5961270 - DNA, 25 bp, Homo sapien
taatggcatatgtatccgacctata

SEQ ID NO: 5961271 - DNA, 25 bp, Homo sapien
acaactttggggatacggtgctggt

SEQ ID NO: 5961272 - DNA, 25 bp, Homo sapien
ccatcatagcattttactccaaaaa

SEQ ID NO: 5961273 - DNA, 25 bp, Homo sapien
ctgggatttagcaaatcgtaatagg

SEQ ID NO: 5961274 - DNA, 25 bp, Homo sapien
ggtgctggtattgtttgttagcatg

SEQ ID NO: 5961275 - DNA, 25 bp, Homo sapien
ttctaattcttgcaagattctttga

SEQ ID NO: 5961276 - DNA, 25 bp, Homo sapien
ttatgtacaactttggggatacggt

SEQ ID NO: 5961277 - DNA, 25 bp, Homo sapien
ccgcaatctcgtccagtcgaggcat

SEQ ID NO: 5961278 - DNA, 25 bp, Homo sapien
gccatgtcataagagatgccaaaat

SEQ ID NO: 5961279 - DNA, 25 bp, Homo sapien
aatgaacttctgcttgactttgaca

SEQ ID NO: 5961280 - DNA, 25 bp, Homo sapien
tacatacttgccatcgccatctgca

SEQ ID NO: 5961281 - DNA, 25 bp, Homo sapien
aatgaaaccatccccaggatacaat

SEQ ID NO: 5961282 - DNA, 25 bp, Homo sapien
ttcaaccatttgccggaaaaaggac

SEQ ID NO: 5961283 - DNA, 25 bp, Homo sapien
caggatacaattaatgaacttctgc

SEQ ID NO: 5961284 - DNA, 25 bp, Homo sapien
caaccatttgccggaaaaaggacaa

SEQ ID NO: 5961285 - DNA, 25 bp, Homo sapien
tcttgttctcatgtaagaatgcaat

SEQ ID NO: 5961286 - DNA, 25 bp, Homo sapien
ttcccatttctgaatggacggtatg

SEQ ID NO: 5961287 - DNA, 25 bp, Homo sapien
tcaattatgtacaactttggggata

SEQ ID NO: 5961288 - DNA, 25 bp, Homo sapien
atcaatcatggccggaacgtgcccc

SEQ ID NO: 5961289 - DNA, 25 bp, Homo sapien
tgagcaaatcagtctgaaatcgctt

SEQ ID NO: 5961290 - DNA, 25 bp, Homo sapien
gatttgaccaactgacagtgtgtaa

SEQ ID NO: 5961291 - DNA, 25 bp, Homo sapien
tgaccaactgacagtgtgtaatgtc

SEQ ID NO: 5961292 - DNA, 25 bp, Homo sapien
gttcatctcttcaaagggaaacaac

SEQ ID NO: 5961293 - DNA, 25 bp, Homo sapien
atcgatacttcgaatttggcgttat

SEQ ID NO: 5961294 - DNA, 25 bp, Homo sapien
tcatgtaagaatgcaatcccttcaa

SEQ ID NO: 5961295 - DNA, 25 bp, Homo sapien
cttctggggccttgtaaattcctgt

SEQ ID NO: 5961296 - DNA, 25 bp, Homo sapien
catattcctctcaacaatgctaatc

SEQ ID NO: 5961297 - DNA, 25 bp, Homo sapien
gtccacgccaccatcatagcatttt

SEQ ID NO: 5961298 - DNA, 25 bp, Homo sapien
tggtgaaaatgaaaccatccccagg

SEQ ID NO: 5961299 - DNA, 25 bp, Homo sapien
gttccgcacttgtttgtgagttatt

SEQ ID NO: 5961300 - DNA, 25 bp, Homo sapien
gcaatctcgtccagtcgaggcatat

SEQ ID NO: 5961301 - DNA, 25 bp, Homo sapien
gtacaactttggggatacggtgctg

SEQ ID NO: 5961302 - DNA, 25 bp, Homo sapien
tgcaagattctttgacagctccatc

SEQ ID NO: 5961303 - DNA, 25 bp, Homo sapien
tatttctgaacgggggggtccgcaa

SEQ ID NO: 5961304 - DNA, 25 bp, Homo sapien
cttccatctgagttcatgtcgtcgc

SEQ ID NO: 5961305 - DNA, 25 bp, Homo sapien
tgaatggacggtatgcccaactttt

SEQ ID NO: 5961306 - DNA, 25 bp, Homo sapien
accaactgacagtgtgtaatgtcta

SEQ ID NO: 5961307 - DNA, 25 bp, Homo sapien
caatgctaatctgtacatctttctc

SEQ ID NO: 5961308 - DNA, 25 bp, Homo sapien
taattatcaacaacgaccacacgtc

SEQ ID NO: 5961309 - DNA, 25 bp, Homo sapien
ccaaaaagcacttctggggccttgt

SEQ ID NO: 5961310 - DNA, 25 bp, Homo sapien
gggccttgtaaattcctgtgcttat

SEQ ID NO: 5961311 - DNA, 25 bp, Homo sapien
cttgtttgtgagttatttgccatgt

SEQ ID NO: 5961312 - DNA, 25 bp, Homo sapien
taggtcattattatcggtagcctta

SEQ ID NO: 5961313 - DNA, 25 bp, Homo sapien
aatgcatcaaccgagccgtgttgcg

SEQ ID NO: 5961314 - DNA, 25 bp, Homo sapien
taccaacaaatgcatcaaccgagcc

SEQ ID NO: 5961315 - DNA, 25 bp, Homo sapien
acatccgcaatctcgtccagtcgag

SEQ ID NO: 5961316 - DNA, 25 bp, Homo sapien
tattttgcggtttgatgtcgcggtg

SEQ ID NO: 5961317 - DNA, 25 bp, Homo sapien
gaggcatattcctctcaacaatgct

SEQ ID NO: 5961318 - DNA, 25 bp, Homo sapien
tggaaccactgagaaataattatca

SEQ ID NO: 5961319 - DNA, 25 bp, Homo sapien
tgaaaccatccccaggatacaatta

SEQ ID NO: 5961320 - DNA, 25 bp, Homo sapien
atgatattttgcggtttgatgtcgc

SEQ ID NO: 5961321 - DNA, 25 bp, Homo sapien
atgtaagaatgcaatcccttcaacc

SEQ ID NO: 5961322 - DNA, 25 bp, Homo sapien
gatttagcaaatcgtaatagggatt

SEQ ID NO: 5961323 - DNA, 25 bp, Homo sapien
agtcgaggcatattcctctcaacaa

SEQ ID NO: 5961324 - DNA, 25 bp, Homo sapien
caacgaccacacgtccacgccacca

SEQ ID NO: 5961325 - DNA, 25 bp, Homo sapien
agtagatttgaccaactgacagtgt

SEQ ID NO: 5961326 - DNA, 25 bp, Homo sapien
tcataaaggttcatctcttcaaagg

SEQ ID NO: 5961327 - DNA, 25 bp, Homo sapien
taatgtctatactatccagtttcat

SEQ ID NO: 5961328 - DNA, 25 bp, Homo sapien
atcgcttccatctgagttcatgtcg

SEQ ID NO: 5961329 - DNA, 25 bp, Homo sapien
catagcattttactccaaaaagcac

SEQ ID NO: 5961330 - DNA, 25 bp, Homo sapien
gcgcaacctcttcccatttctgaat

SEQ ID NO: 5961331 - DNA, 25 bp, Homo sapien
tgtgcttatatccgtcaccttgcta

SEQ ID NO: 5961332 - DNA, 25 bp, Homo sapien
gaagaggtaagatgtgcttacattt

SEQ ID NO: 5961333 - DNA, 25 bp, Homo sapien
ccatcgccatctgcaccaaacatac

SEQ ID NO: 5961334 - DNA, 25 bp, Homo sapien
ataaaggttcatctcttcaaaggga

SEQ ID NO: 5961335 - DNA, 25 bp, Homo sapien
tatagtgcatttgcatgaactcata

SEQ ID NO: 5961336 - DNA, 25 bp, Homo sapien
gacaaagaataccgattgacgtcca

SEQ ID NO: 5961337 - DNA, 25 bp, Homo sapien
attatcaacaacgaccacacgtcca

SEQ ID NO: 5961338 - DNA, 25 bp, Homo sapien
ttcatgtcgtcgctgccgtcatcaa

SEQ ID NO: 5961339 - DNA, 25 bp, Homo sapien
agctccatctttcgtttggtgaaaa

SEQ ID NO: 5961340 - DNA, 25 bp, Homo sapien
ctaattcttgcaagattctttgaca

SEQ ID NO: 5961341 - DNA, 25 bp, Homo sapien
ttctcctggtccagtacatacttgc

SEQ ID NO: 5961342 - DNA, 25 bp, Homo sapien
ctatctcttttatagtgcatttgca

SEQ ID NO: 5961343 - DNA, 25 bp, Homo sapien
tatcgaaatctagtgctagacattt

SEQ ID NO: 5961344 - DNA, 25 bp, Homo sapien
acagctccatctttcgtttggtgaa

SEQ ID NO: 5961345 - DNA, 25 bp, Homo sapien
atgtcgcggtgaatgatcttgttct

SEQ ID NO: 5961346 - DNA, 25 bp, Homo sapien
atggcatatgtatccgacctataaa

SEQ ID NO: 5961347 - DNA, 25 bp, Homo sapien
gatactgggatttagcaaatcgtaa

SEQ ID NO: 5961348 - DNA, 25 bp, Homo sapien
ctatccatgggttccgcacttgttt

SEQ ID NO: 5961349 - DNA, 25 bp, Homo sapien
tagcatgatattttgcggtttgatg

SEQ ID NO: 5961350 - DNA, 25 bp, Homo sapien
cgatacttcgaatttggcgttatgt

SEQ ID NO: 5961351 - DNA, 25 bp, Homo sapien
tttctgaatggacggtatgcccaac

SEQ ID NO: 5961352 - DNA, 25 bp, Homo sapien
catccccaggatacaattaatgaac

SEQ ID NO: 5961353 - DNA, 25 bp, Homo sapien
tttctctctggaaccactgagaaat

SEQ ID NO: 5961354 - DNA, 25 bp, Homo sapien
gcaatcccttcaaccatttgccgga

SEQ ID NO: 5961355 - DNA, 25 bp, Homo sapien
gacatttaatggcatatgtatccga

SEQ ID NO: 5961356 - DNA, 25 bp, Homo sapien
ccagtttgtttaatatcgatacttc

SEQ ID NO: 5961357 - DNA, 25 bp, Homo sapien
gctaatctgtacatctttctcctgg

SEQ ID NO: 5961358 - DNA, 25 bp, Homo sapien
tactccaaaaagcacttctggggcc

SEQ ID NO: 5961359 - DNA, 25 bp, Homo sapien
aacataccaacaaatgcatcaaccg

SEQ ID NO: 5961360 - DNA, 25 bp, Homo sapien
ctccaaaaagcacttctggggcctt

SEQ ID NO: 5961361 - DNA, 25 bp, Homo sapien
tttgttgcccagtttgtttaatatc

SEQ ID NO: 5961362 - DNA, 25 bp, Homo sapien
aggttcatctcttcaaagggaaaca

SEQ ID NO: 5961363 - DNA, 25 bp, Homo sapien
caacaataggtcattattatcggta

SEQ ID NO: 5961364 - DNA, 25 bp, Homo sapien
gtccagtcgaggcatattcctctca

SEQ ID NO: 5961365 - DNA, 25 bp, Homo sapien
gggatactgggatttagcaaatcgt

SEQ ID NO: 5961366 - DNA, 25 bp, Homo sapien
ggcatatgtatccgacctataaatc

SEQ ID NO: 5961367 - DNA, 25 bp, Homo sapien
acgtgccccatacggcttgtttctc

SEQ ID NO: 5961368 - DNA, 25 bp, Homo sapien
tatatccgtcaccttgctatccatg

SEQ ID NO: 5961369 - DNA, 25 bp, Homo sapien
tgactttgacatccgcaatctcgtc

SEQ ID NO: 5961370 - DNA, 25 bp, Homo sapien
gttagcatgatattttgcggtttga

SEQ ID NO: 5961371 - DNA, 25 bp, Homo sapien
gaacgtgccccatacggcttgtttc

SEQ ID NO: 5961372 - DNA, 25 bp, Homo sapien
ggtttgatgtcgcggtgaatgatct

SEQ ID NO: 5961373 - DNA, 25 bp, Homo sapien
tccgacctataaatcctagcagttc

SEQ ID NO: 5961374 - DNA, 25 bp, Homo sapien
tctttgacagctccatctttcgttt

SEQ ID NO: 5961375 - DNA, 25 bp, Homo sapien
ccaaaatcaattatgtacaactttg

SEQ ID NO: 5961376 - DNA, 25 bp, Homo sapien
accttgctatccatgggttccgcac

SEQ ID NO: 5961377 - DNA, 25 bp, Homo sapien
ccatctgcaccaaacataccaacaa

SEQ ID NO: 5961378 - DNA, 25 bp, Homo sapien
aattaatgaacttctgcttgacttt

SEQ ID NO: 5961379 - DNA, 25 bp, Homo sapien
gctagacatttaatggcatatgtat

SEQ ID NO: 5961380 - DNA, 25 bp, Homo sapien
tagtgcatttgcatgaactcataaa

SEQ ID NO: 5961381 - DNA, 25 bp, Homo sapien
acgccaccatcatagcattttactc

SEQ ID NO: 5961382 - DNA, 25 bp, Homo sapien
acaattaatgaacttctgcttgact

SEQ ID NO: 5961383 - DNA, 25 bp, Homo sapien
tttggtgaaaatgaaaccatcccca

SEQ ID NO: 5961384 - DNA, 25 bp, Homo sapien
agtacatacttgccatcgccatctg

SEQ ID NO: 5961385 - DNA, 25 bp, Homo sapien
attgagcaaatcagtctgaaatcgc

SEQ ID NO: 5961386 - DNA, 25 bp, Homo sapien
atattgagcaaatcagtctgaaatc

SEQ ID NO: 5961387 - DNA, 25 bp, Homo sapien
tattatcggtagccttagactctag

SEQ ID NO: 5961388 - DNA, 25 bp, Homo sapien
ttcctctcaacaatgctaatctgta

SEQ ID NO: 5961389 - DNA, 25 bp, Homo sapien
gtatgcccaacttttcgaatattga

SEQ ID NO: 5961390 - DNA, 25 bp, Homo sapien
tatgtatccgacctataaatcctag

SEQ ID NO: 5961391 - DNA, 25 bp, Homo sapien
ttgccatgtcataagagatgccaaa

SEQ ID NO: 5961392 - DNA, 25 bp, Homo sapien
cttctgcttgactttgacatccgca

SEQ ID NO: 5961393 - DNA, 25 bp, Homo sapien
tgtttaatatcgatacttcgaattt

SEQ ID NO: 5961394 - DNA, 25 bp, Homo sapien
atcctagcagttctagtagatttga

SEQ ID NO: 5961395 - DNA, 25 bp, Homo sapien
catttgccggaaaaaggacaaagaa

SEQ ID NO: 5961396 - DNA, 25 bp, Homo sapien
aaatcgcttccatctgagttcatgt

SEQ ID NO: 5961397 - DNA, 25 bp, Homo sapien
catgtcataagagatgccaaaatca

SEQ ID NO: 5961398 - DNA, 25 bp, Homo sapien
gtacatctttctcctggtccagtac

SEQ ID NO: 5961399 - DNA, 25 bp, Homo sapien
gatgtgcttacatttgttgcccagt

SEQ ID NO: 5961400 - DNA, 25 bp, Homo sapien
tctgagttcatgtcgtcgctgccgt

SEQ ID NO: 5961401 - DNA, 25 bp, Homo sapien
aacctcttcccatttctgaatggac

SEQ ID NO: 5961402 - DNA, 25 bp, Homo sapien
gacggtatgcccaacttttcgaata

SEQ ID NO: 5961403 - DNA, 25 bp, Homo sapien
caactgacagtgtgtaatgtctata

SEQ ID NO: 5961404 - DNA, 25 bp, Homo sapien
agttatttgccatgtcataagagat

SEQ ID NO: 5961405 - DNA, 25 bp, Homo sapien
tgcttatatccgtcaccttgctatc

SEQ ID NO: 5961406 - DNA, 25 bp, Homo sapien
taaattcctgtgcttatatccgtca

SEQ ID NO: 5961407 - DNA, 25 bp, Homo sapien
catgtcgtcgctgccgtcatcaatc

SEQ ID NO: 5961408 - DNA, 25 bp, Homo sapien
tccatctgagttcatgtcgtcgctg

SEQ ID NO: 5961409 - DNA, 25 bp, Homo sapien
tgcttacatttgttgcccagtttgt

SEQ ID NO: 5961410 - DNA, 25 bp, Homo sapien
tgcttgactttgacatccgcaatct

SEQ ID NO: 5961411 - DNA, 25 bp, Homo sapien
tgtggcgggatatcgaaatctagtg

SEQ ID NO: 5961412 - DNA, 25 bp, Homo sapien
tattcctctcaacaatgctaatctg

SEQ ID NO: 5961413 - DNA, 25 bp, Homo sapien
tgacgtccaattgattagtatattt

SEQ ID NO: 5961414 - DNA, 25 bp, Homo sapien
gaccacacgtccacgccaccatcat

SEQ ID NO: 5961415 - DNA, 25 bp, Homo sapien
tttactccaaaaagcacttctgggg

SEQ ID NO: 5961416 - DNA, 25 bp, Homo sapien
gtgccccatacggcttgtttctctc

SEQ ID NO: 5961417 - DNA, 25 bp, Homo sapien
ggaaacaacaacaataggtcattat

SEQ ID NO: 5961418 - DNA, 25 bp, Homo sapien
aacaacaataggtcattattatcgg

SEQ ID NO: 5961419 - DNA, 25 bp, Homo sapien
attttactccaaaaagcacttctgg

SEQ ID NO: 5961420 - DNA, 25 bp, Homo sapien
tgtcgtcgctgccgtcatcaatcat

SEQ ID NO: 5961421 - DNA, 25 bp, Homo sapien
ccatctttcgtttggtgaaaatgaa

SEQ ID NO: 5961422 - DNA, 25 bp, Homo sapien
cggaacgtgccccatacggcttgtt

SEQ ID NO: 5961423 - DNA, 25 bp, Homo sapien
gggttccgcacttgtttgtgagtta

SEQ ID NO: 5961424 - DNA, 25 bp, Homo sapien
gccgtcatcaatcatggccggaacg

SEQ ID NO: 5961425 - DNA, 25 bp, Homo sapien
gcatgatattttgcggtttgatgtc

SEQ ID NO: 5961426 - DNA, 25 bp, Homo sapien
atgaactcataaaggttcatctctt

SEQ ID NO: 5961427 - DNA, 25 bp, Homo sapien
aacttttcgaatattgagcaaatca

SEQ ID NO: 5961428 - DNA, 25 bp, Homo sapien
tctctctggaaccactgagaaataa

SEQ ID NO: 5961429 - DNA, 25 bp, Homo sapien
gaatattgagcaaatcagtctgaaa

SEQ ID NO: 5961430 - DNA, 25 bp, Homo sapien
tgaaatcgcttccatctgagttcat

SEQ ID NO: 5961431 - DNA, 25 bp, Homo sapien
tggcttttctaattcttgcaagatt

SEQ ID NO: 5961432 - DNA, 25 bp, Homo sapien
caccatcatagcattttactccaaa

SEQ ID NO: 5961433 - DNA, 25 bp, Homo sapien
caaatgcatcaaccgagccgtgttg

SEQ ID NO: 5961434 - DNA, 25 bp, Homo sapien
aaaggacaaagaataccgattgacg

SEQ ID NO: 5961435 - DNA, 25 bp, Homo sapien
agactctagaagaggtaagatgtgc

SEQ ID NO: 5961436 - DNA, 25 bp, Homo sapien
aattcctgtgcttatatccgtcacc

SEQ ID NO: 5961437 - DNA, 25 bp, Homo sapien
gcatgaactcataaaggttcatctc

SEQ ID NO: 5961438 - DNA, 25 bp, Homo sapien
atacggcttgtttctctctggaacc

SEQ ID NO: 5961439 - DNA, 25 bp, Homo sapien
ctttggggatacggtgctggtattg

SEQ ID NO: 5961440 - DNA, 25 bp, Homo sapien
ctagtagatttgaccaactgacagt

SEQ ID NO: 5961441 - DNA, 25 bp, Homo sapien
atgtacaactttggggatacggtgc

SEQ ID NO: 5961442 - DNA, 25 bp, Homo sapien
agccttagactctagaagaggtaag

SEQ ID NO: 5961443 - DNA, 25 bp, Homo sapien
tgagttatttgccatgtcataagag

SEQ ID NO: 5961444 - DNA, 25 bp, Homo sapien
gaactcataaaggttcatctcttca

SEQ ID NO: 5961445 - DNA, 25 bp, Homo sapien
ttatttgccatgtcataagagatgc

SEQ ID NO: 5961446 - DNA, 25 bp, Homo sapien
gcttttctaattcttgcaagattct

SEQ ID NO: 5961447 - DNA, 25 bp, Homo sapien
aacttctgcttgactttgacatccg

SEQ ID NO: 5961448 - DNA, 25 bp, Homo sapien
ttttgcggtttgatgtcgcggtgaa

SEQ ID NO: 5961449 - DNA, 25 bp, Homo sapien
cgaatttggcgttatgtggcgggat

SEQ ID NO: 5961450 - DNA, 25 bp, Homo sapien
tagcattttactccaaaaagcactt

SEQ ID NO: 5961451 - DNA, 25 bp, Homo sapien
gttctcatgtaagaatgcaatccct

SEQ ID NO: 5961452 - DNA, 25 bp, Homo sapien
cttcaaagggaaacaacaacaatag

SEQ ID NO: 5961453 - DNA, 25 bp, Homo sapien
tctcaacaatgctaatctgtacatc

SEQ ID NO: 5961454 - DNA, 25 bp, Homo sapien
gcggtttgatgtcgcggtgaatgat

SEQ ID NO: 5961455 - DNA, 25 bp, Homo sapien
tttgaccaactgacagtgtgtaatg

SEQ ID NO: 5961456 - DNA, 25 bp, Homo sapien
attattatcggtagccttagactct

SEQ ID NO: 5961457 - DNA, 25 bp, Homo sapien
tttgacatccgcaatctcgtccagt

SEQ ID NO: 5961458 - DNA, 25 bp, Homo sapien
ttgtttgttagcatgatattttgcg

SEQ ID NO: 5961459 - DNA, 25 bp, Homo sapien
ggcttgtttctctctggaaccactg

SEQ ID NO: 5961460 - DNA, 25 bp, Homo sapien
gcgttatgtggcgggatatcgaaat

SEQ ID NO: 5961461 - DNA, 25 bp, Homo sapien
gaatgatcttgttctcatgtaagaa

SEQ ID NO: 5961462 - DNA, 25 bp, Homo sapien
ggatacaattaatgaacttctgctt

SEQ ID NO: 5961463 - DNA, 25 bp, Homo sapien
aattatgtacaactttggggatacg

SEQ ID NO: 5961464 - DNA, 25 bp, Homo sapien
aatttggcgttatgtggcgggatat

SEQ ID NO: 5961465 - DNA, 25 bp, Homo sapien
caacaattgggatactgggatttag

SEQ ID NO: 5961466 - DNA, 25 bp, Homo sapien
ccaacaaatgcatcaaccgagccgt

SEQ ID NO: 5961467 - DNA, 25 bp, Homo sapien
cgtgttgcgcaacctcttcccattt

SEQ ID NO: 5961468 - DNA, 25 bp, Homo sapien
gcgggatatcgaaatctagtgctag

SEQ ID NO: 5961469 - DNA, 25 bp, Homo sapien
aacaacgaccacacgtccacgccac

SEQ ID NO: 5961470 - DNA, 25 bp, Homo sapien
tcccttcaaccatttgccggaaaaa

SEQ ID NO: 5961471 - DNA, 25 bp, Homo sapien
tttaatggcatatgtatccgaccta

SEQ ID NO: 5961472 - DNA, 25 bp, Homo sapien
atatcgatacttcgaatttggcgtt

SEQ ID NO: 5961473 - DNA, 25 bp, Homo sapien
acggcttgtttctctctggaaccac

SEQ ID NO: 5961474 - DNA, 25 bp, Homo sapien
agaggtaagatgtgcttacatttgt

SEQ ID NO: 5961475 - DNA, 25 bp, Homo sapien
aaagcacttctggggccttgtaaat

SEQ ID NO: 5961476 - DNA, 25 bp, Homo sapien
cctgtgcttatatccgtcaccttgc

SEQ ID NO: 5961477 - DNA, 25 bp, Homo sapien
gatattttgcggtttgatgtcgcgg

SEQ ID NO: 5961478 - DNA, 25 bp, Homo sapien
cttgtaaattcctgtgcttatatcc

SEQ ID NO: 5961479 - DNA, 25 bp, Homo sapien
gccggaacgtgccccatacggcttg

SEQ ID NO: 5961480 - DNA, 25 bp, Homo sapien
atacaattaatgaacttctgcttga

SEQ ID NO: 5961481 - DNA, 25 bp, Homo sapien
tcaccttgctatccatgggttccgc

SEQ ID NO: 5961482 - DNA, 25 bp, Homo sapien
tctgaatggacggtatgcccaactt

SEQ ID NO: 5961483 - DNA, 25 bp, Homo sapien
tgtttgtgagttatttgccatgtca

SEQ ID NO: 5961484 - DNA, 25 bp, Homo sapien
gagatgccaaaatcaattatgtaca

SEQ ID NO: 5961485 - DNA, 25 bp, Homo sapien
gattagtatatttctgaacgggggg

SEQ ID NO: 5961486 - DNA, 25 bp, Homo sapien
tccgcaacaattgggatactgggat

SEQ ID NO: 5961487 - DNA, 25 bp, Homo sapien
aaatcctagcagttctagtagattt

SEQ ID NO: 5961488 - DNA, 25 bp, Homo sapien
ccatgggttccgcacttgtttgtga

SEQ ID NO: 5961489 - DNA, 25 bp, Homo sapien
cctggtccagtacatacttgccatc

SEQ ID NO: 5961490 - DNA, 25 bp, Homo sapien
aattgggatactgggatttagcaaa

SEQ ID NO: 5961491 - DNA, 25 bp, Homo sapien
ttggggatacggtgctggtattgtt

SEQ ID NO: 5961492 - DNA, 25 bp, Homo sapien
acgtccacgccaccatcatagcatt

SEQ ID NO: 5961493 - DNA, 25 bp, Homo sapien
gaaataattatcaacaacgaccaca

SEQ ID NO: 5961494 - DNA, 25 bp, Homo sapien
tgaacgggggggtccgcaacaattg

SEQ ID NO: 5961495 - DNA, 25 bp, Homo sapien
aaccgagccgtgttgcgcaacctct

SEQ ID NO: 5961496 - DNA, 25 bp, Homo sapien
actttgacatccgcaatctcgtcca

SEQ ID NO: 5961497 - DNA, 25 bp, Homo sapien
tttgccggaaaaaggacaaagaata

SEQ ID NO: 5961498 - DNA, 25 bp, Homo sapien
tctggggccttgtaaattcctgtgc

SEQ ID NO: 5961499 - DNA, 25 bp, Homo sapien
gcaacctcttcccatttctgaatgg

SEQ ID NO: 5961500 - DNA, 25 bp, Homo sapien
tccccaggatacaattaatgaactt

SEQ ID NO: 5961501 - DNA, 25 bp, Homo sapien
tctagaagaggtaagatgtgcttac

SEQ ID NO: 5961502 - DNA, 25 bp, Homo sapien
atgctaatctgtacatctttctcct

SEQ ID NO: 5961503 - DNA, 25 bp, Homo sapien
acagtgtgtaatgtctatactatcc

SEQ ID NO: 5961504 - DNA, 25 bp, Homo sapien
cactgagaaataattatcaacaacg

SEQ ID NO: 5961505 - DNA, 25 bp, Homo sapien
tttatagtgcatttgcatgaactca

SEQ ID NO: 5961506 - DNA, 25 bp, Homo sapien
gaaccactgagaaataattatcaac

SEQ ID NO: 5961507 - DNA, 25 bp, Homo sapien
atgatcttgttctcatgtaagaatg

SEQ ID NO: 5961508 - DNA, 25 bp, Homo sapien
ataccgattgacgtccaattgatta

SEQ ID NO: 5961509 - DNA, 25 bp, Homo sapien
aataattatcaacaacgaccacacg

SEQ ID NO: 5961510 - DNA, 25 bp, Homo sapien
aacaatgctaatctgtacatctttc

SEQ ID NO: 5961511 - DNA, 25 bp, Homo sapien
aatggacggtatgcccaacttttcg

SEQ ID NO: 5961512 - DNA, 25 bp, Homo sapien
tctctggaaccactgagaaataatt

SEQ ID NO: 5961513 - DNA, 25 bp, Homo sapien
tggccggaacgtgccccatacggct

SEQ ID NO: 5961514 - DNA, 25 bp, Homo sapien
tcataagagatgccaaaatcaatta

SEQ ID NO: 5961515 - DNA, 25 bp, Homo sapien
ttctagtagatttgaccaactgaca

SEQ ID NO: 5961516 - DNA, 25 bp, Homo sapien
aagaataccgattgacgtccaattg

SEQ ID NO: 5961517 - DNA, 25 bp, Homo sapien
ttgattagtatatttctgaacgggg

SEQ ID NO: 5961518 - DNA, 25 bp, Homo sapien
ccaattgattagtatatttctgaac

SEQ ID NO: 5961519 - DNA, 25 bp, Homo sapien
aggacaaagaataccgattgacgtc

SEQ ID NO: 5961520 - DNA, 25 bp, Homo sapien
acaacaacaataggtcattattatc

SEQ ID NO: 5961521 - DNA, 25 bp, Homo sapien
tctggaaccactgagaaataattat

SEQ ID NO: 5961522 - DNA, 25 bp, Homo sapien
cataccaacaaatgcatcaaccgag

SEQ ID NO: 5961523 - DNA, 25 bp, Homo sapien
cgcttccatctgagttcatgtcgtc

SEQ ID NO: 5961524 - DNA, 25 bp, Homo sapien
ctgtacatctttctcctggtccagt

SEQ ID NO: 5961525 - DNA, 25 bp, Homo sapien
ttcgtttggtgaaaatgaaaccatc

SEQ ID NO: 5961526 - DNA, 25 bp, Homo sapien
ttgcggtttgatgtcgcggtgaatg

SEQ ID NO: 5961527 - DNA, 25 bp, Homo sapien
tgtaatgtctatactatccagtttc

SEQ ID NO: 5961528 - DNA, 25 bp, Homo sapien
taatctgtacatctttctcctggtc

SEQ ID NO: 5961529 - DNA, 25 bp, Homo sapien
cgtttggtgaaaatgaaaccatccc

SEQ ID NO: 5961530 - DNA, 25 bp, Homo sapien
ctcttttatagtgcatttgcatgaa

SEQ ID NO: 5961531 - DNA, 25 bp, Homo sapien
gggatatcgaaatctagtgctagac

SEQ ID NO: 5961532 - DNA, 25 bp, Homo sapien
tctcgtccagtcgaggcatattcct

SEQ ID NO: 5961533 - DNA, 25 bp, Homo sapien
atctttctcctggtccagtacatac

SEQ ID NO: 5961534 - DNA, 25 bp, Homo sapien
cctagcagttctagtagatttgacc

SEQ ID NO: 5961535 - DNA, 25 bp, Homo sapien
atttgcatgaactcataaaggttca

SEQ ID NO: 5961536 - DNA, 25 bp, Homo sapien
tgctatccatgggttccgcacttgt

SEQ ID NO: 5961537 - DNA, 25 bp, Homo sapien
tggacggtatgcccaacttttcgaa

SEQ ID NO: 5961538 - DNA, 25 bp, Homo sapien
tgccggaaaaaggacaaagaatacc

SEQ ID NO: 5961539 - DNA, 25 bp, Homo sapien
atacggtgctggtattgtttgttag

SEQ ID NO: 5961540 - DNA, 25 bp, Homo sapien
tggcgggatatcgaaatctagtgct

SEQ ID NO: 5961541 - DNA, 25 bp, Homo sapien
ccttagactctagaagaggtaagat

SEQ ID NO: 5961542 - DNA, 25 bp, Homo sapien
atccgcaatctcgtccagtcgaggc

SEQ ID NO: 5961543 - DNA, 25 bp, Homo sapien
catcaaccgagccgtgttgcgcaac

SEQ ID NO: 5961544 - DNA, 25 bp, Homo sapien
aacaaatgcatcaaccgagccgtgt

SEQ ID NO: 5961545 - DNA, 25 bp, Homo sapien
tatgtggcgggatatcgaaatctag

SEQ ID NO: 5961546 - DNA, 25 bp, Homo sapien
tgcatcaaccgagccgtgttgcgca

SEQ ID NO: 5961547 - DNA, 25 bp, Homo sapien
gaatgcaatcccttcaaccatttgc

SEQ ID NO: 5961548 - DNA, 25 bp, Homo sapien
gatcttgttctcatgtaagaatgca

SEQ ID NO: 5961549 - DNA, 25 bp, Homo sapien
tttggcgttatgtggcgggatatcg

SEQ ID NO: 5961550 - DNA, 25 bp, Homo sapien
tgtgtaatgtctatactatccagtt

SEQ ID NO: 5961551 - DNA, 25 bp, Homo sapien
tgacagtgtgtaatgtctatactat

SEQ ID NO: 5961552 - DNA, 25 bp, Homo sapien
agcacttctggggccttgtaaattc

SEQ ID NO: 5961553 - DNA, 25 bp, Homo sapien
gtcgctgccgtcatcaatcatggcc

SEQ ID NO: 5961554 - DNA, 25 bp, Homo sapien
aagatgtgcttacatttgttgccca

SEQ ID NO: 5961555 - DNA, 25 bp, Homo sapien
gcccagtttgtttaatatcgatact

SEQ ID NO: 5961556 - DNA, 25 bp, Homo sapien
ggtattgtttgttagcatgatattt

SEQ ID NO: 5961557 - DNA, 25 bp, Homo sapien
tagacatttaatggcatatgtatcc

SEQ ID NO: 5961558 - DNA, 25 bp, Homo sapien
tgacagctccatctttcgtttggtg

SEQ ID NO: 5961559 - DNA, 25 bp, Homo sapien
atacttcgaatttggcgttatgtgg

SEQ ID NO: 5961560 - DNA, 25 bp, Homo sapien
caaagaataccgattgacgtccaat

SEQ ID NO: 5961561 - DNA, 25 bp, Homo sapien
gtgctagacatttaatggcatatgt

SEQ ID NO: 5961562 - DNA, 25 bp, Homo sapien
tcaaagggaaacaacaacaataggt

SEQ ID NO: 5961563 - DNA, 25 bp, Homo sapien
tgctggtattgtttgttagcatgat

SEQ ID NO: 5961564 - DNA, 25 bp, Homo sapien
acatctttctcctggtccagtacat

SEQ ID NO: 5961565 - DNA, 25 bp, Homo sapien
ccacgccaccatcatagcattttac

SEQ ID NO: 5961566 - DNA, 25 bp, Homo sapien
aaaccatccccaggatacaattaat

SEQ ID NO: 5961567 - DNA, 25 bp, Homo sapien
atctgtacatctttctcctggtcca

SEQ ID NO: 5961568 - DNA, 25 bp, Homo sapien
ccatacggcttgtttctctctggaa

SEQ ID NO: 5961569 - DNA, 25 bp, Homo sapien
aactttggggatacggtgctggtat

SEQ ID NO: 5961570 - DNA, 25 bp, Homo sapien
ctcctggtccagtacatacttgcca

SEQ ID NO: 5961571 - DNA, 25 bp, Homo sapien
tactgggatttagcaaatcgtaata

SEQ ID NO: 5961572 - DNA, 25 bp, Homo sapien
cttgtttctctctggaaccactgag

SEQ ID NO: 5961573 - DNA, 25 bp, Homo sapien
tggggccttgtaaattcctgtgctt

SEQ ID NO: 5961574 - DNA, 25 bp, Homo sapien
gaaatctagtgctagacatttaatg

SEQ ID NO: 5961575 - DNA, 25 bp, Homo sapien
aggtaagatgtgcttacatttgttg

SEQ ID NO: 5961576 - DNA, 25 bp, Homo sapien
tgttgcgcaacctcttcccatttct

SEQ ID NO: 5961577 - DNA, 25 bp, Homo sapien
caaatcagtctgaaatcgcttccat

SEQ ID NO: 5961578 - DNA, 25 bp, Homo sapien
caatcatggccggaacgtgccccat

SEQ ID NO: 5961579 - DNA, 25 bp, Homo sapien
cgcggtgaatgatcttgttctcatg

SEQ ID NO: 5961580 - DNA, 25 bp, Homo sapien
gtagccttagactctagaagaggta

SEQ ID NO: 5961581 - DNA, 25 bp, Homo sapien
cttgactttgacatccgcaatctcg

SEQ ID NO: 5961582 - DNA, 25 bp, Homo sapien
tagaagaggtaagatgtgcttacat

SEQ ID NO: 5961583 - DNA, 25 bp, Homo sapien
acggtgctggtattgtttgttagca

SEQ ID NO: 5961584 - DNA, 25 bp, Homo sapien
tgttgcccagtttgtttaatatcga

SEQ ID NO: 5961585 - DNA, 25 bp, Homo sapien
ttttctaattcttgcaagattcttt

SEQ ID NO: 5961586 - DNA, 25 bp, Homo sapien
attctttgacagctccatctttcgt

SEQ ID NO: 5961587 - DNA, 25 bp, Homo sapien
tcatctcttcaaagggaaacaacaa

SEQ ID NO: 5961588 - DNA, 25 bp, Homo sapien
ccacacgtccacgccaccatcatag

SEQ ID NO: 5961589 - DNA, 25 bp, Homo sapien
agtctgaaatcgcttccatctgagt

SEQ ID NO: 5961590 - DNA, 25 bp, Homo sapien
gtttgttagcatgatattttgcggt

SEQ ID NO: 5961591 - DNA, 25 bp, Homo sapien
atcgccatctgcaccaaacatacca

SEQ ID NO: 5961592 - DNA, 25 bp, Homo sapien
tggtccagtacatacttgccatcgc

SEQ ID NO: 5961593 - DNA, 25 bp, Homo sapien
ctgccgtcatcaatcatggccggaa

SEQ ID NO: 5961594 - DNA, 25 bp, Homo sapien
atctgcaccaaacataccaacaaat

SEQ ID NO: 5961595 - DNA, 25 bp, Homo sapien
tttagcaaatcgtaatagggatttt

SEQ ID NO: 5961596 - DNA, 25 bp, Homo sapien
catacttgccatcgccatctgcacc

SEQ ID NO: 5961597 - DNA, 25 bp, Homo sapien
tccgcacttgtttgtgagttatttg

SEQ ID NO: 5961598 - DNA, 25 bp, Homo sapien
gaaaatgaaaccatccccaggatac

SEQ ID NO: 5961599 - DNA, 25 bp, Homo sapien
gcattttactccaaaaagcacttct

SEQ ID NO: 5961600 - DNA, 25 bp, Homo sapien
aatcccttcaaccatttgccggaaa

SEQ ID NO: 5961601 - DNA, 25 bp, Homo sapien
atcatagcattttactccaaaaagc

SEQ ID NO: 5961602 - DNA, 25 bp, Homo sapien
ccagtacatacttgccatcgccatc

SEQ ID NO: 5961603 - DNA, 25 bp, Homo sapien
gccaccatcatagcattttactcca

SEQ ID NO: 5961604 - DNA, 25 bp, Homo sapien
gtgaaaatgaaaccatccccaggat

SEQ ID NO: 5961605 - DNA, 25 bp, Homo sapien
ggggtccgcaacaattgggatactg

SEQ ID NO: 5961606 - DNA, 25 bp, Homo sapien
gatatcgaaatctagtgctagacat

SEQ ID NO: 5961607 - DNA, 25 bp, Homo sapien
ctttctcctggtccagtacatactt

SEQ ID NO: 5961608 - DNA, 25 bp, Homo sapien
tatggcttttctaattcttgcaaga

SEQ ID NO: 5961609 - DNA, 25 bp, Homo sapien
tcttcccatttctgaatggacggta

SEQ ID NO: 5961610 - DNA, 25 bp, Homo sapien
ttaatgaacttctgcttgactttga

SEQ ID NO: 5961611 - DNA, 25 bp, Homo sapien
acaattgggatactgggatttagca

SEQ ID NO: 5961612 - DNA, 25 bp, Homo sapien
caagattctttgacagctccatctt

SEQ ID NO: 5961613 - DNA, 25 bp, Homo sapien
gcatttgcatgaactcataaaggtt

SEQ ID NO: 5961614 - DNA, 25 bp, Homo sapien
atgggttccgcacttgtttgtgagt

SEQ ID NO: 5961615 - DNA, 25 bp, Homo sapien
tttgatgtcgcggtgaatgatcttg

SEQ ID NO: 5961616 - DNA, 25 bp, Homo sapien
agggaaacaacaacaataggtcatt

SEQ ID NO: 5961617 - DNA, 25 bp, Homo sapien
tacatttgttgcccagtttgtttaa

SEQ ID NO: 5961618 - DNA, 25 bp, Homo sapien
tttgtgagttatttgccatgtcata

SEQ ID NO: 5961619 - DNA, 25 bp, Homo sapien
agttctagtagatttgaccaactga

SEQ ID NO: 5961620 - DNA, 25 bp, Homo sapien
tatatttctgaacgggggggtccgc

SEQ ID NO: 5961621 - DNA, 25 bp, Homo sapien
ttagactctagaagaggtaagatgt

SEQ ID NO: 5961622 - DNA, 25 bp, Homo sapien
aaagggaaacaacaacaataggtca

SEQ ID NO: 5961623 - DNA, 25 bp, Homo sapien
aaaggttcatctcttcaaagggaaa

SEQ ID NO: 5961624 - DNA, 25 bp, Homo sapien
tagtatatttctgaacgggggggtc

SEQ ID NO: 5961625 - DNA, 25 bp, Homo sapien
ataagagatgccaaaatcaattatg

SEQ ID NO: 5961626 - DNA, 25 bp, Homo sapien
tcgtcgctgccgtcatcaatcatgg

SEQ ID NO: 5961627 - DNA, 25 bp, Homo sapien
atctttcgtttggtgaaaatgaaac

SEQ ID NO: 5961628 - DNA, 25 bp, Homo sapien
aattgattagtatatttctgaacgg

SEQ ID NO: 5961629 - DNA, 25 bp, Homo sapien
gttatgtggcgggatatcgaaatct

SEQ ID NO: 5961630 - DNA, 25 bp, Homo sapien
ttcctgtgcttatatccgtcacctt

SEQ ID NO: 5961631 - DNA, 25 bp, Homo sapien
ttgttctcatgtaagaatgcaatcc

SEQ ID NO: 5961632 - DNA, 25 bp, Homo sapien
cttgctatccatgggttccgcactt

SEQ ID NO: 5961633 - DNA, 25 bp, Homo sapien
cgattgacgtccaattgattagtat

SEQ ID NO: 5961634 - DNA, 25 bp, Homo sapien
ttgcccagtttgtttaatatcgata

SEQ ID NO: 5961635 - DNA, 25 bp, Homo sapien
gtgcatttgcatgaactcataaagg

SEQ ID NO: 5961636 - DNA, 25 bp, Homo sapien
accatccccaggatacaattaatga

SEQ ID NO: 5961637 - DNA, 25 bp, Homo sapien
atgcccaacttttcgaatattgagc

SEQ ID NO: 5961638 - DNA, 25 bp, Homo sapien
ctttcgtttggtgaaaatgaaacca

SEQ ID NO: 5961639 - DNA, 25 bp, Homo sapien
tcagtctgaaatcgcttccatctga

SEQ ID NO: 5961640 - DNA, 25 bp, Homo sapien
gcagttctagtagatttgaccaact

SEQ ID NO: 5961641 - DNA, 25 bp, Homo sapien
tggcgttatgtggcgggatatcgaa

SEQ ID NO: 5961642 - DNA, 25 bp, Homo sapien
cttatatccgtcaccttgctatcca

SEQ ID NO: 5961643 - DNA, 25 bp, Homo sapien
ctgcaccaaacataccaacaaatgc

SEQ ID NO: 5961644 - DNA, 25 bp, Homo sapien
ggggatacggtgctggtattgtttg

SEQ ID NO: 5961645 - DNA, 25 bp, Homo sapien
ctccatctttcgtttggtgaaaatg

SEQ ID NO: 5961646 - DNA, 25 bp, Homo sapien
gaataccgattgacgtccaattgat

SEQ ID NO: 5961647 - DNA, 25 bp, Homo sapien
accactgagaaataattatcaacaa

SEQ ID NO: 5961648 - DNA, 25 bp, Homo sapien
atttgccatgtcataagagatgcca

SEQ ID NO: 5961649 - DNA, 25 bp, Homo sapien
ggcatattcctctcaacaatgctaa

SEQ ID NO: 5961650 - DNA, 25 bp, Homo sapien
gccgtgttgcgcaacctcttcccat

SEQ ID NO: 5961651 - DNA, 25 bp, Homo sapien
ccagtcgaggcatattcctctcaac

SEQ ID NO: 5961652 - DNA, 25 bp, Homo sapien
caaacataccaacaaatgcatcaac

SEQ ID NO: 5961653 - DNA, 25 bp, Homo sapien
tgccatcgccatctgcaccaaacat

SEQ ID NO: 5961654 - DNA, 25 bp, Homo sapien
aagagatgccaaaatcaattatgta

SEQ ID NO: 5961655 - DNA, 25 bp, Homo sapien
tgatgtcgcggtgaatgatcttgtt

SEQ ID NO: 5961656 - DNA, 25 bp, Homo sapien
gtaagatgtgcttacatttgttgcc

SEQ ID NO: 5961657 - DNA, 25 bp, Homo sapien
cggtagccttagactctagaagagg

SEQ ID NO: 5961658 - DNA, 25 bp, Homo sapien
gggatttagcaaatcgtaataggga

SEQ ID NO: 5961659 - DNA, 25 bp, Homo sapien
tatccgtcaccttgctatccatggg

SEQ ID NO: 5961660 - DNA, 25 bp, Homo sapien
tgtgagttatttgccatgtcataag

SEQ ID NO: 5961661 - DNA, 25 bp, Homo sapien
catatgtatccgacctataaatcct

SEQ ID NO: 5961662 - DNA, 25 bp, Homo sapien
aatctcgtccagtcgaggcatattc

SEQ ID NO: 5961663 - DNA, 25 bp, Homo sapien
ttgcatgaactcataaaggttcatc

SEQ ID NO: 5961664 - DNA, 25 bp, Homo sapien
ggtcattattatcggtagccttaga

SEQ ID NO: 5961665 - DNA, 25 bp, Homo sapien
gtccagtacatacttgccatcgcca

SEQ ID NO: 5961666 - DNA, 25 bp, Homo sapien
atctcttttatagtgcatttgcatg

SEQ ID NO: 5961667 - DNA, 25 bp, Homo sapien
tttctgaacgggggggtccgcaaca

SEQ ID NO: 5961668 - DNA, 25 bp, Homo sapien
cgcaacaattgggatactgggattt

SEQ ID NO: 5961669 - DNA, 25 bp, Homo sapien
ttgcgcaacctcttcccatttctga

SEQ ID NO: 5961670 - DNA, 25 bp, Homo sapien
cacttctggggccttgtaaattcct

SEQ ID NO: 5961671 - DNA, 25 bp, Homo sapien
tgtaaattcctgtgcttatatccgt

SEQ ID NO: 5961672 - DNA, 25 bp, Homo sapien
tctgcttgactttgacatccgcaat

SEQ ID NO: 5961673 - DNA, 25 bp, Homo sapien
tcaaccgagccgtgttgcgcaacct

SEQ ID NO: 5961674 - DNA, 25 bp, Homo sapien
ttatcggtagccttagactctagaa

SEQ ID NO: 5961675 - DNA, 25 bp, Homo sapien
ctgagaaataattatcaacaacgac

SEQ ID NO: 5961676 - DNA, 25 bp, Homo sapien
ccaacttttcgaatattgagcaaat

SEQ ID NO: 5961677 - DNA, 25 bp, Homo sapien
cttgcaagattctttgacagctcca

SEQ ID NO: 5961678 - DNA, 25 bp, Homo sapien
tctgaacgggggggtccgcaacaat

SEQ ID NO: 5961679 - DNA, 25 bp, Homo sapien
catttaatggcatatgtatccgacc

SEQ ID NO: 5961680 - DNA, 25 bp, Homo sapien
tgaacttctgcttgactttgacatc

SEQ ID NO: 5961681 - DNA, 25 bp, Homo sapien
atcggtagccttagactctagaaga

SEQ ID NO: 5961682 - DNA, 25 bp, Homo sapien
cttgccatcgccatctgcaccaaac

SEQ ID NO: 5961683 - DNA, 25 bp, Homo sapien
ccgagccgtgttgcgcaacctcttc

SEQ ID NO: 5961684 - DNA, 25 bp, Homo sapien
actgacagtgtgtaatgtctatact

SEQ ID NO: 5961685 - DNA, 25 bp, Homo sapien
actcataaaggttcatctcttcaaa

SEQ ID NO: 5961686 - DNA, 25 bp, Homo sapien
ctggtattgtttgttagcatgatat

SEQ ID NO: 5961687 - DNA, 25 bp, Homo sapien
tcattattatcggtagccttagact

SEQ ID NO: 5961688 - DNA, 25 bp, Homo sapien
tatccgacctataaatcctagcagt

SEQ ID NO: 5961689 - DNA, 25 bp, Homo sapien
aataggtcattattatcggtagcct

SEQ ID NO: 5961690 - DNA, 25 bp, Homo sapien
ttgggatactgggatttagcaaatc

SEQ ID NO: 5961691 - DNA, 25 bp, Homo sapien
cgcacttgtttgtgagttatttgcc

SEQ ID NO: 5961692 - DNA, 25 bp, Homo sapien
atccatgggttccgcacttgtttgt

SEQ ID NO: 5961693 - DNA, 25 bp, Homo sapien
gtgaatgatcttgttctcatgtaag

SEQ ID NO: 5961694 - DNA, 25 bp, Homo sapien
gcccaacttttcgaatattgagcaa

SEQ ID NO: 5961695 - DNA, 25 bp, Homo sapien
agttcatgtcgtcgctgccgtcatc

SEQ ID NO: 5961696 - DNA, 25 bp, Homo sapien
attgacgtccaattgattagtatat

SEQ ID NO: 5961697 - DNA, 25 bp, Homo sapien
gagaaataattatcaacaacgacca

SEQ ID NO: 5961698 - DNA, 25 bp, Homo sapien
tgccaaaatcaattatgtacaactt

SEQ ID NO: 5961699 - DNA, 25 bp, Homo sapien
tcgaggcatattcctctcaacaatg

SEQ ID NO: 5961700 - DNA, 25 bp, Homo sapien
gtccaattgattagtatatttctga

SEQ ID NO: 5961701 - DNA, 25 bp, Homo sapien
catttgttgcccagtttgtttaata

SEQ ID NO: 5961702 - DNA, 25 bp, Homo sapien
ttgttagcatgatattttgcggttt

SEQ ID NO: 5961703 - DNA, 25 bp, Homo sapien
cttacatttgttgcccagtttgttt

SEQ ID NO: 5961704 - DNA, 25 bp, Homo sapien
aatcagtctgaaatcgcttccatct

SEQ ID NO: 5961705 - DNA, 25 bp, Homo sapien
aaaaagcacttctggggccttgtaa

SEQ ID NO: 5961706 - DNA, 25 bp, Homo sapien
acacgtccacgccaccatcatagca

SEQ ID NO: 5961707 - DNA, 25 bp, Homo sapien
gccccatacggcttgtttctctctg

SEQ ID NO: 5961708 - DNA, 25 bp, Homo sapien
cggtgaatgatcttgttctcatgta

SEQ ID NO: 5961709 - DNA, 25 bp, Homo sapien
cttttcgaatattgagcaaatcagt

SEQ ID NO: 5961710 - DNA, 25 bp, Homo sapien
cccatttctgaatggacggtatgcc

SEQ ID NO: 5961711 - DNA, 25 bp, Homo sapien
accaaacataccaacaaatgcatca

SEQ ID NO: 5961712 - DNA, 25 bp, Homo sapien
cgacctataaatcctagcagttcta

SEQ ID NO: 5961713 - DNA, 25 bp, Homo sapien
taatatcgatacttcgaatttggcg

SEQ ID NO: 5961714 - DNA, 25 bp, Homo sapien
catttctgaatggacggtatgccca

SEQ ID NO: 5961715 - DNA, 25 bp, Homo sapien
acgaccacacgtccacgccaccatc

SEQ ID NO: 5961716 - DNA, 25 bp, Homo sapien
tcgtccagtcgaggcatattcctct

SEQ ID NO: 5961717 - DNA, 25 bp, Homo sapien
ttcgaatttggcgttatgtggcggg

SEQ ID NO: 5961718 - DNA, 25 bp, Homo sapien
tcgaaatctagtgctagacatttaa

SEQ ID NO: 5961719 - DNA, 25 bp, Homo sapien
acaataggtcattattatcggtagc

SEQ ID NO: 5961720 - DNA, 25 bp, Homo sapien
cccaggatacaattaatgaacttct

SEQ ID NO: 5961721 - DNA, 25 bp, Homo sapien
ctataaatcctagcagttctagtag

SEQ ID NO: 5961722 - DNA, 25 bp, Homo sapien
catggccggaacgtgccccatacgg

SEQ ID NO: 5961723 - DNA, 25 bp, Homo sapien
tgtgcttacatttgttgcccagttt

SEQ ID NO: 5961724 - DNA, 25 bp, Homo sapien
acttcgaatttggcgttatgtggcg

SEQ ID NO: 5961725 - DNA, 25 bp, Homo sapien
gtaagaatgcaatcccttcaaccat

SEQ ID NO: 5961726 - DNA, 25 bp, Homo sapien
cggtatgcccaacttttcgaatatt

SEQ ID NO: 5961727 - DNA, 25 bp, Homo sapien
acctataaatcctagcagttctagt

SEQ ID NO: 5961728 - DNA, 25 bp, Homo sapien
tttgacagctccatctttcgtttgg

SEQ ID NO: 5961729 - DNA, 25 bp, Homo sapien
cgctgccgtcatcaatcatggccgg

SEQ ID NO: 5961730 - DNA, 25 bp, Homo sapien
tgttattgctgcattgtccgaaaaa

SEQ ID NO: 5961731 - DNA, 25 bp, Homo sapien
aagaaccaagtacgatgttgctgtc

SEQ ID NO: 5961732 - DNA, 25 bp, Homo sapien
agagagttgcctattgaaattgtag

SEQ ID NO: 5961733 - DNA, 25 bp, Homo sapien
ccattgatttgggtggtactaactt

SEQ ID NO: 5961734 - DNA, 25 bp, Homo sapien
tgagagatatctatggatggactgg

SEQ ID NO: 5961735 - DNA, 25 bp, Homo sapien
tatcaattgtgaatatggttccttc

SEQ ID NO: 5961736 - DNA, 25 bp, Homo sapien
aaaggactttggtgtcaagaccact

SEQ ID NO: 5961737 - DNA, 25 bp, Homo sapien
gacctccggttactacttgggtgaa

SEQ ID NO: 5961738 - DNA, 25 bp, Homo sapien
ttgcctattgaaattgtagcattga

SEQ ID NO: 5961739 - DNA, 25 bp, Homo sapien
aaaggttgttaagcactttatcgac

SEQ ID NO: 5961740 - DNA, 25 bp, Homo sapien
aaaagttggagggcaaattagcaga

SEQ ID NO: 5961741 - DNA, 25 bp, Homo sapien
gccacgatgtcgtcccattgctaca

SEQ ID NO: 5961742 - DNA, 25 bp, Homo sapien
gatcaagatctaagcaagttgaaac

SEQ ID NO: 5961743 - DNA, 25 bp, Homo sapien
ggaagccgccgctaagggtttgaga

SEQ ID NO: 5961744 - DNA, 25 bp, Homo sapien
ctattgaaattgtagcattgattaa

SEQ ID NO: 5961745 - DNA, 25 bp, Homo sapien
tgaacatttggtcttgccaagaacc

SEQ ID NO: 5961746 - DNA, 25 bp, Homo sapien
cttgagaaaggttgttaagcacttt

SEQ ID NO: 5961747 - DNA, 25 bp, Homo sapien
cgtaagttgattagaagactttgtg

SEQ ID NO: 5961748 - DNA, 25 bp, Homo sapien
gttggtactttaattgcctcatact

SEQ ID NO: 5961749 - DNA, 25 bp, Homo sapien
aattcatcagttggaagatatgttt

SEQ ID NO: 5961750 - DNA, 25 bp, Homo sapien
tttctatgatgttgtttccgatatc

SEQ ID NO: 5961751 - DNA, 25 bp, Homo sapien
attccaatgattcccggttgggtca

SEQ ID NO: 5961752 - DNA, 25 bp, Homo sapien
agtgttacttgaattaaacgagaag

SEQ ID NO: 5961753 - DNA, 25 bp, Homo sapien
caaaaggactttggtgtcaagacca

SEQ ID NO: 5961754 - DNA, 25 bp, Homo sapien
agatgacctccggttactacttggg

SEQ ID NO: 5961755 - DNA, 25 bp, Homo sapien
gtgaattgatcggtaccagagctgc

SEQ ID NO: 5961756 - DNA, 25 bp, Homo sapien
agcaaagatccaattacgattgttc

SEQ ID NO: 5961757 - DNA, 25 bp, Homo sapien
tttatggtcgagcaagaattgctaa

SEQ ID NO: 5961758 - DNA, 25 bp, Homo sapien
atggttcatttaggtccaaagaaac

SEQ ID NO: 5961759 - DNA, 25 bp, Homo sapien
cacaggctagaaagggttccatggc

SEQ ID NO: 5961760 - DNA, 25 bp, Homo sapien
gaattgatggatgaaattcatcagt

SEQ ID NO: 5961761 - DNA, 25 bp, Homo sapien
gtctataacaaatacccaggtttca

SEQ ID NO: 5961762 - DNA, 25 bp, Homo sapien
ggatacctcctacccagcaagaatc

SEQ ID NO: 5961763 - DNA, 25 bp, Homo sapien
atgacctccggttactacttgggtg

SEQ ID NO: 5961764 - DNA, 25 bp, Homo sapien
acatcttccaaaaggactttggtgt

SEQ ID NO: 5961765 - DNA, 25 bp, Homo sapien
ttaagcactttatcgacgaattgaa

SEQ ID NO: 5961766 - DNA, 25 bp, Homo sapien
ccaagggtttcgatattccaaatgt

SEQ ID NO: 5961767 - DNA, 25 bp, Homo sapien
aagatgggtgtgattttcggtactg

SEQ ID NO: 5961768 - DNA, 25 bp, Homo sapien
cccaacaggtaaagaatctggtaac

SEQ ID NO: 5961769 - DNA, 25 bp, Homo sapien
atgattcccggttgggtcatggaat

SEQ ID NO: 5961770 - DNA, 25 bp, Homo sapien
acaatctccaagacctggtcaacaa

SEQ ID NO: 5961771 - DNA, 25 bp, Homo sapien
tttgtggtattgccgctatttgcca

SEQ ID NO: 5961772 - DNA, 25 bp, Homo sapien
acttgaattaaacgagaagggcttg

SEQ ID NO: 5961773 - DNA, 25 bp, Homo sapien
caattacgattgttccagctgagga

SEQ ID NO: 5961774 - DNA, 25 bp, Homo sapien
ggtcacattgccgctgacggttctg

SEQ ID NO: 5961775 - DNA, 25 bp, Homo sapien
ttctgtctataacaaatacccaggt

SEQ ID NO: 5961776 - DNA, 25 bp, Homo sapien
aaaccacaggctagaaagggttcca

SEQ ID NO: 5961777 - DNA, 25 bp, Homo sapien
cgattgttccagctgaggatggttc

SEQ ID NO: 5961778 - DNA, 25 bp, Homo sapien
ttaggtttcaccttctcgtacccag

SEQ ID NO: 5961779 - DNA, 25 bp, Homo sapien
atcgaggatgatccatttgaaaact

SEQ ID NO: 5961780 - DNA, 25 bp, Homo sapien
acctggtcaacaagcttttgaaaag

SEQ ID NO: 5961781 - DNA, 25 bp, Homo sapien
ctaagcaccaagaggagttatggtc

SEQ ID NO: 5961782 - DNA, 25 bp, Homo sapien
ggaattcccaacaggtaaagaatct

SEQ ID NO: 5961783 - DNA, 25 bp, Homo sapien
agatatctatggatggactggtgac

SEQ ID NO: 5961784 - DNA, 25 bp, Homo sapien
atatggttccttcgataatgaacat

SEQ ID NO: 5961785 - DNA, 25 bp, Homo sapien
tgttggtcaagttgagcggtaacca

SEQ ID NO: 5961786 - DNA, 25 bp, Homo sapien
cagcttcccaaaacaagattaacga

SEQ ID NO: 5961787 - DNA, 25 bp, Homo sapien
tgtcgaaggccacgatgtcgtccca

SEQ ID NO: 5961788 - DNA, 25 bp, Homo sapien
actcaatccaagtataaactaccac

SEQ ID NO: 5961789 - DNA, 25 bp, Homo sapien
taaacaccaaggacaccttaccatt

SEQ ID NO: 5961790 - DNA, 25 bp, Homo sapien
attgatttgggtggtactaacttaa

SEQ ID NO: 5961791 - DNA, 25 bp, Homo sapien
tgacaaagaagggaggtaacattcc

SEQ ID NO: 5961792 - DNA, 25 bp, Homo sapien
ttgaaaacttggaagatactgatga

SEQ ID NO: 5961793 - DNA, 25 bp, Homo sapien
tcaacggtgctttctatgatgttgt

SEQ ID NO: 5961794 - DNA, 25 bp, Homo sapien
cttccaaaaggactttggtgtcaag

SEQ ID NO: 5961795 - DNA, 25 bp, Homo sapien
gtactaacttaagagtcgtgttggt

SEQ ID NO: 5961796 - DNA, 25 bp, Homo sapien
tgaaggactttatggtcgagcaaga

SEQ ID NO: 5961797 - DNA, 25 bp, Homo sapien
aagagaggttacaagactggtcaca

SEQ ID NO: 5961798 - DNA, 25 bp, Homo sapien
tttacagttgacagcgagaccttga

SEQ ID NO: 5961799 - DNA, 25 bp, Homo sapien
gactggtcacattgccgctgacggt

SEQ ID NO: 5961800 - DNA, 25 bp, Homo sapien
aatgtcgaaggccacgatgtcgtcc

SEQ ID NO: 5961801 - DNA, 25 bp, Homo sapien
gccgactctttgaaggactttatgg

SEQ ID NO: 5961802 - DNA, 25 bp, Homo sapien
ccgctatttgccaaaagagaggtta

SEQ ID NO: 5961803 - DNA, 25 bp, Homo sapien
ccgaaggtaagtctcttggtatcat

SEQ ID NO: 5961804 - DNA, 25 bp, Homo sapien
taggtccaaagaaaccacaggctag

SEQ ID NO: 5961805 - DNA, 25 bp, Homo sapien
tcagttggaagatatgtttacagtt

SEQ ID NO: 5961806 - DNA, 25 bp, Homo sapien
atggttcaggtgcaggtgctgctgt

SEQ ID NO: 5961807 - DNA, 25 bp, Homo sapien
tgatgttgtttccgatatcgaaaag

SEQ ID NO: 5961808 - DNA, 25 bp, Homo sapien
gagtcgtgttggtcaagttgagcgg

SEQ ID NO: 5961809 - DNA, 25 bp, Homo sapien
aggaattgatggatgaaattcatca

SEQ ID NO: 5961810 - DNA, 25 bp, Homo sapien
gaaacaaccatacatcatggatacc

SEQ ID NO: 5961811 - DNA, 25 bp, Homo sapien
ggtgctgctgttattgctgcattgt

SEQ ID NO: 5961812 - DNA, 25 bp, Homo sapien
ttgcgtctagtgttacttgaattaa

SEQ ID NO: 5961813 - DNA, 25 bp, Homo sapien
ctcctacccagcaagaatcgaggat

SEQ ID NO: 5961814 - DNA, 25 bp, Homo sapien
ttattgctgcattgtccgaaaaaag

SEQ ID NO: 5961815 - DNA, 25 bp, Homo sapien
ccttcgataatgaacatttggtctt

SEQ ID NO: 5961816 - DNA, 25 bp, Homo sapien
acatgagaaccactaagcaccaaga

SEQ ID NO: 5961817 - DNA, 25 bp, Homo sapien
aacaccaaggacaccttaccattag

SEQ ID NO: 5961818 - DNA, 25 bp, Homo sapien
tggtcctttattgccgactctttga

SEQ ID NO: 5961819 - DNA, 25 bp, Homo sapien
ggttccatggctgatgtgcccaagg

SEQ ID NO: 5961820 - DNA, 25 bp, Homo sapien
gctttctatgatgttgtttccgata

SEQ ID NO: 5961821 - DNA, 25 bp, Homo sapien
aagggtttcgatattccaaatgtcg

SEQ ID NO: 5961822 - DNA, 25 bp, Homo sapien
gatgacatcttccaaaaggactttg

SEQ ID NO: 5961823 - DNA, 25 bp, Homo sapien
gattcccggttgggtcatggaattc

SEQ ID NO: 5961824 - DNA, 25 bp, Homo sapien
ctatttggccattgatttgggtggt

SEQ ID NO: 5961825 - DNA, 25 bp, Homo sapien
tgccaagaaccaagtacgatgttgc

SEQ ID NO: 5961826 - DNA, 25 bp, Homo sapien
caagtataaactaccacatgacatg

SEQ ID NO: 5961827 - DNA, 25 bp, Homo sapien
tctaagcaagttgaaacaaccatac

SEQ ID NO: 5961828 - DNA, 25 bp, Homo sapien
tgtgattttcggtactggtgtcaac

SEQ ID NO: 5961829 - DNA, 25 bp, Homo sapien
ggtcaacaagcttttgaaaagatga

SEQ ID NO: 5961830 - DNA, 25 bp, Homo sapien
atattccaaatgtcgaaggccacga

SEQ ID NO: 5961831 - DNA, 25 bp, Homo sapien
cccagcttcccaaaacaagattaac

SEQ ID NO: 5961832 - DNA, 25 bp, Homo sapien
ggctagaaagggttccatggctgat

SEQ ID NO: 5961833 - DNA, 25 bp, Homo sapien
cgagaagggcttgatgttgaaggat

SEQ ID NO: 5961834 - DNA, 25 bp, Homo sapien
ggttacaagactggtcacattgccg

SEQ ID NO: 5961835 - DNA, 25 bp, Homo sapien
agcgagaccttgagaaaggttgtta

SEQ ID NO: 5961836 - DNA, 25 bp, Homo sapien
ggttcaggtgcaggtgctgctgtta

SEQ ID NO: 5961837 - DNA, 25 bp, Homo sapien
tccaaaaggactttggtgtcaagac

SEQ ID NO: 5961838 - DNA, 25 bp, Homo sapien
ggccattgatttgggtggtactaac

SEQ ID NO: 5961839 - DNA, 25 bp, Homo sapien
tcatggatacctcctacccagcaag

SEQ ID NO: 5961840 - DNA, 25 bp, Homo sapien
actggtgacgcaagcaaagatccaa

SEQ ID NO: 5961841 - DNA, 25 bp, Homo sapien
agcttttgaaaagatgacctccggt

SEQ ID NO: 5961842 - DNA, 25 bp, Homo sapien
aatccaagtataaactaccacatga

SEQ ID NO: 5961843 - DNA, 25 bp, Homo sapien
tcccattgctacaaaacgaaatttc

SEQ ID NO: 5961844 - DNA, 25 bp, Homo sapien
gtcgacgaacaatctccaagacctg

SEQ ID NO: 5961845 - DNA, 25 bp, Homo sapien
aggactttggtgtcaagaccactct

SEQ ID NO: 5961846 - DNA, 25 bp, Homo sapien
tacgatgttgctgtcgacgaacaat

SEQ ID NO: 5961847 - DNA, 25 bp, Homo sapien
tgtttccgatatcgaaaagttggag

SEQ ID NO: 5961848 - DNA, 25 bp, Homo sapien
ccactcaatccaagtataaactacc

SEQ ID NO: 5961849 - DNA, 25 bp, Homo sapien
gaaggtattttgcaaagatggacca

SEQ ID NO: 5961850 - DNA, 25 bp, Homo sapien
ctggtcaacaagcttttgaaaagat

SEQ ID NO: 5961851 - DNA, 25 bp, Homo sapien
tagcattgattaatgatactgttgg

SEQ ID NO: 5961852 - DNA, 25 bp, Homo sapien
taagttgattagaagactttgtgaa

SEQ ID NO: 5961853 - DNA, 25 bp, Homo sapien
tgtttacagttgacagcgagacctt

SEQ ID NO: 5961854 - DNA, 25 bp, Homo sapien
caccttaccattaggtttcaccttc

SEQ ID NO: 5961855 - DNA, 25 bp, Homo sapien
tttgagagatatctatggatggact

SEQ ID NO: 5961856 - DNA, 25 bp, Homo sapien
atggactggtgacgcaagcaaagat

SEQ ID NO: 5961857 - DNA, 25 bp, Homo sapien
taaacgagaagggcttgatgttgaa

SEQ ID NO: 5961858 - DNA, 25 bp, Homo sapien
ctgcattgtccgaaaaaagaattgc

SEQ ID NO: 5961859 - DNA, 25 bp, Homo sapien
ctccaatggctatcaattgtgaata

SEQ ID NO: 5961860 - DNA, 25 bp, Homo sapien
cccggttgggtcatggaattcccaa

SEQ ID NO: 5961861 - DNA, 25 bp, Homo sapien
gactttggtgtcaagaccactctgc

SEQ ID NO: 5961862 - DNA, 25 bp, Homo sapien
tgctagattagctgtttgtggtatt

SEQ ID NO: 5961863 - DNA, 25 bp, Homo sapien
gcttgatgttgaaggatcaagatct

SEQ ID NO: 5961864 - DNA, 25 bp, Homo sapien
accaagtacgatgttgctgtcgacg

SEQ ID NO: 5961865 - DNA, 25 bp, Homo sapien
aatacccaggtttcaaggaagccgc

SEQ ID NO: 5961866 - DNA, 25 bp, Homo sapien
tcaatccaagtataaactaccacat

SEQ ID NO: 5961867 - DNA, 25 bp, Homo sapien
atttggccattgatttgggtggtac

SEQ ID NO: 5961868 - DNA, 25 bp, Homo sapien
gacaccactcaatccaagtataaac

SEQ ID NO: 5961869 - DNA, 25 bp, Homo sapien
tcaattgtgaatatggttccttcga

SEQ ID NO: 5961870 - DNA, 25 bp, Homo sapien
tttggtcttgccaagaaccaagtac

SEQ ID NO: 5961871 - DNA, 25 bp, Homo sapien
tactggtgtcaacggtgctttctat

SEQ ID NO: 5961872 - DNA, 25 bp, Homo sapien
ggtgtcaacggtgctttctatgatg

SEQ ID NO: 5961873 - DNA, 25 bp, Homo sapien
cgataatgaacatttggtcttgcca

SEQ ID NO: 5961874 - DNA, 25 bp, Homo sapien
ccatacctttgacaccactcaatcc

SEQ ID NO: 5961875 - DNA, 25 bp, Homo sapien
cgagcaagaattgctaaacaccaag

SEQ ID NO: 5961876 - DNA, 25 bp, Homo sapien
gatctaagcaagttgaaacaaccat

SEQ ID NO: 5961877 - DNA, 25 bp, Homo sapien
acgaaatttccaagagagagttgcc

SEQ ID NO: 5961878 - DNA, 25 bp, Homo sapien
tccgatatcgaaaagttggagggca

SEQ ID NO: 5961879 - DNA, 25 bp, Homo sapien
aaggaagccgccgctaagggtttga

SEQ ID NO: 5961880 - DNA, 25 bp, Homo sapien
ggtcatggaattcccaacaggtaaa

SEQ ID NO: 5961881 - DNA, 25 bp, Homo sapien
tacactgacccagagactaagatgg

SEQ ID NO: 5961882 - DNA, 25 bp, Homo sapien
ttcgataatgaacatttggtcttgc

SEQ ID NO: 5961883 - DNA, 25 bp, Homo sapien
gaattaaacgagaagggcttgatgt

SEQ ID NO: 5961884 - DNA, 25 bp, Homo sapien
tacccagcttcccaaaacaagatta

SEQ ID NO: 5961885 - DNA, 25 bp, Homo sapien
gtaactatttggccattgatttggg

SEQ ID NO: 5961886 - DNA, 25 bp, Homo sapien
gatgatccatttgaaaacttggaag

SEQ ID NO: 5961887 - DNA, 25 bp, Homo sapien
gaattgccgaaggtaagtctcttgg

SEQ ID NO: 5961888 - DNA, 25 bp, Homo sapien
acgaaggtattttgcaaagatggac

SEQ ID NO: 5961889 - DNA, 25 bp, Homo sapien
ctgacccagagactaagatgggtgt

SEQ ID NO: 5961890 - DNA, 25 bp, Homo sapien
acaaaacgaaatttccaagagagag

SEQ ID NO: 5961891 - DNA, 25 bp, Homo sapien
acttggaagatactgatgacatctt

SEQ ID NO: 5961892 - DNA, 25 bp, Homo sapien
ggctgatgtgcccaaggaattgatg

SEQ ID NO: 5961893 - DNA, 25 bp, Homo sapien
aagatccaattacgattgttccagc

SEQ ID NO: 5961894 - DNA, 25 bp, Homo sapien
caagttgaaacaaccatacatcatg

SEQ ID NO: 5961895 - DNA, 25 bp, Homo sapien
atttgaaaacttggaagatactgat

SEQ ID NO: 5961896 - DNA, 25 bp, Homo sapien
tgttgaaggatcaagatctaagcaa

SEQ ID NO: 5961897 - DNA, 25 bp, Homo sapien
atctatggatggactggtgacgcaa

SEQ ID NO: 5961898 - DNA, 25 bp, Homo sapien
tgttaagcactttatcgacgaattg

SEQ ID NO: 5961899 - DNA, 25 bp, Homo sapien
aacaagcttttgaaaagatgacctc

SEQ ID NO: 5961900 - DNA, 25 bp, Homo sapien
taatgatactgttggtactttaatt

SEQ ID NO: 5961901 - DNA, 25 bp, Homo sapien
tgccgctgacggttctgtctataac

SEQ ID NO: 5961902 - DNA, 25 bp, Homo sapien
tgggtgtgattttcggtactggtgt

SEQ ID NO: 5961903 - DNA, 25 bp, Homo sapien
agaaagggttccatggctgatgtgc

SEQ ID NO: 5961904 - DNA, 25 bp, Homo sapien
caagcttttgaaaagatgacctccg

SEQ ID NO: 5961905 - DNA, 25 bp, Homo sapien
aagaccactctgccagaacgtaagt

SEQ ID NO: 5961906 - DNA, 25 bp, Homo sapien
cgacgaacaatctccaagacctggt

SEQ ID NO: 5961907 - DNA, 25 bp, Homo sapien
aaacgaaatttccaagagagagttg

SEQ ID NO: 5961908 - DNA, 25 bp, Homo sapien
cagagactaagatgggtgtgatttt

SEQ ID NO: 5961909 - DNA, 25 bp, Homo sapien
gatactgttggtactttaattgcct

SEQ ID NO: 5961910 - DNA, 25 bp, Homo sapien
aagactttgtgaattgatcggtacc

SEQ ID NO: 5961911 - DNA, 25 bp, Homo sapien
ggtggtactaacttaagagtcgtgt

SEQ ID NO: 5961912 - DNA, 25 bp, Homo sapien
tgtttgtggtattgccgctatttgc

SEQ ID NO: 5961913 - DNA, 25 bp, Homo sapien
tggtaactatttggccattgatttg

SEQ ID NO: 5961914 - DNA, 25 bp, Homo sapien
acgatattccaagtaactctccaat

SEQ ID NO: 5961915 - DNA, 25 bp, Homo sapien
aaattgtagcattgattaatgatac

SEQ ID NO: 5961916 - DNA, 25 bp, Homo sapien
gagttatggtcctttattgccgact

SEQ ID NO: 5961917 - DNA, 25 bp, Homo sapien
ctttgtgaattgatcggtaccagag

SEQ ID NO: 5961918 - DNA, 25 bp, Homo sapien
cgtacccagcttcccaaaacaagat

SEQ ID NO: 5961919 - DNA, 25 bp, Homo sapien
tatggtcgagcaagaattgctaaac

SEQ ID NO: 5961920 - DNA, 25 bp, Homo sapien
ggatggactggtgacgcaagcaaag

SEQ ID NO: 5961921 - DNA, 25 bp, Homo sapien
gtattttgcaaagatggaccaaggg

SEQ ID NO: 5961922 - DNA, 25 bp, Homo sapien
ggatggttcaggtgcaggtgctgct

SEQ ID NO: 5961923 - DNA, 25 bp, Homo sapien
gatgttgaaggatcaagatctaagc

SEQ ID NO: 5961924 - DNA, 25 bp, Homo sapien
agaccttgagaaaggttgttaagca

SEQ ID NO: 5961925 - DNA, 25 bp, Homo sapien
tagctgtttgtggtattgccgctat

SEQ ID NO: 5961926 - DNA, 25 bp, Homo sapien
gaaattcatcagttggaagatatgt

SEQ ID NO: 5961927 - DNA, 25 bp, Homo sapien
tctggtaactatttggccattgatt

SEQ ID NO: 5961928 - DNA, 25 bp, Homo sapien
ctgtcgacgaacaatctccaagacc

SEQ ID NO: 5961929 - DNA, 25 bp, Homo sapien
ggatgaaattcatcagttggaagat

SEQ ID NO: 5961930 - DNA, 25 bp, Homo sapien
gacgcaagcaaagatccaattacga

SEQ ID NO: 5961931 - DNA, 25 bp, Homo sapien
agcggtaaccatacctttgacacca

SEQ ID NO: 5961932 - DNA, 25 bp, Homo sapien
gatgtgcccaaggaattgatggatg

SEQ ID NO: 5961933 - DNA, 25 bp, Homo sapien
caagacctggtcaacaagcttttga

SEQ ID NO: 5961934 - DNA, 25 bp, Homo sapien
aagatactgatgacatcttccaaaa

SEQ ID NO: 5961935 - DNA, 25 bp, Homo sapien
ttccatggctgatgtgcccaaggaa

SEQ ID NO: 5961936 - DNA, 25 bp, Homo sapien
gaccactctgccagaacgtaagttg

SEQ ID NO: 5961937 - DNA, 25 bp, Homo sapien
gcttcccaaaacaagattaacgaag

SEQ ID NO: 5961938 - DNA, 25 bp, Homo sapien
taaactaccacatgacatgagaacc

SEQ ID NO: 5961939 - DNA, 25 bp, Homo sapien
tgctgcattgtccgaaaaaagaatt

SEQ ID NO: 5961940 - DNA, 25 bp, Homo sapien
agtataaactaccacatgacatgag

SEQ ID NO: 5961941 - DNA, 25 bp, Homo sapien
ccgctgacggttctgtctataacaa

SEQ ID NO: 5961942 - DNA, 25 bp, Homo sapien
aaagggttccatggctgatgtgccc

SEQ ID NO: 5961943 - DNA, 25 bp, Homo sapien
gcgtctagtgttacttgaattaaac

SEQ ID NO: 5961944 - DNA, 25 bp, Homo sapien
tatttgccaaaagagaggttacaag

SEQ ID NO: 5961945 - DNA, 25 bp, Homo sapien
gctgacggttctgtctataacaaat

SEQ ID NO: 5961946 - DNA, 25 bp, Homo sapien
atggttccttcgataatgaacattt

SEQ ID NO: 5961947 - DNA, 25 bp, Homo sapien
aacatttggtcttgccaagaaccaa

SEQ ID NO: 5961948 - DNA, 25 bp, Homo sapien
aaagaatctggtaactatttggcca

SEQ ID NO: 5961949 - DNA, 25 bp, Homo sapien
gggcttgatgttgaaggatcaagat

SEQ ID NO: 5961950 - DNA, 25 bp, Homo sapien
tgatggatgaaattcatcagttgga

SEQ ID NO: 5961951 - DNA, 25 bp, Homo sapien
agaatctggtaactatttggccatt

SEQ ID NO: 5961952 - DNA, 25 bp, Homo sapien
agagatatctatggatggactggtg

SEQ ID NO: 5961953 - DNA, 25 bp, Homo sapien
ctccggttactacttgggtgaattg

SEQ ID NO: 5961954 - DNA, 25 bp, Homo sapien
tggtactaacttaagagtcgtgttg

SEQ ID NO: 5961955 - DNA, 25 bp, Homo sapien
atatcgaaaagttggagggcaaatt

SEQ ID NO: 5961956 - DNA, 25 bp, Homo sapien
ccaagaaccaagtacgatgttgctg

SEQ ID NO: 5961957 - DNA, 25 bp, Homo sapien
atactacactgacccagagactaag

SEQ ID NO: 5961958 - DNA, 25 bp, Homo sapien
gaacaatctccaagacctggtcaac

SEQ ID NO: 5961959 - DNA, 25 bp, Homo sapien
ctagaaagggttccatggctgatgt

SEQ ID NO: 5961960 - DNA, 25 bp, Homo sapien
agttgattagaagactttgtgaatt

SEQ ID NO: 5961961 - DNA, 25 bp, Homo sapien
agagttgcctattgaaattgtagca

SEQ ID NO: 5961962 - DNA, 25 bp, Homo sapien
gaaccaagtacgatgttgctgtcga

SEQ ID NO: 5961963 - DNA, 25 bp, Homo sapien
aaagaagggaggtaacattccaatg

SEQ ID NO: 5961964 - DNA, 25 bp, Homo sapien
attgccgctgacggttctgtctata

SEQ ID NO: 5961965 - DNA, 25 bp, Homo sapien
gcaaattagcagacgatattccaag

SEQ ID NO: 5961966 - DNA, 25 bp, Homo sapien
cttgccaagaaccaagtacgatgtt

SEQ ID NO: 5961967 - DNA, 25 bp, Homo sapien
tccaaatgtcgaaggccacgatgtc

SEQ ID NO: 5961968 - DNA, 25 bp, Homo sapien
tggtcgagcaagaattgctaaacac

SEQ ID NO: 5961969 - DNA, 25 bp, Homo sapien
acaaagaagggaggtaacattccaa

SEQ ID NO: 5961970 - DNA, 25 bp, Homo sapien
gtaccagagctgctagattagctgt

SEQ ID NO: 5961971 - DNA, 25 bp, Homo sapien
ggttccttcgataatgaacatttgg

SEQ ID NO: 5961972 - DNA, 25 bp, Homo sapien
atgatactgttggtactttaattgc

SEQ ID NO: 5961973 - DNA, 25 bp, Homo sapien
tctgccagaacgtaagttgattaga

SEQ ID NO: 5961974 - DNA, 25 bp, Homo sapien
caagcaaagatccaattacgattgt

SEQ ID NO: 5961975 - DNA, 25 bp, Homo sapien
aggatcaagatctaagcaagttgaa

SEQ ID NO: 5961976 - DNA, 25 bp, Homo sapien
tccgaaaaaagaattgccgaaggta

SEQ ID NO: 5961977 - DNA, 25 bp, Homo sapien
cgatatcgaaaagttggagggcaaa

SEQ ID NO: 5961978 - DNA, 25 bp, Homo sapien
aagtctcttggtatcattggcgctt

SEQ ID NO: 5961979 - DNA, 25 bp, Homo sapien
ttccttcgataatgaacatttggtc

SEQ ID NO: 5961980 - DNA, 25 bp, Homo sapien
tgagcggtaaccatacctttgacac

SEQ ID NO: 5961981 - DNA, 25 bp, Homo sapien
cagagctgctagattagctgtttgt

SEQ ID NO: 5961982 - DNA, 25 bp, Homo sapien
ttgaaacaaccatacatcatggata

SEQ ID NO: 5961983 - DNA, 25 bp, Homo sapien
attttgcaaagatggaccaagggtt

SEQ ID NO: 5961984 - DNA, 25 bp, Homo sapien
gttgagcggtaaccatacctttgac

SEQ ID NO: 5961985 - DNA, 25 bp, Homo sapien
taacgaaggtattttgcaaagatgg

SEQ ID NO: 5961986 - DNA, 25 bp, Homo sapien
gtaactctccaatggctatcaattg

SEQ ID NO: 5961987 - DNA, 25 bp, Homo sapien
tgccaaaagagaggttacaagactg

SEQ ID NO: 5961988 - DNA, 25 bp, Homo sapien
tgacggttctgtctataacaaatac

SEQ ID NO: 5961989 - DNA, 25 bp, Homo sapien
tccaaagaaaccacaggctagaaag

SEQ ID NO: 5961990 - DNA, 25 bp, Homo sapien
cattaggtttcaccttctcgtaccc

SEQ ID NO: 5961991 - DNA, 25 bp, Homo sapien
agaagggaggtaacattccaatgat

SEQ ID NO: 5961992 - DNA, 25 bp, Homo sapien
cacatgacatgagaaccactaagca

SEQ ID NO: 5961993 - DNA, 25 bp, Homo sapien
gaggtaacattccaatgattcccgg

SEQ ID NO: 5961994 - DNA, 25 bp, Homo sapien
aggtaagtctcttggtatcattggc

SEQ ID NO: 5961995 - DNA, 25 bp, Homo sapien
tatgtttacagttgacagcgagacc

SEQ ID NO: 5961996 - DNA, 25 bp, Homo sapien
attgaaattgtagcattgattaatg

SEQ ID NO: 5961997 - DNA, 25 bp, Homo sapien
aaattagcagacgatattccaagta

SEQ ID NO: 5961998 - DNA, 25 bp, Homo sapien
agttggaagatatgtttacagttga

SEQ ID NO: 5961999 - DNA, 25 bp, Homo sapien
gctaaacaccaaggacaccttacca

SEQ ID NO: 5962000 - DNA, 25 bp, Homo sapien
aggacaccttaccattaggtttcac

SEQ ID NO: 5962001 - DNA, 25 bp, Homo sapien
cctttattgccgactctttgaagga

SEQ ID NO: 5962002 - DNA, 25 bp, Homo sapien
tcaagttgagcggtaaccatacctt

SEQ ID NO: 5962003 - DNA, 25 bp, Homo sapien
tctttgaaggactttatggtcgagc

SEQ ID NO: 5962004 - DNA, 25 bp, Homo sapien
cccagagactaagatgggtgtgatt

SEQ ID NO: 5962005 - DNA, 25 bp, Homo sapien
aaccatacctttgacaccactcaat

SEQ ID NO: 5962006 - DNA, 25 bp, Homo sapien
cctcatactacactgacccagagac

SEQ ID NO: 5962007 - DNA, 25 bp, Homo sapien
ggtttcaaggaagccgccgctaagg

SEQ ID NO: 5962008 - DNA, 25 bp, Homo sapien
gctgttattgctgcattgtccgaaa

SEQ ID NO: 5962009 - DNA, 25 bp, Homo sapien
gtcgtcccattgctacaaaacgaaa

SEQ ID NO: 5962010 - DNA, 25 bp, Homo sapien
tgtcaagaccactctgccagaacgt

SEQ ID NO: 5962011 - DNA, 25 bp, Homo sapien
acaggtaaagaatctggtaactatt

SEQ ID NO: 5962012 - DNA, 25 bp, Homo sapien
acgaacaatctccaagacctggtca

SEQ ID NO: 5962013 - DNA, 25 bp, Homo sapien
atccatttgaaaacttggaagatac

SEQ ID NO: 5962014 - DNA, 25 bp, Homo sapien
actttatggtcgagcaagaattgct

SEQ ID NO: 5962015 - DNA, 25 bp, Homo sapien
gctatttgccaaaagagaggttaca

SEQ ID NO: 5962016 - DNA, 25 bp, Homo sapien
gttgctgtcgacgaacaatctccaa

SEQ ID NO: 5962017 - DNA, 25 bp, Homo sapien
agaacgtaagttgattagaagactt

SEQ ID NO: 5962018 - DNA, 25 bp, Homo sapien
ggactttatggtcgagcaagaattg

SEQ ID NO: 5962019 - DNA, 25 bp, Homo sapien
cgaggatgatccatttgaaaacttg

SEQ ID NO: 5962020 - DNA, 25 bp, Homo sapien
tccaagacctggtcaacaagctttt

SEQ ID NO: 5962021 - DNA, 25 bp, Homo sapien
atgaaattcatcagttggaagatat

SEQ ID NO: 5962022 - DNA, 25 bp, Homo sapien
ctacttgggtgaattgttgcgtcta

SEQ ID NO: 5962023 - DNA, 25 bp, Homo sapien
ctagtgttacttgaattaaacgaga

SEQ ID NO: 5962024 - DNA, 25 bp, Homo sapien
agattaacgaaggtattttgcaaag

SEQ ID NO: 5962025 - DNA, 25 bp, Homo sapien
cgatattccaaatgtcgaaggccac

SEQ ID NO: 5962026 - DNA, 25 bp, Homo sapien
gccgccgctaagggtttgagagata

SEQ ID NO: 5962027 - DNA, 25 bp, Homo sapien
actctttgaaggactttatggtcga

SEQ ID NO: 5962028 - DNA, 25 bp, Homo sapien
tgatccatttgaaaacttggaagat

SEQ ID NO: 5962029 - DNA, 25 bp, Homo sapien
acattgccgctgacggttctgtcta

SEQ ID NO: 5962030 - DNA, 25 bp, Homo sapien
cactaagcaccaagaggagttatgg

SEQ ID NO: 5962031 - DNA, 25 bp, Homo sapien
tttccaagagagagttgcctattga

SEQ ID NO: 5962032 - DNA, 25 bp, Homo sapien
ggtaacattccaatgattcccggtt

SEQ ID NO: 5962033 - DNA, 25 bp, Homo sapien
aagactggtcacattgccgctgacg

SEQ ID NO: 5962034 - DNA, 25 bp, Homo sapien
atggatggactggtgacgcaagcaa

SEQ ID NO: 5962035 - DNA, 25 bp, Homo sapien
atgttgtttccgatatcgaaaagtt

SEQ ID NO: 5962036 - DNA, 25 bp, Homo sapien
accactaagcaccaagaggagttat

SEQ ID NO: 5962037 - DNA, 25 bp, Homo sapien
gaaggccacgatgtcgtcccattgc

SEQ ID NO: 5962038 - DNA, 25 bp, Homo sapien
acagcgagaccttgagaaaggttgt

SEQ ID NO: 5962039 - DNA, 25 bp, Homo sapien
gtcgagcaagaattgctaaacacca

SEQ ID NO: 5962040 - DNA, 25 bp, Homo sapien
ctttggtgtcaagaccactctgcca

SEQ ID NO: 5962041 - DNA, 25 bp, Homo sapien
atgagaaccactaagcaccaagagg

SEQ ID NO: 5962042 - DNA, 25 bp, Homo sapien
aactatttggccattgatttgggtg

SEQ ID NO: 5962043 - DNA, 25 bp, Homo sapien
accaagaggagttatggtcctttat

SEQ ID NO: 5962044 - DNA, 25 bp, Homo sapien
ttgaaggatcaagatctaagcaagt

SEQ ID NO: 5962045 - DNA, 25 bp, Homo sapien
aagatctaagcaagttgaaacaacc

SEQ ID NO: 5962046 - DNA, 25 bp, Homo sapien
gttgggtcatggaattcccaacagg

SEQ ID NO: 5962047 - DNA, 25 bp, Homo sapien
agagagagttgcctattgaaattgt

SEQ ID NO: 5962048 - DNA, 25 bp, Homo sapien
tgttacttgaattaaacgagaaggg

SEQ ID NO: 5962049 - DNA, 25 bp, Homo sapien
gaccaagggtttcgatattccaaat

SEQ ID NO: 5962050 - DNA, 25 bp, Homo sapien
ttgtgaattgatcggtaccagagct

SEQ ID NO: 5962051 - DNA, 25 bp, Homo sapien
gagggcaaattagcagacgatattc

SEQ ID NO: 5962052 - DNA, 25 bp, Homo sapien
atgttgctgtcgacgaacaatctcc

SEQ ID NO: 5962053 - DNA, 25 bp, Homo sapien
gaaccactaagcaccaagaggagtt

SEQ ID NO: 5962054 - DNA, 25 bp, Homo sapien
aggtttcaccttctcgtacccagct

SEQ ID NO: 5962055 - DNA, 25 bp, Homo sapien
agggttccatggctgatgtgcccaa

SEQ ID NO: 5962056 - DNA, 25 bp, Homo sapien
cgatgtcgtcccattgctacaaaac

SEQ ID NO: 5962057 - DNA, 25 bp, Homo sapien
ttcccggttgggtcatggaattccc

SEQ ID NO: 5962058 - DNA, 25 bp, Homo sapien
cgaattgaataaaggtttgacaaag

SEQ ID NO: 5962059 - DNA, 25 bp, Homo sapien
ttaagagtcgtgttggtcaagttga

SEQ ID NO: 5962060 - DNA, 25 bp, Homo sapien
tgtcaacggtgctttctatgatgtt

SEQ ID NO: 5962061 - DNA, 25 bp, Homo sapien
attgttgcgtctagtgttacttgaa

SEQ ID NO: 5962062 - DNA, 25 bp, Homo sapien
gagactaagatgggtgtgattttcg

SEQ ID NO: 5962063 - DNA, 25 bp, Homo sapien
aagatggaccaagggtttcgatatt

SEQ ID NO: 5962064 - DNA, 25 bp, Homo sapien
tacccagcaagaatcgaggatgatc

SEQ ID NO: 5962065 - DNA, 25 bp, Homo sapien
cactgacccagagactaagatgggt

SEQ ID NO: 5962066 - DNA, 25 bp, Homo sapien
aatggctatcaattgtgaatatggt

SEQ ID NO: 5962067 - DNA, 25 bp, Homo sapien
ttgggtgaattgttgcgtctagtgt

SEQ ID NO: 5962068 - DNA, 25 bp, Homo sapien
tactgttggtactttaattgcctca

SEQ ID NO: 5962069 - DNA, 25 bp, Homo sapien
attgctacaaaacgaaatttccaag

SEQ ID NO: 5962070 - DNA, 25 bp, Homo sapien
tccaatgattcccggttgggtcatg

SEQ ID NO: 5962071 - DNA, 25 bp, Homo sapien
gtctagtgttacttgaattaaacga

SEQ ID NO: 5962072 - DNA, 25 bp, Homo sapien
tggtactttaattgcctcatactac

SEQ ID NO: 5962073 - DNA, 25 bp, Homo sapien
gtttcaccttctcgtacccagcttc

SEQ ID NO: 5962074 - DNA, 25 bp, Homo sapien
catttggtcttgccaagaaccaagt

SEQ ID NO: 5962075 - DNA, 25 bp, Homo sapien
gactaagatgggtgtgattttcggt

SEQ ID NO: 5962076 - DNA, 25 bp, Homo sapien
atacctcctacccagcaagaatcga

SEQ ID NO: 5962077 - DNA, 25 bp, Homo sapien
tattgccgactctttgaaggacttt

SEQ ID NO: 5962078 - DNA, 25 bp, Homo sapien
ttgacaccactcaatccaagtataa

SEQ ID NO: 5962079 - DNA, 25 bp, Homo sapien
taattgcctcatactacactgaccc

SEQ ID NO: 5962080 - DNA, 25 bp, Homo sapien
gtgaatatggttccttcgataatga

SEQ ID NO: 5962081 - DNA, 25 bp, Homo sapien
aagaatcgaggatgatccatttgaa

SEQ ID NO: 5962082 - DNA, 25 bp, Homo sapien
ttcccaacaggtaaagaatctggta

SEQ ID NO: 5962083 - DNA, 25 bp, Homo sapien
ttacaagactggtcacattgccgct

SEQ ID NO: 5962084 - DNA, 25 bp, Homo sapien
cgatgttgctgtcgacgaacaatct

SEQ ID NO: 5962085 - DNA, 25 bp, Homo sapien
caggtttcaaggaagccgccgctaa

SEQ ID NO: 5962086 - DNA, 25 bp, Homo sapien
ctataacaaatacccaggtttcaag

SEQ ID NO: 5962087 - DNA, 25 bp, Homo sapien
caagaattgctaaacaccaaggaca

SEQ ID NO: 5962088 - DNA, 25 bp, Homo sapien
aattgtgaatatggttccttcgata

SEQ ID NO: 5962089 - DNA, 25 bp, Homo sapien
tacagttgacagcgagaccttgaga

SEQ ID NO: 5962090 - DNA, 25 bp, Homo sapien
caggtgctgctgttattgctgcatt

SEQ ID NO: 5962091 - DNA, 25 bp, Homo sapien
gggcaaattagcagacgatattcca

SEQ ID NO: 5962092 - DNA, 25 bp, Homo sapien
ttggtcaagttgagcggtaaccata

SEQ ID NO: 5962093 - DNA, 25 bp, Homo sapien
attgccgaaggtaagtctcttggta

SEQ ID NO: 5962094 - DNA, 25 bp, Homo sapien
caaagatccaattacgattgttcca

SEQ ID NO: 5962095 - DNA, 25 bp, Homo sapien
gcattgattaatgatactgttggta

SEQ ID NO: 5962096 - DNA, 25 bp, Homo sapien
gttgttaagcactttatcgacgaat

SEQ ID NO: 5962097 - DNA, 25 bp, Homo sapien
gtctcttggtatcattggcgcttaa

SEQ ID NO: 5962098 - DNA, 25 bp, Homo sapien
gtcgtgttggtcaagttgagcggta

SEQ ID NO: 5962099 - DNA, 25 bp, Homo sapien
ttccaagtaactctccaatggctat

SEQ ID NO: 5962100 - DNA, 25 bp, Homo sapien
tgacagcgagaccttgagaaaggtt

SEQ ID NO: 5962101 - DNA, 25 bp, Homo sapien
agaaaggttgttaagcactttatcg

SEQ ID NO: 5962102 - DNA, 25 bp, Homo sapien
attagcagacgatattccaagtaac

SEQ ID NO: 5962103 - DNA, 25 bp, Homo sapien
tttgccaaaagagaggttacaagac

SEQ ID NO: 5962104 - DNA, 25 bp, Homo sapien
tcgaaggccacgatgtcgtcccatt

SEQ ID NO: 5962105 - DNA, 25 bp, Homo sapien
aggttgttaagcactttatcgacga

SEQ ID NO: 5962106 - DNA, 25 bp, Homo sapien
acaaatacccaggtttcaaggaagc

SEQ ID NO: 5962107 - DNA, 25 bp, Homo sapien
ctgctgttattgctgcattgtccga

SEQ ID NO: 5962108 - DNA, 25 bp, Homo sapien
catgacatgagaaccactaagcacc

SEQ ID NO: 5962109 - DNA, 25 bp, Homo sapien
gaggttacaagactggtcacattgc

SEQ ID NO: 5962110 - DNA, 25 bp, Homo sapien
taacttaagagtcgtgttggtcaag

SEQ ID NO: 5962111 - DNA, 25 bp, Homo sapien
gggtttcgatattccaaatgtcgaa

SEQ ID NO: 5962112 - DNA, 25 bp, Homo sapien
ctagattagctgtttgtggtattgc

SEQ ID NO: 5962113 - DNA, 25 bp, Homo sapien
aagaattgccgaaggtaagtctctt

SEQ ID NO: 5962114 - DNA, 25 bp, Homo sapien
gctaagggtttgagagatatctatg

SEQ ID NO: 5962115 - DNA, 25 bp, Homo sapien
ttagaagactttgtgaattgatcgg

SEQ ID NO: 5962116 - DNA, 25 bp, Homo sapien
ataacaaatacccaggtttcaagga

SEQ ID NO: 5962117 - DNA, 25 bp, Homo sapien
gtattgccgctatttgccaaaagag

SEQ ID NO: 5962118 - DNA, 25 bp, Homo sapien
tttaattgcctcatactacactgac

SEQ ID NO: 5962119 - DNA, 25 bp, Homo sapien
tcaagatctaagcaagttgaaacaa

SEQ ID NO: 5962120 - DNA, 25 bp, Homo sapien
aggagttatggtcctttattgccga

SEQ ID NO: 5962121 - DNA, 25 bp, Homo sapien
ccattgctacaaaacgaaatttcca

SEQ ID NO: 5962122 - DNA, 25 bp, Homo sapien
gcactttatcgacgaattgaataaa

SEQ ID NO: 5962123 - DNA, 25 bp, Homo sapien
agcaagttgaaacaaccatacatca

SEQ ID NO: 5962124 - DNA, 25 bp, Homo sapien
tattccaagtaactctccaatggct

SEQ ID NO: 5962125 - DNA, 25 bp, Homo sapien
gaaatttccaagagagagttgccta

SEQ ID NO: 5962126 - DNA, 25 bp, Homo sapien
tgggtggtactaacttaagagtcgt

SEQ ID NO: 5962127 - DNA, 25 bp, Homo sapien
ttacttgaattaaacgagaagggct

SEQ ID NO: 5962128 - DNA, 25 bp, Homo sapien
attgtccgaaaaaagaattgccgaa

SEQ ID NO: 5962129 - DNA, 25 bp, Homo sapien
agaattgctaaacaccaaggacacc

SEQ ID NO: 5962130 - DNA, 25 bp, Homo sapien
caaagatggaccaagggtttcgata

SEQ ID NO: 5962131 - DNA, 25 bp, Homo sapien
ctgatgacatcttccaaaaggactt

SEQ ID NO: 5962132 - DNA, 25 bp, Homo sapien
accagagctgctagattagctgttt

SEQ ID NO: 5962133 - DNA, 25 bp, Homo sapien
ttgtgaatatggttccttcgataat

SEQ ID NO: 5962134 - DNA, 25 bp, Homo sapien
agattagctgtttgtggtattgccg

SEQ ID NO: 5962135 - DNA, 25 bp, Homo sapien
tttgggtggtactaacttaagagtc

SEQ ID NO: 5962136 - DNA, 25 bp, Homo sapien
ttcatcagttggaagatatgtttac

SEQ ID NO: 5962137 - DNA, 25 bp, Homo sapien
ggtgcaggtgctgctgttattgctg

SEQ ID NO: 5962138 - DNA, 25 bp, Homo sapien
cgagaccttgagaaaggttgttaag

SEQ ID NO: 5962139 - DNA, 25 bp, Homo sapien
ccaaaagagaggttacaagactggt

SEQ ID NO: 5962140 - DNA, 25 bp, Homo sapien
caccttctcgtacccagcttcccaa

SEQ ID NO: 5962141 - DNA, 25 bp, Homo sapien
attgatcggtaccagagctgctaga

SEQ ID NO: 5962142 - DNA, 25 bp, Homo sapien
tgttgcgtctagtgttacttgaatt

SEQ ID NO: 5962143 - DNA, 25 bp, Homo sapien
tacatcatggatacctcctacccag

SEQ ID NO: 5962144 - DNA, 25 bp, Homo sapien
tggctatcaattgtgaatatggttc

SEQ ID NO: 5962145 - DNA, 25 bp, Homo sapien
gggaggtaacattccaatgattccc

SEQ ID NO: 5962146 - DNA, 25 bp, Homo sapien
tgccgctatttgccaaaagagaggt

SEQ ID NO: 5962147 - DNA, 25 bp, Homo sapien
agttgcctattgaaattgtagcatt

SEQ ID NO: 5962148 - DNA, 25 bp, Homo sapien
ctaccacatgacatgagaaccacta

SEQ ID NO: 5962149 - DNA, 25 bp, Homo sapien
cccaggtttcaaggaagccgccgct

SEQ ID NO: 5962150 - DNA, 25 bp, Homo sapien
aacgagaagggcttgatgttgaagg

SEQ ID NO: 5962151 - DNA, 25 bp, Homo sapien
gatatgtttacagttgacagcgaga

SEQ ID NO: 5962152 - DNA, 25 bp, Homo sapien
aagcactttatcgacgaattgaata

SEQ ID NO: 5962153 - DNA, 25 bp, Homo sapien
gaatcgaggatgatccatttgaaaa

SEQ ID NO: 5962154 - DNA, 25 bp, Homo sapien
attgctgcattgtccgaaaaaagaa

SEQ ID NO: 5962155 - DNA, 25 bp, Homo sapien
atggatgaaattcatcagttggaag

SEQ ID NO: 5962156 - DNA, 25 bp, Homo sapien
acaagactggtcacattgccgctga

SEQ ID NO: 5962157 - DNA, 25 bp, Homo sapien
gctatcaattgtgaatatggttcct

SEQ ID NO: 5962158 - DNA, 25 bp, Homo sapien
agtacgatgttgctgtcgacgaaca

SEQ ID NO: 5962159 - DNA, 25 bp, Homo sapien
acattccaatgattcccggttgggt

SEQ ID NO: 5962160 - DNA, 25 bp, Homo sapien
tgtagcattgattaatgatactgtt

SEQ ID NO: 5962161 - DNA, 25 bp, Homo sapien
ttctcgtacccagcttcccaaaaca

SEQ ID NO: 5962162 - DNA, 25 bp, Homo sapien
gtactttaattgcctcatactacac

SEQ ID NO: 5962163 - DNA, 25 bp, Homo sapien
gttgacagcgagaccttgagaaagg

SEQ ID NO: 5962164 - DNA, 25 bp, Homo sapien
actttaattgcctcatactacactg

SEQ ID NO: 5962165 - DNA, 25 bp, Homo sapien
aagtaactctccaatggctatcaat

SEQ ID NO: 5962166 - DNA, 25 bp, Homo sapien
caagaggagttatggtcctttattg

SEQ ID NO: 5962167 - DNA, 25 bp, Homo sapien
gtgaattgttgcgtctagtgttact

SEQ ID NO: 5962168 - DNA, 25 bp, Homo sapien
ccgctaagggtttgagagatatcta

SEQ ID NO: 5962169 - DNA, 25 bp, Homo sapien
gttactacttgggtgaattgttgcg

SEQ ID NO: 5962170 - DNA, 25 bp, Homo sapien
agttgaaacaaccatacatcatgga

SEQ ID NO: 5962171 - DNA, 25 bp, Homo sapien
gaattgatcggtaccagagctgcta

SEQ ID NO: 5962172 - DNA, 25 bp, Homo sapien
tttgaaaagatgacctccggttact

SEQ ID NO: 5962173 - DNA, 25 bp, Homo sapien
tccaagagagagttgcctattgaaa

SEQ ID NO: 5962174 - DNA, 25 bp, Homo sapien
ggactggtgacgcaagcaaagatcc

SEQ ID NO: 5962175 - DNA, 25 bp, Homo sapien
gctgctagattagctgtttgtggta

SEQ ID NO: 5962176 - DNA, 25 bp, Homo sapien
tcacattgccgctgacggttctgtc

SEQ ID NO: 5962177 - DNA, 25 bp, Homo sapien
agacgatattccaagtaactctcca

SEQ ID NO: 5962178 - DNA, 25 bp, Homo sapien
gtcctttattgccgactctttgaag

SEQ ID NO: 5962179 - DNA, 25 bp, Homo sapien
tgctacaaaacgaaatttccaagag

SEQ ID NO: 5962180 - DNA, 25 bp, Homo sapien
tggtcttgccaagaaccaagtacga

SEQ ID NO: 5962181 - DNA, 25 bp, Homo sapien
actctgccagaacgtaagttgatta

SEQ ID NO: 5962182 - DNA, 25 bp, Homo sapien
tgggtcatggaattcccaacaggta

SEQ ID NO: 5962183 - DNA, 25 bp, Homo sapien
tacgattgttccagctgaggatggt

SEQ ID NO: 5962184 - DNA, 25 bp, Homo sapien
cgtcccattgctacaaaacgaaatt

SEQ ID NO: 5962185 - DNA, 25 bp, Homo sapien
tgtggtattgccgctatttgccaaa

SEQ ID NO: 5962186 - DNA, 25 bp, Homo sapien
aagggcttgatgttgaaggatcaag

SEQ ID NO: 5962187 - DNA, 25 bp, Homo sapien
ttggtgtcaagaccactctgccaga

SEQ ID NO: 5962188 - DNA, 25 bp, Homo sapien
tttatcgacgaattgaataaaggtt

SEQ ID NO: 5962189 - DNA, 25 bp, Homo sapien
tttgaaggactttatggtcgagcaa

SEQ ID NO: 5962190 - DNA, 25 bp, Homo sapien
ccaagtaactctccaatggctatca

SEQ ID NO: 5962191 - DNA, 25 bp, Homo sapien
aagagtcgtgttggtcaagttgagc

SEQ ID NO: 5962192 - DNA, 25 bp, Homo sapien
gcaccaagaggagttatggtccttt

SEQ ID NO: 5962193 - DNA, 25 bp, Homo sapien
tgccagaacgtaagttgattagaag

SEQ ID NO: 5962194 - DNA, 25 bp, Homo sapien
cctacccagcaagaatcgaggatga

SEQ ID NO: 5962195 - DNA, 25 bp, Homo sapien
caaatgtcgaaggccacgatgtcgt

SEQ ID NO: 5962196 - DNA, 25 bp, Homo sapien
tcccaaaacaagattaacgaaggta

SEQ ID NO: 5962197 - DNA, 25 bp, Homo sapien
acggttctgtctataacaaataccc

SEQ ID NO: 5962198 - DNA, 25 bp, Homo sapien
ttaccattaggtttcaccttctcgt

SEQ ID NO: 5962199 - DNA, 25 bp, Homo sapien
caagtacgatgttgctgtcgacgaa

SEQ ID NO: 5962200 - DNA, 25 bp, Homo sapien
cggtgctttctatgatgttgtttcc

SEQ ID NO: 5962201 - DNA, 25 bp, Homo sapien
caagattaacgaaggtattttgcaa

SEQ ID NO: 5962202 - DNA, 25 bp, Homo sapien
ctgtctataacaaatacccaggttt

SEQ ID NO: 5962203 - DNA, 25 bp, Homo sapien
tccaattacgattgttccagctgag

SEQ ID NO: 5962204 - DNA, 25 bp, Homo sapien
tcaaggaagccgccgctaagggttt

SEQ ID NO: 5962205 - DNA, 25 bp, Homo sapien
gttggagggcaaattagcagacgat

SEQ ID NO: 5962206 - DNA, 25 bp, Homo sapien
caagagagagttgcctattgaaatt

SEQ ID NO: 5962207 - DNA, 25 bp, Homo sapien
tgcaaagatggaccaagggtttcga

SEQ ID NO: 5962208 - DNA, 25 bp, Homo sapien
ccaatggctatcaattgtgaatatg

SEQ ID NO: 5962209 - DNA, 25 bp, Homo sapien
acttaagagtcgtgttggtcaagtt

SEQ ID NO: 5962210 - DNA, 25 bp, Homo sapien
ctaagatgggtgtgattttcggtac

SEQ ID NO: 5962211 - DNA, 25 bp, Homo sapien
tataaactaccacatgacatgagaa

SEQ ID NO: 5962212 - DNA, 25 bp, Homo sapien
gcaagaatcgaggatgatccatttg

SEQ ID NO: 5962213 - DNA, 25 bp, Homo sapien
ccttaccattaggtttcaccttctc

SEQ ID NO: 5962214 - DNA, 25 bp, Homo sapien
gtaaagaatctggtaactatttggc

SEQ ID NO: 5962215 - DNA, 25 bp, Homo sapien
attgattaatgatactgttggtact

SEQ ID NO: 5962216 - DNA, 25 bp, Homo sapien
ttcaggtgcaggtgctgctgttatt

SEQ ID NO: 5962217 - DNA, 25 bp, Homo sapien
acttgggtgaattgttgcgtctagt

SEQ ID NO: 5962218 - DNA, 25 bp, Homo sapien
attaacgaaggtattttgcaaagat

SEQ ID NO: 5962219 - DNA, 25 bp, Homo sapien
ccttctcgtacccagcttcccaaaa

SEQ ID NO: 5962220 - DNA, 25 bp, Homo sapien
aggtattttgcaaagatggaccaag

SEQ ID NO: 5962221 - DNA, 25 bp, Homo sapien
tgatcggtaccagagctgctagatt

SEQ ID NO: 5962222 - DNA, 25 bp, Homo sapien
gactttgtgaattgatcggtaccag

SEQ ID NO: 5962223 - DNA, 25 bp, Homo sapien
agaggagttatggtcctttattgcc

SEQ ID NO: 5962224 - DNA, 25 bp, Homo sapien
tagcagacgatattccaagtaactc

SEQ ID NO: 5962225 - DNA, 25 bp, Homo sapien
accatacatcatggatacctcctac

SEQ ID NO: 5962226 - DNA, 25 bp, Homo sapien
tacccaggtttcaaggaagccgccg

SEQ ID NO: 5962227 - DNA, 25 bp, Homo sapien
aatgaacatttggtcttgccaagaa

SEQ ID NO: 5962228 - DNA, 25 bp, Homo sapien
attccaaatgtcgaaggccacgatg

SEQ ID NO: 5962229 - DNA, 25 bp, Homo sapien
aattcccaacaggtaaagaatctgg

SEQ ID NO: 5962230 - DNA, 25 bp, Homo sapien
ggtgtcaagaccactctgccagaac

SEQ ID NO: 5962231 - DNA, 25 bp, Homo sapien
attgccgctatttgccaaaagagag

SEQ ID NO: 5962232 - DNA, 25 bp, Homo sapien
aatctccaagacctggtcaacaagc

SEQ ID NO: 5962233 - DNA, 25 bp, Homo sapien
caaccatacatcatggatacctcct

SEQ ID NO: 5962234 - DNA, 25 bp, Homo sapien
agaagactttgtgaattgatcggta

SEQ ID NO: 5962235 - DNA, 25 bp, Homo sapien
accacatgacatgagaaccactaag

SEQ ID NO: 5962236 - DNA, 25 bp, Homo sapien
cacgatgtcgtcccattgctacaaa

SEQ ID NO: 5962237 - DNA, 25 bp, Homo sapien
gacgaattgaataaaggtttgacaa

SEQ ID NO: 5962238 - DNA, 25 bp, Homo sapien
caggtgcaggtgctgctgttattgc

SEQ ID NO: 5962239 - DNA, 25 bp, Homo sapien
catcagttggaagatatgtttacag

SEQ ID NO: 5962240 - DNA, 25 bp, Homo sapien
aatttccaagagagagttgcctatt

SEQ ID NO: 5962241 - DNA, 25 bp, Homo sapien
acctttgacaccactcaatccaagt

SEQ ID NO: 5962242 - DNA, 25 bp, Homo sapien
cttttgaaaagatgacctccggtta

SEQ ID NO: 5962243 - DNA, 25 bp, Homo sapien
catttaggtccaaagaaaccacagg

SEQ ID NO: 5962244 - DNA, 25 bp, Homo sapien
caccactcaatccaagtataaacta

SEQ ID NO: 5962245 - DNA, 25 bp, Homo sapien
atgtcgtcccattgctacaaaacga

SEQ ID NO: 5962246 - DNA, 25 bp, Homo sapien
tttaggtccaaagaaaccacaggct

SEQ ID NO: 5962247 - DNA, 25 bp, Homo sapien
ccagaacgtaagttgattagaagac

SEQ ID NO: 5962248 - DNA, 25 bp, Homo sapien
taagcaagttgaaacaaccatacat

SEQ ID NO: 5962249 - DNA, 25 bp, Homo sapien
tactgatgacatcttccaaaaggac

SEQ ID NO: 5962250 - DNA, 25 bp, Homo sapien
cgactctttgaaggactttatggtc

SEQ ID NO: 5962251 - DNA, 25 bp, Homo sapien
acctcctacccagcaagaatcgagg

SEQ ID NO: 5962252 - DNA, 25 bp, Homo sapien
gggtgaattgttgcgtctagtgtta

SEQ ID NO: 5962253 - DNA, 25 bp, Homo sapien
ccatttgaaaacttggaagatactg

SEQ ID NO: 5962254 - DNA, 25 bp, Homo sapien
atatctatggatggactggtgacgc

SEQ ID NO: 5962255 - DNA, 25 bp, Homo sapien
ccagctgaggatggttcaggtgcag

SEQ ID NO: 5962256 - DNA, 25 bp, Homo sapien
catacatcatggatacctcctaccc

SEQ ID NO: 5962257 - DNA, 25 bp, Homo sapien
tctatgatgttgtttccgatatcga

SEQ ID NO: 5962258 - DNA, 25 bp, Homo sapien
gcagacgatattccaagtaactctc

SEQ ID NO: 5962259 - DNA, 25 bp, Homo sapien
aagccgccgctaagggtttgagaga

SEQ ID NO: 5962260 - DNA, 25 bp, Homo sapien
ctttgacaccactcaatccaagtat

SEQ ID NO: 5962261 - DNA, 25 bp, Homo sapien
caaagaaaccacaggctagaaaggg

SEQ ID NO: 5962262 - DNA, 25 bp, Homo sapien
attagctgtttgtggtattgccgct

SEQ ID NO: 5962263 - DNA, 25 bp, Homo sapien
ggtccaaagaaaccacaggctagaa

SEQ ID NO: 5962264 - DNA, 25 bp, Homo sapien
accacaggctagaaagggttccatg

SEQ ID NO: 5962265 - DNA, 25 bp, Homo sapien
ccactctgccagaacgtaagttgat

SEQ ID NO: 5962266 - DNA, 25 bp, Homo sapien
aattgctaaacaccaaggacacctt

SEQ ID NO: 5962267 - DNA, 25 bp, Homo sapien
cgccgctaagggtttgagagatatc

SEQ ID NO: 5962268 - DNA, 25 bp, Homo sapien
accattaggtttcaccttctcgtac

SEQ ID NO: 5962269 - DNA, 25 bp, Homo sapien
cgaaaagttggagggcaaattagca

SEQ ID NO: 5962270 - DNA, 25 bp, Homo sapien
gaaaacttggaagatactgatgaca

SEQ ID NO: 5962271 - DNA, 25 bp, Homo sapien
attgttccagctgaggatggttcag

SEQ ID NO: 5962272 - DNA, 25 bp, Homo sapien
ggttcatttaggtccaaagaaacca

SEQ ID NO: 5962273 - DNA, 25 bp, Homo sapien
gagctgctagattagctgtttgtgg

SEQ ID NO: 5962274 - DNA, 25 bp, Homo sapien
tttccgatatcgaaaagttggaggg

SEQ ID NO: 5962275 - DNA, 25 bp, Homo sapien
ggtttgacaaagaagggaggtaaca

SEQ ID NO: 5962276 - DNA, 25 bp, Homo sapien
actacactgacccagagactaagat

SEQ ID NO: 5962277 - DNA, 25 bp, Homo sapien
aactctccaatggctatcaattgtg

SEQ ID NO: 5962278 - DNA, 25 bp, Homo sapien
attgatggatgaaattcatcagttg

SEQ ID NO: 5962279 - DNA, 25 bp, Homo sapien
tttgacaaagaagggaggtaacatt

SEQ ID NO: 5962280 - DNA, 25 bp, Homo sapien
aactaccacatgacatgagaaccac

SEQ ID NO: 5962281 - DNA, 25 bp, Homo sapien
tgcaggtgctgctgttattgctgca

SEQ ID NO: 5962282 - DNA, 25 bp, Homo sapien
aagttgagcggtaaccatacctttg

SEQ ID NO: 5962283 - DNA, 25 bp, Homo sapien
gatccaattacgattgttccagctg

SEQ ID NO: 5962284 - DNA, 25 bp, Homo sapien
atcggtaccagagctgctagattag

SEQ ID NO: 5962285 - DNA, 25 bp, Homo sapien
ctacaaaacgaaatttccaagagag

SEQ ID NO: 5962286 - DNA, 25 bp, Homo sapien
agctgaggatggttcaggtgcaggt

SEQ ID NO: 5962287 - DNA, 25 bp, Homo sapien
tggtgacgcaagcaaagatccaatt

SEQ ID NO: 5962288 - DNA, 25 bp, Homo sapien
agaagggcttgatgttgaaggatca

SEQ ID NO: 5962289 - DNA, 25 bp, Homo sapien
ttgatgttgaaggatcaagatctaa

SEQ ID NO: 5962290 - DNA, 25 bp, Homo sapien
gacaccttaccattaggtttcacct

SEQ ID NO: 5962291 - DNA, 25 bp, Homo sapien
taagggtttgagagatatctatgga

SEQ ID NO: 5962292 - DNA, 25 bp, Homo sapien
aagcaccaagaggagttatggtcct

SEQ ID NO: 5962293 - DNA, 25 bp, Homo sapien
ggttctgtctataacaaatacccag

SEQ ID NO: 5962294 - DNA, 25 bp, Homo sapien
tgtccgaaaaaagaattgccgaagg

SEQ ID NO: 5962295 - DNA, 25 bp, Homo sapien
ctcgtacccagcttcccaaaacaag

SEQ ID NO: 5962296 - DNA, 25 bp, Homo sapien
agggtttgagagatatctatggatg

SEQ ID NO: 5962297 - DNA, 25 bp, Homo sapien
ttccagctgaggatggttcaggtgc

SEQ ID NO: 5962298 - DNA, 25 bp, Homo sapien
gtaagtctcttggtatcattggcgc

SEQ ID NO: 5962299 - DNA, 25 bp, Homo sapien
ggaagatactgatgacatcttccaa

SEQ ID NO: 5962300 - DNA, 25 bp, Homo sapien
accttgagaaaggttgttaagcact

SEQ ID NO: 5962301 - DNA, 25 bp, Homo sapien
agcaagaattgctaaacaccaagga

SEQ ID NO: 5962302 - DNA, 25 bp, Homo sapien
cgcaagcaaagatccaattacgatt

SEQ ID NO: 5962303 - DNA, 25 bp, Homo sapien
ggtgtgattttcggtactggtgtca

SEQ ID NO: 5962304 - DNA, 25 bp, Homo sapien
tgctgctgttattgctgcattgtcc

SEQ ID NO: 5962305 - DNA, 25 bp, Homo sapien
attgtagcattgattaatgatactg

SEQ ID NO: 5962306 - DNA, 25 bp, Homo sapien
caatgattcccggttgggtcatgga

SEQ ID NO: 5962307 - DNA, 25 bp, Homo sapien
ctatggatggactggtgacgcaagc

SEQ ID NO: 5962308 - DNA, 25 bp, Homo sapien
aacaaccatacatcatggatacctc

SEQ ID NO: 5962309 - DNA, 25 bp, Homo sapien
tgacatgagaaccactaagcaccaa

SEQ ID NO: 5962310 - DNA, 25 bp, Homo sapien
ctgatgtgcccaaggaattgatgga

SEQ ID NO: 5962311 - DNA, 25 bp, Homo sapien
tgcccaaggaattgatggatgaaat

SEQ ID NO: 5962312 - DNA, 25 bp, Homo sapien
aaagatgacctccggttactacttg

SEQ ID NO: 5962313 - DNA, 25 bp, Homo sapien
actttatcgacgaattgaataaagg

SEQ ID NO: 5962314 - DNA, 25 bp, Homo sapien
ccatggctgatgtgcccaaggaatt

SEQ ID NO: 5962315 - DNA, 25 bp, Homo sapien
gagaaccactaagcaccaagaggag

SEQ ID NO: 5962316 - DNA, 25 bp, Homo sapien
gaaggtaagtctcttggtatcattg

SEQ ID NO: 5962317 - DNA, 25 bp, Homo sapien
ctctccaatggctatcaattgtgaa

SEQ ID NO: 5962318 - DNA, 25 bp, Homo sapien
tatggtcctttattgccgactcttt

SEQ ID NO: 5962319 - DNA, 25 bp, Homo sapien
aagatatgtttacagttgacagcga

SEQ ID NO: 5962320 - DNA, 25 bp, Homo sapien
aaaagaattgccgaaggtaagtctc

SEQ ID NO: 5962321 - DNA, 25 bp, Homo sapien
gatgggtgtgattttcggtactggt

SEQ ID NO: 5962322 - DNA, 25 bp, Homo sapien
gaggatggttcaggtgcaggtgctg

SEQ ID NO: 5962323 - DNA, 25 bp, Homo sapien
cggttactacttgggtgaattgttg

SEQ ID NO: 5962324 - DNA, 25 bp, Homo sapien
tggtattgccgctatttgccaaaag

SEQ ID NO: 5962325 - DNA, 25 bp, Homo sapien
gttatggtcctttattgccgactct

SEQ ID NO: 5962326 - DNA, 25 bp, Homo sapien
gtttcgatattccaaatgtcgaagg

SEQ ID NO: 5962327 - DNA, 25 bp, Homo sapien
atacctttgacaccactcaatccaa

SEQ ID NO: 5962328 - DNA, 25 bp, Homo sapien
aaggactttatggtcgagcaagaat

SEQ ID NO: 5962329 - DNA, 25 bp, Homo sapien
tggaccaagggtttcgatattccaa

SEQ ID NO: 5962330 - DNA, 25 bp, Homo sapien
caaggacaccttaccattaggtttc

SEQ ID NO: 5962331 - DNA, 25 bp, Homo sapien
catcatggatacctcctacccagca

SEQ ID NO: 5962332 - DNA, 25 bp, Homo sapien
ttgattagaagactttgtgaattga

SEQ ID NO: 5962333 - DNA, 25 bp, Homo sapien
gatactgatgacatcttccaaaagg

SEQ ID NO: 5962334 - DNA, 25 bp, Homo sapien
gctgtttgtggtattgccgctattt

SEQ ID NO: 5962335 - DNA, 25 bp, Homo sapien
tgacatcttccaaaaggactttggt

SEQ ID NO: 5962336 - DNA, 25 bp, Homo sapien
gtgacgcaagcaaagatccaattac

SEQ ID NO: 5962337 - DNA, 25 bp, Homo sapien
tgaaaagatgacctccggttactac

SEQ ID NO: 5962338 - DNA, 25 bp, Homo sapien
gaatatggttccttcgataatgaac

SEQ ID NO: 5962339 - DNA, 25 bp, Homo sapien
gaattgttgcgtctagtgttacttg

SEQ ID NO: 5962340 - DNA, 25 bp, Homo sapien
ttgctaaacaccaaggacaccttac

SEQ ID NO: 5962341 - DNA, 25 bp, Homo sapien
aatctggtaactatttggccattga

SEQ ID NO: 5962342 - DNA, 25 bp, Homo sapien
ggtcaagttgagcggtaaccatacc

SEQ ID NO: 5962343 - DNA, 25 bp, Homo sapien
aaaagagaggttacaagactggtca

SEQ ID NO: 5962344 - DNA, 25 bp, Homo sapien
gcattgtccgaaaaaagaattgccg

SEQ ID NO: 5962345 - DNA, 25 bp, Homo sapien
aacaagattaacgaaggtattttgc

SEQ ID NO: 5962346 - DNA, 25 bp, Homo sapien
tatgatgttgtttccgatatcgaaa

SEQ ID NO: 5962347 - DNA, 25 bp, Homo sapien
cggtaccagagctgctagattagct

SEQ ID NO: 5962348 - DNA, 25 bp, Homo sapien
tttcggtactggtgtcaacggtgct

SEQ ID NO: 5962349 - DNA, 25 bp, Homo sapien
caaggaattgatggatgaaattcat

SEQ ID NO: 5962350 - DNA, 25 bp, Homo sapien
attgcctcatactacactgacccag

SEQ ID NO: 5962351 - DNA, 25 bp, Homo sapien
attaaacgagaagggcttgatgttg

SEQ ID NO: 5962352 - DNA, 25 bp, Homo sapien
aggccacgatgtcgtcccattgcta

SEQ ID NO: 5962353 - DNA, 25 bp, Homo sapien
ataatgaacatttggtcttgccaag

SEQ ID NO: 5962354 - DNA, 25 bp, Homo sapien
ttggaagatactgatgacatcttcc

SEQ ID NO: 5962355 - DNA, 25 bp, Homo sapien
tcgacgaattgaataaaggtttgac

SEQ ID NO: 5962356 - DNA, 25 bp, Homo sapien
actaacttaagagtcgtgttggtca

SEQ ID NO: 5962357 - DNA, 25 bp, Homo sapien
cccagcaagaatcgaggatgatcca

SEQ ID NO: 5962358 - DNA, 25 bp, Homo sapien
gtaaccatacctttgacaccactca

SEQ ID NO: 5962359 - DNA, 25 bp, Homo sapien
tttcaaggaagccgccgctaagggt

SEQ ID NO: 5962360 - DNA, 25 bp, Homo sapien
gtgctttctatgatgttgtttccga

SEQ ID NO: 5962361 - DNA, 25 bp, Homo sapien
tcatggaattcccaacaggtaaaga

SEQ ID NO: 5962362 - DNA, 25 bp, Homo sapien
ggtactggtgtcaacggtgctttct

SEQ ID NO: 5962363 - DNA, 25 bp, Homo sapien
tttgcaaagatggaccaagggtttc

SEQ ID NO: 5962364 - DNA, 25 bp, Homo sapien
agacctggtcaacaagcttttgaaa

SEQ ID NO: 5962365 - DNA, 25 bp, Homo sapien
aacgtaagttgattagaagactttg

SEQ ID NO: 5962366 - DNA, 25 bp, Homo sapien
tatcgacgaattgaataaaggtttg

SEQ ID NO: 5962367 - DNA, 25 bp, Homo sapien
ggtttgagagatatctatggatgga

SEQ ID NO: 5962368 - DNA, 25 bp, Homo sapien
tgattttcggtactggtgtcaacgg

SEQ ID NO: 5962369 - DNA, 25 bp, Homo sapien
caggctagaaagggttccatggctg

SEQ ID NO: 5962370 - DNA, 25 bp, Homo sapien
ttcaccttctcgtacccagcttccc

SEQ ID NO: 5962371 - DNA, 25 bp, Homo sapien
ttgccgactctttgaaggactttat

SEQ ID NO: 5962372 - DNA, 25 bp, Homo sapien
tttattgccgactctttgaaggact

SEQ ID NO: 5962373 - DNA, 25 bp, Homo sapien
ctggtcacattgccgctgacggttc

SEQ ID NO: 5962374 - DNA, 25 bp, Homo sapien
atggctgatgtgcccaaggaattga

SEQ ID NO: 5962375 - DNA, 25 bp, Homo sapien
cggttgggtcatggaattcccaaca

SEQ ID NO: 5962376 - DNA, 25 bp, Homo sapien
aggatgatccatttgaaaacttgga

SEQ ID NO: 5962377 - DNA, 25 bp, Homo sapien
atggatacctcctacccagcaagaa

SEQ ID NO: 5962378 - DNA, 25 bp, Homo sapien
cagttgacagcgagaccttgagaaa

SEQ ID NO: 5962379 - DNA, 25 bp, Homo sapien
aggtaaagaatctggtaactatttg

SEQ ID NO: 5962380 - DNA, 25 bp, Homo sapien
tactacttgggtgaattgttgcgtc

SEQ ID NO: 5962381 - DNA, 25 bp, Homo sapien
tgccgaaggtaagtctcttggtatc

SEQ ID NO: 5962382 - DNA, 25 bp, Homo sapien
tgttccagctgaggatggttcaggt

SEQ ID NO: 5962383 - DNA, 25 bp, Homo sapien
ttggccattgatttgggtggtacta

SEQ ID NO: 5962384 - DNA, 25 bp, Homo sapien
atcgaaaagttggagggcaaattag

SEQ ID NO: 5962385 - DNA, 25 bp, Homo sapien
tgtgcccaaggaattgatggatgaa

SEQ ID NO: 5962386 - DNA, 25 bp, Homo sapien
cgtgttggtcaagttgagcggtaac

SEQ ID NO: 5962387 - DNA, 25 bp, Homo sapien
gttgtttccgatatcgaaaagttgg

SEQ ID NO: 5962388 - DNA, 25 bp, Homo sapien
aagttggagggcaaattagcagacg

SEQ ID NO: 5962389 - DNA, 25 bp, Homo sapien
cagcaagaatcgaggatgatccatt

SEQ ID NO: 5962390 - DNA, 25 bp, Homo sapien
gatggaccaagggtttcgatattcc

SEQ ID NO: 5962391 - DNA, 25 bp, Homo sapien
atcttccaaaaggactttggtgtca

SEQ ID NO: 5962392 - DNA, 25 bp, Homo sapien
tgagaaaggttgttaagcactttat

SEQ ID NO: 5962393 - DNA, 25 bp, Homo sapien
cggtaaccatacctttgacaccact

SEQ ID NO: 5962394 - DNA, 25 bp, Homo sapien
aaacttggaagatactgatgacatc

SEQ ID NO: 5962395 - DNA, 25 bp, Homo sapien
gcctattgaaattgtagcattgatt

SEQ ID NO: 5962396 - DNA, 25 bp, Homo sapien
tcaacaagcttttgaaaagatgacc

SEQ ID NO: 5962397 - DNA, 25 bp, Homo sapien
ggaagatatgtttacagttgacagc

SEQ ID NO: 5962398 - DNA, 25 bp, Homo sapien
attacgattgttccagctgaggatg

SEQ ID NO: 5962399 - DNA, 25 bp, Homo sapien
cccaaggaattgatggatgaaattc

SEQ ID NO: 5962400 - DNA, 25 bp, Homo sapien
tgcctcatactacactgacccagag

SEQ ID NO: 5962401 - DNA, 25 bp, Homo sapien
caccaaggacaccttaccattaggt

SEQ ID NO: 5962402 - DNA, 25 bp, Homo sapien
tgctgtcgacgaacaatctccaaga

SEQ ID NO: 5962403 - DNA, 25 bp, Homo sapien
taacattccaatgattcccggttgg

SEQ ID NO: 5962404 - DNA, 25 bp, Homo sapien
aagggaggtaacattccaatgattc

SEQ ID NO: 5962405 - DNA, 25 bp, Homo sapien
ctggtgtcaacggtgctttctatga

SEQ ID NO: 5962406 - DNA, 25 bp, Homo sapien
agaaaccacaggctagaaagggttc

SEQ ID NO: 5962407 - DNA, 25 bp, Homo sapien
tgattaatgatactgttggtacttt

SEQ ID NO: 5962408 - DNA, 25 bp, Homo sapien
gtcttgccaagaaccaagtacgatg

SEQ ID NO: 5962409 - DNA, 25 bp, Homo sapien
tgatttgggtggtactaacttaaga

SEQ ID NO: 5962410 - DNA, 25 bp, Homo sapien
gattagaagactttgtgaattgatc

SEQ ID NO: 5962411 - DNA, 25 bp, Homo sapien
ctgaggatggttcaggtgcaggtgc

SEQ ID NO: 5962412 - DNA, 25 bp, Homo sapien
ttgaattaaacgagaagggcttgat

SEQ ID NO: 5962413 - DNA, 25 bp, Homo sapien
attaatgatactgttggtactttaa

SEQ ID NO: 5962414 - DNA, 25 bp, Homo sapien
tctccaagacctggtcaacaagctt

SEQ ID NO: 5962415 - DNA, 25 bp, Homo sapien
gagaggttacaagactggtcacatt

SEQ ID NO: 5962416 - DNA, 25 bp, Homo sapien
atggaattcccaacaggtaaagaat

SEQ ID NO: 5962417 - DNA, 25 bp, Homo sapien
tgaaattgtagcattgattaatgat

SEQ ID NO: 5962418 - DNA, 25 bp, Homo sapien
attttcggtactggtgtcaacggtg

SEQ ID NO: 5962419 - DNA, 25 bp, Homo sapien
gacccagagactaagatgggtgtga

SEQ ID NO: 5962420 - DNA, 25 bp, Homo sapien
ttcgatattccaaatgtcgaaggcc

SEQ ID NO: 5962421 - DNA, 25 bp, Homo sapien
tcaagaccactctgccagaacgtaa

SEQ ID NO: 5962422 - DNA, 25 bp, Homo sapien
aacggtgctttctatgatgttgttt

SEQ ID NO: 5962423 - DNA, 25 bp, Homo sapien
tggagggcaaattagcagacgatat

SEQ ID NO: 5962424 - DNA, 25 bp, Homo sapien
tccaagtataaactaccacatgaca

SEQ ID NO: 5962425 - DNA, 25 bp, Homo sapien
tcatactacactgacccagagacta

SEQ ID NO: 5962426 - DNA, 25 bp, Homo sapien
gaaggatcaagatctaagcaagttg

SEQ ID NO: 5962427 - DNA, 25 bp, Homo sapien
gatattccaagtaactctccaatgg

SEQ ID NO: 5962428 - DNA, 25 bp, Homo sapien
caacaggtaaagaatctggtaacta

SEQ ID NO: 5962429 - DNA, 25 bp, Homo sapien
ttcatttaggtccaaagaaaccaca

SEQ ID NO: 5962430 - DNA, 25 bp, Homo sapien
ctgttggtactttaattgcctcata

SEQ ID NO: 5962431 - DNA, 25 bp, Homo sapien
ttggaagatatgtttacagttgaca

SEQ ID NO: 5962432 - DNA, 25 bp, Homo sapien
tcggtactggtgtcaacggtgcttt

SEQ ID NO: 5962433 - DNA, 25 bp, Homo sapien
ctctcttggaaatttcgttttgtag

SEQ ID NO: 5962434 - DNA, 25 bp, Homo sapien
catcaattccttgggcacatcagcc

SEQ ID NO: 5962435 - DNA, 25 bp, Homo sapien
gaaggtgaaacctaatggtaaggtg

SEQ ID NO: 5962436 - DNA, 25 bp, Homo sapien
agattctttacctgttgggaattcc

SEQ ID NO: 5962437 - DNA, 25 bp, Homo sapien
cacccaaatcaatggccaaatagtt

SEQ ID NO: 5962438 - DNA, 25 bp, Homo sapien
tatagacagaaccgtcagcggcaat

SEQ ID NO: 5962439 - DNA, 25 bp, Homo sapien
tagacgcaacaattcacccaagtag

SEQ ID NO: 5962440 - DNA, 25 bp, Homo sapien
tacctgttgggaattccatgaccca

SEQ ID NO: 5962441 - DNA, 25 bp, Homo sapien
ataaagtccttcaaagagtcggcaa

SEQ ID NO: 5962442 - DNA, 25 bp, Homo sapien
gtttcaacttgcttagatcttgatc

SEQ ID NO: 5962443 - DNA, 25 bp, Homo sapien
cggcggcttccttgaaacctgggta

SEQ ID NO: 5962444 - DNA, 25 bp, Homo sapien
acaacctttctcaaggtctcgctgt

SEQ ID NO: 5962445 - DNA, 25 bp, Homo sapien
gtaaacatatcttccaactgatgaa

SEQ ID NO: 5962446 - DNA, 25 bp, Homo sapien
ctagcctgtggtttctttggaccta

SEQ ID NO: 5962447 - DNA, 25 bp, Homo sapien
accacccaaatcaatggccaaatag

SEQ ID NO: 5962448 - DNA, 25 bp, Homo sapien
ctttctagcctgtggtttctttgga

SEQ ID NO: 5962449 - DNA, 25 bp, Homo sapien
aaccgggaatcattggaatgttacc

SEQ ID NO: 5962450 - DNA, 25 bp, Homo sapien
tgaccaggtcttggagattgttcgt

SEQ ID NO: 5962451 - DNA, 25 bp, Homo sapien
cccaagtagtaaccggaggtcatct

SEQ ID NO: 5962452 - DNA, 25 bp, Homo sapien
acacgactcttaagttagtaccacc

SEQ ID NO: 5962453 - DNA, 25 bp, Homo sapien
gtcttctaatcaacttacgttctgg

SEQ ID NO: 5962454 - DNA, 25 bp, Homo sapien
ctctctcttggaaatttcgttttgt

SEQ ID NO: 5962455 - DNA, 25 bp, Homo sapien
tcggacaatgcagcaataacagcag

SEQ ID NO: 5962456 - DNA, 25 bp, Homo sapien
cttttggcaaatagcggcaatacca

SEQ ID NO: 5962457 - DNA, 25 bp, Homo sapien
ccaacagtatcattaatcaatgcta

SEQ ID NO: 5962458 - DNA, 25 bp, Homo sapien
ggtcatcttttcaaaagcttgttga

SEQ ID NO: 5962459 - DNA, 25 bp, Homo sapien
taggcaactctctcttggaaatttc

SEQ ID NO: 5962460 - DNA, 25 bp, Homo sapien
ttaaagtaccaacagtatcattaat

SEQ ID NO: 5962461 - DNA, 25 bp, Homo sapien
acacccatcttagtctctgggtcag

SEQ ID NO: 5962462 - DNA, 25 bp, Homo sapien
actagacgcaacaattcacccaagt

SEQ ID NO: 5962463 - DNA, 25 bp, Homo sapien
ggtctcgctgtcaactgtaaacata

SEQ ID NO: 5962464 - DNA, 25 bp, Homo sapien
tgaaacctgggtatttgttatagac

SEQ ID NO: 5962465 - DNA, 25 bp, Homo sapien
gtggttctcatgtcatgtggtagtt

SEQ ID NO: 5962466 - DNA, 25 bp, Homo sapien
aaacccttagcggcggcttccttga

SEQ ID NO: 5962467 - DNA, 25 bp, Homo sapien
gggtacgagaaggtgaaacctaatg

SEQ ID NO: 5962468 - DNA, 25 bp, Homo sapien
gtgtcaaaggtatggttaccgctca

SEQ ID NO: 5962469 - DNA, 25 bp, Homo sapien
cgataaagtgcttaacaacctttct

SEQ ID NO: 5962470 - DNA, 25 bp, Homo sapien
attctttacctgttgggaattccat

SEQ ID NO: 5962471 - DNA, 25 bp, Homo sapien
acctaatggtaaggtgtccttggtg

SEQ ID NO: 5962472 - DNA, 25 bp, Homo sapien
gaatcattggaatgttacctccctt

SEQ ID NO: 5962473 - DNA, 25 bp, Homo sapien
ccctccaacttttcgatatcggaaa

SEQ ID NO: 5962474 - DNA, 25 bp, Homo sapien
gaatttcatccatcaattccttggg

SEQ ID NO: 5962475 - DNA, 25 bp, Homo sapien
cttctcgtttaattcaagtaacact

SEQ ID NO: 5962476 - DNA, 25 bp, Homo sapien
ctgaaccatcctcagctggaacaat

SEQ ID NO: 5962477 - DNA, 25 bp, Homo sapien
ccttagcggcggcttccttgaaacc

SEQ ID NO: 5962478 - DNA, 25 bp, Homo sapien
tcgtaattggatctttgcttgcgtc

SEQ ID NO: 5962479 - DNA, 25 bp, Homo sapien
tttgccctccaacttttcgatatcg

SEQ ID NO: 5962480 - DNA, 25 bp, Homo sapien
aagcgccaatgataccaagagactt

SEQ ID NO: 5962481 - DNA, 25 bp, Homo sapien
taacaacctttctcaaggtctcgct

SEQ ID NO: 5962482 - DNA, 25 bp, Homo sapien
gccaatgataccaagagacttacct

SEQ ID NO: 5962483 - DNA, 25 bp, Homo sapien
attgttcgtcgacagcaacatcgta

SEQ ID NO: 5962484 - DNA, 25 bp, Homo sapien
gtcaaacctttattcaattcgtcga

SEQ ID NO: 5962485 - DNA, 25 bp, Homo sapien
cccttggtccatctttgcaaaatac

SEQ ID NO: 5962486 - DNA, 25 bp, Homo sapien
taaccggaggtcatcttttcaaaag

SEQ ID NO: 5962487 - DNA, 25 bp, Homo sapien
gaggtcatcttttcaaaagcttgtt

SEQ ID NO: 5962488 - DNA, 25 bp, Homo sapien
aaatagcggcaataccacaaacagc

SEQ ID NO: 5962489 - DNA, 25 bp, Homo sapien
cttagtctctgggtcagtgtagtat

SEQ ID NO: 5962490 - DNA, 25 bp, Homo sapien
gtttctttggacctaaatgaaccat

SEQ ID NO: 5962491 - DNA, 25 bp, Homo sapien
gcaattcttttttcggacaatgcag

SEQ ID NO: 5962492 - DNA, 25 bp, Homo sapien
tctttacctgttgggaattccatga

SEQ ID NO: 5962493 - DNA, 25 bp, Homo sapien
taatcttgttttgggaagctgggta

SEQ ID NO: 5962494 - DNA, 25 bp, Homo sapien
atcttccaagttttcaaatggatca

SEQ ID NO: 5962495 - DNA, 25 bp, Homo sapien
catggaaccctttctagcctgtggt

SEQ ID NO: 5962496 - DNA, 25 bp, Homo sapien
gtatcattaatcaatgctacaattt

SEQ ID NO: 5962497 - DNA, 25 bp, Homo sapien
tcaattcacaaagtcttctaatcaa

SEQ ID NO: 5962498 - DNA, 25 bp, Homo sapien
gcaataacagcagcacctgcacctg

SEQ ID NO: 5962499 - DNA, 25 bp, Homo sapien
ctacaatttcaataggcaactctct

SEQ ID NO: 5962500 - DNA, 25 bp, Homo sapien
gagaaggtgaaacctaatggtaagg

SEQ ID NO: 5962501 - DNA, 25 bp, Homo sapien
tccatccatagatatctctcaaacc

SEQ ID NO: 5962502 - DNA, 25 bp, Homo sapien
cattaatcaatgctacaatttcaat

SEQ ID NO: 5962503 - DNA, 25 bp, Homo sapien
cagtaccgaaaatcacacccatctt

SEQ ID NO: 5962504 - DNA, 25 bp, Homo sapien
accatcctcagctggaacaatcgta

SEQ ID NO: 5962505 - DNA, 25 bp, Homo sapien
tgcagcaataacagcagcacctgca

SEQ ID NO: 5962506 - DNA, 25 bp, Homo sapien
gtaccacccaaatcaatggccaaat

SEQ ID NO: 5962507 - DNA, 25 bp, Homo sapien
aacccttggtccatctttgcaaaat

SEQ ID NO: 5962508 - DNA, 25 bp, Homo sapien
tcgtcgataaagtgcttaacaacct

SEQ ID NO: 5962509 - DNA, 25 bp, Homo sapien
gaaccgtcagcggcaatgtgaccag

SEQ ID NO: 5962510 - DNA, 25 bp, Homo sapien
aacctttctcaaggtctcgctgtca

SEQ ID NO: 5962511 - DNA, 25 bp, Homo sapien
tgcttagtggttctcatgtcatgtg

SEQ ID NO: 5962512 - DNA, 25 bp, Homo sapien
acaaacagctaatctagcagctctg

SEQ ID NO: 5962513 - DNA, 25 bp, Homo sapien
atcttccaactgatgaatttcatcc

SEQ ID NO: 5962514 - DNA, 25 bp, Homo sapien
aggaccataactcctcttggtgctt

SEQ ID NO: 5962515 - DNA, 25 bp, Homo sapien
cagaaccgtcagcggcaatgtgacc

SEQ ID NO: 5962516 - DNA, 25 bp, Homo sapien
aactgtaaacatatcttccaactga

SEQ ID NO: 5962517 - DNA, 25 bp, Homo sapien
gcgtcaccagtccatccatagatat

SEQ ID NO: 5962518 - DNA, 25 bp, Homo sapien
tcgatatcggaaacaacatcataga

SEQ ID NO: 5962519 - DNA, 25 bp, Homo sapien
cagcacctgcacctgaaccatcctc

SEQ ID NO: 5962520 - DNA, 25 bp, Homo sapien
gcaattaaagtaccaacagtatcat

SEQ ID NO: 5962521 - DNA, 25 bp, Homo sapien
agcctgtggtttctttggacctaaa

SEQ ID NO: 5962522 - DNA, 25 bp, Homo sapien
tgtgaccagtcttgtaacctctctt

SEQ ID NO: 5962523 - DNA, 25 bp, Homo sapien
acatatcttccaactgatgaatttc

SEQ ID NO: 5962524 - DNA, 25 bp, Homo sapien
aattcttttttcggacaatgcagca

SEQ ID NO: 5962525 - DNA, 25 bp, Homo sapien
gagagttacttggaatatcgtctgc

SEQ ID NO: 5962526 - DNA, 25 bp, Homo sapien
acatcagccatggaaccctttctag

SEQ ID NO: 5962527 - DNA, 25 bp, Homo sapien
ctcttttggcaaatagcggcaatac

SEQ ID NO: 5962528 - DNA, 25 bp, Homo sapien
aaacagctaatctagcagctctggt

SEQ ID NO: 5962529 - DNA, 25 bp, Homo sapien
tggcaagaccaaatgttcattatcg

SEQ ID NO: 5962530 - DNA, 25 bp, Homo sapien
tgatgaatttcatccatcaattcct

SEQ ID NO: 5962531 - DNA, 25 bp, Homo sapien
gaaggaaccatattcacaattgata

SEQ ID NO: 5962532 - DNA, 25 bp, Homo sapien
tggaatatcgtctgctaatttgccc

SEQ ID NO: 5962533 - DNA, 25 bp, Homo sapien
gatcaattcacaaagtcttctaatc

SEQ ID NO: 5962534 - DNA, 25 bp, Homo sapien
cgaaaatcacacccatcttagtctc

SEQ ID NO: 5962535 - DNA, 25 bp, Homo sapien
tttcggacaatgcagcaataacagc

SEQ ID NO: 5962536 - DNA, 25 bp, Homo sapien
ctggtaccgatcaattcacaaagtc

SEQ ID NO: 5962537 - DNA, 25 bp, Homo sapien
gaaccatattcacaattgatagcca

SEQ ID NO: 5962538 - DNA, 25 bp, Homo sapien
cggcaattcttttttcggacaatgc

SEQ ID NO: 5962539 - DNA, 25 bp, Homo sapien
agaaagcaccgttgacaccagtacc

SEQ ID NO: 5962540 - DNA, 25 bp, Homo sapien
caaagtccttttggaagatgtcatc

SEQ ID NO: 5962541 - DNA, 25 bp, Homo sapien
gagacttaccttcggcaattctttt

SEQ ID NO: 5962542 - DNA, 25 bp, Homo sapien
tcaattccttgggcacatcagccat

SEQ ID NO: 5962543 - DNA, 25 bp, Homo sapien
caaacctttattcaattcgtcgata

SEQ ID NO: 5962544 - DNA, 25 bp, Homo sapien
gttttgtagcaatgggacgacatcg

SEQ ID NO: 5962545 - DNA, 25 bp, Homo sapien
tcaaaagcttgttgaccaggtcttg

SEQ ID NO: 5962546 - DNA, 25 bp, Homo sapien
acgttctggcagagtggtcttgaca

SEQ ID NO: 5962547 - DNA, 25 bp, Homo sapien
taccgatcaattcacaaagtcttct

SEQ ID NO: 5962548 - DNA, 25 bp, Homo sapien
taatcaacttacgttctggcagagt

SEQ ID NO: 5962549 - DNA, 25 bp, Homo sapien
ttgtcaaacctttattcaattcgtc

SEQ ID NO: 5962550 - DNA, 25 bp, Homo sapien
tggcagagtggtcttgacaccaaag

SEQ ID NO: 5962551 - DNA, 25 bp, Homo sapien
ttcacccaagtagtaaccggaggtc

SEQ ID NO: 5962552 - DNA, 25 bp, Homo sapien
tctcaaacccttagcggcggcttcc

SEQ ID NO: 5962553 - DNA, 25 bp, Homo sapien
cgcaacaattcacccaagtagtaac

SEQ ID NO: 5962554 - DNA, 25 bp, Homo sapien
atttggaatatcgaaacccttggtc

SEQ ID NO: 5962555 - DNA, 25 bp, Homo sapien
acagctaatctagcagctctggtac

SEQ ID NO: 5962556 - DNA, 25 bp, Homo sapien
gttaatcttgttttgggaagctggg

SEQ ID NO: 5962557 - DNA, 25 bp, Homo sapien
gaattccatgacccaaccgggaatc

SEQ ID NO: 5962558 - DNA, 25 bp, Homo sapien
gtggtagtttatacttggattgagt

SEQ ID NO: 5962559 - DNA, 25 bp, Homo sapien
ctcttggaaatttcgttttgtagca

SEQ ID NO: 5962560 - DNA, 25 bp, Homo sapien
caccgttgacaccagtaccgaaaat

SEQ ID NO: 5962561 - DNA, 25 bp, Homo sapien
atgttcattatcgaaggaaccatat

SEQ ID NO: 5962562 - DNA, 25 bp, Homo sapien
tcggcaataaaggaccataactcct

SEQ ID NO: 5962563 - DNA, 25 bp, Homo sapien
atcttgttttgggaagctgggtacg

SEQ ID NO: 5962564 - DNA, 25 bp, Homo sapien
gcaaaataccttcgttaatcttgtt

SEQ ID NO: 5962565 - DNA, 25 bp, Homo sapien
tcattatcgaaggaaccatattcac

SEQ ID NO: 5962566 - DNA, 25 bp, Homo sapien
tagcaatgggacgacatcgtggcct

SEQ ID NO: 5962567 - DNA, 25 bp, Homo sapien
ctaatctagcagctctggtaccgat

SEQ ID NO: 5962568 - DNA, 25 bp, Homo sapien
ctctgggtcagtgtagtatgaggca

SEQ ID NO: 5962569 - DNA, 25 bp, Homo sapien
ggacgacatcgtggccttcgacatt

SEQ ID NO: 5962570 - DNA, 25 bp, Homo sapien
tgctaatttgccctccaacttttcg

SEQ ID NO: 5962571 - DNA, 25 bp, Homo sapien
aacctttattcaattcgtcgataaa

SEQ ID NO: 5962572 - DNA, 25 bp, Homo sapien
agcggcggcttccttgaaacctggg

SEQ ID NO: 5962573 - DNA, 25 bp, Homo sapien
gcaacatcgtacttggttcttggca

SEQ ID NO: 5962574 - DNA, 25 bp, Homo sapien
gtaaggtgtccttggtgtttagcaa

SEQ ID NO: 5962575 - DNA, 25 bp, Homo sapien
ccattggagagttacttggaatatc

SEQ ID NO: 5962576 - DNA, 25 bp, Homo sapien
tcgctgtcaactgtaaacatatctt

SEQ ID NO: 5962577 - DNA, 25 bp, Homo sapien
caaagtcttctaatcaacttacgtt

SEQ ID NO: 5962578 - DNA, 25 bp, Homo sapien
acccaaccgggaatcattggaatgt

SEQ ID NO: 5962579 - DNA, 25 bp, Homo sapien
tgacaccagtaccgaaaatcacacc

SEQ ID NO: 5962580 - DNA, 25 bp, Homo sapien
ccaagagacttaccttcggcaattc

SEQ ID NO: 5962581 - DNA, 25 bp, Homo sapien
ggcaataaaggaccataactcctct

SEQ ID NO: 5962582 - DNA, 25 bp, Homo sapien
atgtatggttgtttcaacttgctta

SEQ ID NO: 5962583 - DNA, 25 bp, Homo sapien
ttgcttagatcttgatccttcaaca

SEQ ID NO: 5962584 - DNA, 25 bp, Homo sapien
gtctctgggtcagtgtagtatgagg

SEQ ID NO: 5962585 - DNA, 25 bp, Homo sapien
ccgggaatcattggaatgttacctc

SEQ ID NO: 5962586 - DNA, 25 bp, Homo sapien
caaaggtatggttaccgctcaactt

SEQ ID NO: 5962587 - DNA, 25 bp, Homo sapien
gggcacatcagccatggaacccttt

SEQ ID NO: 5962588 - DNA, 25 bp, Homo sapien
caataaaggaccataactcctcttg

SEQ ID NO: 5962589 - DNA, 25 bp, Homo sapien
tcgaaacccttggtccatctttgca

SEQ ID NO: 5962590 - DNA, 25 bp, Homo sapien
atcttttcaaaagcttgttgaccag

SEQ ID NO: 5962591 - DNA, 25 bp, Homo sapien
tgttcgtcgacagcaacatcgtact

SEQ ID NO: 5962592 - DNA, 25 bp, Homo sapien
attggagagttacttggaatatcgt

SEQ ID NO: 5962593 - DNA, 25 bp, Homo sapien
cctgttgggaattccatgacccaac

SEQ ID NO: 5962594 - DNA, 25 bp, Homo sapien
ccttcggcaattcttttttcggaca

SEQ ID NO: 5962595 - DNA, 25 bp, Homo sapien
agattgttcgtcgacagcaacatcg

SEQ ID NO: 5962596 - DNA, 25 bp, Homo sapien
ttggaatatcgaaacccttggtcca

SEQ ID NO: 5962597 - DNA, 25 bp, Homo sapien
tttattcaattcgtcgataaagtgc

SEQ ID NO: 5962598 - DNA, 25 bp, Homo sapien
tagtttatacttggattgagtggtg

SEQ ID NO: 5962599 - DNA, 25 bp, Homo sapien
gatcatcctcgattcttgctgggta

SEQ ID NO: 5962600 - DNA, 25 bp, Homo sapien
gaaacccttggtccatctttgcaaa

SEQ ID NO: 5962601 - DNA, 25 bp, Homo sapien
acgacatcgtggccttcgacatttg

SEQ ID NO: 5962602 - DNA, 25 bp, Homo sapien
caacaattcacccaagtagtaaccg

SEQ ID NO: 5962603 - DNA, 25 bp, Homo sapien
gtatttgttatagacagaaccgtca

SEQ ID NO: 5962604 - DNA, 25 bp, Homo sapien
aatctagcagctctggtaccgatca

SEQ ID NO: 5962605 - DNA, 25 bp, Homo sapien
ttacgttctggcagagtggtcttga

SEQ ID NO: 5962606 - DNA, 25 bp, Homo sapien
agcaattcttgctcgaccataaagt

SEQ ID NO: 5962607 - DNA, 25 bp, Homo sapien
cggcaataccacaaacagctaatct

SEQ ID NO: 5962608 - DNA, 25 bp, Homo sapien
tggaacaatcgtaattggatctttg

SEQ ID NO: 5962609 - DNA, 25 bp, Homo sapien
gggtcagtgtagtatgaggcaatta

SEQ ID NO: 5962610 - DNA, 25 bp, Homo sapien
tcatcctcgattcttgctgggtagg

SEQ ID NO: 5962611 - DNA, 25 bp, Homo sapien
tcgaccataaagtccttcaaagagt

SEQ ID NO: 5962612 - DNA, 25 bp, Homo sapien
tccttcaaagagtcggcaataaagg

SEQ ID NO: 5962613 - DNA, 25 bp, Homo sapien
tcagcggcaatgtgaccagtcttgt

SEQ ID NO: 5962614 - DNA, 25 bp, Homo sapien
cagtcttgtaacctctcttttggca

SEQ ID NO: 5962615 - DNA, 25 bp, Homo sapien
gtttagcaattcttgctcgaccata

SEQ ID NO: 5962616 - DNA, 25 bp, Homo sapien
caaatcaatggccaaatagttacca

SEQ ID NO: 5962617 - DNA, 25 bp, Homo sapien
gaaccctttctagcctgtggtttct

SEQ ID NO: 5962618 - DNA, 25 bp, Homo sapien
ccgctcaacttgaccaacacgactc

SEQ ID NO: 5962619 - DNA, 25 bp, Homo sapien
atcaagcccttctcgtttaattcaa

SEQ ID NO: 5962620 - DNA, 25 bp, Homo sapien
gttatagacagaaccgtcagcggca

SEQ ID NO: 5962621 - DNA, 25 bp, Homo sapien
tgaccagtcttgtaacctctctttt

SEQ ID NO: 5962622 - DNA, 25 bp, Homo sapien
cagcaacatcgtacttggttcttgg

SEQ ID NO: 5962623 - DNA, 25 bp, Homo sapien
cttaacaacctttctcaaggtctcg

SEQ ID NO: 5962624 - DNA, 25 bp, Homo sapien
gtttatacttggattgagtggtgtc

SEQ ID NO: 5962625 - DNA, 25 bp, Homo sapien
tccttggtgtttagcaattcttgct

SEQ ID NO: 5962626 - DNA, 25 bp, Homo sapien
gtccttttggaagatgtcatcagta

SEQ ID NO: 5962627 - DNA, 25 bp, Homo sapien
ttagcaattcttgctcgaccataaa

SEQ ID NO: 5962628 - DNA, 25 bp, Homo sapien
aggaaccatattcacaattgatagc

SEQ ID NO: 5962629 - DNA, 25 bp, Homo sapien
ataaagtgcttaacaacctttctca

SEQ ID NO: 5962630 - DNA, 25 bp, Homo sapien
cctgtggtttctttggacctaaatg

SEQ ID NO: 5962631 - DNA, 25 bp, Homo sapien
gttgacaccagtaccgaaaatcaca

SEQ ID NO: 5962632 - DNA, 25 bp, Homo sapien
gtcttgacaccaaagtccttttgga

SEQ ID NO: 5962633 - DNA, 25 bp, Homo sapien
gcttgttgaccaggtcttggagatt

SEQ ID NO: 5962634 - DNA, 25 bp, Homo sapien
gatgtcatcagtatcttccaagttt

SEQ ID NO: 5962635 - DNA, 25 bp, Homo sapien
gaccataaagtccttcaaagagtcg

SEQ ID NO: 5962636 - DNA, 25 bp, Homo sapien
aataggcaactctctcttggaaatt

SEQ ID NO: 5962637 - DNA, 25 bp, Homo sapien
atcagccatggaaccctttctagcc

SEQ ID NO: 5962638 - DNA, 25 bp, Homo sapien
aaagtaccaacagtatcattaatca

SEQ ID NO: 5962639 - DNA, 25 bp, Homo sapien
cttcgttaatcttgttttgggaagc

SEQ ID NO: 5962640 - DNA, 25 bp, Homo sapien
ctccaacttttcgatatcggaaaca

SEQ ID NO: 5962641 - DNA, 25 bp, Homo sapien
ttcaaatggatcatcctcgattctt

SEQ ID NO: 5962642 - DNA, 25 bp, Homo sapien
cgacatttggaatatcgaaaccctt

SEQ ID NO: 5962643 - DNA, 25 bp, Homo sapien
gtatcttccaagttttcaaatggat

SEQ ID NO: 5962644 - DNA, 25 bp, Homo sapien
tcaatgctacaatttcaataggcaa

SEQ ID NO: 5962645 - DNA, 25 bp, Homo sapien
ttggaagatgtcatcagtatcttcc

SEQ ID NO: 5962646 - DNA, 25 bp, Homo sapien
tcaacttgaccaacacgactcttaa

SEQ ID NO: 5962647 - DNA, 25 bp, Homo sapien
cttggcaagaccaaatgttcattat

SEQ ID NO: 5962648 - DNA, 25 bp, Homo sapien
atagcggcaataccacaaacagcta

SEQ ID NO: 5962649 - DNA, 25 bp, Homo sapien
tggccaaatagttaccagattcttt

SEQ ID NO: 5962650 - DNA, 25 bp, Homo sapien
ctgggtaggaggtatccatgatgta

SEQ ID NO: 5962651 - DNA, 25 bp, Homo sapien
gcaatgggacgacatcgtggccttc

SEQ ID NO: 5962652 - DNA, 25 bp, Homo sapien
tttggcaaatagcggcaataccaca

SEQ ID NO: 5962653 - DNA, 25 bp, Homo sapien
gaaacctaatggtaaggtgtccttg

SEQ ID NO: 5962654 - DNA, 25 bp, Homo sapien
gggaatcattggaatgttacctccc

SEQ ID NO: 5962655 - DNA, 25 bp, Homo sapien
cttttttcggacaatgcagcaataa

SEQ ID NO: 5962656 - DNA, 25 bp, Homo sapien
attatcgaaggaaccatattcacaa

SEQ ID NO: 5962657 - DNA, 25 bp, Homo sapien
ttcatccatcaattccttgggcaca

SEQ ID NO: 5962658 - DNA, 25 bp, Homo sapien
ttctcatgtcatgtggtagtttata

SEQ ID NO: 5962659 - DNA, 25 bp, Homo sapien
aatttcaataggcaactctctcttg

SEQ ID NO: 5962660 - DNA, 25 bp, Homo sapien
aatcaatggccaaatagttaccaga

SEQ ID NO: 5962661 - DNA, 25 bp, Homo sapien
caatgataccaagagacttaccttc

SEQ ID NO: 5962662 - DNA, 25 bp, Homo sapien
agctgggtacgagaaggtgaaacct

SEQ ID NO: 5962663 - DNA, 25 bp, Homo sapien
agctctggtaccgatcaattcacaa

SEQ ID NO: 5962664 - DNA, 25 bp, Homo sapien
tagttaccagattctttacctgttg

SEQ ID NO: 5962665 - DNA, 25 bp, Homo sapien
agcggcaataccacaaacagctaat

SEQ ID NO: 5962666 - DNA, 25 bp, Homo sapien
ggaatatcgaaacccttggtccatc

SEQ ID NO: 5962667 - DNA, 25 bp, Homo sapien
ctttgcaaaataccttcgttaatct

SEQ ID NO: 5962668 - DNA, 25 bp, Homo sapien
gaggtatccatgatgtatggttgtt

SEQ ID NO: 5962669 - DNA, 25 bp, Homo sapien
ctgggtacgagaaggtgaaacctaa

SEQ ID NO: 5962670 - DNA, 25 bp, Homo sapien
taacagcagcacctgcacctgaacc

SEQ ID NO: 5962671 - DNA, 25 bp, Homo sapien
cttcaaagagtcggcaataaaggac

SEQ ID NO: 5962672 - DNA, 25 bp, Homo sapien
caacatcaagcccttctcgtttaat

SEQ ID NO: 5962673 - DNA, 25 bp, Homo sapien
acgagaaggtgaaacctaatggtaa

SEQ ID NO: 5962674 - DNA, 25 bp, Homo sapien
tccatgatgtatggttgtttcaact

SEQ ID NO: 5962675 - DNA, 25 bp, Homo sapien
aagagacttaccttcggcaattctt

SEQ ID NO: 5962676 - DNA, 25 bp, Homo sapien
ccacaaacagctaatctagcagctc

SEQ ID NO: 5962677 - DNA, 25 bp, Homo sapien
gacagcaacatcgtacttggttctt

SEQ ID NO: 5962678 - DNA, 25 bp, Homo sapien
catgatgtatggttgtttcaacttg

SEQ ID NO: 5962679 - DNA, 25 bp, Homo sapien
tttcaataggcaactctctcttgga

SEQ ID NO: 5962680 - DNA, 25 bp, Homo sapien
tccttgaaacctgggtatttgttat

SEQ ID NO: 5962681 - DNA, 25 bp, Homo sapien
gctcaacttgaccaacacgactctt

SEQ ID NO: 5962682 - DNA, 25 bp, Homo sapien
agcccttctcgtttaattcaagtaa

SEQ ID NO: 5962683 - DNA, 25 bp, Homo sapien
aatcaatgctacaatttcaataggc

SEQ ID NO: 5962684 - DNA, 25 bp, Homo sapien
acaatcgtaattggatctttgcttg

SEQ ID NO: 5962685 - DNA, 25 bp, Homo sapien
taccagattctttacctgttgggaa

SEQ ID NO: 5962686 - DNA, 25 bp, Homo sapien
gaaatttcgttttgtagcaatggga

SEQ ID NO: 5962687 - DNA, 25 bp, Homo sapien
actgatgaatttcatccatcaattc

SEQ ID NO: 5962688 - DNA, 25 bp, Homo sapien
agtggtcttgacaccaaagtccttt

SEQ ID NO: 5962689 - DNA, 25 bp, Homo sapien
ggaaacaacatcatagaaagcaccg

SEQ ID NO: 5962690 - DNA, 25 bp, Homo sapien
aatggtaaggtgtccttggtgttta

SEQ ID NO: 5962691 - DNA, 25 bp, Homo sapien
aaagtccttcaaagagtcggcaata

SEQ ID NO: 5962692 - DNA, 25 bp, Homo sapien
ggtgtccttggtgtttagcaattct

SEQ ID NO: 5962693 - DNA, 25 bp, Homo sapien
tgttacctcccttctttgtcaaacc

SEQ ID NO: 5962694 - DNA, 25 bp, Homo sapien
gatatctctcaaacccttagcggcg

SEQ ID NO: 5962695 - DNA, 25 bp, Homo sapien
acttggttcttggcaagaccaaatg

SEQ ID NO: 5962696 - DNA, 25 bp, Homo sapien
gtaggaggtatccatgatgtatggt

SEQ ID NO: 5962697 - DNA, 25 bp, Homo sapien
agtgcttaacaacctttctcaaggt

SEQ ID NO: 5962698 - DNA, 25 bp, Homo sapien
cttttcaaaagcttgttgaccaggt

SEQ ID NO: 5962699 - DNA, 25 bp, Homo sapien
aagttagtaccacccaaatcaatgg

SEQ ID NO: 5962700 - DNA, 25 bp, Homo sapien
acctgggtatttgttatagacagaa

SEQ ID NO: 5962701 - DNA, 25 bp, Homo sapien
gtccatctttgcaaaataccttcgt

SEQ ID NO: 5962702 - DNA, 25 bp, Homo sapien
ggtatccatgatgtatggttgtttc

SEQ ID NO: 5962703 - DNA, 25 bp, Homo sapien
gtacgagaaggtgaaacctaatggt

SEQ ID NO: 5962704 - DNA, 25 bp, Homo sapien
catcgtacttggttcttggcaagac

SEQ ID NO: 5962705 - DNA, 25 bp, Homo sapien
aatagttaccagattctttacctgt

SEQ ID NO: 5962706 - DNA, 25 bp, Homo sapien
aatgctacaatttcaataggcaact

SEQ ID NO: 5962707 - DNA, 25 bp, Homo sapien
cttggaaatttcgttttgtagcaat

SEQ ID NO: 5962708 - DNA, 25 bp, Homo sapien
tggtgtcaaaggtatggttaccgct

SEQ ID NO: 5962709 - DNA, 25 bp, Homo sapien
agtggtgtcaaaggtatggttaccg

SEQ ID NO: 5962710 - DNA, 25 bp, Homo sapien
atagccattggagagttacttggaa

SEQ ID NO: 5962711 - DNA, 25 bp, Homo sapien
ctcctcttggtgcttagtggttctc

SEQ ID NO: 5962712 - DNA, 25 bp, Homo sapien
acttacgttctggcagagtggtctt

SEQ ID NO: 5962713 - DNA, 25 bp, Homo sapien
acccttagcggcggcttccttgaaa

SEQ ID NO: 5962714 - DNA, 25 bp, Homo sapien
tgagtggtgtcaaaggtatggttac

SEQ ID NO: 5962715 - DNA, 25 bp, Homo sapien
tgtccttggtgtttagcaattcttg

SEQ ID NO: 5962716 - DNA, 25 bp, Homo sapien
accagtaccgaaaatcacacccatc

SEQ ID NO: 5962717 - DNA, 25 bp, Homo sapien
cttctaatcaacttacgttctggca

SEQ ID NO: 5962718 - DNA, 25 bp, Homo sapien
accaggtcttggagattgttcgtcg

SEQ ID NO: 5962719 - DNA, 25 bp, Homo sapien
tggtccatctttgcaaaataccttc

SEQ ID NO: 5962720 - DNA, 25 bp, Homo sapien
acctgaaccatcctcagctggaaca

SEQ ID NO: 5962721 - DNA, 25 bp, Homo sapien
gtttaattcaagtaacactagacgc

SEQ ID NO: 5962722 - DNA, 25 bp, Homo sapien
ttgggaattccatgacccaaccggg

SEQ ID NO: 5962723 - DNA, 25 bp, Homo sapien
atcttagtctctgggtcagtgtagt

SEQ ID NO: 5962724 - DNA, 25 bp, Homo sapien
cttggaatatcgtctgctaatttgc

SEQ ID NO: 5962725 - DNA, 25 bp, Homo sapien
ggccttcgacatttggaatatcgaa

SEQ ID NO: 5962726 - DNA, 25 bp, Homo sapien
ctctggtaccgatcaattcacaaag

SEQ ID NO: 5962727 - DNA, 25 bp, Homo sapien
tgacaccaaagtccttttggaagat

SEQ ID NO: 5962728 - DNA, 25 bp, Homo sapien
gttcattatcgaaggaaccatattc

SEQ ID NO: 5962729 - DNA, 25 bp, Homo sapien
ataaaggaccataactcctcttggt

SEQ ID NO: 5962730 - DNA, 25 bp, Homo sapien
aatcacacccatcttagtctctggg

SEQ ID NO: 5962731 - DNA, 25 bp, Homo sapien
cttgttttgggaagctgggtacgag

SEQ ID NO: 5962732 - DNA, 25 bp, Homo sapien
ttgctcgaccataaagtccttcaaa

SEQ ID NO: 5962733 - DNA, 25 bp, Homo sapien
gcacatcagccatggaaccctttct

SEQ ID NO: 5962734 - DNA, 25 bp, Homo sapien
cagctggaacaatcgtaattggatc

SEQ ID NO: 5962735 - DNA, 25 bp, Homo sapien
ttttcaaatggatcatcctcgattc

SEQ ID NO: 5962736 - DNA, 25 bp, Homo sapien
gcaaatagcggcaataccacaaaca

SEQ ID NO: 5962737 - DNA, 25 bp, Homo sapien
acactagacgcaacaattcacccaa

SEQ ID NO: 5962738 - DNA, 25 bp, Homo sapien
ggagattgttcgtcgacagcaacat

SEQ ID NO: 5962739 - DNA, 25 bp, Homo sapien
tacttggaatatcgtctgctaattt

SEQ ID NO: 5962740 - DNA, 25 bp, Homo sapien
catccatagatatctctcaaaccct

SEQ ID NO: 5962741 - DNA, 25 bp, Homo sapien
aaggtatggttaccgctcaacttga

SEQ ID NO: 5962742 - DNA, 25 bp, Homo sapien
agtccatccatagatatctctcaaa

SEQ ID NO: 5962743 - DNA, 25 bp, Homo sapien
ctttgcttgcgtcaccagtccatcc

SEQ ID NO: 5962744 - DNA, 25 bp, Homo sapien
aatttgccctccaacttttcgatat

SEQ ID NO: 5962745 - DNA, 25 bp, Homo sapien
gcaatgtgaccagtcttgtaacctc

SEQ ID NO: 5962746 - DNA, 25 bp, Homo sapien
gcttagatcttgatccttcaacatc

SEQ ID NO: 5962747 - DNA, 25 bp, Homo sapien
ttcttggcaagaccaaatgttcatt

SEQ ID NO: 5962748 - DNA, 25 bp, Homo sapien
gagttacttggaatatcgtctgcta

SEQ ID NO: 5962749 - DNA, 25 bp, Homo sapien
aaaggaccataactcctcttggtgc

SEQ ID NO: 5962750 - DNA, 25 bp, Homo sapien
tcatcttttcaaaagcttgttgacc

SEQ ID NO: 5962751 - DNA, 25 bp, Homo sapien
ttggttcttggcaagaccaaatgtt

SEQ ID NO: 5962752 - DNA, 25 bp, Homo sapien
atgtggtagtttatacttggattga

SEQ ID NO: 5962753 - DNA, 25 bp, Homo sapien
tcaactgtaaacatatcttccaact

SEQ ID NO: 5962754 - DNA, 25 bp, Homo sapien
ttgggaagctgggtacgagaaggtg

SEQ ID NO: 5962755 - DNA, 25 bp, Homo sapien
atcattggaatgttacctcccttct

SEQ ID NO: 5962756 - DNA, 25 bp, Homo sapien
acaatgcagcaataacagcagcacc

SEQ ID NO: 5962757 - DNA, 25 bp, Homo sapien
aggtgaaacctaatggtaaggtgtc

SEQ ID NO: 5962758 - DNA, 25 bp, Homo sapien
aaaagcttgttgaccaggtcttgga

SEQ ID NO: 5962759 - DNA, 25 bp, Homo sapien
tcttggtgcttagtggttctcatgt

SEQ ID NO: 5962760 - DNA, 25 bp, Homo sapien
gtagtatgaggcaattaaagtacca

SEQ ID NO: 5962761 - DNA, 25 bp, Homo sapien
cagtatcattaatcaatgctacaat

SEQ ID NO: 5962762 - DNA, 25 bp, Homo sapien
ataactcctcttggtgcttagtggt

SEQ ID NO: 5962763 - DNA, 25 bp, Homo sapien
aagtcttctaatcaacttacgttct

SEQ ID NO: 5962764 - DNA, 25 bp, Homo sapien
accgtcagcggcaatgtgaccagtc

SEQ ID NO: 5962765 - DNA, 25 bp, Homo sapien
ggaagatgtcatcagtatcttccaa

SEQ ID NO: 5962766 - DNA, 25 bp, Homo sapien
ccaacttttcgatatcggaaacaac

SEQ ID NO: 5962767 - DNA, 25 bp, Homo sapien
ccagtccatccatagatatctctca

SEQ ID NO: 5962768 - DNA, 25 bp, Homo sapien
cccaaatcaatggccaaatagttac

SEQ ID NO: 5962769 - DNA, 25 bp, Homo sapien
gatatcggaaacaacatcatagaaa

SEQ ID NO: 5962770 - DNA, 25 bp, Homo sapien
gtcagtgtagtatgaggcaattaaa

SEQ ID NO: 5962771 - DNA, 25 bp, Homo sapien
agcaccgttgacaccagtaccgaaa

SEQ ID NO: 5962772 - DNA, 25 bp, Homo sapien
ggtagtttatacttggattgagtgg

SEQ ID NO: 5962773 - DNA, 25 bp, Homo sapien
agcggcaatgtgaccagtcttgtaa

SEQ ID NO: 5962774 - DNA, 25 bp, Homo sapien
aacagtatcattaatcaatgctaca

SEQ ID NO: 5962775 - DNA, 25 bp, Homo sapien
ttcacaattgatagccattggagag

SEQ ID NO: 5962776 - DNA, 25 bp, Homo sapien
tcaaagagtcggcaataaaggacca

SEQ ID NO: 5962777 - DNA, 25 bp, Homo sapien
atggttgtttcaacttgcttagatc

SEQ ID NO: 5962778 - DNA, 25 bp, Homo sapien
aattaaagtaccaacagtatcatta

SEQ ID NO: 5962779 - DNA, 25 bp, Homo sapien
ttggagattgttcgtcgacagcaac

SEQ ID NO: 5962780 - DNA, 25 bp, Homo sapien
gacatcgtggccttcgacatttgga

SEQ ID NO: 5962781 - DNA, 25 bp, Homo sapien
ctgcacctgaaccatcctcagctgg

SEQ ID NO: 5962782 - DNA, 25 bp, Homo sapien
agatcttgatccttcaacatcaagc

SEQ ID NO: 5962783 - DNA, 25 bp, Homo sapien
gcttccttgaaacctgggtatttgt

SEQ ID NO: 5962784 - DNA, 25 bp, Homo sapien
ccatctttgcaaaataccttcgtta

SEQ ID NO: 5962785 - DNA, 25 bp, Homo sapien
ttctagcctgtggtttctttggacc

SEQ ID NO: 5962786 - DNA, 25 bp, Homo sapien
ttcaattcgtcgataaagtgcttaa

SEQ ID NO: 5962787 - DNA, 25 bp, Homo sapien
gttacttggaatatcgtctgctaat

SEQ ID NO: 5962788 - DNA, 25 bp, Homo sapien
atcctcgattcttgctgggtaggag

SEQ ID NO: 5962789 - DNA, 25 bp, Homo sapien
tgatagccattggagagttacttgg

SEQ ID NO: 5962790 - DNA, 25 bp, Homo sapien
ttgtttcaacttgcttagatcttga

SEQ ID NO: 5962791 - DNA, 25 bp, Homo sapien
gcaagaccaaatgttcattatcgaa

SEQ ID NO: 5962792 - DNA, 25 bp, Homo sapien
gcttgcgtcaccagtccatccatag

SEQ ID NO: 5962793 - DNA, 25 bp, Homo sapien
tcgttttgtagcaatgggacgacat

SEQ ID NO: 5962794 - DNA, 25 bp, Homo sapien
ttatacttggattgagtggtgtcaa

SEQ ID NO: 5962795 - DNA, 25 bp, Homo sapien
tcgattcttgctgggtaggaggtat

SEQ ID NO: 5962796 - DNA, 25 bp, Homo sapien
ttgcaaaataccttcgttaatcttg

SEQ ID NO: 5962797 - DNA, 25 bp, Homo sapien
taccaacagtatcattaatcaatgc

SEQ ID NO: 5962798 - DNA, 25 bp, Homo sapien
cgtctgctaatttgccctccaactt

SEQ ID NO: 5962799 - DNA, 25 bp, Homo sapien
agctaatctagcagctctggtaccg

SEQ ID NO: 5962800 - DNA, 25 bp, Homo sapien
atcattaatcaatgctacaatttca

SEQ ID NO: 5962801 - DNA, 25 bp, Homo sapien
tgtcatcagtatcttccaagttttc

SEQ ID NO: 5962802 - DNA, 25 bp, Homo sapien
acaatttcaataggcaactctctct

SEQ ID NO: 5962803 - DNA, 25 bp, Homo sapien
cttgctgggtaggaggtatccatga

SEQ ID NO: 5962804 - DNA, 25 bp, Homo sapien
ccttcaacatcaagcccttctcgtt

SEQ ID NO: 5962805 - DNA, 25 bp, Homo sapien
aattcacaaagtcttctaatcaact

SEQ ID NO: 5962806 - DNA, 25 bp, Homo sapien
tttcaaaagcttgttgaccaggtct

SEQ ID NO: 5962807 - DNA, 25 bp, Homo sapien
gtcttgtaacctctcttttggcaaa

SEQ ID NO: 5962808 - DNA, 25 bp, Homo sapien
caactctctcttggaaatttcgttt

SEQ ID NO: 5962809 - DNA, 25 bp, Homo sapien
ttagatcttgatccttcaacatcaa

SEQ ID NO: 5962810 - DNA, 25 bp, Homo sapien
attccatgacccaaccgggaatcat

SEQ ID NO: 5962811 - DNA, 25 bp, Homo sapien
tctcgtttaattcaagtaacactag

SEQ ID NO: 5962812 - DNA, 25 bp, Homo sapien
ggtgcttagtggttctcatgtcatg

SEQ ID NO: 5962813 - DNA, 25 bp, Homo sapien
cacaaagtcttctaatcaacttacg

SEQ ID NO: 5962814 - DNA, 25 bp, Homo sapien
ccaaccgggaatcattggaatgtta

SEQ ID NO: 5962815 - DNA, 25 bp, Homo sapien
atagaaagcaccgttgacaccagta

SEQ ID NO: 5962816 - DNA, 25 bp, Homo sapien
cagtgtagtatgaggcaattaaagt

SEQ ID NO: 5962817 - DNA, 25 bp, Homo sapien
tcaatggccaaatagttaccagatt

SEQ ID NO: 5962818 - DNA, 25 bp, Homo sapien
agtcggcaataaaggaccataactc

SEQ ID NO: 5962819 - DNA, 25 bp, Homo sapien
ttggaatgttacctcccttctttgt

SEQ ID NO: 5962820 - DNA, 25 bp, Homo sapien
atcagtatcttccaagttttcaaat

SEQ ID NO: 5962821 - DNA, 25 bp, Homo sapien
tgtcaactgtaaacatatcttccaa

SEQ ID NO: 5962822 - DNA, 25 bp, Homo sapien
tgtaacctctcttttggcaaatagc

SEQ ID NO: 5962823 - DNA, 25 bp, Homo sapien
ccaaatgttcattatcgaaggaacc

SEQ ID NO: 5962824 - DNA, 25 bp, Homo sapien
ttttgggaagctgggtacgagaagg

SEQ ID NO: 5962825 - DNA, 25 bp, Homo sapien
tttctcaaggtctcgctgtcaactg

SEQ ID NO: 5962826 - DNA, 25 bp, Homo sapien
cttttcgatatcggaaacaacatca

SEQ ID NO: 5962827 - DNA, 25 bp, Homo sapien
tctctcaaacccttagcggcggctt

SEQ ID NO: 5962828 - DNA, 25 bp, Homo sapien
aatatcgaaacccttggtccatctt

SEQ ID NO: 5962829 - DNA, 25 bp, Homo sapien
agtaccaacagtatcattaatcaat

SEQ ID NO: 5962830 - DNA, 25 bp, Homo sapien
cttgaaacctgggtatttgttatag

SEQ ID NO: 5962831 - DNA, 25 bp, Homo sapien
catcatagaaagcaccgttgacacc

SEQ ID NO: 5962832 - DNA, 25 bp, Homo sapien
cttgacaccaaagtccttttggaag

SEQ ID NO: 5962833 - DNA, 25 bp, Homo sapien
aactcctcttggtgcttagtggttc

SEQ ID NO: 5962834 - DNA, 25 bp, Homo sapien
aacttttcgatatcggaaacaacat

SEQ ID NO: 5962835 - DNA, 25 bp, Homo sapien
tcatagaaagcaccgttgacaccag

SEQ ID NO: 5962836 - DNA, 25 bp, Homo sapien
tcgacagcaacatcgtacttggttc

SEQ ID NO: 5962837 - DNA, 25 bp, Homo sapien
ccatcttagtctctgggtcagtgta

SEQ ID NO: 5962838 - DNA, 25 bp, Homo sapien
agtccttcaaagagtcggcaataaa

SEQ ID NO: 5962839 - DNA, 25 bp, Homo sapien
tatctctcaaacccttagcggcggc

SEQ ID NO: 5962840 - DNA, 25 bp, Homo sapien
gctgtcaactgtaaacatatcttcc

SEQ ID NO: 5962841 - DNA, 25 bp, Homo sapien
tttttcggacaatgcagcaataaca

SEQ ID NO: 5962842 - DNA, 25 bp, Homo sapien
ggtcttggagattgttcgtcgacag

SEQ ID NO: 5962843 - DNA, 25 bp, Homo sapien
gtatggttgtttcaacttgcttaga

SEQ ID NO: 5962844 - DNA, 25 bp, Homo sapien
caacttacgttctggcagagtggtc

SEQ ID NO: 5962845 - DNA, 25 bp, Homo sapien
ttggattgagtggtgtcaaaggtat

SEQ ID NO: 5962846 - DNA, 25 bp, Homo sapien
ctgtaaacatatcttccaactgatg

SEQ ID NO: 5962847 - DNA, 25 bp, Homo sapien
aattccttgggcacatcagccatgg

SEQ ID NO: 5962848 - DNA, 25 bp, Homo sapien
ttggtgcttagtggttctcatgtca

SEQ ID NO: 5962849 - DNA, 25 bp, Homo sapien
gattcttgctgggtaggaggtatcc

SEQ ID NO: 5962850 - DNA, 25 bp, Homo sapien
caattcttgctcgaccataaagtcc

SEQ ID NO: 5962851 - DNA, 25 bp, Homo sapien
acatcaagcccttctcgtttaattc

SEQ ID NO: 5962852 - DNA, 25 bp, Homo sapien
gataccaagagacttaccttcggca

SEQ ID NO: 5962853 - DNA, 25 bp, Homo sapien
aaagagtcggcaataaaggaccata

SEQ ID NO: 5962854 - DNA, 25 bp, Homo sapien
aatgttacctcccttctttgtcaaa

SEQ ID NO: 5962855 - DNA, 25 bp, Homo sapien
tcttaagttagtaccacccaaatca

SEQ ID NO: 5962856 - DNA, 25 bp, Homo sapien
atatcgtctgctaatttgccctcca

SEQ ID NO: 5962857 - DNA, 25 bp, Homo sapien
gggaagctgggtacgagaaggtgaa

SEQ ID NO: 5962858 - DNA, 25 bp, Homo sapien
gcgccaatgataccaagagacttac

SEQ ID NO: 5962859 - DNA, 25 bp, Homo sapien
ttcgacatttggaatatcgaaaccc

SEQ ID NO: 5962860 - DNA, 25 bp, Homo sapien
acatttggaatatcgaaacccttgg

SEQ ID NO: 5962861 - DNA, 25 bp, Homo sapien
cacccaagtagtaaccggaggtcat

SEQ ID NO: 5962862 - DNA, 25 bp, Homo sapien
acagcagcacctgcacctgaaccat

SEQ ID NO: 5962863 - DNA, 25 bp, Homo sapien
caattgatagccattggagagttac

SEQ ID NO: 5962864 - DNA, 25 bp, Homo sapien
aagtccttttggaagatgtcatcag

SEQ ID NO: 5962865 - DNA, 25 bp, Homo sapien
tggtgtttagcaattcttgctcgac

SEQ ID NO: 5962866 - DNA, 25 bp, Homo sapien
ttccttgggcacatcagccatggaa

SEQ ID NO: 5962867 - DNA, 25 bp, Homo sapien
tatcgaaacccttggtccatctttg

SEQ ID NO: 5962868 - DNA, 25 bp, Homo sapien
tctagcagctctggtaccgatcaat

SEQ ID NO: 5962869 - DNA, 25 bp, Homo sapien
aagatgtcatcagtatcttccaagt

SEQ ID NO: 5962870 - DNA, 25 bp, Homo sapien
tgatgtatggttgtttcaacttgct

SEQ ID NO: 5962871 - DNA, 25 bp, Homo sapien
gccatggaaccctttctagcctgtg

SEQ ID NO: 5962872 - DNA, 25 bp, Homo sapien
accgaaaatcacacccatcttagtc

SEQ ID NO: 5962873 - DNA, 25 bp, Homo sapien
tatccatgatgtatggttgtttcaa

SEQ ID NO: 5962874 - DNA, 25 bp, Homo sapien
gttagtaccacccaaatcaatggcc

SEQ ID NO: 5962875 - DNA, 25 bp, Homo sapien
tgttgggaattccatgacccaaccg

SEQ ID NO: 5962876 - DNA, 25 bp, Homo sapien
gttctggcagagtggtcttgacacc

SEQ ID NO: 5962877 - DNA, 25 bp, Homo sapien
ccgatcaattcacaaagtcttctaa

SEQ ID NO: 5962878 - DNA, 25 bp, Homo sapien
ttgcttgcgtcaccagtccatccat

SEQ ID NO: 5962879 - DNA, 25 bp, Homo sapien
tccaactgatgaatttcatccatca

SEQ ID NO: 5962880 - DNA, 25 bp, Homo sapien
cggaggtcatcttttcaaaagcttg

SEQ ID NO: 5962881 - DNA, 25 bp, Homo sapien
aggaggtatccatgatgtatggttg

SEQ ID NO: 5962882 - DNA, 25 bp, Homo sapien
tagatatctctcaaacccttagcgg

SEQ ID NO: 5962883 - DNA, 25 bp, Homo sapien
catgacccaaccgggaatcattgga

SEQ ID NO: 5962884 - DNA, 25 bp, Homo sapien
ccctttctagcctgtggtttctttg

SEQ ID NO: 5962885 - DNA, 25 bp, Homo sapien
tctaatcaacttacgttctggcaga

SEQ ID NO: 5962886 - DNA, 25 bp, Homo sapien
tcacacccatcttagtctctgggtc

SEQ ID NO: 5962887 - DNA, 25 bp, Homo sapien
ggattgagtggtgtcaaaggtatgg

SEQ ID NO: 5962888 - DNA, 25 bp, Homo sapien
tggaaccctttctagcctgtggttt

SEQ ID NO: 5962889 - DNA, 25 bp, Homo sapien
cttagtggttctcatgtcatgtggt

SEQ ID NO: 5962890 - DNA, 25 bp, Homo sapien
acttgcttagatcttgatccttcaa

SEQ ID NO: 5962891 - DNA, 25 bp, Homo sapien
ttcttttttcggacaatgcagcaat

SEQ ID NO: 5962892 - DNA, 25 bp, Homo sapien
atcaacttacgttctggcagagtgg

SEQ ID NO: 5962893 - DNA, 25 bp, Homo sapien
cttccaactgatgaatttcatccat

SEQ ID NO: 5962894 - DNA, 25 bp, Homo sapien
tgatccttcaacatcaagcccttct

SEQ ID NO: 5962895 - DNA, 25 bp, Homo sapien
caaatggatcatcctcgattcttgc

SEQ ID NO: 5962896 - DNA, 25 bp, Homo sapien
gctcgaccataaagtccttcaaaga

SEQ ID NO: 5962897 - DNA, 25 bp, Homo sapien
atctttgcttgcgtcaccagtccat

SEQ ID NO: 5962898 - DNA, 25 bp, Homo sapien
gcacctgaaccatcctcagctggaa

SEQ ID NO: 5962899 - DNA, 25 bp, Homo sapien
ttgggcacatcagccatggaaccct

SEQ ID NO: 5962900 - DNA, 25 bp, Homo sapien
caagttttcaaatggatcatcctcg

SEQ ID NO: 5962901 - DNA, 25 bp, Homo sapien
tatcgaaggaaccatattcacaatt

SEQ ID NO: 5962902 - DNA, 25 bp, Homo sapien
gacagaaccgtcagcggcaatgtga

SEQ ID NO: 5962903 - DNA, 25 bp, Homo sapien
catattcacaattgatagccattgg

SEQ ID NO: 5962904 - DNA, 25 bp, Homo sapien
gtcaccagtccatccatagatatct

SEQ ID NO: 5962905 - DNA, 25 bp, Homo sapien
tggagagttacttggaatatcgtct

SEQ ID NO: 5962906 - DNA, 25 bp, Homo sapien
ccttgggcacatcagccatggaacc

SEQ ID NO: 5962907 - DNA, 25 bp, Homo sapien
gggaattccatgacccaaccgggaa

SEQ ID NO: 5962908 - DNA, 25 bp, Homo sapien
tcatgtggtagtttatacttggatt

SEQ ID NO: 5962909 - DNA, 25 bp, Homo sapien
gtgtttagcaattcttgctcgacca

SEQ ID NO: 5962910 - DNA, 25 bp, Homo sapien
gctggaacaatcgtaattggatctt

SEQ ID NO: 5962911 - DNA, 25 bp, Homo sapien
tattcacaattgatagccattggag

SEQ ID NO: 5962912 - DNA, 25 bp, Homo sapien
tggtcttgacaccaaagtccttttg

SEQ ID NO: 5962913 - DNA, 25 bp, Homo sapien
catgtcatgtggtagtttatacttg

SEQ ID NO: 5962914 - DNA, 25 bp, Homo sapien
aaacaacatcatagaaagcaccgtt

SEQ ID NO: 5962915 - DNA, 25 bp, Homo sapien
ccagattctttacctgttgggaatt

SEQ ID NO: 5962916 - DNA, 25 bp, Homo sapien
atatcttccaactgatgaatttcat

SEQ ID NO: 5962917 - DNA, 25 bp, Homo sapien
tcgaaggaaccatattcacaattga

SEQ ID NO: 5962918 - DNA, 25 bp, Homo sapien
tcgtggccttcgacatttggaatat

SEQ ID NO: 5962919 - DNA, 25 bp, Homo sapien
aatttcgttttgtagcaatgggacg

SEQ ID NO: 5962920 - DNA, 25 bp, Homo sapien
ctttgtcaaacctttattcaattcg

SEQ ID NO: 5962921 - DNA, 25 bp, Homo sapien
gtaccgaaaatcacacccatcttag

SEQ ID NO: 5962922 - DNA, 25 bp, Homo sapien
gaccataactcctcttggtgcttag

SEQ ID NO: 5962923 - DNA, 25 bp, Homo sapien
gcggcttccttgaaacctgggtatt

SEQ ID NO: 5962924 - DNA, 25 bp, Homo sapien
ttgcgtcaccagtccatccatagat

SEQ ID NO: 5962925 - DNA, 25 bp, Homo sapien
gggtaggaggtatccatgatgtatg

SEQ ID NO: 5962926 - DNA, 25 bp, Homo sapien
tcatcagtatcttccaagttttcaa

SEQ ID NO: 5962927 - DNA, 25 bp, Homo sapien
tcctcagctggaacaatcgtaattg

SEQ ID NO: 5962928 - DNA, 25 bp, Homo sapien
aataacagcagcacctgcacctgaa

SEQ ID NO: 5962929 - DNA, 25 bp, Homo sapien
agtaaccggaggtcatcttttcaaa

SEQ ID NO: 5962930 - DNA, 25 bp, Homo sapien
atttgttatagacagaaccgtcagc

SEQ ID NO: 5962931 - DNA, 25 bp, Homo sapien
gttaccagattctttacctgttggg

SEQ ID NO: 5962932 - DNA, 25 bp, Homo sapien
gacgcaacaattcacccaagtagta

SEQ ID NO: 5962933 - DNA, 25 bp, Homo sapien
taacactagacgcaacaattcaccc

SEQ ID NO: 5962934 - DNA, 25 bp, Homo sapien
caactgatgaatttcatccatcaat

SEQ ID NO: 5962935 - DNA, 25 bp, Homo sapien
catagatatctctcaaacccttagc

SEQ ID NO: 5962936 - DNA, 25 bp, Homo sapien
aacatcatagaaagcaccgttgaca

SEQ ID NO: 5962937 - DNA, 25 bp, Homo sapien
gaatatcgtctgctaatttgccctc

SEQ ID NO: 5962938 - DNA, 25 bp, Homo sapien
gtcaaaggtatggttaccgctcaac

SEQ ID NO: 5962939 - DNA, 25 bp, Homo sapien
tccaagttttcaaatggatcatcct

SEQ ID NO: 5962940 - DNA, 25 bp, Homo sapien
tctcgctgtcaactgtaaacatatc

SEQ ID NO: 5962941 - DNA, 25 bp, Homo sapien
caggtcttggagattgttcgtcgac

SEQ ID NO: 5962942 - DNA, 25 bp, Homo sapien
ccttcgacatttggaatatcgaaac

SEQ ID NO: 5962943 - DNA, 25 bp, Homo sapien
ctaatttgccctccaacttttcgat

SEQ ID NO: 5962944 - DNA, 25 bp, Homo sapien
gggtatttgttatagacagaaccgt

SEQ ID NO: 5962945 - DNA, 25 bp, Homo sapien
aaagcaccgttgacaccagtaccga

SEQ ID NO: 5962946 - DNA, 25 bp, Homo sapien
tttcgttttgtagcaatgggacgac

SEQ ID NO: 5962947 - DNA, 25 bp, Homo sapien
ttaagcgccaatgataccaagagac

SEQ ID NO: 5962948 - DNA, 25 bp, Homo sapien
ttgttgaccaggtcttggagattgt

SEQ ID NO: 5962949 - DNA, 25 bp, Homo sapien
ttaagttagtaccacccaaatcaat

SEQ ID NO: 5962950 - DNA, 25 bp, Homo sapien
agccattggagagttacttggaata

SEQ ID NO: 5962951 - DNA, 25 bp, Homo sapien
gcagctctggtaccgatcaattcac

SEQ ID NO: 5962952 - DNA, 25 bp, Homo sapien
gtagtaaccggaggtcatcttttca

SEQ ID NO: 5962953 - DNA, 25 bp, Homo sapien
cttccaagttttcaaatggatcatc

SEQ ID NO: 5962954 - DNA, 25 bp, Homo sapien
aatggatcatcctcgattcttgctg

SEQ ID NO: 5962955 - DNA, 25 bp, Homo sapien
caacacgactcttaagttagtacca

SEQ ID NO: 5962956 - DNA, 25 bp, Homo sapien
tagtctctgggtcagtgtagtatga

SEQ ID NO: 5962957 - DNA, 25 bp, Homo sapien
cctttattcaattcgtcgataaagt

SEQ ID NO: 5962958 - DNA, 25 bp, Homo sapien
attgatagccattggagagttactt

SEQ ID NO: 5962959 - DNA, 25 bp, Homo sapien
gtaattggatctttgcttgcgtcac

SEQ ID NO: 5962960 - DNA, 25 bp, Homo sapien
ctgggtcagtgtagtatgaggcaat

SEQ ID NO: 5962961 - DNA, 25 bp, Homo sapien
tgaggcaattaaagtaccaacagta

SEQ ID NO: 5962962 - DNA, 25 bp, Homo sapien
ggacaatgcagcaataacagcagca

SEQ ID NO: 5962963 - DNA, 25 bp, Homo sapien
gaccaaatgttcattatcgaaggaa

SEQ ID NO: 5962964 - DNA, 25 bp, Homo sapien
ttcaagtaacactagacgcaacaat

SEQ ID NO: 5962965 - DNA, 25 bp, Homo sapien
gaaccatcctcagctggaacaatcg

SEQ ID NO: 5962966 - DNA, 25 bp, Homo sapien
ttggatctttgcttgcgtcaccagt

SEQ ID NO: 5962967 - DNA, 25 bp, Homo sapien
atcttgatccttcaacatcaagccc

SEQ ID NO: 5962968 - DNA, 25 bp, Homo sapien
ggaatgttacctcccttctttgtca

SEQ ID NO: 5962969 - DNA, 25 bp, Homo sapien
catccatcaattccttgggcacatc

SEQ ID NO: 5962970 - DNA, 25 bp, Homo sapien
cttggtgtttagcaattcttgctcg

SEQ ID NO: 5962971 - DNA, 25 bp, Homo sapien
gttgaccaggtcttggagattgttc

SEQ ID NO: 5962972 - DNA, 25 bp, Homo sapien
aagcttgttgaccaggtcttggaga

SEQ ID NO: 5962973 - DNA, 25 bp, Homo sapien
tggttaccgctcaacttgaccaaca

SEQ ID NO: 5962974 - DNA, 25 bp, Homo sapien
ttaatcaatgctacaatttcaatag

SEQ ID NO: 5962975 - DNA, 25 bp, Homo sapien
atgataccaagagacttaccttcgg

SEQ ID NO: 5962976 - DNA, 25 bp, Homo sapien
tatgaggcaattaaagtaccaacag

SEQ ID NO: 5962977 - DNA, 25 bp, Homo sapien
ggttcttggcaagaccaaatgttca

SEQ ID NO: 5962978 - DNA, 25 bp, Homo sapien
aagaccaaatgttcattatcgaagg

SEQ ID NO: 5962979 - DNA, 25 bp, Homo sapien
gactcttaagttagtaccacccaaa

SEQ ID NO: 5962980 - DNA, 25 bp, Homo sapien
aataccacaaacagctaatctagca

SEQ ID NO: 5962981 - DNA, 25 bp, Homo sapien
ttttggaagatgtcatcagtatctt

SEQ ID NO: 5962982 - DNA, 25 bp, Homo sapien
tgccctccaacttttcgatatcgga

SEQ ID NO: 5962983 - DNA, 25 bp, Homo sapien
aaaatcacacccatcttagtctctg

SEQ ID NO: 5962984 - DNA, 25 bp, Homo sapien
aacatcgtacttggttcttggcaag

SEQ ID NO: 5962985 - DNA, 25 bp, Homo sapien
tccatagatatctctcaaaccctta

SEQ ID NO: 5962986 - DNA, 25 bp, Homo sapien
atctttgcaaaataccttcgttaat

SEQ ID NO: 5962987 - DNA, 25 bp, Homo sapien
ttcgtcgacagcaacatcgtacttg

SEQ ID NO: 5962988 - DNA, 25 bp, Homo sapien
ctaatggtaaggtgtccttggtgtt

SEQ ID NO: 5962989 - DNA, 25 bp, Homo sapien
aaggtgtccttggtgtttagcaatt

SEQ ID NO: 5962990 - DNA, 25 bp, Homo sapien
catcctcagctggaacaatcgtaat

SEQ ID NO: 5962991 - DNA, 25 bp, Homo sapien
tggaaatttcgttttgtagcaatgg

SEQ ID NO: 5962992 - DNA, 25 bp, Homo sapien
aatgtgaccagtcttgtaacctctc

SEQ ID NO: 5962993 - DNA, 25 bp, Homo sapien
gcacctgcacctgaaccatcctcag

SEQ ID NO: 5962994 - DNA, 25 bp, Homo sapien
acaccaaagtccttttggaagatgt

SEQ ID NO: 5962995 - DNA, 25 bp, Homo sapien
tctggcagagtggtcttgacaccaa

SEQ ID NO: 5962996 - DNA, 25 bp, Homo sapien
tggtttctttggacctaaatgaacc

SEQ ID NO: 5962997 - DNA, 25 bp, Homo sapien
agagtggtcttgacaccaaagtcct

SEQ ID NO: 5962998 - DNA, 25 bp, Homo sapien
aaggtctcgctgtcaactgtaaaca

SEQ ID NO: 5962999 - DNA, 25 bp, Homo sapien
taccttcggcaattcttttttcgga

SEQ ID NO: 5963000 - DNA, 25 bp, Homo sapien
aattggatctttgcttgcgtcacca

SEQ ID NO: 5963001 - DNA, 25 bp, Homo sapien
tggcaaatagcggcaataccacaaa

SEQ ID NO: 5963002 - DNA, 25 bp, Homo sapien
ggcaactctctcttggaaatttcgt

SEQ ID NO: 5963003 - DNA, 25 bp, Homo sapien
taacctctcttttggcaaatagcgg

SEQ ID NO: 5963004 - DNA, 25 bp, Homo sapien
tctcaaggtctcgctgtcaactgta

SEQ ID NO: 5963005 - DNA, 25 bp, Homo sapien
acccatcttagtctctgggtcagtg

SEQ ID NO: 5963006 - DNA, 25 bp, Homo sapien
taccacaaacagctaatctagcagc

SEQ ID NO: 5963007 - DNA, 25 bp, Homo sapien
caccagtccatccatagatatctct

SEQ ID NO: 5963008 - DNA, 25 bp, Homo sapien
agcagcacctgcacctgaaccatcc

SEQ ID NO: 5963009 - DNA, 25 bp, Homo sapien
agtatgaggcaattaaagtaccaac

SEQ ID NO: 5963010 - DNA, 25 bp, Homo sapien
cagtatcttccaagttttcaaatgg

SEQ ID NO: 5963011 - DNA, 25 bp, Homo sapien
acaacatcatagaaagcaccgttga

SEQ ID NO: 5963012 - DNA, 25 bp, Homo sapien
tggatcatcctcgattcttgctggg

SEQ ID NO: 5963013 - DNA, 25 bp, Homo sapien
cttgatccttcaacatcaagccctt

SEQ ID NO: 5963014 - DNA, 25 bp, Homo sapien
cctcgattcttgctgggtaggaggt

SEQ ID NO: 5963015 - DNA, 25 bp, Homo sapien
cttgtaacctctcttttggcaaata

SEQ ID NO: 5963016 - DNA, 25 bp, Homo sapien
acctgcacctgaaccatcctcagct

SEQ ID NO: 5963017 - DNA, 25 bp, Homo sapien
tagacagaaccgtcagcggcaatgt

SEQ ID NO: 5963018 - DNA, 25 bp, Homo sapien
gaagctgggtacgagaaggtgaaac

SEQ ID NO: 5963019 - DNA, 25 bp, Homo sapien
gaacaatcgtaattggatctttgct

SEQ ID NO: 5963020 - DNA, 25 bp, Homo sapien
cttggtccatctttgcaaaatacct

SEQ ID NO: 5963021 - DNA, 25 bp, Homo sapien
ggttgtttcaacttgcttagatctt

SEQ ID NO: 5963022 - DNA, 25 bp, Homo sapien
accaacacgactcttaagttagtac

SEQ ID NO: 5963023 - DNA, 25 bp, Homo sapien
cggcaatgtgaccagtcttgtaacc

SEQ ID NO: 5963024 - DNA, 25 bp, Homo sapien
aaacctgggtatttgttatagacag

SEQ ID NO: 5963025 - DNA, 25 bp, Homo sapien
tccatcaattccttgggcacatcag

SEQ ID NO: 5963026 - DNA, 25 bp, Homo sapien
attgagtggtgtcaaaggtatggtt

SEQ ID NO: 5963027 - DNA, 25 bp, Homo sapien
aatgggacgacatcgtggccttcga

SEQ ID NO: 5963028 - DNA, 25 bp, Homo sapien
atttcatccatcaattccttgggca

SEQ ID NO: 5963029 - DNA, 25 bp, Homo sapien
gtcgataaagtgcttaacaaccttt

SEQ ID NO: 5963030 - DNA, 25 bp, Homo sapien
aaagtgcttaacaacctttctcaag

SEQ ID NO: 5963031 - DNA, 25 bp, Homo sapien
agagtcggcaataaaggaccataac

SEQ ID NO: 5963032 - DNA, 25 bp, Homo sapien
taccaagagacttaccttcggcaat

SEQ ID NO: 5963033 - DNA, 25 bp, Homo sapien
tttacctgttgggaattccatgacc

SEQ ID NO: 5963034 - DNA, 25 bp, Homo sapien
atccttcaacatcaagcccttctcg

SEQ ID NO: 5963035 - DNA, 25 bp, Homo sapien
caattcgtcgataaagtgcttaaca

SEQ ID NO: 5963036 - DNA, 25 bp, Homo sapien
ccataactcctcttggtgcttagtg

SEQ ID NO: 5963037 - DNA, 25 bp, Homo sapien
ggtaccgatcaattcacaaagtctt

SEQ ID NO: 5963038 - DNA, 25 bp, Homo sapien
ttcaacttgcttagatcttgatcct

SEQ ID NO: 5963039 - DNA, 25 bp, Homo sapien
cttgaccaacacgactcttaagtta

SEQ ID NO: 5963040 - DNA, 25 bp, Homo sapien
atacttggattgagtggtgtcaaag

SEQ ID NO: 5963041 - DNA, 25 bp, Homo sapien
tgtagcaatgggacgacatcgtggc

SEQ ID NO: 5963042 - DNA, 25 bp, Homo sapien
tcttgctcgaccataaagtccttca

SEQ ID NO: 5963043 - DNA, 25 bp, Homo sapien
tcgtacttggttcttggcaagacca

SEQ ID NO: 5963044 - DNA, 25 bp, Homo sapien
cgtcgacagcaacatcgtacttggt

SEQ ID NO: 5963045 - DNA, 25 bp, Homo sapien
gtggccttcgacatttggaatatcg

SEQ ID NO: 5963046 - DNA, 25 bp, Homo sapien
cccttctcgtttaattcaagtaaca

SEQ ID NO: 5963047 - DNA, 25 bp, Homo sapien
acctctcttttggcaaatagcggca

SEQ ID NO: 5963048 - DNA, 25 bp, Homo sapien
tcttggagattgttcgtcgacagca

SEQ ID NO: 5963049 - DNA, 25 bp, Homo sapien
attcgtcgataaagtgcttaacaac

SEQ ID NO: 5963050 - DNA, 25 bp, Homo sapien
accaaagtccttttggaagatgtca

SEQ ID NO: 5963051 - DNA, 25 bp, Homo sapien
tagtaccacccaaatcaatggccaa

SEQ ID NO: 5963052 - DNA, 25 bp, Homo sapien
tcgttaatcttgttttgggaagctg

SEQ ID NO: 5963053 - DNA, 25 bp, Homo sapien
ggtatggttaccgctcaacttgacc

SEQ ID NO: 5963054 - DNA, 25 bp, Homo sapien
caagtaacactagacgcaacaattc

SEQ ID NO: 5963055 - DNA, 25 bp, Homo sapien
aatcgtaattggatctttgcttgcg

SEQ ID NO: 5963056 - DNA, 25 bp, Homo sapien
tgaccaacacgactcttaagttagt

SEQ ID NO: 5963057 - DNA, 25 bp, Homo sapien
agtaacactagacgcaacaattcac

SEQ ID NO: 5963058 - DNA, 25 bp, Homo sapien
tcggaaacaacatcatagaaagcac

SEQ ID NO: 5963059 - DNA, 25 bp, Homo sapien
tcaaacccttagcggcggcttcctt

SEQ ID NO: 5963060 - DNA, 25 bp, Homo sapien
aatggccaaatagttaccagattct

SEQ ID NO: 5963061 - DNA, 25 bp, Homo sapien
aaacatatcttccaactgatgaatt

SEQ ID NO: 5963062 - DNA, 25 bp, Homo sapien
caacttgcttagatcttgatccttc

SEQ ID NO: 5963063 - DNA, 25 bp, Homo sapien
ttcggcaattcttttttcggacaat

SEQ ID NO: 5963064 - DNA, 25 bp, Homo sapien
cagcaataacagcagcacctgcacc

SEQ ID NO: 5963065 - DNA, 25 bp, Homo sapien
gttaccgctcaacttgaccaacacg

SEQ ID NO: 5963066 - DNA, 25 bp, Homo sapien
atgaatttcatccatcaattccttg

SEQ ID NO: 5963067 - DNA, 25 bp, Homo sapien
tctgctaatttgccctccaactttt

SEQ ID NO: 5963068 - DNA, 25 bp, Homo sapien
tgtggtttctttggacctaaatgaa

SEQ ID NO: 5963069 - DNA, 25 bp, Homo sapien
tgacccaaccgggaatcattggaat

SEQ ID NO: 5963070 - DNA, 25 bp, Homo sapien
accagtcttgtaacctctcttttgg

SEQ ID NO: 5963071 - DNA, 25 bp, Homo sapien
ttgttatagacagaaccgtcagcgg

SEQ ID NO: 5963072 - DNA, 25 bp, Homo sapien
aatgcagcaataacagcagcacctg

SEQ ID NO: 5963073 - DNA, 25 bp, Homo sapien
tgctacaatttcaataggcaactct

SEQ ID NO: 5963074 - DNA, 25 bp, Homo sapien
cagccatggaaccctttctagcctg

SEQ ID NO: 5963075 - DNA, 25 bp, Homo sapien
ctctcttttggcaaatagcggcaat

SEQ ID NO: 5963076 - DNA, 25 bp, Homo sapien
ttcttgctgggtaggaggtatccat

SEQ ID NO: 5963077 - DNA, 25 bp, Homo sapien
acaccagtaccgaaaatcacaccca

SEQ ID NO: 5963078 - DNA, 25 bp, Homo sapien
acgactcttaagttagtaccaccca

SEQ ID NO: 5963079 - DNA, 25 bp, Homo sapien
ctgggtatttgttatagacagaacc

SEQ ID NO: 5963080 - DNA, 25 bp, Homo sapien
ctcatgtcatgtggtagtttatact

SEQ ID NO: 5963081 - DNA, 25 bp, Homo sapien
accggaggtcatcttttcaaaagct

SEQ ID NO: 5963082 - DNA, 25 bp, Homo sapien
taccgctcaacttgaccaacacgac

SEQ ID NO: 5963083 - DNA, 25 bp, Homo sapien
ggttctcatgtcatgtggtagttta

SEQ ID NO: 5963084 - DNA, 25 bp, Homo sapien
tggtaaggtgtccttggtgtttagc

SEQ ID NO: 5963085 - DNA, 25 bp, Homo sapien
gtacttggttcttggcaagaccaaa

SEQ ID NO: 5963086 - DNA, 25 bp, Homo sapien
caagtagtaaccggaggtcatcttt

SEQ ID NO: 5963087 - DNA, 25 bp, Homo sapien
taccttcgttaatcttgttttggga

SEQ ID NO: 5963088 - DNA, 25 bp, Homo sapien
tgtcatgtggtagtttatacttgga

SEQ ID NO: 5963089 - DNA, 25 bp, Homo sapien
gtgaaacctaatggtaaggtgtcct

SEQ ID NO: 5963090 - DNA, 25 bp, Homo sapien
gccaaatagttaccagattctttac

SEQ ID NO: 5963091 - DNA, 25 bp, Homo sapien
tgggacgacatcgtggccttcgaca

SEQ ID NO: 5963092 - DNA, 25 bp, Homo sapien
ttcaacatcaagcccttctcgttta

SEQ ID NO: 5963093 - DNA, 25 bp, Homo sapien
ttagcggcggcttccttgaaacctg

SEQ ID NO: 5963094 - DNA, 25 bp, Homo sapien
aattcaagtaacactagacgcaaca

SEQ ID NO: 5963095 - DNA, 25 bp, Homo sapien
ccgttgacaccagtaccgaaaatca

SEQ ID NO: 5963096 - DNA, 25 bp, Homo sapien
tgcttaacaacctttctcaaggtct

SEQ ID NO: 5963097 - DNA, 25 bp, Homo sapien
aggcaattaaagtaccaacagtatc

SEQ ID NO: 5963098 - DNA, 25 bp, Homo sapien
aacttgaccaacacgactcttaagt

SEQ ID NO: 5963099 - DNA, 25 bp, Homo sapien
caattcacccaagtagtaaccggag

SEQ ID NO: 5963100 - DNA, 25 bp, Homo sapien
accatattcacaattgatagccatt

SEQ ID NO: 5963101 - DNA, 25 bp, Homo sapien
ccttttggaagatgtcatcagtatc

SEQ ID NO: 5963102 - DNA, 25 bp, Homo sapien
gcagagtggtcttgacaccaaagtc

SEQ ID NO: 5963103 - DNA, 25 bp, Homo sapien
catcgtggccttcgacatttggaat

SEQ ID NO: 5963104 - DNA, 25 bp, Homo sapien
attcttgctcgaccataaagtcctt

SEQ ID NO: 5963105 - DNA, 25 bp, Homo sapien
ctcagctggaacaatcgtaattgga

SEQ ID NO: 5963106 - DNA, 25 bp, Homo sapien
tttgtagcaatgggacgacatcgtg

SEQ ID NO: 5963107 - DNA, 25 bp, Homo sapien
cgtcagcggcaatgtgaccagtctt

SEQ ID NO: 5963108 - DNA, 25 bp, Homo sapien
tattcaattcgtcgataaagtgctt

SEQ ID NO: 5963109 - DNA, 25 bp, Homo sapien
cctcttggtgcttagtggttctcat

SEQ ID NO: 5963110 - DNA, 25 bp, Homo sapien
tttcgatatcggaaacaacatcata

SEQ ID NO: 5963111 - DNA, 25 bp, Homo sapien
ttaattcaagtaacactagacgcaa

SEQ ID NO: 5963112 - DNA, 25 bp, Homo sapien
ttcacaaagtcttctaatcaactta

SEQ ID NO: 5963113 - DNA, 25 bp, Homo sapien
tgctgggtaggaggtatccatgatg

SEQ ID NO: 5963114 - DNA, 25 bp, Homo sapien
tcaataggcaactctctcttggaaa

SEQ ID NO: 5963115 - DNA, 25 bp, Homo sapien
aaatgttcattatcgaaggaaccat

SEQ ID NO: 5963116 - DNA, 25 bp, Homo sapien
tatggttaccgctcaacttgaccaa

SEQ ID NO: 5963117 - DNA, 25 bp, Homo sapien
ggatctttgcttgcgtcaccagtcc

SEQ ID NO: 5963118 - DNA, 25 bp, Homo sapien
tccatgacccaaccgggaatcattg

SEQ ID NO: 5963119 - DNA, 25 bp, Homo sapien
acttggattgagtggtgtcaaaggt

SEQ ID NO: 5963120 - DNA, 25 bp, Homo sapien
ccataaagtccttcaaagagtcggc

SEQ ID NO: 5963121 - DNA, 25 bp, Homo sapien
atcgtctgctaatttgccctccaac

SEQ ID NO: 5963122 - DNA, 25 bp, Homo sapien
cctttctcaaggtctcgctgtcaac

SEQ ID NO: 5963123 - DNA, 25 bp, Homo sapien
tgttttgggaagctgggtacgagaa

SEQ ID NO: 5963124 - DNA, 25 bp, Homo sapien
tcgtttaattcaagtaacactagac

SEQ ID NO: 5963125 - DNA, 25 bp, Homo sapien
tcaaggtctcgctgtcaactgtaaa

SEQ ID NO: 5963126 - DNA, 25 bp, Homo sapien
cacaattgatagccattggagagtt

SEQ ID NO: 5963127 - DNA, 25 bp, Homo sapien
gcaataccacaaacagctaatctag

SEQ ID NO: 5963128 - DNA, 25 bp, Homo sapien
tagcagctctggtaccgatcaattc

SEQ ID NO: 5963129 - DNA, 25 bp, Homo sapien
gtgtagtatgaggcaattaaagtac

SEQ ID NO: 5963130 - DNA, 25 bp, Homo sapien
cattggaatgttacctcccttcttt

SEQ ID NO: 5963131 - DNA, 25 bp, Homo sapien
agttttcaaatggatcatcctcgat

SEQ ID NO: 5963132 - DNA, 25 bp, Homo sapien
tatcggaaacaacatcatagaaagc

SEQ ID NO: 5963133 - DNA, 25 bp, Homo sapien
tagtggttctcatgtcatgtggtag

SEQ ID NO: 5963134 - DNA, 25 bp, Homo sapien
caagcccttctcgtttaattcaagt

SEQ ID NO: 5963135 - DNA, 25 bp, Homo sapien
caaatagttaccagattctttacct

SEQ ID NO: 5963136 - DNA, 25 bp, Homo sapien
acttacctcatgaagttattgagaa

SEQ ID NO: 5963137 - DNA, 25 bp, Homo sapien
gttctttgaaggtttcggtgacgaa

SEQ ID NO: 5963138 - DNA, 25 bp, Homo sapien
agaggaggcaaaggccaagaaggca

SEQ ID NO: 5963139 - DNA, 25 bp, Homo sapien
attgtgtggttctaacgacgacaaa

SEQ ID NO: 5963140 - DNA, 25 bp, Homo sapien
tcaaaaagccatcaagcacccagat

SEQ ID NO: 5963141 - DNA, 25 bp, Homo sapien
ccaacgctaagggcgaatcattcaa

SEQ ID NO: 5963142 - DNA, 25 bp, Homo sapien
agctaagaaggccgccaacgccaaa

SEQ ID NO: 5963143 - DNA, 25 bp, Homo sapien
actctaaggccggtgacaaggtgtt

SEQ ID NO: 5963144 - DNA, 25 bp, Homo sapien
gacaagttagaaataaatcacgatt

SEQ ID NO: 5963145 - DNA, 25 bp, Homo sapien
caacttataccacatacagacatat

SEQ ID NO: 5963146 - DNA, 25 bp, Homo sapien
gacatattttgagatggattgatta

SEQ ID NO: 5963147 - DNA, 25 bp, Homo sapien
tgcgggtggcgctgctgatgccgca

SEQ ID NO: 5963148 - DNA, 25 bp, Homo sapien
aaatgacgggttggaagttatcttc

SEQ ID NO: 5963149 - DNA, 25 bp, Homo sapien
aatgaagcaattgaatccaaaaaag

SEQ ID NO: 5963150 - DNA, 25 bp, Homo sapien
ggaagtgtcgagcactgacaagtta

SEQ ID NO: 5963151 - DNA, 25 bp, Homo sapien
gaccatcctgtaagaaagttgacca

SEQ ID NO: 5963152 - DNA, 25 bp, Homo sapien
aacgccaaacaacaacaagagcaac

SEQ ID NO: 5963153 - DNA, 25 bp, Homo sapien
aacctcattttactacaaatgacgg

SEQ ID NO: 5963154 - DNA, 25 bp, Homo sapien
gcagctaagaaggccgccaacgcca

SEQ ID NO: 5963155 - DNA, 25 bp, Homo sapien
cctgtaagaaagttgaccaacgcta

SEQ ID NO: 5963156 - DNA, 25 bp, Homo sapien
accaaaggactctaaggccggtgac

SEQ ID NO: 5963157 - DNA, 25 bp, Homo sapien
ctacaattgatgtcggtgatgaaga

SEQ ID NO: 5963158 - DNA, 25 bp, Homo sapien
tgtatgcaacttgaaaccagttaac

SEQ ID NO: 5963159 - DNA, 25 bp, Homo sapien
atcgcttattatttcaaagtatcca

SEQ ID NO: 5963160 - DNA, 25 bp, Homo sapien
agatttccgtgttggttttattcaa

SEQ ID NO: 5963161 - DNA, 25 bp, Homo sapien
tggtattgtgtggttctaacgacga

SEQ ID NO: 5963162 - DNA, 25 bp, Homo sapien
tgttgttgtatgcaacttgaaacca

SEQ ID NO: 5963163 - DNA, 25 bp, Homo sapien
aagtgtcgagcactgacaagttaga

SEQ ID NO: 5963164 - DNA, 25 bp, Homo sapien
ccaaagccatccgcaatagatttcc

SEQ ID NO: 5963165 - DNA, 25 bp, Homo sapien
gtctctacaattgatgtcggtgatg

SEQ ID NO: 5963166 - DNA, 25 bp, Homo sapien
gaaaccagttaacatgagaggtatt

SEQ ID NO: 5963167 - DNA, 25 bp, Homo sapien
gcattttcctttggacgctatgcaa

SEQ ID NO: 5963168 - DNA, 25 bp, Homo sapien
cgtcttcgaagtcgccttaccattg

SEQ ID NO: 5963169 - DNA, 25 bp, Homo sapien
aagaaaaaggcacctgcgggtggcg

SEQ ID NO: 5963170 - DNA, 25 bp, Homo sapien
tgctgatgccgcagccaaggcagac

SEQ ID NO: 5963171 - DNA, 25 bp, Homo sapien
aaatcacgatttggacttacctcat

SEQ ID NO: 5963172 - DNA, 25 bp, Homo sapien
ataccacatacagacatattttgag

SEQ ID NO: 5963173 - DNA, 25 bp, Homo sapien
aatgggaatcggttctaaaatctgg

SEQ ID NO: 5963174 - DNA, 25 bp, Homo sapien
ggactctaaggccggtgacaaggtg

SEQ ID NO: 5963175 - DNA, 25 bp, Homo sapien
catgagaggtattaaatccactgct

SEQ ID NO: 5963176 - DNA, 25 bp, Homo sapien
aattgatgtcggtgatgaagaaggc

SEQ ID NO: 5963177 - DNA, 25 bp, Homo sapien
aagcaattgaatccaaaaaagaaga

SEQ ID NO: 5963178 - DNA, 25 bp, Homo sapien
ttaccattgattaaggatttagtgg

SEQ ID NO: 5963179 - DNA, 25 bp, Homo sapien
catctaccgacgttcacgtcttcga

SEQ ID NO: 5963180 - DNA, 25 bp, Homo sapien
aagagacaacaccttcattgtgtcc

SEQ ID NO: 5963181 - DNA, 25 bp, Homo sapien
aagaggtaagcctgatgaagaaacc

SEQ ID NO: 5963182 - DNA, 25 bp, Homo sapien
gatgtcaagtcaacttataccacat

SEQ ID NO: 5963183 - DNA, 25 bp, Homo sapien
accattgattaaggatttagtggca

SEQ ID NO: 5963184 - DNA, 25 bp, Homo sapien
ttcaaagtatccagtttctttcact

SEQ ID NO: 5963185 - DNA, 25 bp, Homo sapien
aatctggtcaaatccaaccacactt

SEQ ID NO: 5963186 - DNA, 25 bp, Homo sapien
tccgtgttggttttattcaaaaagc

SEQ ID NO: 5963187 - DNA, 25 bp, Homo sapien
cttagatcaattgaatttggtgtta

SEQ ID NO: 5963188 - DNA, 25 bp, Homo sapien
aaaaagccatcaagcacccagatgc

SEQ ID NO: 5963189 - DNA, 25 bp, Homo sapien
ttgtcgagccaccaaaggactctaa

SEQ ID NO: 5963190 - DNA, 25 bp, Homo sapien
gttaccaagttcgaatcgcttatta

SEQ ID NO: 5963191 - DNA, 25 bp, Homo sapien
aagttcgaatcgcttattatttcaa

SEQ ID NO: 5963192 - DNA, 25 bp, Homo sapien
gaatttgtcgagccaccaaaggact

SEQ ID NO: 5963193 - DNA, 25 bp, Homo sapien
tggtttggtcaagcattttcctttg

SEQ ID NO: 5963194 - DNA, 25 bp, Homo sapien
cagaaaagccaaagccatccgcaat

SEQ ID NO: 5963195 - DNA, 25 bp, Homo sapien
caaagacgaagaagaaaaggaccat

SEQ ID NO: 5963196 - DNA, 25 bp, Homo sapien
gcaagatcatccaagaggtaagcct

SEQ ID NO: 5963197 - DNA, 25 bp, Homo sapien
tctaaggccggtgacaaggtgttct

SEQ ID NO: 5963198 - DNA, 25 bp, Homo sapien
tgtgtccactttgtacccaacatct

SEQ ID NO: 5963199 - DNA, 25 bp, Homo sapien
ttgaatccaaaaaagaagatctggg

SEQ ID NO: 5963200 - DNA, 25 bp, Homo sapien
ccaatgaagcaattgaatccaaaaa

SEQ ID NO: 5963201 - DNA, 25 bp, Homo sapien
ggtgacgaagctccaatgaagcaat

SEQ ID NO: 5963202 - DNA, 25 bp, Homo sapien
tgaagcaattgaatccaaaaaagaa

SEQ ID NO: 5963203 - DNA, 25 bp, Homo sapien
gacgacaaagttgaatttgtcgagc

SEQ ID NO: 5963204 - DNA, 25 bp, Homo sapien
tttctttcactaaagaacaatctgc

SEQ ID NO: 5963205 - DNA, 25 bp, Homo sapien
tttcctttggacgctatgcaagaac

SEQ ID NO: 5963206 - DNA, 25 bp, Homo sapien
ctgatgccgcagccaaggcagacga

SEQ ID NO: 5963207 - DNA, 25 bp, Homo sapien
gttgctagtattgctaatgctcaag

SEQ ID NO: 5963208 - DNA, 25 bp, Homo sapien
ctcaagctgcccaatgggaatcggt

SEQ ID NO: 5963209 - DNA, 25 bp, Homo sapien
atccaaaaaagaagatctgggaaca

SEQ ID NO: 5963210 - DNA, 25 bp, Homo sapien
atatgtctctacaattgatgtcggt

SEQ ID NO: 5963211 - DNA, 25 bp, Homo sapien
cccagatgccgactccctatatgtc

SEQ ID NO: 5963212 - DNA, 25 bp, Homo sapien
acccttaagaaattgagagaggagg

SEQ ID NO: 5963213 - DNA, 25 bp, Homo sapien
gtttggtcaagcattttcctttgga

SEQ ID NO: 5963214 - DNA, 25 bp, Homo sapien
tgaaggtttcggtgacgaagctcca

SEQ ID NO: 5963215 - DNA, 25 bp, Homo sapien
tgagagaggaggcaaaggccaagaa

SEQ ID NO: 5963216 - DNA, 25 bp, Homo sapien
aattgaatccaaaaaagaagatctg

SEQ ID NO: 5963217 - DNA, 25 bp, Homo sapien
aacttgttggaagtgtcgagcactg

SEQ ID NO: 5963218 - DNA, 25 bp, Homo sapien
ctgtttgttctggtttggtcaagca

SEQ ID NO: 5963219 - DNA, 25 bp, Homo sapien
tcgaatcgcttattatttcaaagta

SEQ ID NO: 5963220 - DNA, 25 bp, Homo sapien
tccaaggatgtcaagtcaacttata

SEQ ID NO: 5963221 - DNA, 25 bp, Homo sapien
aaaatctggtcaaatccaaccacac

SEQ ID NO: 5963222 - DNA, 25 bp, Homo sapien
gctgctgatgccgcagccaaggcag

SEQ ID NO: 5963223 - DNA, 25 bp, Homo sapien
gctccaaggatgtcaagtcaactta

SEQ ID NO: 5963224 - DNA, 25 bp, Homo sapien
gcaaaacttgttggaagtgtcgagc

SEQ ID NO: 5963225 - DNA, 25 bp, Homo sapien
atcattcaaggttgctagtattgct

SEQ ID NO: 5963226 - DNA, 25 bp, Homo sapien
atccgcaatagatttccgtgttggt

SEQ ID NO: 5963227 - DNA, 25 bp, Homo sapien
gcaattgaatccaaaaaagaagatc

SEQ ID NO: 5963228 - DNA, 25 bp, Homo sapien
cgcttattatttcaaagtatccagt

SEQ ID NO: 5963229 - DNA, 25 bp, Homo sapien
ttggacgctatgcaagaacgttatg

SEQ ID NO: 5963230 - DNA, 25 bp, Homo sapien
tgatgaagaaggcccaagaactgtt

SEQ ID NO: 5963231 - DNA, 25 bp, Homo sapien
cagatgccgactccctatatgtctc

SEQ ID NO: 5963232 - DNA, 25 bp, Homo sapien
ttcacgtcttcgaagtcgccttacc

SEQ ID NO: 5963233 - DNA, 25 bp, Homo sapien
agaactgtttgttctggtttggtca

SEQ ID NO: 5963234 - DNA, 25 bp, Homo sapien
acaaatgacgggttggaagttatct

SEQ ID NO: 5963235 - DNA, 25 bp, Homo sapien
atgaagaaacccttaagaaattgag

SEQ ID NO: 5963236 - DNA, 25 bp, Homo sapien
attgtgtccactttgtacccaacat

SEQ ID NO: 5963237 - DNA, 25 bp, Homo sapien
gctatgcaagaacgttatgttgttg

SEQ ID NO: 5963238 - DNA, 25 bp, Homo sapien
acgaagctccaatgaagcaattgaa

SEQ ID NO: 5963239 - DNA, 25 bp, Homo sapien
agccatccgcaatagatttccgtgt

SEQ ID NO: 5963240 - DNA, 25 bp, Homo sapien
acaaaataaggccccagaaaagcca

SEQ ID NO: 5963241 - DNA, 25 bp, Homo sapien
agtattgctaatgctcaagtccgtt

SEQ ID NO: 5963242 - DNA, 25 bp, Homo sapien
aggccccagaaaagccaaagccatc

SEQ ID NO: 5963243 - DNA, 25 bp, Homo sapien
gagcaacaaaataaggccccagaaa

SEQ ID NO: 5963244 - DNA, 25 bp, Homo sapien
atgacgggttggaagttatcttcaa

SEQ ID NO: 5963245 - DNA, 25 bp, Homo sapien
atcaagcacccagatgccgactccc

SEQ ID NO: 5963246 - DNA, 25 bp, Homo sapien
ttctaaaatctggtcaaatccaacc

SEQ ID NO: 5963247 - DNA, 25 bp, Homo sapien
tcaagcattttcctttggacgctat

SEQ ID NO: 5963248 - DNA, 25 bp, Homo sapien
caacttgaaaccagttaacatgaga

SEQ ID NO: 5963249 - DNA, 25 bp, Homo sapien
ggcaaaggccaagaaggcagctaag

SEQ ID NO: 5963250 - DNA, 25 bp, Homo sapien
tttactacaaatgacgggttggaag

SEQ ID NO: 5963251 - DNA, 25 bp, Homo sapien
aagacgaagaagaaaaggaccatcc

SEQ ID NO: 5963252 - DNA, 25 bp, Homo sapien
acccaacatctaccgacgttcacgt

SEQ ID NO: 5963253 - DNA, 25 bp, Homo sapien
gaaaaaggcacctgcgggtggcgct

SEQ ID NO: 5963254 - DNA, 25 bp, Homo sapien
aactgtttgttctggtttggtcaag

SEQ ID NO: 5963255 - DNA, 25 bp, Homo sapien
atttcaaagtatccagtttctttca

SEQ ID NO: 5963256 - DNA, 25 bp, Homo sapien
cacgatttggacttacctcatgaag

SEQ ID NO: 5963257 - DNA, 25 bp, Homo sapien
gaacacttacaacctcattttacta

SEQ ID NO: 5963258 - DNA, 25 bp, Homo sapien
attaaatccactgctatggtattgt

SEQ ID NO: 5963259 - DNA, 25 bp, Homo sapien
ttagaaataaatcacgatttggact

SEQ ID NO: 5963260 - DNA, 25 bp, Homo sapien
cgagcactgacaagttagaaataaa

SEQ ID NO: 5963261 - DNA, 25 bp, Homo sapien
aacgctaagggcgaatcattcaagg

SEQ ID NO: 5963262 - DNA, 25 bp, Homo sapien
accttcattgtgtccactttgtacc

SEQ ID NO: 5963263 - DNA, 25 bp, Homo sapien
aatccactgctatggtattgtgtgg

SEQ ID NO: 5963264 - DNA, 25 bp, Homo sapien
ttatttcaaagtatccagtttcttt

SEQ ID NO: 5963265 - DNA, 25 bp, Homo sapien
tctttcactaaagaacaatctgctc

SEQ ID NO: 5963266 - DNA, 25 bp, Homo sapien
gctaaaaagcaagatcatccaagag

SEQ ID NO: 5963267 - DNA, 25 bp, Homo sapien
tccactgctatggtattgtgtggtt

SEQ ID NO: 5963268 - DNA, 25 bp, Homo sapien
cgaagatgttagtaagaaggctaaa

SEQ ID NO: 5963269 - DNA, 25 bp, Homo sapien
cctcattttactacaaatgacgggt

SEQ ID NO: 5963270 - DNA, 25 bp, Homo sapien
ccgcagccaaggcagacgaagatgt

SEQ ID NO: 5963271 - DNA, 25 bp, Homo sapien
agccaccaaaggactctaaggccgg

SEQ ID NO: 5963272 - DNA, 25 bp, Homo sapien
acttataccacatacagacatattt

SEQ ID NO: 5963273 - DNA, 25 bp, Homo sapien
tattttgagatggattgattacatg

SEQ ID NO: 5963274 - DNA, 25 bp, Homo sapien
gaccaacgctaagggcgaatcattc

SEQ ID NO: 5963275 - DNA, 25 bp, Homo sapien
cactgctatggtattgtgtggttct

SEQ ID NO: 5963276 - DNA, 25 bp, Homo sapien
taaggccccagaaaagccaaagcca

SEQ ID NO: 5963277 - DNA, 25 bp, Homo sapien
ccaaaaaagaagatctgggaacact

SEQ ID NO: 5963278 - DNA, 25 bp, Homo sapien
agccatcaagcacccagatgccgac

SEQ ID NO: 5963279 - DNA, 25 bp, Homo sapien
gacaaggtgttctttgaaggtttcg

SEQ ID NO: 5963280 - DNA, 25 bp, Homo sapien
cccagaaaagccaaagccatccgca

SEQ ID NO: 5963281 - DNA, 25 bp, Homo sapien
aaaagaagatctgggaacacttaca

SEQ ID NO: 5963282 - DNA, 25 bp, Homo sapien
acaccttcattgtgtccactttgta

SEQ ID NO: 5963283 - DNA, 25 bp, Homo sapien
agctgcccaatgggaatcggttcta

SEQ ID NO: 5963284 - DNA, 25 bp, Homo sapien
atcctgtaagaaagttgaccaacgc

SEQ ID NO: 5963285 - DNA, 25 bp, Homo sapien
gtcaacttataccacatacagacat

SEQ ID NO: 5963286 - DNA, 25 bp, Homo sapien
tccactttgtacccaacatctaccg

SEQ ID NO: 5963287 - DNA, 25 bp, Homo sapien
aggcagctaagaaggccgccaacgc

SEQ ID NO: 5963288 - DNA, 25 bp, Homo sapien
caacaccttcattgtgtccactttg

SEQ ID NO: 5963289 - DNA, 25 bp, Homo sapien
gagaagaagaaaaaggcacctgcgg

SEQ ID NO: 5963290 - DNA, 25 bp, Homo sapien
aagttatcttcaaagacgaagaaga

SEQ ID NO: 5963291 - DNA, 25 bp, Homo sapien
caagctgcccaatgggaatcggttc

SEQ ID NO: 5963292 - DNA, 25 bp, Homo sapien
tcatccaagaggtaagcctgatgaa

SEQ ID NO: 5963293 - DNA, 25 bp, Homo sapien
tagtaagaaggctaaaaagcaagat

SEQ ID NO: 5963294 - DNA, 25 bp, Homo sapien
tcttcgaagtcgccttaccattgat

SEQ ID NO: 5963295 - DNA, 25 bp, Homo sapien
tctggtttggtcaagcattttcctt

SEQ ID NO: 5963296 - DNA, 25 bp, Homo sapien
gatgccgactccctatatgtctcta

SEQ ID NO: 5963297 - DNA, 25 bp, Homo sapien
aataaggccccagaaaagccaaagc

SEQ ID NO: 5963298 - DNA, 25 bp, Homo sapien
ccaaggcagacgaagatgttagtaa

SEQ ID NO: 5963299 - DNA, 25 bp, Homo sapien
tcgttaccaagttcgaatcgcttat

SEQ ID NO: 5963300 - DNA, 25 bp, Homo sapien
ttttattcaaaaagccatcaagcac

SEQ ID NO: 5963301 - DNA, 25 bp, Homo sapien
ctttgtacccaacatctaccgacgt

SEQ ID NO: 5963302 - DNA, 25 bp, Homo sapien
tgtcggtgatgaagaaggcccaaga

SEQ ID NO: 5963303 - DNA, 25 bp, Homo sapien
atctgggaacacttacaacctcatt

SEQ ID NO: 5963304 - DNA, 25 bp, Homo sapien
tctgctcaagctgcccaatgggaat

SEQ ID NO: 5963305 - DNA, 25 bp, Homo sapien
ttattcaaaaagccatcaagcaccc

SEQ ID NO: 5963306 - DNA, 25 bp, Homo sapien
aaagttgaatttgtcgagccaccaa

SEQ ID NO: 5963307 - DNA, 25 bp, Homo sapien
cgggtggcgctgctgatgccgcagc

SEQ ID NO: 5963308 - DNA, 25 bp, Homo sapien
atttgtcgagccaccaaaggactct

SEQ ID NO: 5963309 - DNA, 25 bp, Homo sapien
gtcgagcactgacaagttagaaata

SEQ ID NO: 5963310 - DNA, 25 bp, Homo sapien
atgttgttgttgtatgcaacttgaa

SEQ ID NO: 5963311 - DNA, 25 bp, Homo sapien
gtcgccttaccattgattaaggatt

SEQ ID NO: 5963312 - DNA, 25 bp, Homo sapien
tgagaggtattaaatccactgctat

SEQ ID NO: 5963313 - DNA, 25 bp, Homo sapien
ctttggacgctatgcaagaacgtta

SEQ ID NO: 5963314 - DNA, 25 bp, Homo sapien
cgccaacgccaaacaacaacaagag

SEQ ID NO: 5963315 - DNA, 25 bp, Homo sapien
cagacgaagatgttagtaagaaggc

SEQ ID NO: 5963316 - DNA, 25 bp, Homo sapien
ataaatcacgatttggacttacctc

SEQ ID NO: 5963317 - DNA, 25 bp, Homo sapien
ccatcctgtaagaaagttgaccaac

SEQ ID NO: 5963318 - DNA, 25 bp, Homo sapien
acaacctcattttactacaaatgac

SEQ ID NO: 5963319 - DNA, 25 bp, Homo sapien
tggattgattacatgcaaaacttgt

SEQ ID NO: 5963320 - DNA, 25 bp, Homo sapien
ggtaagcctgatgaagaaaccctta

SEQ ID NO: 5963321 - DNA, 25 bp, Homo sapien
catacagacatattttgagatggat

SEQ ID NO: 5963322 - DNA, 25 bp, Homo sapien
gatcaattgaatttggtgttaagag

SEQ ID NO: 5963323 - DNA, 25 bp, Homo sapien
cgatttggacttacctcatgaagtt

SEQ ID NO: 5963324 - DNA, 25 bp, Homo sapien
attttactacaaatgacgggttgga

SEQ ID NO: 5963325 - DNA, 25 bp, Homo sapien
ggttttattcaaaaagccatcaagc

SEQ ID NO: 5963326 - DNA, 25 bp, Homo sapien
cgttatgttgttgttgtatgcaact

SEQ ID NO: 5963327 - DNA, 25 bp, Homo sapien
gtatccagtttctttcactaaagaa

SEQ ID NO: 5963328 - DNA, 25 bp, Homo sapien
acaacaacaagagcaacaaaataag

SEQ ID NO: 5963329 - DNA, 25 bp, Homo sapien
agccaaagccatccgcaatagattt

SEQ ID NO: 5963330 - DNA, 25 bp, Homo sapien
tgctcaagctgcccaatgggaatcg

SEQ ID NO: 5963331 - DNA, 25 bp, Homo sapien
gtttgttctggtttggtcaagcatt

SEQ ID NO: 5963332 - DNA, 25 bp, Homo sapien
accacacttagatcaattgaatttg

SEQ ID NO: 5963333 - DNA, 25 bp, Homo sapien
agatctgggaacacttacaacctca

SEQ ID NO: 5963334 - DNA, 25 bp, Homo sapien
gattacatgcaaaacttgttggaag

SEQ ID NO: 5963335 - DNA, 25 bp, Homo sapien
atgtctctacaattgatgtcggtga

SEQ ID NO: 5963336 - DNA, 25 bp, Homo sapien
tctggtcaaatccaaccacacttag

SEQ ID NO: 5963337 - DNA, 25 bp, Homo sapien
cgaagtcgccttaccattgattaag

SEQ ID NO: 5963338 - DNA, 25 bp, Homo sapien
aggaccatcctgtaagaaagttgac

SEQ ID NO: 5963339 - DNA, 25 bp, Homo sapien
gattgattacatgcaaaacttgttg

SEQ ID NO: 5963340 - DNA, 25 bp, Homo sapien
gtattaaatccactgctatggtatt

SEQ ID NO: 5963341 - DNA, 25 bp, Homo sapien
cctgcgggtggcgctgctgatgccg

SEQ ID NO: 5963342 - DNA, 25 bp, Homo sapien
ccaagaggtaagcctgatgaagaaa

SEQ ID NO: 5963343 - DNA, 25 bp, Homo sapien
ccgatctcgttaccaagttcgaatc

SEQ ID NO: 5963344 - DNA, 25 bp, Homo sapien
aaaaaagaagatctgggaacactta

SEQ ID NO: 5963345 - DNA, 25 bp, Homo sapien
ctgggaacacttacaacctcatttt

SEQ ID NO: 5963346 - DNA, 25 bp, Homo sapien
tgcaagaacgttatgttgttgttgt

SEQ ID NO: 5963347 - DNA, 25 bp, Homo sapien
ctatatgtctctacaattgatgtcg

SEQ ID NO: 5963348 - DNA, 25 bp, Homo sapien
gcaatagatttccgtgttggtttta

SEQ ID NO: 5963349 - DNA, 25 bp, Homo sapien
ggtgttaagagacaacaccttcatt

SEQ ID NO: 5963350 - DNA, 25 bp, Homo sapien
ggttctaaaatctggtcaaatccaa

SEQ ID NO: 5963351 - DNA, 25 bp, Homo sapien
gtcaaatccaaccacacttagatca

SEQ ID NO: 5963352 - DNA, 25 bp, Homo sapien
ttgatgtcggtgatgaagaaggccc

SEQ ID NO: 5963353 - DNA, 25 bp, Homo sapien
gtgtcgagcactgacaagttagaaa

SEQ ID NO: 5963354 - DNA, 25 bp, Homo sapien
tcggtgatgaagaaggcccaagaac

SEQ ID NO: 5963355 - DNA, 25 bp, Homo sapien
cgggttggaagttatcttcaaagac

SEQ ID NO: 5963356 - DNA, 25 bp, Homo sapien
gccggtgacaaggtgttctttgaag

SEQ ID NO: 5963357 - DNA, 25 bp, Homo sapien
gccccagaaaagccaaagccatccg

SEQ ID NO: 5963358 - DNA, 25 bp, Homo sapien
cattgattaaggatttagtggcaag

SEQ ID NO: 5963359 - DNA, 25 bp, Homo sapien
caaccacacttagatcaattgaatt

SEQ ID NO: 5963360 - DNA, 25 bp, Homo sapien
acttgaaaccagttaacatgagagg

SEQ ID NO: 5963361 - DNA, 25 bp, Homo sapien
atccagtttctttcactaaagaaca

SEQ ID NO: 5963362 - DNA, 25 bp, Homo sapien
tattgctaatgctcaagtccgttaa

SEQ ID NO: 5963363 - DNA, 25 bp, Homo sapien
aaaagcaagatcatccaagaggtaa

SEQ ID NO: 5963364 - DNA, 25 bp, Homo sapien
aaataaatcacgatttggacttacc

SEQ ID NO: 5963365 - DNA, 25 bp, Homo sapien
actaaagaacaatctgctcaagctg

SEQ ID NO: 5963366 - DNA, 25 bp, Homo sapien
ttatgttgttgttgtatgcaacttg

SEQ ID NO: 5963367 - DNA, 25 bp, Homo sapien
attcaaaaagccatcaagcacccag

SEQ ID NO: 5963368 - DNA, 25 bp, Homo sapien
ccctatatgtctctacaattgatgt

SEQ ID NO: 5963369 - DNA, 25 bp, Homo sapien
ctgctatggtattgtgtggttctaa

SEQ ID NO: 5963370 - DNA, 25 bp, Homo sapien
ggaatcggttctaaaatctggtcaa

SEQ ID NO: 5963371 - DNA, 25 bp, Homo sapien
tgtcaagtcaacttataccacatac

SEQ ID NO: 5963372 - DNA, 25 bp, Homo sapien
gaatccaaaaaagaagatctgggaa

SEQ ID NO: 5963373 - DNA, 25 bp, Homo sapien
taccaagttcgaatcgcttattatt

SEQ ID NO: 5963374 - DNA, 25 bp, Homo sapien
tattgagaagaagaaaaaggcacct

SEQ ID NO: 5963375 - DNA, 25 bp, Homo sapien
ccaagaaggcagctaagaaggccgc

SEQ ID NO: 5963376 - DNA, 25 bp, Homo sapien
taagcctgatgaagaaacccttaag

SEQ ID NO: 5963377 - DNA, 25 bp, Homo sapien
cgaagaagaaaaggaccatcctgta

SEQ ID NO: 5963378 - DNA, 25 bp, Homo sapien
gaagatctgggaacacttacaacct

SEQ ID NO: 5963379 - DNA, 25 bp, Homo sapien
caaggttgctagtattgctaatgct

SEQ ID NO: 5963380 - DNA, 25 bp, Homo sapien
ggtggcgctgctgatgccgcagcca

SEQ ID NO: 5963381 - DNA, 25 bp, Homo sapien
aatcggttctaaaatctggtcaaat

SEQ ID NO: 5963382 - DNA, 25 bp, Homo sapien
gacgggttggaagttatcttcaaag

SEQ ID NO: 5963383 - DNA, 25 bp, Homo sapien
caaatccaaccacacttagatcaat

SEQ ID NO: 5963384 - DNA, 25 bp, Homo sapien
taccgacgttcacgtcttcgaagtc

SEQ ID NO: 5963385 - DNA, 25 bp, Homo sapien
tcattttactacaaatgacgggttg

SEQ ID NO: 5963386 - DNA, 25 bp, Homo sapien
agaagaaaaaggcacctgcgggtgg

SEQ ID NO: 5963387 - DNA, 25 bp, Homo sapien
gaatcattcaaggttgctagtattg

SEQ ID NO: 5963388 - DNA, 25 bp, Homo sapien
gtcgagccaccaaaggactctaagg

SEQ ID NO: 5963389 - DNA, 25 bp, Homo sapien
agaaagttgaccaacgctaagggcg

SEQ ID NO: 5963390 - DNA, 25 bp, Homo sapien
cctgatgaagaaacccttaagaaat

SEQ ID NO: 5963391 - DNA, 25 bp, Homo sapien
tcattgtgtccactttgtacccaac

SEQ ID NO: 5963392 - DNA, 25 bp, Homo sapien
agaaaaggaccatcctgtaagaaag

SEQ ID NO: 5963393 - DNA, 25 bp, Homo sapien
agttgaatttgtcgagccaccaaag

SEQ ID NO: 5963394 - DNA, 25 bp, Homo sapien
caacaagagcaacaaaataaggccc

SEQ ID NO: 5963395 - DNA, 25 bp, Homo sapien
gaagaaaaggaccatcctgtaagaa

SEQ ID NO: 5963396 - DNA, 25 bp, Homo sapien
aagaaggccgccaacgccaaacaac

SEQ ID NO: 5963397 - DNA, 25 bp, Homo sapien
gcagccaaggcagacgaagatgtta

SEQ ID NO: 5963398 - DNA, 25 bp, Homo sapien
aagaagaaaaggaccatcctgtaag

SEQ ID NO: 5963399 - DNA, 25 bp, Homo sapien
tgatgaagaaacccttaagaaattg

SEQ ID NO: 5963400 - DNA, 25 bp, Homo sapien
tgttggttttattcaaaaagccatc

SEQ ID NO: 5963401 - DNA, 25 bp, Homo sapien
gccgccaacgccaaacaacaacaag

SEQ ID NO: 5963402 - DNA, 25 bp, Homo sapien
taaaaagcaagatcatccaagaggt

SEQ ID NO: 5963403 - DNA, 25 bp, Homo sapien
gaggcaaaggccaagaaggcagcta

SEQ ID NO: 5963404 - DNA, 25 bp, Homo sapien
gcaacaaaataaggccccagaaaag

SEQ ID NO: 5963405 - DNA, 25 bp, Homo sapien
atgcaaaacttgttggaagtgtcga

SEQ ID NO: 5963406 - DNA, 25 bp, Homo sapien
gttagtaagaaggctaaaaagcaag

SEQ ID NO: 5963407 - DNA, 25 bp, Homo sapien
ctccctatatgtctctacaattgat

SEQ ID NO: 5963408 - DNA, 25 bp, Homo sapien
tgtaagaaagttgaccaacgctaag

SEQ ID NO: 5963409 - DNA, 25 bp, Homo sapien
tattatttcaaagtatccagtttct

SEQ ID NO: 5963410 - DNA, 25 bp, Homo sapien
agccaaggcagacgaagatgttagt

SEQ ID NO: 5963411 - DNA, 25 bp, Homo sapien
tgcaacttgaaaccagttaacatga

SEQ ID NO: 5963412 - DNA, 25 bp, Homo sapien
gatctcgttaccaagttcgaatcgc

SEQ ID NO: 5963413 - DNA, 25 bp, Homo sapien
aaacccttaagaaattgagagagga

SEQ ID NO: 5963414 - DNA, 25 bp, Homo sapien
cactgacaagttagaaataaatcac

SEQ ID NO: 5963415 - DNA, 25 bp, Homo sapien
cttattatttcaaagtatccagttt

SEQ ID NO: 5963416 - DNA, 25 bp, Homo sapien
gagacaacaccttcattgtgtccac

SEQ ID NO: 5963417 - DNA, 25 bp, Homo sapien
aggaggcaaaggccaagaaggcagc

SEQ ID NO: 5963418 - DNA, 25 bp, Homo sapien
ttggtgttaagagacaacaccttca

SEQ ID NO: 5963419 - DNA, 25 bp, Homo sapien
aagaaggctaaaaagcaagatcatc

SEQ ID NO: 5963420 - DNA, 25 bp, Homo sapien
ggcagacgaagatgttagtaagaag

SEQ ID NO: 5963421 - DNA, 25 bp, Homo sapien
gaacaatctgctcaagctgcccaat

SEQ ID NO: 5963422 - DNA, 25 bp, Homo sapien
ttcgaagtcgccttaccattgatta

SEQ ID NO: 5963423 - DNA, 25 bp, Homo sapien
atttggtgttaagagacaacacctt

SEQ ID NO: 5963424 - DNA, 25 bp, Homo sapien
cgccttaccattgattaaggattta

SEQ ID NO: 5963425 - DNA, 25 bp, Homo sapien
ccatcaagcacccagatgccgactc

SEQ ID NO: 5963426 - DNA, 25 bp, Homo sapien
attgagagaggaggcaaaggccaag

SEQ ID NO: 5963427 - DNA, 25 bp, Homo sapien
acgacgacaaagttgaatttgtcga

SEQ ID NO: 5963428 - DNA, 25 bp, Homo sapien
ccgactccctatatgtctctacaat

SEQ ID NO: 5963429 - DNA, 25 bp, Homo sapien
ccgacgttcacgtcttcgaagtcgc

SEQ ID NO: 5963430 - DNA, 25 bp, Homo sapien
gttattgagaagaagaaaaaggcac

SEQ ID NO: 5963431 - DNA, 25 bp, Homo sapien
aagaaggcagctaagaaggccgcca

SEQ ID NO: 5963432 - DNA, 25 bp, Homo sapien
ccaacatctaccgacgttcacgtct

SEQ ID NO: 5963433 - DNA, 25 bp, Homo sapien
taaggccggtgacaaggtgttcttt

SEQ ID NO: 5963434 - DNA, 25 bp, Homo sapien
acaagagcaacaaaataaggcccca

SEQ ID NO: 5963435 - DNA, 25 bp, Homo sapien
gttgttgttgtatgcaacttgaaac

SEQ ID NO: 5963436 - DNA, 25 bp, Homo sapien
tgttaagagacaacaccttcattgt

SEQ ID NO: 5963437 - DNA, 25 bp, Homo sapien
catgaagttattgagaagaagaaaa

SEQ ID NO: 5963438 - DNA, 25 bp, Homo sapien
tgtggttctaacgacgacaaagttg

SEQ ID NO: 5963439 - DNA, 25 bp, Homo sapien
atgaagaaggcccaagaactgtttg

SEQ ID NO: 5963440 - DNA, 25 bp, Homo sapien
ttgtacccaacatctaccgacgttc

SEQ ID NO: 5963441 - DNA, 25 bp, Homo sapien
gatggattgattacatgcaaaactt

SEQ ID NO: 5963442 - DNA, 25 bp, Homo sapien
gacgaagaagaaaaggaccatcctg

SEQ ID NO: 5963443 - DNA, 25 bp, Homo sapien
ggtcaagcattttcctttggacgct

SEQ ID NO: 5963444 - DNA, 25 bp, Homo sapien
ccttaagaaattgagagaggaggca

SEQ ID NO: 5963445 - DNA, 25 bp, Homo sapien
aacaacaagagcaacaaaataaggc

SEQ ID NO: 5963446 - DNA, 25 bp, Homo sapien
cgttcacgtcttcgaagtcgcctta

SEQ ID NO: 5963447 - DNA, 25 bp, Homo sapien
caaggatgtcaagtcaacttatacc

SEQ ID NO: 5963448 - DNA, 25 bp, Homo sapien
ttcaaagacgaagaagaaaaggacc

SEQ ID NO: 5963449 - DNA, 25 bp, Homo sapien
gattaaggatttagtggcaagctcc

SEQ ID NO: 5963450 - DNA, 25 bp, Homo sapien
tcactaaagaacaatctgctcaagc

SEQ ID NO: 5963451 - DNA, 25 bp, Homo sapien
tcggtgacgaagctccaatgaagca

SEQ ID NO: 5963452 - DNA, 25 bp, Homo sapien
ttgaatttgtcgagccaccaaagga

SEQ ID NO: 5963453 - DNA, 25 bp, Homo sapien
ttataccacatacagacatattttg

SEQ ID NO: 5963454 - DNA, 25 bp, Homo sapien
tctaccgacgttcacgtcttcgaag

SEQ ID NO: 5963455 - DNA, 25 bp, Homo sapien
atccaagaggtaagcctgatgaaga

SEQ ID NO: 5963456 - DNA, 25 bp, Homo sapien
gagatggattgattacatgcaaaac

SEQ ID NO: 5963457 - DNA, 25 bp, Homo sapien
gtattgtgtggttctaacgacgaca

SEQ ID NO: 5963458 - DNA, 25 bp, Homo sapien
ccaacgccaaacaacaacaagagca

SEQ ID NO: 5963459 - DNA, 25 bp, Homo sapien
caagaacgttatgttgttgttgtat

SEQ ID NO: 5963460 - DNA, 25 bp, Homo sapien
ttcaaggttgctagtattgctaatg

SEQ ID NO: 5963461 - DNA, 25 bp, Homo sapien
aaccagttaacatgagaggtattaa

SEQ ID NO: 5963462 - DNA, 25 bp, Homo sapien
acaaagttgaatttgtcgagccacc

SEQ ID NO: 5963463 - DNA, 25 bp, Homo sapien
tggcaagctccaaggatgtcaagtc

SEQ ID NO: 5963464 - DNA, 25 bp, Homo sapien
aagctccaaggatgtcaagtcaact

SEQ ID NO: 5963465 - DNA, 25 bp, Homo sapien
tccaaccacacttagatcaattgaa

SEQ ID NO: 5963466 - DNA, 25 bp, Homo sapien
tggttctaacgacgacaaagttgaa

SEQ ID NO: 5963467 - DNA, 25 bp, Homo sapien
tctcgttaccaagttcgaatcgctt

SEQ ID NO: 5963468 - DNA, 25 bp, Homo sapien
aagatcatccaagaggtaagcctga

SEQ ID NO: 5963469 - DNA, 25 bp, Homo sapien
gtgacaaggtgttctttgaaggttt

SEQ ID NO: 5963470 - DNA, 25 bp, Homo sapien
cttcattgtgtccactttgtaccca

SEQ ID NO: 5963471 - DNA, 25 bp, Homo sapien
agttagaaataaatcacgatttgga

SEQ ID NO: 5963472 - DNA, 25 bp, Homo sapien
atcacgatttggacttacctcatga

SEQ ID NO: 5963473 - DNA, 25 bp, Homo sapien
gacgaagatgttagtaagaaggcta

SEQ ID NO: 5963474 - DNA, 25 bp, Homo sapien
ttttgagatggattgattacatgca

SEQ ID NO: 5963475 - DNA, 25 bp, Homo sapien
aggtgttctttgaaggtttcggtga

SEQ ID NO: 5963476 - DNA, 25 bp, Homo sapien
gctatggtattgtgtggttctaacg

SEQ ID NO: 5963477 - DNA, 25 bp, Homo sapien
atttagtggcaagctccaaggatgt

SEQ ID NO: 5963478 - DNA, 25 bp, Homo sapien
cacgtcttcgaagtcgccttaccat

SEQ ID NO: 5963479 - DNA, 25 bp, Homo sapien
aggctaaaaagcaagatcatccaag

SEQ ID NO: 5963480 - DNA, 25 bp, Homo sapien
aaggatttagtggcaagctccaagg

SEQ ID NO: 5963481 - DNA, 25 bp, Homo sapien
ggatttagtggcaagctccaaggat

SEQ ID NO: 5963482 - DNA, 25 bp, Homo sapien
agaggtattaaatccactgctatgg

SEQ ID NO: 5963483 - DNA, 25 bp, Homo sapien
ctaagaaggccgccaacgccaaaca

SEQ ID NO: 5963484 - DNA, 25 bp, Homo sapien
aggttgctagtattgctaatgctca

SEQ ID NO: 5963485 - DNA, 25 bp, Homo sapien
gtccgatctcgttaccaagttcgaa

SEQ ID NO: 5963486 - DNA, 25 bp, Homo sapien
aagtcaacttataccacatacagac

SEQ ID NO: 5963487 - DNA, 25 bp, Homo sapien
cagacatattttgagatggattgat

SEQ ID NO: 5963488 - DNA, 25 bp, Homo sapien
acacttacaacctcattttactaca

SEQ ID NO: 5963489 - DNA, 25 bp, Homo sapien
ttgaatttggtgttaagagacaaca

SEQ ID NO: 5963490 - DNA, 25 bp, Homo sapien
ccagttaacatgagaggtattaaat

SEQ ID NO: 5963491 - DNA, 25 bp, Homo sapien
attttcctttggacgctatgcaaga

SEQ ID NO: 5963492 - DNA, 25 bp, Homo sapien
cactttgtacccaacatctaccgac

SEQ ID NO: 5963493 - DNA, 25 bp, Homo sapien
aggatgtcaagtcaacttataccac

SEQ ID NO: 5963494 - DNA, 25 bp, Homo sapien
tatgcaagaacgttatgttgttgtt

SEQ ID NO: 5963495 - DNA, 25 bp, Homo sapien
gaatcgcttattatttcaaagtatc

SEQ ID NO: 5963496 - DNA, 25 bp, Homo sapien
ttgttgtatgcaacttgaaaccagt

SEQ ID NO: 5963497 - DNA, 25 bp, Homo sapien
aagagcaacaaaataaggccccaga

SEQ ID NO: 5963498 - DNA, 25 bp, Homo sapien
tgccgcagccaaggcagacgaagat

SEQ ID NO: 5963499 - DNA, 25 bp, Homo sapien
tgtccactttgtacccaacatctac

SEQ ID NO: 5963500 - DNA, 25 bp, Homo sapien
ggcacctgcgggtggcgctgctgat

SEQ ID NO: 5963501 - DNA, 25 bp, Homo sapien
ttggtcaagcattttcctttggacg

SEQ ID NO: 5963502 - DNA, 25 bp, Homo sapien
agctccaatgaagcaattgaatcca

SEQ ID NO: 5963503 - DNA, 25 bp, Homo sapien
cacttagatcaattgaatttggtgt

SEQ ID NO: 5963504 - DNA, 25 bp, Homo sapien
agtggcaagctccaaggatgtcaag

SEQ ID NO: 5963505 - DNA, 25 bp, Homo sapien
gaaggccgccaacgccaaacaacaa

SEQ ID NO: 5963506 - DNA, 25 bp, Homo sapien
gatgtcggtgatgaagaaggcccaa

SEQ ID NO: 5963507 - DNA, 25 bp, Homo sapien
aaggccaagaaggcagctaagaagg

SEQ ID NO: 5963508 - DNA, 25 bp, Homo sapien
aggccgccaacgccaaacaacaaca

SEQ ID NO: 5963509 - DNA, 25 bp, Homo sapien
aaattgagagaggaggcaaaggcca

SEQ ID NO: 5963510 - DNA, 25 bp, Homo sapien
agcctgatgaagaaacccttaagaa

SEQ ID NO: 5963511 - DNA, 25 bp, Homo sapien
aagggcgaatcattcaaggttgcta

SEQ ID NO: 5963512 - DNA, 25 bp, Homo sapien
caaagtatccagtttctttcactaa

SEQ ID NO: 5963513 - DNA, 25 bp, Homo sapien
agaaattgagagaggaggcaaaggc

SEQ ID NO: 5963514 - DNA, 25 bp, Homo sapien
tctttgaaggtttcggtgacgaagc

SEQ ID NO: 5963515 - DNA, 25 bp, Homo sapien
tcctttggacgctatgcaagaacgt

SEQ ID NO: 5963516 - DNA, 25 bp, Homo sapien
caagcacccagatgccgactcccta

SEQ ID NO: 5963517 - DNA, 25 bp, Homo sapien
atagatttccgtgttggttttattc

SEQ ID NO: 5963518 - DNA, 25 bp, Homo sapien
gacgttcacgtcttcgaagtcgcct

SEQ ID NO: 5963519 - DNA, 25 bp, Homo sapien
tggcgctgctgatgccgcagccaag

SEQ ID NO: 5963520 - DNA, 25 bp, Homo sapien
ctaaaatctggtcaaatccaaccac

SEQ ID NO: 5963521 - DNA, 25 bp, Homo sapien
ctagtattgctaatgctcaagtccg

SEQ ID NO: 5963522 - DNA, 25 bp, Homo sapien
aaggtttcggtgacgaagctccaat

SEQ ID NO: 5963523 - DNA, 25 bp, Homo sapien
aagtcgccttaccattgattaagga

SEQ ID NO: 5963524 - DNA, 25 bp, Homo sapien
ggacgctatgcaagaacgttatgtt

SEQ ID NO: 5963525 - DNA, 25 bp, Homo sapien
aaggcagacgaagatgttagtaaga

SEQ ID NO: 5963526 - DNA, 25 bp, Homo sapien
gaaaagccaaagccatccgcaatag

SEQ ID NO: 5963527 - DNA, 25 bp, Homo sapien
gcccaatgggaatcggttctaaaat

SEQ ID NO: 5963528 - DNA, 25 bp, Homo sapien
tctaacgacgacaaagttgaatttg

SEQ ID NO: 5963529 - DNA, 25 bp, Homo sapien
agaaataaatcacgatttggactta

SEQ ID NO: 5963530 - DNA, 25 bp, Homo sapien
cacctgcgggtggcgctgctgatgc

SEQ ID NO: 5963531 - DNA, 25 bp, Homo sapien
ccaagttcgaatcgcttattatttc

SEQ ID NO: 5963532 - DNA, 25 bp, Homo sapien
aaagccaaagccatccgcaatagat

SEQ ID NO: 5963533 - DNA, 25 bp, Homo sapien
accacatacagacatattttgagat

SEQ ID NO: 5963534 - DNA, 25 bp, Homo sapien
cggtgacaaggtgttctttgaaggt

SEQ ID NO: 5963535 - DNA, 25 bp, Homo sapien
aagaacaatctgctcaagctgccca

SEQ ID NO: 5963536 - DNA, 25 bp, Homo sapien
caagttagaaataaatcacgatttg

SEQ ID NO: 5963537 - DNA, 25 bp, Homo sapien
taacgacgacaaagttgaatttgtc

SEQ ID NO: 5963538 - DNA, 25 bp, Homo sapien
gaaggcagctaagaaggccgccaac

SEQ ID NO: 5963539 - DNA, 25 bp, Homo sapien
acatgcaaaacttgttggaagtgtc

SEQ ID NO: 5963540 - DNA, 25 bp, Homo sapien
gaagaaggcccaagaactgtttgtt

SEQ ID NO: 5963541 - DNA, 25 bp, Homo sapien
tttgaaggtttcggtgacgaagctc

SEQ ID NO: 5963542 - DNA, 25 bp, Homo sapien
taagaaagttgaccaacgctaaggg

SEQ ID NO: 5963543 - DNA, 25 bp, Homo sapien
aaagccatcaagcacccagatgccg

SEQ ID NO: 5963544 - DNA, 25 bp, Homo sapien
ttaagagacaacaccttcattgtgt

SEQ ID NO: 5963545 - DNA, 25 bp, Homo sapien
cgacaaagttgaatttgtcgagcca

SEQ ID NO: 5963546 - DNA, 25 bp, Homo sapien
aagcaagatcatccaagaggtaagc

SEQ ID NO: 5963547 - DNA, 25 bp, Homo sapien
ggacttacctcatgaagttattgag

SEQ ID NO: 5963548 - DNA, 25 bp, Homo sapien
caaaggactctaaggccggtgacaa

SEQ ID NO: 5963549 - DNA, 25 bp, Homo sapien
ttggaagtgtcgagcactgacaagt

SEQ ID NO: 5963550 - DNA, 25 bp, Homo sapien
agaaggcccaagaactgtttgttct

SEQ ID NO: 5963551 - DNA, 25 bp, Homo sapien
gttatcttcaaagacgaagaagaaa

SEQ ID NO: 5963552 - DNA, 25 bp, Homo sapien
tgttggaagtgtcgagcactgacaa

SEQ ID NO: 5963553 - DNA, 25 bp, Homo sapien
ctaagggcgaatcattcaaggttgc

SEQ ID NO: 5963554 - DNA, 25 bp, Homo sapien
gatgccgcagccaaggcagacgaag

SEQ ID NO: 5963555 - DNA, 25 bp, Homo sapien
cttgttggaagtgtcgagcactgac

SEQ ID NO: 5963556 - DNA, 25 bp, Homo sapien
gttgtatgcaacttgaaaccagtta

SEQ ID NO: 5963557 - DNA, 25 bp, Homo sapien
gactccctatatgtctctacaattg

SEQ ID NO: 5963558 - DNA, 25 bp, Homo sapien
gtaagaaggctaaaaagcaagatca

SEQ ID NO: 5963559 - DNA, 25 bp, Homo sapien
gaggtaagcctgatgaagaaaccct

SEQ ID NO: 5963560 - DNA, 25 bp, Homo sapien
cgagccaccaaaggactctaaggcc

SEQ ID NO: 5963561 - DNA, 25 bp, Homo sapien
ttaagaaattgagagaggaggcaaa

SEQ ID NO: 5963562 - DNA, 25 bp, Homo sapien
acttacaacctcattttactacaaa

SEQ ID NO: 5963563 - DNA, 25 bp, Homo sapien
aagaagatctgggaacacttacaac

SEQ ID NO: 5963564 - DNA, 25 bp, Homo sapien
ttgaccaacgctaagggcgaatcat

SEQ ID NO: 5963565 - DNA, 25 bp, Homo sapien
gtgttctttgaaggtttcggtgacg

SEQ ID NO: 5963566 - DNA, 25 bp, Homo sapien
aacatgagaggtattaaatccactg

SEQ ID NO: 5963567 - DNA, 25 bp, Homo sapien
caaaggccaagaaggcagctaagaa

SEQ ID NO: 5963568 - DNA, 25 bp, Homo sapien
gaagaaacccttaagaaattgagag

SEQ ID NO: 5963569 - DNA, 25 bp, Homo sapien
aaagttgaccaacgctaagggcgaa

SEQ ID NO: 5963570 - DNA, 25 bp, Homo sapien
taaagaacaatctgctcaagctgcc

SEQ ID NO: 5963571 - DNA, 25 bp, Homo sapien
ttgttctggtttggtcaagcatttt

SEQ ID NO: 5963572 - DNA, 25 bp, Homo sapien
ttacaacctcattttactacaaatg

SEQ ID NO: 5963573 - DNA, 25 bp, Homo sapien
ttggttttattcaaaaagccatcaa

SEQ ID NO: 5963574 - DNA, 25 bp, Homo sapien
acctcatgaagttattgagaagaag

SEQ ID NO: 5963575 - DNA, 25 bp, Homo sapien
tactacaaatgacgggttggaagtt

SEQ ID NO: 5963576 - DNA, 25 bp, Homo sapien
ctgcccaatgggaatcggttctaaa

SEQ ID NO: 5963577 - DNA, 25 bp, Homo sapien
aggccggtgacaaggtgttctttga

SEQ ID NO: 5963578 - DNA, 25 bp, Homo sapien
ttagtggcaagctccaaggatgtca

SEQ ID NO: 5963579 - DNA, 25 bp, Homo sapien
ctctacaattgatgtcggtgatgaa

SEQ ID NO: 5963580 - DNA, 25 bp, Homo sapien
tacagacatattttgagatggattg

SEQ ID NO: 5963581 - DNA, 25 bp, Homo sapien
agttaacatgagaggtattaaatcc

SEQ ID NO: 5963582 - DNA, 25 bp, Homo sapien
ggaagttatcttcaaagacgaagaa

SEQ ID NO: 5963583 - DNA, 25 bp, Homo sapien
cgctaagggcgaatcattcaaggtt

SEQ ID NO: 5963584 - DNA, 25 bp, Homo sapien
acaattgatgtcggtgatgaagaag

SEQ ID NO: 5963585 - DNA, 25 bp, Homo sapien
ttacctcatgaagttattgagaaga

SEQ ID NO: 5963586 - DNA, 25 bp, Homo sapien
agttgaccaacgctaagggcgaatc

SEQ ID NO: 5963587 - DNA, 25 bp, Homo sapien
ctccaatgaagcaattgaatccaaa

SEQ ID NO: 5963588 - DNA, 25 bp, Homo sapien
gcgaatcattcaaggttgctagtat

SEQ ID NO: 5963589 - DNA, 25 bp, Homo sapien
ccagtttctttcactaaagaacaat

SEQ ID NO: 5963590 - DNA, 25 bp, Homo sapien
tatggtattgtgtggttctaacgac

SEQ ID NO: 5963591 - DNA, 25 bp, Homo sapien
ccgcaatagatttccgtgttggttt

SEQ ID NO: 5963592 - DNA, 25 bp, Homo sapien
cgtgttggttttattcaaaaagcca

SEQ ID NO: 5963593 - DNA, 25 bp, Homo sapien
aattgaatttggtgttaagagacaa

SEQ ID NO: 5963594 - DNA, 25 bp, Homo sapien
ggttggaagttatcttcaaagacga

SEQ ID NO: 5963595 - DNA, 25 bp, Homo sapien
gatcatccaagaggtaagcctgatg

SEQ ID NO: 5963596 - DNA, 25 bp, Homo sapien
tagatcaattgaatttggtgttaag

SEQ ID NO: 5963597 - DNA, 25 bp, Homo sapien
cacacttagatcaattgaatttggt

SEQ ID NO: 5963598 - DNA, 25 bp, Homo sapien
ctgacaagttagaaataaatcacga

SEQ ID NO: 5963599 - DNA, 25 bp, Homo sapien
ggtgatgaagaaggcccaagaactg

SEQ ID NO: 5963600 - DNA, 25 bp, Homo sapien
aaaggaccatcctgtaagaaagttg

SEQ ID NO: 5963601 - DNA, 25 bp, Homo sapien
ttaacatgagaggtattaaatccac

SEQ ID NO: 5963602 - DNA, 25 bp, Homo sapien
atgtccgatctcgttaccaagttcg

SEQ ID NO: 5963603 - DNA, 25 bp, Homo sapien
ccaaacaacaacaagagcaacaaaa

SEQ ID NO: 5963604 - DNA, 25 bp, Homo sapien
gaagaagaaaaaggcacctgcgggt

SEQ ID NO: 5963605 - DNA, 25 bp, Homo sapien
aaggcccaagaactgtttgttctgg

SEQ ID NO: 5963606 - DNA, 25 bp, Homo sapien
catattttgagatggattgattaca

SEQ ID NO: 5963607 - DNA, 25 bp, Homo sapien
ttacatgcaaaacttgttggaagtg

SEQ ID NO: 5963608 - DNA, 25 bp, Homo sapien
agcactgacaagttagaaataaatc

SEQ ID NO: 5963609 - DNA, 25 bp, Homo sapien
ttgagaagaagaaaaaggcacctgc

SEQ ID NO: 5963610 - DNA, 25 bp, Homo sapien
caagaactgtttgttctggtttggt

SEQ ID NO: 5963611 - DNA, 25 bp, Homo sapien
agtttctttcactaaagaacaatct

SEQ ID NO: 5963612 - DNA, 25 bp, Homo sapien
aagtatccagtttctttcactaaag

SEQ ID NO: 5963613 - DNA, 25 bp, Homo sapien
cattcaaggttgctagtattgctaa

SEQ ID NO: 5963614 - DNA, 25 bp, Homo sapien
tcaattgaatttggtgttaagagac

SEQ ID NO: 5963615 - DNA, 25 bp, Homo sapien
gacaacaccttcattgtgtccactt

SEQ ID NO: 5963616 - DNA, 25 bp, Homo sapien
gggcgaatcattcaaggttgctagt

SEQ ID NO: 5963617 - DNA, 25 bp, Homo sapien
gaagctccaatgaagcaattgaatc

SEQ ID NO: 5963618 - DNA, 25 bp, Homo sapien
ttaaggatttagtggcaagctccaa

SEQ ID NO: 5963619 - DNA, 25 bp, Homo sapien
atttggacttacctcatgaagttat

SEQ ID NO: 5963620 - DNA, 25 bp, Homo sapien
agagaggaggcaaaggccaagaagg

SEQ ID NO: 5963621 - DNA, 25 bp, Homo sapien
ccttaccattgattaaggatttagt

SEQ ID NO: 5963622 - DNA, 25 bp, Homo sapien
cccaagaactgtttgttctggtttg

SEQ ID NO: 5963623 - DNA, 25 bp, Homo sapien
tgtgtggttctaacgacgacaaagt

SEQ ID NO: 5963624 - DNA, 25 bp, Homo sapien
ttggaagttatcttcaaagacgaag

SEQ ID NO: 5963625 - DNA, 25 bp, Homo sapien
gttctggtttggtcaagcattttcc

SEQ ID NO: 5963626 - DNA, 25 bp, Homo sapien
cacatacagacatattttgagatgg

SEQ ID NO: 5963627 - DNA, 25 bp, Homo sapien
tgccgactccctatatgtctctaca

SEQ ID NO: 5963628 - DNA, 25 bp, Homo sapien
agaaacccttaagaaattgagagag

SEQ ID NO: 5963629 - DNA, 25 bp, Homo sapien
ccatccgcaatagatttccgtgttg

SEQ ID NO: 5963630 - DNA, 25 bp, Homo sapien
gaatttggtgttaagagacaacacc

SEQ ID NO: 5963631 - DNA, 25 bp, Homo sapien
agcacccagatgccgactccctata

SEQ ID NO: 5963632 - DNA, 25 bp, Homo sapien
aacgttatgttgttgttgtatgcaa

SEQ ID NO: 5963633 - DNA, 25 bp, Homo sapien
tgacgaagctccaatgaagcaattg

SEQ ID NO: 5963634 - DNA, 25 bp, Homo sapien
tggtcaaatccaaccacacttagat

SEQ ID NO: 5963635 - DNA, 25 bp, Homo sapien
aacatctaccgacgttcacgtcttc

SEQ ID NO: 5963636 - DNA, 25 bp, Homo sapien
gatgttagtaagaaggctaaaaagc

SEQ ID NO: 5963637 - DNA, 25 bp, Homo sapien
taaatccactgctatggtattgtgt

SEQ ID NO: 5963638 - DNA, 25 bp, Homo sapien
aatctgctcaagctgcccaatggga

SEQ ID NO: 5963639 - DNA, 25 bp, Homo sapien
ggccaagaaggcagctaagaaggcc

SEQ ID NO: 5963640 - DNA, 25 bp, Homo sapien
tttcggtgacgaagctccaatgaag

SEQ ID NO: 5963641 - DNA, 25 bp, Homo sapien
agaacgttatgttgttgttgtatgc

SEQ ID NO: 5963642 - DNA, 25 bp, Homo sapien
ttgattaaggatttagtggcaagct

SEQ ID NO: 5963643 - DNA, 25 bp, Homo sapien
aaaaggcacctgcgggtggcgctgc

SEQ ID NO: 5963644 - DNA, 25 bp, Homo sapien
ttgagatggattgattacatgcaaa

SEQ ID NO: 5963645 - DNA, 25 bp, Homo sapien
acaatctgctcaagctgcccaatgg

SEQ ID NO: 5963646 - DNA, 25 bp, Homo sapien
tttcactaaagaacaatctgctcaa

SEQ ID NO: 5963647 - DNA, 25 bp, Homo sapien
aatccaaccacacttagatcaattg

SEQ ID NO: 5963648 - DNA, 25 bp, Homo sapien
ggtttcggtgacgaagctccaatga

SEQ ID NO: 5963649 - DNA, 25 bp, Homo sapien
tatgcaacttgaaaccagttaacat

SEQ ID NO: 5963650 - DNA, 25 bp, Homo sapien
ctacaaatgacgggttggaagttat

SEQ ID NO: 5963651 - DNA, 25 bp, Homo sapien
tcggttctaaaatctggtcaaatcc

SEQ ID NO: 5963652 - DNA, 25 bp, Homo sapien
gttcgaatcgcttattatttcaaag

SEQ ID NO: 5963653 - DNA, 25 bp, Homo sapien
ggcccaagaactgtttgttctggtt

SEQ ID NO: 5963654 - DNA, 25 bp, Homo sapien
ttggacttacctcatgaagttattg

SEQ ID NO: 5963655 - DNA, 25 bp, Homo sapien
aaagccatccgcaatagatttccgt

SEQ ID NO: 5963656 - DNA, 25 bp, Homo sapien
cacccagatgccgactccctatatg

SEQ ID NO: 5963657 - DNA, 25 bp, Homo sapien
aaggactctaaggccggtgacaagg

SEQ ID NO: 5963658 - DNA, 25 bp, Homo sapien
ccaccaaaggactctaaggccggtg

SEQ ID NO: 5963659 - DNA, 25 bp, Homo sapien
aggtattaaatccactgctatggta

SEQ ID NO: 5963660 - DNA, 25 bp, Homo sapien
gtacccaacatctaccgacgttcac

SEQ ID NO: 5963661 - DNA, 25 bp, Homo sapien
ttgattacatgcaaaacttgttgga

SEQ ID NO: 5963662 - DNA, 25 bp, Homo sapien
ttgaaaccagttaacatgagaggta

SEQ ID NO: 5963663 - DNA, 25 bp, Homo sapien
gaaggctaaaaagcaagatcatcca

SEQ ID NO: 5963664 - DNA, 25 bp, Homo sapien
gcaagctccaaggatgtcaagtcaa

SEQ ID NO: 5963665 - DNA, 25 bp, Homo sapien
gggaacacttacaacctcattttac

SEQ ID NO: 5963666 - DNA, 25 bp, Homo sapien
ccaatgggaatcggttctaaaatct

SEQ ID NO: 5963667 - DNA, 25 bp, Homo sapien
aaaacttgttggaagtgtcgagcac

SEQ ID NO: 5963668 - DNA, 25 bp, Homo sapien
cgccaaacaacaacaagagcaacaa

SEQ ID NO: 5963669 - DNA, 25 bp, Homo sapien
tgggaatcggttctaaaatctggtc

SEQ ID NO: 5963670 - DNA, 25 bp, Homo sapien
tgctagtattgctaatgctcaagtc

SEQ ID NO: 5963671 - DNA, 25 bp, Homo sapien
aaacaacaacaagagcaacaaaata

SEQ ID NO: 5963672 - DNA, 25 bp, Homo sapien
aaggcacctgcgggtggcgctgctg

SEQ ID NO: 5963673 - DNA, 25 bp, Homo sapien
tcaagtcaacttataccacatacag

SEQ ID NO: 5963674 - DNA, 25 bp, Homo sapien
acgctatgcaagaacgttatgttgt

SEQ ID NO: 5963675 - DNA, 25 bp, Homo sapien
gcgctgctgatgccgcagccaaggc

SEQ ID NO: 5963676 - DNA, 25 bp, Homo sapien
gttctaacgacgacaaagttgaatt

SEQ ID NO: 5963677 - DNA, 25 bp, Homo sapien
aagcattttcctttggacgctatgc

SEQ ID NO: 5963678 - DNA, 25 bp, Homo sapien
catcaccgacatcaattgtagagac

SEQ ID NO: 5963679 - DNA, 25 bp, Homo sapien
ccactaaatccttaatcaatggtaa

SEQ ID NO: 5963680 - DNA, 25 bp, Homo sapien
ttcttaagggtttcttcatcaggct

SEQ ID NO: 5963681 - DNA, 25 bp, Homo sapien
gccttattttgttgctcttgttgtt

SEQ ID NO: 5963682 - DNA, 25 bp, Homo sapien
gtgaacgtcggtagatgttgggtac

SEQ ID NO: 5963683 - DNA, 25 bp, Homo sapien
ttagtgaaagaaactggatactttg

SEQ ID NO: 5963684 - DNA, 25 bp, Homo sapien
agcgccacccgcaggtgcctttttc

SEQ ID NO: 5963685 - DNA, 25 bp, Homo sapien
gatgatcttgctttttagccttctt

SEQ ID NO: 5963686 - DNA, 25 bp, Homo sapien
ccttagagtcctttggtggctcgac

SEQ ID NO: 5963687 - DNA, 25 bp, Homo sapien
gaatgattcgcccttagcgttggtc

SEQ ID NO: 5963688 - DNA, 25 bp, Homo sapien
tcgacacttccaacaagttttgcat

SEQ ID NO: 5963689 - DNA, 25 bp, Homo sapien
ggaaaatgcttgaccaaaccagaac

SEQ ID NO: 5963690 - DNA, 25 bp, Homo sapien
aaaatgaggttgtaagtgttcccag

SEQ ID NO: 5963691 - DNA, 25 bp, Homo sapien
ctaagtgtggttggatttgaccaga

SEQ ID NO: 5963692 - DNA, 25 bp, Homo sapien
tttatttctaacttgtcagtgctcg

SEQ ID NO: 5963693 - DNA, 25 bp, Homo sapien
atttaatacctctcatgttaactgg

SEQ ID NO: 5963694 - DNA, 25 bp, Homo sapien
tcctttggtggctcgacaaattcaa

SEQ ID NO: 5963695 - DNA, 25 bp, Homo sapien
tcgtgatttatttctaacttgtcag

SEQ ID NO: 5963696 - DNA, 25 bp, Homo sapien
ggtggctcgacaaattcaactttgt

SEQ ID NO: 5963697 - DNA, 25 bp, Homo sapien
agaacaccttgtcaccggccttaga

SEQ ID NO: 5963698 - DNA, 25 bp, Homo sapien
gctcgacaaattcaactttgtcgtc

SEQ ID NO: 5963699 - DNA, 25 bp, Homo sapien
aagtggacacaatgaaggtgttgtc

SEQ ID NO: 5963700 - DNA, 25 bp, Homo sapien
ggtaaggcgacttcgaagacgtgaa

SEQ ID NO: 5963701 - DNA, 25 bp, Homo sapien
aacggacttgagcattagcaatact

SEQ ID NO: 5963702 - DNA, 25 bp, Homo sapien
aacttcatgaggtaagtccaaatcg

SEQ ID NO: 5963703 - DNA, 25 bp, Homo sapien
aaatatgtctgtatgtggtataagt

SEQ ID NO: 5963704 - DNA, 25 bp, Homo sapien
accgattcccattgggcagcttgag

SEQ ID NO: 5963705 - DNA, 25 bp, Homo sapien
tagagacatatagggagtcggcatc

SEQ ID NO: 5963706 - DNA, 25 bp, Homo sapien
ttttcttcttctcaataacttcatg

SEQ ID NO: 5963707 - DNA, 25 bp, Homo sapien
tggatgatcttgctttttagccttc

SEQ ID NO: 5963708 - DNA, 25 bp, Homo sapien
tttcttcttcgtctttgaagataac

SEQ ID NO: 5963709 - DNA, 25 bp, Homo sapien
tgccttcttggcctttgcctcctct

SEQ ID NO: 5963710 - DNA, 25 bp, Homo sapien
taataagcgattcgaacttggtaac

SEQ ID NO: 5963711 - DNA, 25 bp, Homo sapien
agtgttcccagatcttcttttttgg

SEQ ID NO: 5963712 - DNA, 25 bp, Homo sapien
tgttgttgtttggcgttggcggcct

SEQ ID NO: 5963713 - DNA, 25 bp, Homo sapien
cagcttgagcagattgttctttagt

SEQ ID NO: 5963714 - DNA, 25 bp, Homo sapien
cttagcgttggtcaactttcttaca

SEQ ID NO: 5963715 - DNA, 25 bp, Homo sapien
ttcaattgatctaagtgtggttgga

SEQ ID NO: 5963716 - DNA, 25 bp, Homo sapien
tggcgttggcggccttcttagctgc

SEQ ID NO: 5963717 - DNA, 25 bp, Homo sapien
aataataagcgattcgaacttggta

SEQ ID NO: 5963718 - DNA, 25 bp, Homo sapien
acgttcttgcatagcgtccaaagga

SEQ ID NO: 5963719 - DNA, 25 bp, Homo sapien
ccttggagcttgccactaaatcctt

SEQ ID NO: 5963720 - DNA, 25 bp, Homo sapien
ctttgaagataacttccaacccgtc

SEQ ID NO: 5963721 - DNA, 25 bp, Homo sapien
gaaataataagcgattcgaacttgg

SEQ ID NO: 5963722 - DNA, 25 bp, Homo sapien
gccttcttactaacatcttcgtctg

SEQ ID NO: 5963723 - DNA, 25 bp, Homo sapien
gttggcggccttcttagctgccttc

SEQ ID NO: 5963724 - DNA, 25 bp, Homo sapien
cgattcccattgggcagcttgagca

SEQ ID NO: 5963725 - DNA, 25 bp, Homo sapien
tggctttttgaataaaaccaacacg

SEQ ID NO: 5963726 - DNA, 25 bp, Homo sapien
ttctcaataacttcatgaggtaagt

SEQ ID NO: 5963727 - DNA, 25 bp, Homo sapien
aataccatagcagtggatttaatac

SEQ ID NO: 5963728 - DNA, 25 bp, Homo sapien
ttcttggcctttgcctcctctctca

SEQ ID NO: 5963729 - DNA, 25 bp, Homo sapien
actaacatcttcgtctgccttggct

SEQ ID NO: 5963730 - DNA, 25 bp, Homo sapien
tggctgcggcatcagcagcgccacc

SEQ ID NO: 5963731 - DNA, 25 bp, Homo sapien
tcttcttttttggattcaattgctt

SEQ ID NO: 5963732 - DNA, 25 bp, Homo sapien
taatcaatccatctcaaaatatgtc

SEQ ID NO: 5963733 - DNA, 25 bp, Homo sapien
gtgatttatttctaacttgtcagtg

SEQ ID NO: 5963734 - DNA, 25 bp, Homo sapien
tacaaagtggacacaatgaaggtgt

SEQ ID NO: 5963735 - DNA, 25 bp, Homo sapien
ttgcatagcgtccaaaggaaaatgc

SEQ ID NO: 5963736 - DNA, 25 bp, Homo sapien
gtgcctttttcttcttctcaataac

SEQ ID NO: 5963737 - DNA, 25 bp, Homo sapien
acaagttttgcatgtaatcaatcca

SEQ ID NO: 5963738 - DNA, 25 bp, Homo sapien
attggagcttcgtcaccgaaacctt

SEQ ID NO: 5963739 - DNA, 25 bp, Homo sapien
gcctttgcctcctctctcaatttct

SEQ ID NO: 5963740 - DNA, 25 bp, Homo sapien
cagttcttgggccttcttcatcacc

SEQ ID NO: 5963741 - DNA, 25 bp, Homo sapien
cttgagcattagcaatactagcaac

SEQ ID NO: 5963742 - DNA, 25 bp, Homo sapien
agataacttccaacccgtcatttgt

SEQ ID NO: 5963743 - DNA, 25 bp, Homo sapien
gccttcttcatcaccgacatcaatt

SEQ ID NO: 5963744 - DNA, 25 bp, Homo sapien
attgcggatggctttggcttttctg

SEQ ID NO: 5963745 - DNA, 25 bp, Homo sapien
taccatagcagtggatttaatacct

SEQ ID NO: 5963746 - DNA, 25 bp, Homo sapien
agattgttctttagtgaaagaaact

SEQ ID NO: 5963747 - DNA, 25 bp, Homo sapien
ttggagcttgccactaaatccttaa

SEQ ID NO: 5963748 - DNA, 25 bp, Homo sapien
aatccttaatcaatggtaaggcgac

SEQ ID NO: 5963749 - DNA, 25 bp, Homo sapien
tggagcttcgtcaccgaaaccttca

SEQ ID NO: 5963750 - DNA, 25 bp, Homo sapien
attgatctaagtgtggttggatttg

SEQ ID NO: 5963751 - DNA, 25 bp, Homo sapien
ctgccttggctgcggcatcagcagc

SEQ ID NO: 5963752 - DNA, 25 bp, Homo sapien
ttcgtcaccgaaaccttcaaagaac

SEQ ID NO: 5963753 - DNA, 25 bp, Homo sapien
tgttgtctcttaacaccaaattcaa

SEQ ID NO: 5963754 - DNA, 25 bp, Homo sapien
gatggctttggcttttctggggcct

SEQ ID NO: 5963755 - DNA, 25 bp, Homo sapien
ggagcttgccactaaatccttaatc

SEQ ID NO: 5963756 - DNA, 25 bp, Homo sapien
gctttttgaataaaaccaacacgga

SEQ ID NO: 5963757 - DNA, 25 bp, Homo sapien
cagtgctcgacacttccaacaagtt

SEQ ID NO: 5963758 - DNA, 25 bp, Homo sapien
tattttgttgctcttgttgttgttt

SEQ ID NO: 5963759 - DNA, 25 bp, Homo sapien
gcgacttcgaagacgtgaacgtcgg

SEQ ID NO: 5963760 - DNA, 25 bp, Homo sapien
ttcaactttgtcgtcgttagaacca

SEQ ID NO: 5963761 - DNA, 25 bp, Homo sapien
atgttaactggtttcaagttgcata

SEQ ID NO: 5963762 - DNA, 25 bp, Homo sapien
ggtccttttcttcttcgtctttgaa

SEQ ID NO: 5963763 - DNA, 25 bp, Homo sapien
gcaggtgcctttttcttcttctcaa

SEQ ID NO: 5963764 - DNA, 25 bp, Homo sapien
caacacggaaatctattgcggatgg

SEQ ID NO: 5963765 - DNA, 25 bp, Homo sapien
ccacccgcaggtgcctttttcttct

SEQ ID NO: 5963766 - DNA, 25 bp, Homo sapien
gcatcagcagcgccacccgcaggtg

SEQ ID NO: 5963767 - DNA, 25 bp, Homo sapien
gtggacacaatgaaggtgttgtctc

SEQ ID NO: 5963768 - DNA, 25 bp, Homo sapien
ccttcttggcctttgcctcctctct

SEQ ID NO: 5963769 - DNA, 25 bp, Homo sapien
tgtagagacatatagggagtcggca

SEQ ID NO: 5963770 - DNA, 25 bp, Homo sapien
gccttggctgcggcatcagcagcgc

SEQ ID NO: 5963771 - DNA, 25 bp, Homo sapien
ggccttagagtcctttggtggctcg

SEQ ID NO: 5963772 - DNA, 25 bp, Homo sapien
ggtataagttgacttgacatccttg

SEQ ID NO: 5963773 - DNA, 25 bp, Homo sapien
ggaaatctattgcggatggctttgg

SEQ ID NO: 5963774 - DNA, 25 bp, Homo sapien
gttttgcatgtaatcaatccatctc

SEQ ID NO: 5963775 - DNA, 25 bp, Homo sapien
tagcgttggtcaactttcttacagg

SEQ ID NO: 5963776 - DNA, 25 bp, Homo sapien
tgaccaaaccagaacaaacagttct

SEQ ID NO: 5963777 - DNA, 25 bp, Homo sapien
ctctcaatttcttaagggtttcttc

SEQ ID NO: 5963778 - DNA, 25 bp, Homo sapien
gtcggtagatgttgggtacaaagtg

SEQ ID NO: 5963779 - DNA, 25 bp, Homo sapien
cttcgtctttgaagataacttccaa

SEQ ID NO: 5963780 - DNA, 25 bp, Homo sapien
tggctcgacaaattcaactttgtcg

SEQ ID NO: 5963781 - DNA, 25 bp, Homo sapien
tgtttggcgttggcggccttcttag

SEQ ID NO: 5963782 - DNA, 25 bp, Homo sapien
cttcgtctgccttggctgcggcatc

SEQ ID NO: 5963783 - DNA, 25 bp, Homo sapien
gattcaattgcttcattggagcttc

SEQ ID NO: 5963784 - DNA, 25 bp, Homo sapien
agattttagaaccgattcccattgg

SEQ ID NO: 5963785 - DNA, 25 bp, Homo sapien
atactagcaaccttgaatgattcgc

SEQ ID NO: 5963786 - DNA, 25 bp, Homo sapien
agaaccacacaataccatagcagtg

SEQ ID NO: 5963787 - DNA, 25 bp, Homo sapien
atacaacaacaacataacgttcttg

SEQ ID NO: 5963788 - DNA, 25 bp, Homo sapien
aaaccttcaaagaacaccttgtcac

SEQ ID NO: 5963789 - DNA, 25 bp, Homo sapien
cttcatgaggtaagtccaaatcgtg

SEQ ID NO: 5963790 - DNA, 25 bp, Homo sapien
gtcaccggccttagagtcctttggt

SEQ ID NO: 5963791 - DNA, 25 bp, Homo sapien
atccttggagcttgccactaaatcc

SEQ ID NO: 5963792 - DNA, 25 bp, Homo sapien
ttgtcagtgctcgacacttccaaca

SEQ ID NO: 5963793 - DNA, 25 bp, Homo sapien
caaagtggacacaatgaaggtgttg

SEQ ID NO: 5963794 - DNA, 25 bp, Homo sapien
ccatagcagtggatttaatacctct

SEQ ID NO: 5963795 - DNA, 25 bp, Homo sapien
tgatcttgctttttagccttcttac

SEQ ID NO: 5963796 - DNA, 25 bp, Homo sapien
tcaccgaaaccttcaaagaacacct

SEQ ID NO: 5963797 - DNA, 25 bp, Homo sapien
tttctggggccttattttgttgctc

SEQ ID NO: 5963798 - DNA, 25 bp, Homo sapien
ttgatggctttttgaataaaaccaa

SEQ ID NO: 5963799 - DNA, 25 bp, Homo sapien
tggtcaactttcttacaggatggtc

SEQ ID NO: 5963800 - DNA, 25 bp, Homo sapien
aaagaaactggatactttgaaataa

SEQ ID NO: 5963801 - DNA, 25 bp, Homo sapien
gatactttgaaataataagcgattc

SEQ ID NO: 5963802 - DNA, 25 bp, Homo sapien
agggtttcttcatcaggcttacctc

SEQ ID NO: 5963803 - DNA, 25 bp, Homo sapien
gcgttggtcaactttcttacaggat

SEQ ID NO: 5963804 - DNA, 25 bp, Homo sapien
ccattgggcagcttgagcagattgt

SEQ ID NO: 5963805 - DNA, 25 bp, Homo sapien
agttgacttgacatccttggagctt

SEQ ID NO: 5963806 - DNA, 25 bp, Homo sapien
ttgaatgattcgcccttagcgttgg

SEQ ID NO: 5963807 - DNA, 25 bp, Homo sapien
acttgtcagtgctcgacacttccaa

SEQ ID NO: 5963808 - DNA, 25 bp, Homo sapien
tggcttttctggggccttattttgt

SEQ ID NO: 5963809 - DNA, 25 bp, Homo sapien
aatgaaggtgttgtctcttaacacc

SEQ ID NO: 5963810 - DNA, 25 bp, Homo sapien
tggggccttattttgttgctcttgt

SEQ ID NO: 5963811 - DNA, 25 bp, Homo sapien
gttgctcttgttgttgtttggcgtt

SEQ ID NO: 5963812 - DNA, 25 bp, Homo sapien
gtcagtgctcgacacttccaacaag

SEQ ID NO: 5963813 - DNA, 25 bp, Homo sapien
agttgcatacaacaacaacataacg

SEQ ID NO: 5963814 - DNA, 25 bp, Homo sapien
aacagttcttgggccttcttcatca

SEQ ID NO: 5963815 - DNA, 25 bp, Homo sapien
gtttcaagttgcatacaacaacaac

SEQ ID NO: 5963816 - DNA, 25 bp, Homo sapien
tcctctctcaatttcttaagggttt

SEQ ID NO: 5963817 - DNA, 25 bp, Homo sapien
taacatcttcgtctgccttggctgc

SEQ ID NO: 5963818 - DNA, 25 bp, Homo sapien
tttagccttcttactaacatcttcg

SEQ ID NO: 5963819 - DNA, 25 bp, Homo sapien
tctaacttgtcagtgctcgacactt

SEQ ID NO: 5963820 - DNA, 25 bp, Homo sapien
caacccgtcatttgtagtaaaatga

SEQ ID NO: 5963821 - DNA, 25 bp, Homo sapien
cttaacaccaaattcaattgatcta

SEQ ID NO: 5963822 - DNA, 25 bp, Homo sapien
agcttgccactaaatccttaatcaa

SEQ ID NO: 5963823 - DNA, 25 bp, Homo sapien
gcgttggcggccttcttagctgcct

SEQ ID NO: 5963824 - DNA, 25 bp, Homo sapien
tcgtctttgaagataacttccaacc

SEQ ID NO: 5963825 - DNA, 25 bp, Homo sapien
ttgaccagattttagaaccgattcc

SEQ ID NO: 5963826 - DNA, 25 bp, Homo sapien
aatacctctcatgttaactggtttc

SEQ ID NO: 5963827 - DNA, 25 bp, Homo sapien
gaataaaaccaacacggaaatctat

SEQ ID NO: 5963828 - DNA, 25 bp, Homo sapien
gagtcggcatctgggtgcttgatgg

SEQ ID NO: 5963829 - DNA, 25 bp, Homo sapien
cccagatcttcttttttggattcaa

SEQ ID NO: 5963830 - DNA, 25 bp, Homo sapien
gtggatttaatacctctcatgttaa

SEQ ID NO: 5963831 - DNA, 25 bp, Homo sapien
tggcggccttcttagctgccttctt

SEQ ID NO: 5963832 - DNA, 25 bp, Homo sapien
cataacgttcttgcatagcgtccaa

SEQ ID NO: 5963833 - DNA, 25 bp, Homo sapien
gttcttgcatagcgtccaaaggaaa

SEQ ID NO: 5963834 - DNA, 25 bp, Homo sapien
acccgcaggtgcctttttcttcttc

SEQ ID NO: 5963835 - DNA, 25 bp, Homo sapien
gacaaattcaactttgtcgtcgtta

SEQ ID NO: 5963836 - DNA, 25 bp, Homo sapien
tgcatgtaatcaatccatctcaaaa

SEQ ID NO: 5963837 - DNA, 25 bp, Homo sapien
actaaatccttaatcaatggtaagg

SEQ ID NO: 5963838 - DNA, 25 bp, Homo sapien
agtcctttggtggctcgacaaattc

SEQ ID NO: 5963839 - DNA, 25 bp, Homo sapien
gacttcgaagacgtgaacgtcggta

SEQ ID NO: 5963840 - DNA, 25 bp, Homo sapien
gtcgttagaaccacacaataccata

SEQ ID NO: 5963841 - DNA, 25 bp, Homo sapien
gtcaactttcttacaggatggtcct

SEQ ID NO: 5963842 - DNA, 25 bp, Homo sapien
gtcatttgtagtaaaatgaggttgt

SEQ ID NO: 5963843 - DNA, 25 bp, Homo sapien
aagcgattcgaacttggtaacgaga

SEQ ID NO: 5963844 - DNA, 25 bp, Homo sapien
gcagcgccacccgcaggtgcctttt

SEQ ID NO: 5963845 - DNA, 25 bp, Homo sapien
gcatctgggtgcttgatggcttttt

SEQ ID NO: 5963846 - DNA, 25 bp, Homo sapien
caactttgtcgtcgttagaaccaca

SEQ ID NO: 5963847 - DNA, 25 bp, Homo sapien
atgttgggtacaaagtggacacaat

SEQ ID NO: 5963848 - DNA, 25 bp, Homo sapien
cttggctgcggcatcagcagcgcca

SEQ ID NO: 5963849 - DNA, 25 bp, Homo sapien
ttcttttttggattcaattgcttca

SEQ ID NO: 5963850 - DNA, 25 bp, Homo sapien
caatggtaaggcgacttcgaagacg

SEQ ID NO: 5963851 - DNA, 25 bp, Homo sapien
ctattgcggatggctttggcttttc

SEQ ID NO: 5963852 - DNA, 25 bp, Homo sapien
ggtgttgtctcttaacaccaaattc

SEQ ID NO: 5963853 - DNA, 25 bp, Homo sapien
aggttgtaagtgttcccagatcttc

SEQ ID NO: 5963854 - DNA, 25 bp, Homo sapien
tagggagtcggcatctgggtgcttg

SEQ ID NO: 5963855 - DNA, 25 bp, Homo sapien
tgacatccttggagcttgccactaa

SEQ ID NO: 5963856 - DNA, 25 bp, Homo sapien
ttggatttgaccagattttagaacc

SEQ ID NO: 5963857 - DNA, 25 bp, Homo sapien
acaccaaattcaattgatctaagtg

SEQ ID NO: 5963858 - DNA, 25 bp, Homo sapien
atcttcgtctgccttggctgcggca

SEQ ID NO: 5963859 - DNA, 25 bp, Homo sapien
cttggatgatcttgctttttagcct

SEQ ID NO: 5963860 - DNA, 25 bp, Homo sapien
aggcgacttcgaagacgtgaacgtc

SEQ ID NO: 5963861 - DNA, 25 bp, Homo sapien
ttcccagatcttcttttttggattc

SEQ ID NO: 5963862 - DNA, 25 bp, Homo sapien
caaaggaaaatgcttgaccaaacca

SEQ ID NO: 5963863 - DNA, 25 bp, Homo sapien
tgggtacaaagtggacacaatgaag

SEQ ID NO: 5963864 - DNA, 25 bp, Homo sapien
caaatcgtgatttatttctaacttg

SEQ ID NO: 5963865 - DNA, 25 bp, Homo sapien
cttacaggatggtccttttcttctt

SEQ ID NO: 5963866 - DNA, 25 bp, Homo sapien
actggatactttgaaataataagcg

SEQ ID NO: 5963867 - DNA, 25 bp, Homo sapien
ttcgaacttggtaacgagatcggac

SEQ ID NO: 5963868 - DNA, 25 bp, Homo sapien
atggtaaggcgacttcgaagacgtg

SEQ ID NO: 5963869 - DNA, 25 bp, Homo sapien
aaccttgaatgattcgcccttagcg

SEQ ID NO: 5963870 - DNA, 25 bp, Homo sapien
tccaaatcgtgatttatttctaact

SEQ ID NO: 5963871 - DNA, 25 bp, Homo sapien
aaatctattgcggatggctttggct

SEQ ID NO: 5963872 - DNA, 25 bp, Homo sapien
cttcttctcaataacttcatgaggt

SEQ ID NO: 5963873 - DNA, 25 bp, Homo sapien
cagtggatttaatacctctcatgtt

SEQ ID NO: 5963874 - DNA, 25 bp, Homo sapien
gatttatttctaacttgtcagtgct

SEQ ID NO: 5963875 - DNA, 25 bp, Homo sapien
ggtaagtccaaatcgtgatttattt

SEQ ID NO: 5963876 - DNA, 25 bp, Homo sapien
gattcgaacttggtaacgagatcgg

SEQ ID NO: 5963877 - DNA, 25 bp, Homo sapien
tgtagtaaaatgaggttgtaagtgt

SEQ ID NO: 5963878 - DNA, 25 bp, Homo sapien
gcatagcgtccaaaggaaaatgctt

SEQ ID NO: 5963879 - DNA, 25 bp, Homo sapien
tgttctttagtgaaagaaactggat

SEQ ID NO: 5963880 - DNA, 25 bp, Homo sapien
ctgtatgtggtataagttgacttga

SEQ ID NO: 5963881 - DNA, 25 bp, Homo sapien
cttcattggagcttcgtcaccgaaa

SEQ ID NO: 5963882 - DNA, 25 bp, Homo sapien
atcaattgtagagacatatagggag

SEQ ID NO: 5963883 - DNA, 25 bp, Homo sapien
ccacacaataccatagcagtggatt

SEQ ID NO: 5963884 - DNA, 25 bp, Homo sapien
cgtcaccgaaaccttcaaagaacac

SEQ ID NO: 5963885 - DNA, 25 bp, Homo sapien
cttattttgttgctcttgttgttgt

SEQ ID NO: 5963886 - DNA, 25 bp, Homo sapien
acgtgaacgtcggtagatgttgggt

SEQ ID NO: 5963887 - DNA, 25 bp, Homo sapien
gtcggcatctgggtgcttgatggct

SEQ ID NO: 5963888 - DNA, 25 bp, Homo sapien
ctctctcaatttcttaagggtttct

SEQ ID NO: 5963889 - DNA, 25 bp, Homo sapien
acccgtcatttgtagtaaaatgagg

SEQ ID NO: 5963890 - DNA, 25 bp, Homo sapien
cgaacttggtaacgagatcggacat

SEQ ID NO: 5963891 - DNA, 25 bp, Homo sapien
tggctttggcttttctggggcctta

SEQ ID NO: 5963892 - DNA, 25 bp, Homo sapien
gggtgcttgatggctttttgaataa

SEQ ID NO: 5963893 - DNA, 25 bp, Homo sapien
gctttggcttttctggggccttatt

SEQ ID NO: 5963894 - DNA, 25 bp, Homo sapien
cttgctttttagccttcttactaac

SEQ ID NO: 5963895 - DNA, 25 bp, Homo sapien
ttcatcaccgacatcaattgtagag

SEQ ID NO: 5963896 - DNA, 25 bp, Homo sapien
cttcaaagaacaccttgtcaccggc

SEQ ID NO: 5963897 - DNA, 25 bp, Homo sapien
gtctttgaagataacttccaacccg

SEQ ID NO: 5963898 - DNA, 25 bp, Homo sapien
ccgtcatttgtagtaaaatgaggtt

SEQ ID NO: 5963899 - DNA, 25 bp, Homo sapien
taacaccaaattcaattgatctaag

SEQ ID NO: 5963900 - DNA, 25 bp, Homo sapien
ataacttcatgaggtaagtccaaat

SEQ ID NO: 5963901 - DNA, 25 bp, Homo sapien
tagaaccgattcccattgggcagct

SEQ ID NO: 5963902 - DNA, 25 bp, Homo sapien
taagtccaaatcgtgatttatttct

SEQ ID NO: 5963903 - DNA, 25 bp, Homo sapien
cggatggctttggcttttctggggc

SEQ ID NO: 5963904 - DNA, 25 bp, Homo sapien
actttgtcgtcgttagaaccacaca

SEQ ID NO: 5963905 - DNA, 25 bp, Homo sapien
gaccagattttagaaccgattccca

SEQ ID NO: 5963906 - DNA, 25 bp, Homo sapien
gttgtttggcgttggcggccttctt

SEQ ID NO: 5963907 - DNA, 25 bp, Homo sapien
cgaaaccttcaaagaacaccttgtc

SEQ ID NO: 5963908 - DNA, 25 bp, Homo sapien
ttgaagataacttccaacccgtcat

SEQ ID NO: 5963909 - DNA, 25 bp, Homo sapien
gcttacctcttggatgatcttgctt

SEQ ID NO: 5963910 - DNA, 25 bp, Homo sapien
cttgaccaaaccagaacaaacagtt

SEQ ID NO: 5963911 - DNA, 25 bp, Homo sapien
tgcttgaccaaaccagaacaaacag

SEQ ID NO: 5963912 - DNA, 25 bp, Homo sapien
caccggccttagagtcctttggtgg

SEQ ID NO: 5963913 - DNA, 25 bp, Homo sapien
cattagcaatactagcaaccttgaa

SEQ ID NO: 5963914 - DNA, 25 bp, Homo sapien
tttggcgttggcggccttcttagct

SEQ ID NO: 5963915 - DNA, 25 bp, Homo sapien
ccggccttagagtcctttggtggct

SEQ ID NO: 5963916 - DNA, 25 bp, Homo sapien
ctttcttacaggatggtccttttct

SEQ ID NO: 5963917 - DNA, 25 bp, Homo sapien
gcgattcgaacttggtaacgagatc

SEQ ID NO: 5963918 - DNA, 25 bp, Homo sapien
ccttgaatgattcgcccttagcgtt

SEQ ID NO: 5963919 - DNA, 25 bp, Homo sapien
tgtcgtcgttagaaccacacaatac

SEQ ID NO: 5963920 - DNA, 25 bp, Homo sapien
atagcagtggatttaatacctctca

SEQ ID NO: 5963921 - DNA, 25 bp, Homo sapien
tccaaaggaaaatgcttgaccaaac

SEQ ID NO: 5963922 - DNA, 25 bp, Homo sapien
aagttttgcatgtaatcaatccatc

SEQ ID NO: 5963923 - DNA, 25 bp, Homo sapien
ttaacggacttgagcattagcaata

SEQ ID NO: 5963924 - DNA, 25 bp, Homo sapien
gtatgtggtataagttgacttgaca

SEQ ID NO: 5963925 - DNA, 25 bp, Homo sapien
cttgacatccttggagcttgccact

SEQ ID NO: 5963926 - DNA, 25 bp, Homo sapien
gcatacaacaacaacataacgttct

SEQ ID NO: 5963927 - DNA, 25 bp, Homo sapien
cggcatctgggtgcttgatggcttt

SEQ ID NO: 5963928 - DNA, 25 bp, Homo sapien
tccttaatcaatggtaaggcgactt

SEQ ID NO: 5963929 - DNA, 25 bp, Homo sapien
tttcttcatcaggcttacctcttgg

SEQ ID NO: 5963930 - DNA, 25 bp, Homo sapien
acatcaattgtagagacatataggg

SEQ ID NO: 5963931 - DNA, 25 bp, Homo sapien
cttcttactaacatcttcgtctgcc

SEQ ID NO: 5963932 - DNA, 25 bp, Homo sapien
ggtacaaagtggacacaatgaaggt

SEQ ID NO: 5963933 - DNA, 25 bp, Homo sapien
ggacacaatgaaggtgttgtctctt

SEQ ID NO: 5963934 - DNA, 25 bp, Homo sapien
taaggcgacttcgaagacgtgaacg

SEQ ID NO: 5963935 - DNA, 25 bp, Homo sapien
gatggctttttgaataaaaccaaca

SEQ ID NO: 5963936 - DNA, 25 bp, Homo sapien
tcatgaggtaagtccaaatcgtgat

SEQ ID NO: 5963937 - DNA, 25 bp, Homo sapien
caaattcaattgatctaagtgtggt

SEQ ID NO: 5963938 - DNA, 25 bp, Homo sapien
tcttcttcgtctttgaagataactt

SEQ ID NO: 5963939 - DNA, 25 bp, Homo sapien
tagcaaccttgaatgattcgccctt

SEQ ID NO: 5963940 - DNA, 25 bp, Homo sapien
agaacaaacagttcttgggccttct

SEQ ID NO: 5963941 - DNA, 25 bp, Homo sapien
cccttagcgttggtcaactttctta

SEQ ID NO: 5963942 - DNA, 25 bp, Homo sapien
caaacagttcttgggccttcttcat

SEQ ID NO: 5963943 - DNA, 25 bp, Homo sapien
gcagattgttctttagtgaaagaaa

SEQ ID NO: 5963944 - DNA, 25 bp, Homo sapien
ttgtctcttaacaccaaattcaatt

SEQ ID NO: 5963945 - DNA, 25 bp, Homo sapien
ttacctcttggatgatcttgctttt

SEQ ID NO: 5963946 - DNA, 25 bp, Homo sapien
gggagtcggcatctgggtgcttgat

SEQ ID NO: 5963947 - DNA, 25 bp, Homo sapien
agcagtggatttaatacctctcatg

SEQ ID NO: 5963948 - DNA, 25 bp, Homo sapien
cgacatcaattgtagagacatatag

SEQ ID NO: 5963949 - DNA, 25 bp, Homo sapien
tttagaaccgattcccattgggcag

SEQ ID NO: 5963950 - DNA, 25 bp, Homo sapien
attgggcagcttgagcagattgttc

SEQ ID NO: 5963951 - DNA, 25 bp, Homo sapien
catcaggcttacctcttggatgatc

SEQ ID NO: 5963952 - DNA, 25 bp, Homo sapien
ctcttgttgttgtttggcgttggcg

SEQ ID NO: 5963953 - DNA, 25 bp, Homo sapien
tttttggattcaattgcttcattgg

SEQ ID NO: 5963954 - DNA, 25 bp, Homo sapien
ctttggtggctcgacaaattcaact

SEQ ID NO: 5963955 - DNA, 25 bp, Homo sapien
ttagaaccacacaataccatagcag

SEQ ID NO: 5963956 - DNA, 25 bp, Homo sapien
gaagataacttccaacccgtcattt

SEQ ID NO: 5963957 - DNA, 25 bp, Homo sapien
cttagctgccttcttggcctttgcc

SEQ ID NO: 5963958 - DNA, 25 bp, Homo sapien
tttgcatgtaatcaatccatctcaa

SEQ ID NO: 5963959 - DNA, 25 bp, Homo sapien
catatagggagtcggcatctgggtg

SEQ ID NO: 5963960 - DNA, 25 bp, Homo sapien
aaccagaacaaacagttcttgggcc

SEQ ID NO: 5963961 - DNA, 25 bp, Homo sapien
gttgtaagtgttcccagatcttctt

SEQ ID NO: 5963962 - DNA, 25 bp, Homo sapien
ttcatcaggcttacctcttggatga

SEQ ID NO: 5963963 - DNA, 25 bp, Homo sapien
ttagcaatactagcaaccttgaatg

SEQ ID NO: 5963964 - DNA, 25 bp, Homo sapien
gttcttgggccttcttcatcaccga

SEQ ID NO: 5963965 - DNA, 25 bp, Homo sapien
caataacttcatgaggtaagtccaa

SEQ ID NO: 5963966 - DNA, 25 bp, Homo sapien
tccaacccgtcatttgtagtaaaat

SEQ ID NO: 5963967 - DNA, 25 bp, Homo sapien
cacttccaacaagttttgcatgtaa

SEQ ID NO: 5963968 - DNA, 25 bp, Homo sapien
acggaaatctattgcggatggcttt

SEQ ID NO: 5963969 - DNA, 25 bp, Homo sapien
caatccatctcaaaatatgtctgta

SEQ ID NO: 5963970 - DNA, 25 bp, Homo sapien
tggtttcaagttgcatacaacaaca

SEQ ID NO: 5963971 - DNA, 25 bp, Homo sapien
tctggggccttattttgttgctctt

SEQ ID NO: 5963972 - DNA, 25 bp, Homo sapien
aatcgtgatttatttctaacttgtc

SEQ ID NO: 5963973 - DNA, 25 bp, Homo sapien
gaagacgtgaacgtcggtagatgtt

SEQ ID NO: 5963974 - DNA, 25 bp, Homo sapien
tcttgggccttcttcatcaccgaca

SEQ ID NO: 5963975 - DNA, 25 bp, Homo sapien
taagggtttcttcatcaggcttacc

SEQ ID NO: 5963976 - DNA, 25 bp, Homo sapien
tagtaaaatgaggttgtaagtgttc

SEQ ID NO: 5963977 - DNA, 25 bp, Homo sapien
tgaaggtgttgtctcttaacaccaa

SEQ ID NO: 5963978 - DNA, 25 bp, Homo sapien
catttgtagtaaaatgaggttgtaa

SEQ ID NO: 5963979 - DNA, 25 bp, Homo sapien
ccgcaggtgcctttttcttcttctc

SEQ ID NO: 5963980 - DNA, 25 bp, Homo sapien
aacaaacagttcttgggccttcttc

SEQ ID NO: 5963981 - DNA, 25 bp, Homo sapien
tgcggcatcagcagcgccacccgca

SEQ ID NO: 5963982 - DNA, 25 bp, Homo sapien
tgtaatcaatccatctcaaaatatg

SEQ ID NO: 5963983 - DNA, 25 bp, Homo sapien
ctcttaacaccaaattcaattgatc

SEQ ID NO: 5963984 - DNA, 25 bp, Homo sapien
acctcttggatgatcttgcttttta

SEQ ID NO: 5963985 - DNA, 25 bp, Homo sapien
atcttgctttttagccttcttacta

SEQ ID NO: 5963986 - DNA, 25 bp, Homo sapien
tttctaacttgtcagtgctcgacac

SEQ ID NO: 5963987 - DNA, 25 bp, Homo sapien
cagatcttcttttttggattcaatt

SEQ ID NO: 5963988 - DNA, 25 bp, Homo sapien
cttttttggattcaattgcttcatt

SEQ ID NO: 5963989 - DNA, 25 bp, Homo sapien
taacgttcttgcatagcgtccaaag

SEQ ID NO: 5963990 - DNA, 25 bp, Homo sapien
cttgttgttgtttggcgttggcggc

SEQ ID NO: 5963991 - DNA, 25 bp, Homo sapien
accaaattcaattgatctaagtgtg

SEQ ID NO: 5963992 - DNA, 25 bp, Homo sapien
acaataccatagcagtggatttaat

SEQ ID NO: 5963993 - DNA, 25 bp, Homo sapien
tcttcatcaggcttacctcttggat

SEQ ID NO: 5963994 - DNA, 25 bp, Homo sapien
atgaggtaagtccaaatcgtgattt

SEQ ID NO: 5963995 - DNA, 25 bp, Homo sapien
acatcttcgtctgccttggctgcgg

SEQ ID NO: 5963996 - DNA, 25 bp, Homo sapien
ttgttgctcttgttgttgtttggcg

SEQ ID NO: 5963997 - DNA, 25 bp, Homo sapien
tacctctcatgttaactggtttcaa

SEQ ID NO: 5963998 - DNA, 25 bp, Homo sapien
caaattcaactttgtcgtcgttaga

SEQ ID NO: 5963999 - DNA, 25 bp, Homo sapien
agaaactggatactttgaaataata

SEQ ID NO: 5964000 - DNA, 25 bp, Homo sapien
ttcaagttgcatacaacaacaacat

SEQ ID NO: 5964001 - DNA, 25 bp, Homo sapien
acacaataccatagcagtggattta

SEQ ID NO: 5964002 - DNA, 25 bp, Homo sapien
gtggtataagttgacttgacatcct

SEQ ID NO: 5964003 - DNA, 25 bp, Homo sapien
aattcaactttgtcgtcgttagaac

SEQ ID NO: 5964004 - DNA, 25 bp, Homo sapien
gggccttcttcatcaccgacatcaa

SEQ ID NO: 5964005 - DNA, 25 bp, Homo sapien
aacataacgttcttgcatagcgtcc

SEQ ID NO: 5964006 - DNA, 25 bp, Homo sapien
ccagaacaaacagttcttgggcctt

SEQ ID NO: 5964007 - DNA, 25 bp, Homo sapien
gtgcttgatggctttttgaataaaa

SEQ ID NO: 5964008 - DNA, 25 bp, Homo sapien
acacggaaatctattgcggatggct

SEQ ID NO: 5964009 - DNA, 25 bp, Homo sapien
tatttctaacttgtcagtgctcgac

SEQ ID NO: 5964010 - DNA, 25 bp, Homo sapien
agagtcctttggtggctcgacaaat

SEQ ID NO: 5964011 - DNA, 25 bp, Homo sapien
atagcgtccaaaggaaaatgcttga

SEQ ID NO: 5964012 - DNA, 25 bp, Homo sapien
taacttgtcagtgctcgacacttcc

SEQ ID NO: 5964013 - DNA, 25 bp, Homo sapien
cttgccactaaatccttaatcaatg

SEQ ID NO: 5964014 - DNA, 25 bp, Homo sapien
atgtggtataagttgacttgacatc

SEQ ID NO: 5964015 - DNA, 25 bp, Homo sapien
tggattcaattgcttcattggagct

SEQ ID NO: 5964016 - DNA, 25 bp, Homo sapien
atcaatccatctcaaaatatgtctg

SEQ ID NO: 5964017 - DNA, 25 bp, Homo sapien
attcccattgggcagcttgagcaga

SEQ ID NO: 5964018 - DNA, 25 bp, Homo sapien
gcttgagcagattgttctttagtga

SEQ ID NO: 5964019 - DNA, 25 bp, Homo sapien
caatactagcaaccttgaatgattc

SEQ ID NO: 5964020 - DNA, 25 bp, Homo sapien
atctattgcggatggctttggcttt

SEQ ID NO: 5964021 - DNA, 25 bp, Homo sapien
ggtttcttcatcaggcttacctctt

SEQ ID NO: 5964022 - DNA, 25 bp, Homo sapien
ttagagtcctttggtggctcgacaa

SEQ ID NO: 5964023 - DNA, 25 bp, Homo sapien
cttggcctttgcctcctctctcaat

SEQ ID NO: 5964024 - DNA, 25 bp, Homo sapien
gacttgacatccttggagcttgcca

SEQ ID NO: 5964025 - DNA, 25 bp, Homo sapien
ggcagcttgagcagattgttcttta

SEQ ID NO: 5964026 - DNA, 25 bp, Homo sapien
atggtccttttcttcttcgtctttg

SEQ ID NO: 5964027 - DNA, 25 bp, Homo sapien
ttttgttgctcttgttgttgtttgg

SEQ ID NO: 5964028 - DNA, 25 bp, Homo sapien
ttgggccttcttcatcaccgacatc

SEQ ID NO: 5964029 - DNA, 25 bp, Homo sapien
tcaggcttacctcttggatgatctt

SEQ ID NO: 5964030 - DNA, 25 bp, Homo sapien
attttagaaccgattcccattgggc

SEQ ID NO: 5964031 - DNA, 25 bp, Homo sapien
cagcagcgccacccgcaggtgcctt

SEQ ID NO: 5964032 - DNA, 25 bp, Homo sapien
taagtgttcccagatcttctttttt

SEQ ID NO: 5964033 - DNA, 25 bp, Homo sapien
gtctcttaacaccaaattcaattga

SEQ ID NO: 5964034 - DNA, 25 bp, Homo sapien
agcattagcaatactagcaaccttg

SEQ ID NO: 5964035 - DNA, 25 bp, Homo sapien
atcaatggtaaggcgacttcgaaga

SEQ ID NO: 5964036 - DNA, 25 bp, Homo sapien
acacaatgaaggtgttgtctcttaa

SEQ ID NO: 5964037 - DNA, 25 bp, Homo sapien
tgctcttgttgttgtttggcgttgg

SEQ ID NO: 5964038 - DNA, 25 bp, Homo sapien
ttcgcccttagcgttggtcaacttt

SEQ ID NO: 5964039 - DNA, 25 bp, Homo sapien
aaaccaacacggaaatctattgcgg

SEQ ID NO: 5964040 - DNA, 25 bp, Homo sapien
gattcgcccttagcgttggtcaact

SEQ ID NO: 5964041 - DNA, 25 bp, Homo sapien
tataagttgacttgacatccttgga

SEQ ID NO: 5964042 - DNA, 25 bp, Homo sapien
aaagaacaccttgtcaccggcctta

SEQ ID NO: 5964043 - DNA, 25 bp, Homo sapien
gtggttggatttgaccagattttag

SEQ ID NO: 5964044 - DNA, 25 bp, Homo sapien
aaccacacaataccatagcagtgga

SEQ ID NO: 5964045 - DNA, 25 bp, Homo sapien
cgttagaaccacacaataccatagc

SEQ ID NO: 5964046 - DNA, 25 bp, Homo sapien
ataacttccaacccgtcatttgtag

SEQ ID NO: 5964047 - DNA, 25 bp, Homo sapien
atgattcgcccttagcgttggtcaa

SEQ ID NO: 5964048 - DNA, 25 bp, Homo sapien
acaatgaaggtgttgtctcttaaca

SEQ ID NO: 5964049 - DNA, 25 bp, Homo sapien
tcatgttaactggtttcaagttgca

SEQ ID NO: 5964050 - DNA, 25 bp, Homo sapien
caaaccagaacaaacagttcttggg

SEQ ID NO: 5964051 - DNA, 25 bp, Homo sapien
gttaactggtttcaagttgcataca

SEQ ID NO: 5964052 - DNA, 25 bp, Homo sapien
acgtcggtagatgttgggtacaaag

SEQ ID NO: 5964053 - DNA, 25 bp, Homo sapien
tgaggttgtaagtgttcccagatct

SEQ ID NO: 5964054 - DNA, 25 bp, Homo sapien
aagtgtggttggatttgaccagatt

SEQ ID NO: 5964055 - DNA, 25 bp, Homo sapien
ctcaaaatatgtctgtatgtggtat

SEQ ID NO: 5964056 - DNA, 25 bp, Homo sapien
atatgtctgtatgtggtataagttg

SEQ ID NO: 5964057 - DNA, 25 bp, Homo sapien
ccttcttagctgccttcttggcctt

SEQ ID NO: 5964058 - DNA, 25 bp, Homo sapien
gacatatagggagtcggcatctggg

SEQ ID NO: 5964059 - DNA, 25 bp, Homo sapien
gctgcggcatcagcagcgccacccg

SEQ ID NO: 5964060 - DNA, 25 bp, Homo sapien
aggcttacctcttggatgatcttgc

SEQ ID NO: 5964061 - DNA, 25 bp, Homo sapien
tgcggatggctttggcttttctggg

SEQ ID NO: 5964062 - DNA, 25 bp, Homo sapien
ttcttcgtctttgaagataacttcc

SEQ ID NO: 5964063 - DNA, 25 bp, Homo sapien
ccatctcaaaatatgtctgtatgtg

SEQ ID NO: 5964064 - DNA, 25 bp, Homo sapien
catgtaatcaatccatctcaaaata

SEQ ID NO: 5964065 - DNA, 25 bp, Homo sapien
ggccttcttagctgccttcttggcc

SEQ ID NO: 5964066 - DNA, 25 bp, Homo sapien
tgagcattagcaatactagcaacct

SEQ ID NO: 5964067 - DNA, 25 bp, Homo sapien
tggcctttgcctcctctctcaattt

SEQ ID NO: 5964068 - DNA, 25 bp, Homo sapien
tgatctaagtgtggttggatttgac

SEQ ID NO: 5964069 - DNA, 25 bp, Homo sapien
tacaggatggtccttttcttcttcg

SEQ ID NO: 5964070 - DNA, 25 bp, Homo sapien
ttcaattgcttcattggagcttcgt

SEQ ID NO: 5964071 - DNA, 25 bp, Homo sapien
ccagattttagaaccgattcccatt

SEQ ID NO: 5964072 - DNA, 25 bp, Homo sapien
actagcaaccttgaatgattcgccc

SEQ ID NO: 5964073 - DNA, 25 bp, Homo sapien
taaaaccaacacggaaatctattgc

SEQ ID NO: 5964074 - DNA, 25 bp, Homo sapien
acaacataacgttcttgcatagcgt

SEQ ID NO: 5964075 - DNA, 25 bp, Homo sapien
tgttcccagatcttcttttttggat

SEQ ID NO: 5964076 - DNA, 25 bp, Homo sapien
tgccactaaatccttaatcaatggt

SEQ ID NO: 5964077 - DNA, 25 bp, Homo sapien
ctgggtgcttgatggctttttgaat

SEQ ID NO: 5964078 - DNA, 25 bp, Homo sapien
tggatactttgaaataataagcgat

SEQ ID NO: 5964079 - DNA, 25 bp, Homo sapien
cgcccttagcgttggtcaactttct

SEQ ID NO: 5964080 - DNA, 25 bp, Homo sapien
gagcagattgttctttagtgaaaga

SEQ ID NO: 5964081 - DNA, 25 bp, Homo sapien
ggatttaatacctctcatgttaact

SEQ ID NO: 5964082 - DNA, 25 bp, Homo sapien
attgttctttagtgaaagaaactgg

SEQ ID NO: 5964083 - DNA, 25 bp, Homo sapien
accgacatcaattgtagagacatat

SEQ ID NO: 5964084 - DNA, 25 bp, Homo sapien
tcgtcgttagaaccacacaatacca

SEQ ID NO: 5964085 - DNA, 25 bp, Homo sapien
tttgtagtaaaatgaggttgtaagt

SEQ ID NO: 5964086 - DNA, 25 bp, Homo sapien
gtctgccttggctgcggcatcagca

SEQ ID NO: 5964087 - DNA, 25 bp, Homo sapien
cttccaacaagttttgcatgtaatc

SEQ ID NO: 5964088 - DNA, 25 bp, Homo sapien
ccttgtcaccggccttagagtcctt

SEQ ID NO: 5964089 - DNA, 25 bp, Homo sapien
gagcttcgtcaccgaaaccttcaaa

SEQ ID NO: 5964090 - DNA, 25 bp, Homo sapien
agtgaaagaaactggatactttgaa

SEQ ID NO: 5964091 - DNA, 25 bp, Homo sapien
tgtaagtgttcccagatcttctttt

SEQ ID NO: 5964092 - DNA, 25 bp, Homo sapien
tcttgcatagcgtccaaaggaaaat

SEQ ID NO: 5964093 - DNA, 25 bp, Homo sapien
cggacttgagcattagcaatactag

SEQ ID NO: 5964094 - DNA, 25 bp, Homo sapien
agcaatactagcaaccttgaatgat

SEQ ID NO: 5964095 - DNA, 25 bp, Homo sapien
gcttgatggctttttgaataaaacc

SEQ ID NO: 5964096 - DNA, 25 bp, Homo sapien
cggtagatgttgggtacaaagtgga

SEQ ID NO: 5964097 - DNA, 25 bp, Homo sapien
attgcttcattggagcttcgtcacc

SEQ ID NO: 5964098 - DNA, 25 bp, Homo sapien
gctgccttcttggcctttgcctcct

SEQ ID NO: 5964099 - DNA, 25 bp, Homo sapien
ggatttgaccagattttagaaccga

SEQ ID NO: 5964100 - DNA, 25 bp, Homo sapien
tcttactaacatcttcgtctgcctt

SEQ ID NO: 5964101 - DNA, 25 bp, Homo sapien
ttctttagtgaaagaaactggatac

SEQ ID NO: 5964102 - DNA, 25 bp, Homo sapien
cttcttcatcaccgacatcaattgt

SEQ ID NO: 5964103 - DNA, 25 bp, Homo sapien
atttcttaagggtttcttcatcagg

SEQ ID NO: 5964104 - DNA, 25 bp, Homo sapien
cgtccaaaggaaaatgcttgaccaa

SEQ ID NO: 5964105 - DNA, 25 bp, Homo sapien
aaggaaaatgcttgaccaaaccaga

SEQ ID NO: 5964106 - DNA, 25 bp, Homo sapien
aatgaggttgtaagtgttcccagat

SEQ ID NO: 5964107 - DNA, 25 bp, Homo sapien
ggatggtccttttcttcttcgtctt

SEQ ID NO: 5964108 - DNA, 25 bp, Homo sapien
taactggtttcaagttgcatacaac

SEQ ID NO: 5964109 - DNA, 25 bp, Homo sapien
ctttagtgaaagaaactggatactt

SEQ ID NO: 5964110 - DNA, 25 bp, Homo sapien
gcggccttcttagctgccttcttgg

SEQ ID NO: 5964111 - DNA, 25 bp, Homo sapien
ttgttgtttggcgttggcggccttc

SEQ ID NO: 5964112 - DNA, 25 bp, Homo sapien
aacttccaacccgtcatttgtagta

SEQ ID NO: 5964113 - DNA, 25 bp, Homo sapien
ttgcatacaacaacaacataacgtt

SEQ ID NO: 5964114 - DNA, 25 bp, Homo sapien
attgtagagacatatagggagtcgg

SEQ ID NO: 5964115 - DNA, 25 bp, Homo sapien
aacaacaacataacgttcttgcata

SEQ ID NO: 5964116 - DNA, 25 bp, Homo sapien
cttaatcaatggtaaggcgacttcg

SEQ ID NO: 5964117 - DNA, 25 bp, Homo sapien
ttcttagctgccttcttggcctttg

SEQ ID NO: 5964118 - DNA, 25 bp, Homo sapien
gttgggtacaaagtggacacaatga

SEQ ID NO: 5964119 - DNA, 25 bp, Homo sapien
gctttttagccttcttactaacatc

SEQ ID NO: 5964120 - DNA, 25 bp, Homo sapien
caccttgtcaccggccttagagtcc

SEQ ID NO: 5964121 - DNA, 25 bp, Homo sapien
gaacgtcggtagatgttgggtacaa

SEQ ID NO: 5964122 - DNA, 25 bp, Homo sapien
ctcaatttcttaagggtttcttcat

SEQ ID NO: 5964123 - DNA, 25 bp, Homo sapien
ttgaaataataagcgattcgaactt

SEQ ID NO: 5964124 - DNA, 25 bp, Homo sapien
ctcttggatgatcttgctttttagc

SEQ ID NO: 5964125 - DNA, 25 bp, Homo sapien
ggttggatttgaccagattttagaa

SEQ ID NO: 5964126 - DNA, 25 bp, Homo sapien
tctcatgttaactggtttcaagttg

SEQ ID NO: 5964127 - DNA, 25 bp, Homo sapien
ataagcgattcgaacttggtaacga

SEQ ID NO: 5964128 - DNA, 25 bp, Homo sapien
aggtgcctttttcttcttctcaata

SEQ ID NO: 5964129 - DNA, 25 bp, Homo sapien
tgcttcattggagcttcgtcaccga

SEQ ID NO: 5964130 - DNA, 25 bp, Homo sapien
gaaccgattcccattgggcagcttg

SEQ ID NO: 5964131 - DNA, 25 bp, Homo sapien
taatcaatggtaaggcgacttcgaa

SEQ ID NO: 5964132 - DNA, 25 bp, Homo sapien
caattgcttcattggagcttcgtca

SEQ ID NO: 5964133 - DNA, 25 bp, Homo sapien
atctgggtgcttgatggctttttga

SEQ ID NO: 5964134 - DNA, 25 bp, Homo sapien
atctaagtgtggttggatttgacca

SEQ ID NO: 5964135 - DNA, 25 bp, Homo sapien
gatcttcttttttggattcaattgc

SEQ ID NO: 5964136 - DNA, 25 bp, Homo sapien
atctcaaaatatgtctgtatgtggt

SEQ ID NO: 5964137 - DNA, 25 bp, Homo sapien
acaacaacaacataacgttcttgca

SEQ ID NO: 5964138 - DNA, 25 bp, Homo sapien
tcgtctgccttggctgcggcatcag

SEQ ID NO: 5964139 - DNA, 25 bp, Homo sapien
taagttgacttgacatccttggagc

SEQ ID NO: 5964140 - DNA, 25 bp, Homo sapien
cttccaacccgtcatttgtagtaaa

SEQ ID NO: 5964141 - DNA, 25 bp, Homo sapien
accaaaccagaacaaacagttcttg

SEQ ID NO: 5964142 - DNA, 25 bp, Homo sapien
tagctgccttcttggcctttgcctc

SEQ ID NO: 5964143 - DNA, 25 bp, Homo sapien
cttcgaagacgtgaacgtcggtaga

SEQ ID NO: 5964144 - DNA, 25 bp, Homo sapien
tttgtcgtcgttagaaccacacaat

SEQ ID NO: 5964145 - DNA, 25 bp, Homo sapien
aacaccttgtcaccggccttagagt

SEQ ID NO: 5964146 - DNA, 25 bp, Homo sapien
ttactaacatcttcgtctgccttgg

SEQ ID NO: 5964147 - DNA, 25 bp, Homo sapien
gagacatatagggagtcggcatctg

SEQ ID NO: 5964148 - DNA, 25 bp, Homo sapien
actggtttcaagttgcatacaacaa

SEQ ID NO: 5964149 - DNA, 25 bp, Homo sapien
cggcatcagcagcgccacccgcagg

SEQ ID NO: 5964150 - DNA, 25 bp, Homo sapien
agatgttgggtacaaagtggacaca

SEQ ID NO: 5964151 - DNA, 25 bp, Homo sapien
aaactggatactttgaaataataag

SEQ ID NO: 5964152 - DNA, 25 bp, Homo sapien
atccatctcaaaatatgtctgtatg

SEQ ID NO: 5964153 - DNA, 25 bp, Homo sapien
tcaaagaacaccttgtcaccggcct

SEQ ID NO: 5964154 - DNA, 25 bp, Homo sapien
tatagggagtcggcatctgggtgct

SEQ ID NO: 5964155 - DNA, 25 bp, Homo sapien
caatttcttaagggtttcttcatca

SEQ ID NO: 5964156 - DNA, 25 bp, Homo sapien
aattcaattgatctaagtgtggttg

SEQ ID NO: 5964157 - DNA, 25 bp, Homo sapien
acatccttggagcttgccactaaat

SEQ ID NO: 5964158 - DNA, 25 bp, Homo sapien
tactttgaaataataagcgattcga

SEQ ID NO: 5964159 - DNA, 25 bp, Homo sapien
tcttcatcaccgacatcaattgtag

SEQ ID NO: 5964160 - DNA, 25 bp, Homo sapien
accaacacggaaatctattgcggat

SEQ ID NO: 5964161 - DNA, 25 bp, Homo sapien
taaatccttaatcaatggtaaggcg

SEQ ID NO: 5964162 - DNA, 25 bp, Homo sapien
tcattggagcttcgtcaccgaaacc

SEQ ID NO: 5964163 - DNA, 25 bp, Homo sapien
ttgacttgacatccttggagcttgc

SEQ ID NO: 5964164 - DNA, 25 bp, Homo sapien
tgggcagcttgagcagattgttctt

SEQ ID NO: 5964165 - DNA, 25 bp, Homo sapien
caattgatctaagtgtggttggatt

SEQ ID NO: 5964166 - DNA, 25 bp, Homo sapien
atgtctgtatgtggtataagttgac

SEQ ID NO: 5964167 - DNA, 25 bp, Homo sapien
caactttcttacaggatggtccttt

SEQ ID NO: 5964168 - DNA, 25 bp, Homo sapien
caattgtagagacatatagggagtc

SEQ ID NO: 5964169 - DNA, 25 bp, Homo sapien
ttgagcagattgttctttagtgaaa

SEQ ID NO: 5964170 - DNA, 25 bp, Homo sapien
aaaatgcttgaccaaaccagaacaa

SEQ ID NO: 5964171 - DNA, 25 bp, Homo sapien
gtctgtatgtggtataagttgactt

SEQ ID NO: 5964172 - DNA, 25 bp, Homo sapien
caacaagttttgcatgtaatcaatc

SEQ ID NO: 5964173 - DNA, 25 bp, Homo sapien
gtaaaatgaggttgtaagtgttccc

SEQ ID NO: 5964174 - DNA, 25 bp, Homo sapien
ttaatacctctcatgttaactggtt

SEQ ID NO: 5964175 - DNA, 25 bp, Homo sapien
tcttctcaataacttcatgaggtaa

SEQ ID NO: 5964176 - DNA, 25 bp, Homo sapien
caaaatatgtctgtatgtggtataa

SEQ ID NO: 5964177 - DNA, 25 bp, Homo sapien
caagttgcatacaacaacaacataa

SEQ ID NO: 5964178 - DNA, 25 bp, Homo sapien
gttggtcaactttcttacaggatgg

SEQ ID NO: 5964179 - DNA, 25 bp, Homo sapien
tgcctcctctctcaatttcttaagg

SEQ ID NO: 5964180 - DNA, 25 bp, Homo sapien
gctcgacacttccaacaagttttgc

SEQ ID NO: 5964181 - DNA, 25 bp, Homo sapien
accttcaaagaacaccttgtcaccg

SEQ ID NO: 5964182 - DNA, 25 bp, Homo sapien
tcgaagacgtgaacgtcggtagatg

SEQ ID NO: 5964183 - DNA, 25 bp, Homo sapien
aatgcttgaccaaaccagaacaaac

SEQ ID NO: 5964184 - DNA, 25 bp, Homo sapien
gcaaccttgaatgattcgcccttag

SEQ ID NO: 5964185 - DNA, 25 bp, Homo sapien
gacacttccaacaagttttgcatgt

SEQ ID NO: 5964186 - DNA, 25 bp, Homo sapien
cctctcatgttaactggtttcaagt

SEQ ID NO: 5964187 - DNA, 25 bp, Homo sapien
gggccttattttgttgctcttgttg

SEQ ID NO: 5964188 - DNA, 25 bp, Homo sapien
ttcttacaggatggtccttttcttc

SEQ ID NO: 5964189 - DNA, 25 bp, Homo sapien
gaggtaagtccaaatcgtgatttat

SEQ ID NO: 5964190 - DNA, 25 bp, Homo sapien
ttgaataaaaccaacacggaaatct

SEQ ID NO: 5964191 - DNA, 25 bp, Homo sapien
cctcctctctcaatttcttaagggt

SEQ ID NO: 5964192 - DNA, 25 bp, Homo sapien
cttaagggtttcttcatcaggctta

SEQ ID NO: 5964193 - DNA, 25 bp, Homo sapien
tcaccgacatcaattgtagagacat

SEQ ID NO: 5964194 - DNA, 25 bp, Homo sapien
atcagcagcgccacccgcaggtgcc

SEQ ID NO: 5964195 - DNA, 25 bp, Homo sapien
tcccattgggcagcttgagcagatt

SEQ ID NO: 5964196 - DNA, 25 bp, Homo sapien
agacgtgaacgtcggtagatgttgg

SEQ ID NO: 5964197 - DNA, 25 bp, Homo sapien
agtccaaatcgtgatttatttctaa

SEQ ID NO: 5964198 - DNA, 25 bp, Homo sapien
gcttcgtcaccgaaaccttcaaaga

SEQ ID NO: 5964199 - DNA, 25 bp, Homo sapien
ttgtcaccggccttagagtcctttg

SEQ ID NO: 5964200 - DNA, 25 bp, Homo sapien
cttttctggggccttattttgttgc

SEQ ID NO: 5964201 - DNA, 25 bp, Homo sapien
aaggtgttgtctcttaacaccaaat

SEQ ID NO: 5964202 - DNA, 25 bp, Homo sapien
caggatggtccttttcttcttcgtc

SEQ ID NO: 5964203 - DNA, 25 bp, Homo sapien
gtagatgttgggtacaaagtggaca

SEQ ID NO: 5964204 - DNA, 25 bp, Homo sapien
cgccacccgcaggtgcctttttctt

SEQ ID NO: 5964205 - DNA, 25 bp, Homo sapien
tcgacaaattcaactttgtcgtcgt

SEQ ID NO: 5964206 - DNA, 25 bp, Homo sapien
agcgtccaaaggaaaatgcttgacc

SEQ ID NO: 5964207 - DNA, 25 bp, Homo sapien
tagccttcttactaacatcttcgtc

SEQ ID NO: 5964208 - DNA, 25 bp, Homo sapien
atttgaccagattttagaaccgatt

SEQ ID NO: 5964209 - DNA, 25 bp, Homo sapien
ctcaataacttcatgaggtaagtcc

SEQ ID NO: 5964210 - DNA, 25 bp, Homo sapien
gacttgagcattagcaatactagca

SEQ ID NO: 5964211 - DNA, 25 bp, Homo sapien
tccaacaagttttgcatgtaatcaa

SEQ ID NO: 5964212 - DNA, 25 bp, Homo sapien
tgaaagaaactggatactttgaaat

SEQ ID NO: 5964213 - DNA, 25 bp, Homo sapien
tttggattcaattgcttcattggag

SEQ ID NO: 5964214 - DNA, 25 bp, Homo sapien
tttgcctcctctctcaatttcttaa

SEQ ID NO: 5964215 - DNA, 25 bp, Homo sapien
gtgctcgacacttccaacaagtttt

SEQ ID NO: 5964216 - DNA, 25 bp, Homo sapien
gtgtggttggatttgaccagatttt

SEQ ID NO: 5964217 - DNA, 25 bp, Homo sapien
ctttgaaataataagcgattcgaac

SEQ ID NO: 5964218 - DNA, 25 bp, Homo sapien
ttggtggctcgacaaattcaacttt

SEQ ID NO: 5964219 - DNA, 25 bp, Homo sapien
caacaacataacgttcttgcatagc

SEQ ID NO: 5964220 - DNA, 25 bp, Homo sapien
agacctcacgactactccgacatgg

SEQ ID NO: 5964221 - DNA, 25 bp, Homo sapien
acgattggccgtgtcgcttcaggtg

SEQ ID NO: 5964222 - DNA, 25 bp, Homo sapien
cagaggcaacaaggactctatcggt

SEQ ID NO: 5964223 - DNA, 25 bp, Homo sapien
gctattcctattgtggaagccatga

SEQ ID NO: 5964224 - DNA, 25 bp, Homo sapien
tgagaaacttgcctaccggtctcgg

SEQ ID NO: 5964225 - DNA, 25 bp, Homo sapien
ggcaagactctaggtacacccatcg

SEQ ID NO: 5964226 - DNA, 25 bp, Homo sapien
gctaagggtagacatgaccctgctg

SEQ ID NO: 5964227 - DNA, 25 bp, Homo sapien
aggtggtatctctaatggtgagaac

SEQ ID NO: 5964228 - DNA, 25 bp, Homo sapien
caagggtttcgaaattggctcaggt

SEQ ID NO: 5964229 - DNA, 25 bp, Homo sapien
cgacccctagagacgaaaaggatag

SEQ ID NO: 5964230 - DNA, 25 bp, Homo sapien
tcaatctaagctatcgacccctaga

SEQ ID NO: 5964231 - DNA, 25 bp, Homo sapien
caagagatttctccagatccgtggt

SEQ ID NO: 5964232 - DNA, 25 bp, Homo sapien
tcggtggtgtcgtcacttgtgtcgt

SEQ ID NO: 5964233 - DNA, 25 bp, Homo sapien
tacaaggtggtatctctaatggtga

SEQ ID NO: 5964234 - DNA, 25 bp, Homo sapien
tccgcgtcaccacatatggtgaatc

SEQ ID NO: 5964235 - DNA, 25 bp, Homo sapien
tatggtgaatcgcattgtaagtctg

SEQ ID NO: 5964236 - DNA, 25 bp, Homo sapien
ttgatggtcaaggaaatcgaaaagt

SEQ ID NO: 5964237 - DNA, 25 bp, Homo sapien
cctgaatttcagcatctgttgaaca

SEQ ID NO: 5964238 - DNA, 25 bp, Homo sapien
agaccttcccatgcggacttcacgt

SEQ ID NO: 5964239 - DNA, 25 bp, Homo sapien
agagcttctgctagagaaacgattg

SEQ ID NO: 5964240 - DNA, 25 bp, Homo sapien
ccagaagaagaccgggtcaatctaa

SEQ ID NO: 5964241 - DNA, 25 bp, Homo sapien
cgcattgtaagtctgtcggttgcat

SEQ ID NO: 5964242 - DNA, 25 bp, Homo sapien
cgactactccgacatggacaagttc

SEQ ID NO: 5964243 - DNA, 25 bp, Homo sapien
ggaagccatgaccgctctggtgttg

SEQ ID NO: 5964244 - DNA, 25 bp, Homo sapien
ggttttcagggtgtctctgttccag

SEQ ID NO: 5964245 - DNA, 25 bp, Homo sapien
tatttctctgtcccattcaagtcag

SEQ ID NO: 5964246 - DNA, 25 bp, Homo sapien
tggtgaagaaggtatcttagccgct

SEQ ID NO: 5964247 - DNA, 25 bp, Homo sapien
aaacagattaagaacaaagaccaac

SEQ ID NO: 5964248 - DNA, 25 bp, Homo sapien
caagttggaagccatgttggctcat

SEQ ID NO: 5964249 - DNA, 25 bp, Homo sapien
cacatatggtgaatcgcattgtaag

SEQ ID NO: 5964250 - DNA, 25 bp, Homo sapien
tagagtggaaatccagtccggtacc

SEQ ID NO: 5964251 - DNA, 25 bp, Homo sapien
aaaaggcaagagatttctccagatc

SEQ ID NO: 5964252 - DNA, 25 bp, Homo sapien
tctaatgtcgagatcgtagcctttg

SEQ ID NO: 5964253 - DNA, 25 bp, Homo sapien
accgggtcaatctaagctatcgacc

SEQ ID NO: 5964254 - DNA, 25 bp, Homo sapien
ccgacatggacaagttccctagacc

SEQ ID NO: 5964255 - DNA, 25 bp, Homo sapien
aaaaaccgccacttacgatggtgaa

SEQ ID NO: 5964256 - DNA, 25 bp, Homo sapien
catctatttctctgtcccattcaag

SEQ ID NO: 5964257 - DNA, 25 bp, Homo sapien
tgttggctgacgcgcttttgatcca

SEQ ID NO: 5964258 - DNA, 25 bp, Homo sapien
gtggtgtacaaggtggtatctctaa

SEQ ID NO: 5964259 - DNA, 25 bp, Homo sapien
attcagccacaattgaccagaagaa

SEQ ID NO: 5964260 - DNA, 25 bp, Homo sapien
accacatatggtgaatcgcattgta

SEQ ID NO: 5964261 - DNA, 25 bp, Homo sapien
tgtacaaggtggtatctctaatggt

SEQ ID NO: 5964262 - DNA, 25 bp, Homo sapien
caggttttcagggtgtctctgttcc

SEQ ID NO: 5964263 - DNA, 25 bp, Homo sapien
tcaaaaacgaggaccaaagacctca

SEQ ID NO: 5964264 - DNA, 25 bp, Homo sapien
gagttcggcaagactctaggtacac

SEQ ID NO: 5964265 - DNA, 25 bp, Homo sapien
gtccggtaccgagttcggcaagact

SEQ ID NO: 5964266 - DNA, 25 bp, Homo sapien
tggcagagcttctgctagagaaacg

SEQ ID NO: 5964267 - DNA, 25 bp, Homo sapien
gtaagtctgtcggttgcattgtcga

SEQ ID NO: 5964268 - DNA, 25 bp, Homo sapien
gtgacacaaatcggggaaatcaaga

SEQ ID NO: 5964269 - DNA, 25 bp, Homo sapien
ctgtcggttgcattgtcgacggtgt

SEQ ID NO: 5964270 - DNA, 25 bp, Homo sapien
taccgagttcggcaagactctaggt

SEQ ID NO: 5964271 - DNA, 25 bp, Homo sapien
aatgggtcctatcagatgtccagac

SEQ ID NO: 5964272 - DNA, 25 bp, Homo sapien
tgacattcagccacaattgaccaga

SEQ ID NO: 5964273 - DNA, 25 bp, Homo sapien
aattgaccagaagaagaccgggtca

SEQ ID NO: 5964274 - DNA, 25 bp, Homo sapien
cgtgagaaacttgcctaccggtctc

SEQ ID NO: 5964275 - DNA, 25 bp, Homo sapien
agatcgtagcctttgtgacacaaat

SEQ ID NO: 5964276 - DNA, 25 bp, Homo sapien
acattcagccacaattgaccagaag

SEQ ID NO: 5964277 - DNA, 25 bp, Homo sapien
aacatctatttctctgtcccattca

SEQ ID NO: 5964278 - DNA, 25 bp, Homo sapien
cgcgcttttgatccaaaaggcaaga

SEQ ID NO: 5964279 - DNA, 25 bp, Homo sapien
aatctaagctatcgacccctagaga

SEQ ID NO: 5964280 - DNA, 25 bp, Homo sapien
ttgcctaccggtctcggtgagccat

SEQ ID NO: 5964281 - DNA, 25 bp, Homo sapien
tacggtatcaaggcctcctctggtg

SEQ ID NO: 5964282 - DNA, 25 bp, Homo sapien
tgtcattaaccgaagctgacattca

SEQ ID NO: 5964283 - DNA, 25 bp, Homo sapien
catgttggctcatgctatgttgtcc

SEQ ID NO: 5964284 - DNA, 25 bp, Homo sapien
agaacatctatttctctgtcccatt

SEQ ID NO: 5964285 - DNA, 25 bp, Homo sapien
gtcgacggtgttcctccaggaatgt

SEQ ID NO: 5964286 - DNA, 25 bp, Homo sapien
gccatgatgatcaaaaacgaggacc

SEQ ID NO: 5964287 - DNA, 25 bp, Homo sapien
caattcaggtggtgtacaaggtggt

SEQ ID NO: 5964288 - DNA, 25 bp, Homo sapien
gtcgcttcaggtgccattgctgaga

SEQ ID NO: 5964289 - DNA, 25 bp, Homo sapien
gatgaacagagactctttcgatcct

SEQ ID NO: 5964290 - DNA, 25 bp, Homo sapien
ttgacaagttggaagccatgttggc

SEQ ID NO: 5964291 - DNA, 25 bp, Homo sapien
atgcggacttcacgtactcggaaaa

SEQ ID NO: 5964292 - DNA, 25 bp, Homo sapien
aagatgaacagagactctttcgatc

SEQ ID NO: 5964293 - DNA, 25 bp, Homo sapien
cacgtactcggaaaagtacggtatc

SEQ ID NO: 5964294 - DNA, 25 bp, Homo sapien
ggccactatctctcaagaacaaaaa

SEQ ID NO: 5964295 - DNA, 25 bp, Homo sapien
agccgctaagggtagacatgaccct

SEQ ID NO: 5964296 - DNA, 25 bp, Homo sapien
gagctattcctattgtggaagccat

SEQ ID NO: 5964297 - DNA, 25 bp, Homo sapien
ttgtgacacaaatcggggaaatcaa

SEQ ID NO: 5964298 - DNA, 25 bp, Homo sapien
tcccattcaagtcagtggccactat

SEQ ID NO: 5964299 - DNA, 25 bp, Homo sapien
acttacgatggtgaagaaggtatct

SEQ ID NO: 5964300 - DNA, 25 bp, Homo sapien
cctccgttgctggtttgatggtcaa

SEQ ID NO: 5964301 - DNA, 25 bp, Homo sapien
attaagaacaaagaccaacaattca

SEQ ID NO: 5964302 - DNA, 25 bp, Homo sapien
gtatcaaggcctcctctggtggtgg

SEQ ID NO: 5964303 - DNA, 25 bp, Homo sapien
tccagtccggtaccgagttcggcaa

SEQ ID NO: 5964304 - DNA, 25 bp, Homo sapien
cagagactctttcgatcctgaattt

SEQ ID NO: 5964305 - DNA, 25 bp, Homo sapien
catgaccctgctgtcactccaagag

SEQ ID NO: 5964306 - DNA, 25 bp, Homo sapien
gtggtggcagagcttctgctagaga

SEQ ID NO: 5964307 - DNA, 25 bp, Homo sapien
caaagaccaacaattcaggtggtgt

SEQ ID NO: 5964308 - DNA, 25 bp, Homo sapien
caggaatgtcattaaccgaagctga

SEQ ID NO: 5964309 - DNA, 25 bp, Homo sapien
tggtcaaggaaatcgaaaagtacag

SEQ ID NO: 5964310 - DNA, 25 bp, Homo sapien
cctccaggaatgtcattaaccgaag

SEQ ID NO: 5964311 - DNA, 25 bp, Homo sapien
ctctttcgatcctgaatttcagcat

SEQ ID NO: 5964312 - DNA, 25 bp, Homo sapien
cgcttcaggtgccattgctgagaag

SEQ ID NO: 5964313 - DNA, 25 bp, Homo sapien
cctattgtggaagccatgaccgctc

SEQ ID NO: 5964314 - DNA, 25 bp, Homo sapien
actctatcggtggtgtcgtcacttg

SEQ ID NO: 5964315 - DNA, 25 bp, Homo sapien
acttgcctaccggtctcggtgagcc

SEQ ID NO: 5964316 - DNA, 25 bp, Homo sapien
tctgtcccattcaagtcagtggcca

SEQ ID NO: 5964317 - DNA, 25 bp, Homo sapien
taggtacacccatcgccatgatgat

SEQ ID NO: 5964318 - DNA, 25 bp, Homo sapien
gatgtccagacgcctccgttgctgg

SEQ ID NO: 5964319 - DNA, 25 bp, Homo sapien
tccgttgctggtttgatggtcaagg

SEQ ID NO: 5964320 - DNA, 25 bp, Homo sapien
tagcctttgtgacacaaatcgggga

SEQ ID NO: 5964321 - DNA, 25 bp, Homo sapien
caagttccctagaccttcccatgcg

SEQ ID NO: 5964322 - DNA, 25 bp, Homo sapien
tacagaggcaacaaggactctatcg

SEQ ID NO: 5964323 - DNA, 25 bp, Homo sapien
actactccgacatggacaagttccc

SEQ ID NO: 5964324 - DNA, 25 bp, Homo sapien
tcggcaagactctaggtacacccat

SEQ ID NO: 5964325 - DNA, 25 bp, Homo sapien
ttgtaagtctgtcggttgcattgtc

SEQ ID NO: 5964326 - DNA, 25 bp, Homo sapien
acgtttgggaaactgttccgcgtca

SEQ ID NO: 5964327 - DNA, 25 bp, Homo sapien
cagtggccactatctctcaagaaca

SEQ ID NO: 5964328 - DNA, 25 bp, Homo sapien
aactgttccgcgtcaccacatatgg

SEQ ID NO: 5964329 - DNA, 25 bp, Homo sapien
cgaagctgacattcagccacaattg

SEQ ID NO: 5964330 - DNA, 25 bp, Homo sapien
tctaatggtgagaacatctatttct

SEQ ID NO: 5964331 - DNA, 25 bp, Homo sapien
tttctctgtcccattcaagtcagtg

SEQ ID NO: 5964332 - DNA, 25 bp, Homo sapien
caacaaggactctatcggtggtgtc

SEQ ID NO: 5964333 - DNA, 25 bp, Homo sapien
ccagcatccaagggtttcgaaattg

SEQ ID NO: 5964334 - DNA, 25 bp, Homo sapien
catgaccgctctggtgttggctgac

SEQ ID NO: 5964335 - DNA, 25 bp, Homo sapien
ctcctctggtggtggcagagcttct

SEQ ID NO: 5964336 - DNA, 25 bp, Homo sapien
ctcggtgagccatgctttgacaagt

SEQ ID NO: 5964337 - DNA, 25 bp, Homo sapien
cctctggtggtggcagagcttctgc

SEQ ID NO: 5964338 - DNA, 25 bp, Homo sapien
aaggactctatcggtggtgtcgtca

SEQ ID NO: 5964339 - DNA, 25 bp, Homo sapien
ctagagaaacgattggccgtgtcgc

SEQ ID NO: 5964340 - DNA, 25 bp, Homo sapien
ttgtgtcgtgagaaacttgcctacc

SEQ ID NO: 5964341 - DNA, 25 bp, Homo sapien
agcttctgctagagaaacgattggc

SEQ ID NO: 5964342 - DNA, 25 bp, Homo sapien
gagactctttcgatcctgaatttca

SEQ ID NO: 5964343 - DNA, 25 bp, Homo sapien
tccagacgcctccgttgctggtttg

SEQ ID NO: 5964344 - DNA, 25 bp, Homo sapien
tgctgtcactccaagagctattcct

SEQ ID NO: 5964345 - DNA, 25 bp, Homo sapien
atcaaggcctcctctggtggtggca

SEQ ID NO: 5964346 - DNA, 25 bp, Homo sapien
ctgtcactccaagagctattcctat

SEQ ID NO: 5964347 - DNA, 25 bp, Homo sapien
ctcacgactactccgacatggacaa

SEQ ID NO: 5964348 - DNA, 25 bp, Homo sapien
cagacgcctccgttgctggtttgat

SEQ ID NO: 5964349 - DNA, 25 bp, Homo sapien
gttccagggtccaagcacaatgacc

SEQ ID NO: 5964350 - DNA, 25 bp, Homo sapien
tatctctcaagaacaaaaaaccgcc

SEQ ID NO: 5964351 - DNA, 25 bp, Homo sapien
agagatttctccagatccgtggttc

SEQ ID NO: 5964352 - DNA, 25 bp, Homo sapien
gcctaccggtctcggtgagccatgc

SEQ ID NO: 5964353 - DNA, 25 bp, Homo sapien
cgagatcgtagcctttgtgacacaa

SEQ ID NO: 5964354 - DNA, 25 bp, Homo sapien
agaaggtatcttagccgctaagggt

SEQ ID NO: 5964355 - DNA, 25 bp, Homo sapien
atcgtagcctttgtgacacaaatcg

SEQ ID NO: 5964356 - DNA, 25 bp, Homo sapien
tccattccagcatccaagggtttcg

SEQ ID NO: 5964357 - DNA, 25 bp, Homo sapien
attcaagtcagtggccactatctct

SEQ ID NO: 5964358 - DNA, 25 bp, Homo sapien
actatctctcaagaacaaaaaaccg

SEQ ID NO: 5964359 - DNA, 25 bp, Homo sapien
taatggtgagaacatctatttctct

SEQ ID NO: 5964360 - DNA, 25 bp, Homo sapien
gtcgtgagaaacttgcctaccggtc

SEQ ID NO: 5964361 - DNA, 25 bp, Homo sapien
tttcagcatctgttgaacaccatca

SEQ ID NO: 5964362 - DNA, 25 bp, Homo sapien
ggccgtgtcgcttcaggtgccattg

SEQ ID NO: 5964363 - DNA, 25 bp, Homo sapien
gaactctaatgtcgagatcgtagcc

SEQ ID NO: 5964364 - DNA, 25 bp, Homo sapien
cctgctgtcactccaagagctattc

SEQ ID NO: 5964365 - DNA, 25 bp, Homo sapien
ccgagttcggcaagactctaggtac

SEQ ID NO: 5964366 - DNA, 25 bp, Homo sapien
ggctgacgcgcttttgatccaaaag

SEQ ID NO: 5964367 - DNA, 25 bp, Homo sapien
aaacgattggccgtgtcgcttcagg

SEQ ID NO: 5964368 - DNA, 25 bp, Homo sapien
ttccagcatccaagggtttcgaaat

SEQ ID NO: 5964369 - DNA, 25 bp, Homo sapien
gtctctgttccagggtccaagcaca

SEQ ID NO: 5964370 - DNA, 25 bp, Homo sapien
cagatgtccagacgcctccgttgct

SEQ ID NO: 5964371 - DNA, 25 bp, Homo sapien
ctggtgttggctgacgcgcttttga

SEQ ID NO: 5964372 - DNA, 25 bp, Homo sapien
gaaaagtacggtatcaaggcctcct

SEQ ID NO: 5964373 - DNA, 25 bp, Homo sapien
ctttcgatcctgaatttcagcatct

SEQ ID NO: 5964374 - DNA, 25 bp, Homo sapien
tgtccagacgcctccgttgctggtt

SEQ ID NO: 5964375 - DNA, 25 bp, Homo sapien
gccatgaccgctctggtgttggctg

SEQ ID NO: 5964376 - DNA, 25 bp, Homo sapien
cgcctccgttgctggtttgatggtc

SEQ ID NO: 5964377 - DNA, 25 bp, Homo sapien
gtgtcgtgagaaacttgcctaccgg

SEQ ID NO: 5964378 - DNA, 25 bp, Homo sapien
tatctctaatggtgagaacatctat

SEQ ID NO: 5964379 - DNA, 25 bp, Homo sapien
gttcggcaagactctaggtacaccc

SEQ ID NO: 5964380 - DNA, 25 bp, Homo sapien
caaggaaatcgaaaagtacagaggc

SEQ ID NO: 5964381 - DNA, 25 bp, Homo sapien
tggacaagttccctagaccttccca

SEQ ID NO: 5964382 - DNA, 25 bp, Homo sapien
ttgtcgacggtgttcctccaggaat

SEQ ID NO: 5964383 - DNA, 25 bp, Homo sapien
cttctgctagagaaacgattggccg

SEQ ID NO: 5964384 - DNA, 25 bp, Homo sapien
tctaggtacacccatcgccatgatg

SEQ ID NO: 5964385 - DNA, 25 bp, Homo sapien
gagtggaaatccagtccggtaccga

SEQ ID NO: 5964386 - DNA, 25 bp, Homo sapien
tgggtcctatcagatgtccagacgc

SEQ ID NO: 5964387 - DNA, 25 bp, Homo sapien
tggtggtggcagagcttctgctaga

SEQ ID NO: 5964388 - DNA, 25 bp, Homo sapien
ccattcaagtcagtggccactatct

SEQ ID NO: 5964389 - DNA, 25 bp, Homo sapien
tatcggtggtgtcgtcacttgtgtc

SEQ ID NO: 5964390 - DNA, 25 bp, Homo sapien
ggcaagagatttctccagatccgtg

SEQ ID NO: 5964391 - DNA, 25 bp, Homo sapien
ctctggtgttggctgacgcgctttt

SEQ ID NO: 5964392 - DNA, 25 bp, Homo sapien
tcaggtgccattgctgagaagttct

SEQ ID NO: 5964393 - DNA, 25 bp, Homo sapien
cattgtcgacggtgttcctccagga

SEQ ID NO: 5964394 - DNA, 25 bp, Homo sapien
cggaaaagtacggtatcaaggcctc

SEQ ID NO: 5964395 - DNA, 25 bp, Homo sapien
tgctatgttgtccattccagcatcc

SEQ ID NO: 5964396 - DNA, 25 bp, Homo sapien
tgtcccattcaagtcagtggccact

SEQ ID NO: 5964397 - DNA, 25 bp, Homo sapien
aggcctcctctggtggtggcagagc

SEQ ID NO: 5964398 - DNA, 25 bp, Homo sapien
taaccgaagctgacattcagccaca

SEQ ID NO: 5964399 - DNA, 25 bp, Homo sapien
ccggtaccgagttcggcaagactct

SEQ ID NO: 5964400 - DNA, 25 bp, Homo sapien
ggacttcacgtactcggaaaagtac

SEQ ID NO: 5964401 - DNA, 25 bp, Homo sapien
cagggtgtctctgttccagggtcca

SEQ ID NO: 5964402 - DNA, 25 bp, Homo sapien
gtttgggaaactgttccgcgtcacc

SEQ ID NO: 5964403 - DNA, 25 bp, Homo sapien
gagccatgctttgacaagttggaag

SEQ ID NO: 5964404 - DNA, 25 bp, Homo sapien
tcccatgcggacttcacgtactcgg

SEQ ID NO: 5964405 - DNA, 25 bp, Homo sapien
gacaagttggaagccatgttggctc

SEQ ID NO: 5964406 - DNA, 25 bp, Homo sapien
agacgaaaaggatagagtggaaatc

SEQ ID NO: 5964407 - DNA, 25 bp, Homo sapien
ctgacgcgcttttgatccaaaaggc

SEQ ID NO: 5964408 - DNA, 25 bp, Homo sapien
gtggaaatccagtccggtaccgagt

SEQ ID NO: 5964409 - DNA, 25 bp, Homo sapien
ggcaacaaggactctatcggtggtg

SEQ ID NO: 5964410 - DNA, 25 bp, Homo sapien
ctcggaaaagtacggtatcaaggcc

SEQ ID NO: 5964411 - DNA, 25 bp, Homo sapien
ctctgttccagggtccaagcacaat

SEQ ID NO: 5964412 - DNA, 25 bp, Homo sapien
ggaaatccagtccggtaccgagttc

SEQ ID NO: 5964413 - DNA, 25 bp, Homo sapien
gttgtccattccagcatccaagggt

SEQ ID NO: 5964414 - DNA, 25 bp, Homo sapien
gaaaaagtggactcaatgggtccta

SEQ ID NO: 5964415 - DNA, 25 bp, Homo sapien
agctatcgacccctagagacgaaaa

SEQ ID NO: 5964416 - DNA, 25 bp, Homo sapien
tgaatttcagcatctgttgaacacc

SEQ ID NO: 5964417 - DNA, 25 bp, Homo sapien
gggaaactgttccgcgtcaccacat

SEQ ID NO: 5964418 - DNA, 25 bp, Homo sapien
gacgcctccgttgctggtttgatgg

SEQ ID NO: 5964419 - DNA, 25 bp, Homo sapien
tgctttgacaagttggaagccatgt

SEQ ID NO: 5964420 - DNA, 25 bp, Homo sapien
caaaaaaccgccacttacgatggtg

SEQ ID NO: 5964421 - DNA, 25 bp, Homo sapien
tctctcaagaacaaaaaaccgccac

SEQ ID NO: 5964422 - DNA, 25 bp, Homo sapien
accgccacttacgatggtgaagaag

SEQ ID NO: 5964423 - DNA, 25 bp, Homo sapien
aggaaatcgaaaagtacagaggcaa

SEQ ID NO: 5964424 - DNA, 25 bp, Homo sapien
cagtccggtaccgagttcggcaaga

SEQ ID NO: 5964425 - DNA, 25 bp, Homo sapien
ctttgtgacacaaatcggggaaatc

SEQ ID NO: 5964426 - DNA, 25 bp, Homo sapien
agggtagacatgaccctgctgtcac

SEQ ID NO: 5964427 - DNA, 25 bp, Homo sapien
atcgcattgtaagtctgtcggttgc

SEQ ID NO: 5964428 - DNA, 25 bp, Homo sapien
gtcactccaagagctattcctattg

SEQ ID NO: 5964429 - DNA, 25 bp, Homo sapien
gtcgtcacttgtgtcgtgagaaact

SEQ ID NO: 5964430 - DNA, 25 bp, Homo sapien
ctccgacatggacaagttccctaga

SEQ ID NO: 5964431 - DNA, 25 bp, Homo sapien
gacaagttccctagaccttcccatg

SEQ ID NO: 5964432 - DNA, 25 bp, Homo sapien
cacccatcgccatgatgatcaaaaa

SEQ ID NO: 5964433 - DNA, 25 bp, Homo sapien
ctccaagagctattcctattgtgga

SEQ ID NO: 5964434 - DNA, 25 bp, Homo sapien
tcttagctcagaactctaatgtcga

SEQ ID NO: 5964435 - DNA, 25 bp, Homo sapien
tgaccctgctgtcactccaagagct

SEQ ID NO: 5964436 - DNA, 25 bp, Homo sapien
acaaacagattaagaacaaagacca

SEQ ID NO: 5964437 - DNA, 25 bp, Homo sapien
catccaagggtttcgaaattggctc

SEQ ID NO: 5964438 - DNA, 25 bp, Homo sapien
tcacttgtgtcgtgagaaacttgcc

SEQ ID NO: 5964439 - DNA, 25 bp, Homo sapien
tactcggaaaagtacggtatcaagg

SEQ ID NO: 5964440 - DNA, 25 bp, Homo sapien
aggtggtgtacaaggtggtatctct

SEQ ID NO: 5964441 - DNA, 25 bp, Homo sapien
caaggtggtatctctaatggtgaga

SEQ ID NO: 5964442 - DNA, 25 bp, Homo sapien
ttgctgagaagttcttagctcagaa

SEQ ID NO: 5964443 - DNA, 25 bp, Homo sapien
ccatgcggacttcacgtactcggaa

SEQ ID NO: 5964444 - DNA, 25 bp, Homo sapien
gtcagtggccactatctctcaagaa

SEQ ID NO: 5964445 - DNA, 25 bp, Homo sapien
atgatcaaaaacgaggaccaaagac

SEQ ID NO: 5964446 - DNA, 25 bp, Homo sapien
taagggtagacatgaccctgctgtc

SEQ ID NO: 5964447 - DNA, 25 bp, Homo sapien
tccagggtccaagcacaatgaccca

SEQ ID NO: 5964448 - DNA, 25 bp, Homo sapien
ccacttacgatggtgaagaaggtat

SEQ ID NO: 5964449 - DNA, 25 bp, Homo sapien
aaaccgccacttacgatggtgaaga

SEQ ID NO: 5964450 - DNA, 25 bp, Homo sapien
aacaattcaggtggtgtacaaggtg

SEQ ID NO: 5964451 - DNA, 25 bp, Homo sapien
gaatcgcattgtaagtctgtcggtt

SEQ ID NO: 5964452 - DNA, 25 bp, Homo sapien
ggtgttcctccaggaatgtcattaa

SEQ ID NO: 5964453 - DNA, 25 bp, Homo sapien
tgaccgctctggtgttggctgacgc

SEQ ID NO: 5964454 - DNA, 25 bp, Homo sapien
gacatggacaagttccctagacctt

SEQ ID NO: 5964455 - DNA, 25 bp, Homo sapien
aagccatgaccgctctggtgttggc

SEQ ID NO: 5964456 - DNA, 25 bp, Homo sapien
gtgaatcgcattgtaagtctgtcgg

SEQ ID NO: 5964457 - DNA, 25 bp, Homo sapien
ccaaaaggcaagagatttctccaga

SEQ ID NO: 5964458 - DNA, 25 bp, Homo sapien
aatttcagcatctgttgaacaccat

SEQ ID NO: 5964459 - DNA, 25 bp, Homo sapien
ctagagacgaaaaggatagagtgga

SEQ ID NO: 5964460 - DNA, 25 bp, Homo sapien
cttttgatccaaaaggcaagagatt

SEQ ID NO: 5964461 - DNA, 25 bp, Homo sapien
cattgctgagaagttcttagctcag

SEQ ID NO: 5964462 - DNA, 25 bp, Homo sapien
gcctttgtgacacaaatcggggaaa

SEQ ID NO: 5964463 - DNA, 25 bp, Homo sapien
gtgccattgctgagaagttcttagc

SEQ ID NO: 5964464 - DNA, 25 bp, Homo sapien
cgtagcctttgtgacacaaatcggg

SEQ ID NO: 5964465 - DNA, 25 bp, Homo sapien
agaaacaaacagattaagaacaaag

SEQ ID NO: 5964466 - DNA, 25 bp, Homo sapien
tattgtggaagccatgaccgctctg

SEQ ID NO: 5964467 - DNA, 25 bp, Homo sapien
gctgagaagttcttagctcagaact

SEQ ID NO: 5964468 - DNA, 25 bp, Homo sapien
tcgaaaagtacagaggcaacaagga

SEQ ID NO: 5964469 - DNA, 25 bp, Homo sapien
acggtgttcctccaggaatgtcatt

SEQ ID NO: 5964470 - DNA, 25 bp, Homo sapien
tcctatcagatgtccagacgcctcc

SEQ ID NO: 5964471 - DNA, 25 bp, Homo sapien
ccaagagctattcctattgtggaag

SEQ ID NO: 5964472 - DNA, 25 bp, Homo sapien
tctaagctatcgacccctagagacg

SEQ ID NO: 5964473 - DNA, 25 bp, Homo sapien
gcctcctctggtggtggcagagctt

SEQ ID NO: 5964474 - DNA, 25 bp, Homo sapien
aatcaagatgaacagagactctttc

SEQ ID NO: 5964475 - DNA, 25 bp, Homo sapien
gtggactcaatgggtcctatcagat

SEQ ID NO: 5964476 - DNA, 25 bp, Homo sapien
gtggccactatctctcaagaacaaa

SEQ ID NO: 5964477 - DNA, 25 bp, Homo sapien
cggtgagccatgctttgacaagttg

SEQ ID NO: 5964478 - DNA, 25 bp, Homo sapien
ccactatctctcaagaacaaaaaac

SEQ ID NO: 5964479 - DNA, 25 bp, Homo sapien
atttctccagatccgtggttcatta

SEQ ID NO: 5964480 - DNA, 25 bp, Homo sapien
aaagtacggtatcaaggcctcctct

SEQ ID NO: 5964481 - DNA, 25 bp, Homo sapien
gttcttagctcagaactctaatgtc

SEQ ID NO: 5964482 - DNA, 25 bp, Homo sapien
tctcaagaacaaaaaaccgccactt

SEQ ID NO: 5964483 - DNA, 25 bp, Homo sapien
ggtgttggctgacgcgcttttgatc

SEQ ID NO: 5964484 - DNA, 25 bp, Homo sapien
gaaaagtacagaggcaacaaggact

SEQ ID NO: 5964485 - DNA, 25 bp, Homo sapien
ctgttccagggtccaagcacaatga

SEQ ID NO: 5964486 - DNA, 25 bp, Homo sapien
ctagaccttcccatgcggacttcac

SEQ ID NO: 5964487 - DNA, 25 bp, Homo sapien
gccattgctgagaagttcttagctc

SEQ ID NO: 5964488 - DNA, 25 bp, Homo sapien
gcagagcttctgctagagaaacgat

SEQ ID NO: 5964489 - DNA, 25 bp, Homo sapien
tgagaacatctatttctctgtccca

SEQ ID NO: 5964490 - DNA, 25 bp, Homo sapien
tcaccacatatggtgaatcgcattg

SEQ ID NO: 5964491 - DNA, 25 bp, Homo sapien
ttggctcatgctatgttgtccattc

SEQ ID NO: 5964492 - DNA, 25 bp, Homo sapien
ctatcagatgtccagacgcctccgt

SEQ ID NO: 5964493 - DNA, 25 bp, Homo sapien
aaacaaacagattaagaacaaagac

SEQ ID NO: 5964494 - DNA, 25 bp, Homo sapien
cggttgcattgtcgacggtgttcct

SEQ ID NO: 5964495 - DNA, 25 bp, Homo sapien
tggtttgatggtcaaggaaatcgaa

SEQ ID NO: 5964496 - DNA, 25 bp, Homo sapien
ggtttcgaaattggctcaggttttc

SEQ ID NO: 5964497 - DNA, 25 bp, Homo sapien
aaaacgaggaccaaagacctcacga

SEQ ID NO: 5964498 - DNA, 25 bp, Homo sapien
tctatttctctgtcccattcaagtc

SEQ ID NO: 5964499 - DNA, 25 bp, Homo sapien
ttacgatggtgaagaaggtatctta

SEQ ID NO: 5964500 - DNA, 25 bp, Homo sapien
ggctcatgctatgttgtccattcca

SEQ ID NO: 5964501 - DNA, 25 bp, Homo sapien
tcaagatgaacagagactctttcga

SEQ ID NO: 5964502 - DNA, 25 bp, Homo sapien
agattaagaacaaagaccaacaatt

SEQ ID NO: 5964503 - DNA, 25 bp, Homo sapien
ggtacacccatcgccatgatgatca

SEQ ID NO: 5964504 - DNA, 25 bp, Homo sapien
acaattgaccagaagaagaccgggt

SEQ ID NO: 5964505 - DNA, 25 bp, Homo sapien
tgtccattccagcatccaagggttt

SEQ ID NO: 5964506 - DNA, 25 bp, Homo sapien
aacaaagaccaacaattcaggtggt

SEQ ID NO: 5964507 - DNA, 25 bp, Homo sapien
agccacaattgaccagaagaagacc

SEQ ID NO: 5964508 - DNA, 25 bp, Homo sapien
cactccaagagctattcctattgtg

SEQ ID NO: 5964509 - DNA, 25 bp, Homo sapien
aacagagactctttcgatcctgaat

SEQ ID NO: 5964510 - DNA, 25 bp, Homo sapien
ggtgagaacatctatttctctgtcc

SEQ ID NO: 5964511 - DNA, 25 bp, Homo sapien
ccctagagacgaaaaggatagagtg

SEQ ID NO: 5964512 - DNA, 25 bp, Homo sapien
tcgccatgatgatcaaaaacgagga

SEQ ID NO: 5964513 - DNA, 25 bp, Homo sapien
agcatccaagggtttcgaaattggc

SEQ ID NO: 5964514 - DNA, 25 bp, Homo sapien
actcaatgggtcctatcagatgtcc

SEQ ID NO: 5964515 - DNA, 25 bp, Homo sapien
tctgttgaacaccatcaccagggaa

SEQ ID NO: 5964516 - DNA, 25 bp, Homo sapien
tgcattgtcgacggtgttcctccag

SEQ ID NO: 5964517 - DNA, 25 bp, Homo sapien
ctttgacaagttggaagccatgttg

SEQ ID NO: 5964518 - DNA, 25 bp, Homo sapien
ttgaacaccatcaccagggaaaaag

SEQ ID NO: 5964519 - DNA, 25 bp, Homo sapien
ggtatcttagccgctaagggtagac

SEQ ID NO: 5964520 - DNA, 25 bp, Homo sapien
aatgtcattaaccgaagctgacatt

SEQ ID NO: 5964521 - DNA, 25 bp, Homo sapien
gaaactgttccgcgtcaccacatat

SEQ ID NO: 5964522 - DNA, 25 bp, Homo sapien
accgaagctgacattcagccacaat

SEQ ID NO: 5964523 - DNA, 25 bp, Homo sapien
cacgactactccgacatggacaagt

SEQ ID NO: 5964524 - DNA, 25 bp, Homo sapien
aaaagtggactcaatgggtcctatc

SEQ ID NO: 5964525 - DNA, 25 bp, Homo sapien
gctggtttgatggtcaaggaaatcg

SEQ ID NO: 5964526 - DNA, 25 bp, Homo sapien
aatcgaaaagtacagaggcaacaag

SEQ ID NO: 5964527 - DNA, 25 bp, Homo sapien
aaggtatcttagccgctaagggtag

SEQ ID NO: 5964528 - DNA, 25 bp, Homo sapien
tcaagaacaaaaaaccgccacttac

SEQ ID NO: 5964529 - DNA, 25 bp, Homo sapien
atccaaaaggcaagagatttctcca

SEQ ID NO: 5964530 - DNA, 25 bp, Homo sapien
gtcaaggaaatcgaaaagtacagag

SEQ ID NO: 5964531 - DNA, 25 bp, Homo sapien
aattggctcaggttttcagggtgtc

SEQ ID NO: 5964532 - DNA, 25 bp, Homo sapien
ttgggaaactgttccgcgtcaccac

SEQ ID NO: 5964533 - DNA, 25 bp, Homo sapien
tccaggaatgtcattaaccgaagct

SEQ ID NO: 5964534 - DNA, 25 bp, Homo sapien
tctatcggtggtgtcgtcacttgtg

SEQ ID NO: 5964535 - DNA, 25 bp, Homo sapien
caagactctaggtacacccatcgcc

SEQ ID NO: 5964536 - DNA, 25 bp, Homo sapien
cgtcacttgtgtcgtgagaaacttg

SEQ ID NO: 5964537 - DNA, 25 bp, Homo sapien
ttggaagccatgttggctcatgcta

SEQ ID NO: 5964538 - DNA, 25 bp, Homo sapien
gaccaacaattcaggtggtgtacaa

SEQ ID NO: 5964539 - DNA, 25 bp, Homo sapien
tggtgtcgtcacttgtgtcgtgaga

SEQ ID NO: 5964540 - DNA, 25 bp, Homo sapien
gactctttcgatcctgaatttcagc

SEQ ID NO: 5964541 - DNA, 25 bp, Homo sapien
agaccgggtcaatctaagctatcga

SEQ ID NO: 5964542 - DNA, 25 bp, Homo sapien
atggtgagaacatctatttctctgt

SEQ ID NO: 5964543 - DNA, 25 bp, Homo sapien
gccatgttggctcatgctatgttgt

SEQ ID NO: 5964544 - DNA, 25 bp, Homo sapien
gtctcggtgagccatgctttgacaa

SEQ ID NO: 5964545 - DNA, 25 bp, Homo sapien
aagtcagtggccactatctctcaag

SEQ ID NO: 5964546 - DNA, 25 bp, Homo sapien
cgtactcggaaaagtacggtatcaa

SEQ ID NO: 5964547 - DNA, 25 bp, Homo sapien
gtcggttgcattgtcgacggtgttc

SEQ ID NO: 5964548 - DNA, 25 bp, Homo sapien
gaggcaacaaggactctatcggtgg

SEQ ID NO: 5964549 - DNA, 25 bp, Homo sapien
ccaaagacctcacgactactccgac

SEQ ID NO: 5964550 - DNA, 25 bp, Homo sapien
acagattaagaacaaagaccaacaa

SEQ ID NO: 5964551 - DNA, 25 bp, Homo sapien
tgatgatcaaaaacgaggaccaaag

SEQ ID NO: 5964552 - DNA, 25 bp, Homo sapien
aagaagaccgggtcaatctaagcta

SEQ ID NO: 5964553 - DNA, 25 bp, Homo sapien
ggaagccatgttggctcatgctatg

SEQ ID NO: 5964554 - DNA, 25 bp, Homo sapien
agaaacgattggccgtgtcgcttca

SEQ ID NO: 5964555 - DNA, 25 bp, Homo sapien
aaacttgcctaccggtctcggtgag

SEQ ID NO: 5964556 - DNA, 25 bp, Homo sapien
cgccacttacgatggtgaagaaggt

SEQ ID NO: 5964557 - DNA, 25 bp, Homo sapien
tcagccacaattgaccagaagaaga

SEQ ID NO: 5964558 - DNA, 25 bp, Homo sapien
gatggtcaaggaaatcgaaaagtac

SEQ ID NO: 5964559 - DNA, 25 bp, Homo sapien
gaccagaagaagaccgggtcaatct

SEQ ID NO: 5964560 - DNA, 25 bp, Homo sapien
taatgtcgagatcgtagcctttgtg

SEQ ID NO: 5964561 - DNA, 25 bp, Homo sapien
ttgtggaagccatgaccgctctggt

SEQ ID NO: 5964562 - DNA, 25 bp, Homo sapien
atcctgaatttcagcatctgttgaa

SEQ ID NO: 5964563 - DNA, 25 bp, Homo sapien
gtgtcgcttcaggtgccattgctga

SEQ ID NO: 5964564 - DNA, 25 bp, Homo sapien
atcgacccctagagacgaaaaggat

SEQ ID NO: 5964565 - DNA, 25 bp, Homo sapien
aaggcaagagatttctccagatccg

SEQ ID NO: 5964566 - DNA, 25 bp, Homo sapien
ctcaggttttcagggtgtctctgtt

SEQ ID NO: 5964567 - DNA, 25 bp, Homo sapien
gtgaagaaggtatcttagccgctaa

SEQ ID NO: 5964568 - DNA, 25 bp, Homo sapien
cgggtcaatctaagctatcgacccc

SEQ ID NO: 5964569 - DNA, 25 bp, Homo sapien
ttagctcagaactctaatgtcgaga

SEQ ID NO: 5964570 - DNA, 25 bp, Homo sapien
atgtcgagatcgtagcctttgtgac

SEQ ID NO: 5964571 - DNA, 25 bp, Homo sapien
cgctctggtgttggctgacgcgctt

SEQ ID NO: 5964572 - DNA, 25 bp, Homo sapien
ttgaccagaagaagaccgggtcaat

SEQ ID NO: 5964573 - DNA, 25 bp, Homo sapien
aagaccaacaattcaggtggtgtac

SEQ ID NO: 5964574 - DNA, 25 bp, Homo sapien
cttcccatgcggacttcacgtactc

SEQ ID NO: 5964575 - DNA, 25 bp, Homo sapien
ggtaccgagttcggcaagactctag

SEQ ID NO: 5964576 - DNA, 25 bp, Homo sapien
tcaccagggaaaaagtggactcaat

SEQ ID NO: 5964577 - DNA, 25 bp, Homo sapien
ctcagaactctaatgtcgagatcgt

SEQ ID NO: 5964578 - DNA, 25 bp, Homo sapien
ggtgtacaaggtggtatctctaatg

SEQ ID NO: 5964579 - DNA, 25 bp, Homo sapien
tcaggtggtgtacaaggtggtatct

SEQ ID NO: 5964580 - DNA, 25 bp, Homo sapien
acccctagagacgaaaaggatagag

SEQ ID NO: 5964581 - DNA, 25 bp, Homo sapien
agaacaaagaccaacaattcaggtg

SEQ ID NO: 5964582 - DNA, 25 bp, Homo sapien
ttccctagaccttcccatgcggact

SEQ ID NO: 5964583 - DNA, 25 bp, Homo sapien
aatccagtccggtaccgagttcggc

SEQ ID NO: 5964584 - DNA, 25 bp, Homo sapien
agactctaggtacacccatcgccat

SEQ ID NO: 5964585 - DNA, 25 bp, Homo sapien
ttggctgacgcgcttttgatccaaa

SEQ ID NO: 5964586 - DNA, 25 bp, Homo sapien
ttgctggtttgatggtcaaggaaat

SEQ ID NO: 5964587 - DNA, 25 bp, Homo sapien
ccacaattgaccagaagaagaccgg

SEQ ID NO: 5964588 - DNA, 25 bp, Homo sapien
ttggccgtgtcgcttcaggtgccat

SEQ ID NO: 5964589 - DNA, 25 bp, Homo sapien
tgttggctcatgctatgttgtccat

SEQ ID NO: 5964590 - DNA, 25 bp, Homo sapien
aagttcttagctcagaactctaatg

SEQ ID NO: 5964591 - DNA, 25 bp, Homo sapien
aaagtacagaggcaacaaggactct

SEQ ID NO: 5964592 - DNA, 25 bp, Homo sapien
gggaaaaagtggactcaatgggtcc

SEQ ID NO: 5964593 - DNA, 25 bp, Homo sapien
ggtatctctaatggtgagaacatct

SEQ ID NO: 5964594 - DNA, 25 bp, Homo sapien
aagagctattcctattgtggaagcc

SEQ ID NO: 5964595 - DNA, 25 bp, Homo sapien
gaaatcaagatgaacagagactctt

SEQ ID NO: 5964596 - DNA, 25 bp, Homo sapien
gtcaacgtttgggaaactgttccgc

SEQ ID NO: 5964597 - DNA, 25 bp, Homo sapien
gggaaatcaagatgaacagagactc

SEQ ID NO: 5964598 - DNA, 25 bp, Homo sapien
ttcagggtgtctctgttccagggtc

SEQ ID NO: 5964599 - DNA, 25 bp, Homo sapien
gtggaagccatgaccgctctggtgt

SEQ ID NO: 5964600 - DNA, 25 bp, Homo sapien
tcaatgggtcctatcagatgtccag

SEQ ID NO: 5964601 - DNA, 25 bp, Homo sapien
gtccaagcacaatgacccattttac

SEQ ID NO: 5964602 - DNA, 25 bp, Homo sapien
acgaaaaggatagagtggaaatcca

SEQ ID NO: 5964603 - DNA, 25 bp, Homo sapien
cagggaaaaagtggactcaatgggt

SEQ ID NO: 5964604 - DNA, 25 bp, Homo sapien
tcttagccgctaagggtagacatga

SEQ ID NO: 5964605 - DNA, 25 bp, Homo sapien
tcattaaccgaagctgacattcagc

SEQ ID NO: 5964606 - DNA, 25 bp, Homo sapien
aagccatgttggctcatgctatgtt

SEQ ID NO: 5964607 - DNA, 25 bp, Homo sapien
ggtggcagagcttctgctagagaaa

SEQ ID NO: 5964608 - DNA, 25 bp, Homo sapien
accctgctgtcactccaagagctat

SEQ ID NO: 5964609 - DNA, 25 bp, Homo sapien
catgatgatcaaaaacgaggaccaa

SEQ ID NO: 5964610 - DNA, 25 bp, Homo sapien
tctggtggtggcagagcttctgcta

SEQ ID NO: 5964611 - DNA, 25 bp, Homo sapien
gggtgtctctgttccagggtccaag

SEQ ID NO: 5964612 - DNA, 25 bp, Homo sapien
gtttgatggtcaaggaaatcgaaaa

SEQ ID NO: 5964613 - DNA, 25 bp, Homo sapien
tttcgaaattggctcaggttttcag

SEQ ID NO: 5964614 - DNA, 25 bp, Homo sapien
tctctaatggtgagaacatctattt

SEQ ID NO: 5964615 - DNA, 25 bp, Homo sapien
gaacaccatcaccagggaaaaagtg

SEQ ID NO: 5964616 - DNA, 25 bp, Homo sapien
acaatgacccattttactttgaaaa

SEQ ID NO: 5964617 - DNA, 25 bp, Homo sapien
gatcaaaaacgaggaccaaagacct

SEQ ID NO: 5964618 - DNA, 25 bp, Homo sapien
catgctatgttgtccattccagcat

SEQ ID NO: 5964619 - DNA, 25 bp, Homo sapien
tttgatccaaaaggcaagagatttc

SEQ ID NO: 5964620 - DNA, 25 bp, Homo sapien
catcaccagggaaaaagtggactca

SEQ ID NO: 5964621 - DNA, 25 bp, Homo sapien
acaaggactctatcggtggtgtcgt

SEQ ID NO: 5964622 - DNA, 25 bp, Homo sapien
catcgccatgatgatcaaaaacgag

SEQ ID NO: 5964623 - DNA, 25 bp, Homo sapien
agtacggtatcaaggcctcctctgg

SEQ ID NO: 5964624 - DNA, 25 bp, Homo sapien
accagggaaaaagtggactcaatgg

SEQ ID NO: 5964625 - DNA, 25 bp, Homo sapien
tgttcctccaggaatgtcattaacc

SEQ ID NO: 5964626 - DNA, 25 bp, Homo sapien
ttttcagggtgtctctgttccaggg

SEQ ID NO: 5964627 - DNA, 25 bp, Homo sapien
aagtggactcaatgggtcctatcag

SEQ ID NO: 5964628 - DNA, 25 bp, Homo sapien
ggtcctatcagatgtccagacgcct

SEQ ID NO: 5964629 - DNA, 25 bp, Homo sapien
caaggcctcctctggtggtggcaga

SEQ ID NO: 5964630 - DNA, 25 bp, Homo sapien
tcgaaattggctcaggttttcaggg

SEQ ID NO: 5964631 - DNA, 25 bp, Homo sapien
ggtagacatgaccctgctgtcactc

SEQ ID NO: 5964632 - DNA, 25 bp, Homo sapien
gtcgagatcgtagcctttgtgacac

SEQ ID NO: 5964633 - DNA, 25 bp, Homo sapien
aagcacaatgacccattttactttg

SEQ ID NO: 5964634 - DNA, 25 bp, Homo sapien
taagaacaaagaccaacaattcagg

SEQ ID NO: 5964635 - DNA, 25 bp, Homo sapien
aacgaggaccaaagacctcacgact

SEQ ID NO: 5964636 - DNA, 25 bp, Homo sapien
gggtccaagcacaatgacccatttt

SEQ ID NO: 5964637 - DNA, 25 bp, Homo sapien
catgctttgacaagttggaagccat

SEQ ID NO: 5964638 - DNA, 25 bp, Homo sapien
agagacgaaaaggatagagtggaaa

SEQ ID NO: 5964639 - DNA, 25 bp, Homo sapien
tatcttagccgctaagggtagacat

SEQ ID NO: 5964640 - DNA, 25 bp, Homo sapien
tgatccaaaaggcaagagatttctc

SEQ ID NO: 5964641 - DNA, 25 bp, Homo sapien
gtgagccatgctttgacaagttgga

SEQ ID NO: 5964642 - DNA, 25 bp, Homo sapien
gttgcattgtcgacggtgttcctcc

SEQ ID NO: 5964643 - DNA, 25 bp, Homo sapien
taagctatcgacccctagagacgaa

SEQ ID NO: 5964644 - DNA, 25 bp, Homo sapien
gaagaccgggtcaatctaagctatc

SEQ ID NO: 5964645 - DNA, 25 bp, Homo sapien
gtgtctctgttccagggtccaagca

SEQ ID NO: 5964646 - DNA, 25 bp, Homo sapien
agagaaacgattggccgtgtcgctt

SEQ ID NO: 5964647 - DNA, 25 bp, Homo sapien
ccaacaattcaggtggtgtacaagg

SEQ ID NO: 5964648 - DNA, 25 bp, Homo sapien
tgttgaacaccatcaccagggaaaa

SEQ ID NO: 5964649 - DNA, 25 bp, Homo sapien
acaccatcaccagggaaaaagtgga

SEQ ID NO: 5964650 - DNA, 25 bp, Homo sapien
catctgttgaacaccatcaccaggg

SEQ ID NO: 5964651 - DNA, 25 bp, Homo sapien
gaacaaaaaaccgccacttacgatg

SEQ ID NO: 5964652 - DNA, 25 bp, Homo sapien
gaaaaggatagagtggaaatccagt

SEQ ID NO: 5964653 - DNA, 25 bp, Homo sapien
gtctgtcggttgcattgtcgacggt

SEQ ID NO: 5964654 - DNA, 25 bp, Homo sapien
gctgacattcagccacaattgacca

SEQ ID NO: 5964655 - DNA, 25 bp, Homo sapien
cattgtaagtctgtcggttgcattg

SEQ ID NO: 5964656 - DNA, 25 bp, Homo sapien
agatttctccagatccgtggttcat

SEQ ID NO: 5964657 - DNA, 25 bp, Homo sapien
ccaagcacaatgacccattttactt

SEQ ID NO: 5964658 - DNA, 25 bp, Homo sapien
ctgttccgcgtcaccacatatggtg

SEQ ID NO: 5964659 - DNA, 25 bp, Homo sapien
agaagaagaccgggtcaatctaagc

SEQ ID NO: 5964660 - DNA, 25 bp, Homo sapien
cgcttttgatccaaaaggcaagaga

SEQ ID NO: 5964661 - DNA, 25 bp, Homo sapien
cgacggtgttcctccaggaatgtca

SEQ ID NO: 5964662 - DNA, 25 bp, Homo sapien
catatggtgaatcgcattgtaagtc

SEQ ID NO: 5964663 - DNA, 25 bp, Homo sapien
catggacaagttccctagaccttcc

SEQ ID NO: 5964664 - DNA, 25 bp, Homo sapien
acttgtgtcgtgagaaacttgccta

SEQ ID NO: 5964665 - DNA, 25 bp, Homo sapien
ttagccgctaagggtagacatgacc

SEQ ID NO: 5964666 - DNA, 25 bp, Homo sapien
actctaggtacacccatcgccatga

SEQ ID NO: 5964667 - DNA, 25 bp, Homo sapien
tctgctagagaaacgattggccgtg

SEQ ID NO: 5964668 - DNA, 25 bp, Homo sapien
gaagaaggtatcttagccgctaagg

SEQ ID NO: 5964669 - DNA, 25 bp, Homo sapien
tggtgaatcgcattgtaagtctgtc

SEQ ID NO: 5964670 - DNA, 25 bp, Homo sapien
gcacaatgacccattttactttgaa

SEQ ID NO: 5964671 - DNA, 25 bp, Homo sapien
cgttgctggtttgatggtcaaggaa

SEQ ID NO: 5964672 - DNA, 25 bp, Homo sapien
aagctgacattcagccacaattgac

SEQ ID NO: 5964673 - DNA, 25 bp, Homo sapien
cccatcgccatgatgatcaaaaacg

SEQ ID NO: 5964674 - DNA, 25 bp, Homo sapien
gattggccgtgtcgcttcaggtgcc

SEQ ID NO: 5964675 - DNA, 25 bp, Homo sapien
ggtggtgtcgtcacttgtgtcgtga

SEQ ID NO: 5964676 - DNA, 25 bp, Homo sapien
gatagagtggaaatccagtccggta

SEQ ID NO: 5964677 - DNA, 25 bp, Homo sapien
gttccgcgtcaccacatatggtgaa

SEQ ID NO: 5964678 - DNA, 25 bp, Homo sapien
tcaagtcagtggccactatctctca

SEQ ID NO: 5964679 - DNA, 25 bp, Homo sapien
atgtcaacgtttgggaaactgttcc

SEQ ID NO: 5964680 - DNA, 25 bp, Homo sapien
tactccgacatggacaagttcccta

SEQ ID NO: 5964681 - DNA, 25 bp, Homo sapien
ggtcaatctaagctatcgaccccta

SEQ ID NO: 5964682 - DNA, 25 bp, Homo sapien
tgctagagaaacgattggccgtgtc

SEQ ID NO: 5964683 - DNA, 25 bp, Homo sapien
ggctcaggttttcagggtgtctctg

SEQ ID NO: 5964684 - DNA, 25 bp, Homo sapien
cgaggaccaaagacctcacgactac

SEQ ID NO: 5964685 - DNA, 25 bp, Homo sapien
attcaggtggtgtacaaggtggtat

SEQ ID NO: 5964686 - DNA, 25 bp, Homo sapien
agctcagaactctaatgtcgagatc

SEQ ID NO: 5964687 - DNA, 25 bp, Homo sapien
tagacatgaccctgctgtcactcca

SEQ ID NO: 5964688 - DNA, 25 bp, Homo sapien
aaagacctcacgactactccgacat

SEQ ID NO: 5964689 - DNA, 25 bp, Homo sapien
gtgtcgtcacttgtgtcgtgagaaa

SEQ ID NO: 5964690 - DNA, 25 bp, Homo sapien
accttcccatgcggacttcacgtac

SEQ ID NO: 5964691 - DNA, 25 bp, Homo sapien
gcggacttcacgtactcggaaaagt

SEQ ID NO: 5964692 - DNA, 25 bp, Homo sapien
gacatgaccctgctgtcactccaag

SEQ ID NO: 5964693 - DNA, 25 bp, Homo sapien
ccgctaagggtagacatgaccctgc

SEQ ID NO: 5964694 - DNA, 25 bp, Homo sapien
acctcacgactactccgacatggac

SEQ ID NO: 5964695 - DNA, 25 bp, Homo sapien
tcagcatctgttgaacaccatcacc

SEQ ID NO: 5964696 - DNA, 25 bp, Homo sapien
ccgtgtcgcttcaggtgccattgct

SEQ ID NO: 5964697 - DNA, 25 bp, Homo sapien
gaaattggctcaggttttcagggtg

SEQ ID NO: 5964698 - DNA, 25 bp, Homo sapien
cgatcctgaatttcagcatctgttg

SEQ ID NO: 5964699 - DNA, 25 bp, Homo sapien
ctcatgctatgttgtccattccagc

SEQ ID NO: 5964700 - DNA, 25 bp, Homo sapien
agtacagaggcaacaaggactctat

SEQ ID NO: 5964701 - DNA, 25 bp, Homo sapien
cagggtccaagcacaatgacccatt

SEQ ID NO: 5964702 - DNA, 25 bp, Homo sapien
actctaatgtcgagatcgtagcctt

SEQ ID NO: 5964703 - DNA, 25 bp, Homo sapien
accggtctcggtgagccatgctttg

SEQ ID NO: 5964704 - DNA, 25 bp, Homo sapien
agttccctagaccttcccatgcgga

SEQ ID NO: 5964705 - DNA, 25 bp, Homo sapien
ctatcgacccctagagacgaaaagg

SEQ ID NO: 5964706 - DNA, 25 bp, Homo sapien
gatggtgaagaaggtatcttagccg

SEQ ID NO: 5964707 - DNA, 25 bp, Homo sapien
accatcaccagggaaaaagtggact

SEQ ID NO: 5964708 - DNA, 25 bp, Homo sapien
agcatctgttgaacaccatcaccag

SEQ ID NO: 5964709 - DNA, 25 bp, Homo sapien
tctctgtcccattcaagtcagtggc

SEQ ID NO: 5964710 - DNA, 25 bp, Homo sapien
ctaccggtctcggtgagccatgctt

SEQ ID NO: 5964711 - DNA, 25 bp, Homo sapien
cgtcaccacatatggtgaatcgcat

SEQ ID NO: 5964712 - DNA, 25 bp, Homo sapien
gtggtatctctaatggtgagaacat

SEQ ID NO: 5964713 - DNA, 25 bp, Homo sapien
ctatgttgtccattccagcatccaa

SEQ ID NO: 5964714 - DNA, 25 bp, Homo sapien
ggactcaatgggtcctatcagatgt

SEQ ID NO: 5964715 - DNA, 25 bp, Homo sapien
aggtgccattgctgagaagttctta

SEQ ID NO: 5964716 - DNA, 25 bp, Homo sapien
tccaagggtttcgaaattggctcag

SEQ ID NO: 5964717 - DNA, 25 bp, Homo sapien
ttcgatcctgaatttcagcatctgt

SEQ ID NO: 5964718 - DNA, 25 bp, Homo sapien
gccatgctttgacaagttggaagcc

SEQ ID NO: 5964719 - DNA, 25 bp, Homo sapien
cagaactctaatgtcgagatcgtag

SEQ ID NO: 5964720 - DNA, 25 bp, Homo sapien
ttcctccaggaatgtcattaaccga

SEQ ID NO: 5964721 - DNA, 25 bp, Homo sapien
aggaccaaagacctcacgactactc

SEQ ID NO: 5964722 - DNA, 25 bp, Homo sapien
cgcgtcaccacatatggtgaatcgc

SEQ ID NO: 5964723 - DNA, 25 bp, Homo sapien
agttggaagccatgttggctcatgc

SEQ ID NO: 5964724 - DNA, 25 bp, Homo sapien
gaaatcgaaaagtacagaggcaaca

SEQ ID NO: 5964725 - DNA, 25 bp, Homo sapien
ggaatgtcattaaccgaagctgaca

SEQ ID NO: 5964726 - DNA, 25 bp, Homo sapien
atcagatgtccagacgcctccgttg

SEQ ID NO: 5964727 - DNA, 25 bp, Homo sapien
tgagaagttcttagctcagaactct

SEQ ID NO: 5964728 - DNA, 25 bp, Homo sapien
agaagttcttagctcagaactctaa

SEQ ID NO: 5964729 - DNA, 25 bp, Homo sapien
ttggctcaggttttcagggtgtctc

SEQ ID NO: 5964730 - DNA, 25 bp, Homo sapien
ccctagaccttcccatgcggacttc

SEQ ID NO: 5964731 - DNA, 25 bp, Homo sapien
atgttgtccattccagcatccaagg

SEQ ID NO: 5964732 - DNA, 25 bp, Homo sapien
agaaacttgcctaccggtctcggtg

SEQ ID NO: 5964733 - DNA, 25 bp, Homo sapien
ttcctattgtggaagccatgaccgc

SEQ ID NO: 5964734 - DNA, 25 bp, Homo sapien
gaccaaagacctcacgactactccg

SEQ ID NO: 5964735 - DNA, 25 bp, Homo sapien
tgaacagagactctttcgatcctga

SEQ ID NO: 5964736 - DNA, 25 bp, Homo sapien
cttcaggtgccattgctgagaagtt

SEQ ID NO: 5964737 - DNA, 25 bp, Homo sapien
aagtctgtcggttgcattgtcgacg

SEQ ID NO: 5964738 - DNA, 25 bp, Homo sapien
cggtatcaaggcctcctctggtggt

SEQ ID NO: 5964739 - DNA, 25 bp, Homo sapien
attaaccgaagctgacattcagcca

SEQ ID NO: 5964740 - DNA, 25 bp, Homo sapien
accgctctggtgttggctgacgcgc

SEQ ID NO: 5964741 - DNA, 25 bp, Homo sapien
tattcctattgtggaagccatgacc

SEQ ID NO: 5964742 - DNA, 25 bp, Homo sapien
gacgcgcttttgatccaaaaggcaa

SEQ ID NO: 5964743 - DNA, 25 bp, Homo sapien
aaaggatagagtggaaatccagtcc

SEQ ID NO: 5964744 - DNA, 25 bp, Homo sapien
ttcacgtactcggaaaagtacggta

SEQ ID NO: 5964745 - DNA, 25 bp, Homo sapien
tacacccatcgccatgatgatcaaa

SEQ ID NO: 5964746 - DNA, 25 bp, Homo sapien
ggactctatcggtggtgtcgtcact

SEQ ID NO: 5964747 - DNA, 25 bp, Homo sapien
aggatagagtggaaatccagtccgg

SEQ ID NO: 5964748 - DNA, 25 bp, Homo sapien
acgatggtgaagaaggtatcttagc

SEQ ID NO: 5964749 - DNA, 25 bp, Homo sapien
cggtctcggtgagccatgctttgac

SEQ ID NO: 5964750 - DNA, 25 bp, Homo sapien
cattccagcatccaagggtttcgaa

SEQ ID NO: 5964751 - DNA, 25 bp, Homo sapien
atgacccattttactttgaaaaaga

SEQ ID NO: 5964752 - DNA, 25 bp, Homo sapien
tctcttgccttttggatcaaaagcg

SEQ ID NO: 5964753 - DNA, 25 bp, Homo sapien
tcatgtctacccttagcggctaaga

SEQ ID NO: 5964754 - DNA, 25 bp, Homo sapien
cgaaacccttggatgctggaatgga

SEQ ID NO: 5964755 - DNA, 25 bp, Homo sapien
aattgttggtctttgttcttaatct

SEQ ID NO: 5964756 - DNA, 25 bp, Homo sapien
atgtctacccttagcggctaagata

SEQ ID NO: 5964757 - DNA, 25 bp, Homo sapien
attcctggaggaacaccgtcgacaa

SEQ ID NO: 5964758 - DNA, 25 bp, Homo sapien
agttctgagctaagaacttctcagc

SEQ ID NO: 5964759 - DNA, 25 bp, Homo sapien
ctgataggacccattgagtccactt

SEQ ID NO: 5964760 - DNA, 25 bp, Homo sapien
ctttttccctggtgatggtgttcaa

SEQ ID NO: 5964761 - DNA, 25 bp, Homo sapien
agtggccactgacttgaatgggaca

SEQ ID NO: 5964762 - DNA, 25 bp, Homo sapien
atggcgatgggtgtacctagagtct

SEQ ID NO: 5964763 - DNA, 25 bp, Homo sapien
catcgtaagtggcggttttttgttc

SEQ ID NO: 5964764 - DNA, 25 bp, Homo sapien
ggactggatttccactctatccttt

SEQ ID NO: 5964765 - DNA, 25 bp, Homo sapien
atggcttccacaataggaatagctc

SEQ ID NO: 5964766 - DNA, 25 bp, Homo sapien
cacctgaattgttggtctttgttct

SEQ ID NO: 5964767 - DNA, 25 bp, Homo sapien
cgtcgacaatgcaaccgacagactt

SEQ ID NO: 5964768 - DNA, 25 bp, Homo sapien
accacctgaattgttggtctttgtt

SEQ ID NO: 5964769 - DNA, 25 bp, Homo sapien
tccgcatgggaaggtctagggaact

SEQ ID NO: 5964770 - DNA, 25 bp, Homo sapien
acatggcttccaacttgtcaaagca

SEQ ID NO: 5964771 - DNA, 25 bp, Homo sapien
cattagagttctgagctaagaactt

SEQ ID NO: 5964772 - DNA, 25 bp, Homo sapien
accattagagataccaccttgtaca

SEQ ID NO: 5964773 - DNA, 25 bp, Homo sapien
gggaacttgtccatgtcggagtagt

SEQ ID NO: 5964774 - DNA, 25 bp, Homo sapien
gataccgtacttttccgagtacgtg

SEQ ID NO: 5964775 - DNA, 25 bp, Homo sapien
ccaccgatagagtccttgttgcctc

SEQ ID NO: 5964776 - DNA, 25 bp, Homo sapien
aagcgcgtcagccaacaccagagcg

SEQ ID NO: 5964777 - DNA, 25 bp, Homo sapien
taatgaaccacggatctggagaaat

SEQ ID NO: 5964778 - DNA, 25 bp, Homo sapien
tgacgacaccaccgatagagtcctt

SEQ ID NO: 5964779 - DNA, 25 bp, Homo sapien
gaaagagtctctgttcatcttgatt

SEQ ID NO: 5964780 - DNA, 25 bp, Homo sapien
cagacttacaatgcgattcaccata

SEQ ID NO: 5964781 - DNA, 25 bp, Homo sapien
tctctaggggtcgatagcttagatt

SEQ ID NO: 5964782 - DNA, 25 bp, Homo sapien
acatctgataggacccattgagtcc

SEQ ID NO: 5964783 - DNA, 25 bp, Homo sapien
ggcacctgaagcgacacggccaatc

SEQ ID NO: 5964784 - DNA, 25 bp, Homo sapien
agtgacgacaccaccgatagagtcc

SEQ ID NO: 5964785 - DNA, 25 bp, Homo sapien
tttgttcttgagagatagtggccac

SEQ ID NO: 5964786 - DNA, 25 bp, Homo sapien
agtccttgttgcctctgtacttttc

SEQ ID NO: 5964787 - DNA, 25 bp, Homo sapien
ttgcctctgtacttttcgatttcct

SEQ ID NO: 5964788 - DNA, 25 bp, Homo sapien
ggttaatgacattcctggaggaaca

SEQ ID NO: 5964789 - DNA, 25 bp, Homo sapien
acccggtcttcttctggtcaattgt

SEQ ID NO: 5964790 - DNA, 25 bp, Homo sapien
agtccactttttccctggtgatggt

SEQ ID NO: 5964791 - DNA, 25 bp, Homo sapien
attgagtccactttttccctggtga

SEQ ID NO: 5964792 - DNA, 25 bp, Homo sapien
tagggaacttgtccatgtcggagta

SEQ ID NO: 5964793 - DNA, 25 bp, Homo sapien
tacaatgcgattcaccatatgtggt

SEQ ID NO: 5964794 - DNA, 25 bp, Homo sapien
ctgtacttttcgatttccttgacca

SEQ ID NO: 5964795 - DNA, 25 bp, Homo sapien
tcagcttcggttaatgacattcctg

SEQ ID NO: 5964796 - DNA, 25 bp, Homo sapien
tttttgttcttgagagatagtggcc

SEQ ID NO: 5964797 - DNA, 25 bp, Homo sapien
gccaacatggcttccaacttgtcaa

SEQ ID NO: 5964798 - DNA, 25 bp, Homo sapien
catcatggcgatgggtgtacctaga

SEQ ID NO: 5964799 - DNA, 25 bp, Homo sapien
ctggacatctgataggacccattga

SEQ ID NO: 5964800 - DNA, 25 bp, Homo sapien
cttgttgcctctgtacttttcgatt

SEQ ID NO: 5964801 - DNA, 25 bp, Homo sapien
aaacccttggatgctggaatggaca

SEQ ID NO: 5964802 - DNA, 25 bp, Homo sapien
aagtaaaatgggtcattgtgcttgg

SEQ ID NO: 5964803 - DNA, 25 bp, Homo sapien
gccaatcgtttctctagcagaagct

SEQ ID NO: 5964804 - DNA, 25 bp, Homo sapien
ccctggtgatggtgttcaacagatg

SEQ ID NO: 5964805 - DNA, 25 bp, Homo sapien
caccagaggaggccttgataccgta

SEQ ID NO: 5964806 - DNA, 25 bp, Homo sapien
caattgtggctgaatgtcagcttcg

SEQ ID NO: 5964807 - DNA, 25 bp, Homo sapien
gcaaccgacagacttacaatgcgat

SEQ ID NO: 5964808 - DNA, 25 bp, Homo sapien
caacagatgctgaaattcaggatcg

SEQ ID NO: 5964809 - DNA, 25 bp, Homo sapien
tttttgatcatcatggcgatgggtg

SEQ ID NO: 5964810 - DNA, 25 bp, Homo sapien
gtgtcacaaaggctacgatctcgac

SEQ ID NO: 5964811 - DNA, 25 bp, Homo sapien
tgtgcttggaccctggaacagagac

SEQ ID NO: 5964812 - DNA, 25 bp, Homo sapien
tgatcatcatggcgatgggtgtacc

SEQ ID NO: 5964813 - DNA, 25 bp, Homo sapien
caacatggcttccaacttgtcaaag

SEQ ID NO: 5964814 - DNA, 25 bp, Homo sapien
aagcatggctcaccgagaccggtag

SEQ ID NO: 5964815 - DNA, 25 bp, Homo sapien
acgacacaagtgacgacaccaccga

SEQ ID NO: 5964816 - DNA, 25 bp, Homo sapien
ccatatgtggtgacgcggaacagtt

SEQ ID NO: 5964817 - DNA, 25 bp, Homo sapien
ccggtcttcttctggtcaattgtgg

SEQ ID NO: 5964818 - DNA, 25 bp, Homo sapien
ccctggaacagagacaccctgaaaa

SEQ ID NO: 5964819 - DNA, 25 bp, Homo sapien
agctcttggagtgacagcagggtca

SEQ ID NO: 5964820 - DNA, 25 bp, Homo sapien
aagctctgccaccaccagaggaggc

SEQ ID NO: 5964821 - DNA, 25 bp, Homo sapien
gtggcggttttttgttcttgagaga

SEQ ID NO: 5964822 - DNA, 25 bp, Homo sapien
gatctggagaaatctcttgcctttt

SEQ ID NO: 5964823 - DNA, 25 bp, Homo sapien
gccaatttcgaaacccttggatgct

SEQ ID NO: 5964824 - DNA, 25 bp, Homo sapien
ggcgatgggtgtacctagagtcttg

SEQ ID NO: 5964825 - DNA, 25 bp, Homo sapien
gagtgacagcagggtcatgtctacc

SEQ ID NO: 5964826 - DNA, 25 bp, Homo sapien
caatgcgattcaccatatgtggtga

SEQ ID NO: 5964827 - DNA, 25 bp, Homo sapien
aggaggccttgataccgtacttttc

SEQ ID NO: 5964828 - DNA, 25 bp, Homo sapien
gcttagattgacccggtcttcttct

SEQ ID NO: 5964829 - DNA, 25 bp, Homo sapien
caataggaatagctcttggagtgac

SEQ ID NO: 5964830 - DNA, 25 bp, Homo sapien
tgggaaggtctagggaacttgtcca

SEQ ID NO: 5964831 - DNA, 25 bp, Homo sapien
ccttttcgtctctaggggtcgatag

SEQ ID NO: 5964832 - DNA, 25 bp, Homo sapien
ctgacttgaatgggacagagaaata

SEQ ID NO: 5964833 - DNA, 25 bp, Homo sapien
ggtgacgcggaacagtttcccaaac

SEQ ID NO: 5964834 - DNA, 25 bp, Homo sapien
cctgaattgttggtctttgttctta

SEQ ID NO: 5964835 - DNA, 25 bp, Homo sapien
ttttcaaagtaaaatgggtcattgt

SEQ ID NO: 5964836 - DNA, 25 bp, Homo sapien
aaaatgggtcattgtgcttggaccc

SEQ ID NO: 5964837 - DNA, 25 bp, Homo sapien
ggaacagtttcccaaacgttgacat

SEQ ID NO: 5964838 - DNA, 25 bp, Homo sapien
cgatttccttgaccatcaaaccagc

SEQ ID NO: 5964839 - DNA, 25 bp, Homo sapien
caccgagaccggtaggcaagtttct

SEQ ID NO: 5964840 - DNA, 25 bp, Homo sapien
caaagcatggctcaccgagaccggt

SEQ ID NO: 5964841 - DNA, 25 bp, Homo sapien
cttgaatgggacagagaaatagatg

SEQ ID NO: 5964842 - DNA, 25 bp, Homo sapien
accgtcgacaatgcaaccgacagac

SEQ ID NO: 5964843 - DNA, 25 bp, Homo sapien
gctaagataccttcttcaccatcgt

SEQ ID NO: 5964844 - DNA, 25 bp, Homo sapien
ctctgtacttttcgatttccttgac

SEQ ID NO: 5964845 - DNA, 25 bp, Homo sapien
cactgacttgaatgggacagagaaa

SEQ ID NO: 5964846 - DNA, 25 bp, Homo sapien
ccttggatgctggaatggacaacat

SEQ ID NO: 5964847 - DNA, 25 bp, Homo sapien
attgacccggtcttcttctggtcaa

SEQ ID NO: 5964848 - DNA, 25 bp, Homo sapien
gctgaaattcaggatcgaaagagtc

SEQ ID NO: 5964849 - DNA, 25 bp, Homo sapien
ataccaccttgtacaccacctgaat

SEQ ID NO: 5964850 - DNA, 25 bp, Homo sapien
cacggccaatcgtttctctagcaga

SEQ ID NO: 5964851 - DNA, 25 bp, Homo sapien
aagagtctctgttcatcttgatttc

SEQ ID NO: 5964852 - DNA, 25 bp, Homo sapien
tggatcaaaagcgcgtcagccaaca

SEQ ID NO: 5964853 - DNA, 25 bp, Homo sapien
atgctgaaattcaggatcgaaagag

SEQ ID NO: 5964854 - DNA, 25 bp, Homo sapien
tctaggggtcgatagcttagattga

SEQ ID NO: 5964855 - DNA, 25 bp, Homo sapien
acttttcgatttccttgaccatcaa

SEQ ID NO: 5964856 - DNA, 25 bp, Homo sapien
ccagcaacggaggcgtctggacatc

SEQ ID NO: 5964857 - DNA, 25 bp, Homo sapien
ggtaccggactggatttccactcta

SEQ ID NO: 5964858 - DNA, 25 bp, Homo sapien
gacagcagggtcatgtctaccctta

SEQ ID NO: 5964859 - DNA, 25 bp, Homo sapien
tctgccaccaccagaggaggccttg

SEQ ID NO: 5964860 - DNA, 25 bp, Homo sapien
ttttccctggtgatggtgttcaaca

SEQ ID NO: 5964861 - DNA, 25 bp, Homo sapien
ctggtgatggtgttcaacagatgct

SEQ ID NO: 5964862 - DNA, 25 bp, Homo sapien
acttttccgagtacgtgaagtccgc

SEQ ID NO: 5964863 - DNA, 25 bp, Homo sapien
atggacaacatagcatgagccaaca

SEQ ID NO: 5964864 - DNA, 25 bp, Homo sapien
gacattagagttctgagctaagaac

SEQ ID NO: 5964865 - DNA, 25 bp, Homo sapien
agatgttctcaccattagagatacc

SEQ ID NO: 5964866 - DNA, 25 bp, Homo sapien
acggaggcgtctggacatctgatag

SEQ ID NO: 5964867 - DNA, 25 bp, Homo sapien
acattcctggaggaacaccgtcgac

SEQ ID NO: 5964868 - DNA, 25 bp, Homo sapien
ctacccttagcggctaagatacctt

SEQ ID NO: 5964869 - DNA, 25 bp, Homo sapien
ctagagtcttgccgaactcggtacc

SEQ ID NO: 5964870 - DNA, 25 bp, Homo sapien
cggccaatcgtttctctagcagaag

SEQ ID NO: 5964871 - DNA, 25 bp, Homo sapien
aagcgacacggccaatcgtttctct

SEQ ID NO: 5964872 - DNA, 25 bp, Homo sapien
ccaccaccagaggaggccttgatac

SEQ ID NO: 5964873 - DNA, 25 bp, Homo sapien
ctgaaaacctgagccaatttcgaaa

SEQ ID NO: 5964874 - DNA, 25 bp, Homo sapien
ggtgttcaacagatgctgaaattca

SEQ ID NO: 5964875 - DNA, 25 bp, Homo sapien
gaaccacggatctggagaaatctct

SEQ ID NO: 5964876 - DNA, 25 bp, Homo sapien
tgcttggaccctggaacagagacac

SEQ ID NO: 5964877 - DNA, 25 bp, Homo sapien
tttggatcaaaagcgcgtcagccaa

SEQ ID NO: 5964878 - DNA, 25 bp, Homo sapien
cctgaagcgacacggccaatcgttt

SEQ ID NO: 5964879 - DNA, 25 bp, Homo sapien
taggcaagtttctcacgacacaagt

SEQ ID NO: 5964880 - DNA, 25 bp, Homo sapien
atgtcggagtagtcgtgaggtcttt

SEQ ID NO: 5964881 - DNA, 25 bp, Homo sapien
cttggaccctggaacagagacaccc

SEQ ID NO: 5964882 - DNA, 25 bp, Homo sapien
gagtagtcgtgaggtctttggtcct

SEQ ID NO: 5964883 - DNA, 25 bp, Homo sapien
tagcttagattgacccggtcttctt

SEQ ID NO: 5964884 - DNA, 25 bp, Homo sapien
gcgacacggccaatcgtttctctag

SEQ ID NO: 5964885 - DNA, 25 bp, Homo sapien
gcagggtcatgtctacccttagcgg

SEQ ID NO: 5964886 - DNA, 25 bp, Homo sapien
tgacccggtcttcttctggtcaatt

SEQ ID NO: 5964887 - DNA, 25 bp, Homo sapien
gtcaaagcatggctcaccgagaccg

SEQ ID NO: 5964888 - DNA, 25 bp, Homo sapien
acaacatagcatgagccaacatggc

SEQ ID NO: 5964889 - DNA, 25 bp, Homo sapien
tgggacagagaaatagatgttctca

SEQ ID NO: 5964890 - DNA, 25 bp, Homo sapien
accttcttcaccatcgtaagtggcg

SEQ ID NO: 5964891 - DNA, 25 bp, Homo sapien
ctcgtttttgatcatcatggcgatg

SEQ ID NO: 5964892 - DNA, 25 bp, Homo sapien
gccaacaccagagcggtcatggctt

SEQ ID NO: 5964893 - DNA, 25 bp, Homo sapien
atggtgttcaacagatgctgaaatt

SEQ ID NO: 5964894 - DNA, 25 bp, Homo sapien
tggtctttgttcttaatctgtttgt

SEQ ID NO: 5964895 - DNA, 25 bp, Homo sapien
aaccagcaacggaggcgtctggaca

SEQ ID NO: 5964896 - DNA, 25 bp, Homo sapien
aatgggtcattgtgcttggaccctg

SEQ ID NO: 5964897 - DNA, 25 bp, Homo sapien
ccgagtacgtgaagtccgcatggga

SEQ ID NO: 5964898 - DNA, 25 bp, Homo sapien
ggtcattgtgcttggaccctggaac

SEQ ID NO: 5964899 - DNA, 25 bp, Homo sapien
atttgtgtcacaaaggctacgatct

SEQ ID NO: 5964900 - DNA, 25 bp, Homo sapien
ggaaggtctagggaacttgtccatg

SEQ ID NO: 5964901 - DNA, 25 bp, Homo sapien
tcattgtgcttggaccctggaacag

SEQ ID NO: 5964902 - DNA, 25 bp, Homo sapien
gataggacccattgagtccactttt

SEQ ID NO: 5964903 - DNA, 25 bp, Homo sapien
atgtggtgacgcggaacagtttccc

SEQ ID NO: 5964904 - DNA, 25 bp, Homo sapien
accaccagaggaggccttgataccg

SEQ ID NO: 5964905 - DNA, 25 bp, Homo sapien
ataccttcttcaccatcgtaagtgg

SEQ ID NO: 5964906 - DNA, 25 bp, Homo sapien
cacctgaagcgacacggccaatcgt

SEQ ID NO: 5964907 - DNA, 25 bp, Homo sapien
ttcttctggtcaattgtggctgaat

SEQ ID NO: 5964908 - DNA, 25 bp, Homo sapien
gacttgaatgggacagagaaataga

SEQ ID NO: 5964909 - DNA, 25 bp, Homo sapien
ggcttccaacttgtcaaagcatggc

SEQ ID NO: 5964910 - DNA, 25 bp, Homo sapien
ccatcaaaccagcaacggaggcgtc

SEQ ID NO: 5964911 - DNA, 25 bp, Homo sapien
agagaaatagatgttctcaccatta

SEQ ID NO: 5964912 - DNA, 25 bp, Homo sapien
cccgatttgtgtcacaaaggctacg

SEQ ID NO: 5964913 - DNA, 25 bp, Homo sapien
accagagcggtcatggcttccacaa

SEQ ID NO: 5964914 - DNA, 25 bp, Homo sapien
tcaggatcgaaagagtctctgttca

SEQ ID NO: 5964915 - DNA, 25 bp, Homo sapien
agagataccaccttgtacaccacct

SEQ ID NO: 5964916 - DNA, 25 bp, Homo sapien
gccactgacttgaatgggacagaga

SEQ ID NO: 5964917 - DNA, 25 bp, Homo sapien
atcatcatggcgatgggtgtaccta

SEQ ID NO: 5964918 - DNA, 25 bp, Homo sapien
agaagctctgccaccaccagaggag

SEQ ID NO: 5964919 - DNA, 25 bp, Homo sapien
tggaccctggaacagagacaccctg

SEQ ID NO: 5964920 - DNA, 25 bp, Homo sapien
tgagagatagtggccactgacttga

SEQ ID NO: 5964921 - DNA, 25 bp, Homo sapien
aatctcttgccttttggatcaaaag

SEQ ID NO: 5964922 - DNA, 25 bp, Homo sapien
ccttagcggctaagataccttcttc

SEQ ID NO: 5964923 - DNA, 25 bp, Homo sapien
ttttcgatttccttgaccatcaaac

SEQ ID NO: 5964924 - DNA, 25 bp, Homo sapien
gacagacttacaatgcgattcacca

SEQ ID NO: 5964925 - DNA, 25 bp, Homo sapien
tctcaccattagagataccaccttg

SEQ ID NO: 5964926 - DNA, 25 bp, Homo sapien
tgccaccaccagaggaggccttgat

SEQ ID NO: 5964927 - DNA, 25 bp, Homo sapien
cactctatccttttcgtctctaggg

SEQ ID NO: 5964928 - DNA, 25 bp, Homo sapien
tctttttcaaagtaaaatgggtcat

SEQ ID NO: 5964929 - DNA, 25 bp, Homo sapien
tcatggcttccacaataggaatagc

SEQ ID NO: 5964930 - DNA, 25 bp, Homo sapien
ggacatctgataggacccattgagt

SEQ ID NO: 5964931 - DNA, 25 bp, Homo sapien
tctcacgacacaagtgacgacacca

SEQ ID NO: 5964932 - DNA, 25 bp, Homo sapien
gagccaacatggcttccaacttgtc

SEQ ID NO: 5964933 - DNA, 25 bp, Homo sapien
tctagcagaagctctgccaccacca

SEQ ID NO: 5964934 - DNA, 25 bp, Homo sapien
ttgccgaactcggtaccggactgga

SEQ ID NO: 5964935 - DNA, 25 bp, Homo sapien
gacaccaccgatagagtccttgttg

SEQ ID NO: 5964936 - DNA, 25 bp, Homo sapien
gtacttttccgagtacgtgaagtcc

SEQ ID NO: 5964937 - DNA, 25 bp, Homo sapien
ttagattgacccggtcttcttctgg

SEQ ID NO: 5964938 - DNA, 25 bp, Homo sapien
taggacccattgagtccactttttc

SEQ ID NO: 5964939 - DNA, 25 bp, Homo sapien
ggtcgatagcttagattgacccggt

SEQ ID NO: 5964940 - DNA, 25 bp, Homo sapien
ggacaacatagcatgagccaacatg

SEQ ID NO: 5964941 - DNA, 25 bp, Homo sapien
gaacttgtccatgtcggagtagtcg

SEQ ID NO: 5964942 - DNA, 25 bp, Homo sapien
ttcaaagtaaaatgggtcattgtgc

SEQ ID NO: 5964943 - DNA, 25 bp, Homo sapien
cttcggttaatgacattcctggagg

SEQ ID NO: 5964944 - DNA, 25 bp, Homo sapien
gtgtacctagagtcttgccgaactc

SEQ ID NO: 5964945 - DNA, 25 bp, Homo sapien
tgttcttgagagatagtggccactg

SEQ ID NO: 5964946 - DNA, 25 bp, Homo sapien
ctgagccaatttcgaaacccttgga

SEQ ID NO: 5964947 - DNA, 25 bp, Homo sapien
gacttacaatgcgattcaccatatg

SEQ ID NO: 5964948 - DNA, 25 bp, Homo sapien
cttctggtcaattgtggctgaatgt

SEQ ID NO: 5964949 - DNA, 25 bp, Homo sapien
tgaggtctttggtcctcgtttttga

SEQ ID NO: 5964950 - DNA, 25 bp, Homo sapien
ttcgtctctaggggtcgatagctta

SEQ ID NO: 5964951 - DNA, 25 bp, Homo sapien
agataccttcttcaccatcgtaagt

SEQ ID NO: 5964952 - DNA, 25 bp, Homo sapien
tcttgatttccccgatttgtgtcac

SEQ ID NO: 5964953 - DNA, 25 bp, Homo sapien
tgaatgtcagcttcggttaatgaca

SEQ ID NO: 5964954 - DNA, 25 bp, Homo sapien
ttggtcctcgtttttgatcatcatg

SEQ ID NO: 5964955 - DNA, 25 bp, Homo sapien
agtcgtgaggtctttggtcctcgtt

SEQ ID NO: 5964956 - DNA, 25 bp, Homo sapien
ttgccttttggatcaaaagcgcgtc

SEQ ID NO: 5964957 - DNA, 25 bp, Homo sapien
ggatgctggaatggacaacatagca

SEQ ID NO: 5964958 - DNA, 25 bp, Homo sapien
tctggtcaattgtggctgaatgtca

SEQ ID NO: 5964959 - DNA, 25 bp, Homo sapien
gtgaagtccgcatgggaaggtctag

SEQ ID NO: 5964960 - DNA, 25 bp, Homo sapien
ggccttgataccgtacttttccgag

SEQ ID NO: 5964961 - DNA, 25 bp, Homo sapien
ttttccgagtacgtgaagtccgcat

SEQ ID NO: 5964962 - DNA, 25 bp, Homo sapien
acagagaaatagatgttctcaccat

SEQ ID NO: 5964963 - DNA, 25 bp, Homo sapien
tctagggaacttgtccatgtcggag

SEQ ID NO: 5964964 - DNA, 25 bp, Homo sapien
cagccaacaccagagcggtcatggc

SEQ ID NO: 5964965 - DNA, 25 bp, Homo sapien
ccttgtacaccacctgaattgttgg

SEQ ID NO: 5964966 - DNA, 25 bp, Homo sapien
tgatggtgttcaacagatgctgaaa

SEQ ID NO: 5964967 - DNA, 25 bp, Homo sapien
caaaccagcaacggaggcgtctgga

SEQ ID NO: 5964968 - DNA, 25 bp, Homo sapien
gtgacagcagggtcatgtctaccct

SEQ ID NO: 5964969 - DNA, 25 bp, Homo sapien
ggtcctcgtttttgatcatcatggc

SEQ ID NO: 5964970 - DNA, 25 bp, Homo sapien
atagagtccttgttgcctctgtact

SEQ ID NO: 5964971 - DNA, 25 bp, Homo sapien
tcctggaggaacaccgtcgacaatg

SEQ ID NO: 5964972 - DNA, 25 bp, Homo sapien
cactttttccctggtgatggtgttc

SEQ ID NO: 5964973 - DNA, 25 bp, Homo sapien
gattcaccatatgtggtgacgcgga

SEQ ID NO: 5964974 - DNA, 25 bp, Homo sapien
tccacaataggaatagctcttggag

SEQ ID NO: 5964975 - DNA, 25 bp, Homo sapien
atagtggccactgacttgaatggga

SEQ ID NO: 5964976 - DNA, 25 bp, Homo sapien
aggatcgaaagagtctctgttcatc

SEQ ID NO: 5964977 - DNA, 25 bp, Homo sapien
gtacgtgaagtccgcatgggaaggt

SEQ ID NO: 5964978 - DNA, 25 bp, Homo sapien
ggggtcgatagcttagattgacccg

SEQ ID NO: 5964979 - DNA, 25 bp, Homo sapien
tggccactgacttgaatgggacaga

SEQ ID NO: 5964980 - DNA, 25 bp, Homo sapien
ttccctggtgatggtgttcaacaga

SEQ ID NO: 5964981 - DNA, 25 bp, Homo sapien
cattagagataccaccttgtacacc

SEQ ID NO: 5964982 - DNA, 25 bp, Homo sapien
gaccatcaaaccagcaacggaggcg

SEQ ID NO: 5964983 - DNA, 25 bp, Homo sapien
catagcatgagccaacatggcttcc

SEQ ID NO: 5964984 - DNA, 25 bp, Homo sapien
cgtctctaggggtcgatagcttaga

SEQ ID NO: 5964985 - DNA, 25 bp, Homo sapien
tgagtccactttttccctggtgatg

SEQ ID NO: 5964986 - DNA, 25 bp, Homo sapien
cttggagtgacagcagggtcatgtc

SEQ ID NO: 5964987 - DNA, 25 bp, Homo sapien
cgatgggtgtacctagagtcttgcc

SEQ ID NO: 5964988 - DNA, 25 bp, Homo sapien
aatgtcagcttcggttaatgacatt

SEQ ID NO: 5964989 - DNA, 25 bp, Homo sapien
ggcggttttttgttcttgagagata

SEQ ID NO: 5964990 - DNA, 25 bp, Homo sapien
gaacaccgtcgacaatgcaaccgac

SEQ ID NO: 5964991 - DNA, 25 bp, Homo sapien
tcttgccgaactcggtaccggactg

SEQ ID NO: 5964992 - DNA, 25 bp, Homo sapien
cggagtagtcgtgaggtctttggtc

SEQ ID NO: 5964993 - DNA, 25 bp, Homo sapien
cttccacaataggaatagctcttgg

SEQ ID NO: 5964994 - DNA, 25 bp, Homo sapien
cttacaatgcgattcaccatatgtg

SEQ ID NO: 5964995 - DNA, 25 bp, Homo sapien
ttttcgtctctaggggtcgatagct

SEQ ID NO: 5964996 - DNA, 25 bp, Homo sapien
actggatttccactctatccttttc

SEQ ID NO: 5964997 - DNA, 25 bp, Homo sapien
ttagagttctgagctaagaacttct

SEQ ID NO: 5964998 - DNA, 25 bp, Homo sapien
tggagtgacagcagggtcatgtcta

SEQ ID NO: 5964999 - DNA, 25 bp, Homo sapien
atgaaccacggatctggagaaatct

SEQ ID NO: 5965000 - DNA, 25 bp, Homo sapien
gttggtctttgttcttaatctgttt

SEQ ID NO: 5965001 - DNA, 25 bp, Homo sapien
gagtctctgttcatcttgatttccc

SEQ ID NO: 5965002 - DNA, 25 bp, Homo sapien
gcatgagccaacatggcttccaact

SEQ ID NO: 5965003 - DNA, 25 bp, Homo sapien
tctcagcaatggcacctgaagcgac

SEQ ID NO: 5965004 - DNA, 25 bp, Homo sapien
ttccgagtacgtgaagtccgcatgg

SEQ ID NO: 5965005 - DNA, 25 bp, Homo sapien
ttctgagctaagaacttctcagcaa

SEQ ID NO: 5965006 - DNA, 25 bp, Homo sapien
tccttgttgcctctgtacttttcga

SEQ ID NO: 5965007 - DNA, 25 bp, Homo sapien
tcttgccttttggatcaaaagcgcg

SEQ ID NO: 5965008 - DNA, 25 bp, Homo sapien
gtcaattgtggctgaatgtcagctt

SEQ ID NO: 5965009 - DNA, 25 bp, Homo sapien
taagaacttctcagcaatggcacct

SEQ ID NO: 5965010 - DNA, 25 bp, Homo sapien
attgtgcttggaccctggaacagag

SEQ ID NO: 5965011 - DNA, 25 bp, Homo sapien
ttcgaaacccttggatgctggaatg

SEQ ID NO: 5965012 - DNA, 25 bp, Homo sapien
tcacgacacaagtgacgacaccacc

SEQ ID NO: 5965013 - DNA, 25 bp, Homo sapien
ttgtacaccacctgaattgttggtc

SEQ ID NO: 5965014 - DNA, 25 bp, Homo sapien
cacggatctggagaaatctcttgcc

SEQ ID NO: 5965015 - DNA, 25 bp, Homo sapien
acccttggatgctggaatggacaac

SEQ ID NO: 5965016 - DNA, 25 bp, Homo sapien
agagatagtggccactgacttgaat

SEQ ID NO: 5965017 - DNA, 25 bp, Homo sapien
agtttctcacgacacaagtgacgac

SEQ ID NO: 5965018 - DNA, 25 bp, Homo sapien
gagtacgtgaagtccgcatgggaag

SEQ ID NO: 5965019 - DNA, 25 bp, Homo sapien
ctggaggaacaccgtcgacaatgca

SEQ ID NO: 5965020 - DNA, 25 bp, Homo sapien
gaccctggaacagagacaccctgaa

SEQ ID NO: 5965021 - DNA, 25 bp, Homo sapien
gatttccccgatttgtgtcacaaag

SEQ ID NO: 5965022 - DNA, 25 bp, Homo sapien
aaggctacgatctcgacattagagt

SEQ ID NO: 5965023 - DNA, 25 bp, Homo sapien
attcaggatcgaaagagtctctgtt

SEQ ID NO: 5965024 - DNA, 25 bp, Homo sapien
catgggaaggtctagggaacttgtc

SEQ ID NO: 5965025 - DNA, 25 bp, Homo sapien
ccattgagtccactttttccctggt

SEQ ID NO: 5965026 - DNA, 25 bp, Homo sapien
ggaacagagacaccctgaaaacctg

SEQ ID NO: 5965027 - DNA, 25 bp, Homo sapien
tgttcaacagatgctgaaattcagg

SEQ ID NO: 5965028 - DNA, 25 bp, Homo sapien
cagcagggtcatgtctacccttagc

SEQ ID NO: 5965029 - DNA, 25 bp, Homo sapien
caccaccgatagagtccttgttgcc

SEQ ID NO: 5965030 - DNA, 25 bp, Homo sapien
gccttttggatcaaaagcgcgtcag

SEQ ID NO: 5965031 - DNA, 25 bp, Homo sapien
ccagaggaggccttgataccgtact

SEQ ID NO: 5965032 - DNA, 25 bp, Homo sapien
aggtctttggtcctcgtttttgatc

SEQ ID NO: 5965033 - DNA, 25 bp, Homo sapien
caatcgtttctctagcagaagctct

SEQ ID NO: 5965034 - DNA, 25 bp, Homo sapien
aggcgtctggacatctgataggacc

SEQ ID NO: 5965035 - DNA, 25 bp, Homo sapien
atatgtggtgacgcggaacagtttc

SEQ ID NO: 5965036 - DNA, 25 bp, Homo sapien
caagtttctcacgacacaagtgacg

SEQ ID NO: 5965037 - DNA, 25 bp, Homo sapien
acccattgagtccactttttccctg

SEQ ID NO: 5965038 - DNA, 25 bp, Homo sapien
aagtggcggttttttgttcttgaga

SEQ ID NO: 5965039 - DNA, 25 bp, Homo sapien
tgtcagcttcggttaatgacattcc

SEQ ID NO: 5965040 - DNA, 25 bp, Homo sapien
gtacctagagtcttgccgaactcgg

SEQ ID NO: 5965041 - DNA, 25 bp, Homo sapien
gatagcttagattgacccggtcttc

SEQ ID NO: 5965042 - DNA, 25 bp, Homo sapien
cagagcggtcatggcttccacaata

SEQ ID NO: 5965043 - DNA, 25 bp, Homo sapien
agaacttctcagcaatggcacctga

SEQ ID NO: 5965044 - DNA, 25 bp, Homo sapien
tggagaaatctcttgccttttggat

SEQ ID NO: 5965045 - DNA, 25 bp, Homo sapien
ggctacgatctcgacattagagttc

SEQ ID NO: 5965046 - DNA, 25 bp, Homo sapien
attgtggctgaatgtcagcttcggt

SEQ ID NO: 5965047 - DNA, 25 bp, Homo sapien
caccctgaaaacctgagccaatttc

SEQ ID NO: 5965048 - DNA, 25 bp, Homo sapien
caatttcgaaacccttggatgctgg

SEQ ID NO: 5965049 - DNA, 25 bp, Homo sapien
aacagagacaccctgaaaacctgag

SEQ ID NO: 5965050 - DNA, 25 bp, Homo sapien
gagaccggtaggcaagtttctcacg

SEQ ID NO: 5965051 - DNA, 25 bp, Homo sapien
aacttctcagcaatggcacctgaag

SEQ ID NO: 5965052 - DNA, 25 bp, Homo sapien
gaccggtaggcaagtttctcacgac

SEQ ID NO: 5965053 - DNA, 25 bp, Homo sapien
caaaggctacgatctcgacattaga

SEQ ID NO: 5965054 - DNA, 25 bp, Homo sapien
tctcgacattagagttctgagctaa

SEQ ID NO: 5965055 - DNA, 25 bp, Homo sapien
tttgatcatcatggcgatgggtgta

SEQ ID NO: 5965056 - DNA, 25 bp, Homo sapien
gtccatgtcggagtagtcgtgaggt

SEQ ID NO: 5965057 - DNA, 25 bp, Homo sapien
tgtggctgaatgtcagcttcggtta

SEQ ID NO: 5965058 - DNA, 25 bp, Homo sapien
agtcttgccgaactcggtaccggac

SEQ ID NO: 5965059 - DNA, 25 bp, Homo sapien
ggaggcgtctggacatctgatagga

SEQ ID NO: 5965060 - DNA, 25 bp, Homo sapien
tttctcacgacacaagtgacgacac

SEQ ID NO: 5965061 - DNA, 25 bp, Homo sapien
gcagaagctctgccaccaccagagg

SEQ ID NO: 5965062 - DNA, 25 bp, Homo sapien
tcgaaagagtctctgttcatcttga

SEQ ID NO: 5965063 - DNA, 25 bp, Homo sapien
gtagtcgtgaggtctttggtcctcg

SEQ ID NO: 5965064 - DNA, 25 bp, Homo sapien
agcaacggaggcgtctggacatctg

SEQ ID NO: 5965065 - DNA, 25 bp, Homo sapien
gaatagctcttggagtgacagcagg

SEQ ID NO: 5965066 - DNA, 25 bp, Homo sapien
accaccttgtacaccacctgaattg

SEQ ID NO: 5965067 - DNA, 25 bp, Homo sapien
cagagacaccctgaaaacctgagcc

SEQ ID NO: 5965068 - DNA, 25 bp, Homo sapien
aatgggacagagaaatagatgttct

SEQ ID NO: 5965069 - DNA, 25 bp, Homo sapien
ccggtaggcaagtttctcacgacac

SEQ ID NO: 5965070 - DNA, 25 bp, Homo sapien
gagaaatctcttgccttttggatca

SEQ ID NO: 5965071 - DNA, 25 bp, Homo sapien
gcctctgtacttttcgatttccttg

SEQ ID NO: 5965072 - DNA, 25 bp, Homo sapien
cttgagagatagtggccactgactt

SEQ ID NO: 5965073 - DNA, 25 bp, Homo sapien
caatggcacctgaagcgacacggcc

SEQ ID NO: 5965074 - DNA, 25 bp, Homo sapien
tgaagcgacacggccaatcgtttct

SEQ ID NO: 5965075 - DNA, 25 bp, Homo sapien
tggtcaattgtggctgaatgtcagc

SEQ ID NO: 5965076 - DNA, 25 bp, Homo sapien
ggcttccacaataggaatagctctt

SEQ ID NO: 5965077 - DNA, 25 bp, Homo sapien
ttagagataccaccttgtacaccac

SEQ ID NO: 5965078 - DNA, 25 bp, Homo sapien
tgggtcattgtgcttggaccctgga

SEQ ID NO: 5965079 - DNA, 25 bp, Homo sapien
caacaccagagcggtcatggcttcc

SEQ ID NO: 5965080 - DNA, 25 bp, Homo sapien
gcgtctggacatctgataggaccca

SEQ ID NO: 5965081 - DNA, 25 bp, Homo sapien
agagtccttgttgcctctgtacttt

SEQ ID NO: 5965082 - DNA, 25 bp, Homo sapien
tggatttccactctatccttttcgt

SEQ ID NO: 5965083 - DNA, 25 bp, Homo sapien
ccttgaccatcaaaccagcaacgga

SEQ ID NO: 5965084 - DNA, 25 bp, Homo sapien
agagtcttgccgaactcggtaccgg

SEQ ID NO: 5965085 - DNA, 25 bp, Homo sapien
acttgtccatgtcggagtagtcgtg

SEQ ID NO: 5965086 - DNA, 25 bp, Homo sapien
tccactctatccttttcgtctctag

SEQ ID NO: 5965087 - DNA, 25 bp, Homo sapien
tctggagaaatctcttgccttttgg

SEQ ID NO: 5965088 - DNA, 25 bp, Homo sapien
gagcggtcatggcttccacaatagg

SEQ ID NO: 5965089 - DNA, 25 bp, Homo sapien
ttgaccatcaaaccagcaacggagg

SEQ ID NO: 5965090 - DNA, 25 bp, Homo sapien
ctacgatctcgacattagagttctg

SEQ ID NO: 5965091 - DNA, 25 bp, Homo sapien
tcatggcgatgggtgtacctagagt

SEQ ID NO: 5965092 - DNA, 25 bp, Homo sapien
ttggatgctggaatggacaacatag

SEQ ID NO: 5965093 - DNA, 25 bp, Homo sapien
actcggtaccggactggatttccac

SEQ ID NO: 5965094 - DNA, 25 bp, Homo sapien
ccgacagacttacaatgcgattcac

SEQ ID NO: 5965095 - DNA, 25 bp, Homo sapien
acaccgtcgacaatgcaaccgacag

SEQ ID NO: 5965096 - DNA, 25 bp, Homo sapien
tgttgcctctgtacttttcgatttc

SEQ ID NO: 5965097 - DNA, 25 bp, Homo sapien
gacaccctgaaaacctgagccaatt

SEQ ID NO: 5965098 - DNA, 25 bp, Homo sapien
cgcatgggaaggtctagggaacttg

SEQ ID NO: 5965099 - DNA, 25 bp, Homo sapien
gacacaagtgacgacaccaccgata

SEQ ID NO: 5965100 - DNA, 25 bp, Homo sapien
ttgataccgtacttttccgagtacg

SEQ ID NO: 5965101 - DNA, 25 bp, Homo sapien
atgctggaatggacaacatagcatg

SEQ ID NO: 5965102 - DNA, 25 bp, Homo sapien
tcaccattagagataccaccttgta

SEQ ID NO: 5965103 - DNA, 25 bp, Homo sapien
gctgaatgtcagcttcggttaatga

SEQ ID NO: 5965104 - DNA, 25 bp, Homo sapien
ctcttggagtgacagcagggtcatg

SEQ ID NO: 5965105 - DNA, 25 bp, Homo sapien
tggctgaatgtcagcttcggttaat

SEQ ID NO: 5965106 - DNA, 25 bp, Homo sapien
tctctagcagaagctctgccaccac

SEQ ID NO: 5965107 - DNA, 25 bp, Homo sapien
gtacaccacctgaattgttggtctt

SEQ ID NO: 5965108 - DNA, 25 bp, Homo sapien
tccaacttgtcaaagcatggctcac

SEQ ID NO: 5965109 - DNA, 25 bp, Homo sapien
tccactttttccctggtgatggtgt

SEQ ID NO: 5965110 - DNA, 25 bp, Homo sapien
gcatggctcaccgagaccggtaggc

SEQ ID NO: 5965111 - DNA, 25 bp, Homo sapien
caacggaggcgtctggacatctgat

SEQ ID NO: 5965112 - DNA, 25 bp, Homo sapien
accgatagagtccttgttgcctctg

SEQ ID NO: 5965113 - DNA, 25 bp, Homo sapien
atgcaaccgacagacttacaatgcg

SEQ ID NO: 5965114 - DNA, 25 bp, Homo sapien
agtccgcatgggaaggtctagggaa

SEQ ID NO: 5965115 - DNA, 25 bp, Homo sapien
aggaacaccgtcgacaatgcaaccg

SEQ ID NO: 5965116 - DNA, 25 bp, Homo sapien
gatctcgacattagagttctgagct

SEQ ID NO: 5965117 - DNA, 25 bp, Homo sapien
tagcagaagctctgccaccaccaga

SEQ ID NO: 5965118 - DNA, 25 bp, Homo sapien
tgaattgttggtctttgttcttaat

SEQ ID NO: 5965119 - DNA, 25 bp, Homo sapien
taggggtcgatagcttagattgacc

SEQ ID NO: 5965120 - DNA, 25 bp, Homo sapien
atcgtttctctagcagaagctctgc

SEQ ID NO: 5965121 - DNA, 25 bp, Homo sapien
gcgattcaccatatgtggtgacgcg

SEQ ID NO: 5965122 - DNA, 25 bp, Homo sapien
gagccaatttcgaaacccttggatg

SEQ ID NO: 5965123 - DNA, 25 bp, Homo sapien
gatttccactctatccttttcgtct

SEQ ID NO: 5965124 - DNA, 25 bp, Homo sapien
tcttcaccatcgtaagtggcggttt

SEQ ID NO: 5965125 - DNA, 25 bp, Homo sapien
taccgtacttttccgagtacgtgaa

SEQ ID NO: 5965126 - DNA, 25 bp, Homo sapien
gctggaatggacaacatagcatgag

SEQ ID NO: 5965127 - DNA, 25 bp, Homo sapien
cgtttctctagcagaagctctgcca

SEQ ID NO: 5965128 - DNA, 25 bp, Homo sapien
gaggccttgataccgtacttttccg

SEQ ID NO: 5965129 - DNA, 25 bp, Homo sapien
tgacattcctggaggaacaccgtcg

SEQ ID NO: 5965130 - DNA, 25 bp, Homo sapien
caacttgtcaaagcatggctcaccg

SEQ ID NO: 5965131 - DNA, 25 bp, Homo sapien
cggctaagataccttcttcaccatc

SEQ ID NO: 5965132 - DNA, 25 bp, Homo sapien
agcaatggcacctgaagcgacacgg

SEQ ID NO: 5965133 - DNA, 25 bp, Homo sapien
ccctgaaaacctgagccaatttcga

SEQ ID NO: 5965134 - DNA, 25 bp, Homo sapien
atctgataggacccattgagtccac

SEQ ID NO: 5965135 - DNA, 25 bp, Homo sapien
agaaatagatgttctcaccattaga

SEQ ID NO: 5965136 - DNA, 25 bp, Homo sapien
ttaatgacattcctggaggaacacc

SEQ ID NO: 5965137 - DNA, 25 bp, Homo sapien
gcgcgtcagccaacaccagagcggt

SEQ ID NO: 5965138 - DNA, 25 bp, Homo sapien
agagttctgagctaagaacttctca

SEQ ID NO: 5965139 - DNA, 25 bp, Homo sapien
gtctttggtcctcgtttttgatcat

SEQ ID NO: 5965140 - DNA, 25 bp, Homo sapien
taccggactggatttccactctatc

SEQ ID NO: 5965141 - DNA, 25 bp, Homo sapien
gtctacccttagcggctaagatacc

SEQ ID NO: 5965142 - DNA, 25 bp, Homo sapien
cttcttcaccatcgtaagtggcggt

SEQ ID NO: 5965143 - DNA, 25 bp, Homo sapien
ggtcatgtctacccttagcggctaa

SEQ ID NO: 5965144 - DNA, 25 bp, Homo sapien
atagatgttctcaccattagagata

SEQ ID NO: 5965145 - DNA, 25 bp, Homo sapien
tcttcttctggtcaattgtggctga

SEQ ID NO: 5965146 - DNA, 25 bp, Homo sapien
ttgtccatgtcggagtagtcgtgag

SEQ ID NO: 5965147 - DNA, 25 bp, Homo sapien
ggaggaacaccgtcgacaatgcaac

SEQ ID NO: 5965148 - DNA, 25 bp, Homo sapien
gtggtgacgcggaacagtttcccaa

SEQ ID NO: 5965149 - DNA, 25 bp, Homo sapien
gaaatctcttgccttttggatcaaa

SEQ ID NO: 5965150 - DNA, 25 bp, Homo sapien
agcttcggttaatgacattcctgga

SEQ ID NO: 5965151 - DNA, 25 bp, Homo sapien
gctctgccaccaccagaggaggcct

SEQ ID NO: 5965152 - DNA, 25 bp, Homo sapien
tcaaaagcgcgtcagccaacaccag

SEQ ID NO: 5965153 - DNA, 25 bp, Homo sapien
aacatagcatgagccaacatggctt

SEQ ID NO: 5965154 - DNA, 25 bp, Homo sapien
agattgacccggtcttcttctggtc

SEQ ID NO: 5965155 - DNA, 25 bp, Homo sapien
tcctcgtttttgatcatcatggcga

SEQ ID NO: 5965156 - DNA, 25 bp, Homo sapien
tcgacattagagttctgagctaaga

SEQ ID NO: 5965157 - DNA, 25 bp, Homo sapien
aaattcaggatcgaaagagtctctg

SEQ ID NO: 5965158 - DNA, 25 bp, Homo sapien
tcgatagcttagattgacccggtct

SEQ ID NO: 5965159 - DNA, 25 bp, Homo sapien
agatgctgaaattcaggatcgaaag

SEQ ID NO: 5965160 - DNA, 25 bp, Homo sapien
agggtcatgtctacccttagcggct

SEQ ID NO: 5965161 - DNA, 25 bp, Homo sapien
acagatgctgaaattcaggatcgaa

SEQ ID NO: 5965162 - DNA, 25 bp, Homo sapien
ctttgttcttaatctgtttgtttct

SEQ ID NO: 5965163 - DNA, 25 bp, Homo sapien
ttgttggtctttgttcttaatctgt

SEQ ID NO: 5965164 - DNA, 25 bp, Homo sapien
gtcagccaacaccagagcggtcatg

SEQ ID NO: 5965165 - DNA, 25 bp, Homo sapien
ttcaccatcgtaagtggcggttttt

SEQ ID NO: 5965166 - DNA, 25 bp, Homo sapien
gagctaagaacttctcagcaatggc

SEQ ID NO: 5965167 - DNA, 25 bp, Homo sapien
ccgagaccggtaggcaagtttctca

SEQ ID NO: 5965168 - DNA, 25 bp, Homo sapien
tagcatgagccaacatggcttccaa

SEQ ID NO: 5965169 - DNA, 25 bp, Homo sapien
atggcacctgaagcgacacggccaa

SEQ ID NO: 5965170 - DNA, 25 bp, Homo sapien
ctttggtcctcgtttttgatcatca

SEQ ID NO: 5965171 - DNA, 25 bp, Homo sapien
cacaaaggctacgatctcgacatta

SEQ ID NO: 5965172 - DNA, 25 bp, Homo sapien
ggtcatggcttccacaataggaata

SEQ ID NO: 5965173 - DNA, 25 bp, Homo sapien
acgatctcgacattagagttctgag

SEQ ID NO: 5965174 - DNA, 25 bp, Homo sapien
atggctcaccgagaccggtaggcaa

SEQ ID NO: 5965175 - DNA, 25 bp, Homo sapien
gccgaactcggtaccggactggatt

SEQ ID NO: 5965176 - DNA, 25 bp, Homo sapien
gtcacaaaggctacgatctcgacat

SEQ ID NO: 5965177 - DNA, 25 bp, Homo sapien
agaggaggccttgataccgtacttt

SEQ ID NO: 5965178 - DNA, 25 bp, Homo sapien
aaatagatgttctcaccattagaga

SEQ ID NO: 5965179 - DNA, 25 bp, Homo sapien
cgatttgtgtcacaaaggctacgat

SEQ ID NO: 5965180 - DNA, 25 bp, Homo sapien
ctctatccttttcgtctctaggggt

SEQ ID NO: 5965181 - DNA, 25 bp, Homo sapien
aatgacattcctggaggaacaccgt

SEQ ID NO: 5965182 - DNA, 25 bp, Homo sapien
cttctcagcaatggcacctgaagcg

SEQ ID NO: 5965183 - DNA, 25 bp, Homo sapien
aaaagcgcgtcagccaacaccagag

SEQ ID NO: 5965184 - DNA, 25 bp, Homo sapien
aggaatagctcttggagtgacagca

SEQ ID NO: 5965185 - DNA, 25 bp, Homo sapien
ggctcaccgagaccggtaggcaagt

SEQ ID NO: 5965186 - DNA, 25 bp, Homo sapien
ccatgtcggagtagtcgtgaggtct

SEQ ID NO: 5965187 - DNA, 25 bp, Homo sapien
ttgtgtcacaaaggctacgatctcg

SEQ ID NO: 5965188 - DNA, 25 bp, Homo sapien
ggtgatggtgttcaacagatgctga

SEQ ID NO: 5965189 - DNA, 25 bp, Homo sapien
acctagagtcttgccgaactcggta

SEQ ID NO: 5965190 - DNA, 25 bp, Homo sapien
gctaagaacttctcagcaatggcac

SEQ ID NO: 5965191 - DNA, 25 bp, Homo sapien
ctgagctaagaacttctcagcaatg

SEQ ID NO: 5965192 - DNA, 25 bp, Homo sapien
atcaaaccagcaacggaggcgtctg

SEQ ID NO: 5965193 - DNA, 25 bp, Homo sapien
ggacagagaaatagatgttctcacc

SEQ ID NO: 5965194 - DNA, 25 bp, Homo sapien
ctatccttttcgtctctaggggtcg

SEQ ID NO: 5965195 - DNA, 25 bp, Homo sapien
aaccgacagacttacaatgcgattc

SEQ ID NO: 5965196 - DNA, 25 bp, Homo sapien
ggacccattgagtccactttttccc

SEQ ID NO: 5965197 - DNA, 25 bp, Homo sapien
gatcgaaagagtctctgttcatctt

SEQ ID NO: 5965198 - DNA, 25 bp, Homo sapien
ggcaagtttctcacgacacaagtga

SEQ ID NO: 5965199 - DNA, 25 bp, Homo sapien
caatgcaaccgacagacttacaatg

SEQ ID NO: 5965200 - DNA, 25 bp, Homo sapien
gtctggacatctgataggacccatt

SEQ ID NO: 5965201 - DNA, 25 bp, Homo sapien
ttgtcaaagcatggctcaccgagac

SEQ ID NO: 5965202 - DNA, 25 bp, Homo sapien
caagtgacgacaccaccgatagagt

SEQ ID NO: 5965203 - DNA, 25 bp, Homo sapien
cttccaacttgtcaaagcatggctc

SEQ ID NO: 5965204 - DNA, 25 bp, Homo sapien
tggaatggacaacatagcatgagcc

SEQ ID NO: 5965205 - DNA, 25 bp, Homo sapien
atagctcttggagtgacagcagggt

SEQ ID NO: 5965206 - DNA, 25 bp, Homo sapien
tcgacaatgcaaccgacagacttac

SEQ ID NO: 5965207 - DNA, 25 bp, Homo sapien
ccggactggatttccactctatcct

SEQ ID NO: 5965208 - DNA, 25 bp, Homo sapien
tcgtgaggtctttggtcctcgtttt

SEQ ID NO: 5965209 - DNA, 25 bp, Homo sapien
aaggtctagggaacttgtccatgtc

SEQ ID NO: 5965210 - DNA, 25 bp, Homo sapien
ccttgataccgtacttttccgagta

SEQ ID NO: 5965211 - DNA, 25 bp, Homo sapien
atgcgattcaccatatgtggtgacg

SEQ ID NO: 5965212 - DNA, 25 bp, Homo sapien
atttccttgaccatcaaaccagcaa

SEQ ID NO: 5965213 - DNA, 25 bp, Homo sapien
caccatcgtaagtggcggttttttg

SEQ ID NO: 5965214 - DNA, 25 bp, Homo sapien
acttgtcaaagcatggctcaccgag

SEQ ID NO: 5965215 - DNA, 25 bp, Homo sapien
tcggttaatgacattcctggaggaa

SEQ ID NO: 5965216 - DNA, 25 bp, Homo sapien
agatagtggccactgacttgaatgg

SEQ ID NO: 5965217 - DNA, 25 bp, Homo sapien
accacggatctggagaaatctcttg

SEQ ID NO: 5965218 - DNA, 25 bp, Homo sapien
gagacaccctgaaaacctgagccaa

SEQ ID NO: 5965219 - DNA, 25 bp, Homo sapien
cggttttttgttcttgagagatagt

SEQ ID NO: 5965220 - DNA, 25 bp, Homo sapien
gtacttttcgatttccttgaccatc

SEQ ID NO: 5965221 - DNA, 25 bp, Homo sapien
gaactcggtaccggactggatttcc

SEQ ID NO: 5965222 - DNA, 25 bp, Homo sapien
atttcgaaacccttggatgctggaa

SEQ ID NO: 5965223 - DNA, 25 bp, Homo sapien
agcggctaagataccttcttcacca

SEQ ID NO: 5965224 - DNA, 25 bp, Homo sapien
acctgagccaatttcgaaacccttg

SEQ ID NO: 5965225 - DNA, 25 bp, Homo sapien
tgacgcggaacagtttcccaaacgt

SEQ ID NO: 5965226 - DNA, 25 bp, Homo sapien
acaccagagcggtcatggcttccac

SEQ ID NO: 5965227 - DNA, 25 bp, Homo sapien
ttagcggctaagataccttcttcac

SEQ ID NO: 5965228 - DNA, 25 bp, Homo sapien
ggtctagggaacttgtccatgtcgg

SEQ ID NO: 5965229 - DNA, 25 bp, Homo sapien
tgaaattcaggatcgaaagagtctc

SEQ ID NO: 5965230 - DNA, 25 bp, Homo sapien
gttttttgttcttgagagatagtgg

SEQ ID NO: 5965231 - DNA, 25 bp, Homo sapien
tccccgatttgtgtcacaaaggcta

SEQ ID NO: 5965232 - DNA, 25 bp, Homo sapien
gaaaacctgagccaatttcgaaacc

SEQ ID NO: 5965233 - DNA, 25 bp, Homo sapien
tttctctagcagaagctctgccacc

SEQ ID NO: 5965234 - DNA, 25 bp, Homo sapien
tttccactctatccttttcgtctct

SEQ ID NO: 5965235 - DNA, 25 bp, Homo sapien
ataggaatagctcttggagtgacag

SEQ ID NO: 5965236 - DNA, 25 bp, Homo sapien
agataccaccttgtacaccacctga

SEQ ID NO: 5965237 - DNA, 25 bp, Homo sapien
atgttctcaccattagagataccac

SEQ ID NO: 5965238 - DNA, 25 bp, Homo sapien
acgacaccaccgatagagtccttgt

SEQ ID NO: 5965239 - DNA, 25 bp, Homo sapien
gttctcaccattagagataccacct

SEQ ID NO: 5965240 - DNA, 25 bp, Homo sapien
ggtcttcttctggtcaattgtggct

SEQ ID NO: 5965241 - DNA, 25 bp, Homo sapien
acccttagcggctaagataccttct

SEQ ID NO: 5965242 - DNA, 25 bp, Homo sapien
cggatctggagaaatctcttgcctt

SEQ ID NO: 5965243 - DNA, 25 bp, Homo sapien
cacaagtgacgacaccaccgataga

SEQ ID NO: 5965244 - DNA, 25 bp, Homo sapien
gcggtcatggcttccacaataggaa

SEQ ID NO: 5965245 - DNA, 25 bp, Homo sapien
atccttttcgtctctaggggtcgat

SEQ ID NO: 5965246 - DNA, 25 bp, Homo sapien
gaagtccgcatgggaaggtctaggg

SEQ ID NO: 5965247 - DNA, 25 bp, Homo sapien
atggcttccaacttgtcaaagcatg

SEQ ID NO: 5965248 - DNA, 25 bp, Homo sapien
gtaaaatgggtcattgtgcttggac

SEQ ID NO: 5965249 - DNA, 25 bp, Homo sapien
tcggtaccggactggatttccactc

SEQ ID NO: 5965250 - DNA, 25 bp, Homo sapien
cgatagagtccttgttgcctctgta

SEQ ID NO: 5965251 - DNA, 25 bp, Homo sapien
cttttggatcaaaagcgcgtcagcc

SEQ ID NO: 5965252 - DNA, 25 bp, Homo sapien
gtctttgttcttaatctgtttgttt

SEQ ID NO: 5965253 - DNA, 25 bp, Homo sapien
gggtgtacctagagtcttgccgaac

SEQ ID NO: 5965254 - DNA, 25 bp, Homo sapien
cgtttttgatcatcatggcgatggg

SEQ ID NO: 5965255 - DNA, 25 bp, Homo sapien
acgtgaagtccgcatgggaaggtct

SEQ ID NO: 5965256 - DNA, 25 bp, Homo sapien
gcggaacagtttcccaaacgttgac

SEQ ID NO: 5965257 - DNA, 25 bp, Homo sapien
gacacggccaatcgtttctctagca

SEQ ID NO: 5965258 - DNA, 25 bp, Homo sapien
tcagcaatggcacctgaagcgacac

SEQ ID NO: 5965259 - DNA, 25 bp, Homo sapien
atgagccaacatggcttccaacttg

SEQ ID NO: 5965260 - DNA, 25 bp, Homo sapien
ttgatttccccgatttgtgtcacaa

SEQ ID NO: 5965261 - DNA, 25 bp, Homo sapien
gacaatgcaaccgacagacttacaa

SEQ ID NO: 5965262 - DNA, 25 bp, Homo sapien
gaatggacaacatagcatgagccaa

SEQ ID NO: 5965263 - DNA, 25 bp, Homo sapien
gatcaaaagcgcgtcagccaacacc

SEQ ID NO: 5965264 - DNA, 25 bp, Homo sapien
ttcaccatatgtggtgacgcggaac

SEQ ID NO: 5965265 - DNA, 25 bp, Homo sapien
cacaataggaatagctcttggagtg

SEQ ID NO: 5965266 - DNA, 25 bp, Homo sapien
gtaagtggcggttttttgttcttga

SEQ ID NO: 5965267 - DNA, 25 bp, Homo sapien
ttcttgagagatagtggccactgac

SEQ ID NO: 5965268 - DNA, 25 bp, Homo sapien
tgaatgggacagagaaatagatgtt

SEQ ID NO: 5965269 - DNA, 25 bp, Homo sapien
gtcggagtagtcgtgaggtctttgg

SEQ ID NO: 5965270 - DNA, 25 bp, Homo sapien
gcgtcagccaacaccagagcggtca

SEQ ID NO: 5965271 - DNA, 25 bp, Homo sapien
ggtaggcaagtttctcacgacacaa

SEQ ID NO: 5965272 - DNA, 25 bp, Homo sapien
taagataccttcttcaccatcgtaa

SEQ ID NO: 5965273 - DNA, 25 bp, Homo sapien
tttccccgatttgtgtcacaaaggc

SEQ ID NO: 5965274 - DNA, 25 bp, Homo sapien
caccatatgtggtgacgcggaacag

SEQ ID NO: 5965275 - DNA, 25 bp, Homo sapien
ctggaacagagacaccctgaaaacc

SEQ ID NO: 5965276 - DNA, 25 bp, Homo sapien
acaccacctgaattgttggtctttg

SEQ ID NO: 5965277 - DNA, 25 bp, Homo sapien
ctcaccgagaccggtaggcaagttt

SEQ ID NO: 5965278 - DNA, 25 bp, Homo sapien
ttcgatttccttgaccatcaaacca

SEQ ID NO: 5965279 - DNA, 25 bp, Homo sapien
atgggtgtacctagagtcttgccga

SEQ ID NO: 5965280 - DNA, 25 bp, Homo sapien
caaagtaaaatgggtcattgtgctt

SEQ ID NO: 5965281 - DNA, 25 bp, Homo sapien
ttcaacagatgctgaaattcaggat

SEQ ID NO: 5965282 - DNA, 25 bp, Homo sapien
ttccttgaccatcaaaccagcaacg

SEQ ID NO: 5965283 - DNA, 25 bp, Homo sapien
caccttgtacaccacctgaattgtt

SEQ ID NO: 5965284 - DNA, 25 bp, Homo sapien
acagcagcaacagcaacagcaacag

SEQ ID NO: 5965285 - DNA, 25 bp, Homo sapien
agcagatattctaggcaactggcag

SEQ ID NO: 5965286 - DNA, 25 bp, Homo sapien
ggacaagagaggatatcgatgaatt

SEQ ID NO: 5965287 - DNA, 25 bp, Homo sapien
acaggctcaagttcaggctcaggct

SEQ ID NO: 5965288 - DNA, 25 bp, Homo sapien
atggggaatcggacaggtttgatga

SEQ ID NO: 5965289 - DNA, 25 bp, Homo sapien
ggttccagggactcattccaaagca

SEQ ID NO: 5965290 - DNA, 25 bp, Homo sapien
aaatgcggtgaatgtggtaatttct

SEQ ID NO: 5965291 - DNA, 25 bp, Homo sapien
caactccgcccctgcccaggagacg

SEQ ID NO: 5965292 - DNA, 25 bp, Homo sapien
ggcaataaggggaatgctcggttct

SEQ ID NO: 5965293 - DNA, 25 bp, Homo sapien
cccacagccagctatttttgatggt

SEQ ID NO: 5965294 - DNA, 25 bp, Homo sapien
aagcctgaagactttggatccagaa

SEQ ID NO: 5965295 - DNA, 25 bp, Homo sapien
agtatattttgggtaaattcaggta

SEQ ID NO: 5965296 - DNA, 25 bp, Homo sapien
agtaggagcaggagcagatctcatt

SEQ ID NO: 5965297 - DNA, 25 bp, Homo sapien
caaatgtcgcaaggaggaaacctgc

SEQ ID NO: 5965298 - DNA, 25 bp, Homo sapien
ataataggtctgactacggcggttc

SEQ ID NO: 5965299 - DNA, 25 bp, Homo sapien
gcagcaacagcaacaggcgccatta

SEQ ID NO: 5965300 - DNA, 25 bp, Homo sapien
tgttcatagaaaagttttcggtagc

SEQ ID NO: 5965301 - DNA, 25 bp, Homo sapien
gccatggctatgcaacagcagcaac

SEQ ID NO: 5965302 - DNA, 25 bp, Homo sapien
gtggtaggtgtgcctctgttcatag

SEQ ID NO: 5965303 - DNA, 25 bp, Homo sapien
gaaatagaagtaggagcaggagcag

SEQ ID NO: 5965304 - DNA, 25 bp, Homo sapien
aggctcaggcccaggctcaggctca

SEQ ID NO: 5965305 - DNA, 25 bp, Homo sapien
ttcaggtatgatgaaataaagcctg

SEQ ID NO: 5965306 - DNA, 25 bp, Homo sapien
gcattacattagagacaagtatatt

SEQ ID NO: 5965307 - DNA, 25 bp, Homo sapien
aaatttagatgcattatcgtccgct

SEQ ID NO: 5965308 - DNA, 25 bp, Homo sapien
ccttcaacagtattacgatcctgct

SEQ ID NO: 5965309 - DNA, 25 bp, Homo sapien
aatcggacaggtttgatgaaagaaa

SEQ ID NO: 5965310 - DNA, 25 bp, Homo sapien
gtccgctcacggaaatatcaataga

SEQ ID NO: 5965311 - DNA, 25 bp, Homo sapien
tgatggggaatcggacaggtttgat

SEQ ID NO: 5965312 - DNA, 25 bp, Homo sapien
tgatggagatgatgacaaagccatc

SEQ ID NO: 5965313 - DNA, 25 bp, Homo sapien
attaattcgtccgagaatgccaata

SEQ ID NO: 5965314 - DNA, 25 bp, Homo sapien
tatctagaaaaaagttcaagttcaa

SEQ ID NO: 5965315 - DNA, 25 bp, Homo sapien
atgaggtttaggagttcttcccata

SEQ ID NO: 5965316 - DNA, 25 bp, Homo sapien
aacagcaacagcttgctgtcgcaca

SEQ ID NO: 5965317 - DNA, 25 bp, Homo sapien
actacggcggttccagggactcatt

SEQ ID NO: 5965318 - DNA, 25 bp, Homo sapien
ccaggctcaggctcaagcacagcag

SEQ ID NO: 5965319 - DNA, 25 bp, Homo sapien
tttcgatggtacccttcaacagtat

SEQ ID NO: 5965320 - DNA, 25 bp, Homo sapien
caatggatagatggacaagagagga

SEQ ID NO: 5965321 - DNA, 25 bp, Homo sapien
gcacaggcacaggctcaagttcagg

SEQ ID NO: 5965322 - DNA, 25 bp, Homo sapien
aggctcaggctcaggcacaggcaca

SEQ ID NO: 5965323 - DNA, 25 bp, Homo sapien
tgccttttctaacgttaaatcacta

SEQ ID NO: 5965324 - DNA, 25 bp, Homo sapien
ccagcagttttcgatggtacccttc

SEQ ID NO: 5965325 - DNA, 25 bp, Homo sapien
tccagatgcaacagcttcagatgca

SEQ ID NO: 5965326 - DNA, 25 bp, Homo sapien
aggcacaggctcaagttcaggctca

SEQ ID NO: 5965327 - DNA, 25 bp, Homo sapien
atgcggtgaatgtggtaatttctac

SEQ ID NO: 5965328 - DNA, 25 bp, Homo sapien
gaggtttaggagttcttcccatagc

SEQ ID NO: 5965329 - DNA, 25 bp, Homo sapien
gacgacgatgccttttctaacgtta

SEQ ID NO: 5965330 - DNA, 25 bp, Homo sapien
cactatcaatggatagatggacaag

SEQ ID NO: 5965331 - DNA, 25 bp, Homo sapien
caaagcagtggaagcagatattcta

SEQ ID NO: 5965332 - DNA, 25 bp, Homo sapien
taatcacgccagattttacttcaaa

SEQ ID NO: 5965333 - DNA, 25 bp, Homo sapien
acatgttgacagagaattaaaggag

SEQ ID NO: 5965334 - DNA, 25 bp, Homo sapien
tgatggtacaaatgtaatcacgcca

SEQ ID NO: 5965335 - DNA, 25 bp, Homo sapien
tcgatggtacccttcaacagtatta

SEQ ID NO: 5965336 - DNA, 25 bp, Homo sapien
ggtctgactacggcggttccaggga

SEQ ID NO: 5965337 - DNA, 25 bp, Homo sapien
aagaaatagtgtatcggcagcagcg

SEQ ID NO: 5965338 - DNA, 25 bp, Homo sapien
caggagacgtgcgacaacaagtggc

SEQ ID NO: 5965339 - DNA, 25 bp, Homo sapien
ttgtggtaggtgtgcctctgttcat

SEQ ID NO: 5965340 - DNA, 25 bp, Homo sapien
tgaatgtggtaatttctacccaact

SEQ ID NO: 5965341 - DNA, 25 bp, Homo sapien
tcttttgtacaagcaaagccagcag

SEQ ID NO: 5965342 - DNA, 25 bp, Homo sapien
tggatccagaatggatgattttgat

SEQ ID NO: 5965343 - DNA, 25 bp, Homo sapien
aacagcaacagcaacagcttgctgt

SEQ ID NO: 5965344 - DNA, 25 bp, Homo sapien
atggatagatggacaagagaggata

SEQ ID NO: 5965345 - DNA, 25 bp, Homo sapien
aatgtcgcaaggaggaaacctgcca

SEQ ID NO: 5965346 - DNA, 25 bp, Homo sapien
ctgaagactttggatccagaatgga

SEQ ID NO: 5965347 - DNA, 25 bp, Homo sapien
atcgatgaattagtgagtcttggag

SEQ ID NO: 5965348 - DNA, 25 bp, Homo sapien
gcaaagccagcagttttcgatggta

SEQ ID NO: 5965349 - DNA, 25 bp, Homo sapien
aagaaatagaagtaggagcaggagc

SEQ ID NO: 5965350 - DNA, 25 bp, Homo sapien
tacccaacttggtgctcagttaatt

SEQ ID NO: 5965351 - DNA, 25 bp, Homo sapien
catggctatgcaacagcagcaacag

SEQ ID NO: 5965352 - DNA, 25 bp, Homo sapien
tttcagcaaatgtcgcaaggaggaa

SEQ ID NO: 5965353 - DNA, 25 bp, Homo sapien
cattagagacaagtatattttgggt

SEQ ID NO: 5965354 - DNA, 25 bp, Homo sapien
acatgggtttcggtgatacaaacaa

SEQ ID NO: 5965355 - DNA, 25 bp, Homo sapien
ggccataataggtctgactacggcg

SEQ ID NO: 5965356 - DNA, 25 bp, Homo sapien
aggcccaggctcaggctcaagcaca

SEQ ID NO: 5965357 - DNA, 25 bp, Homo sapien
aagcacagcagatccagatgcaaca

SEQ ID NO: 5965358 - DNA, 25 bp, Homo sapien
gcccaggctcaggctcaagcacagc

SEQ ID NO: 5965359 - DNA, 25 bp, Homo sapien
tttaggagttcttcccatagcttaa

SEQ ID NO: 5965360 - DNA, 25 bp, Homo sapien
ttttgggtaaattcaggtatgatga

SEQ ID NO: 5965361 - DNA, 25 bp, Homo sapien
cagatctcattctttctataaaggg

SEQ ID NO: 5965362 - DNA, 25 bp, Homo sapien
atcaatagagcaatcgattatctag

SEQ ID NO: 5965363 - DNA, 25 bp, Homo sapien
caatcgattatctagaaaaaagttc

SEQ ID NO: 5965364 - DNA, 25 bp, Homo sapien
aacagcttgctgtcgcacaggctca

SEQ ID NO: 5965365 - DNA, 25 bp, Homo sapien
tgccacaaggttatttctacacaca

SEQ ID NO: 5965366 - DNA, 25 bp, Homo sapien
gatgccttttctaacgttaaatcac

SEQ ID NO: 5965367 - DNA, 25 bp, Homo sapien
ggtttaggagttcttcccatagctt

SEQ ID NO: 5965368 - DNA, 25 bp, Homo sapien
tttcggtgatacaaacaaaaattta

SEQ ID NO: 5965369 - DNA, 25 bp, Homo sapien
ttaaatcactatcaatggatagatg

SEQ ID NO: 5965370 - DNA, 25 bp, Homo sapien
ccttttctaacgttaaatcactatc

SEQ ID NO: 5965371 - DNA, 25 bp, Homo sapien
atggagatgatgacaaagccatcgt

SEQ ID NO: 5965372 - DNA, 25 bp, Homo sapien
gcaacagcttgctgtcgcacaggct

SEQ ID NO: 5965373 - DNA, 25 bp, Homo sapien
gggttttcctttgtggtaggtgtgc

SEQ ID NO: 5965374 - DNA, 25 bp, Homo sapien
ccatcgtggagcattacattagaga

SEQ ID NO: 5965375 - DNA, 25 bp, Homo sapien
gcattatcgtccgctcacggaaata

SEQ ID NO: 5965376 - DNA, 25 bp, Homo sapien
gaagcagatattctaggcaactggc

SEQ ID NO: 5965377 - DNA, 25 bp, Homo sapien
agggggccataataggtctgactac

SEQ ID NO: 5965378 - DNA, 25 bp, Homo sapien
aagtggcccacagccagctattttt

SEQ ID NO: 5965379 - DNA, 25 bp, Homo sapien
tctacccaacttggtgctcagttaa

SEQ ID NO: 5965380 - DNA, 25 bp, Homo sapien
caataaggggaatgctcggttctgg

SEQ ID NO: 5965381 - DNA, 25 bp, Homo sapien
tttctacccaacttggtgctcagtt

SEQ ID NO: 5965382 - DNA, 25 bp, Homo sapien
agatcagcagcaatacgccatggct

SEQ ID NO: 5965383 - DNA, 25 bp, Homo sapien
taaagcctgaagactttggatccag

SEQ ID NO: 5965384 - DNA, 25 bp, Homo sapien
gcgacaacaagtggcccacagccag

SEQ ID NO: 5965385 - DNA, 25 bp, Homo sapien
agcagatccagatgcaacagcttca

SEQ ID NO: 5965386 - DNA, 25 bp, Homo sapien
agacaagtatattttgggtaaattc

SEQ ID NO: 5965387 - DNA, 25 bp, Homo sapien
tctgttcatagaaaagttttcggta

SEQ ID NO: 5965388 - DNA, 25 bp, Homo sapien
gaggcaataaggggaatgctcggtt

SEQ ID NO: 5965389 - DNA, 25 bp, Homo sapien
tcaggcccaggctcaggctcaagca

SEQ ID NO: 5965390 - DNA, 25 bp, Homo sapien
agatgcattatcgtccgctcacgga

SEQ ID NO: 5965391 - DNA, 25 bp, Homo sapien
attacattagagacaagtatatttt

SEQ ID NO: 5965392 - DNA, 25 bp, Homo sapien
tagaagtaggagcaggagcagatct

SEQ ID NO: 5965393 - DNA, 25 bp, Homo sapien
ctttgtggtaggtgtgcctctgttc

SEQ ID NO: 5965394 - DNA, 25 bp, Homo sapien
aaggggaatgctcggttctggaatc

SEQ ID NO: 5965395 - DNA, 25 bp, Homo sapien
ttgtacaagcaaagccagcagtttt

SEQ ID NO: 5965396 - DNA, 25 bp, Homo sapien
aggagttgattaattcgtccgagaa

SEQ ID NO: 5965397 - DNA, 25 bp, Homo sapien
tacttcaaattcagcatcttttgta

SEQ ID NO: 5965398 - DNA, 25 bp, Homo sapien
cggcagcagcgacaacatcaactcc

SEQ ID NO: 5965399 - DNA, 25 bp, Homo sapien
tgcaacagcagcaacagcaacagca

SEQ ID NO: 5965400 - DNA, 25 bp, Homo sapien
agcagcaacagcaacagcaacagct

SEQ ID NO: 5965401 - DNA, 25 bp, Homo sapien
acaagtatattttgggtaaattcag

SEQ ID NO: 5965402 - DNA, 25 bp, Homo sapien
cagcttgctgtcgcacaggctcagg

SEQ ID NO: 5965403 - DNA, 25 bp, Homo sapien
gaattagtgagtcttggaggcaata

SEQ ID NO: 5965404 - DNA, 25 bp, Homo sapien
atgttgacagagaattaaaggagtt

SEQ ID NO: 5965405 - DNA, 25 bp, Homo sapien
cagagacgacgatgccttttctaac

SEQ ID NO: 5965406 - DNA, 25 bp, Homo sapien
ttagatgcattatcgtccgctcacg

SEQ ID NO: 5965407 - DNA, 25 bp, Homo sapien
atgaaataaagcctgaagactttgg

SEQ ID NO: 5965408 - DNA, 25 bp, Homo sapien
gtggcccacagccagctatttttga

SEQ ID NO: 5965409 - DNA, 25 bp, Homo sapien
ggaatgctcggttctggaatcctaa

SEQ ID NO: 5965410 - DNA, 25 bp, Homo sapien
atatatgtagatcagcagcaatacg

SEQ ID NO: 5965411 - DNA, 25 bp, Homo sapien
ttttgtacaagcaaagccagcagtt

SEQ ID NO: 5965412 - DNA, 25 bp, Homo sapien
gtccgagaatgccaataaatgcggt

SEQ ID NO: 5965413 - DNA, 25 bp, Homo sapien
taccggaatgatatatgtagatcag

SEQ ID NO: 5965414 - DNA, 25 bp, Homo sapien
gtagatcagcagcaatacgccatgg

SEQ ID NO: 5965415 - DNA, 25 bp, Homo sapien
acaggcacaggctcaagttcaggct

SEQ ID NO: 5965416 - DNA, 25 bp, Homo sapien
caggagcagatctcattctttctat

SEQ ID NO: 5965417 - DNA, 25 bp, Homo sapien
ttatcttttcagcaaatgtcgcaag

SEQ ID NO: 5965418 - DNA, 25 bp, Homo sapien
aattaaaggagttgattaattcgtc

SEQ ID NO: 5965419 - DNA, 25 bp, Homo sapien
cagcagcaatacgccatggctatgc

SEQ ID NO: 5965420 - DNA, 25 bp, Homo sapien
tatgcaacagcagcaacagcaacag

SEQ ID NO: 5965421 - DNA, 25 bp, Homo sapien
actccgcccctgcccaggagacgtg

SEQ ID NO: 5965422 - DNA, 25 bp, Homo sapien
tctagaaaaaagttcaagttcaaga

SEQ ID NO: 5965423 - DNA, 25 bp, Homo sapien
ctggcagaactcaaggacatgggtt

SEQ ID NO: 5965424 - DNA, 25 bp, Homo sapien
caacttggtgctcagttaatttggg

SEQ ID NO: 5965425 - DNA, 25 bp, Homo sapien
cttttcagcaaatgtcgcaaggagg

SEQ ID NO: 5965426 - DNA, 25 bp, Homo sapien
gcgccattatcttttcagcaaatgt

SEQ ID NO: 5965427 - DNA, 25 bp, Homo sapien
gtcccttttccttttgatggagatg

SEQ ID NO: 5965428 - DNA, 25 bp, Homo sapien
gcagtggaagcagatattctaggca

SEQ ID NO: 5965429 - DNA, 25 bp, Homo sapien
gctatgcaacagcagcaacagcaac

SEQ ID NO: 5965430 - DNA, 25 bp, Homo sapien
tgactacggcggttccagggactca

SEQ ID NO: 5965431 - DNA, 25 bp, Homo sapien
gatcctgctaccggaatgatatatg

SEQ ID NO: 5965432 - DNA, 25 bp, Homo sapien
agttcttcccatagcttaaaacatg

SEQ ID NO: 5965433 - DNA, 25 bp, Homo sapien
gctcacggaaatatcaatagagcaa

SEQ ID NO: 5965434 - DNA, 25 bp, Homo sapien
cccttttccttttgatggagatgat

SEQ ID NO: 5965435 - DNA, 25 bp, Homo sapien
ctataaagggggccataataggtct

SEQ ID NO: 5965436 - DNA, 25 bp, Homo sapien
agccagcagttttcgatggtaccct

SEQ ID NO: 5965437 - DNA, 25 bp, Homo sapien
agacgtgcgacaacaagtggcccac

SEQ ID NO: 5965438 - DNA, 25 bp, Homo sapien
gcacaggctcaagttcaggctcagg

SEQ ID NO: 5965439 - DNA, 25 bp, Homo sapien
tatttttgatggtacaaatgtaatc

SEQ ID NO: 5965440 - DNA, 25 bp, Homo sapien
aaagttttcggtagcagagacgacg

SEQ ID NO: 5965441 - DNA, 25 bp, Homo sapien
aatgatatatgtagatcagcagcaa

SEQ ID NO: 5965442 - DNA, 25 bp, Homo sapien
caatagagcaatcgattatctagaa

SEQ ID NO: 5965443 - DNA, 25 bp, Homo sapien
acccttcaacagtattacgatcctg

SEQ ID NO: 5965444 - DNA, 25 bp, Homo sapien
gcggttccagggactcattccaaag

SEQ ID NO: 5965445 - DNA, 25 bp, Homo sapien
atatgtagatcagcagcaatacgcc

SEQ ID NO: 5965446 - DNA, 25 bp, Homo sapien
cagcgacaacatcaactccgcccct

SEQ ID NO: 5965447 - DNA, 25 bp, Homo sapien
gcacaggcacaggcacaggctcaag

SEQ ID NO: 5965448 - DNA, 25 bp, Homo sapien
caacatcaactccgcccctgcccag

SEQ ID NO: 5965449 - DNA, 25 bp, Homo sapien
acagtattacgatcctgctaccgga

SEQ ID NO: 5965450 - DNA, 25 bp, Homo sapien
atcaatggatagatggacaagagag

SEQ ID NO: 5965451 - DNA, 25 bp, Homo sapien
aagagaggatatcgatgaattagtg

SEQ ID NO: 5965452 - DNA, 25 bp, Homo sapien
tcaggctcaggcccaggctcaggct

SEQ ID NO: 5965453 - DNA, 25 bp, Homo sapien
taattcgtccgagaatgccaataaa

SEQ ID NO: 5965454 - DNA, 25 bp, Homo sapien
aaacatgttgacagagaattaaagg

SEQ ID NO: 5965455 - DNA, 25 bp, Homo sapien
gcaacagcaacagcttgctgtcgca

SEQ ID NO: 5965456 - DNA, 25 bp, Homo sapien
aatgtaatcacgccagattttactt

SEQ ID NO: 5965457 - DNA, 25 bp, Homo sapien
tgcctctgttcatagaaaagttttc

SEQ ID NO: 5965458 - DNA, 25 bp, Homo sapien
aaaagttcaagttcaagaaatagtg

SEQ ID NO: 5965459 - DNA, 25 bp, Homo sapien
atgaattagtgagtcttggaggcaa

SEQ ID NO: 5965460 - DNA, 25 bp, Homo sapien
tgcaacagcttcagatgcagcaaca

SEQ ID NO: 5965461 - DNA, 25 bp, Homo sapien
agagcaatcgattatctagaaaaaa

SEQ ID NO: 5965462 - DNA, 25 bp, Homo sapien
tgatatatgtagatcagcagcaata

SEQ ID NO: 5965463 - DNA, 25 bp, Homo sapien
ggggaatgctcggttctggaatcct

SEQ ID NO: 5965464 - DNA, 25 bp, Homo sapien
tcggtgatacaaacaaaaatttaga

SEQ ID NO: 5965465 - DNA, 25 bp, Homo sapien
tttggatccagaatggatgattttg

SEQ ID NO: 5965466 - DNA, 25 bp, Homo sapien
cttcaaattcagcatcttttgtaca

SEQ ID NO: 5965467 - DNA, 25 bp, Homo sapien
tgtcgcacaggctcaggctcaggca

SEQ ID NO: 5965468 - DNA, 25 bp, Homo sapien
ttctaggcaactggcagaactcaag

SEQ ID NO: 5965469 - DNA, 25 bp, Homo sapien
ccacaaggttatttctacacacaat

SEQ ID NO: 5965470 - DNA, 25 bp, Homo sapien
gaatgccaataaatgcggtgaatgt

SEQ ID NO: 5965471 - DNA, 25 bp, Homo sapien
ggactcattccaaagcagtggaagc

SEQ ID NO: 5965472 - DNA, 25 bp, Homo sapien
cagttttcgatggtacccttcaaca

SEQ ID NO: 5965473 - DNA, 25 bp, Homo sapien
ttgggtaaattcaggtatgatgaaa

SEQ ID NO: 5965474 - DNA, 25 bp, Homo sapien
tgtgcctctgttcatagaaaagttt

SEQ ID NO: 5965475 - DNA, 25 bp, Homo sapien
tcctttgtggtaggtgtgcctctgt

SEQ ID NO: 5965476 - DNA, 25 bp, Homo sapien
aatgtggtaatttctacccaacttg

SEQ ID NO: 5965477 - DNA, 25 bp, Homo sapien
gctcaggctcaggctcaggcccagg

SEQ ID NO: 5965478 - DNA, 25 bp, Homo sapien
cgtggagcattacattagagacaag

SEQ ID NO: 5965479 - DNA, 25 bp, Homo sapien
tatcgtccgctcacggaaatatcaa

SEQ ID NO: 5965480 - DNA, 25 bp, Homo sapien
ttcatagaaaagttttcggtagcag

SEQ ID NO: 5965481 - DNA, 25 bp, Homo sapien
caacaagtggcccacagccagctat

SEQ ID NO: 5965482 - DNA, 25 bp, Homo sapien
atcacgccagattttacttcaaatt

SEQ ID NO: 5965483 - DNA, 25 bp, Homo sapien
ttttcggtagcagagacgacgatgc

SEQ ID NO: 5965484 - DNA, 25 bp, Homo sapien
aggaaacctgccacaaggttatttc

SEQ ID NO: 5965485 - DNA, 25 bp, Homo sapien
ggggaatcggacaggtttgatgaaa

SEQ ID NO: 5965486 - DNA, 25 bp, Homo sapien
gaaataaagcctgaagactttggat

SEQ ID NO: 5965487 - DNA, 25 bp, Homo sapien
cccaggagacgtgcgacaacaagtg

SEQ ID NO: 5965488 - DNA, 25 bp, Homo sapien
aagcaaagccagcagttttcgatgg

SEQ ID NO: 5965489 - DNA, 25 bp, Homo sapien
ggatagatggacaagagaggatatc

SEQ ID NO: 5965490 - DNA, 25 bp, Homo sapien
tggtacccttcaacagtattacgat

SEQ ID NO: 5965491 - DNA, 25 bp, Homo sapien
taggtctgactacggcggttccagg

SEQ ID NO: 5965492 - DNA, 25 bp, Homo sapien
gtacaagcaaagccagcagttttcg

SEQ ID NO: 5965493 - DNA, 25 bp, Homo sapien
atgtcccttttccttttgatggaga

SEQ ID NO: 5965494 - DNA, 25 bp, Homo sapien
aggctcaggctcaggcccaggctca

SEQ ID NO: 5965495 - DNA, 25 bp, Homo sapien
aaagccagcagttttcgatggtacc

SEQ ID NO: 5965496 - DNA, 25 bp, Homo sapien
ccataataggtctgactacggcggt

SEQ ID NO: 5965497 - DNA, 25 bp, Homo sapien
atgtagatcagcagcaatacgccat

SEQ ID NO: 5965498 - DNA, 25 bp, Homo sapien
aggcacaggcacaggcacaggctca

SEQ ID NO: 5965499 - DNA, 25 bp, Homo sapien
tcacggaaatatcaatagagcaatc

SEQ ID NO: 5965500 - DNA, 25 bp, Homo sapien
ttgctgtcgcacaggctcaggctca

SEQ ID NO: 5965501 - DNA, 25 bp, Homo sapien
tcaggctcaagcacagcagatccag

SEQ ID NO: 5965502 - DNA, 25 bp, Homo sapien
agatgcagcaacagcaacaggcgcc

SEQ ID NO: 5965503 - DNA, 25 bp, Homo sapien
tctgactacggcggttccagggact

SEQ ID NO: 5965504 - DNA, 25 bp, Homo sapien
ggggccataataggtctgactacgg

SEQ ID NO: 5965505 - DNA, 25 bp, Homo sapien
gaaacctgccacaaggttatttcta

SEQ ID NO: 5965506 - DNA, 25 bp, Homo sapien
gttgacagagaattaaaggagttga

SEQ ID NO: 5965507 - DNA, 25 bp, Homo sapien
tttgatggggaatcggacaggtttg

SEQ ID NO: 5965508 - DNA, 25 bp, Homo sapien
cagcaacagcttgctgtcgcacagg

SEQ ID NO: 5965509 - DNA, 25 bp, Homo sapien
gccattatcttttcagcaaatgtcg

SEQ ID NO: 5965510 - DNA, 25 bp, Homo sapien
tttgatggtacaaatgtaatcacgc

SEQ ID NO: 5965511 - DNA, 25 bp, Homo sapien
tgacagagaattaaaggagttgatt

SEQ ID NO: 5965512 - DNA, 25 bp, Homo sapien
caataaatgcggtgaatgtggtaat

SEQ ID NO: 5965513 - DNA, 25 bp, Homo sapien
tcattccaaagcagtggaagcagat

SEQ ID NO: 5965514 - DNA, 25 bp, Homo sapien
caacagcagcaacagcaacagcaac

SEQ ID NO: 5965515 - DNA, 25 bp, Homo sapien
ccagggactcattccaaagcagtgg

SEQ ID NO: 5965516 - DNA, 25 bp, Homo sapien
aatagaagtaggagcaggagcagat

SEQ ID NO: 5965517 - DNA, 25 bp, Homo sapien
ggagcagatctcattctttctataa

SEQ ID NO: 5965518 - DNA, 25 bp, Homo sapien
taaaacatgttgacagagaattaaa

SEQ ID NO: 5965519 - DNA, 25 bp, Homo sapien
aaaggagttgattaattcgtccgag

SEQ ID NO: 5965520 - DNA, 25 bp, Homo sapien
agttttcggtagcagagacgacgat

SEQ ID NO: 5965521 - DNA, 25 bp, Homo sapien
agtggaagcagatattctaggcaac

SEQ ID NO: 5965522 - DNA, 25 bp, Homo sapien
gcagcagcgacaacatcaactccgc

SEQ ID NO: 5965523 - DNA, 25 bp, Homo sapien
atagagcaatcgattatctagaaaa

SEQ ID NO: 5965524 - DNA, 25 bp, Homo sapien
agcaacagcaacaggcgccattatc

SEQ ID NO: 5965525 - DNA, 25 bp, Homo sapien
atggacaagagaggatatcgatgaa

SEQ ID NO: 5965526 - DNA, 25 bp, Homo sapien
agtattacgatcctgctaccggaat

SEQ ID NO: 5965527 - DNA, 25 bp, Homo sapien
taggtgtgcctctgttcatagaaaa

SEQ ID NO: 5965528 - DNA, 25 bp, Homo sapien
acaggctcaggctcaggcacaggca

SEQ ID NO: 5965529 - DNA, 25 bp, Homo sapien
catagaaaagttttcggtagcagag

SEQ ID NO: 5965530 - DNA, 25 bp, Homo sapien
atacgccatggctatgcaacagcag

SEQ ID NO: 5965531 - DNA, 25 bp, Homo sapien
gaaatagtgtatcggcagcagcgac

SEQ ID NO: 5965532 - DNA, 25 bp, Homo sapien
aattcaggtatgatgaaataaagcc

SEQ ID NO: 5965533 - DNA, 25 bp, Homo sapien
gctcaggctcaggcccaggctcagg

SEQ ID NO: 5965534 - DNA, 25 bp, Homo sapien
tgctcggttctggaatcctaaaaat

SEQ ID NO: 5965535 - DNA, 25 bp, Homo sapien
tccgcccctgcccaggagacgtgcg

SEQ ID NO: 5965536 - DNA, 25 bp, Homo sapien
ggagttcttcccatagcttaaaaca

SEQ ID NO: 5965537 - DNA, 25 bp, Homo sapien
gcaacagcaacagcaacagcttgct

SEQ ID NO: 5965538 - DNA, 25 bp, Homo sapien
tggaagcagatattctaggcaactg

SEQ ID NO: 5965539 - DNA, 25 bp, Homo sapien
gagacgacgatgccttttctaacgt

SEQ ID NO: 5965540 - DNA, 25 bp, Homo sapien
atagatggacaagagaggatatcga

SEQ ID NO: 5965541 - DNA, 25 bp, Homo sapien
taggagcaggagcagatctcattct

SEQ ID NO: 5965542 - DNA, 25 bp, Homo sapien
agcagagacgacgatgccttttcta

SEQ ID NO: 5965543 - DNA, 25 bp, Homo sapien
aatgctcggttctggaatcctaaaa

SEQ ID NO: 5965544 - DNA, 25 bp, Homo sapien
acagcagatccagatgcaacagctt

SEQ ID NO: 5965545 - DNA, 25 bp, Homo sapien
tctcattctttctataaagggggcc

SEQ ID NO: 5965546 - DNA, 25 bp, Homo sapien
aagcagtggaagcagatattctagg

SEQ ID NO: 5965547 - DNA, 25 bp, Homo sapien
cggcggttccagggactcattccaa

SEQ ID NO: 5965548 - DNA, 25 bp, Homo sapien
gctcaagcacagcagatccagatgc

SEQ ID NO: 5965549 - DNA, 25 bp, Homo sapien
ggaaatatcaatagagcaatcgatt

SEQ ID NO: 5965550 - DNA, 25 bp, Homo sapien
gctaccggaatgatatatgtagatc

SEQ ID NO: 5965551 - DNA, 25 bp, Homo sapien
gagaatgccaataaatgcggtgaat

SEQ ID NO: 5965552 - DNA, 25 bp, Homo sapien
tgattaattcgtccgagaatgccaa

SEQ ID NO: 5965553 - DNA, 25 bp, Homo sapien
acgccatggctatgcaacagcagca

SEQ ID NO: 5965554 - DNA, 25 bp, Homo sapien
aaatgtcccttttccttttgatgga

SEQ ID NO: 5965555 - DNA, 25 bp, Homo sapien
gcacagcagatccagatgcaacagc

SEQ ID NO: 5965556 - DNA, 25 bp, Homo sapien
ggaatgatatatgtagatcagcagc

SEQ ID NO: 5965557 - DNA, 25 bp, Homo sapien
actcattccaaagcagtggaagcag

SEQ ID NO: 5965558 - DNA, 25 bp, Homo sapien
atcgattatctagaaaaaagttcaa

SEQ ID NO: 5965559 - DNA, 25 bp, Homo sapien
tcggacaggtttgatgaaagaaata

SEQ ID NO: 5965560 - DNA, 25 bp, Homo sapien
gaactcaaggacatgggtttcggtg

SEQ ID NO: 5965561 - DNA, 25 bp, Homo sapien
atacaaacaaaaatttagatgcatt

SEQ ID NO: 5965562 - DNA, 25 bp, Homo sapien
cccctgcccaggagacgtgcgacaa

SEQ ID NO: 5965563 - DNA, 25 bp, Homo sapien
actcaaggacatgggtttcggtgat

SEQ ID NO: 5965564 - DNA, 25 bp, Homo sapien
gagaggatatcgatgaattagtgag

SEQ ID NO: 5965565 - DNA, 25 bp, Homo sapien
ggtatgatgaaataaagcctgaaga

SEQ ID NO: 5965566 - DNA, 25 bp, Homo sapien
catcttttgtacaagcaaagccagc

SEQ ID NO: 5965567 - DNA, 25 bp, Homo sapien
agcttcagatgcagcaacagcaaca

SEQ ID NO: 5965568 - DNA, 25 bp, Homo sapien
atggtacaaatgtaatcacgccaga

SEQ ID NO: 5965569 - DNA, 25 bp, Homo sapien
tcaagaaatagtgtatcggcagcag

SEQ ID NO: 5965570 - DNA, 25 bp, Homo sapien
tcaaattcagcatcttttgtacaag

SEQ ID NO: 5965571 - DNA, 25 bp, Homo sapien
gacaacaagtggcccacagccagct

SEQ ID NO: 5965572 - DNA, 25 bp, Homo sapien
cttttgatggagatgatgacaaagc

SEQ ID NO: 5965573 - DNA, 25 bp, Homo sapien
cttcccatagcttaaaacatgttga

SEQ ID NO: 5965574 - DNA, 25 bp, Homo sapien
cgcccctgcccaggagacgtgcgac

SEQ ID NO: 5965575 - DNA, 25 bp, Homo sapien
acaaagccatcgtggagcattacat

SEQ ID NO: 5965576 - DNA, 25 bp, Homo sapien
tggaatcctaaaaatgtcccttttc

SEQ ID NO: 5965577 - DNA, 25 bp, Homo sapien
tcagcaaatgtcgcaaggaggaaac

SEQ ID NO: 5965578 - DNA, 25 bp, Homo sapien
ttacgatcctgctaccggaatgata

SEQ ID NO: 5965579 - DNA, 25 bp, Homo sapien
cggtagcagagacgacgatgccttt

SEQ ID NO: 5965580 - DNA, 25 bp, Homo sapien
gctcaggctcaggcacaggcacagg

SEQ ID NO: 5965581 - DNA, 25 bp, Homo sapien
tgtcgcaaggaggaaacctgccaca

SEQ ID NO: 5965582 - DNA, 25 bp, Homo sapien
gcggtgaatgtggtaatttctaccc

SEQ ID NO: 5965583 - DNA, 25 bp, Homo sapien
acggaaatatcaatagagcaatcga

SEQ ID NO: 5965584 - DNA, 25 bp, Homo sapien
ttctaacgttaaatcactatcaatg

SEQ ID NO: 5965585 - DNA, 25 bp, Homo sapien
ttctttctataaagggggccataat

SEQ ID NO: 5965586 - DNA, 25 bp, Homo sapien
gggtaaattcaggtatgatgaaata

SEQ ID NO: 5965587 - DNA, 25 bp, Homo sapien
gctgtcgcacaggctcaggctcagg

SEQ ID NO: 5965588 - DNA, 25 bp, Homo sapien
cagatattctaggcaactggcagaa

SEQ ID NO: 5965589 - DNA, 25 bp, Homo sapien
atcgtggagcattacattagagaca

SEQ ID NO: 5965590 - DNA, 25 bp, Homo sapien
gcaactggcagaactcaaggacatg

SEQ ID NO: 5965591 - DNA, 25 bp, Homo sapien
atgcattatcgtccgctcacggaaa

SEQ ID NO: 5965592 - DNA, 25 bp, Homo sapien
aaaaatttagatgcattatcgtccg

SEQ ID NO: 5965593 - DNA, 25 bp, Homo sapien
agcatcttttgtacaagcaaagcca

SEQ ID NO: 5965594 - DNA, 25 bp, Homo sapien
aacctgccacaaggttatttctaca

SEQ ID NO: 5965595 - DNA, 25 bp, Homo sapien
aggctcaagcacagcagatccagat

SEQ ID NO: 5965596 - DNA, 25 bp, Homo sapien
acaaggttatttctacacacaataa

SEQ ID NO: 5965597 - DNA, 25 bp, Homo sapien
agcagatctcattctttctataaag

SEQ ID NO: 5965598 - DNA, 25 bp, Homo sapien
gaagactttggatccagaatggatg

SEQ ID NO: 5965599 - DNA, 25 bp, Homo sapien
agcaggagcagatctcattctttct

SEQ ID NO: 5965600 - DNA, 25 bp, Homo sapien
tgacaaagccatcgtggagcattac

SEQ ID NO: 5965601 - DNA, 25 bp, Homo sapien
aggcaactggcagaactcaaggaca

SEQ ID NO: 5965602 - DNA, 25 bp, Homo sapien
ggatatcgatgaattagtgagtctt

SEQ ID NO: 5965603 - DNA, 25 bp, Homo sapien
aagttcaagttcaagaaatagtgta

SEQ ID NO: 5965604 - DNA, 25 bp, Homo sapien
ttcttcccatagcttaaaacatgtt

SEQ ID NO: 5965605 - DNA, 25 bp, Homo sapien
gatgacaaagccatcgtggagcatt

SEQ ID NO: 5965606 - DNA, 25 bp, Homo sapien
cgatgaattagtgagtcttggaggc

SEQ ID NO: 5965607 - DNA, 25 bp, Homo sapien
ctaggcaactggcagaactcaagga

SEQ ID NO: 5965608 - DNA, 25 bp, Homo sapien
atttagatgcattatcgtccgctca

SEQ ID NO: 5965609 - DNA, 25 bp, Homo sapien
acgatcctgctaccggaatgatata

SEQ ID NO: 5965610 - DNA, 25 bp, Homo sapien
atgggtttcggtgatacaaacaaaa

SEQ ID NO: 5965611 - DNA, 25 bp, Homo sapien
ggcagaactcaaggacatgggtttc

SEQ ID NO: 5965612 - DNA, 25 bp, Homo sapien
atcagcagcaatacgccatggctat

SEQ ID NO: 5965613 - DNA, 25 bp, Homo sapien
gacaacatcaactccgcccctgccc

SEQ ID NO: 5965614 - DNA, 25 bp, Homo sapien
aaggaggaaacctgccacaaggtta

SEQ ID NO: 5965615 - DNA, 25 bp, Homo sapien
gcctgaagactttggatccagaatg

SEQ ID NO: 5965616 - DNA, 25 bp, Homo sapien
tatgatgaaataaagcctgaagact

SEQ ID NO: 5965617 - DNA, 25 bp, Homo sapien
ggtgaatgtggtaatttctacccaa

SEQ ID NO: 5965618 - DNA, 25 bp, Homo sapien
ggcccacagccagctatttttgatg

SEQ ID NO: 5965619 - DNA, 25 bp, Homo sapien
acaaacaaaaatttagatgcattat

SEQ ID NO: 5965620 - DNA, 25 bp, Homo sapien
tcaagcacagcagatccagatgcaa

SEQ ID NO: 5965621 - DNA, 25 bp, Homo sapien
tcccatagcttaaaacatgttgaca

SEQ ID NO: 5965622 - DNA, 25 bp, Homo sapien
tagtgagtcttggaggcaataaggg

SEQ ID NO: 5965623 - DNA, 25 bp, Homo sapien
ttcggtagcagagacgacgatgcct

SEQ ID NO: 5965624 - DNA, 25 bp, Homo sapien
aatttctacccaacttggtgctcag

SEQ ID NO: 5965625 - DNA, 25 bp, Homo sapien
gatctcattctttctataaaggggg

SEQ ID NO: 5965626 - DNA, 25 bp, Homo sapien
attatctagaaaaaagttcaagttc

SEQ ID NO: 5965627 - DNA, 25 bp, Homo sapien
aaatatcaatagagcaatcgattat

SEQ ID NO: 5965628 - DNA, 25 bp, Homo sapien
tacattagagacaagtatattttgg

SEQ ID NO: 5965629 - DNA, 25 bp, Homo sapien
acaagcaaagccagcagttttcgat

SEQ ID NO: 5965630 - DNA, 25 bp, Homo sapien
attcgtccgagaatgccaataaatg

SEQ ID NO: 5965631 - DNA, 25 bp, Homo sapien
caacagcttcagatgcagcaacagc

SEQ ID NO: 5965632 - DNA, 25 bp, Homo sapien
gcgacaacatcaactccgcccctgc

SEQ ID NO: 5965633 - DNA, 25 bp, Homo sapien
tattttgggtaaattcaggtatgat

SEQ ID NO: 5965634 - DNA, 25 bp, Homo sapien
cgttaaatcactatcaatggataga

SEQ ID NO: 5965635 - DNA, 25 bp, Homo sapien
tcaggctcaggcacaggcacaggca

SEQ ID NO: 5965636 - DNA, 25 bp, Homo sapien
ggagatgatgacaaagccatcgtgg

SEQ ID NO: 5965637 - DNA, 25 bp, Homo sapien
aagttcaggctcaggctcaggctca

SEQ ID NO: 5965638 - DNA, 25 bp, Homo sapien
cattatcttttcagcaaatgtcgca

SEQ ID NO: 5965639 - DNA, 25 bp, Homo sapien
ggtgtgcctctgttcatagaaaagt

SEQ ID NO: 5965640 - DNA, 25 bp, Homo sapien
tgatgaaataaagcctgaagacttt

SEQ ID NO: 5965641 - DNA, 25 bp, Homo sapien
gctcaggcccaggctcaggctcaag

SEQ ID NO: 5965642 - DNA, 25 bp, Homo sapien
tattctaggcaactggcagaactca

SEQ ID NO: 5965643 - DNA, 25 bp, Homo sapien
gctcaggctcaagcacagcagatcc

SEQ ID NO: 5965644 - DNA, 25 bp, Homo sapien
cgccagattttacttcaaattcagc

SEQ ID NO: 5965645 - DNA, 25 bp, Homo sapien
tcattctttctataaagggggccat

SEQ ID NO: 5965646 - DNA, 25 bp, Homo sapien
gttcaagaaatagtgtatcggcagc

SEQ ID NO: 5965647 - DNA, 25 bp, Homo sapien
caacagcaacaggcgccattatctt

SEQ ID NO: 5965648 - DNA, 25 bp, Homo sapien
gttgattaattcgtccgagaatgcc

SEQ ID NO: 5965649 - DNA, 25 bp, Homo sapien
acagcaacaggcgccattatctttt

SEQ ID NO: 5965650 - DNA, 25 bp, Homo sapien
acttggtgctcagttaatttggggg

SEQ ID NO: 5965651 - DNA, 25 bp, Homo sapien
tttccttttgatggagatgatgaca

SEQ ID NO: 5965652 - DNA, 25 bp, Homo sapien
ttagagacaagtatattttgggtaa

SEQ ID NO: 5965653 - DNA, 25 bp, Homo sapien
gcagcaatacgccatggctatgcaa

SEQ ID NO: 5965654 - DNA, 25 bp, Homo sapien
tgatacaaacaaaaatttagatgca

SEQ ID NO: 5965655 - DNA, 25 bp, Homo sapien
cctctgttcatagaaaagttttcgg

SEQ ID NO: 5965656 - DNA, 25 bp, Homo sapien
acaagtggcccacagccagctattt

SEQ ID NO: 5965657 - DNA, 25 bp, Homo sapien
ggtgatacaaacaaaaatttagatg

SEQ ID NO: 5965658 - DNA, 25 bp, Homo sapien
atcactatcaatggatagatggaca

SEQ ID NO: 5965659 - DNA, 25 bp, Homo sapien
gaggatatcgatgaattagtgagtc

SEQ ID NO: 5965660 - DNA, 25 bp, Homo sapien
tcaagttcaggctcaggctcaggct

SEQ ID NO: 5965661 - DNA, 25 bp, Homo sapien
agcaatacgccatggctatgcaaca

SEQ ID NO: 5965662 - DNA, 25 bp, Homo sapien
attcagcatcttttgtacaagcaaa

SEQ ID NO: 5965663 - DNA, 25 bp, Homo sapien
gtgtatcggcagcagcgacaacatc

SEQ ID NO: 5965664 - DNA, 25 bp, Homo sapien
atgccaataaatgcggtgaatgtgg

SEQ ID NO: 5965665 - DNA, 25 bp, Homo sapien
aaagggggccataataggtctgact

SEQ ID NO: 5965666 - DNA, 25 bp, Homo sapien
ggagacgtgcgacaacaagtggccc

SEQ ID NO: 5965667 - DNA, 25 bp, Homo sapien
gctcaggcacaggcacaggcacagg

SEQ ID NO: 5965668 - DNA, 25 bp, Homo sapien
gttcaagttcaagaaatagtgtatc

SEQ ID NO: 5965669 - DNA, 25 bp, Homo sapien
cctgccacaaggttatttctacaca

SEQ ID NO: 5965670 - DNA, 25 bp, Homo sapien
tcgcacaggctcaggctcaggcaca

SEQ ID NO: 5965671 - DNA, 25 bp, Homo sapien
tccttttgatggagatgatgacaaa

SEQ ID NO: 5965672 - DNA, 25 bp, Homo sapien
cttaaaacatgttgacagagaatta

SEQ ID NO: 5965673 - DNA, 25 bp, Homo sapien
cgattatctagaaaaaagttcaagt

SEQ ID NO: 5965674 - DNA, 25 bp, Homo sapien
ataaatgcggtgaatgtggtaattt

SEQ ID NO: 5965675 - DNA, 25 bp, Homo sapien
tttgatggagatgatgacaaagcca

SEQ ID NO: 5965676 - DNA, 25 bp, Homo sapien
tcctgctaccggaatgatatatgta

SEQ ID NO: 5965677 - DNA, 25 bp, Homo sapien
ggaatcggacaggtttgatgaaaga

SEQ ID NO: 5965678 - DNA, 25 bp, Homo sapien
tagaaaaaagttcaagttcaagaaa

SEQ ID NO: 5965679 - DNA, 25 bp, Homo sapien
tctggaatcctaaaaatgtcccttt

SEQ ID NO: 5965680 - DNA, 25 bp, Homo sapien
attttgatggggaatcggacaggtt

SEQ ID NO: 5965681 - DNA, 25 bp, Homo sapien
attagtgagtcttggaggcaataag

SEQ ID NO: 5965682 - DNA, 25 bp, Homo sapien
ttggtgctcagttaatttgggggtt

SEQ ID NO: 5965683 - DNA, 25 bp, Homo sapien
aaatcactatcaatggatagatgga

SEQ ID NO: 5965684 - DNA, 25 bp, Homo sapien
cagctatttttgatggtacaaatgt

SEQ ID NO: 5965685 - DNA, 25 bp, Homo sapien
agcaatcgattatctagaaaaaagt

SEQ ID NO: 5965686 - DNA, 25 bp, Homo sapien
tgtggtaatttctacccaacttggt

SEQ ID NO: 5965687 - DNA, 25 bp, Homo sapien
ggtacaaatgtaatcacgccagatt

SEQ ID NO: 5965688 - DNA, 25 bp, Homo sapien
agcagttttcgatggtacccttcaa

SEQ ID NO: 5965689 - DNA, 25 bp, Homo sapien
tttcctttgtggtaggtgtgcctct

SEQ ID NO: 5965690 - DNA, 25 bp, Homo sapien
tcaggctcaggctcaggctcaggcc

SEQ ID NO: 5965691 - DNA, 25 bp, Homo sapien
gagttgattaattcgtccgagaatg

SEQ ID NO: 5965692 - DNA, 25 bp, Homo sapien
gcacaggctcaggctcaggcacagg

SEQ ID NO: 5965693 - DNA, 25 bp, Homo sapien
gctatttttgatggtacaaatgtaa

SEQ ID NO: 5965694 - DNA, 25 bp, Homo sapien
tttttgatggtacaaatgtaatcac

SEQ ID NO: 5965695 - DNA, 25 bp, Homo sapien
tatattttgggtaaattcaggtatg

SEQ ID NO: 5965696 - DNA, 25 bp, Homo sapien
gccagctatttttgatggtacaaat

SEQ ID NO: 5965697 - DNA, 25 bp, Homo sapien
cgacgatgccttttctaacgttaaa

SEQ ID NO: 5965698 - DNA, 25 bp, Homo sapien
gaagtaggagcaggagcagatctca

SEQ ID NO: 5965699 - DNA, 25 bp, Homo sapien
gaaaagttttcggtagcagagacga

SEQ ID NO: 5965700 - DNA, 25 bp, Homo sapien
agcaaatgtcgcaaggaggaaacct

SEQ ID NO: 5965701 - DNA, 25 bp, Homo sapien
agcttaaaacatgttgacagagaat

SEQ ID NO: 5965702 - DNA, 25 bp, Homo sapien
acagcttcagatgcagcaacagcaa

SEQ ID NO: 5965703 - DNA, 25 bp, Homo sapien
gtacccttcaacagtattacgatcc

SEQ ID NO: 5965704 - DNA, 25 bp, Homo sapien
gatattctaggcaactggcagaact

SEQ ID NO: 5965705 - DNA, 25 bp, Homo sapien
atcttttcagcaaatgtcgcaagga

SEQ ID NO: 5965706 - DNA, 25 bp, Homo sapien
tagtgtatcggcagcagcgacaaca

SEQ ID NO: 5965707 - DNA, 25 bp, Homo sapien
ggacaggtttgatgaaagaaataga

SEQ ID NO: 5965708 - DNA, 25 bp, Homo sapien
ccgagaatgccaataaatgcggtga

SEQ ID NO: 5965709 - DNA, 25 bp, Homo sapien
agggactcattccaaagcagtggaa

SEQ ID NO: 5965710 - DNA, 25 bp, Homo sapien
cacagccagctatttttgatggtac

SEQ ID NO: 5965711 - DNA, 25 bp, Homo sapien
aggcgccattatcttttcagcaaat

SEQ ID NO: 5965712 - DNA, 25 bp, Homo sapien
aggctcaagttcaggctcaggctca

SEQ ID NO: 5965713 - DNA, 25 bp, Homo sapien
ccatagcttaaaacatgttgacaga

SEQ ID NO: 5965714 - DNA, 25 bp, Homo sapien
cttcagatgcagcaacagcaacagg

SEQ ID NO: 5965715 - DNA, 25 bp, Homo sapien
gtgcgacaacaagtggcccacagcc

SEQ ID NO: 5965716 - DNA, 25 bp, Homo sapien
gatccagaatggatgattttgatgg

SEQ ID NO: 5965717 - DNA, 25 bp, Homo sapien
tggtaatttctacccaacttggtgc

SEQ ID NO: 5965718 - DNA, 25 bp, Homo sapien
cggttctggaatcctaaaaatgtcc

SEQ ID NO: 5965719 - DNA, 25 bp, Homo sapien
gtgctcagttaatttgggggttttc

SEQ ID NO: 5965720 - DNA, 25 bp, Homo sapien
tggagcattacattagagacaagta

SEQ ID NO: 5965721 - DNA, 25 bp, Homo sapien
ctcggttctggaatcctaaaaatgt

SEQ ID NO: 5965722 - DNA, 25 bp, Homo sapien
cagaactcaaggacatgggtttcgg

SEQ ID NO: 5965723 - DNA, 25 bp, Homo sapien
atatcaatagagcaatcgattatct

SEQ ID NO: 5965724 - DNA, 25 bp, Homo sapien
ttccagggactcattccaaagcagt

SEQ ID NO: 5965725 - DNA, 25 bp, Homo sapien
tacggcggttccagggactcattcc

SEQ ID NO: 5965726 - DNA, 25 bp, Homo sapien
cttttccttttgatggagatgatga

SEQ ID NO: 5965727 - DNA, 25 bp, Homo sapien
aaacaaaaatttagatgcattatcg

SEQ ID NO: 5965728 - DNA, 25 bp, Homo sapien
caacaggcgccattatcttttcagc

SEQ ID NO: 5965729 - DNA, 25 bp, Homo sapien
gccaataaatgcggtgaatgtggta

SEQ ID NO: 5965730 - DNA, 25 bp, Homo sapien
tttacttcaaattcagcatcttttg

SEQ ID NO: 5965731 - DNA, 25 bp, Homo sapien
gatccagatgcaacagcttcagatg

SEQ ID NO: 5965732 - DNA, 25 bp, Homo sapien
agatggacaagagaggatatcgatg

SEQ ID NO: 5965733 - DNA, 25 bp, Homo sapien
caatacgccatggctatgcaacagc

SEQ ID NO: 5965734 - DNA, 25 bp, Homo sapien
aactggcagaactcaaggacatggg

SEQ ID NO: 5965735 - DNA, 25 bp, Homo sapien
tcaggcacaggcacaggcacaggct

SEQ ID NO: 5965736 - DNA, 25 bp, Homo sapien
gtagcagagacgacgatgccttttc

SEQ ID NO: 5965737 - DNA, 25 bp, Homo sapien
ttttctaacgttaaatcactatcaa

SEQ ID NO: 5965738 - DNA, 25 bp, Homo sapien
cagcaacagcaacagcaacagcttg

SEQ ID NO: 5965739 - DNA, 25 bp, Homo sapien
acgtgcgacaacaagtggcccacag

SEQ ID NO: 5965740 - DNA, 25 bp, Homo sapien
ataaagggggccataataggtctga

SEQ ID NO: 5965741 - DNA, 25 bp, Homo sapien
caggtatgatgaaataaagcctgaa

SEQ ID NO: 5965742 - DNA, 25 bp, Homo sapien
taggagttcttcccatagcttaaaa

SEQ ID NO: 5965743 - DNA, 25 bp, Homo sapien
tattacgatcctgctaccggaatga

SEQ ID NO: 5965744 - DNA, 25 bp, Homo sapien
agcaacaggcgccattatcttttca

SEQ ID NO: 5965745 - DNA, 25 bp, Homo sapien
tgcccaggagacgtgcgacaacaag

SEQ ID NO: 5965746 - DNA, 25 bp, Homo sapien
gcttgctgtcgcacaggctcaggct

SEQ ID NO: 5965747 - DNA, 25 bp, Homo sapien
aataaagcctgaagactttggatcc

SEQ ID NO: 5965748 - DNA, 25 bp, Homo sapien
gcaaggaggaaacctgccacaaggt

SEQ ID NO: 5965749 - DNA, 25 bp, Homo sapien
actttggatccagaatggatgattt

SEQ ID NO: 5965750 - DNA, 25 bp, Homo sapien
gttcaggctcaggctcaggctcagg

SEQ ID NO: 5965751 - DNA, 25 bp, Homo sapien
aaagccatcgtggagcattacatta

SEQ ID NO: 5965752 - DNA, 25 bp, Homo sapien
atcggcagcagcgacaacatcaact

SEQ ID NO: 5965753 - DNA, 25 bp, Homo sapien
ccggaatgatatatgtagatcagca

SEQ ID NO: 5965754 - DNA, 25 bp, Homo sapien
agcagcgacaacatcaactccgccc

SEQ ID NO: 5965755 - DNA, 25 bp, Homo sapien
ccagattttacttcaaattcagcat

SEQ ID NO: 5965756 - DNA, 25 bp, Homo sapien
ggagcaggagcagatctcattcttt

SEQ ID NO: 5965757 - DNA, 25 bp, Homo sapien
cccaacttggtgctcagttaatttg

SEQ ID NO: 5965758 - DNA, 25 bp, Homo sapien
atatcgatgaattagtgagtcttgg

SEQ ID NO: 5965759 - DNA, 25 bp, Homo sapien
ttcaacagtattacgatcctgctac

SEQ ID NO: 5965760 - DNA, 25 bp, Homo sapien
cagatccagatgcaacagcttcaga

SEQ ID NO: 5965761 - DNA, 25 bp, Homo sapien
acaggcacaggcacaggctcaagtt

SEQ ID NO: 5965762 - DNA, 25 bp, Homo sapien
ataaggggaatgctcggttctggaa

SEQ ID NO: 5965763 - DNA, 25 bp, Homo sapien
gatgcaacagcttcagatgcagcaa

SEQ ID NO: 5965764 - DNA, 25 bp, Homo sapien
ctaacgttaaatcactatcaatgga

SEQ ID NO: 5965765 - DNA, 25 bp, Homo sapien
ctatcaatggatagatggacaagag

SEQ ID NO: 5965766 - DNA, 25 bp, Homo sapien
tcgtccgagaatgccaataaatgcg

SEQ ID NO: 5965767 - DNA, 25 bp, Homo sapien
acaagagaggatatcgatgaattag

SEQ ID NO: 5965768 - DNA, 25 bp, Homo sapien
gttttcctttgtggtaggtgtgcct

SEQ ID NO: 5965769 - DNA, 25 bp, Homo sapien
acgatgccttttctaacgttaaatc

SEQ ID NO: 5965770 - DNA, 25 bp, Homo sapien
ggacatgggtttcggtgatacaaac

SEQ ID NO: 5965771 - DNA, 25 bp, Homo sapien
gttctggaatcctaaaaatgtccct

SEQ ID NO: 5965772 - DNA, 25 bp, Homo sapien
ttaaaggagttgattaattcgtccg

SEQ ID NO: 5965773 - DNA, 25 bp, Homo sapien
aggctcaggctcaggctcaggccca

SEQ ID NO: 5965774 - DNA, 25 bp, Homo sapien
attccaaagcagtggaagcagatat

SEQ ID NO: 5965775 - DNA, 25 bp, Homo sapien
tcaggctcaggctcaggcccaggct

SEQ ID NO: 5965776 - DNA, 25 bp, Homo sapien
tcagcatcttttgtacaagcaaagc

SEQ ID NO: 5965777 - DNA, 25 bp, Homo sapien
agagacaagtatattttgggtaaat

SEQ ID NO: 5965778 - DNA, 25 bp, Homo sapien
agatgatgacaaagccatcgtggag

SEQ ID NO: 5965779 - DNA, 25 bp, Homo sapien
agattttacttcaaattcagcatct

SEQ ID NO: 5965780 - DNA, 25 bp, Homo sapien
cagatgcaacagcttcagatgcagc

SEQ ID NO: 5965781 - DNA, 25 bp, Homo sapien
ggaggaaacctgccacaaggttatt

SEQ ID NO: 5965782 - DNA, 25 bp, Homo sapien
gttttcgatggtacccttcaacagt

SEQ ID NO: 5965783 - DNA, 25 bp, Homo sapien
acaggcgccattatcttttcagcaa

SEQ ID NO: 5965784 - DNA, 25 bp, Homo sapien
tcgcaaggaggaaacctgccacaag

SEQ ID NO: 5965785 - DNA, 25 bp, Homo sapien
tggctatgcaacagcagcaacagca

SEQ ID NO: 5965786 - DNA, 25 bp, Homo sapien
acatcaactccgcccctgcccagga

SEQ ID NO: 5965787 - DNA, 25 bp, Homo sapien
attttacttcaaattcagcatcttt

SEQ ID NO: 5965788 - DNA, 25 bp, Homo sapien
aggcacaggcacaggctcaagttca

SEQ ID NO: 5965789 - DNA, 25 bp, Homo sapien
tcaaggacatgggtttcggtgatac

SEQ ID NO: 5965790 - DNA, 25 bp, Homo sapien
gctcaagttcaggctcaggctcagg

SEQ ID NO: 5965791 - DNA, 25 bp, Homo sapien
atgcagcaacagcaacaggcgccat

SEQ ID NO: 5965792 - DNA, 25 bp, Homo sapien
aacgttaaatcactatcaatggata

SEQ ID NO: 5965793 - DNA, 25 bp, Homo sapien
ctgctaccggaatgatatatgtaga

SEQ ID NO: 5965794 - DNA, 25 bp, Homo sapien
aggctcaggcacaggcacaggcaca

SEQ ID NO: 5965795 - DNA, 25 bp, Homo sapien
cctgcccaggagacgtgcgacaaca

SEQ ID NO: 5965796 - DNA, 25 bp, Homo sapien
cagcaacagcaacagcttgctgtcg

SEQ ID NO: 5965797 - DNA, 25 bp, Homo sapien
aggctcaggctcaagcacagcagat

SEQ ID NO: 5965798 - DNA, 25 bp, Homo sapien
gaaagaaatagaagtaggagcagga

SEQ ID NO: 5965799 - DNA, 25 bp, Homo sapien
tacaaatgtaatcacgccagatttt

SEQ ID NO: 5965800 - DNA, 25 bp, Homo sapien
cacgccagattttacttcaaattca

SEQ ID NO: 5965801 - DNA, 25 bp, Homo sapien
aagttcaagaaatagtgtatcggca

SEQ ID NO: 5965802 - DNA, 25 bp, Homo sapien
ccgctcacggaaatatcaatagagc

SEQ ID NO: 5965803 - DNA, 25 bp, Homo sapien
aaggacatgggtttcggtgatacaa

SEQ ID NO: 5965804 - DNA, 25 bp, Homo sapien
tcagatgcagcaacagcaacaggcg

SEQ ID NO: 5965805 - DNA, 25 bp, Homo sapien
acaaaaatttagatgcattatcgtc

SEQ ID NO: 5965806 - DNA, 25 bp, Homo sapien
atcaactccgcccctgcccaggaga

SEQ ID NO: 5965807 - DNA, 25 bp, Homo sapien
gaaaaaagttcaagttcaagaaata

SEQ ID NO: 5965808 - DNA, 25 bp, Homo sapien
tcaagttcaagaaatagtgtatcgg

SEQ ID NO: 5965809 - DNA, 25 bp, Homo sapien
gagcattacattagagacaagtata

SEQ ID NO: 5965810 - DNA, 25 bp, Homo sapien
aataggtctgactacggcggttcca

SEQ ID NO: 5965811 - DNA, 25 bp, Homo sapien
atgatgacaaagccatcgtggagca

SEQ ID NO: 5965812 - DNA, 25 bp, Homo sapien
aaattcagcatcttttgtacaagca

SEQ ID NO: 5965813 - DNA, 25 bp, Homo sapien
agccatcgtggagcattacattaga

SEQ ID NO: 5965814 - DNA, 25 bp, Homo sapien
tgtaatcacgccagattttacttca

SEQ ID NO: 5965815 - DNA, 25 bp, Homo sapien
agactttggatccagaatggatgat

SEQ ID NO: 5965816 - DNA, 25 bp, Homo sapien
cagccagctatttttgatggtacaa

SEQ ID NO: 5965817 - DNA, 25 bp, Homo sapien
ggtaggtgtgcctctgttcatagaa

SEQ ID NO: 5965818 - DNA, 25 bp, Homo sapien
aatagtgtatcggcagcagcgacaa

SEQ ID NO: 5965819 - DNA, 25 bp, Homo sapien
tccaaagcagtggaagcagatattc

SEQ ID NO: 5965820 - DNA, 25 bp, Homo sapien
gatggtacccttcaacagtattacg

SEQ ID NO: 5965821 - DNA, 25 bp, Homo sapien
caacagtattacgatcctgctaccg

SEQ ID NO: 5965822 - DNA, 25 bp, Homo sapien
tcgtccgctcacggaaatatcaata

SEQ ID NO: 5965823 - DNA, 25 bp, Homo sapien
gtaatttctacccaacttggtgctc

SEQ ID NO: 5965824 - DNA, 25 bp, Homo sapien
atagcttaaaacatgttgacagaga

SEQ ID NO: 5965825 - DNA, 25 bp, Homo sapien
attatcgtccgctcacggaaatatc

SEQ ID NO: 5965826 - DNA, 25 bp, Homo sapien
tagaaaagttttcggtagcagagac

SEQ ID NO: 5965827 - DNA, 25 bp, Homo sapien
caaatgtaatcacgccagattttac

SEQ ID NO: 5965828 - DNA, 25 bp, Homo sapien
gtatcggcagcagcgacaacatcaa

SEQ ID NO: 5965829 - DNA, 25 bp, Homo sapien
acagcaagctgttgctgttgctgtt

SEQ ID NO: 5965830 - DNA, 25 bp, Homo sapien
gaaaaggcatcgtcgtctctgctac

SEQ ID NO: 5965831 - DNA, 25 bp, Homo sapien
ccacgatggctttgtcatcatctcc

SEQ ID NO: 5965832 - DNA, 25 bp, Homo sapien
ccaagactcactaattcatcgatat

SEQ ID NO: 5965833 - DNA, 25 bp, Homo sapien
caaattaactgagcaccaagttggg

SEQ ID NO: 5965834 - DNA, 25 bp, Homo sapien
tggctttgtcatcatctccatcaaa

SEQ ID NO: 5965835 - DNA, 25 bp, Homo sapien
tgttgcatagccatggcgtattgct

SEQ ID NO: 5965836 - DNA, 25 bp, Homo sapien
tttcatcatacctgaatttacccaa

SEQ ID NO: 5965837 - DNA, 25 bp, Homo sapien
catgtccttgagttctgccagttgc

SEQ ID NO: 5965838 - DNA, 25 bp, Homo sapien
gctttgtcatcatctccatcaaaag

SEQ ID NO: 5965839 - DNA, 25 bp, Homo sapien
tgagttctgccagttgcctagaata

SEQ ID NO: 5965840 - DNA, 25 bp, Homo sapien
cgtcgtctctgctaccgaaaacttt

SEQ ID NO: 5965841 - DNA, 25 bp, Homo sapien
aaaatatacttgtctctaatgtaat

SEQ ID NO: 5965842 - DNA, 25 bp, Homo sapien
atcaccgaaacccatgtccttgagt

SEQ ID NO: 5965843 - DNA, 25 bp, Homo sapien
tgcatctgaagctgttgcatctgga

SEQ ID NO: 5965844 - DNA, 25 bp, Homo sapien
atcatctccatcaaaaggaaaaggg

SEQ ID NO: 5965845 - DNA, 25 bp, Homo sapien
gatttaacgttagaaaaggcatcgt

SEQ ID NO: 5965846 - DNA, 25 bp, Homo sapien
gtctctgctaccgaaaacttttcta

SEQ ID NO: 5965847 - DNA, 25 bp, Homo sapien
tgtctctaatgtaatgctccacgat

SEQ ID NO: 5965848 - DNA, 25 bp, Homo sapien
cggacgataatgcatctaaattttt

SEQ ID NO: 5965849 - DNA, 25 bp, Homo sapien
tgttgaagggtaccatcgaaaactg

SEQ ID NO: 5965850 - DNA, 25 bp, Homo sapien
aaaagataatggcgcctgttgctgt

SEQ ID NO: 5965851 - DNA, 25 bp, Homo sapien
cccccaaattaactgagcaccaagt

SEQ ID NO: 5965852 - DNA, 25 bp, Homo sapien
tttctttcatcaaacctgtccgatt

SEQ ID NO: 5965853 - DNA, 25 bp, Homo sapien
agctggctgtgggccacttgttgtc

SEQ ID NO: 5965854 - DNA, 25 bp, Homo sapien
tatttctttcatcaaacctgtccga

SEQ ID NO: 5965855 - DNA, 25 bp, Homo sapien
atggcgcctgttgctgttgctgcat

SEQ ID NO: 5965856 - DNA, 25 bp, Homo sapien
catccattctggatccaaagtcttc

SEQ ID NO: 5965857 - DNA, 25 bp, Homo sapien
aatgctccacgatggctttgtcatc

SEQ ID NO: 5965858 - DNA, 25 bp, Homo sapien
ataatcgattgctctattgatattt

SEQ ID NO: 5965859 - DNA, 25 bp, Homo sapien
catctaaatttttgtttgtatcacc

SEQ ID NO: 5965860 - DNA, 25 bp, Homo sapien
caaaatcatccattctggatccaaa

SEQ ID NO: 5965861 - DNA, 25 bp, Homo sapien
ttttttctagataatcgattgctct

SEQ ID NO: 5965862 - DNA, 25 bp, Homo sapien
ttacatttgtaccatcaaaaatagc

SEQ ID NO: 5965863 - DNA, 25 bp, Homo sapien
ccgatacactatttcttgaacttga

SEQ ID NO: 5965864 - DNA, 25 bp, Homo sapien
gatatttccgtgagcggacgataat

SEQ ID NO: 5965865 - DNA, 25 bp, Homo sapien
aagctatgggaagaactcctaaacc

SEQ ID NO: 5965866 - DNA, 25 bp, Homo sapien
ctgctgttgcatagccatggcgtat

SEQ ID NO: 5965867 - DNA, 25 bp, Homo sapien
atctgcttccactgctttggaatga

SEQ ID NO: 5965868 - DNA, 25 bp, Homo sapien
agataatcgattgctctattgatat

SEQ ID NO: 5965869 - DNA, 25 bp, Homo sapien
ttgctgttgctgcatctgaagctgt

SEQ ID NO: 5965870 - DNA, 25 bp, Homo sapien
aagtaaaatctggcgtgattacatt

SEQ ID NO: 5965871 - DNA, 25 bp, Homo sapien
gtgggccacttgttgtcgcacgtct

SEQ ID NO: 5965872 - DNA, 25 bp, Homo sapien
ccgaaaacttttctatgaacagagg

SEQ ID NO: 5965873 - DNA, 25 bp, Homo sapien
tgctgttgctgctgttgcatagcca

SEQ ID NO: 5965874 - DNA, 25 bp, Homo sapien
tacaaaagatgctgaatttgaagta

SEQ ID NO: 5965875 - DNA, 25 bp, Homo sapien
acgttagaaaaggcatcgtcgtctc

SEQ ID NO: 5965876 - DNA, 25 bp, Homo sapien
gcaggggcggagttgatgttgtcgc

SEQ ID NO: 5965877 - DNA, 25 bp, Homo sapien
aaaactgctggctttgcttgtacaa

SEQ ID NO: 5965878 - DNA, 25 bp, Homo sapien
aacttgagcctgtgcctgtgcctgt

SEQ ID NO: 5965879 - DNA, 25 bp, Homo sapien
tgctgatctacatatatcattccgg

SEQ ID NO: 5965880 - DNA, 25 bp, Homo sapien
agaaattaccacattcaccgcattt

SEQ ID NO: 5965881 - DNA, 25 bp, Homo sapien
cgctgctgccgatacactatttctt

SEQ ID NO: 5965882 - DNA, 25 bp, Homo sapien
tcaaaaatagctggctgtgggccac

SEQ ID NO: 5965883 - DNA, 25 bp, Homo sapien
tctccatcaaaaggaaaagggacat

SEQ ID NO: 5965884 - DNA, 25 bp, Homo sapien
tttattggcattctcggacgaatta

SEQ ID NO: 5965885 - DNA, 25 bp, Homo sapien
gtttcctccttgcgacatttgctga

SEQ ID NO: 5965886 - DNA, 25 bp, Homo sapien
gtaatgctccacgatggctttgtca

SEQ ID NO: 5965887 - DNA, 25 bp, Homo sapien
ctgtgggccacttgttgtcgcacgt

SEQ ID NO: 5965888 - DNA, 25 bp, Homo sapien
ggccccctttatagaaagaatgaga

SEQ ID NO: 5965889 - DNA, 25 bp, Homo sapien
tccttgagttctgccagttgcctag

SEQ ID NO: 5965890 - DNA, 25 bp, Homo sapien
cattctggatccaaagtcttcaggc

SEQ ID NO: 5965891 - DNA, 25 bp, Homo sapien
gatgttgtcgctgctgccgatacac

SEQ ID NO: 5965892 - DNA, 25 bp, Homo sapien
agaggcacacctaccacaaaggaaa

SEQ ID NO: 5965893 - DNA, 25 bp, Homo sapien
gaaaacccccaaattaactgagcac

SEQ ID NO: 5965894 - DNA, 25 bp, Homo sapien
aagataatggcgcctgttgctgttg

SEQ ID NO: 5965895 - DNA, 25 bp, Homo sapien
gaacagaggcacacctaccacaaag

SEQ ID NO: 5965896 - DNA, 25 bp, Homo sapien
aataaccttgtggcaggtttcctcc

SEQ ID NO: 5965897 - DNA, 25 bp, Homo sapien
actgttgaagggtaccatcgaaaac

SEQ ID NO: 5965898 - DNA, 25 bp, Homo sapien
atcgtaatactgttgaagggtacca

SEQ ID NO: 5965899 - DNA, 25 bp, Homo sapien
cacgtctcctgggcaggggcggagt

SEQ ID NO: 5965900 - DNA, 25 bp, Homo sapien
ttcctccttgcgacatttgctgaaa

SEQ ID NO: 5965901 - DNA, 25 bp, Homo sapien
gtagaaattaccacattcaccgcat

SEQ ID NO: 5965902 - DNA, 25 bp, Homo sapien
tagtgatttaacgttagaaaaggca

SEQ ID NO: 5965903 - DNA, 25 bp, Homo sapien
tgcatctaaatttttgtttgtatca

SEQ ID NO: 5965904 - DNA, 25 bp, Homo sapien
taatgtaatgctccacgatggcttt

SEQ ID NO: 5965905 - DNA, 25 bp, Homo sapien
ttgctgaaaagataatggcgcctgt

SEQ ID NO: 5965906 - DNA, 25 bp, Homo sapien
tcttgaacttgaacttttttctaga

SEQ ID NO: 5965907 - DNA, 25 bp, Homo sapien
tcatcatacctgaatttacccaaaa

SEQ ID NO: 5965908 - DNA, 25 bp, Homo sapien
tgaatttgaagtaaaatctggcgtg

SEQ ID NO: 5965909 - DNA, 25 bp, Homo sapien
aattcatcgatatcctctcttgtcc

SEQ ID NO: 5965910 - DNA, 25 bp, Homo sapien
taacgttagaaaaggcatcgtcgtc

SEQ ID NO: 5965911 - DNA, 25 bp, Homo sapien
gatggctttgtcatcatctccatca

SEQ ID NO: 5965912 - DNA, 25 bp, Homo sapien
tccgtgagcggacgataatgcatct

SEQ ID NO: 5965913 - DNA, 25 bp, Homo sapien
tcagacctattatggccccctttat

SEQ ID NO: 5965914 - DNA, 25 bp, Homo sapien
ttgtaccatcaaaaatagctggctg

SEQ ID NO: 5965915 - DNA, 25 bp, Homo sapien
attatggccccctttatagaaagaa

SEQ ID NO: 5965916 - DNA, 25 bp, Homo sapien
aggattccagaaccgagcattcccc

SEQ ID NO: 5965917 - DNA, 25 bp, Homo sapien
tctggcgtgattacatttgtaccat

SEQ ID NO: 5965918 - DNA, 25 bp, Homo sapien
ttgcatctggatctgctgtgcttga

SEQ ID NO: 5965919 - DNA, 25 bp, Homo sapien
caagctgttgctgttgctgttgctg

SEQ ID NO: 5965920 - DNA, 25 bp, Homo sapien
atctgctgtgcttgagcctgagcct

SEQ ID NO: 5965921 - DNA, 25 bp, Homo sapien
tagaaaaggcatcgtcgtctctgct

SEQ ID NO: 5965922 - DNA, 25 bp, Homo sapien
atggcgtattgctgctgatctacat

SEQ ID NO: 5965923 - DNA, 25 bp, Homo sapien
cactatttcttgaacttgaactttt

SEQ ID NO: 5965924 - DNA, 25 bp, Homo sapien
tgagatctgctcctgctcctacttc

SEQ ID NO: 5965925 - DNA, 25 bp, Homo sapien
caccgaaacccatgtccttgagttc

SEQ ID NO: 5965926 - DNA, 25 bp, Homo sapien
agcaagctgttgctgttgctgttgc

SEQ ID NO: 5965927 - DNA, 25 bp, Homo sapien
agttgatgttgtcgctgctgccgat

SEQ ID NO: 5965928 - DNA, 25 bp, Homo sapien
atgtaatgctccacgatggctttgt

SEQ ID NO: 5965929 - DNA, 25 bp, Homo sapien
catacctgaatttacccaaaatata

SEQ ID NO: 5965930 - DNA, 25 bp, Homo sapien
aaaaatagctggctgtgggccactt

SEQ ID NO: 5965931 - DNA, 25 bp, Homo sapien
ttgcatagccatggcgtattgctgc

SEQ ID NO: 5965932 - DNA, 25 bp, Homo sapien
ggcctgagcctgagcctgagcctga

SEQ ID NO: 5965933 - DNA, 25 bp, Homo sapien
tggaaccgccgtagtcagacctatt

SEQ ID NO: 5965934 - DNA, 25 bp, Homo sapien
caggatcgtaatactgttgaagggt

SEQ ID NO: 5965935 - DNA, 25 bp, Homo sapien
catcgatatcctctcttgtccatct

SEQ ID NO: 5965936 - DNA, 25 bp, Homo sapien
ttattgtgtgtagaaataaccttgt

SEQ ID NO: 5965937 - DNA, 25 bp, Homo sapien
tgcgacagcaagctgttgctgttgc

SEQ ID NO: 5965938 - DNA, 25 bp, Homo sapien
tgagtccctggaaccgccgtagtca

SEQ ID NO: 5965939 - DNA, 25 bp, Homo sapien
ttgaacttttttctagataatcgat

SEQ ID NO: 5965940 - DNA, 25 bp, Homo sapien
ttttctatgaacagaggcacaccta

SEQ ID NO: 5965941 - DNA, 25 bp, Homo sapien
accatcaaaaatagctggctgtggg

SEQ ID NO: 5965942 - DNA, 25 bp, Homo sapien
atttacccaaaatatacttgtctct

SEQ ID NO: 5965943 - DNA, 25 bp, Homo sapien
tttgtcatcatctccatcaaaagga

SEQ ID NO: 5965944 - DNA, 25 bp, Homo sapien
ttctcggacgaattaatcaactcct

SEQ ID NO: 5965945 - DNA, 25 bp, Homo sapien
tgttgtcgcacgtctcctgggcagg

SEQ ID NO: 5965946 - DNA, 25 bp, Homo sapien
tattggcattctcggacgaattaat

SEQ ID NO: 5965947 - DNA, 25 bp, Homo sapien
tatacttgtctctaatgtaatgctc

SEQ ID NO: 5965948 - DNA, 25 bp, Homo sapien
ctgttgctgttgctgctgttgcata

SEQ ID NO: 5965949 - DNA, 25 bp, Homo sapien
ggtaccatcgaaaactgctggcttt

SEQ ID NO: 5965950 - DNA, 25 bp, Homo sapien
cttgagcctgtgcctgtgcctgtgc

SEQ ID NO: 5965951 - DNA, 25 bp, Homo sapien
ttttgtttgtatcaccgaaacccat

SEQ ID NO: 5965952 - DNA, 25 bp, Homo sapien
ccatcaaaatcatccattctggatc

SEQ ID NO: 5965953 - DNA, 25 bp, Homo sapien
tgcctagaatatctgcttccactgc

SEQ ID NO: 5965954 - DNA, 25 bp, Homo sapien
ttgatatttccgtgagcggacgata

SEQ ID NO: 5965955 - DNA, 25 bp, Homo sapien
ggcgtattgctgctgatctacatat

SEQ ID NO: 5965956 - DNA, 25 bp, Homo sapien
tattgctgctgatctacatatatca

SEQ ID NO: 5965957 - DNA, 25 bp, Homo sapien
tctttcatcaaacctgtccgattcc

SEQ ID NO: 5965958 - DNA, 25 bp, Homo sapien
catcaaaaatagctggctgtgggcc

SEQ ID NO: 5965959 - DNA, 25 bp, Homo sapien
gaaccgccgtagtcagacctattat

SEQ ID NO: 5965960 - DNA, 25 bp, Homo sapien
ttgctctattgatatttccgtgagc

SEQ ID NO: 5965961 - DNA, 25 bp, Homo sapien
tgccgatacactatttcttgaactt

SEQ ID NO: 5965962 - DNA, 25 bp, Homo sapien
ttctggatccaaagtcttcaggctt

SEQ ID NO: 5965963 - DNA, 25 bp, Homo sapien
agtcttcaggctttatttcatcata

SEQ ID NO: 5965964 - DNA, 25 bp, Homo sapien
tctattgatatttccgtgagcggac

SEQ ID NO: 5965965 - DNA, 25 bp, Homo sapien
agcctgagcctgggcctgagcctga

SEQ ID NO: 5965966 - DNA, 25 bp, Homo sapien
accgcatttattggcattctcggac

SEQ ID NO: 5965967 - DNA, 25 bp, Homo sapien
gtagtcagacctattatggccccct

SEQ ID NO: 5965968 - DNA, 25 bp, Homo sapien
tccattgatagtgatttaacgttag

SEQ ID NO: 5965969 - DNA, 25 bp, Homo sapien
ttgtcgcacgtctcctgggcagggg

SEQ ID NO: 5965970 - DNA, 25 bp, Homo sapien
ctccaagactcactaattcatcgat

SEQ ID NO: 5965971 - DNA, 25 bp, Homo sapien
tcaacatgttttaagctatgggaag

SEQ ID NO: 5965972 - DNA, 25 bp, Homo sapien
gcaccaagttgggtagaaattacca

SEQ ID NO: 5965973 - DNA, 25 bp, Homo sapien
ctgctggctttgcttgtacaaaaga

SEQ ID NO: 5965974 - DNA, 25 bp, Homo sapien
catctccatcaaaaggaaaagggac

SEQ ID NO: 5965975 - DNA, 25 bp, Homo sapien
gtatcaccgaaacccatgtccttga

SEQ ID NO: 5965976 - DNA, 25 bp, Homo sapien
ctctgctaccgaaaacttttctatg

SEQ ID NO: 5965977 - DNA, 25 bp, Homo sapien
cctgttgctgttgctgcatctgaag

SEQ ID NO: 5965978 - DNA, 25 bp, Homo sapien
taccgaaaacttttctatgaacaga

SEQ ID NO: 5965979 - DNA, 25 bp, Homo sapien
atccaaagtcttcaggctttatttc

SEQ ID NO: 5965980 - DNA, 25 bp, Homo sapien
tgtgtagaaataaccttgtggcagg

SEQ ID NO: 5965981 - DNA, 25 bp, Homo sapien
atcaaaatcatccattctggatcca

SEQ ID NO: 5965982 - DNA, 25 bp, Homo sapien
cctgagcctgaacttgagcctgtgc

SEQ ID NO: 5965983 - DNA, 25 bp, Homo sapien
gaacttttttctagataatcgattg

SEQ ID NO: 5965984 - DNA, 25 bp, Homo sapien
tcaactcctttaattctctgtcaac

SEQ ID NO: 5965985 - DNA, 25 bp, Homo sapien
tgctgctgttgcatagccatggcgt

SEQ ID NO: 5965986 - DNA, 25 bp, Homo sapien
ttccactgctttggaatgagtccct

SEQ ID NO: 5965987 - DNA, 25 bp, Homo sapien
cctgtgcctgagcctgagcctgtgc

SEQ ID NO: 5965988 - DNA, 25 bp, Homo sapien
tgagcggacgataatgcatctaaat

SEQ ID NO: 5965989 - DNA, 25 bp, Homo sapien
tcatcatctccatcaaaaggaaaag

SEQ ID NO: 5965990 - DNA, 25 bp, Homo sapien
tcgatatcctctcttgtccatctat

SEQ ID NO: 5965991 - DNA, 25 bp, Homo sapien
gttagaaaaggcatcgtcgtctctg

SEQ ID NO: 5965992 - DNA, 25 bp, Homo sapien
ggacatttttaggattccagaaccg

SEQ ID NO: 5965993 - DNA, 25 bp, Homo sapien
gactcactaattcatcgatatcctc

SEQ ID NO: 5965994 - DNA, 25 bp, Homo sapien
tatttcttgaacttgaacttttttc

SEQ ID NO: 5965995 - DNA, 25 bp, Homo sapien
tacatatatcattccggtagcagga

SEQ ID NO: 5965996 - DNA, 25 bp, Homo sapien
accgccgtagtcagacctattatgg

SEQ ID NO: 5965997 - DNA, 25 bp, Homo sapien
aagactcactaattcatcgatatcc

SEQ ID NO: 5965998 - DNA, 25 bp, Homo sapien
agcctgagcctgaacttgagcctgt

SEQ ID NO: 5965999 - DNA, 25 bp, Homo sapien
gtaccatcaaaaatagctggctgtg

SEQ ID NO: 5966000 - DNA, 25 bp, Homo sapien
tcctgctcctacttctatttctttc

SEQ ID NO: 5966001 - DNA, 25 bp, Homo sapien
gctatgggaagaactcctaaacctc

SEQ ID NO: 5966002 - DNA, 25 bp, Homo sapien
tctacatatatcattccggtagcag

SEQ ID NO: 5966003 - DNA, 25 bp, Homo sapien
taatactgttgaagggtaccatcga

SEQ ID NO: 5966004 - DNA, 25 bp, Homo sapien
tgtccttgagttctgccagttgcct

SEQ ID NO: 5966005 - DNA, 25 bp, Homo sapien
cagttgcctagaatatctgcttcca

SEQ ID NO: 5966006 - DNA, 25 bp, Homo sapien
tgaacttgagcctgtgcctgtgcct

SEQ ID NO: 5966007 - DNA, 25 bp, Homo sapien
atggccccctttatagaaagaatga

SEQ ID NO: 5966008 - DNA, 25 bp, Homo sapien
aaccgagcattccccttattgcctc

SEQ ID NO: 5966009 - DNA, 25 bp, Homo sapien
atagccatggcgtattgctgctgat

SEQ ID NO: 5966010 - DNA, 25 bp, Homo sapien
tatttcatcatacctgaatttaccc

SEQ ID NO: 5966011 - DNA, 25 bp, Homo sapien
ttctagataatcgattgctctattg

SEQ ID NO: 5966012 - DNA, 25 bp, Homo sapien
ttttctagataatcgattgctctat

SEQ ID NO: 5966013 - DNA, 25 bp, Homo sapien
tttcatcaaacctgtccgattcccc

SEQ ID NO: 5966014 - DNA, 25 bp, Homo sapien
agttctgccagttgcctagaatatc

SEQ ID NO: 5966015 - DNA, 25 bp, Homo sapien
ttgatagtgatttaacgttagaaaa

SEQ ID NO: 5966016 - DNA, 25 bp, Homo sapien
ctgccagttgcctagaatatctgct

SEQ ID NO: 5966017 - DNA, 25 bp, Homo sapien
agacctattatggccccctttatag

SEQ ID NO: 5966018 - DNA, 25 bp, Homo sapien
cttgttgtcgcacgtctcctgggca

SEQ ID NO: 5966019 - DNA, 25 bp, Homo sapien
aatgagatctgctcctgctcctact

SEQ ID NO: 5966020 - DNA, 25 bp, Homo sapien
gaagggtaccatcgaaaactgctgg

SEQ ID NO: 5966021 - DNA, 25 bp, Homo sapien
ccaaaatatacttgtctctaatgta

SEQ ID NO: 5966022 - DNA, 25 bp, Homo sapien
tgcctgagcctgagcctgtgcgaca

SEQ ID NO: 5966023 - DNA, 25 bp, Homo sapien
agatctgctcctgctcctacttcta

SEQ ID NO: 5966024 - DNA, 25 bp, Homo sapien
aggtttcctccttgcgacatttgct

SEQ ID NO: 5966025 - DNA, 25 bp, Homo sapien
ggcgcctgttgctgttgctgcatct

SEQ ID NO: 5966026 - DNA, 25 bp, Homo sapien
cattgatagtgatttaacgttagaa

SEQ ID NO: 5966027 - DNA, 25 bp, Homo sapien
gataatggcgcctgttgctgttgct

SEQ ID NO: 5966028 - DNA, 25 bp, Homo sapien
tgtcaacatgttttaagctatggga

SEQ ID NO: 5966029 - DNA, 25 bp, Homo sapien
ggatctgctgtgcttgagcctgagc

SEQ ID NO: 5966030 - DNA, 25 bp, Homo sapien
ctgctcctgctcctacttctatttc

SEQ ID NO: 5966031 - DNA, 25 bp, Homo sapien
tgctgttgctgttgctgctgttgca

SEQ ID NO: 5966032 - DNA, 25 bp, Homo sapien
ggaatgagtccctggaaccgccgta

SEQ ID NO: 5966033 - DNA, 25 bp, Homo sapien
gaacttgaacttttttctagataat

SEQ ID NO: 5966034 - DNA, 25 bp, Homo sapien
tgaaaagataatggcgcctgttgct

SEQ ID NO: 5966035 - DNA, 25 bp, Homo sapien
gcatctggatctgctgtgcttgagc

SEQ ID NO: 5966036 - DNA, 25 bp, Homo sapien
tccctggaaccgccgtagtcagacc

SEQ ID NO: 5966037 - DNA, 25 bp, Homo sapien
atttttaggattccagaaccgagca

SEQ ID NO: 5966038 - DNA, 25 bp, Homo sapien
tttaacgttagaaaaggcatcgtcg

SEQ ID NO: 5966039 - DNA, 25 bp, Homo sapien
ccactgctttggaatgagtccctgg

SEQ ID NO: 5966040 - DNA, 25 bp, Homo sapien
ttctgccagttgcctagaatatctg

SEQ ID NO: 5966041 - DNA, 25 bp, Homo sapien
actgctttggaatgagtccctggaa

SEQ ID NO: 5966042 - DNA, 25 bp, Homo sapien
gacgataatgcatctaaatttttgt

SEQ ID NO: 5966043 - DNA, 25 bp, Homo sapien
ttgtttgtatcaccgaaacccatgt

SEQ ID NO: 5966044 - DNA, 25 bp, Homo sapien
tacactatttcttgaacttgaactt

SEQ ID NO: 5966045 - DNA, 25 bp, Homo sapien
catgttttaagctatgggaagaact

SEQ ID NO: 5966046 - DNA, 25 bp, Homo sapien
cgacatttgctgaaaagataatggc

SEQ ID NO: 5966047 - DNA, 25 bp, Homo sapien
ccatcgaaaactgctggctttgctt

SEQ ID NO: 5966048 - DNA, 25 bp, Homo sapien
taaatttttgtttgtatcaccgaaa

SEQ ID NO: 5966049 - DNA, 25 bp, Homo sapien
aacatgttttaagctatgggaagaa

SEQ ID NO: 5966050 - DNA, 25 bp, Homo sapien
aacccccaaattaactgagcaccaa

SEQ ID NO: 5966051 - DNA, 25 bp, Homo sapien
caaaagatgctgaatttgaagtaaa

SEQ ID NO: 5966052 - DNA, 25 bp, Homo sapien
tgagcctgagcctgtgcgacagcaa

SEQ ID NO: 5966053 - DNA, 25 bp, Homo sapien
ttaggattccagaaccgagcattcc

SEQ ID NO: 5966054 - DNA, 25 bp, Homo sapien
tgttgcatctggatctgctgtgctt

SEQ ID NO: 5966055 - DNA, 25 bp, Homo sapien
cgacagcaagctgttgctgttgctg

SEQ ID NO: 5966056 - DNA, 25 bp, Homo sapien
attccggtagcaggatcgtaatact

SEQ ID NO: 5966057 - DNA, 25 bp, Homo sapien
ttatagaaagaatgagatctgctcc

SEQ ID NO: 5966058 - DNA, 25 bp, Homo sapien
tattgcctccaagactcactaattc

SEQ ID NO: 5966059 - DNA, 25 bp, Homo sapien
gatagtgatttaacgttagaaaagg

SEQ ID NO: 5966060 - DNA, 25 bp, Homo sapien
gctcctgctcctacttctatttctt

SEQ ID NO: 5966061 - DNA, 25 bp, Homo sapien
tttccgtgagcggacgataatgcat

SEQ ID NO: 5966062 - DNA, 25 bp, Homo sapien
ttgggtagaaattaccacattcacc

SEQ ID NO: 5966063 - DNA, 25 bp, Homo sapien
acattcaccgcatttattggcattc

SEQ ID NO: 5966064 - DNA, 25 bp, Homo sapien
atgaacagaggcacacctaccacaa

SEQ ID NO: 5966065 - DNA, 25 bp, Homo sapien
aactcctttaattctctgtcaacat

SEQ ID NO: 5966066 - DNA, 25 bp, Homo sapien
ctgctaccgaaaacttttctatgaa

SEQ ID NO: 5966067 - DNA, 25 bp, Homo sapien
gatacactatttcttgaacttgaac

SEQ ID NO: 5966068 - DNA, 25 bp, Homo sapien
tacctgaatttacccaaaatatact

SEQ ID NO: 5966069 - DNA, 25 bp, Homo sapien
tgttttaagctatgggaagaactcc

SEQ ID NO: 5966070 - DNA, 25 bp, Homo sapien
atcgaaaactgctggctttgcttgt

SEQ ID NO: 5966071 - DNA, 25 bp, Homo sapien
agatgctgaatttgaagtaaaatct

SEQ ID NO: 5966072 - DNA, 25 bp, Homo sapien
tctgtcaacatgttttaagctatgg

SEQ ID NO: 5966073 - DNA, 25 bp, Homo sapien
agggacatttttaggattccagaac

SEQ ID NO: 5966074 - DNA, 25 bp, Homo sapien
gagcaccaagttgggtagaaattac

SEQ ID NO: 5966075 - DNA, 25 bp, Homo sapien
cctgagcctgagcctgaacttgagc

SEQ ID NO: 5966076 - DNA, 25 bp, Homo sapien
tgtccatctatccattgatagtgat

SEQ ID NO: 5966077 - DNA, 25 bp, Homo sapien
gctgttgcatctggatctgctgtgc

SEQ ID NO: 5966078 - DNA, 25 bp, Homo sapien
tccattctggatccaaagtcttcag

SEQ ID NO: 5966079 - DNA, 25 bp, Homo sapien
cctggaaccgccgtagtcagaccta

SEQ ID NO: 5966080 - DNA, 25 bp, Homo sapien
tcaccgcatttattggcattctcgg

SEQ ID NO: 5966081 - DNA, 25 bp, Homo sapien
tgcttgagcctgagcctgggcctga

SEQ ID NO: 5966082 - DNA, 25 bp, Homo sapien
tatccattgatagtgatttaacgtt

SEQ ID NO: 5966083 - DNA, 25 bp, Homo sapien
ccctttatagaaagaatgagatctg

SEQ ID NO: 5966084 - DNA, 25 bp, Homo sapien
ataatgcatctaaatttttgtttgt

SEQ ID NO: 5966085 - DNA, 25 bp, Homo sapien
gtagcaggatcgtaatactgttgaa

SEQ ID NO: 5966086 - DNA, 25 bp, Homo sapien
agcctgtgcctgtgcctgtgcctga

SEQ ID NO: 5966087 - DNA, 25 bp, Homo sapien
gaaacccatgtccttgagttctgcc

SEQ ID NO: 5966088 - DNA, 25 bp, Homo sapien
ctgcttccactgctttggaatgagt

SEQ ID NO: 5966089 - DNA, 25 bp, Homo sapien
tgttgctgttgctgcatctgaagct

SEQ ID NO: 5966090 - DNA, 25 bp, Homo sapien
agcctgggcctgagcctgagcctga

SEQ ID NO: 5966091 - DNA, 25 bp, Homo sapien
cctgggcctgagcctgagcctgagc

SEQ ID NO: 5966092 - DNA, 25 bp, Homo sapien
gccacttgttgtcgcacgtctcctg

SEQ ID NO: 5966093 - DNA, 25 bp, Homo sapien
cgcatttattggcattctcggacga

SEQ ID NO: 5966094 - DNA, 25 bp, Homo sapien
ggctttatttcatcatacctgaatt

SEQ ID NO: 5966095 - DNA, 25 bp, Homo sapien
cgtgagcggacgataatgcatctaa

SEQ ID NO: 5966096 - DNA, 25 bp, Homo sapien
tctgaagctgttgcatctggatctg

SEQ ID NO: 5966097 - DNA, 25 bp, Homo sapien
ggatcgtaatactgttgaagggtac

SEQ ID NO: 5966098 - DNA, 25 bp, Homo sapien
tgagcctgagcctgaacttgagcct

SEQ ID NO: 5966099 - DNA, 25 bp, Homo sapien
atcgtcgtctctgctaccgaaaact

SEQ ID NO: 5966100 - DNA, 25 bp, Homo sapien
tgcttgtacaaaagatgctgaattt

SEQ ID NO: 5966101 - DNA, 25 bp, Homo sapien
tatttccgtgagcggacgataatgc

SEQ ID NO: 5966102 - DNA, 25 bp, Homo sapien
ctgctgccgatacactatttcttga

SEQ ID NO: 5966103 - DNA, 25 bp, Homo sapien
aatttgaagtaaaatctggcgtgat

SEQ ID NO: 5966104 - DNA, 25 bp, Homo sapien
cctgagcctgggcctgagcctgagc

SEQ ID NO: 5966105 - DNA, 25 bp, Homo sapien
agcctgtgcgacagcaagctgttgc

SEQ ID NO: 5966106 - DNA, 25 bp, Homo sapien
atcatccattctggatccaaagtct

SEQ ID NO: 5966107 - DNA, 25 bp, Homo sapien
acgatggctttgtcatcatctccat

SEQ ID NO: 5966108 - DNA, 25 bp, Homo sapien
gcatcgtcgtctctgctaccgaaaa

SEQ ID NO: 5966109 - DNA, 25 bp, Homo sapien
gctgttgcatagccatggcgtattg

SEQ ID NO: 5966110 - DNA, 25 bp, Homo sapien
gatctacatatatcattccggtagc

SEQ ID NO: 5966111 - DNA, 25 bp, Homo sapien
gacgaattaatcaactcctttaatt

SEQ ID NO: 5966112 - DNA, 25 bp, Homo sapien
gctgaatttgaagtaaaatctggcg

SEQ ID NO: 5966113 - DNA, 25 bp, Homo sapien
agtcagacctattatggcccccttt

SEQ ID NO: 5966114 - DNA, 25 bp, Homo sapien
acttttctatgaacagaggcacacc

SEQ ID NO: 5966115 - DNA, 25 bp, Homo sapien
gctggctttgcttgtacaaaagatg

SEQ ID NO: 5966116 - DNA, 25 bp, Homo sapien
tcatcaaacctgtccgattccccat

SEQ ID NO: 5966117 - DNA, 25 bp, Homo sapien
cttgagttctgccagttgcctagaa

SEQ ID NO: 5966118 - DNA, 25 bp, Homo sapien
cccttattgcctccaagactcacta

SEQ ID NO: 5966119 - DNA, 25 bp, Homo sapien
gtgattacatttgtaccatcaaaaa

SEQ ID NO: 5966120 - DNA, 25 bp, Homo sapien
cctagaatatctgcttccactgctt

SEQ ID NO: 5966121 - DNA, 25 bp, Homo sapien
gctgcatctgaagctgttgcatctg

SEQ ID NO: 5966122 - DNA, 25 bp, Homo sapien
ttgtatcaccgaaacccatgtcctt

SEQ ID NO: 5966123 - DNA, 25 bp, Homo sapien
acttttttctagataatcgattgct

SEQ ID NO: 5966124 - DNA, 25 bp, Homo sapien
gaatatctgcttccactgctttgga

SEQ ID NO: 5966125 - DNA, 25 bp, Homo sapien
ttcatcgatatcctctcttgtccat

SEQ ID NO: 5966126 - DNA, 25 bp, Homo sapien
cctgagcctgagcctgtgcgacagc

SEQ ID NO: 5966127 - DNA, 25 bp, Homo sapien
ccaaagtcttcaggctttatttcat

SEQ ID NO: 5966128 - DNA, 25 bp, Homo sapien
gctgctgatctacatatatcattcc

SEQ ID NO: 5966129 - DNA, 25 bp, Homo sapien
gcgtgattacatttgtaccatcaaa

SEQ ID NO: 5966130 - DNA, 25 bp, Homo sapien
tgagcctgtgcctgtgcctgtgcct

SEQ ID NO: 5966131 - DNA, 25 bp, Homo sapien
aaaggcatcgtcgtctctgctaccg

SEQ ID NO: 5966132 - DNA, 25 bp, Homo sapien
caggctttatttcatcatacctgaa

SEQ ID NO: 5966133 - DNA, 25 bp, Homo sapien
tatatcattccggtagcaggatcgt

SEQ ID NO: 5966134 - DNA, 25 bp, Homo sapien
ggagttgatgttgtcgctgctgccg

SEQ ID NO: 5966135 - DNA, 25 bp, Homo sapien
tgtacaaaagatgctgaatttgaag

SEQ ID NO: 5966136 - DNA, 25 bp, Homo sapien
aattaactgagcaccaagttgggta

SEQ ID NO: 5966137 - DNA, 25 bp, Homo sapien
gattgctctattgatatttccgtga

SEQ ID NO: 5966138 - DNA, 25 bp, Homo sapien
aatcgattgctctattgatatttcc

SEQ ID NO: 5966139 - DNA, 25 bp, Homo sapien
gctgttgctgcatctgaagctgttg

SEQ ID NO: 5966140 - DNA, 25 bp, Homo sapien
ctgaatttacccaaaatatacttgt

SEQ ID NO: 5966141 - DNA, 25 bp, Homo sapien
acatttgctgaaaagataatggcgc

SEQ ID NO: 5966142 - DNA, 25 bp, Homo sapien
agcaggatcgtaatactgttgaagg

SEQ ID NO: 5966143 - DNA, 25 bp, Homo sapien
gatatcctctcttgtccatctatcc

SEQ ID NO: 5966144 - DNA, 25 bp, Homo sapien
cttattgcctccaagactcactaat

SEQ ID NO: 5966145 - DNA, 25 bp, Homo sapien
cttgtctctaatgtaatgctccacg

SEQ ID NO: 5966146 - DNA, 25 bp, Homo sapien
cttgtccatctatccattgatagtg

SEQ ID NO: 5966147 - DNA, 25 bp, Homo sapien
agtccctggaaccgccgtagtcaga

SEQ ID NO: 5966148 - DNA, 25 bp, Homo sapien
atagaaagaatgagatctgctcctg

SEQ ID NO: 5966149 - DNA, 25 bp, Homo sapien
cacttgttgtcgcacgtctcctggg

SEQ ID NO: 5966150 - DNA, 25 bp, Homo sapien
gtaaaatctggcgtgattacatttg

SEQ ID NO: 5966151 - DNA, 25 bp, Homo sapien
ctggatccaaagtcttcaggcttta

SEQ ID NO: 5966152 - DNA, 25 bp, Homo sapien
ctggatctgctgtgcttgagcctga

SEQ ID NO: 5966153 - DNA, 25 bp, Homo sapien
tgtggcaggtttcctccttgcgaca

SEQ ID NO: 5966154 - DNA, 25 bp, Homo sapien
tttaattctctgtcaacatgtttta

SEQ ID NO: 5966155 - DNA, 25 bp, Homo sapien
agaaagaatgagatctgctcctgct

SEQ ID NO: 5966156 - DNA, 25 bp, Homo sapien
cttgagcctgagcctgggcctgagc

SEQ ID NO: 5966157 - DNA, 25 bp, Homo sapien
atatctgcttccactgctttggaat

SEQ ID NO: 5966158 - DNA, 25 bp, Homo sapien
attcaccgcatttattggcattctc

SEQ ID NO: 5966159 - DNA, 25 bp, Homo sapien
gattccagaaccgagcattcccctt

SEQ ID NO: 5966160 - DNA, 25 bp, Homo sapien
tgtgcctgtgcctgtgcctgagcct

SEQ ID NO: 5966161 - DNA, 25 bp, Homo sapien
gtttgtatcaccgaaacccatgtcc

SEQ ID NO: 5966162 - DNA, 25 bp, Homo sapien
catatatcattccggtagcaggatc

SEQ ID NO: 5966163 - DNA, 25 bp, Homo sapien
caagttgggtagaaattaccacatt

SEQ ID NO: 5966164 - DNA, 25 bp, Homo sapien
ccagaaccgagcattccccttattg

SEQ ID NO: 5966165 - DNA, 25 bp, Homo sapien
agctgttgctgttgctgttgctgct

SEQ ID NO: 5966166 - DNA, 25 bp, Homo sapien
ctttatagaaagaatgagatctgct

SEQ ID NO: 5966167 - DNA, 25 bp, Homo sapien
gctgtgcttgagcctgagcctgggc

SEQ ID NO: 5966168 - DNA, 25 bp, Homo sapien
gaatttacccaaaatatacttgtct

SEQ ID NO: 5966169 - DNA, 25 bp, Homo sapien
tgtgcgacagcaagctgttgctgtt

SEQ ID NO: 5966170 - DNA, 25 bp, Homo sapien
tccggtagcaggatcgtaatactgt

SEQ ID NO: 5966171 - DNA, 25 bp, Homo sapien
ccgtagtcagacctattatggcccc

SEQ ID NO: 5966172 - DNA, 25 bp, Homo sapien
ctgttgctgttgctgttgctgctgt

SEQ ID NO: 5966173 - DNA, 25 bp, Homo sapien
agccatggcgtattgctgctgatct

SEQ ID NO: 5966174 - DNA, 25 bp, Homo sapien
ctcggacgaattaatcaactccttt

SEQ ID NO: 5966175 - DNA, 25 bp, Homo sapien
cttgcgacatttgctgaaaagataa

SEQ ID NO: 5966176 - DNA, 25 bp, Homo sapien
tcgattgctctattgatatttccgt

SEQ ID NO: 5966177 - DNA, 25 bp, Homo sapien
aaacttttctatgaacagaggcaca

SEQ ID NO: 5966178 - DNA, 25 bp, Homo sapien
tgcctgtgcctgtgcctgagcctga

SEQ ID NO: 5966179 - DNA, 25 bp, Homo sapien
tgttgctgcatctgaagctgttgca

SEQ ID NO: 5966180 - DNA, 25 bp, Homo sapien
cgcctgttgctgttgctgcatctga

SEQ ID NO: 5966181 - DNA, 25 bp, Homo sapien
atcaaacctgtccgattccccatca

SEQ ID NO: 5966182 - DNA, 25 bp, Homo sapien
ctggctgtgggccacttgttgtcgc

SEQ ID NO: 5966183 - DNA, 25 bp, Homo sapien
cctgtgcctgtgcctgtgcctgagc

SEQ ID NO: 5966184 - DNA, 25 bp, Homo sapien
gggccacttgttgtcgcacgtctcc

SEQ ID NO: 5966185 - DNA, 25 bp, Homo sapien
aaagggacatttttaggattccaga

SEQ ID NO: 5966186 - DNA, 25 bp, Homo sapien
gttgctgttgctgctgttgcatagc

SEQ ID NO: 5966187 - DNA, 25 bp, Homo sapien
accaagttgggtagaaattaccaca

SEQ ID NO: 5966188 - DNA, 25 bp, Homo sapien
gttgctgttgctgttgctgctgttg

SEQ ID NO: 5966189 - DNA, 25 bp, Homo sapien
tgtagaaataaccttgtggcaggtt

SEQ ID NO: 5966190 - DNA, 25 bp, Homo sapien
ctatgaacagaggcacacctaccac

SEQ ID NO: 5966191 - DNA, 25 bp, Homo sapien
cggacgaattaatcaactcctttaa

SEQ ID NO: 5966192 - DNA, 25 bp, Homo sapien
tctatccattgatagtgatttaacg

SEQ ID NO: 5966193 - DNA, 25 bp, Homo sapien
tattgatatttccgtgagcggacga

SEQ ID NO: 5966194 - DNA, 25 bp, Homo sapien
ttaactgagcaccaagttgggtaga

SEQ ID NO: 5966195 - DNA, 25 bp, Homo sapien
gctgaaaagataatggcgcctgttg

SEQ ID NO: 5966196 - DNA, 25 bp, Homo sapien
ttgctgctgatctacatatatcatt

SEQ ID NO: 5966197 - DNA, 25 bp, Homo sapien
ctcctttaattctctgtcaacatgt

SEQ ID NO: 5966198 - DNA, 25 bp, Homo sapien
gggcaggggcggagttgatgttgtc

SEQ ID NO: 5966199 - DNA, 25 bp, Homo sapien
tgtgcctgagcctgagcctgtgcga

SEQ ID NO: 5966200 - DNA, 25 bp, Homo sapien
taccatcgaaaactgctggctttgc

SEQ ID NO: 5966201 - DNA, 25 bp, Homo sapien
gcaggtttcctccttgcgacatttg

SEQ ID NO: 5966202 - DNA, 25 bp, Homo sapien
ctcactaattcatcgatatcctctc

SEQ ID NO: 5966203 - DNA, 25 bp, Homo sapien
ctgctgtgcttgagcctgagcctgg

SEQ ID NO: 5966204 - DNA, 25 bp, Homo sapien
cccatgtccttgagttctgccagtt

SEQ ID NO: 5966205 - DNA, 25 bp, Homo sapien
cattctcggacgaattaatcaactc

SEQ ID NO: 5966206 - DNA, 25 bp, Homo sapien
ctcttgtccatctatccattgatag

SEQ ID NO: 5966207 - DNA, 25 bp, Homo sapien
gtcgcacgtctcctgggcaggggcg

SEQ ID NO: 5966208 - DNA, 25 bp, Homo sapien
aaagtcttcaggctttatttcatca

SEQ ID NO: 5966209 - DNA, 25 bp, Homo sapien
cctgtgcctgtgcctgagcctgagc

SEQ ID NO: 5966210 - DNA, 25 bp, Homo sapien
tgggcctgagcctgagcctgagcct

SEQ ID NO: 5966211 - DNA, 25 bp, Homo sapien
cctttaattctctgtcaacatgttt

SEQ ID NO: 5966212 - DNA, 25 bp, Homo sapien
gttgctgctgttgcatagccatggc

SEQ ID NO: 5966213 - DNA, 25 bp, Homo sapien
tcattccggtagcaggatcgtaata

SEQ ID NO: 5966214 - DNA, 25 bp, Homo sapien
tgaagctgttgcatctggatctgct

SEQ ID NO: 5966215 - DNA, 25 bp, Homo sapien
tagaatatctgcttccactgctttg

SEQ ID NO: 5966216 - DNA, 25 bp, Homo sapien
cgccgtagtcagacctattatggcc

SEQ ID NO: 5966217 - DNA, 25 bp, Homo sapien
ttcaggctttatttcatcatacctg

SEQ ID NO: 5966218 - DNA, 25 bp, Homo sapien
tctatttctttcatcaaacctgtcc

SEQ ID NO: 5966219 - DNA, 25 bp, Homo sapien
tgctccacgatggctttgtcatcat

SEQ ID NO: 5966220 - DNA, 25 bp, Homo sapien
ctgatctacatatatcattccggta

SEQ ID NO: 5966221 - DNA, 25 bp, Homo sapien
atctgctcctgctcctacttctatt

SEQ ID NO: 5966222 - DNA, 25 bp, Homo sapien
aacccatgtccttgagttctgccag

SEQ ID NO: 5966223 - DNA, 25 bp, Homo sapien
agcggacgataatgcatctaaattt

SEQ ID NO: 5966224 - DNA, 25 bp, Homo sapien
ctccacgatggctttgtcatcatct

SEQ ID NO: 5966225 - DNA, 25 bp, Homo sapien
cctgaacttgagcctgtgcctgtgc

SEQ ID NO: 5966226 - DNA, 25 bp, Homo sapien
tccatcaaaaggaaaagggacattt

SEQ ID NO: 5966227 - DNA, 25 bp, Homo sapien
ggatccaaagtcttcaggctttatt

SEQ ID NO: 5966228 - DNA, 25 bp, Homo sapien
cctgagcctgagcctgagcctgaac

SEQ ID NO: 5966229 - DNA, 25 bp, Homo sapien
tcttcaggctttatttcatcatacc

SEQ ID NO: 5966230 - DNA, 25 bp, Homo sapien
tgtgtgtagaaataaccttgtggca

SEQ ID NO: 5966231 - DNA, 25 bp, Homo sapien
gcatagccatggcgtattgctgctg

SEQ ID NO: 5966232 - DNA, 25 bp, Homo sapien
tccatctatccattgatagtgattt

SEQ ID NO: 5966233 - DNA, 25 bp, Homo sapien
aatatacttgtctctaatgtaatgc

SEQ ID NO: 5966234 - DNA, 25 bp, Homo sapien
aggggcggagttgatgttgtcgctg

SEQ ID NO: 5966235 - DNA, 25 bp, Homo sapien
tcgtctctgctaccgaaaacttttc

SEQ ID NO: 5966236 - DNA, 25 bp, Homo sapien
tgagcctgtgcgacagcaagctgtt

SEQ ID NO: 5966237 - DNA, 25 bp, Homo sapien
tgtcatcatctccatcaaaaggaaa

SEQ ID NO: 5966238 - DNA, 25 bp, Homo sapien
acccaaaatatacttgtctctaatg

SEQ ID NO: 5966239 - DNA, 25 bp, Homo sapien
tcctctcttgtccatctatccattg

SEQ ID NO: 5966240 - DNA, 25 bp, Homo sapien
ggctgtgggccacttgttgtcgcac

SEQ ID NO: 5966241 - DNA, 25 bp, Homo sapien
acttgaacttttttctagataatcg

SEQ ID NO: 5966242 - DNA, 25 bp, Homo sapien
tgtgcctgtgcctgagcctgagcct

SEQ ID NO: 5966243 - DNA, 25 bp, Homo sapien
aggcatcgtcgtctctgctaccgaa

SEQ ID NO: 5966244 - DNA, 25 bp, Homo sapien
cgaaaactgctggctttgcttgtac

SEQ ID NO: 5966245 - DNA, 25 bp, Homo sapien
acatttttaggattccagaaccgag

SEQ ID NO: 5966246 - DNA, 25 bp, Homo sapien
tgagcctgagcctgagcctgaactt

SEQ ID NO: 5966247 - DNA, 25 bp, Homo sapien
atagctggctgtgggccacttgttg

SEQ ID NO: 5966248 - DNA, 25 bp, Homo sapien
ctgagcaccaagttgggtagaaatt

SEQ ID NO: 5966249 - DNA, 25 bp, Homo sapien
tgcgacatttgctgaaaagataatg

SEQ ID NO: 5966250 - DNA, 25 bp, Homo sapien
tgagcctgaacttgagcctgtgcct

SEQ ID NO: 5966251 - DNA, 25 bp, Homo sapien
ttgaagggtaccatcgaaaactgct

SEQ ID NO: 5966252 - DNA, 25 bp, Homo sapien
tcctgggcaggggcggagttgatgt

SEQ ID NO: 5966253 - DNA, 25 bp, Homo sapien
cctccttgcgacatttgctgaaaag

SEQ ID NO: 5966254 - DNA, 25 bp, Homo sapien
gcttccactgctttggaatgagtcc

SEQ ID NO: 5966255 - DNA, 25 bp, Homo sapien
atctggatctgctgtgcttgagcct

SEQ ID NO: 5966256 - DNA, 25 bp, Homo sapien
attctctgtcaacatgttttaagct

SEQ ID NO: 5966257 - DNA, 25 bp, Homo sapien
ccccctttatagaaagaatgagatc

SEQ ID NO: 5966258 - DNA, 25 bp, Homo sapien
tgttgtcgctgctgccgatacacta

SEQ ID NO: 5966259 - DNA, 25 bp, Homo sapien
cactaattcatcgatatcctctctt

SEQ ID NO: 5966260 - DNA, 25 bp, Homo sapien
ctaattcatcgatatcctctcttgt

SEQ ID NO: 5966261 - DNA, 25 bp, Homo sapien
tggctttgcttgtacaaaagatgct

SEQ ID NO: 5966262 - DNA, 25 bp, Homo sapien
ttgcctccaagactcactaattcat

SEQ ID NO: 5966263 - DNA, 25 bp, Homo sapien
tgtgcttgagcctgagcctgggcct

SEQ ID NO: 5966264 - DNA, 25 bp, Homo sapien
aactgctggctttgcttgtacaaaa

SEQ ID NO: 5966265 - DNA, 25 bp, Homo sapien
ctgttgctgctgttgcatagccatg

SEQ ID NO: 5966266 - DNA, 25 bp, Homo sapien
ctgggcaggggcggagttgatgttg

SEQ ID NO: 5966267 - DNA, 25 bp, Homo sapien
aagctgttgcatctggatctgctgt

SEQ ID NO: 5966268 - DNA, 25 bp, Homo sapien
cggtagcaggatcgtaatactgttg

SEQ ID NO: 5966269 - DNA, 25 bp, Homo sapien
gattacatttgtaccatcaaaaata

SEQ ID NO: 5966270 - DNA, 25 bp, Homo sapien
tatcctctcttgtccatctatccat

SEQ ID NO: 5966271 - DNA, 25 bp, Homo sapien
aatgagtccctggaaccgccgtagt

SEQ ID NO: 5966272 - DNA, 25 bp, Homo sapien
tttcttgaacttgaacttttttcta

SEQ ID NO: 5966273 - DNA, 25 bp, Homo sapien
agcctgaacttgagcctgtgcctgt

SEQ ID NO: 5966274 - DNA, 25 bp, Homo sapien
aaagatgctgaatttgaagtaaaat

SEQ ID NO: 5966275 - DNA, 25 bp, Homo sapien
atgctgaatttgaagtaaaatctgg

SEQ ID NO: 5966276 - DNA, 25 bp, Homo sapien
ttttaggattccagaaccgagcatt

SEQ ID NO: 5966277 - DNA, 25 bp, Homo sapien
agttgggtagaaattaccacattca

SEQ ID NO: 5966278 - DNA, 25 bp, Homo sapien
ctagataatcgattgctctattgat

SEQ ID NO: 5966279 - DNA, 25 bp, Homo sapien
ttttaagctatgggaagaactccta

SEQ ID NO: 5966280 - DNA, 25 bp, Homo sapien
gggcggagttgatgttgtcgctgct

SEQ ID NO: 5966281 - DNA, 25 bp, Homo sapien
tacttgtctctaatgtaatgctcca

SEQ ID NO: 5966282 - DNA, 25 bp, Homo sapien
tgctttggaatgagtccctggaacc

SEQ ID NO: 5966283 - DNA, 25 bp, Homo sapien
ttgtcgctgctgccgatacactatt

SEQ ID NO: 5966284 - DNA, 25 bp, Homo sapien
tgaagtaaaatctggcgtgattaca

SEQ ID NO: 5966285 - DNA, 25 bp, Homo sapien
cctgagcctgtgcgacagcaagctg

SEQ ID NO: 5966286 - DNA, 25 bp, Homo sapien
tctctaatgtaatgctccacgatgg

SEQ ID NO: 5966287 - DNA, 25 bp, Homo sapien
cgataatgcatctaaatttttgttt

SEQ ID NO: 5966288 - DNA, 25 bp, Homo sapien
cttgtacaaaagatgctgaatttga

SEQ ID NO: 5966289 - DNA, 25 bp, Homo sapien
gctttgcttgtacaaaagatgctga

SEQ ID NO: 5966290 - DNA, 25 bp, Homo sapien
cccaaattaactgagcaccaagttg

SEQ ID NO: 5966291 - DNA, 25 bp, Homo sapien
tccttgcgacatttgctgaaaagat

SEQ ID NO: 5966292 - DNA, 25 bp, Homo sapien
gtcgctgctgccgatacactatttc

SEQ ID NO: 5966293 - DNA, 25 bp, Homo sapien
gccagttgcctagaatatctgcttc

SEQ ID NO: 5966294 - DNA, 25 bp, Homo sapien
ttccagaaccgagcattccccttat

SEQ ID NO: 5966295 - DNA, 25 bp, Homo sapien
tttgaagtaaaatctggcgtgatta

SEQ ID NO: 5966296 - DNA, 25 bp, Homo sapien
cgtaatactgttgaagggtaccatc

SEQ ID NO: 5966297 - DNA, 25 bp, Homo sapien
aaagaatgagatctgctcctgctcc

SEQ ID NO: 5966298 - DNA, 25 bp, Homo sapien
agaatgagatctgctcctgctccta

SEQ ID NO: 5966299 - DNA, 25 bp, Homo sapien
ctttggaatgagtccctggaaccgc

SEQ ID NO: 5966300 - DNA, 25 bp, Homo sapien
ctctcttgtccatctatccattgat

SEQ ID NO: 5966301 - DNA, 25 bp, Homo sapien
tctaatgtaatgctccacgatggct

SEQ ID NO: 5966302 - DNA, 25 bp, Homo sapien
gctctattgatatttccgtgagcgg

SEQ ID NO: 5966303 - DNA, 25 bp, Homo sapien
ccgaaacccatgtccttgagttctg

SEQ ID NO: 5966304 - DNA, 25 bp, Homo sapien
gttgcctagaatatctgcttccact

SEQ ID NO: 5966305 - DNA, 25 bp, Homo sapien
tgagcctgggcctgagcctgagcct

SEQ ID NO: 5966306 - DNA, 25 bp, Homo sapien
gcggagttgatgttgtcgctgctgc

SEQ ID NO: 5966307 - DNA, 25 bp, Homo sapien
caaacctgtccgattccccatcaaa

SEQ ID NO: 5966308 - DNA, 25 bp, Homo sapien
tatcattccggtagcaggatcgtaa

SEQ ID NO: 5966309 - DNA, 25 bp, Homo sapien
aatgcatctaaatttttgtttgtat

SEQ ID NO: 5966310 - DNA, 25 bp, Homo sapien
aaaatctggcgtgattacatttgta

SEQ ID NO: 5966311 - DNA, 25 bp, Homo sapien
cgtctcctgggcaggggcggagttg

SEQ ID NO: 5966312 - DNA, 25 bp, Homo sapien
agcctgagcctgagcctgaacttga

SEQ ID NO: 5966313 - DNA, 25 bp, Homo sapien
aaatagctggctgtgggccacttgt

SEQ ID NO: 5966314 - DNA, 25 bp, Homo sapien
gaaataaccttgtggcaggtttcct

SEQ ID NO: 5966315 - DNA, 25 bp, Homo sapien
aaattaccacattcaccgcatttat

SEQ ID NO: 5966316 - DNA, 25 bp, Homo sapien
aaatcatccattctggatccaaagt

SEQ ID NO: 5966317 - DNA, 25 bp, Homo sapien
gtgatttaacgttagaaaaggcatc

SEQ ID NO: 5966318 - DNA, 25 bp, Homo sapien
acagaggcacacctaccacaaagga

SEQ ID NO: 5966319 - DNA, 25 bp, Homo sapien
gaaaagggacatttttaggattcca

SEQ ID NO: 5966320 - DNA, 25 bp, Homo sapien
aatcaactcctttaattctctgtca

SEQ ID NO: 5966321 - DNA, 25 bp, Homo sapien
ttaagctatgggaagaactcctaaa

SEQ ID NO: 5966322 - DNA, 25 bp, Homo sapien
ttgatgttgtcgctgctgccgatac

SEQ ID NO: 5966323 - DNA, 25 bp, Homo sapien
aactgagcaccaagttgggtagaaa

SEQ ID NO: 5966324 - DNA, 25 bp, Homo sapien
ttgaacttgaacttttttctagata

SEQ ID NO: 5966325 - DNA, 25 bp, Homo sapien
cttgtggcaggtttcctccttgcga

SEQ ID NO: 5966326 - DNA, 25 bp, Homo sapien
tgagcctgagcctgggcctgagcct

SEQ ID NO: 5966327 - DNA, 25 bp, Homo sapien
tggcgtgattacatttgtaccatca

SEQ ID NO: 5966328 - DNA, 25 bp, Homo sapien
aggcacacctaccacaaaggaaaac

SEQ ID NO: 5966329 - DNA, 25 bp, Homo sapien
atcatacctgaatttacccaaaata

SEQ ID NO: 5966330 - DNA, 25 bp, Homo sapien
taccacattcaccgcatttattggc

SEQ ID NO: 5966331 - DNA, 25 bp, Homo sapien
agaaccgagcattccccttattgcc

SEQ ID NO: 5966332 - DNA, 25 bp, Homo sapien
gcacacctaccacaaaggaaaaccc

SEQ ID NO: 5966333 - DNA, 25 bp, Homo sapien
ttacccaaaatatacttgtctctaa

SEQ ID NO: 5966334 - DNA, 25 bp, Homo sapien
atactgttgaagggtaccatcgaaa

SEQ ID NO: 5966335 - DNA, 25 bp, Homo sapien
gctgccgatacactatttcttgaac

SEQ ID NO: 5966336 - DNA, 25 bp, Homo sapien
ttggaatgagtccctggaaccgccg

SEQ ID NO: 5966337 - DNA, 25 bp, Homo sapien
taatggcgcctgttgctgttgctgc

SEQ ID NO: 5966338 - DNA, 25 bp, Homo sapien
ccatggcgtattgctgctgatctac

SEQ ID NO: 5966339 - DNA, 25 bp, Homo sapien
ggcattctcggacgaattaatcaac

SEQ ID NO: 5966340 - DNA, 25 bp, Homo sapien
gcctccaagactcactaattcatcg

SEQ ID NO: 5966341 - DNA, 25 bp, Homo sapien
cctgtgcgacagcaagctgttgctg

SEQ ID NO: 5966342 - DNA, 25 bp, Homo sapien
atttgtaccatcaaaaatagctggc

SEQ ID NO: 5966343 - DNA, 25 bp, Homo sapien
agggtaccatcgaaaactgctggct

SEQ ID NO: 5966344 - DNA, 25 bp, Homo sapien
tggcaggtttcctccttgcgacatt

SEQ ID NO: 5966345 - DNA, 25 bp, Homo sapien
gctaccgaaaacttttctatgaaca

SEQ ID NO: 5966346 - DNA, 25 bp, Homo sapien
atttgctgaaaagataatggcgcct

SEQ ID NO: 5966347 - DNA, 25 bp, Homo sapien
catttattggcattctcggacgaat

SEQ ID NO: 5966348 - DNA, 25 bp, Homo sapien
ccacattcaccgcatttattggcat

SEQ ID NO: 5966349 - DNA, 25 bp, Homo sapien
tatgggaagaactcctaaacctcat

SEQ ID NO: 5966350 - DNA, 25 bp, Homo sapien
gaaaacttttctatgaacagaggca

SEQ ID NO: 5966351 - DNA, 25 bp, Homo sapien
catctgaagctgttgcatctggatc

SEQ ID NO: 5966352 - DNA, 25 bp, Homo sapien
tctctgtcaacatgttttaagctat

SEQ ID NO: 5966353 - DNA, 25 bp, Homo sapien
taaccttgtggcaggtttcctcctt

SEQ ID NO: 5966354 - DNA, 25 bp, Homo sapien
catctatccattgatagtgatttaa

SEQ ID NO: 5966355 - DNA, 25 bp, Homo sapien
ttggcattctcggacgaattaatca

SEQ ID NO: 5966356 - DNA, 25 bp, Homo sapien
tttgcttgtacaaaagatgctgaat

SEQ ID NO: 5966357 - DNA, 25 bp, Homo sapien
cgtattgctgctgatctacatatat

SEQ ID NO: 5966358 - DNA, 25 bp, Homo sapien
tagaaataaccttgtggcaggtttc

SEQ ID NO: 5966359 - DNA, 25 bp, Homo sapien
gggtagaaattaccacattcaccgc

SEQ ID NO: 5966360 - DNA, 25 bp, Homo sapien
acatttgtaccatcaaaaatagctg

SEQ ID NO: 5966361 - DNA, 25 bp, Homo sapien
tctaaatttttgtttgtatcaccga

SEQ ID NO: 5966362 - DNA, 25 bp, Homo sapien
tgcctgtgcctgagcctgagcctgt

SEQ ID NO: 5966363 - DNA, 25 bp, Homo sapien
ttgctgcatctgaagctgttgcatc

SEQ ID NO: 5966364 - DNA, 25 bp, Homo sapien
attaccacattcaccgcatttattg

SEQ ID NO: 5966365 - DNA, 25 bp, Homo sapien
aatctggcgtgattacatttgtacc

SEQ ID NO: 5966366 - DNA, 25 bp, Homo sapien
agcctgagcctgtgcgacagcaagc

SEQ ID NO: 5966367 - DNA, 25 bp, Homo sapien
taattctctgtcaacatgttttaag

SEQ ID NO: 5966368 - DNA, 25 bp, Homo sapien
attgtgtgtagaaataaccttgtgg

SEQ ID NO: 5966369 - DNA, 25 bp, Homo sapien
accttgtggcaggtttcctccttgc

SEQ ID NO: 5966370 - DNA, 25 bp, Homo sapien
ttctatgaacagaggcacacctacc

SEQ ID NO: 5966371 - DNA, 25 bp, Homo sapien
cgcacgtctcctgggcaggggcgga

SEQ ID NO: 5966372 - DNA, 25 bp, Homo sapien
tctcctgggcaggggcggagttgat

SEQ ID NO: 5966373 - DNA, 25 bp, Homo sapien
aacctgtccgattccccatcaaaat

SEQ ID NO: 5966374 - DNA, 25 bp, Homo sapien
gttgtacaattttgaatctcagcat

SEQ ID NO: 5966375 - DNA, 25 bp, Homo sapien
gtatcactagagaagatgagactaa

SEQ ID NO: 5966376 - DNA, 25 bp, Homo sapien
ctccaagtcaatttgccacttctgt

SEQ ID NO: 5966377 - DNA, 25 bp, Homo sapien
gcaggtaaagctcatgacgctgata

SEQ ID NO: 5966378 - DNA, 25 bp, Homo sapien
gattctggtgaaacattatgcagtg

SEQ ID NO: 5966379 - DNA, 25 bp, Homo sapien
tcaaagggaccacttacatttggaa

SEQ ID NO: 5966380 - DNA, 25 bp, Homo sapien
cttctatcgtatcactagagaagat

SEQ ID NO: 5966381 - DNA, 25 bp, Homo sapien
agaattacaaggcactgtcgaatcg

SEQ ID NO: 5966382 - DNA, 25 bp, Homo sapien
tttggaagtttcacccgtttgcaga

SEQ ID NO: 5966383 - DNA, 25 bp, Homo sapien
acattctagctgggtcatgagtcta

SEQ ID NO: 5966384 - DNA, 25 bp, Homo sapien
ctggttgctacagacgtcaaaggga

SEQ ID NO: 5966385 - DNA, 25 bp, Homo sapien
tgatattttctcggtttctgcttgc

SEQ ID NO: 5966386 - DNA, 25 bp, Homo sapien
actatctacattacgcccgttgtac

SEQ ID NO: 5966387 - DNA, 25 bp, Homo sapien
acccgtttgcagatgagtcaaattc

SEQ ID NO: 5966388 - DNA, 25 bp, Homo sapien
tatgccttgttgctaccacttcatt

SEQ ID NO: 5966389 - DNA, 25 bp, Homo sapien
gagaaattggatcttctagactcag

SEQ ID NO: 5966390 - DNA, 25 bp, Homo sapien
tcgaattccatcagatcggtgaaat

SEQ ID NO: 5966391 - DNA, 25 bp, Homo sapien
gccccacgttagaattacaaggcac

SEQ ID NO: 5966392 - DNA, 25 bp, Homo sapien
ggcattaaaatggggtgcctcaaat

SEQ ID NO: 5966393 - DNA, 25 bp, Homo sapien
atttacggtaagttgttcaggtgac

SEQ ID NO: 5966394 - DNA, 25 bp, Homo sapien
agctgttagataatgaaaatccaaa

SEQ ID NO: 5966395 - DNA, 25 bp, Homo sapien
ctcaaatgacagactactttcccat

SEQ ID NO: 5966396 - DNA, 25 bp, Homo sapien
tttctggcgatttactcttctatcg

SEQ ID NO: 5966397 - DNA, 25 bp, Homo sapien
gacgtcaaagggaccacttacattt

SEQ ID NO: 5966398 - DNA, 25 bp, Homo sapien
tagctgttgatgaacatggagattc

SEQ ID NO: 5966399 - DNA, 25 bp, Homo sapien
cttgcaagctattgagagagatgca

SEQ ID NO: 5966400 - DNA, 25 bp, Homo sapien
agtgtttattgccacagcaaatgca

SEQ ID NO: 5966401 - DNA, 25 bp, Homo sapien
tttaatgattctggtgaaacattat

SEQ ID NO: 5966402 - DNA, 25 bp, Homo sapien
ttgccacttctgtggatatctctga

SEQ ID NO: 5966403 - DNA, 25 bp, Homo sapien
cactaaattggagccccacgttaga

SEQ ID NO: 5966404 - DNA, 25 bp, Homo sapien
tgtacaattttgaatctcagcattc

SEQ ID NO: 5966405 - DNA, 25 bp, Homo sapien
ctgtgtttgtttagatagaagcatc

SEQ ID NO: 5966406 - DNA, 25 bp, Homo sapien
gtttagagaagctggcggtaaataa

SEQ ID NO: 5966407 - DNA, 25 bp, Homo sapien
aaaatccaaaagataagtcatattc

SEQ ID NO: 5966408 - DNA, 25 bp, Homo sapien
gtccggattgcaccatgtcgatgtc

SEQ ID NO: 5966409 - DNA, 25 bp, Homo sapien
tagctcgcaggcaagtctgggtgaa

SEQ ID NO: 5966410 - DNA, 25 bp, Homo sapien
tgcaccatgtcgatgtcttgcaagc

SEQ ID NO: 5966411 - DNA, 25 bp, Homo sapien
tttactcttctatcgtatcactaga

SEQ ID NO: 5966412 - DNA, 25 bp, Homo sapien
gctcgcaggcaagtctgggtgaatt

SEQ ID NO: 5966413 - DNA, 25 bp, Homo sapien
aaaaggttggagatctggtatggga

SEQ ID NO: 5966414 - DNA, 25 bp, Homo sapien
atcactacattgaatatgcattgtg

SEQ ID NO: 5966415 - DNA, 25 bp, Homo sapien
gggtgaatttgcacattctagctgg

SEQ ID NO: 5966416 - DNA, 25 bp, Homo sapien
aattgccacaggttttaataatgga

SEQ ID NO: 5966417 - DNA, 25 bp, Homo sapien
tggagccccacgttagaattacaag

SEQ ID NO: 5966418 - DNA, 25 bp, Homo sapien
ttgccacaggttttaataatggaac

SEQ ID NO: 5966419 - DNA, 25 bp, Homo sapien
cactacattgaatatgcattgtgat

SEQ ID NO: 5966420 - DNA, 25 bp, Homo sapien
tattctcactttgtccataagtccg

SEQ ID NO: 5966421 - DNA, 25 bp, Homo sapien
ggtgtctttgacgtgaagtttttga

SEQ ID NO: 5966422 - DNA, 25 bp, Homo sapien
tctgaacgaggactaattgccacag

SEQ ID NO: 5966423 - DNA, 25 bp, Homo sapien
tctttgacgtgaagtttttgaaaaa

SEQ ID NO: 5966424 - DNA, 25 bp, Homo sapien
aattttctcctcaaggatccttatt

SEQ ID NO: 5966425 - DNA, 25 bp, Homo sapien
gaaattggatcttctagactcagac

SEQ ID NO: 5966426 - DNA, 25 bp, Homo sapien
actgaatttggtgaaagaataggct

SEQ ID NO: 5966427 - DNA, 25 bp, Homo sapien
cattaaaatggggtgcctcaaatga

SEQ ID NO: 5966428 - DNA, 25 bp, Homo sapien
agactactttcccataggctggttg

SEQ ID NO: 5966429 - DNA, 25 bp, Homo sapien
aacactaaattggagccccacgtta

SEQ ID NO: 5966430 - DNA, 25 bp, Homo sapien
ggtatgggagctgatttaaatgaaa

SEQ ID NO: 5966431 - DNA, 25 bp, Homo sapien
gactaattgccacaggttttaataa

SEQ ID NO: 5966432 - DNA, 25 bp, Homo sapien
agcattctatgattaataattcgaa

SEQ ID NO: 5966433 - DNA, 25 bp, Homo sapien
aaggcactgtcgaatcgcctatgac

SEQ ID NO: 5966434 - DNA, 25 bp, Homo sapien
cgatgtcttgcaagctattgagaga

SEQ ID NO: 5966435 - DNA, 25 bp, Homo sapien
gtcatattctcactttgtccataag

SEQ ID NO: 5966436 - DNA, 25 bp, Homo sapien
tcgcaggcaagtctgggtgaatttg

SEQ ID NO: 5966437 - DNA, 25 bp, Homo sapien
cattccttttgggcattaaaatggg

SEQ ID NO: 5966438 - DNA, 25 bp, Homo sapien
atattcgagaaattggatcttctag

SEQ ID NO: 5966439 - DNA, 25 bp, Homo sapien
atcggtgaaattttctcctcaagga

SEQ ID NO: 5966440 - DNA, 25 bp, Homo sapien
ggtgtgggataataagctgttagat

SEQ ID NO: 5966441 - DNA, 25 bp, Homo sapien
tgaaactgaatttggtgaaagaata

SEQ ID NO: 5966442 - DNA, 25 bp, Homo sapien
atattttctcggtttctgcttgcaa

SEQ ID NO: 5966443 - DNA, 25 bp, Homo sapien
aaaaaaggttggagatctggtatgg

SEQ ID NO: 5966444 - DNA, 25 bp, Homo sapien
tggaagtttcacccgtttgcagatg

SEQ ID NO: 5966445 - DNA, 25 bp, Homo sapien
ctattgagagagatgcatttgaatt

SEQ ID NO: 5966446 - DNA, 25 bp, Homo sapien
cactagagaagatgagactaaaaaa

SEQ ID NO: 5966447 - DNA, 25 bp, Homo sapien
tatgcattgtgatgatattgaaatt

SEQ ID NO: 5966448 - DNA, 25 bp, Homo sapien
aaaggaaagaatcactacattgaat

SEQ ID NO: 5966449 - DNA, 25 bp, Homo sapien
cgttagaattacaaggcactgtcga

SEQ ID NO: 5966450 - DNA, 25 bp, Homo sapien
aagtctgggtgaatttgcacattct

SEQ ID NO: 5966451 - DNA, 25 bp, Homo sapien
actactttcccataggctggttgct

SEQ ID NO: 5966452 - DNA, 25 bp, Homo sapien
aataatggaacagtacaaatttcag

SEQ ID NO: 5966453 - DNA, 25 bp, Homo sapien
tggtttagagaagctggcggtaaat

SEQ ID NO: 5966454 - DNA, 25 bp, Homo sapien
tttttgaaaaaaggttggagatctg

SEQ ID NO: 5966455 - DNA, 25 bp, Homo sapien
ttagctgaacctggtgtctttgacg

SEQ ID NO: 5966456 - DNA, 25 bp, Homo sapien
aacccatagctcgcaggcaagtctg

SEQ ID NO: 5966457 - DNA, 25 bp, Homo sapien
ttacgcccgttgtacaattttgaat

SEQ ID NO: 5966458 - DNA, 25 bp, Homo sapien
ctgttagataatgaaaatccaaaag

SEQ ID NO: 5966459 - DNA, 25 bp, Homo sapien
gcctcaaatgacagactactttccc

SEQ ID NO: 5966460 - DNA, 25 bp, Homo sapien
tattgccacagcaaatgcaggtaaa

SEQ ID NO: 5966461 - DNA, 25 bp, Homo sapien
aatctcagcattctatgattaataa

SEQ ID NO: 5966462 - DNA, 25 bp, Homo sapien
taatgattctggtgaaacattatgc

SEQ ID NO: 5966463 - DNA, 25 bp, Homo sapien
tacattacgcccgttgtacaatttt

SEQ ID NO: 5966464 - DNA, 25 bp, Homo sapien
aggtaaagctcatgacgctgatatt

SEQ ID NO: 5966465 - DNA, 25 bp, Homo sapien
gcaggcaagtctgggtgaatttgca

SEQ ID NO: 5966466 - DNA, 25 bp, Homo sapien
tctcagcattctatgattaataatt

SEQ ID NO: 5966467 - DNA, 25 bp, Homo sapien
ttaaaatggggtgcctcaaatgaca

SEQ ID NO: 5966468 - DNA, 25 bp, Homo sapien
tgctaccacttcattttctggcgat

SEQ ID NO: 5966469 - DNA, 25 bp, Homo sapien
ccgttgtacaattttgaatctcagc

SEQ ID NO: 5966470 - DNA, 25 bp, Homo sapien
tagactcagacatgaaaaagcattc

SEQ ID NO: 5966471 - DNA, 25 bp, Homo sapien
gcagatgagtcaaattctttaacac

SEQ ID NO: 5966472 - DNA, 25 bp, Homo sapien
gagtcaaattctttaacactaaatt

SEQ ID NO: 5966473 - DNA, 25 bp, Homo sapien
tttctgcttgcaattcatttacggt

SEQ ID NO: 5966474 - DNA, 25 bp, Homo sapien
attgaaattgaagaggatatcttag

SEQ ID NO: 5966475 - DNA, 25 bp, Homo sapien
gattctttagctgaacctggtgtct

SEQ ID NO: 5966476 - DNA, 25 bp, Homo sapien
ggagatctggtatgggagctgattt

SEQ ID NO: 5966477 - DNA, 25 bp, Homo sapien
atcttctagactcagacatgaaaaa

SEQ ID NO: 5966478 - DNA, 25 bp, Homo sapien
cacttctgtggatatctctgaacga

SEQ ID NO: 5966479 - DNA, 25 bp, Homo sapien
ttcatttggttgcatcactctatat

SEQ ID NO: 5966480 - DNA, 25 bp, Homo sapien
attcgaattccatcagatcggtgaa

SEQ ID NO: 5966481 - DNA, 25 bp, Homo sapien
ccggattgcaccatgtcgatgtctt

SEQ ID NO: 5966482 - DNA, 25 bp, Homo sapien
gcctatgactccaagtcaatttgcc

SEQ ID NO: 5966483 - DNA, 25 bp, Homo sapien
cactgtcgaatcgcctatgactcca

SEQ ID NO: 5966484 - DNA, 25 bp, Homo sapien
gttgctaccacttcattttctggcg

SEQ ID NO: 5966485 - DNA, 25 bp, Homo sapien
aatatgcattgtgatgatattgaaa

SEQ ID NO: 5966486 - DNA, 25 bp, Homo sapien
tttgaatctcagcattctatgatta

SEQ ID NO: 5966487 - DNA, 25 bp, Homo sapien
aaattggagccccacgttagaatta

SEQ ID NO: 5966488 - DNA, 25 bp, Homo sapien
gttgttcaggtgacggttacttaaa

SEQ ID NO: 5966489 - DNA, 25 bp, Homo sapien
gtccataagtccggattgcaccatg

SEQ ID NO: 5966490 - DNA, 25 bp, Homo sapien
ctatgactccaagtcaatttgccac

SEQ ID NO: 5966491 - DNA, 25 bp, Homo sapien
aaagcattccttttgggcattaaaa

SEQ ID NO: 5966492 - DNA, 25 bp, Homo sapien
agatctggtatgggagctgatttaa

SEQ ID NO: 5966493 - DNA, 25 bp, Homo sapien
tcacgattcaaattcatttggttgc

SEQ ID NO: 5966494 - DNA, 25 bp, Homo sapien
tgaaaaaaggttggagatctggtat

SEQ ID NO: 5966495 - DNA, 25 bp, Homo sapien
gaatttgcacattctagctgggtca

SEQ ID NO: 5966496 - DNA, 25 bp, Homo sapien
ttctcactttgtccataagtccgga

SEQ ID NO: 5966497 - DNA, 25 bp, Homo sapien
attgaatatgcattgtgatgatatt

SEQ ID NO: 5966498 - DNA, 25 bp, Homo sapien
tactcttctatcgtatcactagaga

SEQ ID NO: 5966499 - DNA, 25 bp, Homo sapien
ttacaaggcactgtcgaatcgccta

SEQ ID NO: 5966500 - DNA, 25 bp, Homo sapien
agttatattcgagaaattggatctt

SEQ ID NO: 5966501 - DNA, 25 bp, Homo sapien
aaactgaatttggtgaaagaatagg

SEQ ID NO: 5966502 - DNA, 25 bp, Homo sapien
ctgaacctggtgtctttgacgtgaa

SEQ ID NO: 5966503 - DNA, 25 bp, Homo sapien
cgtttaatgattctggtgaaacatt

SEQ ID NO: 5966504 - DNA, 25 bp, Homo sapien
cggtgaaattttctcctcaaggatc

SEQ ID NO: 5966505 - DNA, 25 bp, Homo sapien
cctcaaggatccttattagccattg

SEQ ID NO: 5966506 - DNA, 25 bp, Homo sapien
ccttattagccattgctcacgattc

SEQ ID NO: 5966507 - DNA, 25 bp, Homo sapien
gatttactcttctatcgtatcacta

SEQ ID NO: 5966508 - DNA, 25 bp, Homo sapien
ctgatttaaatgaaagtttatgctg

SEQ ID NO: 5966509 - DNA, 25 bp, Homo sapien
tctagactcagacatgaaaaagcat

SEQ ID NO: 5966510 - DNA, 25 bp, Homo sapien
caggtgacggttacttaaaggtgtg

SEQ ID NO: 5966511 - DNA, 25 bp, Homo sapien
gacggttacttaaaggtgtgggata

SEQ ID NO: 5966512 - DNA, 25 bp, Homo sapien
tgggcattaaaatggggtgcctcaa

SEQ ID NO: 5966513 - DNA, 25 bp, Homo sapien
ttctatgattaataattcgaattcc

SEQ ID NO: 5966514 - DNA, 25 bp, Homo sapien
ttgatgaacatggagattctttagc

SEQ ID NO: 5966515 - DNA, 25 bp, Homo sapien
attttgaatctcagcattctatgat

SEQ ID NO: 5966516 - DNA, 25 bp, Homo sapien
tgagactaaaaaagttatattcgag

SEQ ID NO: 5966517 - DNA, 25 bp, Homo sapien
tgaatatgcattgtgatgatattga

SEQ ID NO: 5966518 - DNA, 25 bp, Homo sapien
attagccattgctcacgattcaaat

SEQ ID NO: 5966519 - DNA, 25 bp, Homo sapien
tgtttattgccacagcaaatgcagg

SEQ ID NO: 5966520 - DNA, 25 bp, Homo sapien
aacatggagattctttagctgaacc

SEQ ID NO: 5966521 - DNA, 25 bp, Homo sapien
acagactactttcccataggctggt

SEQ ID NO: 5966522 - DNA, 25 bp, Homo sapien
gtgcctcaaatgacagactactttc

SEQ ID NO: 5966523 - DNA, 25 bp, Homo sapien
caaatgacagactactttcccatag

SEQ ID NO: 5966524 - DNA, 25 bp, Homo sapien
cccataggctggttgctacagacgt

SEQ ID NO: 5966525 - DNA, 25 bp, Homo sapien
tacaattttgaatctcagcattcta

SEQ ID NO: 5966526 - DNA, 25 bp, Homo sapien
gtttgtttagatagaagcatcaggt

SEQ ID NO: 5966527 - DNA, 25 bp, Homo sapien
ggtggtttagagaagctggcggtaa

SEQ ID NO: 5966528 - DNA, 25 bp, Homo sapien
tatgggagctgatttaaatgaaagt

SEQ ID NO: 5966529 - DNA, 25 bp, Homo sapien
gtcgatgtcttgcaagctattgaga

SEQ ID NO: 5966530 - DNA, 25 bp, Homo sapien
tatccgtaccaacccatagctcgca

SEQ ID NO: 5966531 - DNA, 25 bp, Homo sapien
caggttttaataatggaacagtaca

SEQ ID NO: 5966532 - DNA, 25 bp, Homo sapien
caattcatttacggtaagttgttca

SEQ ID NO: 5966533 - DNA, 25 bp, Homo sapien
ccaagtcaatttgccacttctgtgg

SEQ ID NO: 5966534 - DNA, 25 bp, Homo sapien
gatgggatggtaaattgagattttg

SEQ ID NO: 5966535 - DNA, 25 bp, Homo sapien
gctcacgattcaaattcatttggtt

SEQ ID NO: 5966536 - DNA, 25 bp, Homo sapien
ggatccttattagccattgctcacg

SEQ ID NO: 5966537 - DNA, 25 bp, Homo sapien
aaatttcagaactatctacattacg

SEQ ID NO: 5966538 - DNA, 25 bp, Homo sapien
ctaaattggagccccacgttagaat

SEQ ID NO: 5966539 - DNA, 25 bp, Homo sapien
tctggcgatttactcttctatcgta

SEQ ID NO: 5966540 - DNA, 25 bp, Homo sapien
atgattaataattcgaattccatca

SEQ ID NO: 5966541 - DNA, 25 bp, Homo sapien
catgacgctgatattttctcggttt

SEQ ID NO: 5966542 - DNA, 25 bp, Homo sapien
tacttaaaggtgtgggataataagc

SEQ ID NO: 5966543 - DNA, 25 bp, Homo sapien
cttatccgtaccaacccatagctcg

SEQ ID NO: 5966544 - DNA, 25 bp, Homo sapien
gcatttgaattatgccttgttgcta

SEQ ID NO: 5966545 - DNA, 25 bp, Homo sapien
tgaatttggtgaaagaataggctcc

SEQ ID NO: 5966546 - DNA, 25 bp, Homo sapien
gccacttctgtggatatctctgaac

SEQ ID NO: 5966547 - DNA, 25 bp, Homo sapien
catgaaaaagcattccttttgggca

SEQ ID NO: 5966548 - DNA, 25 bp, Homo sapien
gagtctatcgtttaatgattctggt

SEQ ID NO: 5966549 - DNA, 25 bp, Homo sapien
gtgtttgtttagatagaagcatcag

SEQ ID NO: 5966550 - DNA, 25 bp, Homo sapien
tttggttgcatcactctatatgaaa

SEQ ID NO: 5966551 - DNA, 25 bp, Homo sapien
taaatgaaagtttatgctgtgtttg

SEQ ID NO: 5966552 - DNA, 25 bp, Homo sapien
atgattctggtgaaacattatgcag

SEQ ID NO: 5966553 - DNA, 25 bp, Homo sapien
aatttggtgaaagaataggctcctt

SEQ ID NO: 5966554 - DNA, 25 bp, Homo sapien
aataagctgttagataatgaaaatc

SEQ ID NO: 5966555 - DNA, 25 bp, Homo sapien
gaatcactacattgaatatgcattg

SEQ ID NO: 5966556 - DNA, 25 bp, Homo sapien
aaagtgtttattgccacagcaaatg

SEQ ID NO: 5966557 - DNA, 25 bp, Homo sapien
caaattctttaacactaaattggag

SEQ ID NO: 5966558 - DNA, 25 bp, Homo sapien
aatgaaagtttatgctgtgtttgtt

SEQ ID NO: 5966559 - DNA, 25 bp, Homo sapien
tggatatctctgaacgaggactaat

SEQ ID NO: 5966560 - DNA, 25 bp, Homo sapien
tagccattgctcacgattcaaattc

SEQ ID NO: 5966561 - DNA, 25 bp, Homo sapien
cggtaagttgttcaggtgacggtta

SEQ ID NO: 5966562 - DNA, 25 bp, Homo sapien
taggctggttgctacagacgtcaaa

SEQ ID NO: 5966563 - DNA, 25 bp, Homo sapien
tcagcattctatgattaataattcg

SEQ ID NO: 5966564 - DNA, 25 bp, Homo sapien
gaataggctccttatccgtaccaac

SEQ ID NO: 5966565 - DNA, 25 bp, Homo sapien
gaaagaataggctccttatccgtac

SEQ ID NO: 5966566 - DNA, 25 bp, Homo sapien
ataagtccggattgcaccatgtcga

SEQ ID NO: 5966567 - DNA, 25 bp, Homo sapien
acaaaggaaagaatcactacattga

SEQ ID NO: 5966568 - DNA, 25 bp, Homo sapien
ttgcagatgagtcaaattctttaac

SEQ ID NO: 5966569 - DNA, 25 bp, Homo sapien
cactttgtccataagtccggattgc

SEQ ID NO: 5966570 - DNA, 25 bp, Homo sapien
gctgatattttctcggtttctgctt

SEQ ID NO: 5966571 - DNA, 25 bp, Homo sapien
aagtccggattgcaccatgtcgatg

SEQ ID NO: 5966572 - DNA, 25 bp, Homo sapien
ataataagctgttagataatgaaaa

SEQ ID NO: 5966573 - DNA, 25 bp, Homo sapien
ttcaggtgacggttacttaaaggtg

SEQ ID NO: 5966574 - DNA, 25 bp, Homo sapien
caattttgaatctcagcattctatg

SEQ ID NO: 5966575 - DNA, 25 bp, Homo sapien
accacttcattttctggcgatttac

SEQ ID NO: 5966576 - DNA, 25 bp, Homo sapien
tgaaagtttatgctgtgtttgttta

SEQ ID NO: 5966577 - DNA, 25 bp, Homo sapien
cttagctgttgatgaacatggagat

SEQ ID NO: 5966578 - DNA, 25 bp, Homo sapien
tacatttggaagtttcacccgtttg

SEQ ID NO: 5966579 - DNA, 25 bp, Homo sapien
aacagtacaaatttcagaactatct

SEQ ID NO: 5966580 - DNA, 25 bp, Homo sapien
aacgaggactaattgccacaggttt

SEQ ID NO: 5966581 - DNA, 25 bp, Homo sapien
ggttttaataatggaacagtacaaa

SEQ ID NO: 5966582 - DNA, 25 bp, Homo sapien
aaacattatgcagtgccggatggga

SEQ ID NO: 5966583 - DNA, 25 bp, Homo sapien
tatatgaaactgaatttggtgaaag

SEQ ID NO: 5966584 - DNA, 25 bp, Homo sapien
ttatattcgagaaattggatcttct

SEQ ID NO: 5966585 - DNA, 25 bp, Homo sapien
gtacaaatttcagaactatctacat

SEQ ID NO: 5966586 - DNA, 25 bp, Homo sapien
ttgtccataagtccggattgcacca

SEQ ID NO: 5966587 - DNA, 25 bp, Homo sapien
ggatatcttagctgttgatgaacat

SEQ ID NO: 5966588 - DNA, 25 bp, Homo sapien
cattctatgattaataattcgaatt

SEQ ID NO: 5966589 - DNA, 25 bp, Homo sapien
gcaaatgcaggtaaagctcatgacg

SEQ ID NO: 5966590 - DNA, 25 bp, Homo sapien
gaactatctacattacgcccgttgt

SEQ ID NO: 5966591 - DNA, 25 bp, Homo sapien
ctttagctgaacctggtgtctttga

SEQ ID NO: 5966592 - DNA, 25 bp, Homo sapien
ttcccataggctggttgctacagac

SEQ ID NO: 5966593 - DNA, 25 bp, Homo sapien
atatcttagctgttgatgaacatgg

SEQ ID NO: 5966594 - DNA, 25 bp, Homo sapien
caaaagataagtcatattctcactt

SEQ ID NO: 5966595 - DNA, 25 bp, Homo sapien
atttgaattatgccttgttgctacc

SEQ ID NO: 5966596 - DNA, 25 bp, Homo sapien
atcttagctgttgatgaacatggag

SEQ ID NO: 5966597 - DNA, 25 bp, Homo sapien
tttctcggtttctgcttgcaattca

SEQ ID NO: 5966598 - DNA, 25 bp, Homo sapien
acattatgcagtgccggatgggatg

SEQ ID NO: 5966599 - DNA, 25 bp, Homo sapien
agatagaagcatcaggtggtttaga

SEQ ID NO: 5966600 - DNA, 25 bp, Homo sapien
ctcctcaaggatccttattagccat

SEQ ID NO: 5966601 - DNA, 25 bp, Homo sapien
tgcaagctattgagagagatgcatt

SEQ ID NO: 5966602 - DNA, 25 bp, Homo sapien
gtgaaagaataggctccttatccgt

SEQ ID NO: 5966603 - DNA, 25 bp, Homo sapien
tcggtttctgcttgcaattcattta

SEQ ID NO: 5966604 - DNA, 25 bp, Homo sapien
gtcgaatcgcctatgactccaagtc

SEQ ID NO: 5966605 - DNA, 25 bp, Homo sapien
caagctattgagagagatgcatttg

SEQ ID NO: 5966606 - DNA, 25 bp, Homo sapien
cttctgtggatatctctgaacgagg

SEQ ID NO: 5966607 - DNA, 25 bp, Homo sapien
aagtcatattctcactttgtccata

SEQ ID NO: 5966608 - DNA, 25 bp, Homo sapien
aaagataagtcatattctcactttg

SEQ ID NO: 5966609 - DNA, 25 bp, Homo sapien
tactttcccataggctggttgctac

SEQ ID NO: 5966610 - DNA, 25 bp, Homo sapien
taattcgaattccatcagatcggtg

SEQ ID NO: 5966611 - DNA, 25 bp, Homo sapien
catggagattctttagctgaacctg

SEQ ID NO: 5966612 - DNA, 25 bp, Homo sapien
gggtgcctcaaatgacagactactt

SEQ ID NO: 5966613 - DNA, 25 bp, Homo sapien
aattcatttggttgcatcactctat

SEQ ID NO: 5966614 - DNA, 25 bp, Homo sapien
ttagatagaagcatcaggtggttta

SEQ ID NO: 5966615 - DNA, 25 bp, Homo sapien
aaatgcaggtaaagctcatgacgct

SEQ ID NO: 5966616 - DNA, 25 bp, Homo sapien
gaattatgccttgttgctaccactt

SEQ ID NO: 5966617 - DNA, 25 bp, Homo sapien
attgagagagatgcatttgaattat

SEQ ID NO: 5966618 - DNA, 25 bp, Homo sapien
agaagcatcaggtggtttagagaag

SEQ ID NO: 5966619 - DNA, 25 bp, Homo sapien
aatgacagactactttcccataggc

SEQ ID NO: 5966620 - DNA, 25 bp, Homo sapien
agctattgagagagatgcatttgaa

SEQ ID NO: 5966621 - DNA, 25 bp, Homo sapien
tggggtgcctcaaatgacagactac

SEQ ID NO: 5966622 - DNA, 25 bp, Homo sapien
gcatcaggtggtttagagaagctgg

SEQ ID NO: 5966623 - DNA, 25 bp, Homo sapien
catcactctatatgaaactgaattt

SEQ ID NO: 5966624 - DNA, 25 bp, Homo sapien
gtttagatagaagcatcaggtggtt

SEQ ID NO: 5966625 - DNA, 25 bp, Homo sapien
ctgtcgaatcgcctatgactccaag

SEQ ID NO: 5966626 - DNA, 25 bp, Homo sapien
agatgagtcaaattctttaacacta

SEQ ID NO: 5966627 - DNA, 25 bp, Homo sapien
atgtccaaagtgtttattgccacag

SEQ ID NO: 5966628 - DNA, 25 bp, Homo sapien
ccaacccatagctcgcaggcaagtc

SEQ ID NO: 5966629 - DNA, 25 bp, Homo sapien
aaggtgtgggataataagctgttag

SEQ ID NO: 5966630 - DNA, 25 bp, Homo sapien
aaaaagcattccttttgggcattaa

SEQ ID NO: 5966631 - DNA, 25 bp, Homo sapien
acattgaatatgcattgtgatgata

SEQ ID NO: 5966632 - DNA, 25 bp, Homo sapien
ctttcccataggctggttgctacag

SEQ ID NO: 5966633 - DNA, 25 bp, Homo sapien
attggagccccacgttagaattaca

SEQ ID NO: 5966634 - DNA, 25 bp, Homo sapien
aggactaattgccacaggttttaat

SEQ ID NO: 5966635 - DNA, 25 bp, Homo sapien
tcatttacggtaagttgttcaggtg

SEQ ID NO: 5966636 - DNA, 25 bp, Homo sapien
ctacattgaatatgcattgtgatga

SEQ ID NO: 5966637 - DNA, 25 bp, Homo sapien
tttggtgaaagaataggctccttat

SEQ ID NO: 5966638 - DNA, 25 bp, Homo sapien
tccttatccgtaccaacccatagct

SEQ ID NO: 5966639 - DNA, 25 bp, Homo sapien
cacaggttttaataatggaacagta

SEQ ID NO: 5966640 - DNA, 25 bp, Homo sapien
aagaatcactacattgaatatgcat

SEQ ID NO: 5966641 - DNA, 25 bp, Homo sapien
ttcagaactatctacattacgcccg

SEQ ID NO: 5966642 - DNA, 25 bp, Homo sapien
cgtaccaacccatagctcgcaggca

SEQ ID NO: 5966643 - DNA, 25 bp, Homo sapien
caggtggtttagagaagctggcggt

SEQ ID NO: 5966644 - DNA, 25 bp, Homo sapien
cagtacaaatttcagaactatctac

SEQ ID NO: 5966645 - DNA, 25 bp, Homo sapien
tttcacccgtttgcagatgagtcaa

SEQ ID NO: 5966646 - DNA, 25 bp, Homo sapien
cgaatcgcctatgactccaagtcaa

SEQ ID NO: 5966647 - DNA, 25 bp, Homo sapien
gactccaagtcaatttgccacttct

SEQ ID NO: 5966648 - DNA, 25 bp, Homo sapien
ataagtcatattctcactttgtcca

SEQ ID NO: 5966649 - DNA, 25 bp, Homo sapien
gtcaatttgccacttctgtggatat

SEQ ID NO: 5966650 - DNA, 25 bp, Homo sapien
caatttgccacttctgtggatatct

SEQ ID NO: 5966651 - DNA, 25 bp, Homo sapien
acgattcaaattcatttggttgcat

SEQ ID NO: 5966652 - DNA, 25 bp, Homo sapien
gcacattctagctgggtcatgagtc

SEQ ID NO: 5966653 - DNA, 25 bp, Homo sapien
tgcattgtgatgatattgaaattga

SEQ ID NO: 5966654 - DNA, 25 bp, Homo sapien
gaacctggtgtctttgacgtgaagt

SEQ ID NO: 5966655 - DNA, 25 bp, Homo sapien
aaggttggagatctggtatgggagc

SEQ ID NO: 5966656 - DNA, 25 bp, Homo sapien
taccaacccatagctcgcaggcaag

SEQ ID NO: 5966657 - DNA, 25 bp, Homo sapien
tccaaaagataagtcatattctcac

SEQ ID NO: 5966658 - DNA, 25 bp, Homo sapien
tgtgggataataagctgttagataa

SEQ ID NO: 5966659 - DNA, 25 bp, Homo sapien
ttaataatggaacagtacaaatttc

SEQ ID NO: 5966660 - DNA, 25 bp, Homo sapien
aatccaaaagataagtcatattctc

SEQ ID NO: 5966661 - DNA, 25 bp, Homo sapien
tccttttgggcattaaaatggggtg

SEQ ID NO: 5966662 - DNA, 25 bp, Homo sapien
tatctacattacgcccgttgtacaa

SEQ ID NO: 5966663 - DNA, 25 bp, Homo sapien
gatttaaatgaaagtttatgctgtg

SEQ ID NO: 5966664 - DNA, 25 bp, Homo sapien
cccatagctcgcaggcaagtctggg

SEQ ID NO: 5966665 - DNA, 25 bp, Homo sapien
atccttattagccattgctcacgat

SEQ ID NO: 5966666 - DNA, 25 bp, Homo sapien
cgaggactaattgccacaggtttta

SEQ ID NO: 5966667 - DNA, 25 bp, Homo sapien
ttctcctcaaggatccttattagcc

SEQ ID NO: 5966668 - DNA, 25 bp, Homo sapien
gagccccacgttagaattacaaggc

SEQ ID NO: 5966669 - DNA, 25 bp, Homo sapien
tatcgtatcactagagaagatgaga

SEQ ID NO: 5966670 - DNA, 25 bp, Homo sapien
ttgtttagatagaagcatcaggtgg

SEQ ID NO: 5966671 - DNA, 25 bp, Homo sapien
ctcactttgtccataagtccggatt

SEQ ID NO: 5966672 - DNA, 25 bp, Homo sapien
tgtggatatctctgaacgaggacta

SEQ ID NO: 5966673 - DNA, 25 bp, Homo sapien
cttaaaggtgtgggataataagctg

SEQ ID NO: 5966674 - DNA, 25 bp, Homo sapien
tcgcctatgactccaagtcaatttg

SEQ ID NO: 5966675 - DNA, 25 bp, Homo sapien
ccatgtcgatgtcttgcaagctatt

SEQ ID NO: 5966676 - DNA, 25 bp, Homo sapien
ctttaacactaaattggagccccac

SEQ ID NO: 5966677 - DNA, 25 bp, Homo sapien
cataggctggttgctacagacgtca

SEQ ID NO: 5966678 - DNA, 25 bp, Homo sapien
ttattagccattgctcacgattcaa

SEQ ID NO: 5966679 - DNA, 25 bp, Homo sapien
catattctcactttgtccataagtc

SEQ ID NO: 5966680 - DNA, 25 bp, Homo sapien
ttgttgctaccacttcattttctgg

SEQ ID NO: 5966681 - DNA, 25 bp, Homo sapien
ttgcacattctagctgggtcatgag

SEQ ID NO: 5966682 - DNA, 25 bp, Homo sapien
ctaccacttcattttctggcgattt

SEQ ID NO: 5966683 - DNA, 25 bp, Homo sapien
tgccttgttgctaccacttcatttt

SEQ ID NO: 5966684 - DNA, 25 bp, Homo sapien
ttaataattcgaattccatcagatc

SEQ ID NO: 5966685 - DNA, 25 bp, Homo sapien
cttgcaattcatttacggtaagttg

SEQ ID NO: 5966686 - DNA, 25 bp, Homo sapien
ttcaaattcatttggttgcatcact

SEQ ID NO: 5966687 - DNA, 25 bp, Homo sapien
tctagctgggtcatgagtctatcgt

SEQ ID NO: 5966688 - DNA, 25 bp, Homo sapien
gaagtttcacccgtttgcagatgag

SEQ ID NO: 5966689 - DNA, 25 bp, Homo sapien
tgagagagatgcatttgaattatgc

SEQ ID NO: 5966690 - DNA, 25 bp, Homo sapien
gctacagacgtcaaagggaccactt

SEQ ID NO: 5966691 - DNA, 25 bp, Homo sapien
cattgctcacgattcaaattcattt

SEQ ID NO: 5966692 - DNA, 25 bp, Homo sapien
ctttgtccataagtccggattgcac

SEQ ID NO: 5966693 - DNA, 25 bp, Homo sapien
tggtgaaagaataggctccttatcc

SEQ ID NO: 5966694 - DNA, 25 bp, Homo sapien
ggatcttctagactcagacatgaaa

SEQ ID NO: 5966695 - DNA, 25 bp, Homo sapien
aaaaacaaaggaaagaatcactaca

SEQ ID NO: 5966696 - DNA, 25 bp, Homo sapien
tgagattttgggatgtaaaaacaaa

SEQ ID NO: 5966697 - DNA, 25 bp, Homo sapien
tgaaaatccaaaagataagtcatat

SEQ ID NO: 5966698 - DNA, 25 bp, Homo sapien
gccattgctcacgattcaaattcat

SEQ ID NO: 5966699 - DNA, 25 bp, Homo sapien
gcccgttgtacaattttgaatctca

SEQ ID NO: 5966700 - DNA, 25 bp, Homo sapien
tctcggtttctgcttgcaattcatt

SEQ ID NO: 5966701 - DNA, 25 bp, Homo sapien
tctctgaacgaggactaattgccac

SEQ ID NO: 5966702 - DNA, 25 bp, Homo sapien
gtaaagctcatgacgctgatatttt

SEQ ID NO: 5966703 - DNA, 25 bp, Homo sapien
taagctgttagataatgaaaatcca

SEQ ID NO: 5966704 - DNA, 25 bp, Homo sapien
cacagcaaatgcaggtaaagctcat

SEQ ID NO: 5966705 - DNA, 25 bp, Homo sapien
cgtcaaagggaccacttacatttgg

SEQ ID NO: 5966706 - DNA, 25 bp, Homo sapien
acctggtgtctttgacgtgaagttt

SEQ ID NO: 5966707 - DNA, 25 bp, Homo sapien
atgactccaagtcaatttgccactt

SEQ ID NO: 5966708 - DNA, 25 bp, Homo sapien
atctggtatgggagctgatttaaat

SEQ ID NO: 5966709 - DNA, 25 bp, Homo sapien
ctggtgaaacattatgcagtgccgg

SEQ ID NO: 5966710 - DNA, 25 bp, Homo sapien
ttctggtgaaacattatgcagtgcc

SEQ ID NO: 5966711 - DNA, 25 bp, Homo sapien
ggattgcaccatgtcgatgtcttgc

SEQ ID NO: 5966712 - DNA, 25 bp, Homo sapien
tgttgatgaacatggagattcttta

SEQ ID NO: 5966713 - DNA, 25 bp, Homo sapien
acgcccgttgtacaattttgaatct

SEQ ID NO: 5966714 - DNA, 25 bp, Homo sapien
agctgaacctggtgtctttgacgtg

SEQ ID NO: 5966715 - DNA, 25 bp, Homo sapien
gtctgggtgaatttgcacattctag

SEQ ID NO: 5966716 - DNA, 25 bp, Homo sapien
aaattgagattttgggatgtaaaaa

SEQ ID NO: 5966717 - DNA, 25 bp, Homo sapien
atgcatttgaattatgccttgttgc

SEQ ID NO: 5966718 - DNA, 25 bp, Homo sapien
ggttggagatctggtatgggagctg

SEQ ID NO: 5966719 - DNA, 25 bp, Homo sapien
aaagctcatgacgctgatattttct

SEQ ID NO: 5966720 - DNA, 25 bp, Homo sapien
taaaggtgtgggataataagctgtt

SEQ ID NO: 5966721 - DNA, 25 bp, Homo sapien
tggagattctttagctgaacctggt

SEQ ID NO: 5966722 - DNA, 25 bp, Homo sapien
gccacagcaaatgcaggtaaagctc

SEQ ID NO: 5966723 - DNA, 25 bp, Homo sapien
attcatttacggtaagttgttcagg

SEQ ID NO: 5966724 - DNA, 25 bp, Homo sapien
tcatgagtctatcgtttaatgattc

SEQ ID NO: 5966725 - DNA, 25 bp, Homo sapien
gcgatttactcttctatcgtatcac

SEQ ID NO: 5966726 - DNA, 25 bp, Homo sapien
agctcatgacgctgatattttctcg

SEQ ID NO: 5966727 - DNA, 25 bp, Homo sapien
attttctcggtttctgcttgcaatt

SEQ ID NO: 5966728 - DNA, 25 bp, Homo sapien
attatgcagtgccggatgggatggt

SEQ ID NO: 5966729 - DNA, 25 bp, Homo sapien
atcgtttaatgattctggtgaaaca

SEQ ID NO: 5966730 - DNA, 25 bp, Homo sapien
tggttgcatcactctatatgaaact

SEQ ID NO: 5966731 - DNA, 25 bp, Homo sapien
ctggtatgggagctgatttaaatga

SEQ ID NO: 5966732 - DNA, 25 bp, Homo sapien
tcgtatcactagagaagatgagact

SEQ ID NO: 5966733 - DNA, 25 bp, Homo sapien
tgaatctcagcattctatgattaat

SEQ ID NO: 5966734 - DNA, 25 bp, Homo sapien
gctgggtcatgagtctatcgtttaa

SEQ ID NO: 5966735 - DNA, 25 bp, Homo sapien
cacttcattttctggcgatttactc

SEQ ID NO: 5966736 - DNA, 25 bp, Homo sapien
aatggggtgcctcaaatgacagact

SEQ ID NO: 5966737 - DNA, 25 bp, Homo sapien
ttgaattatgccttgttgctaccac

SEQ ID NO: 5966738 - DNA, 25 bp, Homo sapien
ttggagatctggtatgggagctgat

SEQ ID NO: 5966739 - DNA, 25 bp, Homo sapien
catagctcgcaggcaagtctgggtg

SEQ ID NO: 5966740 - DNA, 25 bp, Homo sapien
tttatgctgtgtttgtttagataga

SEQ ID NO: 5966741 - DNA, 25 bp, Homo sapien
gactcagacatgaaaaagcattcct

SEQ ID NO: 5966742 - DNA, 25 bp, Homo sapien
ttgctacagacgtcaaagggaccac

SEQ ID NO: 5966743 - DNA, 25 bp, Homo sapien
tctacattacgcccgttgtacaatt

SEQ ID NO: 5966744 - DNA, 25 bp, Homo sapien
tcacccgtttgcagatgagtcaaat

SEQ ID NO: 5966745 - DNA, 25 bp, Homo sapien
tcgagaaattggatcttctagactc

SEQ ID NO: 5966746 - DNA, 25 bp, Homo sapien
tgggagctgatttaaatgaaagttt

SEQ ID NO: 5966747 - DNA, 25 bp, Homo sapien
ttagaattacaaggcactgtcgaat

SEQ ID NO: 5966748 - DNA, 25 bp, Homo sapien
gtttgcagatgagtcaaattcttta

SEQ ID NO: 5966749 - DNA, 25 bp, Homo sapien
attcgagaaattggatcttctagac

SEQ ID NO: 5966750 - DNA, 25 bp, Homo sapien
catttggttgcatcactctatatga

SEQ ID NO: 5966751 - DNA, 25 bp, Homo sapien
catttggaagtttcacccgtttgca

SEQ ID NO: 5966752 - DNA, 25 bp, Homo sapien
cagaactatctacattacgcccgtt

SEQ ID NO: 5966753 - DNA, 25 bp, Homo sapien
tgctgtgtttgtttagatagaagca

SEQ ID NO: 5966754 - DNA, 25 bp, Homo sapien
tttaaatgaaagtttatgctgtgtt

SEQ ID NO: 5966755 - DNA, 25 bp, Homo sapien
gtgaaattttctcctcaaggatcct

SEQ ID NO: 5966756 - DNA, 25 bp, Homo sapien
ctcttctatcgtatcactagagaag

SEQ ID NO: 5966757 - DNA, 25 bp, Homo sapien
tatgaaactgaatttggtgaaagaa

SEQ ID NO: 5966758 - DNA, 25 bp, Homo sapien
ttttctcctcaaggatccttattag

SEQ ID NO: 5966759 - DNA, 25 bp, Homo sapien
atggaacagtacaaatttcagaact

SEQ ID NO: 5966760 - DNA, 25 bp, Homo sapien
ggttacttaaaggtgtgggataata

SEQ ID NO: 5966761 - DNA, 25 bp, Homo sapien
ggagctgatttaaatgaaagtttat

SEQ ID NO: 5966762 - DNA, 25 bp, Homo sapien
agagagatgcatttgaattatgcct

SEQ ID NO: 5966763 - DNA, 25 bp, Homo sapien
aagtcaatttgccacttctgtggat

SEQ ID NO: 5966764 - DNA, 25 bp, Homo sapien
gtccaaagtgtttattgccacagca

SEQ ID NO: 5966765 - DNA, 25 bp, Homo sapien
gtaaattgagattttgggatgtaaa

SEQ ID NO: 5966766 - DNA, 25 bp, Homo sapien
tgacgctgatattttctcggtttct

SEQ ID NO: 5966767 - DNA, 25 bp, Homo sapien
aagcatcaggtggtttagagaagct

SEQ ID NO: 5966768 - DNA, 25 bp, Homo sapien
tccgtaccaacccatagctcgcagg

SEQ ID NO: 5966769 - DNA, 25 bp, Homo sapien
ccacttacatttggaagtttcaccc

SEQ ID NO: 5966770 - DNA, 25 bp, Homo sapien
gtcaaattctttaacactaaattgg

SEQ ID NO: 5966771 - DNA, 25 bp, Homo sapien
gtgaatttgcacattctagctgggt

SEQ ID NO: 5966772 - DNA, 25 bp, Homo sapien
tatgctgtgtttgtttagatagaag

SEQ ID NO: 5966773 - DNA, 25 bp, Homo sapien
tgggtcatgagtctatcgtttaatg

SEQ ID NO: 5966774 - DNA, 25 bp, Homo sapien
atttgccacttctgtggatatctct

SEQ ID NO: 5966775 - DNA, 25 bp, Homo sapien
atgagtctatcgtttaatgattctg

SEQ ID NO: 5966776 - DNA, 25 bp, Homo sapien
tgcatcactctatatgaaactgaat

SEQ ID NO: 5966777 - DNA, 25 bp, Homo sapien
aattctttaacactaaattggagcc

SEQ ID NO: 5966778 - DNA, 25 bp, Homo sapien
tgaaattgaagaggatatcttagct

SEQ ID NO: 5966779 - DNA, 25 bp, Homo sapien
tatgcagtgccggatgggatggtaa

SEQ ID NO: 5966780 - DNA, 25 bp, Homo sapien
aggctccttatccgtaccaacccat

SEQ ID NO: 5966781 - DNA, 25 bp, Homo sapien
aggaaagaatcactacattgaatat

SEQ ID NO: 5966782 - DNA, 25 bp, Homo sapien
ctcatgacgctgatattttctcggt

SEQ ID NO: 5966783 - DNA, 25 bp, Homo sapien
tgaaaaagcattccttttgggcatt

SEQ ID NO: 5966784 - DNA, 25 bp, Homo sapien
cttcattttctggcgatttactctt

SEQ ID NO: 5966785 - DNA, 25 bp, Homo sapien
attccatcagatcggtgaaattttc

SEQ ID NO: 5966786 - DNA, 25 bp, Homo sapien
atgtcgatgtcttgcaagctattga

SEQ ID NO: 5966787 - DNA, 25 bp, Homo sapien
gagattctttagctgaacctggtgt

SEQ ID NO: 5966788 - DNA, 25 bp, Homo sapien
tgcaattcatttacggtaagttgtt

SEQ ID NO: 5966789 - DNA, 25 bp, Homo sapien
tttgggcattaaaatggggtgcctc

SEQ ID NO: 5966790 - DNA, 25 bp, Homo sapien
cagtgccggatgggatggtaaattg

SEQ ID NO: 5966791 - DNA, 25 bp, Homo sapien
gctccttatccgtaccaacccatag

SEQ ID NO: 5966792 - DNA, 25 bp, Homo sapien
atttcagaactatctacattacgcc

SEQ ID NO: 5966793 - DNA, 25 bp, Homo sapien
aagttgttcaggtgacggttactta

SEQ ID NO: 5966794 - DNA, 25 bp, Homo sapien
acaaggcactgtcgaatcgcctatg

SEQ ID NO: 5966795 - DNA, 25 bp, Homo sapien
aaacaaaggaaagaatcactacatt

SEQ ID NO: 5966796 - DNA, 25 bp, Homo sapien
tcattttctggcgatttactcttct

SEQ ID NO: 5966797 - DNA, 25 bp, Homo sapien
ttgccacagcaaatgcaggtaaagc

SEQ ID NO: 5966798 - DNA, 25 bp, Homo sapien
cacgttagaattacaaggcactgtc

SEQ ID NO: 5966799 - DNA, 25 bp, Homo sapien
cggatgggatggtaaattgagattt

SEQ ID NO: 5966800 - DNA, 25 bp, Homo sapien
atcactagagaagatgagactaaaa

SEQ ID NO: 5966801 - DNA, 25 bp, Homo sapien
tgaacatggagattctttagctgaa

SEQ ID NO: 5966802 - DNA, 25 bp, Homo sapien
gcaagtctgggtgaatttgcacatt

SEQ ID NO: 5966803 - DNA, 25 bp, Homo sapien
aatcgcctatgactccaagtcaatt

SEQ ID NO: 5966804 - DNA, 25 bp, Homo sapien
gattcaaattcatttggttgcatca

SEQ ID NO: 5966805 - DNA, 25 bp, Homo sapien
gtctatcgtttaatgattctggtga

SEQ ID NO: 5966806 - DNA, 25 bp, Homo sapien
gaattccatcagatcggtgaaattt

SEQ ID NO: 5966807 - DNA, 25 bp, Homo sapien
ccttgttgctaccacttcattttct

SEQ ID NO: 5966808 - DNA, 25 bp, Homo sapien
ttttaataatggaacagtacaaatt

SEQ ID NO: 5966809 - DNA, 25 bp, Homo sapien
ctatcgtttaatgattctggtgaaa

SEQ ID NO: 5966810 - DNA, 25 bp, Homo sapien
ttggatcttctagactcagacatga

SEQ ID NO: 5966811 - DNA, 25 bp, Homo sapien
ccgtttgcagatgagtcaaattctt

SEQ ID NO: 5966812 - DNA, 25 bp, Homo sapien
tggcgatttactcttctatcgtatc

SEQ ID NO: 5966813 - DNA, 25 bp, Homo sapien
atttgcacattctagctgggtcatg

SEQ ID NO: 5966814 - DNA, 25 bp, Homo sapien
ctgggtgaatttgcacattctagct

SEQ ID NO: 5966815 - DNA, 25 bp, Homo sapien
attgagattttgggatgtaaaaaca

SEQ ID NO: 5966816 - DNA, 25 bp, Homo sapien
ttgctcacgattcaaattcatttgg

SEQ ID NO: 5966817 - DNA, 25 bp, Homo sapien
agtttcacccgtttgcagatgagtc

SEQ ID NO: 5966818 - DNA, 25 bp, Homo sapien
tgttcaggtgacggttacttaaagg

SEQ ID NO: 5966819 - DNA, 25 bp, Homo sapien
ctggtgtctttgacgtgaagttttt

SEQ ID NO: 5966820 - DNA, 25 bp, Homo sapien
gatgagactaaaaaagttatattcg

SEQ ID NO: 5966821 - DNA, 25 bp, Homo sapien
tcactctatatgaaactgaatttgg

SEQ ID NO: 5966822 - DNA, 25 bp, Homo sapien
tctatatgaaactgaatttggtgaa

SEQ ID NO: 5966823 - DNA, 25 bp, Homo sapien
cagcaaatgcaggtaaagctcatga

SEQ ID NO: 5966824 - DNA, 25 bp, Homo sapien
tgcagtgccggatgggatggtaaat

SEQ ID NO: 5966825 - DNA, 25 bp, Homo sapien
tggtaaattgagattttgggatgta

SEQ ID NO: 5966826 - DNA, 25 bp, Homo sapien
aaaatggggtgcctcaaatgacaga

SEQ ID NO: 5966827 - DNA, 25 bp, Homo sapien
ggttgctacagacgtcaaagggacc

SEQ ID NO: 5966828 - DNA, 25 bp, Homo sapien
attgcaccatgtcgatgtcttgcaa

SEQ ID NO: 5966829 - DNA, 25 bp, Homo sapien
tgaagaggatatcttagctgttgat

SEQ ID NO: 5966830 - DNA, 25 bp, Homo sapien
aaagtttatgctgtgtttgtttaga

SEQ ID NO: 5966831 - DNA, 25 bp, Homo sapien
caccatgtcgatgtcttgcaagcta

SEQ ID NO: 5966832 - DNA, 25 bp, Homo sapien
ttacggtaagttgttcaggtgacgg

SEQ ID NO: 5966833 - DNA, 25 bp, Homo sapien
gatatctctgaacgaggactaattg

SEQ ID NO: 5966834 - DNA, 25 bp, Homo sapien
attgaagaggatatcttagctgttg

SEQ ID NO: 5966835 - DNA, 25 bp, Homo sapien
gattaataattcgaattccatcaga

SEQ ID NO: 5966836 - DNA, 25 bp, Homo sapien
agcattccttttgggcattaaaatg

SEQ ID NO: 5966837 - DNA, 25 bp, Homo sapien
attttctggcgatttactcttctat

SEQ ID NO: 5966838 - DNA, 25 bp, Homo sapien
ggtttctgcttgcaattcatttacg

SEQ ID NO: 5966839 - DNA, 25 bp, Homo sapien
gccggatgggatggtaaattgagat

SEQ ID NO: 5966840 - DNA, 25 bp, Homo sapien
cagacgtcaaagggaccacttacat

SEQ ID NO: 5966841 - DNA, 25 bp, Homo sapien
tgaaacattatgcagtgccggatgg

SEQ ID NO: 5966842 - DNA, 25 bp, Homo sapien
aataattcgaattccatcagatcgg

SEQ ID NO: 5966843 - DNA, 25 bp, Homo sapien
tcaaggatccttattagccattgct

SEQ ID NO: 5966844 - DNA, 25 bp, Homo sapien
acaaatttcagaactatctacatta

SEQ ID NO: 5966845 - DNA, 25 bp, Homo sapien
atgtcttgcaagctattgagagaga

SEQ ID NO: 5966846 - DNA, 25 bp, Homo sapien
gtgacggttacttaaaggtgtggga

SEQ ID NO: 5966847 - DNA, 25 bp, Homo sapien
agataagtcatattctcactttgtc

SEQ ID NO: 5966848 - DNA, 25 bp, Homo sapien
cttctagactcagacatgaaaaagc

SEQ ID NO: 5966849 - DNA, 25 bp, Homo sapien
attatgccttgttgctaccacttca

SEQ ID NO: 5966850 - DNA, 25 bp, Homo sapien
attctagctgggtcatgagtctatc

SEQ ID NO: 5966851 - DNA, 25 bp, Homo sapien
ggctggttgctacagacgtcaaagg

SEQ ID NO: 5966852 - DNA, 25 bp, Homo sapien
taatggaacagtacaaatttcagaa

SEQ ID NO: 5966853 - DNA, 25 bp, Homo sapien
gaggatatcttagctgttgatgaac

SEQ ID NO: 5966854 - DNA, 25 bp, Homo sapien
tgtctttgacgtgaagtttttgaaa

SEQ ID NO: 5966855 - DNA, 25 bp, Homo sapien
aagaggatatcttagctgttgatga

SEQ ID NO: 5966856 - DNA, 25 bp, Homo sapien
gggatggtaaattgagattttggga

SEQ ID NO: 5966857 - DNA, 25 bp, Homo sapien
atgagtcaaattctttaacactaaa

SEQ ID NO: 5966858 - DNA, 25 bp, Homo sapien
tttgaaaaaaggttggagatctggt

SEQ ID NO: 5966859 - DNA, 25 bp, Homo sapien
aattggatcttctagactcagacat

SEQ ID NO: 5966860 - DNA, 25 bp, Homo sapien
agatgcatttgaattatgccttgtt

SEQ ID NO: 5966861 - DNA, 25 bp, Homo sapien
ctcagacatgaaaaagcattccttt

SEQ ID NO: 5966862 - DNA, 25 bp, Homo sapien
actctatatgaaactgaatttggtg

SEQ ID NO: 5966863 - DNA, 25 bp, Homo sapien
ggcactgtcgaatcgcctatgactc

SEQ ID NO: 5966864 - DNA, 25 bp, Homo sapien
gccacaggttttaataatggaacag

SEQ ID NO: 5966865 - DNA, 25 bp, Homo sapien
cagacatgaaaaagcattccttttg

SEQ ID NO: 5966866 - DNA, 25 bp, Homo sapien
aggcaagtctgggtgaatttgcaca

SEQ ID NO: 5966867 - DNA, 25 bp, Homo sapien
ctatgattaataattcgaattccat

SEQ ID NO: 5966868 - DNA, 25 bp, Homo sapien
atgcaggtaaagctcatgacgctga

SEQ ID NO: 5966869 - DNA, 25 bp, Homo sapien
ggaacagtacaaatttcagaactat

SEQ ID NO: 5966870 - DNA, 25 bp, Homo sapien
ggtgaaacattatgcagtgccggat

SEQ ID NO: 5966871 - DNA, 25 bp, Homo sapien
agactaaaaaagttatattcgagaa

SEQ ID NO: 5966872 - DNA, 25 bp, Homo sapien
aaggatccttattagccattgctca

SEQ ID NO: 5966873 - DNA, 25 bp, Homo sapien
gtgccggatgggatggtaaattgag

SEQ ID NO: 5966874 - DNA, 25 bp, Homo sapien
aaaaagttatattcgagaaattgga

SEQ ID NO: 5966875 - DNA, 25 bp, Homo sapien
gtcttgcaagctattgagagagatg

SEQ ID NO: 5966876 - DNA, 25 bp, Homo sapien
gctgttgatgaacatggagattctt

SEQ ID NO: 5966877 - DNA, 25 bp, Homo sapien
gggaccacttacatttggaagtttc

SEQ ID NO: 5966878 - DNA, 25 bp, Homo sapien
caaattcatttggttgcatcactct

SEQ ID NO: 5966879 - DNA, 25 bp, Homo sapien
tttattgccacagcaaatgcaggta

SEQ ID NO: 5966880 - DNA, 25 bp, Homo sapien
ctaattgccacaggttttaataatg

SEQ ID NO: 5966881 - DNA, 25 bp, Homo sapien
catcagatcggtgaaattttctcct

SEQ ID NO: 5966882 - DNA, 25 bp, Homo sapien
tacagacgtcaaagggaccacttac

SEQ ID NO: 5966883 - DNA, 25 bp, Homo sapien
gttgcatcactctatatgaaactga

SEQ ID NO: 5966884 - DNA, 25 bp, Homo sapien
tatctctgaacgaggactaattgcc

SEQ ID NO: 5966885 - DNA, 25 bp, Homo sapien
cccacgttagaattacaaggcactg

SEQ ID NO: 5966886 - DNA, 25 bp, Homo sapien
gatgaacatggagattctttagctg

SEQ ID NO: 5966887 - DNA, 25 bp, Homo sapien
cattacgcccgttgtacaattttga

SEQ ID NO: 5966888 - DNA, 25 bp, Homo sapien
agtttatgctgtgtttgtttagata

SEQ ID NO: 5966889 - DNA, 25 bp, Homo sapien
tagctgggtcatgagtctatcgttt

SEQ ID NO: 5966890 - DNA, 25 bp, Homo sapien
agctgatttaaatgaaagtttatgc

SEQ ID NO: 5966891 - DNA, 25 bp, Homo sapien
acgctgatattttctcggtttctgc

SEQ ID NO: 5966892 - DNA, 25 bp, Homo sapien
agagatgcatttgaattatgccttg

SEQ ID NO: 5966893 - DNA, 25 bp, Homo sapien
ttaacactaaattggagccccacgt

SEQ ID NO: 5966894 - DNA, 25 bp, Homo sapien
agatcggtgaaattttctcctcaag

SEQ ID NO: 5966895 - DNA, 25 bp, Homo sapien
gaaagaatcactacattgaatatgc

SEQ ID NO: 5966896 - DNA, 25 bp, Homo sapien
gtaagttgttcaggtgacggttact

SEQ ID NO: 5966897 - DNA, 25 bp, Homo sapien
gatggtaaattgagattttgggatg

SEQ ID NO: 5966898 - DNA, 25 bp, Homo sapien
ggataataagctgttagataatgaa

SEQ ID NO: 5966899 - DNA, 25 bp, Homo sapien
tgacagactactttcccataggctg

SEQ ID NO: 5966900 - DNA, 25 bp, Homo sapien
cattgtgatgatattgaaattgaag

SEQ ID NO: 5966901 - DNA, 25 bp, Homo sapien
tctgtggatatctctgaacgaggac

SEQ ID NO: 5966902 - DNA, 25 bp, Homo sapien
gaaattttctcctcaaggatcctta

SEQ ID NO: 5966903 - DNA, 25 bp, Homo sapien
ggtcatgagtctatcgtttaatgat

SEQ ID NO: 5966904 - DNA, 25 bp, Homo sapien
tcagatcggtgaaattttctcctca

SEQ ID NO: 5966905 - DNA, 25 bp, Homo sapien
aaattgaagaggatatcttagctgt

SEQ ID NO: 5966906 - DNA, 25 bp, Homo sapien
gacatgaaaaagcattccttttggg

SEQ ID NO: 5966907 - DNA, 25 bp, Homo sapien
aattacaaggcactgtcgaatcgcc

SEQ ID NO: 5966908 - DNA, 25 bp, Homo sapien
tctatcgtatcactagagaagatga

SEQ ID NO: 5966909 - DNA, 25 bp, Homo sapien
ttctttagctgaacctggtgtcttt

SEQ ID NO: 5966910 - DNA, 25 bp, Homo sapien
tgcttgcaattcatttacggtaagt

SEQ ID NO: 5966911 - DNA, 25 bp, Homo sapien
atagaagcatcaggtggtttagaga

SEQ ID NO: 5966912 - DNA, 25 bp, Homo sapien
aagaataggctccttatccgtacca

SEQ ID NO: 5966913 - DNA, 25 bp, Homo sapien
tccatcagatcggtgaaattttctc

SEQ ID NO: 5966914 - DNA, 25 bp, Homo sapien
ccaaagtgtttattgccacagcaaa

SEQ ID NO: 5966915 - DNA, 25 bp, Homo sapien
tctgcttgcaattcatttacggtaa

SEQ ID NO: 5966916 - DNA, 25 bp, Homo sapien
atcaggtggtttagagaagctggcg

SEQ ID NO: 5966917 - DNA, 25 bp, Homo sapien
gtaaaaacaaaggaaagaatcacta

SEQ ID NO: 5966918 - DNA, 25 bp, Homo sapien
ataggctccttatccgtaccaaccc

SEQ ID NO: 5966919 - DNA, 25 bp, Homo sapien
ttctttaacactaaattggagcccc

SEQ ID NO: 5966920 - DNA, 25 bp, Homo sapien
tgaacgaggactaattgccacaggt

SEQ ID NO: 5966921 - DNA, 25 bp, Homo sapien
gaccacttacatttggaagtttcac

SEQ ID NO: 5966922 - DNA, 25 bp, Homo sapien
ccataagtccggattgcaccatgtc

SEQ ID NO: 5966923 - DNA, 25 bp, Homo sapien
tgggataataagctgttagataatg

SEQ ID NO: 5966924 - DNA, 25 bp, Homo sapien
aaagttatattcgagaaattggatc

SEQ ID NO: 5966925 - DNA, 25 bp, Homo sapien
tttcatttaaatcagctcccatacc

SEQ ID NO: 5966926 - DNA, 25 bp, Homo sapien
atattcaatgtagtgattctttcct

SEQ ID NO: 5966927 - DNA, 25 bp, Homo sapien
gaatttgaatcgtgagcaatggcta

SEQ ID NO: 5966928 - DNA, 25 bp, Homo sapien
ttcagctaaagaatctccatgttca

SEQ ID NO: 5966929 - DNA, 25 bp, Homo sapien
cagctcccataccagatctccaacc

SEQ ID NO: 5966930 - DNA, 25 bp, Homo sapien
gtctgtagcaaccagcctatgggaa

SEQ ID NO: 5966931 - DNA, 25 bp, Homo sapien
aaatttcaccgatctgatggaattc

SEQ ID NO: 5966932 - DNA, 25 bp, Homo sapien
taacgtggggctccaatttagtgtt

SEQ ID NO: 5966933 - DNA, 25 bp, Homo sapien
cgaattattaatcatagaatgctga

SEQ ID NO: 5966934 - DNA, 25 bp, Homo sapien
tccaatttctcgaatataacttttt

SEQ ID NO: 5966935 - DNA, 25 bp, Homo sapien
ttaaacgatagactcatgacccagc

SEQ ID NO: 5966936 - DNA, 25 bp, Homo sapien
ttcacccagacttgcctgcgagcta

SEQ ID NO: 5966937 - DNA, 25 bp, Homo sapien
tcaaagacaccaggttcagctaaag

SEQ ID NO: 5966938 - DNA, 25 bp, Homo sapien
ggcactgcataatgtttcaccagaa

SEQ ID NO: 5966939 - DNA, 25 bp, Homo sapien
ctagaatgtgcaaattcacccagac

SEQ ID NO: 5966940 - DNA, 25 bp, Homo sapien
ccaaatgaatttgaatcgtgagcaa

SEQ ID NO: 5966941 - DNA, 25 bp, Homo sapien
aatttcaatatcatcacaatgcata

SEQ ID NO: 5966942 - DNA, 25 bp, Homo sapien
cttggagtcataggcgattcgacag

SEQ ID NO: 5966943 - DNA, 25 bp, Homo sapien
ctgaaatttgtactgttccattatt

SEQ ID NO: 5966944 - DNA, 25 bp, Homo sapien
tgaggagaaaatttcaccgatctga

SEQ ID NO: 5966945 - DNA, 25 bp, Homo sapien
tccctttgacgtctgtagcaaccag

SEQ ID NO: 5966946 - DNA, 25 bp, Homo sapien
gttcagagatatccacagaagtggc

SEQ ID NO: 5966947 - DNA, 25 bp, Homo sapien
caaaaggaatgctttttcatgtctg

SEQ ID NO: 5966948 - DNA, 25 bp, Homo sapien
agtaaccgtcacctgaacaacttac

SEQ ID NO: 5966949 - DNA, 25 bp, Homo sapien
cctgaacaacttaccgtaaatgaat

SEQ ID NO: 5966950 - DNA, 25 bp, Homo sapien
cctttaagtaaccgtcacctgaaca

SEQ ID NO: 5966951 - DNA, 25 bp, Homo sapien
gtggcaattagtcctcgttcagaga

SEQ ID NO: 5966952 - DNA, 25 bp, Homo sapien
gatccaatttctcgaatataacttt

SEQ ID NO: 5966953 - DNA, 25 bp, Homo sapien
attcaaaattgtacaacgggcgtaa

SEQ ID NO: 5966954 - DNA, 25 bp, Homo sapien
gaatgctgagattcaaaattgtaca

SEQ ID NO: 5966955 - DNA, 25 bp, Homo sapien
taaccgtcacctgaacaacttaccg

SEQ ID NO: 5966956 - DNA, 25 bp, Homo sapien
caccccattttaatgcccaaaagga

SEQ ID NO: 5966957 - DNA, 25 bp, Homo sapien
ttatctaacagcttattatcccaca

SEQ ID NO: 5966958 - DNA, 25 bp, Homo sapien
ttattaaaacctgtggcaattagtc

SEQ ID NO: 5966959 - DNA, 25 bp, Homo sapien
tcatttaaatcagctcccataccag

SEQ ID NO: 5966960 - DNA, 25 bp, Homo sapien
gtggtccctttgacgtctgtagcaa

SEQ ID NO: 5966961 - DNA, 25 bp, Homo sapien
atatccacagaagtggcaaattgac

SEQ ID NO: 5966962 - DNA, 25 bp, Homo sapien
gacagtgccttgtaattctaacgtg

SEQ ID NO: 5966963 - DNA, 25 bp, Homo sapien
cctgcgagctatgggttggtacgga

SEQ ID NO: 5966964 - DNA, 25 bp, Homo sapien
agaaaatatcagcgtcatgagcttt

SEQ ID NO: 5966965 - DNA, 25 bp, Homo sapien
catcgacatggtgcaatccggactt

SEQ ID NO: 5966966 - DNA, 25 bp, Homo sapien
atttgaatcgtgagcaatggctaat

SEQ ID NO: 5966967 - DNA, 25 bp, Homo sapien
cacctgaacaacttaccgtaaatga

SEQ ID NO: 5966968 - DNA, 25 bp, Homo sapien
aggatccttgaggagaaaatttcac

SEQ ID NO: 5966969 - DNA, 25 bp, Homo sapien
tgacgtctgtagcaaccagcctatg

SEQ ID NO: 5966970 - DNA, 25 bp, Homo sapien
aaggagcctattctttcaccaaatt

SEQ ID NO: 5966971 - DNA, 25 bp, Homo sapien
ccatgttcatcaacagctaagatat

SEQ ID NO: 5966972 - DNA, 25 bp, Homo sapien
ctccaatttagtgttaaagaatttg

SEQ ID NO: 5966973 - DNA, 25 bp, Homo sapien
gtgagaatatgacttatcttttgga

SEQ ID NO: 5966974 - DNA, 25 bp, Homo sapien
atgcatattcaatgtagtgattctt

SEQ ID NO: 5966975 - DNA, 25 bp, Homo sapien
gcctatgggaaagtagtctgtcatt

SEQ ID NO: 5966976 - DNA, 25 bp, Homo sapien
gaaaatttcaccgatctgatggaat

SEQ ID NO: 5966977 - DNA, 25 bp, Homo sapien
caaaatctcaatttaccatcccatc

SEQ ID NO: 5966978 - DNA, 25 bp, Homo sapien
gtggtagcaacaaggcataattcaa

SEQ ID NO: 5966979 - DNA, 25 bp, Homo sapien
ccagaaaatgaagtggtagcaacaa

SEQ ID NO: 5966980 - DNA, 25 bp, Homo sapien
atcaacagctaagatatcctcttca

SEQ ID NO: 5966981 - DNA, 25 bp, Homo sapien
tgacccagctagaatgtgcaaattc

SEQ ID NO: 5966982 - DNA, 25 bp, Homo sapien
cgatagaagagtaaatcgccagaaa

SEQ ID NO: 5966983 - DNA, 25 bp, Homo sapien
aatgcccaaaaggaatgctttttca

SEQ ID NO: 5966984 - DNA, 25 bp, Homo sapien
tacctgcatttgctgtggcaataaa

SEQ ID NO: 5966985 - DNA, 25 bp, Homo sapien
aaaaacttcacgtcaaagacaccag

SEQ ID NO: 5966986 - DNA, 25 bp, Homo sapien
aagtggcaaattgacttggagtcat

SEQ ID NO: 5966987 - DNA, 25 bp, Homo sapien
tggagtcataggcgattcgacagtg

SEQ ID NO: 5966988 - DNA, 25 bp, Homo sapien
attcagtttcatatagagtgatgca

SEQ ID NO: 5966989 - DNA, 25 bp, Homo sapien
caccgatctgatggaattcgaatta

SEQ ID NO: 5966990 - DNA, 25 bp, Homo sapien
caaccagcctatgggaaagtagtct

SEQ ID NO: 5966991 - DNA, 25 bp, Homo sapien
gcataatgtttcaccagaatcatta

SEQ ID NO: 5966992 - DNA, 25 bp, Homo sapien
ctatgggaaagtagtctgtcatttg

SEQ ID NO: 5966993 - DNA, 25 bp, Homo sapien
aattgtacaacgggcgtaatgtaga

SEQ ID NO: 5966994 - DNA, 25 bp, Homo sapien
catctctctcaatagcttgcaagac

SEQ ID NO: 5966995 - DNA, 25 bp, Homo sapien
ctgtagcaaccagcctatgggaaag

SEQ ID NO: 5966996 - DNA, 25 bp, Homo sapien
gaatttgactcatctgcaaacgggt

SEQ ID NO: 5966997 - DNA, 25 bp, Homo sapien
tgcatttgctgtggcaataaacact

SEQ ID NO: 5966998 - DNA, 25 bp, Homo sapien
aatgaagtggtagcaacaaggcata

SEQ ID NO: 5966999 - DNA, 25 bp, Homo sapien
atgcaaccaaatgaatttgaatcgt

SEQ ID NO: 5967000 - DNA, 25 bp, Homo sapien
agaaaccgagaaaatatcagcgtca

SEQ ID NO: 5967001 - DNA, 25 bp, Homo sapien
cacaatgcatattcaatgtagtgat

SEQ ID NO: 5967002 - DNA, 25 bp, Homo sapien
atttaaatcagctcccataccagat

SEQ ID NO: 5967003 - DNA, 25 bp, Homo sapien
agtgatgcaaccaaatgaatttgaa

SEQ ID NO: 5967004 - DNA, 25 bp, Homo sapien
tagcaacaaggcataattcaaatgc

SEQ ID NO: 5967005 - DNA, 25 bp, Homo sapien
gacaaagtgagaatatgacttatct

SEQ ID NO: 5967006 - DNA, 25 bp, Homo sapien
tcatcttctctagtgatacgataga

SEQ ID NO: 5967007 - DNA, 25 bp, Homo sapien
ttctttcaccaaattcagtttcata

SEQ ID NO: 5967008 - DNA, 25 bp, Homo sapien
cacccagacttgcctgcgagctatg

SEQ ID NO: 5967009 - DNA, 25 bp, Homo sapien
ttttagtctcatcttctctagtgat

SEQ ID NO: 5967010 - DNA, 25 bp, Homo sapien
acctgatgcttctatctaaacaaac

SEQ ID NO: 5967011 - DNA, 25 bp, Homo sapien
attaaaacctgtggcaattagtcct

SEQ ID NO: 5967012 - DNA, 25 bp, Homo sapien
attcgacagtgccttgtaattctaa

SEQ ID NO: 5967013 - DNA, 25 bp, Homo sapien
cttctctagtgatacgatagaagag

SEQ ID NO: 5967014 - DNA, 25 bp, Homo sapien
agaatgtgcaaattcacccagactt

SEQ ID NO: 5967015 - DNA, 25 bp, Homo sapien
gagctttacctgcatttgctgtggc

SEQ ID NO: 5967016 - DNA, 25 bp, Homo sapien
aatttgtactgttccattattaaaa

SEQ ID NO: 5967017 - DNA, 25 bp, Homo sapien
gaatcgtgagcaatggctaataagg

SEQ ID NO: 5967018 - DNA, 25 bp, Homo sapien
aaaggaatgctttttcatgtctgag

SEQ ID NO: 5967019 - DNA, 25 bp, Homo sapien
ttgaggcaccccattttaatgccca

SEQ ID NO: 5967020 - DNA, 25 bp, Homo sapien
gatgcttctatctaaacaaacacag

SEQ ID NO: 5967021 - DNA, 25 bp, Homo sapien
ctagaagatccaatttctcgaatat

SEQ ID NO: 5967022 - DNA, 25 bp, Homo sapien
tttttcaaaaacttcacgtcaaaga

SEQ ID NO: 5967023 - DNA, 25 bp, Homo sapien
ggcgattcgacagtgccttgtaatt

SEQ ID NO: 5967024 - DNA, 25 bp, Homo sapien
catttgctgtggcaataaacacttt

SEQ ID NO: 5967025 - DNA, 25 bp, Homo sapien
ccaaatgtaagtggtccctttgacg

SEQ ID NO: 5967026 - DNA, 25 bp, Homo sapien
agtctgtcatttgaggcaccccatt

SEQ ID NO: 5967027 - DNA, 25 bp, Homo sapien
cacgtcaaagacaccaggttcagct

SEQ ID NO: 5967028 - DNA, 25 bp, Homo sapien
acgtggggctccaatttagtgttaa

SEQ ID NO: 5967029 - DNA, 25 bp, Homo sapien
taattctaacgtggggctccaattt

SEQ ID NO: 5967030 - DNA, 25 bp, Homo sapien
tcccaaaatctcaatttaccatccc

SEQ ID NO: 5967031 - DNA, 25 bp, Homo sapien
caaggcataattcaaatgcatctct

SEQ ID NO: 5967032 - DNA, 25 bp, Homo sapien
acagctaagatatcctcttcaattt

SEQ ID NO: 5967033 - DNA, 25 bp, Homo sapien
tgaattgcaagcagaaaccgagaaa

SEQ ID NO: 5967034 - DNA, 25 bp, Homo sapien
cgaatataacttttttagtctcatc

SEQ ID NO: 5967035 - DNA, 25 bp, Homo sapien
gtgaaacttccaaatgtaagtggtc

SEQ ID NO: 5967036 - DNA, 25 bp, Homo sapien
aggaatgctttttcatgtctgagtc

SEQ ID NO: 5967037 - DNA, 25 bp, Homo sapien
ccgtcacctgaacaacttaccgtaa

SEQ ID NO: 5967038 - DNA, 25 bp, Homo sapien
gacttatggacaaagtgagaatatg

SEQ ID NO: 5967039 - DNA, 25 bp, Homo sapien
catggtgcaatccggacttatggac

SEQ ID NO: 5967040 - DNA, 25 bp, Homo sapien
ttctgaaatttgtactgttccatta

SEQ ID NO: 5967041 - DNA, 25 bp, Homo sapien
tactgttccattattaaaacctgtg

SEQ ID NO: 5967042 - DNA, 25 bp, Homo sapien
cccagacttgcctgcgagctatggg

SEQ ID NO: 5967043 - DNA, 25 bp, Homo sapien
cagatctccaaccttttttcaaaaa

SEQ ID NO: 5967044 - DNA, 25 bp, Homo sapien
acttcacgtcaaagacaccaggttc

SEQ ID NO: 5967045 - DNA, 25 bp, Homo sapien
aatatcagcgtcatgagctttacct

SEQ ID NO: 5967046 - DNA, 25 bp, Homo sapien
ataattcaaatgcatctctctcaat

SEQ ID NO: 5967047 - DNA, 25 bp, Homo sapien
cagtgccttgtaattctaacgtggg

SEQ ID NO: 5967048 - DNA, 25 bp, Homo sapien
aaatgtaagtggtccctttgacgtc

SEQ ID NO: 5967049 - DNA, 25 bp, Homo sapien
gaatgctttttcatgtctgagtcta

SEQ ID NO: 5967050 - DNA, 25 bp, Homo sapien
aatttagtgttaaagaatttgactc

SEQ ID NO: 5967051 - DNA, 25 bp, Homo sapien
aaatctcaatttaccatcccatccg

SEQ ID NO: 5967052 - DNA, 25 bp, Homo sapien
aaatcgccagaaaatgaagtggtag

SEQ ID NO: 5967053 - DNA, 25 bp, Homo sapien
gcaatccggacttatggacaaagtg

SEQ ID NO: 5967054 - DNA, 25 bp, Homo sapien
gcataattcaaatgcatctctctca

SEQ ID NO: 5967055 - DNA, 25 bp, Homo sapien
tggtacggataaggagcctattctt

SEQ ID NO: 5967056 - DNA, 25 bp, Homo sapien
taaatgaattgcaagcagaaaccga

SEQ ID NO: 5967057 - DNA, 25 bp, Homo sapien
agaaaatgaagtggtagcaacaagg

SEQ ID NO: 5967058 - DNA, 25 bp, Homo sapien
gttcatcaacagctaagatatcctc

SEQ ID NO: 5967059 - DNA, 25 bp, Homo sapien
gcaagcagaaaccgagaaaatatca

SEQ ID NO: 5967060 - DNA, 25 bp, Homo sapien
ccgatctgatggaattcgaattatt

SEQ ID NO: 5967061 - DNA, 25 bp, Homo sapien
cagctaaagaatctccatgttcatc

SEQ ID NO: 5967062 - DNA, 25 bp, Homo sapien
ctccatgttcatcaacagctaagat

SEQ ID NO: 5967063 - DNA, 25 bp, Homo sapien
tctagtgatacgatagaagagtaaa

SEQ ID NO: 5967064 - DNA, 25 bp, Homo sapien
aatccggacttatggacaaagtgag

SEQ ID NO: 5967065 - DNA, 25 bp, Homo sapien
atatagagtgatgcaaccaaatgaa

SEQ ID NO: 5967066 - DNA, 25 bp, Homo sapien
tagactcatgacccagctagaatgt

SEQ ID NO: 5967067 - DNA, 25 bp, Homo sapien
atgctgagattcaaaattgtacaac

SEQ ID NO: 5967068 - DNA, 25 bp, Homo sapien
tctaacgtggggctccaatttagtg

SEQ ID NO: 5967069 - DNA, 25 bp, Homo sapien
gcaacaaggcataattcaaatgcat

SEQ ID NO: 5967070 - DNA, 25 bp, Homo sapien
ttgactcatctgcaaacgggtgaaa

SEQ ID NO: 5967071 - DNA, 25 bp, Homo sapien
cctcgttcagagatatccacagaag

SEQ ID NO: 5967072 - DNA, 25 bp, Homo sapien
aggcataattcaaatgcatctctct

SEQ ID NO: 5967073 - DNA, 25 bp, Homo sapien
cataggcgattcgacagtgccttgt

SEQ ID NO: 5967074 - DNA, 25 bp, Homo sapien
aagacatcgacatggtgcaatccgg

SEQ ID NO: 5967075 - DNA, 25 bp, Homo sapien
ccatccggcactgcataatgtttca

SEQ ID NO: 5967076 - DNA, 25 bp, Homo sapien
ttattaatcatagaatgctgagatt

SEQ ID NO: 5967077 - DNA, 25 bp, Homo sapien
atggaattcgaattattaatcatag

SEQ ID NO: 5967078 - DNA, 25 bp, Homo sapien
tcgacatggtgcaatccggacttat

SEQ ID NO: 5967079 - DNA, 25 bp, Homo sapien
atgtaagtggtccctttgacgtctg

SEQ ID NO: 5967080 - DNA, 25 bp, Homo sapien
ctgagtctagaagatccaatttctc

SEQ ID NO: 5967081 - DNA, 25 bp, Homo sapien
aacagcttattatcccacaccttta

SEQ ID NO: 5967082 - DNA, 25 bp, Homo sapien
ttagtctcatcttctctagtgatac

SEQ ID NO: 5967083 - DNA, 25 bp, Homo sapien
tttagtgttaaagaatttgactcat

SEQ ID NO: 5967084 - DNA, 25 bp, Homo sapien
taaacaaacacagcataaactttca

SEQ ID NO: 5967085 - DNA, 25 bp, Homo sapien
ggagcctattctttcaccaaattca

SEQ ID NO: 5967086 - DNA, 25 bp, Homo sapien
tgcctgcgagctatgggttggtacg

SEQ ID NO: 5967087 - DNA, 25 bp, Homo sapien
tcatttgaggcaccccattttaatg

SEQ ID NO: 5967088 - DNA, 25 bp, Homo sapien
aatgaattgcaagcagaaaccgaga

SEQ ID NO: 5967089 - DNA, 25 bp, Homo sapien
ggcaattagtcctcgttcagagata

SEQ ID NO: 5967090 - DNA, 25 bp, Homo sapien
agagtgatgcaaccaaatgaatttg

SEQ ID NO: 5967091 - DNA, 25 bp, Homo sapien
gctttacctgcatttgctgtggcaa

SEQ ID NO: 5967092 - DNA, 25 bp, Homo sapien
accgtaaatgaattgcaagcagaaa

SEQ ID NO: 5967093 - DNA, 25 bp, Homo sapien
cgtaaatgaattgcaagcagaaacc

SEQ ID NO: 5967094 - DNA, 25 bp, Homo sapien
gatccttgaggagaaaatttcaccg

SEQ ID NO: 5967095 - DNA, 25 bp, Homo sapien
ccagctagaatgtgcaaattcaccc

SEQ ID NO: 5967096 - DNA, 25 bp, Homo sapien
cctattctttcaccaaattcagttt

SEQ ID NO: 5967097 - DNA, 25 bp, Homo sapien
gggaaagtagtctgtcatttgaggc

SEQ ID NO: 5967098 - DNA, 25 bp, Homo sapien
aatgtgcaaattcacccagacttgc

SEQ ID NO: 5967099 - DNA, 25 bp, Homo sapien
cactgcataatgtttcaccagaatc

SEQ ID NO: 5967100 - DNA, 25 bp, Homo sapien
atttaccatcccatccggcactgca

SEQ ID NO: 5967101 - DNA, 25 bp, Homo sapien
gccttgtaattctaacgtggggctc

SEQ ID NO: 5967102 - DNA, 25 bp, Homo sapien
tttcaatatcatcacaatgcatatt

SEQ ID NO: 5967103 - DNA, 25 bp, Homo sapien
agcctattctttcaccaaattcagt

SEQ ID NO: 5967104 - DNA, 25 bp, Homo sapien
agattcaaaattgtacaacgggcgt

SEQ ID NO: 5967105 - DNA, 25 bp, Homo sapien
atcttctctagtgatacgatagaag

SEQ ID NO: 5967106 - DNA, 25 bp, Homo sapien
catctgcaaacgggtgaaacttcca

SEQ ID NO: 5967107 - DNA, 25 bp, Homo sapien
atccggcactgcataatgtttcacc

SEQ ID NO: 5967108 - DNA, 25 bp, Homo sapien
tatcagcgtcatgagctttacctgc

SEQ ID NO: 5967109 - DNA, 25 bp, Homo sapien
gattttcattatctaacagcttatt

SEQ ID NO: 5967110 - DNA, 25 bp, Homo sapien
ggataaggagcctattctttcacca

SEQ ID NO: 5967111 - DNA, 25 bp, Homo sapien
atgggaaagtagtctgtcatttgag

SEQ ID NO: 5967112 - DNA, 25 bp, Homo sapien
acctgtggcaattagtcctcgttca

SEQ ID NO: 5967113 - DNA, 25 bp, Homo sapien
acagaagtggcaaattgacttggag

SEQ ID NO: 5967114 - DNA, 25 bp, Homo sapien
aagatccaatttctcgaatataact

SEQ ID NO: 5967115 - DNA, 25 bp, Homo sapien
tgaagtggtagcaacaaggcataat

SEQ ID NO: 5967116 - DNA, 25 bp, Homo sapien
agatagttctgaaatttgtactgtt

SEQ ID NO: 5967117 - DNA, 25 bp, Homo sapien
ccaatttagtgttaaagaatttgac

SEQ ID NO: 5967118 - DNA, 25 bp, Homo sapien
tctctagtgatacgatagaagagta

SEQ ID NO: 5967119 - DNA, 25 bp, Homo sapien
atcattaaacgatagactcatgacc

SEQ ID NO: 5967120 - DNA, 25 bp, Homo sapien
ctaagatatcctcttcaatttcaat

SEQ ID NO: 5967121 - DNA, 25 bp, Homo sapien
tattatcccacacctttaagtaacc

SEQ ID NO: 5967122 - DNA, 25 bp, Homo sapien
gaatcattaaacgatagactcatga

SEQ ID NO: 5967123 - DNA, 25 bp, Homo sapien
cgccagcttctctaaaccacctgat

SEQ ID NO: 5967124 - DNA, 25 bp, Homo sapien
tagtgattctttcctttgtttttac

SEQ ID NO: 5967125 - DNA, 25 bp, Homo sapien
gcatattcaatgtagtgattctttc

SEQ ID NO: 5967126 - DNA, 25 bp, Homo sapien
tcgacagtgccttgtaattctaacg

SEQ ID NO: 5967127 - DNA, 25 bp, Homo sapien
atggctaataaggatccttgaggag

SEQ ID NO: 5967128 - DNA, 25 bp, Homo sapien
ttaccatcccatccggcactgcata

SEQ ID NO: 5967129 - DNA, 25 bp, Homo sapien
ctcatctgcaaacgggtgaaacttc

SEQ ID NO: 5967130 - DNA, 25 bp, Homo sapien
cgtcaaagacaccaggttcagctaa

SEQ ID NO: 5967131 - DNA, 25 bp, Homo sapien
agaagtggcaaattgacttggagtc

SEQ ID NO: 5967132 - DNA, 25 bp, Homo sapien
attcaatgtagtgattctttccttt

SEQ ID NO: 5967133 - DNA, 25 bp, Homo sapien
cttgaggagaaaatttcaccgatct

SEQ ID NO: 5967134 - DNA, 25 bp, Homo sapien
aacaaacacagcataaactttcatt

SEQ ID NO: 5967135 - DNA, 25 bp, Homo sapien
aatatcatcacaatgcatattcaat

SEQ ID NO: 5967136 - DNA, 25 bp, Homo sapien
ttgcaagacatcgacatggtgcaat

SEQ ID NO: 5967137 - DNA, 25 bp, Homo sapien
gaaatttgtactgttccattattaa

SEQ ID NO: 5967138 - DNA, 25 bp, Homo sapien
gcttgcaagacatcgacatggtgca

SEQ ID NO: 5967139 - DNA, 25 bp, Homo sapien
ttcaaatgcatctctctcaatagct

SEQ ID NO: 5967140 - DNA, 25 bp, Homo sapien
gttggtacggataaggagcctattc

SEQ ID NO: 5967141 - DNA, 25 bp, Homo sapien
aaacgatagactcatgacccagcta

SEQ ID NO: 5967142 - DNA, 25 bp, Homo sapien
ggcaaattgacttggagtcataggc

SEQ ID NO: 5967143 - DNA, 25 bp, Homo sapien
gtggcaaattgacttggagtcatag

SEQ ID NO: 5967144 - DNA, 25 bp, Homo sapien
tttcaaaaacttcacgtcaaagaca

SEQ ID NO: 5967145 - DNA, 25 bp, Homo sapien
agctatgggttggtacggataagga

SEQ ID NO: 5967146 - DNA, 25 bp, Homo sapien
acccagctagaatgtgcaaattcac

SEQ ID NO: 5967147 - DNA, 25 bp, Homo sapien
aagtggtagcaacaaggcataattc

SEQ ID NO: 5967148 - DNA, 25 bp, Homo sapien
gcttattatcccacacctttaagta

SEQ ID NO: 5967149 - DNA, 25 bp, Homo sapien
gtacggataaggagcctattctttc

SEQ ID NO: 5967150 - DNA, 25 bp, Homo sapien
cgccagaaaatgaagtggtagcaac

SEQ ID NO: 5967151 - DNA, 25 bp, Homo sapien
gctaaagaatctccatgttcatcaa

SEQ ID NO: 5967152 - DNA, 25 bp, Homo sapien
ccataccagatctccaacctttttt

SEQ ID NO: 5967153 - DNA, 25 bp, Homo sapien
ctatgggttggtacggataaggagc

SEQ ID NO: 5967154 - DNA, 25 bp, Homo sapien
ctaacagcttattatcccacacctt

SEQ ID NO: 5967155 - DNA, 25 bp, Homo sapien
ataatgtttcaccagaatcattaaa

SEQ ID NO: 5967156 - DNA, 25 bp, Homo sapien
tacatcccaaaatctcaatttacca

SEQ ID NO: 5967157 - DNA, 25 bp, Homo sapien
tcaaaattgtacaacgggcgtaatg

SEQ ID NO: 5967158 - DNA, 25 bp, Homo sapien
ttatttaccgccagcttctctaaac

SEQ ID NO: 5967159 - DNA, 25 bp, Homo sapien
gtagcaaccagcctatgggaaagta

SEQ ID NO: 5967160 - DNA, 25 bp, Homo sapien
tccttgaggagaaaatttcaccgat

SEQ ID NO: 5967161 - DNA, 25 bp, Homo sapien
tgcaaattcacccagacttgcctgc

SEQ ID NO: 5967162 - DNA, 25 bp, Homo sapien
tttgacgtctgtagcaaccagccta

SEQ ID NO: 5967163 - DNA, 25 bp, Homo sapien
ttgcaagcagaaaccgagaaaatat

SEQ ID NO: 5967164 - DNA, 25 bp, Homo sapien
caacttaccgtaaatgaattgcaag

SEQ ID NO: 5967165 - DNA, 25 bp, Homo sapien
gtagtctgtcatttgaggcacccca

SEQ ID NO: 5967166 - DNA, 25 bp, Homo sapien
cttgcctgcgagctatgggttggta

SEQ ID NO: 5967167 - DNA, 25 bp, Homo sapien
gttaaagaatttgactcatctgcaa

SEQ ID NO: 5967168 - DNA, 25 bp, Homo sapien
accagatctccaaccttttttcaaa

SEQ ID NO: 5967169 - DNA, 25 bp, Homo sapien
gacttgcctgcgagctatgggttgg

SEQ ID NO: 5967170 - DNA, 25 bp, Homo sapien
accatcccatccggcactgcataat

SEQ ID NO: 5967171 - DNA, 25 bp, Homo sapien
cttgtaattctaacgtggggctcca

SEQ ID NO: 5967172 - DNA, 25 bp, Homo sapien
ccacagaagtggcaaattgacttgg

SEQ ID NO: 5967173 - DNA, 25 bp, Homo sapien
ggttcagctaaagaatctccatgtt

SEQ ID NO: 5967174 - DNA, 25 bp, Homo sapien
tgcttctatctaaacaaacacagca

SEQ ID NO: 5967175 - DNA, 25 bp, Homo sapien
tgctgtggcaataaacactttggac

SEQ ID NO: 5967176 - DNA, 25 bp, Homo sapien
tcatatagagtgatgcaaccaaatg

SEQ ID NO: 5967177 - DNA, 25 bp, Homo sapien
aaactttcatttaaatcagctccca

SEQ ID NO: 5967178 - DNA, 25 bp, Homo sapien
accgagaaaatatcagcgtcatgag

SEQ ID NO: 5967179 - DNA, 25 bp, Homo sapien
tctgtcatttgaggcaccccatttt

SEQ ID NO: 5967180 - DNA, 25 bp, Homo sapien
aaaccgagaaaatatcagcgtcatg

SEQ ID NO: 5967181 - DNA, 25 bp, Homo sapien
aattgcaagcagaaaccgagaaaat

SEQ ID NO: 5967182 - DNA, 25 bp, Homo sapien
tgcgagctatgggttggtacggata

SEQ ID NO: 5967183 - DNA, 25 bp, Homo sapien
atatgacttatcttttggattttca

SEQ ID NO: 5967184 - DNA, 25 bp, Homo sapien
aaaatgaagtggtagcaacaaggca

SEQ ID NO: 5967185 - DNA, 25 bp, Homo sapien
ttaaatcagctcccataccagatct

SEQ ID NO: 5967186 - DNA, 25 bp, Homo sapien
gttccattattaaaacctgtggcaa

SEQ ID NO: 5967187 - DNA, 25 bp, Homo sapien
gaggcaccccattttaatgcccaaa

SEQ ID NO: 5967188 - DNA, 25 bp, Homo sapien
aacgggcgtaatgtagatagttctg

SEQ ID NO: 5967189 - DNA, 25 bp, Homo sapien
tttacatcccaaaatctcaatttac

SEQ ID NO: 5967190 - DNA, 25 bp, Homo sapien
ctgtggcaataaacactttggacat

SEQ ID NO: 5967191 - DNA, 25 bp, Homo sapien
cattttaatgcccaaaaggaatgct

SEQ ID NO: 5967192 - DNA, 25 bp, Homo sapien
ttaccgccagcttctctaaaccacc

SEQ ID NO: 5967193 - DNA, 25 bp, Homo sapien
ggctaataaggatccttgaggagaa

SEQ ID NO: 5967194 - DNA, 25 bp, Homo sapien
aatgcatctctctcaatagcttgca

SEQ ID NO: 5967195 - DNA, 25 bp, Homo sapien
tttcatatagagtgatgcaaccaaa

SEQ ID NO: 5967196 - DNA, 25 bp, Homo sapien
agagatatccacagaagtggcaaat

SEQ ID NO: 5967197 - DNA, 25 bp, Homo sapien
atagttctgaaatttgtactgttcc

SEQ ID NO: 5967198 - DNA, 25 bp, Homo sapien
gcaagacatcgacatggtgcaatcc

SEQ ID NO: 5967199 - DNA, 25 bp, Homo sapien
aaatgaatttgaatcgtgagcaatg

SEQ ID NO: 5967200 - DNA, 25 bp, Homo sapien
tgatgcaaccaaatgaatttgaatc

SEQ ID NO: 5967201 - DNA, 25 bp, Homo sapien
tctaaacaaacacagcataaacttt

SEQ ID NO: 5967202 - DNA, 25 bp, Homo sapien
gacttggagtcataggcgattcgac

SEQ ID NO: 5967203 - DNA, 25 bp, Homo sapien
tcaccagaatcattaaacgatagac

SEQ ID NO: 5967204 - DNA, 25 bp, Homo sapien
ttttttagtctcatcttctctagtg

SEQ ID NO: 5967205 - DNA, 25 bp, Homo sapien
ctgttccattattaaaacctgtggc

SEQ ID NO: 5967206 - DNA, 25 bp, Homo sapien
tatcccacacctttaagtaaccgtc

SEQ ID NO: 5967207 - DNA, 25 bp, Homo sapien
gatctgatggaattcgaattattaa

SEQ ID NO: 5967208 - DNA, 25 bp, Homo sapien
atcacaatgcatattcaatgtagtg

SEQ ID NO: 5967209 - DNA, 25 bp, Homo sapien
gggtgaaacttccaaatgtaagtgg

SEQ ID NO: 5967210 - DNA, 25 bp, Homo sapien
tgatggaattcgaattattaatcat

SEQ ID NO: 5967211 - DNA, 25 bp, Homo sapien
gactcatctgcaaacgggtgaaact

SEQ ID NO: 5967212 - DNA, 25 bp, Homo sapien
aagtggtccctttgacgtctgtagc

SEQ ID NO: 5967213 - DNA, 25 bp, Homo sapien
gagtaaatcgccagaaaatgaagtg

SEQ ID NO: 5967214 - DNA, 25 bp, Homo sapien
taaagaatttgactcatctgcaaac

SEQ ID NO: 5967215 - DNA, 25 bp, Homo sapien
cagcttattatcccacacctttaag

SEQ ID NO: 5967216 - DNA, 25 bp, Homo sapien
ttttcattatctaacagcttattat

SEQ ID NO: 5967217 - DNA, 25 bp, Homo sapien
ggtccctttgacgtctgtagcaacc

SEQ ID NO: 5967218 - DNA, 25 bp, Homo sapien
aggagaaaatttcaccgatctgatg

SEQ ID NO: 5967219 - DNA, 25 bp, Homo sapien
ctttcaccaaattcagtttcatata

SEQ ID NO: 5967220 - DNA, 25 bp, Homo sapien
gtcctcgttcagagatatccacaga

SEQ ID NO: 5967221 - DNA, 25 bp, Homo sapien
caaatgcatctctctcaatagcttg

SEQ ID NO: 5967222 - DNA, 25 bp, Homo sapien
aattcaaatgcatctctctcaatag

SEQ ID NO: 5967223 - DNA, 25 bp, Homo sapien
atcgtgagcaatggctaataaggat

SEQ ID NO: 5967224 - DNA, 25 bp, Homo sapien
cagacttgcctgcgagctatgggtt

SEQ ID NO: 5967225 - DNA, 25 bp, Homo sapien
ccacctgatgcttctatctaaacaa

SEQ ID NO: 5967226 - DNA, 25 bp, Homo sapien
atcgccagaaaatgaagtggtagca

SEQ ID NO: 5967227 - DNA, 25 bp, Homo sapien
taaaacctgtggcaattagtcctcg

SEQ ID NO: 5967228 - DNA, 25 bp, Homo sapien
tacgatagaagagtaaatcgccaga

SEQ ID NO: 5967229 - DNA, 25 bp, Homo sapien
tgcaaacgggtgaaacttccaaatg

SEQ ID NO: 5967230 - DNA, 25 bp, Homo sapien
gcaaccaaatgaatttgaatcgtga

SEQ ID NO: 5967231 - DNA, 25 bp, Homo sapien
cagaatcattaaacgatagactcat

SEQ ID NO: 5967232 - DNA, 25 bp, Homo sapien
ggcgtaatgtagatagttctgaaat

SEQ ID NO: 5967233 - DNA, 25 bp, Homo sapien
aacaaggcataattcaaatgcatct

SEQ ID NO: 5967234 - DNA, 25 bp, Homo sapien
agctaagatatcctcttcaatttca

SEQ ID NO: 5967235 - DNA, 25 bp, Homo sapien
atttcaccgatctgatggaattcga

SEQ ID NO: 5967236 - DNA, 25 bp, Homo sapien
tctgatggaattcgaattattaatc

SEQ ID NO: 5967237 - DNA, 25 bp, Homo sapien
tttttacatcccaaaatctcaattt

SEQ ID NO: 5967238 - DNA, 25 bp, Homo sapien
tatggacaaagtgagaatatgactt

SEQ ID NO: 5967239 - DNA, 25 bp, Homo sapien
attctaacgtggggctccaatttag

SEQ ID NO: 5967240 - DNA, 25 bp, Homo sapien
aattcgaattattaatcatagaatg

SEQ ID NO: 5967241 - DNA, 25 bp, Homo sapien
ggctccaatttagtgttaaagaatt

SEQ ID NO: 5967242 - DNA, 25 bp, Homo sapien
tcatcaacagctaagatatcctctt

SEQ ID NO: 5967243 - DNA, 25 bp, Homo sapien
ttgtacaacgggcgtaatgtagata

SEQ ID NO: 5967244 - DNA, 25 bp, Homo sapien
atgtctgagtctagaagatccaatt

SEQ ID NO: 5967245 - DNA, 25 bp, Homo sapien
tccggacttatggacaaagtgagaa

SEQ ID NO: 5967246 - DNA, 25 bp, Homo sapien
cgagctatgggttggtacggataag

SEQ ID NO: 5967247 - DNA, 25 bp, Homo sapien
gtcataggcgattcgacagtgcctt

SEQ ID NO: 5967248 - DNA, 25 bp, Homo sapien
ataaggagcctattctttcaccaaa

SEQ ID NO: 5967249 - DNA, 25 bp, Homo sapien
ccagcttctctaaaccacctgatgc

SEQ ID NO: 5967250 - DNA, 25 bp, Homo sapien
cattaaacgatagactcatgaccca

SEQ ID NO: 5967251 - DNA, 25 bp, Homo sapien
aacaacttaccgtaaatgaattgca

SEQ ID NO: 5967252 - DNA, 25 bp, Homo sapien
tgtaattctaacgtggggctccaat

SEQ ID NO: 5967253 - DNA, 25 bp, Homo sapien
agcaaccagcctatgggaaagtagt

SEQ ID NO: 5967254 - DNA, 25 bp, Homo sapien
tctaaaccacctgatgcttctatct

SEQ ID NO: 5967255 - DNA, 25 bp, Homo sapien
tgtgcaaattcacccagacttgcct

SEQ ID NO: 5967256 - DNA, 25 bp, Homo sapien
tcaatttcaatatcatcacaatgca

SEQ ID NO: 5967257 - DNA, 25 bp, Homo sapien
agaagagtaaatcgccagaaaatga

SEQ ID NO: 5967258 - DNA, 25 bp, Homo sapien
atgaatttgaatcgtgagcaatggc

SEQ ID NO: 5967259 - DNA, 25 bp, Homo sapien
ttcaccgatctgatggaattcgaat

SEQ ID NO: 5967260 - DNA, 25 bp, Homo sapien
ttaccgtaaatgaattgcaagcaga

SEQ ID NO: 5967261 - DNA, 25 bp, Homo sapien
aatgtagtgattctttcctttgttt

SEQ ID NO: 5967262 - DNA, 25 bp, Homo sapien
aattgacttggagtcataggcgatt

SEQ ID NO: 5967263 - DNA, 25 bp, Homo sapien
gatagactcatgacccagctagaat

SEQ ID NO: 5967264 - DNA, 25 bp, Homo sapien
tcatgagctttacctgcatttgctg

SEQ ID NO: 5967265 - DNA, 25 bp, Homo sapien
gtctgagtctagaagatccaatttc

SEQ ID NO: 5967266 - DNA, 25 bp, Homo sapien
cgtgagcaatggctaataaggatcc

SEQ ID NO: 5967267 - DNA, 25 bp, Homo sapien
ttaatgcccaaaaggaatgcttttt

SEQ ID NO: 5967268 - DNA, 25 bp, Homo sapien
taatcatagaatgctgagattcaaa

SEQ ID NO: 5967269 - DNA, 25 bp, Homo sapien
caccaaattcagtttcatatagagt

SEQ ID NO: 5967270 - DNA, 25 bp, Homo sapien
tgaacaacttaccgtaaatgaattg

SEQ ID NO: 5967271 - DNA, 25 bp, Homo sapien
cttctatctaaacaaacacagcata

SEQ ID NO: 5967272 - DNA, 25 bp, Homo sapien
catcccaaaatctcaatttaccatc

SEQ ID NO: 5967273 - DNA, 25 bp, Homo sapien
tagcttgcaagacatcgacatggtg

SEQ ID NO: 5967274 - DNA, 25 bp, Homo sapien
agcttctctaaaccacctgatgctt

SEQ ID NO: 5967275 - DNA, 25 bp, Homo sapien
tggtgcaatccggacttatggacaa

SEQ ID NO: 5967276 - DNA, 25 bp, Homo sapien
ctcgaatataacttttttagtctca

SEQ ID NO: 5967277 - DNA, 25 bp, Homo sapien
gtaaatcgccagaaaatgaagtggt

SEQ ID NO: 5967278 - DNA, 25 bp, Homo sapien
ccaaattcagtttcatatagagtga

SEQ ID NO: 5967279 - DNA, 25 bp, Homo sapien
agatatccacagaagtggcaaattg

SEQ ID NO: 5967280 - DNA, 25 bp, Homo sapien
ttgacttggagtcataggcgattcg

SEQ ID NO: 5967281 - DNA, 25 bp, Homo sapien
gtctagaagatccaatttctcgaat

SEQ ID NO: 5967282 - DNA, 25 bp, Homo sapien
atcagctcccataccagatctccaa

SEQ ID NO: 5967283 - DNA, 25 bp, Homo sapien
aagagtaaatcgccagaaaatgaag

SEQ ID NO: 5967284 - DNA, 25 bp, Homo sapien
taaaccacctgatgcttctatctaa

SEQ ID NO: 5967285 - DNA, 25 bp, Homo sapien
atgagctttacctgcatttgctgtg

SEQ ID NO: 5967286 - DNA, 25 bp, Homo sapien
aagtgagaatatgacttatcttttg

SEQ ID NO: 5967287 - DNA, 25 bp, Homo sapien
ctgtggcaattagtcctcgttcaga

SEQ ID NO: 5967288 - DNA, 25 bp, Homo sapien
tatctaaacaaacacagcataaact

SEQ ID NO: 5967289 - DNA, 25 bp, Homo sapien
tttcatgtctgagtctagaagatcc

SEQ ID NO: 5967290 - DNA, 25 bp, Homo sapien
tcccatccggcactgcataatgttt

SEQ ID NO: 5967291 - DNA, 25 bp, Homo sapien
tttaagtaaccgtcacctgaacaac

SEQ ID NO: 5967292 - DNA, 25 bp, Homo sapien
attaatcatagaatgctgagattca

SEQ ID NO: 5967293 - DNA, 25 bp, Homo sapien
aattattaatcatagaatgctgaga

SEQ ID NO: 5967294 - DNA, 25 bp, Homo sapien
tctatctaaacaaacacagcataaa

SEQ ID NO: 5967295 - DNA, 25 bp, Homo sapien
gtcacctgaacaacttaccgtaaat

SEQ ID NO: 5967296 - DNA, 25 bp, Homo sapien
tttcaccagaatcattaaacgatag

SEQ ID NO: 5967297 - DNA, 25 bp, Homo sapien
gtacaacgggcgtaatgtagatagt

SEQ ID NO: 5967298 - DNA, 25 bp, Homo sapien
caggttcagctaaagaatctccatg

SEQ ID NO: 5967299 - DNA, 25 bp, Homo sapien
acaccaggttcagctaaagaatctc

SEQ ID NO: 5967300 - DNA, 25 bp, Homo sapien
ttttaatgcccaaaaggaatgcttt

SEQ ID NO: 5967301 - DNA, 25 bp, Homo sapien
tagaatgctgagattcaaaattgta

SEQ ID NO: 5967302 - DNA, 25 bp, Homo sapien
caaacacagcataaactttcattta

SEQ ID NO: 5967303 - DNA, 25 bp, Homo sapien
tcgttcagagatatccacagaagtg

SEQ ID NO: 5967304 - DNA, 25 bp, Homo sapien
gaaagtagtctgtcatttgaggcac

SEQ ID NO: 5967305 - DNA, 25 bp, Homo sapien
caaattgacttggagtcataggcga

SEQ ID NO: 5967306 - DNA, 25 bp, Homo sapien
tctcatcttctctagtgatacgata

SEQ ID NO: 5967307 - DNA, 25 bp, Homo sapien
caatgcatattcaatgtagtgattc

SEQ ID NO: 5967308 - DNA, 25 bp, Homo sapien
caatttaccatcccatccggcactg

SEQ ID NO: 5967309 - DNA, 25 bp, Homo sapien
ctgcataatgtttcaccagaatcat

SEQ ID NO: 5967310 - DNA, 25 bp, Homo sapien
attagtcctcgttcagagatatcca

SEQ ID NO: 5967311 - DNA, 25 bp, Homo sapien
aaacctgtggcaattagtcctcgtt

SEQ ID NO: 5967312 - DNA, 25 bp, Homo sapien
gtgccttgtaattctaacgtggggc

SEQ ID NO: 5967313 - DNA, 25 bp, Homo sapien
acaacgggcgtaatgtagatagttc

SEQ ID NO: 5967314 - DNA, 25 bp, Homo sapien
tcaatatcatcacaatgcatattca

SEQ ID NO: 5967315 - DNA, 25 bp, Homo sapien
cttatggacaaagtgagaatatgac

SEQ ID NO: 5967316 - DNA, 25 bp, Homo sapien
tgtactgttccattattaaaacctg

SEQ ID NO: 5967317 - DNA, 25 bp, Homo sapien
cgattcgacagtgccttgtaattct

SEQ ID NO: 5967318 - DNA, 25 bp, Homo sapien
accagaatcattaaacgatagactc

SEQ ID NO: 5967319 - DNA, 25 bp, Homo sapien
atctccatgttcatcaacagctaag

SEQ ID NO: 5967320 - DNA, 25 bp, Homo sapien
gatacgatagaagagtaaatcgcca

SEQ ID NO: 5967321 - DNA, 25 bp, Homo sapien
aattcacccagacttgcctgcgagc

SEQ ID NO: 5967322 - DNA, 25 bp, Homo sapien
gtgttaaagaatttgactcatctgc

SEQ ID NO: 5967323 - DNA, 25 bp, Homo sapien
tagtgttaaagaatttgactcatct

SEQ ID NO: 5967324 - DNA, 25 bp, Homo sapien
tatcatcacaatgcatattcaatgt

SEQ ID NO: 5967325 - DNA, 25 bp, Homo sapien
cttcaatttcaatatcatcacaatg

SEQ ID NO: 5967326 - DNA, 25 bp, Homo sapien
agttctgaaatttgtactgttccat

SEQ ID NO: 5967327 - DNA, 25 bp, Homo sapien
tcccataccagatctccaacctttt

SEQ ID NO: 5967328 - DNA, 25 bp, Homo sapien
cattattaaaacctgtggcaattag

SEQ ID NO: 5967329 - DNA, 25 bp, Homo sapien
tgtttttacatcccaaaatctcaat

SEQ ID NO: 5967330 - DNA, 25 bp, Homo sapien
gggttggtacggataaggagcctat

SEQ ID NO: 5967331 - DNA, 25 bp, Homo sapien
agcgtcatgagctttacctgcattt

SEQ ID NO: 5967332 - DNA, 25 bp, Homo sapien
gcagaaaccgagaaaatatcagcgt

SEQ ID NO: 5967333 - DNA, 25 bp, Homo sapien
accgccagcttctctaaaccacctg

SEQ ID NO: 5967334 - DNA, 25 bp, Homo sapien
ataccagatctccaaccttttttca

SEQ ID NO: 5967335 - DNA, 25 bp, Homo sapien
cgagaaaatatcagcgtcatgagct

SEQ ID NO: 5967336 - DNA, 25 bp, Homo sapien
tagtgatacgatagaagagtaaatc

SEQ ID NO: 5967337 - DNA, 25 bp, Homo sapien
atgtagatagttctgaaatttgtac

SEQ ID NO: 5967338 - DNA, 25 bp, Homo sapien
atttgaggcaccccattttaatgcc

SEQ ID NO: 5967339 - DNA, 25 bp, Homo sapien
tcagcgtcatgagctttacctgcat

SEQ ID NO: 5967340 - DNA, 25 bp, Homo sapien
ataaactttcatttaaatcagctcc

SEQ ID NO: 5967341 - DNA, 25 bp, Homo sapien
gcataaactttcatttaaatcagct

SEQ ID NO: 5967342 - DNA, 25 bp, Homo sapien
ccggcactgcataatgtttcaccag

SEQ ID NO: 5967343 - DNA, 25 bp, Homo sapien
tgagattcaaaattgtacaacgggc

SEQ ID NO: 5967344 - DNA, 25 bp, Homo sapien
cccaaaaggaatgctttttcatgtc

SEQ ID NO: 5967345 - DNA, 25 bp, Homo sapien
agctagaatgtgcaaattcacccag

SEQ ID NO: 5967346 - DNA, 25 bp, Homo sapien
catcccatccggcactgcataatgt

SEQ ID NO: 5967347 - DNA, 25 bp, Homo sapien
ggaattcgaattattaatcatagaa

SEQ ID NO: 5967348 - DNA, 25 bp, Homo sapien
acgtctgtagcaaccagcctatggg

SEQ ID NO: 5967349 - DNA, 25 bp, Homo sapien
aaccacctgatgcttctatctaaac

SEQ ID NO: 5967350 - DNA, 25 bp, Homo sapien
gtggggctccaatttagtgttaaag

SEQ ID NO: 5967351 - DNA, 25 bp, Homo sapien
aagcagaaaccgagaaaatatcagc

SEQ ID NO: 5967352 - DNA, 25 bp, Homo sapien
atttaccgccagcttctctaaacca

SEQ ID NO: 5967353 - DNA, 25 bp, Homo sapien
acttaccgtaaatgaattgcaagca

SEQ ID NO: 5967354 - DNA, 25 bp, Homo sapien
gctcccataccagatctccaacctt

SEQ ID NO: 5967355 - DNA, 25 bp, Homo sapien
aaattcagtttcatatagagtgatg

SEQ ID NO: 5967356 - DNA, 25 bp, Homo sapien
taaagaatctccatgttcatcaaca

SEQ ID NO: 5967357 - DNA, 25 bp, Homo sapien
acggataaggagcctattctttcac

SEQ ID NO: 5967358 - DNA, 25 bp, Homo sapien
ttcgaattattaatcatagaatgct

SEQ ID NO: 5967359 - DNA, 25 bp, Homo sapien
ggtagcaacaaggcataattcaaat

SEQ ID NO: 5967360 - DNA, 25 bp, Homo sapien
tcaatgtagtgattctttcctttgt

SEQ ID NO: 5967361 - DNA, 25 bp, Homo sapien
taaggatccttgaggagaaaatttc

SEQ ID NO: 5967362 - DNA, 25 bp, Homo sapien
tgtcatttgaggcaccccattttaa

SEQ ID NO: 5967363 - DNA, 25 bp, Homo sapien
atttgactcatctgcaaacgggtga

SEQ ID NO: 5967364 - DNA, 25 bp, Homo sapien
atagaagagtaaatcgccagaaaat

SEQ ID NO: 5967365 - DNA, 25 bp, Homo sapien
ttcattatctaacagcttattatcc

SEQ ID NO: 5967366 - DNA, 25 bp, Homo sapien
tctctcaatagcttgcaagacatcg

SEQ ID NO: 5967367 - DNA, 25 bp, Homo sapien
tttacctgcatttgctgtggcaata

SEQ ID NO: 5967368 - DNA, 25 bp, Homo sapien
gtaagtggtccctttgacgtctgta

SEQ ID NO: 5967369 - DNA, 25 bp, Homo sapien
aatagcttgcaagacatcgacatgg

SEQ ID NO: 5967370 - DNA, 25 bp, Homo sapien
tgcccaaaaggaatgctttttcatg

SEQ ID NO: 5967371 - DNA, 25 bp, Homo sapien
taatgtagatagttctgaaatttgt

SEQ ID NO: 5967372 - DNA, 25 bp, Homo sapien
aatgtttcaccagaatcattaaacg

SEQ ID NO: 5967373 - DNA, 25 bp, Homo sapien
caaacgggtgaaacttccaaatgta

SEQ ID NO: 5967374 - DNA, 25 bp, Homo sapien
atcatagaatgctgagattcaaaat

SEQ ID NO: 5967375 - DNA, 25 bp, Homo sapien
gaaacttccaaatgtaagtggtccc

SEQ ID NO: 5967376 - DNA, 25 bp, Homo sapien
ttgaatcgtgagcaatggctaataa

SEQ ID NO: 5967377 - DNA, 25 bp, Homo sapien
gacatggtgcaatccggacttatgg

SEQ ID NO: 5967378 - DNA, 25 bp, Homo sapien
cagcctatgggaaagtagtctgtca

SEQ ID NO: 5967379 - DNA, 25 bp, Homo sapien
acgatagactcatgacccagctaga

SEQ ID NO: 5967380 - DNA, 25 bp, Homo sapien
tcatgtctgagtctagaagatccaa

SEQ ID NO: 5967381 - DNA, 25 bp, Homo sapien
gagaaaatttcaccgatctgatgga

SEQ ID NO: 5967382 - DNA, 25 bp, Homo sapien
tctgcaaacgggtgaaacttccaaa

SEQ ID NO: 5967383 - DNA, 25 bp, Homo sapien
tttttcatgtctgagtctagaagat

SEQ ID NO: 5967384 - DNA, 25 bp, Homo sapien
aagaatctccatgttcatcaacagc

SEQ ID NO: 5967385 - DNA, 25 bp, Homo sapien
tttgctgtggcaataaacactttgg

SEQ ID NO: 5967386 - DNA, 25 bp, Homo sapien
cccattttaatgcccaaaaggaatg

SEQ ID NO: 5967387 - DNA, 25 bp, Homo sapien
tggattttcattatctaacagctta

SEQ ID NO: 5967388 - DNA, 25 bp, Homo sapien
cttctctaaaccacctgatgcttct

SEQ ID NO: 5967389 - DNA, 25 bp, Homo sapien
agtctcatcttctctagtgatacga

SEQ ID NO: 5967390 - DNA, 25 bp, Homo sapien
aaacttcacgtcaaagacaccaggt

SEQ ID NO: 5967391 - DNA, 25 bp, Homo sapien
tgcatctctctcaatagcttgcaag

SEQ ID NO: 5967392 - DNA, 25 bp, Homo sapien
atctcaatttaccatcccatccggc

SEQ ID NO: 5967393 - DNA, 25 bp, Homo sapien
aataaggatccttgaggagaaaatt

SEQ ID NO: 5967394 - DNA, 25 bp, Homo sapien
caaagtgagaatatgacttatcttt

SEQ ID NO: 5967395 - DNA, 25 bp, Homo sapien
tcaaaaacttcacgtcaaagacacc

SEQ ID NO: 5967396 - DNA, 25 bp, Homo sapien
caaattcacccagacttgcctgcga

SEQ ID NO: 5967397 - DNA, 25 bp, Homo sapien
tcagtttcatatagagtgatgcaac

SEQ ID NO: 5967398 - DNA, 25 bp, Homo sapien
cctttgacgtctgtagcaaccagcc

SEQ ID NO: 5967399 - DNA, 25 bp, Homo sapien
tcagagatatccacagaagtggcaa

SEQ ID NO: 5967400 - DNA, 25 bp, Homo sapien
catagaatgctgagattcaaaattg

SEQ ID NO: 5967401 - DNA, 25 bp, Homo sapien
tgagcaatggctaataaggatcctt

SEQ ID NO: 5967402 - DNA, 25 bp, Homo sapien
ctaataaggatccttgaggagaaaa

SEQ ID NO: 5967403 - DNA, 25 bp, Homo sapien
gacatcgacatggtgcaatccggac

SEQ ID NO: 5967404 - DNA, 25 bp, Homo sapien
gagtcataggcgattcgacagtgcc

SEQ ID NO: 5967405 - DNA, 25 bp, Homo sapien
tcaatagcttgcaagacatcgacat

SEQ ID NO: 5967406 - DNA, 25 bp, Homo sapien
actttcatttaaatcagctcccata

SEQ ID NO: 5967407 - DNA, 25 bp, Homo sapien
aaccaaatgaatttgaatcgtgagc

SEQ ID NO: 5967408 - DNA, 25 bp, Homo sapien
tttgtactgttccattattaaaacc

SEQ ID NO: 5967409 - DNA, 25 bp, Homo sapien
gtgcaatccggacttatggacaaag

SEQ ID NO: 5967410 - DNA, 25 bp, Homo sapien
catgacccagctagaatgtgcaaat

SEQ ID NO: 5967411 - DNA, 25 bp, Homo sapien
agtttcatatagagtgatgcaacca

SEQ ID NO: 5967412 - DNA, 25 bp, Homo sapien
gagtctagaagatccaatttctcga

SEQ ID NO: 5967413 - DNA, 25 bp, Homo sapien
cgtaatgtagatagttctgaaattt

SEQ ID NO: 5967414 - DNA, 25 bp, Homo sapien
tttgtttttacatcccaaaatctca

SEQ ID NO: 5967415 - DNA, 25 bp, Homo sapien
cacagcataaactttcatttaaatc

SEQ ID NO: 5967416 - DNA, 25 bp, Homo sapien
agcaatggctaataaggatccttga

SEQ ID NO: 5967417 - DNA, 25 bp, Homo sapien
aaaattgtacaacgggcgtaatgta

SEQ ID NO: 5967418 - DNA, 25 bp, Homo sapien
gtgatacgatagaagagtaaatcgc

SEQ ID NO: 5967419 - DNA, 25 bp, Homo sapien
ctgatgcttctatctaaacaaacac

SEQ ID NO: 5967420 - DNA, 25 bp, Homo sapien
cacctttaagtaaccgtcacctgaa

SEQ ID NO: 5967421 - DNA, 25 bp, Homo sapien
caacagctaagatatcctcttcaat

SEQ ID NO: 5967422 - DNA, 25 bp, Homo sapien
aagtagtctgtcatttgaggcaccc

SEQ ID NO: 5967423 - DNA, 25 bp, Homo sapien
agaagatccaatttctcgaatataa

SEQ ID NO: 5967424 - DNA, 25 bp, Homo sapien
tctcaatagcttgcaagacatcgac

SEQ ID NO: 5967425 - DNA, 25 bp, Homo sapien
ttcacgtcaaagacaccaggttcag

SEQ ID NO: 5967426 - DNA, 25 bp, Homo sapien
accaggttcagctaaagaatctcca

SEQ ID NO: 5967427 - DNA, 25 bp, Homo sapien
gctgagattcaaaattgtacaacgg

SEQ ID NO: 5967428 - DNA, 25 bp, Homo sapien
tcatcacaatgcatattcaatgtag

SEQ ID NO: 5967429 - DNA, 25 bp, Homo sapien
tgtagtgattctttcctttgttttt

SEQ ID NO: 5967430 - DNA, 25 bp, Homo sapien
cacacctttaagtaaccgtcacctg

SEQ ID NO: 5967431 - DNA, 25 bp, Homo sapien
cggacttatggacaaagtgagaata

SEQ ID NO: 5967432 - DNA, 25 bp, Homo sapien
tctctaaaccacctgatgcttctat

SEQ ID NO: 5967433 - DNA, 25 bp, Homo sapien
cattatctaacagcttattatccca

SEQ ID NO: 5967434 - DNA, 25 bp, Homo sapien
gtagatagttctgaaatttgtactg

SEQ ID NO: 5967435 - DNA, 25 bp, Homo sapien
tggacaaagtgagaatatgacttat

SEQ ID NO: 5967436 - DNA, 25 bp, Homo sapien
aaagacaccaggttcagctaaagaa

SEQ ID NO: 5967437 - DNA, 25 bp, Homo sapien
tctctctcaatagcttgcaagacat

SEQ ID NO: 5967438 - DNA, 25 bp, Homo sapien
tgtttcaccagaatcattaaacgat

SEQ ID NO: 5967439 - DNA, 25 bp, Homo sapien
atagagtgatgcaaccaaatgaatt

SEQ ID NO: 5967440 - DNA, 25 bp, Homo sapien
atgttcatcaacagctaagatatcc

SEQ ID NO: 5967441 - DNA, 25 bp, Homo sapien
ctcaatttaccatcccatccggcac

SEQ ID NO: 5967442 - DNA, 25 bp, Homo sapien
aagaatttgactcatctgcaaacgg

SEQ ID NO: 5967443 - DNA, 25 bp, Homo sapien
cttttggattttcattatctaacag

SEQ ID NO: 5967444 - DNA, 25 bp, Homo sapien
taggcgattcgacagtgccttgtaa

SEQ ID NO: 5967445 - DNA, 25 bp, Homo sapien
gactcatgacccagctagaatgtgc

SEQ ID NO: 5967446 - DNA, 25 bp, Homo sapien
gagaatatgacttatcttttggatt

SEQ ID NO: 5967447 - DNA, 25 bp, Homo sapien
caatggctaataaggatccttgagg

SEQ ID NO: 5967448 - DNA, 25 bp, Homo sapien
tagtcctcgttcagagatatccaca

SEQ ID NO: 5967449 - DNA, 25 bp, Homo sapien
cctgcatttgctgtggcaataaaca

SEQ ID NO: 5967450 - DNA, 25 bp, Homo sapien
atctaacagcttattatcccacacc

SEQ ID NO: 5967451 - DNA, 25 bp, Homo sapien
gaatctccatgttcatcaacagcta

SEQ ID NO: 5967452 - DNA, 25 bp, Homo sapien
tccattattaaaacctgtggcaatt

SEQ ID NO: 5967453 - DNA, 25 bp, Homo sapien
tttggattttcattatctaacagct

SEQ ID NO: 5967454 - DNA, 25 bp, Homo sapien
gctttttcatgtctgagtctagaag

SEQ ID NO: 5967455 - DNA, 25 bp, Homo sapien
ttcaccaaattcagtttcatataga

SEQ ID NO: 5967456 - DNA, 25 bp, Homo sapien
ggggctccaatttagtgttaaagaa

SEQ ID NO: 5967457 - DNA, 25 bp, Homo sapien
tcccacacctttaagtaaccgtcac

SEQ ID NO: 5967458 - DNA, 25 bp, Homo sapien
atccacagaagtggcaaattgactt

SEQ ID NO: 5967459 - DNA, 25 bp, Homo sapien
ttccaaatgtaagtggtccctttga

SEQ ID NO: 5967460 - DNA, 25 bp, Homo sapien
accagcctatgggaaagtagtctgt

SEQ ID NO: 5967461 - DNA, 25 bp, Homo sapien
atgggttggtacggataaggagcct

SEQ ID NO: 5967462 - DNA, 25 bp, Homo sapien
aaaatatcagcgtcatgagctttac

SEQ ID NO: 5967463 - DNA, 25 bp, Homo sapien
aacacagcataaactttcatttaaa

SEQ ID NO: 5967464 - DNA, 25 bp, Homo sapien
aaatcagctcccataccagatctcc

SEQ ID NO: 5967465 - DNA, 25 bp, Homo sapien
cgggcgtaatgtagatagttctgaa

SEQ ID NO: 5967466 - DNA, 25 bp, Homo sapien
caattagtcctcgttcagagatatc

SEQ ID NO: 5967467 - DNA, 25 bp, Homo sapien
agacaccaggttcagctaaagaatc

SEQ ID NO: 5967468 - DNA, 25 bp, Homo sapien
ttctcgaatataacttttttagtct

SEQ ID NO: 5967469 - DNA, 25 bp, Homo sapien
taagtaaccgtcacctgaacaactt

SEQ ID NO: 5967470 - DNA, 25 bp, Homo sapien
cagcataaactttcatttaaatcag

SEQ ID NO: 5967471 - DNA, 25 bp, Homo sapien
cgtcatgagctttacctgcatttgc

SEQ ID NO: 5967472 - DNA, 25 bp, Homo sapien
ctcatgacccagctagaatgtgcaa

SEQ ID NO: 5967473 - DNA, 25 bp, Homo sapien
gaatatgacttatcttttggatttt

SEQ ID NO: 5967474 - DNA, 25 bp, Homo sapien
atgctttttcatgtctgagtctaga

SEQ ID NO: 5967475 - DNA, 25 bp, Homo sapien
tattctttcaccaaattcagtttca

SEQ ID NO: 5967476 - DNA, 25 bp, Homo sapien
tgatggaaaccgatttacaaaaagt

SEQ ID NO: 5967477 - DNA, 25 bp, Homo sapien
agcagtagcgattcaagagaaacat

SEQ ID NO: 5967478 - DNA, 25 bp, Homo sapien
aacttttcaagagtacacaactgcg

SEQ ID NO: 5967479 - DNA, 25 bp, Homo sapien
ttgttacaagaactatacgtgagat

SEQ ID NO: 5967480 - DNA, 25 bp, Homo sapien
tcaagagtacacaactgcgatggat

SEQ ID NO: 5967481 - DNA, 25 bp, Homo sapien
taaagtctattcacagtgcacaagt

SEQ ID NO: 5967482 - DNA, 25 bp, Homo sapien
attggataaagtaaggccagtatcc

SEQ ID NO: 5967483 - DNA, 25 bp, Homo sapien
cccaggcagagactatcatcatcaa

SEQ ID NO: 5967484 - DNA, 25 bp, Homo sapien
aagcgcagcagaagctttaagacac

SEQ ID NO: 5967485 - DNA, 25 bp, Homo sapien
aagagggctaaagagtatatagcaa

SEQ ID NO: 5967486 - DNA, 25 bp, Homo sapien
tcacagtgcacaagttatccataga

SEQ ID NO: 5967487 - DNA, 25 bp, Homo sapien
cagtagcgattcaagagaaacattg

SEQ ID NO: 5967488 - DNA, 25 bp, Homo sapien
ttttacggtatttccatgaacacga

SEQ ID NO: 5967489 - DNA, 25 bp, Homo sapien
atagcaaacttacctatgaggccac

SEQ ID NO: 5967490 - DNA, 25 bp, Homo sapien
aggtgagggagcgtacggaacagta

SEQ ID NO: 5967491 - DNA, 25 bp, Homo sapien
caagaactatacgtgagatcaagct

SEQ ID NO: 5967492 - DNA, 25 bp, Homo sapien
tctgcgattttggactagcgaggtg

SEQ ID NO: 5967493 - DNA, 25 bp, Homo sapien
atagcgggttttccactttaagtga

SEQ ID NO: 5967494 - DNA, 25 bp, Homo sapien
gctaattctagaagtcttgggaact

SEQ ID NO: 5967495 - DNA, 25 bp, Homo sapien
agcgattcaagagaaacattggtag

SEQ ID NO: 5967496 - DNA, 25 bp, Homo sapien
cttacctatgaggccacccttgcca

SEQ ID NO: 5967497 - DNA, 25 bp, Homo sapien
atccaagagggctaaagagtatata

SEQ ID NO: 5967498 - DNA, 25 bp, Homo sapien
atgttcagcaattcataagccttcc

SEQ ID NO: 5967499 - DNA, 25 bp, Homo sapien
ccatcaaacctgttactaaattcca

SEQ ID NO: 5967500 - DNA, 25 bp, Homo sapien
tggtctccgggaagcctttgttccc

SEQ ID NO: 5967501 - DNA, 25 bp, Homo sapien
atatagcaaacttacctatgaggcc

SEQ ID NO: 5967502 - DNA, 25 bp, Homo sapien
agcagaagctttaagacacccttac

SEQ ID NO: 5967503 - DNA, 25 bp, Homo sapien
aacttttgatatcccttcccaatat

SEQ ID NO: 5967504 - DNA, 25 bp, Homo sapien
cagagactatcatcatcaattatgg

SEQ ID NO: 5967505 - DNA, 25 bp, Homo sapien
caacgcgatggtacagggcacccga

SEQ ID NO: 5967506 - DNA, 25 bp, Homo sapien
atacgtgagatcaagcttttacggt

SEQ ID NO: 5967507 - DNA, 25 bp, Homo sapien
gagtatatagcaaacttacctatga

SEQ ID NO: 5967508 - DNA, 25 bp, Homo sapien
ggccagtatccatagacaaactaaa

SEQ ID NO: 5967509 - DNA, 25 bp, Homo sapien
gagccggaatatcctccacttaatt

SEQ ID NO: 5967510 - DNA, 25 bp, Homo sapien
aagacacccttacctggcaatgtac

SEQ ID NO: 5967511 - DNA, 25 bp, Homo sapien
gttcaatactttacataccaaatcc

SEQ ID NO: 5967512 - DNA, 25 bp, Homo sapien
tgttcccaggcagagactatcatca

SEQ ID NO: 5967513 - DNA, 25 bp, Homo sapien
atttggatgatgaattttggaaact

SEQ ID NO: 5967514 - DNA, 25 bp, Homo sapien
ggcagagactatcatcatcaattat

SEQ ID NO: 5967515 - DNA, 25 bp, Homo sapien
acagggcacccgagataatgctaac

SEQ ID NO: 5967516 - DNA, 25 bp, Homo sapien
tgcggatgcattttggctgaaatgg

SEQ ID NO: 5967517 - DNA, 25 bp, Homo sapien
cacttaatttggatgatgaattttg

SEQ ID NO: 5967518 - DNA, 25 bp, Homo sapien
cgattttggactagcgaggtgttta

SEQ ID NO: 5967519 - DNA, 25 bp, Homo sapien
attcacagtgcacaagttatccata

SEQ ID NO: 5967520 - DNA, 25 bp, Homo sapien
caatcctgacaaaagaataagcgca

SEQ ID NO: 5967521 - DNA, 25 bp, Homo sapien
tcaaagtctgcgattttggactagc

SEQ ID NO: 5967522 - DNA, 25 bp, Homo sapien
acgcgatggtacagggcacccgaga

SEQ ID NO: 5967523 - DNA, 25 bp, Homo sapien
ttacataccaaatcctcagagcctt

SEQ ID NO: 5967524 - DNA, 25 bp, Homo sapien
atgttcaatactttacataccaaat

SEQ ID NO: 5967525 - DNA, 25 bp, Homo sapien
gtatatagcaaacttacctatgagg

SEQ ID NO: 5967526 - DNA, 25 bp, Homo sapien
aacattggtaggattcatgacggag

SEQ ID NO: 5967527 - DNA, 25 bp, Homo sapien
gacaaactaaacgctgtttatttag

SEQ ID NO: 5967528 - DNA, 25 bp, Homo sapien
aagataatgcgtccggaagaggagg

SEQ ID NO: 5967529 - DNA, 25 bp, Homo sapien
ccatgggagaccgtctggtcaaaga

SEQ ID NO: 5967530 - DNA, 25 bp, Homo sapien
actaaattccaattgtgatctcaaa

SEQ ID NO: 5967531 - DNA, 25 bp, Homo sapien
aagcttttacggtatttccatgaac

SEQ ID NO: 5967532 - DNA, 25 bp, Homo sapien
tggcaatgtaccatgacccaagtga

SEQ ID NO: 5967533 - DNA, 25 bp, Homo sapien
catagacaaactaaacgctgtttat

SEQ ID NO: 5967534 - DNA, 25 bp, Homo sapien
gcccatagaaatgctcaaagacatg

SEQ ID NO: 5967535 - DNA, 25 bp, Homo sapien
gctgtttatttagtcgaagagttga

SEQ ID NO: 5967536 - DNA, 25 bp, Homo sapien
cttaaagtctattcacagtgcacaa

SEQ ID NO: 5967537 - DNA, 25 bp, Homo sapien
ctagacaaaatgcttcaattcaatc

SEQ ID NO: 5967538 - DNA, 25 bp, Homo sapien
tatttccatgaacacgaaaacataa

SEQ ID NO: 5967539 - DNA, 25 bp, Homo sapien
ctcagagccttaaagtctattcaca

SEQ ID NO: 5967540 - DNA, 25 bp, Homo sapien
aaaggtagctatcaagaaaatacaa

SEQ ID NO: 5967541 - DNA, 25 bp, Homo sapien
atcaattatggctaattctagaagt

SEQ ID NO: 5967542 - DNA, 25 bp, Homo sapien
aaagccatcaaacctgttactaaat

SEQ ID NO: 5967543 - DNA, 25 bp, Homo sapien
gttacaagaactatacgtgagatca

SEQ ID NO: 5967544 - DNA, 25 bp, Homo sapien
gatctcaaagtctgcgattttggac

SEQ ID NO: 5967545 - DNA, 25 bp, Homo sapien
agaagtgcccatagaaatgctcaaa

SEQ ID NO: 5967546 - DNA, 25 bp, Homo sapien
cagtatgttcagcaattcataagcc

SEQ ID NO: 5967547 - DNA, 25 bp, Homo sapien
agcaattcataagccttccggcata

SEQ ID NO: 5967548 - DNA, 25 bp, Homo sapien
ataagccttccggcataaaggtagc

SEQ ID NO: 5967549 - DNA, 25 bp, Homo sapien
atgctcaaagacatgctttacgatg

SEQ ID NO: 5967550 - DNA, 25 bp, Homo sapien
ccgggaagcctttgttcccaggcag

SEQ ID NO: 5967551 - DNA, 25 bp, Homo sapien
aaacgctgtttatttagtcgaagag

SEQ ID NO: 5967552 - DNA, 25 bp, Homo sapien
tggataacaagataatgcgtccgga

SEQ ID NO: 5967553 - DNA, 25 bp, Homo sapien
gtccggaagaggaggaagaagtgcc

SEQ ID NO: 5967554 - DNA, 25 bp, Homo sapien
atgaactaatgaagaccatggaata

SEQ ID NO: 5967555 - DNA, 25 bp, Homo sapien
tatggctaattctagaagtcttggg

SEQ ID NO: 5967556 - DNA, 25 bp, Homo sapien
acaactgcgatggatatatggtcat

SEQ ID NO: 5967557 - DNA, 25 bp, Homo sapien
aattgtttgttacaagaactatacg

SEQ ID NO: 5967558 - DNA, 25 bp, Homo sapien
ggtcaaagaccgatctgaatccaga

SEQ ID NO: 5967559 - DNA, 25 bp, Homo sapien
acaagataatgcgtccggaagagga

SEQ ID NO: 5967560 - DNA, 25 bp, Homo sapien
atccatagagacataaagccatcaa

SEQ ID NO: 5967561 - DNA, 25 bp, Homo sapien
gcagcagaagctttaagacaccctt

SEQ ID NO: 5967562 - DNA, 25 bp, Homo sapien
catgcggatgcattttggctgaaat

SEQ ID NO: 5967563 - DNA, 25 bp, Homo sapien
tggatatatggtcatgcggatgcat

SEQ ID NO: 5967564 - DNA, 25 bp, Homo sapien
caagttatccatagagacataaagc

SEQ ID NO: 5967565 - DNA, 25 bp, Homo sapien
acataaagccatcaaacctgttact

SEQ ID NO: 5967566 - DNA, 25 bp, Homo sapien
atgagccggaatatcctccacttaa

SEQ ID NO: 5967567 - DNA, 25 bp, Homo sapien
gatagatttactagacaaaatgctt

SEQ ID NO: 5967568 - DNA, 25 bp, Homo sapien
agctttaagacacccttacctggca

SEQ ID NO: 5967569 - DNA, 25 bp, Homo sapien
agagacataaagccatcaaacctgt

SEQ ID NO: 5967570 - DNA, 25 bp, Homo sapien
gccttccggcataaaggtagctatc

SEQ ID NO: 5967571 - DNA, 25 bp, Homo sapien
tccacttaatttggatgatgaattt

SEQ ID NO: 5967572 - DNA, 25 bp, Homo sapien
cgatgaactaatgaagaccatggaa

SEQ ID NO: 5967573 - DNA, 25 bp, Homo sapien
tggataaagtaaggccagtatccat

SEQ ID NO: 5967574 - DNA, 25 bp, Homo sapien
tcaagagaaacattggtaggattca

SEQ ID NO: 5967575 - DNA, 25 bp, Homo sapien
tgatatcccttcccaatataaactc

SEQ ID NO: 5967576 - DNA, 25 bp, Homo sapien
gtgcccatagaaatgctcaaagaca

SEQ ID NO: 5967577 - DNA, 25 bp, Homo sapien
gtgagatcaagcttttacggtattt

SEQ ID NO: 5967578 - DNA, 25 bp, Homo sapien
agcaaacttacctatgaggccaccc

SEQ ID NO: 5967579 - DNA, 25 bp, Homo sapien
gacggagtacgtcgcaacgcgatgg

SEQ ID NO: 5967580 - DNA, 25 bp, Homo sapien
ccgtctggtcaaagaccgatctgaa

SEQ ID NO: 5967581 - DNA, 25 bp, Homo sapien
tttgttcccaggcagagactatcat

SEQ ID NO: 5967582 - DNA, 25 bp, Homo sapien
gtcgcaacgcgatggtacagggcac

SEQ ID NO: 5967583 - DNA, 25 bp, Homo sapien
cgggttttccactttaagtgatgac

SEQ ID NO: 5967584 - DNA, 25 bp, Homo sapien
acgctgtttatttagtcgaagagtt

SEQ ID NO: 5967585 - DNA, 25 bp, Homo sapien
atctgaatccagatatgatagattt

SEQ ID NO: 5967586 - DNA, 25 bp, Homo sapien
gaaatggtctccgggaagcctttgt

SEQ ID NO: 5967587 - DNA, 25 bp, Homo sapien
agacatgctttacgatgaactaatg

SEQ ID NO: 5967588 - DNA, 25 bp, Homo sapien
gtgtttagctagcagtagcgattca

SEQ ID NO: 5967589 - DNA, 25 bp, Homo sapien
ggaaactggataacaagataatgcg

SEQ ID NO: 5967590 - DNA, 25 bp, Homo sapien
tggtacagggcacccgagataatgc

SEQ ID NO: 5967591 - DNA, 25 bp, Homo sapien
cctgacaaaagaataagcgcagcag

SEQ ID NO: 5967592 - DNA, 25 bp, Homo sapien
tgcgattttggactagcgaggtgtt

SEQ ID NO: 5967593 - DNA, 25 bp, Homo sapien
tgcacaagttatccatagagacata

SEQ ID NO: 5967594 - DNA, 25 bp, Homo sapien
cgaagagttgatggaaaccgattta

SEQ ID NO: 5967595 - DNA, 25 bp, Homo sapien
agtatccatagacaaactaaacgct

SEQ ID NO: 5967596 - DNA, 25 bp, Homo sapien
agtgcacaagttatccatagagaca

SEQ ID NO: 5967597 - DNA, 25 bp, Homo sapien
gatggatatatggtcatgcggatgc

SEQ ID NO: 5967598 - DNA, 25 bp, Homo sapien
ttaagacacccttacctggcaatgt

SEQ ID NO: 5967599 - DNA, 25 bp, Homo sapien
agaaccataacttttgatatccctt

SEQ ID NO: 5967600 - DNA, 25 bp, Homo sapien
aaccataacttttgatatcccttcc

SEQ ID NO: 5967601 - DNA, 25 bp, Homo sapien
aagtaattaataatcagaatagcgg

SEQ ID NO: 5967602 - DNA, 25 bp, Homo sapien
gtatgttcagcaattcataagcctt

SEQ ID NO: 5967603 - DNA, 25 bp, Homo sapien
atgatgaattttggaaactggataa

SEQ ID NO: 5967604 - DNA, 25 bp, Homo sapien
ggctagaaccataacttttgatatc

SEQ ID NO: 5967605 - DNA, 25 bp, Homo sapien
gtcgaagagttgatggaaaccgatt

SEQ ID NO: 5967606 - DNA, 25 bp, Homo sapien
aaatccaagagggctaaagagtata

SEQ ID NO: 5967607 - DNA, 25 bp, Homo sapien
tagatttactagacaaaatgcttca

SEQ ID NO: 5967608 - DNA, 25 bp, Homo sapien
tgtttatttagtcgaagagttgatg

SEQ ID NO: 5967609 - DNA, 25 bp, Homo sapien
aagagaaacattggtaggattcatg

SEQ ID NO: 5967610 - DNA, 25 bp, Homo sapien
aggtagctatcaagaaaatacaacc

SEQ ID NO: 5967611 - DNA, 25 bp, Homo sapien
tccatgaacacgaaaacataataag

SEQ ID NO: 5967612 - DNA, 25 bp, Homo sapien
agtgatgagccggaatatcctccac

SEQ ID NO: 5967613 - DNA, 25 bp, Homo sapien
ttacggtatttccatgaacacgaaa

SEQ ID NO: 5967614 - DNA, 25 bp, Homo sapien
ccggaagaggaggaagaagtgccca

SEQ ID NO: 5967615 - DNA, 25 bp, Homo sapien
aattttggaaactggataacaagat

SEQ ID NO: 5967616 - DNA, 25 bp, Homo sapien
tatatggtcatgcggatgcattttg

SEQ ID NO: 5967617 - DNA, 25 bp, Homo sapien
ccagatatgatagatttactagaca

SEQ ID NO: 5967618 - DNA, 25 bp, Homo sapien
cctgttactaaattccaattgtgat

SEQ ID NO: 5967619 - DNA, 25 bp, Homo sapien
cccttacctggcaatgtaccatgac

SEQ ID NO: 5967620 - DNA, 25 bp, Homo sapien
tgttactaaattccaattgtgatct

SEQ ID NO: 5967621 - DNA, 25 bp, Homo sapien
tataaactcgtagatttaataggtg

SEQ ID NO: 5967622 - DNA, 25 bp, Homo sapien
atgggagaccgtctggtcaaagacc

SEQ ID NO: 5967623 - DNA, 25 bp, Homo sapien
gggagaccgtctggtcaaagaccga

SEQ ID NO: 5967624 - DNA, 25 bp, Homo sapien
ctttacataccaaatcctcagagcc

SEQ ID NO: 5967625 - DNA, 25 bp, Homo sapien
atgacccaagtgatgagccggaata

SEQ ID NO: 5967626 - DNA, 25 bp, Homo sapien
gcataaaggtagctatcaagaaaat

SEQ ID NO: 5967627 - DNA, 25 bp, Homo sapien
cattttggctgaaatggtctccggg

SEQ ID NO: 5967628 - DNA, 25 bp, Homo sapien
actttaatcagatcaaatccaagag

SEQ ID NO: 5967629 - DNA, 25 bp, Homo sapien
tacctatgaggccacccttgccatg

SEQ ID NO: 5967630 - DNA, 25 bp, Homo sapien
tttactagacaaaatgcttcaattc

SEQ ID NO: 5967631 - DNA, 25 bp, Homo sapien
gcgcagcagaagctttaagacaccc

SEQ ID NO: 5967632 - DNA, 25 bp, Homo sapien
gcttttacggtatttccatgaacac

SEQ ID NO: 5967633 - DNA, 25 bp, Homo sapien
gtctggtcaaagaccgatctgaatc

SEQ ID NO: 5967634 - DNA, 25 bp, Homo sapien
atgacggagtacgtcgcaacgcgat

SEQ ID NO: 5967635 - DNA, 25 bp, Homo sapien
gctaaagagtatatagcaaacttac

SEQ ID NO: 5967636 - DNA, 25 bp, Homo sapien
atgaccatgttcaatactttacata

SEQ ID NO: 5967637 - DNA, 25 bp, Homo sapien
ttaataatcagaatagcgggttttc

SEQ ID NO: 5967638 - DNA, 25 bp, Homo sapien
gagactatcatcatcaattatggct

SEQ ID NO: 5967639 - DNA, 25 bp, Homo sapien
gccttaaagtctattcacagtgcac

SEQ ID NO: 5967640 - DNA, 25 bp, Homo sapien
gcgtacggaacagtatgttcagcaa

SEQ ID NO: 5967641 - DNA, 25 bp, Homo sapien
ctagcgaggtgtttagctagcagta

SEQ ID NO: 5967642 - DNA, 25 bp, Homo sapien
gatcaaatccaagagggctaaagag

SEQ ID NO: 5967643 - DNA, 25 bp, Homo sapien
agcgggttttccactttaagtgatg

SEQ ID NO: 5967644 - DNA, 25 bp, Homo sapien
atcccttcccaatataaactcgtag

SEQ ID NO: 5967645 - DNA, 25 bp, Homo sapien
cttacctggcaatgtaccatgaccc

SEQ ID NO: 5967646 - DNA, 25 bp, Homo sapien
agtctgcgattttggactagcgagg

SEQ ID NO: 5967647 - DNA, 25 bp, Homo sapien
ataagtatattggataaagtaaggc

SEQ ID NO: 5967648 - DNA, 25 bp, Homo sapien
aatgtaccatgacccaagtgatgag

SEQ ID NO: 5967649 - DNA, 25 bp, Homo sapien
aattaataatcagaatagcgggttt

SEQ ID NO: 5967650 - DNA, 25 bp, Homo sapien
gttgatggaaaccgatttacaaaaa

SEQ ID NO: 5967651 - DNA, 25 bp, Homo sapien
ctatcatcatcaattatggctaatt

SEQ ID NO: 5967652 - DNA, 25 bp, Homo sapien
aagtatattggataaagtaaggcca

SEQ ID NO: 5967653 - DNA, 25 bp, Homo sapien
atgctttacgatgaactaatgaaga

SEQ ID NO: 5967654 - DNA, 25 bp, Homo sapien
atcctccacttaatttggatgatga

SEQ ID NO: 5967655 - DNA, 25 bp, Homo sapien
cagaagctttaagacacccttacct

SEQ ID NO: 5967656 - DNA, 25 bp, Homo sapien
gggagcgtacggaacagtatgttca

SEQ ID NO: 5967657 - DNA, 25 bp, Homo sapien
ccactttaagtgatgaccatgttca

SEQ ID NO: 5967658 - DNA, 25 bp, Homo sapien
gaataagcgcagcagaagctttaag

SEQ ID NO: 5967659 - DNA, 25 bp, Homo sapien
tactagacaaaatgcttcaattcaa

SEQ ID NO: 5967660 - DNA, 25 bp, Homo sapien
agcctttgttcccaggcagagacta

SEQ ID NO: 5967661 - DNA, 25 bp, Homo sapien
tttgatatcccttcccaatataaac

SEQ ID NO: 5967662 - DNA, 25 bp, Homo sapien
gagggctaaagagtatatagcaaac

SEQ ID NO: 5967663 - DNA, 25 bp, Homo sapien
attatggctaattctagaagtcttg

SEQ ID NO: 5967664 - DNA, 25 bp, Homo sapien
taaattccaattgtgatctcaaagt

SEQ ID NO: 5967665 - DNA, 25 bp, Homo sapien
ggaggaagaagtgcccatagaaatg

SEQ ID NO: 5967666 - DNA, 25 bp, Homo sapien
gtacggaacagtatgttcagcaatt

SEQ ID NO: 5967667 - DNA, 25 bp, Homo sapien
gatggtacagggcacccgagataat

SEQ ID NO: 5967668 - DNA, 25 bp, Homo sapien
ctaacttttcaagagtacacaactg

SEQ ID NO: 5967669 - DNA, 25 bp, Homo sapien
caaacctgttactaaattccaattg

SEQ ID NO: 5967670 - DNA, 25 bp, Homo sapien
aagccttccggcataaaggtagcta

SEQ ID NO: 5967671 - DNA, 25 bp, Homo sapien
tcaattcaatcctgacaaaagaata

SEQ ID NO: 5967672 - DNA, 25 bp, Homo sapien
cagatcaaatccaagagggctaaag

SEQ ID NO: 5967673 - DNA, 25 bp, Homo sapien
caaactaaacgctgtttatttagtc

SEQ ID NO: 5967674 - DNA, 25 bp, Homo sapien
taatgcgtccggaagaggaggaaga

SEQ ID NO: 5967675 - DNA, 25 bp, Homo sapien
agcgaggtgtttagctagcagtagc

SEQ ID NO: 5967676 - DNA, 25 bp, Homo sapien
cgaggtgtttagctagcagtagcga

SEQ ID NO: 5967677 - DNA, 25 bp, Homo sapien
acaaaatgcttcaattcaatcctga

SEQ ID NO: 5967678 - DNA, 25 bp, Homo sapien
ataacttttgatatcccttcccaat

SEQ ID NO: 5967679 - DNA, 25 bp, Homo sapien
gaatccagatatgatagatttacta

SEQ ID NO: 5967680 - DNA, 25 bp, Homo sapien
tactttacataccaaatcctcagag

SEQ ID NO: 5967681 - DNA, 25 bp, Homo sapien
gagatcaagcttttacggtatttcc

SEQ ID NO: 5967682 - DNA, 25 bp, Homo sapien
gtaaggccagtatccatagacaaac

SEQ ID NO: 5967683 - DNA, 25 bp, Homo sapien
ggtatttccatgaacacgaaaacat

SEQ ID NO: 5967684 - DNA, 25 bp, Homo sapien
tcaagcttttacggtatttccatga

SEQ ID NO: 5967685 - DNA, 25 bp, Homo sapien
aaagaccgatctgaatccagatatg

SEQ ID NO: 5967686 - DNA, 25 bp, Homo sapien
tctcaaagtctgcgattttggacta

SEQ ID NO: 5967687 - DNA, 25 bp, Homo sapien
tttccatgaacacgaaaacataata

SEQ ID NO: 5967688 - DNA, 25 bp, Homo sapien
caattcataagccttccggcataaa

SEQ ID NO: 5967689 - DNA, 25 bp, Homo sapien
aagaataagcgcagcagaagcttta

SEQ ID NO: 5967690 - DNA, 25 bp, Homo sapien
gtacgtcgcaacgcgatggtacagg

SEQ ID NO: 5967691 - DNA, 25 bp, Homo sapien
ctcgtagatttaataggtgagggag

SEQ ID NO: 5967692 - DNA, 25 bp, Homo sapien
cgtagatttaataggtgagggagcg

SEQ ID NO: 5967693 - DNA, 25 bp, Homo sapien
caagaaaatacaaccgtttagcaaa

SEQ ID NO: 5967694 - DNA, 25 bp, Homo sapien
aattccaattgtgatctcaaagtct

SEQ ID NO: 5967695 - DNA, 25 bp, Homo sapien
tttaatcagatcaaatccaagaggg

SEQ ID NO: 5967696 - DNA, 25 bp, Homo sapien
acggaacagtatgttcagcaattca

SEQ ID NO: 5967697 - DNA, 25 bp, Homo sapien
attttggactagcgaggtgtttagc

SEQ ID NO: 5967698 - DNA, 25 bp, Homo sapien
cgagataatgctaacttttcaagag

SEQ ID NO: 5967699 - DNA, 25 bp, Homo sapien
ataccaaatcctcagagccttaaag

SEQ ID NO: 5967700 - DNA, 25 bp, Homo sapien
atcatcatcaattatggctaattct

SEQ ID NO: 5967701 - DNA, 25 bp, Homo sapien
taaagtaaggccagtatccatagac

SEQ ID NO: 5967702 - DNA, 25 bp, Homo sapien
tctttcgaagactttaatcagatca

SEQ ID NO: 5967703 - DNA, 25 bp, Homo sapien
ccaatataaactcgtagatttaata

SEQ ID NO: 5967704 - DNA, 25 bp, Homo sapien
gtttagcaaaaaattgtttgttaca

SEQ ID NO: 5967705 - DNA, 25 bp, Homo sapien
ataggtgagggagcgtacggaacag

SEQ ID NO: 5967706 - DNA, 25 bp, Homo sapien
atagagacataaagccatcaaacct

SEQ ID NO: 5967707 - DNA, 25 bp, Homo sapien
taagtgatgaccatgttcaatactt

SEQ ID NO: 5967708 - DNA, 25 bp, Homo sapien
taatcagaatagcgggttttccact

SEQ ID NO: 5967709 - DNA, 25 bp, Homo sapien
agacataaagccatcaaacctgtta

SEQ ID NO: 5967710 - DNA, 25 bp, Homo sapien
cgattcaagagaaacattggtagga

SEQ ID NO: 5967711 - DNA, 25 bp, Homo sapien
ataaaggtagctatcaagaaaatac

SEQ ID NO: 5967712 - DNA, 25 bp, Homo sapien
agactttaatcagatcaaatccaag

SEQ ID NO: 5967713 - DNA, 25 bp, Homo sapien
cctccacttaatttggatgatgaat

SEQ ID NO: 5967714 - DNA, 25 bp, Homo sapien
gtttgttacaagaactatacgtgag

SEQ ID NO: 5967715 - DNA, 25 bp, Homo sapien
cccgagataatgctaacttttcaag

SEQ ID NO: 5967716 - DNA, 25 bp, Homo sapien
tacctggcaatgtaccatgacccaa

SEQ ID NO: 5967717 - DNA, 25 bp, Homo sapien
gtctattcacagtgcacaagttatc

SEQ ID NO: 5967718 - DNA, 25 bp, Homo sapien
tcctcagagccttaaagtctattca

SEQ ID NO: 5967719 - DNA, 25 bp, Homo sapien
attcaagagaaacattggtaggatt

SEQ ID NO: 5967720 - DNA, 25 bp, Homo sapien
tgacaaaagaataagcgcagcagaa

SEQ ID NO: 5967721 - DNA, 25 bp, Homo sapien
ttccactttaagtgatgaccatgtt

SEQ ID NO: 5967722 - DNA, 25 bp, Homo sapien
atcagaatagcgggttttccacttt

SEQ ID NO: 5967723 - DNA, 25 bp, Homo sapien
tatttagtcgaagagttgatggaaa

SEQ ID NO: 5967724 - DNA, 25 bp, Homo sapien
tttatttagtcgaagagttgatgga

SEQ ID NO: 5967725 - DNA, 25 bp, Homo sapien
ggaacagtatgttcagcaattcata

SEQ ID NO: 5967726 - DNA, 25 bp, Homo sapien
cggaatatcctccacttaatttgga

SEQ ID NO: 5967727 - DNA, 25 bp, Homo sapien
gatttactagacaaaatgcttcaat

SEQ ID NO: 5967728 - DNA, 25 bp, Homo sapien
ccaagagggctaaagagtatatagc

SEQ ID NO: 5967729 - DNA, 25 bp, Homo sapien
gtgagggagcgtacggaacagtatg

SEQ ID NO: 5967730 - DNA, 25 bp, Homo sapien
cgatctgaatccagatatgatagat

SEQ ID NO: 5967731 - DNA, 25 bp, Homo sapien
gcgtccggaagaggaggaagaagtg

SEQ ID NO: 5967732 - DNA, 25 bp, Homo sapien
aatggtctccgggaagcctttgttc

SEQ ID NO: 5967733 - DNA, 25 bp, Homo sapien
catgaacacgaaaacataataagta

SEQ ID NO: 5967734 - DNA, 25 bp, Homo sapien
cattggtaggattcatgacggagta

SEQ ID NO: 5967735 - DNA, 25 bp, Homo sapien
aacagtatgttcagcaattcataag

SEQ ID NO: 5967736 - DNA, 25 bp, Homo sapien
tccatagacaaactaaacgctgttt

SEQ ID NO: 5967737 - DNA, 25 bp, Homo sapien
ttgtttgttacaagaactatacgtg

SEQ ID NO: 5967738 - DNA, 25 bp, Homo sapien
gatttaataggtgagggagcgtacg

SEQ ID NO: 5967739 - DNA, 25 bp, Homo sapien
actggataacaagataatgcgtccg

SEQ ID NO: 5967740 - DNA, 25 bp, Homo sapien
ttttggctgaaatggtctccgggaa

SEQ ID NO: 5967741 - DNA, 25 bp, Homo sapien
ctagcagtagcgattcaagagaaac

SEQ ID NO: 5967742 - DNA, 25 bp, Homo sapien
tgctaacttttcaagagtacacaac

SEQ ID NO: 5967743 - DNA, 25 bp, Homo sapien
gtacacaactgcgatggatatatgg

SEQ ID NO: 5967744 - DNA, 25 bp, Homo sapien
cttccggcataaaggtagctatcaa

SEQ ID NO: 5967745 - DNA, 25 bp, Homo sapien
ttagcaaaaaattgtttgttacaag

SEQ ID NO: 5967746 - DNA, 25 bp, Homo sapien
acagtgcacaagttatccatagaga

SEQ ID NO: 5967747 - DNA, 25 bp, Homo sapien
tggtcatgcggatgcattttggctg

SEQ ID NO: 5967748 - DNA, 25 bp, Homo sapien
tgcattttggctgaaatggtctccg

SEQ ID NO: 5967749 - DNA, 25 bp, Homo sapien
ccagtatccatagacaaactaaacg

SEQ ID NO: 5967750 - DNA, 25 bp, Homo sapien
gcgatggtacagggcacccgagata

SEQ ID NO: 5967751 - DNA, 25 bp, Homo sapien
gggctaaagagtatatagcaaactt

SEQ ID NO: 5967752 - DNA, 25 bp, Homo sapien
tgcttcaattcaatcctgacaaaag

SEQ ID NO: 5967753 - DNA, 25 bp, Homo sapien
taacaagataatgcgtccggaagag

SEQ ID NO: 5967754 - DNA, 25 bp, Homo sapien
aagtaaggccagtatccatagacaa

SEQ ID NO: 5967755 - DNA, 25 bp, Homo sapien
acatgctttacgatgaactaatgaa

SEQ ID NO: 5967756 - DNA, 25 bp, Homo sapien
cagaatagcgggttttccactttaa

SEQ ID NO: 5967757 - DNA, 25 bp, Homo sapien
ttatccatagagacataaagccatc

SEQ ID NO: 5967758 - DNA, 25 bp, Homo sapien
ttggctgaaatggtctccgggaagc

SEQ ID NO: 5967759 - DNA, 25 bp, Homo sapien
atagaaatgctcaaagacatgcttt

SEQ ID NO: 5967760 - DNA, 25 bp, Homo sapien
atcagatcaaatccaagagggctaa

SEQ ID NO: 5967761 - DNA, 25 bp, Homo sapien
tcaaagaccgatctgaatccagata

SEQ ID NO: 5967762 - DNA, 25 bp, Homo sapien
caaacttacctatgaggccaccctt

SEQ ID NO: 5967763 - DNA, 25 bp, Homo sapien
gaaacattggtaggattcatgacgg

SEQ ID NO: 5967764 - DNA, 25 bp, Homo sapien
tcaatactttacataccaaatcctc

SEQ ID NO: 5967765 - DNA, 25 bp, Homo sapien
tatccatagacaaactaaacgctgt

SEQ ID NO: 5967766 - DNA, 25 bp, Homo sapien
cctatgaggccacccttgccatggg

SEQ ID NO: 5967767 - DNA, 25 bp, Homo sapien
aggtgtttagctagcagtagcgatt

SEQ ID NO: 5967768 - DNA, 25 bp, Homo sapien
gaagactttaatcagatcaaatcca

SEQ ID NO: 5967769 - DNA, 25 bp, Homo sapien
gtagcgattcaagagaaacattggt

SEQ ID NO: 5967770 - DNA, 25 bp, Homo sapien
attcataagccttccggcataaagg

SEQ ID NO: 5967771 - DNA, 25 bp, Homo sapien
catcatcaattatggctaattctag

SEQ ID NO: 5967772 - DNA, 25 bp, Homo sapien
atcctgacaaaagaataagcgcagc

SEQ ID NO: 5967773 - DNA, 25 bp, Homo sapien
gaagaagtgcccatagaaatgctca

SEQ ID NO: 5967774 - DNA, 25 bp, Homo sapien
gtaattaataatcagaatagcgggt

SEQ ID NO: 5967775 - DNA, 25 bp, Homo sapien
gagtacacaactgcgatggatatat

SEQ ID NO: 5967776 - DNA, 25 bp, Homo sapien
actttaagtgatgaccatgttcaat

SEQ ID NO: 5967777 - DNA, 25 bp, Homo sapien
gactagcgaggtgtttagctagcag

SEQ ID NO: 5967778 - DNA, 25 bp, Homo sapien
agctagcagtagcgattcaagagaa

SEQ ID NO: 5967779 - DNA, 25 bp, Homo sapien
agataatgctaacttttcaagagta

SEQ ID NO: 5967780 - DNA, 25 bp, Homo sapien
ggctgaaatggtctccgggaagcct

SEQ ID NO: 5967781 - DNA, 25 bp, Homo sapien
ataatgctaacttttcaagagtaca

SEQ ID NO: 5967782 - DNA, 25 bp, Homo sapien
gccggaatatcctccacttaatttg

SEQ ID NO: 5967783 - DNA, 25 bp, Homo sapien
accgatctgaatccagatatgatag

SEQ ID NO: 5967784 - DNA, 25 bp, Homo sapien
caattatggctaattctagaagtct

SEQ ID NO: 5967785 - DNA, 25 bp, Homo sapien
aattcaatcctgacaaaagaataag

SEQ ID NO: 5967786 - DNA, 25 bp, Homo sapien
gaccatgttcaatactttacatacc

SEQ ID NO: 5967787 - DNA, 25 bp, Homo sapien
aaagtctgcgattttggactagcga

SEQ ID NO: 5967788 - DNA, 25 bp, Homo sapien
ggatgatgaattttggaaactggat

SEQ ID NO: 5967789 - DNA, 25 bp, Homo sapien
tcatcaattatggctaattctagaa

SEQ ID NO: 5967790 - DNA, 25 bp, Homo sapien
acgtcgcaacgcgatggtacagggc

SEQ ID NO: 5967791 - DNA, 25 bp, Homo sapien
ctttaagacacccttacctggcaat

SEQ ID NO: 5967792 - DNA, 25 bp, Homo sapien
cggcataaaggtagctatcaagaaa

SEQ ID NO: 5967793 - DNA, 25 bp, Homo sapien
agttatccatagagacataaagcca

SEQ ID NO: 5967794 - DNA, 25 bp, Homo sapien
ggattcatgacggagtacgtcgcaa

SEQ ID NO: 5967795 - DNA, 25 bp, Homo sapien
aaggccagtatccatagacaaacta

SEQ ID NO: 5967796 - DNA, 25 bp, Homo sapien
ttccaattgtgatctcaaagtctgc

SEQ ID NO: 5967797 - DNA, 25 bp, Homo sapien
tgaacacgaaaacataataagtata

SEQ ID NO: 5967798 - DNA, 25 bp, Homo sapien
gttcagcaattcataagccttccgg

SEQ ID NO: 5967799 - DNA, 25 bp, Homo sapien
agaccgatctgaatccagatatgat

SEQ ID NO: 5967800 - DNA, 25 bp, Homo sapien
cacccgagataatgctaacttttca

SEQ ID NO: 5967801 - DNA, 25 bp, Homo sapien
tatgaggccacccttgccatgggag

SEQ ID NO: 5967802 - DNA, 25 bp, Homo sapien
tcatgacggagtacgtcgcaacgcg

SEQ ID NO: 5967803 - DNA, 25 bp, Homo sapien
gccacccttgccatgggagaccgtc

SEQ ID NO: 5967804 - DNA, 25 bp, Homo sapien
tagacaaactaaacgctgtttattt

SEQ ID NO: 5967805 - DNA, 25 bp, Homo sapien
cttttcaagagtacacaactgcgat

SEQ ID NO: 5967806 - DNA, 25 bp, Homo sapien
ctgaatccagatatgatagatttac

SEQ ID NO: 5967807 - DNA, 25 bp, Homo sapien
caggcagagactatcatcatcaatt

SEQ ID NO: 5967808 - DNA, 25 bp, Homo sapien
tttaataggtgagggagcgtacgga

SEQ ID NO: 5967809 - DNA, 25 bp, Homo sapien
atcaagaaaatacaaccgtttagca

SEQ ID NO: 5967810 - DNA, 25 bp, Homo sapien
tacgatgaactaatgaagaccatgg

SEQ ID NO: 5967811 - DNA, 25 bp, Homo sapien
atgatagatttactagacaaaatgc

SEQ ID NO: 5967812 - DNA, 25 bp, Homo sapien
attctagaagtcttgggaactccat

SEQ ID NO: 5967813 - DNA, 25 bp, Homo sapien
aagagttgatggaaaccgatttaca

SEQ ID NO: 5967814 - DNA, 25 bp, Homo sapien
tggactagcgaggtgtttagctagc

SEQ ID NO: 5967815 - DNA, 25 bp, Homo sapien
ctatacgtgagatcaagcttttacg

SEQ ID NO: 5967816 - DNA, 25 bp, Homo sapien
cgcaacgcgatggtacagggcaccc

SEQ ID NO: 5967817 - DNA, 25 bp, Homo sapien
aaaagaataagcgcagcagaagctt

SEQ ID NO: 5967818 - DNA, 25 bp, Homo sapien
tacaagaactatacgtgagatcaag

SEQ ID NO: 5967819 - DNA, 25 bp, Homo sapien
cccttcccaatataaactcgtagat

SEQ ID NO: 5967820 - DNA, 25 bp, Homo sapien
taatcagatcaaatccaagagggct

SEQ ID NO: 5967821 - DNA, 25 bp, Homo sapien
aataatcagaatagcgggttttcca

SEQ ID NO: 5967822 - DNA, 25 bp, Homo sapien
gctttacgatgaactaatgaagacc

SEQ ID NO: 5967823 - DNA, 25 bp, Homo sapien
cacccttgccatgggagaccgtctg

SEQ ID NO: 5967824 - DNA, 25 bp, Homo sapien
cacccttacctggcaatgtaccatg

SEQ ID NO: 5967825 - DNA, 25 bp, Homo sapien
cacaagttatccatagagacataaa

SEQ ID NO: 5967826 - DNA, 25 bp, Homo sapien
catctttcgaagactttaatcagat

SEQ ID NO: 5967827 - DNA, 25 bp, Homo sapien
gataaagtaaggccagtatccatag

SEQ ID NO: 5967828 - DNA, 25 bp, Homo sapien
gactatcatcatcaattatggctaa

SEQ ID NO: 5967829 - DNA, 25 bp, Homo sapien
aatactttacataccaaatcctcag

SEQ ID NO: 5967830 - DNA, 25 bp, Homo sapien
ctatcaagaaaatacaaccgtttag

SEQ ID NO: 5967831 - DNA, 25 bp, Homo sapien
cttaatttggatgatgaattttgga

SEQ ID NO: 5967832 - DNA, 25 bp, Homo sapien
acgtgagatcaagcttttacggtat

SEQ ID NO: 5967833 - DNA, 25 bp, Homo sapien
agatatgatagatttactagacaaa

SEQ ID NO: 5967834 - DNA, 25 bp, Homo sapien
aactatacgtgagatcaagctttta

SEQ ID NO: 5967835 - DNA, 25 bp, Homo sapien
tccggcataaaggtagctatcaaga

SEQ ID NO: 5967836 - DNA, 25 bp, Homo sapien
cccttgccatgggagaccgtctggt

SEQ ID NO: 5967837 - DNA, 25 bp, Homo sapien
tttagtcgaagagttgatggaaacc

SEQ ID NO: 5967838 - DNA, 25 bp, Homo sapien
aaaattgtttgttacaagaactata

SEQ ID NO: 5967839 - DNA, 25 bp, Homo sapien
gtgatctcaaagtctgcgattttgg

SEQ ID NO: 5967840 - DNA, 25 bp, Homo sapien
ggttttccactttaagtgatgacca

SEQ ID NO: 5967841 - DNA, 25 bp, Homo sapien
agtgatgaccatgttcaatacttta

SEQ ID NO: 5967842 - DNA, 25 bp, Homo sapien
atattggataaagtaaggccagtat

SEQ ID NO: 5967843 - DNA, 25 bp, Homo sapien
ctgcgatggatatatggtcatgcgg

SEQ ID NO: 5967844 - DNA, 25 bp, Homo sapien
ttgggaactccatctttcgaagact

SEQ ID NO: 5967845 - DNA, 25 bp, Homo sapien
aatataaactcgtagatttaatagg

SEQ ID NO: 5967846 - DNA, 25 bp, Homo sapien
cttcccaatataaactcgtagattt

SEQ ID NO: 5967847 - DNA, 25 bp, Homo sapien
actccatctttcgaagactttaatc

SEQ ID NO: 5967848 - DNA, 25 bp, Homo sapien
gataacaagataatgcgtccggaag

SEQ ID NO: 5967849 - DNA, 25 bp, Homo sapien
agggcacccgagataatgctaactt

SEQ ID NO: 5967850 - DNA, 25 bp, Homo sapien
gaccgtctggtcaaagaccgatctg

SEQ ID NO: 5967851 - DNA, 25 bp, Homo sapien
tttcaagagtacacaactgcgatgg

SEQ ID NO: 5967852 - DNA, 25 bp, Homo sapien
atcaaacctgttactaaattccaat

SEQ ID NO: 5967853 - DNA, 25 bp, Homo sapien
aactcgtagatttaataggtgaggg

SEQ ID NO: 5967854 - DNA, 25 bp, Homo sapien
gatcaagcttttacggtatttccat

SEQ ID NO: 5967855 - DNA, 25 bp, Homo sapien
accaaatcctcagagccttaaagtc

SEQ ID NO: 5967856 - DNA, 25 bp, Homo sapien
taaagagtatatagcaaacttacct

SEQ ID NO: 5967857 - DNA, 25 bp, Homo sapien
gagtacgtcgcaacgcgatggtaca

SEQ ID NO: 5967858 - DNA, 25 bp, Homo sapien
tccatctttcgaagactttaatcag

SEQ ID NO: 5967859 - DNA, 25 bp, Homo sapien
atgcgtccggaagaggaggaagaag

SEQ ID NO: 5967860 - DNA, 25 bp, Homo sapien
tgtaccatgacccaagtgatgagcc

SEQ ID NO: 5967861 - DNA, 25 bp, Homo sapien
gtagctatcaagaaaatacaaccgt

SEQ ID NO: 5967862 - DNA, 25 bp, Homo sapien
ttggatgatgaattttggaaactgg

SEQ ID NO: 5967863 - DNA, 25 bp, Homo sapien
taataggtgagggagcgtacggaac

SEQ ID NO: 5967864 - DNA, 25 bp, Homo sapien
gtacagggcacccgagataatgcta

SEQ ID NO: 5967865 - DNA, 25 bp, Homo sapien
agtcttgggaactccatctttcgaa

SEQ ID NO: 5967866 - DNA, 25 bp, Homo sapien
agctatcaagaaaatacaaccgttt

SEQ ID NO: 5967867 - DNA, 25 bp, Homo sapien
taaactcgtagatttaataggtgag

SEQ ID NO: 5967868 - DNA, 25 bp, Homo sapien
gcgatggatatatggtcatgcggat

SEQ ID NO: 5967869 - DNA, 25 bp, Homo sapien
aagtgcccatagaaatgctcaaaga

SEQ ID NO: 5967870 - DNA, 25 bp, Homo sapien
taggattcatgacggagtacgtcgc

SEQ ID NO: 5967871 - DNA, 25 bp, Homo sapien
gtttagctagcagtagcgattcaag

SEQ ID NO: 5967872 - DNA, 25 bp, Homo sapien
ttcaatcctgacaaaagaataagcg

SEQ ID NO: 5967873 - DNA, 25 bp, Homo sapien
gtcatgcggatgcattttggctgaa

SEQ ID NO: 5967874 - DNA, 25 bp, Homo sapien
agaactatacgtgagatcaagcttt

SEQ ID NO: 5967875 - DNA, 25 bp, Homo sapien
gctcaaagacatgctttacgatgaa

SEQ ID NO: 5967876 - DNA, 25 bp, Homo sapien
aatgctaacttttcaagagtacaca

SEQ ID NO: 5967877 - DNA, 25 bp, Homo sapien
ccatgttcaatactttacataccaa

SEQ ID NO: 5967878 - DNA, 25 bp, Homo sapien
ttagctagcagtagcgattcaagag

SEQ ID NO: 5967879 - DNA, 25 bp, Homo sapien
taattctagaagtcttgggaactcc

SEQ ID NO: 5967880 - DNA, 25 bp, Homo sapien
agccatcaaacctgttactaaattc

SEQ ID NO: 5967881 - DNA, 25 bp, Homo sapien
cttcaattcaatcctgacaaaagaa

SEQ ID NO: 5967882 - DNA, 25 bp, Homo sapien
cggatgcattttggctgaaatggtc

SEQ ID NO: 5967883 - DNA, 25 bp, Homo sapien
ggcacccgagataatgctaactttt

SEQ ID NO: 5967884 - DNA, 25 bp, Homo sapien
atccagatatgatagatttactaga

SEQ ID NO: 5967885 - DNA, 25 bp, Homo sapien
aggaagaagtgcccatagaaatgct

SEQ ID NO: 5967886 - DNA, 25 bp, Homo sapien
tagtcgaagagttgatggaaaccga

SEQ ID NO: 5967887 - DNA, 25 bp, Homo sapien
gagaccgtctggtcaaagaccgatc

SEQ ID NO: 5967888 - DNA, 25 bp, Homo sapien
ctccgggaagcctttgttcccaggc

SEQ ID NO: 5967889 - DNA, 25 bp, Homo sapien
gatgcattttggctgaaatggtctc

SEQ ID NO: 5967890 - DNA, 25 bp, Homo sapien
aagagtacacaactgcgatggatat

SEQ ID NO: 5967891 - DNA, 25 bp, Homo sapien
agcaaaaaattgtttgttacaagaa

SEQ ID NO: 5967892 - DNA, 25 bp, Homo sapien
atggctagaaccataacttttgata

SEQ ID NO: 5967893 - DNA, 25 bp, Homo sapien
taatttggatgatgaattttggaaa

SEQ ID NO: 5967894 - DNA, 25 bp, Homo sapien
ctagaaccataacttttgatatccc

SEQ ID NO: 5967895 - DNA, 25 bp, Homo sapien
gacccaagtgatgagccggaatatc

SEQ ID NO: 5967896 - DNA, 25 bp, Homo sapien
aattgtgatctcaaagtctgcgatt

SEQ ID NO: 5967897 - DNA, 25 bp, Homo sapien
agacaaaatgcttcaattcaatcct

SEQ ID NO: 5967898 - DNA, 25 bp, Homo sapien
gaagctttaagacacccttacctgg

SEQ ID NO: 5967899 - DNA, 25 bp, Homo sapien
gatgaattttggaaactggataaca

SEQ ID NO: 5967900 - DNA, 25 bp, Homo sapien
tagaagtcttgggaactccatcttt

SEQ ID NO: 5967901 - DNA, 25 bp, Homo sapien
ccatgacccaagtgatgagccggaa

SEQ ID NO: 5967902 - DNA, 25 bp, Homo sapien
tcaaatccaagagggctaaagagta

SEQ ID NO: 5967903 - DNA, 25 bp, Homo sapien
caaatcctcagagccttaaagtcta

SEQ ID NO: 5967904 - DNA, 25 bp, Homo sapien
gaagcctttgttcccaggcagagac

SEQ ID NO: 5967905 - DNA, 25 bp, Homo sapien
cagagccttaaagtctattcacagt

SEQ ID NO: 5967906 - DNA, 25 bp, Homo sapien
ttcccaggcagagactatcatcatc

SEQ ID NO: 5967907 - DNA, 25 bp, Homo sapien
atatcctccacttaatttggatgat

SEQ ID NO: 5967908 - DNA, 25 bp, Homo sapien
cggagtacgtcgcaacgcgatggta

SEQ ID NO: 5967909 - DNA, 25 bp, Homo sapien
ttggaaactggataacaagataatg

SEQ ID NO: 5967910 - DNA, 25 bp, Homo sapien
aaactggataacaagataatgcgtc

SEQ ID NO: 5967911 - DNA, 25 bp, Homo sapien
gaggaggaagaagtgcccatagaaa

SEQ ID NO: 5967912 - DNA, 25 bp, Homo sapien
attcatgacggagtacgtcgcaacg

SEQ ID NO: 5967913 - DNA, 25 bp, Homo sapien
gatatatggtcatgcggatgcattt

SEQ ID NO: 5967914 - DNA, 25 bp, Homo sapien
gcaatgtaccatgacccaagtgatg

SEQ ID NO: 5967915 - DNA, 25 bp, Homo sapien
tatggtcatgcggatgcattttggc

SEQ ID NO: 5967916 - DNA, 25 bp, Homo sapien
gagggagcgtacggaacagtatgtt

SEQ ID NO: 5967917 - DNA, 25 bp, Homo sapien
acacaactgcgatggatatatggtc

SEQ ID NO: 5967918 - DNA, 25 bp, Homo sapien
aaatgctcaaagacatgctttacga

SEQ ID NO: 5967919 - DNA, 25 bp, Homo sapien
tgatgaccatgttcaatactttaca

SEQ ID NO: 5967920 - DNA, 25 bp, Homo sapien
cctttgttcccaggcagagactatc

SEQ ID NO: 5967921 - DNA, 25 bp, Homo sapien
aacctgttactaaattccaattgtg

SEQ ID NO: 5967922 - DNA, 25 bp, Homo sapien
ttggtaggattcatgacggagtacg

SEQ ID NO: 5967923 - DNA, 25 bp, Homo sapien
cttgccatgggagaccgtctggtca

SEQ ID NO: 5967924 - DNA, 25 bp, Homo sapien
acaaaagaataagcgcagcagaagc

SEQ ID NO: 5967925 - DNA, 25 bp, Homo sapien
tttcgaagactttaatcagatcaaa

SEQ ID NO: 5967926 - DNA, 25 bp, Homo sapien
aagtctattcacagtgcacaagtta

SEQ ID NO: 5967927 - DNA, 25 bp, Homo sapien
tcagcaattcataagccttccggca

SEQ ID NO: 5967928 - DNA, 25 bp, Homo sapien
acggtatttccatgaacacgaaaac

SEQ ID NO: 5967929 - DNA, 25 bp, Homo sapien
aatcctcagagccttaaagtctatt

SEQ ID NO: 5967930 - DNA, 25 bp, Homo sapien
aaaatgcttcaattcaatcctgaca

SEQ ID NO: 5967931 - DNA, 25 bp, Homo sapien
ctattcacagtgcacaagttatcca

SEQ ID NO: 5967932 - DNA, 25 bp, Homo sapien
cttttgatatcccttcccaatataa

SEQ ID NO: 5967933 - DNA, 25 bp, Homo sapien
tttaagtgatgaccatgttcaatac

SEQ ID NO: 5967934 - DNA, 25 bp, Homo sapien
tgaattttggaaactggataacaag

SEQ ID NO: 5967935 - DNA, 25 bp, Homo sapien
ctgaaatggtctccgggaagccttt

SEQ ID NO: 5967936 - DNA, 25 bp, Homo sapien
caagtgatgagccggaatatcctcc

SEQ ID NO: 5967937 - DNA, 25 bp, Homo sapien
ttgtgatctcaaagtctgcgatttt

SEQ ID NO: 5967938 - DNA, 25 bp, Homo sapien
aaagacatgctttacgatgaactaa

SEQ ID NO: 5967939 - DNA, 25 bp, Homo sapien
ccataacttttgatatcccttccca

SEQ ID NO: 5967940 - DNA, 25 bp, Homo sapien
gacacccttacctggcaatgtacca

SEQ ID NO: 5967941 - DNA, 25 bp, Homo sapien
agaaatgctcaaagacatgctttac

SEQ ID NO: 5967942 - DNA, 25 bp, Homo sapien
aacttacctatgaggccacccttgc

SEQ ID NO: 5967943 - DNA, 25 bp, Homo sapien
acataccaaatcctcagagccttaa

SEQ ID NO: 5967944 - DNA, 25 bp, Homo sapien
gtatattggataaagtaaggccagt

SEQ ID NO: 5967945 - DNA, 25 bp, Homo sapien
gaactccatctttcgaagactttaa

SEQ ID NO: 5967946 - DNA, 25 bp, Homo sapien
ctggtcaaagaccgatctgaatcca

SEQ ID NO: 5967947 - DNA, 25 bp, Homo sapien
gagccttaaagtctattcacagtgc

SEQ ID NO: 5967948 - DNA, 25 bp, Homo sapien
ttttccactttaagtgatgaccatg

SEQ ID NO: 5967949 - DNA, 25 bp, Homo sapien
gtctccgggaagcctttgttcccag

SEQ ID NO: 5967950 - DNA, 25 bp, Homo sapien
aggccacccttgccatgggagaccg

SEQ ID NO: 5967951 - DNA, 25 bp, Homo sapien
taccatgacccaagtgatgagccgg

SEQ ID NO: 5967952 - DNA, 25 bp, Homo sapien
tcaaagacatgctttacgatgaact

SEQ ID NO: 5967953 - DNA, 25 bp, Homo sapien
ttactaaattccaattgtgatctca

SEQ ID NO: 5967954 - DNA, 25 bp, Homo sapien
gggaactccatctttcgaagacttt

SEQ ID NO: 5967955 - DNA, 25 bp, Homo sapien
aagagtatatagcaaacttacctat

SEQ ID NO: 5967956 - DNA, 25 bp, Homo sapien
gaatatcctccacttaatttggatg

SEQ ID NO: 5967957 - DNA, 25 bp, Homo sapien
tgaggccacccttgccatgggagac

SEQ ID NO: 5967958 - DNA, 25 bp, Homo sapien
tagatttaataggtgagggagcgta

SEQ ID NO: 5967959 - DNA, 25 bp, Homo sapien
ctaaacgctgtttatttagtcgaag

SEQ ID NO: 5967960 - DNA, 25 bp, Homo sapien
ggtaggattcatgacggagtacgtc

SEQ ID NO: 5967961 - DNA, 25 bp, Homo sapien
gataatgcgtccggaagaggaggaa

SEQ ID NO: 5967962 - DNA, 25 bp, Homo sapien
tttacgatgaactaatgaagaccat

SEQ ID NO: 5967963 - DNA, 25 bp, Homo sapien
ccatagagacataaagccatcaaac

SEQ ID NO: 5967964 - DNA, 25 bp, Homo sapien
ttttggaaactggataacaagataa

SEQ ID NO: 5967965 - DNA, 25 bp, Homo sapien
atatcccttcccaatataaactcgt

SEQ ID NO: 5967966 - DNA, 25 bp, Homo sapien
tctagaagtcttgggaactccatct

SEQ ID NO: 5967967 - DNA, 25 bp, Homo sapien
aagaggaggaagaagtgcccataga

SEQ ID NO: 5967968 - DNA, 25 bp, Homo sapien
cccaagtgatgagccggaatatcct

SEQ ID NO: 5967969 - DNA, 25 bp, Homo sapien
gaagtcttgggaactccatctttcg

SEQ ID NO: 5967970 - DNA, 25 bp, Homo sapien
tgatgagccggaatatcctccactt

SEQ ID NO: 5967971 - DNA, 25 bp, Homo sapien
gggaagcctttgttcccaggcagag

SEQ ID NO: 5967972 - DNA, 25 bp, Homo sapien
aactgcgatggatatatggtcatgc

SEQ ID NO: 5967973 - DNA, 25 bp, Homo sapien
tcgaagactttaatcagatcaaatc

SEQ ID NO: 5967974 - DNA, 25 bp, Homo sapien
tcttgggaactccatctttcgaaga

SEQ ID NO: 5967975 - DNA, 25 bp, Homo sapien
ccatagaaatgctcaaagacatgct

SEQ ID NO: 5967976 - DNA, 25 bp, Homo sapien
cctggcaatgtaccatgacccaagt

SEQ ID NO: 5967977 - DNA, 25 bp, Homo sapien
gagttgatggaaaccgatttacaaa

SEQ ID NO: 5967978 - DNA, 25 bp, Homo sapien
tcccaatataaactcgtagatttaa

SEQ ID NO: 5967979 - DNA, 25 bp, Homo sapien
ggaagaggaggaagaagtgcccata

SEQ ID NO: 5967980 - DNA, 25 bp, Homo sapien
aactaaacgctgtttatttagtcga

SEQ ID NO: 5967981 - DNA, 25 bp, Homo sapien
ataagcgcagcagaagctttaagac

SEQ ID NO: 5967982 - DNA, 25 bp, Homo sapien
gagaaacattggtaggattcatgac

SEQ ID NO: 5967983 - DNA, 25 bp, Homo sapien
atatgatagatttactagacaaaat

SEQ ID NO: 5967984 - DNA, 25 bp, Homo sapien
tgccatgggagaccgtctggtcaaa

SEQ ID NO: 5967985 - DNA, 25 bp, Homo sapien
tggctaattctagaagtcttgggaa

SEQ ID NO: 5967986 - DNA, 25 bp, Homo sapien
tcataagccttccggcataaaggta

SEQ ID NO: 5967987 - DNA, 25 bp, Homo sapien
gagcgtacggaacagtatgttcagc

SEQ ID NO: 5967988 - DNA, 25 bp, Homo sapien
ccaattgtgatctcaaagtctgcga

SEQ ID NO: 5967989 - DNA, 25 bp, Homo sapien
ataaagccatcaaacctgttactaa

SEQ ID NO: 5967990 - DNA, 25 bp, Homo sapien
aatgcttcaattcaatcctgacaaa

SEQ ID NO: 5967991 - DNA, 25 bp, Homo sapien
tttggactagcgaggtgtttagcta

SEQ ID NO: 5967992 - DNA, 25 bp, Homo sapien
aggcttcccggagaccatttcagcc

SEQ ID NO: 5967993 - DNA, 25 bp, Homo sapien
ttctagaattagccataattgatga

SEQ ID NO: 5967994 - DNA, 25 bp, Homo sapien
ccatatatccatcgcagttgtgtac

SEQ ID NO: 5967995 - DNA, 25 bp, Homo sapien
catcgtaaagcatgtctttgagcat

SEQ ID NO: 5967996 - DNA, 25 bp, Homo sapien
acattgccaggtaagggtgtcttaa

SEQ ID NO: 5967997 - DNA, 25 bp, Homo sapien
ctaaataaacagcgtttagtttgtc

SEQ ID NO: 5967998 - DNA, 25 bp, Homo sapien
ttcctcctcttccggacgcattatc

SEQ ID NO: 5967999 - DNA, 25 bp, Homo sapien
ggcttatgaattgctgaacatactg

SEQ ID NO: 5968000 - DNA, 25 bp, Homo sapien
acgagtttatattgggaagggatat

SEQ ID NO: 5968001 - DNA, 25 bp, Homo sapien
tttttgtaaatcggtttccatcaac

SEQ ID NO: 5968002 - DNA, 25 bp, Homo sapien
gccaaaatgcatccgcatgaccata

SEQ ID NO: 5968003 - DNA, 25 bp, Homo sapien
cagatcggtctttgaccagacggtc

SEQ ID NO: 5968004 - DNA, 25 bp, Homo sapien
actggccttactttatccaatatac

SEQ ID NO: 5968005 - DNA, 25 bp, Homo sapien
tggaaaacccgctattctgattatt

SEQ ID NO: 5968006 - DNA, 25 bp, Homo sapien
aacacctcgctagtccaaaatcgca

SEQ ID NO: 5968007 - DNA, 25 bp, Homo sapien
gtaaatctatcatatctggattcag

SEQ ID NO: 5968008 - DNA, 25 bp, Homo sapien
tccggacgcattatcttgttatcca

SEQ ID NO: 5968009 - DNA, 25 bp, Homo sapien
cgttgcgacgtactccgtcatgaat

SEQ ID NO: 5968010 - DNA, 25 bp, Homo sapien
tagctacctttatgccggaaggctt

SEQ ID NO: 5968011 - DNA, 25 bp, Homo sapien
ttatattgggaagggatatcaaaag

SEQ ID NO: 5968012 - DNA, 25 bp, Homo sapien
gctatatactctttagccctcttgg

SEQ ID NO: 5968013 - DNA, 25 bp, Homo sapien
tatgaattgctgaacatactgttcc

SEQ ID NO: 5968014 - DNA, 25 bp, Homo sapien
ccggaaggcttatgaattgctgaac

SEQ ID NO: 5968015 - DNA, 25 bp, Homo sapien
ataccgtaaaagcttgatctcacgt

SEQ ID NO: 5968016 - DNA, 25 bp, Homo sapien
tggtcatcacttaaagtggaaaacc

SEQ ID NO: 5968017 - DNA, 25 bp, Homo sapien
aaacggttgtattttcttgatagct

SEQ ID NO: 5968018 - DNA, 25 bp, Homo sapien
tggctttatgtctctatggataact

SEQ ID NO: 5968019 - DNA, 25 bp, Homo sapien
gatagtctctgcctgggaacaaagg

SEQ ID NO: 5968020 - DNA, 25 bp, Homo sapien
aaatctatcatatctggattcagat

SEQ ID NO: 5968021 - DNA, 25 bp, Homo sapien
gccttactttatccaatatacttat

SEQ ID NO: 5968022 - DNA, 25 bp, Homo sapien
cgtactccgtcatgaatcctaccaa

SEQ ID NO: 5968023 - DNA, 25 bp, Homo sapien
catgaatcctaccaatgtttctctt

SEQ ID NO: 5968024 - DNA, 25 bp, Homo sapien
tgaatcctaccaatgtttctcttga

SEQ ID NO: 5968025 - DNA, 25 bp, Homo sapien
acttgggtcatggtacattgccagg

SEQ ID NO: 5968026 - DNA, 25 bp, Homo sapien
tgaacatactgttccgtacgctccc

SEQ ID NO: 5968027 - DNA, 25 bp, Homo sapien
gttagcattatctcgggtgccctgt

SEQ ID NO: 5968028 - DNA, 25 bp, Homo sapien
tttatgccggaaggcttatgaattg

SEQ ID NO: 5968029 - DNA, 25 bp, Homo sapien
tttgagatcacaattggaatttagt

SEQ ID NO: 5968030 - DNA, 25 bp, Homo sapien
cttattcttttgtcaggattgaatt

SEQ ID NO: 5968031 - DNA, 25 bp, Homo sapien
gaacaaaggcttcccggagaccatt

SEQ ID NO: 5968032 - DNA, 25 bp, Homo sapien
ccatcgcagttgtgtactcttgaaa

SEQ ID NO: 5968033 - DNA, 25 bp, Homo sapien
tggattcagatcggtctttgaccag

SEQ ID NO: 5968034 - DNA, 25 bp, Homo sapien
atggtcttcattagttcatcgtaaa

SEQ ID NO: 5968035 - DNA, 25 bp, Homo sapien
ccagtttccaaaattcatcatccaa

SEQ ID NO: 5968036 - DNA, 25 bp, Homo sapien
ttcttgtaacaaacaattttttgct

SEQ ID NO: 5968037 - DNA, 25 bp, Homo sapien
tcacttaaagtggaaaacccgctat

SEQ ID NO: 5968038 - DNA, 25 bp, Homo sapien
ccaaaatcgcagactttgagatcac

SEQ ID NO: 5968039 - DNA, 25 bp, Homo sapien
attcatcatccaaattaagtggagg

SEQ ID NO: 5968040 - DNA, 25 bp, Homo sapien
ccgcatgaccatatatccatcgcag

SEQ ID NO: 5968041 - DNA, 25 bp, Homo sapien
tatagttcttgtaacaaacaatttt

SEQ ID NO: 5968042 - DNA, 25 bp, Homo sapien
aaatgcatccgcatgaccatatatc

SEQ ID NO: 5968043 - DNA, 25 bp, Homo sapien
tgaacatggtcatcacttaaagtgg

SEQ ID NO: 5968044 - DNA, 25 bp, Homo sapien
ttgaattgaagcattttgtctagta

SEQ ID NO: 5968045 - DNA, 25 bp, Homo sapien
atctatcatatctggattcagatcg

SEQ ID NO: 5968046 - DNA, 25 bp, Homo sapien
agttcatcgtaaagcatgtctttga

SEQ ID NO: 5968047 - DNA, 25 bp, Homo sapien
gtctatggatactggccttacttta

SEQ ID NO: 5968048 - DNA, 25 bp, Homo sapien
tatgccggaaggcttatgaattgct

SEQ ID NO: 5968049 - DNA, 25 bp, Homo sapien
tcataggtaagtttgctatatactc

SEQ ID NO: 5968050 - DNA, 25 bp, Homo sapien
gcatgaccatatatccatcgcagtt

SEQ ID NO: 5968051 - DNA, 25 bp, Homo sapien
ccgctattctgattattaattactt

SEQ ID NO: 5968052 - DNA, 25 bp, Homo sapien
ctcatcacttgggtcatggtacatt

SEQ ID NO: 5968053 - DNA, 25 bp, Homo sapien
tagcattatctcgggtgccctgtac

SEQ ID NO: 5968054 - DNA, 25 bp, Homo sapien
tcaactcttcgactaaataaacagc

SEQ ID NO: 5968055 - DNA, 25 bp, Homo sapien
aatagactttaaggctctgaggatt

SEQ ID NO: 5968056 - DNA, 25 bp, Homo sapien
tttgagcatttctatgggcacttct

SEQ ID NO: 5968057 - DNA, 25 bp, Homo sapien
aattgctgaacatactgttccgtac

SEQ ID NO: 5968058 - DNA, 25 bp, Homo sapien
tacttattatgttttcgtgttcatg

SEQ ID NO: 5968059 - DNA, 25 bp, Homo sapien
tcatggaaataccgtaaaagcttga

SEQ ID NO: 5968060 - DNA, 25 bp, Homo sapien
tgtaaagtattgaacatggtcatca

SEQ ID NO: 5968061 - DNA, 25 bp, Homo sapien
ggatactggccttactttatccaat

SEQ ID NO: 5968062 - DNA, 25 bp, Homo sapien
ccaggtaagggtgtcttaaagcttc

SEQ ID NO: 5968063 - DNA, 25 bp, Homo sapien
tatggataacttgtgcactgtgaat

SEQ ID NO: 5968064 - DNA, 25 bp, Homo sapien
atccagtttccaaaattcatcatcc

SEQ ID NO: 5968065 - DNA, 25 bp, Homo sapien
atcttgttatccagtttccaaaatt

SEQ ID NO: 5968066 - DNA, 25 bp, Homo sapien
aaagtcttcgaaagatggagttccc

SEQ ID NO: 5968067 - DNA, 25 bp, Homo sapien
tgtgtactcttgaaaagttagcatt

SEQ ID NO: 5968068 - DNA, 25 bp, Homo sapien
tcttcctcctcttccggacgcatta

SEQ ID NO: 5968069 - DNA, 25 bp, Homo sapien
cctttatgccggaaggcttatgaat

SEQ ID NO: 5968070 - DNA, 25 bp, Homo sapien
aagtggaggatattccggctcatca

SEQ ID NO: 5968071 - DNA, 25 bp, Homo sapien
ttaaagtggaaaacccgctattctg

SEQ ID NO: 5968072 - DNA, 25 bp, Homo sapien
ctcccatggcaagggtggcctcata

SEQ ID NO: 5968073 - DNA, 25 bp, Homo sapien
gatttgatctgattaaagtcttcga

SEQ ID NO: 5968074 - DNA, 25 bp, Homo sapien
taacaggtttgatggctttatgtct

SEQ ID NO: 5968075 - DNA, 25 bp, Homo sapien
gttttcgtgttcatggaaataccgt

SEQ ID NO: 5968076 - DNA, 25 bp, Homo sapien
gttcatggaaataccgtaaaagctt

SEQ ID NO: 5968077 - DNA, 25 bp, Homo sapien
aacatggtcatcacttaaagtggaa

SEQ ID NO: 5968078 - DNA, 25 bp, Homo sapien
tcggtttccatcaactcttcgacta

SEQ ID NO: 5968079 - DNA, 25 bp, Homo sapien
tttccaaaattcatcatccaaatta

SEQ ID NO: 5968080 - DNA, 25 bp, Homo sapien
ctagaattagccataattgatgatg

SEQ ID NO: 5968081 - DNA, 25 bp, Homo sapien
tactccgtcatgaatcctaccaatg

SEQ ID NO: 5968082 - DNA, 25 bp, Homo sapien
aggtaagtttgctatatactcttta

SEQ ID NO: 5968083 - DNA, 25 bp, Homo sapien
cttaaagcttctgctgcgcttattc

SEQ ID NO: 5968084 - DNA, 25 bp, Homo sapien
agacttctagaattagccataattg

SEQ ID NO: 5968085 - DNA, 25 bp, Homo sapien
cacctcgctagtccaaaatcgcaga

SEQ ID NO: 5968086 - DNA, 25 bp, Homo sapien
cagttgtgtactcttgaaaagttag

SEQ ID NO: 5968087 - DNA, 25 bp, Homo sapien
atttggtatgtaaagtattgaacat

SEQ ID NO: 5968088 - DNA, 25 bp, Homo sapien
gctttatgtctctatggataacttg

SEQ ID NO: 5968089 - DNA, 25 bp, Homo sapien
catggcaagggtggcctcataggta

SEQ ID NO: 5968090 - DNA, 25 bp, Homo sapien
ctcttggatttgatctgattaaagt

SEQ ID NO: 5968091 - DNA, 25 bp, Homo sapien
cacaattggaatttagtaacaggtt

SEQ ID NO: 5968092 - DNA, 25 bp, Homo sapien
ttggtatgtaaagtattgaacatgg

SEQ ID NO: 5968093 - DNA, 25 bp, Homo sapien
aggattgaattgaagcattttgtct

SEQ ID NO: 5968094 - DNA, 25 bp, Homo sapien
tcgactaaataaacagcgtttagtt

SEQ ID NO: 5968095 - DNA, 25 bp, Homo sapien
tcgctagtccaaaatcgcagacttt

SEQ ID NO: 5968096 - DNA, 25 bp, Homo sapien
attgccaggtaagggtgtcttaaag

SEQ ID NO: 5968097 - DNA, 25 bp, Homo sapien
ggtatgtaaagtattgaacatggtc

SEQ ID NO: 5968098 - DNA, 25 bp, Homo sapien
gattgaattgaagcattttgtctag

SEQ ID NO: 5968099 - DNA, 25 bp, Homo sapien
agtttccaaaattcatcatccaaat

SEQ ID NO: 5968100 - DNA, 25 bp, Homo sapien
caattggaatttagtaacaggtttg

SEQ ID NO: 5968101 - DNA, 25 bp, Homo sapien
gtctctgcctgggaacaaaggcttc

SEQ ID NO: 5968102 - DNA, 25 bp, Homo sapien
gaatttagtaacaggtttgatggct

SEQ ID NO: 5968103 - DNA, 25 bp, Homo sapien
cggagaccatttcagccaaaatgca

SEQ ID NO: 5968104 - DNA, 25 bp, Homo sapien
tcaggattgaattgaagcattttgt

SEQ ID NO: 5968105 - DNA, 25 bp, Homo sapien
cgctccctcacctattaaatctacg

SEQ ID NO: 5968106 - DNA, 25 bp, Homo sapien
tgagcatttctatgggcacttcttc

SEQ ID NO: 5968107 - DNA, 25 bp, Homo sapien
tgtctctatggataacttgtgcact

SEQ ID NO: 5968108 - DNA, 25 bp, Homo sapien
agcatgtctttgagcatttctatgg

SEQ ID NO: 5968109 - DNA, 25 bp, Homo sapien
atcatatctggattcagatcggtct

SEQ ID NO: 5968110 - DNA, 25 bp, Homo sapien
atctcacgtatagttcttgtaacaa

SEQ ID NO: 5968111 - DNA, 25 bp, Homo sapien
ttaaggctctgaggatttggtatgt

SEQ ID NO: 5968112 - DNA, 25 bp, Homo sapien
aatcctaccaatgtttctcttgaat

SEQ ID NO: 5968113 - DNA, 25 bp, Homo sapien
actttttgtaaatcggtttccatca

SEQ ID NO: 5968114 - DNA, 25 bp, Homo sapien
tgatctgattaaagtcttcgaaaga

SEQ ID NO: 5968115 - DNA, 25 bp, Homo sapien
gtaaagcatgtctttgagcatttct

SEQ ID NO: 5968116 - DNA, 25 bp, Homo sapien
ccatggtcttcattagttcatcgta

SEQ ID NO: 5968117 - DNA, 25 bp, Homo sapien
agtcttcgaaagatggagttcccaa

SEQ ID NO: 5968118 - DNA, 25 bp, Homo sapien
gtcatggtacattgccaggtaaggg

SEQ ID NO: 5968119 - DNA, 25 bp, Homo sapien
cccaagacttctagaattagccata

SEQ ID NO: 5968120 - DNA, 25 bp, Homo sapien
tttcttgatagctacctttatgccg

SEQ ID NO: 5968121 - DNA, 25 bp, Homo sapien
accagacggtctcccatggcaaggg

SEQ ID NO: 5968122 - DNA, 25 bp, Homo sapien
aaaatcgcagactttgagatcacaa

SEQ ID NO: 5968123 - DNA, 25 bp, Homo sapien
gtattttcttgatagctacctttat

SEQ ID NO: 5968124 - DNA, 25 bp, Homo sapien
caagacttctagaattagccataat

SEQ ID NO: 5968125 - DNA, 25 bp, Homo sapien
tccaaattaagtggaggatattccg

SEQ ID NO: 5968126 - DNA, 25 bp, Homo sapien
cagccaaaatgcatccgcatgacca

SEQ ID NO: 5968127 - DNA, 25 bp, Homo sapien
aaaagttagcattatctcgggtgcc

SEQ ID NO: 5968128 - DNA, 25 bp, Homo sapien
atgaccatatatccatcgcagttgt

SEQ ID NO: 5968129 - DNA, 25 bp, Homo sapien
ttcccaagacttctagaattagcca

SEQ ID NO: 5968130 - DNA, 25 bp, Homo sapien
ctgctagctaaacacctcgctagtc

SEQ ID NO: 5968131 - DNA, 25 bp, Homo sapien
cagacggtctcccatggcaagggtg

SEQ ID NO: 5968132 - DNA, 25 bp, Homo sapien
attgaagcattttgtctagtaaatc

SEQ ID NO: 5968133 - DNA, 25 bp, Homo sapien
tgaatcgctactgctagctaaacac

SEQ ID NO: 5968134 - DNA, 25 bp, Homo sapien
agatggagttcccaagacttctaga

SEQ ID NO: 5968135 - DNA, 25 bp, Homo sapien
ggtctttgaccagacggtctcccat

SEQ ID NO: 5968136 - DNA, 25 bp, Homo sapien
gggtgccctgtaccatcgcgttgcg

SEQ ID NO: 5968137 - DNA, 25 bp, Homo sapien
cggtctcccatggcaagggtggcct

SEQ ID NO: 5968138 - DNA, 25 bp, Homo sapien
cttccggacgcattatcttgttatc

SEQ ID NO: 5968139 - DNA, 25 bp, Homo sapien
caaattaagtggaggatattccggc

SEQ ID NO: 5968140 - DNA, 25 bp, Homo sapien
gctaaacacctcgctagtccaaaat

SEQ ID NO: 5968141 - DNA, 25 bp, Homo sapien
caaaattcatcatccaaattaagtg

SEQ ID NO: 5968142 - DNA, 25 bp, Homo sapien
aaggcttatgaattgctgaacatac

SEQ ID NO: 5968143 - DNA, 25 bp, Homo sapien
ctatcatatctggattcagatcggt

SEQ ID NO: 5968144 - DNA, 25 bp, Homo sapien
aagggatatcaaaagttatggttct

SEQ ID NO: 5968145 - DNA, 25 bp, Homo sapien
ggaggatattccggctcatcacttg

SEQ ID NO: 5968146 - DNA, 25 bp, Homo sapien
aatcgctactgctagctaaacacct

SEQ ID NO: 5968147 - DNA, 25 bp, Homo sapien
cttgatctcacgtatagttcttgta

SEQ ID NO: 5968148 - DNA, 25 bp, Homo sapien
gtgcactgtgaatagactttaaggc

SEQ ID NO: 5968149 - DNA, 25 bp, Homo sapien
tgaccagacggtctcccatggcaag

SEQ ID NO: 5968150 - DNA, 25 bp, Homo sapien
cacgtatagttcttgtaacaaacaa

SEQ ID NO: 5968151 - DNA, 25 bp, Homo sapien
aaacccgctattctgattattaatt

SEQ ID NO: 5968152 - DNA, 25 bp, Homo sapien
gtttgctatatactctttagccctc

SEQ ID NO: 5968153 - DNA, 25 bp, Homo sapien
gacggtctcccatggcaagggtggc

SEQ ID NO: 5968154 - DNA, 25 bp, Homo sapien
acagcgtttagtttgtctatggata

SEQ ID NO: 5968155 - DNA, 25 bp, Homo sapien
tagctaaacacctcgctagtccaaa

SEQ ID NO: 5968156 - DNA, 25 bp, Homo sapien
gaattgaagcattttgtctagtaaa

SEQ ID NO: 5968157 - DNA, 25 bp, Homo sapien
ttcagccaaaatgcatccgcatgac

SEQ ID NO: 5968158 - DNA, 25 bp, Homo sapien
gtaagggtgtcttaaagcttctgct

SEQ ID NO: 5968159 - DNA, 25 bp, Homo sapien
tctatgggcacttcttcctcctctt

SEQ ID NO: 5968160 - DNA, 25 bp, Homo sapien
ttaaagtcttcgaaagatggagttc

SEQ ID NO: 5968161 - DNA, 25 bp, Homo sapien
gggtgtcttaaagcttctgctgcgc

SEQ ID NO: 5968162 - DNA, 25 bp, Homo sapien
ccatttcagccaaaatgcatccgca

SEQ ID NO: 5968163 - DNA, 25 bp, Homo sapien
atatccatcgcagttgtgtactctt

SEQ ID NO: 5968164 - DNA, 25 bp, Homo sapien
tttgtctagtaaatctatcatatct

SEQ ID NO: 5968165 - DNA, 25 bp, Homo sapien
ttcagatcggtctttgaccagacgg

SEQ ID NO: 5968166 - DNA, 25 bp, Homo sapien
acttctagaattagccataattgat

SEQ ID NO: 5968167 - DNA, 25 bp, Homo sapien
ataattgatgatgatagtctctgcc

SEQ ID NO: 5968168 - DNA, 25 bp, Homo sapien
ctttaaggctctgaggatttggtat

SEQ ID NO: 5968169 - DNA, 25 bp, Homo sapien
tccaaaattcatcatccaaattaag

SEQ ID NO: 5968170 - DNA, 25 bp, Homo sapien
agcttgatctcacgtatagttcttg

SEQ ID NO: 5968171 - DNA, 25 bp, Homo sapien
tcggtctttgaccagacggtctccc

SEQ ID NO: 5968172 - DNA, 25 bp, Homo sapien
aattgatgatgatagtctctgcctg

SEQ ID NO: 5968173 - DNA, 25 bp, Homo sapien
ttgatagctacctttatgccggaag

SEQ ID NO: 5968174 - DNA, 25 bp, Homo sapien
tctttgagcatttctatgggcactt

SEQ ID NO: 5968175 - DNA, 25 bp, Homo sapien
ttagtaacaggtttgatggctttat

SEQ ID NO: 5968176 - DNA, 25 bp, Homo sapien
gagaccatttcagccaaaatgcatc

SEQ ID NO: 5968177 - DNA, 25 bp, Homo sapien
atccgcatgaccatatatccatcgc

SEQ ID NO: 5968178 - DNA, 25 bp, Homo sapien
ttgtgcactgtgaatagactttaag

SEQ ID NO: 5968179 - DNA, 25 bp, Homo sapien
acggttgtattttcttgatagctac

SEQ ID NO: 5968180 - DNA, 25 bp, Homo sapien
gattcagatcggtctttgaccagac

SEQ ID NO: 5968181 - DNA, 25 bp, Homo sapien
ttaagtggaggatattccggctcat

SEQ ID NO: 5968182 - DNA, 25 bp, Homo sapien
ctccctcacctattaaatctacgag

SEQ ID NO: 5968183 - DNA, 25 bp, Homo sapien
ttagttcatcgtaaagcatgtcttt

SEQ ID NO: 5968184 - DNA, 25 bp, Homo sapien
cctcctcttccggacgcattatctt

SEQ ID NO: 5968185 - DNA, 25 bp, Homo sapien
tatcaaaagttatggttctagccat

SEQ ID NO: 5968186 - DNA, 25 bp, Homo sapien
atggatactggccttactttatcca

SEQ ID NO: 5968187 - DNA, 25 bp, Homo sapien
aggtaagggtgtcttaaagcttctg

SEQ ID NO: 5968188 - DNA, 25 bp, Homo sapien
atgttttcgtgttcatggaaatacc

SEQ ID NO: 5968189 - DNA, 25 bp, Homo sapien
gttccgtacgctccctcacctatta

SEQ ID NO: 5968190 - DNA, 25 bp, Homo sapien
tctctatggataacttgtgcactgt

SEQ ID NO: 5968191 - DNA, 25 bp, Homo sapien
cgcgttgcgacgtactccgtcatga

SEQ ID NO: 5968192 - DNA, 25 bp, Homo sapien
taaaagcttgatctcacgtatagtt

SEQ ID NO: 5968193 - DNA, 25 bp, Homo sapien
tattccggctcatcacttgggtcat

SEQ ID NO: 5968194 - DNA, 25 bp, Homo sapien
aagcattttgtctagtaaatctatc

SEQ ID NO: 5968195 - DNA, 25 bp, Homo sapien
aggatattccggctcatcacttggg

SEQ ID NO: 5968196 - DNA, 25 bp, Homo sapien
atttagtaacaggtttgatggcttt

SEQ ID NO: 5968197 - DNA, 25 bp, Homo sapien
gggtcatggtacattgccaggtaag

SEQ ID NO: 5968198 - DNA, 25 bp, Homo sapien
tactgttccgtacgctccctcacct

SEQ ID NO: 5968199 - DNA, 25 bp, Homo sapien
tattaaatctacgagtttatattgg

SEQ ID NO: 5968200 - DNA, 25 bp, Homo sapien
ggaaggcttatgaattgctgaacat

SEQ ID NO: 5968201 - DNA, 25 bp, Homo sapien
ctgattaaagtcttcgaaagatgga

SEQ ID NO: 5968202 - DNA, 25 bp, Homo sapien
tcgggtgccctgtaccatcgcgttg

SEQ ID NO: 5968203 - DNA, 25 bp, Homo sapien
cttttgtcaggattgaattgaagca

SEQ ID NO: 5968204 - DNA, 25 bp, Homo sapien
ggttgtattttcttgatagctacct

SEQ ID NO: 5968205 - DNA, 25 bp, Homo sapien
aagggtggcctcataggtaagtttg

SEQ ID NO: 5968206 - DNA, 25 bp, Homo sapien
tttgtcaggattgaattgaagcatt

SEQ ID NO: 5968207 - DNA, 25 bp, Homo sapien
aagttagcattatctcgggtgccct

SEQ ID NO: 5968208 - DNA, 25 bp, Homo sapien
cccggagaccatttcagccaaaatg

SEQ ID NO: 5968209 - DNA, 25 bp, Homo sapien
ggatttggtatgtaaagtattgaac

SEQ ID NO: 5968210 - DNA, 25 bp, Homo sapien
atcatccaaattaagtggaggatat

SEQ ID NO: 5968211 - DNA, 25 bp, Homo sapien
cgtaaaagcttgatctcacgtatag

SEQ ID NO: 5968212 - DNA, 25 bp, Homo sapien
aaatctacgagtttatattgggaag

SEQ ID NO: 5968213 - DNA, 25 bp, Homo sapien
gggaacaaaggcttcccggagacca

SEQ ID NO: 5968214 - DNA, 25 bp, Homo sapien
ctgggaacaaaggcttcccggagac

SEQ ID NO: 5968215 - DNA, 25 bp, Homo sapien
gatcggtctttgaccagacggtctc

SEQ ID NO: 5968216 - DNA, 25 bp, Homo sapien
cttgtaacaaacaattttttgctaa

SEQ ID NO: 5968217 - DNA, 25 bp, Homo sapien
gactaaataaacagcgtttagtttg

SEQ ID NO: 5968218 - DNA, 25 bp, Homo sapien
gcattttgtctagtaaatctatcat

SEQ ID NO: 5968219 - DNA, 25 bp, Homo sapien
caaaatgcatccgcatgaccatata

SEQ ID NO: 5968220 - DNA, 25 bp, Homo sapien
attggaatttagtaacaggtttgat

SEQ ID NO: 5968221 - DNA, 25 bp, Homo sapien
ttcatcgtaaagcatgtctttgagc

SEQ ID NO: 5968222 - DNA, 25 bp, Homo sapien
aagtattgaacatggtcatcactta

SEQ ID NO: 5968223 - DNA, 25 bp, Homo sapien
tcctcttccggacgcattatcttgt

SEQ ID NO: 5968224 - DNA, 25 bp, Homo sapien
gtaagtttgctatatactctttagc

SEQ ID NO: 5968225 - DNA, 25 bp, Homo sapien
cttatgaattgctgaacatactgtt

SEQ ID NO: 5968226 - DNA, 25 bp, Homo sapien
aaagcatgtctttgagcatttctat

SEQ ID NO: 5968227 - DNA, 25 bp, Homo sapien
accgtaaaagcttgatctcacgtat

SEQ ID NO: 5968228 - DNA, 25 bp, Homo sapien
tgtaccatcgcgttgcgacgtactc

SEQ ID NO: 5968229 - DNA, 25 bp, Homo sapien
tcacttgggtcatggtacattgcca

SEQ ID NO: 5968230 - DNA, 25 bp, Homo sapien
gcttctgctgcgcttattcttttgt

SEQ ID NO: 5968231 - DNA, 25 bp, Homo sapien
ctacgagtttatattgggaagggat

SEQ ID NO: 5968232 - DNA, 25 bp, Homo sapien
taaacacctcgctagtccaaaatcg

SEQ ID NO: 5968233 - DNA, 25 bp, Homo sapien
gcatccgcatgaccatatatccatc

SEQ ID NO: 5968234 - DNA, 25 bp, Homo sapien
ggaagggatatcaaaagttatggtt

SEQ ID NO: 5968235 - DNA, 25 bp, Homo sapien
agcgtttagtttgtctatggatact

SEQ ID NO: 5968236 - DNA, 25 bp, Homo sapien
cctgtaccatcgcgttgcgacgtac

SEQ ID NO: 5968237 - DNA, 25 bp, Homo sapien
tgaatagactttaaggctctgagga

SEQ ID NO: 5968238 - DNA, 25 bp, Homo sapien
acttgtgcactgtgaatagacttta

SEQ ID NO: 5968239 - DNA, 25 bp, Homo sapien
tgatgatagtctctgcctgggaaca

SEQ ID NO: 5968240 - DNA, 25 bp, Homo sapien
cattagttcatcgtaaagcatgtct

SEQ ID NO: 5968241 - DNA, 25 bp, Homo sapien
aattagccataattgatgatgatag

SEQ ID NO: 5968242 - DNA, 25 bp, Homo sapien
tgtgaatagactttaaggctctgag

SEQ ID NO: 5968243 - DNA, 25 bp, Homo sapien
ctcttgaatcgctactgctagctaa

SEQ ID NO: 5968244 - DNA, 25 bp, Homo sapien
tgtctagtaaatctatcatatctgg

SEQ ID NO: 5968245 - DNA, 25 bp, Homo sapien
ctctgcctgggaacaaaggcttccc

SEQ ID NO: 5968246 - DNA, 25 bp, Homo sapien
ctcttcgactaaataaacagcgttt

SEQ ID NO: 5968247 - DNA, 25 bp, Homo sapien
gggatatcaaaagttatggttctag

SEQ ID NO: 5968248 - DNA, 25 bp, Homo sapien
agcatttctatgggcacttcttcct

SEQ ID NO: 5968249 - DNA, 25 bp, Homo sapien
cttattatgttttcgtgttcatgga

SEQ ID NO: 5968250 - DNA, 25 bp, Homo sapien
ttccatggtcttcattagttcatcg

SEQ ID NO: 5968251 - DNA, 25 bp, Homo sapien
gttgtgtactcttgaaaagttagca

SEQ ID NO: 5968252 - DNA, 25 bp, Homo sapien
ttccggctcatcacttgggtcatgg

SEQ ID NO: 5968253 - DNA, 25 bp, Homo sapien
ctctgaggatttggtatgtaaagta

SEQ ID NO: 5968254 - DNA, 25 bp, Homo sapien
atcacaattggaatttagtaacagg

SEQ ID NO: 5968255 - DNA, 25 bp, Homo sapien
tacctttatgccggaaggcttatga

SEQ ID NO: 5968256 - DNA, 25 bp, Homo sapien
aaataaacagcgtttagtttgtcta

SEQ ID NO: 5968257 - DNA, 25 bp, Homo sapien
tcttgatagctacctttatgccgga

SEQ ID NO: 5968258 - DNA, 25 bp, Homo sapien
gaaaacccgctattctgattattaa

SEQ ID NO: 5968259 - DNA, 25 bp, Homo sapien
tggcaagggtggcctcataggtaag

SEQ ID NO: 5968260 - DNA, 25 bp, Homo sapien
cccatggcaagggtggcctcatagg

SEQ ID NO: 5968261 - DNA, 25 bp, Homo sapien
tatgtctctatggataacttgtgca

SEQ ID NO: 5968262 - DNA, 25 bp, Homo sapien
tcctaccaatgtttctcttgaatcg

SEQ ID NO: 5968263 - DNA, 25 bp, Homo sapien
attatctcgggtgccctgtaccatc

SEQ ID NO: 5968264 - DNA, 25 bp, Homo sapien
catgtctttgagcatttctatgggc

SEQ ID NO: 5968265 - DNA, 25 bp, Homo sapien
tactcttgaaaagttagcattatct

SEQ ID NO: 5968266 - DNA, 25 bp, Homo sapien
gtggaggatattccggctcatcact

SEQ ID NO: 5968267 - DNA, 25 bp, Homo sapien
aatcgcagactttgagatcacaatt

SEQ ID NO: 5968268 - DNA, 25 bp, Homo sapien
tgtaaatcggtttccatcaactctt

SEQ ID NO: 5968269 - DNA, 25 bp, Homo sapien
tatatactctttagccctcttggat

SEQ ID NO: 5968270 - DNA, 25 bp, Homo sapien
tgccggaaggcttatgaattgctga

SEQ ID NO: 5968271 - DNA, 25 bp, Homo sapien
tccgtacgctccctcacctattaaa

SEQ ID NO: 5968272 - DNA, 25 bp, Homo sapien
catcaactcttcgactaaataaaca

SEQ ID NO: 5968273 - DNA, 25 bp, Homo sapien
ccctcttggatttgatctgattaaa

SEQ ID NO: 5968274 - DNA, 25 bp, Homo sapien
tctggattcagatcggtctttgacc

SEQ ID NO: 5968275 - DNA, 25 bp, Homo sapien
gagtttatattgggaagggatatca

SEQ ID NO: 5968276 - DNA, 25 bp, Homo sapien
cctattaaatctacgagtttatatt

SEQ ID NO: 5968277 - DNA, 25 bp, Homo sapien
attttcttgatagctacctttatgc

SEQ ID NO: 5968278 - DNA, 25 bp, Homo sapien
aacatactgttccgtacgctccctc

SEQ ID NO: 5968279 - DNA, 25 bp, Homo sapien
atccatcgcagttgtgtactcttga

SEQ ID NO: 5968280 - DNA, 25 bp, Homo sapien
tttccatcaactcttcgactaaata

SEQ ID NO: 5968281 - DNA, 25 bp, Homo sapien
tactctttagccctcttggatttga

SEQ ID NO: 5968282 - DNA, 25 bp, Homo sapien
tagtccaaaatcgcagactttgaga

SEQ ID NO: 5968283 - DNA, 25 bp, Homo sapien
catcacttaaagtggaaaacccgct

SEQ ID NO: 5968284 - DNA, 25 bp, Homo sapien
ctccgtcatgaatcctaccaatgtt

SEQ ID NO: 5968285 - DNA, 25 bp, Homo sapien
ctgttccgtacgctccctcacctat

SEQ ID NO: 5968286 - DNA, 25 bp, Homo sapien
gtacattgccaggtaagggtgtctt

SEQ ID NO: 5968287 - DNA, 25 bp, Homo sapien
gcctgggaacaaaggcttcccggag

SEQ ID NO: 5968288 - DNA, 25 bp, Homo sapien
tggccttactttatccaatatactt

SEQ ID NO: 5968289 - DNA, 25 bp, Homo sapien
ttcgaaagatggagttcccaagact

SEQ ID NO: 5968290 - DNA, 25 bp, Homo sapien
tgggaagggatatcaaaagttatgg

SEQ ID NO: 5968291 - DNA, 25 bp, Homo sapien
attgaacatggtcatcacttaaagt

SEQ ID NO: 5968292 - DNA, 25 bp, Homo sapien
tttatgtctctatggataacttgtg

SEQ ID NO: 5968293 - DNA, 25 bp, Homo sapien
atgatagtctctgcctgggaacaaa

SEQ ID NO: 5968294 - DNA, 25 bp, Homo sapien
tttgatctgattaaagtcttcgaaa

SEQ ID NO: 5968295 - DNA, 25 bp, Homo sapien
ttgctgaacatactgttccgtacgc

SEQ ID NO: 5968296 - DNA, 25 bp, Homo sapien
cttgaatcgctactgctagctaaac

SEQ ID NO: 5968297 - DNA, 25 bp, Homo sapien
aaattcatcatccaaattaagtgga

SEQ ID NO: 5968298 - DNA, 25 bp, Homo sapien
tcttcgaaagatggagttcccaaga

SEQ ID NO: 5968299 - DNA, 25 bp, Homo sapien
gtcatgaatcctaccaatgtttctc

SEQ ID NO: 5968300 - DNA, 25 bp, Homo sapien
attgggaagggatatcaaaagttat

SEQ ID NO: 5968301 - DNA, 25 bp, Homo sapien
ttcattagttcatcgtaaagcatgt

SEQ ID NO: 5968302 - DNA, 25 bp, Homo sapien
agccataattgatgatgatagtctc

SEQ ID NO: 5968303 - DNA, 25 bp, Homo sapien
tgggcacttcttcctcctcttccgg

SEQ ID NO: 5968304 - DNA, 25 bp, Homo sapien
taaagcttctgctgcgcttattctt

SEQ ID NO: 5968305 - DNA, 25 bp, Homo sapien
gaccatttcagccaaaatgcatccg

SEQ ID NO: 5968306 - DNA, 25 bp, Homo sapien
tgatctcacgtatagttcttgtaac

SEQ ID NO: 5968307 - DNA, 25 bp, Homo sapien
atggagttcccaagacttctagaat

SEQ ID NO: 5968308 - DNA, 25 bp, Homo sapien
aaagtggaaaacccgctattctgat

SEQ ID NO: 5968309 - DNA, 25 bp, Homo sapien
tcgcagactttgagatcacaattgg

SEQ ID NO: 5968310 - DNA, 25 bp, Homo sapien
gctacctttatgccggaaggcttat

SEQ ID NO: 5968311 - DNA, 25 bp, Homo sapien
tgccaggtaagggtgtcttaaagct

SEQ ID NO: 5968312 - DNA, 25 bp, Homo sapien
gcagactttgagatcacaattggaa

SEQ ID NO: 5968313 - DNA, 25 bp, Homo sapien
atcgcagttgtgtactcttgaaaag

SEQ ID NO: 5968314 - DNA, 25 bp, Homo sapien
tatctggattcagatcggtctttga

SEQ ID NO: 5968315 - DNA, 25 bp, Homo sapien
tcgctactgctagctaaacacctcg

SEQ ID NO: 5968316 - DNA, 25 bp, Homo sapien
catggtacattgccaggtaagggtg

SEQ ID NO: 5968317 - DNA, 25 bp, Homo sapien
ctttagccctcttggatttgatctg

SEQ ID NO: 5968318 - DNA, 25 bp, Homo sapien
gcattatctcgggtgccctgtacca

SEQ ID NO: 5968319 - DNA, 25 bp, Homo sapien
gctagtccaaaatcgcagactttga

SEQ ID NO: 5968320 - DNA, 25 bp, Homo sapien
acaaaggcttcccggagaccatttc

SEQ ID NO: 5968321 - DNA, 25 bp, Homo sapien
tttctatgggcacttcttcctcctc

SEQ ID NO: 5968322 - DNA, 25 bp, Homo sapien
tatgtaaagtattgaacatggtcat

SEQ ID NO: 5968323 - DNA, 25 bp, Homo sapien
cggacgcattatcttgttatccagt

SEQ ID NO: 5968324 - DNA, 25 bp, Homo sapien
gatatcaaaagttatggttctagcc

SEQ ID NO: 5968325 - DNA, 25 bp, Homo sapien
taccatcgcgttgcgacgtactccg

SEQ ID NO: 5968326 - DNA, 25 bp, Homo sapien
atttcagccaaaatgcatccgcatg

SEQ ID NO: 5968327 - DNA, 25 bp, Homo sapien
tttcgtgttcatggaaataccgtaa

SEQ ID NO: 5968328 - DNA, 25 bp, Homo sapien
gtttgtctatggatactggccttac

SEQ ID NO: 5968329 - DNA, 25 bp, Homo sapien
gattaaagtcttcgaaagatggagt

SEQ ID NO: 5968330 - DNA, 25 bp, Homo sapien
cttcgactaaataaacagcgtttag

SEQ ID NO: 5968331 - DNA, 25 bp, Homo sapien
gtattgaacatggtcatcacttaaa

SEQ ID NO: 5968332 - DNA, 25 bp, Homo sapien
ttagccataattgatgatgatagtc

SEQ ID NO: 5968333 - DNA, 25 bp, Homo sapien
taaatcggtttccatcaactcttcg

SEQ ID NO: 5968334 - DNA, 25 bp, Homo sapien
aaagcttgatctcacgtatagttct

SEQ ID NO: 5968335 - DNA, 25 bp, Homo sapien
atgcatccgcatgaccatatatcca

SEQ ID NO: 5968336 - DNA, 25 bp, Homo sapien
ggcctcataggtaagtttgctatat

SEQ ID NO: 5968337 - DNA, 25 bp, Homo sapien
ttgctatatactctttagccctctt

SEQ ID NO: 5968338 - DNA, 25 bp, Homo sapien
gatgatgatagtctctgcctgggaa

SEQ ID NO: 5968339 - DNA, 25 bp, Homo sapien
gtgccctgtaccatcgcgttgcgac

SEQ ID NO: 5968340 - DNA, 25 bp, Homo sapien
aaacagcgtttagtttgtctatgga

SEQ ID NO: 5968341 - DNA, 25 bp, Homo sapien
ggtttccatcaactcttcgactaaa

SEQ ID NO: 5968342 - DNA, 25 bp, Homo sapien
ttctgctgcgcttattcttttgtca

SEQ ID NO: 5968343 - DNA, 25 bp, Homo sapien
aaaggcttcccggagaccatttcag

SEQ ID NO: 5968344 - DNA, 25 bp, Homo sapien
gctgcgcttattcttttgtcaggat

SEQ ID NO: 5968345 - DNA, 25 bp, Homo sapien
attttgtctagtaaatctatcatat

SEQ ID NO: 5968346 - DNA, 25 bp, Homo sapien
aaggctctgaggatttggtatgtaa

SEQ ID NO: 5968347 - DNA, 25 bp, Homo sapien
acccgctattctgattattaattac

SEQ ID NO: 5968348 - DNA, 25 bp, Homo sapien
tctcgggtgccctgtaccatcgcgt

SEQ ID NO: 5968349 - DNA, 25 bp, Homo sapien
cattatcttgttatccagtttccaa

SEQ ID NO: 5968350 - DNA, 25 bp, Homo sapien
tcatcatccaaattaagtggaggat

SEQ ID NO: 5968351 - DNA, 25 bp, Homo sapien
ttatcttgttatccagtttccaaaa

SEQ ID NO: 5968352 - DNA, 25 bp, Homo sapien
tggatttgatctgattaaagtcttc

SEQ ID NO: 5968353 - DNA, 25 bp, Homo sapien
tgttatccagtttccaaaattcatc

SEQ ID NO: 5968354 - DNA, 25 bp, Homo sapien
aagcttctgctgcgcttattctttt

SEQ ID NO: 5968355 - DNA, 25 bp, Homo sapien
tactgctagctaaacacctcgctag

SEQ ID NO: 5968356 - DNA, 25 bp, Homo sapien
tgaagcattttgtctagtaaatcta

SEQ ID NO: 5968357 - DNA, 25 bp, Homo sapien
ctcacgtatagttcttgtaacaaac

SEQ ID NO: 5968358 - DNA, 25 bp, Homo sapien
agttcccaagacttctagaattagc

SEQ ID NO: 5968359 - DNA, 25 bp, Homo sapien
tagtctctgcctgggaacaaaggct

SEQ ID NO: 5968360 - DNA, 25 bp, Homo sapien
ctcacctattaaatctacgagttta

SEQ ID NO: 5968361 - DNA, 25 bp, Homo sapien
gccctgtaccatcgcgttgcgacgt

SEQ ID NO: 5968362 - DNA, 25 bp, Homo sapien
tgaaaagttagcattatctcgggtg

SEQ ID NO: 5968363 - DNA, 25 bp, Homo sapien
ccatcgcgttgcgacgtactccgtc

SEQ ID NO: 5968364 - DNA, 25 bp, Homo sapien
atactggccttactttatccaatat

SEQ ID NO: 5968365 - DNA, 25 bp, Homo sapien
tatctcgggtgccctgtaccatcgc

SEQ ID NO: 5968366 - DNA, 25 bp, Homo sapien
ctgaggatttggtatgtaaagtatt

SEQ ID NO: 5968367 - DNA, 25 bp, Homo sapien
ctgctgcgcttattcttttgtcagg

SEQ ID NO: 5968368 - DNA, 25 bp, Homo sapien
gtcatcacttaaagtggaaaacccg

SEQ ID NO: 5968369 - DNA, 25 bp, Homo sapien
tgtcaggattgaattgaagcatttt

SEQ ID NO: 5968370 - DNA, 25 bp, Homo sapien
atggaaataccgtaaaagcttgatc

SEQ ID NO: 5968371 - DNA, 25 bp, Homo sapien
ctgcctgggaacaaaggcttcccgg

SEQ ID NO: 5968372 - DNA, 25 bp, Homo sapien
gcactgtgaatagactttaaggctc

SEQ ID NO: 5968373 - DNA, 25 bp, Homo sapien
ttgatgatgatagtctctgcctggg

SEQ ID NO: 5968374 - DNA, 25 bp, Homo sapien
taacttgtgcactgtgaatagactt

SEQ ID NO: 5968375 - DNA, 25 bp, Homo sapien
ttctcttgaatcgctactgctagct

SEQ ID NO: 5968376 - DNA, 25 bp, Homo sapien
atctacgagtttatattgggaaggg

SEQ ID NO: 5968377 - DNA, 25 bp, Homo sapien
ttagccctcttggatttgatctgat

SEQ ID NO: 5968378 - DNA, 25 bp, Homo sapien
gaggatttggtatgtaaagtattga

SEQ ID NO: 5968379 - DNA, 25 bp, Homo sapien
ccctcacctattaaatctacgagtt

SEQ ID NO: 5968380 - DNA, 25 bp, Homo sapien
acaggtttgatggctttatgtctct

SEQ ID NO: 5968381 - DNA, 25 bp, Homo sapien
tgtactcttgaaaagttagcattat

SEQ ID NO: 5968382 - DNA, 25 bp, Homo sapien
tgagatcacaattggaatttagtaa

SEQ ID NO: 5968383 - DNA, 25 bp, Homo sapien
ataaacagcgtttagtttgtctatg

SEQ ID NO: 5968384 - DNA, 25 bp, Homo sapien
aagtttgctatatactctttagccc

SEQ ID NO: 5968385 - DNA, 25 bp, Homo sapien
aagggtgtcttaaagcttctgctgc

SEQ ID NO: 5968386 - DNA, 25 bp, Homo sapien
agccctcttggatttgatctgatta

SEQ ID NO: 5968387 - DNA, 25 bp, Homo sapien
cacctattaaatctacgagtttata

SEQ ID NO: 5968388 - DNA, 25 bp, Homo sapien
gtttatattgggaagggatatcaaa

SEQ ID NO: 5968389 - DNA, 25 bp, Homo sapien
gtgtcttaaagcttctgctgcgctt

SEQ ID NO: 5968390 - DNA, 25 bp, Homo sapien
gtccaaaatcgcagactttgagatc

SEQ ID NO: 5968391 - DNA, 25 bp, Homo sapien
catatctggattcagatcggtcttt

SEQ ID NO: 5968392 - DNA, 25 bp, Homo sapien
ttatgttttcgtgttcatggaaata

SEQ ID NO: 5968393 - DNA, 25 bp, Homo sapien
aaataccgtaaaagcttgatctcac

SEQ ID NO: 5968394 - DNA, 25 bp, Homo sapien
tatgggcacttcttcctcctcttcc

SEQ ID NO: 5968395 - DNA, 25 bp, Homo sapien
gcaagggtggcctcataggtaagtt

SEQ ID NO: 5968396 - DNA, 25 bp, Homo sapien
gatattccggctcatcacttgggtc

SEQ ID NO: 5968397 - DNA, 25 bp, Homo sapien
gactttaaggctctgaggatttggt

SEQ ID NO: 5968398 - DNA, 25 bp, Homo sapien
gtctcccatggcaagggtggcctca

SEQ ID NO: 5968399 - DNA, 25 bp, Homo sapien
catttctatgggcacttcttcctcc

SEQ ID NO: 5968400 - DNA, 25 bp, Homo sapien
ctctttagccctcttggatttgatc

SEQ ID NO: 5968401 - DNA, 25 bp, Homo sapien
ggagttcccaagacttctagaatta

SEQ ID NO: 5968402 - DNA, 25 bp, Homo sapien
ttgcgacgtactccgtcatgaatcc

SEQ ID NO: 5968403 - DNA, 25 bp, Homo sapien
atattgggaagggatatcaaaagtt

SEQ ID NO: 5968404 - DNA, 25 bp, Homo sapien
tttgaccagacggtctcccatggca

SEQ ID NO: 5968405 - DNA, 25 bp, Homo sapien
tagtttgtctatggatactggcctt

SEQ ID NO: 5968406 - DNA, 25 bp, Homo sapien
gtttgatggctttatgtctctatgg

SEQ ID NO: 5968407 - DNA, 25 bp, Homo sapien
gatagctacctttatgccggaaggc

SEQ ID NO: 5968408 - DNA, 25 bp, Homo sapien
gtttctcttgaatcgctactgctag

SEQ ID NO: 5968409 - DNA, 25 bp, Homo sapien
cgcattatcttgttatccagtttcc

SEQ ID NO: 5968410 - DNA, 25 bp, Homo sapien
atctgattaaagtcttcgaaagatg

SEQ ID NO: 5968411 - DNA, 25 bp, Homo sapien
tttagtttgtctatggatactggcc

SEQ ID NO: 5968412 - DNA, 25 bp, Homo sapien
tattccatggtcttcattagttcat

SEQ ID NO: 5968413 - DNA, 25 bp, Homo sapien
cctcataggtaagtttgctatatac

SEQ ID NO: 5968414 - DNA, 25 bp, Homo sapien
cctcgctagtccaaaatcgcagact

SEQ ID NO: 5968415 - DNA, 25 bp, Homo sapien
agaattagccataattgatgatgat

SEQ ID NO: 5968416 - DNA, 25 bp, Homo sapien
tgtctttgagcatttctatgggcac

SEQ ID NO: 5968417 - DNA, 25 bp, Homo sapien
ctcttgaaaagttagcattatctcg

SEQ ID NO: 5968418 - DNA, 25 bp, Homo sapien
tgctaaacggttgtattttcttgat

SEQ ID NO: 5968419 - DNA, 25 bp, Homo sapien
aggtttgatggctttatgtctctat

SEQ ID NO: 5968420 - DNA, 25 bp, Homo sapien
catggtcatcacttaaagtggaaaa

SEQ ID NO: 5968421 - DNA, 25 bp, Homo sapien
agtggaaaacccgctattctgatta

SEQ ID NO: 5968422 - DNA, 25 bp, Homo sapien
atatatccatcgcagttgtgtactc

SEQ ID NO: 5968423 - DNA, 25 bp, Homo sapien
tggtacattgccaggtaagggtgtc

SEQ ID NO: 5968424 - DNA, 25 bp, Homo sapien
caatgtttctcttgaatcgctactg

SEQ ID NO: 5968425 - DNA, 25 bp, Homo sapien
actgtgaatagactttaaggctctg

SEQ ID NO: 5968426 - DNA, 25 bp, Homo sapien
tagtaaatctatcatatctggattc

SEQ ID NO: 5968427 - DNA, 25 bp, Homo sapien
gaccatatatccatcgcagttgtgt

SEQ ID NO: 5968428 - DNA, 25 bp, Homo sapien
ttgggtcatggtacattgccaggta

SEQ ID NO: 5968429 - DNA, 25 bp, Homo sapien
gatggctttatgtctctatggataa

SEQ ID NO: 5968430 - DNA, 25 bp, Homo sapien
catcacttgggtcatggtacattgc

SEQ ID NO: 5968431 - DNA, 25 bp, Homo sapien
ttaaatctacgagtttatattggga

SEQ ID NO: 5968432 - DNA, 25 bp, Homo sapien
tctatggataacttgtgcactgtga

SEQ ID NO: 5968433 - DNA, 25 bp, Homo sapien
tccatcaactcttcgactaaataaa

SEQ ID NO: 5968434 - DNA, 25 bp, Homo sapien
tagactttaaggctctgaggatttg

SEQ ID NO: 5968435 - DNA, 25 bp, Homo sapien
ctaccaatgtttctcttgaatcgct

SEQ ID NO: 5968436 - DNA, 25 bp, Homo sapien
ttatccagtttccaaaattcatcat

SEQ ID NO: 5968437 - DNA, 25 bp, Homo sapien
tgtaacaaacaattttttgctaaac

SEQ ID NO: 5968438 - DNA, 25 bp, Homo sapien
tcgtaaagcatgtctttgagcattt

SEQ ID NO: 5968439 - DNA, 25 bp, Homo sapien
gggtggcctcataggtaagtttgct

SEQ ID NO: 5968440 - DNA, 25 bp, Homo sapien
tattatgttttcgtgttcatggaaa

SEQ ID NO: 5968441 - DNA, 25 bp, Homo sapien
ttcttttgtcaggattgaattgaag

SEQ ID NO: 5968442 - DNA, 25 bp, Homo sapien
cgtttagtttgtctatggatactgg

SEQ ID NO: 5968443 - DNA, 25 bp, Homo sapien
actttgagatcacaattggaattta

SEQ ID NO: 5968444 - DNA, 25 bp, Homo sapien
cgtatagttcttgtaacaaacaatt

SEQ ID NO: 5968445 - DNA, 25 bp, Homo sapien
gtgttcatggaaataccgtaaaagc

SEQ ID NO: 5968446 - DNA, 25 bp, Homo sapien
tctttgaccagacggtctcccatgg

SEQ ID NO: 5968447 - DNA, 25 bp, Homo sapien
cttgaaaagttagcattatctcggg

SEQ ID NO: 5968448 - DNA, 25 bp, Homo sapien
tatactctttagccctcttggattt

SEQ ID NO: 5968449 - DNA, 25 bp, Homo sapien
ggaaataccgtaaaagcttgatctc

SEQ ID NO: 5968450 - DNA, 25 bp, Homo sapien
tcgtgttcatggaaataccgtaaaa

SEQ ID NO: 5968451 - DNA, 25 bp, Homo sapien
aatcggtttccatcaactcttcgac

SEQ ID NO: 5968452 - DNA, 25 bp, Homo sapien
gctactgctagctaaacacctcgct

SEQ ID NO: 5968453 - DNA, 25 bp, Homo sapien
ggctctgaggatttggtatgtaaag

SEQ ID NO: 5968454 - DNA, 25 bp, Homo sapien
gataacttgtgcactgtgaatagac

SEQ ID NO: 5968455 - DNA, 25 bp, Homo sapien
ctcttccggacgcattatcttgtta

SEQ ID NO: 5968456 - DNA, 25 bp, Homo sapien
ataggtaagtttgctatatactctt

SEQ ID NO: 5968457 - DNA, 25 bp, Homo sapien
tatacttattatgttttcgtgttca

SEQ ID NO: 5968458 - DNA, 25 bp, Homo sapien
gacgtactccgtcatgaatcctacc

SEQ ID NO: 5968459 - DNA, 25 bp, Homo sapien
ctatggatactggccttactttatc

SEQ ID NO: 5968460 - DNA, 25 bp, Homo sapien
tctagtaaatctatcatatctggat

SEQ ID NO: 5968461 - DNA, 25 bp, Homo sapien
ccggctcatcacttgggtcatggta

SEQ ID NO: 5968462 - DNA, 25 bp, Homo sapien
ccgtcatgaatcctaccaatgtttc

SEQ ID NO: 5968463 - DNA, 25 bp, Homo sapien
ggtcttcattagttcatcgtaaagc

SEQ ID NO: 5968464 - DNA, 25 bp, Homo sapien
ggctcatcacttgggtcatggtaca

SEQ ID NO: 5968465 - DNA, 25 bp, Homo sapien
gcttcccggagaccatttcagccaa

SEQ ID NO: 5968466 - DNA, 25 bp, Homo sapien
tattcttttgtcaggattgaattga

SEQ ID NO: 5968467 - DNA, 25 bp, Homo sapien
gtcttaaagcttctgctgcgcttat

SEQ ID NO: 5968468 - DNA, 25 bp, Homo sapien
tggataacttgtgcactgtgaatag

SEQ ID NO: 5968469 - DNA, 25 bp, Homo sapien
ttgtctatggatactggccttactt

SEQ ID NO: 5968470 - DNA, 25 bp, Homo sapien
tgaattgctgaacatactgttccgt

SEQ ID NO: 5968471 - DNA, 25 bp, Homo sapien
ttcccggagaccatttcagccaaaa

SEQ ID NO: 5968472 - DNA, 25 bp, Homo sapien
ttgatggctttatgtctctatggat

SEQ ID NO: 5968473 - DNA, 25 bp, Homo sapien
catccaaattaagtggaggatattc

SEQ ID NO: 5968474 - DNA, 25 bp, Homo sapien
gacgcattatcttgttatccagttt

SEQ ID NO: 5968475 - DNA, 25 bp, Homo sapien
cgaaagatggagttcccaagacttc

SEQ ID NO: 5968476 - DNA, 25 bp, Homo sapien
agtaacaggtttgatggctttatgt

SEQ ID NO: 5968477 - DNA, 25 bp, Homo sapien
gcgacgtactccgtcatgaatccta

SEQ ID NO: 5968478 - DNA, 25 bp, Homo sapien
aattaagtggaggatattccggctc

SEQ ID NO: 5968479 - DNA, 25 bp, Homo sapien
gtggcctcataggtaagtttgctat

SEQ ID NO: 5968480 - DNA, 25 bp, Homo sapien
catactgttccgtacgctccctcac

SEQ ID NO: 5968481 - DNA, 25 bp, Homo sapien
tgcgcttattcttttgtcaggattg

SEQ ID NO: 5968482 - DNA, 25 bp, Homo sapien
ttgtattttcttgatagctaccttt

SEQ ID NO: 5968483 - DNA, 25 bp, Homo sapien
cttgttatccagtttccaaaattca

SEQ ID NO: 5968484 - DNA, 25 bp, Homo sapien
tcttcattagttcatcgtaaagcat

SEQ ID NO: 5968485 - DNA, 25 bp, Homo sapien
cgtacgctccctcacctattaaatc

SEQ ID NO: 5968486 - DNA, 25 bp, Homo sapien
agatcacaattggaatttagtaaca

SEQ ID NO: 5968487 - DNA, 25 bp, Homo sapien
tacgctccctcacctattaaatcta

SEQ ID NO: 5968488 - DNA, 25 bp, Homo sapien
cttcttcctcctcttccggacgcat

SEQ ID NO: 5968489 - DNA, 25 bp, Homo sapien
aaagatggagttcccaagacttcta

SEQ ID NO: 5968490 - DNA, 25 bp, Homo sapien
tttgtaaatcggtttccatcaactc

SEQ ID NO: 5968491 - DNA, 25 bp, Homo sapien
tttgctaaacggttgtattttcttg

SEQ ID NO: 5968492 - DNA, 25 bp, Homo sapien
taaagtattgaacatggtcatcact

SEQ ID NO: 5968493 - DNA, 25 bp, Homo sapien
ccataattgatgatgatagtctctg

SEQ ID NO: 5968494 - DNA, 25 bp, Homo sapien
ggcacttcttcctcctcttccggac

SEQ ID NO: 5968495 - DNA, 25 bp, Homo sapien
atgtttctcttgaatcgctactgct

SEQ ID NO: 5968496 - DNA, 25 bp, Homo sapien
aactcttcgactaaataaacagcgt

SEQ ID NO: 5968497 - DNA, 25 bp, Homo sapien
atcgcgttgcgacgtactccgtcat

SEQ ID NO: 5968498 - DNA, 25 bp, Homo sapien
agactttgagatcacaattggaatt

SEQ ID NO: 5968499 - DNA, 25 bp, Homo sapien
cacttcttcctcctcttccggacgc

SEQ ID NO: 5968500 - DNA, 25 bp, Homo sapien
cttggatttgatctgattaaagtct

SEQ ID NO: 5968501 - DNA, 25 bp, Homo sapien
gctagctaaacacctcgctagtcca

SEQ ID NO: 5968502 - DNA, 25 bp, Homo sapien
cgcagttgtgtactcttgaaaagtt

SEQ ID NO: 5968503 - DNA, 25 bp, Homo sapien
accaatgtttctcttgaatcgctac

SEQ ID NO: 5968504 - DNA, 25 bp, Homo sapien
tggaatttagtaacaggtttgatgg

SEQ ID NO: 5968505 - DNA, 25 bp, Homo sapien
cgcttattcttttgtcaggattgaa

SEQ ID NO: 5968506 - DNA, 25 bp, Homo sapien
ctaaacggttgtattttcttgatag

SEQ ID NO: 5968507 - DNA, 25 bp, Homo sapien
gctgaacatactgttccgtacgctc

SEQ ID NO: 5968508 - DNA, 25 bp, Homo sapien
aaagaacagaaagggtgttaacaga

SEQ ID NO: 5968509 - DNA, 25 bp, Homo sapien
ttccaagattttagcgtattgaaat

SEQ ID NO: 5968510 - DNA, 25 bp, Homo sapien
gagaataaggttaataatgctacta

SEQ ID NO: 5968511 - DNA, 25 bp, Homo sapien
aataatgctactaatgctacccaca

SEQ ID NO: 5968512 - DNA, 25 bp, Homo sapien
cggtgcaatttcttgttcgacaact

SEQ ID NO: 5968513 - DNA, 25 bp, Homo sapien
ctacctccaaatttgactgcagatg

SEQ ID NO: 5968514 - DNA, 25 bp, Homo sapien
gaaaaaacggaacagaggcaagaag

SEQ ID NO: 5968515 - DNA, 25 bp, Homo sapien
gaaataggtatcataacaagaacag

SEQ ID NO: 5968516 - DNA, 25 bp, Homo sapien
gttattagattgctacctccaaatt

SEQ ID NO: 5968517 - DNA, 25 bp, Homo sapien
ccaagaacagtaatgtggttattat

SEQ ID NO: 5968518 - DNA, 25 bp, Homo sapien
atgctactaatgctacccacaacaa

SEQ ID NO: 5968519 - DNA, 25 bp, Homo sapien
taagaatgagacggtagatcctaaa

SEQ ID NO: 5968520 - DNA, 25 bp, Homo sapien
catccgctaagataccaaagaaaaa

SEQ ID NO: 5968521 - DNA, 25 bp, Homo sapien
gggtgttaacagagctggttggaac

SEQ ID NO: 5968522 - DNA, 25 bp, Homo sapien
aaatcaaccgagaatgaaggattta

SEQ ID NO: 5968523 - DNA, 25 bp, Homo sapien
aatagcagaaagaacagaaagggtg

SEQ ID NO: 5968524 - DNA, 25 bp, Homo sapien
tctcagcctcagtcatcatccgctc

SEQ ID NO: 5968525 - DNA, 25 bp, Homo sapien
atttatgaattcaatgaaacagctg

SEQ ID NO: 5968526 - DNA, 25 bp, Homo sapien
tgaaaatcgtgaaaaaagcaccatt

SEQ ID NO: 5968527 - DNA, 25 bp, Homo sapien
ctgcagatgaattttttgccatctt

SEQ ID NO: 5968528 - DNA, 25 bp, Homo sapien
gaaagggtgttaacagagctggttg

SEQ ID NO: 5968529 - DNA, 25 bp, Homo sapien
aatgcgcaaatttcattaaaacttg

SEQ ID NO: 5968530 - DNA, 25 bp, Homo sapien
cgtaaagaaattcactcaaacatca

SEQ ID NO: 5968531 - DNA, 25 bp, Homo sapien
gactggtgtttttttgaaggtcatt

SEQ ID NO: 5968532 - DNA, 25 bp, Homo sapien
atcttacgagataataataacgatg

SEQ ID NO: 5968533 - DNA, 25 bp, Homo sapien
aaggaagaagaaaatgcttttgcaa

SEQ ID NO: 5968534 - DNA, 25 bp, Homo sapien
gaataaggttaataatgctactaat

SEQ ID NO: 5968535 - DNA, 25 bp, Homo sapien
gaaattcaaagaagaggaagcatcc

SEQ ID NO: 5968536 - DNA, 25 bp, Homo sapien
tcatcatccgctcaaacccagccgt

SEQ ID NO: 5968537 - DNA, 25 bp, Homo sapien
ccatcttacgagataataataacga

SEQ ID NO: 5968538 - DNA, 25 bp, Homo sapien
aacagaggcaagaagaagcgtgaaa

SEQ ID NO: 5968539 - DNA, 25 bp, Homo sapien
tcttgttcgacaacttatcagactt

SEQ ID NO: 5968540 - DNA, 25 bp, Homo sapien
tcagcctcagtcatcatccgctcaa

SEQ ID NO: 5968541 - DNA, 25 bp, Homo sapien
ttttagcgtattgaaatctttagaa

SEQ ID NO: 5968542 - DNA, 25 bp, Homo sapien
aatgaaggatttaagcttgttatta

SEQ ID NO: 5968543 - DNA, 25 bp, Homo sapien
acggtagatcctaaaaagaatgaga

SEQ ID NO: 5968544 - DNA, 25 bp, Homo sapien
ttggaactggtgataaggtcaagaa

SEQ ID NO: 5968545 - DNA, 25 bp, Homo sapien
tggaaaaatgcgcaaatttcattaa

SEQ ID NO: 5968546 - DNA, 25 bp, Homo sapien
agcatccgctaagataccaaagaaa

SEQ ID NO: 5968547 - DNA, 25 bp, Homo sapien
atattacaattccagatatgaaact

SEQ ID NO: 5968548 - DNA, 25 bp, Homo sapien
gacatattctcggtgcaatttcttg

SEQ ID NO: 5968549 - DNA, 25 bp, Homo sapien
aactcaagtacagtgactggtgttt

SEQ ID NO: 5968550 - DNA, 25 bp, Homo sapien
aacatcaaaaaaggatgccgcgcta

SEQ ID NO: 5968551 - DNA, 25 bp, Homo sapien
agcgtgaaaatcgtgaaaaaagcac

SEQ ID NO: 5968552 - DNA, 25 bp, Homo sapien
ttgggtaaatcaaccgagaatgaag

SEQ ID NO: 5968553 - DNA, 25 bp, Homo sapien
gctactaatgctacccacaacaata

SEQ ID NO: 5968554 - DNA, 25 bp, Homo sapien
atcaaccgagaatgaaggatttaag

SEQ ID NO: 5968555 - DNA, 25 bp, Homo sapien
ttaagcttgttattagattgctacc

SEQ ID NO: 5968556 - DNA, 25 bp, Homo sapien
gataccaaagaaaaaacggaacaga

SEQ ID NO: 5968557 - DNA, 25 bp, Homo sapien
gttaacagagctggttggaactggt

SEQ ID NO: 5968558 - DNA, 25 bp, Homo sapien
cgctcaaacccagccgtcgttccaa

SEQ ID NO: 5968559 - DNA, 25 bp, Homo sapien
gttcgacaacttatcagacttggaa

SEQ ID NO: 5968560 - DNA, 25 bp, Homo sapien
ggaactggtgataaggtcaagaata

SEQ ID NO: 5968561 - DNA, 25 bp, Homo sapien
atttaagcttgttattagattgcta

SEQ ID NO: 5968562 - DNA, 25 bp, Homo sapien
ttatgaattcaatgaaacagctgaa

SEQ ID NO: 5968563 - DNA, 25 bp, Homo sapien
cgagtactcattccaagattttagc

SEQ ID NO: 5968564 - DNA, 25 bp, Homo sapien
aataaggataatattacaattccag

SEQ ID NO: 5968565 - DNA, 25 bp, Homo sapien
tcgacaacttatcagacttggaaaa

SEQ ID NO: 5968566 - DNA, 25 bp, Homo sapien
atttgactgcagatgaattttttgc

SEQ ID NO: 5968567 - DNA, 25 bp, Homo sapien
tacagtgactggtgtttttttgaag

SEQ ID NO: 5968568 - DNA, 25 bp, Homo sapien
tatcataacaagaacagaggaaaaa

SEQ ID NO: 5968569 - DNA, 25 bp, Homo sapien
tttttgccatcttacgagataataa

SEQ ID NO: 5968570 - DNA, 25 bp, Homo sapien
attattgaggaagcgggtaaagagg

SEQ ID NO: 5968571 - DNA, 25 bp, Homo sapien
gataatattacaattccagatatga

SEQ ID NO: 5968572 - DNA, 25 bp, Homo sapien
tttttttgaaggtcattattctagt

SEQ ID NO: 5968573 - DNA, 25 bp, Homo sapien
agaatgagacggtagatcctaaaaa

SEQ ID NO: 5968574 - DNA, 25 bp, Homo sapien
gatggtgataagcaagatatccagg

SEQ ID NO: 5968575 - DNA, 25 bp, Homo sapien
taatgctactaatgctacccacaac

SEQ ID NO: 5968576 - DNA, 25 bp, Homo sapien
ctcggtgcaatttcttgttcgacaa

SEQ ID NO: 5968577 - DNA, 25 bp, Homo sapien
ggtcattattctagtaaagtattca

SEQ ID NO: 5968578 - DNA, 25 bp, Homo sapien
cagccgtcgttccaacctaaagaaa

SEQ ID NO: 5968579 - DNA, 25 bp, Homo sapien
agtaggaacaattgaagaagacgaa

SEQ ID NO: 5968580 - DNA, 25 bp, Homo sapien
cttggaaaaatgcgcaaatttcatt

SEQ ID NO: 5968581 - DNA, 25 bp, Homo sapien
gtattcaaaaactcgacatattctc

SEQ ID NO: 5968582 - DNA, 25 bp, Homo sapien
tattagattgctacctccaaatttg

SEQ ID NO: 5968583 - DNA, 25 bp, Homo sapien
ttctcggtgcaatttcttgttcgac

SEQ ID NO: 5968584 - DNA, 25 bp, Homo sapien
cagatatgaaactgtcgccctacgt

SEQ ID NO: 5968585 - DNA, 25 bp, Homo sapien
gggaaataggtatcataacaagaac

SEQ ID NO: 5968586 - DNA, 25 bp, Homo sapien
atgacgagtactcattccaagattt

SEQ ID NO: 5968587 - DNA, 25 bp, Homo sapien
aagaacagtaatgtggttattattg

SEQ ID NO: 5968588 - DNA, 25 bp, Homo sapien
agagctggttggaactggtgataag

SEQ ID NO: 5968589 - DNA, 25 bp, Homo sapien
aacttgtaaattcattgataataag

SEQ ID NO: 5968590 - DNA, 25 bp, Homo sapien
tcattattctagtaaagtattcaaa

SEQ ID NO: 5968591 - DNA, 25 bp, Homo sapien
attgctacctccaaatttgactgca

SEQ ID NO: 5968592 - DNA, 25 bp, Homo sapien
gccgcgctagtaggaacaattgaag

SEQ ID NO: 5968593 - DNA, 25 bp, Homo sapien
aactataaaagaaaggctagattgg

SEQ ID NO: 5968594 - DNA, 25 bp, Homo sapien
agaaagaacagaaagggtgttaaca

SEQ ID NO: 5968595 - DNA, 25 bp, Homo sapien
atgtggttattattgaggaagcggg

SEQ ID NO: 5968596 - DNA, 25 bp, Homo sapien
caaaggaagaagaaaatgcttttgc

SEQ ID NO: 5968597 - DNA, 25 bp, Homo sapien
taaactcaagtacagtgactggtgt

SEQ ID NO: 5968598 - DNA, 25 bp, Homo sapien
gcaatttcttgttcgacaacttatc

SEQ ID NO: 5968599 - DNA, 25 bp, Homo sapien
ctgaatgaaaatgacgagtactcat

SEQ ID NO: 5968600 - DNA, 25 bp, Homo sapien
ttctaagaccaagaacagtaatgtg

SEQ ID NO: 5968601 - DNA, 25 bp, Homo sapien
taggtatcataacaagaacagagga

SEQ ID NO: 5968602 - DNA, 25 bp, Homo sapien
tgccatcttacgagataataataac

SEQ ID NO: 5968603 - DNA, 25 bp, Homo sapien
actcgacatattctcggtgcaattt

SEQ ID NO: 5968604 - DNA, 25 bp, Homo sapien
tgaagaagacgaaatttttaaaaca

SEQ ID NO: 5968605 - DNA, 25 bp, Homo sapien
ttgactgcagatgaattttttgcca

SEQ ID NO: 5968606 - DNA, 25 bp, Homo sapien
gacttggaaaaatgcgcaaatttca

SEQ ID NO: 5968607 - DNA, 25 bp, Homo sapien
cagaaggaataacaagaaaaggaac

SEQ ID NO: 5968608 - DNA, 25 bp, Homo sapien
aagaagaggaagcatccgctaagat

SEQ ID NO: 5968609 - DNA, 25 bp, Homo sapien
cattaaaacttgtaaattcattgat

SEQ ID NO: 5968610 - DNA, 25 bp, Homo sapien
cttacgagataataataacgatgat

SEQ ID NO: 5968611 - DNA, 25 bp, Homo sapien
tacaattccagatatgaaactgtcg

SEQ ID NO: 5968612 - DNA, 25 bp, Homo sapien
tccgctcaaacccagccgtcgttcc

SEQ ID NO: 5968613 - DNA, 25 bp, Homo sapien
caaccgagaatgaaggatttaagct

SEQ ID NO: 5968614 - DNA, 25 bp, Homo sapien
cctacgtaaagaaattcactcaaac

SEQ ID NO: 5968615 - DNA, 25 bp, Homo sapien
tgagacggtagatcctaaaaagaat

SEQ ID NO: 5968616 - DNA, 25 bp, Homo sapien
atgaattttttgccatcttacgaga

SEQ ID NO: 5968617 - DNA, 25 bp, Homo sapien
acaagaaaaggaacagagagtatta

SEQ ID NO: 5968618 - DNA, 25 bp, Homo sapien
caagatatccagggtaaactcaagt

SEQ ID NO: 5968619 - DNA, 25 bp, Homo sapien
cagacttggaaaaatgcgcaaattt

SEQ ID NO: 5968620 - DNA, 25 bp, Homo sapien
ctcctctcagcctcagtcatcatcc

SEQ ID NO: 5968621 - DNA, 25 bp, Homo sapien
tttcttgttcgacaacttatcagac

SEQ ID NO: 5968622 - DNA, 25 bp, Homo sapien
gtgataagcaagatatccagggtaa

SEQ ID NO: 5968623 - DNA, 25 bp, Homo sapien
ataataataacgatgatggtgataa

SEQ ID NO: 5968624 - DNA, 25 bp, Homo sapien
cactcaaacatcaaaaaaggatgcc

SEQ ID NO: 5968625 - DNA, 25 bp, Homo sapien
atgatggtgataagcaagatatcca

SEQ ID NO: 5968626 - DNA, 25 bp, Homo sapien
aaagaaaggctagattgggtaaatc

SEQ ID NO: 5968627 - DNA, 25 bp, Homo sapien
caattccagatatgaaactgtcgcc

SEQ ID NO: 5968628 - DNA, 25 bp, Homo sapien
agtactcattccaagattttagcgt

SEQ ID NO: 5968629 - DNA, 25 bp, Homo sapien
tgaaggtcattattctagtaaagta

SEQ ID NO: 5968630 - DNA, 25 bp, Homo sapien
ttctagtaaagtattcaaaaactcg

SEQ ID NO: 5968631 - DNA, 25 bp, Homo sapien
ccagggtaaactcaagtacagtgac

SEQ ID NO: 5968632 - DNA, 25 bp, Homo sapien
aggataatattacaattccagatat

SEQ ID NO: 5968633 - DNA, 25 bp, Homo sapien
ggcaagaagaagcgtgaaaatcgtg

SEQ ID NO: 5968634 - DNA, 25 bp, Homo sapien
gaacagagagtattataactataaa

SEQ ID NO: 5968635 - DNA, 25 bp, Homo sapien
tcagtcatcatccgctcaaacccag

SEQ ID NO: 5968636 - DNA, 25 bp, Homo sapien
gtgcaatttcttgttcgacaactta

SEQ ID NO: 5968637 - DNA, 25 bp, Homo sapien
cagaaagggtgttaacagagctggt

SEQ ID NO: 5968638 - DNA, 25 bp, Homo sapien
gactgcagatgaattttttgccatc

SEQ ID NO: 5968639 - DNA, 25 bp, Homo sapien
cagaggcaagaagaagcgtgaaaat

SEQ ID NO: 5968640 - DNA, 25 bp, Homo sapien
tcataacaagaacagaggaaaaagt

SEQ ID NO: 5968641 - DNA, 25 bp, Homo sapien
caatagcaaaggcagaaggaataac

SEQ ID NO: 5968642 - DNA, 25 bp, Homo sapien
gaagcatccgctaagataccaaaga

SEQ ID NO: 5968643 - DNA, 25 bp, Homo sapien
tgaaggatttaagcttgttattaga

SEQ ID NO: 5968644 - DNA, 25 bp, Homo sapien
agctggttggaactggtgataaggt

SEQ ID NO: 5968645 - DNA, 25 bp, Homo sapien
gattgggtaaatcaaccgagaatga

SEQ ID NO: 5968646 - DNA, 25 bp, Homo sapien
taataacgatgatggtgataagcaa

SEQ ID NO: 5968647 - DNA, 25 bp, Homo sapien
aatgctacccacaacaatagcaaag

SEQ ID NO: 5968648 - DNA, 25 bp, Homo sapien
ggttattattgaggaagcgggtaaa

SEQ ID NO: 5968649 - DNA, 25 bp, Homo sapien
aaggatgccgcgctagtaggaacaa

SEQ ID NO: 5968650 - DNA, 25 bp, Homo sapien
ccatttctaagaccaagaacagtaa

SEQ ID NO: 5968651 - DNA, 25 bp, Homo sapien
tttgaaggtcattattctagtaaag

SEQ ID NO: 5968652 - DNA, 25 bp, Homo sapien
ttaaaacttgtaaattcattgataa

SEQ ID NO: 5968653 - DNA, 25 bp, Homo sapien
acagtaatgtggttattattgagga

SEQ ID NO: 5968654 - DNA, 25 bp, Homo sapien
tcgtaccacgggtaaaaattttgca

SEQ ID NO: 5968655 - DNA, 25 bp, Homo sapien
gatatgaaactgtcgccctacgtaa

SEQ ID NO: 5968656 - DNA, 25 bp, Homo sapien
attcaaaaactcgacatattctcgg

SEQ ID NO: 5968657 - DNA, 25 bp, Homo sapien
aagaagcgtgaaaatcgtgaaaaaa

SEQ ID NO: 5968658 - DNA, 25 bp, Homo sapien
ttcattaaaacttgtaaattcattg

SEQ ID NO: 5968659 - DNA, 25 bp, Homo sapien
ttagcgtattgaaatctttagaaaa

SEQ ID NO: 5968660 - DNA, 25 bp, Homo sapien
aggaacagagagtattataactata

SEQ ID NO: 5968661 - DNA, 25 bp, Homo sapien
ctccaaatttgactgcagatgaatt

SEQ ID NO: 5968662 - DNA, 25 bp, Homo sapien
gaccaagaacagtaatgtggttatt

SEQ ID NO: 5968663 - DNA, 25 bp, Homo sapien
cccagccgtcgttccaacctaaaga

SEQ ID NO: 5968664 - DNA, 25 bp, Homo sapien
aggctagattgggtaaatcaaccga

SEQ ID NO: 5968665 - DNA, 25 bp, Homo sapien
gagaagttaaaaatatcaaactcct

SEQ ID NO: 5968666 - DNA, 25 bp, Homo sapien
caacttatcagacttggaaaaatgc

SEQ ID NO: 5968667 - DNA, 25 bp, Homo sapien
gggtaaatcaaccgagaatgaagga

SEQ ID NO: 5968668 - DNA, 25 bp, Homo sapien
ttgttattagattgctacctccaaa

SEQ ID NO: 5968669 - DNA, 25 bp, Homo sapien
aagaagaaaatgcttttgcaagaga

SEQ ID NO: 5968670 - DNA, 25 bp, Homo sapien
acccacaacaatagcaaaggcagaa

SEQ ID NO: 5968671 - DNA, 25 bp, Homo sapien
aaaagaattctcaaaaagcatagag

SEQ ID NO: 5968672 - DNA, 25 bp, Homo sapien
gacaacttatcagacttggaaaaat

SEQ ID NO: 5968673 - DNA, 25 bp, Homo sapien
agtaaagtattcaaaaactcgacat

SEQ ID NO: 5968674 - DNA, 25 bp, Homo sapien
aaatttgactgcagatgaatttttt

SEQ ID NO: 5968675 - DNA, 25 bp, Homo sapien
agaaaatgcttttgcaagagaagtt

SEQ ID NO: 5968676 - DNA, 25 bp, Homo sapien
gaattcaatgaaacagctgaatgaa

SEQ ID NO: 5968677 - DNA, 25 bp, Homo sapien
aaattttgcatcgtgatgataccaa

SEQ ID NO: 5968678 - DNA, 25 bp, Homo sapien
aaactcgacatattctcggtgcaat

SEQ ID NO: 5968679 - DNA, 25 bp, Homo sapien
aagaaaaaacggaacagaggcaaga

SEQ ID NO: 5968680 - DNA, 25 bp, Homo sapien
ctagtaaagtattcaaaaactcgac

SEQ ID NO: 5968681 - DNA, 25 bp, Homo sapien
agtacagtgactggtgtttttttga

SEQ ID NO: 5968682 - DNA, 25 bp, Homo sapien
acctccaaatttgactgcagatgaa

SEQ ID NO: 5968683 - DNA, 25 bp, Homo sapien
aaaaatatcaaactcctctcagcct

SEQ ID NO: 5968684 - DNA, 25 bp, Homo sapien
ttagattgctacctccaaatttgac

SEQ ID NO: 5968685 - DNA, 25 bp, Homo sapien
gggtaaaaattttgcatcgtgatga

SEQ ID NO: 5968686 - DNA, 25 bp, Homo sapien
catcaaaaaaggatgccgcgctagt

SEQ ID NO: 5968687 - DNA, 25 bp, Homo sapien
ttgttcgacaacttatcagacttgg

SEQ ID NO: 5968688 - DNA, 25 bp, Homo sapien
aaaatagcagaaagaacagaaaggg

SEQ ID NO: 5968689 - DNA, 25 bp, Homo sapien
aaaaattttgcatcgtgatgatacc

SEQ ID NO: 5968690 - DNA, 25 bp, Homo sapien
aagattttagcgtattgaaatcttt

SEQ ID NO: 5968691 - DNA, 25 bp, Homo sapien
tattctcggtgcaatttcttgttcg

SEQ ID NO: 5968692 - DNA, 25 bp, Homo sapien
catccgctcaaacccagccgtcgtt

SEQ ID NO: 5968693 - DNA, 25 bp, Homo sapien
gtaccacgggtaaaaattttgcatc

SEQ ID NO: 5968694 - DNA, 25 bp, Homo sapien
atgagaataaggttaataatgctac

SEQ ID NO: 5968695 - DNA, 25 bp, Homo sapien
agacggtagatcctaaaaagaatga

SEQ ID NO: 5968696 - DNA, 25 bp, Homo sapien
ggtagatcctaaaaagaatgagaat

SEQ ID NO: 5968697 - DNA, 25 bp, Homo sapien
caagaagaagcgtgaaaatcgtgaa

SEQ ID NO: 5968698 - DNA, 25 bp, Homo sapien
gataagcaagatatccagggtaaac

SEQ ID NO: 5968699 - DNA, 25 bp, Homo sapien
cgtgaaaatcgtgaaaaaagcacca

SEQ ID NO: 5968700 - DNA, 25 bp, Homo sapien
aaaatcgtgaaaaaagcaccatttc

SEQ ID NO: 5968701 - DNA, 25 bp, Homo sapien
agtaagaatgagacggtagatccta

SEQ ID NO: 5968702 - DNA, 25 bp, Homo sapien
aagaaattcactcaaacatcaaaaa

SEQ ID NO: 5968703 - DNA, 25 bp, Homo sapien
agaagaagcgtgaaaatcgtgaaaa

SEQ ID NO: 5968704 - DNA, 25 bp, Homo sapien
aataggtatcataacaagaacagag

SEQ ID NO: 5968705 - DNA, 25 bp, Homo sapien
gaaaaagaattctcaaaaagcatag

SEQ ID NO: 5968706 - DNA, 25 bp, Homo sapien
aatttcttgttcgacaacttatcag

SEQ ID NO: 5968707 - DNA, 25 bp, Homo sapien
aaggcaggggaaataggtatcataa

SEQ ID NO: 5968708 - DNA, 25 bp, Homo sapien
cgctagtaggaacaattgaagaaga

SEQ ID NO: 5968709 - DNA, 25 bp, Homo sapien
aagggtgttaacagagctggttgga

SEQ ID NO: 5968710 - DNA, 25 bp, Homo sapien
ctcattccaagattttagcgtattg

SEQ ID NO: 5968711 - DNA, 25 bp, Homo sapien
aataataacgatgatggtgataagc

SEQ ID NO: 5968712 - DNA, 25 bp, Homo sapien
caaactcctctcagcctcagtcatc

SEQ ID NO: 5968713 - DNA, 25 bp, Homo sapien
ctaatgctacccacaacaatagcaa

SEQ ID NO: 5968714 - DNA, 25 bp, Homo sapien
gaaaatgacgagtactcattccaag

SEQ ID NO: 5968715 - DNA, 25 bp, Homo sapien
catattctcggtgcaatttcttgtt

SEQ ID NO: 5968716 - DNA, 25 bp, Homo sapien
ggaagaagaaaatgcttttgcaaga

SEQ ID NO: 5968717 - DNA, 25 bp, Homo sapien
actgtcgccctacgtaaagaaattc

SEQ ID NO: 5968718 - DNA, 25 bp, Homo sapien
gaagaggaagcatccgctaagatac

SEQ ID NO: 5968719 - DNA, 25 bp, Homo sapien
tttttgaaggtcattattctagtaa

SEQ ID NO: 5968720 - DNA, 25 bp, Homo sapien
gcttgttattagattgctacctcca

SEQ ID NO: 5968721 - DNA, 25 bp, Homo sapien
gattttagcgtattgaaatctttag

SEQ ID NO: 5968722 - DNA, 25 bp, Homo sapien
gaattttttgccatcttacgagata

SEQ ID NO: 5968723 - DNA, 25 bp, Homo sapien
ccacaacaatagcaaaggcagaagg

SEQ ID NO: 5968724 - DNA, 25 bp, Homo sapien
cgatgatggtgataagcaagatatc

SEQ ID NO: 5968725 - DNA, 25 bp, Homo sapien
gctaagataccaaagaaaaaacgga

SEQ ID NO: 5968726 - DNA, 25 bp, Homo sapien
ctggttggaactggtgataaggtca

SEQ ID NO: 5968727 - DNA, 25 bp, Homo sapien
agcaagatatccagggtaaactcaa

SEQ ID NO: 5968728 - DNA, 25 bp, Homo sapien
tagcagaaagaacagaaagggtgtt

SEQ ID NO: 5968729 - DNA, 25 bp, Homo sapien
agttaaaaatatcaaactcctctca

SEQ ID NO: 5968730 - DNA, 25 bp, Homo sapien
aatgcttttgcaagagaagttaaaa

SEQ ID NO: 5968731 - DNA, 25 bp, Homo sapien
taggaacaattgaagaagacgaaat

SEQ ID NO: 5968732 - DNA, 25 bp, Homo sapien
atatccagggtaaactcaagtacag

SEQ ID NO: 5968733 - DNA, 25 bp, Homo sapien
gaatgaaaatgacgagtactcattc

SEQ ID NO: 5968734 - DNA, 25 bp, Homo sapien
aaaaagcaccatttctaagaccaag

SEQ ID NO: 5968735 - DNA, 25 bp, Homo sapien
tccagatatgaaactgtcgccctac

SEQ ID NO: 5968736 - DNA, 25 bp, Homo sapien
aaggatttaagcttgttattagatt

SEQ ID NO: 5968737 - DNA, 25 bp, Homo sapien
aatcgtgaaaaaagcaccatttcta

SEQ ID NO: 5968738 - DNA, 25 bp, Homo sapien
gtgttaacagagctggttggaactg

SEQ ID NO: 5968739 - DNA, 25 bp, Homo sapien
tatgaaactgtcgccctacgtaaag

SEQ ID NO: 5968740 - DNA, 25 bp, Homo sapien
aacgatgatggtgataagcaagata

SEQ ID NO: 5968741 - DNA, 25 bp, Homo sapien
tactaatgctacccacaacaatagc

SEQ ID NO: 5968742 - DNA, 25 bp, Homo sapien
cagtgactggtgtttttttgaaggt

SEQ ID NO: 5968743 - DNA, 25 bp, Homo sapien
ctggtgataaggtcaagaataagaa

SEQ ID NO: 5968744 - DNA, 25 bp, Homo sapien
tcgccctacgtaaagaaattcactc

SEQ ID NO: 5968745 - DNA, 25 bp, Homo sapien
acaacaatagcaaaggcagaaggaa

SEQ ID NO: 5968746 - DNA, 25 bp, Homo sapien
gaaaaatgcgcaaatttcattaaaa

SEQ ID NO: 5968747 - DNA, 25 bp, Homo sapien
attttttgccatcttacgagataat

SEQ ID NO: 5968748 - DNA, 25 bp, Homo sapien
agtaatgtggttattattgaggaag

SEQ ID NO: 5968749 - DNA, 25 bp, Homo sapien
agattgctacctccaaatttgactg

SEQ ID NO: 5968750 - DNA, 25 bp, Homo sapien
ttaaaaatatcaaactcctctcagc

SEQ ID NO: 5968751 - DNA, 25 bp, Homo sapien
aaaacttgtaaattcattgataata

SEQ ID NO: 5968752 - DNA, 25 bp, Homo sapien
aaaaacggaacagaggcaagaagaa

SEQ ID NO: 5968753 - DNA, 25 bp, Homo sapien
acttatcagacttggaaaaatgcgc

SEQ ID NO: 5968754 - DNA, 25 bp, Homo sapien
gaagttaaaaatatcaaactcctct

SEQ ID NO: 5968755 - DNA, 25 bp, Homo sapien
taatgtggttattattgaggaagcg

SEQ ID NO: 5968756 - DNA, 25 bp, Homo sapien
ctataaaagaaaggctagattgggt

SEQ ID NO: 5968757 - DNA, 25 bp, Homo sapien
aaacagctgaatgaaaatgacgagt

SEQ ID NO: 5968758 - DNA, 25 bp, Homo sapien
tcgtgaaaaaagcaccatttctaag

SEQ ID NO: 5968759 - DNA, 25 bp, Homo sapien
gacgaaatttttaaaacatttatga

SEQ ID NO: 5968760 - DNA, 25 bp, Homo sapien
atgaaaatgacgagtactcattcca

SEQ ID NO: 5968761 - DNA, 25 bp, Homo sapien
atttcattaaaacttgtaaattcat

SEQ ID NO: 5968762 - DNA, 25 bp, Homo sapien
ggcagaaggaataacaagaaaagga

SEQ ID NO: 5968763 - DNA, 25 bp, Homo sapien
aaggcagaaggaataacaagaaaag

SEQ ID NO: 5968764 - DNA, 25 bp, Homo sapien
tgcgcaaatttcattaaaacttgta

SEQ ID NO: 5968765 - DNA, 25 bp, Homo sapien
taaagaaattcactcaaacatcaaa

SEQ ID NO: 5968766 - DNA, 25 bp, Homo sapien
agggtaaactcaagtacagtgactg

SEQ ID NO: 5968767 - DNA, 25 bp, Homo sapien
ggatttaagcttgttattagattgc

SEQ ID NO: 5968768 - DNA, 25 bp, Homo sapien
ggtgataaggtcaagaataagaaca

SEQ ID NO: 5968769 - DNA, 25 bp, Homo sapien
gcagatgaattttttgccatcttac

SEQ ID NO: 5968770 - DNA, 25 bp, Homo sapien
aaagtaagaatgagacggtagatcc

SEQ ID NO: 5968771 - DNA, 25 bp, Homo sapien
atgccgcgctagtaggaacaattga

SEQ ID NO: 5968772 - DNA, 25 bp, Homo sapien
gaaattcactcaaacatcaaaaaag

SEQ ID NO: 5968773 - DNA, 25 bp, Homo sapien
aattcaaagaagaggaagcatccgc

SEQ ID NO: 5968774 - DNA, 25 bp, Homo sapien
ggaaaaagtaagaatgagacggtag

SEQ ID NO: 5968775 - DNA, 25 bp, Homo sapien
ggaacagaggcaagaagaagcgtga

SEQ ID NO: 5968776 - DNA, 25 bp, Homo sapien
attttgcatcgtgatgataccaaga

SEQ ID NO: 5968777 - DNA, 25 bp, Homo sapien
aatgagacggtagatcctaaaaaga

SEQ ID NO: 5968778 - DNA, 25 bp, Homo sapien
tcaaaaaaggatgccgcgctagtag

SEQ ID NO: 5968779 - DNA, 25 bp, Homo sapien
taaagtattcaaaaactcgacatat

SEQ ID NO: 5968780 - DNA, 25 bp, Homo sapien
agctgaatgaaaatgacgagtactc

SEQ ID NO: 5968781 - DNA, 25 bp, Homo sapien
ctggtgtttttttgaaggtcattat

SEQ ID NO: 5968782 - DNA, 25 bp, Homo sapien
aaatgacgagtactcattccaagat

SEQ ID NO: 5968783 - DNA, 25 bp, Homo sapien
aagtattcaaaaactcgacatattc

SEQ ID NO: 5968784 - DNA, 25 bp, Homo sapien
atgaattcaatgaaacagctgaatg

SEQ ID NO: 5968785 - DNA, 25 bp, Homo sapien
tgtttttttgaaggtcattattcta

SEQ ID NO: 5968786 - DNA, 25 bp, Homo sapien
tgaaactgtcgccctacgtaaagaa

SEQ ID NO: 5968787 - DNA, 25 bp, Homo sapien
ctcaagtacagtgactggtgttttt

SEQ ID NO: 5968788 - DNA, 25 bp, Homo sapien
aaggtcattattctagtaaagtatt

SEQ ID NO: 5968789 - DNA, 25 bp, Homo sapien
tcaaaaagcatagagttagaaaata

SEQ ID NO: 5968790 - DNA, 25 bp, Homo sapien
tgaaacagctgaatgaaaatgacga

SEQ ID NO: 5968791 - DNA, 25 bp, Homo sapien
cctcagtcatcatccgctcaaaccc

SEQ ID NO: 5968792 - DNA, 25 bp, Homo sapien
tattgaggaagcgggtaaagaggtt

SEQ ID NO: 5968793 - DNA, 25 bp, Homo sapien
agcgtattgaaatctttagaaaaag

SEQ ID NO: 5968794 - DNA, 25 bp, Homo sapien
taatattacaattccagatatgaaa

SEQ ID NO: 5968795 - DNA, 25 bp, Homo sapien
ctcaaacatcaaaaaaggatgccgc

SEQ ID NO: 5968796 - DNA, 25 bp, Homo sapien
cctctcagcctcagtcatcatccgc

SEQ ID NO: 5968797 - DNA, 25 bp, Homo sapien
ctagtaggaacaattgaagaagacg

SEQ ID NO: 5968798 - DNA, 25 bp, Homo sapien
ctacccacaacaatagcaaaggcag

SEQ ID NO: 5968799 - DNA, 25 bp, Homo sapien
ataaggttaataatgctactaatgc

SEQ ID NO: 5968800 - DNA, 25 bp, Homo sapien
ggtgtttttttgaaggtcattattc

SEQ ID NO: 5968801 - DNA, 25 bp, Homo sapien
agaggaagcatccgctaagatacca

SEQ ID NO: 5968802 - DNA, 25 bp, Homo sapien
aagaaattcaaagaagaggaagcat

SEQ ID NO: 5968803 - DNA, 25 bp, Homo sapien
aaaaactcgacatattctcggtgca

SEQ ID NO: 5968804 - DNA, 25 bp, Homo sapien
ttcactcaaacatcaaaaaaggatg

SEQ ID NO: 5968805 - DNA, 25 bp, Homo sapien
tacgtaaagaaattcactcaaacat

SEQ ID NO: 5968806 - DNA, 25 bp, Homo sapien
agtcatcatccgctcaaacccagcc

SEQ ID NO: 5968807 - DNA, 25 bp, Homo sapien
cgagaatgaaggatttaagcttgtt

SEQ ID NO: 5968808 - DNA, 25 bp, Homo sapien
taacaagaaaaggaacagagagtat

SEQ ID NO: 5968809 - DNA, 25 bp, Homo sapien
ataaaagaaaggctagattgggtaa

SEQ ID NO: 5968810 - DNA, 25 bp, Homo sapien
ttaataatgctactaatgctaccca

SEQ ID NO: 5968811 - DNA, 25 bp, Homo sapien
attctcaaaaagcatagagttagaa

SEQ ID NO: 5968812 - DNA, 25 bp, Homo sapien
caaagaagaggaagcatccgctaag

SEQ ID NO: 5968813 - DNA, 25 bp, Homo sapien
aaacatttatgaattcaatgaaaca

SEQ ID NO: 5968814 - DNA, 25 bp, Homo sapien
atttctaagaccaagaacagtaatg

SEQ ID NO: 5968815 - DNA, 25 bp, Homo sapien
tcaaaaactcgacatattctcggtg

SEQ ID NO: 5968816 - DNA, 25 bp, Homo sapien
atagcaaaggcagaaggaataacaa

SEQ ID NO: 5968817 - DNA, 25 bp, Homo sapien
agcaaaggcagaaggaataacaaga

SEQ ID NO: 5968818 - DNA, 25 bp, Homo sapien
tgctacctccaaatttgactgcaga

SEQ ID NO: 5968819 - DNA, 25 bp, Homo sapien
atcagacttggaaaaatgcgcaaat

SEQ ID NO: 5968820 - DNA, 25 bp, Homo sapien
agcctcagtcatcatccgctcaaac

SEQ ID NO: 5968821 - DNA, 25 bp, Homo sapien
aatgaaacagctgaatgaaaatgac

SEQ ID NO: 5968822 - DNA, 25 bp, Homo sapien
tgcttttgcaagagaagttaaaaat

SEQ ID NO: 5968823 - DNA, 25 bp, Homo sapien
taaggataatattacaattccagat

SEQ ID NO: 5968824 - DNA, 25 bp, Homo sapien
tggtgataagcaagatatccagggt

SEQ ID NO: 5968825 - DNA, 25 bp, Homo sapien
caagtacagtgactggtgttttttt

SEQ ID NO: 5968826 - DNA, 25 bp, Homo sapien
aactggtgataaggtcaagaataag

SEQ ID NO: 5968827 - DNA, 25 bp, Homo sapien
acaattgaagaagacgaaattttta

SEQ ID NO: 5968828 - DNA, 25 bp, Homo sapien
ggaataacaagaaaaggaacagaga

SEQ ID NO: 5968829 - DNA, 25 bp, Homo sapien
caaacatcaaaaaaggatgccgcgc

SEQ ID NO: 5968830 - DNA, 25 bp, Homo sapien
attacaattccagatatgaaactgt

SEQ ID NO: 5968831 - DNA, 25 bp, Homo sapien
ccacgggtaaaaattttgcatcgtg

SEQ ID NO: 5968832 - DNA, 25 bp, Homo sapien
tgaggaagcgggtaaagaggttttg

SEQ ID NO: 5968833 - DNA, 25 bp, Homo sapien
gaacagtaatgtggttattattgag

SEQ ID NO: 5968834 - DNA, 25 bp, Homo sapien
ggttggaactggtgataaggtcaag

SEQ ID NO: 5968835 - DNA, 25 bp, Homo sapien
gaatgagaataaggttaataatgct

SEQ ID NO: 5968836 - DNA, 25 bp, Homo sapien
ttcaaagaagaggaagcatccgcta

SEQ ID NO: 5968837 - DNA, 25 bp, Homo sapien
aaaggctagattgggtaaatcaacc

SEQ ID NO: 5968838 - DNA, 25 bp, Homo sapien
atcaaactcctctcagcctcagtca

SEQ ID NO: 5968839 - DNA, 25 bp, Homo sapien
tagattgggtaaatcaaccgagaat

SEQ ID NO: 5968840 - DNA, 25 bp, Homo sapien
aaatatcaaactcctctcagcctca

SEQ ID NO: 5968841 - DNA, 25 bp, Homo sapien
ccaaagaaaaaacggaacagaggca

SEQ ID NO: 5968842 - DNA, 25 bp, Homo sapien
acggaacagaggcaagaagaagcgt

SEQ ID NO: 5968843 - DNA, 25 bp, Homo sapien
tcaatgaaacagctgaatgaaaatg

SEQ ID NO: 5968844 - DNA, 25 bp, Homo sapien
agaacagaaagggtgttaacagagc

SEQ ID NO: 5968845 - DNA, 25 bp, Homo sapien
taagcaagatatccagggtaaactc

SEQ ID NO: 5968846 - DNA, 25 bp, Homo sapien
gaagaaaatgcttttgcaagagaag

SEQ ID NO: 5968847 - DNA, 25 bp, Homo sapien
aaaaaaggatgccgcgctagtagga

SEQ ID NO: 5968848 - DNA, 25 bp, Homo sapien
taacagagctggttggaactggtga

SEQ ID NO: 5968849 - DNA, 25 bp, Homo sapien
aggaagcatccgctaagataccaaa

SEQ ID NO: 5968850 - DNA, 25 bp, Homo sapien
gaaaaggaacagagagtattataac

SEQ ID NO: 5968851 - DNA, 25 bp, Homo sapien
agaatgaaggatttaagcttgttat

SEQ ID NO: 5968852 - DNA, 25 bp, Homo sapien
gtgactggtgtttttttgaaggtca

SEQ ID NO: 5968853 - DNA, 25 bp, Homo sapien
agaaaggctagattgggtaaatcaa

SEQ ID NO: 5968854 - DNA, 25 bp, Homo sapien
aattcactcaaacatcaaaaaagga

SEQ ID NO: 5968855 - DNA, 25 bp, Homo sapien
tccgctaagataccaaagaaaaaac

SEQ ID NO: 5968856 - DNA, 25 bp, Homo sapien
agataataataacgatgatggtgat

SEQ ID NO: 5968857 - DNA, 25 bp, Homo sapien
tgtcgccctacgtaaagaaattcac

SEQ ID NO: 5968858 - DNA, 25 bp, Homo sapien
ctaagaccaagaacagtaatgtggt

SEQ ID NO: 5968859 - DNA, 25 bp, Homo sapien
ggcaggggaaataggtatcataaca

SEQ ID NO: 5968860 - DNA, 25 bp, Homo sapien
ccaagattttagcgtattgaaatct

SEQ ID NO: 5968861 - DNA, 25 bp, Homo sapien
gacgagtactcattccaagatttta

SEQ ID NO: 5968862 - DNA, 25 bp, Homo sapien
ggttaataatgctactaatgctacc

SEQ ID NO: 5968863 - DNA, 25 bp, Homo sapien
ggtaaactcaagtacagtgactggt

SEQ ID NO: 5968864 - DNA, 25 bp, Homo sapien
aagcttgttattagattgctacctc

SEQ ID NO: 5968865 - DNA, 25 bp, Homo sapien
agcaccatttctaagaccaagaaca

SEQ ID NO: 5968866 - DNA, 25 bp, Homo sapien
gaaaaaagcaccatttctaagacca

SEQ ID NO: 5968867 - DNA, 25 bp, Homo sapien
ctcaaacccagccgtcgttccaacc

SEQ ID NO: 5968868 - DNA, 25 bp, Homo sapien
aacagaaagggtgttaacagagctg

SEQ ID NO: 5968869 - DNA, 25 bp, Homo sapien
aaaaggatgccgcgctagtaggaac

SEQ ID NO: 5968870 - DNA, 25 bp, Homo sapien
atatcaaactcctctcagcctcagt

SEQ ID NO: 5968871 - DNA, 25 bp, Homo sapien
tagatcctaaaaagaatgagaataa

SEQ ID NO: 5968872 - DNA, 25 bp, Homo sapien
ataacgatgatggtgataagcaaga

SEQ ID NO: 5968873 - DNA, 25 bp, Homo sapien
cgcgctagtaggaacaattgaagaa

SEQ ID NO: 5968874 - DNA, 25 bp, Homo sapien
aaaatgcttttgcaagagaagttaa

SEQ ID NO: 5968875 - DNA, 25 bp, Homo sapien
tttgccatcttacgagataataata

SEQ ID NO: 5968876 - DNA, 25 bp, Homo sapien
gaaggaataacaagaaaaggaacag

SEQ ID NO: 5968877 - DNA, 25 bp, Homo sapien
aaaaagtaagaatgagacggtagat

SEQ ID NO: 5968878 - DNA, 25 bp, Homo sapien
ttatcagacttggaaaaatgcgcaa

SEQ ID NO: 5968879 - DNA, 25 bp, Homo sapien
agatatccagggtaaactcaagtac

SEQ ID NO: 5968880 - DNA, 25 bp, Homo sapien
tactcattccaagattttagcgtat

SEQ ID NO: 5968881 - DNA, 25 bp, Homo sapien
tttgcatcgtgatgataccaagaag

SEQ ID NO: 5968882 - DNA, 25 bp, Homo sapien
tacgagataataataacgatgatgg

SEQ ID NO: 5968883 - DNA, 25 bp, Homo sapien
acagctgaatgaaaatgacgagtac

SEQ ID NO: 5968884 - DNA, 25 bp, Homo sapien
gtaaatcaaccgagaatgaaggatt

SEQ ID NO: 5968885 - DNA, 25 bp, Homo sapien
gcagaaagaacagaaagggtgttaa

SEQ ID NO: 5968886 - DNA, 25 bp, Homo sapien
gccctacgtaaagaaattcactcaa

SEQ ID NO: 5968887 - DNA, 25 bp, Homo sapien
gctagattgggtaaatcaaccgaga

SEQ ID NO: 5968888 - DNA, 25 bp, Homo sapien
acatttatgaattcaatgaaacagc

SEQ ID NO: 5968889 - DNA, 25 bp, Homo sapien
gtggttattattgaggaagcgggta

SEQ ID NO: 5968890 - DNA, 25 bp, Homo sapien
attattctagtaaagtattcaaaaa

SEQ ID NO: 5968891 - DNA, 25 bp, Homo sapien
aaaggaacagagagtattataacta

SEQ ID NO: 5968892 - DNA, 25 bp, Homo sapien
tattctagtaaagtattcaaaaact

SEQ ID NO: 5968893 - DNA, 25 bp, Homo sapien
gaggcaagaagaagcgtgaaaatcg

SEQ ID NO: 5968894 - DNA, 25 bp, Homo sapien
caaaggcagaaggaataacaagaaa

SEQ ID NO: 5968895 - DNA, 25 bp, Homo sapien
atccagggtaaactcaagtacagtg

SEQ ID NO: 5968896 - DNA, 25 bp, Homo sapien
aaaatgcgcaaatttcattaaaact

SEQ ID NO: 5968897 - DNA, 25 bp, Homo sapien
gtaaaaattttgcatcgtgatgata

SEQ ID NO: 5968898 - DNA, 25 bp, Homo sapien
aaacggaacagaggcaagaagaagc

SEQ ID NO: 5968899 - DNA, 25 bp, Homo sapien
atcatccgctcaaacccagccgtcg

SEQ ID NO: 5968900 - DNA, 25 bp, Homo sapien
attcaatgaaacagctgaatgaaaa

SEQ ID NO: 5968901 - DNA, 25 bp, Homo sapien
attccagatatgaaactgtcgccct

SEQ ID NO: 5968902 - DNA, 25 bp, Homo sapien
ggatgccgcgctagtaggaacaatt

SEQ ID NO: 5968903 - DNA, 25 bp, Homo sapien
ggaacaattgaagaagacgaaattt

SEQ ID NO: 5968904 - DNA, 25 bp, Homo sapien
tgataaggtcaagaataagaacaaa

SEQ ID NO: 5968905 - DNA, 25 bp, Homo sapien
aagaccaagaacagtaatgtggtta

SEQ ID NO: 5968906 - DNA, 25 bp, Homo sapien
ccaaatttgactgcagatgaatttt

SEQ ID NO: 5968907 - DNA, 25 bp, Homo sapien
acagagctggttggaactggtgata

SEQ ID NO: 5968908 - DNA, 25 bp, Homo sapien
aaagcaccatttctaagaccaagaa

SEQ ID NO: 5968909 - DNA, 25 bp, Homo sapien
tcgacatattctcggtgcaatttct

SEQ ID NO: 5968910 - DNA, 25 bp, Homo sapien
tgcatcgtgatgataccaagaagta

SEQ ID NO: 5968911 - DNA, 25 bp, Homo sapien
cattccaagattttagcgtattgaa

SEQ ID NO: 5968912 - DNA, 25 bp, Homo sapien
cgcaaatttcattaaaacttgtaaa

SEQ ID NO: 5968913 - DNA, 25 bp, Homo sapien
ttattattgaggaagcgggtaaaga

SEQ ID NO: 5968914 - DNA, 25 bp, Homo sapien
tgctacccacaacaatagcaaaggc

SEQ ID NO: 5968915 - DNA, 25 bp, Homo sapien
gaattctcaaaaagcatagagttag

SEQ ID NO: 5968916 - DNA, 25 bp, Homo sapien
aagaattctcaaaaagcatagagtt

SEQ ID NO: 5968917 - DNA, 25 bp, Homo sapien
acgggtaaaaattttgcatcgtgat

SEQ ID NO: 5968918 - DNA, 25 bp, Homo sapien
ggtatcataacaagaacagaggaaa

SEQ ID NO: 5968919 - DNA, 25 bp, Homo sapien
aactcctctcagcctcagtcatcat

SEQ ID NO: 5968920 - DNA, 25 bp, Homo sapien
caccatttctaagaccaagaacagt

SEQ ID NO: 5968921 - DNA, 25 bp, Homo sapien
caaacccagccgtcgttccaaccta

SEQ ID NO: 5968922 - DNA, 25 bp, Homo sapien
agatgaattttttgccatcttacga

SEQ ID NO: 5968923 - DNA, 25 bp, Homo sapien
gtgaaaaaagcaccatttctaagac

SEQ ID NO: 5968924 - DNA, 25 bp, Homo sapien
cgagataataataacgatgatggtg

SEQ ID NO: 5968925 - DNA, 25 bp, Homo sapien
accgagaatgaaggatttaagcttg

SEQ ID NO: 5968926 - DNA, 25 bp, Homo sapien
aacaatagcaaaggcagaaggaata

SEQ ID NO: 5968927 - DNA, 25 bp, Homo sapien
gaagcgtgaaaatcgtgaaaaaagc

SEQ ID NO: 5968928 - DNA, 25 bp, Homo sapien
aaggttaataatgctactaatgcta

SEQ ID NO: 5968929 - DNA, 25 bp, Homo sapien
gaaatggtgcttttttcacgatttt

SEQ ID NO: 5968930 - DNA, 25 bp, Homo sapien
atcttggaatgagtactcgtcattt

SEQ ID NO: 5968931 - DNA, 25 bp, Homo sapien
cacgattttcacgcttcttcttgcc

SEQ ID NO: 5968932 - DNA, 25 bp, Homo sapien
tgtttcattgaattcataaatgttt

SEQ ID NO: 5968933 - DNA, 25 bp, Homo sapien
tagttataatactctctgttccttt

SEQ ID NO: 5968934 - DNA, 25 bp, Homo sapien
tttttgatgtttgagtgaatttctt

SEQ ID NO: 5968935 - DNA, 25 bp, Homo sapien
tcttgcaaaagcattttcttcttcc

SEQ ID NO: 5968936 - DNA, 25 bp, Homo sapien
tctaataacaagcttaaatccttca

SEQ ID NO: 5968937 - DNA, 25 bp, Homo sapien
gatatcttgcttatcaccatcatcg

SEQ ID NO: 5968938 - DNA, 25 bp, Homo sapien
tctctgttccttttcttgttattcc

SEQ ID NO: 5968939 - DNA, 25 bp, Homo sapien
ttgcttatcaccatcatcgttatta

SEQ ID NO: 5968940 - DNA, 25 bp, Homo sapien
cccgcttcctcaataataaccacat

SEQ ID NO: 5968941 - DNA, 25 bp, Homo sapien
gaggtagcaatctaataacaagctt

SEQ ID NO: 5968942 - DNA, 25 bp, Homo sapien
cgcttcctcaataataaccacatta

SEQ ID NO: 5968943 - DNA, 25 bp, Homo sapien
tcataaatgttttaaaaatttcgtc

SEQ ID NO: 5968944 - DNA, 25 bp, Homo sapien
cttcttggtatcatcacgatgcaaa

SEQ ID NO: 5968945 - DNA, 25 bp, Homo sapien
agtttttgaatactttactagaata

SEQ ID NO: 5968946 - DNA, 25 bp, Homo sapien
actgttcttggtcttagaaatggtg

SEQ ID NO: 5968947 - DNA, 25 bp, Homo sapien
ccaatctagcctttcttttatagtt

SEQ ID NO: 5968948 - DNA, 25 bp, Homo sapien
tacttcttggtatcatcacgatgca

SEQ ID NO: 5968949 - DNA, 25 bp, Homo sapien
gtcttagaaatggtgcttttttcac

SEQ ID NO: 5968950 - DNA, 25 bp, Homo sapien
cttcattctcggttgatttacccaa

SEQ ID NO: 5968951 - DNA, 25 bp, Homo sapien
tcatatctggaattgtaatattatc

SEQ ID NO: 5968952 - DNA, 25 bp, Homo sapien
atcaatgaatttacaagttttaatg

SEQ ID NO: 5968953 - DNA, 25 bp, Homo sapien
tcattctttttaggatctaccgtct

SEQ ID NO: 5968954 - DNA, 25 bp, Homo sapien
caaatttggaggtagcaatctaata

SEQ ID NO: 5968955 - DNA, 25 bp, Homo sapien
atgtttgagtgaatttctttacgta

SEQ ID NO: 5968956 - DNA, 25 bp, Homo sapien
ataatgaccttcaaaaaaacaccag

SEQ ID NO: 5968957 - DNA, 25 bp, Homo sapien
ttttcattcagctgtttcattgaat

SEQ ID NO: 5968958 - DNA, 25 bp, Homo sapien
tacccgcttcctcaataataaccac

SEQ ID NO: 5968959 - DNA, 25 bp, Homo sapien
attttcacgcttcttcttgcctctg

SEQ ID NO: 5968960 - DNA, 25 bp, Homo sapien
tgcagtcaaatttggaggtagcaat

SEQ ID NO: 5968961 - DNA, 25 bp, Homo sapien
gttccaaccagctctgttaacaccc

SEQ ID NO: 5968962 - DNA, 25 bp, Homo sapien
gatttacccaatctagcctttcttt

SEQ ID NO: 5968963 - DNA, 25 bp, Homo sapien
caagttttaatgaaatttgcgcatt

SEQ ID NO: 5968964 - DNA, 25 bp, Homo sapien
gctgtttcattgaattcataaatgt

SEQ ID NO: 5968965 - DNA, 25 bp, Homo sapien
gctattgttgtgggtagcattagta

SEQ ID NO: 5968966 - DNA, 25 bp, Homo sapien
gcggatgatgactgaggctgagagg

SEQ ID NO: 5968967 - DNA, 25 bp, Homo sapien
aacaagaaattgcaccgagaatatg

SEQ ID NO: 5968968 - DNA, 25 bp, Homo sapien
acccaatctagcctttcttttatag

SEQ ID NO: 5968969 - DNA, 25 bp, Homo sapien
tcaattgttcctactagcgcggcat

SEQ ID NO: 5968970 - DNA, 25 bp, Homo sapien
tttggaggtagcaatctaataacaa

SEQ ID NO: 5968971 - DNA, 25 bp, Homo sapien
ttttaacttctcttgcaaaagcatt

SEQ ID NO: 5968972 - DNA, 25 bp, Homo sapien
aaaaacaccagtcactgtacttgag

SEQ ID NO: 5968973 - DNA, 25 bp, Homo sapien
atgagtactcgtcattttcattcag

SEQ ID NO: 5968974 - DNA, 25 bp, Homo sapien
gctctgttaacaccctttctgttct

SEQ ID NO: 5968975 - DNA, 25 bp, Homo sapien
cttttcttgttattccttctgcctt

SEQ ID NO: 5968976 - DNA, 25 bp, Homo sapien
gttgtgggtagcattagtagcatta

SEQ ID NO: 5968977 - DNA, 25 bp, Homo sapien
tttttctttggtatcttagcggatg

SEQ ID NO: 5968978 - DNA, 25 bp, Homo sapien
taggatctaccgtctcattcttact

SEQ ID NO: 5968979 - DNA, 25 bp, Homo sapien
cgacggctgggtttgagcggatgat

SEQ ID NO: 5968980 - DNA, 25 bp, Homo sapien
tttttgaatactttactagaataat

SEQ ID NO: 5968981 - DNA, 25 bp, Homo sapien
taaatccttcattctcggttgattt

SEQ ID NO: 5968982 - DNA, 25 bp, Homo sapien
tctcattctttttaggatctaccgt

SEQ ID NO: 5968983 - DNA, 25 bp, Homo sapien
cgattttcacgcttcttcttgcctc

SEQ ID NO: 5968984 - DNA, 25 bp, Homo sapien
tgaatactttactagaataatgacc

SEQ ID NO: 5968985 - DNA, 25 bp, Homo sapien
tgggtagcattagtagcattattaa

SEQ ID NO: 5968986 - DNA, 25 bp, Homo sapien
aggctgagaggagtttgatattttt

SEQ ID NO: 5968987 - DNA, 25 bp, Homo sapien
atgatgactgaggctgagaggagtt

SEQ ID NO: 5968988 - DNA, 25 bp, Homo sapien
ttaccctggatatcttgcttatcac

SEQ ID NO: 5968989 - DNA, 25 bp, Homo sapien
tcttcttcaattgttcctactagcg

SEQ ID NO: 5968990 - DNA, 25 bp, Homo sapien
tttcatatctggaattgtaatatta

SEQ ID NO: 5968991 - DNA, 25 bp, Homo sapien
attctttttaggatctaccgtctca

SEQ ID NO: 5968992 - DNA, 25 bp, Homo sapien
tcctctgttcttgttatgataccta

SEQ ID NO: 5968993 - DNA, 25 bp, Homo sapien
attctcattctttttaggatctacc

SEQ ID NO: 5968994 - DNA, 25 bp, Homo sapien
acgtagggcgacagtttcatatctg

SEQ ID NO: 5968995 - DNA, 25 bp, Homo sapien
aataaccacattactgttcttggtc

SEQ ID NO: 5968996 - DNA, 25 bp, Homo sapien
tcgtaagatggcaaaaaattcatct

SEQ ID NO: 5968997 - DNA, 25 bp, Homo sapien
cttggaatgagtactcgtcattttc

SEQ ID NO: 5968998 - DNA, 25 bp, Homo sapien
tctgttaacaccctttctgttcttt

SEQ ID NO: 5968999 - DNA, 25 bp, Homo sapien
caagcttaaatccttcattctcggt

SEQ ID NO: 5969000 - DNA, 25 bp, Homo sapien
tgcaaaatttttacccgtggtacga

SEQ ID NO: 5969001 - DNA, 25 bp, Homo sapien
tccgttttttctttggtatcttagc

SEQ ID NO: 5969002 - DNA, 25 bp, Homo sapien
tattttctaactctatgctttttga

SEQ ID NO: 5969003 - DNA, 25 bp, Homo sapien
taataacaagcttaaatccttcatt

SEQ ID NO: 5969004 - DNA, 25 bp, Homo sapien
tactttactagaataatgaccttca

SEQ ID NO: 5969005 - DNA, 25 bp, Homo sapien
agcttaaatccttcattctcggttg

SEQ ID NO: 5969006 - DNA, 25 bp, Homo sapien
tattattatctcgtaagatggcaaa

SEQ ID NO: 5969007 - DNA, 25 bp, Homo sapien
tatctcgtaagatggcaaaaaattc

SEQ ID NO: 5969008 - DNA, 25 bp, Homo sapien
tgactgaggctgagaggagtttgat

SEQ ID NO: 5969009 - DNA, 25 bp, Homo sapien
tgcaccgagaatatgtcgagttttt

SEQ ID NO: 5969010 - DNA, 25 bp, Homo sapien
tgcctctgttccgttttttctttgg

SEQ ID NO: 5969011 - DNA, 25 bp, Homo sapien
accttcaaaaaaacaccagtcactg

SEQ ID NO: 5969012 - DNA, 25 bp, Homo sapien
gttccttttcttgttattccttctg

SEQ ID NO: 5969013 - DNA, 25 bp, Homo sapien
ttcttggtcttagaaatggtgcttt

SEQ ID NO: 5969014 - DNA, 25 bp, Homo sapien
accagtcactgtacttgagtttacc

SEQ ID NO: 5969015 - DNA, 25 bp, Homo sapien
tttttaggatctaccgtctcattct

SEQ ID NO: 5969016 - DNA, 25 bp, Homo sapien
agaaattgcaccgagaatatgtcga

SEQ ID NO: 5969017 - DNA, 25 bp, Homo sapien
aaaattcatctgcagtcaaatttgg

SEQ ID NO: 5969018 - DNA, 25 bp, Homo sapien
ctctgttcttgttatgatacctatt

SEQ ID NO: 5969019 - DNA, 25 bp, Homo sapien
agcattattaaccttattctcattc

SEQ ID NO: 5969020 - DNA, 25 bp, Homo sapien
gtactcgtcattttcattcagctgt

SEQ ID NO: 5969021 - DNA, 25 bp, Homo sapien
ccctttctgttctttctgctatttt

SEQ ID NO: 5969022 - DNA, 25 bp, Homo sapien
aatgaaatttgcgcatttttccaag

SEQ ID NO: 5969023 - DNA, 25 bp, Homo sapien
ttgatttacccaatctagcctttct

SEQ ID NO: 5969024 - DNA, 25 bp, Homo sapien
atttcgtcttcttcaattgttccta

SEQ ID NO: 5969025 - DNA, 25 bp, Homo sapien
tttgaatactttactagaataatga

SEQ ID NO: 5969026 - DNA, 25 bp, Homo sapien
gtgcttttttcacgattttcacgct

SEQ ID NO: 5969027 - DNA, 25 bp, Homo sapien
gagaatatgtcgagtttttgaatac

SEQ ID NO: 5969028 - DNA, 25 bp, Homo sapien
tttcacgcttcttcttgcctctgtt

SEQ ID NO: 5969029 - DNA, 25 bp, Homo sapien
atttcaatacgctaaaatcttggaa

SEQ ID NO: 5969030 - DNA, 25 bp, Homo sapien
cttggtcttagaaatggtgcttttt

SEQ ID NO: 5969031 - DNA, 25 bp, Homo sapien
accacattactgttcttggtcttag

SEQ ID NO: 5969032 - DNA, 25 bp, Homo sapien
ggctgggtttgagcggatgatgact

SEQ ID NO: 5969033 - DNA, 25 bp, Homo sapien
ctgtacttgagtttaccctggatat

SEQ ID NO: 5969034 - DNA, 25 bp, Homo sapien
acaccagtcactgtacttgagttta

SEQ ID NO: 5969035 - DNA, 25 bp, Homo sapien
accagctctgttaacaccctttctg

SEQ ID NO: 5969036 - DNA, 25 bp, Homo sapien
ttgagtgaatttctttacgtagggc

SEQ ID NO: 5969037 - DNA, 25 bp, Homo sapien
cttgaccttatcaccagttccaacc

SEQ ID NO: 5969038 - DNA, 25 bp, Homo sapien
aacaagcttaaatccttcattctcg

SEQ ID NO: 5969039 - DNA, 25 bp, Homo sapien
cctctttacccgcttcctcaataat

SEQ ID NO: 5969040 - DNA, 25 bp, Homo sapien
atgtcgagtttttgaatactttact

SEQ ID NO: 5969041 - DNA, 25 bp, Homo sapien
gttataatactctctgttccttttc

SEQ ID NO: 5969042 - DNA, 25 bp, Homo sapien
ttcagctgtttcattgaattcataa

SEQ ID NO: 5969043 - DNA, 25 bp, Homo sapien
ggatgatgactgaggctgagaggag

SEQ ID NO: 5969044 - DNA, 25 bp, Homo sapien
ttgagcggatgatgactgaggctga

SEQ ID NO: 5969045 - DNA, 25 bp, Homo sapien
aacttctcttgcaaaagcattttct

SEQ ID NO: 5969046 - DNA, 25 bp, Homo sapien
gcattagtagcattattaaccttat

SEQ ID NO: 5969047 - DNA, 25 bp, Homo sapien
tgttttaaaaatttcgtcttcttca

SEQ ID NO: 5969048 - DNA, 25 bp, Homo sapien
actgaggctgagaggagtttgatat

SEQ ID NO: 5969049 - DNA, 25 bp, Homo sapien
tagcggatgcttcctcttctttgaa

SEQ ID NO: 5969050 - DNA, 25 bp, Homo sapien
ggtagcattagtagcattattaacc

SEQ ID NO: 5969051 - DNA, 25 bp, Homo sapien
tcattctcggttgatttacccaatc

SEQ ID NO: 5969052 - DNA, 25 bp, Homo sapien
gcttatcaccatcatcgttattatt

SEQ ID NO: 5969053 - DNA, 25 bp, Homo sapien
ttttttcacgattttcacgcttctt

SEQ ID NO: 5969054 - DNA, 25 bp, Homo sapien
aatgaccttcaaaaaaacaccagtc

SEQ ID NO: 5969055 - DNA, 25 bp, Homo sapien
actagcgcggcatccttttttgatg

SEQ ID NO: 5969056 - DNA, 25 bp, Homo sapien
atactctctgttccttttcttgtta

SEQ ID NO: 5969057 - DNA, 25 bp, Homo sapien
aaacaccagtcactgtacttgagtt

SEQ ID NO: 5969058 - DNA, 25 bp, Homo sapien
caccctttctgttctttctgctatt

SEQ ID NO: 5969059 - DNA, 25 bp, Homo sapien
cttcaaaaaaacaccagtcactgta

SEQ ID NO: 5969060 - DNA, 25 bp, Homo sapien
ttacccaatctagcctttcttttat

SEQ ID NO: 5969061 - DNA, 25 bp, Homo sapien
aattcatctgcagtcaaatttggag

SEQ ID NO: 5969062 - DNA, 25 bp, Homo sapien
cttcttgcctctgttccgttttttc

SEQ ID NO: 5969063 - DNA, 25 bp, Homo sapien
ctactagcgcggcatccttttttga

SEQ ID NO: 5969064 - DNA, 25 bp, Homo sapien
ttcatctgcagtcaaatttggaggt

SEQ ID NO: 5969065 - DNA, 25 bp, Homo sapien
agggcgacagtttcatatctggaat

SEQ ID NO: 5969066 - DNA, 25 bp, Homo sapien
ttacgtagggcgacagtttcatatc

SEQ ID NO: 5969067 - DNA, 25 bp, Homo sapien
ttaacttctcttgcaaaagcatttt

SEQ ID NO: 5969068 - DNA, 25 bp, Homo sapien
cgagtttttgaatactttactagaa

SEQ ID NO: 5969069 - DNA, 25 bp, Homo sapien
catcgttattattatctcgtaagat

SEQ ID NO: 5969070 - DNA, 25 bp, Homo sapien
tgaaatttgcgcatttttccaagtc

SEQ ID NO: 5969071 - DNA, 25 bp, Homo sapien
tttgatgtttgagtgaatttcttta

SEQ ID NO: 5969072 - DNA, 25 bp, Homo sapien
tttcctctgttcttgttatgatacc

SEQ ID NO: 5969073 - DNA, 25 bp, Homo sapien
tttggtatcttagcggatgcttcct

SEQ ID NO: 5969074 - DNA, 25 bp, Homo sapien
acagtttcatatctggaattgtaat

SEQ ID NO: 5969075 - DNA, 25 bp, Homo sapien
ctctatgctttttgagaattctttt

SEQ ID NO: 5969076 - DNA, 25 bp, Homo sapien
ttcattcagctgtttcattgaattc

SEQ ID NO: 5969077 - DNA, 25 bp, Homo sapien
agttttaatgaaatttgcgcatttt

SEQ ID NO: 5969078 - DNA, 25 bp, Homo sapien
ttgctattgttgtgggtagcattag

SEQ ID NO: 5969079 - DNA, 25 bp, Homo sapien
tggatatcttgcttatcaccatcat

SEQ ID NO: 5969080 - DNA, 25 bp, Homo sapien
gctaaaatcttggaatgagtactcg

SEQ ID NO: 5969081 - DNA, 25 bp, Homo sapien
atatctggaattgtaatattatcct

SEQ ID NO: 5969082 - DNA, 25 bp, Homo sapien
gttcctactagcgcggcatcctttt

SEQ ID NO: 5969083 - DNA, 25 bp, Homo sapien
ctgcctttgctattgttgtgggtag

SEQ ID NO: 5969084 - DNA, 25 bp, Homo sapien
tcctactagcgcggcatcctttttt

SEQ ID NO: 5969085 - DNA, 25 bp, Homo sapien
attagtagcattattaaccttattc

SEQ ID NO: 5969086 - DNA, 25 bp, Homo sapien
cttctcttgcaaaagcattttcttc

SEQ ID NO: 5969087 - DNA, 25 bp, Homo sapien
attatctcgtaagatggcaaaaaat

SEQ ID NO: 5969088 - DNA, 25 bp, Homo sapien
tgttatgatacctatttcccctgcc

SEQ ID NO: 5969089 - DNA, 25 bp, Homo sapien
ggtagcaatctaataacaagcttaa

SEQ ID NO: 5969090 - DNA, 25 bp, Homo sapien
ggcgacagtttcatatctggaattg

SEQ ID NO: 5969091 - DNA, 25 bp, Homo sapien
cactgtacttgagtttaccctggat

SEQ ID NO: 5969092 - DNA, 25 bp, Homo sapien
cattactgttcttggtcttagaaat

SEQ ID NO: 5969093 - DNA, 25 bp, Homo sapien
taggttggaacgacggctgggtttg

SEQ ID NO: 5969094 - DNA, 25 bp, Homo sapien
caccatcatcgttattattatctcg

SEQ ID NO: 5969095 - DNA, 25 bp, Homo sapien
tattatcaatgaatttacaagtttt

SEQ ID NO: 5969096 - DNA, 25 bp, Homo sapien
caagaaattgcaccgagaatatgtc

SEQ ID NO: 5969097 - DNA, 25 bp, Homo sapien
ctcaataataaccacattactgttc

SEQ ID NO: 5969098 - DNA, 25 bp, Homo sapien
caccgagaatatgtcgagtttttga

SEQ ID NO: 5969099 - DNA, 25 bp, Homo sapien
tatcatcacgatgcaaaatttttac

SEQ ID NO: 5969100 - DNA, 25 bp, Homo sapien
cgaacaagaaattgcaccgagaata

SEQ ID NO: 5969101 - DNA, 25 bp, Homo sapien
tcttgcctctgttccgttttttctt

SEQ ID NO: 5969102 - DNA, 25 bp, Homo sapien
aacctctttacccgcttcctcaata

SEQ ID NO: 5969103 - DNA, 25 bp, Homo sapien
gggtttgagcggatgatgactgagg

SEQ ID NO: 5969104 - DNA, 25 bp, Homo sapien
ttgttcctactagcgcggcatcctt

SEQ ID NO: 5969105 - DNA, 25 bp, Homo sapien
ttctaactctatgctttttgagaat

SEQ ID NO: 5969106 - DNA, 25 bp, Homo sapien
tgaccttatcaccagttccaaccag

SEQ ID NO: 5969107 - DNA, 25 bp, Homo sapien
ctgataagttgtcgaacaagaaatt

SEQ ID NO: 5969108 - DNA, 25 bp, Homo sapien
tgagaggagtttgatatttttaact

SEQ ID NO: 5969109 - DNA, 25 bp, Homo sapien
tccttcattctcggttgatttaccc

SEQ ID NO: 5969110 - DNA, 25 bp, Homo sapien
ttactagaataatgaccttcaaaaa

SEQ ID NO: 5969111 - DNA, 25 bp, Homo sapien
tcacgcttcttcttgcctctgttcc

SEQ ID NO: 5969112 - DNA, 25 bp, Homo sapien
accttatcaccagttccaaccagct

SEQ ID NO: 5969113 - DNA, 25 bp, Homo sapien
ggcatccttttttgatgtttgagtg

SEQ ID NO: 5969114 - DNA, 25 bp, Homo sapien
aattgttcctactagcgcggcatcc

SEQ ID NO: 5969115 - DNA, 25 bp, Homo sapien
ttggtatcatcacgatgcaaaattt

SEQ ID NO: 5969116 - DNA, 25 bp, Homo sapien
tcggttgatttacccaatctagcct

SEQ ID NO: 5969117 - DNA, 25 bp, Homo sapien
tggtgcttttttcacgattttcacg

SEQ ID NO: 5969118 - DNA, 25 bp, Homo sapien
ttaatgaaatttgcgcatttttcca

SEQ ID NO: 5969119 - DNA, 25 bp, Homo sapien
cagctctgttaacaccctttctgtt

SEQ ID NO: 5969120 - DNA, 25 bp, Homo sapien
gagtactcgtcattttcattcagct

SEQ ID NO: 5969121 - DNA, 25 bp, Homo sapien
gaatatgtcgagtttttgaatactt

SEQ ID NO: 5969122 - DNA, 25 bp, Homo sapien
atgcttcctcttctttgaatttctt

SEQ ID NO: 5969123 - DNA, 25 bp, Homo sapien
gctgagaggagtttgatatttttaa

SEQ ID NO: 5969124 - DNA, 25 bp, Homo sapien
tattgttgtgggtagcattagtagc

SEQ ID NO: 5969125 - DNA, 25 bp, Homo sapien
tctttacccgcttcctcaataataa

SEQ ID NO: 5969126 - DNA, 25 bp, Homo sapien
tcaaaaaaacaccagtcactgtact

SEQ ID NO: 5969127 - DNA, 25 bp, Homo sapien
taaccacattactgttcttggtctt

SEQ ID NO: 5969128 - DNA, 25 bp, Homo sapien
caaaacctctttacccgcttcctca

SEQ ID NO: 5969129 - DNA, 25 bp, Homo sapien
aacaccctttctgttctttctgcta

SEQ ID NO: 5969130 - DNA, 25 bp, Homo sapien
aaatttgcgcatttttccaagtctg

SEQ ID NO: 5969131 - DNA, 25 bp, Homo sapien
cttaaatccttcattctcggttgat

SEQ ID NO: 5969132 - DNA, 25 bp, Homo sapien
gtcgaacaagaaattgcaccgagaa

SEQ ID NO: 5969133 - DNA, 25 bp, Homo sapien
gcggatgcttcctcttctttgaatt

SEQ ID NO: 5969134 - DNA, 25 bp, Homo sapien
ttgagtttaccctggatatcttgct

SEQ ID NO: 5969135 - DNA, 25 bp, Homo sapien
cattttcattcagctgtttcattga

SEQ ID NO: 5969136 - DNA, 25 bp, Homo sapien
ctgttcttgttatgatacctatttc

SEQ ID NO: 5969137 - DNA, 25 bp, Homo sapien
actttttcctctgttcttgttatga

SEQ ID NO: 5969138 - DNA, 25 bp, Homo sapien
gtacttgagtttaccctggatatct

SEQ ID NO: 5969139 - DNA, 25 bp, Homo sapien
atttttaacttctcttgcaaaagca

SEQ ID NO: 5969140 - DNA, 25 bp, Homo sapien
cagtcactgtacttgagtttaccct

SEQ ID NO: 5969141 - DNA, 25 bp, Homo sapien
ttcttattcttgaccttatcaccag

SEQ ID NO: 5969142 - DNA, 25 bp, Homo sapien
ttcttgaccttatcaccagttccaa

SEQ ID NO: 5969143 - DNA, 25 bp, Homo sapien
ttgttgtgggtagcattagtagcat

SEQ ID NO: 5969144 - DNA, 25 bp, Homo sapien
tacaagttttaatgaaatttgcgca

SEQ ID NO: 5969145 - DNA, 25 bp, Homo sapien
tagaataatgaccttcaaaaaaaca

SEQ ID NO: 5969146 - DNA, 25 bp, Homo sapien
atgaatttacaagttttaatgaaat

SEQ ID NO: 5969147 - DNA, 25 bp, Homo sapien
tctcggttgatttacccaatctagc

SEQ ID NO: 5969148 - DNA, 25 bp, Homo sapien
aaaaaaacaccagtcactgtacttg

SEQ ID NO: 5969149 - DNA, 25 bp, Homo sapien
ttttaatgaaatttgcgcatttttc

SEQ ID NO: 5969150 - DNA, 25 bp, Homo sapien
tggcaaaaaattcatctgcagtcaa

SEQ ID NO: 5969151 - DNA, 25 bp, Homo sapien
aaagatttcaatacgctaaaatctt

SEQ ID NO: 5969152 - DNA, 25 bp, Homo sapien
ctgggtttgagcggatgatgactga

SEQ ID NO: 5969153 - DNA, 25 bp, Homo sapien
gcgcatttttccaagtctgataagt

SEQ ID NO: 5969154 - DNA, 25 bp, Homo sapien
gagtttaccctggatatcttgctta

SEQ ID NO: 5969155 - DNA, 25 bp, Homo sapien
tagcattagtagcattattaacctt

SEQ ID NO: 5969156 - DNA, 25 bp, Homo sapien
caaccagctctgttaacaccctttc

SEQ ID NO: 5969157 - DNA, 25 bp, Homo sapien
tagcgcggcatccttttttgatgtt

SEQ ID NO: 5969158 - DNA, 25 bp, Homo sapien
ttactgttcttggtcttagaaatgg

SEQ ID NO: 5969159 - DNA, 25 bp, Homo sapien
agaggagtttgatatttttaacttc

SEQ ID NO: 5969160 - DNA, 25 bp, Homo sapien
tttacccgcttcctcaataataacc

SEQ ID NO: 5969161 - DNA, 25 bp, Homo sapien
tggaggtagcaatctaataacaagc

SEQ ID NO: 5969162 - DNA, 25 bp, Homo sapien
ttattatctcgtaagatggcaaaaa

SEQ ID NO: 5969163 - DNA, 25 bp, Homo sapien
atcttagcggatgcttcctcttctt

SEQ ID NO: 5969164 - DNA, 25 bp, Homo sapien
tgtgggtagcattagtagcattatt

SEQ ID NO: 5969165 - DNA, 25 bp, Homo sapien
gcaaaaaattcatctgcagtcaaat

SEQ ID NO: 5969166 - DNA, 25 bp, Homo sapien
tctgcagtcaaatttggaggtagca

SEQ ID NO: 5969167 - DNA, 25 bp, Homo sapien
gtcgagtttttgaatactttactag

SEQ ID NO: 5969168 - DNA, 25 bp, Homo sapien
ggttgatttacccaatctagccttt

SEQ ID NO: 5969169 - DNA, 25 bp, Homo sapien
tcttgttattccttctgcctttgct

SEQ ID NO: 5969170 - DNA, 25 bp, Homo sapien
gtctgataagttgtcgaacaagaaa

SEQ ID NO: 5969171 - DNA, 25 bp, Homo sapien
tcaccagttccaaccagctctgtta

SEQ ID NO: 5969172 - DNA, 25 bp, Homo sapien
ttcttcaattgttcctactagcgcg

SEQ ID NO: 5969173 - DNA, 25 bp, Homo sapien
tgttcttggtcttagaaatggtgct

SEQ ID NO: 5969174 - DNA, 25 bp, Homo sapien
atttttccaagtctgataagttgtc

SEQ ID NO: 5969175 - DNA, 25 bp, Homo sapien
tgaggctgagaggagtttgatattt

SEQ ID NO: 5969176 - DNA, 25 bp, Homo sapien
atctaccgtctcattcttacttttt

SEQ ID NO: 5969177 - DNA, 25 bp, Homo sapien
gtagggcgacagtttcatatctgga

SEQ ID NO: 5969178 - DNA, 25 bp, Homo sapien
ttggaacgacggctgggtttgagcg

SEQ ID NO: 5969179 - DNA, 25 bp, Homo sapien
gaataatgaccttcaaaaaaacacc

SEQ ID NO: 5969180 - DNA, 25 bp, Homo sapien
ccatcatcgttattattatctcgta

SEQ ID NO: 5969181 - DNA, 25 bp, Homo sapien
tcctcaataataaccacattactgt

SEQ ID NO: 5969182 - DNA, 25 bp, Homo sapien
ttctttacgtagggcgacagtttca

SEQ ID NO: 5969183 - DNA, 25 bp, Homo sapien
tagtagcattattaaccttattctc

SEQ ID NO: 5969184 - DNA, 25 bp, Homo sapien
aaaaaattcatctgcagtcaaattt

SEQ ID NO: 5969185 - DNA, 25 bp, Homo sapien
gaatttctttacgtagggcgacagt

SEQ ID NO: 5969186 - DNA, 25 bp, Homo sapien
ctaactctatgctttttgagaattc

SEQ ID NO: 5969187 - DNA, 25 bp, Homo sapien
tcttgcttatcaccatcatcgttat

SEQ ID NO: 5969188 - DNA, 25 bp, Homo sapien
tcatcacgatgcaaaatttttaccc

SEQ ID NO: 5969189 - DNA, 25 bp, Homo sapien
catctgcagtcaaatttggaggtag

SEQ ID NO: 5969190 - DNA, 25 bp, Homo sapien
ctatgctttttgagaattctttttc

SEQ ID NO: 5969191 - DNA, 25 bp, Homo sapien
tatagttataatactctctgttcct

SEQ ID NO: 5969192 - DNA, 25 bp, Homo sapien
ataataaccacattactgttcttgg

SEQ ID NO: 5969193 - DNA, 25 bp, Homo sapien
gcttttttcacgattttcacgcttc

SEQ ID NO: 5969194 - DNA, 25 bp, Homo sapien
ttctgcctttgctattgttgtgggt

SEQ ID NO: 5969195 - DNA, 25 bp, Homo sapien
gttttttctttggtatcttagcgga

SEQ ID NO: 5969196 - DNA, 25 bp, Homo sapien
ggtatcatcacgatgcaaaattttt

SEQ ID NO: 5969197 - DNA, 25 bp, Homo sapien
tctttaggttggaacgacggctggg

SEQ ID NO: 5969198 - DNA, 25 bp, Homo sapien
gcgcggcatccttttttgatgtttg

SEQ ID NO: 5969199 - DNA, 25 bp, Homo sapien
gatgcaaaatttttacccgtggtac

SEQ ID NO: 5969200 - DNA, 25 bp, Homo sapien
tatcttgcttatcaccatcatcgtt

SEQ ID NO: 5969201 - DNA, 25 bp, Homo sapien
cacattactgttcttggtcttagaa

SEQ ID NO: 5969202 - DNA, 25 bp, Homo sapien
aagtctgataagttgtcgaacaaga

SEQ ID NO: 5969203 - DNA, 25 bp, Homo sapien
agatttcaatacgctaaaatcttgg

SEQ ID NO: 5969204 - DNA, 25 bp, Homo sapien
gtatcttagcggatgcttcctcttc

SEQ ID NO: 5969205 - DNA, 25 bp, Homo sapien
cgacagtttcatatctggaattgta

SEQ ID NO: 5969206 - DNA, 25 bp, Homo sapien
tctcttgcaaaagcattttcttctt

SEQ ID NO: 5969207 - DNA, 25 bp, Homo sapien
accctggatatcttgcttatcacca

SEQ ID NO: 5969208 - DNA, 25 bp, Homo sapien
ttccttctgcctttgctattgttgt

SEQ ID NO: 5969209 - DNA, 25 bp, Homo sapien
atcacgatgcaaaatttttacccgt

SEQ ID NO: 5969210 - DNA, 25 bp, Homo sapien
gcaaaagcattttcttcttcctttg

SEQ ID NO: 5969211 - DNA, 25 bp, Homo sapien
tatcaccagttccaaccagctctgt

SEQ ID NO: 5969212 - DNA, 25 bp, Homo sapien
ctttttctaaagatttcaatacgct

SEQ ID NO: 5969213 - DNA, 25 bp, Homo sapien
cgtcttcttcaattgttcctactag

SEQ ID NO: 5969214 - DNA, 25 bp, Homo sapien
tttcttgttattccttctgcctttg

SEQ ID NO: 5969215 - DNA, 25 bp, Homo sapien
ctaccgtctcattcttactttttcc

SEQ ID NO: 5969216 - DNA, 25 bp, Homo sapien
tattcttgaccttatcaccagttcc

SEQ ID NO: 5969217 - DNA, 25 bp, Homo sapien
aagatggcaaaaaattcatctgcag

SEQ ID NO: 5969218 - DNA, 25 bp, Homo sapien
tttgttcttattcttgaccttatca

SEQ ID NO: 5969219 - DNA, 25 bp, Homo sapien
tgttcttattcttgaccttatcacc

SEQ ID NO: 5969220 - DNA, 25 bp, Homo sapien
gtgaatttctttacgtagggcgaca

SEQ ID NO: 5969221 - DNA, 25 bp, Homo sapien
taatactctctgttccttttcttgt

SEQ ID NO: 5969222 - DNA, 25 bp, Homo sapien
cttcaattgttcctactagcgcggc

SEQ ID NO: 5969223 - DNA, 25 bp, Homo sapien
acgctaaaatcttggaatgagtact

SEQ ID NO: 5969224 - DNA, 25 bp, Homo sapien
ctttgctattgttgtgggtagcatt

SEQ ID NO: 5969225 - DNA, 25 bp, Homo sapien
atctggaattgtaatattatcctta

SEQ ID NO: 5969226 - DNA, 25 bp, Homo sapien
catccttttttgatgtttgagtgaa

SEQ ID NO: 5969227 - DNA, 25 bp, Homo sapien
tgatgtttgagtgaatttctttacg

SEQ ID NO: 5969228 - DNA, 25 bp, Homo sapien
cttattcttgaccttatcaccagtt

SEQ ID NO: 5969229 - DNA, 25 bp, Homo sapien
ataacaagcttaaatccttcattct

SEQ ID NO: 5969230 - DNA, 25 bp, Homo sapien
cagtcaaatttggaggtagcaatct

SEQ ID NO: 5969231 - DNA, 25 bp, Homo sapien
ctttacgtagggcgacagtttcata

SEQ ID NO: 5969232 - DNA, 25 bp, Homo sapien
tctgttccgttttttctttggtatc

SEQ ID NO: 5969233 - DNA, 25 bp, Homo sapien
ccgagaatatgtcgagtttttgaat

SEQ ID NO: 5969234 - DNA, 25 bp, Homo sapien
ggttggaacgacggctgggtttgag

SEQ ID NO: 5969235 - DNA, 25 bp, Homo sapien
atacgctaaaatcttggaatgagta

SEQ ID NO: 5969236 - DNA, 25 bp, Homo sapien
aatactttactagaataatgacctt

SEQ ID NO: 5969237 - DNA, 25 bp, Homo sapien
cttatcaccagttccaaccagctct

SEQ ID NO: 5969238 - DNA, 25 bp, Homo sapien
cttcctcaataataaccacattact

SEQ ID NO: 5969239 - DNA, 25 bp, Homo sapien
gtcaaatttggaggtagcaatctaa

SEQ ID NO: 5969240 - DNA, 25 bp, Homo sapien
tggaatgagtactcgtcattttcat

SEQ ID NO: 5969241 - DNA, 25 bp, Homo sapien
ttcttcttgcctctgttccgttttt

SEQ ID NO: 5969242 - DNA, 25 bp, Homo sapien
actagaataatgaccttcaaaaaaa

SEQ ID NO: 5969243 - DNA, 25 bp, Homo sapien
ttcgtcttcttcaattgttcctact

SEQ ID NO: 5969244 - DNA, 25 bp, Homo sapien
gttattattatctcgtaagatggca

SEQ ID NO: 5969245 - DNA, 25 bp, Homo sapien
tggtcttagaaatggtgcttttttc

SEQ ID NO: 5969246 - DNA, 25 bp, Homo sapien
atcaccatcatcgttattattatct

SEQ ID NO: 5969247 - DNA, 25 bp, Homo sapien
ttttctaaagatttcaatacgctaa

SEQ ID NO: 5969248 - DNA, 25 bp, Homo sapien
tttatagttataatactctctgttc

SEQ ID NO: 5969249 - DNA, 25 bp, Homo sapien
tctcgtaagatggcaaaaaattcat

SEQ ID NO: 5969250 - DNA, 25 bp, Homo sapien
tggtatcttagcggatgcttcctct

SEQ ID NO: 5969251 - DNA, 25 bp, Homo sapien
ctttactagaataatgaccttcaaa

SEQ ID NO: 5969252 - DNA, 25 bp, Homo sapien
aatccttcattctcggttgatttac

SEQ ID NO: 5969253 - DNA, 25 bp, Homo sapien
gtttgagcggatgatgactgaggct

SEQ ID NO: 5969254 - DNA, 25 bp, Homo sapien
gagcggatgatgactgaggctgaga

SEQ ID NO: 5969255 - DNA, 25 bp, Homo sapien
cttttttgatgtttgagtgaatttc

SEQ ID NO: 5969256 - DNA, 25 bp, Homo sapien
aatttggaggtagcaatctaataac

SEQ ID NO: 5969257 - DNA, 25 bp, Homo sapien
ttatcaccatcatcgttattattat

SEQ ID NO: 5969258 - DNA, 25 bp, Homo sapien
gtaagatggcaaaaaattcatctgc

SEQ ID NO: 5969259 - DNA, 25 bp, Homo sapien
tcgtcattttcattcagctgtttca

SEQ ID NO: 5969260 - DNA, 25 bp, Homo sapien
tagcaatctaataacaagcttaaat

SEQ ID NO: 5969261 - DNA, 25 bp, Homo sapien
aggagtttgatatttttaacttctc

SEQ ID NO: 5969262 - DNA, 25 bp, Homo sapien
tttctttggtatcttagcggatgct

SEQ ID NO: 5969263 - DNA, 25 bp, Homo sapien
aacgacggctgggtttgagcggatg

SEQ ID NO: 5969264 - DNA, 25 bp, Homo sapien
gtttgagtgaatttctttacgtagg

SEQ ID NO: 5969265 - DNA, 25 bp, Homo sapien
taagttgtcgaacaagaaattgcac

SEQ ID NO: 5969266 - DNA, 25 bp, Homo sapien
tcttggtatcatcacgatgcaaaat

SEQ ID NO: 5969267 - DNA, 25 bp, Homo sapien
aactctatgctttttgagaattctt

SEQ ID NO: 5969268 - DNA, 25 bp, Homo sapien
tttttcctctgttcttgttatgata

SEQ ID NO: 5969269 - DNA, 25 bp, Homo sapien
attctcggttgatttacccaatcta

SEQ ID NO: 5969270 - DNA, 25 bp, Homo sapien
actcgtcattttcattcagctgttt

SEQ ID NO: 5969271 - DNA, 25 bp, Homo sapien
ttccaagtctgataagttgtcgaac

SEQ ID NO: 5969272 - DNA, 25 bp, Homo sapien
gagtgaatttctttacgtagggcga

SEQ ID NO: 5969273 - DNA, 25 bp, Homo sapien
caatacgctaaaatcttggaatgag

SEQ ID NO: 5969274 - DNA, 25 bp, Homo sapien
tttaggatctaccgtctcattctta

SEQ ID NO: 5969275 - DNA, 25 bp, Homo sapien
tgaccttcaaaaaaacaccagtcac

SEQ ID NO: 5969276 - DNA, 25 bp, Homo sapien
cttagaaatggtgcttttttcacga

SEQ ID NO: 5969277 - DNA, 25 bp, Homo sapien
ctggaattgtaatattatccttatt

SEQ ID NO: 5969278 - DNA, 25 bp, Homo sapien
taaaaatttcgtcttcttcaattgt

SEQ ID NO: 5969279 - DNA, 25 bp, Homo sapien
gcctttgctattgttgtgggtagca

SEQ ID NO: 5969280 - DNA, 25 bp, Homo sapien
cattcagctgtttcattgaattcat

SEQ ID NO: 5969281 - DNA, 25 bp, Homo sapien
cagttccaaccagctctgttaacac

SEQ ID NO: 5969282 - DNA, 25 bp, Homo sapien
cacgatgcaaaatttttacccgtgg

SEQ ID NO: 5969283 - DNA, 25 bp, Homo sapien
tttacaagttttaatgaaatttgcg

SEQ ID NO: 5969284 - DNA, 25 bp, Homo sapien
gtcattttcattcagctgtttcatt

SEQ ID NO: 5969285 - DNA, 25 bp, Homo sapien
gcttcttcttgcctctgttccgttt

SEQ ID NO: 5969286 - DNA, 25 bp, Homo sapien
aaattgcaccgagaatatgtcgagt

SEQ ID NO: 5969287 - DNA, 25 bp, Homo sapien
acggctgggtttgagcggatgatga

SEQ ID NO: 5969288 - DNA, 25 bp, Homo sapien
ttaacaccctttctgttctttctgc

SEQ ID NO: 5969289 - DNA, 25 bp, Homo sapien
agttgtcgaacaagaaattgcaccg

SEQ ID NO: 5969290 - DNA, 25 bp, Homo sapien
ttttcacgattttcacgcttcttct

SEQ ID NO: 5969291 - DNA, 25 bp, Homo sapien
gttattccttctgcctttgctattg

SEQ ID NO: 5969292 - DNA, 25 bp, Homo sapien
ttgcgcatttttccaagtctgataa

SEQ ID NO: 5969293 - DNA, 25 bp, Homo sapien
agtttcatatctggaattgtaatat

SEQ ID NO: 5969294 - DNA, 25 bp, Homo sapien
ttatgatacctatttcccctgcctt

SEQ ID NO: 5969295 - DNA, 25 bp, Homo sapien
gttcttgttatgatacctatttccc

SEQ ID NO: 5969296 - DNA, 25 bp, Homo sapien
ttcaatacgctaaaatcttggaatg

SEQ ID NO: 5969297 - DNA, 25 bp, Homo sapien
ttgtcgaacaagaaattgcaccgag

SEQ ID NO: 5969298 - DNA, 25 bp, Homo sapien
ttcacgattttcacgcttcttcttg

SEQ ID NO: 5969299 - DNA, 25 bp, Homo sapien
cagctgtttcattgaattcataaat

SEQ ID NO: 5969300 - DNA, 25 bp, Homo sapien
ttctaaagatttcaatacgctaaaa

SEQ ID NO: 5969301 - DNA, 25 bp, Homo sapien
ggatctaccgtctcattcttacttt

SEQ ID NO: 5969302 - DNA, 25 bp, Homo sapien
gcatttttccaagtctgataagttg

SEQ ID NO: 5969303 - DNA, 25 bp, Homo sapien
tccttttttgatgtttgagtgaatt

SEQ ID NO: 5969304 - DNA, 25 bp, Homo sapien
gtcactgtacttgagtttaccctgg

SEQ ID NO: 5969305 - DNA, 25 bp, Homo sapien
aatctaataacaagcttaaatcctt

SEQ ID NO: 5969306 - DNA, 25 bp, Homo sapien
tattccttctgcctttgctattgtt

SEQ ID NO: 5969307 - DNA, 25 bp, Homo sapien
atttgcgcatttttccaagtctgat

SEQ ID NO: 5969308 - DNA, 25 bp, Homo sapien
gatgactgaggctgagaggagtttg

SEQ ID NO: 5969309 - DNA, 25 bp, Homo sapien
ttgcaaaagcattttcttcttcctt

SEQ ID NO: 5969310 - DNA, 25 bp, Homo sapien
ctgttccttttcttgttattccttc

SEQ ID NO: 5969311 - DNA, 25 bp, Homo sapien
ttgttattccttctgcctttgctat

SEQ ID NO: 5969312 - DNA, 25 bp, Homo sapien
ggatgcttcctcttctttgaatttc

SEQ ID NO: 5969313 - DNA, 25 bp, Homo sapien
gatggcaaaaaattcatctgcagtc

SEQ ID NO: 5969314 - DNA, 25 bp, Homo sapien
ttattctcattctttttaggatcta

SEQ ID NO: 5969315 - DNA, 25 bp, Homo sapien
ctaaagatttcaatacgctaaaatc

SEQ ID NO: 5969316 - DNA, 25 bp, Homo sapien
tagaaatggtgcttttttcacgatt

SEQ ID NO: 5969317 - DNA, 25 bp, Homo sapien
aaatttcgtcttcttcaattgttcc

SEQ ID NO: 5969318 - DNA, 25 bp, Homo sapien
tctttggtatcttagcggatgcttc

SEQ ID NO: 5969319 - DNA, 25 bp, Homo sapien
gcaatctaataacaagcttaaatcc

SEQ ID NO: 5969320 - DNA, 25 bp, Homo sapien
gtagcattattaaccttattctcat

SEQ ID NO: 5969321 - DNA, 25 bp, Homo sapien
gataagttgtcgaacaagaaattgc

SEQ ID NO: 5969322 - DNA, 25 bp, Homo sapien
acttgagtttaccctggatatcttg

SEQ ID NO: 5969323 - DNA, 25 bp, Homo sapien
aaatcttggaatgagtactcgtcat

SEQ ID NO: 5969324 - DNA, 25 bp, Homo sapien
ggaacgacggctgggtttgagcgga

SEQ ID NO: 5969325 - DNA, 25 bp, Homo sapien
caataataaccacattactgttctt

SEQ ID NO: 5969326 - DNA, 25 bp, Homo sapien
tgttaacaccctttctgttctttct

SEQ ID NO: 5969327 - DNA, 25 bp, Homo sapien
gaatgagtactcgtcattttcattc

SEQ ID NO: 5969328 - DNA, 25 bp, Homo sapien
accagttccaaccagctctgttaac

SEQ ID NO: 5969329 - DNA, 25 bp, Homo sapien
acgcttcttcttgcctctgttccgt

SEQ ID NO: 5969330 - DNA, 25 bp, Homo sapien
ttatcaatgaatttacaagttttaa

SEQ ID NO: 5969331 - DNA, 25 bp, Homo sapien
attgcaccgagaatatgtcgagttt

SEQ ID NO: 5969332 - DNA, 25 bp, Homo sapien
cttagcggatgcttcctcttctttg

SEQ ID NO: 5969333 - DNA, 25 bp, Homo sapien
caatgaatttacaagttttaatgaa

SEQ ID NO: 5969334 - DNA, 25 bp, Homo sapien
cttattatcaatgaatttacaagtt

SEQ ID NO: 5969335 - DNA, 25 bp, Homo sapien
taaaatcttggaatgagtactcgtc

SEQ ID NO: 5969336 - DNA, 25 bp, Homo sapien
tttctttaggttggaacgacggctg

SEQ ID NO: 5969337 - DNA, 25 bp, Homo sapien
tctttttaggatctaccgtctcatt

SEQ ID NO: 5969338 - DNA, 25 bp, Homo sapien
gtttaccctggatatcttgcttatc

SEQ ID NO: 5969339 - DNA, 25 bp, Homo sapien
ttttccaagtctgataagttgtcga

SEQ ID NO: 5969340 - DNA, 25 bp, Homo sapien
tccaaccagctctgttaacaccctt

SEQ ID NO: 5969341 - DNA, 25 bp, Homo sapien
atcatcgttattattatctcgtaag

SEQ ID NO: 5969342 - DNA, 25 bp, Homo sapien
tccttttcttgttattccttctgcc

SEQ ID NO: 5969343 - DNA, 25 bp, Homo sapien
atatgtcgagtttttgaatacttta

SEQ ID NO: 5969344 - DNA, 25 bp, Homo sapien
gcggcatccttttttgatgtttgag

SEQ ID NO: 5969345 - DNA, 25 bp, Homo sapien
aatggtgcttttttcacgattttca

SEQ ID NO: 5969346 - DNA, 25 bp, Homo sapien
ccaagtctgataagttgtcgaacaa

SEQ ID NO: 5969347 - DNA, 25 bp, Homo sapien
ccttctgcctttgctattgttgtgg

SEQ ID NO: 5969348 - DNA, 25 bp, Homo sapien
cctggatatcttgcttatcaccatc

SEQ ID NO: 5969349 - DNA, 25 bp, Homo sapien
tcgttattattatctcgtaagatgg

SEQ ID NO: 5969350 - DNA, 25 bp, Homo sapien
atgtatatcgccagaaaaattaaaa

SEQ ID NO: 5969351 - DNA, 25 bp, Homo sapien
gccactgtcgaaggaattaggaagg

SEQ ID NO: 5969352 - DNA, 25 bp, Homo sapien
tgaagatattgctgtacctgatacg

SEQ ID NO: 5969353 - DNA, 25 bp, Homo sapien
cattccaagagaaagttcaattaac

SEQ ID NO: 5969354 - DNA, 25 bp, Homo sapien
tgtacctgatacgaatctagattcc

SEQ ID NO: 5969355 - DNA, 25 bp, Homo sapien
tatagagccaaaaactgtgaaaaaa

SEQ ID NO: 5969356 - DNA, 25 bp, Homo sapien
tacgtgactgacggtgctgccactg

SEQ ID NO: 5969357 - DNA, 25 bp, Homo sapien
gacacataactatttaatggacacg

SEQ ID NO: 5969358 - DNA, 25 bp, Homo sapien
tatttcaaggtttttgactggtgta

SEQ ID NO: 5969359 - DNA, 25 bp, Homo sapien
cataactatttaatggacacgcaat

SEQ ID NO: 5969360 - DNA, 25 bp, Homo sapien
cattcatggtagcagaatatacaga

SEQ ID NO: 5969361 - DNA, 25 bp, Homo sapien
actgacggtgctgccactgtcgaag

SEQ ID NO: 5969362 - DNA, 25 bp, Homo sapien
ccacctgaagccatcatatttagct

SEQ ID NO: 5969363 - DNA, 25 bp, Homo sapien
actactatgcatcacttgcctgttc

SEQ ID NO: 5969364 - DNA, 25 bp, Homo sapien
gcctgtaaatttgaagaagttaaat

SEQ ID NO: 5969365 - DNA, 25 bp, Homo sapien
ttcattgcctgtaaatttgaagaag

SEQ ID NO: 5969366 - DNA, 25 bp, Homo sapien
taactatttaatggacacgcaatct

SEQ ID NO: 5969367 - DNA, 25 bp, Homo sapien
cttaaatacaaaaagcctaaacatg

SEQ ID NO: 5969368 - DNA, 25 bp, Homo sapien
tgaaacttttattcattatagtggc

SEQ ID NO: 5969369 - DNA, 25 bp, Homo sapien
cacaaaatgttgttaaattgaataa

SEQ ID NO: 5969370 - DNA, 25 bp, Homo sapien
aaattacaactactatgcatcactt

SEQ ID NO: 5969371 - DNA, 25 bp, Homo sapien
cattatttttagcgatcaacctgct

SEQ ID NO: 5969372 - DNA, 25 bp, Homo sapien
gagacaattatcaaatgattcaacc

SEQ ID NO: 5969373 - DNA, 25 bp, Homo sapien
ctgcttacctgaaacattattttta

SEQ ID NO: 5969374 - DNA, 25 bp, Homo sapien
tcaaggtttttgactggtgtaaaca

SEQ ID NO: 5969375 - DNA, 25 bp, Homo sapien
accattccaagagaaagttcaatta

SEQ ID NO: 5969376 - DNA, 25 bp, Homo sapien
cgatagagatggatgatccattcat

SEQ ID NO: 5969377 - DNA, 25 bp, Homo sapien
ccatgagggcgctgttaattgactg

SEQ ID NO: 5969378 - DNA, 25 bp, Homo sapien
tggattcgatagagatggatgatcc

SEQ ID NO: 5969379 - DNA, 25 bp, Homo sapien
ggatgatccattcatggtagcagaa

SEQ ID NO: 5969380 - DNA, 25 bp, Homo sapien
aagttcaattaacttgacacctcac

SEQ ID NO: 5969381 - DNA, 25 bp, Homo sapien
gaataaattacaactactatgcatc

SEQ ID NO: 5969382 - DNA, 25 bp, Homo sapien
cgaatgaaaaaaaagttctatccga

SEQ ID NO: 5969383 - DNA, 25 bp, Homo sapien
agattctatattttctcatctttac

SEQ ID NO: 5969384 - DNA, 25 bp, Homo sapien
tttaaggattttatcagtgaactag

SEQ ID NO: 5969385 - DNA, 25 bp, Homo sapien
ttcactgcttacctgaaacattatt

SEQ ID NO: 5969386 - DNA, 25 bp, Homo sapien
atagagatggatgatccattcatgg

SEQ ID NO: 5969387 - DNA, 25 bp, Homo sapien
taacaaattttgcgtacgtgactga

SEQ ID NO: 5969388 - DNA, 25 bp, Homo sapien
aatacaaaaagcctaaacatggcat

SEQ ID NO: 5969389 - DNA, 25 bp, Homo sapien
gttataacatatctctaccaaaccc

SEQ ID NO: 5969390 - DNA, 25 bp, Homo sapien
ctacgaatgaaaaaaaagttctatc

SEQ ID NO: 5969391 - DNA, 25 bp, Homo sapien
tcgaggtaaattgcaaagagattcc

SEQ ID NO: 5969392 - DNA, 25 bp, Homo sapien
attatcaaatgattcaaccgatcct

SEQ ID NO: 5969393 - DNA, 25 bp, Homo sapien
aaatgggatgaaacttttattcatt

SEQ ID NO: 5969394 - DNA, 25 bp, Homo sapien
atttcattaggagaatttcaaaagc

SEQ ID NO: 5969395 - DNA, 25 bp, Homo sapien
ttcgttctaagttctttaggttata

SEQ ID NO: 5969396 - DNA, 25 bp, Homo sapien
cactgcttacctgaaacattatttt

SEQ ID NO: 5969397 - DNA, 25 bp, Homo sapien
ttatttttagcgatcaacctgctag

SEQ ID NO: 5969398 - DNA, 25 bp, Homo sapien
aaatttcactgcttacctgaaacat

SEQ ID NO: 5969399 - DNA, 25 bp, Homo sapien
tattcgatttgttgtaataaattca

SEQ ID NO: 5969400 - DNA, 25 bp, Homo sapien
ctgcattgaaacaaggaacatggcc

SEQ ID NO: 5969401 - DNA, 25 bp, Homo sapien
gactggttggttgaagttcatgaga

SEQ ID NO: 5969402 - DNA, 25 bp, Homo sapien
catgagaaatttcactgcttacctg

SEQ ID NO: 5969403 - DNA, 25 bp, Homo sapien
tgagacttaaatacaaaaagcctaa

SEQ ID NO: 5969404 - DNA, 25 bp, Homo sapien
atggcatggtttatttcaaggtttt

SEQ ID NO: 5969405 - DNA, 25 bp, Homo sapien
tttacaactccctcgaggtaaattg

SEQ ID NO: 5969406 - DNA, 25 bp, Homo sapien
actccctcgaggtaaattgcaaaga

SEQ ID NO: 5969407 - DNA, 25 bp, Homo sapien
ctcactctacgaatgaaaaaaaagt

SEQ ID NO: 5969408 - DNA, 25 bp, Homo sapien
atcaacctgctagatcgatttttat

SEQ ID NO: 5969409 - DNA, 25 bp, Homo sapien
caacctgctagatcgatttttatca

SEQ ID NO: 5969410 - DNA, 25 bp, Homo sapien
gctgagctattcgttctaagttctt

SEQ ID NO: 5969411 - DNA, 25 bp, Homo sapien
aaatttcattaggagaatttcaaaa

SEQ ID NO: 5969412 - DNA, 25 bp, Homo sapien
gcttacctgaaacattatttttagc

SEQ ID NO: 5969413 - DNA, 25 bp, Homo sapien
atgagggcgctgttaattgactggt

SEQ ID NO: 5969414 - DNA, 25 bp, Homo sapien
tccctcgaggtaaattgcaaagaga

SEQ ID NO: 5969415 - DNA, 25 bp, Homo sapien
ttttagcgatcaacctgctagatcg

SEQ ID NO: 5969416 - DNA, 25 bp, Homo sapien
gagggcgctgttaattgactggttg

SEQ ID NO: 5969417 - DNA, 25 bp, Homo sapien
tgaaacaaggaacatggccaaattc

SEQ ID NO: 5969418 - DNA, 25 bp, Homo sapien
ttccaaatgggatgaaacttttatt

SEQ ID NO: 5969419 - DNA, 25 bp, Homo sapien
ggtgctgccactgtcgaaggaatta

SEQ ID NO: 5969420 - DNA, 25 bp, Homo sapien
tctctaccaaaccccctaaatttca

SEQ ID NO: 5969421 - DNA, 25 bp, Homo sapien
tctatattttctcatctttacgaga

SEQ ID NO: 5969422 - DNA, 25 bp, Homo sapien
ttgaaaagctccatgagggcgctgt

SEQ ID NO: 5969423 - DNA, 25 bp, Homo sapien
ggtaaacagtaacaaaatcgattct

SEQ ID NO: 5969424 - DNA, 25 bp, Homo sapien
gaggtaaacagtaacaaaatcgatt

SEQ ID NO: 5969425 - DNA, 25 bp, Homo sapien
agctattcgttctaagttctttagg

SEQ ID NO: 5969426 - DNA, 25 bp, Homo sapien
aaacatggcatggtttatttcaagg

SEQ ID NO: 5969427 - DNA, 25 bp, Homo sapien
ttgttgtaataaattcatccacctg

SEQ ID NO: 5969428 - DNA, 25 bp, Homo sapien
cctgatacgaatctagattccttga

SEQ ID NO: 5969429 - DNA, 25 bp, Homo sapien
cgaaggaattaggaaggctgagcta

SEQ ID NO: 5969430 - DNA, 25 bp, Homo sapien
ttcgatttgttgtaataaattcatc

SEQ ID NO: 5969431 - DNA, 25 bp, Homo sapien
atccacctgaagccatcatatttag

SEQ ID NO: 5969432 - DNA, 25 bp, Homo sapien
ataccattccaagagaaagttcaat

SEQ ID NO: 5969433 - DNA, 25 bp, Homo sapien
cttgcctgttcattgcctgtaaatt

SEQ ID NO: 5969434 - DNA, 25 bp, Homo sapien
gagccaaaaactgtgaaaaaaataa

SEQ ID NO: 5969435 - DNA, 25 bp, Homo sapien
atcatatttagctgcaatgtccatg

SEQ ID NO: 5969436 - DNA, 25 bp, Homo sapien
aaaatgctttccataccattccaag

SEQ ID NO: 5969437 - DNA, 25 bp, Homo sapien
aaaaataaaatgtcatcaatggaaa

SEQ ID NO: 5969438 - DNA, 25 bp, Homo sapien
cgatcctatagagccaaaaactgtg

SEQ ID NO: 5969439 - DNA, 25 bp, Homo sapien
cactgtcgaaggaattaggaaggct

SEQ ID NO: 5969440 - DNA, 25 bp, Homo sapien
tattttctcatctttacgagaagga

SEQ ID NO: 5969441 - DNA, 25 bp, Homo sapien
cattaggagaatttcaaaagctgac

SEQ ID NO: 5969442 - DNA, 25 bp, Homo sapien
gagaatttcaaaagctgacaattac

SEQ ID NO: 5969443 - DNA, 25 bp, Homo sapien
gccaaattcatcatggaatattcga

SEQ ID NO: 5969444 - DNA, 25 bp, Homo sapien
gctagatcgatttttatcacaaaat

SEQ ID NO: 5969445 - DNA, 25 bp, Homo sapien
aaacaagaaagagacaattatcaaa

SEQ ID NO: 5969446 - DNA, 25 bp, Homo sapien
atggatgatccattcatggtagcag

SEQ ID NO: 5969447 - DNA, 25 bp, Homo sapien
atgattcaaccgatcctatagagcc

SEQ ID NO: 5969448 - DNA, 25 bp, Homo sapien
tccttgagacttaaatacaaaaagc

SEQ ID NO: 5969449 - DNA, 25 bp, Homo sapien
attgaaacaaggaacatggccaaat

SEQ ID NO: 5969450 - DNA, 25 bp, Homo sapien
aacagtaacaaaatcgattctttac

SEQ ID NO: 5969451 - DNA, 25 bp, Homo sapien
atcagtgaactagttgaagatattg

SEQ ID NO: 5969452 - DNA, 25 bp, Homo sapien
ccaagagaaagttcaattaacttga

SEQ ID NO: 5969453 - DNA, 25 bp, Homo sapien
tagtccaattagtgaaaggaaaatc

SEQ ID NO: 5969454 - DNA, 25 bp, Homo sapien
ggttgaagttcatgagaaatttcac

SEQ ID NO: 5969455 - DNA, 25 bp, Homo sapien
cgatcaacctgctagatcgattttt

SEQ ID NO: 5969456 - DNA, 25 bp, Homo sapien
gatattgctgtacctgatacgaatc

SEQ ID NO: 5969457 - DNA, 25 bp, Homo sapien
ttaggaaggctgagctattcgttct

SEQ ID NO: 5969458 - DNA, 25 bp, Homo sapien
gtcgaaggaattaggaaggctgagc

SEQ ID NO: 5969459 - DNA, 25 bp, Homo sapien
cactctacgaatgaaaaaaaagttc

SEQ ID NO: 5969460 - DNA, 25 bp, Homo sapien
ttccaagagaaagttcaattaactt

SEQ ID NO: 5969461 - DNA, 25 bp, Homo sapien
attacaactactatgcatcacttgc

SEQ ID NO: 5969462 - DNA, 25 bp, Homo sapien
ttaggagaatttcaaaagctgacaa

SEQ ID NO: 5969463 - DNA, 25 bp, Homo sapien
taaggattttatcagtgaactagtt

SEQ ID NO: 5969464 - DNA, 25 bp, Homo sapien
tctccctatcatttgaaaagctcca

SEQ ID NO: 5969465 - DNA, 25 bp, Homo sapien
tacgagaaggaaatccaaatgctac

SEQ ID NO: 5969466 - DNA, 25 bp, Homo sapien
tatttaatggacacgcaatctccct

SEQ ID NO: 5969467 - DNA, 25 bp, Homo sapien
gaatttcaaaagctgacaattactg

SEQ ID NO: 5969468 - DNA, 25 bp, Homo sapien
gtgaactagttgaagatattgctgt

SEQ ID NO: 5969469 - DNA, 25 bp, Homo sapien
aacaaaatcgattctttacaactcc

SEQ ID NO: 5969470 - DNA, 25 bp, Homo sapien
ccgacacataactatttaatggaca

SEQ ID NO: 5969471 - DNA, 25 bp, Homo sapien
agattccttgagacttaaatacaaa

SEQ ID NO: 5969472 - DNA, 25 bp, Homo sapien
aagcctaaacatggcatggtttatt

SEQ ID NO: 5969473 - DNA, 25 bp, Homo sapien
cctagtccaattagtgaaaggaaaa

SEQ ID NO: 5969474 - DNA, 25 bp, Homo sapien
acgaatctagattccttgagactta

SEQ ID NO: 5969475 - DNA, 25 bp, Homo sapien
taacatatctctaccaaacccccta

SEQ ID NO: 5969476 - DNA, 25 bp, Homo sapien
tgcgtacgtgactgacggtgctgcc

SEQ ID NO: 5969477 - DNA, 25 bp, Homo sapien
ctgacaattactgcattgaaacaag

SEQ ID NO: 5969478 - DNA, 25 bp, Homo sapien
attctatattttctcatctttacga

SEQ ID NO: 5969479 - DNA, 25 bp, Homo sapien
gacttaaatacaaaaagcctaaaca

SEQ ID NO: 5969480 - DNA, 25 bp, Homo sapien
gattcaaccgatcctatagagccaa

SEQ ID NO: 5969481 - DNA, 25 bp, Homo sapien
tactatgcatcacttgcctgttcat

SEQ ID NO: 5969482 - DNA, 25 bp, Homo sapien
ctatccgaggtaaacagtaacaaaa

SEQ ID NO: 5969483 - DNA, 25 bp, Homo sapien
gaaacattatttttagcgatcaacc

SEQ ID NO: 5969484 - DNA, 25 bp, Homo sapien
atccgaggtaaacagtaacaaaatc

SEQ ID NO: 5969485 - DNA, 25 bp, Homo sapien
ttagcgatcaacctgctagatcgat

SEQ ID NO: 5969486 - DNA, 25 bp, Homo sapien
attccttgagacttaaatacaaaaa

SEQ ID NO: 5969487 - DNA, 25 bp, Homo sapien
attgtatccctagtccaattagtga

SEQ ID NO: 5969488 - DNA, 25 bp, Homo sapien
cgattctttacaactccctcgaggt

SEQ ID NO: 5969489 - DNA, 25 bp, Homo sapien
tccattcatggtagcagaatataca

SEQ ID NO: 5969490 - DNA, 25 bp, Homo sapien
atgtccatgtatatcgccagaaaaa

SEQ ID NO: 5969491 - DNA, 25 bp, Homo sapien
tcaaatgattcaaccgatcctatag

SEQ ID NO: 5969492 - DNA, 25 bp, Homo sapien
aggcaaggaaaatgctttccatacc

SEQ ID NO: 5969493 - DNA, 25 bp, Homo sapien
acggtgctgccactgtcgaaggaat

SEQ ID NO: 5969494 - DNA, 25 bp, Homo sapien
aattccaaatgggatgaaactttta

SEQ ID NO: 5969495 - DNA, 25 bp, Homo sapien
cacataactatttaatggacacgca

SEQ ID NO: 5969496 - DNA, 25 bp, Homo sapien
atttcactgcttacctgaaacatta

SEQ ID NO: 5969497 - DNA, 25 bp, Homo sapien
catggtagcagaatatacagattct

SEQ ID NO: 5969498 - DNA, 25 bp, Homo sapien
tacaactccctcgaggtaaattgca

SEQ ID NO: 5969499 - DNA, 25 bp, Homo sapien
aagagaaagttcaattaacttgaca

SEQ ID NO: 5969500 - DNA, 25 bp, Homo sapien
tagatcgatttttatcacaaaatgt

SEQ ID NO: 5969501 - DNA, 25 bp, Homo sapien
gcattgaaacaaggaacatggccaa

SEQ ID NO: 5969502 - DNA, 25 bp, Homo sapien
aggagaatttcaaaagctgacaatt

SEQ ID NO: 5969503 - DNA, 25 bp, Homo sapien
aaagctgacaattactgcattgaaa

SEQ ID NO: 5969504 - DNA, 25 bp, Homo sapien
tgagctattcgttctaagttcttta

SEQ ID NO: 5969505 - DNA, 25 bp, Homo sapien
tatcaaatgattcaaccgatcctat

SEQ ID NO: 5969506 - DNA, 25 bp, Homo sapien
cgtacgtgactgacggtgctgccac

SEQ ID NO: 5969507 - DNA, 25 bp, Homo sapien
aggattttatcagtgaactagttga

SEQ ID NO: 5969508 - DNA, 25 bp, Homo sapien
atatacagattctatattttctcat

SEQ ID NO: 5969509 - DNA, 25 bp, Homo sapien
ggtaaattgcaaagagattccaccc

SEQ ID NO: 5969510 - DNA, 25 bp, Homo sapien
taaatacaaaaagcctaaacatggc

SEQ ID NO: 5969511 - DNA, 25 bp, Homo sapien
aagattgtataggcaaggaaaatgc

SEQ ID NO: 5969512 - DNA, 25 bp, Homo sapien
ttctatccgaggtaaacagtaacaa

SEQ ID NO: 5969513 - DNA, 25 bp, Homo sapien
gctgttaattgactggttggttgaa

SEQ ID NO: 5969514 - DNA, 25 bp, Homo sapien
ttgctgtacctgatacgaatctaga

SEQ ID NO: 5969515 - DNA, 25 bp, Homo sapien
gaactagttgaagatattgctgtac

SEQ ID NO: 5969516 - DNA, 25 bp, Homo sapien
agcgtttaaggattttatcagtgaa

SEQ ID NO: 5969517 - DNA, 25 bp, Homo sapien
cagtgaactagttgaagatattgct

SEQ ID NO: 5969518 - DNA, 25 bp, Homo sapien
ttaattgactggttggttgaagttc

SEQ ID NO: 5969519 - DNA, 25 bp, Homo sapien
gaaggctgagctattcgttctaagt

SEQ ID NO: 5969520 - DNA, 25 bp, Homo sapien
gattcgatagagatggatgatccat

SEQ ID NO: 5969521 - DNA, 25 bp, Homo sapien
tcgatttttatcacaaaatgttgtt

SEQ ID NO: 5969522 - DNA, 25 bp, Homo sapien
ccctaaatttcattaggagaatttc

SEQ ID NO: 5969523 - DNA, 25 bp, Homo sapien
tagagccaaaaactgtgaaaaaaat

SEQ ID NO: 5969524 - DNA, 25 bp, Homo sapien
ctttccataccattccaagagaaag

SEQ ID NO: 5969525 - DNA, 25 bp, Homo sapien
gcaaggaaaatgctttccataccat

SEQ ID NO: 5969526 - DNA, 25 bp, Homo sapien
atctagattccttgagacttaaata

SEQ ID NO: 5969527 - DNA, 25 bp, Homo sapien
aatggaaaaatttggattcgataga

SEQ ID NO: 5969528 - DNA, 25 bp, Homo sapien
aaatccaaatgctaccgacacataa

SEQ ID NO: 5969529 - DNA, 25 bp, Homo sapien
catatttagctgcaatgtccatgta

SEQ ID NO: 5969530 - DNA, 25 bp, Homo sapien
atacgaatctagattccttgagact

SEQ ID NO: 5969531 - DNA, 25 bp, Homo sapien
ataaattcatccacctgaagccatc

SEQ ID NO: 5969532 - DNA, 25 bp, Homo sapien
acatggcatggtttatttcaaggtt

SEQ ID NO: 5969533 - DNA, 25 bp, Homo sapien
ttccacccatttggaaaaaacaaga

SEQ ID NO: 5969534 - DNA, 25 bp, Homo sapien
gttgaagatattgctgtacctgata

SEQ ID NO: 5969535 - DNA, 25 bp, Homo sapien
cctatcatttgaaaagctccatgag

SEQ ID NO: 5969536 - DNA, 25 bp, Homo sapien
gacaattatcaaatgattcaaccga

SEQ ID NO: 5969537 - DNA, 25 bp, Homo sapien
ggacacgcaatctccctatcatttg

SEQ ID NO: 5969538 - DNA, 25 bp, Homo sapien
atttcaaaagctgacaattactgca

SEQ ID NO: 5969539 - DNA, 25 bp, Homo sapien
ttgcaaagagattccacccatttgg

SEQ ID NO: 5969540 - DNA, 25 bp, Homo sapien
aaaatttggattcgatagagatgga

SEQ ID NO: 5969541 - DNA, 25 bp, Homo sapien
tacaactactatgcatcacttgcct

SEQ ID NO: 5969542 - DNA, 25 bp, Homo sapien
tattcgttctaagttctttaggtta

SEQ ID NO: 5969543 - DNA, 25 bp, Homo sapien
agccatcatatttagctgcaatgtc

SEQ ID NO: 5969544 - DNA, 25 bp, Homo sapien
tgaaaaaaaagttctatccgaggta

SEQ ID NO: 5969545 - DNA, 25 bp, Homo sapien
acttttattcattatagtggcggca

SEQ ID NO: 5969546 - DNA, 25 bp, Homo sapien
ggaaaatgctttccataccattcca

SEQ ID NO: 5969547 - DNA, 25 bp, Homo sapien
tgacggtgctgccactgtcgaagga

SEQ ID NO: 5969548 - DNA, 25 bp, Homo sapien
tgctttccataccattccaagagaa

SEQ ID NO: 5969549 - DNA, 25 bp, Homo sapien
atccaaatgctaccgacacataact

SEQ ID NO: 5969550 - DNA, 25 bp, Homo sapien
catctttacgagaaggaaatccaaa

SEQ ID NO: 5969551 - DNA, 25 bp, Homo sapien
ataatgaagattgtataggcaagga

SEQ ID NO: 5969552 - DNA, 25 bp, Homo sapien
tttggattcgatagagatggatgat

SEQ ID NO: 5969553 - DNA, 25 bp, Homo sapien
tgtatccctagtccaattagtgaaa

SEQ ID NO: 5969554 - DNA, 25 bp, Homo sapien
tgctgccactgtcgaaggaattagg

SEQ ID NO: 5969555 - DNA, 25 bp, Homo sapien
atggaatattcgatttgttgtaata

SEQ ID NO: 5969556 - DNA, 25 bp, Homo sapien
tcatggaatattcgatttgttgtaa

SEQ ID NO: 5969557 - DNA, 25 bp, Homo sapien
aggaaggctgagctattcgttctaa

SEQ ID NO: 5969558 - DNA, 25 bp, Homo sapien
ttatcagtgaactagttgaagatat

SEQ ID NO: 5969559 - DNA, 25 bp, Homo sapien
acctcactctacgaatgaaaaaaaa

SEQ ID NO: 5969560 - DNA, 25 bp, Homo sapien
gagaaagttcaattaacttgacacc

SEQ ID NO: 5969561 - DNA, 25 bp, Homo sapien
ccatcatatttagctgcaatgtcca

SEQ ID NO: 5969562 - DNA, 25 bp, Homo sapien
tcaattaacttgacacctcactcta

SEQ ID NO: 5969563 - DNA, 25 bp, Homo sapien
ctgctagatcgatttttatcacaaa

SEQ ID NO: 5969564 - DNA, 25 bp, Homo sapien
ttaacttgacacctcactctacgaa

SEQ ID NO: 5969565 - DNA, 25 bp, Homo sapien
tactgcattgaaacaaggaacatgg

SEQ ID NO: 5969566 - DNA, 25 bp, Homo sapien
atgaattgtatccctagtccaatta

SEQ ID NO: 5969567 - DNA, 25 bp, Homo sapien
atcacttgcctgttcattgcctgta

SEQ ID NO: 5969568 - DNA, 25 bp, Homo sapien
attcattatagtggcggcattgata

SEQ ID NO: 5969569 - DNA, 25 bp, Homo sapien
cctgttcattgcctgtaaatttgaa

SEQ ID NO: 5969570 - DNA, 25 bp, Homo sapien
acgcaatctccctatcatttgaaaa

SEQ ID NO: 5969571 - DNA, 25 bp, Homo sapien
ttcattaggagaatttcaaaagctg

SEQ ID NO: 5969572 - DNA, 25 bp, Homo sapien
cttgacacctcactctacgaatgaa

SEQ ID NO: 5969573 - DNA, 25 bp, Homo sapien
ccataccattccaagagaaagttca

SEQ ID NO: 5969574 - DNA, 25 bp, Homo sapien
ccaaatgggatgaaacttttattca

SEQ ID NO: 5969575 - DNA, 25 bp, Homo sapien
agaaatttcactgcttacctgaaac

SEQ ID NO: 5969576 - DNA, 25 bp, Homo sapien
actagttgaagatattgctgtacct

SEQ ID NO: 5969577 - DNA, 25 bp, Homo sapien
ttttattcattatagtggcggcatt

SEQ ID NO: 5969578 - DNA, 25 bp, Homo sapien
ttattcattatagtggcggcattga

SEQ ID NO: 5969579 - DNA, 25 bp, Homo sapien
cacttgcctgttcattgcctgtaaa

SEQ ID NO: 5969580 - DNA, 25 bp, Homo sapien
acctgctagatcgatttttatcaca

SEQ ID NO: 5969581 - DNA, 25 bp, Homo sapien
aatgaaaattccaaatgggatgaaa

SEQ ID NO: 5969582 - DNA, 25 bp, Homo sapien
gaattgtatccctagtccaattagt

SEQ ID NO: 5969583 - DNA, 25 bp, Homo sapien
aatgctttccataccattccaagag

SEQ ID NO: 5969584 - DNA, 25 bp, Homo sapien
ttgaagttcatgagaaatttcactg

SEQ ID NO: 5969585 - DNA, 25 bp, Homo sapien
cagtaacaaaatcgattctttacaa

SEQ ID NO: 5969586 - DNA, 25 bp, Homo sapien
gaaaaatttggattcgatagagatg

SEQ ID NO: 5969587 - DNA, 25 bp, Homo sapien
tagtggcggcattgatattgaatca

SEQ ID NO: 5969588 - DNA, 25 bp, Homo sapien
aatttggattcgatagagatggatg

SEQ ID NO: 5969589 - DNA, 25 bp, Homo sapien
atgggatgaaacttttattcattat

SEQ ID NO: 5969590 - DNA, 25 bp, Homo sapien
aaatgtcatcaatggaaaaatttgg

SEQ ID NO: 5969591 - DNA, 25 bp, Homo sapien
aaattcatccacctgaagccatcat

SEQ ID NO: 5969592 - DNA, 25 bp, Homo sapien
aaggaaatccaaatgctaccgacac

SEQ ID NO: 5969593 - DNA, 25 bp, Homo sapien
gtataggcaaggaaaatgctttcca

SEQ ID NO: 5969594 - DNA, 25 bp, Homo sapien
gctaccgacacataactatttaatg

SEQ ID NO: 5969595 - DNA, 25 bp, Homo sapien
cattgcctgtaaatttgaagaagtt

SEQ ID NO: 5969596 - DNA, 25 bp, Homo sapien
accgatcctatagagccaaaaactg

SEQ ID NO: 5969597 - DNA, 25 bp, Homo sapien
ctgaagccatcatatttagctgcaa

SEQ ID NO: 5969598 - DNA, 25 bp, Homo sapien
ttgactggttggttgaagttcatga

SEQ ID NO: 5969599 - DNA, 25 bp, Homo sapien
tgaatcagatccagcgtttaaggat

SEQ ID NO: 5969600 - DNA, 25 bp, Homo sapien
catggtttatttcaaggtttttgac

SEQ ID NO: 5969601 - DNA, 25 bp, Homo sapien
ttcatggtagcagaatatacagatt

SEQ ID NO: 5969602 - DNA, 25 bp, Homo sapien
gaggtaaattgcaaagagattccac

SEQ ID NO: 5969603 - DNA, 25 bp, Homo sapien
ggaacatggccaaattcatcatgga

SEQ ID NO: 5969604 - DNA, 25 bp, Homo sapien
taaaatgtcatcaatggaaaaattt

SEQ ID NO: 5969605 - DNA, 25 bp, Homo sapien
ggaattaggaaggctgagctattcg

SEQ ID NO: 5969606 - DNA, 25 bp, Homo sapien
tatagtggcggcattgatattgaat

SEQ ID NO: 5969607 - DNA, 25 bp, Homo sapien
caaaatcgattctttacaactccct

SEQ ID NO: 5969608 - DNA, 25 bp, Homo sapien
ttgactggtgtaaacaaaaacgttg

SEQ ID NO: 5969609 - DNA, 25 bp, Homo sapien
attctttacaactccctcgaggtaa

SEQ ID NO: 5969610 - DNA, 25 bp, Homo sapien
aattgcaaagagattccacccattt

SEQ ID NO: 5969611 - DNA, 25 bp, Homo sapien
ttgcctgtaaatttgaagaagttaa

SEQ ID NO: 5969612 - DNA, 25 bp, Homo sapien
aggctgagctattcgttctaagttc

SEQ ID NO: 5969613 - DNA, 25 bp, Homo sapien
gattgtataggcaaggaaaatgctt

SEQ ID NO: 5969614 - DNA, 25 bp, Homo sapien
tatattttctcatctttacgagaag

SEQ ID NO: 5969615 - DNA, 25 bp, Homo sapien
taataaattcatccacctgaagcca

SEQ ID NO: 5969616 - DNA, 25 bp, Homo sapien
catcaatggaaaaatttggattcga

SEQ ID NO: 5969617 - DNA, 25 bp, Homo sapien
gtcatcaatggaaaaatttggattc

SEQ ID NO: 5969618 - DNA, 25 bp, Homo sapien
ttggttgaagttcatgagaaatttc

SEQ ID NO: 5969619 - DNA, 25 bp, Homo sapien
aaggaattaggaaggctgagctatt

SEQ ID NO: 5969620 - DNA, 25 bp, Homo sapien
tgttcattgcctgtaaatttgaaga

SEQ ID NO: 5969621 - DNA, 25 bp, Homo sapien
acacctcactctacgaatgaaaaaa

SEQ ID NO: 5969622 - DNA, 25 bp, Homo sapien
ttctcatctttacgagaaggaaatc

SEQ ID NO: 5969623 - DNA, 25 bp, Homo sapien
tggaaaaatttggattcgatagaga

SEQ ID NO: 5969624 - DNA, 25 bp, Homo sapien
gatttttatcacaaaatgttgttaa

SEQ ID NO: 5969625 - DNA, 25 bp, Homo sapien
ccaattagtgaaaggaaaatccaaa

SEQ ID NO: 5969626 - DNA, 25 bp, Homo sapien
acagattctatattttctcatcttt

SEQ ID NO: 5969627 - DNA, 25 bp, Homo sapien
ccatgtatatcgccagaaaaattaa

SEQ ID NO: 5969628 - DNA, 25 bp, Homo sapien
tgaagattgtataggcaaggaaaat

SEQ ID NO: 5969629 - DNA, 25 bp, Homo sapien
ctcatctttacgagaaggaaatcca

SEQ ID NO: 5969630 - DNA, 25 bp, Homo sapien
gttgtaataaattcatccacctgaa

SEQ ID NO: 5969631 - DNA, 25 bp, Homo sapien
caattatcaaatgattcaaccgatc

SEQ ID NO: 5969632 - DNA, 25 bp, Homo sapien
atgcatcacttgcctgttcattgcc

SEQ ID NO: 5969633 - DNA, 25 bp, Homo sapien
agttctttaggttataacatatctc

SEQ ID NO: 5969634 - DNA, 25 bp, Homo sapien
gatccattcatggtagcagaatata

SEQ ID NO: 5969635 - DNA, 25 bp, Homo sapien
taaattgcaaagagattccacccat

SEQ ID NO: 5969636 - DNA, 25 bp, Homo sapien
tgactgacggtgctgccactgtcga

SEQ ID NO: 5969637 - DNA, 25 bp, Homo sapien
taaaaatgaaaattccaaatgggat

SEQ ID NO: 5969638 - DNA, 25 bp, Homo sapien
taagttctttaggttataacatatc

SEQ ID NO: 5969639 - DNA, 25 bp, Homo sapien
attgaatcagatccagcgtttaagg

SEQ ID NO: 5969640 - DNA, 25 bp, Homo sapien
gcatcacttgcctgttcattgcctg

SEQ ID NO: 5969641 - DNA, 25 bp, Homo sapien
cgtgactgacggtgctgccactgtc

SEQ ID NO: 5969642 - DNA, 25 bp, Homo sapien
tttacgagaaggaaatccaaatgct

SEQ ID NO: 5969643 - DNA, 25 bp, Homo sapien
ttcgatagagatggatgatccattc

SEQ ID NO: 5969644 - DNA, 25 bp, Homo sapien
tttgcgtacgtgactgacggtgctg

SEQ ID NO: 5969645 - DNA, 25 bp, Homo sapien
aatgaagattgtataggcaaggaaa

SEQ ID NO: 5969646 - DNA, 25 bp, Homo sapien
aacatggccaaattcatcatggaat

SEQ ID NO: 5969647 - DNA, 25 bp, Homo sapien
aagaaagagacaattatcaaatgat

SEQ ID NO: 5969648 - DNA, 25 bp, Homo sapien
gttcaattaacttgacacctcactc

SEQ ID NO: 5969649 - DNA, 25 bp, Homo sapien
cctcgaggtaaattgcaaagagatt

SEQ ID NO: 5969650 - DNA, 25 bp, Homo sapien
catggccaaattcatcatggaatat

SEQ ID NO: 5969651 - DNA, 25 bp, Homo sapien
acaaattttgcgtacgtgactgacg

SEQ ID NO: 5969652 - DNA, 25 bp, Homo sapien
agattccacccatttggaaaaaaca

SEQ ID NO: 5969653 - DNA, 25 bp, Homo sapien
tgttaattgactggttggttgaagt

SEQ ID NO: 5969654 - DNA, 25 bp, Homo sapien
ttgaataaattacaactactatgca

SEQ ID NO: 5969655 - DNA, 25 bp, Homo sapien
atgatccattcatggtagcagaata

SEQ ID NO: 5969656 - DNA, 25 bp, Homo sapien
aacattatttttagcgatcaacctg

SEQ ID NO: 5969657 - DNA, 25 bp, Homo sapien
caatgtccatgtatatcgccagaaa

SEQ ID NO: 5969658 - DNA, 25 bp, Homo sapien
agctgacaattactgcattgaaaca

SEQ ID NO: 5969659 - DNA, 25 bp, Homo sapien
atcctatagagccaaaaactgtgaa

SEQ ID NO: 5969660 - DNA, 25 bp, Homo sapien
atggacacgcaatctccctatcatt

SEQ ID NO: 5969661 - DNA, 25 bp, Homo sapien
gtccatgtatatcgccagaaaaatt

SEQ ID NO: 5969662 - DNA, 25 bp, Homo sapien
ctccatgagggcgctgttaattgac

SEQ ID NO: 5969663 - DNA, 25 bp, Homo sapien
ttttatcagtgaactagttgaagat

SEQ ID NO: 5969664 - DNA, 25 bp, Homo sapien
atttgaaaagctccatgagggcgct

SEQ ID NO: 5969665 - DNA, 25 bp, Homo sapien
aaaagcctaaacatggcatggttta

SEQ ID NO: 5969666 - DNA, 25 bp, Homo sapien
gctgcaatgtccatgtatatcgcca

SEQ ID NO: 5969667 - DNA, 25 bp, Homo sapien
aaggaacatggccaaattcatcatg

SEQ ID NO: 5969668 - DNA, 25 bp, Homo sapien
agcagaatatacagattctatattt

SEQ ID NO: 5969669 - DNA, 25 bp, Homo sapien
tttagctgcaatgtccatgtatatc

SEQ ID NO: 5969670 - DNA, 25 bp, Homo sapien
aagagacaattatcaaatgattcaa

SEQ ID NO: 5969671 - DNA, 25 bp, Homo sapien
catcatggaatattcgatttgttgt

SEQ ID NO: 5969672 - DNA, 25 bp, Homo sapien
acctgaagccatcatatttagctgc

SEQ ID NO: 5969673 - DNA, 25 bp, Homo sapien
tatcatttgaaaagctccatgaggg

SEQ ID NO: 5969674 - DNA, 25 bp, Homo sapien
caaccgatcctatagagccaaaaac

SEQ ID NO: 5969675 - DNA, 25 bp, Homo sapien
aaatgctaccgacacataactattt

SEQ ID NO: 5969676 - DNA, 25 bp, Homo sapien
caactccctcgaggtaaattgcaaa

SEQ ID NO: 5969677 - DNA, 25 bp, Homo sapien
actatttaatggacacgcaatctcc

SEQ ID NO: 5969678 - DNA, 25 bp, Homo sapien
tccctatcatttgaaaagctccatg

SEQ ID NO: 5969679 - DNA, 25 bp, Homo sapien
cctatagagccaaaaactgtgaaaa

SEQ ID NO: 5969680 - DNA, 25 bp, Homo sapien
gtggcggcattgatattgaatcaga

SEQ ID NO: 5969681 - DNA, 25 bp, Homo sapien
aaaatgaaaattccaaatgggatga

SEQ ID NO: 5969682 - DNA, 25 bp, Homo sapien
tgacacctcactctacgaatgaaaa

SEQ ID NO: 5969683 - DNA, 25 bp, Homo sapien
tgagaaatttcactgcttacctgaa

SEQ ID NO: 5969684 - DNA, 25 bp, Homo sapien
gatcgatttttatcacaaaatgttg

SEQ ID NO: 5969685 - DNA, 25 bp, Homo sapien
gaaaagctccatgagggcgctgtta

SEQ ID NO: 5969686 - DNA, 25 bp, Homo sapien
aaatcgattctttacaactccctcg

SEQ ID NO: 5969687 - DNA, 25 bp, Homo sapien
aattgactggttggttgaagttcat

SEQ ID NO: 5969688 - DNA, 25 bp, Homo sapien
caaaaagcctaaacatggcatggtt

SEQ ID NO: 5969689 - DNA, 25 bp, Homo sapien
agttctatccgaggtaaacagtaac

SEQ ID NO: 5969690 - DNA, 25 bp, Homo sapien
gcattgatattgaatcagatccagc

SEQ ID NO: 5969691 - DNA, 25 bp, Homo sapien
caaaagctgacaattactgcattga

SEQ ID NO: 5969692 - DNA, 25 bp, Homo sapien
attttgcgtacgtgactgacggtgc

SEQ ID NO: 5969693 - DNA, 25 bp, Homo sapien
tatccctagtccaattagtgaaagg

SEQ ID NO: 5969694 - DNA, 25 bp, Homo sapien
acctgaaacattatttttagcgatc

SEQ ID NO: 5969695 - DNA, 25 bp, Homo sapien
acacgcaatctccctatcatttgaa

SEQ ID NO: 5969696 - DNA, 25 bp, Homo sapien
gcctaaacatggcatggtttatttc

SEQ ID NO: 5969697 - DNA, 25 bp, Homo sapien
gttctaagttctttaggttataaca

SEQ ID NO: 5969698 - DNA, 25 bp, Homo sapien
ttttctcatctttacgagaaggaaa

SEQ ID NO: 5969699 - DNA, 25 bp, Homo sapien
gaaagagacaattatcaaatgattc

SEQ ID NO: 5969700 - DNA, 25 bp, Homo sapien
atttgttgtaataaattcatccacc

SEQ ID NO: 5969701 - DNA, 25 bp, Homo sapien
tagctgcaatgtccatgtatatcgc

SEQ ID NO: 5969702 - DNA, 25 bp, Homo sapien
ctagattccttgagacttaaataca

SEQ ID NO: 5969703 - DNA, 25 bp, Homo sapien
aattaacttgacacctcactctacg

SEQ ID NO: 5969704 - DNA, 25 bp, Homo sapien
cgagaaggaaatccaaatgctaccg

SEQ ID NO: 5969705 - DNA, 25 bp, Homo sapien
gcaaagagattccacccatttggaa

SEQ ID NO: 5969706 - DNA, 25 bp, Homo sapien
ccaaatgctaccgacacataactat

SEQ ID NO: 5969707 - DNA, 25 bp, Homo sapien
aaagagattccacccatttggaaaa

SEQ ID NO: 5969708 - DNA, 25 bp, Homo sapien
cagaatatacagattctatattttc

SEQ ID NO: 5969709 - DNA, 25 bp, Homo sapien
tcatccacctgaagccatcatattt

SEQ ID NO: 5969710 - DNA, 25 bp, Homo sapien
ataggcaaggaaaatgctttccata

SEQ ID NO: 5969711 - DNA, 25 bp, Homo sapien
attgatattgaatcagatccagcgt

SEQ ID NO: 5969712 - DNA, 25 bp, Homo sapien
ttcatgagaaatttcactgcttacc

SEQ ID NO: 5969713 - DNA, 25 bp, Homo sapien
taatggacacgcaatctccctatca

SEQ ID NO: 5969714 - DNA, 25 bp, Homo sapien
gggcgctgttaattgactggttggt

SEQ ID NO: 5969715 - DNA, 25 bp, Homo sapien
gtagcagaatatacagattctatat

SEQ ID NO: 5969716 - DNA, 25 bp, Homo sapien
atgctaccgacacataactatttaa

SEQ ID NO: 5969717 - DNA, 25 bp, Homo sapien
gaaagttcaattaacttgacacctc

SEQ ID NO: 5969718 - DNA, 25 bp, Homo sapien
ggttggttgaagttcatgagaaatt

SEQ ID NO: 5969719 - DNA, 25 bp, Homo sapien
ggcatggtttatttcaaggtttttg

SEQ ID NO: 5969720 - DNA, 25 bp, Homo sapien
ctttaggttataacatatctctacc

SEQ ID NO: 5969721 - DNA, 25 bp, Homo sapien
aaatgattcaaccgatcctatagag

SEQ ID NO: 5969722 - DNA, 25 bp, Homo sapien
agttcatgagaaatttcactgctta

SEQ ID NO: 5969723 - DNA, 25 bp, Homo sapien
caattactgcattgaaacaaggaac

SEQ ID NO: 5969724 - DNA, 25 bp, Homo sapien
ggaatattcgatttgttgtaataaa

SEQ ID NO: 5969725 - DNA, 25 bp, Homo sapien
aatattcgatttgttgtaataaatt

SEQ ID NO: 5969726 - DNA, 25 bp, Homo sapien
tctaagttctttaggttataacata

SEQ ID NO: 5969727 - DNA, 25 bp, Homo sapien
aaacaaggaacatggccaaattcat

SEQ ID NO: 5969728 - DNA, 25 bp, Homo sapien
tgatacgaatctagattccttgaga

SEQ ID NO: 5969729 - DNA, 25 bp, Homo sapien
aggttataacatatctctaccaaac

SEQ ID NO: 5969730 - DNA, 25 bp, Homo sapien
ctggttggttgaagttcatgagaaa

SEQ ID NO: 5969731 - DNA, 25 bp, Homo sapien
ttaggttataacatatctctaccaa

SEQ ID NO: 5969732 - DNA, 25 bp, Homo sapien
tacaaaaagcctaaacatggcatgg

SEQ ID NO: 5969733 - DNA, 25 bp, Homo sapien
gcgctgttaattgactggttggttg

SEQ ID NO: 5969734 - DNA, 25 bp, Homo sapien
gaatatacagattctatattttctc

SEQ ID NO: 5969735 - DNA, 25 bp, Homo sapien
ccagcgtttaaggattttatcagtg

SEQ ID NO: 5969736 - DNA, 25 bp, Homo sapien
aggaaaatccaaattaataatgaag

SEQ ID NO: 5969737 - DNA, 25 bp, Homo sapien
caactactatgcatcacttgcctgt

SEQ ID NO: 5969738 - DNA, 25 bp, Homo sapien
tataacatatctctaccaaaccccc

SEQ ID NO: 5969739 - DNA, 25 bp, Homo sapien
aaaataacaaattttgcgtacgtga

SEQ ID NO: 5969740 - DNA, 25 bp, Homo sapien
tatttagctgcaatgtccatgtata

SEQ ID NO: 5969741 - DNA, 25 bp, Homo sapien
gattttatcagtgaactagttgaag

SEQ ID NO: 5969742 - DNA, 25 bp, Homo sapien
taaacagtaacaaaatcgattcttt

SEQ ID NO: 5969743 - DNA, 25 bp, Homo sapien
agcgatcaacctgctagatcgattt

SEQ ID NO: 5969744 - DNA, 25 bp, Homo sapien
gatgaaacttttattcattatagtg

SEQ ID NO: 5969745 - DNA, 25 bp, Homo sapien
gaagccatcatatttagctgcaatg

SEQ ID NO: 5969746 - DNA, 25 bp, Homo sapien
tctttacaactccctcgaggtaaat

SEQ ID NO: 5969747 - DNA, 25 bp, Homo sapien
cttgagacttaaatacaaaaagcct

SEQ ID NO: 5969748 - DNA, 25 bp, Homo sapien
atatcgccagaaaaattaaaaatga

SEQ ID NO: 5969749 - DNA, 25 bp, Homo sapien
tgcctgttcattgcctgtaaatttg

SEQ ID NO: 5969750 - DNA, 25 bp, Homo sapien
gggatgaaacttttattcattatag

SEQ ID NO: 5969751 - DNA, 25 bp, Homo sapien
acatatctctaccaaaccccctaaa

SEQ ID NO: 5969752 - DNA, 25 bp, Homo sapien
tcagatccagcgtttaaggatttta

SEQ ID NO: 5969753 - DNA, 25 bp, Homo sapien
tttatttcaaggtttttgactggtg

SEQ ID NO: 5969754 - DNA, 25 bp, Homo sapien
aattgaataaattacaactactatg

SEQ ID NO: 5969755 - DNA, 25 bp, Homo sapien
ttccataccattccaagagaaagtt

SEQ ID NO: 5969756 - DNA, 25 bp, Homo sapien
ggaaatccaaatgctaccgacacat

SEQ ID NO: 5969757 - DNA, 25 bp, Homo sapien
atcgattctttacaactccctcgag

SEQ ID NO: 5969758 - DNA, 25 bp, Homo sapien
caaattcatcatggaatattcgatt

SEQ ID NO: 5969759 - DNA, 25 bp, Homo sapien
aatctccctatcatttgaaaagctc

SEQ ID NO: 5969760 - DNA, 25 bp, Homo sapien
ggcggcattgatattgaatcagatc

SEQ ID NO: 5969761 - DNA, 25 bp, Homo sapien
attactgcattgaaacaaggaacat

SEQ ID NO: 5969762 - DNA, 25 bp, Homo sapien
ctgtcgaaggaattaggaaggctga

SEQ ID NO: 5969763 - DNA, 25 bp, Homo sapien
tgtaataaattcatccacctgaagc

SEQ ID NO: 5969764 - DNA, 25 bp, Homo sapien
cgtttaaggattttatcagtgaact

SEQ ID NO: 5969765 - DNA, 25 bp, Homo sapien
ttcaaccgatcctatagagccaaaa

SEQ ID NO: 5969766 - DNA, 25 bp, Homo sapien
atgtcatcaatggaaaaatttggat

SEQ ID NO: 5969767 - DNA, 25 bp, Homo sapien
ctaaacatggcatggtttatttcaa

SEQ ID NO: 5969768 - DNA, 25 bp, Homo sapien
aacttgacacctcactctacgaatg

SEQ ID NO: 5969769 - DNA, 25 bp, Homo sapien
tttaatggacacgcaatctccctat

SEQ ID NO: 5969770 - DNA, 25 bp, Homo sapien
acaaggaacatggccaaattcatca

SEQ ID NO: 5969771 - DNA, 25 bp, Homo sapien
aagatattgctgtacctgatacgaa

SEQ ID NO: 5969772 - DNA, 25 bp, Homo sapien
tcatttgaaaagctccatgagggcg

SEQ ID NO: 5969773 - DNA, 25 bp, Homo sapien
tggtttatttcaaggtttttgactg

SEQ ID NO: 5969774 - DNA, 25 bp, Homo sapien
tctttacgagaaggaaatccaaatg

SEQ ID NO: 5969775 - DNA, 25 bp, Homo sapien
gacaattactgcattgaaacaagga

SEQ ID NO: 5969776 - DNA, 25 bp, Homo sapien
ttacctgaaacattatttttagcga

SEQ ID NO: 5969777 - DNA, 25 bp, Homo sapien
aaggaaaatgctttccataccattc

SEQ ID NO: 5969778 - DNA, 25 bp, Homo sapien
atattgaatcagatccagcgtttaa

SEQ ID NO: 5969779 - DNA, 25 bp, Homo sapien
ataaattacaactactatgcatcac

SEQ ID NO: 5969780 - DNA, 25 bp, Homo sapien
aataacaaattttgcgtacgtgact

SEQ ID NO: 5969781 - DNA, 25 bp, Homo sapien
ctaaatttcattaggagaatttcaa

SEQ ID NO: 5969782 - DNA, 25 bp, Homo sapien
ctgaaacattatttttagcgatcaa

SEQ ID NO: 5969783 - DNA, 25 bp, Homo sapien
gtatatcgccagaaaaattaaaaat

SEQ ID NO: 5969784 - DNA, 25 bp, Homo sapien
tagttgaagatattgctgtacctga

SEQ ID NO: 5969785 - DNA, 25 bp, Homo sapien
tggtagcagaatatacagattctat

SEQ ID NO: 5969786 - DNA, 25 bp, Homo sapien
attaataatgaagattgtataggca

SEQ ID NO: 5969787 - DNA, 25 bp, Homo sapien
atacagattctatattttctcatct

SEQ ID NO: 5969788 - DNA, 25 bp, Homo sapien
aataaaatgtcatcaatggaaaaat

SEQ ID NO: 5969789 - DNA, 25 bp, Homo sapien
ttcaaaagctgacaattactgcatt

SEQ ID NO: 5969790 - DNA, 25 bp, Homo sapien
tgcaatgtccatgtatatcgccaga

SEQ ID NO: 5969791 - DNA, 25 bp, Homo sapien
agatccagcgtttaaggattttatc

SEQ ID NO: 5969792 - DNA, 25 bp, Homo sapien
gctgtacctgatacgaatctagatt

SEQ ID NO: 5969793 - DNA, 25 bp, Homo sapien
tggccaaattcatcatggaatattc

SEQ ID NO: 5969794 - DNA, 25 bp, Homo sapien
gaagttcatgagaaatttcactgct

SEQ ID NO: 5969795 - DNA, 25 bp, Homo sapien
tacctgatacgaatctagattcctt

SEQ ID NO: 5969796 - DNA, 25 bp, Homo sapien
ttctttaggttataacatatctcta

SEQ ID NO: 5969797 - DNA, 25 bp, Homo sapien
ctatgcatcacttgcctgttcattg

SEQ ID NO: 5969798 - DNA, 25 bp, Homo sapien
ctctacgaatgaaaaaaaagttcta

SEQ ID NO: 5969799 - DNA, 25 bp, Homo sapien
agctccatgagggcgctgttaattg

SEQ ID NO: 5969800 - DNA, 25 bp, Homo sapien
acaagaaagagacaattatcaaatg

SEQ ID NO: 5969801 - DNA, 25 bp, Homo sapien
gtccaattagtgaaaggaaaatcca

SEQ ID NO: 5969802 - DNA, 25 bp, Homo sapien
tccctagtccaattagtgaaaggaa

SEQ ID NO: 5969803 - DNA, 25 bp, Homo sapien
agagatggatgatccattcatggta

SEQ ID NO: 5969804 - DNA, 25 bp, Homo sapien
attatagtggcggcattgatattga

SEQ ID NO: 5969805 - DNA, 25 bp, Homo sapien
aaagctccatgagggcgctgttaat

SEQ ID NO: 5969806 - DNA, 25 bp, Homo sapien
agatggatgatccattcatggtagc

SEQ ID NO: 5969807 - DNA, 25 bp, Homo sapien
aaagttctatccgaggtaaacagta

SEQ ID NO: 5969808 - DNA, 25 bp, Homo sapien
tgatattgaatcagatccagcgttt

SEQ ID NO: 5969809 - DNA, 25 bp, Homo sapien
tattgctgtacctgatacgaatcta

SEQ ID NO: 5969810 - DNA, 25 bp, Homo sapien
taataatgaagattgtataggcaag

SEQ ID NO: 5969811 - DNA, 25 bp, Homo sapien
atccagcgtttaaggattttatcag

SEQ ID NO: 5969812 - DNA, 25 bp, Homo sapien
gcaatctccctatcatttgaaaagc

SEQ ID NO: 5969813 - DNA, 25 bp, Homo sapien
aatcagatccagcgtttaaggattt

SEQ ID NO: 5969814 - DNA, 25 bp, Homo sapien
aaacttttattcattatagtggcgg

SEQ ID NO: 5969815 - DNA, 25 bp, Homo sapien
agaaggaaatccaaatgctaccgac

SEQ ID NO: 5969816 - DNA, 25 bp, Homo sapien
attcatccacctgaagccatcatat

SEQ ID NO: 5969817 - DNA, 25 bp, Homo sapien
aaattttgcgtacgtgactgacggt

SEQ ID NO: 5969818 - DNA, 25 bp, Homo sapien
atttttagcgatcaacctgctagat

SEQ ID NO: 5969819 - DNA, 25 bp, Homo sapien
tttcaaggtttttgactggtgtaaa

SEQ ID NO: 5969820 - DNA, 25 bp, Homo sapien
taccgacacataactatttaatgga

SEQ ID NO: 5969821 - DNA, 25 bp, Homo sapien
aattcatcatggaatattcgatttg

SEQ ID NO: 5969822 - DNA, 25 bp, Homo sapien
ccgaggtaaacagtaacaaaatcga

SEQ ID NO: 5969823 - DNA, 25 bp, Homo sapien
cgatttgttgtaataaattcatcca

SEQ ID NO: 5969824 - DNA, 25 bp, Homo sapien
gtaacaaaatcgattctttacaact

SEQ ID NO: 5969825 - DNA, 25 bp, Homo sapien
ttcatcatggaatattcgatttgtt

SEQ ID NO: 5969826 - DNA, 25 bp, Homo sapien
cggcattgatattgaatcagatcca

SEQ ID NO: 5969827 - DNA, 25 bp, Homo sapien
tcaatggaaaaatttggattcgata

SEQ ID NO: 5969828 - DNA, 25 bp, Homo sapien
aattaggaaggctgagctattcgtt

SEQ ID NO: 5969829 - DNA, 25 bp, Homo sapien
ttgtataggcaaggaaaatgctttc

SEQ ID NO: 5969830 - DNA, 25 bp, Homo sapien
gaatctagattccttgagacttaaa

SEQ ID NO: 5969831 - DNA, 25 bp, Homo sapien
agagattccacccatttggaaaaaa

SEQ ID NO: 5969832 - DNA, 25 bp, Homo sapien
tcattatagtggcggcattgatatt

SEQ ID NO: 5969833 - DNA, 25 bp, Homo sapien
tgaaaattccaaatgggatgaaact

SEQ ID NO: 5969834 - DNA, 25 bp, Homo sapien
ctgccactgtcgaaggaattaggaa

SEQ ID NO: 5969835 - DNA, 25 bp, Homo sapien
tccttctcgtaaagatgagaaaata

SEQ ID NO: 5969836 - DNA, 25 bp, Homo sapien
ttttcattcgtagagtgaggtgtca

SEQ ID NO: 5969837 - DNA, 25 bp, Homo sapien
ttttgttactgtttacctcggatag

SEQ ID NO: 5969838 - DNA, 25 bp, Homo sapien
attccttcgacagtggcagcaccgt

SEQ ID NO: 5969839 - DNA, 25 bp, Homo sapien
tctatcgaatccaaatttttccatt

SEQ ID NO: 5969840 - DNA, 25 bp, Homo sapien
taagcagtgaaatttctcatgaact

SEQ ID NO: 5969841 - DNA, 25 bp, Homo sapien
tctcaaggaatctagattcgtatca

SEQ ID NO: 5969842 - DNA, 25 bp, Homo sapien
caaaaaccttgaaataaaccatgcc

SEQ ID NO: 5969843 - DNA, 25 bp, Homo sapien
agggagattgcgtgtccattaaata

SEQ ID NO: 5969844 - DNA, 25 bp, Homo sapien
aatgccgccactataatgaataaaa

SEQ ID NO: 5969845 - DNA, 25 bp, Homo sapien
tatttaagtctcaaggaatctagat

SEQ ID NO: 5969846 - DNA, 25 bp, Homo sapien
tttgtatttaagtctcaaggaatct

SEQ ID NO: 5969847 - DNA, 25 bp, Homo sapien
cgaatagctcagccttcctaattcc

SEQ ID NO: 5969848 - DNA, 25 bp, Homo sapien
atagttatgtgtcggtagcatttgg

SEQ ID NO: 5969849 - DNA, 25 bp, Homo sapien
tttgataattgtctctttcttgttt

SEQ ID NO: 5969850 - DNA, 25 bp, Homo sapien
aaatgggtggaatctctttgcaatt

SEQ ID NO: 5969851 - DNA, 25 bp, Homo sapien
caattaacagcgccctcatggagct

SEQ ID NO: 5969852 - DNA, 25 bp, Homo sapien
atttaacttcttcaaatttacaggc

SEQ ID NO: 5969853 - DNA, 25 bp, Homo sapien
catagtagttgtaatttattcaatt

SEQ ID NO: 5969854 - DNA, 25 bp, Homo sapien
ataaaaatcgatctagcaggttgat

SEQ ID NO: 5969855 - DNA, 25 bp, Homo sapien
ctcgagggagttgtaaagaatcgat

SEQ ID NO: 5969856 - DNA, 25 bp, Homo sapien
aatctctttgcaatttacctcgagg

SEQ ID NO: 5969857 - DNA, 25 bp, Homo sapien
aatttacaggcaatgaacaggcaag

SEQ ID NO: 5969858 - DNA, 25 bp, Homo sapien
cgtatcaggtacagcaatatcttca

SEQ ID NO: 5969859 - DNA, 25 bp, Homo sapien
atcttcaactagttcactgataaaa

SEQ ID NO: 5969860 - DNA, 25 bp, Homo sapien
ggttgatcgctaaaaataatgtttc

SEQ ID NO: 5969861 - DNA, 25 bp, Homo sapien
gtcggtagcatttggatttccttct

SEQ ID NO: 5969862 - DNA, 25 bp, Homo sapien
caccagtcaaaaaccttgaaataaa

SEQ ID NO: 5969863 - DNA, 25 bp, Homo sapien
tttccttctcgtaaagatgagaaaa

SEQ ID NO: 5969864 - DNA, 25 bp, Homo sapien
atgtttcaggtaagcagtgaaattt

SEQ ID NO: 5969865 - DNA, 25 bp, Homo sapien
ctagttcactgataaaatccttaaa

SEQ ID NO: 5969866 - DNA, 25 bp, Homo sapien
agcatttggatttccttctcgtaaa

SEQ ID NO: 5969867 - DNA, 25 bp, Homo sapien
gggggtttggtagagatatgttata

SEQ ID NO: 5969868 - DNA, 25 bp, Homo sapien
tatcgaatccaaatttttccattga

SEQ ID NO: 5969869 - DNA, 25 bp, Homo sapien
tcgtaaagatgagaaaatatagaat

SEQ ID NO: 5969870 - DNA, 25 bp, Homo sapien
acttagaacgaatagctcagccttc

SEQ ID NO: 5969871 - DNA, 25 bp, Homo sapien
ttgtaaagaatcgattttgttactg

SEQ ID NO: 5969872 - DNA, 25 bp, Homo sapien
gtgatgcatagtagttgtaatttat

SEQ ID NO: 5969873 - DNA, 25 bp, Homo sapien
tcaatgcagtaattgtcagcttttg

SEQ ID NO: 5969874 - DNA, 25 bp, Homo sapien
gatatgttataacctaaagaactta

SEQ ID NO: 5969875 - DNA, 25 bp, Homo sapien
tactgtttacctcggatagaacttt

SEQ ID NO: 5969876 - DNA, 25 bp, Homo sapien
tatcaatgccgccactataatgaat

SEQ ID NO: 5969877 - DNA, 25 bp, Homo sapien
gaggtgtcaagttaattgaactttc

SEQ ID NO: 5969878 - DNA, 25 bp, Homo sapien
gcttcaggtggatgaatttattaca

SEQ ID NO: 5969879 - DNA, 25 bp, Homo sapien
catccatctctatcgaatccaaatt

SEQ ID NO: 5969880 - DNA, 25 bp, Homo sapien
attttccttgcctatacaatcttca

SEQ ID NO: 5969881 - DNA, 25 bp, Homo sapien
acagcgccctcatggagcttttcaa

SEQ ID NO: 5969882 - DNA, 25 bp, Homo sapien
ttttcaaatgatagggagattgcgt

SEQ ID NO: 5969883 - DNA, 25 bp, Homo sapien
ttttttcattcgtagagtgaggtgt

SEQ ID NO: 5969884 - DNA, 25 bp, Homo sapien
tggattttcctttcactaattggac

SEQ ID NO: 5969885 - DNA, 25 bp, Homo sapien
gttactgtttacctcggatagaact

SEQ ID NO: 5969886 - DNA, 25 bp, Homo sapien
atttttccattgatgacattttatt

SEQ ID NO: 5969887 - DNA, 25 bp, Homo sapien
taattgaactttctcttggaatggt

SEQ ID NO: 5969888 - DNA, 25 bp, Homo sapien
ccatgccatgtttaggctttttgta

SEQ ID NO: 5969889 - DNA, 25 bp, Homo sapien
agattgcgtgtccattaaatagtta

SEQ ID NO: 5969890 - DNA, 25 bp, Homo sapien
tgaaatttagggggtttggtagaga

SEQ ID NO: 5969891 - DNA, 25 bp, Homo sapien
taacctaaagaacttagaacgaata

SEQ ID NO: 5969892 - DNA, 25 bp, Homo sapien
tcggttgaatcatttgataattgtc

SEQ ID NO: 5969893 - DNA, 25 bp, Homo sapien
tcttcaaatttacaggcaatgaaca

SEQ ID NO: 5969894 - DNA, 25 bp, Homo sapien
tgtccattaaatagttatgtgtcgg

SEQ ID NO: 5969895 - DNA, 25 bp, Homo sapien
cgtcagtcacgtacgcaaaatttgt

SEQ ID NO: 5969896 - DNA, 25 bp, Homo sapien
ccctcatggagcttttcaaatgata

SEQ ID NO: 5969897 - DNA, 25 bp, Homo sapien
aacttcttcaaatttacaggcaatg

SEQ ID NO: 5969898 - DNA, 25 bp, Homo sapien
ggcaatgaacaggcaagtgatgcat

SEQ ID NO: 5969899 - DNA, 25 bp, Homo sapien
agccttcctaattccttcgacagtg

SEQ ID NO: 5969900 - DNA, 25 bp, Homo sapien
tcagtcacgtacgcaaaatttgtta

SEQ ID NO: 5969901 - DNA, 25 bp, Homo sapien
atgttccttgtttcaatgcagtaat

SEQ ID NO: 5969902 - DNA, 25 bp, Homo sapien
gttccttgtttcaatgcagtaattg

SEQ ID NO: 5969903 - DNA, 25 bp, Homo sapien
agggagttgtaaagaatcgattttg

SEQ ID NO: 5969904 - DNA, 25 bp, Homo sapien
agctaaatatgatggcttcaggtgg

SEQ ID NO: 5969905 - DNA, 25 bp, Homo sapien
atcccatttggaattttcattttta

SEQ ID NO: 5969906 - DNA, 25 bp, Homo sapien
tttccattgatgacattttattttt

SEQ ID NO: 5969907 - DNA, 25 bp, Homo sapien
tccttgtttcaatgcagtaattgtc

SEQ ID NO: 5969908 - DNA, 25 bp, Homo sapien
atttttaatttttctggcgatatac

SEQ ID NO: 5969909 - DNA, 25 bp, Homo sapien
gatcggttgaatcatttgataattg

SEQ ID NO: 5969910 - DNA, 25 bp, Homo sapien
atgaacaggcaagtgatgcatagta

SEQ ID NO: 5969911 - DNA, 25 bp, Homo sapien
ttcctaattccttcgacagtggcag

SEQ ID NO: 5969912 - DNA, 25 bp, Homo sapien
gtcaattaacagcgccctcatggag

SEQ ID NO: 5969913 - DNA, 25 bp, Homo sapien
tgtttacaccagtcaaaaaccttga

SEQ ID NO: 5969914 - DNA, 25 bp, Homo sapien
tcaatatcaatgccgccactataat

SEQ ID NO: 5969915 - DNA, 25 bp, Homo sapien
acctcgagggagttgtaaagaatcg

SEQ ID NO: 5969916 - DNA, 25 bp, Homo sapien
tttggattttcctttcactaattgg

SEQ ID NO: 5969917 - DNA, 25 bp, Homo sapien
atagaatctgtatattctgctacca

SEQ ID NO: 5969918 - DNA, 25 bp, Homo sapien
gaatccaaatttttccattgatgac

SEQ ID NO: 5969919 - DNA, 25 bp, Homo sapien
tttgtgataaaaatcgatctagcag

SEQ ID NO: 5969920 - DNA, 25 bp, Homo sapien
ttcactgataaaatccttaaacgct

SEQ ID NO: 5969921 - DNA, 25 bp, Homo sapien
ctaaatatgatggcttcaggtggat

SEQ ID NO: 5969922 - DNA, 25 bp, Homo sapien
cggtagcatttggatttccttctcg

SEQ ID NO: 5969923 - DNA, 25 bp, Homo sapien
tatattctgctaccatgaatggatc

SEQ ID NO: 5969924 - DNA, 25 bp, Homo sapien
ttctgctaccatgaatggatcatcc

SEQ ID NO: 5969925 - DNA, 25 bp, Homo sapien
gcagctaaatatgatggcttcaggt

SEQ ID NO: 5969926 - DNA, 25 bp, Homo sapien
ttcattcgtagagtgaggtgtcaag

SEQ ID NO: 5969927 - DNA, 25 bp, Homo sapien
ttcaaatttacaggcaatgaacagg

SEQ ID NO: 5969928 - DNA, 25 bp, Homo sapien
tttctcatgaacttcaaccaaccag

SEQ ID NO: 5969929 - DNA, 25 bp, Homo sapien
tccattaaatagttatgtgtcggta

SEQ ID NO: 5969930 - DNA, 25 bp, Homo sapien
aaatccttaaacgctggatctgatt

SEQ ID NO: 5969931 - DNA, 25 bp, Homo sapien
ttttaatttttctggcgatatacat

SEQ ID NO: 5969932 - DNA, 25 bp, Homo sapien
aatatcaatgccgccactataatga

SEQ ID NO: 5969933 - DNA, 25 bp, Homo sapien
cagcaccgtcagtcacgtacgcaaa

SEQ ID NO: 5969934 - DNA, 25 bp, Homo sapien
caggcaatgaacaggcaagtgatgc

SEQ ID NO: 5969935 - DNA, 25 bp, Homo sapien
ggatcatccatctctatcgaatcca

SEQ ID NO: 5969936 - DNA, 25 bp, Homo sapien
attgcgtgtccattaaatagttatg

SEQ ID NO: 5969937 - DNA, 25 bp, Homo sapien
tttcactaattggactagggataca

SEQ ID NO: 5969938 - DNA, 25 bp, Homo sapien
caaccagtcaattaacagcgccctc

SEQ ID NO: 5969939 - DNA, 25 bp, Homo sapien
gagtgaggtgtcaagttaattgaac

SEQ ID NO: 5969940 - DNA, 25 bp, Homo sapien
aggatcggttgaatcatttgataat

SEQ ID NO: 5969941 - DNA, 25 bp, Homo sapien
ataggatcggttgaatcatttgata

SEQ ID NO: 5969942 - DNA, 25 bp, Homo sapien
aatagctcagccttcctaattcctt

SEQ ID NO: 5969943 - DNA, 25 bp, Homo sapien
tgaactttctcttggaatggtatgg

SEQ ID NO: 5969944 - DNA, 25 bp, Homo sapien
cttcaactagttcactgataaaatc

SEQ ID NO: 5969945 - DNA, 25 bp, Homo sapien
ccttaaacgctggatctgattcaat

SEQ ID NO: 5969946 - DNA, 25 bp, Homo sapien
tggcttcaggtggatgaatttatta

SEQ ID NO: 5969947 - DNA, 25 bp, Homo sapien
tccttcgacagtggcagcaccgtca

SEQ ID NO: 5969948 - DNA, 25 bp, Homo sapien
atatgatggcttcaggtggatgaat

SEQ ID NO: 5969949 - DNA, 25 bp, Homo sapien
cagtcaattaacagcgccctcatgg

SEQ ID NO: 5969950 - DNA, 25 bp, Homo sapien
acaggcaagtgatgcatagtagttg

SEQ ID NO: 5969951 - DNA, 25 bp, Homo sapien
gtgaggtgtcaagttaattgaactt

SEQ ID NO: 5969952 - DNA, 25 bp, Homo sapien
agttcactgataaaatccttaaacg

SEQ ID NO: 5969953 - DNA, 25 bp, Homo sapien
atagggagattgcgtgtccattaaa

SEQ ID NO: 5969954 - DNA, 25 bp, Homo sapien
atttacctcgagggagttgtaaaga

SEQ ID NO: 5969955 - DNA, 25 bp, Homo sapien
ttaacttcttcaaatttacaggcaa

SEQ ID NO: 5969956 - DNA, 25 bp, Homo sapien
ttattcaatttaacaacattttgtg

SEQ ID NO: 5969957 - DNA, 25 bp, Homo sapien
ggtatggaaagcattttccttgcct

SEQ ID NO: 5969958 - DNA, 25 bp, Homo sapien
atcatttgataattgtctctttctt

SEQ ID NO: 5969959 - DNA, 25 bp, Homo sapien
ttacaacaaatcgaatattccatga

SEQ ID NO: 5969960 - DNA, 25 bp, Homo sapien
tcagccttcctaattccttcgacag

SEQ ID NO: 5969961 - DNA, 25 bp, Homo sapien
aatgatagggagattgcgtgtccat

SEQ ID NO: 5969962 - DNA, 25 bp, Homo sapien
tcatttttaatttttctggcgatat

SEQ ID NO: 5969963 - DNA, 25 bp, Homo sapien
atgtgtcggtagcatttggatttcc

SEQ ID NO: 5969964 - DNA, 25 bp, Homo sapien
tggcgatatacatggacattgcagc

SEQ ID NO: 5969965 - DNA, 25 bp, Homo sapien
tattacaacaaatcgaatattccat

SEQ ID NO: 5969966 - DNA, 25 bp, Homo sapien
acgctggatctgattcaatatcaat

SEQ ID NO: 5969967 - DNA, 25 bp, Homo sapien
ggagattgcgtgtccattaaatagt

SEQ ID NO: 5969968 - DNA, 25 bp, Homo sapien
aaagatgagaaaatatagaatctgt

SEQ ID NO: 5969969 - DNA, 25 bp, Homo sapien
tgtatttaagtctcaaggaatctag

SEQ ID NO: 5969970 - DNA, 25 bp, Homo sapien
atgggtggaatctctttgcaattta

SEQ ID NO: 5969971 - DNA, 25 bp, Homo sapien
ctataggatcggttgaatcatttga

SEQ ID NO: 5969972 - DNA, 25 bp, Homo sapien
ggaatctagattcgtatcaggtaca

SEQ ID NO: 5969973 - DNA, 25 bp, Homo sapien
cttgcctatacaatcttcattatta

SEQ ID NO: 5969974 - DNA, 25 bp, Homo sapien
taaaagtttcatcccatttggaatt

SEQ ID NO: 5969975 - DNA, 25 bp, Homo sapien
aagaacttagaacgaatagctcagc

SEQ ID NO: 5969976 - DNA, 25 bp, Homo sapien
tgtatattctgctaccatgaatgga

SEQ ID NO: 5969977 - DNA, 25 bp, Homo sapien
catttggatttccttctcgtaaaga

SEQ ID NO: 5969978 - DNA, 25 bp, Homo sapien
aataatgtttcaggtaagcagtgaa

SEQ ID NO: 5969979 - DNA, 25 bp, Homo sapien
tctctatcgaatccaaatttttcca

SEQ ID NO: 5969980 - DNA, 25 bp, Homo sapien
accagtcaattaacagcgccctcat

SEQ ID NO: 5969981 - DNA, 25 bp, Homo sapien
ccatgaatggatcatccatctctat

SEQ ID NO: 5969982 - DNA, 25 bp, Homo sapien
atttggccatgttccttgtttcaat

SEQ ID NO: 5969983 - DNA, 25 bp, Homo sapien
ggtggatgaatttattacaacaaat

SEQ ID NO: 5969984 - DNA, 25 bp, Homo sapien
tattctgctaccatgaatggatcat

SEQ ID NO: 5969985 - DNA, 25 bp, Homo sapien
tcgaatccaaatttttccattgatg

SEQ ID NO: 5969986 - DNA, 25 bp, Homo sapien
ttgttactgtttacctcggatagaa

SEQ ID NO: 5969987 - DNA, 25 bp, Homo sapien
tggatctgattcaatatcaatgccg

SEQ ID NO: 5969988 - DNA, 25 bp, Homo sapien
ctctataggatcggttgaatcattt

SEQ ID NO: 5969989 - DNA, 25 bp, Homo sapien
tcaactagttcactgataaaatcct

SEQ ID NO: 5969990 - DNA, 25 bp, Homo sapien
agaatcgattttgttactgtttacc

SEQ ID NO: 5969991 - DNA, 25 bp, Homo sapien
ctgataaaatccttaaacgctggat

SEQ ID NO: 5969992 - DNA, 25 bp, Homo sapien
ttttcacagtttttggctctatagg

SEQ ID NO: 5969993 - DNA, 25 bp, Homo sapien
tagagtgaggtgtcaagttaattga

SEQ ID NO: 5969994 - DNA, 25 bp, Homo sapien
atgaatttggccatgttccttgttt

SEQ ID NO: 5969995 - DNA, 25 bp, Homo sapien
gtaaagaatcgattttgttactgtt

SEQ ID NO: 5969996 - DNA, 25 bp, Homo sapien
gaacttcaaccaaccagtcaattaa

SEQ ID NO: 5969997 - DNA, 25 bp, Homo sapien
gattcgtatcaggtacagcaatatc

SEQ ID NO: 5969998 - DNA, 25 bp, Homo sapien
attttgtgataaaaatcgatctagc

SEQ ID NO: 5969999 - DNA, 25 bp, Homo sapien
catttgataattgtctctttcttgt

SEQ ID NO: 5970000 - DNA, 25 bp, Homo sapien
agtcacgtacgcaaaatttgttatt

SEQ ID NO: 5970001 - DNA, 25 bp, Homo sapien
gttaattgaactttctcttggaatg

SEQ ID NO: 5970002 - DNA, 25 bp, Homo sapien
ttgatcgctaaaaataatgtttcag

SEQ ID NO: 5970003 - DNA, 25 bp, Homo sapien
gagaaaatatagaatctgtatattc

SEQ ID NO: 5970004 - DNA, 25 bp, Homo sapien
tgcaatttacctcgagggagttgta

SEQ ID NO: 5970005 - DNA, 25 bp, Homo sapien
tcgctaaaaataatgtttcaggtaa

SEQ ID NO: 5970006 - DNA, 25 bp, Homo sapien
gggtttggtagagatatgttataac

SEQ ID NO: 5970007 - DNA, 25 bp, Homo sapien
tgataaaaatcgatctagcaggttg

SEQ ID NO: 5970008 - DNA, 25 bp, Homo sapien
tggaatggtatggaaagcattttcc

SEQ ID NO: 5970009 - DNA, 25 bp, Homo sapien
agaatctgtatattctgctaccatg

SEQ ID NO: 5970010 - DNA, 25 bp, Homo sapien
aaaaatcgatctagcaggttgatcg

SEQ ID NO: 5970011 - DNA, 25 bp, Homo sapien
tttctggcgatatacatggacattg

SEQ ID NO: 5970012 - DNA, 25 bp, Homo sapien
gataaaatccttaaacgctggatct

SEQ ID NO: 5970013 - DNA, 25 bp, Homo sapien
aggctttttgtatttaagtctcaag

SEQ ID NO: 5970014 - DNA, 25 bp, Homo sapien
tcggatagaacttttttttcattcg

SEQ ID NO: 5970015 - DNA, 25 bp, Homo sapien
tttaagtctcaaggaatctagattc

SEQ ID NO: 5970016 - DNA, 25 bp, Homo sapien
accaaccagtcaattaacagcgccc

SEQ ID NO: 5970017 - DNA, 25 bp, Homo sapien
gaaagcattttccttgcctatacaa

SEQ ID NO: 5970018 - DNA, 25 bp, Homo sapien
gattttgttactgtttacctcggat

SEQ ID NO: 5970019 - DNA, 25 bp, Homo sapien
gagcttttcaaatgatagggagatt

SEQ ID NO: 5970020 - DNA, 25 bp, Homo sapien
agcgccctcatggagcttttcaaat

SEQ ID NO: 5970021 - DNA, 25 bp, Homo sapien
aaggaatctagattcgtatcaggta

SEQ ID NO: 5970022 - DNA, 25 bp, Homo sapien
ccaaatgggtggaatctctttgcaa

SEQ ID NO: 5970023 - DNA, 25 bp, Homo sapien
caggtaagcagtgaaatttctcatg

SEQ ID NO: 5970024 - DNA, 25 bp, Homo sapien
accgtcagtcacgtacgcaaaattt

SEQ ID NO: 5970025 - DNA, 25 bp, Homo sapien
ttttttccaaatgggtggaatctct

SEQ ID NO: 5970026 - DNA, 25 bp, Homo sapien
aatttctcatgaacttcaaccaacc

SEQ ID NO: 5970027 - DNA, 25 bp, Homo sapien
taaaaataatgtttcaggtaagcag

SEQ ID NO: 5970028 - DNA, 25 bp, Homo sapien
agcaggttgatcgctaaaaataatg

SEQ ID NO: 5970029 - DNA, 25 bp, Homo sapien
tcactaattggactagggatacaat

SEQ ID NO: 5970030 - DNA, 25 bp, Homo sapien
caacgtttttgtttacaccagtcaa

SEQ ID NO: 5970031 - DNA, 25 bp, Homo sapien
gtttcaggtaagcagtgaaatttct

SEQ ID NO: 5970032 - DNA, 25 bp, Homo sapien
cttcgacagtggcagcaccgtcagt

SEQ ID NO: 5970033 - DNA, 25 bp, Homo sapien
ttaggctttttgtatttaagtctca

SEQ ID NO: 5970034 - DNA, 25 bp, Homo sapien
aaacgctggatctgattcaatatca

SEQ ID NO: 5970035 - DNA, 25 bp, Homo sapien
ttgtcagcttttgaaattctcctaa

SEQ ID NO: 5970036 - DNA, 25 bp, Homo sapien
ttccaaatgggtggaatctctttgc

SEQ ID NO: 5970037 - DNA, 25 bp, Homo sapien
taaagaacttagaacgaatagctca

SEQ ID NO: 5970038 - DNA, 25 bp, Homo sapien
ggttgaatcatttgataattgtctc

SEQ ID NO: 5970039 - DNA, 25 bp, Homo sapien
ttcctttcactaattggactaggga

SEQ ID NO: 5970040 - DNA, 25 bp, Homo sapien
agatgagaaaatatagaatctgtat

SEQ ID NO: 5970041 - DNA, 25 bp, Homo sapien
gatggcttcaggtggatgaatttat

SEQ ID NO: 5970042 - DNA, 25 bp, Homo sapien
tggatgaatttattacaacaaatcg

SEQ ID NO: 5970043 - DNA, 25 bp, Homo sapien
aactagttcactgataaaatcctta

SEQ ID NO: 5970044 - DNA, 25 bp, Homo sapien
gcttttgaaattctcctaatgaaat

SEQ ID NO: 5970045 - DNA, 25 bp, Homo sapien
tctttgcaatttacctcgagggagt

SEQ ID NO: 5970046 - DNA, 25 bp, Homo sapien
ggtaagcagtgaaatttctcatgaa

SEQ ID NO: 5970047 - DNA, 25 bp, Homo sapien
gaacttttttttcattcgtagagtg

SEQ ID NO: 5970048 - DNA, 25 bp, Homo sapien
tggatttccttctcgtaaagatgag

SEQ ID NO: 5970049 - DNA, 25 bp, Homo sapien
cattcgtagagtgaggtgtcaagtt

SEQ ID NO: 5970050 - DNA, 25 bp, Homo sapien
gcaagtgatgcatagtagttgtaat

SEQ ID NO: 5970051 - DNA, 25 bp, Homo sapien
atccttaaacgctggatctgattca

SEQ ID NO: 5970052 - DNA, 25 bp, Homo sapien
aataaaccatgccatgtttaggctt

SEQ ID NO: 5970053 - DNA, 25 bp, Homo sapien
cgagggagttgtaaagaatcgattt

SEQ ID NO: 5970054 - DNA, 25 bp, Homo sapien
ataatgaataaaagtttcatcccat

SEQ ID NO: 5970055 - DNA, 25 bp, Homo sapien
ttgaatcatttgataattgtctctt

SEQ ID NO: 5970056 - DNA, 25 bp, Homo sapien
cgtgtccattaaatagttatgtgtc

SEQ ID NO: 5970057 - DNA, 25 bp, Homo sapien
atgccatgtttaggctttttgtatt

SEQ ID NO: 5970058 - DNA, 25 bp, Homo sapien
gctttttgtatttaagtctcaagga

SEQ ID NO: 5970059 - DNA, 25 bp, Homo sapien
gtaaagatgagaaaatatagaatct

SEQ ID NO: 5970060 - DNA, 25 bp, Homo sapien
tttagggggtttggtagagatatgt

SEQ ID NO: 5970061 - DNA, 25 bp, Homo sapien
tatacatggacattgcagctaaata

SEQ ID NO: 5970062 - DNA, 25 bp, Homo sapien
gtttttggctctataggatcggttg

SEQ ID NO: 5970063 - DNA, 25 bp, Homo sapien
catgtttaggctttttgtatttaag

SEQ ID NO: 5970064 - DNA, 25 bp, Homo sapien
ttttgaaattctcctaatgaaattt

SEQ ID NO: 5970065 - DNA, 25 bp, Homo sapien
aaagaatcgattttgttactgttta

SEQ ID NO: 5970066 - DNA, 25 bp, Homo sapien
tcacgtacgcaaaatttgttatttt

SEQ ID NO: 5970067 - DNA, 25 bp, Homo sapien
ttcgtagagtgaggtgtcaagttaa

SEQ ID NO: 5970068 - DNA, 25 bp, Homo sapien
tttcaatgcagtaattgtcagcttt

SEQ ID NO: 5970069 - DNA, 25 bp, Homo sapien
agtctcaaggaatctagattcgtat

SEQ ID NO: 5970070 - DNA, 25 bp, Homo sapien
catgatgaatttggccatgttcctt

SEQ ID NO: 5970071 - DNA, 25 bp, Homo sapien
caatgaacaggcaagtgatgcatag

SEQ ID NO: 5970072 - DNA, 25 bp, Homo sapien
aattgtcagcttttgaaattctcct

SEQ ID NO: 5970073 - DNA, 25 bp, Homo sapien
taattccttcgacagtggcagcacc

SEQ ID NO: 5970074 - DNA, 25 bp, Homo sapien
tctgtatattctgctaccatgaatg

SEQ ID NO: 5970075 - DNA, 25 bp, Homo sapien
aaatttttccattgatgacatttta

SEQ ID NO: 5970076 - DNA, 25 bp, Homo sapien
cttggaatggtatggaaagcatttt

SEQ ID NO: 5970077 - DNA, 25 bp, Homo sapien
gtttggtagagatatgttataacct

SEQ ID NO: 5970078 - DNA, 25 bp, Homo sapien
taatgtttcaggtaagcagtgaaat

SEQ ID NO: 5970079 - DNA, 25 bp, Homo sapien
aatttattacaacaaatcgaatatt

SEQ ID NO: 5970080 - DNA, 25 bp, Homo sapien
ggtagagatatgttataacctaaag

SEQ ID NO: 5970081 - DNA, 25 bp, Homo sapien
gatttccttctcgtaaagatgagaa

SEQ ID NO: 5970082 - DNA, 25 bp, Homo sapien
aatttttctggcgatatacatggac

SEQ ID NO: 5970083 - DNA, 25 bp, Homo sapien
tttacaccagtcaaaaaccttgaaa

SEQ ID NO: 5970084 - DNA, 25 bp, Homo sapien
atttttttcacagtttttggctcta

SEQ ID NO: 5970085 - DNA, 25 bp, Homo sapien
tgaataaaagtttcatcccatttgg

SEQ ID NO: 5970086 - DNA, 25 bp, Homo sapien
ttcgtatcaggtacagcaatatctt

SEQ ID NO: 5970087 - DNA, 25 bp, Homo sapien
tacaggcaatgaacaggcaagtgat

SEQ ID NO: 5970088 - DNA, 25 bp, Homo sapien
agttgtaaagaatcgattttgttac

SEQ ID NO: 5970089 - DNA, 25 bp, Homo sapien
aatctgtatattctgctaccatgaa

SEQ ID NO: 5970090 - DNA, 25 bp, Homo sapien
tccatctctatcgaatccaaatttt

SEQ ID NO: 5970091 - DNA, 25 bp, Homo sapien
ctcttggaatggtatggaaagcatt

SEQ ID NO: 5970092 - DNA, 25 bp, Homo sapien
cagtaattgtcagcttttgaaattc

SEQ ID NO: 5970093 - DNA, 25 bp, Homo sapien
tttcatcccatttggaattttcatt

SEQ ID NO: 5970094 - DNA, 25 bp, Homo sapien
aagttaattgaactttctcttggaa

SEQ ID NO: 5970095 - DNA, 25 bp, Homo sapien
taagtctcaaggaatctagattcgt

SEQ ID NO: 5970096 - DNA, 25 bp, Homo sapien
aatgaataaaagtttcatcccattt

SEQ ID NO: 5970097 - DNA, 25 bp, Homo sapien
caaatttacaggcaatgaacaggca

SEQ ID NO: 5970098 - DNA, 25 bp, Homo sapien
gtgaaatttctcatgaacttcaacc

SEQ ID NO: 5970099 - DNA, 25 bp, Homo sapien
tggaaagcattttccttgcctatac

SEQ ID NO: 5970100 - DNA, 25 bp, Homo sapien
ctagcaggttgatcgctaaaaataa

SEQ ID NO: 5970101 - DNA, 25 bp, Homo sapien
ttatttttttcacagtttttggctc

SEQ ID NO: 5970102 - DNA, 25 bp, Homo sapien
ggaatctctttgcaatttacctcga

SEQ ID NO: 5970103 - DNA, 25 bp, Homo sapien
caatttacctcgagggagttgtaaa

SEQ ID NO: 5970104 - DNA, 25 bp, Homo sapien
aatcgaatattccatgatgaatttg

SEQ ID NO: 5970105 - DNA, 25 bp, Homo sapien
attcaatatcaatgccgccactata

SEQ ID NO: 5970106 - DNA, 25 bp, Homo sapien
catggacattgcagctaaatatgat

SEQ ID NO: 5970107 - DNA, 25 bp, Homo sapien
atccaaatttttccattgatgacat

SEQ ID NO: 5970108 - DNA, 25 bp, Homo sapien
tgcgtgtccattaaatagttatgtg

SEQ ID NO: 5970109 - DNA, 25 bp, Homo sapien
ccttcctaattccttcgacagtggc

SEQ ID NO: 5970110 - DNA, 25 bp, Homo sapien
ccgccactataatgaataaaagttt

SEQ ID NO: 5970111 - DNA, 25 bp, Homo sapien
tttacaggcaatgaacaggcaagtg

SEQ ID NO: 5970112 - DNA, 25 bp, Homo sapien
tctcatgaacttcaaccaaccagtc

SEQ ID NO: 5970113 - DNA, 25 bp, Homo sapien
aataaaagtttcatcccatttggaa

SEQ ID NO: 5970114 - DNA, 25 bp, Homo sapien
ttgaaataaaccatgccatgtttag

SEQ ID NO: 5970115 - DNA, 25 bp, Homo sapien
tctggcgatatacatggacattgca

SEQ ID NO: 5970116 - DNA, 25 bp, Homo sapien
tctctttgcaatttacctcgaggga

SEQ ID NO: 5970117 - DNA, 25 bp, Homo sapien
cagtttttggctctataggatcggt

SEQ ID NO: 5970118 - DNA, 25 bp, Homo sapien
tgttataacctaaagaacttagaac

SEQ ID NO: 5970119 - DNA, 25 bp, Homo sapien
tgcctatacaatcttcattattaat

SEQ ID NO: 5970120 - DNA, 25 bp, Homo sapien
tggagcttttcaaatgatagggaga

SEQ ID NO: 5970121 - DNA, 25 bp, Homo sapien
tcgacagtggcagcaccgtcagtca

SEQ ID NO: 5970122 - DNA, 25 bp, Homo sapien
tgcagtaattgtcagcttttgaaat

SEQ ID NO: 5970123 - DNA, 25 bp, Homo sapien
gcgatatacatggacattgcagcta

SEQ ID NO: 5970124 - DNA, 25 bp, Homo sapien
gaatggtatggaaagcattttcctt

SEQ ID NO: 5970125 - DNA, 25 bp, Homo sapien
aaatatagaatctgtatattctgct

SEQ ID NO: 5970126 - DNA, 25 bp, Homo sapien
gaatggatcatccatctctatcgaa

SEQ ID NO: 5970127 - DNA, 25 bp, Homo sapien
cattaaatagttatgtgtcggtagc

SEQ ID NO: 5970128 - DNA, 25 bp, Homo sapien
tttttctggcgatatacatggacat

SEQ ID NO: 5970129 - DNA, 25 bp, Homo sapien
cttctcgtaaagatgagaaaatata

SEQ ID NO: 5970130 - DNA, 25 bp, Homo sapien
tagagatatgttataacctaaagaa

SEQ ID NO: 5970131 - DNA, 25 bp, Homo sapien
gctggatctgattcaatatcaatgc

SEQ ID NO: 5970132 - DNA, 25 bp, Homo sapien
gacagtggcagcaccgtcagtcacg

SEQ ID NO: 5970133 - DNA, 25 bp, Homo sapien
tgaatttattacaacaaatcgaata

SEQ ID NO: 5970134 - DNA, 25 bp, Homo sapien
aatgcagtaattgtcagcttttgaa

SEQ ID NO: 5970135 - DNA, 25 bp, Homo sapien
tccatgatgaatttggccatgttcc

SEQ ID NO: 5970136 - DNA, 25 bp, Homo sapien
cactgataaaatccttaaacgctgg

SEQ ID NO: 5970137 - DNA, 25 bp, Homo sapien
caggtggatgaatttattacaacaa

SEQ ID NO: 5970138 - DNA, 25 bp, Homo sapien
ttgaaattctcctaatgaaatttag

SEQ ID NO: 5970139 - DNA, 25 bp, Homo sapien
attaacagcgccctcatggagcttt

SEQ ID NO: 5970140 - DNA, 25 bp, Homo sapien
atgatggcttcaggtggatgaattt

SEQ ID NO: 5970141 - DNA, 25 bp, Homo sapien
cagcttttgaaattctcctaatgaa

SEQ ID NO: 5970142 - DNA, 25 bp, Homo sapien
tggacattgcagctaaatatgatgg

SEQ ID NO: 5970143 - DNA, 25 bp, Homo sapien
aaatcgatctagcaggttgatcgct

SEQ ID NO: 5970144 - DNA, 25 bp, Homo sapien
ttttcctttcactaattggactagg

SEQ ID NO: 5970145 - DNA, 25 bp, Homo sapien
ggcagcaccgtcagtcacgtacgca

SEQ ID NO: 5970146 - DNA, 25 bp, Homo sapien
acttcaaccaaccagtcaattaaca

SEQ ID NO: 5970147 - DNA, 25 bp, Homo sapien
gtggcagcaccgtcagtcacgtacg

SEQ ID NO: 5970148 - DNA, 25 bp, Homo sapien
gatagaacttttttttcattcgtag

SEQ ID NO: 5970149 - DNA, 25 bp, Homo sapien
gctaaaaataatgtttcaggtaagc

SEQ ID NO: 5970150 - DNA, 25 bp, Homo sapien
gctaccatgaatggatcatccatct

SEQ ID NO: 5970151 - DNA, 25 bp, Homo sapien
caaatcgaatattccatgatgaatt

SEQ ID NO: 5970152 - DNA, 25 bp, Homo sapien
gtagcatttggatttccttctcgta

SEQ ID NO: 5970153 - DNA, 25 bp, Homo sapien
tacctcggatagaacttttttttca

SEQ ID NO: 5970154 - DNA, 25 bp, Homo sapien
ttctcttggaatggtatggaaagca

SEQ ID NO: 5970155 - DNA, 25 bp, Homo sapien
cacagtttttggctctataggatcg

SEQ ID NO: 5970156 - DNA, 25 bp, Homo sapien
caatatcttcaactagttcactgat

SEQ ID NO: 5970157 - DNA, 25 bp, Homo sapien
tcatgaacttcaaccaaccagtcaa

SEQ ID NO: 5970158 - DNA, 25 bp, Homo sapien
aaaaccttgaaataaaccatgccat

SEQ ID NO: 5970159 - DNA, 25 bp, Homo sapien
gtggaatctctttgcaatttacctc

SEQ ID NO: 5970160 - DNA, 25 bp, Homo sapien
gtgtcggtagcatttggatttcctt

SEQ ID NO: 5970161 - DNA, 25 bp, Homo sapien
tcttgttttttccaaatgggtggaa

SEQ ID NO: 5970162 - DNA, 25 bp, Homo sapien
tctgattcaatatcaatgccgccac

SEQ ID NO: 5970163 - DNA, 25 bp, Homo sapien
tatggaaagcattttccttgcctat

SEQ ID NO: 5970164 - DNA, 25 bp, Homo sapien
atattccatgatgaatttggccatg

SEQ ID NO: 5970165 - DNA, 25 bp, Homo sapien
ttttttttcattcgtagagtgaggt

SEQ ID NO: 5970166 - DNA, 25 bp, Homo sapien
atatcttcaactagttcactgataa

SEQ ID NO: 5970167 - DNA, 25 bp, Homo sapien
aacgaatagctcagccttcctaatt

SEQ ID NO: 5970168 - DNA, 25 bp, Homo sapien
cagtcaaaaaccttgaaataaacca

SEQ ID NO: 5970169 - DNA, 25 bp, Homo sapien
gcattttccttgcctatacaatctt

SEQ ID NO: 5970170 - DNA, 25 bp, Homo sapien
ctataatgaataaaagtttcatccc

SEQ ID NO: 5970171 - DNA, 25 bp, Homo sapien
tagggggtttggtagagatatgtta

SEQ ID NO: 5970172 - DNA, 25 bp, Homo sapien
gccatgtttaggctttttgtattta

SEQ ID NO: 5970173 - DNA, 25 bp, Homo sapien
cttgtttcaatgcagtaattgtcag

SEQ ID NO: 5970174 - DNA, 25 bp, Homo sapien
ggctctataggatcggttgaatcat

SEQ ID NO: 5970175 - DNA, 25 bp, Homo sapien
taaaatccttaaacgctggatctga

SEQ ID NO: 5970176 - DNA, 25 bp, Homo sapien
taaaccatgccatgtttaggctttt

SEQ ID NO: 5970177 - DNA, 25 bp, Homo sapien
cttcattattaatttggattttcct

SEQ ID NO: 5970178 - DNA, 25 bp, Homo sapien
tataacctaaagaacttagaacgaa

SEQ ID NO: 5970179 - DNA, 25 bp, Homo sapien
tcaatgccgccactataatgaataa

SEQ ID NO: 5970180 - DNA, 25 bp, Homo sapien
caaccaaccagtcaattaacagcgc

SEQ ID NO: 5970181 - DNA, 25 bp, Homo sapien
acattttgtgataaaaatcgatcta

SEQ ID NO: 5970182 - DNA, 25 bp, Homo sapien
tcatcccatttggaattttcatttt

SEQ ID NO: 5970183 - DNA, 25 bp, Homo sapien
caacattttgtgataaaaatcgatc

SEQ ID NO: 5970184 - DNA, 25 bp, Homo sapien
taacagcgccctcatggagcttttc

SEQ ID NO: 5970185 - DNA, 25 bp, Homo sapien
atggatcatccatctctatcgaatc

SEQ ID NO: 5970186 - DNA, 25 bp, Homo sapien
gtacagcaatatcttcaactagttc

SEQ ID NO: 5970187 - DNA, 25 bp, Homo sapien
acttttttttcattcgtagagtgag

SEQ ID NO: 5970188 - DNA, 25 bp, Homo sapien
gaatcatttgataattgtctctttc

SEQ ID NO: 5970189 - DNA, 25 bp, Homo sapien
attccatgatgaatttggccatgtt

SEQ ID NO: 5970190 - DNA, 25 bp, Homo sapien
ccaaatttttccattgatgacattt

SEQ ID NO: 5970191 - DNA, 25 bp, Homo sapien
aaccttgaaataaaccatgccatgt

SEQ ID NO: 5970192 - DNA, 25 bp, Homo sapien
gtaattgtcagcttttgaaattctc

SEQ ID NO: 5970193 - DNA, 25 bp, Homo sapien
ccatgttccttgtttcaatgcagta

SEQ ID NO: 5970194 - DNA, 25 bp, Homo sapien
ttggccatgttccttgtttcaatgc

SEQ ID NO: 5970195 - DNA, 25 bp, Homo sapien
agttatgtgtcggtagcatttggat

SEQ ID NO: 5970196 - DNA, 25 bp, Homo sapien
gaacaggcaagtgatgcatagtagt

SEQ ID NO: 5970197 - DNA, 25 bp, Homo sapien
ttcaaccaaccagtcaattaacagc

SEQ ID NO: 5970198 - DNA, 25 bp, Homo sapien
tgattcaatatcaatgccgccacta

SEQ ID NO: 5970199 - DNA, 25 bp, Homo sapien
tagaacttttttttcattcgtagag

SEQ ID NO: 5970200 - DNA, 25 bp, Homo sapien
aactttctcttggaatggtatggaa

SEQ ID NO: 5970201 - DNA, 25 bp, Homo sapien
catggagcttttcaaatgataggga

SEQ ID NO: 5970202 - DNA, 25 bp, Homo sapien
tcaagttaattgaactttctcttgg

SEQ ID NO: 5970203 - DNA, 25 bp, Homo sapien
tcgaatattccatgatgaatttggc

SEQ ID NO: 5970204 - DNA, 25 bp, Homo sapien
atcatccatctctatcgaatccaaa

SEQ ID NO: 5970205 - DNA, 25 bp, Homo sapien
cgtagagtgaggtgtcaagttaatt

SEQ ID NO: 5970206 - DNA, 25 bp, Homo sapien
ttttttcacagtttttggctctata

SEQ ID NO: 5970207 - DNA, 25 bp, Homo sapien
acagcaatatcttcaactagttcac

SEQ ID NO: 5970208 - DNA, 25 bp, Homo sapien
tttttgtatttaagtctcaaggaat

SEQ ID NO: 5970209 - DNA, 25 bp, Homo sapien
ggccatgttccttgtttcaatgcag

SEQ ID NO: 5970210 - DNA, 25 bp, Homo sapien
tgtttaggctttttgtatttaagtc

SEQ ID NO: 5970211 - DNA, 25 bp, Homo sapien
tgtgataaaaatcgatctagcaggt

SEQ ID NO: 5970212 - DNA, 25 bp, Homo sapien
cagtggcagcaccgtcagtcacgta

SEQ ID NO: 5970213 - DNA, 25 bp, Homo sapien
tgatgaatttggccatgttccttgt

SEQ ID NO: 5970214 - DNA, 25 bp, Homo sapien
gctcagccttcctaattccttcgac

SEQ ID NO: 5970215 - DNA, 25 bp, Homo sapien
catctctatcgaatccaaatttttc

SEQ ID NO: 5970216 - DNA, 25 bp, Homo sapien
gattttcctttcactaattggacta

SEQ ID NO: 5970217 - DNA, 25 bp, Homo sapien
aaatagttatgtgtcggtagcattt

SEQ ID NO: 5970218 - DNA, 25 bp, Homo sapien
aggcaagtgatgcatagtagttgta

SEQ ID NO: 5970219 - DNA, 25 bp, Homo sapien
attgaactttctcttggaatggtat

SEQ ID NO: 5970220 - DNA, 25 bp, Homo sapien
gatgaatttattacaacaaatcgaa

SEQ ID NO: 5970221 - DNA, 25 bp, Homo sapien
ttagaacgaatagctcagccttcct

SEQ ID NO: 5970222 - DNA, 25 bp, Homo sapien
tatcaggtacagcaatatcttcaac

SEQ ID NO: 5970223 - DNA, 25 bp, Homo sapien
gaaaatatagaatctgtatattctg

SEQ ID NO: 5970224 - DNA, 25 bp, Homo sapien
tttattacaacaaatcgaatattcc

SEQ ID NO: 5970225 - DNA, 25 bp, Homo sapien
ctgctaccatgaatggatcatccat

SEQ ID NO: 5970226 - DNA, 25 bp, Homo sapien
ttcaaatgatagggagattgcgtgt

SEQ ID NO: 5970227 - DNA, 25 bp, Homo sapien
cagtgaaatttctcatgaacttcaa

SEQ ID NO: 5970228 - DNA, 25 bp, Homo sapien
aaccatgccatgtttaggctttttg

SEQ ID NO: 5970229 - DNA, 25 bp, Homo sapien
ttgcagctaaatatgatggcttcag

SEQ ID NO: 5970230 - DNA, 25 bp, Homo sapien
tagattcgtatcaggtacagcaata

SEQ ID NO: 5970231 - DNA, 25 bp, Homo sapien
gatctgattcaatatcaatgccgcc

SEQ ID NO: 5970232 - DNA, 25 bp, Homo sapien
taccatgaatggatcatccatctct

SEQ ID NO: 5970233 - DNA, 25 bp, Homo sapien
taattggactagggatacaattcat

SEQ ID NO: 5970234 - DNA, 25 bp, Homo sapien
tatgttataacctaaagaacttaga

SEQ ID NO: 5970235 - DNA, 25 bp, Homo sapien
ttcaggtaagcagtgaaatttctca

SEQ ID NO: 5970236 - DNA, 25 bp, Homo sapien
atgaacttcaaccaaccagtcaatt

SEQ ID NO: 5970237 - DNA, 25 bp, Homo sapien
ttacctcgagggagttgtaaagaat

SEQ ID NO: 5970238 - DNA, 25 bp, Homo sapien
tgatagggagattgcgtgtccatta

SEQ ID NO: 5970239 - DNA, 25 bp, Homo sapien
ttaaatagttatgtgtcggtagcat

SEQ ID NO: 5970240 - DNA, 25 bp, Homo sapien
tctagattcgtatcaggtacagcaa

SEQ ID NO: 5970241 - DNA, 25 bp, Homo sapien
gtcagcttttgaaattctcctaatg

SEQ ID NO: 5970242 - DNA, 25 bp, Homo sapien
ttggtagagatatgttataacctaa

SEQ ID NO: 5970243 - DNA, 25 bp, Homo sapien
aagtgatgcatagtagttgtaattt

SEQ ID NO: 5970244 - DNA, 25 bp, Homo sapien
tgtttcaatgcagtaattgtcagct

SEQ ID NO: 5970245 - DNA, 25 bp, Homo sapien
cctaattccttcgacagtggcagca

SEQ ID NO: 5970246 - DNA, 25 bp, Homo sapien
tcaaggaatctagattcgtatcagg

SEQ ID NO: 5970247 - DNA, 25 bp, Homo sapien
aatctagattcgtatcaggtacagc

SEQ ID NO: 5970248 - DNA, 25 bp, Homo sapien
cactataatgaataaaagtttcatc

SEQ ID NO: 5970249 - DNA, 25 bp, Homo sapien
tttccttgcctatacaatcttcatt

SEQ ID NO: 5970250 - DNA, 25 bp, Homo sapien
ttttggctctataggatcggttgaa

SEQ ID NO: 5970251 - DNA, 25 bp, Homo sapien
gaacttagaacgaatagctcagcct

SEQ ID NO: 5970252 - DNA, 25 bp, Homo sapien
aacaacattttgtgataaaaatcga

SEQ ID NO: 5970253 - DNA, 25 bp, Homo sapien
gccactataatgaataaaagtttca

SEQ ID NO: 5970254 - DNA, 25 bp, Homo sapien
tacatggacattgcagctaaatatg

SEQ ID NO: 5970255 - DNA, 25 bp, Homo sapien
cctttcactaattggactagggata

SEQ ID NO: 5970256 - DNA, 25 bp, Homo sapien
agaacgaatagctcagccttcctaa

SEQ ID NO: 5970257 - DNA, 25 bp, Homo sapien
cgccctcatggagcttttcaaatga

SEQ ID NO: 5970258 - DNA, 25 bp, Homo sapien
gagatatgttataacctaaagaact

SEQ ID NO: 5970259 - DNA, 25 bp, Homo sapien
cattgcagctaaatatgatggcttc

SEQ ID NO: 5970260 - DNA, 25 bp, Homo sapien
gatgcatagtagttgtaatttattc

SEQ ID NO: 5970261 - DNA, 25 bp, Homo sapien
caaatgatagggagattgcgtgtcc

SEQ ID NO: 5970262 - DNA, 25 bp, Homo sapien
ctcatggagcttttcaaatgatagg

SEQ ID NO: 5970263 - DNA, 25 bp, Homo sapien
ttggctctataggatcggttgaatc

SEQ ID NO: 5970264 - DNA, 25 bp, Homo sapien
tttggatttccttctcgtaaagatg

SEQ ID NO: 5970265 - DNA, 25 bp, Homo sapien
ccttgaaataaaccatgccatgttt

SEQ ID NO: 5970266 - DNA, 25 bp, Homo sapien
aacaaatcgaatattccatgatgaa

SEQ ID NO: 5970267 - DNA, 25 bp, Homo sapien
tccttgcctatacaatcttcattat

SEQ ID NO: 5970268 - DNA, 25 bp, Homo sapien
ttatgtgtcggtagcatttggattt

SEQ ID NO: 5970269 - DNA, 25 bp, Homo sapien
atcgatctagcaggttgatcgctaa

SEQ ID NO: 5970270 - DNA, 25 bp, Homo sapien
aatcgattttgttactgtttacctc

SEQ ID NO: 5970271 - DNA, 25 bp, Homo sapien
gatcgctaaaaataatgtttcaggt

SEQ ID NO: 5970272 - DNA, 25 bp, Homo sapien
ggtgtcaagttaattgaactttctc

SEQ ID NO: 5970273 - DNA, 25 bp, Homo sapien
gacattgcagctaaatatgatggct

SEQ ID NO: 5970274 - DNA, 25 bp, Homo sapien
agcaatatcttcaactagttcactg

SEQ ID NO: 5970275 - DNA, 25 bp, Homo sapien
ttcaggtggatgaatttattacaac

SEQ ID NO: 5970276 - DNA, 25 bp, Homo sapien
gcaccgtcagtcacgtacgcaaaat

SEQ ID NO: 5970277 - DNA, 25 bp, Homo sapien
tcgattttgttactgtttacctcgg

SEQ ID NO: 5970278 - DNA, 25 bp, Homo sapien
gatatacatggacattgcagctaaa

SEQ ID NO: 5970279 - DNA, 25 bp, Homo sapien
ttcacagtttttggctctataggat

SEQ ID NO: 5970280 - DNA, 25 bp, Homo sapien
caggttgatcgctaaaaataatgtt

SEQ ID NO: 5970281 - DNA, 25 bp, Homo sapien
agtttcatcccatttggaattttca

SEQ ID NO: 5970282 - DNA, 25 bp, Homo sapien
gcttttcaaatgatagggagattgc

SEQ ID NO: 5970283 - DNA, 25 bp, Homo sapien
gggtggaatctctttgcaatttacc

SEQ ID NO: 5970284 - DNA, 25 bp, Homo sapien
cttcttcaaatttacaggcaatgaa

SEQ ID NO: 5970285 - DNA, 25 bp, Homo sapien
ttaatttttctggcgatatacatgg

SEQ ID NO: 5970286 - DNA, 25 bp, Homo sapien
ttaaacgctggatctgattcaatat

SEQ ID NO: 5970287 - DNA, 25 bp, Homo sapien
aaaataatgtttcaggtaagcagtg

SEQ ID NO: 5970288 - DNA, 25 bp, Homo sapien
atctagcaggttgatcgctaaaaat

SEQ ID NO: 5970289 - DNA, 25 bp, Homo sapien
cgatctagcaggttgatcgctaaaa

SEQ ID NO: 5970290 - DNA, 25 bp, Homo sapien
atgaatggatcatccatctctatcg

SEQ ID NO: 5970291 - DNA, 25 bp, Homo sapien
aggtacagcaatatcttcaactagt

SEQ ID NO: 5970292 - DNA, 25 bp, Homo sapien
gtcaaaaaccttgaaataaaccatg

SEQ ID NO: 5970293 - DNA, 25 bp, Homo sapien
tacaccagtcaaaaaccttgaaata

SEQ ID NO: 5970294 - DNA, 25 bp, Homo sapien
tctcgtaaagatgagaaaatataga

SEQ ID NO: 5970295 - DNA, 25 bp, Homo sapien
tagctcagccttcctaattccttcg

SEQ ID NO: 5970296 - DNA, 25 bp, Homo sapien
ttaacaacattttgtgataaaaatc

SEQ ID NO: 5970297 - DNA, 25 bp, Homo sapien
tcaggtacagcaatatcttcaacta

SEQ ID NO: 5970298 - DNA, 25 bp, Homo sapien
actaattggactagggatacaattc

SEQ ID NO: 5970299 - DNA, 25 bp, Homo sapien
gaaatttctcatgaacttcaaccaa

SEQ ID NO: 5970300 - DNA, 25 bp, Homo sapien
agcagtgaaatttctcatgaacttc

SEQ ID NO: 5970301 - DNA, 25 bp, Homo sapien
acaacaaatcgaatattccatgatg

SEQ ID NO: 5970302 - DNA, 25 bp, Homo sapien
tttgcaatttacctcgagggagttg

SEQ ID NO: 5970303 - DNA, 25 bp, Homo sapien
gaaataaaccatgccatgtttaggc

SEQ ID NO: 5970304 - DNA, 25 bp, Homo sapien
ctttctcttggaatggtatggaaag

SEQ ID NO: 5970305 - DNA, 25 bp, Homo sapien
atggtatggaaagcattttccttgc

SEQ ID NO: 5970306 - DNA, 25 bp, Homo sapien
tgcatagtagttgtaatttattcaa

SEQ ID NO: 5970307 - DNA, 25 bp, Homo sapien
atatagaatctgtatattctgctac

SEQ ID NO: 5970308 - DNA, 25 bp, Homo sapien
cctaaagaacttagaacgaatagct

SEQ ID NO: 5970309 - DNA, 25 bp, Homo sapien
atgagaaaatatagaatctgtatat

SEQ ID NO: 5970310 - DNA, 25 bp, Homo sapien
gaaattctcctaatgaaatttaggg

SEQ ID NO: 5970311 - DNA, 25 bp, Homo sapien
tgttttttccaaatgggtggaatct

SEQ ID NO: 5970312 - DNA, 25 bp, Homo sapien
gaatttggccatgttccttgtttca

SEQ ID NO: 5970313 - DNA, 25 bp, Homo sapien
aagcattttccttgcctatacaatc

SEQ ID NO: 5970314 - DNA, 25 bp, Homo sapien
ttttccaaatgggtggaatctcttt

SEQ ID NO: 5970315 - DNA, 25 bp, Homo sapien
aaatatgatggcttcaggtggatga

SEQ ID NO: 5970316 - DNA, 25 bp, Homo sapien
gaatattccatgatgaatttggcca

SEQ ID NO: 5970317 - DNA, 25 bp, Homo sapien
ggagttgtaaagaatcgattttgtt

SEQ ID NO: 5970318 - DNA, 25 bp, Homo sapien
tgccgccactataatgaataaaagt

SEQ ID NO: 5970319 - DNA, 25 bp, Homo sapien
tgtcaagttaattgaactttctctt

SEQ ID NO: 5970320 - DNA, 25 bp, Homo sapien
accaactaatgaaagagaaactgaa

SEQ ID NO: 5970321 - DNA, 25 bp, Homo sapien
tgatgttcgcgatgccaataatatc

SEQ ID NO: 5970322 - DNA, 25 bp, Homo sapien
gcttcacaaaacaattccacctcta

SEQ ID NO: 5970323 - DNA, 25 bp, Homo sapien
tacaatatttggtaacgtggtatgg

SEQ ID NO: 5970324 - DNA, 25 bp, Homo sapien
gagggtggataagtgaagaaaaagt

SEQ ID NO: 5970325 - DNA, 25 bp, Homo sapien
atccaataatcgaggaacacacaag

SEQ ID NO: 5970326 - DNA, 25 bp, Homo sapien
catcgaagcctcgttctaggcagga

SEQ ID NO: 5970327 - DNA, 25 bp, Homo sapien
tacaccgttcattagagatgacacc

SEQ ID NO: 5970328 - DNA, 25 bp, Homo sapien
cacttcctaagtcatttacacctga

SEQ ID NO: 5970329 - DNA, 25 bp, Homo sapien
gcatgcgaaactaaacttacttatg

SEQ ID NO: 5970330 - DNA, 25 bp, Homo sapien
acacaagaaacgaggcttcacaaaa

SEQ ID NO: 5970331 - DNA, 25 bp, Homo sapien
gtcccaagaccaactaatgaaagag

SEQ ID NO: 5970332 - DNA, 25 bp, Homo sapien
aatacatcgaagcctcgttctaggc

SEQ ID NO: 5970333 - DNA, 25 bp, Homo sapien
aagctgattgcggcatgcgaaacta

SEQ ID NO: 5970334 - DNA, 25 bp, Homo sapien
gaaatttacaccatttgtcgttgcc

SEQ ID NO: 5970335 - DNA, 25 bp, Homo sapien
caggaaatgccgacagaccaaacaa

SEQ ID NO: 5970336 - DNA, 25 bp, Homo sapien
agacatatatgacatggcaagatca

SEQ ID NO: 5970337 - DNA, 25 bp, Homo sapien
ctttggcaagaaaattgttctgggt

SEQ ID NO: 5970338 - DNA, 25 bp, Homo sapien
tgtaaacggaacgcaagctgttgat

SEQ ID NO: 5970339 - DNA, 25 bp, Homo sapien
ccaagctgattgcggcatgcgaaac

SEQ ID NO: 5970340 - DNA, 25 bp, Homo sapien
caatcttcctcattgtggctcttag

SEQ ID NO: 5970341 - DNA, 25 bp, Homo sapien
ctgtagactggaaaccaatcaagac

SEQ ID NO: 5970342 - DNA, 25 bp, Homo sapien
caataccacttcctaagtcatttac

SEQ ID NO: 5970343 - DNA, 25 bp, Homo sapien
cggtgagaaagttctgatagaaaga

SEQ ID NO: 5970344 - DNA, 25 bp, Homo sapien
cgaggcttcacaaaacaattccacc

SEQ ID NO: 5970345 - DNA, 25 bp, Homo sapien
cttcctcattgtggctcttaggaag

SEQ ID NO: 5970346 - DNA, 25 bp, Homo sapien
aaagaataaccatctacaatatttg

SEQ ID NO: 5970347 - DNA, 25 bp, Homo sapien
tcgcgatgccaataatatccttcta

SEQ ID NO: 5970348 - DNA, 25 bp, Homo sapien
tagtaagacctccaaagaaaagagg

SEQ ID NO: 5970349 - DNA, 25 bp, Homo sapien
gaaactaaacttacttatgaaccaa

SEQ ID NO: 5970350 - DNA, 25 bp, Homo sapien
aggccggaagcccactattgattta

SEQ ID NO: 5970351 - DNA, 25 bp, Homo sapien
accaataccacttcctaagtcattt

SEQ ID NO: 5970352 - DNA, 25 bp, Homo sapien
aggaacacacaagaaacgaggcttc

SEQ ID NO: 5970353 - DNA, 25 bp, Homo sapien
gtgagaaagttctgatagaaagagg

SEQ ID NO: 5970354 - DNA, 25 bp, Homo sapien
aataatatccttctatttgggaact

SEQ ID NO: 5970355 - DNA, 25 bp, Homo sapien
acaagaaacgaggcttcacaaaaca

SEQ ID NO: 5970356 - DNA, 25 bp, Homo sapien
cccaaatgatgattctcgaagagaa

SEQ ID NO: 5970357 - DNA, 25 bp, Homo sapien
tggataagtgaagaaaaagttgctc

SEQ ID NO: 5970358 - DNA, 25 bp, Homo sapien
tatacttaccggacacttccttcac

SEQ ID NO: 5970359 - DNA, 25 bp, Homo sapien
atcttcctcattgtggctcttagga

SEQ ID NO: 5970360 - DNA, 25 bp, Homo sapien
caatgaagagatgtttgttggtcca

SEQ ID NO: 5970361 - DNA, 25 bp, Homo sapien
gaagcctcgttctaggcaggaaatg

SEQ ID NO: 5970362 - DNA, 25 bp, Homo sapien
aattcgatgaacgacagtttatcaa

SEQ ID NO: 5970363 - DNA, 25 bp, Homo sapien
ttccttcacaatgaagagatgtttg

SEQ ID NO: 5970364 - DNA, 25 bp, Homo sapien
ggtggataagtgaagaaaaagttgc

SEQ ID NO: 5970365 - DNA, 25 bp, Homo sapien
acaattccacctctagcctgtggaa

SEQ ID NO: 5970366 - DNA, 25 bp, Homo sapien
taccggacacttccttcacaatgaa

SEQ ID NO: 5970367 - DNA, 25 bp, Homo sapien
acgtacctcttagcttcaagaaatc

SEQ ID NO: 5970368 - DNA, 25 bp, Homo sapien
gtggaaaaccaagctgattgcggca

SEQ ID NO: 5970369 - DNA, 25 bp, Homo sapien
aaggatccaaattctagattgtggc

SEQ ID NO: 5970370 - DNA, 25 bp, Homo sapien
aactgaagcattcaaggaaatatat

SEQ ID NO: 5970371 - DNA, 25 bp, Homo sapien
gatgccaataatatccttctatttg

SEQ ID NO: 5970372 - DNA, 25 bp, Homo sapien
tgtttacaccgttcattagagatga

SEQ ID NO: 5970373 - DNA, 25 bp, Homo sapien
atgccgacagaccaaacaattgaat

SEQ ID NO: 5970374 - DNA, 25 bp, Homo sapien
tgctcctgactcaagaaatttacac

SEQ ID NO: 5970375 - DNA, 25 bp, Homo sapien
tgattgcggcatgcgaaactaaact

SEQ ID NO: 5970376 - DNA, 25 bp, Homo sapien
gctgtaaacggaacgcaagctgttg

SEQ ID NO: 5970377 - DNA, 25 bp, Homo sapien
tgttgataataatacatcgaagcct

SEQ ID NO: 5970378 - DNA, 25 bp, Homo sapien
aagacctccaaagaaaagaggctcg

SEQ ID NO: 5970379 - DNA, 25 bp, Homo sapien
gaacttggcaagtaaggagattgaa

SEQ ID NO: 5970380 - DNA, 25 bp, Homo sapien
cctgactcaagaaatttacaccatt

SEQ ID NO: 5970381 - DNA, 25 bp, Homo sapien
cactattgatttaaagaataaccat

SEQ ID NO: 5970382 - DNA, 25 bp, Homo sapien
aagaacacttgaaagtggtttgctt

SEQ ID NO: 5970383 - DNA, 25 bp, Homo sapien
caaatgatgattctcgaagagaaag

SEQ ID NO: 5970384 - DNA, 25 bp, Homo sapien
attgatttaaagaataaccatctac

SEQ ID NO: 5970385 - DNA, 25 bp, Homo sapien
ataacgtcaactgtagactggaaac

SEQ ID NO: 5970386 - DNA, 25 bp, Homo sapien
cctcgttctaggcaggaaatgccga

SEQ ID NO: 5970387 - DNA, 25 bp, Homo sapien
ttgtgtcccaagaccaactaatgaa

SEQ ID NO: 5970388 - DNA, 25 bp, Homo sapien
caaaacaattccacctctagcctgt

SEQ ID NO: 5970389 - DNA, 25 bp, Homo sapien
ttggtaacgtggtatggcctttcgt

SEQ ID NO: 5970390 - DNA, 25 bp, Homo sapien
acgtggtatggcctttcgtttttga

SEQ ID NO: 5970391 - DNA, 25 bp, Homo sapien
ctcctgactcaagaaatttacacca

SEQ ID NO: 5970392 - DNA, 25 bp, Homo sapien
caacagtaccgaggcatcataacgt

SEQ ID NO: 5970393 - DNA, 25 bp, Homo sapien
atcaattccgactaagaatgctatt

SEQ ID NO: 5970394 - DNA, 25 bp, Homo sapien
atcgaggaacacacaagaaacgagg

SEQ ID NO: 5970395 - DNA, 25 bp, Homo sapien
ctagcctgtggaagttctggaaacg

SEQ ID NO: 5970396 - DNA, 25 bp, Homo sapien
aatttcaagccttgtatgacatgaa

SEQ ID NO: 5970397 - DNA, 25 bp, Homo sapien
tgaattcgatgaacgacagtttatc

SEQ ID NO: 5970398 - DNA, 25 bp, Homo sapien
ttaccgttggttttcaatcgctgca

SEQ ID NO: 5970399 - DNA, 25 bp, Homo sapien
taaacggaacgcaagctgttgataa

SEQ ID NO: 5970400 - DNA, 25 bp, Homo sapien
agagcccaaatgatgattctcgaag

SEQ ID NO: 5970401 - DNA, 25 bp, Homo sapien
cgatgaacgacagtttatcaaagca

SEQ ID NO: 5970402 - DNA, 25 bp, Homo sapien
cacctgacatgtgcgaggattggga

SEQ ID NO: 5970403 - DNA, 25 bp, Homo sapien
gataagtgaagaaaaagttgctcct

SEQ ID NO: 5970404 - DNA, 25 bp, Homo sapien
gatcctttggcaagaaaattgttct

SEQ ID NO: 5970405 - DNA, 25 bp, Homo sapien
cttgtatgacatgaaggaccatcca

SEQ ID NO: 5970406 - DNA, 25 bp, Homo sapien
gaaactgaagcattcaaggaaatat

SEQ ID NO: 5970407 - DNA, 25 bp, Homo sapien
ttcgtttttgagcacaatcttcctc

SEQ ID NO: 5970408 - DNA, 25 bp, Homo sapien
tggcaagatcatcagggtgcacgcc

SEQ ID NO: 5970409 - DNA, 25 bp, Homo sapien
aaggagattgaagtggaaaaccaag

SEQ ID NO: 5970410 - DNA, 25 bp, Homo sapien
cgttgtgtcccaagaccaactaatg

SEQ ID NO: 5970411 - DNA, 25 bp, Homo sapien
aataatcgaggaacacacaagaaac

SEQ ID NO: 5970412 - DNA, 25 bp, Homo sapien
ttctatttgggaacttggcaagtaa

SEQ ID NO: 5970413 - DNA, 25 bp, Homo sapien
cttagtaagacctccaaagaaaaga

SEQ ID NO: 5970414 - DNA, 25 bp, Homo sapien
tgagcacaatcttcctcattgtggc

SEQ ID NO: 5970415 - DNA, 25 bp, Homo sapien
agactggaaaccaatcaagacaggt

SEQ ID NO: 5970416 - DNA, 25 bp, Homo sapien
agcacaatcttcctcattgtggctc

SEQ ID NO: 5970417 - DNA, 25 bp, Homo sapien
atgaagagatgtttgttggtccaag

SEQ ID NO: 5970418 - DNA, 25 bp, Homo sapien
gcaaatccacgtacctcttagcttc

SEQ ID NO: 5970419 - DNA, 25 bp, Homo sapien
accacttcctaagtcatttacacct

SEQ ID NO: 5970420 - DNA, 25 bp, Homo sapien
agatgtttgttggtccaagaaagaa

SEQ ID NO: 5970421 - DNA, 25 bp, Homo sapien
accggtgagaaagttctgatagaaa

SEQ ID NO: 5970422 - DNA, 25 bp, Homo sapien
aggtgttcccataggccggaagccc

SEQ ID NO: 5970423 - DNA, 25 bp, Homo sapien
tcaagaaatttacaccatttgtcgt

SEQ ID NO: 5970424 - DNA, 25 bp, Homo sapien
ccaaattctagattgtggcaggtgc

SEQ ID NO: 5970425 - DNA, 25 bp, Homo sapien
aaaaggatccaaattctagattgtg

SEQ ID NO: 5970426 - DNA, 25 bp, Homo sapien
aactgtagactggaaaccaatcaag

SEQ ID NO: 5970427 - DNA, 25 bp, Homo sapien
atcgctgcatcaattccgactaaga

SEQ ID NO: 5970428 - DNA, 25 bp, Homo sapien
tccaaagaaaagaggctcgctacaa

SEQ ID NO: 5970429 - DNA, 25 bp, Homo sapien
taaagttatacttaccggacacttc

SEQ ID NO: 5970430 - DNA, 25 bp, Homo sapien
cacaaaacaattccacctctagcct

SEQ ID NO: 5970431 - DNA, 25 bp, Homo sapien
agaagaacacttgaaagtggtttgc

SEQ ID NO: 5970432 - DNA, 25 bp, Homo sapien
caccatttgtcgttgcctcaagaag

SEQ ID NO: 5970433 - DNA, 25 bp, Homo sapien
ggaaaaccaagctgattgcggcatg

SEQ ID NO: 5970434 - DNA, 25 bp, Homo sapien
acgacagtttatcaaagcaggtgtt

SEQ ID NO: 5970435 - DNA, 25 bp, Homo sapien
gaggcatcataacgtcaactgtaga

SEQ ID NO: 5970436 - DNA, 25 bp, Homo sapien
atccacgtacctcttagcttcaaga

SEQ ID NO: 5970437 - DNA, 25 bp, Homo sapien
gccgacagaccaaacaattgaattc

SEQ ID NO: 5970438 - DNA, 25 bp, Homo sapien
tgatgattctcgaagagaaagatcc

SEQ ID NO: 5970439 - DNA, 25 bp, Homo sapien
ggcaggaaatgccgacagaccaaac

SEQ ID NO: 5970440 - DNA, 25 bp, Homo sapien
ctcaagaagaacacttgaaagtggt

SEQ ID NO: 5970441 - DNA, 25 bp, Homo sapien
acacttccttcacaatgaagagatg

SEQ ID NO: 5970442 - DNA, 25 bp, Homo sapien
gaagcccactattgatttaaagaat

SEQ ID NO: 5970443 - DNA, 25 bp, Homo sapien
actggaaaccaatcaagacaggtaa

SEQ ID NO: 5970444 - DNA, 25 bp, Homo sapien
attgaattcgatgaacgacagttta

SEQ ID NO: 5970445 - DNA, 25 bp, Homo sapien
acttaccgttggttttcaatcgctg

SEQ ID NO: 5970446 - DNA, 25 bp, Homo sapien
aagaaatttacaccatttgtcgttg

SEQ ID NO: 5970447 - DNA, 25 bp, Homo sapien
aagctgttgataataatacatcgaa

SEQ ID NO: 5970448 - DNA, 25 bp, Homo sapien
atcagggtgcacgcccattcaattt

SEQ ID NO: 5970449 - DNA, 25 bp, Homo sapien
acatatatgacatggcaagatcatc

SEQ ID NO: 5970450 - DNA, 25 bp, Homo sapien
atatatgacatggcaagatcatcag

SEQ ID NO: 5970451 - DNA, 25 bp, Homo sapien
tctaggcaggaaatgccgacagacc

SEQ ID NO: 5970452 - DNA, 25 bp, Homo sapien
aaccaatcaagacaggtaagagccc

SEQ ID NO: 5970453 - DNA, 25 bp, Homo sapien
gtctctactaggcgccaggtccact

SEQ ID NO: 5970454 - DNA, 25 bp, Homo sapien
aagatcatcagggtgcacgcccatt

SEQ ID NO: 5970455 - DNA, 25 bp, Homo sapien
taatatccttctatttgggaacttg

SEQ ID NO: 5970456 - DNA, 25 bp, Homo sapien
gaaaaagttgctcctgactcaagaa

SEQ ID NO: 5970457 - DNA, 25 bp, Homo sapien
tcataacgtcaactgtagactggaa

SEQ ID NO: 5970458 - DNA, 25 bp, Homo sapien
ctaaacttacttatgaaccaatacc

SEQ ID NO: 5970459 - DNA, 25 bp, Homo sapien
gtggcaggtgccagacatatatgac

SEQ ID NO: 5970460 - DNA, 25 bp, Homo sapien
gcaggtgttcccataggccggaagc

SEQ ID NO: 5970461 - DNA, 25 bp, Homo sapien
cacaatcttcctcattgtggctctt

SEQ ID NO: 5970462 - DNA, 25 bp, Homo sapien
gaaggaccatccaataatcgaggaa

SEQ ID NO: 5970463 - DNA, 25 bp, Homo sapien
caagaaatcaacagtaccgaggcat

SEQ ID NO: 5970464 - DNA, 25 bp, Homo sapien
accatctacaatatttggtaacgtg

SEQ ID NO: 5970465 - DNA, 25 bp, Homo sapien
gtttatcaaagcaggtgttcccata

SEQ ID NO: 5970466 - DNA, 25 bp, Homo sapien
ccttctatttgggaacttggcaagt

SEQ ID NO: 5970467 - DNA, 25 bp, Homo sapien
ggagattgaagtggaaaaccaagct

SEQ ID NO: 5970468 - DNA, 25 bp, Homo sapien
agaatgctattggcaaatccacgta

SEQ ID NO: 5970469 - DNA, 25 bp, Homo sapien
ggcgttgtgtcccaagaccaactaa

SEQ ID NO: 5970470 - DNA, 25 bp, Homo sapien
agcctcgttctaggcaggaaatgcc

SEQ ID NO: 5970471 - DNA, 25 bp, Homo sapien
ggcatcataacgtcaactgtagact

SEQ ID NO: 5970472 - DNA, 25 bp, Homo sapien
tggaagttctggaaacgagaaccta

SEQ ID NO: 5970473 - DNA, 25 bp, Homo sapien
gataataatacatcgaagcctcgtt

SEQ ID NO: 5970474 - DNA, 25 bp, Homo sapien
tcatcagggtgcacgcccattcaat

SEQ ID NO: 5970475 - DNA, 25 bp, Homo sapien
gcaagatcatcagggtgcacgccca

SEQ ID NO: 5970476 - DNA, 25 bp, Homo sapien
gggaacttggcaagtaaggagattg

SEQ ID NO: 5970477 - DNA, 25 bp, Homo sapien
tcgctacaatgggcgaaaaaggatc

SEQ ID NO: 5970478 - DNA, 25 bp, Homo sapien
cgctgcatcaattccgactaagaat

SEQ ID NO: 5970479 - DNA, 25 bp, Homo sapien
gggcgaaaaaggatccaaattctag

SEQ ID NO: 5970480 - DNA, 25 bp, Homo sapien
agagatgtttgttggtccaagaaag

SEQ ID NO: 5970481 - DNA, 25 bp, Homo sapien
caaagaaaagaggctcgctacaatg

SEQ ID NO: 5970482 - DNA, 25 bp, Homo sapien
ccttcacaatgaagagatgtttgtt

SEQ ID NO: 5970483 - DNA, 25 bp, Homo sapien
caagaaaattgttctgggtctgatg

SEQ ID NO: 5970484 - DNA, 25 bp, Homo sapien
gagaaagttctgatagaaagagggt

SEQ ID NO: 5970485 - DNA, 25 bp, Homo sapien
gaagcattcaaggaaatatatgtaa

SEQ ID NO: 5970486 - DNA, 25 bp, Homo sapien
aattgttctgggtctgatgttcgcg

SEQ ID NO: 5970487 - DNA, 25 bp, Homo sapien
aaacttacttatgaaccaataccac

SEQ ID NO: 5970488 - DNA, 25 bp, Homo sapien
cacaatgaagagatgtttgttggtc

SEQ ID NO: 5970489 - DNA, 25 bp, Homo sapien
tatgacatgaaggaccatccaataa

SEQ ID NO: 5970490 - DNA, 25 bp, Homo sapien
gtaaggagattgaagtggaaaacca

SEQ ID NO: 5970491 - DNA, 25 bp, Homo sapien
gaccatccaataatcgaggaacaca

SEQ ID NO: 5970492 - DNA, 25 bp, Homo sapien
acagtaccgaggcatcataacgtca

SEQ ID NO: 5970493 - DNA, 25 bp, Homo sapien
gaacgcaagctgttgataataatac

SEQ ID NO: 5970494 - DNA, 25 bp, Homo sapien
ccacgtacctcttagcttcaagaaa

SEQ ID NO: 5970495 - DNA, 25 bp, Homo sapien
tgactcaagaaatttacaccatttg

SEQ ID NO: 5970496 - DNA, 25 bp, Homo sapien
tgacatgtgcgaggattgggaatac

SEQ ID NO: 5970497 - DNA, 25 bp, Homo sapien
aaagagggggcgttgtgtcccaaga

SEQ ID NO: 5970498 - DNA, 25 bp, Homo sapien
agaccaactaatgaaagagaaactg

SEQ ID NO: 5970499 - DNA, 25 bp, Homo sapien
ttcaatcgctgcatcaattccgact

SEQ ID NO: 5970500 - DNA, 25 bp, Homo sapien
atatgacatggcaagatcatcaggg

SEQ ID NO: 5970501 - DNA, 25 bp, Homo sapien
taatgaaagagaaactgaagcattc

SEQ ID NO: 5970502 - DNA, 25 bp, Homo sapien
acacacaagaaacgaggcttcacaa

SEQ ID NO: 5970503 - DNA, 25 bp, Homo sapien
atgtgcgaggattgggaataccgta

SEQ ID NO: 5970504 - DNA, 25 bp, Homo sapien
atgattctcgaagagaaagatcctt

SEQ ID NO: 5970505 - DNA, 25 bp, Homo sapien
cctccaaagaaaagaggctcgctac

SEQ ID NO: 5970506 - DNA, 25 bp, Homo sapien
cctgtggaagttctggaaacgagaa

SEQ ID NO: 5970507 - DNA, 25 bp, Homo sapien
tttcaagccttgtatgacatgaagg

SEQ ID NO: 5970508 - DNA, 25 bp, Homo sapien
ctggaaacgagaacctacgactgct

SEQ ID NO: 5970509 - DNA, 25 bp, Homo sapien
ccggacacttccttcacaatgaaga

SEQ ID NO: 5970510 - DNA, 25 bp, Homo sapien
gatcatcagggtgcacgcccattca

SEQ ID NO: 5970511 - DNA, 25 bp, Homo sapien
agaaatcaacagtaccgaggcatca

SEQ ID NO: 5970512 - DNA, 25 bp, Homo sapien
agagggggcgttgtgtcccaagacc

SEQ ID NO: 5970513 - DNA, 25 bp, Homo sapien
gaacacttgaaagtggtttgcttag

SEQ ID NO: 5970514 - DNA, 25 bp, Homo sapien
gaaagatcctttggcaagaaaattg

SEQ ID NO: 5970515 - DNA, 25 bp, Homo sapien
aactaaacttacttatgaaccaata

SEQ ID NO: 5970516 - DNA, 25 bp, Homo sapien
ccattcaatttcaagccttgtatga

SEQ ID NO: 5970517 - DNA, 25 bp, Homo sapien
atatttggtaacgtggtatggcctt

SEQ ID NO: 5970518 - DNA, 25 bp, Homo sapien
ttctcgaagagaaagatcctttggc

SEQ ID NO: 5970519 - DNA, 25 bp, Homo sapien
agcctgtggaagttctggaaacgag

SEQ ID NO: 5970520 - DNA, 25 bp, Homo sapien
ttgtggcaggtgccagacatatatg

SEQ ID NO: 5970521 - DNA, 25 bp, Homo sapien
gaaaagaggctcgctacaatgggcg

SEQ ID NO: 5970522 - DNA, 25 bp, Homo sapien
aacgtcaactgtagactggaaacca

SEQ ID NO: 5970523 - DNA, 25 bp, Homo sapien
tctagattgtggcaggtgccagaca

SEQ ID NO: 5970524 - DNA, 25 bp, Homo sapien
cttcctaagtcatttacacctgaca

SEQ ID NO: 5970525 - DNA, 25 bp, Homo sapien
attttctgtttacaccgttcattag

SEQ ID NO: 5970526 - DNA, 25 bp, Homo sapien
cgactaagaatgctattggcaaatc

SEQ ID NO: 5970527 - DNA, 25 bp, Homo sapien
gactgctgtaaacggaacgcaagct

SEQ ID NO: 5970528 - DNA, 25 bp, Homo sapien
attcaatttcaagccttgtatgaca

SEQ ID NO: 5970529 - DNA, 25 bp, Homo sapien
tttacaccatttgtcgttgcctcaa

SEQ ID NO: 5970530 - DNA, 25 bp, Homo sapien
ccaataatatccttctatttgggaa

SEQ ID NO: 5970531 - DNA, 25 bp, Homo sapien
gtggtttgcttagtaagacctccaa

SEQ ID NO: 5970532 - DNA, 25 bp, Homo sapien
ttcacaatgaagagatgtttgttgg

SEQ ID NO: 5970533 - DNA, 25 bp, Homo sapien
tgccagacatatatgacatggcaag

SEQ ID NO: 5970534 - DNA, 25 bp, Homo sapien
ttcacaaaacaattccacctctagc

SEQ ID NO: 5970535 - DNA, 25 bp, Homo sapien
tgggtctgatgttcgcgatgccaat

SEQ ID NO: 5970536 - DNA, 25 bp, Homo sapien
tgacatgaaggaccatccaataatc

SEQ ID NO: 5970537 - DNA, 25 bp, Homo sapien
agaataaccatctacaatatttggt

SEQ ID NO: 5970538 - DNA, 25 bp, Homo sapien
atttggtaacgtggtatggcctttc

SEQ ID NO: 5970539 - DNA, 25 bp, Homo sapien
acttgaaagtggtttgcttagtaag

SEQ ID NO: 5970540 - DNA, 25 bp, Homo sapien
tcctaagtcatttacacctgacatg

SEQ ID NO: 5970541 - DNA, 25 bp, Homo sapien
ttgcctcaagaagaacacttgaaag

SEQ ID NO: 5970542 - DNA, 25 bp, Homo sapien
caaacaattgaattcgatgaacgac

SEQ ID NO: 5970543 - DNA, 25 bp, Homo sapien
cggcatgcgaaactaaacttactta

SEQ ID NO: 5970544 - DNA, 25 bp, Homo sapien
gaaagagggtggataagtgaagaaa

SEQ ID NO: 5970545 - DNA, 25 bp, Homo sapien
tgacaccggtgagaaagttctgata

SEQ ID NO: 5970546 - DNA, 25 bp, Homo sapien
gaagagatgtttgttggtccaagaa

SEQ ID NO: 5970547 - DNA, 25 bp, Homo sapien
ggctcttaggaaggcgaaaagaggg

SEQ ID NO: 5970548 - DNA, 25 bp, Homo sapien
cccaagaccaactaatgaaagagaa

SEQ ID NO: 5970549 - DNA, 25 bp, Homo sapien
taagtgaagaaaaagttgctcctga

SEQ ID NO: 5970550 - DNA, 25 bp, Homo sapien
agtgaagaaaaagttgctcctgact

SEQ ID NO: 5970551 - DNA, 25 bp, Homo sapien
catctacaatatttggtaacgtggt

SEQ ID NO: 5970552 - DNA, 25 bp, Homo sapien
aaaaccaagctgattgcggcatgcg

SEQ ID NO: 5970553 - DNA, 25 bp, Homo sapien
aaatcaacagtaccgaggcatcata

SEQ ID NO: 5970554 - DNA, 25 bp, Homo sapien
caggtgccagacatatatgacatgg

SEQ ID NO: 5970555 - DNA, 25 bp, Homo sapien
gttcgcgatgccaataatatccttc

SEQ ID NO: 5970556 - DNA, 25 bp, Homo sapien
catcataacgtcaactgtagactgg

SEQ ID NO: 5970557 - DNA, 25 bp, Homo sapien
gattgtggcaggtgccagacatata

SEQ ID NO: 5970558 - DNA, 25 bp, Homo sapien
aaaattgttctgggtctgatgttcg

SEQ ID NO: 5970559 - DNA, 25 bp, Homo sapien
gcctttcgtttttgagcacaatctt

SEQ ID NO: 5970560 - DNA, 25 bp, Homo sapien
tcgaagcctcgttctaggcaggaaa

SEQ ID NO: 5970561 - DNA, 25 bp, Homo sapien
cattgtggctcttaggaaggcgaaa

SEQ ID NO: 5970562 - DNA, 25 bp, Homo sapien
aagccttgtatgacatgaaggacca

SEQ ID NO: 5970563 - DNA, 25 bp, Homo sapien
aagttgctcctgactcaagaaattt

SEQ ID NO: 5970564 - DNA, 25 bp, Homo sapien
ggcaggtgccagacatatatgacat

SEQ ID NO: 5970565 - DNA, 25 bp, Homo sapien
ccgttcattagagatgacaccggtg

SEQ ID NO: 5970566 - DNA, 25 bp, Homo sapien
gtgtcccaagaccaactaatgaaag

SEQ ID NO: 5970567 - DNA, 25 bp, Homo sapien
gatagaaagagggtggataagtgaa

SEQ ID NO: 5970568 - DNA, 25 bp, Homo sapien
gcccattcaatttcaagccttgtat

SEQ ID NO: 5970569 - DNA, 25 bp, Homo sapien
tccgactaagaatgctattggcaaa

SEQ ID NO: 5970570 - DNA, 25 bp, Homo sapien
aatgatgattctcgaagagaaagat

SEQ ID NO: 5970571 - DNA, 25 bp, Homo sapien
aagaaacgaggcttcacaaaacaat

SEQ ID NO: 5970572 - DNA, 25 bp, Homo sapien
gttgctcctgactcaagaaatttac

SEQ ID NO: 5970573 - DNA, 25 bp, Homo sapien
caattccgactaagaatgctattgg

SEQ ID NO: 5970574 - DNA, 25 bp, Homo sapien
tctgtttacaccgttcattagagat

SEQ ID NO: 5970575 - DNA, 25 bp, Homo sapien
ccgaggcatcataacgtcaactgta

SEQ ID NO: 5970576 - DNA, 25 bp, Homo sapien
gcatcaattccgactaagaatgcta

SEQ ID NO: 5970577 - DNA, 25 bp, Homo sapien
actaggcgccaggtccacttaccgt

SEQ ID NO: 5970578 - DNA, 25 bp, Homo sapien
gccggaagcccactattgatttaaa

SEQ ID NO: 5970579 - DNA, 25 bp, Homo sapien
ggttattttctgtttacaccgttca

SEQ ID NO: 5970580 - DNA, 25 bp, Homo sapien
acctacgactgctgtaaacggaacg

SEQ ID NO: 5970581 - DNA, 25 bp, Homo sapien
ggtctgatgttcgcgatgccaataa

SEQ ID NO: 5970582 - DNA, 25 bp, Homo sapien
atcaacagtaccgaggcatcataac

SEQ ID NO: 5970583 - DNA, 25 bp, Homo sapien
ttacttatgaaccaataccacttcc

SEQ ID NO: 5970584 - DNA, 25 bp, Homo sapien
tggaaaccaatcaagacaggtaaga

SEQ ID NO: 5970585 - DNA, 25 bp, Homo sapien
atgtttgttggtccaagaaagaaaa

SEQ ID NO: 5970586 - DNA, 25 bp, Homo sapien
gaagttctggaaacgagaacctacg

SEQ ID NO: 5970587 - DNA, 25 bp, Homo sapien
taccgaggcatcataacgtcaactg

SEQ ID NO: 5970588 - DNA, 25 bp, Homo sapien
agaaaattgttctgggtctgatgtt

SEQ ID NO: 5970589 - DNA, 25 bp, Homo sapien
acgactgctgtaaacggaacgcaag

SEQ ID NO: 5970590 - DNA, 25 bp, Homo sapien
agtaccgaggcatcataacgtcaac

SEQ ID NO: 5970591 - DNA, 25 bp, Homo sapien
tctgatgttcgcgatgccaataata

SEQ ID NO: 5970592 - DNA, 25 bp, Homo sapien
gaacgacagtttatcaaagcaggtg

SEQ ID NO: 5970593 - DNA, 25 bp, Homo sapien
gcctcaagaagaacacttgaaagtg

SEQ ID NO: 5970594 - DNA, 25 bp, Homo sapien
caggtaagagcccaaatgatgattc

SEQ ID NO: 5970595 - DNA, 25 bp, Homo sapien
agaggctcgctacaatgggcgaaaa

SEQ ID NO: 5970596 - DNA, 25 bp, Homo sapien
ctattggcaaatccacgtacctctt

SEQ ID NO: 5970597 - DNA, 25 bp, Homo sapien
ctacgactgctgtaaacggaacgca

SEQ ID NO: 5970598 - DNA, 25 bp, Homo sapien
agggggcgttgtgtcccaagaccaa

SEQ ID NO: 5970599 - DNA, 25 bp, Homo sapien
acaccggtgagaaagttctgataga

SEQ ID NO: 5970600 - DNA, 25 bp, Homo sapien
ctaagtcatttacacctgacatgtg

SEQ ID NO: 5970601 - DNA, 25 bp, Homo sapien
ttgaaagtggtttgcttagtaagac

SEQ ID NO: 5970602 - DNA, 25 bp, Homo sapien
tcaagacaggtaagagcccaaatga

SEQ ID NO: 5970603 - DNA, 25 bp, Homo sapien
aatttacaccatttgtcgttgcctc

SEQ ID NO: 5970604 - DNA, 25 bp, Homo sapien
gcgaggattgggaataccgtaaagt

SEQ ID NO: 5970605 - DNA, 25 bp, Homo sapien
atccttctatttgggaacttggcaa

SEQ ID NO: 5970606 - DNA, 25 bp, Homo sapien
gacctccaaagaaaagaggctcgct

SEQ ID NO: 5970607 - DNA, 25 bp, Homo sapien
atgggcgaaaaaggatccaaattct

SEQ ID NO: 5970608 - DNA, 25 bp, Homo sapien
gaggattgggaataccgtaaagtta

SEQ ID NO: 5970609 - DNA, 25 bp, Homo sapien
tgcttagtaagacctccaaagaaaa

SEQ ID NO: 5970610 - DNA, 25 bp, Homo sapien
atgcgaaactaaacttacttatgaa

SEQ ID NO: 5970611 - DNA, 25 bp, Homo sapien
ttatgaaccaataccacttcctaag

SEQ ID NO: 5970612 - DNA, 25 bp, Homo sapien
acttggcaagtaaggagattgaagt

SEQ ID NO: 5970613 - DNA, 25 bp, Homo sapien
gtgcacgcccattcaatttcaagcc

SEQ ID NO: 5970614 - DNA, 25 bp, Homo sapien
atgacatggcaagatcatcagggtg

SEQ ID NO: 5970615 - DNA, 25 bp, Homo sapien
gaaagttctgatagaaagagggtgg

SEQ ID NO: 5970616 - DNA, 25 bp, Homo sapien
tatggcctttcgtttttgagcacaa

SEQ ID NO: 5970617 - DNA, 25 bp, Homo sapien
gaacacacaagaaacgaggcttcac

SEQ ID NO: 5970618 - DNA, 25 bp, Homo sapien
tgggaataccgtaaagttatactta

SEQ ID NO: 5970619 - DNA, 25 bp, Homo sapien
ggggcgttgtgtcccaagaccaact

SEQ ID NO: 5970620 - DNA, 25 bp, Homo sapien
aagtggtttgcttagtaagacctcc

SEQ ID NO: 5970621 - DNA, 25 bp, Homo sapien
tcaactgtagactggaaaccaatca

SEQ ID NO: 5970622 - DNA, 25 bp, Homo sapien
aagaaaaagttgctcctgactcaag

SEQ ID NO: 5970623 - DNA, 25 bp, Homo sapien
tgcggcatgcgaaactaaacttact

SEQ ID NO: 5970624 - DNA, 25 bp, Homo sapien
atcaaagcaggtgttcccataggcc

SEQ ID NO: 5970625 - DNA, 25 bp, Homo sapien
attagagatgacaccggtgagaaag

SEQ ID NO: 5970626 - DNA, 25 bp, Homo sapien
cgttgcctcaagaagaacacttgaa

SEQ ID NO: 5970627 - DNA, 25 bp, Homo sapien
gatgacaccggtgagaaagttctga

SEQ ID NO: 5970628 - DNA, 25 bp, Homo sapien
aagttctgatagaaagagggtggat

SEQ ID NO: 5970629 - DNA, 25 bp, Homo sapien
ttggttttcaatcgctgcatcaatt

SEQ ID NO: 5970630 - DNA, 25 bp, Homo sapien
cgaggaacacacaagaaacgaggct

SEQ ID NO: 5970631 - DNA, 25 bp, Homo sapien
atatccttctatttgggaacttggc

SEQ ID NO: 5970632 - DNA, 25 bp, Homo sapien
gagaaactgaagcattcaaggaaat

SEQ ID NO: 5970633 - DNA, 25 bp, Homo sapien
cggaagcccactattgatttaaaga

SEQ ID NO: 5970634 - DNA, 25 bp, Homo sapien
aaccaagctgattgcggcatgcgaa

SEQ ID NO: 5970635 - DNA, 25 bp, Homo sapien
tcctttggcaagaaaattgttctgg

SEQ ID NO: 5970636 - DNA, 25 bp, Homo sapien
taataatacatcgaagcctcgttct

SEQ ID NO: 5970637 - DNA, 25 bp, Homo sapien
gctgttgataataatacatcgaagc

SEQ ID NO: 5970638 - DNA, 25 bp, Homo sapien
gtcatttacacctgacatgtgcgag

SEQ ID NO: 5970639 - DNA, 25 bp, Homo sapien
aaattctagattgtggcaggtgcca

SEQ ID NO: 5970640 - DNA, 25 bp, Homo sapien
ataccacttcctaagtcatttacac

SEQ ID NO: 5970641 - DNA, 25 bp, Homo sapien
ggaaacgagaacctacgactgctgt

SEQ ID NO: 5970642 - DNA, 25 bp, Homo sapien
tggcctttcgtttttgagcacaatc

SEQ ID NO: 5970643 - DNA, 25 bp, Homo sapien
actaagaatgctattggcaaatcca

SEQ ID NO: 5970644 - DNA, 25 bp, Homo sapien
gacagtttatcaaagcaggtgttcc

SEQ ID NO: 5970645 - DNA, 25 bp, Homo sapien
cgaagagaaagatcctttggcaaga

SEQ ID NO: 5970646 - DNA, 25 bp, Homo sapien
tagaaagagggtggataagtgaaga

SEQ ID NO: 5970647 - DNA, 25 bp, Homo sapien
tcgttctaggcaggaaatgccgaca

SEQ ID NO: 5970648 - DNA, 25 bp, Homo sapien
acttatgaaccaataccacttccta

SEQ ID NO: 5970649 - DNA, 25 bp, Homo sapien
ttgtcgttgcctcaagaagaacact

SEQ ID NO: 5970650 - DNA, 25 bp, Homo sapien
atccaaattctagattgtggcaggt

SEQ ID NO: 5970651 - DNA, 25 bp, Homo sapien
atgaaagagaaactgaagcattcaa

SEQ ID NO: 5970652 - DNA, 25 bp, Homo sapien
ctctagcctgtggaagttctggaaa

SEQ ID NO: 5970653 - DNA, 25 bp, Homo sapien
gaaacgaggcttcacaaaacaattc

SEQ ID NO: 5970654 - DNA, 25 bp, Homo sapien
gcacgcccattcaatttcaagcctt

SEQ ID NO: 5970655 - DNA, 25 bp, Homo sapien
ttgataataatacatcgaagcctcg

SEQ ID NO: 5970656 - DNA, 25 bp, Homo sapien
tggcaaatccacgtacctcttagct

SEQ ID NO: 5970657 - DNA, 25 bp, Homo sapien
cgtttttgagcacaatcttcctcat

SEQ ID NO: 5970658 - DNA, 25 bp, Homo sapien
aaacaattccacctctagcctgtgg

SEQ ID NO: 5970659 - DNA, 25 bp, Homo sapien
acacttgaaagtggtttgcttagta

SEQ ID NO: 5970660 - DNA, 25 bp, Homo sapien
gtgcgaggattgggaataccgtaaa

SEQ ID NO: 5970661 - DNA, 25 bp, Homo sapien
catggcaagatcatcagggtgcacg

SEQ ID NO: 5970662 - DNA, 25 bp, Homo sapien
ggacacttccttcacaatgaagaga

SEQ ID NO: 5970663 - DNA, 25 bp, Homo sapien
taaccatctacaatatttggtaacg

SEQ ID NO: 5970664 - DNA, 25 bp, Homo sapien
acgagaacctacgactgctgtaaac

SEQ ID NO: 5970665 - DNA, 25 bp, Homo sapien
ctattgatttaaagaataaccatct

SEQ ID NO: 5970666 - DNA, 25 bp, Homo sapien
ccagacatatatgacatggcaagat

SEQ ID NO: 5970667 - DNA, 25 bp, Homo sapien
ctgcatcaattccgactaagaatgc

SEQ ID NO: 5970668 - DNA, 25 bp, Homo sapien
attgcggcatgcgaaactaaactta

SEQ ID NO: 5970669 - DNA, 25 bp, Homo sapien
gtccacttaccgttggttttcaatc

SEQ ID NO: 5970670 - DNA, 25 bp, Homo sapien
ctcgaagagaaagatcctttggcaa

SEQ ID NO: 5970671 - DNA, 25 bp, Homo sapien
acttccttcacaatgaagagatgtt

SEQ ID NO: 5970672 - DNA, 25 bp, Homo sapien
tacaccatttgtcgttgcctcaaga

SEQ ID NO: 5970673 - DNA, 25 bp, Homo sapien
ttgtggctcttaggaaggcgaaaag

SEQ ID NO: 5970674 - DNA, 25 bp, Homo sapien
ttgggaacttggcaagtaaggagat

SEQ ID NO: 5970675 - DNA, 25 bp, Homo sapien
aggaccatccaataatcgaggaaca

SEQ ID NO: 5970676 - DNA, 25 bp, Homo sapien
gaaaccaatcaagacaggtaagagc

SEQ ID NO: 5970677 - DNA, 25 bp, Homo sapien
ttcaagaaatcaacagtaccgaggc

SEQ ID NO: 5970678 - DNA, 25 bp, Homo sapien
tttctgtttacaccgttcattagag

SEQ ID NO: 5970679 - DNA, 25 bp, Homo sapien
caggtccacttaccgttggttttca

SEQ ID NO: 5970680 - DNA, 25 bp, Homo sapien
tgaagaaaaagttgctcctgactca

SEQ ID NO: 5970681 - DNA, 25 bp, Homo sapien
aaacgagaacctacgactgctgtaa

SEQ ID NO: 5970682 - DNA, 25 bp, Homo sapien
ctgaagcattcaaggaaatatatgt

SEQ ID NO: 5970683 - DNA, 25 bp, Homo sapien
acttacttatgaaccaataccactt

SEQ ID NO: 5970684 - DNA, 25 bp, Homo sapien
tacaatgggcgaaaaaggatccaaa

SEQ ID NO: 5970685 - DNA, 25 bp, Homo sapien
tttacaccgttcattagagatgaca

SEQ ID NO: 5970686 - DNA, 25 bp, Homo sapien
gtcgttgcctcaagaagaacacttg

SEQ ID NO: 5970687 - DNA, 25 bp, Homo sapien
taggcgccaggtccacttaccgttg

SEQ ID NO: 5970688 - DNA, 25 bp, Homo sapien
tgtggaagttctggaaacgagaacc

SEQ ID NO: 5970689 - DNA, 25 bp, Homo sapien
tgatttaaagaataaccatctacaa

SEQ ID NO: 5970690 - DNA, 25 bp, Homo sapien
ttggcaagaaaattgttctgggtct

SEQ ID NO: 5970691 - DNA, 25 bp, Homo sapien
atttaaagaataaccatctacaata

SEQ ID NO: 5970692 - DNA, 25 bp, Homo sapien
tttacacctgacatgtgcgaggatt

SEQ ID NO: 5970693 - DNA, 25 bp, Homo sapien
caatgggcgaaaaaggatccaaatt

SEQ ID NO: 5970694 - DNA, 25 bp, Homo sapien
tacatcgaagcctcgttctaggcag

SEQ ID NO: 5970695 - DNA, 25 bp, Homo sapien
gccttgtatgacatgaaggaccatc

SEQ ID NO: 5970696 - DNA, 25 bp, Homo sapien
cgaaaagagggggcgttgtgtccca

SEQ ID NO: 5970697 - DNA, 25 bp, Homo sapien
agcccactattgatttaaagaataa

SEQ ID NO: 5970698 - DNA, 25 bp, Homo sapien
caactaatgaaagagaaactgaagc

SEQ ID NO: 5970699 - DNA, 25 bp, Homo sapien
tgaagtggaaaaccaagctgattgc

SEQ ID NO: 5970700 - DNA, 25 bp, Homo sapien
ctatttgggaacttggcaagtaagg

SEQ ID NO: 5970701 - DNA, 25 bp, Homo sapien
tcattagagatgacaccggtgagaa

SEQ ID NO: 5970702 - DNA, 25 bp, Homo sapien
ttaaagaataaccatctacaatatt

SEQ ID NO: 5970703 - DNA, 25 bp, Homo sapien
gacatggcaagatcatcagggtgca

SEQ ID NO: 5970704 - DNA, 25 bp, Homo sapien
aagagaaactgaagcattcaaggaa

SEQ ID NO: 5970705 - DNA, 25 bp, Homo sapien
ggcgccaggtccacttaccgttggt

SEQ ID NO: 5970706 - DNA, 25 bp, Homo sapien
gctacaatgggcgaaaaaggatcca

SEQ ID NO: 5970707 - DNA, 25 bp, Homo sapien
gcaagctgttgataataatacatcg

SEQ ID NO: 5970708 - DNA, 25 bp, Homo sapien
acctctagcctgtggaagttctgga

SEQ ID NO: 5970709 - DNA, 25 bp, Homo sapien
attgaagtggaaaaccaagctgatt

SEQ ID NO: 5970710 - DNA, 25 bp, Homo sapien
atgaaggaccatccaataatcgagg

SEQ ID NO: 5970711 - DNA, 25 bp, Homo sapien
tacttaccggacacttccttcacaa

SEQ ID NO: 5970712 - DNA, 25 bp, Homo sapien
aggcttcacaaaacaattccacctc

SEQ ID NO: 5970713 - DNA, 25 bp, Homo sapien
gttctgatagaaagagggtggataa

SEQ ID NO: 5970714 - DNA, 25 bp, Homo sapien
caccgttcattagagatgacaccgg

SEQ ID NO: 5970715 - DNA, 25 bp, Homo sapien
aattccacctctagcctgtggaagt

SEQ ID NO: 5970716 - DNA, 25 bp, Homo sapien
gaaagtggtttgcttagtaagacct

SEQ ID NO: 5970717 - DNA, 25 bp, Homo sapien
tctgatagaaagagggtggataagt

SEQ ID NO: 5970718 - DNA, 25 bp, Homo sapien
atttgtcgttgcctcaagaagaaca

SEQ ID NO: 5970719 - DNA, 25 bp, Homo sapien
ttatcaaagcaggtgttcccatagg

SEQ ID NO: 5970720 - DNA, 25 bp, Homo sapien
aataaccatctacaatatttggtaa

SEQ ID NO: 5970721 - DNA, 25 bp, Homo sapien
ctcttagcttcaagaaatcaacagt

SEQ ID NO: 5970722 - DNA, 25 bp, Homo sapien
ctgctgtaaacggaacgcaagctgt

SEQ ID NO: 5970723 - DNA, 25 bp, Homo sapien
taagaatgctattggcaaatccacg

SEQ ID NO: 5970724 - DNA, 25 bp, Homo sapien
gacaggtaagagcccaaatgatgat

SEQ ID NO: 5970725 - DNA, 25 bp, Homo sapien
actcaagaaatttacaccatttgtc

SEQ ID NO: 5970726 - DNA, 25 bp, Homo sapien
aagtggaaaaccaagctgattgcgg

SEQ ID NO: 5970727 - DNA, 25 bp, Homo sapien
tagagatgacaccggtgagaaagtt

SEQ ID NO: 5970728 - DNA, 25 bp, Homo sapien
accgttggttttcaatcgctgcatc

SEQ ID NO: 5970729 - DNA, 25 bp, Homo sapien
ttgttctgggtctgatgttcgcgat

SEQ ID NO: 5970730 - DNA, 25 bp, Homo sapien
aagagggtggataagtgaagaaaaa

SEQ ID NO: 5970731 - DNA, 25 bp, Homo sapien
caatatttggtaacgtggtatggcc

SEQ ID NO: 5970732 - DNA, 25 bp, Homo sapien
cgttggttttcaatcgctgcatcaa

SEQ ID NO: 5970733 - DNA, 25 bp, Homo sapien
tgtatgacatgaaggaccatccaat

SEQ ID NO: 5970734 - DNA, 25 bp, Homo sapien
aaagaggctcgctacaatgggcgaa

SEQ ID NO: 5970735 - DNA, 25 bp, Homo sapien
gtgttcccataggccggaagcccac

SEQ ID NO: 5970736 - DNA, 25 bp, Homo sapien
atttgggaacttggcaagtaaggag

SEQ ID NO: 5970737 - DNA, 25 bp, Homo sapien
gttctgggtctgatgttcgcgatgc

SEQ ID NO: 5970738 - DNA, 25 bp, Homo sapien
ttcgatgaacgacagtttatcaaag

SEQ ID NO: 5970739 - DNA, 25 bp, Homo sapien
aagaaaagaggctcgctacaatggg

SEQ ID NO: 5970740 - DNA, 25 bp, Homo sapien
cggaacgcaagctgttgataataat

SEQ ID NO: 5970741 - DNA, 25 bp, Homo sapien
caagaccaactaatgaaagagaaac

SEQ ID NO: 5970742 - DNA, 25 bp, Homo sapien
ttctggaaacgagaacctacgactg

SEQ ID NO: 5970743 - DNA, 25 bp, Homo sapien
tagattgtggcaggtgccagacata

SEQ ID NO: 5970744 - DNA, 25 bp, Homo sapien
gtacctcttagcttcaagaaatcaa

SEQ ID NO: 5970745 - DNA, 25 bp, Homo sapien
tctacaatatttggtaacgtggtat

SEQ ID NO: 5970746 - DNA, 25 bp, Homo sapien
gtggctcttaggaaggcgaaaagag

SEQ ID NO: 5970747 - DNA, 25 bp, Homo sapien
caattgaattcgatgaacgacagtt

SEQ ID NO: 5970748 - DNA, 25 bp, Homo sapien
ctcattgtggctcttaggaaggcga

SEQ ID NO: 5970749 - DNA, 25 bp, Homo sapien
acatgtgcgaggattgggaataccg

SEQ ID NO: 5970750 - DNA, 25 bp, Homo sapien
gcgaaaaaggatccaaattctagat

SEQ ID NO: 5970751 - DNA, 25 bp, Homo sapien
tctgggtctgatgttcgcgatgcca

SEQ ID NO: 5970752 - DNA, 25 bp, Homo sapien
cagtttatcaaagcaggtgttccca

SEQ ID NO: 5970753 - DNA, 25 bp, Homo sapien
aggctcgctacaatgggcgaaaaag

SEQ ID NO: 5970754 - DNA, 25 bp, Homo sapien
cagggtgcacgcccattcaatttca

SEQ ID NO: 5970755 - DNA, 25 bp, Homo sapien
aagatcctttggcaagaaaattgtt

SEQ ID NO: 5970756 - DNA, 25 bp, Homo sapien
atgaacgacagtttatcaaagcagg

SEQ ID NO: 5970757 - DNA, 25 bp, Homo sapien
aacaattgaattcgatgaacgacag

SEQ ID NO: 5970758 - DNA, 25 bp, Homo sapien
ttttcaatcgctgcatcaattccga

SEQ ID NO: 5970759 - DNA, 25 bp, Homo sapien
aatgctattggcaaatccacgtacc

SEQ ID NO: 5970760 - DNA, 25 bp, Homo sapien
agattgaagtggaaaaccaagctga

SEQ ID NO: 5970761 - DNA, 25 bp, Homo sapien
gttcccataggccggaagcccacta

SEQ ID NO: 5970762 - DNA, 25 bp, Homo sapien
gttcattagagatgacaccggtgag

SEQ ID NO: 5970763 - DNA, 25 bp, Homo sapien
attctagattgtggcaggtgccaga

SEQ ID NO: 5970764 - DNA, 25 bp, Homo sapien
ggattgggaataccgtaaagttata

SEQ ID NO: 5970765 - DNA, 25 bp, Homo sapien
tttttgagcacaatcttcctcattg

SEQ ID NO: 5970766 - DNA, 25 bp, Homo sapien
gctcgctacaatgggcgaaaaagga

SEQ ID NO: 5970767 - DNA, 25 bp, Homo sapien
atgaaccaataccacttcctaagtc

SEQ ID NO: 5970768 - DNA, 25 bp, Homo sapien
gctgattgcggcatgcgaaactaaa

SEQ ID NO: 5970769 - DNA, 25 bp, Homo sapien
ccatccaataatcgaggaacacaca

SEQ ID NO: 5970770 - DNA, 25 bp, Homo sapien
aacgaggcttcacaaaacaattcca

SEQ ID NO: 5970771 - DNA, 25 bp, Homo sapien
ggttttcaatcgctgcatcaattcc

SEQ ID NO: 5970772 - DNA, 25 bp, Homo sapien
cgtcaactgtagactggaaaccaat

SEQ ID NO: 5970773 - DNA, 25 bp, Homo sapien
gaacctacgactgctgtaaacggaa

SEQ ID NO: 5970774 - DNA, 25 bp, Homo sapien
agaccaaacaattgaattcgatgaa

SEQ ID NO: 5970775 - DNA, 25 bp, Homo sapien
acgcccattcaatttcaagccttgt

SEQ ID NO: 5970776 - DNA, 25 bp, Homo sapien
ggtaagagcccaaatgatgattctc

SEQ ID NO: 5970777 - DNA, 25 bp, Homo sapien
gattctcgaagagaaagatcctttg

SEQ ID NO: 5970778 - DNA, 25 bp, Homo sapien
ccataggccggaagcccactattga

SEQ ID NO: 5970779 - DNA, 25 bp, Homo sapien
attggcaaatccacgtacctcttag

SEQ ID NO: 5970780 - DNA, 25 bp, Homo sapien
taatcgaggaacacacaagaaacga

SEQ ID NO: 5970781 - DNA, 25 bp, Homo sapien
caagaagaacacttgaaagtggttt

SEQ ID NO: 5970782 - DNA, 25 bp, Homo sapien
caaagcaggtgttcccataggccgg

SEQ ID NO: 5970783 - DNA, 25 bp, Homo sapien
gaaccaataccacttcctaagtcat

SEQ ID NO: 5970784 - DNA, 25 bp, Homo sapien
acgcaagctgttgataataatacat

SEQ ID NO: 5970785 - DNA, 25 bp, Homo sapien
gttatacttaccggacacttccttc

SEQ ID NO: 5970786 - DNA, 25 bp, Homo sapien
aagacaggtaagagcccaaatgatg

SEQ ID NO: 5970787 - DNA, 25 bp, Homo sapien
aagcaggtgttcccataggccggaa

SEQ ID NO: 5970788 - DNA, 25 bp, Homo sapien
agcccaaatgatgattctcgaagag

SEQ ID NO: 5970789 - DNA, 25 bp, Homo sapien
actaatgaaagagaaactgaagcat

SEQ ID NO: 5970790 - DNA, 25 bp, Homo sapien
taggcaggaaatgccgacagaccaa

SEQ ID NO: 5970791 - DNA, 25 bp, Homo sapien
ggcaagtaaggagattgaagtggaa

SEQ ID NO: 5970792 - DNA, 25 bp, Homo sapien
aagtaaggagattgaagtggaaaac

SEQ ID NO: 5970793 - DNA, 25 bp, Homo sapien
aaaagttgctcctgactcaagaaat

SEQ ID NO: 5970794 - DNA, 25 bp, Homo sapien
atgtctctactaggcgccaggtcca

SEQ ID NO: 5970795 - DNA, 25 bp, Homo sapien
gagatgacaccggtgagaaagttct

SEQ ID NO: 5970796 - DNA, 25 bp, Homo sapien
ttggcaagtaaggagattgaagtgg

SEQ ID NO: 5970797 - DNA, 25 bp, Homo sapien
gcgaaactaaacttacttatgaacc

SEQ ID NO: 5970798 - DNA, 25 bp, Homo sapien
tagcttcaagaaatcaacagtaccg

SEQ ID NO: 5970799 - DNA, 25 bp, Homo sapien
ggatccaaattctagattgtggcag

SEQ ID NO: 5970800 - DNA, 25 bp, Homo sapien
ctctactaggcgccaggtccactta

SEQ ID NO: 5970801 - DNA, 25 bp, Homo sapien
ccatttgtcgttgcctcaagaagaa

SEQ ID NO: 5970802 - DNA, 25 bp, Homo sapien
ccacctctagcctgtggaagttctg

SEQ ID NO: 5970803 - DNA, 25 bp, Homo sapien
cccactattgatttaaagaataacc

SEQ ID NO: 5970804 - DNA, 25 bp, Homo sapien
accaaacaattgaattcgatgaacg

SEQ ID NO: 5970805 - DNA, 25 bp, Homo sapien
aagtcatttacacctgacatgtgcg

SEQ ID NO: 5970806 - DNA, 25 bp, Homo sapien
ctactaggcgccaggtccacttacc

SEQ ID NO: 5970807 - DNA, 25 bp, Homo sapien
tcccataggccggaagcccactatt

SEQ ID NO: 5970808 - DNA, 25 bp, Homo sapien
gtggtatggcctttcgtttttgagc

SEQ ID NO: 5970809 - DNA, 25 bp, Homo sapien
atgttcgcgatgccaataatatcct

SEQ ID NO: 5970810 - DNA, 25 bp, Homo sapien
ttattttctgtttacaccgttcatt

SEQ ID NO: 5970811 - DNA, 25 bp, Homo sapien
catttacacctgacatgtgcgagga

SEQ ID NO: 5970812 - DNA, 25 bp, Homo sapien
ggtatggcctttcgtttttgagcac

SEQ ID NO: 5970813 - DNA, 25 bp, Homo sapien
aaatccacgtacctcttagcttcaa

SEQ ID NO: 5970814 - DNA, 25 bp, Homo sapien
gggtgcacgcccattcaatttcaag

SEQ ID NO: 5970815 - DNA, 25 bp, Homo sapien
ggcaagaaaattgttctgggtctga

SEQ ID NO: 5970816 - DNA, 25 bp, Homo sapien
aagagaaagatcctttggcaagaaa

SEQ ID NO: 5970817 - DNA, 25 bp, Homo sapien
tacacctgacatgtgcgaggattgg

SEQ ID NO: 5970818 - DNA, 25 bp, Homo sapien
gaaaaaggatccaaattctagattg

SEQ ID NO: 5970819 - DNA, 25 bp, Homo sapien
taagagcccaaatgatgattctcga

SEQ ID NO: 5970820 - DNA, 25 bp, Homo sapien
agttctggaaacgagaacctacgac

SEQ ID NO: 5970821 - DNA, 25 bp, Homo sapien
tttgcttagtaagacctccaaagaa

SEQ ID NO: 5970822 - DNA, 25 bp, Homo sapien
ggaaatgccgacagaccaaacaatt

SEQ ID NO: 5970823 - DNA, 25 bp, Homo sapien
cttagcttcaagaaatcaacagtac

SEQ ID NO: 5970824 - DNA, 25 bp, Homo sapien
tcctcattgtggctcttaggaaggc

SEQ ID NO: 5970825 - DNA, 25 bp, Homo sapien
aaatgccgacagaccaaacaattga

SEQ ID NO: 5970826 - DNA, 25 bp, Homo sapien
gaaagagaaactgaagcattcaagg

SEQ ID NO: 5970827 - DNA, 25 bp, Homo sapien
gtaagacctccaaagaaaagaggct

SEQ ID NO: 5970828 - DNA, 25 bp, Homo sapien
ctttcgtttttgagcacaatcttcc

SEQ ID NO: 5970829 - DNA, 25 bp, Homo sapien
gagaacctacgactgctgtaaacgg

SEQ ID NO: 5970830 - DNA, 25 bp, Homo sapien
attccgactaagaatgctattggca

SEQ ID NO: 5970831 - DNA, 25 bp, Homo sapien
tgctattggcaaatccacgtacctc

SEQ ID NO: 5970832 - DNA, 25 bp, Homo sapien
tttgttggtccaagaaagaaaaatg

SEQ ID NO: 5970833 - DNA, 25 bp, Homo sapien
tcaagccttgtatgacatgaaggac

SEQ ID NO: 5970834 - DNA, 25 bp, Homo sapien
tttgagcacaatcttcctcattgtg

SEQ ID NO: 5970835 - DNA, 25 bp, Homo sapien
aacggaacgcaagctgttgataata

SEQ ID NO: 5970836 - DNA, 25 bp, Homo sapien
gttctaggcaggaaatgccgacaga

SEQ ID NO: 5970837 - DNA, 25 bp, Homo sapien
gcgatgccaataatatccttctatt

SEQ ID NO: 5970838 - DNA, 25 bp, Homo sapien
acatgaaggaccatccaataatcga

SEQ ID NO: 5970839 - DNA, 25 bp, Homo sapien
ataggccggaagcccactattgatt

SEQ ID NO: 5970840 - DNA, 25 bp, Homo sapien
ccaataatcgaggaacacacaagaa

SEQ ID NO: 5970841 - DNA, 25 bp, Homo sapien
aatcaagacaggtaagagcccaaat

SEQ ID NO: 5970842 - DNA, 25 bp, Homo sapien
ggtttgcttagtaagacctccaaag

SEQ ID NO: 5970843 - DNA, 25 bp, Homo sapien
gcttcaagaaatcaacagtaccgag

SEQ ID NO: 5970844 - DNA, 25 bp, Homo sapien
cgacagaccaaacaattgaattcga

SEQ ID NO: 5970845 - DNA, 25 bp, Homo sapien
ttccacctctagcctgtggaagttc

SEQ ID NO: 5970846 - DNA, 25 bp, Homo sapien
caatcgctgcatcaattccgactaa

SEQ ID NO: 5970847 - DNA, 25 bp, Homo sapien
acctcttagcttcaagaaatcaaca

SEQ ID NO: 5970848 - DNA, 25 bp, Homo sapien
gtagactggaaaccaatcaagacag

SEQ ID NO: 5970849 - DNA, 25 bp, Homo sapien
tgccaataatatccttctatttggg

SEQ ID NO: 5970850 - DNA, 25 bp, Homo sapien
cctgacatgtgcgaggattgggaat

SEQ ID NO: 5970851 - DNA, 25 bp, Homo sapien
acagaccaaacaattgaattcgatg

SEQ ID NO: 5970852 - DNA, 25 bp, Homo sapien
ggtgccagacatatatgacatggca

SEQ ID NO: 5970853 - DNA, 25 bp, Homo sapien
ccacttaccgttggttttcaatcgc

SEQ ID NO: 5970854 - DNA, 25 bp, Homo sapien
ccaatcaagacaggtaagagcccaa

SEQ ID NO: 5970855 - DNA, 25 bp, Homo sapien
gagaaagatcctttggcaagaaaat

SEQ ID NO: 5970856 - DNA, 25 bp, Homo sapien
ataatacatcgaagcctcgttctag

SEQ ID NO: 5970857 - DNA, 25 bp, Homo sapien
tcaatttcaagccttgtatgacatg

SEQ ID NO: 5970858 - DNA, 25 bp, Homo sapien
cttaccggacacttccttcacaatg

SEQ ID NO: 5970859 - DNA, 25 bp, Homo sapien
aaggatctttctcttcgagaatcat

SEQ ID NO: 5970860 - DNA, 25 bp, Homo sapien
ttggttcataagtaagtttagtttc

SEQ ID NO: 5970861 - DNA, 25 bp, Homo sapien
aatgggcgtgcaccctgatgatctt

SEQ ID NO: 5970862 - DNA, 25 bp, Homo sapien
gtattcccaatcctcgcacatgtca

SEQ ID NO: 5970863 - DNA, 25 bp, Homo sapien
ttagtcggaattgatgcagcgattg

SEQ ID NO: 5970864 - DNA, 25 bp, Homo sapien
taaatcaatagtgggcttccggcct

SEQ ID NO: 5970865 - DNA, 25 bp, Homo sapien
cttgaaattgaatgggcgtgcaccc

SEQ ID NO: 5970866 - DNA, 25 bp, Homo sapien
tctatcagaactttctcaccggtgt

SEQ ID NO: 5970867 - DNA, 25 bp, Homo sapien
ggaagattgtgctcaaaaacgaaag

SEQ ID NO: 5970868 - DNA, 25 bp, Homo sapien
agaactttctcaccggtgtcatctc

SEQ ID NO: 5970869 - DNA, 25 bp, Homo sapien
ccaccctctttctatcagaactttc

SEQ ID NO: 5970870 - DNA, 25 bp, Homo sapien
tttcttgaagctaagaggtacgtgg

SEQ ID NO: 5970871 - DNA, 25 bp, Homo sapien
cccaaatagaaggatattattggca

SEQ ID NO: 5970872 - DNA, 25 bp, Homo sapien
agcttggttttccacttcaatctcc

SEQ ID NO: 5970873 - DNA, 25 bp, Homo sapien
accaaatattgtagatggttattct

SEQ ID NO: 5970874 - DNA, 25 bp, Homo sapien
ttgaatgcttcagtttctctttcat

SEQ ID NO: 5970875 - DNA, 25 bp, Homo sapien
tggcacctgccacaatctagaattt

SEQ ID NO: 5970876 - DNA, 25 bp, Homo sapien
ggcctatgggaacacctgctttgat

SEQ ID NO: 5970877 - DNA, 25 bp, Homo sapien
tccagaacttccacaggctagaggt

SEQ ID NO: 5970878 - DNA, 25 bp, Homo sapien
gttatgatgcctcggtactgttgat

SEQ ID NO: 5970879 - DNA, 25 bp, Homo sapien
cctcttttctttggaggtcttacta

SEQ ID NO: 5970880 - DNA, 25 bp, Homo sapien
cacaatctagaatttggatcctttt

SEQ ID NO: 5970881 - DNA, 25 bp, Homo sapien
tctttaaatcaatagtgggcttccg

SEQ ID NO: 5970882 - DNA, 25 bp, Homo sapien
gaggtacgtggatttgccaatagca

SEQ ID NO: 5970883 - DNA, 25 bp, Homo sapien
gaatgcttcagtttctctttcatta

SEQ ID NO: 5970884 - DNA, 25 bp, Homo sapien
gatgcagcgattgaaaaccaacggt

SEQ ID NO: 5970885 - DNA, 25 bp, Homo sapien
ggaggtcttactaagcaaaccactt

SEQ ID NO: 5970886 - DNA, 25 bp, Homo sapien
gctcaaaaacgaaaggccataccac

SEQ ID NO: 5970887 - DNA, 25 bp, Homo sapien
atgaggaagattgtgctcaaaaacg

SEQ ID NO: 5970888 - DNA, 25 bp, Homo sapien
taagtataactttacggtattccca

SEQ ID NO: 5970889 - DNA, 25 bp, Homo sapien
ttcttgtgtgttcctcgattattgg

SEQ ID NO: 5970890 - DNA, 25 bp, Homo sapien
gtaaatttcttgagtcaggagcaac

SEQ ID NO: 5970891 - DNA, 25 bp, Homo sapien
gtttcgcatgccgcaatcagcttgg

SEQ ID NO: 5970892 - DNA, 25 bp, Homo sapien
attctttaaatcaatagtgggcttc

SEQ ID NO: 5970893 - DNA, 25 bp, Homo sapien
atctccttacttgccaagttcccaa

SEQ ID NO: 5970894 - DNA, 25 bp, Homo sapien
tgtcaggtgtaaatgacttaggaag

SEQ ID NO: 5970895 - DNA, 25 bp, Homo sapien
gcttcgatgtattattatcaacagc

SEQ ID NO: 5970896 - DNA, 25 bp, Homo sapien
ctcttcgagaatcatcatttgggct

SEQ ID NO: 5970897 - DNA, 25 bp, Homo sapien
acttcaatctccttacttgccaagt

SEQ ID NO: 5970898 - DNA, 25 bp, Homo sapien
tgtcatctctaatgaacggtgtaaa

SEQ ID NO: 5970899 - DNA, 25 bp, Homo sapien
tgaatgggcgtgcaccctgatgatc

SEQ ID NO: 5970900 - DNA, 25 bp, Homo sapien
cgtgcaccctgatgatcttgccatg

SEQ ID NO: 5970901 - DNA, 25 bp, Homo sapien
cgttccgtttacagcagtcgtaggt

SEQ ID NO: 5970902 - DNA, 25 bp, Homo sapien
acttgccaagttcccaaatagaagg

SEQ ID NO: 5970903 - DNA, 25 bp, Homo sapien
ttacctgtcttgattggtttccagt

SEQ ID NO: 5970904 - DNA, 25 bp, Homo sapien
tgttcctcgattattggatggtcct

SEQ ID NO: 5970905 - DNA, 25 bp, Homo sapien
ctcgcacatgtcaggtgtaaatgac

SEQ ID NO: 5970906 - DNA, 25 bp, Homo sapien
gcacctgccacaatctagaatttgg

SEQ ID NO: 5970907 - DNA, 25 bp, Homo sapien
ttgataaactgtcgttcatcgaatt

SEQ ID NO: 5970908 - DNA, 25 bp, Homo sapien
gtgggcttccggcctatgggaacac

SEQ ID NO: 5970909 - DNA, 25 bp, Homo sapien
tggtgtaaatttcttgagtcaggag

SEQ ID NO: 5970910 - DNA, 25 bp, Homo sapien
gtcatatatgtctggcacctgccac

SEQ ID NO: 5970911 - DNA, 25 bp, Homo sapien
cagtcgtaggttctcgtttccagaa

SEQ ID NO: 5970912 - DNA, 25 bp, Homo sapien
cggtactgttgatttcttgaagcta

SEQ ID NO: 5970913 - DNA, 25 bp, Homo sapien
ttcgcccattgtagcgagcctcttt

SEQ ID NO: 5970914 - DNA, 25 bp, Homo sapien
tcctcgcacatgtcaggtgtaaatg

SEQ ID NO: 5970915 - DNA, 25 bp, Homo sapien
aagtggtattggttcataagtaagt

SEQ ID NO: 5970916 - DNA, 25 bp, Homo sapien
atggttattctttaaatcaatagtg

SEQ ID NO: 5970917 - DNA, 25 bp, Homo sapien
gcctagaacgaggcttcgatgtatt

SEQ ID NO: 5970918 - DNA, 25 bp, Homo sapien
agtttagtttcgcatgccgcaatca

SEQ ID NO: 5970919 - DNA, 25 bp, Homo sapien
ccggcctatgggaacacctgctttg

SEQ ID NO: 5970920 - DNA, 25 bp, Homo sapien
agcctcgtttcttgtgtgttcctcg

SEQ ID NO: 5970921 - DNA, 25 bp, Homo sapien
caaatggtgtaaatttcttgagtca

SEQ ID NO: 5970922 - DNA, 25 bp, Homo sapien
caaatagaaggatattattggcatc

SEQ ID NO: 5970923 - DNA, 25 bp, Homo sapien
gtttggtctgtcggcatttcctgcc

SEQ ID NO: 5970924 - DNA, 25 bp, Homo sapien
tgaaaaccaacggtaagtggacctg

SEQ ID NO: 5970925 - DNA, 25 bp, Homo sapien
cacatgtcaggtgtaaatgacttag

SEQ ID NO: 5970926 - DNA, 25 bp, Homo sapien
tcggaattgatgcagcgattgaaaa

SEQ ID NO: 5970927 - DNA, 25 bp, Homo sapien
taagtaagtttagtttcgcatgccg

SEQ ID NO: 5970928 - DNA, 25 bp, Homo sapien
tggacctggcgcctagtagagacat

SEQ ID NO: 5970929 - DNA, 25 bp, Homo sapien
ttaccaaatattgtagatggttatt

SEQ ID NO: 5970930 - DNA, 25 bp, Homo sapien
tttaaatcaatagtgggcttccggc

SEQ ID NO: 5970931 - DNA, 25 bp, Homo sapien
cctgctttgataaactgtcgttcat

SEQ ID NO: 5970932 - DNA, 25 bp, Homo sapien
aacacctgctttgataaactgtcgt

SEQ ID NO: 5970933 - DNA, 25 bp, Homo sapien
tattggttcataagtaagtttagtt

SEQ ID NO: 5970934 - DNA, 25 bp, Homo sapien
gaagctaagaggtacgtggatttgc

SEQ ID NO: 5970935 - DNA, 25 bp, Homo sapien
ttgccaagttcccaaatagaaggat

SEQ ID NO: 5970936 - DNA, 25 bp, Homo sapien
ttcataagtaagtttagtttcgcat

SEQ ID NO: 5970937 - DNA, 25 bp, Homo sapien
tttcgccttcctaagagccacaatg

SEQ ID NO: 5970938 - DNA, 25 bp, Homo sapien
tggttttccacttcaatctccttac

SEQ ID NO: 5970939 - DNA, 25 bp, Homo sapien
tgtgttcctcgattattggatggtc

SEQ ID NO: 5970940 - DNA, 25 bp, Homo sapien
ctgccacaatctagaatttggatcc

SEQ ID NO: 5970941 - DNA, 25 bp, Homo sapien
tcgagaatcatcatttgggctctta

SEQ ID NO: 5970942 - DNA, 25 bp, Homo sapien
ttcattagttggtcttgggacacaa

SEQ ID NO: 5970943 - DNA, 25 bp, Homo sapien
ctaagagccacaatgaggaagattg

SEQ ID NO: 5970944 - DNA, 25 bp, Homo sapien
ccacttcaatctccttacttgccaa

SEQ ID NO: 5970945 - DNA, 25 bp, Homo sapien
caaacatctcttcattgtgaaggaa

SEQ ID NO: 5970946 - DNA, 25 bp, Homo sapien
ctccttacttgccaagttcccaaat

SEQ ID NO: 5970947 - DNA, 25 bp, Homo sapien
ctaagcaaaccactttcaagtgttc

SEQ ID NO: 5970948 - DNA, 25 bp, Homo sapien
gtcgttcatcgaattcaattgtttg

SEQ ID NO: 5970949 - DNA, 25 bp, Homo sapien
tcatttgggctcttacctgtcttga

SEQ ID NO: 5970950 - DNA, 25 bp, Homo sapien
tagcattcttagtcggaattgatgc

SEQ ID NO: 5970951 - DNA, 25 bp, Homo sapien
ttccacaggctagaggtggaattgt

SEQ ID NO: 5970952 - DNA, 25 bp, Homo sapien
caatctccttacttgccaagttccc

SEQ ID NO: 5970953 - DNA, 25 bp, Homo sapien
aatcctcgcacatgtcaggtgtaaa

SEQ ID NO: 5970954 - DNA, 25 bp, Homo sapien
ctagaacgaggcttcgatgtattat

SEQ ID NO: 5970955 - DNA, 25 bp, Homo sapien
actgttgatttcttgaagctaagag

SEQ ID NO: 5970956 - DNA, 25 bp, Homo sapien
gtggtattggttcataagtaagttt

SEQ ID NO: 5970957 - DNA, 25 bp, Homo sapien
agaacgaggcttcgatgtattatta

SEQ ID NO: 5970958 - DNA, 25 bp, Homo sapien
ctttttcgcccattgtagcgagcct

SEQ ID NO: 5970959 - DNA, 25 bp, Homo sapien
gtagcgagcctcttttctttggagg

SEQ ID NO: 5970960 - DNA, 25 bp, Homo sapien
ggccataccacgttaccaaatattg

SEQ ID NO: 5970961 - DNA, 25 bp, Homo sapien
gctcttacctgtcttgattggtttc

SEQ ID NO: 5970962 - DNA, 25 bp, Homo sapien
ccttacttgccaagttcccaaatag

SEQ ID NO: 5970963 - DNA, 25 bp, Homo sapien
cgcccattgtagcgagcctcttttc

SEQ ID NO: 5970964 - DNA, 25 bp, Homo sapien
tgattggtttccagtctacagttga

SEQ ID NO: 5970965 - DNA, 25 bp, Homo sapien
cgaacatcagacccagaacaatttt

SEQ ID NO: 5970966 - DNA, 25 bp, Homo sapien
agaacaattttcttgccaaaggatc

SEQ ID NO: 5970967 - DNA, 25 bp, Homo sapien
gagaatcatcatttgggctcttacc

SEQ ID NO: 5970968 - DNA, 25 bp, Homo sapien
attgaatgggcgtgcaccctgatga

SEQ ID NO: 5970969 - DNA, 25 bp, Homo sapien
ggcaacgacaaatggtgtaaatttc

SEQ ID NO: 5970970 - DNA, 25 bp, Homo sapien
catcatttgggctcttacctgtctt

SEQ ID NO: 5970971 - DNA, 25 bp, Homo sapien
ccaatagcattcttagtcggaattg

SEQ ID NO: 5970972 - DNA, 25 bp, Homo sapien
attggcatcgcgaacatcagaccca

SEQ ID NO: 5970973 - DNA, 25 bp, Homo sapien
tggatcctttttcgcccattgtagc

SEQ ID NO: 5970974 - DNA, 25 bp, Homo sapien
aagagccacaatgaggaagattgtg

SEQ ID NO: 5970975 - DNA, 25 bp, Homo sapien
ttgtagcgagcctcttttctttgga

SEQ ID NO: 5970976 - DNA, 25 bp, Homo sapien
atgtcatatatgtctggcacctgcc

SEQ ID NO: 5970977 - DNA, 25 bp, Homo sapien
cgcatgccgcaatcagcttggtttt

SEQ ID NO: 5970978 - DNA, 25 bp, Homo sapien
gggctcttacctgtcttgattggtt

SEQ ID NO: 5970979 - DNA, 25 bp, Homo sapien
tcatctctaatgaacggtgtaaaca

SEQ ID NO: 5970980 - DNA, 25 bp, Homo sapien
atctctaatgaacggtgtaaacaga

SEQ ID NO: 5970981 - DNA, 25 bp, Homo sapien
ttgggctcttacctgtcttgattgg

SEQ ID NO: 5970982 - DNA, 25 bp, Homo sapien
aaggcttgaaattgaatgggcgtgc

SEQ ID NO: 5970983 - DNA, 25 bp, Homo sapien
gataaactgtcgttcatcgaattca

SEQ ID NO: 5970984 - DNA, 25 bp, Homo sapien
acccagaacaattttcttgccaaag

SEQ ID NO: 5970985 - DNA, 25 bp, Homo sapien
gtgaagcctcgtttcttgtgtgttc

SEQ ID NO: 5970986 - DNA, 25 bp, Homo sapien
tcaggtgtaaatgacttaggaagtg

SEQ ID NO: 5970987 - DNA, 25 bp, Homo sapien
tcttacctgtcttgattggtttcca

SEQ ID NO: 5970988 - DNA, 25 bp, Homo sapien
catcagacccagaacaattttcttg

SEQ ID NO: 5970989 - DNA, 25 bp, Homo sapien
tcagcttggttttccacttcaatct

SEQ ID NO: 5970990 - DNA, 25 bp, Homo sapien
taggaagtggtattggttcataagt

SEQ ID NO: 5970991 - DNA, 25 bp, Homo sapien
aggcttcgatgtattattatcaaca

SEQ ID NO: 5970992 - DNA, 25 bp, Homo sapien
gaccaacaaacatctcttcattgtg

SEQ ID NO: 5970993 - DNA, 25 bp, Homo sapien
aactgtcgttcatcgaattcaattg

SEQ ID NO: 5970994 - DNA, 25 bp, Homo sapien
ccacaggctagaggtggaattgttt

SEQ ID NO: 5970995 - DNA, 25 bp, Homo sapien
ggtattggttcataagtaagtttag

SEQ ID NO: 5970996 - DNA, 25 bp, Homo sapien
taggttctcgtttccagaacttcca

SEQ ID NO: 5970997 - DNA, 25 bp, Homo sapien
ggcgtgcaccctgatgatcttgcca

SEQ ID NO: 5970998 - DNA, 25 bp, Homo sapien
aagattgtgctcaaaaacgaaaggc

SEQ ID NO: 5970999 - DNA, 25 bp, Homo sapien
cagaacttccacaggctagaggtgg

SEQ ID NO: 5971000 - DNA, 25 bp, Homo sapien
gcctcggtactgttgatttcttgaa

SEQ ID NO: 5971001 - DNA, 25 bp, Homo sapien
atttgggctcttacctgtcttgatt

SEQ ID NO: 5971002 - DNA, 25 bp, Homo sapien
attggatggtccttcatgtcataca

SEQ ID NO: 5971003 - DNA, 25 bp, Homo sapien
acagcagtcgtaggttctcgtttcc

SEQ ID NO: 5971004 - DNA, 25 bp, Homo sapien
aaatttcttgagtcaggagcaactt

SEQ ID NO: 5971005 - DNA, 25 bp, Homo sapien
cattgtgaaggaagtgtccggtaag

SEQ ID NO: 5971006 - DNA, 25 bp, Homo sapien
ttttcgcccattgtagcgagcctct

SEQ ID NO: 5971007 - DNA, 25 bp, Homo sapien
cttggttttccacttcaatctcctt

SEQ ID NO: 5971008 - DNA, 25 bp, Homo sapien
cataagtaagtttagtttcgcatgc

SEQ ID NO: 5971009 - DNA, 25 bp, Homo sapien
agcagtcgtaggttctcgtttccag

SEQ ID NO: 5971010 - DNA, 25 bp, Homo sapien
tcttcacttatccaccctctttcta

SEQ ID NO: 5971011 - DNA, 25 bp, Homo sapien
tgatcttgccatgtcatatatgtct

SEQ ID NO: 5971012 - DNA, 25 bp, Homo sapien
ttcctcgattattggatggtccttc

SEQ ID NO: 5971013 - DNA, 25 bp, Homo sapien
aggtcttactaagcaaaccactttc

SEQ ID NO: 5971014 - DNA, 25 bp, Homo sapien
aacaattttcttgccaaaggatctt

SEQ ID NO: 5971015 - DNA, 25 bp, Homo sapien
ctgtcgttcatcgaattcaattgtt

SEQ ID NO: 5971016 - DNA, 25 bp, Homo sapien
atatttccttgaatgcttcagtttc

SEQ ID NO: 5971017 - DNA, 25 bp, Homo sapien
ttttgtgaagcctcgtttcttgtgt

SEQ ID NO: 5971018 - DNA, 25 bp, Homo sapien
gtgctcaaaaacgaaaggccatacc

SEQ ID NO: 5971019 - DNA, 25 bp, Homo sapien
catttttctttcttggaccaacaaa

SEQ ID NO: 5971020 - DNA, 25 bp, Homo sapien
aatgaacggtgtaaacagaaaataa

SEQ ID NO: 5971021 - DNA, 25 bp, Homo sapien
gaggaagattgtgctcaaaaacgaa

SEQ ID NO: 5971022 - DNA, 25 bp, Homo sapien
ttatcaacagcttgcgttccgttta

SEQ ID NO: 5971023 - DNA, 25 bp, Homo sapien
gttgacgttatgatgcctcggtact

SEQ ID NO: 5971024 - DNA, 25 bp, Homo sapien
acctgccacaatctagaatttggat

SEQ ID NO: 5971025 - DNA, 25 bp, Homo sapien
attcaattgtttggtctgtcggcat

SEQ ID NO: 5971026 - DNA, 25 bp, Homo sapien
cctctttctatcagaactttctcac

SEQ ID NO: 5971027 - DNA, 25 bp, Homo sapien
caagttcccaaatagaaggatatta

SEQ ID NO: 5971028 - DNA, 25 bp, Homo sapien
cttcctaagagccacaatgaggaag

SEQ ID NO: 5971029 - DNA, 25 bp, Homo sapien
tttggatcctttttcgcccattgta

SEQ ID NO: 5971030 - DNA, 25 bp, Homo sapien
aatagaaggatattattggcatcgc

SEQ ID NO: 5971031 - DNA, 25 bp, Homo sapien
tcaaaaacgaaaggccataccacgt

SEQ ID NO: 5971032 - DNA, 25 bp, Homo sapien
taagtttagtttcgcatgccgcaat

SEQ ID NO: 5971033 - DNA, 25 bp, Homo sapien
tcctttttcgcccattgtagcgagc

SEQ ID NO: 5971034 - DNA, 25 bp, Homo sapien
acggtaagtggacctggcgcctagt

SEQ ID NO: 5971035 - DNA, 25 bp, Homo sapien
tacagttgacgttatgatgcctcgg

SEQ ID NO: 5971036 - DNA, 25 bp, Homo sapien
gaagtgtccggtaagtataacttta

SEQ ID NO: 5971037 - DNA, 25 bp, Homo sapien
ggttcataagtaagtttagtttcgc

SEQ ID NO: 5971038 - DNA, 25 bp, Homo sapien
gacaaatggtgtaaatttcttgagt

SEQ ID NO: 5971039 - DNA, 25 bp, Homo sapien
tcggcatttcctgcctagaacgagg

SEQ ID NO: 5971040 - DNA, 25 bp, Homo sapien
ttacatatatttccttgaatgcttc

SEQ ID NO: 5971041 - DNA, 25 bp, Homo sapien
ttgatgcagcgattgaaaaccaacg

SEQ ID NO: 5971042 - DNA, 25 bp, Homo sapien
ttagttggtcttgggacacaacgcc

SEQ ID NO: 5971043 - DNA, 25 bp, Homo sapien
tgccatgtcatatatgtctggcacc

SEQ ID NO: 5971044 - DNA, 25 bp, Homo sapien
acatatatttccttgaatgcttcag

SEQ ID NO: 5971045 - DNA, 25 bp, Homo sapien
tcaggagcaactttttcttcactta

SEQ ID NO: 5971046 - DNA, 25 bp, Homo sapien
tcctaagagccacaatgaggaagat

SEQ ID NO: 5971047 - DNA, 25 bp, Homo sapien
ttatccaccctctttctatcagaac

SEQ ID NO: 5971048 - DNA, 25 bp, Homo sapien
ttccagtctacagttgacgttatga

SEQ ID NO: 5971049 - DNA, 25 bp, Homo sapien
ttattggatggtccttcatgtcata

SEQ ID NO: 5971050 - DNA, 25 bp, Homo sapien
caacagcttgcgttccgtttacagc

SEQ ID NO: 5971051 - DNA, 25 bp, Homo sapien
cttactaagcaaaccactttcaagt

SEQ ID NO: 5971052 - DNA, 25 bp, Homo sapien
ttccttgaatgcttcagtttctctt

SEQ ID NO: 5971053 - DNA, 25 bp, Homo sapien
gccttcctaagagccacaatgagga

SEQ ID NO: 5971054 - DNA, 25 bp, Homo sapien
tgttcttcttgaggcaacgacaaat

SEQ ID NO: 5971055 - DNA, 25 bp, Homo sapien
aatagcattcttagtcggaattgat

SEQ ID NO: 5971056 - DNA, 25 bp, Homo sapien
tttgccaatagcattcttagtcgga

SEQ ID NO: 5971057 - DNA, 25 bp, Homo sapien
gatttcttgaagctaagaggtacgt

SEQ ID NO: 5971058 - DNA, 25 bp, Homo sapien
ctttcttggaccaacaaacatctct

SEQ ID NO: 5971059 - DNA, 25 bp, Homo sapien
cctatgggaacacctgctttgataa

SEQ ID NO: 5971060 - DNA, 25 bp, Homo sapien
ttttctttggaggtcttactaagca

SEQ ID NO: 5971061 - DNA, 25 bp, Homo sapien
gccaaaggatctttctcttcgagaa

SEQ ID NO: 5971062 - DNA, 25 bp, Homo sapien
gaattgttttgtgaagcctcgtttc

SEQ ID NO: 5971063 - DNA, 25 bp, Homo sapien
ggaacacctgctttgataaactgtc

SEQ ID NO: 5971064 - DNA, 25 bp, Homo sapien
acctgtcttgattggtttccagtct

SEQ ID NO: 5971065 - DNA, 25 bp, Homo sapien
tgtcggcatttcctgcctagaacga

SEQ ID NO: 5971066 - DNA, 25 bp, Homo sapien
catttcctgcctagaacgaggcttc

SEQ ID NO: 5971067 - DNA, 25 bp, Homo sapien
cgcacatgtcaggtgtaaatgactt

SEQ ID NO: 5971068 - DNA, 25 bp, Homo sapien
ttacttgccaagttcccaaatagaa

SEQ ID NO: 5971069 - DNA, 25 bp, Homo sapien
gccaagttcccaaatagaaggatat

SEQ ID NO: 5971070 - DNA, 25 bp, Homo sapien
gtaaatgacttaggaagtggtattg

SEQ ID NO: 5971071 - DNA, 25 bp, Homo sapien
cttcttgaggcaacgacaaatggtg

SEQ ID NO: 5971072 - DNA, 25 bp, Homo sapien
aggagcaactttttcttcacttatc

SEQ ID NO: 5971073 - DNA, 25 bp, Homo sapien
tcttgggacacaacgccccctcttt

SEQ ID NO: 5971074 - DNA, 25 bp, Homo sapien
gtcgtaggttctcgtttccagaact

SEQ ID NO: 5971075 - DNA, 25 bp, Homo sapien
ccttcatgtcatacaaggcttgaaa

SEQ ID NO: 5971076 - DNA, 25 bp, Homo sapien
aagaggtacgtggatttgccaatag

SEQ ID NO: 5971077 - DNA, 25 bp, Homo sapien
ttcttggaccaacaaacatctcttc

SEQ ID NO: 5971078 - DNA, 25 bp, Homo sapien
cggtattcccaatcctcgcacatgt

SEQ ID NO: 5971079 - DNA, 25 bp, Homo sapien
tttcttcacttatccaccctctttc

SEQ ID NO: 5971080 - DNA, 25 bp, Homo sapien
attttcttgccaaaggatctttctc

SEQ ID NO: 5971081 - DNA, 25 bp, Homo sapien
ccctgatgatcttgccatgtcatat

SEQ ID NO: 5971082 - DNA, 25 bp, Homo sapien
caacggtaagtggacctggcgccta

SEQ ID NO: 5971083 - DNA, 25 bp, Homo sapien
tgatgcctcggtactgttgatttct

SEQ ID NO: 5971084 - DNA, 25 bp, Homo sapien
cgttaccaaatattgtagatggtta

SEQ ID NO: 5971085 - DNA, 25 bp, Homo sapien
gattgaaaaccaacggtaagtggac

SEQ ID NO: 5971086 - DNA, 25 bp, Homo sapien
tcaatagtgggcttccggcctatgg

SEQ ID NO: 5971087 - DNA, 25 bp, Homo sapien
tcaattgtttggtctgtcggcattt

SEQ ID NO: 5971088 - DNA, 25 bp, Homo sapien
gaacttccacaggctagaggtggaa

SEQ ID NO: 5971089 - DNA, 25 bp, Homo sapien
gcattcttagtcggaattgatgcag

SEQ ID NO: 5971090 - DNA, 25 bp, Homo sapien
actttttcttcacttatccaccctc

SEQ ID NO: 5971091 - DNA, 25 bp, Homo sapien
caccggtgtcatctctaatgaacgg

SEQ ID NO: 5971092 - DNA, 25 bp, Homo sapien
tctttctatcagaactttctcaccg

SEQ ID NO: 5971093 - DNA, 25 bp, Homo sapien
tatatgtctggcacctgccacaatc

SEQ ID NO: 5971094 - DNA, 25 bp, Homo sapien
tcgaattcaattgtttggtctgtcg

SEQ ID NO: 5971095 - DNA, 25 bp, Homo sapien
atttccttgaatgcttcagtttctc

SEQ ID NO: 5971096 - DNA, 25 bp, Homo sapien
aattgtttggtctgtcggcatttcc

SEQ ID NO: 5971097 - DNA, 25 bp, Homo sapien
cgatgtattattatcaacagcttgc

SEQ ID NO: 5971098 - DNA, 25 bp, Homo sapien
ggaattgatgcagcgattgaaaacc

SEQ ID NO: 5971099 - DNA, 25 bp, Homo sapien
aatggtgtaaatttcttgagtcagg

SEQ ID NO: 5971100 - DNA, 25 bp, Homo sapien
tgggaacacctgctttgataaactg

SEQ ID NO: 5971101 - DNA, 25 bp, Homo sapien
tagaggtggaattgttttgtgaagc

SEQ ID NO: 5971102 - DNA, 25 bp, Homo sapien
cttgagtcaggagcaactttttctt

SEQ ID NO: 5971103 - DNA, 25 bp, Homo sapien
ccaatcctcgcacatgtcaggtgta

SEQ ID NO: 5971104 - DNA, 25 bp, Homo sapien
ttggaggtcttactaagcaaaccac

SEQ ID NO: 5971105 - DNA, 25 bp, Homo sapien
cccattgtagcgagcctcttttctt

SEQ ID NO: 5971106 - DNA, 25 bp, Homo sapien
ttcttgagtcaggagcaactttttc

SEQ ID NO: 5971107 - DNA, 25 bp, Homo sapien
aaatgacttaggaagtggtattggt

SEQ ID NO: 5971108 - DNA, 25 bp, Homo sapien
gtttccagtctacagttgacgttat

SEQ ID NO: 5971109 - DNA, 25 bp, Homo sapien
ttattggcatcgcgaacatcagacc

SEQ ID NO: 5971110 - DNA, 25 bp, Homo sapien
accactttcaagtgttcttcttgag

SEQ ID NO: 5971111 - DNA, 25 bp, Homo sapien
caatgaggaagattgtgctcaaaaa

SEQ ID NO: 5971112 - DNA, 25 bp, Homo sapien
attgttttgtgaagcctcgtttctt

SEQ ID NO: 5971113 - DNA, 25 bp, Homo sapien
aggatattattggcatcgcgaacat

SEQ ID NO: 5971114 - DNA, 25 bp, Homo sapien
ggatctttctcttcgagaatcatca

SEQ ID NO: 5971115 - DNA, 25 bp, Homo sapien
aacatcagacccagaacaattttct

SEQ ID NO: 5971116 - DNA, 25 bp, Homo sapien
gcttcagtttctctttcattagttg

SEQ ID NO: 5971117 - DNA, 25 bp, Homo sapien
cacgttaccaaatattgtagatggt

SEQ ID NO: 5971118 - DNA, 25 bp, Homo sapien
atacaaggcttgaaattgaatgggc

SEQ ID NO: 5971119 - DNA, 25 bp, Homo sapien
cttaggaagtggtattggttcataa

SEQ ID NO: 5971120 - DNA, 25 bp, Homo sapien
agttggtcttgggacacaacgcccc

SEQ ID NO: 5971121 - DNA, 25 bp, Homo sapien
tttctatcagaactttctcaccggt

SEQ ID NO: 5971122 - DNA, 25 bp, Homo sapien
caacgacaaatggtgtaaatttctt

SEQ ID NO: 5971123 - DNA, 25 bp, Homo sapien
acgttatgatgcctcggtactgttg

SEQ ID NO: 5971124 - DNA, 25 bp, Homo sapien
atctagaatttggatcctttttcgc

SEQ ID NO: 5971125 - DNA, 25 bp, Homo sapien
ttcatgtcatacaaggcttgaaatt

SEQ ID NO: 5971126 - DNA, 25 bp, Homo sapien
gagccacaatgaggaagattgtgct

SEQ ID NO: 5971127 - DNA, 25 bp, Homo sapien
gaggtggaattgttttgtgaagcct

SEQ ID NO: 5971128 - DNA, 25 bp, Homo sapien
tcgccttcctaagagccacaatgag

SEQ ID NO: 5971129 - DNA, 25 bp, Homo sapien
gtcttgattggtttccagtctacag

SEQ ID NO: 5971130 - DNA, 25 bp, Homo sapien
ttggtcttgggacacaacgccccct

SEQ ID NO: 5971131 - DNA, 25 bp, Homo sapien
ttctttggaggtcttactaagcaaa

SEQ ID NO: 5971132 - DNA, 25 bp, Homo sapien
tcttcattgtgaaggaagtgtccgg

SEQ ID NO: 5971133 - DNA, 25 bp, Homo sapien
tgttttgtgaagcctcgtttcttgt

SEQ ID NO: 5971134 - DNA, 25 bp, Homo sapien
cgagcctcttttctttggaggtctt

SEQ ID NO: 5971135 - DNA, 25 bp, Homo sapien
ccctcttttcgccttcctaagagcc

SEQ ID NO: 5971136 - DNA, 25 bp, Homo sapien
catctcttcattgtgaaggaagtgt

SEQ ID NO: 5971137 - DNA, 25 bp, Homo sapien
tactaagcaaaccactttcaagtgt

SEQ ID NO: 5971138 - DNA, 25 bp, Homo sapien
tagtgggcttccggcctatgggaac

SEQ ID NO: 5971139 - DNA, 25 bp, Homo sapien
tctggcacctgccacaatctagaat

SEQ ID NO: 5971140 - DNA, 25 bp, Homo sapien
tacgtggatttgccaatagcattct

SEQ ID NO: 5971141 - DNA, 25 bp, Homo sapien
tttagtttcgcatgccgcaatcagc

SEQ ID NO: 5971142 - DNA, 25 bp, Homo sapien
tcttttctttggaggtcttactaag

SEQ ID NO: 5971143 - DNA, 25 bp, Homo sapien
ctctttcattagttggtcttgggac

SEQ ID NO: 5971144 - DNA, 25 bp, Homo sapien
ctcttttcgccttcctaagagccac

SEQ ID NO: 5971145 - DNA, 25 bp, Homo sapien
caccctgatgatcttgccatgtcat

SEQ ID NO: 5971146 - DNA, 25 bp, Homo sapien
gtgtaaatttcttgagtcaggagca

SEQ ID NO: 5971147 - DNA, 25 bp, Homo sapien
accacgttaccaaatattgtagatg

SEQ ID NO: 5971148 - DNA, 25 bp, Homo sapien
aatcaatagtgggcttccggcctat

SEQ ID NO: 5971149 - DNA, 25 bp, Homo sapien
tgccgcaatcagcttggttttccac

SEQ ID NO: 5971150 - DNA, 25 bp, Homo sapien
tggtccttcatgtcatacaaggctt

SEQ ID NO: 5971151 - DNA, 25 bp, Homo sapien
atgtattattatcaacagcttgcgt

SEQ ID NO: 5971152 - DNA, 25 bp, Homo sapien
tattatcaacagcttgcgttccgtt

SEQ ID NO: 5971153 - DNA, 25 bp, Homo sapien
ttctcttcgagaatcatcatttggg

SEQ ID NO: 5971154 - DNA, 25 bp, Homo sapien
tgaacggtgtaaacagaaaataacc

SEQ ID NO: 5971155 - DNA, 25 bp, Homo sapien
ggtcttgggacacaacgccccctct

SEQ ID NO: 5971156 - DNA, 25 bp, Homo sapien
tgctttgataaactgtcgttcatcg

SEQ ID NO: 5971157 - DNA, 25 bp, Homo sapien
ttctttcttggaccaacaaacatct

SEQ ID NO: 5971158 - DNA, 25 bp, Homo sapien
ccagtctacagttgacgttatgatg

SEQ ID NO: 5971159 - DNA, 25 bp, Homo sapien
tctgtcggcatttcctgcctagaac

SEQ ID NO: 5971160 - DNA, 25 bp, Homo sapien
ttgaggcaacgacaaatggtgtaaa

SEQ ID NO: 5971161 - DNA, 25 bp, Homo sapien
cgtaggttctcgtttccagaacttc

SEQ ID NO: 5971162 - DNA, 25 bp, Homo sapien
aggctagaggtggaattgttttgtg

SEQ ID NO: 5971163 - DNA, 25 bp, Homo sapien
atcttgccatgtcatatatgtctgg

SEQ ID NO: 5971164 - DNA, 25 bp, Homo sapien
ctttcaagtgttcttcttgaggcaa

SEQ ID NO: 5971165 - DNA, 25 bp, Homo sapien
tttacggtattcccaatcctcgcac

SEQ ID NO: 5971166 - DNA, 25 bp, Homo sapien
gcgattgaaaaccaacggtaagtgg

SEQ ID NO: 5971167 - DNA, 25 bp, Homo sapien
ttgtttggtctgtcggcatttcctg

SEQ ID NO: 5971168 - DNA, 25 bp, Homo sapien
cctcgattattggatggtccttcat

SEQ ID NO: 5971169 - DNA, 25 bp, Homo sapien
agctaagaggtacgtggatttgcca

SEQ ID NO: 5971170 - DNA, 25 bp, Homo sapien
catgtcaggtgtaaatgacttagga

SEQ ID NO: 5971171 - DNA, 25 bp, Homo sapien
cagcgattgaaaaccaacggtaagt

SEQ ID NO: 5971172 - DNA, 25 bp, Homo sapien
tggaattgttttgtgaagcctcgtt

SEQ ID NO: 5971173 - DNA, 25 bp, Homo sapien
gtattattatcaacagcttgcgttc

SEQ ID NO: 5971174 - DNA, 25 bp, Homo sapien
tgccaatagcattcttagtcggaat

SEQ ID NO: 5971175 - DNA, 25 bp, Homo sapien
ccatgtcatatatgtctggcacctg

SEQ ID NO: 5971176 - DNA, 25 bp, Homo sapien
agcgagcctcttttctttggaggtc

SEQ ID NO: 5971177 - DNA, 25 bp, Homo sapien
ggcttgaaattgaatgggcgtgcac

SEQ ID NO: 5971178 - DNA, 25 bp, Homo sapien
catcgaattcaattgtttggtctgt

SEQ ID NO: 5971179 - DNA, 25 bp, Homo sapien
tctacagttgacgttatgatgcctc

SEQ ID NO: 5971180 - DNA, 25 bp, Homo sapien
tgagtcaggagcaactttttcttca

SEQ ID NO: 5971181 - DNA, 25 bp, Homo sapien
ctttcattagttggtcttgggacac

SEQ ID NO: 5971182 - DNA, 25 bp, Homo sapien
ccttgaatgcttcagtttctctttc

SEQ ID NO: 5971183 - DNA, 25 bp, Homo sapien
agtaagtttagtttcgcatgccgca

SEQ ID NO: 5971184 - DNA, 25 bp, Homo sapien
ggtaagtggacctggcgcctagtag

SEQ ID NO: 5971185 - DNA, 25 bp, Homo sapien
cttttcgccttcctaagagccacaa

SEQ ID NO: 5971186 - DNA, 25 bp, Homo sapien
tcatacaaggcttgaaattgaatgg

SEQ ID NO: 5971187 - DNA, 25 bp, Homo sapien
tggaccaacaaacatctcttcattg

SEQ ID NO: 5971188 - DNA, 25 bp, Homo sapien
ctcggtactgttgatttcttgaagc

SEQ ID NO: 5971189 - DNA, 25 bp, Homo sapien
catgtcatacaaggcttgaaattga

SEQ ID NO: 5971190 - DNA, 25 bp, Homo sapien
atctttctcttcgagaatcatcatt

SEQ ID NO: 5971191 - DNA, 25 bp, Homo sapien
ttcttcttgaggcaacgacaaatgg

SEQ ID NO: 5971192 - DNA, 25 bp, Homo sapien
atgcctcggtactgttgatttcttg

SEQ ID NO: 5971193 - DNA, 25 bp, Homo sapien
catatatgtctggcacctgccacaa

SEQ ID NO: 5971194 - DNA, 25 bp, Homo sapien
ttggtctgtcggcatttcctgccta

SEQ ID NO: 5971195 - DNA, 25 bp, Homo sapien
gattgtgctcaaaaacgaaaggcca

SEQ ID NO: 5971196 - DNA, 25 bp, Homo sapien
tatgatgcctcggtactgttgattt

SEQ ID NO: 5971197 - DNA, 25 bp, Homo sapien
tctcttcattgtgaaggaagtgtcc

SEQ ID NO: 5971198 - DNA, 25 bp, Homo sapien
ccagaacaattttcttgccaaagga

SEQ ID NO: 5971199 - DNA, 25 bp, Homo sapien
ttcaagtgttcttcttgaggcaacg

SEQ ID NO: 5971200 - DNA, 25 bp, Homo sapien
tgtcatacaaggcttgaaattgaat

SEQ ID NO: 5971201 - DNA, 25 bp, Homo sapien
caattttcttgccaaaggatctttc

SEQ ID NO: 5971202 - DNA, 25 bp, Homo sapien
tcttgccaaaggatctttctcttcg

SEQ ID NO: 5971203 - DNA, 25 bp, Homo sapien
aggtgtaaatgacttaggaagtggt

SEQ ID NO: 5971204 - DNA, 25 bp, Homo sapien
ctaatgaacggtgtaaacagaaaat

SEQ ID NO: 5971205 - DNA, 25 bp, Homo sapien
tatgggaacacctgctttgataaac

SEQ ID NO: 5971206 - DNA, 25 bp, Homo sapien
ctagaatttggatcctttttcgccc

SEQ ID NO: 5971207 - DNA, 25 bp, Homo sapien
tcctgcctagaacgaggcttcgatg

SEQ ID NO: 5971208 - DNA, 25 bp, Homo sapien
ttgtgaagcctcgtttcttgtgtgt

SEQ ID NO: 5971209 - DNA, 25 bp, Homo sapien
ttctcaccggtgtcatctctaatga

SEQ ID NO: 5971210 - DNA, 25 bp, Homo sapien
cttcgagaatcatcatttgggctct

SEQ ID NO: 5971211 - DNA, 25 bp, Homo sapien
acgaaaggccataccacgttaccaa

SEQ ID NO: 5971212 - DNA, 25 bp, Homo sapien
aaattgaatgggcgtgcaccctgat

SEQ ID NO: 5971213 - DNA, 25 bp, Homo sapien
tcgattattggatggtccttcatgt

SEQ ID NO: 5971214 - DNA, 25 bp, Homo sapien
agcctcttttctttggaggtcttac

SEQ ID NO: 5971215 - DNA, 25 bp, Homo sapien
gcttccggcctatgggaacacctgc

SEQ ID NO: 5971216 - DNA, 25 bp, Homo sapien
ctttctcttcgagaatcatcatttg

SEQ ID NO: 5971217 - DNA, 25 bp, Homo sapien
ttcgatgtattattatcaacagctt

SEQ ID NO: 5971218 - DNA, 25 bp, Homo sapien
taagtggacctggcgcctagtagag

SEQ ID NO: 5971219 - DNA, 25 bp, Homo sapien
gggcttccggcctatgggaacacct

SEQ ID NO: 5971220 - DNA, 25 bp, Homo sapien
aattgatgcagcgattgaaaaccaa

SEQ ID NO: 5971221 - DNA, 25 bp, Homo sapien
gaattcaattgtttggtctgtcggc

SEQ ID NO: 5971222 - DNA, 25 bp, Homo sapien
tgcaccctgatgatcttgccatgtc

SEQ ID NO: 5971223 - DNA, 25 bp, Homo sapien
gccacaatgaggaagattgtgctca

SEQ ID NO: 5971224 - DNA, 25 bp, Homo sapien
ggtggaattgttttgtgaagcctcg

SEQ ID NO: 5971225 - DNA, 25 bp, Homo sapien
cttgattggtttccagtctacagtt

SEQ ID NO: 5971226 - DNA, 25 bp, Homo sapien
atcaacagcttgcgttccgtttaca

SEQ ID NO: 5971227 - DNA, 25 bp, Homo sapien
cgaggcttcgatgtattattatcaa

SEQ ID NO: 5971228 - DNA, 25 bp, Homo sapien
cagttgacgttatgatgcctcggta

SEQ ID NO: 5971229 - DNA, 25 bp, Homo sapien
atccaccctctttctatcagaactt

SEQ ID NO: 5971230 - DNA, 25 bp, Homo sapien
cattagttggtcttgggacacaacg

SEQ ID NO: 5971231 - DNA, 25 bp, Homo sapien
tcgtttcttgtgtgttcctcgatta

SEQ ID NO: 5971232 - DNA, 25 bp, Homo sapien
ggcatttcctgcctagaacgaggct

SEQ ID NO: 5971233 - DNA, 25 bp, Homo sapien
tcagaactttctcaccggtgtcatc

SEQ ID NO: 5971234 - DNA, 25 bp, Homo sapien
ttccgtttacagcagtcgtaggttc

SEQ ID NO: 5971235 - DNA, 25 bp, Homo sapien
ttcccaaatagaaggatattattgg

SEQ ID NO: 5971236 - DNA, 25 bp, Homo sapien
caagtgttcttcttgaggcaacgac

SEQ ID NO: 5971237 - DNA, 25 bp, Homo sapien
gcaaaccactttcaagtgttcttct

SEQ ID NO: 5971238 - DNA, 25 bp, Homo sapien
cagtttctctttcattagttggtct

SEQ ID NO: 5971239 - DNA, 25 bp, Homo sapien
ccggtgtcatctctaatgaacggtg

SEQ ID NO: 5971240 - DNA, 25 bp, Homo sapien
agtcggaattgatgcagcgattgaa

SEQ ID NO: 5971241 - DNA, 25 bp, Homo sapien
ctttgataaactgtcgttcatcgaa

SEQ ID NO: 5971242 - DNA, 25 bp, Homo sapien
agtctacagttgacgttatgatgcc

SEQ ID NO: 5971243 - DNA, 25 bp, Homo sapien
ggaagtggtattggttcataagtaa

SEQ ID NO: 5971244 - DNA, 25 bp, Homo sapien
gattattggatggtccttcatgtca

SEQ ID NO: 5971245 - DNA, 25 bp, Homo sapien
gcatcgcgaacatcagacccagaac

SEQ ID NO: 5971246 - DNA, 25 bp, Homo sapien
attattatcaacagcttgcgttccg

SEQ ID NO: 5971247 - DNA, 25 bp, Homo sapien
ccataccacgttaccaaatattgta

SEQ ID NO: 5971248 - DNA, 25 bp, Homo sapien
attcccaatcctcgcacatgtcagg

SEQ ID NO: 5971249 - DNA, 25 bp, Homo sapien
tagaaggatattattggcatcgcga

SEQ ID NO: 5971250 - DNA, 25 bp, Homo sapien
agtgttcttcttgaggcaacgacaa

SEQ ID NO: 5971251 - DNA, 25 bp, Homo sapien
catgccgcaatcagcttggttttcc

SEQ ID NO: 5971252 - DNA, 25 bp, Homo sapien
ttgaagctaagaggtacgtggattt

SEQ ID NO: 5971253 - DNA, 25 bp, Homo sapien
ttcagtttctctttcattagttggt

SEQ ID NO: 5971254 - DNA, 25 bp, Homo sapien
gtttcttgtgtgttcctcgattatt

SEQ ID NO: 5971255 - DNA, 25 bp, Homo sapien
gaagcctcgtttcttgtgtgttcct

SEQ ID NO: 5971256 - DNA, 25 bp, Homo sapien
acttatccaccctctttctatcaga

SEQ ID NO: 5971257 - DNA, 25 bp, Homo sapien
atgcttcagtttctctttcattagt

SEQ ID NO: 5971258 - DNA, 25 bp, Homo sapien
gttttccacttcaatctccttactt

SEQ ID NO: 5971259 - DNA, 25 bp, Homo sapien
tttccagaacttccacaggctagag

SEQ ID NO: 5971260 - DNA, 25 bp, Homo sapien
gctagaggtggaattgttttgtgaa

SEQ ID NO: 5971261 - DNA, 25 bp, Homo sapien
gcaactttttcttcacttatccacc

SEQ ID NO: 5971262 - DNA, 25 bp, Homo sapien
tattattggcatcgcgaacatcaga

SEQ ID NO: 5971263 - DNA, 25 bp, Homo sapien
acagcttgcgttccgtttacagcag

SEQ ID NO: 5971264 - DNA, 25 bp, Homo sapien
taactttacggtattcccaatcctc

SEQ ID NO: 5971265 - DNA, 25 bp, Homo sapien
gatggtccttcatgtcatacaaggc

SEQ ID NO: 5971266 - DNA, 25 bp, Homo sapien
ctaagaggtacgtggatttgccaat

SEQ ID NO: 5971267 - DNA, 25 bp, Homo sapien
tgggcgtgcaccctgatgatcttgc

SEQ ID NO: 5971268 - DNA, 25 bp, Homo sapien
aacgaggcttcgatgtattattatc

SEQ ID NO: 5971269 - DNA, 25 bp, Homo sapien
ctcaccggtgtcatctctaatgaac

SEQ ID NO: 5971270 - DNA, 25 bp, Homo sapien
ctgcctagaacgaggcttcgatgta

SEQ ID NO: 5971271 - DNA, 25 bp, Homo sapien
caatctagaatttggatcctttttc

SEQ ID NO: 5971272 - DNA, 25 bp, Homo sapien
tgcgttccgtttacagcagtcgtag

SEQ ID NO: 5971273 - DNA, 25 bp, Homo sapien
tggatggtccttcatgtcatacaag

SEQ ID NO: 5971274 - DNA, 25 bp, Homo sapien
agaatttggatcctttttcgcccat

SEQ ID NO: 5971275 - DNA, 25 bp, Homo sapien
caaaggatctttctcttcgagaatc

SEQ ID NO: 5971276 - DNA, 25 bp, Homo sapien
acgacaaatggtgtaaatttcttga

SEQ ID NO: 5971277 - DNA, 25 bp, Homo sapien
ctgtcttgattggtttccagtctac

SEQ ID NO: 5971278 - DNA, 25 bp, Homo sapien
gaatcatcatttgggctcttacctg

SEQ ID NO: 5971279 - DNA, 25 bp, Homo sapien
ttccacttcaatctccttacttgcc

SEQ ID NO: 5971280 - DNA, 25 bp, Homo sapien
accctctttctatcagaactttctc

SEQ ID NO: 5971281 - DNA, 25 bp, Homo sapien
tttcttgccaaaggatctttctctt

SEQ ID NO: 5971282 - DNA, 25 bp, Homo sapien
atgacttaggaagtggtattggttc

SEQ ID NO: 5971283 - DNA, 25 bp, Homo sapien
gtcttactaagcaaaccactttcaa

SEQ ID NO: 5971284 - DNA, 25 bp, Homo sapien
attcttagtcggaattgatgcagcg

SEQ ID NO: 5971285 - DNA, 25 bp, Homo sapien
ttcaatctccttacttgccaagttc

SEQ ID NO: 5971286 - DNA, 25 bp, Homo sapien
taaactgtcgttcatcgaattcaat

SEQ ID NO: 5971287 - DNA, 25 bp, Homo sapien
ctttctcaccggtgtcatctctaat

SEQ ID NO: 5971288 - DNA, 25 bp, Homo sapien
ggtctgtcggcatttcctgcctaga

SEQ ID NO: 5971289 - DNA, 25 bp, Homo sapien
tgggacacaacgccccctcttttcg

SEQ ID NO: 5971290 - DNA, 25 bp, Homo sapien
agatggttattctttaaatcaatag

SEQ ID NO: 5971291 - DNA, 25 bp, Homo sapien
gatgatcttgccatgtcatatatgt

SEQ ID NO: 5971292 - DNA, 25 bp, Homo sapien
atcatcatttgggctcttacctgtc

SEQ ID NO: 5971293 - DNA, 25 bp, Homo sapien
atcgcgaacatcagacccagaacaa

SEQ ID NO: 5971294 - DNA, 25 bp, Homo sapien
accaacggtaagtggacctggcgcc

SEQ ID NO: 5971295 - DNA, 25 bp, Homo sapien
ttgtgctcaaaaacgaaaggccata

SEQ ID NO: 5971296 - DNA, 25 bp, Homo sapien
cgtggatttgccaatagcattctta

SEQ ID NO: 5971297 - DNA, 25 bp, Homo sapien
tcttgaagctaagaggtacgtggat

SEQ ID NO: 5971298 - DNA, 25 bp, Homo sapien
cttgtgtgttcctcgattattggat

SEQ ID NO: 5971299 - DNA, 25 bp, Homo sapien
actttacggtattcccaatcctcgc

SEQ ID NO: 5971300 - DNA, 25 bp, Homo sapien
gtgtaaatgacttaggaagtggtat

SEQ ID NO: 5971301 - DNA, 25 bp, Homo sapien
gaggcaacgacaaatggtgtaaatt

SEQ ID NO: 5971302 - DNA, 25 bp, Homo sapien
ttgtagatggttattctttaaatca

SEQ ID NO: 5971303 - DNA, 25 bp, Homo sapien
tcagacccagaacaattttcttgcc

SEQ ID NO: 5971304 - DNA, 25 bp, Homo sapien
cacaatgaggaagattgtgctcaaa

SEQ ID NO: 5971305 - DNA, 25 bp, Homo sapien
aatttggatcctttttcgcccattg

SEQ ID NO: 5971306 - DNA, 25 bp, Homo sapien
gatttgccaatagcattcttagtcg

SEQ ID NO: 5971307 - DNA, 25 bp, Homo sapien
ggtgtcatctctaatgaacggtgta

SEQ ID NO: 5971308 - DNA, 25 bp, Homo sapien
agacccagaacaattttcttgccaa

SEQ ID NO: 5971309 - DNA, 25 bp, Homo sapien
ttgatttcttgaagctaagaggtac

SEQ ID NO: 5971310 - DNA, 25 bp, Homo sapien
tggtttccagtctacagttgacgtt

SEQ ID NO: 5971311 - DNA, 25 bp, Homo sapien
ttcatcgaattcaattgtttggtct

SEQ ID NO: 5971312 - DNA, 25 bp, Homo sapien
cgttcatcgaattcaattgtttggt

SEQ ID NO: 5971313 - DNA, 25 bp, Homo sapien
cattgtagcgagcctcttttctttg

SEQ ID NO: 5971314 - DNA, 25 bp, Homo sapien
tcttgaggcaacgacaaatggtgta

SEQ ID NO: 5971315 - DNA, 25 bp, Homo sapien
atatatttccttgaatgcttcagtt

SEQ ID NO: 5971316 - DNA, 25 bp, Homo sapien
tggatttgccaatagcattcttagt

SEQ ID NO: 5971317 - DNA, 25 bp, Homo sapien
ttcacttatccaccctctttctatc

SEQ ID NO: 5971318 - DNA, 25 bp, Homo sapien
tggcatcgcgaacatcagacccaga

SEQ ID NO: 5971319 - DNA, 25 bp, Homo sapien
cttgcgttccgtttacagcagtcgt

SEQ ID NO: 5971320 - DNA, 25 bp, Homo sapien
aatcagcttggttttccacttcaat

SEQ ID NO: 5971321 - DNA, 25 bp, Homo sapien
ccgcaatcagcttggttttccactt

SEQ ID NO: 5971322 - DNA, 25 bp, Homo sapien
aaaccactttcaagtgttcttcttg

SEQ ID NO: 5971323 - DNA, 25 bp, Homo sapien
gacttaggaagtggtattggttcat

SEQ ID NO: 5971324 - DNA, 25 bp, Homo sapien
caaatattgtagatggttattcttt

SEQ ID NO: 5971325 - DNA, 25 bp, Homo sapien
ttctcgtttccagaacttccacagg

SEQ ID NO: 5971326 - DNA, 25 bp, Homo sapien
gccacaatctagaatttggatcctt

SEQ ID NO: 5971327 - DNA, 25 bp, Homo sapien
tgaaattgaatgggcgtgcaccctg

SEQ ID NO: 5971328 - DNA, 25 bp, Homo sapien
tatcagaactttctcaccggtgtca

SEQ ID NO: 5971329 - DNA, 25 bp, Homo sapien
tgtgtgttcctcgattattggatgg

SEQ ID NO: 5971330 - DNA, 25 bp, Homo sapien
tataactttacggtattcccaatcc

SEQ ID NO: 5971331 - DNA, 25 bp, Homo sapien
ccaacaaacatctcttcattgtgaa

SEQ ID NO: 5971332 - DNA, 25 bp, Homo sapien
agtcaggagcaactttttcttcact

SEQ ID NO: 5971333 - DNA, 25 bp, Homo sapien
attggtttccagtctacagttgacg

SEQ ID NO: 5971334 - DNA, 25 bp, Homo sapien
ctcgtttccagaacttccacaggct

SEQ ID NO: 5971335 - DNA, 25 bp, Homo sapien
acaggctagaggtggaattgttttg

SEQ ID NO: 5971336 - DNA, 25 bp, Homo sapien
cgtttccagaacttccacaggctag

SEQ ID NO: 5971337 - DNA, 25 bp, Homo sapien
cgcgaacatcagacccagaacaatt

SEQ ID NO: 5971338 - DNA, 25 bp, Homo sapien
ctctaatgaacggtgtaaacagaaa

SEQ ID NO: 5971339 - DNA, 25 bp, Homo sapien
gtttctctttcattagttggtcttg

SEQ ID NO: 5971340 - DNA, 25 bp, Homo sapien
ttgtgaaggaagtgtccggtaagta

SEQ ID NO: 5971341 - DNA, 25 bp, Homo sapien
ggtacgtggatttgccaatagcatt

SEQ ID NO: 5971342 - DNA, 25 bp, Homo sapien
ggttctcgtttccagaacttccaca

SEQ ID NO: 5971343 - DNA, 25 bp, Homo sapien
atttcttgagtcaggagcaactttt

SEQ ID NO: 5971344 - DNA, 25 bp, Homo sapien
tgtctggcacctgccacaatctaga

SEQ ID NO: 5971345 - DNA, 25 bp, Homo sapien
agcttgcgttccgtttacagcagtc

SEQ ID NO: 5971346 - DNA, 25 bp, Homo sapien
gtccttcatgtcatacaaggcttga

SEQ ID NO: 5971347 - DNA, 25 bp, Homo sapien
ttcgcatgccgcaatcagcttggtt

SEQ ID NO: 5971348 - DNA, 25 bp, Homo sapien
aagcaaaccactttcaagtgttctt

SEQ ID NO: 5971349 - DNA, 25 bp, Homo sapien
gtgaaggaagtgtccggtaagtata

SEQ ID NO: 5971350 - DNA, 25 bp, Homo sapien
ggttattctttaaatcaatagtggg

SEQ ID NO: 5971351 - DNA, 25 bp, Homo sapien
gatattattggcatcgcgaacatca

SEQ ID NO: 5971352 - DNA, 25 bp, Homo sapien
gatcctttttcgcccattgtagcga

SEQ ID NO: 5971353 - DNA, 25 bp, Homo sapien
aacaaacatctcttcattgtgaagg

SEQ ID NO: 5971354 - DNA, 25 bp, Homo sapien
ttacagcagtcgtaggttctcgttt

SEQ ID NO: 5971355 - DNA, 25 bp, Homo sapien
tagtttcgcatgccgcaatcagctt

SEQ ID NO: 5971356 - DNA, 25 bp, Homo sapien
acaaggcttgaaattgaatgggcgt

SEQ ID NO: 5971357 - DNA, 25 bp, Homo sapien
tcccaatcctcgcacatgtcaggtg

SEQ ID NO: 5971358 - DNA, 25 bp, Homo sapien
gaaggatattattggcatcgcgaac

SEQ ID NO: 5971359 - DNA, 25 bp, Homo sapien
ttcattgtgaaggaagtgtccggta

SEQ ID NO: 5971360 - DNA, 25 bp, Homo sapien
ttttctttcttggaccaacaaacat

SEQ ID NO: 5971361 - DNA, 25 bp, Homo sapien
tattgtagatggttattctttaaat

SEQ ID NO: 5971362 - DNA, 25 bp, Homo sapien
cttggaccaacaaacatctcttcat

SEQ ID NO: 5971363 - DNA, 25 bp, Homo sapien
tcttagtcggaattgatgcagcgat

SEQ ID NO: 5971364 - DNA, 25 bp, Homo sapien
tatgtctggcacctgccacaatcta

SEQ ID NO: 5971365 - DNA, 25 bp, Homo sapien
aatagtgggcttccggcctatggga

SEQ ID NO: 5971366 - DNA, 25 bp, Homo sapien
aactttctcaccggtgtcatctcta

SEQ ID NO: 5971367 - DNA, 25 bp, Homo sapien
cacctgctttgataaactgtcgttc

SEQ ID NO: 5971368 - DNA, 25 bp, Homo sapien
gtttacagcagtcgtaggttctcgt

SEQ ID NO: 5971369 - DNA, 25 bp, Homo sapien
acttccacaggctagaggtggaatt

SEQ ID NO: 5971370 - DNA, 25 bp, Homo sapien
gtactgttgatttcttgaagctaag

SEQ ID NO: 5971371 - DNA, 25 bp, Homo sapien
tgttgatttcttgaagctaagaggt

SEQ ID NO: 5971372 - DNA, 25 bp, Homo sapien
ttccggcctatgggaacacctgctt

SEQ ID NO: 5971373 - DNA, 25 bp, Homo sapien
ctgatgatcttgccatgtcatatat

SEQ ID NO: 5971374 - DNA, 25 bp, Homo sapien
ccgtttacagcagtcgtaggttctc

SEQ ID NO: 5971375 - DNA, 25 bp, Homo sapien
cctcgtttcttgtgtgttcctcgat

SEQ ID NO: 5971376 - DNA, 25 bp, Homo sapien
gcaatcagcttggttttccacttca

SEQ ID NO: 5971377 - DNA, 25 bp, Homo sapien
aacatctcttcattgtgaaggaagt

SEQ ID NO: 5971378 - DNA, 25 bp, Homo sapien
tttcctgcctagaacgaggcttcga

SEQ ID NO: 5971379 - DNA, 25 bp, Homo sapien
ataccacgttaccaaatattgtaga

SEQ ID NO: 5971380 - DNA, 25 bp, Homo sapien
aatattgtagatggttattctttaa

SEQ ID NO: 5971381 - DNA, 25 bp, Homo sapien
agttcccaaatagaaggatattatt

SEQ ID NO: 5971382 - DNA, 25 bp, Homo sapien
tgacgttatgatgcctcggtactgt

SEQ ID NO: 5971383 - DNA, 25 bp, Homo sapien
gtagatggttattctttaaatcaat

SEQ ID NO: 5971384 - DNA, 25 bp, Homo sapien
tttttcttcacttatccaccctctt

SEQ ID NO: 5971385 - DNA, 25 bp, Homo sapien
aaggccataccacgttaccaaatat

SEQ ID NO: 5971386 - DNA, 25 bp, Homo sapien
cactttcaagtgttcttcttgaggc

SEQ ID NO: 5971387 - DNA, 25 bp, Homo sapien
ttattctttaaatcaatagtgggct

SEQ ID NO: 5971388 - DNA, 25 bp, Homo sapien
gagcaactttttcttcacttatcca

SEQ ID NO: 5971389 - DNA, 25 bp, Homo sapien
tgcagcgattgaaaaccaacggtaa

SEQ ID NO: 5971390 - DNA, 25 bp, Homo sapien
ttctctttcattagttggtcttggg

SEQ ID NO: 5971391 - DNA, 25 bp, Homo sapien
gaaaggccataccacgttaccaaat

SEQ ID NO: 5971392 - DNA, 25 bp, Homo sapien
tacggtattcccaatcctcgcacat

SEQ ID NO: 5971393 - DNA, 25 bp, Homo sapien
cttgccatgtcatatatgtctggca

SEQ ID NO: 5971394 - DNA, 25 bp, Homo sapien
ttgccaaaggatctttctcttcgag

SEQ ID NO: 5971395 - DNA, 25 bp, Homo sapien
gaaggaagtgtccggtaagtataac

SEQ ID NO: 5971396 - DNA, 25 bp, Homo sapien
ctttggaggtcttactaagcaaacc

SEQ ID NO: 5971397 - DNA, 25 bp, Homo sapien
agtggacctggcgcctagtagagac

SEQ ID NO: 5971398 - DNA, 25 bp, Homo sapien
ttctcgaagtacaaaagagacattt

SEQ ID NO: 5971399 - DNA, 25 bp, Homo sapien
tgcaccaatccaagaattgaagttt

SEQ ID NO: 5971400 - DNA, 25 bp, Homo sapien
aaatccttcgaagaaatgaaattgg

SEQ ID NO: 5971401 - DNA, 25 bp, Homo sapien
atgaaggcgccattggaagtggtga

SEQ ID NO: 5971402 - DNA, 25 bp, Homo sapien
tcaaaaatcgaccttttggaagaac

SEQ ID NO: 5971403 - DNA, 25 bp, Homo sapien
agaattgaagtttggtacaaatcac

SEQ ID NO: 5971404 - DNA, 25 bp, Homo sapien
gaagaaccaaagcaagttaagaaaa

SEQ ID NO: 5971405 - DNA, 25 bp, Homo sapien
atgttgtcaagcaagtcgccaatcc

SEQ ID NO: 5971406 - DNA, 25 bp, Homo sapien
accaagcttgctgatttcttgaaag

SEQ ID NO: 5971407 - DNA, 25 bp, Homo sapien
gtgactgttcttttagcagacttgc

SEQ ID NO: 5971408 - DNA, 25 bp, Homo sapien
aagggtactaagtacccaggcgcta

SEQ ID NO: 5971409 - DNA, 25 bp, Homo sapien
ccagaaaagttcggtggtccaatta

SEQ ID NO: 5971410 - DNA, 25 bp, Homo sapien
acctcattgtggttattttgttcct

SEQ ID NO: 5971411 - DNA, 25 bp, Homo sapien
acaacaaggaatttcaagaggcctc

SEQ ID NO: 5971412 - DNA, 25 bp, Homo sapien
tcgaattcttcattgatagaccaga

SEQ ID NO: 5971413 - DNA, 25 bp, Homo sapien
gattgccacgaaactagaggaaacc

SEQ ID NO: 5971414 - DNA, 25 bp, Homo sapien
agaaaaattgtccccacctgatcta

SEQ ID NO: 5971415 - DNA, 25 bp, Homo sapien
gaccatcaaagctatcttgagaagc

SEQ ID NO: 5971416 - DNA, 25 bp, Homo sapien
gaaggcgccattggaagtggtgaac

SEQ ID NO: 5971417 - DNA, 25 bp, Homo sapien
gggctacaagaaaagagcacattta

SEQ ID NO: 5971418 - DNA, 25 bp, Homo sapien
ctctgatccgaattcaaaaatcgac

SEQ ID NO: 5971419 - DNA, 25 bp, Homo sapien
atgaggcgttcggtctcattaccaa

SEQ ID NO: 5971420 - DNA, 25 bp, Homo sapien
attttgttcctatgaccaagcttgc

SEQ ID NO: 5971421 - DNA, 25 bp, Homo sapien
gaaccaaagcaagttaagaaaaaga

SEQ ID NO: 5971422 - DNA, 25 bp, Homo sapien
tgtgaagtgactgttcttttagcag

SEQ ID NO: 5971423 - DNA, 25 bp, Homo sapien
tactggggtaccgcgcccactggaa

SEQ ID NO: 5971424 - DNA, 25 bp, Homo sapien
attgaaaagctaaaatttgttgttg

SEQ ID NO: 5971425 - DNA, 25 bp, Homo sapien
ccaggtttggctcaaggtggtaaaa

SEQ ID NO: 5971426 - DNA, 25 bp, Homo sapien
cattaccaagaacttgcaagaagtc

SEQ ID NO: 5971427 - DNA, 25 bp, Homo sapien
aagtttgggctacaagaaaagagca

SEQ ID NO: 5971428 - DNA, 25 bp, Homo sapien
ctcattgtggttattttgttcctat

SEQ ID NO: 5971429 - DNA, 25 bp, Homo sapien
atttaatgaaccctatggttccagg

SEQ ID NO: 5971430 - DNA, 25 bp, Homo sapien
aatgcaagcgttggacgaacaattc

SEQ ID NO: 5971431 - DNA, 25 bp, Homo sapien
tggacaacatgaaggcgccattgga

SEQ ID NO: 5971432 - DNA, 25 bp, Homo sapien
ccaatccaagaattgaagtttggta

SEQ ID NO: 5971433 - DNA, 25 bp, Homo sapien
cgctatcaacgagctattggagcca

SEQ ID NO: 5971434 - DNA, 25 bp, Homo sapien
ttgttgttggctcttcttaccagct

SEQ ID NO: 5971435 - DNA, 25 bp, Homo sapien
ttgccaatttggtggtgtcgaccag

SEQ ID NO: 5971436 - DNA, 25 bp, Homo sapien
agcttgctgatttcttgaaagcagg

SEQ ID NO: 5971437 - DNA, 25 bp, Homo sapien
caaagctatcttgagaagcatcaat

SEQ ID NO: 5971438 - DNA, 25 bp, Homo sapien
gaataagggtactaagtacccaggc

SEQ ID NO: 5971439 - DNA, 25 bp, Homo sapien
cgaaactagaggaaaccaaattgta

SEQ ID NO: 5971440 - DNA, 25 bp, Homo sapien
ctatcaacgagctattggagccaat

SEQ ID NO: 5971441 - DNA, 25 bp, Homo sapien
tagatgttgattgccaatttggtgg

SEQ ID NO: 5971442 - DNA, 25 bp, Homo sapien
ccgaaaagggttatccagttgccac

SEQ ID NO: 5971443 - DNA, 25 bp, Homo sapien
cggtaacgtcgaagagaatggttta

SEQ ID NO: 5971444 - DNA, 25 bp, Homo sapien
tgaaccctatggttccaggtttggc

SEQ ID NO: 5971445 - DNA, 25 bp, Homo sapien
acatttaatgaaccctatggttcca

SEQ ID NO: 5971446 - DNA, 25 bp, Homo sapien
agttgccacaccacaaaagtcgaaa

SEQ ID NO: 5971447 - DNA, 25 bp, Homo sapien
caagaaaagagcacatttaatgaac

SEQ ID NO: 5971448 - DNA, 25 bp, Homo sapien
gtactaagtacccaggcgctactaa

SEQ ID NO: 5971449 - DNA, 25 bp, Homo sapien
tcttaccagctaactccagactata

SEQ ID NO: 5971450 - DNA, 25 bp, Homo sapien
cattgtggttattttgttcctatga

SEQ ID NO: 5971451 - DNA, 25 bp, Homo sapien
gagcacatttaatgaaccctatggt

SEQ ID NO: 5971452 - DNA, 25 bp, Homo sapien
gtcgaccagagaaaaatttttgtct

SEQ ID NO: 5971453 - DNA, 25 bp, Homo sapien
gtccaatatgtcattgcaccaatcc

SEQ ID NO: 5971454 - DNA, 25 bp, Homo sapien
tgctaaaagggcaggcgctgatgtt

SEQ ID NO: 5971455 - DNA, 25 bp, Homo sapien
gaaaaatttttgtcttagcggaaga

SEQ ID NO: 5971456 - DNA, 25 bp, Homo sapien
ttatccagttgccacaccacaaaag

SEQ ID NO: 5971457 - DNA, 25 bp, Homo sapien
gtcttagcggaagaaaatttaccaa

SEQ ID NO: 5971458 - DNA, 25 bp, Homo sapien
aaatcacttcgaattcttcattgat

SEQ ID NO: 5971459 - DNA, 25 bp, Homo sapien
ggtaaaatgtctgcctctgatccga

SEQ ID NO: 5971460 - DNA, 25 bp, Homo sapien
aagatgttctcgaagtacaaaagag

SEQ ID NO: 5971461 - DNA, 25 bp, Homo sapien
ctatggttccaggtttggctcaagg

SEQ ID NO: 5971462 - DNA, 25 bp, Homo sapien
cttgcaagaagtcttgaacccacaa

SEQ ID NO: 5971463 - DNA, 25 bp, Homo sapien
gatttcttgaaagcaggttgtgaag

SEQ ID NO: 5971464 - DNA, 25 bp, Homo sapien
ggaagtggtgaactatagggccaaa

SEQ ID NO: 5971465 - DNA, 25 bp, Homo sapien
cttgctgatttcttgaaagcaggtt

SEQ ID NO: 5971466 - DNA, 25 bp, Homo sapien
aagcaagtcgccaatccattattga

SEQ ID NO: 5971467 - DNA, 25 bp, Homo sapien
aaatgtctgcctctgatccgaattc

SEQ ID NO: 5971468 - DNA, 25 bp, Homo sapien
cgccaatccattattgagtgggctt

SEQ ID NO: 5971469 - DNA, 25 bp, Homo sapien
atagggccaaatactatgaattgac

SEQ ID NO: 5971470 - DNA, 25 bp, Homo sapien
gcgcccactggaagacctcattgtg

SEQ ID NO: 5971471 - DNA, 25 bp, Homo sapien
ttaagaaaaagatcaatagtgcatt

SEQ ID NO: 5971472 - DNA, 25 bp, Homo sapien
aactatagggccaaatactatgaat

SEQ ID NO: 5971473 - DNA, 25 bp, Homo sapien
gaagcatcaatgttccaattgaaaa

SEQ ID NO: 5971474 - DNA, 25 bp, Homo sapien
aagaatttgccaacaacaaggaatt

SEQ ID NO: 5971475 - DNA, 25 bp, Homo sapien
cacggttgaccctaatgaggcgttc

SEQ ID NO: 5971476 - DNA, 25 bp, Homo sapien
aggttgtgaagtgactgttctttta

SEQ ID NO: 5971477 - DNA, 25 bp, Homo sapien
attatactggggtaccgcgcccact

SEQ ID NO: 5971478 - DNA, 25 bp, Homo sapien
agtgggcttatctatcctttaatgc

SEQ ID NO: 5971479 - DNA, 25 bp, Homo sapien
aatatgtcattgcaccaatccaaga

SEQ ID NO: 5971480 - DNA, 25 bp, Homo sapien
aaaaattgtccccacctgatctaaa

SEQ ID NO: 5971481 - DNA, 25 bp, Homo sapien
atttgttgttggctcttcttaccag

SEQ ID NO: 5971482 - DNA, 25 bp, Homo sapien
gccaacaacaaggaatttcaagagg

SEQ ID NO: 5971483 - DNA, 25 bp, Homo sapien
gagaagcatcaatgttccaattgaa

SEQ ID NO: 5971484 - DNA, 25 bp, Homo sapien
aattgaagtttggtacaaatcactt

SEQ ID NO: 5971485 - DNA, 25 bp, Homo sapien
accaaagcaagttaagaaaaagatc

SEQ ID NO: 5971486 - DNA, 25 bp, Homo sapien
aagggcaggcgctgatgttgtcaag

SEQ ID NO: 5971487 - DNA, 25 bp, Homo sapien
aagttcggtggtccaattacctaca

SEQ ID NO: 5971488 - DNA, 25 bp, Homo sapien
tccaagaattgaagtttggtacaaa

SEQ ID NO: 5971489 - DNA, 25 bp, Homo sapien
ttccaattgaaaagctaaaatttgt

SEQ ID NO: 5971490 - DNA, 25 bp, Homo sapien
ggttattttgttcctatgaccaagc

SEQ ID NO: 5971491 - DNA, 25 bp, Homo sapien
gtgcattttgtagccccggtaacgt

SEQ ID NO: 5971492 - DNA, 25 bp, Homo sapien
ttacctacaaatccttcgaagaaat

SEQ ID NO: 5971493 - DNA, 25 bp, Homo sapien
tgttggctcttcttaccagctaact

SEQ ID NO: 5971494 - DNA, 25 bp, Homo sapien
gttgaccctaatgaggcgttcggtc

SEQ ID NO: 5971495 - DNA, 25 bp, Homo sapien
tgaactatagggccaaatactatga

SEQ ID NO: 5971496 - DNA, 25 bp, Homo sapien
ttgtcttagcggaagaaaatttacc

SEQ ID NO: 5971497 - DNA, 25 bp, Homo sapien
tgagtgggcttatctatcctttaat

SEQ ID NO: 5971498 - DNA, 25 bp, Homo sapien
gatagaccagaaaagttcggtggtc

SEQ ID NO: 5971499 - DNA, 25 bp, Homo sapien
ctcattaccaagaacttgcaagaag

SEQ ID NO: 5971500 - DNA, 25 bp, Homo sapien
cttatctatcctttaatgcaagcgt

SEQ ID NO: 5971501 - DNA, 25 bp, Homo sapien
accaagaacttgcaagaagtcttga

SEQ ID NO: 5971502 - DNA, 25 bp, Homo sapien
aaacgatgctaaaagggcaggcgct

SEQ ID NO: 5971503 - DNA, 25 bp, Homo sapien
gtcttgaacccacaaatcatcaaag

SEQ ID NO: 5971504 - DNA, 25 bp, Homo sapien
aatccattattgagtgggcttatct

SEQ ID NO: 5971505 - DNA, 25 bp, Homo sapien
cgtcgaagagaatggtttactgtca

SEQ ID NO: 5971506 - DNA, 25 bp, Homo sapien
ttgggctacaagaaaagagcacatt

SEQ ID NO: 5971507 - DNA, 25 bp, Homo sapien
aaaagagcacatttaatgaacccta

SEQ ID NO: 5971508 - DNA, 25 bp, Homo sapien
tgcaagaagtcttgaacccacaaat

SEQ ID NO: 5971509 - DNA, 25 bp, Homo sapien
cgctactaagaccaacgagattgcc

SEQ ID NO: 5971510 - DNA, 25 bp, Homo sapien
ctgccacggttgaccctaatgaggc

SEQ ID NO: 5971511 - DNA, 25 bp, Homo sapien
gacaacatgaaggcgccattggaag

SEQ ID NO: 5971512 - DNA, 25 bp, Homo sapien
acctacaaatccttcgaagaaatga

SEQ ID NO: 5971513 - DNA, 25 bp, Homo sapien
tccccacctgatctaaaaattggtg

SEQ ID NO: 5971514 - DNA, 25 bp, Homo sapien
aggtttggctcaaggtggtaaaatg

SEQ ID NO: 5971515 - DNA, 25 bp, Homo sapien
cccacctgatctaaaaattggtgtt

SEQ ID NO: 5971516 - DNA, 25 bp, Homo sapien
tgaagtgactgttcttttagcagac

SEQ ID NO: 5971517 - DNA, 25 bp, Homo sapien
aatagtgcattttgtagccccggta

SEQ ID NO: 5971518 - DNA, 25 bp, Homo sapien
gatgttgattgccaatttggtggtg

SEQ ID NO: 5971519 - DNA, 25 bp, Homo sapien
ttgccaacaacaaggaatttcaaga

SEQ ID NO: 5971520 - DNA, 25 bp, Homo sapien
gtccaattacctacaaatccttcga

SEQ ID NO: 5971521 - DNA, 25 bp, Homo sapien
actgtcatttgtccaatatgtcatt

SEQ ID NO: 5971522 - DNA, 25 bp, Homo sapien
cggtctcattaccaagaacttgcaa

SEQ ID NO: 5971523 - DNA, 25 bp, Homo sapien
ttaatgcaagcgttggacgaacaat

SEQ ID NO: 5971524 - DNA, 25 bp, Homo sapien
gctacaagaaaagagcacatttaat

SEQ ID NO: 5971525 - DNA, 25 bp, Homo sapien
caaaacgatgctaaaagggcaggcg

SEQ ID NO: 5971526 - DNA, 25 bp, Homo sapien
gccacgaaactagaggaaaccaaat

SEQ ID NO: 5971527 - DNA, 25 bp, Homo sapien
attgcaccaatccaagaattgaagt

SEQ ID NO: 5971528 - DNA, 25 bp, Homo sapien
ttggctcaaggtggtaaaatgtctg

SEQ ID NO: 5971529 - DNA, 25 bp, Homo sapien
ttcattgatagaccagaaaagttcg

SEQ ID NO: 5971530 - DNA, 25 bp, Homo sapien
ttgagaagcatcaatgttccaattg

SEQ ID NO: 5971531 - DNA, 25 bp, Homo sapien
gaaaagggttatccagttgccacac

SEQ ID NO: 5971532 - DNA, 25 bp, Homo sapien
accagctaactccagactataccat

SEQ ID NO: 5971533 - DNA, 25 bp, Homo sapien
ttagcagacttgcacgcctttttgg

SEQ ID NO: 5971534 - DNA, 25 bp, Homo sapien
atcacttcgaattcttcattgatag

SEQ ID NO: 5971535 - DNA, 25 bp, Homo sapien
catcaatgttccaattgaaaagcta

SEQ ID NO: 5971536 - DNA, 25 bp, Homo sapien
ctcgaagtacaaaagagacatttga

SEQ ID NO: 5971537 - DNA, 25 bp, Homo sapien
aatccaagaattgaagtttggtaca

SEQ ID NO: 5971538 - DNA, 25 bp, Homo sapien
atgtcctctgctgccacggttgacc

SEQ ID NO: 5971539 - DNA, 25 bp, Homo sapien
caacatgaaggcgccattggaagtg

SEQ ID NO: 5971540 - DNA, 25 bp, Homo sapien
cagctaactccagactataccatgg

SEQ ID NO: 5971541 - DNA, 25 bp, Homo sapien
ctccgaaaagggttatccagttgcc

SEQ ID NO: 5971542 - DNA, 25 bp, Homo sapien
ttaatgaaccctatggttccaggtt

SEQ ID NO: 5971543 - DNA, 25 bp, Homo sapien
acgagctattggagccaatcagaca

SEQ ID NO: 5971544 - DNA, 25 bp, Homo sapien
agagaatggtttactgtcatttgtc

SEQ ID NO: 5971545 - DNA, 25 bp, Homo sapien
ctacaaatccttcgaagaaatgaaa

SEQ ID NO: 5971546 - DNA, 25 bp, Homo sapien
ctgatttcttgaaagcaggttgtga

SEQ ID NO: 5971547 - DNA, 25 bp, Homo sapien
gatatctttagattatccaacattg

SEQ ID NO: 5971548 - DNA, 25 bp, Homo sapien
agtacccaggcgctactaagaccaa

SEQ ID NO: 5971549 - DNA, 25 bp, Homo sapien
gaatttgccaacaacaaggaatttc

SEQ ID NO: 5971550 - DNA, 25 bp, Homo sapien
aatggtttactgtcatttgtccaat

SEQ ID NO: 5971551 - DNA, 25 bp, Homo sapien
gcctccgaaaagggttatccagttg

SEQ ID NO: 5971552 - DNA, 25 bp, Homo sapien
gattgccaatttggtggtgtcgacc

SEQ ID NO: 5971553 - DNA, 25 bp, Homo sapien
agcgttggacgaacaattcttagat

SEQ ID NO: 5971554 - DNA, 25 bp, Homo sapien
agtttggtacaaatcacttcgaatt

SEQ ID NO: 5971555 - DNA, 25 bp, Homo sapien
gctatcttgagaagcatcaatgttc

SEQ ID NO: 5971556 - DNA, 25 bp, Homo sapien
tggtttactgtcatttgtccaatat

SEQ ID NO: 5971557 - DNA, 25 bp, Homo sapien
tgctgatttcttgaaagcaggttgt

SEQ ID NO: 5971558 - DNA, 25 bp, Homo sapien
aaattgtccccacctgatctaaaaa

SEQ ID NO: 5971559 - DNA, 25 bp, Homo sapien
aattcttagatgttgattgccaatt

SEQ ID NO: 5971560 - DNA, 25 bp, Homo sapien
aatcagacaagaatttgccaacaac

SEQ ID NO: 5971561 - DNA, 25 bp, Homo sapien
ggcgctactaagaccaacgagattg

SEQ ID NO: 5971562 - DNA, 25 bp, Homo sapien
gtggttattttgttcctatgaccaa

SEQ ID NO: 5971563 - DNA, 25 bp, Homo sapien
caagaagtcttgaacccacaaatca

SEQ ID NO: 5971564 - DNA, 25 bp, Homo sapien
attgagtgggcttatctatccttta

SEQ ID NO: 5971565 - DNA, 25 bp, Homo sapien
gtctcattaccaagaacttgcaaga

SEQ ID NO: 5971566 - DNA, 25 bp, Homo sapien
ccaattacctacaaatccttcgaag

SEQ ID NO: 5971567 - DNA, 25 bp, Homo sapien
ccgcgcccactggaagacctcattg

SEQ ID NO: 5971568 - DNA, 25 bp, Homo sapien
tagattatccaacattgtttcacaa

SEQ ID NO: 5971569 - DNA, 25 bp, Homo sapien
tccattattgagtgggcttatctat

SEQ ID NO: 5971570 - DNA, 25 bp, Homo sapien
cctctgctgccacggttgaccctaa

SEQ ID NO: 5971571 - DNA, 25 bp, Homo sapien
caagaattgaagtttggtacaaatc

SEQ ID NO: 5971572 - DNA, 25 bp, Homo sapien
gctgatgttgtcaagcaagtcgcca

SEQ ID NO: 5971573 - DNA, 25 bp, Homo sapien
cccaggcgctactaagaccaacgag

SEQ ID NO: 5971574 - DNA, 25 bp, Homo sapien
agacaagaatttgccaacaacaagg

SEQ ID NO: 5971575 - DNA, 25 bp, Homo sapien
cgttcggtctcattaccaagaactt

SEQ ID NO: 5971576 - DNA, 25 bp, Homo sapien
aattgaccatcaaagctatcttgag

SEQ ID NO: 5971577 - DNA, 25 bp, Homo sapien
ctgttcttttagcagacttgcacgc

SEQ ID NO: 5971578 - DNA, 25 bp, Homo sapien
ttatccaacattgtttcacaaaacg

SEQ ID NO: 5971579 - DNA, 25 bp, Homo sapien
ttcgaagaaatgaaattggctttta

SEQ ID NO: 5971580 - DNA, 25 bp, Homo sapien
ggcgttcggtctcattaccaagaac

SEQ ID NO: 5971581 - DNA, 25 bp, Homo sapien
ctgcctctgatccgaattcaaaaat

SEQ ID NO: 5971582 - DNA, 25 bp, Homo sapien
acaaatcacttcgaattcttcattg

SEQ ID NO: 5971583 - DNA, 25 bp, Homo sapien
cttcttaccagctaactccagacta

SEQ ID NO: 5971584 - DNA, 25 bp, Homo sapien
aaagggttatccagttgccacacca

SEQ ID NO: 5971585 - DNA, 25 bp, Homo sapien
agaccaacgagattgccacgaaact

SEQ ID NO: 5971586 - DNA, 25 bp, Homo sapien
atttgccaacaacaaggaatttcaa

SEQ ID NO: 5971587 - DNA, 25 bp, Homo sapien
ccaatcagacaagaatttgccaaca

SEQ ID NO: 5971588 - DNA, 25 bp, Homo sapien
tggaagaaccaaagcaagttaagaa

SEQ ID NO: 5971589 - DNA, 25 bp, Homo sapien
cttttggaagaaccaaagcaagtta

SEQ ID NO: 5971590 - DNA, 25 bp, Homo sapien
tttggacaacatgaaggcgccattg

SEQ ID NO: 5971591 - DNA, 25 bp, Homo sapien
aaaagggcaggcgctgatgttgtca

SEQ ID NO: 5971592 - DNA, 25 bp, Homo sapien
ttactgtcatttgtccaatatgtca

SEQ ID NO: 5971593 - DNA, 25 bp, Homo sapien
agggccaaatactatgaattgacca

SEQ ID NO: 5971594 - DNA, 25 bp, Homo sapien
tcctttaatgcaagcgttggacgaa

SEQ ID NO: 5971595 - DNA, 25 bp, Homo sapien
ggtaccgcgcccactggaagacctc

SEQ ID NO: 5971596 - DNA, 25 bp, Homo sapien
ccacaaaagtcgaaaaaggctaaga

SEQ ID NO: 5971597 - DNA, 25 bp, Homo sapien
tatgtcattgcaccaatccaagaat

SEQ ID NO: 5971598 - DNA, 25 bp, Homo sapien
gtttggctcaaggtggtaaaatgtc

SEQ ID NO: 5971599 - DNA, 25 bp, Homo sapien
atactatgaattgaccatcaaagct

SEQ ID NO: 5971600 - DNA, 25 bp, Homo sapien
gcctctgatccgaattcaaaaatcg

SEQ ID NO: 5971601 - DNA, 25 bp, Homo sapien
caccaatccaagaattgaagtttgg

SEQ ID NO: 5971602 - DNA, 25 bp, Homo sapien
ggttccaggtttggctcaaggtggt

SEQ ID NO: 5971603 - DNA, 25 bp, Homo sapien
cctgatctaaaaattggtgttgctg

SEQ ID NO: 5971604 - DNA, 25 bp, Homo sapien
ataccatggatatctttagattatc

SEQ ID NO: 5971605 - DNA, 25 bp, Homo sapien
acgatgctaaaagggcaggcgctga

SEQ ID NO: 5971606 - DNA, 25 bp, Homo sapien
tgctgacgctatcaacgagctattg

SEQ ID NO: 5971607 - DNA, 25 bp, Homo sapien
tgttgattgccaatttggtggtgtc

SEQ ID NO: 5971608 - DNA, 25 bp, Homo sapien
atttggtggtgtcgaccagagaaaa

SEQ ID NO: 5971609 - DNA, 25 bp, Homo sapien
gccaatttggtggtgtcgaccagag

SEQ ID NO: 5971610 - DNA, 25 bp, Homo sapien
atcgaccttttggaagaaccaaagc

SEQ ID NO: 5971611 - DNA, 25 bp, Homo sapien
tttagattatccaacattgtttcac

SEQ ID NO: 5971612 - DNA, 25 bp, Homo sapien
cgttggacgaacaattcttagatgt

SEQ ID NO: 5971613 - DNA, 25 bp, Homo sapien
gttgttggctcttcttaccagctaa

SEQ ID NO: 5971614 - DNA, 25 bp, Homo sapien
cacaaaacgatgctaaaagggcagg

SEQ ID NO: 5971615 - DNA, 25 bp, Homo sapien
ccaagtttgggctacaagaaaagag

SEQ ID NO: 5971616 - DNA, 25 bp, Homo sapien
tcatttgtccaatatgtcattgcac

SEQ ID NO: 5971617 - DNA, 25 bp, Homo sapien
agaacttgcaagaagtcttgaaccc

SEQ ID NO: 5971618 - DNA, 25 bp, Homo sapien
agaagtcttgaacccacaaatcatc

SEQ ID NO: 5971619 - DNA, 25 bp, Homo sapien
actatgaattgaccatcaaagctat

SEQ ID NO: 5971620 - DNA, 25 bp, Homo sapien
gagctattggagccaatcagacaag

SEQ ID NO: 5971621 - DNA, 25 bp, Homo sapien
tctatcctttaatgcaagcgttgga

SEQ ID NO: 5971622 - DNA, 25 bp, Homo sapien
ccctatggttccaggtttggctcaa

SEQ ID NO: 5971623 - DNA, 25 bp, Homo sapien
taactccagactataccatggatat

SEQ ID NO: 5971624 - DNA, 25 bp, Homo sapien
aatgaaattggcttttaaagaagaa

SEQ ID NO: 5971625 - DNA, 25 bp, Homo sapien
aagaaaaagatcaatagtgcatttt

SEQ ID NO: 5971626 - DNA, 25 bp, Homo sapien
gtctgcctctgatccgaattcaaaa

SEQ ID NO: 5971627 - DNA, 25 bp, Homo sapien
caaagatgttctcgaagtacaaaag

SEQ ID NO: 5971628 - DNA, 25 bp, Homo sapien
tgcacgcctttttggacaacatgaa

SEQ ID NO: 5971629 - DNA, 25 bp, Homo sapien
gtcctctgctgccacggttgaccct

SEQ ID NO: 5971630 - DNA, 25 bp, Homo sapien
gaaaaagatcaatagtgcattttgt

SEQ ID NO: 5971631 - DNA, 25 bp, Homo sapien
gtttgggctacaagaaaagagcaca

SEQ ID NO: 5971632 - DNA, 25 bp, Homo sapien
aagaaatgaaattggcttttaaaga

SEQ ID NO: 5971633 - DNA, 25 bp, Homo sapien
cggttgaccctaatgaggcgttcgg

SEQ ID NO: 5971634 - DNA, 25 bp, Homo sapien
ggctcttcttaccagctaactccag

SEQ ID NO: 5971635 - DNA, 25 bp, Homo sapien
tatcttgagaagcatcaatgttcca

SEQ ID NO: 5971636 - DNA, 25 bp, Homo sapien
cacctgatctaaaaattggtgttgc

SEQ ID NO: 5971637 - DNA, 25 bp, Homo sapien
atcaacgagctattggagccaatca

SEQ ID NO: 5971638 - DNA, 25 bp, Homo sapien
gttgtcaagcaagtcgccaatccat

SEQ ID NO: 5971639 - DNA, 25 bp, Homo sapien
gcccactggaagacctcattgtggt

SEQ ID NO: 5971640 - DNA, 25 bp, Homo sapien
tgtagccccggtaacgtcgaagaga

SEQ ID NO: 5971641 - DNA, 25 bp, Homo sapien
agccaatcagacaagaatttgccaa

SEQ ID NO: 5971642 - DNA, 25 bp, Homo sapien
ctaaaaattggtgttgctgacgcta

SEQ ID NO: 5971643 - DNA, 25 bp, Homo sapien
aagatcaatagtgcattttgtagcc

SEQ ID NO: 5971644 - DNA, 25 bp, Homo sapien
tcttgagaagcatcaatgttccaat

SEQ ID NO: 5971645 - DNA, 25 bp, Homo sapien
ccaaatactatgaattgaccatcaa

SEQ ID NO: 5971646 - DNA, 25 bp, Homo sapien
cctatgaccaagcttgctgatttct

SEQ ID NO: 5971647 - DNA, 25 bp, Homo sapien
caaggtggtaaaatgtctgcctctg

SEQ ID NO: 5971648 - DNA, 25 bp, Homo sapien
gtgtcgaccagagaaaaatttttgt

SEQ ID NO: 5971649 - DNA, 25 bp, Homo sapien
ttaccagctaactccagactatacc

SEQ ID NO: 5971650 - DNA, 25 bp, Homo sapien
ctactaagaccaacgagattgccac

SEQ ID NO: 5971651 - DNA, 25 bp, Homo sapien
gcaggcgctgatgttgtcaagcaag

SEQ ID NO: 5971652 - DNA, 25 bp, Homo sapien
caagcgttggacgaacaattcttag

SEQ ID NO: 5971653 - DNA, 25 bp, Homo sapien
aacccacaaatcatcaaagatgttc

SEQ ID NO: 5971654 - DNA, 25 bp, Homo sapien
tgttccaattgaaaagctaaaattt

SEQ ID NO: 5971655 - DNA, 25 bp, Homo sapien
gccccggtaacgtcgaagagaatgg

SEQ ID NO: 5971656 - DNA, 25 bp, Homo sapien
actccagactataccatggatatct

SEQ ID NO: 5971657 - DNA, 25 bp, Homo sapien
atggttccaggtttggctcaaggtg

SEQ ID NO: 5971658 - DNA, 25 bp, Homo sapien
tgtcatttgtccaatatgtcattgc

SEQ ID NO: 5971659 - DNA, 25 bp, Homo sapien
atcaaagctatcttgagaagcatca

SEQ ID NO: 5971660 - DNA, 25 bp, Homo sapien
tttggaagaaccaaagcaagttaag

SEQ ID NO: 5971661 - DNA, 25 bp, Homo sapien
ggggtaccgcgcccactggaagacc

SEQ ID NO: 5971662 - DNA, 25 bp, Homo sapien
caagaggcctccgaaaagggttatc

SEQ ID NO: 5971663 - DNA, 25 bp, Homo sapien
tgaccaagcttgctgatttcttgaa

SEQ ID NO: 5971664 - DNA, 25 bp, Homo sapien
cttgaacccacaaatcatcaaagat

SEQ ID NO: 5971665 - DNA, 25 bp, Homo sapien
actaagaccaacgagattgccacga

SEQ ID NO: 5971666 - DNA, 25 bp, Homo sapien
gttcggtggtccaattacctacaaa

SEQ ID NO: 5971667 - DNA, 25 bp, Homo sapien
agttaagaaaaagatcaatagtgca

SEQ ID NO: 5971668 - DNA, 25 bp, Homo sapien
ccaatccattattgagtgggcttat

SEQ ID NO: 5971669 - DNA, 25 bp, Homo sapien
tttttggacaacatgaaggcgccat

SEQ ID NO: 5971670 - DNA, 25 bp, Homo sapien
gagacatttgaaattatactggggt

SEQ ID NO: 5971671 - DNA, 25 bp, Homo sapien
gactataccatggatatctttagat

SEQ ID NO: 5971672 - DNA, 25 bp, Homo sapien
cctttttggacaacatgaaggcgcc

SEQ ID NO: 5971673 - DNA, 25 bp, Homo sapien
agcagacttgcacgcctttttggac

SEQ ID NO: 5971674 - DNA, 25 bp, Homo sapien
gatcaatagtgcattttgtagcccc

SEQ ID NO: 5971675 - DNA, 25 bp, Homo sapien
ccaacattgtttcacaaaacgatgc

SEQ ID NO: 5971676 - DNA, 25 bp, Homo sapien
tgtcaagcaagtcgccaatccatta

SEQ ID NO: 5971677 - DNA, 25 bp, Homo sapien
gaggcgttcggtctcattaccaaga

SEQ ID NO: 5971678 - DNA, 25 bp, Homo sapien
agggttatccagttgccacaccaca

SEQ ID NO: 5971679 - DNA, 25 bp, Homo sapien
ggccaaatactatgaattgaccatc

SEQ ID NO: 5971680 - DNA, 25 bp, Homo sapien
caacaacaaggaatttcaagaggcc

SEQ ID NO: 5971681 - DNA, 25 bp, Homo sapien
tattggagccaatcagacaagaatt

SEQ ID NO: 5971682 - DNA, 25 bp, Homo sapien
ttgccacgaaactagaggaaaccaa

SEQ ID NO: 5971683 - DNA, 25 bp, Homo sapien
taatgaggcgttcggtctcattacc

SEQ ID NO: 5971684 - DNA, 25 bp, Homo sapien
tttgttcctatgaccaagcttgctg

SEQ ID NO: 5971685 - DNA, 25 bp, Homo sapien
attgtccccacctgatctaaaaatt

SEQ ID NO: 5971686 - DNA, 25 bp, Homo sapien
cacgcctttttggacaacatgaagg

SEQ ID NO: 5971687 - DNA, 25 bp, Homo sapien
ccagttgccacaccacaaaagtcga

SEQ ID NO: 5971688 - DNA, 25 bp, Homo sapien
tccagactataccatggatatcttt

SEQ ID NO: 5971689 - DNA, 25 bp, Homo sapien
gaaaatttaccaagtttgggctaca

SEQ ID NO: 5971690 - DNA, 25 bp, Homo sapien
tgaccctaatgaggcgttcggtctc

SEQ ID NO: 5971691 - DNA, 25 bp, Homo sapien
ttcacaaaacgatgctaaaagggca

SEQ ID NO: 5971692 - DNA, 25 bp, Homo sapien
cattggaagtggtgaactatagggc

SEQ ID NO: 5971693 - DNA, 25 bp, Homo sapien
ataagggtactaagtacccaggcgc

SEQ ID NO: 5971694 - DNA, 25 bp, Homo sapien
gtacaaatcacttcgaattcttcat

SEQ ID NO: 5971695 - DNA, 25 bp, Homo sapien
aagagacatttgaaattatactggg

SEQ ID NO: 5971696 - DNA, 25 bp, Homo sapien
cagacttgcacgcctttttggacaa

SEQ ID NO: 5971697 - DNA, 25 bp, Homo sapien
gagattgccacgaaactagaggaaa

SEQ ID NO: 5971698 - DNA, 25 bp, Homo sapien
ggctcaaggtggtaaaatgtctgcc

SEQ ID NO: 5971699 - DNA, 25 bp, Homo sapien
ttcaagaggcctccgaaaagggtta

SEQ ID NO: 5971700 - DNA, 25 bp, Homo sapien
gaagtttggtacaaatcacttcgaa

SEQ ID NO: 5971701 - DNA, 25 bp, Homo sapien
tagccccggtaacgtcgaagagaat

SEQ ID NO: 5971702 - DNA, 25 bp, Homo sapien
tttgtagccccggtaacgtcgaaga

SEQ ID NO: 5971703 - DNA, 25 bp, Homo sapien
agaaaagagcacatttaatgaaccc

SEQ ID NO: 5971704 - DNA, 25 bp, Homo sapien
gccacggttgaccctaatgaggcgt

SEQ ID NO: 5971705 - DNA, 25 bp, Homo sapien
ccaatatgtcattgcaccaatccaa

SEQ ID NO: 5971706 - DNA, 25 bp, Homo sapien
tacaagaaaagagcacatttaatga

SEQ ID NO: 5971707 - DNA, 25 bp, Homo sapien
ggagccaatcagacaagaatttgcc

SEQ ID NO: 5971708 - DNA, 25 bp, Homo sapien
tcgaaaaaggctaagaaaccaaaga

SEQ ID NO: 5971709 - DNA, 25 bp, Homo sapien
cacgaaactagaggaaaccaaattg

SEQ ID NO: 5971710 - DNA, 25 bp, Homo sapien
ttgaccatcaaagctatcttgagaa

SEQ ID NO: 5971711 - DNA, 25 bp, Homo sapien
gatgttctcgaagtacaaaagagac

SEQ ID NO: 5971712 - DNA, 25 bp, Homo sapien
ctcaaggtggtaaaatgtctgcctc

SEQ ID NO: 5971713 - DNA, 25 bp, Homo sapien
gcgctgatgttgtcaagcaagtcgc

SEQ ID NO: 5971714 - DNA, 25 bp, Homo sapien
gaattcttcattgatagaccagaaa

SEQ ID NO: 5971715 - DNA, 25 bp, Homo sapien
ggttatccagttgccacaccacaaa

SEQ ID NO: 5971716 - DNA, 25 bp, Homo sapien
ccttcgaagaaatgaaattggcttt

SEQ ID NO: 5971717 - DNA, 25 bp, Homo sapien
gtgttgctgacgctatcaacgagct

SEQ ID NO: 5971718 - DNA, 25 bp, Homo sapien
cgaagtacaaaagagacatttgaaa

SEQ ID NO: 5971719 - DNA, 25 bp, Homo sapien
ttttgtcttagcggaagaaaattta

SEQ ID NO: 5971720 - DNA, 25 bp, Homo sapien
ggtgaactatagggccaaatactat

SEQ ID NO: 5971721 - DNA, 25 bp, Homo sapien
tgaattgaccatcaaagctatcttg

SEQ ID NO: 5971722 - DNA, 25 bp, Homo sapien
aagctaaaatttgttgttggctctt

SEQ ID NO: 5971723 - DNA, 25 bp, Homo sapien
gcaagtcgccaatccattattgagt

SEQ ID NO: 5971724 - DNA, 25 bp, Homo sapien
ttgatagaccagaaaagttcggtgg

SEQ ID NO: 5971725 - DNA, 25 bp, Homo sapien
cattgtttcacaaaacgatgctaaa

SEQ ID NO: 5971726 - DNA, 25 bp, Homo sapien
ttggctcttcttaccagctaactcc

SEQ ID NO: 5971727 - DNA, 25 bp, Homo sapien
ttggagccaatcagacaagaatttg

SEQ ID NO: 5971728 - DNA, 25 bp, Homo sapien
taccaagtttgggctacaagaaaag

SEQ ID NO: 5971729 - DNA, 25 bp, Homo sapien
gaagagaatggtttactgtcatttg

SEQ ID NO: 5971730 - DNA, 25 bp, Homo sapien
atctaaaaattggtgttgctgacgc

SEQ ID NO: 5971731 - DNA, 25 bp, Homo sapien
ggtggtgtcgaccagagaaaaattt

SEQ ID NO: 5971732 - DNA, 25 bp, Homo sapien
gaccagaaaagttcggtggtccaat

SEQ ID NO: 5971733 - DNA, 25 bp, Homo sapien
aacattgtttcacaaaacgatgcta

SEQ ID NO: 5971734 - DNA, 25 bp, Homo sapien
tgcaagcgttggacgaacaattctt

SEQ ID NO: 5971735 - DNA, 25 bp, Homo sapien
gacatttgaaattatactggggtac

SEQ ID NO: 5971736 - DNA, 25 bp, Homo sapien
tcaagcaagtcgccaatccattatt

SEQ ID NO: 5971737 - DNA, 25 bp, Homo sapien
aggaatttcaagaggcctccgaaaa

SEQ ID NO: 5971738 - DNA, 25 bp, Homo sapien
tggatatctttagattatccaacat

SEQ ID NO: 5971739 - DNA, 25 bp, Homo sapien
aaaagatcaatagtgcattttgtag

SEQ ID NO: 5971740 - DNA, 25 bp, Homo sapien
tcttgaaagcaggttgtgaagtgac

SEQ ID NO: 5971741 - DNA, 25 bp, Homo sapien
gctattggagccaatcagacaagaa

SEQ ID NO: 5971742 - DNA, 25 bp, Homo sapien
tacccaggcgctactaagaccaacg

SEQ ID NO: 5971743 - DNA, 25 bp, Homo sapien
ctgacgctatcaacgagctattgga

SEQ ID NO: 5971744 - DNA, 25 bp, Homo sapien
taaaatttgttgttggctcttctta

SEQ ID NO: 5971745 - DNA, 25 bp, Homo sapien
tgttcctatgaccaagcttgctgat

SEQ ID NO: 5971746 - DNA, 25 bp, Homo sapien
gcacatttaatgaaccctatggttc

SEQ ID NO: 5971747 - DNA, 25 bp, Homo sapien
gaagaaaaattgtccccacctgatc

SEQ ID NO: 5971748 - DNA, 25 bp, Homo sapien
tgtcattgcaccaatccaagaattg

SEQ ID NO: 5971749 - DNA, 25 bp, Homo sapien
aaatactatgaattgaccatcaaag

SEQ ID NO: 5971750 - DNA, 25 bp, Homo sapien
tatgaccaagcttgctgatttcttg

SEQ ID NO: 5971751 - DNA, 25 bp, Homo sapien
tgctgccacggttgaccctaatgag

SEQ ID NO: 5971752 - DNA, 25 bp, Homo sapien
ttggtggtgtcgaccagagaaaaat

SEQ ID NO: 5971753 - DNA, 25 bp, Homo sapien
caaatcatcaaagatgttctcgaag

SEQ ID NO: 5971754 - DNA, 25 bp, Homo sapien
aaccctatggttccaggtttggctc

SEQ ID NO: 5971755 - DNA, 25 bp, Homo sapien
accaacgagattgccacgaaactag

SEQ ID NO: 5971756 - DNA, 25 bp, Homo sapien
cacttcgaattcttcattgatagac

SEQ ID NO: 5971757 - DNA, 25 bp, Homo sapien
ccatcaaagctatcttgagaagcat

SEQ ID NO: 5971758 - DNA, 25 bp, Homo sapien
atgtctgcctctgatccgaattcaa

SEQ ID NO: 5971759 - DNA, 25 bp, Homo sapien
cacaaatcatcaaagatgttctcga

SEQ ID NO: 5971760 - DNA, 25 bp, Homo sapien
acaaatccttcgaagaaatgaaatt

SEQ ID NO: 5971761 - DNA, 25 bp, Homo sapien
tcatcaaagatgttctcgaagtaca

SEQ ID NO: 5971762 - DNA, 25 bp, Homo sapien
tggtgtcgaccagagaaaaattttt

SEQ ID NO: 5971763 - DNA, 25 bp, Homo sapien
ttcctatgaccaagcttgctgattt

SEQ ID NO: 5971764 - DNA, 25 bp, Homo sapien
ttggacgaacaattcttagatgttg

SEQ ID NO: 5971765 - DNA, 25 bp, Homo sapien
aacaaggaatttcaagaggcctccg

SEQ ID NO: 5971766 - DNA, 25 bp, Homo sapien
gtaacgtcgaagagaatggtttact

SEQ ID NO: 5971767 - DNA, 25 bp, Homo sapien
cgaattcaaaaatcgaccttttgga

SEQ ID NO: 5971768 - DNA, 25 bp, Homo sapien
agaatggtttactgtcatttgtcca

SEQ ID NO: 5971769 - DNA, 25 bp, Homo sapien
atccaacattgtttcacaaaacgat

SEQ ID NO: 5971770 - DNA, 25 bp, Homo sapien
caccacaaaagtcgaaaaaggctaa

SEQ ID NO: 5971771 - DNA, 25 bp, Homo sapien
gaagacctcattgtggttattttgt

SEQ ID NO: 5971772 - DNA, 25 bp, Homo sapien
gccacaccacaaaagtcgaaaaagg

SEQ ID NO: 5971773 - DNA, 25 bp, Homo sapien
acgaacaattcttagatgttgattg

SEQ ID NO: 5971774 - DNA, 25 bp, Homo sapien
tggtccaattacctacaaatccttc

SEQ ID NO: 5971775 - DNA, 25 bp, Homo sapien
ttgccacaccacaaaagtcgaaaaa

SEQ ID NO: 5971776 - DNA, 25 bp, Homo sapien
taagtacccaggcgctactaagacc

SEQ ID NO: 5971777 - DNA, 25 bp, Homo sapien
gacttgcacgcctttttggacaaca

SEQ ID NO: 5971778 - DNA, 25 bp, Homo sapien
aatgaaccctatggttccaggtttg

SEQ ID NO: 5971779 - DNA, 25 bp, Homo sapien
accctaatgaggcgttcggtctcat

SEQ ID NO: 5971780 - DNA, 25 bp, Homo sapien
ttaccaagaacttgcaagaagtctt

SEQ ID NO: 5971781 - DNA, 25 bp, Homo sapien
tgtccccacctgatctaaaaattgg

SEQ ID NO: 5971782 - DNA, 25 bp, Homo sapien
aagtgactgttcttttagcagactt

SEQ ID NO: 5971783 - DNA, 25 bp, Homo sapien
gttgctgacgctatcaacgagctat

SEQ ID NO: 5971784 - DNA, 25 bp, Homo sapien
tatctttagattatccaacattgtt

SEQ ID NO: 5971785 - DNA, 25 bp, Homo sapien
cgaagaaatgaaattggcttttaaa

SEQ ID NO: 5971786 - DNA, 25 bp, Homo sapien
ttcttagatgttgattgccaatttg

SEQ ID NO: 5971787 - DNA, 25 bp, Homo sapien
ggacgaacaattcttagatgttgat

SEQ ID NO: 5971788 - DNA, 25 bp, Homo sapien
ctcttcttaccagctaactccagac

SEQ ID NO: 5971789 - DNA, 25 bp, Homo sapien
gtcgccaatccattattgagtgggc

SEQ ID NO: 5971790 - DNA, 25 bp, Homo sapien
actaagtacccaggcgctactaaga

SEQ ID NO: 5971791 - DNA, 25 bp, Homo sapien
gggcaggcgctgatgttgtcaagca

SEQ ID NO: 5971792 - DNA, 25 bp, Homo sapien
tcaatagtgcattttgtagccccgg

SEQ ID NO: 5971793 - DNA, 25 bp, Homo sapien
agcatcaatgttccaattgaaaagc

SEQ ID NO: 5971794 - DNA, 25 bp, Homo sapien
accatggatatctttagattatcca

SEQ ID NO: 5971795 - DNA, 25 bp, Homo sapien
tggtgttgctgacgctatcaacgag

SEQ ID NO: 5971796 - DNA, 25 bp, Homo sapien
aggtggtaaaatgtctgcctctgat

SEQ ID NO: 5971797 - DNA, 25 bp, Homo sapien
tatcctttaatgcaagcgttggacg

SEQ ID NO: 5971798 - DNA, 25 bp, Homo sapien
gaaatgaaattggcttttaaagaag

SEQ ID NO: 5971799 - DNA, 25 bp, Homo sapien
acgagattgccacgaaactagagga

SEQ ID NO: 5971800 - DNA, 25 bp, Homo sapien
attcttcattgatagaccagaaaag

SEQ ID NO: 5971801 - DNA, 25 bp, Homo sapien
gtttcacaaaacgatgctaaaaggg

SEQ ID NO: 5971802 - DNA, 25 bp, Homo sapien
tcggtggtccaattacctacaaatc

SEQ ID NO: 5971803 - DNA, 25 bp, Homo sapien
gctaaaatttgttgttggctcttct

SEQ ID NO: 5971804 - DNA, 25 bp, Homo sapien
tatgaattgaccatcaaagctatct

SEQ ID NO: 5971805 - DNA, 25 bp, Homo sapien
gacgctatcaacgagctattggagc

SEQ ID NO: 5971806 - DNA, 25 bp, Homo sapien
aatcatcaaagatgttctcgaagta

SEQ ID NO: 5971807 - DNA, 25 bp, Homo sapien
cattattgagtgggcttatctatcc

SEQ ID NO: 5971808 - DNA, 25 bp, Homo sapien
ctataccatggatatctttagatta

SEQ ID NO: 5971809 - DNA, 25 bp, Homo sapien
gcattttgtagccccggtaacgtcg

SEQ ID NO: 5971810 - DNA, 25 bp, Homo sapien
aatttaccaagtttgggctacaaga

SEQ ID NO: 5971811 - DNA, 25 bp, Homo sapien
gttgtgaagtgactgttcttttagc

SEQ ID NO: 5971812 - DNA, 25 bp, Homo sapien
tcagacaagaatttgccaacaacaa

SEQ ID NO: 5971813 - DNA, 25 bp, Homo sapien
taccgcgcccactggaagacctcat

SEQ ID NO: 5971814 - DNA, 25 bp, Homo sapien
tcattgcaccaatccaagaattgaa

SEQ ID NO: 5971815 - DNA, 25 bp, Homo sapien
gaacaattcttagatgttgattgcc

SEQ ID NO: 5971816 - DNA, 25 bp, Homo sapien
tgaacccacaaatcatcaaagatgt

SEQ ID NO: 5971817 - DNA, 25 bp, Homo sapien
aagagcacatttaatgaaccctatg

SEQ ID NO: 5971818 - DNA, 25 bp, Homo sapien
ttgattgccaatttggtggtgtcga

SEQ ID NO: 5971819 - DNA, 25 bp, Homo sapien
gaatttcaagaggcctccgaaaagg

SEQ ID NO: 5971820 - DNA, 25 bp, Homo sapien
aagtcttgaacccacaaatcatcaa

SEQ ID NO: 5971821 - DNA, 25 bp, Homo sapien
aagtcgccaatccattattgagtgg

SEQ ID NO: 5971822 - DNA, 25 bp, Homo sapien
gggtactaagtacccaggcgctact

SEQ ID NO: 5971823 - DNA, 25 bp, Homo sapien
aaatttgttgttggctcttcttacc

SEQ ID NO: 5971824 - DNA, 25 bp, Homo sapien
caacgagattgccacgaaactagag

SEQ ID NO: 5971825 - DNA, 25 bp, Homo sapien
ggcttatctatcctttaatgcaagc

SEQ ID NO: 5971826 - DNA, 25 bp, Homo sapien
aggcgccattggaagtggtgaacta

SEQ ID NO: 5971827 - DNA, 25 bp, Homo sapien
cgaccagagaaaaatttttgtctta

SEQ ID NO: 5971828 - DNA, 25 bp, Homo sapien
acaattcttagatgttgattgccaa

SEQ ID NO: 5971829 - DNA, 25 bp, Homo sapien
atccttcgaagaaatgaaattggct

SEQ ID NO: 5971830 - DNA, 25 bp, Homo sapien
tttggtacaaatcacttcgaattct

SEQ ID NO: 5971831 - DNA, 25 bp, Homo sapien
tagtgcattttgtagccccggtaac

SEQ ID NO: 5971832 - DNA, 25 bp, Homo sapien
ttggaagtggtgaactatagggcca

SEQ ID NO: 5971833 - DNA, 25 bp, Homo sapien
ttgtggttattttgttcctatgacc

SEQ ID NO: 5971834 - DNA, 25 bp, Homo sapien
cttcgaattcttcattgatagacca

SEQ ID NO: 5971835 - DNA, 25 bp, Homo sapien
ctttaatgcaagcgttggacgaaca

SEQ ID NO: 5971836 - DNA, 25 bp, Homo sapien
aagctatcttgagaagcatcaatgt

SEQ ID NO: 5971837 - DNA, 25 bp, Homo sapien
aagcaggttgtgaagtgactgttct

SEQ ID NO: 5971838 - DNA, 25 bp, Homo sapien
aggcgctgatgttgtcaagcaagtc

SEQ ID NO: 5971839 - DNA, 25 bp, Homo sapien
cttgcacgcctttttggacaacatg

SEQ ID NO: 5971840 - DNA, 25 bp, Homo sapien
tgggcttatctatcctttaatgcaa

SEQ ID NO: 5971841 - DNA, 25 bp, Homo sapien
tcgaagagaatggtttactgtcatt

SEQ ID NO: 5971842 - DNA, 25 bp, Homo sapien
acatgaaggcgccattggaagtggt

SEQ ID NO: 5971843 - DNA, 25 bp, Homo sapien
gactgttcttttagcagacttgcac

SEQ ID NO: 5971844 - DNA, 25 bp, Homo sapien
ttcggtctcattaccaagaacttgc

SEQ ID NO: 5971845 - DNA, 25 bp, Homo sapien
cacaccacaaaagtcgaaaaaggct

SEQ ID NO: 5971846 - DNA, 25 bp, Homo sapien
agaggcctccgaaaagggttatcca

SEQ ID NO: 5971847 - DNA, 25 bp, Homo sapien
tttcttgaaagcaggttgtgaagtg

SEQ ID NO: 5971848 - DNA, 25 bp, Homo sapien
aaaaattggtgttgctgacgctatc

SEQ ID NO: 5971849 - DNA, 25 bp, Homo sapien
attggtgttgctgacgctatcaacg

SEQ ID NO: 5971850 - DNA, 25 bp, Homo sapien
aaattggtgttgctgacgctatcaa

SEQ ID NO: 5971851 - DNA, 25 bp, Homo sapien
attcaaaaatcgaccttttggaaga

SEQ ID NO: 5971852 - DNA, 25 bp, Homo sapien
tggtacaaatcacttcgaattcttc

SEQ ID NO: 5971853 - DNA, 25 bp, Homo sapien
ttgaagtttggtacaaatcacttcg

SEQ ID NO: 5971854 - DNA, 25 bp, Homo sapien
taagaccaacgagattgccacgaaa

SEQ ID NO: 5971855 - DNA, 25 bp, Homo sapien
tggaagacctcattgtggttatttt

SEQ ID NO: 5971856 - DNA, 25 bp, Homo sapien
gtggtaaaatgtctgcctctgatcc

SEQ ID NO: 5971857 - DNA, 25 bp, Homo sapien
ggtggtccaattacctacaaatcct

SEQ ID NO: 5971858 - DNA, 25 bp, Homo sapien
tgaaaagctaaaatttgttgttggc

SEQ ID NO: 5971859 - DNA, 25 bp, Homo sapien
gatgctaaaagggcaggcgctgatg

SEQ ID NO: 5971860 - DNA, 25 bp, Homo sapien
cagactataccatggatatctttag

SEQ ID NO: 5971861 - DNA, 25 bp, Homo sapien
cgcctttttggacaacatgaaggcg

SEQ ID NO: 5971862 - DNA, 25 bp, Homo sapien
atccagttgccacaccacaaaagtc

SEQ ID NO: 5971863 - DNA, 25 bp, Homo sapien
tttaccaagtttgggctacaagaaa

SEQ ID NO: 5971864 - DNA, 25 bp, Homo sapien
gatccgaattcaaaaatcgaccttt

SEQ ID NO: 5971865 - DNA, 25 bp, Homo sapien
ccaattgaaaagctaaaatttgttg

SEQ ID NO: 5971866 - DNA, 25 bp, Homo sapien
gctaactccagactataccatggat

SEQ ID NO: 5971867 - DNA, 25 bp, Homo sapien
cgaccttttggaagaaccaaagcaa

SEQ ID NO: 5971868 - DNA, 25 bp, Homo sapien
ttattttgttcctatgaccaagctt

SEQ ID NO: 5971869 - DNA, 25 bp, Homo sapien
caacgagctattggagccaatcaga

SEQ ID NO: 5971870 - DNA, 25 bp, Homo sapien
caagaacttgcaagaagtcttgaac

SEQ ID NO: 5971871 - DNA, 25 bp, Homo sapien
tgatctaaaaattggtgttgctgac

SEQ ID NO: 5971872 - DNA, 25 bp, Homo sapien
tccgaattcaaaaatcgaccttttg

SEQ ID NO: 5971873 - DNA, 25 bp, Homo sapien
aagaagaaaaattgtccccacctga

SEQ ID NO: 5971874 - DNA, 25 bp, Homo sapien
tcttttagcagacttgcacgccttt

SEQ ID NO: 5971875 - DNA, 25 bp, Homo sapien
tctgctgccacggttgaccctaatg

SEQ ID NO: 5971876 - DNA, 25 bp, Homo sapien
ttgtttcacaaaacgatgctaaaag

SEQ ID NO: 5971877 - DNA, 25 bp, Homo sapien
gcgccattggaagtggtgaactata

SEQ ID NO: 5971878 - DNA, 25 bp, Homo sapien
actggaagacctcattgtggttatt

SEQ ID NO: 5971879 - DNA, 25 bp, Homo sapien
tctttagattatccaacattgtttc

SEQ ID NO: 5971880 - DNA, 25 bp, Homo sapien
tgttctcgaagtacaaaagagacat

SEQ ID NO: 5971881 - DNA, 25 bp, Homo sapien
atcaaagatgttctcgaagtacaaa

SEQ ID NO: 5971882 - DNA, 25 bp, Homo sapien
gagaaaaatttttgtcttagcggaa

SEQ ID NO: 5971883 - DNA, 25 bp, Homo sapien
tcttcattgatagaccagaaaagtt

SEQ ID NO: 5971884 - DNA, 25 bp, Homo sapien
ttgtccaatatgtcattgcaccaat

SEQ ID NO: 5971885 - DNA, 25 bp, Homo sapien
taaaatgtctgcctctgatccgaat

SEQ ID NO: 5971886 - DNA, 25 bp, Homo sapien
aacgtcgaagagaatggtttactgt

SEQ ID NO: 5971887 - DNA, 25 bp, Homo sapien
tgaaattatactggggtaccgcgcc

SEQ ID NO: 5971888 - DNA, 25 bp, Homo sapien
ctgatccgaattcaaaaatcgacct

SEQ ID NO: 5971889 - DNA, 25 bp, Homo sapien
cagagaaaaatttttgtcttagcgg

SEQ ID NO: 5971890 - DNA, 25 bp, Homo sapien
gattatccaacattgtttcacaaaa

SEQ ID NO: 5971891 - DNA, 25 bp, Homo sapien
ttattgagtgggcttatctatcctt

SEQ ID NO: 5971892 - DNA, 25 bp, Homo sapien
gaaagcaggttgtgaagtgactgtt

SEQ ID NO: 5971893 - DNA, 25 bp, Homo sapien
caagcttgctgatttcttgaaagca

SEQ ID NO: 5971894 - DNA, 25 bp, Homo sapien
acaagaatttgccaacaacaaggaa

SEQ ID NO: 5971895 - DNA, 25 bp, Homo sapien
cctaatgaggcgttcggtctcatta

SEQ ID NO: 5971896 - DNA, 25 bp, Homo sapien
cttagatgttgattgccaatttggt

SEQ ID NO: 5971897 - DNA, 25 bp, Homo sapien
agacctcattgtggttattttgttc

SEQ ID NO: 5971898 - DNA, 25 bp, Homo sapien
caggcgctactaagaccaacgagat

SEQ ID NO: 5971899 - DNA, 25 bp, Homo sapien
gtttactgtcatttgtccaatatgt

SEQ ID NO: 5971900 - DNA, 25 bp, Homo sapien
gtggtgaactatagggccaaatact

SEQ ID NO: 5971901 - DNA, 25 bp, Homo sapien
aaaagctaaaatttgttgttggctc

SEQ ID NO: 5971902 - DNA, 25 bp, Homo sapien
gcaggttgtgaagtgactgttcttt

SEQ ID NO: 5971903 - DNA, 25 bp, Homo sapien
atttgtccaatatgtcattgcacca

SEQ ID NO: 5971904 - DNA, 25 bp, Homo sapien
gctaagaaaccaaagaataagggta

SEQ ID NO: 5971905 - DNA, 25 bp, Homo sapien
tatctatcctttaatgcaagcgttg

SEQ ID NO: 5971906 - DNA, 25 bp, Homo sapien
gttcttttagcagacttgcacgcct

SEQ ID NO: 5971907 - DNA, 25 bp, Homo sapien
ttccaggtttggctcaaggtggtaa

SEQ ID NO: 5971908 - DNA, 25 bp, Homo sapien
ctggggtaccgcgcccactggaaga

SEQ ID NO: 5971909 - DNA, 25 bp, Homo sapien
tttgaaattatactggggtaccgcg

SEQ ID NO: 5971910 - DNA, 25 bp, Homo sapien
aagtggtgaactatagggccaaata

SEQ ID NO: 5971911 - DNA, 25 bp, Homo sapien
ctaaaagggcaggcgctgatgttgt

SEQ ID NO: 5971912 - DNA, 25 bp, Homo sapien
cccacaaatcatcaaagatgttctc

SEQ ID NO: 5971913 - DNA, 25 bp, Homo sapien
caaggaatttcaagaggcctccgaa

SEQ ID NO: 5971914 - DNA, 25 bp, Homo sapien
aacttgcaagaagtcttgaacccac

SEQ ID NO: 5971915 - DNA, 25 bp, Homo sapien
aaattatactggggtaccgcgccca

SEQ ID NO: 5971916 - DNA, 25 bp, Homo sapien
aatgttccaattgaaaagctaaaat

SEQ ID NO: 5971917 - DNA, 25 bp, Homo sapien
tgatgttgtcaagcaagtcgccaat

SEQ ID NO: 5971918 - DNA, 25 bp, Homo sapien
gccattggaagtggtgaactatagg

SEQ ID NO: 5971919 - DNA, 25 bp, Homo sapien
ccactggaagacctcattgtggtta

SEQ ID NO: 5971920 - DNA, 25 bp, Homo sapien
tcaatgttccaattgaaaagctaaa

SEQ ID NO: 5971921 - DNA, 25 bp, Homo sapien
aattacctacaaatccttcgaagaa

SEQ ID NO: 5971922 - DNA, 25 bp, Homo sapien
catttgaaattatactggggtaccg

SEQ ID NO: 5971923 - DNA, 25 bp, Homo sapien
tatactggggtaccgcgcccactgg

SEQ ID NO: 5971924 - DNA, 25 bp, Homo sapien
ttttagcagacttgcacgccttttt

SEQ ID NO: 5971925 - DNA, 25 bp, Homo sapien
accagagaaaaatttttgtcttagc

SEQ ID NO: 5971926 - DNA, 25 bp, Homo sapien
tagaccagaaaagttcggtggtcca

SEQ ID NO: 5971927 - DNA, 25 bp, Homo sapien
caatttggtggtgtcgaccagagaa

SEQ ID NO: 5971928 - DNA, 25 bp, Homo sapien
ctatagggccaaatactatgaattg

SEQ ID NO: 5971929 - DNA, 25 bp, Homo sapien
catggatatctttagattatccaac

SEQ ID NO: 5971930 - DNA, 25 bp, Homo sapien
ttgaaagcaggttgtgaagtgactg

SEQ ID NO: 5971931 - DNA, 25 bp, Homo sapien
aaaagagacatttgaaattatactg

SEQ ID NO: 5971932 - DNA, 25 bp, Homo sapien
cattgatagaccagaaaagttcggt

SEQ ID NO: 5971933 - DNA, 25 bp, Homo sapien
ttttgaattcggatcagaggcagac

SEQ ID NO: 5971934 - DNA, 25 bp, Homo sapien
attgatgcttctcaagatagctttg

SEQ ID NO: 5971935 - DNA, 25 bp, Homo sapien
acaaaatgcactattgatctttttc

SEQ ID NO: 5971936 - DNA, 25 bp, Homo sapien
caaattcttgtctgattggctccaa

SEQ ID NO: 5971937 - DNA, 25 bp, Homo sapien
gtgcaagtctgctaaaagaacagtc

SEQ ID NO: 5971938 - DNA, 25 bp, Homo sapien
ttccagtgggcgcggtaccccagta

SEQ ID NO: 5971939 - DNA, 25 bp, Homo sapien
cgtccaacgcttgcattaaaggata

SEQ ID NO: 5971940 - DNA, 25 bp, Homo sapien
agttagctggtaagaagagccaaca

SEQ ID NO: 5971941 - DNA, 25 bp, Homo sapien
agacaaaaatttttctctggtcgac

SEQ ID NO: 5971942 - DNA, 25 bp, Homo sapien
ccttgagccaaacctggaaccatag

SEQ ID NO: 5971943 - DNA, 25 bp, Homo sapien
ttttcggaggcctcttgaaattcct

SEQ ID NO: 5971944 - DNA, 25 bp, Homo sapien
caattggaacattgatgcttctcaa

SEQ ID NO: 5971945 - DNA, 25 bp, Homo sapien
tggaaccatagggttcattaaatgt

SEQ ID NO: 5971946 - DNA, 25 bp, Homo sapien
ggggctacaaaatgcactattgatc

SEQ ID NO: 5971947 - DNA, 25 bp, Homo sapien
ttggtcttagtagcgcctgggtact

SEQ ID NO: 5971948 - DNA, 25 bp, Homo sapien
cttcgagaacatctttgatgatttg

SEQ ID NO: 5971949 - DNA, 25 bp, Homo sapien
cattttaccaccttgagccaaacct

SEQ ID NO: 5971950 - DNA, 25 bp, Homo sapien
cagcaagcttggtcataggaacaaa

SEQ ID NO: 5971951 - DNA, 25 bp, Homo sapien
agggtcaaccgtggcagcagaggac

SEQ ID NO: 5971952 - DNA, 25 bp, Homo sapien
tcaccacttccaatggcgccttcat

SEQ ID NO: 5971953 - DNA, 25 bp, Homo sapien
catgttgtccaaaaaggcgtgcaag

SEQ ID NO: 5971954 - DNA, 25 bp, Homo sapien
atctttgatgatttgtgggttcaag

SEQ ID NO: 5971955 - DNA, 25 bp, Homo sapien
gctttggttcttccaaaaggtcgat

SEQ ID NO: 5971956 - DNA, 25 bp, Homo sapien
cttttctggtctatcaatgaagaat

SEQ ID NO: 5971957 - DNA, 25 bp, Homo sapien
tcaggtggggacaatttttcttctt

SEQ ID NO: 5971958 - DNA, 25 bp, Homo sapien
attcttggattggtgcaatgacata

SEQ ID NO: 5971959 - DNA, 25 bp, Homo sapien
aacaatgttggataatctaaagata

SEQ ID NO: 5971960 - DNA, 25 bp, Homo sapien
gaaggatttgtaggtaattggacca

SEQ ID NO: 5971961 - DNA, 25 bp, Homo sapien
gcttgcattaaaggatagataagcc

SEQ ID NO: 5971962 - DNA, 25 bp, Homo sapien
agtagcgcctgggtacttagtaccc

SEQ ID NO: 5971963 - DNA, 25 bp, Homo sapien
gtggcaatctcgttggtcttagtag

SEQ ID NO: 5971964 - DNA, 25 bp, Homo sapien
ttttctctggtcgacaccaccaaat

SEQ ID NO: 5971965 - DNA, 25 bp, Homo sapien
tctttaaaagccaatttcatttctt

SEQ ID NO: 5971966 - DNA, 25 bp, Homo sapien
gcgtgcaagtctgctaaaagaacag

SEQ ID NO: 5971967 - DNA, 25 bp, Homo sapien
ttgcattaaaggatagataagccca

SEQ ID NO: 5971968 - DNA, 25 bp, Homo sapien
ggcgcggtaccccagtataatttca

SEQ ID NO: 5971969 - DNA, 25 bp, Homo sapien
atagtatttggccctatagttcacc

SEQ ID NO: 5971970 - DNA, 25 bp, Homo sapien
aacagtcacttcacaacctgctttc

SEQ ID NO: 5971971 - DNA, 25 bp, Homo sapien
tggaccaccgaacttttctggtcta

SEQ ID NO: 5971972 - DNA, 25 bp, Homo sapien
acttcaattcttggattggtgcaat

SEQ ID NO: 5971973 - DNA, 25 bp, Homo sapien
ccattctcttcgacgttaccggggc

SEQ ID NO: 5971974 - DNA, 25 bp, Homo sapien
cgttttgtgaaacaatgttggataa

SEQ ID NO: 5971975 - DNA, 25 bp, Homo sapien
caacaaattttagcttttcaattgg

SEQ ID NO: 5971976 - DNA, 25 bp, Homo sapien
cgttggtcttagtagcgcctgggta

SEQ ID NO: 5971977 - DNA, 25 bp, Homo sapien
agaaatcagcaagcttggtcatagg

SEQ ID NO: 5971978 - DNA, 25 bp, Homo sapien
cgttgatagcgtcagcaacaccaat

SEQ ID NO: 5971979 - DNA, 25 bp, Homo sapien
ctcgttggtcttagtagcgcctggg

SEQ ID NO: 5971980 - DNA, 25 bp, Homo sapien
tacccttattctttggtttcttagc

SEQ ID NO: 5971981 - DNA, 25 bp, Homo sapien
cggtaccccagtataatttcaaatg

SEQ ID NO: 5971982 - DNA, 25 bp, Homo sapien
atggtatagtctggagttagctggt

SEQ ID NO: 5971983 - DNA, 25 bp, Homo sapien
gaaacaatgttggataatctaaaga

SEQ ID NO: 5971984 - DNA, 25 bp, Homo sapien
gataacccttttcggaggcctcttg

SEQ ID NO: 5971985 - DNA, 25 bp, Homo sapien
ggcaactggataacccttttcggag

SEQ ID NO: 5971986 - DNA, 25 bp, Homo sapien
tggacaaatgacagtaaaccattct

SEQ ID NO: 5971987 - DNA, 25 bp, Homo sapien
tagggttcattaaatgtgctctttt

SEQ ID NO: 5971988 - DNA, 25 bp, Homo sapien
cacttccaatggcgccttcatgttg

SEQ ID NO: 5971989 - DNA, 25 bp, Homo sapien
ccagtgggcgcggtaccccagtata

SEQ ID NO: 5971990 - DNA, 25 bp, Homo sapien
ttgaaattccttgttgttggcaaat

SEQ ID NO: 5971991 - DNA, 25 bp, Homo sapien
ctctggtcgacaccaccaaattggc

SEQ ID NO: 5971992 - DNA, 25 bp, Homo sapien
tttttcgacttttgtggtgtggcaa

SEQ ID NO: 5971993 - DNA, 25 bp, Homo sapien
ctggtaagaagagccaacaacaaat

SEQ ID NO: 5971994 - DNA, 25 bp, Homo sapien
gtcgatttttgaattcggatcagag

SEQ ID NO: 5971995 - DNA, 25 bp, Homo sapien
acatctttgatgatttgtgggttca

SEQ ID NO: 5971996 - DNA, 25 bp, Homo sapien
attggaacattgatgcttctcaaga

SEQ ID NO: 5971997 - DNA, 25 bp, Homo sapien
gtctgctaaaagaacagtcacttca

SEQ ID NO: 5971998 - DNA, 25 bp, Homo sapien
ctttcaagaaatcagcaagcttggt

SEQ ID NO: 5971999 - DNA, 25 bp, Homo sapien
atcagaggcagacattttaccacct

SEQ ID NO: 5972000 - DNA, 25 bp, Homo sapien
taccaaacttcaattcttggattgg

SEQ ID NO: 5972001 - DNA, 25 bp, Homo sapien
gcccactcaataatggattggcgac

SEQ ID NO: 5972002 - DNA, 25 bp, Homo sapien
taattggaccaccgaacttttctgg

SEQ ID NO: 5972003 - DNA, 25 bp, Homo sapien
tctcttcgacgttaccggggctaca

SEQ ID NO: 5972004 - DNA, 25 bp, Homo sapien
tttcaaatgtctcttttgtacttcg

SEQ ID NO: 5972005 - DNA, 25 bp, Homo sapien
ggcaatcaacatctaagaattgttc

SEQ ID NO: 5972006 - DNA, 25 bp, Homo sapien
tatagttcaccacttccaatggcgc

SEQ ID NO: 5972007 - DNA, 25 bp, Homo sapien
tagatcaggtggggacaatttttct

SEQ ID NO: 5972008 - DNA, 25 bp, Homo sapien
attaaaggatagataagcccactca

SEQ ID NO: 5972009 - DNA, 25 bp, Homo sapien
caccttgagccaaacctggaaccat

SEQ ID NO: 5972010 - DNA, 25 bp, Homo sapien
ggtcgacaccaccaaattggcaatc

SEQ ID NO: 5972011 - DNA, 25 bp, Homo sapien
gcttggtcataggaacaaaataacc

SEQ ID NO: 5972012 - DNA, 25 bp, Homo sapien
tgtagcccaaacttggtaaattttc

SEQ ID NO: 5972013 - DNA, 25 bp, Homo sapien
ctcttttgtacttcgagaacatctt

SEQ ID NO: 5972014 - DNA, 25 bp, Homo sapien
tccaatggcgccttcatgttgtcca

SEQ ID NO: 5972015 - DNA, 25 bp, Homo sapien
aaaggcgtgcaagtctgctaaaaga

SEQ ID NO: 5972016 - DNA, 25 bp, Homo sapien
tttagcatcgttttgtgaaacaatg

SEQ ID NO: 5972017 - DNA, 25 bp, Homo sapien
ttccgctaagacaaaaatttttctc

SEQ ID NO: 5972018 - DNA, 25 bp, Homo sapien
aggatttgtaggtaattggaccacc

SEQ ID NO: 5972019 - DNA, 25 bp, Homo sapien
atgttggataatctaaagatatcca

SEQ ID NO: 5972020 - DNA, 25 bp, Homo sapien
attggcgacttgcttgacaacatca

SEQ ID NO: 5972021 - DNA, 25 bp, Homo sapien
attcatagtatttggccctatagtt

SEQ ID NO: 5972022 - DNA, 25 bp, Homo sapien
ctcattagggtcaaccgtggcagca

SEQ ID NO: 5972023 - DNA, 25 bp, Homo sapien
aacctgctttcaagaaatcagcaag

SEQ ID NO: 5972024 - DNA, 25 bp, Homo sapien
ggcctcttgaaattccttgttgttg

SEQ ID NO: 5972025 - DNA, 25 bp, Homo sapien
acatctaagaattgttcgtccaacg

SEQ ID NO: 5972026 - DNA, 25 bp, Homo sapien
aaaaatttttctctggtcgacacca

SEQ ID NO: 5972027 - DNA, 25 bp, Homo sapien
cttcgaaggatttgtaggtaattgg

SEQ ID NO: 5972028 - DNA, 25 bp, Homo sapien
aattcgaagtgatttgtaccaaact

SEQ ID NO: 5972029 - DNA, 25 bp, Homo sapien
ttggcaatcaacatctaagaattgt

SEQ ID NO: 5972030 - DNA, 25 bp, Homo sapien
ttttcaattggaacattgatgcttc

SEQ ID NO: 5972031 - DNA, 25 bp, Homo sapien
agctttgatggtcaattcatagtat

SEQ ID NO: 5972032 - DNA, 25 bp, Homo sapien
caatgaagaattcgaagtgatttgt

SEQ ID NO: 5972033 - DNA, 25 bp, Homo sapien
gctccaatagctcgttgatagcgtc

SEQ ID NO: 5972034 - DNA, 25 bp, Homo sapien
ttttgtgaaacaatgttggataatc

SEQ ID NO: 5972035 - DNA, 25 bp, Homo sapien
ctaaagatatccatggtatagtctg

SEQ ID NO: 5972036 - DNA, 25 bp, Homo sapien
tcttggattggtgcaatgacatatt

SEQ ID NO: 5972037 - DNA, 25 bp, Homo sapien
taaaagaacagtcacttcacaacct

SEQ ID NO: 5972038 - DNA, 25 bp, Homo sapien
tgctcttttcttgtagcccaaactt

SEQ ID NO: 5972039 - DNA, 25 bp, Homo sapien
tggataatctaaagatatccatggt

SEQ ID NO: 5972040 - DNA, 25 bp, Homo sapien
aagtgatttgtaccaaacttcaatt

SEQ ID NO: 5972041 - DNA, 25 bp, Homo sapien
caactggataacccttttcggaggc

SEQ ID NO: 5972042 - DNA, 25 bp, Homo sapien
gtcagcaacaccaatttttagatca

SEQ ID NO: 5972043 - DNA, 25 bp, Homo sapien
aaagaacagtcacttcacaacctgc

SEQ ID NO: 5972044 - DNA, 25 bp, Homo sapien
tcttccaaaaggtcgatttttgaat

SEQ ID NO: 5972045 - DNA, 25 bp, Homo sapien
cccagtataatttcaaatgtctctt

SEQ ID NO: 5972046 - DNA, 25 bp, Homo sapien
taaattttcttccgctaagacaaaa

SEQ ID NO: 5972047 - DNA, 25 bp, Homo sapien
gcaagtctgctaaaagaacagtcac

SEQ ID NO: 5972048 - DNA, 25 bp, Homo sapien
tcatagtatttggccctatagttca

SEQ ID NO: 5972049 - DNA, 25 bp, Homo sapien
cgaacttttctggtctatcaatgaa

SEQ ID NO: 5972050 - DNA, 25 bp, Homo sapien
ttggtaatgagaccgaacgcctcat

SEQ ID NO: 5972051 - DNA, 25 bp, Homo sapien
taatgagaccgaacgcctcattagg

SEQ ID NO: 5972052 - DNA, 25 bp, Homo sapien
gttcttggtaatgagaccgaacgcc

SEQ ID NO: 5972053 - DNA, 25 bp, Homo sapien
acaaattttagcttttcaattggaa

SEQ ID NO: 5972054 - DNA, 25 bp, Homo sapien
cctgcccttttagcatcgttttgtg

SEQ ID NO: 5972055 - DNA, 25 bp, Homo sapien
tggataacccttttcggaggcctct

SEQ ID NO: 5972056 - DNA, 25 bp, Homo sapien
ttgatggtcaattcatagtatttgg

SEQ ID NO: 5972057 - DNA, 25 bp, Homo sapien
atattggacaaatgacagtaaacca

SEQ ID NO: 5972058 - DNA, 25 bp, Homo sapien
aaattttagcttttcaattggaaca

SEQ ID NO: 5972059 - DNA, 25 bp, Homo sapien
tcgaaggatttgtaggtaattggac

SEQ ID NO: 5972060 - DNA, 25 bp, Homo sapien
attggacaaatgacagtaaaccatt

SEQ ID NO: 5972061 - DNA, 25 bp, Homo sapien
gatggtcaattcatagtatttggcc

SEQ ID NO: 5972062 - DNA, 25 bp, Homo sapien
gctaagacaaaaatttttctctggt

SEQ ID NO: 5972063 - DNA, 25 bp, Homo sapien
tcttagcctttttcgacttttgtgg

SEQ ID NO: 5972064 - DNA, 25 bp, Homo sapien
atagctcgttgatagcgtcagcaac

SEQ ID NO: 5972065 - DNA, 25 bp, Homo sapien
tccaaaaggtcgatttttgaattcg

SEQ ID NO: 5972066 - DNA, 25 bp, Homo sapien
taaaagccaatttcatttcttcgaa

SEQ ID NO: 5972067 - DNA, 25 bp, Homo sapien
tggtcaattcatagtatttggccct

SEQ ID NO: 5972068 - DNA, 25 bp, Homo sapien
aacaccaatttttagatcaggtggg

SEQ ID NO: 5972069 - DNA, 25 bp, Homo sapien
gaacattgatgcttctcaagatagc

SEQ ID NO: 5972070 - DNA, 25 bp, Homo sapien
acaaaaatttttctctggtcgacac

SEQ ID NO: 5972071 - DNA, 25 bp, Homo sapien
acgcctcattagggtcaaccgtggc

SEQ ID NO: 5972072 - DNA, 25 bp, Homo sapien
taaccacaatgaggtcttccagtgg

SEQ ID NO: 5972073 - DNA, 25 bp, Homo sapien
cttttagcatcgttttgtgaaacaa

SEQ ID NO: 5972074 - DNA, 25 bp, Homo sapien
gtccaaaaaggcgtgcaagtctgct

SEQ ID NO: 5972075 - DNA, 25 bp, Homo sapien
acaaaataaccacaatgaggtcttc

SEQ ID NO: 5972076 - DNA, 25 bp, Homo sapien
gaaattccttgttgttggcaaattc

SEQ ID NO: 5972077 - DNA, 25 bp, Homo sapien
tgctttcaagaaatcagcaagcttg

SEQ ID NO: 5972078 - DNA, 25 bp, Homo sapien
atttggtttcctctagtttcgtggc

SEQ ID NO: 5972079 - DNA, 25 bp, Homo sapien
tttgtaccaaacttcaattcttgga

SEQ ID NO: 5972080 - DNA, 25 bp, Homo sapien
tcgacttttgtggtgtggcaactgg

SEQ ID NO: 5972081 - DNA, 25 bp, Homo sapien
atcagcaagcttggtcataggaaca

SEQ ID NO: 5972082 - DNA, 25 bp, Homo sapien
atccatggtatagtctggagttagc

SEQ ID NO: 5972083 - DNA, 25 bp, Homo sapien
ggagttagctggtaagaagagccaa

SEQ ID NO: 5972084 - DNA, 25 bp, Homo sapien
caaattggcaatcaacatctaagaa

SEQ ID NO: 5972085 - DNA, 25 bp, Homo sapien
cttgcttgacaacatcagcgcctgc

SEQ ID NO: 5972086 - DNA, 25 bp, Homo sapien
atgtctcttttgtacttcgagaaca

SEQ ID NO: 5972087 - DNA, 25 bp, Homo sapien
ttaccaccttgagccaaacctggaa

SEQ ID NO: 5972088 - DNA, 25 bp, Homo sapien
acaacctgctttcaagaaatcagca

SEQ ID NO: 5972089 - DNA, 25 bp, Homo sapien
ttgtgggttcaagacttcttgcaag

SEQ ID NO: 5972090 - DNA, 25 bp, Homo sapien
aataaccacaatgaggtcttccagt

SEQ ID NO: 5972091 - DNA, 25 bp, Homo sapien
aaaatgcactattgatctttttctt

SEQ ID NO: 5972092 - DNA, 25 bp, Homo sapien
acaacatcagcgcctgcccttttag

SEQ ID NO: 5972093 - DNA, 25 bp, Homo sapien
ttcgaagtgatttgtaccaaacttc

SEQ ID NO: 5972094 - DNA, 25 bp, Homo sapien
gaggcagacattttaccaccttgag

SEQ ID NO: 5972095 - DNA, 25 bp, Homo sapien
cctatagttcaccacttccaatggc

SEQ ID NO: 5972096 - DNA, 25 bp, Homo sapien
ataggaacaaaataaccacaatgag

SEQ ID NO: 5972097 - DNA, 25 bp, Homo sapien
cacaatgaggtcttccagtgggcgc

SEQ ID NO: 5972098 - DNA, 25 bp, Homo sapien
attctcttcgacgttaccggggcta

SEQ ID NO: 5972099 - DNA, 25 bp, Homo sapien
caatagctcgttgatagcgtcagca

SEQ ID NO: 5972100 - DNA, 25 bp, Homo sapien
aaggatagataagcccactcaataa

SEQ ID NO: 5972101 - DNA, 25 bp, Homo sapien
ttgatagcgtcagcaacaccaattt

SEQ ID NO: 5972102 - DNA, 25 bp, Homo sapien
ccttttcggaggcctcttgaaattc

SEQ ID NO: 5972103 - DNA, 25 bp, Homo sapien
ttggtaaattttcttccgctaagac

SEQ ID NO: 5972104 - DNA, 25 bp, Homo sapien
ctcttttcttgtagcccaaacttgg

SEQ ID NO: 5972105 - DNA, 25 bp, Homo sapien
ttgagccaaacctggaaccataggg

SEQ ID NO: 5972106 - DNA, 25 bp, Homo sapien
cttaacttgctttggttcttccaaa

SEQ ID NO: 5972107 - DNA, 25 bp, Homo sapien
acgcttgcattaaaggatagataag

SEQ ID NO: 5972108 - DNA, 25 bp, Homo sapien
aggtcgatttttgaattcggatcag

SEQ ID NO: 5972109 - DNA, 25 bp, Homo sapien
tcctctagtttcgtggcaatctcgt

SEQ ID NO: 5972110 - DNA, 25 bp, Homo sapien
ttcttaacttgctttggttcttcca

SEQ ID NO: 5972111 - DNA, 25 bp, Homo sapien
taagacaaaaatttttctctggtcg

SEQ ID NO: 5972112 - DNA, 25 bp, Homo sapien
agtatttggccctatagttcaccac

SEQ ID NO: 5972113 - DNA, 25 bp, Homo sapien
tttgtaggtaattggaccaccgaac

SEQ ID NO: 5972114 - DNA, 25 bp, Homo sapien
gaacgcctcattagggtcaaccgtg

SEQ ID NO: 5972115 - DNA, 25 bp, Homo sapien
tcggatcagaggcagacattttacc

SEQ ID NO: 5972116 - DNA, 25 bp, Homo sapien
ggtttcctctagtttcgtggcaatc

SEQ ID NO: 5972117 - DNA, 25 bp, Homo sapien
tctttttcttaacttgctttggttc

SEQ ID NO: 5972118 - DNA, 25 bp, Homo sapien
acattgatgcttctcaagatagctt

SEQ ID NO: 5972119 - DNA, 25 bp, Homo sapien
cttttcttgtagcccaaacttggta

SEQ ID NO: 5972120 - DNA, 25 bp, Homo sapien
cctttttcgacttttgtggtgtggc

SEQ ID NO: 5972121 - DNA, 25 bp, Homo sapien
tctttggtttcttagcctttttcga

SEQ ID NO: 5972122 - DNA, 25 bp, Homo sapien
gcctcattagggtcaaccgtggcag

SEQ ID NO: 5972123 - DNA, 25 bp, Homo sapien
cttctttaaaagccaatttcatttc

SEQ ID NO: 5972124 - DNA, 25 bp, Homo sapien
gtgggttcaagacttcttgcaagtt

SEQ ID NO: 5972125 - DNA, 25 bp, Homo sapien
aagttcttggtaatgagaccgaacg

SEQ ID NO: 5972126 - DNA, 25 bp, Homo sapien
atggcgccttcatgttgtccaaaaa

SEQ ID NO: 5972127 - DNA, 25 bp, Homo sapien
gaggcctcttgaaattccttgttgt

SEQ ID NO: 5972128 - DNA, 25 bp, Homo sapien
tgttgtccaaaaaggcgtgcaagtc

SEQ ID NO: 5972129 - DNA, 25 bp, Homo sapien
atagctttgatggtcaattcatagt

SEQ ID NO: 5972130 - DNA, 25 bp, Homo sapien
tgcactattgatctttttcttaact

SEQ ID NO: 5972131 - DNA, 25 bp, Homo sapien
ggtatagtctggagttagctggtaa

SEQ ID NO: 5972132 - DNA, 25 bp, Homo sapien
ccgaacgcctcattagggtcaaccg

SEQ ID NO: 5972133 - DNA, 25 bp, Homo sapien
agaacagtcacttcacaacctgctt

SEQ ID NO: 5972134 - DNA, 25 bp, Homo sapien
tcattaaatgtgctcttttcttgta

SEQ ID NO: 5972135 - DNA, 25 bp, Homo sapien
agatatccatggtatagtctggagt

SEQ ID NO: 5972136 - DNA, 25 bp, Homo sapien
taaaccattctcttcgacgttaccg

SEQ ID NO: 5972137 - DNA, 25 bp, Homo sapien
gaccgaacgcctcattagggtcaac

SEQ ID NO: 5972138 - DNA, 25 bp, Homo sapien
tggtctatcaatgaagaattcgaag

SEQ ID NO: 5972139 - DNA, 25 bp, Homo sapien
tcgtggcaatctcgttggtcttagt

SEQ ID NO: 5972140 - DNA, 25 bp, Homo sapien
gttcaagacttcttgcaagttcttg

SEQ ID NO: 5972141 - DNA, 25 bp, Homo sapien
tttgtacttcgagaacatctttgat

SEQ ID NO: 5972142 - DNA, 25 bp, Homo sapien
gtgaaacaatgttggataatctaaa

SEQ ID NO: 5972143 - DNA, 25 bp, Homo sapien
tttgtggtgtggcaactggataacc

SEQ ID NO: 5972144 - DNA, 25 bp, Homo sapien
taccggggctacaaaatgcactatt

SEQ ID NO: 5972145 - DNA, 25 bp, Homo sapien
gtcacttcacaacctgctttcaaga

SEQ ID NO: 5972146 - DNA, 25 bp, Homo sapien
cgacgttaccggggctacaaaatgc

SEQ ID NO: 5972147 - DNA, 25 bp, Homo sapien
ctatcaatgaagaattcgaagtgat

SEQ ID NO: 5972148 - DNA, 25 bp, Homo sapien
cttgtctgattggctccaatagctc

SEQ ID NO: 5972149 - DNA, 25 bp, Homo sapien
aaatttttctctggtcgacaccacc

SEQ ID NO: 5972150 - DNA, 25 bp, Homo sapien
gtggcaactggataacccttttcgg

SEQ ID NO: 5972151 - DNA, 25 bp, Homo sapien
ctgctaaaagaacagtcacttcaca

SEQ ID NO: 5972152 - DNA, 25 bp, Homo sapien
cttcacaacctgctttcaagaaatc

SEQ ID NO: 5972153 - DNA, 25 bp, Homo sapien
ggtcaaccgtggcagcagaggacat

SEQ ID NO: 5972154 - DNA, 25 bp, Homo sapien
atcaacatctaagaattgttcgtcc

SEQ ID NO: 5972155 - DNA, 25 bp, Homo sapien
caattcttggattggtgcaatgaca

SEQ ID NO: 5972156 - DNA, 25 bp, Homo sapien
aaatcagcaagcttggtcataggaa

SEQ ID NO: 5972157 - DNA, 25 bp, Homo sapien
aatttttagatcaggtggggacaat

SEQ ID NO: 5972158 - DNA, 25 bp, Homo sapien
attggaccaccgaacttttctggtc

SEQ ID NO: 5972159 - DNA, 25 bp, Homo sapien
tgtaccaaacttcaattcttggatt

SEQ ID NO: 5972160 - DNA, 25 bp, Homo sapien
gtctcttttgtacttcgagaacatc

SEQ ID NO: 5972161 - DNA, 25 bp, Homo sapien
cgaagtgatttgtaccaaacttcaa

SEQ ID NO: 5972162 - DNA, 25 bp, Homo sapien
caagaaatcagcaagcttggtcata

SEQ ID NO: 5972163 - DNA, 25 bp, Homo sapien
accgaacttttctggtctatcaatg

SEQ ID NO: 5972164 - DNA, 25 bp, Homo sapien
atctcgttggtcttagtagcgcctg

SEQ ID NO: 5972165 - DNA, 25 bp, Homo sapien
caagatagctttgatggtcaattca

SEQ ID NO: 5972166 - DNA, 25 bp, Homo sapien
tgtggtgtggcaactggataaccct

SEQ ID NO: 5972167 - DNA, 25 bp, Homo sapien
ggtcataggaacaaaataaccacaa

SEQ ID NO: 5972168 - DNA, 25 bp, Homo sapien
ctttgatgatttgtgggttcaagac

SEQ ID NO: 5972169 - DNA, 25 bp, Homo sapien
aacctggaaccatagggttcattaa

SEQ ID NO: 5972170 - DNA, 25 bp, Homo sapien
gaacaaaataaccacaatgaggtct

SEQ ID NO: 5972171 - DNA, 25 bp, Homo sapien
caatttggtttcctctagtttcgtg

SEQ ID NO: 5972172 - DNA, 25 bp, Homo sapien
tgcttgacaacatcagcgcctgccc

SEQ ID NO: 5972173 - DNA, 25 bp, Homo sapien
ccttgttgttggcaaattcttgtct

SEQ ID NO: 5972174 - DNA, 25 bp, Homo sapien
caaaaggtcgatttttgaattcgga

SEQ ID NO: 5972175 - DNA, 25 bp, Homo sapien
tggaacattgatgcttctcaagata

SEQ ID NO: 5972176 - DNA, 25 bp, Homo sapien
accacaatgaggtcttccagtgggc

SEQ ID NO: 5972177 - DNA, 25 bp, Homo sapien
ttgaattcggatcagaggcagacat

SEQ ID NO: 5972178 - DNA, 25 bp, Homo sapien
tctggtctatcaatgaagaattcga

SEQ ID NO: 5972179 - DNA, 25 bp, Homo sapien
ggtaatgagaccgaacgcctcatta

SEQ ID NO: 5972180 - DNA, 25 bp, Homo sapien
gcattaaaggatagataagcccact

SEQ ID NO: 5972181 - DNA, 25 bp, Homo sapien
attttagcttttcaattggaacatt

SEQ ID NO: 5972182 - DNA, 25 bp, Homo sapien
tacaatttggtttcctctagtttcg

SEQ ID NO: 5972183 - DNA, 25 bp, Homo sapien
aatgcactattgatctttttcttaa

SEQ ID NO: 5972184 - DNA, 25 bp, Homo sapien
cagtcacttcacaacctgctttcaa

SEQ ID NO: 5972185 - DNA, 25 bp, Homo sapien
tagcgtcagcaacaccaatttttag

SEQ ID NO: 5972186 - DNA, 25 bp, Homo sapien
gcaagcttggtcataggaacaaaat

SEQ ID NO: 5972187 - DNA, 25 bp, Homo sapien
atctaagaattgttcgtccaacgct

SEQ ID NO: 5972188 - DNA, 25 bp, Homo sapien
ggtaagaagagccaacaacaaattt

SEQ ID NO: 5972189 - DNA, 25 bp, Homo sapien
ggatagataagcccactcaataatg

SEQ ID NO: 5972190 - DNA, 25 bp, Homo sapien
gacattttaccaccttgagccaaac

SEQ ID NO: 5972191 - DNA, 25 bp, Homo sapien
tcagcgcctgcccttttagcatcgt

SEQ ID NO: 5972192 - DNA, 25 bp, Homo sapien
gctaaaagaacagtcacttcacaac

SEQ ID NO: 5972193 - DNA, 25 bp, Homo sapien
atttgtgggttcaagacttcttgca

SEQ ID NO: 5972194 - DNA, 25 bp, Homo sapien
tcttagtagcgcctgggtacttagt

SEQ ID NO: 5972195 - DNA, 25 bp, Homo sapien
tagcatcgttttgtgaaacaatgtt

SEQ ID NO: 5972196 - DNA, 25 bp, Homo sapien
aaatgtctcttttgtacttcgagaa

SEQ ID NO: 5972197 - DNA, 25 bp, Homo sapien
gggttcaagacttcttgcaagttct

SEQ ID NO: 5972198 - DNA, 25 bp, Homo sapien
ttggtttcctctagtttcgtggcaa

SEQ ID NO: 5972199 - DNA, 25 bp, Homo sapien
cagcaacaccaatttttagatcagg

SEQ ID NO: 5972200 - DNA, 25 bp, Homo sapien
tccaacgcttgcattaaaggataga

SEQ ID NO: 5972201 - DNA, 25 bp, Homo sapien
aattggcaatcaacatctaagaatt

SEQ ID NO: 5972202 - DNA, 25 bp, Homo sapien
tctgattggctccaatagctcgttg

SEQ ID NO: 5972203 - DNA, 25 bp, Homo sapien
agtgggcgcggtaccccagtataat

SEQ ID NO: 5972204 - DNA, 25 bp, Homo sapien
cattagggtcaaccgtggcagcaga

SEQ ID NO: 5972205 - DNA, 25 bp, Homo sapien
tttctggtctatcaatgaagaattc

SEQ ID NO: 5972206 - DNA, 25 bp, Homo sapien
gttgttggcaaattcttgtctgatt

SEQ ID NO: 5972207 - DNA, 25 bp, Homo sapien
ggattggtgcaatgacatattggac

SEQ ID NO: 5972208 - DNA, 25 bp, Homo sapien
accacttccaatggcgccttcatgt

SEQ ID NO: 5972209 - DNA, 25 bp, Homo sapien
ttctcaagatagctttgatggtcaa

SEQ ID NO: 5972210 - DNA, 25 bp, Homo sapien
atcaatgaagaattcgaagtgattt

SEQ ID NO: 5972211 - DNA, 25 bp, Homo sapien
cttttgtacttcgagaacatctttg

SEQ ID NO: 5972212 - DNA, 25 bp, Homo sapien
ggcgccttcatgttgtccaaaaagg

SEQ ID NO: 5972213 - DNA, 25 bp, Homo sapien
tagttcaccacttccaatggcgcct

SEQ ID NO: 5972214 - DNA, 25 bp, Homo sapien
attggctccaatagctcgttgatag

SEQ ID NO: 5972215 - DNA, 25 bp, Homo sapien
tacttcgagaacatctttgatgatt

SEQ ID NO: 5972216 - DNA, 25 bp, Homo sapien
ctacaaaatgcactattgatctttt

SEQ ID NO: 5972217 - DNA, 25 bp, Homo sapien
agaattcgaagtgatttgtaccaaa

SEQ ID NO: 5972218 - DNA, 25 bp, Homo sapien
tggccctatagttcaccacttccaa

SEQ ID NO: 5972219 - DNA, 25 bp, Homo sapien
atgcttctcaagatagctttgatgg

SEQ ID NO: 5972220 - DNA, 25 bp, Homo sapien
tcttggtaatgagaccgaacgcctc

SEQ ID NO: 5972221 - DNA, 25 bp, Homo sapien
tcgagaacatctttgatgatttgtg

SEQ ID NO: 5972222 - DNA, 25 bp, Homo sapien
aacatcagcgcctgcccttttagca

SEQ ID NO: 5972223 - DNA, 25 bp, Homo sapien
catagggttcattaaatgtgctctt

SEQ ID NO: 5972224 - DNA, 25 bp, Homo sapien
ctctagtttcgtggcaatctcgttg

SEQ ID NO: 5972225 - DNA, 25 bp, Homo sapien
tgggcgcggtaccccagtataattt

SEQ ID NO: 5972226 - DNA, 25 bp, Homo sapien
ggcagacattttaccaccttgagcc

SEQ ID NO: 5972227 - DNA, 25 bp, Homo sapien
tcttcgacgttaccggggctacaaa

SEQ ID NO: 5972228 - DNA, 25 bp, Homo sapien
aacttttctggtctatcaatgaaga

SEQ ID NO: 5972229 - DNA, 25 bp, Homo sapien
ttcttctttaaaagccaatttcatt

SEQ ID NO: 5972230 - DNA, 25 bp, Homo sapien
aatgacagtaaaccattctcttcga

SEQ ID NO: 5972231 - DNA, 25 bp, Homo sapien
ttggcaaattcttgtctgattggct

SEQ ID NO: 5972232 - DNA, 25 bp, Homo sapien
aagacttcttgcaagttcttggtaa

SEQ ID NO: 5972233 - DNA, 25 bp, Homo sapien
ttcaattggaacattgatgcttctc

SEQ ID NO: 5972234 - DNA, 25 bp, Homo sapien
cctcttgaaattccttgttgttggc

SEQ ID NO: 5972235 - DNA, 25 bp, Homo sapien
caacaacaaattttagcttttcaat

SEQ ID NO: 5972236 - DNA, 25 bp, Homo sapien
gcctgggtacttagtacccttattc

SEQ ID NO: 5972237 - DNA, 25 bp, Homo sapien
gaaccatagggttcattaaatgtgc

SEQ ID NO: 5972238 - DNA, 25 bp, Homo sapien
atgagaccgaacgcctcattagggt

SEQ ID NO: 5972239 - DNA, 25 bp, Homo sapien
tggtgtggcaactggataacccttt

SEQ ID NO: 5972240 - DNA, 25 bp, Homo sapien
cccttttagcatcgttttgtgaaac

SEQ ID NO: 5972241 - DNA, 25 bp, Homo sapien
caattcatagtatttggccctatag

SEQ ID NO: 5972242 - DNA, 25 bp, Homo sapien
caatggcgccttcatgttgtccaaa

SEQ ID NO: 5972243 - DNA, 25 bp, Homo sapien
tcttgcaagttcttggtaatgagac

SEQ ID NO: 5972244 - DNA, 25 bp, Homo sapien
gcatcgttttgtgaaacaatgttgg

SEQ ID NO: 5972245 - DNA, 25 bp, Homo sapien
tagcgcctgggtacttagtaccctt

SEQ ID NO: 5972246 - DNA, 25 bp, Homo sapien
tttcatttcttcgaaggatttgtag

SEQ ID NO: 5972247 - DNA, 25 bp, Homo sapien
gacttgcttgacaacatcagcgcct

SEQ ID NO: 5972248 - DNA, 25 bp, Homo sapien
aatttcatttcttcgaaggatttgt

SEQ ID NO: 5972249 - DNA, 25 bp, Homo sapien
tgacagtaaaccattctcttcgacg

SEQ ID NO: 5972250 - DNA, 25 bp, Homo sapien
cttcttgcaagttcttggtaatgag

SEQ ID NO: 5972251 - DNA, 25 bp, Homo sapien
ccatggtatagtctggagttagctg

SEQ ID NO: 5972252 - DNA, 25 bp, Homo sapien
gacttttgtggtgtggcaactggat

SEQ ID NO: 5972253 - DNA, 25 bp, Homo sapien
gacttcttgcaagttcttggtaatg

SEQ ID NO: 5972254 - DNA, 25 bp, Homo sapien
gtgtggcaactggataacccttttc

SEQ ID NO: 5972255 - DNA, 25 bp, Homo sapien
ccaatttttagatcaggtggggaca

SEQ ID NO: 5972256 - DNA, 25 bp, Homo sapien
gagaacatctttgatgatttgtggg

SEQ ID NO: 5972257 - DNA, 25 bp, Homo sapien
tgacatattggacaaatgacagtaa

SEQ ID NO: 5972258 - DNA, 25 bp, Homo sapien
atagataagcccactcaataatgga

SEQ ID NO: 5972259 - DNA, 25 bp, Homo sapien
atttttctctggtcgacaccaccaa

SEQ ID NO: 5972260 - DNA, 25 bp, Homo sapien
atgaagaattcgaagtgatttgtac

SEQ ID NO: 5972261 - DNA, 25 bp, Homo sapien
gaacatctttgatgatttgtgggtt

SEQ ID NO: 5972262 - DNA, 25 bp, Homo sapien
tgtacttcgagaacatctttgatga

SEQ ID NO: 5972263 - DNA, 25 bp, Homo sapien
caaacctggaaccatagggttcatt

SEQ ID NO: 5972264 - DNA, 25 bp, Homo sapien
tttagcttttcaattggaacattga

SEQ ID NO: 5972265 - DNA, 25 bp, Homo sapien
gtgatttgtaccaaacttcaattct

SEQ ID NO: 5972266 - DNA, 25 bp, Homo sapien
ttttcttaacttgctttggttcttc

SEQ ID NO: 5972267 - DNA, 25 bp, Homo sapien
atcgttttgtgaaacaatgttggat

SEQ ID NO: 5972268 - DNA, 25 bp, Homo sapien
taacttgctttggttcttccaaaag

SEQ ID NO: 5972269 - DNA, 25 bp, Homo sapien
acgttaccggggctacaaaatgcac

SEQ ID NO: 5972270 - DNA, 25 bp, Homo sapien
cttgacaacatcagcgcctgccctt

SEQ ID NO: 5972271 - DNA, 25 bp, Homo sapien
tcttgtagcccaaacttggtaaatt

SEQ ID NO: 5972272 - DNA, 25 bp, Homo sapien
gcgacttgcttgacaacatcagcgc

SEQ ID NO: 5972273 - DNA, 25 bp, Homo sapien
caaatgacagtaaaccattctcttc

SEQ ID NO: 5972274 - DNA, 25 bp, Homo sapien
gatttgtaggtaattggaccaccga

SEQ ID NO: 5972275 - DNA, 25 bp, Homo sapien
tcttccagtgggcgcggtaccccag

SEQ ID NO: 5972276 - DNA, 25 bp, Homo sapien
aaacttcaattcttggattggtgca

SEQ ID NO: 5972277 - DNA, 25 bp, Homo sapien
gatgatttgtgggttcaagacttct

SEQ ID NO: 5972278 - DNA, 25 bp, Homo sapien
accaaattggcaatcaacatctaag

SEQ ID NO: 5972279 - DNA, 25 bp, Homo sapien
ggattggcgacttgcttgacaacat

SEQ ID NO: 5972280 - DNA, 25 bp, Homo sapien
gacaccaccaaattggcaatcaaca

SEQ ID NO: 5972281 - DNA, 25 bp, Homo sapien
tgacaacatcagcgcctgccctttt

SEQ ID NO: 5972282 - DNA, 25 bp, Homo sapien
gatagcgtcagcaacaccaattttt

SEQ ID NO: 5972283 - DNA, 25 bp, Homo sapien
attaaatgtgctcttttcttgtagc

SEQ ID NO: 5972284 - DNA, 25 bp, Homo sapien
tgtctgattggctccaatagctcgt

SEQ ID NO: 5972285 - DNA, 25 bp, Homo sapien
tagcttttcaattggaacattgatg

SEQ ID NO: 5972286 - DNA, 25 bp, Homo sapien
cctgctttcaagaaatcagcaagct

SEQ ID NO: 5972287 - DNA, 25 bp, Homo sapien
gtaccccagtataatttcaaatgtc

SEQ ID NO: 5972288 - DNA, 25 bp, Homo sapien
aagaattgttcgtccaacgcttgca

SEQ ID NO: 5972289 - DNA, 25 bp, Homo sapien
tggctccaatagctcgttgatagcg

SEQ ID NO: 5972290 - DNA, 25 bp, Homo sapien
caatgttggataatctaaagatatc

SEQ ID NO: 5972291 - DNA, 25 bp, Homo sapien
tcatttcttcgaaggatttgtaggt

SEQ ID NO: 5972292 - DNA, 25 bp, Homo sapien
gttggataatctaaagatatccatg

SEQ ID NO: 5972293 - DNA, 25 bp, Homo sapien
ctagtttcgtggcaatctcgttggt

SEQ ID NO: 5972294 - DNA, 25 bp, Homo sapien
tttttagatcaggtggggacaattt

SEQ ID NO: 5972295 - DNA, 25 bp, Homo sapien
cttttgtggtgtggcaactggataa

SEQ ID NO: 5972296 - DNA, 25 bp, Homo sapien
taacccttttcggaggcctcttgaa

SEQ ID NO: 5972297 - DNA, 25 bp, Homo sapien
tgttcgtccaacgcttgcattaaag

SEQ ID NO: 5972298 - DNA, 25 bp, Homo sapien
ttcttgtctgattggctccaatagc

SEQ ID NO: 5972299 - DNA, 25 bp, Homo sapien
tagtctggagttagctggtaagaag

SEQ ID NO: 5972300 - DNA, 25 bp, Homo sapien
agctcgttgatagcgtcagcaacac

SEQ ID NO: 5972301 - DNA, 25 bp, Homo sapien
atggattggcgacttgcttgacaac

SEQ ID NO: 5972302 - DNA, 25 bp, Homo sapien
aagcttggtcataggaacaaaataa

SEQ ID NO: 5972303 - DNA, 25 bp, Homo sapien
cagacattttaccaccttgagccaa

SEQ ID NO: 5972304 - DNA, 25 bp, Homo sapien
gatctttttcttaacttgctttggt

SEQ ID NO: 5972305 - DNA, 25 bp, Homo sapien
ccaaaaaggcgtgcaagtctgctaa

SEQ ID NO: 5972306 - DNA, 25 bp, Homo sapien
tcaaatgtctcttttgtacttcgag

SEQ ID NO: 5972307 - DNA, 25 bp, Homo sapien
tttcctctagtttcgtggcaatctc

SEQ ID NO: 5972308 - DNA, 25 bp, Homo sapien
agctggtaagaagagccaacaacaa

SEQ ID NO: 5972309 - DNA, 25 bp, Homo sapien
caatctcgttggtcttagtagcgcc

SEQ ID NO: 5972310 - DNA, 25 bp, Homo sapien
ttttaccaccttgagccaaacctgg

SEQ ID NO: 5972311 - DNA, 25 bp, Homo sapien
tgatttgtgggttcaagacttcttg

SEQ ID NO: 5972312 - DNA, 25 bp, Homo sapien
attggtgcaatgacatattggacaa

SEQ ID NO: 5972313 - DNA, 25 bp, Homo sapien
gagaccgaacgcctcattagggtca

SEQ ID NO: 5972314 - DNA, 25 bp, Homo sapien
taatctaaagatatccatggtatag

SEQ ID NO: 5972315 - DNA, 25 bp, Homo sapien
gtctatcaatgaagaattcgaagtg

SEQ ID NO: 5972316 - DNA, 25 bp, Homo sapien
ccaccgaacttttctggtctatcaa

SEQ ID NO: 5972317 - DNA, 25 bp, Homo sapien
ttcaagaaatcagcaagcttggtca

SEQ ID NO: 5972318 - DNA, 25 bp, Homo sapien
ggcaaattcttgtctgattggctcc

SEQ ID NO: 5972319 - DNA, 25 bp, Homo sapien
aaaggtcgatttttgaattcggatc

SEQ ID NO: 5972320 - DNA, 25 bp, Homo sapien
ttctctggtcgacaccaccaaattg

SEQ ID NO: 5972321 - DNA, 25 bp, Homo sapien
tcttccgctaagacaaaaatttttc

SEQ ID NO: 5972322 - DNA, 25 bp, Homo sapien
tcacaacctgctttcaagaaatcag

SEQ ID NO: 5972323 - DNA, 25 bp, Homo sapien
ttcgtccaacgcttgcattaaagga

SEQ ID NO: 5972324 - DNA, 25 bp, Homo sapien
gacaaatgacagtaaaccattctct

SEQ ID NO: 5972325 - DNA, 25 bp, Homo sapien
gcgcctgggtacttagtacccttat

SEQ ID NO: 5972326 - DNA, 25 bp, Homo sapien
ctcgttgatagcgtcagcaacacca

SEQ ID NO: 5972327 - DNA, 25 bp, Homo sapien
aaagatatccatggtatagtctgga

SEQ ID NO: 5972328 - DNA, 25 bp, Homo sapien
aattccttgttgttggcaaattctt

SEQ ID NO: 5972329 - DNA, 25 bp, Homo sapien
gatcaggtggggacaatttttcttc

SEQ ID NO: 5972330 - DNA, 25 bp, Homo sapien
ggcaatctcgttggtcttagtagcg

SEQ ID NO: 5972331 - DNA, 25 bp, Homo sapien
tttggccctatagttcaccacttcc

SEQ ID NO: 5972332 - DNA, 25 bp, Homo sapien
cgatttttgaattcggatcagaggc

SEQ ID NO: 5972333 - DNA, 25 bp, Homo sapien
ccaatttcatttcttcgaaggattt

SEQ ID NO: 5972334 - DNA, 25 bp, Homo sapien
agtaaaccattctcttcgacgttac

SEQ ID NO: 5972335 - DNA, 25 bp, Homo sapien
aagtctgctaaaagaacagtcactt

SEQ ID NO: 5972336 - DNA, 25 bp, Homo sapien
ctggagttagctggtaagaagagcc

SEQ ID NO: 5972337 - DNA, 25 bp, Homo sapien
ccactcaataatggattggcgactt

SEQ ID NO: 5972338 - DNA, 25 bp, Homo sapien
tatttggccctatagttcaccactt

SEQ ID NO: 5972339 - DNA, 25 bp, Homo sapien
gcaacaccaatttttagatcaggtg

SEQ ID NO: 5972340 - DNA, 25 bp, Homo sapien
ctaagaattgttcgtccaacgcttg

SEQ ID NO: 5972341 - DNA, 25 bp, Homo sapien
gcgtcagcaacaccaatttttagat

SEQ ID NO: 5972342 - DNA, 25 bp, Homo sapien
caatgaggtcttccagtgggcgcgg

SEQ ID NO: 5972343 - DNA, 25 bp, Homo sapien
accaccttgagccaaacctggaacc

SEQ ID NO: 5972344 - DNA, 25 bp, Homo sapien
tgattggctccaatagctcgttgat

SEQ ID NO: 5972345 - DNA, 25 bp, Homo sapien
tcttgaaattccttgttgttggcaa

SEQ ID NO: 5972346 - DNA, 25 bp, Homo sapien
taaatgtgctcttttcttgtagccc

SEQ ID NO: 5972347 - DNA, 25 bp, Homo sapien
aggaacaaaataaccacaatgaggt

SEQ ID NO: 5972348 - DNA, 25 bp, Homo sapien
caccaatttttagatcaggtgggga

SEQ ID NO: 5972349 - DNA, 25 bp, Homo sapien
ccttcatgttgtccaaaaaggcgtg

SEQ ID NO: 5972350 - DNA, 25 bp, Homo sapien
ttccttgttgttggcaaattcttgt

SEQ ID NO: 5972351 - DNA, 25 bp, Homo sapien
cagtataatttcaaatgtctctttt

SEQ ID NO: 5972352 - DNA, 25 bp, Homo sapien
gatttgtaccaaacttcaattcttg

SEQ ID NO: 5972353 - DNA, 25 bp, Homo sapien
taagaagagccaacaacaaatttta

SEQ ID NO: 5972354 - DNA, 25 bp, Homo sapien
gaagaattcgaagtgatttgtacca

SEQ ID NO: 5972355 - DNA, 25 bp, Homo sapien
ttgtgaaacaatgttggataatcta

SEQ ID NO: 5972356 - DNA, 25 bp, Homo sapien
gcttctcaagatagctttgatggtc

SEQ ID NO: 5972357 - DNA, 25 bp, Homo sapien
aataatggattggcgacttgcttga

SEQ ID NO: 5972358 - DNA, 25 bp, Homo sapien
gataatctaaagatatccatggtat

SEQ ID NO: 5972359 - DNA, 25 bp, Homo sapien
agcctttttcgacttttgtggtgtg

SEQ ID NO: 5972360 - DNA, 25 bp, Homo sapien
tttcgtggcaatctcgttggtctta

SEQ ID NO: 5972361 - DNA, 25 bp, Homo sapien
ttgtccaaaaaggcgtgcaagtctg

SEQ ID NO: 5972362 - DNA, 25 bp, Homo sapien
aaagccaatttcatttcttcgaagg

SEQ ID NO: 5972363 - DNA, 25 bp, Homo sapien
cgcggtaccccagtataatttcaaa

SEQ ID NO: 5972364 - DNA, 25 bp, Homo sapien
gaattcggatcagaggcagacattt

SEQ ID NO: 5972365 - DNA, 25 bp, Homo sapien
aatgacatattggacaaatgacagt

SEQ ID NO: 5972366 - DNA, 25 bp, Homo sapien
agatagctttgatggtcaattcata

SEQ ID NO: 5972367 - DNA, 25 bp, Homo sapien
caacgcttgcattaaaggatagata

SEQ ID NO: 5972368 - DNA, 25 bp, Homo sapien
aaaaaggcgtgcaagtctgctaaaa

SEQ ID NO: 5972369 - DNA, 25 bp, Homo sapien
tgtaggtaattggaccaccgaactt

SEQ ID NO: 5972370 - DNA, 25 bp, Homo sapien
ctttgatggtcaattcatagtattt

SEQ ID NO: 5972371 - DNA, 25 bp, Homo sapien
ctggtcgacaccaccaaattggcaa

SEQ ID NO: 5972372 - DNA, 25 bp, Homo sapien
gccctatagttcaccacttccaatg

SEQ ID NO: 5972373 - DNA, 25 bp, Homo sapien
tcaagacttcttgcaagttcttggt

SEQ ID NO: 5972374 - DNA, 25 bp, Homo sapien
tcataggaacaaaataaccacaatg

SEQ ID NO: 5972375 - DNA, 25 bp, Homo sapien
ttagtagcgcctgggtacttagtac

SEQ ID NO: 5972376 - DNA, 25 bp, Homo sapien
ttggtcataggaacaaaataaccac

SEQ ID NO: 5972377 - DNA, 25 bp, Homo sapien
atatccatggtatagtctggagtta

SEQ ID NO: 5972378 - DNA, 25 bp, Homo sapien
tttcttgtagcccaaacttggtaaa

SEQ ID NO: 5972379 - DNA, 25 bp, Homo sapien
gccaaacctggaaccatagggttca

SEQ ID NO: 5972380 - DNA, 25 bp, Homo sapien
gttaccggggctacaaaatgcacta

SEQ ID NO: 5972381 - DNA, 25 bp, Homo sapien
ataagcccactcaataatggattgg

SEQ ID NO: 5972382 - DNA, 25 bp, Homo sapien
agataagcccactcaataatggatt

SEQ ID NO: 5972383 - DNA, 25 bp, Homo sapien
cttccaatggcgccttcatgttgtc

SEQ ID NO: 5972384 - DNA, 25 bp, Homo sapien
agtttcgtggcaatctcgttggtct

SEQ ID NO: 5972385 - DNA, 25 bp, Homo sapien
ttgttgttggcaaattcttgtctga

SEQ ID NO: 5972386 - DNA, 25 bp, Homo sapien
ggtcttccagtgggcgcggtacccc

SEQ ID NO: 5972387 - DNA, 25 bp, Homo sapien
gggttcattaaatgtgctcttttct

SEQ ID NO: 5972388 - DNA, 25 bp, Homo sapien
gagccaacaacaaattttagctttt

SEQ ID NO: 5972389 - DNA, 25 bp, Homo sapien
tgatgcttctcaagatagctttgat

SEQ ID NO: 5972390 - DNA, 25 bp, Homo sapien
atgaggtcttccagtgggcgcggta

SEQ ID NO: 5972391 - DNA, 25 bp, Homo sapien
agcgcctgcccttttagcatcgttt

SEQ ID NO: 5972392 - DNA, 25 bp, Homo sapien
tcaataatggattggcgacttgctt

SEQ ID NO: 5972393 - DNA, 25 bp, Homo sapien
ggatcagaggcagacattttaccac

SEQ ID NO: 5972394 - DNA, 25 bp, Homo sapien
accatagggttcattaaatgtgctc

SEQ ID NO: 5972395 - DNA, 25 bp, Homo sapien
attcggatcagaggcagacatttta

SEQ ID NO: 5972396 - DNA, 25 bp, Homo sapien
gttcattaaatgtgctcttttcttg

SEQ ID NO: 5972397 - DNA, 25 bp, Homo sapien
gcaatgacatattggacaaatgaca

SEQ ID NO: 5972398 - DNA, 25 bp, Homo sapien
cagaggcagacattttaccaccttg

SEQ ID NO: 5972399 - DNA, 25 bp, Homo sapien
accccagtataatttcaaatgtctc

SEQ ID NO: 5972400 - DNA, 25 bp, Homo sapien
gtgcaatgacatattggacaaatga

SEQ ID NO: 5972401 - DNA, 25 bp, Homo sapien
taatggattggcgacttgcttgaca

SEQ ID NO: 5972402 - DNA, 25 bp, Homo sapien
tccaatagctcgttgatagcgtcag

SEQ ID NO: 5972403 - DNA, 25 bp, Homo sapien
ggtaaattttcttccgctaagacaa

SEQ ID NO: 5972404 - DNA, 25 bp, Homo sapien
caccaccaaattggcaatcaacatc

SEQ ID NO: 5972405 - DNA, 25 bp, Homo sapien
cctggaaccatagggttcattaaat

SEQ ID NO: 5972406 - DNA, 25 bp, Homo sapien
ggctacaaaatgcactattgatctt

SEQ ID NO: 5972407 - DNA, 25 bp, Homo sapien
cacttcacaacctgctttcaagaaa

SEQ ID NO: 5972408 - DNA, 25 bp, Homo sapien
catcagcgcctgcccttttagcatc

SEQ ID NO: 5972409 - DNA, 25 bp, Homo sapien
gaggtcttccagtgggcgcggtacc

SEQ ID NO: 5972410 - DNA, 25 bp, Homo sapien
tttaaaagccaatttcatttcttcg

SEQ ID NO: 5972411 - DNA, 25 bp, Homo sapien
caatcaacatctaagaattgttcgt

SEQ ID NO: 5972412 - DNA, 25 bp, Homo sapien
attgttcgtccaacgcttgcattaa

SEQ ID NO: 5972413 - DNA, 25 bp, Homo sapien
actcaataatggattggcgacttgc

SEQ ID NO: 5972414 - DNA, 25 bp, Homo sapien
caacatctaagaattgttcgtccaa

SEQ ID NO: 5972415 - DNA, 25 bp, Homo sapien
tttcgacttttgtggtgtggcaact

SEQ ID NO: 5972416 - DNA, 25 bp, Homo sapien
acatattggacaaatgacagtaaac

SEQ ID NO: 5972417 - DNA, 25 bp, Homo sapien
ttgatgatttgtgggttcaagactt

SEQ ID NO: 5972418 - DNA, 25 bp, Homo sapien
ttcaattcttggattggtgcaatga

SEQ ID NO: 5972419 - DNA, 25 bp, Homo sapien
atttcttcgaaggatttgtaggtaa

SEQ ID NO: 5972420 - DNA, 25 bp, Homo sapien
ccgctaagacaaaaatttttctctg

SEQ ID NO: 5972421 - DNA, 25 bp, Homo sapien
gaccaccgaacttttctggtctatc

SEQ ID NO: 5972422 - DNA, 25 bp, Homo sapien
gcaagttcttggtaatgagaccgaa

SEQ ID NO: 5972423 - DNA, 25 bp, Homo sapien
cggaggcctcttgaaattccttgtt

SEQ ID NO: 5972424 - DNA, 25 bp, Homo sapien
atctaaagatatccatggtatagtc

SEQ ID NO: 5972425 - DNA, 25 bp, Homo sapien
aggcgtgcaagtctgctaaaagaac

SEQ ID NO: 5972426 - DNA, 25 bp, Homo sapien
gagccaaacctggaaccatagggtt

SEQ ID NO: 5972427 - DNA, 25 bp, Homo sapien
ttcatgttgtccaaaaaggcgtgca

SEQ ID NO: 5972428 - DNA, 25 bp, Homo sapien
tggtgcaatgacatattggacaaat

SEQ ID NO: 5972429 - DNA, 25 bp, Homo sapien
aattcttgtctgattggctccaata

SEQ ID NO: 5972430 - DNA, 25 bp, Homo sapien
aatgtgctcttttcttgtagcccaa

SEQ ID NO: 5972431 - DNA, 25 bp, Homo sapien
ttggattggtgcaatgacatattgg

SEQ ID NO: 5972432 - DNA, 25 bp, Homo sapien
ctcaagatagctttgatggtcaatt

SEQ ID NO: 5972433 - DNA, 25 bp, Homo sapien
ttagctggtaagaagagccaacaac

SEQ ID NO: 5972434 - DNA, 25 bp, Homo sapien
ggtcttagtagcgcctgggtactta

SEQ ID NO: 5972435 - DNA, 25 bp, Homo sapien
cgcctgcccttttagcatcgttttg

SEQ ID NO: 5972436 - DNA, 25 bp, Homo sapien
cgccttcatgttgtccaaaaaggcg

SEQ ID NO: 5972437 - DNA, 25 bp, Homo sapien
ttgcaagttcttggtaatgagaccg

SEQ ID NO: 5972438 - DNA, 25 bp, Homo sapien
tttagatcaggtggggacaattttt

SEQ ID NO: 5972439 - DNA, 25 bp, Homo sapien
ccggggctacaaaatgcactattga

SEQ ID NO: 5972440 - DNA, 25 bp, Homo sapien
gccaacaacaaattttagcttttca

SEQ ID NO: 5972441 - DNA, 25 bp, Homo sapien
gaattgttcgtccaacgcttgcatt

SEQ ID NO: 5972442 - DNA, 25 bp, Homo sapien
ttagcctttttcgacttttgtggtg

SEQ ID NO: 5972443 - DNA, 25 bp, Homo sapien
ttcttcgaaggatttgtaggtaatt

SEQ ID NO: 5972444 - DNA, 25 bp, Homo sapien
gttcaccacttccaatggcgccttc

SEQ ID NO: 5972445 - DNA, 25 bp, Homo sapien
tgtgctcttttcttgtagcccaaac

SEQ ID NO: 5972446 - DNA, 25 bp, Homo sapien
tggcgacttgcttgacaacatcagc

SEQ ID NO: 5972447 - DNA, 25 bp, Homo sapien
ttcggaggcctcttgaaattccttg

SEQ ID NO: 5972448 - DNA, 25 bp, Homo sapien
aagagccaacaacaaattttagctt

SEQ ID NO: 5972449 - DNA, 25 bp, Homo sapien
ttagggtcaaccgtggcagcagagg

SEQ ID NO: 5972450 - DNA, 25 bp, Homo sapien
agccaatttcatttcttcgaaggat

SEQ ID NO: 5972451 - DNA, 25 bp, Homo sapien
ttgctttggttcttccaaaaggtcg

SEQ ID NO: 5972452 - DNA, 25 bp, Homo sapien
gcttttcaattggaacattgatgct

SEQ ID NO: 5972453 - DNA, 25 bp, Homo sapien
tatagtctggagttagctggtaaga

SEQ ID NO: 5972454 - DNA, 25 bp, Homo sapien
tgcccttttagcatcgttttgtgaa

SEQ ID NO: 5972455 - DNA, 25 bp, Homo sapien
taaaggatagataagcccactcaat

SEQ ID NO: 5972456 - DNA, 25 bp, Homo sapien
gtctggagttagctggtaagaagag

SEQ ID NO: 5972457 - DNA, 25 bp, Homo sapien
ccaaacttcaattcttggattggtg

SEQ ID NO: 5972458 - DNA, 25 bp, Homo sapien
gtcaattcatagtatttggccctat

SEQ ID NO: 5972459 - DNA, 25 bp, Homo sapien
aagcccactcaataatggattggcg

SEQ ID NO: 5972460 - DNA, 25 bp, Homo sapien
acagtaaaccattctcttcgacgtt

SEQ ID NO: 5972461 - DNA, 25 bp, Homo sapien
tcgacaccaccaaattggcaatcaa

SEQ ID NO: 5972462 - DNA, 25 bp, Homo sapien
aaaataaccacaatgaggtcttcca

SEQ ID NO: 5972463 - DNA, 25 bp, Homo sapien
agaagagccaacaacaaattttagc

SEQ ID NO: 5972464 - DNA, 25 bp, Homo sapien
atttttgaattcggatcagaggcag

SEQ ID NO: 5972465 - DNA, 25 bp, Homo sapien
gttcttccaaaaggtcgatttttga

SEQ ID NO: 5972466 - DNA, 25 bp, Homo sapien
tgttggcaaattcttgtctgattgg

SEQ ID NO: 5972467 - DNA, 25 bp, Homo sapien
ccaccaaattggcaatcaacatcta

SEQ ID NO: 5972468 - DNA, 25 bp, Homo sapien
agggaaccaccgctcaagaggccgc

SEQ ID NO: 5972469 - DNA, 25 bp, Homo sapien
aacttaattagcttctttacatgcg

SEQ ID NO: 5972470 - DNA, 25 bp, Homo sapien
cgtcagagtattttgacaagatcaa

SEQ ID NO: 5972471 - DNA, 25 bp, Homo sapien
aatttgaatcgcaattgatggaatg

SEQ ID NO: 5972472 - DNA, 25 bp, Homo sapien
gacaatgacattgccttattcaaag

SEQ ID NO: 5972473 - DNA, 25 bp, Homo sapien
gcaggcaaacaatatattatgcagg

SEQ ID NO: 5972474 - DNA, 25 bp, Homo sapien
ggaatataagggagggaaccaccgc

SEQ ID NO: 5972475 - DNA, 25 bp, Homo sapien
aagtcaatatacctagcgtgccgct

SEQ ID NO: 5972476 - DNA, 25 bp, Homo sapien
caatgtttctgatcaacagttagtt

SEQ ID NO: 5972477 - DNA, 25 bp, Homo sapien
ctacttttcagtgcagaatttgaat

SEQ ID NO: 5972478 - DNA, 25 bp, Homo sapien
ctgatcaacagttagtttctgcgat

SEQ ID NO: 5972479 - DNA, 25 bp, Homo sapien
ttcaaagccgccggtgggaaaatta

SEQ ID NO: 5972480 - DNA, 25 bp, Homo sapien
ctatccgtggtacaagatgaactca

SEQ ID NO: 5972481 - DNA, 25 bp, Homo sapien
atgtttctgatcaacagttagtttc

SEQ ID NO: 5972482 - DNA, 25 bp, Homo sapien
agttcttaaacgatatcagacacgt

SEQ ID NO: 5972483 - DNA, 25 bp, Homo sapien
tatagaatggattaacgaattttcg

SEQ ID NO: 5972484 - DNA, 25 bp, Homo sapien
gtgcgaaatgcgtacctggaacact

SEQ ID NO: 5972485 - DNA, 25 bp, Homo sapien
aattgatggaatgtaaaggcatagc

SEQ ID NO: 5972486 - DNA, 25 bp, Homo sapien
agacagaattattagatgcattaga

SEQ ID NO: 5972487 - DNA, 25 bp, Homo sapien
tcaggaaatgaagatagagacagaa

SEQ ID NO: 5972488 - DNA, 25 bp, Homo sapien
caactttgatattgctaaatgtttc

SEQ ID NO: 5972489 - DNA, 25 bp, Homo sapien
atattgctgggctcaccagaggcgc

SEQ ID NO: 5972490 - DNA, 25 bp, Homo sapien
ctggaaaacattagggaaagactta

SEQ ID NO: 5972491 - DNA, 25 bp, Homo sapien
aatatattatgcaggacaatgacat

SEQ ID NO: 5972492 - DNA, 25 bp, Homo sapien
tattttgacaagatcaaggaagata

SEQ ID NO: 5972493 - DNA, 25 bp, Homo sapien
agaaggtaatgttgatcctgtcaga

SEQ ID NO: 5972494 - DNA, 25 bp, Homo sapien
agaaagttgttgaacttaattagct

SEQ ID NO: 5972495 - DNA, 25 bp, Homo sapien
atggaatataagggagggaaccacc

SEQ ID NO: 5972496 - DNA, 25 bp, Homo sapien
atttctggaaaacattagggaaaga

SEQ ID NO: 5972497 - DNA, 25 bp, Homo sapien
tagtaagaagatgagaatggtttcg

SEQ ID NO: 5972498 - DNA, 25 bp, Homo sapien
tatattatgcaggacaatgacattg

SEQ ID NO: 5972499 - DNA, 25 bp, Homo sapien
gcttctttacatgcggcccacaaga

SEQ ID NO: 5972500 - DNA, 25 bp, Homo sapien
tgaacttaattagcttctttacatg

SEQ ID NO: 5972501 - DNA, 25 bp, Homo sapien
tttaacctccaaaccaactttgata

SEQ ID NO: 5972502 - DNA, 25 bp, Homo sapien
ttagaggaacatttgtttaacggta

SEQ ID NO: 5972503 - DNA, 25 bp, Homo sapien
agcgctgatgtaataaaatatgacg

SEQ ID NO: 5972504 - DNA, 25 bp, Homo sapien
aaaggcatagcgtcagagtattttg

SEQ ID NO: 5972505 - DNA, 25 bp, Homo sapien
gaaatattatagaatggattaacga

SEQ ID NO: 5972506 - DNA, 25 bp, Homo sapien
tttccaagcaataacaaactcaaaa

SEQ ID NO: 5972507 - DNA, 25 bp, Homo sapien
tttattgagaatatatcagagtgcg

SEQ ID NO: 5972508 - DNA, 25 bp, Homo sapien
ctgcgataccgcaaataatactaga

SEQ ID NO: 5972509 - DNA, 25 bp, Homo sapien
gttcaccaatggaatataagggagg

SEQ ID NO: 5972510 - DNA, 25 bp, Homo sapien
gacttatcaaacgtgcaggcaaaca

SEQ ID NO: 5972511 - DNA, 25 bp, Homo sapien
tgaatcgcaattgatggaatgtaaa

SEQ ID NO: 5972512 - DNA, 25 bp, Homo sapien
cttaaaggaagacatcacccatata

SEQ ID NO: 5972513 - DNA, 25 bp, Homo sapien
attaacgaattttcgccaggagata

SEQ ID NO: 5972514 - DNA, 25 bp, Homo sapien
atggtttcgaagaattctaaagaac

SEQ ID NO: 5972515 - DNA, 25 bp, Homo sapien
aggattcttaaaggaagacatcacc

SEQ ID NO: 5972516 - DNA, 25 bp, Homo sapien
ctccaaaccaactttgatattgcta

SEQ ID NO: 5972517 - DNA, 25 bp, Homo sapien
cttagaatttctggaaaacattagg

SEQ ID NO: 5972518 - DNA, 25 bp, Homo sapien
gtgcaggcaaacaatatattatgca

SEQ ID NO: 5972519 - DNA, 25 bp, Homo sapien
ttgccttattcaaagccgccggtgg

SEQ ID NO: 5972520 - DNA, 25 bp, Homo sapien
aattgggaaatcctgcaaattatcc

SEQ ID NO: 5972521 - DNA, 25 bp, Homo sapien
acttttcagtgcagaatttgaatcg

SEQ ID NO: 5972522 - DNA, 25 bp, Homo sapien
tatcagcgctgatgtaataaaatat

SEQ ID NO: 5972523 - DNA, 25 bp, Homo sapien
ttgggtaacaagttcttaaacgata

SEQ ID NO: 5972524 - DNA, 25 bp, Homo sapien
gctcaccagaggcgcatctcaaggc

SEQ ID NO: 5972525 - DNA, 25 bp, Homo sapien
ggaaccaccgctaaatgagtcttta

SEQ ID NO: 5972526 - DNA, 25 bp, Homo sapien
aagacatcacccatatagaaggtaa

SEQ ID NO: 5972527 - DNA, 25 bp, Homo sapien
actttgatattgctaaatgtttcac

SEQ ID NO: 5972528 - DNA, 25 bp, Homo sapien
cagacacgtagaggggatatttcaa

SEQ ID NO: 5972529 - DNA, 25 bp, Homo sapien
ggaacctggatgaagtcaaaatttt

SEQ ID NO: 5972530 - DNA, 25 bp, Homo sapien
taaatcgacttttttccaagcaata

SEQ ID NO: 5972531 - DNA, 25 bp, Homo sapien
agggatagtagggcttgctaatgtt

SEQ ID NO: 5972532 - DNA, 25 bp, Homo sapien
ctagcgtgccgctctctaatttatt

SEQ ID NO: 5972533 - DNA, 25 bp, Homo sapien
cgaataatccaacttcagggatagt

SEQ ID NO: 5972534 - DNA, 25 bp, Homo sapien
agataccaatgtttctgatcaacag

SEQ ID NO: 5972535 - DNA, 25 bp, Homo sapien
ggatagtagggcttgctaatgttgg

SEQ ID NO: 5972536 - DNA, 25 bp, Homo sapien
cattcgctaccattgacgcagaatg

SEQ ID NO: 5972537 - DNA, 25 bp, Homo sapien
atcagagtgcgaaatgcgtacctgg

SEQ ID NO: 5972538 - DNA, 25 bp, Homo sapien
acttgcgtgaaacatttatcagcgc

SEQ ID NO: 5972539 - DNA, 25 bp, Homo sapien
atgtttcacctcaagattacgttag

SEQ ID NO: 5972540 - DNA, 25 bp, Homo sapien
aaaccaactttgatattgctaaatg

SEQ ID NO: 5972541 - DNA, 25 bp, Homo sapien
cgctaaatgagtctttactaaaatc

SEQ ID NO: 5972542 - DNA, 25 bp, Homo sapien
cgatatcagacacgtagaggggata

SEQ ID NO: 5972543 - DNA, 25 bp, Homo sapien
cctcaagattacgttaggaatgaaa

SEQ ID NO: 5972544 - DNA, 25 bp, Homo sapien
ggattaacgaattttcgccaggaga

SEQ ID NO: 5972545 - DNA, 25 bp, Homo sapien
tactaaaatctaagggacttatcaa

SEQ ID NO: 5972546 - DNA, 25 bp, Homo sapien
ccaccgctaaatgagtctttactaa

SEQ ID NO: 5972547 - DNA, 25 bp, Homo sapien
atatagaaggtaatgttgatcctgt

SEQ ID NO: 5972548 - DNA, 25 bp, Homo sapien
tctgaagaagatggaaccaccgcta

SEQ ID NO: 5972549 - DNA, 25 bp, Homo sapien
taataaaatatgacgatctgaagaa

SEQ ID NO: 5972550 - DNA, 25 bp, Homo sapien
aatataagggagggaaccaccgctc

SEQ ID NO: 5972551 - DNA, 25 bp, Homo sapien
atccatagcgacttgcgtgaaacat

SEQ ID NO: 5972552 - DNA, 25 bp, Homo sapien
atagcgtcagagtattttgacaaga

SEQ ID NO: 5972553 - DNA, 25 bp, Homo sapien
gaaatgagaaagttgttgaacttaa

SEQ ID NO: 5972554 - DNA, 25 bp, Homo sapien
aacgatatcagacacgtagagggga

SEQ ID NO: 5972555 - DNA, 25 bp, Homo sapien
gagaatggtttcgaagaattctaaa

SEQ ID NO: 5972556 - DNA, 25 bp, Homo sapien
cttaaacgatatcagacacgtagag

SEQ ID NO: 5972557 - DNA, 25 bp, Homo sapien
ggagggaaccaccgctcaagaggcc

SEQ ID NO: 5972558 - DNA, 25 bp, Homo sapien
accaatggaatataagggagggaac

SEQ ID NO: 5972559 - DNA, 25 bp, Homo sapien
agaggattcttaaaggaagacatca

SEQ ID NO: 5972560 - DNA, 25 bp, Homo sapien
aattctaaagaacatcaggaaatga

SEQ ID NO: 5972561 - DNA, 25 bp, Homo sapien
ataaattcctacttttcagtgcaga

SEQ ID NO: 5972562 - DNA, 25 bp, Homo sapien
cccacaagaagttcaccaatggaat

SEQ ID NO: 5972563 - DNA, 25 bp, Homo sapien
acagaattattagatgcattagagg

SEQ ID NO: 5972564 - DNA, 25 bp, Homo sapien
gctaatgttggtaaatcgacttttt

SEQ ID NO: 5972565 - DNA, 25 bp, Homo sapien
tttcaagtggtgagaggattcttaa

SEQ ID NO: 5972566 - DNA, 25 bp, Homo sapien
ctaaaatctaagggacttatcaaac

SEQ ID NO: 5972567 - DNA, 25 bp, Homo sapien
gtaagaagatgagaatggtttcgaa

SEQ ID NO: 5972568 - DNA, 25 bp, Homo sapien
tatccattcgctaccattgacgcag

SEQ ID NO: 5972569 - DNA, 25 bp, Homo sapien
gccatggtttgggtaacaagttctt

SEQ ID NO: 5972570 - DNA, 25 bp, Homo sapien
tcaaaattttgaataagcataactt

SEQ ID NO: 5972571 - DNA, 25 bp, Homo sapien
atatcagacacgtagaggggatatt

SEQ ID NO: 5972572 - DNA, 25 bp, Homo sapien
acaatatattatgcaggacaatgac

SEQ ID NO: 5972573 - DNA, 25 bp, Homo sapien
tgatattgctgggctcaccagaggc

SEQ ID NO: 5972574 - DNA, 25 bp, Homo sapien
tagggcttgctaatgttggtaaatc

SEQ ID NO: 5972575 - DNA, 25 bp, Homo sapien
agatggaaccaccgctaaatgagtc

SEQ ID NO: 5972576 - DNA, 25 bp, Homo sapien
gatctgaagaagatggaaccaccgc

SEQ ID NO: 5972577 - DNA, 25 bp, Homo sapien
gaagatggaaccaccgctaaatgag

SEQ ID NO: 5972578 - DNA, 25 bp, Homo sapien
agtattttgacaagatcaaggaaga

SEQ ID NO: 5972579 - DNA, 25 bp, Homo sapien
attcctacttttcagtgcagaattt

SEQ ID NO: 5972580 - DNA, 25 bp, Homo sapien
ttcttaaaggaagacatcacccata

SEQ ID NO: 5972581 - DNA, 25 bp, Homo sapien
caaagtcaatatacctagcgtgccg

SEQ ID NO: 5972582 - DNA, 25 bp, Homo sapien
atagaaggtaatgttgatcctgtca

SEQ ID NO: 5972583 - DNA, 25 bp, Homo sapien
taattagcttctttacatgcggccc

SEQ ID NO: 5972584 - DNA, 25 bp, Homo sapien
ctaaagaacatcaggaaatgaagat

SEQ ID NO: 5972585 - DNA, 25 bp, Homo sapien
tattgagaatatatcagagtgcgaa

SEQ ID NO: 5972586 - DNA, 25 bp, Homo sapien
tggaatgtaaaggcatagcgtcaga

SEQ ID NO: 5972587 - DNA, 25 bp, Homo sapien
tatcaaacgtgcaggcaaacaatat

SEQ ID NO: 5972588 - DNA, 25 bp, Homo sapien
tgcattagaggaacatttgtttaac

SEQ ID NO: 5972589 - DNA, 25 bp, Homo sapien
aaatgtttcacctcaagattacgtt

SEQ ID NO: 5972590 - DNA, 25 bp, Homo sapien
ttctggaaaacattagggaaagact

SEQ ID NO: 5972591 - DNA, 25 bp, Homo sapien
aagggacttatcaaacgtgcaggca

SEQ ID NO: 5972592 - DNA, 25 bp, Homo sapien
cattagaggaacatttgtttaacgg

SEQ ID NO: 5972593 - DNA, 25 bp, Homo sapien
atatcagagtgcgaaatgcgtacct

SEQ ID NO: 5972594 - DNA, 25 bp, Homo sapien
ggagataaattcctacttttcagtg

SEQ ID NO: 5972595 - DNA, 25 bp, Homo sapien
acccatatagaaggtaatgttgatc

SEQ ID NO: 5972596 - DNA, 25 bp, Homo sapien
atatcgaataatccaacttcaggga

SEQ ID NO: 5972597 - DNA, 25 bp, Homo sapien
tattatgcaggacaatgacattgcc

SEQ ID NO: 5972598 - DNA, 25 bp, Homo sapien
ttgaataagcataactttttaacct

SEQ ID NO: 5972599 - DNA, 25 bp, Homo sapien
tcagagtattttgacaagatcaagg

SEQ ID NO: 5972600 - DNA, 25 bp, Homo sapien
aaggaagacatcacccatatagaag

SEQ ID NO: 5972601 - DNA, 25 bp, Homo sapien
ttttcagtgcagaatttgaatcgca

SEQ ID NO: 5972602 - DNA, 25 bp, Homo sapien
tttcgaagaattctaaagaacatca

SEQ ID NO: 5972603 - DNA, 25 bp, Homo sapien
tatgacgatctgaagaagatggaac

SEQ ID NO: 5972604 - DNA, 25 bp, Homo sapien
gccttattcaaagccgccggtggga

SEQ ID NO: 5972605 - DNA, 25 bp, Homo sapien
cagagtgcgaaatgcgtacctggaa

SEQ ID NO: 5972606 - DNA, 25 bp, Homo sapien
tcaccaatggaatataagggaggga

SEQ ID NO: 5972607 - DNA, 25 bp, Homo sapien
gatcaacagttagtttctgcgatac

SEQ ID NO: 5972608 - DNA, 25 bp, Homo sapien
aacttcagggatagtagggcttgct

SEQ ID NO: 5972609 - DNA, 25 bp, Homo sapien
atacctagcgtgccgctctctaatt

SEQ ID NO: 5972610 - DNA, 25 bp, Homo sapien
gggctcaccagaggcgcatctcaag

SEQ ID NO: 5972611 - DNA, 25 bp, Homo sapien
cctgtcagagatctatccgtggtac

SEQ ID NO: 5972612 - DNA, 25 bp, Homo sapien
catggtttgggtaacaagttcttaa

SEQ ID NO: 5972613 - DNA, 25 bp, Homo sapien
caagatcaaggaagataccaatgtt

SEQ ID NO: 5972614 - DNA, 25 bp, Homo sapien
gaataagcataactttttaacctcc

SEQ ID NO: 5972615 - DNA, 25 bp, Homo sapien
caagaggccgcgggtgtaatccata

SEQ ID NO: 5972616 - DNA, 25 bp, Homo sapien
gtggtgagaggattcttaaaggaag

SEQ ID NO: 5972617 - DNA, 25 bp, Homo sapien
gggatatttcaagtggtgagaggat

SEQ ID NO: 5972618 - DNA, 25 bp, Homo sapien
aacatcaggaaatgaagatagagac

SEQ ID NO: 5972619 - DNA, 25 bp, Homo sapien
aagtggtgagaggattcttaaagga

SEQ ID NO: 5972620 - DNA, 25 bp, Homo sapien
caatgacattgccttattcaaagcc

SEQ ID NO: 5972621 - DNA, 25 bp, Homo sapien
agagatctatccgtggtacaagatg

SEQ ID NO: 5972622 - DNA, 25 bp, Homo sapien
agatctatccgtggtacaagatgaa

SEQ ID NO: 5972623 - DNA, 25 bp, Homo sapien
tattcaaagccgccggtgggaaaat

SEQ ID NO: 5972624 - DNA, 25 bp, Homo sapien
aggacaatgacattgccttattcaa

SEQ ID NO: 5972625 - DNA, 25 bp, Homo sapien
cgcgggtgtaatccatagcgacttg

SEQ ID NO: 5972626 - DNA, 25 bp, Homo sapien
gtggtacaagatgaactcatcttga

SEQ ID NO: 5972627 - DNA, 25 bp, Homo sapien
aagttcaccaatggaatataaggga

SEQ ID NO: 5972628 - DNA, 25 bp, Homo sapien
tagatgcattagaggaacatttgtt

SEQ ID NO: 5972629 - DNA, 25 bp, Homo sapien
gatggaatgtaaaggcatagcgtca

SEQ ID NO: 5972630 - DNA, 25 bp, Homo sapien
taaacgatatcagacacgtagaggg

SEQ ID NO: 5972631 - DNA, 25 bp, Homo sapien
catctcaaggccatggtttgggtaa

SEQ ID NO: 5972632 - DNA, 25 bp, Homo sapien
gacacgtagaggggatatttcaagt

SEQ ID NO: 5972633 - DNA, 25 bp, Homo sapien
aaatgagtctttactaaaatctaag

SEQ ID NO: 5972634 - DNA, 25 bp, Homo sapien
cttattcaaagccgccggtgggaaa

SEQ ID NO: 5972635 - DNA, 25 bp, Homo sapien
tagaatttctggaaaacattaggga

SEQ ID NO: 5972636 - DNA, 25 bp, Homo sapien
tgaagaagatggaaccaccgctaaa

SEQ ID NO: 5972637 - DNA, 25 bp, Homo sapien
aggccatggtttgggtaacaagttc

SEQ ID NO: 5972638 - DNA, 25 bp, Homo sapien
acctccaaaccaactttgatattgc

SEQ ID NO: 5972639 - DNA, 25 bp, Homo sapien
tcctgcaaattatccattcgctacc

SEQ ID NO: 5972640 - DNA, 25 bp, Homo sapien
ttttacttgggaggatatcgaataa

SEQ ID NO: 5972641 - DNA, 25 bp, Homo sapien
tccaagcaataacaaactcaaaatt

SEQ ID NO: 5972642 - DNA, 25 bp, Homo sapien
ttagggaaagacttagtaagaagat

SEQ ID NO: 5972643 - DNA, 25 bp, Homo sapien
tcagcgctgatgtaataaaatatga

SEQ ID NO: 5972644 - DNA, 25 bp, Homo sapien
cgtgccgctctctaatttattgaga

SEQ ID NO: 5972645 - DNA, 25 bp, Homo sapien
gaatgtgccaaagtcaatataccta

SEQ ID NO: 5972646 - DNA, 25 bp, Homo sapien
ttatgcaggacaatgacattgcctt

SEQ ID NO: 5972647 - DNA, 25 bp, Homo sapien
ttgaaagacttagaatttctggaaa

SEQ ID NO: 5972648 - DNA, 25 bp, Homo sapien
agcaataacaaactcaaaattggga

SEQ ID NO: 5972649 - DNA, 25 bp, Homo sapien
ttttgaataagcataactttttaac

SEQ ID NO: 5972650 - DNA, 25 bp, Homo sapien
aacaagttcttaaacgatatcagac

SEQ ID NO: 5972651 - DNA, 25 bp, Homo sapien
aattattagatgcattagaggaaca

SEQ ID NO: 5972652 - DNA, 25 bp, Homo sapien
ggtgagaggattcttaaaggaagac

SEQ ID NO: 5972653 - DNA, 25 bp, Homo sapien
gcgaaatgcgtacctggaacactca

SEQ ID NO: 5972654 - DNA, 25 bp, Homo sapien
tttactaaaatctaagggacttatc

SEQ ID NO: 5972655 - DNA, 25 bp, Homo sapien
ttgatggaatgtaaaggcatagcgt

SEQ ID NO: 5972656 - DNA, 25 bp, Homo sapien
gagaatatatcagagtgcgaaatgc

SEQ ID NO: 5972657 - DNA, 25 bp, Homo sapien
aggaagataccaatgtttctgatca

SEQ ID NO: 5972658 - DNA, 25 bp, Homo sapien
acgtagaggggatatttcaagtggt

SEQ ID NO: 5972659 - DNA, 25 bp, Homo sapien
ggtaaatcgacttttttccaagcaa

SEQ ID NO: 5972660 - DNA, 25 bp, Homo sapien
tgacgatctgaagaagatggaacca

SEQ ID NO: 5972661 - DNA, 25 bp, Homo sapien
cgctcaagaggccgcgggtgtaatc

SEQ ID NO: 5972662 - DNA, 25 bp, Homo sapien
cttaattagcttctttacatgcggc

SEQ ID NO: 5972663 - DNA, 25 bp, Homo sapien
agcgacttgcgtgaaacatttatca

SEQ ID NO: 5972664 - DNA, 25 bp, Homo sapien
gcaggacaatgacattgccttattc

SEQ ID NO: 5972665 - DNA, 25 bp, Homo sapien
actagaaatgagaaagttgttgaac

SEQ ID NO: 5972666 - DNA, 25 bp, Homo sapien
tcagggatagtagggcttgctaatg

SEQ ID NO: 5972667 - DNA, 25 bp, Homo sapien
gcatagcgtcagagtattttgacaa

SEQ ID NO: 5972668 - DNA, 25 bp, Homo sapien
aaaaaaatccggcatttcaaagatc

SEQ ID NO: 5972669 - DNA, 25 bp, Homo sapien
catttatcagcgctgatgtaataaa

SEQ ID NO: 5972670 - DNA, 25 bp, Homo sapien
gggaggatatcgaataatccaactt

SEQ ID NO: 5972671 - DNA, 25 bp, Homo sapien
cctggaacactcacaatatatgata

SEQ ID NO: 5972672 - DNA, 25 bp, Homo sapien
tttatcagcgctgatgtaataaaat

SEQ ID NO: 5972673 - DNA, 25 bp, Homo sapien
aggcatagcgtcagagtattttgac

SEQ ID NO: 5972674 - DNA, 25 bp, Homo sapien
gcgataccgcaaataatactagaaa

SEQ ID NO: 5972675 - DNA, 25 bp, Homo sapien
cagttagtttctgcgataccgcaaa

SEQ ID NO: 5972676 - DNA, 25 bp, Homo sapien
gccaaagtcaatatacctagcgtgc

SEQ ID NO: 5972677 - DNA, 25 bp, Homo sapien
ttgacaagatcaaggaagataccaa

SEQ ID NO: 5972678 - DNA, 25 bp, Homo sapien
tagcttctttacatgcggcccacaa

SEQ ID NO: 5972679 - DNA, 25 bp, Homo sapien
ttctttacatgcggcccacaagaag

SEQ ID NO: 5972680 - DNA, 25 bp, Homo sapien
tgtaataaaatatgacgatctgaag

SEQ ID NO: 5972681 - DNA, 25 bp, Homo sapien
catcttgaaagacttagaatttctg

SEQ ID NO: 5972682 - DNA, 25 bp, Homo sapien
aatatatgatattgctgggctcacc

SEQ ID NO: 5972683 - DNA, 25 bp, Homo sapien
tagtttctgcgataccgcaaataat

SEQ ID NO: 5972684 - DNA, 25 bp, Homo sapien
caagcaataacaaactcaaaattgg

SEQ ID NO: 5972685 - DNA, 25 bp, Homo sapien
gttagtttctgcgataccgcaaata

SEQ ID NO: 5972686 - DNA, 25 bp, Homo sapien
tcagagatctatccgtggtacaaga

SEQ ID NO: 5972687 - DNA, 25 bp, Homo sapien
aaagaacatcaggaaatgaagatag

SEQ ID NO: 5972688 - DNA, 25 bp, Homo sapien
cgacttgcgtgaaacatttatcagc

SEQ ID NO: 5972689 - DNA, 25 bp, Homo sapien
tgctaaatgtttcacctcaagatta

SEQ ID NO: 5972690 - DNA, 25 bp, Homo sapien
agaattctaaagaacatcaggaaat

SEQ ID NO: 5972691 - DNA, 25 bp, Homo sapien
gatgtaataaaatatgacgatctga

SEQ ID NO: 5972692 - DNA, 25 bp, Homo sapien
gagtgcgaaatgcgtacctggaaca

SEQ ID NO: 5972693 - DNA, 25 bp, Homo sapien
catcaggaaatgaagatagagacag

SEQ ID NO: 5972694 - DNA, 25 bp, Homo sapien
cttagtaagaagatgagaatggttt

SEQ ID NO: 5972695 - DNA, 25 bp, Homo sapien
ttctgcgataccgcaaataatacta

SEQ ID NO: 5972696 - DNA, 25 bp, Homo sapien
ttggaacctggatgaagtcaaaatt

SEQ ID NO: 5972697 - DNA, 25 bp, Homo sapien
acgatctgaagaagatggaaccacc

SEQ ID NO: 5972698 - DNA, 25 bp, Homo sapien
ttgcgtgaaacatttatcagcgctg

SEQ ID NO: 5972699 - DNA, 25 bp, Homo sapien
gccaggagataaattcctacttttc

SEQ ID NO: 5972700 - DNA, 25 bp, Homo sapien
atccaacttcagggatagtagggct

SEQ ID NO: 5972701 - DNA, 25 bp, Homo sapien
cgctaccattgacgcagaatgtgcc

SEQ ID NO: 5972702 - DNA, 25 bp, Homo sapien
taacctccaaaccaactttgatatt

SEQ ID NO: 5972703 - DNA, 25 bp, Homo sapien
tgatattgctaaatgtttcacctca

SEQ ID NO: 5972704 - DNA, 25 bp, Homo sapien
ttgttgaacttaattagcttcttta

SEQ ID NO: 5972705 - DNA, 25 bp, Homo sapien
atgtgccaaagtcaatatacctagc

SEQ ID NO: 5972706 - DNA, 25 bp, Homo sapien
gggaaatcctgcaaattatccattc

SEQ ID NO: 5972707 - DNA, 25 bp, Homo sapien
ggcgcatctcaaggccatggtttgg

SEQ ID NO: 5972708 - DNA, 25 bp, Homo sapien
cgcatctcaaggccatggtttgggt

SEQ ID NO: 5972709 - DNA, 25 bp, Homo sapien
gcaattgatggaatgtaaaggcata

SEQ ID NO: 5972710 - DNA, 25 bp, Homo sapien
gatgcattagaggaacatttgttta

SEQ ID NO: 5972711 - DNA, 25 bp, Homo sapien
tcacccatatagaaggtaatgttga

SEQ ID NO: 5972712 - DNA, 25 bp, Homo sapien
cgctgatgtaataaaatatgacgat

SEQ ID NO: 5972713 - DNA, 25 bp, Homo sapien
caggagataaattcctacttttcag

SEQ ID NO: 5972714 - DNA, 25 bp, Homo sapien
gaagaattctaaagaacatcaggaa

SEQ ID NO: 5972715 - DNA, 25 bp, Homo sapien
ctctaatttattgagaatatatcag

SEQ ID NO: 5972716 - DNA, 25 bp, Homo sapien
tacctggaacactcacaatatatga

SEQ ID NO: 5972717 - DNA, 25 bp, Homo sapien
tcaaaattgggaaatcctgcaaatt

SEQ ID NO: 5972718 - DNA, 25 bp, Homo sapien
gacttagaatttctggaaaacatta

SEQ ID NO: 5972719 - DNA, 25 bp, Homo sapien
ttggtaaatcgacttttttccaagc

SEQ ID NO: 5972720 - DNA, 25 bp, Homo sapien
atcattggaacctggatgaagtcaa

SEQ ID NO: 5972721 - DNA, 25 bp, Homo sapien
gaggcgcatctcaaggccatggttt

SEQ ID NO: 5972722 - DNA, 25 bp, Homo sapien
gtgcagaatttgaatcgcaattgat

SEQ ID NO: 5972723 - DNA, 25 bp, Homo sapien
ctaccattgacgcagaatgtgccaa

SEQ ID NO: 5972724 - DNA, 25 bp, Homo sapien
actcacaatatatgatattgctggg

SEQ ID NO: 5972725 - DNA, 25 bp, Homo sapien
tgctgggctcaccagaggcgcatct

SEQ ID NO: 5972726 - DNA, 25 bp, Homo sapien
cttttttccaagcaataacaaactc

SEQ ID NO: 5972727 - DNA, 25 bp, Homo sapien
ctttacatgcggcccacaagaagtt

SEQ ID NO: 5972728 - DNA, 25 bp, Homo sapien
aaacaatatattatgcaggacaatg

SEQ ID NO: 5972729 - DNA, 25 bp, Homo sapien
ccaaaccaactttgatattgctaaa

SEQ ID NO: 5972730 - DNA, 25 bp, Homo sapien
gcttgctaatgttggtaaatcgact

SEQ ID NO: 5972731 - DNA, 25 bp, Homo sapien
cttcagggatagtagggcttgctaa

SEQ ID NO: 5972732 - DNA, 25 bp, Homo sapien
ccaccgctcaagaggccgcgggtgt

SEQ ID NO: 5972733 - DNA, 25 bp, Homo sapien
caaggaagataccaatgtttctgat

SEQ ID NO: 5972734 - DNA, 25 bp, Homo sapien
agaacatcaggaaatgaagatagag

SEQ ID NO: 5972735 - DNA, 25 bp, Homo sapien
gatgaactcatcttgaaagacttag

SEQ ID NO: 5972736 - DNA, 25 bp, Homo sapien
taatgttggtaaatcgacttttttc

SEQ ID NO: 5972737 - DNA, 25 bp, Homo sapien
tgagaaagttgttgaacttaattag

SEQ ID NO: 5972738 - DNA, 25 bp, Homo sapien
ctaagggacttatcaaacgtgcagg

SEQ ID NO: 5972739 - DNA, 25 bp, Homo sapien
acaagatgaactcatcttgaaagac

SEQ ID NO: 5972740 - DNA, 25 bp, Homo sapien
gaaatgaagatagagacagaattat

SEQ ID NO: 5972741 - DNA, 25 bp, Homo sapien
ccgctctctaatttattgagaatat

SEQ ID NO: 5972742 - DNA, 25 bp, Homo sapien
atttgtcagaaatattatagaatgg

SEQ ID NO: 5972743 - DNA, 25 bp, Homo sapien
atattgctaaatgtttcacctcaag

SEQ ID NO: 5972744 - DNA, 25 bp, Homo sapien
tgtaatccatagcgacttgcgtgaa

SEQ ID NO: 5972745 - DNA, 25 bp, Homo sapien
atgtaaaggcatagcgtcagagtat

SEQ ID NO: 5972746 - DNA, 25 bp, Homo sapien
ataacaaactcaaaattgggaaatc

SEQ ID NO: 5972747 - DNA, 25 bp, Homo sapien
agatgagaatggtttcgaagaattc

SEQ ID NO: 5972748 - DNA, 25 bp, Homo sapien
gttgaacttaattagcttctttaca

SEQ ID NO: 5972749 - DNA, 25 bp, Homo sapien
aatgcgtacctggaacactcacaat

SEQ ID NO: 5972750 - DNA, 25 bp, Homo sapien
atgagtctttactaaaatctaaggg

SEQ ID NO: 5972751 - DNA, 25 bp, Homo sapien
cattggaacctggatgaagtcaaaa

SEQ ID NO: 5972752 - DNA, 25 bp, Homo sapien
ttcttaaacgatatcagacacgtag

SEQ ID NO: 5972753 - DNA, 25 bp, Homo sapien
agagacagaattattagatgcatta

SEQ ID NO: 5972754 - DNA, 25 bp, Homo sapien
gaaatgcgtacctggaacactcaca

SEQ ID NO: 5972755 - DNA, 25 bp, Homo sapien
cgggtgtaatccatagcgacttgcg

SEQ ID NO: 5972756 - DNA, 25 bp, Homo sapien
aatatgacgatctgaagaagatgga

SEQ ID NO: 5972757 - DNA, 25 bp, Homo sapien
tgtcagagatctatccgtggtacaa

SEQ ID NO: 5972758 - DNA, 25 bp, Homo sapien
cagaggcgcatctcaaggccatggt

SEQ ID NO: 5972759 - DNA, 25 bp, Homo sapien
gacgcagaatgtgccaaagtcaata

SEQ ID NO: 5972760 - DNA, 25 bp, Homo sapien
ttacttgggaggatatcgaataatc

SEQ ID NO: 5972761 - DNA, 25 bp, Homo sapien
gaaatcctgcaaattatccattcgc

SEQ ID NO: 5972762 - DNA, 25 bp, Homo sapien
atatacctagcgtgccgctctctaa

SEQ ID NO: 5972763 - DNA, 25 bp, Homo sapien
atcgaataatccaacttcagggata

SEQ ID NO: 5972764 - DNA, 25 bp, Homo sapien
acctagcgtgccgctctctaattta

SEQ ID NO: 5972765 - DNA, 25 bp, Homo sapien
gtttctgatcaacagttagtttctg

SEQ ID NO: 5972766 - DNA, 25 bp, Homo sapien
gacatcacccatatagaaggtaatg

SEQ ID NO: 5972767 - DNA, 25 bp, Homo sapien
gacattgccttattcaaagccgccg

SEQ ID NO: 5972768 - DNA, 25 bp, Homo sapien
ccgtggtacaagatgaactcatctt

SEQ ID NO: 5972769 - DNA, 25 bp, Homo sapien
tgatcctgtcagagatctatccgtg

SEQ ID NO: 5972770 - DNA, 25 bp, Homo sapien
tcaaagatcattggaacctggatga

SEQ ID NO: 5972771 - DNA, 25 bp, Homo sapien
acactcacaatatatgatattgctg

SEQ ID NO: 5972772 - DNA, 25 bp, Homo sapien
tttcgccaggagataaattcctact

SEQ ID NO: 5972773 - DNA, 25 bp, Homo sapien
tcacaatatatgatattgctgggct

SEQ ID NO: 5972774 - DNA, 25 bp, Homo sapien
aggaaatgaagatagagacagaatt

SEQ ID NO: 5972775 - DNA, 25 bp, Homo sapien
tggaacactcacaatatatgatatt

SEQ ID NO: 5972776 - DNA, 25 bp, Homo sapien
cctggatgaagtcaaaattttgaat

SEQ ID NO: 5972777 - DNA, 25 bp, Homo sapien
gtaaaggcatagcgtcagagtattt

SEQ ID NO: 5972778 - DNA, 25 bp, Homo sapien
ttgagaatatatcagagtgcgaaat

SEQ ID NO: 5972779 - DNA, 25 bp, Homo sapien
gtgaaacatttatcagcgctgatgt

SEQ ID NO: 5972780 - DNA, 25 bp, Homo sapien
atagtagggcttgctaatgttggta

SEQ ID NO: 5972781 - DNA, 25 bp, Homo sapien
ataccaatgtttctgatcaacagtt

SEQ ID NO: 5972782 - DNA, 25 bp, Homo sapien
tataagggagggaaccaccgctcaa

SEQ ID NO: 5972783 - DNA, 25 bp, Homo sapien
atccggcatttcaaagatcattgga

SEQ ID NO: 5972784 - DNA, 25 bp, Homo sapien
tcaagtggtgagaggattcttaaag

SEQ ID NO: 5972785 - DNA, 25 bp, Homo sapien
aaatccggcatttcaaagatcattg

SEQ ID NO: 5972786 - DNA, 25 bp, Homo sapien
aagattacgttaggaatgaaaataa

SEQ ID NO: 5972787 - DNA, 25 bp, Homo sapien
caatatacctagcgtgccgctctct

SEQ ID NO: 5972788 - DNA, 25 bp, Homo sapien
accagaggcgcatctcaaggccatg

SEQ ID NO: 5972789 - DNA, 25 bp, Homo sapien
atgttgatcctgtcagagatctatc

SEQ ID NO: 5972790 - DNA, 25 bp, Homo sapien
ttgctaatgttggtaaatcgacttt

SEQ ID NO: 5972791 - DNA, 25 bp, Homo sapien
ccggcatttcaaagatcattggaac

SEQ ID NO: 5972792 - DNA, 25 bp, Homo sapien
ttcacctcaagattacgttaggaat

SEQ ID NO: 5972793 - DNA, 25 bp, Homo sapien
taacgaattttcgccaggagataaa

SEQ ID NO: 5972794 - DNA, 25 bp, Homo sapien
gaatggtttcgaagaattctaaaga

SEQ ID NO: 5972795 - DNA, 25 bp, Homo sapien
ggatatcgaataatccaacttcagg

SEQ ID NO: 5972796 - DNA, 25 bp, Homo sapien
ttgggaaatcctgcaaattatccat

SEQ ID NO: 5972797 - DNA, 25 bp, Homo sapien
agaggccgcgggtgtaatccatagc

SEQ ID NO: 5972798 - DNA, 25 bp, Homo sapien
gtaacaagttcttaaacgatatcag

SEQ ID NO: 5972799 - DNA, 25 bp, Homo sapien
agatcattggaacctggatgaagtc

SEQ ID NO: 5972800 - DNA, 25 bp, Homo sapien
agaagttcaccaatggaatataagg

SEQ ID NO: 5972801 - DNA, 25 bp, Homo sapien
ggtaatgttgatcctgtcagagatc

SEQ ID NO: 5972802 - DNA, 25 bp, Homo sapien
tatttcaagtggtgagaggattctt

SEQ ID NO: 5972803 - DNA, 25 bp, Homo sapien
tcgcaattgatggaatgtaaaggca

SEQ ID NO: 5972804 - DNA, 25 bp, Homo sapien
ttgtcagaaatattatagaatggat

SEQ ID NO: 5972805 - DNA, 25 bp, Homo sapien
agataaattcctacttttcagtgca

SEQ ID NO: 5972806 - DNA, 25 bp, Homo sapien
attgctgggctcaccagaggcgcat

SEQ ID NO: 5972807 - DNA, 25 bp, Homo sapien
cgtacctggaacactcacaatatat

SEQ ID NO: 5972808 - DNA, 25 bp, Homo sapien
aatcgacttttttccaagcaataac

SEQ ID NO: 5972809 - DNA, 25 bp, Homo sapien
accaactttgatattgctaaatgtt

SEQ ID NO: 5972810 - DNA, 25 bp, Homo sapien
caagttcttaaacgatatcagacac

SEQ ID NO: 5972811 - DNA, 25 bp, Homo sapien
agaatttgaatcgcaattgatggaa

SEQ ID NO: 5972812 - DNA, 25 bp, Homo sapien
atgacattgccttattcaaagccgc

SEQ ID NO: 5972813 - DNA, 25 bp, Homo sapien
gaagatagagacagaattattagat

SEQ ID NO: 5972814 - DNA, 25 bp, Homo sapien
gaacactcacaatatatgatattgc

SEQ ID NO: 5972815 - DNA, 25 bp, Homo sapien
gaagataccaatgtttctgatcaac

SEQ ID NO: 5972816 - DNA, 25 bp, Homo sapien
tagaaatgagaaagttgttgaactt

SEQ ID NO: 5972817 - DNA, 25 bp, Homo sapien
gccgcgggtgtaatccatagcgact

SEQ ID NO: 5972818 - DNA, 25 bp, Homo sapien
tccattcgctaccattgacgcagaa

SEQ ID NO: 5972819 - DNA, 25 bp, Homo sapien
ataagcataactttttaacctccaa

SEQ ID NO: 5972820 - DNA, 25 bp, Homo sapien
gtttctgcgataccgcaaataatac

SEQ ID NO: 5972821 - DNA, 25 bp, Homo sapien
atgcggcccacaagaagttcaccaa

SEQ ID NO: 5972822 - DNA, 25 bp, Homo sapien
gaaaatttttacttgggaggatatc

SEQ ID NO: 5972823 - DNA, 25 bp, Homo sapien
ctaaatgagtctttactaaaatcta

SEQ ID NO: 5972824 - DNA, 25 bp, Homo sapien
taatgttgatcctgtcagagatcta

SEQ ID NO: 5972825 - DNA, 25 bp, Homo sapien
tatgatattgctgggctcaccagag

SEQ ID NO: 5972826 - DNA, 25 bp, Homo sapien
tcaacagttagtttctgcgataccg

SEQ ID NO: 5972827 - DNA, 25 bp, Homo sapien
atggattaacgaattttcgccagga

SEQ ID NO: 5972828 - DNA, 25 bp, Homo sapien
aggcaaacaatatattatgcaggac

SEQ ID NO: 5972829 - DNA, 25 bp, Homo sapien
accattgacgcagaatgtgccaaag

SEQ ID NO: 5972830 - DNA, 25 bp, Homo sapien
aaattatccattcgctaccattgac

SEQ ID NO: 5972831 - DNA, 25 bp, Homo sapien
aaccaccgctcaagaggccgcgggt

SEQ ID NO: 5972832 - DNA, 25 bp, Homo sapien
gaaacatttatcagcgctgatgtaa

SEQ ID NO: 5972833 - DNA, 25 bp, Homo sapien
aatttattgagaatatatcagagtg

SEQ ID NO: 5972834 - DNA, 25 bp, Homo sapien
tcaaggccatggtttgggtaacaag

SEQ ID NO: 5972835 - DNA, 25 bp, Homo sapien
ccatagcgacttgcgtgaaacattt

SEQ ID NO: 5972836 - DNA, 25 bp, Homo sapien
cacctcaagattacgttaggaatga

SEQ ID NO: 5972837 - DNA, 25 bp, Homo sapien
atgagaatggtttcgaagaattcta

SEQ ID NO: 5972838 - DNA, 25 bp, Homo sapien
taaaggaagacatcacccatataga

SEQ ID NO: 5972839 - DNA, 25 bp, Homo sapien
attgctaaatgtttcacctcaagat

SEQ ID NO: 5972840 - DNA, 25 bp, Homo sapien
atagagacagaattattagatgcat

SEQ ID NO: 5972841 - DNA, 25 bp, Homo sapien
ggcatttcaaagatcattggaacct

SEQ ID NO: 5972842 - DNA, 25 bp, Homo sapien
gaagatgagaatggtttcgaagaat

SEQ ID NO: 5972843 - DNA, 25 bp, Homo sapien
gaatggattaacgaattttcgccag

SEQ ID NO: 5972844 - DNA, 25 bp, Homo sapien
gatatttcaagtggtgagaggattc

SEQ ID NO: 5972845 - DNA, 25 bp, Homo sapien
atctatccgtggtacaagatgaact

SEQ ID NO: 5972846 - DNA, 25 bp, Homo sapien
tgcgtacctggaacactcacaatat

SEQ ID NO: 5972847 - DNA, 25 bp, Homo sapien
tatatgatattgctgggctcaccag

SEQ ID NO: 5972848 - DNA, 25 bp, Homo sapien
gtttcacctcaagattacgttagga

SEQ ID NO: 5972849 - DNA, 25 bp, Homo sapien
ggcccacaagaagttcaccaatgga

SEQ ID NO: 5972850 - DNA, 25 bp, Homo sapien
accgctcaagaggccgcgggtgtaa

SEQ ID NO: 5972851 - DNA, 25 bp, Homo sapien
agatcaaggaagataccaatgtttc

SEQ ID NO: 5972852 - DNA, 25 bp, Homo sapien
gtagaggggatatttcaagtggtga

SEQ ID NO: 5972853 - DNA, 25 bp, Homo sapien
atgttggtaaatcgacttttttcca

SEQ ID NO: 5972854 - DNA, 25 bp, Homo sapien
ctgcaaattatccattcgctaccat

SEQ ID NO: 5972855 - DNA, 25 bp, Homo sapien
ctcatcttgaaagacttagaatttc

SEQ ID NO: 5972856 - DNA, 25 bp, Homo sapien
aaacgtgcaggcaaacaatatatta

SEQ ID NO: 5972857 - DNA, 25 bp, Homo sapien
gaatttctggaaaacattagggaaa

SEQ ID NO: 5972858 - DNA, 25 bp, Homo sapien
ttgggaggatatcgaataatccaac

SEQ ID NO: 5972859 - DNA, 25 bp, Homo sapien
ggtacaagatgaactcatcttgaaa

SEQ ID NO: 5972860 - DNA, 25 bp, Homo sapien
taatccaacttcagggatagtaggg

SEQ ID NO: 5972861 - DNA, 25 bp, Homo sapien
attagcttctttacatgcggcccac

SEQ ID NO: 5972862 - DNA, 25 bp, Homo sapien
cttatcaaacgtgcaggcaaacaat

SEQ ID NO: 5972863 - DNA, 25 bp, Homo sapien
taccgcaaataatactagaaatgag

SEQ ID NO: 5972864 - DNA, 25 bp, Homo sapien
gtaaaaaaatccggcatttcaaaga

SEQ ID NO: 5972865 - DNA, 25 bp, Homo sapien
aaagatcattggaacctggatgaag

SEQ ID NO: 5972866 - DNA, 25 bp, Homo sapien
atgcaggacaatgacattgccttat

SEQ ID NO: 5972867 - DNA, 25 bp, Homo sapien
ccatatagaaggtaatgttgatcct

SEQ ID NO: 5972868 - DNA, 25 bp, Homo sapien
tcaaacgtgcaggcaaacaatatat

SEQ ID NO: 5972869 - DNA, 25 bp, Homo sapien
tctcaaggccatggtttgggtaaca

SEQ ID NO: 5972870 - DNA, 25 bp, Homo sapien
aatcctgcaaattatccattcgcta

SEQ ID NO: 5972871 - DNA, 25 bp, Homo sapien
atgaagatagagacagaattattag

SEQ ID NO: 5972872 - DNA, 25 bp, Homo sapien
atgaacattggtggaggaaaatttt

SEQ ID NO: 5972873 - DNA, 25 bp, Homo sapien
cagaatgtgccaaagtcaatatacc

SEQ ID NO: 5972874 - DNA, 25 bp, Homo sapien
ctcaagaggccgcgggtgtaatcca

SEQ ID NO: 5972875 - DNA, 25 bp, Homo sapien
gcataactttttaacctccaaacca

SEQ ID NO: 5972876 - DNA, 25 bp, Homo sapien
tcttgaaagacttagaatttctgga

SEQ ID NO: 5972877 - DNA, 25 bp, Homo sapien
gaaaacattagggaaagacttagta

SEQ ID NO: 5972878 - DNA, 25 bp, Homo sapien
gattcttaaaggaagacatcaccca

SEQ ID NO: 5972879 - DNA, 25 bp, Homo sapien
catcacccatatagaaggtaatgtt

SEQ ID NO: 5972880 - DNA, 25 bp, Homo sapien
atcagacacgtagaggggatatttc

SEQ ID NO: 5972881 - DNA, 25 bp, Homo sapien
tttgatattgctaaatgtttcacct

SEQ ID NO: 5972882 - DNA, 25 bp, Homo sapien
tcgaagaattctaaagaacatcagg

SEQ ID NO: 5972883 - DNA, 25 bp, Homo sapien
aacctggatgaagtcaaaattttga

SEQ ID NO: 5972884 - DNA, 25 bp, Homo sapien
aacatttatcagcgctgatgtaata

SEQ ID NO: 5972885 - DNA, 25 bp, Homo sapien
cattgccttattcaaagccgccggt

SEQ ID NO: 5972886 - DNA, 25 bp, Homo sapien
atggaaccaccgctaaatgagtctt

SEQ ID NO: 5972887 - DNA, 25 bp, Homo sapien
ttctaaagaacatcaggaaatgaag

SEQ ID NO: 5972888 - DNA, 25 bp, Homo sapien
tgaactcatcttgaaagacttagaa

SEQ ID NO: 5972889 - DNA, 25 bp, Homo sapien
gataccgcaaataatactagaaatg

SEQ ID NO: 5972890 - DNA, 25 bp, Homo sapien
cattgacgcagaatgtgccaaagtc

SEQ ID NO: 5972891 - DNA, 25 bp, Homo sapien
ttttgacaagatcaaggaagatacc

SEQ ID NO: 5972892 - DNA, 25 bp, Homo sapien
aaccaccgctaaatgagtctttact

SEQ ID NO: 5972893 - DNA, 25 bp, Homo sapien
acaatatatgatattgctgggctca

SEQ ID NO: 5972894 - DNA, 25 bp, Homo sapien
gggacttatcaaacgtgcaggcaaa

SEQ ID NO: 5972895 - DNA, 25 bp, Homo sapien
atcaaggaagataccaatgtttctg

SEQ ID NO: 5972896 - DNA, 25 bp, Homo sapien
gcgtgaaacatttatcagcgctgat

SEQ ID NO: 5972897 - DNA, 25 bp, Homo sapien
attatccattcgctaccattgacgc

SEQ ID NO: 5972898 - DNA, 25 bp, Homo sapien
acgtgcaggcaaacaatatattatg

SEQ ID NO: 5972899 - DNA, 25 bp, Homo sapien
cagtgcagaatttgaatcgcaattg

SEQ ID NO: 5972900 - DNA, 25 bp, Homo sapien
agatagagacagaattattagatgc

SEQ ID NO: 5972901 - DNA, 25 bp, Homo sapien
agttgttgaacttaattagcttctt

SEQ ID NO: 5972902 - DNA, 25 bp, Homo sapien
aattttgaataagcataacttttta

SEQ ID NO: 5972903 - DNA, 25 bp, Homo sapien
aaggtaatgttgatcctgtcagaga

SEQ ID NO: 5972904 - DNA, 25 bp, Homo sapien
actcaaaattgggaaatcctgcaaa

SEQ ID NO: 5972905 - DNA, 25 bp, Homo sapien
aaatctaagggacttatcaaacgtg

SEQ ID NO: 5972906 - DNA, 25 bp, Homo sapien
gaatgtaaaggcatagcgtcagagt

SEQ ID NO: 5972907 - DNA, 25 bp, Homo sapien
ttcagtgcagaatttgaatcgcaat

SEQ ID NO: 5972908 - DNA, 25 bp, Homo sapien
tgagaggattcttaaaggaagacat

SEQ ID NO: 5972909 - DNA, 25 bp, Homo sapien
ccaacttcagggatagtagggcttg

SEQ ID NO: 5972910 - DNA, 25 bp, Homo sapien
caataacaaactcaaaattgggaaa

SEQ ID NO: 5972911 - DNA, 25 bp, Homo sapien
tttttccaagcaataacaaactcaa

SEQ ID NO: 5972912 - DNA, 25 bp, Homo sapien
acatgcggcccacaagaagttcacc

SEQ ID NO: 5972913 - DNA, 25 bp, Homo sapien
agaattattagatgcattagaggaa

SEQ ID NO: 5972914 - DNA, 25 bp, Homo sapien
aggccgcgggtgtaatccatagcga

SEQ ID NO: 5972915 - DNA, 25 bp, Homo sapien
agtagggcttgctaatgttggtaaa

SEQ ID NO: 5972916 - DNA, 25 bp, Homo sapien
atagcgacttgcgtgaaacatttat

SEQ ID NO: 5972917 - DNA, 25 bp, Homo sapien
tcaccagaggcgcatctcaaggcca

SEQ ID NO: 5972918 - DNA, 25 bp, Homo sapien
cacaagaagttcaccaatggaatat

SEQ ID NO: 5972919 - DNA, 25 bp, Homo sapien
aatgagaaagttgttgaacttaatt

SEQ ID NO: 5972920 - DNA, 25 bp, Homo sapien
atctaagggacttatcaaacgtgca

SEQ ID NO: 5972921 - DNA, 25 bp, Homo sapien
acaaactcaaaattgggaaatcctg

SEQ ID NO: 5972922 - DNA, 25 bp, Homo sapien
attttcgccaggagataaattccta

SEQ ID NO: 5972923 - DNA, 25 bp, Homo sapien
agtcaaaattttgaataagcataac

SEQ ID NO: 5972924 - DNA, 25 bp, Homo sapien
acgaattttcgccaggagataaatt

SEQ ID NO: 5972925 - DNA, 25 bp, Homo sapien
catttcaaagatcattggaacctgg

SEQ ID NO: 5972926 - DNA, 25 bp, Homo sapien
aagatgaactcatcttgaaagactt

SEQ ID NO: 5972927 - DNA, 25 bp, Homo sapien
aagaagatgagaatggtttcgaaga

SEQ ID NO: 5972928 - DNA, 25 bp, Homo sapien
caatggaatataagggagggaacca

SEQ ID NO: 5972929 - DNA, 25 bp, Homo sapien
tcctacttttcagtgcagaatttga

SEQ ID NO: 5972930 - DNA, 25 bp, Homo sapien
aagacttagaatttctggaaaacat

SEQ ID NO: 5972931 - DNA, 25 bp, Homo sapien
ggaaccaccgctcaagaggccgcgg

SEQ ID NO: 5972932 - DNA, 25 bp, Homo sapien
accaatgtttctgatcaacagttag

SEQ ID NO: 5972933 - DNA, 25 bp, Homo sapien
gattacgttaggaatgaaaataaat

SEQ ID NO: 5972934 - DNA, 25 bp, Homo sapien
ggaagacatcacccatatagaaggt

SEQ ID NO: 5972935 - DNA, 25 bp, Homo sapien
aagaagatggaaccaccgctaaatg

SEQ ID NO: 5972936 - DNA, 25 bp, Homo sapien
aaagttgttgaacttaattagcttc

SEQ ID NO: 5972937 - DNA, 25 bp, Homo sapien
gtcagaaatattatagaatggatta

SEQ ID NO: 5972938 - DNA, 25 bp, Homo sapien
aaattcctacttttcagtgcagaat

SEQ ID NO: 5972939 - DNA, 25 bp, Homo sapien
ttgacgcagaatgtgccaaagtcaa

SEQ ID NO: 5972940 - DNA, 25 bp, Homo sapien
gctctctaatttattgagaatatat

SEQ ID NO: 5972941 - DNA, 25 bp, Homo sapien
atttttacttgggaggatatcgaat

SEQ ID NO: 5972942 - DNA, 25 bp, Homo sapien
agagtattttgacaagatcaaggaa

SEQ ID NO: 5972943 - DNA, 25 bp, Homo sapien
ctaaatgtttcacctcaagattacg

SEQ ID NO: 5972944 - DNA, 25 bp, Homo sapien
tttgaatcgcaattgatggaatgta

SEQ ID NO: 5972945 - DNA, 25 bp, Homo sapien
ggtttcgaagaattctaaagaacat

SEQ ID NO: 5972946 - DNA, 25 bp, Homo sapien
atccgtggtacaagatgaactcatc

SEQ ID NO: 5972947 - DNA, 25 bp, Homo sapien
gaatatatcagagtgcgaaatgcgt

SEQ ID NO: 5972948 - DNA, 25 bp, Homo sapien
atattatagaatggattaacgaatt

SEQ ID NO: 5972949 - DNA, 25 bp, Homo sapien
gacaagatcaaggaagataccaatg

SEQ ID NO: 5972950 - DNA, 25 bp, Homo sapien
ctgatgtaataaaatatgacgatct

SEQ ID NO: 5972951 - DNA, 25 bp, Homo sapien
ttcgctaccattgacgcagaatgtg

SEQ ID NO: 5972952 - DNA, 25 bp, Homo sapien
cgcagaatgtgccaaagtcaatata

SEQ ID NO: 5972953 - DNA, 25 bp, Homo sapien
gggcttgctaatgttggtaaatcga

SEQ ID NO: 5972954 - DNA, 25 bp, Homo sapien
ttattagatgcattagaggaacatt

SEQ ID NO: 5972955 - DNA, 25 bp, Homo sapien
gagtctttactaaaatctaagggac

SEQ ID NO: 5972956 - DNA, 25 bp, Homo sapien
taagggagggaaccaccgctcaaga

SEQ ID NO: 5972957 - DNA, 25 bp, Homo sapien
gaaagacttagaatttctggaaaac

SEQ ID NO: 5972958 - DNA, 25 bp, Homo sapien
tgccgctctctaatttattgagaat

SEQ ID NO: 5972959 - DNA, 25 bp, Homo sapien
aaaatatgacgatctgaagaagatg

SEQ ID NO: 5972960 - DNA, 25 bp, Homo sapien
gcaaacaatatattatgcaggacaa

SEQ ID NO: 5972961 - DNA, 25 bp, Homo sapien
gtcaatatacctagcgtgccgctct

SEQ ID NO: 5972962 - DNA, 25 bp, Homo sapien
aacagttagtttctgcgataccgca

SEQ ID NO: 5972963 - DNA, 25 bp, Homo sapien
atatatcagagtgcgaaatgcgtac

SEQ ID NO: 5972964 - DNA, 25 bp, Homo sapien
atcctgtcagagatctatccgtggt

SEQ ID NO: 5972965 - DNA, 25 bp, Homo sapien
attatagaatggattaacgaatttt

SEQ ID NO: 5972966 - DNA, 25 bp, Homo sapien
aacattagggaaagacttagtaaga

SEQ ID NO: 5972967 - DNA, 25 bp, Homo sapien
ttacatgcggcccacaagaagttca

SEQ ID NO: 5972968 - DNA, 25 bp, Homo sapien
aataatccaacttcagggatagtag

SEQ ID NO: 5972969 - DNA, 25 bp, Homo sapien
aaaattgggaaatcctgcaaattat

SEQ ID NO: 5972970 - DNA, 25 bp, Homo sapien
gtgccaaagtcaatatacctagcgt

SEQ ID NO: 5972971 - DNA, 25 bp, Homo sapien
agggagggaaccaccgctcaagagg

SEQ ID NO: 5972972 - DNA, 25 bp, Homo sapien
gaggatatcgaataatccaacttca

SEQ ID NO: 5972973 - DNA, 25 bp, Homo sapien
ctgggctcaccagaggcgcatctca

SEQ ID NO: 5972974 - DNA, 25 bp, Homo sapien
gcaaattatccattcgctaccattg

SEQ ID NO: 5972975 - DNA, 25 bp, Homo sapien
tcgccaggagataaattcctacttt

SEQ ID NO: 5972976 - DNA, 25 bp, Homo sapien
tcaagattacgttaggaatgaaaat

SEQ ID NO: 5972977 - DNA, 25 bp, Homo sapien
aactcatcttgaaagacttagaatt

SEQ ID NO: 5972978 - DNA, 25 bp, Homo sapien
caagaagttcaccaatggaatataa

SEQ ID NO: 5972979 - DNA, 25 bp, Homo sapien
tctttactaaaatctaagggactta

SEQ ID NO: 5972980 - DNA, 25 bp, Homo sapien
gcggcccacaagaagttcaccaatg

SEQ ID NO: 5972981 - DNA, 25 bp, Homo sapien
accgctaaatgagtctttactaaaa

SEQ ID NO: 5972982 - DNA, 25 bp, Homo sapien
aaaaatccggcatttcaaagatcat

SEQ ID NO: 5972983 - DNA, 25 bp, Homo sapien
ttctgatcaacagttagtttctgcg

SEQ ID NO: 5972984 - DNA, 25 bp, Homo sapien
gacttttttccaagcaataacaaac

SEQ ID NO: 5972985 - DNA, 25 bp, Homo sapien
agcgtcagagtattttgacaagatc

SEQ ID NO: 5972986 - DNA, 25 bp, Homo sapien
tcgacttttttccaagcaataacaa

SEQ ID NO: 5972987 - DNA, 25 bp, Homo sapien
gttgatcctgtcagagatctatccg

SEQ ID NO: 5972988 - DNA, 25 bp, Homo sapien
gggtaacaagttcttaaacgatatc

SEQ ID NO: 5972989 - DNA, 25 bp, Homo sapien
tttcaaagatcattggaacctggat

SEQ ID NO: 5972990 - DNA, 25 bp, Homo sapien
taatccatagcgacttgcgtgaaac

SEQ ID NO: 5972991 - DNA, 25 bp, Homo sapien
aatcgcaattgatggaatgtaaagg

SEQ ID NO: 5972992 - DNA, 25 bp, Homo sapien
gaacattggtggaggaaaattttta

SEQ ID NO: 5972993 - DNA, 25 bp, Homo sapien
aaatttttacttgggaggatatcga

SEQ ID NO: 5972994 - DNA, 25 bp, Homo sapien
gcagaatttgaatcgcaattgatgg

SEQ ID NO: 5972995 - DNA, 25 bp, Homo sapien
tagaatggattaacgaattttcgcc

SEQ ID NO: 5972996 - DNA, 25 bp, Homo sapien
aaactcaaaattgggaaatcctgca

SEQ ID NO: 5972997 - DNA, 25 bp, Homo sapien
cattagggaaagacttagtaagaag

SEQ ID NO: 5972998 - DNA, 25 bp, Homo sapien
attagatgcattagaggaacatttg

SEQ ID NO: 5972999 - DNA, 25 bp, Homo sapien
acttgggaggatatcgaataatcca

SEQ ID NO: 5973000 - DNA, 25 bp, Homo sapien
ataaaatatgacgatctgaagaaga

SEQ ID NO: 5973001 - DNA, 25 bp, Homo sapien
ccgcaaataatactagaaatgagaa

SEQ ID NO: 5973002 - DNA, 25 bp, Homo sapien
gaattttcgccaggagataaattcc

SEQ ID NO: 5973003 - DNA, 25 bp, Homo sapien
agcgtgccgctctctaatttattga

SEQ ID NO: 5973004 - DNA, 25 bp, Homo sapien
ggtgtaatccatagcgacttgcgtg

SEQ ID NO: 5973005 - DNA, 25 bp, Homo sapien
cagaaacattggtatcttccttgat

SEQ ID NO: 5973006 - DNA, 25 bp, Homo sapien
aagaatcctctcaccacttgaaata

SEQ ID NO: 5973007 - DNA, 25 bp, Homo sapien
gatctctgacaggatcaacattacc

SEQ ID NO: 5973008 - DNA, 25 bp, Homo sapien
tcctaacgtaatcttgaggtgaaac

SEQ ID NO: 5973009 - DNA, 25 bp, Homo sapien
ttggcacattctgcgtcaatggtag

SEQ ID NO: 5973010 - DNA, 25 bp, Homo sapien
cggatagatctctgacaggatcaac

SEQ ID NO: 5973011 - DNA, 25 bp, Homo sapien
ttgtcaaaatactctgacgctatgc

SEQ ID NO: 5973012 - DNA, 25 bp, Homo sapien
cattccatcaattgcgattcaaatt

SEQ ID NO: 5973013 - DNA, 25 bp, Homo sapien
tctcctggcgaaaattcgttaatcc

SEQ ID NO: 5973014 - DNA, 25 bp, Homo sapien
catttctagtattatttgcggtatc

SEQ ID NO: 5973015 - DNA, 25 bp, Homo sapien
ttgtgggccgcatgtaaagaagcta

SEQ ID NO: 5973016 - DNA, 25 bp, Homo sapien
ctacgtgtctgatatcgtttaagaa

SEQ ID NO: 5973017 - DNA, 25 bp, Homo sapien
gcgcctctggtgagcccagcaatat

SEQ ID NO: 5973018 - DNA, 25 bp, Homo sapien
tcaccacttgaaatatcccctctac

SEQ ID NO: 5973019 - DNA, 25 bp, Homo sapien
aggttaaaaagttatgcttattcaa

SEQ ID NO: 5973020 - DNA, 25 bp, Homo sapien
gaaacatttagcaatatcaaagttg

SEQ ID NO: 5973021 - DNA, 25 bp, Homo sapien
gttccaatgatctttgaaatgccgg

SEQ ID NO: 5973022 - DNA, 25 bp, Homo sapien
cgcagaaactaactgttgatcagaa

SEQ ID NO: 5973023 - DNA, 25 bp, Homo sapien
agatgcgcctctggtgagcccagca

SEQ ID NO: 5973024 - DNA, 25 bp, Homo sapien
catgtaaagaagctaattaagttca

SEQ ID NO: 5973025 - DNA, 25 bp, Homo sapien
gtgggccgcatgtaaagaagctaat

SEQ ID NO: 5973026 - DNA, 25 bp, Homo sapien
aactgttgatcagaaacattggtat

SEQ ID NO: 5973027 - DNA, 25 bp, Homo sapien
gatatcctcccaagtaaaaattttc

SEQ ID NO: 5973028 - DNA, 25 bp, Homo sapien
tagatctctgacaggatcaacatta

SEQ ID NO: 5973029 - DNA, 25 bp, Homo sapien
agctaattaagttcaacaactttct

SEQ ID NO: 5973030 - DNA, 25 bp, Homo sapien
taggaatttatctcctggcgaaaat

SEQ ID NO: 5973031 - DNA, 25 bp, Homo sapien
tatcgtttaagaacttgttacccaa

SEQ ID NO: 5973032 - DNA, 25 bp, Homo sapien
gctgataaatgtttcacgcaagtcg

SEQ ID NO: 5973033 - DNA, 25 bp, Homo sapien
gatttaccaacattagcaagcccta

SEQ ID NO: 5973034 - DNA, 25 bp, Homo sapien
attttcccaccggcggctttgaata

SEQ ID NO: 5973035 - DNA, 25 bp, Homo sapien
tcctttaagaatcctctcaccactt

SEQ ID NO: 5973036 - DNA, 25 bp, Homo sapien
ttgtcctgcataatatattgtttgc

SEQ ID NO: 5973037 - DNA, 25 bp, Homo sapien
gagcggtggttccctcccttatatt

SEQ ID NO: 5973038 - DNA, 25 bp, Homo sapien
taaacaaatgttcctctaatgcatc

SEQ ID NO: 5973039 - DNA, 25 bp, Homo sapien
attctcaataaattagagagcggca

SEQ ID NO: 5973040 - DNA, 25 bp, Homo sapien
gacttcatccaggttccaatgatct

SEQ ID NO: 5973041 - DNA, 25 bp, Homo sapien
tctaatgcatctaataattctgtct

SEQ ID NO: 5973042 - DNA, 25 bp, Homo sapien
cattggtgaacttcttgtgggccgc

SEQ ID NO: 5973043 - DNA, 25 bp, Homo sapien
tgagtgttccaggtacgcatttcgc

SEQ ID NO: 5973044 - DNA, 25 bp, Homo sapien
caatggtagcgaatggataatttgc

SEQ ID NO: 5973045 - DNA, 25 bp, Homo sapien
atattttattacatcagcgctgata

SEQ ID NO: 5973046 - DNA, 25 bp, Homo sapien
cctgcataatatattgtttgcctgc

SEQ ID NO: 5973047 - DNA, 25 bp, Homo sapien
ttagcaagccctactatccctgaag

SEQ ID NO: 5973048 - DNA, 25 bp, Homo sapien
acgcatttcgcactctgatatattc

SEQ ID NO: 5973049 - DNA, 25 bp, Homo sapien
caggatttcccaattttgagtttgt

SEQ ID NO: 5973050 - DNA, 25 bp, Homo sapien
cgtcatattttattacatcagcgct

SEQ ID NO: 5973051 - DNA, 25 bp, Homo sapien
tcatatattgtgagtgttccaggta

SEQ ID NO: 5973052 - DNA, 25 bp, Homo sapien
gcaatatcatatattgtgagtgttc

SEQ ID NO: 5973053 - DNA, 25 bp, Homo sapien
aacatttagcaatatcaaagttggt

SEQ ID NO: 5973054 - DNA, 25 bp, Homo sapien
gcggcctcttgagcggtggttccct

SEQ ID NO: 5973055 - DNA, 25 bp, Homo sapien
ataattctgtctctatcttcatttc

SEQ ID NO: 5973056 - DNA, 25 bp, Homo sapien
tcttgtgggccgcatgtaaagaagc

SEQ ID NO: 5973057 - DNA, 25 bp, Homo sapien
gaaacattggtatcttccttgatct

SEQ ID NO: 5973058 - DNA, 25 bp, Homo sapien
atggataatttgcaggatttcccaa

SEQ ID NO: 5973059 - DNA, 25 bp, Homo sapien
ccaggtacgcatttcgcactctgat

SEQ ID NO: 5973060 - DNA, 25 bp, Homo sapien
tctgcactgaaaagtaggaatttat

SEQ ID NO: 5973061 - DNA, 25 bp, Homo sapien
caattgcgattcaaattctgcactg

SEQ ID NO: 5973062 - DNA, 25 bp, Homo sapien
cttcatttcctgatgttctttagaa

SEQ ID NO: 5973063 - DNA, 25 bp, Homo sapien
ataatttgcaggatttcccaatttt

SEQ ID NO: 5973064 - DNA, 25 bp, Homo sapien
taaaaagttatgcttattcaaaatt

SEQ ID NO: 5973065 - DNA, 25 bp, Homo sapien
gttttccagaaattctaagtctttc

SEQ ID NO: 5973066 - DNA, 25 bp, Homo sapien
ttcacgcaagtcgctatggattaca

SEQ ID NO: 5973067 - DNA, 25 bp, Homo sapien
aatttatctcctggcgaaaattcgt

SEQ ID NO: 5973068 - DNA, 25 bp, Homo sapien
gaaactaactgttgatcagaaacat

SEQ ID NO: 5973069 - DNA, 25 bp, Homo sapien
tgagatgcgcctctggtgagcccag

SEQ ID NO: 5973070 - DNA, 25 bp, Homo sapien
ttacacccgcggcctcttgagcggt

SEQ ID NO: 5973071 - DNA, 25 bp, Homo sapien
gtattatttgcggtatcgcagaaac

SEQ ID NO: 5973072 - DNA, 25 bp, Homo sapien
tccagaaattctaagtctttcaaga

SEQ ID NO: 5973073 - DNA, 25 bp, Homo sapien
aagatgagttcatcttgtaccacgg

SEQ ID NO: 5973074 - DNA, 25 bp, Homo sapien
agtaggaatttatctcctggcgaaa

SEQ ID NO: 5973075 - DNA, 25 bp, Homo sapien
tgcgattcaaattctgcactgaaaa

SEQ ID NO: 5973076 - DNA, 25 bp, Homo sapien
tgatcagaaacattggtatcttcct

SEQ ID NO: 5973077 - DNA, 25 bp, Homo sapien
tccctgaagttggattattcgatat

SEQ ID NO: 5973078 - DNA, 25 bp, Homo sapien
ggtgaacttcttgtgggccgcatgt

SEQ ID NO: 5973079 - DNA, 25 bp, Homo sapien
cattagcaagccctactatccctga

SEQ ID NO: 5973080 - DNA, 25 bp, Homo sapien
ctgttgatcagaaacattggtatct

SEQ ID NO: 5973081 - DNA, 25 bp, Homo sapien
aatatcccctctacgtgtctgatat

SEQ ID NO: 5973082 - DNA, 25 bp, Homo sapien
attccattggtgaacttcttgtggg

SEQ ID NO: 5973083 - DNA, 25 bp, Homo sapien
aggatcaacattaccttctatatgg

SEQ ID NO: 5973084 - DNA, 25 bp, Homo sapien
tcaagatgagttcatcttgtaccac

SEQ ID NO: 5973085 - DNA, 25 bp, Homo sapien
atgtttcacgcaagtcgctatggat

SEQ ID NO: 5973086 - DNA, 25 bp, Homo sapien
ggctttgaataaggcaatgtcattg

SEQ ID NO: 5973087 - DNA, 25 bp, Homo sapien
attcaaaattttgacttcatccagg

SEQ ID NO: 5973088 - DNA, 25 bp, Homo sapien
tttattacatcagcgctgataaatg

SEQ ID NO: 5973089 - DNA, 25 bp, Homo sapien
gataagtcccttagattttagtaaa

SEQ ID NO: 5973090 - DNA, 25 bp, Homo sapien
acgctatgcctttacattccatcaa

SEQ ID NO: 5973091 - DNA, 25 bp, Homo sapien
gtgtctgatatcgtttaagaacttg

SEQ ID NO: 5973092 - DNA, 25 bp, Homo sapien
cgcaagtcgctatggattacacccg

SEQ ID NO: 5973093 - DNA, 25 bp, Homo sapien
gtcttcctttaagaatcctctcacc

SEQ ID NO: 5973094 - DNA, 25 bp, Homo sapien
tgatgttctttagaattcttcgaaa

SEQ ID NO: 5973095 - DNA, 25 bp, Homo sapien
tatggattacacccgcggcctcttg

SEQ ID NO: 5973096 - DNA, 25 bp, Homo sapien
ggtagcgaatggataatttgcagga

SEQ ID NO: 5973097 - DNA, 25 bp, Homo sapien
tccaatgatctttgaaatgccggat

SEQ ID NO: 5973098 - DNA, 25 bp, Homo sapien
tggaaaaaagtcgatttaccaacat

SEQ ID NO: 5973099 - DNA, 25 bp, Homo sapien
taagtctttccctaatgttttccag

SEQ ID NO: 5973100 - DNA, 25 bp, Homo sapien
acacccgcggcctcttgagcggtgg

SEQ ID NO: 5973101 - DNA, 25 bp, Homo sapien
taaagaagctaattaagttcaacaa

SEQ ID NO: 5973102 - DNA, 25 bp, Homo sapien
gtttgataagtcccttagattttag

SEQ ID NO: 5973103 - DNA, 25 bp, Homo sapien
tgatgtcttcctttaagaatcctct

SEQ ID NO: 5973104 - DNA, 25 bp, Homo sapien
gaataaggcaatgtcattgtcctgc

SEQ ID NO: 5973105 - DNA, 25 bp, Homo sapien
cattctgcgtcaatggtagcgaatg

SEQ ID NO: 5973106 - DNA, 25 bp, Homo sapien
ccttgatcttgtcaaaatactctga

SEQ ID NO: 5973107 - DNA, 25 bp, Homo sapien
tttgcaggatttcccaattttgagt

SEQ ID NO: 5973108 - DNA, 25 bp, Homo sapien
gtcctgcataatatattgtttgcct

SEQ ID NO: 5973109 - DNA, 25 bp, Homo sapien
atattgtttgcctgcacgtttgata

SEQ ID NO: 5973110 - DNA, 25 bp, Homo sapien
ttatattccattggtgaacttcttg

SEQ ID NO: 5973111 - DNA, 25 bp, Homo sapien
tttgcggtatcgcagaaactaactg

SEQ ID NO: 5973112 - DNA, 25 bp, Homo sapien
aagtctttcaagatgagttcatctt

SEQ ID NO: 5973113 - DNA, 25 bp, Homo sapien
gatcaacattaccttctatatgggt

SEQ ID NO: 5973114 - DNA, 25 bp, Homo sapien
aatatcatatattgtgagtgttcca

SEQ ID NO: 5973115 - DNA, 25 bp, Homo sapien
ctggtgagcccagcaatatcatata

SEQ ID NO: 5973116 - DNA, 25 bp, Homo sapien
gttccatcttcttcagatcgtcata

SEQ ID NO: 5973117 - DNA, 25 bp, Homo sapien
aaagtaggaatttatctcctggcga

SEQ ID NO: 5973118 - DNA, 25 bp, Homo sapien
ttacatcagcgctgataaatgtttc

SEQ ID NO: 5973119 - DNA, 25 bp, Homo sapien
tttcattcctaacgtaatcttgagg

SEQ ID NO: 5973120 - DNA, 25 bp, Homo sapien
tattgcttggaaaaaagtcgattta

SEQ ID NO: 5973121 - DNA, 25 bp, Homo sapien
tcgatatcctcccaagtaaaaattt

SEQ ID NO: 5973122 - DNA, 25 bp, Homo sapien
agcccagcaatatcatatattgtga

SEQ ID NO: 5973123 - DNA, 25 bp, Homo sapien
tggattattcgatatcctcccaagt

SEQ ID NO: 5973124 - DNA, 25 bp, Homo sapien
gttctttagaattcttcgaaaccat

SEQ ID NO: 5973125 - DNA, 25 bp, Homo sapien
tcttgagcggtggttccctccctta

SEQ ID NO: 5973126 - DNA, 25 bp, Homo sapien
cgaaaccattctcatcttcttacta

SEQ ID NO: 5973127 - DNA, 25 bp, Homo sapien
ggaatttatctcctggcgaaaattc

SEQ ID NO: 5973128 - DNA, 25 bp, Homo sapien
aattaagttcaacaactttctcatt

SEQ ID NO: 5973129 - DNA, 25 bp, Homo sapien
aacattagcaagccctactatccct

SEQ ID NO: 5973130 - DNA, 25 bp, Homo sapien
gaacttgttacccaaaccatggcct

SEQ ID NO: 5973131 - DNA, 25 bp, Homo sapien
tctcaataaattagagagcggcacg

SEQ ID NO: 5973132 - DNA, 25 bp, Homo sapien
caaatgttcctctaatgcatctaat

SEQ ID NO: 5973133 - DNA, 25 bp, Homo sapien
ttgaataaggcaatgtcattgtcct

SEQ ID NO: 5973134 - DNA, 25 bp, Homo sapien
ttctgcgtcaatggtagcgaatgga

SEQ ID NO: 5973135 - DNA, 25 bp, Homo sapien
gatatcgtttaagaacttgttaccc

SEQ ID NO: 5973136 - DNA, 25 bp, Homo sapien
aattttgagtttgttattgcttgga

SEQ ID NO: 5973137 - DNA, 25 bp, Homo sapien
tgttacccaaaccatggccttgaga

SEQ ID NO: 5973138 - DNA, 25 bp, Homo sapien
atgcgcctctggtgagcccagcaat

SEQ ID NO: 5973139 - DNA, 25 bp, Homo sapien
acgtgtctgatatcgtttaagaact

SEQ ID NO: 5973140 - DNA, 25 bp, Homo sapien
gaattcttcgaaaccattctcatct

SEQ ID NO: 5973141 - DNA, 25 bp, Homo sapien
ctaacgtaatcttgaggtgaaacat

SEQ ID NO: 5973142 - DNA, 25 bp, Homo sapien
cagaaactaactgttgatcagaaac

SEQ ID NO: 5973143 - DNA, 25 bp, Homo sapien
ccaacattagcaagccctactatcc

SEQ ID NO: 5973144 - DNA, 25 bp, Homo sapien
ttcgcactctgatatattctcaata

SEQ ID NO: 5973145 - DNA, 25 bp, Homo sapien
tcaaaattttgacttcatccaggtt

SEQ ID NO: 5973146 - DNA, 25 bp, Homo sapien
cttgttacccaaaccatggccttga

SEQ ID NO: 5973147 - DNA, 25 bp, Homo sapien
attctgcactgaaaagtaggaattt

SEQ ID NO: 5973148 - DNA, 25 bp, Homo sapien
accacggatagatctctgacaggat

SEQ ID NO: 5973149 - DNA, 25 bp, Homo sapien
atgtcttcctttaagaatcctctca

SEQ ID NO: 5973150 - DNA, 25 bp, Homo sapien
tatcttccttgatcttgtcaaaata

SEQ ID NO: 5973151 - DNA, 25 bp, Homo sapien
aaaccatggccttgagatgcgcctc

SEQ ID NO: 5973152 - DNA, 25 bp, Homo sapien
ttattttcattcctaacgtaatctt

SEQ ID NO: 5973153 - DNA, 25 bp, Homo sapien
ggtggttccctcccttatattccat

SEQ ID NO: 5973154 - DNA, 25 bp, Homo sapien
gcggctttgaataaggcaatgtcat

SEQ ID NO: 5973155 - DNA, 25 bp, Homo sapien
tgtttgcctgcacgtttgataagtc

SEQ ID NO: 5973156 - DNA, 25 bp, Homo sapien
aagaagctaattaagttcaacaact

SEQ ID NO: 5973157 - DNA, 25 bp, Homo sapien
tcaaattctgcactgaaaagtagga

SEQ ID NO: 5973158 - DNA, 25 bp, Homo sapien
tatattgactttggcacattctgcg

SEQ ID NO: 5973159 - DNA, 25 bp, Homo sapien
cgtaatcttgaggtgaaacatttag

SEQ ID NO: 5973160 - DNA, 25 bp, Homo sapien
gttaaacaaatgttcctctaatgca

SEQ ID NO: 5973161 - DNA, 25 bp, Homo sapien
cattaccttctatatgggtgatgtc

SEQ ID NO: 5973162 - DNA, 25 bp, Homo sapien
gaaaagtaggaatttatctcctggc

SEQ ID NO: 5973163 - DNA, 25 bp, Homo sapien
tcatattttattacatcagcgctga

SEQ ID NO: 5973164 - DNA, 25 bp, Homo sapien
ttaagaacttgttacccaaaccatg

SEQ ID NO: 5973165 - DNA, 25 bp, Homo sapien
tttcaagatgagttcatcttgtacc

SEQ ID NO: 5973166 - DNA, 25 bp, Homo sapien
aggttccaatgatctttgaaatgcc

SEQ ID NO: 5973167 - DNA, 25 bp, Homo sapien
tctgacgctatgcctttacattcca

SEQ ID NO: 5973168 - DNA, 25 bp, Homo sapien
gggccgcatgtaaagaagctaatta

SEQ ID NO: 5973169 - DNA, 25 bp, Homo sapien
ataaatgtttcacgcaagtcgctat

SEQ ID NO: 5973170 - DNA, 25 bp, Homo sapien
ctttggcacattctgcgtcaatggt

SEQ ID NO: 5973171 - DNA, 25 bp, Homo sapien
aattcgttaatccattctataatat

SEQ ID NO: 5973172 - DNA, 25 bp, Homo sapien
cttgaggtgaaacatttagcaatat

SEQ ID NO: 5973173 - DNA, 25 bp, Homo sapien
taatcttgaggtgaaacatttagca

SEQ ID NO: 5973174 - DNA, 25 bp, Homo sapien
tcttcgaaaccattctcatcttctt

SEQ ID NO: 5973175 - DNA, 25 bp, Homo sapien
taattttcccaccggcggctttgaa

SEQ ID NO: 5973176 - DNA, 25 bp, Homo sapien
agtcgctatggattacacccgcggc

SEQ ID NO: 5973177 - DNA, 25 bp, Homo sapien
tttcccaccggcggctttgaataag

SEQ ID NO: 5973178 - DNA, 25 bp, Homo sapien
accggcggctttgaataaggcaatg

SEQ ID NO: 5973179 - DNA, 25 bp, Homo sapien
tatcaaagttggtttggaggttaaa

SEQ ID NO: 5973180 - DNA, 25 bp, Homo sapien
tcaacattaccttctatatgggtga

SEQ ID NO: 5973181 - DNA, 25 bp, Homo sapien
cggcggctttgaataaggcaatgtc

SEQ ID NO: 5973182 - DNA, 25 bp, Homo sapien
ttcctgatgttctttagaattcttc

SEQ ID NO: 5973183 - DNA, 25 bp, Homo sapien
gttcaacaactttctcatttctagt

SEQ ID NO: 5973184 - DNA, 25 bp, Homo sapien
tatgcctttacattccatcaattgc

SEQ ID NO: 5973185 - DNA, 25 bp, Homo sapien
agttcatcttgtaccacggatagat

SEQ ID NO: 5973186 - DNA, 25 bp, Homo sapien
aacaaatgttcctctaatgcatcta

SEQ ID NO: 5973187 - DNA, 25 bp, Homo sapien
agagagcggcacgctaggtatattg

SEQ ID NO: 5973188 - DNA, 25 bp, Homo sapien
taccgttaaacaaatgttcctctaa

SEQ ID NO: 5973189 - DNA, 25 bp, Homo sapien
cacattctgcgtcaatggtagcgaa

SEQ ID NO: 5973190 - DNA, 25 bp, Homo sapien
gcatttcgcactctgatatattctc

SEQ ID NO: 5973191 - DNA, 25 bp, Homo sapien
attttcattcctaacgtaatcttga

SEQ ID NO: 5973192 - DNA, 25 bp, Homo sapien
cagcaatatcatatattgtgagtgt

SEQ ID NO: 5973193 - DNA, 25 bp, Homo sapien
gtgaaacatttagcaatatcaaagt

SEQ ID NO: 5973194 - DNA, 25 bp, Homo sapien
catcttgtaccacggatagatctct

SEQ ID NO: 5973195 - DNA, 25 bp, Homo sapien
ctgatatattctcaataaattagag

SEQ ID NO: 5973196 - DNA, 25 bp, Homo sapien
ctcatttctagtattatttgcggta

SEQ ID NO: 5973197 - DNA, 25 bp, Homo sapien
ttttgacttcatccaggttccaatg

SEQ ID NO: 5973198 - DNA, 25 bp, Homo sapien
atccaggttccaatgatctttgaaa

SEQ ID NO: 5973199 - DNA, 25 bp, Homo sapien
aatgttcctctaatgcatctaataa

SEQ ID NO: 5973200 - DNA, 25 bp, Homo sapien
attcgatatcctcccaagtaaaaat

SEQ ID NO: 5973201 - DNA, 25 bp, Homo sapien
ttaagttcaacaactttctcatttc

SEQ ID NO: 5973202 - DNA, 25 bp, Homo sapien
gcctctggtgagcccagcaatatca

SEQ ID NO: 5973203 - DNA, 25 bp, Homo sapien
tagcgaatggataatttgcaggatt

SEQ ID NO: 5973204 - DNA, 25 bp, Homo sapien
atattccattggtgaacttcttgtg

SEQ ID NO: 5973205 - DNA, 25 bp, Homo sapien
gccgcatgtaaagaagctaattaag

SEQ ID NO: 5973206 - DNA, 25 bp, Homo sapien
agcaagccctactatccctgaagtt

SEQ ID NO: 5973207 - DNA, 25 bp, Homo sapien
ttccaggtacgcatttcgcactctg

SEQ ID NO: 5973208 - DNA, 25 bp, Homo sapien
aaaattttgacttcatccaggttcc

SEQ ID NO: 5973209 - DNA, 25 bp, Homo sapien
cctgaagttggattattcgatatcc

SEQ ID NO: 5973210 - DNA, 25 bp, Homo sapien
gatctttgaaatgccggattttttt

SEQ ID NO: 5973211 - DNA, 25 bp, Homo sapien
aaaattttcctccaccaatgttcat

SEQ ID NO: 5973212 - DNA, 25 bp, Homo sapien
tttacattccatcaattgcgattca

SEQ ID NO: 5973213 - DNA, 25 bp, Homo sapien
ccctactatccctgaagttggatta

SEQ ID NO: 5973214 - DNA, 25 bp, Homo sapien
aattttgacttcatccaggttccaa

SEQ ID NO: 5973215 - DNA, 25 bp, Homo sapien
atcgtcatattttattacatcagcg

SEQ ID NO: 5973216 - DNA, 25 bp, Homo sapien
gcgctgataaatgtttcacgcaagt

SEQ ID NO: 5973217 - DNA, 25 bp, Homo sapien
acttgaaatatcccctctacgtgtc

SEQ ID NO: 5973218 - DNA, 25 bp, Homo sapien
gttattgcttggaaaaaagtcgatt

SEQ ID NO: 5973219 - DNA, 25 bp, Homo sapien
gaatggataatttgcaggatttccc

SEQ ID NO: 5973220 - DNA, 25 bp, Homo sapien
cctcttgagcggtggttccctccct

SEQ ID NO: 5973221 - DNA, 25 bp, Homo sapien
tagcggtggttccatcttcttcaga

SEQ ID NO: 5973222 - DNA, 25 bp, Homo sapien
tcccaattttgagtttgttattgct

SEQ ID NO: 5973223 - DNA, 25 bp, Homo sapien
tcccaccggcggctttgaataaggc

SEQ ID NO: 5973224 - DNA, 25 bp, Homo sapien
tcttcttcagatcgtcatattttat

SEQ ID NO: 5973225 - DNA, 25 bp, Homo sapien
atctaataattctgtctctatcttc

SEQ ID NO: 5973226 - DNA, 25 bp, Homo sapien
gttgatcagaaacattggtatcttc

SEQ ID NO: 5973227 - DNA, 25 bp, Homo sapien
aaggcaatgtcattgtcctgcataa

SEQ ID NO: 5973228 - DNA, 25 bp, Homo sapien
cctaatgttttccagaaattctaag

SEQ ID NO: 5973229 - DNA, 25 bp, Homo sapien
tctttagaattcttcgaaaccattc

SEQ ID NO: 5973230 - DNA, 25 bp, Homo sapien
ttgactttggcacattctgcgtcaa

SEQ ID NO: 5973231 - DNA, 25 bp, Homo sapien
ttcttcagatcgtcatattttatta

SEQ ID NO: 5973232 - DNA, 25 bp, Homo sapien
ttgttattgcttggaaaaaagtcga

SEQ ID NO: 5973233 - DNA, 25 bp, Homo sapien
ctgtctctatcttcatttcctgatg

SEQ ID NO: 5973234 - DNA, 25 bp, Homo sapien
attcaaattctgcactgaaaagtag

SEQ ID NO: 5973235 - DNA, 25 bp, Homo sapien
gcggtggttccctcccttatattcc

SEQ ID NO: 5973236 - DNA, 25 bp, Homo sapien
tcttactaagtctttccctaatgtt

SEQ ID NO: 5973237 - DNA, 25 bp, Homo sapien
ttccttgatcttgtcaaaatactct

SEQ ID NO: 5973238 - DNA, 25 bp, Homo sapien
caagccctactatccctgaagttgg

SEQ ID NO: 5973239 - DNA, 25 bp, Homo sapien
ctgatatcgtttaagaacttgttac

SEQ ID NO: 5973240 - DNA, 25 bp, Homo sapien
atattctcaataaattagagagcgg

SEQ ID NO: 5973241 - DNA, 25 bp, Homo sapien
ttgacttcatccaggttccaatgat

SEQ ID NO: 5973242 - DNA, 25 bp, Homo sapien
tggtttggaggttaaaaagttatgc

SEQ ID NO: 5973243 - DNA, 25 bp, Homo sapien
ctaattaagttcaacaactttctca

SEQ ID NO: 5973244 - DNA, 25 bp, Homo sapien
agtgttccaggtacgcatttcgcac

SEQ ID NO: 5973245 - DNA, 25 bp, Homo sapien
acgctaggtatattgactttggcac

SEQ ID NO: 5973246 - DNA, 25 bp, Homo sapien
ttgataagtcccttagattttagta

SEQ ID NO: 5973247 - DNA, 25 bp, Homo sapien
tgtgagtgttccaggtacgcatttc

SEQ ID NO: 5973248 - DNA, 25 bp, Homo sapien
gctaggtatattgactttggcacat

SEQ ID NO: 5973249 - DNA, 25 bp, Homo sapien
atgttttccagaaattctaagtctt

SEQ ID NO: 5973250 - DNA, 25 bp, Homo sapien
gaaattctaagtctttcaagatgag

SEQ ID NO: 5973251 - DNA, 25 bp, Homo sapien
ccaaaccatggccttgagatgcgcc

SEQ ID NO: 5973252 - DNA, 25 bp, Homo sapien
cactctgatatattctcaataaatt

SEQ ID NO: 5973253 - DNA, 25 bp, Homo sapien
attgcgattcaaattctgcactgaa

SEQ ID NO: 5973254 - DNA, 25 bp, Homo sapien
aagaacttgttacccaaaccatggc

SEQ ID NO: 5973255 - DNA, 25 bp, Homo sapien
tgacaggatcaacattaccttctat

SEQ ID NO: 5973256 - DNA, 25 bp, Homo sapien
ttgagtttgttattgcttggaaaaa

SEQ ID NO: 5973257 - DNA, 25 bp, Homo sapien
aacttcttgtgggccgcatgtaaag

SEQ ID NO: 5973258 - DNA, 25 bp, Homo sapien
agtaaagactcatttagcggtggtt

SEQ ID NO: 5973259 - DNA, 25 bp, Homo sapien
cacgcaagtcgctatggattacacc

SEQ ID NO: 5973260 - DNA, 25 bp, Homo sapien
gtatcgcagaaactaactgttgatc

SEQ ID NO: 5973261 - DNA, 25 bp, Homo sapien
cgattcaaattctgcactgaaaagt

SEQ ID NO: 5973262 - DNA, 25 bp, Homo sapien
gatttcccaattttgagtttgttat

SEQ ID NO: 5973263 - DNA, 25 bp, Homo sapien
acccaaaccatggccttgagatgcg

SEQ ID NO: 5973264 - DNA, 25 bp, Homo sapien
tctgacaggatcaacattaccttct

SEQ ID NO: 5973265 - DNA, 25 bp, Homo sapien
agccctactatccctgaagttggat

SEQ ID NO: 5973266 - DNA, 25 bp, Homo sapien
taatatattgtttgcctgcacgttt

SEQ ID NO: 5973267 - DNA, 25 bp, Homo sapien
tatatgggtgatgtcttcctttaag

SEQ ID NO: 5973268 - DNA, 25 bp, Homo sapien
gattacacccgcggcctcttgagcg

SEQ ID NO: 5973269 - DNA, 25 bp, Homo sapien
aattagagagcggcacgctaggtat

SEQ ID NO: 5973270 - DNA, 25 bp, Homo sapien
caagtcgctatggattacacccgcg

SEQ ID NO: 5973271 - DNA, 25 bp, Homo sapien
gttaaaaagttatgcttattcaaaa

SEQ ID NO: 5973272 - DNA, 25 bp, Homo sapien
aaatactctgacgctatgcctttac

SEQ ID NO: 5973273 - DNA, 25 bp, Homo sapien
attgtgagtgttccaggtacgcatt

SEQ ID NO: 5973274 - DNA, 25 bp, Homo sapien
gtcaaaatactctgacgctatgcct

SEQ ID NO: 5973275 - DNA, 25 bp, Homo sapien
atgatctttgaaatgccggattttt

SEQ ID NO: 5973276 - DNA, 25 bp, Homo sapien
ggcgaaaattcgttaatccattcta

SEQ ID NO: 5973277 - DNA, 25 bp, Homo sapien
tttcccaattttgagtttgttattg

SEQ ID NO: 5973278 - DNA, 25 bp, Homo sapien
atgtcattgtcctgcataatatatt

SEQ ID NO: 5973279 - DNA, 25 bp, Homo sapien
tgaacttcttgtgggccgcatgtaa

SEQ ID NO: 5973280 - DNA, 25 bp, Homo sapien
ccatcaattgcgattcaaattctgc

SEQ ID NO: 5973281 - DNA, 25 bp, Homo sapien
atttattttcattcctaacgtaatc

SEQ ID NO: 5973282 - DNA, 25 bp, Homo sapien
aagactcatttagcggtggttccat

SEQ ID NO: 5973283 - DNA, 25 bp, Homo sapien
cctgatgttctttagaattcttcga

SEQ ID NO: 5973284 - DNA, 25 bp, Homo sapien
gcggtggttccatcttcttcagatc

SEQ ID NO: 5973285 - DNA, 25 bp, Homo sapien
gtacgcatttcgcactctgatatat

SEQ ID NO: 5973286 - DNA, 25 bp, Homo sapien
ccaattttgagtttgttattgcttg

SEQ ID NO: 5973287 - DNA, 25 bp, Homo sapien
ccattctataatatttctgacaaat

SEQ ID NO: 5973288 - DNA, 25 bp, Homo sapien
taatgttttccagaaattctaagtc

SEQ ID NO: 5973289 - DNA, 25 bp, Homo sapien
ctgaaaagtaggaatttatctcctg

SEQ ID NO: 5973290 - DNA, 25 bp, Homo sapien
attcctaacgtaatcttgaggtgaa

SEQ ID NO: 5973291 - DNA, 25 bp, Homo sapien
tctagtattatttgcggtatcgcag

SEQ ID NO: 5973292 - DNA, 25 bp, Homo sapien
cccagcaatatcatatattgtgagt

SEQ ID NO: 5973293 - DNA, 25 bp, Homo sapien
aagttggattattcgatatcctccc

SEQ ID NO: 5973294 - DNA, 25 bp, Homo sapien
tgacgctatgcctttacattccatc

SEQ ID NO: 5973295 - DNA, 25 bp, Homo sapien
tgtaaagaagctaattaagttcaac

SEQ ID NO: 5973296 - DNA, 25 bp, Homo sapien
ctaactgttgatcagaaacattggt

SEQ ID NO: 5973297 - DNA, 25 bp, Homo sapien
gcttggaaaaaagtcgatttaccaa

SEQ ID NO: 5973298 - DNA, 25 bp, Homo sapien
attcttcgaaaccattctcatcttc

SEQ ID NO: 5973299 - DNA, 25 bp, Homo sapien
atttcctgatgttctttagaattct

SEQ ID NO: 5973300 - DNA, 25 bp, Homo sapien
tccatcttcttcagatcgtcatatt

SEQ ID NO: 5973301 - DNA, 25 bp, Homo sapien
aaagtcgatttaccaacattagcaa

SEQ ID NO: 5973302 - DNA, 25 bp, Homo sapien
aacattaccttctatatgggtgatg

SEQ ID NO: 5973303 - DNA, 25 bp, Homo sapien
ctcatttagcggtggttccatcttc

SEQ ID NO: 5973304 - DNA, 25 bp, Homo sapien
tatgggtgatgtcttcctttaagaa

SEQ ID NO: 5973305 - DNA, 25 bp, Homo sapien
atcctctcaccacttgaaatatccc

SEQ ID NO: 5973306 - DNA, 25 bp, Homo sapien
actatccctgaagttggattattcg

SEQ ID NO: 5973307 - DNA, 25 bp, Homo sapien
gctatgcctttacattccatcaatt

SEQ ID NO: 5973308 - DNA, 25 bp, Homo sapien
atccattctataatatttctgacaa

SEQ ID NO: 5973309 - DNA, 25 bp, Homo sapien
ctaataattctgtctctatcttcat

SEQ ID NO: 5973310 - DNA, 25 bp, Homo sapien
atcagaaacattggtatcttccttg

SEQ ID NO: 5973311 - DNA, 25 bp, Homo sapien
tatctcctggcgaaaattcgttaat

SEQ ID NO: 5973312 - DNA, 25 bp, Homo sapien
atggtagcgaatggataatttgcag

SEQ ID NO: 5973313 - DNA, 25 bp, Homo sapien
ctaagtctttcaagatgagttcatc

SEQ ID NO: 5973314 - DNA, 25 bp, Homo sapien
atgttctttagaattcttcgaaacc

SEQ ID NO: 5973315 - DNA, 25 bp, Homo sapien
tcattcctaacgtaatcttgaggtg

SEQ ID NO: 5973316 - DNA, 25 bp, Homo sapien
ttcctctaatgcatctaataattct

SEQ ID NO: 5973317 - DNA, 25 bp, Homo sapien
ccaggttccaatgatctttgaaatg

SEQ ID NO: 5973318 - DNA, 25 bp, Homo sapien
ttggaggttaaaaagttatgcttat

SEQ ID NO: 5973319 - DNA, 25 bp, Homo sapien
gcacgctaggtatattgactttggc

SEQ ID NO: 5973320 - DNA, 25 bp, Homo sapien
tttagcaatatcaaagttggtttgg

SEQ ID NO: 5973321 - DNA, 25 bp, Homo sapien
ttgcttggaaaaaagtcgatttacc

SEQ ID NO: 5973322 - DNA, 25 bp, Homo sapien
tggccttgagatgcgcctctggtga

SEQ ID NO: 5973323 - DNA, 25 bp, Homo sapien
cggtatcgcagaaactaactgttga

SEQ ID NO: 5973324 - DNA, 25 bp, Homo sapien
cataatatattgtttgcctgcacgt

SEQ ID NO: 5973325 - DNA, 25 bp, Homo sapien
catcttcttcagatcgtcatatttt

SEQ ID NO: 5973326 - DNA, 25 bp, Homo sapien
cctctaatgcatctaataattctgt

SEQ ID NO: 5973327 - DNA, 25 bp, Homo sapien
ggcaatgtcattgtcctgcataata

SEQ ID NO: 5973328 - DNA, 25 bp, Homo sapien
taagtcccttagattttagtaaaga

SEQ ID NO: 5973329 - DNA, 25 bp, Homo sapien
cctgcacgtttgataagtcccttag

SEQ ID NO: 5973330 - DNA, 25 bp, Homo sapien
gtttgttattgcttggaaaaaagtc

SEQ ID NO: 5973331 - DNA, 25 bp, Homo sapien
tttagaattcttcgaaaccattctc

SEQ ID NO: 5973332 - DNA, 25 bp, Homo sapien
ttcgaaaccattctcatcttcttac

SEQ ID NO: 5973333 - DNA, 25 bp, Homo sapien
ggtgagcccagcaatatcatatatt

SEQ ID NO: 5973334 - DNA, 25 bp, Homo sapien
cttcagatcgtcatattttattaca

SEQ ID NO: 5973335 - DNA, 25 bp, Homo sapien
tcccctctacgtgtctgatatcgtt

SEQ ID NO: 5973336 - DNA, 25 bp, Homo sapien
gcaatatcaaagttggtttggaggt

SEQ ID NO: 5973337 - DNA, 25 bp, Homo sapien
acatcagcgctgataaatgtttcac

SEQ ID NO: 5973338 - DNA, 25 bp, Homo sapien
aacgtaatcttgaggtgaaacattt

SEQ ID NO: 5973339 - DNA, 25 bp, Homo sapien
gtttcacgcaagtcgctatggatta

SEQ ID NO: 5973340 - DNA, 25 bp, Homo sapien
catggccttgagatgcgcctctggt

SEQ ID NO: 5973341 - DNA, 25 bp, Homo sapien
taaattagagagcggcacgctaggt

SEQ ID NO: 5973342 - DNA, 25 bp, Homo sapien
cacggatagatctctgacaggatca

SEQ ID NO: 5973343 - DNA, 25 bp, Homo sapien
gctatggattacacccgcggcctct

SEQ ID NO: 5973344 - DNA, 25 bp, Homo sapien
aaaattcgttaatccattctataat

SEQ ID NO: 5973345 - DNA, 25 bp, Homo sapien
cccttagattttagtaaagactcat

SEQ ID NO: 5973346 - DNA, 25 bp, Homo sapien
gcgtcaatggtagcgaatggataat

SEQ ID NO: 5973347 - DNA, 25 bp, Homo sapien
tcgctatggattacacccgcggcct

SEQ ID NO: 5973348 - DNA, 25 bp, Homo sapien
attttattacatcagcgctgataaa

SEQ ID NO: 5973349 - DNA, 25 bp, Homo sapien
aaattctgcactgaaaagtaggaat

SEQ ID NO: 5973350 - DNA, 25 bp, Homo sapien
tgataaatgtttcacgcaagtcgct

SEQ ID NO: 5973351 - DNA, 25 bp, Homo sapien
gattttagtaaagactcatttagcg

SEQ ID NO: 5973352 - DNA, 25 bp, Homo sapien
tctttgaaatgccggatttttttac

SEQ ID NO: 5973353 - DNA, 25 bp, Homo sapien
atcaattgcgattcaaattctgcac

SEQ ID NO: 5973354 - DNA, 25 bp, Homo sapien
tgttccaggtacgcatttcgcactc

SEQ ID NO: 5973355 - DNA, 25 bp, Homo sapien
aagttatgcttattcaaaattttga

SEQ ID NO: 5973356 - DNA, 25 bp, Homo sapien
tttgcctgcacgtttgataagtccc

SEQ ID NO: 5973357 - DNA, 25 bp, Homo sapien
ggcacattctgcgtcaatggtagcg

SEQ ID NO: 5973358 - DNA, 25 bp, Homo sapien
tgaggtgaaacatttagcaatatca

SEQ ID NO: 5973359 - DNA, 25 bp, Homo sapien
agatcgtcatattttattacatcag

SEQ ID NO: 5973360 - DNA, 25 bp, Homo sapien
ttattcgatatcctcccaagtaaaa

SEQ ID NO: 5973361 - DNA, 25 bp, Homo sapien
atcgcagaaactaactgttgatcag

SEQ ID NO: 5973362 - DNA, 25 bp, Homo sapien
gatcttgtcaaaatactctgacgct

SEQ ID NO: 5973363 - DNA, 25 bp, Homo sapien
ctctatcttcatttcctgatgttct

SEQ ID NO: 5973364 - DNA, 25 bp, Homo sapien
ttacccaaaccatggccttgagatg

SEQ ID NO: 5973365 - DNA, 25 bp, Homo sapien
caaaatactctgacgctatgccttt

SEQ ID NO: 5973366 - DNA, 25 bp, Homo sapien
tcttccttgatcttgtcaaaatact

SEQ ID NO: 5973367 - DNA, 25 bp, Homo sapien
tagaattcttcgaaaccattctcat

SEQ ID NO: 5973368 - DNA, 25 bp, Homo sapien
aggtgaaacatttagcaatatcaaa

SEQ ID NO: 5973369 - DNA, 25 bp, Homo sapien
cctttacattccatcaattgcgatt

SEQ ID NO: 5973370 - DNA, 25 bp, Homo sapien
atgcatctaataattctgtctctat

SEQ ID NO: 5973371 - DNA, 25 bp, Homo sapien
atatattctcaataaattagagagc

SEQ ID NO: 5973372 - DNA, 25 bp, Homo sapien
gcatctaataattctgtctctatct

SEQ ID NO: 5973373 - DNA, 25 bp, Homo sapien
tcttgtaccacggatagatctctga

SEQ ID NO: 5973374 - DNA, 25 bp, Homo sapien
aaaaagtcgatttaccaacattagc

SEQ ID NO: 5973375 - DNA, 25 bp, Homo sapien
tgcacgtttgataagtcccttagat

SEQ ID NO: 5973376 - DNA, 25 bp, Homo sapien
catttagcggtggttccatcttctt

SEQ ID NO: 5973377 - DNA, 25 bp, Homo sapien
ttagtaaagactcatttagcggtgg

SEQ ID NO: 5973378 - DNA, 25 bp, Homo sapien
ttccatcaattgcgattcaaattct

SEQ ID NO: 5973379 - DNA, 25 bp, Homo sapien
agtctttccctaatgttttccagaa

SEQ ID NO: 5973380 - DNA, 25 bp, Homo sapien
gtcaatggtagcgaatggataattt

SEQ ID NO: 5973381 - DNA, 25 bp, Homo sapien
aattctgtctctatcttcatttcct

SEQ ID NO: 5973382 - DNA, 25 bp, Homo sapien
aaaccattctcatcttcttactaag

SEQ ID NO: 5973383 - DNA, 25 bp, Homo sapien
ccaccggcggctttgaataaggcaa

SEQ ID NO: 5973384 - DNA, 25 bp, Homo sapien
atcagcgctgataaatgtttcacgc

SEQ ID NO: 5973385 - DNA, 25 bp, Homo sapien
tttagcggtggttccatcttcttca

SEQ ID NO: 5973386 - DNA, 25 bp, Homo sapien
ttgaaatatcccctctacgtgtctg

SEQ ID NO: 5973387 - DNA, 25 bp, Homo sapien
taggtatattgactttggcacattc

SEQ ID NO: 5973388 - DNA, 25 bp, Homo sapien
cttctatatgggtgatgtcttcctt

SEQ ID NO: 5973389 - DNA, 25 bp, Homo sapien
tatcccctctacgtgtctgatatcg

SEQ ID NO: 5973390 - DNA, 25 bp, Homo sapien
ttagagagcggcacgctaggtatat

SEQ ID NO: 5973391 - DNA, 25 bp, Homo sapien
tcaataaattagagagcggcacgct

SEQ ID NO: 5973392 - DNA, 25 bp, Homo sapien
actctgacgctatgcctttacattc

SEQ ID NO: 5973393 - DNA, 25 bp, Homo sapien
agagcggcacgctaggtatattgac

SEQ ID NO: 5973394 - DNA, 25 bp, Homo sapien
caatgtcattgtcctgcataatata

SEQ ID NO: 5973395 - DNA, 25 bp, Homo sapien
ttgagcggtggttccctcccttata

SEQ ID NO: 5973396 - DNA, 25 bp, Homo sapien
gccttgagatgcgcctctggtgagc

SEQ ID NO: 5973397 - DNA, 25 bp, Homo sapien
ttttagtaaagactcatttagcggt

SEQ ID NO: 5973398 - DNA, 25 bp, Homo sapien
ggtatattgactttggcacattctg

SEQ ID NO: 5973399 - DNA, 25 bp, Homo sapien
gaatcctctcaccacttgaaatatc

SEQ ID NO: 5973400 - DNA, 25 bp, Homo sapien
aggtacgcatttcgcactctgatat

SEQ ID NO: 5973401 - DNA, 25 bp, Homo sapien
taccaacattagcaagccctactat

SEQ ID NO: 5973402 - DNA, 25 bp, Homo sapien
ttggtatcttccttgatcttgtcaa

SEQ ID NO: 5973403 - DNA, 25 bp, Homo sapien
aattctaagtctttcaagatgagtt

SEQ ID NO: 5973404 - DNA, 25 bp, Homo sapien
gtaccacggatagatctctgacagg

SEQ ID NO: 5973405 - DNA, 25 bp, Homo sapien
tccctaatgttttccagaaattcta

SEQ ID NO: 5973406 - DNA, 25 bp, Homo sapien
gtctctatcttcatttcctgatgtt

SEQ ID NO: 5973407 - DNA, 25 bp, Homo sapien
attatttgcggtatcgcagaaacta

SEQ ID NO: 5973408 - DNA, 25 bp, Homo sapien
cttgagatgcgcctctggtgagccc

SEQ ID NO: 5973409 - DNA, 25 bp, Homo sapien
ggaggttaaaaagttatgcttattc

SEQ ID NO: 5973410 - DNA, 25 bp, Homo sapien
gactttggcacattctgcgtcaatg

SEQ ID NO: 5973411 - DNA, 25 bp, Homo sapien
cattggtatcttccttgatcttgtc

SEQ ID NO: 5973412 - DNA, 25 bp, Homo sapien
agcggcacgctaggtatattgactt

SEQ ID NO: 5973413 - DNA, 25 bp, Homo sapien
accttctatatgggtgatgtcttcc

SEQ ID NO: 5973414 - DNA, 25 bp, Homo sapien
gcgaatggataatttgcaggatttc

SEQ ID NO: 5973415 - DNA, 25 bp, Homo sapien
gatgagttcatcttgtaccacggat

SEQ ID NO: 5973416 - DNA, 25 bp, Homo sapien
cgaaaattcgttaatccattctata

SEQ ID NO: 5973417 - DNA, 25 bp, Homo sapien
tattacatcagcgctgataaatgtt

SEQ ID NO: 5973418 - DNA, 25 bp, Homo sapien
gactcatttagcggtggttccatct

SEQ ID NO: 5973419 - DNA, 25 bp, Homo sapien
ccgcggcctcttgagcggtggttcc

SEQ ID NO: 5973420 - DNA, 25 bp, Homo sapien
ctttgaataaggcaatgtcattgtc

SEQ ID NO: 5973421 - DNA, 25 bp, Homo sapien
tcttgtcaaaatactctgacgctat

SEQ ID NO: 5973422 - DNA, 25 bp, Homo sapien
cgcatgtaaagaagctaattaagtt

SEQ ID NO: 5973423 - DNA, 25 bp, Homo sapien
atattgtgagtgttccaggtacgca

SEQ ID NO: 5973424 - DNA, 25 bp, Homo sapien
tgcctttacattccatcaattgcga

SEQ ID NO: 5973425 - DNA, 25 bp, Homo sapien
taaaaattttcctccaccaatgttc

SEQ ID NO: 5973426 - DNA, 25 bp, Homo sapien
tagattttagtaaagactcatttag

SEQ ID NO: 5973427 - DNA, 25 bp, Homo sapien
ggcctcttgagcggtggttccctcc

SEQ ID NO: 5973428 - DNA, 25 bp, Homo sapien
tggttccctcccttatattccattg

SEQ ID NO: 5973429 - DNA, 25 bp, Homo sapien
gtctgatatcgtttaagaacttgtt

SEQ ID NO: 5973430 - DNA, 25 bp, Homo sapien
ttcatcttgtaccacggatagatct

SEQ ID NO: 5973431 - DNA, 25 bp, Homo sapien
cttagattttagtaaagactcattt

SEQ ID NO: 5973432 - DNA, 25 bp, Homo sapien
ttaccttctatatgggtgatgtctt

SEQ ID NO: 5973433 - DNA, 25 bp, Homo sapien
tgagcccagcaatatcatatattgt

SEQ ID NO: 5973434 - DNA, 25 bp, Homo sapien
ttgatcttgtcaaaatactctgacg

SEQ ID NO: 5973435 - DNA, 25 bp, Homo sapien
tttaccaacattagcaagccctact

SEQ ID NO: 5973436 - DNA, 25 bp, Homo sapien
ttctcatttctagtattatttgcgg

SEQ ID NO: 5973437 - DNA, 25 bp, Homo sapien
ttctaagtctttcaagatgagttca

SEQ ID NO: 5973438 - DNA, 25 bp, Homo sapien
tccattggtgaacttcttgtgggcc

SEQ ID NO: 5973439 - DNA, 25 bp, Homo sapien
aagttcaacaactttctcatttcta

SEQ ID NO: 5973440 - DNA, 25 bp, Homo sapien
tctctgacaggatcaacattacctt

SEQ ID NO: 5973441 - DNA, 25 bp, Homo sapien
ctctggtgagcccagcaatatcata

SEQ ID NO: 5973442 - DNA, 25 bp, Homo sapien
cactgaaaagtaggaatttatctcc

SEQ ID NO: 5973443 - DNA, 25 bp, Homo sapien
cttcatccaggttccaatgatcttt

SEQ ID NO: 5973444 - DNA, 25 bp, Homo sapien
ggtgatgtcttcctttaagaatcct

SEQ ID NO: 5973445 - DNA, 25 bp, Homo sapien
ggtatcttccttgatcttgtcaaaa

SEQ ID NO: 5973446 - DNA, 25 bp, Homo sapien
atcttgaggtgaaacatttagcaat

SEQ ID NO: 5973447 - DNA, 25 bp, Homo sapien
ctggcgaaaattcgttaatccattc

SEQ ID NO: 5973448 - DNA, 25 bp, Homo sapien
aatatcaaagttggtttggaggtta

SEQ ID NO: 5973449 - DNA, 25 bp, Homo sapien
tgcctgcacgtttgataagtccctt

SEQ ID NO: 5973450 - DNA, 25 bp, Homo sapien
ggtggttccatcttcttcagatcgt

SEQ ID NO: 5973451 - DNA, 25 bp, Homo sapien
ccgttaaacaaatgttcctctaatg

SEQ ID NO: 5973452 - DNA, 25 bp, Homo sapien
cgcactctgatatattctcaataaa

SEQ ID NO: 5973453 - DNA, 25 bp, Homo sapien
tgttcctctaatgcatctaataatt

SEQ ID NO: 5973454 - DNA, 25 bp, Homo sapien
catttagcaatatcaaagttggttt

SEQ ID NO: 5973455 - DNA, 25 bp, Homo sapien
tcatccaggttccaatgatctttga

SEQ ID NO: 5973456 - DNA, 25 bp, Homo sapien
tggattacacccgcggcctcttgag

SEQ ID NO: 5973457 - DNA, 25 bp, Homo sapien
tattgactttggcacattctgcgtc

SEQ ID NO: 5973458 - DNA, 25 bp, Homo sapien
atcttcttactaagtctttccctaa

SEQ ID NO: 5973459 - DNA, 25 bp, Homo sapien
tgcaggatttcccaattttgagttt

SEQ ID NO: 5973460 - DNA, 25 bp, Homo sapien
taaagactcatttagcggtggttcc

SEQ ID NO: 5973461 - DNA, 25 bp, Homo sapien
attgtttgcctgcacgtttgataag

SEQ ID NO: 5973462 - DNA, 25 bp, Homo sapien
ttggtgaacttcttgtgggccgcat

SEQ ID NO: 5973463 - DNA, 25 bp, Homo sapien
aacattggtatcttccttgatcttg

SEQ ID NO: 5973464 - DNA, 25 bp, Homo sapien
gaaaaaagtcgatttaccaacatta

SEQ ID NO: 5973465 - DNA, 25 bp, Homo sapien
tatccctgaagttggattattcgat

SEQ ID NO: 5973466 - DNA, 25 bp, Homo sapien
tgcggtatcgcagaaactaactgtt

SEQ ID NO: 5973467 - DNA, 25 bp, Homo sapien
gtcattgtcctgcataatatattgt

SEQ ID NO: 5973468 - DNA, 25 bp, Homo sapien
tacattccatcaattgcgattcaaa

SEQ ID NO: 5973469 - DNA, 25 bp, Homo sapien
ctgcgtcaatggtagcgaatggata

SEQ ID NO: 5973470 - DNA, 25 bp, Homo sapien
tgggtgatgtcttcctttaagaatc

SEQ ID NO: 5973471 - DNA, 25 bp, Homo sapien
caatgatctttgaaatgccggattt

SEQ ID NO: 5973472 - DNA, 25 bp, Homo sapien
ttttgagtttgttattgcttggaaa

SEQ ID NO: 5973473 - DNA, 25 bp, Homo sapien
agtcgatttaccaacattagcaagc

SEQ ID NO: 5973474 - DNA, 25 bp, Homo sapien
acaggatcaacattaccttctatat

SEQ ID NO: 5973475 - DNA, 25 bp, Homo sapien
gatagatctctgacaggatcaacat

SEQ ID NO: 5973476 - DNA, 25 bp, Homo sapien
ttctgtctctatcttcatttcctga

SEQ ID NO: 5973477 - DNA, 25 bp, Homo sapien
cttcttactaagtctttccctaatg

SEQ ID NO: 5973478 - DNA, 25 bp, Homo sapien
cctcccttatattccattggtgaac

SEQ ID NO: 5973479 - DNA, 25 bp, Homo sapien
tgcactgaaaagtaggaatttatct

SEQ ID NO: 5973480 - DNA, 25 bp, Homo sapien
ctatcttcatttcctgatgttcttt

SEQ ID NO: 5973481 - DNA, 25 bp, Homo sapien
tgagttcatcttgtaccacggatag

SEQ ID NO: 5973482 - DNA, 25 bp, Homo sapien
gtctttcaagatgagttcatcttgt

SEQ ID NO: 5973483 - DNA, 25 bp, Homo sapien
tggttccatcttcttcagatcgtca

SEQ ID NO: 5973484 - DNA, 25 bp, Homo sapien
ctttaagaatcctctcaccacttga

SEQ ID NO: 5973485 - DNA, 25 bp, Homo sapien
atttcgcactctgatatattctcaa

SEQ ID NO: 5973486 - DNA, 25 bp, Homo sapien
cattgtcctgcataatatattgttt

SEQ ID NO: 5973487 - DNA, 25 bp, Homo sapien
ccctctacgtgtctgatatcgttta

SEQ ID NO: 5973488 - DNA, 25 bp, Homo sapien
tatcatatattgtgagtgttccagg

SEQ ID NO: 5973489 - DNA, 25 bp, Homo sapien
tccctcccttatattccattggtga

SEQ ID NO: 5973490 - DNA, 25 bp, Homo sapien
gttatgcttattcaaaattttgact

SEQ ID NO: 5973491 - DNA, 25 bp, Homo sapien
accacttgaaatatcccctctacgt

SEQ ID NO: 5973492 - DNA, 25 bp, Homo sapien
ctactatccctgaagttggattatt

SEQ ID NO: 5973493 - DNA, 25 bp, Homo sapien
tatttgcggtatcgcagaaactaac

SEQ ID NO: 5973494 - DNA, 25 bp, Homo sapien
tttctagtattatttgcggtatcgc

SEQ ID NO: 5973495 - DNA, 25 bp, Homo sapien
cttcttgtgggccgcatgtaaagaa

SEQ ID NO: 5973496 - DNA, 25 bp, Homo sapien
gagtttgttattgcttggaaaaaag

SEQ ID NO: 5973497 - DNA, 25 bp, Homo sapien
gttggattattcgatatcctcccaa

SEQ ID NO: 5973498 - DNA, 25 bp, Homo sapien
tcctggcgaaaattcgttaatccat

SEQ ID NO: 5973499 - DNA, 25 bp, Homo sapien
tgaagttggattattcgatatcctc

SEQ ID NO: 5973500 - DNA, 25 bp, Homo sapien
gaagctaattaagttcaacaacttt

SEQ ID NO: 5973501 - DNA, 25 bp, Homo sapien
cttcctttaagaatcctctcaccac

SEQ ID NO: 5973502 - DNA, 25 bp, Homo sapien
tactaagtctttccctaatgttttc

SEQ ID NO: 5973503 - DNA, 25 bp, Homo sapien
tctatatgggtgatgtcttccttta

SEQ ID NO: 5973504 - DNA, 25 bp, Homo sapien
atatattgtgagtgttccaggtacg

SEQ ID NO: 5973505 - DNA, 25 bp, Homo sapien
gattattcgatatcctcccaagtaa

SEQ ID NO: 5973506 - DNA, 25 bp, Homo sapien
tcccttatattccattggtgaactt

SEQ ID NO: 5973507 - DNA, 25 bp, Homo sapien
cggcacgctaggtatattgactttg

SEQ ID NO: 5973508 - DNA, 25 bp, Homo sapien
tcgatttaccaacattagcaagccc

SEQ ID NO: 5973509 - DNA, 25 bp, Homo sapien
ttgtaccacggatagatctctgaca

SEQ ID NO: 5973510 - DNA, 25 bp, Homo sapien
aataaattagagagcggcacgctag

SEQ ID NO: 5973511 - DNA, 25 bp, Homo sapien
gaaatatcccctctacgtgtctgat

SEQ ID NO: 5973512 - DNA, 25 bp, Homo sapien
taatgcatctaataattctgtctct

SEQ ID NO: 5973513 - DNA, 25 bp, Homo sapien
ccttatattccattggtgaacttct

SEQ ID NO: 5973514 - DNA, 25 bp, Homo sapien
aatttgcaggatttcccaattttga

SEQ ID NO: 5973515 - DNA, 25 bp, Homo sapien
tagtattatttgcggtatcgcagaa

SEQ ID NO: 5973516 - DNA, 25 bp, Homo sapien
atcttcatttcctgatgttctttag

SEQ ID NO: 5973517 - DNA, 25 bp, Homo sapien
tgcataatatattgtttgcctgcac

SEQ ID NO: 5973518 - DNA, 25 bp, Homo sapien
gtcccttagattttagtaaagactc

SEQ ID NO: 5973519 - DNA, 25 bp, Homo sapien
tctttccctaatgttttccagaaat

SEQ ID NO: 5973520 - DNA, 25 bp, Homo sapien
cacgtttgataagtcccttagattt

SEQ ID NO: 5973521 - DNA, 25 bp, Homo sapien
tttatctcctggcgaaaattcgtta

SEQ ID NO: 5973522 - DNA, 25 bp, Homo sapien
tttccctaatgttttccagaaattc

SEQ ID NO: 5973523 - DNA, 25 bp, Homo sapien
aactaactgttgatcagaaacattg

SEQ ID NO: 5973524 - DNA, 25 bp, Homo sapien
atactctgacgctatgcctttacat

SEQ ID NO: 5973525 - DNA, 25 bp, Homo sapien
gttccctcccttatattccattggt

SEQ ID NO: 5973526 - DNA, 25 bp, Homo sapien
atatattgtttgcctgcacgtttga

SEQ ID NO: 5973527 - DNA, 25 bp, Homo sapien
ttaagaatcctctcaccacttgaaa

SEQ ID NO: 5973528 - DNA, 25 bp, Homo sapien
acccgcggcctcttgagcggtggtt

SEQ ID NO: 5973529 - DNA, 25 bp, Homo sapien
accatggccttgagatgcgcctctg

SEQ ID NO: 5973530 - DNA, 25 bp, Homo sapien
cagcgctgataaatgtttcacgcaa

SEQ ID NO: 5973531 - DNA, 25 bp, Homo sapien
tcgttaatccattctataatatttc

SEQ ID NO: 5973532 - DNA, 25 bp, Homo sapien
tttccagaaattctaagtctttcaa

SEQ ID NO: 5973533 - DNA, 25 bp, Homo sapien
cagaaattctaagtctttcaagatg

SEQ ID NO: 5973534 - DNA, 25 bp, Homo sapien
tcagatcgtcatattttattacatc

SEQ ID NO: 5973535 - DNA, 25 bp, Homo sapien
tcatttcctgatgttctttagaatt

SEQ ID NO: 5973536 - DNA, 25 bp, Homo sapien
ggataatttgcaggatttcccaatt

SEQ ID NO: 5973537 - DNA, 25 bp, Homo sapien
tagcaatatcaaagttggtttggag

SEQ ID NO: 5973538 - DNA, 25 bp, Homo sapien
aaatgtttcacgcaagtcgctatgg

SEQ ID NO: 5973539 - DNA, 25 bp, Homo sapien
taatccattctataatatttctgac

SEQ ID NO: 5973540 - DNA, 25 bp, Homo sapien
ctctacgtgtctgatatcgtttaag

SEQ ID NO: 5973541 - DNA, 25 bp, Homo sapien
ataaggcaatgtcattgtcctgcat

SEQ ID NO: 5973542 - DNA, 25 bp, Homo sapien
aaacgtagtccagtggctggacgtt

SEQ ID NO: 5973543 - DNA, 25 bp, Homo sapien
gcaaaagcaaacaattttccctggt

SEQ ID NO: 5973544 - DNA, 25 bp, Homo sapien
acttcaccattaaagaacgtcatca

SEQ ID NO: 5973545 - DNA, 25 bp, Homo sapien
gtggaaaaagaagctgtcttcacca

SEQ ID NO: 5973546 - DNA, 25 bp, Homo sapien
ttccaagatgatgcggtcatcaagt

SEQ ID NO: 5973547 - DNA, 25 bp, Homo sapien
aactagaacaatattgctccaaatt

SEQ ID NO: 5973548 - DNA, 25 bp, Homo sapien
cagtggctggacgttatacgcttta

SEQ ID NO: 5973549 - DNA, 25 bp, Homo sapien
tttcttgacaaggttattcctaaaa

SEQ ID NO: 5973550 - DNA, 25 bp, Homo sapien
ggctggacgttatacgctttaattt

SEQ ID NO: 5973551 - DNA, 25 bp, Homo sapien
gttctatatttaccgatgcggaccc

SEQ ID NO: 5973552 - DNA, 25 bp, Homo sapien
tcgtattacgcaagttttggcacaa

SEQ ID NO: 5973553 - DNA, 25 bp, Homo sapien
agaagctgtcttcaccaaattagta

SEQ ID NO: 5973554 - DNA, 25 bp, Homo sapien
atcggactgttctatatttaccgat

SEQ ID NO: 5973555 - DNA, 25 bp, Homo sapien
tgaaccaaagatgcaaaagcaaaca

SEQ ID NO: 5973556 - DNA, 25 bp, Homo sapien
gcaaactataaaggaattcgtatta

SEQ ID NO: 5973557 - DNA, 25 bp, Homo sapien
ctaattccatttttccaagatgatg

SEQ ID NO: 5973558 - DNA, 25 bp, Homo sapien
tgtgaaaatgaaccaaagatgcaaa

SEQ ID NO: 5973559 - DNA, 25 bp, Homo sapien
ccctttgaatggcccgcatctatgc

SEQ ID NO: 5973560 - DNA, 25 bp, Homo sapien
tgaagtgcataacaaatccattcaa

SEQ ID NO: 5973561 - DNA, 25 bp, Homo sapien
gtacaaataccatgctcattacagg

SEQ ID NO: 5973562 - DNA, 25 bp, Homo sapien
gcacgatggcaaactataaaggaat

SEQ ID NO: 5973563 - DNA, 25 bp, Homo sapien
tgaaatgaacgagattgatgccaga

SEQ ID NO: 5973564 - DNA, 25 bp, Homo sapien
actccaatggtcactccaacggaac

SEQ ID NO: 5973565 - DNA, 25 bp, Homo sapien
ggctttggagggattgcggaaaaaa

SEQ ID NO: 5973566 - DNA, 25 bp, Homo sapien
ccgctaggtaaaaacactacagtga

SEQ ID NO: 5973567 - DNA, 25 bp, Homo sapien
taagcatttcctgtcattggcggct

SEQ ID NO: 5973568 - DNA, 25 bp, Homo sapien
ctcactcgaatgaacgcaacgctta

SEQ ID NO: 5973569 - DNA, 25 bp, Homo sapien
ctttaatttcaagctctctccaaga

SEQ ID NO: 5973570 - DNA, 25 bp, Homo sapien
aggcaggaattggtcaaagcactca

SEQ ID NO: 5973571 - DNA, 25 bp, Homo sapien
ccctggtaagccctgtctaattcca

SEQ ID NO: 5973572 - DNA, 25 bp, Homo sapien
cagcgcgactactccttagccaaga

SEQ ID NO: 5973573 - DNA, 25 bp, Homo sapien
ttacaggtaagggatttccagattt

SEQ ID NO: 5973574 - DNA, 25 bp, Homo sapien
gatttccagatttcttgacaaggtt

SEQ ID NO: 5973575 - DNA, 25 bp, Homo sapien
gacatgtgaaaatgaaccaaagatg

SEQ ID NO: 5973576 - DNA, 25 bp, Homo sapien
gggattgcggaaaaaatataaaaca

SEQ ID NO: 5973577 - DNA, 25 bp, Homo sapien
ggagggattgcggaaaaaatataaa

SEQ ID NO: 5973578 - DNA, 25 bp, Homo sapien
agacaagcaaacgtagtccagtggc

SEQ ID NO: 5973579 - DNA, 25 bp, Homo sapien
gtccattcacttgaactccaatggt

SEQ ID NO: 5973580 - DNA, 25 bp, Homo sapien
tagccaagaatttgatagcatctct

SEQ ID NO: 5973581 - DNA, 25 bp, Homo sapien
actccttagccaagaatttgatagc

SEQ ID NO: 5973582 - DNA, 25 bp, Homo sapien
gtatgtgtaatattgtaatagtgga

SEQ ID NO: 5973583 - DNA, 25 bp, Homo sapien
gttatacgctttaatttcaagctct

SEQ ID NO: 5973584 - DNA, 25 bp, Homo sapien
tgagagatatcttctactccaacgt

SEQ ID NO: 5973585 - DNA, 25 bp, Homo sapien
atcaagttagggacaacaagtatgt

SEQ ID NO: 5973586 - DNA, 25 bp, Homo sapien
ctactccttagccaagaatttgata

SEQ ID NO: 5973587 - DNA, 25 bp, Homo sapien
ataatgaagtgcataacaaatccat

SEQ ID NO: 5973588 - DNA, 25 bp, Homo sapien
gatttcttgacaaggttattcctaa

SEQ ID NO: 5973589 - DNA, 25 bp, Homo sapien
tctctgactgccaacagctgggata

SEQ ID NO: 5973590 - DNA, 25 bp, Homo sapien
gcactcactcctaaaagacggtcca

SEQ ID NO: 5973591 - DNA, 25 bp, Homo sapien
tcctaaaagacggtccattcacttg

SEQ ID NO: 5973592 - DNA, 25 bp, Homo sapien
tccccattgatatttatgacaatat

SEQ ID NO: 5973593 - DNA, 25 bp, Homo sapien
ggattagcatagccctaaattatac

SEQ ID NO: 5973594 - DNA, 25 bp, Homo sapien
tcatattaagcatttcctgtcattg

SEQ ID NO: 5973595 - DNA, 25 bp, Homo sapien
aacaaggcaggaattggtcaaagca

SEQ ID NO: 5973596 - DNA, 25 bp, Homo sapien
taaagaacgtcatcatagaatgtca

SEQ ID NO: 5973597 - DNA, 25 bp, Homo sapien
agtcgttatggaaaaattaccgcta

SEQ ID NO: 5973598 - DNA, 25 bp, Homo sapien
attcacttgaactccaatggtcact

SEQ ID NO: 5973599 - DNA, 25 bp, Homo sapien
ctccaacgtggaattgtttcaaaga

SEQ ID NO: 5973600 - DNA, 25 bp, Homo sapien
aaatataaaacaaggcaggaattgg

SEQ ID NO: 5973601 - DNA, 25 bp, Homo sapien
gcatagccctaaattatactcactc

SEQ ID NO: 5973602 - DNA, 25 bp, Homo sapien
caagttttggcacaaaataatgaag

SEQ ID NO: 5973603 - DNA, 25 bp, Homo sapien
aattccatttttccaagatgatgcg

SEQ ID NO: 5973604 - DNA, 25 bp, Homo sapien
tgcactcatcagttcaagttgaaaa

SEQ ID NO: 5973605 - DNA, 25 bp, Homo sapien
ctgttcaaacgcagatgttttggct

SEQ ID NO: 5973606 - DNA, 25 bp, Homo sapien
ttctgacatgtgaaaatgaaccaaa

SEQ ID NO: 5973607 - DNA, 25 bp, Homo sapien
caattattgagtttgaatcagcgcg

SEQ ID NO: 5973608 - DNA, 25 bp, Homo sapien
aaacgcagatgttttggctcatatt

SEQ ID NO: 5973609 - DNA, 25 bp, Homo sapien
gaattgtttcaaagacaagcaaacg

SEQ ID NO: 5973610 - DNA, 25 bp, Homo sapien
attcacacaacattggacttccctt

SEQ ID NO: 5973611 - DNA, 25 bp, Homo sapien
taaaaacactacagtgagagatatc

SEQ ID NO: 5973612 - DNA, 25 bp, Homo sapien
gatgcggacccctatgggattagca

SEQ ID NO: 5973613 - DNA, 25 bp, Homo sapien
ggacgttatacgctttaatttcaag

SEQ ID NO: 5973614 - DNA, 25 bp, Homo sapien
gtcattggcggctaattcattagag

SEQ ID NO: 5973615 - DNA, 25 bp, Homo sapien
aaaaagaagctgtcttcaccaaatt

SEQ ID NO: 5973616 - DNA, 25 bp, Homo sapien
ttggagggattgcggaaaaaatata

SEQ ID NO: 5973617 - DNA, 25 bp, Homo sapien
tatgacaatattctgacatgtgaaa

SEQ ID NO: 5973618 - DNA, 25 bp, Homo sapien
ttccctttgaatggcccgcatctat

SEQ ID NO: 5973619 - DNA, 25 bp, Homo sapien
atggtcactccaacggaactccctg

SEQ ID NO: 5973620 - DNA, 25 bp, Homo sapien
tccttagccaagaatttgatagcat

SEQ ID NO: 5973621 - DNA, 25 bp, Homo sapien
tttatgacaatattctgacatgtga

SEQ ID NO: 5973622 - DNA, 25 bp, Homo sapien
acaatattctgacatgtgaaaatga

SEQ ID NO: 5973623 - DNA, 25 bp, Homo sapien
ccattcacttgaactccaatggtca

SEQ ID NO: 5973624 - DNA, 25 bp, Homo sapien
tagtaaataattatcacaagttgag

SEQ ID NO: 5973625 - DNA, 25 bp, Homo sapien
aacactacagtgagagatatcttct

SEQ ID NO: 5973626 - DNA, 25 bp, Homo sapien
cccattgatatttatgacaatattc

SEQ ID NO: 5973627 - DNA, 25 bp, Homo sapien
ccctgttcaaacgcagatgttttgg

SEQ ID NO: 5973628 - DNA, 25 bp, Homo sapien
agttgaaaagatgcgcaatcctttt

SEQ ID NO: 5973629 - DNA, 25 bp, Homo sapien
aatttgatagcatctctgactgcca

SEQ ID NO: 5973630 - DNA, 25 bp, Homo sapien
gactactccttagccaagaatttga

SEQ ID NO: 5973631 - DNA, 25 bp, Homo sapien
acgagattgatgccagaatttttga

SEQ ID NO: 5973632 - DNA, 25 bp, Homo sapien
ttttccctggtaagccctgtctaat

SEQ ID NO: 5973633 - DNA, 25 bp, Homo sapien
aacattataccagctcaaaagggtt

SEQ ID NO: 5973634 - DNA, 25 bp, Homo sapien
tttcctgtcattggcggctaattca

SEQ ID NO: 5973635 - DNA, 25 bp, Homo sapien
ctgttctatatttaccgatgcggac

SEQ ID NO: 5973636 - DNA, 25 bp, Homo sapien
agcatttcctgtcattggcggctaa

SEQ ID NO: 5973637 - DNA, 25 bp, Homo sapien
ctcattacaggtaagggatttccag

SEQ ID NO: 5973638 - DNA, 25 bp, Homo sapien
taaacattataccagctcaaaaggg

SEQ ID NO: 5973639 - DNA, 25 bp, Homo sapien
tttccccattgatatttatgacaat

SEQ ID NO: 5973640 - DNA, 25 bp, Homo sapien
aaataattatcacaagttgagtaca

SEQ ID NO: 5973641 - DNA, 25 bp, Homo sapien
ataccatgctcattacaggtaaggg

SEQ ID NO: 5973642 - DNA, 25 bp, Homo sapien
taagccctgtctaattccatttttc

SEQ ID NO: 5973643 - DNA, 25 bp, Homo sapien
taggtaaaaacactacagtgagaga

SEQ ID NO: 5973644 - DNA, 25 bp, Homo sapien
tgtcttcaccaaattagtaaataat

SEQ ID NO: 5973645 - DNA, 25 bp, Homo sapien
tctctccaagaaaatccttaaacat

SEQ ID NO: 5973646 - DNA, 25 bp, Homo sapien
catctatgcactcatcagttcaagt

SEQ ID NO: 5973647 - DNA, 25 bp, Homo sapien
gcaaacaattttccctggtaagccc

SEQ ID NO: 5973648 - DNA, 25 bp, Homo sapien
ccgatgcggacccctatgggattag

SEQ ID NO: 5973649 - DNA, 25 bp, Homo sapien
agtgagagatatcttctactccaac

SEQ ID NO: 5973650 - DNA, 25 bp, Homo sapien
ctcatcagttcaagttgaaaagatg

SEQ ID NO: 5973651 - DNA, 25 bp, Homo sapien
ctttggagggattgcggaaaaaata

SEQ ID NO: 5973652 - DNA, 25 bp, Homo sapien
ggacaacaagtatgtgtaatattgt

SEQ ID NO: 5973653 - DNA, 25 bp, Homo sapien
aacagcctatttcaatcgtctttca

SEQ ID NO: 5973654 - DNA, 25 bp, Homo sapien
tttgatagcatctctgactgccaac

SEQ ID NO: 5973655 - DNA, 25 bp, Homo sapien
attgtttcaaagacaagcaaacgta

SEQ ID NO: 5973656 - DNA, 25 bp, Homo sapien
gatatttatgacaatattctgacat

SEQ ID NO: 5973657 - DNA, 25 bp, Homo sapien
ggcccgcatctatgcactcatcagt

SEQ ID NO: 5973658 - DNA, 25 bp, Homo sapien
tatatttaccgatgcggacccctat

SEQ ID NO: 5973659 - DNA, 25 bp, Homo sapien
atataaaacaaggcaggaattggtc

SEQ ID NO: 5973660 - DNA, 25 bp, Homo sapien
atatcggactgttctatatttaccg

SEQ ID NO: 5973661 - DNA, 25 bp, Homo sapien
atcacaagttgagtacaaataccat

SEQ ID NO: 5973662 - DNA, 25 bp, Homo sapien
tccattcaattattgagtttgaatc

SEQ ID NO: 5973663 - DNA, 25 bp, Homo sapien
cattggcggctaattcattagagca

SEQ ID NO: 5973664 - DNA, 25 bp, Homo sapien
acaggtaagggatttccagatttct

SEQ ID NO: 5973665 - DNA, 25 bp, Homo sapien
aacattggacttccctttgaatggc

SEQ ID NO: 5973666 - DNA, 25 bp, Homo sapien
agcagtcctgacattcacacaacat

SEQ ID NO: 5973667 - DNA, 25 bp, Homo sapien
cgcctttccccattgatatttatga

SEQ ID NO: 5973668 - DNA, 25 bp, Homo sapien
catctctgactgccaacagctggga

SEQ ID NO: 5973669 - DNA, 25 bp, Homo sapien
attggtcaaagcactcactcctaaa

SEQ ID NO: 5973670 - DNA, 25 bp, Homo sapien
ttatatttgcacgatggcaaactat

SEQ ID NO: 5973671 - DNA, 25 bp, Homo sapien
catcaacagcctatttcaatcgtct

SEQ ID NO: 5973672 - DNA, 25 bp, Homo sapien
aatgaaccaaagatgcaaaagcaaa

SEQ ID NO: 5973673 - DNA, 25 bp, Homo sapien
ttttttccaaaagaaagctgaaatg

SEQ ID NO: 5973674 - DNA, 25 bp, Homo sapien
gcaaacgtagtccagtggctggacg

SEQ ID NO: 5973675 - DNA, 25 bp, Homo sapien
tcttgacaaggttattcctaaaaaa

SEQ ID NO: 5973676 - DNA, 25 bp, Homo sapien
acaagcaaacgtagtccagtggctg

SEQ ID NO: 5973677 - DNA, 25 bp, Homo sapien
tatacgctttaatttcaagctctct

SEQ ID NO: 5973678 - DNA, 25 bp, Homo sapien
gacggtccattcacttgaactccaa

SEQ ID NO: 5973679 - DNA, 25 bp, Homo sapien
caagaaaatccttaaacattatacc

SEQ ID NO: 5973680 - DNA, 25 bp, Homo sapien
caacttcaccattaaagaacgtcat

SEQ ID NO: 5973681 - DNA, 25 bp, Homo sapien
ggcggctaattcattagagcaacat

SEQ ID NO: 5973682 - DNA, 25 bp, Homo sapien
cttctactccaacgtggaattgttt

SEQ ID NO: 5973683 - DNA, 25 bp, Homo sapien
tgccagaatttttgaatacaaatga

SEQ ID NO: 5973684 - DNA, 25 bp, Homo sapien
tgcaacttcaccattaaagaacgtc

SEQ ID NO: 5973685 - DNA, 25 bp, Homo sapien
cattacaggtaagggatttccagat

SEQ ID NO: 5973686 - DNA, 25 bp, Homo sapien
acttccctttgaatggcccgcatct

SEQ ID NO: 5973687 - DNA, 25 bp, Homo sapien
ggaactccctgttcaaacgcagatg

SEQ ID NO: 5973688 - DNA, 25 bp, Homo sapien
tatgggattagcatagccctaaatt

SEQ ID NO: 5973689 - DNA, 25 bp, Homo sapien
catcagttcaagttgaaaagatgcg

SEQ ID NO: 5973690 - DNA, 25 bp, Homo sapien
cgcatctatgcactcatcagttcaa

SEQ ID NO: 5973691 - DNA, 25 bp, Homo sapien
ttcaattattgagtttgaatcagcg

SEQ ID NO: 5973692 - DNA, 25 bp, Homo sapien
acgatggcaaactataaaggaattc

SEQ ID NO: 5973693 - DNA, 25 bp, Homo sapien
aaaaaactagaacaatattgctcca

SEQ ID NO: 5973694 - DNA, 25 bp, Homo sapien
tattgaaagtcgttatggaaaaatt

SEQ ID NO: 5973695 - DNA, 25 bp, Homo sapien
cggtccattcacttgaactccaatg

SEQ ID NO: 5973696 - DNA, 25 bp, Homo sapien
ggacttccctttgaatggcccgcat

SEQ ID NO: 5973697 - DNA, 25 bp, Homo sapien
ctaaaagacggtccattcacttgaa

SEQ ID NO: 5973698 - DNA, 25 bp, Homo sapien
agttgagtacaaataccatgctcat

SEQ ID NO: 5973699 - DNA, 25 bp, Homo sapien
ctccaaattgatatcggactgttct

SEQ ID NO: 5973700 - DNA, 25 bp, Homo sapien
ttgcacgatggcaaactataaagga

SEQ ID NO: 5973701 - DNA, 25 bp, Homo sapien
cagctgggatattgcaacttcacca

SEQ ID NO: 5973702 - DNA, 25 bp, Homo sapien
aaagatgcgcaatccttttaaactt

SEQ ID NO: 5973703 - DNA, 25 bp, Homo sapien
atatttgcacgatggcaaactataa

SEQ ID NO: 5973704 - DNA, 25 bp, Homo sapien
tccttaaacattataccagctcaaa

SEQ ID NO: 5973705 - DNA, 25 bp, Homo sapien
gctaggtaaaaacactacagtgaga

SEQ ID NO: 5973706 - DNA, 25 bp, Homo sapien
cactacagtgagagatatcttctac

SEQ ID NO: 5973707 - DNA, 25 bp, Homo sapien
tgaaaatgaaccaaagatgcaaaag

SEQ ID NO: 5973708 - DNA, 25 bp, Homo sapien
atttcaatcgtctttcaaaacaaaa

SEQ ID NO: 5973709 - DNA, 25 bp, Homo sapien
acgcagatgttttggctcatattaa

SEQ ID NO: 5973710 - DNA, 25 bp, Homo sapien
gtttgaatcagcgcgactactcctt

SEQ ID NO: 5973711 - DNA, 25 bp, Homo sapien
aatccattcaattattgagtttgaa

SEQ ID NO: 5973712 - DNA, 25 bp, Homo sapien
aacaaatccattcaattattgagtt

SEQ ID NO: 5973713 - DNA, 25 bp, Homo sapien
aacgtggaattgtttcaaagacaag

SEQ ID NO: 5973714 - DNA, 25 bp, Homo sapien
gcggtcatcaagttagggacaacaa

SEQ ID NO: 5973715 - DNA, 25 bp, Homo sapien
aaattgatatcggactgttctatat

SEQ ID NO: 5973716 - DNA, 25 bp, Homo sapien
aaattatactcactcgaatgaacgc

SEQ ID NO: 5973717 - DNA, 25 bp, Homo sapien
ccaaagatgcaaaagcaaacaattt

SEQ ID NO: 5973718 - DNA, 25 bp, Homo sapien
taaaaaaactagaacaatattgctc

SEQ ID NO: 5973719 - DNA, 25 bp, Homo sapien
ccaacagctgggatattgcaacttc

SEQ ID NO: 5973720 - DNA, 25 bp, Homo sapien
tcacacaacattggacttccctttg

SEQ ID NO: 5973721 - DNA, 25 bp, Homo sapien
ctgtctaattccatttttccaagat

SEQ ID NO: 5973722 - DNA, 25 bp, Homo sapien
ccctaaattatactcactcgaatga

SEQ ID NO: 5973723 - DNA, 25 bp, Homo sapien
caagtatgtgtaatattgtaatagt

SEQ ID NO: 5973724 - DNA, 25 bp, Homo sapien
acagtgagagatatcttctactcca

SEQ ID NO: 5973725 - DNA, 25 bp, Homo sapien
catcatagaatgtcagcgggaaatt

SEQ ID NO: 5973726 - DNA, 25 bp, Homo sapien
aaaatccttaaacattataccagct

SEQ ID NO: 5973727 - DNA, 25 bp, Homo sapien
gctcatattaagcatttcctgtcat

SEQ ID NO: 5973728 - DNA, 25 bp, Homo sapien
aagatgatgcggtcatcaagttagg

SEQ ID NO: 5973729 - DNA, 25 bp, Homo sapien
gtaaataattatcacaagttgagta

SEQ ID NO: 5973730 - DNA, 25 bp, Homo sapien
cccctatgggattagcatagcccta

SEQ ID NO: 5973731 - DNA, 25 bp, Homo sapien
gcttatatttgcacgatggcaaact

SEQ ID NO: 5973732 - DNA, 25 bp, Homo sapien
ccctgtctaattccatttttccaag

SEQ ID NO: 5973733 - DNA, 25 bp, Homo sapien
aagctctctccaagaaaatccttaa

SEQ ID NO: 5973734 - DNA, 25 bp, Homo sapien
cattgatatttatgacaatattctg

SEQ ID NO: 5973735 - DNA, 25 bp, Homo sapien
ggaaaaagaagctgtcttcaccaaa

SEQ ID NO: 5973736 - DNA, 25 bp, Homo sapien
aacaatattgctccaaattgatatc

SEQ ID NO: 5973737 - DNA, 25 bp, Homo sapien
ataaaacaaggcaggaattggtcaa

SEQ ID NO: 5973738 - DNA, 25 bp, Homo sapien
ctttgaatggcccgcatctatgcac

SEQ ID NO: 5973739 - DNA, 25 bp, Homo sapien
ccatttttccaagatgatgcggtca

SEQ ID NO: 5973740 - DNA, 25 bp, Homo sapien
agggacaacaagtatgtgtaatatt

SEQ ID NO: 5973741 - DNA, 25 bp, Homo sapien
attattgagtttgaatcagcgcgac

SEQ ID NO: 5973742 - DNA, 25 bp, Homo sapien
ctcgaatgaacgcaacgcttatatt

SEQ ID NO: 5973743 - DNA, 25 bp, Homo sapien
tgatagcatctctgactgccaacag

SEQ ID NO: 5973744 - DNA, 25 bp, Homo sapien
aaagacaagcaaacgtagtccagtg

SEQ ID NO: 5973745 - DNA, 25 bp, Homo sapien
aagacggtccattcacttgaactcc

SEQ ID NO: 5973746 - DNA, 25 bp, Homo sapien
ccaaaagaaagctgaaatgaacgag

SEQ ID NO: 5973747 - DNA, 25 bp, Homo sapien
taccgatgcggacccctatgggatt

SEQ ID NO: 5973748 - DNA, 25 bp, Homo sapien
tattctgacatgtgaaaatgaacca

SEQ ID NO: 5973749 - DNA, 25 bp, Homo sapien
ataattatcacaagttgagtacaaa

SEQ ID NO: 5973750 - DNA, 25 bp, Homo sapien
gcaacatcaacagcctatttcaatc

SEQ ID NO: 5973751 - DNA, 25 bp, Homo sapien
ctccctgttcaaacgcagatgtttt

SEQ ID NO: 5973752 - DNA, 25 bp, Homo sapien
atattgctccaaattgatatcggac

SEQ ID NO: 5973753 - DNA, 25 bp, Homo sapien
tcacttgaactccaatggtcactcc

SEQ ID NO: 5973754 - DNA, 25 bp, Homo sapien
ttcaagttgaaaagatgcgcaatcc

SEQ ID NO: 5973755 - DNA, 25 bp, Homo sapien
tgggattagcatagccctaaattat

SEQ ID NO: 5973756 - DNA, 25 bp, Homo sapien
tggtcaaagcactcactcctaaaag

SEQ ID NO: 5973757 - DNA, 25 bp, Homo sapien
cctgacattcacacaacattggact

SEQ ID NO: 5973758 - DNA, 25 bp, Homo sapien
atgcgcaatccttttaaacttattg

SEQ ID NO: 5973759 - DNA, 25 bp, Homo sapien
gctgggatattgcaacttcaccatt

SEQ ID NO: 5973760 - DNA, 25 bp, Homo sapien
cttagccaagaatttgatagcatct

SEQ ID NO: 5973761 - DNA, 25 bp, Homo sapien
acgtcatcatagaatgtcagcggga

SEQ ID NO: 5973762 - DNA, 25 bp, Homo sapien
ttccatttttccaagatgatgcggt

SEQ ID NO: 5973763 - DNA, 25 bp, Homo sapien
ttagggacaacaagtatgtgtaata

SEQ ID NO: 5973764 - DNA, 25 bp, Homo sapien
gcagatgttttggctcatattaagc

SEQ ID NO: 5973765 - DNA, 25 bp, Homo sapien
cggactgttctatatttaccgatgc

SEQ ID NO: 5973766 - DNA, 25 bp, Homo sapien
aacagctgggatattgcaacttcac

SEQ ID NO: 5973767 - DNA, 25 bp, Homo sapien
gtaatagtggaaaaagaagctgtct

SEQ ID NO: 5973768 - DNA, 25 bp, Homo sapien
aagggatttccagatttcttgacaa

SEQ ID NO: 5973769 - DNA, 25 bp, Homo sapien
gaattggtcaaagcactcactccta

SEQ ID NO: 5973770 - DNA, 25 bp, Homo sapien
atttttccaagatgatgcggtcatc

SEQ ID NO: 5973771 - DNA, 25 bp, Homo sapien
tgcggacccctatgggattagcata

SEQ ID NO: 5973772 - DNA, 25 bp, Homo sapien
tttattcgcctttccccattgatat

SEQ ID NO: 5973773 - DNA, 25 bp, Homo sapien
cactcatcagttcaagttgaaaaga

SEQ ID NO: 5973774 - DNA, 25 bp, Homo sapien
atttgcacgatggcaaactataaag

SEQ ID NO: 5973775 - DNA, 25 bp, Homo sapien
tggctcatattaagcatttcctgtc

SEQ ID NO: 5973776 - DNA, 25 bp, Homo sapien
aattatcacaagttgagtacaaata

SEQ ID NO: 5973777 - DNA, 25 bp, Homo sapien
ttcgcctttccccattgatatttat

SEQ ID NO: 5973778 - DNA, 25 bp, Homo sapien
aacgcaacgcttatatttgcacgat

SEQ ID NO: 5973779 - DNA, 25 bp, Homo sapien
tagtggaaaaagaagctgtcttcac

SEQ ID NO: 5973780 - DNA, 25 bp, Homo sapien
ctgacatgtgaaaatgaaccaaaga

SEQ ID NO: 5973781 - DNA, 25 bp, Homo sapien
tgatatcggactgttctatatttac

SEQ ID NO: 5973782 - DNA, 25 bp, Homo sapien
ctataaaggaattcgtattacgcaa

SEQ ID NO: 5973783 - DNA, 25 bp, Homo sapien
aaaagaaagctgaaatgaacgagat

SEQ ID NO: 5973784 - DNA, 25 bp, Homo sapien
tgtcagcgggaaatttttttccaaa

SEQ ID NO: 5973785 - DNA, 25 bp, Homo sapien
aacatcaacagcctatttcaatcgt

SEQ ID NO: 5973786 - DNA, 25 bp, Homo sapien
gtcctgacattcacacaacattgga

SEQ ID NO: 5973787 - DNA, 25 bp, Homo sapien
ctatttcaatcgtctttcaaaacaa

SEQ ID NO: 5973788 - DNA, 25 bp, Homo sapien
tccagtggctggacgttatacgctt

SEQ ID NO: 5973789 - DNA, 25 bp, Homo sapien
taccagctcaaaagggtttagttta

SEQ ID NO: 5973790 - DNA, 25 bp, Homo sapien
gctgaaatgaacgagattgatgcca

SEQ ID NO: 5973791 - DNA, 25 bp, Homo sapien
attcattagagcaacatcaacagcc

SEQ ID NO: 5973792 - DNA, 25 bp, Homo sapien
ctggtaagccctgtctaattccatt

SEQ ID NO: 5973793 - DNA, 25 bp, Homo sapien
acggaactccctgttcaaacgcaga

SEQ ID NO: 5973794 - DNA, 25 bp, Homo sapien
atagaatgtcagcgggaaatttttt

SEQ ID NO: 5973795 - DNA, 25 bp, Homo sapien
gcaatccttttaaacttattgaaag

SEQ ID NO: 5973796 - DNA, 25 bp, Homo sapien
ggaaaaaatataaaacaaggcagga

SEQ ID NO: 5973797 - DNA, 25 bp, Homo sapien
cctttccccattgatatttatgaca

SEQ ID NO: 5973798 - DNA, 25 bp, Homo sapien
tgggatattgcaacttcaccattaa

SEQ ID NO: 5973799 - DNA, 25 bp, Homo sapien
cgcaagttttggcacaaaataatga

SEQ ID NO: 5973800 - DNA, 25 bp, Homo sapien
tccaatggtcactccaacggaactc

SEQ ID NO: 5973801 - DNA, 25 bp, Homo sapien
atagcatctctgactgccaacagct

SEQ ID NO: 5973802 - DNA, 25 bp, Homo sapien
aatgtcagcgggaaatttttttcca

SEQ ID NO: 5973803 - DNA, 25 bp, Homo sapien
ataaaggaattcgtattacgcaagt

SEQ ID NO: 5973804 - DNA, 25 bp, Homo sapien
gtggctggacgttatacgctttaat

SEQ ID NO: 5973805 - DNA, 25 bp, Homo sapien
actccaacggaactccctgttcaaa

SEQ ID NO: 5973806 - DNA, 25 bp, Homo sapien
tcctgtcattggcggctaattcatt

SEQ ID NO: 5973807 - DNA, 25 bp, Homo sapien
attacgcaagttttggcacaaaata

SEQ ID NO: 5973808 - DNA, 25 bp, Homo sapien
ggtaaaaacactacagtgagagata

SEQ ID NO: 5973809 - DNA, 25 bp, Homo sapien
acaacattggacttccctttgaatg

SEQ ID NO: 5973810 - DNA, 25 bp, Homo sapien
aagcaaacaattttccctggtaagc

SEQ ID NO: 5973811 - DNA, 25 bp, Homo sapien
aatattctgacatgtgaaaatgaac

SEQ ID NO: 5973812 - DNA, 25 bp, Homo sapien
gacccctatgggattagcatagccc

SEQ ID NO: 5973813 - DNA, 25 bp, Homo sapien
tggcaaactataaaggaattcgtat

SEQ ID NO: 5973814 - DNA, 25 bp, Homo sapien
aatttcaagctctctccaagaaaat

SEQ ID NO: 5973815 - DNA, 25 bp, Homo sapien
ataacaaatccattcaattattgag

SEQ ID NO: 5973816 - DNA, 25 bp, Homo sapien
tgaacgcaacgcttatatttgcacg

SEQ ID NO: 5973817 - DNA, 25 bp, Homo sapien
tgacaatattctgacatgtgaaaat

SEQ ID NO: 5973818 - DNA, 25 bp, Homo sapien
catgctcattacaggtaagggattt

SEQ ID NO: 5973819 - DNA, 25 bp, Homo sapien
ttgatgccagaatttttgaatacaa

SEQ ID NO: 5973820 - DNA, 25 bp, Homo sapien
ttgagtttgaatcagcgcgactact

SEQ ID NO: 5973821 - DNA, 25 bp, Homo sapien
atcttctactccaacgtggaattgt

SEQ ID NO: 5973822 - DNA, 25 bp, Homo sapien
gatggcaaactataaaggaattcgt

SEQ ID NO: 5973823 - DNA, 25 bp, Homo sapien
gctgtcttcaccaaattagtaaata

SEQ ID NO: 5973824 - DNA, 25 bp, Homo sapien
gcataacaaatccattcaattattg

SEQ ID NO: 5973825 - DNA, 25 bp, Homo sapien
agttcaagttgaaaagatgcgcaat

SEQ ID NO: 5973826 - DNA, 25 bp, Homo sapien
ccaacgtggaattgtttcaaagaca

SEQ ID NO: 5973827 - DNA, 25 bp, Homo sapien
tatggaaaaattaccgctaggtaaa

SEQ ID NO: 5973828 - DNA, 25 bp, Homo sapien
gcgcaatccttttaaacttattgaa

SEQ ID NO: 5973829 - DNA, 25 bp, Homo sapien
tactccaacgtggaattgtttcaaa

SEQ ID NO: 5973830 - DNA, 25 bp, Homo sapien
ccaaattgatatcggactgttctat

SEQ ID NO: 5973831 - DNA, 25 bp, Homo sapien
aggcgatacaagcagtcctgacatt

SEQ ID NO: 5973832 - DNA, 25 bp, Homo sapien
ggtaagccctgtctaattccatttt

SEQ ID NO: 5973833 - DNA, 25 bp, Homo sapien
tcactcctaaaagacggtccattca

SEQ ID NO: 5973834 - DNA, 25 bp, Homo sapien
aagaacgtcatcatagaatgtcagc

SEQ ID NO: 5973835 - DNA, 25 bp, Homo sapien
aaaacactacagtgagagatatctt

SEQ ID NO: 5973836 - DNA, 25 bp, Homo sapien
gtctaattccatttttccaagatga

SEQ ID NO: 5973837 - DNA, 25 bp, Homo sapien
aaatgaacgagattgatgccagaat

SEQ ID NO: 5973838 - DNA, 25 bp, Homo sapien
agagatatcttctactccaacgtgg

SEQ ID NO: 5973839 - DNA, 25 bp, Homo sapien
acgcttatatttgcacgatggcaaa

SEQ ID NO: 5973840 - DNA, 25 bp, Homo sapien
gcgactactccttagccaagaattt

SEQ ID NO: 5973841 - DNA, 25 bp, Homo sapien
tatttatgacaatattctgacatgt

SEQ ID NO: 5973842 - DNA, 25 bp, Homo sapien
caacggaactccctgttcaaacgca

SEQ ID NO: 5973843 - DNA, 25 bp, Homo sapien
acaattttccctggtaagccctgtc

SEQ ID NO: 5973844 - DNA, 25 bp, Homo sapien
accatgctcattacaggtaagggat

SEQ ID NO: 5973845 - DNA, 25 bp, Homo sapien
tacgctttaatttcaagctctctcc

SEQ ID NO: 5973846 - DNA, 25 bp, Homo sapien
gattgatgccagaatttttgaatac

SEQ ID NO: 5973847 - DNA, 25 bp, Homo sapien
caatggtcactccaacggaactccc

SEQ ID NO: 5973848 - DNA, 25 bp, Homo sapien
ctggacgttatacgctttaatttca

SEQ ID NO: 5973849 - DNA, 25 bp, Homo sapien
ttggacttccctttgaatggcccgc

SEQ ID NO: 5973850 - DNA, 25 bp, Homo sapien
ctagaacaatattgctccaaattga

SEQ ID NO: 5973851 - DNA, 25 bp, Homo sapien
agaacaatattgctccaaattgata

SEQ ID NO: 5973852 - DNA, 25 bp, Homo sapien
cattataccagctcaaaagggttta

SEQ ID NO: 5973853 - DNA, 25 bp, Homo sapien
gagtacaaataccatgctcattaca

SEQ ID NO: 5973854 - DNA, 25 bp, Homo sapien
attaaagaacgtcatcatagaatgt

SEQ ID NO: 5973855 - DNA, 25 bp, Homo sapien
tctgactgccaacagctgggatatt

SEQ ID NO: 5973856 - DNA, 25 bp, Homo sapien
caagttgagtacaaataccatgctc

SEQ ID NO: 5973857 - DNA, 25 bp, Homo sapien
ttgaactccaatggtcactccaacg

SEQ ID NO: 5973858 - DNA, 25 bp, Homo sapien
aaaaaggcgatacaagcagtcctga

SEQ ID NO: 5973859 - DNA, 25 bp, Homo sapien
atgaacgagattgatgccagaattt

SEQ ID NO: 5973860 - DNA, 25 bp, Homo sapien
ttgatatttatgacaatattctgac

SEQ ID NO: 5973861 - DNA, 25 bp, Homo sapien
ttccaaaagaaagctgaaatgaacg

SEQ ID NO: 5973862 - DNA, 25 bp, Homo sapien
cattcaattattgagtttgaatcag

SEQ ID NO: 5973863 - DNA, 25 bp, Homo sapien
acaaataccatgctcattacaggta

SEQ ID NO: 5973864 - DNA, 25 bp, Homo sapien
gttttggctcatattaagcatttcc

SEQ ID NO: 5973865 - DNA, 25 bp, Homo sapien
aaaggcgatacaagcagtcctgaca

SEQ ID NO: 5973866 - DNA, 25 bp, Homo sapien
attagagcaacatcaacagcctatt

SEQ ID NO: 5973867 - DNA, 25 bp, Homo sapien
tgactgccaacagctgggatattgc

SEQ ID NO: 5973868 - DNA, 25 bp, Homo sapien
caagcagtcctgacattcacacaac

SEQ ID NO: 5973869 - DNA, 25 bp, Homo sapien
cttaaacattataccagctcaaaag

SEQ ID NO: 5973870 - DNA, 25 bp, Homo sapien
gaacgagattgatgccagaattttt

SEQ ID NO: 5973871 - DNA, 25 bp, Homo sapien
atgcaaaagcaaacaattttccctg

SEQ ID NO: 5973872 - DNA, 25 bp, Homo sapien
tgctccaaattgatatcggactgtt

SEQ ID NO: 5973873 - DNA, 25 bp, Homo sapien
tttggctcatattaagcatttcctg

SEQ ID NO: 5973874 - DNA, 25 bp, Homo sapien
ttgaatggcccgcatctatgcactc

SEQ ID NO: 5973875 - DNA, 25 bp, Homo sapien
agcatctctgactgccaacagctgg

SEQ ID NO: 5973876 - DNA, 25 bp, Homo sapien
ttgaaaagatgcgcaatccttttaa

SEQ ID NO: 5973877 - DNA, 25 bp, Homo sapien
gagcaacatcaacagcctatttcaa

SEQ ID NO: 5973878 - DNA, 25 bp, Homo sapien
actgccaacagctgggatattgcaa

SEQ ID NO: 5973879 - DNA, 25 bp, Homo sapien
agaatttgatagcatctctgactgc

SEQ ID NO: 5973880 - DNA, 25 bp, Homo sapien
caagttagggacaacaagtatgtgt

SEQ ID NO: 5973881 - DNA, 25 bp, Homo sapien
taattcattagagcaacatcaacag

SEQ ID NO: 5973882 - DNA, 25 bp, Homo sapien
gtcaaagcactcactcctaaaagac

SEQ ID NO: 5973883 - DNA, 25 bp, Homo sapien
aaataccatgctcattacaggtaag

SEQ ID NO: 5973884 - DNA, 25 bp, Homo sapien
ttggcggctaattcattagagcaac

SEQ ID NO: 5973885 - DNA, 25 bp, Homo sapien
ctaaattatactcactcgaatgaac

SEQ ID NO: 5973886 - DNA, 25 bp, Homo sapien
caaagcactcactcctaaaagacgg

SEQ ID NO: 5973887 - DNA, 25 bp, Homo sapien
ctgtcattggcggctaattcattag

SEQ ID NO: 5973888 - DNA, 25 bp, Homo sapien
tatttaccgatgcggacccctatgg

SEQ ID NO: 5973889 - DNA, 25 bp, Homo sapien
aagaaagctgaaatgaacgagattg

SEQ ID NO: 5973890 - DNA, 25 bp, Homo sapien
tttaccgatgcggacccctatggga

SEQ ID NO: 5973891 - DNA, 25 bp, Homo sapien
ccattaaagaacgtcatcatagaat

SEQ ID NO: 5973892 - DNA, 25 bp, Homo sapien
agatgcgcaatccttttaaacttat

SEQ ID NO: 5973893 - DNA, 25 bp, Homo sapien
ttttccaagatgatgcggtcatcaa

SEQ ID NO: 5973894 - DNA, 25 bp, Homo sapien
atggcccgcatctatgcactcatca

SEQ ID NO: 5973895 - DNA, 25 bp, Homo sapien
tctatgcactcatcagttcaagttg

SEQ ID NO: 5973896 - DNA, 25 bp, Homo sapien
tcaaagacaagcaaacgtagtccag

SEQ ID NO: 5973897 - DNA, 25 bp, Homo sapien
tagagcaacatcaacagcctatttc

SEQ ID NO: 5973898 - DNA, 25 bp, Homo sapien
catttcctgtcattggcggctaatt

SEQ ID NO: 5973899 - DNA, 25 bp, Homo sapien
gggatttccagatttcttgacaagg

SEQ ID NO: 5973900 - DNA, 25 bp, Homo sapien
aattttccctggtaagccctgtcta

SEQ ID NO: 5973901 - DNA, 25 bp, Homo sapien
caagaatttgatagcatctctgact

SEQ ID NO: 5973902 - DNA, 25 bp, Homo sapien
aaccaaagatgcaaaagcaaacaat

SEQ ID NO: 5973903 - DNA, 25 bp, Homo sapien
acgtagtccagtggctggacgttat

SEQ ID NO: 5973904 - DNA, 25 bp, Homo sapien
tggaattgtttcaaagacaagcaaa

SEQ ID NO: 5973905 - DNA, 25 bp, Homo sapien
aagctgaaatgaacgagattgatgc

SEQ ID NO: 5973906 - DNA, 25 bp, Homo sapien
ttggcacaaaataatgaagtgcata

SEQ ID NO: 5973907 - DNA, 25 bp, Homo sapien
aacttattgaaagtcgttatggaaa

SEQ ID NO: 5973908 - DNA, 25 bp, Homo sapien
cagtcctgacattcacacaacattg

SEQ ID NO: 5973909 - DNA, 25 bp, Homo sapien
tacaagcagtcctgacattcacaca

SEQ ID NO: 5973910 - DNA, 25 bp, Homo sapien
caaaataatgaagtgcataacaaat

SEQ ID NO: 5973911 - DNA, 25 bp, Homo sapien
atattaagcatttcctgtcattggc

SEQ ID NO: 5973912 - DNA, 25 bp, Homo sapien
tttccagatttcttgacaaggttat

SEQ ID NO: 5973913 - DNA, 25 bp, Homo sapien
ctacagtgagagatatcttctactc

SEQ ID NO: 5973914 - DNA, 25 bp, Homo sapien
gctctctccaagaaaatccttaaac

SEQ ID NO: 5973915 - DNA, 25 bp, Homo sapien
atggctttggagggattgcggaaaa

SEQ ID NO: 5973916 - DNA, 25 bp, Homo sapien
taccgctaggtaaaaacactacagt

SEQ ID NO: 5973917 - DNA, 25 bp, Homo sapien
atatcttctactccaacgtggaatt

SEQ ID NO: 5973918 - DNA, 25 bp, Homo sapien
gtattacgcaagttttggcacaaaa

SEQ ID NO: 5973919 - DNA, 25 bp, Homo sapien
tcagttcaagttgaaaagatgcgca

SEQ ID NO: 5973920 - DNA, 25 bp, Homo sapien
actcctaaaagacggtccattcact

SEQ ID NO: 5973921 - DNA, 25 bp, Homo sapien
aaaagacggtccattcacttgaact

SEQ ID NO: 5973922 - DNA, 25 bp, Homo sapien
tatgcactcatcagttcaagttgaa

SEQ ID NO: 5973923 - DNA, 25 bp, Homo sapien
cactcgaatgaacgcaacgcttata

SEQ ID NO: 5973924 - DNA, 25 bp, Homo sapien
tttaaacttattgaaagtcgttatg

SEQ ID NO: 5973925 - DNA, 25 bp, Homo sapien
cacaagttgagtacaaataccatgc

SEQ ID NO: 5973926 - DNA, 25 bp, Homo sapien
ttagtttattcgcctttccccattg

SEQ ID NO: 5973927 - DNA, 25 bp, Homo sapien
ttttccaaaagaaagctgaaatgaa

SEQ ID NO: 5973928 - DNA, 25 bp, Homo sapien
gaaagctgaaatgaacgagattgat

SEQ ID NO: 5973929 - DNA, 25 bp, Homo sapien
ggcacaaaataatgaagtgcataac

SEQ ID NO: 5973930 - DNA, 25 bp, Homo sapien
tacgcaagttttggcacaaaataat

SEQ ID NO: 5973931 - DNA, 25 bp, Homo sapien
ggatattgcaacttcaccattaaag

SEQ ID NO: 5973932 - DNA, 25 bp, Homo sapien
atgttttggctcatattaagcattt

SEQ ID NO: 5973933 - DNA, 25 bp, Homo sapien
ggtcactccaacggaactccctgtt

SEQ ID NO: 5973934 - DNA, 25 bp, Homo sapien
taaacttattgaaagtcgttatgga

SEQ ID NO: 5973935 - DNA, 25 bp, Homo sapien
acacaacattggacttccctttgaa

SEQ ID NO: 5973936 - DNA, 25 bp, Homo sapien
cattggacttccctttgaatggccc

SEQ ID NO: 5973937 - DNA, 25 bp, Homo sapien
gtaagggatttccagatttcttgac

SEQ ID NO: 5973938 - DNA, 25 bp, Homo sapien
cgcaacgcttatatttgcacgatgg

SEQ ID NO: 5973939 - DNA, 25 bp, Homo sapien
aatagtggaaaaagaagctgtcttc

SEQ ID NO: 5973940 - DNA, 25 bp, Homo sapien
gactgttctatatttaccgatgcgg

SEQ ID NO: 5973941 - DNA, 25 bp, Homo sapien
gcgatacaagcagtcctgacattca

SEQ ID NO: 5973942 - DNA, 25 bp, Homo sapien
tctactccaacgtggaattgtttca

SEQ ID NO: 5973943 - DNA, 25 bp, Homo sapien
gatacaagcagtcctgacattcaca

SEQ ID NO: 5973944 - DNA, 25 bp, Homo sapien
aggaattggtcaaagcactcactcc

SEQ ID NO: 5973945 - DNA, 25 bp, Homo sapien
ggtcatcaagttagggacaacaagt

SEQ ID NO: 5973946 - DNA, 25 bp, Homo sapien
tttcaaagacaagcaaacgtagtcc

SEQ ID NO: 5973947 - DNA, 25 bp, Homo sapien
tccagatttcttgacaaggttattc

SEQ ID NO: 5973948 - DNA, 25 bp, Homo sapien
cagcctatttcaatcgtctttcaaa

SEQ ID NO: 5973949 - DNA, 25 bp, Homo sapien
aatgaagtgcataacaaatccattc

SEQ ID NO: 5973950 - DNA, 25 bp, Homo sapien
cgaatgaacgcaacgcttatatttg

SEQ ID NO: 5973951 - DNA, 25 bp, Homo sapien
aaagaagctgtcttcaccaaattag

SEQ ID NO: 5973952 - DNA, 25 bp, Homo sapien
agatgcaaaagcaaacaattttccc

SEQ ID NO: 5973953 - DNA, 25 bp, Homo sapien
tgatgcggtcatcaagttagggaca

SEQ ID NO: 5973954 - DNA, 25 bp, Homo sapien
tgtttcaaagacaagcaaacgtagt

SEQ ID NO: 5973955 - DNA, 25 bp, Homo sapien
ttataccagctcaaaagggtttagt

SEQ ID NO: 5973956 - DNA, 25 bp, Homo sapien
cctatgggattagcatagccctaaa

SEQ ID NO: 5973957 - DNA, 25 bp, Homo sapien
tccaacggaactccctgttcaaacg

SEQ ID NO: 5973958 - DNA, 25 bp, Homo sapien
tcaacagcctatttcaatcgtcttt

SEQ ID NO: 5973959 - DNA, 25 bp, Homo sapien
aaaactagaacaatattgctccaaa

SEQ ID NO: 5973960 - DNA, 25 bp, Homo sapien
tctatatttaccgatgcggacccct

SEQ ID NO: 5973961 - DNA, 25 bp, Homo sapien
tgccaacagctgggatattgcaact

SEQ ID NO: 5973962 - DNA, 25 bp, Homo sapien
agttttggcacaaaataatgaagtg

SEQ ID NO: 5973963 - DNA, 25 bp, Homo sapien
gatgatgcggtcatcaagttaggga

SEQ ID NO: 5973964 - DNA, 25 bp, Homo sapien
gcctatttcaatcgtctttcaaaac

SEQ ID NO: 5973965 - DNA, 25 bp, Homo sapien
gaatggcccgcatctatgcactcat

SEQ ID NO: 5973966 - DNA, 25 bp, Homo sapien
gctaattcattagagcaacatcaac

SEQ ID NO: 5973967 - DNA, 25 bp, Homo sapien
attagtaaataattatcacaagttg

SEQ ID NO: 5973968 - DNA, 25 bp, Homo sapien
cagctcaaaagggtttagtttattc

SEQ ID NO: 5973969 - DNA, 25 bp, Homo sapien
ccaagatgatgcggtcatcaagtta

SEQ ID NO: 5973970 - DNA, 25 bp, Homo sapien
cagatttcttgacaaggttattcct

SEQ ID NO: 5973971 - DNA, 25 bp, Homo sapien
caagttgaaaagatgcgcaatcctt

SEQ ID NO: 5973972 - DNA, 25 bp, Homo sapien
agtccagtggctggacgttatacgc

SEQ ID NO: 5973973 - DNA, 25 bp, Homo sapien
tgacattcacacaacattggacttc

SEQ ID NO: 5973974 - DNA, 25 bp, Homo sapien
caccattaaagaacgtcatcataga

SEQ ID NO: 5973975 - DNA, 25 bp, Homo sapien
attagcatagccctaaattatactc

SEQ ID NO: 5973976 - DNA, 25 bp, Homo sapien
aagcaaacgtagtccagtggctgga

SEQ ID NO: 5973977 - DNA, 25 bp, Homo sapien
attgctccaaattgatatcggactg

SEQ ID NO: 5973978 - DNA, 25 bp, Homo sapien
tagcatagccctaaattatactcac

SEQ ID NO: 5973979 - DNA, 25 bp, Homo sapien
acgttatacgctttaatttcaagct

SEQ ID NO: 5973980 - DNA, 25 bp, Homo sapien
tcattagagcaacatcaacagccta

SEQ ID NO: 5973981 - DNA, 25 bp, Homo sapien
gtgcataacaaatccattcaattat

SEQ ID NO: 5973982 - DNA, 25 bp, Homo sapien
cgctttaatttcaagctctctccaa

SEQ ID NO: 5973983 - DNA, 25 bp, Homo sapien
tccaagaaaatccttaaacattata

SEQ ID NO: 5973984 - DNA, 25 bp, Homo sapien
agaatgtcagcgggaaatttttttc

SEQ ID NO: 5973985 - DNA, 25 bp, Homo sapien
tcatagaatgtcagcgggaaatttt

SEQ ID NO: 5973986 - DNA, 25 bp, Homo sapien
atattgcaacttcaccattaaagaa

SEQ ID NO: 5973987 - DNA, 25 bp, Homo sapien
gctcaaaagggtttagtttattcgc

SEQ ID NO: 5973988 - DNA, 25 bp, Homo sapien
agaaaatccttaaacattataccag

SEQ ID NO: 5973989 - DNA, 25 bp, Homo sapien
tctccaagaaaatccttaaacatta

SEQ ID NO: 5973990 - DNA, 25 bp, Homo sapien
gcgcgactactccttagccaagaat

SEQ ID NO: 5973991 - DNA, 25 bp, Homo sapien
caaatccattcaattattgagtttg

SEQ ID NO: 5973992 - DNA, 25 bp, Homo sapien
acttgaactccaatggtcactccaa

SEQ ID NO: 5973993 - DNA, 25 bp, Homo sapien
attaagcatttcctgtcattggcgg

SEQ ID NO: 5973994 - DNA, 25 bp, Homo sapien
caaggcaggaattggtcaaagcact

SEQ ID NO: 5973995 - DNA, 25 bp, Homo sapien
tactcactcgaatgaacgcaacgct

SEQ ID NO: 5973996 - DNA, 25 bp, Homo sapien
aatccttaaacattataccagctca

SEQ ID NO: 5973997 - DNA, 25 bp, Homo sapien
agccctaaattatactcactcgaat

SEQ ID NO: 5973998 - DNA, 25 bp, Homo sapien
aaagatgcaaaagcaaacaattttc

SEQ ID NO: 5973999 - DNA, 25 bp, Homo sapien
ttcaccattaaagaacgtcatcata

SEQ ID NO: 5974000 - DNA, 25 bp, Homo sapien
aactataaaggaattcgtattacgc

SEQ ID NO: 5974001 - DNA, 25 bp, Homo sapien
caacgcttatatttgcacgatggca

SEQ ID NO: 5974002 - DNA, 25 bp, Homo sapien
aaaatgaaccaaagatgcaaaagca

SEQ ID NO: 5974003 - DNA, 25 bp, Homo sapien
tcgttatggaaaaattaccgctagg

SEQ ID NO: 5974004 - DNA, 25 bp, Homo sapien
gagtttgaatcagcgcgactactcc

SEQ ID NO: 5974005 - DNA, 25 bp, Homo sapien
ttgaatcagcgcgactactccttag

SEQ ID NO: 5974006 - DNA, 25 bp, Homo sapien
ttaatttcaagctctctccaagaaa

SEQ ID NO: 5974007 - DNA, 25 bp, Homo sapien
gaatcagcgcgactactccttagcc

SEQ ID NO: 5974008 - DNA, 25 bp, Homo sapien
tatactcactcgaatgaacgcaacg

SEQ ID NO: 5974009 - DNA, 25 bp, Homo sapien
caatattgctccaaattgatatcgg

SEQ ID NO: 5974010 - DNA, 25 bp, Homo sapien
aagcactcactcctaaaagacggtc

SEQ ID NO: 5974011 - DNA, 25 bp, Homo sapien
aactccctgttcaaacgcagatgtt

SEQ ID NO: 5974012 - DNA, 25 bp, Homo sapien
aggtaagggatttccagatttcttg

SEQ ID NO: 5974013 - DNA, 25 bp, Homo sapien
ttgaaagtcgttatggaaaaattac

SEQ ID NO: 5974014 - DNA, 25 bp, Homo sapien
attgcaacttcaccattaaagaacg

SEQ ID NO: 5974015 - DNA, 25 bp, Homo sapien
aagtgcataacaaatccattcaatt

SEQ ID NO: 5974016 - DNA, 25 bp, Homo sapien
catgtgaaaatgaaccaaagatgca

SEQ ID NO: 5974017 - DNA, 25 bp, Homo sapien
gagattgatgccagaatttttgaat

SEQ ID NO: 5974018 - DNA, 25 bp, Homo sapien
gaacgtcatcatagaatgtcagcgg

SEQ ID NO: 5974019 - DNA, 25 bp, Homo sapien
gatgccagaatttttgaatacaaat

SEQ ID NO: 5974020 - DNA, 25 bp, Homo sapien
tcaagctctctccaagaaaatcctt

SEQ ID NO: 5974021 - DNA, 25 bp, Homo sapien
aaaacaaggcaggaattggtcaaag

SEQ ID NO: 5974022 - DNA, 25 bp, Homo sapien
tcactccaacggaactccctgttca

SEQ ID NO: 5974023 - DNA, 25 bp, Homo sapien
tattgagtttgaatcagcgcgacta

SEQ ID NO: 5974024 - DNA, 25 bp, Homo sapien
gttatggaaaaattaccgctaggta

SEQ ID NO: 5974025 - DNA, 25 bp, Homo sapien
tattcgcctttccccattgatattt

SEQ ID NO: 5974026 - DNA, 25 bp, Homo sapien
attcgtattacgcaagttttggcac

SEQ ID NO: 5974027 - DNA, 25 bp, Homo sapien
tgctcattacaggtaagggatttcc

SEQ ID NO: 5974028 - DNA, 25 bp, Homo sapien
cgtggaattgtttcaaagacaagca

SEQ ID NO: 5974029 - DNA, 25 bp, Homo sapien
atagccctaaattatactcactcga

SEQ ID NO: 5974030 - DNA, 25 bp, Homo sapien
acattcacacaacattggacttccc

SEQ ID NO: 5974031 - DNA, 25 bp, Homo sapien
tttcaagctctctccaagaaaatcc

SEQ ID NO: 5974032 - DNA, 25 bp, Homo sapien
agttagggacaacaagtatgtgtaa

SEQ ID NO: 5974033 - DNA, 25 bp, Homo sapien
gccaagaatttgatagcatctctga

SEQ ID NO: 5974034 - DNA, 25 bp, Homo sapien
actcactcctaaaagacggtccatt

SEQ ID NO: 5974035 - DNA, 25 bp, Homo sapien
attaccgctaggtaaaaacactaca

SEQ ID NO: 5974036 - DNA, 25 bp, Homo sapien
aagctgtcttcaccaaattagtaaa

SEQ ID NO: 5974037 - DNA, 25 bp, Homo sapien
gaattcgtattacgcaagttttggc

SEQ ID NO: 5974038 - DNA, 25 bp, Homo sapien
gttcaaacgcagatgttttggctca

SEQ ID NO: 5974039 - DNA, 25 bp, Homo sapien
agccctgtctaattccatttttcca

SEQ ID NO: 5974040 - DNA, 25 bp, Homo sapien
ttttggcacaaaataatgaagtgca

SEQ ID NO: 5974041 - DNA, 25 bp, Homo sapien
aaataatgaagtgcataacaaatcc

SEQ ID NO: 5974042 - DNA, 25 bp, Homo sapien
cggacccctatgggattagcatagc

SEQ ID NO: 5974043 - DNA, 25 bp, Homo sapien
ttatcacaagttgagtacaaatacc

SEQ ID NO: 5974044 - DNA, 25 bp, Homo sapien
tcaaacgcagatgttttggctcata

SEQ ID NO: 5974045 - DNA, 25 bp, Homo sapien
agatgttttggctcatattaagcat

SEQ ID NO: 5974046 - DNA, 25 bp, Homo sapien
atgcggtcatcaagttagggacaac

SEQ ID NO: 5974047 - DNA, 25 bp, Homo sapien
agatatcttctactccaacgtggaa

SEQ ID NO: 5974048 - DNA, 25 bp, Homo sapien
ttgtaatagtggaaaaagaagctgt

SEQ ID NO: 5974049 - DNA, 25 bp, Homo sapien
agtttattcgcctttccccattgat

SEQ ID NO: 5974050 - DNA, 25 bp, Homo sapien
aatgaacgcaacgcttatatttgca

SEQ ID NO: 5974051 - DNA, 25 bp, Homo sapien
atcagcgcgactactccttagccaa

SEQ ID NO: 5974052 - DNA, 25 bp, Homo sapien
aaaaaaaggcgatacaagcagtcct

SEQ ID NO: 5974053 - DNA, 25 bp, Homo sapien
ttgagtacaaataccatgctcatta

SEQ ID NO: 5974054 - DNA, 25 bp, Homo sapien
attgatatcggactgttctatattt

SEQ ID NO: 5974055 - DNA, 25 bp, Homo sapien
ttcaatcgtctttcaaaacaaaaaa

SEQ ID NO: 5974056 - DNA, 25 bp, Homo sapien
cggctaattcattagagcaacatca

SEQ ID NO: 5974057 - DNA, 25 bp, Homo sapien
gcaggaattggtcaaagcactcact

SEQ ID NO: 5974058 - DNA, 25 bp, Homo sapien
gtagtccagtggctggacgttatac

SEQ ID NO: 5974059 - DNA, 25 bp, Homo sapien
gaactccaatggtcactccaacgga

SEQ ID NO: 5974060 - DNA, 25 bp, Homo sapien
attatactcactcgaatgaacgcaa

SEQ ID NO: 5974061 - DNA, 25 bp, Homo sapien
aggaattcgtattacgcaagttttg

SEQ ID NO: 5974062 - DNA, 25 bp, Homo sapien
gaaaagatgcgcaatccttttaaac

SEQ ID NO: 5974063 - DNA, 25 bp, Homo sapien
aaaaaaaaaggcgatacaagcagtc

SEQ ID NO: 5974064 - DNA, 25 bp, Homo sapien
cttattgaaagtcgttatggaaaaa

SEQ ID NO: 5974065 - DNA, 25 bp, Homo sapien
acaacaagtatgtgtaatattgtaa

SEQ ID NO: 5974066 - DNA, 25 bp, Homo sapien
tcatcaagttagggacaacaagtat

SEQ ID NO: 5974067 - DNA, 25 bp, Homo sapien
ttccctggtaagccctgtctaattc

SEQ ID NO: 5974068 - DNA, 25 bp, Homo sapien
cccgcatctatgcactcatcagttc

SEQ ID NO: 5974069 - DNA, 25 bp, Homo sapien
gtcatcatagaatgtcagcgggaaa

SEQ ID NO: 5974070 - DNA, 25 bp, Homo sapien
ttggagtgaccattggagttcaagt

SEQ ID NO: 5974071 - DNA, 25 bp, Homo sapien
aatgaattagccgccaatgacagga

SEQ ID NO: 5974072 - DNA, 25 bp, Homo sapien
atgctatcaaattcttggctaagga

SEQ ID NO: 5974073 - DNA, 25 bp, Homo sapien
agaacagtccgatatcaatttggag

SEQ ID NO: 5974074 - DNA, 25 bp, Homo sapien
cttacctgtaatgagcatggtattt

SEQ ID NO: 5974075 - DNA, 25 bp, Homo sapien
tgagctggtataatgtttaaggatt

SEQ ID NO: 5974076 - DNA, 25 bp, Homo sapien
acaatattacacatacttgttgtcc

SEQ ID NO: 5974077 - DNA, 25 bp, Homo sapien
tccactattacaatattacacatac

SEQ ID NO: 5974078 - DNA, 25 bp, Homo sapien
ttgaactgatgagtgcatagatgcg

SEQ ID NO: 5974079 - DNA, 25 bp, Homo sapien
aagcgtataacgtccagccactgga

SEQ ID NO: 5974080 - DNA, 25 bp, Homo sapien
gttcattcgagtgagtataatttag

SEQ ID NO: 5974081 - DNA, 25 bp, Homo sapien
tctgcgtttgaacagggagttccgt

SEQ ID NO: 5974082 - DNA, 25 bp, Homo sapien
gcttaatatgagccaaaacatctgc

SEQ ID NO: 5974083 - DNA, 25 bp, Homo sapien
tggaccgtcttttaggagtgagtgc

SEQ ID NO: 5974084 - DNA, 25 bp, Homo sapien
gtcgcgctgattcaaactcaataat

SEQ ID NO: 5974085 - DNA, 25 bp, Homo sapien
ggagagagcttgaaattaaagcgta

SEQ ID NO: 5974086 - DNA, 25 bp, Homo sapien
ttaaaaggattgcgcatcttttcaa

SEQ ID NO: 5974087 - DNA, 25 bp, Homo sapien
gttccgttggagtgaccattggagt

SEQ ID NO: 5974088 - DNA, 25 bp, Homo sapien
atattgtcataaatatcaatgggga

SEQ ID NO: 5974089 - DNA, 25 bp, Homo sapien
caagtgaatggaccgtcttttagga

SEQ ID NO: 5974090 - DNA, 25 bp, Homo sapien
ttagccgccaatgacaggaaatgct

SEQ ID NO: 5974091 - DNA, 25 bp, Homo sapien
taatgtttaaggattttcttggaga

SEQ ID NO: 5974092 - DNA, 25 bp, Homo sapien
tttggagcaatattgttctagtttt

SEQ ID NO: 5974093 - DNA, 25 bp, Homo sapien
cgcatcatcttggaaaaatggaatt

SEQ ID NO: 5974094 - DNA, 25 bp, Homo sapien
agttcaagtgaatggaccgtctttt

SEQ ID NO: 5974095 - DNA, 25 bp, Homo sapien
atctcgttcatttcagctttctttt

SEQ ID NO: 5974096 - DNA, 25 bp, Homo sapien
tcactgtagtgtttttacctagcgg

SEQ ID NO: 5974097 - DNA, 25 bp, Homo sapien
gtataatttagggctatgctaatcc

SEQ ID NO: 5974098 - DNA, 25 bp, Homo sapien
atgacgttctttaatggtgaagttg

SEQ ID NO: 5974099 - DNA, 25 bp, Homo sapien
gggagttccgttggagtgaccattg

SEQ ID NO: 5974100 - DNA, 25 bp, Homo sapien
tttactaatttggtgaagacagctt

SEQ ID NO: 5974101 - DNA, 25 bp, Homo sapien
tttgcttgtctttgaaacaattcca

SEQ ID NO: 5974102 - DNA, 25 bp, Homo sapien
tccgttggagtgaccattggagttc

SEQ ID NO: 5974103 - DNA, 25 bp, Homo sapien
ctgattcaaactcaataattgaatg

SEQ ID NO: 5974104 - DNA, 25 bp, Homo sapien
tttcttggagagagcttgaaattaa

SEQ ID NO: 5974105 - DNA, 25 bp, Homo sapien
tatgagccaaaacatctgcgtttga

SEQ ID NO: 5974106 - DNA, 25 bp, Homo sapien
tcccgctgacattctatgatgacgt

SEQ ID NO: 5974107 - DNA, 25 bp, Homo sapien
acttgcgtaatacgaattcctttat

SEQ ID NO: 5974108 - DNA, 25 bp, Homo sapien
ttgatgaccgcatcatcttggaaaa

SEQ ID NO: 5974109 - DNA, 25 bp, Homo sapien
caagaaatctggaaatcccttacct

SEQ ID NO: 5974110 - DNA, 25 bp, Homo sapien
tgatgacgttctttaatggtgaagt

SEQ ID NO: 5974111 - DNA, 25 bp, Homo sapien
aatttttccataacgactttcaata

SEQ ID NO: 5974112 - DNA, 25 bp, Homo sapien
taatacgaattcctttatagtttgc

SEQ ID NO: 5974113 - DNA, 25 bp, Homo sapien
cctagcggtaatttttccataacga

SEQ ID NO: 5974114 - DNA, 25 bp, Homo sapien
gaactgatgagtgcatagatgcggg

SEQ ID NO: 5974115 - DNA, 25 bp, Homo sapien
tggaaaaatggaattagacagggct

SEQ ID NO: 5974116 - DNA, 25 bp, Homo sapien
gacaggaaatgcttaatatgagcca

SEQ ID NO: 5974117 - DNA, 25 bp, Homo sapien
cttgtctttgaaacaattccacgtt

SEQ ID NO: 5974118 - DNA, 25 bp, Homo sapien
ctcgttcatttcagctttcttttgg

SEQ ID NO: 5974119 - DNA, 25 bp, Homo sapien
aatatgagccaaaacatctgcgttt

SEQ ID NO: 5974120 - DNA, 25 bp, Homo sapien
gagttccgttggagtgaccattgga

SEQ ID NO: 5974121 - DNA, 25 bp, Homo sapien
ataagtttaaaaggattgcgcatct

SEQ ID NO: 5974122 - DNA, 25 bp, Homo sapien
caaatataagcgttgcgttcattcg

SEQ ID NO: 5974123 - DNA, 25 bp, Homo sapien
tctctcactgtagtgtttttaccta

SEQ ID NO: 5974124 - DNA, 25 bp, Homo sapien
tcgagtgagtataatttagggctat

SEQ ID NO: 5974125 - DNA, 25 bp, Homo sapien
tcaaaaattctggcatcaatctcgt

SEQ ID NO: 5974126 - DNA, 25 bp, Homo sapien
agccaaaacatctgcgtttgaacag

SEQ ID NO: 5974127 - DNA, 25 bp, Homo sapien
gtgcatagatgcgggccattcaaag

SEQ ID NO: 5974128 - DNA, 25 bp, Homo sapien
acttgatgaccgcatcatcttggaa

SEQ ID NO: 5974129 - DNA, 25 bp, Homo sapien
aaaaaatttcccgctgacattctat

SEQ ID NO: 5974130 - DNA, 25 bp, Homo sapien
agctggtataatgtttaaggatttt

SEQ ID NO: 5974131 - DNA, 25 bp, Homo sapien
cttggaaaaatggaattagacaggg

SEQ ID NO: 5974132 - DNA, 25 bp, Homo sapien
taaacccttttgagctggtataatg

SEQ ID NO: 5974133 - DNA, 25 bp, Homo sapien
tatttactaatttggtgaagacagc

SEQ ID NO: 5974134 - DNA, 25 bp, Homo sapien
taaactaaacccttttgagctggta

SEQ ID NO: 5974135 - DNA, 25 bp, Homo sapien
aaaaggattgcgcatcttttcaact

SEQ ID NO: 5974136 - DNA, 25 bp, Homo sapien
agacgattgaaataggctgttgatg

SEQ ID NO: 5974137 - DNA, 25 bp, Homo sapien
ctttgaccaattcctgccttgtttt

SEQ ID NO: 5974138 - DNA, 25 bp, Homo sapien
agtgctttgaccaattcctgccttg

SEQ ID NO: 5974139 - DNA, 25 bp, Homo sapien
ggagtagtcgcgctgattcaaactc

SEQ ID NO: 5974140 - DNA, 25 bp, Homo sapien
acttgaactgatgagtgcatagatg

SEQ ID NO: 5974141 - DNA, 25 bp, Homo sapien
agacagcttctttttccactattac

SEQ ID NO: 5974142 - DNA, 25 bp, Homo sapien
caacttgaactgatgagtgcataga

SEQ ID NO: 5974143 - DNA, 25 bp, Homo sapien
tttaggagtgagtgctttgaccaat

SEQ ID NO: 5974144 - DNA, 25 bp, Homo sapien
cccttttgagctggtataatgttta

SEQ ID NO: 5974145 - DNA, 25 bp, Homo sapien
ccgtcttttaggagtgagtgctttg

SEQ ID NO: 5974146 - DNA, 25 bp, Homo sapien
gagcaatattgttctagttttttta

SEQ ID NO: 5974147 - DNA, 25 bp, Homo sapien
gaattcctttatagtttgccatcgt

SEQ ID NO: 5974148 - DNA, 25 bp, Homo sapien
ttcaaagggaagtccaatgttgtgt

SEQ ID NO: 5974149 - DNA, 25 bp, Homo sapien
ctttcaataagtttaaaaggattgc

SEQ ID NO: 5974150 - DNA, 25 bp, Homo sapien
tattttgtgccaaaacttgcgtaat

SEQ ID NO: 5974151 - DNA, 25 bp, Homo sapien
tatattttttccgcaatccctccaa

SEQ ID NO: 5974152 - DNA, 25 bp, Homo sapien
acgaattcctttatagtttgccatc

SEQ ID NO: 5974153 - DNA, 25 bp, Homo sapien
cattggagttcaagtgaatggaccg

SEQ ID NO: 5974154 - DNA, 25 bp, Homo sapien
atttgttatgcacttcattattttg

SEQ ID NO: 5974155 - DNA, 25 bp, Homo sapien
gttgatgttgctctaatgaattagc

SEQ ID NO: 5974156 - DNA, 25 bp, Homo sapien
atgcttaatatgagccaaaacatct

SEQ ID NO: 5974157 - DNA, 25 bp, Homo sapien
tttgaacagggagttccgttggagt

SEQ ID NO: 5974158 - DNA, 25 bp, Homo sapien
agtttgccatcgtgcaaatataagc

SEQ ID NO: 5974159 - DNA, 25 bp, Homo sapien
cgttgcgttcattcgagtgagtata

SEQ ID NO: 5974160 - DNA, 25 bp, Homo sapien
tgaccattggagttcaagtgaatgg

SEQ ID NO: 5974161 - DNA, 25 bp, Homo sapien
gttttgaaagacgattgaaataggc

SEQ ID NO: 5974162 - DNA, 25 bp, Homo sapien
ttatagtttgccatcgtgcaaatat

SEQ ID NO: 5974163 - DNA, 25 bp, Homo sapien
tatcaaattcttggctaaggagtag

SEQ ID NO: 5974164 - DNA, 25 bp, Homo sapien
cattcaaagggaagtccaatgttgt

SEQ ID NO: 5974165 - DNA, 25 bp, Homo sapien
atgttgctctaatgaattagccgcc

SEQ ID NO: 5974166 - DNA, 25 bp, Homo sapien
attttcacatgtcagaatattgtca

SEQ ID NO: 5974167 - DNA, 25 bp, Homo sapien
ccgccaatgacaggaaatgcttaat

SEQ ID NO: 5974168 - DNA, 25 bp, Homo sapien
cttttgcatctttggttcattttca

SEQ ID NO: 5974169 - DNA, 25 bp, Homo sapien
tttggtgaagacagcttctttttcc

SEQ ID NO: 5974170 - DNA, 25 bp, Homo sapien
gctatgctaatcccataggggtccg
